United States Patent Application Publication US 2017/0009304 A1 - sequence listing, part 15

SEQ ID NO: 301947 - DNA, 95 bp, Homo sapiens
cagccccgagcgggacagcgcggcggggagcgacgagcacgttgcccctggcctcgcaggagtcggccgtggtggaggacctgctgtacgtgctg

SEQ ID NO: 301948 - DNA, 100 bp, Homo sapiens
cgcaaccggcagcagcgctgccgccgcgtcctcagccaccgctccctcttcccacggtcctacaggtatggatctctggcagctgctgttgaccttggca

SEQ ID NO: 301949 - DNA, 83 bp, Homo sapiens
cggcgctctggctctggctgtgcgcgctggcgctgagcctgcagccggccctgccggtgacttaagagattaaaattaatttg

SEQ ID NO: 301950 - DNA, 75 bp, Homo sapiens
cccgcgccgcatggaggccggctgaggagcgccgctgcctcgcctcgggggggccctcagcctcttggccttgaa

SEQ ID NO: 301951 - DNA, 103 bp, Homo sapiens
ggtttggtggcgcgtttcagcgaagtcgcacgtgaaggatagcagtggcctgagaaaggtcatccatctccagccccacctgaccagctcaacaccagcagtg

SEQ ID NO: 301952 - DNA, 100 bp, Homo sapiens
cgggcctacggggcgggggcggggcggcagtgagctcggccggcaaccgagggacccgcgtccaggtactccaaagattcaggtttactcacgtcatcca

SEQ ID NO: 301953 - DNA, 100 bp, Homo sapiens
tggattgactgtagaagaagggacagaaagagcccagaacattcccccagcggttaagaagattgtctaccaaatatagaacagaaaagatatatcccac

SEQ ID NO: 301954 - DNA, 98 bp, Homo sapiens
gagtctagccctggggtgaggatgccacggctacccggcttataaatcaaagccattctgtgaaaaactgctttcctgggtgaaaagcagtggctgtg

SEQ ID NO: 301955 - DNA, 83 bp, Homo sapiens
tagcagtgctggcggcggcgggtcaggagcagccgcagcgacggcggcgacagcaggccacggaaaggtatgatatatttgat

SEQ ID NO: 301956 - DNA, 82 bp, Homo sapiens
aattcacgagcaggttcgggaccggcagattgcttatgcccgtatagagggggatatgatagtctgcgcagcgtatgcacac

SEQ ID NO: 301957 - DNA, 100 bp, Homo sapiens
cacgaggaccatgctgggccggagcctccgagaagaaaagtacccagatgccgtgtacctctcggaggggccctcctcctgctccatggggatccgcagc

SEQ ID NO: 301958 - DNA, 100 bp, Homo sapiens
cgaggatacccgcatctgtgaaggcggcacaggcaccaagatgtccaaccgagtggtctgccgagaagccagtcacgccgggagctggtacacagcctca

SEQ ID NO: 301959 - DNA, 87 bp, Homo sapiens
ttgccctcagcatctcccttcatgtctgggtcatggcccttgatgggttcttctttgtagtgaacctggaaggcaacgttgtgtttg

SEQ ID NO: 301960 - DNA, 50 bp, Homo sapiens
cttgcaacaattgttatgcttgtcttgagagctgatgacaataacatggg

SEQ ID NO: 301961 - DNA, 80 bp, Homo sapiens
ccctgtactctcatcgctctcggcctccgacacggatgcttgaagcccacatgcagagctacaagggcaatgaccctctt

SEQ ID NO: 301962 - DNA, 50 bp, Homo sapiens
ggcagccatcaaccgaaacaacagggttcgggggtgattaaagctggctt

SEQ ID NO: 301963 - DNA, 101 bp, Homo sapiens
attcatgaagatttagccgaggcccatggacacattcagctaacgtattttagcaggtggagtgaggttgaagattcctgtgacagcgatgccatagagag

SEQ ID NO: 301964 - DNA, 51 bp, Homo sapiens
agtttggacagttttgtacagtaggaaaacatccagtcatggataaaaatg

SEQ ID NO: 301965 - DNA, 75 bp, Homo sapiens
tagcagccagttccggcccgaggacaccgactaccagcaggtctccacctctgggcaggagagttgccgaccacc

SEQ ID NO: 301966 - DNA, 83 bp, Homo sapiens
cgggggagtcgtaaacaaccctgaagagaacagccaggcctgggcggcgactggcggcgcgatggacctgaccgggctcctgc

SEQ ID NO: 301967 - DNA, 82 bp, Homo sapiens
tggtgcatccttggcagaaagtgaggaggaaaacacccccattagtgaattactggaactgaaacggcagcagcaagagcaa

SEQ ID NO: 301968 - DNA, 50 bp, Homo sapiens
ggccctcccgtcggtcattaagtttcagctcctggcatcagctctattca

SEQ ID NO: 301969 - DNA, 101 bp, Homo sapiens
gaccatgcagcggaggtgggtcttcgtgctgctcgacgtgctgtgcttactggtcgtacaagcaggtggagcagtacatgtccttccacaagctgccagct

SEQ ID NO: 301970 - DNA, 101 bp, Homo sapiens
cagtaattggaggaagaatgatagcacagaaaatctctgtcagaactgacttcctgggaatgaaaatggttggtgagctgctacgaatgtcgggtgccttt

SEQ ID NO: 301971 - DNA, 80 bp, Homo sapiens
cgacccagggaccagtcacccatcccattttacagctggagcagttcaacatgatggagaacgccatcagctccagcagc

SEQ ID NO: 301972 - DNA, 75 bp, Homo sapiens
tgaggtctcctcagccatgctgaactaacctgcacttgttgccaagtcttccatcttactagatgtgaaaccttg

SEQ ID NO: 301973 - DNA, 96 bp, Homo sapiens
accctccgggggtaaaagagatcaccgacaagatcaccacggacgagatgatcaaacgcctgaagatgagttttgatcatcctgagaaaaatgggc

SEQ ID NO: 301974 - DNA, 75 bp, Homo sapiens
cccatgtgtatcctgtgaccattctatctgggctgtctgtgatcctggaaacatacgtgtgactgaagctcccaa

SEQ ID NO: 301975 - DNA, 82 bp, Homo sapiens
tcgtggcgtcgtctgcgaccgctgccttctcggtgcagtcattggagaaatcgatgaagaaacagattctgcgcttgatttg

SEQ ID NO: 301976 - DNA, 100 bp, Homo sapiens
tggcacttcattggccacctacagaaacaaaatgtcaacaaattgatggaactacacgaaggccatgcggctgtttgtgggagaaccggtgtggacagcg

SEQ ID NO: 301977 - DNA, 74 bp, Homo sapiens
catcacccaccaacaacaccacaataatccacagccaagttactccacaggatccgctgaacataggatgttgc

SEQ ID NO: 301978 - DNA, 75 bp, Homo sapiens
cctatggaagcagaagaagctgaggatgaagaagatgacaagttggatggcttgaggactggtactaaaaggaaa

SEQ ID NO: 301979 - DNA, 100 bp, Homo sapiens
caagaatctcgtgctcaccggtttctcccacatcgacctggttcttgggtgtctctggggagtccctgggccagaccttcctccagactccagcccacct

SEQ ID NO: 301980 - DNA, 95 bp, Homo sapiens
cgtggatctggccaacaagaaggagattattgagccagtgtatttctatattggcattgtttttggattgcaaggaatatatgttactgctttat

SEQ ID NO: 301981 - DNA, 100 bp, Homo sapiens
agaagatccatttgtatttattcctgaagatgacccattatttccacctattgagaagtgagctcacaatgactcaagctgccacatagtgttgattgtg

SEQ ID NO: 301982 - DNA, 74 bp, Homo sapiens
ggaagtgcagctgcctcagttcttagcgcagcagcgtcaccctttacaccagaaagctggcgggcactatgggg

SEQ ID NO: 301983 - DNA, 100 bp, Homo sapiens
tggtcccctgtggttcactgtgcatcgcccactccagaagtagcatggaaatggagggcatcttcaaccacaaagtacttcctcctgtgctggttccaag

SEQ ID NO: 301984 - DNA, 97 bp, Homo sapiens
gtggaacaggaggattttgtaatggaagggcatggcaagactccacctcctggtgaagaaagcaaacaattacaccaggaagcaaggcggcagctgc

SEQ ID NO: 301985 - DNA, 75 bp, Homo sapiens
gtgggcttcaccatggacaagctggtgcagaacattgcgcggcagattcggcatgaaccatgacggcgtgggaaa

SEQ ID NO: 301986 - DNA, 90 bp, Homo sapiens
gtccagtaatgtcccggcggatatgctgtgatgcagatccatccgccctagcaaaatatgttctggctttggtaaagaaagacaaaagtg

SEQ ID NO: 301987 - DNA, 75 bp, Homo sapiens
agctggaggaaaggggttttgacaagacacttctacaagcccatgcttcgacggggcagcagcaagtggatggcc

SEQ ID NO: 301988 - DNA, 74 bp, Homo sapiens
tctgtggagaggcctggcagaacgaagaggatggtcagcttttgccaactgttttcaaatcacatgcatggggg

SEQ ID NO: 301989 - DNA, 75 bp, Homo sapiens
cagaagacttatttgtaaacatacgaggggtgtcaaattgagaaccaggtagatccccaccacctacagtaaaaa

SEQ ID NO: 301990 - DNA, 95 bp, Homo sapiens
aagaaaagtgcccaccagaagcctctgccccagcctgtcttctggcccctcctgaaagctgtcacccccaagtcagcccttcataaacccagatg

SEQ ID NO: 301991 - DNA, 110 bp, Homo sapiens
tcaggctcctggaaaggaccgtccacccctccgcgctggcggtgtggacgcggaactcagcggagaaacgcgattgaggcgtccgagctgggccacagcctgaacgagaa

SEQ ID NO: 301992 - DNA, 100 bp, Homo sapiens
caacagacggcctggctggagccctggacgcccggcagcagagcactggcgcgagctcaggccccggggcctccagcggcaccagcggagaccacggtga

SEQ ID NO: 301993 - DNA, 75 bp, Homo sapiens
agcctgcggagcctgtggggcagaatctggcaatgggggcaggagctgttggagctttgcagctgacctacatct

SEQ ID NO: 301994 - DNA, 50 bp, Homo sapiens
cagcaaaccatgcaaggcatgcagcagaatgaacttcatgagcttgaaaa

SEQ ID NO: 301995 - DNA, 101 bp, Homo sapiens
cagcgtgctgggcctgcctgcctcccagatcttcattgtgggccggcccaccaagaagtaccaaacccagtgccagcaagaaggccctcaccagatgccag

SEQ ID NO: 301996 - DNA, 82 bp, Homo sapiens
caccgacctcgacgtcttgcctgtgtcccacttgttcgcggcctatagctctactgagatgaagaaagaaaaagaatacctg

SEQ ID NO: 301997 - DNA, 100 bp, Homo sapiens
cccgacttgaagtggaaaatcaagctaagcgcctactagagcagggtttggagactcagataacaacgaacttgatgcaagtgataggtttgccaaggtc

SEQ ID NO: 301998 - DNA, 83 bp, Homo sapiens
ttctcggtcaccatgtggtcctcagcgccggcatcggccgcacaggcaccatcattgtcatcgacatgctcatggagaacatc

SEQ ID NO: 301999 - DNA, 75 bp, Homo sapiens
aggcagcctgtctcccaaagagagaactcttctcaaagaggaccctgcttactgtaatccttcccctctaccacc

SEQ ID NO: 302000 - DNA, 100 bp, Homo sapiens
gccaaggccaggggagacctgggtgccttcagcagaggcattgaatgccccagaggagcccgaaacctcccaggcttggtgcaggaaggagagcccttca

SEQ ID NO: 302001 - DNA, 87 bp, Homo sapiens
aaggacaaaagccaagaggaggacagttcgctacacagcaatgcatcgaggatgaggaagatggagagaatgcccacccatatagaa

SEQ ID NO: 302002 - DNA, 100 bp, Homo sapiens
ctttgaagttgggttcaggagtgtagaattggcaaagttattgccagcttcctgacttaattcagtgcacaaatgagatgaatgtgaacatcccacagtt

SEQ ID NO: 302003 - DNA, 80 bp, Homo sapiens
gtactcacatctctgcagatgaaaaagcagctgaaaggagtcgaaaggtggataatattaatgcagctgtgatggatttg

SEQ ID NO: 302004 - DNA, 100 bp, Homo sapiens
gttccgtctgtgtgttcgagtggacaaaatggcgaagatcgccaagactcacgaagtggccataaaatgcagtaaaaacaaatccagttcccaagaagct

SEQ ID NO: 302005 - DNA, 74 bp, Homo sapiens
agtaatttgccttctggattgccacaacatctattccaatatattaggtttcctcggtggtgtttcctgggcta

SEQ ID NO: 302006 - DNA, 100 bp, Homo sapiens
cccgagcatgcaatattcatcataacaactcccgggtgacatacccagccaaagccaagggcacattcatcgcagacagccaccagaacttcgccttgtt

SEQ ID NO: 302007 - DNA, 100 bp, Homo sapiens
cttggcacttagaaccgcagcagggacgtcggtttgctatcgggactcggcgaggacgagtaattccctcctggtcccagacagtctaagaggcacagat

SEQ ID NO: 302008 - DNA, 98 bp, Homo sapiens
ttaaagaaggcaaagccatggtcatcgttgcggatgttctgccttactcaatacgggtcttgttggaagctgctgtacgaaattgtgatggcttttta

SEQ ID NO: 302009 - DNA, 51 bp, Homo sapiens
tctgattccaagcaaaaaccagttgaccactgaaaaacacacatactatct

SEQ ID NO: 302010 - DNA, 100 bp, Homo sapiens
ttccgatgtcattaaggaagaatttccaaatgaaaatcaagtagtgtttgccagagttgattgtgatcagcactggatggtaggatgctctttgactacc

SEQ ID NO: 302011 - DNA, 83 bp, Homo sapiens
ctcaggaacagggacagcacctcatcccctggatgggggaccacaagatcctcatcgacagcttcgagagctgtgcccaggag

SEQ ID NO: 302012 - DNA, 83 bp, Homo sapiens
aaccagctcgggggccaactctgaggagtccactgcagcagtcctcctccgcctcctcctctctgcatgcgcgtcagagcccg

SEQ ID NO: 302013 - DNA, 82 bp, Homo sapiens
ctgagctgcgaggaaaatggcggcgggaggtttctctggaaacccccctggtaagtgtggaggaggcgggacactctgaccc

SEQ ID NO: 302014 - DNA, 75 bp, Homo sapiens
gaagtatgaggtggtgaaactcaagatccccatggacaacaaggagctgctgaatgccatggtggcaaaactggg

SEQ ID NO: 302015 - DNA, 100 bp, Homo sapiens
cttcccagccttcagaaattgccggtctgggagttgggggcaaggagaagatcctggaacagaggcggctgagccaggaacgggatcgcctagagggtct

SEQ ID NO: 302016 - DNA, 51 bp, Homo sapiens
gcagcgagatggagcagctcaaggaggttctacatgaaacattttctcaac

SEQ ID NO: 302017 - DNA, 80 bp, Homo sapiens
gtgtcctaaatgtgataaaacatttgaccgaatagatgttttgaacagagataaggatgaggagccaactgtaaaacaag

SEQ ID NO: 302018 - DNA, 74 bp, Homo sapiens
gcagagcgcgggaggcggcggcggcgcggagcccagacttcccaagtaagaagcggaagaggagccgctggaac

SEQ ID NO: 302019 - DNA, 51 bp, Homo sapiens
ctgaaccagggatcacagtctaaggtccagaaacacccgccgggcagcaga

SEQ ID NO: 302020 - DNA, 88 bp, Homo sapiens
gaagaagagcccagctagcaccttcgccctctccagccaggtacctgattattgcatcgagcttttagtgtcttcttattcaacaccg

SEQ ID NO: 302021 - DNA, 100 bp, Homo sapiens
catttggaagacagtgaatcagcagcattactttgctgtgaatgtgaagaatcagaaatctttactgattccaatgctgatgaaaacttttacacttgtg

SEQ ID NO: 302022 - DNA, 82 bp, Homo sapiens
cgacgatctccatatttcattgcaaggactttgtgttttatgccccacgtctgagaatcaacaagcggatcctgcagctctg

SEQ ID NO: 302023 - DNA, 100 bp, Homo sapiens
gcgacctgcaggcagcaccggaggcccaggtctccgtgcagcccaacttccagcaggacaagggacgcatggaatacctcgtgaaatggaagggatggtc

SEQ ID NO: 302024 - DNA, 100 bp, Homo sapiens
ctttcacgaaggcaccgacgtcatcatgctgaccaccaatcagatccgtaagaaactagatgatggccatttaaacaactctttgagctctccagttcaa

SEQ ID NO: 302025 - DNA, 90 bp, Homo sapiens
cgttgatatcggtggtaacgacggcctcagcaggcggggaagatgaaagggtctcctctgagcctccggcctccataagacccaaaacag

SEQ ID NO: 302026 - DNA, 95 bp, Homo sapiens
ggcagcacgggcgaccccccggcgcagcagcatcatcaagcaagaaaagcctaggcttctcgagcctttggattatgagactgtcattgaagaac

SEQ ID NO: 302027 - DNA, 101 bp, Homo sapiens
gcctctatgtggccatgaatggtgaaggctatctctacagttcaaagcctggaaataatgtacgtcctgcaaaatcaaaaaaactaaacaagttggtcgag

SEQ ID NO: 302028 - DNA, 100 bp, Homo sapiens
ggttattatcactgtgaatcttccattgtgattgcctctactcaatagtccccccagctttgtgtgctggtctcggggcttcatggagatgaatgggcgg

SEQ ID NO: 302029 - DNA, 75 bp, Homo sapiens
gttgcttattcctctattgctgcaaaaaatgcagaactagaacaggagcttatgttgctgaacagaagacttttg

SEQ ID NO: 302030 - DNA, 96 bp, Homo sapiens
gctttgtcaaaaaggaccagttgggcaaggttttgcgtgtgaagctgtgtggaaatgtgaaatactaccagtcacaccattatagtaccgtggtgc

SEQ ID NO: 302031 - DNA, 50 bp, Homo sapiens
gtgaaaaacctaaaggataccttagttctttattggtgaaaacatgaatc

SEQ ID NO: 302032 - DNA, 92 bp, Homo sapiens
cccctgtctctgccctcctggcgggcccggcggctctcactatccaggtgtttcccattaaacactaccaggacaaaatcaggccttacatc

SEQ ID NO: 302033 - DNA, 75 bp, Homo sapiens
ctgctctctcatttgctggccatcggattgggacctgcttttttaaaggctgcagaaaacttcactcttttggtt

SEQ ID NO: 302034 - DNA, 98 bp, Homo sapiens
gcggatcctagtaatctctttgtggtttcttctgatttctgccattgggttgaaatggatgcagtcagaactgaatgttgaagaagtggtaaatgaca

SEQ ID NO: 302035 - DNA, 75 bp, Homo sapiens
caggaactcgactcagacgtggataaagataatcccggttttaaaatcaaagatgggaaaatcggagaaaattgc

SEQ ID NO: 302036 - DNA, 83 bp, Homo sapiens
ccaggccccttctcagattgcaaacagtggttctgctggattgataaacccagctgctacagattaagatgttctacgaggag

SEQ ID NO: 302037 - DNA, 129 bp, Homo sapiens
tttgagcaatggtctttgctgtgccttctctactgatggcagtgttttagctgctgggaggaggagggggccagtgggggagcagtccattcagacattgggagcagcagcagcagcagcagccctgag

SEQ ID NO: 302038 - DNA, 95 bp, Homo sapiens
aaggcactgtcacaggagaactacacaatgctcaatgtcaattgctgcaagcttagtgagtgaagatacaaagaccaagtttttgaacaaaatgg

SEQ ID NO: 302039 - DNA, 75 bp, Homo sapiens
gttcgagaacgaccccgagacgcctggcagtgttgcccaggaggaggcagtggagttaagaagcctgggtctgag

SEQ ID NO: 302040 - DNA, 75 bp, Homo sapiens
ccagtcaataggaagtacgagtgtgagtatcggctatgcctccgttgtaattgtgtccctcctgaatgtctacta

SEQ ID NO: 302041 - DNA, 98 bp, Homo sapiens
gttggggagctgatttcagactcagaagccgacgttcgagaggaagattcttacctctttgatctcgacaataagggtctcctatggacagaagtgcg

SEQ ID NO: 302042 - DNA, 86 bp, Homo sapiens
tacttctgccactgctgctccgtggagatcgtcccgcgcctgccggattctgtttcactgaggccatctatccgatttcaaggaag

SEQ ID NO: 302043 - DNA, 98 bp, Homo sapiens
gctcacctgagagacggagccccggctcgcccgtgtgcagagccacagacccctttgcttctgtttttgggaatgaatcatttggaggtggatttgct

SEQ ID NO: 302044 - DNA, 75 bp, Homo sapiens
agccctaattaccacaagggtattgactggtaaccatgtgcgaccgaaaggccgtgatcaaaaatgcggacatgt

SEQ ID NO: 302045 - DNA, 140 bp, Homo sapiens
gaagcaggaggctaagaaagtggtgaatcccctgtttgagaaaaggcctaagaattttggcattggaaaaccagtagattcccagacatcgcgaagtgaatctgaaattgtgccaaaagttgctaaaatgactgtatctg

SEQ ID NO: 302046 - DNA, 51 bp, Homo sapiens
gggagcttccgggagggcggctcgcaggagccatgtggctagaaatcctcc

SEQ ID NO: 302047 - DNA, 99 bp, Homo sapiens
atggcagccagtcagtggtggagggacactagactttcagggatgtggctatagatttctctttggaggagtggaaatgcctgaaccctgcacagaggg

SEQ ID NO: 302048 - DNA, 100 bp, Homo sapiens
ctgacccctgtgagagtggcagctttgcacagcgtgtgtgtgaaccagactagaagacagtttgctataaagaaaacctctgaagatgcaagtgaatact

SEQ ID NO: 302049 - DNA, 74 bp, Homo sapiens
cgggatctcggtgctgcagacggcgagacctcctgcacaggaaacttcctcctggccaaccctgtgtctggcag

SEQ ID NO: 302050 - DNA, 83 bp, Homo sapiens
ctcaggacaagcagcagaaatacatgcaacatggtgactgaaatccccggcttcctgactgatgaagagtgtcggctcatcat

SEQ ID NO: 302051 - DNA, 89 bp, Homo sapiens
gcagtacagatcaacttaaggagccaggtgactttatacacactttgggagatgcacatatttacctgaatcacatcgagccactgaaa

SEQ ID NO: 302052 - DNA, 98 bp, Homo sapiens
atgttaaagctctagcagaggaaaataagaacacagtggatgtcgagaacggtgcttctatggcaggatatggaagcagtcaattatagatttcttca

SEQ ID NO: 302053 - DNA, 100 bp, Homo sapiens
cggcagtcggatagacaataccacaacaacacattttgcagaggttggatgccagtgagatccaggtggacgaaaccatcttcctgctggagtcttacat

SEQ ID NO: 302054 - DNA, 51 bp, Homo sapiens
caaatgaagaacactttcaagaaccagcgtctgcttctacgctttgcctgg

SEQ ID NO: 302055 - DNA, 75 bp, Homo sapiens
ccccaccactgcagccatgatctccttaacggacacgcagagtgatgtacagttcattgattatgaatattctgg

SEQ ID NO: 302056 - DNA, 91 bp, Homo sapiens
gcgtcagcagcctgttcggcgaggacaacgtgcgcgccgctcagaagggagcatttcctgaagacgtagtcatgcagcacgtcagcagctc

SEQ ID NO: 302057 - DNA, 119 bp, Homo sapiens
cggcagctccgcggcggcgtctgcccagggcagggctcctaaggaaggacccgcctttagagcctgtgtggtgcccctatctccttgttccaagggcctctcttgccttgaaagccttc

SEQ ID NO: 302058 - DNA, 74 bp, Homo sapiens
gcagtggtcgcttcttctccttggaagcacaagcctatgcagacgacaacagtttgctgttcatggagacatca

SEQ ID NO: 302059 - DNA, 140 bp, Homo sapiens
attttatgggaaaattaagcagatgctccagtttgagaaacctggatctgcgatctgtttgtgtacagctattggaatcagatgcaaagatggtgttgtctttggggtagaaaaattagtcctttctaaactttatgaag

SEQ ID NO: 302060 - DNA, 76 bp, Homo sapiens
agcttggccttcgcggcccctgccgcctcgatgctggagagcatgatcaagaagccccgccccactcgggctgaag

SEQ ID NO: 302061 - DNA, 80 bp, Homo sapiens
aggaccagcgggcgggggcccacgagtgtggacactgccagcggctgcagccgacttggaatgacctgggagacaaatac

SEQ ID NO: 302062 - DNA, 74 bp, Homo sapiens
cctacgtcctgatcgacatggttctcaacaagatggccaaaggtagttgaattcagtgaattggacaaacccag

SEQ ID NO: 302063 - DNA, 50 bp, Homo sapiens
gtgacgactgttgacctgaaaaggaacagcgcctaaaagaacttgcaaag

SEQ ID NO: 302064 - DNA, 90 bp, Homo sapiens
gccatgaggcgccagcctgcgaaggtggcggcgctgctgctcgggctgctcttggaggaatacaaacagaagcttgcacgagtaacccag

SEQ ID NO: 302065 - DNA, 95 bp, Homo sapiens
gagctgggaagaggcggcagacagcgggatggagaaggatgaaactgtgagtgactgctccccacacatagccaacatcgggcgcctggtagagg

SEQ ID NO: 302066 - DNA, 50 bp, Homo sapiens
tttggatcaggagttagtgataacagcatctggcgaggccccaatgtgaa

SEQ ID NO: 302067 - DNA, 100 bp, Homo sapiens
aggtcctcgcgttcgggcttctgcttgccgcggcgacggcgacttttgccgcagctcaggaaggtcctactgctctgttggctcatgaaataggttttgg

SEQ ID NO: 302068 - DNA, 96 bp, Homo sapiens
cgtgaacgaaagcagtgacggaggagcttgtaccaccggtacggttcctggagcagcagaacaagatgctggagaccaagtggagcctcctgcagc

SEQ ID NO: 302069 - DNA, 76 bp, Homo sapiens
gcacagcagctgggccagctggcactcaatctgtccagggaaatgacccatttacagaaggaggtgacagccattg

SEQ ID NO: 302070 - DNA, 75 bp, Homo sapiens
gcggatctctacatttctgaaagtgcttgtgcacagagctcgaaaactagctcaacaatactatcttgtgtacca

SEQ ID NO: 302071 - DNA, 100 bp, Homo sapiens
ccgcggggcagctaccgctcggatccaaactactggatacaggtgcatcgcttggaacatggagatggaggaatactagaccttgatgacattctttgtg

SEQ ID NO: 302072 - DNA, 100 bp, Homo sapiens
ccaaactctccatcacccagggcgtggtgtccctcgtggccgttcacccctccaccgtcaacccgctcgggaagcagctcttgccaaaaacctttggaca

SEQ ID NO: 302073 - DNA, 100 bp, Homo sapiens
acagccgtgattctggggcaggggaacgtggctctggacgtggcccgcatcctactgaccccacctgagcacctggagatcccagccatcatgtccatag

SEQ ID NO: 302074 - DNA, 100 bp, Homo sapiens
ttcttcagattggaaaataccacaggatggagactacgagtttggtttggaaatcccttgtctccaggttgctgggattgacttcttgctcaattgaaac

SEQ ID NO: 302075 - DNA, 101 bp, Homo sapiens
catctggcttggcgcctgaggttctcccattaggagcagtgaggagaatgaataccttccaagaccagagtggcagctccagtaatagagaaccccttttg

SEQ ID NO: 302076 - DNA, 100 bp, Homo sapiens
gtggagccaccagcctctccctgatcatggaagggaagtggttgctgtgtatgttactggtgcttggaactgctattgttgaggctcatgatggacatga

SEQ ID NO: 302077 - DNA, 100 bp, Homo sapiens
cagtccctgatgcaggctcccctcctgatcgccctgggcttgcttctcgcggcccctgcgcaagcccacctgaaaaagaactgggaagaaaggaccctga

SEQ ID NO: 302078 - DNA, 98 bp, Homo sapiens
tttctggctctgaaggcgaacgcttcgctggccatttaggagctctgctcaaagccagacgtgttgcatctgagccaagaaaactttatgaaatgcca

SEQ ID NO: 302079 - DNA, 98 bp, Homo sapiens
tgtacaatggagacttacatcacctataggatcaccaccaaaaatggagatgtatgcatttcgattcttcatccgcctgtagatgacccacagagtgg

SEQ ID NO: 302080 - DNA, 100 bp, Homo sapiens
gtgaatacgatggatcccagagacatatacctttatcaatgaatgtgtcaacctttctggcatacgaccagcccacaataagttactgtggggtgcatca

SEQ ID NO: 302081 - DNA, 100 bp, Homo sapiens
gtgcgatggcgcggagcccgggacgcgcgtacgccctgctgcttctcctgaaggaagaggcccagcagaagggactcgctgagccaccccccgccccact

SEQ ID NO: 302082 - DNA, 75 bp, Homo sapiens
gtccctgaagagggaagacacgcggaaacaggtttatgcatgtatgatggttttcttcttgagcaacatgattga

SEQ ID NO: 302083 - DNA, 100 bp, Homo sapiens
gtcagctgcagcaatggaatacgtgctggaagtgaagaactctccgcggcacctcctgaagcaattcacaggttcacgcaaagaatctgctccacaagtt

SEQ ID NO: 302084 - DNA, 50 bp, Homo sapiens
gataatgtaactgtgtgcaaggataacagagccccaacggtaaactgact

SEQ ID NO: 302085 - DNA, 96 bp, Homo sapiens
agcagacacagtggctatcattttctgttctacacacaaatcccttacattggggcctgctccgtttggttccagttgggtcaaacactattgcat

SEQ ID NO: 302086 - DNA, 80 bp, Homo sapiens
tgctcgcgctactctctctttctggcctggaggctatccagcgctttatcctgtggataaacgcagagtgaacgagtttg

SEQ ID NO: 302087 - DNA, 82 bp, Homo sapiens
cctactcagatcaggagcacatcaaactctggaggaggaatctgagaaaaaggggttgattgaaagaatctatatggtacag

SEQ ID NO: 302088 - DNA, 100 bp, Homo sapiens
ctgacagcgggaggcagagggaggaacctggacgccggaagccgggaaatggacctgcaagcgcaggaccgagcccaccgcatcgggcagcagaacgagg

SEQ ID NO: 302089 - DNA, 50 bp, Homo sapiens
gcggagctggaatgactggcaacccaggctcttgtcaggatggtgaagct

SEQ ID NO: 302090 - DNA, 95 bp, Homo sapiens
gcgtgggcccgggcgagcagccctgcctccggacgaatcagaatgtacgtgagaacctgaagacactctacagacttacaatggacctttgctct

SEQ ID NO: 302091 - DNA, 97 bp, Homo sapiens
tgaaggtgctgaagaagtctgcctacctgtcagccgtgggcaccttcacctgggtctgcacgccctttctggttctctcaagtagtgctgccagtag

SEQ ID NO: 302092 - DNA, 99 bp, Homo sapiens
aagataaatccaaatactgcatatcagaaacaacagccctaccacttatgtcttggatgaagatgaacctcgattccttgaagaagttgattacagtgc

SEQ ID NO: 302093 - DNA, 100 bp, Homo sapiens
cctggcgaggatgcaccttcccctgccttggaaaggaaccagcagcacaaacactgttggggcaacagtgaacagccaagccgcccaagctcagcctcct

SEQ ID NO: 302094 - DNA, 74 bp, Homo sapiens
ctcgatccgcctgcctgcgcacctgccaattaccagctctggctgggtcgccacaacttgtttgacgacgaaaa

SEQ ID NO: 302095 - DNA, 117 bp, Homo sapiens
tgctcccgtggttgcgggcgcagcgggcagtgtcggaggccagcggggccggaagcggcggcgcaggttgagctttttcataaagatatagaagctttcaaagaagaatataaaaca

SEQ ID NO: 302096 - DNA, 75 bp, Homo sapiens
tttgtaagaaggactgtgcctgaaggacaggccataggaaaaggatacagagtagagtttcatgaacctgaaact

SEQ ID NO: 302097 - DNA, 89 bp, Homo sapiens
tccgcccaggcgcagatgcgggccctgctggaccagctcatgggcacggctcgggacggaagacataggccaaggagccagacttcctg

SEQ ID NO: 302098 - DNA, 100 bp, Homo sapiens
ggatttacgtggagatcaagcgcagcgatggtgacaaacagcatgtttggtgcttcaagaaagaagtttgtagagggggtcgacagtgactaccatgacg

SEQ ID NO: 302099 - DNA, 74 bp, Homo sapiens
cttatcaagctgaaagacggcaggaagtttgtcgctgatggcatcttcaaagctgaactgaatgagtttcttac

SEQ ID NO: 302100 - DNA, 88 bp, Homo sapiens
aacaaggaaatgtataagctacagatgggatggaggtggataccacaccaacagttgctggacagtttgaggatgcagatgttgatca

SEQ ID NO: 302101 - DNA, 100 bp, Homo sapiens
caaacaaagaaacactggagatattcagaaccttgtccagacgaagtgacgttgagatcctcggctactgcatgctgcggtggttgtgtgggaaacttcc

SEQ ID NO: 302102 - DNA, 100 bp, Homo sapiens
tgtcggtggaaagcacagggcaagaatgcctggaggctgtggcccagaggctggagctgcgagagtctgaagatgatgagaaactgaaaaagaggaagga

SEQ ID NO: 302103 - DNA, 75 bp, Homo sapiens
tgctggtcatgcaggatcccagcatgaaccttcagatggaaaatctcaaatgggaggtggatcagaaagaaagag

SEQ ID NO: 302104 - DNA, 131 bp, Homo sapiens
taacacctcaaggttgaagcagaagaataaggagaaggataagtcgaaggggaaggcgcctgaagaggacgaaggtgtcatggagaaactccagctgggcccagagattctgcagcgggaaaatccaaggc

SEQ ID NO: 302105 - DNA, 101 bp, Homo sapiens
aacaacagatgatgtatgctggaagtaagaataagctagtccagacagctgaactaaccaaggaatcattaaccaatggcaacaggaatccaaggataaag

SEQ ID NO: 302106 - DNA, 100 bp, Homo sapiens
ccgctgtggccctcgtgctgatgctactgaggagccagcgtctagggcagcagccgcttcctagaagaccagtttaaactcatatcccaggcatatgaag

SEQ ID NO: 302107 - DNA, 75 bp, Homo sapiens
cacccgcaggatacccgccgagggtagggtcgcgctcgcccgggcggcagaacagagccgctaccctggaggagg

SEQ ID NO: 302108 - DNA, 100 bp, Homo sapiens
tggacattggagagagtggtattatggtgtaaacaacgattctttggagatggaggtgacacgagcagtgatgaggataaagaagaacatgaaactcctg

SEQ ID NO: 302109 - DNA, 87 bp, Homo sapiens
gccgtctacccgtggccgctgccggtctacatctattaatgagatgaagcggttggaagaaatgtcaaatatgtttcagagctctgg

SEQ ID NO: 302110 - DNA, 100 bp, Homo sapiens
cgaaactgagaaccagctctcccgaagccgcgggtctccggccggcggcggcggcggcggcggcggcggcgcagggaaacactactatgaagtatcctgt

SEQ ID NO: 302111 - DNA, 73 bp, Homo sapiens
ccctcagcacacagctgtcggcttcaaacagacgatcacctcagccagttctcagacacttaggggacatgtt

SEQ ID NO: 302112 - DNA, 80 bp, Homo sapiens
atgaaaaccaaatcattcacagagatgtcaaagattgttaaaggaaatgggctggcaggaagacagtgaaaatgatgaaa

SEQ ID NO: 302113 - DNA, 100 bp, Homo sapiens
gcctatggagttgtacttaaatgcagacacaagaggtctcttcattattgatgacaaaggaatcctaagacaaattactctgaatgatcttcctgtgggt

SEQ ID NO: 302114 - DNA, 80 bp, Homo sapiens
ctgggacctgtgctgagagagcgctaggtatttactaccagggagcacccaattcttcttgagaacaccaacctacaact

SEQ ID NO: 302115 - DNA, 90 bp, Homo sapiens
tatttattgttcagttttctgtatcttgcgcttgtttagccctgaaccaggagcaacagggccattatgctgtgatgaacaaccccacca

SEQ ID NO: 302116 - DNA, 93 bp, Homo sapiens
cgaggaggcgcgggaggtgttcgagaacgaccccgagacgacctgcctagagctggaacgttacctccagagcgagccctgctatgtttcagc

SEQ ID NO: 302117 - DNA, 131 bp, Homo sapiens
acctattaaaaggaccatacgagtcctagatgtcaataaccagtccttcagagaacaagaggggctggagagacttcttcatgaaggaatacagggacagtcacaggagacaggagcaccaagggattcgg

SEQ ID NO: 302118 - DNA, 100 bp, Homo sapiens
gcagcccgcggcgaccaagatcaggaacctgccctgattcagtgctcaagagtgaagaaaattctactgtctttagccacttaatgaagtacccgtgtaa

SEQ ID NO: 302119 - DNA, 90 bp, Homo sapiens
cttcacggcgccgagccgcggtccgagatgggtcatcagttaaggaagttgaaacctaccaccggacacgtgctttaagatctttgagaa

SEQ ID NO: 302120 - DNA, 101 bp, Homo sapiens
aggaggaggttttcaggaccaaaattgtggaaaagtcactctgaaggactccatgaaagatgacagaagaagttattgtgatagccaagtgggactacacc

SEQ ID NO: 302121 - DNA, 82 bp, Homo sapiens
gagcgagctgagtggttgtgtggtcgcgtctcggaaaccggtagcgcttgcagcatggtatcatgatattagctggtttgac

SEQ ID NO: 302122 - DNA, 83 bp, Homo sapiens
ctcagttggaagcagccgatccagcctgcggagcctgtggggcaggttcaaggtgtttgcagactatgaagcctacatgcagt

SEQ ID NO: 302123 - DNA, 50 bp, Homo sapiens
gcaccaccaagatgcctacatccgggtcagcccaaggccaaccccactgt

SEQ ID NO: 302124 - DNA, 101 bp, Homo sapiens
tacctgctgtacaccctcaacaaacaccagcgctttggggtgagcttgtcggccacagactgctacattgtgcatgagatctacaatggggagaatgccca

SEQ ID NO: 302125 - DNA, 80 bp, Homo sapiens
tctattaccagaccaactacctggtggtggctgccatgatgatttccattgtggggtgtcgtgaaaactacccctaaaag

SEQ ID NO: 302126 - DNA, 97 bp, Homo sapiens
ttggaatgaatccttctagagacgtccacggtcgtggagggcccccaagacccaacagagggatgccgcaaatgaacactcagcaagtgaattaatc

SEQ ID NO: 302127 - DNA, 90 bp, Homo sapiens
gccttgctgatctgagctcagacctgccaatttaccagagataattgataacaccctgtaacagctgaatacctgactgaatcctatgga

SEQ ID NO: 302128 - DNA, 76 bp, Homo sapiens
ctttagaaaaacacgatcagctcttagacaggcagacctgtctaactacaagccagacttgggttttctcctgtag

SEQ ID NO: 302129 - DNA, 75 bp, Homo sapiens
ggatgaggtgaagtccacaatcaagttccaaatgaagaagccctaaaagaagatccccctagaaatctcctggaa

SEQ ID NO: 302130 - DNA, 74 bp, Homo sapiens
tgtcgaaaagaaatcagaaatggaaagtgttttggcccaggggagatcatcggaggccgggagagcaggcccca

SEQ ID NO: 302131 - DNA, 50 bp, Homo sapiens
caggagtgaagctgcataccttcgcgggtgtcaaattgagaaccaggtag

SEQ ID NO: 302132 - DNA, 100 bp, Homo sapiens
agatcatcaagcgcaagcacaccctaccgaattacaagatcaggaatatcagaagctctttcctgacattcccatagggtattctgggcatgaaacaggc

SEQ ID NO: 302133 - DNA, 113 bp, Homo sapiens
gggccccgggccccgatggccccgaccgcgtgctggagctcttcgacccacccaagacaatgcagatcttcgtgaagactctgactggtaagaccatcaccctcgaggttgag

SEQ ID NO: 302134 - DNA, 100 bp, Homo sapiens
atgtttaacaggacctacaagctctattcctacagctttaaggatttttatgaactggagccagagaagttccagaataagaccaatggcatcacccccc

SEQ ID NO: 302135 - DNA, 82 bp, Homo sapiens
tcgcttgcagttcagcgaccacggtagctacagcaagctgggtagcaggcagatccaaaggatatcatgaagtttccagggc

SEQ ID NO: 302136 - DNA, 100 bp, Homo sapiens
aggcaactgaaaactgttcttggacctgcggtgctatagagcagccttccttgaatccagaagctggcaaacagcatcagccatgcagacctattgggac

SEQ ID NO: 302137 - DNA, 87 bp, Homo sapiens
aatcctctcaggacattgtgtagcctatgcttctcggacaaactatttagtggaaaaggcttacattttcagccatcagttttagat

SEQ ID NO: 302138 - DNA, 98 bp, Homo sapiens
tgctgatagacatgggggcctcaaacgtggagatcaactcctctctgttaatggagtgaaagtttcctacactactgaggtttaggggcactgtgaag

SEQ ID NO: 302139 - DNA, 98 bp, Homo sapiens
gggatgacagctgttgacccatgggcctcctgggaaaccagcctggacaccaagtctgtgtcagaaggccacctcaagaggaacatcgtggtgaagac

SEQ ID NO: 302140 - DNA, 74 bp, Homo sapiens
ccagttccaaagtgtcttaaagatatgaaaaacagtagctccgtatcgaatacattgacaaatggatgtgtcat

SEQ ID NO: 302141 - DNA, 100 bp, Homo sapiens
caagaaatatttggagcccaggtgtcctcggatggttttatctctgaaaggtatggcctcacaagtcttggtctacccaccatatgtttatcaaactcag

SEQ ID NO: 302142 - DNA, 90 bp, Homo sapiens
taagactccaggacacccctgaagccgagaaatggtttacccaaggtccagcctagcccctaggcaccatgtcggacagtgatctaggtg

SEQ ID NO: 302143 - DNA, 88 bp, Homo sapiens
gaccaagggctgatcacgcggcaccacctcaagaagcgggcgggtccccacggagtctggaccatggaggagcgaggtctggccccca

SEQ ID NO: 302144 - DNA, 75 bp, Homo sapiens
gaggcgcaggcgcaggcgcagtgggggtgagggcgcgtgggggcgcacagaccaaagtgaaggagtttggaattg

SEQ ID NO: 302145 - DNA, 75 bp, Homo sapiens
tccagctcacccactgccagcagagattgcagccaaaattggaggcgatgctgccacgacagtgaataacagcac

SEQ ID NO: 302146 - DNA, 95 bp, Homo sapiens
gacagttcagctgagagctcagcccctgaggaaggtgaacaaatagaagctgagggtgaaggacctacagctgtcaccttcatctcttctcaaca

SEQ ID NO: 302147 - DNA, 100 bp, Homo sapiens
cacgaccacaccgctgatgaagacaaggactcacagtggctgcaagggaagcagctcgagagtgtcgtagaaagaagaaagaatatgtgaaatgtttaga

SEQ ID NO: 302148 - DNA, 75 bp, Homo sapiens
ggaagtcgacggcgccggcggctcctgagagaaatattcactggaacaagacattcgagaaaaggaagaggcaat

SEQ ID NO: 302149 - DNA, 90 bp, Homo sapiens
ctggtttgtgcgcccgtcgcaggtcgcaggcctctttgtcagctggagttgcgcgtggtgggtacgggcacctcgctggcgctctcctcc

SEQ ID NO: 302150 - DNA, 95 bp, Homo sapiens
agagtggattaaaggatgggaagaggtggagtgggattcatcttgtggaaaaatcaggagaactggagaagttaaatcagtccacggatgatatc

SEQ ID NO: 302151 - DNA, 100 bp, Homo sapiens
tcaagccgaagccttcagtgggactcccccagcagatacattctcaggatacagcaggccaggagcgatttcacaccatcacaacctcctactacagagg

SEQ ID NO: 302152 - DNA, 82 bp, Homo sapiens
ccgcgagcaccagagtcggcgtaactatcgcctgacagggcgaagctggtccgttacatttgtaagcagaggcagtgcaagc

SEQ ID NO: 302153 - DNA, 83 bp, Homo sapiens
ccgtgctgctgctcgcagcgtgccacctcgcctcccgccgctaccgaggtctgtcagtttgtcgtctctgtcaacgggctcaa

SEQ ID NO: 302154 - DNA, 101 bp, Homo sapiens
gcggcagcggcggcggcggcggccctccggaactctaatgaatcattgattgaccagcactattttaccagttggaatgaatgatcagaaatgggcatagt

SEQ ID NO: 302155 - DNA, 106 bp, Homo sapiens
ggcttccagtggaggcattttggggcagaatacagagatatggaatcaggctgtgggtgagcgtggaggatgctcagatgcacaccgtcaccatctggctcacagt

SEQ ID NO: 302156 - DNA, 100 bp, Homo sapiens
gaagagggacgggtcccgcggcgagcgagctcctgaggtacggcgtcggggccatccagctgagccgagatgggcagtacctgctcacaggaggagacag

SEQ ID NO: 302157 - DNA, 98 bp, Homo sapiens
tgatgtctgctttcagtcctgaaaagctgaacgaggcagggcaagaatcctttcgttccatcacaaggtcgtattacagaggtgcagcaggagcttta

SEQ ID NO: 302158 - DNA, 83 bp, Homo sapiens
caaagaatcaagttgcaatgaaccccaccaacacagtttttggatgttgcttcagagtgtgaagtcaaatgcatgccaacatt

SEQ ID NO: 302159 - DNA, 100 bp, Homo sapiens
cagagacagctccagacatgtggctcttcttcgggatcactggattgctgacggcagccctctcagcctaccgtatgtgaacgggagctgtgtgtgtttg

SEQ ID NO: 302160 - DNA, 90 bp, Homo sapiens
gaaaattaagagttatgtgaattatgtgctaagtgaaaaatcatcaacctttctaatgaagttaagtgggcagaccaacatccacctcag

SEQ ID NO: 302161 - DNA, 100 bp, Homo sapiens
gcgcgcccgcgccctccgcgcgacgccagggtgaggtggctttgaccccgggttgcccggccagcacgaccgaggaggtggctggacagctggaggatga

SEQ ID NO: 302162 - DNA, 96 bp, Homo sapiens
ggtggccgaatcttccttcaggatatcaagaatggtgtgctcttgcttgcacagcttttgaatgaggacccagtacttcaacttaaatgcagaacc

SEQ ID NO: 302163 - DNA, 100 bp, Homo sapiens
atggcgctggccggatggaaatcctaatgacagtctccaaattcgcctccatctgtaccatgttctgggaggtgatcagtgatgaacatggcatcgaccc

SEQ ID NO: 302164 - DNA, 73 bp, Homo sapiens
ttcaaagtactcaagatgaatttgagttccaaagaactactggttcagattttagctcttcccaagttgtgaa

SEQ ID NO: 302165 - DNA, 83 bp, Homo sapiens
acccgagctggagctgaagcgcaggctgcggggcgcggagtcgggagacccgggaaaaggagaagatgaaggaagccaaggat

SEQ ID NO: 302166 - DNA, 75 bp, Homo sapiens
ggaaaggctctcagtgaaaaaggaaactagcagagttgttcacatcatggattttcaacgagggaaaaacttgag

SEQ ID NO: 302167 - DNA, 75 bp, Homo sapiens
ccgccagcacgcgcctgcttcccgtctgcgcgagtccacgcagctccccagtccccatgtgagagcagcagaggc

SEQ ID NO: 302168 - DNA, 87 bp, Homo sapiens
cggctcgcgggaggcagctgcaccaagaaggataaaagaatcagagtgtctcaacccttgacaagaggaccaagtgcctttattcca

SEQ ID NO: 302169 - DNA, 96 bp, Homo sapiens
ctctctcgggattattgccgattgccagggtgctgaccgtgggagccgaccgaggaacctggcttctgtatttaccatgtacctggagcattggtt

SEQ ID NO: 302170 - DNA, 99 bp, Homo sapiens
gcccgttcggggcagagatgaagaacaggatgatattgtttcagcagatgtggaagagctggaatgttctgaagaactgggtgatcttgtgaaatctgt

SEQ ID NO: 302171 - DNA, 96 bp, Homo sapiens
agctgccctctcgaaggcaggacagcggtggcggcagaaatgggacgtcggtcatcagatactgaagaagaaagcagaagcaagagaaaaaagaaa

SEQ ID NO: 302172 - DNA, 100 bp, Homo sapiens
ccggaaaagggcactcgtctccgtgggtgtggcggagcgcgcggtgcatgggatgcttgaagatggaaagaaatttgattcctcccgggacagaaacaag

SEQ ID NO: 302173 - DNA, 74 bp, Homo sapiens
aacctcagaggacaacgaagtgttcgggacactccggacgcaggcccggccaggagagttcgtctgcatcgagt

SEQ ID NO: 302174 - DNA, 100 bp, Homo sapiens
gctgagctgggcatccgacacgtactgctgtgtaaactggagttgctggtgggcagccctgcttcctgcatggaactggagctgtatggagttgacgaca

SEQ ID NO: 302175 - DNA, 111 bp, Homo sapiens
cagggggtggctctggggctgacccgggaagtcggggtctccttcgccttctgtctttctgcgtcctactagcaggtgctggagaatctggtaaaagcaccattgtgaagc

SEQ ID NO: 302176 - DNA, 75 bp, Homo sapiens
attccgtcaaggtcacaacagtgtctttctgatcaaggtgccccacctcaaccagaatgcctggaacaacctgga

SEQ ID NO: 302177 - DNA, 75 bp, Homo sapiens
atgctggggaaggttctgaccagtagagcactcataacagatggctacggggcgtggagtgctggacctgccaac

SEQ ID NO: 302178 - DNA, 82 bp, Homo sapiens
caacgaccacgtctccaaaatgagtcgcatcttcaacccccatctgtttggtgcacctcgatttggaggaagtagggcaggg

SEQ ID NO: 302179 - DNA, 100 bp, Homo sapiens
gaaaaaggctacaaagctgctttcattggaataggttgtctgcattcaaaagagcattctattaaagctaccttaatttggcgcttatttttcttaatca

SEQ ID NO: 302180 - DNA, 49 bp, Homo sapiens
aggccatcgatttagtaaagcagggcagttttcggctttgtgagaaacc

SEQ ID NO: 302181 - DNA, 75 bp, Homo sapiens
tgctcgcgctactctctctttctggcctggaggctatccagcgaaataatgcaaaaggtgtcccaaggctcctga

SEQ ID NO: 302182 - DNA, 100 bp, Homo sapiens
tgtggaattcccagtacgacaggcagacgcaaaatcgaatgaagctaatggccgacaactacgaggatgaccacttcaaatcctcccattccaatcaaac

SEQ ID NO: 302183 - DNA, 100 bp, Homo sapiens
caccgatgtcattccctcggaagccatcaatgagctcactgttctggtgctggttaacaccatttacttcaaggacgtggagtcggactctgccaagcag

SEQ ID NO: 302184 - DNA, 49 bp, Homo sapiens
cttggcttctgaggcatctgacaagaaagatgtagcacttaagcctcag

SEQ ID NO: 302185 - DNA, 75 bp, Homo sapiens
acagagttagagagagggatggtgcctttccgctgtgcccattgccattactcctgcaacatatctggctctctg

SEQ ID NO: 302186 - DNA, 98 bp, Homo sapiens
gcgccccggccgaggtggcggcggctcctcagaaacgcttcgttaagggactcaggcagtacgggaagaacttcttcagaattagaaaggagctgctt

SEQ ID NO: 302187 - DNA, 100 bp, Homo sapiens
ttcaagacatgtgtcagaaagaagtgatggagcaaagtgccggtagaatttattcaagagctgccaaagactatcagtgggaagacaaaaagaaatgaac

SEQ ID NO: 302188 - DNA, 80 bp, Homo sapiens
aaaattggaggccgaagctgacaaaattggactactgcttgctgcaaagcgcttctctgaagtagctttggaaagtagag

SEQ ID NO: 302189 - DNA, 80 bp, Homo sapiens
ccccgggcacgcctccctcatccggaccatcatcggcggtggggaccaaggcatactgaacacattttttagcagctggg

SEQ ID NO: 302190 - DNA, 100 bp, Homo sapiens
ctgtggtcctggccattcggagtcgatatgtgctggaagctgcagtctacaccttcaccatgttcttctccacggctggagtgcaatggcacgatctcgg

SEQ ID NO: 302191 - DNA, 100 bp, Homo sapiens
cgaggcggcagcccgggtacgcgccgcccggcgcgcacaggctgtagcaggttccggcggacggcgttgcgaagctgcaagtgtccactgcttgggaaag

SEQ ID NO: 302192 - DNA, 50 bp, Homo sapiens
cacagagacagatcaaagcagctcaggaggctgcggaggaggaggaggaa

SEQ ID NO: 302193 - DNA, 100 bp, Homo sapiens
ctcgcatcttgcccgaagccgggcggaggagagctcaagctaaggtatggcatttcaaatatagatacaaccattgaaggaacgtcagatgacctgactg

SEQ ID NO: 302194 - DNA, 100 bp, Homo sapiens
cttgtgtccgcttctcgcccaacagcagcaaccctatcatcgtctcctgtggctgggacaagctggtcaagatcatggaagggaagtggttgctgtgtat

SEQ ID NO: 302195 - DNA, 98 bp, Homo sapiens
ggctctccgccgtccccagccctgcctctccctgggctctgcgctcctttaccctcatcgtggaggcctgggactgggacaacgataccaccccgaat

SEQ ID NO: 302196 - DNA, 83 bp, Homo sapiens
ctttctgctgctgaagtaatgcaatggtctcaatctctggaaaaacttcttgccaaccaaagctctcctccttcagatgagat

SEQ ID NO: 302197 - DNA, 82 bp, Homo sapiens
gaaaacaacttcgagggcagaatccagacatttaatgtggatgcaccatgccagaccgtggaagatttaacgaatggggttg

SEQ ID NO: 302198 - DNA, 75 bp, Homo sapiens
gaaacctggcacggctcttgcttccgtctccttatatacatttgacaaagccaaacagtgtattggcacaatgac

SEQ ID NO: 302199 - DNA, 82 bp, Homo sapiens
cacctgccatacctgcaaggacaggtcaccctggagcttgctgtgtacagtatatgggacaggttgctcatcaactcccaac

SEQ ID NO: 302200 - DNA, 75 bp, Homo sapiens
ttccatcccacctttgagtcaggaatgtatcctgtcaggtataatgtcagtgaatggcaagaaagttcttcatat

SEQ ID NO: 302201 - DNA, 98 bp, Homo sapiens
tgagggggactggcctggcgtgcactccgcacctcggggacattattgcgcgtggaacggctgcttttggaagtgccggtggtggtgtgcacattgag

SEQ ID NO: 302202 - DNA, 100 bp, Homo sapiens
ctgcgcctcttcccctgcagcgccgtgcagctcgccgcctaccgcaagacaatctggagctcccacattgttctagtcaggaggaagcagcagccagggg

SEQ ID NO: 302203 - DNA, 100 bp, Homo sapiens
tcaaggcaaaggtgggatatcatggcatctatctggactaatagggatgccaaaggaaaaatatgatcctccagatcctcgcagaatttataccatcatg

SEQ ID NO: 302204 - DNA, 101 bp, Homo sapiens
taaagaacagcgtaactccagacatggaatgtttggatgaagcaaatgctgcattggattcagcatcaagacttacagaacagttagatgtaaaagaagaa

SEQ ID NO: 302205 - DNA, 75 bp, Homo sapiens
ggaagaaaacctttgaccatgaagagaaatgagatgatagccaaaccctcagattcatgttacatgtaaagctgt

SEQ ID NO: 302206 - DNA, 110 bp, Homo sapiens
tctatggtactcggaccatggagccatacagtggatccaaacttctacagcaaaaacttacttcttttaggaaagacatacttgaaactacacaacaaaaagcttgctgc

SEQ ID NO: 302207 - DNA, 71 bp, Homo sapiens
tgaaaattctcttcattctcttggactgaacttaaatactgatagacaatattgactcacgcctactccag

SEQ ID NO: 302208 - DNA, 75 bp, Homo sapiens
ctcagccaagcctgcccctttgcagggccccagggctgatgttgtagtcaccgatcttgaggaattgcaagactt

SEQ ID NO: 302209 - DNA, 96 bp, Homo sapiens
attttttgggaaaacacttcaaatgctgaggtgcaagcggtcttctctgtcttctttatggccagtaaaattctccagaagagatttatggcagcc

SEQ ID NO: 302210 - DNA, 50 bp, Homo sapiens
gttcgttgtgccagcgactaaaaagagatggtccagtagtctatgcagca

SEQ ID NO: 302211 - DNA, 100 bp, Homo sapiens
ctctcctggtccagctctcaggacaagaacaaagtgtgctgggcaattcaagctgctggaacaagaccgagatataaaggagccagtgcaatatttcaac

SEQ ID NO: 302212 - DNA, 97 bp, Homo sapiens
ttaccgagatgcggttttcctcgcagaacgcctttatgcagaaggtcattagtaattatcagcactttagatgggagaattgctgccttggatcctg

SEQ ID NO: 302213 - DNA, 100 bp, Homo sapiens
ctgagaatgagtttgtgatgctgaagaaggatgttaacttggcggagttcgctgtggctgcaggggaccagatgctttacaggagtgaggacatccagct

SEQ ID NO: 302214 - DNA, 100 bp, Homo sapiens
cggcggcccaggccagcattcccgcatataaccccgttttcacacgaatggccccttcacatatttgaagactaccgtcgtgtccgtgctgaccctttct

SEQ ID NO: 302215 - DNA, 83 bp, Homo sapiens
caggcgtttgatgttggccagccccgggacggactgaagctggtgcgcaaggacaggtcaaaatgcagatcttcgtgaaaacc

SEQ ID NO: 302216 - DNA, 100 bp, Homo sapiens
cctaggccctattcaaaacaagggaaggggaggagttacagcccggccagttggagttgtagtaccacgagggacgccaactcccagaggagtcctgtcc

SEQ ID NO: 302217 - DNA, 83 bp, Homo sapiens
aaaaaaaatagctcagttaatgaaggatcaacgtatcataaaagccttgctatacatcctgacaaaattaggattgcaactgg

SEQ ID NO: 302218 - DNA, 50 bp, Homo sapiens
ctggagttccacaactgcaggacagcggagctccctgggtcctcagcagt

SEQ ID NO: 302219 - DNA, 101 bp, Homo sapiens
ggcccctgctgctactggccctgctgggctggctgctgctggccgaagcgaagggcgacgccaagccggaggcatacttccacaggctgcactcgaggaga

SEQ ID NO: 302220 - DNA, 100 bp, Homo sapiens
ttgctctcccctcccctagtatggaagggctaccacccgatgccccatgaagtggagatcgcacacaccaagaagctgttccgcaggaggagaaatgatc

SEQ ID NO: 302221 - DNA, 100 bp, Homo sapiens
caaagacccagtgaacaaatccgggggcaaggccaaaaagaaggtgaatcaaaaactctggttttaagcaacctctcctacagtgcaacagaagaaactc

SEQ ID NO: 302222 - DNA, 75 bp, Homo sapiens
agccacccgctgggaatcgtgcagggattcttcggagactccatcctctgccaatggcccttcccgggagggctc

SEQ ID NO: 302223 - DNA, 74 bp, Homo sapiens
tcctccccacgacactctgaagcagcgacggcacagcgggaagaatggtcaatattgaaggaggggctatagcc

SEQ ID NO: 302224 - DNA, 109 bp, Homo sapiens
cctcctagccgctccggaccccagaggcggaagtaaaagcgaactacagtggatgggtgcagttcaggtgagatgaacccggtacctcagatggaaatgcagaaatcac

SEQ ID NO: 302225 - DNA, 137 bp, Homo sapiens
tcattctcctcttctatttttttacccactatgacgcttccttagaggatcaaaaggggctcgtggcatcctatcaagtgacctgaaaaaaatgtctggatttctagagggcttgagatgctcagaatgcattgact

SEQ ID NO: 302226 - DNA, 82 bp, Homo sapiens
aggattatgtggctcatgaagaaccattgaagggtacccagtgtgttgaacaaattcaagagttggttctacgcttctgtga

SEQ ID NO: 302227 - DNA, 100 bp, Homo sapiens
aatctgatgagaaagaccaagatgctatagaaactgatgccatgatcaagctgacggcccagagggtgggtgccaattccaccagcagctgcaactgaaa

SEQ ID NO: 302228 - DNA, 100 bp, Homo sapiens
gggaaatgaggcaagttatcctttggaaatgtgctcacactgaagaggaggctgcaaaatgggcccgggaagaagaagaagcccagcgtcgattagagga

SEQ ID NO: 302229 - DNA, 100 bp, Homo sapiens
gcccttcctcgaggcggtgtcccacctgccgcccttcttcggtaatgcaggtggtgaaggagcaggttatgagagcacttacaaccaagcctagctccct

SEQ ID NO: 302230 - DNA, 85 bp, Homo sapiens
aaagagtacagtgcggggaggctgagaggggcgcatgcaacaacaacttttggaagggatgccggctccaggagcagcagtggag

SEQ ID NO: 302231 - DNA, 80 bp, Homo sapiens
gactttggctcagctgctgcatcaggcagtttcccttcccaagatgcagcagcttttttatgagaattacgagcagaaca

SEQ ID NO: 302232 - DNA, 100 bp, Homo sapiens
gacgcaatggcagcctttgcagtggaacctcaggggcccgcgttaggcatgtggagaccccaaggcaaaaccatcctatcttatcgacaaaaacctggaa

SEQ ID NO: 302233 - DNA, 75 bp, Homo sapiens
ggaggctgagcaggaagccctggagaaggaccaggagaggaagctcataaaatggtgagagaagcaaatatcaag

SEQ ID NO: 302234 - DNA, 100 bp, Homo sapiens
cagatatcctggattgatgacacatcagcatttgtttcccttagccagcccgagcaagtaaagattgggactacttctgatgaagaaagtggcataatta

SEQ ID NO: 302235 - DNA, 80 bp, Homo sapiens
agcttgtgaaactgagggaataggaactgtggctgcaccatctgtcttcatcttcccgccatctgatgagcagttgaaat

SEQ ID NO: 302236 - DNA, 100 bp, Homo sapiens
ctgcgcagcatcaaccagggcctggaccgcctgcgcagggtcagccaccagggctacagcactgaggctggccagaagcggactcctagaagaggggagc

SEQ ID NO: 302237 - DNA, 75 bp, Homo sapiens
aaaaacattggtgttgacaatccagcagctaaagttttagttggtgattatgggagtgctattgagacactggta

SEQ ID NO: 302238 - DNA, 74 bp, Homo sapiens
accactagacccacagctgttaaagcaacagggcttctttcggcgaacgattcgactcaagctggtgtatgaca

SEQ ID NO: 302239 - DNA, 100 bp, Homo sapiens
tgttccctgcagccctcccacggagagcaagccctggaggttcactctttcaagaagtcgtgtgctgaggtgtaatgctacacaagtcagaggaaggaag

SEQ ID NO: 302240 - DNA, 100 bp, Homo sapiens
caacaacttcatggacggcctcaaagatggcatcattctttgcgagttggccgactgcgatgtgagtgacagcagctgcagcagcctcgccgcaaccctg

SEQ ID NO: 302241 - DNA, 80 bp, Homo sapiens
ctctgggtctccaggcccgcgaccgtccgccagtcgtcccgagtgtcaacagcatctccaccctggagcctgtgagccgg

SEQ ID NO: 302242 - DNA, 82 bp, Homo sapiens
cggctgcagcgggggcgccggctgggagccctccagaatacccatcatatagcccctgaggtggcatggtgatgtctccatg

SEQ ID NO: 302243 - DNA, 83 bp, Homo sapiens
cagctatcgtggacgtcactggccctggtggggattgacagccacgggaaggttacgggcaggacttgagtggcttcggacag

SEQ ID NO: 302244 - DNA, 100 bp, Homo sapiens
cacactccgcctgcaggaatacttatcagggctttaatggagacggtggctcagggagtaaaggaaggccagttgagcaaacagaagtgttcctctgcat

SEQ ID NO: 302245 - DNA, 100 bp, Homo sapiens
gacaaaccaaatgaccaatcttcaagatggtcttcagagagcaactatcctccccagatttttgatgaaattgagtcatgaaactgtaaccattgaattg

SEQ ID NO: 302246 - DNA, 98 bp, Homo sapiens
aaggtaaatacctagaagtggaattgctgggtcatatgggaatctgggaagaattgcaaagtctgtatctttagtaaggatgggaccttgtttgcctg

SEQ ID NO: 302247 - DNA, 100 bp, Homo sapiens
tccaacatcctgctagacttgttaaggctgaactccagtgcacccagttagacttggagcggaaactcaagttgaatgaaaatgccatctccaggctcca

SEQ ID NO: 302248 - DNA, 83 bp, Homo sapiens
tttaacaaccagctgaccactgtccacaaccaggagacgctggtgaacctggcggggctcttggtcagcctcctgatgctccc

SEQ ID NO: 302249 - DNA, 75 bp, Homo sapiens
ttgggatcttcttcactgcctctggcatggatgaggatcccctaacaacagtgagagagcaatgcgagcagttgg

SEQ ID NO: 302250 - DNA, 51 bp, Homo sapiens
atgtgaatggcagatggataaaggaagacgcctactttggggataaaggat

SEQ ID NO: 302251 - DNA, 83 bp, Homo sapiens
agcacctgcacatccacactccgctgctcgacaggtttttagaacttcagccataaaaatgggcagaattttccttgatcata

SEQ ID NO: 302252 - DNA, 98 bp, Homo sapiens
tcggcctcggcgtgctgcgcctccgcggctgccctgcgccaggtggaaaggagactatggaaccaggatccagcagtacttcccatccaactacgtcg

SEQ ID NO: 302253 - DNA, 100 bp, Homo sapiens
gccgtctgcaaagtgtccccggcaagaaggcagggcaagaatcctttcgttccatcacaaggtcgtattacagaggtgcagcaggagctttactagttta

SEQ ID NO: 302254 - DNA, 100 bp, Homo sapiens
ccacctgcagaagtcagggtgcagccacagctcagcaggacccctcaagcggcccagcagactgaggccctggccagattggcataaacccgggactaat

SEQ ID NO: 302255 - DNA, 75 bp, Homo sapiens
gtgcgctgcagcgtctccttcccgttctccaggtaaaaaagagtgtcaagtggacatgcaaagcttgtggagaga

SEQ ID NO: 302256 - DNA, 82 bp, Homo sapiens
gatggccagtcacgagaacccaggtacatgtcccagagcaagcacacggaggcccgggagctcatgtactcgggagccctgc

SEQ ID NO: 302257 - DNA, 75 bp, Homo sapiens
atagactatgctcggcaactcatagaagaaaagattggtcatggcctgtatgagaagaaaaagacctcaagaaag

SEQ ID NO: 302258 - DNA, 100 bp, Homo sapiens
gtaaaccttattctggccaacagtgttaagtataatggacttgcaattgtgaccaaatatattacaaagggctggaaagaagttcatgaattgtataaag

SEQ ID NO: 302259 - DNA, 51 bp, Homo sapiens
ctgatcgggtcttccttcatgatatggtggtggttttaatgaaagagaaaa

SEQ ID NO: 302260 - DNA, 100 bp, Homo sapiens
aaaggctcaacgagaacaagctatcaggctatttgcgcctaggagccatggctagagataagggaaacttttatgaggcttcagattggtttaaggaagc

SEQ ID NO: 302261 - DNA, 100 bp, Homo sapiens
tggtcttgctcggccgatgaagtgcagaggtttttttctgcttcctgcctgacacagctcacttcaagaagtgcacaatgtcagaacgtggaattaagtg

SEQ ID NO: 302262 - DNA, 51 bp, Homo sapiens
tgggctggtctgggctgccacgacaggaatgggtaccacagaccatgtcat

SEQ ID NO: 302263 - DNA, 89 bp, Homo sapiens
ggcaaactaagccgattttccggaaaaaggatttagagggaaagatcattgtagatgaactgaagcaagaagttatcagtaccagcagc

SEQ ID NO: 302264 - DNA, 90 bp, Homo sapiens
tgtactggcattgaaaacattgacgaagctattacattgcttgaacaaaataattgggacttagtggatgagagagacctagagaaagat

SEQ ID NO: 302265 - DNA, 89 bp, Homo sapiens
agaaaaggccccgatggcccccagaagacctcttcagacagcatgctcctctggacccttcccgctgcccagcgctggggacgccttcc

SEQ ID NO: 302266 - DNA, 100 bp, Homo sapiens
aactggaacaggaacttaaaagagtttcactctgtcacccaggctcgagtgcagtggcgtgttctcggctcactacaacctccgtcctctgggctcaagc

SEQ ID NO: 302267 - DNA, 82 bp, Homo sapiens
ggcaacgaaaatgagcctcgcgaggccgacaagagccacccggagcaggatttttagactctgaggagcagttggagctaat

SEQ ID NO: 302268 - DNA, 74 bp, Homo sapiens
acaagacacttttcagaaagacagaatacagattctgttcatcttgctctgaaattaaataattctgaactcat

SEQ ID NO: 302269 - DNA, 100 bp, Homo sapiens
cttcaggagcgaagagctgcttctgtatcttaagaaatgcatcttctgcagacaccgggttaagagggtctctggagcctgcatccagtgttcctacggt

SEQ ID NO: 302270 - DNA, 131 bp, Homo sapiens
cagctgaagagcgacaagccgctggcagccgcggatctcaccgccgctcaggataacgaaggaggcccaacttcattcaataaggagcctgacggatttatcccagacggtagaacaaaaggaagaatatt

SEQ ID NO: 302271 - DNA, 88 bp, Homo sapiens
gtggaccctactgtacctcaaaaggtgtgaggacttctgcatcttacagtcagcacagaacacactgagacttgaatcaagtcagcaa

SEQ ID NO: 302272 - DNA, 50 bp, Homo sapiens
tagtggattttctgaaagagaagcttgttagcagtggcacaagatcttac

SEQ ID NO: 302273 - DNA, 88 bp, Homo sapiens
cttgaggtggaggactcagaccctgagcctgaaggggaggcggaggacaggtgaccaccattgacctctcagcctccctagttctgaa

SEQ ID NO: 302274 - DNA, 118 bp, Homo sapiens
gccccttggaggggctgctggacctcagctacccccgcacccacgcggccctgctgaaagtggcgcaaatgggagagatgacatgctggacgtggagaccgatgcctacatccactgc

SEQ ID NO: 302275 - DNA, 100 bp, Homo sapiens
aacgcagtggattatagctctgttttcttctttccaaaactgtgcacccctggatgaaaccctggaagaaagcgggacttttcccctgttccttggagtc

SEQ ID NO: 302276 - DNA, 75 bp, Homo sapiens
ctacaacacgttcattggcgagagaactgtaggagcgctccaggtcctagggagtgcatccgccccaaccctttt

SEQ ID NO: 302277 - DNA, 75 bp, Homo sapiens
gaaaaagatgccgcagtaccagaaggagctgaataagtttattaaccttgcaagaactcttcaggcacatatgga

SEQ ID NO: 302278 - DNA, 89 bp, Homo sapiens
tgtaccaggcgaagctggccgagcaggctgagcgatacgacgacaaaacttacctggggtccctacttatggttttacatgcttcgggc

SEQ ID NO: 302279 - DNA, 100 bp, Homo sapiens
ccaaagtcgagggatgtacagcaacagaatgagaagctacaaacaagaaatgggaaaactcgaaacagattttgtccttttgataggaaaatcaataaat

SEQ ID NO: 302280 - DNA, 51 bp, Homo sapiens
atcaagctttgaaggcagcaggagaatgaagttgaagaggtaaaagaggag

SEQ ID NO: 302281 - DNA, 75 bp, Homo sapiens
ccgcccccgggctcgcggcctgcagttaaaagaagatggatgcacagtgttcagccaaggtcaatgcaaggaaga

SEQ ID NO: 302282 - DNA, 88 bp, Homo sapiens
cagccgcagaggaggagcgcagcccggcctcggtggagccgccaccaaaatgcagattttcgtgaaaacccttacggggaagaccatc

SEQ ID NO: 302283 - DNA, 51 bp, Homo sapiens
gctgtgttctctgcagattctaaagagaagaagaaggaggttcctgctgtg

SEQ ID NO: 302284 - DNA, 100 bp, Homo sapiens
cgggcttccttgccctgtccgggatggttttactcagcatttggtgtggtggatcttacataaacctttagaacttacattagagtgttcaagtcttctg

SEQ ID NO: 302285 - DNA, 87 bp, Homo sapiens
ctgatttaggaaacgacttatattttgttaaactgcccaactttctcagtgtagagcccaggttgctacaagatcaccacggttttc

SEQ ID NO: 302286 - DNA, 100 bp, Homo sapiens
agcacgccatgaaggcctcgggcacggagaactacgatgacccgcacaaaacccctgcctccccagttgtccacatcaggggcctgattgacggtgtggt

SEQ ID NO: 302287 - DNA, 101 bp, Homo sapiens
aggcggcgcagtacaccaacgcggtgcgcgaccgggagctggacctccgggctcagccagcaggagtgccagaaatcttaaagaaaagcttgcatagctgt

SEQ ID NO: 302288 - DNA, 129 bp, Homo sapiens
tcaagaagaagaagttgcgaaggatccccaacggggaggccaacgtgaagaagcgccatgtcagaaccggctggggatgtccgtcagaacccatgcggcagcaaggcctgccgccgcctcttcggccca

SEQ ID NO: 302289 - DNA, 82 bp, Homo sapiens
gaggcaaacaccttgtaactgtactcatggaatgctgtgtaaatgccctggtgacatcatttaaagagactatcttagctga

SEQ ID NO: 302290 - DNA, 75 bp, Homo sapiens
acggcccctgtccccgctggcgggcttccctgtcgccgttcgctgcgctgccggcatgcttttcacttccactgc

SEQ ID NO: 302291 - DNA, 118 bp, Homo sapiens
tagaaggagactctgaattcttacaacctctctacgccaaagaaatccagtcccgaccatctcaaatatctatcagtgtagaagagtgggaagacaccaaagactccaaagaacaagg

SEQ ID NO: 302292 - DNA, 83 bp, Homo sapiens
gaagaattttccaaatgaatttgcaaaacttactgtaggcataaacttggaggaggcagtggagagagcatcctggtatcaca

SEQ ID NO: 302293 - DNA, 83 bp, Homo sapiens
cccaaagatccccgttcctggagattctgattgagtcttctcaagtcttaggattgcagcaacacgctcggctgcccaaaccc

SEQ ID NO: 302294 - DNA, 100 bp, Homo sapiens
ggtgcagtgtgtctggtcttatgagatgggaataactgggaacacaagtccatttggacagccctttagtcaagctggagggcagccaatgggagccact

SEQ ID NO: 302295 - DNA, 90 bp, Homo sapiens
ggccccaggacaccggccccgagcaggtcacgaggacggagggccatgtgttgggtcagcaccatcaggctttcttcgagagtcacccag

SEQ ID NO: 302296 - DNA, 98 bp, Homo sapiens
tcaaagctgttgtcggagagaggaggaggtacaggagaactgtgtgcggtggcgaaagaggttcaccttcgtgtgtaagatgagtgctaacccggcca

SEQ ID NO: 302297 - DNA, 83 bp, Homo sapiens
gctgttcgtgctgctgggattcgcgctgctgggcacccacggagcctccggggctgggccgagaactactggtggcgtggcca

SEQ ID NO: 302298 - DNA, 90 bp, Homo sapiens
gccgagcggatcctaataaggggaaaatgggggggccctcagcctcttggccttgaacgggctgttcatcttgattcacaaacacaacct

SEQ ID NO: 302299 - DNA, 50 bp, Homo sapiens
ggagaatcgaggagctcaacaagctcaccatggatgatgatatcgccgcg

SEQ ID NO: 302300 - DNA, 75 bp, Homo sapiens
actgtgacatgtctgatcccttgctcccatccctgcagcatgaacaaggaagatttcgatgtcgatcattttgtg

SEQ ID NO: 302301 - DNA, 100 bp, Homo sapiens
gccaatgatacgttcacagtcaaatatgtgcctcctgctgctgggcgatacactatcaaagttctctttgcatctcaggcccataagatggcctggcctt

SEQ ID NO: 302302 - DNA, 100 bp, Homo sapiens
gtgtatactctacaatctaagaaggatttcagcaaatttggagcagggtactaggttttgacaagcttgcatcatgcgtgagtataagctagtcgttctt

SEQ ID NO: 302303 - DNA, 75 bp, Homo sapiens
gttaccttcgactttcagataaccccaggagcttcggaggaagatcctggtgaaggggaagaagttaacacttga

SEQ ID NO: 302304 - DNA, 117 bp, Homo sapiens
cagctatggggtctttcagctcacacatgacagagtttccacgaaaacgcaaaggaagtgattcagacccatcccaggtatgttggagctagaggctgagcatgaccaggacctgag

SEQ ID NO: 302305 - DNA, 99 bp, Homo sapiens
tcgagaagggcgactactacgaggcgcaccagatgtaccggaccctgttcttcagggcagctggtggaatttttgaagaaaatggaatctcgaggcccc

SEQ ID NO: 302306 - DNA, 100 bp, Homo sapiens
gtggacagaggctatttcagtatagagaaatgcaatggcacatcgtgattctgagatgaaagaagaatgtctaagggaagacctgaagttttacttcatg

SEQ ID NO: 302307 - DNA, 74 bp, Homo sapiens
gggttggagttttggcgagagtttgtggaagatggcgcctgttgtgacagggatctgtgccagttcagaagcag

SEQ ID NO: 302308 - DNA, 100 bp, Homo sapiens
cagagccaaggtccagggggcaaggtcgtggacagtcattttgtttactcattcagccctgttgcaggtcccaataaactcttcataaggttgacagaag

SEQ ID NO: 302309 - DNA, 83 bp, Homo sapiens
cggcgatccgggcgctcgagacttaccagagccacaagagttcaagctgaagaagatgtggaaaagtcccaatggaactatcc

SEQ ID NO: 302310 - DNA, 100 bp, Homo sapiens
gcctgcagagcgcgcagtacctccggagcctgtggtgctgaccgacacaaatcttgtgtatcctgccctgaaatgggaccttgaatacctgcaagagaat

SEQ ID NO: 302311 - DNA, 100 bp, Homo sapiens
gtgtacaggagaaaaaggcattggacacacgactgggaaacctctccatttcaaaggatgcccttttcatcgaaaaatgcactcggtgatggaaagagag

SEQ ID NO: 302312 - DNA, 87 bp, Homo sapiens
aaaagcgtgcaagtatcagtgatgctgccctgttagacatcatttgagcattgggctcaggatctgaacaaagtccgtgagcggatg

SEQ ID NO: 302313 - DNA, 50 bp, Homo sapiens
ggagacagcaatctcaacttcagttttcagatgcttcaagtgttgtgaac

SEQ ID NO: 302314 - DNA, 76 bp, Homo sapiens
gtgaaacatggcggtaggctgggaccataacacaaggaaacttggatttaactggccagaagcaggtattcaaagc

SEQ ID NO: 302315 - DNA, 101 bp, Homo sapiens
tcccggtggccgccgcgcaggagcctcccggagctggccatggcgagtgtcactgcggggaatgcaagtgccatgcaggttacatcggggacaactgtaac

SEQ ID NO: 302316 - DNA, 75 bp, Homo sapiens
caccatattgaagcctgtgcccaggtggacccaagtggagagattgtggaactggcgaaaggtgcatgtccctgg

SEQ ID NO: 302317 - DNA, 100 bp, Homo sapiens
ggagggccttcaagaaggagaccagattctgaaggcccagtttgatatctctgtggccagtgaaattatggctgtcctggctctcaccacttctctagaa

SEQ ID NO: 302318 - DNA, 53 bp, Homo sapiens
tggtgtcatccagccttagcaaaccagagtttccagagtgtggattctttggc

SEQ ID NO: 302319 - DNA, 75 bp, Homo sapiens
tagaagaggaggaagaggaaagaaaaggagtcaggaatgcctcttaggtgacaaccaaagccaagcaactgaagg

SEQ ID NO: 302320 - DNA, 98 bp, Homo sapiens
aagaggctggatggatgcatttatgccattaagcgatcaaaaaagccattggcgggctctgttgatgaccgaaggagtaaaggtgctgcaatgatgtt

SEQ ID NO: 302321 - DNA, 80 bp, Homo sapiens
aagaccttgaaatgcatccgctggtcgctgccggaaatggccagcatcacaggacatggccccctcagccacctagctgg

SEQ ID NO: 302322 - DNA, 100 bp, Homo sapiens
aagtgtgcagacgactctgaaacagccaactacattagtgctcacactaaagacgtgccagaaccctgtggagcatcatgaactgggaagagtagctgag

SEQ ID NO: 302323 - DNA, 74 bp, Homo sapiens
taccaggattggaatattgtgaagttcaacgagatccttattcaaattatgatccgagctggatccagagttgc

SEQ ID NO: 302324 - DNA, 100 bp, Homo sapiens
ggcaacgtggtaaacggggaaagccacgtgtcgggaaccaccacgctcacggactgcctgcgacggtgtggcgatcgatgggaataatcacgaagtcaaa

SEQ ID NO: 302325 - DNA, 88 bp, Homo sapiens
cgagaaggtggaggatgcctgccagggtggtccccaaaaagaaagagcgtaaggtggcttccgatgatgacatctctgagcaggacgg

SEQ ID NO: 302326 - DNA, 75 bp, Homo sapiens
cagagccctgcgatactattatgacaagaaagatgttctcgtccgtggcgcacctggcgcgggcgaaccccttca

SEQ ID NO: 302327 - DNA, 74 bp, Homo sapiens
ctcgggcaagaccaccttcgtcaatgtcatcgcggcatgttatgttacccagagaactttccaaacaagtacct

SEQ ID NO: 302328 - DNA, 82 bp, Homo sapiens
ggacattatctggttttgtaataacacggtggacttaaatgaagaagaaactatattgatcatcaggcgtctacataaggtg

SEQ ID NO: 302329 - DNA, 90 bp, Homo sapiens
ccatgttctctcgcgcgggtgtcgctgggctgtcggcctggaccttgcagccgcaatgatggccgaacagacccaattttggatgatgtt

SEQ ID NO: 302330 - DNA, 75 bp, Homo sapiens
gctttttctaactatttcaagatgatatttattcaccaaacaaggtgattgaattactcagatatgaagatcatc

SEQ ID NO: 302331 - DNA, 100 bp, Homo sapiens
gccaaactgaaatttaccagtatgtccaaaacagtatggcacctcatcctgctcgagactacgttgttttaaggtgactgtaatcaatgagagactgaag

SEQ ID NO: 302332 - DNA, 100 bp, Homo sapiens
actgaagcaattaatggaggaacatgatcaggcatctccatcaggatttcaaccagagatggattgtggtggtgccatgcagcaagaatcagagagatgc

SEQ ID NO: 302333 - DNA, 100 bp, Homo sapiens
aggactgcggacaagggctggcagttacagaatgtctgaaggggacagtgtgggagaatccgtccatgggaaaccttcggtggtgtacagatttttcaca

SEQ ID NO: 302334 - DNA, 100 bp, Homo sapiens
gggtgaaccttctaattgtgaaggatctgttaaggtatcccatttgcttccagggaaaaagacaactaaactttgggttccagatgaagaagtatctcct

SEQ ID NO: 302335 - DNA, 90 bp, Homo sapiens
ttcaggaatgccaggagcaggatctgcagaagacgcagggctcaagggagcacaatacttgggaacctgagaaaaacttggattgccctg

SEQ ID NO: 302336 - DNA, 82 bp, Homo sapiens
cgaggagataccagtcggtagaggacaatgcagatcttcgtgaagactctgactggtaagaccatcaccctcgaggttgagc

SEQ ID NO: 302337 - DNA, 100 bp, Homo sapiens
cacgaaatggattggagtgaaccggagaccccgaaaacggaagcgcagggagaaggaagaggtgtttgaaaagactgatcccgttgagaacacatatgta

SEQ ID NO: 302338 - DNA, 78 bp, Homo sapiens
tgggactaatgtgcggacgccgggagcttctgcgcttgctacagtccgggcgtcggaaaaggtgtgagcggtactggg

SEQ ID NO: 302339 - DNA, 75 bp, Homo sapiens
tggggtggtgcacacagaacaacaaggtgttgatgccgccggacggtcccgcaggctcccgatggcgagattacg

SEQ ID NO: 302340 - DNA, 100 bp, Homo sapiens
acactccacccacgatttgagggcaagagctgcagccccctgacaccatcatccgagcagtattgatttttgcagaaggaatttttacaggtgaaagcca

SEQ ID NO: 302341 - DNA, 83 bp, Homo sapiens
gtcttccccggccggtccctcgcctcccggccgagctgacgcaaattgtggctactaatttgccccctgaagatcaagatggc

SEQ ID NO: 302342 - DNA, 75 bp, Homo sapiens
caaccaggcactactgaccaagatcttgtcaagctgtgtcagccaatctccctggaaaaggagacatgaatgtct

SEQ ID NO: 302343 - DNA, 74 bp, Homo sapiens
actgtgtccaggccccgggttctcaggctgggttgcggcccatttgtgaatttatgaccttcaatttctccatg

SEQ ID NO: 302344 - DNA, 90 bp, Homo sapiens
acagaggagaggactactgtaattcccagccttgttcctttatagataacaacgaacttgatgcaagtgataggtttgccaaggtcagac

SEQ ID NO: 302345 - DNA, 75 bp, Homo sapiens
cactcatcattccagaggagggtaaaaggctgagaagcttaagggatctcaatcaacagagggtgcagaagctgg

SEQ ID NO: 302346 - DNA, 75 bp, Homo sapiens
ctgaagggcctgccgcccctgggggattagccagaagcagaggcaccaagtctgaaggaggcagaagggaaagaa

SEQ ID NO: 302347 - DNA, 75 bp, Homo sapiens
gaaaatgggcacatcttcaactgcattcagcgagcccaccagaacacgacagtcattttgtttactcattcagcc

SEQ ID NO: 302348 - DNA, 100 bp, Homo sapiens
ccccgagcattgtgggcctcatcatcttcctcctgtgcaccctcttcatcagctattgtacagggggatacgctggaagacatttacaaccaagtgaaac

SEQ ID NO: 302349 - DNA, 50 bp, Homo sapiens
cctggacacgcagtacagcaaggtacttgaactggcaggaaatgcatcaa

SEQ ID NO: 302350 - DNA, 75 bp, Homo sapiens
gacccgaagcctaaattccaggagggttatggaaacaaaggacatgctttacatcgtcactgaatttgctaaaaa

SEQ ID NO: 302351 - DNA, 100 bp, Homo sapiens
gcagaagatagaggaagtactttctggggtcttagatacagaactacgatataagccaggtgggtttggaggatttgggacaacatctacaactgcaggt

SEQ ID NO: 302352 - DNA, 74 bp, Homo sapiens
aggatattcctcatgacattgctgtctgggggaaatttgcagtggtgagaaaatgtataaagaaagattctggg

SEQ ID NO: 302353 - DNA, 82 bp, Homo sapiens
agatgccaagaagaatctagacagacaggcctttctaggttgacgagattagagagatggttgacaatgatttaggttttca

SEQ ID NO: 302354 - DNA, 82 bp, Homo sapiens
ctggcctgctgctggcccgcaggtgtgacaagtacaagactggagttattgatgggcctgcatgtaacagcctttgtgttac

SEQ ID NO: 302355 - DNA, 75 bp, Homo sapiens
gggtcatcaccatggatgggacgctgcaggccctggtattgggagagttgctgctacatctttaggaaatttgac

SEQ ID NO: 302356 - DNA, 101 bp, Homo sapiens
ccggccgcctcagccatggacgcgtccctggagaaggctctgacgcccgctctgcggcttcggtgtttgaacaggccacagtccaggagcgcttacattca

SEQ ID NO: 302357 - DNA, 98 bp, Homo sapiens
gccaacctcccctgatgacattctggggcacgccaccatttccaaggtagctacagcaagctgggtagcaggcagatccaaaggatatcatgaagttt

SEQ ID NO: 302358 - DNA, 132 bp, Homo sapiens
tttacccttcccgccggccagaaggagtgcttctaccagcccatgcccctgaaggcctcgctggagatcgagtaccaacttctcaataggtttggcatggacaagatctatgaaggccaagtggaggtgact

SEQ ID NO: 302359 - DNA, 50 bp, Homo sapiens
ccgggctcgggggagcgtgagttgcagattttaggtgatgggcaagtcag

SEQ ID NO: 302360 - DNA, 100 bp, Homo sapiens
atgagctcaatcggcactggggatctgccactgtgaaggagatgatgagagccccctgatcaccccctgccactgcacaggaagcctccacttcgtgcac

SEQ ID NO: 302361 - DNA, 100 bp, Homo sapiens
atggaattcctattcgtacggtcaaaagctttctttccaagatacctagcgtcttctctggtattgcgcagcgatgcacggccatcaagtaccacttttc

SEQ ID NO: 302362 - DNA, 88 bp, Homo sapiens
ccgcccccagcgggatgtgaaggactccgggtgaggccggccacgccccgcacgagctccaaacgagaatggaagccgctggaggacc

SEQ ID NO: 302363 - DNA, 82 bp, Homo sapiens
ggaaggaacgaggcaaggagctaaagcagcgtgcgttcagccctggggcggcggcggcggcgcccgggagccggagccttcg

SEQ ID NO: 302364 - DNA, 51 bp, Homo sapiens
tgatcgtcttcctcttcagccatccaggagccaccatgttggtgatacccc

SEQ ID NO: 302365 - DNA, 98 bp, Homo sapiens
gagtggatggtcaagagcgtgccctacttcaaggataagggtgacagcaacagctcggcgggctggaagactggattatggacagaacttggaaatat

SEQ ID NO: 302366 - DNA, 90 bp, Homo sapiens
cagctgggcaccatcagccgagaggccctgcagcccctggccagtctgcaagtcctgcgcctcacaggcagggtgcctgagctgtattcc

SEQ ID NO: 302367 - DNA, 75 bp, Homo sapiens
cactacgcctttcaggacgagaaccacctggtcagggaagtcaaagatgcatccctgagttcttcctagcaggca

SEQ ID NO: 302368 - DNA, 100 bp, Homo sapiens
cagctgtaccagtccgccattttgctaccaagaaagccaaaggggagatggtgcgacaggcccgcatcctggcccaagccacatctgacctggtcaatgc

SEQ ID NO: 302369 - DNA, 88 bp, Homo sapiens
tatgtttctggaacattgcgatttggaatgtgttggagagcacaatggctgaacaagtccttcctcaggctttgtatttgagcaatat

SEQ ID NO: 302370 - DNA, 100 bp, Homo sapiens
actctgggccaccgcaacccatgggtggccagggattctggtctccaccagctcctggccgggttcgaggacaagtcagcctatgcgctctgcacgtttg

SEQ ID NO: 302371 - DNA, 100 bp, Homo sapiens
tgctacaatggcaaaattactggaaacacctatttctactggcaggggccgcctgaagtgggagcagcgcctggagaaggcgggaggagcccggcccggg

SEQ ID NO: 302372 - DNA, 100 bp, Homo sapiens
ccaggagccaggagccaagagcagagcgccagcatgaacttgggggtcagcatgctgaggatcctcttcctcctgggagcagtgaggagaatgaatacct

SEQ ID NO: 302373 - DNA, 95 bp, Homo sapiens
ggcagatattgagagaatagccccattggctgagggggccttaccttacaacctggcagaacttcagagacaggaccctgatgcttggtgtgacc

SEQ ID NO: 302374 - DNA, 74 bp, Homo sapiens
agcaggcttgcaatattaaaagcactacaaacaccactggtttcccgaaaagccgtccaagggctccggctacc

SEQ ID NO: 302375 - DNA, 100 bp, Homo sapiens
ctgccgcgcctgtcctggatcgacaccctctacagcacccgtggaccgggagcccgtggaccgggagccggtggtgtgccaccccgacctggaggagcgg

SEQ ID NO: 302376 - DNA, 75 bp, Homo sapiens
gctctttgcattcttaaacctactgcctgtagaagcagacattttagcacacttaaatatagatccggtggtatg

SEQ ID NO: 302377 - DNA, 83 bp, Homo sapiens
ttggaaccaacatcttccaaactcctggtttttagaacttcagccataaaaatgggcagaattttccttgatcatatcggtgg

SEQ ID NO: 302378 - DNA, 101 bp, Homo sapiens
caagtccaggatacaacattgaacagatggcaaagcgattcatcaagatcctcgatagtgtcctgcaccacctggtacctgcctgggaccacacactgggc

SEQ ID NO: 302379 - DNA, 83 bp, Homo sapiens
gggccatcccgaaactgtgattgttttctggaccccaatgaggatgagccaaacatccgagtgctccttgagcaccgctttta

SEQ ID NO: 302380 - DNA, 100 bp, Homo sapiens
aagaaggtcccaaagaccccgtgaagaccctccgccccacgccggctcggcctcgaaacagcttgaagaaagccacagagtgtttctttgtggagccaga

SEQ ID NO: 302381 - DNA, 82 bp, Homo sapiens
gaagagctgcagtctttgtgggacaaggtattagaaaactactcggatgctccaatgacaccaaaacagattctgcaggtca

SEQ ID NO: 302382 - DNA, 89 bp, Homo sapiens
gttgtgtgtggcagcaaggagcccgcagagggcagcacagactatttcttgagcagtggtgacaagattcgattcttctttgagaaagg

SEQ ID NO: 302383 - DNA, 100 bp, Homo sapiens
cctgccatggacatgcctgaggtcctcaagtccctgctggagcactctctgccttggccagagaagagaacagggaaggatcgaatcatatttgtaacca

SEQ ID NO: 302384 - DNA, 83 bp, Homo sapiens
ctggtgctgctggtggccaacattttgcggatactcttctgggggatatgagactttctactcggaatatcctgagtgttgcg

SEQ ID NO: 302385 - DNA, 75 bp, Homo sapiens
tcaagcctgtttatgaaattcaaggtgtgatgaaataaggcctttgagccctacttagagattttggaagtatac

SEQ ID NO: 302386 - DNA, 100 bp, Homo sapiens
aggagaagagccatggatcataaagagacacataccaaattggatctatccaggtcaatgagctgaaggagaaaggcaacaaggccctgagcgtgggtaa

SEQ ID NO: 302387 - DNA, 141 bp, Homo sapiens
tggggagaagaggattggaggtgtcagtgttaaaggaacctctacaacgaaggtgaagccacggaagataagtaatctatgccagcaattatgacaatgttagcagaccatgcagctcgtcagctgcttgatttcagccaa

SEQ ID NO: 302388 - DNA, 101 bp, Homo sapiens
cgagggcgcgaggccagcccgcctgcccagcccgggaccagcctccccgcgcagcctggcaggtgctggagaatctggtaaaagcaccattgtgaagcaga

SEQ ID NO: 302389 - DNA, 87 bp, Homo sapiens
catgttgccttgtgaattttgtgaggagctctacccagaggaactgctgattgaccatcaggtcattcccaaaagcaagttcgtctt

SEQ ID NO: 302390 - DNA, 86 bp, Homo sapiens
ggatctggtgtaccaggcgaagctggccgagcaggctgagcgatacgacgatccagaagcagcaaggtctagcaattccaaaatca

SEQ ID NO: 302391 - DNA, 73 bp, Homo sapiens
tgcccctggccgatcagatcaagatcctgatgaagaatggtgctcgcatttggcttttcgttggtttcatgtt

SEQ ID NO: 302392 - DNA, 100 bp, Homo sapiens
tggatgatgtgcttggtggagcagctgcctgggagaatgttgactctactgcaggtccacagagtccatgtgaacggacagatatcaggatggcaatagt

SEQ ID NO: 302393 - DNA, 74 bp, Homo sapiens
acgaggaggaaaaggcccctgtgacctgttctgcggggagtgtctccagccctgcctgcaggtgccatccccgc

SEQ ID NO: 302394 - DNA, 90 bp, Homo sapiens
gtcaaatgaagaacactttcaagaaccagacatacgtctcgtaaaaaagcaacaggctttgctgctgttcatcagctatttacagaacgc

SEQ ID NO: 302395 - DNA, 119 bp, Homo sapiens
ttatgttactttgccacttcttcacggaccagtttcagttcgccgatgggaaacccggagaccaaatccttgcaccatatgaaggcggagtatggaaagttagagtggacctacctgat

SEQ ID NO: 302396 - DNA, 75 bp, Homo sapiens
cccgcatgctctttgtcactccccggcggcagcacgaaagtaccatgtaaggagtgccaatggaccgatgcctgc

SEQ ID NO: 302397 - DNA, 83 bp, Homo sapiens
gagaaagccagttatccacggactggaagatcaaaagaggattgtggtggtgccatgcagcaagaatcagagagatgcagagt

SEQ ID NO: 302398 - DNA, 83 bp, Homo sapiens
cagaactcccggcatgagcgtgcgcgaaggaagttacacgtcaagtcaaatctgaagatgatgagaaactgaaaaagaggaag

SEQ ID NO: 302399 - DNA, 100 bp, Homo sapiens
aacaccgggtggctggtgcagccgaggtcttcgggaattccagcgaggacgcaggaggagggagacgcactgatgacatcgggccgctcctgcagctcgg

SEQ ID NO: 302400 - DNA, 100 bp, Homo sapiens
cgctgtaagaagcaacaacctctcctcttcgtctccgccatcagctcggcagtcgcgaagcagcaaccatgcttcggaaccaaaaagaagcttcccagag

SEQ ID NO: 302401 - DNA, 50 bp, Homo sapiens
ctttgcaacagaattacagagtatgatgaaaaccagcattggaatcagct

SEQ ID NO: 302402 - DNA, 101 bp, Homo sapiens
ctcgccagcgtctcctctgccaaaacccagggctggaagatgtggcagccggccacggagcgcctgcaggtacctactgtcaacaacgggaagtggaggcc

SEQ ID NO: 302403 - DNA, 135 bp, Homo sapiens
tgtagggagcatagctgctacactgaagatgaagcaaggcccaatgacccaggcggtactaggttttgacaagcttgcatcatgcgtgagtataagctagtcgttcttggctcaggaggcgttggaaagtctgct

SEQ ID NO: 302404 - DNA, 100 bp, Homo sapiens
aaatgctccttctcctggagacgcaactcaaggcaaccaacacaaaaggcctggaccaggtggtggagatgctggggctcctacacagaggctctatttt

SEQ ID NO: 302405 - DNA, 98 bp, Homo sapiens
gaatatggaatccaagggggccagttcctgccgtctgctcttctgcctcttgatctccgccaccgtcttcaggccagatctaattacttgtttggaca

SEQ ID NO: 302406 - DNA, 112 bp, Homo sapiens
ttaaggatgtgcaggatcttgatggtggcaaggagtagtttctctccctggctcatcttgcatgcttgctctgatggaaaaggtcacctggaaaggaactgaggatagcctt

SEQ ID NO: 302407 - DNA, 100 bp, Homo sapiens
ccattcaagctgaacgcacccgctggttgtggaccgtctgccaggcaccacaatgaatgcactggacacccttggtcagactgctttgcatagagccgcc

SEQ ID NO: 302408 - DNA, 100 bp, Homo sapiens
aaaatagcacacttttactctacgcaactgttgctttttcatggtgaatctggattgggaaagtcgacattaatcaactcattattcctcacagatttgt

SEQ ID NO: 302409 - DNA, 74 bp, Homo sapiens
tcttgggacccaccgctgccctcagctccgagtccagggcgaggcccagtggtgattcctgcatagtcctagga

SEQ ID NO: 302410 - DNA, 50 bp, Homo sapiens
cgtcaatcagagcgtcctgtgcgatgccatggacaatattaccaggcaga

SEQ ID NO: 302411 - DNA, 74 bp, Homo sapiens
cctggccccagtgctgcgtccttatcagccgagccgaatccagggcctgaaaacccagaatgaacttgtgtcca

SEQ ID NO: 302412 - DNA, 75 bp, Homo sapiens
gggtctggcggtcacaggggctggcagggacaggctgcgggaggagctgcaggactgaggtacagaggccagggg

SEQ ID NO: 302413 - DNA, 100 bp, Homo sapiens
ctttgaccgagaggctgctggagctcgtgtttggacgcgtgctatacttggtagatcagaaactcaggagtgtcttttctttaatgctaattgggaaaaa

SEQ ID NO: 302414 - DNA, 100 bp, Homo sapiens
cagcatgactcatccccgggagtgttgactattgcagatcccaaccccctgctagactaataagtggagaggaacatttttcaagcaagaagtgcctggc

SEQ ID NO: 302415 - DNA, 145 bp, Homo sapiens
tttgaagctgatgaggaaaattggcaaatctgttactgcagacagatgggaaaaatatttgatcaagcattctcctggtgtgcagcctgcagatgtgaaggaagttgttgagaagggtgtacagactcttgtgattggccgaggg

SEQ ID NO: 302416 - DNA, 75 bp, Homo sapiens
cctggaccgggtctgagcgcggctgcccaggttgacctttctgcgggagacaatgcagatcttcgtgaagactct

SEQ ID NO: 302417 - DNA, 50 bp, Homo sapiens
cgtcagcagcgccaatatgatgtcagacaatgcagatcttcgtgaagact

SEQ ID NO: 302418 - DNA, 100 bp, Homo sapiens
gaagaacaaatcagcctggtcaccagcttttcggaacagcagagacacagagggcagtcatgaggttaacattcaagatggtacatgctgaagccttttc

SEQ ID NO: 302419 - DNA, 100 bp, Homo sapiens
ggaattgctactgctgcctctgtcactcctggtgaccagcattcaaggtcagcccaaggccaaccccactgtcactctgttcccgccctcctctgaggag

SEQ ID NO: 302420 - DNA, 74 bp, Homo sapiens
aataccgtgccctgaggttggacgtggggaatttctcctggggctcagagttatacgctcaacggcaagaaagt

SEQ ID NO: 302421 - DNA, 100 bp, Homo sapiens
tgaaactgtaatgcatgaacagaactcaggagttgtctggccagcttagtgtgaaaagaagagattggacctggaaaagaaactttatgaatataatcag

SEQ ID NO: 302422 - DNA, 75 bp, Homo sapiens
ctgtgtgccccttctccacccagagatcgtcagtatttaaacagatcacatcatgcgtgagtacaagctagtggt

SEQ ID NO: 302423 - DNA, 75 bp, Homo sapiens
cctgttccccggggagaatgaggtggagcagctggcctgcatcatggaggtggataattactgtaccttcctcat

SEQ ID NO: 302424 - DNA, 100 bp, Homo sapiens
ctgaagataggcaacaagatgatgagggcgcggcagtatccttggggcactgtgcagggtacaactccaaaaggagacattggagaagaaccaagctggg

SEQ ID NO: 302425 - DNA, 75 bp, Homo sapiens
gcctggctgagctggagctggagctgtcggaaggatgctgtatgattatgttgaaaggaaacgaaaagaaaattc

SEQ ID NO: 302426 - DNA, 75 bp, Homo sapiens
ttcccagaatgccgagatgatagctccggctcccaccttgtctttgtcccgtcattgagagatgtgcaccatgag

SEQ ID NO: 302427 - DNA, 98 bp, Homo sapiens
gcggaatccaccggcgcagtttcatctagcgactgaggtctctttattactatccacgatcgagggcatattgcttcagttctcaatgcatggccaga

SEQ ID NO: 302428 - DNA, 109 bp, Homo sapiens
gtccggagagcggtgggctgacctgttcctacaccttgcatcatgccagctttgtcaacgggatctgggagtgacactgttaccttatcccatatcacacaactggtcc

SEQ ID NO: 302429 - DNA, 75 bp, Homo sapiens
tcctgcccttacacctgtgctcctatacaagattaacattcagtatcacaaagtcgtgaagaaaggaaaggccaa

SEQ ID NO: 302430 - DNA, 51 bp, Homo sapiens
gcttcacctgtgcagcttgcaagcagagtaattctcagagcttctctacat

SEQ ID NO: 302431 - DNA, 75 bp, Homo sapiens
ttttggaaagacttcctcgcgacttcttctcccaccaggaggaatagactcaagtatgcgttgactggagatgag

SEQ ID NO: 302432 - DNA, 104 bp, Homo sapiens
ctcggcggccgctctgcctgcgcgctgctcctgctctgctacctgggggatatgagactttctactcggaatatcctgagtgttgcgtggatgtaaaacccatt

SEQ ID NO: 302433 - DNA, 75 bp, Homo sapiens
ggaggaacctcctctggaaatgaacactgggggtgctgataagactgtgaaaggcccagatggactgaccgcctt

SEQ ID NO: 302434 - DNA, 80 bp, Homo sapiens
aggccctgcagaccctgtggtccacgcgggagcggaagcagcaaacggggattcagcgtccgatcctttggaacagggac

SEQ ID NO: 302435 - DNA, 75 bp, Homo sapiens
ggatgccctgcagtacctgcagaaggtctctggagacatcttcagcagagacgaggtcttgctacattgtccagg

SEQ ID NO: 302436 - DNA, 73 bp, Homo sapiens
ttacgcagggttacatatattttcacaagttttacatggacggatggcaaattaaacagcagtaacttggtaa

SEQ ID NO: 302437 - DNA, 100 bp, Homo sapiens
gccgaagccccgccagcccagctaaagcagacggctcgcactgcgacccgaaggattttcagttcccaaacccgcttttatctcgtgggtggaaggagaa

SEQ ID NO: 302438 - DNA, 80 bp, Homo sapiens
gtagccctccttgcgcctccgattcccagtttaaggaagaaatctctaaacgttttaaatcacatactgaccaacttgtg

SEQ ID NO: 302439 - DNA, 90 bp, Homo sapiens
ccaggagtcagtttattactggaaagtacgaaaccagcactggagcctcattatggaaagtgtggtcccatctgacaagggaaattatac

SEQ ID NO: 302440 - DNA, 83 bp, Homo sapiens
gcttcgtctctcccgccatcatcttcgagtgtggccatctggggccgtgtggtatttgccactcaggagacatgtccctatga

SEQ ID NO: 302441 - DNA, 101 bp, Homo sapiens
tccgggaggctggaaaaggaggatctggggacccggatcagccgcctgacccggcgggtggaggagatcaagatggaggacgttattgaggatataatcgg

SEQ ID NO: 302442 - DNA, 100 bp, Homo sapiens
gaggtctatgagaacaagacggacgtcatcctgatcttggaactatgaagatgacgccaacagactcggggagaaggtgatcctgcgggagcaggtgaag

SEQ ID NO: 302443 - DNA, 100 bp, Homo sapiens
gaattaccactaccaagaagggatctatcacctctgtacagctgaagtcgttcctccgggagtgcaaggtggccaactactgccggcaggtgcagcagct

SEQ ID NO: 302444 - DNA, 90 bp, Homo sapiens
cagcccccgggcacgacctctcggacacggtgcaggcagtgacttctgacagctctctccatggaaggaggcggcggccgcgatgagcct

SEQ ID NO: 302445 - DNA, 75 bp, Homo sapiens
ctgctgacgtgcactgtgcccctggctgggggctcgcagggtggctacaacctccgcgccctggctgaaggcgtc

SEQ ID NO: 302446 - DNA, 75 bp, Homo sapiens
tataatacattccatgggaggagtttaggcaggaatatttagatacactctacagatatgcaaaattccagtacg

SEQ ID NO: 302447 - DNA, 48 bp, Homo sapiens
gggccgccgcatccacagctaccgagcaataccaagtttccaggcccg

SEQ ID NO: 302448 - DNA, 100 bp, Homo sapiens
cggcgcccgctggccgggctggctgcggccgccctgggccgggccccaccggacggcatctctgggaaaggacctggggctggtgaggggcccggaggag

SEQ ID NO: 302449 - DNA, 83 bp, Homo sapiens
ccagcggcagccgagcccgcccgcgcgccgtgttatagttttgccgctggactcttccctcccttcccccaccccatcaggat

SEQ ID NO: 302450 - DNA, 90 bp, Homo sapiens
ggcgcccgccaccggctccctcgggagctcatcttcgtggggcgtgaggagtgtgagctcatgctacagatatcagttttagagaatgtg

SEQ ID NO: 302451 - DNA, 100 bp, Homo sapiens
gcagagagagagagaagagaggagattgcagcagcgaaccaatcccaagtattcccggcaggagcaggaggaggagggccggaagcggtatgaagcccag

SEQ ID NO: 302452 - DNA, 74 bp, Homo sapiens
tgaccttcgagtacagagtctccgagatctgtgtgccaatgtcagtggaatttgaggaactcctgaaggctcga

SEQ ID NO: 302453 - DNA, 90 bp, Homo sapiens
cttaaaacgggagagagtcagaatcaactaggtcagaatggcggcagtggagcatcgtcattcttcaggattgccctactggccctacct

SEQ ID NO: 302454 - DNA, 82 bp, Homo sapiens
agcccagagcccttggggcttccccaaagccagaggtgagaagccctaccactgcaactgggacggctgcggctggaagttt

SEQ ID NO: 302455 - DNA, 100 bp, Homo sapiens
ggtgaatgctgctaaaaacaagactggggctgctcccatcattgatgtggtgcgatcggtggacccccaaaagtacaagggcatatttaacggattctca

SEQ ID NO: 302456 - DNA, 101 bp, Homo sapiens
aaagagatacagggcagaggaaaatgcaagaagactgatggagcaggcttgcaatattaaacacacgacggttctgccctttatattaatcgagatgagga

SEQ ID NO: 302457 - DNA, 75 bp, Homo sapiens
ggggccttcggaaagagagagcaggctgaagaagaggaggaggaggaggattccgaggtgcagggggagcagccc

SEQ ID NO: 302458 - DNA, 100 bp, Homo sapiens
gtacctctcagaagagtgagagagagctattagagattgtgaagaagaatttcgatctccgccctggggtcattgtcagcatggcggacaccgacctgtt

SEQ ID NO: 302459 - DNA, 100 bp, Homo sapiens
actggaggagatggtcaagaatcgctctataagatctgcaaggtgctggagaatctggtaaaagcaccattgtgaagcagatgaggatcctgcatgttaa

SEQ ID NO: 302460 - DNA, 75 bp, Homo sapiens
tttcaagaaacctttattctaccaatcctagaactcagtcaatcgagtatgtccgtggttcagaccctgtattaa

SEQ ID NO: 302461 - DNA, 122 bp, Homo sapiens
gggtggtctggagaccatggagaccctcacggagctgggcgacgagctgaccctgggagacatcgacgacctagaggatcaagacataatgggagcatttttagacaagccaaagatggaaa

SEQ ID NO: 302462 - DNA, 102 bp, Homo sapiens
gacctagctcgggaccggcctggagatggagttcgactgcgagggcctgagacggctgcttggcaagtgagctgaagagacgcctgaaagctgagaagaaag

SEQ ID NO: 302463 - DNA, 98 bp, Homo sapiens
cccagacatacgatgggagagttgcagtgctggagaatctggtaaaagcaccattgtgaagcagatgaggatcctgcatgttaatgggtttaatggag

SEQ ID NO: 302464 - DNA, 97 bp, Homo sapiens
ccatcccgtgccctcgctctgagctgcgcctggacctggttctgccttctggacaatctttccgtaattataaagtggactgtgcctgtcacaaggg

SEQ ID NO: 302465 - DNA, 100 bp, Homo sapiens
gcagacgttagcgtgagtgatcactctcaatcccggggcaactacactttccaatgcagtgtcttccctggcaagcactggtctatctctgaccaaagtg

SEQ ID NO: 302466 - DNA, 51 bp, Homo sapiens
acgaggtgcgccggctgatcgctcttgcaagcttaggatatgaaaagagct

SEQ ID NO: 302467 - DNA, 100 bp, Homo sapiens
tcgacgtcttgcctgtgtcccacttgttcgcggcctataggccaggtctctgcctcggaagtgagtgcttctgccatcgtcccctgcctgtcccctcctg

SEQ ID NO: 302468 - DNA, 100 bp, Homo sapiens
gaagagataggtcagctcaaacagttaatggagctgatttccatggtgtcagtgattcatattcctgataggacttataaactatcctgcagaatattgt

SEQ ID NO: 302469 - DNA, 117 bp, Homo sapiens
gctgtctcttccccccagggcagagtggagtatctggtgaaatggagaggctggtcgcccaactgcatcttcctcccgtgaggctggccgagctccacgctgatctgaagatacagg

SEQ ID NO: 302470 - DNA, 100 bp, Homo sapiens
agatgctgcccgtgtaccaggaggtgaagcccaacccgctgcaggacgcgaacctctgctcacgcgtgttcttctggtgtggctggatctcctaaaaccc

SEQ ID NO: 302471 - DNA, 100 bp, Homo sapiens
tcaggcctttcccaatattcatccacctcagataccagcaactcccccatcgtatgaatctgttctagtaaataccgcttgctgtgttttgatgttggtg

SEQ ID NO: 302472 - DNA, 51 bp, Homo sapiens
gagcgaagagctcggaccaagcgctcaggataagaaactctttaagcctcc

SEQ ID NO: 302473 - DNA, 75 bp, Homo sapiens
cgccgtcccccagctgcgcaaccctaggaactctcgggttgggtgggactatatcagcatacaagatagtaccag

SEQ ID NO: 302474 - DNA, 75 bp, Homo sapiens
aaacttcttaattctgaacatgaagatgttcaggaacaggacttgattattcttagaaatgcacttgacctgctt

SEQ ID NO: 302475 - DNA, 75 bp, Homo sapiens
atcgtgaccaagatgtggaacagcctttctttgaggggatgtcgcagtccagctcccagacggagattggcagcc

SEQ ID NO: 302476 - DNA, 96 bp, Homo sapiens
tgccaggccagctcgaagaaggcgagcagggtgcgggagagccccttgcagaagacgccgtacgagacgactgcaagaacattgccaacatcatga

SEQ ID NO: 302477 - DNA, 100 bp, Homo sapiens
gaaatggaaattggcctataccaggagagcggatcccagacgtggctgcattgtccatgggcttctctgtgaaagaagttatcaatactctggctgacca

SEQ ID NO: 302478 - DNA, 99 bp, Homo sapiens
gtacgatggcagctgggccctggctgatgtcatgagccaactcaagaagaagggtcttactgaagtaacacaaagcttaaaaatggaaaatgaagagtt

SEQ ID NO: 302479 - DNA, 145 bp, Homo sapiens
gagttgcagtgtctctttcaacagatagaaaggcaggagcagcttctggatgaaatacatcgtgagaagagaggactttggacttgggccggaactacacatcagctctcctgggcctctagcttgccaactacggacactgtga

SEQ ID NO: 302480 - DNA, 100 bp, Homo sapiens
aataaaagatcttcaaaaggagcagaaaactttacaggaaacccagcgtttgctggcagaaccagttcctggcatcaaagccgaaccagatgagagcaac

SEQ ID NO: 302481 - DNA, 99 bp, Homo sapiens
ggctcagcgggctctgaacacagcatcaatggcaggaggtttcctgttgaggccttggacaagattcgctatgagagcctgacagacccttcgaagttg

SEQ ID NO: 302482 - DNA, 83 bp, Homo sapiens
cctttatgaaccagtgtatcccaagtgagcggagaattagagtacatacactttgtttgccagtggtaagttcactagcagat

SEQ ID NO: 302483 - DNA, 100 bp, Homo sapiens
aaagccccacatttgcagctcattgaaggaaaggcagaggaacggactagatacttctcagtcttctacctgtccatcaatgcagggagcttgatttcta

SEQ ID NO: 302484 - DNA, 83 bp, Homo sapiens
gtgaataaagaagtggagcgtgtcctgaaggagttccaccaggccgggaagcccatcgggatttttagactctgaggagcagt

SEQ ID NO: 302485 - DNA, 75 bp, Homo sapiens
tgccggcccggcggctgctgctgctgctgacgctgctgctgcccggcctcggggaataagttcccctgtcagtgg

SEQ ID NO: 302486 - DNA, 95 bp, Homo sapiens
gaatcagaacgcaagcaaaatgcgttaggaaaatgtgatgcatgtctcagtggctaaatttattgtgaagaaatcagaagatgaagaagacgccg

SEQ ID NO: 302487 - DNA, 90 bp, Homo sapiens
ggcctcagcaggcggggaagatgaaaggtgggtaattccagaattgattggccataccattgtcactgtattactgctcatgtcattgca

SEQ ID NO: 302488 - DNA, 50 bp, Homo sapiens
caggatacagcagaagcattagcaggtccggtttatcactaaaatatggc

SEQ ID NO: 302489 - DNA, 75 bp, Homo sapiens
cttcggagcagcagccctgtccggcatctgtcttgagctcccagcaagaacaaattggagctctggcagatcagc

SEQ ID NO: 302490 - DNA, 90 bp, Homo sapiens
acaggggccactcagagtcgcccgagaaatcatgatgctgccgccaccgccgccaccacggagcgagaagcccagatagacgccccggcg

SEQ ID NO: 302491 - DNA, 75 bp, Homo sapiens
aaagaagactaattagcccatataaggtactgcttaggatgaatatgatttggagaaattccatttcttgtctaa

SEQ ID NO: 302492 - DNA, 89 bp, Homo sapiens
ttgtacttggattcagcaaggaaccttccgaggactactgagcccagccaggctgtatgccattgctgccaaagaaaaagatattcaag

SEQ ID NO: 302493 - DNA, 75 bp, Homo sapiens
taatcctcaatttaagcctgatctaacccctagaaacaggtccagtccaggtgcagcagcaaggagaacattctc

SEQ ID NO: 302494 - DNA, 82 bp, Homo sapiens
cgcgctgcgcatccccgcggacgccacagcgctttccagggtctccctccactgctgtagtaacccgggtccggggcctcgg

SEQ ID NO: 302495 - DNA, 75 bp, Homo sapiens
tgtcatcctttttatgaatctgtcatctcaaatccttttgtcgctgaggatgggcttctttctcaaggttattct

SEQ ID NO: 302496 - DNA, 82 bp, Homo sapiens
cgaagaatctgtatctcaaaatgtggaagggacccaggctgattcagaactgataaatttcaaacggaagagagtggcagca

SEQ ID NO: 302497 - DNA, 103 bp, Homo sapiens
cctgtccccgggggcgccatggcgaccggagcgaacgccacgccgttggaaattcattgagtttgaagatgctctggaacaagagaagaaagagctgcaaatc

SEQ ID NO: 302498 - DNA, 100 bp, Homo sapiens
tgagagccacgtgtgccgcgctctgggcacagccttggaaagtcaggaccgcgacggcagcagagcagaccccaggagcaagcacaagttcaaaatccac

SEQ ID NO: 302499 - DNA, 100 bp, Homo sapiens
gctacccgagcggcggcggcggcagcagcggcagcggcaagcaccgaagacccactaccttatctgagacaatgggaaaagctgacatatggcttatgcg

SEQ ID NO: 302500 - DNA, 74 bp, Homo sapiens
tgagaaatggtgcccttgttgatgccagagccaggtcactgtgtgcccagtattctgcagacaaacgagaagat

SEQ ID NO: 302501 - DNA, 100 bp, Homo sapiens
gaaaaagataagaaggaaaagaaaccaactgtcagtgtattttcaatggaagcgttgttgacgaccatggacatcatccacgatggatttggattcatgc

SEQ ID NO: 302502 - DNA, 100 bp, Homo sapiens
cggagtgtaggaagaggcactgctgagggggcgcgaggggaacggaggccagagctgcgtggagcccacagtgaccatctccccatccaggacagaggcc

SEQ ID NO: 302503 - DNA, 96 bp, Homo sapiens
ggaaaatactcagtttcctgcttactgcttcattatggattatacagataataccagaagatttcagcatagcagataaaatacagcaaatcctaa

SEQ ID NO: 302504 - DNA, 50 bp, Homo sapiens
gtctacataacaagcgtgctctccgaagggtgaaacttcctacatccgag

SEQ ID NO: 302505 - DNA, 74 bp, Homo sapiens
cttattacgccgtctccaagatgtagctaatgaccgtggttcccactgagccaggcgttgtggggcagatgatc

SEQ ID NO: 302506 - DNA, 50 bp, Homo sapiens
tgtggaggaaaacaacttcgagggcagaggcgtgatggtgggcatgggtc

SEQ ID NO: 302507 - DNA, 100 bp, Homo sapiens
attgacggaatgtgcaaagtagcaattaactggtctggagggtggcatcatgcaaagaagggcggagaaactcatcatccacctgcggaaacatggcatc

SEQ ID NO: 302508 - DNA, 100 bp, Homo sapiens
tgagaatttatcctcaagagtcagctggcagaggcatttcatccttcatgaagccattcaggattttgaattgcatatgagtgcttggctcttccttctg

SEQ ID NO: 302509 - DNA, 83 bp, Homo sapiens
agagttccctgcaacccgtgcttatgcagatagttactattatgaagatggagcggacaaggcaaaatctcagcaagttcgga

SEQ ID NO: 302510 - DNA, 83 bp, Homo sapiens
agtacaccacgaagggtcacacaaggctgttcacggaagaccaggatgtagatgagggacttgtctatgacactgtattcaag

SEQ ID NO: 302511 - DNA, 74 bp, Homo sapiens
cgagatctccttggaagcagaacccatagaactcgtggaaactgaccatgctcgacagctgaccaaggccatga

SEQ ID NO: 302512 - DNA, 75 bp, Homo sapiens
tcaactactagatgactttaaaatatcaggagttaatggaacacccaaaagttttggaaggtctccatcaagaaa

SEQ ID NO: 302513 - DNA, 73 bp, Homo sapiens
aatgctagaagctatcaaagcccttgaagtcaggacaatgaaaagcgaaccccattgcacgccgcagcttacc

SEQ ID NO: 302514 - DNA, 101 bp, Homo sapiens
ataacagagagccagagctctcccccacctgttattgatttgataacaataaagctgagtgaaatgcgactatacaggccaggggttatcaccatgcaagc

SEQ ID NO: 302515 - DNA, 73 bp, Homo sapiens
ttgtttctctctgcctgatttctcctgaatttggaaactattttgttgctaaagattatgtgcgactgatgaa

SEQ ID NO: 302516 - DNA, 88 bp, Homo sapiens
cgcatcccattttttatgtccacaggtacaggtttgcagattccgccagcagcacagcaagctctacagatgagtggctctttggcat

SEQ ID NO: 302517 - DNA, 75 bp, Homo sapiens
aacttggccaggctggccccgagcggaactggagaaagctgaggggcagctgcaatgactctccgcacggtatta

SEQ ID NO: 302518 - DNA, 100 bp, Homo sapiens
cgggtcagttggcagccatcaaagttatggatgtcactgagttccctgtattgaacactgatatacaaggaatgaatagaagtcaagaaaaacagacctg

SEQ ID NO: 302519 - DNA, 90 bp, Homo sapiens
tttcccgctggcgcgcagcctcagctaggtttgcaaagattcatatcagtgtatctgaacctattattccattcagagaaacaatcacaa

SEQ ID NO: 302520 - DNA, 75 bp, Homo sapiens
gagcataatagaagtactgcgttttgatgatggagggctactacagtgcacttggaggctcctcagctcttcata

SEQ ID NO: 302521 - DNA, 98 bp, Homo sapiens
cccgcctcggcctcccaaagcgttgggattacaggagtgagccaccgcgcccggccggtggtgaagaaggtgaagtccatgcagatgttccacatgcc

SEQ ID NO: 302522 - DNA, 75 bp, Homo sapiens
cggaaggcgcgggcaggagcctggcgaggatgcaccttcccctgccttggaaagataactgtgtccagaggaccc

SEQ ID NO: 302523 - DNA, 100 bp, Homo sapiens
caagtacgagcgacaggagttcatctacccggagaagcaggagccctactcggcaggtcaccgacgatgagggcgcacctgctgtcctggagcttccgat

SEQ ID NO: 302524 - DNA, 136 bp, Homo sapiens
attttccttgacctttaggtgcttttatattcatctcaaaaacaaaattctgaactcaggacttggcaaggaactgggaacagccaggtgccccaaagcaaatacgcggagctgctggccatcattgaagagctgg

SEQ ID NO: 302525 - DNA, 51 bp, Homo sapiens
cggagcagcttcaggaacatgctccagtaatgttaaagtagagactcagag

SEQ ID NO: 302526 - DNA, 128 bp, Homo sapiens
cgagaacgaagtaggccgtctcgctctgggtctccaggcccgcgaccgtccgccagtcgtcccgagggggggccctcagcctcttggccttgaacgggctgttcatcttgattcacaaacacaacctg

SEQ ID NO: 302527 - DNA, 100 bp, Homo sapiens
atcaaatcagtcactgggatttgggaagttccttcttctttgctggcactgttattacaaccatagcgccagcagccctgtggtggcgacgacgatggac

SEQ ID NO: 302528 - DNA, 101 bp, Homo sapiens
aggaaattgtgatctgcgatcgagcctcggtcaaggagtgtcctaaccgctttggagagcgataacttgagttaaagcacctgtctgtgcctggcctccag

SEQ ID NO: 302529 - DNA, 82 bp, Homo sapiens
ctatcgtctatcattggatgaagtggctccggagatattggaaccaaccagatggctgtgtgtgccaaagcacagaacaaac

SEQ ID NO: 302530 - DNA, 58 bp, Homo sapiens
gcagaaaatgacagatggccgtggattcaggattgtgcagactggtgcttaaaatgga

SEQ ID NO: 302531 - DNA, 75 bp, Homo sapiens
atgagtcatgtggcagtggaaaatgcgctcgggctggaccagcagggactggtgattgcagctggaagtgcccat

SEQ ID NO: 302532 - DNA, 90 bp, Homo sapiens
aagactacaggagaattcggtttgtaggtcgtcagaaagagcagcaacaactccaggcccagcatttatcacatggacatggtctccccg

SEQ ID NO: 302533 - DNA, 50 bp, Homo sapiens
cagcaagctgttcaatgaggagatggaagtttactgttctgattttcatg

SEQ ID NO: 302534 - DNA, 88 bp, Homo sapiens
tccccatccttggacaagcgcctcaaactcataggcggggtttcaccatgttgcccagactggtcttgaactcctgagcttaagcaat

SEQ ID NO: 302535 - DNA, 75 bp, Homo sapiens
ctgcctaggcattttgctgtctcctcctaatacggtgttggggaaccactgattcaagtatacacatagaccttg

SEQ ID NO: 302536 - DNA, 90 bp, Homo sapiens
gtctcctggtgaccgagcacccgcctccgggcatcttcaactaatcatattctaagaactcagccactcaggtatccaccatggtgctgg

SEQ ID NO: 302537 - DNA, 75 bp, Homo sapiens
tccatttttgccaaagtactctgctggattagaattacttagcagtgagaaagatcagtctaaagaaaaggagaa

SEQ ID NO: 302538 - DNA, 74 bp, Homo sapiens
tctacgggatctcatagcagattcaaatccaatggcatcctctggtatcacgattccaaaacccccaaagccac

SEQ ID NO: 302539 - DNA, 100 bp, Homo sapiens
cggcccggagcccccagcgcagcggccgcgggccccgtggttatgaatgtgcttcagtttcataatgcctcctgctatggcagacatccttgacatctgg

SEQ ID NO: 302540 - DNA, 82 bp, Homo sapiens
ctccaaagaatcctgaaccagacaaggtgaagtaagactcaaatgtcttactgctctacaagggctttattataacaaagag

SEQ ID NO: 302541 - DNA, 99 bp, Homo sapiens
gacgacagatgcctgtgagcagctctgcgacccagaaaccggcatacccagagtatcttatcacttaccagatcatgaagccagaagccccttcccaga

SEQ ID NO: 302542 - DNA, 82 bp, Homo sapiens
taaggattccaagtaactcttatttggtatcatgatattagctggtttgacatcaagtcatttgtgagtcatcagatcttct

SEQ ID NO: 302543 - DNA, 80 bp, Homo sapiens
gtgccgcaccgaggcgagcaggagcagggaacagcatcaagatggtgctcatgtggaccagtggtgacgccttcaagacg

SEQ ID NO: 302544 - DNA, 90 bp, Homo sapiens
aggaagcccttccgcggaccgaaagattgaaagtggagctgtttggaaacaagtctaccaagatcttggaatccctgtcttaaattcagc

SEQ ID NO: 302545 - DNA, 97 bp, Homo sapiens
ttcaattttggggctccctcgggcacctccggtaccgctgcagccaccgcggcccccgcggccccttccaaatgacaaaaccttactctacaatcca

SEQ ID NO: 302546 - DNA, 110 bp, Homo sapiens
cagaaattgccggtctgggagttgggggcaaggagaagatcctgtattctaccttgtaaatactgttatttgtatatactgtaaatgatgacatcggtgggcactaaccg

SEQ ID NO: 302547 - DNA, 100 bp, Homo sapiens
atctccagcgccggcctcctcagtgcgaagaagctgcagccgcacctggccaagggactccagtgggggtgactcatgtgcttctgaggaggaaccaacc

SEQ ID NO: 302548 - DNA, 100 bp, Homo sapiens
cccaggatgtgagcaacacgggaccggaatgaatctgaagtctgctgcagtaaaacacagaaggctttaaaatgttttcttgcataaaattcaaaacttt

SEQ ID NO: 302549 - DNA, 100 bp, Homo sapiens
cgactacactttgggagtgaggacagccaagggtcggagcacctcctcaatggacaggccttctctggggagcatggacaaggacagcccggaggtccac

SEQ ID NO: 302550 - DNA, 90 bp, Homo sapiens
tctgcggaagtgcagctgcctcagttcttagcgcaggtgaaggtaggcaatgaagttgctacaggaacaggacctaataaaaagatagcc

SEQ ID NO: 302551 - DNA, 74 bp, Homo sapiens
cctgccacccttcaaacctcaggtcacgtccgaggtcgacacaaggtggactttgaacagctgactgagaacct

SEQ ID NO: 302552 - DNA, 50 bp, Homo sapiens
cggactcttcttcgccttcgagctcgcgatgcctctacacaagtatcccg

SEQ ID NO: 302553 - DNA, 100 bp, Homo sapiens
gaactgagcccaggccacagtaccctattcacgctctgtgcttgtgccaaggatatgatggatgatatctgtcaggagcaatttctagagctgtcctact

SEQ ID NO: 302554 - DNA, 80 bp, Homo sapiens
gttaccatctcacccaacaacaagcccatattcctgcagctgcgctagacttatttgattacatgcttgccttggatcct

SEQ ID NO: 302555 - DNA, 74 bp, Homo sapiens
ctcctaggaggaggactagatagtctggtctgggaggggctgaacgtggtgaagacaggccgagtgatgcttgg

SEQ ID NO: 302556 - DNA, 96 bp, Homo sapiens
gagactacaaggacagcagcgactttggggcccgtcaccctcagatgttctcaaatagtgatgaagctgtaatcaataaaaaacttcccaaagaac

SEQ ID NO: 302557 - DNA, 98 bp, Homo sapiens
tgaacttataatcgtcactggattgccaaatttgagtttcatcatggtgactatgaaaaacagtttctgcatgtactgagccgcaaggacaagactgg

SEQ ID NO: 302558 - DNA, 100 bp, Homo sapiens
cggggctaccggatcggtcggaaatgtactatactggcaattgctggagaagattttgcaattgttgcttctgatactcgattgagtgaagggttttcaa

SEQ ID NO: 302559 - DNA, 98 bp, Homo sapiens
tgaaacacagtcgaaaagaatactgtgaattatgcaagcacagatttgcttttacaccaactcatgatggagcagtccaagaagtcctccctcatggt

SEQ ID NO: 302560 - DNA, 100 bp, Homo sapiens
caaagccccaagtgccgcagacttgtctgagattattactgaagatttcattgctacatatcaggccaattatggcttctctaacgatggcgcatctagt

SEQ ID NO: 302561 - DNA, 98 bp, Homo sapiens
ctgtattgagtttctctttgagatgattggactgctctatccagcatcattgagaattgcaccatgccaaactacaaactcacttattttaatatgag

SEQ ID NO: 302562 - DNA, 96 bp, Homo sapiens
cttcaatttccatctttaagaagaaactcaagggtcagagtcaacaagatgaccgcaatccccttattacagtacctatagccaagctgcagcgca

SEQ ID NO: 302563 - DNA, 110 bp, Homo sapiens
gttggcgtggcccagcatctaactaacacggtttttattgacagagctctgatagttgttccttgtgcagaagcattgatatgaaccatggacaagtatattctgctgcc

SEQ ID NO: 302564 - DNA, 71 bp, Homo sapiens
agacagaagtggggagaagcggagggattgggggggtggggcggggccccccacctttctgacatcagcgc

SEQ ID NO: 302565 - DNA, 87 bp, Homo sapiens
gctgggattataggcgtgagccaccgtgcctggctgaagaccattcctcaagaattttgtatccaaggcccaaaagtttgttaccca

SEQ ID NO: 302566 - DNA, 83 bp, Homo sapiens
ctgtcaccatttctttcacaaaccttgtgtctcaatttggctacaaaagagaaccatggagtctggcagtaccgccgccagtg

SEQ ID NO: 302567 - DNA, 82 bp, Homo sapiens
cagtatttgaggagaaagcatttgagccctatgagtttgtctctctggaatggctgcaaaagtggttggatgaatcaacacc

SEQ ID NO: 302568 - DNA, 75 bp, Homo sapiens
catcagctcggcagtcgcgaagcagcaaccatgattgacgtgagtgaattcagatataactcaagcttgttagag

SEQ ID NO: 302569 - DNA, 100 bp, Homo sapiens
aggacaaggaagatggggagccaaagaccaagcatctcagagaagaggaggaagaaggcgagaagcacaggcctcgaaaaagcccaagacagcagaagca

SEQ ID NO: 302570 - DNA, 100 bp, Homo sapiens
cagttcccaggatctgcataaagatggatgggaaagtaccagtctcagtgaggaggaggatgctgatggtgaatggattgatgtgcaacactcttccgat

SEQ ID NO: 302571 - DNA, 100 bp, Homo sapiens
ccgagactctccttgcttggaattctgcccactctgcggagttagcagtcacgacctccagcacaggctaggcagctggaagagaaagaccgagtgctaa

SEQ ID NO: 302572 - DNA, 100 bp, Homo sapiens
ttttagaaagagagctgcaggaactgcaagatagtctaaatgctgaaagggagaaagtccaggtggatttcattgactgggtagacaacatgtggccaag

SEQ ID NO: 302573 - DNA, 87 bp, Homo sapiens
tacctgcggaccagtaacctccaagaggatcaggtcatccagctgatgaacgcgatcttcagcaagaagaactttgagtccctctcc

SEQ ID NO: 302574 - DNA, 100 bp, Homo sapiens
agcagtggattaatctgaaaaaggccaggacgactggaatgggaccaggccgtcgctgaaggcccctcctgctaggccagtgaagggagcatacagagag

SEQ ID NO: 302575 - DNA, 83 bp, Homo sapiens
cgcctgcctccgccggctacagcgggaagagcggtggtctttgggaagaagcttcctgcctttgccaccatccccatccacca

SEQ ID NO: 302576 - DNA, 82 bp, Homo sapiens
ttacttcagaattaccagtgttacactgtcccctttcctccaacccaacggcttactttcaaggaagtatttgagaatggga

SEQ ID NO: 302577 - DNA, 101 bp, Homo sapiens
agcacaaagcccacagcacagccccggtgcacagacgcggtcacatgcacgcccgtccacacacacccagagaagaatccccagcacaagatagaatatag

SEQ ID NO: 302578 - DNA, 75 bp, Homo sapiens
cagtacaaaaattcttcaagaaatctaagaggtctgcggggtttccgagaggctcgccgggatttctggcggggg

SEQ ID NO: 302579 - DNA, 83 bp, Homo sapiens
cttcgtcaagaccgtgacggagggtggtgcggcccatcgggatggcagacaatgcagatcttcgtgaagactctgactggtaa

SEQ ID NO: 302580 - DNA, 100 bp, Homo sapiens
gacctggctagaagcagagacaccaggacagaaaagacagtgttctgctttcatggagttcacagaagagtcgaggagctgaagaaacacttaaattctg

SEQ ID NO: 302581 - DNA, 74 bp, Homo sapiens
ggaggctgaggatatggtgcagaaggtgcacagccacagcgccgagatggaggaattggtggagagaaggcgca

SEQ ID NO: 302582 - DNA, 100 bp, Homo sapiens
gccctcggacttcatctcattgctcagcgcggacctagacctggaatcgcccaagtccctctactcgcgaggtttattaatgcccggagaagaatagtgc

SEQ ID NO: 302583 - DNA, 101 bp, Homo sapiens
gtcgctggagcgggcggagctgtgcgagagcctcctcacttggatgaagcagatgatgatgatgatccagaatataatttcctggaagacctcgatgaacc

SEQ ID NO: 302584 - DNA, 100 bp, Homo sapiens
ctcaatgcctccaacctcatctaccccatctttgtcacaggagctgagtgccctgcacagctggttccagacactgagtacccaggaaccatgtcagcga

SEQ ID NO: 302585 - DNA, 100 bp, Homo sapiens
gacagagtggcccctcctctgaagatcgacctactggattagttgtactgttacaagcatcctcaggtacaactgtaactgctttaagattatttaagaa

SEQ ID NO: 302586 - DNA, 75 bp, Homo sapiens
ggccgaggtagaggcagtggcgcttgagttggtcgggggcagcggcagaaaaggatgcgcctccacttagcaagg

SEQ ID NO: 302587 - DNA, 75 bp, Homo sapiens
cgcctggctcggagcagcagcctctgagtgccctctggtggtcagaagatgctgtgctgtctcgttaggatgaat

SEQ ID NO: 302588 - DNA, 124 bp, Homo sapiens
agtccctccacgcggaaagaagtaccttcgccggtcaccggctcctgcaggggtatatttacttctggcacatgggaagagaaatcagatgaaatttcctttgctgacttcaagttctcagtca

SEQ ID NO: 302589 - DNA, 83 bp, Homo sapiens
ccgggcggaggcgtcagagccgcgcaccgcggacgagcaggcccaggattttttatcaagcagaaatgcatcgaacaacgaga

SEQ ID NO: 302590 - DNA, 88 bp, Homo sapiens
gtgaaggagcagatttacaaactggccaagaagggccttactccttcacagatcgttaactctgctgtttgctgcatgctgcatgaga

SEQ ID NO: 302591 - DNA, 100 bp, Homo sapiens
acatttctgggtgacactcaacaggattcccgaaaatgcatccgatgcagatttatggctcctgaacagttgcactgtaaaaaacccagctgaagaccac

SEQ ID NO: 302592 - DNA, 88 bp, Homo sapiens
aaagaaagaagacaaggtggaaaagttgcagtttgaagaggaggactttattgagaggatccagaatccagatctctggaatagctac

SEQ ID NO: 302593 - DNA, 83 bp, Homo sapiens
caaacagatgactacccagggagaggaattacgggaacagaaagaaaagtccgaaagagctgatcaagatattttggaaacta

SEQ ID NO: 302594 - DNA, 100 bp, Homo sapiens
cagaacgcggctcccagccacaccaagttcagatgggatgtaatgaccgaatttccccaagaaagaagctccatcagtttggtcagcctggctggatctc

SEQ ID NO: 302595 - DNA, 100 bp, Homo sapiens
ggagctctccgagaagcaatgaggatcagttcgacagcttagacaagcatacacaatggggaattgacttcttggaaagatatgccaaatttgttaaaga

SEQ ID NO: 302596 - DNA, 73 bp, Homo sapiens
gtccaaggatgaatcccagtccctgttacggcaagaagtggtggagaaatatgaaatctatggagactcagtt

SEQ ID NO: 302597 - DNA, 82 bp, Homo sapiens
ctcaggacccctgctacgtggagaaaacctcggataaggctaccggctctctgaccagttccacgacatcctcattcgaaag

SEQ ID NO: 302598 - DNA, 100 bp, Homo sapiens
tgcacacaacatacagacccacagagacagcttggatttgctgttttttgctccactcaagcctgttagaatcaccatggaatacagctccagtgggaag

SEQ ID NO: 302599 - DNA, 74 bp, Homo sapiens
gcacttggagtccggacatctgaaacttggcattgaagttgatatcgatgtggagcacggagggaaaagaagcc

SEQ ID NO: 302600 - DNA, 50 bp, Homo sapiens
gacaggtcccaccccaacaagcaggactggcagccaccctttgctgtgga

SEQ ID NO: 302601 - DNA, 100 bp, Homo sapiens
cgaggaggttctaggacctgctacgagaacccttaggagaaatcttgagagtggacagcaattgtgaagatcgccagagagttctgtgtttcatcaccgc

SEQ ID NO: 302602 - DNA, 100 bp, Homo sapiens
gtcgggttattcgagtgaccgagaccgcggccgggaccgagggttgaaccatgattccggtgacagagctccgctactttgcggacacgcagccagcata

SEQ ID NO: 302603 - DNA, 100 bp, Homo sapiens
cgcttcagtccgaaggaggaagggaaccaacccactttctcggcgccgcggctcttttctaaaagtaataccgtagcagtaggcaggacagttccaattc

SEQ ID NO: 302604 - DNA, 74 bp, Homo sapiens
gcggatctttgaccccagaacaaagccgcgggcctctcagggagaaacaaaggcagcgctgccctcgggggagc

SEQ ID NO: 302605 - DNA, 100 bp, Homo sapiens
tccaaactgtgttgtttcagctgtattaggggactcatgaagtggcagctaagccctgtccagtggccacccgtcagccaagggccagagaccaggaaag

SEQ ID NO: 302606 - DNA, 83 bp, Homo sapiens
cgcgccgccaccgtctgaactaggatgtcccgacatgaaggtgacttaagagattaaaattaatttggttgctgttggttctg

SEQ ID NO: 302607 - DNA, 75 bp, Homo sapiens
cccagccatgtggtcagcctgatctcggacttcacagccagcagaactcatgttggcagataaattgaacatgac

SEQ ID NO: 302608 - DNA, 75 bp, Homo sapiens
atgctggatagataccgaattcttatcacaaagaagtccaaggcttgcgagaaggtcatttccgtgggtcaaacg

SEQ ID NO: 302609 - DNA, 101 bp, Homo sapiens
gcgacacactctgcgtcctcgcctcaccaggttaaccccaaagattggctttccttggagtgaaatcaggaacatctctttcaatgacaaaaagtttgtca

SEQ ID NO: 302610 - DNA, 112 bp, Homo sapiens
atcagccgaggtggagctgcggggccctggcatgaaaggctttatcctgtggataaacgcagagtgaacgagtttggggagtcctacgaggagaaggccacgcgggcgcccc

SEQ ID NO: 302611 - DNA, 90 bp, Homo sapiens
aaaatgtctctctatccatctctcgaagacttgaagatggcgggtgaaaaagttgagaagccagatactaaagagaagaaacccgaagcc

SEQ ID NO: 302612 - DNA, 75 bp, Homo sapiens
agctgatcgactcacaaatacctgtgatttctctccccgtctccacctccaggttgcacagagcattgaggatca

SEQ ID NO: 302613 - DNA, 82 bp, Homo sapiens
aatcacgctcggaaacaatggcagtcctgcgttaactgcggccgggaggctatgagcgagtgcaccggctgccacaaggtca

SEQ ID NO: 302614 - DNA, 78 bp, Homo sapiens
agtttctcacgacgggccgagcctgccactgtggtgatgatgtccagcaactctgtgaagcaggagaagaggagtttt

SEQ ID NO: 302615 - DNA, 100 bp, Homo sapiens
ggggcacccccatcccactgtgggtcagcgatgactttgaggaggtggtatgcatgagcttcttcgacatcgtgctggacttcatcctcatggacgcctt

SEQ ID NO: 302616 - DNA, 82 bp, Homo sapiens
tcccaagtgcaacaaggaggtgtacttcggtctgcgaggaacagaagtgcgaggaggaggtcttcccgctggccatgaacta

SEQ ID NO: 302617 - DNA, 83 bp, Homo sapiens
cgaacttgggctcgggaagccggcggaccgcgtcctgcgccggagcagacccaacatgagtgaagtttcctgcaagaaacggg

SEQ ID NO: 302618 - DNA, 100 bp, Homo sapiens
caagatcaagatctcattctagaaagaagcgatacaggtcacggtctagatcacattctcgatccagaggaaggcgatactctcgctcacgcagcaggag

SEQ ID NO: 302619 - DNA, 100 bp, Homo sapiens
taagagcagaggatggaacacttcagtgcattcaagaacaattttggaaatggaaggcaggaaagaagaaagaggaagagaagcaaaaggaaaaaggagg

SEQ ID NO: 302620 - DNA, 96 bp, Homo sapiens
tcaatccagatggcagccagtcagtggtggaggaaatgaaaccaatttctacaacataggaatgatttcggcatgtctaggagagtcagagaaaag

SEQ ID NO: 302621 - DNA, 96 bp, Homo sapiens
gggcagccgctaccagggggtcagagggatcggaagagtcttcaaaaacggtgttgacagctcttctaccacaagcagtgcttctccaatgcccaa

SEQ ID NO: 302622 - DNA, 71 bp, Homo sapiens
aaaacttcctgaagaacatgccaggcctctaagaaatatgtctccaaagaacttgccaaagagattcgtgt

SEQ ID NO: 302623 - DNA, 100 bp, Homo sapiens
cgtccttctatggccgcttcaggcacttcttggatatcatcgaccctcgcacactctttgtcactgagctcatgggcctcctgagtgacccagaattagg

SEQ ID NO: 302624 - DNA, 100 bp, Homo sapiens
ctgagaacctgctgaaggccccaaccatcgttgggaaatcatctctaaatcccatcctctttcgaggtgttgggtttgttgataagccggggcccttcgt

SEQ ID NO: 302625 - DNA, 83 bp, Homo sapiens
ccatcggcgtcctgaccagcggcggcgacgcgcaagcaagagtgagccatggagctacgtgtggggaacaagtaccgcctggg

SEQ ID NO: 302626 - DNA, 99 bp, Homo sapiens
acatggctagcaggaatgcttactgttgcgtggttcgttattaacagccagaagatacctgaaattcctgcagatgttgtgggtgcccttctgttcctg

SEQ ID NO: 302627 - DNA, 75 bp, Homo sapiens
gggaaaaccagctgaggtgtccgtaaagattccagagaagcctgtgaacaaattgcagtaccatgcaggactagc

SEQ ID NO: 302628 - DNA, 80 bp, Homo sapiens
ccaagatcgagcccagcgtcaacttcctcaagtcgcccaaaggtggatggtctgaagcatttgctggagacaggggcctc

SEQ ID NO: 302629 - DNA, 95 bp, Homo sapiens
ggaggggccgcgccgccaccgtctgaactaggatgtcccgacatgaaggtgtcctagttgcctatgaaggtttgccacttcatcttgcactgttc

SEQ ID NO: 302630 - DNA, 100 bp, Homo sapiens
gcttcgaggtggagagagcccagtgggaggtggagcgggcggagctgcaggttatcaatactctggctgaccatcatcatcgtgggactgactttggtgg

SEQ ID NO: 302631 - DNA, 100 bp, Homo sapiens
tgaaatacatccaggaaagacatggagattctcttaaaaaggatttatgattggctacttgggctattgtaaaggggtagaaccaaaaactgagtgtgag

SEQ ID NO: 302632 - DNA, 100 bp, Homo sapiens
tgctctggatcatcgaactgaatgcatccgtgtcattctggaccttactcccaactaccggggtgagaactcgtggttctccactcaggttgacactgtg

SEQ ID NO: 302633 - DNA, 71 bp, Homo sapiens
agcataaaattgatgaacagatgttcccttgtcgattcattaaaatagatccttgatgatggacagtctcc

SEQ ID NO: 302634 - DNA, 82 bp, Homo sapiens
ggaagagaagatcatcgagcatttcaaacgttctgacccagtgggtgatatatgccatccgaaaccttaccgaagacaacag

SEQ ID NO: 302635 - DNA, 90 bp, Homo sapiens
cctgtgcttctgactatcttctcttcaccagctcttcagatcaatatgcttgtagacaaaagacgtcactctcattccttaatcgaccag

SEQ ID NO: 302636 - DNA, 100 bp, Homo sapiens
cttggaccaatcctaaagaaaatcatttgtgatgggtcagctagtatgcaggctaggcaaactgcgggtaaacaccaagaatatgaacagaagctacttc

SEQ ID NO: 302637 - DNA, 75 bp, Homo sapiens
tggcattacgcaggccagcaactcccagctcaatgcaatggttatcaatactctggctgaccatcatcatcgtgg

SEQ ID NO: 302638 - DNA, 100 bp, Homo sapiens
aacggctcaagaatttcaagaacaaaggccgcgacttggagcagcgatggattttgggtggggaagtcctccttgcggagttggcgccagctagctcttg

SEQ ID NO: 302639 - DNA, 100 bp, Homo sapiens
gttggcggtccctgtgacctgtggagacacggccagatctgccctccaccctgccaaggtaaccctgctggggtcagttatcttcacattccagcacacc

SEQ ID NO: 302640 - DNA, 100 bp, Homo sapiens
cgctcagcctcactgtagatgccaagacagagactgcggtcttcaaaaggtgaccaaggaagaaaggcacattgttaaacctctctatgatagatacagg

SEQ ID NO: 302641 - DNA, 101 bp, Homo sapiens
aagcaccccacccaccacgagaggggccagaagaaggtgaggatacaactagaagccagcagtctacaggctggaagaaggccctcaccagaacccaaccc

SEQ ID NO: 302642 - DNA, 98 bp, Homo sapiens
acagatggcctcaaatgagagagatgctatatcgtggtaccaaaagaagagctgtcagaaagcagaagcaaagaaaaagtaataagatgaaaatggag

SEQ ID NO: 302643 - DNA, 98 bp, Homo sapiens
aagccaatcccaggaggaaaaacgtattctaccttgtaaatactgttatttgtatatactgtaaatgatgacatcggtgggcactaaccgagcccggg

SEQ ID NO: 302644 - DNA, 100 bp, Homo sapiens
ccctcttcactcgctgccaagggctacagaagtgtgcatcccaaccttccttctgacaagtcccagggagacttgcagctcctctgctgaaacgtttaag

SEQ ID NO: 302645 - DNA, 90 bp, Homo sapiens
catatctggagatacgcggtgcagctgccgacaccccagcctgttgctgacactagtgctggttggaaggaaaatcatgcaacattcatg

SEQ ID NO: 302646 - DNA, 100 bp, Homo sapiens
gaaaagcccagagaaaaatgaacgacacacatgttagagcccttctgaaaaaacattgtggatatcaagcctgccaatatggaagagctaacagaggtga

SEQ ID NO: 302647 - DNA, 76 bp, Homo sapiens
ttaggcatacaagtaccctggctgctgtgatgcagatccatccgccctagcaaaatatgttctggctttggtaaag

SEQ ID NO: 302648 - DNA, 98 bp, Homo sapiens
ccggcggcggtttcggcgcgcggccgggctggcgatggaagatggaaggaaggagcgcagcggtggtattaaagataatcaaacattatcaagaagaa

SEQ ID NO: 302649 - DNA, 75 bp, Homo sapiens
ccccgaatccgatgtccccagcacataataacttgggagctggtgactgccctcatgtgtgatttgcggcggcca

SEQ ID NO: 302650 - DNA, 74 bp, Homo sapiens
aaatatgggaaggatttcacggacattcagcaagattttatggattaccgggccttggtgcatgagcgagatga

SEQ ID NO: 302651 - DNA, 80 bp, Homo sapiens
accatgttaaggaggattttacagagggtcaaaatgcagatcttcgtgaaaacccttaccggcaagaccatcacccttga

SEQ ID NO: 302652 - DNA, 90 bp, Homo sapiens
ggagaatgaatacgggtccatcaatcacacgtaccacctggatgttgtggatcttagcaaagcaatgtctcaagatggtgcttctcagtt

SEQ ID NO: 302653 - DNA, 90 bp, Homo sapiens
tctgaatctggtgatgaacttagcagcagctccactgaacagataagggcctcactggagcagcttctgcaggtcctacacagcaccacg

SEQ ID NO: 302654 - DNA, 50 bp, Homo sapiens
gctgcctctgtgtacgctgaggggggagcccactgtttgtaacatggaag

SEQ ID NO: 302655 - DNA, 100 bp, Homo sapiens
aaaatacccgcaacagccccttcgtcccaaaacatcgatatattgaactcttcttgaattctactcctggaggcggctctggcatgggaggttctggaat

SEQ ID NO: 302656 - DNA, 100 bp, Homo sapiens
cgcacgtagaattaagacggagttcctagtgcaaatgcaaggtacaggtttgcagattccgccagcagcacagcaagctctacagatgagtggctctttg

SEQ ID NO: 302657 - DNA, 75 bp, Homo sapiens
gcggggaccgctgtgctctcgttggaggagagcagattagtgccattggaaggggcatatgtgtgttgctgggta

SEQ ID NO: 302658 - DNA, 75 bp, Homo sapiens
ctcatgttcagcatccccaggctggccatcgtgtgcacacagatccaggtagtctctgctagtaatgagcccctt

SEQ ID NO: 302659 - DNA, 82 bp, Homo sapiens
gaatgaccaaatttacgccatgaaagtggtgaagaaagagctggtgcatgatgacgagatcatccgggaagcccacgggacc

SEQ ID NO: 302660 - DNA, 82 bp, Homo sapiens
gtttgtactatcctcggtgctgtggtgcagagctagttcctctccagctcagccgcggagtgcatccgccccaacccttttc

SEQ ID NO: 302661 - DNA, 100 bp, Homo sapiens
ctcagcttcgtactgagttcgctccagctcggggagggggtggagttcgatgtgctgcctgcctttgatgccctggattatggtgacaagctgaacatgg

SEQ ID NO: 302662 - DNA, 100 bp, Homo sapiens
accaagtctcttcttcatttacacaagaagaaaaaacctcccagcatcagtgcccagtttcagagcattggctgtgatgactacttaggctccgacaaag

SEQ ID NO: 302663 - DNA, 75 bp, Homo sapiens
gggggctgaggatgacaaaaaagccttcatagcatgcaagagctctgcgaggggatgaagctgctggcatctgac

SEQ ID NO: 302664 - DNA, 100 bp, Homo sapiens
gcttgcaaaagcccagggccatatatctcagatgaggtggaggaccatcctgctacagtattgctttctcttgattacatgtttacttactgctcttgaa

SEQ ID NO: 302665 - DNA, 100 bp, Homo sapiens
gaacaagcctgcagctcattttctgcctaaaccactgaaagatgatgtctttctacctaaagatattgacctagacagtgtggatatggatgagacagag

SEQ ID NO: 302666 - DNA, 99 bp, Homo sapiens
aagtggttggttgcagttgtgtagtagttaagctagagatgatcgctatggaaaatcctgcagacttgaagaagcagttgtatgtggaatttgaaggag

SEQ ID NO: 302667 - DNA, 98 bp, Homo sapiens
aactcgtcatgctctttgtagcgtggtgcttctgttgctcacaggttctggaggacacgtgccggcggcaggacttcaacccctgtgaatatgatctg

SEQ ID NO: 302668 - DNA, 98 bp, Homo sapiens
gagcccacgagaggcagcgccatggcggagcagacctactcgtgggcgaacgctgttggagaagctgttcagccagcaggagaacgggcctccagaag

SEQ ID NO: 302669 - DNA, 100 bp, Homo sapiens
cgaggaatcgccgtggcgtcttggtgttctccacgctggttcgcagcagaatggaagtgaggaaaggcaaccagctgacacaggagccagagtgagacca

SEQ ID NO: 302670 - DNA, 98 bp, Homo sapiens
gaggattgactgctgctggggctgggctcgccagtcttggggacagtgtcagcgaaaattgcctaagaattatgacccaaaagttaccccagatccag

SEQ ID NO: 302671 - DNA, 100 bp, Homo sapiens
cgctgtggcatggcggacgaggggaagtcgtacagcggtcaaaatgcagatcttcgtgaaaacccttaccggcaagaccatcacccttgaggtggagccc

SEQ ID NO: 302672 - DNA, 82 bp, Homo sapiens
tttgatgaaggtggaggcagcgcggctctcaggtgctcttacagcctgttccaagtgtggcttaatccgtctccaccaccag

SEQ ID NO: 302673 - DNA, 74 bp, Homo sapiens
ttgacatttaattttagggtcctttatatagaagggagagtagtttgatgaaggccggaacaactttgaagggg

SEQ ID NO: 302674 - DNA, 74 bp, Homo sapiens
tcctgcccgtaagttcccgttttgtgtgtgatatcgatgagtgtcaggatcccgacacctgcagccagctctgc

SEQ ID NO: 302675 - DNA, 90 bp, Homo sapiens
tggacagcgccgacgtccgggtgcacgtgccacgcacggttcgagaacttgtcttggacaattgcaaatcaaatgatggaaaaattgagg

SEQ ID NO: 302676 - DNA, 50 bp, Homo sapiens
ctccagagctttgtcaaagagaagtgagctcacaatgactcaagctgcca

SEQ ID NO: 302677 - DNA, 75 bp, Homo sapiens
gccacaccaggctggagaatatggtgcagaggccctccacgcaaagaatggccgagtggattctgaggaccggag

SEQ ID NO: 302678 - DNA, 76 bp, Homo sapiens
cttgaagttagtgagaccaaaaacccaccaattctggacacattgggattaaagcctgtgacctgacctgcccaat

SEQ ID NO: 302679 - DNA, 80 bp, Homo sapiens
cttcggcagtccacccaccgccgccgcctcccaggtggctatggaccgccccctgcaggaagaggagcccccccgccacc

SEQ ID NO: 302680 - DNA, 100 bp, Homo sapiens
cattccgacgttacaatggtggagttggcaggtgtgcgcagtttccaaggcaggaaaggtaaagagacaaagaaagtgccttgtacagatgcaaacggag

SEQ ID NO: 302681 - DNA, 100 bp, Homo sapiens
attaacccttctgacaccacagtgccccttctgaatgactgcacagagtgatcttccattgtttgaagcactggacctttaatccactgtaggtatggac

SEQ ID NO: 302682 - DNA, 50 bp, Homo sapiens
ctcccaagtagctggaattacagattgcaacacctgctcggtataccgtg

SEQ ID NO: 302683 - DNA, 90 bp, Homo sapiens
gaatattttgcctgctggaacctgctgtatctactcaagagtggaagttttcacagacatatctgaagagatggattaagaatgctttgg

SEQ ID NO: 302684 - DNA, 100 bp, Homo sapiens
atttcctgcatgtccaaaatgggagacaggcgcctgagtaacccggggcaaggaacgaatgcaggaatttgggaactgagctgtgcaagtgctgaagaag

SEQ ID NO: 302685 - DNA, 51 bp, Homo sapiens
ccgcctggctccccatactagtcgccgcatttgacattgtgcagcaaagaa

SEQ ID NO: 302686 - DNA, 100 bp, Homo sapiens
ctccaacgaattaggtggtctgactaccagtggctctgcagagactttgaagattatccaatgagaattttatatgaccttcattcagaagttcagactc

SEQ ID NO: 302687 - DNA, 75 bp, Homo sapiens
ctgtgtcccaaccggcctgagtcaacactattcctgatcagagaactccagttgcttcaacacacagtatcagta

SEQ ID NO: 302688 - DNA, 83 bp, Homo sapiens
agatgactgtggatttcgaggagtgtctgaaggactcgccccgcttcagttgacttttgtgccctggtaattctgtatcctgt

SEQ ID NO: 302689 - DNA, 75 bp, Homo sapiens
tcgctggtgaagcccgcggcgcgcgcctctcccggaccctgcagggtttctgcggcactgaaacaaggccaaatt

SEQ ID NO: 302690 - DNA, 83 bp, Homo sapiens
ctgttttctgccggctgtaaagtcatcacctcctgggatcagatgtgcattgaggttatgggtgctacatgtgtgctttcaga

SEQ ID NO: 302691 - DNA, 100 bp, Homo sapiens
ggatgccgtgatctccagcgccggcctcctcagtgcgaagaagctgcagccgcacctggccaaggcatggggtcctgtcccagcaattcgtggagctcat

SEQ ID NO: 302692 - DNA, 85 bp, Homo sapiens
atctccggagcgaggaacagaagaagaagaaccggaagaaactgtccgagaagcccaaattctcaaaagtctatggtcctgtgtt

SEQ ID NO: 302693 - DNA, 74 bp, Homo sapiens
cggaagtggaggtggctgacgagctgctggccgcttacaaacacgcagatggcaagaagattgatggcaggagg

SEQ ID NO: 302694 - DNA, 83 bp, Homo sapiens
cgttttccggagggattccatcatagacaatgcagatcttcgtgaagactctgactggtaagaccatcaccctcgaggttgag

SEQ ID NO: 302695 - DNA, 95 bp, Homo sapiens
aagatgcaagcggtttgggaccttgaacaaggcaaatatggttttgggtaagcttgatgattaccaggaacgaatgaacaaaggggaaaggctta

SEQ ID NO: 302696 - DNA, 98 bp, Homo sapiens
agctgttcaacgaggatgtggaggaggtcacttaccgagccctgagggtgtgggccgaagatatgctcatgtggtgttgaggaaagcagacattgacc

SEQ ID NO: 302697 - DNA, 100 bp, Homo sapiens
tggaaaaagatgaacttctgagttacataaagaagacctaaaactgatggctactaaaaagcagagcatttctggcttcctgttggataaaaaaattgga

SEQ ID NO: 302698 - DNA, 90 bp, Homo sapiens
cgtgtcagaaaggcaggcgctgcgagacggagacggcaatcgcacctggggccgcctaacagagatcaagtcactctttgtgcatccctt

SEQ ID NO: 302699 - DNA, 100 bp, Homo sapiens
ggctctacccagaattcaattaaagtggctcaggaaaattgcctaagaattatgacccaaaagttaccccagatccagaaagatggctgccaatgcgaga

SEQ ID NO: 302700 - DNA, 90 bp, Homo sapiens
agtagttgttgagcagagggaaagggataggagaaggatgtggactgcagtgctgcagtgccagggcttaaaagacaaccttcttgcttc

SEQ ID NO: 302701 - DNA, 98 bp, Homo sapiens
tggacatcagcgccatccccgagcagcggtggaagctggtcatgatgatgggcagcgcccgagtggcggagctgctgctgctccacggcgcggagccc

SEQ ID NO: 302702 - DNA, 73 bp, Homo sapiens
tgaaggacatgcaaactttcaaagcagaatcttgtggaagaagaatgaagttgctgattatgaagctacaaca

SEQ ID NO: 302703 - DNA, 75 bp, Homo sapiens
cgcgtctctctgctgcggcgcggggaccgctgtgctctcggcattgccgtctgcaacgtgcccgcggcgtctgtg

SEQ ID NO: 302704 - DNA, 75 bp, Homo sapiens
cccttcctgtcgctgacggcgactgcgggaggccagatctttaaatggatgagatggctaccactcagatttcca

SEQ ID NO: 302705 - DNA, 100 bp, Homo sapiens
cttgagaagaggagccaaaacatcatagttgaaccgtcctggaatagaagagtttccagatgtcttggaatgcactgtatctcatgcagtagaaaagata

SEQ ID NO: 302706 - DNA, 50 bp, Homo sapiens
cgacatccccaagatgctggatgcagaggaaacaccaagggacccacgac

SEQ ID NO: 302707 - DNA, 75 bp, Homo sapiens
cgctgttttcgtgatcttcagaccccaggttctttgatgagcagcaccagcagtaagagggctccgaccacggca

SEQ ID NO: 302708 - DNA, 76 bp, Homo sapiens
ctggtgtaccaggcgaagctggccgagcaggctgagcgatacgacgattgacttgatgcacaacatcacaaaggcg

SEQ ID NO: 302709 - DNA, 75 bp, Homo sapiens
ctggctgtggcccggacgtttgagaagatcgaggaggtgtctgctcggtggttccttatgtcacgacgatttttg

SEQ ID NO: 302710 - DNA, 100 bp, Homo sapiens
gttctggccattgatgatgatatcattatgctgacctctgacgagctgcaatttggttatgagtccgatacatacttctgcatgtctatgcgaataccag

SEQ ID NO: 302711 - DNA, 100 bp, Homo sapiens
ttcagtttgaagatgacacaccctgggccagcacatctccacctcatcaggaaacagctgagacaggtgaacgcttggccaagccagagcgaggcaagat

SEQ ID NO: 302712 - DNA, 100 bp, Homo sapiens
tccagacaggaacaagacccggacattccaggccacagtcctgggaagtcagatgggattgaaaggcgcagatcaggcctctataaccgccaggaatcac

SEQ ID NO: 302713 - DNA, 98 bp, Homo sapiens
ccagaggatccccagtatgcatctcaagatgtggaagctgtagagaaatatgaagaagtgctacataatttggaatttgccaaggagcttcaaaaaac

SEQ ID NO: 302714 - DNA, 75 bp, Homo sapiens
cagcagtacagacagctcaggctgcccagatggtggctcccggagtccagattattttcgaaataccagtatttc

SEQ ID NO: 302715 - DNA, 100 bp, Homo sapiens
cagagcctggagtctgcgaaggccgggacccggttccccggcccacagtgggggtgtgcaaacccgagagaactgggggttgccctgctgtcagacgtct

SEQ ID NO: 302716 - DNA, 100 bp, Homo sapiens
agcattatctgcataccagaggtactacagtttacagtctgactactggaaggcttgcattgatgacaatgttgatatggtgaagtttctggtagaaaat

SEQ ID NO: 302717 - DNA, 88 bp, Homo sapiens
ggcggagccgctgctcgagctgctgctggattgaactcagagaagccgggttggtgatgtatattggccaagtggccaaggatgtctt

SEQ ID NO: 302718 - DNA, 50 bp, Homo sapiens
tgaggcctccccagccatgtggaactagtctcgctctgtcatccaggctg

SEQ ID NO: 302719 - DNA, 97 bp, Homo sapiens
tggagctggtcgcagatcctgagacccggacagtggcagtgaaacaggtcattgacgagactctggatgttaaggaaatgattttcaatgccgagag

SEQ ID NO: 302720 - DNA, 98 bp, Homo sapiens
ctttattatgcaggtggtctgtgaagccacacagtgtccagatacgaggaggcaccttccactagcaacagtctccccaggcacaacacagctaacac

SEQ ID NO: 302721 - DNA, 101 bp, Homo sapiens
ccaagagctctcttcctcccgtgctaggaactgagaacatccacgacagcgatggcagttccagcagcagccaccagagcctcaagagcacagccaaatgg

SEQ ID NO: 302722 - DNA, 83 bp, Homo sapiens
ccagcgtcgccgcagccccccaatgcggccgcgagaagcagcgggggggcaggcgatcgaagacaatgcagatcttcgtgaag

SEQ ID NO: 302723 - DNA, 100 bp, Homo sapiens
gattaatgaaagaagtcatggaacactatgctgatcaagatgatctggttgtcatgtttactgaatgggctgttgataatcaggtgtatgtggccacagc

SEQ ID NO: 302724 - DNA, 48 bp, Homo sapiens
aaccaggtcatgctccaaattatcagatgtagaaggtggtgatggact

SEQ ID NO: 302725 - DNA, 100 bp, Homo sapiens
gtgctttttcaagggagctgataaagaacttcttcccaaaatgggtgatgtaaaattctcaaacaatgagatagataaaaagtacgcagccaaaaagttc

SEQ ID NO: 302726 - DNA, 83 bp, Homo sapiens
agatggccagctttcccccgagggtcaacgagaaagagatcggtccactggctattctgaggtgatagttgtcgttggaggat

SEQ ID NO: 302727 - DNA, 96 bp, Homo sapiens
cggggctcgcaactcggcagcctccacccaccggcccaccctacatttagcgcatcatgtgatccggcaagagtgagccatggagctacgtgtggg

SEQ ID NO: 302728 - DNA, 75 bp, Homo sapiens
atcttgaatcatgaagctactaaccagagccggctctttctcggttcaagggcagcaggaaagacgagatcctgg

SEQ ID NO: 302729 - DNA, 100 bp, Homo sapiens
accttctactgtccaagcacagtctcagccccatggggtatatccaccctcaagtgtgaacccttaggagaaatcttgagagtggacagcaattgtgaag

SEQ ID NO: 302730 - DNA, 101 bp, Homo sapiens
tggacgcagacggcgtcacttgcttggctgaaactgatgtaaatgtggtcatgcttcaggaatcccaagtttgtgaaaagcgtgccagccaacaattctgt

SEQ ID NO: 302731 - DNA, 100 bp, Homo sapiens
gggcaatttgtctcaataaaagcccaggaagaagacgaggatgaaacatgccaagggacaagtgttatttgacaaagtgtgtgaacacctcaatctcttg

SEQ ID NO: 302732 - DNA, 98 bp, Homo sapiens
tcattttcacatctctcctgaatggatcacagcgtcgcagatgtctttgggagagcttatggatggagaccaaacatccagatctggagtgccggcac

SEQ ID NO: 302733 - DNA, 50 bp, Homo sapiens
gagaggcaggcaggggatcccggactttacaagtccttccactttctctc

SEQ ID NO: 302734 - DNA, 50 bp, Homo sapiens
gagcgagcagcactcacatctcaagaatatcctccgaatcctaaatctag

SEQ ID NO: 302735 - DNA, 83 bp, Homo sapiens
cctcggaggcgttcagctgcttcaagatgaaggccggctgcctaccctccagactgtccgctatggctccaaggctgttaccc

SEQ ID NO: 302736 - DNA, 100 bp, Homo sapiens
ggtgaatcccctgtttgagaaaaggcctaagaattttggcattgacgaagttatacggaagcgtctcctcattgatggagatggtgctggagatgatcgg

SEQ ID NO: 302737 - DNA, 83 bp, Homo sapiens
ctacaacacatggtggaatgtatccgggaggtcaacgaggtcatccagatcttgatgtggaagaaatggaggactcagaacca

SEQ ID NO: 302738 - DNA, 50 bp, Homo sapiens
aaaaaagacagaggagtgacgaggttatattccctgctcagagaggatac

SEQ ID NO: 302739 - DNA, 100 bp, Homo sapiens
agtcgatccaatgtgtggaactggggcaataccaatagaggtcgaagtggttctggaaactttggtggtggtcgtggaggtggtttcggtgggaatgaca

SEQ ID NO: 302740 - DNA, 83 bp, Homo sapiens
ccgcactcctggtcctgctcggggctctgttcccagggtgcggggggcaatggcactgcagctctgggccctgaccctgctgg

SEQ ID NO: 302741 - DNA, 100 bp, Homo sapiens
gccaggagtcatgagcgacagcggcgagcagaactacggcgagcggagaagcctgtgtctcccaaatcaggaacactgaagagccctcccaaaggatttg

SEQ ID NO: 302742 - DNA, 100 bp, Homo sapiens
cccatccagactgtttgatgctgaacttcaccgttaagttttctggatatgccgcagaaggatccgtgccagaagcaagcctgtgagatacagaaatgtt

SEQ ID NO: 302743 - DNA, 90 bp, Homo sapiens
caaaggcagggcaaggaaactggccacaagtgggaggaggagctcgccaagcgcatgaaccttcagaccatggtggacacgctgcaggag

SEQ ID NO: 302744 - DNA, 83 bp, Homo sapiens
ccaaattgagcgacttgagaaaatcctgcagcgttcaagtttgtaccataacagcttgggggaaagaccatgaaaaagatgct

SEQ ID NO: 302745 - DNA, 74 bp, Homo sapiens
gccgctgctacctgcagcgccgtgtggcacgacacaaaaatcagctcttagaacaagctctggtgattgaggaa

SEQ ID NO: 302746 - DNA, 80 bp, Homo sapiens
cagctgacgccggagcagctcctaacccagccgcggcgagtcctttgcacatgttggcaacacacgcatccgcatcggcc

SEQ ID NO: 302747 - DNA, 82 bp, Homo sapiens
aattctaagcaccaggcaaatgctcttcattgtgtaacaactagtcttatcgaatgttacttagcctccaacagtattcgag

SEQ ID NO: 302748 - DNA, 90 bp, Homo sapiens
gactaccaccgcagcgacgagcaggtccctccttgtggtccatttctgggcaccatgggctccacagtgtgcacagatgaacgaagttat

SEQ ID NO: 302749 - DNA, 90 bp, Homo sapiens
gttctgcagaaacatgtaattgtcttggtcctttagtgagtaaagtgaaagaataccaagtagagacaattgtagataccctctgcacta

SEQ ID NO: 302750 - DNA, 83 bp, Homo sapiens
acaggaagcagagtggctatggtgggcaaactaagccgattttccggaaaaagggatctctcaatgctatttgccttcattag

SEQ ID NO: 302751 - DNA, 100 bp, Homo sapiens
gttaactgtttctggcaaacatgaagtcaggcctctggtatttctttctcttctgcttgcgcattaaagttttaacagcatcattgacaaagaagtttca

SEQ ID NO: 302752 - DNA, 100 bp, Homo sapiens
gaggaagtgcccctcaccgccttcgccctggagctggagcatgccctcagcgccatcgcccgtgctttgaagaagaggagcacttcaaggtgctggtgaa

SEQ ID NO: 302753 - DNA, 75 bp, Homo sapiens
gacctgatttcaagcaacagcagtagtggccacagaagaagtagttactgcagaatctgtggatggtgccattca

SEQ ID NO: 302754 - DNA, 75 bp, Homo sapiens
cctctgggtcctcggtcggtacagtctctgcacctcgcgccccagcagacttcacagagaatgcagttgtcttga

SEQ ID NO: 302755 - DNA, 99 bp, Homo sapiens
atccgatggcagcaccacttcgaccagcttcatcctcagacagtaatggaggggaaagttccagtcgcagcgctgagaagcgatcagctgaagaagaag

SEQ ID NO: 302756 - DNA, 100 bp, Homo sapiens
gaggtggcatgaagctcagtggtgttatattggaatgagtgagtgaccatcctggagccttcctgaaagaggccgggattatgaaaagaataaagtctgc

SEQ ID NO: 302757 - DNA, 101 bp, Homo sapiens
atttattggatcattgggaacacttcacctgtcacatattgaccagtggaataaggtaattgaacaactaggaacaccatgtccagaattcatgaagaaat

SEQ ID NO: 302758 - DNA, 82 bp, Homo sapiens
gctacggttgttgttggcgactgtgcttcaagcggtcaaaatgcagatcttcgtgaaaacccttaccggcaagaccatcacc

SEQ ID NO: 302759 - DNA, 83 bp, Homo sapiens
gctgccgctgtcgtctttgcttcagccgcagtcgccactggctgcctgaggtcagaagttgagtagcaggggcctaggagggc

SEQ ID NO: 302760 - DNA, 74 bp, Homo sapiens
ttgggagatccacagctaagacgccaggacccactggaagcctagaaatggaagatgatccctatgatcttgaa

SEQ ID NO: 302761 - DNA, 100 bp, Homo sapiens
cgccatcgccgggcgacgacgaggaggaggcggccgccgcagccggggcccccgccgccgccggagcggtatggcatttcaaatatagatacaaccattg

SEQ ID NO: 302762 - DNA, 100 bp, Homo sapiens
cagcgctggggattcttcccgaacaggcgcttgccctctcttttatggaacaagactgccaatggagactgccgcagagacccccgggagcggagccgca

SEQ ID NO: 302763 - DNA, 101 bp, Homo sapiens
ctgaagaggaggaagagactgtggccagcaagcagactcatattctggagcaggtccaccctgagaatgaagactggacttgcttcgagcagtctgcctca

SEQ ID NO: 302764 - DNA, 101 bp, Homo sapiens
aaggacattggaaaccagctgcacatgctaaccaacaggcacgacaagtttctggacactctccgagaggtgaagattatggattggatatgtctacttct

SEQ ID NO: 302765 - DNA, 75 bp, Homo sapiens
gaaacctcgtggcctggtctccattatttgagatgagttacatcttggaggtcagatttcatttcagtgtaaagg

SEQ ID NO: 302766 - DNA, 100 bp, Homo sapiens
gcgcgggccgaccgggcgcaccgaccatggcctccaaatgccccaagtgcgacaagaccgtgtacttcgccatccagtccaatggatcagatgggcaaga

SEQ ID NO: 302767 - DNA, 100 bp, Homo sapiens
tttctcgctgatcgcctaacttctactgacgaagcttggaagttgcagaagttttgatgtggacaatggcacatctgcgggacggagtcccttggatccc

SEQ ID NO: 302768 - DNA, 90 bp, Homo sapiens
caggaatcgtcacccggcggcctctcattctgcagctcatcttctcaaaaacagaacgccaatctgaattgccaacgcaaagcaaagcga

SEQ ID NO: 302769 - DNA, 50 bp, Homo sapiens
tggctgccgtccccgctgctgtgcattggtaaagatgacggcgccttgag

SEQ ID NO: 302770 - DNA, 83 bp, Homo sapiens
gcggcgcccagacaggcctggagcacgccgcagagatcgggagccgcgggagcactaaggcgcaagggccacagcagcagccg

SEQ ID NO: 302771 - DNA, 50 bp, Homo sapiens
ctgtggccctgccaggcatatagtgaagctgcctgtgtcagggaatctgc

SEQ ID NO: 302772 - DNA, 82 bp, Homo sapiens
gaacgctcactgtcagcgcctggaaacttgctcacgttaatttggagtggcccctggagtcagtttcctacaccatccgagg

SEQ ID NO: 302773 - DNA, 100 bp, Homo sapiens
tagagcatcaagcagttagaattgagaatctggaactaatgtcacagcatggatgtaatgcctggaaagtatacaatgacaccaaagactctgcacagaa

SEQ ID NO: 302774 - DNA, 101 bp, Homo sapiens
ggggcgctggcggcctgcgcagccacctcaagggtgatcagttatgaagaagggaaagctttggcagaatcttggaatgcagcttttttggaatcttctgc

SEQ ID NO: 302775 - DNA, 99 bp, Homo sapiens
atatctgacagagctcatattgctgacctgatctccagcttcctgctcatcaccatgctcttcatcatcagcctgagcctactgatcggcgtagtcaag

SEQ ID NO: 302776 - DNA, 101 bp, Homo sapiens
cctaccagcgcgccatcctgcaaaaccacaccgacttcaaggacaaggacctgaaggagaagaaggagaaggtggaggagaaggcaagccggaaagagcga

SEQ ID NO: 302777 - DNA, 90 bp, Homo sapiens
gtgaattatgaatcttttgaagttggcgccggacaggatttctatgatgactggattttgaattttgtggaacgctttttctccatctac

SEQ ID NO: 302778 - DNA, 116 bp, Homo sapiens
gagcgcgagagggggaaaagcgagcgatcgagcgagcgcgcgcgcgaaaactccgggcaggtatattcgaattgttgggactcacaacacagtgaacaagatttttcacattgtgg

SEQ ID NO: 302779 - DNA, 101 bp, Homo sapiens
tacttctatagaaatggctgaaggaaaacctccttatgctgatatacatccaatgaggataccatgtttgtgtggaagtgccccgtgtttgctatgccgat

SEQ ID NO: 302780 - DNA, 51 bp, Homo sapiens
atttgtaggacttcggttggaggataaggagccccgtggaatcatcccttt

SEQ ID NO: 302781 - DNA, 83 bp, Homo sapiens
attgcttcaaaaaaccagaaaacccaagcaagatgatgataagaggacaagaagctccgccacgcccgcagtggggcccccgc

SEQ ID NO: 302782 - DNA, 51 bp, Homo sapiens
gattcgcagtggtcgcttcttctccttggtggtcttcgagggatagcacga

SEQ ID NO: 302783 - DNA, 100 bp, Homo sapiens
ctgcggcagagcgtgtctgaggtggtgcgcggctccgtgctcctggaggagacatcacagctttcccagatcgggaggaaaaatatggaatgtgttttac

SEQ ID NO: 302784 - DNA, 97 bp, Homo sapiens
taggcattctgatgggaacttgtgtgttaaagtaacagatgatttagttaacaccttccaccatgaccacctcagcaagttcccacttaaataaagg

SEQ ID NO: 302785 - DNA, 98 bp, Homo sapiens
gggtcctgatgaaagcaaacagaaatttgtgctcaaaacccccaagaaggtgcttcctggaggggcctgccccactgttcctgtgctgagttccagga

SEQ ID NO: 302786 - DNA, 100 bp, Homo sapiens
aaacaggataaaatcttatgattatgaggcatgggcaaaacttgatgtgggcggcgactggcggcgcgatggacctgaccgggctcctgctggacgaaga

SEQ ID NO: 302787 - DNA, 74 bp, Homo sapiens
ggagatcctggtccggaggcccacagtgtaccacatgaaggaagatggttgggtgaaagtagaaagtacagatg

SEQ ID NO: 302788 - DNA, 74 bp, Homo sapiens
catcgtcaccatgacaacactagggaggtggaaaagtcgggtctgctcaacatgaccaagattgcccaaggggg

SEQ ID NO: 302789 - DNA, 100 bp, Homo sapiens
cctgagctcaagagatcctcctgcatcagcctcccgaagtgctgggattataggtgtgggagtatttccctcacaggatcctgctcagcccagaatgcct

SEQ ID NO: 302790 - DNA, 100 bp, Homo sapiens
gtcactgaagtcacaacttgccaggaggttgtcatagccttagctcaagcaataggcagctggtgaccaggactgagaacttgtcccaggccacgagcct

SEQ ID NO: 302791 - DNA, 80 bp, Homo sapiens
ctgcctcagcctcctaagtagctgggactacagctggtaggtgagtgctgtcctcggctcactttcctcaagctctccgg

SEQ ID NO: 302792 - DNA, 82 bp, Homo sapiens
tttgaggacacttgtggagagctcgaattccagaatgatgaaattgtaatatgatgctgtggctgagaaagctggtaaagta

SEQ ID NO: 302793 - DNA, 98 bp, Homo sapiens
gccactcctcccggaggcgacatggggcacccggtgtaccgcggcgagaagccccagctgcactacgcgtgtaaacaggaacatcgataagtagtgta

SEQ ID NO: 302794 - DNA, 80 bp, Homo sapiens
caaaaactggagcagaaattggaggctcagcatagcctgatgaaaacaaaggcgatatgcattatgatgctgagattatc

SEQ ID NO: 302795 - DNA, 75 bp, Homo sapiens
caattactgatgggagcaagttgactaccaccagtggagtccaggatgagaatcaaatggctatagcatgtggat

SEQ ID NO: 302796 - DNA, 100 bp, Homo sapiens
ggaaattagaaatatcttctggaaagctggccagatttgcagatggctctgctgtagtacaggatgctttcattggatttggaggaaatgtgatcaggca

SEQ ID NO: 302797 - DNA, 100 bp, Homo sapiens
cagcagctgttccttctcccgagggcgagcccccccacagcagttggctggggaacagaccagggaattggtggatttggagaagagccgggaattaaat

SEQ ID NO: 302798 - DNA, 82 bp, Homo sapiens
ttcaacaagggcccctcgtacgggctgtcggccgaggtcaagaaccgggccgggctctcgccatgggtcactgtcgcctctg

SEQ ID NO: 302799 - DNA, 83 bp, Homo sapiens
aaaagttaaacccaggaagctttggatcagacttttgtgttgcagttcggccactgaggcggctcccagctgcgttggcgaca

SEQ ID NO: 302800 - DNA, 105 bp, Homo sapiens
ccgggggcggccacggtgatgagccgggcctggcggacgcggcgccatcgcagtcagcaatgcagagtccctggacaggctcctgccacctgtgggcactgggcg

SEQ ID NO: 302801 - DNA, 51 bp, Homo sapiens
ccgttggaacaagattgtcctgaagaagtgatggagtctcgctctgtcacc

SEQ ID NO: 302802 - DNA, 75 bp, Homo sapiens
gccgctccttgggctacgcgtatgtgaacttccagcagccggcggacggctgaccccgcactacatctacccacc

SEQ ID NO: 302803 - DNA, 101 bp, Homo sapiens
gactgaaccacatgggctggccagagcacacaccaggcactgattttatcatgtgggcaacctgctgcaactggttctgcctggatggacagcctgaggag

SEQ ID NO: 302804 - DNA, 101 bp, Homo sapiens
ctcactcaggactccctgcagatgttcctgccccagggacgggtaaattgaagcaaaaagcagacaagttctatgggatttgctggcattgatttcccagg

SEQ ID NO: 302805 - DNA, 78 bp, Homo sapiens
tggggtaatcactgggcaagatggagttgaggactattttacactgtatgcagatagggttattcaacacaatgcttt

SEQ ID NO: 302806 - DNA, 101 bp, Homo sapiens
tttgtcccctcatgtgggtgagctgtcaaaccttactcatctggagctcattgcctcccaaagtgaaatgcctgaccaagatctggcaccccaacatcaca

SEQ ID NO: 302807 - DNA, 90 bp, Homo sapiens
agtccagagcagaggaatctatacaaagaagtgatgctggagaattacaggaatcttctctcattggcgtccagaccaaagcatttactg

SEQ ID NO: 302808 - DNA, 83 bp, Homo sapiens
agacagtcaaaaaagaacctgaggatagacaacaggcttccaaaagcccttacaatggtctcctacggtagtgtgcagcttat

SEQ ID NO: 302809 - DNA, 104 bp, Homo sapiens
caccggcggggccacgggcatcggaaaagccatcgtgaaggagctcctggagctgggatggtgccatgacaatggtgtgaactacaagattggagagaagtggg

SEQ ID NO: 302810 - DNA, 76 bp, Homo sapiens
gttaatactacctgcttttggatagaatgtaaagacccagattgatcactatgttggcatcgcccgagatcagacc

SEQ ID NO: 302811 - DNA, 98 bp, Homo sapiens
cacagggcaaggcggcggacggctgcgtcgcccgaggcgaggaggagcgctggcgtaagactttgaccccgacgcaggcttcagtgattgccgcggat

SEQ ID NO: 302812 - DNA, 101 bp, Homo sapiens
ggaaggggctcttctactgcatgtgggtgcaggatgaaccccttctacaggccaaagaagctaaacgactaaaagaattcttagaagactatgatgatgat

SEQ ID NO: 302813 - DNA, 75 bp, Homo sapiens
ctgaggttttcctaagccatcccctggcggaaccgcccccagattagcctgaggcctgctcagtcgttcctaatg

SEQ ID NO: 302814 - DNA, 100 bp, Homo sapiens
cacggctcgatgctggacatacttgaccggggtcatcctagggaaaacactatcctctgagatcccagatcatgagatcgagacgctccctccggagctc

SEQ ID NO: 302815 - DNA, 83 bp, Homo sapiens
acagtgtttgcctctggttcagctcatacaacagcttcttagacacctagctcccctgtttgacaaccctaagttggataagg

SEQ ID NO: 302816 - DNA, 123 bp, Homo sapiens
aaatcatgtcaagcgaagccttgaaaaagctgccctgagacggtgtcccgccgaaagaattcctcagagagagaagactgtaataatggcgaaccccctaggaagataataccagagaagaat

SEQ ID NO: 302817 - DNA, 128 bp, Homo sapiens
acgatctgcacttcgcattttggcattgacatttaattttagggtcctttatatagaagggagagtaggaaatgctgtctatgatttcttcattggccgtgaattaaaccctcgaattggtacttttg

SEQ ID NO: 302818 - DNA, 74 bp, Homo sapiens
aaaaaagtcaccgccgctagggtcgccgttgcatcggtgcagggcaagcttctaagtgccagatgatggaggag

SEQ ID NO: 302819 - DNA, 96 bp, Homo sapiens
ttacctacgttggcggccccagaagcctatttgatggctttgcagatggactaggagttgctgaagctatttcatatgtggatcctcagttcctta

SEQ ID NO: 302820 - DNA, 51 bp, Homo sapiens
agcacgtggtgggctatggccaccttgggaagaaggagaaagggccaaccc

SEQ ID NO: 302821 - DNA, 76 bp, Homo sapiens
ggcgactgtcattcacaaccccctgaaagccattaacaacagtgtcttcagtgttcgctttttcagaactacagct

SEQ ID NO: 302822 - DNA, 97 bp, Homo sapiens
ttcatcaacatcaactacgtccctctgaagcagccacctcagcagagaagtgctcctgacatctctttcaccatcgatgcgaataagcagcaaaggc

SEQ ID NO: 302823 - DNA, 99 bp, Homo sapiens
cccagcggcagcagcagcggcgggaggagcctccgggcagttggaattgatcacaccttttcagttgtacttcaatcctgaattaatctttaaacactt

SEQ ID NO: 302824 - DNA, 75 bp, Homo sapiens
gacagcaacagctcggcgggctggaagggcatttgatgtagaactactgtacatagcacagttctttaaaattcc

SEQ ID NO: 302825 - DNA, 83 bp, Homo sapiens
gagggccaccccacccctcttgggggctacaacctctccgccagattaagactttgaccccgacgcaggcttcagtgattgcc

SEQ ID NO: 302826 - DNA, 100 bp, Homo sapiens
tcggcctcatcagcccggcctacctcttcctctggcccgaagccttcctttatcgctttcaggcatttatgtttgaatcatctttaagtctggcggtcac

SEQ ID NO: 302827 - DNA, 101 bp, Homo sapiens
tcgataaatcagacagaacagttaatcctcaatttaagcctgatctaacccctagaaacaggtgcggccggccggacggacctactacgactgcgcagacg

SEQ ID NO: 302828 - DNA, 100 bp, Homo sapiens
ctgcaccaggcaaattactccatcattgatgatgctacaatggtacaggtttgcagattccgccagcagcacagcaagctctacagatgagtggctcttt

SEQ ID NO: 302829 - DNA, 83 bp, Homo sapiens
gggtccgcggcttcattcttgaagtcagtgagaccaagaacccaccaattccggacacgcattcctctgaatattgatttgct

SEQ ID NO: 302830 - DNA, 100 bp, Homo sapiens
ttttgctaaatacagaaggacatgcaaaacttgcagattttggggtagcaggtcaacttacagcagattattgccagagggctgcttgatatcttccggg

SEQ ID NO: 302831 - DNA, 90 bp, Homo sapiens
gccaggagaaggccaagtggctggggggtgcagtggaggattacttcatgcgcaatgctctcatttcactcttcagtgttcctgttattt

SEQ ID NO: 302832 - DNA, 100 bp, Homo sapiens
tttttggattcagttctcctgtgtgcatggctttccaaaaggacattagtgccagcagtagttcccaagggctgtctcagccatccacccagacgactca

SEQ ID NO: 302833 - DNA, 100 bp, Homo sapiens
cggccgcctccggccaggacgctgggagctgcctgcgggaaggtgcggggagcggagccatggcctccggtcacgagacatgtgtagaactgcttttaga

SEQ ID NO: 302834 - DNA, 74 bp, Homo sapiens
gagtacgaccctcggagacaccgatatgaccatcaccagagcctgcctagggtagttaaaagacgagtgaatgc

SEQ ID NO: 302835 - DNA, 132 bp, Homo sapiens
gcggaacagcaggcccgagcccaccgcgccgggccccggacgccgcgcggaaaagcctctacggcagacacatgcaggccaacccagaaccaccgaagaagaataatgacaaatcgaaaaagatcagccgga

SEQ ID NO: 302836 - DNA, 110 bp, Homo sapiens
gcctcgggaccggctgtatgattaggccacaatcttcaatgagtaaacatattcctgcaccgtctgcgtcctgctgtccttccccttcatcttcagcccctgcctgggct

SEQ ID NO: 302837 - DNA, 90 bp, Homo sapiens
aataaccattctccagatccagcacgtcagctaactgttcagatgatgcaaaatcctcagattcttgcagcccttcaagaaagacttgat

SEQ ID NO: 302838 - DNA, 90 bp, Homo sapiens
gatatgcttgcttctattaaaagtggtgatgaacttcaggatgagacacatcaactggatcattctgctcattacctgcgcctgaaattt

SEQ ID NO: 302839 - DNA, 97 bp, Homo sapiens
cggacaagaggactgaagcagatggcaactctgatcccaactctggttgtttgcattcgctccacttggaatgctctctctccaaagctgagttgtg

SEQ ID NO: 302840 - DNA, 102 bp, Homo sapiens
ccagagcctggagtctgcgaaggccgggacccggttccccggcccacagtgggggtgtgcaaacccgagagaactggtaacaacatgctgtaccccaaggaa

SEQ ID NO: 302841 - DNA, 101 bp, Homo sapiens
gcggggtgcgccggcagaggatccagtgttcaccatcctggccccggaagctgaaactaagatctgcttcaaatactaccatggagtgagtggggccctgc

SEQ ID NO: 302842 - DNA, 100 bp, Homo sapiens
aatcaagacagttatagtcaacatggttgacgttgcaaaggcgcttaatcggcctccaacgtgtttttgaagaggatgctctcagctgggaagataagct

SEQ ID NO: 302843 - DNA, 82 bp, Homo sapiens
catgaactcttttccagtgtccttcaggagatctgtgatgagggcagccccgagaaccacaggtgtacaccctgcccccatc

SEQ ID NO: 302844 - DNA, 50 bp, Homo sapiens
ccagtcgccacgacaggcggcagccagacgcaaacatgcagatctttgtg

SEQ ID NO: 302845 - DNA, 90 bp, Homo sapiens
cgtgggcttggtgggcaactcgctggtcatgttcgtgatcatccgattctccctgactctgctcatctggaccttttctgtgtgtctgcc

SEQ ID NO: 302846 - DNA, 115 bp, Homo sapiens
cggctctccgccgtccccagccctgcctctccctgggctctgccagatgacgtgtactactgtggaataaagtacatcaaagatgatgtcatcttaaatgagccctctgcagatg

SEQ ID NO: 302847 - DNA, 75 bp, Homo sapiens
tgcgagaccagtattgcaacagcagcagcagatgcttcaaatgactgggaacttctggggtaggacgttgtctgc

SEQ ID NO: 302848 - DNA, 105 bp, Homo sapiens
cctcgagaccaacgtggaggagctgtgggtggaagcttcttccagaccagctggtcttgcttctggagcatctcttggagcagaagactctgagcccccgaactc

SEQ ID NO: 302849 - DNA, 100 bp, Homo sapiens
gataaatcacgagaggaagcttaaatctgtcgtttgaatttaggaccacctcgttgacttcaagcctcgagccagcatggatactgtccatcacatgtta

SEQ ID NO: 302850 - DNA, 75 bp, Homo sapiens
aacagggaacctgccccccaacacttggaagggatcccaacggcttcaatgactggaccttctccactgtgcgat

SEQ ID NO: 302851 - DNA, 95 bp, Homo sapiens
cacagttggagaaaatcggcagctgagacggccttggccggagacacttctaaaggaggcatagctaaagttactcaatccaacttgaagtcagg

SEQ ID NO: 302852 - DNA, 87 bp, Homo sapiens
aagctcctggactggtttaaaacggtcactgaaggaggtcaaacaggatttatgcatcatccatcattttttacgtctgagccacca

SEQ ID NO: 302853 - DNA, 75 bp, Homo sapiens
atggctacgtgatccatctggctcctccaaggatgaggcagatgctctctacgaagctctgaagaagcttagaac

SEQ ID NO: 302854 - DNA, 90 bp, Homo sapiens
ggactcatggaggctgagcatttattcaggatataattgacactggcaaaacaatgcagactttgctttccttggtcaggcagtataatc

SEQ ID NO: 302855 - DNA, 100 bp, Homo sapiens
cagcttctccgggtctcagcatgttatttctcaaactctgaggctgcggagttcacacattgaaatctgtcatctttttcagagagaaactttcggtaat

SEQ ID NO: 302856 - DNA, 75 bp, Homo sapiens
tggacaccgcccatcagtacagcatccagaaccgtctcgcccaaatctgcagcagcatacggacccacaaatgag

SEQ ID NO: 302857 - DNA, 74 bp, Homo sapiens
cagatgaatatgagtccacctccaggcaatggcgcagttgtgtagcagttgagtaatgctggttagctgttaag

SEQ ID NO: 302858 - DNA, 98 bp, Homo sapiens
ttcaacccacccaaaagcagcaaaaacacagactttttcattggcaagccaactctgagagaggtgatgatgaacagtctacacagatggctgcaagt

SEQ ID NO: 302859 - DNA, 51 bp, Homo sapiens
aggaaaacaagtgtctgcttatgtcgatcactttgggaagcagtgacatcc

SEQ ID NO: 302860 - DNA, 90 bp, Homo sapiens
tggggttccctatgcaaatgccaaaggaattggttatccagggagagacaaaggcagcgctgccctcgggggagtattggccctggcgga

SEQ ID NO: 302861 - DNA, 100 bp, Homo sapiens
agttggagttggaatttgtgcaatgtttagccaacccaaattaccttaattgtgtctgacttccagcaactgctggcctgtgccagggtgcaagctgagc

SEQ ID NO: 302862 - DNA, 101 bp, Homo sapiens
gtctgggccttttgggcagcttttccggcctgacaacttcatctttgagataattgacgaccttgccaacctagtggagaacacagatgaaaaacttcgca

SEQ ID NO: 302863 - DNA, 75 bp, Homo sapiens
acacaccgagaccaaaggacccttgggagactcacacctgggagaggctgaactcacgggaatcaaatggcgtag

SEQ ID NO: 302864 - DNA, 82 bp, Homo sapiens
cgagaagagcagagcggagggagccccagacacggaactcctgcgttgcgagctgtgcctgggcatcatgggtgggaaaccg

SEQ ID NO: 302865 - DNA, 100 bp, Homo sapiens
tttttcttgaaaggagataggaacattataagaatttcaagcaggcctgaaggattaacatcaacagccaagacaatgcaaactccagtgaacattcccg

SEQ ID NO: 302866 - DNA, 75 bp, Homo sapiens
gagtgaagaacgccgccatccagccaccattccaaggttgatgctatgaaactgggagtaaaggaaatgaagaag

SEQ ID NO: 302867 - DNA, 74 bp, Homo sapiens
caaaaaacttcttcatgatcatgaacttcttttggccaagctcaagggcctgctttcttccccgggcgatgtgc

SEQ ID NO: 302868 - DNA, 100 bp, Homo sapiens
ctgcaatgctgctttcaatgacctctggagacttgacctaaacagcaaagagtggatccgacctttggcttcagtgtaaacaggaacatcgataagtagt

SEQ ID NO: 302869 - DNA, 50 bp, Homo sapiens
aaattgcatcttgtagttatgaggccagacccaatgattctcgcatgctg

SEQ ID NO: 302870 - DNA, 100 bp, Homo sapiens
gcccttgcggagttccgcgtccgaggtgtgaagggcatgacgtccttgatgaaggccgcgctggacctcacctaccccatcacgtccatgttctccggag

SEQ ID NO: 302871 - DNA, 90 bp, Homo sapiens
gagctacggtaacgatcagtggctgcagtctttctctaatacacagaattctaggaaggaggctgttcttttagccaaaatgaaacaccc

SEQ ID NO: 302872 - DNA, 106 bp, Homo sapiens
ttttgcctgaatacatgatttaaacaagagatttccacagaaggcatcaagcagatcctgccacaccagatgaccacggcagggcccgtgctgggtgagggccggg

SEQ ID NO: 302873 - DNA, 100 bp, Homo sapiens
gtctctgcacctcgcgccccagcaggtccagcagctccagatctcggttgaccaacatggtgacaacctgaagaacaccaagagtgaaattgcagagctc

SEQ ID NO: 302874 - DNA, 75 bp, Homo sapiens
ctactggcgaaaatgttggaccacttgctttaccagttgggaaggcaaggaccaacttggaggccttgcagaaga

SEQ ID NO: 302875 - DNA, 90 bp, Homo sapiens
gaacttgctctaacttcctcggccgagccgggccgcgccgccgctgccgccgccgcgcgcggggaccgatgatgtggcgaccatcagttc

SEQ ID NO: 302876 - DNA, 75 bp, Homo sapiens
cggcgacaagggtgttcccgaactagagtgggaaatgttgggtgaactcttcactcctgtagaaacacctgaagc

SEQ ID NO: 302877 - DNA, 97 bp, Homo sapiens
ggacttggtctggagcatcccggattgcttctcgcacctgtctggcacctaggtatagtggaggattacaagccaccgttctacgatgtggttccca

SEQ ID NO: 302878 - DNA, 75 bp, Homo sapiens
accgagatgtgatgttggagaactacaggaacatggtcttgctggtgttatgtgccaagaaccttgcaaagaaag

SEQ ID NO: 302879 - DNA, 97 bp, Homo sapiens
ctggatgagcccaccagaatatgtttcttgttgttatagactttctcagaagctatacattgtaagttccagttctggccgggcgcggtggctcaca

SEQ ID NO: 302880 - DNA, 95 bp, Homo sapiens
ggataggcctgtgacgaaggtgctaccatcgtgagagtaaggaaatctggcattttttaaagtttgcgccccacaaagaggaaatattccaaagg

SEQ ID NO: 302881 - DNA, 116 bp, Homo sapiens
tctcggagcacttcctagcatgccccgagccctggcctttcaagcaccagtcaatatccaggtttaccgaactaatcagtgtgctggggagtttgtgattacatttccaagagcct

SEQ ID NO: 302882 - DNA, 115 bp, Homo sapiens
gccgagtctcaatatctgtcttcggtggactccttcggcagtccacccaccgccgccgcctcccagatataacacgtgggaaccggaggagaacatcctggaccccaggctgctg

SEQ ID NO: 302883 - DNA, 88 bp, Homo sapiens
cccatcctgccgtccttctccactttcgccagcccgtgccgcgagcgcggcctgcaggagggggggccctcagcctcttggccttgaa

SEQ ID NO: 302884 - DNA, 100 bp, Homo sapiens
cgtcgcctccttgcccgtgaccgtcgctagaactcagttgtgcgttgcggccagtcgccactgctaaatgagccgtcagactgctacagcattacctacc

SEQ ID NO: 302885 - DNA, 83 bp, Homo sapiens
cccgctcggccccgccagcagcactgtggaggccgtcctcgggcagctggtggaatttttgaagaaaatggaatctcgaggcc

SEQ ID NO: 302886 - DNA, 88 bp, Homo sapiens
gtagacccgtctgcagccctggatctattaaagggagcattccgatcatctgaggaacagcaggcatgttatttgaaagcaattgaga

SEQ ID NO: 302887 - DNA, 51 bp, Homo sapiens
caggaaattaccctgactatctccggtctttactcacctggagacctgtgg

SEQ ID NO: 302888 - DNA, 100 bp, Homo sapiens
caaatgatggcacagtgaaaatctggaacagtcaaaagatggaggggaagaccaccactaccagaattagactttcttgtacctaaggctggattcttct

SEQ ID NO: 302889 - DNA, 100 bp, Homo sapiens
cgagaagctgccgccgaacgacaggacgttggggcggcctggctccctcagcctttctgagaaaagtctacagcattctttctctgcaggttctcttaac

SEQ ID NO: 302890 - DNA, 98 bp, Homo sapiens
tccgcctggagaaagagcagctcatcgagatggggaacaggctccgtgcagagctgggccgacccgaaagaggaggcctcggtggtaccagaagagga

SEQ ID NO: 302891 - DNA, 83 bp, Homo sapiens
gcgacaagccgctggcagccgcggatctcaccgccgctcaggatgtatcctccactcctcgctggccaccatcctgctgccca

SEQ ID NO: 302892 - DNA, 100 bp, Homo sapiens
tgctcaaagacatccagctagtaaaaggcagagctgggactcatacccagattcatgatgttgctatcaaaagttgagaaattgtcagaagaaatcatgg

SEQ ID NO: 302893 - DNA, 75 bp, Homo sapiens
cgaaatgttcaagtttaccaaaagagaggcaccgctggaacactaatgagaaatctatcctttgaagatggcctc

SEQ ID NO: 302894 - DNA, 97 bp, Homo sapiens
ctgcacttcgcattttggcattgacatttaattttagggtcctttatatagaagggagagtagtgtctcatccaaagaacagctattcgaccagatc

SEQ ID NO: 302895 - DNA, 101 bp, Homo sapiens
ggcagattcctccgggcagcaggcaaaagtactttgactcaggagactacaacatggccaaagccaagatgaagaataagcagctgccaagtgcaggacca

SEQ ID NO: 302896 - DNA, 75 bp, Homo sapiens
cggaagaagatgatggaaatcatgacccgagaggtgcagacatggccaagtccaagaaccacaccacacacaacc

SEQ ID NO: 302897 - DNA, 83 bp, Homo sapiens
aaacaatcggctgagaatgagaagagattgtgtggtcccgttcctgacccggcctaaggtccctgtcttgcagctggatagcg

SEQ ID NO: 302898 - DNA, 90 bp, Homo sapiens
caacattgatcccaatgccaagggttggatggattgggcagcccacaagtgagtgagatcattggccgagacctgagtggcttccctgca

SEQ ID NO: 302899 - DNA, 87 bp, Homo sapiens
tgaattgacaatcaaagaaggagatatagtcactctcatcaataagggccagatattcgaagcttacaacatggcagctttgtggaa

SEQ ID NO: 302900 - DNA, 51 bp, Homo sapiens
aacaaaatgtcaacaaattgatgggtgaaaggtgtagcagtcactcggcct

SEQ ID NO: 302901 - DNA, 75 bp, Homo sapiens
gtaacattacattatgctttccagacagaaaccaaacttcatctcattttaggaagcagttcaggtacttttgaa

SEQ ID NO: 302902 - DNA, 74 bp, Homo sapiens
cttcgcacttctacacacccctgaagacagagagatgccggtggccgtgggtccctacggacagtcccagccaa

SEQ ID NO: 302903 - DNA, 90 bp, Homo sapiens
gttcgctgcaagtcggcggaaagtttggctgcgcgggttcccccgaagttcagtgtctttggtgcaacactaacaaggcttgtctggact

SEQ ID NO: 302904 - DNA, 51 bp, Homo sapiens
gctggagctggagctgtcggaagattgcattcatggcttctctggcaaccc

SEQ ID NO: 302905 - DNA, 75 bp, Homo sapiens
caacatcctgggcaaagtcaaaactcttcaggtccagcccagaatcaaatgcaggttccatctggatatggattg

SEQ ID NO: 302906 - DNA, 88 bp, Homo sapiens
gtcgtctttgcttcagccgcagtcgccactggctgcctgagacaatgcagatcttcgtgaagactctgactggtaagaccatcaccct

SEQ ID NO: 302907 - DNA, 74 bp, Homo sapiens
tctccgagctcacccagcagctggcgcaggccaccggcaagcacgaggagcggcaggacgagcatggctacatc

SEQ ID NO: 302908 - DNA, 75 bp, Homo sapiens
cggcatcaagcaggtccggacccactggctgctggagcttgtcaccaccagtctaaggttgtgggtgacagagag

SEQ ID NO: 302909 - DNA, 78 bp, Homo sapiens
aatctggtcaaacatggaatgggaactggaagaagttcgggaactcagagtttgacccccccggacccaatgtggcca

SEQ ID NO: 302910 - DNA, 83 bp, Homo sapiens
ccggttcttggtgggatctgagcaggtctacctccatgccatcgtgcgagatgctcacggccggaagatgagcaagtctctag

SEQ ID NO: 302911 - DNA, 98 bp, Homo sapiens
actaaagcctttagtgcattctcctcatgctattgtgtgggtaattccagaattgattggccataccattgtcactgtattactgctcatgtcattgc

SEQ ID NO: 302912 - DNA, 85 bp, Homo sapiens
cagctggagatgatcctcaacaagccaggactcaagtacaagcctgtctgcaaccagggtttttaatgaccacaacaagcaagca

SEQ ID NO: 302913 - DNA, 89 bp, Homo sapiens
ctcccgagtagctaggactacagcagggtttccaggcctgaggtgcccgccctggccccaggagaatgaaccagccgcagaggatggcg

SEQ ID NO: 302914 - DNA, 82 bp, Homo sapiens
cgccgctctgtctacaacccgaggtcctgaacgaggctgtgggggccctgatgtaccacaccatcactctcaccagggagga

SEQ ID NO: 302915 - DNA, 83 bp, Homo sapiens
tcgtccagagggtcggcagcggcacctacggggacgtctataaggattctaacattttcagagaaccttttggaaagaacaag

SEQ ID NO: 302916 - DNA, 100 bp, Homo sapiens
ggagttcttacaacatggcagacattgacaagtgtgtgtgtgcaggccacagcagcatgcccttggtgtagtcagtgccgaaaggggtctgttccttctt

SEQ ID NO: 302917 - DNA, 83 bp, Homo sapiens
caaaggaattttgaagtcaccactgaggaggaattcaccctgttcgtctatggtggctgagaacaacctgtgcagccagtatg

SEQ ID NO: 302918 - DNA, 90 bp, Homo sapiens
aagacacaaatgtaacttctgaggacaaaaagtgacttttttgaacgaaccattctgtgcaacagccttgtgtggagttgtgctgtgacg

SEQ ID NO: 302919 - DNA, 74 bp, Homo sapiens
cccaggttgccttggaaaatgccaacgccgtgtctgaaggttatgatgtgattgctcaagcccaatctgggact

SEQ ID NO: 302920 - DNA, 90 bp, Homo sapiens
cacaaagtattgtctgaaaaagctcaaaatgaggaaattctgtatgttcttcgccattatattcagaccggaacatgaacattttgcagt

SEQ ID NO: 302921 - DNA, 101 bp, Homo sapiens
gggtgaactaccttcacacaaagaaaattgctcactttgatctcaagacccgagagggactcacttatgggaattcatccgcgacatcctcttgaacccag

SEQ ID NO: 302922 - DNA, 74 bp, Homo sapiens
cacgcggatttggctggcgtcccgcagacaaggtctagctctgtgatgcaggccggaggacagtggtgtgatca

SEQ ID NO: 302923 - DNA, 100 bp, Homo sapiens
ctgtgctggagcacatggaggaactgcaggagcaagtggcgctggagatcgacgcgtacatcgtgcaggccaaggagcgcagctacgagaccgtgctcag

SEQ ID NO: 302924 - DNA, 83 bp, Homo sapiens
aaaatccagaagtacaagcagtctggtcagggaagtcaaagatgcatccctgagttcttcctagcaggcaagcagccgtgcac

SEQ ID NO: 302925 - DNA, 75 bp, Homo sapiens
agcaacagtccaagctcaaaggacctgatttcccatcgccttctgtccccctaaaggcttcagatcctgaggagg

SEQ ID NO: 302926 - DNA, 80 bp, Homo sapiens
gggtctcgggggccgctctgggatcccggccaccagcaattgtccgatattggctccaataattgtggatactatgactt

SEQ ID NO: 302927 - DNA, 83 bp, Homo sapiens
gggcgagcggtggtttggacgccggcggagacgcgggcgagacaccattcgcttttcacccaagatgatttgatgtcttataa

SEQ ID NO: 302928 - DNA, 83 bp, Homo sapiens
aaaaagctgccctgagacggtgtcccgccgaaagtttgaggtggtatcaacatcctacagaagaagaattaagaattcttgca

SEQ ID NO: 302929 - DNA, 71 bp, Homo sapiens
tacggagcataggaggaaaattcatcatctgctcgaattacatctttacaagaggaggtgaagcatctcaa

SEQ ID NO: 302930 - DNA, 75 bp, Homo sapiens
ggcgagagactttgtcagctcccgcacagtaactcgcccatgtttgatggaaaagtcccacactggtaccacttc

SEQ ID NO: 302931 - DNA, 98 bp, Homo sapiens
gcactcctaccgcgtgctgtacctgggtcctgcagttctgagcttgggttccctttgcctggacaccaaccaagcccccaactggactggacttcaga

SEQ ID NO: 302932 - DNA, 100 bp, Homo sapiens
ggccaggcgccgctcagaacggggctgggaaccgacgaggactctctcattgagatcatctgctccagaaccaaccaggagctgcaggaaattaacagag

SEQ ID NO: 302933 - DNA, 101 bp, Homo sapiens
acggccaacttcggcaagatccagatcgggatttacgtggagatcaagcgcagcgatgggacaggagagagtggcaagagtacgtttatcaagcagatgag

SEQ ID NO: 302934 - DNA, 96 bp, Homo sapiens
gcgctcctggcgctgctggctgcgctctgcccggcgagtcgggctctggaggaaaagaaaggtttacccaaggtccagcctagcccctaggcacca

SEQ ID NO: 302935 - DNA, 82 bp, Homo sapiens
agcctcctgagtagcttggattacagagcacagtagagagtgccaagcgtttcctggagaaatttaagccaggaaagtggat

SEQ ID NO: 302936 - DNA, 74 bp, Homo sapiens
acagctcaggctgcccagatggtggctcccggagtccagggggttacactggggacatttattccaattctaac

SEQ ID NO: 302937 - DNA, 80 bp, Homo sapiens
gtatagagatgtgatgttggagaactacagaaacctggtctccctaggaaggtgggagtcaatcattttgacaagtctcc

SEQ ID NO: 302938 - DNA, 82 bp, Homo sapiens
ggcaggggcagcgggagccggccggagatggagtctcactgtattgcctaggctggtcttgaactcctgggatcaagtgaac

SEQ ID NO: 302939 - DNA, 100 bp, Homo sapiens
gccattgcccactgctgccgcccagtgtttgagaacaatctccaggaagatctcttcgaccagatcttggctgggaagctggagtttccggccccctact

SEQ ID NO: 302940 - DNA, 75 bp, Homo sapiens
gatgaagaagacctgctggatggtcttctgggaactggcttccagctgtttggctatgaggaaaaactgcagtcc

SEQ ID NO: 302941 - DNA, 82 bp, Homo sapiens
cccgcgccgacggctgctcaaacatcagggccctgggaggagcggggacactgaggacctctctccaaattggcctctcaac

SEQ ID NO: 302942 - DNA, 74 bp, Homo sapiens
cagtgcccttgtggcgaatggggctcacgtcgagagcgagaacccgagcagcgccatgagcaacactaccgtcg

SEQ ID NO: 302943 - DNA, 75 bp, Homo sapiens
gtggagcccaaagacccctggagacatggagtacgagagggcctccaaagtggaccagtttgtgacgcgcttcct

SEQ ID NO: 302944 - DNA, 98 bp, Homo sapiens
aggaagggagatgcagcatcccagtttttggtcttctgtcaaaaacacagggatgagcttctgcagaaagccgtcattacacctgattttgaaaaaaa

SEQ ID NO: 302945 - DNA, 100 bp, Homo sapiens
ttatagcctgcttatgggggaagatatggatcagaaactttcgaagttggtagaagagctcacaacttcaggagaaccccgactaaatcctgagaaaatg

SEQ ID NO: 302946 - DNA, 75 bp, Homo sapiens
ggaaatggctgcaggttcagacaattaccagctctggctgggtcgccacaacttgtttgacgacgaaaacacagc

SEQ ID NO: 302947 - DNA, 100 bp, Homo sapiens
ataacaacatggaattagaagagggagaactcatggaagatgcagctgctgcaggacccgcagatcttggagaaattcattcaaggcttttggatcacag

SEQ ID NO: 302948 - DNA, 83 bp, Homo sapiens
ggagaagcaacattccaataaagtctttgtggtgaagggactgtcaagttatcaggaactgttgccgttattacatcagatgg

SEQ ID NO: 302949 - DNA, 75 bp, Homo sapiens
gaagaaaaagatacaacgaactagcacaacgagggaaattcagttcatgaagataagaagtttcttgacaaatac

SEQ ID NO: 302950 - DNA, 100 bp, Homo sapiens
gacagatatggcgaaattagaggagtgcgtcagaagcattcaagcagacggcttagtctggggctcatctttgcccgaagtttttacatacaaattctac

SEQ ID NO: 302951 - DNA, 99 bp, Homo sapiens
tgaagcagcgacggcacagcgggaagaatggtaatgtgaggctacaggagatgatggcaacaatgtgccaggaacgtggagcccggctttttgctacag

SEQ ID NO: 302952 - DNA, 74 bp, Homo sapiens
gcgacccttcctggccatcctgggcgggaaggtgaagcagatgcaccttaacttcatggatgaaaaggatcgga

SEQ ID NO: 302953 - DNA, 50 bp, Homo sapiens
ccgagtcttggcacgtgaacagtaaagatgacggcgccttgaggtaagct

SEQ ID NO: 302954 - DNA, 71 bp, Homo sapiens
gtggatggaatctgctttgttgggagtgatggatggacaggtcaatggcatgcagctttatggaaaatctc

SEQ ID NO: 302955 - DNA, 100 bp, Homo sapiens
gaagtggttgagaagcctgtacctgttttatacttgcttttgcttcagcgttctgtggttgtcaacagcttatagtgatttaggatactacattatcaat

SEQ ID NO: 302956 - DNA, 75 bp, Homo sapiens
cgcctacttctataaagtcatccagcgtcgagggcgaggcccccagcagtgagactggcacatccctggacagcc

SEQ ID NO: 302957 - DNA, 100 bp, Homo sapiens
cgtgcggcaagtgagcgatttggtgaacagacactcccttctgtagctattcctgcaccaactgacctgaagttcactcaggtcacacccacaagcctga

SEQ ID NO: 302958 - DNA, 133 bp, Homo sapiens
ggattggaggtgtcagtgttaaaggaacctctacaacgaaggtgaagccacggaagataagaacccttaggagaaatcttgagagtggacagcaattgtgaagatcgccagagagttctgtgtttcatcaccg

SEQ ID NO: 302959 - DNA, 100 bp, Homo sapiens
aagaatgcacattaaagccatgcccgaggatgctaaggggcaggtaaccacatggtggatattggggatattatatttactttgaatgagctacaggaac

SEQ ID NO: 302960 - DNA, 100 bp, Homo sapiens
ttgatttggaaccagataatgctacaacatatgttcataaagggttgctgtgagtctaggtactccaattatgaagccagaatggatttataaagcttgg

SEQ ID NO: 302961 - DNA, 75 bp, Homo sapiens
ttttgaccttcaatctggacattgtcattgagctcagtgatgcccttggaatcagtattgctggaggaagaggaa

SEQ ID NO: 302962 - DNA, 75 bp, Homo sapiens
cctaatgttatacaggctctggaaaaacatgaaggttcaaaatcaaaggaagcccagaagggaggtcatttttac

SEQ ID NO: 302963 - DNA, 50 bp, Homo sapiens
ctcaacaaacaccagcgctttggattctgcttctcagaagatgcactatt

SEQ ID NO: 302964 - DNA, 76 bp, Homo sapiens
gaaaaaataagaaggaacccaaagaaccatctcccaaacaggatggacacagcattgttggttttgccatgtacta

SEQ ID NO: 302965 - DNA, 74 bp, Homo sapiens
aacagagagagaggtggacagatctgagagatactgaggcctctccatattgctgtggtgcagggtaacctgcc

SEQ ID NO: 302966 - DNA, 99 bp, Homo sapiens
caggaatattgaaatggaatctacagtgtttgcagctatgtgtggactctgtggtctaaaagagctccgagaggccttcagagaattcgacaaggacaa

SEQ ID NO: 302967 - DNA, 100 bp, Homo sapiens
tcttcagtgcctactatgttgcatttctccccctgtgttttgtgaaggagctgcgggcgtctttggagacacagcgtgctcagagcagtcgactctgcgt

SEQ ID NO: 302968 - DNA, 82 bp, Homo sapiens
gtgggctgggtgctggacgagggcgcctgtgtggcacggggtcactctggtgcccattgaggagttcagcccggagttcgtg

SEQ ID NO: 302969 - DNA, 83 bp, Homo sapiens
gtgacaacgggctgctcacctatcaccccagcctgcatgtgtcatctggatatgtgcccccaccagtggccactccattcagt

SEQ ID NO: 302970 - DNA, 100 bp, Homo sapiens
tttttgatggccatggcataaggaactctatcccaggaatacagctttgcattaggtgaaaggtgtagcagtcactcggcctacacccacagcatcgacc

SEQ ID NO: 302971 - DNA, 87 bp, Homo sapiens
tccgaagcctgcgcaccaaactgctacttatgtcccgcaatgaagaagctaccaagcacctagaggatcatgaattttctaaaactg

SEQ ID NO: 302972 - DNA, 90 bp, Homo sapiens
cggtcggtgacagcctcaagggcttcagcaccgcgcccatggcagagccagaccatttccatggtgtcagtgattcatattcctgatagg

SEQ ID NO: 302973 - DNA, 60 bp, Homo sapiens
aggagtgtctgaaggactcgccccgcttcagtgccggtggtggtgtgcacattgagcccc

SEQ ID NO: 302974 - DNA, 100 bp, Homo sapiens
cggagaccagacctactgcagccacgcgggcgagcggctgtgtggatgtcggcgaagccgcgggcgaggacctgaaggagaagaaggagaaggtggagga

SEQ ID NO: 302975 - DNA, 75 bp, Homo sapiens
gaaaatgctttatttttgtggcaggcatctgtgggatctgtaatagaaatgttattctcgttcaagttaatccag

SEQ ID NO: 302976 - DNA, 78 bp, Homo sapiens
ctgcctcagcctcccgagtggctgggattacagtggatgagtgctcgtctgactacacaattgtgcttcctgtgattg

SEQ ID NO: 302977 - DNA, 96 bp, Homo sapiens
gacttctacgacttcgagccgctgcccaccctccccgaggacgagctacccgtacagtgaggacgcccgccagggtgagcagtacatgaacacccg

SEQ ID NO: 302978 - DNA, 50 bp, Homo sapiens
gtacatgaagacacggcttttccagtcactgtgtgcccagtattctgcag

SEQ ID NO: 302979 - DNA, 51 bp, Homo sapiens
atgcgggagtcgcaatgtgtgcttggatcaccgggggccatcaagtataag

SEQ ID NO: 302980 - DNA, 75 bp, Homo sapiens
ccttgtgtcaaccatccattccaggagccagctatctgaggtaaatgagctggatggtatcccgttgatcctgga

SEQ ID NO: 302981 - DNA, 75 bp, Homo sapiens
acattgaagttcttcattacttactccaactctggccagttctctattcagaaacttgaacctttcctaagggac

SEQ ID NO: 302982 - DNA, 100 bp, Homo sapiens
ctggaggatgcgttccctggggtccgggtgctggagaatctggtaaaagcaccattgtgaagcagatgaggatcctgcatgttaatgggtttaatggaga

SEQ ID NO: 302983 - DNA, 97 bp, Homo sapiens
ccggcgcggcttctgcctggagagaaggccaatgatgaggccaatcagagtgatacaagtgtctccttgtcagaacccaagagcaaaagcagccttc

SEQ ID NO: 302984 - DNA, 100 bp, Homo sapiens
ggctggttgcactggtccctggagaggggatgttggaaattactattatggacaaggccacccaatgaagcctcaccgaatccgcatgactcataatttg

SEQ ID NO: 302985 - DNA, 80 bp, Homo sapiens
tctcaatcagaattactagattttctctcaaactacgaggaattgaatgatctggcacgggaccctccagcacagtgttc

SEQ ID NO: 302986 - DNA, 147 bp, Homo sapiens
cagcagagcaaagttaccggacagcaattaaacacagaaggaaatacccagactgttactacaacctcgggcgtctgaatataaccttgaaccttgtgaagatcctggcattcctcaatatggtagtcgaatcgggttcaactttgg

SEQ ID NO: 302987 - DNA, 82 bp, Homo sapiens
caatcaagaaaggagaaagagagctcaaaatcggagacagagtattgaaatatggctacacacacctttctgcaggagagct

SEQ ID NO: 302988 - DNA, 100 bp, Homo sapiens
aaaagatatatcccacagccactggagaaaaagaagaaaatgttaaaaagaacagatacaaggacatactgccataatgaactctggaagcccagccagg

SEQ ID NO: 302989 - DNA, 100 bp, Homo sapiens
cagtggagccttctcagacccacaggtcgcttcctttaatgaccctgacttcctcaagcagctagagatgtccataaagtacgggacccctttcctgttc

SEQ ID NO: 302990 - DNA, 82 bp, Homo sapiens
caggatctcgggctcggaacgagactgcacgttctggagagtcttggcttctgggaggaagtcagagggattatctcaggat

SEQ ID NO: 302991 - DNA, 90 bp, Homo sapiens
agctgttcctattcggccatcttggctcctccacaactgaaatgtggggcatgtggtgccattggacacatgaggactaacaaattctgc

SEQ ID NO: 302992 - DNA, 75 bp, Homo sapiens
atgaagagacatgagatcatggtggccaaacccacaggcatttcagaagatggacacaaagaagaaggaggaaca

SEQ ID NO: 302993 - DNA, 100 bp, Homo sapiens
cagtatctcacctccctaaactggttaatagtggcatggaagatccatttgatggtggatgcttccaaaagcatcgaagctgtccatgaggacatccgcg

SEQ ID NO: 302994 - DNA, 89 bp, Homo sapiens
cggctgctggtagttccatgctgtctgttcagacttcagcttggtgatccagtttatggaaaaggaaaacttggagaaatccagggact

SEQ ID NO: 302995 - DNA, 82 bp, Homo sapiens
cgcccacgtcccatttcgcccctcgcgtccggagtccccgtggccagcaaacggggattcagcgtccgatcctttggaacag

SEQ ID NO: 302996 - DNA, 74 bp, Homo sapiens
ctcgcctttgccgatccgccgcccgtccacacccgccgccagcactgcgtggctatcgtccatgtgcctgggcg

SEQ ID NO: 302997 - DNA, 75 bp, Homo sapiens
gttccggcccgaggacaccgactaccagcaggtcccaggtgtgacaccttcagcaggtctcagggaagatggcag

SEQ ID NO: 302998 - DNA, 74 bp, Homo sapiens
tgagttctgcgagtgttacacttgcgaaagctcggggagtacagacagtgaggaaagtacagactctgaagaag

SEQ ID NO: 302999 - DNA, 100 bp, Homo sapiens
gaacttggttccccctccctcagcttccgccccaaaagaatacagattctgttcatcttgctctgaaattaaataattctgaactcatggggagaaaact

SEQ ID NO: 303000 - DNA, 100 bp, Homo sapiens
tgtatgaggacgtcccagcgagaaatgtgccggtggtggtgtgcacattgagccccggtatagacagttcccccagctgaccagatcccaggtgttccag

SEQ ID NO: 303001 - DNA, 82 bp, Homo sapiens
gcaggtgccagagagagaggcgcaggacgctcaggcaaaatttggtttctctaatattactggaattgattactctccttct

SEQ ID NO: 303002 - DNA, 82 bp, Homo sapiens
gagccagccttcaatgtgtcctacaccaggcagcccccaaatcccggcccaggaatcaagtactggaaatgtttgatcatgc

SEQ ID NO: 303003 - DNA, 100 bp, Homo sapiens
aagtgatgtaccatcatgggtagcctttgataaacaggtattttttgcatccgtgcgatctggaggaagtagccaagtgtttttcatgaccctcaacaga

SEQ ID NO: 303004 - DNA, 100 bp, Homo sapiens
agatgtttgggaacagctccatcaaggggtgtcacacctgctgccctacttctacctcctctacttcaccgcgctgctggtgcaccgtgaggcccgggat

SEQ ID NO: 303005 - DNA, 75 bp, Homo sapiens
agcatcctgcagagcagcgctggaggatttgcacagattcagtttaatggcacttgatgacattagtgaaagcat

SEQ ID NO: 303006 - DNA, 100 bp, Homo sapiens
acgcagcaagacccgcgccgccgggacccccaggacgacgtgtacctggacatcaccggcgcatattaaatttcctattgactacccctattcaccacct

SEQ ID NO: 303007 - DNA, 82 bp, Homo sapiens
cgggcgcggaggcggctagaaggtgaccgcggatcccagcttcctgcagccagcgtggagattggtgaaagcgtgagagggg

SEQ ID NO: 303008 - DNA, 142 bp, Homo sapiens
cttcctcaacaccagcaccgcagatgttgtcaaggtggcctaccaggaggccaggggtgtcgccatggccataggaaaaggatacagagtagagtttcatgaacctgaaacttggtggaaatttgatcctgaagaattagaa

SEQ ID NO: 303009 - DNA, 75 bp, Homo sapiens
caaagggaagttcttcggaacctttcttcccctggatgggaaaacatctcaagatggagtctcactctgttgccc

SEQ ID NO: 303010 - DNA, 100 bp, Homo sapiens
agcagggggagacagcatcgctggtcattgcccgccaagaaggacattttctgccccgagagttggactggctggacaatggcccagaacaagctattca

SEQ ID NO: 303011 - DNA, 75 bp, Homo sapiens
cctatatgatggatgacttggagttaataggattagattacctttggaggattgttttagcaaccaatattgcag

SEQ ID NO: 303012 - DNA, 51 bp, Homo sapiens
ccaccagctcatactaatcgggtcatgtaatgtttgcagaaataaaaatgg

SEQ ID NO: 303013 - DNA, 60 bp, Homo sapiens
cttttcttcagaagctggtcgccgccggcaggaggaacccctctcccagatcactgccta

SEQ ID NO: 303014 - DNA, 98 bp, Homo sapiens
ggtcgaacagttttttctaatggctattcaagagagacaagagagacacctccaacttcgacaaagagttcaccagacagcctgtggaactgaccccc

SEQ ID NO: 303015 - DNA, 75 bp, Homo sapiens
gacaaccaggcaatgctggatagataccgaattcttatcacaaaggagcatcgtgcatcaagtcaccagggtggt

SEQ ID NO: 303016 - DNA, 100 bp, Homo sapiens
cagtcttgccacgggcttgaaaccaagataccattttgctgctttggaaaagacctattatgagaggcttccatatcgattgaccttgtacaaataaaac

SEQ ID NO: 303017 - DNA, 75 bp, Homo sapiens
cgtaagagctctatgcctcagaaatttcttgtgaagctgtggtctaccaatctagacaactcagtggcaagcatt

SEQ ID NO: 303018 - DNA, 100 bp, Homo sapiens
agaatcttgtctttggcaaaggattccaagcaaagatcttccctgagaatgtgaaaggaccacccacccaccgtctgtcttgtggtcagtcaccctacac

SEQ ID NO: 303019 - DNA, 85 bp, Homo sapiens
gttctccacgctctgtctcctcaacctctacctggcggaggttagtggttacttggatgattgtacctgtgatgttgaaaccatt

SEQ ID NO: 303020 - DNA, 101 bp, Homo sapiens
tgttcctactccaccctcccctggtgctcaccaagctcctgtatctactggaaaatggaagtccagccttaccaacttgtgaaccttgtctgaagggagcc

SEQ ID NO: 303021 - DNA, 80 bp, Homo sapiens
cagccaaccatgatgctgccatctttccaggaggctttggagcggctaaaaacctgattttgacacttcatgacatgtca

SEQ ID NO: 303022 - DNA, 73 bp, Homo sapiens
cacgctcaccaagtaccctgactccagtttctacagcagtataatcactacaaatccaatgtggagattttca

SEQ ID NO: 303023 - DNA, 82 bp, Homo sapiens
acagccgccggccgggagaggcgcgcgccatggcttctggagccgaggaaagcaggcaggatgggagagtcgccgatagaac

SEQ ID NO: 303024 - DNA, 90 bp, Homo sapiens
ccagatgaccagcggcaacctcatcgccttcatcatctacgagtttgtcctgggagattgtatggaggaagagcaagcagtcagaccaaa

SEQ ID NO: 303025 - DNA, 100 bp, Homo sapiens
gccattctcagccgagaccgtctgctacctcgacctggcccctaccttggggaccaggcccttgcgctgtggaaccagagacggggtttcgccatgttgg

SEQ ID NO: 303026 - DNA, 75 bp, Homo sapiens
ccacttgaccttgcacatatagtcagcagccgctcttctaaaacattcaaaccaaagaagaatatccctgaagga

SEQ ID NO: 303027 - DNA, 82 bp, Homo sapiens
aggaggccgagcgcagagcattggcaggaggggcaaggtggaacaggcttcacggctacaggacagaggcagctgaggccag

SEQ ID NO: 303028 - DNA, 74 bp, Homo sapiens
tcatccctgagccttgagctcccagtcgcaggtgttcattgaggatgtcagcagggagtttgtggaggagttca

SEQ ID NO: 303029 - DNA, 50 bp, Homo sapiens
agattgaagaaatgcagagacagttgtcacaggtagtactgatggaattg

SEQ ID NO: 303030 - DNA, 82 bp, Homo sapiens
gcccgcgaccgtccgccagtcgtcccgagagtcatcttagtgggatttggggaagcaacagggctgtgtggggtaacctgcc

SEQ ID NO: 303031 - DNA, 75 bp, Homo sapiens
ctctgtactatgtcgattcgacagcattgctattggaaatacttaatagtagatgaaggacacaggattaagaat

SEQ ID NO: 303032 - DNA, 75 bp, Homo sapiens
gggcagaggatgcagtggaggccatcaggggccttgataacacagagtttcaagaacaactctgctcatggtgat

SEQ ID NO: 303033 - DNA, 75 bp, Homo sapiens
gaaaacatccttggagaggtcggagatgggtttaaggttgggtttcagtaacacctaattttaaggacagactgc

SEQ ID NO: 303034 - DNA, 75 bp, Homo sapiens
gccgaggcccattttccagacgaccacgacgaggccggggtcacgttcctgatgaaaagttatgatcaggtgcac

SEQ ID NO: 303035 - DNA, 75 bp, Homo sapiens
cctcagttggaagcagccgatccagcctgcggagcctgtggggcagatatctcttccaaacgcatgatgaaggag

SEQ ID NO: 303036 - DNA, 74 bp, Homo sapiens
ttaagaaccaactggttgaggttcaatgcagacaagacggatgtgatgctgtagtattattgattccacagaat

SEQ ID NO: 303037 - DNA, 83 bp, Homo sapiens
aggaccggcccctcatcgtgcagtctgcccagtcaagcccgtccaactccagctccagctcagactccagctcagactcagac

SEQ ID NO: 303038 - DNA, 60 bp, Homo sapiens
tcctaatctccttttcacattaaagtttcatttccagggaccctgtggaacgactcttcc

SEQ ID NO: 303039 - DNA, 88 bp, Homo sapiens
ttggctgatttcatgcaagaagtaggctatggcttttgtgcaagcgggtgcctcccaggtcaaatggaataaaaaaaatgctaactgc

SEQ ID NO: 303040 - DNA, 100 bp, Homo sapiens
tgtcggaagaggaccggaggctctggatggaagccatggatggccgggaacctgattgccccctgtgggtcactttctcagtcattttgagctcagccta

SEQ ID NO: 303041 - DNA, 50 bp, Homo sapiens
acttggagtccggacatctgaaacttggagaggagaggcagcagcatggc

SEQ ID NO: 303042 - DNA, 75 bp, Homo sapiens
gggtctgtcatcatgtcgcgttacgggcggtacggaggagggatgtttcagcagcccctgagaaggaagaggagg

SEQ ID NO: 303043 - DNA, 100 bp, Homo sapiens
agccaccaccagtttgcggcaagcaaatcaggggaaacactactatgaagtatcctgtcatgaccaagggttatgcagggtcgggtggtctaccatgcag

SEQ ID NO: 303044 - DNA, 100 bp, Homo sapiens
cccaggccttcatgttgactccaccccaagagcttggcccttcccattgcagcttccagacaacaggaggttccccaatacaactcatgagggtttcaat

SEQ ID NO: 303045 - DNA, 100 bp, Homo sapiens
ttatatcatgtatacaactgtagatgcaaatgggtatctgaaaaatggatcagaaatgagccgtcagactgctacagcattacctaccggtacctcgaag

SEQ ID NO: 303046 - DNA, 100 bp, Homo sapiens
caatggccttgcaaaggccaagagaagacgcagcctacaccacaagcagcagctggagagagaccccagggatgctgctctgctgaatgctgtacttagt

SEQ ID NO: 303047 - DNA, 90 bp, Homo sapiens
cagcccgtggtccttctccatattcgaggttgtttacattcagagctctatcaataagaggaatacatattacagtgaattcgacaaccg

SEQ ID NO: 303048 - DNA, 135 bp, Homo sapiens
caggcggtgttggacaggcttacctttgactaccaccagaagctgcagggcaagccacagagccatgagctggtgaacagtctacacgtggctgaccctgtggaggctgtgctgcagctccaggactgcagcatc

SEQ ID NO: 303049 - DNA, 50 bp, Homo sapiens
tggctgtccacctccaccagacggtccagagcccaaatcttgtgacaaaa

SEQ ID NO: 303050 - DNA, 95 bp, Homo sapiens
ctaaagaatattcttacatataataaagaattcccatttgatgttcagcctgtcccattaagatgcctgaaaacttcatgcctcctgttcccatc

SEQ ID NO: 303051 - DNA, 82 bp, Homo sapiens
tatacgtgtatgttcacttacgcctctcaaggagggaccaatgaggagtttaatctgattgataggcgtgagctggcacctc

SEQ ID NO: 303052 - DNA, 90 bp, Homo sapiens
acactgctgagtcacacacaacgcttgttatgttttcatcacttctctccagaagatatgccacacttctgcctgctgttggcaaccctc

SEQ ID NO: 303053 - DNA, 90 bp, Homo sapiens
tgcccgccgccagcatgttgggcgccccggacgagagctccgtgcgggtggctgtcaggaacaagactgccaatggagactgccgcagag

SEQ ID NO: 303054 - DNA, 99 bp, Homo sapiens
tctgtgacctgccccttctctttacgcccggtatgaaagccagcggatccagctggagtcggagctggctgtgcagctggagcagcgggtgacagagcg

SEQ ID NO: 303055 - DNA, 82 bp, Homo sapiens
gcgtccccggccgggacgcgggtcgcgtcgttgtcctccgcgagcgtccggattgcaggtgtttcccattaaacactaccag

SEQ ID NO: 303056 - DNA, 135 bp, Homo sapiens
cactgcagtagaattccttgtagataagcaactggattttttaactgaagatagtgcctttcagccctaccagccataaagttgggcatgcacagaagcatttcatcatcaaatggaagtggtatatacatgatg

SEQ ID NO: 303057 - DNA, 74 bp, Homo sapiens
gaactggcatatttcaaaagggaaaaccaggagctaatgattcaaaagccaatggaagcactgttgtgaagaac

SEQ ID NO: 303058 - DNA, 100 bp, Homo sapiens
cttggactcttgattggaatgttctccctgcagcagtcagcccaaaggaagtggatgattcaacagccacacaaagcagcaacattttttggatgcattg

SEQ ID NO: 303059 - DNA, 97 bp, Homo sapiens
ttgggtttgatgccacgtgttctctggttgttttggataagcagtttcacccattaccagtcaaccaggaaggacgcgtgaccaaaaccaaagacgg

SEQ ID NO: 303060 - DNA, 100 bp, Homo sapiens
ggaataggtgtatcaagtaatggtgcaaagcctgaagcgcaatgtgtcatttaggcctgtgacgtcggaactttattatttgaacatttaaaaataaatg

SEQ ID NO: 303061 - DNA, 83 bp, Homo sapiens
gggcgagcggctcctctgccagagacaatgcagatcttcgtgaagactctgactggtaagaccatcaccctcgaggttgagcc

SEQ ID NO: 303062 - DNA, 75 bp, Homo sapiens
ccagcatttgccatcttcaagtttgttcaggtccaggtgcaggtacagcagtctccgcaacaggtctcggctcag

SEQ ID NO: 303063 - DNA, 90 bp, Homo sapiens
gcagtatgaccgggaccgctcgggctccattagctacacagagctgcagcaaggtactccaaagattcaggtttactcacgtcatccagc

SEQ ID NO: 303064 - DNA, 74 bp, Homo sapiens
ctccttttcctccacctaccttcccgaacagccaccgcactgtgttcctgacacgtacagcaacgccacgctct

SEQ ID NO: 303065 - DNA, 90 bp, Homo sapiens
cagaagaggaggaaaatgttttgccacgtggatgtgaagatttcctctaaaaggtgcgctacctgaagatcattgagaagagtgggtacc

SEQ ID NO: 303066 - DNA, 125 bp, Homo sapiens
gaagcaacccaagacgttcaccgtgaggatcgtcaccatggacgccgagatggagttcaattgcgagacatttctcttgggaagttgtgcatctgacaggaatatagtactgtacgatatgaggc

SEQ ID NO: 303067 - DNA, 76 bp, Homo sapiens
ctaatagactgacttttattccaggggattaacctccatttcagctaatcatgggagagattaaagtctctcctga

SEQ ID NO: 303068 - DNA, 82 bp, Homo sapiens
aacacatcttacctataaacagtgaagtcttaagtgatgcagctgttcggctcttgaatcccagcgatgaaaccaggaactc

SEQ ID NO: 303069 - DNA, 100 bp, Homo sapiens
ccttccggaacagcgccgaggccttcaagtgcatgatgtgcgatgtgcggaagggcacctccacccggaccgtatccttgatgagcttgacaaagacgat

SEQ ID NO: 303070 - DNA, 74 bp, Homo sapiens
aaaggaagacttgtaacctggagaagagacccaacatgagtgaagtttcctgcaagaaacgggacgactatttg

SEQ ID NO: 303071 - DNA, 143 bp, Homo sapiens
aacggcgacctcaagaagcagctccacgaaaggcagccgcggatcgccgcgctcagcgacaaacaaggtgcttcaaggatgaccgcatcgtcttctggacttggatgttctccacctacttcatggagaaatgggctccccgg

SEQ ID NO: 303072 - DNA, 82 bp, Homo sapiens
ttatggagcatatattatggaacacagaactgtggctgcaccatctgtcttcatcttcccgccatctgatgagcagttgaaa

SEQ ID NO: 303073 - DNA, 75 bp, Homo sapiens
aacagcttgatcgtctgggcctgtgtttcagctgggataggattaaccagaagggctcggagaagccacttgagc

SEQ ID NO: 303074 - DNA, 100 bp, Homo sapiens
tcaccacaccaagaacagcgagcaggcgcgcagccacctggagaaggcgaatgaccgaagaagcatgccgaacacggagtcagaaacgagcgcttgaacg

SEQ ID NO: 303075 - DNA, 100 bp, Homo sapiens
gtccattgtggtatctcccattttaattccagagaatcagagacagcctttcccaagagatgttggcaagcctacaacacagcagtcccctcaggatgag

SEQ ID NO: 303076 - DNA, 100 bp, Homo sapiens
tcctgaacgactgtttacgggagatgctgctcttcccttacgatgactttcaggctgcagttcatggagctcgtttcaaagggcaagatctaaaactggc

SEQ ID NO: 303077 - DNA, 50 bp, Homo sapiens
ggcagcatgcagtgctttctggagatgtggtatggtgtattcctgtgggc

SEQ ID NO: 303078 - DNA, 51 bp, Homo sapiens
ccgaaacgccgaatataatcccaagtgcacagccagagaacaacacatcac

SEQ ID NO: 303079 - DNA, 82 bp, Homo sapiens
ccttggaaatcctgccgcggacttctctgcacagcatccctgtgacaggcgacgttgtggacgtttaccagcgggagttcct

SEQ ID NO: 303080 - DNA, 90 bp, Homo sapiens
attccaagtaactcttatttgtcctggtatctgggatagcaaaggtcttcttccctcgccccttctccatcgtcccaggaatcccagggg

SEQ ID NO: 303081 - DNA, 90 bp, Homo sapiens
cccttggaaaaattcagaaaagagcaacttggagctgtaaaggaagaagatggactgcggatgaggaagacagtgcagagcaacagcccc

SEQ ID NO: 303082 - DNA, 102 bp, Homo sapiens
ggggtgcagcagctgcaccccaccttgatccagcggacttacgggcataatcaccagcaacacccgggacaataatacgggggccacctacccccacctgaa

SEQ ID NO: 303083 - DNA, 100 bp, Homo sapiens
aaggacttcggaatgcactacaacaggaaaatcatattatagatggagtaaagttccgccatggagtcatagttgcagctgactccagggctacagcggg

SEQ ID NO: 303084 - DNA, 107 bp, Homo sapiens
agaggatctggtgtaccaggcgaagctggccgagcaggctgagcgatacgacggttgtggcagcactgcctgaaggtatgagaccagattctaatctttatggtttt

SEQ ID NO: 303085 - DNA, 90 bp, Homo sapiens
aagaccatcatgctgcgcggccttcccatcaccatcacagagagcgatagcgggaacagcttccacgtgttcgaccagggccagtttgcc

SEQ ID NO: 303086 - DNA, 100 bp, Homo sapiens
agctgccgccgcctgcagtcggtgaccgcgcgactcggcgcccgcccgcgtttgaaggatgacctctaggaagaaagtgttgctgaaggttatcatcctg

SEQ ID NO: 303087 - DNA, 83 bp, Homo sapiens
ggcgcggggaccgctgtgctctcggagcaggccgggctctcgccatgggtcactgtcgcctctgccacgggaagttttcctcg

SEQ ID NO: 303088 - DNA, 103 bp, Homo sapiens
gggttttctcccaacgtcaggcccgatggctcggcttccccagaccctacagcttggggcctgggctcctctgaccatcctcattgagaaaggaaagtgagtc

SEQ ID NO: 303089 - DNA, 51 bp, Homo sapiens
ggaagaagccagcagaggaactccttcatgacgtatcccagactttactca

SEQ ID NO: 303090 - DNA, 50 bp, Homo sapiens
ctcaggaatcatgggctatcaaaggtccaagacaactttgacaagattga

SEQ ID NO: 303091 - DNA, 100 bp, Homo sapiens
ctggaggcggcggagcgcgagagcttcgagcggactcagtggatccggattggtgccaatgtctccaacttcacttttgctcctagcacgattatatttc

SEQ ID NO: 303092 - DNA, 75 bp, Homo sapiens
aatcagacctgctcacacttcagaatagagaagtttatcatctggacttcaagctgcaggcagttctgtttttcc

SEQ ID NO: 303093 - DNA, 75 bp, Homo sapiens
gccgaaggaaaatgtcactgtcccattggccatattttagactatggaaatgatgttagacaaaaagcaaattca

SEQ ID NO: 303094 - DNA, 51 bp, Homo sapiens
gccctgaagttgtccatcccttggttggtgttcgaggaagagacattgttg

SEQ ID NO: 303095 - DNA, 50 bp, Homo sapiens
ttcacttattccaaggaaagatacaggagcccagtttcctccaattgcag

SEQ ID NO: 303096 - DNA, 133 bp, Homo sapiens
tatctagggagagtttctgtgtgatttacctcaactggatagagtactgctcttcccgaagagcaaagggacacatggaagctgccagccccccagccaaggatcagctgagccctagggctgatgcttgcct

SEQ ID NO: 303097 - DNA, 73 bp, Homo sapiens
cacagatgtccaagctgccaagaaagatatgatccgccaaatgatgattaaaatatttcgctgcattgagcca

SEQ ID NO: 303098 - DNA, 100 bp, Homo sapiens
aagagcaaagataagaagagaaaaagagaagaagatgaagaaaccagcttgatatgttgagatgtgataatggatcatcatgtttctaccatcaagcctc

SEQ ID NO: 303099 - DNA, 98 bp, Homo sapiens
aaatacctcacccttcaaagtaccaggtgttcctgaaaagccccatagtgattgagtcttcaaaaccaccgattctgagagcaaggaagattttggaa

SEQ ID NO: 303100 - DNA, 75 bp, Homo sapiens
gtgatatttctcttttgtctgcccctattgtaagtgcagatggaacacaacagatgaatatttcccccgcttccc

SEQ ID NO: 303101 - DNA, 82 bp, Homo sapiens
cggaagcttgtggcgctgaaaacgaacggttgcctgtggctggagaaaggaatgtgctcatcaccagtgccctcccttacgt

SEQ ID NO: 303102 - DNA, 130 bp, Homo sapiens
tcagtgtgctgggatgaggttacgagtagccatgtgccatatgatttatcggaagaataccctgaagatgtagctcctactgttggattttcaaaaattaaccttagacaaggaaagtttgaagtcacca

SEQ ID NO: 303103 - DNA, 101 bp, Homo sapiens
caaaatcatgcgagtggggacagcttcttcctaggtgaaaggtgtagcagtcactcggcctacacccacagcatcgaccttgtgaacccagcgacctgact

SEQ ID NO: 303104 - DNA, 50 bp, Homo sapiens
ggcctcgcctcctcgcagcagcgccatggctggtccagggaccctcatca

SEQ ID NO: 303105 - DNA, 101 bp, Homo sapiens
gcctgcagcggagcccacgagaggcagcgccatggcggagcagacctactcgtgtattaaaggtggaagaaggtccatatctttttctgtgggtgcttcaa

SEQ ID NO: 303106 - DNA, 100 bp, Homo sapiens
agcggcggtgctgggaggcccggccagctcgatcgcaggcttccacctggcggccaggccaattcctgtccccccagcagcatggcatcgtgtgctgaac

SEQ ID NO: 303107 - DNA, 106 bp, Homo sapiens
ctgctccctctaagtaccaccgaactcgatctgggggagccagggatgaacgatatcgatcaggagcagaaagtttaataggcaagaaagaaggaagaagctcccc

SEQ ID NO: 303108 - DNA, 90 bp, Homo sapiens
accagaaaaacttcctgaaagcttaatgcccaaactgattgatttggaagattcagcagatgctgatggaaagttaagcgtgaaatttgg

SEQ ID NO: 303109 - DNA, 90 bp, Homo sapiens
ggctgcttcccgttctgccatgatgatggtggatgcttccaaaagcatcgaagctgtccatgaggacatccgcgtgctctctgaggacgc

SEQ ID NO: 303110 - DNA, 100 bp, Homo sapiens
atttctttctcgctgatcgcctaacttctactgacgaagcttggaagttgcagaagtatcaccttttgccatgatagcatttctttcattggacagttcc

SEQ ID NO: 303111 - DNA, 100 bp, Homo sapiens
tatagatggacaagagacgatcattctgcaagcaggcaacctgaatacaggtactactgagcgagtgtgcttgatccagggaacggttgaagcactgaat

SEQ ID NO: 303112 - DNA, 97 bp, Homo sapiens
tcagcttcaaagttccccaagaagaactggaaaatgccagcctagtgtttacagattttgctaaacatgttgactttctagaagccataagtagtgc

SEQ ID NO: 303113 - DNA, 74 bp, Homo sapiens
gcccccctgaaccccaaggccaaccgcgagaagatgacccagggaggattctatgatggaatacctgaagattg

SEQ ID NO: 303114 - DNA, 98 bp, Homo sapiens
cctggccaggccggcctgtctgccgcgatggatgacagtaaggtttctgaaggattgtcattcttgcatagcagtgtgaaaatggtgcatggaaatat

SEQ ID NO: 303115 - DNA, 135 bp, Homo sapiens
gccggcgcgaggacagcgcgtgcccgcgaggagccgccgcgcgcccgcgccctccgcgcgacgccagggtaccgtgagggttttctctggaagcgtggccgggacaacgggcagtttttgagccggaagtttgtg

SEQ ID NO: 303116 - DNA, 100 bp, Homo sapiens
caggccagtctgggcaccctgggatagcggctgcagagctcagagtggaccctggcccgctgtgaccacgccttttgctggggcctgctggaggagttgg

SEQ ID NO: 303117 - DNA, 100 bp, Homo sapiens
cctagtgactgcggcctgcatcccggtgtggagagagtatgctctgtgtcgtcccagacatttctgcattccgagaaggttggagatgggtccggcaacc

SEQ ID NO: 303118 - DNA, 100 bp, Homo sapiens
aaaaaagaaactacagaatcaacttcaaggagtacaagcgcaagctagccagagtttccctggtgcgcaaagaactcaggtcccggatccagagcctgcc

SEQ ID NO: 303119 - DNA, 74 bp, Homo sapiens
gcacttcttctgctctcactgcggagaggtgtttggtgcagaaggcctccccatggccacccatggaccagtcg

SEQ ID NO: 303120 - DNA, 101 bp, Homo sapiens
cagcatggctgtcgtgtctacggcaactccacagactctagaggacaaaatcccagtccttggcacaaactcaggaaatggaagccggagtctgttttttg

SEQ ID NO: 303121 - DNA, 90 bp, Homo sapiens
ggcggtgtctacagtgttctcgacttcgtcgctgggaagtgatgccgacatggtggataagaacaagtgctgcacactctgcaacatgtc

SEQ ID NO: 303122 - DNA, 74 bp, Homo sapiens
tcctgcctcagcctcccgggtagctgggactacagaagtttccaagggtcacttgtgtctcgtccgtgggaaga

SEQ ID NO: 303123 - DNA, 73 bp, Homo sapiens
cgtgaggagcagcgctgcagccgcagccgcagccgccgccggccaggtcgaaacttcagagaaatgaaaatcg

SEQ ID NO: 303124 - DNA, 96 bp, Homo sapiens
gcagatgaaaaagtgtgacttggcagctgagttcccgattttgaaatgctgggctcactcagaagtggcagccccttgtgctttggagaatgagga

SEQ ID NO: 303125 - DNA, 74 bp, Homo sapiens
aactggaccgagcagcagcagatggtcttgggcgtctttggtactggcttttttaggggtctgcctggggatta

SEQ ID NO: 303126 - DNA, 51 bp, Homo sapiens
aggaagcggagggcgcgcgagggatccacctctgatgttcagtgaagacta

SEQ ID NO: 303127 - DNA, 75 bp, Homo sapiens
gtggagagagttcggcgctcagagaggtaccagaccatgaaggtgcccctgggcgctgggattgctctagcctgt

SEQ ID NO: 303128 - DNA, 155 bp, Homo sapiens
ggcgcggtagtactatgatttggtatgtggccactttcatagcaagtgtgatcggcacccgagggcttgcggctgaaggctcggggaccagttctacaaggaagccattgagcactgccggagttacaactcacggctgtgtgcagagcgcagcg

SEQ ID NO: 303129 - DNA, 83 bp, Homo sapiens
gggaataaatgggaacaggccagcaaaacactcagctgcaagtccaaagccacaaggaagctttataagcgatatgcttttct

SEQ ID NO: 303130 - DNA, 83 bp, Homo sapiens
gttagttcttcagattttgaagaagggccgtcgaggaaaagagactctgacctgtttttgttggacacccgtgtagtatgggc

SEQ ID NO: 303131 - DNA, 100 bp, Homo sapiens
gggactgccttccattgtgaagtctgttcaacttgcctcgaaccctgtgctggatgcctggtacggtgctcgtgactgggccttgaaccacctagatgat

SEQ ID NO: 303132 - DNA, 83 bp, Homo sapiens
gggaggttacgcagcaaaccatccagaagggggatatgagactttctactcggaatatcctgagtgttgcgtggatgtaaaac

SEQ ID NO: 303133 - DNA, 74 bp, Homo sapiens
ttcagaaccaccatctgaaattagcttaaaaaatgatctaggccctcgggaccaaggatcacgtcatgactccg

SEQ ID NO: 303134 - DNA, 82 bp, Homo sapiens
aaatgagcatttcaagagaggacaaaataactaccccgaaaacagaggtgtcagagccagccaccaattaccctagttatgg

SEQ ID NO: 303135 - DNA, 96 bp, Homo sapiens
tgagcagttattttaggcttagtcttggagcgggctacattgagagacctcagctgattcgagcaaaagtgccaattgtgaagttcagggataaag

SEQ ID NO: 303136 - DNA, 88 bp, Homo sapiens
ggcggcgtgtcaggtggttgcggagctggtaagggggggccctcagcctcttggccttgaacgggctgttcatcttgattcacaaaca

SEQ ID NO: 303137 - DNA, 104 bp, Homo sapiens
gcgctcgaggtcgtatgaacgcacaggccgtcgctatgagcgggaccaccctgggcacagcaggcatcggagacaaatttacatgtattggagaccagaccaga

SEQ ID NO: 303138 - DNA, 82 bp, Homo sapiens
atggaatcaggcagttttgtgtccatgtgaacaactatacgacgacatattccacagagcgatccgagcacttcaaaccctg

SEQ ID NO: 303139 - DNA, 90 bp, Homo sapiens
gacctgaagagaaagttgtcggagaaactggacagcacagacttcaccggcaccatcaagtgtacaaagataatcaatgctgattcggag

SEQ ID NO: 303140 - DNA, 50 bp, Homo sapiens
ccggagcccccagcgcagcggccgcggcaaaagtcaacaactctagctta

SEQ ID NO: 303141 - DNA, 50 bp, Homo sapiens
tcgctctggccgacgagtggagaaagtctccgaattcaatcctttgacgt

SEQ ID NO: 303142 - DNA, 82 bp, Homo sapiens
ccactttcgccagcccgtgccgcgagcgcggcctgcaggagccacacccactcgcccgggtctatggccacggtcggagagt

SEQ ID NO: 303143 - DNA, 75 bp, Homo sapiens
ctgttgatggctcaggaactaaactgagcagcgccagttggcactagctgagaagttcaaggagctgaaacgcag

SEQ ID NO: 303144 - DNA, 97 bp, Homo sapiens
cagtgggagttttgatgaatgtaatgcagtctgccacctatctgctcgatggaaaggccccctggggccctgccccacagcatcatgatggggaaac

SEQ ID NO: 303145 - DNA, 50 bp, Homo sapiens
ggggataaaaacatcagagggcacaccagattcgccttttacaagtccac

SEQ ID NO: 303146 - DNA, 100 bp, Homo sapiens
taagctttcactaactttacatccagacaagaataaagatgaaaatgcagaaactcagtttagacaaggaccagttactctccacaagaaaattcacaca

SEQ ID NO: 303147 - DNA, 100 bp, Homo sapiens
aatccgtcagaaaccagtaaaccatctatggagagtggagatggcaacacagccccatctgctttgatatgattgaagaagcatacatgacaaaatgtgg

SEQ ID NO: 303148 - DNA, 101 bp, Homo sapiens
gaatgtggatcaagcaggttttaaatcaagatttaacattccaacacataaaaattatttatccaacagctcctcccaggacccaaccctggaagaaaaga

SEQ ID NO: 303149 - DNA, 82 bp, Homo sapiens
cccaccaacaacaccacaataatccacagccaagccttgcaaaataccctactaaataaatcattttagacatggagtgcag

SEQ ID NO: 303150 - DNA, 100 bp, Homo sapiens
cccgccgggaggtactttgctgattggagctaaacatggtgttatttacttgatcacaaagtatggctatcttcatctgtacgacctagagtctggcgtg

SEQ ID NO: 303151 - DNA, 90 bp, Homo sapiens
gtcgatcaagacttgaccacttacttggataaagttccagagcctggagtgcccactgaaaccataaagcctactttggggataaaggat

SEQ ID NO: 303152 - DNA, 90 bp, Homo sapiens
tgtagataagcaactggattttttaactgaagatagtgcctttcagccctaccaggctgaccggttccctgatgtgttacctgcttctgc

SEQ ID NO: 303153 - DNA, 75 bp, Homo sapiens
cgtggagggcctcgccatgtcctgctgcccgagttacactgttagaccttatgatagccaagataacgagtgatg

SEQ ID NO: 303154 - DNA, 100 bp, Homo sapiens
caaagatccccgttcctggagattctgattgaggaaggtgctcgggtcttcggggcactgggtcccatcggtccctcctcacctgggctcaccctcgggg

SEQ ID NO: 303155 - DNA, 100 bp, Homo sapiens
atggatacctgaagacttcagccttgtcagctccaaaaggaattcttcatttgtctcctgatgtttatcaagagatggaagccagccgccacaaagtaat

SEQ ID NO: 303156 - DNA, 101 bp, Homo sapiens
ccttcctggtcggattacactcctgcttccagacgacaagtcgcaaacggggattcagcgtccgatcctttggaacagggactcacgtgaagcttccagga

SEQ ID NO: 303157 - DNA, 100 bp, Homo sapiens
tcatggatgggctgcctccaggtgacagcaatcagctggcctggtttgatactgacctgtaaatcatcctttaggtgaaatgacaatggatgctctgttg

SEQ ID NO: 303158 - DNA, 95 bp, Homo sapiens
aagagcaagatgcagtcagtggagggtctagacagtttcaaagtgaaacagaagttcttcgctggcagccaggagccaatggccacctttcctgt

SEQ ID NO: 303159 - DNA, 100 bp, Homo sapiens
ctgtgcctctgtacctcctgcgccgacacgctgcgctaccaggccaacaactgccccatctgccggctgcgctgaccccgcactacatctacccaccagc

SEQ ID NO: 303160 - DNA, 100 bp, Homo sapiens
ctttggtgaatacacgatttggtgcagccggggtttggtaccgagcggagaggagatgcacacggcactcgagtgtgagaaatgcttcggttacccacag

SEQ ID NO: 303161 - DNA, 75 bp, Homo sapiens
gaaggacttggatgaagaaatctttgatgatgatgacttttaccaccaggtctgctcaccaggtggccagatacc

SEQ ID NO: 303162 - DNA, 75 bp, Homo sapiens
acctcggcaaattccgacgtcttgaagacttccgagtagatgacccagatgatgtggtaccagttggccaaagaa

SEQ ID NO: 303163 - DNA, 75 bp, Homo sapiens
gcccggctgcagcgagcgctggacggagaggaaagcggtgtgaaaatcacaaatgtcaaatgatggaagatccag

SEQ ID NO: 303164 - DNA, 75 bp, Homo sapiens
acgaggagactctcagcaccctcaggttccagcctgaactgtctgcccctgatctgcggcgatttatcgatggtc

SEQ ID NO: 303165 - DNA, 105 bp, Homo sapiens
ctgggagattactaccagggccggaggattaccatcaccggaaagggcaaggagttggtgcacacctacaagggctgcatcaggtcccaggactgctactccggc

SEQ ID NO: 303166 - DNA, 100 bp, Homo sapiens
agacgtctcagagaggctgtgcagctgctggaggactataagcatgggaccctgcgcccgggggtcaccaatgaacagttccaaagaactactggttcag

SEQ ID NO: 303167 - DNA, 90 bp, Homo sapiens
gtggaagcggccaccgactactgtcagcagctgtgccaggttacttcctcagaatgttggcctcctgtatgttggaggttatgaaagacc

SEQ ID NO: 303168 - DNA, 98 bp, Homo sapiens
gcagcccgagtcccagaaggcggcgatcctgggctgcgggcaaggcgaatgcatcagaggtcaaaatagcggaagaaaatggagctgcatttgcagga

SEQ ID NO: 303169 - DNA, 103 bp, Homo sapiens
cagataccgtttattaaaagagctgtggctgtggttgaccagattgacaccctgacctctgacctacagctggaggatgagatgactgacagctccaaaacgg

SEQ ID NO: 303170 - DNA, 96 bp, Homo sapiens
aaaggacagcattcctgtgacctctgcctaccatccataaaatactcattcccctctcaggtgcaggttttgcagcatttggacaaacaaagccag

SEQ ID NO: 303171 - DNA, 83 bp, Homo sapiens
gtctcggacgtggccatgaaagtactcaacagcatcgcctacaagatggtggagccagggcaagatttactgcttgctgcttt

SEQ ID NO: 303172 - DNA, 50 bp, Homo sapiens
ttgaacccattgtcacccctccggagcacgtgaattgcctctgcttacgt

SEQ ID NO: 303173 - DNA, 90 bp, Homo sapiens
ttctgatttcttttgcaaccctctgcattccatctctatgagccaccatgtgtgatgaatgcagactctgctaccattttggctgtttgg

SEQ ID NO: 303174 - DNA, 83 bp, Homo sapiens
gccttcatagggacagccgcccctggtgcacacaccctcgtattctcctgcccttccccagtattgactcggagacaaaaaga

SEQ ID NO: 303175 - DNA, 100 bp, Homo sapiens
aacaatgggaagaccagaacattgaagacccattcaaaattcccaggagaaatataaggttggaagtgtatcctcccttcttattttttctagctgttgg

SEQ ID NO: 303176 - DNA, 83 bp, Homo sapiens
gctgagcagggacaggagaatgagaggcctccgctggcgttacactcggctggaactgtggctgcaccatctgtcttcatctt

SEQ ID NO: 303177 - DNA, 100 bp, Homo sapiens
gtgaaagaaggttgggttcagaagaggggttggtctccgccagctggacatgtccttgctctgccaactgtacagcctctacgagtcgattcaggagtac

SEQ ID NO: 303178 - DNA, 74 bp, Homo sapiens
atggcatcaagtggcatccatcataagtgggatgaagctctcttgactatgagtaaaggagaaaaggctcgact

SEQ ID NO: 303179 - DNA, 51 bp, Homo sapiens
ctgcgttcacggcaggattcggttagcaaaatgatgcttcaacacccaggc

SEQ ID NO: 303180 - DNA, 51 bp, Homo sapiens
ccagggtggagaagagccagcccaggtgatgatgaacagtctacacagatg

SEQ ID NO: 303181 - DNA, 100 bp, Homo sapiens
ttccaggagctgcagatcgatgacaatgagtatgcctacctcaaagccatcatcttctttgacccagcaatcacagaggtggtaaaatgtgagcatgagc

SEQ ID NO: 303182 - DNA, 100 bp, Homo sapiens
cactcacgtggcatcagtccccactgcggtccacggccaggtgaacaatgagacacctatggctgccgatgaaggctcagcagagaaacaggcaggagag

SEQ ID NO: 303183 - DNA, 90 bp, Homo sapiens
cagcgtgcgttcagccctggggcctcaggagtgcaagtagctgatgaagtatgtcgcattttttatgacatgaaagttcgtaaatgctcc

SEQ ID NO: 303184 - DNA, 82 bp, Homo sapiens
gccgcgcacttcgtcatgttcttcgcgccctgttctggacttcagtgaccccttcagcactgaagtgaagccgagaatcctg

SEQ ID NO: 303185 - DNA, 80 bp, Homo sapiens
tttgactctccagaaaggaaacggattaagtactccagggaaactgacagcattgatatgaaccatggacaagtatattc

SEQ ID NO: 303186 - DNA, 100 bp, Homo sapiens
agtattctccatccagccacatcaacctcctcacccaacagatatggaatgtgcagatgtcccactattaactccaagcagcaaagaaatgatgtctcaa

SEQ ID NO: 303187 - DNA, 99 bp, Homo sapiens
agaaggagatatagtcactctcatcaataaggttaacgtccctaaaacccgccggactttctgtaagaagtgtggcaagcaccaaccccataaagtgac

SEQ ID NO: 303188 - DNA, 90 bp, Homo sapiens
caggttttacgtgaaatgaaagccattggaatagccttatgcaaaaagagctcgtcaggagttcccctgggaagaagagtacaggtcagc

SEQ ID NO: 303189 - DNA, 96 bp, Homo sapiens
gcgcagcgcccaggcccagctcgtccagagtctgcggacagcgcacgtccaggtggccagcgtgaggaagaccacggtcctggatgtcatgaggcg

SEQ ID NO: 303190 - DNA, 99 bp, Homo sapiens
gcgccccttcgcgtcccctgcaccatgagctggggcaccgagctctgggaatactcccccagttgcaagaggcgcaggaccgtggaagacttcaacaaa

SEQ ID NO: 303191 - DNA, 98 bp, Homo sapiens
acagatgtcaacctggaaaatggcctggaacccgctgaaacccacagataatgtggatgcaaatgatcttaagcagttttttgagaccaactattctc

SEQ ID NO: 303192 - DNA, 100 bp, Homo sapiens
cagggagctcacatttctcatattgctcaacagattgtggaacagcaccgcttaaggatgtgttgcaagggtctcggattatagggggcaccgaagcaca

SEQ ID NO: 303193 - DNA, 90 bp, Homo sapiens
gcctggggaggccatgtttctggaggccaacgtaccccatgcctacctgaaaggagggcggcgactggcggcgcgatggacctgaccggg

SEQ ID NO: 303194 - DNA, 100 bp, Homo sapiens
aaactcccacggtcaagcgatctgctggcctcggcctctcaaggaatagccaggtctggctgggtcggcacaacctgtttgagcctgaagacacaggcca

SEQ ID NO: 303195 - DNA, 75 bp, Homo sapiens
tgctcctgttttcccggctatgccatcatggcggatggcgtgtcctgtgaagcaaaatgatgcttcaacacccag

SEQ ID NO: 303196 - DNA, 112 bp, Homo sapiens
ccagattctgctaaagacgagagactcctcgcctaagcatcctgtgctcctgactgaggcgcctttaaacccacgaaaaaaccgggaacgagctgccgaagttttcttcgag

SEQ ID NO: 303197 - DNA, 50 bp, Homo sapiens
ttggggccactgcgaggccgttttagattgtacctgagcctggttctggg

SEQ ID NO: 303198 - DNA, 96 bp, Homo sapiens
acaagagtcaaccagaaagagattgggtacttaatgaacttcctgcagggactgctcaccaaagacccacggcagcgactgtcctggccagacctc

SEQ ID NO: 303199 - DNA, 126 bp, Homo sapiens
gcagtcgtaagaagaggtcccaatcccccactctttccgccctaatggaggtctccagtttcggtgaatgattccaattgtgaccaagaacttctttccctgctcctggatgccaagctgctggtg

SEQ ID NO: 303200 - DNA, 100 bp, Homo sapiens
gacattgacagcaaacagagattcgggttctgccgcttatcttcaggagcgaagagctgcttctgtatcttaagacgctgttggaagctctgactgtggc

SEQ ID NO: 303201 - DNA, 75 bp, Homo sapiens
ctcggattccttatgcagagtggccgacttgatgaggtttatataactttccaagacaaggaagttgtgcaaagc

SEQ ID NO: 303202 - DNA, 100 bp, Homo sapiens
cctcaacaaacaccagcgctttggaacgtgcgcatcgaccccagtagcctgtccttcaacatgtggaaggagatccctatccccttctatctctccgtct

SEQ ID NO: 303203 - DNA, 90 bp, Homo sapiens
gtcgttttccgtgagagacgtagagctgagcgacccagcccgcgagcgagggtacaggtgaaagggggcagacccctcatcatgctttcc

SEQ ID NO: 303204 - DNA, 101 bp, Homo sapiens
ccccggggccgtgaggcgcgcgccgtgacgcctgccattgacctcatcaacaacctgctgcaggtgaagatgcgcaaacgctacagcgtggacaaatctct

SEQ ID NO: 303205 - DNA, 83 bp, Homo sapiens
catttctcctctcagcagaagtccaggttcccatgcaggagcgagcccagggcgtggtgctgaaagtgctcacaaacttcaag

SEQ ID NO: 303206 - DNA, 75 bp, Homo sapiens
atataaagtcttgaagtctcctaagtgtaaactacaagttctagggttttaaaatcaaagatgggaaaatcggag

SEQ ID NO: 303207 - DNA, 101 bp, Homo sapiens
agctttggaagatgcagatgagaaggttcagttggcaaaccagatatatgacttggttttcctttggaatatggataaatacaccatgatacggaaactag

SEQ ID NO: 303208 - DNA, 80 bp, Homo sapiens
tcttcacggaccagtttcagttcgccgatgggaaacccggagaccaaatccttgtgtggggctgccttccaggaggatga

SEQ ID NO: 303209 - DNA, 83 bp, Homo sapiens
tgccacaaaggatgcctccacacctaccactacccgtgtgccagcgatgcagatggtcagtaggacagaaggtaacattgatg

SEQ ID NO: 303210 - DNA, 75 bp, Homo sapiens
ccctcaaagcaagcccagccactcgacgaccctgaagcccacaagagtgaacagatactgaaagcggccagtctc

SEQ ID NO: 303211 - DNA, 74 bp, Homo sapiens
aagatcctggctaactgttcttctccctaccagtcaatcgcaggccactctgctgagcatcttctcccaggagt

SEQ ID NO: 303212 - DNA, 100 bp, Homo sapiens
gggcggccaagttccagttcgtggcctgttaccacgagctagtgttggagtgcaccaagaaatgtagccacgatggaggtgatgaacctgatggagcagc

SEQ ID NO: 303213 - DNA, 83 bp, Homo sapiens
cttctggatgtgcagcaatcagatttatcattcgggagcgagaacccgagcagcgccatgagcaacactaccgtcgtccccag

SEQ ID NO: 303214 - DNA, 119 bp, Homo sapiens
cacacatacttgtacccgacagggccggttaagagaactgcgcatcaggtgacagagctgaatgaacctctctccaatgaagatcgaaatctcctctctgtggcctacaagaatgtggt

SEQ ID NO: 303215 - DNA, 108 bp, Homo sapiens
atgaagagcccaaaacctattacgaactcaaaagtcaaccgctgaagagcaggagcccagtttcctccaattgcagcacaagaccttccttttgttctaaaggctggc

SEQ ID NO: 303216 - DNA, 90 bp, Homo sapiens
gaagcttggaatccctcagaacactattttggtgcagactttgctgagggtgacccagggaagcagctcgagagtgtcgtagaaagaaga

SEQ ID NO: 303217 - DNA, 100 bp, Homo sapiens
gcaagagtgcaaaaaaattatagttctaactggagctggggtttcattgtttgcggaacttttcaacgaaatgcttcaaagagattttggtgtccgtata

SEQ ID NO: 303218 - DNA, 74 bp, Homo sapiens
tgttcttcttcgagtatttgtagaaggggttattttggagctgttggagcactccttgagctgttgaagatccc

SEQ ID NO: 303219 - DNA, 75 bp, Homo sapiens
tcgatgtgatacctgccgctctggtttctactcattccctatttgccaaggttcacagctgtaaagaacttgcct

SEQ ID NO: 303220 - DNA, 82 bp, Homo sapiens
cgagagcgtcatgaacccgagctatagagaaaggagatgagtaatttctatgcagcccccgacccagagccgagctccactt

SEQ ID NO: 303221 - DNA, 75 bp, Homo sapiens
ggctgaagcccatccagactgtttgatgctgaacttcaccgttaaggctattgattactatttgaaagcgctaag

SEQ ID NO: 303222 - DNA, 100 bp, Homo sapiens
caatggagctggaaaacatcgtggccaacacggtcttgctgaaagccagggaaggtactccaaagattcaggtttactcacgtcatccagcagagaatgg

SEQ ID NO: 303223 - DNA, 88 bp, Homo sapiens
ctcctaaccaaccccgacaaaagatatttcagcagttgaatcagttgaattcacttcatcaagaaactatcatgaaatgcgtgaaaag

SEQ ID NO: 303224 - DNA, 100 bp, Homo sapiens
tatttgacaatgacacaagccttggaggccaggctggggggttccccatttggaaacaattgaagatgttgaagaaatgctcaacaaccttcctggtgtg

SEQ ID NO: 303225 - DNA, 100 bp, Homo sapiens
atgtggagttcggaggaaaagggctcagtgatgtcttggcattgcccattttcaagcaggaagattccagccttccattggatggtgaaacagagcaccc

SEQ ID NO: 303226 - DNA, 75 bp, Homo sapiens
tggcattgttgggagcgctgttttcgtgatcttcagaccccaggttctttggagttaaagttcctcgtaattttc

SEQ ID NO: 303227 - DNA, 90 bp, Homo sapiens
aataaatagggaagatggagacaccctctgggggtcctctctgagtcaaatccagtgagtttgcagaagcaggaggtgaagaacttgcac

SEQ ID NO: 303228 - DNA, 96 bp, Homo sapiens
ggagtcgtagggaggacgccgggacacctggaagccgagaaatggttgggcccgaaggcatcctgcagaacggggctgtggacgacagtgtagcca

SEQ ID NO: 303229 - DNA, 100 bp, Homo sapiens
cactgccgctgctgttacagccaccaggagttttatttcgggagcaagggggctctgctgcatcttccaatcttccaggatgaaccggccgatccaggtg

SEQ ID NO: 303230 - DNA, 75 bp, Homo sapiens
gaatttgcctcggggacgcctctccagacttaattcagtgcacaaatgagatgaatgtgaacatcccacagttgg

SEQ ID NO: 303231 - DNA, 76 bp, Homo sapiens
tttggatcagcttgtgaaatacggagtgaatcctggtcctattgtggggagcagtatgcagaggggaagatgagag

SEQ ID NO: 303232 - DNA, 100 bp, Homo sapiens
ctgctattcaggtccagcaaatcctcagccatcctgggagggagctttagagtggatgggcaggtggtagcactgctggtacagaatctggagcgcctgg

SEQ ID NO: 303233 - DNA, 90 bp, Homo sapiens
ctgcgcgaagctggccaaagcctgcccagacggctcacctgtgcgggatggaacaaaaggttgaaatcacaaagattagacaccttttta

SEQ ID NO: 303234 - DNA, 90 bp, Homo sapiens
ctggagggctgcatgcagggaaggtcattaaaggacctgaaggagaagaaggagaaggtggaggagaaggcaagccggaaagagcgaaag

SEQ ID NO: 303235 - DNA, 100 bp, Homo sapiens
aagtggttggaaatggcacctatggacaagtctataaggatccagccgcagaagccaggatgaaggtagcctgcatcacagagcaggtcttgaccctggt

SEQ ID NO: 303236 - DNA, 98 bp, Homo sapiens
ccgactctgcttaaaaccacgtggttcgatggctgccgcggctacgctgaggctctccgctcagcatgcagccagtaaagatcccagagaagttcgag

SEQ ID NO: 303237 - DNA, 75 bp, Homo sapiens
ggggccctggatgagggggaagggcctcaaagccagaaggcatcaagcatgatggaaccatgtgtgatacctgcc

SEQ ID NO: 303238 - DNA, 50 bp, Homo sapiens
cttcccagtagctgggaccacaggaaaaatgaggaagctgtgagtaccag

SEQ ID NO: 303239 - DNA, 98 bp, Homo sapiens
caatgtttgactatgaatgtttcgttataactgcctggaaggttagcgtcaaagaagttgaggtcatcttccacgatgttgctgtgctgacggataag

SEQ ID NO: 303240 - DNA, 100 bp, Homo sapiens
ggcggcaggcgccttcgcggaccgagcctgacggagccggaggctgggagccgcggcggcctggggaacatcggaatttgccttttatgcgtgagctgag

SEQ ID NO: 303241 - DNA, 98 bp, Homo sapiens
aagcagaggtgggggtgtttgtccagcgactccggggcctgatgaatgacatcgggtctgttcctggtttcccagatgcataaaggaagacatatccc

SEQ ID NO: 303242 - DNA, 76 bp, Homo sapiens
caggtactattcggggaaagaattgaaccttcaccatataagtccaagccttatgcatttgatcgggtgttccagt

SEQ ID NO: 303243 - DNA, 100 bp, Homo sapiens
gttcaaggatttctctttgggaaactaaagagtagcttgagccgagaacgaggcgagaaagctggagaccgaggagaccgcctagagcggagtgaacggg

SEQ ID NO: 303244 - DNA, 100 bp, Homo sapiens
ctctccaaagaaggaggagactgtagcaaggggctgttgtggttccgactataaacagtacgtgtttggcggctgggcctgggcctggtggtgtatctcc

SEQ ID NO: 303245 - DNA, 98 bp, Homo sapiens
taggaatctgacttcctccagtctgaatgacatttctgataaaccggagaaggaccagaataatccagaatggctactctgatctatgttgataagga

SEQ ID NO: 303246 - DNA, 100 bp, Homo sapiens
gtcaaggtggcctaccaggaggccaggggtgtcgccatggtgcccagtcccctggaaggcagtgaaggggacggagacactgactgaggcgatgggagct

SEQ ID NO: 303247 - DNA, 82 bp, Homo sapiens
agactttgtagccatcaacccgagtgcagtttcgatggaaaatgaaggtttcgacacagccccaactgctggtacctgagaa

SEQ ID NO: 303248 - DNA, 101 bp, Homo sapiens
aaaccgaagtcctcaccactcaacagtcaaagtgaagcaggaatttatgcaaatattctcatgaggttctctcagaagagaacttcaaagtcctgaaaaat

SEQ ID NO: 303249 - DNA, 100 bp, Homo sapiens
gccaaggccctgagaggcaggatggttctgttagagtctcgtaggaaatctaagaagattacagccagaggaatctttgcaggtgccagagtggtgcgag

SEQ ID NO: 303250 - DNA, 74 bp, Homo sapiens
atctttttggctgttagatgctcttgttggaagaatactaccagggaaaaagacctcgatgaagttctgcagac

SEQ ID NO: 303251 - DNA, 90 bp, Homo sapiens
cagcatgtcctgggtttcaggctcatcgagaggtaccaggtggatccataaagaacccagccaacccgcagagggaggggaggggctgag

SEQ ID NO: 303252 - DNA, 83 bp, Homo sapiens
gcgccaggcagccctgaaatcagctcgagacatgtgggctgattacatcctggtgctggcccagcagggggagtacagtgagg

SEQ ID NO: 303253 - DNA, 76 bp, Homo sapiens
cctcgggggcggcggccacgccaaggacggggcttaaaagacaaccttcttgcttctgggacatccagcctgacag

SEQ ID NO: 303254 - DNA, 98 bp, Homo sapiens
cagtgctcttacgcagataatgatcattaacatcagcctctctgatcaaagggaccagttactctccacaagaaaattcacacaaccacagtgctctt

SEQ ID NO: 303255 - DNA, 74 bp, Homo sapiens
atcgccgagcgcgccgcgtagacctccgctcccccagattgatctggatactattgatgtaagcaacctcaaca

SEQ ID NO: 303256 - DNA, 100 bp, Homo sapiens
ttaaacaggttcattttggaaaagcaaatgccagatgttaatgtaagctgggatggagagggcccaaagcaactgccatttattgacatttcagtggctg

SEQ ID NO: 303257 - DNA, 74 bp, Homo sapiens
gctgcggcgcggggaccgctgtgctctcggtgtgggcccatcgctggatggatctgtcagaacacggctttggg

SEQ ID NO: 303258 - DNA, 100 bp, Homo sapiens
ctttccgccctaatggaggtctccagtttcgttgattatggaagattcccacaagagtaccacgtcagagacagcacctcaacctggttcagcagttcag

SEQ ID NO: 303259 - DNA, 98 bp, Homo sapiens
gggccttgtgctgtcgctgccgtggcaccccttctagaaggaaggcgcaatggcgaggaagttatctgtaatcttgatcctgacctttgccctctctg

SEQ ID NO: 303260 - DNA, 75 bp, Homo sapiens
gctggacttcttggctggatgcgcgggggatccctcatccacctacatcaggcaactggagagcaaagtgaggct

SEQ ID NO: 303261 - DNA, 96 bp, Homo sapiens
gggcctactcgcccgccaccctgcgctgccgccgctctgaggagttaaaggtgtgaaatctaagaatcccctgccaactcttgagggctcaatcca

SEQ ID NO: 303262 - DNA, 75 bp, Homo sapiens
tggataaccatgctttatatgacaagaccaagtgcactgacaggcagaactcaccagtcacatcaccaggatcct

SEQ ID NO: 303263 - DNA, 95 bp, Homo sapiens
cctggaggaatccgagaagagcagagcggagggagccccagacacgacaatgcagatcttcgtgaagactctgactggtaagaccatcaccctcg

SEQ ID NO: 303264 - DNA, 100 bp, Homo sapiens
ataattaatgcaataaaacgcttccatctttatccagaggtgaccgggctggtccacaagtgggcatggaccaaagacgacgtgatcctccacgtgctcc

SEQ ID NO: 303265 - DNA, 101 bp, Homo sapiens
caaaagagcttctctccagagtagaaaggtgtggtggctcacgtctgtaatcccagcactttgacaggctgagcgagggagtggatcttgaggtcagcagt

SEQ ID NO: 303266 - DNA, 47 bp, Homo sapiens
ctcccaagtagctgggattgcagaagaactgatgaccaccccaattt

SEQ ID NO: 303267 - DNA, 75 bp, Homo sapiens
cggtttgctttgcttcgattggaggaaggacctccacacactaaaaactggaggacacagcattgttggttttgc

SEQ ID NO: 303268 - DNA, 50 bp, Homo sapiens
gagcaatcgccgggacagctgcaaggtcctctccacccggatcctggcca

SEQ ID NO: 303269 - DNA, 100 bp, Homo sapiens
cccagagctcctgggaccaagcaaatggcggacacaattccctgggcggaaggggacttcgggagccagtagccaaggccactgcctgctgggggccctt

SEQ ID NO: 303270 - DNA, 98 bp, Homo sapiens
gaacggcccaggtccccgcccgcaggtcccgggcagaatctgtctatgatcttctcccaaaggagttacagttacctccatctagagaaacatctgta

SEQ ID NO: 303271 - DNA, 82 bp, Homo sapiens
gtacagtacttcttccttccaaggaccagcggtagctcccggggtcagcccaaggccaaccccactgtcactctgttcccgc

SEQ ID NO: 303272 - DNA, 83 bp, Homo sapiens
aggagatcgagaccatcatggctaacaaggaaaatcaggaaaatgtttccaacctggtgattgaggacacagagctgaaacag

SEQ ID NO: 303273 - DNA, 90 bp, Homo sapiens
gttgttaccaatggtgaaactacatgttcagaaaccgacatcggcctggctgcctggggacgcaaggccctggacattgctgagaacgag

SEQ ID NO: 303274 - DNA, 50 bp, Homo sapiens
agcgcactaaatcgtctccaaggacagtcattttgtttactcattcagcc

SEQ ID NO: 303275 - DNA, 100 bp, Homo sapiens
gcgaggcagagaagggccaggagaggagcactttgaggacatggcctccgacgaggacatgtggaatgaatcttacttgttgaatatcttctggttacta

SEQ ID NO: 303276 - DNA, 101 bp, Homo sapiens
tgatcgaccgcaacttacgggaggacggggaaaaagcggccaaagaagtgaagctgctgctactcgggtgtttcccgaccagtccctgggcgccaactaga

SEQ ID NO: 303277 - DNA, 75 bp, Homo sapiens
caactttgaagagatcgactacaaggagatcgaggtggaagaggtgtggacacctcaagatcgccagtgtgtcct

SEQ ID NO: 303278 - DNA, 100 bp, Homo sapiens
aagaggagctccctgtactttccccggtctccttcagcaaacgactccccatccccaggatgtcaacctcagtccctcaaggccatacctggacccaacg

SEQ ID NO: 303279 - DNA, 83 bp, Homo sapiens
cgctctgcgttttgttttcccctcggcactaggcagcggaggagcccgaccgacccgtgcctacaccaactaatgttacaatt

SEQ ID NO: 303280 - DNA, 95 bp, Homo sapiens
gacaattgctaggcggagacagtgcagggaagagagaccttagaaaggatcaggactggcggaaatgttcccactgccaggaggcaggcgccacc

SEQ ID NO: 303281 - DNA, 100 bp, Homo sapiens
cagggacactcggtgtgcgacgtggagatccgaaggaatgaaatccggggggatatgagactttctactcggaatatcctgagtgttgcgtggatgtaaa

SEQ ID NO: 303282 - DNA, 82 bp, Homo sapiens
ggagcctcagttggaagcagccgatccagcctgcggagcctgtggggcagcattttaagtcttccacatcaagcatctccag

SEQ ID NO: 303283 - DNA, 95 bp, Homo sapiens
aagaactcgcaagctcctacgaaagaaagctcatcgaggttggctggctcctctggctgatggcatgttgaggtacatgggccagcggcagcgag

SEQ ID NO: 303284 - DNA, 100 bp, Homo sapiens
ggatgcaccatgccagaccgtggaagatttaacgaatggggttgtgatggcccaggttcttcaaaagatagctcccagctcctccagcagccgacaggag

SEQ ID NO: 303285 - DNA, 83 bp, Homo sapiens
ccgagagccacactttcaagtaaaccagagacgtctcccacaacctgctccgggcgctggacgttgggctcctggcgaacctc

SEQ ID NO: 303286 - DNA, 83 bp, Homo sapiens
ctgaccctgggagacatcgacggttgctgtcttcctcgtccctccggcccttcttcctactcagcgtctcacttttggcctat

SEQ ID NO: 303287 - DNA, 75 bp, Homo sapiens
accgtatcaagccaagaacagcccaatctcctttctgggcaaacgttccaagacctgtggatgaagagccagagt

SEQ ID NO: 303288 - DNA, 75 bp, Homo sapiens
acctcgctgtacgccgagcacccaggcgactgcctcatcttcaagggaacggcaggagcagctgatgggatatcg

SEQ ID NO: 303289 - DNA, 100 bp, Homo sapiens
cttctctcattttctttccctgcaccaactagcaggtaccagctggaggatgagtctgcgcatttggatgaaatgccactaatgatgtctgaagaaggct

SEQ ID NO: 303290 - DNA, 100 bp, Homo sapiens
ggacaagcacagataatgaagactttccatcaagcaaaattcctgcctttctaaatgtggtggatattgctggccttgtgaaaggagctcacaatgggca

SEQ ID NO: 303291 - DNA, 90 bp, Homo sapiens
gtaaaaaatttcgagcatctgaactctgactttgacaggcagtggccttgtcgtcgaagtctggcctttcccgaggccggaaagtgatgc

SEQ ID NO: 303292 - DNA, 100 bp, Homo sapiens
acttaattgacttatgcttcctagttcgttgcccagccaccaccgtctctccaaaaacccgagatacttggcatatcgaaattttatgattgacacgtat

SEQ ID NO: 303293 - DNA, 100 bp, Homo sapiens
cgagagcaccgacaccgcctgtgtggggcccaccctccggaactctaatgaatcattgattgaccagcactattttaccagttggaatgaatgatcagaa

SEQ ID NO: 303294 - DNA, 90 bp, Homo sapiens
cgctgcacaatggcggctctgaagagttggctgtcgcgcagcgtaacttcattcttcagcttttacccagcacctgtccagtgaaacaac

SEQ ID NO: 303295 - DNA, 98 bp, Homo sapiens
gcggctcagccccatcatgctgggtattccaaatctgatcacagcagatatgatcaaggaaggagcagcagtcattgatgtgggaataaatagagttc

SEQ ID NO: 303296 - DNA, 100 bp, Homo sapiens
ggggcttggggggcctcgcctgagagagtgagtcctccaccttccccaaatgggtgaccaagacggaaagagggagacagcccttgagatcctagacctg

SEQ ID NO: 303297 - DNA, 100 bp, Homo sapiens
atgagatggagaccctctagtctcgtgagactttgccccatggcagaactctgctggaatcctattgagaagagctgaactagagaaacatggttataag

SEQ ID NO: 303298 - DNA, 74 bp, Homo sapiens
agggacaatggtcaccgtctcttcaggtctgcctcagccacctccctgacgctgtcccactgtgtggatgtggt

SEQ ID NO: 303299 - DNA, 75 bp, Homo sapiens
cgggcggagacgtgggcgccctccccgccaaggcccgtgcgaggacgtagacaagtttggcaacgagatcaccca

SEQ ID NO: 303300 - DNA, 75 bp, Homo sapiens
cagaatccgcaagtttatgtgtctcagtctgcagcagatgctgagatgaatcgtcacctgtgtgtttggcttttt

SEQ ID NO: 303301 - DNA, 50 bp, Homo sapiens
aggagggcaagaagggcaagaaggagtggagtcaacatatcaatggagca

SEQ ID NO: 303302 - DNA, 50 bp, Homo sapiens
cggctctcgggagcgcaacactgcagtgtgggccaaactgaaattgcaga

SEQ ID NO: 303303 - DNA, 51 bp, Homo sapiens
aaccgattctgcctgtccaagcctgttcacagcattaacaaaatggatgcg

SEQ ID NO: 303304 - DNA, 100 bp, Homo sapiens
ccgaagctatggcctgaagacgggattctttagggtggattacggaacaacaacgagaaagacatggccctcacggcctttgttctcatctcgctgcagg

SEQ ID NO: 303305 - DNA, 100 bp, Homo sapiens
gaattcagaaggaacttgcagaaatcacattggaccctcctcccaactgtagacaggcaaatgtacactggggaccaccatgttcacgtgacatcaagag

SEQ ID NO: 303306 - DNA, 100 bp, Homo sapiens
tatctgacaagagcatcaaccctctgcccagaagaatcagtgcggtttctgtggcagagcgagttgcatttgaaagaggagaagagcctggaaaaagctg

SEQ ID NO: 303307 - DNA, 75 bp, Homo sapiens
ctgaatcagagaccaccagaaaacccagacactgatgattattgtgcaacaaagtggtccattttgcgggaacgc

SEQ ID NO: 303308 - DNA, 51 bp, Homo sapiens
ccaaggccaagaacgggcacctggctgtggaaatgttcctgatggctgcca

SEQ ID NO: 303309 - DNA, 95 bp, Homo sapiens
aaagacatttacaacacagcttgtggatatgggggcaaaggtgctccattatgcctgaaaggttaacttcaccaccaaagcccaagaagaggttt

SEQ ID NO: 303310 - DNA, 99 bp, Homo sapiens
tcgccagcggagcgaacccgagagcgtggagcgggctgggccaggctagcttgtcactttctgcaaaggtttccctcagggagcctcctgctgccaggc

SEQ ID NO: 303311 - DNA, 83 bp, Homo sapiens
aaagactctgggactcttggtgccaacagagttactctgaatgtcgttgtctgctgggtcttcccctcttcattcccccaaga

SEQ ID NO: 303312 - DNA, 84 bp, Homo sapiens
cgggagctggacggcgagcgcgagcggcgcgagaaaaaatcttcccaaggctgcagacaccgacggatttgctttgggagccag

SEQ ID NO: 303313 - DNA, 95 bp, Homo sapiens
gtcatgcagctgcagcattagctgctatgaatggacggaagataatgggtaaggcattttggagatcaaagatgggtagaaaagatgctgctact

SEQ ID NO: 303314 - DNA, 50 bp, Homo sapiens
ggccttcaacccatcagcgccccagactcagctttgcactccagggctgc

SEQ ID NO: 303315 - DNA, 83 bp, Homo sapiens
ctcgtcagcactgactttcagctatggaatcgcacattggagatatatttccacagcatctggcttttcttgttcctgttctg

SEQ ID NO: 303316 - DNA, 100 bp, Homo sapiens
gccagaaggaaatctcgtgattttcattccaagctaaaggagcgagcgagcccgctggataactgccctgggacacagcagcgggaagccgcctgcagac

SEQ ID NO: 303317 - DNA, 90 bp, Homo sapiens
gggggacggggaccagcagctgtcgccgccgctctcaggatgaccagtgtcccagtgaaggaacgagtgaaggtgtctcagaactggaga

SEQ ID NO: 303318 - DNA, 74 bp, Homo sapiens
aggaacccctggaagcctagaaatggccaatggtggcagagtctacatagaactatgcttcgtggtgttctggg

SEQ ID NO: 303319 - DNA, 76 bp, Homo sapiens
aatgaatggtgctatacttgaattttctaaggtgtcattaggttatcaatactctggctgaccatcatcatcgtgg

SEQ ID NO: 303320 - DNA, 100 bp, Homo sapiens
gataaaacgatctaaagggaaggagagaccctttgttcttacacgttctttctttgctggatcacaaaagtatgtccccagaagaccatgtctgtgttga

SEQ ID NO: 303321 - DNA, 83 bp, Homo sapiens
ctgggcgcggattcgccgaggcaccgaggcactcagaggagggaaagcaggcaggatgggagagtcgccgatagaaccacctc

SEQ ID NO: 303322 - DNA, 100 bp, Homo sapiens
cctacactgcttttctaggaaacctaccctatgatgttacagaagagtcaattaaggaattctttcgaggattaaatgttcaaggacgcccacagaaaac

SEQ ID NO: 303323 - DNA, 75 bp, Homo sapiens
gaaagaagtggaaacacccctaactctcccagataacaacgaacttgatgcaagtgataggtttgccaaggtcag

SEQ ID NO: 303324 - DNA, 100 bp, Homo sapiens
caccctgaccgatgggaccctggttcggctttccagtttggcagcagcactacaaatttcaacttcacaaacaacagtccatcaggagtgttcacatttg

SEQ ID NO: 303325 - DNA, 99 bp, Homo sapiens
tgctcaccaagccctgttggagactatgcaaaacaagtttatcagcacgtgggaaaaagcgccagataggctggttcccagctaattatgtaaagcttc

SEQ ID NO: 303326 - DNA, 100 bp, Homo sapiens
aggaggcagccaagctcgtagcctgccactccgtgcatgaagttggagcccttgtttttgacattggatcctatactgtgagagctggttatgctggtga

SEQ ID NO: 303327 - DNA, 100 bp, Homo sapiens
aggacatggagctcgagaacatcgtggccaactcgctgctgctgaaagcgcgtcaaggtgtcatggagaaactccagctgggcccagagattctgcagcg

SEQ ID NO: 303328 - DNA, 83 bp, Homo sapiens
ccggcctggccccggcccctcctgcccatggcggtggccgagctgtacacgcagaggctgacccgcggctgattgagtccctc

SEQ ID NO: 303329 - DNA, 75 bp, Homo sapiens
tggctgcggcggcccagctctctctgacacagccttatgtttgatcatcggccaaggtcctggcgagaactgcct

SEQ ID NO: 303330 - DNA, 75 bp, Homo sapiens
catgatcttcattggtggtatcaactgccatcagggaaagccgttgcctatgcgttttaccaacgaggatcattt

SEQ ID NO: 303331 - DNA, 100 bp, Homo sapiens
caaaaatagtgatagctttgataagtgctcctgacctctgataaagctgcagccaatttctcagatcgttctttgctgaagaacttgggacattggctag

SEQ ID NO: 303332 - DNA, 100 bp, Homo sapiens
tgttcagtactgtgggtgatatttgcctttagtgcactcttctccttcacagtaaagtggctgctcaaggatctaaatttacttgatcgctgtataaaag

SEQ ID NO: 303333 - DNA, 75 bp, Homo sapiens
aggcattgaggactttccttacctgtttttccagctcacccactgccagcagagtcctggaatcaagatgtgaga

SEQ ID NO: 303334 - DNA, 75 bp, Homo sapiens
ctcggagaccccgcgccgacggctgctcaaacatcaggtggagcgagaccgtgccctgggccaccaggagcccca

SEQ ID NO: 303335 - DNA, 100 bp, Homo sapiens
gaggccatgggaccagattccagtgctcatgacccaacagtggcctcatcctgcatgactcgcctgtcccggtctcgtacagcctctctgaccagtgcag

SEQ ID NO: 303336 - DNA, 95 bp, Homo sapiens
cttggcgccctgctctgcgcacacggtgccacatcatctcacagttcaaccaaggcttctacgactgtgtcatagcaactgatgctgaagtcctg

SEQ ID NO: 303337 - DNA, 82 bp, Homo sapiens
cgccgccaagagtgagcgagcggacccgcgatgggcctgtgtcacttgtgaaaatgaagattcagctgatggtgcggccaca

SEQ ID NO: 303338 - DNA, 98 bp, Homo sapiens
attgaggaaatgcgaaaggttgtatgtgatcagaagctgcgtcccaacatccccaactggtggcagagttatgagaacctcagaggatccagaacggc

SEQ ID NO: 303339 - DNA, 89 bp, Homo sapiens
gagccatcctctacaggacccgctttctaccattaaggattccttttaagattgggcagcccaagaaacagattgtgcccaaaacagtg

SEQ ID NO: 303340 - DNA, 76 bp, Homo sapiens
aaatctttcgccgggattctgacctgacttgtttgcagaaacgtactgagcgctttgggcagggaggtgcggggcc

SEQ ID NO: 303341 - DNA, 101 bp, Homo sapiens
cgcggctgctgccgacccctggcacctggcgcccagcgcgcccgtggccgctgccgcctccgccccagcttaacattggtatcccttccctgacaaagtgt

SEQ ID NO: 303342 - DNA, 83 bp, Homo sapiens
caaaggagaagatatatctaaaaggattttatgagggtgtacgttcttcagatgtgtcatggtctgatactcgtaggaccctc

SEQ ID NO: 303343 - DNA, 96 bp, Homo sapiens
agtcttgcccttggagaccttatctatgtggtcattgatctccctatcaatgtatttaagtctcaagataaaacatcgggaggtgttaatccagaa

SEQ ID NO: 303344 - DNA, 83 bp, Homo sapiens
gtgcccttcacctgcagaagcgtgtcgttctgcaccagcgccttgatcgagtacttgagggtcggcactcttcaccctcccga

SEQ ID NO: 303345 - DNA, 100 bp, Homo sapiens
tttgttagaaggaatacaaaatcgagggcatggtgggaaaatcctgccttgcttcgttgggcctatgcaagaacaataaatgtctatcctaatttcagac

SEQ ID NO: 303346 - DNA, 100 bp, Homo sapiens
gcgtcccccgggggcccgtactgcacatcgtggtggtcggatttcaccacaagaagggctgccaggtaccctggctaaagccgggccggagccctctgcc

SEQ ID NO: 303347 - DNA, 100 bp, Homo sapiens
ctgccgcctcccgggagtgccgtgcgccgcagcccgggcccaggccccggcagcgcctgggacaaggaagtgtttggattgtgagctatttcagaactgt

SEQ ID NO: 303348 - DNA, 82 bp, Homo sapiens
ggacggggcggacggcgacgcagcccgcggcagaagaattcaattcgtcataatctgtccctacacagcaagttcattcgtg

SEQ ID NO: 303349 - DNA, 126 bp, Homo sapiens
agcgtccctgtgacctggccgatgaggaagtactgagcctgttggaggaactggcccggaaacaggaggacatccagacatttaatgtggatgcaccatgccagaccgtggaagatttaacgaatg

SEQ ID NO: 303350 - DNA, 51 bp, Homo sapiens
gagaagatggcggaagaggaatttaaggaccatagtacagctatggatact

SEQ ID NO: 303351 - DNA, 75 bp, Homo sapiens
ggccttactccttcacagatcggtagaagaccatgatggagaaggtgatgtggctggagatgatgatgatgacga

SEQ ID NO: 303352 - DNA, 50 bp, Homo sapiens
tcattactgaaactcagtgcactctaggaagtgacctcacaatgactcaa

SEQ ID NO: 303353 - DNA, 100 bp, Homo sapiens
aatttgatgcaaaagaaggggaaatttgattacatactgttagagaccactggattagcagaccctgcttgataatggaactatacagcgaagagacaat

SEQ ID NO: 303354 - DNA, 100 bp, Homo sapiens
cctgacgaaattgaaattacctccgagggaaacaagaaaacatcaaagaggtctagcaaagtctactgttagcagacttggccgatggattgactttgac

SEQ ID NO: 303355 - DNA, 50 bp, Homo sapiens
gttcctcccagctacgagctgccccagagctgccaaacggaggcccgaag

SEQ ID NO: 303356 - DNA, 98 bp, Homo sapiens
tgaaaagcctccttctggttccaaatgacggaggacatccgcttggagccagatctatacgaagcctgcaagagtgacatcaaaaacttctgttccgc

SEQ ID NO: 303357 - DNA, 75 bp, Homo sapiens
accagaggaaaatagtatgggaattcctattatggaatgtttaggtgtccataatgtcactaaacccgtgtcttc

SEQ ID NO: 303358 - DNA, 101 bp, Homo sapiens
gggggcttcacctgcagctgcccggcaggcaggggaggcgccgtctgtgagaaggcagcagtgttgtactgctacttctataaacggacagccgtaagact

SEQ ID NO: 303359 - DNA, 78 bp, Homo sapiens
cacccctgccttttgttcaactctataaagatgctggttgccaacattgacttgggtcctactattttggacattgct

SEQ ID NO: 303360 - DNA, 98 bp, Homo sapiens
gttcacagggaagtcgcctggaaaaaccaatagtatcctggtgtatagcctggaagcaggacgccgcctcttgaagctgggtaacgttctccgtgact

SEQ ID NO: 303361 - DNA, 100 bp, Homo sapiens
tcatgttcactgctctccaactgcatagacagtgtgtcgtttgcaaaaagtatgctgaggccttggattaccaccgtcaggcactggtgttgattcctca

SEQ ID NO: 303362 - DNA, 83 bp, Homo sapiens
ctgggagagtccgacgagcgctgcactaacgcaggatccggctgccgaaggtcctcgccagactaatagggatgccaaaggaa

SEQ ID NO: 303363 - DNA, 74 bp, Homo sapiens
gagattgttcctgtggagcaaagagctgcatcatgaattcaggagcatcggacagagcagaatgggctgatata

SEQ ID NO: 303364 - DNA, 80 bp, Homo sapiens
tgacaggggggcctggccgcgcagccggcaccgcatcagcctgctcaaccctttaaatttacaatttccgaatcctgtga

SEQ ID NO: 303365 - DNA, 100 bp, Homo sapiens
ttctgcgctcatgtgtcggaactagatctttctgacaacaaactcgaagactggcatgagataacggaggagatgatggatcaggcaaatgataaaaaag

SEQ ID NO: 303366 - DNA, 101 bp, Homo sapiens
acagctttcacagtttgcgggactcagtcccatcactccaaggagagaagccacataaagaagatccctaatagtcatttctcaacaattatatagtcaac

SEQ ID NO: 303367 - DNA, 100 bp, Homo sapiens
cagttccacacctgcaccatccacggaccacagctcactttccccaaggaccagcttgacgaggcctggactggaagcagtgcatcgagctggagcagca

SEQ ID NO: 303368 - DNA, 101 bp, Homo sapiens
ctcctccccaccaccaccatctccatcacccaccaacaacaccacaataatccacagccaagacctgagtcagaactccatcacaggggaacacagccaac

SEQ ID NO: 303369 - DNA, 100 bp, Homo sapiens
cactactggcccctgatccggttcttggtgcccctgggcatcaccaacatagccatcgacttcggggagcaggaacacactgtgaattgtacaaggatcc

SEQ ID NO: 303370 - DNA, 74 bp, Homo sapiens
ttcgaggtgctggccgccttcaacgctctgagtgtcctgtttgccggtactgtcaaacgcccgagccagtagaa

SEQ ID NO: 303371 - DNA, 103 bp, Homo sapiens
ccatgtcgggttattcgagtgaccgagaccgcggccgggaccgaggatgagcagcaccagcagtaagagggctccgaccacggcaacccagaggctgaagcag

SEQ ID NO: 303372 - DNA, 99 bp, Homo sapiens
tgaagcaaggaaaagagccatggatattagaagtagaatttccacatcggggcttccctggaacaagtgtcattcaaggatgtatgtgtggacttcact

SEQ ID NO: 303373 - DNA, 98 bp, Homo sapiens
atctacactcatgtctattgtcagagcactatgctggtgctcatgtgactatcacggatcgaaaagtagcattagaatttcttaaatcaaacgttcaa

SEQ ID NO: 303374 - DNA, 97 bp, Homo sapiens
gaagtggtacaggagagaatttgtgatgatgagctgatcttaatcaaaaagctgggacctttggcctacaatcagcaaggggctgtgttccctgcaa

SEQ ID NO: 303375 - DNA, 101 bp, Homo sapiens
aaggtgaagccacggaagataaggtgaagccaaaaaccttccctcttacccggggccgagcaagatgagggattgctactgcacggtgaacctggaccagg

SEQ ID NO: 303376 - DNA, 80 bp, Homo sapiens
cgccaccctgcgctgccgccgctctgaggagttaaagatcaatgcaatgtcccggaatggcttccatttgccaggcctac

SEQ ID NO: 303377 - DNA, 90 bp, Homo sapiens
tgtatggacaggcttgtccatctgtaacttcattaagaacaccttccaccatgaccacctcagcaagttcccacttaaataaaggcatca

SEQ ID NO: 303378 - DNA, 50 bp, Homo sapiens
aaagaagcatagcttttagctctaatatcctgacatgcatcctgacggaa

SEQ ID NO: 303379 - DNA, 50 bp, Homo sapiens
gacattttcaggaaaatcctggatatgacatgtctacatttattaggcgg

SEQ ID NO: 303380 - DNA, 100 bp, Homo sapiens
tgctcttcgaagtggcctgggaggtggctaacaaggctgctggagccagttctgcttctcggcaaggagcgatttgctggtgtagacatccgtgtccgtg

SEQ ID NO: 303381 - DNA, 75 bp, Homo sapiens
agaacgagtaaatctgtctgcagcccagacactgagagccgctttcatcaagataccgactgcattttgagagag

SEQ ID NO: 303382 - DNA, 99 bp, Homo sapiens
gtcgcggtgggtcctcgcttgcagttcagcgaccacggattgacttctaaggactcttggtacatgaggaagaaacccggaaggggaagaggaaagcaa

SEQ ID NO: 303383 - DNA, 100 bp, Homo sapiens
tacgcgagatgttcaccatccatgcctacgtgggcttcaccatggacaagctggtgcagaacattgcgcggcagggcaacaggtttgtctatgctggctc

SEQ ID NO: 303384 - DNA, 83 bp, Homo sapiens
tgggaacccaggccccgccgaggcggccagagccgatgatgagcaccccacctcctgccagcgagctcccgcagccacagccg

SEQ ID NO: 303385 - DNA, 82 bp, Homo sapiens
cggcgtgtgcgcgcccgccagctgctccggagatacggtgtgaacccacatccctgcccccagggccacctgcaggacgccg

SEQ ID NO: 303386 - DNA, 50 bp, Homo sapiens
aggactaaggggcttcatccacagttttccaagagataacttcaccaaga

SEQ ID NO: 303387 - DNA, 90 bp, Homo sapiens
atggaaaatcgcttggttaaaacctgacacttttaacaggaaactgttaaggcagcaataatagaagagcagaaacgaagtgaaaaggct

SEQ ID NO: 303388 - DNA, 101 bp, Homo sapiens
accattgctgctgctttttctcatctctttgacccaggcaaagtccaatccactgccgatatctttggtgacgaagaaggagatctgttcaaagaaaaagc

SEQ ID NO: 303389 - DNA, 90 bp, Homo sapiens
ggggggctgaaatccatcttcatcctaccgctccgcccgtgcagaccatgaattacgtggggcagttagccggccaggtgtttgtcaccg

SEQ ID NO: 303390 - DNA, 109 bp, Homo sapiens
attggagtgactgtctggcatcaccaagatgacactccacgccacccggggggctgcactcctctcttggctcaggagcatctatcggctgcacgccaacatcaacaca

SEQ ID NO: 303391 - DNA, 75 bp, Homo sapiens
ttgtttgtggatcgctgtgatcgtcacttgatcaggatcctcatgaccagccaaagagaagaagaattaggaagc

SEQ ID NO: 303392 - DNA, 100 bp, Homo sapiens
ctcggcaccgcgctcgcctccctcggctcggcccaaagcagcagcttcagccccgaagcagttccggcgaggggggagcctcagcaggattgctgtgtga

SEQ ID NO: 303393 - DNA, 75 bp, Homo sapiens
catggaaaagctcctattctgattgctacagatgtggcctccagagggctagcatgcttttcacttccactgcat

SEQ ID NO: 303394 - DNA, 50 bp, Homo sapiens
caagattgtccccattgccatccaggagtggctaagcaggttcggttacc

SEQ ID NO: 303395 - DNA, 50 bp, Homo sapiens
ctctccttttcgtttccggaaacatgattttgggaaccagtaggacattg

SEQ ID NO: 303396 - DNA, 100 bp, Homo sapiens
cttccaaagagatacagggcagaggaaaatgcaagaagactgatggagcaggcttgcaatattaaagatctagtgaaaagccatttgatgtatgcggtca

SEQ ID NO: 303397 - DNA, 100 bp, Homo sapiens
ccagacggctgcccttcaagtaccagacaaagcaggacctcataaggaaatctacccctatgtcatccaggaacttagaccaactttaaatgaactggga

SEQ ID NO: 303398 - DNA, 90 bp, Homo sapiens
gctttacaggagcgacttgacaatgtccctcacaccccttccagctacatcgaaacatactgaacggctgtattcagtggtgtttcaaga

SEQ ID NO: 303399 - DNA, 129 bp, Homo sapiens
ctggcaaggatggtgcagattttggcagattatggctttgtccccacccagcactgatgatattataaagaattagcagcaaaagtggttcagatgttttatgtggctgagccaaagcaagtgccccat

SEQ ID NO: 303400 - DNA, 100 bp, Homo sapiens
gctggtcctcatggattcctggtgccagcccggctttgacatcaaggacgttgccagctgtctctgcttggaggtgccctgcccatgtttgagctggtgg

SEQ ID NO: 303401 - DNA, 76 bp, Homo sapiens
acaaagaggacccggtgcaaggaaaatccaatggagaactctctttgagcagaattatatccagatcgagagacag

SEQ ID NO: 303402 - DNA, 90 bp, Homo sapiens
acaatctcctcagggaaggggcagcacagaaaatcctgccttgcttcgttgggcctatgcaagaacaataaatgtctatcctaatttcag

SEQ ID NO: 303403 - DNA, 78 bp, Homo sapiens
gctggccatttaggagctctgctcaaagccagacggtagcagtagctgatgtgcagtttggccccatgagatttcatc

SEQ ID NO: 303404 - DNA, 83 bp, Homo sapiens
ctctaccagggcctgctctccaacttccctgacatcatccatctacaaaaaggagtccaaaactacttacctggaagaccttc

SEQ ID NO: 303405 - DNA, 98 bp, Homo sapiens
ggcggcgggagcccaggagcctgccccgccctggggacgaagagctgcagctcctcctgtgcgggatttgttaaggattccaagtaactcttatttgg

SEQ ID NO: 303406 - DNA, 51 bp, Homo sapiens
gatcttcttcttttcttaactggtcaagagaatgaccagtcaacaggggac

SEQ ID NO: 303407 - DNA, 76 bp, Homo sapiens
ctgttgtagctgttcctctggcaatacaaactttctgctttcactggtgctcaagaccgaatcggctgggcttttg

SEQ ID NO: 303408 - DNA, 89 bp, Homo sapiens
aggcattttggggcagaatacagagatatggaatcagaggcggggtttcaccatgttgcccagactggtcttgaactcctgagcttaag

SEQ ID NO: 303409 - DNA, 98 bp, Homo sapiens
ccaatgtccaaaacgtgaccactgaggatgtggagaaggccacagatttcagccttccaagttctgatgtaacaaacaacttaaaacccagtcttcat

SEQ ID NO: 303410 - DNA, 100 bp, Homo sapiens
cgggatgtttttggcaaggacttaatttatacactttattattggaaatcttcaagttcaggaaagacatgcagccgtcttggttgaaactattaaaaag

SEQ ID NO: 303411 - DNA, 75 bp, Homo sapiens
ctccaggagcccagctcacagccaccggtaccttcttccagcggccctccaggcactgaagcgtaagaagaggta

SEQ ID NO: 303412 - DNA, 90 bp, Homo sapiens
gttccccccgagttcgacgtgaccgggaacacctttgaggagaatcaatacgcccaatggatggctgcctgcatgttggcatcgaagggc

SEQ ID NO: 303413 - DNA, 75 bp, Homo sapiens
ttctgggtgatactgaaggggtcgtcactgtactggtatagcaatcaaatgatgcagctggaaacagagaaggag

SEQ ID NO: 303414 - DNA, 83 bp, Homo sapiens
cggacggcgcgggcgccggcgaggagagcccgcggctgcaggtgagaagccctaccactgcaactgggacggctgcggctgga

SEQ ID NO: 303415 - DNA, 72 bp, Homo sapiens
gggttttgtgacttgctgccttgccactatgaaggtactaggttttgacaagcttgcatcatgcgtgagtat

SEQ ID NO: 303416 - DNA, 50 bp, Homo sapiens
gactgatggagcaggcttgcaatattaaattgctgatagtccaactccac

SEQ ID NO: 303417 - DNA, 96 bp, Homo sapiens
ctgatggtgtcggtgagcgcgtttcccgcctgagcgcaactagcggcgggtcgtgggcacctccaggagccgaggaggtgctgctgctggcccggc

SEQ ID NO: 303418 - DNA, 99 bp, Homo sapiens
acccatcctggtagacggcaaggatgtgatgccagaggtcaacaaggttctggacaagatgaagtctttctgccagcctagtatcagaaggccaggcga

SEQ ID NO: 303419 - DNA, 100 bp, Homo sapiens
gagaagctgaatgcaacaaacattgagtgcagccttcatattcatgcttcctacagcatctcccagaaactgaatgttccaatggccccactctcagagc

SEQ ID NO: 303420 - DNA, 100 bp, Homo sapiens
agccatggtccatccgagagaagctatgtttagcatcttctgtcatgagaagtggcgatcaaaattggaagagctaaagatggctgaatttctagatgac

SEQ ID NO: 303421 - DNA, 82 bp, Homo sapiens
agcagacagcagtacagacagctcaggctgcccagatggtggctcccggagtccaggtgtggaaacaggaagagaactagaa

SEQ ID NO: 303422 - DNA, 82 bp, Homo sapiens
cgaatctccggccgaagagcggcggcggcagcggcggtgcaatgattctggactgagacgcgcttgggcagaggctatgtaa

SEQ ID NO: 303423 - DNA, 75 bp, Homo sapiens
gtgcgccccagacccaagaatcgcccgcctctccaagaccatccctggctgctgacttggggacagagagcgtca

SEQ ID NO: 303424 - DNA, 100 bp, Homo sapiens
agaccaggaagcgagcactcagcaggacctgatcccaaccttgaagaaagtcctaaaagaaaaaatattacatatgaggaattaaggaataagaacagag

SEQ ID NO: 303425 - DNA, 75 bp, Homo sapiens
cagacattagcaacggaagccccgggcctcatcccagggctttcttcgagagtcacccagctccttcagctgagc

SEQ ID NO: 303426 - DNA, 99 bp, Homo sapiens
tttaatcctctcgtcaaaactgaagggatctgcaggaatcgtgtgactaataatgtaaaagacgtcactaaattgtatggaccaatatttacagtcttt

SEQ ID NO: 303427 - DNA, 95 bp, Homo sapiens
gatgtcatcagcaacaaaaacataaagctctcagaaagagtactgattcctgtcaagcagtatccaaaggaagaagacttaaactgcgtaaggga

SEQ ID NO: 303428 - DNA, 147 bp, Homo sapiens
ctccggagaagacaagggcatcgccgcctcagccgccgccgccgccgttttcgcctgcagctgctcaccgggacagacatggctcagcggatgacaacacagctgctgctccttctagtgtgggtggctgtagtaggggaggctcag

SEQ ID NO: 303429 - DNA, 78 bp, Homo sapiens
gacagattgaccttcagagcgaggcaccatgactcctgtgaggatgcagcactccctggcaggtcagacctatgccgt

SEQ ID NO: 303430 - DNA, 90 bp, Homo sapiens
taggcattttgctgtctcctcctaatacgattccagaatgactatcttgacttacccctttaaaaatcttcccactgcatcaaaatgggc

SEQ ID NO: 303431 - DNA, 90 bp, Homo sapiens
ccgctgcatggttaccacagaccacaaagccaaagaagctaaacgactaaaagaattcttagaagactatgatgatgatagagatgaccc

SEQ ID NO: 303432 - DNA, 75 bp, Homo sapiens
aggagttccgcccctttctggcaaagatgagggggattcttaaggggccacctacagatgctcctgcagtggaca

SEQ ID NO: 303433 - DNA, 98 bp, Homo sapiens
caacagcaagaaggtgctgagggaggcgggcagcgtgactgccctggtgcagtgtgtcctgcgggccaccaagttaagtgggcagaccaacatccacc

SEQ ID NO: 303434 - DNA, 100 bp, Homo sapiens
cgtactgacgatacacctgtggttcttgtgggaaacaagtcagacctcaaacagctaagacagagtgcaatagagtctctttttggagcatcattaactg

SEQ ID NO: 303435 - DNA, 98 bp, Homo sapiens
acagggacgtgatgttggagaactacaggaacctgctttctctcgatgaggataacatccctccagaagatggaccctttccagctttttgcctgaaa

SEQ ID NO: 303436 - DNA, 100 bp, Homo sapiens
attggcgccatagcccaagtccacgcagaaaatggcgacatcattgcagagcagcagcagtgagcggggttcccggagaggccagcgtggggacagccgc

SEQ ID NO: 303437 - DNA, 100 bp, Homo sapiens
cagcaatgacagtgttttttcccctggatacagctagacttcgacttcagggtgaactccagaaagccattgacttattcacagatgccatcaagctgaa

SEQ ID NO: 303438 - DNA, 100 bp, Homo sapiens
gccctgcattcgcggcgtgtgcagggctaccttttcatctctgtgttggtgaactcaaacagtgagctgatccgcctgatcaacaacgccatcaagaatg

SEQ ID NO: 303439 - DNA, 97 bp, Homo sapiens
ccgggtggggcctcgggatgcagccgccggtgcccgggcccctgggcctgctggaccccgcaggccggtctaattgaagccaacggagaactcaagg

SEQ ID NO: 303440 - DNA, 100 bp, Homo sapiens
gttagagattacaatttgactgaagaacagaaggcgatcaaggccaagtatccgccagtcaataggaagtacgagtagagagtctacaaggagattgaac

SEQ ID NO: 303441 - DNA, 100 bp, Homo sapiens
acgacacggtgccgctgacagcagccatcgaggcgagccagagcctgcagtcccacacgagttcctgagttggaggtagaagaagaaacccaagttcaag

SEQ ID NO: 303442 - DNA, 75 bp, Homo sapiens
gatcctagggttcttcatcacatgggtggataatattaatgcagctgtgatggatttgaaaaaaaagaagatccg

SEQ ID NO: 303443 - DNA, 82 bp, Homo sapiens
tgaccatctcacaactgctcgcgtgacgaccgcattcgtggcaggatagaatttttgcggcatttgaagagctttttccaga

SEQ ID NO: 303444 - DNA, 74 bp, Homo sapiens
ttttcacagcctgaaagtgatgagactcagcccaagtctccatgtccatcacctgggacactgtctgaggaact

SEQ ID NO: 303445 - DNA, 102 bp, Homo sapiens
gcgccggcgccgcggcctcttcggctgcggaccctgccattccggaggaggctaggcagctggaagagaaagaccgagtgctaaagaagcaggatgcattct

SEQ ID NO: 303446 - DNA, 75 bp, Homo sapiens
ctttgtagccatcaacccgagtgcagtttcgatggaaaatgaagctctattaccaggttttaaacttcgccatga

SEQ ID NO: 303447 - DNA, 89 bp, Homo sapiens
gttggatttatgcaaacttgggccaaaggacagttagaagacagtaggccaaccaagccctcgagcagttattcccatgtcctgtataa

SEQ ID NO: 303448 - DNA, 100 bp, Homo sapiens
ccggcaccacctcccggtccgccctccagccctcttggaacagagatcatgatgacacggcatctactcgttcaggaggaaccccaggcccttccagcgg

SEQ ID NO: 303449 - DNA, 80 bp, Homo sapiens
caggaacatgtggctgctcccagctctactccttctctgcctctcagatttatcgaggtgtgagagtcggagggttgaaa

SEQ ID NO: 303450 - DNA, 75 bp, Homo sapiens
gggcagtacaagcttacgtctctgctcttcagtacaatcctggttcttctctatccaaagcacctgagtgttact

SEQ ID NO: 303451 - DNA, 97 bp, Homo sapiens
acagttacaggacatagcaactctggctgatcaaagaagagcagcccatgctgctgatgcaaggaatcccctgggctcccgtccactccactgctga

SEQ ID NO: 303452 - DNA, 83 bp, Homo sapiens
cgccgctctccagcccgcttgaacgcaaacggggattcagcgtccgatcctttggaacagggactcacgtgaagcttccagga

SEQ ID NO: 303453 - DNA, 74 bp, Homo sapiens
atttattcgtaatgcgactcaaagctgcacggcagtctgtttatgaggtgccttatgtggatttggaacaccaa

SEQ ID NO: 303454 - DNA, 88 bp, Homo sapiens
gcagtggtcgcttcttctccttgaatcatgtccctaaggaggaagctggagctccacgaggggaggggccggccatcccaggagacac

SEQ ID NO: 303455 - DNA, 51 bp, Homo sapiens
ctatgatcagcttccttcatgttcaggacacattcagctaacgtattttag

SEQ ID NO: 303456 - DNA, 100 bp, Homo sapiens
acttcttcctgctgctgcttttcagggctttcactttcagaagaacagaatgaagtaatgaaaaatggctgtgaatctaaagagctggtctacctcgtgc

SEQ ID NO: 303457 - DNA, 100 bp, Homo sapiens
caagaagaagggccggagcccagatgagctgccctcggcgggcggcgacggcggcaaatctaagaaatttgaagaatccccagcacaagatagaatatag

SEQ ID NO: 303458 - DNA, 83 bp, Homo sapiens
gggaaccggctccggagcgagaacgcgcgaagcgccgcggagccatcaacagcaagcagctcacctacctggagaaataccgg

SEQ ID NO: 303459 - DNA, 100 bp, Homo sapiens
cggtggcggcgctgccgcctgaagtgcgggcgcagctggcggagctggagctggagctctcggaggagtccgtgcgtcctggtgcctcctacaaacggca

SEQ ID NO: 303460 - DNA, 75 bp, Homo sapiens
ccctgccccggcgccgtccgtgcccgcgggacctgacagccgggtcagagggagtgaggattctttggacaccag

SEQ ID NO: 303461 - DNA, 96 bp, Homo sapiens
cgcttgggagaggtgggctccaccctgtacactaaagctaatcttatcctttgtcgcagagactatctgaggtacaccagaggatcgcttcctggc

SEQ ID NO: 303462 - DNA, 87 bp, Homo sapiens
cttggacctctgaaggaatagaacggtcaaggagattatgtctacgtttacaggaatcccagtcagaagttccagcctgccactgtt

SEQ ID NO: 303463 - DNA, 98 bp, Homo sapiens
gcagtagaaaaggtggcgtggctggcgattcgtgttcgtgagggccttttctgatcttcaacttgctgctgagcttgggaagacattactggatcgga

SEQ ID NO: 303464 - DNA, 100 bp, Homo sapiens
atgatttcggaacctggagaaaatatgagatgagcgagagccgccagacccacgtgacgctgcacgacatcgaccctcaggccttggaccagctggtgca

SEQ ID NO: 303465 - DNA, 90 bp, Homo sapiens
gtccggcccagggcgacgtcttcgcaggggccacaggccatgaagaagatgtacaaggcgtgcctcaagtaccccgagtggaaacagaag

SEQ ID NO: 303466 - DNA, 101 bp, Homo sapiens
ccggggaccctgtacgtgtacatcatttacggcatgtacttctgcatgaacatctccagccaggggcgccctgcgtccggcagaggaggcgagcatcccgc

SEQ ID NO: 303467 - DNA, 95 bp, Homo sapiens
ctgagcgccatggctcactccccggtgcagtcgggcctgcccggcatgcaggcgtggtgtccctcgtggccgttcacccctccaccgtcaacccg

SEQ ID NO: 303468 - DNA, 100 bp, Homo sapiens
ggacccacctcaggtcccagcctgctgctcctgctactaacccacctccccctggctctggggagtcccatgagttctgtgctgagccgaagttcatctg

SEQ ID NO: 303469 - DNA, 82 bp, Homo sapiens
cagctaaagcagacggctcgcactgcgacccgaaggattctgtttcactgaggccatctatccgatttcaaggaagccaagg

SEQ ID NO: 303470 - DNA, 51 bp, Homo sapiens
agctctgcggctcgggccctgagttgtggaagaaggactctgggaaaatgg

SEQ ID NO: 303471 - DNA, 100 bp, Homo sapiens
ctatatcagataagcttgacattacagccaagatggtgctgtcccagagacaacgagatgaactgttttgaacgaagaatgtgatcagaactggtacaag

SEQ ID NO: 303472 - DNA, 101 bp, Homo sapiens
gcaataatttgcttgatggcttagaactctccacagccatcactcatgtccataaggaggccaggagacaagcttctcaagtctttacagccgagaagatt

SEQ ID NO: 303473 - DNA, 82 bp, Homo sapiens
tcatgtggcagtggaaaatgcgctcgggctggaccagcagaaggaagaggcccagcagaagggactcgctgagccacccccc

SEQ ID NO: 303474 - DNA, 83 bp, Homo sapiens
cgcggatctcaccgccgctcagggacattggctccctggattatcaagagtttgtagttgacattgaatccaggctgaggatg

SEQ ID NO: 303475 - DNA, 100 bp, Homo sapiens
caatcctaccatgtcagccttcccagtagctggaactacaggtaactttcgaccgactttccccaagagaaaattcctagaaattgaacaaaaatgtttc

SEQ ID NO: 303476 - DNA, 80 bp, Homo sapiens
gcgtgtctaggtgagtcgcggtgggtcctcgcttgcagttcagcgaccacgtgttaccaaagaagtgaatcatatagaaa

SEQ ID NO: 303477 - DNA, 100 bp, Homo sapiens
gcggcagtccccggacagggatgggctctgaccaggaggacagcaagcccatcacgctgggtgttgacttcaaaatcaaaactgtagagctaagaggaaa

SEQ ID NO: 303478 - DNA, 100 bp, Homo sapiens
ggctaatagcccggagacaagctgatgagccctcctcttcagctaggaaaatgacggtgttcagaaagttaaaacttcttcgctggaaggatttcatctt

SEQ ID NO: 303479 - DNA, 50 bp, Homo sapiens
ttcagacagctttgtcaagggatcactggcgttatccttcttgcagttgg

SEQ ID NO: 303480 - DNA, 128 bp, Homo sapiens
ctccaaattctttggtttctttttttgatgcatctctacctggaactttgccggttacttgtctgcaagacttttttggtgatgacgatgtttttattgcatgtggaccagaaaaatttcgttatgcc

SEQ ID NO: 303481 - DNA, 97 bp, Homo sapiens
tgccgcaccaggctcatcctgtccatcgtgtgcctgatgatcacgcagctggctggcttcagtggaccaatttataactacctcgacaagtatgttg

SEQ ID NO: 303482 - DNA, 100 bp, Homo sapiens
ctgcccagcccctggggagaagacaccagcagcatgcccagccagggcagggtggagagctgcagctgcagaattaaacaaccaccatgtcgagcaaaaa

SEQ ID NO: 303483 - DNA, 88 bp, Homo sapiens
gcccaacagaatttatatagagatgtgatgttggagaactacagaaacctcgtctccctgggtgcagtagacattgttgcaatcatga

SEQ ID NO: 303484 - DNA, 97 bp, Homo sapiens
ggagcccgctgctcttccccactcaggccttagaaaatttacgtgtatacctgtgtgagaaaatcatagctgagagacattttgatcatctacgtgc

SEQ ID NO: 303485 - DNA, 75 bp, Homo sapiens
ttcatgcttagatacatgtataacaaggcaggatggggaagcagaatagcaaactggcccctgaagtgatggagg

SEQ ID NO: 303486 - DNA, 75 bp, Homo sapiens
agagcagagcggagggagccccagacacggtgaacttcacggtagaccagatccgcgccatcatggacaagaagg

SEQ ID NO: 303487 - DNA, 74 bp, Homo sapiens
gatactaacctcttattcagaatgtcccaacaggtttttacaggtgcttcctgcttgcactgaagatgagaaac

SEQ ID NO: 303488 - DNA, 100 bp, Homo sapiens
gcccgccgcgctgcctgcgccggaccggggcgggtccagtcccgggcgggccgtcgcgggagaggggccaaaccagtgctcctgccacctctctggctgc

SEQ ID NO: 303489 - DNA, 75 bp, Homo sapiens
ctgggcctcccggtccgcaagcaggtacctgtacttcaccaacatgcaggaccgggcagccaagatcgaacgcgc

SEQ ID NO: 303490 - DNA, 75 bp, Homo sapiens
ggagactgaacgagagctcaaacagaggcttctggaagagattactcttgtctctgctgctcctgggaaagtgat

SEQ ID NO: 303491 - DNA, 90 bp, Homo sapiens
gtccccagcgccccagccacctctggaagaacaaagggttgactttgataaagattgtgaagatcctgaatataaaccactccaaggtcc

SEQ ID NO: 303492 - DNA, 97 bp, Homo sapiens
ctcagtatcttgggcttcaagtctaaatagcagatcacagctgaaatgattccccactgtgtgacaaggtttcagaggtgccgggaagtctgagcct

SEQ ID NO: 303493 - DNA, 75 bp, Homo sapiens
cagagtggagccatggctagaggcatcagtgtttttctgaccgaagttctcatttcctgacaatggaaatggaac

SEQ ID NO: 303494 - DNA, 50 bp, Homo sapiens
caaagtccagcggtaacctggtacaaggtgagtgttgtgcaagattctgt

SEQ ID NO: 303495 - DNA, 82 bp, Homo sapiens
aaatacaaatcacacgcataatggatgaaaggaaccgacagctgaactgtcccaagcaataaacagtggtacattgttatca

SEQ ID NO: 303496 - DNA, 75 bp, Homo sapiens
cttttcatgattggagaacttgtagcagaaccttctaagtctcagacacgtaaacccaagtgtggcaaaggaact

SEQ ID NO: 303497 - DNA, 100 bp, Homo sapiens
ggatttttggcctcatactctgttatagataaacaagggacttgcaacaaagcattgccagagaacctagtgctccttcaattcctacacctgcgtatca

SEQ ID NO: 303498 - DNA, 51 bp, Homo sapiens
ggcgaggaactccagaatacaagctcccgtggaagtcgctgaccagcatca

SEQ ID NO: 303499 - DNA, 100 bp, Homo sapiens
gtttatctcaaggcctgagtagccggtaacaaacgagggttcccgggattggaccgacgcagccatggagaccccatcttcagaaccaatggaggaagag

SEQ ID NO: 303500 - DNA, 100 bp, Homo sapiens
tccgccagatctacggagccaagggcttcagcctgagcgacgtgccccaggcggagatctcggccgatgaagaggcccctgattatggctctggcgtccg

SEQ ID NO: 303501 - DNA, 50 bp, Homo sapiens
acaggattcttacatctcattgctattcctctacacagccgactagttat

SEQ ID NO: 303502 - DNA, 100 bp, Homo sapiens
tgcccagagcaggcaccgtagccccagtgccctgtacaaccctgtgcatgcaagagatgggaaatggaaaggcaaaccgactttatgaagcctatcttcc

SEQ ID NO: 303503 - DNA, 98 bp, Homo sapiens
gcgaatatcgtcatcgttagaagcagggagaagaggatgatgagcatgccaggcccctggccgagtccctgctcctggccattgctgacctgctcttc

SEQ ID NO: 303504 - DNA, 88 bp, Homo sapiens
tacaatgtcaccctcccagcaacagaaacaaagggtcatcctttctagaaagagaaccgctgtgctatcaggagggaaataatccaag

SEQ ID NO: 303505 - DNA, 90 bp, Homo sapiens
gagctgaagacaattttaacttggaaaaggctttgtctggcatacggaggatctgatgtgtcaagatgtttttactggctaatgcagcga

SEQ ID NO: 303506 - DNA, 100 bp, Homo sapiens
gatgataccaatgatcctgaaaacagaaggaaattgaaggaacttggagttaatggtctaatttatgataggtttgcctgcaatgagatttcattctcta

SEQ ID NO: 303507 - DNA, 75 bp, Homo sapiens
acttctcaactgccattctggattccagaagatttaactacgtggtccgggtgggtcatgataactgggtacgtg

SEQ ID NO: 303508 - DNA, 74 bp, Homo sapiens
tggcggcgctgcggatccagggggtcggctgccaggtacaggtgaatgaaaactttgccattgatttgatagca

SEQ ID NO: 303509 - DNA, 98 bp, Homo sapiens
ggggccgtgtactccctggtgctcatccccaaagccaagccactcactctgctctggggtgcagattcactttataggaacagcttcagcttcagtga

SEQ ID NO: 303510 - DNA, 90 bp, Homo sapiens
gacatttcttcggcattctgcaacaggtgatttgatgaaggctgctgcaggagagttcgcagatgatccctgctcttctgtgaagcgagg

SEQ ID NO: 303511 - DNA, 100 bp, Homo sapiens
gtgaaccttctgggaagcagaggcggagaggaggtgctcaacagagccttcaaggtctgaactgatccagctggtggcagtgacacagaagactgctgag

SEQ ID NO: 303512 - DNA, 100 bp, Homo sapiens
cttatcgaacagagccgggagttcaagaagaacactccagagattcacaatgacatcctttcaagaagtcccattgcagacttccaactttgcccatgtc

SEQ ID NO: 303513 - DNA, 100 bp, Homo sapiens
aaaaggcatgatagaccaaatttccatgaaagaagcaggtaatattaatgaagccaggaatatcttgaaaacatttgaagaatgtgttctaggattggca

SEQ ID NO: 303514 - DNA, 100 bp, Homo sapiens
gtcgcgcagaagctcctcaatggccagcgccagctgcagccccggctgcccactcgcctcacctgagcctgggctgaccggttccctgatgtgttacctg

SEQ ID NO: 303515 - DNA, 100 bp, Homo sapiens
tctaaaggagcaacagtttacagcccttccagatacagctaccagaatgagtccctggaacgccagatgcgtgaaatggaagagaactttgccgttgaag

SEQ ID NO: 303516 - DNA, 100 bp, Homo sapiens
catggggcaggatggcaccagccttggattatttcctatttagagatggtgacattcttggaaagtacgtagactgaaataagtcactattgaaatggca

SEQ ID NO: 303517 - DNA, 90 bp, Homo sapiens
ctgcctttgtgtggctgtcaccggtgggactggcggggagctgtgtgacctcagcagccatgtcgaagccccatagtgaagccgggactg

SEQ ID NO: 303518 - DNA, 100 bp, Homo sapiens
tggattatcctgtgccacagttcctcaaaggtctaaaattcccaggactccacagctttgcaccagataagcctggaggaatactaatgatggatctaaa

SEQ ID NO: 303519 - DNA, 90 bp, Homo sapiens
ctcctgaagacacacctgcccctggctctgctcccccagactctgttggatcagaaggtcaagcttgtctttaaccgaactgtcacactg

SEQ ID NO: 303520 - DNA, 98 bp, Homo sapiens
tgactacaacatattgctgcaatcaggaccattgcaataaaatagaacttccaactactgggcttcgtgggacacatatgcaacatgcctatgatttt

SEQ ID NO: 303521 - DNA, 75 bp, Homo sapiens
tggaaacgaactgaatactgtccgagaaattataggtgatgaactagtccagcaagcccttgtgattcgaaatgg

SEQ ID NO: 303522 - DNA, 98 bp, Homo sapiens
gccagaagttgccacccttttgccagcaggggtacctgaggatgcagggactcgtggattacaaagctgacgagtggctgatgaagaacatggatccc

SEQ ID NO: 303523 - DNA, 80 bp, Homo sapiens
atttccacgacccggagaccggaggctttatcctgtggataaacgcagagtgaacgagtttggggagtcctacgaggaga

SEQ ID NO: 303524 - DNA, 101 bp, Homo sapiens
ccacactaggcaaagaacttgcgtcaaaatcaggactgaaatacattaatgtgggtgatttagctcgagaagatttacactgactgggccaaccactacct

SEQ ID NO: 303525 - DNA, 80 bp, Homo sapiens
cttcactttcaaaagtccagagcaagagcatccaaaaatgtggagccattatttccatttaatttggatgaatttgttac

SEQ ID NO: 303526 - DNA, 101 bp, Homo sapiens
tgcaacaggactgtgacctgagctgtcagatcaccattcccaaagaaggagaacttatggattgtgatggaaaatcagaatctagtcctgagcgggaagct

SEQ ID NO: 303527 - DNA, 98 bp, Homo sapiens
gggaacaagcaaggagtcatatatccttcatatgatccatcttagtgaagaattaggatacaggagattcctcaacagctgaatgggagtgattgtgg

SEQ ID NO: 303528 - DNA, 82 bp, Homo sapiens
tcccagctcggcccgcgggggagccccgggagccgcacggttttaaaatcaaagatgggaaaatcggagaaaattgcccttc

SEQ ID NO: 303529 - DNA, 98 bp, Homo sapiens
agcagctccacgaaaggcagccgcggatcgccgcgctcagcgacaaacaaggtgtcaaattgagaaccaggtagatccccaccacctacagtaaaaag

SEQ ID NO: 303530 - DNA, 74 bp, Homo sapiens
ggttccccggcccacagtgggggtgtgcaaacccgagagaactggaatgcctctctgtatggaacataaaattt

SEQ ID NO: 303531 - DNA, 113 bp, Homo sapiens
cccacctgcccggtgcccgaggaggcagccaagctcgtagcctgccactccgtgcgctaccggctctctgaccagttccacgacatcctcattcgaaagtttgacaggcaggg

SEQ ID NO: 303532 - DNA, 100 bp, Homo sapiens
tttggaagcccttttcctccaaatcctgggaaagaaagtgaagtcactgcttttgctgtcttggatcaagaccagaaagaaattattgataccaatggag

SEQ ID NO: 303533 - DNA, 75 bp, Homo sapiens
gggattacaggtgcctgctaccacacccggctgctctttggcgtaaattgcaatcgattagggatcgtttctcag

SEQ ID NO: 303534 - DNA, 101 bp, Homo sapiens
tttacttttacctacgttggcggccccagaaggcagcataattcgttgtatgaggcgcctggaagaattgcttcgacaaatgtgtcaagcagcaaaagcca

SEQ ID NO: 303535 - DNA, 100 bp, Homo sapiens
ttttctactgggaaattgatattaggaccacaagaagaaaagggaaagcagcatgttggccaggatatattgtctttgaagccatcaaatcatgctacca

SEQ ID NO: 303536 - DNA, 100 bp, Homo sapiens
aaaaggagagcatcttggacttgtccaagtacatcgacaagacgatccgggtaaagttccagggaggccgcgaagtgggcatccccaccatcagatggtg

SEQ ID NO: 303537 - DNA, 75 bp, Homo sapiens
agagtgatgaggagaaaaaggtggcgagcagatgtatcggcaagcagtgtaaacggaggacttggggaaaaagga

SEQ ID NO: 303538 - DNA, 75 bp, Homo sapiens
acatcaagtacccgctgcggctcatcgaccgggagttgagtcagcagatactggagttatttgaaacatgtcagc

SEQ ID NO: 303539 - DNA, 50 bp, Homo sapiens
tggtgatccaaattctcatatgaaagaatgctttgtggaacttggcttaa

SEQ ID NO: 303540 - DNA, 98 bp, Homo sapiens
catgccggtgtggtggcggcggcggagactgcgggcccgtagctgggctctgcgaggctttacttactgcagtaacatcacaacacatagaaattcat

SEQ ID NO: 303541 - DNA, 80 bp, Homo sapiens
cgacccatcaaggcttctgtcatcactcagtgagaaagatcagtctaaagaaaaggagaagaaagtgaaaaaaacaattc

SEQ ID NO: 303542 - DNA, 100 bp, Homo sapiens
taacctgatcacagacaaagagatgaggatgtgctgtggtttaaaccagtggaactgagaacgaagtggggccggagaggacatatcaaggaacctttag

SEQ ID NO: 303543 - DNA, 98 bp, Homo sapiens
gaaacttgtcggctttcaagacatggagtgtgtgccttgtggagaccctcctcctccttacgaaccgcactataaggagggttcctgcccccaggtga

SEQ ID NO: 303544 - DNA, 90 bp, Homo sapiens
gcgggacctggcgctgcagcgagttacttcaatgagaatcaatacccagatgaagcaaagagggaagaaattgcaaacgcttgcaatgca

SEQ ID NO: 303545 - DNA, 75 bp, Homo sapiens
cagcctaaacatcagccagatatatgtgtggctacagcaaaccaaacagcccagcagcccagcagcccagccatg

SEQ ID NO: 303546 - DNA, 73 bp, Homo sapiens
tctagatgatattggacatggagtaaagggtgtcaaattgagaaccaggtagatccccaccacctacagtaaa

SEQ ID NO: 303547 - DNA, 50 bp, Homo sapiens
gctgaattatggcagcccagtcaaggttgcttataaaaagggagtcaaac

SEQ ID NO: 303548 - DNA, 75 bp, Homo sapiens
ttcacccaaatatactgcctgctgtccagagggcacacttaggcaaattgaagaagttcgacaggtgggatccta

SEQ ID NO: 303549 - DNA, 51 bp, Homo sapiens
gcggccaagactccgtcctgcaagctcaacgggacccaggtggagtctgta

SEQ ID NO: 303550 - DNA, 98 bp, Homo sapiens
tccgccgcggcactgatccccacagccctgtatgatgagattcgtcagtttcgcaaggcctgtggggaggctcatcttaaaactatattagcgacagg

SEQ ID NO: 303551 - DNA, 50 bp, Homo sapiens
ttcaagagagtaccattggggtggaagcatcagttcacagcagtaatgca

SEQ ID NO: 303552 - DNA, 83 bp, Homo sapiens
atgaaacatttgtttgtgaaaatgcaaaacctgggcaggtgctgcgacaagagactttggacaaaaattgacttgagtaggtg

SEQ ID NO: 303553 - DNA, 89 bp, Homo sapiens
gctggccaaagcctgcccagacggctcacctgtgcgggatggaacaaaagacattgggtttgcctatcacagatgaacaaatccaggag

SEQ ID NO: 303554 - DNA, 50 bp, Homo sapiens
gtatgccaaccagcatggccctggacagtgagatgaacccggtacctcag

SEQ ID NO: 303555 - DNA, 100 bp, Homo sapiens
gtcgcttatattgggatgacctgaagagaaagttgtcggagaaactggacagcacagacttcaccggcaccatcaaatgtggacgagtgctcactagcag

SEQ ID NO: 303556 - DNA, 75 bp, Homo sapiens
cagaacatgatcaagggtgttacactggaccacagccgctttgtcaactgtgtgcgattctctcctgatgggaac

SEQ ID NO: 303557 - DNA, 100 bp, Homo sapiens
ctacaacttattcctgtccggagacagcctaaggggcaagtgtccagagaatggctgggatgaaagtacacttgaactctttttacatgaacttgcaatc

SEQ ID NO: 303558 - DNA, 100 bp, Homo sapiens
agacaaagcagcgcccgtctgcttcgggcctctggaatttagcgctcgcccagctagccgcagttggccagtcagtgctgaaagatgtaagcaaagtgaa

SEQ ID NO: 303559 - DNA, 92 bp, Homo sapiens
ccgaggtagaggcagtggcgcttgagttggtcgggggcagcggcagctgataccccaatgtccttctttgactttgtggttgatcctcattc

SEQ ID NO: 303560 - DNA, 75 bp, Homo sapiens
ctcagaaatgttctgccagcgcaaaggatgggaagcacaaaatgcaagaggaaaatgttaaactaaaaaagcccc

SEQ ID NO: 303561 - DNA, 75 bp, Homo sapiens
caatgacataaggatgtttccaagaggaggcaataaagtgcatgagtgcctggtgaagaatgtgatgggatcact

SEQ ID NO: 303562 - DNA, 117 bp, Homo sapiens
gcggcggcggccaggtccctgctgaatcacacgccgccatccgggaggcccagggaagacaggtgatttggcttctgcacagttaggaggagcaccaaaccgatgggaggttttgtc

SEQ ID NO: 303563 - DNA, 75 bp, Homo sapiens
gaggagaggcacccgatatatgttctctaggccttttagaaaacatgtggctgtgtggagtggtgtgaatgtggc

SEQ ID NO: 303564 - DNA, 100 bp, Homo sapiens
gtccgaggagcctcgcgcggcgctggagagagacaagatgtccgccagagctgcggccgccaaggaagaattcgaaaggagcagtcagggtattgcatgc

SEQ ID NO: 303565 - DNA, 83 bp, Homo sapiens
ggctgtcctttgaaaattaattgtgcaacatcctggatacatcctgatacaaaagatgctgcacttaaaaggatgcttgtttt

SEQ ID NO: 303566 - DNA, 75 bp, Homo sapiens
gcggccatggctcacctccggggatttgccaaccaggtggtggtgaagtttattaagaaggagaaggtcttggag

SEQ ID NO: 303567 - DNA, 90 bp, Homo sapiens
tcacggagtgaatttggaccaaactgtaaaggaatttatcgtatttctaaagcaagggagcccaagcaatctttaatgagctaccttgtg

SEQ ID NO: 303568 - DNA, 100 bp, Homo sapiens
attaatactcatcttgtccagaactctgtcaaatgaagaacactttcaagaaccaggtagtgggcagcagtcagtgacaggtgtaacctctgtggatgac

SEQ ID NO: 303569 - DNA, 94 bp, Homo sapiens
gccgactaccctccgggcccagtctgtctgtccgtggtggatctaaggaccagtcctgcctctgttgtagaagacatgtggtgtatataaagtt

SEQ ID NO: 303570 - DNA, 99 bp, Homo sapiens
atctgtcttcggtggactccttcggcagtccacccaccgccgccgcctcccaggcgtccgagctgggccacagcctgaacgagaacgtcctcaagcctg

SEQ ID NO: 303571 - DNA, 100 bp, Homo sapiens
tctcctgaccctgaagaactgtggtcctggaagccatacgggtgacccgtcacaagaacgccatggcagagcgctgggaatcccgcatctacgccagtga

SEQ ID NO: 303572 - DNA, 100 bp, Homo sapiens
tgcagcgggagctggacggcgagcgcgagcggcgcgagaaagttcccaacaaggctacgcagaagaacccccttgactgaagcaatggaggggggtccag

SEQ ID NO: 303573 - DNA, 100 bp, Homo sapiens
atcctcaaaccagaagaaaacctgaatctctgaggtggagatgacccctgagaagttcagtgtcttaatggagaagctctgtaaaaaggggctggcagcc

SEQ ID NO: 303574 - DNA, 98 bp, Homo sapiens
cgaacccgagagcgtggagcgggctgggccagaaggtagaagatagcaccatgccgattcgtcgaactgtgaattctacccgggaaactcctcccaaa

SEQ ID NO: 303575 - DNA, 100 bp, Homo sapiens
acgctgtggtgtgactggggcaggaccatcaggtccagtgcacgtgccaacattacactgtcagggaagaagcgcagaaaactcctccagcagatccggc

SEQ ID NO: 303576 - DNA, 125 bp, Homo sapiens
tagagatccggagcgccaccggcaaagaggtgttgcagaacctcggccccaaggacaagccccagcatgagaccagatgtaagctctcctccatccagctcctcaacagcaacaacaggaccacc

SEQ ID NO: 303577 - DNA, 49 bp, Homo sapiens
agcccaaagacccctggagacatgggggggccctcagcctcttggcctt

SEQ ID NO: 303578 - DNA, 100 bp, Homo sapiens
gcccttccccaacctccttctcagagcggctctgcctgcaaaatatgaaggagaacgacctgctcagaatgagaagaggaaggagaaaaacataaaaaga

SEQ ID NO: 303579 - DNA, 97 bp, Homo sapiens
ctctggcactgggatgcttccacagatgtacctgaaaagtcgtcactctttcaccaagtttaagtgctgtggggctgctaactacacagattgggag

SEQ ID NO: 303580 - DNA, 75 bp, Homo sapiens
tggtgatctctggtgcaggaaaaatgttcactgcaggttcttctgtgtggcagttcagaatgatggatcaagcta

SEQ ID NO: 303581 - DNA, 90 bp, Homo sapiens
tatggccagagcagctattcttcttatggccagagccagaacagctctcggctgagcaaaatctattcccagtccaccctgtcactgtcc

SEQ ID NO: 303582 - DNA, 100 bp, Homo sapiens
gtgggagatccttgttgccgtcccttcgcctccttcaccgccgcagaccccttcaagttctagtcatggtgatcatggagctcagcttggtctccatggg

SEQ ID NO: 303583 - DNA, 51 bp, Homo sapiens
gagagctgaggctaatgaaaaacaggtgtggaggcacagttggtgctattt

SEQ ID NO: 303584 - DNA, 50 bp, Homo sapiens
aggctgatgccccaaaaggcactgagccagatgaccaagatgctccagat

SEQ ID NO: 303585 - DNA, 100 bp, Homo sapiens
tattatttatagcacaatctggtctccccacatccctggttgttttgcttcagcctcagtgcattccactcttcgttcaacttgttttggagagattaac

SEQ ID NO: 303586 - DNA, 80 bp, Homo sapiens
cccgaccctggccgccccgagcggagcctggaggcaagtgaaccggagcaaacgacttccgatccagtctgcgctgttgc

SEQ ID NO: 303587 - DNA, 85 bp, Homo sapiens
aaagtgtgtggagtttgcaaacaaattattgacggtcaaggtatttcatgccgagaatgcctgtctggggaggtggaaacaagtg

SEQ ID NO: 303588 - DNA, 75 bp, Homo sapiens
cgggatgggatccacggacccctgctcatggaggagcaggacttggagcgaaggttcgagctgctgagccgcgag

SEQ ID NO: 303589 - DNA, 83 bp, Homo sapiens
ctgtgtggttgcaacggagataaattcccggaaccgcgattcggcgtgtcagaattaaacaaccaccatgtcgagcaaaaagg

SEQ ID NO: 303590 - DNA, 75 bp, Homo sapiens
gcggagagcacgccatgaaggcctcgggcacggtggtctttgggaagaagcttcctgcctttgccaccatcccca

SEQ ID NO: 303591 - DNA, 100 bp, Homo sapiens
aggagaaacatcagaagcagttggaaagggtctgacatttcaggaggtggagaacttctttactttcctaaagaacattaatgatgtggacactgcattg

SEQ ID NO: 303592 - DNA, 100 bp, Homo sapiens
tcaccaaataccctgaatccagttacagcaattggaacttgcacagatacagcatagagacgctaatctcacagctcttgcagctattggaccaaggaag

SEQ ID NO: 303593 - DNA, 87 bp, Homo sapiens
ccaagaagatcgtggcccctacggtgtcccaaatcaatgcggagttcgtgacccaggaactgcaagcacatgttgaccagataactg

SEQ ID NO: 303594 - DNA, 90 bp, Homo sapiens
ctgaatcattatgaccaacagacagcagctttggcaatggagagctcatcagtcaatcagtcagcttctcagagtagcaatccatgtgtc

SEQ ID NO: 303595 - DNA, 95 bp, Homo sapiens
accatctacctcatctagaaggagagcaattagtgagacagtgtgccaaaggcagtaatgcattttttggttaatcatgtgaaagacactcttca

SEQ ID NO: 303596 - DNA, 100 bp, Homo sapiens
gacattcccaagaatggcaagttaaacatacagtcgcctctgacaagccagatccggaacatggtggcggtgctggaagtcatctccagcctggagaaat

SEQ ID NO: 303597 - DNA, 74 bp, Homo sapiens
tccgcttccacaacctcaaccatggcacctccatccgcgaagacatccttgtatccaaagtgtgtacatcagta

SEQ ID NO: 303598 - DNA, 75 bp, Homo sapiens
taggggcagcagcttggatgcggaccctcagtcctcaggcaggtttggtgcacctcgatttggaggaagtagggc

SEQ ID NO: 303599 - DNA, 88 bp, Homo sapiens
gcatcaagtgccacatcaacgtgtatccacacaagcaggaaccagcagcacaaacactgttggggcaacagtgaacagccaagccgcc

SEQ ID NO: 303600 - DNA, 100 bp, Homo sapiens
ggcacacaagtgtgaggagttgctaaatgctcaggtactaggttttgacaagcttgcatcatgcgtgagtataagctagtcgttcttggctcaggaggcg

SEQ ID NO: 303601 - DNA, 96 bp, Homo sapiens
gaacttttgacacggctttggaaacgacgtcatgtgttagggtcctgtattaataggaagttcacatggtggtgtcaacattgaagatgttgctgc

SEQ ID NO: 303602 - DNA, 96 bp, Homo sapiens
tctggggaaaataatccagagatttccacagaaggactgggatgatacaccttttccacagggaattgagttggatcaaaatggtttcaatcccag

SEQ ID NO: 303603 - DNA, 83 bp, Homo sapiens
caggacccgggctttagctatggcagcggcagcaccgggagtcagcagagtgaagctacgagttccagggagctctgtcctgg

SEQ ID NO: 303604 - DNA, 136 bp, Homo sapiens
gcatgttttgcatctggtgtgcaatgtgaagagtccttcaaaaatgccagaaatcaacgccaaggctccttctcctgaaaaagccgaggaggagagtgagaggcttctgagggaactctatttgtttgatgttctc

SEQ ID NO: 303605 - DNA, 100 bp, Homo sapiens
ttggccacgcatcacctggcgctgcatgaggacaaggccggatcacctcaacagtcacgtcagacaagtgcactcaacagaacggcccttcaaatgtgag

SEQ ID NO: 303606 - DNA, 101 bp, Homo sapiens
gcagtggcgcctaaagtctgagagagggaagtcgcctctgtgctcgtgagtgcatggggtataaggggaagatggtgaaaggaatgggaggtgctatggat

SEQ ID NO: 303607 - DNA, 98 bp, Homo sapiens
agcgggcacagggcaaggcggcggacggctgcgtcgcccgaggcgaggaggagcgctggcggggatatcattttcaatgcccaatacccagaactgcc

SEQ ID NO: 303608 - DNA, 97 bp, Homo sapiens
cggtcccgacacctagcctgcgtacaggtttgcagattccgccagcagcacagcaagctctacagatgagtggctctttggcatttggtgctgtggc

SEQ ID NO: 303609 - DNA, 100 bp, Homo sapiens
gtcacctctcaactgtgtgccaaagggatcgcttacacctgagacgaactacagaacagcacgtaccagaggtggaagtccaagtcaaacgcagaaggac

SEQ ID NO: 303610 - DNA, 100 bp, Homo sapiens
tatgctcgatggatagcattcactggaagagaagtacagcatcggggagcccacagtgccatccaccctggcagaggagtttacctacaaccccttcatg

SEQ ID NO: 303611 - DNA, 75 bp, Homo sapiens
agtaaccccttccgggagcctagatcctgtgctttactctgaagactcgatctcattttgcccaacggtggtact

SEQ ID NO: 303612 - DNA, 90 bp, Homo sapiens
gcacctcgggatcccattccttcacagggaccctagccagaatcctgcttatctgtgaaatgcagttaacacatcagctggacctatttc

SEQ ID NO: 303613 - DNA, 96 bp, Homo sapiens
cttgattctcttatacgctacttttactcagagtttgaaggttgtgaccaaaagaggctccgctgttgtgaacttggataattctgtggttgacct

SEQ ID NO: 303614 - DNA, 123 bp, Homo sapiens
cagggactggctgccaacccctccggctacgggccccttaccgagctcccagactggtcatatgcggagcttgggaaagtcgaggtgacggtgtttgaccctgactccctggaccctgatcgc

SEQ ID NO: 303615 - DNA, 90 bp, Homo sapiens
agacacggcagcgcagtgcagatccgcaggcgcaaggcttcaggcgacccgtactgggcctactctgagagtaatgccttctagcttttt

SEQ ID NO: 303616 - DNA, 98 bp, Homo sapiens
taccagttccaattctttcaagaggcagttccacccaatgactactatgcaagatatgggaaaatagtctccacaaaggcaattttggataagacaac

SEQ ID NO: 303617 - DNA, 100 bp, Homo sapiens
gggacagatgggcacccctttggttggccttccaacggcttcccagggccccagggaatgggtaccacagaccatgtcatcgtcctggcgtccacgaacc

SEQ ID NO: 303618 - DNA, 108 bp, Homo sapiens
agccgagtgcagaagatctgggtgcccgtggaccacaggccctcgttgcccagatcagcccctgtcaaagggaacaggaagcagtccacggagggtgacgccctagac

SEQ ID NO: 303619 - DNA, 50 bp, Homo sapiens
aaatcaccagttactttaatgaagtgatcagcagctggactgtgccttgg

SEQ ID NO: 303620 - DNA, 75 bp, Homo sapiens
gattgatgctcgtgactgcccacatataagcctgtcttccaccgtgacccttgaacactcttcactccctcctgg

SEQ ID NO: 303621 - DNA, 51 bp, Homo sapiens
ggcccacctccccaccaaggaagtgttttaactcaaatgggtgatgaaaag

SEQ ID NO: 303622 - DNA, 50 bp, Homo sapiens
caggcagcaggggtcctcattcacaggttgttatggagttgatggagaga

SEQ ID NO: 303623 - DNA, 100 bp, Homo sapiens
gggcaggcctggaccagttgctggccaccaccagatgccaagagttcaaactcaacaatattatccccatgtggttatccaaatgccaacccagtccagg

SEQ ID NO: 303624 - DNA, 99 bp, Homo sapiens
caggatctcgggctcggaacgagactgcacggacgagattgaggagctgcgggccgagatgctggagatgcgggacgtctatatggaggaggacgtgta

SEQ ID NO: 303625 - DNA, 82 bp, Homo sapiens
gtcggtatctttccaaggtcctagaactcaggaagagtgatgtggttttggataaggtcttcgccttgatcgtgttctcctg

SEQ ID NO: 303626 - DNA, 98 bp, Homo sapiens
cgaggtataccttaagccgtacttcctggaagcgtatcgacccatccggaaagggtcctgctgagctcaggagctgcacggaatggtggcagtcacct

SEQ ID NO: 303627 - DNA, 75 bp, Homo sapiens
ctttggagaactacatcaaccggctgctaaggaagcaaaaaaggctaagcaagcatctaaaaagactgcaatggc

SEQ ID NO: 303628 - DNA, 103 bp, Homo sapiens
acgctgctggtggcccgggtcttccagaaggctgtagaccagagtatcgagaaggtagctacagcaagctgggtagcaggcagatccaaaggatatcatgaag

SEQ ID NO: 303629 - DNA, 121 bp, Homo sapiens
gccaccccaagtacaggattggagtgggggcacccgtgtacatggccgccgtcctggaatacctgacaggtgcactttacaggtccccgatgaaccaagagaaccctccaccatatccagg

SEQ ID NO: 303630 - DNA, 105 bp, Homo sapiens
cagtgatatcgaagcgttggccaggtgtttggaaaatgtcctgggttgcacttctctagagagatggaaccatgtaaccaccacgaccaagaggccagtaaccac

SEQ ID NO: 303631 - DNA, 75 bp, Homo sapiens
agcccatggcaacagcctccggggcattgtcaagcatctggaggatgatggaccatttggattgtgcaacaaatg

SEQ ID NO: 303632 - DNA, 88 bp, Homo sapiens
cgcggccggagaagggctgcgggttagggggccggcgcccgcggttcagtgggtaattccagaattgattggccataccattgtcact

SEQ ID NO: 303633 - DNA, 101 bp, Homo sapiens
gaggcaggagcatttccaggggaagcgtgggctggaccaggatgtgcgggtgctgaaggtagtcaagctcctctggtgcaagtgtggtagctattgacaac

SEQ ID NO: 303634 - DNA, 75 bp, Homo sapiens
gacccggtttctaatccctgctctgtcactaacaagctgcgtgatcttcggcactactgcagtcttcagttaagc

SEQ ID NO: 303635 - DNA, 90 bp, Homo sapiens
ccaccatcaagttcttcaggaatggagacacggcttcccccaaggaatatacagtacgtagagaaatcgacactcttaatgaacgtttag

SEQ ID NO: 303636 - DNA, 100 bp, Homo sapiens
ggagaagcttacctttctggaggaggatgacaaggaaactgacccagactttgatcattgtgcagtctgcatagagagctataagcagaatgatgtcgtc

SEQ ID NO: 303637 - DNA, 100 bp, Homo sapiens
tatatagagatgtgatgttggagaactacagaaacctcgtctccctggatacccagtatctccaagataccatgaaccatgtcctaagctgtgtcaagaa

SEQ ID NO: 303638 - DNA, 75 bp, Homo sapiens
aggatccagatattagcacagcagaccttggtgatgtgctacagctatgaccaccaaagattatccatcattgtg

SEQ ID NO: 303639 - DNA, 100 bp, Homo sapiens
ctgaagtgtagcgaaaatgctactatgactcttcctggaatacacccacctaccttgaaccagctttggagtttaacccttctgccaatccagaggcaag

SEQ ID NO: 303640 - DNA, 101 bp, Homo sapiens
ggacgtactttgtctgactacaatattcaaaagcgcgttccttcacctcgggcagaataactttgcagaagcccacaggttcttcacagagatcttaagga

SEQ ID NO: 303641 - DNA, 75 bp, Homo sapiens
ggccgtctcgctctgggtctccaggcccgcgaccgtccgccagtcgtcccgaggactcagaattcatgattgaag

SEQ ID NO: 303642 - DNA, 82 bp, Homo sapiens
gaggagcagctcacctgagagacggagccccggctcgcccgtgtgcagaggtaccactgatgaaattatgaccaggtgggcc

SEQ ID NO: 303643 - DNA, 75 bp, Homo sapiens
gttgttgggcatatcactgaaggtgtgtgcaggcctctaaaggctttcaaggggggctgcaaagctcctcatgct

SEQ ID NO: 303644 - DNA, 50 bp, Homo sapiens
cagcggcagcgcggcggggccggcacccaccaaggctccggatgtgttcc

SEQ ID NO: 303645 - DNA, 74 bp, Homo sapiens
aagagattcagccagcacactcctcgcgagcaaggccaagtcctgtatctgccatgtctgtggcgtccacctca

SEQ ID NO: 303646 - DNA, 100 bp, Homo sapiens
agagaaagagattcaggattagaggatggaagggagtcaccttcttttgggcaaaggtgaagaaaggcgtgaacatcatcggcgtgcgagccagcagccc

SEQ ID NO: 303647 - DNA, 90 bp, Homo sapiens
accaaaaacaggagtattaaatgaaaacacagtttctgcaggaaaagatctctctacttctcctaaggaaaattgcctaagaattatgac

SEQ ID NO: 303648 - DNA, 100 bp, Homo sapiens
gagtctacttctttttccgagggctacctggcctatcgaaactttatgattgacacttaccgactgaacccccaagagtatcttacctctaccgcctgcc

SEQ ID NO: 303649 - DNA, 100 bp, Homo sapiens
ccattcacctgtgggacctgctggaagggaaggaaaaacctgtatgtggaaccacctaccctggtgggcagcagtgggaccattctgaccacaatgcctg

SEQ ID NO: 303650 - DNA, 82 bp, Homo sapiens
ccaccacccacggccagacacttccaggagcgctttgccacaaatgtcagtgcagaactctggctggccccaccaagaagac

SEQ ID NO: 303651 - DNA, 100 bp, Homo sapiens
gggatctttccggatcaatccagatggcagccagtcagtggtggaggtgaatgaaaactttgccattgatttgatagcagagcagcccgtgagcgaggtg

SEQ ID NO: 303652 - DNA, 78 bp, Homo sapiens
caatgatgagaggatgtggtggtctactctgatgtcaatcttgagggctagaccaagatcactccatggatgaaatga

SEQ ID NO: 303653 - DNA, 75 bp, Homo sapiens
atatgatcttcagaagaaaacctgattggtacacagaacagcttggagcttcttgaggatccaaaagctgaagtg

SEQ ID NO: 303654 - DNA, 99 bp, Homo sapiens
gcgagaagaaaatcaagaagctgaatttccaggccttcgccgagctgtgcagatgttcctcctgctgatcaagagaagctttttatccagaagttacgt

SEQ ID NO: 303655 - DNA, 100 bp, Homo sapiens
ttataaagccttctgaactgagtgaaaatacagccaagatcttggcaaagcttctccctcagtatttagaccagcttgaacatgcgaaagtgacacagac

SEQ ID NO: 303656 - DNA, 95 bp, Homo sapiens
acctatgcagttcgaaaactggataacactaagtttagatctcatgaggaaccctaaggactctgcaatatgaataattccctagagaacaccat

SEQ ID NO: 303657 - DNA, 100 bp, Homo sapiens
tggcccccggctccgtgaccagccggctgggctcggtattccccttcctgctagtcctggtggatctgcagtacgaaggggcaacaccctccactaaaga

SEQ ID NO: 303658 - DNA, 100 bp, Homo sapiens
aagaagatccatttgtatttattcctgaagatgacccattatttccacctattgagtggttgtggaggcagagaatcaggttataccttgaagggactgg

SEQ ID NO: 303659 - DNA, 75 bp, Homo sapiens
tacgattgcagcgcagtggaagtcaagagcaagcgcgagcccagcattgacctgctgcaggccttcgtggagcac

SEQ ID NO: 303660 - DNA, 90 bp, Homo sapiens
ttctttcatcattaagaaatcagggacgtgcttccttaacacaagagaaagagaagtttgcccatgaacatgaagaaatgaagaacctag

SEQ ID NO: 303661 - DNA, 101 bp, Homo sapiens
caagtatccccgttcgccaccaattatgggagggctggccaacttctgctacagacgactcaattcctgggaacaccaccatggagggcctggcctttggc

SEQ ID NO: 303662 - DNA, 93 bp, Homo sapiens
gagacatgtctgagactcctgctcagtgtagcattaagtgtaaacaggaacatcgataagtagtgtaaaaacttgcacaatgaaatccgaagc

SEQ ID NO: 303663 - DNA, 100 bp, Homo sapiens
cctccgtctgccacacgctgatggtgcagcaccgcatgatggtacccaaagtcagggatgggcgtgttttgggcgtgctagaggtgtcacgctccattgg

SEQ ID NO: 303664 - DNA, 87 bp, Homo sapiens
tgaagcgattcctgcaggcgttggttcccctctttgacctggagaggcagatgcgaaccagaacaatgggacctcctctcaggacac

SEQ ID NO: 303665 - DNA, 73 bp, Homo sapiens
aagagaggactggaaatggaaggatgggaggttttggtgggagaacgagggtgtgttcagcatgcagcagcga

SEQ ID NO: 303666 - DNA, 90 bp, Homo sapiens
tctcaccaataatagtctcgtggaactgcgggacgaccctgggacagtctccactggggcagatccagctgaccatccggcacagctcgc

SEQ ID NO: 303667 - DNA, 74 bp, Homo sapiens
tgaagacatcataactaaaccacctgttcgaaagatccaaaaggtaattctggcacttggagactatatgggag

SEQ ID NO: 303668 - DNA, 82 bp, Homo sapiens
gttgtgtggtcgcgtctcggaaaccggtagcgcttgcagcatggcacccggggcagcccctggtgaggtctgtgccaagctg

SEQ ID NO: 303669 - DNA, 75 bp, Homo sapiens
gccgcccctgcgccgccgagccagctgccagtgacaaaaatgctgagtttcttccgtagaacactagggcgtcgg

SEQ ID NO: 303670 - DNA, 100 bp, Homo sapiens
aaacaaaattctgaactcaggacttggcaaaatgcagaggctgtgcattttttctgcaattacgaagagagccgaggcaattacctggttgatgtggacg

SEQ ID NO: 303671 - DNA, 90 bp, Homo sapiens
acacgagtttcaagatcctggaccgtgtcaccatccaggaactcacaggatggtgattgctcacaccaaagccttggacccctcccagcc

SEQ ID NO: 303672 - DNA, 83 bp, Homo sapiens
taccgggcgcgggcagagcgcggcggcgcggatgaagaaaacctgcttgatatcacacagtcaggagtcaactgagttggggc

SEQ ID NO: 303673 - DNA, 76 bp, Homo sapiens
cctcagctgggagaaatgttggaaatggtttaaacacattatcagacacctagctgttgggcagaagagggtgcag

SEQ ID NO: 303674 - DNA, 109 bp, Homo sapiens
cacatttccaagtacattctcaggtggagacctggcttccgagtggacctgccaatcaagtcggcccgctaccgtggccagtacaacacctatcccatcaagctcttct

SEQ ID NO: 303675 - DNA, 100 bp, Homo sapiens
accttttcacgttcggtttggaaagctgggagtcctgagatccaaagagaaagtgataagtacatgcagatgaatcacgcattgttttctctcaatgggc

SEQ ID NO: 303676 - DNA, 80 bp, Homo sapiens
tggtaaatgacgaaggggcttcttccagagccaaggaggaagggttgtccggctccccagttaaagatctcagatgaccg

SEQ ID NO: 303677 - DNA, 100 bp, Homo sapiens
cttggttaacttgggagaaagtttcatctgtggatggagtattgcacacgacggttctgccctttatattaatcgagatgaggacatcgcaccatcagta

SEQ ID NO: 303678 - DNA, 75 bp, Homo sapiens
ctgggctcaggcattcagctgttctgtatgatcctcatcgtcatctgactccagcgaaattacagggaattcgtg

SEQ ID NO: 303679 - DNA, 100 bp, Homo sapiens
ggaagaacgagaacggcagcttcgagaagagattgttaaaggaaatgggctggcaggaagacagtgaaaatgatgaaacatgtgctcccttaactgagga

SEQ ID NO: 303680 - DNA, 100 bp, Homo sapiens
tcagtttatgagtctctgggatggattggatactgatcacagctgccaggtgttttcacagtcctgtgtttggtatggagagtgtggaattgcatatggg

SEQ ID NO: 303681 - DNA, 74 bp, Homo sapiens
aataagattcctcaatcctgagagagagaattaaagtctaactctccaaatgttgctgcttttgctcagaggac

SEQ ID NO: 303682 - DNA, 75 bp, Homo sapiens
ggatctggggatcttcgcactatcccaagttactccacaggatccgctgaacataggatgttgccacaaaatcta

SEQ ID NO: 303683 - DNA, 98 bp, Homo sapiens
gaaattatcaactggcttgataagaatcagatattaataaggcagcggaaagaagaaatatgaatacggctccatcaagacccagccccacacgaagg

SEQ ID NO: 303684 - DNA, 85 bp, Homo sapiens
acaccctctacgaaggcggctacttcaagattttcagctgaactctcatctctcaacactggcaaatattcataagatctaccac

SEQ ID NO: 303685 - DNA, 74 bp, Homo sapiens
gccccgttccccgagctgtgcaggatctgtctggctccattgatgacctccccacgggaacggaagcaactttg

SEQ ID NO: 303686 - DNA, 83 bp, Homo sapiens
acagccgcggcggcagcagcagtgagagatcttcgtgaagactctgactggtaagaccatcaccctcgaggttgagcccagtg

SEQ ID NO: 303687 - DNA, 100 bp, Homo sapiens
gtggaagcagagtgggaagcaggtgactctgttttgagaagtgcaaccagatctctcctggaattcaacacaacagtgagctgtgaccagcaaggcacaa

SEQ ID NO: 303688 - DNA, 101 bp, Homo sapiens
tgaagctcctgaagccgacctgggtcaaccacaatggacaaccctccatatgataagggagccttcagaatcgaaatcaactttccagcagagtacccatt

SEQ ID NO: 303689 - DNA, 100 bp, Homo sapiens
gagagtatatgcgatgagtttgtaagagatgctaaaaaccttgtacctatggaccccaatggcctgtcagatccctacgtaaaactgaaactgattcccg

SEQ ID NO: 303690 - DNA, 124 bp, Homo sapiens
ttctttgaactggaccccgcgagcaccagagtcggcgtaactatcgcctgacagggtatctgaagtaaaagggggtaagaatgattgatgttggctgatattggagtgctcattcacatgaagt

SEQ ID NO: 303691 - DNA, 102 bp, Homo sapiens
tcgggtcgccggagccgcgccccaccccgccagctccagagccacgtacgccgcttacaaacacgcagatggcaagaagattgatggcaggagggtccttgt

SEQ ID NO: 303692 - DNA, 73 bp, Homo sapiens
gccgcctccgccgctgcctcaggagcggaacaacgtcggcgagcggggaaatctactttcttcaatgtgttaa

SEQ ID NO: 303693 - DNA, 101 bp, Homo sapiens
atcctgtcccactgggaaaagtataacacagggattcttttcctgccatggggatatgacattagccaggtggcatttatgtttgaatcatctttaagtct

SEQ ID NO: 303694 - DNA, 142 bp, Homo sapiens
ccggaaagcactgaatactttgtttcccataagagaatcccattatatgttgatgtattaaaagacctgagaacctggttttcttatcaccacaggagaaaatctagattatcttgatggtgtccatacggtgtttggtgag

SEQ ID NO: 303695 - DNA, 74 bp, Homo sapiens
aactctggctaccagtacaagagactagaagagtgtctacccacaggaatcaggaaacccaggcccaacggcag

SEQ ID NO: 303696 - DNA, 90 bp, Homo sapiens
cagctgcggagcagtgcgtcagagtttcaggaacacagacagacctatgggaacacacgggaacctcttttagaaaacctgacaagcgag

SEQ ID NO: 303697 - DNA, 100 bp, Homo sapiens
gacggagctacagctccgcgcccgccagttgcttgatcaggtggaacagattcagaaggagcaggattaccaaaggatggagtctcgctctgtcacccag

SEQ ID NO: 303698 - DNA, 100 bp, Homo sapiens
ttagcacatgcagatgagaagtccttagaacatccagtcatggataaaaatgagctggttcagaaggccaaactggccgagcaggctgagcgatatgatg

SEQ ID NO: 303699 - DNA, 74 bp, Homo sapiens
tcgggcgctgctgtctgtgaattctttttgaaagctgcctgcggcaaaggagaattctcaccaaatgttcccaa

SEQ ID NO: 303700 - DNA, 98 bp, Homo sapiens
gccagtcatgtatcaaagactgtttgttcaacatatctacaatctcggtactacagagctccagtacttgttgccctagcattaattgaaggtggaat

SEQ ID NO: 303701 - DNA, 100 bp, Homo sapiens
accaagggcctccgtctggatttccaaggaagaatttcctctgaagcaccggaatcccttggcaccatgtcctgtgtgcattataaattttcctctaaac

SEQ ID NO: 303702 - DNA, 127 bp, Homo sapiens
aagaccgcgcgcagggcctgcagcgggagctggacggcgagcgcgagcggcgcgagaaagttgtgaccgagattcccgacgagagagactgaggggaagagaggaaggaggggcgggctcctggcaa

SEQ ID NO: 303703 - DNA, 101 bp, Homo sapiens
caatgatagatacatcagtgtgggaagccaagcagatacaagaaaatatgagagccacacccgtgttcacacaggtgagaagccctttgagtgtgatattt

SEQ ID NO: 303704 - DNA, 100 bp, Homo sapiens
tggagcgtgggcgtttcgcagactcctaaggttgcagagaacacatcttagaagatgaaaaacctgaatctatcagtgacactactgacttggctctacc

SEQ ID NO: 303705 - DNA, 83 bp, Homo sapiens
attttctctacaaagctgggggaggctcatatattgctgcaggtattatacctgaagaaccttagccctcgggtgactgaaag

SEQ ID NO: 303706 - DNA, 100 bp, Homo sapiens
aatacagaactgccccatcgatgtgcggcgtccgctgtataaggctgctgagaaactaggtgaaactgagaaacttagtataatgattgaagaatgtgga

SEQ ID NO: 303707 - DNA, 82 bp, Homo sapiens
tgcttaaaaatcaccagttactttaatgaatccaattctggtacagcagttgcgccggacatacaaatatttcaaagattat

SEQ ID NO: 303708 - DNA, 82 bp, Homo sapiens
cagaagaagctggaggccggcaaagccaaggttcttggaacaccaaatgaggacacatggcctggagttcattctttaccac

SEQ ID NO: 303709 - DNA, 83 bp, Homo sapiens
gctgggattggagattccacccaaacttgctggtcactgggagggacccagacatggagctgcgggaagaagcctggtctccg

SEQ ID NO: 303710 - DNA, 87 bp, Homo sapiens
gtgatcgaggacataaggaactagtcacagtgttgctgcaacatagagctgacattaactgtcagtggcatgccctctcccgtgaag

SEQ ID NO: 303711 - DNA, 75 bp, Homo sapiens
cattgatctccctatcaatgtatttaaggttccgagaagtaaagctttggaggtcacaaaattagcaatagaagc

SEQ ID NO: 303712 - DNA, 98 bp, Homo sapiens
ctctctccctgccaggtctccgggctgctgaagaggcgctttcactggaccgcgccggctgcgctgcaggacactgacgaccgaaacaagatgtcagt

SEQ ID NO: 303713 - DNA, 100 bp, Homo sapiens
agcctttaccaacgccatcaccgacctcatcagtgagctgtccctgctggaggagcgctttcggcacccccccaggcagcagcagcagttttcatctctg

SEQ ID NO: 303714 - DNA, 50 bp, Homo sapiens
gaggtctcctcagccatgctgaactacttagtcatgactgtgagccaaac

SEQ ID NO: 303715 - DNA, 80 bp, Homo sapiens
cgatgtggtgcgaatacaggagacgtgtggaggttgtctgcattcaaaagagcattctattaaagctaccttaatttggc

SEQ ID NO: 303716 - DNA, 100 bp, Homo sapiens
cgtgaacgaagattcgaaaagccacttgaagaaaagggtgaaggaggcgaattttcagttgataggtgataacgtggtgctggaccagacctacctgtgg

SEQ ID NO: 303717 - DNA, 83 bp, Homo sapiens
cggcgttccgtgttgtggcgttgccccgccggccaagtcctgtatctgccatgtctgtggcgtccacctcaacaggctgcatt

SEQ ID NO: 303718 - DNA, 83 bp, Homo sapiens
gagacacaatttatcattgaataagtgttttaagaaagtggacaaagagaggagtcaggaactcagcgagatgctgtacacag

SEQ ID NO: 303719 - DNA, 100 bp, Homo sapiens
cccagggccagagccgaagctgtgcttctccatgagatggtcagcagcacagtggccatggaaaaagaaaaactctacagcatatttccgaggatcaagg

SEQ ID NO: 303720 - DNA, 51 bp, Homo sapiens
cagccttagccctagtgtagagagaccatttgtttgtgactatgaagggtg

SEQ ID NO: 303721 - DNA, 100 bp, Homo sapiens
ttattctggtgtttatatctgtaaagtgaccaattcccttggtcaaagaagtgaccaaaaagtcatctacatttcaggagaccgtaaacaaggtcttcac

SEQ ID NO: 303722 - DNA, 100 bp, Homo sapiens
tgcagaggtgctggagctggcaggcagacctgttatcctaaactaggtgagtcagcttttggtacatgtgatgattttcagtgtaaccaatgatgtaatg

SEQ ID NO: 303723 - DNA, 75 bp, Homo sapiens
gcttggagcacttcctattccactggattgggaaagaccatggcagaagaacatgagctgcctgtggacatggaa

SEQ ID NO: 303724 - DNA, 100 bp, Homo sapiens
tggcattctgttagacagtgaatgtggaaaggagattgacagtcacaattttgtaataaggaactgtggctgcaccatctgtcttcatcttcccgccatc

SEQ ID NO: 303725 - DNA, 74 bp, Homo sapiens
tattttttctcatggatgttcttcttcgagtatttgtagaagggacttgattattcttagaaatgcacttgacc

SEQ ID NO: 303726 - DNA, 73 bp, Homo sapiens
tttttattacaagactacggagcataggaggaaaattcatcatctgatgtgttcagagcaacattgttttgtt

SEQ ID NO: 303727 - DNA, 104 bp, Homo sapiens
ctgtcagtcgcgagcgaacgaccaagagggtgttcgactgctagagccgagcgaagcgattttttatcaagcagaaatgcatcgaacaacgagaatcaagatca

SEQ ID NO: 303728 - DNA, 75 bp, Homo sapiens
ccgtgggcagccagggtcggtgaagggattgtcaatgaggcagatcagattccgatttgacgggcaaccaatcaa

SEQ ID NO: 303729 - DNA, 100 bp, Homo sapiens
ttttgaggttcatttaaccccaaaatcagtgattctacatctcaagctcatattttgaagtgtttacgggaattgaatgatctggcacgggaccctccag

SEQ ID NO: 303730 - DNA, 100 bp, Homo sapiens
ccaggaaatcgagactcatgactcccagagaggatggcatctagaaggccctggccaacgtcaacattgggagcctcatctgcaatgtaggggccggtgg

SEQ ID NO: 303731 - DNA, 133 bp, Homo sapiens
acgaaaacgtagggaccacatcaaagacagctttcacagtttgcgggactcagtcccatcactccaaggagagaaggaacttgacaagaggagtcggaagatttagagagcttctcagagcagttgaaacaag

SEQ ID NO: 303732 - DNA, 96 bp, Homo sapiens
gggagtcgaagcgagggtctgaagttcacgactactagaaggggaggggagtggaaaggctctcagtgaaaaagaggagagtacaggtcgtgctgc

SEQ ID NO: 303733 - DNA, 50 bp, Homo sapiens
cttcaaccaaacttggactgcaaacagatatgagggaaggcaccattgga

SEQ ID NO: 303734 - DNA, 100 bp, Homo sapiens
ggtttcttactaaggacgagctgatcaagtatatgactgaagaaggcttcaccacggcagcatacctgcgcatccacgcggtgaaggaccacgggctcca

SEQ ID NO: 303735 - DNA, 76 bp, Homo sapiens
ttggaagaaatggtgcagagattaaatgcggtttccaagcacacgggccaagaagcttgagagaagaaaaatttca

SEQ ID NO: 303736 - DNA, 100 bp, Homo sapiens
tcgtaatgcgagaggtgcgggcgcggctggcggccacgcaggaattttctgaaccaacaattattctctttgaaagagaagacttcaaaggaaaaaagat

SEQ ID NO: 303737 - DNA, 98 bp, Homo sapiens
gacagcctcaaacaggagctggagcagctcaaagagggtaaaaggacaaacttgcgtaaaactggctcagagcgtatcgctcatggaatgagggtgaa

SEQ ID NO: 303738 - DNA, 60 bp, Homo sapiens
agttggcagccatcaaagttatggatgtcactgaggtagacgcaccctctgaagatggtg

SEQ ID NO: 303739 - DNA, 51 bp, Homo sapiens
agaaggtgacagtggtgaatgcaaagttttgatggcgacgactttgatgat

SEQ ID NO: 303740 - DNA, 74 bp, Homo sapiens
cagctgctctgaaccaggacctggacccggacccaaagtgccatgtctttaattgatgatggccaaagagaagc

SEQ ID NO: 303741 - DNA, 96 bp, Homo sapiens
aatcctgtcctgaagactgtaagaaacaagtgttgaaaatgttaaaggctgtgctgaagaagagccgagagggaggaaagggaggcaagaaggaag

SEQ ID NO: 303742 - DNA, 96 bp, Homo sapiens
ctccattactcccatggacacccctgatgagcctcaaaaaaagagttctgaagatatccggtgcaaatgcatctgtccaccttatagaaacatcag

SEQ ID NO: 303743 - DNA, 95 bp, Homo sapiens
aaggagcagcttccaggatcctgagatccggagcagccggggtcggagcgggcagtagcagaatcccatggtagccaggtgggtgaaggggagcg

SEQ ID NO: 303744 - DNA, 83 bp, Homo sapiens
tcccagctcggcccgcgggggagccccgggagccgcacggttgatgataattagaagcatgctttccactgaacttcccgaca

SEQ ID NO: 303745 - DNA, 83 bp, Homo sapiens
agactggagagggagatcacgcagtcctgctacttcctgggatgttaggggctttgaccacgacctttgaagagcttcatttt

SEQ ID NO: 303746 - DNA, 96 bp, Homo sapiens
cccaacagagggaactacaaccagcctgtctgtgtcgttggccttatgacgaggagtgcctgtgggttatcctaatcgttgtcttggtcactcttg

SEQ ID NO: 303747 - DNA, 89 bp, Homo sapiens
gctgcacccgcaggtgctgggcgcgctgcgggagctgggcttcccgtacatgacgccggtgcaggtgcactgtgaagagttcatccccg

SEQ ID NO: 303748 - DNA, 75 bp, Homo sapiens
atccgttacaagcgtcagggagctgcgcgcttccaccggattggtgctgaagacatggacggcttccaggcagac

SEQ ID NO: 303749 - DNA, 75 bp, Homo sapiens
ctactgatgagacaagatgtggtgatgacagaatcagcttttgttcgaccttgaaactacaagagtgaatctgaa

SEQ ID NO: 303750 - DNA, 96 bp, Homo sapiens
cttggcttgattcagtctgccttgtaacaggtattatccatgcagcagaagagaaggactggaaaactgcgtactcatacttctatgaggcatttg

SEQ ID NO: 303751 - DNA, 100 bp, Homo sapiens
gacttcctccaggcgctgtgcccccaggagctcgctttgacccctttggacccattgggaccagcccacccggaaaatgttttcagactgctcatttcta

SEQ ID NO: 303752 - DNA, 101 bp, Homo sapiens
caccgccctcagccagaagggctacgccagcggcgtcgagaggaccatcctgggtgctggccctgtgctggaggattaatacccctcgaagacaaggagga

SEQ ID NO: 303753 - DNA, 75 bp, Homo sapiens
tacaaaccatactaaattattccatttgcaacttatccccaacaggcttgaagtagaaaatgccatgatgagaaa

SEQ ID NO: 303754 - DNA, 75 bp, Homo sapiens
tgcaacatggggcttgagaaaggaacatccagtcatggataaaaatgagctggttcagaaggccaaactggccga

SEQ ID NO: 303755 - DNA, 98 bp, Homo sapiens
acttgctggatggtggactcagagaccaataaaaataaactgcttgaacatcctttgactggttagccaggaagaaacacctcttacagtcatctgca

SEQ ID NO: 303756 - DNA, 100 bp, Homo sapiens
ctcggctggatgttctcatcgtccctgccaactttccaagtctggggatggccaggcattgggatcccgtggcagttgcagcactgaagtggagaaggag

SEQ ID NO: 303757 - DNA, 98 bp, Homo sapiens
ctctcactgaatgagcctgaagacaaggatgtgactgccagatcgataaggaggccgtgcagaagtacgcctacctcaacgtggtgggcatggtgggc

SEQ ID NO: 303758 - DNA, 116 bp, Homo sapiens
cggagcttatactcctcccagtgacgggtctggagtgcgtgggggaccggctgttggcggctcaccatggatgatgatatcgccgcgctcgtcgtcgacaacggctccggcatgtg

SEQ ID NO: 303759 - DNA, 98 bp, Homo sapiens
cgcctatgcctgccaggctgctgcccttcctttgaagaaaggaaacagttgggcttgccccaccagagacgaggaggaaactttaaatctaaatccag

SEQ ID NO: 303760 - DNA, 96 bp, Homo sapiens
tgaaggtccggggcttgccctggtcttgctcggccgatgaagtgcagaggtttttttctgacctatgaggaccagcacagcagtgaggaggaggag

SEQ ID NO: 303761 - DNA, 90 bp, Homo sapiens
cgcctgctggccgcgctgtgcggcgcgctgctctgcgcccccagcctcctcgtcgccctgggcatcctgacatcgaggcccaggagagag

SEQ ID NO: 303762 - DNA, 83 bp, Homo sapiens
accttctgtggaaaggaagctgcacaggaagccgtgaaactgaggagacacaccttgaagaaacaacagagagccaacagaat

SEQ ID NO: 303763 - DNA, 100 bp, Homo sapiens
taatgcaactggtagccacagagtacttattcattcatttcccagatcatcatgaaggacacttaactaggctgctgtcaagcaaactcaggacttcaag

SEQ ID NO: 303764 - DNA, 100 bp, Homo sapiens
tcttcccaggctgtcatataactcctgagaatagtggttcttaactctgtgctgagcacagtgctctccatgtatgttgtgtatagcactcagagtagtc

SEQ ID NO: 303765 - DNA, 100 bp, Homo sapiens
gctctagcagaggaaaataagaacacagtggatgtcgagaacggtgcttctatggcaggatatgggaaatcctcattgacgattcaatttgttgaaggcc

SEQ ID NO: 303766 - DNA, 50 bp, Homo sapiens
aaggggcagaagctgatcatcaccagcagctttcttagccctcttagaag

SEQ ID NO: 303767 - DNA, 75 bp, Homo sapiens
aaaactctttcagtagcagcagcttttaatgaagatgaagatgtcttgtccaataagcatgtggctcctgatcat

SEQ ID NO: 303768 - DNA, 100 bp, Homo sapiens
ccgcaattatggcatcctggccgatgccacggagcaagtgggccagacttcccaagtaagaagcggaagaggagccgctggaaccaagacacaatggaac

SEQ ID NO: 303769 - DNA, 74 bp, Homo sapiens
cttcaaacattcgtctcggaaaccccgcctcttacagtcacgagaaccgtgggtaccgatggatgtggccgaga

SEQ ID NO: 303770 - DNA, 100 bp, Homo sapiens
aagagttggatcaacccagagctattgccttagatccttcaagtgggtggtggaagatggatatgaattttttgctaaacgacagttggtaaccttattt

SEQ ID NO: 303771 - DNA, 100 bp, Homo sapiens
tacaaagacattctcccctgcctggatggatacctgaagacttcagccttgtcagatgctgcagttggagaagaaacttgaacgtgaacttgaggatgat

SEQ ID NO: 303772 - DNA, 75 bp, Homo sapiens
gcgggagatgctggagaagctgattcgatcctttggtacagaagacagaccgacagatcgtccaataccacctcg

SEQ ID NO: 303773 - DNA, 74 bp, Homo sapiens
ccaaagggaacttcaaattagtcagtttcagaagaggagccccgccgaggcatgagggccgtgctccccccaga

SEQ ID NO: 303774 - DNA, 98 bp, Homo sapiens
ggctggaggtgggatccacacagctcagaacagctggatcttgctcacactctttcaagagaagcttccttgctgctggagccagttctgcttctcgg

SEQ ID NO: 303775 - DNA, 75 bp, Homo sapiens
agaggacagatcccacagatactctactatagtgtgaaatcaaagttgcacaacccaaagaggtatataggcagc

SEQ ID NO: 303776 - DNA, 100 bp, Homo sapiens
caagagcgtgccctacttcaaggataagggtgacagcaacagctcggcgggctggaaggacccaggaccacccccaccttctccattactaggtttgaaa

SEQ ID NO: 303777 - DNA, 100 bp, Homo sapiens
atcatttacggcatgtacttctgcatgaacatctccagccagggcgccatggctgcggagcggacccggccgctgcaaggctctggcggtccgagcgtgc

SEQ ID NO: 303778 - DNA, 82 bp, Homo sapiens
gctagccggcgagttgagtggcgatgtccccaactcctgcccagccagtccacgcggtgccggctcctccagttaccgcttt

SEQ ID NO: 303779 - DNA, 50 bp, Homo sapiens
catccctgaccagccgccaacaaaggcaacatcagatgctgacctgaaag

SEQ ID NO: 303780 - DNA, 82 bp, Homo sapiens
ggcggaaaggacgtgctttttctgggtttcaacagacatccacgacagcgatggcagttccagcagcagccaccagagcctc

SEQ ID NO: 303781 - DNA, 82 bp, Homo sapiens
cgacaagccgctggcagccgcggatctcaccgccgctcagggagaagatggggagccccgaggatgacctgattgggattcc

SEQ ID NO: 303782 - DNA, 100 bp, Homo sapiens
gccaagttccccaacggctccccgtcgtcctggtgctgcagcgtgtgccatcataatgtttgatgtaacatcgagagttacttacaagaatgtgcctaac

SEQ ID NO: 303783 - DNA, 101 bp, Homo sapiens
ggcgagcccttgggccgcgtctcctttgagcatcccagccatcactcttccacctgctccttagagaagggaagatgagtgagtcgagctcgaagtccagc

SEQ ID NO: 303784 - DNA, 75 bp, Homo sapiens
tggtttttcggatcatgtctggtggctccgcggattataacagccggatcgagctgggagatgtgacaccacaca

SEQ ID NO: 303785 - DNA, 100 bp, Homo sapiens
gtaagaactaaaatggtctactgcaaaattgatcagacccagagaaaagtagttgtcaggaaaaatgaggaagctgtgagtaccagtggaaggaacgagc

SEQ ID NO: 303786 - DNA, 75 bp, Homo sapiens
gttttctggctgcggggggttgtcggagggattccaccaagcagcaaacggggattcagcgtccgatcctttgga

SEQ ID NO: 303787 - DNA, 100 bp, Homo sapiens
aatgataaaatttcatggagaagaaggccttgactacggaggggttgccaggcctgtctcctccctcctacacatttccagctcctgctgcagttattcc

SEQ ID NO: 303788 - DNA, 82 bp, Homo sapiens
acccgagacgcggcgcgcacgctccggcctgcgttcaaatctgaacatcaatgatgtactagggaactactcattgactctt

SEQ ID NO: 303789 - DNA, 90 bp, Homo sapiens
aggacgagctgatcaagtatatgactgaagaaggaaggggatgattatgaagtcattcctaacagtaatttctatgtatccagaacggcc

SEQ ID NO: 303790 - DNA, 100 bp, Homo sapiens
atgaagaacgggatcctctgctgcatagtttcggtcatctaaaggaggttttaaacagtataacaggctctacttgaacctggtcctcggcaatgtgaac

SEQ ID NO: 303791 - DNA, 75 bp, Homo sapiens
tgtcaacatagacttgacatatgatatacagtcatttactgatacagattctgctgcaaccctttcctatactac

SEQ ID NO: 303792 - DNA, 74 bp, Homo sapiens
caggccccggcagcgcctgggacaagggaaagaatatggcaaagctgatgcaagatgggtttattttgatccaa

SEQ ID NO: 303793 - DNA, 100 bp, Homo sapiens
gcagcagaggatgatgagggcttcagtgcagacgcagtggtggccctggagcagtatgccagcaagtgagaaaaaacgcaagcctgcatggaccgatcgc

SEQ ID NO: 303794 - DNA, 75 bp, Homo sapiens
cgccgcccgtccacacccgccgccaggttttcgacgctggggaagtgtttgggatcatgcaagtggaggaggtag

SEQ ID NO: 303795 - DNA, 98 bp, Homo sapiens
gtttcagtgagcgggagctggcagagtttctatgtgctctgccaagaagggaaggttatgagttttttgtaggacaatggacaggtactgaactccac

SEQ ID NO: 303796 - DNA, 89 bp, Homo sapiens
ctggtgtgcagaacattctcaaaattggcttcctgaatgacaagttggaggagaggtcagtgctctttgcggtggcctcagcgctggtg

SEQ ID NO: 303797 - DNA, 75 bp, Homo sapiens
gtccgccaggccctgcaggacctgctttcggagtacatgggcaatgacgtctgctcactggagatgacacgtgcg

SEQ ID NO: 303798 - DNA, 100 bp, Homo sapiens
gggcaggcgggacatggaggtggtggacgagacggaggcgctgcagcgcttcttcgaaggaaatgtgactggaaacagtaactccacgttcatctccagc

SEQ ID NO: 303799 - DNA, 82 bp, Homo sapiens
gaaaggaatgaacatgtatttaaccaagttccaacaaaagaatgctgccgcagcattcctgggagatggtcgggaagaagaa

SEQ ID NO: 303800 - DNA, 109 bp, Homo sapiens
ctgagcccaggccacagtaccctattcacgctctgtgcttgtgccaagggtcaatacacctaagaaacaaggaggactgggacccatgaacattcctttggtatcagac

SEQ ID NO: 303801 - DNA, 102 bp, Homo sapiens
caagttcttcaggaatggagacacggcttcccccaaggaatatacagacgcaaacatgcagatctttgtgaagaccctcactggcaaaaccatcacccttga

SEQ ID NO: 303802 - DNA, 100 bp, Homo sapiens
gtacgggcggccgtgcgcgaggcgaggcaagaaattatagagcagcttctatcaaatattttccacaaggagaaaaatgagtcagccatagtcagtgcaa

SEQ ID NO: 303803 - DNA, 83 bp, Homo sapiens
ctcttctcagtgatgtttgagcaaatggaactgaagctgtggtctaccaatctagacaactcagtggcaagcattgaggcaaa

SEQ ID NO: 303804 - DNA, 106 bp, Homo sapiens
caacaagaagaacgctctcatccggaggcaggaccagctgcagctgctgttggatggcaagcatgtggtgtttggcaaagtgaaagaaggcatgaatattgtggag

SEQ ID NO: 303805 - DNA, 90 bp, Homo sapiens
ctattttcacgttttaatgccgagaggtgctgggactctggtgcccccaaccctgggcatcctcaggctttgaggagaatacacaggatt

SEQ ID NO: 303806 - DNA, 100 bp, Homo sapiens
ctttagccatgtggatacctacggagcacgagaaatacggcgtgggcgacttcagaatgcccacactggcctcgacctgactgtgccccagcaccaggag

SEQ ID NO: 303807 - DNA, 101 bp, Homo sapiens
ttgaagttccagattcttccattttgaaaaagtcaggatctggtgattttgaagagaaaccacaacaacaaagatgaaaacccctgcttcctttacctgag

SEQ ID NO: 303808 - DNA, 83 bp, Homo sapiens
tctcttttgtctgcccctattgtaagtgcagatggaacacaacagtcacattaactttgctctagaagacaactttacaagga

SEQ ID NO: 303809 - DNA, 100 bp, Homo sapiens
tggaggaattgctacacccccagtgtatggtcagcttctagctttatatttgctccataatgacatgcagtgtcatcattaggctgtctttgtgccttaa

SEQ ID NO: 303810 - DNA, 75 bp, Homo sapiens
cctggagttcacgactctgagtgctgacaatacaatggtgggtgaagagaagatgtctctaagaaaccggctgtc

SEQ ID NO: 303811 - DNA, 74 bp, Homo sapiens
cccgtgccgcgagcgcggcctgcaggaggtcgccatgggctactcacactccttggtgatagcaagagatgaaa

SEQ ID NO: 303812 - DNA, 100 bp, Homo sapiens
ttaaattccatgacaagggcaaatttgagaagattgctcagcgattacggacaaagcttaattggcttagtgtcgacttcaataattggaaagactggga

SEQ ID NO: 303813 - DNA, 75 bp, Homo sapiens
cactccgacgtgtgctccgcccagggggtgcgaggataccccacgctttatcctgtggataaacgcagagtgaac

SEQ ID NO: 303814 - DNA, 75 bp, Homo sapiens
cacaaatctggaacgggtggccgattactgcgagaacaactacatacaggcccaaacctgcaccactgactgctg

SEQ ID NO: 303815 - DNA, 83 bp, Homo sapiens
gtgcctgctatcgccgagttctacaacacgatatcagttttagagaatgtggcgtggagaaattctcaaggaaagagtaaaat

SEQ ID NO: 303816 - DNA, 100 bp, Homo sapiens
gagccacgtcacgccaacaacaggggtaccaacaatgtcacttcacacgcctccatctccaagcaggctttcttgatcatggatggtgaagatataccag

SEQ ID NO: 303817 - DNA, 100 bp, Homo sapiens
cgaaggtctcccagatggtctaaggcattgaacctggccacatcccaggtaccgtgaacatccccttcacagacttcctgagccaggaggggctggagaa

SEQ ID NO: 303818 - DNA, 96 bp, Homo sapiens
ttcgaagctgagtatgtgacagacgactgcaagaacattgccaacatcatgaagacactcgcctatcgaggcttcatcttcaagcagacatcgaag

SEQ ID NO: 303819 - DNA, 82 bp, Homo sapiens
ctcacatacgactcttactctcctgataccttcctggagatgggggatatgagactttctactcggaatatcctgagtgttg

SEQ ID NO: 303820 - DNA, 100 bp, Homo sapiens
ttctgggggcggctcctcataccaaggcaaacaaggcagcagaacaaggacggccccctgagcacaccagcaagttttatgcgaagggagcactacagta

SEQ ID NO: 303821 - DNA, 75 bp, Homo sapiens
tgaaaaggaaaaggagagtattgccagagcaagagctggatctcgtctttcttgctgtccccggcataggtccat

SEQ ID NO: 303822 - DNA, 116 bp, Homo sapiens
cggggaccccagcggacagcgaggcgggcctcctggaggcagcacgggcgaccccccggcgcagcagcatcatcaagaggttgaaggctgcattgactcaccaccctgctgccatg

SEQ ID NO: 303823 - DNA, 75 bp, Homo sapiens
gcggcccgaatgccagcgcctcttctaccggggcaagcagagttgacgggcgccgacctgaaggactgcgtcagc

SEQ ID NO: 303824 - DNA, 82 bp, Homo sapiens
aggatatcgacgtcgtgatccagaagtccagagctgaggactgcctgtttgcagcttatgttcctgaggaagaattgaaggc

SEQ ID NO: 303825 - DNA, 83 bp, Homo sapiens
tgcagctctactccaaggagagggtgtgtgaagtggaattcgtcttctctgagggctccgaggcatctggacggagagtggat

SEQ ID NO: 303826 - DNA, 98 bp, Homo sapiens
gaggaggctgcgagcgagccgcgaaccgagcgggcggcgggcgcgcgcaccatgggggagaaacccgggaccagaccgagaaggacatcctgctgcga

SEQ ID NO: 303827 - DNA, 82 bp, Homo sapiens
ctggggtagcggcggcgggagtcctggcgctctgcaggtgtggacactgccagcggctgcagccgacttggaatgacctggg

SEQ ID NO: 303828 - DNA, 100 bp, Homo sapiens
agcagcgactttggggcccgtcaccctcagacaggccgacggtcgcaaggtcctacggtcaagcatccgggagtttctatgcagcgaagccatgttccac

SEQ ID NO: 303829 - DNA, 83 bp, Homo sapiens
ggagctgcccggctcggcagcgggaagacacgatgaggcgagtggtacgacagagcaagtttcggcatgtatttgggcaagcg

SEQ ID NO: 303830 - DNA, 100 bp, Homo sapiens
cctatagcagattttacgccaaaccactggctgccttggtgacatacaaaggaagggagagatgggggtctcgctatgttgatgaggctggtctcgagct

SEQ ID NO: 303831 - DNA, 90 bp, Homo sapiens
tcatctcagttttgatcccctggcatcatttattctccgtactgatcactacatcatgggacacggccaacacggtgaaggaaaagttcg

SEQ ID NO: 303832 - DNA, 90 bp, Homo sapiens
gagggcactggcctagttcccgacttgtttctcaggtggagccgccaccaaaatgcagattttcgtgaaaacccttacggggaagaccat

SEQ ID NO: 303833 - DNA, 82 bp, Homo sapiens
cttgcggagttccgcgtccgaggtgtgaaggccctgtttgtgctcttcgtcctggcctacatccacatcgtcttctcccgct

SEQ ID NO: 303834 - DNA, 82 bp, Homo sapiens
tcaatattaatctctacaactgggaaaggagcagattctggccagatttctgaagaaacatggaattttctgcagtctattt

SEQ ID NO: 303835 - DNA, 82 bp, Homo sapiens
tggcggccggcttggagaggccgagggtttgatgaaggtggaggcagcgcggctctcaggtgccgccgccggacgggacttt

SEQ ID NO: 303836 - DNA, 75 bp, Homo sapiens
ttttccagccagcgtgtgcttacttcatgtctctgggtcacattttggaaacaatgtgatgagaaccattcatgg

SEQ ID NO: 303837 - DNA, 90 bp, Homo sapiens
cgccaagcccgaatctccgtgaactcaggacttggaccctctgtggaacacccgagtacctagcccccgaagtcattcagagcaagggcc

SEQ ID NO: 303838 - DNA, 101 bp, Homo sapiens
ggaagggggaccatcctctgcaggtaattccactgcttcaagctggtcctatagtacccctcctcaggaatgtctccccagtgcaaggacaaagactgaag

SEQ ID NO: 303839 - DNA, 75 bp, Homo sapiens
aggatgtcacatctctagattggaatttaccttagagcagttctccctagcagtgaagagctgtcctgaccaaga

SEQ ID NO: 303840 - DNA, 74 bp, Homo sapiens
cgcctaccccaaactcatggaaattgatcaggtgtcttctctttagggatggtgaggttggaaaaaggctcctg

SEQ ID NO: 303841 - DNA, 101 bp, Homo sapiens
aatgttctcgatgccaatctctgcttgaaaggagaagacttggattctcaggaaggagatgattcactacttataactgtggtacctgtcaaatcatataa

SEQ ID NO: 303842 - DNA, 90 bp, Homo sapiens
ctgggacagcgttctgtcatctcagcaaagaatgggaatgactctactaatgatggggtcagcagatgctcttccagaagaaccctcagc

SEQ ID NO: 303843 - DNA, 101 bp, Homo sapiens
ggaaaacggagagactggggagaaatgccttcaattaagttgcagagttctgatggagagatatttgaagttgatgtggaaattgccaaacaatctgtgac

SEQ ID NO: 303844 - DNA, 88 bp, Homo sapiens
ggtcaaggatattgtcatcaatgaggccatttacatgagtcttcctaatattctcaccgatgatcgatttaaagttatgtttgagaac

SEQ ID NO: 303845 - DNA, 74 bp, Homo sapiens
cctcagttggaagcagccgatccagcctgcggagcctgtggggcagaaaaatgtctcaaattgggtataacaaa

SEQ ID NO: 303846 - DNA, 83 bp, Homo sapiens
ctgacctctctgatgagatggatcgatcatggaagggaagtggttgctgtgtatgttactggtgcttggaactgctattgttg

SEQ ID NO: 303847 - DNA, 100 bp, Homo sapiens
caacagtaccaaacacgattgttgtttcttggactgcagaaattggaagagaggattctctatgggaggatgcatggcaatacatttagcatatagaaat

SEQ ID NO: 303848 - DNA, 96 bp, Homo sapiens
ccggatcaggagccgccgccgccatatcaggttgtcacatccattggtgagctggttgaagtgtgttccacgcagatccagtcgggatggagaccc

SEQ ID NO: 303849 - DNA, 74 bp, Homo sapiens
gaagatggcgggacggctgccggcctgtgtggtggactgtggcacggggagctcgaggccatgagcagatatac

SEQ ID NO: 303850 - DNA, 100 bp, Homo sapiens
agatgataaagatgatgatatccttctcaaccttgtgggatgtgaaaactctgttactgaagataaacttctgcactggaggggcctctcctcccctcgt

SEQ ID NO: 303851 - DNA, 96 bp, Homo sapiens
gcgactggcccagtatccaggtcgaggttctgcagaaggttgtgactttagtatacagcattatattgtacttctagcaagtgcaccaacagaaaa

SEQ ID NO: 303852 - DNA, 49 bp, Homo sapiens
ttaaagctggtctgttctaactgaggggacggtattcagaattcgagcg

SEQ ID NO: 303853 - DNA, 100 bp, Homo sapiens
cgcagtggtcgcttcttctccttggttgaggaacaggttagcaccactgagagagtgtttcaggatagacaatatcagattgatgctgctatcgtcagaa

SEQ ID NO: 303854 - DNA, 89 bp, Homo sapiens
ggcaaccccctgccacctcagatatttaatggcgaccgatactgtggagttgaactcccaccacctgatcttggaccaagttctgcact

SEQ ID NO: 303855 - DNA, 100 bp, Homo sapiens
gctgcaaccacagtcactgttgtgctctttgttggattgggcttcattgtggtgaactgtcacccctacaactcagcttgcaaccagccctggccaccag

SEQ ID NO: 303856 - DNA, 100 bp, Homo sapiens
gccttgctatacatcctgacaaaattaggattgcaactggacagatagctggcgtggataaagatggaaggagaaagtggctcatgccaaagaagaaaac

SEQ ID NO: 303857 - DNA, 98 bp, Homo sapiens
ctggctggagcagctgggcccttgggcatctctttacagggaaaggtttttatctgaacgagtaaatggaaggccatgttttatggatgagtatgaga

SEQ ID NO: 303858 - DNA, 50 bp, Homo sapiens
tgcagcacttccactctgagagcaaatctccggcctgtgaaactgtgagg

SEQ ID NO: 303859 - DNA, 88 bp, Homo sapiens
cgagcctgagcgcggcggcggcccacgcgcagcgacagggagagcccatgaaacccctgaaggccaccgccaccacctcccagcccgt

SEQ ID NO: 303860 - DNA, 100 bp, Homo sapiens
cctgaagttgcctcttctggtgtcaaagcttttggacattcctgggggccacccgttcatcgtgcagttcaatgatggaaatgccgccgtggtgtccatg

SEQ ID NO: 303861 - DNA, 101 bp, Homo sapiens
ctctttcctttaccaaccagactggcggttcatggagagcaaggagaaggatcgccaggtgctggaggacttcccaacgtcacattaactttgctctagaa

SEQ ID NO: 303862 - DNA, 75 bp, Homo sapiens
gggacagcacctcatcccctggatgggggaccacaagatcctcatcgacaggacttgggaccctggaggactgac

SEQ ID NO: 303863 - DNA, 75 bp, Homo sapiens
gcacttagtgcccacaaccgcaccaagaagcacgacctgctgaggacaatcctgagaagacagctgcatcagaac

SEQ ID NO: 303864 - DNA, 100 bp, Homo sapiens
tacatcactgtcgtctcatgggagaaagacactgtttcacttgtctcagagcaggttgttgccctggatgcccaaaatattgtagctgtttcatgtggag

SEQ ID NO: 303865 - DNA, 123 bp, Homo sapiens
ctggaatataacgaggaactggagaagctgtgtgaggaactgcaggccaccttggatgggttgactatctgttatagtccctgggtcaagacaacaatttttataccttcgtcgtggttcaga

SEQ ID NO: 303866 - DNA, 98 bp, Homo sapiens
taaaggcgggactgccacgtccaagcaaaccgggaaaggagaggatcccggagccggatccaacctggagaatgaagtctgtgaggattttagtgcaa

SEQ ID NO: 303867 - DNA, 100 bp, Homo sapiens
acagctcctctgacagagttacttcactctaggaatgaaggtgtggttttatgtgctgaaagagttggccagatgactaagacatataatgacatagatg

SEQ ID NO: 303868 - DNA, 82 bp, Homo sapiens
tcggtattccccttcctgctagtcctggtggatctgcagtacgaagaattaaacaaccaccatgtcgagcaaaaaggcaaag

SEQ ID NO: 303869 - DNA, 113 bp, Homo sapiens
ctttagtgtgttacatatgcaaaattacaaaaatgtcatcagctaatgtctacctcgaatcaaaggtcactgaactgatgcaggagcagtcatacctgaagtctgaattgggc

SEQ ID NO: 303870 - DNA, 101 bp, Homo sapiens
cgccaagatgatgtgcggggcgccctccgccacgcagccggccaccgccgagacccagcacatcgccgaccagctatatgttctcctttcagccaagacct

SEQ ID NO: 303871 - DNA, 97 bp, Homo sapiens
tgctggacattcctgagaggagccagaggacctgggatccagttggaggacggcggtgatggcagggaggatgccccgttgagaatggagtggtacc

SEQ ID NO: 303872 - DNA, 75 bp, Homo sapiens
cttttttcaggcagaaaacaagtctcgtctggacgggctggtgaattaccagatctctgtcaagggcagtaacct

SEQ ID NO: 303873 - DNA, 74 bp, Homo sapiens
cgctactctctctttctggcctggaggctatccagcattggcggcagtaagcacacaatgaatgatcacctgca

SEQ ID NO: 303874 - DNA, 100 bp, Homo sapiens
gtctttgactggaacatgctgaaattcgggaacgcccttttgcttgtgactggcagggctgcgacaagaagttcgcccgctccgacgagctggcccgcca

SEQ ID NO: 303875 - DNA, 137 bp, Homo sapiens
agtggttcctggatgttcctggatgcctgacatcacattgatacatgctggaggtctggctcaggatgacgtagctttgccaaagacttagaagctaagcagaaaatgagcttaacatcctggtttttggtgagcag

SEQ ID NO: 303876 - DNA, 108 bp, Homo sapiens
agtatagaagcatgcgctgtcccaaatccgctgttactatgagaaatgaagagctgcttttaagcatttatgacattaacagagaacaggactatgtcaagaattctg

SEQ ID NO: 303877 - DNA, 98 bp, Homo sapiens
aagaatgagtataaaggatgggttttaactacagacccagtctctgccaagtggtgttcccactgatgaagagcaggcgactgggttggagagggaga

SEQ ID NO: 303878 - DNA, 83 bp, Homo sapiens
acatggacgtctggggcaaagggaccacggtcaccgtctcctcagtatcctagaaggaaaacatcaccatggctacagaaatt

SEQ ID NO: 303879 - DNA, 96 bp, Homo sapiens
cttcccggacgctgggaaatggaatatatgcagaacatgtcctgcggcccaagaatcttggacttgcacatcagaggcaacagcaactacaatttt

SEQ ID NO: 303880 - DNA, 83 bp, Homo sapiens
cgagcatggcatggccccgcaggtcttcacccaggccctggagtgcatgcgcagcattgccatttttgaaaaatacagtaatt

SEQ ID NO: 303881 - DNA, 89 bp, Homo sapiens
cccgccgcagggcgctgacggtcccgcacgtctgccgctgccaccggcgcgcccgagatacttttgtggaactctatgggaacaatgca

SEQ ID NO: 303882 - DNA, 75 bp, Homo sapiens
tgaacttcacaagttcctcatctgggacactgctggtcaggaacgggtccaagacaagctgctgctatctgcgtg

SEQ ID NO: 303883 - DNA, 96 bp, Homo sapiens
gcgccgccagccagagggccgagagccgcggggagaaggccatcacccaggtcagcaagggcacctgcgagcaagcgcgcagggaccatgtcggcg

SEQ ID NO: 303884 - DNA, 75 bp, Homo sapiens
ggaaaaaatcccaaggtctgcaaagactcctgggagagttggctctcaaggttctgatttagattcatcagcaac

SEQ ID NO: 303885 - DNA, 98 bp, Homo sapiens
ccaccaggcatctcaagccagcacttcacctaccaggacctggtgttttctgcttcccccgatgccactatcaggatttggtcggtccccaatgcctc

SEQ ID NO: 303886 - DNA, 75 bp, Homo sapiens
ctggggccggctctttgggatctccctgtcctacctcacgggggcggcggtcaagagcacctcacagctgctgag

SEQ ID NO: 303887 - DNA, 50 bp, Homo sapiens
gagaggagagcggtgcggaggactgagaacccagcgggtgccgcttctcc

SEQ ID NO: 303888 - DNA, 74 bp, Homo sapiens
agaaagcaggcgaacccgcggcgcaataacgtgcctgatttgagatggggtcccaggtctcggtggaatcggga

SEQ ID NO: 303889 - DNA, 102 bp, Homo sapiens
attcaaaccctagtgaataaagccaagagagaccttggagtaattcgtcgacagattccagttcttcagacaaacaatggtccaagtctaacaggattgact

SEQ ID NO: 303890 - DNA, 75 bp, Homo sapiens
agtgactggggatagtgaaggtgctacggtgcagggccttctccagaagcaaaaggagttggaaagtagtctcct

SEQ ID NO: 303891 - DNA, 50 bp, Homo sapiens
gcatgactcatccccgggagtgttgacccgtgatgctgatgagcgagaga

SEQ ID NO: 303892 - DNA, 82 bp, Homo sapiens
ggaaaaccagttattgaatatcaagaggaggagttgttgtgtcagcaaagaagccttaaacagtaaaaatcctcaactccat

SEQ ID NO: 303893 - DNA, 100 bp, Homo sapiens
atgtactcagcccacatgcccgctcacctgcgctgtgatgcctgcagagctgtggcttaccagagtgtcaatccatatctacaaggacagagactggata

SEQ ID NO: 303894 - DNA, 88 bp, Homo sapiens
ctcctgcctcagcctcccgggtagctgggactacaggtcatggaatatcagcctggaggggacttgctgtcacttttgaatagatatg

SEQ ID NO: 303895 - DNA, 50 bp, Homo sapiens
agaatccgaagatcagaaacggtgtcagcagttgagtctttggagggccc

SEQ ID NO: 303896 - DNA, 83 bp, Homo sapiens
gcagcaccgaggccagcaagacgctgcccgccatcgagccaaggccacctttgatgccatttctaagacctacagctacctga

SEQ ID NO: 303897 - DNA, 101 bp, Homo sapiens
gccgcctcggccgaccagggacctgcccgcctgcggctgctccgggagtggacgcttctcttgtgagccagctggaggtcttacctctttgactgaaccac

SEQ ID NO: 303898 - DNA, 75 bp, Homo sapiens
aagggggaccaggagagcaagaaggccgacaccaaggcccagacagagtgtcaatccatatctacaaggacagag

SEQ ID NO: 303899 - DNA, 100 bp, Homo sapiens
aaaaagaactctgaaatgaaattgaggatttgaacttcacacagctgtttgaagttgctgcagcaactggtcacacagtagtgttggtagaccagacaga

SEQ ID NO: 303900 - DNA, 73 bp, Homo sapiens
cagagaaacactctcaacattgacaaattgaaaatagaaactgctcagatttcaggtatgctgctgaaagtgg

SEQ ID NO: 303901 - DNA, 100 bp, Homo sapiens
ctgtaaagggtatctgatcaagccaacaacagtgacggaatgcctccatacatttcctacaacagcagccagtacccctgatgccgttgacaagtatctc

SEQ ID NO: 303902 - DNA, 82 bp, Homo sapiens
agagctctccgggttccccggctcgcggggcccggcgaagggcagggcgaccattgacgaggtggagacggacgtggtggag

SEQ ID NO: 303903 - DNA, 100 bp, Homo sapiens
aagttccctgatgatcagactcagaaaattttggaaagagaagatgctcggctgatgaaataaactatcaatcttgcccagactggagaaaggactgcag

SEQ ID NO: 303904 - DNA, 75 bp, Homo sapiens
cctttccgccactgcccaaactgctgaagcagctcccgcgaggaccacccgagttgtggaaagtaaaaatgtagc

SEQ ID NO: 303905 - DNA, 98 bp, Homo sapiens
ggtgcccttcgacggcctggctgatccgggtcctgtgcttggattgtggggaacagactccccggggggtgctgcaagagcgtttccaagtcctgaac

SEQ ID NO: 303906 - DNA, 77 bp, Homo sapiens
cagcacctagatgacgtaactctcatcttttgcctggaccttgcatattttgggctggagtgcagtggtgcaatctc

SEQ ID NO: 303907 - DNA, 76 bp, Homo sapiens
tgaaaactgaacccacagaagattctggtccctgagtgccagaggtggtggtgttgcttatcttctggaaccccat

SEQ ID NO: 303908 - DNA, 83 bp, Homo sapiens
cggacagtatgaggcaagcgcagggggacggggaccagcagctgtcgccgccgctctcagggaccatggctaaacctcctgga

SEQ ID NO: 303909 - DNA, 99 bp, Homo sapiens
aggcatggaacccgagaccacagccaccactattctagcatccgtgaaggagcaggttttcctttggaatatggataaatacaccatgatacggaaact

SEQ ID NO: 303910 - DNA, 100 bp, Homo sapiens
gttcgccgggtgtgaggcttcacagcggtccggtgaccaagtcgagattttaggtgatgggcaagtcagaaagtcagatggatataactgatatcaacac

SEQ ID NO: 303911 - DNA, 87 bp, Homo sapiens
gactttaaccaccaatgcgctggacttgaattcagtgcttgggaaggttggatggcaagcatgtggtgtttggcaaagtgaaagaag

SEQ ID NO: 303912 - DNA, 76 bp, Homo sapiens
aaccgggaatgcaaactcctaagagatactctgcagagcttcagctggaatgattatggtgacaagctgaacatgg

SEQ ID NO: 303913 - DNA, 100 bp, Homo sapiens
ccccctcccccgacccttttcccctccccgggccacccagcccgcccaactcccagcggagagcaagcattgtttacaataaccaagatatgaaatcaac

SEQ ID NO: 303914 - DNA, 90 bp, Homo sapiens
gcgattcctgtctaagaaaaggaggatttaaatatggctacacacacctttctgcaggagagctgcttcgtgatgaaaggaagaacccag

SEQ ID NO: 303915 - DNA, 100 bp, Homo sapiens
gctgcctcggcggcccggcccggctcgacgccaatggaacatggtccaagacaattcctgggaaagttcagttcttctcaagtgagggttctgacacatc

SEQ ID NO: 303916 - DNA, 74 bp, Homo sapiens
ccgcgcgacgtacccgccgccgccgttggctggagggcgtgatggtgggcatgggtcagaaggattcctatgtg

SEQ ID NO: 303917 - DNA, 100 bp, Homo sapiens
ctcatttttcaatgagagtcagtcagtgagtcattaaggaagctctagaggacaaaatcccagtccttggcacaaactcaggaaatggaagccggagtct

SEQ ID NO: 303918 - DNA, 100 bp, Homo sapiens
ctttgtgttaaccaaagccagcctggcatactttgaagatcgtcatggggtgtgatgaatgcagactctgctaccattttggctgtttggatcctccttt

SEQ ID NO: 303919 - DNA, 75 bp, Homo sapiens
ttattcccttcaattcaagtaacaggtgctgcagaaattggggaaagctgtagaaaccaaagatgaacgatttga

SEQ ID NO: 303920 - DNA, 98 bp, Homo sapiens
ggccctcagcggccgcgaccgagtcatggctgagacctacgggtcatcacactgaaacggtgttcaaccgggttttgccagggcctattgcaccagag

SEQ ID NO: 303921 - DNA, 75 bp, Homo sapiens
gatgaagatgcgacaggctaagctggattatcagatcatcattttctgggtggaagtattcagctaaagactggt

SEQ ID NO: 303922 - DNA, 90 bp, Homo sapiens
cgctcgattggttctactgtgggtctggactgatctccatgtcctgttgtggggcttttacagcctttggctgtggtcgccaggaccccc

SEQ ID NO: 303923 - DNA, 100 bp, Homo sapiens
tccagcgctcctgatctccgtgtgcagtacctccgccagatccacgccaaccacgaggaaagaccacagcaagattctttcattcgtctcctcctagcct

SEQ ID NO: 303924 - DNA, 100 bp, Homo sapiens
ccgccccgggggtccgcggccggcaggaccatgctgctgaaagagtaccggatctgcatgccgctcaccgtagacgagaaacctgctcctccaaagccag

SEQ ID NO: 303925 - DNA, 83 bp, Homo sapiens
cttagctgtgctcgcgctactctctctttctggcctggaggctatccagcgcagttccagggccacacagatggggccagctg

SEQ ID NO: 303926 - DNA, 97 bp, Homo sapiens
cagtttaggaggaagatgcaagcggtttgggaccttgaacaaggcaaatatggttttggttttgggatttgagattgacgcggtgaactctgtccag

SEQ ID NO: 303927 - DNA, 83 bp, Homo sapiens
cttgggaacctagctgatgataggggggttccatctcccaacttgtccattgagacggtttaagcggaagcatcttactgcca

SEQ ID NO: 303928 - DNA, 82 bp, Homo sapiens
caaaaccccaaatcttcgaatgtcagagaagaaatgttgttcctgggtggagctacccatgaacagcagcaatggcaatgat

SEQ ID NO: 303929 - DNA, 75 bp, Homo sapiens
tcctcccttcgctcgcaccatgcccgtggaccgggagcccgtggaccgggagccggtggtgtgccaccccgacct

SEQ ID NO: 303930 - DNA, 90 bp, Homo sapiens
gctttattgaacaccagcaagaatggcatatcaggattacagagttagtcacattgacttatttactgaaccagaagggttaggaatcct

SEQ ID NO: 303931 - DNA, 74 bp, Homo sapiens
ggtatttggccaaggaaccaggctgactatcaacccaagaaccagcacctatgacagaagatctgctagaagag

SEQ ID NO: 303932 - DNA, 75 bp, Homo sapiens
ggactgaagggggatcatctagaagaaacagtatctcacctccctaaactggttaatagtggcatggaagatcca

SEQ ID NO: 303933 - DNA, 116 bp, Homo sapiens
atctggttactgctgtgtggctgcactcactctacgtggagttgggccctgcaggaaggacggacttcaggggcaggaatcagagatcattgatttcttcctgggggcctctctca

SEQ ID NO: 303934 - DNA, 51 bp, Homo sapiens
taagactacagttatttgaacaggtcttgtgataatggtcactgtatgctg

SEQ ID NO: 303935 - DNA, 100 bp, Homo sapiens
ccgtggagaacctcaagaacatcttctcagataagaccatcatcatgtggaaactgaccagggatgagaccaactatggaattccacagcgtgctctgcg

SEQ ID NO: 303936 - DNA, 101 bp, Homo sapiens
gcaccaacaatgtctcagcctttcagccttaccaagcaacaagtgaaattgaggtcacaccttcagtccttcgagcaaaattaaacaaccaccatgtcgag

SEQ ID NO: 303937 - DNA, 98 bp, Homo sapiens
caggcccgccgcctccctgccaagtactatactggcaattgctggagaagattttgcaattgttgcttctgatactcgattgagtgaagggttttcaa

SEQ ID NO: 303938 - DNA, 101 bp, Homo sapiens
gccgcgaccgcccgctcgtactgctgctgcacctgctgcaacttgggccccttttcagaaaatgtcttctgaggctgatctggtgtctcacatctgtaatc

SEQ ID NO: 303939 - DNA, 100 bp, Homo sapiens
tcaccattaacaggattttcaaagggtgggctgaaaaacagcaaacatgaatgcaccctgtcttcacaagaatatgttcatgaattacgatcgggtatat

SEQ ID NO: 303940 - DNA, 78 bp, Homo sapiens
acgatcttcgaggagagacacctcaagtacatctcacagctgggcaagatgctcagtgacctccaggagtctgtggcc

SEQ ID NO: 303941 - DNA, 75 bp, Homo sapiens
gctttgatatgattgaagaagcatacatgacaaaatgtggccacagcttttgatgccagaggaacaagcattctg

SEQ ID NO: 303942 - DNA, 83 bp, Homo sapiens
ctttgccgatccgccgcccgtccacacccgccgccaggtgctgccttcacctgcctggagactgccttccgcctggacgccct

SEQ ID NO: 303943 - DNA, 75 bp, Homo sapiens
ccagatgaccaggatgatagacctactggagcaaggtgtccctgccttcactgtgctccaacctgaaggtcccct

SEQ ID NO: 303944 - DNA, 82 bp, Homo sapiens
cgacgcaagactgtcccggcccggtgtactaatggtcacttgatgtgcgctggctgttttatccacctactagcagatgccc

SEQ ID NO: 303945 - DNA, 75 bp, Homo sapiens
cgccggcctcctcagtgcgaagaagctgcagccgcacctggccaagggaaacagagcaaatgcagcgttacaatc

SEQ ID NO: 303946 - DNA, 100 bp, Homo sapiens
tgggagcttctcagccattttccacagatcagggctgaaatctctttaatgatggagggaagcaggcagacgcgagtgtctcggccatacaagatcagcg

SEQ ID NO: 303947 - DNA, 100 bp, Homo sapiens
gtttgacccagttcctgtcaagcaagaggccatggaccctgtctcagtgctggagaatgctggaggagaccttaaggatggccaccaccactatgaagga

SEQ ID NO: 303948 - DNA, 100 bp, Homo sapiens
attgatgaagctgaagaaggtgtaaaggtttgtccgatatgtgcctcgatgccctggggagaccccaactaccgcagcgccaacttcagagagcacatcc

SEQ ID NO: 303949 - DNA, 99 bp, Homo sapiens
gaaaggcaaaggcaaaggcggctcgggagattcagccgtgaagcaagtgcagatagatggccttgtatcagcagatgttgcacacaaacttggtatacc

SEQ ID NO: 303950 - DNA, 100 bp, Homo sapiens
tgggagttcagcttttagagcaggtgtatgatcttttggaggaggaggatgaatttgatagagagggcatttttggtcgaagagagctgaagtaatgaga

SEQ ID NO: 303951 - DNA, 83 bp, Homo sapiens
ctgaagacgtctgcgtgagaatagagaccaccgaggagcaggccgggctctcgccatgggtcactgtcgcctctgccacggga

SEQ ID NO: 303952 - DNA, 51 bp, Homo sapiens
gtcggagacacggtggaaacgcttatgagactgggtgtgttgctgtattgc

SEQ ID NO: 303953 - DNA, 100 bp, Homo sapiens
ggctgcggggcccacctctctaagcctatggaaaagcttctggatgacgaagatgatcctgcagaagctgaaaaggagggaaatgaaatggagggtgagg

SEQ ID NO: 303954 - DNA, 138 bp, Homo sapiens
gctaatagaaaatgcagatgatttgcagtgaccattttgttgcagttgactcacgattatagtcatagggccatgctatgatagtggaagcttatccaaaataatagatccagaagaagtgacctgaagtttctgtgc

SEQ ID NO: 303955 - DNA, 123 bp, Homo sapiens
catggcgtacgcctatctcttcaagtacatcataatcggcgacacagttgctgtctctgctggccttcatctgtgaagaagttgtatcacaatgtactttatgtggaggactttatttttttg

SEQ ID NO: 303956 - DNA, 100 bp, Homo sapiens
tgctatctgtctagattgtttacgaaataatgggcaatcaggggacaatgtagtaaagccaaacatcatgtcaatggcaacagaacagtcgaacctttcc

SEQ ID NO: 303957 - DNA, 50 bp, Homo sapiens
gtgatgatgaccgtcaccaactggttcaaagcctggagaaagttcttgtg

SEQ ID NO: 303958 - DNA, 75 bp, Homo sapiens
ttcctcccttcgctcgcaccatgcagaaaggacccaggagcgataacagtaaatcaaataagatatttgtcggtg

SEQ ID NO: 303959 - DNA, 82 bp, Homo sapiens
cttcagcagaaatggaaaaaggacggtgttcttggtcaactctgagtgttctgccagttctggataatccactgtccaagaa

SEQ ID NO: 303960 - DNA, 88 bp, Homo sapiens
acaaggtgttgatgccgccggacggtgactccccggacagctcaacaccaaagctttcgcgggcacagcggccgcagtcgtgcacgtc

SEQ ID NO: 303961 - DNA, 101 bp, Homo sapiens
cgaggactgcaaagtgcccccaaggcccttagaggctgaaggtgcccagctgcagggcggcagtaatgagacctgtgaccgcatcaagcagtcagcagctg

SEQ ID NO: 303962 - DNA, 100 bp, Homo sapiens
cttatacaaaaaggagaaggaagaagcagatcttcttttggagcagcagagactgattgactttgaagatgtgattgcagaaccagaagggacacacagt

SEQ ID NO: 303963 - DNA, 98 bp, Homo sapiens
cacagagctgcttgcggccaagtacaaggctcaggccacagggtcaccacatacatcgcccacccatggaggcggccggccaatgcccatgccagtgc

SEQ ID NO: 303964 - DNA, 87 bp, Homo sapiens
gacgacaaagatggcggcagggaccagcagttactgggaaggagaagctgatcgtatcctgtgagcaggagattctgcgggttcact

SEQ ID NO: 303965 - DNA, 100 bp, Homo sapiens
tggcatctatgttatcaaccagacattgtatgcaaacctgttccattctttcttcgtggacaacccattccaaaaagaatgcttccaccagaagaactgg

SEQ ID NO: 303966 - DNA, 99 bp, Homo sapiens
cttggagtacggagcctgcagagggtcccacggtggaagcgagagaggagggaaagaccacagcaagattctttcattcgtctcctcctagcctggggg

SEQ ID NO: 303967 - DNA, 98 bp, Homo sapiens
tggaggcaggctgcggcagacggcgacagtggcggcggcgccatggcagggcttgcaggtgacctcaaagcagaagctctgaattcacctctcatctg

SEQ ID NO: 303968 - DNA, 90 bp, Homo sapiens
cacctgcctcctccgcagagcaatggcggtgtctgccgggtccgcgcggacctcgcccagctcagggtgaaagattgtctgctggatatt

SEQ ID NO: 303969 - DNA, 75 bp, Homo sapiens
ctcggactccgcggccggcccggcgcggcccagcgccctcagggaaatcctcattgacgattcaatttgttgaag

SEQ ID NO: 303970 - DNA, 83 bp, Homo sapiens
gctcaaccatgaccaagtgcagaaggcacaaatcctgaagagcccgtgggcgtggactgctcatctgtaaagaaagtggagac

SEQ ID NO: 303971 - DNA, 100 bp, Homo sapiens
ccctggatctgagcaatggaaatttcaggaattaagtcaaccacgttctcataccagcctgaaggaggaggcaaaacagattcagaatctgcagaaagca

SEQ ID NO: 303972 - DNA, 95 bp, Homo sapiens
caccacagtccttctgcagtccctcgtccagccacccccagcaggtagcatctaaaggaactggtttaaatcctaatgccaaagtatggcaagaa

SEQ ID NO: 303973 - DNA, 99 bp, Homo sapiens
ggaattccagcaccgcagcaaccactccagaaactttccctccttcagggtttagatgtagattctctggtcattgagcatatccaagtgaacaaagca

SEQ ID NO: 303974 - DNA, 75 bp, Homo sapiens
gcgctgttttcgtgatcttcagaccccaggttctttgagcctggcagagagcaggtgtgtgatacacgtcgtcag

SEQ ID NO: 303975 - DNA, 100 bp, Homo sapiens
tgggacctgcacaggccggagagagccgtaggcaggaccccgggacaccctggaagccaggaaatgttcaggacctcaaggggctcggctatgagaaggg

SEQ ID NO: 303976 - DNA, 105 bp, Homo sapiens
tcgtcggcttcttggtgccttggttcatccctaagggtcctaaccgggggtcagtttaggggctggtgcaaaggatgagttgcacattgttgaagcagaggcaat

SEQ ID NO: 303977 - DNA, 75 bp, Homo sapiens
gctgacagcgcgcacttcacccgcagttgacctctgtgagtgaaagccttcagagggaagctgctaagaagcagg

SEQ ID NO: 303978 - DNA, 98 bp, Homo sapiens
tgtcctgagatttgaaagtgttatccatgagtttgatccgtaagcctgcccacggcagagattgattgcagcctggcagagtacattgacatgatctg

SEQ ID NO: 303979 - DNA, 88 bp, Homo sapiens
ctcgaccaagagctgaagctgatcggtcagccaatcaaccctcaatgtcgaatctacccagaggaaatgattcagactggcatttcgg

SEQ ID NO: 303980 - DNA, 143 bp, Homo sapiens
gggtattcattcaggagaaggaccctacagatggagggaatgcaggaaagctaagaagaatcacacctcattgcagaaatctcctgcaaagaagctgagccatgcaattagtaaatctttggggtgtgtacccacgagagaac

SEQ ID NO: 303981 - DNA, 100 bp, Homo sapiens
cccgaggcagaggaaccggctcccagggcagcagaatcaactgaggaagtatctagcctccgtccccctcgcctgatccatgaagatggcatcattcgtc

SEQ ID NO: 303982 - DNA, 98 bp, Homo sapiens
ccatctatgaggagaccaaaataaaactaacagtctatgatgtcaaggataagtctcatgacaccatgccttcaattaagttgcagagttctgatgga

SEQ ID NO: 303983 - DNA, 80 bp, Homo sapiens
ggaaaattggtactaatttgtctctgattcagtgtccaagagttcagtttcagggctgtgtgcaggaaacatgaacttat

SEQ ID NO: 303984 - DNA, 100 bp, Homo sapiens
ggaaatacatgttatatgaacagtgttatacaagccttgtttatggccacagagcttaccagaactgggtgaagaagaacggggctgagcactcgctccc

SEQ ID NO: 303985 - DNA, 100 bp, Homo sapiens
tggcaaaggaactaaagaagcctaatgaagacatgtgcttagcagaccaaaaggctccagcaaaccttcaccaatttacatcagttcctattcctcacca

SEQ ID NO: 303986 - DNA, 82 bp, Homo sapiens
atctgagcgtgctgcggacggcgctgcggtacatccaggcttgggcactgtttaaaggaaagttccgagaaggcatcgacaa

SEQ ID NO: 303987 - DNA, 100 bp, Homo sapiens
ctgtgcaacctgaggtggcactgaagagattttgcaagaacgaggctcaaggatgtgagggacacagtattgacagctgaagaaatgatttacgttttcc

SEQ ID NO: 303988 - DNA, 100 bp, Homo sapiens
tcgacgacgcggcaccggcttcgacgccctctgcccgctccagaagcagattccattggccgtgacatccccaaaatgcttgaattatttaaaaatggac

SEQ ID NO: 303989 - DNA, 131 bp, Homo sapiens
gctgctcggcttccagctcaatcctgccggttgcgccttcttcctggacatgaccaactgtgcatgagcagccgagcctgctaaccgcagctccgcacttgtccatccccctgcggctacaccatgtccag

SEQ ID NO: 303990 - DNA, 50 bp, Homo sapiens
gcgggggaaggcctccatcgagatagatcaatggcattgcactggacaac

SEQ ID NO: 303991 - DNA, 74 bp, Homo sapiens
gatattgtcatcaatgaggccatttacatgctatccagtcagttcgctgctattcccatgggtcacaggagaca

SEQ ID NO: 303992 - DNA, 75 bp, Homo sapiens
gtcttcaagaacatatgagtattcacacagcgtccagaggaccagaggttaatttattctgggaagctgttgttg

SEQ ID NO: 303993 - DNA, 129 bp, Homo sapiens
ctcgggctcttcatggccgtcatgccgactctcatacaggcgggcgccagtgcatcttctagcaataccaagtttccaggcccgaagagcatcccagactattgggactcctctgccctgccagaccca

SEQ ID NO: 303994 - DNA, 101 bp, Homo sapiens
agaaatgtgtataggataatcagtttagatggctcaaagaattcaaggaagccttctccctatttgataaagatggcgatggcaccatcacaacaaaggaa

SEQ ID NO: 303995 - DNA, 100 bp, Homo sapiens
ggctagaaagatggcccaggctgatcaattttattcccaaatactgcttaagagagtcatccagagctggctacagggctgctaaggaagcaaaaaaggc

SEQ ID NO: 303996 - DNA, 75 bp, Homo sapiens
gaaatacaaatgaaccaagcacacgtgtccgagtaagaagacaagaggtttcttctcctagaaaagaaacttcag

SEQ ID NO: 303997 - DNA, 82 bp, Homo sapiens
ggactggaagatcaaaagagggttattcagcttctcaaggctggaaaagcgaaggaagtttcctacaatgcactagcctcac

SEQ ID NO: 303998 - DNA, 95 bp, Homo sapiens
ccctggcaggcaaccccaaagccgcgcgagcagtgggaggagcaatgagaggcaatcctgctgaccccgcactacatctacccaccagccatcgt

SEQ ID NO: 303999 - DNA, 75 bp, Homo sapiens
cgctggccatgcactggcaactgcagcccgaggacaagcggctacgccaaattccagcgaaacagctgatgccag

SEQ ID NO: 304000 - DNA, 51 bp, Homo sapiens
gtcactcctggtgaccagcattcaaggcaaagctgggactgccacattggc

SEQ ID NO: 304001 - DNA, 83 bp, Homo sapiens
cgtgcttccccaagtagtccgatggcagcggctgtgccgaggcgcccaactcagaattaaacaaccaccatgtcgagcaaaaa

SEQ ID NO: 304002 - DNA, 83 bp, Homo sapiens
ctgctgcagactggagcctgagagcagtgtaagacgaatggaatgcaagccttttctcaaggtcttaatgagcaacagcaaca

SEQ ID NO: 304003 - DNA, 125 bp, Homo sapiens
ggaaaactaggaatctatgatgctgatggtgatggagattttgatgtggatgatgccaaagttttattaggccataggaaaaggatacagagtagagtttcatgaacctgaaacttggtggaaat

SEQ ID NO: 304004 - DNA, 83 bp, Homo sapiens
gccggaacaagcatgagatcattcgctgcttgaaagcttttatgaacaacaaggattcttacagaagcagagattgatgctca

SEQ ID NO: 304005 - DNA, 120 bp, Homo sapiens
tgacgaagaggaagaccctcctgccaaaaggaaatgcatctttatgtcagaaacacaaagcagcccaaccaaagggttactcctggatggagcacctctgatagcaatccacaaagccag

SEQ ID NO: 304006 - DNA, 100 bp, Homo sapiens
gggatatctttcttcactcctcttcacttcttcagcacgtctgagaatggtggatgtggtggagaaagaagatgtgaatgaagccatcaggctaatggag

SEQ ID NO: 304007 - DNA, 101 bp, Homo sapiens
gaggccgtcggggagacgctgtggtgtgactggggcaggaccatcaggaagactatgaccgtctgaggcctttatcttacccaatgaccgatgtcttcctt

SEQ ID NO: 304008 - DNA, 88 bp, Homo sapiens
cattatttatgtcatcaagaagaatgacgatgagtacccaaaggcaagtggaacagctctaatggggttgaagaaaaggagacttggg

SEQ ID NO: 304009 - DNA, 75 bp, Homo sapiens
aatatattaacttcaaaattcagccactgagatatcaccttccaggcacttctggatccagctgtgtgatagccg

SEQ ID NO: 304010 - DNA, 100 bp, Homo sapiens
gtaagacagccactccacccactgcagtctacaaggaaagcctccatagctgtggaatggtcctcgtccgaagtgagaatgggcagttgttaatgattcc

SEQ ID NO: 304011 - DNA, 88 bp, Homo sapiens
gaaagccagaatggagaaggaactgttggagatgagacccttccggtcttcttttcagggagtactgatggtcggcccacctggcacg

SEQ ID NO: 304012 - DNA, 100 bp, Homo sapiens
ctaaggctgtgttggagcccattcagagcaccagtctagacgtgatgcctgggccacggcaggagctgctctgtgccttctggaagagtgacagcgacag

SEQ ID NO: 304013 - DNA, 100 bp, Homo sapiens
ccccgatgagtactacgcccgctccgaggactacgtggagctggtgcagcggaagcgagtgttgcccccaagtttcctggcagtgtgtgatactgaggag

SEQ ID NO: 304014 - DNA, 100 bp, Homo sapiens
ctggattaatcgaattacagctgctagccaggaacatggactgaagtatccagcgctcattgggaatttagttaaggccacggcatatgcctccaaggac

SEQ ID NO: 304015 - DNA, 73 bp, Homo sapiens
tggaagaagactctcccttcccttcctttgcccaggtggttcagtcaggtggcaaaaacattgaacttgctgt

SEQ ID NO: 304016 - DNA, 75 bp, Homo sapiens
gccgccgcccctcaccagacagatcgctgtcaaaaccctagtacatcgggtgattcttctcggtcaaaccttttt

SEQ ID NO: 304017 - DNA, 101 bp, Homo sapiens
cgggagttacaccgccaccgccaggggcaagctctgtgtgattgattggaagacatcagagaaaccaaagccttttattcaaagtacatttgacaacccac

SEQ ID NO: 304018 - DNA, 50 bp, Homo sapiens
aggacttttctgtcaccagccatttccagcatgattatgatatgagggtg

SEQ ID NO: 304019 - DNA, 100 bp, Homo sapiens
ccctggaggagcagctgctcaagtactcgccggacccggtggtcgtccgcggctccggtcacgtcaccgtcattccaagaatcaagcactacaaagtgat

SEQ ID NO: 304020 - DNA, 100 bp, Homo sapiens
actccaatttgtatgccatatcaggtgaccttggagaaggtgctgggaattacagtgtctggaggcagaggacttgcctgtgacccccgatcaggtttag

SEQ ID NO: 304021 - DNA, 100 bp, Homo sapiens
gacgcgcgcagcccgcccgcccggcgaccagcaaggacacccatcctgtttgaaattttgtcctgaattaacaacaaatgtaaaggccttaaggtggcag

SEQ ID NO: 304022 - DNA, 98 bp, Homo sapiens
tggccactgtggatgttgaccccaagtctccccagtattgccagaaaattggagcctgcccctcggcccataagcccttgttgggaactgagaagtgt

SEQ ID NO: 304023 - DNA, 50 bp, Homo sapiens
tgaaggacagcctcttctcaatgcttgatgattccctgaatcagatccgt

SEQ ID NO: 304024 - DNA, 82 bp, Homo sapiens
tatggctccgatgggctcaaaggtcagtcattggcaccatgaactggaataaaggtggtcctggcactaagcgaggatttgg

SEQ ID NO: 304025 - DNA, 100 bp, Homo sapiens
ctcaggcctccaacatggagtacatgggtcgacaagaagatgctgaggaatacttaggcttcattctaaatggacttcatgaggaaatgttgaacctaaa

SEQ ID NO: 304026 - DNA, 100 bp, Homo sapiens
ggaaaatcgaactatgctcttcacgcggcctcccagccaacatccagctggacattgatggggaccgtgagacggagcgtatctactccctcttcaactt

SEQ ID NO: 304027 - DNA, 75 bp, Homo sapiens
aaaggggaggttacgcagcaaaccatccagaagagtgcctggtgaagaatgtgatgggatcactagcatgtctgc

SEQ ID NO: 304028 - DNA, 82 bp, Homo sapiens
ggaggaggtcggctcagccgggcagtttgaggagctgctgcgcctcaaagccaagtgaaatgacaatggatgctctgttggc

SEQ ID NO: 304029 - DNA, 119 bp, Homo sapiens
ggcgagggcgactacgaccagtgaggcggccgccgcagcccaggcgcgggggcgacgacagaatcaccacgacagcagcatgcatgatggacctcaggagataccccctggacgagcag

SEQ ID NO: 304030 - DNA, 82 bp, Homo sapiens
gtcagtgtgcttgcttggagatcaggacgcaaagggtggagccagccatcctgagacgtccgtacagcccgtactggtggag

SEQ ID NO: 304031 - DNA, 100 bp, Homo sapiens
tcggttacttggacaagcaagtgcctgataccagcgtgcaagagacagaccggatcctggtggagaaggtacagaggtttgaagaaaaggcccaagtgga

SEQ ID NO: 304032 - DNA, 75 bp, Homo sapiens
aaatagtgagaggacgtctgcaaaatgctggttctgtacagagtaatgagatgtgtgacggctgcaaaccaggtg

SEQ ID NO: 304033 - DNA, 100 bp, Homo sapiens
ccggcggcgacagcggaggcagagaggaaggcggttctgagagcttcagagagcgatggaaagcaggcgtagatcccccaccatgtgacgctgggacaga

SEQ ID NO: 304034 - DNA, 50 bp, Homo sapiens
cgagaagtccccgaccgactgctgtttgcagacaaggtcccaaagacagc

SEQ ID NO: 304035 - DNA, 87 bp, Homo sapiens
taaaagacagtcctcgtcagcactgactttcagctatggaatcggtgatgtgtccaatctagatcccaacttctcatttgaaggcac

SEQ ID NO: 304036 - DNA, 75 bp, Homo sapiens
gaagaaacagacattcaacatgattgcatttgaaagccctatgagtttgtctctctggaatggctgcaaaagtgg

SEQ ID NO: 304037 - DNA, 100 bp, Homo sapiens
agtcacaggacaccgaagaaaccatcacgtacacggactctgtgtgggggatgaaccacagtacactccattcagtatttcagaccaatcaaagcaacaa

SEQ ID NO: 304038 - DNA, 100 bp, Homo sapiens
agaaactagagcaaataaccgttttgaaattccccatggctgggggttatggagtgatgggtgacgatggttctattgattatactgttcacgaagcctg

SEQ ID NO: 304039 - DNA, 100 bp, Homo sapiens
gagcttgctccctacgatgagaactggttctacacgcgagctgatcatgacaagatgtttaagatgagtgaaaagatattactcctgtgtgttggagagg

SEQ ID NO: 304040 - DNA, 76 bp, Homo sapiens
ggtccctgaagagggaagacacgcggaaacaggatggttattgcaagttccaacctggaaaggccatcggctttgt

SEQ ID NO: 304041 - DNA, 83 bp, Homo sapiens
aaaccgctgaggcttatttgggaaagaaggaaacccagaagttctgtgaacaagtccatgctgccatcaaggcatttattgca

SEQ ID NO: 304042 - DNA, 82 bp, Homo sapiens
gtgctgctgggcctcagcgctctgctgcagtgagatcccaggaagctgcaaacggggattcagcgtccgatcctttggaaca

SEQ ID NO: 304043 - DNA, 98 bp, Homo sapiens
acaaaggctatgaaaagaagccctattgtaatgcagttctaaagttcctgttgcttcagacaatggatgagcaatcacaaggaatgcaagggccacct

SEQ ID NO: 304044 - DNA, 82 bp, Homo sapiens
ttcacgcacgggatccagagcgccgcgcacttcgtcatgttcttcgcgccctgagctgccatcagtcatgctcttaaacggg

SEQ ID NO: 304045 - DNA, 118 bp, Homo sapiens
cctctccctgaaaaggcaccaggaaaagagagagggagagaagagttcacagcagccacaatggtgcgcatgaatgtcctggcagatgctctcaagagtatcaacaatgccgaaaaga

SEQ ID NO: 304046 - DNA, 89 bp, Homo sapiens
atttgttaaggattccaagtaactcttatttggttcatgtgtgcccagctgcccaaccccgtcctggacagcatcagcatcatcgacac

SEQ ID NO: 304047 - DNA, 74 bp, Homo sapiens
tacacacacctgttgccattatagagctggaattaggcaaatatggacaggaaatggtgttcacactggccctg

SEQ ID NO: 304048 - DNA, 100 bp, Homo sapiens
aagcagactagccagccggctacaattggagtcagagtcccaaagacatgggataccatacttgcagagctccttcagatacataaagaacacattgtag

SEQ ID NO: 304049 - DNA, 82 bp, Homo sapiens
aggaacgaggcaaggagctaaagcagcgtgcgttcagccctggggcccagctgagagccagcctggaggttacccagcagca

SEQ ID NO: 304050 - DNA, 100 bp, Homo sapiens
gccttttatttagtcagtcatccaaatgaagtgtcttggccaatggcttctctaattattgttctgaaacgacacaactcagatgggaagttcatcgccc

SEQ ID NO: 304051 - DNA, 50 bp, Homo sapiens
ctcccgagtatctgggattacagggagggacattgcttgggcctccagac

SEQ ID NO: 304052 - DNA, 90 bp, Homo sapiens
ctttaatcctgaaagccatgcagcggggcgccatgttttggaagtttgacctgcacacaagctcgcacctggacacgctgctggagcggg

SEQ ID NO: 304053 - DNA, 82 bp, Homo sapiens
tgctaggaagcccctatcgccgagctcgttggagcttgaacccattgtcacccctccggccctaaaggacagcaaggtggtg

SEQ ID NO: 304054 - DNA, 100 bp, Homo sapiens
ggacgtcacatgtcattataccttcacccagcatttcatccctcgtcgaaaggattggattggcatctttagacggatcctagaaccagatgacttcctg

SEQ ID NO: 304055 - DNA, 97 bp, Homo sapiens
ctaaaacaggatcagtaaagaaggaaaaagcagtaaagccagaggaagctatgctgggactcatgtatgtctactggactcagctcaacatgttcca

SEQ ID NO: 304056 - DNA, 101 bp, Homo sapiens
ccgggctgtggcaccgagcactcacacaccgtccgcgtccagggataacaacgaacttgatgcaagtgataggtttgccaaggtcagacctctcatcatcc

SEQ ID NO: 304057 - DNA, 100 bp, Homo sapiens
gcttaacgtcccagtggatgactccttggttaaggaggctatgtggttgatgttgcagaatgatgagccggaggacttcgttatagctactggggaggtc

SEQ ID NO: 304058 - DNA, 100 bp, Homo sapiens
ctcagaacaacagccggccagagcttctggacccggagcccggcggcctcctcaccagccaagtcctggcaacagggcccactttgtctatgggattgct

SEQ ID NO: 304059 - DNA, 50 bp, Homo sapiens
gccacatctgaccttggataccatgatgtggtggtacagtgggagctatt

SEQ ID NO: 304060 - DNA, 100 bp, Homo sapiens
ggaaaaaggaaaaagagaaaagaaatgaaccagtattcttaaattgatttcaagtttgaacaagagctgaagttgtaataaacggctcctcatcaccagc

SEQ ID NO: 304061 - DNA, 83 bp, Homo sapiens
ttatcgtgctgaatttgggtgaggaggaaggagaagcaggattattgcatcgagcttttagtgtcttcttattcaacaccgaa

SEQ ID NO: 304062 - DNA, 75 bp, Homo sapiens
ctcagaaatcactaaatactactctgaggggcttagaaattaacaggctaaaccaggtggacaggtgaaatgtca

SEQ ID NO: 304063 - DNA, 75 bp, Homo sapiens
tgcggacctagtggtgtgtgacggggctcctgatggacagagcgggatgccaccagcttgtccaaagggaagttc

SEQ ID NO: 304064 - DNA, 80 bp, Homo sapiens
ctggaaaagaatgatgttgtccttaaacaacctacagaatatcatctataacccgaaactaatggcagatcccggaaatc

SEQ ID NO: 304065 - DNA, 99 bp, Homo sapiens
gaagatcatcattaaggacggaggcacggccttagaaaatttacgtgtatacctgtgtgagaaaatcatagctgagagacattttgatcatctacgtgc

SEQ ID NO: 304066 - DNA, 74 bp, Homo sapiens
caagcacgagggcgcgctcgagacgctcctgaggaacttacaatgtctcagaaaaatggtgggaatgttcttca

SEQ ID NO: 304067 - DNA, 90 bp, Homo sapiens
cggcgccaggccacccggccgtcagcagcatgcaggatggtgatggaatttcctgataatgtgttaaatctcgatggacatcagaataat

SEQ ID NO: 304068 - DNA, 75 bp, Homo sapiens
tagcgctatgcctgcggcggagactgcatcaggctctcggcagacactctggaggagggctctgcctccccgaca

SEQ ID NO: 304069 - DNA, 50 bp, Homo sapiens
gcggccgcgggcgatgccaaaaacgaatacttcagagagtcagagttgtg

SEQ ID NO: 304070 - DNA, 75 bp, Homo sapiens
cagagcgccgtctggagccgagatggagccctggtgggcacggcgtgcaagaattcggttccctcaaaattataa

SEQ ID NO: 304071 - DNA, 75 bp, Homo sapiens
gtgagcctcccgcccaaggagaatgcgctcttcaagcggatcttgttggatgaaaaatctgacaaacagtatgct

SEQ ID NO: 304072 - DNA, 75 bp, Homo sapiens
ggagtcatcggacgccagaatctggtggagccccctgagctgcccgctgatctgcagcactggatctcctacaac

SEQ ID NO: 304073 - DNA, 71 bp, Homo sapiens
acctccacatgcaccacgttcgtgaccgggagatgcctgaagctgaagagacttgctttgacaagtacact

SEQ ID NO: 304074 - DNA, 100 bp, Homo sapiens
agcgggtagcgggctcagctggccggggctcagggaacttatagaaatgctggcaatttcaagaaaccaaaagttgttacaggctggagaggaaaaccag

SEQ ID NO: 304075 - DNA, 100 bp, Homo sapiens
gctacttctcggcgctgccgtctctggaggagtactggcaacagggggatatgagactttctactcggaatatcctgagtgttgcgtggatgtaaaaccc

SEQ ID NO: 304076 - DNA, 89 bp, Homo sapiens
gtctgagctaaacttcaccaaataatagctgtttgtattttggctgctgcaggagccattttaggtcactggcatgcattttgtatgag

SEQ ID NO: 304077 - DNA, 75 bp, Homo sapiens
aagaggaatgttccctgacaatttcgttaaggacaaggagcatccaagatacctgatcccagaactttgcaaaca

SEQ ID NO: 304078 - DNA, 82 bp, Homo sapiens
gaaccccaaataaggaagattgtggatcaaataagaaacccagcttagactagaaagtctagaagacacacacataatgaag

SEQ ID NO: 304079 - DNA, 75 bp, Homo sapiens
ggaggttacgcagcaaaccatccagaagtgtggggctgccttccaggaggatgatgtcatcatgctcaatggcac

SEQ ID NO: 304080 - DNA, 82 bp, Homo sapiens
ctgattggaggtgccctgctgaatatctacacggaaatgggccgacgggtaacaagatgctcaactatagtgctcccagtgc

SEQ ID NO: 304081 - DNA, 100 bp, Homo sapiens
aacatccaggccgtgcttctgcctaagaagaccgagagtcaccacaaggccaagggcaagtgatttgacagccgtcatttcaccaagctgataatgttcg

SEQ ID NO: 304082 - DNA, 100 bp, Homo sapiens
cacacctcacttgttcttttgggcgaagtgctgcattggaagaagtggctgccatttgtcgatgtagtcagccactctctggattcagtgccaggtgcct

SEQ ID NO: 304083 - DNA, 100 bp, Homo sapiens
ccgacctcttccactccgaggaaatcaagctctactgagatgaagaaagaaaaagaatacctgctcagctccagagacacgtaaagggacagagattggg

SEQ ID NO: 304084 - DNA, 82 bp, Homo sapiens
gactcttctgacctccgcgcgacgtacccgccgccgccgttggctggagcaagagtgagccatggagctacgtgtggggaac

SEQ ID NO: 304085 - DNA, 97 bp, Homo sapiens
acagaatttatatagagatgtgatgttggagaactacagaaacctcgtctccctgggtcccagaacagttttcttctgggctccaattatgaaatgg

SEQ ID NO: 304086 - DNA, 99 bp, Homo sapiens
gatcattgaagagaacatccctgagcatggagatatggaccaaaaggaacgagacgtgattatgagggagtttcgttctggctctagcagagttttgat

SEQ ID NO: 304087 - DNA, 134 bp, Homo sapiens
ctgtgacgatgagccagagacctacgtggcagctgtgaaaaaagccatttccgaaggtactccaaagattcaggtttactcacgtcatccagcagagaatggaaagtcaaatttcctgaattgctatgtgtctg

SEQ ID NO: 304088 - DNA, 98 bp, Homo sapiens
cctgaccattttctactgtccctgcgcgaggtggaaaaatgctaatcactgaaagaaaacattttcggtcaggaagaattgcacaaagtatgtctgaa

SEQ ID NO: 304089 - DNA, 100 bp, Homo sapiens
gggaagctcttctggagagtgagagaagcttccagttaaggtgaactccagaaagccattgacttattcacagatgccatcaagctgaatcctcgcttgg

SEQ ID NO: 304090 - DNA, 103 bp, Homo sapiens
caccgacagtgccctgagggccttcgagagctaccgcgccagacagttcaaatctgaacatcaatgatgtactagggaactactcattgactcttgttgatgc

SEQ ID NO: 304091 - DNA, 101 bp, Homo sapiens
gtgtatggaccttcagttccaaagatgatgaatctgaaaggaaatccggaattatcacagagatttgaatttgttgaaatgagcagtcgtaaatcaaagag

SEQ ID NO: 304092 - DNA, 100 bp, Homo sapiens
tcgatctttcaaagatggaaaatttcgtcactgcggacgtcttctttgccataaatgctcgaccaaggagattcctattataaagtttgatctgaacaag

SEQ ID NO: 304093 - DNA, 50 bp, Homo sapiens
tggagtgttctgcacttacacaggtgaaaattagttctgctgtgcttaaa

SEQ ID NO: 304094 - DNA, 76 bp, Homo sapiens
ttaccactgcctggttgcagaagtgccgaaagagcactggactccggaaggtagtttgagctccctaaaagaggaa

SEQ ID NO: 304095 - DNA, 83 bp, Homo sapiens
ctttggacagtctatggatctacattataccaataacgagcaaattcaacacccaacagcttccttaatagcaaaggtagcaa

SEQ ID NO: 304096 - DNA, 98 bp, Homo sapiens
tctgactctgctgggattggctttcgccacctgccccactggaacacccgctgtcctctggcctcccacacggtttcaccctcaacagccaggtgcag

SEQ ID NO: 304097 - DNA, 82 bp, Homo sapiens
tcgctaatgccactgttcttttggattatcacctgaactatttaaagtcgagcaaaagatgtgataataccagcaaagccac

SEQ ID NO: 304098 - DNA, 83 bp, Homo sapiens
ccgggcatggagggcgcgggtgttgtgatcgcagtgggcgagggagtcagcgaccgcaagacaatgcagatcttcgtgaagac

SEQ ID NO: 304099 - DNA, 98 bp, Homo sapiens
tgtaaattacagagaacctaagtctgtttgcaaagcacctgaactggtgacaatatcagtggatgggattcttaccacaacgggctacacgcaagaag

SEQ ID NO: 304100 - DNA, 100 bp, Homo sapiens
ttatcttaagctaagtcggaaggaaagatcttcagcttatagcaaaaggtactatttttctgcctggaaataaagtttctgagcatccctgcaatgaaga

SEQ ID NO: 304101 - DNA, 82 bp, Homo sapiens
tggtatgggaaaattgtttgcagaaggatgaaaaggctttattgccaaacttttgatgatcttatggcggagaaggaagctg

SEQ ID NO: 304102 - DNA, 74 bp, Homo sapiens
agtgtaatgattattgacaacaggtttatccagcatccaaaaaactttggactaattgcatcatacttggagag

SEQ ID NO: 304103 - DNA, 100 bp, Homo sapiens
ctttcccctgccgctcctgccggcagctccaaccatgggaggccgcgtctttctcgtgcacactggtttttggctgttgtttgtttccccggtttggaaa

SEQ ID NO: 304104 - DNA, 90 bp, Homo sapiens
gttcgcagtgacctggggaacctgctcaaagccctgggtcgcttggaagaagccaaggtgcgggccagtgctattgcccaggacgcggac

SEQ ID NO: 304105 - DNA, 100 bp, Homo sapiens
cggacagtgtacgcttcgaggacttcacggagctctggagaaacatgaagttcgggactatcttctgcttcaaaagcagtggactgtcttttggattcaa

SEQ ID NO: 304106 - DNA, 100 bp, Homo sapiens
caccacaaaagcgaaatgggcacaccacaggttcagcttgttggtttagatgaggagagttcagagtttatttgcagaaacacctttgaccacccatacc

SEQ ID NO: 304107 - DNA, 100 bp, Homo sapiens
ttgcagatcgggagcgcaaggtcgccctcaaggccatgatcaaaacgattccttggcagcagagattgagggaacgatgcgcaaggagctgcagttggaa

SEQ ID NO: 304108 - DNA, 100 bp, Homo sapiens
tccgggagcaccggggctccgtcatctgtctggagctgggaggctgtggcgtgctgggtgtcggcatctggctggccgccacacaggggagcttcgccac

SEQ ID NO: 304109 - DNA, 100 bp, Homo sapiens
cgacatggctgcgctggtggagccgctggggctggagcggggggcttccatcgttggcgtgaactgccgctttgggcccgacaccagcttgaagacgatg

SEQ ID NO: 304110 - DNA, 100 bp, Homo sapiens
tcagaatcaagtctcgagtcagattctgaagcaggagctggagttcctacgcgtggccaagaaggagaagctgcgggaggccacggaggccaagcgtaac

SEQ ID NO: 304111 - DNA, 100 bp, Homo sapiens
ccgatccagcctgcggagcctgtggggcagggccatgtttatgagtggactaagtgaaagcaaacaaacccatgtacacctgaggaatgtcgatgctgcc

SEQ ID NO: 304112 - DNA, 100 bp, Homo sapiens
tttatatagagccatggggccttacaacgtggcagtgccttcagatgtatctcatgcccgcttttatgtgaagcaaaaaatttattgccatatcttggac

SEQ ID NO: 304113 - DNA, 75 bp, Homo sapiens
cgggctccgcgcccggccggacccgggcccgagcccgagcgggaagaagttccgcagcaagccgcagctggcgcg

SEQ ID NO: 304114 - DNA, 133 bp, Homo sapiens
aagaagaaacgggccgcgaaccgcagtatcatgctggccaagaagatcatcattaaggacggaggcacggtgattcgcaaggggtggctcaccatcagcaacattggcatcatgaaaggcggctcgaagggat

SEQ ID NO: 304115 - DNA, 90 bp, Homo sapiens
taaagatctggtccctgatgaagaaaaaaatctagctatgtcagatgattgctgaacaacttttgtacgaacactggaaaaagaacaacc

SEQ ID NO: 304116 - DNA, 90 bp, Homo sapiens
cccgaagccccctgcaggaactctacaacccaatccagctagagaccgttggatggcagcttaaccttcagatggctcactctgctcaag

SEQ ID NO: 304117 - DNA, 83 bp, Homo sapiens
cttggatgacctcacagacatggatcctgaagtggcggccctgtattttcccaaaaagctaccggctctctgaccagttccac

SEQ ID NO: 304118 - DNA, 83 bp, Homo sapiens
ccgtcttcgacctcagttacttcatcgtctccatcctctacctcaagtatgagccagaacatccagtcatggataaaaatgag

SEQ ID NO: 304119 - DNA, 135 bp, Homo sapiens
gaactacagaacagcacgtaccagaggtggaagtccaagtcaaacgcagaaggactgcctcactgagcaaccaagaagctcacaatgtctctctgcaccaagctccatgactcaggatttgcctggagttcctgg

SEQ ID NO: 304120 - DNA, 97 bp, Homo sapiens
aaggaattaccttggagaggctgtgagccacaatgcatcgctggaagtagccaacgaagttatacggaagcgtctcctcattgatggagatggtgct

SEQ ID NO: 304121 - DNA, 100 bp, Homo sapiens
ggctagtaaggatgccacctatacttctgcccggaccctgctggctatcctgcgcctttccactgctctgtgttctaagaacggaagcatctgggctgga

SEQ ID NO: 304122 - DNA, 82 bp, Homo sapiens
ctttgaccttctgccatgattgtgaggcctccccagccacgtgaaactattctgaaggaagatttccattaggtaatttgtt

SEQ ID NO: 304123 - DNA, 95 bp, Homo sapiens
cttggaacagggctgcacacctttctgctttatctggacttggatgttgtgggtgatggtatgcagtgtcctccttcacctttgctttttgatcc

SEQ ID NO: 304124 - DNA, 51 bp, Homo sapiens
agacctggagatggacctgtgatctgggcaggcccaatgccgaaacacatt

SEQ ID NO: 304125 - DNA, 100 bp, Homo sapiens
ctactggtcctattggaagccgaggtccttctggacccccagggcctgatggaaacaagggtgaaccaggcggtccaggtgctgatggtgtcccagggaa

SEQ ID NO: 304126 - DNA, 90 bp, Homo sapiens
caggatctcgggctcggaacgagactgcacgcccgcctggccagccgcgtctgtgccgccagcctctgactcgagcattatggggagcca

SEQ ID NO: 304127 - DNA, 75 bp, Homo sapiens
tatgtgggagagcagaggtcaaacctgaaagaccccagttatggatgggagtgccattcaggaattctgagtggg

SEQ ID NO: 304128 - DNA, 83 bp, Homo sapiens
gttaattcgaaagtcttgtggaagatctggaagaaacaggaaaaggggaagatagtgatgtactcagtataaatgcagatgct

SEQ ID NO: 304129 - DNA, 50 bp, Homo sapiens
tgaaatcactgtggcaaccggggtaaaggcatgacttcctggcaccacag

SEQ ID NO: 304130 - DNA, 100 bp, Homo sapiens
ccttaatccacctaacatggagactggtatgagagcaatcacctcacagacttgtaccgaagagatgagaccatccaggtgaaaggaaacggctacgtgc

SEQ ID NO: 304131 - DNA, 75 bp, Homo sapiens
tttgaaaatgatttaattgaatcaagctgcaaagtaactaggctgtgcaacaagttattactaacctgctaattg

SEQ ID NO: 304132 - DNA, 50 bp, Homo sapiens
cacaccagctcatcagatgaacctcagggatttctctatgaatcatcatc

SEQ ID NO: 304133 - DNA, 90 bp, Homo sapiens
ggctgcgagcgagccgcgaaccgagcgggcggcgggcgcgcgcaccatgggggagaaacccgggaccagagacacctatggctgccgatg

SEQ ID NO: 304134 - DNA, 102 bp, Homo sapiens
gcgcggaaggcctcccggcgctcttcctcccggagtatggtgcagattcactttataggaacagcttcagcttcagtgatgaaaaactgaattctccaacag

SEQ ID NO: 304135 - DNA, 90 bp, Homo sapiens
aacgggacagacagtataatggcattagtgccagcagtagttcccaagggctgtctcagccatccacccagacgactcagtatctgagag

SEQ ID NO: 304136 - DNA, 100 bp, Homo sapiens
tctgctgaaggccatcgtgcaggggcaggtgagaagccctaccactgcaactgggacggctgcggctggaagtttgcgcgctcagacgagctcacgcgcc

SEQ ID NO: 304137 - DNA, 101 bp, Homo sapiens
actcatgagagcgcggccggaggacaggaagaaggtagataatgactataatgcccttcgagaaagactcagcaccttgcctgataaattgtcttataata

SEQ ID NO: 304138 - DNA, 74 bp, Homo sapiens
aaaaagtgtgacttggcagctggtgttgggatggccaccaactgggggagcctcttgcaggataaacagcagct

SEQ ID NO: 304139 - DNA, 123 bp, Homo sapiens
tgttatctcacatggctgcacagtgccttgcattgcttctatatttccaattgagagaaaagggtagggctctacttcactgggcctgtgatcgaggacataaggaactagtcacagtgttgc

SEQ ID NO: 304140 - DNA, 98 bp, Homo sapiens
ctaggcgaagatccggactctgggtgttttgctaccgtgaccgtttagaatttgccattttcagtggaaaacaagtggtcgttactagctaagatgtg

SEQ ID NO: 304141 - DNA, 51 bp, Homo sapiens
gctcggggactcccccaaagacaaggagaacttgccgggctggaactacac

SEQ ID NO: 304142 - DNA, 90 bp, Homo sapiens
ctcttcgcgcccctgggagggaggtgggaggctctaggctccaagacgccgtcgcttgagattccacaccaaatcatccatcacaaacaa

SEQ ID NO: 304143 - DNA, 83 bp, Homo sapiens
gattggtctatgaaacatcagttcttgatcctgatgaggcctctcttctgtggaaactctgaagccgaccagttgggcaaaat

SEQ ID NO: 304144 - DNA, 90 bp, Homo sapiens
gtgcgcgccctggcgggtccggaccaagatgatgcagtttgcttggcagagctataagcgttatgcaatggggaaaaacgaactccgtcc

SEQ ID NO: 304145 - DNA, 74 bp, Homo sapiens
ttttggcattgacatttaattttagggtcctttatatagaagggagagtaggaaattctgaaacagccacacct

SEQ ID NO: 304146 - DNA, 75 bp, Homo sapiens
gcaacacctgcggcctcactgggacccccaggaggtgaccctgcagatgtgtatatctcatgattgatatggaga

SEQ ID NO: 304147 - DNA, 121 bp, Homo sapiens
cagaaacagtgctgaagcctttaaatgcagcatctgcgatgtgaggaaaggcacctccaccaggtttctgagtcccttcaacatgatcctgggaggaatcgtggtggtgctggtgttcaca

SEQ ID NO: 304148 - DNA, 100 bp, Homo sapiens
cggagagagaggtggagtccggcccccgaaagagggttcgagaacttgtcttggacaattgcaaatcaaatgatggaaaaattgagggcttaacagctga

SEQ ID NO: 304149 - DNA, 100 bp, Homo sapiens
gacaattgttcagttgcaaaaagaaactggagccaccatcaagctgtctaagtccaaagatttttacccagagacaaagcatggaggacacaagaatggg

SEQ ID NO: 304150 - DNA, 73 bp, Homo sapiens
caagaggcaaaggggaggttacgcagcaaaccatccagaagaaaaactggcagggtgcaagctgaatgtggct

SEQ ID NO: 304151 - DNA, 75 bp, Homo sapiens
agcagcaacagcgacttctcaggcaagcccagactcggcctttccaacagtgtttcctgaggttataggcgggtg

SEQ ID NO: 304152 - DNA, 75 bp, Homo sapiens
gttcttcaggaatggagacacggcttcccccaaggaatatacagtgggcatccccaccatcagatggtgcggggc

SEQ ID NO: 304153 - DNA, 82 bp, Homo sapiens
ttctctcctcgtcatcatccagagcagccagtgtccgggaggcagaagtcggtcctgaccgccagcctgtcgtacatggtgg

SEQ ID NO: 304154 - DNA, 100 bp, Homo sapiens
gacataattactcacaaaccatttgaggttgagggaaaccaccgaaacacaagagtaagaccttttaaggaagaggatcacctagcccgggtagaagagg

SEQ ID NO: 304155 - DNA, 100 bp, Homo sapiens
tggagcgcccccagccctgggtgggggctgtctcggcaccttcacctccctgctgctgctggcgtcgacaggtctgaaggggcgtctcgattacctgagc

SEQ ID NO: 304156 - DNA, 100 bp, Homo sapiens
gcccgtgcacgcctacaaattcttctttaagtccatggaccaggacttcgggtcgcctgcgaggccgctggccaggcctgagcctctgccaccatggcca

SEQ ID NO: 304157 - DNA, 50 bp, Homo sapiens
ctggcaggaacctcggcctcagagctctaagcgaaagacatgaggcctca

SEQ ID NO: 304158 - DNA, 75 bp, Homo sapiens
ccaggtgcccagggctgcttccacgacgtgggtcccctgccagatttgtgatagtagctgtagatccaaaatgac

SEQ ID NO: 304159 - DNA, 141 bp, Homo sapiens
tagcgcgaggctggggagcgctgagccgcgcgtcgtgccctgcgctgcccagactagcgaacaatacaggaaacattggcaaatttggagcgacagatctatgcttttgagggaagctacctggaagacactcagatgtat

SEQ ID NO: 304160 - DNA, 98 bp, Homo sapiens
tcccagctggcagaagcctatgagagtcacttatttcagcaattcaaggtgatattgaagaagctaagaaacgactagagttaccagaacatttgaaa

SEQ ID NO: 304161 - DNA, 98 bp, Homo sapiens
cctggtgcgctccctgcgtttcgggtggggccgcgcaggcaaggacaaggccacagagtcggggtcttcacggctttacaggaagtatggtgctggca

SEQ ID NO: 304162 - DNA, 50 bp, Homo sapiens
tggaggaagtacagccagcactgcagctgataaattctaatgaacccgga

SEQ ID NO: 304163 - DNA, 114 bp, Homo sapiens
cttgaccagaacccccacctggctcaggagctgcggccccaaatccggagagcacatctgcctgatccgcaaggtgaacgagaactggtacgagggacgcatcacgggcacggg

SEQ ID NO: 304164 - DNA, 51 bp, Homo sapiens
gatcagcatgtttataaagctataaaataccatgaggagtttgagaagagc

SEQ ID NO: 304165 - DNA, 75 bp, Homo sapiens
catctgtgacttcccatgaaacttctgatttcttccctaggcctttacgatgtctggagcccggcactgtggtca

SEQ ID NO: 304166 - DNA, 75 bp, Homo sapiens
acaccaggtgcagagatccaagatggcagattcaatctttttaagacgtatgaccttagcagacattgaacggat

SEQ ID NO: 304167 - DNA, 82 bp, Homo sapiens
agccatcaaggtgaccgtggacggaccccgggagcccagacggtgcttcaaggatgaccgcatcgtcttctggacttggatg

SEQ ID NO: 304168 - DNA, 82 bp, Homo sapiens
gcaggactcgggccggagcgtggccggacccccacccgccgaggggcccagggaggacgcgggtgcggggggcaatggcact

SEQ ID NO: 304169 - DNA, 100 bp, Homo sapiens
ggaaaacccagagaaaagtgaaacaattcaggacactatgccagaccagtttgaccaggcggttgtgctgaaccagctgcggtactcagggatgctggag

SEQ ID NO: 304170 - DNA, 75 bp, Homo sapiens
cctggagttcacgactctgagtgctgttcggcagaaggttctggagagaaaaaatcatgagttggtatggcaagg

SEQ ID NO: 304171 - DNA, 90 bp, Homo sapiens
aggagctggcggacatcactttagaccctccacctaattgcaggctcagctggaagctcagaaagccacgcaggacttccagagggccac

SEQ ID NO: 304172 - DNA, 75 bp, Homo sapiens
gcggagctgacggtggaggttcgcggctctaacggggctttctacaagattgccaacactcctgatagctgaatg

SEQ ID NO: 304173 - DNA, 100 bp, Homo sapiens
tctgcttccacgaggctgctgaccagaagaggtttagtgccctcctgagtgactgcgtcaggcatctcaatcatggtcattcaagacacagatatgcact

SEQ ID NO: 304174 - DNA, 100 bp, Homo sapiens
gttggatcgggttctaaaggaaaggctgctggaaagtacagacaacaaggcagaaattatattgttgaagatggagatattatcttcttcaaatttaaca

SEQ ID NO: 304175 - DNA, 100 bp, Homo sapiens
tcctggtgggcgaccttatgcgctcagtgctgctgcttgcctacaagcccatggaaggaaactttgaagagtttgtacaaatgatgacagcaaagtgaag

SEQ ID NO: 304176 - DNA, 76 bp, Homo sapiens
ggaagaaatactaatgcagatggattctcgtctcaccaagtttgtgcagtgggagtctcgggtgactcaatatgaa

SEQ ID NO: 304177 - DNA, 100 bp, Homo sapiens
ggcgttggtctggccggagcccttgggtgaaattgttaggcgtggagagggagtgatgtcttccagactcggtgaagtgccagcattataagaaaaaacg

SEQ ID NO: 304178 - DNA, 75 bp, Homo sapiens
tgtagaagaagggacgccctcacaggacacctcaggacccattctgacaagttggatggcttgaggactggtact

SEQ ID NO: 304179 - DNA, 102 bp, Homo sapiens
tccgcagtgaccggactcgggggagaaatcaagatgactaccagctggttcgaaaattaggccgaggtaaatacagtgaagtatttgaagccatcaacatca

SEQ ID NO: 304180 - DNA, 87 bp, Homo sapiens
gcggacttaccagaatcttgtcattgagaaggatggttcaaatgaaggcaaggagatgagacaccatctacaaataatggaagtgat

SEQ ID NO: 304181 - DNA, 83 bp, Homo sapiens
caatgttaaaaatggtatggatttccaaagctagtgccatacagcggaaaggcaggcaaacctgtatgtgggactggtggtca

SEQ ID NO: 304182 - DNA, 80 bp, Homo sapiens
aggacgaggatgaggaggaggaaggtgaagaggaggacgtgagtggagaggaggaggtcgatgaaacaggtgtagaagtt

SEQ ID NO: 304183 - DNA, 73 bp, Homo sapiens
gcaaattcagaagctggtgaaatatttaaaggtgtgatgaatgcagactctgctaccattttggctgtttgga

SEQ ID NO: 304184 - DNA, 82 bp, Homo sapiens
cttagctgtgctcgcgctactctctctttctggcctggaggctatccagccaggggaaatgctgtctgtagctgagcacttc

SEQ ID NO: 304185 - DNA, 95 bp, Homo sapiens
atgtaccagcctgccctgccacacagtgtgcctgcaacctgtccggggatcccagggaggttgatgccggcccaggatggatcagacctgtgaac

SEQ ID NO: 304186 - DNA, 100 bp, Homo sapiens
ggcctggcagccctgcccgagtggtccagtgcatttcagagctgggcatctttggggtctatgtcagatcccagatgcagtgactggttactacctgaac

SEQ ID NO: 304187 - DNA, 121 bp, Homo sapiens
cgagtctctgcgaacattccttttaacctatgtcttacaaaggcccaagccaaagcacccctacgcagaaaggagtaggcattgctggagctgtgtgtgtttccagcaagttgcgacctcg

SEQ ID NO: 304188 - DNA, 87 bp, Homo sapiens
gacacttgtgtttgaatatgtggtgaccaagaatatggcccaggtgaccaaagccctggacaaggccctgagcaccatggacctgca

SEQ ID NO: 304189 - DNA, 51 bp, Homo sapiens
attttggaaagcagtttttaagacaaatttcctcctctgatgctcctcttc

SEQ ID NO: 304190 - DNA, 82 bp, Homo sapiens
ggatgcctactggaaggacgacgacaaacacgtcatgaggaaggagcagcgcaagtgtactaatggtcacttgatgtgcgct

SEQ ID NO: 304191 - DNA, 82 bp, Homo sapiens
gaccatggctgactacctgctgtacaccctcaacaaacaccagcgctttggatggtcagtaggacagaaggtaacattgatg

SEQ ID NO: 304192 - DNA, 75 bp, Homo sapiens
tatcagcacagagaagcaaagatccaaattcccaggtttgacttggtggcaaatggtggggcctctctaactttg

SEQ ID NO: 304193 - DNA, 98 bp, Homo sapiens
tgcaggtattgggagatccacagctaagactccaggaccctctggaagcctagaaatgctgatcttgcatctttaatggataaaacatttgagagaaa

SEQ ID NO: 304194 - DNA, 98 bp, Homo sapiens
gggctcccaggacctccactaatcaccagaacaaaatgtgcagtgttagatgatgaagatagcaacaacatcacagtaggatccttagttacagtgtt

SEQ ID NO: 304195 - DNA, 100 bp, Homo sapiens
tggaacttgccctgtctcctcgcagatgaggaaccacgtgaatgttgagggggcgacacacaagcaggtggtggacctgattcgagcaggcgagaaggaa

SEQ ID NO: 304196 - DNA, 82 bp, Homo sapiens
aggtgcttctcatgcaaaaggaatcgtgctggaaaaagtattaaaaggagcccaagccccatctcatcctagcacaccctcc

SEQ ID NO: 304197 - DNA, 100 bp, Homo sapiens
cgatctgcacttcgcattttggcattgacatttaattttagggtcctttatatagaagggagagtagtcataccctaatgatcccagcaagataatgtcc

SEQ ID NO: 304198 - DNA, 88 bp, Homo sapiens
ccaagtcccggaagatcgcgatcctgggctaccggtctgtggatcatcatggcaaaaccagctggtgggcccaagcctccaagtggga

SEQ ID NO: 304199 - DNA, 99 bp, Homo sapiens
catcctcctgactccataaactattggattcataacctgctccatgcttgaaaacatggggattggaattcggtctctgaaagaagatgaatttggctg

SEQ ID NO: 304200 - DNA, 74 bp, Homo sapiens
gtgtttgtgaaacagagaaagataggcggccatggtccaaccttgaagatccacctccgacccttaagccagag

SEQ ID NO: 304201 - DNA, 100 bp, Homo sapiens
agcgcgaggtggtggcggcctcccacgagctgggccaggactacgagcatgtgactgttaagaatagacccaccagcatttcgtgggatggtcttgattc

SEQ ID NO: 304202 - DNA, 126 bp, Homo sapiens
ctttgccccattcctatctcgtacacttcttggcagtcatggacaagagctattgatagaaggagaatgaagtttctagattagaagacataatgcagcatttaaaatcaaagaagcgggaagaaa

SEQ ID NO: 304203 - DNA, 87 bp, Homo sapiens
gaggaccattattttttaatgggtcttactgaagtaacacaaagcttaaaaatggaaaatgaagagtttaagaagaggttcagtgat

SEQ ID NO: 304204 - DNA, 100 bp, Homo sapiens
tccctcctcacttgaggtccccagcgggcactaccaccctcaccccgtcctcacaagcaaacagtgattgctgaccactcgctgagcgccagccacatgg

SEQ ID NO: 304205 - DNA, 75 bp, Homo sapiens
gcagcctggagagtcgaagcagcagctctcgctccagaagcttcactttgtaatctatgccagcaattatgacaa

SEQ ID NO: 304206 - DNA, 75 bp, Homo sapiens
ttcagtcatcacaaccctcaaaggacatgaagtcaggatctggtgattttgaagagaaaccacaacaacaaagat

SEQ ID NO: 304207 - DNA, 126 bp, Homo sapiens
agaaagttgggtttcttttactggcaaatagtacttcaagagcacagtcttatgtaagtgttatccaagataaattctgtgggattataaacatttcagtagaaggcctgcatgatgtcatgacgg

SEQ ID NO: 304208 - DNA, 82 bp, Homo sapiens
ggccgacttccggcgagcgggcaagcgggaaccaggtggccacccggtgtcgatggagttttgctcttgtcacccaggctgg

SEQ ID NO: 304209 - DNA, 100 bp, Homo sapiens
gccttgctgcaagaaggccgtgtgcgaggagtgcctcaaagtctacctgagcgcccagtcacttatataagaagaaccttgatgtgaccaagatccggaa

SEQ ID NO: 304210 - DNA, 75 bp, Homo sapiens
tccccacctaccccagcggccagatcggcttcatgctgtgcagcaagaacccgcctcagggatttagagatactg

SEQ ID NO: 304211 - DNA, 97 bp, Homo sapiens
cttcctatctaccctgccattgatattgatgcacaggaaaagtgggttgaagttgcctcaatgaaagtgcctagagcaggcatgtgtgttgtggcag

SEQ ID NO: 304212 - DNA, 75 bp, Homo sapiens
cacaggagctgtagagaggaccccggtacatctgaaagccgggaaatgagagcgcctgctcgctgtgcccccggg

SEQ ID NO: 304213 - DNA, 100 bp, Homo sapiens
ttcttctggataacactgtacaagctttcaaagtcaatgttgctgcatctacctttatccctgactgccttgaagttgaaggctctgtggctatctgaca

SEQ ID NO: 304214 - DNA, 52 bp, Homo sapiens
agaagtggagaccagcagaactccaccagtctgcaggtgtacccaacagctc

SEQ ID NO: 304215 - DNA, 100 bp, Homo sapiens
cgagctgcgacgcagacgacgagggcgtgcgcggcacctgcgaagatgcttccctgtgcaagagccctgcagagcccagggagatggaagacttcgcccg

SEQ ID NO: 304216 - DNA, 100 bp, Homo sapiens
aaggcgttggacaagtcaacatctcctcggtgggaggcagcgctgtcatgtctggaggagttggtggaggcttggggagcacttgtggactcggtagtgg

SEQ ID NO: 304217 - DNA, 89 bp, Homo sapiens
acccaggcccctgtcaagaaggtgccggtggtgcgagtcttcggagcgaccccggcagagatgtggtactggatcttcctctgggctct

SEQ ID NO: 304218 - DNA, 95 bp, Homo sapiens
acttcttgctcatttctgagtattgtctttatatcctgacactatgaatgctacttggatgcctcttaagcttggtgctaacagtggtttgcaca

SEQ ID NO: 304219 - DNA, 99 bp, Homo sapiens
gcgccgggcgtggacggtgtggggcggtcccggccccgcaggggccagacccaagaggacgcagaggctgagcgcggagacctgggacctgctgagact

SEQ ID NO: 304220 - DNA, 83 bp, Homo sapiens
ccgcgcgcagggcctgcagcgggagctggacggcgagcgcgagcggcgcgagaaaggggtccactggacggggcctgagctac

SEQ ID NO: 304221 - DNA, 97 bp, Homo sapiens
cttttcggaacaaactctgatgagcacagatctcttagcaaacagttcggatccagatttcatgtatgaactggcacaattcagattcagaagcgtc

SEQ ID NO: 304222 - DNA, 78 bp, Homo sapiens
tcaggactctggcagttgagagactgttggagcctcttgttacacagagccggggccatccagtcttggcagcatgct

SEQ ID NO: 304223 - DNA, 100 bp, Homo sapiens
gcaggctgcggggcgcggagtcgggagaccctgtgtcaaggagagtggaaagcctcatttgaagagctccacgatgtggaccactttgaaattgttgaga

SEQ ID NO: 304224 - DNA, 82 bp, Homo sapiens
catcttcgaacttagacttccggaaggactttggcgagggtttttagaacttcagccataaaaatgggcagaattttccttg

SEQ ID NO: 304225 - DNA, 100 bp, Homo sapiens
acacccaccacaaaaccccagtggagtttggaacttgcacggaagggaacaggccaggagtggtggctcacacctgtaatcccagctctgggaggccaag

SEQ ID NO: 304226 - DNA, 100 bp, Homo sapiens
ctactctcacacggttaaatatacacccacccaacaggcagaagaaatccttagacaagagctggagaaaaaagaaacgcctagtttatactgcttgctt

SEQ ID NO: 304227 - DNA, 80 bp, Homo sapiens
gcttaaggtcttcagcggggcgctccaggaggcactcacagtgagacggtttaagcggaagcatcttactgccattgact

SEQ ID NO: 304228 - DNA, 100 bp, Homo sapiens
caacaagatgctagagcatcgagaagttcgtgatagacaccacagtcttgttggaggagagcagattagtgccattggaaggggcatatgtgtgttgctg

SEQ ID NO: 304229 - DNA, 96 bp, Homo sapiens
gtggtgctgtcagcgcggccgtcggagacatgggagacccggggtcggaggcacagaaaactgaatctgtagataacgagggagaatgaattgtca

SEQ ID NO: 304230 - DNA, 96 bp, Homo sapiens
ccgcgacctggttctcccggagtctacaggtttccaggcctgaggtgcccgccctggccccaggagaatgaaccagccgcagaggatggcgcctgt

SEQ ID NO: 304231 - DNA, 82 bp, Homo sapiens
aaatgaggacatatcagtatcggtcacgagaagagaatgccttctagatgcaaaatcacctccaaaccagaccacttttctt

SEQ ID NO: 304232 - DNA, 97 bp, Homo sapiens
agcaacacagtcacggcagcccacatcaagaagttcaccttcgtctgcatggctctgtcactcacggtaatagcctgcagctggtgttttgagaagc

SEQ ID NO: 304233 - DNA, 98 bp, Homo sapiens
cctagatggaacacatgctctgatggttggaggcatcaagcctgggtgctttaagattggcaacacaggtgggatgctggacaacatcctggcctcca

SEQ ID NO: 304234 - DNA, 80 bp, Homo sapiens
acgacaccaagctggacgctgtcctggaggaattcaagcgagatactcagaactaaccactgttcaacaacagctaatta

SEQ ID NO: 304235 - DNA, 83 bp, Homo sapiens
aaataccaggctaccatggtctacaagactctcttcgctctttgcatcttaactgcagtcgccagcagcacggccgaagtgag

SEQ ID NO: 304236 - DNA, 98 bp, Homo sapiens
taaattacatattccagtaatggtggatgaagttgttcattgtttgtcaccacaaaaaggacaggtgggccataaaacatgaaggaaccagtaagcca

SEQ ID NO: 304237 - DNA, 100 bp, Homo sapiens
gttggccttcgtacccgtcttgattgagtgggctcggtttgttgcagttatgcaggtcatcacacaaactgccgagaatactgtcaagccatttttcgaa

SEQ ID NO: 304238 - DNA, 100 bp, Homo sapiens
ttgtccactgtccgccagacctgctgctgcttcaatgtccgcatcgcaaccaccgccctggccatctaccatgtgactcggtgaaatacctggagtgctc

SEQ ID NO: 304239 - DNA, 75 bp, Homo sapiens
atatgtcaggaatgtgattcttcatcttccaagatggcaccgaaagcgaaggaagctcctgctcctcctaaagcc

SEQ ID NO: 304240 - DNA, 51 bp, Homo sapiens
ggaccaggcaccttctgtggaaggttgcccccaagtttcctggcagtgtgt

SEQ ID NO: 304241 - DNA, 75 bp, Homo sapiens
gctgaagcgactgagtccgcgatggagatcgaagatttatcccagcaagcacaactagcagctgctgagaaattc

SEQ ID NO: 304242 - DNA, 100 bp, Homo sapiens
ctccttcggcagtccacccaccgccgccgcctcccagtcagactcagtcacatgcccactcgaagtcgcactgctatggaaagtgggtgcaggtggtggg

SEQ ID NO: 304243 - DNA, 90 bp, Homo sapiens
tgcaaggccacgacccacgagatcatggggcccaagaaaaagcacctggactgaaattttagccagtgtaatgattaagaacctggatac

SEQ ID NO: 304244 - DNA, 98 bp, Homo sapiens
atttttgtggcaggcatctgtgggatctgtaatagaaatgtgctggagaatctggtaaaagcaccattgtgaagcagatgaggatcctgcatgttaat

SEQ ID NO: 304245 - DNA, 100 bp, Homo sapiens
cagcagttcgtcgtcagtggcagccccatgcgagcacccgaggaagcctactttggggataaaggattatttggtcttctggatttggaggcaatcagcg

SEQ ID NO: 304246 - DNA, 101 bp, Homo sapiens
aatggatcctcttccaaaaccacaaacttgcctacgtcagtaacagccaccaagactgaatctatgcttaaaatagcagaagatctgggaggaccgtatgt

SEQ ID NO: 304247 - DNA, 51 bp, Homo sapiens
aatcccactgatgaggatcagcccatgaattccatacgacataatctgtca

SEQ ID NO: 304248 - DNA, 83 bp, Homo sapiens
gcagagccgagtgcagaagatctgggtgcccgtggaccacaggccctcgttgcccagatcaaccatgtccaagggacctgcag

SEQ ID NO: 304249 - DNA, 100 bp, Homo sapiens
tacaagagccctgcttcagatacttacatagtttttggggaagccaagccaagaagtatgatgcgtttttggcctcagagtctctgatcaagcagattcc

SEQ ID NO: 304250 - DNA, 75 bp, Homo sapiens
agccctgcagacagaggtgtgctgacgacctgctacaacagaagttaaacccatccagagtaatggctgcggcct

SEQ ID NO: 304251 - DNA, 75 bp, Homo sapiens
aaacatttatcattggaatcagtggagtatttgatttctgacactggaggacaacagctctcaataagtgacgct

SEQ ID NO: 304252 - DNA, 76 bp, Homo sapiens
tggaagatgaggaggtcgctgagagctgggaagaggcggcagacagcggggcttctcgtcagtgcctcgcaggatg

SEQ ID NO: 304253 - DNA, 114 bp, Homo sapiens
cttggaagcaccatgtccggatgagatcgcacttcctgcagtgggcattagccacgtccagttggtgttggtattaggagatctgcacatcccacaccggtgcaacagtttgcc

SEQ ID NO: 304254 - DNA, 73 bp, Homo sapiens
ccgccgccgccgccgccgccgccgcgcacgccatgggagccgtgactgacggtggtcctgccatcatggctgt

SEQ ID NO: 304255 - DNA, 75 bp, Homo sapiens
ctgagatgggcaccgcggatctggggccgtcctcaggtcctaggcctacttacaagcctccagtctcaaattatc

SEQ ID NO: 304256 - DNA, 100 bp, Homo sapiens
caccaacaatgagagagtggttgtaaaaatcctgaagaatgcttcagacatgcctgaaacaatcaccagccgggatgccgcccgcttccccatcatcgcc

SEQ ID NO: 304257 - DNA, 147 bp, Homo sapiens
ggggaggcatgccgccgctcctggcgcccctgctctgcctggcgctgctgcccgcgctcgccgcacgaggactcatctctgttggatggccgggtggcgcttctgcacgttcctgcaggcacggtggtgtcaaggcagggagaccag

SEQ ID NO: 304258 - DNA, 75 bp, Homo sapiens
ttcctgcagtgggcattagccacgtccagttgtgtgacttcattgagacacattacctgaatgagcaggtgaaag

SEQ ID NO: 304259 - DNA, 82 bp, Homo sapiens
cgtgccgcgagcgcggcctgcaggaggtttttagaacttcagccataaaaatgggcagaattttccttgatcatatcggtgg

SEQ ID NO: 304260 - DNA, 97 bp, Homo sapiens
cagaatttgtatagagatgtgatgttggagaactacagaaacctggtctccctagaaagctgtatgtgatggcttctgtgtttgtctgtctactcct

SEQ ID NO: 304261 - DNA, 82 bp, Homo sapiens
cacagacctgctgtgtgtgcttctgcgccccaggtgttgtgtgtgggggtgcagccgcttacaaacacgcagatggcaagaa

SEQ ID NO: 304262 - DNA, 50 bp, Homo sapiens
tccaactatactccgatcaccaatggtcacagtaaggctgttagggatat

SEQ ID NO: 304263 - DNA, 74 bp, Homo sapiens
aactcacacatgcccaccgtgcccagcacctgttccgcgagcctgagaagaggccccccaccgtggtgtccaat

SEQ ID NO: 304264 - DNA, 74 bp, Homo sapiens
tggcaagattcttctgaattgtgctgccttggccaaaagagattattcagcgatgttttactaaccacttctga

SEQ ID NO: 304265 - DNA, 82 bp, Homo sapiens
tattcctggtctacatcctgcgggtgcctttgaaaatcaacgacaacttgagcacagaggagcaggagcggcttcgcttgga

SEQ ID NO: 304266 - DNA, 100 bp, Homo sapiens
agcaagtagagagcaagaggaagtcagggggaaatgagtttgccaaggcacgagtaacaagctcacgcagttgggcacttttgaagatcattttctcagc

SEQ ID NO: 304267 - DNA, 87 bp, Homo sapiens
actaccatcctttacctgtagccctggagagaggaaaagtttgctgatggccgccaaagttggagttcgtatgttgatgacatctga

SEQ ID NO: 304268 - DNA, 50 bp, Homo sapiens
tttaagaaagaagatgttaactttcagacacattccttaacccagcgcag

SEQ ID NO: 304269 - DNA, 100 bp, Homo sapiens
gcctacgcctgcctagaagctgtgccgcccccgccagcccagctgcagctccagcaggtggcgctgcagcagcagcagcaacagcagcagttccagcagc

SEQ ID NO: 304270 - DNA, 84 bp, Homo sapiens
agcctcccgagtggctgggattacagcatctacgtcatgggcttggttctggagtggattaaaaacaatggaggtgccgcggcc

SEQ ID NO: 304271 - DNA, 75 bp, Homo sapiens
ggctcccctctcaggacaacccagatgtgcaacaaagtgcgatgacttgtgcaccatggacaattttgctgaggg

SEQ ID NO: 304272 - DNA, 100 bp, Homo sapiens
gaggacttcgtggacgacgtgagcgaggaaggtggccggactgtgccatgctgctccagacccaaggtggcagctctcactgcggggaccctgctacttc

SEQ ID NO: 304273 - DNA, 75 bp, Homo sapiens
aagggcacgtatagcattggtaaagaacgatcgtccagtggaggcacagttggtggatctgaaatctgaactgac

SEQ ID NO: 304274 - DNA, 75 bp, Homo sapiens
atgtctcacaaatgatgtttatgatgctgctttaaagctccagcagtacccgcggctacgggaggagatggagcg

SEQ ID NO: 304275 - DNA, 137 bp, Homo sapiens
gcgctgtagcctggaggctccgggcgcggggaagtcatgctcgcttcacggaggcaatagctagccggatggaaaggcagatgtaaagtccctcatggcgaaatataacacggggggcaacccgacagaggatgtct

SEQ ID NO: 304276 - DNA, 74 bp, Homo sapiens
aatgttgaaactatttaaagaggttgctagcttacaggaattgaatgatctggcacgggaccctccagcacagt

SEQ ID NO: 304277 - DNA, 90 bp, Homo sapiens
cgaaagcatcatccacgagttcgacccgtgcacttttccagccattaactccaggctctcgagaatttgaagatgttgtaaatattctcc

SEQ ID NO: 304278 - DNA, 75 bp, Homo sapiens
aagccagctaagaagtattctgatgtttcaggtctgctttaatccttcccctctaccaccggatatggctcctgg

SEQ ID NO: 304279 - DNA, 96 bp, Homo sapiens
gtctgcaaaagatgattttacatccattattgggaaatgtcaagacggcaccgaaagcgaaggaagctcctgctcctcctaaagccgaagccaaag

SEQ ID NO: 304280 - DNA, 100 bp, Homo sapiens
gggctacgccttgcgtccccaggaaaagggccactcgcccgaagacatctaccagatggctctcaaccaggccctcagccacaagtacggtggacacagc

SEQ ID NO: 304281 - DNA, 90 bp, Homo sapiens
cgtgcccggcagtgcttggtcttattaaacgctttatgaaaggtatttaacatgaagtcgctccagattgtgttacctgcccgagcagac

SEQ ID NO: 304282 - DNA, 83 bp, Homo sapiens
cgcgtgtcctcggagcgcggtccctgtattggtctcctgctcctagagggatcgcttacacctgagacgaactacagaacagc

SEQ ID NO: 304283 - DNA, 51 bp, Homo sapiens
gccaaagtcactgctgttaacaaggatggatggaagagtgtagaaagtgtc

SEQ ID NO: 304284 - DNA, 90 bp, Homo sapiens
acgagctcaaccccatccactgccgcggccgtgggcccgaccgcggggacccggtggctcggaccccctcccctggccccagcgtgtcag

SEQ ID NO: 304285 - DNA, 100 bp, Homo sapiens
ccagaggagccgccttctgcctcagaacggcgtgactcggaggtgtttgtggccagtcctcacaaaacacagcctattgtggagatcctgttaaaaaatc

SEQ ID NO: 304286 - DNA, 100 bp, Homo sapiens
ctgggcaacgccgaacccagtcgcgcagcgctgcagtgaattttccccccaaactgcaataagccgccttccaaggtgtgggcaagagcagtttactgtt

SEQ ID NO: 304287 - DNA, 100 bp, Homo sapiens
caccatccccctgctgtaccggcagcaccagggatttccacaagatcaaattcgattgtggcccatgcaagcaaggagtaatggaacaaaacgaccagca

SEQ ID NO: 304288 - DNA, 74 bp, Homo sapiens
gacagctgttccttggccatcccaaagctattctgggggcaacagaggcacatgatggctccgctacttacttg

SEQ ID NO: 304289 - DNA, 83 bp, Homo sapiens
acttcgactctcaaagcaataccaggatagctgttgtttcagagaaaggttatcaatactctggctgaccatcatcatcgtgg

SEQ ID NO: 304290 - DNA, 82 bp, Homo sapiens
cttgtggagccggagctgggcgcggattcgccgaggcaccgaggcactcagaggagggggggccctcagcctcttggccttg

SEQ ID NO: 304291 - DNA, 100 bp, Homo sapiens
cccgatggacacctggcgaccaagcagcgcccggtcgccagatcgaaaatcaaggaggaatcggagaagcagctctgtctgattgaggcgcagaccatgg

SEQ ID NO: 304292 - DNA, 100 bp, Homo sapiens
cagggaacttggcagaaggtgatacaggtggttcagtcaggaataagtttgtggagtttgacatgaagccagtctgtaagaagtgctatgagaaatttcc

SEQ ID NO: 304293 - DNA, 90 bp, Homo sapiens
cgcctcctcccgcctgccccctcagccctgtggctgggggcagagctcaggtcgttgaggacttccacatggagattggcacaggaccag

SEQ ID NO: 304294 - DNA, 100 bp, Homo sapiens
aaagcgacaagtggaggcgccgctctagcggccgggactctgaactatggcgcatgtcctggaattggaagccaaaatggaccagctgcgaacaatggtg

SEQ ID NO: 304295 - DNA, 75 bp, Homo sapiens
gcccagataagaaaaagcgcaaggcaaatacacagacctgaaagatgtctgaaaattccagtgacagtgattcat

SEQ ID NO: 304296 - DNA, 75 bp, Homo sapiens
gacccactggaagcctagaaatggcacttcctggacctcactactacacatggggagaccacggcggaatcatca

SEQ ID NO: 304297 - DNA, 100 bp, Homo sapiens
ctttgccctctgttccagaagagaaaaagcccaggcataaaatcatctccatattctcaggcacagagaaaggaaggtgatgaagacgtatacggggagg

SEQ ID NO: 304298 - DNA, 100 bp, Homo sapiens
gggaagcaggagccccaggacagaggagagcaaagcagacagtccacccccatcctacccaacacagcagggttacacatcattttggaatgactgtata

SEQ ID NO: 304299 - DNA, 90 bp, Homo sapiens
ggcgttcagctgcttcaagatgaaggtgtattacctgactgcttaaccgatggctctgatgtggtcagtgaccttgaacacgaagagatg

SEQ ID NO: 304300 - DNA, 50 bp, Homo sapiens
cccatggacctcagcactgtcaaggattcagaatccatggctggaagagg

SEQ ID NO: 304301 - DNA, 75 bp, Homo sapiens
ccggctcccgcaccatggaggaggacgacagctacggctgaaggggatgctaagggagataaagcaaaggtgaag

SEQ ID NO: 304302 - DNA, 58 bp, Homo sapiens
aggctctaggctccaagacgccgtcgcttgaggtttggaaggcgctttgagtccccgc

SEQ ID NO: 304303 - DNA, 74 bp, Homo sapiens
ggtccagggctcgatctggccctaaccacagagtcaccttgagattgtgctacgatgcatttacagagaacatg

SEQ ID NO: 304304 - DNA, 78 bp, Homo sapiens
ccgcccgaccccgtcccgaccctggccgccccgagcggagcctggaggtgtctcgtgcctctgctggaccctgactct

SEQ ID NO: 304305 - DNA, 100 bp, Homo sapiens
aaaaaaagctctgtggtgcagtgaggataaacagattctttctgctgatgacaaaactgttcggctggatgacaccaaaatcctcccaggcaacatgaag

SEQ ID NO: 304306 - DNA, 75 bp, Homo sapiens
attttggcattgacatttaattttagggtcctttatatagaagggagagtagggggccgtctgccctgcccagag

SEQ ID NO: 304307 - DNA, 82 bp, Homo sapiens
tcccgcaaccgaagcacaaaagttatcaaacccggtggaccatatgtaggtgtttgatcagtatgtaaagaccagggcagag

SEQ ID NO: 304308 - DNA, 100 bp, Homo sapiens
ctacatttcccggaaggttaacagcccccttctcagttttcctgatggatggaatacccatgtcaatgaagaatgaaatgcccatctcccaactactgat

SEQ ID NO: 304309 - DNA, 100 bp, Homo sapiens
cctggatcaccgacagcacagacagaatccctgctaccaaaatgggacgtcggtcatcagatactgaagaagaaagcagaagcaagagaaaaaagaaaca

SEQ ID NO: 304310 - DNA, 100 bp, Homo sapiens
gacaagtacatcgccaagtttcagggagaagacacggtcgtgatcgcgttataggtgcacagcgaaggagaagccccagtgcactagccattgaagtatt

SEQ ID NO: 304311 - DNA, 83 bp, Homo sapiens
agccaatcggatgctgaagcagatgcttttcaggccttagcagtaggaggactaggctccattataagagttcttacagcaag

SEQ ID NO: 304312 - DNA, 96 bp, Homo sapiens
cccggggccagcggccggagccagcttgtacttaaatacttcctgcgaagttttgactgagacgctgcaacaattcccgagctgtttcatcgtggc

SEQ ID NO: 304313 - DNA, 74 bp, Homo sapiens
gatgattgttggatatgcataagagagagagatcatcattgcctgaatttagctttgtgactgcaagagcaaga

SEQ ID NO: 304314 - DNA, 96 bp, Homo sapiens
acagattttggagaaaactcccaacaggctcaaacgcatttggaattggaggagaaagtggctcatgccaaagaagaaaaccttagtatgcatcag

SEQ ID NO: 304315 - DNA, 98 bp, Homo sapiens
cgggcgtccgcggagcagcttccccccgcgcctctcttcgcctcgcctcgggacccgcggtccccgctcttgctggaaacctcgacctgtctcccagt

SEQ ID NO: 304316 - DNA, 97 bp, Homo sapiens
gaagaaataatatttatgaactgaaccctaataaggagccatggagaaaaatggatcttaggtgtctcaatgagatcttggagtcagcagatgcacc

SEQ ID NO: 304317 - DNA, 100 bp, Homo sapiens
gtgggatctcaccgtgggtccgattagccttttctctgccttgcttgcttgagcttcagcggaattcgaaatgcactattggaaataattatgaaaaatg

SEQ ID NO: 304318 - DNA, 75 bp, Homo sapiens
agcttgtgaaactgagggaataggtgtcattccacacatccacaaatctctgattgggaagaaaggacaacagaa

SEQ ID NO: 304319 - DNA, 100 bp, Homo sapiens
ctcggttctttggtcctggggaattcgacccctctgttgacgtctatgccatgaaaagccatgaaaaattctccctctgaagcacagaatttagatgaga

SEQ ID NO: 304320 - DNA, 75 bp, Homo sapiens
gctcagacatgttctcaccacccttgcgtcagcttttctttcgcaaaaagctgcttcactcatcccagatgcttc

SEQ ID NO: 304321 - DNA, 83 bp, Homo sapiens
ctgttcctggaggaatccgagaagagcagagcggagggagccccagacacgggatcgcttacacctgagacgaactacagaac

SEQ ID NO: 304322 - DNA, 99 bp, Homo sapiens
cacagatggcagaacagacttagctaatgaatcaaaggcatgggaggttgatacctgccggggccattacaacaatgtatcttgtgccgtcttccaccc

SEQ ID NO: 304323 - DNA, 100 bp, Homo sapiens
acctgagccaggtgaagggccccgtaaattggaaggatgcacaagttccaaggttacgtttcaggaaaggaaaacctcttcagcgcaaggtgaaaccacc

SEQ ID NO: 304324 - DNA, 100 bp, Homo sapiens
aaacgttctaaaaagaggcgaaaggaagcaagcagttcagaagagccaaggaataaacatgcaatgaacccaaaagggtccccagtcccaagcggaagtt

SEQ ID NO: 304325 - DNA, 100 bp, Homo sapiens
ttttaaggcttctctcgtcaaaaatggtgcagaatttacgacacttcgtgtatgatcatgtgttcgctgagaagatcacttccttgcaaggtcagccaag

SEQ ID NO: 304326 - DNA, 87 bp, Homo sapiens
ctgcctacctgtcagccgtgggcaccttcacctgggtctgcacgccctttctggtctcctctgagcctccggcctccataagaccca

SEQ ID NO: 304327 - DNA, 100 bp, Homo sapiens
gtcgacgactccgtcgcagactacggacctgtctgggtctcagccgccaaagaccccgtccggcaaaatacatatctcagtgcattgatgagatcaagca

SEQ ID NO: 304328 - DNA, 82 bp, Homo sapiens
attgaagccgcctctgtattacttaccagtgcctccggagccagcgtggtggccatagacaacaagatcgaacaggccatgg

SEQ ID NO: 304329 - DNA, 99 bp, Homo sapiens
ttttggatgaagaagtttttgagtatgaagactatatgccattgcatgcacctcttccacccacatctcctcagccacctgaggaacctcctttgccag

SEQ ID NO: 304330 - DNA, 50 bp, Homo sapiens
atggatgctggattctaaaatttgaataaaaatgtgagttcaagggttcc

SEQ ID NO: 304331 - DNA, 83 bp, Homo sapiens
gaagcagaaacaactcagatggagttatccccagctcccactataagtaacctgtgtatggtgactggaggtgctaacctagg

SEQ ID NO: 304332 - DNA, 98 bp, Homo sapiens
ggtatctaggcaacagggatgagcctgaacctccctgaggccagcttactgagatagaagaagtcagagatgccatggaaaatgaaatgagaacccag

SEQ ID NO: 304333 - DNA, 82 bp, Homo sapiens
gatgcgggccgtcctctcggctgatgaagtttccaagggtcacttgtgtctcgtccgtgggaagaccgggggagcccagaag

SEQ ID NO: 304334 - DNA, 75 bp, Homo sapiens
gcaagaaagaccatcaagtttaccagcataagatgcacatttttctgctctggagccgggaatgaaatattcttg

SEQ ID NO: 304335 - DNA, 99 bp, Homo sapiens
cttggatatgacccatatgccaacccacctaactacggaaaacctgatcccaaaattattgaaaacactcgaaggaaactgctggagcgaacccgtgcc

SEQ ID NO: 304336 - DNA, 90 bp, Homo sapiens
ggcactacttccagaacactcaggaaacagattattacttccaacaccaacagtaaagcaggaatcaaaggatgtggaagaaaatgttgg

SEQ ID NO: 304337 - DNA, 90 bp, Homo sapiens
cccatcagcgcggctacctgctgacacggaaccctcacctcaacaaggaatggtagtgctattggccttccagtcccacctatcacagcc

SEQ ID NO: 304338 - DNA, 100 bp, Homo sapiens
ttgtagtcccctatcccatcctggcctcgggcgagactgccaaggagggcaagacgtacaggtccgagctccgatggtggtgcagcagcccccagtgcag

SEQ ID NO: 304339 - DNA, 99 bp, Homo sapiens
agggcggcgacggtggtggtgactgagcggagcccggtgacaggatgattttaggtgatgggcaagtcagaaagtcagatggatataactgatatcaac

SEQ ID NO: 304340 - DNA, 75 bp, Homo sapiens
gaagatgatgttcatcatgtggtttagtggcaactttggctttggggattcacgtggtggcggtggaaatttcgg

SEQ ID NO: 304341 - DNA, 124 bp, Homo sapiens
atatggtgtttcttctatcattccaaactttcagatctctcaagattcagtagggaacaggtgaaagaaaagatgttgtcccggttaagagtagtttccaccacttgtactttggcatgtcgac

SEQ ID NO: 304342 - DNA, 98 bp, Homo sapiens
agatgatgcctatgatgccaacgtgtccttcaatgtttcccgggagctcttcttcatcaacatgtggcagaagattttaccaaatgttgcaagaactc

SEQ ID NO: 304343 - DNA, 100 bp, Homo sapiens
ggcctttattcactgggtgtcacagcctttgatgtgtgaggttcgcctctatgagcgactctggattcactcctgcttgcgaaaagctgacaaaaacaag

SEQ ID NO: 304344 - DNA, 50 bp, Homo sapiens
gacgttctcaaggagaaggcagacctggcttgataaagatgacatggtat

SEQ ID NO: 304345 - DNA, 100 bp, Homo sapiens
attcagatgggatctttccggatcaatccagatggcagccagtcagtggtggagagatgaccaagcgagacgtgcctggcttcgccatcgggggcctgag

SEQ ID NO: 304346 - DNA, 83 bp, Homo sapiens
cctgtgggcacagacaaggagctcagtgacctcctggacttcagcatgaattggctgtgaaaggactgaggcagccatctggg

SEQ ID NO: 304347 - DNA, 90 bp, Homo sapiens
ctcgcgggcgggagaacggaaaactcccaacttcctgtttttggctttcacccccaaccagtgaccaaagacttgaccactcaaagtcca

SEQ ID NO: 304348 - DNA, 83 bp, Homo sapiens
aatgttgaagatgtccttaccagctttgacaatacaggaaatgtttctgcctctggagacgtacaaacataccagattcgcac

SEQ ID NO: 304349 - DNA, 81 bp, Homo sapiens
tccgtctggccgccggccacctggtccagctgcccgcaggggtggagctgtggcgcggggccttccaggagtctgagctat

SEQ ID NO: 304350 - DNA, 100 bp, Homo sapiens
aatgttgccctgaaatttatgtccaggattcaaaaagtttaggactgctaagtaagactttgaccccgacgcaggcttcagtgattgccgcggatcagaa

SEQ ID NO: 304351 - DNA, 127 bp, Homo sapiens
catgttcaagaaactgaagcaaaagatcagcgaggagcagcagcagctccagcaggcgctggctcctgctcaggccccttcacagatgtagtcactacaaatcttaaattgcgaaatccatcggata

SEQ ID NO: 304352 - DNA, 75 bp, Homo sapiens
tgcactgaagagaggagagatcattgcaaagcagggaggagaacatccagtcatggataaaaatgagctggttca

SEQ ID NO: 304353 - DNA, 75 bp, Homo sapiens
ttgggaaccgcctgggaactccgccatgtcatccacttcgcccaacctccagaatgattacggacctgaagccaa

SEQ ID NO: 304354 - DNA, 83 bp, Homo sapiens
gacggctctagctaggtgagcggctccggccaggatggctggctgtggtgaaattgatcattcaataaacatgcttcctacaa

SEQ ID NO: 304355 - DNA, 87 bp, Homo sapiens
tccaacgacctcacacaaaaagaaatccggaccctggagccgattacacctcaacaagaaggcaactgacaaacagccttatagcaa

SEQ ID NO: 304356 - DNA, 103 bp, Homo sapiens
cgacgtgggcggtgggccccagccccacagaccagcccagcattcagataacgaaggaggcccaacttcattcaataaggagcctgacggatttatcccagac

SEQ ID NO: 304357 - DNA, 50 bp, Homo sapiens
cgaaaacttaatctacacctacgataaggccttagaaaatttacgtgtat

SEQ ID NO: 304358 - DNA, 98 bp, Homo sapiens
ggaagagggactggaaccatctcagaagccatgcccctcaggctggaacttgccctgtctcctcgcagatgagagccagccccagtgcctgctgagcc

SEQ ID NO: 304359 - DNA, 75 bp, Homo sapiens
gagacctcctgtccgaaaataaccgccttcgcatggagctggaaaccatcaagtcttggacagtaaagcaccaaa

SEQ ID NO: 304360 - DNA, 101 bp, Homo sapiens
gggcatgaaggtcctggaagtctgttatcagaacttaagtcaaaggggaaaccccaaagccacggagaaaatcagggaaggtaaaagaagagaaggagaag

SEQ ID NO: 304361 - DNA, 82 bp, Homo sapiens
gccgccgccgccgctgccgctgccgctgccgcacctccgtagctgactcgagtgaagacatttccacctggacacctgacca

SEQ ID NO: 304362 - DNA, 75 bp, Homo sapiens
cagagcgcggcggtcttcaagctctcaggcgtctctggccgagcctctttttgtggaaaacgacagcagcagcag

SEQ ID NO: 304363 - DNA, 97 bp, Homo sapiens
atatgccttcaagtatggatgagtatgtccatcaggatgcaaggtgttgtaaaccgactgtccaagttactgaaacctgggggaatgctgttatttc

SEQ ID NO: 304364 - DNA, 82 bp, Homo sapiens
tgtcccgggcctaccccctggactccctggagaagcagatggaaaaggaagagagaagggcacagttacctaagtatcaacg

SEQ ID NO: 304365 - DNA, 75 bp, Homo sapiens
tgtcaaacgaaacccatgtttctaatgaccagcaggaaggtgggagtcaatcattttgacaagtctcctgaaagg

SEQ ID NO: 304366 - DNA, 83 bp, Homo sapiens
acttaagtctgaatttcggcagaatttaggtccgggcagctccccctccacctacacagaatcaccgaaggccagcagagaag

SEQ ID NO: 304367 - DNA, 100 bp, Homo sapiens
ccctctcctttccctttgagaccgtgaagagaaagatgcaggcaagacatctgtatagattctgcttcatccgtgagagagaataagcaacctgaaggtt

SEQ ID NO: 304368 - DNA, 82 bp, Homo sapiens
agccgcggcggcagcagcagtgagagggtggtgaaggaggagatctttgatgacaatgccaagcttccctgcttcaacggcc

SEQ ID NO: 304369 - DNA, 100 bp, Homo sapiens
gccgggggctttgccattgtgtattacctcattcaaaattgagaacgggctctgcatctgtgcagccatgcccagcaaagtcgtcattctccgctacaac

SEQ ID NO: 304370 - DNA, 82 bp, Homo sapiens
gcgcggcagagtccccgtacgcctacagtaacggtgtccctacctgcaccggacgacgggggacacagaacgcaagtaccac

SEQ ID NO: 304371 - DNA, 75 bp, Homo sapiens
tgatgtaaacaaaagactggaaaaactctcagccttggattataagtctattgcgtctgcagacatggatttcaa

SEQ ID NO: 304372 - DNA, 76 bp, Homo sapiens
cgcgtggaacggctgcttttggaaggaagatgagaatgtgcctactgctcctgatcctccaagtcaacatttacgt

SEQ ID NO: 304373 - DNA, 83 bp, Homo sapiens
aacaagggccacaaagtgaccaagaacgtgagcaagcccaggcacagccgacgccgcgggtggacatcctcatcatggatgat

SEQ ID NO: 304374 - DNA, 50 bp, Homo sapiens
cggggcctgaaccgtatccagactcaggtgctggagaatctggtaaaagc

SEQ ID NO: 304375 - DNA, 78 bp, Homo sapiens
ggaaatggcttcagcgcagtatattactgcagcagtatcctggtgtgaaccagctatcctccagtataggaggattga

SEQ ID NO: 304376 - DNA, 100 bp, Homo sapiens
cgcgagtcggcgcccggccgaggggctgcgtaggccccgcccggccaggcccagccgggccctggacagaccgaagccaggacagcacagccgtagcact

SEQ ID NO: 304377 - DNA, 80 bp, Homo sapiens
caataaggttctgggaacacataaaggccggtgctggtgtgtgctccgagcaacatcgccgtggaccagctaacggagaa

SEQ ID NO: 304378 - DNA, 82 bp, Homo sapiens
aagaggcccggactcatacagagattgaaatgttccttagaaaggagcagcagtgagagggtccaagcctggtaagaatgtc

SEQ ID NO: 304379 - DNA, 75 bp, Homo sapiens
ccagaatgaatgaagtgcttcagatttaaatagtattttgatcacaactatagcctccaagggagaattgcagaa

SEQ ID NO: 304380 - DNA, 82 bp, Homo sapiens
aagaaaccgctgaggcttatttgggaaagaagcttcttggacacttaatgattgttggcaagaaatgtgctgctgatctggg

SEQ ID NO: 304381 - DNA, 75 bp, Homo sapiens
ccagcacacactgcaaggagatcagcttgcaagccaggctgggattccttcaggtgtatacaatgttattccctg

SEQ ID NO: 304382 - DNA, 100 bp, Homo sapiens
tgatttctactgccccgtctgtcaggaggtgctcaaaacgcccgtgcggaccacggcctgtcagcacgtgcctccccatggccacccatggaccagtcgg

SEQ ID NO: 304383 - DNA, 98 bp, Homo sapiens
cctacggcccgagacacaccaggccggcaggctgagaaaagcgagaccgcgtgcgaggaccgcatgagggcatctgtgccttcccctctgtggcgttc

SEQ ID NO: 304384 - DNA, 82 bp, Homo sapiens
ccgggtcttccagaaggctgtagaccagagtatcgagaagatgtaaccttctgtaatggaagatgattgaagacaaggggcc

SEQ ID NO: 304385 - DNA, 75 bp, Homo sapiens
taggtgattctgatgcacactcaaatttgacagggcacaagagactatagtccccggcagatggcagttcgcgag

SEQ ID NO: 304386 - DNA, 75 bp, Homo sapiens
tgtacttcaattatatggcttcatgggtcatgttaggaataacttatagaaatcctgataacttaagtgactctc

SEQ ID NO: 304387 - DNA, 98 bp, Homo sapiens
ggacccggggaccggagccgcagccggcggaggaggcagtagcgggggactcgatggaccgcggctggcaaatgtcatgggaacagacatgtcttgga

SEQ ID NO: 304388 - DNA, 75 bp, Homo sapiens
cattctttgtacagaaattgaaaggcttcaaagctagcagctacgtggtgaacatgggtctgattgacaaactgt

SEQ ID NO: 304389 - DNA, 100 bp, Homo sapiens
attactgggcatccactgccaaaatgcagctcttacagaaatgtgtcttgttgcatttggtaatttagcagaacttggtctggtgagctgtaccttcttt

SEQ ID NO: 304390 - DNA, 83 bp, Homo sapiens
gggaaaaggcaaaaatcccatctaccgcaactctcagttcgagagtaaaggccggctgcgtgcacttttcctacaaagcatcg

SEQ ID NO: 304391 - DNA, 100 bp, Homo sapiens
gtgttttaaagagtacagtgcggggaggctgagaggggcgcatgcaacaacaacttttggaaggttttgggaggtcatcagtgatgagcatgggattgac

SEQ ID NO: 304392 - DNA, 75 bp, Homo sapiens
gccgcccgccccccaccgccgccccctccggcgtgttcatgcccccgggtcccaggggcagccactggcctccca

SEQ ID NO: 304393 - DNA, 74 bp, Homo sapiens
ccaggtgcaaggtatcgagcaggacctggtgatagaaagacagaatccattgatgtaatggatgcggttggaag

SEQ ID NO: 304394 - DNA, 75 bp, Homo sapiens
agctcagcgagaacctcaagagagtgggccagatattcgaagcttacaacatggcagctttgtggaaattacctt

SEQ ID NO: 304395 - DNA, 83 bp, Homo sapiens
gtagagtatttcaaccataaagacatcttaattgggcacgaaagaggttgtgcagcctgactctgaagaagctggtggtcttc

SEQ ID NO: 304396 - DNA, 100 bp, Homo sapiens
ccgtgtaatggatgtaggaaccttggcttccccatgcttgcccagtactaaggctcgtacgtctgcatcgattatcttacgtggggcaaatgatttcatg

SEQ ID NO: 304397 - DNA, 100 bp, Homo sapiens
agccggccggggtccaggtcggaaatgtagccagtggggccgccaggaattgaatgatctggcacgggaccctccagcacagtgttcagcaggtcctgtt

SEQ ID NO: 304398 - DNA, 110 bp, Homo sapiens
tctctacagaagagcttctcctcatcaactggggatgattacagttcttcctaaaaaagcccaaaaaggtcagtggttgagtggcttttttgactatggatctttctcag

SEQ ID NO: 304399 - DNA, 75 bp, Homo sapiens
gaagcttcggccccgcagctcggcttgctgcggtctcagatattttatgacctggtcagacagataaataggaaa

SEQ ID NO: 304400 - DNA, 51 bp, Homo sapiens
gatgggacagcgtctcaatgtccaaatgaccctgtgactaacatctgtcag

SEQ ID NO: 304401 - DNA, 90 bp, Homo sapiens
ccgagccatggctctcgccgtccgagtcgtttattgctcacctgttctccaggaccagccctgctggggcccaggcccaggctctgagag

SEQ ID NO: 304402 - DNA, 100 bp, Homo sapiens
gcgaacctcgagaccaacgtggaggagctgtgggtggaaggtgctggagaatctggtaaaagcaccattgtgaagcagatgaggatcctgcatgttaatg

SEQ ID NO: 304403 - DNA, 50 bp, Homo sapiens
gtgggcatggcagacaaatctgtagttgcatccaagaattgatgcccgga

SEQ ID NO: 304404 - DNA, 87 bp, Homo sapiens
cggcttcttctccaatgtgtcatctgctttcgaaaaatgtcacccttggacaagacccctggatccatctggttacaatcctgccaa

SEQ ID NO: 304405 - DNA, 83 bp, Homo sapiens
gccacgcagaggacgccggaacaccctggaagccgagaaatggtatcgagaaccttccctgcgaacttcagaggaacttccag

SEQ ID NO: 304406 - DNA, 83 bp, Homo sapiens
agaacgccaagcgcttcgccatcgacataggccctgggaggagcggggacactgaggacctctctccaaattggcctctcaac

SEQ ID NO: 304407 - DNA, 83 bp, Homo sapiens
tgcttgctgtataagaacctggccaacaagattgtccccattgccatccagactgacgacaacagtggagacttggacccagg

SEQ ID NO: 304408 - DNA, 75 bp, Homo sapiens
cagccggaggtccagagatcctgagagcccgagcgcccagcgccgcgccgggagttgcagagtgggcaggatctt

SEQ ID NO: 304409 - DNA, 75 bp, Homo sapiens
atctcagctccctggggataagtccaaagcctttgatttccttagtgaagagttcatcttccttcctgtacagta

SEQ ID NO: 304410 - DNA, 74 bp, Homo sapiens
tgatggtgtccttctcaaggcagtggcccaggccacagcaatcttcctgagctcttttcgggtgccatatgagg

SEQ ID NO: 304411 - DNA, 82 bp, Homo sapiens
actctgacattcctggctgtcatgctcattgttctgaactccacggctccccacaggtgcaggaagccgccgcccagccatg

SEQ ID NO: 304412 - DNA, 75 bp, Homo sapiens
gggcctgtggactgcagcctcggcggtcagcaggtgaaaggtgtagcagtcactcggcctacacccacagcatcg

SEQ ID NO: 304413 - DNA, 98 bp, Homo sapiens
atttgctgtgctatttgacctcttggtttcagagagctccctggaccatctaatggctatgggagatgctattgacctgaaaagtggttctggaaaag

SEQ ID NO: 304414 - DNA, 76 bp, Homo sapiens
aaaacagtaattggagaacttcctccagcttccagtgaacaacatagacgtttgtcctgaatgtggtcacctgaaa

SEQ ID NO: 304415 - DNA, 82 bp, Homo sapiens
catggccctgagtgaatacccagaaaatttcatgttttataggatcacattgacaaaagtaccatggagttttatgagtcag

SEQ ID NO: 304416 - DNA, 100 bp, Homo sapiens
ctcagacaccatggggaaggtgaaggtcggagtcaacgggggcaccaccacgaggcgatttgtgggccataccaaggatgtgctgagtgtggccttctcc

SEQ ID NO: 304417 - DNA, 71 bp, Homo sapiens
gataaattcccggaaccgcgattcggcgtgtcagctgtctcactctgccagaccaacaaaaactgagactg

SEQ ID NO: 304418 - DNA, 100 bp, Homo sapiens
cagaccctggagcctcagttggaagcagccgatccagcctgcggagcctgtggggcaggtggaacacctgcagcaggagactgctgctctgaaaaagcaa

SEQ ID NO: 304419 - DNA, 83 bp, Homo sapiens
ccggcagaacacagcagggcggaggaaagtgcaggtaaatgggcaatgtgctggccacacagctatgcaagctgctagtcaga

SEQ ID NO: 304420 - DNA, 83 bp, Homo sapiens
ccaacctgggattcaaatgaaagtgaaaatgttagaagaactcgtgagccggattgatgggaacggcaggagcagctgatggg

SEQ ID NO: 304421 - DNA, 124 bp, Homo sapiens
tacagttcatgacaatgactttgagccctaccttactggacagtcaaatcagtgtttcaggctgcatgtaccaagtagttcagacgattggctcggatggaaaaaatcttctgcaattacttcc

SEQ ID NO: 304422 - DNA, 83 bp, Homo sapiens
gcagaccgcacacgctagatggccgaaaccaaattgtggctactaatttgccccctgaagatcaagatggctctggggatgac

SEQ ID NO: 304423 - DNA, 97 bp, Homo sapiens
ggcagggctccctctggatgtggaattctccgtccctttccagggagggaacaaagcccacagcaccgatgctggcccgcgagagacattgatgcat

SEQ ID NO: 304424 - DNA, 100 bp, Homo sapiens
ctacaagtgacttaagaagcaaaaaattcaagaaactgactaaagctatatgtggactggaaacgaggtatcagttacttcagcttcgacctgcgcagag

SEQ ID NO: 304425 - DNA, 101 bp, Homo sapiens
cattgctgctaagtacatgctggattgtagaacttctctctctcatccgcacttccactaatagccaagtagacaagctgaccctgtcagggagtgacagc

SEQ ID NO: 304426 - DNA, 75 bp, Homo sapiens
cctacatcatcccatcgggagatgctcatcagatgctagtgatcaaagagaagatgtttatattggaaaccacat

SEQ ID NO: 304427 - DNA, 100 bp, Homo sapiens
taacccttgatcctcctcctaattgcagacaggtgatttggcttctgcacagttaggaggagcaccaaaccgatgggaggttttgtcagccacacctaca

SEQ ID NO: 304428 - DNA, 100 bp, Homo sapiens
cagcctcccaagtagctgggattacagcttccaattgtggacaagataaggaccattgcccaggctgtctatggagccaaagatatcgaactctgtcctg

SEQ ID NO: 304429 - DNA, 115 bp, Homo sapiens
cagatgcattttaaccacagtggacccagacaccggtgtcatgagcaggaaggaaccgctggaaacactgaagagacggagtttcactcttgttgcccaggctggagtgcaatgg

SEQ ID NO: 304430 - DNA, 90 bp, Homo sapiens
ggctccggcgtctgcgcttccccatggggctggcctgcggcgcctgggcgctctgaggatactgaggatttggaattaaagaaatcattc

SEQ ID NO: 304431 - DNA, 100 bp, Homo sapiens
taagtcctgactgcttgggacatgcaggacttgtatatgagtatacattgggtaaactagcgctcctttccgtaaccacgggaggcacggccgagatgta

SEQ ID NO: 304432 - DNA, 74 bp, Homo sapiens
gccaaatttacataattggagtggtgactggagcttttgggtcaaaatgcagatcttcgtgaaaacccttaccg

SEQ ID NO: 304433 - DNA, 101 bp, Homo sapiens
agaaaactggtcaaggaagctctgcaagctttcttcctggtggcagatgacatcatggattcatcccttacccgccggggacagatctgctggtatcagaa

SEQ ID NO: 304434 - DNA, 101 bp, Homo sapiens
attgaagctatgcagtatttctttggcatcactgcagctagtaatttgccttctggattaacaatatgatgcgtttgtgaagtttacgcatgatcaaataa

SEQ ID NO: 304435 - DNA, 100 bp, Homo sapiens
agtacatggagcacgtgtacctcatccacagggcctcctgccagccccagcccctggagaggatgcagcaaatgaagaaacacccctgccgccagtgtga

SEQ ID NO: 304436 - DNA, 100 bp, Homo sapiens
cgccgcaacgccgagcgcaccgacatctgcctgctcaaagatccagacatttaatgtggatgcaccatgccagaccgtggaagatttaacgaatggggtt

SEQ ID NO: 304437 - DNA, 95 bp, Homo sapiens
agaagacctaccagtgggtgcccttccatgggggaccctgatgctcccataagacagaaaatgccccttgatgatctggatagagaagatgaagt

SEQ ID NO: 304438 - DNA, 83 bp, Homo sapiens
cagcaagctccacatccccgtggattttttatcaagcagaaatgcatcgaacaacgagaatcaagatcactgagctaaatccc

SEQ ID NO: 304439 - DNA, 100 bp, Homo sapiens
cgcaactagcggcgggtcgtgggcacctccaggtgacagagctgaatgaacctctctccaatgaagatcgaaatctcctctctgtggcctacaagaatgt

SEQ ID NO: 304440 - DNA, 96 bp, Homo sapiens
cacactgggtagaagataaacaacttttcattaagagaaaccaggagcttttagaaaagcttaacagagcgttccaaaaagaggactctccagcta

SEQ ID NO: 304441 - DNA, 83 bp, Homo sapiens
gttggatatttgcttggaaaaacgtgtgggtacgaccttggttgatggaaatcacaatcttctgacaaagctttctctggaag

SEQ ID NO: 304442 - DNA, 83 bp, Homo sapiens
tggaattctgttcggtgtttaagccagcaatgccaagatctgttgtggttggtttcatcgactacattgtccatccattgtgg

SEQ ID NO: 304443 - DNA, 100 bp, Homo sapiens
aaacaagcctttgaaagatgtcataggatgatggacctagccaaagtgagtctgctactgagactgccatgacactaccaagtgaatccagagtcaatat

SEQ ID NO: 304444 - DNA, 74 bp, Homo sapiens
gagccacctgcgaaggtgtcctcccatactggacccctacaggtattagaaaactactcggatgctccaatgac

SEQ ID NO: 304445 - DNA, 75 bp, Homo sapiens
agacatccagctctaaggagctcaaaacatcctgaggacagtgcctggagtcaccttcaggccattcagaggagg

SEQ ID NO: 304446 - DNA, 75 bp, Homo sapiens
cggcgttcggggaaatggctgcgagaccctagaggcctgcgatcttcagtgtctattggatttttccaagagaaa

SEQ ID NO: 304447 - DNA, 97 bp, Homo sapiens
ggccaacctcaccaacgccatccgcgagactggaggcctccgcttcatccaggtcttcctccagagcatctgcgacggggagcgggacgagaaccac

SEQ ID NO: 304448 - DNA, 135 bp, Homo sapiens
gagaattggtacataatggttgcattaaagcattaaaggatagttcttcaggaacagaacgaacagatgctcccataatactctcagatagtgaagaagaagaaatgatcattttggaaccagacaagaatccaa

SEQ ID NO: 304449 - DNA, 98 bp, Homo sapiens
cactctctctctcacttggattttccctatgccagcagacgccgcctgccctgcagccatgaggcccccgcagtgtctgctgcacacgccttccctgg

SEQ ID NO: 304450 - DNA, 82 bp, Homo sapiens
ccgtgtgcagtataataacctggaacagagagtcccacgaactggctgggtatacagaaatgtccagaggccggagagcgtt

SEQ ID NO: 304451 - DNA, 96 bp, Homo sapiens
ggagcagaagggaggctccaagacctcatcaacaattaaggattactacagcatcccatttcccacacccactactccgctgactgggagggatgg

SEQ ID NO: 304452 - DNA, 100 bp, Homo sapiens
cacaacatgcgatgtttggaaatgatacaattacctgcacgacacatggaaattggactaaattaccagaatgcaggggaattagtatccgataccaatc

SEQ ID NO: 304453 - DNA, 76 bp, Homo sapiens
gaaggcgcttttcaccgcggccatcctgcaggcacagttgccgattacagaagagaagctgaatttggacgacagc

SEQ ID NO: 304454 - DNA, 75 bp, Homo sapiens
tgtcagccttcccagtagctgggaccacagttctagaatacttggctttctctgactcaagtaaatgggtttttg

SEQ ID NO: 304455 - DNA, 75 bp, Homo sapiens
agtgactaccaacgtttggaccagaagtgtgggaagatgggatggtaagaacaaagtctgtctctggaagcacgg

SEQ ID NO: 304456 - DNA, 100 bp, Homo sapiens
ttctgctccacatccaaatgacctgagcgggcccagcgtgccaggcatgggagttatacactgaagtgtcaaacacagtcagattttgggaaagtgacaa

SEQ ID NO: 304457 - DNA, 100 bp, Homo sapiens
ctctgctcatcatcttgatcagatccgggaagccatgaaccggatgcaggtgacatgtacagccatgatgggaatactgatgagccagaatgggtaaaga

SEQ ID NO: 304458 - DNA, 100 bp, Homo sapiens
ctcatgatgatagtatttggagagatgactgacaaatttgttgatactgcaggaaacttctcctttccagataaactgccagggagaagaatgagaagac

SEQ ID NO: 304459 - DNA, 75 bp, Homo sapiens
agagtccacaaagggacctgatgaagcgaagatcaaggtatctccctgggataaaaaagaagaagctaaccagaa

SEQ ID NO: 304460 - DNA, 90 bp, Homo sapiens
ccgcgcacttcgtcatgttcttcgcgccctgccttatgccagcctggaccatcttggaggcagtgtaggatcatggaagaactttgaatt

SEQ ID NO: 304461 - DNA, 83 bp, Homo sapiens
cggcggccgctctgcctgcgcgctgctcctgctctgctacctgaattcggttccctcaaaattataaaggcaggaaagctcaa

SEQ ID NO: 304462 - DNA, 100 bp, Homo sapiens
gtcctccacagggcgacggcggcaggagctcgggaaccgggactgcgagcgggccgacgcctccccccagggtcagctgcgggctcccaggcctaggcgc

SEQ ID NO: 304463 - DNA, 98 bp, Homo sapiens
cgacaggacgttggggcggcctggctccctcaggtcaaaatgcagatcttcgtgaaaacccttaccggcaagaccatcacccttgaggtggagcccag

SEQ ID NO: 304464 - DNA, 74 bp, Homo sapiens
ccggaaggttgcagccgcaggagccccggaggcccaggacacagggtgaccaaagccacgtaatgtccgtagtt

SEQ ID NO: 304465 - DNA, 75 bp, Homo sapiens
tgaagcctcctgcgccggccttgcctcgggtggtggactttgtagcagcaacattgcagagagcctgtgcaagcc

SEQ ID NO: 304466 - DNA, 98 bp, Homo sapiens
ggagacaacctgcagcctcctggcaccaaaggctggactctgtgaagctgagcaggagcagatgcggaagatcctctaccagaaagagtctaattaca

SEQ ID NO: 304467 - DNA, 82 bp, Homo sapiens
caagaactgtgggaagaaattcccagttaagcaggctttgcaaagacagtggtgaagcagtattttccaatttgaagattca

SEQ ID NO: 304468 - DNA, 98 bp, Homo sapiens
gcctgccacatcgggggcaccaccctccatgcctttgcagtttcctgtgcctggtccccgaggaagccaagacctctgccttcctggaggagacaggc

SEQ ID NO: 304469 - DNA, 76 bp, Homo sapiens
ttttgcctcccaccgtgattctgaggcctccccaaccatgtgcaattaacatgacctttgacctgccatcagatgc

SEQ ID NO: 304470 - DNA, 100 bp, Homo sapiens
cttcaaccacctcgagcggctgctggacgaagattttctggcatccttaaatcttgtgtcaaggattggttataatataaccagaaaccatgacggcggc

SEQ ID NO: 304471 - DNA, 98 bp, Homo sapiens
gtggttgtgtggtcgcgtctcggaaaccggtagcgcttgcagcatgtgtctttggtgcaacactaacaaggcttgtctggactacccagttacaagcg

SEQ ID NO: 304472 - DNA, 75 bp, Homo sapiens
cagaatcactattaccgcaacaataggctgttcggctcttgaatcccagcgatgaaaccaggaactcactttccc

SEQ ID NO: 304473 - DNA, 99 bp, Homo sapiens
caatgttatatcatggaacccaggaggaacgtcaaaaattgggttggaaatcgtgccaaatgggataacattgacgatggactaccaggggagaagcac

SEQ ID NO: 304474 - DNA, 100 bp, Homo sapiens
tcaggcaaatgagatcatgtggaataacttaacagcagaaagtttgcaagtaatgtcagacatatttccaacatttgggtcaaaaccttgtccaacaaga

SEQ ID NO: 304475 - DNA, 75 bp, Homo sapiens
ttttttgcctttgttgattaactggacaaattcagtttcaccagtgatcattaaagaatgggcagcttacaaagg

SEQ ID NO: 304476 - DNA, 90 bp, Homo sapiens
cctcaatgacaagctgtacgaaaagcggaaggtggcagcgctggagatcgagaaggtctggaacagaatctgacagtgatgaatcagtac

SEQ ID NO: 304477 - DNA, 96 bp, Homo sapiens
gagaccgtgaccgagagcgtgaccgagagcgcgaatatcgtcatcgttagaaggcatctgcatctgggaccgacctcctgggctggctgatcaaag

SEQ ID NO: 304478 - DNA, 100 bp, Homo sapiens
gatggaagaaccattgttagtgaacgtggacaaagctgttgtctcagggagcacagaaggtctaaaattcccaggactccacagctttgcaccagataag

SEQ ID NO: 304479 - DNA, 80 bp, Homo sapiens
ctttctggcctggaggctatccagcgagattgatggcaacgctctgctgttgctgaagagtgacatggtcatgaagtacc

SEQ ID NO: 304480 - DNA, 100 bp, Homo sapiens
ctctacggccgcgcgctgcgggtgctgcaggcgcaaggggagccaggaagtgggacggaaagtgacacttctccagacttccacaatcaggaaaatgagc

SEQ ID NO: 304481 - DNA, 96 bp, Homo sapiens
ggagattcggatgggtcagatggctatgggaggttactatgggcaaggcggcatgagtggaggtggatggcgtgggatgtactgaaagcaaaaaca

SEQ ID NO: 304482 - DNA, 98 bp, Homo sapiens
gcgctatgtacgccctcttcctcctggccagcctcctgggcgcgggttgaaatcacaaagattagacacctttttagataggtgttcttcagcaccac

SEQ ID NO: 304483 - DNA, 50 bp, Homo sapiens
ctcggcctctgccggagaaacagggctgcgaataaaggagaccaaggaag

SEQ ID NO: 304484 - DNA, 75 bp, Homo sapiens
aacgtggtatactcgcagacaacccaaccggtatacaatgaacacggctctagataaggaggggcagattttctg

SEQ ID NO: 304485 - DNA, 73 bp, Homo sapiens
aaagattttgcatctagaggaattgaaagtggcaattttggaggtagccccggttatggaggaggaagaggag

SEQ ID NO: 304486 - DNA, 87 bp, Homo sapiens
gcgacccagcccccgcccgcagcctggacgacatcgacctgtccgccctgcgggttttgaacgaagaatgtgatcagaactggtaca

SEQ ID NO: 304487 - DNA, 90 bp, Homo sapiens
gcaggccaggatatcagccactggtttgatccaaagaccagagactttctccggatctgcgctgacctcttccgcctggtgccgttcctt

SEQ ID NO: 304488 - DNA, 85 bp, Homo sapiens
cgggccagggccggttctgcaccatcttcaggtcctactccaggggcgctcagggattaatgaaaatcaagttccatcctcagac

SEQ ID NO: 304489 - DNA, 80 bp, Homo sapiens
gaacgaggcaaggagctaaagcagcgtgcgttcagccctgggagcactgcagtttcctcctgaaggctggctccggctct

SEQ ID NO: 304490 - DNA, 106 bp, Homo sapiens
ccgacctcgacgtcttgcctgtgtcccacttgttcgcggcctataggcttgggcactgtttaaaggaaagttccgagaaggcatcgacaagccggaccctcccacc

SEQ ID NO: 304491 - DNA, 100 bp, Homo sapiens
ggaggaggagcagggcaacatggaggccatgagcgaccgggtccgcaaagccacacagcaggctcaggcaaagcaacgagctggcagagctgggagaaca

SEQ ID NO: 304492 - DNA, 100 bp, Homo sapiens
ctatcctaggattacctgaaggtgaaacagattgagccagaaggaagacaatgctgctctccttaaggcggcagcaaataggtgaaagattgaatgaatg

SEQ ID NO: 304493 - DNA, 100 bp, Homo sapiens
agctgttcacttcagtcctccgactctgtgtctctagtgatccctgaaaagttccagcatattttgcgagtactcaacaccaacatcgatgggcggcgga

SEQ ID NO: 304494 - DNA, 98 bp, Homo sapiens
gagccagtcctagagaaggatgacctcatggacatggatgcctctcagcagcccctcttggagtctgtgccttatgaagaagcactggcaaaccgccg

SEQ ID NO: 304495 - DNA, 71 bp, Homo sapiens
agaacacaagcgtggtattgtccatgaatagtcaaaagagattcttggtgccaccattgagaactccagga

SEQ ID NO: 304496 - DNA, 75 bp, Homo sapiens
tcgcccgtccccctgccccgttcacaatgagcggttggttccccgaggcgtacgtgaaggctctggaggaggggc

SEQ ID NO: 304497 - DNA, 98 bp, Homo sapiens
cagaaaatgacagatggccgtggattcagattcccaaatgctggaaaatcctctttgctaagttgtgtttctcatgcaaaacctgcaattgcagatta

SEQ ID NO: 304498 - DNA, 123 bp, Homo sapiens
ttcactctacctggatgcattttaactaatcctgaggacttcatccggtcaccatctacctattcttcaaatgaattctccaagtcccggctgcttatgtacctatcgagccagattcaccac

SEQ ID NO: 304499 - DNA, 74 bp, Homo sapiens
ttccaaagcacaggaatctcactctgttaaagctggtctgttctaactgagggatgaagatgcccctgctaaga

SEQ ID NO: 304500 - DNA, 83 bp, Homo sapiens
tcagagagaggaagccgaaaacaccctgcaatctttcagacaggtttacccaaggtccagcctagcccctaggcaccatgtcg

SEQ ID NO: 304501 - DNA, 100 bp, Homo sapiens
gccaaattgggcgagggcacaaaataaccacttaccccttctcaccgaggaagagcgggagaaaggacaagttggatggcttgaggactggtactaaaag

SEQ ID NO: 304502 - DNA, 100 bp, Homo sapiens
ggtaggccacctgttgagacctggtgaaagatcaggtataataatgttctgcagtgaaaagaaattgcgtgatatccttggaacagaagatcttattgtg

SEQ ID NO: 304503 - DNA, 75 bp, Homo sapiens
ccctagaccggtttttagtccattgactatgcagcctaatgggaaatgtttcaacgtgcgcaagcgttgcggcgg

SEQ ID NO: 304504 - DNA, 96 bp, Homo sapiens
gctgctgctgcacgggcggctgctggcgattcctgggaacaccaccatggagggcctggcctttggcggtggacagtctgtggctgggtgggaacg

SEQ ID NO: 304505 - DNA, 51 bp, Homo sapiens
tcccggtgtggccacgagtcgggtcaaaatgcagatcttcgtgaaaaccct

SEQ ID NO: 304506 - DNA, 100 bp, Homo sapiens
cgagccaggaactgcgcagcctcttcgagcgccgcggacgcgtcatcgagtgtgacgtggtgaaaggacctaaagtgatccagacttctgcggctaattt

SEQ ID NO: 304507 - DNA, 123 bp, Homo sapiens
acagacatatcgctgaccgaatgggaaccccacacctgcagaaggtccttaatcagttggggttagacttggaggaactcgaggagatagaagaagatgctggccttgggaatggaggcctgg

SEQ ID NO: 304508 - DNA, 75 bp, Homo sapiens
cagcacgaaagagagaggtccgtctaatgaagaacagtcgacctcttcaggatggagatattatcaacattgatg

SEQ ID NO: 304509 - DNA, 97 bp, Homo sapiens
ggacacctgtgtcagcatgtgggacctggttctctccatcgccttgtctgtggggtgcactgtctgcgctcctcagaccaccggcaggtgaacagcc

SEQ ID NO: 304510 - DNA, 100 bp, Homo sapiens
cacgcagttactagtgtctgaagatccaaaggaaggaggagctaccaccaaagagtcagctctgatgctgttctttgacaagtttgcaaacatcgtgccc

SEQ ID NO: 304511 - DNA, 50 bp, Homo sapiens
ctctgtcgctgagtaacgtcaaaggggctttgaccacgacctttgaagag

SEQ ID NO: 304512 - DNA, 76 bp, Homo sapiens
tttcaactggctgcccccttctggcaagccaatggggtacaggccaagacaatgcaaactccagtgaacattcccg

SEQ ID NO: 304513 - DNA, 100 bp, Homo sapiens
acagccatgcaaaggcaggggaggaagccacctcgaggtggacacctgcgcaggtgtgtgccctccggcccctgaagcatggccagcagcggcatggctg

SEQ ID NO: 304514 - DNA, 71 bp, Homo sapiens
atgattagagacatactaatgtacatgcaggcttatggctatgggccatacggtggtgcgtacccgccagg

SEQ ID NO: 304515 - DNA, 97 bp, Homo sapiens
ggcgagattgcctgacccaggcctgctcggccctcacagggtggagccgccaccaaaatgcagattttcgtgaaaacccttacggggaagaccatca

SEQ ID NO: 304516 - DNA, 100 bp, Homo sapiens
tctttctccgcggcgaaggtgaagagttgtcccagctcggcccgcgggggagccccgggagccgcacggtatcagcagatgttgcacacaaacttggtat

SEQ ID NO: 304517 - DNA, 82 bp, Homo sapiens
agcaggaggagctgctggcgcccgcagatgacctgcctagagctggaacgttacctccagagcgagccctgctatgtttcag

SEQ ID NO: 304518 - DNA, 90 bp, Homo sapiens
ctcaggatggtttccaatttatgacaccatacatgatcaaaggtccatcatcaaaacaccaaagactcaagacacagaagatgatgaggg

SEQ ID NO: 304519 - DNA, 100 bp, Homo sapiens
atctaatttagatcttagaaaagagttgtctgaaccaagcagcacgcgtatctatgccattgccaaggccatgaagaagatgtacaaggcgtgcctcaag

SEQ ID NO: 304520 - DNA, 82 bp, Homo sapiens
agacagtcctcgtcagcactgactttcagctatggaatcgtattttcatctcagcctagtgacgatgaatcaagtagtgatg

SEQ ID NO: 304521 - DNA, 83 bp, Homo sapiens
aggagctgctgcgcctcaaagccaaggggatatgagactttctactcggaatatcctgagtgttgcgtggatgtaaaacccat

SEQ ID NO: 304522 - DNA, 101 bp, Homo sapiens
aacaacccgttcttgcctcaggccagtcgcctccaggccaagagggatccttcacccgtgtctggatggcttaaattccttggtccttgatttagattttc

SEQ ID NO: 304523 - DNA, 74 bp, Homo sapiens
ccagcgagccgatcctcagcgtcctgatgtggggggtgaaccacacgaaaaagcttgtggtgaaggggggcaaa

SEQ ID NO: 304524 - DNA, 98 bp, Homo sapiens
agctcatcggggacctgacccagtgtgtggactgcgtgattcctccagaggggtccctcttgcagatcgtctcctctgcctccaccgacctccaggac

SEQ ID NO: 304525 - DNA, 75 bp, Homo sapiens
ccgccagatcaacctggagctctacgcctcctacgtttacctgtccatgtgctacctgggcgatgccttccgctg

SEQ ID NO: 304526 - DNA, 100 bp, Homo sapiens
agggcactacaccattggcaaggagatcattgacctcgtgttggaccgaattcgcaagctggacctagatgtgaaggctggtggaggctgtgtaatgacc

SEQ ID NO: 304527 - DNA, 98 bp, Homo sapiens
gcgcgtgagcgctggagcttcatccgggcacttcataagggatccgcagctgctcccgctctccaggctgcagaagatgtcaatgttactttcgaaga

SEQ ID NO: 304528 - DNA, 48 bp, Homo sapiens
acgacatggcctccgctatgaaggcgacccaacatgagtgaagtttcc

SEQ ID NO: 304529 - DNA, 51 bp, Homo sapiens
aacacaaaccacagatcctcatgatggtcaagactgatacagttcttatat

SEQ ID NO: 304530 - DNA, 100 bp, Homo sapiens
gagatgtacatcaaggcatttatatgagtccaaaacactttgtgctactctgtggggctttggaaaagcatgttaaatgtgatattagggaagatgcaag

SEQ ID NO: 304531 - DNA, 75 bp, Homo sapiens
ggccgacttcgatgatcgtgtgtcggatgaggagaaggataagttctgaacgtcgaaaagaaaagtctcgagatg

SEQ ID NO: 304532 - DNA, 100 bp, Homo sapiens
aaaacaatagctcaaggaaacctttccaacacagatgtccaagctgccaatggaagccgtgaggtggtggatgaaggcttgatccctggagatgggctgg

SEQ ID NO: 304533 - DNA, 51 bp, Homo sapiens
cctccggagtagctgggattacagggaagttctggcacatcgctgacctgc

SEQ ID NO: 304534 - DNA, 100 bp, Homo sapiens
tgaagacggaggcagctccacactgtgaactaagcgtctgtagaggcttctggtgaaatcgcattatgcaagactggatttcctgaagatgtttacagtg

SEQ ID NO: 304535 - DNA, 82 bp, Homo sapiens
ccagaatttaccaaatcagagtatgcagtctgtgctctaaggaatgacattcttgtttcagtaggtggcaagtgggagaaac

SEQ ID NO: 304536 - DNA, 115 bp, Homo sapiens
tgctactgctgtttctggtgtcttgacaaatacctgctccatctcaaccagattgcttccaagtatgatcatcaggcagaagaagatcttcgcaattggatagaagaggtgacag

SEQ ID NO: 304537 - DNA, 74 bp, Homo sapiens
gataaatgtcagaatcgcataacccccaggatcagcacatgccaaaatttaattcaatttcaattagtggatac

SEQ ID NO: 304538 - DNA, 101 bp, Homo sapiens
aagcagatcttcttttggagcagcagagactgtcttataaaatctgctttaggagacagaactgggcttgaagccttgtctttcaaagacaaaatccatgc

SEQ ID NO: 304539 - DNA, 75 bp, Homo sapiens
tccgcaccccggggtcccaggaagggcggcccagctgatccagtgtctctttgggccacttcaggcggggccgag

SEQ ID NO: 304540 - DNA, 75 bp, Homo sapiens
gaggaatctggattgtcacctttgctgcaaaaaattacggacattttgctgtcagctggaagagctgatctgctg

SEQ ID NO: 304541 - DNA, 82 bp, Homo sapiens
cccgggctaagcgtcggcaagttctgtagagaaactcgggcaacctttggaagactatgaccgtctgaggcctttatcttac

SEQ ID NO: 304542 - DNA, 100 bp, Homo sapiens
gctgagaggggctgcggccggagcgggcggctgagacaaaggcgacggtccttggatgtggctgtgttgcccaagctattctcagtcgaggacgttttgg

SEQ ID NO: 304543 - DNA, 119 bp, Homo sapiens
tgcaggtattgggagatccacagctaagactccaggaccctctggaagcctagaaatggctgcatttgatgccagaaggcaaacacaacctgcatttgcgttttgcagatgaattcaac

SEQ ID NO: 304544 - DNA, 73 bp, Homo sapiens
ctgaagtcggtgtctgctgcgttcacggcaggattcggttaggagtgacagtgaggattcacatttgggttat

SEQ ID NO: 304545 - DNA, 83 bp, Homo sapiens
atcttaattgggcacgaaagagactatcttgctaatcatggccggttaaatgagtctgaagccaggcgaaaattctggcaaat

SEQ ID NO: 304546 - DNA, 100 bp, Homo sapiens
cttacacttctcaggagtggggaaggtgcgacaggctgcatgcggtggcacgggctgtgcagtgttaaacgtgccaccctccaaaccagaatgcggcatc

SEQ ID NO: 304547 - DNA, 75 bp, Homo sapiens
ctctgggatcccggccaccagcaattgtccgttggttgaatctggcgatgtggaacccatggatatggagggctg

SEQ ID NO: 304548 - DNA, 74 bp, Homo sapiens
gcgaagagcggcctcctgaaggaggggaagggacgtgggggcggccacggcagctgtttggggctcagctaagt

SEQ ID NO: 304549 - DNA, 90 bp, Homo sapiens
gccagatgactttaaggccagctccaagatcaaggtcaacaatcaccttttccacagcgacagcccatacagtgagcacggtacattgga

SEQ ID NO: 304550 - DNA, 50 bp, Homo sapiens
gcccagcgtgctcaagtccaaggcagaggaatgctttaattctccatatg

SEQ ID NO: 304551 - DNA, 51 bp, Homo sapiens
ccaggagagaatgctgacagtcctgcagattcctgttgccatcaccctggg

SEQ ID NO: 304552 - DNA, 83 bp, Homo sapiens
ctctctctttctggcctggaggctatccagcatgttagtaggcaggaagaggcggagggagagctcagtgaaggagaacactg

SEQ ID NO: 304553 - DNA, 83 bp, Homo sapiens
ttaaccgagatcaacctgtctggaggcagtgtcgcattgccctgaagaaggccaactggcccgaatccaaaatgttatccagg

SEQ ID NO: 304554 - DNA, 98 bp, Homo sapiens
gatgaagctgcagaaccaacgaggtggccgaatcttccttcaggatatcaagctgcagaaccttggcctgaaaatgctacattatatcagcaattgaa

SEQ ID NO: 304555 - DNA, 100 bp, Homo sapiens
ttgacattgatccgatggtggttactgggtgtccgcaatgttgccagtgtctgtctgcagattggctacccaactgttgcatcagtaccccattctatca

SEQ ID NO: 304556 - DNA, 84 bp, Homo sapiens
agccgatccagcctgcggagcctgtggggcagatgaggtggaaagtgagaaatggtacctgtctacagacttcccttcaacatc

SEQ ID NO: 304557 - DNA, 75 bp, Homo sapiens
tcagtcattttactgtcaagacatttcttcggcattctgcaacagagtgttgcggagataggaacatgggagaga

SEQ ID NO: 304558 - DNA, 75 bp, Homo sapiens
gaagagttgtcccagctcggcccgcgggggagccccgggagccgcacggtgtgcaactgaggaacatggctcaag

SEQ ID NO: 304559 - DNA, 83 bp, Homo sapiens
aaaatgaaagaaaccgctgaggcttatttgggaaagaagcttgtgaaaaaacagttgaagaagcacctttcaggagaggagca

SEQ ID NO: 304560 - DNA, 87 bp, Homo sapiens
caggggaagacccaaaggcagcaaaaacaagagtccctctaaagcagctcaaaaggctgatctactggctgacctttgccgtgggcc

SEQ ID NO: 304561 - DNA, 88 bp, Homo sapiens
agaaccaggagcctcttccatacatgagacgcaaacatgcagatctttgtgaagaccctcactggcaaaaccatcacccttgaggtcg

SEQ ID NO: 304562 - DNA, 100 bp, Homo sapiens
ggctgactgtcttcggagtcggctgaaagtacccatggcagacaagcctggtaacacagtgaatttccggaagctgctactgaaccgttgccagaaggag

SEQ ID NO: 304563 - DNA, 75 bp, Homo sapiens
ccttttgcctcccaccgtgattctgaggcctccccaaccatgtgcaattggagtgcatccgccccaacccttttc

SEQ ID NO: 304564 - DNA, 105 bp, Homo sapiens
catgctcctactatccatttcaactacagatactttgaagtagaagaagctgatgcctatggaccagctctcattgaacactgtcttttagaaaatggattctcg

SEQ ID NO: 304565 - DNA, 100 bp, Homo sapiens
gtgcccctacgtgcacaacatcacccgcaagggtactggaagatgaaagagactatacaagggaccgggtcctgggggcctgagcctcctggacccggca

SEQ ID NO: 304566 - DNA, 100 bp, Homo sapiens
caccagaaggaaccaattccggacacataacaagcagcagtgaggacaccaaagataagctgtcattggaaggaatagtggtacaaagagctgaatgccg

SEQ ID NO: 304567 - DNA, 97 bp, Homo sapiens
tcaaagttaatggagccaaatttaataaagttagatattatacagcaagaatatattaatgattatggtctgatccaaattgaactaacaaaggctg

SEQ ID NO: 304568 - DNA, 101 bp, Homo sapiens
gaggctgaggagaggggagcttggggggcgcctgctgccaagggatttttagactctgaggagcagttggagctaatccacattatggaaatggaaaccac

SEQ ID NO: 304569 - DNA, 100 bp, Homo sapiens
gatgtggaacggagtcgcttcccctactgcgtggtgtggacgcccatcccggtgctcacgtgggacgctcgtccctgctggtggggaatctcaagaagaa

SEQ ID NO: 304570 - DNA, 99 bp, Homo sapiens
cagacagaacagttaatcctcaatttaagcctgatctaacccctagaaacaggtcttgctcagtgtgcagaactctgctggcagctgagaggggaagcc

SEQ ID NO: 304571 - DNA, 74 bp, Homo sapiens
aacgccttacccttcgctcccagcccagttgctggaagtgcaggtgcgggaatctctggcaaagtccagccagg

SEQ ID NO: 304572 - DNA, 74 bp, Homo sapiens
accaagaacgtgagcaagcccaggcacagccgacgccgcggggtgagatcggactggaactgttcggctgcgac

SEQ ID NO: 304573 - DNA, 94 bp, Homo sapiens
tctgattgagcaaaccacagctctcaacaagcgagtagaagccatgaaacagggtcattatcgttattgtgatgctctttctatgctgggggaa

SEQ ID NO: 304574 - DNA, 102 bp, Homo sapiens
cgtgtgtactcctcgccatggctcagctccaaacacgcttctacactgataacaagaagattggagcaaaacatcaggagctaagggaaaagcaggcaagag

SEQ ID NO: 304575 - DNA, 87 bp, Homo sapiens
tttgtggtcttcatttgtgaatacataggttcttgattattacagacctctttctgaaaagcccggaattggtacaagccatgtttc

SEQ ID NO: 304576 - DNA, 75 bp, Homo sapiens
acgacccctatgacttcagtgacacagaggaggaaatgcctcaaggtggataatattaatgcagctgtgatggat

SEQ ID NO: 304577 - DNA, 100 bp, Homo sapiens
cccattgctctgatggccttgaagatgatggaactttcagaagaggtgctgacacctgatggaagaccgattcaggaattacatgaacgacagccttcgc

SEQ ID NO: 304578 - DNA, 82 bp, Homo sapiens
tgtgatccagtcttgggtgacaagtgggacggcgaaggctcgatggtactccaaagattcaggtttactcacgtcatccagc

SEQ ID NO: 304579 - DNA, 100 bp, Homo sapiens
tggagacggcctgggtgctggcgaagcggaggccggagttcatggcctcccacgggaacgacgccgcgagagccaggtttgagtccaaagtaccctcctt

SEQ ID NO: 304580 - DNA, 100 bp, Homo sapiens
ccacaacttattcttcaactctacattcttctggagcatggacaagcgaatttcagtcagtattttctctgtgggcagttctttttgttttgggaagact

SEQ ID NO: 304581 - DNA, 98 bp, Homo sapiens
ttgaggcccttcttgtgtatctggagaaaatagagtctgcgggccaggcatcgacatccgcaacgactatcagcagctgaagcgcctggagaactgca

SEQ ID NO: 304582 - DNA, 75 bp, Homo sapiens
aaccttgtgggatgtgaaaactctgttactgaaggctttacaggaagtatggtgctggcatctgcttggcttcta

SEQ ID NO: 304583 - DNA, 100 bp, Homo sapiens
gtgcgatctctgcggtggacgaggtggactacaagacggctgaggagaagtacatcaaggggccttcgctgagctaccgttttctggatatgccgcagaa

SEQ ID NO: 304584 - DNA, 100 bp, Homo sapiens
ggaagcggaggaggcccctgcagaaacagcgctgatcccgctggccctggaaggcacggacgtggggcagacaaaggcagcccaggcccttgccaagctc

SEQ ID NO: 304585 - DNA, 100 bp, Homo sapiens
aaagaggcgaaaggaagcaagcagttcagaagagccaaggaataaacatgcaatgaacccaaaaggcagaattacctgattctaggacaaaggaaattga

SEQ ID NO: 304586 - DNA, 87 bp, Homo sapiens
caggagcttccaccgctgctgctttctctgcaaaacagcacttcttctcagtctcagacaagtactgcctccagaaaagccaattca

SEQ ID NO: 304587 - DNA, 100 bp, Homo sapiens
ccccaagtcctccttgccaggccttcaaccactatctcagtgcaatgggttgctgaaaagccaggagtcaaaatgactgagcgctttgactgccaccatt

SEQ ID NO: 304588 - DNA, 100 bp, Homo sapiens
gatttaatcactgtgcaatgaccgtgaactgtacagttacctccgtgtgtcacaggaagactctttgagagggtccaagcctggtaagaatgtccagctt

SEQ ID NO: 304589 - DNA, 82 bp, Homo sapiens
ctgttgacatggaaaacaaggaaaatggctctgtcggtgtaaaaaagagctcttgtccctggcaaagcgaaagcgcagtgac

SEQ ID NO: 304590 - DNA, 82 bp, Homo sapiens
ctgagactttctccttcaagtacttggcagatcactctcttagcaggtgctttgcaagatatcaccttgtcacagcagaccc

SEQ ID NO: 304591 - DNA, 83 bp, Homo sapiens
cgcgggcactgctttccactcggctcctgtcgtccgttctctcaggctcccgttcagagtctgtagaagaggcgacaccaggg

SEQ ID NO: 304592 - DNA, 76 bp, Homo sapiens
ttatttcaacactgacaagctagttactagagggcctacaaaggggtgctacatccattgtgtacagatgcaaaca

SEQ ID NO: 304593 - DNA, 75 bp, Homo sapiens
ggcccgcgaccgtccgccagtcgtcccgagggtgtccgtgccgctgctgaagacgctggaccacgtgctcaccca

SEQ ID NO: 304594 - DNA, 100 bp, Homo sapiens
attggtcagctatccagaatttctgtgagcaggtgaacactgaccccaatgggatatcaagtttccaagccagaggtgatcttcaaattggagcaaggag

SEQ ID NO: 304595 - DNA, 88 bp, Homo sapiens
gtattacagctggctgatggccagatatttaagtacctttgggctccctagatctttagcttctactcccactgctcctaccactcca

SEQ ID NO: 304596 - DNA, 74 bp, Homo sapiens
aaggcactgctttttcatgacggtcagcccaaggccaaccccactgtcactctgttcccgccctcctctgagga

SEQ ID NO: 304597 - DNA, 100 bp, Homo sapiens
ctggttggggccaatggcatttgggggcagcgagccgtggacatcggggagcgcatagtgtcctgcaggccatcaggaagaccgtgtgtgactgggagac

SEQ ID NO: 304598 - DNA, 51 bp, Homo sapiens
ccgggagatgcagccagtttacagagatggatttataaaagctattggtcc

SEQ ID NO: 304599 - DNA, 97 bp, Homo sapiens
atttgatgttgccaacaacggctcttctcaagttcctgctccagcgtggctcctggactggcgccagatgctggccctgggggtttcaatccaagca

SEQ ID NO: 304600 - DNA, 51 bp, Homo sapiens
ggatgattattgtatttcgccgtcaacagcacccgacagctacaaagtgca

SEQ ID NO: 304601 - DNA, 101 bp, Homo sapiens
ggccgcgcgggccgggaggggacggccgccggagccgcgaggccaagtcgcaatggaagaagagatcgccgcgctggtcattgacaatggctccggcatgt

SEQ ID NO: 304602 - DNA, 80 bp, Homo sapiens
tcttgaatgactggaaactgattggaaactctttgggaaagccactcgaaaaggccctcgggaccaaggatcacgtcatg

SEQ ID NO: 304603 - DNA, 101 bp, Homo sapiens
gatccggctcctccagctaccggcccaaggccatctacctggacatcgatggacgcattcagaagaacgacaaatcctccacccctgggctcaagtccaac

SEQ ID NO: 304604 - DNA, 98 bp, Homo sapiens
gaaagctgcccaactaagacctatctccctaccaggagtttctagcactgaaggtttcagcacagccagtcccacaggagcccagcagaaaagattac

SEQ ID NO: 304605 - DNA, 100 bp, Homo sapiens
cgctgcagacccgcgacccggagcagctcggaggcggtgaaaccctgagagatggttggtgccatgtggaaggtgattgtttcgctggtcctgttgatgc

SEQ ID NO: 304606 - DNA, 80 bp, Homo sapiens
tagaagaattcatgctcatccggataacgaaggaggcccaacttcattcaataaggagcctgacggatttatcccagacg

SEQ ID NO: 304607 - DNA, 75 bp, Homo sapiens
gcgctgcgcggcgcggcggccgggccctcgagacggggacggttcgtgctggccgtgggcagcgccgtctttgat

SEQ ID NO: 304608 - DNA, 75 bp, Homo sapiens
tggaggagcagttgtctgatgaagagaagtctgttggacgagctcccccagtcagtgcttaaatgggctccttct

SEQ ID NO: 304609 - DNA, 132 bp, Homo sapiens
tcgactccctagcagcagccgccgccagagaggcccgcccaccagttcgcccgtccccctgccccgttcacaatacaatgcagatcttcgtgaagactctgactggtaagaccatcaccctcgaggttgagc

SEQ ID NO: 304610 - DNA, 83 bp, Homo sapiens
cggcgcctcggccggggcgctcacggccacggcgctggtcaccggggtctgcctggttggaatcgaagcctcttaaaatggca

SEQ ID NO: 304611 - DNA, 90 bp, Homo sapiens
caacacgcccctgaggacggttgacggctcccccatgatgaaggcagccggcacagtcttcactaccgtagaagaccttggctccaagat

SEQ ID NO: 304612 - DNA, 98 bp, Homo sapiens
cagagcacgagcggatcctgcgagagatcgagagcactgacacggcctgcatcgggcccacgctcagggcgtctctggccgagcctctttttgtggaa

SEQ ID NO: 304613 - DNA, 90 bp, Homo sapiens
tgctgcctgcccagaggccacccagcctcctagacagagcccccctccatgcgcctgaaggcccgacccagcagccctggcttttccgtg

SEQ ID NO: 304614 - DNA, 90 bp, Homo sapiens
agatcctcgacgagagcagatggctgcagcagctgccagacctattaatgccagcatgaaaccagaccctatcagatttggatatgtcct

SEQ ID NO: 304615 - DNA, 100 bp, Homo sapiens
tgcagcccgagacgctgaatccaggatagaggtcactcctggaagcaaggcggctctagctaatttatgtattggagatgtaatcacagccattgatggg

SEQ ID NO: 304616 - DNA, 100 bp, Homo sapiens
gcggtgtggaacgaggagaagccgtcgcagcctcgggagctgcggccgccgcggcattcggggaatctgcagggcagagtaatcaagtcagaggattata

SEQ ID NO: 304617 - DNA, 90 bp, Homo sapiens
aagctgctgagctgtgatggtgatgacgaggtactataagatctccgtggtgctcatgtgctttgtggtccccacgctggtgccctggta

SEQ ID NO: 304618 - DNA, 98 bp, Homo sapiens
ccgcgtacccgggacccgcccgcccgcgggagcctgtggacatctctacagcaatgagtgaacgggcacttgctcagaaaagactcagtgagaatgca

SEQ ID NO: 304619 - DNA, 100 bp, Homo sapiens
ctggcggcgctgccgctcccgggcggccgcgggcggcgggctgacgcacgaggcacacaggaaggaggtggagcaggtgtatctgcgctgtgcggcgggt

SEQ ID NO: 304620 - DNA, 75 bp, Homo sapiens
ctctcccaacatggcggcctcaggatttgcagatttacagaatggctgcacattaatggaaagagaagcataaac

SEQ ID NO: 304621 - DNA, 50 bp, Homo sapiens
ggatggattcctctggatggagaggcaccccctgtaatggcctatcctgc

SEQ ID NO: 304622 - DNA, 90 bp, Homo sapiens
attgcgtgaaatatctgaatctacccccgtggaagtccactggtctccacataatgaaactattctggcttcaagtggtactgaccgccg

SEQ ID NO: 304623 - DNA, 146 bp, Homo sapiens
gtcggcggtgggaaggcgatggcggatttagataaactcaacatcgacagcattatccaacggctgctggaagggctgtgcctgcgcccagaagcagctacacttcatggaccagttgctcgataccatccggagcctgaccattg

SEQ ID NO: 304624 - DNA, 97 bp, Homo sapiens
gattacccacttcgagtcctttattgtggaggcacagccatcatcacagaagagcatgcagccatgtggactgacgggcgctactttctccaggctg

SEQ ID NO: 304625 - DNA, 111 bp, Homo sapiens
ggacactgaagccacccaggtgtaccccaagctgtacttgtcacctcgaattgagcagcaggtccgatcagaaaacaaagaaaagagtgcagtgatgtcatttacagttac

SEQ ID NO: 304626 - DNA, 100 bp, Homo sapiens
tcctggtcctgacgcccccctcccgcccggaaagctgcccagccaccagcaaccccccagcatgtcaatccaaagaagcaaacaataggtaattcttgta

SEQ ID NO: 304627 - DNA, 100 bp, Homo sapiens
gagcaatatggaaatcactgaagagctccgccagtactttgcagagaccgagaggcatagagaagaacgacattccaggagggcttcgtgtatggacctc

SEQ ID NO: 304628 - DNA, 75 bp, Homo sapiens
gcaggtgcggaagctggtgggcactcagcaccctctgcttaccacagccagtctggctcttgctgattgaattcc

SEQ ID NO: 304629 - DNA, 74 bp, Homo sapiens
catcatcttgtggagtgttcaggatgggggaagtggaagtgaaattggcttctccagtgacagtgatctggtat

SEQ ID NO: 304630 - DNA, 99 bp, Homo sapiens
tgctgaactggggccgcctgcggaagaagtgcccgtccacgcacagcgaggagattggagacccacagttggtgatctgtatggactgctcggcagaca

SEQ ID NO: 304631 - DNA, 75 bp, Homo sapiens
tccatctcccgcatctacctggctaaggacaagaccactggccaatccaaggtctcctcctcggcttcctcttcc

SEQ ID NO: 304632 - DNA, 139 bp, Homo sapiens
aggaaaactaggaatctatgatgctgatggtgatggagattttgatgtggatgatgccaaagttttattaggtgcttttgaagatgatgatatcacgcacgttgaaggaagtgtagatcctattcgagatatagaaata

SEQ ID NO: 304633 - DNA, 99 bp, Homo sapiens
aggtgctggcacatgagatcgagcggctgcagatggagatgaaggaggacgacgtttcttttctcatgggaagtgttcgccagttactacatgaaaaga

SEQ ID NO: 304634 - DNA, 96 bp, Homo sapiens
gtggatgaagttgttcattgtttgtcaccacaaaaaggacagttactgcaacaaggaggtatacaataaggagaatcttttcaacagcctgaacta

SEQ ID NO: 304635 - DNA, 75 bp, Homo sapiens
tgggattttcagctcgatacaatttcacacctggcatgcatatcattctgtttcaactccccctgtttaccctcc

SEQ ID NO: 304636 - DNA, 100 bp, Homo sapiens
aactacaaaagactcagagactatataagtagcttaaagatgacaccttgcattccctatttaggtggagccgccaccaaaatgcagattttcgtgaaaa

SEQ ID NO: 304637 - DNA, 100 bp, Homo sapiens
ttcactgtgcatcgcccactccagaagtagcatggaaatggagggcatcttcaaccacaaagtgggcaggcttggctgaaatgagaactgctgaagcaag

SEQ ID NO: 304638 - DNA, 90 bp, Homo sapiens
cagattttggtttaatatctgattgggacaacattcagacccatttccagtcatgacgcttctctgaagtagctttggaaagtagagaag

SEQ ID NO: 304639 - DNA, 74 bp, Homo sapiens
ggacctggacccggacccaaagtgccatgtctttaatgagtcccagctctcactgggtggccagagctgtgcag

SEQ ID NO: 304640 - DNA, 82 bp, Homo sapiens
agtacgagctggttaggaggcacagggcgtcggacctgcacgagctgtctggctgatcagctgaccgaagaacagattgctg

SEQ ID NO: 304641 - DNA, 51 bp, Homo sapiens
acgagagctccgtgcgggtggctgtcaggtatgcaaccactcatgtattcg

SEQ ID NO: 304642 - DNA, 75 bp, Homo sapiens
ggcttgtccttgctggtgcatgcgtcgtcggcctctgggcagcaggtagcccctgaagaagatgaaaggaaaaag

SEQ ID NO: 304643 - DNA, 100 bp, Homo sapiens
cgagacgctcctgggctgcgcgcgcttttgggctgcgccaccgacagagacatctggaagccggagctagtggaagagctggagtgcagtggcacaatct

SEQ ID NO: 304644 - DNA, 90 bp, Homo sapiens
aagtccattcagaaaagacaagagccctgtgagagtcagcgtgggagaaattgtaacgagaaaccaacaaatgtcaggaaaagaaaattc

SEQ ID NO: 304645 - DNA, 98 bp, Homo sapiens
cctgctacagccaagcctgctgccccagaacctcacccttctccctctcttgaacagatgaagaaagttctcctcctgatcacagccatcttggcagt

SEQ ID NO: 304646 - DNA, 100 bp, Homo sapiens
acttccttttactattagcccatcaagaaatgaagaacgagattcagacacagtgccagaactgaaagagcagattcaggcgtggatgagagagaaacag

SEQ ID NO: 304647 - DNA, 100 bp, Homo sapiens
acaccaagtcttcacctggacccagatgtgtgacataaaagatacacgatgaggcgagtggtacgacagagcaagtttcggcatgtatttgggcaagcgg

SEQ ID NO: 304648 - DNA, 82 bp, Homo sapiens
aagatgcctctgattggtctgggtacctggaagagtgagcctggtcagagcacgaacttccaggagccggtgcagccgctga

SEQ ID NO: 304649 - DNA, 75 bp, Homo sapiens
gccagatatagatgcctgggaattgcgtaaaggtggtggagacactgccacttgctgtgccaaatggaacacgga

SEQ ID NO: 304650 - DNA, 75 bp, Homo sapiens
tatgtgccgttacggcagcgccggcagctactgctcgggttcatgacgctctcgatattcctgtgcagaaacctg

SEQ ID NO: 304651 - DNA, 50 bp, Homo sapiens
aagcagcgtgcgttcagccctgggacgaagcttcacaaaagatgtctaag

SEQ ID NO: 304652 - DNA, 82 bp, Homo sapiens
ggatttggatgtgggatccggttccttggtgtcatccagccttagcaaaccagagcaaggagtaaataatgctgaaaaattt

SEQ ID NO: 304653 - DNA, 100 bp, Homo sapiens
ttttgtgaaggaagccctccacaggctgttcacagagacattttcaatggaggtaaccatgcctgctattttaaagggtacagccaaagaccggagcttt

SEQ ID NO: 304654 - DNA, 88 bp, Homo sapiens
accagcccagacagctgcaagtcaccatggacgctgaaggagtggaggcagcacagacagtgaggacgaagaagaggaggacgaggag

SEQ ID NO: 304655 - DNA, 75 bp, Homo sapiens
cattacagccaagatggtgctgtcccagagacaacgagatgaactgaatgaatctgaagtctgctgcagtaaaac

SEQ ID NO: 304656 - DNA, 87 bp, Homo sapiens
cacctggatccaggataacggaggctggtgctgcagctctgatggttcaactctgccaaaagatggatctttaatgattagcactac

SEQ ID NO: 304657 - DNA, 95 bp, Homo sapiens
ctactactgcaagcgccccatctatgagttcaagatcacatggtggcccaggctgcaagcacaaaggaagtttgctcagtctcagccgaatagtc

SEQ ID NO: 304658 - DNA, 100 bp, Homo sapiens
aaccatgtctccatccccgaccgccctcttctgtcttgatatgtcttgtcgttcaagacttgcaacactaaacgagaaattgacagcccttgaacggaga

SEQ ID NO: 304659 - DNA, 75 bp, Homo sapiens
cggcgttgggttgagcgggctttttggaagtttgtggcggaggtgaggccgaggctggagtgcagtggcgggatc

SEQ ID NO: 304660 - DNA, 100 bp, Homo sapiens
tgaattgggaggggggcagctggagcctcaggcggcagcgcttctagattttaccaaatgttgcaagaactctggagttcttatggtagtaaaatgccgg

SEQ ID NO: 304661 - DNA, 90 bp, Homo sapiens
aataggccaggactgtcctgtggacagacggggtgagcctcttcttgtgtctggagattctgacatcagacaacagtcagcgctttcgag

SEQ ID NO: 304662 - DNA, 100 bp, Homo sapiens
cactgcctggctgcgagcacatgatggcgatacgggagctcaaagtgtgccttctcgggaaggtagaagatagcaccatgccgattcgtcgaactgtgaa

SEQ ID NO: 304663 - DNA, 101 bp, Homo sapiens
gtttgatggctgatcttgaaggtttacacttgtcaacttcctcttcagtcatcagtgtaaaataccatgaagattttgaaaaaacaaaggggagaggcttt

SEQ ID NO: 304664 - DNA, 90 bp, Homo sapiens
gctgaccctggccttcaaccccgagccgctggtgctacagcctaagaaagctgtcaagataaaacctcacccacctgtagctcctcgacc

SEQ ID NO: 304665 - DNA, 100 bp, Homo sapiens
ccggaatggagaaggaagaggagtcggctggactctgtgaagctgagcaggagcagatgcggaagatcctctaccagaaagagtctaattacaacaggtt

SEQ ID NO: 304666 - DNA, 135 bp, Homo sapiens
cagttgcaccctgttttgcaaaaaccatcagtgtttgggaatgattctgatgatgatgatgaggacgtgttcctcatgatccggcgccacaagaccaccatcttcacggacgccaaggagtccagcacggtgttc

SEQ ID NO: 304667 - DNA, 83 bp, Homo sapiens
caagaagatcttcgagttcaaagagaccctcggaacatgaggacggggacttggttgccttttccagtgacgaggaattgaca

SEQ ID NO: 304668 - DNA, 101 bp, Homo sapiens
gcgaacgagcgacggcggaacccgtgggcctgtggactgcagcctcggcggtcagcagcctcctctattggcccaggaagcccacccagccccgccacgca

SEQ ID NO: 304669 - DNA, 87 bp, Homo sapiens
cagcggagccaagccccacgctggccggacagggccgcctgtcgccggccactgaggcggctcccagctgcgttggcgacatggccg

SEQ ID NO: 304670 - DNA, 97 bp, Homo sapiens
agacgacaagcacacactatggcgctgaaacggattaataagctattgacctgaaaagtggttctggaaaagtgtaccaaggccctgcaaaaggtgc

SEQ ID NO: 304671 - DNA, 80 bp, Homo sapiens
gactagaggctggataccaaatagcagtggaaaccgagcttcctgcggctgagggagggatgaaacaagtacccatgtga

SEQ ID NO: 304672 - DNA, 100 bp, Homo sapiens
accccctccaaagaaggaggaagctggaggcgaattctggggagaactggaggtgcagagggtgaagttcctggcctgtagtggtggagacacgcccagt

SEQ ID NO: 304673 - DNA, 75 bp, Homo sapiens
cttcttagctgaatacctctcctacgactccagtgaccgtagcacagagctgacaggcagcacgaatctgatcac

SEQ ID NO: 304674 - DNA, 137 bp, Homo sapiens
gcgagtgcctgagcaacatccgcgagttcctgcgcggctgcggggcttccctgcggctggagagatcctgaaggagctagacgagtgctacgagcgcttcagtcgcgagacagacggggcgcagaagcggcggatgc

SEQ ID NO: 304675 - DNA, 75 bp, Homo sapiens
ttcacactactatgagagctttctagagaagaaggggccctgtgaccgggactgggctaatgctaatgtcagcag

SEQ ID NO: 304676 - DNA, 100 bp, Homo sapiens
tggggaccacattgctccaagccagatatggtacaggactgtcaacgaaacctggcacggctcttgcttccgatgatgattcagatctgtactctcccag

SEQ ID NO: 304677 - DNA, 95 bp, Homo sapiens
actgggtcgtcacggaggacgggaaaatccagcagcaggtggaagttgatgggtcgaaactaaatgtgaccagcacgtggaacctggcttcgccc

SEQ ID NO: 304678 - DNA, 96 bp, Homo sapiens
tcccaattatacagtgttgctgattcaaacagacaagatgaagagttacctaagtcagtgttataagatgttccatggtaaaagggatttgaagac

SEQ ID NO: 304679 - DNA, 50 bp, Homo sapiens
tcgccccggccgcggccgggtcctcagggttgtgtctgaagagaaatccc

SEQ ID NO: 304680 - DNA, 75 bp, Homo sapiens
cccaagcgccgcggttaaccacgtctcgtccacgacctccctaggctttatcctgtggataaacgcagagtgaac

SEQ ID NO: 304681 - DNA, 75 bp, Homo sapiens
tccgcagtttcagcagagccgctgcagccatggccccaatcaaggtggcctgtgagaagaccgtgtctaccttgc

SEQ ID NO: 304682 - DNA, 100 bp, Homo sapiens
gctgcctcagttcttagcgcagattcagaatctgataattcagataacaacacaatctttgtgcaaggacttggggagggtgtgtctacagatcaagttg

SEQ ID NO: 304683 - DNA, 82 bp, Homo sapiens
gccgatccagcctgcggagcctgtggggcagaacactctgctccagccaaggtggtgagggcagctgttcctaaacagcgca

SEQ ID NO: 304684 - DNA, 82 bp, Homo sapiens
cgaggccggacgcacctctgtttgggggtcctcaggctggacggcagtctggaaacgaccaatgagatcttggactctgcct

SEQ ID NO: 304685 - DNA, 145 bp, Homo sapiens
caggcagccctggtgtgggagcggccagctaggagcgctctgtggtgcctggggctgaacgcggctttctgctggacacctgttctgctgttgtgtcctgccattctcctgaagaacagaggcacactgtaaaacccaacacttc

SEQ ID NO: 304686 - DNA, 96 bp, Homo sapiens
ctggaaccgggatggcgacgtctacactgagtcggaggcgaaggtgtcatggagaaactccagctgggcccagagattctgcagcgggaaaatcca

SEQ ID NO: 304687 - DNA, 90 bp, Homo sapiens
tggaaaaaacttgtttaatgggtgagccccaggtgtatcccagagggatccgggtgacttctctgcagactgtttgccatgacagcccac

SEQ ID NO: 304688 - DNA, 83 bp, Homo sapiens
ctgaaaccaccgtggaagtcgcctggtgtgaactgcaggttattatcaacccttactttgctaagcaagaaactgaactgtta

SEQ ID NO: 304689 - DNA, 82 bp, Homo sapiens
gaagatccggcgcggggcacaggatccggagctggagcccccagaacatccagtcatggataaaaatgagctggttcagaag

SEQ ID NO: 304690 - DNA, 100 bp, Homo sapiens
gctgctgcaggactcgtccggggactacagcctggcgcacgtccgcgagatggcttgctccattgtcgaccagaagctctactgagatgaagaaagaaaa

SEQ ID NO: 304691 - DNA, 83 bp, Homo sapiens
tgagaaaaagcaggttttcacttctgagaaattcctggtcatggcttcagaggatggtgccgtgagcgatgtggagatgcagg

SEQ ID NO: 304692 - DNA, 75 bp, Homo sapiens
aggccaaggagacccccctgacaacatgaaggtctggctctgggagaggagtggacagcagctggttgagataca

SEQ ID NO: 304693 - DNA, 75 bp, Homo sapiens
gtccatgctaacctactatgagggtcgagcagagacctccttaactacgtgttttgctcaagaaacttttgggaa

SEQ ID NO: 304694 - DNA, 90 bp, Homo sapiens
gcgactccgaacgaaggcggctccgtgcgggccatcccctatctccccgggcgggatgatcggctgaatgtaacagaggaactaacgtcc

SEQ ID NO: 304695 - DNA, 75 bp, Homo sapiens
gggagctccagagcctgctggtggaggagtggtatcctgaggtgcggcaccactgtcccaacactcccatcatcc

SEQ ID NO: 304696 - DNA, 82 bp, Homo sapiens
aaaacttgcagattttggggtagcaggtcaacttacatgcttcatgcccaccagtttctgcagaatgaatatgccctcagtc

SEQ ID NO: 304697 - DNA, 98 bp, Homo sapiens
agaggcaaagtctggagcttagccattggcaacgagttaaatatcacccacgggaagtggcactaaggtccaaaggaagctacatatgggtggtccct

SEQ ID NO: 304698 - DNA, 101 bp, Homo sapiens
ctttcccacccaaggacgccgtcagtcctttcagcttcagcctgctcaagaactgcagcattgcagccgccaagacgttcgaggtcaggaaaatggattgg

SEQ ID NO: 304699 - DNA, 87 bp, Homo sapiens
ccacattcagccgccaatgatcccatttttgtggtggaaaacgaagctcattcccaacgtgcaaagccaaggcagcgaccccaggac

SEQ ID NO: 304700 - DNA, 75 bp, Homo sapiens
gaactgtgttcgcaattcttacgatgtcttctctttgctacgcttttgttaggagtgataaacccaaactgttca

SEQ ID NO: 304701 - DNA, 98 bp, Homo sapiens
gcaaccgccctctcctgcatccaccagcagccaggaatccaagacaagggaacagcctggacatggcatcagagatccacatgacaggcccaatgtgc

SEQ ID NO: 304702 - DNA, 100 bp, Homo sapiens
cgaggcccagagatgaccccttatgaagacacttctacaagcccatgcttcgacggggcagcagcaagtggatggccaggacaggggtgttcctggcctc

SEQ ID NO: 304703 - DNA, 100 bp, Homo sapiens
ggaggtggaccggagctcgtccagctgcgtgcctaggactccagaagacctttccagattcgtggttgagctgcagcagagggagcttgccttgaaggac

SEQ ID NO: 304704 - DNA, 75 bp, Homo sapiens
ccacaggctctctccgctcgattttgtcaccgttatgtgggaagcgaatccaacttaaaagaagctctgactcag

SEQ ID NO: 304705 - DNA, 98 bp, Homo sapiens
ttcaggaggaaccccaggcccttccagcggtggccacacgtcacacagtggggacaacagcagtgagcaagaaatttaagatccgcattgaagaccca

SEQ ID NO: 304706 - DNA, 75 bp, Homo sapiens
ccagaacatccactagcctcactaaaggatccaaactactggatacaggtgcatcgcttggaacatggagatgga

SEQ ID NO: 304707 - DNA, 100 bp, Homo sapiens
ccaagatggagttcctcctggggaacccgttcagcacaccagtggggcagtgcctcggtacctttgacaggagcgtgaccctgctggaggtgtgcgggag

SEQ ID NO: 304708 - DNA, 100 bp, Homo sapiens
cttgtcagtggagaagaccagcaagcgtggcggcaagatcatcgtgggcgacgccacagagaaagtcattgctgtgcgtgtgaaggaagagcatctagac

SEQ ID NO: 304709 - DNA, 100 bp, Homo sapiens
tggccatcttcaccgtgtacctgggctcgagcctgcacatgaagatccgctttatcctcatccagaaccgggcaggcaagacgcgcctggccaagtggta

SEQ ID NO: 304710 - DNA, 101 bp, Homo sapiens
gctgaaatgtttgacgacactgatggtttggtgaaatgcctcagctcgtaaaaggaatgaaactgttaaaccaggctgatccctgtgtccagattttaatt

SEQ ID NO: 304711 - DNA, 75 bp, Homo sapiens
aattgaatcacttgaaaagaggctcgagaatgttcgcatcttaccacatacagttctttacatggctgattcaga

SEQ ID NO: 304712 - DNA, 98 bp, Homo sapiens
tggagtctgcgaaggccgggacccggttccccggcccacagtgggggtgtgcaaacccgagagaactgggagttttttgagaaccctgcttttcgtcc

SEQ ID NO: 304713 - DNA, 100 bp, Homo sapiens
gaaagacttcagcctctgctcaatcacctcagctttcagcttatgtggagaagtcgctgtgaagccacctataaatccatttactgaatttatggagaag

SEQ ID NO: 304714 - DNA, 100 bp, Homo sapiens
ttcccccaggcttctgcgcagaatgcttctcagcagcaacatccccaaacagcggcgtttcacggtggcacatacatgggtgcttattggttctccgtta

SEQ ID NO: 304715 - DNA, 51 bp, Homo sapiens
acctcagcttgatgatgtatctcagctcctggagcctgtctgccatcagct

SEQ ID NO: 304716 - DNA, 50 bp, Homo sapiens
gggaatcccgttcttcgccatggcaaagaagtttgtcatcctgatattgg

SEQ ID NO: 304717 - DNA, 101 bp, Homo sapiens
taatggtctttttgttcaagataaagtgattttttgcctttgttgattaactggacaaattcaggaggctgaaagggaaacatcagccgcccggggggagt

SEQ ID NO: 304718 - DNA, 75 bp, Homo sapiens
aaaaatgccagaccagtatggatgaactattagggccacctacagatgctcctgcagtggacacagcagaacaag

SEQ ID NO: 304719 - DNA, 101 bp, Homo sapiens
cctggaggtggactggagcagtgagaaagcaaaggctgctctgaagcgcacgacctccgactactttctccttcaagaggccatcaggcggaaggtggagc

SEQ ID NO: 304720 - DNA, 87 bp, Homo sapiens
aacgtggcttatgagtacctttgtcatttggaagaagcgaagagctctattatcaagtcctaaattttggaatgattgtctcatcgg

SEQ ID NO: 304721 - DNA, 75 bp, Homo sapiens
gttgaactcaacggaaatcagcccatggagatcaaagtcctggccataagacctctgagctgttcctcccagcta

SEQ ID NO: 304722 - DNA, 100 bp, Homo sapiens
ccatcctcaatgttttgctcctggcctggaaggctttccttaaagtttcccatgtctcaatggactcctgaatataacgagctctacaccttaaaagtgg

SEQ ID NO: 304723 - DNA, 80 bp, Homo sapiens
ttgtgatgttggcagttgaaccgaccatcagcttatacaagtctggcagacccgtctgcgttaacacaagcggttgctgc

SEQ ID NO: 304724 - DNA, 98 bp, Homo sapiens
tcagcagacagcgccatcatgaatccagctagcaaagtaattgcactgaaagtgaataccagggcctggtgaagcacacaggaggctgccactgtgga

SEQ ID NO: 304725 - DNA, 90 bp, Homo sapiens
ctgaggcacgagcgggtgacgctgggcctgcagcgcggagcagaaagcagaacccgcagaagcagctgacacaggatgatgatactgatg

SEQ ID NO: 304726 - DNA, 100 bp, Homo sapiens
cgtaccgggccgtgctgcttatggcggcgctggagagggggcgctgagctgttgggcctcaaggaataggttctcctagtgtctatcatgcagttatcgt

SEQ ID NO: 304727 - DNA, 75 bp, Homo sapiens
cttccaccatccataatgaagctgagcttggcgatgatgacgtttttacacatgcttttcttccaaccatgcctg

SEQ ID NO: 304728 - DNA, 95 bp, Homo sapiens
ttctggaatgtcattatcagacacaatggtttatcaggtagaagatgtgtgtgaagaagaaatgccagaagagtcagatgaatgtgtccggatgg

SEQ ID NO: 304729 - DNA, 90 bp, Homo sapiens
gttttcagcgtgttcaggctctcactacaaaccttaatctcatcttagagtttcaggcgacctccaagaagggtatcagtcgactggata

SEQ ID NO: 304730 - DNA, 100 bp, Homo sapiens
acggtcttgctgaaagccagggaagtgttgacctaaccaatgaagaaacaactgattccaccacttctaaaatcagcccatctgaagatactcagcaaga

SEQ ID NO: 304731 - DNA, 75 bp, Homo sapiens
aataggaattaacctccaaataaaacatgactggaattgactttaaaattaggaccatagagctcgatggcaaga

SEQ ID NO: 304732 - DNA, 80 bp, Homo sapiens
ccatggagctcgagaacatcgtagcgaacacggtgctactcaaggcccgggaaggttaatttggagtggcccctggagtc

SEQ ID NO: 304733 - DNA, 98 bp, Homo sapiens
tagtctttccgcttcttgaatttctctctgtaaaggagagtgtagcttccattggcaatactttaaacagcgtccatcttgctgtggaagcactacag

SEQ ID NO: 304734 - DNA, 89 bp, Homo sapiens
tatggtacagcacctgtaaatcttaacatcaagacagggggaagagtttatggaactacagaaagtttcctacactactgaggtttagg

SEQ ID NO: 304735 - DNA, 88 bp, Homo sapiens
aggtgtacaagtaccccttcgagcaggtggtcgccagctttctccgaaagccaaacctcaccgcaagacaccttttagagaagaacaa

SEQ ID NO: 304736 - DNA, 51 bp, Homo sapiens
gtggttcttcctcagctctctcctgcaggtggaaccaagctcacaaatcct

SEQ ID NO: 304737 - DNA, 89 bp, Homo sapiens
ttcatctacaacccgcgcttctggccgcgggaaggagagacttaattcagtgcacaaatgagatgaatgtgaacatcccacagttggca

SEQ ID NO: 304738 - DNA, 74 bp, Homo sapiens
cttggactgagtcctgcaggacacaggcccccattgccgtgcggctgggcaaagtagccattgaccgaggaacg

SEQ ID NO: 304739 - DNA, 75 bp, Homo sapiens
tcggaccggatggcaagaatcagctggggcagaagcgcgtggtcaagtctattatcctcccagtccacaacgctg

SEQ ID NO: 304740 - DNA, 75 bp, Homo sapiens
ggacctctgccactctcaccgtgaagggtcgagtctatgctgtcttgtcaaagagagaaggtcgggtacttcaag

SEQ ID NO: 304741 - DNA, 83 bp, Homo sapiens
gacctctcgctgcttcaggaggacctgcaggaggacgcagacggatgttttgaacgaagaatgtgatcagaactggtacaagg

SEQ ID NO: 304742 - DNA, 75 bp, Homo sapiens
acacattttcctatacctctggttacaggaaatacaggaggcagaggaacaaataaaagacaccacgagaaacag

SEQ ID NO: 304743 - DNA, 75 bp, Homo sapiens
tcgcgccggctatggccgtgccctggggctgagccctcaggggttcggtccgagcccggtgggaggctcccggag

SEQ ID NO: 304744 - DNA, 112 bp, Homo sapiens
acagagtgctgttttagagctggcagcagcatctcagcccaagagaaggtcaaaatgcagatcttcgtgaaaacccttaccggcaagaccatcacccttgaggtggagccca

SEQ ID NO: 304745 - DNA, 100 bp, Homo sapiens
tccaaaaactacaatcataaagaaatccaacttaccttgtcagcactggtgaggtggattgatgatgaatcttctggcacacctggagcaactccagaac

SEQ ID NO: 304746 - DNA, 88 bp, Homo sapiens
cgctccgctgtacctggatcctgctcctctgggttgaaacccgggcgccgccaagatgccgcgcgagcccagcattgacctgctgcag

SEQ ID NO: 304747 - DNA, 50 bp, Homo sapiens
tatgtctcatggaggaattttagtgccatttggattgtactttagtggca

SEQ ID NO: 304748 - DNA, 98 bp, Homo sapiens
gaaacatgagcattcagtttcttggtacagtggtaacaaggagggagcgcattcttccaccttctgggtgctgctgagtatctttctgggagcagtgg

SEQ ID NO: 304749 - DNA, 100 bp, Homo sapiens
ccagtcgcgcacaagtgttatctctgtaccgggcgatgctgagagagagcaagcgtttcagcgcctacaattacagcaccactgggagtctgagtgcgat

SEQ ID NO: 304750 - DNA, 75 bp, Homo sapiens
tgtcagccaccttgttctctaaagcttttagtttggatgctgaacagcctgattatgatttggattctgaagatg

SEQ ID NO: 304751 - DNA, 100 bp, Homo sapiens
gccgccgccgccgcccagagactgctgagcccgtccgtccgccgccaccacccactccggacacaggggctttgaccacgacctttgaagagcttcattt

SEQ ID NO: 304752 - DNA, 113 bp, Homo sapiens
cggtggcggaggctgaggagaaggaggagcgggccgtggaggcttcgccgcctaggtggcacaagaatggctcaactctccaaatagagagaatttctatcagttgcaagtac

SEQ ID NO: 304753 - DNA, 101 bp, Homo sapiens
caggtccggagagacgcacagctaagatgtcaggacatcctggaagctgggaaaggtgatgcggctgactaagcctactttattcaccaatatcccagtaa

SEQ ID NO: 304754 - DNA, 97 bp, Homo sapiens
agtgcctgataccagcgtgcaagagacagaccggatcctggtggagaaggagctcgagtatatttagcttgccgggatgtggaaaagggggaattgg

SEQ ID NO: 304755 - DNA, 97 bp, Homo sapiens
caactctggctgatcaaagaagagcagcccatggacctgaaggagaagaaggagaaggtggaggagaaggcaagccggaaagagcgaaagaaagaag

SEQ ID NO: 304756 - DNA, 90 bp, Homo sapiens
gtgatttctgcatttccatctgaggctctcaaaattagagagatgtgtaattgtccaccactgtctaatccagaccctcgattactattc

SEQ ID NO: 304757 - DNA, 100 bp, Homo sapiens
cccatgcagaatgccaccaagtatggcaacatgacagaggaccatgtgatgcacctgctccaggtacccaagatattgtatttggagaagtagatcggtg

SEQ ID NO: 304758 - DNA, 82 bp, Homo sapiens
aaggcccgcggaacagcggaggacgaagagcgggacccgagccctgtgcctccggagccagcgtggtggccatagacaacaa

SEQ ID NO: 304759 - DNA, 100 bp, Homo sapiens
aaaaaacagcagatggctcgagaatacagagagaaaattgagacggagctaagagatatctgcaatgatgtactgcttacatcacgagaaaaagcagcca

SEQ ID NO: 304760 - DNA, 75 bp, Homo sapiens
agtggtggccagtagaggaggaggtgaacaaggaggaggggttatggttttgtgaaattcacagatgaactggaa

SEQ ID NO: 304761 - DNA, 50 bp, Homo sapiens
gaggtgcccaccatcgagtccctgatagcaatggccaatgtacatggtgg

SEQ ID NO: 304762 - DNA, 82 bp, Homo sapiens
caggggcatgggcctgggcccaggctatgatgcaccaggtgagaatgagatggtgatcatgagacctggaaacaaatatgag

SEQ ID NO: 304763 - DNA, 100 bp, Homo sapiens
ggaagcaggactgcgccgcgtcttcctcaaggggctttgttatgcacctaaagccatattggaagctccagaagaaagagcaccccccggaagtcagcag

SEQ ID NO: 304764 - DNA, 100 bp, Homo sapiens
gatcacctgcggaatggggtagatattaacacctgtaaccagatttggaggccaatcactgccaccttttatttccctgtgggtccaggaactggatttc

SEQ ID NO: 304765 - DNA, 51 bp, Homo sapiens
ctgtgaaataccagagtcaggcccggaagggtcatcacactgaaacggtgt

SEQ ID NO: 304766 - DNA, 100 bp, Homo sapiens
ggttatagatggacaagagacgatcattctgcaagcaggcaacctgaatacaggcatttaaggaaatctgtttctcttttggatcactagctgcaaatta

SEQ ID NO: 304767 - DNA, 100 bp, Homo sapiens
ccggagtctgaggggttcgggcttgtcaggttctaggttggtcaaagaaaaagtgatgtatgaaaaagaggcaaaacaacaagaagaaaagattgaaaaa

SEQ ID NO: 304768 - DNA, 100 bp, Homo sapiens
taccagacaagttcagagaatatcatgcttccagtctactgtaaaggcaaatacgccatgcgagacctagtccacaggcttccaggagggaacaacagca

SEQ ID NO: 304769 - DNA, 100 bp, Homo sapiens
cccgcgtccgccgattcctcctccttggtcgccgcgtccttggctggcgtctgagcttcagtcattgtctattcctggaacttaccaagagaagatcacc

SEQ ID NO: 304770 - DNA, 73 bp, Homo sapiens
tcgacttagaagctaccgagttaccctaagaaaggcaaaatttggtttctctaatattactggaattgattac

SEQ ID NO: 304771 - DNA, 83 bp, Homo sapiens
gtaaagtcgagtatctggtgaagtggaaaggatggcccccaaattcaaatctgaacatcaatgatgtactagggaactactca

SEQ ID NO: 304772 - DNA, 82 bp, Homo sapiens
gaccggctcctgctcaagatctcagagaaggaggaggtgaccacgcgcgagctgtttttggaaggaagaaagatggaaagcg

SEQ ID NO: 304773 - DNA, 71 bp, Homo sapiens
attctccaacaatggaggccagtggctggtctcaggatttgaatttgttgaaatgagcagtcgtaaatcaa

SEQ ID NO: 304774 - DNA, 98 bp, Homo sapiens
cggaatcatacatggctacctgtctcagatgacgcctgttataggtggaattgcgtttgttgccataaaaggagcatttaaagtttacttcaaacagc

SEQ ID NO: 304775 - DNA, 100 bp, Homo sapiens
tatcggggtgaacgcatcaatcagctcatccgtcagctgaactagacccaggtgttttcgccatcagggtgtattggaggctgacacttaatgggtgtgt

SEQ ID NO: 304776 - DNA, 74 bp, Homo sapiens
gtcactccaacctcttttcgctggtttatggctacaaatgatttgatgacggaactgcagaaagattccatcaa

SEQ ID NO: 304777 - DNA, 101 bp, Homo sapiens
caccttgaattaaaactgaatgaactgataacggagaatggaactgtatgccagcagcttgttgtacattctttctacaacttcaacaggctgcactggag

SEQ ID NO: 304778 - DNA, 100 bp, Homo sapiens
tggacagacttcttagacttggaggaggtatgcctggactgggccagggtaattgggatacttctggcagcgaactgagtgaaggggaattggaaaagcg

SEQ ID NO: 304779 - DNA, 96 bp, Homo sapiens
ccaggagctgtcccagaattcagctataaagcagacaacaagggaggtgtcacagttttccatttagatcaacaacttcaagttcttaccatggaa

SEQ ID NO: 304780 - DNA, 82 bp, Homo sapiens
aaaggaagaggagaaggaaattgtcccgaatccctgcagggcggcgactggcggcgcgatggacctgaccgggctcctgctg

SEQ ID NO: 304781 - DNA, 99 bp, Homo sapiens
gctctgggagcctagaatgcatcagtgcccttgtggcgaatggggctcacgtcgagctcccagccaacctctgataaaccctcccagcggccatcagag

SEQ ID NO: 304782 - DNA, 50 bp, Homo sapiens
gagcctcaagtgcttctgcattacataccctgatgggaggatgaaaacag

SEQ ID NO: 304783 - DNA, 100 bp, Homo sapiens
tcggtcatcaggattgcctaatatacctgtccagacaatctccagagctgctgcagaaaagctgtttgggctccgtgtgtttgacagtggcgtcatggta

SEQ ID NO: 304784 - DNA, 100 bp, Homo sapiens
agaagataacactttagtacagtcgccaactgatgtctacaggaaacaccgggctggagttgacatccactcctgttcgcagtttttgcttgagttgtac

SEQ ID NO: 304785 - DNA, 83 bp, Homo sapiens
agaaagtcgtcttccacttgcacgaaagctttcctaggccaaaaagaggttaacacagaaatctgcctcctgggccatgccgc

SEQ ID NO: 304786 - DNA, 100 bp, Homo sapiens
cagaagaggtttagtgccctcctgagtgactgcgtcaggcatctcaatcatggtgtggccgacgacgatgccctcgctgaggagcgcatgcggagaggcc

SEQ ID NO: 304787 - DNA, 98 bp, Homo sapiens
cgccgcctccgccgcagacgccgccgcattcttgttggatctagccttggagggtggcttatgcttcatgctgcaattgcacgaccagagaaggtcgt

SEQ ID NO: 304788 - DNA, 83 bp, Homo sapiens
aagcatctattgtgaaaaacctaaaggataccttaggtacctttaaaacagggcagaagccttatggattggattcgactgac

SEQ ID NO: 304789 - DNA, 96 bp, Homo sapiens
gggtaaagttccagggaggccgcgaagggaaggctgggaatctagacacagcaacagtaacaacaacaacaataacaatgaaggctcactgtgaaa

SEQ ID NO: 304790 - DNA, 74 bp, Homo sapiens
ccggacgcacctctgtttgggggtcctcagtttggaaattttagcattcaggtgccaggaatgcagatgggaca

SEQ ID NO: 304791 - DNA, 75 bp, Homo sapiens
caggggctgagctggctgggcaagcgcgggccgcggaggaggtctcagggtcatctgtgggaagtgctccgagtt

SEQ ID NO: 304792 - DNA, 98 bp, Homo sapiens
ccgggcggggagggcatgttccgtggcctcgcccaggccgacggggtgaggtggctttgaccccgggttgcccggccagcacgaccgaggaggtggct

SEQ ID NO: 304793 - DNA, 134 bp, Homo sapiens
gtgcagcccccaccagagacacctgcagaagaagagatggagacagagacagaggccgaagctctccaggaaaagaaggagcgaaacatctttgagcaagatgggtctctaccgcatccgcgtgtccactgggg

SEQ ID NO: 304794 - DNA, 100 bp, Homo sapiens
gatgccggctatggcgaacaggaactggatgccaactctgcccttatggaattggacaaaggatggagagcaatacatcatcatctttggagaatttagc

SEQ ID NO: 304795 - DNA, 100 bp, Homo sapiens
cagcatctgcgatgtgaggaaaggcacctccaccaggaaagagccagacttctcagaggtcagtctgttcaacaagtgggaccccagggccttctgtatg

SEQ ID NO: 304796 - DNA, 74 bp, Homo sapiens
ccaaagcagtggaactactggtggaactagcttctctgcagcttgccaacaacatttgcaactttggatattga

SEQ ID NO: 304797 - DNA, 75 bp, Homo sapiens
cccatgcagaagggatgagattgaagatgcttgctctgtcaaggcacagcctattgtctcctttgctcagtgtga

SEQ ID NO: 304798 - DNA, 100 bp, Homo sapiens
ggacggggaggacgcgccgcggccaggcagggaggagaccggcacccagacaggtggcgaaggcagaggagaatactcccccagttgcaagaggcgcagg

SEQ ID NO: 304799 - DNA, 82 bp, Homo sapiens
aaggtcctgggcaggaccggttctcagggacagtgcacgcagggaccatggctaaacctcctggatcattagccagaagcag

SEQ ID NO: 304800 - DNA, 97 bp, Homo sapiens
cggagctgaatctgccgcagctagaaatgctcaagaaccagctggaccaggatgccccttacctagacctggccccctacatgcccgactactacaa

SEQ ID NO: 304801 - DNA, 100 bp, Homo sapiens
ctaaaccagtcatatggcatggacaatcacagtggtggtggtgggggtagcaggtatgagacagagctggccatgcgccagtctgtggagaacgacatcc

SEQ ID NO: 304802 - DNA, 100 bp, Homo sapiens
cagagagcacaaattgtagccctacccggaaaaggtcttcatctgagagtacttcttcaacaggttgctacaactatctgtataggatgaaagctctgga

SEQ ID NO: 304803 - DNA, 90 bp, Homo sapiens
ctgaggaggcggcggccgacggtggcggcgggatgcagcttccaattgaagacttgtgcagtttaacatcccagtcactgcccattgaac

SEQ ID NO: 304804 - DNA, 136 bp, Homo sapiens
agtggtgcgtgatgtggctaagatgctgccgactctgggcggcgaggaaggcgtctcccggaaaaagcttgtggtgaaggggggcaaaaaaaagaagcaagttctgaagttcactcttgattgcacccaccctgta

SEQ ID NO: 304805 - DNA, 90 bp, Homo sapiens
gcttctggagtgaataccaggattgatgatctccaaatggagcgcctggaccatgctgctgagcgcctactggcacggcctccacccggg

SEQ ID NO: 304806 - DNA, 82 bp, Homo sapiens
caagaatccttttggcttagagatcactaatccatcttcagcttcaattacaactattggaatcagatgcaaagatggtgtt

SEQ ID NO: 304807 - DNA, 82 bp, Homo sapiens
atcggcgagtgaagagactgtacagcaattggcggaacaccttccaccatgaccacctcagcaagttcccacttaaataaag

SEQ ID NO: 304808 - DNA, 83 bp, Homo sapiens
tgctgggccctgaggctgcaccaagtggcgaaggagccggctccaaggtgtttcccattaaacactaccaggacaaaatcagg

SEQ ID NO: 304809 - DNA, 50 bp, Homo sapiens
cggcaccatgaagtcagcggaggaagtgatgaacggcagcagccactcac

SEQ ID NO: 304810 - DNA, 52 bp, Homo sapiens
ccgccgcctctagggatggacggcttgcattgatgacaatgttgatatggtg

SEQ ID NO: 304811 - DNA, 100 bp, Homo sapiens
aacccagaggccatcattccgcaccatcctgcgtgacctcacccggctgcagccccacactcaggcgctcaggactgccaggacccagaggattcacacg

SEQ ID NO: 304812 - DNA, 82 bp, Homo sapiens
gccggttacatcagccagcgacgagcagggttacctggcgattggtgatccccgcagagaaccactcgttttgactattatt

SEQ ID NO: 304813 - DNA, 100 bp, Homo sapiens
cacactcgcctcccctcggcacccccggccccggagctgcctggaggcggccgcactcgggtttaccaagattcaaaacacgaagctgaccatgaagcgg

SEQ ID NO: 304814 - DNA, 75 bp, Homo sapiens
gagaagcccaactaaagccccacatttgcagctcattgaaggaaaggtgaaaagaacggaggggagcccgatgac

SEQ ID NO: 304815 - DNA, 83 bp, Homo sapiens
cagggacccggtgacagcgtgagaggtgacaaacagcatgtttggtgcttcaagaaagaagtttgtagagggggtcgacagtg

SEQ ID NO: 304816 - DNA, 100 bp, Homo sapiens
cagaacctgcagcaagctccacagcaccctccatgggctcagtcttgctcccgggaagatggttaattccatcaggttcaggatgcatttagatgccgat

SEQ ID NO: 304817 - DNA, 129 bp, Homo sapiens
gaaaacatgacgtctccagccaaattcaaaaaggataaggagatcatagcagagtacgatactcaggtcaaagggaggtggtacaagcaaactgtgttcgctggagaaagaagttctcatttatgtgca

SEQ ID NO: 304818 - DNA, 90 bp, Homo sapiens
ccacattcaggggaaccgcctcaccgttctgcccccagaactagggtttggacagaggagccaaaggccaaatttccactttcagcagtt

SEQ ID NO: 304819 - DNA, 100 bp, Homo sapiens
cgggaaccgtgtccagccagggtcctgggccgcgacctggttctcccggagtctacagcgtccgacctccgatcatgaacgggcccctgcacccgcggcc

SEQ ID NO: 304820 - DNA, 95 bp, Homo sapiens
tgctgagcccgtccgtccgccgccaccacccactccggacacaggttatgaagacagtatggagtttccagaccatagtagacatttgctacagt

SEQ ID NO: 304821 - DNA, 98 bp, Homo sapiens
gctgcgtcgcccgaggcgaggaggagcgctggcggctgggcggggagcgtcggaccagaagagaatcacgccaggaaagcgacccggaggatgatgat

SEQ ID NO: 304822 - DNA, 98 bp, Homo sapiens
caagatatgtgcctggatgcagctcacctccgagaatcttggtttggattctgaagttgctaaagcaaatgccatgggttttgctggatgcatgtctt

SEQ ID NO: 304823 - DNA, 100 bp, Homo sapiens
gggcgccagacggggctctggaggctttggggagttgtagtctccggccatgcccttgaggatcttagggcaattgaaggaacagactaaaaatcgtgtc

SEQ ID NO: 304824 - DNA, 95 bp, Homo sapiens
tcgaaaccgtttccttcatatgcatgagctgcaggaatggttgggtttcagtaacacctaattttaaggacagactgcatctccgaggctataca

SEQ ID NO: 304825 - DNA, 83 bp, Homo sapiens
aagactgagagtcaccacaaggccaaggatatggctcgtggacagcagaaaattcagtctcagcagaaaaatgccaaaaagca

SEQ ID NO: 304826 - DNA, 83 bp, Homo sapiens
gggaggccagttaaatgtctctggatcccatgacagattctgttgtcacgtctccttacagagtttgagcggtgctgaactgt

SEQ ID NO: 304827 - DNA, 100 bp, Homo sapiens
gctttttgcttagcactgaaaattctggataatggtgaatggtatcgggaaaattgcctggcagcaaaagcactttttcctgacttctgcctaccagctt

SEQ ID NO: 304828 - DNA, 90 bp, Homo sapiens
cgcacggaccaggcccatttccctttcatcttgcatactccttccacgttactgcagacggtcagatgcagcctgtcccttttccccccg

SEQ ID NO: 304829 - DNA, 75 bp, Homo sapiens
tttgccgcagttcatcttcctccctgtgtactttccatttgccttcctgggtggcatttttctgaagttgttcat

SEQ ID NO: 304830 - DNA, 75 bp, Homo sapiens
tcaaccgccagatcaacctggagctctacgcctcctacgtttacctgtccatggacttccaatagtagtcagaca

SEQ ID NO: 304831 - DNA, 75 bp, Homo sapiens
gtttattgaaactagtgcaaaagctggatacaatgtaaagcagacattcactactttcactgcctaagaatcctg

SEQ ID NO: 304832 - DNA, 50 bp, Homo sapiens
agcattcgcctactccgtgaaggttggtggttctgtcagatgaaagcaaa

SEQ ID NO: 304833 - DNA, 100 bp, Homo sapiens
gggcctctggcggtggcggcctggggcggcgcgacggctggtgcgcagggtgtgaacaaagactcctatctgatcctggagacgctgcccacagagtatg

SEQ ID NO: 304834 - DNA, 98 bp, Homo sapiens
gagtattccgcattcaagctggagaatgagaggctgaaggatgttttagaagaatgtatgtctcttcccaagctatcttcttattctggatgggtggt

SEQ ID NO: 304835 - DNA, 95 bp, Homo sapiens
ccttgtgccgtgccgcggcggctggcgctacgcccaggcccactccaccatcgtcagcgagcgtgaccgaattacaagttttagaaaatctactg

SEQ ID NO: 304836 - DNA, 50 bp, Homo sapiens
gactgcaccagagccatggtcggaaacacaaagatggtgcagacccaggc

SEQ ID NO: 304837 - DNA, 98 bp, Homo sapiens
gaaaagggccccagcgtcctcttgtcaccgacagggcgattgcagtgcgttccgacaagaggctacagtggatggaaactctgtgactgtaagaattg

SEQ ID NO: 304838 - DNA, 74 bp, Homo sapiens
gagacgcagagtgtaccaggggatgctggactgcatggtactgggcctaatcgctacgtgcctctttggctatg

SEQ ID NO: 304839 - DNA, 75 bp, Homo sapiens
cggcaggcgagattgcctgacccaggcctgctcggccctcacaggacttcccaagtaagaagcggaagaggagcc

SEQ ID NO: 304840 - DNA, 100 bp, Homo sapiens
cagttcaattatgaatctcaggaacaccaccttctgtcaggagtttaccgtgaagaagctgactgctatgaacagcatgtgaaggtggaggaattccagc

SEQ ID NO: 304841 - DNA, 82 bp, Homo sapiens
tagaagctccggcgccgagagtgggcatggcgacttggtctcagccggactcggtgtgattctggagagtgacccccagcaa

SEQ ID NO: 304842 - DNA, 50 bp, Homo sapiens
cagcagcccaccagggagctcctgcagatgacaacggcaacacgacaaga

SEQ ID NO: 304843 - DNA, 90 bp, Homo sapiens
cggatcctgcgcatcactggctactatggctaccagccctgggcagcgagctgcaaaagtaaataccagctgtcccctacagtgaatatg

SEQ ID NO: 304844 - DNA, 97 bp, Homo sapiens
gcaggaactctacaacccaatccaggccattcctgtatcacgagactgggagctgcttcccagtgctgctgcctctgctgagccacaatccaagaac

SEQ ID NO: 304845 - DNA, 100 bp, Homo sapiens
cagaagtcagaaaacaaggtgtctgcaggaccaacctctcctctggatgctctagtcactcaagactgcttgcaactgattgcagacagtgaaacaccaa

SEQ ID NO: 304846 - DNA, 100 bp, Homo sapiens
gcctggggaatgcttttttatctcatattagtgcctgtgatggcatctttcatctaacacgaaacagaccttatcctgacttttaatatatcaatgcacc

SEQ ID NO: 304847 - DNA, 96 bp, Homo sapiens
tacatgggcagaccaactcagattccggagtttgaatccacctttgacaattgtccgaaagacgtttgaatcaacagaaaacccagatgacttctt

SEQ ID NO: 304848 - DNA, 100 bp, Homo sapiens
agcagtagccttgatagattatattccagaaaaatcagaaagcagcttgttcatcataaacaggcagaagaaatccttagacaagagctggagaaaaaag

SEQ ID NO: 304849 - DNA, 82 bp, Homo sapiens
atttatgaagctccgttgactaccgtggagagatcataatttggggttcaagattccagatcatggaagggaagtggttgct

SEQ ID NO: 304850 - DNA, 100 bp, Homo sapiens
acctcaatgaagagctgggacagccaacagacctcaggaaagaggggatgaacttgcagactctgcgcttgagatcttcaaacaagcatcagcgttttcc

SEQ ID NO: 304851 - DNA, 85 bp, Homo sapiens
taaatcccatcctctttcgaggtgttgggatggatgacatggctgtggatagtgatgaggaggtggattatagcaaaatggacca

SEQ ID NO: 304852 - DNA, 103 bp, Homo sapiens
gaacgaggcaaggagctaaagcagcgtgcgttcagccctgggtacctggagtagaacagaaaaattattatgtctgtgttcccttgggactcattggaaattg

SEQ ID NO: 304853 - DNA, 75 bp, Homo sapiens
aagacaacatcctttacctacaggagccctccctaaggcatatcctgataatcatctcagtcaggtggatgtaaa

SEQ ID NO: 304854 - DNA, 104 bp, Homo sapiens
ggggaacccgttcagcacaccagtggggcagtgcctcgccacaatggtgcgcatgaatgtcctggcagatgctctcaagagtatcaacaatgccgaaaagagag

SEQ ID NO: 304855 - DNA, 83 bp, Homo sapiens
cttctgccactgctgctccgtggagatcgtcccgcgcctgccgacctcctgccccccgaggtctgcagtctcctgaacccagc

SEQ ID NO: 304856 - DNA, 75 bp, Homo sapiens
tgtttgtggatcgctgtgatcgtcacttgattcacaatgttgaaagcccttttcctaactatgctgactctggcg

SEQ ID NO: 304857 - DNA, 49 bp, Homo sapiens
aaaaaagagcgacgagtgcaagctcaaatctaatccaagtgaaaatgaa

SEQ ID NO: 304858 - DNA, 98 bp, Homo sapiens
ttgacccctgctttgaggtggcagagttaacactactcttcgttataagctctcgtctggggcaactcagaagaacattcgaagcttcttgagcctgg

SEQ ID NO: 304859 - DNA, 100 bp, Homo sapiens
tttggtcgacatattggccttgatgaagagtgaaatacatatgggaggtcaagaacatttttatatggaaacccaaagcatgcttgtcgttcccaaggga

SEQ ID NO: 304860 - DNA, 96 bp, Homo sapiens
caaattgggcgagggcacaaaataaccacttaccccttctcaccgaggaagagcgggagaaaggtcggatcctgacctcccagccgatgtgcagac

SEQ ID NO: 304861 - DNA, 96 bp, Homo sapiens
gcccagtcctcggtgcggcgcggccaggtgtcttcaaaaacaaacatatttaaaagattttacttctcatctccaggaagaaccagctaggagtag

SEQ ID NO: 304862 - DNA, 100 bp, Homo sapiens
acgtccctggcacgggctgtctgattctccttcgctgtggcgggaagatggccggatttgaagatctggcaggggatcgacattgagaccaagatgcacg

SEQ ID NO: 304863 - DNA, 100 bp, Homo sapiens
aagagttttctatcgatgttggttatgagagatttttgggacctgaaatcttttttcatccagagctcttcacagatggaatcacaaataaacttattgg

SEQ ID NO: 304864 - DNA, 90 bp, Homo sapiens
tcaagacgctgggcgcgtcgaggactggataacaactattccacaccaaatgagagaggagaccacaatagaacactggatcgatcgggg

SEQ ID NO: 304865 - DNA, 75 bp, Homo sapiens
gaggaggcgcgggaggtgttcgagaacgaccccgagacgaaaactttagaaactgttcctttggagaggaaaaag

SEQ ID NO: 304866 - DNA, 50 bp, Homo sapiens
caagggtttccgcaatgcccctgttacctttaccagaagatgatagtatt

SEQ ID NO: 304867 - DNA, 100 bp, Homo sapiens
ggaaaatcatattatagatggagtaaagggagctgagcacataacgacttacacgttcaatactcacaaagcccagcataccttctgtaagagatgtggc

SEQ ID NO: 304868 - DNA, 75 bp, Homo sapiens
aattcctcaatgcagtcttttatagaaaagtttaaggccaatcctcctgctgtgacttttgaactaactggggag

SEQ ID NO: 304869 - DNA, 75 bp, Homo sapiens
aagtactgagcctgttggaggaactggcccggaaacaggaggacagcgtcacggggttcggacgtcagatgatcg

SEQ ID NO: 304870 - DNA, 75 bp, Homo sapiens
gggcggcctgccccgccggagcagcatcatcaagcatgcttttcacttccactgcatctctcgctggctcaaaac

SEQ ID NO: 304871 - DNA, 98 bp, Homo sapiens
agcagaaaccagattggatgttccagctcccagagaagaatggatataaatttctctactgttctgcccgtgccatcgggatggcggacatgacgcgg

SEQ ID NO: 304872 - DNA, 105 bp, Homo sapiens
accactggaccggaagctctagcaagtgttgcccacctggctactagtggagccttcacgtaaatgggtccagtcatgcctcccagtaagaagccagaaagctca

SEQ ID NO: 304873 - DNA, 51 bp, Homo sapiens
gtgtcctcccccgcatgacccccttggtgacatgaaatggcagaagctaaa

SEQ ID NO: 304874 - DNA, 75 bp, Homo sapiens
gcggcgctgctctgccgttgggattctgaacacgaccctctttgagagttgggagataatcgggccttatgcttc

SEQ ID NO: 304875 - DNA, 87 bp, Homo sapiens
ggggtgtcagtgtggaggagactgagattgacgagatgcctgaggctgccgtgaaatcaacagccaacaaataccaagtcttttttt

SEQ ID NO: 304876 - DNA, 97 bp, Homo sapiens
cgctaggccgcggccttcgttcctcccagaaaggtctcctttacagaaaggggcttggataaggaggaaagaccatcagaagaaaagataagacact

SEQ ID NO: 304877 - DNA, 98 bp, Homo sapiens
cgggagcgcggcggagacgatgcctgagatcagagtcacgcccttggggccgcctgggcagaatgtcacgatggacgagggcggcacgcccctgctcc

SEQ ID NO: 304878 - DNA, 82 bp, Homo sapiens
tctttctggcctggaggctatccagcgttgaagccatccttgtcaatatatttggtggtatcgtcaactgtgccatcattgc

SEQ ID NO: 304879 - DNA, 98 bp, Homo sapiens
gaatcagtgcgtcagagagattctaagattgattcactgacggaatctattgcacaacttgagaaagatgtcaggaggctggcaggatgtacagtttt

SEQ ID NO: 304880 - DNA, 75 bp, Homo sapiens
gttgaacagtcctgtatcaaaactgaagatggtttgaaacagcttcacaagcaccctggaggagaagaggttctg

SEQ ID NO: 304881 - DNA, 98 bp, Homo sapiens
atcgaggcatgcttgacacacatcataaactctgcacattcattctcaaaaacccacctggtggacccccaaaagtacaagggcatatttaacggatt

SEQ ID NO: 304882 - DNA, 100 bp, Homo sapiens
atctcatatcttcacttggcaaactcaacaaggtatccgttacagcactgatgtgagtgtagatgaagtaaaagctttggcttctctgatgacatacaag

SEQ ID NO: 304883 - DNA, 100 bp, Homo sapiens
tgataaaatacttatcagtatcttatatgttagcttgacctatgcagatcttattccagtcattgaaattatgagactatcattcaaatggaagcattat

SEQ ID NO: 304884 - DNA, 100 bp, Homo sapiens
cggggacccggctgcggtggctgcgggactgacgaattgtccgtgtggagcccttggtgaccatgggccaggtgactgccctgctgacctccattggctg

SEQ ID NO: 304885 - DNA, 100 bp, Homo sapiens
gaagaaggccatccattcaagaagagcctaggctggatgtcttgatcaataacgcagggatcttccagtgcccttacatgaagactgaagatgggtttga

SEQ ID NO: 304886 - DNA, 50 bp, Homo sapiens
tggggaaaatctccccggtgactttcagttggatcgactggttgtggatg

SEQ ID NO: 304887 - DNA, 100 bp, Homo sapiens
cagattcagtggcctgcattgagaaaatgtgatcagtactggcctgccgatgggagtgaggagtacgggaactttctggtcactcagaagagtgtgcaag

SEQ ID NO: 304888 - DNA, 75 bp, Homo sapiens
acagagtttgacagggagatagaccggggatccctcaaccctggaaaacagctatacaaggcagatccaaccatc

SEQ ID NO: 304889 - DNA, 82 bp, Homo sapiens
ttcggcagtccacccaccgccgccgcctcccagcactatggagatgaccgccatggccacggaggacccccagagcgccacg

SEQ ID NO: 304890 - DNA, 82 bp, Homo sapiens
caaccccttcgagcaagacgtgggtgtcagttgtacccgaggcgttctcagcagcagcaagtacctgtggtggatttccagg

SEQ ID NO: 304891 - DNA, 74 bp, Homo sapiens
ctacccaggccccacacctcccagcatcctgcccagccgacgtggggctatcagttgagggatttgcagttgat

SEQ ID NO: 304892 - DNA, 101 bp, Homo sapiens
tttgtgtttcaggtagatgacattaatgctgataagaatatctcttctgcacagattgttggacagtcattttgtttactcattcagccctgttgcaggtc

SEQ ID NO: 304893 - DNA, 75 bp, Homo sapiens
gtcgcctctgtgctcgtgagtccagggatctaagctcttagaacaagctctggtgattgaggaacagctgcgccg

SEQ ID NO: 304894 - DNA, 90 bp, Homo sapiens
tccccttcctgcatgtggcagaaagttgcaaaggtctcctctgagcctccggcctccataagacccaaaacagatgacacctcttcccag

SEQ ID NO: 304895 - DNA, 75 bp, Homo sapiens
cagtcctcctaggcatcttattgatcctccagtcgagggaacccgagcgtcatgttagggtgaagcagaggacct

SEQ ID NO: 304896 - DNA, 82 bp, Homo sapiens
ggcggatgccctgcagtacctgcagaaggtctctggagacatcttcagcaggacctcctctgtcagagagagcagctttgtg

SEQ ID NO: 304897 - DNA, 82 bp, Homo sapiens
cctggagcctcagttggaagcagccgatccagcctgcggagcctgtggggcagagccccacagtcttcgttacaacctcatg

SEQ ID NO: 304898 - DNA, 75 bp, Homo sapiens
atggaggctgagcatttattcaggctcagtttatgaacctcttaaaagcattaatcttccaagacctgataatga

SEQ ID NO: 304899 - DNA, 82 bp, Homo sapiens
gagcacagagcctcgcctttgccgatccgccgcccgtccacacccgccgccagcaatggctgccatccggaagaaactggtg

SEQ ID NO: 304900 - DNA, 71 bp, Homo sapiens
ggttcctgtcgaatgggatcgtttcagggtgataaaagaaaatgtggctgaagttacccgaagttcagctt

SEQ ID NO: 304901 - DNA, 98 bp, Homo sapiens
tgtggaggaggtggatgtgaaagatcctaactatgatgatgaccagaacacagatatgtagaactcttcttgaattctacagcaggagcaagcggtgg

SEQ ID NO: 304902 - DNA, 100 bp, Homo sapiens
ggccttatgcccaggcctgggccctcagaaagcagcggaggaggagaaagagatggacctcccggactcggcctcgagggtcttctgcggccgcatcctg

SEQ ID NO: 304903 - DNA, 75 bp, Homo sapiens
ggcgacggcaacagtgaccagctcatgggcttcgagagagactcggaaggttctgggaagttctggattgtttaa

SEQ ID NO: 304904 - DNA, 100 bp, Homo sapiens
gaaattgcccgcaccgagctggagggcgctgtcgggcttgctgccccccgacaccgctatcctgtcttgggcttgccttcaacttgaatccagctctgac

SEQ ID NO: 304905 - DNA, 101 bp, Homo sapiens
tgtttcccctgccgcggggaaatggctgctgttgcttctgggccagaggaagagaatgaggtggattctccacagttttcctcgtgcgtactcacggtgga

SEQ ID NO: 304906 - DNA, 87 bp, Homo sapiens
aatggagagaagaacaaatggaacgcttggaagcccttgaatgcagtaatagtggccttgtcttcaaaatcatgggatgtagagact

SEQ ID NO: 304907 - DNA, 100 bp, Homo sapiens
aatctgaaaaaaagagaaacctgggtgaactttcacggacaacctcagaggacaacgaagtgttcgagcatgtctgttcgatcctggcttccctcctgcg

SEQ ID NO: 304908 - DNA, 83 bp, Homo sapiens
ttgctccggactcagccaagttccccaacggctccccgtcgtcctggtgctgcagcggactaatggctgaaggataaatcaac

SEQ ID NO: 304909 - DNA, 100 bp, Homo sapiens
cgcaaccattgacgccatgtcgggttattcgagtgaccgagaccgcggccgggaccgaggtgtcctcagcctgcgggggctgcgtggaggtggactcgga

SEQ ID NO: 304910 - DNA, 75 bp, Homo sapiens
aggcgcttcgggagccgcggcttatggtgcagatgctaatttcagtgtctggattaaaaggtgtcaagaagctca

SEQ ID NO: 304911 - DNA, 90 bp, Homo sapiens
cactgctacaggactctactatggagggttctgagcaaggttcaaccagtcaagaacaggccttatctgctcagcaagctgctgttatta

SEQ ID NO: 304912 - DNA, 75 bp, Homo sapiens
cgttatgtgggaagcgaatccagattgtctcaaagcttgccaggagcagattgaggcggtgctcctcaatagcct

SEQ ID NO: 304913 - DNA, 98 bp, Homo sapiens
tgatgcttttgctacgacctcattttctgctggaactggggggacacagcgattgccacgcgccattggaatgtccctggccaaggagctcatattct

SEQ ID NO: 304914 - DNA, 98 bp, Homo sapiens
gcgcacgcaccacgacggcgccatcaccgagcgcttgatgtgcgcggagagcaatcgccgggacagctgcaaggaattgtgaagtttcatgaacacta

SEQ ID NO: 304915 - DNA, 100 bp, Homo sapiens
gcggggtaaagtcctgggcacaagccagcgtcacccatggagcacatggagatgctccaacagacagaagcagagctcaggaaggtggatgaggccatcg

SEQ ID NO: 304916 - DNA, 74 bp, Homo sapiens
gtctttgaccagcaatcctgtgaggtgtggaaacaggaagagaactagaactggaagtaaagcattgaagatgt

SEQ ID NO: 304917 - DNA, 74 bp, Homo sapiens
cactttcggcggagggaccaaggtggagatcaaactgaagcgtgacattcaggaaaacgatgaagaggcagtgc

SEQ ID NO: 304918 - DNA, 75 bp, Homo sapiens
cgccttcaaaagcccacttggcgatgggttacagtaagagcgtcgtatgtctcgtggggtgaatccctccttggt

SEQ ID NO: 304919 - DNA, 90 bp, Homo sapiens
cttgtatgcaggttacaaccacaggcctcaagtggaacctcaatcagctggaggagctagagaagatattccaagaagaccactatcctg

SEQ ID NO: 304920 - DNA, 74 bp, Homo sapiens
tattgcttgtggaacaagttaccatgctggtgtagcattattagaggaagtaacacaaggggatatgagtgcag

SEQ ID NO: 304921 - DNA, 100 bp, Homo sapiens
gctcattaacagaaaagaagaggagaatgctaagcagagatcccttggttccagtaccccattatctatgacattcgggccagacctcgaaaaatctcct

SEQ ID NO: 304922 - DNA, 75 bp, Homo sapiens
gaagtggctttgtggaatattcccatctcctgcctcctaatagctttgaggatgtggaagatgtgaaatttgtca

SEQ ID NO: 304923 - DNA, 75 bp, Homo sapiens
gagagtttaaacagccaaaacagttcattcatattcagccactgccagtgaaagatgtagaagataaacctgaac

SEQ ID NO: 304924 - DNA, 97 bp, Homo sapiens
ctggaggtcaccgtggacttcctcgcagaggtggacaagctggtgcagctgattgagtgccccatcttcacatctgtcttgtcgacggtctcactga

SEQ ID NO: 304925 - DNA, 83 bp, Homo sapiens
gaaacacctctacctcctgcgaggcctcccgggctccgggaaaactacactggccagagacgtctcccacaacctgctccggg

SEQ ID NO: 304926 - DNA, 82 bp, Homo sapiens
cccgctgttcacctacgggcctgatcaaacttgccttcctgttctccaagaccaggccacggcgtatgcctccgaggacggg

SEQ ID NO: 304927 - DNA, 100 bp, Homo sapiens
gttgggtaaaagatacattgaactcttcaggagcacagcagctgaagttcagcagaccgtgtatgctttacccaccattgcatttgcatttgtttgccac

SEQ ID NO: 304928 - DNA, 90 bp, Homo sapiens
tttcaggagtacctggaggctcaacggcagaagcttcaccacaaaagcgaaatgggcacaccacagaaaaatggctacaaacttcctagc

SEQ ID NO: 304929 - DNA, 100 bp, Homo sapiens
gccaagatcggtgagattgccactgggtcccccgtgtcaactgaactgggattaagttgtcatcattctgggaagaaaaaaaaaacattaatgaagaggc

SEQ ID NO: 304930 - DNA, 100 bp, Homo sapiens
aagtatttcaaccacagatggcactgccaacagtgtttaactgctgaagagatcttttcccttcatggcttttcaaatgctacccaaataaccagctcca

SEQ ID NO: 304931 - DNA, 75 bp, Homo sapiens
ggcaactgtgaggactaccttatgatttcctatgcatatgaaacagccaagatgctgtgtgaacagtattacctg

SEQ ID NO: 304932 - DNA, 100 bp, Homo sapiens
caggctgagtgcggcatgatctccatcaccgaatggcagagtacctgtgtgacaaggtcgtccctgggaacagggttaccatcatgggcatctactccat

SEQ ID NO: 304933 - DNA, 83 bp, Homo sapiens
tgcgccggcagaggatccagtgttcaccatcctggccccggaaggaaaccactgttgctgcgattgccccggatatgccagag

SEQ ID NO: 304934 - DNA, 74 bp, Homo sapiens
caacatctctcagagacgaaaggtgtgacttttgttccaataatgaagagtcctttatcctggatgctgacagc

SEQ ID NO: 304935 - DNA, 82 bp, Homo sapiens
agcctcccctgcaccggcaggtgagaggcggatctacagacatagagcaccataacatggtgtgggaagtgaagacaaatca

SEQ ID NO: 304936 - DNA, 75 bp, Homo sapiens
gcagagaatattttcaagggggagtgatcagcagctggactgtgccttggacctaatgaggcgcctgcctcccca

SEQ ID NO: 304937 - DNA, 100 bp, Homo sapiens
agtgaaacagctgcaaaggttgcattgatgaaattaaagatgcatgctgatggcgataagtcattaccacagcttttctgggagaagaggctacaaggac

SEQ ID NO: 304938 - DNA, 51 bp, Homo sapiens
tttaggagctctgctcaaagccagacggaaagaactgacttcctctggtgg

SEQ ID NO: 304939 - DNA, 75 bp, Homo sapiens
tattggaacatgcagggtcctattttgaccttgaagctcaactagagaaaaaggaccaacaatttaaagaacaag

SEQ ID NO: 304940 - DNA, 98 bp, Homo sapiens
ggggaccgccctggacatcaagattaaaagagcgaataaagtttatcacgccggggttattcagcttctcaaggctggaaaagcgaaggaagtttcct

SEQ ID NO: 304941 - DNA, 101 bp, Homo sapiens
atgggccagtgcggcatcacctcctccaagaccgtgctggtctttctcaacctcatcttctgggtgctgcaggaggcttctcacatgctttgggatatctt

SEQ ID NO: 304942 - DNA, 74 bp, Homo sapiens
ggaggccggcgagcctcgggacctctgaaagccttgaggaggcgcgggggtgtagagaggagagagagtgaaca

SEQ ID NO: 304943 - DNA, 75 bp, Homo sapiens
gatctgctcttcgtctgcttcttcctcttcagtcaagaccctggaagctgtcctgaatttcaaatactctggagg

SEQ ID NO: 304944 - DNA, 90 bp, Homo sapiens
tgagcggccgcggccatggcgtacgcctatctcttcaagtacatcataatcggcgacacagacactggctctgagaccccgactgcccga

SEQ ID NO: 304945 - DNA, 100 bp, Homo sapiens
cagccctacggatgcttttgggaccattgagttccaaggaggtggccattccaacaaagccatggtttgcaccttctgctccatctcctcaccacatcag

SEQ ID NO: 304946 - DNA, 82 bp, Homo sapiens
attttggctgctgcaggagccattttagctgtccccgccctactccggaccgccccaaagactccatgggatggacctgagt

SEQ ID NO: 304947 - DNA, 99 bp, Homo sapiens
gggcagttgaggaccccgcggaggcgcgtgactggttgagcgggcaggccagcctccgagccgggtggacacagaggttctgtctgaacaccctccagc

SEQ ID NO: 304948 - DNA, 101 bp, Homo sapiens
caccatcgacccgaagttgcggattgcagccgagaacgagctcaaccagtatctggagtccatctttcaccatcttctcctgagattgtactggaccgtga

SEQ ID NO: 304949 - DNA, 100 bp, Homo sapiens
gccaggctaggtgcctgcaggttgaagaactgagctctatctgggatacctcagacaatggcagcttttggattgaaatatttgctgaatgacactggat

SEQ ID NO: 304950 - DNA, 100 bp, Homo sapiens
acatgtcccaacattacatcccagatttgctcgaatatttgggtacccagtaggtatcgttggaaacaacggagttctcttttctgaatctgcaaaaaag

SEQ ID NO: 304951 - DNA, 75 bp, Homo sapiens
tggctcccatcacctacccgcagggcctggcactggccaaggagattgggactggtgattgcagctggaagtgcc

SEQ ID NO: 304952 - DNA, 100 bp, Homo sapiens
caaattcagctgtctatgaaaatgccagggaaaaattttttagaaccaaagaactaattgcagagatgcgcaggctgatcacccgaggggaatggcagtc

SEQ ID NO: 304953 - DNA, 101 bp, Homo sapiens
cggcggaggcgacggtggcggctctcggagccggcgcgaatccggcccccgcagcgggacccgggccggatcacctcaacagtcacgtcagacaagtgcac

SEQ ID NO: 304954 - DNA, 76 bp, Homo sapiens
tagacactgttgacatcctaggatgcacagctttacacagaggggtaaaaccttgttagccaaagcagtagcaaac

SEQ ID NO: 304955 - DNA, 75 bp, Homo sapiens
acagaggaatagtctacaaaggaagacttgtaacctggagaagagacactctggaaaacggatccaataagggtg

SEQ ID NO: 304956 - DNA, 100 bp, Homo sapiens
ggaagccttgaggacctactcacagataggaattgaagattttgacagtgaagaactggagaaggaattggacatcctccttcaggataccaccaaagaa

SEQ ID NO: 304957 - DNA, 75 bp, Homo sapiens
gccattaaagcgcttcagtcaaaccctgcaggaccatcagcacgtgcccatcgacatccagaccagcaagctgct

SEQ ID NO: 304958 - DNA, 87 bp, Homo sapiens
tgagctccaggagttcgtctcttacgtctgcggaagtgcagctgcctcagttcttagcgcagacatgccaccactgctctttgaggt

SEQ ID NO: 304959 - DNA, 80 bp, Homo sapiens
agatctactttggaaaaacaaaggatatcgtcaatgggctgagaggactacgggcactacgaagagctgccaggggagcc

SEQ ID NO: 304960 - DNA, 50 bp, Homo sapiens
gcaggaggcggtgcacagcgccaagggtgtgcccttgccccttcccccca

SEQ ID NO: 304961 - DNA, 78 bp, Homo sapiens
atgatgatttttctgaggaagtaaccaaacaagaagacctcatgagagagcatcctgaggttagcattacacttctcc

SEQ ID NO: 304962 - DNA, 83 bp, Homo sapiens
ccatggagaccctcacggagctgggcgacgagctgaccctgggagacatcgacgatgccatggacaatattaccaggcagaac

SEQ ID NO: 304963 - DNA, 80 bp, Homo sapiens
gcccggcaccccccgccgacaaggaggaatagcctaacatggcagaccagagacagcgctcactgtctacctctggggag

SEQ ID NO: 304964 - DNA, 74 bp, Homo sapiens
ccaacgtcgagcggcgacggctggatacccagagttatattgacgaatgtcctgggaacggagttaggaagaaa

SEQ ID NO: 304965 - DNA, 75 bp, Homo sapiens
agatctcattccatcatacagtctaggcagcaacaagacatttctcttgggaagttgtgcatctgacaggaatat

SEQ ID NO: 304966 - DNA, 82 bp, Homo sapiens
gaacgaccaagagggtgttcgactgctagagccgagcgaagcgatgagccggagccagccatccgaaagagctaccaggcgg

SEQ ID NO: 304967 - DNA, 75 bp, Homo sapiens
ctgtgacacggttcaggctgtccagaagtaaaaggttaagtgggcagaccaacatccacctcagcaaaaacttct

SEQ ID NO: 304968 - DNA, 98 bp, Homo sapiens
atttgattggcattgacaatcttgtggttccgggaaggctggccctgaaggaccctgttcatacagtgtcactgcagcagttcatctacgagaagctc

SEQ ID NO: 304969 - DNA, 82 bp, Homo sapiens
ccgggactatggtttgtgccctccttattgcctccgaaatatttttaactgccgaggcgccatgtcagaaccggctggggat

SEQ ID NO: 304970 - DNA, 82 bp, Homo sapiens
ccggactcaaccgcgtaaaaatcagtggaccatcccctgcccggatcctctctctccacagactatggcagctggcagatgg

SEQ ID NO: 304971 - DNA, 98 bp, Homo sapiens
attctgtctttgtgtcctgagatcaaatggcacttcattggccacctacagaaacaaaatgtcaacaaattgatgggggatgccaacagacagatcag

SEQ ID NO: 304972 - DNA, 100 bp, Homo sapiens
ttatcactgtgatagaacctggactgctttttgagataatagaggtgctggtgattgggtgtggcaactcagaactgagtgagcaactgtatgatgtggg

SEQ ID NO: 304973 - DNA, 98 bp, Homo sapiens
cgagcagccggaggccccggtcccggagggctccccgaggactttctgaactccctggagaagatggaggacggcaagttgaaggtcaccctcaagta

SEQ ID NO: 304974 - DNA, 100 bp, Homo sapiens
agagaagagattccatcttccagagccttggaatggatggctttggccaaccagttggcattcttggacgccctgccacagcatatggattccgccctga

SEQ ID NO: 304975 - DNA, 100 bp, Homo sapiens
cgagcgcgagcggcgcgagaaagcctccgagagcttccacagcggtggcagcggcagcccgatggccgcgacagccacgtcacccccgccacacttcccc

SEQ ID NO: 304976 - DNA, 75 bp, Homo sapiens
gagggcagctgttcccactggctctgctgaccttgtgccttgctcacccgacgactgccacccatcaaagaagct

SEQ ID NO: 304977 - DNA, 90 bp, Homo sapiens
cgcgtctctctgctgcggcgcggggaccgctgtgctctcggcggccttctgatctgtttaccacgtgagcaagcagctcggttctgtgca

SEQ ID NO: 304978 - DNA, 75 bp, Homo sapiens
caagacgtttgcaaaagggactaggctcatagtaacttcgcctgaggacctgaaaaacgtgttcccacccgaggt

SEQ ID NO: 304979 - DNA, 75 bp, Homo sapiens
gtgacagtctgcatgtgcagttttcaggtcgttgaggacttccacatggagattggcacaggaccagactcaaga

SEQ ID NO: 304980 - DNA, 95 bp, Homo sapiens
cccgccatgaagccccccgcagattgcccgtgaggcagaggctgccatctaccacttgcaattatttgaggaactccgccgcctggcgcccatta

SEQ ID NO: 304981 - DNA, 96 bp, Homo sapiens
aaaaatgcagagctggagtcgtgtgtactgctccttggccaaggtatggcacagtcacaagggtgggtgaaaagatacatcaaggccttttgtaaa

SEQ ID NO: 304982 - DNA, 75 bp, Homo sapiens
cttttttcctacccaaggacatgactatgtacttgcagaaaaacagagctggaagtcgagtgtgctactcaactc

SEQ ID NO: 304983 - DNA, 80 bp, Homo sapiens
acgcggacatggtcatgagctttgtgaacctggagcccggagctgaccctgagccagaagataaggaccaagctgcagaa

SEQ ID NO: 304984 - DNA, 90 bp, Homo sapiens
gctctctcctttccctgttagacatggtcacggagctgctggacgtctccatggagctgggctgtttcctggctggagcgctcgtctcct

SEQ ID NO: 304985 - DNA, 75 bp, Homo sapiens
gacccaagtgccaagttatttactttcccatcaggtttcctgatgtgagcagatttattgctaaacatgggtgca

SEQ ID NO: 304986 - DNA, 100 bp, Homo sapiens
cctttttcatccgaatgaaatctactctgaccaaacgcggtgtgcacatcaaatcatcaggatataaggtagatgacattaatgctgataagaatatctc

SEQ ID NO: 304987 - DNA, 75 bp, Homo sapiens
gacactcagcactttgcgccaccttactctaaccagtttgaagatcaaaagttaacaatgcttgaagctggctgt

SEQ ID NO: 304988 - DNA, 116 bp, Homo sapiens
tatatccaatgccgaacctaagcacaatagcaatagacagttagaaagaagtggaagatttggtggtaatccaggttctacctacagcgtcctgtccaccatgccctcagactcag

SEQ ID NO: 304989 - DNA, 75 bp, Homo sapiens
tcctgacactcaggaaatgagcgattggatggtggtgggaaagagaaaaggaacagttccgtaagctctttattg

SEQ ID NO: 304990 - DNA, 80 bp, Homo sapiens
accctgaccattcgggagagcattctcatcagcaacggctcaagacaatgcagatcttcgtgaagactctgactggtaag

SEQ ID NO: 304991 - DNA, 100 bp, Homo sapiens
atttaacatctacgtcagtgataaaatctccttgaatcgctctctcccagatatccggcacccaaagctgctttgtaccgcctcagtggagactggaatc

SEQ ID NO: 304992 - DNA, 85 bp, Homo sapiens
ccgccgctctgccacggtctgcccacccaacgcgaagacggtaacccgtgtgactttgactgggaatactcccccagttgcaaga

SEQ ID NO: 304993 - DNA, 75 bp, Homo sapiens
tgatgtgcttggtggagcagctgcctgggagaatgttgactctactgcaggaactgtggctgcaccatctgtctt

SEQ ID NO: 304994 - DNA, 76 bp, Homo sapiens
cggccttcgaggaggtcatgaaggacctgagcctgacgcgggccgcgcggatgcctcagttcaagtgctaatcact

SEQ ID NO: 304995 - DNA, 82 bp, Homo sapiens
ttagctgtgctcgcgctactctctctttctggcctggaggctatccagcatggagaaaatcctccaagaacccacatgaacg

SEQ ID NO: 304996 - DNA, 83 bp, Homo sapiens
atgtaaagcccgctgttactttgctaggaaacatacatgctgtcactaagcagagctttttagatgaggaatttcctcactat

SEQ ID NO: 304997 - DNA, 50 bp, Homo sapiens
ggattcctgtacaggagtggtgcagaatggtgaggttctggagaattgat

SEQ ID NO: 304998 - DNA, 83 bp, Homo sapiens
ctaggcccctgcgcggccaacgcccaggatccgcaagctgcgcgcccacgagttgcagaggaaagtggtcgcttatggtcaga

SEQ ID NO: 304999 - DNA, 88 bp, Homo sapiens
tcgcagtggtcgcttcttctccttgccagcagaaaactgagcttccggtcacagagaacgtgcagacgattcccccgccatatgtggt

SEQ ID NO: 305000 - DNA, 100 bp, Homo sapiens
ggatgagagtggggtatttatctataccacaagcaaccacatcaaatatgctgtcaccactgggccggatcacctcaacagtcacgtcagacaagtgcac

SEQ ID NO: 305001 - DNA, 76 bp, Homo sapiens
cagcgacacccgaggggctacacagtatataaggtcaccgcccgggcctaagatctggcaaacttggtgaacagtg

SEQ ID NO: 305002 - DNA, 75 bp, Homo sapiens
agacttatgaagttgaccttaataaacttggccctaaaccacacagaagagctggcatgaaacccagagctttca

SEQ ID NO: 305003 - DNA, 100 bp, Homo sapiens
ttaaccagcatggctacttcatattttggaaagcagtttttaagacaagctgctttgctggctctgcaagaaaatggactagacgcaactacagtgaaac

SEQ ID NO: 305004 - DNA, 100 bp, Homo sapiens
gaagttgtaatggccgaacccttggagatgatagttccaagaaggaacattttatcgtctttgtttttaatctcaagaatggtacctaccatcagtgaat

SEQ ID NO: 305005 - DNA, 75 bp, Homo sapiens
cggagacacatgaaggtggcattttttggcaggcagctatttttgctatgataatcctgctgcccttcagactca

SEQ ID NO: 305006 - DNA, 75 bp, Homo sapiens
ataccacgacaaaaccaccctagaggactgacaaatggtagtggtcgatatatctctgcagcacctggagcagaa

SEQ ID NO: 305007 - DNA, 100 bp, Homo sapiens
cagttcgctagtcaaacctgtgagttcaacatgatagagcagagtggaccaccccatgaacctcggcaacagatcccctaatttgtggctgaaagatgtt

SEQ ID NO: 305008 - DNA, 100 bp, Homo sapiens
cagaggtgtggcaggtgctgaagacccaccccggagacccccgcttccagtgcagtgcacagataaacttgaacgagataggttgattctcttccttaac

SEQ ID NO: 305009 - DNA, 83 bp, Homo sapiens
cataatcctggagagccccggtttaagatctccaggtgaagtagatttttattagataattgacgaccttgccaacctagtgg

SEQ ID NO: 305010 - DNA, 103 bp, Homo sapiens
gggctcgcactcttctggtctcccaggcccaacccacctgaaggtaacagcatcagagaagacaaagggagcaacttcccctggacagaaggcaaagttggtg

SEQ ID NO: 305011 - DNA, 90 bp, Homo sapiens
gaggaggaggaagcggccgccgcggggtccgcggcgcgcccggcccggatccgagtgaagcctgacaggaccggtgtggtcacggatggt

SEQ ID NO: 305012 - DNA, 100 bp, Homo sapiens
gtcatttcttgtaagtaaaccagagcgaatcaggcccctgtccctgccttacccagcaagcttcccacgtttggagccccggaacagttagtggatttaa

SEQ ID NO: 305013 - DNA, 100 bp, Homo sapiens
ggagcccccaggggatcaagtccccctcgaagcctccaggaccaaatcggattggcagaaggaaccaggtacatctccgttcatggatgcattaacagcc

SEQ ID NO: 305014 - DNA, 101 bp, Homo sapiens
ggcgggtcccgcgggccaggccgtggaggattcctccttggtcacttttcagcagcagcctgctcttcttttgcaatctcttcaggatctctgtagaagta

SEQ ID NO: 305015 - DNA, 90 bp, Homo sapiens
taggacttgatggatcactagtttttctggctgatcttcagacaagttctcagcgtttaaatctttcagcctccaatgctgcagtggctg

SEQ ID NO: 305016 - DNA, 83 bp, Homo sapiens
gagataatgactcggcggcggcggcggcgggcatcgcagtggcgcagacaatgcagatcttcgtgaagactctgactggtaag

SEQ ID NO: 305017 - DNA, 90 bp, Homo sapiens
cgaagaccagccagaccatggagctcgcccccaacttccaggagcccccctccatgcgcctgaaggcccgacccagcagccctggctttt

SEQ ID NO: 305018 - DNA, 88 bp, Homo sapiens
cctatgattgggctggtacccatcctcaagggaggccgtttctaccagggtgtgggccgaagatatgctcatgtggtgttgaggaaag

SEQ ID NO: 305019 - DNA, 100 bp, Homo sapiens
tctggtctttcgccaggaagacgccttccacccaagggaactgacatggagcccaaacctgcaaccaagaaggctacacgaacaaaggctatttctgaag

SEQ ID NO: 305020 - DNA, 75 bp, Homo sapiens
gttggatggatcaagaatctacggggagccaagtcacttaaaagtatcagttctgggaggtgatcagtgatgaac

SEQ ID NO: 305021 - DNA, 74 bp, Homo sapiens
tgagtttcctggtagagccggccgagctgaggcggtcgcggccatgaagagaagaggaggtatcttgcagtggg

SEQ ID NO: 305022 - DNA, 87 bp, Homo sapiens
caagaggaggacagttcgctacacagcaatgcatcgaggcagcacacttctgcttttgttccttcatcaggacgaatttactctttt

SEQ ID NO: 305023 - DNA, 98 bp, Homo sapiens
aacgccggaagctgacggttgaggacttcaacagggccctcagatggagcagcgtggaggcatccgtgtcattctggaccttactcccaactaccggg

SEQ ID NO: 305024 - DNA, 100 bp, Homo sapiens
gccaactcttcgttcgattattagctttagtgaaatgggctaataatgctggcaaagtggaaaaatgtgcgttgaaacattgtagtcggtatatacatga

SEQ ID NO: 305025 - DNA, 100 bp, Homo sapiens
tcaccgagggggtccttaccactaccttcagcgacgagggcaatctccgaggatctcccagccatccagccccggctagtggcggtcagcaaaaccaaac

SEQ ID NO: 305026 - DNA, 83 bp, Homo sapiens
cccaggcacagccgacgccgcgggagaggtggagaagagcgagtacttgagaaagaagaggaagaagatgatgatgaagatga

SEQ ID NO: 305027 - DNA, 99 bp, Homo sapiens
gaagaatttcaacaatctctatggcaccaaaggggcaccaccacgaggcgatttgtgggccataccaaggatgtgctgagtgtggccttctcctctgac

SEQ ID NO: 305028 - DNA, 74 bp, Homo sapiens
gtcgaggacattattttcacaatcatggaagggaagtggttgctgtgtatgttactggtgcttggaactgctat

SEQ ID NO: 305029 - DNA, 100 bp, Homo sapiens
acttaatgactgtctcacattggccggcaacttgttccagctctggccaggctgccgcacctctacaggaactttgccgcggagcagtatgccagtgtgt

SEQ ID NO: 305030 - DNA, 100 bp, Homo sapiens
tcatgttttctcctgatcaagaaaatcatccatctaaagcaccagtaaaatatggtgaactcattgtcttaggattgctcttaaacttggtgtgactgct

SEQ ID NO: 305031 - DNA, 87 bp, Homo sapiens
cggtcctcagcgactcttctgacctccgcgcgacgtacccgccgccgccgttggctggaggtgcccgtggttgacacgagctgtgtc

SEQ ID NO: 305032 - DNA, 100 bp, Homo sapiens
cggctgtgtcgcagcctctcgggatgacaccactctgaatgcactgaacacaaatccctgtaaccattcatccaggtgttgagaagatatgtagcagccg

SEQ ID NO: 305033 - DNA, 100 bp, Homo sapiens
tggtgaatcccctgtttgagaaaaggcctaagaattttggcattggcatctaataggattcaggaatcaaagaatcagtgtactcaggtggtacaggaaa

SEQ ID NO: 305034 - DNA, 75 bp, Homo sapiens
gtcagcacaaccaatttgcattagtgtgatgaatgcagactctgctaccattttggctgtttggatcctcctttg

SEQ ID NO: 305035 - DNA, 73 bp, Homo sapiens
atgtcttaagacaagcttctaagtgaccaaagacttgaccactcaaagtccagctccccagaacactgctcga

SEQ ID NO: 305036 - DNA, 50 bp, Homo sapiens
cttgaggctgttttcctagaactcgagtgatctttgcagagctgtttcaa

SEQ ID NO: 305037 - DNA, 100 bp, Homo sapiens
tgttctcgcacaagaggagttggtgtgaatgagccaagcttcttgaaaggcctgtctacacttgctgtcttccttcctcacctccaatttcctcttcaac

SEQ ID NO: 305038 - DNA, 100 bp, Homo sapiens
gagttcgtgcgcaagaccctggcaacctggctgcggagacgcggcggatgggccaggtcagagcagcccaccatgggatggggagggggtggaggctgca

SEQ ID NO: 305039 - DNA, 96 bp, Homo sapiens
gtgcagcccccttcgccagccattttctctacaaagctgggggaggctcatatattgctgcagacctgtcatttactccatcctttatagtgatgc

SEQ ID NO: 305040 - DNA, 100 bp, Homo sapiens
tgtcagtggctctcttggccctcctgaaatgatggactagaggcttttaccagatttcttaaaactgaattcagtgaagaaaatattgaattttggatag

SEQ ID NO: 305041 - DNA, 96 bp, Homo sapiens
acagcaatatctctgggctttcacagacttaattcagtgcacaaatgagatgaatgtgaacatcccacagttggcagacagtttatttgaaagaac

SEQ ID NO: 305042 - DNA, 60 bp, Homo sapiens
ccgatattcaccaagcgcttcgctacaagcaactagaagccatttgtgtcaaggtaacgt

SEQ ID NO: 305043 - DNA, 82 bp, Homo sapiens
atgaagccgcggaccctcgcgtaattaatggtcacacactgtgtttacggctgttgctagaaattgcagacaacccggaggc

SEQ ID NO: 305044 - DNA, 98 bp, Homo sapiens
gagatttttacatttgaatacagtgcagcttagtaaactgttgcaagagaatgtgccgtcatatgaaaaaggcgtcacaatgtagcagggaccccagg

SEQ ID NO: 305045 - DNA, 75 bp, Homo sapiens
atcccaaagcaaaattaccagggttcgtgctgtaagacctaaagttcttatgagattgtccaaaacaaagaaaca

SEQ ID NO: 305046 - DNA, 90 bp, Homo sapiens
cttctggcatcattaacggaccttttaccatgaatagttctactccttctacaggcggttttggtgaataacatcaccacaggtgagagg

SEQ ID NO: 305047 - DNA, 50 bp, Homo sapiens
gccggggtggtcctcttccctttgtcgatttgaaagttgagagcagcatg

SEQ ID NO: 305048 - DNA, 111 bp, Homo sapiens
ccgctcctgcgggcttagcaggaaagggtgcctaaggctcacagaacatttcctgcctgttgctcacactctgttgtccacagcatacccgcaccctagatggctgactct

SEQ ID NO: 305049 - DNA, 82 bp, Homo sapiens
ggcagtccacccaccgccgccgcctcccaggctccataaaaatacagactcaccagttcctgctttgatgtgacatgtgact

SEQ ID NO: 305050 - DNA, 75 bp, Homo sapiens
acttcatgttcacccgcgggggaccctactggcaggaggtcaagggcaagtgtccagagaatggctgggatgaaa

SEQ ID NO: 305051 - DNA, 100 bp, Homo sapiens
cagacgcaggcagccccaaagcctgaacaggcagggccagacccagtcacgtgacctggccgtcgcttggcaacaggacgccgccgagtcccgcttctcc

SEQ ID NO: 305052 - DNA, 75 bp, Homo sapiens
ggcggcgccgctcatccccctctcccagcaggggaccctcacaatgatcccaatgctcagggggatgccttcaag

SEQ ID NO: 305053 - DNA, 99 bp, Homo sapiens
agcagctggccggaaaagtgttgcctcatcttattcccctgagtattgaaaacaatcttaatcttaatcagcaatgagtattacccagcagatctgcaa

SEQ ID NO: 305054 - DNA, 83 bp, Homo sapiens
aggtgttactcggggtgcgccagtggaagcgggaggcagttgcagctttcagacacatgcctcactcctgtcagcagttccac

SEQ ID NO: 305055 - DNA, 104 bp, Homo sapiens
ctgggagtgacggcatatgaactgctgagaggccgggtaatagcctgcagctggtgttttgagaagccctactgctgaaaacttaacaattttgtgtaataaaa

SEQ ID NO: 305056 - DNA, 90 bp, Homo sapiens
gttatcatgagggaattccggtcagggtcaagtcgtgttctgatcactactgacttgttgggaccaacgagcaggctatcatcgatgtgc

SEQ ID NO: 305057 - DNA, 87 bp, Homo sapiens
ggcccccagaagtgatcgctcagctggagaacgcggctaaagttctgatgatgagtgtgggtcagagagccaaactgactatatctc

SEQ ID NO: 305058 - DNA, 75 bp, Homo sapiens
cggggccccgggatctcggctgtccttcctcccgcttgatccaaggattattcgaccatttatagcagaatgccg

SEQ ID NO: 305059 - DNA, 75 bp, Homo sapiens
cctccgagcgcaaggacagcgcgaggtccgcgcagcccagcgcagccatggtggactccattatgctggtggaag

SEQ ID NO: 305060 - DNA, 101 bp, Homo sapiens
cagaatgctaaaagaaaaggagccgcgtgtggaggaggctgaagtctcacatcagaggtgtcaagatatttggagttcttacaacatggcagacattgaca

SEQ ID NO: 305061 - DNA, 100 bp, Homo sapiens
ccgccgccgccgccgcggacaatgagagggaaaagcattcgtcaaagagagcttaaaatgcatcgccaacggggtcacctccaaggtcttcctcgccatt

SEQ ID NO: 305062 - DNA, 96 bp, Homo sapiens
ctgggcagagctccaccatgacgggcacctacgcgggacagttcgtgatggagaggtctacaccatccagggaaactcccacggaaagccgtgcac

SEQ ID NO: 305063 - DNA, 100 bp, Homo sapiens
gttactgggtctcctctcaagaaatctcaagatattaaagttactgctgttaaaaaggcctgttacatgaacagaatatggcaaaaatgagactacttac

SEQ ID NO: 305064 - DNA, 100 bp, Homo sapiens
cggatcaatccagatggcagccagtcagtggtggaggttgatccaactaatggaagaaataatggctgaaaaggaaaacaaaacaataatatttgtggag

SEQ ID NO: 305065 - DNA, 98 bp, Homo sapiens
acggctgaaggccctacgggagaaaaccgggcgcaaggcagccgagagaccgccttcacccacgcggtgagcgccgcgggcgtggtcaacgccatcag

SEQ ID NO: 305066 - DNA, 83 bp, Homo sapiens
agatctgggtgcccgtggaccacaggccctcgttgcccagatggactttgaacatgtcggggatcgccctcagcagactcgcc

SEQ ID NO: 305067 - DNA, 82 bp, Homo sapiens
ctttcacaataagagcagaggatggaacacttcagtgcattcaaggtactccaaagattcaggtttactcacgtcatccagc

SEQ ID NO: 305068 - DNA, 51 bp, Homo sapiens
taccggaatgtcatccagcgagtgattaggctgtcattatttgtatcaaaa

SEQ ID NO: 305069 - DNA, 98 bp, Homo sapiens
agcatctttgtaaagcttcttaagatatcaggaattattcttaaaacgggagagagtcagaatcaactagacttctgctggatgtgtctaggagattg

SEQ ID NO: 305070 - DNA, 83 bp, Homo sapiens
aagcaggtccggacccactggctgctggagcttgtcaccaccagacctcctgccccccgaggtctgcagtctcctgaacccag

SEQ ID NO: 305071 - DNA, 96 bp, Homo sapiens
ctaagaatacattttatgaaacattaccagtggcaattaatggaaatggacccaccaagcattagtgccagcagtagttcccaagggctgtctcag

SEQ ID NO: 305072 - DNA, 75 bp, Homo sapiens
gaaagaacacatccatattggggagatgaagcaggaacttgtaatagctggcatcgttgagaatgaatggaaaag

SEQ ID NO: 305073 - DNA, 83 bp, Homo sapiens
ccgcgagcgcggcctgcaggagacaccattcgcttttcacccaagatgatttgatgtcttataaaactctgatgaaccatgat

SEQ ID NO: 305074 - DNA, 100 bp, Homo sapiens
gattccctgtgttctgcttttttcattgttccactggacgctcatcagagggaagatctttttcctcaattgatggctgtatgggcgaaaaagatgaccg

SEQ ID NO: 305075 - DNA, 100 bp, Homo sapiens
tctgtccctgctcagtcggccaagaagccctgcccagtaaacattgctatcttcagaaattaaggaatgagaggcaaggaagaaaggacattcatcttgg

SEQ ID NO: 305076 - DNA, 102 bp, Homo sapiens
gaaaaggctagagaagtcaccctccttcgcctcggagtgggatgaggtatcacagcctgtacctgaaggtgaaggggaatgtgttcaaaaacaagcggattc

SEQ ID NO: 305077 - DNA, 100 bp, Homo sapiens
cacagcaaacccgccgggatcaaagtgtaccagtcggcagcatgggagtccccgggccccaggctgcagactggtacctgtcgagagctgttaggaactg

SEQ ID NO: 305078 - DNA, 98 bp, Homo sapiens
tattatggataccaaggaagagaagaaggaacggaaacaaagttattttgctcgctcttacccggctctacaaattactgaagtccactgatagtccc

SEQ ID NO: 305079 - DNA, 82 bp, Homo sapiens
cggccgcggccatggcgtacgcctatctcttcaagtacatcataatcggcgacacagactggccttatgggtttctagaagg

SEQ ID NO: 305080 - DNA, 98 bp, Homo sapiens
caagaaggtgccggtggtgcgagtcttcggagcgaccccggcaggagcggagggcacagtgttccctaaatctatagaaacacctaatgtcagggcag

SEQ ID NO: 305081 - DNA, 93 bp, Homo sapiens
ggcaacatggcagagaccgcggccggagtgggccgcttcaagaccaaagacgtctcccacaacctgctccgggcgctggacgttgggctcctg

SEQ ID NO: 305082 - DNA, 75 bp, Homo sapiens
ccacctttacttttacctacgttggcggccccagaaggaactgtggctgcaccatctgtcttcatcttcccgcca

SEQ ID NO: 305083 - DNA, 102 bp, Homo sapiens
ggaaaattacccggtatcgttagaggggaagcaaaggcgaatgctccttgtgttatatttattgatgaattagattctgttggtgggaagagaattgaatct

SEQ ID NO: 305084 - DNA, 100 bp, Homo sapiens
ctctctccccagaaatccaacttctcaagacaaatcttcctattttcaagctgaaagaatctactgttagaagaagatacagtgactttgaatggctgcg

SEQ ID NO: 305085 - DNA, 74 bp, Homo sapiens
gaaattccttggacattaagtcgcccttccaccaatgagatggcaacccacacattgatcacggggctagaaga

SEQ ID NO: 305086 - DNA, 100 bp, Homo sapiens
ggcaacggggctccgggccctaagggggcagcaaggagcgcttccactggcagagccacaacgtgaagcagagcggcgtggatgacatggtgcttcttcc

SEQ ID NO: 305087 - DNA, 100 bp, Homo sapiens
cagaaactgatccgcaaagtgtctacctcggggcagatccggaccaaggttgttgatcattatgaaaatcctagaaacgtggggtcccttgacaagacat

SEQ ID NO: 305088 - DNA, 74 bp, Homo sapiens
tttgctttctcggagcaaaagtgaaatggctagtgatgagctgaaagagatgcggaaaaacttgaccaaagaag

SEQ ID NO: 305089 - DNA, 73 bp, Homo sapiens
tgggggaagccattgacgtgtaccaggcgtctgtggggtttgtgtgtgagagtgcgccccggagaacaccttg

SEQ ID NO: 305090 - DNA, 100 bp, Homo sapiens
gcgaagtagaggatgccgaggagaaaacagcaggcacccaagcgggcggcaggtcgacaaagatgctgaattagtggcccaatggaactattgtactcta

SEQ ID NO: 305091 - DNA, 98 bp, Homo sapiens
tcccatgatacatggtggggagatacagcaaacacccaatactgttgcagcctcccctgctgcatcaggtcaggttgccaaaaaggaagatctcatca

SEQ ID NO: 305092 - DNA, 74 bp, Homo sapiens
ccggcgtgcgtgttcgggcatgcgcgctgccgccgcactgccctcgcttcctgtctatcagccacagtctctgc

SEQ ID NO: 305093 - DNA, 82 bp, Homo sapiens
ggttgattatcgagcaaaactttgggcctgtaatttctgttttcaaagaaatcaggaatcctacgccaacgtgaagcagtgg

SEQ ID NO: 305094 - DNA, 82 bp, Homo sapiens
acggtcctaagagctgggcaccaggaagcgaaggctggctaaggcagctggataagcacagccaggccacagcccagcagct

SEQ ID NO: 305095 - DNA, 88 bp, Homo sapiens
taggcaccgaacccagcattttcggcaaccgctgctggcagttttgccaggtgtttgttaccttgactggtcgaattgacaaatctta

SEQ ID NO: 305096 - DNA, 82 bp, Homo sapiens
attcagagcgcgtatggagtggaaacgcttgtagggcttcaccaggctggcagtgatggtgaaagcataggaaactgcccct

SEQ ID NO: 305097 - DNA, 100 bp, Homo sapiens
aaacccgtgatgcccaacatgatcttcattggtggtatcaactgccatcagggaaagccgttgcctatggcaggtgacagcagggacatgtctcgggaga

SEQ ID NO: 305098 - DNA, 103 bp, Homo sapiens
gtaagagactccaaggacaactgcaagggggaagtagagagataacaaaagctgctcagagtctcaatgaacttggtttccctaggacttctgcatgcccatg

SEQ ID NO: 305099 - DNA, 75 bp, Homo sapiens
tgactagcagcttcattttgaagtacaccaggggttggaaaaaccacactaggcaaagaacttgcgtcaaaatca

SEQ ID NO: 305100 - DNA, 101 bp, Homo sapiens
cttggttaagaaagctatatatgccatggttgagggagactgtgatgaggctgaccggttccctgatgtgttacctgcttctgctactgatccaaactgca

SEQ ID NO: 305101 - DNA, 50 bp, Homo sapiens
gtcagaccgatctgctctgctctcggtccaggtcaagacctcgtctccgt

SEQ ID NO: 305102 - DNA, 122 bp, Homo sapiens
aaggagaaagtcctacaacagtttggcgtgcaacatggggcttgagaaaggaccaagatcactccatggatgaaatgacagctgtggtgaaaattgaaaaaggagttggtggcaataatggg

SEQ ID NO: 305103 - DNA, 100 bp, Homo sapiens
aagactattactcgttgctgaacgtgcgcagggagtgagaaagatcagtctaaagaaaaggagaagaaagtgaaaaaaacaattccttcctgggctaccc

SEQ ID NO: 305104 - DNA, 88 bp, Homo sapiens
gcaaagactccagtaacactcaagcaaagaagagttgagcacaatcagtgctctatgcccaggtctctgtggctgggctgctccagcc

SEQ ID NO: 305105 - DNA, 104 bp, Homo sapiens
ggagcgcgagcaggacccgcgtgtcgcccctcagcagtggtgtccgcaatgttgccagtgtctgtctgcagattggctacccaactgttgcatcagtaccccat

SEQ ID NO: 305106 - DNA, 83 bp, Homo sapiens
cttcgatgttagccgggacccgactcagggggatatgagactttctactcggaatatcctgagtgttgcgtggatgtaaaacc

SEQ ID NO: 305107 - DNA, 100 bp, Homo sapiens
ctggattcaagtcccaggagtcctgaccagagagcagatacagcatcatgcaggcctgctgggccttggagcccacccacagacccaccttccagcagat

SEQ ID NO: 305108 - DNA, 98 bp, Homo sapiens
aagctatctagggacgagatctagaatcaactgagagagatgcttaaaaatcaccagttactttaatgagaccgtatccttgatgagcttgacaaaga

SEQ ID NO: 305109 - DNA, 87 bp, Homo sapiens
ttggtttcgggatctcggtgctgcagacggcgagacctcctgcacaggttgggcccgaaggcatcctgcagaacggggctgtggacg

SEQ ID NO: 305110 - DNA, 75 bp, Homo sapiens
caggatggccgacttaaggcaggagacagacttatagagggaggaagagatagtcgctctggatcacccatggct

SEQ ID NO: 305111 - DNA, 75 bp, Homo sapiens
ccctgctctgtcactaacaagctgcgtgatcttcgcttttatcaaaatacaactcaaacctagctactccaatag

SEQ ID NO: 305112 - DNA, 100 bp, Homo sapiens
tgcggaagtgcagctgcctcagttcttagcgcagatttgtagccaaaccgtgcgccatagccctcaacattcaggccaatggaccacaaattgctccgcc

SEQ ID NO: 305113 - DNA, 100 bp, Homo sapiens
gacacggtactaccgggcgcccgaagtcatcctgggtatgggctacaaagagaacggtactccaaagattcaggtttactcacgtcatccagcagagaat

SEQ ID NO: 305114 - DNA, 98 bp, Homo sapiens
acgtgaggaagaaccgctacaaagacgtgctgccttatgctgaagttccgaacagtccatgggggcctgaggctcctgggaatccgccgaacctccac

SEQ ID NO: 305115 - DNA, 101 bp, Homo sapiens
ccacgcagcaagacccgcgccgccgggacccccaggacgacgtgtacctggacatcaccgcttgaaatccatggcccaaaatgactctaccagtggagact

SEQ ID NO: 305116 - DNA, 51 bp, Homo sapiens
gcctcttcagcgacctgcccgaggtccggtgtctaaaagactatggagaat

SEQ ID NO: 305117 - DNA, 96 bp, Homo sapiens
gaggagctggcagccaaggaggtggacaccatcacggcagtgctcttaaagttccgtacagataaaggaagagatcccagttctgatacatatgag

SEQ ID NO: 305118 - DNA, 82 bp, Homo sapiens
gtcttcggtggactccttcggcagtccacccaccgccgccgcctcccagacttcccaagaaggacaacccgaggcgaggctt

SEQ ID NO: 305119 - DNA, 83 bp, Homo sapiens
ctggtcagagcgcggatggccgtaaccccgaaggaaatgctgaaggtgatgtggccgccctcaaccgacgcatccagctcgtt

SEQ ID NO: 305120 - DNA, 100 bp, Homo sapiens
cagaggtgtgcccaccgctgctctgccagaacccctcacgcacccaggattcctgctgcccacagtgtacaggtgatgtggaaacagctgtaaaatttgc

SEQ ID NO: 305121 - DNA, 50 bp, Homo sapiens
cccgcctaaagcagctctcatttgcagtacgtagagaaatcgacactctt

SEQ ID NO: 305122 - DNA, 75 bp, Homo sapiens
aaagcctattcaaaaataaaggtggacaatcacctttttaacaattctaatacccgatttacaattacattgaac

SEQ ID NO: 305123 - DNA, 100 bp, Homo sapiens
gcactcactctacgtggagttgggccctgcaggaaggacggacttcaggggcagactcagaaccgtgctgcatactatcctcctagccaaattgctcaac

SEQ ID NO: 305124 - DNA, 100 bp, Homo sapiens
tttgagccactatattaaaactgctaaggctgagtcatcactagagagtgggaagggcagcagcagcagagaatccaaaccctaaagctgatatcacaaa

SEQ ID NO: 305125 - DNA, 82 bp, Homo sapiens
ctagcactgcattaagtgatgcatacaggatttttagactctgaggagcagttggagctaatccacattatggaaatggaaa

SEQ ID NO: 305126 - DNA, 82 bp, Homo sapiens
cacagccaaaaattcttcctgggacacaacgacgacattatcagagattcgtcagcgaactgcagctcaaagaaacctttct

SEQ ID NO: 305127 - DNA, 74 bp, Homo sapiens
ctggggcccgcgctgcagcgtggatgagcctcggggacactgtgccgaatgaaacaaatttacatgtattggag

SEQ ID NO: 305128 - DNA, 75 bp, Homo sapiens
cttcaaccagagcctttcatcctcaaactggattgcctcttctttcaagccctgaatgtgcggcaagaggagaag

SEQ ID NO: 305129 - DNA, 136 bp, Homo sapiens
gagaactgcaacgcccgcctggtggagctcaagaggcaggccctgaggttgctcctcccggggcccttcccgggcaagatcaatgaactgagccatgttcaaatccctgttatgttgatgccagatgacttcaaag

SEQ ID NO: 305130 - DNA, 100 bp, Homo sapiens
atttagttctggggagcgcctcgtcgacatgagtgatgtggaggaaaacaacttcgagggcagagaccgcctgtactttgtgatggagtacgtgaatggg

SEQ ID NO: 305131 - DNA, 50 bp, Homo sapiens
caggaaaataattaaatattcttaccgagaacgatatcgcattcagagtg

SEQ ID NO: 305132 - DNA, 100 bp, Homo sapiens
gctcatcctgcagcaggccgtgcaggtcatcctggggctggagcagcaggtgcgagcttccatgtaggaagcggctgtaccgatcctgagaccttcgtgc

SEQ ID NO: 305133 - DNA, 86 bp, Homo sapiens
acattcagacaaaattggagagactgccatgaagcaagtgaatgattccaattgtgaccaagaacttctttccctgctcctggatg

SEQ ID NO: 305134 - DNA, 88 bp, Homo sapiens
ctctgggccaggagaagctgaagctggaggcggagcttggcaacatgcagggcgcattttggaggaccaggaggaaaacccgctgccc

SEQ ID NO: 305135 - DNA, 87 bp, Homo sapiens
tccaacttcttgatccatctgggagagaagacgtaccattatgtgcccgaattccgaaaagagtctcttctccttcaagtccgtggt

SEQ ID NO: 305136 - DNA, 101 bp, Homo sapiens
cagtggagccttctcagacccacaggttttgaacgaagaatgtgatcagaactggtacaaggcagagcttaatggaaaagacggcttcattcccaagaact

SEQ ID NO: 305137 - DNA, 88 bp, Homo sapiens
agccaccacacccagccactaagaactattactttggcttatgtaaatattggcctcatacatctgctacacctggataactacacgg

SEQ ID NO: 305138 - DNA, 100 bp, Homo sapiens
gaggacaaggctcgggaactcatcagccgcatcaaacagagtgaactttctgccaagatgcggttcaaggatggcccagtccctgcccatgaaccatccc

SEQ ID NO: 305139 - DNA, 90 bp, Homo sapiens
ggaaaggatgttggcggtccctgtgacctgtggagacacggccagatctgccctccaagatcatgatgcagccgtccttttggatttctt

SEQ ID NO: 305140 - DNA, 75 bp, Homo sapiens
caaacacacacccatcgcccctggctttgccagcctcaatgagatggccctgagagcagatggctttggagacaa

SEQ ID NO: 305141 - DNA, 95 bp, Homo sapiens
tggaagagtttaatagataattttgctttaaatccagggggtcctggtcttcatgatccttgtgagcgagacccaacagatgctctgagctatat

SEQ ID NO: 305142 - DNA, 78 bp, Homo sapiens
ttacgtggagatcaagcgcagcgatgttcgatcctttggtacagaagacagaccgacagatcgtccaataccacctcg

SEQ ID NO: 305143 - DNA, 100 bp, Homo sapiens
gctcagatggagaatatccgatgttatctgccagatgcctataagattatgtctcaaagcttggatttacactgggcaacgtggttggaatgtatctggc

SEQ ID NO: 305144 - DNA, 82 bp, Homo sapiens
gttcgctacacagcaatgcatcgaggctcttcagagtaacctgaggtactccttgttgccaagacggctcctcatcagcaaa

SEQ ID NO: 305145 - DNA, 75 bp, Homo sapiens
catcagcttcagagaatggcagccatttatttgtcccgtggacctattcaaactcagtctgtctcttgactggag

SEQ ID NO: 305146 - DNA, 75 bp, Homo sapiens
gaaggggttgctgcagtctggtcagatccctggcagagaacgcagatcagcttgagatcttcttagcccagagag

SEQ ID NO: 305147 - DNA, 103 bp, Homo sapiens
tcacgcacgggatccagagcgccgcgcacttcgtcatgttcttcgcgccctggtctcggcgcggaagatggccggcggcgtggacggccccatcgggatcccg

SEQ ID NO: 305148 - DNA, 90 bp, Homo sapiens
cctgaaggagacagatcttctcaggggccagctcaccaaagtgcaggcaaagctctcagatgcggaaaacgccatgcggtacataaatgg

SEQ ID NO: 305149 - DNA, 49 bp, Homo sapiens
ggctggaggaactttgcatacagacacgatgaggcgagtggtacgacag

SEQ ID NO: 305150 - DNA, 100 bp, Homo sapiens
aggagtcgtactttgggagaactagaatctctgcagataatcaccagaatgggagtgaatgacttgtggcaaattttggagcctgttaagcaacacatcc

SEQ ID NO: 305151 - DNA, 100 bp, Homo sapiens
ccaggagctgctgcgcacgaccggcgcctcggacaccttcgagggttggactgctctggcccatttagagtctcttgcagtggatgttgaggtggccaat

SEQ ID NO: 305152 - DNA, 100 bp, Homo sapiens
ggctggccaagttactggagccgatgtgtttgatcagtatgtaaagaccagggcagaggaagaacgcagggaaaagaaaaataaaataatgcaagccaag

SEQ ID NO: 305153 - DNA, 88 bp, Homo sapiens
tactactacatggacgtctggggcaaagggaccacggtcaccgtctcctcagccatcccaggcctcaggacctgagttctccgacgcc

SEQ ID NO: 305154 - DNA, 50 bp, Homo sapiens
cggagctggtggaggccaaagcagcaagagcaactcaccaccagccttgg

SEQ ID NO: 305155 - DNA, 82 bp, Homo sapiens
gacgtcttgcctgtgtcccacttgttcgcggcctataggttatgaagacagtatggagtttccagaccatagtagacatttg

SEQ ID NO: 305156 - DNA, 74 bp, Homo sapiens
caagctgctgtgcggcctgctggccgagcgcctgcgcatcagcccggacaggttccctacggtcttatccacca

SEQ ID NO: 305157 - DNA, 75 bp, Homo sapiens
tgatttgctcttacgtatttgtgtgacttgactcttcaaacacaaaggcaattaagttggaatatgcaaggttgg

SEQ ID NO: 305158 - DNA, 100 bp, Homo sapiens
acacaactccagtgctaactcaacagcctcagactatggcatgaaactgccaatcctgcgttccaaccctgaggaccagatcctgtatcaaactgagcgg

SEQ ID NO: 305159 - DNA, 100 bp, Homo sapiens
tcatgaaaagcatgcccatacgattaaacctgcaatgttgtaccatctttgggtaggcagacttccctgacgacatcagtgatacccaaagctgagcaga

SEQ ID NO: 305160 - DNA, 113 bp, Homo sapiens
ggccgtctcgctctgggtctccaggcccgcgaccgtccgccagtcgtcccgagcatcatggcagaacaggatgtggaaaacgatcttttggattacgatgaagaggaagagcc

SEQ ID NO: 305161 - DNA, 50 bp, Homo sapiens
cgtccacagccaggagacacgctcggggtgtggttttctctcggttgtgc

SEQ ID NO: 305162 - DNA, 83 bp, Homo sapiens
atccatcccatctcttggacagatgatgccagttaattactttgaattgcacactggtttttggctgttgtttgtttccccgg

SEQ ID NO: 305163 - DNA, 90 bp, Homo sapiens
cttcaaccccaggggaccagaggaactcagccctgattgcgtgtggccagactccactgatgatagctgccgaacaaggcaatctggaaa

SEQ ID NO: 305164 - DNA, 100 bp, Homo sapiens
ctttgaatgcatcagaaccatgcacgagtacagttgtgaatttggctccgcgaagtattatgcactgtgtggctttggtggggtcttaagttgtggtctg

SEQ ID NO: 305165 - DNA, 117 bp, Homo sapiens
ccttcttggacgcctttcagaaagtggctgacatggccaccaacacacgtggtactccaaagattcaggtttactcacgtcatccagcagagaatggaaagtcaaatttcctgaatt

SEQ ID NO: 305166 - DNA, 50 bp, Homo sapiens
cttggatcccaaaatgaaagtgttatatgcctttgaagatgagaaacccc

SEQ ID NO: 305167 - DNA, 82 bp, Homo sapiens
ctcagttggaagcagccgatccagcctgcggagcctgtggggcaggttgagccagtgatacagagaggccatgagagtctgg

SEQ ID NO: 305168 - DNA, 100 bp, Homo sapiens
tgcagttccagaaattcttatgccggtctagatccaagcaaccagggctcattgtcatccccaagccaggccagttctccaggtggaactgtagtgtagc

SEQ ID NO: 305169 - DNA, 98 bp, Homo sapiens
tgaggggggccttagagggcctccccaggccgcctccgcccgtgaaggcttttattgagatggagacaagagaagatgcaatggcaatggttgaccat

SEQ ID NO: 305170 - DNA, 101 bp, Homo sapiens
tcccgattagctgggattacaggactctcacagaaggaggaagaggaggacacttttattgaagaacaacaactagaagaagagaagctattggaaagaga

SEQ ID NO: 305171 - DNA, 83 bp, Homo sapiens
gtcaaagaaaaagttcaaaaactgaaggactctgaagctgagttgcagactggtctagaaacaaatagacttatctttgaaga

SEQ ID NO: 305172 - DNA, 98 bp, Homo sapiens
gggctgcccggctctcgcaggcccccccgcgccgaccgcgttcctatggacagacgcacagacacctgcagcgttacagtgtttctgccacctctgta

SEQ ID NO: 305173 - DNA, 96 bp, Homo sapiens
ccgccccgagcctccgccgctgcgtctgcctgctgctcgccgcgatcctggacctggcgcgcggggacggcaaaacagaacagaaaggcggagata

SEQ ID NO: 305174 - DNA, 75 bp, Homo sapiens
caagcattggtgcacgatgtactggtgggcaaacgcagaggcgggaacaaactagccctcaagacgggaatagta

SEQ ID NO: 305175 - DNA, 76 bp, Homo sapiens
ccacctgttgcctatccagaagaaaatacactactcatcaaggaagaaccagtttgacggtgagaacatgtatatg

SEQ ID NO: 305176 - DNA, 83 bp, Homo sapiens
ccgtgccctggggctgagccctcagggccgcgatgggcctcttggaacattggtgtgttcatctgcattcgatgtgctggaat

SEQ ID NO: 305177 - DNA, 100 bp, Homo sapiens
tttcttgaaacagattttgacagaaggattgaggccatcaagctacagatgatcttacaaatggaaccccaaatgagctcaactaacaacttctactgag

SEQ ID NO: 305178 - DNA, 100 bp, Homo sapiens
tgccttgctgatattttcaggatttatgctcctgaagctccttacacatcccctgataaactaaagggctgtttaacgacccccaactccccatccatgc

SEQ ID NO: 305179 - DNA, 101 bp, Homo sapiens
cctgccctggcgctgacaagggtccagcctccgatgaaatccaaatctcctcccaaagtgcccattgtgattcaggacgatagccttcccgcggggccccc

SEQ ID NO: 305180 - DNA, 90 bp, Homo sapiens
aaatttgtgaatgctgtgtatgataccttacttaatactggtggttctcttcccaaagtggaagccaaattcatcaattatgtgaagaat

SEQ ID NO: 305181 - DNA, 75 bp, Homo sapiens
gcgggacaagaaaattcatgcgagagaagaagaaggaggttcctgctgtgccagaaacccttaagaaaaagcgaa

SEQ ID NO: 305182 - DNA, 83 bp, Homo sapiens
ctccagattactatgtcggaacagctggatttacctgtgagacaggcagtaatgtgtgtggctggtattggacttgttgtatt

SEQ ID NO: 305183 - DNA, 51 bp, Homo sapiens
ctggatacggtcactttctacaagataagaccacttttttatctgagcttc

SEQ ID NO: 305184 - DNA, 100 bp, Homo sapiens
gaagacaatttcttcttccaaaatcctcggattctctacttctgctgttgaagaaattgtggatattggagcatttgctccagaagacatccatattcct

SEQ ID NO: 305185 - DNA, 90 bp, Homo sapiens
cagattcgcagtggtcgcttcttctccttgaaagatgtagcacttaagcctcaggaacgtgtggagaaacgccagacgcccctgaccaag

SEQ ID NO: 305186 - DNA, 75 bp, Homo sapiens
actaaacatgaagagcttgaaagcgaagttcaggaagagtgacatcttcagtttagatcttggaggcatatcaac

SEQ ID NO: 305187 - DNA, 74 bp, Homo sapiens
ggctgctgcaggcgccgcacaaggagtacaagcgcaagctagccagagtttccctggtgcgcaaagaactcagg

SEQ ID NO: 305188 - DNA, 83 bp, Homo sapiens
ctccagtgtaatgattattgacaacaggcagaacgcagagctggccaagcttcggcaggagctcagcaaggtcagcaaagagc

SEQ ID NO: 305189 - DNA, 90 bp, Homo sapiens
ggtttacagttggctgatgattccacagataacccacccagcgacttctccgtgtcccttaaagcgtcagggaagaacaaacacttcaag

SEQ ID NO: 305190 - DNA, 98 bp, Homo sapiens
cacgagatgccccctcacatctatgccatcacagacaccgcctacaggagtatgatgcaagcggcaacctttggcactgcatccatgagcatgcccac

SEQ ID NO: 305191 - DNA, 100 bp, Homo sapiens
cttcgtgtgtacctcctgctccggcagcctgtatgggctacgtgagttcgtggtgattgcccctgctgcacacagtgacgctgttctcagcgaatctaag

SEQ ID NO: 305192 - DNA, 100 bp, Homo sapiens
gacaggctcagccaaagtaaatccatgatcctcaccgatgtcgggaaggtcactgaacctatggaagatggtaccccaaagcatatcatccagatgacag

SEQ ID NO: 305193 - DNA, 100 bp, Homo sapiens
cggaagagggaggcgtggacgcatccaagaaaacattcttggccaaaatctaggggaagttactgccacttcgtactatataaggaaaacaaagacacca

SEQ ID NO: 305194 - DNA, 50 bp, Homo sapiens
atgcaggagaaaatacggcattgctagctcttcagtgggtcatctgtgtg

SEQ ID NO: 305195 - DNA, 73 bp, Homo sapiens
aaggacgtgttcttgccctctgtggcctcgtctgcttccaggtattttgaaggtggcgtctcatctgtctacc

SEQ ID NO: 305196 - DNA, 100 bp, Homo sapiens
cccaatttgccaagcagacaggccagtggatcggaatggtggagaacttcaaccaggcactcaaggctgtgctgcacatggagcagcggaagcagcagca

SEQ ID NO: 305197 - DNA, 75 bp, Homo sapiens
cagccatgtttggcactgaatcttcatgtgattttacaacgagatgctgctctccatagggatgctcatgctgtc

SEQ ID NO: 305198 - DNA, 97 bp, Homo sapiens
tactgcacagcagaagctctgaatcgtgttcctgaatgaaagaagtcaggagatggaataaactgagactgcaggacaaagagaaacgtctgaagct

SEQ ID NO: 305199 - DNA, 97 bp, Homo sapiens
gatcagttacacaaccaatgcatttcctggagaatatatccctactgtataatgctcggaatatttttcaatgtccattccgctgtgttgattgagg

SEQ ID NO: 305200 - DNA, 75 bp, Homo sapiens
ggccctctcagcaagaacgggaacaaaactctggatcagtggtcaattggtcaggacagggactacagaaattag

SEQ ID NO: 305201 - DNA, 90 bp, Homo sapiens
cgggcagaggcgacctccccgcgttccatgcgcacagggacagggatatcagttttagagaatgtggcgtggagaaattctcaaggaaag

SEQ ID NO: 305202 - DNA, 76 bp, Homo sapiens
tgaatttgtaggaggtgtacttgtttgcaacaatcaagtagcagtccgcagactggctgcaccttcgaggaggcaa

SEQ ID NO: 305203 - DNA, 82 bp, Homo sapiens
tgacaatggctttggtccccagcgcagtgaagtggtgagcctttttgtcactgcggagctgatccccagccacaggatgaag

SEQ ID NO: 305204 - DNA, 75 bp, Homo sapiens
caggacagctgttccttggccatcccaaagctattctgggggcaacagagagctggagccggagccagagctgga

SEQ ID NO: 305205 - DNA, 101 bp, Homo sapiens
ccggaacgggccagcgctgcaagaggcctacgtgcgggtggtcaccgagaagtccccgaccgactggcatccgtgtcattctggaccttactcccaactac

SEQ ID NO: 305206 - DNA, 101 bp, Homo sapiens
ccagttcgtttaaggctttcttctttctcctgtggacaagccagtgctaccccattcacagacatcaaggaagggaacctgattggattaccccttctgat

SEQ ID NO: 305207 - DNA, 121 bp, Homo sapiens
gaagaccgcgcgcagggcctgcagcgggagctggacggcgagcgcgagcggcgcgagaaactgcctgtggaggaaccgattgtgtccacagatgaggtcatcttcccactcaccgtttcac

SEQ ID NO: 305208 - DNA, 82 bp, Homo sapiens
tggagctgaggaaccggaccccggcagctcccgtgcagcctgccaggactcttccagacacgggatttgtcggtgaacaacg

SEQ ID NO: 305209 - DNA, 100 bp, Homo sapiens
gccggtgccagcacctttcggcttctgagacggcggcagcagcggcattcaggggcctttatcatctgctggactcctggattggttttgttacttctag

SEQ ID NO: 305210 - DNA, 75 bp, Homo sapiens
cagacttcaaagttatggcaagagatgagttaattctaagatgttggggatcagccaggtgaggtaggttattca

SEQ ID NO: 305211 - DNA, 84 bp, Homo sapiens
caaccacctgttccacgacggctgcatcgtgccctggctggagcaggtgctgaagtccacaggggatgtggccggagggcgggc

SEQ ID NO: 305212 - DNA, 75 bp, Homo sapiens
caaaggaagacttgtaacctggagaagagatttatcagcaagactgttgaacgcataactgcccaagatgcctgt

SEQ ID NO: 305213 - DNA, 100 bp, Homo sapiens
gaaaggaagcaggcccgttggaagtggttgtgaaaatgtttataggaggccttagctgggacactacaaagaaagatctgaaggactacttttccaaatt

SEQ ID NO: 305214 - DNA, 100 bp, Homo sapiens
aaagctgcacggcagtctgtttatgaggctcgaaaggacacagaagcgggagaaacgttttcatctgtccaagccaatttaagtaaagcagaaaaacata

SEQ ID NO: 305215 - DNA, 50 bp, Homo sapiens
ccctctcctgaccctgaagaactgtggaaatggtgttcacactggccctg

SEQ ID NO: 305216 - DNA, 51 bp, Homo sapiens
tcttcactgcctctggcatggatgagctttcttggactccgtactgttggt

SEQ ID NO: 305217 - DNA, 100 bp, Homo sapiens
caatgcatcttcccaccaccttaaaccactggtttgctcaccttataaatgtggaattttttgatgatctgttagtagttcttcatactctcattgagtc

SEQ ID NO: 305218 - DNA, 100 bp, Homo sapiens
cagtttgatgcgtcacactacgacagtgagaaaggaggatgttcttgaggagagaatttccctggaagttcaactggaacaacttcgaccattctctcac

SEQ ID NO: 305219 - DNA, 100 bp, Homo sapiens
aatgaacccacatgcctctaccaatggacagctctcagtccacactcccaaaagggaaagttacgccccatggtgtccatcctgccagcagactgattca

SEQ ID NO: 305220 - DNA, 100 bp, Homo sapiens
gatgccaggaccccctgaaagcctagacatgaccagagtgaactccgagcaggaacacttcctcattgtcccttttgggcttctttacagtgaagtgact

SEQ ID NO: 305221 - DNA, 96 bp, Homo sapiens
cagcagtcctagaggagcagcattcggccagagcccccttgctggattatatctacaggatcttttgcagctttgcagatacccagactgagctgg

SEQ ID NO: 305222 - DNA, 83 bp, Homo sapiens
gtgctggagttacagatgtgagcctctgtgctcagtccatccttggctgttcaagtgtagagttcttccctgtggaacagtag

SEQ ID NO: 305223 - DNA, 82 bp, Homo sapiens
tcgcctttgccgatccgccgcccgtccacacccgccgccagaaacgcttcgttaagggactcaggcagtacgggaagaactt

SEQ ID NO: 305224 - DNA, 82 bp, Homo sapiens
cgcaaccattgacgccatgtcgggttattcgagtgaccgagaccgcggccgggaccgagggatttcagatgcatgccaggtt

SEQ ID NO: 305225 - DNA, 74 bp, Homo sapiens
tccacccctgggaggcagaagccaggtggcacaagaatggctcaactctccaaatagagagaatttctatcagt

SEQ ID NO: 305226 - DNA, 50 bp, Homo sapiens
cggagctcccccaagagccggaaagaatgagaagactttgggacatttca

SEQ ID NO: 305227 - DNA, 98 bp, Homo sapiens
gccgacagcttcctgcccaggctgaaggtgtacaagctgaagcacaagcatggccttgtggagcgggtgggccttaatgtcctggttcagaaagccaa

SEQ ID NO: 305228 - DNA, 110 bp, Homo sapiens
cggacactttgttattggagaaacatgcagattatatcgcatcctatggctcaaagaaagatgattattcctcatcaccgggggcatcgtggccacagctgggcgcttca

SEQ ID NO: 305229 - DNA, 101 bp, Homo sapiens
catgaggtcaaaaaggaaatcaccctgcttgagcaaaggaaggaaattggattccaagatccatcaaggagcaaagaaggggttaatgaagcagaataaag

SEQ ID NO: 305230 - DNA, 77 bp, Homo sapiens
cacgcagctggctggcttcagtggaccagaaagaccacagcaagattctttcattcgtctcctcctagcctggggga

SEQ ID NO: 305231 - DNA, 100 bp, Homo sapiens
tgcagcccacccgggcagccctcaccctgattatataaggaccatctggaaaagaaacatgctgcctgttgtctggaaaccttccactgacaccttcagg

SEQ ID NO: 305232 - DNA, 75 bp, Homo sapiens
tagagattgaaaagaatgctgaaagtagcaaggttaaagatcgaggtccggaagccactaggagattttttaatt

SEQ ID NO: 305233 - DNA, 90 bp, Homo sapiens
ggcggggccgccggggccgccatggagcccgactcggtgattgaggacaagaccatcgagctcatgttttccaagagataacttcaccaa

SEQ ID NO: 305234 - DNA, 96 bp, Homo sapiens
tcgctgatggtgtcggtgagcgcgtttcccgcctgagcgcaactagcggcgggtcgtgggcacctccaggtcttagtggtgcaatggctagtataa

SEQ ID NO: 305235 - DNA, 50 bp, Homo sapiens
gctgctattgaaagagagtatgcacagaccaacgaagccagctgttggag

SEQ ID NO: 305236 - DNA, 100 bp, Homo sapiens
gtcgctgtgatccggggccccggaacccgagctggagctgaagcgcaggctgcggggcgcggagtcgggaggtgaaggatgattccagggccctgacttt

SEQ ID NO: 305237 - DNA, 100 bp, Homo sapiens
cctgcagaatcacgcggacatcgtctcctgtgtggcgatggtcttcctgctggggctcatgtttgagcgtggtaccatgcgacgacgctatgaagatgat

SEQ ID NO: 305238 - DNA, 100 bp, Homo sapiens
gttcccaaaaagctccgcaggggctgtagggagtttgaggtggtatcaacatcctacagaagaagaattaagaattcttgcagggaaacaacaaaaaggg

SEQ ID NO: 305239 - DNA, 90 bp, Homo sapiens
catccacgcacctgcagctctgctgagagagtgcaagccgtgggtggatggcattcccaatgacagtagtgatagtgaaatggaggacaa

SEQ ID NO: 305240 - DNA, 90 bp, Homo sapiens
caagctgcaccagcttctaaccgagcaaacgaggtcctccagaacttcctgcagtcacaggtggttgtagaggaatccatcctgcagtca

SEQ ID NO: 305241 - DNA, 75 bp, Homo sapiens
actaccaggctgtgggtctgcacctctggaagctgcatcttcctcccgtgaggctggccgagctccacgctgatc

SEQ ID NO: 305242 - DNA, 75 bp, Homo sapiens
tgcgggcgcggctggcggccacgcaggcacggaatgttaacactggtgaattagcagcaattaaagtaataaaat

SEQ ID NO: 305243 - DNA, 96 bp, Homo sapiens
tccgtcgtggaagcaggactgcgccgcgtcttcctcaagacaatgcagatcttcgtgaagactctgactggtaagaccatcaccctcgaggttgag

SEQ ID NO: 305244 - DNA, 74 bp, Homo sapiens
cacccttgtagagtcattcctgcctttgagcggactcccttttaaggtgaccaaagccacgtaatgtccgtagt

SEQ ID NO: 305245 - DNA, 102 bp, Homo sapiens
gatgtgaaacttaaatttgaagagattgtcttcttacataatgatagatacattgaatttcattcgcaatcaggtttttactacaaaaccagaataccaaag

SEQ ID NO: 305246 - DNA, 95 bp, Homo sapiens
tctttgcctcaagacccagctattgttcagctattcctctacacagccgactagttatgatcagagcagttactctcagcagaacacctatgggc

SEQ ID NO: 305247 - DNA, 74 bp, Homo sapiens
aaaagtgactcagctgcctgcaagacaaaggtagctggatccgtagagttgatattcactgatggactccaaag

SEQ ID NO: 305248 - DNA, 78 bp, Homo sapiens
ttgaattctccaacaatggaggccagtggctggtctcaggtaagaatgattgatgttggctgatattggagtgctcat

SEQ ID NO: 305249 - DNA, 82 bp, Homo sapiens
tataaatgttggtggaactaacacagctgtaggatgaccatgaaagctgtggttctaattctaccaaccgtagtactgctga

SEQ ID NO: 305250 - DNA, 100 bp, Homo sapiens
ttttgcaaggagaaaattttggtggagaattatccaacaagaaaaagacctgtggctattaagatagagcattggggagtcagcaatgtccgttgtgtta

SEQ ID NO: 305251 - DNA, 80 bp, Homo sapiens
atggcaaagtatgagaaggctgaggtcgttccaggggtagaggaggcatgaaggatgaccgtcgggacagatactctgcg

SEQ ID NO: 305252 - DNA, 75 bp, Homo sapiens
agaatctggattggggcgtgctgatccaccttatactcatactatacagatgtgaactatgaagactttactttc

SEQ ID NO: 305253 - DNA, 122 bp, Homo sapiens
tttactcatccatgtgaccatgaggaaatgagagaaatgcttacacacagaaatggtatttaaaccatgtcagagctgcctcaccacaggaccttgctggaggctatacttcttctcttgct

SEQ ID NO: 305254 - DNA, 98 bp, Homo sapiens
agaggcgagccctggtggaggaagagatgcaagtgctgctggaccaggcgggctgctgtatcgtgggtcagagtgagcagctggttcctgcggacgga

SEQ ID NO: 305255 - DNA, 75 bp, Homo sapiens
ggagctggacggcgagcgcgagcggcgcgagaaaggctcttccgtgggcggcggcttcgcgggcttggagttcgc

SEQ ID NO: 305256 - DNA, 75 bp, Homo sapiens
gatggtaccagagcatatttctttacaaaaggcatttataagacgctgtttggcatatcgaaaagaagatcgatt

SEQ ID NO: 305257 - DNA, 80 bp, Homo sapiens
gaggcaggctgcggcagacggcgacagtggcggcggcgccatggcagggcttgcagaggaatgtttgctgggggattgaa

SEQ ID NO: 305258 - DNA, 100 bp, Homo sapiens
aagaagttgatgaaatgatcagggaagcagatattgatggtgatggtcaagtaaactatgaaggctgaaaaacagagtgggtactctcttctgggaagct

SEQ ID NO: 305259 - DNA, 100 bp, Homo sapiens
tggaaaacaaatcaaactgcaaatctgggatacggttcctccagaagaaattaattatttaacacgaattcactacaaagctcagtctgatggtatctgg

SEQ ID NO: 305260 - DNA, 90 bp, Homo sapiens
ggggccttgtgtcctaccatggtatttgctaacgtttagagagtgcttccccttgccgagcactggatccgcatttgctaccagcggcgg

SEQ ID NO: 305261 - DNA, 95 bp, Homo sapiens
agagaagcagatgctgcattattttcagaactccacagaaaacttcattcacagatctcccttgagtttagaaatctggctgagaaataccaaac

SEQ ID NO: 305262 - DNA, 75 bp, Homo sapiens
ctcacttctaatgagaagcttatgctggcctccatgttccactcgcagacctgtctaactacaagccagacttgg

SEQ ID NO: 305263 - DNA, 97 bp, Homo sapiens
atgaaaaggtcactgccatctggagtggatggacacacctggttgctcagacaggagctacagggagctggccgactgcacctggcacatggcggag

SEQ ID NO: 305264 - DNA, 75 bp, Homo sapiens
gcgaagtctgtggtttatcattgtaatcagcttcttaccaaatacagaagattcagaccaggatgtagcactcaa

SEQ ID NO: 305265 - DNA, 75 bp, Homo sapiens
gtctgcccacccaacgcgaagacggtaacccgtgtgactttgactggattgtaaaccatggctgtgtggatacaa

SEQ ID NO: 305266 - DNA, 95 bp, Homo sapiens
ttagtgaagcgcgcccggcgtcacgtagtggccacagaagaagtagttactgcagaatctgtggatggtgccattcagcaagtagttagttcagg

SEQ ID NO: 305267 - DNA, 96 bp, Homo sapiens
gcctggcactgcgcttcttcaaagattgtggccgccatcctcgccatcgctggcattgtgatgatgacctacgctgatggcttccacagccactcc

SEQ ID NO: 305268 - DNA, 73 bp, Homo sapiens
agtttgtcacagtgaatcaaaacatctcagaccagtatccttcaggggttctcttactctgatttgcggaaat

SEQ ID NO: 305269 - DNA, 83 bp, Homo sapiens
cagaagatctgggtgcccgtggaccacaggccctcgttgcccagatacgccgactgggcccccacgtctgcctctctgggttt

SEQ ID NO: 305270 - DNA, 101 bp, Homo sapiens
tctccctggccccattgggccccctggtcctcgcggtcgcactggtgatgctggtcctgttggtcccccaggccccgcaggccccgaaggcagacagggag

SEQ ID NO: 305271 - DNA, 82 bp, Homo sapiens
ggcgcccgcgccgagcgccagccagcaattctgtggtgttcttggtcacacatttatggagtttctgaagggcagtggagat

SEQ ID NO: 305272 - DNA, 98 bp, Homo sapiens
tttaaggttgaagagtaaacaaagtgagcctccagtaaactttattcaaagttcacaacagtaccagtacaaccttggaaaagcttgaagttgcagag

SEQ ID NO: 305273 - DNA, 100 bp, Homo sapiens
gcggggcccgcgctgcagccggagacccggagaaagggggaacaggaacctgataaagaatcaggagcctcagtggatgaagtagcaagacagttggaaa

SEQ ID NO: 305274 - DNA, 100 bp, Homo sapiens
ccgttggcccaaccagtcccagcgctgtcgtgctcctctactcggttgaagctccattcataccaaagtttagaggctctggagataccagcaactttga

SEQ ID NO: 305275 - DNA, 76 bp, Homo sapiens
gctggagattgagagactggaggagcaggcttcatagagcccagtgtgcaattaaacagactcaggtaactgttca

SEQ ID NO: 305276 - DNA, 93 bp, Homo sapiens
tgaagagagatgacgaaaccataaaggagcatttatgtaaggtagtaaacctattgatggcaattttgctgactgtggaagtgactcatccaa

SEQ ID NO: 305277 - DNA, 95 bp, Homo sapiens
agcagattttggtttaatatctgattgggacaacattcagacccatttccagtcatgagtggtggctaatgccgtagcggcattatctgaaatca

SEQ ID NO: 305278 - DNA, 100 bp, Homo sapiens
gtggcggccgagactggcgggggtggacgcccgggccgggctgcgcccgcttcttgcaggtgatgatgaacagtctacacagatggctgcaagttgggaa

SEQ ID NO: 305279 - DNA, 75 bp, Homo sapiens
agacttgaacatatttggatctagaagctgccctctgtcgacagctccccatggaagctgagactcttgccccag

SEQ ID NO: 305280 - DNA, 50 bp, Homo sapiens
tgtctgtctgctgcaaggagaggagttccggaatgaggactacaccatac

SEQ ID NO: 305281 - DNA, 131 bp, Homo sapiens
ctggctcggatgctgatggggctggacctgctggtgttcgcccacgaccatggacactttacttcggccgaagacttaaacctgttgattgccaaaaacacgagattagagatctatgtggtcaccgccga

SEQ ID NO: 305282 - DNA, 76 bp, Homo sapiens
gttggttcccctctttgacctgagagaagaggtactcccttatagggactcgtaaagacatagagcatctggaaat

SEQ ID NO: 305283 - DNA, 75 bp, Homo sapiens
gcggcggcctttctcctgggaagacgacctcctgccccccgaggtctgcagtctcctgaacccagcagccatcta

SEQ ID NO: 305284 - DNA, 101 bp, Homo sapiens
atttttaaagtctttagtatgttgaactggaaatataggacatgcgtttgagatctactgtgagtgctccatacttgcttgcagtgcctacgtggctctgg

SEQ ID NO: 305285 - DNA, 100 bp, Homo sapiens
gtcgccgccatggcccgctggatcccgaccaagaggcagaagtacggggttggaggagacatcacagctttcccagatcgggaggaaaaatatggaatgt

SEQ ID NO: 305286 - DNA, 101 bp, Homo sapiens
gctgccaagctggatcttgatgcgggacttcagtcctagtggcattttcggagcgtttcaaagagctttctctcctttgaaaacactaagaataatgtcac

SEQ ID NO: 305287 - DNA, 82 bp, Homo sapiens
ctggaatggcaagcgcagcaacaacagagagcacgtggagcaggccgggctctcgccatgggtcactgtcgcctctgccacg

SEQ ID NO: 305288 - DNA, 122 bp, Homo sapiens
caagtccatccgcgacctcatgccaaagaccatcatgcacctcatgatcaacaatgtggccaagcaagaggagttcttcaacctgtcccactgccaactggtgaccctcatcagccgggacg

SEQ ID NO: 305289 - DNA, 90 bp, Homo sapiens
gtggccctggagcagtatgccagcaagaacctagaagtcggaatccggaagaagatcgaacatgacgtggtgatgaaagccagcagcagc

SEQ ID NO: 305290 - DNA, 98 bp, Homo sapiens
gcgaagctgccaaagccttagacaaattgatgtacagctatatattttgtcctttctttcacctcatgatctgtgtcagttgggaagtacaaatcatt

SEQ ID NO: 305291 - DNA, 100 bp, Homo sapiens
agtcaatgccttgaggcctttctattttgcagtacatccagatttctttggacagcaccccgtagaaaggatatttggagttcttacaacatggcagaca

SEQ ID NO: 305292 - DNA, 90 bp, Homo sapiens
agctgttactttcctatggagcctccagaaatgctgtgcttcccagctggcgtgtatgttgtaaagagagttcttcagcttcagcgtcat

SEQ ID NO: 305293 - DNA, 90 bp, Homo sapiens
ctgctcagtcggccaagaagccctgcccaggctttatcctgtggataaacgcagagtgaacgagtttggggagtcctacgaggagaaggc

SEQ ID NO: 305294 - DNA, 100 bp, Homo sapiens
cggcatgtcatctttgccaggactgatgcagatgcccctcctccaccagaggactgggaggagcatgtcaacagaatcttgacaaaacttttggaagtgt

SEQ ID NO: 305295 - DNA, 102 bp, Homo sapiens
gtcatacttggaaatggctgcaggttcagagtggatatcatccagtgaaaattggagacctcttcaatggccggtatcatgttattagaaagcttggatggg

SEQ ID NO: 305296 - DNA, 100 bp, Homo sapiens
gtgtcaccagctttagccatgacagccccagtgtccctacgttcatagccgtctcaacaatgggtctgagtgtacggtttgcagatatgcctggaaaatc

SEQ ID NO: 305297 - DNA, 50 bp, Homo sapiens
aggctgatgccccaaaaggcactgattatcaggcaattgttgatgctgag

SEQ ID NO: 305298 - DNA, 100 bp, Homo sapiens
tccggcgcatcctccacaccgacaccatctggaggaggcgttgccgtgagggtgagcgtgtaggagccttcactatggtctgcaaagatgcggatgaagc

SEQ ID NO: 305299 - DNA, 90 bp, Homo sapiens
ttccttagttgctccaaatactgagtcacccacaaaagctgtatataatgccagacattggaatcatccagattcagaagaactgcctgg

SEQ ID NO: 305300 - DNA, 83 bp, Homo sapiens
gatcgcttctggcagaccgaaccggcgctcctgcccccggggtgacgcgcagctcccagccgacaatgcagatcttcgtgaag

SEQ ID NO: 305301 - DNA, 75 bp, Homo sapiens
tcagatcaaccaccaaagtgggaaacattgaaatcaaggtttgaattttgggaagattttgaagaagaccatggg

SEQ ID NO: 305302 - DNA, 114 bp, Homo sapiens
accaccaaccctcatacctcggccagccacaggccttgcgtcaatggggatgtagacaagccttcagagccaggttagctgctgaatcaaagcttcaaacagaagttaaagaag

SEQ ID NO: 305303 - DNA, 100 bp, Homo sapiens
cgagctacctctttcctgctggctttggagcctgagctcgaggcccggctggcgcacctgggcgtgcaggttctgacagggagacaacagcaaatacaag

SEQ ID NO: 305304 - DNA, 101 bp, Homo sapiens
aaagaaatattttgttatatgggcttctcatatcttacccacagatgatgattattctccaccgtctaagagaccaaaggccaatgagctaccgcagccac

SEQ ID NO: 305305 - DNA, 100 bp, Homo sapiens
ccaagaaaagatggtcccaaacgttctgtactgtccaagtcagttcctgggtacaaggctgatttaaactgcaatattcaagatgatgctggggcttttt

SEQ ID NO: 305306 - DNA, 100 bp, Homo sapiens
gattacccacttcgagtcctttattgtggaggctattgagggcacctacattgacaagaaatgccccttcactggtaatgtgtccattcgagggcggatc

SEQ ID NO: 305307 - DNA, 50 bp, Homo sapiens
cttgatcccaacaatgttatcattgagctgattcaccccaagagtggccg

SEQ ID NO: 305308 - DNA, 100 bp, Homo sapiens
atcattttcacctcgcgtcgcgcccgggaggaaggaacgaggcaaggagctaaagcagcgtgcgttcagccctgggacacgaatgcagagtttgagtcca

SEQ ID NO: 305309 - DNA, 100 bp, Homo sapiens
gtcctacgaaagcctggtccacgccgtggccggagccgtggcatggaggagtgacggcaggaactttctgtgctctgacaacccttatgcaccaactaga

SEQ ID NO: 305310 - DNA, 75 bp, Homo sapiens
ttccttggaagaagatgtctgcagagcaatggctgccatccggaagaaactggtgattgttggtgatggagcctg

SEQ ID NO: 305311 - DNA, 75 bp, Homo sapiens
gacgcccgcaggtcctcgcggtgcgcaccgtttgcgacttgcggttgctgatgctattagaacaagccttggacc

SEQ ID NO: 305312 - DNA, 98 bp, Homo sapiens
tcagaagcatgtgtcttccccagctctgcagccacatactatccgtttgttcaggaaccaccagtgacagagtttcctatcctgggagcaggagagtg

SEQ ID NO: 305313 - DNA, 98 bp, Homo sapiens
tgaggccagcacagagcgttgggtggagactggctgaggcaggggtctgccagtgagattgaggtcagataccaggcccaggttccatgatgcccggg

SEQ ID NO: 305314 - DNA, 100 bp, Homo sapiens
gcctccaggccgctccccacggtggtgttagcacctcagcccatcccagccttgcaccagggaacgtctaaatcttcctctctccccgcctatggcagga

SEQ ID NO: 305315 - DNA, 83 bp, Homo sapiens
aaaaaatttcatgttggacatttgcgttctaccatcataggttttggagattttaggtaagaagtttcctgttactgagaact

SEQ ID NO: 305316 - DNA, 75 bp, Homo sapiens
gctcctgatcatgttttatgcccccttcctgatcacccgagaggatgacttcaacaacaggctgaacaaccgcgc

SEQ ID NO: 305317 - DNA, 90 bp, Homo sapiens
cctacgtgcacaacatcacccgcaagaatgactgatggatactcaggaagtgacctaacagctttggcaaaagatgcagcactgggtcct

SEQ ID NO: 305318 - DNA, 82 bp, Homo sapiens
aggggcgccccgggagcagccagcccgtgggcgagccgcccgcccgccgagcagccatgagagccaagattttcttcttcac

SEQ ID NO: 305319 - DNA, 83 bp, Homo sapiens
gccccgcgcagcccccggccgcagcgcaggcagcccagcagaattctctggtggttgagatcccgccatttcggaatcagagg

SEQ ID NO: 305320 - DNA, 75 bp, Homo sapiens
gatgcagatgagaaggttcagttggcaaaccagatatatgacttgaatgctgttgcatggaccaacttgggagtg

SEQ ID NO: 305321 - DNA, 75 bp, Homo sapiens
aagattctgcagaatatcagttcactgggacttattctacaagactaagaaaaatggctttgtcagcccaacaga

SEQ ID NO: 305322 - DNA, 90 bp, Homo sapiens
gcagaaggtggacagggtaaaagaaagagacttttttctaaagaatgccactttggagttgtctaccacggagaatacatagaccaggcc

SEQ ID NO: 305323 - DNA, 105 bp, Homo sapiens
tcccgtatatggtgcctgcaagctcttggacatggagctggaaatggtgagagaacgccgagccgtcgccgcagcctccgccgccgagaagcccttgttcccgct

SEQ ID NO: 305324 - DNA, 90 bp, Homo sapiens
ccagaagcgggcggcgcgggggagatgggtttcatcaccttaaatggttttgaaccaatgaaggtgtattcccttaaaaagacggacagc

SEQ ID NO: 305325 - DNA, 50 bp, Homo sapiens
gcaggacatcactttagatgatggtatccaagcccaccaatgggatctgt

SEQ ID NO: 305326 - DNA, 76 bp, Homo sapiens
aaggaggaggtgaccacgcgcgagggcgtgatggtgggcatgggtcagaaggattcctatgtgggcgacgaggccc

SEQ ID NO: 305327 - DNA, 51 bp, Homo sapiens
gaacgatcctcgaattcagcacagggtagatatggattcccagtttctcca

SEQ ID NO: 305328 - DNA, 100 bp, Homo sapiens
ctgagtgctgccgccccttcccaggacagcggaggtggaacttcgtcgcgctgcaacccccggctcgggccagaagcggactcctagaagaggggagcag

SEQ ID NO: 305329 - DNA, 99 bp, Homo sapiens
aaaagactcaggacggacaagcacagtcttcggaagcctggagtaggaacaaaaattgctgaaaagattgatgagtttttagcaactggaaaattacgt

SEQ ID NO: 305330 - DNA, 100 bp, Homo sapiens
aagccaaactggaagtccgcgagtttgtggattatctgaaggtgggcagaaccgaggtggtccggagcagcctgcatcccgtgttctccaaggtcttcac

SEQ ID NO: 305331 - DNA, 74 bp, Homo sapiens
tgcattcccccggcgcgtgtgggaccgaggtggacatggatccgcagtctctcaagtcccgaggctacgtgaag

SEQ ID NO: 305332 - DNA, 90 bp, Homo sapiens
ggagcactcggttcgctaccagtgtaagaactactacaaactgcgcacagaaggagatggaggtagagctcatcaccaggttcctcccga

SEQ ID NO: 305333 - DNA, 83 bp, Homo sapiens
aaaagaagaatttattcactcaagactaaaaactaaaggcctgggcctgagaactgaatcagaacaagttgaaatcatcgcag

SEQ ID NO: 305334 - DNA, 83 bp, Homo sapiens
ttgtggtgattgtgatgtttgcctggtctatagttggcaggatgacgcaaaacacggtgattgtgaatggagttgctatggcc

SEQ ID NO: 305335 - DNA, 120 bp, Homo sapiens
cgcggaggccttagttggccaagtactagtgaaaccatacatagacgagtctcaggccctaattgaagagctgttgctatacaagcgctcagaagatcagatagaactgaaggaaaagca

SEQ ID NO: 305336 - DNA, 137 bp, Homo sapiens
tagtcctgagcttcccaccgaagatgaacagggttcctggggcatcgacgatctccatatttcattgcaagattggaggtggacacaaaggaagaggcagccagacagctacttcagcgtcctcaacgcattcatcg

SEQ ID NO: 305337 - DNA, 73 bp, Homo sapiens
cacaggatggactccattgagaaggagttggatgatattaataaggcagcggaaagaagaaatatgaatacgg

SEQ ID NO: 305338 - DNA, 100 bp, Homo sapiens
catcagtgtggagactcatgctgtagagtcactgcttcaaccacctgtgagaaattagaaaaagccaggaatgagttacaaacagtgtatgaagcattcg

SEQ ID NO: 305339 - DNA, 74 bp, Homo sapiens
gccactggaagctgatcacctggagtgaagacctcacacctgaataccactagaaacatacctgtaaccagaga

SEQ ID NO: 305340 - DNA, 102 bp, Homo sapiens
ctgggattggagattccacccaaacttgctggtcactgggagggaaaagtgttttaggcttccagagtagaaatctgatattacttcgtttgattcttcgac

SEQ ID NO: 305341 - DNA, 75 bp, Homo sapiens
gaagctgtcggagcttcccaaggtagctacagcaagctgggtagcaggcagatccaaaggatatcatgaagtttc

SEQ ID NO: 305342 - DNA, 100 bp, Homo sapiens
attgatctcgtcttccggtgtgtgagtcactcacctgtgagctcctagagtccaaaagaaactcttccttcaaaacctgtgaagaaagagaaggaacaga

SEQ ID NO: 305343 - DNA, 100 bp, Homo sapiens
ttcttctaagagcacactgtcagacatctggatggtcacttactgagcagtgcaaaatggcaactcttaaggaaaaactcattgcaccagttgcggaaga

SEQ ID NO: 305344 - DNA, 100 bp, Homo sapiens
gtaatcctggatctcttgttcgcaaatcgacagcctgaagccctctggaagcccaagactgctggagttgctgagacaaaggaaaacccactcccttgga

SEQ ID NO: 305345 - DNA, 95 bp, Homo sapiens
aggagacggcgacttctgacaacgagtctacttccccagcaggacagcatcattctcctatatcttctagacatcactcatcttcctcacaatca

SEQ ID NO: 305346 - DNA, 100 bp, Homo sapiens
ccttctcagagaagaccaaaatgaggaagtcaaagaggaaacacttgttgaagcatcagtcctacgacgaggacttcaaccatgagccgtgtcagaggaa

SEQ ID NO: 305347 - DNA, 75 bp, Homo sapiens
ctgaaaccacagacatgactgagtcctccatgaagaaagatgcaagtggaccaggaggaaccacatgttgaagag

SEQ ID NO: 305348 - DNA, 109 bp, Homo sapiens
gatggggccagaacggacaggggccgcgccgctgccgctgctgctggtgttagcgctcagtcaagtgttttagagcactttgctgcaagggaccaccacctgcacgacc

SEQ ID NO: 305349 - DNA, 101 bp, Homo sapiens
tctctatcactacgtggccgtcaacaatcccaagaagcaggaatgaaagtggcgctttctccgccccagatgtgaatgaatgtgaactgctcagtggggtg

SEQ ID NO: 305350 - DNA, 51 bp, Homo sapiens
cctccctgccctgtataccgagggaacaggcgggctggtccgagtctctgt

SEQ ID NO: 305351 - DNA, 74 bp, Homo sapiens
cggttcagccctttgatgaccgcagcagagaatagtgacagtggtacaggaaagaaagaaaaagaaaagaaaaa

SEQ ID NO: 305352 - DNA, 78 bp, Homo sapiens
ttgcttacaggtttaacatcattaactgtgaaaagtccaacagtcagtttaattatgttcgatcctttggtacagaag

SEQ ID NO: 305353 - DNA, 82 bp, Homo sapiens
tgatttttggatcctgagaattgatctatgttggatcatcacagcaaactgtacaatggcagttgagtgggttttgaaaaac

SEQ ID NO: 305354 - DNA, 82 bp, Homo sapiens
aagaatccccccgaaaggaccccccagaaactgtatgagctgaataaccttcatgcacttatggcagtggtttctggcctac

SEQ ID NO: 305355 - DNA, 82 bp, Homo sapiens
cggctgcctaatttacagcaaccatgagaaggaagaatcctgctcaaaaatgaggtgaattaatacttgggcgctcaggaac

SEQ ID NO: 305356 - DNA, 82 bp, Homo sapiens
cccgctgcagccgagatgccgggggagcggggccttccacaccccctccgtgggtgtgtgacgcaaacatgcagatctttgt

SEQ ID NO: 305357 - DNA, 100 bp, Homo sapiens
cctcgggggcggcggccacgccaaggacggtctctggctgatgaacttgctcttgtggatgttttggaagataagcttaaaggagaaatgatggatctgc

SEQ ID NO: 305358 - DNA, 100 bp, Homo sapiens
attcagcctggcggacatcccctaccaggagatcgcagggcaccatgccggtggaaaggatgcgcatgcgcccgtggctggaggagcagataaactccaa

SEQ ID NO: 305359 - DNA, 101 bp, Homo sapiens
acattgagagcaaaatctacaagatgatgcagggaggaggtttgttctgagtaatgaataccctattactatgatactagtatcttccttaattatcctac

SEQ ID NO: 305360 - DNA, 100 bp, Homo sapiens
cggggaggagtttcatgaagagcccaaaacctattacgaactcaaaagtcaaccgctgaagagcagacacattccttaacccagcgcagggctgtccagg

SEQ ID NO: 305361 - DNA, 98 bp, Homo sapiens
ggagctctacgcctcctacgtttacctgtccatgttttagaaccccagctatcaaaaggtcaatcttagaaagctctccaagaactcctacaccattc

SEQ ID NO: 305362 - DNA, 92 bp, Homo sapiens
cagagttcaaggaggccttccagctgtttgaccgaacaggttgggggccgtcccgctcctaaggcaggaagatggtggccgcaaagaagacg

SEQ ID NO: 305363 - DNA, 75 bp, Homo sapiens
ttatttaaacaggttcattttggaaaaggtcctgtccctgctatcagtggggcactgaagaaagcaggactgagt

SEQ ID NO: 305364 - DNA, 75 bp, Homo sapiens
caccatggagacccgctacaacctgaagagtccgggtgtggacactgccagcggctgcagccgacttggaatgac

SEQ ID NO: 305365 - DNA, 100 bp, Homo sapiens
cttccattggccagtatgaagtggtgaaggagtgtgtgcagcgagctcttgaatcagccagtcagttggtgtaaagttgaggcaatggctttgaaaccag

SEQ ID NO: 305366 - DNA, 75 bp, Homo sapiens
acaacctgaacgtcaccgaggagaagtaccaggaggcgttggccaaggagcccccaaagacacacgtgactcacc

SEQ ID NO: 305367 - DNA, 100 bp, Homo sapiens
ccacgttgctcctggagatgagcacgccctttacctgcgtttcctggatgctcttaaaggaaatgagtggcttatactctcctgtcagtgaggatagcac

SEQ ID NO: 305368 - DNA, 100 bp, Homo sapiens
ctggtgcagggcctgattgaggactgccagctggcgctgcaggtggttattaacttggtgatgcttttggctgaaatgaaaatacaggaccgcgctgttc

SEQ ID NO: 305369 - DNA, 93 bp, Homo sapiens
ccgggccgcgccgccgctgccgccgccgcgcgcggacaatgcagatcttcgtgaagactctgactggtaagaccatcaccctcgaggttgagc

SEQ ID NO: 305370 - DNA, 100 bp, Homo sapiens
ggagaggacagaggtgcctggggcaacctccaccttgacggttccaggccagcgcaggacatctcattgccattgtcagccaggaactcgcagcctcaca

SEQ ID NO: 305371 - DNA, 100 bp, Homo sapiens
ctcctcttctgggctgtgctggtcacagccacactctgcaccgctaggccgtccccgaccttgcctgaacaagatgaagactggcccatttgcagagcac

SEQ ID NO: 305372 - DNA, 100 bp, Homo sapiens
atgctgatacggtagatgactatggagctgactccaactctgaggatgaggaggaaggtgaagcggcctgtagtggtggagacacgcccagtggatgatc

SEQ ID NO: 305373 - DNA, 83 bp, Homo sapiens
cccagtaccaagacccgacacaaggcagcttcccacagcaggttggacagttcacaggtggagtccacagctgtggtgagctt

SEQ ID NO: 305374 - DNA, 74 bp, Homo sapiens
cctgcacacctggatccaggataacggaggctggttggaggctggcagcgaagaagatcgaaaattaaacctca

SEQ ID NO: 305375 - DNA, 74 bp, Homo sapiens
ttcagactggtggactgttcatcattctgttgaagaaacgcttaacccaagatcctgaaggagctagacgagtg

SEQ ID NO: 305376 - DNA, 82 bp, Homo sapiens
tatcgtgaggttcagctgatgaagcttctgaaccatccacacatcataaagctttaccaggacctttaacttgaaggaagtc

SEQ ID NO: 305377 - DNA, 100 bp, Homo sapiens
aattaatgaagctgtacctcaggtgaagttttatgaagagtactgtggaatgtctatggtgactgtgataactatgccacactgaagggacacagtggag

SEQ ID NO: 305378 - DNA, 88 bp, Homo sapiens
ctgtgatgtagtttcctgacctctgacacgtattgtctcaagattaaagggtgatcagcccatgacctaaacctccagacaaaataaa

SEQ ID NO: 305379 - DNA, 98 bp, Homo sapiens
ggagactgtgccgtggagggcctcgccatgtcctgctgcccggatacaagaccctcctgaaaggaatttccgggaagttcaatagtggtgagttggtg

SEQ ID NO: 305380 - DNA, 98 bp, Homo sapiens
gaagaaacccagcttgatatgttgaaaccctgaagctgttacagcgcctgctgaagtcaccaggctgccggaagatccccgtgctggtgcagagcaaa

SEQ ID NO: 305381 - DNA, 87 bp, Homo sapiens
aatggagcaggtgaaagtgcagatcgccgtggccaacgcgcaggagctgctgcagaaagtcctacctccatctccgtgggccccagc

SEQ ID NO: 305382 - DNA, 75 bp, Homo sapiens
ttagggtcctttatatagaagggagagtagacaggggcaagtgtccgagtggtgaatcagctacttacagagatg

SEQ ID NO: 305383 - DNA, 100 bp, Homo sapiens
gttaatgtttacggcgaagtctactcaacgtttccaaggctgctctttggcgtaaattgcaatcgattagggatcgtttctcagaatcaagttagaagtg

SEQ ID NO: 305384 - DNA, 100 bp, Homo sapiens
gtttctgtatggagctcccgctgctcagacagatagaactgccaggaactcctgccaccgccaccggctcccatggcccacatacccagtgggggtgccc

SEQ ID NO: 305385 - DNA, 80 bp, Homo sapiens
agcccccatgatccctaagaagacagcttgaacctagattacctaggaacagtacgatttggggttatcacaaataaaca

SEQ ID NO: 305386 - DNA, 82 bp, Homo sapiens
agaacgtgtagccgcgtcccctccagtccgctccgggcaggcaacatgagtgagaatgaggaagaggaaatttctcagcaag

SEQ ID NO: 305387 - DNA, 90 bp, Homo sapiens
gcagccacggtccccagcttggcggccccacaggctctcacaggtggtaataagctgcagtcaacaggaaataaagcagaagacataaaa

SEQ ID NO: 305388 - DNA, 100 bp, Homo sapiens
gtgaaaatacagccaagatcttggcaaagcttctccctcagtatttagaccagggtgatgatgatgcttatctgtgtattcatgaagatcagactgtgta

SEQ ID NO: 305389 - DNA, 50 bp, Homo sapiens
gaaagagtcaacagcagtggcaacaggtttattttaggacagtggaactt

SEQ ID NO: 305390 - DNA, 99 bp, Homo sapiens
gaagatggggacaaagccgctccacctcccatgtcggcacaggtgacctctgagaaggatgtgcaaacagctctggctctagcaaaaggaaagtttggc

SEQ ID NO: 305391 - DNA, 75 bp, Homo sapiens
agcggagcgaacccgagagcgtggagcgggctgggccagagttgtggaaagtaaaaatgtagccctaccaaaagg

SEQ ID NO: 305392 - DNA, 90 bp, Homo sapiens
caaggcctcccagtacgttgtgtgaagagtatcattcgacaggaatatattattcgagtgcaaagaggaatttctgtggaaaacagctgg

SEQ ID NO: 305393 - DNA, 96 bp, Homo sapiens
caaggagtcatatatccttcatatgatccatcttagtgaagaattaggatacagggaaggccatggtaaaatttcagtatttgctgtcaaaatggc

SEQ ID NO: 305394 - DNA, 75 bp, Homo sapiens
aaggattccaagtaactcttatttggagttcaacctaagcctgctagctccatgcttaagcctagggatgagtga

SEQ ID NO: 305395 - DNA, 100 bp, Homo sapiens
atactatccgtttgttcaggaaccaccagtgacagactgtatgcaggagctattcttgaagtttgtggatgaaaattgggaaggttccctcaagtccaag

SEQ ID NO: 305396 - DNA, 75 bp, Homo sapiens
cgggccttcaggtgcggcgtgagagatagtcaaagaggttggtcaactggcagaaacccaacgcttcgaatgcac

SEQ ID NO: 305397 - DNA, 100 bp, Homo sapiens
ggggtgctgggcgacctgcaggcagcaccggaggcccaggtctccgtgcagcccaacttccagcaggacaagccatctgcagccagggacaaggatgaac

SEQ ID NO: 305398 - DNA, 116 bp, Homo sapiens
ctcaatatctgtcttcggtggactccttcggcagtccacccaccgccgccgcctcccagatagcctgggctggaagctcttctacgtcacaggctgcctgtttgtggctgtgcaga

SEQ ID NO: 305399 - DNA, 75 bp, Homo sapiens
aagccttgaggacctactcacagataggaattgaaggtactactgagcgagtgtgcttgatccagggaacggttg

SEQ ID NO: 305400 - DNA, 73 bp, Homo sapiens
tttcagagcgtttgggtcctctgaggccccttgaccagaaagtgactgagaccgaagatgatagtgatagtga

SEQ ID NO: 305401 - DNA, 73 bp, Homo sapiens
gctgtaactggtggcatttgtcccgggaccagagaacaccttctgcagtggggaccatgtgtcctggcacagc

SEQ ID NO: 305402 - DNA, 90 bp, Homo sapiens
aaacagatgctaatttgggaaaaagctccaggattctgacagggatgttgcgaagcggaggaaatatttgagagtgtaggagatcgagag

SEQ ID NO: 305403 - DNA, 100 bp, Homo sapiens
ggagtgaagaagcaagtgggatcacctatgaagatagtgaaatctgtgactgttgctgaaggactcatagaagaccattttgatgtcactgtgaagatga

SEQ ID NO: 305404 - DNA, 100 bp, Homo sapiens
gaatatctggaaacgggcattgcctgcgaggctggccgagaaatcccgtgatgaccatgaaagctgtggttctaattctaccaaccgtagtactgctgag

SEQ ID NO: 305405 - DNA, 100 bp, Homo sapiens
aagtattttctaccaagctgggacttccaaagctgggaatcctattttttattatgttgcacggagctttgaaaagtccagccgcatttcatgagcagag

SEQ ID NO: 305406 - DNA, 98 bp, Homo sapiens
ccaggaagagggactggaaccatctcagaagccatgcccctcaggctggaacttgccctgtctcctcgcagatgagcttgaagtacaatcttgttgtg

SEQ ID NO: 305407 - DNA, 100 bp, Homo sapiens
aaaagtgaaacaattcaggacacttgattcgcctttgccagtctcatctcgtgtctgctttgttaagttccatgatccagactcagcagttgtggcacag

SEQ ID NO: 305408 - DNA, 89 bp, Homo sapiens
aggacctgccagagactgggagtgttgactgctgcaaggaccaaggcttgtctggagcgggaaagactactgtgagcatggccttggag

SEQ ID NO: 305409 - DNA, 100 bp, Homo sapiens
cgcctgctttggccccggcgggttcggcatccgagcctggcaggggccaataggttatcagtgagctgaatggaaaaaacattgaagacgtcattgccca

SEQ ID NO: 305410 - DNA, 75 bp, Homo sapiens
gagcattttacaagggaagctgagttttggagcaaactaatggcatcccgggcccaaatcctagacaaagccaca

SEQ ID NO: 305411 - DNA, 74 bp, Homo sapiens
gtcgctatgagcgggaccaccctgggcacagcaggcatcggaggccaaacgtaccaagaaagtcgggatcgtcg

SEQ ID NO: 305412 - DNA, 100 bp, Homo sapiens
gaagacttgaacttaatacagcaagaaagaccatcaagtttaccacaatggccaatgtacatggtggactatgccggcctgaacgtgcagctcccgggac

SEQ ID NO: 305413 - DNA, 98 bp, Homo sapiens
caagaggcccagctggtcaccatcacaaaccccttagagcaagcccagatgaaccaatgacaaatttggaattaaaaatatctgcctccctaaaacaa

SEQ ID NO: 305414 - DNA, 82 bp, Homo sapiens
atagaagatcgtatagtcctagaaaactggattatggacagaacttggaaatattgagaataatttcttaaagccacttcat

SEQ ID NO: 305415 - DNA, 75 bp, Homo sapiens
cagagccggactgattctctcaatttgctttaatcccatggaatcaatcaaattaaatcatcatgactacattga

SEQ ID NO: 305416 - DNA, 83 bp, Homo sapiens
cccagttttgctgaccttattcaccatgacttatcaggaatgcttctagtcacaacagacacccttggccatgactttcatgt

SEQ ID NO: 305417 - DNA, 110 bp, Homo sapiens
ggctcccgagcctcgctggcggatgctctacctctgcacatcgcacccaggtggttcagctcgcatagtgtattcatgggctgccctgggcaagagccagctctgtttag

SEQ ID NO: 305418 - DNA, 98 bp, Homo sapiens
tttttgctggaggcataacaatgggaaacattggtcgacaactggcaatggtccggcctctttggcctacccccgttggctccgctgccccaggtcga

SEQ ID NO: 305419 - DNA, 83 bp, Homo sapiens
atgatattcagtggtgtttttctcaggtgaaaggagcagtagatgatgatgtagcagaagaagcctccccagctttctgagga

SEQ ID NO: 305420 - DNA, 82 bp, Homo sapiens
tttgagctgcacgttgcacaagatatggctcgtggacagcagaaaattcagtctcagcagaaaaatgccaaaaagcaagctg

SEQ ID NO: 305421 - DNA, 100 bp, Homo sapiens
cgatacagaaagtgcactgactggtggtgtcaacccatggctcaactggaagcactgtggaagaagatggagggtgtgaatgacatccttaactccaggc

SEQ ID NO: 305422 - DNA, 100 bp, Homo sapiens
aaagaccctttttcctctgattgaagccaagaaaaaggatcaagtgactgctcaggaaattttccaagacaagtcgtccttggtggaaggaaccatgaac

SEQ ID NO: 305423 - DNA, 50 bp, Homo sapiens
aaggtctttgtcaagaacccagagtcggagcagctgataacctcagtccg

SEQ ID NO: 305424 - DNA, 100 bp, Homo sapiens
ctcagaccgtgcagaatgttacattgtcgctcactctgcccatcacgtgccacatttgcttggggaagttcgtgccctcgtgaggctggcatgcaggatg

SEQ ID NO: 305425 - DNA, 75 bp, Homo sapiens
ggtgcccggtactgcactgtgcgctgtctggggacccaccaggagaccagggaaagcaggcaggatgggagagtc

SEQ ID NO: 305426 - DNA, 100 bp, Homo sapiens
gacctggaagttttagcctagctgttctcaaggcggattaattagcccaagaaacattatattcatgctcctgctccagcccagcccccagagagcagac

SEQ ID NO: 305427 - DNA, 96 bp, Homo sapiens
agtaaagagaaggaggccggaactacaccagcaaaaggtgtcatggagaaactccagctgggcccagagattctgcagcgggaaaatccaaggctt

SEQ ID NO: 305428 - DNA, 100 bp, Homo sapiens
cacgattccaaaacccccaaagccaccagataagccgctgatgccctacatgaggtacagcagaaaggctgatgatacctacctccagctgaagaaagac

SEQ ID NO: 305429 - DNA, 75 bp, Homo sapiens
atcattggacccaatggctctgaggccagctccaccagggcaagggtttttccctgcctgccactgtatgccgag

SEQ ID NO: 305430 - DNA, 90 bp, Homo sapiens
gccctatcaggacatggagtatgaaagacgcggaagatccatccaaaagctatgtgaaattacgagactttgtgcttgtgaagctttgtc

SEQ ID NO: 305431 - DNA, 107 bp, Homo sapiens
atccttcaggtgctggaaaggaatgaggagttacagagggccgagaaggacaggatcagatatgaggccccaggattcctggcgaggtcctcctccccttttccagc

SEQ ID NO: 305432 - DNA, 100 bp, Homo sapiens
ttttccagcgctgcctccaggttttgccggagcgctattcttcactcgagacaagcagaattaaagctatagagagtcccaacaaagaagatgataccca

SEQ ID NO: 305433 - DNA, 90 bp, Homo sapiens
gcgcgccaaaaccgggacggacaagaccctggtgaaggaggtcgtacaggtaccaaccaagaagctgaagaaatatgagaaagaatatca

SEQ ID NO: 305434 - DNA, 109 bp, Homo sapiens
caggagttcgtctcttacgtctgcggaagtgcagctgcctcagttcttagcgcagataacgaaggaggcccaacttcattcaataaggagcctgacggatttatcccag

SEQ ID NO: 305435 - DNA, 75 bp, Homo sapiens
tgagcaccgccaccatggggaaggggtactatactggcaattgctggagaagattttgcaattgttgcttctgat

SEQ ID NO: 305436 - DNA, 98 bp, Homo sapiens
tggaatacattagcgaaaaacttgtatcaggtagtagccatggttatgtgggttccagtagtagaatatcaagaagaacacatttatgctccgctgct

SEQ ID NO: 305437 - DNA, 75 bp, Homo sapiens
gactttcagttaaactaacaaatgtttccagatgtttcaaactattcatcagcttactagtagccctgaagatat

SEQ ID NO: 305438 - DNA, 100 bp, Homo sapiens
gcataaagaaaggaaataatgccttcagggtctaccgaatgctgcccctatcagaacggccttctaagaaagaaggggtagaagagccatccaaaaaacg

SEQ ID NO: 305439 - DNA, 75 bp, Homo sapiens
atcaattcttcgacaggaaaaaaatttgctggatattgatgcgccagtcactgtgtttcaacaaaagacagccag

SEQ ID NO: 305440 - DNA, 97 bp, Homo sapiens
tgaaaaacattcaggactactttaatccagctactctacctctaacacagtacctgttaacaactgtacatatgaagattgaagaaaagataacatt

SEQ ID NO: 305441 - DNA, 75 bp, Homo sapiens
agctcaccgagacggcgatccgggcgctcgagacttaccagagccacaaggctgaccaactgactgaagagcaga

SEQ ID NO: 305442 - DNA, 74 bp, Homo sapiens
aagatacatgagacagcagccaaacccccagatgccgacaaaaggatcaaggtggcgaagcccgtggtggagat

SEQ ID NO: 305443 - DNA, 100 bp, Homo sapiens
ttggacttcgcgatcttcgccgttaccttcttgctggcgttggtgggagccgtgctctacctctatccgaaacaggtggcatctgcatcgcaccacggcc

SEQ ID NO: 305444 - DNA, 80 bp, Homo sapiens
gcccaaacatctcaacttacatttaaagtgaccccagttttgcccgtctgggtcagatggtcttggagtatgaccaccct

SEQ ID NO: 305445 - DNA, 74 bp, Homo sapiens
agatgcaggaccttggggacaagctgcgcatgatcgtcatgggacacagaaggaacaagatcactcaaggtgaa

SEQ ID NO: 305446 - DNA, 80 bp, Homo sapiens
cagagcgccgcgcacttcgtcatgttcttcgcgccctgcttccccgggcgctgcctggacaggcctgcctgcgtgctggg

SEQ ID NO: 305447 - DNA, 80 bp, Homo sapiens
ggagccgtgggcgctcggtgcccgggccgggcagaacttgaaggtgcacattcttgatactgaaagttttgaaactacat

SEQ ID NO: 305448 - DNA, 75 bp, Homo sapiens
gccacatttgttttgagctaaatattgagggagcggaaagaatgtcggagcgggccgcggatgacgtcagggggg

SEQ ID NO: 305449 - DNA, 83 bp, Homo sapiens
ttttagagctgccgacagctctaagcgcacagtgcagaaaaacgccaagtacatctgcctggctaacaaggactgccctgtgg

SEQ ID NO: 305450 - DNA, 75 bp, Homo sapiens
ccagccccagcagcagttccccaaggccaacgggactccaaaaaggtggggcaagtccgtgggcatcatgttgac

SEQ ID NO: 305451 - DNA, 100 bp, Homo sapiens
ctccttttccctctccctttccctaagttgtctatcaacgtctatgactacaactgccatgtggacttgatcagactgctcaggctggaaggggagctta

SEQ ID NO: 305452 - DNA, 100 bp, Homo sapiens
gcggccggaggagccatggactgcagcctcgtgcggacgctcgtgcacagatacttcatggcctcccacgggaacgacgccgcgagagccaggtttgagt

SEQ ID NO: 305453 - DNA, 95 bp, Homo sapiens
ggaacatctcttcccagcggctcagtactactataattccttgacccagcagtacctttactgggatggggaaaaagagacctacgtgccagctg

SEQ ID NO: 305454 - DNA, 83 bp, Homo sapiens
caccacgcagagaatccagcctggctgaaggtgatgtggccgccctcaaccgacgcatccagctcgttgaggaggagttggac

SEQ ID NO: 305455 - DNA, 75 bp, Homo sapiens
agaggtcccaatcccccactctttccgccctaatggaggtctccagtttcgaaatgcactcggtgatggaaagag

SEQ ID NO: 305456 - DNA, 83 bp, Homo sapiens
ggaagtgcagctgcctcagttcttagcgcagctgcaacattattcctctgcaaagatgattgtccctggggaacagtaacagg

SEQ ID NO: 305457 - DNA, 50 bp, Homo sapiens
tctactgggggacatcctgttgtgaagtgctgctcacggccgtgaactgc

SEQ ID NO: 305458 - DNA, 100 bp, Homo sapiens
cgccgcccccagctcccccgcctcggggagggcaccagcatcaattcctgaagattgccaagcccctctccagcctcactccactgattgctgcagctaa

SEQ ID NO: 305459 - DNA, 75 bp, Homo sapiens
taagaaaggtgcagaagtcattttaaactatggacgactccgaggaacattgagctttgatgtggaaaatggccc

SEQ ID NO: 305460 - DNA, 98 bp, Homo sapiens
aagaatgctgatggtttcattgatctagaagagtatattggtgagctgcgttctctacgggaggagatttccctgttagagcatgagaaagaaagcga

SEQ ID NO: 305461 - DNA, 100 bp, Homo sapiens
acgtcagcgtgatgctgaggtgactcgactaagagaattaaccagtgatggaatggggagaagatattaaagcagtttcaaaagatgaagcagtgatgtt

SEQ ID NO: 305462 - DNA, 98 bp, Homo sapiens
gcagttttggggccattggtgggggcggtggaccagggcaccagttcgacgcgctttttggacctggtgtcaaagatgcttcatgtagaccctcatca

SEQ ID NO: 305463 - DNA, 100 bp, Homo sapiens
ttgaagatgtttcaaggagaggcccagcatatacaaaggcatggaagtatgaaaatgtgttatagttttgccgctggactcttccctcccttcccccacc

SEQ ID NO: 305464 - DNA, 80 bp, Homo sapiens
agacgaactccgcaatgaggacgttcagatcatcggccgtggcaatgaccaggtggccatcagctccaaatttgagaccc

SEQ ID NO: 305465 - DNA, 75 bp, Homo sapiens
aaggtgttttggatgcattctagaacacagttctcagcacagatattctacacctcacgccttcacctttaacac

SEQ ID NO: 305466 - DNA, 75 bp, Homo sapiens
cgccagatcaacctggagctctacgcctcctacgtttacctgtccatggctcacgaggcccagggaatcctctgg

SEQ ID NO: 305467 - DNA, 100 bp, Homo sapiens
cgatagctgcaaggaaggtggagatctcctgtgctgcgaccactgcccggctgccttccacctccagtgctggaaagatgaatgggagggctgattttcg

SEQ ID NO: 305468 - DNA, 82 bp, Homo sapiens
ggcagctggagcctcaggcggcagcgcttctaggccaccaaaatgaatggctgtgaagaatattgtgaagaaaaagtaaaaa

SEQ ID NO: 305469 - DNA, 74 bp, Homo sapiens
agatctttgtctcgctcgatctcacagtcctccactgacagctacagttcagggaaaactgcctttgcttctga

SEQ ID NO: 305470 - DNA, 100 bp, Homo sapiens
cagggaccgcagatgctctgggcctgagccgggccatcctgtgcaatgctcaaagcttggattctgccgtgccactcacgaatggcgacacagaagacga

SEQ ID NO: 305471 - DNA, 96 bp, Homo sapiens
agcagccgctgccgccgccgcgggagccgctgcccgaactcccggcccgaactccaggaggctattacttgacaagcgcatatggagcactttctc

SEQ ID NO: 305472 - DNA, 88 bp, Homo sapiens
tttgaactagaagcattttatactaatttacatgaagtgccttatcctgatgcaagaattggaaaaatatattcagggggaagagatg

SEQ ID NO: 305473 - DNA, 98 bp, Homo sapiens
tttcttatactctagaatatacaaagacaaaaggagattctgatgaagaagttattcaagatgataacgtggttagaaggccattcactggcacagac

SEQ ID NO: 305474 - DNA, 101 bp, Homo sapiens
gcagcttttcctgcttgatatagcacagaaatatggctacacacacctttctgcaggagagctgcttcgtgatgaaaggaagaacccagattcacagtatg

SEQ ID NO: 305475 - DNA, 90 bp, Homo sapiens
ctgctgtggaggctgaggaggcggcggcggagatctggggggcaatggcggcttcctgtgttctactgcacactgggcagaagatgcctc

SEQ ID NO: 305476 - DNA, 96 bp, Homo sapiens
tggaagaagatgaagaggaactttttaaaatgtgctgctctccctgcgcattttgctactgatgaagcccagtgtgctatcccgagtcagccacca

SEQ ID NO: 305477 - DNA, 100 bp, Homo sapiens
ccgacattaggctcctgcagcacaggcagtttctccagtacctagctcttgcagtgtacagtgccagccgtatccagcaattgtccccttggggcggaaa

SEQ ID NO: 305478 - DNA, 100 bp, Homo sapiens
agaaactctataatgtcatcagcctcgagtttagccacaccaggctggagaatatggtgcagaggccctccacgggttgttttataaaggtgatgaccat

SEQ ID NO: 305479 - DNA, 92 bp, Homo sapiens
cagccgggctggtcctgctgcgagccggcggcccggagtggggcggcgggtactccaaagattcaggtttactcacgtcatccagcagagaa

SEQ ID NO: 305480 - DNA, 100 bp, Homo sapiens
ggctcagaaagatggatttttgcatgagacgcttctggacagagatccatcctgcaaagaaacctaatgtaattcgatctacaccaagcctgcaaacccc

SEQ ID NO: 305481 - DNA, 100 bp, Homo sapiens
atcccccctcacccaggcccctgtcaagaaggtgccggtggtgcgagtcttcggagcgaccccggcagaaatacaggtatcaggatgaagatacacctcc

SEQ ID NO: 305482 - DNA, 75 bp, Homo sapiens
aatatgagtgatgacaaaccctttctatgtactgcgcctggatgtggccagggagcatgataaagatccagaaag

SEQ ID NO: 305483 - DNA, 100 bp, Homo sapiens
ttgactgtctatgcaattgacccccaaaccaacagagccatcgatagaaatgagctttttaacttagcagtgtctgcaaaaacgaatcttttcctacaac

SEQ ID NO: 305484 - DNA, 88 bp, Homo sapiens
ctagctgaaataacccttgatcctcctcctaattgcagggcaggttgtgcagctggaggcagagcagtcctctctggggagcctgaag

SEQ ID NO: 305485 - DNA, 83 bp, Homo sapiens
cagaagtccagagctgaggactgcctgtttgcaggcgatcagtgggtgaccgcggctgcgagggactttgtcatccgtcctcc

SEQ ID NO: 305486 - DNA, 80 bp, Homo sapiens
gaggcctgaaaccaaggtgctcatctgcacacacaccaacaggtcagcccaaggccaaccccactgtcactctgttcccg

SEQ ID NO: 305487 - DNA, 100 bp, Homo sapiens
gtcgcggctacggcgtcatggaggagatccggcggcagggcaagctgtgcgacgtgaccctcaagggaagtcgagataacatgagtattgtactagtttg

SEQ ID NO: 305488 - DNA, 75 bp, Homo sapiens
accaatggaagcagctggcttcactgctcaggttaatttggagtggcccctggagtcagtttcctacaccatccg

SEQ ID NO: 305489 - DNA, 80 bp, Homo sapiens
ccgacgacgttcgtcatttagtgcgggagggatcctgaaccgcgcggccgaaccctccggagcaggccgggctctcgcca

SEQ ID NO: 305490 - DNA, 100 bp, Homo sapiens
ttgctgcgctgtagaatcttgaggggtctccatccagatcagctgaatcagagtttgcattgttaacaaggtaggagcaacggtgggaatgccctctgag

SEQ ID NO: 305491 - DNA, 107 bp, Homo sapiens
ggaaaatactggagttcctgagatctcaagggcaaacttgaagataaatcttttgactccagctctttagaggatctaaagtgaccttgatggacagtggaagaaat

SEQ ID NO: 305492 - DNA, 100 bp, Homo sapiens
ggggagacccttcgaggaacagctgaacgaaccctggccacactctcaggctgctgccccattggaagattactccccaggcttcccttgccccaagcag

SEQ ID NO: 305493 - DNA, 98 bp, Homo sapiens
gggcgaggtggcggcggcggcggagcgggagcgggtaccgggcgcgggcagagcgcggcggcgcgggtttcctatgttattcgagatgaagtggagaa

SEQ ID NO: 305494 - DNA, 82 bp, Homo sapiens
cgctgtgttgattgaggacgttcccttcacggagaaagattttgagtttggtgcacctcgatttggaggaagtagggcaggg

SEQ ID NO: 305495 - DNA, 90 bp, Homo sapiens
ggtagcctcaccatgaaatcacagcttcagatcactgactccattaataatatacctctttcatttcctaattgactatgctgaattggt

SEQ ID NO: 305496 - DNA, 75 bp, Homo sapiens
ctgaatgcctacttgcaacagggttgcaaactgtcttccagacctgaaggaaaagattatgcccttcattggcta

SEQ ID NO: 305497 - DNA, 100 bp, Homo sapiens
tggaatttgctaagaatatgtatgaactgcataaaaaagtttctccaaatgagctcatcctgggctggtgactctgacatcattagaagcatgccagaac

SEQ ID NO: 305498 - DNA, 75 bp, Homo sapiens
ctcctggctgccgtgaataggcagcctaaaggtgtaaatgcagacaaagttggaattgaagctgccgaaatgcta

SEQ ID NO: 305499 - DNA, 101 bp, Homo sapiens
ctatgacaacctgaggcactgtgctcggaagttagacccacggcgtgaaggggcagaaattcggttgcaccctgcggtgagcgtgggccaggcaaccacag

SEQ ID NO: 305500 - DNA, 76 bp, Homo sapiens
tggaagcagccgatccagcctgcggagcctgtggggcagctgcccaacatgttcggcgaccttcggtccacgttta

SEQ ID NO: 305501 - DNA, 90 bp, Homo sapiens
gcaatgacccagacccggacgacccccattgctgagccagcggagctgcttggtctccaggaaacctagagaaaaaccgttatggggatg

SEQ ID NO: 305502 - DNA, 127 bp, Homo sapiens
ccgcacggcacatcactggggagaagctcggagagctgtataagagctttatcaagaactatcctggctccaggaggccagagctctactgaagcggcggcggccccgggggccagggggccgggga

SEQ ID NO: 305503 - DNA, 75 bp, Homo sapiens
gttttcaggaaacttgcagcaaagccattcgggttggagtaattgaccaaggagttcatcttctcggagctgctg

SEQ ID NO: 305504 - DNA, 80 bp, Homo sapiens
tttggaactgactccgagggttgggagagcgcgttggtggcgacggccgagtcaggtattaagtcatgatgcaggaatct

SEQ ID NO: 305505 - DNA, 98 bp, Homo sapiens
tgagatttacctgtgagatgtttcatcccaacaatgccatggacaatattaccaggcagaaccaattctacgatacccaagtcatcaaacaagaaaac

SEQ ID NO: 305506 - DNA, 98 bp, Homo sapiens
ggcagcattttttccagaacacaaaagctccagtcagcccggtcaagcatgacagcaactcaaactcggcaaacttccaagacgtggaggacatgcct

SEQ ID NO: 305507 - DNA, 74 bp, Homo sapiens
atgaaattcattacagaaatctggcacccaaatgattgctttggccttgaacaaagtggatggagccaatgtgg

SEQ ID NO: 305508 - DNA, 76 bp, Homo sapiens
gttcgtgagtcccgtgggaaagctaacctcaccaaataatgttaattcaagactctcgaagagaagcttcagtgca

SEQ ID NO: 305509 - DNA, 75 bp, Homo sapiens
tgacatttaattttagggtcctttatatagaagggagagtagagtcttgctatggagatacacttcaattcctac

SEQ ID NO: 305510 - DNA, 90 bp, Homo sapiens
ggacagcacttccggtcacgccatcgttgctgccttcttcgtcaaggaatctgcaagcagaatatgaccgtctaaagcagcagcacgaac

SEQ ID NO: 305511 - DNA, 50 bp, Homo sapiens
gatccagcctgcggagcctgtggggcagtttggtgaggattcatcaacct

SEQ ID NO: 305512 - DNA, 82 bp, Homo sapiens
cgcgcgcagggcctgcagcgggagctggacggcgagcgcgagcggcgcgagaaaccccataggctccttcaatttccgtgat

SEQ ID NO: 305513 - DNA, 76 bp, Homo sapiens
atccctggctgtagcgaacaacaacccaaccattactggaaaaccagtttggctattaagggaacctgtcgacaca

SEQ ID NO: 305514 - DNA, 103 bp, Homo sapiens
cggctccgtcgtggaagcaggactgcgccgcgtcttcctcaaggaccaagaatcgccttcagccctgtctggtgcatccttggcagaaagtgaggaggaaaac

SEQ ID NO: 305515 - DNA, 50 bp, Homo sapiens
ctgcgggcccgctccgacgcggaagccacaagtatatggttatgatgact

SEQ ID NO: 305516 - DNA, 100 bp, Homo sapiens
cagaatgctgccagctggggctatttcaacacgcagagccaaagctggaacgtagagacgtgcattgtcctgttttcacttttggcatgggtttatgctg

SEQ ID NO: 305517 - DNA, 101 bp, Homo sapiens
agtctagctgctctagtgaagaagatgaggaagatgactcggaatcagaagctgaaacaggaagagatgatctagagagcttccagcttgagataagtggc

SEQ ID NO: 305518 - DNA, 82 bp, Homo sapiens
cggttgccgctttctcctctcctaaccgttaagtgcgctaagggaacggcaggagcagctgatgggatatcggaagagaggg

SEQ ID NO: 305519 - DNA, 82 bp, Homo sapiens
cctggagcctcagttggaagcagccgatccagcctgcggagcctgtggggcagtttcggagcaacatcccctgtcacctggt

SEQ ID NO: 305520 - DNA, 75 bp, Homo sapiens
aagggtgttcccgaactagagtggaaggacagaataacgggctcccagattcacaagccccaccaagaggatcac

SEQ ID NO: 305521 - DNA, 101 bp, Homo sapiens
agagtccggccgcgacaggacggttcagccgtctgtatatctccccagatacctgaaactgaccacctgagtacgttttcccattgctgagctgtttccct

SEQ ID NO: 305522 - DNA, 74 bp, Homo sapiens
atgcagaggaagaatttttctatgagtgccctataaggactgccaggcaataatgaaggttcttttactgaagg

SEQ ID NO: 305523 - DNA, 95 bp, Homo sapiens
tgcccgcccctaccgcctcaagccaggccatgtcctggatgtggagggcggctgcatcaccaagttggagaccttcatccaggagcacctgaggg

SEQ ID NO: 305524 - DNA, 82 bp, Homo sapiens
ggtgaaactgaccacagtgctcaccacccaccaccactgattttgcaagaacgaggctcaaggatgtgagggacacagtatt

SEQ ID NO: 305525 - DNA, 83 bp, Homo sapiens
atcagagattgagaatgtccatggatttgtttctcattctcatatttcaccaataaagattggccatcgggactttgatgtgg

SEQ ID NO: 305526 - DNA, 100 bp, Homo sapiens
tggagcctgactatggcacggccacaaggaggaggcctgagtgtgggcggggccttcataccagacacaacatttgcctgcaacaaggacagcggccagt

SEQ ID NO: 305527 - DNA, 101 bp, Homo sapiens
ccgggatctcaggtcctcgggggcggcggccacgccaaggacggaactctaagaaggagctgatgtggaggagcagctgagacagttcaagatgacgacca

SEQ ID NO: 305528 - DNA, 73 bp, Homo sapiens
gggaactgactgctgtagttcagaagaggtttgttttcctgctggaccgagggctagacatctacgtatggcg

SEQ ID NO: 305529 - DNA, 98 bp, Homo sapiens
tcacctggcccctgggccagttcggaagcctctgagcaggtagttttggatgttgggtgtggaactggaattctctctatgtttgctgctaaagctgg

SEQ ID NO: 305530 - DNA, 156 bp, Homo sapiens
aggccgtccagcagatggcggatgccctgcagtacctgcagaaggtctctggagacatcttcagcaggattttttatcaagcagaaatgcatcgaacaacgagaatcaagatcactgagctaaatccccacctgatgtgtgtgctttgtggagggt

SEQ ID NO: 305531 - DNA, 100 bp, Homo sapiens
tctgcgacgcgcagtccacgcaggagatccatgagaaggtttttagaacttcagccataaaaatgggcagaattttccttgatcatatcggtggtacccg

SEQ ID NO: 305532 - DNA, 101 bp, Homo sapiens
ctgcgtccctcccagcggcgcgtgagcggcactgatttgtccctggggcggcagcgcggacccgcccggagatgaggaggagagacttcagcatgcaaacc

SEQ ID NO: 305533 - DNA, 51 bp, Homo sapiens
ccttgaggctccaagaccagcaggtggaaaatgagcttatatatgaagaag

SEQ ID NO: 305534 - DNA, 75 bp, Homo sapiens
gttggaccagttgtacctggatgacggttttggcccgaaccgcgacttcaacaaaaaataagagaagaaaggaat

SEQ ID NO: 305535 - DNA, 96 bp, Homo sapiens
gagaactggaggtgcagagggtgaagttcctggtgaggcaggcgactaatcagattgtgatgaattgtgctgatattgatattattacagcttcat

SEQ ID NO: 305536 - DNA, 100 bp, Homo sapiens
tctggatccccgcccaggaagcccctctgaagcctcctcgccgccgtttctgagaagggcattttggaagtgtcaaaggccagggacatccctgttgtca

SEQ ID NO: 305537 - DNA, 97 bp, Homo sapiens
cgccatcttggatccgcgggacaagaaaattcatgcggtacttccgaagatcccagtttacagcgatcagtttcggttgcaacgggactgaacatga

SEQ ID NO: 305538 - DNA, 73 bp, Homo sapiens
ttgacttggtgttgaaagtgaaatgtcatgcctctgaaaatgaaggcttctctgcagaatgtcaaacaaagat

SEQ ID NO: 305539 - DNA, 75 bp, Homo sapiens
gccgtgaagaccttcaatagcgagagagaaaaggaacagttccgtaagctctttattggtggcttaagctttgaa

SEQ ID NO: 305540 - DNA, 98 bp, Homo sapiens
ttgcaagaaaaggggccttctgtggattggggaaaaatccagagaccccctgaagattcggaaatgcttccagactgcacacttttacttagaggaca

SEQ ID NO: 305541 - DNA, 82 bp, Homo sapiens
attgaagccgcctctgtattacttaccagagtggacagctggttttgaggggtacagtctgagcagtcgaagaaatatagca

SEQ ID NO: 305542 - DNA, 83 bp, Homo sapiens
cctgggctgggaacccgcggtggagcgggacacgaacgtgcaaattgtggctactaatttgccccctgaagatcaagatggct

SEQ ID NO: 305543 - DNA, 100 bp, Homo sapiens
aaagcgcccagcctgccgcctcgctgtccctgcggcttctgggggtcatgcttcaccccttcctccatctgctgcacctaccactgattctacagattcc

SEQ ID NO: 305544 - DNA, 139 bp, Homo sapiens
gtcaccgacctggccgagctgcccagcgagatcctcggggccccagaggccgcggacaccgacctggagtggtgaagcagcgcttgcagatgtacaactcgcagcaccggtcagcaatcagctgcatccggacggtgtg

SEQ ID NO: 305545 - DNA, 100 bp, Homo sapiens
caaaagagcatgtaccttgatattgaattactgtatctggacggatggactgaatgcgctactcgggaaggacatgatgagcgacctgacgcggaatgac

SEQ ID NO: 305546 - DNA, 82 bp, Homo sapiens
agagattcagccagcacactcctcgcgagcaagttacaacattaaagcctgaacttggaaagataatgtacagtgatttcaa

SEQ ID NO: 305547 - DNA, 83 bp, Homo sapiens
aaaagctgccctgagacggtgtcccgccgaaaggaggacaagtccttgaatgaccttggctgattcagctctccctgctcctt

SEQ ID NO: 305548 - DNA, 121 bp, Homo sapiens
ccgcaaccacagcttccgccacatcctgccggggttccggagcgccgccgccgccgccgcggacaatgagaggtatagcgaaggagatactgagaagttaaagatgtaccattctctcctt

SEQ ID NO: 305549 - DNA, 50 bp, Homo sapiens
gccttctctccaggctctgaactttctcaaatccagggcctgaaaaccca

SEQ ID NO: 305550 - DNA, 95 bp, Homo sapiens
cttctggctgctaatgtggccaccctggggctcctcatggcccggctccttagcacctctccagagagaactcgatgccaccgcaacggtattgg

SEQ ID NO: 305551 - DNA, 100 bp, Homo sapiens
tggggtggactccgtgcaggagctggccccgccgcccgccctaccccccaagcagcggcagctggacattcagtcagaagaaggctgctattgaaagaga

SEQ ID NO: 305552 - DNA, 131 bp, Homo sapiens
ccgctgttcacctacgggcctgatcaaacttgccttcctgttctccaagaccaggctttttatggaaattctcaatgactgttctgatgtagatgagatcaaattccaagaagatggttcttggtgtccaa

SEQ ID NO: 305553 - DNA, 100 bp, Homo sapiens
aggatgtcgggcactctacagatgccagggaaatgtccaaaacattcatcattggggagctccatccagtatggcccatctcctgtacgcttggagcgac

SEQ ID NO: 305554 - DNA, 100 bp, Homo sapiens
agcgcgggatcccagcctcaggcgtgcgcggacggtgtgcgggtgatcttattcctgataatgttggttatgcgcaaacgtgttgctcttaccatcgcct

SEQ ID NO: 305555 - DNA, 90 bp, Homo sapiens
gaggtcctttacttggtgcattactgcggatggaatgtgagataagccaatggacacgtcagtgttatctgaagaaggaggagagccttt

SEQ ID NO: 305556 - DNA, 80 bp, Homo sapiens
ccggaccggagactttggggcctaactagacctcctgccccccgaggtctgcagtctcctgaacccagcagccatctacg

SEQ ID NO: 305557 - DNA, 101 bp, Homo sapiens
gaacaaactcgtagggactccaaaccccagtactcctctgcccaacactgtacctcagttcattgccagagagccatttttaacttctagtcatggcgaat

SEQ ID NO: 305558 - DNA, 75 bp, Homo sapiens
aattctgcaggagaattctactctgtctgcaagtaacaagtgttgcatgattggccatttgatgatggagctcca

SEQ ID NO: 305559 - DNA, 75 bp, Homo sapiens
agatgaacttctatcacagtttaagggtacttttgacttcagtgacattgctgtctatatattcaataaacctcc

SEQ ID NO: 305560 - DNA, 75 bp, Homo sapiens
caagaaccaacccccaaattggctgggacaggtgaaggcttccataattaccatcacacctttccctttgactac

SEQ ID NO: 305561 - DNA, 75 bp, Homo sapiens
cacatcctgaccaccttgcaagagccacatgacaagactgcttttcaggaagccttggacgctgcaggtgataaa

SEQ ID NO: 305562 - DNA, 100 bp, Homo sapiens
ggaaccgtcgggccgcagccgccggcaatgccgcgaaggaaggctattcaaggccgaaatgagagctgtgacatatcaaaagaacatacttcagaaacta

SEQ ID NO: 305563 - DNA, 90 bp, Homo sapiens
cagcagaagagaagaagaagcaggatgaactgaaacggattgccagagaattggcagaaggtctcctactccctccctccagtactgcga

SEQ ID NO: 305564 - DNA, 49 bp, Homo sapiens
agaagaagcagctgaagccgtggtgctgataatggagtgaagaaagtga

SEQ ID NO: 305565 - DNA, 74 bp, Homo sapiens
gcggccgacccgctggtgggtgtgttcctgtggggcgtagcccactcgacaaatgtttatgggtcagcccagag

SEQ ID NO: 305566 - DNA, 90 bp, Homo sapiens
cagctcgaagaaggcgagcagggtgcgggagagccccttgcagaagacgccgtacgagtgctttctcctgctcaagacagccacacgaac

SEQ ID NO: 305567 - DNA, 98 bp, Homo sapiens
agaaagtgaaaatgattgggaagaggttgaaggtctacaaggaagtcttcacgaggagcagtgagaactcagcgtcgtcgacgttctaagtctcctgt

SEQ ID NO: 305568 - DNA, 134 bp, Homo sapiens
acaaaaccagatgtctacaagagccctgcttcagatacttacatagtttttggggaagccaaggttcttcttccgcagtgggaacatcgagcacccggaggacaagctcttcaacacgtctgtggaggtgctgc

SEQ ID NO: 305569 - DNA, 90 bp, Homo sapiens
gctgacatcaacggccaataccaacataaattacagaagacatccccgtgaagactttgaatatgaagactgtgtatgtttctgtgttac

SEQ ID NO: 305570 - DNA, 74 bp, Homo sapiens
gcgtctgctagtggagcatggggcatccccatcaggaggtatgaacatgctaatgatgataagagcagtttgaa

SEQ ID NO: 305571 - DNA, 100 bp, Homo sapiens
ggaagatgggaaagttattgaacggctgggccagagcgtggttgctgaccagttgaaagtaagactttgaccccgacgcaggcttcagtgattgccgcgg

SEQ ID NO: 305572 - DNA, 100 bp, Homo sapiens
ctccgcgagaccctggtgcacctcaatcttgctgggccggcggcggcggctgccccgagggacgcggccctaggcggtggcgatggggaccgcccggatc

SEQ ID NO: 305573 - DNA, 100 bp, Homo sapiens
gaacctgctgtatctactcaagagtggaagttttcacaggtagacgttacatccaagaggaaataatccaggcaaggaagcacaagctgatcaagatgtg

SEQ ID NO: 305574 - DNA, 75 bp, Homo sapiens
aagatgcggatccgggcctttccggttggtacaggtcttgggcctacactggagttttatgcgcttgtatctcag

SEQ ID NO: 305575 - DNA, 98 bp, Homo sapiens
ggcggcagcggttggaggcttcgcccggctttgcagcggggacttcggcggcggcgcctcaggcacctcggcccggccagagcctaagcctggagacc

SEQ ID NO: 305576 - DNA, 98 bp, Homo sapiens
tccacggtgaagcgctatggcctgggggcacatcgagggagactcaacatccagcttggtgtaaaaattgccaaagcagttgcctgccacaactttgt

SEQ ID NO: 305577 - DNA, 100 bp, Homo sapiens
aggtgttggccgcggcctctgagctgggatgagccgtgctcccggtggaagcaagggagcccagccggagccatgaaccctgatgccaacccacgcccca

SEQ ID NO: 305578 - DNA, 83 bp, Homo sapiens
gcaatggtctcaatctctggaaaaacttcttgccaaccaaattcctgttcccgacatccggacgtgccacttctgcctcgtag

SEQ ID NO: 305579 - DNA, 101 bp, Homo sapiens
ctaaagtcacccggcggccaaaggccagtgactaccaacgtttggaccagaagaaaaagcttgtggtgaaggggggcaaaaaaaagaagcaagttctgaag

SEQ ID NO: 305580 - DNA, 78 bp, Homo sapiens
gactctcctttcatccttgttaacttaccctcaggtccaacaatgcaggaatcccgttctgcttccagaagtggaagt

SEQ ID NO: 305581 - DNA, 95 bp, Homo sapiens
cctgtctacagagaaaaagaagatatgtatgacgagattattgagttaaagaagagggagacgctgttgcggcagctggagacgaaccagctgga

SEQ ID NO: 305582 - DNA, 50 bp, Homo sapiens
agggctccgggcaccaggagcatatcaaggtctcactctgtcgcccaggc

SEQ ID NO: 305583 - DNA, 98 bp, Homo sapiens
caggatctatttgtaaaggccagcagcttgtgatgatgccaaacaaggttcaaaccttgtactactcagctgatcacaagctgcttgatgggaaccta

SEQ ID NO: 305584 - DNA, 82 bp, Homo sapiens
gcgcgcagggcctgcagcgggagctggacggcgagcgcgagcggcgcgagaaagtggacgacatccttggagaaggcagcga

SEQ ID NO: 305585 - DNA, 100 bp, Homo sapiens
atacacagggttcccacttggggagctgcatcgagaaagcccggccctactatgaggctcggcggctggctaaggagctgaactaccagcagaaagtagg

SEQ ID NO: 305586 - DNA, 82 bp, Homo sapiens
gcaccttggagtccaagcttgtgctctttgacttctgcctggtgtcgaaggtggtgggcagatgccgggcctccatgcctag

SEQ ID NO: 305587 - DNA, 100 bp, Homo sapiens
gtgaatttgcctcggggacgcctctccagagtgtgaacatggctacgcctcttcattcccgtccatgccgagcccccgactgcagcattcaaagccccca

SEQ ID NO: 305588 - DNA, 83 bp, Homo sapiens
aaataccacaggatggagactacgagtttattacgatgaggacctggtgcaggaagcttcatctgaagatgtcctgggcgttc

SEQ ID NO: 305589 - DNA, 98 bp, Homo sapiens
atttacccctatctagaggatataccagaccctggagtgaactggattccatgtagagacccctggagagttctaaagttcctgttgcttcagacaat

SEQ ID NO: 305590 - DNA, 82 bp, Homo sapiens
ttctgcgtttgaaaggaaacccggctatgtcttgcccagccacgtgactgaggagatgctatgggagtgcaagcagcttggg

SEQ ID NO: 305591 - DNA, 86 bp, Homo sapiens
tcctgatggtgtggttcaacacacccaccagagacggaagagtttatgtggccgaggcagacaagtggaattaggccttgctgcag

SEQ ID NO: 305592 - DNA, 83 bp, Homo sapiens
ataagggcgacagcaacagctctgccggctggaagttcaacctggtgtgtgctgactcctggaagctggacctctttcagtcc

SEQ ID NO: 305593 - DNA, 100 bp, Homo sapiens
accatggcgtttggcaagagtcaccgggatccctacgcgacctccgtgggccacctcatagacaaggacgagggtgaccaccccaacaacagcttcagcc

SEQ ID NO: 305594 - DNA, 97 bp, Homo sapiens
acctgtaaacttcatggttcggctttttgtggtgattgtgatgtttgcctggtctatagttgggatgcttgaagatggaaagaaatttgattcctcc

SEQ ID NO: 305595 - DNA, 100 bp, Homo sapiens
gaaagcggcttatcgaacagagccgggagttcaagaagaacactccagaggaggcacgcggacctccagtggccggctccggaggcttggtgactccagt

SEQ ID NO: 305596 - DNA, 89 bp, Homo sapiens
gatcccagcataggagaagctcctgctccagacatgaagatcgaaagccttcagagagacttcagatggattttaaaattgaacacact

SEQ ID NO: 305597 - DNA, 83 bp, Homo sapiens
gaaaggctttgaagcaaaagtttgatgagattttttcagcaacaagtattccctgggcctccgatttgcagttccacgtcttg

SEQ ID NO: 305598 - DNA, 83 bp, Homo sapiens
aggcttactcggagcgtagaatcatgggggccccaaagtcaccagatgctctggagtcggctcagtcggaggaggaagtggac

SEQ ID NO: 305599 - DNA, 83 bp, Homo sapiens
cgacaaagtcatgggacccggggtttcctacttggttcggacaatgcagatcttcgtgaagactctgactggtaagaccatca

SEQ ID NO: 305600 - DNA, 75 bp, Homo sapiens
aacggagacgacgaggcagctgagttgatgcagcagatcaggagtgatacttcacagatcctggaggaaaacatc

SEQ ID NO: 305601 - DNA, 100 bp, Homo sapiens
aggccctgatggaggggacggaggcaacggtggacacgtcattctgagaggcggcttggatgtgaagtctcaggaagcagctcttcgggcagcgcctgac

SEQ ID NO: 305602 - DNA, 99 bp, Homo sapiens
cgagggtctgaagttcacgactactagaaggggaggggagtggaaaggctctcagtgaaaaaggaagcacaagcctatgcagacgacaacagtttgctg

SEQ ID NO: 305603 - DNA, 50 bp, Homo sapiens
ttcagcattgattttactaaagtattctctactgccgctgatggtcaaac

SEQ ID NO: 305604 - DNA, 88 bp, Homo sapiens
agttggtcgggggcagcggcagatgtggccccatggtattggatgctttaatcaagattaagaatgaagttgactctactttgacctt

SEQ ID NO: 305605 - DNA, 51 bp, Homo sapiens
aacatcctgttagatgattatggagagaagtggatgggccctatacctcca

SEQ ID NO: 305606 - DNA, 82 bp, Homo sapiens
ggcgactgtgtggagaaggaatatcccaaccggacctaatctgggagcctgcaagtgacaacagcctttgcggtccttagac

SEQ ID NO: 305607 - DNA, 100 bp, Homo sapiens
gagggagagcaggagccactgagatgaggaggcgtcgcgcgcgcctgtagctcgcgggcctcgcaggaacaggagtacagctgtgtagtaaagatgcctt

SEQ ID NO: 305608 - DNA, 100 bp, Homo sapiens
gcccgcttccccatcatcgccagctgcacactcttggggctctacctctttttcaaaaaactggcgatggaatatgagaggagccctctggaaagaaaag

SEQ ID NO: 305609 - DNA, 82 bp, Homo sapiens
gtcatcaagaagaatgacgatggtgaccctggcagcaaccccaacaaacgccagaggcagccccctctcctgggagatcacc

SEQ ID NO: 305610 - DNA, 98 bp, Homo sapiens
ctgccatctttcagccctctgaaaccgtgtccagcacagcaaaagatacagatattgtggatgaagccatctattacttcaaggccaatgtcttcttc

SEQ ID NO: 305611 - DNA, 97 bp, Homo sapiens
aagggccagcctgtttcctcccggtcacctccaaatcttgctgcttttaattcaactcagaggatcgcggaggccatgcatcaccaggactgcctgc

SEQ ID NO: 305612 - DNA, 82 bp, Homo sapiens
gagaattgagaccttacaatgaaccaacaaatgctcaatttctggagtctgttaagagaggcacggcagcaatttgataggt

SEQ ID NO: 305613 - DNA, 98 bp, Homo sapiens
aaaactgcacagtggaaggcactttccatgaatactgagaatgccaaagtaaccagatctaacatgagtttaattggttggggtcagataagaagagg

SEQ ID NO: 305614 - DNA, 100 bp, Homo sapiens
aaggcacaaaagtctctgcacatgttggagtccgtgcggctggagtaccgtgcggggctgaagaacatcgcaaatacactcatggccaaggcgctgcagg

SEQ ID NO: 305615 - DNA, 98 bp, Homo sapiens
tcgtcatagccaagatggatgccacagccaatgatgtgccttctccatatgaagtcagaggaattggcagagggggtcgatttgggaggaaaggtgtg

SEQ ID NO: 305616 - DNA, 100 bp, Homo sapiens
ctgctcaaagccatctggcacgccttcaccgcactcgaccaggaccacagcggcaaggtctccaagtcccagctcaaggatcgacgagaacgtgctagga

SEQ ID NO: 305617 - DNA, 82 bp, Homo sapiens
acagacctgctgtgtgtgcttctgcgccccagtgacaaccatgagtggaaaaaactaattatggttcagcactggcctgaga

SEQ ID NO: 305618 - DNA, 75 bp, Homo sapiens
cgctgtcctgggcggcagcgactccgagaagtgctcctactctcagggagaagagcctgctgagtgcagtgaggc

SEQ ID NO: 305619 - DNA, 101 bp, Homo sapiens
aggcgtgcttgtgggacacccgtttgacacggtcaaggtcctgatccggttccccatgcagaggaacttggtggtgatccccaagtctgtgacaccagaac

SEQ ID NO: 305620 - DNA, 100 bp, Homo sapiens
ctgcaattgagaaacaggcacacaagtgtgaggagttgctaaatgctcaggaaggatctgagtctctccctgcggagacagccctgaagaactcctgtaa

SEQ ID NO: 305621 - DNA, 76 bp, Homo sapiens
cagagatgcactgagatacaaacctaaggccttacgaccggatatgggctataatacattagccaactttcgaata

SEQ ID NO: 305622 - DNA, 100 bp, Homo sapiens
gggatgatacaccttttccacagggaattgagttggtcctttcccataacctgtgcacggtgctgaaggttcctcatgacccagttgcccttgaagagca

SEQ ID NO: 305623 - DNA, 75 bp, Homo sapiens
atgtgccctctatgaggagttttggattaaggctgggccagtaataaaggtgaaaattccaaaagataaggatgg

SEQ ID NO: 305624 - DNA, 100 bp, Homo sapiens
ttcaaaaggtggcctttccactggagttgcttcacttagctctacaatcaacccatgtgagatgtgctccggcatctattcgcctcatggacaacaagca

SEQ ID NO: 305625 - DNA, 100 bp, Homo sapiens
cacgaaggctgcaagagaggcgctgttgagttctgcagttgatcatgggcctgaagctgcccagcaggcattccaaggcctgggtcctggtttctccggt

SEQ ID NO: 305626 - DNA, 90 bp, Homo sapiens
cgcgatgttcgccccccggctgctggatttccagaagacgaaatacgcgagatccagtttgctgaccagaagcaagaattcaacaaacgt

SEQ ID NO: 305627 - DNA, 97 bp, Homo sapiens
aaccctcaaaggccaagctgtgcgcaaacagctttgtgctacaaggtgagctgcctggaaatccctgggccctctggccccaagggctaccgtggac

SEQ ID NO: 305628 - DNA, 73 bp, Homo sapiens
ggaagcagccctcaaggccagcggagtcttcagcacccccacaagcatgcagacgtgccaccttgcttagcgc

SEQ ID NO: 305629 - DNA, 75 bp, Homo sapiens
caaacccaatgctcagaaacctctccctcaagattgcgcagtctctttgtggagaggacttgatcattaaaggaa

SEQ ID NO: 305630 - DNA, 100 bp, Homo sapiens
cggagacaggcagcagatctacgagaaaggaacggtcactgcgcaggatcaagctacaatgaagaggagggaggcagtctgcgcgcaccgccattttcta

SEQ ID NO: 305631 - DNA, 82 bp, Homo sapiens
tgttgggaaaggaattacctttgacagggattaggcaaagaggagtcccaaaatgagaaacagaccaaaaagagtctcttac

SEQ ID NO: 305632 - DNA, 98 bp, Homo sapiens
aacagctttacttagaacgagttttgaagggtgatgtggaaaaactttctcataccataaagtctccaaaggatggcacagtaaagaaagtgttctac

SEQ ID NO: 305633 - DNA, 90 bp, Homo sapiens
aaaaggaagaattgacccttgaaggaatcaaacagttttatattaatgttgagagagagtttaagtgctgtggggctgctaactacacag

SEQ ID NO: 305634 - DNA, 90 bp, Homo sapiens
gtcaagtatacaccacaccaccgcacaggggacaaatgcttccatgtaggaagcggctgtaccgatcctgagaccttcgtgcaggcaatc

SEQ ID NO: 305635 - DNA, 75 bp, Homo sapiens
ggagcggtgtcctcttaagaaaatgggcctcctcccaaggagaacatgagaccacttcatatctggaactctaga

SEQ ID NO: 305636 - DNA, 95 bp, Homo sapiens
gaaacagttgaaaagttccggcagagaattctggctccctgtaagatgccttcaattaagttgcagagttctgatggagagatatttgaagttga

SEQ ID NO: 305637 - DNA, 100 bp, Homo sapiens
gtgtcctgagatcaaatggcacttcattggccacctacagaaacaaaatgtcaacaaattgatggaatttcacggtccctcatggtgtctcactccagca

SEQ ID NO: 305638 - DNA, 101 bp, Homo sapiens
caagcagctgggccatgaggaagagggaagtgatgagctttcctttgatccggacgacgtaatcactgacattgagatggtggacgagggctggtggcggg

SEQ ID NO: 305639 - DNA, 100 bp, Homo sapiens
ctcggttaaagcacattgtagaattgcaaataatcctggaaaagtacttggcagttcttacccgttccaggtatgatgaatatcatcctgaggaggatct

SEQ ID NO: 305640 - DNA, 75 bp, Homo sapiens
gagccttccaagaagaggcagcttcatgtgtttgatgatctcagaggctcagtatccttgtcctgggttggagat

SEQ ID NO: 305641 - DNA, 75 bp, Homo sapiens
tggctgtgtgtgctgcaaaccgagacaagttcaccccgaagtctgccggtatgaaaatgaaagtcttcagaatgg

SEQ ID NO: 305642 - DNA, 143 bp, Homo sapiens
atacctgccacgccaataactcagtcactggctgcaacaggaccacagtcaagacgatcatagtcactgaccaccaaatcccattgaatttctagcatcttatcttttaaaaaacaaggcacagtttgaagatcgaaactgac

SEQ ID NO: 305643 - DNA, 90 bp, Homo sapiens
aaaaccatcagtgtttgggaatgattctgatgatgatgatgagttggttgacaggactaggattgtgattgtcccttctctaaatccaga

SEQ ID NO: 305644 - DNA, 97 bp, Homo sapiens
acaaaggtgccttctgtagacactcctgctctcttccatccccatcttacagatgtattaagaagcctcaggagggcatcctggctgtttcacccgt

SEQ ID NO: 305645 - DNA, 75 bp, Homo sapiens
tggccaacctcttgtatgagaaacgaacattgatgatggcacctcagatcgcccctacagccatgctctggtggc

SEQ ID NO: 305646 - DNA, 75 bp, Homo sapiens
tatccacaccttttctgcctgcctaggagtctatactttgctcacaactcatctcaatgccatccttgtggagag

SEQ ID NO: 305647 - DNA, 101 bp, Homo sapiens
gaactacttccaggtgaatccaacaagatcccccgtctgaggactgacctttttccgcagcacacttctgcttttgttccttcatcaggacgaatttactc

SEQ ID NO: 305648 - DNA, 75 bp, Homo sapiens
cgccatgggctactcagtttacagccactgcagtatcacagccagatatcaatgatgtcaaacggctgaaacctg

SEQ ID NO: 305649 - DNA, 102 bp, Homo sapiens
agatggaagaaccattgttagtgaacgtggacaaagctgttgtctcagggagcacagaagagtctactcttcatcttgtgttgagacttcgtggtggtgcta

SEQ ID NO: 305650 - DNA, 80 bp, Homo sapiens
gatcctcggggccccagaggccgcggacaccgacctggagacactacaacaacaggagtgcaaacttctctacagccgaa

SEQ ID NO: 305651 - DNA, 90 bp, Homo sapiens
tcgcagcgaggccaagcctctggccgtatgcctcggccgcgtggccgacgtctacagacaggggttgatttgactaaagacaacatggca

SEQ ID NO: 305652 - DNA, 100 bp, Homo sapiens
ttacctgcacgacacatggaaattggactaaattaccagaatgcagggactgcttttggcttctggatgccctcctccagtacacatcgtatggggtgac

SEQ ID NO: 305653 - DNA, 135 bp, Homo sapiens
ttgccccagcctcgggaggtggtggagtgacctggccccagtgctgcgtccttatcagccgagccggtgctggagaatctggtaaaagcaccattgtgaagcagatgaggatcctgcatgttaatgggtttaatg

SEQ ID NO: 305654 - DNA, 82 bp, Homo sapiens
ccatccatcaaaaatactttacaaataataccacttctggttttgctgttactgctcagtgtagtcacaccttgaataagaa

SEQ ID NO: 305655 - DNA, 74 bp, Homo sapiens
cggtccccaacgcatcatgccagggagccaagcgtcctgcccggccggggggccctcagcctcttggccttgaa

SEQ ID NO: 305656 - DNA, 100 bp, Homo sapiens
ccgggcagcgtgttacaacgtgggactgtgaccagggcaagcactctgacagtgtgtggtacatggacggctatcacaacaaccgcttcgtacgtgagta

SEQ ID NO: 305657 - DNA, 76 bp, Homo sapiens
agggcaggatgaaaaccaagaaggagattttgaagatgcagatacccaggaatcttcctgatgcagcagagcccga

SEQ ID NO: 305658 - DNA, 96 bp, Homo sapiens
cacatggctgccctcctcctgcttccctggctcatgttgctcacaggtgcgggccagtgctattgcccaggacgcggaccagaactacgactacgc

SEQ ID NO: 305659 - DNA, 100 bp, Homo sapiens
tgggggaagctggtaggcacgggcggctccgcagtgaccggactcgggggaggttggagcaaaacgtcccactcactggaggcacctgaggacgacgggg

SEQ ID NO: 305660 - DNA, 100 bp, Homo sapiens
gtctttcgtggtcagtaaattccgggaaattcaacaggagctttccagttaccggtattgtaagaacaagccgtacccaaagtctcgcttctgccgaggt

SEQ ID NO: 305661 - DNA, 101 bp, Homo sapiens
tccggcgcgctgccccgccggaccgtgatagatggctccccaataccagaagtgagttcggcaaagagaaggccacggagaatgaccccattttggagagg

SEQ ID NO: 305662 - DNA, 100 bp, Homo sapiens
ggcttgaagaaaaacatgaagctttacttaaggaaaaagaggttcaaaccttgtactactcagctgatcacaagctgcttgatgggaacctactagatgg

SEQ ID NO: 305663 - DNA, 98 bp, Homo sapiens
gaagctgatgctgctggacgccactttccggggtgcacagcaagtggttttagatggagcaggattagatattgatttccatcttgcctctccagaag

SEQ ID NO: 305664 - DNA, 100 bp, Homo sapiens
gccatcctgggcctgctgagctctgattcaagtgcctgcctctgccccttggtgggctgaagcttcatggaggcatacacatccctgtgatcatgagtct

SEQ ID NO: 305665 - DNA, 100 bp, Homo sapiens
gttttccctcagcagtcggatgggggaggactgctttatggacttgcatcaggagtagcaaaagagaagctgaatttggacgacagccagtgggaggaca

SEQ ID NO: 305666 - DNA, 100 bp, Homo sapiens
aaggctgcctataatcaagtaaaaacaatagctcaaggaaacctttccaacacagatgtccaagctgccaagactccttctaatggagctgaagggctga

SEQ ID NO: 305667 - DNA, 74 bp, Homo sapiens
aagtgtaaggatcttcatgatgaaatttctgtaaatggacttatcaaactggtttcaaagcacagagctcaagt

SEQ ID NO: 305668 - DNA, 100 bp, Homo sapiens
gaatgcttactgttgcgtggttcgttattaacagaagctatggagatattttgcatagaatgaaggatctctgcagatacatgaacaactttgatagtga

SEQ ID NO: 305669 - DNA, 95 bp, Homo sapiens
tctctacagaagagcttctcctcatcaactggggatgattacagttcttcctaaaaaaggcattgaatgccccagaggagcccgaaacctcccag

SEQ ID NO: 305670 - DNA, 50 bp, Homo sapiens
acaatgaccagtcacaatggttacagatcatcacgaagtatgtatatgag

SEQ ID NO: 305671 - DNA, 75 bp, Homo sapiens
aaactaggtcgatggtcggcggcgcccggatgggcagctgagcatggagatatggaccaaaaggaacgagacgtg

SEQ ID NO: 305672 - DNA, 99 bp, Homo sapiens
cggaagtgtaacgttgaggcccttcttgtgtatctggagaaaatagagaaaaagcttgtggtgaaggggggcaaaaaaaagaagcaagttctgaagttc

SEQ ID NO: 305673 - DNA, 98 bp, Homo sapiens
gcctttgtgatctcctggaaaggatctggagtcatggactacaagtgaaacagggcaagtgtccagagaatggctgggatgaaagtacacttgaactc

SEQ ID NO: 305674 - DNA, 71 bp, Homo sapiens
tttgagtccgcatcgccacagctgaaggctgcgagggactaagagcagagacacagccagtgtgaagtcct

SEQ ID NO: 305675 - DNA, 90 bp, Homo sapiens
ttggatgattggtagctaagactcccgaatacttcagaagtggggaaatggttgatgataattagaagcatgctttccactgaacttccc

SEQ ID NO: 305676 - DNA, 115 bp, Homo sapiens
cttccccacctgcccggtgcccgaggaggcagccaagctcgtggcctgcctctgcgtgcggggatatgagactttctactcggaatatcctgagtgttgcgtggatgtaaaaccc

SEQ ID NO: 305677 - DNA, 100 bp, Homo sapiens
ttgttttcagaattttccccagagaatacctccttcaacagatccacctgtattcacttgccgacctgcagcaggtgtgtgcggattttaggcaaacaag

SEQ ID NO: 305678 - DNA, 100 bp, Homo sapiens
taaaaggtgtcaagaagctcagaatggaccaggtggacacgctgaccttccagagccagtctctgcgggacagagcccgccgcttcgaagaggccttgag

SEQ ID NO: 305679 - DNA, 107 bp, Homo sapiens
ctctgtttctctgctgcaccgacctcgacgtcttgcctgtgtcccacttgttcgcggcctataggtcctcgaggccacacgggttaatcgaagaaagagcgcactgg

SEQ ID NO: 305680 - DNA, 101 bp, Homo sapiens
tacaggtttcgagatttgctgctaggggaccaaggatggcaaaacgacgacaggttattgacccagtggctccacgatatgttgcattactgaagaaagaa

SEQ ID NO: 305681 - DNA, 110 bp, Homo sapiens
gtcttggctggatccctgttgggccccacgagtaggtcggcagcgttgctgggtggcagctctggacttattggacaaaatgttgacattcaacccacacaagaggattg

SEQ ID NO: 305682 - DNA, 100 bp, Homo sapiens
gagcaacctgctctattaccagaccaactacctggtggtggctgccatgatgatttccattgtgggatgatgcggagaaagcacaaaaacaaggacaatt

SEQ ID NO: 305683 - DNA, 75 bp, Homo sapiens
ttcacgaaggcaccgacgtcatcatgctgaccaccaatcagatccgtaaggacggaaccactgcactccaggttc

SEQ ID NO: 305684 - DNA, 80 bp, Homo sapiens
ctcgagcccagaagatcaagactagtgtgagcaacaaaattgaaaatggaagccctgactgacagggaacatggaatgat

SEQ ID NO: 305685 - DNA, 100 bp, Homo sapiens
ggaccgccatctccgccctggaatacggcgtacccgtcaccctcattgggtgtccgcaatgttgccagtgtctgtctgcagattggctacccaactgttg

SEQ ID NO: 305686 - DNA, 98 bp, Homo sapiens
ggagaactgtgcccattacttctgcctggactgcattgtcgaatggtccaaggaaggttgtgcaggaccagcgttccctgtgcaggcgccactgcgtt

SEQ ID NO: 305687 - DNA, 90 bp, Homo sapiens
tggttagagaagaattttccaaatgaatttgcaaaacttactgtaggctcctcgacctccaaaacaacccaatgttcaggatttccagtt

SEQ ID NO: 305688 - DNA, 75 bp, Homo sapiens
gcagtggccgacatcaagttttcctctgcaggcccagcagtgagaaactttcacaatctgtaatagatggtgtga

SEQ ID NO: 305689 - DNA, 100 bp, Homo sapiens
gaaagggactgacctggacttagtggagcaactcaacatttatgaggtttctacagaagaaggcttgagtcttgcccaagaatataattgtggttttttt

SEQ ID NO: 305690 - DNA, 74 bp, Homo sapiens
cggaacaggacgccctctgatatggagaaggatgaaactgtgagtgactgctccccacacatagccaacatcgg

SEQ ID NO: 305691 - DNA, 99 bp, Homo sapiens
acaagaaaaccacctaaatatgaaagattcatcaggccaatgaatgtccgtctgtctgcccaggctggagtggcacgatctcagctcactgcagcctcc

SEQ ID NO: 305692 - DNA, 100 bp, Homo sapiens
cagcaatatagaggaattcgcagagggatccaagatcaacgcgagcaagaatcagcaggatgacgggtggaatccatagagctccccatggacaacaaga

SEQ ID NO: 305693 - DNA, 50 bp, Homo sapiens
aatgggagttcactagctgggatttggaatctgagcatgatgagaggact

SEQ ID NO: 305694 - DNA, 75 bp, Homo sapiens
ttgcttagccgaaagaggcatcgttttctctttaggtaaagcagctgagcagccattttcagatttaccccttct

SEQ ID NO: 305695 - DNA, 75 bp, Homo sapiens
cgcagatcctgagacccggacagtggcagtgaaacaggtggagatgacccctgagaagttcagtgtcttaatgga

SEQ ID NO: 305696 - DNA, 76 bp, Homo sapiens
cggtttctcggcgaatgacagcacagtgcctggatcaaagtggaacagctgaagccatatcatgctcataaagagg

SEQ ID NO: 305697 - DNA, 74 bp, Homo sapiens
cggaaagctgcccagccaccagcaaccccccagagtaaccagagagcacagagaaatgctggtgaaactggcca

SEQ ID NO: 305698 - DNA, 100 bp, Homo sapiens
ccggcaccaatcgaccagatatcctggaccccgcgctgcttaggccggggcgtttcgacaggcagatctttattgatgccacagggcccagtgggctccg

SEQ ID NO: 305699 - DNA, 106 bp, Homo sapiens
tgggctgtgacgcgcgcgccggagcggggtccgatggttctcgaaggcccgcggcgccccgtgctgcagtccagttacaacacagggatcacaacaaacacaaccg

SEQ ID NO: 305700 - DNA, 82 bp, Homo sapiens
gtatattttggaagtgtgccagaattggcacttggaggtgtcccaggaagtcagccattactccccagtggaatggatccaa

SEQ ID NO: 305701 - DNA, 97 bp, Homo sapiens
gatattaagcctgaaaaacggcctcgtagagtcaacaggaagaggagcaggacttggatggtgagaaggggccatcatcggaagggcctgaggagga

SEQ ID NO: 305702 - DNA, 96 bp, Homo sapiens
ccaccttaaaaattcatcagattcggtttatattcgaagcacagacgttgaccggactttgatgagtgctatgacaaacctggcagccctgtttcc

SEQ ID NO: 305703 - DNA, 83 bp, Homo sapiens
cgccgcccgactgccatcgcccggcccggccgcgcccgcggaaccagaccagggggaaatttgcagtggtgagaaaatgtata

SEQ ID NO: 305704 - DNA, 100 bp, Homo sapiens
tttgcaagaatgaatgggaggactgttggaattgttggcaaccaacctaaggtggcctcagctgtcacgggaagtctttttaggataaacgtaggcctgc

SEQ ID NO: 305705 - DNA, 50 bp, Homo sapiens
ccaagttcgagctctgcccaaaccccgagcctggagatgagggggagccg

SEQ ID NO: 305706 - DNA, 119 bp, Homo sapiens
aagtgaaagacacaatgaatggtcatatttctaatcatcccagtagttttggaatgtacccatctcagatgaagctccagacccagttcctggacctgccctggaaaagaagtatcccg

SEQ ID NO: 305707 - DNA, 88 bp, Homo sapiens
ctctgaagcaacaggatctgaggttgttcctccaaaagagtggaagccacgagcatcctatgatgacattgatgatttggtcattcct

SEQ ID NO: 305708 - DNA, 100 bp, Homo sapiens
tatgcatggtgtggggttggtgtgattagcttcgcagtctggaaagctttaggagttcacagtggcgacatggagtccaatgggaaatacatcaccaaat

SEQ ID NO: 305709 - DNA, 100 bp, Homo sapiens
tggactgctgcccccatgacatcctggctgggacggcttggtggcatgcatgtttagtcccagctacacagcagggaggctgaggctgaaggaatacttg

SEQ ID NO: 305710 - DNA, 98 bp, Homo sapiens
ctgttgcctgggggcacacaggtgctggatggtacctcggggttctctcctgcccccaagctgggagatctataaggacaggcagaaattctcagaac

SEQ ID NO: 305711 - DNA, 101 bp, Homo sapiens
aaatgtgctgcgtttgaattttcgtggttgtcttctccgacccaaaactttcagatctgtcaatataagcttaccaaagtcagcaacaatatgctacacag

SEQ ID NO: 305712 - DNA, 88 bp, Homo sapiens
agcaattctcctgcctcaacctcgcaagtagctgggattacaggcatgcaccaccatgcccagaggatgttaagcaagtttttggaca

SEQ ID NO: 305713 - DNA, 96 bp, Homo sapiens
ctttgtttttcctgggaactgcaggttgcactgctgtgatccatcctcatctcctaaagatgcatcctgacttatctccacacttgcacactgaag

SEQ ID NO: 305714 - DNA, 74 bp, Homo sapiens
cgcgcggcttcctccagacctctcggcgcggataagcatggattcctggttcattcttgttctgctcggcagtg

SEQ ID NO: 305715 - DNA, 100 bp, Homo sapiens
gtttttttgaagaagcaggatgctgatctaaacgtggaaaaactccagggttccttgaaaagaaaacaggtagttaacctatctcctgccaacagcaagc

SEQ ID NO: 305716 - DNA, 75 bp, Homo sapiens
ccaggcctgctcggccctcacaggggcgtctctggccgagcctctttttgtggaaaacgacagcagcagcagtgg

SEQ ID NO: 305717 - DNA, 74 bp, Homo sapiens
gtagacttctgaaagacagtgctctgggttcaagttgtcctcaggttctccccatgacaccacctgaacgtctc

SEQ ID NO: 305718 - DNA, 100 bp, Homo sapiens
atgctggcaaagtggaaaaatgtgcgagcaaaggcacaacaccacttgctccaccacctaaacctgttcgaagaagattaaaatcagaagatgaattaag

SEQ ID NO: 305719 - DNA, 109 bp, Homo sapiens
ccggcctcattttgctgatttctcttgagctcagtgttttccaagcagtgaagcacttgccgtgttgaactgaatgcactactggagaatgttctgggtccaagatgct

SEQ ID NO: 305720 - DNA, 83 bp, Homo sapiens
aaagaaccgcgcgggaagccccagcccgcagccctcggggacttcccaagtaagaagcggaagaggagccgctggaaccaaga

SEQ ID NO: 305721 - DNA, 96 bp, Homo sapiens
attcaggatgggaaaccacgcaggcaaacgagaattaaatgccgagaaggccagtacggatttagtcgtccgtgttgtttttattcttggcaacct

SEQ ID NO: 305722 - DNA, 75 bp, Homo sapiens
tattcctgggtgatcaatggcgagacagtgcctggggaacatcagacatgacaatggatgaagtccgagaatttg

SEQ ID NO: 305723 - DNA, 76 bp, Homo sapiens
cggccgctggaggcgctcatggaggtgtctgtgtctgatgcctgctctgtgcctgtatctgagatcatcgccgttg

SEQ ID NO: 305724 - DNA, 100 bp, Homo sapiens
acaaaatgtcaacaaattgatgggactcgggggactatcctctgacagctccaggtctatcctggaagaagttccagggcagcttctgtgagtttgtggg

SEQ ID NO: 305725 - DNA, 73 bp, Homo sapiens
catgatcctgctggtgggccagtacagcaccggcaagaccaccttcatcaggcaatgcatgaaccattgcaaa

SEQ ID NO: 305726 - DNA, 80 bp, Homo sapiens
agtgcagctgcctcagttcttagcgcagctgtccagcagaaggagatcacacagagcccatccacgtccaccatcaccct

SEQ ID NO: 305727 - DNA, 74 bp, Homo sapiens
gtctttaatgaaaagggatggaactacattcttgagctcgggttcatgacgctctcgatattcctgtgcagaaa

SEQ ID NO: 305728 - DNA, 87 bp, Homo sapiens
ctcagttggaagcagccgatccagcctgcggagcctgtggggcagaatgaagactattctcagcaatcagactgtcgacattccaga

SEQ ID NO: 305729 - DNA, 51 bp, Homo sapiens
gatgaatacaaagacaacctgcaccaggtgccgacgccaccgccgagccca

SEQ ID NO: 305730 - DNA, 100 bp, Homo sapiens
ccaaagaagaaacaagttatttcttgtaatgtctgtcagcttcgctttaactcagatgttgggggccgtcccgctcctaaggcaggaagatggtggccgc

SEQ ID NO: 305731 - DNA, 50 bp, Homo sapiens
cgacgatctccatatttcattgcaagggcagatgattctggaccagatga

SEQ ID NO: 305732 - DNA, 75 bp, Homo sapiens
gccaagaagaatctagacagacaggcctttctaggcatgtttgctccaacacagaggacagaaggtatctccaca

SEQ ID NO: 305733 - DNA, 100 bp, Homo sapiens
accaaacttctcgaccgagaaacggaagcagaacatcagagagccatgcagagacgtgctatccgtgatgccaaaacacctgacaagatgaaaaagtcaa

SEQ ID NO: 305734 - DNA, 50 bp, Homo sapiens
ggcgccgtcgcgccactcctccgatgtctttggtgcaacactaacaaggc

SEQ ID NO: 305735 - DNA, 98 bp, Homo sapiens
ctgggtgaactttcacggacaacctcagaggacaacgaagtgttcggtttattttcttgaaaaggctccaggcttcggcttggaaaatcccaccgcca

SEQ ID NO: 305736 - DNA, 101 bp, Homo sapiens
cgacggccgggagggctgcctccccgtccagaagcctgtaggaaagcggaagcggcctggcaggggaaggatcgagatcgcccaggaccacaccgcagcgt

SEQ ID NO: 305737 - DNA, 83 bp, Homo sapiens
ccgtcgtggaagcaggactgcgccgcgtcttcctcaaggtttggtgcacctcgatttggaggaagtagggcagggcccttatc

SEQ ID NO: 305738 - DNA, 94 bp, Homo sapiens
cagaaatgcgtggcatctatgccaaagtggaccggctagagaaactatgttccaacttcctgtcaacaatcttggcagtttaagaaaagcccgg

SEQ ID NO: 305739 - DNA, 100 bp, Homo sapiens
cccgggacccactgttctatggtggcccgtaagctggtcatcattgagagcgacctggaacgtgcagaggagcgggctgagctctcagaagggtaagcgg

SEQ ID NO: 305740 - DNA, 98 bp, Homo sapiens
ttgagaccatcccggccaacatggctacaaactctggcacctgcaaaaaacaaggaaagtaaatgattgaagcagggcactgaaggtgggcctttgaa

SEQ ID NO: 305741 - DNA, 74 bp, Homo sapiens
tggcggcgccgctcatccccctctcccagcaggccccttcccagctgcctgcctgccctagccagctcccaggt

SEQ ID NO: 305742 - DNA, 75 bp, Homo sapiens
tggcgactgtggcagagttgaaggctgtgcctggatcaaagtggaacagctgaagccatatcatgctcataaaga

SEQ ID NO: 305743 - DNA, 50 bp, Homo sapiens
ctgcagacggcgagacctcctgcacagaatattaggtgttccagtcaaag

SEQ ID NO: 305744 - DNA, 100 bp, Homo sapiens
tccgagcctcacctttattctctcagcacactgcagtgtgcaagatgacctgccacaagaagtgcgtgcacaagattcagagccactgctcctacaccta

SEQ ID NO: 305745 - DNA, 75 bp, Homo sapiens
ctgcccgccgcgggcccggcaggagcttttaataacccacgaccagggcaactgggcaggttattgccaaaccag

SEQ ID NO: 305746 - DNA, 80 bp, Homo sapiens
cagtctttgctacgtacagcaaaaggagatttttcaagagcttgggatgttcttcttgaccatatacagtcagcagcact

SEQ ID NO: 305747 - DNA, 98 bp, Homo sapiens
tggaagtggtgaaacccaaacaacatctcctgctattccttgggctgcctttcctgcaggattggagaatccatgttgaccaaatgcaccagcacaga

SEQ ID NO: 305748 - DNA, 75 bp, Homo sapiens
tgcagggggactctctgaagctgtgcaggctgcctgtatgctgtgagtaccagagtgcccactggttccaacagt

SEQ ID NO: 305749 - DNA, 90 bp, Homo sapiens
gccagctgctagaaaacagggaagatattagccaatatggaattgccaggttcttcactgaataggaaatgaggcaagttatcctttgga

SEQ ID NO: 305750 - DNA, 100 bp, Homo sapiens
ggcaacctagaaagccagttgatgccacttgctattggagttgtgggtccgggcccaccagctggtcttgccaccttgcgacgtagtgatcaaagccgtt

SEQ ID NO: 305751 - DNA, 73 bp, Homo sapiens
tgaagatctgtctgcagaaacaatggcaaaattggagctggagtgagccttccaggaattttggctgccaaat

SEQ ID NO: 305752 - DNA, 100 bp, Homo sapiens
gccataacaaggaccgaaaggttcggcgcaaggagcccaagagccaggatatctacctgaggctgttggtcaaggtacatcctgaaggtaaatttgttgt

SEQ ID NO: 305753 - DNA, 50 bp, Homo sapiens
ctggtgttcgcccacgaccatggtctcaccaacggctttgggggtgcgag

SEQ ID NO: 305754 - DNA, 75 bp, Homo sapiens
gatggtgtagcgctttaggggaagctacattattgagcagggggtgtgtgatttggttttatgtgaagctgcctt

SEQ ID NO: 305755 - DNA, 87 bp, Homo sapiens
acttttcacttctgctgcactgctttcagcatgcaagtacaatgcccaggagtactacgatcgcattcctgagcttcggcaggtcat

SEQ ID NO: 305756 - DNA, 75 bp, Homo sapiens
acattggaattctttcaatacagaatacttcctagaatcacaaggttcagggcttctggaaatcttgtaatcacc

SEQ ID NO: 305757 - DNA, 88 bp, Homo sapiens
gctgtgataaaaaaaaaattcatctgggcggtatctggaacttggacagtcattttgtttactcattcagccctgttgcaggtcccaa

SEQ ID NO: 305758 - DNA, 75 bp, Homo sapiens
ttcgcagtggtcgcttcttctccttggctgctctttggcgtaaattgcaatcgattagggatcgtttctcagaat

SEQ ID NO: 305759 - DNA, 73 bp, Homo sapiens
gacatcctggaagctgggaaatgtgcagtcattggagaaatcgatgaagaaacagattctgcgcttgatttgg

SEQ ID NO: 305760 - DNA, 50 bp, Homo sapiens
gctgaggagttttcaatcccagctcctacccagagattctacccagtgaa

SEQ ID NO: 305761 - DNA, 101 bp, Homo sapiens
atctggcttactttgtccacactccgggtatcatgatattagctggtttgacatcaagtcatttgtgagtcatcagatcttctcctgaaaatgggagacac

SEQ ID NO: 305762 - DNA, 83 bp, Homo sapiens
attggtctaaagtctttccaaaaggtcaaggttcacaaggaggaaaagaaccaggattgggaggtcacagaacctgaaatcag

SEQ ID NO: 305763 - DNA, 75 bp, Homo sapiens
cagcaattgaaccatcagattagccagcagacccagctacgtggactagagggatgaccctgaaaatgataacag

SEQ ID NO: 305764 - DNA, 100 bp, Homo sapiens
aaagcctgcccagacggctcacctgtgcgggatggaacaaaaggcagatcgggagcggtgccgagaaaaatttccttactagatgacatttcatcgcaat

SEQ ID NO: 305765 - DNA, 98 bp, Homo sapiens
gcctcctgaggagctgggattacagttgctgatgtatattcaagatgagtggattaggagaaaacttggatccactggccagtgattcacgaaaacgc

SEQ ID NO: 305766 - DNA, 123 bp, Homo sapiens
ttacatcatagactttcagctacttgaagatagccatcagccgctacgtgactcttttctccaggtgctggagaatctggtaaaagcaccattgtgaagcagatgaggatcctgcatgttaat

SEQ ID NO: 305767 - DNA, 100 bp, Homo sapiens
ccagctcccggcactgctacctctgacccaaagcagcactatgagatgcttgctaatcgaacagctgcaaatggtcactgcattgatatttatgcttgtg

SEQ ID NO: 305768 - DNA, 80 bp, Homo sapiens
acaagccatcaaaactgccttcagaagcaaaagggaccatggctaaacctcctggatcattagccagaagcagcagcctg

SEQ ID NO: 305769 - DNA, 80 bp, Homo sapiens
aatcagaaggtggatcaagtggccaactgcaagcaaatgcttattgtgaaaatccagatatagtattaattggcaacaag

SEQ ID NO: 305770 - DNA, 95 bp, Homo sapiens
ctcagttggaagcagccgatccagcctgcggagcctgtggggcaggtcgcgtggggcaggcagtggcgctgcgggccaaggccttcggcttcaac

SEQ ID NO: 305771 - DNA, 82 bp, Homo sapiens
caagaggcaaagagaatcggttgtgctgaagctgctgaaagatggcagaagaagtggtggtagtagccaaatttgattatgt

SEQ ID NO: 305772 - DNA, 75 bp, Homo sapiens
gccaacagtgtaccagcagggcgttggctatgtgcccatcacagggcagttgggtgagaagcagcttccatcttc

SEQ ID NO: 305773 - DNA, 100 bp, Homo sapiens
agtctccagaattcgtcagggtcagatcatatgaatcccaaatggttatccgtccccacaagtcatttgatgagtttccgctttgtggccacatggtgtc

SEQ ID NO: 305774 - DNA, 90 bp, Homo sapiens
cctaagtctacccaggaactgaccctgctctctcctttccctgttagacatgatgctgggctcttgcactgtttggtggaaatggtgaga

SEQ ID NO: 305775 - DNA, 82 bp, Homo sapiens
tgatgtgaaaaataccacgacaaaaccaccctatatcgtcgtcctccccgcagtcaggctgcccatcacccaccattccagc

SEQ ID NO: 305776 - DNA, 50 bp, Homo sapiens
aaatgtcatccgatggcacaatcaggaatacaaacagaagcttgcacgag

SEQ ID NO: 305777 - DNA, 100 bp, Homo sapiens
actgcaaggaaaagttgaatgatgtatttgatcctgattctacccaagtacatatgatttcagctgcaatggcaggttttgaaaacattgaattgactcc

SEQ ID NO: 305778 - DNA, 101 bp, Homo sapiens
acaaaacataccaattcttgaatgacatccgagcgaaagagaaagagggaaagccctgagaaactaccagaacggggtccctggggccagtgttgggagcg

SEQ ID NO: 305779 - DNA, 50 bp, Homo sapiens
gaacattctcgaatacctagaatgggcacttgtcttatggcaacggcagc

SEQ ID NO: 305780 - DNA, 75 bp, Homo sapiens
agccgccggcacaagcacccctcgtcacagatagcctgggctggaagctcttctacgtcacaggctgcctgtttg

SEQ ID NO: 305781 - DNA, 97 bp, Homo sapiens
catcgggcgacagcaggtcacagtggacgaggtgttggcggaagtttcagctgtgagttcaacatggaggcaaatcagtgccccctggttgtggaac

SEQ ID NO: 305782 - DNA, 90 bp, Homo sapiens
atggcaacggccaacttcggcaagatccagatcgggatttacgtggagatcaagcgcagcgatgggacaagaatccttcaagaaacagga

SEQ ID NO: 305783 - DNA, 51 bp, Homo sapiens
ggcctggcaacagctggtcctccagaacgacaaatcctccacccctgggct

SEQ ID NO: 305784 - DNA, 100 bp, Homo sapiens
gacttttgcttcatgtgtcctggaaactgggctgggtagagatcaacagcagttcaaggtagttggcaaaaaaggagaaagccactaaggtacaaaagac

SEQ ID NO: 305785 - DNA, 100 bp, Homo sapiens
gtataatgaatttgctgaagtatttctgaaggcatttgctgttggtgtccagcaatgttctggacttggtgcctctttctgttatatgctttcctattta

SEQ ID NO: 305786 - DNA, 100 bp, Homo sapiens
gaaaggcagattgttgccagtcagctagaaagatgtaggcttggagcagaatcaccaagcatcgccagcaccagatgtatccagttaaagcaggcaatag

SEQ ID NO: 305787 - DNA, 90 bp, Homo sapiens
gcaggttttaaatcaagatttaacattccaacacataaaaattatttatccaacagctcctcccagagcctggagaaagttcttgtggaa

SEQ ID NO: 305788 - DNA, 100 bp, Homo sapiens
aaaatggagaaaagcaatacaaactgggtggacattacccaagattttgaagaagcttgtcgaggtgctgaccttaaggaaagagccaaaatgagttcca

SEQ ID NO: 305789 - DNA, 90 bp, Homo sapiens
cccctcctccagcaaattctactgaccctgcagcatctaccgctcactgtagaccatctcaagcagattttccgcagatttccagtggcc

SEQ ID NO: 305790 - DNA, 75 bp, Homo sapiens
catgtctggttggatgaatacaaggaatatgatgaagaatgggctaagaaaattcagagtgaaaagtttcgctgg

SEQ ID NO: 305791 - DNA, 110 bp, Homo sapiens
ggagagagaggaatgtgctcttgtcctggcattgcatccacaggaggggcaggaaattctttgaagaggggtctggttgctgcttacagtggtgacagtgacaatgagga

SEQ ID NO: 305792 - DNA, 75 bp, Homo sapiens
ctttgtagcgtggtgcttctgttgctcacagatccaaggttttgccatcaaggggggacgatttaccaaagccca

SEQ ID NO: 305793 - DNA, 100 bp, Homo sapiens
ctgcaggccatcgaggacctggttaagaatagacccaccagcatttcgtgggatggtcttgattcagggaagctctacaccttggtcctgacagacccgg

SEQ ID NO: 305794 - DNA, 100 bp, Homo sapiens
agctgccgcgacacatccgcacccacacgggcgagaagccctacgagtgcaacatctgcaaggtccgcttcaccaggaagccatcttcgacaagagcaca

SEQ ID NO: 305795 - DNA, 98 bp, Homo sapiens
agaacattcagctggacagaggggtaatagagcaggcaacagctctcaatctgaaattgaagtgtctgtctctgcaaggaatatcagaaggctactaa

SEQ ID NO: 305796 - DNA, 100 bp, Homo sapiens
ggtggcagcggcaggagagtccggccgcgacaggacggcagaggcagaggtgaatgtggtttctaccaaagaagttttgatgaagtagagggtgtttttg

SEQ ID NO: 305797 - DNA, 75 bp, Homo sapiens
aactggttggtgaagaaggatttgtagcttgggatgtggtaatgccagccacactcctcagagccgtggccagat

SEQ ID NO: 305798 - DNA, 122 bp, Homo sapiens
ctcggtggaggtcttggatgtgcaacacaaccagctccttgagctcccacctaaccttctgatgaaggctgacagagctggaagtcgagtgtgctactcaactcaggagatttggagacaaa

SEQ ID NO: 305799 - DNA, 100 bp, Homo sapiens
atttcctctgatcccagccagaactgctcaactggccaactctgcctgcaagaagactgagcaccatcactatgtggggccggacatggtacattctttc

SEQ ID NO: 305800 - DNA, 90 bp, Homo sapiens
gcggcctgcagaggaggaccacctggaggattccctggaagacctgggggcagcagattgcctcggtctggcatggtaccctctcgaagc

SEQ ID NO: 305801 - DNA, 75 bp, Homo sapiens
tctgacatgttagtggtgaccacaaaagcaggccttcttgagagtcttttatgacatcaagagaaatgatcccag

SEQ ID NO: 305802 - DNA, 90 bp, Homo sapiens
cgacaaggcgttcaagcgaaaacatgaccgctgagcccatgagagtatttggagctggttatccaagtctgccaactatgacggtgagtg

SEQ ID NO: 305803 - DNA, 100 bp, Homo sapiens
ggaagcaagcagttcagaagagccaaggaataaacatgcaatgaacccaaaaggaattcagattttggccgtttttggtgatcatcgtgattctaagcgc

SEQ ID NO: 305804 - DNA, 90 bp, Homo sapiens
taaaattggcaagacatatccttacaggcagagagatgtatatgccatgaagccactgtcaccatcaacatgcagaacacttccatcgcc

SEQ ID NO: 305805 - DNA, 75 bp, Homo sapiens
catcctggacaattcacctgcctcctatgtcttccatccagacaatgctgaagaggagttgtacgcatgtcagag

SEQ ID NO: 305806 - DNA, 82 bp, Homo sapiens
gccgtcccggctcacctggcggtgcccgaggagtagtcgctggagtccgcgcctccctggatacagatcacttggattcagt

SEQ ID NO: 305807 - DNA, 100 bp, Homo sapiens
cgccagctctgtccgctgcccacagcctagcagtcgggaccgtactgagatttgaacatggaattcaatccttcagatcatcctcgggccagcacaatat

SEQ ID NO: 305808 - DNA, 75 bp, Homo sapiens
ggacgacagaagcgactttggtgagactctggttggactcttcacagaaattgggcccatgtcttgcttcatctc

SEQ ID NO: 305809 - DNA, 73 bp, Homo sapiens
aaggaacgcgacggcggcgcccgcagcgaccgtggcagccatgtattacagctactacatgctaccggacggc

SEQ ID NO: 305810 - DNA, 74 bp, Homo sapiens
tgaatttaaaggagcagccctggtgtcacctatcagtaaaaggatgtatatggaatgttactcaatttagaaaa

SEQ ID NO: 305811 - DNA, 75 bp, Homo sapiens
aggcctcccgggctccgggaaaactacactggccagcagcctcccgcgacgatgcccctcaacgttagcttcacc

SEQ ID NO: 305812 - DNA, 83 bp, Homo sapiens
gtctcgccgcaagcaaggcaaaccccagcacttaagcaaacgggaattctcgccgtgagtgcatctccatccacgttggccag

SEQ ID NO: 305813 - DNA, 100 bp, Homo sapiens
tttcatggagaagaaggccttgactacggaggggttgccagttctgtgtcctacatagagcagcaactttatctgcggtgggctccaagctagatttccg

SEQ ID NO: 305814 - DNA, 98 bp, Homo sapiens
ctccaacattgtctcactttcagcaaacattctaaggtgggtgcggctgctatttggacgagagttccccctgcaggaccttctggtggtctgggatg

SEQ ID NO: 305815 - DNA, 75 bp, Homo sapiens
tcgtatgcaacctcaggcttcagccagtcagaagagatcaattctacagaaatttccagtggttctgttgaggct

SEQ ID NO: 305816 - DNA, 74 bp, Homo sapiens
gtcagaagtgcttctctaggataatcctggtctccaaaagtttgctaatccagactttacacaacctatctcag

SEQ ID NO: 305817 - DNA, 95 bp, Homo sapiens
atggttccagtatagtctctagaataagaccacagcttgccaaagagaagattgaaggatgccatatttgtacatctgtcacaccaggagagcct

SEQ ID NO: 305818 - DNA, 75 bp, Homo sapiens
ccggaacccaagatggctgcgctgttgctgaggctggctacagcaaacatcattcaagatgtccagcaaagggag

SEQ ID NO: 305819 - DNA, 50 bp, Homo sapiens
cagcttttcacatgcctgagtggatgcaacatctgcgcaagtggatggaa

SEQ ID NO: 305820 - DNA, 74 bp, Homo sapiens
gaacccaggccccgccgaggcggccaggcctggagctgctgaagactgctattgggaaagctggctacactgat

SEQ ID NO: 305821 - DNA, 49 bp, Homo sapiens
cgcgagtcggcgcgcgggacgaaggtgtcgtgaaaactacccctaaaag

SEQ ID NO: 305822 - DNA, 83 bp, Homo sapiens
cttccccacctgcccggtgcccgaggaggcagccaagctcgtggcctgcctctgcgtgcgattctgtttcactgaggccatct

SEQ ID NO: 305823 - DNA, 100 bp, Homo sapiens
agctcttctctgttcgacatggcccaattcgagcggctagaatcttgcctgctccacagtttgatcctgataacttaagtgactctctcttttccggtga

SEQ ID NO: 305824 - DNA, 89 bp, Homo sapiens
aagcctgcccagacggctcacctgtgcgggatggaacaaaagaccatgctcgacagctgaccaaggccatgatgcgaaaggccacggcc

SEQ ID NO: 305825 - DNA, 121 bp, Homo sapiens
gaaaacacctcttatgatggctgcagaaaatggacaaacaaatacagttgtgcaactgcagatagaagacctgactcgtaaactgcgcacaggagacctgggcatcccccctaaccctgag

SEQ ID NO: 305826 - DNA, 100 bp, Homo sapiens
ggaggaagaagcagctggagtggttgttgaggaagaacttttccaccagcaggagtggagtcaacatatcaatggagcaagtcacagtcgtcgatgccag

SEQ ID NO: 305827 - DNA, 83 bp, Homo sapiens
cctggctccggctgcaccagctgcacacgcctgccacggctgctgatgagatggcccactgcgtgaccttggttcagctgtcc

SEQ ID NO: 305828 - DNA, 97 bp, Homo sapiens
gagctcctggtgggagcgccacggcgtggactgcgccatcctcgcgctcagcctcttcgccttgccggcagatgagccccgctagggccgccccgcg

SEQ ID NO: 305829 - DNA, 90 bp, Homo sapiens
gcagggcctgcagcgggagctggacggcgagcgcgagcggcgcgagaaagttgtggcagcactgcctgaaggtatgagaccagattctaa

SEQ ID NO: 305830 - DNA, 100 bp, Homo sapiens
accgggacccggtgtctgctcctgtcgccttcgcctcctaatccctagccactatggtgcagtagacattgttgcaatcatgatcggcaatctgaaaggc

SEQ ID NO: 305831 - DNA, 80 bp, Homo sapiens
gagcaggctctgcgggaggtggagcacctgaagagatgccagcagggagtgcatccgccccaacccttttccccctcgtc

SEQ ID NO: 305832 - DNA, 56 bp, Homo sapiens
tctgtataccactcagatatcccaaaggttttgagcaaaattttggactgtgaagc

SEQ ID NO: 305833 - DNA, 75 bp, Homo sapiens
cgcgaatatcgtcatcgttagaagatccataatgagatggcatcaacatcagataaaggtgcccaaggaagaaat

SEQ ID NO: 305834 - DNA, 74 bp, Homo sapiens
ttttctctctcgtcctcgctgctgtacttcgtctatgtggcgcccggcatagtactatactggcaattgctgga

SEQ ID NO: 305835 - DNA, 90 bp, Homo sapiens
ccctcatctatatcctttggcagctcacagacagcgtttgtttgaaaatttgcgcatgttacctcatgcacctggtgtccagatgcaagc

SEQ ID NO: 305836 - DNA, 101 bp, Homo sapiens
ctctttcctttccgtctggcggcagccatcaggtgagagaacgccgagccgtcgccgcagcctccgccgccgagaagcccttgttcccgctgctgggaagg

SEQ ID NO: 305837 - DNA, 100 bp, Homo sapiens
cctttcggcttctgagacggcggcagcagcggcattcagattctgtgaggagaccaggaggaattttgaagccaccttaggttggctacaagaacatgct

SEQ ID NO: 305838 - DNA, 100 bp, Homo sapiens
gtgttcatgctgtccacgtatcagacagacttcatcctggtgagcacctccgggtctgtccccaggagtacacctgctgttccagtgagacagagcagag

SEQ ID NO: 305839 - DNA, 75 bp, Homo sapiens
ttgcaaatcattcagtgaatcccaactgttatgccaaagagacgagttgtactgctgtcacaggaaatggacgct

SEQ ID NO: 305840 - DNA, 101 bp, Homo sapiens
caaagtggtacagaccaagtatgtggaagccaaggactgtctgaacgtgctgaacaagagcaacgaggatttgctgaccatgaaagaatatcactgtttgc

SEQ ID NO: 305841 - DNA, 96 bp, Homo sapiens
cactttttacctggtctcagatgtttacggactgacatggaacatctctctccagagcatgagactgctgtggatgtttttcgaaggataattttg

SEQ ID NO: 305842 - DNA, 122 bp, Homo sapiens
gcggccgggcagcggggcctgggacgcgccccgaggaggagcggggcggcgcaggcgaggcggccttagcaacatgctgttccagtgctccctacctgacaccacagccacccttggtgatg

SEQ ID NO: 305843 - DNA, 90 bp, Homo sapiens
aactgaggcgccgggaccggctgcagagacaggcgttcgaggagatcatcctgcagtgcgtggtggaagtggaggagggcgaggtgaacg

SEQ ID NO: 305844 - DNA, 50 bp, Homo sapiens
tctgggacagctctactgacggaagcagtcaattatagatttcttcaaac

SEQ ID NO: 305845 - DNA, 100 bp, Homo sapiens
atgagatgattgccaaacccccaggccaggagtggtggctcacacctgtaatcccagctctgggaggccaaggccagtggattgcttgagcccaggagtt

SEQ ID NO: 305846 - DNA, 50 bp, Homo sapiens
taccttctaaagtatggcaaggtcaaggaattattagaccaattacaaca

SEQ ID NO: 305847 - DNA, 74 bp, Homo sapiens
ccgagtcgaacggggagccgagctggagctgccgcggcgcagccagctgactttggtgtgtctgccaagaatct

SEQ ID NO: 305848 - DNA, 97 bp, Homo sapiens
ctctttcccacacaggaagtcagctagagagccgtctcccctctctggagccgagagaggccggtttcccccaccatgtccaacatcacagtcacat

SEQ ID NO: 305849 - DNA, 74 bp, Homo sapiens
cttcggcagtccacccaccgccgccgcctcccagttggcagatgcactacctgaacactcccctgccaaaacct

SEQ ID NO: 305850 - DNA, 100 bp, Homo sapiens
ccgcaacagccccttcgtcccaagtcctaatgccccgagccaagttccactggttcttcttgaagatgtatcgaatgtgtatggtgatgtagaaattgat

SEQ ID NO: 305851 - DNA, 100 bp, Homo sapiens
ccaaagcatctccttcatcagccacttgtcgggcgatgtcgcaagcagcttcattgacttcctgcccctaaaatgggagaagttttgctctgttgcccag

SEQ ID NO: 305852 - DNA, 101 bp, Homo sapiens
aaccaaggatctggggatcttcgcactatcccaagggtttggaaatcccttgtctccaggttgctgggattgacttcttgctcaattgaaacactcattca

SEQ ID NO: 305853 - DNA, 100 bp, Homo sapiens
tgcttggcgggtaactctatcggactctcccatcactctgcatggttgaccgttctggaaggcctgttcctgaacccccagttactggaacccccaggat

SEQ ID NO: 305854 - DNA, 100 bp, Homo sapiens
tcctgtacagcctgtggaactgtaaagtgaatgccgaagacagaagatttggatgatacaccactgactttctttgtttggaatacacgttatgaaccct

SEQ ID NO: 305855 - DNA, 75 bp, Homo sapiens
gtagagaagaatgaacattgtattgagaacaatatagatttgcagaaaatatatcgctatcgtctcctatgagca

SEQ ID NO: 305856 - DNA, 101 bp, Homo sapiens
ggtcactacatttccccctttcatgatattcctctgaaggtgaactctaaagaggttggtgacatcgtgaaagtcacaaggatgaatataaatggccagtg

SEQ ID NO: 305857 - DNA, 82 bp, Homo sapiens
caaaactaacttgccttcagaatttaaaatggtccacagcagtcgaattttgtaaaagatgtaatccctgttcattactact

SEQ ID NO: 305858 - DNA, 104 bp, Homo sapiens
gatgggatctttccggatcaatccagatggcagccagtcagtggtggaggactacaaatccctccaggatatcattgccatcctgggtatggatgaactttctg

SEQ ID NO: 305859 - DNA, 82 bp, Homo sapiens
ggccgtggaaagccgcaccaccgacctgctgactgactgggagaagaccaagcctgtcacgaggaggggataccaactggag

SEQ ID NO: 305860 - DNA, 50 bp, Homo sapiens
caagagaaaaagaacattactgtcttgccacaatggtgcgcatgaatgtc

SEQ ID NO: 305861 - DNA, 100 bp, Homo sapiens
atgggtattcagaacattttgtggaattcgtgaaacttgtccgtgccaaatttcctgaacacaccattatgtttgaccttgtctgtgtcaatgcgtggat

SEQ ID NO: 305862 - DNA, 75 bp, Homo sapiens
tgaaggtgcccctcgtcacagtaatctaagttggcagagcaaatcatggaggaagataaaaaacatggtgcactg

SEQ ID NO: 305863 - DNA, 96 bp, Homo sapiens
tccaggtccgacccgcgaacccctctgggatccccgccgctctgtctacaacccgagacaatgcagatcttcgtgaagactctgactggtaagacc

SEQ ID NO: 305864 - DNA, 90 bp, Homo sapiens
ggcatctgcggccatggcggcgactactgccaaccccgggttaccttcccgccaatgtagaccggagaccagccactctccagagaaaac

SEQ ID NO: 305865 - DNA, 101 bp, Homo sapiens
aagacaaacttgccaaagctacaagagacaggcattggaatggatacttgtgtcattcctttgaggcacggtgggctttccttggttcaaaccacagatta

SEQ ID NO: 305866 - DNA, 98 bp, Homo sapiens
gcgacctttaccataggatgaagtaaccttgcattcggctgcaaggtgtactgtacgtacacaggaaaatgtctaatcaacaggagaagtatgaagct

SEQ ID NO: 305867 - DNA, 98 bp, Homo sapiens
aggagtctctgtccgggggcctggctaaggaaaccctattacctccaggtttcccaggcagctgcagacttgaaacagttctgtctgcagaatgctca

SEQ ID NO: 305868 - DNA, 100 bp, Homo sapiens
cgtctgcttcgggcctctggaatttagcgctcgcccagctagccgcagaacactctgctccagccaaggtggtgagggcagctgttcctaaacagcgcaa

SEQ ID NO: 305869 - DNA, 99 bp, Homo sapiens
atctacaaccttcgatctcctgacgagtatggaacgccgtggactccgggcactgcctgcagacctactccctgcacacagaggcagtgcgggccgccc

SEQ ID NO: 305870 - DNA, 124 bp, Homo sapiens
gccctgctggaacccctggagcaggaggaagcggtgattctccaggccttgggtgtcatggagaaactccagctgggcccagagattctgcagcgggaaaatccaaggcttatttatgccaggc

SEQ ID NO: 305871 - DNA, 75 bp, Homo sapiens
ttttgatgtctgacaacgtggatcgttgttttgaaactccaaggccattggtttgctagatgtggatgtgtatgg

SEQ ID NO: 305872 - DNA, 101 bp, Homo sapiens
ggagcccattcagagcaccagtctagtggtcctgcagttgaaataactggaaatgatgaataccagtcctatcagattttattgctccaacttatatggca

SEQ ID NO: 305873 - DNA, 90 bp, Homo sapiens
ggcggcggaccgtcccgcgcggggcacgatgttgaacatgtggaaggtgcgcgagctggtggacaaagctttgcctgagaatacagatca

SEQ ID NO: 305874 - DNA, 100 bp, Homo sapiens
caatcagcgagactccgtgggcgtaggaccctccgagccaggtccagttatcttttgactgccacatatggaccccaaaagatctcaaaaggaaagtgtc

SEQ ID NO: 305875 - DNA, 98 bp, Homo sapiens
gctgctgctgctgctgacgctgctgctgcccggcctcggggctgcctgctgtttcccggggagatcatgaaacgaggtcgccttcccagcagcagtga

SEQ ID NO: 305876 - DNA, 95 bp, Homo sapiens
cgagatcttgagcgccctctactcagcatggatatccaggtgctgagccaggagcagcagcctttctaaatcatgaccaccccaggaaaagagaa

SEQ ID NO: 305877 - DNA, 100 bp, Homo sapiens
ccgaagtttactggagaaactgcgttgggtgaccgtaggctaccattataactgggacagtaagatgatgaggagtctgatgaggaagctgtgaagaaaa

SEQ ID NO: 305878 - DNA, 144 bp, Homo sapiens
gcttaggcgagggacgttaccgggaagttgcaggcgggaggactcttccccatccagtcacctgacaggaaatctactttcttcaatgtgttaaccaatagtcaggcttcagcagaaaacttcccgttctgcactattgatcct

SEQ ID NO: 305879 - DNA, 99 bp, Homo sapiens
gtgccctacaactacctgcagcgggcctacatcaaggacactgccttaggaaaaccacgagaggtgtttcgacttcctacagatttgacagcatgtgac

SEQ ID NO: 305880 - DNA, 100 bp, Homo sapiens
ggcggcggcggcggcggcggcgtagccgtagaggttggcccagtcccgcggtgaaaggaaggttcaagtctcagctgccagatctcagtggccctcacag

SEQ ID NO: 305881 - DNA, 131 bp, Homo sapiens
tgttgcaagaggtcttctttcaggcaatcctgcttgctgtgtgcttaatcatttctgcatgtgcaagtcacagaagatcttattagacggaatgctgaacacaacgactgtgtcattttttccctggagga

SEQ ID NO: 305882 - DNA, 75 bp, Homo sapiens
accagctaaacctgatgagaaaggagagatgcagattctctcgggcctagccgtccttggaacccgatattcggg

SEQ ID NO: 305883 - DNA, 98 bp, Homo sapiens
acaaatgcttcaagacttgcaagctgctggatttgatgagggatgcgtccttgatggcaatgagaaggcgcattgaaggtttgactccagaggaaatc

SEQ ID NO: 305884 - DNA, 98 bp, Homo sapiens
ggaagacatggccactccagtcggtgttgagcacggcgagcagtctcaggcctttagtgatgatgtaaataacagatgcgggtgaaagatccaactaa

SEQ ID NO: 305885 - DNA, 101 bp, Homo sapiens
gggaggaggggggtcggccgccgcagccatggaggccaactggaccgcgttcctgttccaggtagaatgtaagaaagctcagccgaaagaagtcatgttcc

SEQ ID NO: 305886 - DNA, 95 bp, Homo sapiens
ccgggatttcaggggtctaccggctctcttatggcgaatgcaacccgaagagagagtgagagcattggggagtcagcaatgtccgttgtgttaaa

SEQ ID NO: 305887 - DNA, 75 bp, Homo sapiens
agcctgaggagccattttgagcaatggggaacgctcacggactgtgtggtctctcaggcagctgcagagcttcaa

SEQ ID NO: 305888 - DNA, 75 bp, Homo sapiens
ctctgattcggcttgcaaaaaaggcgagcccacaccttaaccgtgctcttcatcctcacctgtacgcttggctat

SEQ ID NO: 305889 - DNA, 90 bp, Homo sapiens
gtaaagtctctcccttaatgctcagttcttagaagaccgagaaatacaggtatcaggatgaagatacacctcctcaagagcatatttccc

SEQ ID NO: 305890 - DNA, 74 bp, Homo sapiens
ctaggcgaagatccggactctgggtgttttgctaccgtgaccgtttaggctgtggatccctcctctgttgcctt

SEQ ID NO: 305891 - DNA, 83 bp, Homo sapiens
ctccactccgtcccccgcgggtctgctctgtgtgccatggacggacctgcctagagctggaacgttacctccagagcgagccc

SEQ ID NO: 305892 - DNA, 98 bp, Homo sapiens
gtcttcctcttcagccatccagagcagcccgacggccatggaggctgaagagacgatggaatgccttcaggagttccctgaacatcataaaatgatcc

SEQ ID NO: 305893 - DNA, 90 bp, Homo sapiens
gattcatttagagctgcggaacaggacgccctctgatggtgactatgaccagagcaggaccaaagtgctgcacatgagcctgaaccccac

SEQ ID NO: 305894 - DNA, 82 bp, Homo sapiens
gccaacaatgcctttgaccagtatcgagacctaattcagaaggagctggcggacatcactttagaccctccacctaattgca

SEQ ID NO: 305895 - DNA, 50 bp, Homo sapiens
ctgtaacctccaaactatgagtaatctgccctgtatgatgagattcgtca

SEQ ID NO: 305896 - DNA, 100 bp, Homo sapiens
tgacggtggctggagcggcacgggcgacgcaaggcatgtactggcattgaaaacattgacgaagctattacattgcttgaacaaaataattgggacttag

SEQ ID NO: 305897 - DNA, 75 bp, Homo sapiens
ggtccaggccccggggcacatgatcatctcagctgctggccctaagggatgtttcagcagcccctgagaaggaag

SEQ ID NO: 305898 - DNA, 78 bp, Homo sapiens
tcccctggggtggcagaagcgctcgcctgttcacagccaacggagggaatggacaatcagaccgttctggctgtccag

SEQ ID NO: 305899 - DNA, 97 bp, Homo sapiens
ggccacagcatctttgtctagccccagtgcaggttgctccttgagggcaggacagttcttatggctttatccgttgcgtaagcacagagaggtctgc

SEQ ID NO: 305900 - DNA, 100 bp, Homo sapiens
gtcggaggaaacagccagaccgagagcagcctgccggggcggaggcacgtgtggttctcaaatataggcattctgatgggaacttgtgtgttaaagtaac

SEQ ID NO: 305901 - DNA, 82 bp, Homo sapiens
gggaatgaagtagaggtgggacgtccaaggatgatgggcactggagtgttcagcctgggtgttcctgtagatgctctcttct

SEQ ID NO: 305902 - DNA, 51 bp, Homo sapiens
gctggaatgactggcaacccaggaaaattctgtttgaagatttccggtcct

SEQ ID NO: 305903 - DNA, 125 bp, Homo sapiens
ctcaacttcacgctggcgcgagccccgtcctccttcgccgccgcgcacaaccgcacgtgcagccaggcccagacatgtccgtccttgtaagttaaaagcttccatgggagccttccttcctaatc

SEQ ID NO: 305904 - DNA, 83 bp, Homo sapiens
agcagtcgcctagccaaccctgtgttcatcatttgccacttaagctacttgcagtcacgtcacaccttggatctctatcatca

SEQ ID NO: 305905 - DNA, 107 bp, Homo sapiens
cccgagtggaatctttagaatctcaaacaagacaacttgagctgaaagcgaaaaactatgctgaccagagtgctccagctgctgctcctgcccctgcctcagtccca

SEQ ID NO: 305906 - DNA, 93 bp, Homo sapiens
agggagcctgccctcgcatggtggccagggcacgtcactgcaggccagcacatacccccggcctcatgagtacctgtccccagcggatctgcc

SEQ ID NO: 305907 - DNA, 75 bp, Homo sapiens
ctcagtgtgatacagccaattgtaaaagactgcaaagaggcatttagacttttttgaaatgctccgaaatgaaga

SEQ ID NO: 305908 - DNA, 90 bp, Homo sapiens
gctggaacatcccggggctgcgggggtaggcggtgtgaagcgaattatgtaaagagattatcttagaagacctaggactccaaaaatgtt

SEQ ID NO: 305909 - DNA, 82 bp, Homo sapiens
cgagaccgtgaccgagagcgtgaccgagagcgcgaatatcgtcatcgttagaagaaaagcaccaaggattctcttttgttga

SEQ ID NO: 305910 - DNA, 86 bp, Homo sapiens
tgagggtgaggagaagtatgaggtggtgaaactcaagatccccatggacaacaaggaggtcaaaatgcagatcttcgtgaaaaccc

SEQ ID NO: 305911 - DNA, 82 bp, Homo sapiens
tctcattctgcagctcatcttctcaaaaacagttacatggacacagaacagtatgaagaagcagtacgagactatgaaaaag

SEQ ID NO: 305912 - DNA, 51 bp, Homo sapiens
cgaggttcctgtgcaactcttcacagatggtgaccctctttcagatgtggg

SEQ ID NO: 305913 - DNA, 101 bp, Homo sapiens
gcctctaatatctttgggacacctgaagaaaatcaagcttcttgggccaagtcagcagctagacttcgggctccttgaggatattcagttttgtatgtttg

SEQ ID NO: 305914 - DNA, 75 bp, Homo sapiens
tttatgaagatattcctaatatgaaaaacagcaatgttgtgaaaatgctacagagtcttgctctgttgcccaggc

SEQ ID NO: 305915 - DNA, 75 bp, Homo sapiens
aaaaatgacccaccaatggaagcagctggcttcactgctcagctggttggtggagaatttgaactggagatgaac

SEQ ID NO: 305916 - DNA, 98 bp, Homo sapiens
tgctttggcctgaccatcttcgttgggatcagagaattcaaagaagctttttcactatttgacaaagatggtgatggaactataacaacaaaggaatt

SEQ ID NO: 305917 - DNA, 83 bp, Homo sapiens
ggtccagatgaaagagaagtttctggtcactccccaggattatgcgcggttcttcagacccagaagaagaaagtgttctctac

SEQ ID NO: 305918 - DNA, 75 bp, Homo sapiens
cgagcatctgggccgagaccattccgtatggagagccggcacctggctgcagtggaagaaagaaagatcaagtcc

SEQ ID NO: 305919 - DNA, 100 bp, Homo sapiens
cagatccagaagactgtgatcgagcccttaaaaaagatatgcatgtatccccaagggcagccagggactttgaaagagcccagtggaacctacacctaag

SEQ ID NO: 305920 - DNA, 107 bp, Homo sapiens
gtattcaatgattctcaggagcacttggaaagattttactgtaacccagaaaatgatagaatgagaatgaagtatggcagccagactgccttccgggtcactgccat

SEQ ID NO: 305921 - DNA, 125 bp, Homo sapiens
ctgggcaacacccactatttgttggggaacttcacagaggccacgaccttccacaaggaggcttctttgcctacacgtgcggccgcctggtggtggtggaggacctgcactctggcgcccagcag

SEQ ID NO: 305922 - DNA, 101 bp, Homo sapiens
caagccaccaacctctgcctgtcacccctgactcccagctggccttacccattcagcccattccctgcaaaccaggtctctcaggcagctgcagagcttca

SEQ ID NO: 305923 - DNA, 50 bp, Homo sapiens
cgcgcctttgtgcgcgcgccgaggcatgaatgctttacagttgcagaacc

SEQ ID NO: 305924 - DNA, 96 bp, Homo sapiens
gacagtccagcacccagaaaagagcgactggcaaacaagaaatggtggagtcaatgaagaaagtagcagggatggatgtggagctgacagttgaag

SEQ ID NO: 305925 - DNA, 78 bp, Homo sapiens
ttctggaagctgagctccacttcccagcccatgtctccccagcaacagtatcaaagtgctctattttgggcagataaa

SEQ ID NO: 305926 - DNA, 50 bp, Homo sapiens
ctggggcactgtcaccagtccccgagctccagcaggagaggcccttcctc

SEQ ID NO: 305927 - DNA, 50 bp, Homo sapiens
cagccgcaagaaccaggactcggaaggcagaaccacagagaggctacagc

SEQ ID NO: 305928 - DNA, 75 bp, Homo sapiens
cggaggcagagcggctgccatgtgctgaggtagggaccatctttgccctcagctggctcatcacctggtttgggc

SEQ ID NO: 305929 - DNA, 75 bp, Homo sapiens
tgggacagtacttggtccagtactgtaaggacaccggcatcaccaaaccaaacaggaagcttacttttctctacc

SEQ ID NO: 305930 - DNA, 99 bp, Homo sapiens
cgaggatgcaccttcccctgccttggaaaggcagacgatgagcactacatcccccgggccgtgctgctggacttggaaccccgggtgatccactccatc

SEQ ID NO: 305931 - DNA, 100 bp, Homo sapiens
gaatgcgagagaaagagcctccgtcaccacatagtatcacagcctgtacctgaaggtgaaggggaatgtgttcaaaaacaagcggattctcatggaacac

SEQ ID NO: 305932 - DNA, 75 bp, Homo sapiens
aagcgaggctgcccgcgcacggcgctggagtactgcaagctcatcctgaggtttggtgcacctcgatttggagga

SEQ ID NO: 305933 - DNA, 100 bp, Homo sapiens
cgtgacccggagctgtgcgaggagagtaccgaggagggggtcggcgggagaggagatagctgcaagctttcttcctggtggcagatgacatcatggattc

SEQ ID NO: 305934 - DNA, 90 bp, Homo sapiens
gctgctgcagagctcggaggggcgctgtgtgtacatcacccccatggaggccctggcagagcaggactattagaagacacattagtgcag

SEQ ID NO: 305935 - DNA, 96 bp, Homo sapiens
tggtattgtggaaattcccagaggactttggagaccagtctccaaacgtccacaactatcccgatatggaagccgttcccctgttgctaaataatg

SEQ ID NO: 305936 - DNA, 100 bp, Homo sapiens
ctgaagccgctgcccctgctacagacatccacgacagcgatggcagttccagcagcagccaccagagcctcaagagcacagccaaatgggcggcatccct

SEQ ID NO: 305937 - DNA, 50 bp, Homo sapiens
agaagtttccgcaggactacttccccgagcccacagaattcttccagtcc

SEQ ID NO: 305938 - DNA, 83 bp, Homo sapiens
gagtgaccgagaccgcggccgggaccgaggaactgcatgaacttgcccccagacaaggtccagctgctgagccagtatgacaa

SEQ ID NO: 305939 - DNA, 103 bp, Homo sapiens
cgctacaccaacctctcgtacatcggcgagggcgcctacggcatggtgtggtgtatggaatgattcggttctcaggcaccacaggccagatgtctgacctgaa

SEQ ID NO: 305940 - DNA, 128 bp, Homo sapiens
acctcaagaagcagctccacgaaaggcagccgcggatcgccgcgctcagcgacaaacaagacgagattgaggagctgcgggccgagatgctggagatgcgggacgtctatatggaggaggacgtgtat

SEQ ID NO: 305941 - DNA, 82 bp, Homo sapiens
tccaaccaaatcccggggctcatctggattaataaaatggggaccttgacctgaacgggcagttgttggtcgcacaaccgcg

SEQ ID NO: 305942 - DNA, 87 bp, Homo sapiens
agaaaccaacagctgtgttgaagaaataatccgggagcacagggatcagttgtccttgtttttttttggtcttttcttcatttgaag

SEQ ID NO: 305943 - DNA, 95 bp, Homo sapiens
cgctaccggactacatgtcggaggagaagctgcaggagaaaggcccggtatgaaagccagcggatccagctggagtcggagctggctgtgcagct

SEQ ID NO: 305944 - DNA, 100 bp, Homo sapiens
atgattctttgctaacatccgtagattttcaggaatgtaaagaaaacctgccaagtattcaggtaatactgcattgcatgattgtgcagaatctggaagt

SEQ ID NO: 305945 - DNA, 50 bp, Homo sapiens
ctcctgagtacctgggattacagggaccactgacaattagggatgtgact

SEQ ID NO: 305946 - DNA, 75 bp, Homo sapiens
aaacaccacatgttgtctcttagaagtgggagctgaacggctgtattcatcaccaaagaaaaaacttacaccaat

SEQ ID NO: 305947 - DNA, 95 bp, Homo sapiens
ctttagtttcatctctctataaagttatccaggagccacaaagtgaggttcaaaccttgtactactcagctgatcacaagctgcttgatgggaac

SEQ ID NO: 305948 - DNA, 51 bp, Homo sapiens
cctcccgagtggctgggactacaggcagagctgcaaccctcttgtcctctt

SEQ ID NO: 305949 - DNA, 98 bp, Homo sapiens
gcctgggccttctggtcaacctggccgtccggggcccccaggccccccacctgcaggaggagcaaatacgacatcctcatggagaagctttcggtcat

SEQ ID NO: 305950 - DNA, 80 bp, Homo sapiens
tctctcgctgtgagacatgtctgagactcctgctcagtgtagcattaagaaatcatgttgttgatgtcagtgttgcggtc

SEQ ID NO: 305951 - DNA, 74 bp, Homo sapiens
agcctctgggtcctcggtcggtacagtctctgcacctcgcgccccagcaggacgtgttcctcatgatccggcgc

SEQ ID NO: 305952 - DNA, 83 bp, Homo sapiens
ccagcagaaaataaggcagagtctgaagaaatggaggtaatttatggactcgcctaggatctgcacccaagaccaaagaaaag

SEQ ID NO: 305953 - DNA, 100 bp, Homo sapiens
ggccagccgagccggcgtttctggcccgcttcaaggaacgggtcggctacagggagggacccaccgtagagactaagttattaaatagagcatctgttga

SEQ ID NO: 305954 - DNA, 95 bp, Homo sapiens
gccagtttctgtgtcagcatcccgatgtggccaaagtctccttcactggaagtgtgcccactggcatgaagagtaagagggaccatctcctcatg

SEQ ID NO: 305955 - DNA, 100 bp, Homo sapiens
gcgtagcctcctttctccagaaaggaaagttgtggaaagtaaaaatgtagccctaccaaaaggaactattgtactggcttctccaggctggacaacgcac

SEQ ID NO: 305956 - DNA, 75 bp, Homo sapiens
gagcttcttcctatttgccatgggtgaattcatgacacctttgactcttctactgtctcagaccttaggtaacat

SEQ ID NO: 305957 - DNA, 90 bp, Homo sapiens
ggatactgaaactgacattatttgaagcatcagatggtgaaggagaaggagacacagaagtgatgcagcaggagacagttccagttcctg

SEQ ID NO: 305958 - DNA, 98 bp, Homo sapiens
cttacaggagcctccatcttcctggcacctgtgctcaagaggcagcaagtggttctgacggagcggtgggcccaagggcacccggccatccatttttc

SEQ ID NO: 305959 - DNA, 83 bp, Homo sapiens
ggaggagctgtgcagccgcgaggaggcgcgggaggtgttcgagaacgaccccgagacggtgaaatgacaatggatgctctgtt

SEQ ID NO: 305960 - DNA, 74 bp, Homo sapiens
ggtacctctccttttccctctccctttccctaagcaaacggggattcagcgtccgatcctttggaacagggact

SEQ ID NO: 305961 - DNA, 50 bp, Homo sapiens
ggattttgtcagcttgtcgtcaagctcattgctatggacagtgctatcac

SEQ ID NO: 305962 - DNA, 100 bp, Homo sapiens
cttcacacatggagagatgcaagaccagtccatttggggaaatccttcggatggtgaactcattagaagcattgcttctatgacagtgccagtgtacatt

SEQ ID NO: 305963 - DNA, 104 bp, Homo sapiens
catccattgcaaaccttattaatctcagggaactggatgtcagcaagaatggtgtcattccacacatccacaaatctctgattgggaagaaaggacaacagaag

SEQ ID NO: 305964 - DNA, 73 bp, Homo sapiens
cccgcctgcctccgccggctacagcgggaagagcgagcctggaaacctggccggcgtcaggcacatcatcctg

SEQ ID NO: 305965 - DNA, 98 bp, Homo sapiens
cgctgatagagcaattcaacagttcgttatgagttgcagaaacgaattgctgaaatggaaactcaaaaggaaaaaattcatgaagataccaaagaaat

SEQ ID NO: 305966 - DNA, 100 bp, Homo sapiens
aggcaagccccctgtttctactcttgcgccccctgctggtttcctgccctgtctgtgaatcacaagcctttgagaacagcctgagccttcagccctcaca

SEQ ID NO: 305967 - DNA, 83 bp, Homo sapiens
gagaagctggagaatgacaagagcttccgcggtgtcattctgacctcgccaaaacagagtggagtacgagaaaagggtccgag

SEQ ID NO: 305968 - DNA, 78 bp, Homo sapiens
aactttgcacatgtaacatccctgggcaaaatcctgacagatgactttgcagacaaggagggtctggaaatgggtgat

SEQ ID NO: 305969 - DNA, 98 bp, Homo sapiens
atttcttcagcatggctcatattctacttcattcagaagatcaggtacacaaatgcacgcgacaggaaccaggaatgtatcctgtcaggtataatgtc

SEQ ID NO: 305970 - DNA, 99 bp, Homo sapiens
cccaccagaagcctctgccccagcctgtcttctggcccctcctgaaagctgtcacccacaagcacctgcggaactcgagtcatgcaggagcttttgtga

SEQ ID NO: 305971 - DNA, 50 bp, Homo sapiens
cttgttcttggactgggccaaggtggtggaaaaatgctaatcactgaaag

SEQ ID NO: 305972 - DNA, 83 bp, Homo sapiens
caagaagcagcccaaagtcgaatgattcagacttgcaaggttaagaaatatcctctcagttgtcggtactgatgccttgaaaa

SEQ ID NO: 305973 - DNA, 90 bp, Homo sapiens
caaaatggcgccctacagcctactggtgactcggctgcagtgagaacaacatgcccagaaccaacaaaaccgaattccaactggagctgc

SEQ ID NO: 305974 - DNA, 75 bp, Homo sapiens
ccacttcccacatgtctggccccatgcatctcttcatctgtaggtgcacgtctcatcgcacatgctggcagcctc

SEQ ID NO: 305975 - DNA, 75 bp, Homo sapiens
atttatggcttcatgaagtctttcctgacccccgatgctgctgactatagcaggtagagcagagccggagccagg

SEQ ID NO: 305976 - DNA, 74 bp, Homo sapiens
cgcgggaggtgttcgagaacgaccccgagacggtatcatgatattagctggtttgacatcaagtcatttgtgag

SEQ ID NO: 305977 - DNA, 100 bp, Homo sapiens
caccgtcagcagctacagccctccacaggtctatgttaacaatgaatgggcaaccagtgttggggaaggagggagctttggagaacttgctttgatttat

SEQ ID NO: 305978 - DNA, 100 bp, Homo sapiens
tatgaagtattaattcttccactgatatctcaaaaggtgatctggacaaaggaacaggtatctcagggggcagctggcattttatgctatgtgggagcct

SEQ ID NO: 305979 - DNA, 75 bp, Homo sapiens
atgatcaggatacttgggactacacaaaccccaatctcagtggacaagggatgcggaaagaaagcggaaagtaaa

SEQ ID NO: 305980 - DNA, 100 bp, Homo sapiens
cgagcggcgagccggagcgcggagcccggctcccgcaccatggaggaggacgacagctacgcggaatggccaaagactatgacgggtcttcctagcacat

SEQ ID NO: 305981 - DNA, 51 bp, Homo sapiens
ggggattccacggaccaagtctgtaggacacattcagctaacgtattttag

SEQ ID NO: 305982 - DNA, 95 bp, Homo sapiens
tacatgctctgatgacggcactgttagaatctgggactttcttcgttgccatgaggaaagaattctccgaggatttccactggacaaagcggttg

SEQ ID NO: 305983 - DNA, 99 bp, Homo sapiens
gggaaaacttggagttccaggattaccaggatatccaggaagacaaggtccaaagatccaacttagaaataatgtttcattcaagataaggctcgtggc

SEQ ID NO: 305984 - DNA, 75 bp, Homo sapiens
ccacctggacctcctggacttatgcagtggcagaacgtggagcacgttggtgaccagagcccctacgtcacctct

SEQ ID NO: 305985 - DNA, 100 bp, Homo sapiens
atgagaatggccagtggaatgatgttccctgcaattaccatctcacctatacgtgcaagaaaggaacagagtcaagggtccagagaaggaggagaagttg

SEQ ID NO: 305986 - DNA, 100 bp, Homo sapiens
aaatcggctcattgcagcctcgacgtccaggactcgagcgatcctcccgcctcagcctctcgagaagatgaagattatggaagagattcgggccctccca

SEQ ID NO: 305987 - DNA, 98 bp, Homo sapiens
gaggaggcaattgacaggaactacgtcccggggaagaattggcttggaaacgaaattgaggttatggtcagtactgaggaagccaaacgccatctgaa

SEQ ID NO: 305988 - DNA, 100 bp, Homo sapiens
tttaggagctctgctcaaagccagacggtttacccaaggtccagcctagcccctaggcaccatgtcggacagtgatctaggtgaggacgaaggcctcctc

SEQ ID NO: 305989 - DNA, 80 bp, Homo sapiens
gggggccacacgccccccctccttcacgccacacacacgaactgtggctgcaccatctgtcttcatcttcccgccatctg

SEQ ID NO: 305990 - DNA, 74 bp, Homo sapiens
caggacctccacctcagtttaaccggatggaagaaatgattttgaagatgtaactgagtttctggaagaggtca

SEQ ID NO: 305991 - DNA, 74 bp, Homo sapiens
tggagccttcctgtggcaggagagacaacaaagcgctattatcctaagagtctctggccagccgcagagtgtga

SEQ ID NO: 305992 - DNA, 60 bp, Homo sapiens
tcttgctgggagtggacttttccagtaaggaaagtggtggacttgctttgtgaagagaca

SEQ ID NO: 305993 - DNA, 75 bp, Homo sapiens
agcaggactgcgccgcgtcttcctcaaggccagctgcgggccgtccagcggctgtgccacttctacagcgccgtc

SEQ ID NO: 305994 - DNA, 100 bp, Homo sapiens
catgggagattcctgcatcttttgcgctctcaagattgatgtacagctatatattttgtcctttctttcacctcatgatctgtgtcagttgggaagtaca

SEQ ID NO: 305995 - DNA, 98 bp, Homo sapiens
cagaggtggaggggaggattttgaggacacttgtggagagctcgaattccagaatgatgaaattgtgctaagaaatggcatttcaaaaggcagtgaaa

SEQ ID NO: 305996 - DNA, 75 bp, Homo sapiens
gaagattttgaagacaatcgtcacttatacaggtttattcttcagtccaaggaagcaattcacagtcagctgtta

SEQ ID NO: 305997 - DNA, 98 bp, Homo sapiens
gagcgcggagcccggctcccgcaccatggaggaggacgacagctacggtcaccatggctgttattggctcccttgctgtccccagctgttccccaggt

SEQ ID NO: 305998 - DNA, 83 bp, Homo sapiens
cgcagcgctgccatggagcccagcagcaaggtaatattaacggctgctatttgaactattacttttttcttctggctgctatt

SEQ ID NO: 305999 - DNA, 101 bp, Homo sapiens
atgattataactggtccttcaatgattctgaagatggggagaaggaaaatgaaaaatctaaaacttcagattcttcaaatgacgaatctagttcaatagaa

SEQ ID NO: 306000 - DNA, 75 bp, Homo sapiens
ggaaaaggctaatggcacaactgtccacgtaggcattcaccccagcaaggtgatagtagaaaaggctcccaaagc

SEQ ID NO: 306001 - DNA, 100 bp, Homo sapiens
cggcagctactcatggggatggctgacaagaacatccagtattatgagaaggatgttgcttcagagtgtgaagtcaaatgcatgccaacattccagtttt

SEQ ID NO: 306002 - DNA, 75 bp, Homo sapiens
cccgttatgcatgagagtcaccatgctcaaagtgaatatattaagtattcacaggcctccactgggctctcagta

SEQ ID NO: 306003 - DNA, 75 bp, Homo sapiens
acctctcctatcgtctccacccacctggacactcgtaatgtggcctttgagagatggcgagcggctgcagctgca

SEQ ID NO: 306004 - DNA, 83 bp, Homo sapiens
attccttccatctgaagatcaggtatccaaaacaagatgaaaagaggcttgattagtactcctccatcagatatgcttcctac

SEQ ID NO: 306005 - DNA, 100 bp, Homo sapiens
cagaagtccagagctgaggactgcctgtttgcagcgcttctctgaagtagctttggaaagtagagaagaaaatccagtttgcttcttggagaacactgga

SEQ ID NO: 306006 - DNA, 73 bp, Homo sapiens
caaaggccaatgttggtgctggcaaaaagaagaagcctgagaagatgatgcacagatagagaggcaccaggac

SEQ ID NO: 306007 - DNA, 96 bp, Homo sapiens
caggcacaagacacgtcggatgttgcagcagagccagcagctagcgcaggccccttcacagatgtagtcactacaaatcttaaattgcgaaatcca

SEQ ID NO: 306008 - DNA, 50 bp, Homo sapiens
gtcgccctcaaggccatgatcaaaacatggcctgatatgaaggagtcacg

SEQ ID NO: 306009 - DNA, 82 bp, Homo sapiens
agatgatcttcaaccttgcagatacacatctgttcttcaatgacctggaggtcgtcgtcccgcagacacacaatccagaagt

SEQ ID NO: 306010 - DNA, 100 bp, Homo sapiens
ccgtgggcgagccgcccgcccgccgagcagccatgaggctttacaggaagtatggtgctggcatctgcttggcttctagagagtcttacaatcgtggagg

SEQ ID NO: 306011 - DNA, 100 bp, Homo sapiens
gccagattatcgcaggcaagaaagcagttcctgggcttcccgatggactcgagtttttactatgtgagcatcccggtgcctgcacagcaaggactctcat

SEQ ID NO: 306012 - DNA, 100 bp, Homo sapiens
taacctgccccggcttcaggatttacacagacgtggggcgatgcttgtgaccctgcagctcctcaaaaacatgagcctttgactgctcctcagctcttgg

SEQ ID NO: 306013 - DNA, 50 bp, Homo sapiens
aggatgtttgtgaattagatagagagtggtggatctgaaccttctaacag

SEQ ID NO: 306014 - DNA, 98 bp, Homo sapiens
ggagaggcgccccccgcagcaggccatcgaggagggcacgctggaggagatcgaagaggaggtccggcagaagaaatcatcacggaagcgcaagcgag

SEQ ID NO: 306015 - DNA, 101 bp, Homo sapiens
ataccagcgtaagggctatggcaggtttctcatcgatttcatctgtacaaccatatccagttgtctagtaatttaatgcctggctgtgactactcactttt

SEQ ID NO: 306016 - DNA, 50 bp, Homo sapiens
atgatcgaatccggcctcattatgtccgtggttcagaccctgtattaaag

SEQ ID NO: 306017 - DNA, 99 bp, Homo sapiens
gaacactggtcagatgtggcaaagcaaaggtagttgatgtcacttggcgatattcctgcaaacatgaagaggtgattgccagaagaactaaggttaaag

SEQ ID NO: 306018 - DNA, 83 bp, Homo sapiens
cacggaatgaagaggttgtcctaattccagcactgagtgtactggtagttaactctcaaggagaaatttcacggttgagcacc

SEQ ID NO: 306019 - DNA, 87 bp, Homo sapiens
ttcaactatggcagcagcgtggcctccgccaccgtgcacatccgaatggaaatacaaacctggtcgatgtgatgatattttgaaatg

SEQ ID NO: 306020 - DNA, 97 bp, Homo sapiens
ctaaggagaaagtcctacaacagtttggcgtgcaacatggggcttgagaaaggcaagtcaagccagagatctgttatcaaaaatgttagtgattgat

SEQ ID NO: 306021 - DNA, 87 bp, Homo sapiens
aaacatcatcgttttgaagagttctgcgttttgccagtcacctctcaactgtgtgccaaagatctattaatgagatgaagcggttgg

SEQ ID NO: 306022 - DNA, 100 bp, Homo sapiens
cttgttgtcttctgacgccccccggcggattgaagagtctgccattgatgaggaaagattctgaagcttggcggagaggggtgtgtgagtggacaccagt

SEQ ID NO: 306023 - DNA, 100 bp, Homo sapiens
ccgctgtacagattcatcaccacggtgattgtgaagacaagaacggaatatcagccggaacagaagaacaaagggaagttccgggtgccgaaaatcgctg

SEQ ID NO: 306024 - DNA, 113 bp, Homo sapiens
agcatgtacggcaaaggcaagagtaacagcagcgccgtcccgtccgacagccaggcccgggagaaacatggatgggtgcaaaaaagagctgccccgcttgcaagagccggagg

SEQ ID NO: 306025 - DNA, 100 bp, Homo sapiens
cttctctagaccttgccaagatggcacagtatcaccttttgccatgatagcatttctttcattggacagttccttacaagggctccactcagtgtctgtc

SEQ ID NO: 306026 - DNA, 75 bp, Homo sapiens
cgctgagccgtcgcggagccgcgcagccctcggagcacggcctgggttctgaggaaaacgcaatggtggccatgg

SEQ ID NO: 306027 - DNA, 80 bp, Homo sapiens
acgaattgggtcgatctgtgacagatatgccttcaattaagttgcagagttctgatggagagatatttgaagttgatgtg

SEQ ID NO: 306028 - DNA, 100 bp, Homo sapiens
gtgtgaggctgccaaggaagctctggagggtggcccggtggaaatcctgccctttctgtacctgggcagtgcgtatcacgcttcccgcaaggacatgctg

SEQ ID NO: 306029 - DNA, 76 bp, Homo sapiens
tccctccaaaatctcagaaggctcagggactaagaaacaagccttgtataggtgctcatgtgactatcacggatcg

SEQ ID NO: 306030 - DNA, 90 bp, Homo sapiens
aggatttctacctttccatagcaggaattttggagagtaaaaggctgaaccttgttaaagagaaaaccattaatcagaccatcggcaacg

SEQ ID NO: 306031 - DNA, 102 bp, Homo sapiens
ccggactcgtggagttgtgaacgccgcggactccggagccgcacaaaccagggctcgccatgaagccagatgccatggacaatattaccaggcagaaccaat

SEQ ID NO: 306032 - DNA, 100 bp, Homo sapiens
tgctcaaagccctgggtcgcttggaagaagccaagattgagaggatccagaatccagatctctggaatagctaccaggcaaagaaaaaaactatggatgc

SEQ ID NO: 306033 - DNA, 100 bp, Homo sapiens
cgggcgtcagctcgcccgcgagttcgcggagcgcggcgccagaaagcacaggaagtcctggagaacctgaaggaccgctggtaccaggcggacagccccc

SEQ ID NO: 306034 - DNA, 76 bp, Homo sapiens
caacattttgcggatactcttctggtgtgatgaatgcagactctgctaccattttggctgtttggatcctcctttg

SEQ ID NO: 306035 - DNA, 90 bp, Homo sapiens
cgaggttcgagtgttgcagagcctgcggggcaagatctgctcacccatgacatcagcctggaggagtttgaggatgaagacctctcggag

SEQ ID NO: 306036 - DNA, 107 bp, Homo sapiens
tgggaacatgacgcaggtgcaggtgtctcttctcgccctggcggggaaggttgtggcagcactgcctgaaggtatgagaccagattctaatctttatggttttccat

SEQ ID NO: 306037 - DNA, 74 bp, Homo sapiens
ccgcgaggagccgccgcgcgcccgcgccctccgcgcgacgccaggaccgaccagctgggcatgttcacgcacaa

SEQ ID NO: 306038 - DNA, 101 bp, Homo sapiens
caggctctttgaatatgactctgcaaagttcctattttgacgagaaaggcttggttagacaacagctggattcttttgatgagtttattcagatgtctgtt

SEQ ID NO: 306039 - DNA, 82 bp, Homo sapiens
ggacagccgcccctggtgcacacaccctcgtattctcctgcccttccccagccttatgccagcctggaccatcttggaggca

SEQ ID NO: 306040 - DNA, 83 bp, Homo sapiens
ccgggtttcactgtccgtgacttccttcggggcacctcaggcagtgggaaagtaaaactgtcctgcgcaatgagcctttggtt

SEQ ID NO: 306041 - DNA, 100 bp, Homo sapiens
cagagacactactcaacgctggaagagcagagggggctggagaccactgctactaccaggggaagctccgggggaacccgcactccttcgccgccctctc

SEQ ID NO: 306042 - DNA, 90 bp, Homo sapiens
cacaggctccacagaggtgggcaagcacatcatgaaaaggctgtgagaagacatttatcacagtgagtgccctgttttcccataaccgag

SEQ ID NO: 306043 - DNA, 106 bp, Homo sapiens
cattaactttgcgctcagacgagtaacttcggcaaagggatggggagagaaaaggaatctctttgcgttctttgacatggcctaccaaggctttgccagtggtgat

SEQ ID NO: 306044 - DNA, 100 bp, Homo sapiens
ctctcctggctcccttctgccccagctccgtctcggcggcggcggtgtctgtggccatctgaaaacgtccacatgatgccagaccatgctttactctgaa

SEQ ID NO: 306045 - DNA, 83 bp, Homo sapiens
cagaagaagacgaagaagcagaagcgtctgctcaggttgcagcaggagagaggctactgcagcactggggtgtcagttgttgg

SEQ ID NO: 306046 - DNA, 118 bp, Homo sapiens
ccagaccctggagcctcagttggaagcagccgatccagcctgcggagcctgtggggcaggttaaataggattgcgaatcaggtggccattcagcggaagaagcagtttgtggagcgag

SEQ ID NO: 306047 - DNA, 101 bp, Homo sapiens
ctggggccggcgatgtgccaccgaggctgaggatgatggtagattgccaggctgttgatggagaagggggcggatgacagccgggaccgtggtcatcaccg

SEQ ID NO: 306048 - DNA, 90 bp, Homo sapiens
gccttggacaaggatgccccgctgcgctatgcaggtgaggtccagagatatatccagagaggagtggaagggctcggagacctacagccc

SEQ ID NO: 306049 - DNA, 75 bp, Homo sapiens
cccatatatgattttctttaaggatggtttagaaatggaaaaatgttgtgtaaaggttgccataaaggacaaaca

SEQ ID NO: 306050 - DNA, 75 bp, Homo sapiens
atcgaggacagtgcaaccacgtccgaatcaaccagacggatgatgagtttacacacctgtacacactgattgtgc

SEQ ID NO: 306051 - DNA, 50 bp, Homo sapiens
gatcagagcatgaaggaaggggtcctagaccagaaggagcacaggctgga

SEQ ID NO: 306052 - DNA, 96 bp, Homo sapiens
ctctgagcacagagaaggaggaagtaatggggctgtgcataggggaggaagacacagagaggacccagatcaacgtcctggccgtgcaggccatca

SEQ ID NO: 306053 - DNA, 75 bp, Homo sapiens
catcgggagcagtgtgccaggcccgcagtcctaccccattgtgacagactgtattggtgatcacgtaccgagaac

SEQ ID NO: 306054 - DNA, 96 bp, Homo sapiens
acgagactgcaatggggacacgccaaacctgagtttctacagaaatgagatccgcttcctgcccaacgggtgaggacgcttgagcggaagttagaa

SEQ ID NO: 306055 - DNA, 74 bp, Homo sapiens
cggccggcacgaaggcgtccccacgctggaaggatgttccaggtcatccagccagagcgtgcgctgtacatcca

SEQ ID NO: 306056 - DNA, 75 bp, Homo sapiens
cgcacggactgctggagatggtggagtccgtcagctggctacagcaaacatcattcaagatgtccagcaaaggga

SEQ ID NO: 306057 - DNA, 100 bp, Homo sapiens
ctccagagaagtagaatctgtagaccttccacactgccacctgattaaaggaattgtacaaccttggaaaagcttgaagttgcagagtcagagttcaccc

SEQ ID NO: 306058 - DNA, 75 bp, Homo sapiens
gcgacccaccatggagacccgctacaacctgaagagtccgggcgccaagcccatctttgtgtgcttgcatccaac

SEQ ID NO: 306059 - DNA, 100 bp, Homo sapiens
ctagcgagcctgccggtcgaccccagccagcgcagcgacggggcgctgcctggcccaggcgcacacggaagtgaagtgtatgctgacttgtaaagtgaag

SEQ ID NO: 306060 - DNA, 100 bp, Homo sapiens
ggctggcgccgctgcgcgcatgggcctgttcctggcccgcagccgccacctacccagtgaccatgatagtgttggagaaatcagcatgttaaaacaactg

SEQ ID NO: 306061 - DNA, 98 bp, Homo sapiens
tgtcgcagacggccatgtccgaaacctacgagtagcacagaagagggaggatgctgtttccaaagaagtgactcgaaaactttctgaagctgataata

SEQ ID NO: 306062 - DNA, 100 bp, Homo sapiens
atctcatattagtgcctgtgatggcatctttcatctaacactattcttgccatgagaaaaagaatgtgataagttattcaacttatgaaattcaagttac

SEQ ID NO: 306063 - DNA, 51 bp, Homo sapiens
cacctgacttccttcctcttctgaacaaagacagatgcaccatcaggaatg

SEQ ID NO: 306064 - DNA, 74 bp, Homo sapiens
gccgggcctggcggacgcggcgccatcgcagtcagggcagctggtggaatttttgaagaaaatggaatctcgag

SEQ ID NO: 306065 - DNA, 90 bp, Homo sapiens
tgcatttgtatatgccataaaaaatcattactggtaccagatgtacatagatgatttaccaatatgggcccgaaaatggcacagaaatgg

SEQ ID NO: 306066 - DNA, 98 bp, Homo sapiens
caaaggcaaaggcggctcgggagattcagccgtgaagcaagtgcagatagatggccttgacttaaccaccaccatgtcgagcaaaagaacaaagacca

SEQ ID NO: 306067 - DNA, 100 bp, Homo sapiens
tcgtgcagctcttggcaggagtagctgatcaaaccaaggatgggcaactcaaagttatgttgacgaatgtcctatggacggatttaggacgaaaattcag

SEQ ID NO: 306068 - DNA, 82 bp, Homo sapiens
catgtttcgaagacctgtattacaggcagaagtcaattcatctggaaagactatctctgagtcagacttaaaccactctttt

SEQ ID NO: 306069 - DNA, 75 bp, Homo sapiens
gaactcgtcctacgtaacacagccagttaggtgtccctggccagtgtccttccacctgtccacaagcatggggaa

SEQ ID NO: 306070 - DNA, 101 bp, Homo sapiens
atacacaagggaaatgccctttaaaataaaccagggggagcacctggggaccacggaagcgaccgaggccttctttgccatgaccaagctctttcagtcca

SEQ ID NO: 306071 - DNA, 100 bp, Homo sapiens
agcggatactggtcttctcgtcggattgcccatgcacttgttgcagaaacagccaagttgttgacctcctgtactggagagacattaagaagactggagt

SEQ ID NO: 306072 - DNA, 80 bp, Homo sapiens
cgcggcgggaggagcctgttcccctgaggtttggttttcctaaacaaatcctttcacagggaccgacggcacttgataat

SEQ ID NO: 306073 - DNA, 74 bp, Homo sapiens
ctgtgaagagacatgagatgattgccaaatccccagctgacaagctctctactgatgatctgaactccctcatt

SEQ ID NO: 306074 - DNA, 95 bp, Homo sapiens
ggcgtggagccggcagccgacggcaaaggtgtcgtggtggtcattaagcggagatccgcttcccttgccagacaattcctctgtcgggtgtggcc

SEQ ID NO: 306075 - DNA, 89 bp, Homo sapiens
ttgaagaacgagaacggcgtagagaggaagagagaagacttggcgatagttccctttctagaaagattactgacagccctgtcctagga

SEQ ID NO: 306076 - DNA, 74 bp, Homo sapiens
gctgtttgccctgaacatcatgaattcccaagaaggagacaagagtgagaatggtgaggcatatcagagaaaga

SEQ ID NO: 306077 - DNA, 75 bp, Homo sapiens
gttccgcacaggcctgctgaactgggtgctttatataggtggtgggggaaaagtagctccagctcaaccatctga

SEQ ID NO: 306078 - DNA, 83 bp, Homo sapiens
aggatagccaatcggaccaaaaattcactcactttgcaatggaagtggccgacatccccggcatcatacgaggcgcccaccag

SEQ ID NO: 306079 - DNA, 74 bp, Homo sapiens
tccatccggcagatccggcagcacagttccagggtcacccccgagaggacaacaggcatctggaagtgctctct

SEQ ID NO: 306080 - DNA, 83 bp, Homo sapiens
ccgtggccttagctgtgctcgcgctactctctctttctggcctggaggctatccagcgaagccagttgagggaagttctccat

SEQ ID NO: 306081 - DNA, 100 bp, Homo sapiens
ctcgaagaacagctgtggaaagaagttgcaaaacactggagcccccctccatgcgcctgaaggcccgacccagcagccctggcttttccgtgcttacctg

SEQ ID NO: 306082 - DNA, 134 bp, Homo sapiens
cttgaattcagcttcatgaaccaggagcagggaaaccagctgagccaacccacattctgacctaaggagcactgagtttcagacccaaagtttacgcctatcagacctacacagaaaatcgcatctttggagag

SEQ ID NO: 306083 - DNA, 120 bp, Homo sapiens
ttcagttcgtcatggggctgtttggaaagacccaggagaagccgcccaaagaactggttatgaagacagtatggagtttccagaccatagtagacatttgctacagtgtctgagcgagca

SEQ ID NO: 306084 - DNA, 83 bp, Homo sapiens
gcaggatgggggactccaaagtgaaagtggcggtgcggatacgacccatgaaccggcgaggaatactcccccagttgcaagag

SEQ ID NO: 306085 - DNA, 97 bp, Homo sapiens
ggcacctacggtcacgtctacaaggcgaggcggaaagatggctgaaacagctttaagagaatttcaaaggcaatatgaaaaaatggagtttggagta

SEQ ID NO: 306086 - DNA, 129 bp, Homo sapiens
ccaactaggctgcacaggcacgctgggcgcatgtccgcctcgccggggctgccagataattctgaaataatcagcagaaacggaatggaatgccaagaatctgcattgagaataactaaacattgttac

SEQ ID NO: 306087 - DNA, 90 bp, Homo sapiens
caacagtggaccatggttgctgacagaactaaagtctcctgcaaaaaggcctaaagaatgtatttgacgaagcaatattggctgccctgg

SEQ ID NO: 306088 - DNA, 87 bp, Homo sapiens
gatgccagcgtagctgaatccagtaccaaaaacgtcaacaacagttttacgatcaacaggcggtccttcgggtcggagtggacatcg

SEQ ID NO: 306089 - DNA, 75 bp, Homo sapiens
ccgggcccggcttcccagcctgacgtgttatagttttgccgctggactcttccctcccttcccccaccccatcag

SEQ ID NO: 306090 - DNA, 96 bp, Homo sapiens
aagaacatgacgccgtcacccttcctgcgattctacttagattttaccaaatgttgcaagaactctggagttcttatggtagtaaaatgccggaaa

SEQ ID NO: 306091 - DNA, 100 bp, Homo sapiens
cgagttctcacgtgcccatcagtgacagcaagtccattcagaagttcatctgcagaagccagcggacgcctctgttcaacttgtgggttacctggctcat

SEQ ID NO: 306092 - DNA, 99 bp, Homo sapiens
gttgccattttggcagcagcttgtttgctgcagttggtagatgacaaggtgaatttccattttattctgtttaacaacgtggatggccacctctatgaa

SEQ ID NO: 306093 - DNA, 75 bp, Homo sapiens
tgcagacatctacaaccttcgatctcctgacgataaacctatgatggacttgttgatattcctttgtgcacagta

SEQ ID NO: 306094 - DNA, 51 bp, Homo sapiens
ccgacatggaacagggactcactggggctgtccgcaggcttgtccaaaagg

SEQ ID NO: 306095 - DNA, 100 bp, Homo sapiens
gccgcggtcgctccgagcggcgggccgcagagacaccaatgggaatcccaatggggaagtcgatgctggtgcttctcaccttcttggccttcgcctcgtg

SEQ ID NO: 306096 - DNA, 98 bp, Homo sapiens
tgacgtcaggaagtcgaatccggcggcgacgcctttagggagcccgcgagggggcgcgtgttggcagcccagctatctcggcccctttccaaacactc

SEQ ID NO: 306097 - DNA, 97 bp, Homo sapiens
gtcggcctgcagggctgccaggcctgggctctagtacccaaaaggtcacccaccgggtgctgggccccgtcagaggctggagtgcagtggcatgatc

SEQ ID NO: 306098 - DNA, 89 bp, Homo sapiens
cagtagcagtctgctggccagccaagatgagacaaaggtgtttgatcagtatgtaaagaccagggcagaggaagaacgcagggaaaaga

SEQ ID NO: 306099 - DNA, 82 bp, Homo sapiens
tcgcccgccaccctgcgctgccgccgctctgaggagttaaaggaatcccagtcagaagttccagcctgccactgttctctga

SEQ ID NO: 306100 - DNA, 90 bp, Homo sapiens
tggccaccgaccagaggaaagtcaaggtgaaagaacttgtcctggacaacagtcggtcgaatgaaggcaaactcgaaggcctcacagatg

SEQ ID NO: 306101 - DNA, 98 bp, Homo sapiens
gatcgagcagaggcctatttgatagaggaaatgtatgatgaaggtgtcatggagaaactccagctgggcccagagattctgcagcgggaaaatccaag

SEQ ID NO: 306102 - DNA, 100 bp, Homo sapiens
ggagaccccgcgccggaccctgaggcagcgatgagcagcggttccatcgcagtgaacgccgactcttcggtgcagttgttggccgaagaggccgtgacgc

SEQ ID NO: 306103 - DNA, 50 bp, Homo sapiens
cgggaggaggccttgtccacagcatttaaatcaaacggtattgagatgga

SEQ ID NO: 306104 - DNA, 73 bp, Homo sapiens
cctgtctctgctcctcgctgtggctttgggatcaccattaacaaggacaccaaggtacccaatgcctgtttat

SEQ ID NO: 306105 - DNA, 83 bp, Homo sapiens
gctagggaagatcgcaccgcggacgcccgctgagcttggcgcacgggccgaccagctggtcagtgagaaggtcggaggggccg

SEQ ID NO: 306106 - DNA, 100 bp, Homo sapiens
gccaagtccagatatatggagctctacacgtatcctcctgcctagcgcaggactctgtctactagtgacgatgtcgaagacagggaaaatgaaaagggtc

SEQ ID NO: 306107 - DNA, 83 bp, Homo sapiens
ctgtacagcatcaactacctgcactttggggagcctaagtcctgatcatgatgctgccgccaccgccgccaccacggagcgag

SEQ ID NO: 306108 - DNA, 75 bp, Homo sapiens
ggggcagaatacagagatatggaatcagttttctggatatgccgcagaaggatccgtgccagaagcaagcctgtg

SEQ ID NO: 306109 - DNA, 100 bp, Homo sapiens
gagcagaccaaggcagcgcagcagggtgagccccacccggagttcagcgcggactcccccagcccaggtccaggaggcccaggaggtcctgggggaccca

SEQ ID NO: 306110 - DNA, 100 bp, Homo sapiens
tgtggaaagaagttgcaaaacactggattacctaaaacctcgggcagaagaggagaggaggatagcagcagaagagaagaagaagcaggatgaactgaaa

SEQ ID NO: 306111 - DNA, 75 bp, Homo sapiens
aaagaagctgatccggcaggccggctttccacaggtatgaaggttattgaaaaccgggccttaaaagatgaagaa

SEQ ID NO: 306112 - DNA, 100 bp, Homo sapiens
cctgtgacagataatcgtgatgtggaagacatggaactctcagatgtggaagatgatgggtcaaaaatcattggctgatgaaaacttttacacttgtgca

SEQ ID NO: 306113 - DNA, 82 bp, Homo sapiens
ggaggagactcctgaccctcagaatgatttgacaagatcaaagctgcaggaaaatggacagtgaggttcagagagatggaag

SEQ ID NO: 306114 - DNA, 75 bp, Homo sapiens
ttccacaagaaggactgcggggacctggtggccatcgcttgatcctctcccagaaaaggttttacagcaaagacc

SEQ ID NO: 306115 - DNA, 98 bp, Homo sapiens
gctgctgcaatgacgagggcctggagtgtgtgcccactgaggagtccaacatcaccatgcaggtgtgtgtggtttcagcgcagcatggctgtggtcat

SEQ ID NO: 306116 - DNA, 98 bp, Homo sapiens
tgccccctggttcctcaccatgtttgcctcacagttcccgctgggattcgtagccagagtctttgcttcttggacacttaatgattgttggcaagaaa

SEQ ID NO: 306117 - DNA, 85 bp, Homo sapiens
aagttcagcaacacctgttaaagtccttgctcctggtgaattcggtaaccatagaccaaaagcaccaccatctccaccctgtgat

SEQ ID NO: 306118 - DNA, 96 bp, Homo sapiens
gaaaaatattgctgtacctaaattcaagtttacaggtacatacattacacccctatttctacaaagcttggctattagagcattatgaacattaat

SEQ ID NO: 306119 - DNA, 99 bp, Homo sapiens
catctttccaccgaatgccacctggtttataacaaaagccaggaagaaagctcaggcccattagtgatgactctgaaagcattgaagaaagtgatacaa

SEQ ID NO: 306120 - DNA, 82 bp, Homo sapiens
ccttcggcagtccacccaccgccgccgcctcccaggtacaccaggggttggaaaaaccacactaggcaaagaacttgcgtca

SEQ ID NO: 306121 - DNA, 98 bp, Homo sapiens
tggagatggggagcgtcctggggctgtgctccatggcgagctgggctttcttgatcatggatggtgaagatataccagatttttcaagtttaaaggag

SEQ ID NO: 306122 - DNA, 98 bp, Homo sapiens
ggctgggtaacccagatcgctactaccccgcagttcccggacatgatcctctccgcctctcgaggctaaaacactgtcttatgaaccattatcttcag

SEQ ID NO: 306123 - DNA, 50 bp, Homo sapiens
ccgacttggaatttgaggactttgacttccttggaaatcattgactagca

SEQ ID NO: 306124 - DNA, 100 bp, Homo sapiens
agtacaagatcccagactggttcttgaacagacagaaggatgtaaaggatggaaaatacagccaggagaagaaggaagttgtggaagaggcagaaaatgg

SEQ ID NO: 306125 - DNA, 83 bp, Homo sapiens
taagaaggcgctgaagggcaaggaaagcagcatagagaatgagatagccgtcctgagaaattggaatcgaagcctcttaaaat

SEQ ID NO: 306126 - DNA, 90 bp, Homo sapiens
gttgaaatgggccatgagctcttcaaattggcccagatctttttcaacgggaatagctattcagtcagacagaaccacttatcacgtttt

SEQ ID NO: 306127 - DNA, 82 bp, Homo sapiens
ggacggcggaggcggcgggactggtccctgcaattctgtggtgttcttggtcacacatttatggagtttctgaagggcagtg

SEQ ID NO: 306128 - DNA, 109 bp, Homo sapiens
catatttgatgaggtggatctgacagatgccagcgtagctgaatccagtaccaaaaacgtcaacaacagttttacgcggagtttaagagagctgtgaaagtagcaacag

SEQ ID NO: 306129 - DNA, 80 bp, Homo sapiens
gttattcgagtgaccgagaccgcggccgggaccgaggccgctgccatggcccagacactgcagatggagatcccgaactt

SEQ ID NO: 306130 - DNA, 96 bp, Homo sapiens
gaagcctgggaggaagaacaggaagttgctgagctctcaaaagccaaaagtctctgagaacgactttgaagatctgttgtccaatcaaggcttctc

SEQ ID NO: 306131 - DNA, 101 bp, Homo sapiens
aagattcagacaagaaaggcaaggaaacatcttttgacaagatgtcacctgaaagtggtcacagccgcatctttgaagtaatatatttggtctgcggcctg

SEQ ID NO: 306132 - DNA, 50 bp, Homo sapiens
gcaaagaagcattctcaagtaatttcaggcatcgttggcttcacagtatg

SEQ ID NO: 306133 - DNA, 98 bp, Homo sapiens
atccactctcccagagtgctccaacgggactgaaccacatgggctggccagagcacacaccaggcactgtacggcaagaagaagctgaaatacctgcc

SEQ ID NO: 306134 - DNA, 100 bp, Homo sapiens
gttaagaccatttttactaaggagactgaagaaagaagttgaatcccagcttcccgaaaaagcaagaaactatattcagtctttgactcagatgccgaag

SEQ ID NO: 306135 - DNA, 51 bp, Homo sapiens
gcctcccgagtggctgggactacaggtttgtctacagattttgagcgttcg

SEQ ID NO: 306136 - DNA, 90 bp, Homo sapiens
tcagaaaagaagaagaagagggatactcccatgctgccaaaggaaaacgggccttactatacatcatatcccccatcaccagatttgtga

SEQ ID NO: 306137 - DNA, 100 bp, Homo sapiens
tttgccttcatataaacgtacacctactgaatggattcaagacttcaaaacccattttcttgtagtttatgccaacgtgacttcattcatacagatgaac

SEQ ID NO: 306138 - DNA, 82 bp, Homo sapiens
cctgcagcagctaggggcctggccaatccagagcctgccccagagcccaagggcgccatgttttggaagtttgacctgcaca

SEQ ID NO: 306139 - DNA, 98 bp, Homo sapiens
tgcataccatccgcgaccgagtctggcagatccagtcttgctcagctctcacaggagagggcgttcaggtcccgctccccgaggcgcaggtcccccgt

SEQ ID NO: 306140 - DNA, 74 bp, Homo sapiens
cccacttcgttcaagacaggtgtttaagcctgataccccaatgtccttctttgactttgtggttgatcctcatt

SEQ ID NO: 306141 - DNA, 89 bp, Homo sapiens
aaccggcagcagcgctgccgccgcgtcctcagccaccgctccctcttcccacgtggaatgcagtagccctctgggcctgggatattgtg

SEQ ID NO: 306142 - DNA, 83 bp, Homo sapiens
cctactgatggtgctgtaaccacctcacagattccagcttcggaacaagagaccctggtggacccccaaaagtacaagggcat

SEQ ID NO: 306143 - DNA, 50 bp, Homo sapiens
catcgacctggggaccacctactcctgcatgctggtagctgccatccagt

SEQ ID NO: 306144 - DNA, 100 bp, Homo sapiens
tggcatgggggcctcagggcagcctgcctggaggtgttatttggaagatggagcttcaaagggtgcctggctgaaccggtcaagtattatttttgcggga

SEQ ID NO: 306145 - DNA, 87 bp, Homo sapiens
tctggaccagaatacctcaaacgtctaccattacagtgagctgaacgacaaaggaatgaagcactatataatgccgaagagctgagt

SEQ ID NO: 306146 - DNA, 100 bp, Homo sapiens
cggctcggcccaaagcagcagcttcagccccgaagtcatgcgcatcgtggataatgttcgtcctgatcgacagacggttatgttttcagctactttcccc

SEQ ID NO: 306147 - DNA, 100 bp, Homo sapiens
cacagatgagccagtatggaccacaagcaagctgtgtaatgttcttgatcgactaaatgtgattgcagaaagtgtggtgaagaaaacaggtttctttgta

SEQ ID NO: 306148 - DNA, 95 bp, Homo sapiens
cttgctgaaccgcttcctgggggactatgtggagaacctgaacaagtcccagctgaagctgggcatctggggcgacgtgccaccttgcttagcgc

SEQ ID NO: 306149 - DNA, 109 bp, Homo sapiens
agggcaacttcgctgtggtgaagctggggcggcaccggatcaccaagacggagagatcctgaaggagctagacgagtgctacgagcgcttcagtcgcgagacagacggg

SEQ ID NO: 306150 - DNA, 82 bp, Homo sapiens
ggcagtccacccaccgccgccgcctcccagatatatttttgccatcatggatcagtttggagatatattagaaggtgaagtg

SEQ ID NO: 306151 - DNA, 75 bp, Homo sapiens
ttcatccagggagacagcgttgttctaagaacggaagcatctgggctggatggaatttagcatcaagcagagtcc

SEQ ID NO: 306152 - DNA, 75 bp, Homo sapiens
gaggaggatgaacactatgattaccaccaggagattgcaaggcgccaagcccatctttgtgtgcttgcatccaac

SEQ ID NO: 306153 - DNA, 82 bp, Homo sapiens
agaaggaccggcaattccagtacattgccatcgagctgtgtgcagccaccctgcaagaggcacccctttcccaaagtgttca

SEQ ID NO: 306154 - DNA, 99 bp, Homo sapiens
cagggttgttcacctgcccaaaaattgtgtcttgagttgctgattgttggaggttcttttggtcttcgtgagttttctcaaatccgatatgatgctgtg

SEQ ID NO: 306155 - DNA, 75 bp, Homo sapiens
tacacgctgtgtcggaacggggtgaaagagaagcacggctccgactactccaagaaactggcgatggaatatgag

SEQ ID NO: 306156 - DNA, 98 bp, Homo sapiens
aggaacccctggaagcctagaaatgctgacaacatagaaggacccatagccttgaagttctcacacctttgcctggaagatcataacagttactgcat

SEQ ID NO: 306157 - DNA, 98 bp, Homo sapiens
aaacgggaggggaaaaacagatggcaagatattctctaagccgctttcatcatgggagaaatagagcagaggccgaccccaggatcacgactgggggc

SEQ ID NO: 306158 - DNA, 83 bp, Homo sapiens
agcggaagctgcccttcaccgcgggcgccaatggggagcagaaggactcggacacaggtggaagttaaacgagctgagcctcg

SEQ ID NO: 306159 - DNA, 82 bp, Homo sapiens
tatttggagcagagaggaaaaaacggctatctataatagatgagagatctccagctgctcagtatgtagacctattgctgaa

SEQ ID NO: 306160 - DNA, 75 bp, Homo sapiens
caggcaggccctgagcacgctgctgtgtgagcagcagaccatcatggagcagttcaaccctagcctccggaactt

SEQ ID NO: 306161 - DNA, 75 bp, Homo sapiens
cagaagagctgccaagaggagccagcaccccttcggaaaaactttaccgaccctgtcacactcactgaaaatggc

SEQ ID NO: 306162 - DNA, 100 bp, Homo sapiens
agaaaaagcaagagacgaagcgctccatcaacgaagagatccacacacagggggatgacaaggtgtttcgccgcgcgccctcctggaggaagcgcttccg

SEQ ID NO: 306163 - DNA, 98 bp, Homo sapiens
ttcagacccatttccagtcatgaattgtcctgggtcacataatgccagctgagcgtaaaaagccagcaagtatggaagaaaaagactctttaccaaac

SEQ ID NO: 306164 - DNA, 108 bp, Homo sapiens
gtgacattcctcatgtcagctctcgagtccatgctgtatcttcagagttgtctccgtctttccaagaacagaacaaaatgaacaaggtaagttgtttattaattccct

SEQ ID NO: 306165 - DNA, 85 bp, Homo sapiens
aagcaatgtttgaacaaactcgaagaacagctgtggaaagaagttgcaaaacactggaatagcctaacatggcagaccagagaca

SEQ ID NO: 306166 - DNA, 100 bp, Homo sapiens
gtacaatttgccagtgtttccacaatggaaccaattgttttacagtctgttccacatgatcattgtaataagaccttgccaccatggaagaaagagtaca

SEQ ID NO: 306167 - DNA, 97 bp, Homo sapiens
gtcactctcaaggatctccgtgtagaactccttggagaggacccagagttcaacaatacagatcagattgacctgtatgatgatgtgctgacagcca

SEQ ID NO: 306168 - DNA, 100 bp, Homo sapiens
tgaggggcctcttccaggacttcaacccgaggacatgagaaacctgaggttcgctttgaaacaggaaggccacagcagaagagatatgtttgagatcctc

SEQ ID NO: 306169 - DNA, 75 bp, Homo sapiens
gggaaatcccaggctgccgcggctcctgtgtgctttgaagacggccgaagccctgcagcccacgctacagccgga

SEQ ID NO: 306170 - DNA, 87 bp, Homo sapiens
gccgaggatgcgacgcaccgcagggcttccgttacaagatgaggtctgtgtatgctcacttccccatcaacgttgttatccaggaga

SEQ ID NO: 306171 - DNA, 100 bp, Homo sapiens
caaacttcttaacccctagaccggtttttagtccattgactatgcagcctaatgaccccaagactgcttctgagacagaaacagatatctgtgctgaatg

SEQ ID NO: 306172 - DNA, 100 bp, Homo sapiens
gagaagaccaccatcaacaatgagtacaactaccgctgctggaccacaaaccgctgccagaaaaaattcaattcgtcataatctgtccctacacagcaag

SEQ ID NO: 306173 - DNA, 75 bp, Homo sapiens
ggaaacacccgtaccttacccaactctactgctgcttccagaccaagggagatgcagttaaagacttgatgcttc

SEQ ID NO: 306174 - DNA, 83 bp, Homo sapiens
gaagaaagccatggtggagtatgagaaatcctgccagaaacctgtagacaaatatatcgagtatgatcctgttatcatcttga

SEQ ID NO: 306175 - DNA, 100 bp, Homo sapiens
ttgcaaagagttatggatattctggtggggagatgaacccaacctagtgggtgtaatacatcatgaactgcaggagacaaggtctcactgtgttgcccag

SEQ ID NO: 306176 - DNA, 75 bp, Homo sapiens
ggatctacaggatgatcaaacttggtctgggggtttcccattaatcaaaacacgtgatatatgtaatcagttgca

SEQ ID NO: 306177 - DNA, 100 bp, Homo sapiens
cgggagcacgtcatcgccatcgaaggtctggtccatcgaactcatatgtcatcctgtcgggtggataagccctctgagatagtagatgttggagataaag

SEQ ID NO: 306178 - DNA, 98 bp, Homo sapiens
tggcagccagtcagtggtggaggtcatccgcaagggctggctgactatcaataatattggcatcatgaaagggggctccaaggagtactggtttgtgc

SEQ ID NO: 306179 - DNA, 90 bp, Homo sapiens
ctgaccttgagtgcagctccccctataagcctcggcctccacagctgatgactatcagccagttcgtctgctcagtaaacctggggaact

SEQ ID NO: 306180 - DNA, 75 bp, Homo sapiens
gcagttgggaatcaggtctggaatactcctaaccaagaagttgcccagtgtaaacaggaacatcgataagtagtg

SEQ ID NO: 306181 - DNA, 90 bp, Homo sapiens
atctactcccagaggaattccagacttttttgctccactcaagcctgttagaatcaccatggaatacagctccagtgggaaggccactgg

SEQ ID NO: 306182 - DNA, 98 bp, Homo sapiens
attgagatgatccttacggaaaaggaacagattgttcctaaaccagaagaggaggttgcccagaagaaaaaggaaccattaaagagatcctggggact

SEQ ID NO: 306183 - DNA, 83 bp, Homo sapiens
ttgcctggaacaccagctcgggtcctcgcacaccatcctggaaatctggcattttttaaagtttgcgccccacaaagaggaaa

SEQ ID NO: 306184 - DNA, 75 bp, Homo sapiens
tacggcctggcactgcgcttcttcaaaggtcaaaatgcagatcttcgtgaaaacccttaccggcaagaccatcac

SEQ ID NO: 306185 - DNA, 100 bp, Homo sapiens
accggaggcggaggctgcagcgggcactgcggcgccgaggcgcggcggcaggacgggaaccacgcgagctgcagccaggcgaaagggcgtgtggttgcgc

SEQ ID NO: 306186 - DNA, 75 bp, Homo sapiens
atgagatgggccttagcttggagtttttatgatgatgtcacagtaccagaagctcttcgtgggcggtcttgactg

SEQ ID NO: 306187 - DNA, 100 bp, Homo sapiens
caacaataacaagactgtccttcggacaagttttagggtgttttgaatgctgtatcaaatgcctggggggcattccctatgcctctctgattgccaccat

SEQ ID NO: 306188 - DNA, 100 bp, Homo sapiens
gaaaactcagcaagtttggatccatacgttataagcaccgctacagatgtttctatactttgaagatcatggactagtgacgtgctccgctgatcatctc

SEQ ID NO: 306189 - DNA, 75 bp, Homo sapiens
gggaggtgcttctgcggctgtacggagccatcttgcaggtacatcaggaacgtctctatcaagaatacaatttca

SEQ ID NO: 306190 - DNA, 87 bp, Homo sapiens
aaacttcgaggcactcaagtcctggctcagcaagactctcgagcccatgtggatcatccatgccatggagtatgaacttcagatccg

SEQ ID NO: 306191 - DNA, 75 bp, Homo sapiens
gaactcagacatctgcaaatcatgtgtaaacaggaacatcgataagtagtgtaaaaacttgcacaatgaaatccg

SEQ ID NO: 306192 - DNA, 74 bp, Homo sapiens
aaccaaatgcaaccagatacaacaagtgttgttaaagattctcaggcttccagttgtgcagctctggaaatgcc

SEQ ID NO: 306193 - DNA, 90 bp, Homo sapiens
cgagctttccgagtgccaggcgccggccggctgcgaagacgcggtgggccgcccctccggggcaagattcttgccaagagaattaatgtg

SEQ ID NO: 306194 - DNA, 76 bp, Homo sapiens
gaccatgtccgggaggcgcttccacctctccaccaccgaccgcgtcatcaaagatggagtctcgctctgttgtcca

SEQ ID NO: 306195 - DNA, 100 bp, Homo sapiens
tgcagaatatgctaaacttttggccaagagaatgaagctccggtctgatatacaaaaacgactgcaggaagaccccaactacagtccccagcgcttcccc

SEQ ID NO: 306196 - DNA, 75 bp, Homo sapiens
ctaaaaaagccttcactggtttggatgcattggagcatctgggcataatcaacccatttcctgcttcaaaaggaa

SEQ ID NO: 306197 - DNA, 89 bp, Homo sapiens
cccacatacaggagacaccaaagaagagaaagacaaggatgaccaggaatgggaaagccccaggatggagctatgacattgaagagagg

SEQ ID NO: 306198 - DNA, 51 bp, Homo sapiens
gccttcccaagattgtggactccctgccactgcagagccccgccatggaag

SEQ ID NO: 306199 - DNA, 82 bp, Homo sapiens
gagaccgtcctggcgcgatgcgtcaagtacactgaaattcatcctgagatgaggggtggcactgaatcaacaagacaagcaa

SEQ ID NO: 306200 - DNA, 59 bp, Homo sapiens
tctcaagtagctggaactacaggaacttagtgatttggcccgtgaccctccagcacaat

SEQ ID NO: 306201 - DNA, 100 bp, Homo sapiens
ctacctgtggctctttctgctgggcctgcccttcaccctctacatgatgatatcatcaagttgaatcgaaaggaagggaagaagcagaattttccaagac

SEQ ID NO: 306202 - DNA, 75 bp, Homo sapiens
tgctgtttctcttcgccgacggtggtgttcccactgatgaagagcaggcgactgggttggagagggagatcatgc

SEQ ID NO: 306203 - DNA, 96 bp, Homo sapiens
caaccaccccgtctgagaagtgaggagcccctccgcccggcagctgccccgtctgagaagtggtgaaggcattgattgtcctgaccccacagtttc

SEQ ID NO: 306204 - DNA, 98 bp, Homo sapiens
tcaactaaaagcattgtttctagaacatgaggttcaaaccttgtactactcagctgatcacaagctgcttgatgggaacctactagatggacaggctg

SEQ ID NO: 306205 - DNA, 83 bp, Homo sapiens
caacacggtggccataccattgtgaagtcatcgatgaaaaagtccagcatattgcaatggctgccatccggaagaaactggtg

SEQ ID NO: 306206 - DNA, 100 bp, Homo sapiens
ccacccactgtggtctgttgtaccccactgctggggtggtggttccaatgagacagggcacaccaaactccatctggaacttgctactaccagcaccatg

SEQ ID NO: 306207 - DNA, 87 bp, Homo sapiens
ttatatccgtttccagtccaggtcaggggatgccatggggatgaacatgatttcaaagagggtgtggcctgcttctcagcgagacgt

SEQ ID NO: 306208 - DNA, 114 bp, Homo sapiens
atcagaaagcactgggtcaaagagaacagaagatacagatctggcagaaaactgtgaaggaggctcatttgacaaagacagtcattttgtttactcattcagccctgttgcagg

SEQ ID NO: 306209 - DNA, 98 bp, Homo sapiens
acgccgccatccgggaggcccagggaagacagagagtgcatgggctgaagaatactctgaaaagaagaaagggtctcacaagcgctcagcatcttggg

SEQ ID NO: 306210 - DNA, 100 bp, Homo sapiens
cccccctgcggacctccactgggggcatctccactttggggcttcaggagctgaaggaacagctcatgcaacagcagacaacagtcctgtccacctcggg

SEQ ID NO: 306211 - DNA, 90 bp, Homo sapiens
cggcatccccctgtggtaccactcccagtcaccccgagtcatcctccagagtgggagcagcatcatggtggaggtggccactgggccctc

SEQ ID NO: 306212 - DNA, 82 bp, Homo sapiens
gttcacagatgatacgtttgatccagaacttgcagcaacaataggtccagagggggcaaacctctttatttaccaccttcca

SEQ ID NO: 306213 - DNA, 100 bp, Homo sapiens
ccttgccaacacacccttccttggttacttctatcatggtgctgtccttcatctcctcgtcctccaggcagcacaagccattgtggaatctccaccaggt

SEQ ID NO: 306214 - DNA, 75 bp, Homo sapiens
aagacttcaagaaaaccttagaagagaagcatttagagagcatcagcaatatactatactggcaattgctggaga

SEQ ID NO: 306215 - DNA, 88 bp, Homo sapiens
gaggataattattcccagagtcgggagctgctcgtgcagagtcatgtgctgttcctggggcttggatgatgtaggggaagcaaggtga

SEQ ID NO: 306216 - DNA, 93 bp, Homo sapiens
cttggtttgcgtcctgcactgaaaggaaatgacggattttaatcctcactatggatgggctcattgaggacattaagcatcggcggtattatg

SEQ ID NO: 306217 - DNA, 83 bp, Homo sapiens
tgaaacccagacagaggggagcacagagaaagagaatgatgaagagaaaggcccggagactgatgatcctttcaaaaataaag

SEQ ID NO: 306218 - DNA, 89 bp, Homo sapiens
gagctggctgaagatggctactctggagttgaggcctatgagagctacaagaagaaggactacacccaggtggactacttaatcaacgg

SEQ ID NO: 306219 - DNA, 83 bp, Homo sapiens
ggcgagaacgtccactgcgggccggcgaaagctgtgtctccagaacgctatagctatggcacctccagctcttcaaagaggac

SEQ ID NO: 306220 - DNA, 100 bp, Homo sapiens
cacgaccacaccgctgatgaagacaaggactcacagtggctgcaaggcatgaatgctttacagttgcagaacctggcgacgctggctgctgctgcagctg

SEQ ID NO: 306221 - DNA, 100 bp, Homo sapiens
tggtactttccgactgcgacgagggagtcgatttacctggagaaaggagtgcctggctgttatggaaaggggtcggcaccaggaattattatagaaagat

SEQ ID NO: 306222 - DNA, 126 bp, Homo sapiens
cacgtgacatcaagaggaagcggaaaccagtggccacagcatctttgtctagccccagtgcagagagacaagagagacacctccaacttcgacaaagagttcaccagacagcctgtggaactgacc

SEQ ID NO: 306223 - DNA, 82 bp, Homo sapiens
tggagcccgcggccggggacctggacaacccccctaagaagttccgtggcgccatgtcagaaccggctggggatgtccgtca

SEQ ID NO: 306224 - DNA, 97 bp, Homo sapiens
tggaccgatttgcagtacagggagaaagagattcttcaggagatgatgaaagagattgactatgatggcagtggctctgtctctcaagctgagtggg

SEQ ID NO: 306225 - DNA, 75 bp, Homo sapiens
ttcatccattatgctggctgttatgtacgcaggagatttttgcactgagtggccagccgcactggacagtgacga

SEQ ID NO: 306226 - DNA, 76 bp, Homo sapiens
gtccaccttgcgaccgtatccgctagcgcggcctgggatgcgcttgggctccctgagtctcgccctgtcgcccagg

SEQ ID NO: 306227 - DNA, 97 bp, Homo sapiens
attgtccgaatcagtatcagatctacagtgagtcattcaaacagcatgacataactgctacccaggtggatttagacaagtaacagctgctcagctt

SEQ ID NO: 306228 - DNA, 74 bp, Homo sapiens
aaactcttggcatttggctttgcctttctggacacagaagtatttgtgacaggggaggtaactccaggactatc

SEQ ID NO: 306229 - DNA, 100 bp, Homo sapiens
gccaagaagcagcggtacacgcttatggtgaaggctctggtgctgattgtagacgccatgtccaaaagttaaatctactacagggacaagtttcagagct

SEQ ID NO: 306230 - DNA, 98 bp, Homo sapiens
cggggaggccaacgtgaagaacttccgacttcgactccttaccttaaaagatgctggagtcatatgtaactccaattttaatgagctatgtgaatcgc

SEQ ID NO: 306231 - DNA, 51 bp, Homo sapiens
gcggggaccgctgtgctctcggtacctaaaacagatccaggacctgccccc

SEQ ID NO: 306232 - DNA, 75 bp, Homo sapiens
ccagctctgcagccacatactatccgtttgttcaggaaccaccagtgacagaaatttacatagtacatgacgaag

SEQ ID NO: 306233 - DNA, 100 bp, Homo sapiens
gctaaccttagcagaagaaaggacggtagacctgcccaagtctcccaagacaacgactgaaagacctttcattcagaagctgtttcgtcctgtggctgca

SEQ ID NO: 306234 - DNA, 100 bp, Homo sapiens
acatctgcgaagtggttgagaagcctgtacctgttttatacttgcttttgcttcagcgttctgtggttgtcaacaggccgaatgggtaatagccgaagtg

SEQ ID NO: 306235 - DNA, 100 bp, Homo sapiens
ctctatcagcatgggaaacttacactgctgcataatggagaacctctctacattccagtaacccagtatctctcagaagatagaagtgtgcaagaagtac

SEQ ID NO: 306236 - DNA, 90 bp, Homo sapiens
cgctccggcaacgccaaccgctccgctgcgcgcaggctgggctgcaggctctcggctgcagcgctggatgcaagtgctgctggaccaggc

SEQ ID NO: 306237 - DNA, 100 bp, Homo sapiens
cacctgtattttagcgtactatgcagtgaaatccggcccaactccaccgtgcagtgggaagaagtgtgccggccctgggtctctgggcatcggaagctga

SEQ ID NO: 306238 - DNA, 83 bp, Homo sapiens
tgccctgtgtgctcatctcgggcctggtgctgctcgcctacttcctgccggcgcagggcggctatgagaggttttcctccgag

SEQ ID NO: 306239 - DNA, 97 bp, Homo sapiens
tgttcgacgtagtcgtgatcggaggtggcatttcaggtacacttcatgttggtgatgaaattcgagaaatcaatggcatcagtgtggctaaccaaac

SEQ ID NO: 306240 - DNA, 98 bp, Homo sapiens
cacgatgaaaagaaatacctgtgatttgctttctcggagcaaaagtgctgatcttcagacaagttctcagcgtttaaatctttcagcctccaatgctg

SEQ ID NO: 306241 - DNA, 100 bp, Homo sapiens
gaatttgaagaccagtcccttgaaaaagacagtgacgacaaaacaccagatgatgaccctgagcaaggaaaatctgaggtttcaccagtgatcattaaag

SEQ ID NO: 306242 - DNA, 76 bp, Homo sapiens
tgtgacccaggggaaaaattagactcaaaaattggagtccttataggaaaaggttgttgatgagcgtgaatttttt

SEQ ID NO: 306243 - DNA, 106 bp, Homo sapiens
aacgacctagtatttgaatttgctagtaacgtcatggaggatgaacgacagcatgtgatagtgatggaagatatgctgaaagactttctccttggagaacacttat

SEQ ID NO: 306244 - DNA, 100 bp, Homo sapiens
gttctatttctctagctattgccttattttttctcatggatgttcttcttcgagtatttgtagaaggcttcttctcagcctgttgataaccatgttagcc

SEQ ID NO: 306245 - DNA, 74 bp, Homo sapiens
taaccaggtgcttggcaaaatcgagcgggccattggccctgggaggagcggggacactgaggacctctctccaa

SEQ ID NO: 306246 - DNA, 94 bp, Homo sapiens
attttaagaaaaggcattgaggaactcaatcaaaccagtattcttttcacacagcagtacttctggaatagaaattctaaacattagcctgccg

SEQ ID NO: 306247 - DNA, 75 bp, Homo sapiens
ggtggcgaacggggcgagcctggaggattgtcactccaacctcttttcgctgggactttgaacatgtcggggatc

SEQ ID NO: 306248 - DNA, 90 bp, Homo sapiens
ccagcagccaagatggtgaagcagatcgagagcaagacttaattcagtgcacaaatgagatgaatgtgaacatcccacagttggcagaca

SEQ ID NO: 306249 - DNA, 75 bp, Homo sapiens
aggcgccaggccaaggtgcaggagaagcgcccgccgccctggaagaagaggacattcaaccctatgaaaagataa

SEQ ID NO: 306250 - DNA, 83 bp, Homo sapiens
cctctgccagtccccgttcctggattctagagcccagcccaggggcgctggacgtgaccatcatgtacaagggccgcacggtg

SEQ ID NO: 306251 - DNA, 90 bp, Homo sapiens
tccacctggagctgaggaaccggaccccggcagctattttagtccagtggaacctaattcctcaagtctaatggaaaccaatcctctgga

SEQ ID NO: 306252 - DNA, 100 bp, Homo sapiens
acaagtctttggcaccacagggaagttcgtaatctttggagccacctctctacagaacactggaggtgttttggggaacgagtttagtatattaaaatca

SEQ ID NO: 306253 - DNA, 83 bp, Homo sapiens
ctcgcggccaacctgacgcacctgggcatcggtggcgccggccagggtgagaagccctaccactgcaactgggacggctgcgg

SEQ ID NO: 306254 - DNA, 100 bp, Homo sapiens
tcgcgctgggacccacactggcttttaaggaggacacccggacacctggaagctgggaaatggaagatgttggatccagggttgatgacgtgttccaagc

SEQ ID NO: 306255 - DNA, 90 bp, Homo sapiens
gagtttacgtctcttccatctgctgctcacctcagctgcctgggtccccgacgagagccaggagcttctctgcagactgacacaccctcc

SEQ ID NO: 306256 - DNA, 75 bp, Homo sapiens
ctcagtgtcccccccgcaagcattgttgcaagagttcgagaacttgtcttggacaattgcaaatcaaatgatgga

SEQ ID NO: 306257 - DNA, 83 bp, Homo sapiens
ggaggatccacctggagctgaggaaccggaccccggcagctggcagcgaggtcacaggccccacctttgctgatggcgagctc

SEQ ID NO: 306258 - DNA, 90 bp, Homo sapiens
cctcccccgtccggtccctctctccacggtaaggggaaatgagtggcttatactctcctgtcagtgaggatagcacagtgcctcaatttg

SEQ ID NO: 306259 - DNA, 57 bp, Homo sapiens
atactatggtgctccatttgaacataaggtgctactcgtgagcagtagtcgccatcc

SEQ ID NO: 306260 - DNA, 132 bp, Homo sapiens
acgactccacgcagctcgcccttggtaaggggtcggggaggggcacaagctcttctttactagagattttaccaaatgttgcaagaactctggagttcttatggtagtaaaatgccggaaagaaaattctgc

SEQ ID NO: 306261 - DNA, 101 bp, Homo sapiens
aagagaaaaggaattagcagaagacattatgtcaggtctctggggaacaagactcatggaggaaagcagcactaaccgagagaaataccttaaaagtgttt

SEQ ID NO: 306262 - DNA, 51 bp, Homo sapiens
aattgaaagtggactatttaatagctagagtttccaggatggcttctgcat

SEQ ID NO: 306263 - DNA, 75 bp, Homo sapiens
cgcctcgggacccgcggtccccgctcttgctggatgaaacgaggaggaagagatagtgaccgtaattcatcagaa

SEQ ID NO: 306264 - DNA, 76 bp, Homo sapiens
gagagatccaacgaataccagctgattgactgtgcacaatagtactgaacgacacctgggtctccttcccttcctg

SEQ ID NO: 306265 - DNA, 80 bp, Homo sapiens
ctgaactgctccgatcccactagtgagagctgattgggcagaaagtggcccatgctctggcagagggactcggagtaatc

SEQ ID NO: 306266 - DNA, 80 bp, Homo sapiens
cagagggccttgtacgtggaggtgatgctggagacctgtgggcttctggtcgcactgggctacagcatgctggccatagg

SEQ ID NO: 306267 - DNA, 82 bp, Homo sapiens
gctgcccgagttatcgggaccctgttggaaaatagttgtgcaagaactgatgcgatttttaccccttaccccggatttaaaa

SEQ ID NO: 306268 - DNA, 82 bp, Homo sapiens
acagactgagcgcgtccaggcctgacagctctgcggctcgggccctgagattactactttgtaaccagggaggtgatgcagc

SEQ ID NO: 306269 - DNA, 50 bp, Homo sapiens
acttgtaaatcaatcacatattctttagaacatccagtcatggataaaaa

SEQ ID NO: 306270 - DNA, 74 bp, Homo sapiens
gcccgcctccctggccggggcgcagttcggaggttcagccgctgccatggcccagacactgcagatggagatcc

SEQ ID NO: 306271 - DNA, 75 bp, Homo sapiens
ccgcgtcgtcctgtcaacctcgactcagcgctggccgcgctgcgcaaggagatgaaaccaatagagccatggcga

SEQ ID NO: 306272 - DNA, 51 bp, Homo sapiens
ggagaaggaccgcactctgaccccgctggggagggcaatgagccaggggag

SEQ ID NO: 306273 - DNA, 98 bp, Homo sapiens
gggaggatcacagagccagcatgggcatgaactacttggaggaccgtcgcttggtgcaccgcgacctggcagccaggaacgtactggtgaaaacaccg

SEQ ID NO: 306274 - DNA, 97 bp, Homo sapiens
ccgggagcagctggaggaggaggaggaggccaagcacaacctggagaagcagatcgccaccctccatgcccaggtatccctgttgatccgccgggag

SEQ ID NO: 306275 - DNA, 100 bp, Homo sapiens
cacgagtcgggtcctgagaccaggaagaattttaaatcgtttctccaaagacattggacacttggatgatttgctgccgctgacgtttttagatttcatc

SEQ ID NO: 306276 - DNA, 90 bp, Homo sapiens
ccgaggacagagatggcgagcgcccggattggggatgagtatgcggaggacagctctgatgaggagggccggccaaggattgcgaaaagg

SEQ ID NO: 306277 - DNA, 98 bp, Homo sapiens
ctaccccttgcacacctaccctaaggatatgatggatgatatctgtcaggagcaatttctagagctgtcctacttgaatggagtacctgaaccctctc

SEQ ID NO: 306278 - DNA, 74 bp, Homo sapiens
tgggcaccgaccgcacgggcttcaccttcaaatacaggaattgaaatgcaccagcggttgtctaacatagaaag

SEQ ID NO: 306279 - DNA, 100 bp, Homo sapiens
gctttgaggtggcagagttaacactactcttcgttataagctctcgtctggggcaactcagaagaacggtgagcccatcactttctgtgaggagagtttt

SEQ ID NO: 306280 - DNA, 101 bp, Homo sapiens
tgcgcttggggatcctctgtacgcccgttcactgatagtcgtgcaagcactgcagtgttcccattattcgattctttggcagttggtgaaaattactgatg

SEQ ID NO: 306281 - DNA, 76 bp, Homo sapiens
ctgtggagcaaagagctgcatcatgaattcaggagcatcgacctgggaggaaggcaaggtgctcatctttgatgac

SEQ ID NO: 306282 - DNA, 82 bp, Homo sapiens
cctcgtgtctgccaccatcttcgacttgagcgaagttttatgcaagtacaagttgtgcaaagtgaggaagattactgtggga

SEQ ID NO: 306283 - DNA, 75 bp, Homo sapiens
atccccagcccactgggctacgcaggcctcagaagccacaggaacatggcctaggcatggctcagccagcagccc

SEQ ID NO: 306284 - DNA, 90 bp, Homo sapiens
tggtagatcacacccagctgtcacccacgtgtccatcatcgtgcaggtgcgggagctcgaggcggagctggaggatgagaggaaacagcg

SEQ ID NO: 306285 - DNA, 100 bp, Homo sapiens
gatcacaatgtcagaatgtacatagaagaacaagatgatcaagatggctcttcatggaaatgcattgtcagtgtcttcattggctgctctggcatggagc

SEQ ID NO: 306286 - DNA, 75 bp, Homo sapiens
cacaagtcctaccggccgctctgcgtcctcaccttcaagtagacgttacatccaagaggaaataatccaggcaag

SEQ ID NO: 306287 - DNA, 96 bp, Homo sapiens
ctcctggaccaccgggcgctggtctgctcccagccggttcaggcgtgaacggcctggaggagcccagcatcgccaagcgactgaggggcaccccag

SEQ ID NO: 306288 - DNA, 90 bp, Homo sapiens
tcgcagtctccacggcgcaggcccacggtagcgcagccgctctgagaaatgagccgtcagactgctacagcattacctaccggtacctcg

SEQ ID NO: 306289 - DNA, 83 bp, Homo sapiens
acagagccctgcaaaaatactgacagcccacctgaggatattgaccataaggactcatatctcattacaagaagcatcatggc

SEQ ID NO: 306290 - DNA, 75 bp, Homo sapiens
tcgctgtgagacatgtctgagactcctgctcagtgtagcattaagatgcagacaacatatgttttacagagtctt

SEQ ID NO: 306291 - DNA, 90 bp, Homo sapiens
tctcttcaggatctgatctgaatgctgtgaaatcactaggaactccagagggattgtcaatgaggcagatcagattccgatttgacgggc

SEQ ID NO: 306292 - DNA, 98 bp, Homo sapiens
agacttgagtcctggtccttctgcagaggcctgagcaggaaagaccacagcaagattctttcattcgtctcctcctagcctgggggaccaggctcgaa

SEQ ID NO: 306293 - DNA, 74 bp, Homo sapiens
cttcagcgcagtatattactgcagacgttccatcctcagagcagcctgaactgttcctaaagaaacttcagcag

SEQ ID NO: 306294 - DNA, 83 bp, Homo sapiens
caagaagatcatcattaaggacggaggcacggtgcatggctgcctcctaatcccatagtccagaggaggcatccctaggactg

SEQ ID NO: 306295 - DNA, 75 bp, Homo sapiens
cgagatccgggccgtgaacgaaagcagtgacggaggagcttgtaccaccggccatcgttctttccacatacctgg

SEQ ID NO: 306296 - DNA, 82 bp, Homo sapiens
ctcgcgctactctctctttctggcctggaggctatccagcggtgagcttgtcggccacagactgctacattgtgcatgagat

SEQ ID NO: 306297 - DNA, 82 bp, Homo sapiens
agacggattcatttagagctgcggaacaggacgccctctgatggcgccctgcgtccggcagaggaggcgagcatcccgctca

SEQ ID NO: 306298 - DNA, 98 bp, Homo sapiens
cgaccagtctatgaaggaccatccatgtttggaggtttgaagatgccgcatttggattggatgaattccaaattctgcttgcttgctttttaatattg

SEQ ID NO: 306299 - DNA, 102 bp, Homo sapiens
ggattccaagtaactcttatttggttattaatgctgcactggctttagcagcaaaaccacagagtaaactggcccaagagaacatggatctttttaaagaac

SEQ ID NO: 306300 - DNA, 100 bp, Homo sapiens
attgagctgcactgtattcctaatcctgctgcatcacagaagctggaagttctgatgttccactgaaatcacaatggaaagtcttgacttgactggtaag

SEQ ID NO: 306301 - DNA, 120 bp, Homo sapiens
atatcctaaaggagatggaagtgatgtaccatcatgggtagcctttgataaacagctaactgccttctatgaaagcagtcattattcaaggtgatcgtattcttccagtgaaaacaagac

SEQ ID NO: 306302 - DNA, 75 bp, Homo sapiens
cccctggcccgggcatttctgggacagatgtggacgagtgcagctccgggcagcatcagtgtgacagctccaccg

SEQ ID NO: 306303 - DNA, 83 bp, Homo sapiens
cgccgctccttgggctacgcgtatgtgaacttccagcagccggcggacgtgccctctggtggtcagaagatgctgtgctgtct

SEQ ID NO: 306304 - DNA, 90 bp, Homo sapiens
gaagaacatcctggcggcggccagcccgtacatcagataacgaaggaggcccaacttcattcaataaggagcctgacggatttatcccag

SEQ ID NO: 306305 - DNA, 100 bp, Homo sapiens
tcctcatcaccgcggagaccttcactctctccagcaacatcatcatggacacctccaccttcctgctcaggagggtgaggacaaaatcttcttaatcaac

SEQ ID NO: 306306 - DNA, 83 bp, Homo sapiens
gacaccgaccctgagaacttacctgagatttcgtcacagggtcctaaaaaggtggggacgctgtggcgagaagccgggcttag

SEQ ID NO: 306307 - DNA, 90 bp, Homo sapiens
gctccggcgtctccgcagcagatcagggaccggctgctgcaggccatcgacccccagagcaacattcttggtgccaccattgagaactcc

SEQ ID NO: 306308 - DNA, 83 bp, Homo sapiens
ggcgccgccgtggctcgacggagaccagctagggattatatctgtccaagatgcgagtctggttttatcgaggagcttccgga

SEQ ID NO: 306309 - DNA, 82 bp, Homo sapiens
tctgagccccggcggcgcccgggcccacgcggaacgacggggcgaggtactccaaagattcaggtttactcacgtcatccag

SEQ ID NO: 306310 - DNA, 80 bp, Homo sapiens
gcggctggcggagcagaacggattgcaggatgacatggcagagcttctcctcggggagtcgaagctggagcagtacctga

SEQ ID NO: 306311 - DNA, 98 bp, Homo sapiens
gaggcagagagagttggactacacaaagtcttcaaactccaaactagtctcacatgcaactctatggctggttttaacctacgcaaagttaacaaaca

SEQ ID NO: 306312 - DNA, 100 bp, Homo sapiens
cctctttaaaaattccgccgaaaaagagaagacgctttacccgactctttgggccgttatctcacaacaccttccaccatgaccacctcagcaagttccc

SEQ ID NO: 306313 - DNA, 75 bp, Homo sapiens
ggctcactgaaagtctgagaagcaaagtaactgctataaaatctttggcctttaccagagtttgatccaagccag

SEQ ID NO: 306314 - DNA, 98 bp, Homo sapiens
gctaaagtggcatcctgggattttgttgaagccacacaaagaacaaattgcagttgtttgagaaagtgttgtgaagagcgaagacttttcgctcccag

SEQ ID NO: 306315 - DNA, 99 bp, Homo sapiens
ccatggaggccaactggaccgcgttcctgttccagacttaattcagtgcacaaatgagatgaatgtgaacatcccacagttggcagacagtttatttga

SEQ ID NO: 306316 - DNA, 82 bp, Homo sapiens
tcggcggcgccctgcaccgcgcctcgcaaaaaatgagccgtcagactgctacagcattacctaccggtacctcgaagtgtcc

SEQ ID NO: 306317 - DNA, 100 bp, Homo sapiens
gaaggggagccatggcggctgacagtcgggaggagaaagggttttggccaaattgggcgagggcacaaaataaccacttaccccttctcaccgaggaaga

SEQ ID NO: 306318 - DNA, 100 bp, Homo sapiens
tggcaccactgaagtgaccgaatgaggtggctttttctcaagtatattttccagtctgtttggaactcgggaaatgagaattttaattttgggattagat

SEQ ID NO: 306319 - DNA, 73 bp, Homo sapiens
ccacagtgggggtgtgcaaacccgagagaactggcatgtattccactgatgagaacctgatcctttccccact

SEQ ID NO: 306320 - DNA, 75 bp, Homo sapiens
gcagacttctctgtgagctcttcattagggcaccaaagcgaagggtgaaggcaaatgtttgtcccaggagaaacc

SEQ ID NO: 306321 - DNA, 89 bp, Homo sapiens
ggagcaaaagtcaaccagccaaggcaggagtgggaatagctttgcgaaaaatgggcgcaatggccaagccagattgtatcatcacttgt

SEQ ID NO: 306322 - DNA, 134 bp, Homo sapiens
aactgctagtactgaaggctcatcatgatattgtacgatttctggtacagttagatgactacaggtcagtactcctgcatttgtaccaacgaaaactcacgtgctgcttcatcgaatgagtggaaaaggactag

SEQ ID NO: 306323 - DNA, 100 bp, Homo sapiens
ggcgcttcccctttccagagagccagaaagaaggggtcctgatgacaacttaattgaaggtggaggaacaaaatttgtctgcaaacctggagccagaaac

SEQ ID NO: 306324 - DNA, 100 bp, Homo sapiens
cgtaagaagaggtcccaatcccccactctttccgccctaatggaggtctccagtttcgtttgctaatccagactttacacaacctatctcagaagttgta

SEQ ID NO: 306325 - DNA, 75 bp, Homo sapiens
cctgagtcaccagttaactatggtagcccacccagcattggaactgtggctgcaccatctgtcttcatcttcccg

SEQ ID NO: 306326 - DNA, 143 bp, Homo sapiens
ctcgcatcggaagacctggaagccaatgagatcgtgagcctcttgacgtgggtcttaaacacctacacaaggaactcgtaacattcagggatgtggccatagaattctcccctgaagagtggaaatgtctggaccctgcccag

SEQ ID NO: 306327 - DNA, 74 bp, Homo sapiens
gctccccgcgtgcgtcgcggcccacgcccacaccagttatcctattgaaagaggggactgatagctcccaaggc

SEQ ID NO: 306328 - DNA, 83 bp, Homo sapiens
ccggccgagggtggccctaggggcagcgagcaagacagcaagcagactgtggtacagacctccatgagccggtcccaggtagc

SEQ ID NO: 306329 - DNA, 100 bp, Homo sapiens
gttgcctctcataaatggccaaagctgtgacccttatgcaacagtttctctagtgggcccttctaggttctgcggcatgaggaatttgaagaaggctgca

SEQ ID NO: 306330 - DNA, 100 bp, Homo sapiens
aatgcctttgtcaaagaatcgaaacaaaagatgaatgcaaggaaaaggaggtgaaagtaagtgaacacagtctcctgccccttatgctggagcagtttcc

SEQ ID NO: 306331 - DNA, 100 bp, Homo sapiens
cccgggtcctccaggccctatcgatctcgaggacctggaagaagcagaggagccagacatggaggaagacgatgatcagaaagctgtgaaagatgaactg

SEQ ID NO: 306332 - DNA, 83 bp, Homo sapiens
aatgatagccagtccctggagctggtgcacaggttccaggtgtggacactgccagcggctgcagccgacttggaatgacctgg

SEQ ID NO: 306333 - DNA, 100 bp, Homo sapiens
tggtcctgggcctggatcctaagtcctgacctttcatgagggagcagctatgcattgggaagcaatgcagaagacaaaccaattaaaaaacaacttggag

SEQ ID NO: 306334 - DNA, 76 bp, Homo sapiens
gagcggcgcgggctccagactcgccgtggtcaagttcaccatgagaggttgcctagacctggagcagtgttctctt

SEQ ID NO: 306335 - DNA, 133 bp, Homo sapiens
tgaaaagcccagaacttttcctctgttataagagagggagagataaaccaccgcttacagatattgggtgtgcaactgaggaacatggctcaagaaactaatcacagccaagtgcctatgctttgttccactg

SEQ ID NO: 306336 - DNA, 86 bp, Homo sapiens
tagagatgtaccccagcccttatttaattcagctgtcaaccaagaagaaaatgatgcatcctgttgccagcagtaatccagctttc

SEQ ID NO: 306337 - DNA, 97 bp, Homo sapiens
ctgaacctgcggcctgacccagagccacttctcaccgagatgattcatgaaaagtctgggccaacggtcacaaaagttgtcactgttgtgacaacca

SEQ ID NO: 306338 - DNA, 75 bp, Homo sapiens
ccgagtggtctaaggcgccagactcaagatgttacatcctgtccactgcagacaacgtattgactttgtcgctgc

SEQ ID NO: 306339 - DNA, 100 bp, Homo sapiens
ctaaattggctaatcaggctgcagattattttggtgatgctttcaaacagtgtcaatacaaagatactctccccaaggtgttcctagtgctgaccttgca

SEQ ID NO: 306340 - DNA, 100 bp, Homo sapiens
cccgcttctgctcctgctgtccagctggtgcaggaccgggctggccggtggtcactctctttgcttcaacttcactataaaatcattgtccagacctgga

SEQ ID NO: 306341 - DNA, 96 bp, Homo sapiens
agccaggctgggattaaatgccaggtgctaaaatgatgtattttctggacaagtcaaggcaggagaaagcaattgctatagccactagactagatg

SEQ ID NO: 306342 - DNA, 50 bp, Homo sapiens
ctttactggtgttccagccctaaggaagctgccacttttgctagagagca

SEQ ID NO: 306343 - DNA, 100 bp, Homo sapiens
ctgtgtactttgccctcagcatctcccttcatgtctgggtcatgattatttctcaagatgaagctgacagaagagggaaagtgtatgataaatacatgtg

SEQ ID NO: 306344 - DNA, 83 bp, Homo sapiens
cgacacagcctggatctcctccatcctgctggccatgctctacgggacagatgttccaggtcatccagccagagcgtgcgctg

SEQ ID NO: 306345 - DNA, 75 bp, Homo sapiens
tccagaaactggaggagtcccgctcgaagctagtgaagagtgaatctaccaagaacgttggcaatgaaaattgag

SEQ ID NO: 306346 - DNA, 100 bp, Homo sapiens
caagaatacctcggcaaattccgacgtcttgaagacttccgagtagatcttcccatcgacggtcagtgcgcacgttgtaatcagctgaggccatgtcagg

SEQ ID NO: 306347 - DNA, 82 bp, Homo sapiens
tggacggcgagcgcgagcggcgcgagaaatcaaggagaagctgcgccttgatcctgacagcgagatcgccaccaccggtgtg

SEQ ID NO: 306348 - DNA, 100 bp, Homo sapiens
gcggcgtcttatccaaccttgcgctgcatccgctcgacctcgtgaagatccgcttcgccgcacaatcctggaggaagagaaggctcagcaagaagagcgc

SEQ ID NO: 306349 - DNA, 52 bp, Homo sapiens
cgagcgtctgggcgggtggtaggtgtgcaactgaggaacatggctcaagaaa

SEQ ID NO: 306350 - DNA, 101 bp, Homo sapiens
ttggtttgcctatgtcaagatcacaggatattggtgctggaaaaggcaaatactatgctgtcaattttccaatgagagatggtatagatgatgagtcatat

SEQ ID NO: 306351 - DNA, 100 bp, Homo sapiens
tggcagtcctgtgcccttcggaggcttccgtgtgcaggggggcatggcgggccagtttgaatttgaatgccgggctcgtggcgcagacattttagcctat

SEQ ID NO: 306352 - DNA, 136 bp, Homo sapiens
acccgaacttgcgacaagttgccggagccgcggggcgcgggcggcggacagattgaccttcagagcgagagtcttcttcaagatcaaaagccgaaatgcacacatgaaaactcacaggcagcaggaggaacaacag

SEQ ID NO: 306353 - DNA, 100 bp, Homo sapiens
acccttactgtggacttggcttcgcgctctggtgtctctgcagagcctggagaaagttcttgtggaattcagtcacaaggagttgtttgatttctataac

SEQ ID NO: 306354 - DNA, 100 bp, Homo sapiens
ttcttgtcaagaaggaagagttgaccctggagggtatccgccagttctacatcaacgtggaacgagaggagtggtgaaaggacataggaaggagtctggg

SEQ ID NO: 306355 - DNA, 122 bp, Homo sapiens
gcctccaggtgacagcaatcagctggcctggtttgatactgacctgtaaatcatcctttagatcaacaacccctccccgtcgtaaacgctgaggaatgatgtggcaagaatgccatgatgtt

SEQ ID NO: 306356 - DNA, 100 bp, Homo sapiens
agaagaccacacactgggaaacatcattaaatcgtctgtgtgaaaatgtgtgaccctgccaaaggagcagctggccagagaaccatcgctgcccttctgc

SEQ ID NO: 306357 - DNA, 100 bp, Homo sapiens
caagatggacaccgcggaggaaggaaaaccagtagattcccagacatcgcgaagtgaatctgaaattgtgccaaaagttgctaaaatgactgtatctgga

SEQ ID NO: 306358 - DNA, 100 bp, Homo sapiens
cggcttcggagcgggagtgttcgttgtgccagcgactaaaaagagggaaaaggggtcgaggccggtcctgacctgttacaatgaagactgacttgctatg

SEQ ID NO: 306359 - DNA, 82 bp, Homo sapiens
tcctcgatccgcccacagacctcaaattcaaagacctcctgccccccgaggtctgcagtctcctgaacccagcagccatcta

SEQ ID NO: 306360 - DNA, 90 bp, Homo sapiens
ctgcaatccgttcgggagaggctgctgccaaattgaaaaggaatgaagcccaaactgccaaggagtttattaaaatcatagagaatgcag

SEQ ID NO: 306361 - DNA, 100 bp, Homo sapiens
gagcgttttcggggctgtaaagggagaatggcgcatgcgcatattcagggcggaaggcgcgctaagagcagtaatccagtccctcatagcactggtgaat

SEQ ID NO: 306362 - DNA, 75 bp, Homo sapiens
ctccaatgggcctttccagcccgtggtccttctccatattcgagatctttaatctcatgaagtacgacagctaca

SEQ ID NO: 306363 - DNA, 100 bp, Homo sapiens
cagaactactatattcagtggctaaatggctccctgattcatggcctcccagaagttcctgccgaatcgtcttcgtcacccccggggtccgaggtagcct

SEQ ID NO: 306364 - DNA, 98 bp, Homo sapiens
ggaaactggtgaccaagctgcagaattcagagaggaagaagcgaggggcacggcgctgagacagagctggaggtcagaatggcggcagtggagcatcg

SEQ ID NO: 306365 - DNA, 90 bp, Homo sapiens
agtccaacttgcctggaccagcttaatggttctgggtcaaaagcggctggtgctttccgaaagctgctcccgggactccatgagcagtca

SEQ ID NO: 306366 - DNA, 100 bp, Homo sapiens
acctgcaacaatggcagatgtatcaacatcaactggagatgcgacaatgcttcatctgccgtgaattggatgccatttccactaatgaagaggaaaaaga

SEQ ID NO: 306367 - DNA, 50 bp, Homo sapiens
ccgaggccaagatggcggtgctgtcagagagtcacaccccaaagcctctt

SEQ ID NO: 306368 - DNA, 100 bp, Homo sapiens
cctgaagtgcttgatatcacagaggaaactctgcattctcgcttcctggaggttctgtttggattctgcaaagcagactcgtcagaaagttgctgtgaac

SEQ ID NO: 306369 - DNA, 97 bp, Homo sapiens
ttttcgcttcacttttcctggctgtagagcgctttccccctggcgggtgagagtgcagagacgaaggtcaaggtcagcatctcctcgacgatcaaga

SEQ ID NO: 306370 - DNA, 74 bp, Homo sapiens
gccgtgcaggcgctgaagcgcgcgggcaaggaggtgctgctggagggtgtccttcttcacatcattatggaatc

SEQ ID NO: 306371 - DNA, 75 bp, Homo sapiens
cagccaccaaggctctgttgaccagagttcaagccgtggaccccgacattggagaaggaagccaacatccttttg

SEQ ID NO: 306372 - DNA, 103 bp, Homo sapiens
ctgtagaccagctccaacaggattccatggtagctgggatgttagggctcagggtaaagcccacagcttgaagccaagcataaaggagaagctggcaggcagc

SEQ ID NO: 306373 - DNA, 98 bp, Homo sapiens
atttgtggcttaaactcttggcatttggctttgcctttctggacacagaagtatttgtgacagcttggttctacagccattgggatccagacatcaga

SEQ ID NO: 306374 - DNA, 92 bp, Homo sapiens
caccgagagacctccatggtccatgaactcaaccgacgttatgacagtgttataaatcgactgtacactggtattcagtgttactcttgtgg

SEQ ID NO: 306375 - DNA, 98 bp, Homo sapiens
tgcagaaccagatccgggagcacgtcatcgccatcgaagcctggagcattggtaagcgtcacactgccaaagtgagagctgctggagaactcataatc

SEQ ID NO: 306376 - DNA, 99 bp, Homo sapiens
agcccctgaggtggacgagctctcactggtttctgacgtagaagagcttacccctccagagcatctttctgatcttccaccattttcaaggtgtttaat

SEQ ID NO: 306377 - DNA, 98 bp, Homo sapiens
aagcatgtgtcttccccagctctgcagccacatactatccgtttgttcaggaaccaccagtgacagacatcgagagtaaacatgaggttacgatcctg

SEQ ID NO: 306378 - DNA, 100 bp, Homo sapiens
ctaactagacatatgcgtactcattcaggattcactccttctccagttgcacagccacacccttcagctggccttaatgttgactttgaatctgtgtttg

SEQ ID NO: 306379 - DNA, 75 bp, Homo sapiens
tcccgggcggcgcgctgcccgaggggagcaaggacaggtacctaaaacagatccaggacctgcccccaactggcc

SEQ ID NO: 306380 - DNA, 100 bp, Homo sapiens
tactccagccaacactgatcttgcaaactcagatgcgctgaagctagctaaagaagttgatcctcaaggaggttcgtaaagtgaatgaaagcatcaagta

SEQ ID NO: 306381 - DNA, 83 bp, Homo sapiens
ggtacaagctcctgcgggccggcggggcccgcgatgctcccagcccggtgagacctgcctgaatggcgggaagtgtgaagcgg

SEQ ID NO: 306382 - DNA, 83 bp, Homo sapiens
tctgaggcctcctcagccatgtggaactatttaatccagagactgacttcactatagaacccacagttgtatcaatggttggg

SEQ ID NO: 306383 - DNA, 95 bp, Homo sapiens
aaggaatcgtatcgtatgtccgctatccagaacctccactctttcggttttaaaatcaaagatgggaaaatcggagaaaattgcccttccccatg

SEQ ID NO: 306384 - DNA, 100 bp, Homo sapiens
tggagacggtcatccctgtagatgtcatgaggcgagctgggaaaaccatgagctgttttccaagagcttcatctccatggaagtgcctgtcatggtagta

SEQ ID NO: 306385 - DNA, 75 bp, Homo sapiens
gctctgctgtccagctgggctcagcttctgacagacgccaactcctggtgctgccacccgggttaccatggagag

SEQ ID NO: 306386 - DNA, 100 bp, Homo sapiens
tggaaaaagaaactggaatctcccaacagagaaattattattttacacaatccaaagctgcaaggcacaatcctgcagtacgtgaagacgctgatggagg

SEQ ID NO: 306387 - DNA, 74 bp, Homo sapiens
gtcctcgtcagcactgactttcagctatggaatcgcttgacctcagagatgatgtggtgaaaattacaatcgat

SEQ ID NO: 306388 - DNA, 75 bp, Homo sapiens
gaagaagttgcgaaggatccccaacggggaggccaacgtgaagaacccgcgagccgcgcctgggcctggacttag

SEQ ID NO: 306389 - DNA, 89 bp, Homo sapiens
gggatagctggttaccagaaggacttctttgcagggccagtggtttctgtcagattttcgccggtttctttctcagtcacatatgaaat

SEQ ID NO: 306390 - DNA, 73 bp, Homo sapiens
tcggtccatgactctggagatccgagaaggaaggttggatggcaagcatgtggtgtttggcaaagtgaaagaa

SEQ ID NO: 306391 - DNA, 122 bp, Homo sapiens
ccagtagtgcccgccccacccgcatgctctttgtcactccccggcggcagcacgaaagtaccattcaaggcggataagaaggcggcacaagaaaagatgatccagcaggagcatgagcggca

SEQ ID NO: 306392 - DNA, 101 bp, Homo sapiens
tagatgataaagatgatgatatccttctcaaccttgtgggatgtgaaaactctgttactgaagcacctgtggaatcctctcaagaggaacagtcattgtgt

SEQ ID NO: 306393 - DNA, 99 bp, Homo sapiens
gtgtggccttagcgatctatattccctttccagaagatgattccaacgccaccaattccaacctggccagtcttcagagacctgagattaaacttgaat

SEQ ID NO: 306394 - DNA, 101 bp, Homo sapiens
ggcctcggcgattatggacccggccgaggcggtgctgcaagagaaggcactcaagtttatggtacatatccatttttaaggcaactgtaaaagatgacatg

SEQ ID NO: 306395 - DNA, 100 bp, Homo sapiens
ggtcagtagctggatcctttgataatgaaggcattgctatttttgcacttcagttcacatactatttatggaaacttgtggtggagaatgttgatgtgtt

SEQ ID NO: 306396 - DNA, 100 bp, Homo sapiens
ttgacatttaattttagggtcctttatatagaagggagaaacggtgtgctgctgaggactgtcttggaccctgtcactggggatttgtctgatactcgca

SEQ ID NO: 306397 - DNA, 87 bp, Homo sapiens
gactctcaccagtgcgcatgcgtggctctccggcaccggatgaccagtgtcccagtgaaggaacgagtgaaggtgtctcagaactgg

SEQ ID NO: 306398 - DNA, 74 bp, Homo sapiens
atgccaagaagatgagaccgggggaggcgacgctaagttgctgatcgtggcgacatgcgtcgggatgtccagga

SEQ ID NO: 306399 - DNA, 75 bp, Homo sapiens
cggcacctgacggcgtgaccgacccgagccgagatgtgaatacagctgtgatggagttgctcatcatggcttacg

SEQ ID NO: 306400 - DNA, 98 bp, Homo sapiens
acatttgtgggaagttgtattcatcaataatgaaatgctgactaaggaacaaggtgcagtagacattgttgcaatcatgatcggcaatctgaaaggca

SEQ ID NO: 306401 - DNA, 82 bp, Homo sapiens
ctgggagctgacttcttggtgcactacggccacagttgcctgagaattacatgaacgacagccttcgcaccgacgtcttcgt

SEQ ID NO: 306402 - DNA, 75 bp, Homo sapiens
cacctttgctgcaaaaaattacgggtcttttccaatggtcaccttggaagtgaagaatatgatgttcctccccgg

SEQ ID NO: 306403 - DNA, 80 bp, Homo sapiens
cttctgcatccttaactgagaatgaggatgcctttgtggaactgtacggccccagcatgcggcctctgtttgatttctcc

SEQ ID NO: 306404 - DNA, 95 bp, Homo sapiens
agacaatgaccagtggctgagcaccgtctcccagtacgaccgggacaagtactggaaccgctttcgagacaattccttgtgtggatatcagatcc

SEQ ID NO: 306405 - DNA, 98 bp, Homo sapiens
ggaagccatcgcggagcatgctaaggacacaggtgaagatgatgatgtgcctgcagatatggttgcagaagaatcaggtcctggtgcacaaaatagtc

SEQ ID NO: 306406 - DNA, 50 bp, Homo sapiens
gagaaccgcagggactggccgagtgttgacctaaccaatgaagaaacaac

SEQ ID NO: 306407 - DNA, 75 bp, Homo sapiens
agaacccagccatgtggtcagcctgatctcggacttcacagccagcagaactgttgaaaattggtgtcctcattt

SEQ ID NO: 306408 - DNA, 83 bp, Homo sapiens
aattctcctgccaccgcgtggtgcttgccgcagccagcaactatttcagtttgcgtgtgaacttggacatgggcaaagcggtg

SEQ ID NO: 306409 - DNA, 98 bp, Homo sapiens
tccccagttgctgtacgagagcaagctctataagattcttcaaggtggggttggcatcccccacatacgaaatgatcactgcccccagtgaatatggt

SEQ ID NO: 306410 - DNA, 75 bp, Homo sapiens
cttgtttgtggatcgctgtgatcgtcacttgcaacatgtcatggtttagtggcctcctggtccctaaagtggatg

SEQ ID NO: 306411 - DNA, 100 bp, Homo sapiens
ctccaacccatcaaatcaatggattttttaccattgtttcatcaacgtctaagaaacttggagaactccaggcgatgacccaggatgcagccaggggcca

SEQ ID NO: 306412 - DNA, 74 bp, Homo sapiens
ggaagaggaaagcaaaggcgtcaggaatggttcttcctcagattaagcctgatcaagatgacaacctcccaaaa

SEQ ID NO: 306413 - DNA, 100 bp, Homo sapiens
tttcaacagctgaggcaagccaagtgatcattaataaagcttttcttggttccttcagtggtgttggtagtaaaatgaaaaagcttgtggtgaagggggg

SEQ ID NO: 306414 - DNA, 80 bp, Homo sapiens
gatgataatgttttcagcagcaatttgccctcagaggaaaagctccagaaagctgtgacaaaactgaagcaacttgaaga

SEQ ID NO: 306415 - DNA, 75 bp, Homo sapiens
gcgccgtgctgcccgtgtggagtgcgcacggggaagatacaaactggactctcaggacaaaacgacaccagccaa

SEQ ID NO: 306416 - DNA, 75 bp, Homo sapiens
tcaggttcacgccaacagtacctcattgctctttggcgactcttattggaactttatattgctgttggaatatct

SEQ ID NO: 306417 - DNA, 75 bp, Homo sapiens
caggtctctgtcgagcagcggacgccggtctctgttccgcaggatgttggagaatattggcaactttattaaagc

SEQ ID NO: 306418 - DNA, 86 bp, Homo sapiens
ctggagactttcacaggaatgacagcatctatgaggagttttatcttcaagacactaaaagtagtaatggtacttttataaatagc

SEQ ID NO: 306419 - DNA, 100 bp, Homo sapiens
ggaagatggcggaacaggctaccaagtccgtgctgtttgtgtgtctggtgtctatgaaccagatagaaatgcattacggaggaaagaacgagaaagaaga

SEQ ID NO: 306420 - DNA, 100 bp, Homo sapiens
cctcgtcccggggcagcagcggctctcctgcgcacgccgagtcctactccagcggcggcggcggccagcagcattactctactgactggcagagacagga

SEQ ID NO: 306421 - DNA, 75 bp, Homo sapiens
taccagtacctgctgtgcctggggatgcccccggccctgtgcattgctatggcctgctgtgcagttagccaactt

SEQ ID NO: 306422 - DNA, 75 bp, Homo sapiens
tgctcatggaagatccaaatccggaggaaaaggattagtagatattcagcctcattgggtatctgccctggcttg

SEQ ID NO: 306423 - DNA, 76 bp, Homo sapiens
ttcttggggagcttgctcactatgtgctcctctgacgtgccgttactcagagatcgccatggatcggatgaagaag

SEQ ID NO: 306424 - DNA, 87 bp, Homo sapiens
cctttcagattctttctctggaactgaaccagaggttcacaaaacaagtgtagtagtacctgagccgcaacgtggtacacagtgtcc

SEQ ID NO: 306425 - DNA, 95 bp, Homo sapiens
ccctggccttctgtatcttcatggtgcggctcatcttcgagagtgagaaagatcagtctaaagaaaaggagaagaaagtgaaaaaaacaattcct

SEQ ID NO: 306426 - DNA, 82 bp, Homo sapiens
gctccctctcagcacctgggcggacgagagcgcctgctcgctgtgcccccgggttatgacgacccccaataaaggaaacaag

SEQ ID NO: 306427 - DNA, 83 bp, Homo sapiens
ttgcgccatcatcctcatcatcatcatagattccttcacttgtccctcaccaaggacgggacaaacagaacccagttgtgacc

SEQ ID NO: 306428 - DNA, 90 bp, Homo sapiens
tcgcttgcaaaccatacctcaattgcagaattgatcaaagatgtcactagtgacattgcattccggttccttaattatgttcagtcccag

SEQ ID NO: 306429 - DNA, 99 bp, Homo sapiens
gaagaaatcaacctgctcaccggggagtctgatacacagataatgatttttccagaaggaacttgtacaaacaggacctgcctaattaccttcaaacct

SEQ ID NO: 306430 - DNA, 75 bp, Homo sapiens
ccaggcagcattaaaacttaagcagtattctaccttgtaaatactgttatttgtatatactgtaaatgatgacat

SEQ ID NO: 306431 - DNA, 75 bp, Homo sapiens
ggcaggtgacagtctgcatgtgcagttttcagttctttaaggaaaaacagtagtgctctgcatagtttactgaaa

SEQ ID NO: 306432 - DNA, 76 bp, Homo sapiens
gtgccgtctacaggactgatgactgctgctctagccggcccggtccttggactgaaagaatgcaccaggggctcgg

SEQ ID NO: 306433 - DNA, 50 bp, Homo sapiens
gtgtccagctccagactgtgggtggacccccaaaagtacaagggcatatt

SEQ ID NO: 306434 - DNA, 101 bp, Homo sapiens
ctcggccgaccagggacctgcccgcctgcggctgctccggagctccactggttcaacagcctctcctccagtttcgaccccagtcacaggacacaagagaa

SEQ ID NO: 306435 - DNA, 75 bp, Homo sapiens
gcggacgctcggtcccgcgctgcgcatccccgcggacgccacagcgctgaccgaccagctgggcatgttcacgca

SEQ ID NO: 306436 - DNA, 100 bp, Homo sapiens
attcagcttgctttactctttcattgttgggacatgtatattggtcatctcgatgcactcctgaggggcttggttctgggaaaactaggaaaagcaggac

SEQ ID NO: 306437 - DNA, 102 bp, Homo sapiens
cagaatgagacccgttctccctccagaacatacacttacatctctagataacagtctgcactttcacccgtttcagaggcgacaggaagaagggtattacag

SEQ ID NO: 306438 - DNA, 100 bp, Homo sapiens
aacatggaacagctgcttcagtctgcaagtatggagctcaagttcttaattattcagaatgctgcggttttccaaggtcacagtgctgtcgatatcacca

SEQ ID NO: 306439 - DNA, 100 bp, Homo sapiens
gatatttattataagactcttgaccagtctgagttcactgacaccatcctgtccgtgcacccctctgatgtgctggacatgcccgtggacccaaacgaac

SEQ ID NO: 306440 - DNA, 88 bp, Homo sapiens
gctcctttcctggcagcaggggtttcaatgggagggtaccaaaaactgtggaagagttatgtgaaacttcgccacctcctagcaaata

SEQ ID NO: 306441 - DNA, 75 bp, Homo sapiens
acttctccctgagcctcctgcagatcatggacgtggaattacatgaatgacagtcttcgaaccaatgtgtttgtt

SEQ ID NO: 306442 - DNA, 74 bp, Homo sapiens
ctgaaaggaggaagagaagcagcagctgaggagacagaaagttcgacacagcaaactggctgagtctgtggaaa

SEQ ID NO: 306443 - DNA, 100 bp, Homo sapiens
ggtgatttctgcatttccatctgagacactgggtcaaggagtaagcagaggataaacaactggaaggagagcaagcacaaagtcatcatggcttcagcgt

SEQ ID NO: 306444 - DNA, 75 bp, Homo sapiens
ccctacagatctgtgggactggtttgaatccttccttgatgatgaagaggaagaggagttgtacgcatgtcagag

SEQ ID NO: 306445 - DNA, 111 bp, Homo sapiens
ctctggacagggacagtgggcagtgctcccggaacacaagctgtgaaacactaggaactgtggctgcaccatctgtcttcatcttcccgccatctgatgagcagttgaaat

SEQ ID NO: 306446 - DNA, 82 bp, Homo sapiens
atcttgagaaaaaattcctggaaaacccaggaacaggcctttgagagcagccagaagtacaaagaggggaagtacatcattg

SEQ ID NO: 306447 - DNA, 82 bp, Homo sapiens
ccgcatctgcctccctgccccagcccatcctctctaaccaagcttccgccctgcgctgccagtctcctacctgcaggccgag

SEQ ID NO: 306448 - DNA, 82 bp, Homo sapiens
ctcagggatcaaagagcaaacagattcagtggcctgcattgtgtgaagcagtatgcagatgttgaaggattctaatgcaaga

SEQ ID NO: 306449 - DNA, 100 bp, Homo sapiens
aaagtattttagagtccaccagatcatccatgtgagtgaccatgcagcaaaagaaggagggtcctctcagtgattaagggcccaggagacaccagcgggg

SEQ ID NO: 306450 - DNA, 97 bp, Homo sapiens
gttttttgctatgactgtgctattttacatgaaaaaaagggagataagatgtgtccagggaactttatattgctgttggaatatctggagccatcca

SEQ ID NO: 306451 - DNA, 87 bp, Homo sapiens
ggcaagtgggggaggagcgttccttgtcctccctctgcacaaggtgaaaggtgtagcagtcactcggcctacacccacagcatcgac

SEQ ID NO: 306452 - DNA, 75 bp, Homo sapiens
tccagcactggactcatggaggctgagcatttattcagctccagtgatccacaagctcagaaatacatcgcggaa

SEQ ID NO: 306453 - DNA, 74 bp, Homo sapiens
ccagattctgccaattcgttttcaggagcatctccaggtacttggaaaaatggacaaggattgtgaaatgaaac

SEQ ID NO: 306454 - DNA, 100 bp, Homo sapiens
ctcccaccgtgattctgaggcctccccaaccatgtgcaatttgtactaatggtcacttgatgtgcgctggctgttttatccacctactagcagatgcccg

SEQ ID NO: 306455 - DNA, 100 bp, Homo sapiens
ttgaccctgttcaggcctcggtgaagattggatttgtcctgtatccccccagtggaggtcctgcatgggatctgatggatcatgaaaatattttgtttct

SEQ ID NO: 306456 - DNA, 116 bp, Homo sapiens
cagcagggaccttgggtcacatgacaatctctctccaccttttgtcaattccagaatacaaaatctcccttgagtttagaaatctggctgagaaataccaaacagtgattgccgac

SEQ ID NO: 306457 - DNA, 100 bp, Homo sapiens
gacgcgagcagcaccagaatccgcgggagcgcggctgttcctgcccacaatgattctgagctaaaacacaaaataaaaaccagattcattgccaccagcg

SEQ ID NO: 306458 - DNA, 75 bp, Homo sapiens
caagcggtggtgaggcaggctcgcctcctccagctgttgttgctgctgaggatgccagcccccatcagattgcgg

SEQ ID NO: 306459 - DNA, 50 bp, Homo sapiens
gcacggacggtgttggttgggacgaagttatacggaagcgtctcctcatt

SEQ ID NO: 306460 - DNA, 119 bp, Homo sapiens
acagcacctcatcccctggatgggggaccacaagatcctcatcgacagacttcccaagtaagaagcggaagaggagccgctggaaccaagacacaatggaacagaagacagtgattcca

SEQ ID NO: 306461 - DNA, 100 bp, Homo sapiens
ccctgcgccccgctctgctgtgggcgctgctggcgctctggctgtgctgcgcggcccccgcgcatgagtttgccagatccggcccggtgcctgggttcca

SEQ ID NO: 306462 - DNA, 100 bp, Homo sapiens
cggtggttgaccagaccactttgatgaaaaagtaccttcagtttgtggcagctctcacagatgtgaatacacgaatggaagttggatacactttgtgact

SEQ ID NO: 306463 - DNA, 131 bp, Homo sapiens
tcgaagcaacagtgccataaagaaatgggctagatatttccagaggctgcaatctggaggcgtttggaggtaagatgcttataagacccaggtcaggattgacaatgagccagcttacttggacatcttgg

SEQ ID NO: 306464 - DNA, 100 bp, Homo sapiens
cccgatatatgttctctaggccttttagaaaacatgcatgttccaccttccctcttcacggaacctaatgaaatatcccagtatttaccaataaaggaag

SEQ ID NO: 306465 - DNA, 82 bp, Homo sapiens
ccgttgacaaggcactgctttttcatgacgggagaggctgtcgatgctgaggcacgagagaatttgctcctgctcctccaga

SEQ ID NO: 306466 - DNA, 75 bp, Homo sapiens
tactcaggcggcagctcgggcagggggtggacgtattggtgaccacagctggcggcgtggaggaagacctcatca

SEQ ID NO: 306467 - DNA, 80 bp, Homo sapiens
tcagccactaatgaagttgggaactcagaccgtaccttgcaacaaggaacgtctggtcctaaccagtgagcactggttag

SEQ ID NO: 306468 - DNA, 75 bp, Homo sapiens
attggaaggaggagattctgaagataaggagacctagaggatcaagacataatgggagcatttttagacaagcca

SEQ ID NO: 306469 - DNA, 82 bp, Homo sapiens
ggccagggaaccctggtcaccgtctcctcaggtctcctccgggctggggctgagcaagccctcggagtgaccgtgggtgaca

SEQ ID NO: 306470 - DNA, 90 bp, Homo sapiens
aagcagtggccgcccgggcggcgggatccactgtccggcagagatggttccaatccctatacattgaagctttgcttttctacatcatcc

SEQ ID NO: 306471 - DNA, 75 bp, Homo sapiens
caatggcatttacagaaagagtcaacagcagtggcaacagttggttgaatctggcgatgtggaacccatggatat

SEQ ID NO: 306472 - DNA, 78 bp, Homo sapiens
aaaagtgcccagaccaaggaaaaatccaagtgatggagcagcattttcaggaaaatgcaacatggcagcagcaatgga

SEQ ID NO: 306473 - DNA, 100 bp, Homo sapiens
agaagctgtggatgaatttgcttttctggaagctctattatcaagtcctaaattttggaatgattgtctcatcggcactaatgatctggaaggggttaat

SEQ ID NO: 306474 - DNA, 75 bp, Homo sapiens
ggattgtgacatatcgttggacccagaattgagaactgggtagataaagctgaaaaacaggctcttctctctgaa

SEQ ID NO: 306475 - DNA, 80 bp, Homo sapiens
gatgccaaacgagattggggccatgccaaggactatgtggaggtcagcccaaggccaaccccactgtcactctgttcccg

SEQ ID NO: 306476 - DNA, 75 bp, Homo sapiens
agattgcagttatctgtccagaaaccagagcaagttatcaaagagtatggtggtgatattacccgaaaaatgaag

SEQ ID NO: 306477 - DNA, 75 bp, Homo sapiens
cagacactgggtctgactatttctgaacaacaagcagagttgattcttcaaagaatggaagcttcttgcctagag

SEQ ID NO: 306478 - DNA, 92 bp, Homo sapiens
gaaaagaacggagcttgaagcaaagctgcaggttttaaaggagtggacgcttctcttgtgagccagctggaggtcttacctctttgactgaa

SEQ ID NO: 306479 - DNA, 100 bp, Homo sapiens
ggaacggggctcccaggacctccactaatcaccagaacaaaatgtgcagacaaaacctgctacaaccccctcttcaactacgaggacatgcaggagatca

SEQ ID NO: 306480 - DNA, 100 bp, Homo sapiens
ctcggatcgcctggagaggcactcggacctgatatatttttgccatcatggatcagtttggagatatattagaaggtgaagtggaccattctttctttga

SEQ ID NO: 306481 - DNA, 100 bp, Homo sapiens
ttgggctgtatggatccatccacgggcccaccgactaccaagtgaacatccagatcatgtttgagaccttcaacaccccagccatgtacgttgctatcca

SEQ ID NO: 306482 - DNA, 51 bp, Homo sapiens
caacatcagccgagccgcggggaaataagcgggttttgaaaacaaaaaaaa

SEQ ID NO: 306483 - DNA, 100 bp, Homo sapiens
gcccgggctgcccggctctcgcaggcccccccgcgccgaccgcgttcctatggacagacgcacagacacctgcaggtgaggaattttaaattggaacaag

SEQ ID NO: 306484 - DNA, 101 bp, Homo sapiens
tggcactctggcgggcataccagcgggccctggccgctcacccgtggaaagtacaggtcctgacagctgtggaatgcagtagccctctgggcctgggatat

SEQ ID NO: 306485 - DNA, 100 bp, Homo sapiens
aatgaaatcaaaaggcagaaccagtcccttgtgtatggcaaagtggatagcttctggaagttcttcgtgccatgaaggaggacagtgaaaaagttccgag

SEQ ID NO: 306486 - DNA, 75 bp, Homo sapiens
aaacagtggtatcgacttatcaaaggaacggaaaacagttcttccttcaaagcatgcagtacctgaagtaataga

SEQ ID NO: 306487 - DNA, 101 bp, Homo sapiens
caaaggctttgccgcagttcatcttcctccctgtgtactttccatttgccttcctggtagccggatcgagctgggagatgtgacaccacacaatattaaac

SEQ ID NO: 306488 - DNA, 83 bp, Homo sapiens
gcaggcaggcgctgagaaggacgcgcagtccatctctctcagcactgccagtgaaagatgtagaagataaacctgaacaacaa

SEQ ID NO: 306489 - DNA, 90 bp, Homo sapiens
caggccagtcatgctagaacgcaagaaagtgaaggggggctccagcaagctgacaggccgtgtccttgctctgtcctttgatgcccctgg

SEQ ID NO: 306490 - DNA, 100 bp, Homo sapiens
tcagacagatcgccggggaggcagcgcgggatcccagcctcaggcgtgcgcggacggtgtgcggttgtctgagggaagtcaaaagcatgcaagcctacag

SEQ ID NO: 306491 - DNA, 50 bp, Homo sapiens
ataagttggaggttctggaatctcaggccttagattttagtgatgatgaa

SEQ ID NO: 306492 - DNA, 83 bp, Homo sapiens
acttcgccccggacgagctgacggtcaagaccaaggatggcgtggtggagatcaccggtgtctgtgacctttgatgatgtggc

SEQ ID NO: 306493 - DNA, 83 bp, Homo sapiens
ggctgcctgttactcctggtgttgagatcctgaaggagctagacgagtgctacgagcgcttcagtcgcgagacagacggggcg

SEQ ID NO: 306494 - DNA, 75 bp, Homo sapiens
ctaggacatgaacaagctatcctttcatcgaggacagcaaacattatgagaagatggcgaattagaagatggtga

SEQ ID NO: 306495 - DNA, 98 bp, Homo sapiens
cgcgtctcggaaaccggtagcgcttgcagcatggtttgctgggatgggaaacctgctcaaagtccttaccagggaaattgaaaactatccacactttt

SEQ ID NO: 306496 - DNA, 75 bp, Homo sapiens
gaaaccagtcatcactgcatctttttggcaaaccaggtcaccatcagaaaagctaagtttgctgtatagtgagga

SEQ ID NO: 306497 - DNA, 96 bp, Homo sapiens
tgttataaagatgaggatgaagagctgtggcaagaagatccatatgagtatataaggatgaaatttggtctgtagttactgtggaatcaataagcc

SEQ ID NO: 306498 - DNA, 83 bp, Homo sapiens
attcaaggatgatccagttggaccttttggacaggaaagtgtaacatcagttacagagtctttgatttgcgtcagtgtcatcg

SEQ ID NO: 306499 - DNA, 114 bp, Homo sapiens
agctggggcttccaaagctgggaatcctattttttattatgctgcacggggtgtcatggagaaactccagctgggcccagagattctgcagcgggaaaatccaaggcttattta

SEQ ID NO: 306500 - DNA, 98 bp, Homo sapiens
aaggactgactgaaggcctgcatggattccatgttcatgagtttggagataatacagcaggctgctggtggtctacccttggacccagaggttctttg

SEQ ID NO: 306501 - DNA, 90 bp, Homo sapiens
aactaaaggcctgggcctgagaactgaatcaggtggagccgccaccaaaatgcagattttcgtgaaaacccttacggggaagaccatcac

SEQ ID NO: 306502 - DNA, 90 bp, Homo sapiens
ctcagccactccctagcactcacaggccacgtggtgcttgcgcagtgccgagtgctgatggccagtgtgggggccgcgtgccactcggac

SEQ ID NO: 306503 - DNA, 82 bp, Homo sapiens
acactgtgtgctgtgagagctgcgccgcccagctacagctgatcttgcatctttaatggataaaacatttgagagaaagttg

SEQ ID NO: 306504 - DNA, 95 bp, Homo sapiens
agagaagtcacaaaacagcagatttcccaagagcagcggaaaatgatccagtcacagatcaagaggaatggtgtttggaccggccaatttggggg

SEQ ID NO: 306505 - DNA, 73 bp, Homo sapiens
cagtgtttccgtcagtacgcgaaggatatcggtttcattaaggagtcaaattgactttatcagctttaatcga

SEQ ID NO: 306506 - DNA, 51 bp, Homo sapiens
gagcagccttcagggagcgtggagacagggcctgatatagaacaattgaca

SEQ ID NO: 306507 - DNA, 100 bp, Homo sapiens
acttctcactgtgccacgcagggtgccctgcagccacggagacgaatgtggacggccagaaggacttaaccaccaccatgtcgagcaaaagaacaaagac

SEQ ID NO: 306508 - DNA, 100 bp, Homo sapiens
cctgaccagaggaaagtcacctgcgaagggggcaatggcctgggctgtgggattgccagcagatggatctgggacattgcatgggacagctgggtcgcag

SEQ ID NO: 306509 - DNA, 74 bp, Homo sapiens
ttttgtggatccaaataaacagaatttgattgctgaggtttcaaccaagatccatatcatagattttgacgatg

SEQ ID NO: 306510 - DNA, 73 bp, Homo sapiens
tcagatcctagagcatctgaaaaccctggccaaggacgaggatatacacatgacaccatccactgacttctat

SEQ ID NO: 306511 - DNA, 82 bp, Homo sapiens
tcgatatgcagaaacactctttgacattctggtggctggtggaatgctggaattgtattcctattgaagagcagcttcagtt

SEQ ID NO: 306512 - DNA, 75 bp, Homo sapiens
ggactgcgccgcgtcttcctcaaggaactcgaatcatttatgacagaaagtttctgttggatcgtcgcaattctc

SEQ ID NO: 306513 - DNA, 83 bp, Homo sapiens
ctccgtcccccgcgggtctgctctgtgtgccatggacgggtgacttaagagattaaaattaatttggttgctgttggttctga

SEQ ID NO: 306514 - DNA, 100 bp, Homo sapiens
tttcttccagcttctgctgtccttctttgtggagagcaaggtctccacctctgggcaggagagttgccgaccacctcgggggtgctttctctgcgcttga

SEQ ID NO: 306515 - DNA, 100 bp, Homo sapiens
ttgtttgtttttttcgtaaacatctgggtgtatatcaaacggcaagatgtccagtaatgtcccggcggatatgatccctcatgtccatgatccggaaacg

SEQ ID NO: 306516 - DNA, 83 bp, Homo sapiens
aaccacccaagtctgcaatcttaccagggaggccaagcgaccacccaaagaaggcctccagtacagcccagtccaggggggag

SEQ ID NO: 306517 - DNA, 100 bp, Homo sapiens
tctcagtcagtcctgcctcatcccagccatgtcatcttatctacgaaatgattcagcaaagaatggctcaagaagtactgacacatttaaaggagcatcc

SEQ ID NO: 306518 - DNA, 99 bp, Homo sapiens
cgagaaccacctgatggctaatggatttgacaatgtgcagtttatggtatttaccttgctgtggattgctgactggatggtccatcacttctggaggaa

SEQ ID NO: 306519 - DNA, 98 bp, Homo sapiens
ccgcggccctgcgcagctgccccatgtgccagaaggagttcgcccccaggcctctcttctgtggaaactctgaagccgaccagttgggcaaaatcttt

SEQ ID NO: 306520 - DNA, 75 bp, Homo sapiens
cggggcggctggcgccgggggccggggagcgccaggaagggaaaaggccgaggcatcagcgtgtgaagaccgcaa

SEQ ID NO: 306521 - DNA, 100 bp, Homo sapiens
cttcagcatcgtcacggacactcctgagctacagagactgaagaggactcaggagcaaatcagtaatgaggcaggtggaagtcatcataaagtttctgtt

SEQ ID NO: 306522 - DNA, 100 bp, Homo sapiens
ttgggaattttcgcctgcttgcagagctttccagcccgtttgtgaatcagcggtgggcataccactgagatcctgaggctgcttgggagcttgtccaatg

SEQ ID NO: 306523 - DNA, 90 bp, Homo sapiens
agagagtagcagtaacggcacagcctctcagtcaacatctccttcgcagccgcgcaaaaaaagttccacttccaaacatgagttccaggc

SEQ ID NO: 306524 - DNA, 90 bp, Homo sapiens
tagacctgaaaatttcttccaaggttgatgcatctctctcagagaattctgcttggtcagaatcgtgatggcattgtgttcagcactgat

SEQ ID NO: 306525 - DNA, 102 bp, Homo sapiens
cggtgacagagtggagccatggctagagggcagcgggtggcatgagacgtgggaacatgggccacctcacacggatcgccaacgcggtggtgcagaacctgg

SEQ ID NO: 306526 - DNA, 97 bp, Homo sapiens
cagccggctgcgtccaccgcagcggcctcgctctttgagtgctcccggatcaaggccttggcaggtggtcaagtaccccctgcacgccatcatggag

SEQ ID NO: 306527 - DNA, 100 bp, Homo sapiens
cttcaaaggaccggacccagagaagaggaaaactctaccggtgcaggtcttcatcctccaggtccacctttagcaagacctattctcccccgagaacgag

SEQ ID NO: 306528 - DNA, 100 bp, Homo sapiens
ctctttcgctctttggactaatgggagttgcttttggaatgaatttggaatcttcccttgaagagggttcccttctggagaagagtcaccgggtttggtt

SEQ ID NO: 306529 - DNA, 98 bp, Homo sapiens
gatggctcgtgcatctgtgaacgagtggcctccattgtagacgtttgaggagccgtgccatgtcaactcctcccagctcatcacgtgccgcacacctg

SEQ ID NO: 306530 - DNA, 99 bp, Homo sapiens
tagattctgacagcgatgatgatcccttggaggcattcatggctgaagtggagtatccggctgctttgatgaacctgggagccattctgcacctcaatg

SEQ ID NO: 306531 - DNA, 90 bp, Homo sapiens
cacttgtcggggaccgcgagggcacacctgtctccattgttgtcactacgctccattccagtgattaatggaagagatttacagaaccct

SEQ ID NO: 306532 - DNA, 101 bp, Homo sapiens
ctgtgatattgctaatccagcctcgcttgatgaaatggctaaacaggcaacagttgtcctcaattgcgtaggaccatatgtccgtggttcagaccctgtat

SEQ ID NO: 306533 - DNA, 100 bp, Homo sapiens
gacacggccagatctgccctccagttatgcaatggtctctgcaagatggtttattcttgaattggacctttttaagactgacaaatgctggtacttcatc

SEQ ID NO: 306534 - DNA, 112 bp, Homo sapiens
ctgcggaccacggttggtgtcgacggatctctttacaagacgcacccacactgattggggccctggtcctgtctgtgggcatctatgcagaggttgagcggcagaaatataa

SEQ ID NO: 306535 - DNA, 83 bp, Homo sapiens
ccaaattcgcctccatctgtaccatggtttacccaaggtccagcctagcccctaggcaccatgtcggacagtgatctaggtga

SEQ ID NO: 306536 - DNA, 50 bp, Homo sapiens
cagctcattcacatggctagtgccttggtttacagagagccagtgcaaga

SEQ ID NO: 306537 - DNA, 101 bp, Homo sapiens
aggaaaaacccacaaacatgttcacaacgggcatgaatgtagccgtgagttcaggcagtgggcagaatgatctggaaaagatgaccagcatcctggaagct

SEQ ID NO: 306538 - DNA, 83 bp, Homo sapiens
cttagaccaaataaagagaaaatagactttcttcttgaggcagtatttggcagtcgtattcagagataaacccctggagctat

SEQ ID NO: 306539 - DNA, 73 bp, Homo sapiens
gctactctctaagcgtcaccatcctgctcctgaacttcctgcgctcgcactgaaatcttcccaaggctgcaga

SEQ ID NO: 306540 - DNA, 100 bp, Homo sapiens
ggcgactgtcattcacaaccccctgaaagcagaaagcatgggattatggcaaccacagaatctcagtagtacaagttccattcagttttttctgaaagaa

SEQ ID NO: 306541 - DNA, 51 bp, Homo sapiens
gcttctcagactatccacctttggatattgatgatgttaagaagttcaaac

SEQ ID NO: 306542 - DNA, 74 bp, Homo sapiens
gaagatcctggtgtcgccatgggccgccgccccgcccgttggcccgtgaaggtggagcggacccggaagcggtc

SEQ ID NO: 306543 - DNA, 99 bp, Homo sapiens
atcttgaaggtttacacttgtcaacttcctcttcagtcatcagtcataatgcaaggcaaggtccagccgttccacccggcatgcaagcttatggagcag

SEQ ID NO: 306544 - DNA, 123 bp, Homo sapiens
gcggcatctacgtctgccatgtcagcaatgagttctcctcaagggattctcaggtcactgtggatgttcttggaggctgtaggagtgcaattggaacctgagcgcttggtcaagatcctagag

SEQ ID NO: 306545 - DNA, 100 bp, Homo sapiens
acagttgttgcagcaagcgattcagggtatgcagaagttggctagtcaatacctgaagagagattggcctggagtaaaagctgatgatcggaatgattac

SEQ ID NO: 306546 - DNA, 103 bp, Homo sapiens
actcattcacttctagacgacaaaatgcaaaaaaggaggccaaagactttcaattctgtggtgttcttggtcacacatttatggagtttctgaagggcagtgg

SEQ ID NO: 306547 - DNA, 75 bp, Homo sapiens
gtggcagtggactcggctccggaggtggcagttaaggctttccttaaagtttcccatgtctcaatggactcctga

SEQ ID NO: 306548 - DNA, 83 bp, Homo sapiens
ctccagggctgagtcacagggaagaaagcgatttcctccgcctcttccaaagcgacctgcctagagctggaacgttacctcca

SEQ ID NO: 306549 - DNA, 102 bp, Homo sapiens
cctaagaagacagcttgaacctagccgagagggtgacctctctgggcaaggactggcatcggccctgcctgaagtgcgagaaatgtgggaagacgctgacct

SEQ ID NO: 306550 - DNA, 83 bp, Homo sapiens
cccaaacttcttaacccctagaccggtttttagtccattgactatgcagcctaatggtagaagtaaaatctggagaagaagat

SEQ ID NO: 306551 - DNA, 76 bp, Homo sapiens
gtctctgccagtataaatgcagtgacggtgtgcaactgaggaacatggctcaagaaactaatcacagccaagtgcc

SEQ ID NO: 306552 - DNA, 82 bp, Homo sapiens
tggaatacaaaactcacaccgacagcatcaaggagtgcatccgccccaacccttttccccctcgtctcctgtgagaattccc

SEQ ID NO: 306553 - DNA, 96 bp, Homo sapiens
gcttgatgtgcgcggagagcaatcgccgggacagctgcaagatcgacgacatcgcggatggcgccgtgaagcccccacccaacaagtaccccatct

SEQ ID NO: 306554 - DNA, 100 bp, Homo sapiens
tagaattgacttgtgatcagttcacctttgaatttatgaactatatcatcatgtacatagaaaaatccaaaggattctgcaaaaaagctactagaaccac

SEQ ID NO: 306555 - DNA, 75 bp, Homo sapiens
attccgggtaccagttcgcgtcctgctccaaggactgcactgtgaagtgctgccgtggtcaacgccattggcctg

SEQ ID NO: 306556 - DNA, 89 bp, Homo sapiens
tggacagacgggaaaaatagtagcaccagggctgggaaccgacgaggactctctcattgagatcatctgctccagaaccaaccaggagc

SEQ ID NO: 306557 - DNA, 100 bp, Homo sapiens
cgacgagcgggccctggctcaggaacagggacagcacctcatcccctggatgggggaccacaagatcctcatcgacagaaaagcaaactcaagttcctgc

SEQ ID NO: 306558 - DNA, 49 bp, Homo sapiens
agtatttgacgaaaatagactgtggaatgcagtagccctctgggcctgg

SEQ ID NO: 306559 - DNA, 71 bp, Homo sapiens
caatcgcaaggcacctctgagaacttcagtgagaaagatcagtctaaagaaaaggagaagaaagtgaaaaa

SEQ ID NO: 306560 - DNA, 75 bp, Homo sapiens
ggggaggtcacctgacgaggagttacagaatgtctgaaggggacagtgtgggagaatccgtccatgggaaacctt

SEQ ID NO: 306561 - DNA, 75 bp, Homo sapiens
tcaggaggtacccaaactgaaggtctttgaaggaaatcgcccaaccaactctattgtgttcaccaagctcacacc

SEQ ID NO: 306562 - DNA, 98 bp, Homo sapiens
tgatgctggagaattataggaacctggtctccctggaactcagcctcctcccaagctccctgtgggtcctagccacaagctctccaacaattactatt

SEQ ID NO: 306563 - DNA, 90 bp, Homo sapiens
gcaagattacaggaatttcagaattttgaacaaatctttgaggatttgattgccttatgtgacaagcccaagatctgtgacagttggagc

SEQ ID NO: 306564 - DNA, 82 bp, Homo sapiens
caggagcaggagcgggagcgggatccccagcaggagcaggagcgggagcggcttccccgggcgctgcctggacaggcctgcc

SEQ ID NO: 306565 - DNA, 100 bp, Homo sapiens
ccgtgtttgacgagaatgaggaaggaacttgcttgctagaaaacaaagtgcaaggcttgacaaacacaatgacttgggatggaagttatttgggaaagcg

SEQ ID NO: 306566 - DNA, 98 bp, Homo sapiens
agcttgctttctgtcgtggcaatgttttgaaactggcaaaatcagactcagcaggcatgactggagagggaagtcccaatggtgctagaatggtgctg

SEQ ID NO: 306567 - DNA, 98 bp, Homo sapiens
ctgaagttcaggcagcgggagcgaggagggtcctccagcagcctgacctgagtgggttagtgatccagagaaaccagcaggccaacttggtcaggaag

SEQ ID NO: 306568 - DNA, 80 bp, Homo sapiens
ctcagaagggtgcaagaagaatcagtgcggatactctgttttcaaggaagctgaatgggaaatacagacttgagcgactt

SEQ ID NO: 306569 - DNA, 75 bp, Homo sapiens
gcagcagcgaaccaatcccaagattagtgatgatgaaccaggttatgaccttgatttattttgcatacctaatca

SEQ ID NO: 306570 - DNA, 75 bp, Homo sapiens
gtgtcttcatccagaagggacagtttgtgccagctctccagagagaaaagtactttgccagacgtttatcaaaat

SEQ ID NO: 306571 - DNA, 98 bp, Homo sapiens
tgaactctagggagccgggttgatttttaaagcttcaaaatcctaagactcagcactgttgcggggtaagaagagttcctgggtcaagtggtcacctt

SEQ ID NO: 306572 - DNA, 82 bp, Homo sapiens
cttgggaacctcgggaccggcccccggcgagcgcagcggcgcccagtgttttaaaatcaaagatgggaaaatcggagaaaat

SEQ ID NO: 306573 - DNA, 75 bp, Homo sapiens
gaaaggctattgttgcagaccgggcggcttacagggagaacacagttggcctccaccgtttctgccccacagaaa

SEQ ID NO: 306574 - DNA, 83 bp, Homo sapiens
gatgtgacccaaggagagtgctacccggtgtactggaaccgattttttatcaagcagaaatgcatcgaacaacgagaatcaag

SEQ ID NO: 306575 - DNA, 100 bp, Homo sapiens
caacggtcaggagtccactcctggaattgttccagatggtctaccaggtccagaaggtcctccaggtctccctggaaatggaggtattaaaggagagaag

SEQ ID NO: 306576 - DNA, 90 bp, Homo sapiens
aacaatttgatgactcaccagaatgttgaactttttaaagaactcagtttttcacagacctacgggatggcatcatctcagatatatttg

SEQ ID NO: 306577 - DNA, 100 bp, Homo sapiens
ggaaccggatatttaagtacaatggtgggcttaattttaggttcatcaatgccagaagacgaattcttcagccaatgttggattcaagttgttcagagac

SEQ ID NO: 306578 - DNA, 96 bp, Homo sapiens
ttgcaattccaaaatgtgtaagacgggatattctcttctgtgctgtcaaggacatatctgaagagatggattaagaatgctttggattaaggattg

SEQ ID NO: 306579 - DNA, 83 bp, Homo sapiens
ccggatcccattgtacccagagtgcagagccgcctttccagcatgcaggggctgctcaggttcgtgctggccgtgggcagcgc

SEQ ID NO: 306580 - DNA, 100 bp, Homo sapiens
caacggccaacttcggcaagatccagatcgggatttacgtggagatcaagcgcagcgatgatgtgaatttcttcggagtaagaaatcctcagaggaaatt

SEQ ID NO: 306581 - DNA, 100 bp, Homo sapiens
cccgctggcggcgggcatcttcttcgtgaggctgctcttcgagcgatggcccactgcgtgaccttggttcagctgtccatttcctgtgaccatctcattg

SEQ ID NO: 306582 - DNA, 101 bp, Homo sapiens
ccttaccctcagcgagagaagtaaccgctcgcaggaaggaggtatttatccaggaacggtatgggagatttaatctaaatgacccgttcctggcactccag

SEQ ID NO: 306583 - DNA, 85 bp, Homo sapiens
tgatgctcagtttgatgcgtcacactacgacagtgagaaaggaggttgtacatcctggagacctgaagaattctgttgaagtcgc

SEQ ID NO: 306584 - DNA, 80 bp, Homo sapiens
agacggcggaagcggagagcaacagcgcgccgaatggcctgtccagaagacagccaaatacatccttcaaacagacttca

SEQ ID NO: 306585 - DNA, 75 bp, Homo sapiens
tgaagaacctgagtcaggacgtaaatggaaccctgatttgacttgggctcatatgacataaggatgatcatctct

SEQ ID NO: 306586 - DNA, 75 bp, Homo sapiens
tatatttccgtgagaaaaaatttgctgttgaagttcatgatccacgaagagagggagccggcatcagaaaacaac

SEQ ID NO: 306587 - DNA, 100 bp, Homo sapiens
cgagaccgcggccgggaccgagggtacggacattgctgcaggagaagaggttgccatcaagcttgaatgtgtcaaaaccaaacaccctcagctccacatt

SEQ ID NO: 306588 - DNA, 74 bp, Homo sapiens
ccaagagcagcggaaaatgatccagtcacaggtgctggagaatctggtaaaagcaccattgtgaagcagatgag

SEQ ID NO: 306589 - DNA, 75 bp, Homo sapiens
ccattttcctcggtgggggcttagcgcactggaggagcggcgggcttcagacagagtctcgctctctcgccaggc

SEQ ID NO: 306590 - DNA, 95 bp, Homo sapiens
ccggaccttcaagactgtctttgctgagcacatcagtgatgaatgcaagaggcgtttctataagaattgccatgtgtccttgaccggggagagcg

SEQ ID NO: 306591 - DNA, 75 bp, Homo sapiens
gagcggccgaagcagctttgcggtagtgaagcgcgcagtggcgagccagccagactctgtggatgcagccgagag

SEQ ID NO: 306592 - DNA, 90 bp, Homo sapiens
gtaggatactgaaactgacattatttggcagagattgtcaagaggctgaatgctatctgtgcacaagtcattcctttcctgtcccaagag

SEQ ID NO: 306593 - DNA, 98 bp, Homo sapiens
gatgtgcgcggagagcaatcgccgggacagctgcaagcttgcgggaagggttgggaggcagcaggctgtaagcagcctggagcaccagcctagaccag

SEQ ID NO: 306594 - DNA, 96 bp, Homo sapiens
gcggcgccgacatcaattacgccaatgtggacggactcactgccctgcaccaggagttgataccaagttgaaattcactcttgagccatctttagg

SEQ ID NO: 306595 - DNA, 111 bp, Homo sapiens
gaagaggcccaccctggagtaaccctcactggagaatccagagaatgtctacacaaggaagtacaggatttggcttttctagatgtcgtatccaaacttcgcagtcatgag

SEQ ID NO: 306596 - DNA, 51 bp, Homo sapiens
atgaagaacagtcacaggacaggatggagagcaatacatcatcatctttgg

SEQ ID NO: 306597 - DNA, 99 bp, Homo sapiens
acagctgcctgtcaccccagatgtcctcatcatcccgtcagagctgaggtacttcgtgaaggtcaacattggcatcctcatcgctgtgaccagagtcat

SEQ ID NO: 306598 - DNA, 100 bp, Homo sapiens
gagacgccaaggaaagatgggacctcccggcccaggctcctctggacccttcccgctgcccagcgctggggacgccttcctcaccctgcggactctggcc

SEQ ID NO: 306599 - DNA, 82 bp, Homo sapiens
aaagtcctttccaaaaagaagttactgaagcagtatggctttccacctgggacagaaagaacaacccggagccctggaaccg

SEQ ID NO: 306600 - DNA, 100 bp, Homo sapiens
agagaagcaggacctcgggccatggggagtgaactactttatgtccaagggtatcctggatgattcgccaaaggaaatagcaaagtttatcttctgtaca

SEQ ID NO: 306601 - DNA, 98 bp, Homo sapiens
gccagacagctggaggaggaacttcgaaccatggaccaggccctcaagtccctgatggcctcagaggaggaggtctgtacaacccaccctacagtgct

SEQ ID NO: 306602 - DNA, 130 bp, Homo sapiens
attccggatttccttgggtcttccggtaggagctgtaatcaattgtgctgacaacacaggagctctttgttcaatgcctagccacctattcctacagacacggcagtggaaaggaaaagaaagtactgac

SEQ ID NO: 306603 - DNA, 83 bp, Homo sapiens
tcgtgtgtggagacaggggcttttatttcaatagtgaattcctaagaagaaaataatggattgcatattagttgttctctaag

SEQ ID NO: 306604 - DNA, 87 bp, Homo sapiens
gcctaccaaggtcaaaggctatgacaacctctttgctatgatccggaaggctgcccagcatggagtatgctcagtcctcaagggcag

SEQ ID NO: 306605 - DNA, 100 bp, Homo sapiens
agaagggagacgacgctgctgggtccgctgagcggggcgacccgaggataacaaagccattgacctttgccgattgtgttggggacgaacttcctttagg

SEQ ID NO: 306606 - DNA, 83 bp, Homo sapiens
caagttttgtgcagattgccagtctaaaggaggtgctcctgtaccctggccacagcccaatcctgccactgctgacatctggg

SEQ ID NO: 306607 - DNA, 82 bp, Homo sapiens
ctcggccgcgcggactgaaggagactgaagacatgcaagaaagcacttcagccaagcagaagggagccagctggacgaggtg

SEQ ID NO: 306608 - DNA, 100 bp, Homo sapiens
ccggcccacagtgggggtgtgcaaacccgagagaactggtactttggaagtgttgctgaaatcatcaggaatcatcaacatagtcctttggttcttattg

SEQ ID NO: 306609 - DNA, 102 bp, Homo sapiens
ccgacacttacatgccatggccttctacgttgtgaaaatgctggctctgaagcaccgacaaggcaagaatcacaagatgcgcatcattgcctttgtgggaag

SEQ ID NO: 306610 - DNA, 75 bp, Homo sapiens
ctacggaccttaaaataccagcaacagccccttcgccccaagacattggctccctggattatcaagagtttgtag

SEQ ID NO: 306611 - DNA, 73 bp, Homo sapiens
cactcgccggagctcctgcagttcagtgtcatcgtcgcacagtcagggtaccgtgagggttttctctggaagc

SEQ ID NO: 306612 - DNA, 75 bp, Homo sapiens
tgtctccgacgccgccgctcttcagtttgcccgaagcgcggacgcggtttacggccaaagatgaagaggaagcct

SEQ ID NO: 306613 - DNA, 98 bp, Homo sapiens
caagctcctacttccagaaaaagtgctcctgggactccaggataccagtattaaaggtggaagaaggtccatatctttttctgtgggtgcttcaagtg

SEQ ID NO: 306614 - DNA, 50 bp, Homo sapiens
tcccggcgccgtcgcgccactcctccgaggcaagaatatcacggcatggg

SEQ ID NO: 306615 - DNA, 74 bp, Homo sapiens
catcaccaaagagcagatgccaaatctgctgtggaggaagatgcagagtcagaagatgaagaggaggaggatgt

SEQ ID NO: 306616 - DNA, 100 bp, Homo sapiens
gcatagagacgctactggaggcggcccgcttcctggaatggcaagcgcagcaacaacagagagcacgtggtcgcaatggaagaagagatcgccgcgctgg

SEQ ID NO: 306617 - DNA, 98 bp, Homo sapiens
cgtattctctgaagcctggaaacgaggcactcagttggaagagtccagcaagctgctctgttaaaagcgaaaatgaaacaattgcctgcggcaacagt

SEQ ID NO: 306618 - DNA, 51 bp, Homo sapiens
caggagctggatccggcttccggaaggtgtcccgacccaggctaagcttga

SEQ ID NO: 306619 - DNA, 100 bp, Homo sapiens
ggagcagtgggaagtaatcagtttgtggatcttgaggcaactaactatgatggttcaggcctcagggactttacccaggagaagtccgtcttctgccgta

SEQ ID NO: 306620 - DNA, 97 bp, Homo sapiens
ggcttgccctggtcttgctcggccgatgaagtgcagaggtttttttctggggctaagccagctctaccataaccagagtcagggactcttatcccag

SEQ ID NO: 306621 - DNA, 106 bp, Homo sapiens
catccctttccgagtcaactggcccggcaccgagttctctctggttcgagaaatggctgctactaccttaagcggtctgctacagtgtaactttcttaccatggac

SEQ ID NO: 306622 - DNA, 83 bp, Homo sapiens
atccaatcccttgtccttaaaagctcgaatatgagactcaaattaagaagatgctatgctcaaaagatagcctgggactaaaa

SEQ ID NO: 306623 - DNA, 90 bp, Homo sapiens
cgcggggctcctgcagcatggctgtcagcaggaaggactggtccgcgctgtccaggttctcccatggcgccagccagtgtgggcaattgc

SEQ ID NO: 306624 - DNA, 51 bp, Homo sapiens
tgctaatgactggcaatgtaaaacggaacattattacagcagccagacgat

SEQ ID NO: 306625 - DNA, 101 bp, Homo sapiens
tgaagagagatatgccaccagcatttattaaatgaagagttacctaagtcagtgttataagatgttccatggtaaaagggatttgaagacaaattttggaa

SEQ ID NO: 306626 - DNA, 83 bp, Homo sapiens
agttgttgcagaaattctttcaaaaaccactgaatatcttcagccaaatccagagtattgggaaagggtcgttgtggtgcata

SEQ ID NO: 306627 - DNA, 100 bp, Homo sapiens
tgcctaagaacaagaaccaggagggcaccgggcaccggctgctgaacgacaaaactttcggtttgaagaataagaaaggagcaaagcaacagaagtttat

SEQ ID NO: 306628 - DNA, 82 bp, Homo sapiens
cttccactcaagaatcgtaggccaggctgatggagagctgaacattactcttccagaagagaaatgcactcggtgatggaaa

SEQ ID NO: 306629 - DNA, 96 bp, Homo sapiens
caaagccaaggaagcagatggaaggccatttatgccagtgttcttcctggagagttgatgagggggtacatgacccagtttcccaccttcccaagc

SEQ ID NO: 306630 - DNA, 101 bp, Homo sapiens
cggatgatgccttcaatactacctttatttccaccatagtgtaaacaggaacatcgataagtagtgtaaaaacttgcacaatgaaatccgaagccaaggat

SEQ ID NO: 306631 - DNA, 73 bp, Homo sapiens
aagagatgatggtgccagggatggaaggcaaagaggaggaagaagaatttggacttgatgaagaagatgaaga

SEQ ID NO: 306632 - DNA, 88 bp, Homo sapiens
ccagaagcgggcggcgcgggggagatgggggggccctcagcctcttggccttgaacgggctgttcatcttgattcacaaacacaacct

SEQ ID NO: 306633 - DNA, 100 bp, Homo sapiens
tgaatcctgaagatggaaatgtagcttaatgacctccttgtcctggagtctcccttaatacaggtgctgactgggttacttttttaaacactaggaatgg

SEQ ID NO: 306634 - DNA, 83 bp, Homo sapiens
ctggagaaggactgcgctgcaagacccggaccctggacagtgagcccaagtgtgtggaaggaactggcaactttaaagtctca

SEQ ID NO: 306635 - DNA, 100 bp, Homo sapiens
agagagaagagggcagagccgtgcatggggctgctccccaggacctgagcaggaacctggagttttcagagtctcattctgttaccaggctggaatgcag

SEQ ID NO: 306636 - DNA, 95 bp, Homo sapiens
ggaaatcccaaagcctcgaatggctgccactcagaaacttgttaaagacattattgatcctgtttgaccaaactcagagatcaattaaggcacag

SEQ ID NO: 306637 - DNA, 82 bp, Homo sapiens
ccaagtttaagcgccacctcaatgatgatgatgtcacaggttctgtgaaaagtgaaaggagacatggtcttgctatgttgcc

SEQ ID NO: 306638 - DNA, 82 bp, Homo sapiens
gcgccgaggccttcaagtgcatgatgtgcgatgtgcggaagggcacctccacccgaaatggaggcaaacgaccattttaact

SEQ ID NO: 306639 - DNA, 82 bp, Homo sapiens
tggcatctgtgacaacttgcttaaactatgttccaacttcctgtcaacaatcttggcagtttaagaaaagcccggaaaactg

SEQ ID NO: 306640 - DNA, 95 bp, Homo sapiens
gcccggctgccgggagccgacagcttcgcgccgggtagctacagcaagctgggtagcaggcagatccaaaggatatcatgaagtttccagggcct

SEQ ID NO: 306641 - DNA, 100 bp, Homo sapiens
ccgggatgacttctcagcgttcccctctggcgcctttgctgctcctctctctgcacgattcatgttacatgtaaagctgtcctcatttgtgactatggac

SEQ ID NO: 306642 - DNA, 75 bp, Homo sapiens
gcagctcagtcaggaccctggagatgagacacgggccttccaggagcaaggtctttgggaggagccagtcgctac

SEQ ID NO: 306643 - DNA, 98 bp, Homo sapiens
gaaaactcacacccggtctggacacagaaagagaacccctgaatcctatgaggaactgagatctctgttgttaggaagatcgatggaagagcagcttt

SEQ ID NO: 306644 - DNA, 101 bp, Homo sapiens
cgagcggccctgatgcaggccatcaagtgtgtggtggtgggagacgggagcttgatcctggatagtgtttgtatgatgtgcacacgtctctgcaaatgctt

SEQ ID NO: 306645 - DNA, 100 bp, Homo sapiens
cgcgagtgaggaaaggaggtactgtagcacacagcaagaaggaggccatcagcaaactgggaagaggaccctcaccaggaaccacatctgccagcacctt

SEQ ID NO: 306646 - DNA, 101 bp, Homo sapiens
gcagcaattgaagagaggtatggcaaagatctgctcaacctctctaggaagaagccgtgtggacagtctgaaatcaactgagatcaggaggtgctcaagta

SEQ ID NO: 306647 - DNA, 83 bp, Homo sapiens
aagctgccgttctttaatatgctggatgagctgctgaagcccaccgaattagaagtcccgggcccagagcccggccagcagga

SEQ ID NO: 306648 - DNA, 82 bp, Homo sapiens
cacggaaccctcacctcaacaagcaattctgtggtgttcttggtcacacatttatggagtttctgaagggcagtggagatta

SEQ ID NO: 306649 - DNA, 98 bp, Homo sapiens
gggctgcgggcaggtggcggcgcggcgcgggctggcggtggctccacgtacctggagtagaacagaaaaattattatgtctgtgttcccttgggactc

SEQ ID NO: 306650 - DNA, 75 bp, Homo sapiens
atgatccgcctgcctcagcctccaaagtagctgagactacagtcaccttcaggccattcagaggaggaaagagag

SEQ ID NO: 306651 - DNA, 75 bp, Homo sapiens
cagattttgaagatggaatccgtagcgcccagctcattgcctcagctaagtatctgatggtataattgccccagg

SEQ ID NO: 306652 - DNA, 98 bp, Homo sapiens
aataattgggcagaagagaagcagtgaaggagtgcagaggcatcacctgaaaggttacttcttgctgcagattctgcgcaggatcggagctgtgggcc

SEQ ID NO: 306653 - DNA, 98 bp, Homo sapiens
tagcagaggacgcggccaggcgattcggtgaagcgattcctgcaggcgttggttcccctctttgacctgaagttcaccatgtctattctcaagatcca

SEQ ID NO: 306654 - DNA, 96 bp, Homo sapiens
tttgagccttacggagccgtctaccagatcaacgtcctccgggaccggagtcagaaccctccgcagagtaaagtcgcctgctgctgtcgtcgggag

SEQ ID NO: 306655 - DNA, 82 bp, Homo sapiens
caaaggaccgggacctgttggttgtcgcccatgatctgatccggaagatgtcacctatgatatcatcaagttgaatcgaaag

SEQ ID NO: 306656 - DNA, 100 bp, Homo sapiens
cgctcgctactagcccgcgggccagcgccgcgtcccgagccccggcgggaggcgacagaaggctagagagaggcagcagaaattgcttgcggagtttgct

SEQ ID NO: 306657 - DNA, 80 bp, Homo sapiens
tgcggcgtgtgcgcgcccgccagctgctccggagatacgtctctgctttctatccgtcaagatgataaagtcgtgtgccc

SEQ ID NO: 306658 - DNA, 75 bp, Homo sapiens
aaacagccaaaggggactatcctctggaggctgtgcgcatgcagcacctgagtatcgagatcgttatgattcaga

SEQ ID NO: 306659 - DNA, 75 bp, Homo sapiens
caaaggtgaggaagttggcgaaggaacggctctcctttgtttgcagtttcccagagctatggggacttcccatcc

SEQ ID NO: 306660 - DNA, 90 bp, Homo sapiens
cgctgctcttgtgacgttgtggagatggggagcgtcctggggctgtgctccatggcgagctgggtgaaagcccagcctccgtggttctta

SEQ ID NO: 306661 - DNA, 100 bp, Homo sapiens
gccggtggagacgctccgtgcctgcgaggagtatctgcggcagcatgacaagattcttggtgccaccattgagaactccaggattgtcctgcagatcgac

SEQ ID NO: 306662 - DNA, 83 bp, Homo sapiens
catccagccttagcaaaccagagatcctgataacttaagtgactctctcttttccggtgatgaagaaaatgctgggactgagg

SEQ ID NO: 306663 - DNA, 75 bp, Homo sapiens
ctgctattgaagccctaaatgatggaaaggcgggaacaataagctgatcaaggtcttccaccgagatgggcacta

SEQ ID NO: 306664 - DNA, 100 bp, Homo sapiens
atttctctgaacatactgccttatgggacagatcaaataatttgcggtaaaagcctttcagtgaatgaaatgactcttagcactttgaaagaaaaaggct

SEQ ID NO: 306665 - DNA, 100 bp, Homo sapiens
cgggagactagcttggccacaggagacaacgttgaggtacagacagtttgaaggatgacctctaggaagaaagtgttgctgaaggttatcatcctgggag

SEQ ID NO: 306666 - DNA, 88 bp, Homo sapiens
aacagccagacgagagcttcagccatcacgaggatgatttcggaacctggagaaaatggaaaacttcagatgtgggtggatgttttcc

SEQ ID NO: 306667 - DNA, 100 bp, Homo sapiens
tgacaaacgagatgtaaaagtgtcactgttcataccctatggtactgcagtatcgaccaagaattgatttcggttagaccaaggggcccagacctcactg

SEQ ID NO: 306668 - DNA, 95 bp, Homo sapiens
cctggagaatgtcatcaagcagcacattcaagatagaaaatgctgctgaagaacctagagtcttatgtattatacaagatactactaattcaaag

SEQ ID NO: 306669 - DNA, 98 bp, Homo sapiens
gcctgaagcagctgctgtcccgggcctaccccctggactccctggagaagcagatggaaaagttaagtgggcagaccaacatccacctcagcaaaaac

SEQ ID NO: 306670 - DNA, 75 bp, Homo sapiens
acttggcagctcggggagtcctaccctatgtgggcaacctcatcaccaaggaattgagttcttctcagactttat

SEQ ID NO: 306671 - DNA, 96 bp, Homo sapiens
ggaccagctcatgggcacggctcgggacgctatatcgagaagtttactgactttcttcggctctttgtgagtgttcacctaagaagaatcgagtct

SEQ ID NO: 306672 - DNA, 82 bp, Homo sapiens
cgttggagaggtgttaccggaacggcggcgacaagggtgttcccgaactagagtggacaatgcagatcttcgtgaagactct

SEQ ID NO: 306673 - DNA, 100 bp, Homo sapiens
ttcctcctccatgcagccttccaagacccacctgagtacaggcagcacacttctgcttttgttccttcatcaggacgaatttactcttttgggcttggtg

SEQ ID NO: 306674 - DNA, 89 bp, Homo sapiens
gaagacccacctccctatctcatgatggatgaacttcttggaaggcagagaaaagttgtggaagctgatcgaggaagcctaagcaggct

SEQ ID NO: 306675 - DNA, 90 bp, Homo sapiens
cagaaacagaggactaattttggcagttctaaatttgaatttgagatgaatcagctttagataaaataatagaaaggtgcctcagggatg

SEQ ID NO: 306676 - DNA, 88 bp, Homo sapiens
cagggcccacgggccagccccgccgccctcgcaacctggcagccgccgccgtggaagactttgagagttttgacctgcctgaagagca

SEQ ID NO: 306677 - DNA, 100 bp, Homo sapiens
gcttttgtgtcatatgtccaagcttatgcaaagcatgaatgcaacctgattttcagattaaaggcatccatgagtatgttttctgatttcctgcagtctt

SEQ ID NO: 306678 - DNA, 100 bp, Homo sapiens
gccgctacgtgactcttttctccagctctgaggatgaagtggatgtgcttttacatggaactcctgaccaaaaacgaaaactcatcagagaatgtcttac

SEQ ID NO: 306679 - DNA, 96 bp, Homo sapiens
ctggatttgaagaccagccctgctacttaccagccaacattggtactcagaccacaggacccagtggggtaggatgctgtacaccaggccggccgc

SEQ ID NO: 306680 - DNA, 100 bp, Homo sapiens
aaggcaactgtgaggactaccttatgatttcctctccagggcccacaacggcagtgtcctacatgtcggtgaaatgtgtggatgcccgtaagaaccatca

SEQ ID NO: 306681 - DNA, 100 bp, Homo sapiens
tccaagtgcgcgccctggcgggtccggaccaaggaatcctatccatcttcttcaccgatatggtttgtggattctgaagacccaaatctgacatcagttc

SEQ ID NO: 306682 - DNA, 111 bp, Homo sapiens
caccaggacgccgtcacggccgcgctgctcatccccaaggaggacggcgtgatcacggccagcgaggacaggtttggtgcacctcgatttggaggaagtagggcagggccc

SEQ ID NO: 306683 - DNA, 75 bp, Homo sapiens
acagcgtgcagcacaagaagcagcgtgtgaagctccctggggtacatccccctaatgagggtggtgcaatcggtg

SEQ ID NO: 306684 - DNA, 111 bp, Homo sapiens
cggcggcagcggggtccgggtccggagcgccacaagaaagatgctggtttcgagttttggagatccttgttttttatggaacacagttctgtaaaattttcataagattcc

SEQ ID NO: 306685 - DNA, 75 bp, Homo sapiens
gccttggaccccgcggcgcccctcggcctcggagcaacgagcgcagcgccgatagcctgggctggaagctcttct

SEQ ID NO: 306686 - DNA, 78 bp, Homo sapiens
tctaagactctgggacactcctgaagtcgggaaatgcctcctgacaaggtgatccgggcgggccccgcaggaatttta

SEQ ID NO: 306687 - DNA, 100 bp, Homo sapiens
ctcattgttaagcacaagttcacgaaagcctacaaaagtgtggagaggttccttcaggaggatcaggtgatgttgagcttgaatgggaagaaaccactat

SEQ ID NO: 306688 - DNA, 82 bp, Homo sapiens
cagaaggccggggccggccagaagcgggcggcgcgggggagatgttccagggtctccctccactgctgtagtaacccgggtc

SEQ ID NO: 306689 - DNA, 90 bp, Homo sapiens
ttaagtgagagagatgccatctacaaagaattctccttccacaattttaatcaggtctcctggaacacggccgcaactggtcggccatcg

SEQ ID NO: 306690 - DNA, 85 bp, Homo sapiens
gcaaggcacctctgagaacttcaggcgggatgtagctcattttgggatacgagtctccatcgtggagcctggcttcttccgaacc

SEQ ID NO: 306691 - DNA, 74 bp, Homo sapiens
tttgagctgggaaaactgtttcagttgcagactttaggcctgaaagaggctgacccgcggctgattgagtccct

SEQ ID NO: 306692 - DNA, 78 bp, Homo sapiens
ccaacgcatcatgccagggagccaagcgtcctgcccggccccctgccaaggtaaccctgctggggtcagttatcttca

SEQ ID NO: 306693 - DNA, 97 bp, Homo sapiens
gcccggccacctctgagaagggagacgacgctgctgggtccgctgagcggggcgacccgaggtgtcatggagaaactccagctgggcccagagattc

SEQ ID NO: 306694 - DNA, 82 bp, Homo sapiens
gcggatcggactttgagaaagtgcaggagcaactgggaaatgatggatttgatggaacaacttgaaaaacaggataagacgg

SEQ ID NO: 306695 - DNA, 100 bp, Homo sapiens
cagattcgcagtggtcgcttcttctccttggacatgatccacatcgcggacaccaaggtcgccaggcgttatggggatttcttcatccgtcagatccaca

SEQ ID NO: 306696 - DNA, 75 bp, Homo sapiens
gcggggggagccggagccgcctgggatgttcaggaaagtacggtggccagactttaaccaggaagcttatgttgg

SEQ ID NO: 306697 - DNA, 100 bp, Homo sapiens
ccaacggagaactcaaggtcttcatagaccagaaccttagtcccgggaaaggcagtcaagaaagtactgtaatttctcaacttcatggttacttgtcttg

SEQ ID NO: 306698 - DNA, 100 bp, Homo sapiens
cttggccatgtagaagttgatgaatcaagaggaatgcacatctgtgaagatgctgtaaaaagattgaaagctcaaactgaaaatatggtccactaaccag

SEQ ID NO: 306699 - DNA, 100 bp, Homo sapiens
gaggttcagtgcgaaggcaacagcttccataaatcctgcttcctgtgcaatgcctgtgaggagccaccaacatttgaagctatggagctcattggtaaac

SEQ ID NO: 306700 - DNA, 80 bp, Homo sapiens
cagagtccgcggccggggcgcgggagaatagctgaaacctttggacttcaagaaaattatatcaaaattgtcataaataa

SEQ ID NO: 306701 - DNA, 82 bp, Homo sapiens
atagctctgtatgagaaggacaacacctacttagatccgccgggccctgcagcagctgcttttcccaggcaaggccttcagc

SEQ ID NO: 306702 - DNA, 88 bp, Homo sapiens
tgccattgccaggcagggaggacttgtggacctgctgtgtgaaagccctgtgtaaggaatgtgtagtagaacgttgtcgcatattgcg

SEQ ID NO: 306703 - DNA, 96 bp, Homo sapiens
tttcttgccctagtgacttaactgccgaaggaaaatgtcactgtcccattggccatattttagtaatgattctcagtgtggagtcatttgattatt

SEQ ID NO: 306704 - DNA, 82 bp, Homo sapiens
aacgacgttccatctgtggaaggacctaccaaccaggttctttagaagattgggatatagctgttcagaaaactgaaacccg

SEQ ID NO: 306705 - DNA, 51 bp, Homo sapiens
ccttcaagcatataagtggtcaaacaagaacgcattccctgggatgaaaaa

SEQ ID NO: 306706 - DNA, 100 bp, Homo sapiens
ccgcgagcgcccggccgaacccgcgatggaataatgcccagcggcccgccaggtcccgcctgattacatcaaccccagagccgtgcagctgggctccctt

SEQ ID NO: 306707 - DNA, 98 bp, Homo sapiens
ggacctccaaggaagccacgtgcagacatctacaaccttcgatctcctgacgagataaaagaatcagagtgtctcaacccttgacaagaggaccaagt

SEQ ID NO: 306708 - DNA, 76 bp, Homo sapiens
gagtcagctgtgtgtccagaacgtgccatggagacgcttaacggttgcacaccgatgctccagaattgtgagggag

SEQ ID NO: 306709 - DNA, 82 bp, Homo sapiens
tctccactttcgccagcccgtgccgcgagcgcggcctgcaggaggtgtacgtgaacggagagtgggtgaccaacatcagcga

SEQ ID NO: 306710 - DNA, 73 bp, Homo sapiens
ggtacaagctcctgcgggccggcgggctcttggagtttgacaaggagttgtctgtctttaaggacagactgta

SEQ ID NO: 306711 - DNA, 83 bp, Homo sapiens
aaccataatagaatgtctacattcctaccttaacagtggaagtagaggttgtgatcatctcgaacaggaaagcagaaacaagg

SEQ ID NO: 306712 - DNA, 71 bp, Homo sapiens
aagttgttacgggaatttagacttgtagcagctgaccgaaggaatgccagctgatgaagaccgagaggccg

SEQ ID NO: 306713 - DNA, 50 bp, Homo sapiens
gggtgtaataatgttaactgaggcaggggaaatggaaggtgatgcagtcg

SEQ ID NO: 306714 - DNA, 80 bp, Homo sapiens
tgaaggcgccggggcctagcgctatgcctgcggcggagactgcatcaggctctcgtgagtgtgtccgcttgaaaccaact

SEQ ID NO: 306715 - DNA, 75 bp, Homo sapiens
tgttgatgctgaaattgaagatccaccaattccagaaaaaccatggaagcccattgcagatgcaaaggctcctga

SEQ ID NO: 306716 - DNA, 87 bp, Homo sapiens
atgtcacaagattgaccacattgatcacacatcagccactatgtgattgtcatgtccatgaccatctttttggtgttcctcaatggc

SEQ ID NO: 306717 - DNA, 100 bp, Homo sapiens
cttggctggtttcctggacagagaacatccaaggttccattaaatacatcatgcttaaccctagttcacgaatcaagagagagcaggagattcggatggg

SEQ ID NO: 306718 - DNA, 100 bp, Homo sapiens
gcccttgaagcagaaaacagaggtgaaatgaaactagctctccagtatgtcccagagccagtccctggagaaggagcggcagcgcctggagaatctgcgg

SEQ ID NO: 306719 - DNA, 96 bp, Homo sapiens
ttaaaaataaacaagatgtatcactttgttctctacttgcactgatatatgcccataaaatgagtcctaatccagctttgttttccggaaagttcg

SEQ ID NO: 306720 - DNA, 100 bp, Homo sapiens
acgtcccctgttggccggagcccagcagctgtgggagccccgagaacgcctccagcggggatgacacagaaggcttcctttctgtctgaccagcctgagc

SEQ ID NO: 306721 - DNA, 108 bp, Homo sapiens
agctatatgtctttgggggcggagagagaggtgcccagcccgtgcaggacacgaagctgcatgtgtttgacgcaactatttccatgcctaactcaaaggagacacaag

SEQ ID NO: 306722 - DNA, 99 bp, Homo sapiens
gaaaaacggagacttggatgaggtgaaagactatgtggccaagaactggtcatgctgctggagtggtggtcctgcacggagtgtacactgttcacggac

SEQ ID NO: 306723 - DNA, 100 bp, Homo sapiens
gcaaggagtcatatatccttcatatgatccatcttagtgaagaattaggatacagagtctccttggaggtgacatggatatgggcaacccaggaaccctt

SEQ ID NO: 306724 - DNA, 90 bp, Homo sapiens
aagcccgtggaacaattcatcttaccagaggctaatggaggttggcaggatgctactaccccttcatcagtgacctcccctacagaaggc

SEQ ID NO: 306725 - DNA, 100 bp, Homo sapiens
gagcctggaactggacgaccaggacacgtgcgggatagacggggacaatgaggaggagacggagcacgccaaaggacttgctacatttgtgatgaacaag

SEQ ID NO: 306726 - DNA, 75 bp, Homo sapiens
gcggaggtcgataagctggaactgatggtattggcatcggtccctaaacccacggaagctgattgaagtgaagtt

SEQ ID NO: 306727 - DNA, 83 bp, Homo sapiens
gaggatggcttcctcttggaaactaatgctgtttctgtcagtcaccatgtgtctttcagaatccacattcatctcaatggaag

SEQ ID NO: 306728 - DNA, 98 bp, Homo sapiens
gaatgaccaccatggcagatggcaacagaggatgtcaacaattttttggaggagctggttttccatccatcccagtcggcaagagccccatggtggag

SEQ ID NO: 306729 - DNA, 74 bp, Homo sapiens
gccaggcccagtccccagcacagatcaaagctgtgggcaagctgacgccgcgaccgtggcagccatgtattaca

SEQ ID NO: 306730 - DNA, 83 bp, Homo sapiens
gtgagaggaaaaagaaacttacatctaacaggaagagaaaagttttaggaagaccaaattgatttttagactctgaggagcag

SEQ ID NO: 306731 - DNA, 87 bp, Homo sapiens
cctgagaatacttttaaaggaacctgttgataaatgcaaaacagtggctgttgcaggtttctaagcatgaattgaggaacagaagaa

SEQ ID NO: 306732 - DNA, 100 bp, Homo sapiens
cgccgaggccgcgtgtcccaaaggccagtcttactactttgaccgcgatgatgtggctttgaagaactttgccaaatactttcttcaccaatctcatgag

SEQ ID NO: 306733 - DNA, 80 bp, Homo sapiens
cgggtgtcgctgggctgtcggcctggaccttgcagccgcaatggtcagcccaaggccaaccccactgtcactctgttccc

SEQ ID NO: 306734 - DNA, 100 bp, Homo sapiens
ctccgtcttgcagtacgcggcctggggtgtccaagggcagcagctggatttgaatttgttgaaatgagcagtcgtaaatcaaagagtaacagcttaattc

SEQ ID NO: 306735 - DNA, 90 bp, Homo sapiens
cctcagctcgaagtcagccaccatggaggcgcaggcacaaggtacaagaagtatgtcttcctggaccccctggctggtgctgtaacaaag

SEQ ID NO: 306736 - DNA, 99 bp, Homo sapiens
ggacatgatccaggaagagcagtaagggactgagctgctgatgctgtctttgcatttcaactacgcaacccagtgcacaatggacatgccctgttaatg

SEQ ID NO: 306737 - DNA, 83 bp, Homo sapiens
ctgggatcccggccaccagcaattgtccggccgccatggcatcagatgaaggcaaactttttgttggagggctgagttttgac

SEQ ID NO: 306738 - DNA, 74 bp, Homo sapiens
ggtgagatgagtcccgcagagctgctgcacttccagcagcaacagaaggacagaataacgggctcccagattca

SEQ ID NO: 306739 - DNA, 100 bp, Homo sapiens
tgggactctacctgctgctgtccaggctggagtatgccaggtgaaggagccatggggcgccatgttgccaccagctgccacgtggcctggcttttggtgc

SEQ ID NO: 306740 - DNA, 82 bp, Homo sapiens
tgcgcggcgcggcggccgggccctcgagacggggacggtgaccctggcaaagatgagagtgcacatttcgtcctgcctgaag

SEQ ID NO: 306741 - DNA, 100 bp, Homo sapiens
ctcaaactcggtaccgggagaggtcgcgggctgggagccacatctcctccaatcgagcgtatgattttctgtacgaacatgttcttcaagtatacatgga

SEQ ID NO: 306742 - DNA, 100 bp, Homo sapiens
gttccgaggaggacggcctggccgaagcacccgagcacggaaccacagccaccttccaccgctgcgccaaggtggaagcagggaaaggcctggagatgag

SEQ ID NO: 306743 - DNA, 75 bp, Homo sapiens
atatgctgtattcagctcaggaccaggcaccttctgtggaaggagtccaatgtgctgattgctgctaacagtcag

SEQ ID NO: 306744 - DNA, 99 bp, Homo sapiens
gaaactttttttttcaatctgggttacctcaacctgttttagcacagatatgatacttggcatatcgaaattttatgattgacacgtatcgtctaaacc

SEQ ID NO: 306745 - DNA, 75 bp, Homo sapiens
ctgcttcaggatgatggggaacatggatatgcctttcacctgtgaaggtatcacccctgatatcatcatcaatcc

SEQ ID NO: 306746 - DNA, 100 bp, Homo sapiens
cgaccaaagcgcctgaggaccggcaacatggtgcggtcggggaataagagggcagccactacattagatgagaagattgagaaagttcgaaagaaaagga

SEQ ID NO: 306747 - DNA, 98 bp, Homo sapiens
attgcccgaagacacaaacaacaagggcagcccctatacaaggacagttggctcctaagggagggactaaatgcctgatggagagaagaaggcatatg

SEQ ID NO: 306748 - DNA, 50 bp, Homo sapiens
ggaaaagaaatcctgataagaactgctttctgcaggtggagctggagcaa

SEQ ID NO: 306749 - DNA, 88 bp, Homo sapiens
actccatggcctcagaggaagtaaagcaaggttggatggcaagcatgtggtgtttggcaaagtgaaagaaggcatgaatattgtggag

SEQ ID NO: 306750 - DNA, 82 bp, Homo sapiens
gaaaaagcagaaagtagatgaagatgagattcagaagatgcaacatatctgaagagatggattaagaatgctttggattaag

SEQ ID NO: 306751 - DNA, 51 bp, Homo sapiens
cttcaatgtgcccctctccatttcccggggctctgtacacatatgaagatg

SEQ ID NO: 306752 - DNA, 97 bp, Homo sapiens
caggtcaagagcctctgcgagaaggtgtctgcttttggggcagagttttcatcggaggcatgcagagagttaggcttttctagcaacttgctttgca

SEQ ID NO: 306753 - DNA, 75 bp, Homo sapiens
agcgacccggacaccgacgcgctcatctgctggagcccggttctgcggggagtgtctccagccctgcctgcaggt

SEQ ID NO: 306754 - DNA, 82 bp, Homo sapiens
ttggaagcagccgatccagcctgcggagcctgtggggcaggaggggcaacccccttcatttatctcgtgagcggtatcggaa

SEQ ID NO: 306755 - DNA, 90 bp, Homo sapiens
gtcgcggaccatgggcgacaaagggacccggggcatggtctagtggcccagtcaggacgcggaaacactccctggaggttctgacccact

SEQ ID NO: 306756 - DNA, 82 bp, Homo sapiens
cttcatgcagagtgacatgggtcgggaagcagcatatgggggatatgagactttctactcggaatatcctgagtgttgcgtg

SEQ ID NO: 306757 - DNA, 75 bp, Homo sapiens
ttagaagcattttgcaacgtagtgttgccaatccagcatttttgaatttgcgcgataacaatatctcagaccgag

SEQ ID NO: 306758 - DNA, 100 bp, Homo sapiens
cgagcggcggcggcggcagcgggtcttgggtcctccgagagcagcagcggaagagatgtcaggagaaagtgtggtgagctcagcggtgccagcggctgct

SEQ ID NO: 306759 - DNA, 83 bp, Homo sapiens
tggaaagcgaccccggggtcttcaccgagctcattaaaggattcgctcctgttggaacaccaggatgcaattgcccctgagaa

SEQ ID NO: 306760 - DNA, 50 bp, Homo sapiens
aacagacaagcaggttgtcttgaatgttgtaccatctttgggtaggcaga

SEQ ID NO: 306761 - DNA, 90 bp, Homo sapiens
caggaccctcagggagagcgggcagccttccaggtggacagatcttagcaaagcaatgtctcaagatggtgcttctcagttccaagaagt

SEQ ID NO: 306762 - DNA, 100 bp, Homo sapiens
tgggagcctgcaagttgttgctccgcttgttggactgctgctgcaaaacttttctgtattgtaatagagattttgatgatgagaagatccttattcagca

SEQ ID NO: 306763 - DNA, 101 bp, Homo sapiens
atggagttcaacccagtgttatcatcctactcagtctgttctccactcctcatgtggtggacttgctttgtgaagagacagttcatgaacaagagtctttc

SEQ ID NO: 306764 - DNA, 82 bp, Homo sapiens
cttccaccggcagggcttctcctatgactacgtctttgactggaacatgctgaaattcgctcaaactctccaaggtggtggt

SEQ ID NO: 306765 - DNA, 76 bp, Homo sapiens
aactgatgcgcaggaggctgaaattgtctgaagtcacacagcagtaaagatgacggcgccttgaggtaagctacag

SEQ ID NO: 306766 - DNA, 83 bp, Homo sapiens
cccagaccctggagcctcagttggaagcagccgatccagcctgcggagcctgtggggcagacctgcctgaccagtgcacgccc

SEQ ID NO: 306767 - DNA, 100 bp, Homo sapiens
ggactcctatatgagagtcgcgagtgtgcagcagactctgtttgctggctacacggacaacctggtgcgagtgtggcaggtgaccattggcacacgctag

SEQ ID NO: 306768 - DNA, 100 bp, Homo sapiens
gaggagtttcatgaagagcccaaaacctattacgaactcaaaagtcaaccgctgaagagcagatgatgaggagtctgatgaggaagctgtgaagaaaacc

SEQ ID NO: 306769 - DNA, 100 bp, Homo sapiens
cgacagtgacctcatgggcaagaccatgacggaggatgatgacatcactaccggggtgataaaagaaaatgtggctgaagttacccgaagttcagcttgc

SEQ ID NO: 306770 - DNA, 83 bp, Homo sapiens
atgcggccaactccaatgggcctttccagcccgtggtccttctccatattcgagccccagcatgagaccagatgtaagctctc

SEQ ID NO: 306771 - DNA, 98 bp, Homo sapiens
aaaattcgatttgcaaatcattcagtgaatcccaactgttatgccaaaggtatcgtgatttccgatacccacctggacacccccaggagtataaacac

SEQ ID NO: 306772 - DNA, 90 bp, Homo sapiens
ctggtggctcctcttgatgccaacactctggggaaggtggccagtggcatctgtgacaacttgcttatgtgaagttcatttccaatccgc

SEQ ID NO: 306773 - DNA, 83 bp, Homo sapiens
cctggatcttcgaacttttgacacggctttggaaacgacgtcatgtgttaggaataatgtatttgtggccttggacatgaggc

SEQ ID NO: 306774 - DNA, 100 bp, Homo sapiens
tggggaaggcgattggcatcgatctctccatcccttccgaggcccgacttcggtcagtcaccacgaacaggggcactcggcatgctgccccagcactgga

SEQ ID NO: 306775 - DNA, 100 bp, Homo sapiens
agtggaatgctggcacaaaggacaatttcttgcagaacataaattattaggaaacattaaaaatgtggccaagacagctaacaaggaccacttggttaca

SEQ ID NO: 306776 - DNA, 74 bp, Homo sapiens
caatgaaccccaccaacacagtttttgtcaatcaccttctgctgcttggatgggtggatttggtgctcagcctc

SEQ ID NO: 306777 - DNA, 101 bp, Homo sapiens
aaaagttcctgagccagataacaagaaaaagaagccgaagaaagaagaggaacagaagtggaaatgtgtaactcacacagcaaaagtgacaatattcctgt

SEQ ID NO: 306778 - DNA, 100 bp, Homo sapiens
caacacatccacaggttcgagcccaaacagcagaactttttgccaaaatgacagcagataaactgataggtccaaagttcttacagcagctgtgacacaa

SEQ ID NO: 306779 - DNA, 100 bp, Homo sapiens
cgccatgacagcgagcgaggcggaggtgcctggacttggagaaccaggaggtgaggggactgactacttgaagatcacatggaggaggagtctgatccag

SEQ ID NO: 306780 - DNA, 100 bp, Homo sapiens
tcctgaagttaatggttctatgaaacagtgtatcaaagtgtggactgagcctgtgccatatttcgggaggctgcaaggagggctcacagctcgaagaacc

SEQ ID NO: 306781 - DNA, 75 bp, Homo sapiens
aaagaaggttgggttcagaagagggttacccagcatgccacaatctgattgctgacctggatggaacagagtgaa

SEQ ID NO: 306782 - DNA, 75 bp, Homo sapiens
cgagggaaagggggccttgttgagtccgccagatccaggatgggggccccgtttgtctgggccttgggccttttg

SEQ ID NO: 306783 - DNA, 75 bp, Homo sapiens
cgagatcctgcacatgtctttgatgaagttaaaggaagtagatcgtacagccatgcaggcatggagccctgccca

SEQ ID NO: 306784 - DNA, 87 bp, Homo sapiens
tcaattaaaaaatttattaaaggaagcacacctaaggtatagacacgtgtggccgtttacgctgtaggatcctcattcccactggct

SEQ ID NO: 306785 - DNA, 75 bp, Homo sapiens
tgcggtctgggccttttgggcagcttttccggcctgacaacttcatctttggtgcttgaggaatccaaagccctc

SEQ ID NO: 306786 - DNA, 83 bp, Homo sapiens
ttcacaggcagtgtaggcgacgagaccaattccgcagtacagagcattcagcaggatggaatccgacgtggtaggcccagagc

SEQ ID NO: 306787 - DNA, 82 bp, Homo sapiens
gtttcctggtagagccggccgagctgaggcggtcgcggccatgaaggttatggaaacaaaggacatgctttacatcgtcact

SEQ ID NO: 306788 - DNA, 96 bp, Homo sapiens
gaacgaggcaaggagctaaagcagcgtgcgttcagccctgggagagatgcaggtcagctcctccagtaccacaacttctgagagtcaagatccgtc

SEQ ID NO: 306789 - DNA, 98 bp, Homo sapiens
ccaggagttcgtctcttacgtctgcggaagtgcagctgcctcagttcttagcgcagacaaagctctgatggcaccaaatcttgactcctttggacgcg

SEQ ID NO: 306790 - DNA, 98 bp, Homo sapiens
catggcttactgcagtctggaactcctgggctcaaaccatcctcccacctcagccttggaactgctcgcagaaagaagaaggtggttcatagaacagc

SEQ ID NO: 306791 - DNA, 75 bp, Homo sapiens
ctgttgcttccagagccactgtcctccagaagacatccttcacccctgtaggggtctaccttctgcttccctgga

SEQ ID NO: 306792 - DNA, 90 bp, Homo sapiens
ctgctttatgaccatattaatgcagatgaggcgttctttgcaggaggatgcattagcacaacaggcctttgaagaggctcggagaaggac

SEQ ID NO: 306793 - DNA, 93 bp, Homo sapiens
tagttcagatgacagtgattttaaagttggagatgcctcagttactccacaggatccgctgaacataggatgttgccacaaaatctacctcgt

SEQ ID NO: 306794 - DNA, 51 bp, Homo sapiens
ctcggggtctccctacaccaacggttacacacttattccatcagctaaatc

SEQ ID NO: 306795 - DNA, 75 bp, Homo sapiens
aatagatcgagcctgcagacaagaaacattcgtttatgagatggtacgcatagctgctaaattcatcactcatgc

SEQ ID NO: 306796 - DNA, 97 bp, Homo sapiens
gagcccacgggctatgactggagcacactgatgatgcttcggatgcacaatctgcatgggacaaagcccccaccctcagagggcagtgatgaagaag

SEQ ID NO: 306797 - DNA, 75 bp, Homo sapiens
gaggggggcagctggagcctcaggcggcagcgcttctaggacatagctcgccttttgcaagaaaaggagttacag

SEQ ID NO: 306798 - DNA, 74 bp, Homo sapiens
gcgggcgacgcggtagtggcgaagccgggagtgtgggcgcggctggcatcccagccatcactcttccacctgct

SEQ ID NO: 306799 - DNA, 100 bp, Homo sapiens
ggagaagtgtccggggtagccccgttacagacttcctagcatgggctgttgtgctggagagaacgagagctacgaagagactacagtgcctctgactttt

SEQ ID NO: 306800 - DNA, 91 bp, Homo sapiens
gtccactggtagcccccacccctctccgtccatggccccagatgacacttcagcccgagcagttcagtgatgaagtggaaccagcaacacc

SEQ ID NO: 306801 - DNA, 100 bp, Homo sapiens
atcgccctcaacagcccagccctcccctcgggatccctcaccccagccttcttcaccgcacaggtatagggaggacacctctggattgaggatcttatga

SEQ ID NO: 306802 - DNA, 99 bp, Homo sapiens
acaaaatgtcaacaaattgatgggaactgcaagcacatgttgaccagataactgaaatggcagcagtaatgaggaaagccattgaaattgacgagcaac

SEQ ID NO: 306803 - DNA, 95 bp, Homo sapiens
attcaagcaaattcagagattcagccaccaaggggttcagcttattgacttctcaccttgtgaaagggcttattaaaactactagaaggcacaat

SEQ ID NO: 306804 - DNA, 133 bp, Homo sapiens
cccgcacctacgacggcgacggctacaagaagcgggccgcatgcctgtgtttccgcagcgagagcgaggaggaggaacctacaagcagcaattggcgcctattatgactttgagagcccaaacatcagtgtgc

SEQ ID NO: 306805 - DNA, 75 bp, Homo sapiens
gacatgcagttgtccaaaagtgaaattttacgaactcaggtgtccatctcttcacagtcatggctgatcttgtca

SEQ ID NO: 306806 - DNA, 90 bp, Homo sapiens
ggccgaggcggccagttgggtaccgggaggggcgaaggcgggcggcagaggcgatcaggtaaagaagcttcttaataaagtagtgctccg

SEQ ID NO: 306807 - DNA, 89 bp, Homo sapiens
tccagatctctttgccaaattggcattgaattttgctactcagataaaagtctacgcctgcaagctctcagaccgggaacatccactct

SEQ ID NO: 306808 - DNA, 50 bp, Homo sapiens
cttgggaaccgctcgagcctaccaggctggagtgcaatggcgcgatctcg

SEQ ID NO: 306809 - DNA, 100 bp, Homo sapiens
ggaggatggagatgctctgtgccggcagggtccctgcgctgctgctctgcctggcgagtaaccagctcataaatcacatcgaacagtttttggatactaa

SEQ ID NO: 306810 - DNA, 96 bp, Homo sapiens
cggtgatgcggctgtgaagccctagtcggtgtggtgtcagcacagcggcaggtcaccgttcaggaaggacccttgtaccgcacggagggctcccac

SEQ ID NO: 306811 - DNA, 75 bp, Homo sapiens
tgccagcgtagctgaatccagtaccaaaaacgtcaacaacagttttacgacctgcctagagctggaacgttacct

SEQ ID NO: 306812 - DNA, 100 bp, Homo sapiens
gctcctgcatctgcctccccatagacaggagactctctccatcatgtgaagatacagcaaaacagcagctgtctgcaagccaggaagggaaccctcacca

SEQ ID NO: 306813 - DNA, 100 bp, Homo sapiens
tatggagcttcagtagcaaataaggacatcatctgctataacctacaagcagttggacaggcaaggggagagccagttgcgcagagccctgcaaccagca

SEQ ID NO: 306814 - DNA, 100 bp, Homo sapiens
ggacagctgtatcagcctccagaagcagaactcagacatgcaggctgagctccaaaagaagcagcaatgaagcttggagatacatgggtggctttgcaaa

SEQ ID NO: 306815 - DNA, 74 bp, Homo sapiens
tttctcctgtggacaagccagtgctaccccattcacagacatcaaggatacggatgtcctctacatcgtgtctc

SEQ ID NO: 306816 - DNA, 100 bp, Homo sapiens
cggaaatgtgtcatcgaaagccagagtgtgaacatggctacgcctcttcattcccgtccatgccgagcccccgactgcagcattcaaagcccccacggag

SEQ ID NO: 306817 - DNA, 100 bp, Homo sapiens
gaagaatagagccataaagaaagcaaagcgcagaaatgttggatttgaagagtccatagaggccactgtattctattgaagaacatgtctaacagtaaca

SEQ ID NO: 306818 - DNA, 96 bp, Homo sapiens
ggagaagcggcgcggcctggacaagcggaccccggcccaggcggccttcgagaaaatgcaggagaagcgggttgcctgcaggagggaaggcggtga

SEQ ID NO: 306819 - DNA, 100 bp, Homo sapiens
aaagatgagttttttaaacttctgcaggtgtctgatgatttgtgagcctcaagtgactactctgtggaatcatctgtccttgcctttgaattagctttcc

SEQ ID NO: 306820 - DNA, 100 bp, Homo sapiens
tgcagcacgagtgggcccgcttcgaggtggagagagcccagtgggaggtggagcgggcggagctgcagaggctgaaagacactcctcggaagcagctgcg

SEQ ID NO: 306821 - DNA, 100 bp, Homo sapiens
gagcaaagtccttcaggagtccagcaagaaggaccagctcatcaccaagtgcaatggtagatttcgggcagacaacttgaacaagctgaagaacctatgc

SEQ ID NO: 306822 - DNA, 50 bp, Homo sapiens
aaggaccagtacctgcccaggaaactggttggattagcttttcaaaacag

SEQ ID NO: 306823 - DNA, 83 bp, Homo sapiens
cgaagagttggatactcagcgtcgctggcagccgctgtacttggagcgcagctcagctgggctggaactgccctcctggaact

SEQ ID NO: 306824 - DNA, 100 bp, Homo sapiens
gaataactgtcaagacaacagtgatgaggaaagctgtgaaagttctcaagatatgccaagagtttaacagtacctgggcatgggagatggagaagaaggg

SEQ ID NO: 306825 - DNA, 90 bp, Homo sapiens
ggggagcacagagaaagagaatgatgaagagaaaggcccggagactggaaaaaccttcagcatatggaaactgaatgatcttcgtgacct

SEQ ID NO: 306826 - DNA, 100 bp, Homo sapiens
gtatgtccgctatccagaacctccactctttcggtggtaaataaagatgtcctggacgtttacattgagcatcggctaatgatggagcagcggagtcggg

SEQ ID NO: 306827 - DNA, 99 bp, Homo sapiens
aggagactggatgatagaattagaactattgtcgagtgatgcgatgaaagaatataacagggctcgagtctacctggatgaaaactacaaatcccagga

SEQ ID NO: 306828 - DNA, 100 bp, Homo sapiens
tgggaaaccgggtctgctgcggaggaagctgcctcctttggaaaatctggcaactgtggaagagactgttgttcgtgacaaggctgtggagtccctgaga

SEQ ID NO: 306829 - DNA, 100 bp, Homo sapiens
ccctgtagaatcagtgctgtgaccccgagtaacaacgcgcgcttgagttggtataaactcctgaaggtacggttcctggagcagcagaacaagatgctgg

SEQ ID NO: 306830 - DNA, 100 bp, Homo sapiens
cagcgtcgctggcagccgctgtacttggcgacactaacaggtgaagatctcgggagaccatgactaagaaaagaattgctgtgattgggggaggagtgag

SEQ ID NO: 306831 - DNA, 88 bp, Homo sapiens
gcagagcccatttcagaacctgagaaagtagagactgcccaagaagatgaaaggattgttcttgttgacaacaaatgtaagtgtgccc

SEQ ID NO: 306832 - DNA, 75 bp, Homo sapiens
aataacaatggaaaggtcatttcaagttgagcatcctgtcacagaatgcattactggcctggacctagtccagga

SEQ ID NO: 306833 - DNA, 75 bp, Homo sapiens
ccagtcaatatcccacttaaatcattccagacccttatagttgcctggatcaaagcaaacctaaatgtgtacatc

SEQ ID NO: 306834 - DNA, 73 bp, Homo sapiens
gaggaggccgtggtgtctctacctgttcaactcggtgtgtgtctggggaagagacttacagaagtggagttgc

SEQ ID NO: 306835 - DNA, 80 bp, Homo sapiens
ggcccctcggcctcggcggcagcggctgcggagaaggcgagcgaagaacccttaggagaaatcttgagagtggacagcaa

SEQ ID NO: 306836 - DNA, 74 bp, Homo sapiens
aaccagtctattgttgtcagtggagagagtggtgctggaaagatggccaacttagcatttatacggggtcagct

SEQ ID NO: 306837 - DNA, 100 bp, Homo sapiens
aagagtttatatctgaaatggacgtagttgtttgtgtgtcagctggatacagacatagtgctgctgtcacagaggatggggaattatacacatggggtga

SEQ ID NO: 306838 - DNA, 74 bp, Homo sapiens
cccgcttccgcagcccgctcgtgcccggcttctggtcctgctttgaaatatcagtgatgtataatgaatctgac

SEQ ID NO: 306839 - DNA, 82 bp, Homo sapiens
cccatcctgccgtccttctccactttcgccagcccgtgccgcgagcgcggcctgcaggagatgggtctgtgaagaaatcccg

SEQ ID NO: 306840 - DNA, 108 bp, Homo sapiens
gaagtcactgaacttaggagaaagtatacagaattacagctggaagacccagatgatgtggtaccagttggccaaagaagagcctggtgttggtgcatgtgctttgga

SEQ ID NO: 306841 - DNA, 112 bp, Homo sapiens
gatcatcaaacagctatggtgatgattagagacatactaatgtacatgcactttcagaccatgctgaagtctaaattgaatgtcttaacactgaaaaaggaacctctcccag

SEQ ID NO: 306842 - DNA, 83 bp, Homo sapiens
acaagtttgtcagacctaaatgatccaagtcctcgatgggcttcctggaatattggtgtgtttatttgcatcagatgtgctgg

SEQ ID NO: 306843 - DNA, 100 bp, Homo sapiens
gagtcactggaactggaggacccgtcttctgggctgggtgtgaccaagcaggatctgggcccaggtgtacgccccaagttgggacgccggcatagtatgg

SEQ ID NO: 306844 - DNA, 50 bp, Homo sapiens
ataccatgtcctgtttctcggaacagatgaagaggaagatgatgatgtag

SEQ ID NO: 306845 - DNA, 100 bp, Homo sapiens
cgaagagcggaaagaacagacccggaatgccagggccgaggtgttgcgccaggtaatctttagatggtggaagatctctctaaggagtgagtatcgatca

SEQ ID NO: 306846 - DNA, 100 bp, Homo sapiens
gatgggttctgtcttttggcatgtgctcttctgcattagtgcaaatctctagaagatgacggtgttctttaaaacgcttcgaaatcactggaagaaaact

SEQ ID NO: 306847 - DNA, 82 bp, Homo sapiens
caaggactcaacagcagctgtgaggcccagatgttcacagttgactcacagctacaacagatgaggatgaggaagggaaatt

SEQ ID NO: 306848 - DNA, 75 bp, Homo sapiens
ctggcctggaggctatccagcgacatcggcagaaactagatgatcagaccaagcccgggagcttgtccttttccg

SEQ ID NO: 306849 - DNA, 74 bp, Homo sapiens
gagcaattgaagctgactactaaggagaataagatttccacaagacggcaccctatgtcgtcactggcagcgta

SEQ ID NO: 306850 - DNA, 100 bp, Homo sapiens
gcggcggccgaacgatgtgcgagaactgcgcagacctggtggaggtgttaaatgaaagatcttatggttggtgatgaggcaagtgaattacgatcaatgt

SEQ ID NO: 306851 - DNA, 75 bp, Homo sapiens
gtttgtaactacctggcattgccttttgttgaggtccttgaatgggcaagagggcacatgaagtacggcgtcctc

SEQ ID NO: 306852 - DNA, 98 bp, Homo sapiens
gcccaaccctcgtgcctccctgaaccactccactgcctttaaccctcagcctcagagtcagatgcagggccgaatacatcaagcaatggtaacatctt

SEQ ID NO: 306853 - DNA, 82 bp, Homo sapiens
ccacaaagggacctgatgaagcgaagatcaagacttcacatgtatcattctccgagcctgatattccgtcctcaaaaagtac

SEQ ID NO: 306854 - DNA, 51 bp, Homo sapiens
gagggtcaaactgctgctgcaggaatatgaagccatctacctagcaaaatt

SEQ ID NO: 306855 - DNA, 51 bp, Homo sapiens
tgctttccgaggaagccggtgttgccgaggcaccacactgtaactcgaggc

SEQ ID NO: 306856 - DNA, 83 bp, Homo sapiens
caacaagtgcgccgcctcagccgcggaggagagcggggccggcaagaaggacaagcacttgcacctcctgcgccgccgccccc

SEQ ID NO: 306857 - DNA, 74 bp, Homo sapiens
ttgagagcaccttgtggcgcacccagtgtaactgtgacgatgtatgacctgccatattcagtaagaactgagat

SEQ ID NO: 306858 - DNA, 88 bp, Homo sapiens
ccagcccgcccctttcggccgctgctgcccacttcccgctcggggttttaaaatcaaagatgggaaaatcggagaaaattgcccttcc

SEQ ID NO: 306859 - DNA, 98 bp, Homo sapiens
ttcgggctggggctgtcggccgcggggcggaggcactcgcgcggggggaccaagaatcgccttcagccctgtctggtgcatccttggcagaaagtgag

SEQ ID NO: 306860 - DNA, 82 bp, Homo sapiens
ttggaaccacctggagaaccaggaccttccaccaatattcctgaaaatgaattggcagagggggtcgatttgggaggaaagg

SEQ ID NO: 306861 - DNA, 50 bp, Homo sapiens
ggaagcccttccgcggaccgaaagatctgaaatagctcaactcagtcaag

SEQ ID NO: 306862 - DNA, 100 bp, Homo sapiens
gcggtgtccaccaactgccgagcagcgcttctccatggagtttgcgatccccgcgtccaggatggagcagctgaacgaactggagctgctgatggagaag

SEQ ID NO: 306863 - DNA, 98 bp, Homo sapiens
ggagaacaggtgtccttctaaaatacagcacaagctacagcctgcgtccagccataacccaggagtaacatcagctgaaaatgtgtgtctgacatgca

SEQ ID NO: 306864 - DNA, 75 bp, Homo sapiens
ctacgagtcccgcaaccacgtccacgtgtcggtcaaagctggttgtgctgtgttacaggtcagcccagtgactga

SEQ ID NO: 306865 - DNA, 100 bp, Homo sapiens
gggtggataccgtcaagctggccaagcacaaagagcttgctccctacgatgagaactggttctacacgcgagctggatttgaatttgttgaaatgagcag

SEQ ID NO: 306866 - DNA, 100 bp, Homo sapiens
cagtcttcccgcgtccgccgattcctcctccttggtcgccgcgtccttggctggcgtccagagcagctgagttccagataaaaactgtcagacccggcct

SEQ ID NO: 306867 - DNA, 100 bp, Homo sapiens
caaatacatcagcttgtaggagacagaggatctagtgaaaagccatttgatgtatgcggtcagagaagaagtggaggtcctcaaagagcaaatcaaagaa

SEQ ID NO: 306868 - DNA, 82 bp, Homo sapiens
ggcgaatcacttataaatggcgccgaagcaggacccgaagcctaaattccaggaggaaaacttggaatataacgtggagcct

SEQ ID NO: 306869 - DNA, 75 bp, Homo sapiens
tagctcaattgtcatgcaggacaccaaagacagcgtggacgatgaatttgaattgtccaccgtgtgtcaccggcc

SEQ ID NO: 306870 - DNA, 90 bp, Homo sapiens
cttaaaaacaaaagattgagctgcactgtattcctgtagctacagcaagctgggtagcaggcagatccaaaggatatcatgaagtttcca

SEQ ID NO: 306871 - DNA, 100 bp, Homo sapiens
ttcgggctgggagcgtgctttccacgacggtgacacgcttccctggattggtgtctttctcgagaagcaggtggaaacatgagcattcagtttcttggta

SEQ ID NO: 306872 - DNA, 82 bp, Homo sapiens
gaagattaacctggagttaaggaacagatccccggaggagggacccagacatggagctgcgggaagaagcctggtctccggg

SEQ ID NO: 306873 - DNA, 101 bp, Homo sapiens
ctataaagccagtatgatagcaatgatggcagctgatgaagagtatgaagatggaattgaaaggacgtgtgacactctccttatgtgcattgtcaccgtgc

SEQ ID NO: 306874 - DNA, 100 bp, Homo sapiens
gaactggaaatataggacatgcgtttgagatctactgtgagcattttttactgtctacagaaacttattgtaattcatttttcctcactccagtagtaag

SEQ ID NO: 306875 - DNA, 88 bp, Homo sapiens
cacagcacagttcctgggaaggtggagccaccagcctctccctgacaagttggatggcttgaggactggtactaaaaggaaacgtgac

SEQ ID NO: 306876 - DNA, 118 bp, Homo sapiens
catgtcaagcgaagccttgaaaaagctgccctgagacggtgtcccgccgaaaggtactccaaagattcaggtttactcacgtcatccagcagagaatggaaagtcaaatttcctgaat

SEQ ID NO: 306877 - DNA, 82 bp, Homo sapiens
aactccatcctgcgggatgccttgaaccaggccacgagccaggtggagagcaagaggcagtggagaaggtgacacagcacat

SEQ ID NO: 306878 - DNA, 100 bp, Homo sapiens
atcggccggaggcggctccgctcggccggcgcggcgcagaagaaacccgcggcgaccacagccaaagcgggcggccgttgctccagggagaactgcaaat

SEQ ID NO: 306879 - DNA, 82 bp, Homo sapiens
gtcacccctttccagccagcaaacaaggttggtcaaagaaaaagtgatgtatgaaaaagaggcaaaacaacaagaagaaaag

SEQ ID NO: 306880 - DNA, 51 bp, Homo sapiens
cccttgggccgcgtctcctttgaggtatccttttgcactatccaaaagctc

SEQ ID NO: 306881 - DNA, 99 bp, Homo sapiens
gcgctggaggagcgaggcagctgtactaggactgggaacgggccatttcataattctgaatcatgtctgataacggagaactggaagataagcctccag

SEQ ID NO: 306882 - DNA, 100 bp, Homo sapiens
caggacatcactttagatgatgggtgctgtgattacaccaaccatggaccatcccatgtcaatgcagccagccaacatgatgggcccactgacacagcag

SEQ ID NO: 306883 - DNA, 82 bp, Homo sapiens
gcgaagtgagcatcttgattagaagcagggtgaaatgacaatggatgctctgttggctcgattgaaacttctgaatccagat

SEQ ID NO: 306884 - DNA, 50 bp, Homo sapiens
caaagagtttcaagatgcaggtgaacagtggccttgttcccagtgtacca

SEQ ID NO: 306885 - DNA, 98 bp, Homo sapiens
caacccaagacgttcaccgtgaggatcgtcaccatggacgccgagatggagttcaattgcgagtgtgtagcccacaatgccctggagtgtgcacgagc

SEQ ID NO: 306886 - DNA, 100 bp, Homo sapiens
cttattcacagttaccaaagctgactcattctgatgaaggaaagagcgtccctgtgcagctgcgtgtccttcagttctttggctctgattccgtgtctgg

SEQ ID NO: 306887 - DNA, 98 bp, Homo sapiens
gagagcgttactgctgcacacctaaagtcaaggtgttctaagaacggaagcatctgggctggatggaatttagcatcaagcagagtcccctttctgtt

SEQ ID NO: 306888 - DNA, 100 bp, Homo sapiens
atcaagagagcactctgagctccagaaggagctttccaggatagctttgaggataagctgcggatgagcgggtcagttaaatgaaagcatggaccatggg

SEQ ID NO: 306889 - DNA, 75 bp, Homo sapiens
tcagaatgagctcaccagggagctgaaactcaagtatggctatcctgatccttcttacctgaaacgtgtcaaaga

SEQ ID NO: 306890 - DNA, 85 bp, Homo sapiens
aacgtgttggaccttccggagcttctcagaagacagagggttttcttttgagggaccagttactctccacaagaaaattcacaca

SEQ ID NO: 306891 - DNA, 97 bp, Homo sapiens
acaaattatgctgcagcatattgtactggcctgctgctggcccgcaggccttgcaccagaatagagagatgatagacccagacaagttctgcagcct

SEQ ID NO: 306892 - DNA, 101 bp, Homo sapiens
atggatcggcgctggacgtgctcctctccatggggttccccagagcccgcgcaacattgacatcaccaatttcagcagcagctggagcgatggcctggcct

SEQ ID NO: 306893 - DNA, 50 bp, Homo sapiens
ggtgaacgcaggatgcgaccaggattttgtgtggatgagggctcggctac

SEQ ID NO: 306894 - DNA, 74 bp, Homo sapiens
gctcgggacggaggacgcgctagtatgagagtccggagtgttgtcatgtgaagcctgccatccaggaacctcca

SEQ ID NO: 306895 - DNA, 83 bp, Homo sapiens
aaggagcgaatactactggtaaactaatggaagaaatctgctgcaccactggccttcttgtatcatggatgtgtcattacgta

SEQ ID NO: 306896 - DNA, 101 bp, Homo sapiens
agaagctgccaagatagccaaagacaagacgcaggagaaaatcgagacctcaagtaatcattcccaagaaatgcaacctcaccacaagtacaaagaccatc

SEQ ID NO: 306897 - DNA, 74 bp, Homo sapiens
tatgatgcgctgctgccgtggcccttccggaacaagggttcaccagccagctgggagctgaggggaaaagccaa

SEQ ID NO: 306898 - DNA, 90 bp, Homo sapiens
caagaagataactatccaaatagtctatgtataaaagtaaatgggaagctatttcctttgcctgaccagttacagaagtggatccgcggt

SEQ ID NO: 306899 - DNA, 96 bp, Homo sapiens
ttaaaagatgatgagaaataaggacaaaagccaagaggaggacagttcgctacacagcaatgcatcgaggcgtcgaccagaagattatgatattca

SEQ ID NO: 306900 - DNA, 97 bp, Homo sapiens
tgcagccgagaacgagctcaaccagtcactgcttcaaccacctgtgagaaattagaaaaagccaggaatgagttacaaacagtgtatgaagcattcg

SEQ ID NO: 306901 - DNA, 75 bp, Homo sapiens
ccggctggagcggatcccacacctccggaccgagggacgcgggcccgatgagagaaagggaaagttaaggatgct

SEQ ID NO: 306902 - DNA, 100 bp, Homo sapiens
ttgtggcgaatggggctcacgtcgacaaagtctggtggataaagtatctcgaagacagagacctgatatgaatatattatttctaaatatgaaagtaaga

SEQ ID NO: 306903 - DNA, 75 bp, Homo sapiens
gtgcagccgcgaggaggcgcgggaggtgttcgagaacgaccccgagacgacacgatgaggcgagtggtacgacag

SEQ ID NO: 306904 - DNA, 75 bp, Homo sapiens
cagccaggacatcctggaacctgggaaaggactgtgccctgtccacggtgcctcctgcatgtcctgctgccctga

SEQ ID NO: 306905 - DNA, 88 bp, Homo sapiens
gaaaatgacagccttcatttctctgaacatactgccttatgggacagatcaaggaaaagcttcactctgaccatcactgtcttcacaa

SEQ ID NO: 306906 - DNA, 83 bp, Homo sapiens
ctctgttaaagctggtctgttctaactgagtatttccaacttggggatgtttggcatcgacgaatttactgcagtgattaacc

SEQ ID NO: 306907 - DNA, 73 bp, Homo sapiens
aagcttgagagaaaagcccccaaaagcagctattcagcaattcccttgactgaagacgttctcataacattag

SEQ ID NO: 306908 - DNA, 100 bp, Homo sapiens
ggcagcagcagcggcgggaggagcctccgggatgttcctggttcgccgggacagcagctcgaagcagctggtgctctgtgtccactttccttctctgaac

SEQ ID NO: 306909 - DNA, 100 bp, Homo sapiens
ggaaagctattttgcgaactatcttctccagcggagatggccaatgagagaagaccaagaggtcggagaagaggtagaaaatgtggcagaggccataaag

SEQ ID NO: 306910 - DNA, 75 bp, Homo sapiens
cttcatggggaactgcaagacaggaagagaggccgtgcccctcaggttgttcggaatcctataattgaaaaacag

SEQ ID NO: 306911 - DNA, 100 bp, Homo sapiens
tcgcagtggtcgcttcttctccttgtttgcctgagaatacagatcaacccacagaacaaagcggatttccaaggcatctccccagagcgagcctttgctg

SEQ ID NO: 306912 - DNA, 100 bp, Homo sapiens
gaaaaatgaaagacacagacagtgaagaagaaattagagaagcattccgtgtgtttgataaggtggatgagaatggcaaaattagtcgccttcgtcgaga

SEQ ID NO: 306913 - DNA, 100 bp, Homo sapiens
aggcggggatggcgtcccccgggggcccgtactgcacatcgtggtggtcggatttcaccacaagaagggctgccagatatggaatgtgcagatgtcccac

SEQ ID NO: 306914 - DNA, 50 bp, Homo sapiens
cttcggatggtgaactcattagaaggaatgcagagagcaaccaatgtcac

SEQ ID NO: 306915 - DNA, 100 bp, Homo sapiens
gccaggtccctgctgaatcacacgccgccatccgggaggcccagggaaggtgctgatgttgctaatgtctgtaatgaagctgcgttgattgctgcaaggc

SEQ ID NO: 306916 - DNA, 100 bp, Homo sapiens
tcgtccaggaggcctcctccaagccggccaattccccccgcaccaaattgcatcgtttcccagtttccaacatggctagatccatcagaaactgaagccg

SEQ ID NO: 306917 - DNA, 100 bp, Homo sapiens
ctgtgacagtaacagtacttgggatcccccagttccaaagtgtcttaaagggaaatccctaagtcagccaacccctcctcccatgccaatcctttcacag

SEQ ID NO: 306918 - DNA, 100 bp, Homo sapiens
cccggggagctgactccattgcatgtgggaccttcagccgtgaactgccggactactttagttctgtggccacagtggtgtatcttcgcaaagagaactg

SEQ ID NO: 306919 - DNA, 100 bp, Homo sapiens
tcaggcaggaggacgtggaggaccattatgagatgggggaggagctgggcaggatcatccagcagctcgtcaacggcatcatcacgcccgccaccatccc

SEQ ID NO: 306920 - DNA, 100 bp, Homo sapiens
aaaggcaaaaatcccatctaccgcaactctcagttcgagagtaaagatggctattcatatgaaaaggaagcaatggaaaattggatcagcaaaaagaaac

SEQ ID NO: 306921 - DNA, 100 bp, Homo sapiens
ggggacccttccgtatctgcctaggcattttgctgtctcctcctaatacggatgggaagcacaaaatgcaagaggaaaatgttaaactaaaaaagcccct

SEQ ID NO: 306922 - DNA, 83 bp, Homo sapiens
cagatctctgcagttacaggaacatcgtctgcttcatgtgagaaagatcagtctaaagaaaaggagaagaaagtgaaaaaaac

SEQ ID NO: 306923 - DNA, 98 bp, Homo sapiens
atatgtgcctggatgcagctcacctccgataaaaatttccaatgggcaaatactggagcagctgtgtttggaacacagtcagtcggaacccagtcagc

SEQ ID NO: 306924 - DNA, 90 bp, Homo sapiens
gaagaggctttggttttagcaaaaggagcccggaggaacattccaaaggaaaaatttcagcaaaccaagagtttcactgttgacatccgc

SEQ ID NO: 306925 - DNA, 75 bp, Homo sapiens
cccagcccgcccaactcccagcggagagcaagatgaagaaactgaggttcagagaggttaagagactccactgag

SEQ ID NO: 306926 - DNA, 50 bp, Homo sapiens
gagatccgcagagccatcacaggtcgcatcccagaaagcttaagaaattg

SEQ ID NO: 306927 - DNA, 90 bp, Homo sapiens
tggatctggtgtgcatcagcatcccccctccactcacccggcagatatccgtgaaggctctagtgtatgcctggaagggcgaaacggacg

SEQ ID NO: 306928 - DNA, 100 bp, Homo sapiens
tcatcatagctcactatggccttgatcctcctgccttagcctcccaagcagctggtattacagatccagaagcagcaaggtctagcaattccaaaatcac

SEQ ID NO: 306929 - DNA, 96 bp, Homo sapiens
gcttgaagaaacagaggtcaaaggaaaaagaaaaaggggtcgtcctggccggcctccaactttcttgtctgcacagaaagtcccagtacaacttcc

SEQ ID NO: 306930 - DNA, 49 bp, Homo sapiens
gaatcaccagcactggctgaaggttggacacgagttgccgctggttgtc

SEQ ID NO: 306931 - DNA, 98 bp, Homo sapiens
cgctgctggctgcgctctgcccggcgagtcgggctctggaggaaaagaaagcagttggaattgatcacaccttttcagttgtacttcaatcctgaatt

SEQ ID NO: 306932 - DNA, 90 bp, Homo sapiens
acggccgaggcgccgagaggagacagccggagcgcgacggagactgggtcttgctatgctgccgaggttggtctcaaactcctgggctca

SEQ ID NO: 306933 - DNA, 83 bp, Homo sapiens
gccgggctggctgcggccgccctgggccgggccccaccggacggctccccacaggtgcaggaagccgccgcccagccatggac

SEQ ID NO: 306934 - DNA, 82 bp, Homo sapiens
cgccgaggcaccgaggcactcagaggaggatggccgagcctcgatttaacaacccctacttctggccccctcctcccaccat

SEQ ID NO: 306935 - DNA, 50 bp, Homo sapiens
gatgtcctcttcctgggcactggtgacagcagggacatgtctcgggagat

SEQ ID NO: 306936 - DNA, 51 bp, Homo sapiens
tggagaactacagcaacctgatctcattggatccctgcatgtcactgagtc

SEQ ID NO: 306937 - DNA, 98 bp, Homo sapiens
atatgttggtgtcagaaaccacaggcgaatccataactctgataagccgtacaggtttatggctacaaatgatttgatgacggaactgcagaaagatt

SEQ ID NO: 306938 - DNA, 100 bp, Homo sapiens
gtgaaagagtggaatagtgtgaaactgcatgctacagttatgaatacactattcaggaaagaccccaatggtctttcactaccattcctacagtgattgg

SEQ ID NO: 306939 - DNA, 71 bp, Homo sapiens
cgctcatgatcgacttcctcacccgcgcctgcgacctcggtgctaactttgagtacatcatcgcagaaaaa

SEQ ID NO: 306940 - DNA, 74 bp, Homo sapiens
ggagctcgcccccaacttccaggagggctctgaactcctacttcgagcctccggtggaggagagcgccttggaa

SEQ ID NO: 306941 - DNA, 100 bp, Homo sapiens
cggaaaacctaaccatgaagacttgaacttaatacagcaagaaagaccatcaagtttaccacccaccttgggacaccttgactccaagcccagcagtaag

SEQ ID NO: 306942 - DNA, 98 bp, Homo sapiens
gtgacctgactctctgaggctcattttgcagttgttgaaattgtccccgcagttttcaatcatggacgagattgaggagctgcgggccgagatgctgg

SEQ ID NO: 306943 - DNA, 99 bp, Homo sapiens
gattcttccaaggaaagactatgagccccacaccagtgagaagcatcagcaccgtgaacttgtctgagaatagcagtgttgtcatccccccacccgact

SEQ ID NO: 306944 - DNA, 82 bp, Homo sapiens
ataagtggaattttggagatattcaaagggagatgcatttcctgagctgaagaaggacccagacatggtgaaggacatcatt

SEQ ID NO: 306945 - DNA, 110 bp, Homo sapiens
agactctgtggctctgtgacctgcaggtattgggagatccacagctaagactccaggaccctctggaagcctagaaatgagatcctgcatattttgatgaaaattggcta

SEQ ID NO: 306946 - DNA, 75 bp, Homo sapiens
tggcatctagactttggtttacatacaggaaaaactttccagccattggctgtgatccaaaatcccttcagcaat

SEQ ID NO: 306947 - DNA, 97 bp, Homo sapiens
aaagcaggcgaacccgcggcgcaataacggtgcacattcaggttcccgagcacaaacatcaagataacgttcactgccctgtccagcgagaagagag

SEQ ID NO: 306948 - DNA, 90 bp, Homo sapiens
aacagacctagtgggcgttgcctttagacccaggtagcatcttggacaaaatattgggcagctttgtgtgggacacagcttttttactat

SEQ ID NO: 306949 - DNA, 51 bp, Homo sapiens
cactggctttggctggggacacccgacattttaccaaatgttgcaagaact

SEQ ID NO: 306950 - DNA, 75 bp, Homo sapiens
gggagccgcaccacctaacgctggccgacaacagcctggcgtccgccacggtgctgctgctaacatctgcagaag

SEQ ID NO: 306951 - DNA, 76 bp, Homo sapiens
ccctgagagtgactattccctgagggctctttccaggatgctggcgttatccaagctgcctacagcctaaacttcc

SEQ ID NO: 306952 - DNA, 75 bp, Homo sapiens
cagagacaagctgagcttgccgcacaaaaagctagagaggaaaatatgttgtgttcttcttttaccctcttgact

SEQ ID NO: 306953 - DNA, 83 bp, Homo sapiens
taacaagcagcagtgaggacaccaaagcttctgggctggctggctgagaaactacctactcttcgttccacccctacagacct

SEQ ID NO: 306954 - DNA, 83 bp, Homo sapiens
gattgactatggaaaagttgccaaattggttcgagaacttgtcttggacaattgcaaatcaaatgatggaaaaattgagggct

SEQ ID NO: 306955 - DNA, 51 bp, Homo sapiens
ccgggccctcgactgggttcccaggagccgatcctctggaccttctccatc

SEQ ID NO: 306956 - DNA, 82 bp, Homo sapiens
ccaggaacccctggaagcctagaaatgaaatgcactcggtgatggaaagagagccactattctgaagaacacttggccaaag

SEQ ID NO: 306957 - DNA, 100 bp, Homo sapiens
cgtgcaacatggggcttgagaaaggagagacaagagagacacctccaacttcgacaaagagttcaccagacagcctgtggaactgacccccactgataaa

SEQ ID NO: 306958 - DNA, 101 bp, Homo sapiens
acactcctgcaaactgttgaagaagaacatgggaatgattgttataaatgaaggctctcttgatcgagtaaccagctcataaatcacatcgaacagttttt

SEQ ID NO: 306959 - DNA, 100 bp, Homo sapiens
gaggagctgctatggtgctgagtttcctggtagagccggccgagctgaggcggtcgcggccatgaagttatttggagagactacattagttaaatcaagg

SEQ ID NO: 306960 - DNA, 100 bp, Homo sapiens
gaagaatttgaccaactccagaaatattcagaatacgttacatccaagaggaaataatccaggcaaggaagcacaagctgatcaagatgtgtagttctgt

SEQ ID NO: 306961 - DNA, 75 bp, Homo sapiens
acttggattctggagagcataagacttcagttttagaggaaaggagtctccaagagcttttagattaccccgggg

SEQ ID NO: 306962 - DNA, 74 bp, Homo sapiens
tttcgtgcaactgaaaatgacattgctaatgatactatttttgagacaacaaattaaggaacttgaaaagctaa

SEQ ID NO: 306963 - DNA, 100 bp, Homo sapiens
ggagagagctggaagaagcacctcagcggggagttcgggaaaccgtattttatcaaggctggcctgctgtctgccttgggctccctgatattgatgattt

SEQ ID NO: 306964 - DNA, 83 bp, Homo sapiens
ctgactgggagaagaccaagcctgtcacgatgcctgaggaaacccagacccaagaccaaccgatggaggaggaggaggttgag

SEQ ID NO: 306965 - DNA, 82 bp, Homo sapiens
accgcagtatcatgctggccaagaagatcatcattaaggacggaggcacgtaatttctatgcagcccccgacccagagccga

SEQ ID NO: 306966 - DNA, 82 bp, Homo sapiens
gctagcgttcgccttcagccaccatggggaatgggatgaacaagaattcagaaggagctggcggacatcactttagaccctc

SEQ ID NO: 306967 - DNA, 50 bp, Homo sapiens
caacatctttcctcaccccaaggccataaaattttgagtagaaaaatcca

SEQ ID NO: 306968 - DNA, 100 bp, Homo sapiens
aacattgtttacaaaatagatgacatgacagctgcacccatggacgttcgccagtgggttgacacagatgaacgtcaaggtcgtgggaaataaaaggcag

SEQ ID NO: 306969 - DNA, 82 bp, Homo sapiens
cccggagttccgcgcggcgccagcccttccgccacggccgtctctggagagcagcaggaggtgcttcccaaggaccgtagat

SEQ ID NO: 306970 - DNA, 87 bp, Homo sapiens
tcaaggtggccatagaatggccgggcgcctaccccaaactcatggaaattgatcagcggacaaggcaaaatctcagcaagttcggac

SEQ ID NO: 306971 - DNA, 97 bp, Homo sapiens
tggggagcttgaggacacttaccacgaagtgtacgaagccatcgacagcagagatggagcatcttgtgcagagttggtgtcttttaaacatcctcat

SEQ ID NO: 306972 - DNA, 75 bp, Homo sapiens
aaacggctcaacccaccgctgccgaaatgaagtataagatcggacagctggcttttaaaggaatgaagagactca

SEQ ID NO: 306973 - DNA, 100 bp, Homo sapiens
ttttgatatctggggccaagggacaatggtcaccgtctcttcagaacccagcgggtgccgcttctccacccgaggcttccacctccaacgagccatgttc

SEQ ID NO: 306974 - DNA, 73 bp, Homo sapiens
ccgaaagctcagcacacactcccgcaggatcccgccattgttcaggtggataattactgtaccttcctcatgg

SEQ ID NO: 306975 - DNA, 82 bp, Homo sapiens
ggggcaggtggctgcatagtcttggcggagacaatgcagatcttcgtgaagactctgactggtaagaccatcaccctcgagg

SEQ ID NO: 306976 - DNA, 100 bp, Homo sapiens
ccttcttagaagacttgactggtcttacattgctgcatcaagaaacccaagctgctgagatcaaattttctccggtggctaaaaagttgtttgtggtaac

SEQ ID NO: 306977 - DNA, 75 bp, Homo sapiens
cgggacccggttccccggcccacagtgggggtgtgcaaacccgagagaactggaagacaaaactgctaaggccaa

SEQ ID NO: 306978 - DNA, 75 bp, Homo sapiens
aggcttcttaccattcagcaatttagttactcatctagacttgaggtttaacagaataagagaaattccagggag

SEQ ID NO: 306979 - DNA, 100 bp, Homo sapiens
gcgaactggggtcagccaatggagtcacatcagcattttctgttgactgtaaaggtgctggtaagatttcttctgattctgaaaaagagttccacgtcct

SEQ ID NO: 306980 - DNA, 51 bp, Homo sapiens
atatgatttcagctgcaatggcagaacacagatatgtagaactcttcttga

SEQ ID NO: 306981 - DNA, 90 bp, Homo sapiens
tggctatccagcgcttcctgcggatgtgggcagtagaacactctctccccagaaatccaacttctcaagcctgagaagccaggccccggc

SEQ ID NO: 306982 - DNA, 100 bp, Homo sapiens
gcaaaggtgctaatccagtggaaatcaggagaggatgagtggcagtgtactgaatgcaagaaatttaactctccaagcaagaggtactgttttcgttgtt

SEQ ID NO: 306983 - DNA, 100 bp, Homo sapiens
atcccggaaactccagcgtgtctccagccgtggtccggaccctatttgtcagtggccttcctctggatatcaaacctcgggagctctatctgcttttcag

SEQ ID NO: 306984 - DNA, 100 bp, Homo sapiens
cctggaacggggcgagcgccatgagcaacaaatgcgacgtggtcgtggtggggggcggcatctcagctgtgcagcagatactgtgatgatggattgcaag

SEQ ID NO: 306985 - DNA, 50 bp, Homo sapiens
ctccaccactccctcccatcccgagtcgttccccatcaggaagtcctcgc

SEQ ID NO: 306986 - DNA, 96 bp, Homo sapiens
actatcctcctagccaaattgctcaactaagaccaagtcctcgctggactgctcagggtgccagacctcatcatatggctcgtggacagcagaaaa

SEQ ID NO: 306987 - DNA, 82 bp, Homo sapiens
actgggcggtgccggcgccggagacgatgccgttgagaaaacgacgctccacacctttaacttcttccacacttccttcaca

SEQ ID NO: 306988 - DNA, 100 bp, Homo sapiens
ggggagcgtccggagctagctggatcctctaggcagagttcggcgtgtactgcagccactgccggagtgaggtccgtggcacgcagtgtgccatctgcaa

SEQ ID NO: 306989 - DNA, 82 bp, Homo sapiens
aaggacgccagcatcatacaccggctgttcgaggccttgactgtagagtcatcttagtgggatttggggaagcaacagggct

SEQ ID NO: 306990 - DNA, 50 bp, Homo sapiens
gtgacagagtggagccatggctagagtgcaccgtccaggtgaggttagag

SEQ ID NO: 306991 - DNA, 75 bp, Homo sapiens
cacagcccaaactcgctgtcatccaggaagcccggtttgcccagagcgccccagcatgaggccaccaaggtcatg

SEQ ID NO: 306992 - DNA, 98 bp, Homo sapiens
tcgtctcctagaaatctagcactggagaaacgattggcctaatgaagaagttcaacctggagagatggaaaatcagctctcataactaagttaattta

SEQ ID NO: 306993 - DNA, 100 bp, Homo sapiens
caggatgtggaccaacgtgaggctcccctcaacaacttctctgtggcgcctgccactgcagagccccgccatggaagacacgccgttggtgatatcgaag

SEQ ID NO: 306994 - DNA, 100 bp, Homo sapiens
aacagaatcctctgaaacttccacaggacacatttgacatccggatcctgatggccaagtctgtcaagtacacggtgaacttcttagaagccaaagaagg

SEQ ID NO: 306995 - DNA, 87 bp, Homo sapiens
agcttaaaggaagcagaaaatgtgtggcggattactgggacagatgtttcgaccacttggcacagtaacgatgacgatgtgtatagg

SEQ ID NO: 306996 - DNA, 51 bp, Homo sapiens
accaagcatcccattacagatagaagaggaccacagccgctttgtcaactg

SEQ ID NO: 306997 - DNA, 88 bp, Homo sapiens
cgagagatcccgagtacgtctacagtcagccttacggccaggaatagttgctgaacaccccaggcctgctgaggtccctccttgagtc

SEQ ID NO: 306998 - DNA, 100 bp, Homo sapiens
ggaacatccccaacgtggatgacaagaagacgtccaatctgagcgtgctgcggacggcgctgcggtacatccagatggtcatcatgggccagtgctacta

SEQ ID NO: 306999 - DNA, 50 bp, Homo sapiens
ggggcggcggccacgccaaggacgggtaacgatgggaaaggaactcctgt

SEQ ID NO: 307000 - DNA, 80 bp, Homo sapiens
gccgctcctaagcctgcacagccgcggcggcagcagcagtgagagcagaaagatgaaggtcttagaatcattgattggaa

SEQ ID NO: 307001 - DNA, 104 bp, Homo sapiens
gagcaagatcaccgtgacatccgaggtgcctttctccaaaagaaaaatggctacaaacttcctagcacatgagaagatctggttcgacaagttcaaatatgacg

SEQ ID NO: 307002 - DNA, 83 bp, Homo sapiens
gaccgcgcgcagggcctgcagcgggagctggacggcgagcgcgagcggcgcgagaaagtgtgagatcaaccatgagttccgtt

SEQ ID NO: 307003 - DNA, 51 bp, Homo sapiens
agccggggaatgggcccgcacttgcccaggacgagattgaggagctgcggg

SEQ ID NO: 307004 - DNA, 75 bp, Homo sapiens
gcccttcctatgggctctcggccgaagtcaagaacaagaaccagcttcttgcaaaaggactgttctttgtggagg

SEQ ID NO: 307005 - DNA, 80 bp, Homo sapiens
ctcccgggcggcgaccggggcctgggtccacgccgagggcaggacgaacttcaccagcacatgattaagtaccggtacat

SEQ ID NO: 307006 - DNA, 75 bp, Homo sapiens
ctagctgctattattgaacgtctgcaggaaaaggttgtaatgggagagttgttcctactgatgggggcagatatg

SEQ ID NO: 307007 - DNA, 119 bp, Homo sapiens
ttattacgagtactacccgcacgtgtaccctgggcgcagggcttcagacagcaaagtcctgacatgtgcagccgtgtggaggatgccgaaggaattggaatcaggcagccacgagtccc

SEQ ID NO: 307008 - DNA, 99 bp, Homo sapiens
aatgtctctagtcgtatggacagcacgggggtccccgaccgaatccaggtgtcagcagctcccggggcggggtcgtgtgcggggacctctgcgtgtcag

SEQ ID NO: 307009 - DNA, 100 bp, Homo sapiens
tagaaaatggacctgctgacagagcagatggcctggagattcatgacaaaatcatggaggtctatagtaaagagatgtggcatctgatgaaaaggaagac

SEQ ID NO: 307010 - DNA, 83 bp, Homo sapiens
gggaagccctgctgggcatggacctactcaggccgctacctgtctgaggaacccgagccctacctggcagtctacctgcactc

SEQ ID NO: 307011 - DNA, 98 bp, Homo sapiens
gtcagtcagcttttatacccggaaggatgggcagcttacctggagtagaacagaaaaattattatgtctgtgttcccttgggactcattggaaattgt

SEQ ID NO: 307012 - DNA, 99 bp, Homo sapiens
agtcagatgtcaaaagccagactattctcaaaccactgtctgaatccattgagacccagagcagcagttctgaagagatagtgcccagccctccctcgc

SEQ ID NO: 307013 - DNA, 51 bp, Homo sapiens
attttgtcagcttgtcgtcaaggaaatactcttaattctaaggaaaacctg

SEQ ID NO: 307014 - DNA, 100 bp, Homo sapiens
tttatgactccgttgggctccggccctcctagagaggcctccatagcgcagggcacctttcacagccagcaggcattggaatatggcaccaaactcgttg

SEQ ID NO: 307015 - DNA, 108 bp, Homo sapiens
ataccaggctaccatggtctacaagactctcttcgctctttgcatcttaactgcaggtgagaagccctaccactgcaactgggacggctgcggctggaagtttgcgcg

SEQ ID NO: 307016 - DNA, 50 bp, Homo sapiens
ccagcatcagcccctcccacagccaggcccagctctgaccagactccatg

SEQ ID NO: 307017 - DNA, 74 bp, Homo sapiens
aggattccaagtaactcttatttgaacaaaatccagtctcatagcagaggagaatataatgtttacagcacctt

SEQ ID NO: 307018 - DNA, 74 bp, Homo sapiens
gaagcatcgttaaagtctctcttcaccctgccgtcatgtctaagtcagaggtgtgaaagcctggtggacattta

SEQ ID NO: 307019 - DNA, 90 bp, Homo sapiens
gtggcgtggttgtgaggactatagttcctggaggattagcagatcgagtttctctactcggacgaggtgcagattggcccggagacggtg

SEQ ID NO: 307020 - DNA, 75 bp, Homo sapiens
cgtcgccatcttggatccgcgggacaagaaaattcatgcggaaacccttttccaaagagaaatgaagaagaaaac

SEQ ID NO: 307021 - DNA, 100 bp, Homo sapiens
gagctcacatttctcatattgctcaacaggatccaaggattctgtagctacaatgttgtcaagactttttcgaatgcatggcctctttgtggcctcccat

SEQ ID NO: 307022 - DNA, 82 bp, Homo sapiens
ccatgagcgacgtggctattgtgaaggagggttggctgcacaaacgagggcgccatgttttggaagtttgacctgcacacaa

SEQ ID NO: 307023 - DNA, 100 bp, Homo sapiens
cctgctcctcttctggctctcaggctccagcccccttttggacatcgttggcggccggaaggcgaggccccgccagttcccgttcctggcctccattcag

SEQ ID NO: 307024 - DNA, 100 bp, Homo sapiens
tggcctacagtctgaactcttctgctcaggagcgcctaataccacttggtgtgatgaatgcagactctgctaccattttggctgtttggatcctcctttg

SEQ ID NO: 307025 - DNA, 89 bp, Homo sapiens
atggctcctggaccccaagatccttaagttcgtcgtcttcatcgtcgcggttctgctgccggtctcagctgagtctgctctgatcaccc

SEQ ID NO: 307026 - DNA, 83 bp, Homo sapiens
cgacgaccggatcctgaggaggcagctgcggtggcagctgctgagttctcggtgaagggtggcttgatgatattggcttaccc

SEQ ID NO: 307027 - DNA, 75 bp, Homo sapiens
ttcgtcagctcaccccgggacgaggacatggagaaacaactggctgagcagtccaaagtcctgagcgccgtggag

SEQ ID NO: 307028 - DNA, 100 bp, Homo sapiens
gccaacaaggccagtgccaagttatattcaaagaccagattatgctgatcatcccttaggtatacccgaaatcttgtggatcaaggaaatggaaaattta

SEQ ID NO: 307029 - DNA, 82 bp, Homo sapiens
gcagataccgtttgacaccaccagagagaaggatattcctggactgactgatactacagtgcctcgccgcctgggccccaaa

SEQ ID NO: 307030 - DNA, 75 bp, Homo sapiens
gaggaactgcaggagcaagtggcgctgatggattaccgggccttggtgcatgagcgagatgaggcagcctatggg

SEQ ID NO: 307031 - DNA, 101 bp, Homo sapiens
acagtgatgtgaagaggttcagctgtcctaatcctcactgccgaaagaaaatggacccaagtggggtcaaagtgctggaaacagcagaggacatccaggag

SEQ ID NO: 307032 - DNA, 100 bp, Homo sapiens
aaagtttctcagaatggagacattctcattgaagaaatgatagagaagctcaagaaggtttttgccaatccagaagactgtgtagcatttggcaaaggag

SEQ ID NO: 307033 - DNA, 90 bp, Homo sapiens
gaatatgctgaagggggctctttatataatgcttttatcaaaatacaactcaaacctagctactccaatagcaattaaagcagtgccacc

SEQ ID NO: 307034 - DNA, 100 bp, Homo sapiens
ggttcggtggcctctagtgagatctggaggttgatgccggcccaggatggatcagacctgtgaactacccagaagaaattgtctgctgcccttttccaat

SEQ ID NO: 307035 - DNA, 100 bp, Homo sapiens
gaggaaatggccgaggagccggagccgcaggtgacttgcttttggagggcttcaacaactacaccttcctctccaatggctttgtgcccatcccagcagc

SEQ ID NO: 307036 - DNA, 83 bp, Homo sapiens
agccgatactgagcttcttcctatttgccatggtttgcagaaaaaacttcagcatgtgccaggaacacaacctcaccttgatc

SEQ ID NO: 307037 - DNA, 90 bp, Homo sapiens
tatgatattcttctcctggttaatcaagaattctctatttctgctccgtcatccatgccactggtgtcaaattgagaaccaggtagatcc

SEQ ID NO: 307038 - DNA, 100 bp, Homo sapiens
caagccgctcttccccacctgcccggtgcccgaggaggcagccaagctcgtagcctgccactccgtgccatcagaagagctaacaattgctggaatgacc

SEQ ID NO: 307039 - DNA, 60 bp, Homo sapiens
ccccaggacgccttctgcaactccgacatcggaataagacgagttggaagaagacctgat

SEQ ID NO: 307040 - DNA, 97 bp, Homo sapiens
tacttggattctatccctcctggtcagtacatggattcttcacttgttaagggcggcgactggcggcgcgatggacctgaccgggctcctgctggac

SEQ ID NO: 307041 - DNA, 50 bp, Homo sapiens
ccgacgtcgaccagcagagactggtgtaaattttgataccaccattgccg

SEQ ID NO: 307042 - DNA, 50 bp, Homo sapiens
agaagatcctgctgcccgagcccagggtgagaactctgtctcagtcgacg

SEQ ID NO: 307043 - DNA, 83 bp, Homo sapiens
cgagagtgttgggaagaggagcgcgtccccggggaaatgaggcaccgtctgcgtcctgctgtccttccccttcatcttcagcc

SEQ ID NO: 307044 - DNA, 75 bp, Homo sapiens
cagctgacaagtcctctgaaaatactgttccacctggagggatatctgcattacctccacctcctccacctccac

SEQ ID NO: 307045 - DNA, 98 bp, Homo sapiens
cggtacctgaagacccgggagaagctccatgatgcgttatctgggtctggaaacccaaaccctcaaggatggcctggcgcatgggggaaccagcctgc

SEQ ID NO: 307046 - DNA, 100 bp, Homo sapiens
aagagctggtgcatgatgacgagacattgtatgcaaacctgttccattctttcttcgtggacaacccattccaaaaagaatgcttccaccagaagaactg

SEQ ID NO: 307047 - DNA, 120 bp, Homo sapiens
tcatctccagccctaaaatgacgacacgccccacaggtcttgggaggattaagtgaggggacatgagggagcctgcacacatgatcctgaccgtcggaaacaaggcagatggagtcctgg

SEQ ID NO: 307048 - DNA, 50 bp, Homo sapiens
gtggctgacatggctaccaacacccgagtgaccaaagacttgaccactca

SEQ ID NO: 307049 - DNA, 100 bp, Homo sapiens
gtccgggcgatccagtgcttagttccgtcatatccctctccacgacctcggtcgagcatgttcaccagggcccaggacaaagcaggacctcataaggaaa

SEQ ID NO: 307050 - DNA, 98 bp, Homo sapiens
ctattgagacaggtttggctgcagcagctgcaaagctggcccagcaggagcagctcctgaagcagcagcagcagcaccagtggcagcagcatcaacag

SEQ ID NO: 307051 - DNA, 100 bp, Homo sapiens
tccagccgaaggagaaggggggtgagagaacgccgagccgtcgccgcagcctccgccgccgagaagcccttgttcccgctgctgggaaggagagtctgtg

SEQ ID NO: 307052 - DNA, 89 bp, Homo sapiens
atgaaaatatggattacaggttgatgtgggagaagcatccccagacatccagttcaggagatccttgtcaagatggtatattcatttca

SEQ ID NO: 307053 - DNA, 97 bp, Homo sapiens
gaaaatggcggacgggaaggcgggagacgagaagcctgaaaagtcgcagcgagctggagccgccggaggtctgccatcatggatgttctcgcagaag

SEQ ID NO: 307054 - DNA, 83 bp, Homo sapiens
aatggagtgagaaaagatgtagtgatgataggttcattcctgggcttcacagacgtacacatcagagacatggaatactgtgc

SEQ ID NO: 307055 - DNA, 104 bp, Homo sapiens
aaagcaatgaataaatttggtgaagcacttaagaaatgtcatgagattgagagaaatcaccatgatcgattacttctgctcatcataaacatctagttcctaag

SEQ ID NO: 307056 - DNA, 100 bp, Homo sapiens
agtgcccttgtggcgaatggggctcacgtcgacccctgaagaagatggccgaccggatcaggaagtatcagatcttgaacaatgaggtttttgccatcct

SEQ ID NO: 307057 - DNA, 98 bp, Homo sapiens
aaaatggacctgctgacagagcagatggcctggagattcatgacaaaatcatggagctgctggcagaggactggccatttggagctgagatgtgtaag

SEQ ID NO: 307058 - DNA, 100 bp, Homo sapiens
tcaagatgaatatgaccctatggaagcagaagaagctgaggatgaagaagatgaaaaggtggacaagtcctattttcaagagaagatgacttttaacagt

SEQ ID NO: 307059 - DNA, 74 bp, Homo sapiens
cagcctcccaagtagctggaattacagatccgctttatcctcatccagaaccgggcaggcaagacgcgcctggc

SEQ ID NO: 307060 - DNA, 73 bp, Homo sapiens
gatctacataagaaaagatcctggcatggattccgtgaaggaacaacacctaaacccaagagggcagctgttg

SEQ ID NO: 307061 - DNA, 76 bp, Homo sapiens
agtggttggttgcagttgtgtagtagttaaggttcgtgacaataaaaaattaagagtaaatgctgttattgctccc

SEQ ID NO: 307062 - DNA, 83 bp, Homo sapiens
actggctaatcatttccaaagtgaaggaactccagttatgatcgacagggatgatcgttcttttggccgtgatagaaatcggg

SEQ ID NO: 307063 - DNA, 100 bp, Homo sapiens
actggatctttatctggcttactttgtccacactccgggaggagacatcacagctttcccagatcgggaggaaaaatatggaatgtgttttaccgctgac

SEQ ID NO: 307064 - DNA, 50 bp, Homo sapiens
ggaacacttcagtgcattcaagaccattcctcaagaattttgtatccaag

SEQ ID NO: 307065 - DNA, 88 bp, Homo sapiens
gtcgtggaagcaggactgcgccgcgtcttcctcaaggccaagactaaggggctgcagagcggggtggacattggcgtcaagtactcgg

SEQ ID NO: 307066 - DNA, 88 bp, Homo sapiens
gctggagtttcagacgtctgagaagtttatcggaattctatgccagcttccagttttcagcagcagaaacttcgagtctgtgaagtct

SEQ ID NO: 307067 - DNA, 100 bp, Homo sapiens
ctcagcagcagcaactgtgggactttttgactacaattctcaacaacagatagccaccatcctggactgccatgcagccaccctgcagcggaaggctgat

SEQ ID NO: 307068 - DNA, 141 bp, Homo sapiens
aagaggattggaggtgtcagtgttaaaggaacctctacaacgaaggtgaagccacggaagataagaacaagttgaaatcatcgcagaaggataaagttcgtcagtttatgatcttcacacaatctagtgaaaaaacagcag

SEQ ID NO: 307069 - DNA, 134 bp, Homo sapiens
aaattctgcagaagttcctggatgaggcccaaagcaagaaaattactaaagaggagtttgccaatgaatttctgcattggcgctctcataggcctgtccgtagcagcagtggttcttctcgccttcattgttac

SEQ ID NO: 307070 - DNA, 100 bp, Homo sapiens
tgccgcgccaccgagtccggaccggagactttggggcctaactagggcctattccactagaagcaagatggctgaactcaatactcatgtgaatgtcaag

SEQ ID NO: 307071 - DNA, 98 bp, Homo sapiens
gagtacatccagaacttcaaaatactacaagcaggttttaagagaatgggtgttgacaaaggtccttttgtacaagtggatgaactgatggaaatttt

SEQ ID NO: 307072 - DNA, 99 bp, Homo sapiens
gagctcccttctggaaatgacacctctgggcttgagaataagactgttgttgtcaccacaattttgacagggaaaaatgcattttttgtgggagatctt

SEQ ID NO: 307073 - DNA, 90 bp, Homo sapiens
atagcagacagcgggcttgatgtgcttaaaagctgcgtttggcatagaaatggtaccccttgttcaaaatgaacaagaagccttagattt

SEQ ID NO: 307074 - DNA, 74 bp, Homo sapiens
ggaaatcctaatgacagtctccaaattcgcctccatctgtaccatggatgaccagtgtcccagtgaaggaacga

SEQ ID NO: 307075 - DNA, 82 bp, Homo sapiens
gacgcagtggcctccaaggtgcagacagctgtgactatgaaggggatgtgaagttcatttccaatccgccctccatggtggc

SEQ ID NO: 307076 - DNA, 100 bp, Homo sapiens
gaaaagtcgcagcgagctggagccgccggagggcgccctgcgtccggcagaggaggcgagcatcccgctcaggtgatgaggaacccctcgcgcacccagc

SEQ ID NO: 307077 - DNA, 96 bp, Homo sapiens
cgcgggagccgcacgcggcgatatggaagaggagggcaagaagggcaagaagtctgcgctcctcagaccaccggcaggtgaacagcctgatgcaga

SEQ ID NO: 307078 - DNA, 101 bp, Homo sapiens
aggtgttcaaacagcactgccaaatagcagaagaataccatgaggtcaaaaaggaaatcaccctgcttgagcaaaggaaatctcgatttattaatgatgca

SEQ ID NO: 307079 - DNA, 90 bp, Homo sapiens
gaagatggaagggcacgagccgtccgactggagcagctactatgcagagcccgagcaattctgtggtgttcttggtcacacatttatgga

SEQ ID NO: 307080 - DNA, 82 bp, Homo sapiens
cgtggcgcctcggaggcgttcagctgcttcaagatgaagagcactacaaacaccactggtttcccgaaaagccgtccaaggg

SEQ ID NO: 307081 - DNA, 75 bp, Homo sapiens
agctggcttagaagcagatctggaatgcaaacagatctggcaaaatttggggggaagctggaagatgggacagag

SEQ ID NO: 307082 - DNA, 75 bp, Homo sapiens
aatgaggaggagacggagcacgccaaaggaatgatatggaacctagcaaagctgttccactgaatgcatctaagc

SEQ ID NO: 307083 - DNA, 112 bp, Homo sapiens
cctggcggtgcccgaggagtagtcgctggagtccgcgcctccctgggtcagcccaaggccaaccccactgtcactctgttcccgccctcctctgaggagctccaagccaaca

SEQ ID NO: 307084 - DNA, 88 bp, Homo sapiens
cccgcagtcctaccccattgtgacaggctaactcaggtgagatggagccgctatagtcctgaattcaaggatcccttgattgacaagg

SEQ ID NO: 307085 - DNA, 100 bp, Homo sapiens
gtgcgctcagcaggacgtgggaggctccggcttcaaggccaccagcccctcgggttccaagatgcagctactggagacagagttctcacacaccgtgggc

SEQ ID NO: 307086 - DNA, 82 bp, Homo sapiens
ggctacctgctgacacggaaccctcacctcaacaagctgctctgttaaaagcgaaaatgaaacaattgcctgcggcaacagt

SEQ ID NO: 307087 - DNA, 75 bp, Homo sapiens
tcaaacagttcaacatcttctgtcatatgctggagtcagccctcactcagtgttcaagagacctatgaagccaaa

SEQ ID NO: 307088 - DNA, 75 bp, Homo sapiens
tccagtcagacctcggataacaatgccctgacacctgaggagggtttgcatttgtgtatgaagctcaagatgtgg

SEQ ID NO: 307089 - DNA, 90 bp, Homo sapiens
acaatgatgaaattaagattgggacctcatgtaagaatggagggtgttcaaaggttatttgttatcaaagcgtgaaggccaagcagggtc

SEQ ID NO: 307090 - DNA, 50 bp, Homo sapiens
gaaagaatgcagtctttctatacctggtacatcaggaacgtctctatcaa

SEQ ID NO: 307091 - DNA, 98 bp, Homo sapiens
gaaaagatagttgcttattcctctattgctgcaaaaaatgcagaactagaacaggagcttatgttcctctgtgacgagggtgcaggtatctctgggga

SEQ ID NO: 307092 - DNA, 75 bp, Homo sapiens
gacaacaagacaggcaaaccactgccctttgggactctgggagtacacaaggcgtccgagctgggccacagcctg

SEQ ID NO: 307093 - DNA, 73 bp, Homo sapiens
gcgcacagctgctcccttcgccttcgccctttccacctcgcggcagttcggattctgaaaccttccttgtatc

SEQ ID NO: 307094 - DNA, 99 bp, Homo sapiens
cgaggctccgcaccagccgcgcttctgtccgcctgcagaaatggtgtcaacctccaacaacaaagatggacaagccttaggtacgacatcagaattcat

SEQ ID NO: 307095 - DNA, 98 bp, Homo sapiens
ttgcctccagcccacccacctccagaaatgagccgtcagactgctacagcattacctaccggtacctcgaagtgtccaccatcccagagggtgcctgc

SEQ ID NO: 307096 - DNA, 80 bp, Homo sapiens
ccctgctggaggagcgcttccggtgggaatttcagattggaccttgtgaaggaatcagcatgggagatcatctctgggtg

SEQ ID NO: 307097 - DNA, 78 bp, Homo sapiens
gctatggaagctgaaatactgaaagaaattcgagaagctgcaaatgccagcttgctatgggtgttctccaggatcaaa

SEQ ID NO: 307098 - DNA, 82 bp, Homo sapiens
tgtgctcatccccacagggacattcacaacatgaataatggaagcactgtgagctctgaggaacatgaatacagtgatgaag

SEQ ID NO: 307099 - DNA, 98 bp, Homo sapiens
cgccagggaccctgtgcaggcctgctcctccgtttgcaaggtgtcatggagaaactccagctgggcccagagattctgcagcgggaaaatccaaggct

SEQ ID NO: 307100 - DNA, 98 bp, Homo sapiens
gatgatgtcttcctccgggaactcgccaaggtgaagcagggcgaactttctgaccaagtatacaactacccagagggcctaggagaagtgctgtatag

SEQ ID NO: 307101 - DNA, 75 bp, Homo sapiens
gtgatagacaccacagtcttgtagacccaaatgatttgtacattgtagaacccctcaagttttctccagaaaaga

SEQ ID NO: 307102 - DNA, 90 bp, Homo sapiens
gtgttccaccgttcaccatcgaggtgaagcttttgtgtggtcctctgagccccagtgagagtttcctgaggtacctcacccttccacaag

SEQ ID NO: 307103 - DNA, 100 bp, Homo sapiens
tcaccgacagtgccctgagggccttcgagagctaccgcgccagacaggaagtgtttggattgtgagctatttcagaactgttctcaggactcattatttt

SEQ ID NO: 307104 - DNA, 100 bp, Homo sapiens
ctcggactcccgacccgccgccggctccggccgcgtttcccgggtaaaggggatttgaactcagaggatcaaaaagccttcagtgttgaacatacaagct

SEQ ID NO: 307105 - DNA, 100 bp, Homo sapiens
ccccagcagcccccgaaggccctatcaggacatggagtatgaaagacggtgcagtagacattgttgcaatcatgatcggcaatctgaaaggcacaaaaat

SEQ ID NO: 307106 - DNA, 148 bp, Homo sapiens
ggggctcaccatcagggacgtgctggccgtgatcaaacactgcaaggaccccctccggctcaagtgtgtcaagcaagcattttgaaagcgaagcagaagccgtagaatcagcggcgagcctgttgaaagaacccacaggtgcatttca

SEQ ID NO: 307107 - DNA, 75 bp, Homo sapiens
gattcaacggggttccggaccgcgctgcgctatggagcaggagggagctctgacagcctttcgcaagacatatga

SEQ ID NO: 307108 - DNA, 100 bp, Homo sapiens
caaaccctgaatttataactgaaacatcgggtcagaagttgagatttccactatcgagaaacaacggaaggagctgcagttgctcattggagaattaaaa

SEQ ID NO: 307109 - DNA, 82 bp, Homo sapiens
gagccgccgcgcgcccgcgccctccgcgcgacgccagctcttttgaaacagatggtcaccatgtttagatattagcagtccc

SEQ ID NO: 307110 - DNA, 101 bp, Homo sapiens
cgagccgccaccgcaggtcgaggacggtcggactcccgcggcgggaggagcctgttcccctgaggaatgctttgtgtggaaagcttcagtgtgagaatgta

SEQ ID NO: 307111 - DNA, 51 bp, Homo sapiens
gtgcactgataataaccctgcagtgagaaagatcagtctaaagaaaaggag

SEQ ID NO: 307112 - DNA, 75 bp, Homo sapiens
ccaatgtcaacattgcccagcaagtgagtcattcaggagagcaggaaagaaaaggccatccctgtggatgtcgcg

SEQ ID NO: 307113 - DNA, 100 bp, Homo sapiens
ctcccaagtagcttggattacaggacacttgtttaacaagacatctgcccatgtccctggcccatctcattggctgcagcacatcacagtggaccttctg

SEQ ID NO: 307114 - DNA, 75 bp, Homo sapiens
gtttcttcatctacaacccgcgcttctggccgcgggaaggagaggctttctcggtatcagcagtttaaagatttt

SEQ ID NO: 307115 - DNA, 100 bp, Homo sapiens
gtgaagccagcctaactgagctctggactttggggacagctgtcagtggcctaggccgcaggtgacctcgagggccatgcaggaccctgtgttccagctt

SEQ ID NO: 307116 - DNA, 100 bp, Homo sapiens
gtgacagagtggagccatggctagagacagcaaggccatcgtggacgggaacctgaagctgatcctgggcctcatctggaccctgatcctgcactactcc

SEQ ID NO: 307117 - DNA, 75 bp, Homo sapiens
cgtccctggagcggccgccttccagctgccggtggtggtgtgcacattgagccccggtatagacagttcccccag

SEQ ID NO: 307118 - DNA, 100 bp, Homo sapiens
cccagtatggacacatctttagaagacctaagttgctccttgagggcaggacagttcttatggctttatccgttgcgtaagcacagagaggtctgcgagg

SEQ ID NO: 307119 - DNA, 122 bp, Homo sapiens
gctgccggctgccctgtgaatgggaagttacgcgaagtccacccagcgtttctgagagtgatcagcagctggactgtgccttggacctaatgaggcgcctgcctccccagcaaatcgagaaa

SEQ ID NO: 307120 - DNA, 96 bp, Homo sapiens
atctatattttttgactgctctgctcctctatgctggacatcaaatttccagtctgcgctcctcagaccaccggcaggtgaacagcctgatgcaga

SEQ ID NO: 307121 - DNA, 95 bp, Homo sapiens
ggatggcccccggtgcaagaggcgcaaacaagccaatcccaggaggaaaaacgtgtaaatgagcaaagatggatcaggaaggtgggggagatggg

SEQ ID NO: 307122 - DNA, 98 bp, Homo sapiens
gacgcctgcagcaaggagaccaggaaggggtgagacaaggaagagacctacagatttgacagtgaagtgcttctcaaagtgctttcaaaataaattac

SEQ ID NO: 307123 - DNA, 106 bp, Homo sapiens
ggcgggtgaaattacagagaccggggaactctactcttcctactagccacgatggaggtgatgaacctgatggagcagcctatcaaggtgactgagtggcagcaga

SEQ ID NO: 307124 - DNA, 89 bp, Homo sapiens
ggaataggttcgccgaagagagagccacaatggtgcgcatgaatgtcctggcagatgctctcaagagtatcaacaatgccgaaaagaga

SEQ ID NO: 307125 - DNA, 75 bp, Homo sapiens
ttacaggtttctgcaaagattgggtttttgaaaatttcacggtccctcatggtgtctcactccagcagacagagg

SEQ ID NO: 307126 - DNA, 83 bp, Homo sapiens
cgcagccgtagacaccagctccgaaatcaccaccaagaaggtagaagatagcaccatgccgattcgtcgaactgtgaattcta

SEQ ID NO: 307127 - DNA, 50 bp, Homo sapiens
aagaagattcctggaatctcatcaactgatggagtcttgctttgttgccc

SEQ ID NO: 307128 - DNA, 75 bp, Homo sapiens
cgttacaaggccttctacattaccgatatggagtctggagaacggttaccatcctcagcagcctcctctactaca

SEQ ID NO: 307129 - DNA, 100 bp, Homo sapiens
caccgtcctgccacagattgagaagcttctgcagagcaagtatgagaggccttatgtggaggagccacgccacgtgaaggtgcagaagggctcagagccg

SEQ ID NO: 307130 - DNA, 100 bp, Homo sapiens
tgccgcctgaagtgcgggcgcagctggcggagctggagctggagctctcggagggtgtcatggagaaactccagctgggcccagagattctgcagcggga

SEQ ID NO: 307131 - DNA, 96 bp, Homo sapiens
gtgccattgcggagcctcatctcctcgggacaatgtcaggtgcgggtgctgcccccagtgcccacggaagggctgacaccagatgacgtcccagct

SEQ ID NO: 307132 - DNA, 100 bp, Homo sapiens
ctgggagagaggtacctctccttttccctctccctttccctaagctgcatcttcctcccgtgaggctggccgagctccacgctgatctgaagatacagga

SEQ ID NO: 307133 - DNA, 100 bp, Homo sapiens
tgggtctgggaccttaacagggagccatggtccgagtacaaggcccacttctccctccgcaacctgcatgccttctctgtggagccgctgctcatctacc

SEQ ID NO: 307134 - DNA, 85 bp, Homo sapiens
gaagatgactgtacaaaggataataaactagttgagaagcagaacccagctgaaggactgcagcagagacagtggtggatccaga

SEQ ID NO: 307135 - DNA, 75 bp, Homo sapiens
gttttatattaatgttgagagagaggtcacacatcccgggtcctgagtctgaccatgagcccagatggggccaca

SEQ ID NO: 307136 - DNA, 100 bp, Homo sapiens
agctgctggaggacgagggccagctgacggagatggtgcagaagatggaggagcacgtgtggagtgagagcgaggactgcctgcctttcttgcagctagc

SEQ ID NO: 307137 - DNA, 130 bp, Homo sapiens
aaggcccacctgcgccggcacacgggtgagaagcccttcgcctgcacctggccaggctgcggctggagcccctctgactgataagccacccaagcttttgtatcctatggaaagtaaactgacaattcag

SEQ ID NO: 307138 - DNA, 130 bp, Homo sapiens
aaccacttggatgactgcagttggtctttcagagatggcagcagaagctgcatatcaaactggacacattcagctaacgtattttagcaggtggagtgaggttgaagattcctgtgacagcgatgccata

SEQ ID NO: 307139 - DNA, 100 bp, Homo sapiens
cgtaagaacctgatcaccgtgtgcagatcttccaggaccacccactacagaagacttataactacaacgtgttgatggtgcccaaacctcagggccccct

SEQ ID NO: 307140 - DNA, 102 bp, Homo sapiens
gtgtgcaaacccgagagaactggttttagaaagagcgttttcgctacgtaaagcacattcgataaaggatatggaaaatactttgcagctggtgagaaatat

SEQ ID NO: 307141 - DNA, 74 bp, Homo sapiens
atctgtaccctgaagaacttccctaatgccatcgagcacaccctgcaggttatcaatagtctggctgtctatcg

SEQ ID NO: 307142 - DNA, 101 bp, Homo sapiens
ccggagtggggaagacctgcgtcctttttcgtttttcggatgatgccttcaatactacctttatttccaccatagaacttggagcgtgatgcccagaagtg

SEQ ID NO: 307143 - DNA, 75 bp, Homo sapiens
gccagccatactccattctcttaaatttaaccgggaacgcatccaggtactacttcctttggaatgtcagtattt

SEQ ID NO: 307144 - DNA, 86 bp, Homo sapiens
cccaagccgcgtccccagagagcgccctgagagaacagggtggccgcttggtccaggcactcaaggagttgcccctggtcctgtaa

SEQ ID NO: 307145 - DNA, 99 bp, Homo sapiens
gcactcccaggctgggagctggatacctgccctggcagcatggctcagactgcatgacagaattcagaaggagctggcggacatcactttagaccctcc

SEQ ID NO: 307146 - DNA, 74 bp, Homo sapiens
taatgagttctttaaccttgataaggtgccatgcttggcttcgtccctggcaatccagagatcccgatatctag

SEQ ID NO: 307147 - DNA, 100 bp, Homo sapiens
tgacattcaagactcctctggaagtgaagactctgttgacgttcagggatgtggccatagaattctccctggaggagtggaaatgcctggacctcgctca

SEQ ID NO: 307148 - DNA, 101 bp, Homo sapiens
ggccagtgtggcaaccagatcggagccaaggaattgaaagatgttggccatcgtgatcagatggctgcagctagaggaatcctgcagaagaacgttccgat

SEQ ID NO: 307149 - DNA, 100 bp, Homo sapiens
atataaataaagatgtgggtgtgaaggacagtcattttgtttactcattcagccctgttgcaggtcccaataaactcttcataaggttgacagaagcacc

SEQ ID NO: 307150 - DNA, 74 bp, Homo sapiens
tttgtacctcggggacctgctggagacctgccatttccaggccttctggctgagatctgtatctgtggacctga

SEQ ID NO: 307151 - DNA, 75 bp, Homo sapiens
cagcgagaacgagctgaagaagtggttggaataaaaacagggttgaatgagttccagaaagcagggttctcaacc

SEQ ID NO: 307152 - DNA, 107 bp, Homo sapiens
gagatcttgggcttggccggtttttcagctcaaaaaccacagctgcacattctttaggtcctcagtttgcagaagacccctcccagttgccttcaactcagttacct

SEQ ID NO: 307153 - DNA, 75 bp, Homo sapiens
tgattcagctcagccttacaagtggcgggggaaagcacacagctgcgtgctcggttgaagaggacaaccatctgt

SEQ ID NO: 307154 - DNA, 98 bp, Homo sapiens
gccatccaggccccctgggggcgcccgtctcccacagcaaagatgcagagcaaagcggcagtccccggacagggatgggctctgaccaggaggacagc

SEQ ID NO: 307155 - DNA, 51 bp, Homo sapiens
ccgagaccagtccacctacatcagtaagctttcccgccagagcgccacaga

SEQ ID NO: 307156 - DNA, 100 bp, Homo sapiens
tcgctgcaacctttagactaatgactgtccgaaacatcgcctccatctgtaatatgatttggactgagcaacaaatttgaatctgaattcccttcttcat

SEQ ID NO: 307157 - DNA, 100 bp, Homo sapiens
cagagatttccacagaaggactgggatgatacaccttttccacagggaattgagttggacgtggtgggtcctctggtgcgaaattccggatttccttggg

SEQ ID NO: 307158 - DNA, 100 bp, Homo sapiens
caaagagcaacatcgcagtggaaggccggaggacgtctgtgccgagccctgagcacaagagtgagccatggagctacgtgtggggaacaagtaccgcctg

SEQ ID NO: 307159 - DNA, 98 bp, Homo sapiens
aattttacataagaagttacctttttcaggctgtgtctgcaccagaagaggctcccacagactctgctcccgagaagccaagtgatgctggggaggat

SEQ ID NO: 307160 - DNA, 101 bp, Homo sapiens
caccacaataatccacagccaaggttttatatactgataagacctacgccatgggacatctaattcagaggaagaaggtccatgtctttggggatgaattg

SEQ ID NO: 307161 - DNA, 100 bp, Homo sapiens
tggtcactgacttctctctcctagtgaatgaaaaatgccagctgtgggacaaggagtgcaggccgcacaacctcggcaggcaccggggggatgtggcgat

SEQ ID NO: 307162 - DNA, 98 bp, Homo sapiens
cccgcaaagccaagcaaatatatggctatttgaagacactgttttaattactggaaaattagctgatttccaggtggaacttcttttggataaactca

SEQ ID NO: 307163 - DNA, 50 bp, Homo sapiens
gtgcagctgcctcagttcttagcgcaggagaatccatatgctacactgac

SEQ ID NO: 307164 - DNA, 73 bp, Homo sapiens
ctataaaagcacagttttaagagaggtacctcaataataatgagttgacagcggtaccatccctgggcgctgc

SEQ ID NO: 307165 - DNA, 75 bp, Homo sapiens
ggggaggtcacctgacgaggagaggaattacggaggttgagctggtccggaatccctaagccagtgcgtccaatg

SEQ ID NO: 307166 - DNA, 100 bp, Homo sapiens
cccagcgccgggccaaggccaaggccagccggactaaaacaaaggaagtgcacggctgtctataacgtgctgccgggtctcaggatggaggagtgaagtc

SEQ ID NO: 307167 - DNA, 100 bp, Homo sapiens
cccgaacgggggtcttcctcctccgccgttgacagctgaactttgacctggaccggggcgtgtttccagtagtcatccaggctgtggtggacgaaggaga

SEQ ID NO: 307168 - DNA, 46 bp, Homo sapiens
agtacacagacgagcatggggaagttgaagcttcttgtcatgacgg

SEQ ID NO: 307169 - DNA, 75 bp, Homo sapiens
attgcacacgacgtggatcccatcgagtctatgactttgaaagaagccatcaagtcttcactcatcatcctcaaa

SEQ ID NO: 307170 - DNA, 100 bp, Homo sapiens
cagattcgcagtggtcgcttcttctccttgagttgtggaaagtaaaaatgtagccctaccaaaaggaactattgtactggcttctccaggctggacaacg

SEQ ID NO: 307171 - DNA, 90 bp, Homo sapiens
ctgcagcgggagctggacggcgagcgcgagcggcgcgagaaagtcttgagtcaccacgtccgaatataattcttgggttagtaatctgcc

SEQ ID NO: 307172 - DNA, 82 bp, Homo sapiens
acggccgcgctgctcatccccaaggaggacggcgtgatcacggccagcgaggacaggcaagtgaaccggagcaaacgacttc

SEQ ID NO: 307173 - DNA, 100 bp, Homo sapiens
ttcgtgcgcttcgaggacccccgtcttgctctgttgcccaggctggagtgcagtggtgccatcatgccaacctcgacctcctggacttaagtgatcctcc

SEQ ID NO: 307174 - DNA, 95 bp, Homo sapiens
agagccaactagacatcttgagcctcctgaaacaggttctgctccagacgagcccttaccacgttgactcactcctgcagctcagcgatgcctgc

SEQ ID NO: 307175 - DNA, 90 bp, Homo sapiens
cccaagaagaccattcagatgggatctttccggatcaatccagatggcagccagtcagtggtggagacttgggaagacccagggcacaat

SEQ ID NO: 307176 - DNA, 50 bp, Homo sapiens
ttgttgcggtgcgctggagccggctgaagccgacgtagcttctctgaaca

SEQ ID NO: 307177 - DNA, 100 bp, Homo sapiens
tcctcaactttgaagagatcgactacaaggagatcgaggtggaagagctggatgttgagacctggcaacaggaacagcctgtggtgttacatacgtggac

SEQ ID NO: 307178 - DNA, 87 bp, Homo sapiens
tggatatcatcgaccctcgcacactctttgtcactgaggtctctgctgctgatgaagctgtgaccaaacgcacccaacccttggcag

SEQ ID NO: 307179 - DNA, 100 bp, Homo sapiens
acagatcaccctgggaatcctcatctccactcagcgggcccagattcggaggaacctgagtgcctcagtcatcgccgtcaccatccaggggggagcgcac

SEQ ID NO: 307180 - DNA, 75 bp, Homo sapiens
gatctatctgtggaacaacccgtgcagttcagatcttttgacagaagggacaatggagaacattgcagcccaggc

SEQ ID NO: 307181 - DNA, 90 bp, Homo sapiens
gaatatttaatggaaaatcgcttggttaaaacctgacacttttaacagagtattgggaaagggtcgttgtggtgcatagacccagagtat

SEQ ID NO: 307182 - DNA, 100 bp, Homo sapiens
aggcaaaaatcccatctaccgcaactctcagttcgagagtaaagggctgcacaaagatgttcagggataactcggccatgagaaaacatctgcacaccca

SEQ ID NO: 307183 - DNA, 90 bp, Homo sapiens
cactttgggtttgagactgtgtcggaagaggagaaggggggcaaagagatgcagaggatgctatttatggaagaaatggttatgattatg

SEQ ID NO: 307184 - DNA, 48 bp, Homo sapiens
ccgggaccatgtccgcgctggcggaaccactcacgaattcttgtttgg

SEQ ID NO: 307185 - DNA, 100 bp, Homo sapiens
cacctcccgcgccgcacggtggacgagacccccgtttcttctgttagaggaattgtggtgttagtaaaacgccaagcagagggtggccatggctgtccag

SEQ ID NO: 307186 - DNA, 76 bp, Homo sapiens
cgaacagccaaaagatatgaagaaatccttgatccaccagctaagtaccttcttccagaggtgacggtgcttgact

SEQ ID NO: 307187 - DNA, 101 bp, Homo sapiens
gcggaaaacggggaaacgaagactgaggaggtgatcagcgagtttgaggcctctcccgactcgttttcctacagaattcccaacctgagtaggaatcgtca

SEQ ID NO: 307188 - DNA, 75 bp, Homo sapiens
gatgggggaagccaccaggattacatcatctgctggagagaaatatgagttggagggaaggaaaagtggttctac

SEQ ID NO: 307189 - DNA, 50 bp, Homo sapiens
atatggcgcaactgcggcgcgagaactgcgacacatcaccaagctgaagc

SEQ ID NO: 307190 - DNA, 75 bp, Homo sapiens
gcaaccccagatccatttacactttacaattctggtacaggtcaaagaggtcctctccaagctgagcacgctcgt

SEQ ID NO: 307191 - DNA, 98 bp, Homo sapiens
cctgctggccgtgctgctgcaggctttcatctgagtggcacagtaactgagctggccactgcctctgaaccagcagtgacttataaagttgcaatcag

SEQ ID NO: 307192 - DNA, 75 bp, Homo sapiens
ctccaagtcaatatagccaacagagcagcagctacgggcagcagaggtcccctcctaaccgcaagcgtcctgcta

SEQ ID NO: 307193 - DNA, 80 bp, Homo sapiens
tgctggttgtgcgaaccccgggcagcccgggaaatctccaagtcagaaagaacggtgggatttacttgctggccaaccag

SEQ ID NO: 307194 - DNA, 129 bp, Homo sapiens
ggagcccggccggagctgggtctggagacgccgtggcagcctgaacggagtgtgcgacggattgggaggtaaatgagctggatggtatcccgttgatcctggacaactgcaacatcagtgacagtaacc

SEQ ID NO: 307195 - DNA, 75 bp, Homo sapiens
ctaaactgtgtggggcgcggatgggatccagctgttagtcgggtattgttgcagcatctggcagtgagactgagg

SEQ ID NO: 307196 - DNA, 83 bp, Homo sapiens
caaaattatcaacaccaaaaagctttctgctaggggaaagatgaatgggagggctgattttcgagagccgaatgcagaggttc

SEQ ID NO: 307197 - DNA, 74 bp, Homo sapiens
ccagtacgtgtgtcagcagacaggcctgcagataccccagctggtgaaactggctaaacgcctcaagaaggaga

SEQ ID NO: 307198 - DNA, 98 bp, Homo sapiens
tggggtcctgatgtgctaatttcctgttttcccttggttgcttcagactggagacgggctgaaggccaggctggatgaatttcacccattcatcgagg

SEQ ID NO: 307199 - DNA, 100 bp, Homo sapiens
agacggtcatccctgtagatgtcatgaggcgagctgggcaagcaagagaaatggtactagagattatccgagaaaaagaccaagctgactttcggggtgt

SEQ ID NO: 307200 - DNA, 75 bp, Homo sapiens
accacagggatggatgtcctctgggcagggacccccatggtgactatgccaggagttcatgatcaagtgttgccc

SEQ ID NO: 307201 - DNA, 100 bp, Homo sapiens
ggacccttgggacccagcacagggagctggagagccaactccacgtgcttcagtccaaactgcagaaaacgcccactcctggatcttcacattgaactca

SEQ ID NO: 307202 - DNA, 100 bp, Homo sapiens
ccattgttctcttctgtgagcagcatgtcttcgcgtttcagagtgacttatcagatgccctggtcatcttccagctctatgaaaagatcaaagttcctgt

SEQ ID NO: 307203 - DNA, 83 bp, Homo sapiens
caaagacaagaggagacactgagggaacaaacacttctggatgcatcctttaatcccatggaatcaatcaaattaaatcatca

SEQ ID NO: 307204 - DNA, 119 bp, Homo sapiens
ggaaggaaccgctctcgcttcgtcctacacttgcgcaaatgtctccgatttaaggaccatagtacagctatggatactgaaccaaacccgggaacatcttctgtgtcaacaacaaccag

SEQ ID NO: 307205 - DNA, 90 bp, Homo sapiens
caagaatctgcaggacttggtccgcggcatccgtaaccacaaggaggacgagaccgagacatgggtgcccggcaccgcgcccgagcccac

SEQ ID NO: 307206 - DNA, 50 bp, Homo sapiens
cctggctcagctgaaggatgagtttgtcccgctggctggaagcctggcag

SEQ ID NO: 307207 - DNA, 100 bp, Homo sapiens
ctgtgtcccagatcaccgccatcgaggcacagcacttgctcaagaggaaaccaggttcattcagggctcggtggtgcagactccctatgctttctaccac

SEQ ID NO: 307208 - DNA, 75 bp, Homo sapiens
gtcgcggtgggtcctcgcttgcagttcagcgaccacgtacgagctcaactggaggcagtcctgtgcggaaatctg

SEQ ID NO: 307209 - DNA, 87 bp, Homo sapiens
ctgtgagcaggtgaacactgaccccaatgggcaaagcagagagcagaggttcttcagtccacgcaacggttcttctctgaacagcaa

SEQ ID NO: 307210 - DNA, 98 bp, Homo sapiens
ttatacacaaacctgcggaatggactttaattgctatggtgttgctgtcattgttcatgcagcatcccaagaactttggcctgatcgcatcattcctg

SEQ ID NO: 307211 - DNA, 82 bp, Homo sapiens
gccgtgttgctgatcgcctgggtggttgttggcgtgtccctgcagcgaaggatcctggtacatggtgcgggtccgagctgtg

SEQ ID NO: 307212 - DNA, 100 bp, Homo sapiens
ccacagagtcaatggttagaatcgggctgatttagcccagtgaagacgttacgtgctagcaaaacgtgatgtccgagctcagcgatgaagccagcgagcc

SEQ ID NO: 307213 - DNA, 100 bp, Homo sapiens
cctggtgcagggcctgattgaggactgccagctggcgctgcagaatggcattgtgcccatcgtggagcctgagatcctccctgatggggaccatgacttg

SEQ ID NO: 307214 - DNA, 100 bp, Homo sapiens
ctgtgttgatacctataccaaccgtttaaggttctccaaaatacttatcattcaggttgaataaaccagttctacagactgcttcttccatgcatttccc

SEQ ID NO: 307215 - DNA, 100 bp, Homo sapiens
ctggtggaccagctcatccgcgacctgggagagtcccgtattctcagagtaaaagttgtttctggaattgatctcgccaaaaaggacatctttggagcca

SEQ ID NO: 307216 - DNA, 96 bp, Homo sapiens
catcacccacgctctgacctctgattcgtgtgagggatgacaagatgcctttggcgcaccttgcaatagctgttgaagctgttggttgggcacatc

SEQ ID NO: 307217 - DNA, 83 bp, Homo sapiens
cttttcaagacaccaagtgagaggccaaccagcctggtccgacccccagtggcactaacgtgggatcctcagggcgctctccc

SEQ ID NO: 307218 - DNA, 94 bp, Homo sapiens
actaacaggatattcctcatgacattgctgtctggaacgaatgatcacacactttgaaaggtccaaaatggagtaaggaatgggaagatttgca

SEQ ID NO: 307219 - DNA, 83 bp, Homo sapiens
cggaagaccgcgcgcagggcctgcagcgggagctggacggcgagcgcgagcggcgcgagaaaaatgtatgacaacatgtccac

SEQ ID NO: 307220 - DNA, 76 bp, Homo sapiens
gagcctgcagagcgcgcagtacctccgctgagctgactgctgcccactttggaggaggcggtgggctccttcacaa

SEQ ID NO: 307221 - DNA, 75 bp, Homo sapiens
cacaaaatggctgtcctccttggtaaatttgcaatggattttggataaacaagatctgttgaaggagcgccaaaa

SEQ ID NO: 307222 - DNA, 89 bp, Homo sapiens
gctaacagaactggaccttttcgcctgaagatgaccatggacaagacgggtctcctgctgctcagtgacccagacaaagtgaccatcgg

SEQ ID NO: 307223 - DNA, 75 bp, Homo sapiens
gccagcgtcacccatggagcacatggagatgccagacgaggacagccggctgctgcccctgctggtctgcctgcg

SEQ ID NO: 307224 - DNA, 100 bp, Homo sapiens
tactcagaaatctgttctacaggaagatgctgagaaactgcggaaagaattgcatgaaggcggatggcaggatgaaacctggccagatggttggactgcg

SEQ ID NO: 307225 - DNA, 83 bp, Homo sapiens
cggagactcagaatacaacatcatgtttggaattacatgaatgacagtcttcgaaccaatgtgtttgttcgatttcaaccaga

SEQ ID NO: 307226 - DNA, 82 bp, Homo sapiens
caacattaaagacatgaagctgttgaagaccctcctggatattcctgcaaacccaacagatatccttggaacagaagatctt

SEQ ID NO: 307227 - DNA, 82 bp, Homo sapiens
gtgaaaagggtcctcctgctcacagtgtgaataacagcatcccagccatcactcttccacctgctccttagagaagggaaga

SEQ ID NO: 307228 - DNA, 100 bp, Homo sapiens
agccagggacctgcttggccagcgacagatcctttgctgctctgtctgccggttcttgagacactggcttcatgtcctattgaccgtaaaccttttcagg

SEQ ID NO: 307229 - DNA, 100 bp, Homo sapiens
cggagcggctgtacgagttgtggctgctctactacgcgcagggtggatgtgaacactgaccggaagatcagtgccaaggagatgcagcgctggatcatgg

SEQ ID NO: 307230 - DNA, 75 bp, Homo sapiens
cacagacaactccaccaattgtacagctgaactgtcccaagcaataaacagtggtacattgttatcaaaaccgtc

SEQ ID NO: 307231 - DNA, 87 bp, Homo sapiens
ggctgcgacggccatgctggggcaggatgtgtgcccctgtgatggtggagctggagggggagacagatcctctgctcattgccatga

SEQ ID NO: 307232 - DNA, 50 bp, Homo sapiens
cggcactcggagcttctacagaagacacgagacgacttcctgggccaggt

SEQ ID NO: 307233 - DNA, 75 bp, Homo sapiens
ggtcgcaagacacagagcagtgggcctgggctgcagaagaataatatccagttctggaacagccggcagtccctg

SEQ ID NO: 307234 - DNA, 100 bp, Homo sapiens
gcagcgctggatcaagaactgcctgtgcggtgggcttggattttacaggatatcttggggattgctttctgtctgaatttaattaaaacactgaagttgc

SEQ ID NO: 307235 - DNA, 90 bp, Homo sapiens
agattattgaagtagatcctgacactaaggaaatgctgaagcttttgccgctcctgacatcactggccataaacggagtgagaacaagaa

SEQ ID NO: 307236 - DNA, 100 bp, Homo sapiens
ctttattatgcaggtggtctgtgaagccacacagtgtccagatacgaggctctctgatgtaaaggatggagtaaatcaagcagcacctgcatttggattt

SEQ ID NO: 307237 - DNA, 87 bp, Homo sapiens
cgagctttcccgggataagtagctttagcgatcgggagacagccgggcgctgcaagtatgccgagattttgctgtcctggaggacca

SEQ ID NO: 307238 - DNA, 50 bp, Homo sapiens
acgagttaaatatcacccacggtgcccctacagacatacaaggagattgt

SEQ ID NO: 307239 - DNA, 97 bp, Homo sapiens
cgggagatcgcggacgggttgtgcctggaggtggaggggaaggagggagccatggatttgctgcgggagctgaaggccatgcctatcacgctgcacc

SEQ ID NO: 307240 - DNA, 103 bp, Homo sapiens
gggctcggggcctccgcagcgacaacatggaggccgtgaagaccttcaatagcgagtgagtgtgtccgcttgaaaccaactgacatacagcccgacatcttca

SEQ ID NO: 307241 - DNA, 114 bp, Homo sapiens
ctgaagtgctggttatgttcaaaactctgccagaaaagatctctggaaacaccaagtcatgaaagaaaacttttcagtctcaagaccacaaatagttgaaaaatttatacagag

SEQ ID NO: 307242 - DNA, 97 bp, Homo sapiens
acatgcttcaggctcctctctttactgctgaagctttacttcgagctcatggagaaacatcagatggagtgaggaagtcagttcacaaggtctttgc

SEQ ID NO: 307243 - DNA, 100 bp, Homo sapiens
atctacctgaaaatatgagaaagctcgccaaaaccagtaatttatctgaaaattgccatctgtatgaagctgtccaatgtgaaagaaaacccattgaagt

SEQ ID NO: 307244 - DNA, 74 bp, Homo sapiens
gttcggtgaccgcagcactggggaaacgatccgctcccaaaacgttttttgaagggaaggagctaagattgaag

SEQ ID NO: 307245 - DNA, 83 bp, Homo sapiens
ctgcagtaccccactctacgatcaggaactgtggctgcaccatctgtcttcatcttcccgccatctgatgagcagttgaaatc

SEQ ID NO: 307246 - DNA, 90 bp, Homo sapiens
cgcggcgtccccggtttggtgttgcggcgcccaccttcgggaggatcaggctgaccccgcactacatctacccaccagccatcgtgcagc

SEQ ID NO: 307247 - DNA, 100 bp, Homo sapiens
tggtactgattgttccccagagtttggggaccccttgtcttgacagtatcatgcacaggattcagtggtcccaatttaaaggctattttattttcaaact

SEQ ID NO: 307248 - DNA, 98 bp, Homo sapiens
gagccgcaggagagacacgctgggccgaccccagagcggcgctggacagggccggagttaagatgagtccagcgaagtgcctagagtaccaaattcat

SEQ ID NO: 307249 - DNA, 49 bp, Homo sapiens
atcttcacttggcaaactcaacaaggaaaacctggaagcacaatgggag

SEQ ID NO: 307250 - DNA, 100 bp, Homo sapiens
tctgaggacatggggaccacagtcaatggagatgtgtttcagtaacaaatgtggcaattattttggatctatcacctgtcatcataactggcttctgctt

SEQ ID NO: 307251 - DNA, 100 bp, Homo sapiens
gaagaaaaagagcaaagataagaagagaaaaagagaagatgaagaaacccagcttgatatgttggaacagcagcagtattggtatcgacagcacttgctt

SEQ ID NO: 307252 - DNA, 129 bp, Homo sapiens
tgatttcattctcgaaagggagccctcatttcaagtcctggggtaccctgtgcgcaaactccatctatctggagtgcccaccttgggacaccttgactccaagcccagcagtaagtccaacatgattcg

SEQ ID NO: 307253 - DNA, 75 bp, Homo sapiens
actggtagatttgatgttagaagccatccagggagccctacgtagagaaatcgacactcttaatgaacgtttagc

SEQ ID NO: 307254 - DNA, 75 bp, Homo sapiens
gacatctgcaatgatgttctggaattgaaagatgttggccatcgtgatcagatggctgcagctagaggaatcctg

SEQ ID NO: 307255 - DNA, 75 bp, Homo sapiens
agttcgaggggccaaggcagaagaaatcttggagaagggtctaaagatgctggagagcatgatcaagaagccccg

SEQ ID NO: 307256 - DNA, 105 bp, Homo sapiens
tctgttctgcgtggctgtcgggcggcgtttggtcccgggagcctcgccgggtgtcatggagaaactccagctgggcccagagattctgcagcgggaaaatccaag

SEQ ID NO: 307257 - DNA, 97 bp, Homo sapiens
tcttgggcaatcttcacggggctggctgctctgtgtctcttccaaggtgtcatggagaaactccagctgggcccagagattctgcagcgggaaaatc

SEQ ID NO: 307258 - DNA, 78 bp, Homo sapiens
gcagtggtcgcttcttctccttggcatcgactgggcccccgagagtaaccgtattgtgacctgcggcacagaccgcaa

SEQ ID NO: 307259 - DNA, 51 bp, Homo sapiens
cccaagacacccagagagggacagctgaactacctgggcccccctttcaac

SEQ ID NO: 307260 - DNA, 98 bp, Homo sapiens
gcggcgccagcagttccagtccgttgctttactttttgcttcaccgacatagtcattatgccgaagagaaaggaatgtatcctgtcaggtataatgtc

SEQ ID NO: 307261 - DNA, 99 bp, Homo sapiens
ccaggaagcgcgagaccaggacggcgcgggaactctacgccaacgtggtgctgggttacagaatgtctgaaggggacagtgtgggagaatccgtccatg

SEQ ID NO: 307262 - DNA, 50 bp, Homo sapiens
cagcatcattgtgagccctcggcagaagaacatgtgatcatccaggccga

SEQ ID NO: 307263 - DNA, 90 bp, Homo sapiens
attggaaactctttgggaaagccactcgaaaaggttcaaaccttgtactactcagctgatcacaagctgcttgatgggaacctactagat

SEQ ID NO: 307264 - DNA, 99 bp, Homo sapiens
gaacacgctaaagaagaaacaaaaaaagctatcaaatatcagagcaaggcaagaaggaattgtggtggttttggactccatgattaaggtgttcacatt

SEQ ID NO: 307265 - DNA, 88 bp, Homo sapiens
ctcagaaagcagaggctcagagcttggagacagacggtacccactgatggtaatgctggcctgctggctgaaccccagattgccatgt

SEQ ID NO: 307266 - DNA, 100 bp, Homo sapiens
cagtggaagatgaggacagcatggatgggctggagacaacagaaacagaaacgattgtggaaacagcaacgaaggttttgggaacagtaaaatggttcaa

SEQ ID NO: 307267 - DNA, 50 bp, Homo sapiens
cgaatatcgtcatcgttagaagagcaccactaggctggacagcgacagag

SEQ ID NO: 307268 - DNA, 100 bp, Homo sapiens
ggtgcaggtggggaaaatggcggtgtctacagtgttctcgacttcgtcgctgagttgctggagaatgtaaccctaatccataaaccagtgtcgttgcaac

SEQ ID NO: 307269 - DNA, 75 bp, Homo sapiens
attcctttccggaagcacacagtgcgcggggagcgttcctacaggcaaggcactgacgtttcttctgctacagcc

SEQ ID NO: 307270 - DNA, 75 bp, Homo sapiens
gaagaaaatggatttcgttatatcccctttagaatatatcagggccaataataagaagtggacaatacagtattt

SEQ ID NO: 307271 - DNA, 75 bp, Homo sapiens
atgaatctctgcccgcaacacatatcagtgcacagccagaggacaacacatcacacacaagaaacagttgtgctc

SEQ ID NO: 307272 - DNA, 88 bp, Homo sapiens
gggtcatcctagggaaaacactatcctctgagatcccagatcatgagatccatccttttacaatccctgctattattcgtccattcag

SEQ ID NO: 307273 - DNA, 82 bp, Homo sapiens
ggcgccacgagagcgggcagcggaggagttttggaccaatcgaatacaaaggccccatgagtgctgtttacattgagaagtt

SEQ ID NO: 307274 - DNA, 50 bp, Homo sapiens
gtcgactccttcgagaagcaatcctccccggcgtgaaggtcatcatcgca

SEQ ID NO: 307275 - DNA, 75 bp, Homo sapiens
atcatcctggggacctggtacatggatgctccagaccttgtatgattacttctggtgggaacgtctgtggctgcc

SEQ ID NO: 307276 - DNA, 100 bp, Homo sapiens
cagaacgcagatcagaggtagtcggacctttcccgctggcgcgcagcctcagctagggcccggcaggaagatgggctcccgtggacagggactcttgctg

SEQ ID NO: 307277 - DNA, 100 bp, Homo sapiens
gtctgatgccactgttctcttcccgactccttagttgctttagtcagctaacctcgtcattatttgccaaatctaaattttcaggagtgaaaagaaaaag

SEQ ID NO: 307278 - DNA, 82 bp, Homo sapiens
gccgccgctgccgctgccgctgccgcacctccgtagctgactcggaagctcttcgtgggcggtcttgactggagcacgaccc

SEQ ID NO: 307279 - DNA, 120 bp, Homo sapiens
tgccgcagctggcgcagcccacgctcatgatcgacttcctcacccgcgcctgcgacctcgtgtgacagcgagagcggcccggacgacaaggtaagcccagcgtcctcctcctgggctcgg

SEQ ID NO: 307280 - DNA, 100 bp, Homo sapiens
tcttctgcactgtttacaggcacagactgtggatattcataaggagaaagtggcacgaagagagattggtattttgacaacaaataagaatacatcaaga

SEQ ID NO: 307281 - DNA, 74 bp, Homo sapiens
cgggaggcagagggaggaacctggacgccggaagccgggaaatggtgaaaggcaggattgggaaccccacagac

SEQ ID NO: 307282 - DNA, 98 bp, Homo sapiens
gttcccaagtctctttccagaggccaggctttatgggagcatgggttaccagcgacgcaccctttgttgacctcctgtactggagagacattaagaag

SEQ ID NO: 307283 - DNA, 101 bp, Homo sapiens
ccgctggaggagctccccagctggtggctggagcgaccccttgttctttggtggcgctgcctgccctcaagtatgtgttgtatacattggttggctttgtg

SEQ ID NO: 307284 - DNA, 82 bp, Homo sapiens
ctccgcccgcagccgccgcggaccaggcaggaggaggcctcggtggtaccagaagaggaggggctgatgtgaacatccggca

SEQ ID NO: 307285 - DNA, 100 bp, Homo sapiens
acgaatccttcatcagtatggtcattggtcgactgagatctgatgatatttacaaccagatctccaagaaggagaagcttctctcgcagccggagcaggt

SEQ ID NO: 307286 - DNA, 90 bp, Homo sapiens
gtcaaacatgctgaccgctcaagagattctacatcagtttggtttcactcagaccgatatgagatcctgactccaaactccattcccaag

SEQ ID NO: 307287 - DNA, 100 bp, Homo sapiens
cctggaggaggtgttgaaaggggatgaaacaggcgcctatttaatcgacagagaccccacctactttgggcctgtgctgaactacctgagacacggcaag

SEQ ID NO: 307288 - DNA, 100 bp, Homo sapiens
aatgccattattgcttcagaaacagcaagaaatagcatctattacggagcagcttatgactactgagggagcactggcagttgctgggtaatttgaagac

SEQ ID NO: 307289 - DNA, 82 bp, Homo sapiens
cgagctcataatcacaaagtgtgctgggttaaagaagcaggagacccccgaccaggaatcctgttcactggggagctctggg

SEQ ID NO: 307290 - DNA, 101 bp, Homo sapiens
gaggaagcggccacggcagagcctggtgcctgaagaggagtcggagaacacagatatgtagaactcttcttgaattctacagcaggagcaagcggtggtgc

SEQ ID NO: 307291 - DNA, 100 bp, Homo sapiens
tggcacgccagtgcagtgactcttcggccatggaatccctgaccaagcacctatttgctatcctcggagatccggagttctgtaactcacttgttgtgtg

SEQ ID NO: 307292 - DNA, 99 bp, Homo sapiens
ggtctgcactacactgagtattatctgcatgagcctccttctgtgaggaaatggcaactgctgacaggaagtttggcatccacctcccccagcctcctg

SEQ ID NO: 307293 - DNA, 101 bp, Homo sapiens
ggtgccatcttcgaaccttcactatcagttggaacagaggctgacaacttcacagttctcaatctggctgtggcagtgaacagggatattgtgtcaggcct

SEQ ID NO: 307294 - DNA, 157 bp, Homo sapiens
cattaacaaccaaaggaaaagttggtgattctctgctagatgttgtggttgaaaataatctagatattgatggctttgagacagggtctcactctgccaaccaagctggagtgcagtgatgtgattgtagctcactgctgcctcaaattcctggact

SEQ ID NO: 307295 - DNA, 100 bp, Homo sapiens
gtcgatttggatctgggatgaacatgggcaggataaatggccagaagcggactcctagaagaggggagcagcaaggatggaatgacagccgtgggccgga

SEQ ID NO: 307296 - DNA, 100 bp, Homo sapiens
gagcaacctgaaggccccgtccaggacttggatgttgtgggtgatggtatgcagtgtcctccttcacctttgctttttgatccttcactaacccttgaag

SEQ ID NO: 307297 - DNA, 75 bp, Homo sapiens
cgagtccaaagttgtgtttactgagaagaccacaggtgtgatccctcacatccacaaatctctgattggaaagaa

SEQ ID NO: 307298 - DNA, 100 bp, Homo sapiens
tcccatttcgcccctcgcgtccggagtccccgtggccagttgatattcactgatggactccaaagaatcattaactcctggtagagaagaaaaccccagc

SEQ ID NO: 307299 - DNA, 98 bp, Homo sapiens
tgggaaacccacaggaggcaaccacactagtttagctggaaaacctcatgctggacaaagatggccacatcaagatcactgactttggcctctgcaaa

SEQ ID NO: 307300 - DNA, 100 bp, Homo sapiens
aggaggagaacaggaagagcacgatggggaatgcagagagcaaccaatgtcacctaccaagcccatcatgtcagcaggaacaagagaggtcaggtggtgg

SEQ ID NO: 307301 - DNA, 74 bp, Homo sapiens
taaccacatcgtgggatgcactttctcaaaccaaggctgctcttcttggacacttaatgattgttggcaagaaa

SEQ ID NO: 307302 - DNA, 100 bp, Homo sapiens
aggaaactggcggctgctggtagttccatgctgtctgttcagacttcagcttggtgaccaggaagaaacaggctcctgccagcaccgacagcaacgaaaa

SEQ ID NO: 307303 - DNA, 73 bp, Homo sapiens
gcggagcctggcgggcgtgggaacccaggccccgccgaggcggccaggtactccaaagattcaggtttactca

SEQ ID NO: 307304 - DNA, 89 bp, Homo sapiens
caaggcactgcaggaggagaaccgcgacctgcgcaaagccagcgtgaccatcgaattgagtgatctacagcgcgatccacctgctcact

SEQ ID NO: 307305 - DNA, 100 bp, Homo sapiens
agtggaggacatggctcggaggaaggtggtttgtgctccccctactgcctatatcgacttcgcccggcagaagctagatcccaagattgctgtggctgcg

SEQ ID NO: 307306 - DNA, 83 bp, Homo sapiens
caccttcacaataactgttgatcagaaaaccttccatttccaggaccaaaatccacacccttatcacagcccagtgccaatgg

SEQ ID NO: 307307 - DNA, 75 bp, Homo sapiens
tccggaggcgccagctcaaccgaagcggctcagccccagggcagcacatcagagacaccatggaacacagccatt

SEQ ID NO: 307308 - DNA, 100 bp, Homo sapiens
ttcaaagcacctagtacctcctaccattgtcaactggtcgtccttggtggaaggaaccatgaactggcatctccccctcttcctcttggcctctgtgacg

SEQ ID NO: 307309 - DNA, 82 bp, Homo sapiens
ctgtcttcatctttacagaggaatagtctacaaaggaagacttgtaacctggagaagagggccgttgctccagggagaactg

SEQ ID NO: 307310 - DNA, 100 bp, Homo sapiens
ggaacacggttctgtccaggagagccaggtatcggagcagccggccacggaagcagcccagctcaacattggcaatgtgctccctgtgggcaccatgcct

SEQ ID NO: 307311 - DNA, 96 bp, Homo sapiens
gaaacttgcttgaaaatccgtgaacaggaacttaagagtcttaggagtcagttggatgtgacacataaggaggttttcaacacatactccaatgaa

SEQ ID NO: 307312 - DNA, 74 bp, Homo sapiens
gcctgcccagacggctcacctgtgcgggatggaacaaaagatatggatcagaaactttcgaagttggtagaaga

SEQ ID NO: 307313 - DNA, 100 bp, Homo sapiens
gttatgaagctaatcctggcgttccaccagcaaccatgagtggttccatgatgggaagtgacatgggaagagaaggaacggtggatccgtgccaagtacg

SEQ ID NO: 307314 - DNA, 83 bp, Homo sapiens
tcaagacacaccggaggcgacggccatggccacagaggctgggaggcggcagaatgcagccagaggagggcacaggctggctg

SEQ ID NO: 307315 - DNA, 90 bp, Homo sapiens
ggagatggcacgtggagtccccgaacaccatcatgtggagacatggggatcagcagtatacttgtgttataaaaaatcggtggcaaagac

SEQ ID NO: 307316 - DNA, 117 bp, Homo sapiens
cgagcgcccggattggggatgagtatgcggaggacagctctgatgaggagagaggtggagaagagcgagtacttgagaaagaagaggaagaagatgatgatgaagatgaagatgaag

SEQ ID NO: 307317 - DNA, 82 bp, Homo sapiens
agaagaacctgcgagccgacaacgccttcatgctgctcacgcaggtgacgatgcctggggagcctgtggacgtggcatgtgg

SEQ ID NO: 307318 - DNA, 96 bp, Homo sapiens
tttgctgatggagagctggaatctatgggattttcagctcgatacaatttcacacctggttaccagccagtcttgtctggtcaacagggattccaa

SEQ ID NO: 307319 - DNA, 100 bp, Homo sapiens
gacgaggaggcggatcccccggcgtcagatcccagctctcctgttggcttcgtgcttggggtagatcttcttcacatattccccctggaaggagcaactt

SEQ ID NO: 307320 - DNA, 87 bp, Homo sapiens
gcaagctgtgcgacgtgaccctcaagcttaccctgaaagaagcagatcccagttcaaaagtagccataagaaggaaggattcaccac

SEQ ID NO: 307321 - DNA, 96 bp, Homo sapiens
aggagttaagaaaagagctcttggaaaagcaccaaagggagcttcaggagggaaggtgtgaagatgccttaagaaaaaataagagcttaattgggc

SEQ ID NO: 307322 - DNA, 75 bp, Homo sapiens
gggacccaccgtagagactaagcatgttgacatagcggctttattgataaaatacaacacgtgtgtaaatgcaac

SEQ ID NO: 307323 - DNA, 88 bp, Homo sapiens
cacggtcttgctgaaagccagggaagattagcctgaggcctgctcagtcgttcctaatgaataaaaatcaagtgccaaagcttcagcc

SEQ ID NO: 307324 - DNA, 75 bp, Homo sapiens
tatacactggaacagaatcaacccagaacggatagctccctcctggaaaaggtttgaagactgcttcattctgcc

SEQ ID NO: 307325 - DNA, 100 bp, Homo sapiens
gaaaatcatattatagatggagtaaaggcgaggaaacgagacctctttcgttccttctagaaggtctggaggacgtagagttattgaaaatgcagatggt

SEQ ID NO: 307326 - DNA, 75 bp, Homo sapiens
aacctctatgccgacatcgacgccgcctggcaggccctgcgcaccagaggtggggctggtgtccgagcacttctc

SEQ ID NO: 307327 - DNA, 101 bp, Homo sapiens
gagccgcgcagccctcggagcacggttatgaagacagtatggagtttccagaccatagtagacatttgctacagtgtctgagcgagcagagacaccagggt

SEQ ID NO: 307328 - DNA, 90 bp, Homo sapiens
atcaagatgaatatgaccctatggaagcagaagaagctgaggatgaagaagatgttgttgccacctcctccctttcatggttccatcagc

SEQ ID NO: 307329 - DNA, 101 bp, Homo sapiens
tcatgatccaccggcctcggcctcccaaagtgctgggattataggcgtgagccaccgtgcctggctgaaggtaacaccgtgattcacttagatcaagcatt

SEQ ID NO: 307330 - DNA, 100 bp, Homo sapiens
caacattgttcctggaacgccctctttttaaaaaaggcattcctgcatcgcatccggcagaacgtggccgactcagtggagaagggcctcacggaggaga

SEQ ID NO: 307331 - DNA, 90 bp, Homo sapiens
cccctttaaaccaaaccctgtactcagtcttttgtgcccaggccccttcacagatgtagtcactacaaatcttaaattgcgaaatccatc

SEQ ID NO: 307332 - DNA, 98 bp, Homo sapiens
tacgacccggagcacccgacccctgacccagcgacttctccgtgtcccttaaagcgtcagggaagaacaaacacttcaaggtgcagctcgtggacaat

SEQ ID NO: 307333 - DNA, 100 bp, Homo sapiens
gcggcaggggagagcatggctcagcggatggtctgggtggacctggagggaaatcctcattgacgattcaatttgttgaaggccaatttgtggactccta

SEQ ID NO: 307334 - DNA, 75 bp, Homo sapiens
agcagttgagcgagcccgaggacatggagatggaagctgcagacctattcacagacttggaaaatgcatttcagg

SEQ ID NO: 307335 - DNA, 90 bp, Homo sapiens
gctaactaccagacgatgaaagaacatttcctctagtttctggataatgagcaggcacacagcacatggattaattgatgtatgttgagt

SEQ ID NO: 307336 - DNA, 75 bp, Homo sapiens
aaacgacaggagcatcccaggaaggggttcccagaagtcagaatccaagatgggaaattcacctcttctatagaa

SEQ ID NO: 307337 - DNA, 96 bp, Homo sapiens
cctactacgcgtacgtggtggagctctgcgtgtagagtgataatcttcaaaatgaagactttggaaaattttaggttctctataggaactacaaaa

SEQ ID NO: 307338 - DNA, 75 bp, Homo sapiens
tggcaaacagtgtttgcctctggttcagctcatacaacagcttcttagctcaagagcaagatgacgttctcatag

SEQ ID NO: 307339 - DNA, 100 bp, Homo sapiens
ttgctcaagttcacaactcgacggtccaggcctcgatggagagactgtgcagctacctgcctgtactgtatctggacggatggactgaatgcgctactcg

SEQ ID NO: 307340 - DNA, 89 bp, Homo sapiens
ttaaggggaaattacaagaattaggagcttatgttgacagcaactctggaaagtggcttctaactcggcgcattttcttagtggatgca

SEQ ID NO: 307341 - DNA, 75 bp, Homo sapiens
gttccttggtgtcatccagccttagcaaaccagaggattgtcaccagacctgcaatctatggagcagattcggag

SEQ ID NO: 307342 - DNA, 100 bp, Homo sapiens
tccaaagtggatgcctccggggagtttcgataatggacaaggtgacgacagttttcaacagtgcacaaagactagaagttgtcagaaactgtatctcatt

SEQ ID NO: 307343 - DNA, 100 bp, Homo sapiens
cgaaatgagactccctcagatccagtgataattgacagccacagcaattgtctgctattttaaaagcactgtgatgcttaaatattccagctgctacatc

SEQ ID NO: 307344 - DNA, 100 bp, Homo sapiens
ttttcttttgttcctgcccgtaggtgtaattgaaaagtgatcctctcttcagagatgtcaaaaacaaacaaatccaagtctggatctcgctcttctcgct

SEQ ID NO: 307345 - DNA, 100 bp, Homo sapiens
gacagcccaaatatcctcggaagagcgctcccaggagaaacaaattctgcctgatcaatgcaggagtcctgtacctctacttcagcaattacctacagat

SEQ ID NO: 307346 - DNA, 75 bp, Homo sapiens
tgtctgcgtgcgcacagacggcgagggcgaggatccggagtgtctgggagaaggtctcacagatttcaagcctgg

SEQ ID NO: 307347 - DNA, 90 bp, Homo sapiens
tggacaaaggaacaggtatctcagttacacaacagggcatatttgggcatgtccaccaagtgagggagatgattatatcttccattgcca

SEQ ID NO: 307348 - DNA, 51 bp, Homo sapiens
caaaatcccaggctgtcggaagcaagatgcctgtgaggagccaccaacatt

SEQ ID NO: 307349 - DNA, 75 bp, Homo sapiens
cagacgaggcccgcagggacatggccggggacacccagtggtccagggctcggagcccagctacctggaccgcac

SEQ ID NO: 307350 - DNA, 100 bp, Homo sapiens
tatttatggaaaacaagttataatcaatctggacccctatggtgtagccgtgggtggaactgtggggcactgcctgtgcacgggattggcagtaattgga

SEQ ID NO: 307351 - DNA, 74 bp, Homo sapiens
gacaacccagatgtgcaacaaagtgcgatgtccaatggatgggaccccaatgaaatgttcaagttcaatgagga

SEQ ID NO: 307352 - DNA, 96 bp, Homo sapiens
ggaagtccaagtcaaacgcagaaggactgcctcactgagcaaccaagagtgcccgcccctgcatccctaaaagcttcggctacagctcggtggtgt

SEQ ID NO: 307353 - DNA, 100 bp, Homo sapiens
atgatgaactagggtcagaagaagatggatttgatgataaccttctgttcggtgatgaaattatcactaatggttttcattcctgtgaaagtgatgagga

SEQ ID NO: 307354 - DNA, 101 bp, Homo sapiens
gctaggctggctgcacttgctccacgggtcaggggatcggaggggttcaatcaatgtactgaatataactgctgaagaaattaaaccaaatcaggttggag

SEQ ID NO: 307355 - DNA, 89 bp, Homo sapiens
tggggccacagctgctgctcaactggggagtacaaattgccaaggggctgggtgaccgatggcttcagttccctgaaagactactggag

SEQ ID NO: 307356 - DNA, 96 bp, Homo sapiens
ggcaactgcgatgtctgtggactgtcttgggcagcatgcagtgctttctgggtgaactggcacaaaggttaatctcaagatgccgctagtgaaaag

SEQ ID NO: 307357 - DNA, 97 bp, Homo sapiens
gcagtgtgacggctgggcgacttgcgaggatgagagcgacgaagccaactgtccagatggagaaggatgaaactgtgagtgactgctccccacacat

SEQ ID NO: 307358 - DNA, 100 bp, Homo sapiens
cggcggcagcgagaggcgagccagcggcgacggatgaatttcacccattcatcgaggcacttcttccacatgtccgtgcaattgcctatacttggttcaa

SEQ ID NO: 307359 - DNA, 50 bp, Homo sapiens
gggggaagcggcggcggcaaaggacgtaaaattcatcctgatcagaaaaa

SEQ ID NO: 307360 - DNA, 100 bp, Homo sapiens
gaggggttcgggcttgtcaggttctagaaatgaagctgttgtcatttctggaaggaaactggcccagcagatcaagcaggaagtgcggcaggaggtagaa

SEQ ID NO: 307361 - DNA, 98 bp, Homo sapiens
cggggaggcgctgcggaccggcggcccaggcacggagaggcggcgagaccgcagtggaaggaggcaaaaccggaagaccttatggattcaaaacttag

SEQ ID NO: 307362 - DNA, 75 bp, Homo sapiens
tcgaacttttgacacggctttggaaacgacgtcatgtgttagacaacaatatgcacaggttttggcccaacagca

SEQ ID NO: 307363 - DNA, 100 bp, Homo sapiens
gtcaacaggtgaaaagaatggaaaactgtggtctccagatgaagaggtttcccctgaagtactagcaaagatgaagaagatgactttatgtgtaagaagg

SEQ ID NO: 307364 - DNA, 122 bp, Homo sapiens
aaccgaattccaactggagctgccggtgaaatatgctgtctacatggtggtcaccaggtttttcgttggaatatacgttgcacatttatggcgattctgagtgtgagggcagacttctgcca

SEQ ID NO: 307365 - DNA, 100 bp, Homo sapiens
cccgtctcccgcccctccaagccacagatcatctttggattcttccccagaagcttcaagtttttcacagcatatggtcctgattatgtgctggaaatca

SEQ ID NO: 307366 - DNA, 96 bp, Homo sapiens
aaaaacatcttttcgaccaggatgaggagacatgttggaactcagaccagcccggaggaaccacccccgccctcctcagcctgatcctggaagaga

SEQ ID NO: 307367 - DNA, 83 bp, Homo sapiens
cctgcaccactaacgcgaggaaacgcaggcgagtgggaaggggagcttttggaagagtcccagatggaagcgaccaggctccg

SEQ ID NO: 307368 - DNA, 100 bp, Homo sapiens
gaaaacgagcccctatcctaggattacctgaaggtgaaacagattgagccagaaggaagacaatgctggaggaagttaagtcttcagagcctactgagga

SEQ ID NO: 307369 - DNA, 100 bp, Homo sapiens
gcggacccagtggatgtaaaccccttccagctctaatggtaccaagtgacaggttggctttactgtgactcggggacgccagagctcctgagaagatgtc

SEQ ID NO: 307370 - DNA, 50 bp, Homo sapiens
cagccttcccagtagctggaactacaggtccgcgggagagctgtggggct

SEQ ID NO: 307371 - DNA, 100 bp, Homo sapiens
ggcaaactgtactatgacaaaagatgatttcagccttccaagttctgatgtaacaaacaacttaaaacccagtcttcatccacagatgaacttgctagcc

SEQ ID NO: 307372 - DNA, 83 bp, Homo sapiens
gaatgtttccatctcttcagagatgaaccagtgagtgacctgcaggaagaaggcaagaatgccatcaactcaccgatgtcccc

SEQ ID NO: 307373 - DNA, 95 bp, Homo sapiens
gcactgcctgtgcacgggattggcagtaattggaggaagaatgatagcacagaaaatctctgtcagaactgacagcgtggaagatgaactggaga

SEQ ID NO: 307374 - DNA, 100 bp, Homo sapiens
aggtggaaagagttaagagcaagatggaatgattttttctgttctctgttctgtttcccaatgcagaaaagaagggacttcaggcccgcatagctcatag

SEQ ID NO: 307375 - DNA, 90 bp, Homo sapiens
gaaagatgatgatgttgtaagccttagcagccttgatctgaagattgctcgctgtaagcagctcatctgtgaccccagctacgtaaaaga

SEQ ID NO: 307376 - DNA, 90 bp, Homo sapiens
cgcagtggtcgcttcttctccttgcccattccagatgatgggatttattggcaggccaaccttgacagattccaccaacacttccgtgac

SEQ ID NO: 307377 - DNA, 113 bp, Homo sapiens
cttcgtggcgacctatggccgtggctaccccggatttgctccaagctatggctatcagttcccagctgtcaccactgactaaagaagagaaaactgcggcagagcaattcaaa

SEQ ID NO: 307378 - DNA, 74 bp, Homo sapiens
aaaggtcactgccatctggagtggatggacacacctggttgctcagacaggagtgcaatctgaagccacttcaa

SEQ ID NO: 307379 - DNA, 100 bp, Homo sapiens
cagtcctggagctgtgaggagattcgggccgtcaccctgcctcccctgcgtcccgccaccggccgcttctgtcctcggaatactcccccagttgcaagag

SEQ ID NO: 307380 - DNA, 90 bp, Homo sapiens
tcagatggcagtggcagtcctttgccagtggaaggagttcctgctaaggggaggtgcaggagataacttctttgtggatgattatgctag

SEQ ID NO: 307381 - DNA, 51 bp, Homo sapiens
agaaactggagaatgttctgaacatagactatgccagttactaccagggcc

SEQ ID NO: 307382 - DNA, 79 bp, Homo sapiens
ctatgggcagcagccagcagccactgcacctacaagtgttatctacaaacttctggcatcgaaaagtgaaggaatcagg

SEQ ID NO: 307383 - DNA, 100 bp, Homo sapiens
gcaagattcaaagataaaactcctgcccctcttcaacacctggacaccttgttagatggaacctacaagcaggtccggcccggagcggccatgtcccacg

SEQ ID NO: 307384 - DNA, 105 bp, Homo sapiens
cctcagcctcccgagtggctgggactacagtgattctaccagaaaggaatgaagaacagaaccttcaggaattgagtcacaatgcagacaaatatcaaatgggag

SEQ ID NO: 307385 - DNA, 75 bp, Homo sapiens
ctttattgacctcgactcccatgcggtacaggtttgcagattccgccagcagcacagcaagctctacagatgagt

SEQ ID NO: 307386 - DNA, 51 bp, Homo sapiens
aggaggaggcgaggaggagagactgtgggacgctcgtccctgctggtgggg

SEQ ID NO: 307387 - DNA, 74 bp, Homo sapiens
attgaactcatccggcagaataagagactggacgctgtgaggtcctgaacgaggctgtgggggccctgatgtac

SEQ ID NO: 307388 - DNA, 98 bp, Homo sapiens
tggtcccaaagaccaaacctcaagtacaaaccactgccacagatcagcaaagtagcaaatcacgtcgggtcggcagcggttctggtcggaacctgtgg

SEQ ID NO: 307389 - DNA, 75 bp, Homo sapiens
gctggcgcggcatcgagtcaccaaaacgcaggtggaagaagagcccgaagaagaacctgaagagacagcagaaga

SEQ ID NO: 307390 - DNA, 50 bp, Homo sapiens
cgcggggaccgctgtgctctcgcctgtactgcgagaagcggatcctggag

SEQ ID NO: 307391 - DNA, 74 bp, Homo sapiens
tttcaatatgtaggatccactaccagggttttcgtgagattaagaaggacaatgcagatcttcgtgaagactct

SEQ ID NO: 307392 - DNA, 100 bp, Homo sapiens
aaatggcgaagatcgccaagactcacgaagggtcttactacatattgcaacagaagataatattggaggtgaagagggtaacatgaagtttggcactacc

SEQ ID NO: 307393 - DNA, 100 bp, Homo sapiens
ccaaagccttcttattgactcctaggaatcaagccgcttacaaacacgcagatggcaagaagattgatggcaggagggtccttgtggacgtggagagggg

SEQ ID NO: 307394 - DNA, 95 bp, Homo sapiens
gggctcaaggacagcttgcctgactgcagccataaggatgaagcctcttcagaattcgacaccaaattttggaacttaaaaagaagattcttaaa

SEQ ID NO: 307395 - DNA, 100 bp, Homo sapiens
acatatttttggacctgaaacagaaattctggaacacctatatgcaaaagcgaaagcttcggatctacatttccaatacgttcagtcccagcaaggcgga

SEQ ID NO: 307396 - DNA, 75 bp, Homo sapiens
cccaccccacctgccaccgaggccccctcttcgcctcctccaggaactgtggctgcaccatctgtcttcatcttc

SEQ ID NO: 307397 - DNA, 102 bp, Homo sapiens
ttggaacttcgttgcttgcttgcctgtgcgcgcgtgcgcggacatggcctcaaacgtgtggacgaatgtggaacctcgctctgtggctgtgttcccttggca

SEQ ID NO: 307398 - DNA, 97 bp, Homo sapiens
caggaagctggaactcctagtacaggtttctgggtggagcggacccctgtgcacgaggcagcccagcggggtgagagcctgcagctgcaacagctga

SEQ ID NO: 307399 - DNA, 125 bp, Homo sapiens
tttcctgaagatgtttacagtgcagtcttatcgaaggatgtgcatgaaggacagcctcttctcaatgatttgataatgggctgcattaaaagtaaagaaaacaaaagtccagccattaaatacag

SEQ ID NO: 307400 - DNA, 82 bp, Homo sapiens
attcaacttcacccgtaacccaccgccatggccgaggaaggtggtggacttgctttgtgaagagacagttcatgaacaagag

SEQ ID NO: 307401 - DNA, 82 bp, Homo sapiens
aacatcgaatcatggaatcccttgcatggctctcagtgtttaatgaacgctgccgaattcacttcaagcctccaaagaatga

SEQ ID NO: 307402 - DNA, 89 bp, Homo sapiens
gggaaggacggggcctggcccccgggactccctgtgccttgcttggagctgacgccgacgggagcacccagtggtgctgacaaaatttg

SEQ ID NO: 307403 - DNA, 90 bp, Homo sapiens
gaaaagtaggatgaacctgcccaaggggccggacacgctctgcttcgacaaggacgagttcatgaagcaacatcggcaagtatagacaga

SEQ ID NO: 307404 - DNA, 51 bp, Homo sapiens
agagggttgcaatggttccacagacttataagctagcaattacagatttaa

SEQ ID NO: 307405 - DNA, 78 bp, Homo sapiens
cagattcctgggtactgccagatacggctgcttctgatgcttggaagatatcctctcagccacaaagatggtaataaa

SEQ ID NO: 307406 - DNA, 102 bp, Homo sapiens
tccgctccccgccccgccgcggccatggaggacgagcggaaaaacggagcctacggtttttcgttggaatatacgttgcacatttatggcgattctgagtgt

SEQ ID NO: 307407 - DNA, 75 bp, Homo sapiens
gctgcgtggggctcggccgcgcggactgaaggagactgaaggacgtgttcctcatgatccggcgccacaagacca

SEQ ID NO: 307408 - DNA, 75 bp, Homo sapiens
ggacatggagtatgaaagacggtggatctttaactcaagactagcatgaagagttgccttctggcctgccctgag

SEQ ID NO: 307409 - DNA, 75 bp, Homo sapiens
agaggcatggatgcttctctgtctcatcagtccttagtagcactatcagaggtacatcaggaacgtctctatcaa

SEQ ID NO: 307410 - DNA, 75 bp, Homo sapiens
taggtggtgtccagctccagactgtgggagatgactgatgacatggattcatacacaaacgtatatcgtatgttc

SEQ ID NO: 307411 - DNA, 83 bp, Homo sapiens
ggaaagtcaggaccgcgacggcagcagagcactggtgctcaagaccgaatcggctgggcttttggcctaggattagaaaggct

SEQ ID NO: 307412 - DNA, 95 bp, Homo sapiens
tcattaagcagatgtggtctggaagggacgcccatgtggcacctcgcatgttcaaaccaactcgtggagaaggtgtaggagtaattggagtcatt

SEQ ID NO: 307413 - DNA, 75 bp, Homo sapiens
ccatgctgggaagaccatcatccccctgatctctcagtcctcctgcccctgctcgagtcttgcagtgtgcggccc

SEQ ID NO: 307414 - DNA, 100 bp, Homo sapiens
ctcctcggccacctcctccgcggacgccggggagaacccaggaaagaccacagcaagattctttcattcgtctcctcctagcctgggggaccaggctcga

SEQ ID NO: 307415 - DNA, 97 bp, Homo sapiens
cgacgctatggcgcactggagtaccctgttcctggcacctacaaggagaagatgaaggagctgtcggtgctgtcgctcatctgctcctgcttctaca

SEQ ID NO: 307416 - DNA, 73 bp, Homo sapiens
tggtggtctgcatcaccaccggatcaacttcgacaaatagtgctgaagaaaaaatcctaacagaattccgtga

SEQ ID NO: 307417 - DNA, 76 bp, Homo sapiens
agctgcagattctgctgttcgactctggtctaaaaagggtccagaagttccctgtattgaacactgatatacaagg

SEQ ID NO: 307418 - DNA, 83 bp, Homo sapiens
ggggaccacaagatcctcatcgacaggttcctgacggagacttcgcccttcatgtggtccaacctgggcattggcctagctat

SEQ ID NO: 307419 - DNA, 51 bp, Homo sapiens
acctggcacttatgtcctccctgggttacattggcgaatttgaaatcattg

SEQ ID NO: 307420 - DNA, 100 bp, Homo sapiens
gaagattttaggcggtatcaaatggaaagtttttccaaatattcatctgtacaggaaagtttctgtggaacatctatcattgtaccagaactggaaggag

SEQ ID NO: 307421 - DNA, 96 bp, Homo sapiens
gcgactgctgctgctcctgagggtgctggaccccctgctctgcgacttcctggaaggagcttcaagagcagggggagatcagaatcgtccagctgg

SEQ ID NO: 307422 - DNA, 75 bp, Homo sapiens
gctcgccggtcagcggctcgtcgccgttcgccacccaagcctcccgcgacgatgcccctcaacgttagcttcacc

SEQ ID NO: 307423 - DNA, 147 bp, Homo sapiens
cacgaaatggattggagtgaaccggagaccccgaaaacggaagcgcagggagaaggaagaggtgtttgaaaaggccatttcataattctgaatcatgtctgataacggagaactggaagataagcctccagcacctcctgtgcgaat

SEQ ID NO: 307424 - DNA, 73 bp, Homo sapiens
gatccgggagatcgcggacgggttgtgcctggaggtggaggggaagatactaggggcaaacgagacagagaaa

SEQ ID NO: 307425 - DNA, 100 bp, Homo sapiens
atccggggccccggaacccgagctggagctgaagcgcaggctgcggggcgcggagtcgggagctctttcagtctcacatggcaacgaaaacaacttgtat

SEQ ID NO: 307426 - DNA, 100 bp, Homo sapiens
atctacggagcccagcaggcgtgccaggcaatggggagtctttatcacactgactgcttcacctgcgactcgtgtgtgggctcagacccagagtttgcac

SEQ ID NO: 307427 - DNA, 96 bp, Homo sapiens
ctggcgacctatccagaatgatcaaggaaactaaatatattttgccaactttggaaaaagaattattcttggcagagcacagtgaccttgaagaag

SEQ ID NO: 307428 - DNA, 100 bp, Homo sapiens
gatgattgacagtgtggagagccgtgatatgttccagttgcacatttcctgcaaggactccaaagtggtgagttccagggtcacccccgagaggacaaca

SEQ ID NO: 307429 - DNA, 75 bp, Homo sapiens
gctcatgaagaaagagttaatgaagtgaaccagtttgctgccaaactcatacagaataagacctggaagtttgtt

SEQ ID NO: 307430 - DNA, 82 bp, Homo sapiens
cctgcccagacggctcacctgtgcgggatggaacaaaaggccgccatggcatcagatgaaggcaaactttttgttggagggc

SEQ ID NO: 307431 - DNA, 97 bp, Homo sapiens
gctgaaaatgtgtcctttgtggaggagtacaggagaacccccgcctcacagaagacttcgtgtcccacctggagaccgagctggagcagtcgaggct

SEQ ID NO: 307432 - DNA, 88 bp, Homo sapiens
cctgaccatggctccctgcagtaccctttaacgatgccatggacaatattaccaggcagaaccaattctacgatacccaagtcatcaa

SEQ ID NO: 307433 - DNA, 82 bp, Homo sapiens
tatgatctcaggtcctcagaccaaccagcccaaggaacatcttgccaatttcaaatcggcagcccataacggtacgtgaagg

SEQ ID NO: 307434 - DNA, 74 bp, Homo sapiens
tggaggcggcgggatggaggcggcggccggtgctgactctggctgcccaggagctgtctaggcctgggtgcctc

SEQ ID NO: 307435 - DNA, 82 bp, Homo sapiens
ctgaagttccctcacattagccagtgtgaagacctccgaaggaccatagatggagtgaagtgaccaggaaattggaattctg

SEQ ID NO: 307436 - DNA, 82 bp, Homo sapiens
gtttgcagaagtggaaggagcagaacgtgagggtgtaacttacaaaaagacgcatcttctctccagactgccgatcccagaa

SEQ ID NO: 307437 - DNA, 51 bp, Homo sapiens
cgcggcggccgcagctgccacaaaccaggtcactgcagccagaggggtcca

SEQ ID NO: 307438 - DNA, 71 bp, Homo sapiens
ggacctgagcgttatgtctttccgcgacctccgcaataaagtggacgacccagtgtggaacattcaaattg

SEQ ID NO: 307439 - DNA, 75 bp, Homo sapiens
cgtgtacatcatttacggcatgtacttctgcatgaacatctccagccagggctttatcctgtggataaacgcaga

SEQ ID NO: 307440 - DNA, 101 bp, Homo sapiens
ttcgcgtctgggaggccaagaccgctgtgtggaggtagccgcagcgccagcaccaggtggattttcggaaaagacatatgaatggagctcagaagaggagg

SEQ ID NO: 307441 - DNA, 100 bp, Homo sapiens
cgttttgatggatatatcttccttgacagcaaagacatagggcctgattacattccaacagaggaagaaaggagagtcttcgcagaatgcaatgatgaaa

SEQ ID NO: 307442 - DNA, 51 bp, Homo sapiens
ttgtttgtcaccacaaaaaggacaggtcattacacctactctgagaatcgt

SEQ ID NO: 307443 - DNA, 98 bp, Homo sapiens
tccgaagtcggcgacagcggccggggcgcaggcgcccgtgcggaatggcaggccaccatgaagactttgcttagaacttggtcagaattatatagagc

SEQ ID NO: 307444 - DNA, 82 bp, Homo sapiens
cgctcaagttcttccgcaatgggaaccgcacgcacccggaggagtacacagcacctgaactcctggggggaccgtcagtctt

SEQ ID NO: 307445 - DNA, 75 bp, Homo sapiens
cgttgggtccggccgctctgcgggactctgaggaaaagctcgcaccagaccatggtgaatccgggcagcagctcg

SEQ ID NO: 307446 - DNA, 100 bp, Homo sapiens
tgggcgagccgtgcgatctggacgcggcgctgctgaccgacatcgaaggcactgcctccttacctgtgaggaatgcaaaataaagcatggattaagtgag

SEQ ID NO: 307447 - DNA, 99 bp, Homo sapiens
ggatgtggtgctgcccgagaaggtggacgtgctggtgtctgagtggatggggacctgcctgctgagctccacctggaggggaacttcctacaccgcctc

SEQ ID NO: 307448 - DNA, 80 bp, Homo sapiens
ggatgccctgcagtacctgcagaaggtctctggagacatcttcagcagatggcgattttgctgacagctgccaagaaaat

SEQ ID NO: 307449 - DNA, 110 bp, Homo sapiens
ctcggcccggcggctcccagtgccgcgcgccaagatccattcgttgccgccggaggggaagcttgggatcatgccagagcctaagcctggagacctgattgagatttttc

SEQ ID NO: 307450 - DNA, 82 bp, Homo sapiens
ccgcggcggcagcagcagtgagagatcaatgagctgagcaatgttcctgttcctgtcatgctaatgccagatgacttcaaag

SEQ ID NO: 307451 - DNA, 101 bp, Homo sapiens
ggctgctgcaatgacgagggcctggagtgtgtgcccactgaggagtccaacatcaccatgcagagcctgtgcctctggaggaggtccaattggtggtggag

SEQ ID NO: 307452 - DNA, 100 bp, Homo sapiens
gtgatggagattttgatgtggatgatgccaaagttttattagagaaagcagcagctgccaacatagatgaagtgcagaagtcagatgtatcctctacagg

SEQ ID NO: 307453 - DNA, 74 bp, Homo sapiens
aaatgctagtgtgataatgcaagttccggagaggattgttgtagcagcggcaacctttggcactgcatccatga

SEQ ID NO: 307454 - DNA, 98 bp, Homo sapiens
tccccatgaaaaagataagagcacgaactgctttggagataatgatcctattgatgtttgcgaaataggctcaaaggatactcatccagatcatcagg

SEQ ID NO: 307455 - DNA, 82 bp, Homo sapiens
ggcggctgaggaaagcaggaggaggtggcggcggcgggaagatggaaccttctgaccagcctcatgggctcctcagagcagg

SEQ ID NO: 307456 - DNA, 82 bp, Homo sapiens
gtgggccgcgtcgaagacatggaccagggctacggagacaggccgacggtcgcaaggtcctacggtcaagcatccgggagtt

SEQ ID NO: 307457 - DNA, 98 bp, Homo sapiens
gactgcaatcttccaggcaatagctgaagaagaagaggaagtagccaaagagcaactaactgatgctgacaccaaagctgaggaagtggagaggctgg

SEQ ID NO: 307458 - DNA, 87 bp, Homo sapiens
gatgcatgccagagacttcacagtttctgctctggaattacatgaatgacagtcttcgaaccaatgtgtttgttcgatttcaaccag

SEQ ID NO: 307459 - DNA, 75 bp, Homo sapiens
tttacctcgctgaccctatgaaggtactccaaagattcaggtttactcacgtcatccagcagagaatggaaagtc

SEQ ID NO: 307460 - DNA, 103 bp, Homo sapiens
cctggagcctcagttggaagcagccgatccagcctgcggagcctgtggggcaggtccctgactatggctccccagagcctgccttcatctaggatggctcctc

SEQ ID NO: 307461 - DNA, 96 bp, Homo sapiens
agacagcccaaatatcctcggaagagcgctcccaggagaaacaagaaatgcttccagactgcacacttttacttagaggacagtacatcccctaga

SEQ ID NO: 307462 - DNA, 100 bp, Homo sapiens
ccaggtttacctggctgtgctttcatttgtaaaacaagaattgtcaggttgggtatctacagccattggttgctgttcaggtcagctttgctcctaacaa

SEQ ID NO: 307463 - DNA, 100 bp, Homo sapiens
cggcgctgcgggacggctagcggccctgcgtgatctactgccaaaacctgtgcctgttggccaaactttttctggaccacaagacattatattatgatgt

SEQ ID NO: 307464 - DNA, 75 bp, Homo sapiens
ggtgccctgcgcttcccagtgccttcccacaggacggagagagatgcttcaaattggtccacggataagctgaaa

SEQ ID NO: 307465 - DNA, 117 bp, Homo sapiens
atggtgaaatcccagactgcaaatggaacaagtcgccacctaaggaagtcctcggcaattacgagattctatctgtgaagtcctggaacgctcccactctccacccctgaagctgac

SEQ ID NO: 307466 - DNA, 82 bp, Homo sapiens
aacatgaaacacctgtggttcttcctcctgctggtggcagctcccagatgccctgggaggagcggggacactgaggacctct

SEQ ID NO: 307467 - DNA, 75 bp, Homo sapiens
gcttcactatgtatggggtactcaatcctagtactgtgccctacaacattcagaggaagacaatgtgtggcaccc

SEQ ID NO: 307468 - DNA, 75 bp, Homo sapiens
cttttaacgagtattccaaatttgatggcaaggaatctatcttctggatttaatctacattgattctgcatatcc

SEQ ID NO: 307469 - DNA, 97 bp, Homo sapiens
gaaattgcgggatgcacgcctgtgtcctcattgctccaaactgtgttgtttcagctgtattaggaggaagtatcattctgcaaaggaggcatatgaa

SEQ ID NO: 307470 - DNA, 74 bp, Homo sapiens
caaagtggaagagtcctgtgccattaaaaacaacaaggaagctttcagtggtggttctcttcccaaagtggaag

SEQ ID NO: 307471 - DNA, 75 bp, Homo sapiens
gctgccactaatgctgatgtccatggtctctagcagcctgaatccagaaaataaacagagttgtctttgttggaa

SEQ ID NO: 307472 - DNA, 51 bp, Homo sapiens
gccggcgccctggggccccggagaggtagcgatgggcttctttcaagtggg

SEQ ID NO: 307473 - DNA, 98 bp, Homo sapiens
cctgtgtcccacttgttcgcggcctataggagtcagagtattcatcgaaaagaaagcacagctaacacttttaggaacagaaatggactatgttgaag

SEQ ID NO: 307474 - DNA, 82 bp, Homo sapiens
gtacaagctgatcctgtccacaggggatgtggagacgctggtagcggggccaggaaggctccggacggagcaggttttctgg

SEQ ID NO: 307475 - DNA, 82 bp, Homo sapiens
gtactgggcagaacgcgacgggtctgcggcttagggattctaacattttcagagaaccttttggaaagaacaagcctacttc

SEQ ID NO: 307476 - DNA, 83 bp, Homo sapiens
attctcagtccaagtttaaagttaaggtgccaatgggtcatgtttggttagaaggtgacaatctacagaattctacagattcc

SEQ ID NO: 307477 - DNA, 75 bp, Homo sapiens
gctggcggcgtggacacctgagtcccggggtaggggtctcccgcgagggaaagcaggcaggatgggagagtcgcc

SEQ ID NO: 307478 - DNA, 95 bp, Homo sapiens
ttcaaagaacaataatcttgctgtcacttccaagttcaatattcctgacttaaagttgcacactgacaagaaacagatcagtgttgggttcattg

SEQ ID NO: 307479 - DNA, 100 bp, Homo sapiens
agcatgtcaataaggggtcataggtggaaaagacatggttcttcacacacccccattcggcgtagtacccagagagctcaagatgtgtggcagttttcgg

SEQ ID NO: 307480 - DNA, 90 bp, Homo sapiens
caggacatagcaactctggctgatcaaagaagagcagcccatggttagaaaatggatttctgactggaatctcaccactgaaaaaaagca

SEQ ID NO: 307481 - DNA, 91 bp, Homo sapiens
cgcggctcctgagggatcggtctcagccgcgcggggggatatgagactttctactcggaatatcctgagtgttgcgtggatgtaaaaccca

SEQ ID NO: 307482 - DNA, 90 bp, Homo sapiens
caaatcatggagccgctggggtcccttttgcctcagatactattttgaaggacctctaacaatgatattggaagaatagatactaagtct

SEQ ID NO: 307483 - DNA, 100 bp, Homo sapiens
gccgcctccgcctccgcctccgccggcgcatcgcggacgcccagcagagacaaagcatggaggacacaagaatgggaggaaaggcggactctcaggaact

SEQ ID NO: 307484 - DNA, 100 bp, Homo sapiens
cccacagtgcccggctcggctgcgcttcgagagctgtgcccaggagtgaacaaccagccctacctctgtgagagtggtcactgctgcggggagactggct

SEQ ID NO: 307485 - DNA, 76 bp, Homo sapiens
aacaggctgaagaaagcataagatattctcgtcagcatcacagtattcagatggcaattgaaaagctgcaggccgg

SEQ ID NO: 307486 - DNA, 100 bp, Homo sapiens
cggcaagggggcaacgaggaagctcttaagagcgcggccggaaagcagtttgtcagggagccactggtgatgtggatggggcacagattgtctttaaaga

SEQ ID NO: 307487 - DNA, 82 bp, Homo sapiens
cttcccgcccgccttccgccgtctcttcgagttcttcgtgctgctcaaggtcagttctacagcaacggagggcattctggga

SEQ ID NO: 307488 - DNA, 82 bp, Homo sapiens
caacatcctgtcacaggccatgctctggcaaaaacatgccatggacaatattaccaggcagaaccaattctacgatacccaa

SEQ ID NO: 307489 - DNA, 100 bp, Homo sapiens
atttgaagctccttctccatcacacagtactatactggcaattgctggagaagattttgcaattgttgcttctgatactcgattgagtgaagggttttca

SEQ ID NO: 307490 - DNA, 75 bp, Homo sapiens
cagcagcaaccgggcccggccaggttcggcgttccgtgagtgaacggagctgctaagccgcacatctcttgagac

SEQ ID NO: 307491 - DNA, 100 bp, Homo sapiens
aaggatttagaaatcttcaagaatttctgaggacgagctcacatctggaagctttctatgggaggattctcgtaacagcagcacaccaactgaaaagccc

SEQ ID NO: 307492 - DNA, 100 bp, Homo sapiens
gaggaagcttaaatctgtcgtttgaatttaggaccacctcggaaaatggttctcctgaagaacatgcaatctatgtttgggatcatttcatagctcaggc

SEQ ID NO: 307493 - DNA, 100 bp, Homo sapiens
cttcatctctgttgcaggatttagcagctggaatgcttgctgattcctctgcacacttctaaggctgagaacctgaggaacccagctggaaaatgccgtc

SEQ ID NO: 307494 - DNA, 90 bp, Homo sapiens
ggcattggagaatggggcttaggcaagcctgtaggtgctacctttttacccacacttaagtgacgcaaaatgcccttcaatggcgagaag

SEQ ID NO: 307495 - DNA, 100 bp, Homo sapiens
caagttacagaatgtgacacaaagatgcatgttttgcatgtcctttcttgtgtgatcgaaagagtcaacatgcagcttgaccacatattatcccctccac

SEQ ID NO: 307496 - DNA, 100 bp, Homo sapiens
tgttttccttgcggcggccgtggaaggcgacccggcggctgtggaggccacgctcagctcgccaggcggcgcagggacttcgcaggtgagcagtaacgga

SEQ ID NO: 307497 - DNA, 88 bp, Homo sapiens
tgatagaggaaatgtatgatgaaggatcttacacatttgttccatggcttctcagctttaaaaggggaagtgccctagaagaaaaaga

SEQ ID NO: 307498 - DNA, 78 bp, Homo sapiens
ttcccttccagccattggaacagattgagaggatccagaatccagatctctggaatagctaccaggcaaagaaaaaaa

SEQ ID NO: 307499 - DNA, 82 bp, Homo sapiens
gaagaccgcgcgcagggcctgcagcgggagctggacggcgagcgcgagcggcgcgagaaaggaaccttctgaccagcctcat

SEQ ID NO: 307500 - DNA, 98 bp, Homo sapiens
cggactggcacgcagactgcttcaggacagaagcccactgggcctggtgggcctctcatccagaacgtccatgcctccaagcgcattctcttctccat

SEQ ID NO: 307501 - DNA, 83 bp, Homo sapiens
ggattttgtcagcttgtcgtcaaggcgcctgtgtctggcagagctggtgtgagacgagacaatcctgccccgccgccgggata

SEQ ID NO: 307502 - DNA, 100 bp, Homo sapiens
ggtggaccccaaaagaaacgggctacacagagttagtaaagtttcagtacaaaacggttcgattcatcaaaaagatgctgtaaatgatgatgattttgag

SEQ ID NO: 307503 - DNA, 98 bp, Homo sapiens
ccgcctcccgcggaggggtggccgccgccgaccggcagccagggccaaatccatatccccccaatattgggtgccctggaggttccaatcctgcccac

SEQ ID NO: 307504 - DNA, 100 bp, Homo sapiens
cagggagcagaggggacagaggcaccaaggacctccaagacaggattttttatcaagcagaaatgcatcgaacaacgagaatcaagatcactgagctaaa

SEQ ID NO: 307505 - DNA, 90 bp, Homo sapiens
cactcgcccctggcctcgcgggccgtgtctccggcatcatgtgtggtctcggcgcggaagatggccggcggcgtggacggccccatcggg

SEQ ID NO: 307506 - DNA, 50 bp, Homo sapiens
gaactcagggccggttgtggccatgaaaaagaaggggagcgttcaattcc

SEQ ID NO: 307507 - DNA, 51 bp, Homo sapiens
atcaccttattctggtcccgggattcggaaacttcagatacgaaatatccc

SEQ ID NO: 307508 - DNA, 49 bp, Homo sapiens
ggaagatggcgcctgttgtgacagggtgggaatgagatctcgaaaccaa

SEQ ID NO: 307509 - DNA, 82 bp, Homo sapiens
ccgggggaggcgacgctaagttgctgatcgtggcgtgtactaatggtcacttgatgtgcgctggctgttttatccacctact

SEQ ID NO: 307510 - DNA, 100 bp, Homo sapiens
tactaacctcgtgagaaaagctttacgtctcattcaagaaaccgaagtgatttccagaggatttacactggatttgtcttggctgttactatgacacggg

SEQ ID NO: 307511 - DNA, 75 bp, Homo sapiens
caacaaaggcaaaggattcggatttattaagcttgcagaagctcctcctggggtagagacagatcttattgatgt

SEQ ID NO: 307512 - DNA, 98 bp, Homo sapiens
gcatctggatgcccacgccaccaccctcccagccacctctgaagttgccaggcttcccaacattcttgtctgtgggagaaggcagcgatgcctgtggc

SEQ ID NO: 307513 - DNA, 57 bp, Homo sapiens
ccgtagtgggagtattgtggaacttatagaccttgtgccggagccgactactggaga

SEQ ID NO: 307514 - DNA, 100 bp, Homo sapiens
ctcctcctttcctccctcccagatcttctcacgatgatatcatcaagttgaatcgaaaggaagggaagaagcagaattttccaagactaaatagaagact

SEQ ID NO: 307515 - DNA, 76 bp, Homo sapiens
agtcgcaagaaccagggtgacttctcgctctccgtcaggacacatgacggaagtgtgtatttttgggccactccac

SEQ ID NO: 307516 - DNA, 100 bp, Homo sapiens
ccttcctagttggcattgaaggttcactcaaaggcaggtatggtctctctggcagtgatgtcctggataatgtagcatatgctcgagcgttcaacacaga

SEQ ID NO: 307517 - DNA, 90 bp, Homo sapiens
agcccggagcccggcgctttccccgcaagatggacggtttcgccggcagtctcgaaagctgatggtgtgcccgtctacctgaaacgaggc

SEQ ID NO: 307518 - DNA, 75 bp, Homo sapiens
attttccacctcctgacacaacaccactcatgagaaagatcagtctaaagaaaaggagaagaaagtgaaaaaaac

SEQ ID NO: 307519 - DNA, 98 bp, Homo sapiens
ggcggcgtctgcccagggcagggctcctaaggaaggacccgcctttaggtgtcctgatggcaaatttcaagggccacgcgcttccagggagtttcttc

SEQ ID NO: 307520 - DNA, 80 bp, Homo sapiens
attggggtgcagcagctgcaccccaccttgatccagcggacttacggggaggtacatggtcagtggagaaggtgatccag

SEQ ID NO: 307521 - DNA, 75 bp, Homo sapiens
ctctcgccccaacccgcgcgccagcaatcagccatgactgcctttgcactgtccatgctctcagcccaccacctc

SEQ ID NO: 307522 - DNA, 107 bp, Homo sapiens
ttcaagacacttacgggtttcttctgtttgatactgaaaagcagtcagaaaaagtggacagggcagtgctgaaggaactgagtgaaaaactggaactggcagagaag

SEQ ID NO: 307523 - DNA, 82 bp, Homo sapiens
ggagaaacaggcgccgcgggctccgcgcccggccggacccgggcccgaggaggctactcacagtcgaactacaactccccgg

SEQ ID NO: 307524 - DNA, 49 bp, Homo sapiens
atacagaaatttcctgggctaaatatctcctatagggctcttcaaactg

SEQ ID NO: 307525 - DNA, 74 bp, Homo sapiens
attacactagccctgggaaatgcacagaaattgccaaaaggtctttttgccattcctccaggacatccaccata

SEQ ID NO: 307526 - DNA, 78 bp, Homo sapiens
tacgctcctcagcggcggcgccagctcctgtggccctgtttgtgctcttcgtcctggcctacatccacatcgtcttct

SEQ ID NO: 307527 - DNA, 75 bp, Homo sapiens
agaagatggatttttggctgtatgttcagaagctaaagcatgccaatgaagatgtggaaagaatgttactaggaa

SEQ ID NO: 307528 - DNA, 100 bp, Homo sapiens
ctgaaaacctttgggcttcatggagtcgtcttagatgttgattcaagatgcccgagtggtaaaagacatggcaacaggaaagtctaagggatatggcttt

SEQ ID NO: 307529 - DNA, 78 bp, Homo sapiens
gaatatcaagaggaggagttgttggccctggccaacgtcaacattgggagcctcatctgcaatgtaggggccggtgga

SEQ ID NO: 307530 - DNA, 74 bp, Homo sapiens
aaacagcagttttggtagaagatgtggtacacactcagttaattaatctggatttttttcccaggaagccatcc

SEQ ID NO: 307531 - DNA, 111 bp, Homo sapiens
ggagattcagccgtgaagcaagtgcagatagatggcctttttccatcaccagaatgggacacggtgactcctgaagccaaagacctcatcaataaaatgcttactatcaac

SEQ ID NO: 307532 - DNA, 90 bp, Homo sapiens
gttctttatggctgtagatggtgtggctcctcgagcaaaaatgaaccagcagcgtgggaggcgttttagtgccacaccagaggaatataa

SEQ ID NO: 307533 - DNA, 100 bp, Homo sapiens
gttaatggatgacattcgctgcaaaagatacaccttgcgaaaagtgatgccaacaaatggaattttcttgagcatgtttctaatcgttttgccattggaa

SEQ ID NO: 307534 - DNA, 100 bp, Homo sapiens
caaagataaatccaaatactgcatatcagaaacaacaggaaggaatgcagctcatttcagaaaagcctgagacggaagctgtggtgaaggagaaactcac

SEQ ID NO: 307535 - DNA, 82 bp, Homo sapiens
tctgttacgccatggaaaccgctctggtcacaccaatactgttgcagattggaagccgacggtttagttctgataaatattg

SEQ ID NO: 307536 - DNA, 100 bp, Homo sapiens
atttgaaccaccgtttccatcgtctcgtagtccgacgcctggggcgatggatccgtttacggaggtgaatggaggcattgagaacacattagagaaggag

SEQ ID NO: 307537 - DNA, 90 bp, Homo sapiens
cgcgcactggtgctctggttcccagatcaagtcagaatctggtcatggtgcacaagtgctacatctttctggtgttcatggtagtcattc

SEQ ID NO: 307538 - DNA, 98 bp, Homo sapiens
ttggtctcactgagttctagaatgaagctgcagaccctcgcagtgagtgttacagctcttaagctaatttgacaggacatgctgagaaggtgggaata

SEQ ID NO: 307539 - DNA, 75 bp, Homo sapiens
ctcagccaggccgactacctcaacctggtgcagtgcgagacgctagaggatgttcggttactgcttaataatgac

SEQ ID NO: 307540 - DNA, 51 bp, Homo sapiens
agcctgacctcttacttcctgtgggtctataacttgacccaggagttcttc

SEQ ID NO: 307541 - DNA, 75 bp, Homo sapiens
gcggtgctggaaggcgccagcctggtggtgggcaaacctgcaggctgggacaatgaaaagaaaatagctatttta

SEQ ID NO: 307542 - DNA, 90 bp, Homo sapiens
cggggcaggggcggaggcggaggcagaggtggaggcgctttgaaagggtgtcagatgcctgatacattcaattcatggtttcttataacc

SEQ ID NO: 307543 - DNA, 101 bp, Homo sapiens
cgtccgcggagcagcttccccccgcgcctctcttcgcctcgcctcgggacccgcggtccccgctcttgctgaactcccccactggaaaggattctgaaaga

SEQ ID NO: 307544 - DNA, 100 bp, Homo sapiens
tgtgaacctgatatacctaatccaccaaggatagccaatcggaccaaaaattcactcactttgcaatggaagctggagttaaccgaatttcatactggcc

SEQ ID NO: 307545 - DNA, 82 bp, Homo sapiens
acccctggctctataagctgaattatggcagcccagtcaaggtattatacctgaagaaccttagccctcgggtgactgaaag

SEQ ID NO: 307546 - DNA, 100 bp, Homo sapiens
cggcattacctgtacccattcaccggcggctaccggcggcggcgcgcagcgtgtcaggcggagagacccgccgccagatctttataaacaacgagtggca

SEQ ID NO: 307547 - DNA, 100 bp, Homo sapiens
tcaaaccctttccaatctttgcctgaagataaatgcaaaacttggaggaattaacaatgtgcttgtgcctcatcaaaggctggggtgcagtggcgtgatc

SEQ ID NO: 307548 - DNA, 100 bp, Homo sapiens
gggttgtgaaggacatcactaacgccttcaggaggaacccacacatgttgcataccctgtcctgagggcgcggcacggagtgcatgcgggccgctgccat

SEQ ID NO: 307549 - DNA, 99 bp, Homo sapiens
gcttcccagtgggagaggaccggcaaaccatttaatccactcttgggagaaacgtatgaattaatcagatgctggacgagaaccaccacctgatccagt

SEQ ID NO: 307550 - DNA, 98 bp, Homo sapiens
gtgagtgatcactctcaatcccggttactgtaaaatggggaaaggagaaatttgaaggtgtagaattgaatacagatgaacctccaatggtattcaag

SEQ ID NO: 307551 - DNA, 73 bp, Homo sapiens
cacggcgtacgccctcatggggaaaatctccccggtgactttcagggccgcctttttgcctatcctgacactc

SEQ ID NO: 307552 - DNA, 100 bp, Homo sapiens
cttcaggagcgaagagctgcttctgtatcttaagggtgaagttgaacaaattgctatgatgaaaccaaaaggccagactgaacacgatgagggtatgctt

SEQ ID NO: 307553 - DNA, 100 bp, Homo sapiens
gaaatcctccccacttatgtttgtaaatgtgagtggaagccatgaggccaaaggcagttgtattggctcagtagatgaaggcgtttctgagggcttgcct

SEQ ID NO: 307554 - DNA, 83 bp, Homo sapiens
atggctatcctactctcctactcagaaagagtgttctaagaacggaagcatctgggctggatggaatttagcatcaagcagag

SEQ ID NO: 307555 - DNA, 101 bp, Homo sapiens
gccaggtttactggagtaggtgttagtaagctcaaatagctataactgtaccaaagacatggaagaaaccaaaagatcggacccgaaccactgaagagatg

SEQ ID NO: 307556 - DNA, 83 bp, Homo sapiens
tagaaatgagctgaagaccattcacagcattcaacagaaggtgtcaaattgacagctctcaatgacagcagcctcgacttgtc

SEQ ID NO: 307557 - DNA, 87 bp, Homo sapiens
gcaaagttgctgccaaattatctgagactggataagatgaccttcagtgtgctgctcaaaaacagatttgcatctgctggtgatgat

SEQ ID NO: 307558 - DNA, 75 bp, Homo sapiens
ttaaaagctgaaaatttacttctggatgccaatctgaatatcaaaatagcaggtacttacactgtgaaattttat

SEQ ID NO: 307559 - DNA, 90 bp, Homo sapiens
cgagcggcggcggcggcagcgggtcttgggtcctccgagagcagcagcgatgccatggacaatattaccaggcagaaccaattctacgat

SEQ ID NO: 307560 - DNA, 101 bp, Homo sapiens
tatttctctgcctcctgtggacaaaaaaagaccaactgccagagttttctctgggtgttaacagcggttggactacagacaattgcttccgggcagcgttc

SEQ ID NO: 307561 - DNA, 75 bp, Homo sapiens
cttcctattccactggattgggaaagaccatggcaggccatgaccttgcctcctttcctggagttcggtgtcccg

SEQ ID NO: 307562 - DNA, 75 bp, Homo sapiens
tggaaaaggctataccaaagaccaagtagatggagttctcaggtcaacaggacatactgctgtggcacctaccga

SEQ ID NO: 307563 - DNA, 75 bp, Homo sapiens
ggaattcagaacgtcagcacctgcaggttcagtgtttcaaatgattggtatgcgacacttgatatgctaaaagaa

SEQ ID NO: 307564 - DNA, 80 bp, Homo sapiens
gtgctggcgagacgggggtgatgcccacccgggcgagaaaggtgagaagccctaccactgcaactgggacggctgcggct

SEQ ID NO: 307565 - DNA, 80 bp, Homo sapiens
catcctgcagcggcgccgcgggcacggcgaggggggcggccgcctcaccgtcggatgtcatggatcagaatttgttaaat

SEQ ID NO: 307566 - DNA, 100 bp, Homo sapiens
aacaatgtctgtcttgaagctccgggaaccaggaaaatgagctggaaatgtacctcaggatgagtggggagggtaccccaccggtggcaaagatgaggag

SEQ ID NO: 307567 - DNA, 100 bp, Homo sapiens
ccaccttccaccggaggtgctactggctccttcagctacaggcctcgggcctccccggcagcgcggagctgacggtgggcgcggcggtcgcctgcttcct

SEQ ID NO: 307568 - DNA, 100 bp, Homo sapiens
caaacccaaggtcatcattgtccaggcctgcagaggtggtccaggagagcctcagattattttttgtagaagtgaagctgcacatcaaggagtaattacc

SEQ ID NO: 307569 - DNA, 101 bp, Homo sapiens
cgtacatcaggggctgttcttttgctgcaaatgaagttgatggaattacactgtgatacgactgactgttgaaaggattgttgacaaaaggaaaaataaaa

SEQ ID NO: 307570 - DNA, 75 bp, Homo sapiens
ggactttaatcactgaccatcccaatatacaggcatctggtgtcgaaggctcagatattcctgatgatggtaaac

SEQ ID NO: 307571 - DNA, 82 bp, Homo sapiens
ggagccatgaggcgccagcctgcgaaggtggcggcgctgctgctcgggctgctcttggaggatgaaacgaggaggaagagat

SEQ ID NO: 307572 - DNA, 71 bp, Homo sapiens
ttcccagctgaaaggggttcggagccacccagagttccctcactgaagatctgagcatgacccgggacgag

SEQ ID NO: 307573 - DNA, 75 bp, Homo sapiens
ccgggctaagcgtcggcaagttctgtagagaaactcgggcaacctttggccaagactaaggggctgcagagcggg

SEQ ID NO: 307574 - DNA, 100 bp, Homo sapiens
acatccaggaaagacatggagattctcttaaaaaggacagggtaaccttcaggagaataattgtgaaaaacaatgccaaaaagagaaaaatgtatgaaag

SEQ ID NO: 307575 - DNA, 75 bp, Homo sapiens
caaaacttctaggcacaatctatactgctgctgaagaaaaactggcattgcccgccttgtcgaggaatctgcaac

SEQ ID NO: 307576 - DNA, 101 bp, Homo sapiens
tgctgaccctggccttcaaccccgagccgctggtgctacagggtcaacatatttcactggcacctattcacaagcttgaagaagctctgtatgaataccag

SEQ ID NO: 307577 - DNA, 78 bp, Homo sapiens
tggcgagcccgctactgcagggacctatggcgtgtgctcgcccactgatatcggtgtactccgaaaagggggagtcat

SEQ ID NO: 307578 - DNA, 107 bp, Homo sapiens
acagtgctgaagcctttaaatgcagcatctgcgatgtgaggaaaggcacctccaccagtactatactggcaattgctggagaagattttgcaattgttgcttctgat

SEQ ID NO: 307579 - DNA, 82 bp, Homo sapiens
ggaaggcatttgctgtctctagttctcttatcactcattctcgaaaacatacagaaggcggtcaccttctccttactatagt

SEQ ID NO: 307580 - DNA, 100 bp, Homo sapiens
atggaagagaccgaagaactctgccttcagagggagcagagagaggatgaaattgattctgcagtaaagatgttggtgtcattaaaaatgagctacaaag

SEQ ID NO: 307581 - DNA, 100 bp, Homo sapiens
ttaagttggagcagggagaggagctgtggataacgggaggtgaatttccatgtcaacatagtcctgagctgcggtgcaaccctgggcagtttgcgtgtcg

SEQ ID NO: 307582 - DNA, 75 bp, Homo sapiens
gcgtattcccggagggcagttggggagcgcagatcccgaagcagcgctgggagcttctggaggctgggaagtcaa

SEQ ID NO: 307583 - DNA, 115 bp, Homo sapiens
ttttggctctgcgtgagtgtggtctacgagctgtttctcatctttatactcttccagggcagctggtggaatttttgaagaaaatggaatctcgaggccccctttcgtgcgacac

SEQ ID NO: 307584 - DNA, 100 bp, Homo sapiens
cggctagtccgcggccctgctgagagggaaaaggacgccgcggtcttcccaggcgtcgcggagagcagctgcagtacagcaatggcgatcagaaggtaga

SEQ ID NO: 307585 - DNA, 88 bp, Homo sapiens
cggacagcattgggagcggccgagccatcccaattaaacagccaagaagccctccatgagcagagcagctacatcctctccagtgcag

SEQ ID NO: 307586 - DNA, 75 bp, Homo sapiens
gtccgccaagacccccagcagcacctatcccgcccccttctacgtggcaggctggctgaaggcggtgcaggtcct

SEQ ID NO: 307587 - DNA, 90 bp, Homo sapiens
cacaaagtattgtctgaaaaagctcaaaatgaggaaattctgtatgttcttcgccattatattcagatttctcacattggcaaactgaga

SEQ ID NO: 307588 - DNA, 90 bp, Homo sapiens
catctttaccttctctgtgtctttagaaataaaagaagatgatggtaaaggttattttagttcgtgccctcgtgaggctggcatgcagga

SEQ ID NO: 307589 - DNA, 96 bp, Homo sapiens
gggttccaaagggggagatatcatgctctggaattttggcatcaaggacaaacccaccttcatcaaaggggctgcaaccccaccctatggatgaac

SEQ ID NO: 307590 - DNA, 86 bp, Homo sapiens
cgccagccgcaccatgccgctcctaagcctgcacagccgcggcggcagcagcagtgagagatgccgacaaaaggatcaaggtggcg

SEQ ID NO: 307591 - DNA, 101 bp, Homo sapiens
gtcactgcagctgaagccgctgcccctgctacagttcaaacaagctgtatataaacagacaatgaaactctttgcagagctggaaattaaaaggaaagaga

SEQ ID NO: 307592 - DNA, 100 bp, Homo sapiens
ctgcaagcaggcaacctgaatacaggagccttcacgtaaatgggtccagtcatgcctcccagtaagaagccagaaagctcaggaattagtgtctccagtg

SEQ ID NO: 307593 - DNA, 101 bp, Homo sapiens
gcgagaatgaggaggacaacagctacaaccgggggttcaccggaacagcacaatccgccctggctgtgatgtgaatccctcctgcgcactgtgtggttcag

SEQ ID NO: 307594 - DNA, 100 bp, Homo sapiens
caagactgtccttcggacaagttttaggtatatgaatgacctaaaggtacaaataaagacggagagagaacagtgccaactgggagcagggcaagaatgc

SEQ ID NO: 307595 - DNA, 75 bp, Homo sapiens
tgagccagatttcacctctgcaaatatgagagattctgcagaagtgttttaactcaaatgggtgatgaaaaggac

SEQ ID NO: 307596 - DNA, 100 bp, Homo sapiens
ggcgcaccatctgaaaacaacatcatgcagtggaatgcagttatatttggattctgacaatggagatattaattatgattatgttcatgaattgtcattg

SEQ ID NO: 307597 - DNA, 96 bp, Homo sapiens
tggcggacatcactttagaccctccacctaattgcaggtgaccattgtgaggtagatattttgttctaattttccagatgaggaagctgagaccct

SEQ ID NO: 307598 - DNA, 100 bp, Homo sapiens
tccccagctgcaatctcctgccatcggattgcatcaccaactcaacctaattggtactaggttttgacaagcttgcatcatgcgtgagtataagctagtc

SEQ ID NO: 307599 - DNA, 100 bp, Homo sapiens
ctcaacaccagcaccgcagatgttgtcaaggtggcctaccaggaggccaggggtgtcgccatgtttcctcactgcttggaggaagatgagaattctcaga

SEQ ID NO: 307600 - DNA, 100 bp, Homo sapiens
cttggactgagtcctgcaggacacagtgcaaaatggcaactcttaaggaaaaactcattgcaccagttgcggaagaagaggcaacagttccaaacaataa

SEQ ID NO: 307601 - DNA, 78 bp, Homo sapiens
tgaaccgtgcagtgctcgctgccatggatgccaccaagctggattgacttggcctctacttcttgttaaggaaattca

SEQ ID NO: 307602 - DNA, 90 bp, Homo sapiens
atgtcgaaggtggagaggtcctttacttggtgcattactgcggatggaatgtgagagagttaattgttaaatccagtatggccacaggag

SEQ ID NO: 307603 - DNA, 82 bp, Homo sapiens
ctcttcttcgggatcactggattgctgacggcagccctctcaggtacggtggttgaggagagcaatggttctgatgagatgg

SEQ ID NO: 307604 - DNA, 83 bp, Homo sapiens
cccaggacctaccagaatctggttcaagcactgtcttcctgttggccctgacaatcatagccagcacctgggctctgacgccc

SEQ ID NO: 307605 - DNA, 100 bp, Homo sapiens
ttctttcttcatgaccctgcccttgccagaatttcctgcgctgttccacctcattcaacttcagtaatctatgccagcaattatgacaatgttagcagac

SEQ ID NO: 307606 - DNA, 83 bp, Homo sapiens
acgagaggctcaccgcagtcgtgcaggatctgaaggaggaagctttataagcgatatgcttttctacgttgcgaagaagaaag

SEQ ID NO: 307607 - DNA, 75 bp, Homo sapiens
ccgcgcgctgagggtctcggggcgggcgccgcgggacctctccgggccatgggccaagtcctgtatctgccatgt

SEQ ID NO: 307608 - DNA, 82 bp, Homo sapiens
cgggctgaagcgactgagtccgcgatggagcctgtggacatctctacagcaatgagtgaacgggcacttgctcagaaaagac

SEQ ID NO: 307609 - DNA, 101 bp, Homo sapiens
agcacagttcctgggaaggtggagccaccagcctctccttggcagacaccacccatcctttaaccaagcacagaaaaatagcctcttcttttcgcgattca

SEQ ID NO: 307610 - DNA, 100 bp, Homo sapiens
ggacctgcccgcctgcggctgctccgggcttggtggcatgcatgtttagtcccagctacacagcagggaggctgaggctgaaggaatacttgagcccagg

SEQ ID NO: 307611 - DNA, 90 bp, Homo sapiens
atgtttggagaccagaatgatgatactctgtggaaattgatgacttgaaaaaaattaccaattcactgactgtgctttgcagtgaaaaac

SEQ ID NO: 307612 - DNA, 82 bp, Homo sapiens
agtgggaggatggagcagaggacattctagagaaaggttataaagcagcagagacaacacacaacatcaacaatgcatttgg

SEQ ID NO: 307613 - DNA, 100 bp, Homo sapiens
ctacaaactctgtgcctcaacaaccatttctaagtgtttctacagcagtataatcactacaaatccaatgtggagattttcaaattgcaaccaaataaac

SEQ ID NO: 307614 - DNA, 98 bp, Homo sapiens
taaattaattgacatgagagacctttaccaagaatggaaggaaaaagttcctgaggtggacattgaagtggacctaattcggttttccttttaaaagc

SEQ ID NO: 307615 - DNA, 50 bp, Homo sapiens
cggggaactctactcttcctacgctttgaacttggcctactccagcattt

SEQ ID NO: 307616 - DNA, 115 bp, Homo sapiens
ttggattttatgtgctacagtctgcggaacggagcagtatttcaatgtggaggaactgcaagcacatgttgaccagataactgaaatggcagcagtaatgaggaaagccattgaa

SEQ ID NO: 307617 - DNA, 104 bp, Homo sapiens
cgccgcatcccggacggtacttctgccactgctgctccgtggagatcgtcccgcgcctgccggactcctcctattttgaggacttctccaacatctccatcttc

SEQ ID NO: 307618 - DNA, 100 bp, Homo sapiens
gagcggccaaccacgacctgacggacaccacccgggcggaatcttgctctgtcacccaggctggagtgcaatggtgcaatctcaagctcactgcaacctc

SEQ ID NO: 307619 - DNA, 50 bp, Homo sapiens
ggaaattgcactggaactgtctgattaagtaccagagatgtctccaagag

SEQ ID NO: 307620 - DNA, 89 bp, Homo sapiens
gcccagtcctcggtgcggcgcggccagctctgcctgcagttgaacacaaagacctggaggagactcccacctccttcagggagaagaaa

SEQ ID NO: 307621 - DNA, 75 bp, Homo sapiens
agaagcaggatgaactgaaacggattgccagagaattggcagaaggcgtcacaatgtagcagggaccccaggcgt

SEQ ID NO: 307622 - DNA, 100 bp, Homo sapiens
ataaccctgaccagaacacagaggattatctcttccaagggaaacactactatgaagtatcctgtcatgaccaagggttatgcagggtcgggtggtctac

SEQ ID NO: 307623 - DNA, 51 bp, Homo sapiens
aaggcatgaaccagcaatattaccctgatgagttgctggagaatgtaaccc

SEQ ID NO: 307624 - DNA, 90 bp, Homo sapiens
acctcagccgcctcctagcggcgcggcgctcgctcctacgggggcagtacccaaaggaaacgctacgaaagaatacatggagagcttgca

SEQ ID NO: 307625 - DNA, 90 bp, Homo sapiens
gggtggcgcctccctgcgactcctggaccaccgggcgctggtctgctcccagccgttactccacaggatccgctgaacataggatgttgc

SEQ ID NO: 307626 - DNA, 74 bp, Homo sapiens
ttgtacaaaggagagtttaaacagccaaaacagttcattcatattcagcactgagaactatgagcagagaatac

SEQ ID NO: 307627 - DNA, 98 bp, Homo sapiens
gacagcaggagcagtggtgctgtcagcgcggccgtcggagacatgggagacccggggtcggaggcatcctgtacacgtcaaagaagagcccctcgatc

SEQ ID NO: 307628 - DNA, 82 bp, Homo sapiens
ggacagtgggcagtgctcccggaacacaagctgtgaaacactagctcaatatcagtagtttgcagatagcaaccaggaacgg

SEQ ID NO: 307629 - DNA, 97 bp, Homo sapiens
gaggaagagcaaccatttgaaccatgtgttcatcagtaatgggtcattaagtgatgttgtgattgtagttgcggtcacaaatcatgaagctccctcc

SEQ ID NO: 307630 - DNA, 75 bp, Homo sapiens
tgagcaaaagttcctatctaatattatatgctttcctttgctcccaggtttgcctgaatccatcattgcagctgc

SEQ ID NO: 307631 - DNA, 75 bp, Homo sapiens
tctggtgtagaaaagattatcaaggccatggatcatctgcagtcattcattgcagattgtgatcgtagaacagaa

SEQ ID NO: 307632 - DNA, 74 bp, Homo sapiens
aaatgaatgccaaatgggacacgatcttagcaaagcaatgtctcaagatggtgcttctcagttccaagaagtca

SEQ ID NO: 307633 - DNA, 83 bp, Homo sapiens
gttactacagagccaataccagtaatttttcatagaatagcaacaggctctgcattagctgctaatgtatgtaaaaagattac

SEQ ID NO: 307634 - DNA, 97 bp, Homo sapiens
gttacgcacacacgtttaacccgaaggtcatcctcaatgccgccaccttaacagataaaagcttcgatgatgaagaatcagtggatggaaataggcc

SEQ ID NO: 307635 - DNA, 75 bp, Homo sapiens
gaggacgaggggctccgggtcttccagagcgtgaagatcaagatcggcatctgcatctgggaccgacctcctggg

SEQ ID NO: 307636 - DNA, 51 bp, Homo sapiens
tgcaacagccacggaagattaagcaggtagctacagcaagctgggtagcag

SEQ ID NO: 307637 - DNA, 99 bp, Homo sapiens
agagttattcaaggggatggagtagatattaataccttacaagaggatgttaaagtctttagtgaagatgggacaagcaaagtggtggagattctagca

SEQ ID NO: 307638 - DNA, 74 bp, Homo sapiens
ccttgccaggccttcaaccactatctcagtgcaatggaggttggaaagaaccatgactgtattcaggaaggcac

SEQ ID NO: 307639 - DNA, 100 bp, Homo sapiens
caccttgggaagagaaagaaaatgccgaaggcactcagacaggactcacaccacccggcaagaactgctcactacggctccctgccccagaagtcacacg

SEQ ID NO: 307640 - DNA, 51 bp, Homo sapiens
ctccgccctggggtcattgtcagacctcttcttgggtgaatttggtattgt

SEQ ID NO: 307641 - DNA, 88 bp, Homo sapiens
tggttggttacttttcgatagatctggtgacttttatagatccaagcaccttggaacaacaggagctccagaaagctgtggaccaccg

SEQ ID NO: 307642 - DNA, 100 bp, Homo sapiens
ccacattaggacaaaaatgctggtgtacgaagccatcgacagcagagatggagcatcttgtgcagagttggtgtcttttaaacatcctcatgttgcaaac

SEQ ID NO: 307643 - DNA, 100 bp, Homo sapiens
cagccagaacatttcatttagcacaaggagatgttcttaagaggcgtagaggctccggtgttttttgtgccaattgcctgaccacaaagacctctctctg

SEQ ID NO: 307644 - DNA, 100 bp, Homo sapiens
catgaatggagcaaaatggcggatcatgtgcagttggcttttgaaacgatgagtgttatatctgtggtcactaactgtgcgctgattggaatgtcaccac

SEQ ID NO: 307645 - DNA, 101 bp, Homo sapiens
tatgatcgaattggtggaaaggttgaagttcaagagctcagaccctaaaagagtgaatctggaagtgaaagtggagaacaaggcgaaagtggggaggaagg

SEQ ID NO: 307646 - DNA, 74 bp, Homo sapiens
tcgagcagatcgacaagtccgggagctgggcggccatttaccagatcaggagtgatacttcacagatcctggag

SEQ ID NO: 307647 - DNA, 100 bp, Homo sapiens
ggagggtggacgaagctctctccagaaagacatcctgagaggacttggcagagaagatggcgaattagaagatggtgaaatagacgatgcaggatttgaa

SEQ ID NO: 307648 - DNA, 96 bp, Homo sapiens
gggagggctgtgtgatggcctcggagcgcccggagccggagcagtcctgcgttaactgcggccgggaggctatgagcgagtgcaccggctgccaca

SEQ ID NO: 307649 - DNA, 98 bp, Homo sapiens
gccctacgggagaaaaccgggcgcaaggtggctattatcatggaaaactaatttttcccagagaatttcctttcaaacctcccagtatctatatgatc

SEQ ID NO: 307650 - DNA, 101 bp, Homo sapiens
gtggatttgggagacatttaggagagagctggcggtcaccatggcaatgcgggagctggtggaggccgaatgcgggggtgccaacccgctcatgaagctcg

SEQ ID NO: 307651 - DNA, 100 bp, Homo sapiens
agaaggcgacagcctggattataaggatgtcatccccatggctgatgcagcaggcatcatccgctatgcaattgggatgatgaggagtctgatgaggaag

SEQ ID NO: 307652 - DNA, 96 bp, Homo sapiens
ctggcggtggctacctcacgctggaagtcagaactacagggccgccgccacgcagtgcacacacccagaagctatgtccttcggcagtaaaagttt

SEQ ID NO: 307653 - DNA, 75 bp, Homo sapiens
ccacttcctggtggttcaggaaacgcaactcagcagcaaggtggggaactacaagcggaccgtgaagcgcatcga

SEQ ID NO: 307654 - DNA, 100 bp, Homo sapiens
actacaaagatgctctgcggtttttgggctgtgttgacatcaaggatctaccaggctagacagcaacaagcagaattggcccaacaggaatggcttcaaa

SEQ ID NO: 307655 - DNA, 100 bp, Homo sapiens
agacaagacacttttcagaaagacagccttatttagtgtctctgacaaaaccggccttgtggaatttgcaagaaacctgaccgctcttggtttgaatctg

SEQ ID NO: 307656 - DNA, 75 bp, Homo sapiens
atcatcaagcagacatactcaaggtttcccaggctggagatttgttaattgaagtatatgtagaaaggaaggaac

SEQ ID NO: 307657 - DNA, 110 bp, Homo sapiens
ctctaggaggtgtctttaccaaacttattaataggaataccactattccaaccaagaagagccaggatatgctgcaggctgctagtcattatcgccaaaatagaaactct

SEQ ID NO: 307658 - DNA, 97 bp, Homo sapiens
ttgatctggtcagcagtgatgatgaagagcctagcacctcttatactgatgcgatggatgactacagtgtgatcggccgctccctgttcaaaaagga

SEQ ID NO: 307659 - DNA, 48 bp, Homo sapiens
cttgccgcacaaaaagctagagagaatgctgaccccctgaaggtgtac

SEQ ID NO: 307660 - DNA, 76 bp, Homo sapiens
aagcaggatggactatcattactcctccaacaccaatcatcccagacgacaaggtcatttgatgaagatgcaaaag

SEQ ID NO: 307661 - DNA, 88 bp, Homo sapiens
acggcgagcgcgagcggcgcgagaaaatcttgatgtggaagaaatggaggactcagaaccaaggatttccaagtgatttcttccaaag

SEQ ID NO: 307662 - DNA, 100 bp, Homo sapiens
gcgacgactaaatacccgtgtctgaagtcttcaggcgagctcaccacatgctacaggtgtgtataggacaaattctacgaataatacaactacttggaac

SEQ ID NO: 307663 - DNA, 99 bp, Homo sapiens
cggaggcggcgggacagagcgcctgcgaccccagtcggtgctccggggaggtcacctgacgaggagcaaaaccgctgagttcttgagcaaactgaacac

SEQ ID NO: 307664 - DNA, 101 bp, Homo sapiens
ctggggcagggccttatgtcttctcctagtacaaccaaacagacagccctgcacctccgggctcggcggaacttccgggacttcaggggagtgtcccgccg

SEQ ID NO: 307665 - DNA, 100 bp, Homo sapiens
gtaatgagagcccggaaccactctttgtgccgcagcttcgcaggtctgccatcatggatgttctcgcagaagcaaatggcacctttgccttaaacctttt

SEQ ID NO: 307666 - DNA, 100 bp, Homo sapiens
gaaactcgctcgccttcagaagacaggtcaagagcaatctgaatccaaatgcaaaggagtttgttcctggggtgaagtacggaaatatttgagtagacgg

SEQ ID NO: 307667 - DNA, 98 bp, Homo sapiens
cctgctccatgcttgaaaacatggggattggaattcggctttgatgacagtagggaaagaaccatttcctaccatttacgtagattcacaaaaagaaa

SEQ ID NO: 307668 - DNA, 100 bp, Homo sapiens
caagtgcagtgaaagaactgcacggtgagtttaaaacaaccgcttgtggccgatgcatcagtggaatggtcaatgcatcacgtcaagaagccaaattgac

SEQ ID NO: 307669 - DNA, 99 bp, Homo sapiens
agagggaaatcaccaggtggaagatggatgtagagaaatggcgtgtgaagagctggaaggggtctgtgtacatcagcaactttcaaacccattttattt

SEQ ID NO: 307670 - DNA, 83 bp, Homo sapiens
gttttgcagatcttcaacaagaggacccaggagaaattcgccctcaaagtctgccatcatggatgttctcgcagaagcaaatg

SEQ ID NO: 307671 - DNA, 82 bp, Homo sapiens
cgccgcgatggtgacccggttcctgggcccacgctaccgggagctggtcaagaactgacaatgcagatcttcgtgaagactc

SEQ ID NO: 307672 - DNA, 90 bp, Homo sapiens
gccgtttgatgattccttagaacacgagaaactcacagtggatgaatggaagcgcctgtcccctcagttcccaggtgccatgaggaagcc

SEQ ID NO: 307673 - DNA, 100 bp, Homo sapiens
gctaaaaacaagactggggctgctcccatcattgatgtggtgcgatcggtggcacaagaatggctcaactctccaaatagagagaatttctatcagttgc

SEQ ID NO: 307674 - DNA, 95 bp, Homo sapiens
acgccgcggacctccctgcgaccgtcgcggaccatgggcgacaaagggacccggcccctagcagtcttcttgatgctttggaacaacatttagct

SEQ ID NO: 307675 - DNA, 74 bp, Homo sapiens
gcaacgccgagcgcaccgacatctgcctgctcaaaggcacattcaggaccccgcgagccagcggctgacgtgga

SEQ ID NO: 307676 - DNA, 51 bp, Homo sapiens
gaacccctgctctggcctacctggcgagcgacaccacaggcaagctgggct

SEQ ID NO: 307677 - DNA, 75 bp, Homo sapiens
agcagctactgtagcctgcatccacatgaacgtttgaaccttgtgaaacatcttcctgagcagaagatactcaac

SEQ ID NO: 307678 - DNA, 83 bp, Homo sapiens
cagggtgccatagatgtttatgtcagccaactggggaaagtggaattgaaatcccataaagactggactctgaaatgggcatg

SEQ ID NO: 307679 - DNA, 74 bp, Homo sapiens
gggacatagaacaggtgccacagttccttcttggagggaccactcagtagagcctctaagggacccaaatcctt

SEQ ID NO: 307680 - DNA, 83 bp, Homo sapiens
ataacaagcaacagctcatgagagttcactgattaccaaagctatgtcatccatggctgcctggagaataatccaaccttgga

SEQ ID NO: 307681 - DNA, 99 bp, Homo sapiens
aatggaagtagtagttgttgagcagagggaaagggataggagaaggatgtggactgcagtgctgcagtgccaggaaacttttgagaagaactttgaaag

SEQ ID NO: 307682 - DNA, 50 bp, Homo sapiens
gatacagtcactctggaagtattaggcgacgttgtggacgtttaccagcg

SEQ ID NO: 307683 - DNA, 100 bp, Homo sapiens
tctgaaaacatttttgaaaagacaagccatcaaaactgccttcagaagcaaaagggtttttaatgaccacaacaagcaagcatgcagcttactgcttgaa

SEQ ID NO: 307684 - DNA, 74 bp, Homo sapiens
ccgcttctatgtcctgtacacaatcttcatgaaagcatcccagccatcactcttccacctgctccttagagaag

SEQ ID NO: 307685 - DNA, 101 bp, Homo sapiens
tggtgaaggagcagttccgggagacggatgtggccaagaaaatgccaacatagccgaggtagaggtctccatccctgccaagctgcacaactccctcattg

SEQ ID NO: 307686 - DNA, 74 bp, Homo sapiens
tggagatggtacaggcgctttacgaggttctgcggggagtgtctccagccctgcctgcaggtgccatccccgct

SEQ ID NO: 307687 - DNA, 99 bp, Homo sapiens
ctggcacggccaaggaggctgtggtggtggactatggggtcaggtcatttttggatgaattaaaggcatgtgtggcttctaatgatattgaaggcattg

SEQ ID NO: 307688 - DNA, 50 bp, Homo sapiens
aggacagaggctgttccctatggcagtttcagaatggcttcggttattgc

SEQ ID NO: 307689 - DNA, 90 bp, Homo sapiens
gtcggggatcggtcgcctgagaggccagggagctggagagcagagaggcagagctaagacgccgtgacaccttctacaaggagcagctgg

SEQ ID NO: 307690 - DNA, 80 bp, Homo sapiens
gcctcaaacaggagctggagcagctcaaagagatctccagcaccctgccggtggcactactgagagacgaggtgccaggg

SEQ ID NO: 307691 - DNA, 100 bp, Homo sapiens
atttggacagtgaaaaggcccttaaaaagatgatgaataaggtatttggaggtactgtgcacaaaaaaagtgtcagagaagatggagttttcaacattag

SEQ ID NO: 307692 - DNA, 83 bp, Homo sapiens
aaggattccaagtaactcttatttggtgtgttcatcctcgaggtggtgtgattcagagtgtttcttcatggaagcatggctcg

SEQ ID NO: 307693 - DNA, 80 bp, Homo sapiens
cgggcagtttgtcgaacgatgttggactcatagtcactgccagaaagttccagatttcggaaggttcacgagtgttgccg

SEQ ID NO: 307694 - DNA, 95 bp, Homo sapiens
caacatcaagggagttttccggggccctctcagcaagaacgggaacaaaactctgaaagggctattgcaagacacgaagtccgagaaattgagca

SEQ ID NO: 307695 - DNA, 83 bp, Homo sapiens
cccccttccccacgcaaccccagatccatttacactttacagtgtctgacttccagcaactgctggcctgtgccagggtgcaa

SEQ ID NO: 307696 - DNA, 74 bp, Homo sapiens
ttcaaagagaacttatacagaatggttttacaaggtattaacaagtaaaggtgacgcgtgggccaagtacatgg

SEQ ID NO: 307697 - DNA, 75 bp, Homo sapiens
gtttcctgaggcctccccagccatgctgaactcttcagtatcagacacagcacagcagccatctgaagagcaaag

SEQ ID NO: 307698 - DNA, 82 bp, Homo sapiens
ctcccttgcaggattcagaagtgtatttagcatctctaggaagcagtcaattatagatttcttcaaaccagcttcaaaacaa

SEQ ID NO: 307699 - DNA, 82 bp, Homo sapiens
cgtcgccttgctcctcgccgcggcggggactgcaggtgtcgtgaaaactacccctaaaagccaaaatgggaaaggaaaagac

SEQ ID NO: 307700 - DNA, 100 bp, Homo sapiens
aacatccagaagatcacacagtgttgatggtgctgctccactggtgcctgctgtggctcctgtttccactcagctcaaggacccagaagttacccacccg

SEQ ID NO: 307701 - DNA, 83 bp, Homo sapiens
gtgcagctgcctcagttcttagcgcaggaaaattgcctaagaattatgacccaaaagttaccccagatccagaaagatggctg

SEQ ID NO: 307702 - DNA, 83 bp, Homo sapiens
cagaagggctctgttagtgcgcctctaagatggcgacgcctttggcggtaaattcgggttgtgaccgagattcccgacgagag

SEQ ID NO: 307703 - DNA, 111 bp, Homo sapiens
taagagagctctggacaagctggaatgcatccaagagaatccctcaacatgctgacaatgcagatcttcgtgaagactctgactggtaagaccatcaccctcgaggttgag

SEQ ID NO: 307704 - DNA, 82 bp, Homo sapiens
tgggagcaccaggatctcgggctcggaacgagactgcacggtgtttccccccgggccggcctgccgtgacgatcacagccct

SEQ ID NO: 307705 - DNA, 76 bp, Homo sapiens
tatcagctggggctggatgagtgtgctgggtcttcagctctaaagaggccatttgaagatggattaggggatgata

SEQ ID NO: 307706 - DNA, 83 bp, Homo sapiens
ggagaacgtcccgctggatctgacccgagctccaccagcccattggagaaaagttactgttcagtccctgaaggcttgtgcca

SEQ ID NO: 307707 - DNA, 73 bp, Homo sapiens
tcgtgggactcagcagccttggtgctcaggtgccagatgcaaaggcatttgatgaagcaattgctgaattgga

SEQ ID NO: 307708 - DNA, 100 bp, Homo sapiens
ggattactttgatggcaatctgaagagatacctgaagtctgaacctatcccagagagcaatgatgggcctgtgaaggtggacccaggtgcggggctggct

SEQ ID NO: 307709 - DNA, 83 bp, Homo sapiens
ctaagcctgcacagccgcggcggcagcagcagtgagagttttccaagagataacttcaccaagatgtccagtgataggcaaag

SEQ ID NO: 307710 - DNA, 75 bp, Homo sapiens
cctgtctggatggacaggtcattggctctgccaagcttggagttatgacctacagtgatacagggaaactaagtc

SEQ ID NO: 307711 - DNA, 75 bp, Homo sapiens
caggcggaagcggaggcgctggggcaccatagtgacccctaccagactccatcagcagctatgaagcccagatca

SEQ ID NO: 307712 - DNA, 100 bp, Homo sapiens
tcaggatggaggaagactcgatccgcctgcctgcgcacctgcgttgggcccgaaggcatcctgcagaacggggctgtggacgacagtgtagccaagacca

SEQ ID NO: 307713 - DNA, 134 bp, Homo sapiens
tggctctgaaggcgaacgcttcgctggccatttaggagctctgctcaaagccagacggacatggatttgattgacatactttggaggcaagatatagatcttggagtaagtcgagaagtatttgacttcagtca

SEQ ID NO: 307714 - DNA, 107 bp, Homo sapiens
gatttacaaaccgaggaggaaatcttctaaaagaagaaaaacaacgagccaagctccagaaaatgctgcccaagctcctgttggatcaccaggatgccattgctccg

SEQ ID NO: 307715 - DNA, 75 bp, Homo sapiens
gtgggatcgatgtttcaatattggaagcgctttgatttacagcagctgcaggcagtcatggatcaggtaatgcag

SEQ ID NO: 307716 - DNA, 83 bp, Homo sapiens
gaagagggttggaggcaaagttccgaatagggatgaggcatacgtgggaaagaatcatgtgatgtacagctttatataaagag

SEQ ID NO: 307717 - DNA, 75 bp, Homo sapiens
tgaagacacttttgtatatctatctgcaattcaggtgctgccttaacaatttcaggaaaagactaaaatgcttcc

SEQ ID NO: 307718 - DNA, 90 bp, Homo sapiens
ggggccgggctcaggagcagaggttatgtgaaattacctccagagaaatttgcacctaagaaacagggcgatggtggtaaggacctcccc

SEQ ID NO: 307719 - DNA, 75 bp, Homo sapiens
tgttaccagcaatgacactacgatggtctgtcttctgctgatcccaactctgattggaatgcaccagcagaagag

SEQ ID NO: 307720 - DNA, 115 bp, Homo sapiens
aaatgtaaaggatcctgtagaaattcaaaccctagtgaataaagccaagagagaccttggagtaattcgtcgacaggcactactgcagtcttcagttaagcaacaagtagaagct

SEQ ID NO: 307721 - DNA, 100 bp, Homo sapiens
aaaaaactaatggaattagcctgcaacatgaagaaatctcctgcaaagaagctgagccatgcaattagtaaatctttggggtgtgtacccacgagagaac

SEQ ID NO: 307722 - DNA, 100 bp, Homo sapiens
tgaactagatcgagctgatagagaccctagtaacatggaacctgaggatcagctttactatgtgaaatttttgtcactcccagaggtgagacaagccatc

SEQ ID NO: 307723 - DNA, 84 bp, Homo sapiens
gggaaccctggtcaccgtctcctcaggtgatgtgtccaatctagatcccaacttctcatttgaaggcaccaaactggatgtggg

SEQ ID NO: 307724 - DNA, 51 bp, Homo sapiens
ttgataacaccctgtaacagctgagccacagacctccaccagcacgaagtg

SEQ ID NO: 307725 - DNA, 80 bp, Homo sapiens
cgcaaccccagatccatttacactttacactttgcccgaagtttttacatacaaattctactagtcacacctggccattc

SEQ ID NO: 307726 - DNA, 98 bp, Homo sapiens
aaataagtgccgaaattatgtggactctttttgctctggatatgaaatatgcattagaagttgatgcgatgaagagagttgaagaaatcaaacagaag

SEQ ID NO: 307727 - DNA, 96 bp, Homo sapiens
gatgtgcagtttggccccatgagatttcatcaagatcaacttcaggctggtgggcttaaactggatggccggcagctcaaggttgacttggcggtg

SEQ ID NO: 307728 - DNA, 83 bp, Homo sapiens
ggaacctggatgaatgtagagagaaagtacttcaaggtctggtccatcgaactcatatgtcatcctgtcgggtggataagccc

SEQ ID NO: 307729 - DNA, 100 bp, Homo sapiens
tcgggtctcgggggccgctctgggatcccggccaccagcaattgtccgccggccaagctcgctgaggccttcaagtacttcgtgcagggcatgggataca

SEQ ID NO: 307730 - DNA, 75 bp, Homo sapiens
caaaaattaatatgaacggaataaataattccagtgggatgttggcaaacatgaattgactgggcataaagtagc

SEQ ID NO: 307731 - DNA, 90 bp, Homo sapiens
cattacagaccggtggatcctgtccttcatgcagtctctcattggcttctttgagactgaaatggcagtgacctgaccaacggtgcagat

SEQ ID NO: 307732 - DNA, 87 bp, Homo sapiens
gccatcttcaccgtgtacctgggctcgagcctgcacatgaaggtggagatgacccctgagaagttcagtgtcttaatggagaagctc

SEQ ID NO: 307733 - DNA, 95 bp, Homo sapiens
ccagggctgagtcacagggaagaaagcgatttcctccgcctcttccaaagcgattcttcgctgctgctgccttaccgccgagaaccaccacccgc

SEQ ID NO: 307734 - DNA, 51 bp, Homo sapiens
ggtgatttctgcatttccatctgagactcagcccgcctgcacccaggtgaa

SEQ ID NO: 307735 - DNA, 74 bp, Homo sapiens
attccaagtaactcttatttgtgttgtcatgactggatcttacaataatttcttcagaatgtttgacagaaaca

SEQ ID NO: 307736 - DNA, 90 bp, Homo sapiens
caaaagccaattcctcgaccaggggatgccggaccagatctctgtctcggagttcatcgccgagaccaccgaggactacaactcgcccac

SEQ ID NO: 307737 - DNA, 98 bp, Homo sapiens
gaagatggaaggaaggagcgcagcggtctgctgagaacagacccagtccctgaggaaggagaagatgttgctgccacgatcagtgccacagagaccct

SEQ ID NO: 307738 - DNA, 88 bp, Homo sapiens
gcacgccaagtacacttgctctttctgtggcaaagttggaagtgtgaatcctgctgaaaacttccgtgttctagtgaaacagaagaag

SEQ ID NO: 307739 - DNA, 101 bp, Homo sapiens
cgccgctgcctccgccttcctgccccgcgtcgggccgggcgccacctcccccctgcctccctctccgctgtgcaagttgtcctcgaagaaggtacaattgc

SEQ ID NO: 307740 - DNA, 88 bp, Homo sapiens
cactgtcctggtctgctccaaagagatctcagcgctcaccgacttctctggatttaagtgccctgtatgctcaaaatttgtatcctca

SEQ ID NO: 307741 - DNA, 76 bp, Homo sapiens
catcgtgcctgaaggagtacatgccctttatgaagatattcttgagggcacttctggatccagctgtgtgatagcc

SEQ ID NO: 307742 - DNA, 75 bp, Homo sapiens
tgcttatctcatagcaaaaggacaggaacctcactctggagcctgagatcatgcctgctgccactgacaaccgct

SEQ ID NO: 307743 - DNA, 90 bp, Homo sapiens
atctcgggaagagttcagagagcatctggagctaattgtgaaaaatagtgcaacctacaatggtcagacacattctatgtgaaaaacatg

SEQ ID NO: 307744 - DNA, 75 bp, Homo sapiens
gcaggagcctggcgaggatgcaccttcccctgccttggaaagcccgagcgggaagaagttccgcagcaagccgca

SEQ ID NO: 307745 - DNA, 100 bp, Homo sapiens
gtacctgcttcagagacatgagaagattcatactgctttcttggactccgtactgttggtgtaaccaaggcctggaggtctgggtggctcaggtttcctg

SEQ ID NO: 307746 - DNA, 50 bp, Homo sapiens
tgccaaactggaacgtttgcgagagaagagccgcattcaccagtccacct

SEQ ID NO: 307747 - DNA, 82 bp, Homo sapiens
catttttctgcaatggaattaaatggccaaggaagcagctcgagagtgtcgtagaaagaagaaagaatatgtgaaatgttta

SEQ ID NO: 307748 - DNA, 95 bp, Homo sapiens
gtatccgacgccgcgagttcgcggccaaatgtgtgtggaaacacccacctggtgatgagatatatcgcaaaggttcaatctctgtgtttgaagtg

SEQ ID NO: 307749 - DNA, 85 bp, Homo sapiens
aaccccactgcacaccagccgggtcctgaaggaggacaaggagcggtgggaggatgtcaaggtgccacatctgccccattcctca

SEQ ID NO: 307750 - DNA, 101 bp, Homo sapiens
ccaggacctgcccccaggagcctctcagggcatcctaatgtcctatgatcacgtggaactcacattcaatgacatgaagaacgtgccagaagccttcaaag

SEQ ID NO: 307751 - DNA, 92 bp, Homo sapiens
gagctcattaaggacgggaagaacctcatcgctgcgacgaaaagactgcatcgacgtaggctggtgggaaggagagctgaacggcagacgag

SEQ ID NO: 307752 - DNA, 100 bp, Homo sapiens
cgggatctcaggtcctcgggggcggcggccacgccaaggacggccaataggagctctgaacccaaaaagagcagcattcttcgctgagcgttatgaatca

SEQ ID NO: 307753 - DNA, 100 bp, Homo sapiens
tgaggtccagatgaaagagaagtttctggtcactccccaggattatgcgcggtggaagggcatcaagcctactgtcacgattctctcgagaggaatttcc

SEQ ID NO: 307754 - DNA, 99 bp, Homo sapiens
gtcccagcagaccctgaggaatgtgccaccgatagtgtttgttcaagacaagggaaatgcagctctagctgaggctgcaataggatctgtggctttgga

SEQ ID NO: 307755 - DNA, 89 bp, Homo sapiens
agaccactgcctgtgtctcgtcttgtatctctaattggaagcaagcagattttgaagcagtgggaagaatattctgtcttggcatgggt

SEQ ID NO: 307756 - DNA, 75 bp, Homo sapiens
ggctcagcgccttcacccaagcgcttgatgctgcttcaaaagtcatggtggaattgctcggaagttacacagagg

SEQ ID NO: 307757 - DNA, 100 bp, Homo sapiens
aggaccagaagaaactgcaccggaaatgtgcctaccaggatcttagtaagagccctaagaccatgaaaaagctgctgcccaagcgcaaacctgaacggaa

SEQ ID NO: 307758 - DNA, 100 bp, Homo sapiens
gccttctggcctgccctgagtctcctcaaataacaacagatgcctgaggaaacccagacccaagaccaaccgatggaggaggaggaggttgagacgttcg

SEQ ID NO: 307759 - DNA, 100 bp, Homo sapiens
cattttacaatatgggataagctattggaaagatctcggaaaatgcaaagtgaaaaggagagcttgttgaaggaaagagatcacattttgtcaactctgg

SEQ ID NO: 307760 - DNA, 96 bp, Homo sapiens
ggtgctgaccgtgggagccgaccgagaatcttccccaggtgtgactgaggtgaccatcatagaaaagcctcctgctgaacgtcatatgatttcttc

SEQ ID NO: 307761 - DNA, 100 bp, Homo sapiens
tggatggtacctcggggttctctcctgcccccaagctgggccttcccttcttcttggtggtgttcttgagtaagataatctggactggcccccgtctttg

SEQ ID NO: 307762 - DNA, 100 bp, Homo sapiens
gggcaccttgcgcttcttgcagtcggattttaaacaatttgaacctaatgacttttatttgaaaaacactacatgggaggatgtaggactgtgggaccca

SEQ ID NO: 307763 - DNA, 75 bp, Homo sapiens
aactacaggcgcccactaccacgcccagatttatgtgatcagtttggctgaaccccgtctgcccctgcagctgga

SEQ ID NO: 307764 - DNA, 73 bp, Homo sapiens
tccgaccggctgaggcggcgcggcagcggagggacggcagtctcgcgcgggcaagttaaagtcttcagagccc

SEQ ID NO: 307765 - DNA, 82 bp, Homo sapiens
tatgaagtggtgaaggagtgtgtgcagcggtgtccctggccagtgtccttccacctgtccacaagcatggggaacatcttcg

SEQ ID NO: 307766 - DNA, 85 bp, Homo sapiens
cgactcgacaccgtcccagctgaagagaggtcaaaatgcagatcttcgtgaaaacccttaccggcaagaccatcacccttgaggt

SEQ ID NO: 307767 - DNA, 98 bp, Homo sapiens
agacgctgggagcgagcgcagcaaagcgcccagcctgccgcctcgctgtccctgcggcttctggggtggacagtttgcggttgtgaagaaatgccgtg

SEQ ID NO: 307768 - DNA, 82 bp, Homo sapiens
cgtgggtgaactctcttccttcctaatgtatgctttctgggttggaataagcattggagggaaagtacggtggccagacttt

SEQ ID NO: 307769 - DNA, 100 bp, Homo sapiens
agtcgcgctgcgcgccccgcgccgcagccagccacccgctcagcaggtggctgcctctttgatgagccgtatagcacatgtggatatagtcaatctgaag

SEQ ID NO: 307770 - DNA, 98 bp, Homo sapiens
ggacatcttacaccgccaggcctatgcggccccccacccactgcaaagctatgccaccaaccaccacccggcaggaatagccaggtctggctgggtcg

SEQ ID NO: 307771 - DNA, 100 bp, Homo sapiens
ggaccccttgtcttgacagtatcatgcacagagtacctgtggagaagaaacaatggattccttagaccatatgctgacagatcctctggaacttggtccg

SEQ ID NO: 307772 - DNA, 100 bp, Homo sapiens
ggtctggatgtaccgactgcttttggaataaaaagattcccaggatgtgagcaacacgggaccggtattgatgaagatgaccctactgctgatgatacca

SEQ ID NO: 307773 - DNA, 100 bp, Homo sapiens
atgggagctgcagcacagtcgggggtgtaggttatggggggggagaagcactacacctaatcctcttacctgctacaggcaatgtggcagagaattctcc

SEQ ID NO: 307774 - DNA, 90 bp, Homo sapiens
cagttgtggcattgaatgttcagtatcgcttcctttctgcacacgaggcatactgttgagagacagtgcgcacggccacccccttcccca

SEQ ID NO: 307775 - DNA, 73 bp, Homo sapiens
ttcaatggacagaattattagatcctacaaatgtgttcatttcagttgtactactaaccaataacctgcttgg

SEQ ID NO: 307776 - DNA, 100 bp, Homo sapiens
tgtgttcgaggtggagaagatcctggacatgaagaccgaggggcaacacagtcactcctggcggcaaaccaaacaaaaccagagtcatctggggaaaagt

SEQ ID NO: 307777 - DNA, 98 bp, Homo sapiens
aaaaattgtccatcttgtcgtcttcggaaatgttatgaagcagggatgactctgggagccttgatacatcatcaaaggcatagcctttccaagatggt

SEQ ID NO: 307778 - DNA, 73 bp, Homo sapiens
ctccggagtagctgggattacaggatggatagaatgacagaagatgctcttcgcttgaatctgttgaagcgga

SEQ ID NO: 307779 - DNA, 90 bp, Homo sapiens
gacgagcacggtggcgtcttctcccagtccttcctgcgccatgtcagaaccggctggggatgtccgtcagaacccatgcggcagcaaggc

SEQ ID NO: 307780 - DNA, 100 bp, Homo sapiens
tttgtgattgtccgcaggcctaagctaaatcgagagaactttccagaataatcatgggccagactgggaagaaatctgagaagggaccagtttgttggcg

SEQ ID NO: 307781 - DNA, 88 bp, Homo sapiens
caaggccacgacccacgagatcatggggcccaagaaaaagcacctggactatatggaatgtgcagatgtcccactattaactccaagc

SEQ ID NO: 307782 - DNA, 49 bp, Homo sapiens
cttggccccctcgtcgtctgccccaggcaaaatcatcatgcatgacccc

SEQ ID NO: 307783 - DNA, 83 bp, Homo sapiens
gcgcggagcccggctcccgcaccatggaggaggacgacagctacgctgcctgtggaggaaccgattgtgtccacagatgaggt

SEQ ID NO: 307784 - DNA, 75 bp, Homo sapiens
acaccaaatggacctggtggccaccctcagccagctggtgcaccaattccagctggacatcactgtgaaaatggg

SEQ ID NO: 307785 - DNA, 100 bp, Homo sapiens
aggcttgtccatctgtaacttcattaagatttctctatgaatcatcatcaagaactctgggagaacttttgaattcataaccaagccaacatctccagac

SEQ ID NO: 307786 - DNA, 75 bp, Homo sapiens
cagttcctgcagcttccttgagattgcaggaggagatgcttcagagagaggaagccgaaaacaccctgcaatctt

SEQ ID NO: 307787 - DNA, 83 bp, Homo sapiens
ctcttcctggactcctgagcagagatgtggacgagtgctcactagcagaaaaaacctgtgtgaggaaaaacgaaaactgctac

SEQ ID NO: 307788 - DNA, 96 bp, Homo sapiens
gagcagggggatggggcagaggacgaggagtggactattgtgtcaaagaatgcactgcagtaccggggaaattcccaacatgatgcccaggagttt

SEQ ID NO: 307789 - DNA, 98 bp, Homo sapiens
ggtgtcagcgaccaagccgcaggtggcggcgagcgcggggctcggcccgagctcaggagttcatggcctcccacgggaacgacgccgcgagagccagg

SEQ ID NO: 307790 - DNA, 96 bp, Homo sapiens
ggaagatggcggcgccgctcatccccctctcccagcagtgtggcaaagcgctccctggcctttcaaagcaagaggactgctgtggaactgtgggta

SEQ ID NO: 307791 - DNA, 98 bp, Homo sapiens
cagaacaatcttgaatcatgaagctactaaccagagccggctctttctcggggttggctgtgttccggccgcagagcaccgtctgcgtgaggagatcc

SEQ ID NO: 307792 - DNA, 75 bp, Homo sapiens
agatacgttagccagtttacttagcccaagctcgttgccacagaattggtcagaacaaagcagttaaagtctaca

SEQ ID NO: 307793 - DNA, 100 bp, Homo sapiens
tgggcgctgggttcgcggcgcgccctcctgctgcctccccggagctcccgggccagtagatcttatgccttcattcatccggcatggtccaacaattcca

SEQ ID NO: 307794 - DNA, 90 bp, Homo sapiens
aagaagtgccttttgcctcccaccgtgattctgaggcctccccaaccatgtgcaattacttaattcagtgcacaaatgagatgaatgtga

SEQ ID NO: 307795 - DNA, 73 bp, Homo sapiens
gagcaccaggagactgcctatgagcagcccgacggccatggaggctgaagagacgatggaatgccttcaggag

SEQ ID NO: 307796 - DNA, 96 bp, Homo sapiens
tttttgggaaggtgcaaggggtgtttttccgtaagcatactcaggagcatctttccttgaagaagtacattattgacattgtggttgaaagtacag

SEQ ID NO: 307797 - DNA, 97 bp, Homo sapiens
attcagctgcagcttcatgctaaaactggtcaaagtgctgactctggtaccattaaggcaaaattggaaaccctgatagattggtgtgatgaaaagg

SEQ ID NO: 307798 - DNA, 90 bp, Homo sapiens
cgccgcgtgtcctcggagcgcggtccctgtattggtctcctgctcctagaggtgtaatggataggtaacagagaagacctcgtcccttcc

SEQ ID NO: 307799 - DNA, 97 bp, Homo sapiens
acagcctgcgccgagtgtgcgcacctgtcggagacccgccagtccgccggccgcggttctaagctggtctatgtccatcaccttcttggagaaggag

SEQ ID NO: 307800 - DNA, 90 bp, Homo sapiens
ccaaaattgtggaaaagtcactctgatattctctaagccgctttcatcatgggagaaatagagcagaggccgaccccaggatcacgactg

SEQ ID NO: 307801 - DNA, 98 bp, Homo sapiens
tgaaagaagggcaggcccccaagcagcagcaggactcagaggcgagagtggccccagccgggccagaagcaggttatggaggttttgatgactatggt

SEQ ID NO: 307802 - DNA, 95 bp, Homo sapiens
ttggatccgcgggacaagaaaattcatgcgaaagaatcttcaagagggagacatagggaaaaggaagacataaaaatcactaaggaaagaactcc

SEQ ID NO: 307803 - DNA, 75 bp, Homo sapiens
cccggggcgcgcccaccgcgccgcatccatgttcgaattccaactccacagagtgaccagagagaggacgtggct

SEQ ID NO: 307804 - DNA, 50 bp, Homo sapiens
tcatgggaagccagtgaggtagtcaggaaagagcatctacggtgagcgct

SEQ ID NO: 307805 - DNA, 89 bp, Homo sapiens
ggtgagccggaggagtcagtcagaggggcgagcaggagcgattccgtcgccaaacaggtacctttgacaggagcgtgaccctgctggag

SEQ ID NO: 307806 - DNA, 100 bp, Homo sapiens
acgtgaaggaggaatggcaggacgaagatcttcccagcgcggagacccacatcaagggcttcacactgaacgatgctgccaacagccgcctcatcataac

SEQ ID NO: 307807 - DNA, 89 bp, Homo sapiens
ctgaagctcatcatgaccttccagaattacgggcaagcgctgttcaaacccatgaaccagagactgctgctactttgaaacgtacgata

SEQ ID NO: 307808 - DNA, 96 bp, Homo sapiens
caagaagcagctggactctctgcgggagaggctgcagcggaggcggaagcaggactcggggcacttggtgaaaggagatgaccttcaggccattaa

SEQ ID NO: 307809 - DNA, 75 bp, Homo sapiens
gtcctccgggaccggagtcagaaccctccgcagagtaaagacctgtcgcgaaatcgcctttcagaaattcctata

SEQ ID NO: 307810 - DNA, 82 bp, Homo sapiens
ctttcatgtgctttacctaactacagatccactccttataccgccgcacaggtgccagctttcagaaggcccagcaagaatt

SEQ ID NO: 307811 - DNA, 135 bp, Homo sapiens
cggtaatgcaccgacaatgagtggctgttttccagtttctggcctccgctgcctatctagggccatctgctttatctgaagattttcagctgatgaagaactaggaggctcaaacactatcttacctgagtccag

SEQ ID NO: 307812 - DNA, 82 bp, Homo sapiens
gagaaggaagcgagactcatacgcaacctcaatggtcaaaatgcagatcttcgtgaaaacccttaccggcaagaccatcacc

SEQ ID NO: 307813 - DNA, 100 bp, Homo sapiens
aagacccagtcacctgtctggagcaagaaaaagagccctggaatatgaagagacatgagatggtggatgaacccccagtcaagttcatccgagaagtaac

SEQ ID NO: 307814 - DNA, 75 bp, Homo sapiens
gtcagtggaggtggagttcgggctgtgctggctggagctgctgccttcatttacgagaaacggggtggtacatac

SEQ ID NO: 307815 - DNA, 100 bp, Homo sapiens
gaagccctgctactgctggattagcgccagcccgtggccacccaggagcccgatgtgcaaggcaggtgtgagtgccaggacggcattcctggagatgaag

SEQ ID NO: 307816 - DNA, 96 bp, Homo sapiens
cttggacaggggccgcggggctccaggacggcgcccttagcgacaccatggcgctgagatgcgtctggagagccagagggcctgcctgaaggaatc

SEQ ID NO: 307817 - DNA, 100 bp, Homo sapiens
tctgttccaaatgctttgctggtccatgactccagctcaggctgacttggagtttcttgagaatgccaaaaagttgtctatgtatggagttgatcttcat

SEQ ID NO: 307818 - DNA, 104 bp, Homo sapiens
ggagctgtgcagccgcgaggaggcgcgggaggtgttcgagaacgaccccgagacggttacgggcaggacttgagtggcttcggacagggcttctcagaccccag

SEQ ID NO: 307819 - DNA, 100 bp, Homo sapiens
tgcatactcacagagttagagagagggatggtgacatgcacatgatggtgtccaagccagaacagtgggtaaagccaatggctgtagcaggagccaatca

SEQ ID NO: 307820 - DNA, 74 bp, Homo sapiens
attgaagcttgagagaaaagcccccaaaagcagctattcaggttacctgtcctgctgccgattcctggatgaca

SEQ ID NO: 307821 - DNA, 98 bp, Homo sapiens
gcctatctgcccgtcaacgagtcctttgggcaactccagagagaagcatcccctggcccggtgggaagcccagacgaggaggacggggaaccggatta

SEQ ID NO: 307822 - DNA, 75 bp, Homo sapiens
ggatccagagaaactcatcaggatttatcctggataatttcttgagaggagataactcccgtaaagttcagcacc

SEQ ID NO: 307823 - DNA, 99 bp, Homo sapiens
cctcaccatacaggaacagggcagacgttagcgtgagtgatcactctcaatcccggactgtgccctgtccacggtgcctcctgcatgtcctgctgccct

SEQ ID NO: 307824 - DNA, 82 bp, Homo sapiens
accagtttccggacagcttcgtgctgggaccatggccaacctggagcgcaccttcatcgccatcaagccggacggcgtgcag

SEQ ID NO: 307825 - DNA, 88 bp, Homo sapiens
taacccttgatcctcctcctaattgcagacagttgatattcataaagagaaagttgcaagaagagaaattggtattttgactaccaat

SEQ ID NO: 307826 - DNA, 101 bp, Homo sapiens
gcgtggttgtgaggactatagttcctggaggattagcagatcgagtttgccagtttagatcatcaacattttctgatgtagaagctcattttagagcagcc

SEQ ID NO: 307827 - DNA, 82 bp, Homo sapiens
gcgcctgcgccgccggggccgctgcaaggggaggagagaggccgcctcaggggttgtgtccactgtggtccccgactctgcc

SEQ ID NO: 307828 - DNA, 75 bp, Homo sapiens
agctcccagactggtcatatgcgggattgccaaggatccaagatttgaacgattaccatgtacacacaaaggaac

SEQ ID NO: 307829 - DNA, 82 bp, Homo sapiens
cgctgccctcagctccgagtccagggcgaggagcaggacatcgagactttacatggctctgttcacgtcacgctgtgtggga

SEQ ID NO: 307830 - DNA, 101 bp, Homo sapiens
acggcggcaaatctaagaaatttgacactggggttgggaaatcaagcatcgtgtgtcgatttgtccaggatcactttgaccacaacatcagccctactatt

SEQ ID NO: 307831 - DNA, 115 bp, Homo sapiens
ctatgtctctgaaaaaggaactgttcagcaggctgatgaataagatctaagaggacattcggaaattctttggagtaataccaagtggaaagaaacttgtaagtgaaacagtaaa

SEQ ID NO: 307832 - DNA, 50 bp, Homo sapiens
gacacaggcagagcaagctgcacaggatgttcaagatccttcagtatttg

SEQ ID NO: 307833 - DNA, 74 bp, Homo sapiens
agaaaacctcctgcggcacaaagagaatgacagagttgccctttacattgcaaaaacctctgcgccatgagagc

SEQ ID NO: 307834 - DNA, 101 bp, Homo sapiens
ttcctcagaactactatattcagtggctaaatggctccctgattcatgcttacgaggaaatatttcagtaaaagcagttaaaaaagaagtagaaaagaaac

SEQ ID NO: 307835 - DNA, 101 bp, Homo sapiens
catgctcagctccgcctttggccagatcactggggtgatcctgctggctgttggagtctggggcaaacttactctgggcacctatatctcccttattgccg

SEQ ID NO: 307836 - DNA, 74 bp, Homo sapiens
tgcggaggtacggatactcagttgtggagagctgattcccaaatctaaaggtttctaagcatgaattgaggaac

SEQ ID NO: 307837 - DNA, 74 bp, Homo sapiens
cgggatcccagcctcaggcgtgcgcggacggtgtgcgggtggagccgccaccaaaatgcagattttcgtgaaaa

SEQ ID NO: 307838 - DNA, 98 bp, Homo sapiens
tggtacatgagtggctatcatactggctattatatggtcaatgagctgaaggagaaaggcaacaaggccctgagcgtgggtaacatcgatgatgcctt

SEQ ID NO: 307839 - DNA, 101 bp, Homo sapiens
ccatttcgatgctgcgaaacggatgaactggacctcacagacaaacacagagaagccatgtttgcacttccagctgagaaaaaatggcaaatatactgtag

SEQ ID NO: 307840 - DNA, 90 bp, Homo sapiens
tccttgtagataagcaactggattttttaactgaagatagtgcctttcagccctaccagttgctgttggactgcggtttgggaaatggca

SEQ ID NO: 307841 - DNA, 119 bp, Homo sapiens
gtggagatccgcggaggccgacaggattcgttggctgccgtccccgctgctgtgcattggggactatgcagccatcgtcttctttgctaacaaccgctttgagacagggaagaaaaaac

SEQ ID NO: 307842 - DNA, 75 bp, Homo sapiens
taccacatcaaaaataggttctcttattgatgtaaatcagtcaaagatcttcagcctgttaaacaagaaaacgaa

SEQ ID NO: 307843 - DNA, 97 bp, Homo sapiens
tgggctcagcagatcagagagggcagacaccactttttagtaggcaaagacacttctaccacaacaatcagaggccacaatcagagaatggaattcc

SEQ ID NO: 307844 - DNA, 75 bp, Homo sapiens
cgcctcgcgccggctgctctttccgggtcctagaccagaaggagcacaggctggatggccgtgtcattgacccta

SEQ ID NO: 307845 - DNA, 100 bp, Homo sapiens
caccatcgtgcctgctatcgccgagttctacaacacgcagtcagtggaagagcatctgcaatgtcaaacactcctacccacagtattgctgcatccattt

SEQ ID NO: 307846 - DNA, 75 bp, Homo sapiens
tcacggagctgggcgacgagctgaccctgggagacatcgacgttgattatggaagattcccacaagagtaccacg

SEQ ID NO: 307847 - DNA, 90 bp, Homo sapiens
ggactatgggcgaatagctctgaccacccggcgaagtgtactggttctgcctgtctggagggccatggagaagaggctgggagtcaagcc

SEQ ID NO: 307848 - DNA, 73 bp, Homo sapiens
aaggccaaagagactgcagatgccatcactaaagaaggagtgtgctgatgctgcctccccagctctgtcccta

SEQ ID NO: 307849 - DNA, 75 bp, Homo sapiens
ggtcaggaggatgcaagtcctgacagattcagcaacactgagcatcagatccatgctgctgctgactcggagccc

SEQ ID NO: 307850 - DNA, 74 bp, Homo sapiens
acgcccaagccgccctggatggagactcccagaaaaactgcttaaggttgaaaagagaaatttaagaaattgct

SEQ ID NO: 307851 - DNA, 90 bp, Homo sapiens
atcatacgcggcaggaccaagcaacatggaatcaactatgaaattataatcatagatgatggaagcccagatggaacaagggatgttgct

SEQ ID NO: 307852 - DNA, 82 bp, Homo sapiens
tggagatatggcgcaactgcggcgctgtcttgggacaaggtgcgcattcctggtgtgctgcagcgattgggagtgacatact

SEQ ID NO: 307853 - DNA, 80 bp, Homo sapiens
cttttaagtggagtggtggatcagaccaaagatgggcaaccttcaaaagatcctgtcccatgatcatcctccagagtatt

SEQ ID NO: 307854 - DNA, 100 bp, Homo sapiens
acagttctctcaatacataaagaacagcgtaactccagacatggagccagatgaccaagatgctccagatgaacatgagtcgcctccacctgaagatgcc

SEQ ID NO: 307855 - DNA, 98 bp, Homo sapiens
gttccctcagctctaagggccgcgatgttgtacctagaagactatctggaaactgtcgcctggttgggcccggaaatgggacgtcgcgctttctcagg

SEQ ID NO: 307856 - DNA, 121 bp, Homo sapiens
ctgcttcgggcctctggaatttagcgctcgcccagctagccgcagcaggaaatcacctttccaaacccaatgggacttcccagctggaacgagaactgagtctgatgcaaaaagaaccgcc

SEQ ID NO: 307857 - DNA, 82 bp, Homo sapiens
atggcggcgctggagagggggcgctgagctgttggggtggccatcaaagtgattccccggaatcgtgtgctgggctggtccc

SEQ ID NO: 307858 - DNA, 75 bp, Homo sapiens
gagagcttcacctgtcggcttggagagatccagatcatggccaccaccatcgacaactcccgggtcatcctggag

SEQ ID NO: 307859 - DNA, 82 bp, Homo sapiens
cgcgagtgggagcaccaggatctcgggctcggaacgagactgcacgaaatacatgctacaggatttaactatcagaatgaag

SEQ ID NO: 307860 - DNA, 98 bp, Homo sapiens
ctgactgtgaaacctcagggccccagcgccgacggcgacgtcggggccgagctaacccggcctctggacaagacatttggccatccagtgtcattggt

SEQ ID NO: 307861 - DNA, 114 bp, Homo sapiens
cctcgctcccccctcacctccacaacctccccctttccaatctggcaatcccaggcttctcacggcattcagcagcagcgttgctgtaaccgacaaagacaccttcgaattaag

SEQ ID NO: 307862 - DNA, 100 bp, Homo sapiens
gaggctgggcctgggatggcaaaaaagccttggaagcagccaagatcaaggtccagaaaggtggaagaggatgaatatgaagattcatcatcaaaccaaa

SEQ ID NO: 307863 - DNA, 51 bp, Homo sapiens
cgtggacatgcgcacctcacacaggtttctgccattattacctgcccgagg

SEQ ID NO: 307864 - DNA, 83 bp, Homo sapiens
ggcaaggagctaaagcagcgtgcgttcagccctgggcctggtggagttgacagaagagatcctgaagctgctgatggaactgg

SEQ ID NO: 307865 - DNA, 105 bp, Homo sapiens
aggggagtcatcatgagcgatgttaccattgtgaaagaaggttgggttcagaagagggatgtgaaaggaccacccacccaccgtctgtcttgtggtcagtcaccc

SEQ ID NO: 307866 - DNA, 74 bp, Homo sapiens
ttatgtccattgttctcttggagcagctggtcatcatggatttgctttcccatatgcttcatatggacccacat

SEQ ID NO: 307867 - DNA, 74 bp, Homo sapiens
tttttcttcaatgggcagcatatgaaagtggattatggccgaattaagaaagtggtttccatctacggaagcag

SEQ ID NO: 307868 - DNA, 50 bp, Homo sapiens
tgcttatggctataaaattacagttcaaatctgaacatcaatgatgtact

SEQ ID NO: 307869 - DNA, 100 bp, Homo sapiens
tggtggcgaggacagctggccgccgatattcaccaagcgcttcgctacaagtcctcaaccactgaagaagaagcttgatgcttggctgtcagaagacatg

SEQ ID NO: 307870 - DNA, 140 bp, Homo sapiens
tgcatggaggagctggtgagcctcatcacacaggatccgcccctggacatggaggagaaggtccgcttcaagtgaaaggtgtagcagtcactcggcctacacccacagcatcgaccttgtgaacccagcgacctgactgc

SEQ ID NO: 307871 - DNA, 75 bp, Homo sapiens
tgactactggggccagggaaccctggtcaccgtctcctcaggcgtccgagctgggccacagcctgaacgagaacg

SEQ ID NO: 307872 - DNA, 83 bp, Homo sapiens
cattggatttaaaagacagtcctcgtcagcactgactttcagctatggaatcgtgagaaagatcagtctaaagaaaaggagaa

SEQ ID NO: 307873 - DNA, 50 bp, Homo sapiens
tagcattcgcctactccgtgaaggactccccccaggtcctgagggcagga

SEQ ID NO: 307874 - DNA, 96 bp, Homo sapiens
atccgcccgcaagagcgagccgcctgccccggtgcgcagacagagctattccagcaccagcagaggccagtacagtggtagcagttggactgacca

SEQ ID NO: 307875 - DNA, 75 bp, Homo sapiens
tgccctgcagtacctgcagaaggtctctggagacatcttcagcagggtacagaagtgcaggtggatgacatcaag

SEQ ID NO: 307876 - DNA, 101 bp, Homo sapiens
atggaagttgattactcagtctctaaaaagctaaggtctttttgccattcctccaggacatccaccataaggaaaggagaccctggaccaacattctctaa

SEQ ID NO: 307877 - DNA, 75 bp, Homo sapiens
catggcccagattctgccaattcgttttcaggagcatctccagttttcggctttgtgagaaaccttaccatcaaa

SEQ ID NO: 307878 - DNA, 83 bp, Homo sapiens
gagccagaagctacatgacccctaaacggtctttctgtggaatttggaacaattctagtttacacatgtgagaagagttgctg

SEQ ID NO: 307879 - DNA, 100 bp, Homo sapiens
ggccttctccctgggattgcggtcgcagcttcactcattgatgcccatgcaggaggactagggtcatgtaggtacaacagcaaccaagaagatcgatgtc

SEQ ID NO: 307880 - DNA, 75 bp, Homo sapiens
atttcctgcgctgttccacctcattcaacttcagccatcccaggcctcaggacctgagttctccgacgcccacat

SEQ ID NO: 307881 - DNA, 75 bp, Homo sapiens
gctgaggactcagaccggtctctgcaagagccatcactgcccgcgactccatggccaagtctctgtacagcgccc

SEQ ID NO: 307882 - DNA, 101 bp, Homo sapiens
aaaaccccacagctgtggaaggactgggatcagagcctgataatttggtgattacgtggaagttgatgctgatgtaacagttataggttctggtcctggag

SEQ ID NO: 307883 - DNA, 98 bp, Homo sapiens
ccggagtcggggacccaggagtttcctgtgtccagcgctgccggagccgcctgagtgattacagtggcgagatcttgaacaactgctgcgtcatggag

SEQ ID NO: 307884 - DNA, 75 bp, Homo sapiens
cagcaaaaatgacccaccaatggaagcagctggcttcactgctcaggagatcacaaatcaacatctcacttccga

SEQ ID NO: 307885 - DNA, 100 bp, Homo sapiens
gcagatgtaccctcagtacgccacctactattacccccagtatctgcaagccaagggtgaggcgctcaggcaagttctggtcaaccgttactatggaaac

SEQ ID NO: 307886 - DNA, 74 bp, Homo sapiens
ctactcgcccgccaccctgcgctgccgccgctctgaggagttaaagctgtggcagaggtaaaacttcgagatga

SEQ ID NO: 307887 - DNA, 97 bp, Homo sapiens
gaccatcgaaaggagcaagagcaagatcaccgtgacatccgaggtgcctttctccaaaaggtctgctgagaacagacccagtccctgaggaaggaga

SEQ ID NO: 307888 - DNA, 100 bp, Homo sapiens
ttaaaaaggaagctattcaccattgaggccacaacatctattccaatatattaggtttcctcggtggtgtttcctgggctatgctagtagcaagaacttg

SEQ ID NO: 307889 - DNA, 83 bp, Homo sapiens
cagctacacagttccaggctacatgcaggacttggaggtggagcaggccctgactccagaatccacattcatctcaatggaag

SEQ ID NO: 307890 - DNA, 98 bp, Homo sapiens
catgaagcagatgagttgagtggagatgcttctgtggaagatgatgcttttatcaaggacacaactcagatgggaagttcatcgcccgggcacagcgg

SEQ ID NO: 307891 - DNA, 102 bp, Homo sapiens
agatttccagccttccaagctctactgtgacttcagagacactgccaagcagccttagccctagtgtagaggtgatgctgtggagtcttcaaaaagcccgac

SEQ ID NO: 307892 - DNA, 127 bp, Homo sapiens
aagaccgcgcgcagggcctgcagcgggagctggacggcgagcgcgagcggcgcgagaaagaacaagatcactcaaggtgaaggataatctactaataccagcactttgaatgaaaatttgtttctct

SEQ ID NO: 307893 - DNA, 83 bp, Homo sapiens
gctatatctgtaaagggtatctgatcaagccaacaacagtgacggaatgcctccatacatatactcctgggcatggaagtgga

SEQ ID NO: 307894 - DNA, 100 bp, Homo sapiens
gccgtcaacgccttcaaccaggaggatgttaatgcaggcgagggcagtgagtttgcagacagtgggattgaaggggccactaccgacacggacctcctgt

SEQ ID NO: 307895 - DNA, 80 bp, Homo sapiens
gtttcccgcagccggccggggtccaggtcggaaatgtagccagtggggccgccaggtgctggagaatctggtaaaagcac

SEQ ID NO: 307896 - DNA, 90 bp, Homo sapiens
tatcggaccatttcagaggttcaccgccatcattggacccaatggctctggtcatcgagctggttaagaagtatggcacaaagcagtgga

SEQ ID NO: 307897 - DNA, 100 bp, Homo sapiens
ttacatcagcaccctcaaaacaggaacagcatatgccatatatgagctggctgtggcttcatttcccaagaagcaggagtgacttcagtcatcccagcaa

SEQ ID NO: 307898 - DNA, 100 bp, Homo sapiens
caagatggacaccgcggaggaaggaaacttggatttaactggccagaagcaggtattcaaagcagagaacaatccctgggtgacccccattgcagaccag

SEQ ID NO: 307899 - DNA, 75 bp, Homo sapiens
cgggacccggttccccggcccacagtgggggtgtgcaaacccgagagaactggataatgggaaattcatccgagt

SEQ ID NO: 307900 - DNA, 74 bp, Homo sapiens
gaacagggcagacgttagcgtgagtgatcactctcaatcccgggccccaggcatggaagagctgatatgggaac

SEQ ID NO: 307901 - DNA, 74 bp, Homo sapiens
ccgccgccgcgggcttcgttcgttgggggccgtcccgctcctaaggcaggaagatggtggccgcaaagaagacg

SEQ ID NO: 307902 - DNA, 90 bp, Homo sapiens
aagacttgaccacttacttggataaagttccagagcctggagtgcccactgaaaccataaagattgttgaacagataaatacgaaactgc

SEQ ID NO: 307903 - DNA, 75 bp, Homo sapiens
gagactccacctctcatcaccccaggctcagcagggagctgctggatgagaaagggcctgaagtcttgcaggact

SEQ ID NO: 307904 - DNA, 75 bp, Homo sapiens
cgcagtggtcgcttcttctccttgggagcagctccccgagtcagcctatatgcaccagctcttgggcctcaacct

SEQ ID NO: 307905 - DNA, 122 bp, Homo sapiens
ctgcccggccgccccgtctgagaagtgaggagaccctctgcctggcaaccaccccgtctgagaagccttcctcgagaccacccggagagttaccactccttcatgtggaacaacttcttcaa

SEQ ID NO: 307906 - DNA, 100 bp, Homo sapiens
cagctttggataatgacgacagcaacccgaagacagggaaatttagacccagcctccggctgtgacccccagcctcacacctgcctctggttcccgcctg

SEQ ID NO: 307907 - DNA, 83 bp, Homo sapiens
ttctttccctttaagatatgtgcaggatcaagttgcggcaccttttcagcgcctactgaacttgacgcactggtatttggcca

SEQ ID NO: 307908 - DNA, 75 bp, Homo sapiens
tatccttcatatgatccatcttagtgaagaattaggatacagtagtgagttgaaactcttggaggaagcaaccat

SEQ ID NO: 307909 - DNA, 51 bp, Homo sapiens
ttattcgtaatggacttttagagggcttccgttacaagatgaggtctgtgt

SEQ ID NO: 307910 - DNA, 75 bp, Homo sapiens
tggcactcttcaggaaccaccagtcttcttaccaaaacattgctgaggctcttgtcagcaaaggtctagccacag

SEQ ID NO: 307911 - DNA, 73 bp, Homo sapiens
cagcatgatcaactggaggctcagaagctggaatatcatcagatccagctccaggtcccacaggggctcttct

SEQ ID NO: 307912 - DNA, 100 bp, Homo sapiens
attaggaggaccagcagctcttagtccattaaccccaagggaaatcctcattgacgattcaatttgttgaaggccaatttgtggactcctacgatccaac

SEQ ID NO: 307913 - DNA, 75 bp, Homo sapiens
gaataatatttatggagcatatattatggaacacaggagctgagcacataacgacttacacgttcaatactcaca

SEQ ID NO: 307914 - DNA, 75 bp, Homo sapiens
atagatattgcacgacagactgcacagggcatggaggaggtatggaaacattggaacttcaaaaggacatcaaag

SEQ ID NO: 307915 - DNA, 88 bp, Homo sapiens
ccgcctccttgaagctgccgctgtcgctgctgctcgttcgagtcgcaggctactgcagcactggggtgtcagttgttggtccgaccca

SEQ ID NO: 307916 - DNA, 74 bp, Homo sapiens
ccgattcctcctccttggtcgccgcgtccttggctggcgtgatgggcgggatccccgctgtgaacggccgcggg

SEQ ID NO: 307917 - DNA, 100 bp, Homo sapiens
accagctgagcaccgggccccgcgccgcgccggaggaggccgagacgctggcagagaccgagccagaacacagatatgtagaactcttcttgaattctac

SEQ ID NO: 307918 - DNA, 50 bp, Homo sapiens
ccatttcttctgtatagaaatgcaagctatattacaggagtatgtcaatc

SEQ ID NO: 307919 - DNA, 50 bp, Homo sapiens
tggatgtgatgcctgctagccaaaagggatgaagcctgctgggagcgtga

SEQ ID NO: 307920 - DNA, 89 bp, Homo sapiens
ctttctcaaaccaaggctgctcgacagggtctcactgtattgcccaggttggtctcgaactcctggcttcaagcgattctcccacctca

SEQ ID NO: 307921 - DNA, 50 bp, Homo sapiens
atatcaaattgcctgtggaattagattgcaaatagaagagtcttccaaac

SEQ ID NO: 307922 - DNA, 90 bp, Homo sapiens
ttggaaacgacgtcatgtgttagatactctggatgaatattttgaatatgatgcagaggagttcttggtctctttggccttgctgataac

SEQ ID NO: 307923 - DNA, 100 bp, Homo sapiens
gtatggagtggaaacgcttgtagggtttcaccaggtcagtactcctgcatttgtaccaacgaaaactcacgtgctgcttcatcgaatgagtggaaaagga

SEQ ID NO: 307924 - DNA, 99 bp, Homo sapiens
gctggaacgaacatcccggtgctaggggtgcaggaggaggacggcagcaaccgcagcagcagccttcaggtggagccgccaccaaaatgcagattttcg

SEQ ID NO: 307925 - DNA, 100 bp, Homo sapiens
cggagcgccagctcagcgtgcccatcccggggggcagcaacggcgacatccagcaaggctacctgacagtcaacattgagcctctcccccctgtggtggc

SEQ ID NO: 307926 - DNA, 127 bp, Homo sapiens
gcgccgcccgcgcccgggaccgacccctctgctcgcggccgcgcctttgagcactgatagccattgggcgatacagcatgacaatagagactgtggatgtcggatggtgtaaagaaatcacagacca

SEQ ID NO: 307927 - DNA, 101 bp, Homo sapiens
atgttcgagaactacagaaacctggtctccctggcaacttgagttggtggaaccaagtggctggattcatgttcccttaactgacaatcataagaagccaa

SEQ ID NO: 307928 - DNA, 75 bp, Homo sapiens
caagactttcatattctctgacctggactacatgggggtggttgagtttgcctcttatggtgacttaaagaatgc

SEQ ID NO: 307929 - DNA, 80 bp, Homo sapiens
gctggctgcgaccttgatgtccaggatgatgagatacaactcgtcaacgaatcaaattcagtgatgacagagtatgcaag

SEQ ID NO: 307930 - DNA, 100 bp, Homo sapiens
gcccggatgagtacgataccgaagcgggctgtgtgccccttctccacccagaggaccccaaattacgtgaacttttggatgtggggaacatcgggcgcct

SEQ ID NO: 307931 - DNA, 98 bp, Homo sapiens
gtaccaatggagcctgaagagttcggcgcagttcctggggtctccacagctgaggcaggtggtgaagcagtattttccaatttgaagattcatttgaa

SEQ ID NO: 307932 - DNA, 101 bp, Homo sapiens
caggaaatggagatcttatacaaaaaggagaaggaagaagcagatcttcttttggagcagcagagactgatttcaaggccagagaatggcaggggaacaga

SEQ ID NO: 307933 - DNA, 88 bp, Homo sapiens
gcggcggcggcgcagctattgctggacggccagtgggagagcgaggcctgagcctctgcgtctaggcaagaaactatattcagtcttt

SEQ ID NO: 307934 - DNA, 100 bp, Homo sapiens
gcggtcagagccgaacgcgagggcggcgcccggggactggagctgcgcgcaatagaagttccacctggtgccaagcatcaacaccatgagtggcagtcag

SEQ ID NO: 307935 - DNA, 100 bp, Homo sapiens
agccccgacgaacatttctgggtgacactcaacaggattcccggtcatggcaaaaccccaaaagatgccgcgtcagttcgagccacgcatccaataccag

SEQ ID NO: 307936 - DNA, 100 bp, Homo sapiens
gtccctgtttcgccacagttcctaccttatgagctcggttttcttatgcttataagagtggaacaggctgccctgaggatctgtgtttggtgaaaaggag

SEQ ID NO: 307937 - DNA, 50 bp, Homo sapiens
cggggctgccggagaccggccgcatggaatcaggaaacccaggcccaacg

SEQ ID NO: 307938 - DNA, 75 bp, Homo sapiens
caatttgaagtccgagaagcgttacagtaagtaaggaggtctctgtaccatggctcgtacaaagcagactgcccg

SEQ ID NO: 307939 - DNA, 75 bp, Homo sapiens
gaacaaaccttggaaatgttattgataactatgtttatgaacataccctggaaatctgaaatagagtactatgct

SEQ ID NO: 307940 - DNA, 75 bp, Homo sapiens
cctgaatttctctctttgggaggaggaagggacaccgagggaccaaagggcgtattatgcggagtgtcacggcgt

SEQ ID NO: 307941 - DNA, 105 bp, Homo sapiens
tatgcctcaatttgctggatttaagcactgctgcactttatgagattcatgatgttgctatcaaaagttgagaaattgtcagaagaaatcatggagataatgcaa

SEQ ID NO: 307942 - DNA, 76 bp, Homo sapiens
agctgatggagccacacagaccagaacggcaggtcacgaacgagatcacgccggtgctgtcgtactcctacctggc

SEQ ID NO: 307943 - DNA, 100 bp, Homo sapiens
catgatgaagaagctgtggggtgacaggatgttgacaatgcgtctctggcacgtcttgaccttgaacgcaaagtggaatctttgcaagaagagattgcct

SEQ ID NO: 307944 - DNA, 99 bp, Homo sapiens
ccgagaggaggtggaccagaacttttggaactagtgccggcggctctccaccccccaggcgacattgactacagcaccgtgctcctcggcatgctggtg

SEQ ID NO: 307945 - DNA, 82 bp, Homo sapiens
agcatttgcatggaacacatggcttgggcactgtttaaaggaaagttccgagaaggcatcgacaagccggaccctcccacct

SEQ ID NO: 307946 - DNA, 75 bp, Homo sapiens
tgtatcagtttcttctgaagtacaatcaactgtagaagcctttgtagcagggaaaatggagctgatagtatcctg

SEQ ID NO: 307947 - DNA, 75 bp, Homo sapiens
actaaactcctcttcatgacatcccggactgcatcaacaagtatgggtctccgtacaccaaaaactcaggcttcg

SEQ ID NO: 307948 - DNA, 100 bp, Homo sapiens
gcctcccctgcaccggcaggtgagaggcggatctacagacatagctgactacacagacttagtcttctccactccgtgttcctgcagctagagacatgac

SEQ ID NO: 307949 - DNA, 104 bp, Homo sapiens
cgacctggatctccaagacgtagaggaagtggagatcggcagagacaccttctggcccggccacctgctgctccgatcacctgcactgctgcccccaagacact

SEQ ID NO: 307950 - DNA, 95 bp, Homo sapiens
ccacgcgactcaatggacggagagcttggattagactctggccctaacccagggacagtggccaccatgcgtaagccccgctgctccctgcctga

SEQ ID NO: 307951 - DNA, 100 bp, Homo sapiens
cggagcagtagcccgatccggggccgcgggccgagctgccggtgaaagcccagcctccgtggttcttaatgcctcaggaggactattttcactaaagatg

SEQ ID NO: 307952 - DNA, 80 bp, Homo sapiens
agccgctcggcctaccacagccacaagttgctctatatgcaatcagtgctgtctactttgctggagtgatggtgcgactg

SEQ ID NO: 307953 - DNA, 95 bp, Homo sapiens
gaaccaattgttttacagtctgttccgcatgatcgttataataagagctggaagtcgagtgtgctactcaactcaggagatttggagacaaactg

SEQ ID NO: 307954 - DNA, 100 bp, Homo sapiens
ttggccacatatatgcgaatctataagaaaggtgatattgtagacatcaagtacatccagcagtggtcattcgacaacgaaagtcataccgtagaaaaga

SEQ ID NO: 307955 - DNA, 75 bp, Homo sapiens
ggcattgacatttaattttagggtcctttatatagaagggagagtaggctcggcatggctgcccggggccacagc

SEQ ID NO: 307956 - DNA, 80 bp, Homo sapiens
gagttaatctcctcagaaatcactaaatactactctgaggggcttagaaattaacaggcaccgacagtaaatggttcacg

SEQ ID NO: 307957 - DNA, 50 bp, Homo sapiens
ctcggagcaacgagcgcagcgccgggggacagccgcgccgctgctgcttt

SEQ ID NO: 307958 - DNA, 127 bp, Homo sapiens
ccaagggcgggctgcttgccgctatggctggcagtcaggacatattcgatgccatcgtgatggcggatgagaggtgagcgactggtgggaggagtacatctacctccgaggacgagggccgctcatg

SEQ ID NO: 307959 - DNA, 83 bp, Homo sapiens
gggagctggaaattcctgacgttcattgatctggcattcaactcagaaacagacagtttcaagctggcctatggagggcacca

SEQ ID NO: 307960 - DNA, 50 bp, Homo sapiens
ggacccctacttcatccagtcggagctgccctcctggacctggagcaaac

SEQ ID NO: 307961 - DNA, 89 bp, Homo sapiens
aggagacccaaatctgcttgttatctacagaactcaaagttgtcaatacgtagagctgagtcagtgctgattctctcaaatagagcttg

SEQ ID NO: 307962 - DNA, 89 bp, Homo sapiens
gagaggcagcgccatggcggagcagacctactcgtgggactttgcctacgtagctcgtgataagctgacccagatgctcaagtgccacg

SEQ ID NO: 307963 - DNA, 90 bp, Homo sapiens
gccacccattgtgtcttctcaagaaggaatgtatcctgtcaggtataatgtcagtgaatggcaagaaagttcttcatatggatcgaaacc

SEQ ID NO: 307964 - DNA, 98 bp, Homo sapiens
gtttattaagacaatgaaagcacctctgttggttagtggttacttggatgattgtacctgtgatgttgaaaccattgatagatttaataactacaggc

SEQ ID NO: 307965 - DNA, 95 bp, Homo sapiens
cccgcgtccgccactcctgccccttctgggcaggcttctcggtactccaaagattcaggtttactcacgtcatccagcagagaatggaaagtcaa

SEQ ID NO: 307966 - DNA, 50 bp, Homo sapiens
gttagcctggcctggcataatgggaccctgatgcttggtgtgacctgagt

SEQ ID NO: 307967 - DNA, 90 bp, Homo sapiens
gcatccctgcatgtctgatgtagcagaggatctttgttccatgctgaggggggatttcagatttcatacgctgaccggaaaggagattga

SEQ ID NO: 307968 - DNA, 100 bp, Homo sapiens
gcaggatctcacagctgcagtctaatagtaacacagagacctgcctagagctggaacgttacctccagagcgagccctgctatgtttcagcctcagaaat

SEQ ID NO: 307969 - DNA, 82 bp, Homo sapiens
gtttactgttgcgttttgcagacaacactttctcagagtctctggtaagaagagtgaaagcaaagaagccaagaagtctgaa

SEQ ID NO: 307970 - DNA, 83 bp, Homo sapiens
gtgaggaccccccaatccgcgtgagggggatatgagactttctactcggaatatcctgagtgttgcgtggatgtaaaacccat

SEQ ID NO: 307971 - DNA, 90 bp, Homo sapiens
ggaactcttctggggagaccccgacgtggagtgccgagaccgggaagcagccctgtgggagatggaagagcaccagctgcaggagaggca

SEQ ID NO: 307972 - DNA, 100 bp, Homo sapiens
tgcgagtcttcggagcgaccccggcagatgccgctcctacgaggactgctgtggctccaggtgctgtgtgcgggccctctccatacagaggctgtggtac

SEQ ID NO: 307973 - DNA, 75 bp, Homo sapiens
tttccttgaagtataagcaaagattaaaaggagcccaagccccatctcatcctagcacaccctcctccactgtcc

SEQ ID NO: 307974 - DNA, 73 bp, Homo sapiens
tgaactgaagaaagaagttactttagctgttgaaaatgaggcacagccaaaattggtcagaaaggggagtaaa

SEQ ID NO: 307975 - DNA, 75 bp, Homo sapiens
tggagcctcagttggaagcagccgatccagcctgcggagcctgtggggcaggaaaacgaagccccctcctgtatt

SEQ ID NO: 307976 - DNA, 50 bp, Homo sapiens
ggccgagcaggaggcgccatcatggagccctctggcacaaatggaagaag

SEQ ID NO: 307977 - DNA, 87 bp, Homo sapiens
ctgtcccagcccctggaaaggggcaggaacgacaaactcaaagtccaggtaatagttaacctcttctgtgagaagtcagaaggtgat

SEQ ID NO: 307978 - DNA, 100 bp, Homo sapiens
gccgcactcgccgatcctccaggcatgccccgctacgagctggctttaatcctgaaagccatgcagcgggcagtagcagaatcccatggtagccaggtgg

SEQ ID NO: 307979 - DNA, 90 bp, Homo sapiens
tagtacttcaagagcacagtcttatgtaaggattggttgccgtggtctttactgcttttctccctgatgtgtgaaacaagcgccttctat

SEQ ID NO: 307980 - DNA, 100 bp, Homo sapiens
gacacaatctactcctacgtcaggccagagagatcgggcccgggacacccagacagatgagattgtcgcactgaagaaggtgcggatggacaaggagaag

SEQ ID NO: 307981 - DNA, 90 bp, Homo sapiens
atgggatttgcaacgaattcaatgaacattcctgctcttgttggcaaaggccaaacagcctttgatgtagcagatgaagacattttagga

SEQ ID NO: 307982 - DNA, 111 bp, Homo sapiens
ctgaaactgtcaaccatcactacttgctctttcaagacacagatttggagacacagcaggtccccacagaggaagtgtccttggaagtgctgctcagcaacgggcagaaag

SEQ ID NO: 307983 - DNA, 100 bp, Homo sapiens
agaacacccccccatggaggcgagtatgtttgtgctactgaaaggagccactaaggagcagtcttttaagattggtcaggaaattgccgaagctgtaact

SEQ ID NO: 307984 - DNA, 100 bp, Homo sapiens
gaaatggagttgcactcactgccctggatcaggatcacgtcgcagtcctaggaagtccactagcagcttctaagggaaggcagcaacaactcatctccag

SEQ ID NO: 307985 - DNA, 100 bp, Homo sapiens
tttcctcccccagctccagcctctctcatcttgggaatctgcgtcagaagtcactcgcagtcccgtcagcccagggggatatgagactttctactcggaa

SEQ ID NO: 307986 - DNA, 96 bp, Homo sapiens
cgggtggcggctcgggacggaggacgcgctagtaattccatcgacagagaggagaaaatacatctggggaatttgccgctgctctgagttccaaag

SEQ ID NO: 307987 - DNA, 80 bp, Homo sapiens
cgcgagcgaacgaccaagagggtgttcgactgctagagccgagcgaagcgacatagatctgattgacatcctttggcgac

SEQ ID NO: 307988 - DNA, 75 bp, Homo sapiens
gtgttctaatggtcagcatcgatcaattattgcttgccaattctgtaactccttgggatatcttgctgagcttaa

SEQ ID NO: 307989 - DNA, 88 bp, Homo sapiens
tttctccaaggtttgaaaagcagctggcctgcaaggcttcccttccggtgcaggagtacctgtttatgccattcgaccaggctcacaa

SEQ ID NO: 307990 - DNA, 82 bp, Homo sapiens
aaacctgagcctgatgccatttctgatttcgctgcctcatcacccacatctcccaatgcattgcctcctgctcgcaaagcca

SEQ ID NO: 307991 - DNA, 100 bp, Homo sapiens
cccaacagaccaccaaatgttgacctgacgaaattccacaaaacctcttctggaaacatcagaaattggctttggaaaaatggaaacctacatcaaattg

SEQ ID NO: 307992 - DNA, 100 bp, Homo sapiens
taaaaggaatcagaatcgagagggcctgagggccctgcagaaggatctcagcctctctgttgatgcggatgaaattaaaaggctaggaaagagatttaag

SEQ ID NO: 307993 - DNA, 100 bp, Homo sapiens
cagaaccaacgaggtggccgaatcttccttcaggatatcaagaggttggaaagaaccatgactgtattcaggaaggcacatgaactgaagcttctgtcag

SEQ ID NO: 307994 - DNA, 100 bp, Homo sapiens
gacagggggcccaagtgatgctctggggtactggcgtgggagagtggatttccgaagctgacagatgggatggccaggccatgttatgggatctcaacga

SEQ ID NO: 307995 - DNA, 96 bp, Homo sapiens
gctagtgttttcttatttagccggagtgagaagcaagaaggccctggacacagcaatatctctgggctttcacagaatccagactccaaaatgatg

SEQ ID NO: 307996 - DNA, 100 bp, Homo sapiens
tgggcagccacggccgggggcgtctttcagagcattacggtgacagagctgaatgaacctctctccaatgaagatcgaaatctcctctctgtggcctaca

SEQ ID NO: 307997 - DNA, 90 bp, Homo sapiens
gtcgaaaatggagcacgtccaggctgaccacgagcttttcctccaggcctttgagaagtgcctggaagagctgggatgtctggttgagtc

SEQ ID NO: 307998 - DNA, 75 bp, Homo sapiens
caaggatttcttgtctgtgatgcttgaaaaaggaatcttccacttgactcagatcaagaaagtcaggaagcaaga

SEQ ID NO: 307999 - DNA, 73 bp, Homo sapiens
gctgctggaccacaaaccgctgccagaaaatgcagtcattggagaaatcgatgaagaaacagattctgcgctt

SEQ ID NO: 308000 - DNA, 74 bp, Homo sapiens
tgaagatctgtctgcagaaacaatggcaaaggaggtatatcatacaaagagaatgcaacatgttatctgtgtaa

SEQ ID NO: 308001 - DNA, 82 bp, Homo sapiens
cgtgatggatccttgatagtttcaagtagctatgatggtctctggttttaaaatcaaagatgggaaaatcggagaaaattgc

SEQ ID NO: 308002 - DNA, 74 bp, Homo sapiens
aggcatggaaagttccagccggttcgagagctaggagcaggccgggctctcgccatgggtcactgtcgcctctg

SEQ ID NO: 308003 - DNA, 127 bp, Homo sapiens
accacatataccacgaggatccatctcgtctgctccaggggcaggctgaatggagatttacagacagtcatctgggtggaggacacccttttgggatcagcactgaaagtgacgccatatcccactc

SEQ ID NO: 308004 - DNA, 115 bp, Homo sapiens
cggagccgggtccccaaccgacgatggagggagacgtgctggacacactggaggcgctgggtaatagttatgcacgagtgcgagctgtggtgatgacccgagatgactcaagtgg

SEQ ID NO: 308005 - DNA, 100 bp, Homo sapiens
ttaaagaacctattgatattgaagaaggcatcaaaaaggaacaagctctccagagaatttctctgctcctcctgatgtcactacaactacctcttcctcc

SEQ ID NO: 308006 - DNA, 100 bp, Homo sapiens
tgatgaaattggaattgggtttacatgaggaactgtggctgcaccatctgtcttcatcttcccgccatctgatgagcagttgaaatctggaactgcctct

SEQ ID NO: 308007 - DNA, 51 bp, Homo sapiens
agaatgagagaagtcatatgcccggcacaatgagaactggactgatgacca

SEQ ID NO: 308008 - DNA, 82 bp, Homo sapiens
gttcctacagagattcatatgagagttatgactgcaaaattcaaaatggggctcaaggtattcgtttcatctacaccagaga

SEQ ID NO: 308009 - DNA, 75 bp, Homo sapiens
actggagagaaatcctacaagtgtgcaacacagtcactcctggcggcaaaccaaacaaaaccagagtcatctggg

SEQ ID NO: 308010 - DNA, 112 bp, Homo sapiens
ccgggccgtgcttccccaagtagtccgatggcagcggctgtgccgaggcgcccaactcaggccatcgatgatgactgtaaccagacagggcagatgacagctggatttcttg

SEQ ID NO: 308011 - DNA, 100 bp, Homo sapiens
gtcatgagcatagtgatcccattgggggttgatacagcagagacgtcatacttggaaatggctgcaggttcagaaattgaagatgttcctgctccttcta

SEQ ID NO: 308012 - DNA, 100 bp, Homo sapiens
gtcaacgccgtatccagcgactacgcggccgcggagacctacctgcggcgtcggcagctgctgctccgagatcctactatgttgacagacatgatgaaag

SEQ ID NO: 308013 - DNA, 100 bp, Homo sapiens
ggcagcgggaccggcggctctaagctcagtgcacctgtgcaacaactccatccagaagcacctggagaactcatgccatcggcatccactgcttccgcca

SEQ ID NO: 308014 - DNA, 100 bp, Homo sapiens
ccagcgtgccaaaagagcagtctcacatgaagaccaatttttacgtctagatttccatgcccatggaaggtgtgttctactccctcttctgggaatgaag

SEQ ID NO: 308015 - DNA, 82 bp, Homo sapiens
gggaagatgatcttaaaaaaaatagctcagttaatgaaggatcaacgtatcataaaagagcttgcactagcactcatttatc

SEQ ID NO: 308016 - DNA, 50 bp, Homo sapiens
taattgataacaccctgtaacagctgaattatgagcttacagaaagcctg

SEQ ID NO: 308017 - DNA, 100 bp, Homo sapiens
ggcaaggcggaagtcaatcaagagactatccagcggaggtctgcggggtttccgagaggctcgccgggatttctggcggggggctgagagcctggaggct

SEQ ID NO: 308018 - DNA, 97 bp, Homo sapiens
gcaacctgacaattctgtcgtgtcccggttcaaaactggtcaaatcaatggtgatttgctgatataccatgtcttactgactttaaagccatattat

SEQ ID NO: 308019 - DNA, 98 bp, Homo sapiens
tttactagatttgttcctaaatttaaggatgaaagtcaaacttctgcatcctcttgtgatgagactgagatacagatcagcaaccaggaagaagctga

SEQ ID NO: 308020 - DNA, 50 bp, Homo sapiens
aggcagctgtactaggactgggaacgggttttgagagtattttagaaggg

SEQ ID NO: 308021 - DNA, 106 bp, Homo sapiens
tgccttcagggaacacctggcggggacttctctgagcccaacccggccctcactaagactttgctgttccagccaacatgcgctgtggggtgcagacacccactgc

SEQ ID NO: 308022 - DNA, 82 bp, Homo sapiens
cacaacctccccctttccaatctggcaatcccagatcctcctactactaccacccttcagcctacaattcagtggcatccct

SEQ ID NO: 308023 - DNA, 100 bp, Homo sapiens
ccacgctgcgggcccgggccatggccgccgccgatgccgaggttgcacagagcattgaggatcaccatcaggaagtgattggtttctgcagagagaatgg

SEQ ID NO: 308024 - DNA, 74 bp, Homo sapiens
tagttgatgatttagttgattctctgaagatctttgtagaatttgatggctgtaactggaagcaacactcctgg

SEQ ID NO: 308025 - DNA, 75 bp, Homo sapiens
tcatctacccggagaagcaggagccctactcggcaggaattacttgaatttcgtcacagaggaaatgatcaaccc

SEQ ID NO: 308026 - DNA, 74 bp, Homo sapiens
cccatgctcacatcagtgaacaagctgtctgggctctaggaaacattgcaggttggatggcaagcatgtggtgt

SEQ ID NO: 308027 - DNA, 96 bp, Homo sapiens
tatgtggaccgagcccggtactcagccttttaaaaactggagaatctccctggaaaaggagacatgaatgtctgcaatgatacttcctgacaagaa

SEQ ID NO: 308028 - DNA, 82 bp, Homo sapiens
cgtttggctgtgacctgacggagtatctggaaagctcgggacaggatggtatcatgaactgatcactaaatatgggaagttg

SEQ ID NO: 308029 - DNA, 98 bp, Homo sapiens
aggagtcatgagcgacagcggcgagcagaactacggcgagcgggtcttatatccagatggccaggctcagatgattcaccccaagcctgcagacttcc

SEQ ID NO: 308030 - DNA, 96 bp, Homo sapiens
tcgcgtctgcttcggagaccgtaagggcatgaacaaccgggaggtgctggagcaggtggagcgaggctacaggatgccctgcccgcaggactgccc

SEQ ID NO: 308031 - DNA, 74 bp, Homo sapiens
gctacttcatattttggaaagcagtttttaagacaagtggctttctagaagatgaccatagaggaccttccaga

SEQ ID NO: 308032 - DNA, 75 bp, Homo sapiens
ctgagcagaggacgacatgttgcttttcgtggaggagagcgacttgcagttgtggaggtacagtgtgaacggctg

SEQ ID NO: 308033 - DNA, 75 bp, Homo sapiens
tcatcactttgggagttgatggtccccttcacgagagattataataccctacagacctacctggtggttctgtgc

SEQ ID NO: 308034 - DNA, 100 bp, Homo sapiens
tggttggccctgtgatccctcaagactggtccacggagtgtatgaccacaaacagccatcaagcgggagaggacctgctggccccaccgcacgacaccag

SEQ ID NO: 308035 - DNA, 97 bp, Homo sapiens
gtgcatactcacagagttagagagagggatggtgtttacagcgatagctctcctttgattgagaagattcaagcatttgaaaaatttttcacaaggc

SEQ ID NO: 308036 - DNA, 74 bp, Homo sapiens
cagccacgcatctgaccttgttgaaagggtcctcagccacgcctgaccagagcctgatgtgcagcttcctgcag

SEQ ID NO: 308037 - DNA, 100 bp, Homo sapiens
ttttcagaaagttgctggtgaataaaagcattcggcagcgtcgtcgcttcactgtggctcatacatgggtactatttttctgcctggaaataaagtttct

SEQ ID NO: 308038 - DNA, 51 bp, Homo sapiens
catccggcgctcagctgggcttgaggagacaggtactgggtgttcaaggac

SEQ ID NO: 308039 - DNA, 97 bp, Homo sapiens
cctgtttctggggcaaaaacattcaagaatgagagcgagaacacctgtcaagcaccgtggacaaggagtaccttattgttctgagagagcctggggg

SEQ ID NO: 308040 - DNA, 50 bp, Homo sapiens
agaggctcttcctcctcctcccgcgacgaaatcatagcccactaatgagt

SEQ ID NO: 308041 - DNA, 83 bp, Homo sapiens
gcgggcggcttcctggcctgggcgctccggtggcggcggaggtacatggtgcgggtccgagctgtggtgatggcccgagatga

SEQ ID NO: 308042 - DNA, 98 bp, Homo sapiens
tcatctcgtcagtgactttctttactccactggataaccctgcactgttctggttctcgaggcacatctctctctgggggagcatttccttcaacctg

SEQ ID NO: 308043 - DNA, 50 bp, Homo sapiens
tcatcgagtgtgacgtggtgaaagattattttcgaaataccagtatttcg

SEQ ID NO: 308044 - DNA, 100 bp, Homo sapiens
agtagtgttagtgatgcaaacgaacctggagagagccaaagtaccatagtgctcggccttgttctccccatgtgggccatagccctcatttcctttggtg

SEQ ID NO: 308045 - DNA, 50 bp, Homo sapiens
accggagctcgtccagctgcgtgcctagctcctgtatcagcagtgcttgc

SEQ ID NO: 308046 - DNA, 100 bp, Homo sapiens
aatttagagagcagcgtggagagtatcatctcaccaaaggaagttaaatgaagttcgaaagagattgaatgagctaagagaattagttcattattatgaa

SEQ ID NO: 308047 - DNA, 95 bp, Homo sapiens
tgcctccccagcaaacatcttagaggacgataatgaagaggagatcgaaagtgatattctcccaggagtacatcaacctcctgctgtccatgtat

SEQ ID NO: 308048 - DNA, 83 bp, Homo sapiens
caggccatctgcctgacttctgcatgctcatggttccagatgtggaatctcgtgaagacttaattaaaaatcactacatggca

SEQ ID NO: 308049 - DNA, 90 bp, Homo sapiens
cattcagacccatttccagtcatgatcaccaggagactaaagtccatcaaaaacatccagaaaattaccaagtctatgaaaatggtagcg

SEQ ID NO: 308050 - DNA, 100 bp, Homo sapiens
atttcagagctgcaaaattatcaggactcgctgattcttgagaagagtcaaaactggagctctcaaaaaatggaccatattctgatttgctgtgtttgtc

SEQ ID NO: 308051 - DNA, 74 bp, Homo sapiens
gaactcaagtcaccgtggagctccgccgccccgaaactttcaccgcgagcggagtcgctgccacaaaaagtccg

SEQ ID NO: 308052 - DNA, 85 bp, Homo sapiens
gcctccagatggaaggatatctcacgaatttgctttgggcatcgagattggtaaagtgccacctcccatcccgggtgtaggcaag

SEQ ID NO: 308053 - DNA, 74 bp, Homo sapiens
aaaatggctggccgaggctcttatgaatggcaacatacttgtttaacattgaattctgtgcaagaaagaaaaaa

SEQ ID NO: 308054 - DNA, 83 bp, Homo sapiens
tatctgtcttcggtggactccttcggcagtccacccaccgccgccgcctcccaggaccatgaatggcacctacaacacctgtg

SEQ ID NO: 308055 - DNA, 51 bp, Homo sapiens
gttttgccagcgataatacgcctcagcacaatcctggaggaagagaaggct

SEQ ID NO: 308056 - DNA, 75 bp, Homo sapiens
gaagaaactgaggcctggaatttgattaactcattcaaggttacccagttgctgaccatactccctggagccttc

SEQ ID NO: 308057 - DNA, 75 bp, Homo sapiens
tcaggcaggaagcagcccccagcctcggacgccgtggcccttgggagagagacagcatcgatggcagcaacgtga

SEQ ID NO: 308058 - DNA, 80 bp, Homo sapiens
ctcacatttgtttcattgaagaaatagttaagggccggtgggaaagtcagcaggatgtatcccaaaccacagtttccaga

SEQ ID NO: 308059 - DNA, 100 bp, Homo sapiens
agaattttactgcgaagttttgctcctggatgaatccaagttaacccttaccacccagcagcagggcatcaagggtttgtgtttagtgaatcagagggat

SEQ ID NO: 308060 - DNA, 75 bp, Homo sapiens
agctgtccaatcacctcgcaggagccctaggtcatcagtgagttctgcctcagtcagctcccaagtgaggacgca

SEQ ID NO: 308061 - DNA, 100 bp, Homo sapiens
ctgcaccctgcacggctttgtgcacggagttcacacaaaagatgttggacaatttctacaattttgcttcatcatttgctgtctctcaggcccagatgac

SEQ ID NO: 308062 - DNA, 50 bp, Homo sapiens
ctgccgtctcgactcgtggatggatttggagttccatggagtgatgagat

SEQ ID NO: 308063 - DNA, 100 bp, Homo sapiens
tgccacgcaccttctgccagctgatcctggaccccatcttcaaggaagcagatgaagccaccctggcccgtctggatctggagaggaagattgagtcgct

SEQ ID NO: 308064 - DNA, 98 bp, Homo sapiens
ggactgtgctgtcaaaccatgtcaatctgaaatgcttccagactgcacacttttacttagaggacagtacatcccctagagttatatccacacctcca

SEQ ID NO: 308065 - DNA, 74 bp, Homo sapiens
gagtgaaggacccggagccgaaacaccggtaggagcggggagattcatgatgttgctatcaaaagttgagaaat

SEQ ID NO: 308066 - DNA, 101 bp, Homo sapiens
gaatatcttcccttacaagggttatatatggaattatggtaccctccctcagtatgccaagtacatggaaaaccatagcattgaaggagtgaggcatgtct

SEQ ID NO: 308067 - DNA, 100 bp, Homo sapiens
gaagacgaccatgacgagctctagctggatgggcgcagaggctgtctctcaaggtggtctcttctgctgctagcaactcaaaaatcccaacagcactccc

SEQ ID NO: 308068 - DNA, 89 bp, Homo sapiens
cgcgagcaaggagcgcggaatcggggagcgtccggagctagctggatcctctaggcagccccatgttatagtacattgtgcagcagaga

SEQ ID NO: 308069 - DNA, 98 bp, Homo sapiens
gttggaaatggcacctatggacaagtctataagactcagcccacctgcacccaggtgaaataaacagctttattgctcacacgaagcctgtttggtgg

SEQ ID NO: 308070 - DNA, 112 bp, Homo sapiens
atctcccaaatcaagtatacagaaaatcggtgaagagaggttttgaattcacgcttatggtagtgggtgctggagaatctggtaaaagcaccattgtgaagcagatgaggat

SEQ ID NO: 308071 - DNA, 100 bp, Homo sapiens
tggaacccctagtctcaagagatcctccagcctcagcctccctgtacaacacctcaggtattgagccccactattacatctcccccaaacgcactgcctc

SEQ ID NO: 308072 - DNA, 98 bp, Homo sapiens
agcagcccagacgcggcacagagagggcctgggagcttgctgcagcttcaggttggaagaccacagacatggaaggggcccatgcctcccttagctta

SEQ ID NO: 308073 - DNA, 95 bp, Homo sapiens
ggaatgaattcagatatttccagagaatgaccacaacctcttcagtagaagggtgtcaaattgagaaccaggtagatccccaccacctacagtaa

SEQ ID NO: 308074 - DNA, 49 bp, Homo sapiens
gaaacattcactgcacagaaccggtacttttacagcgggttgatgaact

SEQ ID NO: 308075 - DNA, 76 bp, Homo sapiens
gtcagcgtgaagcgtgatctgctcttccaagccctgggccgcacctacagggatcatggaagctgataaagatgac

SEQ ID NO: 308076 - DNA, 75 bp, Homo sapiens
ggatctggaggagcagttgtctgatgaagagaagccctttctaaggcacaaaatgatgtgatggaaatgaagatg

SEQ ID NO: 308077 - DNA, 98 bp, Homo sapiens
ccctgaggatggacccaggagatcccgctggtgaccctgccgctggcgagcgccaccgcatgggaagcatcggagagcaagagacaggtccagatcct

SEQ ID NO: 308078 - DNA, 82 bp, Homo sapiens
cacccaccgccgccgcctcccagtgggtaattccagaattgattggccataccattgtcactgtattactgctcatgtcatt

SEQ ID NO: 308079 - DNA, 82 bp, Homo sapiens
ggcagatggacaccaacaatgacggtttgcctggatttactgatctgtttgttctggaatacgtgtatgtgggaagttgaat

SEQ ID NO: 308080 - DNA, 75 bp, Homo sapiens
ctgttctcctggcacccggtgcttatgtctttggctactagacgcttgaagcaaagctgccatcccagaagacga

SEQ ID NO: 308081 - DNA, 98 bp, Homo sapiens
taagcaatgtgcaggaatatgatttggataagaccatcatcatgtggaaactgaccagggatgagaccaactatggaattccacagcgtgctctgcgg

SEQ ID NO: 308082 - DNA, 91 bp, Homo sapiens
cacagcaatggagaagagaaagcacaaagcatggagaccctccctccaggtcatgaaacgagtgcgtaccgagcagattcagatggcagtg

SEQ ID NO: 308083 - DNA, 100 bp, Homo sapiens
ggatggagagatagaaaccgagggagggagagagacagcgatcgagagagaccggagaggtggagagttggccacggacagagcgaaggggagaggatgg

SEQ ID NO: 308084 - DNA, 101 bp, Homo sapiens
agtgcgtggaggagctgtgcagccgcgaggaggcgcgggaggtgttcgagaacgaccccgagacgttaagtgggcagaccaacatccacctcagcaaaaac

SEQ ID NO: 308085 - DNA, 100 bp, Homo sapiens
ggctgcggatggagttgggtgctccagaagagatggggcagagatgccctgtatccaagcccaatatgggacaccagcaccgagtccgggaccccgtgac

SEQ ID NO: 308086 - DNA, 103 bp, Homo sapiens
atgaagtaaagcccacagagatctacaaccttggagcccagagccacgtcaaaaacattgagctcaaggtggaagtagaaagtctgaagcgggaactccagga

SEQ ID NO: 308087 - DNA, 87 bp, Homo sapiens
gagaggatcggggacccgctgatcttccagctcccctcacccaacgtcgtgcatgtctgactcagggaatgaccttatatagctacg

SEQ ID NO: 308088 - DNA, 83 bp, Homo sapiens
agggatgtgacattttctggctgcaacagctgttaggcaattttcttcagtggtatggcattttctcaaataaaactctgcaa

SEQ ID NO: 308089 - DNA, 75 bp, Homo sapiens
cattttttccagaacacaaaagggaaactgaacagccaagactcctataacaattttaccaacaacaaccctggc

SEQ ID NO: 308090 - DNA, 100 bp, Homo sapiens
tcagaaggagctagctgaaataacccttgatcctcctcctaattgcagggtgactatgaccagagcaggaccaaagtgctgcacatgagcctgaacccca

SEQ ID NO: 308091 - DNA, 83 bp, Homo sapiens
ccaagagagacagagaacactggatagacttcgaacatttaaacaggaaaatgttctgctgctgccctggatgttcttgcaaa

SEQ ID NO: 308092 - DNA, 96 bp, Homo sapiens
gaagaccgcagtgggataaatctcaaagatctcgtacaagatccttctttcttggagctcggcggcacaaccagcaccatctggtcgcgatggtgg

SEQ ID NO: 308093 - DNA, 74 bp, Homo sapiens
ttggctggaggccaggtggacaacctgtcatcactgacttctgaaaagctcccacatcaggacgagaaggagcc

SEQ ID NO: 308094 - DNA, 115 bp, Homo sapiens
gtgggaagtcaaacgtaagatgaaagctattggatggggaaagaagactctggaccagtgagtgaagatcttgtaatcaggttacgtcgaccccctctaagatacccaagatatg

SEQ ID NO: 308095 - DNA, 75 bp, Homo sapiens
ctattcgggcatcttggctcctccttgattcacttcttcaactgagatggacatgatataatctccattgagtca

SEQ ID NO: 308096 - DNA, 78 bp, Homo sapiens
ggatcttcaaccacctcgagcggctgctggacgaagagctggtgatgctgctggagtggtggtcgggcacggaatgca

SEQ ID NO: 308097 - DNA, 85 bp, Homo sapiens
ggccggcagtttccgtgggtctgtgaagaggtcggcggcccctgcgggcgccagtcagaattcagcttagagaactatcaacaca

SEQ ID NO: 308098 - DNA, 100 bp, Homo sapiens
aagacccagtgaacaaatccgggggcaaggccaaaaagaagagctcaggccccggggcctccagcggcaccagcggagaccacggtgagctcgtcgtccg

SEQ ID NO: 308099 - DNA, 50 bp, Homo sapiens
ggaatggagaaggaagaggagtcgggtcctgacttgtcctgggcaagcca

SEQ ID NO: 308100 - DNA, 98 bp, Homo sapiens
tcgggctcttgggcgctgctctgagatcatggaagggaagtggttgctgtgtatgttactggtgcttggaactgctattgttgaggctcatgatggac

SEQ ID NO: 308101 - DNA, 98 bp, Homo sapiens
ttgacagaaatgaagaagacattggtgctggagaccagcaaagaatggccgagtggattctgaggaccggaggagccgccactgcccgtacctggaca

SEQ ID NO: 308102 - DNA, 100 bp, Homo sapiens
ctcacaagtgcagcgtccagactctcctgaggagcgagggcagcggtcttaattctttttatgatcaacgagaatacatagggagaagtgttcattattg

SEQ ID NO: 308103 - DNA, 101 bp, Homo sapiens
acgagagcgacatcctggaggaaagcccgtgtggtcgctggcaaaagcgacgggagcagttaacaagcacaagccctggctggagcccacctaccacggca

SEQ ID NO: 308104 - DNA, 122 bp, Homo sapiens
gaagtagtagttgttgagcagagggaaagggataggagaaggatgtggactgcagtgctgcagtgccaggtcttgactccactaacggggacttctcatacggctttgaacttggaccttgg

SEQ ID NO: 308105 - DNA, 100 bp, Homo sapiens
gacgggaaggcgggagacgagaagcctgaaaagtcgcagcgagctggagccgccggagatacttggcatatcgaaattttatgattgacacgtatcgtct

SEQ ID NO: 308106 - DNA, 90 bp, Homo sapiens
acaacctggcggtgctcgagtgcctgcaggatgtgagggaggataacttcaaactaatgtgtactaatgccatgatttacaataaaccag

SEQ ID NO: 308107 - DNA, 90 bp, Homo sapiens
cccgttcttgcctcaggccagtcgcctccaggccaagagggatccttcacccgtgtctgggctgggttacgacccctacaaccctgagct

SEQ ID NO: 308108 - DNA, 100 bp, Homo sapiens
aaaaataaacaagatgtatcactttgttctctacttgcactgatatatgcccataaaatgagtcctaatccagaacttgaagaatccaggcagaaatgcc

SEQ ID NO: 308109 - DNA, 75 bp, Homo sapiens
aaggggatgaggacgacgatgaagtcagtgaggagattgtgccttgccagtacatgctgcagacaatgaaggatg

SEQ ID NO: 308110 - DNA, 50 bp, Homo sapiens
cttcagcagcagcagacgtttggaaagatgacagtcgtctagaggagctc

SEQ ID NO: 308111 - DNA, 75 bp, Homo sapiens
gctgcctacagaaccgtcccaaaatatggcaaagaaacctattctgaggaggagctggagttctgtgaaaagctg

SEQ ID NO: 308112 - DNA, 50 bp, Homo sapiens
attggatgaagtggctccggagatgcccttgatgagcctccctatttgac

SEQ ID NO: 308113 - DNA, 75 bp, Homo sapiens
ccgcgcagtccgcgcagccctcatcgcaactgggcccgcgcgcaggacgtctgctcactggagatgacacgtgcg

SEQ ID NO: 308114 - DNA, 100 bp, Homo sapiens
atacagaactgccccatcgatgtgcggcgtccgctgtataagatgaggtggaaagtgagaaatggtacctgtctacagacttcccttcaacatccatcaa

SEQ ID NO: 308115 - DNA, 78 bp, Homo sapiens
tttggcattgacatttaattttagggtcctttatatagaagggagagtagaaaatattttcagaacctggaagcttat

SEQ ID NO: 308116 - DNA, 100 bp, Homo sapiens
gtgtgtgctgcgttcacaggtgtttctgcggcagatatctcttccaaacgcatgatgaaggaggtcttgtcaacagggcaaggcaatacagaagtgatcc

SEQ ID NO: 308117 - DNA, 96 bp, Homo sapiens
gccagacatgtcttggagaaaacccatatatccgaatgatggctgatcactgggaaactgcacctcgtcacatgatgcgtctagatattcgttctt

SEQ ID NO: 308118 - DNA, 78 bp, Homo sapiens
agccctggaaacccagttcagggacagtgtggtgaagaagaggatggagatgaagatgaggaagctgagtcagctacg

SEQ ID NO: 308119 - DNA, 100 bp, Homo sapiens
tgaagccctacgagattcacaccgtcttcggtctcctggggtcggcgccgagtgggaggatggcggaaggggggccctcagcctcttggccttgaacggg

SEQ ID NO: 308120 - DNA, 109 bp, Homo sapiens
agcgccagcggccgagcgggcggcttcctggcctgggcgctccggtggcggcggaggtgtcccgacccaggctaagcttgagcatggctgagcaggagcccacagccga

SEQ ID NO: 308121 - DNA, 82 bp, Homo sapiens
ctcggctgcgggaaatcgggctgaagcgactgagtccgcgatggagctgtcccccgaggcagcctatgatgtgctgagcgtc

SEQ ID NO: 308122 - DNA, 100 bp, Homo sapiens
tatgtatttacctacggagtcagattcctgaaaaaggacaaaactttcggtttgaagaataagaaaggagcaaagcaacagaagtttatcaaggctgtca

SEQ ID NO: 308123 - DNA, 101 bp, Homo sapiens
cggatcgctctcgcccaccgcccgaaccgagaaccagcagaaatccaccaatgtagtctatcaggcccaccatgtgagcaggaataagagagggcaagtgg

SEQ ID NO: 308124 - DNA, 98 bp, Homo sapiens
gctgatgaagatgatgacgatgatgatgaagaggatgatgatgaagattgatattcactgatggactccaaagaatcattaactcctggtagagaaga

SEQ ID NO: 308125 - DNA, 74 bp, Homo sapiens
gcggagagagaggtggagtccggcccccgaaagaggttatttctcaaactctgaggctgcggagttcacacatt

SEQ ID NO: 308126 - DNA, 83 bp, Homo sapiens
acagtcatctttgctggcttcagtgcagagtccttggctgggaggatcaatgatggtactccaaagattcaggtttactcacg

SEQ ID NO: 308127 - DNA, 73 bp, Homo sapiens
ccgagagcgtgaccgagagcgcgaatatcgtcatcgttagaagtgacatgaaaaaggttggtgtcaccgtggt

SEQ ID NO: 308128 - DNA, 100 bp, Homo sapiens
caaacttatagatattgcacgacagactgcacagggcatggaccctgaatcgtgtgcacttacttgggcgagtgggtcaggaccctgtcttgagacaggt

SEQ ID NO: 308129 - DNA, 50 bp, Homo sapiens
gaacgatctcgtaagaaggattcaggctgccagttcccaagaagagccca

SEQ ID NO: 308130 - DNA, 83 bp, Homo sapiens
gtgacctatgacaaaacgccgctggagaaggatggcatcaccgttgtggtgtccctggccagtgtccttccacctgtccacaa

SEQ ID NO: 308131 - DNA, 51 bp, Homo sapiens
ccaccatgagaacaagagttgttagggaaatatcggctcatcaaattgggg

SEQ ID NO: 308132 - DNA, 100 bp, Homo sapiens
gaaaggaacaagggaaagagccggtgaaggggcagaacaggcaggatcactcaaacaacgaccgtgaagtgccaccggacttaaccaagagacgtaaaga

SEQ ID NO: 308133 - DNA, 75 bp, Homo sapiens
ggtccctgaagagggaagacacgcggaaacaggaattacatgaacgacagccttcgcaccgacgtcttcgtgcgg

SEQ ID NO: 308134 - DNA, 80 bp, Homo sapiens
gccgtgattcagtataacctagaccagtcctgtttgcctcatgatatcagcaatggctgccatccggaagaaactggtga

SEQ ID NO: 308135 - DNA, 50 bp, Homo sapiens
tccagaccgcaattaacaatggtacagattgactttgaagatgtgattgc

SEQ ID NO: 308136 - DNA, 51 bp, Homo sapiens
agtgtaatcattccactacgagaggttacaggaggttccagtggcatcggg

SEQ ID NO: 308137 - DNA, 98 bp, Homo sapiens
actgggaacctttgccagagcatgtgaggaaggccctccagtcccccataagccccatcaggaactttgtgagaattttaatgcatggaaaagctgtc

SEQ ID NO: 308138 - DNA, 80 bp, Homo sapiens
tgtaaattcagactatcggccagaaatgactatggtacaaggttgccaacttggcctgttccatctcaaataatgaagaa

SEQ ID NO: 308139 - DNA, 100 bp, Homo sapiens
gccgattatgtccattgttctcttggagcagctggtcatcatgggcttacggcaaccagctcctttttctgatgaaattgaagttgactttagtaagccc

SEQ ID NO: 308140 - DNA, 83 bp, Homo sapiens
gtggaagcggccaccgactactgtcagcagctgtgccaggtttttagaacttcagccataaaaatgggcagaattttccttga

SEQ ID NO: 308141 - DNA, 76 bp, Homo sapiens
ctggcatgtttctacacaacaaaacattcatggagggggaaactgttggtggtggtgctgtgcaggagagagcgcc

SEQ ID NO: 308142 - DNA, 75 bp, Homo sapiens
acaaccgtggctcacaagatgaaagagcacggccaagattaacacccctcctgcaggaggaagacagccaccagc

SEQ ID NO: 308143 - DNA, 74 bp, Homo sapiens
accaggtcatggcagccatgcctctgaaagctcaataccaggttcgttccaccagtcataaaccagatgaaatc

SEQ ID NO: 308144 - DNA, 85 bp, Homo sapiens
ccagaggagccacagcgtctgctggtgttcctgcatgaagccaccgtgcgcctgatggcaggagccagccccacccgcacccacc

SEQ ID NO: 308145 - DNA, 100 bp, Homo sapiens
ctccctgcctggacccctactattgcaacaaggaactgacaatggcgaagcccttcccgaatccatcccatcagctcctgggacactgcctcatttcata

SEQ ID NO: 308146 - DNA, 78 bp, Homo sapiens
tccgcatcgaggacttcatccagtttgctacggtctacggggcagagcagcttcgagagctgtgcccaggagtgaaca

SEQ ID NO: 308147 - DNA, 150 bp, Homo sapiens
aatctgggcggcgtgcccagcaagagattaaagatgcagtacgccacggggccgctgctcaagttccagatttgccaatgttttcagttgcaccaagcttagccaccaatgcatcagcagccgcctttaatccctatctgggacctgttt

SEQ ID NO: 308148 - DNA, 73 bp, Homo sapiens
gccctagccttcgcagaaacgatggcggaggaagaagcagcaagatggaacttattgatgataacaccgtagt

SEQ ID NO: 308149 - DNA, 136 bp, Homo sapiens
cgagacctggatgaaagacaagtccgaggtggaggtcgtggacctggtcctgaaacttcgtgagaagctgtacttagggaaaaactcggtgtgaaggattccctctgagagatctgactacttcttccatttcatc

SEQ ID NO: 308150 - DNA, 101 bp, Homo sapiens
cctggaggtgatgctcagcgtgccgaagcgagccaatgatgccatgcacctcagcatgctggaagttaataacgacatgatagtcactgacaacaacggtg

SEQ ID NO: 308151 - DNA, 90 bp, Homo sapiens
gagagcattacaagccagcctctgggaccgagagtgcttcatgttggcggaaccattgtattgttgcttagtgaagatcaccacaggcgc

SEQ ID NO: 308152 - DNA, 125 bp, Homo sapiens
ggattcctctctaggactgaaccaagacttacccgaagttgccgcggggccttccgatcccctgctgacaaacgggctcatcataatgcactggaacgaaaacgtagggaccacatcaaagacag

SEQ ID NO: 308153 - DNA, 87 bp, Homo sapiens
aggatgctgggaaatctcctgctcgaaatagaacctctgtattactggcaacagactgaagatgatttgacagtaaccatacggctt

SEQ ID NO: 308154 - DNA, 50 bp, Homo sapiens
ctagaccttgccaagatggcacaggttatgaagacagtatggagtttcca

SEQ ID NO: 308155 - DNA, 75 bp, Homo sapiens
cagcatgggcatcaccttgatagtgggcccagaatactcagtacctctcaatgaccctcagacgctgtaggaaga

SEQ ID NO: 308156 - DNA, 100 bp, Homo sapiens
tttcagacggtggatctatgggaagcaatcactgcttgagaagcagagagtcctgatccagcagcacgaggacgccaaggagctcaaggagaacctggac

SEQ ID NO: 308157 - DNA, 100 bp, Homo sapiens
cttaattaaccctcaaactgcccagtgagggtggactccattatgctggtggaagagggcttcagtgtgacgagtgtggatgccagtgacaagatgctga

SEQ ID NO: 308158 - DNA, 83 bp, Homo sapiens
cccaccgctgccgaaatgaagtataaggtgttggagagcacaatggctgaacaagtccttcctcaggctttgtatttgagcaa

SEQ ID NO: 308159 - DNA, 100 bp, Homo sapiens
cgacgaggagggagaggacggagcccttgatgacgagggccacagtgggattaaaaagaccactgaggagcaggtgcagagcgggaacagcttccacgtg

SEQ ID NO: 308160 - DNA, 75 bp, Homo sapiens
tgcagaggtcaatctttatgtacaggcagaagaagagttcaacatagagaaaggtcggcttgtgcaaacccaaag

SEQ ID NO: 308161 - DNA, 97 bp, Homo sapiens
cgccatcttcgaacttagacttccggaaggactttggcgaggtttcctccagcttatggaggcatatctgaggtgaatcaacctgccgaattgatgc

SEQ ID NO: 308162 - DNA, 100 bp, Homo sapiens
gcatgtttgctgactacctcgcccacgagagtcggagaatccacactggtgatagaccatacaaatgtgcacacccaggctgtgagaaagccttcacaca

SEQ ID NO: 308163 - DNA, 88 bp, Homo sapiens
acgcttcgctggccatttaggagctctgctcaaagccagacggaatccagaaccctggctgaaattgcaaaagcagagctggacggca

SEQ ID NO: 308164 - DNA, 82 bp, Homo sapiens
cactggcattgctgtgctaggaattgtcatgctgaaacggcggatggtggttcctgctgccctcaaggtcgtgcgtctgaag

SEQ ID NO: 308165 - DNA, 80 bp, Homo sapiens
gcgggagctgtgccagggcctgggccagcctggctctgtgctgcgggtgctctggctggagtgcaatggtgcaatctcgg

SEQ ID NO: 308166 - DNA, 110 bp, Homo sapiens
gaaacaataacagccatgaccaacctggccatagtaaactgtcaagtatatgggagaaatgcacttaatctgaaggtccagtccaggtgcagcagcaaggagaacattct

SEQ ID NO: 308167 - DNA, 101 bp, Homo sapiens
aagtgaccaagaacgtgagcaagcccaggcacagccgacgccgcgggaaatgcgtgtactgccggaagcggatgaagaaggtgtcaggtgcctgtatccag

SEQ ID NO: 308168 - DNA, 80 bp, Homo sapiens
gcgaccagctggtctcggcttccagctcgcgggttcagggaaggtgcgcggcccccgccatcccgccccgccgccctgcg

SEQ ID NO: 308169 - DNA, 100 bp, Homo sapiens
ggcccgggcgccatcgagccttggcggcggacgtgcagccctgggcgctgcctatggcacagccaagagcggtaccggcattgcggccatgtctgtcatg

SEQ ID NO: 308170 - DNA, 98 bp, Homo sapiens
aaaggaacctgttgataaatgcaaaacagtggctgttgcagagtgaaccagaggaaatgcctccagaagcaaagatgaggatgaagaatattggaagg

SEQ ID NO: 308171 - DNA, 100 bp, Homo sapiens
cacaaaatggctgatggaggaagccccttcctaggtcggagggactttgtctacccttcctcaacccgagaaccctctgcaggtcctggtgaacgccatc

SEQ ID NO: 308172 - DNA, 100 bp, Homo sapiens
gatgagggcatccgcacccgctctaagtcagccaaaaagatggtggccacacagcaggagatgatggacgcgcagctgaggctccagctgcgggactact

SEQ ID NO: 308173 - DNA, 80 bp, Homo sapiens
acatatgtttgtaaaacaagttgatatggatcatgtcatgaagtgaaactggaacgccaagctgaagaagaacgaatacg

SEQ ID NO: 308174 - DNA, 98 bp, Homo sapiens
gccaaggtgctccagcgcaccaacggcgaccggatccggttcattctggacgtgcttctgcccgagctcctggcctgcgcggcttccggatccttggt

SEQ ID NO: 308175 - DNA, 100 bp, Homo sapiens
gctggctgaggaaatcgcctcccgagaagaagttgaggcgctatattgcagcaattctccggaaacggaaattagactattatttacacaaactactccc

SEQ ID NO: 308176 - DNA, 100 bp, Homo sapiens
gatttgggagaagaaaatttcaaagccttttaattggccttggtcctcacagctccaaaaagaaacaggatctcgataagctctatgagctgaagtccaa

SEQ ID NO: 308177 - DNA, 97 bp, Homo sapiens
tatattccggaggtagaaggcgtagaacaggaaagcaaaggctatgacttcgaatctgaaacagacacagagacaattgccaagctcgttaagtata

SEQ ID NO: 308178 - DNA, 75 bp, Homo sapiens
ctccaagccaaaatcacagctttgagtgagaaacaggaactttatattgctgttggaatatctggagccatccaa

SEQ ID NO: 308179 - DNA, 75 bp, Homo sapiens
gccagcggacccgacggctgagagtacacagtgtatagtcaagccagcaccatgagcattccggttgcaatggag

SEQ ID NO: 308180 - DNA, 75 bp, Homo sapiens
gtctgggtaaaggaacaaaaggttcaggagatttttatgcaagggacatggcttgcagtgtggcaggcataactt

SEQ ID NO: 308181 - DNA, 82 bp, Homo sapiens
catggacacagttttgacagtaattcttttgggccggattttttatcaagcagaaatgcatcgaacaacgagaatcaagatc

SEQ ID NO: 308182 - DNA, 80 bp, Homo sapiens
acccatccgcgacttcctggccatcgttttcttcgcctccatagacaatgcagatcttcgtgaagactctgactggtaag

SEQ ID NO: 308183 - DNA, 50 bp, Homo sapiens
gggacgtggggtccaccggtacagacatttatgcagtgtgtgattctttc

SEQ ID NO: 308184 - DNA, 100 bp, Homo sapiens
aggacaacatcaccgtactgcatgtgaagctcaccgagacggcgatccgggcgctcgagacttaccagagccacaagctgtttgcagacaaggtcccaaa

SEQ ID NO: 308185 - DNA, 98 bp, Homo sapiens
agatccagccacaggagccgtgaaggagaagatcacagcttttgtggtggagaggggcttcgggggcattacccatcagggagtctgctccaagcaga

SEQ ID NO: 308186 - DNA, 82 bp, Homo sapiens
ccagagcctcagcaggagcctgttctcatcaccatggcaacaggctgcccagagaaaactgcgccaggccagcaccaacgtg

SEQ ID NO: 308187 - DNA, 87 bp, Homo sapiens
ggaaggtggtggtcgtacgctgtgaaggcatcaacatttctggcaatttctacagaaacaagtacacaacatttgcctgcaacaagg

SEQ ID NO: 308188 - DNA, 100 bp, Homo sapiens
acatacaagtctgagatcaaatactcctgtcaggagccctattacaagatgctcaacaataacacaggatacttatccgctttttccccttggagtcctg

SEQ ID NO: 308189 - DNA, 99 bp, Homo sapiens
ctcgacgtcttgcctgtgtcccacttgttcgcggcctatagactagacgcttgaagcaaagctgccatcccagaagacgacatgctctcagcaaccccc

SEQ ID NO: 308190 - DNA, 82 bp, Homo sapiens
ttgacatttaattttagggtcctttatatagaagggagagtagcaagccctggatgaaaacatggacctcttggaaggtata

SEQ ID NO: 308191 - DNA, 74 bp, Homo sapiens
cgacatgagtgatgtggaggaaaacaacttcgagggcagagtgccagatgcaattaaaaagtgtcagagggctg

SEQ ID NO: 308192 - DNA, 100 bp, Homo sapiens
cgtcgataccttgaaatttctcagtgagaacaaatgccctttggatgtgaaagacaaggtatcaatcacggagatcttaatgaccataatattttaatag

SEQ ID NO: 308193 - DNA, 75 bp, Homo sapiens
acagaattacagagtatgatggttgaagctttgagagaagcagcaactgctgttgagcaagagaaagaaatcctt

SEQ ID NO: 308194 - DNA, 127 bp, Homo sapiens
ccggctgcagatagagattgggaagctgagggcagagttggacgaggtcaacaagagggtgagaactctgtctcagtcgacgggaagtgcagtgactccacgctactgagcaacttgttagaagaga

SEQ ID NO: 308195 - DNA, 108 bp, Homo sapiens
tatctgtcttcggtggactccttcggcagtccacccaccgccgccgcctcccagtaagactttgaccccgacgcaggcttcagtgattgccgcggatcagaagcctga

SEQ ID NO: 308196 - DNA, 51 bp, Homo sapiens
agcccgggaccgtttaaaaaactgttgcaagtcaccaatgttctgtctcag

SEQ ID NO: 308197 - DNA, 50 bp, Homo sapiens
ccctggaggtggtagcaaggttccacagtctaaagaatcctcgtctgtct

SEQ ID NO: 308198 - DNA, 97 bp, Homo sapiens
gctcaactttaaagaagcttctacacactggaaattctattaagggtcctaacctgattataaaacaaccagatgagttgctggacagcatgtcaga

SEQ ID NO: 308199 - DNA, 74 bp, Homo sapiens
caaatatccaacagcctttctggatttctcagagtcctatggatagtggagatgacccctgagaagttcagtgt

SEQ ID NO: 308200 - DNA, 110 bp, Homo sapiens
gccggctacggcgaatacagtgaagatgtgcacctgcacacgcccccggcacctgatctatccatactaatggaaatgtaactggaactgactctgatgataaaatcaag

SEQ ID NO: 308201 - DNA, 100 bp, Homo sapiens
gcctcgggcaccatgagcgacgtggctattgtgaaggagggttggctgcacaaacgagtttgcccgaccatctgtaagtcacacggctgcaccgccgaag

SEQ ID NO: 308202 - DNA, 100 bp, Homo sapiens
gaaagatgttagaattgaagcctataatatttgtcacctgaactacttcacattttccccaatatatgtccaatatcagatggaaatgatgcggagcctt

SEQ ID NO: 308203 - DNA, 100 bp, Homo sapiens
agacattcaacacctttacatttagcaggtgttggagagcacaatggctgaacaagtccttcctcaggctttgtatttgagcaatatgcggaaagctgtg

SEQ ID NO: 308204 - DNA, 82 bp, Homo sapiens
atttgtctgccaaacaactgcagatttccatggtgtcagtgattcatattcctgataggacttataaactatcctgcagaat

SEQ ID NO: 308205 - DNA, 96 bp, Homo sapiens
ctgcagttcctttcttagcttcggataatgaagaggaggaggatgagaaaggcaacagcggaaggtggtattaaagataatcaaacattatcaaga

SEQ ID NO: 308206 - DNA, 96 bp, Homo sapiens
ggcagtggctacatcggaagagtcttcggcatcgggcgacagcaggtcacagtggacgaggtgttggcggaagatcaactcacaatgaaatggaga

SEQ ID NO: 308207 - DNA, 100 bp, Homo sapiens
gtgatcttggcatcaaggaagggatgcacatcatcacaccatcagcttcagagaatggcagccatttatttgtcccgtgttcccagaaatgaatgctatg

SEQ ID NO: 308208 - DNA, 119 bp, Homo sapiens
tccgttcatttacaagttattttctcttcttctgaaaaagagatcttgggttttgagctcatcttcatcattcatatgaggaaataagtggtaaaatccttggaaatacaatgagactc

SEQ ID NO: 308209 - DNA, 51 bp, Homo sapiens
agttatgtggctcaaatgattgtgatatttggagttcttacaacatggcag

SEQ ID NO: 308210 - DNA, 101 bp, Homo sapiens
aacaagaatgtgaacttgccattactgacctggagagcggccgtgaagatgaggctggcctgcatcagagtcagagccatgtccattggagcccgttccca

SEQ ID NO: 308211 - DNA, 50 bp, Homo sapiens
cactggaagtctcactgtctcgagtatttattacagtatcaggagccaat

SEQ ID NO: 308212 - DNA, 74 bp, Homo sapiens
gggaacgtggaaagcgcatacaggaccctaaacaggtttgaagatcagcttcagcaatggttgtctgaagactc

SEQ ID NO: 308213 - DNA, 49 bp, Homo sapiens
ccaaggtgtacttcatctacgaggctgacgttcctcagggagtgattcg

SEQ ID NO: 308214 - DNA, 100 bp, Homo sapiens
cggcccctggagatgattgagccgcgcacgctacagtacaaggacaagaagaggcaagcatctcctcatctccaggatgtgaggctggaggggaatccag

SEQ ID NO: 308215 - DNA, 83 bp, Homo sapiens
atctgtgtgcccacagctcctggagccccacaggttcgtgctggccgtgggcagcgccgtctttgatgccatgttcaacgggg

SEQ ID NO: 308216 - DNA, 82 bp, Homo sapiens
catcatacaccggctgttcgaggccttgactgtaggcagatcgggagcggtgccgagaaaaatttccttactagatgacatt

SEQ ID NO: 308217 - DNA, 99 bp, Homo sapiens
cggcatcccgggatccggagggtcacttccctcgctgcatccccattgtgcaactgccagtctaaaaattgatatagataatagaatctgtccctccag

SEQ ID NO: 308218 - DNA, 83 bp, Homo sapiens
caagtcaaacgcagaaggactgcctcactgagcaaccaagaatgacccagcagatggctgggatgaacttctatggagccaat

SEQ ID NO: 308219 - DNA, 73 bp, Homo sapiens
cggatcccggagagccccggagtgagcggagtagcgagtcggcaacccggagcattcgttcagtcagagagca

SEQ ID NO: 308220 - DNA, 74 bp, Homo sapiens
taggagtgaatataaaaggacttcatctcctcaacatggaaactaagactcagcccgcctgcacccaggtgaaa

SEQ ID NO: 308221 - DNA, 82 bp, Homo sapiens
aaccacaagcaggtccaaagagagagattttttatcaagcagaaatgcatcgaacaacgagaatcaagatcactgagctaaa

SEQ ID NO: 308222 - DNA, 75 bp, Homo sapiens
tgtttgcaacctttaaggaagactgaaaaggcattcctgaagcatccaatggagatcttcgtggatgatgagacg

SEQ ID NO: 308223 - DNA, 82 bp, Homo sapiens
gggaccacggtcaccgtctcctcagttccagggtctccctccactgctgtagtaacccgggtccggggcctcggtggtgctc

SEQ ID NO: 308224 - DNA, 100 bp, Homo sapiens
aacctgtgaccacccctgaagaaattgcacaggatccaatgagttccacctacatagaggaattgggtaaaagagaagtcacaattcctccaaaatatag

SEQ ID NO: 308225 - DNA, 82 bp, Homo sapiens
tcaccctctcgcctcgggtctcgggggccgctctgggatcccggccaccagcaattgtccgcattttgaaagcgaagcagaa

SEQ ID NO: 308226 - DNA, 80 bp, Homo sapiens
gtttggctataacctctctatcatcaatgccccgaccttggtcctctcagggtgcgccatcattgtccgaggtcagcctc

SEQ ID NO: 308227 - DNA, 75 bp, Homo sapiens
cttgtgaatccaggaagagagactgactgggcaacatgttattcagagctgtccagttctcccccaggaccctac

SEQ ID NO: 308228 - DNA, 98 bp, Homo sapiens
aggaggttcgagatcacatgcaggactctttcttaatgcagcctgaggttgggtatctacagccattggttgctgttcaggtcagctttgctcctaac

SEQ ID NO: 308229 - DNA, 100 bp, Homo sapiens
tctggagggattctggcatcagggaggctttcagccggagaagcgagtttcagctgtggcttttcatggcctgccactgaaaatcaagaaagaaccccac

SEQ ID NO: 308230 - DNA, 95 bp, Homo sapiens
accgcgggccctgccctgggctggaacgaccctggtaatgctgatgcttcaagtcttggaaccacacttcgagaatcactgttataatgtacagc

SEQ ID NO: 308231 - DNA, 100 bp, Homo sapiens
caccaaagaagagaaagacaaggatgaccaggaatgggaaagccccagtatcccatgttccgagcccctccaccactgccccctgtgtactcgatggaga

SEQ ID NO: 308232 - DNA, 100 bp, Homo sapiens
tcgctttgagaaggagcagcaacaactcaactggaagcagatcctgatggctgactcagaagcactcccctcccttgctggggacccagtggctgtggaa

SEQ ID NO: 308233 - DNA, 100 bp, Homo sapiens
gtttttgtcttttgatttcaagagttaggagctcgagaaccgtttggcaatatgtacgacgcggatgaggagcattggggagtcagcaatgtccgttgtg

SEQ ID NO: 308234 - DNA, 89 bp, Homo sapiens
aagatagtgcctttcagccctaccagagtcaagggtccagagaaggaggagaagttgagacaggcggtcaagcaggtgctgaagtgtga

SEQ ID NO: 308235 - DNA, 74 bp, Homo sapiens
aaatgaagtataataccaagaaagccccacttggtcctactgctctgttggctcatgaaataggttttggaagt

SEQ ID NO: 308236 - DNA, 100 bp, Homo sapiens
tgccaaaatggcgaccggcaactactttggattcacccacagcggggcggcggcggcggcggctgcggcccaatataggaggccccgtgtgggccgcggc

SEQ ID NO: 308237 - DNA, 89 bp, Homo sapiens
tatggagtaaacctaattctgcccttgatgtcacaggatctcttgaaggggtttgttaaagttgttaagaataaggcctactttaagag

SEQ ID NO: 308238 - DNA, 101 bp, Homo sapiens
tagcttggatccttgtgggcatgatccataatcggtttcaagtcttatgatgtaatcagcgcgatttcacttcctgaatttcgatgaattctaagacatgg

SEQ ID NO: 308239 - DNA, 71 bp, Homo sapiens
ctatcatcgtctcctgtggctgggacaagctggtcaagaggttggaaagaaccatgactgtattcaggaag

SEQ ID NO: 308240 - DNA, 116 bp, Homo sapiens
ggcacttcattggccacctacagaaacaaaatgtcaacaaattgatgggctggtgcagtggtgtcatcttggctcagtgcagcctcgacttcctgggatccagcgatcctcccgct

SEQ ID NO: 308241 - DNA, 73 bp, Homo sapiens
gtgggtatcgaggcggacgacgaccggctcaacaaggtggctgcattgatgacaccatcctcagcaggcaggg

SEQ ID NO: 308242 - DNA, 75 bp, Homo sapiens
aaaaagcagaaagtagatgaagatgagattcagaagatgcacatgtgtgcctggatgattgatagcttcggaaat

SEQ ID NO: 308243 - DNA, 100 bp, Homo sapiens
cgacggacggcagcggccaagcaagaagaaagacgtggcagcaagcgggagtcggggatagtgtcatcggttcgatgccttcaattaagttgcagagttc

SEQ ID NO: 308244 - DNA, 75 bp, Homo sapiens
tctggaccttcatggagaacagccaagaaatggaccttgtccgggaggaggaagccaagaatctggtgagcgaag

SEQ ID NO: 308245 - DNA, 98 bp, Homo sapiens
ggtgcccagaggactttcttccagcttctgctgtccttctttgtggagagcaaggtaaaagttttgtttgtgagaaacttggctactacggtgacaga

SEQ ID NO: 308246 - DNA, 99 bp, Homo sapiens
ttttgccttcatgatggacctccttatgcaaacggtgaccctcatgttggacatgctttaaataaggcattgggatcccgtggcagttgcagcactgaa

SEQ ID NO: 308247 - DNA, 75 bp, Homo sapiens
ctgagctgcgaggaaaatggcggcgggaggaaggatatggagtaatagtactaaatcccaatgaaaactatattg

SEQ ID NO: 308248 - DNA, 75 bp, Homo sapiens
caccgaccgtgcccgctgcaagtacagggcctctttattgctgtcaaagatgaggaccctggctcacagtccagc

SEQ ID NO: 308249 - DNA, 83 bp, Homo sapiens
agagcggcctgcgccagcgaagggtcaccatgaagttcaatcccttcgttacctcggaccgcagtaaaaaccgcaaacgtcac

SEQ ID NO: 308250 - DNA, 98 bp, Homo sapiens
ctaaatgatctacagccttggcctgccaactggaacagagcagaagaagaaaatgaattccaaatccctggaagaactagaccctcctctgaccaact

SEQ ID NO: 308251 - DNA, 50 bp, Homo sapiens
aggatgtgtacattataaagttgaacccagtgacttgattgtaaaaattt

SEQ ID NO: 308252 - DNA, 74 bp, Homo sapiens
gaggaagatggcgggacggctgccggcctgtgtggtggactgtggcacggggtcctgtcccagtgcagccatca

SEQ ID NO: 308253 - DNA, 100 bp, Homo sapiens
cagatgatgtatagccctcagaattctgattatcttttagctctcagcactgaagcatttgcaagtaaaatcactggcatgttgttggaattatccccag

SEQ ID NO: 308254 - DNA, 100 bp, Homo sapiens
gtccaaagcctcttacagcctggggagtgcgagagaaacccagccgaagcatttaaaagaacactgatatttgcatttaatggggaacaaaagatgaaga

SEQ ID NO: 308255 - DNA, 75 bp, Homo sapiens
tgtggctctcctttcccctaattcacagggtgaagccagatttggtgttcatctgacatcacaggcatttttgtg

SEQ ID NO: 308256 - DNA, 74 bp, Homo sapiens
cgttcagtgacgagcagggaagaggtggagctgaagaagggagccactctcaaaatcacgctggataacgccta

SEQ ID NO: 308257 - DNA, 51 bp, Homo sapiens
gcagctgcgatctctgtggtaggcccagagattctttgaaaaccttaaccc

SEQ ID NO: 308258 - DNA, 75 bp, Homo sapiens
ccaggtgccaaggaaggggatacagggttatgtggtccgaatcagtggtgggaacgacaaacaaggtttccccat

SEQ ID NO: 308259 - DNA, 100 bp, Homo sapiens
gcacttactactaataaagacgatgataatattctcttcagagattctgcaaatgcgacaagcctcccaggaactgactcagcacaagaagacagcttcg

SEQ ID NO: 308260 - DNA, 82 bp, Homo sapiens
ggatcaagaagccggactacaaggtcgcctacgtgcagctggtcctgaacgaggctgtgggggccctgatgtaccacaccat

SEQ ID NO: 308261 - DNA, 87 bp, Homo sapiens
actttgactactggggccagggaaccctggtcaccgtctcctcagccagaagatcagctgccatgttacttgactcacaccaaccct

SEQ ID NO: 308262 - DNA, 50 bp, Homo sapiens
cctggtgtcacctatcagtaaaaggtgacagagctgaatgaacctctctc

SEQ ID NO: 308263 - DNA, 95 bp, Homo sapiens
aacactgctgctgcctgtgatgggagattcaaagtccagcatggagtgtcgaggagggccccaaccgcagcacagtcagccgcccccgcagccac

SEQ ID NO: 308264 - DNA, 80 bp, Homo sapiens
ttccgccctaatggaggtctccagtttcgccatccgggtgacctgcataggttcctgcggggtctccaacaaggctaatg

SEQ ID NO: 308265 - DNA, 80 bp, Homo sapiens
cagttcaaaacataatgtgattgggggatatgagactttctactcggaatatcctgagtgttgcgtggatgtaaaaccca

SEQ ID NO: 308266 - DNA, 101 bp, Homo sapiens
tgcgccttcccggcgtctaggggagcgaaggctgaggtggcagcggcaggagagtccggccgcgacaggacgggcagcacgctgaggaaacgcaagatgta

SEQ ID NO: 308267 - DNA, 74 bp, Homo sapiens
cagatttcagtgtcctccttagctctgcaggtttatgtgagattaagaccatttttcagggaattcctggaacg

SEQ ID NO: 308268 - DNA, 71 bp, Homo sapiens
acaccggcgaggaacttggcagctgaagcatttgatttgattgcacaagatgaagaagaatttaataaaga

SEQ ID NO: 308269 - DNA, 75 bp, Homo sapiens
gaggcgccagaggagccgccttctgcctcagaacggcgtgactcggagtgagtgatagttgcttcaggaatcttg

SEQ ID NO: 308270 - DNA, 50 bp, Homo sapiens
tcaggagcgtgaagcaggtgaaaggcaacatttcatacaccatttagtca

SEQ ID NO: 308271 - DNA, 83 bp, Homo sapiens
ttgcaggagatcgagagcaccgacaccgcctgtgtggggcccaccctccggtaacaaatatactctggagactagaccaaacc

SEQ ID NO: 308272 - DNA, 102 bp, Homo sapiens
attattagtgcatcctctgatggcactgtaaagggttttctgcccaaggatttgcaagctgaagctctctgcaaacttgataggagagtaaaagccacaata

SEQ ID NO: 308273 - DNA, 83 bp, Homo sapiens
gcagatggccgtacgtgtgaagttctggacatggcaagacatgtgccactctatcgggcactgctggaattgcttcgggccat

SEQ ID NO: 308274 - DNA, 114 bp, Homo sapiens
atgcagatgagaaggttcagttggcaaaccagatatatgacttgggaggtggggaagacagggctccagctaccacaggacgggctctgggtatagccgttccagtcagggaca

SEQ ID NO: 308275 - DNA, 82 bp, Homo sapiens
gagaacctggaggaggaggccatcatcatgaaggacgtgcccgactggaagggtgcagccttgacacctgtgaatgcccgga

SEQ ID NO: 308276 - DNA, 100 bp, Homo sapiens
gggactgcctcgactggcagcgcgggaaacgtcaaactcgagatctgacaggatggcatctgatgactttgacatagtgattgaggccatgctggaagct

SEQ ID NO: 308277 - DNA, 74 bp, Homo sapiens
tcgccaaggctggcgcagtcggacccagatgatgtggtaccagttggccaaagaagagcctggtgttggtgcat

SEQ ID NO: 308278 - DNA, 51 bp, Homo sapiens
gaagagcaaaggagactgcaccatccgtgagtgaagtgcaaccagtggtct

SEQ ID NO: 308279 - DNA, 75 bp, Homo sapiens
ttccgcagggatggtggcgccgcggcggccgcggagcccggggaccccgcccagcagtaccatcccactgatatc

SEQ ID NO: 308280 - DNA, 75 bp, Homo sapiens
gtacttgaagatttgcataaagccaacattcgcaccgtcatggtcacaggagcccagtttcctccaattgcagca

SEQ ID NO: 308281 - DNA, 83 bp, Homo sapiens
gtcctttcctttctccctcgcgttaggcgagcccacaccttaaccgtgctcttcatcctcacctgtacgcttggctatgtgac

SEQ ID NO: 308282 - DNA, 100 bp, Homo sapiens
gaaaagtggctgcaccattttacattcctaccatgaaaggttttgatgatgatggttcagaatttcatgaacatatatttctggagaaacacctggagag

SEQ ID NO: 308283 - DNA, 100 bp, Homo sapiens
aagtcgagggccaagacgaagacagttgcttatggaaccacagagaacagtcccgtgacattcgcgcacttccctgaggacactgtggagcagaaggcag

SEQ ID NO: 308284 - DNA, 82 bp, Homo sapiens
attctggcttgggttccatccttatatgaaccagttcctgatgatgatgaggcatgctacgggatcctcaaggtgcccacgg

SEQ ID NO: 308285 - DNA, 75 bp, Homo sapiens
ggacccccattcaagttcaagttcacaattggcggactggtgattgcagctggaagtgcccatgaccgagctggc

SEQ ID NO: 308286 - DNA, 73 bp, Homo sapiens
catactgcatcagaaccatgaagaaggttgtctgcattcaaaagagcattctattaaagctaccttaatttgg

SEQ ID NO: 308287 - DNA, 100 bp, Homo sapiens
ccactttcgccagcccgtgccgcgagcgcggcctgcaggagggcaaaataacatggcagccagacgaattacacaggagacttttgatgctgtattacaa

SEQ ID NO: 308288 - DNA, 99 bp, Homo sapiens
ccacaactacgaatgaatgtccatccccagatacttctcaaaatacttgtaaaagtcctccaaaaatgagcaaggagaactgcgacacatcaccaagct

SEQ ID NO: 308289 - DNA, 78 bp, Homo sapiens
ccagcaccgcacgccctgcaagggagattccagtgtagttagtgaagttgtacttcaagacttactggcatatgtgtc

SEQ ID NO: 308290 - DNA, 75 bp, Homo sapiens
aatggcagcacagagctacattcgagaggaattccagggaagaaatgtggtacaatcatacttacagcagaggaa

SEQ ID NO: 308291 - DNA, 95 bp, Homo sapiens
cagtgtcgccataccttggaacagcataactggaacatagaggatgaagcggatcccaaacggcagaagacagaaaatggggcatcggcgtgagc

SEQ ID NO: 308292 - DNA, 87 bp, Homo sapiens
gagcgcaactagcggcgggtcgtgggcacctccaggtgacttaagagattaaaattaatttggttgctgttggttctgaacaaataa

SEQ ID NO: 308293 - DNA, 83 bp, Homo sapiens
gtcggcttcaaagagaaaaggcaacatcctgtcacaggccatgctctggcaaaaactgcctccggagccagcgtggtggccat

SEQ ID NO: 308294 - DNA, 75 bp, Homo sapiens
cgcatcatgccagggagccaagcgtcctgcccggcccatttgacattgtgcagcaaagaaatggttatggagaag

SEQ ID NO: 308295 - DNA, 100 bp, Homo sapiens
ggacagcgcgtgcccgcgaggagccgccgcgcgcccgcgccctccgcgcgacgccaggaacaacaacctgaccttcctgcggccgtactaccagacggag

SEQ ID NO: 308296 - DNA, 83 bp, Homo sapiens
gcacttcgcattttggcattgacatttaattttagggtcctttatatagaagggagagtagttaccgtgatgctgaatcagcg

SEQ ID NO: 308297 - DNA, 105 bp, Homo sapiens
ataatgatgccaaatatgaataacgacccatacatgtcaaatggatctctttctccacccatcccgagaacaacttgggaagatccccatgaaaaagataagagc

SEQ ID NO: 308298 - DNA, 75 bp, Homo sapiens
cctggatgaagccaccagcgctttggatgccgagagcgagtatctgtgagaaagatcagtctaaagaaaaggaga

SEQ ID NO: 308299 - DNA, 74 bp, Homo sapiens
ttgtggggcttttacagcctttgggttgctatggtgacagactatggggcctttatcaaaatcccaggctgtcg

SEQ ID NO: 308300 - DNA, 85 bp, Homo sapiens
ccaggagtcatcggacgccagaatctggaaagaccacagcaagattctttcattcgtctcctcctagcctgggggaccaggctcg

SEQ ID NO: 308301 - DNA, 83 bp, Homo sapiens
gcttggccatatttgtcactgtgatctccctcttggtgtacaaaagctccaccatgaggcgaggtggatggaggaagcgagct

SEQ ID NO: 308302 - DNA, 78 bp, Homo sapiens
gagaagggcaggggcctaagaaacagaccaggtggtccattatggctgacatgcaaaatctggtagaaagattggaga

SEQ ID NO: 308303 - DNA, 75 bp, Homo sapiens
aacaaggttctggacaagatgaagtctttctgccagaacaatgtctcccttttgcagagctgtattgacttgttc

SEQ ID NO: 308304 - DNA, 100 bp, Homo sapiens
gcggctgcagggtccggtcttcggtttgcacagctagaggccgcgcagcagcaaaggatgagcggaaccttggaaaagaggcggggtttcaccatgttgc

SEQ ID NO: 308305 - DNA, 90 bp, Homo sapiens
gcacgaacattgatttgaggaggatgcttcgcagtttacgaagagcgagaacccgagcagcgccatgagcaacactaccgtcgtccccag

SEQ ID NO: 308306 - DNA, 100 bp, Homo sapiens
atccagacggcagggagtgcatcaaaggtgtgaacacagtggctgagaagaccaaagagcaagtgacaaatgttggaggagcagtggtgacgggtgtgac

SEQ ID NO: 308307 - DNA, 100 bp, Homo sapiens
tccaaagctgtgatgaatggcttggcacctggcagcaatgggcaagacaaagaggatggcattccctgtggatatgctggaaaattgcagccatgaggaa

SEQ ID NO: 308308 - DNA, 82 bp, Homo sapiens
gagaacgcgcccaagtggcggggactactggtgcctgcgctgaaaaagaaatgctttgtggtctacagccacaccaccccaa

SEQ ID NO: 308309 - DNA, 75 bp, Homo sapiens
ggccgcaccgccctccgcggccgccccctggggatccagcgagcgcggttcagccgtctgtatatctccccagat

SEQ ID NO: 308310 - DNA, 50 bp, Homo sapiens
gttcggtcgaggacattattttcacaatggaaatcctgtatgaatgtgga

SEQ ID NO: 308311 - DNA, 100 bp, Homo sapiens
agccgagatgccgggggagcggggccttccacaccccctccgtgggtgtgtgactcggacagccagtgcagccccacgcggcagagcctcagcctgtcgg

SEQ ID NO: 308312 - DNA, 75 bp, Homo sapiens
ggcggaaaatagcctttgccatcactgccattaagggtgtgcgcgagtgtcgggagccggaactgggcctggagg

SEQ ID NO: 308313 - DNA, 90 bp, Homo sapiens
cccgctgccgggcaccgaggaccagctcaatgacaggttggctgttgaaggcacgaatggaatagataatcatgtacctacaagcactct

SEQ ID NO: 308314 - DNA, 96 bp, Homo sapiens
ttgaaaccagaatggaccaggtcacatgtgctgcttaaaattcagggctaagcattttgggtgattttaaactagctatgcaaaagcagccttttg

SEQ ID NO: 308315 - DNA, 75 bp, Homo sapiens
aacgtggatcgttgttttgaaacataagccaatggacacgtcagtgttatctgaagaaggaggagagccttttca

SEQ ID NO: 308316 - DNA, 75 bp, Homo sapiens
ccaaagtgctgggattataggcgtgagccaccgtgcctggctgaagagttgatctctctaatgtattagatcttc

SEQ ID NO: 308317 - DNA, 85 bp, Homo sapiens
ctctcgctttccctctcgcgtctctggctgcagacctgcctagagctggaacgttacctccagagcgagccctgctatgtttcag

SEQ ID NO: 308318 - DNA, 75 bp, Homo sapiens
cgccagccccagcttggcgtcctgagaaatgaggttggagcaatcactgaagaaactgaagcctgtgattggtgg

SEQ ID NO: 308319 - DNA, 83 bp, Homo sapiens
cagactgtggcggtttatagtgaggctgacagaaattccatgcatgtagatatggtccgctacacacagctcgtgaggaagaa

SEQ ID NO: 308320 - DNA, 75 bp, Homo sapiens
ccttccgcttcctactcagctactccatcatcaaagaggatcatccagcagctcgtcaacggcatcatcacgccc

SEQ ID NO: 308321 - DNA, 82 bp, Homo sapiens
tggccacaagagcgaggagaagcgagaaaagatgaaacggaccctgagaatggggtactaagagaaaagcacgaagctgtgg

SEQ ID NO: 308322 - DNA, 75 bp, Homo sapiens
ctcaggcccctcccctggacccgccgcagagccagacaatgcagatcttcgtgaagactctgactggtaagacca

SEQ ID NO: 308323 - DNA, 100 bp, Homo sapiens
ggagcccaccgcaccgtccctcaccgaggaggacctcactgaagtgaagaaggacgttgaagctccattcataccaaagtttagaggctctggagatacc

SEQ ID NO: 308324 - DNA, 75 bp, Homo sapiens
cacacagtggcttctgctcaccaacagatgaagacagatgcaccaacgagtccacctggaaggccgctgtggtgg

SEQ ID NO: 308325 - DNA, 75 bp, Homo sapiens
atgccagcaacgtgcggcgagtcatggccgagacccatacaatgtactggccccaaagggagcttcaggcaccag

SEQ ID NO: 308326 - DNA, 75 bp, Homo sapiens
ggaaatgaagtataataccaagaaagccccacttgactgaacggctcttgtatgtggtggacctgcttctgtcag

SEQ ID NO: 308327 - DNA, 135 bp, Homo sapiens
cacgccgcattactacaggagaaagaacatttccatcaaaccctgagagctttattaccagacatgatctttcaggtggcccttcagaaggtttttaatttttctacttcacatatatttgaaacaagagtagca

SEQ ID NO: 308328 - DNA, 100 bp, Homo sapiens
tccagcttcaccacgcggctgcacaactgcaggaacaccgtcacgctgctggaggagaaatctccaaattggacatccagagcagcattcttgttctgtc

SEQ ID NO: 308329 - DNA, 112 bp, Homo sapiens
ctcaggtccgcagtggaggccacatcaactcggcgccttgggaaccgctcgagcctaccaggcatcaacttctaactcatctcgccaggagaggcctccagtgaaacccttc

SEQ ID NO: 308330 - DNA, 50 bp, Homo sapiens
aggtagagctgggcttctttcagacatgcttcagcttatcaacaaccaag

SEQ ID NO: 308331 - DNA, 105 bp, Homo sapiens
ccggccgtggaagcggccaccgactactgtcagcagctgtgccagagaaactggtagtctgggtagattcaaagcatctttaagagaaaatgtcttggggagccc

SEQ ID NO: 308332 - DNA, 74 bp, Homo sapiens
aactctgaggattaaagctgagtatgaagggaattgcaacccagtgaagaagttacctggaagtaaagactggc

SEQ ID NO: 308333 - DNA, 75 bp, Homo sapiens
ggagggagccatgaagcattacgaggggccaaaccagtgctcctgccacctctctggctgccccctagagcctgc

SEQ ID NO: 308334 - DNA, 75 bp, Homo sapiens
actacggacacaggattcatgcggtccagggagtcggtagtaagggatggcgggacgtcaccacctttttttcgg

SEQ ID NO: 308335 - DNA, 75 bp, Homo sapiens
gaaatctggaaacatgatacaatctgcaaatggtgatgatgaacagtctacacagatggctgcaagttgggaaga

SEQ ID NO: 308336 - DNA, 100 bp, Homo sapiens
cgagaggagacttccttgcttctttggagaatgatatcaaaccagtccatggttttttggtgaaatcattgatggcaaatttggttgctgcttttccttt

SEQ ID NO: 308337 - DNA, 90 bp, Homo sapiens
tacataaggatttggaagacactgaagcaaataaagagaaaaatctggagcagtataatatgctgagcaggaattactctcagatgacgc

SEQ ID NO: 308338 - DNA, 100 bp, Homo sapiens
ccgtggccatgaactcacccgtggaccctggcgctaggcaggcgttgaggaagaagccacccgagcggactcccgagatgaacgactttcgaagtaaaat

SEQ ID NO: 308339 - DNA, 96 bp, Homo sapiens
gtcagtgtcctttcacacccatgtgaaagagttgtatcacggactgattcaccgagcccaaccgtactcaactcacatatttctaccccaaatgtg

SEQ ID NO: 308340 - DNA, 100 bp, Homo sapiens
gcaccccgactgccgaggaacgagagcgcgaagctaagcaatacctgaacaccttctatggctgccccaaggagagctgcaacctgtttgtgctgaagga

SEQ ID NO: 308341 - DNA, 104 bp, Homo sapiens
gagagtaaagtcagcatgagcaaaaactccaaactcctctccaccagcgccaagagctgcttttctaacccaaactgtatgtcttgatgacactacagtaaagt

SEQ ID NO: 308342 - DNA, 100 bp, Homo sapiens
cgacatcccggaagccgaaaaatgctgcaggtggagctggagcaagaataccaagacaaattcaaaagactgcccctcgagattttggaattcgtgcagg

SEQ ID NO: 308343 - DNA, 100 bp, Homo sapiens
gactatgcagagacatgagatggtagccaacccctcagggccccggagctgcagttctacaccagcgccgctgcggtggccatgctcgtcccggcccggg

SEQ ID NO: 308344 - DNA, 75 bp, Homo sapiens
cctcaatttaagcctgatctaacccctagaaacagattgaaaaggctgtggtgtctcagcgcctgacagaatctc

SEQ ID NO: 308345 - DNA, 97 bp, Homo sapiens
agctcccctcccactgtggctcccgcatctgcctccctgccccagcccatcctctctaaccaaggtgtgagctgtcagtggagaagtccacagtgct

SEQ ID NO: 308346 - DNA, 88 bp, Homo sapiens
gatgagaacacagccacgcttacggaacattttagtggacaaaccaaatgaccaatcttcaagatggtcttcagagagcaactatcct

SEQ ID NO: 308347 - DNA, 100 bp, Homo sapiens
ctgggtgactcagagagggaagagattcagccagcacactcctcgcgagcaaggtgcatggctgcctcctaatcccatagtccagaggaggcatccctag

SEQ ID NO: 308348 - DNA, 90 bp, Homo sapiens
aaagaaaacaaagcaagatagaactcctcttaccaaagatgtttcacttctagatctggatgattggtttggagttgaaaatatggcaac

SEQ ID NO: 308349 - DNA, 83 bp, Homo sapiens
gacgggccgagcctgccacttctgttatgttctgaacccacacatgttttcggaaggaccagatggctgacactggctaatgg

SEQ ID NO: 308350 - DNA, 98 bp, Homo sapiens
gcgacctcaagaagcagctccacgaaaggcagccgcggatcgccgcgctcagcgacaaacaagacggctgtcctcagcgaggggccgtgcacccgctc

SEQ ID NO: 308351 - DNA, 75 bp, Homo sapiens
cagaattagacctttcacatgggaaaaaagatgcttttgttttggaggcttgaagtagaaaatgccatgatgaga

SEQ ID NO: 308352 - DNA, 83 bp, Homo sapiens
cacgcaggcgccgccctacagcatggcgcccgccatggtgaacagctcggcaggatggcactggatctttaaaacgcagtggt

SEQ ID NO: 308353 - DNA, 82 bp, Homo sapiens
cggtaacccgtgtgactttgactggctatcgtccagagaggacgcgtgctgccgcctcccgcccctcttgacacgacgaacc

SEQ ID NO: 308354 - DNA, 83 bp, Homo sapiens
ctggagagaagcagcggatcagcagagaactgcatgaacttgcccccagacaaggtccagctgctgagccagtatgacaacga

SEQ ID NO: 308355 - DNA, 85 bp, Homo sapiens
tgcccatacaaaatgccttttgcagcagacaattccaagctcgagtgtctcggcaaactctgttggcacttgagaaagaagaaga

SEQ ID NO: 308356 - DNA, 88 bp, Homo sapiens
aacaaaaccgagtcaacagggaagcagaggagaaccgggagccattcagaaaaggcatggctctgtgagcgctgatgaggctgcccgc

SEQ ID NO: 308357 - DNA, 75 bp, Homo sapiens
atcatccgcctcaccacgagctacctgaagatgcgcgccgtcttccccgaagggatctgctaagctagaaaaagc

SEQ ID NO: 308358 - DNA, 75 bp, Homo sapiens
ctgaggtcatctttggacatgtcttggcagcagcaaacagctaccggacatccagcatcatatttaagtgtgatg

SEQ ID NO: 308359 - DNA, 75 bp, Homo sapiens
gcacgtttaaagtactttcaacaaagattggagctggagtgagccttccaggaattttggctgccaaatgtggtg

SEQ ID NO: 308360 - DNA, 82 bp, Homo sapiens
gcaaagaggagctgatagcggagctgcaggtattaatctctggagaagacacatccacagttagcactttcttcagatgctg

SEQ ID NO: 308361 - DNA, 100 bp, Homo sapiens
ttcatcaccctgtttggcagctatgtcagccggctgcggcgagtcatctgtgcctcctactacccatcccgggagcaggctggagtgcaatgacgcgatc

SEQ ID NO: 308362 - DNA, 88 bp, Homo sapiens
ggagaagagcggagcagtggtcggagatgtggcgaccggccacggcgtatgcctccgaggacggggtcctgaccgaggccatgatgga

SEQ ID NO: 308363 - DNA, 98 bp, Homo sapiens
cgaaatggagaaggtgaaccctatgacccagatgtgctctactatattttcctgtgtattcaaaaggatgaatttcacccattcatcgaggcacttct

SEQ ID NO: 308364 - DNA, 75 bp, Homo sapiens
cctcccgccgcttagcctgatgctggaaggacgaagggagtgatgatgaatacagtgatgatgatgacatgagtt

SEQ ID NO: 308365 - DNA, 100 bp, Homo sapiens
gaagtccacccagaaggtgctggacccgaagaaggacgtgctgacccgcctgaagcacctgcgggcgctgctggaaacagaagcctatcagttgctgaag

SEQ ID NO: 308366 - DNA, 83 bp, Homo sapiens
cactatggaattctaatttgaaccatgtttggattgaagccgcctctgtattacttaccaggcttctggagttacagtgaatg

SEQ ID NO: 308367 - DNA, 75 bp, Homo sapiens
gcaatgcagcagaacgcagggggcctctgtaaggcacatggagccgatcaaagtccagatctccatctccaaaaa

SEQ ID NO: 308368 - DNA, 51 bp, Homo sapiens
cccacacctccggaccgagggacgcggttgaagattcctgtctctggatcc

SEQ ID NO: 308369 - DNA, 82 bp, Homo sapiens
cgagcgcgagcggcgcgagaaaatcctgaagtacatcctcagtcgtgagatcaaggagaagcggctccggagcctgtccagg

SEQ ID NO: 308370 - DNA, 100 bp, Homo sapiens
tttactgtaaaaggaaattggtacccctataatgggcagtgtctaccagatattggaaacagagcaaatgcagcgttacaatcaaagacttattgaggaa

SEQ ID NO: 308371 - DNA, 83 bp, Homo sapiens
catggaggaagtcaagaaatttctagtaccgttgttgacctcctgtactggagagacattaagaagactggagtggtgtttgg

SEQ ID NO: 308372 - DNA, 100 bp, Homo sapiens
atgcgggagacttgagaagaaaggccatggaaggcaccatcgatggatcactgataaatcctacagtgattttagtccatggagaacagaatgaaatggc

SEQ ID NO: 308373 - DNA, 100 bp, Homo sapiens
ctggaatcattcctacatgattcctggcggcagaaacgtgacaaggtagtaccgttgtcagcacacagcgttcacaaggtaattgtatcttcttaaacat

SEQ ID NO: 308374 - DNA, 100 bp, Homo sapiens
tgtgccgcaccgaggcgagcaggagcagggaacagtaccttctccaggcaaattccgttcccctgcagcaccatctcctttggctcttcggcaaccagtg

SEQ ID NO: 308375 - DNA, 101 bp, Homo sapiens
cttacactgtttcaataaaatcaagctttgtaggcagccaatcccagagaagcagacgggatggctagttcagcccgggagcacctgctttttgtgaggcg

SEQ ID NO: 308376 - DNA, 100 bp, Homo sapiens
tgtgctaccggataagctgtgtgttattcctgctgccatactgagagaagaggtactcccttatagggactcgtaaagacatagagcatctggaaattaa

SEQ ID NO: 308377 - DNA, 75 bp, Homo sapiens
acgcataatggatgaaaggaaccgacagctcatttcagttttgaaaaatttgcctgaaagtctgagcaatggaag

SEQ ID NO: 308378 - DNA, 97 bp, Homo sapiens
ttccttctgatgcctcagccaattcctctctccttcttgaattccagggaaaatatatgcagatgatgaacattcttaagccaattgcctttgatgt

SEQ ID NO: 308379 - DNA, 100 bp, Homo sapiens
atggtgttcacagtgttggtgtggagtcacagcttgacttttgtggagtagggcgaaactggggctgggcatctgcaggtagcagcattctggctgaatt

SEQ ID NO: 308380 - DNA, 83 bp, Homo sapiens
ccagggagttgaaggctgcagtgagccctgtttttgccaccacactccagcttgggggcagccattttggggggtgctgatgg

SEQ ID NO: 308381 - DNA, 101 bp, Homo sapiens
gatcgttggcgggagatgtcgaaccccgggacacgcaggaacggctccagcatcaagatccgtctgacagtttgcatttatgtcggatcctcagtgaaaat

SEQ ID NO: 308382 - DNA, 88 bp, Homo sapiens
caggatgggggacaggaggctgcggggcctcagtgtggaaccatcagagaatctacaatccctgatggagaagaatcagtccctggta

SEQ ID NO: 308383 - DNA, 96 bp, Homo sapiens
ccagtccccagtgagggtgtacaaatacccctttgaattaattatggctgatcccaatgaagatacagaatggaatgacattttaagagatttcgg

SEQ ID NO: 308384 - DNA, 88 bp, Homo sapiens
ccatgtgcctctggctcaagcccaggctttggtcaccagtgagctggagaagttccaggacctgtatgaggctggagagaagaaatgg

SEQ ID NO: 308385 - DNA, 82 bp, Homo sapiens
ctacacttactccagtgggaggaggactccatacgagctcaactggaggcagtcctgtgcggaaatctgaagaaaaaacaga

SEQ ID NO: 308386 - DNA, 100 bp, Homo sapiens
gtgcggcctgctggccgagcgcctgcgcatcagcccggacagttgcacctggacttgatatgaaagtaaccatcagaaaatcaacagagatcttaaactt

SEQ ID NO: 308387 - DNA, 100 bp, Homo sapiens
ccagaggatattactcagatccaaccacagcagttggttttgcgattaagatcaggctgactgtgctgtcctgattgttgctgctggtgttggtgaattt

SEQ ID NO: 308388 - DNA, 95 bp, Homo sapiens
gcaccggacactttgttattggagaaacatgcagattatatcgcatcctatggctcaaagaaagatgattatcatcactgtcctggtaactgggg

SEQ ID NO: 308389 - DNA, 100 bp, Homo sapiens
tgttacatgacagatgtatgaggtcctgggaactccaacaagggagcaaatcagagaaatgaacccaaactacacagaatttaaattccctcaaattaag

SEQ ID NO: 308390 - DNA, 100 bp, Homo sapiens
cacccaggaggcatttgaagttccactcacaaatgcttttttacatctgcaagaaattaactagtcatcaaatgcttagtagcacagaaattctcaagtg

SEQ ID NO: 308391 - DNA, 83 bp, Homo sapiens
cagcctctcagtcaacatctccttcgcagccgcgcaaaaaaaccgctccgggaattctgaagttctgggcctttctcagaaga

SEQ ID NO: 308392 - DNA, 96 bp, Homo sapiens
cgcattcgcagcactgtggctgaggacatttttattccttccccaagtctggaagaacaatcaaatgatgggaagaaagatggagatatgcatagt

SEQ ID NO: 308393 - DNA, 90 bp, Homo sapiens
tcacatgggtccaaccccagggtggtggatgacgacggcatgaccagtctgcataagtcaccatccaggggagactccacctctcatcac

SEQ ID NO: 308394 - DNA, 80 bp, Homo sapiens
tgtcatggttccccttctactacatgctgaagttaaagaagagtgtaagagtcctaaagctgagtgttggtcccaaaaaa

SEQ ID NO: 308395 - DNA, 75 bp, Homo sapiens
cggagaagcgcacagacaagatcttcaggcagatggacaccaacaatgacggcaagatcgtggacgccgtgattc

SEQ ID NO: 308396 - DNA, 82 bp, Homo sapiens
agggctccaccccgtcgcctcgacagatggagttttaacattgaatgcggagaacactaattatgcctatcaagttccaaac

SEQ ID NO: 308397 - DNA, 83 bp, Homo sapiens
cttctgcagaggtggctgacctcaagaagcaggtggtcagctgtagctggatgtgtgccttgaaaggctgacaagtttgccct

SEQ ID NO: 308398 - DNA, 75 bp, Homo sapiens
cggggcaagagcaggagcccggcaccccccgccgacaaggaggtgggaccctgaagatgtgaacctcgaaggcag

SEQ ID NO: 308399 - DNA, 74 bp, Homo sapiens
gggggaccacaagatcctcatcgacagcagccattgtttgatgtcctgtgactgagaaaccaggctttaaactt

SEQ ID NO: 308400 - DNA, 82 bp, Homo sapiens
gtttttcctgtcgtacgtgggacaggccacgctgtccgtccgcagtaccgacgcctgcagggtgctttcttctgcgacctgg

SEQ ID NO: 308401 - DNA, 100 bp, Homo sapiens
gccagggctctatcaaggggctggtgtactccagcaacttccagattttgactaaaggagaagttcaagtatcagataaagacacacacaactggagcag

SEQ ID NO: 308402 - DNA, 75 bp, Homo sapiens
gacggccaatgaaacccccaagatgggcatctattacattccagtctccagaaatgctttgggttcatctttcat

SEQ ID NO: 308403 - DNA, 98 bp, Homo sapiens
ggtcctagcacccactcgagaattggctcagcaggtcccctctgagccctctcaccttgtcctgtggaagaagcacaggctcctgtcctcagatcccg

SEQ ID NO: 308404 - DNA, 99 bp, Homo sapiens
gaagccctttctcctcggcactgtattctttacctgcttcccaatcccactgatgaggatcagcccatgatctccaacctctatctgtatgacagtgtt

SEQ ID NO: 308405 - DNA, 75 bp, Homo sapiens
ttctctcccaggccacaagacatttcctgctcggaaccttgtttactaattgggcactatgaacgaagaggagca

SEQ ID NO: 308406 - DNA, 82 bp, Homo sapiens
cggacatcagggtgaccaggatggaggagcaaattgtggctactaatttgccccctgaagatcaagatggctctggggatga

SEQ ID NO: 308407 - DNA, 75 bp, Homo sapiens
gtcgacccggcctggcgccggactagcacatggattaattgatgtatgttgagtttatggagctgccttttggtg

SEQ ID NO: 308408 - DNA, 83 bp, Homo sapiens
agcctgcacagccgcggcggcagcagcagtgagaggtgtgggccaggtcgtgctccaggttgctgctgccaccaactgcaaac

SEQ ID NO: 308409 - DNA, 98 bp, Homo sapiens
aagaaacatctcaccaatttcaaatctgagatgtgataatggatcatcatgtttctaccatcaagcctcgaagaatccaaaaccaaaatgtcattcac

SEQ ID NO: 308410 - DNA, 75 bp, Homo sapiens
actgttgtgatggaggaaatcaatatttgatcctgatgacctttattcaggggtcaatttctccaaggtactgag

SEQ ID NO: 308411 - DNA, 96 bp, Homo sapiens
gaaagactaagcgtcccgttggccagtgcaacgaagaacggaggaagcgacgtgctgctctccctgcgcattttgctactgatgaagcccagtgtg

SEQ ID NO: 308412 - DNA, 75 bp, Homo sapiens
acagctgcagtctgacgagagggggcgaagctgtgctcaggcccgggctggacgcagagccagagctgtccccag

SEQ ID NO: 308413 - DNA, 75 bp, Homo sapiens
aagcgggctggcggcgctgccgctcccgggcggccgcgggcggctgagctgactgctgcccactttggaggaggc

SEQ ID NO: 308414 - DNA, 82 bp, Homo sapiens
ggcgaatcaatatctacagtaatagtcttgaggctgttgccaggtcacgcatgaagggagcaccgtggagaagacagtggcc

SEQ ID NO: 308415 - DNA, 50 bp, Homo sapiens
ttaggctcctgaagacgctggagacaagttctgtacagagtaatgagatg

SEQ ID NO: 308416 - DNA, 100 bp, Homo sapiens
ttcccgcaagcccagacaatgccggtggaggaatttgtggctggctggatctctggttgcagaagatcattcaccgcaatgacggggcagagaattcctg

SEQ ID NO: 308417 - DNA, 82 bp, Homo sapiens
tgaacagaaacacctaggaagggagaactggtttggttttcctaaacaaatcctttcacagggaccgacggcacttgataat

SEQ ID NO: 308418 - DNA, 99 bp, Homo sapiens
ttctcagcgggtcaagtgcagtacctggatctcatcaaaaaggacaccagcaagctgttcaatgaggaggcttctattgtggctgaggcctacgatttt

SEQ ID NO: 308419 - DNA, 75 bp, Homo sapiens
tacctgaacgaattttctttcgatggcattaccagagtatagtgataatatgcagcatgcatactgggaactgaa

SEQ ID NO: 308420 - DNA, 83 bp, Homo sapiens
tcagctctgtggaggagcagcagtagtcggagggtgcaggtttttcgttggaatatacgttgcacatttatggcgattctgag

SEQ ID NO: 308421 - DNA, 82 bp, Homo sapiens
tatttcttgtcacaaaaaggctgcagcaaaatcaccaggacagccaatacaagtggtttatgtaccatcccatctctatcac

SEQ ID NO: 308422 - DNA, 75 bp, Homo sapiens
tgcctcaggccagtcgcctccaggccaagagggatccttcacccgtgtctgctgctcaagatgaggaggtgcgcg

SEQ ID NO: 308423 - DNA, 87 bp, Homo sapiens
gatctgcattggaagagactcctagaccctcagaagagatagaaaatggcagtagttcttcagataagaaattttggaatccataag

SEQ ID NO: 308424 - DNA, 96 bp, Homo sapiens
agaggatgaggcccaggaagctgtggtgaaggaaaaggggaagatagtgatgtactcagtataaatgcagatgcttatgacagcgacatagaaggc

SEQ ID NO: 308425 - DNA, 102 bp, Homo sapiens
ggatccgcgggacaagaaaattcatgcgaatttagcctatgaaatcatcctaaccctgggacaggcattcgaagtcgcttaccagctagcactacaagcaag

SEQ ID NO: 308426 - DNA, 83 bp, Homo sapiens
cgcaccaccgacctgctgactgactgggagaagaccaagcctgtcacgtgacaaaggagagcatgcttccagctggagctgag

SEQ ID NO: 308427 - DNA, 75 bp, Homo sapiens
agactcccagccgggttattaccctgaaggttcgagaacttgtcttggacaattgcaaatcaaatgatggaaaaa

SEQ ID NO: 308428 - DNA, 101 bp, Homo sapiens
gataatggtatcatcaaggccttcagaaacatccctggttttgtggtctttgcaacccttgtggtcattgtggccttgatattaatcttcgtggtgggtcc

SEQ ID NO: 308429 - DNA, 101 bp, Homo sapiens
agtgaatatcctgacatgtgacaatgaaattgaattgaagaaaattgcacgtaatcacccaaatgccaagcccccattgccgtgcggctgggcaaagtagc

SEQ ID NO: 308430 - DNA, 98 bp, Homo sapiens
gaagaaggaggaggagcggcttcgcctggaggaggagcagaaggtgtgccagaaggctggcgagatctccctcctgaagcagcagctgaaggactcgc

SEQ ID NO: 308431 - DNA, 82 bp, Homo sapiens
gcgtctcggaaaccggtagcgcttgcagcatggatttttagactctgaggagcagttggagctaatccacattatggaaatg

SEQ ID NO: 308432 - DNA, 88 bp, Homo sapiens
caggcttgtccatctgtaacttcattaagtttcaccagtgatcattaaagaatgggcagcttacaaaggaaagtctcctcaaaccccg

SEQ ID NO: 308433 - DNA, 50 bp, Homo sapiens
tgcctggcccaggcgcacacggaagtgctacttttccaggtatgtgggag

SEQ ID NO: 308434 - DNA, 50 bp, Homo sapiens
atcctggggaaagtcagcatcgcggtgctgggccccaagccggctctgcc

SEQ ID NO: 308435 - DNA, 80 bp, Homo sapiens
tgaagagtcttgtccacagctggcaaattcagtgcagatcaggtttcctttggatcctaaaagaagaaaagaatgggttc

SEQ ID NO: 308436 - DNA, 100 bp, Homo sapiens
aggcacttatggccatttcagccagacagtcattttgtttactcattcagccctgttgcaggtcccaataaactcttcataaggttgacagaagcaccct

SEQ ID NO: 308437 - DNA, 100 bp, Homo sapiens
tggaaatgtacagaaagaagtctcatcttcctttgaccacgttatcaaggagggctatggcatttcctctgtgccatctgcttccaattctaaatccata

SEQ ID NO: 308438 - DNA, 75 bp, Homo sapiens
tttgaagcactacaaacaagcagctgagagcgagaacccgagcagcgccatgagcaacactaccgtcgtccccag

SEQ ID NO: 308439 - DNA, 90 bp, Homo sapiens
cggaagtattgacggaaagcttgaattacctacatgaatgcagtaatagtggccttgtcttcaaaatcatgggatgtagagactgcaaca

SEQ ID NO: 308440 - DNA, 75 bp, Homo sapiens
tgcgcggactcatcgggtcacagtttatgcttttatgacgcggcatgaaagatggccagaagataacattccatg

SEQ ID NO: 308441 - DNA, 83 bp, Homo sapiens
gagcgtctccggctgcacagcgctcaggtgcgcgcggagccatggttatcatgtcggagttcagcgcggaccccgcgggccag

SEQ ID NO: 308442 - DNA, 82 bp, Homo sapiens
gtcccgctgccgtcgccgccgccaccatgcccaagagaaaggaagctcttcgtgggcggtcttgactggagcacgacccaag

SEQ ID NO: 308443 - DNA, 75 bp, Homo sapiens
cgtgtcgggttttgagctgccgcggtcccgggactgaggtgagaagccctaccactgcaactgggacggctgcgg

SEQ ID NO: 308444 - DNA, 80 bp, Homo sapiens
ttgacagcttccgccgggactgcctggccgacgtggacaccaagcctgattacatcaaccccagagccgtgcagctgggc

SEQ ID NO: 308445 - DNA, 75 bp, Homo sapiens
tcgcatcaaaccagctgtcattaagtacctcataagccatagcttcaggtggataagattgtggaccagctgcag

SEQ ID NO: 308446 - DNA, 95 bp, Homo sapiens
cttgagtcctgcattgtgggctggcgctgccgcgtgggtcagtggcttcctgcctgacacagctcacttcaagaagtgcacaatgtcagaacgtg

SEQ ID NO: 308447 - DNA, 50 bp, Homo sapiens
tgggcacccacggagcctccggggctgggcgtgatggtgggcatgggtca

SEQ ID NO: 308448 - DNA, 90 bp, Homo sapiens
gcgctgggtttggagacagcgtggtccagtatgccaactcctggttcaagggcagcaggaaagacgagatcctgggcatcgccaacaacc

SEQ ID NO: 308449 - DNA, 100 bp, Homo sapiens
gaatgggatattcttgaagttaagcgcctccttgatcaccaggataatattctctcattgattaatgtcaatggtgccgtgagcgatgtggagatgcagg

SEQ ID NO: 308450 - DNA, 75 bp, Homo sapiens
gagggccccagcagggccaccgggcggcaagccagcagacatcaaggacttctgaggagcctggtaccttgcata

SEQ ID NO: 308451 - DNA, 90 bp, Homo sapiens
actcctcaggccggggcgcacgtcggctcccacgcttagccagctcccggtgtggcggggcaccctggcccgcatgcggtacaaaagaac

SEQ ID NO: 308452 - DNA, 100 bp, Homo sapiens
cttgaaaaagacagtgacgacaaaacaccagatgatgaccctgagcaaggaaaatctgagggaacaggagtacagctgtgtagtaaagatgccttctggt

SEQ ID NO: 308453 - DNA, 101 bp, Homo sapiens
aatgcagtgaatgaacacgggaatgtgcccctgcactatgcctgtttttggggccaagatcaagtggcagaggagtcacccacttgcaatctgttccctgc

SEQ ID NO: 308454 - DNA, 100 bp, Homo sapiens
gatgtacgtggttttacaagggggacaaagacaataagtatgttccctactcggagagcttcagccaagttttagagctgtcggaaaaggtaacagaaga

SEQ ID NO: 308455 - DNA, 95 bp, Homo sapiens
cccagtcataaactatgatctcttatatgccatctccaagctggggccaggagctggttttccatccatcccagtcggcaagagccccatggtgg

SEQ ID NO: 308456 - DNA, 100 bp, Homo sapiens
gtgaagagacaggaggcagtagccaaacacccaggttcctaaagagaaagatgaaatggtagagcaagagtttaaccggttgctagaagctacatcttac

SEQ ID NO: 308457 - DNA, 83 bp, Homo sapiens
ctggagcctcagttggaagcagccgatccagcctgcggagcctgtggggcagatctgattccggagctgccatgattgaagtg

SEQ ID NO: 308458 - DNA, 87 bp, Homo sapiens
gagaggctgcagcagatcttcctacagatcatccaatggcagaccagagaatggacatttcttcaaccatcagtgatttcatgtccc

SEQ ID NO: 308459 - DNA, 100 bp, Homo sapiens
ctggagagcttcatcaaaaatagtgatagctttgataagacctgatcgctgcaaaatgaacccgtgccttaacggaggcacctgttatcctactgaaact

SEQ ID NO: 308460 - DNA, 75 bp, Homo sapiens
cccgcgtccgccgattcctcctccttggtcgccgcgtccttggctggcgtcccagtgtgccatcataatgtttga

SEQ ID NO: 308461 - DNA, 83 bp, Homo sapiens
tttggacgccggcggagacgcgggcgagatgtccagctcgccgctgtccaagaaacgtcgcgtgtccgggcctgatccaaagc

SEQ ID NO: 308462 - DNA, 101 bp, Homo sapiens
ctccgggcgcggggaagtcatgctcgcttcacggaggcaatagctagccggagattagcagaggcatttcatatcagtgaggattctgatcctttcaatat

SEQ ID NO: 308463 - DNA, 100 bp, Homo sapiens
aagaagagccgagagggaggaaagggaggcaagaaggaagcaggtgagtgtggtccaagattcagtaaacatatcaggacatactaatacaaatactttg

SEQ ID NO: 308464 - DNA, 83 bp, Homo sapiens
tttgtggagggtacttcattgatgccacaaccataatagaatgtctacattcctacctgtggatgaagagccagagtcctctg

SEQ ID NO: 308465 - DNA, 50 bp, Homo sapiens
tttgcctttgagatttactttaggaaagtggaagcatcagttcacagcag

SEQ ID NO: 308466 - DNA, 103 bp, Homo sapiens
ggccagaaatgtacacacaggagagctggctgcagtaaaaatcattaaattggagcctggtggattttcggaaaagacatatgaatggagctcagaagaggag

SEQ ID NO: 308467 - DNA, 100 bp, Homo sapiens
tgttcttgtcatgagtttcatcggtaaagatgacatgaaggtgtcttgctgcaggtaactaatgaagaagtggtcaaccacagagtcttcaagaaataag

SEQ ID NO: 308468 - DNA, 75 bp, Homo sapiens
gatacatcagtgtgggaagccaagcagatacaaggatccatatggctttggagacagtcgagattcaaggcgtga

SEQ ID NO: 308469 - DNA, 74 bp, Homo sapiens
gctagaagtacataagaccttatttggttatggaggttttgatgactatggtggctataataattacggctatg

SEQ ID NO: 308470 - DNA, 100 bp, Homo sapiens
gccctctcagcaagaacgggaacaaaactctgggtcctgacttgtcctgggcaagccaagtccattgcttctgctcctgggaagtgccaagattctgcag

SEQ ID NO: 308471 - DNA, 100 bp, Homo sapiens
agccgcgccccaccccgccagctccagagccacgctggcgcccatgcggctctacacgctctccaagcgccactttgtcctcgtgtttgtcgtcttcttc

SEQ ID NO: 308472 - DNA, 100 bp, Homo sapiens
agacgcagagaagaaacagcagtgcagcttcaagggcaaggacccacaggtcagctctatggctcttccacatgattcaaacgaaacttcctatttgctg

SEQ ID NO: 308473 - DNA, 75 bp, Homo sapiens
ctcatcttcctctcggtctacttcatgagagtctggataacacatggctaaacaggactgacaccatgattcaga

SEQ ID NO: 308474 - DNA, 97 bp, Homo sapiens
tacaggatcattaatatacagttcatctgtgttatcaggatcaatatggaaattatgtaatccaacatgtactggagcacggtcgtcctgaggataa

SEQ ID NO: 308475 - DNA, 128 bp, Homo sapiens
agaagacggggcagctggacgagctggagaaggccatcaccacgcagaacgtcaacaccaagtgcatcaccatccccagacaatgcagatcttcgtgaagactctgactggtaagaccatcaccctcg

SEQ ID NO: 308476 - DNA, 100 bp, Homo sapiens
ctccatcccccttgtctttgtgcttgcctgcgtccccagactcagagctctctttaagaactgtgacctgatgtggaagcagagcatatggacatcgacc

SEQ ID NO: 308477 - DNA, 100 bp, Homo sapiens
tattgcaatcatggtgcagaaataccagtccccagtgagggtgtacaaatacccctttgaattaattatggctagaaccatggagtctggcagtaccgcc

SEQ ID NO: 308478 - DNA, 50 bp, Homo sapiens
cccgggacacccccgcaagcgagcaggttaaatgggccagggaaaactat

SEQ ID NO: 308479 - DNA, 76 bp, Homo sapiens
gaatgccttggataaaattgtggaagaaggcaaagtccgcaaagagccagcctgtgactgtgaagtgctgaccaca

SEQ ID NO: 308480 - DNA, 100 bp, Homo sapiens
attctaccaatggcatcgtcatagagccgagcgaaaaggcgaagagcctaaaaccattggccaaccgtcacgcaactgccagtaaaaatattttccgaga

SEQ ID NO: 308481 - DNA, 100 bp, Homo sapiens
ggccactcacgctgggggaccttcagcaacctctgggaacacaaccaagcaatcatcaagcacctcctcgctgtggtcgccaggacccccccagagccaa

SEQ ID NO: 308482 - DNA, 82 bp, Homo sapiens
ttttaagaaagtggacaaagagaggagtcagtgccctctggtggtcagaagatgctgtgctgtctcgttaggatgaatggat

SEQ ID NO: 308483 - DNA, 95 bp, Homo sapiens
ccaggagtgccactatggtggcagcatacctgattcagggttgctcatcacccatggtggtaaaatttgctgatacacagaaggacaaagaacag

SEQ ID NO: 308484 - DNA, 90 bp, Homo sapiens
caacgccgtatccagcgactacgcggccgcggagacctacctgcggcgtcggcagctgctgctccgagagacggggtttcatcgtgttag

SEQ ID NO: 308485 - DNA, 75 bp, Homo sapiens
aaccatgtttggattgaagccgcctctgtattacttaccaggcctgaccttcataagaagacccagagtaaacac

SEQ ID NO: 308486 - DNA, 98 bp, Homo sapiens
aggtggatgtgaaagatcctaactatgatgatgaccagggttggttctggacattacacagcatacgcaactcacgaaggccgctggttccacttcaa

SEQ ID NO: 308487 - DNA, 82 bp, Homo sapiens
tgaagaaaggtggatcctacatgtgccataggactctttttgatcagaacaatgctgcaaaaaaagaagagtcagaaactgc

SEQ ID NO: 308488 - DNA, 100 bp, Homo sapiens
agcgagcaggcgaagccgcggaggacggggtgaagatggcggccttctccgatgtatcgttaagattaccggagaaatggtgttgtcatttcctgctggc

SEQ ID NO: 308489 - DNA, 90 bp, Homo sapiens
taggacctggaaatgtacagaaagaagtctcatcttcctttgaccacgttatcaaggagtttgaacgccatgaccctgtggatgggagaa

SEQ ID NO: 308490 - DNA, 75 bp, Homo sapiens
tcaatgctgttgagtatatcaataccctgttcccaaccgagcaaggccatgtgaaactttctgactttggtcttt

SEQ ID NO: 308491 - DNA, 76 bp, Homo sapiens
gaagaatttgttcacataaacagattgggactaaataggaatagtttgccaactccacagctgaggagaagctcag

SEQ ID NO: 308492 - DNA, 75 bp, Homo sapiens
aacggggctgctggtgggccgcgtcgaagacatggaccagggctacggaggctggagtgcagtggcgagatctcg

SEQ ID NO: 308493 - DNA, 83 bp, Homo sapiens
ggcctccatgtcccacgtggacaagttcgtcaaccgcggcgagtcctttgcacatgttggcaacacacgcatccgcatcggcc

SEQ ID NO: 308494 - DNA, 73 bp, Homo sapiens
acagaagcgctggtcggcgtctggcggttggatacactccagattggatatttctgctgagaaatgtaatgcg

SEQ ID NO: 308495 - DNA, 82 bp, Homo sapiens
gacggctgctcaaacatcaggcactattcctgatcagagaactccagttgcttcaacacacagtatcagtagtgcagccacc

SEQ ID NO: 308496 - DNA, 82 bp, Homo sapiens
gcgcggtagcgaaggccgccgaacctgcctggctagccggcgacttgagtgacgactgagcgggctttggacaccatgaact

SEQ ID NO: 308497 - DNA, 83 bp, Homo sapiens
cgccgctctccagcccgcttgaacggtgtccctggccagtgtccttccacctgtccacaagcatggggaacatcttcgccaac

SEQ ID NO: 308498 - DNA, 89 bp, Homo sapiens
cgaggccatccaggaaagcctgcagccctctgctatgccctttgccttctgtacgagagagaagcttccttggacagaatttgctgagt

SEQ ID NO: 308499 - DNA, 80 bp, Homo sapiens
ccaggagctggcatgacgtgcaggtctctagcgcgacatcaccttgaagatacagtttttgaggcttcttcagagcttca

SEQ ID NO: 308500 - DNA, 83 bp, Homo sapiens
ggagaaggcacccgcggaaccgacggctcaggtgccggacgctggcggatgtgcgagcgagacaatgcagatcttcgtgaaga

SEQ ID NO: 308501 - DNA, 50 bp, Homo sapiens
gaatccaccttcttacgctatggcaggccagaacacaaagcgtgaatccg

SEQ ID NO: 308502 - DNA, 100 bp, Homo sapiens
gtggtgctcaaaggccggccatgtaagatcgtcgagatgtctacttcgaagactggcaagcacggccacgccaaggttttctccaatgagggccagttca

SEQ ID NO: 308503 - DNA, 100 bp, Homo sapiens
cggcagtgctgaggcggaacaggccgggcaccaaggcgcagggccacactgcgttactgagcatgttctgaccgggccgtcttgggcatcacctgccatt

SEQ ID NO: 308504 - DNA, 96 bp, Homo sapiens
ccaccacctccgatggagcccgaccatcctttctacagcaacatcagtaaggacgcaatgagcccctgaagaaagagcggcttaagtggaagagcg

SEQ ID NO: 308505 - DNA, 75 bp, Homo sapiens
aagtagcatggaaatggagggcatcttcaaccacaaaggacttggaagaacaaagtcggttgatagctgcttcca

SEQ ID NO: 308506 - DNA, 50 bp, Homo sapiens
ctggtttcattcgaggtttcgggccgattctggctgtgactcagtcactg

SEQ ID NO: 308507 - DNA, 90 bp, Homo sapiens
tggcaatgatgagaggagccgggcagtggaccatgtgcagcgcagctctctgctggatgaaccgaatcctaacagtccagccaatagcca

SEQ ID NO: 308508 - DNA, 100 bp, Homo sapiens
cctgggagttcagcttttagagcaggtgtatgatcttttggaggaggaggatgaatttgatagagaggtgtgatgaatgcagactctgctaccattttgg

SEQ ID NO: 308509 - DNA, 101 bp, Homo sapiens
ttgaaattaccaactgctttcctttccctcagcacacagaggatgatgctgactttgatgaagcctttctgagaaaagtctacagcattctttctctgcag

SEQ ID NO: 308510 - DNA, 97 bp, Homo sapiens
ctgacagtggatcacaacttggttcaatgggtagcctcaccatgaaatcacagcttcagatcactggctaaagaattacctccaaagccattgtcaa

SEQ ID NO: 308511 - DNA, 100 bp, Homo sapiens
gacggtcatgaggagctgaaggccatcgtatgggaagtgaagctcagtgttcccatgccctacacactcaaggtgcactacaagtacacggtagtcatga

SEQ ID NO: 308512 - DNA, 75 bp, Homo sapiens
gctggactaaacaggtcacctgcaggctaccggctctctgaccagttccacgacatcctcattcgaaagtttgac

SEQ ID NO: 308513 - DNA, 80 bp, Homo sapiens
ctctgcttttccagaaactgtgccaggatcacggtcttgcagtcacagatgaaattcttcaaggaaagtcagattggtcc

SEQ ID NO: 308514 - DNA, 96 bp, Homo sapiens
gttgttgccggagctgagaccgggcggccacagtccgcagggatgaacctcgagttgctggattgctgctaaaattgattcaattcctcacttgaa

SEQ ID NO: 308515 - DNA, 89 bp, Homo sapiens
cgcgagcacagagcctcgcctttgccgatccgccgcccgtccacacccgccgccagcgtgagtgcatctccatccacgttggccaggct

SEQ ID NO: 308516 - DNA, 100 bp, Homo sapiens
cctcgacctgggcaagctccagagcctgccggaaggctccctcggtcgcgagtatctccgtttcctggatgtgaacgacgccaagagtgccgaggatgag

SEQ ID NO: 308517 - DNA, 100 bp, Homo sapiens
cgatgaagaggatgatgtttttggtgaaggacccagatgatgtggtaccagttggccaaagaagagcctggtgttggtgcatgtgctttggactagcatt

SEQ ID NO: 308518 - DNA, 100 bp, Homo sapiens
tgcctacctactctgtgccaggttctatgctctgtgttatttatcatctcgataaccccgtggggaagatggtcagtaggacagaaggtaacattgatga

SEQ ID NO: 308519 - DNA, 100 bp, Homo sapiens
cctccagcttgccaccaaagacctgcgactttgctcagttccagggtctccctccactgctgtagtaacccgggtccggggcctcggtggtgctcctgat

SEQ ID NO: 308520 - DNA, 91 bp, Homo sapiens
gggccaaggaaaaatcgagcagaaagaatgtctttcaggcgcacctatgttggcagcatgcctggtcgcatcatcaacggcttgaagactg

SEQ ID NO: 308521 - DNA, 75 bp, Homo sapiens
gtggatcgctgtgatcgtcacttggttggcttatttggacgtctaggcagttttccagttagagggacaccgatg

SEQ ID NO: 308522 - DNA, 100 bp, Homo sapiens
gccgctgtgtggttgcaacggagataaattcccggaaccgcgattcggcgtgtcaggaatatattattcgagtgcaaagaggaatttctgtggaaaacag

SEQ ID NO: 308523 - DNA, 75 bp, Homo sapiens
cagattcgcagtggtcgcttcttctccttggaccctctttgcaagttcagtgcttaacctgaccgaactggctgc

SEQ ID NO: 308524 - DNA, 116 bp, Homo sapiens
cgctgccacggtctgcgtagctccagaggtttaaccataggatagagaaaccaggataccatacttgcagagctccttcagatacataaagaacacattgtaggataccatgaaca

SEQ ID NO: 308525 - DNA, 88 bp, Homo sapiens
tgcgaactatcttctccagcggagatggccaataggttggaaagaaccatgactgtattcaggaaggcacatgaactgaagcttctgt

SEQ ID NO: 308526 - DNA, 74 bp, Homo sapiens
aggcactcctaggggacataaaattagtgattactttgagggtataaaattcccgtcattgaaaatctaggtgc

SEQ ID NO: 308527 - DNA, 100 bp, Homo sapiens
tacagatcttccctttcacctatgaaagcaaacgtatgggcatcatcgtgcgggatggccgagcctcgatttaacaacccctacttctggccccctcctc

SEQ ID NO: 308528 - DNA, 75 bp, Homo sapiens
gttacctcttttaaactcattctactggagcaaatggtactaggttttgacaagcttgcatcatgcgtgagtata

SEQ ID NO: 308529 - DNA, 97 bp, Homo sapiens
tgagacctgtcaccccgactcaacgtgagacgcaccgcccggactcaccatgactgacgacaacagtggagacttggacccaggagtcttgctgaca

SEQ ID NO: 308530 - DNA, 75 bp, Homo sapiens
agccgtaggcaggaccccgggacaccctggaagccaggaaatgaatttctagaaggaggagttggccatgttgaa

SEQ ID NO: 308531 - DNA, 100 bp, Homo sapiens
tagcctcggggaaggagcaggatttagaggaccactagttggaccccatcctcgtgctggaggaacagacctgtggatgaagagccagagtcctctgagg

SEQ ID NO: 308532 - DNA, 105 bp, Homo sapiens
gcaagatggcggacagtgcggaactaaagatgtcaagccctccaacatcctagtcaactcccgtggggagatcaagctctgtgactttggggtcagcgggcagct

SEQ ID NO: 308533 - DNA, 82 bp, Homo sapiens
catttcctcctgacggctgtacttgagcagtcacctggcacagggggcagtacccaaaggaaacgctacgaaagaatacatg

SEQ ID NO: 308534 - DNA, 100 bp, Homo sapiens
gaagatgaagcaaaagaacaaattcagtcccttctccatgaaatggtacacgcagaacatgatgaaggagcttctatgcacccttgtgatgacacatact

SEQ ID NO: 308535 - DNA, 96 bp, Homo sapiens
cacagtatggtagccacacccccagatgaccttgaatgatgccatgaggaacaaggcaaggctgtcaattacaggaagtactggagaaaatggacg

SEQ ID NO: 308536 - DNA, 50 bp, Homo sapiens
ccgggagacccaggaggagcccgcaggatgaccagtgtcccagtgaagga

SEQ ID NO: 308537 - DNA, 110 bp, Homo sapiens
agcacagtgtctgatggagctttcctaccagaccctgaaattcacgcatcaggcgcgggaagcgacactgccctaaccatcatggaggtggccgaggtggaaagtcctct

SEQ ID NO: 308538 - DNA, 97 bp, Homo sapiens
cactgaccccagagtggcagaaaggctgatgcagcagaccttcacggcatggtgcaactcccacctgcggaaggcaggcacacagatcgagaacatt

SEQ ID NO: 308539 - DNA, 96 bp, Homo sapiens
cttcgccatcgccagcatcgccaacccggactggatcaacaccggggagtctgcgggtaagaatgattgatgttggctgatattggagtgctcatt

SEQ ID NO: 308540 - DNA, 75 bp, Homo sapiens
gacaatggctttggtccccagcgcagtgaagtggtgagcctttttgtcactgaatttacatagtacatgacgaag

SEQ ID NO: 308541 - DNA, 100 bp, Homo sapiens
gacacatcatgcctcccacacaatcgcagtttggagagatgggaggcaagtttatgaaaagccagggctcctcgaactcctatgccattaagaagaagga

SEQ ID NO: 308542 - DNA, 100 bp, Homo sapiens
aaatagcagaagaataccatgaggtcaaaaaggaaatcaccctgcttgagcaaaggaaaccttagctggatctccaaaatacaagtgaatcacccggcag

SEQ ID NO: 308543 - DNA, 98 bp, Homo sapiens
gggaaaaacttaaaatggatatgaaaagtgaagaaagtgatcataggagaaaaccatttcaggtggagccgccaccaaaatgcagattttcgtgaaaa

SEQ ID NO: 308544 - DNA, 88 bp, Homo sapiens
gatgcggctcccgccggctctgggtctggagatctgtgacttcctccgcggagccacagtccatagaatcctcggccagcaggtcccc

SEQ ID NO: 308545 - DNA, 101 bp, Homo sapiens
tcgtcaacggcgcgctggtggtcacggtgagctgcggcgagcggagcttcgcggggatcctgctggactgcacgaaaaatcatacacgtggacctaactgc

SEQ ID NO: 308546 - DNA, 100 bp, Homo sapiens
caacatgtggttcaagaaccttgacaagctcatccggctggtaaatgcgcagaacattaaccaggtggtatttgttggaaatttcttgagaattaatacg

SEQ ID NO: 308547 - DNA, 75 bp, Homo sapiens
gtattttgcagagcatcccccaaagacagattgaagaaatgcagagacagatgacacaattggtactgcctggca

SEQ ID NO: 308548 - DNA, 75 bp, Homo sapiens
agaaatcatttcactgttagtttcaaagtatgtccgtggttcagaccctgtattaaagcttttggacgacaatgg

SEQ ID NO: 308549 - DNA, 100 bp, Homo sapiens
gggtttcgtgtgtttgacaaggaggggaacggcaaagtcatgggagcagagctcagacatgttctcaccacccttggaggagctgacaagcacaagtgtg

SEQ ID NO: 308550 - DNA, 101 bp, Homo sapiens
gcttttcctcgctggggtgtacgacattgctacaagtggttggtgtggtctctgtggctgtggccgtgattccttggatcgcaatacccttggttcccctt

SEQ ID NO: 308551 - DNA, 85 bp, Homo sapiens
gctggccacttgcttgggatcctttatcctggtcatcttctatttccaaacagctcttcagtgggtcatctgtgtgtcacagcct

SEQ ID NO: 308552 - DNA, 98 bp, Homo sapiens
agcctcttcgagcgccgcggacgcgtcatcgagtgtgacgtggtgaaagtcactggaatcaattccgtggggaatcggctccgccgccgcgaaggaca

SEQ ID NO: 308553 - DNA, 100 bp, Homo sapiens
agcacaccaggagtagtggccaggtttgtggagttcctcaaacgaaaagagaattgtacactgcaggtaatgagagatccaaacaccaagcgctccaggg

SEQ ID NO: 308554 - DNA, 50 bp, Homo sapiens
ccggaatcatgtacataaagcagggaccccagggcggggcagttcccctg

SEQ ID NO: 308555 - DNA, 75 bp, Homo sapiens
tcagtccgggacacgaggccatggtcagcccaaggccaaccccactgtcactctgttcccgccctcctctgagga

SEQ ID NO: 308556 - DNA, 74 bp, Homo sapiens
caagggccccaacagtgcattagtgcagcagcttatcaaagctgttaaacgtttaatgaaagaagcggcagaat

SEQ ID NO: 308557 - DNA, 100 bp, Homo sapiens
tcactaagccccttgctgtgatccaccatgaagcagaatctaaaggtaaacgcaaagcactgaagttgaattttgcaaatccacctttcaaatctacagc

SEQ ID NO: 308558 - DNA, 51 bp, Homo sapiens
agtttgaaaggtgtttagattcagaagagccccccaagatgaacccagtgg

SEQ ID NO: 308559 - DNA, 97 bp, Homo sapiens
tacagagttggattccaactggtcatggtttcagttgcgatgcatgcaagtcggaggaaacgctagtgcagtaaagtaatctcacaagctgccaaag

SEQ ID NO: 308560 - DNA, 100 bp, Homo sapiens
tgcaaatctcccatttttgatgcgacagaatcccactgagacgcttcggagagtgttgccaaaagtcagaaaggacagaataacgggctcccagattcac

SEQ ID NO: 308561 - DNA, 100 bp, Homo sapiens
ctcagggtgtgcgttcccctctgctgaggcagagctccagtgaacagtgcaggagaagctaaaacttacttatgaggaaaagtgtgaaattgaggaatcc

SEQ ID NO: 308562 - DNA, 98 bp, Homo sapiens
cgggagctgagttatagctgtgacttctgccctgccaggccgcacacaagctggctgacccgggaattgaatgatctggcacgggaccctccagcaca

SEQ ID NO: 308563 - DNA, 88 bp, Homo sapiens
aactgggaaactatagcaaggctcgtgcctggattaacaccaaaagagaagaacatgagctgcctgtggacatggaaaccatcaacct

SEQ ID NO: 308564 - DNA, 100 bp, Homo sapiens
gacgcgccgctggagaatgaaggaccagaggagcgagagcagcaagaaccacacccagcagcaatgtcagcggaagtggaaacctcagagggggtagacg

SEQ ID NO: 308565 - DNA, 98 bp, Homo sapiens
tgaacggggagctcgttctccggaaggtggtaaataaagatgtcctggacgtttacattgagcatcggctaatgatggagcagcggagtcgggaccct

SEQ ID NO: 308566 - DNA, 87 bp, Homo sapiens
gcgggatctgcaccgcgaccagggccgcaggaagacgcagtgctggagatcagaatttatttacctctgtttatccaacgctctctc

SEQ ID NO: 308567 - DNA, 99 bp, Homo sapiens
agccttcagcttttggcagcatgaaagttagcactcaaagcttggattctgccgtgccactcacgaatggcgacacagaagacgatgctgacaaaatgc

SEQ ID NO: 308568 - DNA, 101 bp, Homo sapiens
cttgtgtagcaatggagattcaacagaataatgctacaaagacatttcgagaattttgtggacctgctgatcctgatcgtagggcatcagaaaaacaaaaa

SEQ ID NO: 308569 - DNA, 49 bp, Homo sapiens
cacgccatgcccattgggagaatagcagaacctttgcacaaaactgcag

SEQ ID NO: 308570 - DNA, 117 bp, Homo sapiens
ctccgcccaccccctagtacttccgttctccagcgctgggcaccgcggccggagctgtgggctgacaccaatgggaatcccaatggggaagtcgatgctggtgcttctcaccttctt

SEQ ID NO: 308571 - DNA, 75 bp, Homo sapiens
actggtgacttcacttttgagtgcaactgccttccaggaatgtttacccttgcggaagttgcatcacttaatgac

SEQ ID NO: 308572 - DNA, 100 bp, Homo sapiens
cgactttccaaagcgctggaattatgggcgtgagccactgtgcccagggttctccaaaaaatgtggaatcctttgcatctatgctgagacattctcctct

SEQ ID NO: 308573 - DNA, 100 bp, Homo sapiens
gacagtggagtctggcatcttattgggccgcggccagagggctagaatccgcgccttccgagggagccgcgccctgcgggccccaccgtacccgagggga

SEQ ID NO: 308574 - DNA, 100 bp, Homo sapiens
ggtgcccagcgttttcgcgccccaagagcaggaataccagcaggtccctgtgcgttttattgcgacctgccggtgggaactttgtctccgagtcggagca

SEQ ID NO: 308575 - DNA, 100 bp, Homo sapiens
tgagggaaatcgtgcacatccaggctggtcagtgtggcaaccagatcggtgccaaggttgaaatcacaaagattagacacctttttagataggtgttctt

SEQ ID NO: 308576 - DNA, 100 bp, Homo sapiens
aaactgaagagagctagaacagttcaccgagactcaggttccgagaagtaaagctttggaggtcacaaaattagcaatagaagctgggttccgccatata

SEQ ID NO: 308577 - DNA, 88 bp, Homo sapiens
gggcaggggcggaggcggaggcagaggtggaggcgctttgaaaggtagttagaaacaaacctgtggcaaggcaggctcctggcaaacg

SEQ ID NO: 308578 - DNA, 75 bp, Homo sapiens
actcgcctcagctgagcctgggtgagcccgtggtagcagcagaagcaggcattatgggataacgattgtgtaaag

SEQ ID NO: 308579 - DNA, 100 bp, Homo sapiens
gcagaagatgttatccacagcctgggaacctgccttaagctgggtgatgttatcaatactctggctgaccatcatcatcgtgggactgactttggtggaa

SEQ ID NO: 308580 - DNA, 75 bp, Homo sapiens
gtccagggtgtgctgcggggccgggcgcgcgtccaatatcagatggaaatgatgcggagccttcgccatgtaaac

SEQ ID NO: 308581 - DNA, 100 bp, Homo sapiens
caaataagctatatactttggttacctatgtacctgttaccactttcaaaaccaaaacctattgatgtacaagtcattacacaccacatgcagcgatatg

SEQ ID NO: 308582 - DNA, 90 bp, Homo sapiens
ccaaccagcagggggcttgaaggaggcgtctagggctttgctcccaagggctgtggctgatgatggcgtggaagacattttggtgaagcc

SEQ ID NO: 308583 - DNA, 48 bp, Homo sapiens
aaagctttaggagttcacagtctgtgaagagggataccaaggaaagtt

SEQ ID NO: 308584 - DNA, 98 bp, Homo sapiens
cggccctctgcgaccccagtcgcctggcgcaccggcttttggtgctgttactgatgtgcttccttggctttgacaaaagcaagccgggaggctggctg

SEQ ID NO: 308585 - DNA, 75 bp, Homo sapiens
acccaccccacagtgcccggctcggctgcgacggtgtgaagggagacctgctgattgacatcggctctggcccca

SEQ ID NO: 308586 - DNA, 74 bp, Homo sapiens
ctggaacatcacatagtctggcatggactgctcttcctagggacagggagcagggggctcttttagcattgaca

SEQ ID NO: 308587 - DNA, 82 bp, Homo sapiens
gatggacctccagatttccttactgcttcaaggttactgactttttatgatgtttggtggctatgagactatagaagcatac

SEQ ID NO: 308588 - DNA, 100 bp, Homo sapiens
tccctgaagagagaaggcaaagaacctctggtgttgaaaggtgaccaagaatatggcccaggtgaccaaagccctggacaaggccctgagcaccatggac

SEQ ID NO: 308589 - DNA, 75 bp, Homo sapiens
ctatggcctgttatttgtctcaacaaaagaaaggacagaataacgggctcccagattcacaagccccaccaagag

SEQ ID NO: 308590 - DNA, 76 bp, Homo sapiens
aaagtcagcatgagcaaaaactccaaactcctctccaccagcgccaagagggagatgcagttaaagacttgatgct

SEQ ID NO: 308591 - DNA, 89 bp, Homo sapiens
gcaggaagaccgtgatgggagctgcagcacagtcgggggtgtaggttatggggagcatgcaagcggcaagatgtcctacagatgaatta

SEQ ID NO: 308592 - DNA, 93 bp, Homo sapiens
cgatgcctaccacctagaactggattgtgcgaggcggggtttcaccatgttgcccagactggtcttgaactcctgagcttaagcaatccacct

SEQ ID NO: 308593 - DNA, 85 bp, Homo sapiens
cttatactcctcccagtgacgggtctggagtgcgtgggggaccggctgttggcggccttatgccagcctggaccatcttggaggc

SEQ ID NO: 308594 - DNA, 50 bp, Homo sapiens
cttcttgacaatttgcttgcgcttataagatatggtttggagtgcctttt

SEQ ID NO: 308595 - DNA, 100 bp, Homo sapiens
attaggcggtaatcctgggagcaccagcgctgccacttgtacccgcagacattatgaaaggtcctaggcctacttacaagcctccagtctcaaattatcc

SEQ ID NO: 308596 - DNA, 75 bp, Homo sapiens
gcgctgcagaagagcaggcacctcctggaccagcgggacctggacttcaccatcgacctggacttcaagggccag

SEQ ID NO: 308597 - DNA, 75 bp, Homo sapiens
agcaggatgaactgaaacggattgccagagaattggcagaaggaattcctcctgatcagcagagactgatctttg

SEQ ID NO: 308598 - DNA, 75 bp, Homo sapiens
aagtactgttgagaagtgcccaggagcaccttactatgcaacgagtgagctgaaggtcaggccaggacagtgaga

SEQ ID NO: 308599 - DNA, 76 bp, Homo sapiens
acagaggatcaatgaaggggaacaaagatttgggagcatctactttgtgccagaattatatccagatcgagagaca

SEQ ID NO: 308600 - DNA, 51 bp, Homo sapiens
cacttgacaaccagcatgccgagatgaggtaacctgacctctccactgaag

SEQ ID NO: 308601 - DNA, 80 bp, Homo sapiens
tctcagggtttcacacgtacctcgtcgcctccaacctgactactaatgaagacgagcatccccccggtccttcagaatcc

SEQ ID NO: 308602 - DNA, 100 bp, Homo sapiens
gtaaatgcaaaggacatggccggccggaagtcttctcccctgcacttcgctgcagcacaaacatttcactgaagatattcaaacaaggcaatatcgttcc

SEQ ID NO: 308603 - DNA, 100 bp, Homo sapiens
aagacttgcaagctgctggatttgatgaggttacacggtgtgggcacacaacctcattgccattgctcgtcttcggggctctgatctgaaagtgcttgaa

SEQ ID NO: 308604 - DNA, 74 bp, Homo sapiens
gagaatgagaccctggtggagtttgctattgttggaatcgaagcctcttaaaatggcagatgacttggacttcg

SEQ ID NO: 308605 - DNA, 75 bp, Homo sapiens
tcgcgcgggtgtcgctgggctgtcggcctggaccttgcagccgcaatggagcatcagatccatgctgctgctgac

SEQ ID NO: 308606 - DNA, 90 bp, Homo sapiens
ctgaagaagctctgtagtggccccgaaggaggactgaggaaggattatatgcgtcaggcaggagaagtgacttatgcagatgctcacaag

SEQ ID NO: 308607 - DNA, 96 bp, Homo sapiens
tcctgactgcccacttaagtcggctcttgcgtatgtggatggcaaatgctgtaaggaatgcaaatataaagagaggcctgtccagtctttgaaaac

SEQ ID NO: 308608 - DNA, 96 bp, Homo sapiens
ggaagacttatgaacgccttgttgcccagttccccagttctggcagattctggaaactgtacattgaagcagaggaaaagaccagtgccctcagtc

SEQ ID NO: 308609 - DNA, 50 bp, Homo sapiens
actgtccagcccaagcctgactatggatcaagcaccccaacattgtagcc

SEQ ID NO: 308610 - DNA, 100 bp, Homo sapiens
catgcatccaagttccagtttgtggcctcctaccaggagctcatggttgagtgtacgaagaaatggactccagttcagttgtagaatggactcaggcccc

SEQ ID NO: 308611 - DNA, 100 bp, Homo sapiens
gatgagcaaagaatgacagcaagaggcaaaacttcggacatagaggccaaccaacctttggaggactgtgaaggccttattgttcgctctgccaccaagg

SEQ ID NO: 308612 - DNA, 73 bp, Homo sapiens
gaagatcgcaccgcggacgcccgctgagcttggcgcacgggccgaccaggaccgtataatagacgctggcccc

SEQ ID NO: 308613 - DNA, 89 bp, Homo sapiens
caggcctccaaagaccaagcgaggaatactctgaagatagtaactccgagccaaatgtggatttggaaaatcagtactataattccaaa

SEQ ID NO: 308614 - DNA, 75 bp, Homo sapiens
ccactgatgaggatcagcccatgctgtgctgggttctggcgtccctctccccaaaatcctcaacatcgactttag

SEQ ID NO: 308615 - DNA, 98 bp, Homo sapiens
cctgccctgcccaccggggctgaaaattcctgaggaagatggttacaccatcacccccaacaccctcaagggctcgaagggagtattgggagaatctg

SEQ ID NO: 308616 - DNA, 51 bp, Homo sapiens
gaagatggcggctgggttcaatactgtaagattgatgttaaaggcatggtg

SEQ ID NO: 308617 - DNA, 71 bp, Homo sapiens
tggactcgccctcctatgtcctgtacagctacctctacccagatggaaagacccacaacccagacctgact

SEQ ID NO: 308618 - DNA, 90 bp, Homo sapiens
tactcctctcgaccgtgctaggatgactgcagcagagtccccgagtcctttgatgcaagggtctaggtaaaagaaatcattgagtccccc

SEQ ID NO: 308619 - DNA, 74 bp, Homo sapiens
acggctgtgctagacgaagtggtgaagcccaaacgcaaacatgcagatctttgtgaagaccctcactggcaaaa

SEQ ID NO: 308620 - DNA, 90 bp, Homo sapiens
ccataccagagaattatgatcaacttcaaccctcacttcgatttggaggacagagactgcaaggtgtttgtgaaccgaagtttagcaatg

SEQ ID NO: 308621 - DNA, 75 bp, Homo sapiens
atctgggcggtatctggaacttgaatctccctggaaaaggagacatgaatgtctgcaatgatacttcctgacaag

SEQ ID NO: 308622 - DNA, 82 bp, Homo sapiens
ggagtcgccaggcggccgtcatggcggtgtcggagagccagctcaagaaaatggtgtccaagagcataccagaaattcctga

SEQ ID NO: 308623 - DNA, 98 bp, Homo sapiens
caaggaagggactttaatcactgaccatcccaatatacaggcgcatattaaatttcctattgactacccctattcaccacctaccttcagattcttga

SEQ ID NO: 308624 - DNA, 101 bp, Homo sapiens
cagaggtggaggcgctttgaaagaggatctgaagaggcaaaatgcagtattacaagctgcacaagatgatttgggacaccttcgaacccagctgtgggaag

SEQ ID NO: 308625 - DNA, 95 bp, Homo sapiens
gcgcgactcggcggcggcgtcttttaacccacaatacattatatgcaccagaaatgctagccaaaatggcagagcctttcaccaaggctctggat

SEQ ID NO: 308626 - DNA, 83 bp, Homo sapiens
atcatgctgaccaccaatcagatccgtaagggactggtgattgcagctggaagtgcccatgaccgagctggcgtcctccgggg

SEQ ID NO: 308627 - DNA, 90 bp, Homo sapiens
ggatgaagttgttcattgtttgtcaccacaaaaaggacagtggatcaatcttcctgtcctacaactgacaaaggatcccctaaagacccc

SEQ ID NO: 308628 - DNA, 50 bp, Homo sapiens
gggacaagtactggaaccgctttcgagacaaccacatcactgccttcgca

SEQ ID NO: 308629 - DNA, 89 bp, Homo sapiens
gtccagagacagagcactaattagatatgaaaaacagtagctccgtatcgaatacattgacaaatggatgtgtcatcaatggacatttg

SEQ ID NO: 308630 - DNA, 51 bp, Homo sapiens
gtacttcaagagcacagtcttatgtaagaaccatccgggtatggctgaaaa

SEQ ID NO: 308631 - DNA, 100 bp, Homo sapiens
aagctggagtattttgagattggagaattaagccccgtgctgatcccattccaatatgtagcttctgtttggggactaaagaatcaaatcgtgaaaagaa

SEQ ID NO: 308632 - DNA, 100 bp, Homo sapiens
ctggagctgcccggggcggtccctggctgcgtgcacagcgccttgttccagcagggcctgatccagttgcagaatgaagaagagtctggagaacctgaac

SEQ ID NO: 308633 - DNA, 82 bp, Homo sapiens
cgagcgcgagcggcgcgagaaagcggacctacgtgggcgccatgcccgggaagatcatccagtgtttgaagaagaccaagac

SEQ ID NO: 308634 - DNA, 98 bp, Homo sapiens
actacaggctttacttttgtggtagaccgtctaagagaaggttagcatggcctcattgaaagaactagatcaaagactctttgaaaattacatcgagt

SEQ ID NO: 308635 - DNA, 82 bp, Homo sapiens
aaatgaagttcaaggatttctctttgggaaactaaagaacgtcaaggtcgtgggaaataaaaggcagttctacacagactgc

SEQ ID NO: 308636 - DNA, 95 bp, Homo sapiens
tgcattaaggtcctacagaccctgagggaaatgatgaccaaagatagaggctatggagaaaaggaaacatacctacagaccattctgtttctgtg

SEQ ID NO: 308637 - DNA, 74 bp, Homo sapiens
gagacacagtatggtagccacacccccagttacatcatgctgatgacagcttcctggtcctcaccacagatgga

SEQ ID NO: 308638 - DNA, 100 bp, Homo sapiens
ctcaaatcgtcgtagtgggaacgcagcaaagtgtgggatgctgtctcaggagatgaattgatgaccctggctcataaacacattgtcaagactgtggatt

SEQ ID NO: 308639 - DNA, 97 bp, Homo sapiens
aaaccctgcttcgtctgccaggacaaatcatcagggtaccactatggggtcagcgcctgtgagggatgtaagggtgatcttgatactgcagcagtaa

SEQ ID NO: 308640 - DNA, 101 bp, Homo sapiens
aactaggaatctatgatgctgatggtgatggagattttgatgtggatgatgccaaagttttattaggacttttttcaggagatattgcacctttaatgcaa

SEQ ID NO: 308641 - DNA, 75 bp, Homo sapiens
tgtcgcctccgaccgggtggccgccagcaatattgtccagatgaaggacgaaaaactgttcttgaaaaccacctg

SEQ ID NO: 308642 - DNA, 83 bp, Homo sapiens
ctggccagcgagagccagggctccaaagaactcgccctgggcgctgcctatggcacagccaagagcggtaccggcattgcggc

SEQ ID NO: 308643 - DNA, 120 bp, Homo sapiens
ggagactacaatatggatggctatccagacgctctggtcatactaaagaacacatctggaaggaaagaccacagcaagattctttcattcgtctcctcctagcctgggggaccaggctcg

SEQ ID NO: 308644 - DNA, 108 bp, Homo sapiens
gcgcagggcctgcagcgggagctggacggcgagcgcgagcggcgcgagaaaggtggcccagttgaaatccttcccttcctctaccttggaagtgcctaccatgcatcc

SEQ ID NO: 308645 - DNA, 85 bp, Homo sapiens
ggatttagccaaagaaaaagataaaactgagaaagaattgcccaaaatgagccagggtaaaatccagtacaaggaatatatcatt

SEQ ID NO: 308646 - DNA, 76 bp, Homo sapiens
agtacttcgccacttactttaatgagaagatctccattcctgaggaggaggattactacagcatcccatttcccac

SEQ ID NO: 308647 - DNA, 83 bp, Homo sapiens
ctcgccaagggccccaatgagtggcacacagtctactatcaccgacagatacgtttgaaatggtttctgaagatgaagatggg

SEQ ID NO: 308648 - DNA, 83 bp, Homo sapiens
aacgcctggctcggagcagcagcctctgagttttgctacttgagaagatagaacatgatgacatctgcaataaaactttgaag

SEQ ID NO: 308649 - DNA, 75 bp, Homo sapiens
gcacttcctgcagtgggcattagccacgtccagtctcgattccttccttgggcttttcatctgccacggcaagcg

SEQ ID NO: 308650 - DNA, 98 bp, Homo sapiens
tggccatggacctgcccggccacgcggatgaggcagaagctctccggaggatccaggtggtgcatgcatttgacatcttccagatgctggatgtgctg

SEQ ID NO: 308651 - DNA, 50 bp, Homo sapiens
agaagaaacgacaccattgtttttagccttgccttacacccagacaaaac

SEQ ID NO: 308652 - DNA, 98 bp, Homo sapiens
catcaaaaatagtgatagctttgataagatgtacagttacccagcacgtgtacctcctcctcctcctattgctcgggctgtagtgccctcgaaacgtc

SEQ ID NO: 308653 - DNA, 74 bp, Homo sapiens
cgggtcctgcgaccgctcctggctggtgagggtggcctgcagagcctgctgggaaacatgagccacagccagct

SEQ ID NO: 308654 - DNA, 123 bp, Homo sapiens
agtttttctccattgattatgatagcagtgggcttttcacagtgggctttactgtgttgagtcactgtgtgcccagtattctgcagacaaacgagaagatgagaagatgtgtgatcatttgat

SEQ ID NO: 308655 - DNA, 75 bp, Homo sapiens
aaaaccctagcgcctattatagtgatagtggaacagatgtgcattcagattaaagaagttggagatcgtgtcaac

SEQ ID NO: 308656 - DNA, 125 bp, Homo sapiens
gtgcttggctactggaaactggaattctgttcctccagaatgccaaggccaggagtggtggctcacacctgtaatcccagctctgggaggccaaggccagtggattgcttgagcccaggagtttg

SEQ ID NO: 308657 - DNA, 82 bp, Homo sapiens
ggcacatccttgcattgttctacgccgccaatgtcagcgtttgctgccaattgatggggcaaatgatctcttttttcagcca

SEQ ID NO: 308658 - DNA, 82 bp, Homo sapiens
caaccattgacgccatgtcgggttattcgagtgaccgagaccgcggccgggaccgaggctgaataccactagaaacatacct

SEQ ID NO: 308659 - DNA, 76 bp, Homo sapiens
cggcggtggcatctgcggccatggcggcgactactgccaaccccggcatttggctttatgtcccgagttgccctac

SEQ ID NO: 308660 - DNA, 101 bp, Homo sapiens
tggaaatgttaaagatggcaaagcctccctctgatatccaggaaatagaactgagagtgaagagactgcaggtgagccaatggtggcagcagaagtaggcg

SEQ ID NO: 308661 - DNA, 100 bp, Homo sapiens
tcattgattatcatctggcagcattcatcacagtgatgcttgcgaggaggcttgtatgggctctcatctcagagaatgttctcattgttgaggtaagctg

SEQ ID NO: 308662 - DNA, 90 bp, Homo sapiens
aaaaggcaccaagaatttgtacacatgtacaatgcccaatgcgatgctttgcatcctaaatcaggtattgttgcagcatctggcagtgag

SEQ ID NO: 308663 - DNA, 51 bp, Homo sapiens
atcaccggagcgtcccagctgcgaggaggcactggagatattattgctgtc

SEQ ID NO: 308664 - DNA, 75 bp, Homo sapiens
ggaaggggcagtacaagcttacgtctctgctcttcagtacaatcctgcacaaatatttaaacatggaaaacgtga

SEQ ID NO: 308665 - DNA, 75 bp, Homo sapiens
ccagccgtcccgagctaccagcaggatcaacggccaccccgggaagtccacgcgcctggcgggcttgtggaagct

SEQ ID NO: 308666 - DNA, 83 bp, Homo sapiens
catggcaatatgggtggggggaattgtgtgttgtgtggaaacaggaagagaactagaactggaagtaaagcattgaagatgtg

SEQ ID NO: 308667 - DNA, 98 bp, Homo sapiens
caccatcatcagtgagaacttgaacaatgaggtcatgatgaagcaatggcagatgagtctggggaccagcgaagaccaccagcacttcacctgcacca

SEQ ID NO: 308668 - DNA, 82 bp, Homo sapiens
aagccgtctgtagaggatcctttccccattcctatggaccagctctcattgaacactgtcttttagaaaatggattctcggg

SEQ ID NO: 308669 - DNA, 97 bp, Homo sapiens
agagcgtgaccgagagcgcgaatatcgtcatcgttagaaggtctaggctgtatagaagacaatgaaatatttgacaatgcaatggctggagtctgga

SEQ ID NO: 308670 - DNA, 82 bp, Homo sapiens
ttgacattttgaagttacttttgaagcaaaacgtggatgtcgaagcagaggactcagtctcctttgaggatgtggccgtgaa

SEQ ID NO: 308671 - DNA, 83 bp, Homo sapiens
tgtttccggaagtgtatagggaaacctgggggctccctggacaactccgagcaggtaactaggatttctacctcaaccgcgag

SEQ ID NO: 308672 - DNA, 75 bp, Homo sapiens
gaccagtccatttggggaaatccttcggatggtgaactcattagaagtattaagtcatgatgcaggaatctgcga

SEQ ID NO: 308673 - DNA, 90 bp, Homo sapiens
cctcagtcttggtctccaaatcctacaccttactttgaaacaccactgaatctgaattatccagaacagaaagttgtgactgttggacag

SEQ ID NO: 308674 - DNA, 82 bp, Homo sapiens
cagtctctctgtgtggctgtaacttacgtgtactttaccaacgagctgaagcaggaattgaatgatctggcacgggaccctc

SEQ ID NO: 308675 - DNA, 75 bp, Homo sapiens
ggagaaatgacatctctcagccctctcagctgcaccggaccaccaacaggaaaaaagagggggcatggctggagc

SEQ ID NO: 308676 - DNA, 75 bp, Homo sapiens
gctgtttgacccctttgacctcttcgatgtgcgagactttggaaagaacatccagtcatggataaaaatgagctg

SEQ ID NO: 308677 - DNA, 75 bp, Homo sapiens
cattaagaagatcaatagactgtctacaccaatagcaggattggcatcatcatgaaaattttgtgggctatcaag

SEQ ID NO: 308678 - DNA, 100 bp, Homo sapiens
cgagactgcaatggggacacgccaaacctgagtttctacagaaatgagatccgcttcctgcccaacggttgcccccaagtttcctggcagtgtgtgatac

SEQ ID NO: 308679 - DNA, 96 bp, Homo sapiens
cagtgcttaggctttggaagtggtcatttcagatgtgattcatctaagtgtgaacatggctacgcctcttcattcccgtccatgccgagcccccga

SEQ ID NO: 308680 - DNA, 100 bp, Homo sapiens
cagatggaggaatcctggatccagatgatgtcttggcagatgttgttgaagataaagacaaggaatgctgtctctgcaatttgagaggaggtgctcttaa

SEQ ID NO: 308681 - DNA, 105 bp, Homo sapiens
agatcctcaagaagaagaagttgcgaaggatccccaacggggaggccaacgtgaagaagattatatctgtccaagatgcgagtctggttttatcgaggagcttcc

SEQ ID NO: 308682 - DNA, 95 bp, Homo sapiens
tcaagcacttgctctggagggaagagcgatgggagaggagtccttcggcggctgttgtgtcgggagcctgatcgcgatggggacaaaggcgcaag

SEQ ID NO: 308683 - DNA, 82 bp, Homo sapiens
ccaccgtcggccgcatccgtttccacgactttctgggagactcataacgaaggaggcccaacttcattcaataaggagcctg

SEQ ID NO: 308684 - DNA, 73 bp, Homo sapiens
gcggagaaaaccggcatctgcaaaattcggccgcccaagaaagttcgtcgctgcttcctgtgctccaggagag

SEQ ID NO: 308685 - DNA, 75 bp, Homo sapiens
gggcaccgaggaccagctcaatgacagggcacagactccatcaagatggagaacgggcagagcacagccgccaag

SEQ ID NO: 308686 - DNA, 82 bp, Homo sapiens
cacccaccgccgccgcctcccaggtcagggaagtcaaagatgcatccctgagttcttcctagcaggcaagcagccgtgcacc

SEQ ID NO: 308687 - DNA, 100 bp, Homo sapiens
attggatgattcgtagctaagacttcgcgacacccttgaagctgagaaatgagaaggtgttcgccagcctcccgcaggtggagaggggcgtctccaagat

SEQ ID NO: 308688 - DNA, 75 bp, Homo sapiens
cttctatgtgctgggaaaccacaggactatcaagaaatccaagtggtaatgggcgaagtttattcagcatccggc

SEQ ID NO: 308689 - DNA, 100 bp, Homo sapiens
gatagctccaaactgggatattagccggatcgagctgggagatgtgacaccacacaatattaaacagttgaaaagattgaatcaggtcatctttccagtc

SEQ ID NO: 308690 - DNA, 85 bp, Homo sapiens
agccacgtgcagacatctacaaccttcgatctcctgacgaatccaaaattaacgggacaggctcttattccaggatcagtaatat

SEQ ID NO: 308691 - DNA, 100 bp, Homo sapiens
cctactttgagatggcaagaactgctggagacacactggatgtttttaccatgctgacacattaaaggagaggtatcagaaaattggagatacaaaacgg

SEQ ID NO: 308692 - DNA, 100 bp, Homo sapiens
cctatggcagatttgaaaattcacccttgtagagtcattcctgcctttgagcggactcccttttaaggattggcctaatgaagaagttcaacctggagag

SEQ ID NO: 308693 - DNA, 100 bp, Homo sapiens
gtcttcagaatttggaaactagttaagctcctgaaaagtacatcaagtctaaagtgaaccagctaactcattaagactggaatcatgagcaacaatggag

SEQ ID NO: 308694 - DNA, 75 bp, Homo sapiens
agccggtggtggagccgccgaggcccgccaagctgccccctgtgtgctattctttgatgagctggattcgattgc

SEQ ID NO: 308695 - DNA, 75 bp, Homo sapiens
ataaagaagcttgaaagtgtcattactgcagtgagtcaactactggattttctgtctggcaaacagtatgcagta

SEQ ID NO: 308696 - DNA, 100 bp, Homo sapiens
cccgccaggcgctctgaccactctccagcaccagcttccagttagtggatatagcacaccatccccagccactgtgctgtcgtcatgcctcaaacccgat

SEQ ID NO: 308697 - DNA, 100 bp, Homo sapiens
agagactggaatgttgacttgattcccaagttccttatggctaatgctgcaggactcatgcacacgttcaatgcccacgccgccactgacatcacgggct

SEQ ID NO: 308698 - DNA, 82 bp, Homo sapiens
tgaagccggcgctgctctgtggggctctggccgcgcctggcctggccgggaccatggtctcctccgggctggggctgagcaa

SEQ ID NO: 308699 - DNA, 82 bp, Homo sapiens
gagaagggcgactactacgaggcgcaccagatgtaccggaccctgttcttcagggaacggcaggagcagctgatgggatatc

SEQ ID NO: 308700 - DNA, 100 bp, Homo sapiens
cggcgcgctgctggacgaagagctctcctccttcttcctcaactatctcgctgacacgcagctcaccatggatgatgatatcgccgcgctcgtcgtcgac

SEQ ID NO: 308701 - DNA, 75 bp, Homo sapiens
cacgcacctcgtcaccaaggccaagttgaagatcctctttgtaacttccactccccaaacttcctgaggatctca

SEQ ID NO: 308702 - DNA, 100 bp, Homo sapiens
caattttggggctccctcgggcacctccggtaccgctgcagccaccgcggcccccgcgggtgtccttgaatggccattttggacaaaactggttgtggta

SEQ ID NO: 308703 - DNA, 97 bp, Homo sapiens
gggagttcattcctttgaaaccacgtcagtaggaagactgaatgtttcaatcttgccttgcaccagaatagagagatgatagacccagacaagttct

SEQ ID NO: 308704 - DNA, 83 bp, Homo sapiens
catggcatggccccgcaggtcttcacccaggccctggagtgcatgcgcagtggctagaaagtttgaaatggtggggagagggg

SEQ ID NO: 308705 - DNA, 101 bp, Homo sapiens
cggatggaaatcctaatgacagtctccaaattcgcctccatctgtaccatgtactatactggcaattgctggagaagattttgcaattgttgcttctgata

SEQ ID NO: 308706 - DNA, 51 bp, Homo sapiens
tgcagaggtgctggagctggcagggaaagaatatggcaaagctgatgcaag

SEQ ID NO: 308707 - DNA, 100 bp, Homo sapiens
tctgaagactgaaagagtcgaatggtttgttggcaggatatgaacgagactgccaaacaagaagatattttggaatccacaacagatgctgcagaatgga

SEQ ID NO: 308708 - DNA, 82 bp, Homo sapiens
caattcttcgacaggaaaaaaatttgctggatattgatgcgccagtcactggcttgcagatgggtcaagggttgtggagagt

SEQ ID NO: 308709 - DNA, 74 bp, Homo sapiens
actatattcagtggctaaatggctccctgattcatggtgtatgcaacagcgttattgcaacaggctaacgaaaa

SEQ ID NO: 308710 - DNA, 96 bp, Homo sapiens
accacccctatccagacggctgcccttcaagtaccagaaagtgtgctgtgttgtcattcaaggacttcctctcctgcaggccaactgaaataccag

SEQ ID NO: 308711 - DNA, 75 bp, Homo sapiens
gcaccccgaggaccccgagcggcgggcagccatctacgacaagtacaaggcgggcaaggatgactatgtgaaggc

SEQ ID NO: 308712 - DNA, 74 bp, Homo sapiens
cttactttgttctgctttagcatggcaacaatctcttagtggaggctgcattgaggcgtgagcaaaagaagttg

SEQ ID NO: 308713 - DNA, 75 bp, Homo sapiens
ctaccaatggacagctctcagtccacactcccaaaagggaaagggtgataaaagaaaatgtggctgaagttaccc

SEQ ID NO: 308714 - DNA, 90 bp, Homo sapiens
gcagcttcaagcttaggaccacccaccatgcctatccagggatggaagaagcgagcctgtgccttggagtgtcttcggcggagccggaag

SEQ ID NO: 308715 - DNA, 75 bp, Homo sapiens
tgacaggagaggctgcttcttgtagagttgggccggtgcacaaacagcgtggtcaagtatgagctgatgcgcccc

SEQ ID NO: 308716 - DNA, 75 bp, Homo sapiens
gcaaataaacccaagatcctggctaatgaagcgtaaaagatgtgttgttttcaatcaaggtgaattggatgctat

SEQ ID NO: 308717 - DNA, 100 bp, Homo sapiens
ctgctggtgaagatgcatgaataggcttctgcagaacccccaggtcaggccacatcattgaggctgcaggatctctcttcatagcccagtacgactctcc

SEQ ID NO: 308718 - DNA, 100 bp, Homo sapiens
ctgatcaagccaacaacagtgacggaatgcctccatacatggtcagtatagaccttctgatttgctgtgccctgagacatatgtttgggtacccattgag

SEQ ID NO: 308719 - DNA, 98 bp, Homo sapiens
agcgaattgtggcagagtgtaatgctgtccgccaggccctgcaggacctgctttcggagtacatgggcaatatggctgcattacaaagtcctttctat

SEQ ID NO: 308720 - DNA, 131 bp, Homo sapiens
ctgggatgagagtggggtatttatctataccacaagcaaccacatcaaatatgctgtcaccactgggtgcttttctgctttgggccaagtagcaaaagctcgattcctgcatgagaccaatgagattgcag

SEQ ID NO: 308721 - DNA, 100 bp, Homo sapiens
ggccagcaatcctcagacgcctcacttaggacaatggactcccgaaaaattgaccaggaagggaaaatcccagatgaaactttggagaaattgaagagcc

SEQ ID NO: 308722 - DNA, 100 bp, Homo sapiens
gcaaaaccgggcaatattagaccatcaacagtttgactacataataaggatgatgaattgtactctacaggaccatgcagaggagggcagggctagcatt

SEQ ID NO: 308723 - DNA, 74 bp, Homo sapiens
caagctggacgttaaagggaagcgggtcgttatgagcacatgcagatgacaatccaggctctccaggatgaatt

SEQ ID NO: 308724 - DNA, 78 bp, Homo sapiens
caggcgagacctggagatggacctgtgatctgggatgggtcatcagttaaggaagttgaaacctaccaccggacacgt

SEQ ID NO: 308725 - DNA, 100 bp, Homo sapiens
cagccaatcaataatggtgaatttgacattattgtcctaagtgattcttgccagctctcattactgcagttctgaccaatcatcttgcctgggttccaac

SEQ ID NO: 308726 - DNA, 50 bp, Homo sapiens
gtccagtgggtctgagcaaaaggagatggaataaactgagactgcaggac

SEQ ID NO: 308727 - DNA, 97 bp, Homo sapiens
cggagaacacaaccctcccgagaagcccagatccaagcacaccccagccagttggtattgaccttggagggagaagacctcggggaattggataagg

SEQ ID NO: 308728 - DNA, 100 bp, Homo sapiens
agaaaatcattctgccttattacgccgtctccaagatgtagctaatgaccgtggttcccactgagattgagaggatccagaatccagatctctggaatag

SEQ ID NO: 308729 - DNA, 90 bp, Homo sapiens
cagcgatgatgatcccttggaggcattcatggctgaagtggagcaggatcaggcaaaaatgatcatgccgaaaaagtggcggaaaagcta

SEQ ID NO: 308730 - DNA, 73 bp, Homo sapiens
catctccttctgcatccttaactgagaatgaggactcgctgattcttgagaagagtcaaaactggagctctca

SEQ ID NO: 308731 - DNA, 98 bp, Homo sapiens
tcaggacaaagatgctcaggctgctcttggctctcaacttattcccttcaattcaagtaacaggtagccctaatggagaaccttgtggaaagacttgt

SEQ ID NO: 308732 - DNA, 100 bp, Homo sapiens
cacgaatctatccttcataagtgcatcaaaacaggagatggatacagggtatgtcagtatgattttcagaaatttagctccctactgtcacccgacaacc

SEQ ID NO: 308733 - DNA, 83 bp, Homo sapiens
attgaccccactccctattactggtatacggatcaggtggggaacgccaagcacaacgtgcatgtcatgaacatctccacagg

SEQ ID NO: 308734 - DNA, 99 bp, Homo sapiens
cttcaactctacattcttctggagcatggacaagcgaatttcagtcagtatccttgccagcacattacagaatatttttgttgaaccttcttgagaatt

SEQ ID NO: 308735 - DNA, 83 bp, Homo sapiens
tacatatattgggtcagtggagccattgacgcaggtagttgatgtcacttggcgatattcctgcaaacatgaagaggtgattg

SEQ ID NO: 308736 - DNA, 83 bp, Homo sapiens
gccggaccgggaggaggggagggggcgatgctggaagccatggcggagcccagtcccgaagacaatgcagatcttcgtgaaga

SEQ ID NO: 308737 - DNA, 100 bp, Homo sapiens
gacggctgcccttcaagtaccaaacaccaatcagggtcttcaggcctggaagattgaagacattccagccaacaaaatgtccattgcgtggcagctacca

SEQ ID NO: 308738 - DNA, 130 bp, Homo sapiens
gagacccgactgcaactgctggattgctgcaaggctgagggacgagaacgaggtttcactgggatcgattctgaatatgaaaagccagaggcccctgagttggtgctgaaaacagactcctgtgatgtaa

SEQ ID NO: 308739 - DNA, 100 bp, Homo sapiens
cctactgttcttagagatgtacctttctcaggttgggttcaatatacggagagtgccctgtgccaaagccacgagttgatcgtccaagaaaagttcctgt

SEQ ID NO: 308740 - DNA, 101 bp, Homo sapiens
gtaacaacacccgttttggcattgctgctaagtacatgctggattgtagaacttctctctctgttgcacttcctgcagaagaggattatttaccacttaaa

SEQ ID NO: 308741 - DNA, 75 bp, Homo sapiens
gtgctttttatttttccccaattcagcagagaatattttcaagggggtaagactttgaccccgacgcaggcttca

SEQ ID NO: 308742 - DNA, 78 bp, Homo sapiens
acgcaccccactcggcgtcgcgcggcgtgccctgcttgtcacagtgtactaatggtcacttgatgtgcgctggctgtt

SEQ ID NO: 308743 - DNA, 75 bp, Homo sapiens
cagaccaacgggatagccgatgacaggcagtccttgtcgtcagcagataatctgcctgccgagtgcctgcgattg

SEQ ID NO: 308744 - DNA, 100 bp, Homo sapiens
tggatcctttccaaacttggtgtcttttctacaaactctgtgcctcaacaaccatttctaagtgacacgaagatcgattgagaagttattagaatgggaa

SEQ ID NO: 308745 - DNA, 98 bp, Homo sapiens
tgctttccccaagtagtccgatggctgcggctgcgccgaggcgccctactcaggaattgaagccattttttatgaaggaagttggcagtcactttgat

SEQ ID NO: 308746 - DNA, 75 bp, Homo sapiens
atttgagcctctgctgaattggatgaaagataaagcccttaaggacaagctagtgtcagcagtgggatacctgcg

SEQ ID NO: 308747 - DNA, 74 bp, Homo sapiens
catcccgttctctgatttgcagcaggttgcagtgagagcagatgctggcaagaagcacttaccagacaagcagg

SEQ ID NO: 308748 - DNA, 100 bp, Homo sapiens
gatgttgcttcagagtgtgaagtcaaatgcatgccaacattccagttttttaagaagggacaaaaggtattaataggggaccctattaccacatgtcttt

SEQ ID NO: 308749 - DNA, 101 bp, Homo sapiens
agaagcaaaggtcaccagtcccaagtcgtccccctctccgccccccaggaggggcgagagggagccgcagctgatgtcagcacatttaactggacggtccc

SEQ ID NO: 308750 - DNA, 100 bp, Homo sapiens
cttcatgatcagggcgctggtggcaatgtactcccctgccctcaacaagatgttttgccaactggccaagacctgccctgtgcagctgtgggttgattcc

SEQ ID NO: 308751 - DNA, 97 bp, Homo sapiens
ggtgctggagctgttccgggccgcgcagctgccgaacgacgtggtcctacagggttatgtaccgaaggactctaccgtgtcagcgggaataaaactg

SEQ ID NO: 308752 - DNA, 98 bp, Homo sapiens
tggggacgtgtttggaaccaatgctgctgaatttcagatggcagaaatgatgttcaggagagtagcttaagagacttaataaaagagctgccagacac

SEQ ID NO: 308753 - DNA, 75 bp, Homo sapiens
gtccagcatcctttagaagaatccagcatgccaatgaagatgtggaaagaatgttactaggaaacaagtgtgata

SEQ ID NO: 308754 - DNA, 92 bp, Homo sapiens
catcaccccagaacaccccgcagaaagtgcctgtgcatcagaagagccgaatgcacataaggtcgccagcccaccctccggacccgcatacc

SEQ ID NO: 308755 - DNA, 100 bp, Homo sapiens
agaactgcctgaagaatgcggggaatcccagagacatgcgccgcttccaggtgggcgacatgaccaacagaaagccacagcgcctcatcactcagttcca

SEQ ID NO: 308756 - DNA, 98 bp, Homo sapiens
gccgggggcgtctttcagagcattacggactttgtgttttatgccccacgtctgagaatcaacaagcggatcctgcagctctgcatgggcaaccatga

SEQ ID NO: 308757 - DNA, 75 bp, Homo sapiens
aaatgtggccgtggtttctggtgcaccacttcagggggtaaaacttccttttcctgtagatcaaatcacagatct

SEQ ID NO: 308758 - DNA, 73 bp, Homo sapiens
tcagttagcgaacggttgcgcactgacgatgtgtacaagtccccagagtatgagtcccttggttttgagctta

SEQ ID NO: 308759 - DNA, 100 bp, Homo sapiens
caactaatagcccttgaacagctatgcatgctgcttttgatgtctgacaacgtggatcgttgttttgaaacatgctaacatcagagaagttggccttgag

SEQ ID NO: 308760 - DNA, 88 bp, Homo sapiens
tgagcgcctcgcctggatgtgagtttcagccagaacacttcagttatggaagatcaaaatgaagatgagtccccaaagaaaaatactc

SEQ ID NO: 308761 - DNA, 83 bp, Homo sapiens
gttgcacagtcgccttttccagtttggagagacgttcagcctgagggaactggcatgatagatgaagagttcactgttgcaag

SEQ ID NO: 308762 - DNA, 80 bp, Homo sapiens
tggagcttggtttcgggatctcggtgctgcagacggcgagacctcctgcacaggtggtgatgatgtccagcaactctgtg

SEQ ID NO: 308763 - DNA, 100 bp, Homo sapiens
accgcgaccctaaacacctcaacgatgacgtggtcaagaaaccaggaatggatctggcagacacctatattatgtttgttcggcaaaaccaagatattct

SEQ ID NO: 308764 - DNA, 100 bp, Homo sapiens
tgatgagtcagctgaaaattgtgacaaatcacttgctgacattattatcggacacttatgtatcagacatgaaatgactccagtaaaccctggtgttggc

SEQ ID NO: 308765 - DNA, 100 bp, Homo sapiens
gctgaacgagaaccaagtgcggacgctgtgcgagaaggtatctagagatcaggttctggacaatgctgcagttcaattctgtgcccgcaaagtctctgct

SEQ ID NO: 308766 - DNA, 88 bp, Homo sapiens
caggaaagctgccatcagctgagcaagtccaccaacagtttctgtgtcccacttcatctttaataagccaaagtggaacaggtgaagt

SEQ ID NO: 308767 - DNA, 74 bp, Homo sapiens
ttttgtggagtggtttgaatatcgtaagcgcacgtttaaacatctcaagatacatttcatcaatgaagccttct

SEQ ID NO: 308768 - DNA, 82 bp, Homo sapiens
ccacgggggccgccgcagcaccatggcgaccaccgtcagcactcagcgcgggccgcttcctgggtctgcaggtccagccggc

SEQ ID NO: 308769 - DNA, 100 bp, Homo sapiens
ccaagcgttactttcctaccaagaacattaaccaggtggtatttgttggaaatttcttgagaattaatacgatcgccatgcggcttttggcatatgcttt

SEQ ID NO: 308770 - DNA, 82 bp, Homo sapiens
gactggcggagcaccgccttccggcagaagctggtcagtcaaataattcagaaggagctggcggacatcactttagaccctc

SEQ ID NO: 308771 - DNA, 83 bp, Homo sapiens
ttctccactttcgccagcccgtgccgcgagcgcggcctgcaggagacaggccgacggtcgcaaggtcctacggtcaagcatcc

SEQ ID NO: 308772 - DNA, 83 bp, Homo sapiens
ggggcggcggcggcggcggctgcggcccaatatagtgagtgtgtccgcttgaaaccaactgacatacagcccgacatcttcag

SEQ ID NO: 308773 - DNA, 83 bp, Homo sapiens
ccctttaccaggaattactatgttcgggccgtcctgcatctcctgctcagctggaagctcagaaagccacgcaggacttccag

SEQ ID NO: 308774 - DNA, 76 bp, Homo sapiens
cgcggaggctggagctggaggcgcggcgccggtgagctgaggagagtagttatcttgatggaattagaagttttga

SEQ ID NO: 308775 - DNA, 100 bp, Homo sapiens
gcacagtaacatacagcactttgtggagaaagtcgtcttccacttgcacgaaagctttcctaggccaaaaagaggtaatgcaggtggtgaaggagcaggt

SEQ ID NO: 308776 - DNA, 90 bp, Homo sapiens
ggactgggagggcaacgagcacaacaggagctacgaggagttgctgacagtgaagatagtactgtgtccatccagataaaattagaaaat

SEQ ID NO: 308777 - DNA, 100 bp, Homo sapiens
tcagctatctgcccggaggcaccacaggactgcagctccccagcacggtggtgaagctccttatggtcctgaccctacagttcctgtcccatgaccaggg

SEQ ID NO: 308778 - DNA, 98 bp, Homo sapiens
gcaaaggcaccgtgacaggccaagtgcaggggccagaagacaaagtcaattccattttgcagaaaaaacttcagcatgtgccaggaacacaacctcac

SEQ ID NO: 308779 - DNA, 75 bp, Homo sapiens
acatggagattctcttaaaaagatgcagcagcttttttatgagaattacgagcagaacaaaaaggggtacattag

SEQ ID NO: 308780 - DNA, 100 bp, Homo sapiens
aaacagttgaaaagttccggcagagaattctggctccctgtaaggtggaagttgatgggtcgaaactaaatgtgaccagcacgtggaacctggcttcgcc

SEQ ID NO: 308781 - DNA, 97 bp, Homo sapiens
gtggtggcttgtggtgcggcctcaccatacaggaacagggcagacgttagcgtgagtgatcactctcaatcccggcattatgccagtacatacaggc

SEQ ID NO: 308782 - DNA, 98 bp, Homo sapiens
ttgtaatgaagaagcacttaaatactcatctactaggcaagcatggagttggcaccccaaaagaaagaccgaccaagaccatcactatgaccgatgga

SEQ ID NO: 308783 - DNA, 80 bp, Homo sapiens
ttttgaaaatgtctgtgagctggatttgattttccatgtagacaagattgggaaaatgaggtacgttagtgttcgcgatt

SEQ ID NO: 308784 - DNA, 90 bp, Homo sapiens
aaaggcctaagaattttggcattgtctgcccagtcaagcccgtccaactccagctccagctcagactccagctcagactcagacttcgag

SEQ ID NO: 308785 - DNA, 50 bp, Homo sapiens
cggctcactgcaagctccgcctcccaggagaatcgcttgaacccgggagg

SEQ ID NO: 308786 - DNA, 75 bp, Homo sapiens
ccgctcccctgagtaagagtcagccagccgcggatggggagcgtgagtggcgagtccaatatcagatggaaatga

SEQ ID NO: 308787 - DNA, 101 bp, Homo sapiens
gcagattcagcggtactggtgtataatagatgacaaatcctctgagggaaatcgacaaaattgtggggcaattaatggatggactgaaacaactaaaactg

SEQ ID NO: 308788 - DNA, 50 bp, Homo sapiens
ctggtgctcaagactttctccgaggaggaaatgtgttcttcagtgcacag

SEQ ID NO: 308789 - DNA, 75 bp, Homo sapiens
caaagggacctgatgaagcgaagatcaaggtacaagaatattccacagatgtcctttgatgatacagaaagggag

SEQ ID NO: 308790 - DNA, 96 bp, Homo sapiens
cagtaaactcacctttgggactggaacaagacttcaggtcacgctcgatacttgccagaactaatacagctgatgaaatacctgaccttttctgct

SEQ ID NO: 308791 - DNA, 88 bp, Homo sapiens
agttcttggcaagagaggcatcctccttgaagtatttggctgaggagttttcaatcccatggtgaaatagggccttctaaacctgtgg

SEQ ID NO: 308792 - DNA, 100 bp, Homo sapiens
gacagagatgatggacccagagctagactacaccctcatgagggtctgcaagcagatgataaaggatggaactccaacctcgaaaacatttgaacacgtg

SEQ ID NO: 308793 - DNA, 98 bp, Homo sapiens
gggatgaggaggtggaggaggcccggcagtcgtgtcagaagaagtttaaacagatttctcaagcttacgaagttctctctgatgcaaagaaaagggaa

SEQ ID NO: 308794 - DNA, 75 bp, Homo sapiens
ccaccaataggccaggactgtcctgtggacagacgggatgttaactcattccagcaaactacaaagtggattgat

SEQ ID NO: 308795 - DNA, 98 bp, Homo sapiens
tgaagaggaggaaggccttgtgcaaacgcaagtcgtggatgagtaaggatgagaacaagttgagcagtgccaacggccatgaagaacgtagcaaaaag

SEQ ID NO: 308796 - DNA, 75 bp, Homo sapiens
atcttcggaccccccaacaccctctacgaaggcggctacttcaaggctgaactcacgggaatcaaatggcgtagg

SEQ ID NO: 308797 - DNA, 80 bp, Homo sapiens
cctggccaagggcttcacagcagcaggagcatgcaagttgtccccttggacaaacagatcacaatcatagatagtccgag

SEQ ID NO: 308798 - DNA, 95 bp, Homo sapiens
aaagtcgagtatctggtgaagtggaaaggatggcccccaaacattttgaaagcgaagcagaagccgtagaatcagcggcgagcctgttgaaagaa

SEQ ID NO: 308799 - DNA, 82 bp, Homo sapiens
atttcagcacttctggcattgagacaacatgtgcatcaaatatgctgaaagcttccattgaagattgacatcattaaacatc

SEQ ID NO: 308800 - DNA, 99 bp, Homo sapiens
tcgtaacacaccttcagaacctatacattgcatcgtttgggcaaagtacttgttcaagaccttcttcagattcgatcgtatgtgtacgcagaagagcca

SEQ ID NO: 308801 - DNA, 98 bp, Homo sapiens
ggggacgcaagggccggggccggggtcccccgtcctcctctgactccgagcccgaggccgagctggagagagaggtcgcaatggaagaagagatcgcc

SEQ ID NO: 308802 - DNA, 75 bp, Homo sapiens
gacagcatggggctgtactgaataccgcagaccattgtaattcatgattcatgatgttgctatcaaaagttgaga

SEQ ID NO: 308803 - DNA, 75 bp, Homo sapiens
gagacggcagccgctgtacagattcatcaccacggttgccaacttggcctgttccatctcaaataatgaagaagg

SEQ ID NO: 308804 - DNA, 100 bp, Homo sapiens
acctgcgcgaagctggccaaagcctgcccagacggctcacctgtgcgggatggaacaaaagacctcctgacagtgagtgagactgccaatgagccccctc

SEQ ID NO: 308805 - DNA, 72 bp, Homo sapiens
cgctggggctgccgccacggccgcccggaggctcatcagattcaagagatgtttccccaggttccataccat

SEQ ID NO: 308806 - DNA, 75 bp, Homo sapiens
gcattttttaaccctagatctcggctggagtctgggatgcagaacatgagtattcatacgaagaccaccagcggc

SEQ ID NO: 308807 - DNA, 74 bp, Homo sapiens
gggggaccagcagctgctgaagcgggtgctcgtccggtcagcccaaggccaaccccactgtcactctgttcccg

SEQ ID NO: 308808 - DNA, 83 bp, Homo sapiens
gcttaagcacttttaccgaaaaccttctccccagatctaccccaacgagagacacagtattcgctgccccgagtcgggcgagc

SEQ ID NO: 308809 - DNA, 95 bp, Homo sapiens
ttcgtacgggcggccgtgcgcgaggcgagactgcaaaattcaaaatggggctcaaggtattcgtttcatctacaccagagaaggcagaccaagtg

SEQ ID NO: 308810 - DNA, 101 bp, Homo sapiens
cgggcgggcaagccagacagctgggccggagcagccgcgggcgcccgaggggccgagcgagacggttgatgatgaagcgccggccgtgtaaatgaagatcg

SEQ ID NO: 308811 - DNA, 51 bp, Homo sapiens
gctggaagaggatcttgggcgccgccagagcagcccgacggccatggaggc

SEQ ID NO: 308812 - DNA, 100 bp, Homo sapiens
taagaggccagatgcagatctgaagacctattttactgataagaaaacacatctttacacactaagatttgcatgggcaactgatttgtctacagactta

SEQ ID NO: 308813 - DNA, 74 bp, Homo sapiens
tgttaagaaaacataccaatattgttgcacagactaccaagaaggatcaagaaggtggagaagaaaagaaatct

SEQ ID NO: 308814 - DNA, 100 bp, Homo sapiens
ctgaaccgcatctttcctcttctgaccatgcacccccagcagccaccggcaggtctttcagtttgcagtcaaagaatcacttatcctgaagctgccaaca

SEQ ID NO: 308815 - DNA, 100 bp, Homo sapiens
cttcccagtagctggaactacagggccctcctggtgagcctggcccacctggccctccgggtccccctggccaccttacagctgctcttggggatatcat

SEQ ID NO: 308816 - DNA, 90 bp, Homo sapiens
gtgcggaccacggcctgtcagcacgtgtgctgagcgccgtcctcaaggatctctaccacctgctgaagcacgtagtgtgtctggagcccg

SEQ ID NO: 308817 - DNA, 83 bp, Homo sapiens
tttttgggggagaactatgttcattatggggctactgcagcactggggtgtcagttgttggtccgacccagaacgcttcagtt

SEQ ID NO: 308818 - DNA, 100 bp, Homo sapiens
aggggccccagcagcccccgaaggccctatcaggacatggagtatgaaagacgaatgggccgagcagctgacaaagatgggccggggcaagcacttcatc

SEQ ID NO: 308819 - DNA, 98 bp, Homo sapiens
agtcggggaggagtttcatgaagagcccaaaacctattacgaactcaaaagtcaaccgctgaagagcagttgttctacgctgctgcgtatcattcaat

SEQ ID NO: 308820 - DNA, 100 bp, Homo sapiens
cgagagggaggaaaaccttcagaatttctctgcaaagaatgtccaaaaattcatattcacattgatcgtatcgacaaaaaagatgtcccagaagaacaag

SEQ ID NO: 308821 - DNA, 50 bp, Homo sapiens
gtggactctgccgacaccggagagaggatatccgacatgaagccagtgac

SEQ ID NO: 308822 - DNA, 100 bp, Homo sapiens
ctggcggtcccgggtgctgctgctctagccggcccggtccttggactgaaagaatgcaccaggggctcggcagtgtggtgccagaatgtgaagacggcgt

SEQ ID NO: 308823 - DNA, 82 bp, Homo sapiens
ggaaacattcaagaacctggcatctatagatttctcactatgtgcaatagacactttggcagtgttgtggcacaaaccattc

SEQ ID NO: 308824 - DNA, 78 bp, Homo sapiens
ttcaaaacgtcagcaaccaaaggcaccggccttgatgaggcaatggaatggtatggcagatcccagaaaatggactca

SEQ ID NO: 308825 - DNA, 100 bp, Homo sapiens
tcaagttcttcaggaatggagacacggcttcccccaaggaatatacagaagctgtcagcgtttcggccagcccccagggtcatccgctgcatgaccaaca

SEQ ID NO: 308826 - DNA, 74 bp, Homo sapiens
cggtcaaggtatttcatgccgaggtgacttaagagattaaaattaatttggttgctgttggttctgaacaaata

SEQ ID NO: 308827 - DNA, 75 bp, Homo sapiens
tatttaaccaagttccaacaaaagaatgctgccacaggcataaacttggaggaggcagtggagagagcatcctgg

SEQ ID NO: 308828 - DNA, 119 bp, Homo sapiens
cgggagccaacatggcagcggggttcgggcgatgctgcaggtgaagctgtggtctaccaatctagacaactcagtggcaagcattgaggcaaaggctaatgtgtgctgtgttaaattca

SEQ ID NO: 308829 - DNA, 75 bp, Homo sapiens
agagattccctgccctgattccaggagaacctggcagatcttttgagcaattgcccccacatgtgcgcatctggg

SEQ ID NO: 308830 - DNA, 50 bp, Homo sapiens
actcaaggatatgcacagaccacccaggttagagccacagctgaaacaac

SEQ ID NO: 308831 - DNA, 100 bp, Homo sapiens
tgtgcaccgagttactttcccggcccctcgttgacaccgtcacctgcgttgtgcataactttcagagccggccaccctctggccgaaggctctctccctg

SEQ ID NO: 308832 - DNA, 75 bp, Homo sapiens
cgccatcgttgctgccttcttcgtcaagttgatgtagaacattctcatgttcgatttctgggaaacctggtattg

SEQ ID NO: 308833 - DNA, 50 bp, Homo sapiens
gttcaaatccacgttgatacaatgaagttggtgttggtattaggagatct

SEQ ID NO: 308834 - DNA, 75 bp, Homo sapiens
aaaggactatggtgtatacctagaggactcaggccacactcttagtgagaaagatcagtctaaagaaaaggagaa

SEQ ID NO: 308835 - DNA, 75 bp, Homo sapiens
tttcaccaccagctcctgcgctggccgcatcctactccttgaccgggtctttcccgcggtgacttcccttgggct

SEQ ID NO: 308836 - DNA, 75 bp, Homo sapiens
agtcgcagcgccagacccaaggcccccgagtgagcgcgggcgccgagggcagcgggtggcatgagacgtgggaac

SEQ ID NO: 308837 - DNA, 71 bp, Homo sapiens
atttctgaaaaacagcaacctgcagcacattgagaatgagtccctttggaaggaggtgtcagaattacgag

SEQ ID NO: 308838 - DNA, 100 bp, Homo sapiens
aggccgccatcaaccgccagatcaacctggagctctacgcctcctacgtttacctgtccatggatttcttacaatctccagctacaacctgcttagcttg

SEQ ID NO: 308839 - DNA, 100 bp, Homo sapiens
cctgaatgacatctacctccatcaggaccccagatgtctgacagccctgtgtgacaccaagataagtaacgttggtgaccgttgttatgatgaaaaaatg

SEQ ID NO: 308840 - DNA, 100 bp, Homo sapiens
cactacaaaaagctggccgaggagcagcaaaagcagtacaaggtgcacctggacctctgggttaagactgcaggcaccacctgtgtgaaccggacatgaa

SEQ ID NO: 308841 - DNA, 100 bp, Homo sapiens
agagaagaagaagcaggatgaactgaaacggattgccagagaattggcagaagataagtatgctgtgcgcttcatccctcgggagaatggcgtttacctg

SEQ ID NO: 308842 - DNA, 75 bp, Homo sapiens
tttttgcatgagacgcttctggacagccattcaaactcctccccacgacactctgaagcagcgacggcacagcgg

SEQ ID NO: 308843 - DNA, 76 bp, Homo sapiens
gtgacttgactcttcaaacacaaagagtgaagacatttccacctggacacctgaccatgtgcctgccctgagcagc

SEQ ID NO: 308844 - DNA, 97 bp, Homo sapiens
tcttggccagggcgatttctctctggattcgattttccaggtgtcatggagaaactccagctgggcccagagattctgcagcgggaaaatccaaggc

SEQ ID NO: 308845 - DNA, 82 bp, Homo sapiens
gagggaagagattcagccagcacactcctcgcgagcaagggcgtgatggtgggcatgggtcagaaggattcctatgtgggcg

SEQ ID NO: 308846 - DNA, 83 bp, Homo sapiens
cattcacatacgtcaaggaaattgagcaattctgtggtgttcttggtcacacatttatggagtttctgaagggcagtggagat

SEQ ID NO: 308847 - DNA, 98 bp, Homo sapiens
atgtggctgtcggcagagctggtagagattgacgagatgcctgaggctgccgtgaaatcaacagccaacaaataccaagtcttttttttcgggaccca

SEQ ID NO: 308848 - DNA, 50 bp, Homo sapiens
gccaatcatgatgaactaatttccaaggatgaggaagtacagacaattgg

SEQ ID NO: 308849 - DNA, 50 bp, Homo sapiens
gtgacagtctgcatgtgcagttttcaggaggccactgtctgcagctcccg

SEQ ID NO: 308850 - DNA, 80 bp, Homo sapiens
aaaggatgttggcggtccctgtgacctgtggagacacggccagatctgccctccaaatccctgtaaccattcatccaggt

SEQ ID NO: 308851 - DNA, 83 bp, Homo sapiens
cttgcatgtatttggaacaaaaaaaggagatgcctggcagccccgctctctgcaatgtgtatatctcatgattgatatggaga

SEQ ID NO: 308852 - DNA, 100 bp, Homo sapiens
aaaaagcaagttctttgatcagtttactcaaacaggaagggatagccacaagtgacaacttcatgcaggctgctggtggtctacccttggacccagaggt

SEQ ID NO: 308853 - DNA, 85 bp, Homo sapiens
aggtccaatcttacaagtctcaagtcttctctgcagctttaccggagtgcagcagctgccccgagccccgtgcttggcaacattc

SEQ ID NO: 308854 - DNA, 100 bp, Homo sapiens
gccacacaggccagcagaaacccaatcacatccaaagagtggtactggaaccagcccaggaacagcaaagtttgatacacaccaaccaggctgaaagtca

SEQ ID NO: 308855 - DNA, 75 bp, Homo sapiens
caagcagttcagaagagccaaggaataaacatgcaatgaacccaaaagggccttggacaagattcgctatgagag

SEQ ID NO: 308856 - DNA, 100 bp, Homo sapiens
attttctcaaacgagagtcagcctttaacggtcttcatcctccaggtccacctttagcaagacctattctcccccgagaacgaggtgctttggatagaat

SEQ ID NO: 308857 - DNA, 96 bp, Homo sapiens
gcgaagatggcagctgctgaggaggagccgaagcccaaaaagctgaaggtggaggcgccgcaagcgctgaggtcactggaaggactgagcgcattc

SEQ ID NO: 308858 - DNA, 101 bp, Homo sapiens
ggcgctgattctgtgatcatggagttactgtcggtggcttccccaggaccatctaaagcaccaagtttctggtataaaatagatccatcccatactcaagg

SEQ ID NO: 308859 - DNA, 96 bp, Homo sapiens
gggcggcgtgcggcctagcgtctcagtggtgctcatcggggactcaggcgtgggcaagagcaacctgctgtcgcgcttcacccgcaacgagttcaa

SEQ ID NO: 308860 - DNA, 100 bp, Homo sapiens
gtacgaagggtgcaaagtgggacgcggcacctacggtcacgtctacaaggcgaggcggaaagatgggtgctggagaatctggtaaaagcaccattgtgaa

SEQ ID NO: 308861 - DNA, 82 bp, Homo sapiens
tcgtagtcttcctaggagttattcttgttggatctagccttggagggtggcttatgcttcatgctgcaattgcacgaccaga

SEQ ID NO: 308862 - DNA, 100 bp, Homo sapiens
cgatcccaccgaagcagcgtgtcctccgtgggagcccgagaggagagcgggaatgacgaggctcgggtggaaggccaggccacagatgagaagaaggagc

SEQ ID NO: 308863 - DNA, 100 bp, Homo sapiens
aacatggataagcatgccctgaaaaagtatcgtcgagaagcctatcatcgaaaattggagaagactatgtgaaagacctgagccagctgacgaagctcca

SEQ ID NO: 308864 - DNA, 51 bp, Homo sapiens
ggacgacaagcccattggggccacccacaagaatgctctcatcactcagtc

SEQ ID NO: 308865 - DNA, 50 bp, Homo sapiens
agatcatgcagagtattacctttacaaatcggggagttactaagcaccac

SEQ ID NO: 308866 - DNA, 100 bp, Homo sapiens
tctacgaggacatcatcaaggtggaggtgcagcagcccatgcccccaggaagcctcccctgcaaccccctgtggatcctgtggtaaaggccaggatggag

SEQ ID NO: 308867 - DNA, 50 bp, Homo sapiens
gggggaccacaagatcctcatcgacaggctgaccccgcactacatctacc

SEQ ID NO: 308868 - DNA, 90 bp, Homo sapiens
ctggattatggagcggacattgtttactgtgaggttacaggaatacttaaagatgctggagtaaacaatttaacaattcaagtggaaaag

SEQ ID NO: 308869 - DNA, 82 bp, Homo sapiens
ttggaacgtcaacaggagcaacttgtaaagcccgagcgggaagaagttccgcagcaagccgcagctggcgcgctacctgggc

SEQ ID NO: 308870 - DNA, 50 bp, Homo sapiens
ctggcgctggagcagcagcagcaggagaggcaggaggcgacggtcctgac

SEQ ID NO: 308871 - DNA, 100 bp, Homo sapiens
ggctcctggagctgtgagctctgctacttcaagtaccaggtcctggcgatcagcaccaagaacccactgcaggtagtatcttccccagcagatgttgctg

SEQ ID NO: 308872 - DNA, 73 bp, Homo sapiens
ttggggccgtaccatggcggagaagactcaaaagagtcccaaagacacctgtcgagatccccaggaattgtgt

SEQ ID NO: 308873 - DNA, 90 bp, Homo sapiens
ccatcatgttcgaccagcaccccaaagctttgtcaagcaagttggagatggagggagattagttcctgttccaagcctcagtgaagctga

SEQ ID NO: 308874 - DNA, 101 bp, Homo sapiens
gaaagtacggaccataataatcaggagtgaagtcccagggatattctgtgctgggaatcttttaactgagccagtcggctacttggaatcttgtttctcgg

SEQ ID NO: 308875 - DNA, 100 bp, Homo sapiens
gcagaaccccaggactgcgcccccgggagcgggcgcccagaggtatgaaattgaaggctgtgaagtgatttgggccattaaagataaagctatagggaat

SEQ ID NO: 308876 - DNA, 100 bp, Homo sapiens
tcttcagaattagaaaggagctgcttcccaataaggaaacaagtgcagcagctgccccgagccccgtgcttggcaacattccccccaacgatgggatgcc

SEQ ID NO: 308877 - DNA, 100 bp, Homo sapiens
gacgggtctggagtgcgtgggggaccggctgttggcggagaggaggttcagatgagcccctgctgacttgagagagacagagagaccacgccgattgctg

SEQ ID NO: 308878 - DNA, 100 bp, Homo sapiens
caagagcagagcgccagcatgaacttgggggtcagcatgctgaggatcctcttcctcctggcttagaccatgctcagcctccaagcagccttgtcatcga

SEQ ID NO: 308879 - DNA, 75 bp, Homo sapiens
ggaaggcctcccggcgctcttcctcccggagtatgatcagcattgttgatattgccaacaagaggagctcttctg

SEQ ID NO: 308880 - DNA, 50 bp, Homo sapiens
cccagaccatggcatctacggaaggggtggctttgtccactatggtgaag

SEQ ID NO: 308881 - DNA, 82 bp, Homo sapiens
gcagcagctaaatgcaggaaccggcggagggagctgaccgaccgactccaggcgagctagagccggtgcaggccacgcagaa

SEQ ID NO: 308882 - DNA, 96 bp, Homo sapiens
gcccttcagaacgctggggaggttgggctgaactgcagtgggagaggagaagagatgctggcgtgaagggagcttgacctcatggacctcgtaggg

SEQ ID NO: 308883 - DNA, 75 bp, Homo sapiens
gaagtagaagacagcggcgttgccatggcggcgtctctgggacttcattgacttaactagagagaccagaccaag

SEQ ID NO: 308884 - DNA, 101 bp, Homo sapiens
aatggcggacgggaaggcgggagacgagaagcctgaaaagtcgcagcgagctggagccgccggaggtatgggcactaggaaaagacttcttccatcaagct

SEQ ID NO: 308885 - DNA, 75 bp, Homo sapiens
tgtccagccacctacaggcctccaggaatggctaaaaatgtttcagagtgagtatattgctccatgtgactgtcg

SEQ ID NO: 308886 - DNA, 100 bp, Homo sapiens
gcaccctcgccttgtgtcaatggaggcacctgtcggcagactggtgacttcacttttgagtgcaactgccttccaggctggacgtaaagaaagaagtgat

SEQ ID NO: 308887 - DNA, 101 bp, Homo sapiens
actggaaacaatggcatttacagaaagagtcaacagcagtggcaacagaggagtattcaagctgtagtcggcatccgtgccaaaatgggggcacgtgcata

SEQ ID NO: 308888 - DNA, 83 bp, Homo sapiens
cttggactgagtcctgcaggacacagctggatgaaaaagaaagtcggcgtctgttccaacagatcctttctggtgtggattat

SEQ ID NO: 308889 - DNA, 100 bp, Homo sapiens
gtgaaagacagcttgaccggaaagatgcatgttctgccactaattggtggaaaactgcaagctttcttcctggtggcagatgacatcatggattcatccc

SEQ ID NO: 308890 - DNA, 100 bp, Homo sapiens
ggatttccttgcggaaaggatgttggcggtccctgtgacctgtggagacacggccagatctgccctccagactccaagccccctgatccttgatcagaac

SEQ ID NO: 308891 - DNA, 99 bp, Homo sapiens
ctttttctcgcttgtggactccgatatattgcccttcttcccttagaagaactgctgaaccgactctgagaaatttggatggtgccatgacaatggtgt

SEQ ID NO: 308892 - DNA, 95 bp, Homo sapiens
agatcttgagcgccctctactcagcatggatatccaggtgctgagccaggagcagcagcctttctgcagcgtctatcccagactaccggggccct

SEQ ID NO: 308893 - DNA, 82 bp, Homo sapiens
aatcgaaacagatacagagatgtaagcccatctgctctgttaaaagcgaaaatgaaacaattgcctgcggcaacagttcgac

SEQ ID NO: 308894 - DNA, 75 bp, Homo sapiens
atgtcacgctgggtaatgaggatttgactgtgaagccttcaacaattggatccatggctttgacagaaggggcat

SEQ ID NO: 308895 - DNA, 51 bp, Homo sapiens
agaactcagcgaggattctgagggcttgtcaatgaggcagatcagattcag

SEQ ID NO: 308896 - DNA, 100 bp, Homo sapiens
ctgcctcagctgaaatgccagtcttcagcctcatctactgcacacttgagtccatgagattttagagtgctggaggagaaagctcgcctagaagcagagg

SEQ ID NO: 308897 - DNA, 74 bp, Homo sapiens
tgttacctggagcttaaaaagctgcacgcaagtgttaaacttctgtactctgggaccgagtgcactgaagacga

SEQ ID NO: 308898 - DNA, 108 bp, Homo sapiens
gagcactgggccctgtatataggagatggctacgtgatccatctggctcctccaagtgatgatggcttgcagggtcagccaggacttcctggccctacaggagaaaaa

SEQ ID NO: 308899 - DNA, 51 bp, Homo sapiens
ccgcgctctgcctcagcgacggtgctggagaatctggtaaaagcaccattg

SEQ ID NO: 308900 - DNA, 88 bp, Homo sapiens
gggcagctgttcccactggctctgctgaccttgtgccttgggcaagcaggaggacttcaagacgacagttctggagggtatggagacg

SEQ ID NO: 308901 - DNA, 82 bp, Homo sapiens
aagagttccccgtgccggctcttcaccatcccgttttccagcaagcggagctggagtttgttcagatcatcatcatcgtggt

SEQ ID NO: 308902 - DNA, 90 bp, Homo sapiens
gggagcttcaggctcgctccgtgcgggtctcctctgagcctccggcctccataagacccaaaacagatgacacctcttcccagtcccccg

SEQ ID NO: 308903 - DNA, 98 bp, Homo sapiens
gtcatcaggattgcctaatatacctgtccagacaatctccagagctgctgcagaaaagctgtttgggtatatgagtagaccagtgatgagtggcccag

SEQ ID NO: 308904 - DNA, 95 bp, Homo sapiens
gaagcccggaatttgctcaaatctcatcttaaccttggtatttgaaatatctcaccaaaaaatatttgaagaagaataatctacgtgactggttg

SEQ ID NO: 308905 - DNA, 74 bp, Homo sapiens
atcaagaaatatgggacacatttcttgctatctgctactctgggaggcacgcttaaaaaggcctcttaagagcc

SEQ ID NO: 308906 - DNA, 100 bp, Homo sapiens
gttgacctatgatctgcagggagacgcacagccaggacatcctggaacctgggaaagggaacagatggagtcggataactgttcaggaggagatgatgac

SEQ ID NO: 308907 - DNA, 50 bp, Homo sapiens
cggaaggcgtcgtcttctcttaaaatctatatgttctcctttcagccaag

SEQ ID NO: 308908 - DNA, 82 bp, Homo sapiens
caaagcctgcccagacggctcacctgtgcgggatggaacaaaagaagtgtatgctgacttgtaaagtgaagaagccagtggt

SEQ ID NO: 308909 - DNA, 50 bp, Homo sapiens
acggacaagcacagtcttcggaagatgatgtctttctacctaaagatatt

SEQ ID NO: 308910 - DNA, 73 bp, Homo sapiens
gaaaactcctttccagaagactgtacatttctattatgatgtgttccatgtatggcatatgcaaagtgaagaa

SEQ ID NO: 308911 - DNA, 75 bp, Homo sapiens
gaaaggagtgcctggctgttatggaaagcattttaagtcttccacatcaagcatctccagtatcccgcaccccaa

SEQ ID NO: 308912 - DNA, 76 bp, Homo sapiens
ccgaccaccatcccggtcaccacgagatccccataccgagtgtgcctacgttccagccgtctacacctgtccctga

SEQ ID NO: 308913 - DNA, 90 bp, Homo sapiens
cctgcctccgcgtcgcagcccccgccgtagccgcctccgagcccgccgccacatcctctgagggccaattcctgtccccccagcagcatg

SEQ ID NO: 308914 - DNA, 100 bp, Homo sapiens
ctcctggggcccgacaagaacttcacgcgggagcaggcctatgaaggggtgctgcagctggtggaggctcgcgggcgctacgaggagctctgcatcgtca

SEQ ID NO: 308915 - DNA, 83 bp, Homo sapiens
gggcgctgctggcgctctggctgtgctgcgcgacccccgcgcatggtttggtgcacctcgatttggaggaagtagggcagggc

SEQ ID NO: 308916 - DNA, 100 bp, Homo sapiens
gtacctcccgccccgcgcgcccagccggcgagggacattggaccagggtcgggggtcgcggccgctccagcgagggatctataaagggcactgcttccgg

SEQ ID NO: 308917 - DNA, 100 bp, Homo sapiens
cctagtgcttcgttttgtgaaaggccaatttcatgaatttcaagagagtaccattggggaattaaacaaccaccatgtcgagcaaaaaggcaaagaccaa

SEQ ID NO: 308918 - DNA, 100 bp, Homo sapiens
acagtcgaacctttcccagagggaacacagatggctgtatttgatctcccttgagtttagaaatctggctgagaaataccaaacagtgattgccgacatt

SEQ ID NO: 308919 - DNA, 101 bp, Homo sapiens
cttaaaagaaactgtgaagcaaattcgtcagatcaaagaacaagaggaagaatacaagcgattgagtgaagcactagcagaggatgggagctacaatgccg

SEQ ID NO: 308920 - DNA, 75 bp, Homo sapiens
ggcaagtttaagaaggataattaattacacaaacccttcacagactgctctggtttggtgcctggaatgctgacc

SEQ ID NO: 308921 - DNA, 50 bp, Homo sapiens
gggcaagctgtgcgacgtgaccctcaagatacttggcatatcgaaatttt

SEQ ID NO: 308922 - DNA, 100 bp, Homo sapiens
tgattaacaccttaataaccagcggagctgacacagccaagaaggaccatcgagacctgttcttgaatacatcgatctggtctgtggtgatgatgaaaac

SEQ ID NO: 308923 - DNA, 75 bp, Homo sapiens
ggcagccagcacggccaaaccccctcctctgcctcgctccaacacaggtggcctggattcctccgtgtccttcgt

SEQ ID NO: 308924 - DNA, 75 bp, Homo sapiens
ggtgtaagcgcagaaagcaggcgaacccgcggcgcaataacggagcatcagatccatgctgctgctgactcggag

SEQ ID NO: 308925 - DNA, 123 bp, Homo sapiens
ccgagagggaagcgatgccacgggagatggaaccaaggagaaaccatttaaaacaggtctaaaggatgatgatgctgaagctatccttgctgcagacttcgaaattggtcactttttacgtga

SEQ ID NO: 308926 - DNA, 98 bp, Homo sapiens
tggggcaagtggtcaccctcatactcctcctgctcctcaaggtgtatcagggcaaagatacactctgtgcagttttagagagagacacactcagtatt

SEQ ID NO: 308927 - DNA, 96 bp, Homo sapiens
aagacgccttcccacctagctctcctctctttgcagagccatacaaagttgccacgccttggagtcactcttcataaggttgtagtagcaggagcc

SEQ ID NO: 308928 - DNA, 83 bp, Homo sapiens
gtggagctgcccactctagaggagctgaaagtagatgaggagctgcagaggctggagacagagttgggccaacccgctgagcg

SEQ ID NO: 308929 - DNA, 100 bp, Homo sapiens
ggcgcccgagtgtaggcgacaggccgctgacggccggaaggaaaatgtgtctttggtgcaacactaacaaggcttgtctggactacccagttacaagcgt

SEQ ID NO: 308930 - DNA, 74 bp, Homo sapiens
atggggaaaaactggatgttttactcttggtagaaaaagggagacagagctttttgtacatgccttcaaggatc

SEQ ID NO: 308931 - DNA, 75 bp, Homo sapiens
tgagcaccaagcagatcacttgcagaaatgactgctgtccatgcaggcaacataaacttcaagtgggatcctaaa

SEQ ID NO: 308932 - DNA, 75 bp, Homo sapiens
cgcggctcttttctaaaagtgtgacaatccttacccttccaaggaggacacccctaccagcagtctggactcact

SEQ ID NO: 308933 - DNA, 97 bp, Homo sapiens
cacccgccggggacggtggacaagaagatggtggagaagtgctggaagctcatggacaaggtgaatgaaaactttgccattgatttgatagcagagc

SEQ ID NO: 308934 - DNA, 131 bp, Homo sapiens
agaagcaggggcctgggccctcccgcgactacagccactactacacgaccatccaggacctgcgggacaagcttttccagaagcctgttaaaagcaaggtctccccacaagcaacttctctgccacatcgc

SEQ ID NO: 308935 - DNA, 118 bp, Homo sapiens
gcaacgtgttggaccttccggagcttctcagaagacagagggttttcttttgaggagttggcatcctttggaagagttcgtgaaagctttctgcccagagctcctggaccaatgcatc

SEQ ID NO: 308936 - DNA, 83 bp, Homo sapiens
gacatgtctgagactcctgctcagtgtagcattaaggtctgtctgctatcagctatgccgctgcccgttgcgctgcagacccg

SEQ ID NO: 308937 - DNA, 90 bp, Homo sapiens
tgagggcgctggtcctgctcggctgcctcctggcctcgctcctgttctcaggacaagcagcctcctccagctggtgatctcgggtcccgt

SEQ ID NO: 308938 - DNA, 100 bp, Homo sapiens
gtcatccagaatgagaacacgatgccacgcgcggagttcgccatgttcagcgggacccacgtggagcgggactttgtggaggcgccgtcgcagatgctgg

SEQ ID NO: 308939 - DNA, 100 bp, Homo sapiens
gtcagtttggggcatctccgcggtccggcccggggccccgggatctcggctgtccttcctcccggttttttattggcacctcagtctcaacattttcttt

SEQ ID NO: 308940 - DNA, 82 bp, Homo sapiens
acgaagaagcagaagcgtctgctcaggttgcagcaggagagaggtgctggagaatctggtaaaagcaccattgtgaagcaga

SEQ ID NO: 308941 - DNA, 50 bp, Homo sapiens
cgataatcggcttagaccaggactgggagtggttggaataaaaacagggt

SEQ ID NO: 308942 - DNA, 98 bp, Homo sapiens
tttcatctaacttgtcatgttccaacactacttagctttccaagggacatgggactggagttatttagggctcatattataagtgatcagaaagtgca

SEQ ID NO: 308943 - DNA, 100 bp, Homo sapiens
gaccccaacgaggtgtgggagatcgtgggcgagctgggcgacggcgccttcggcaaggtttacaaggttgttgtcgggataccagatttcctactccgag

SEQ ID NO: 308944 - DNA, 100 bp, Homo sapiens
gaccagggacctgcccgcctgcggctgctccggctgcaaatcagaaggagcccatgaatcttaattttaaagtgaaagaggagcctaaggaaggggagtc

SEQ ID NO: 308945 - DNA, 75 bp, Homo sapiens
gagtttgtcaggcaggccttggcgtaccttgagcagagtgatgatgatgatgattttgatgatgaggaagctgaa

SEQ ID NO: 308946 - DNA, 97 bp, Homo sapiens
cagggcccagccggttcagagcaaaccgcagaagcccgtgggtgctggctgccaagtcttcgaaggccgacccaagctggccacatggcggcagcgc

SEQ ID NO: 308947 - DNA, 75 bp, Homo sapiens
ccgtcccccgcgggtctgctctgtgtgccatggacggccatgccagtgacggtaacccgcaccaccatcacaacc

SEQ ID NO: 308948 - DNA, 83 bp, Homo sapiens
cgtggccagcggcgccgccgaaggttcttacatccccgcgtccccaggtttagcctgagcagggttgtggaaggccgggaccc

SEQ ID NO: 308949 - DNA, 95 bp, Homo sapiens
ctggcaacgcaaagcaccttacaaacgcccgaggtctgaagcctgggagtggcggtggagacggaatcagtccccaatgcctggaaattcctcat

SEQ ID NO: 308950 - DNA, 98 bp, Homo sapiens
tcccgcgtccagcacctacgtcccgctgccgtcgccgccgccaccatgcccaagagaaagtaaaggcatgacttcctggcaccacagggaaaatcggg

SEQ ID NO: 308951 - DNA, 90 bp, Homo sapiens
cctttccaaaggacgcgaccataactctaaaaggtgaagttcatccacgaccagacctccccaaaccccaagtacagaggattcttccac

SEQ ID NO: 308952 - DNA, 82 bp, Homo sapiens
cgctggccgggctggctgcggccgccctgggccgggccccaccggacggaaaacgaagccccctcctgtattgacagctggg

SEQ ID NO: 308953 - DNA, 83 bp, Homo sapiens
ccctgaaggccatgaagcagtacaacggcgtccctctggatgacaatgcagatcttcgtgaagactctgactggtaagaccat

SEQ ID NO: 308954 - DNA, 82 bp, Homo sapiens
agggaaccctggtcaccgtctcctcaggtcctgaacgaggctgtgggggccctgatgtaccacaccatcactctcaccaggg

SEQ ID NO: 308955 - DNA, 101 bp, Homo sapiens
aggtgaaggcggccggggccgggacgccatgtccatggaggaccccttctttgtggtgaaagggtcgctcatcccgtcagtcatcctttattgcagtcggg

SEQ ID NO: 308956 - DNA, 50 bp, Homo sapiens
aagcaatcatcaagcacctcctcgtaattcgccaaaatgacgaacacaaa

SEQ ID NO: 308957 - DNA, 100 bp, Homo sapiens
actcgggaccccgccctcgacggagagagtcggaccccacaggcccacagagacagtgggatctggtgtgtgagcagaaaggtctgaacagagctgcgtc

SEQ ID NO: 308958 - DNA, 98 bp, Homo sapiens
ttggaagatttaaaagaactcagtcctcggttggggaactgcagtacagcaatggcgatcagaaggtagaacagctgtatggctgcacattcccatcc

SEQ ID NO: 308959 - DNA, 90 bp, Homo sapiens
ggtcacggaggtagtcatgatctatgacgccgagaagcagaggccccgaggctcttgtcaggatggtgaagctgttcatcggaaacctgc

SEQ ID NO: 308960 - DNA, 101 bp, Homo sapiens
ccgagtttgcgactcgcggaccggcgtccccggcgcgaagaggctggactcggattcgttgcctgagatatttggagttcttacaacatggcagacattga

SEQ ID NO: 308961 - DNA, 98 bp, Homo sapiens
cccaaaataaaaaaattgcaagagagagactattttcgttattacaaggatttttttcccaggaagccatcccgtcagaggggttcaagtgatgaaag

SEQ ID NO: 308962 - DNA, 100 bp, Homo sapiens
cgtgccattttagacctggtgcagtttttcaagtggaaaaccgtcacggttgtgtatgatgacagcactgttaatgttggagaagattgtccagtgtttg

SEQ ID NO: 308963 - DNA, 90 bp, Homo sapiens
tcatcgtgatcccggcgacatactacctctggccccgagatcagaatgccgtgtatgtggtagaagaccaaagaagagatgagctaggac

SEQ ID NO: 308964 - DNA, 100 bp, Homo sapiens
tcggtgcagaggctgcaagtgctggagaacatcatggaaaacaacactcagtggctaatgaaggtggggacccatcgtgaagatggcgtggccctgagag

SEQ ID NO: 308965 - DNA, 76 bp, Homo sapiens
cgatactctcgctcacgcagcaggagcaggggacgaaggttggtaaagtgtcatctcaccgccgcgtgctgtgaga

SEQ ID NO: 308966 - DNA, 75 bp, Homo sapiens
gcaaggggtaaatgagggtgttgatttctccaaggatctgctgaaagaattcaaaatgtcctcagcctcttttgt

SEQ ID NO: 308967 - DNA, 75 bp, Homo sapiens
ccccgggccaggccgcggccggggcaggagcgcagaacattctagtatgccagtagaaaaaaatatcactttaga

SEQ ID NO: 308968 - DNA, 101 bp, Homo sapiens
tcctgctatgtgccctctttgttcctaaagaacatacatatgatagttgagaaagacacatattctgatcatgaagaaataaacacaagttaaatatgact

SEQ ID NO: 308969 - DNA, 100 bp, Homo sapiens
gaagctaatcttgtacttcaagaggaggaatcacgctcggaaacaatggggggggccctcagcctcttggccttgaacgggctgttcatcttgattcaca

SEQ ID NO: 308970 - DNA, 82 bp, Homo sapiens
ttatcaaaacatttcattccctataatgcaaagtgaaatcccattctctggctggagacacagatggcctcaaatgagagag

SEQ ID NO: 308971 - DNA, 88 bp, Homo sapiens
ctggtgagccacgcgcctggggaggctctggcccgggctccgcgtacttcctgttcagaccattactgggacttccacccccaccacg

SEQ ID NO: 308972 - DNA, 100 bp, Homo sapiens
tgctgacgctctgggtgaagaatggaagaaccctctgcaggtcctggtgaacgccatcatcaacagtggtccccgggaggactccacacgcattgggcgc

SEQ ID NO: 308973 - DNA, 100 bp, Homo sapiens
cgagtcggcgcgcgggacgaaggtcggatccgcacaagacggcaaagctctgggagtgccaccaacgtcgcctctacacctgataaccggggccgcagtc

SEQ ID NO: 308974 - DNA, 76 bp, Homo sapiens
agccaaggaataaacatgcaatgaacccaaaagggtgttcacggccctggcactggtgcgaatgctcattcttcct

SEQ ID NO: 308975 - DNA, 100 bp, Homo sapiens
tggggcctgtgcatcctcctgacccacaggcagaatccagagaccacatttgaagtatatgttgaagtggcctatcccaggacaggtggcactctttcag

SEQ ID NO: 308976 - DNA, 100 bp, Homo sapiens
aacctggcagccgccgccgtggaaggaatctaaggccgctgctccagctcctgtgtcggaggctgtgtgtcggacctccatgtgtagtatacagtcagca

SEQ ID NO: 308977 - DNA, 100 bp, Homo sapiens
aacgagatggctatttatgaattcattcataactttgtggaagttttagatgagtatttcagccgagtggctgaaggtgatgtggccgccctcaaccgac

SEQ ID NO: 308978 - DNA, 98 bp, Homo sapiens
agcagcccagacgcggcacagagagggcctgggagcttgctgcagcttcaggccaggtcagagcagcccaccatgggatggggagggggtggaggctg

SEQ ID NO: 308979 - DNA, 100 bp, Homo sapiens
caggtgtaagcgcagaaagcaggcgaacccgcggcgcaataacggagtggagtcaacatatcaatggagcaagtcacagtcgtcgatgccagcttcttct

SEQ ID NO: 308980 - DNA, 83 bp, Homo sapiens
gtcgggcgcggcggctgagaaggcggactccagacagcgaccccagatgaaggtgaggctttccccgtctcggagcaccacca

SEQ ID NO: 308981 - DNA, 100 bp, Homo sapiens
ttgccaacctttacagacctatccaacggtcttgcgagtggctggttccctgcagaagagcacagaagtgatgaaggccatgcaaagtcttgtgaagatt

SEQ ID NO: 308982 - DNA, 82 bp, Homo sapiens
gtctgacatggaggatgatttcatgtgcgatgatgaggaggactacgacctggtctgccatcatggatgttctcgcagaagc

SEQ ID NO: 308983 - DNA, 48 bp, Homo sapiens
gcttcaggtggagacagcccgaaggtcctctggacacagacatgcagc

SEQ ID NO: 308984 - DNA, 100 bp, Homo sapiens
ctaacagaagaacaagccagaaaaacatttgagagagccatgaaactggaacaggagtttactgaacatttcacagaatgcggagctgctttcaccagca

SEQ ID NO: 308985 - DNA, 100 bp, Homo sapiens
tccacttccgcaaggaccctttggaaggccgggtgggccgagatgctgagggttggaaaagcaaaagcagatgtgtggcccaaaactgctccaaagaaag

SEQ ID NO: 308986 - DNA, 75 bp, Homo sapiens
ctaatggtccggacttccgtgtgcaagagcggtgagcggggcgcctatgcctccttcgggagagacgcaggcgtg

SEQ ID NO: 308987 - DNA, 100 bp, Homo sapiens
ggcgtgcccagcaagagattaaagatgcagtacgccacggggccgctgctcaagttccagatttgtttttgaaatcatgaatcctgtttatagtcctgga

SEQ ID NO: 308988 - DNA, 87 bp, Homo sapiens
tgagctggaggacatgaagatgaagatctctgccctcaagagtgaaatccagaaggaggtgcccctgggcgctgggattgctctagc

SEQ ID NO: 308989 - DNA, 71 bp, Homo sapiens
gattcgcagtggtcgcttcttctccttggaaacaattgaagatgttgaagaaatgctcaacaaccttcctg

SEQ ID NO: 308990 - DNA, 75 bp, Homo sapiens
tttcgatctccgccctggggtcattgtcagggtttttaatgaccacaacaagcaagcatgcagcttactgcttga

SEQ ID NO: 308991 - DNA, 50 bp, Homo sapiens
aatgtcaagtacgaagatatctatgagacagaactgtccttgtggataca

SEQ ID NO: 308992 - DNA, 75 bp, Homo sapiens
gccctggccctgaccgagacctgggccgagccactgacaagactttaagcaagagacggagagttaacatctaat

SEQ ID NO: 308993 - DNA, 80 bp, Homo sapiens
ctgcgcagctccggccgcctggctccccatactagtcgccgcaattctgtggtgttcttggtcacacatttatggagttt

SEQ ID NO: 308994 - DNA, 74 bp, Homo sapiens
acacctggaagccgagaaatggtcatcgaggctgaacttcggtccaccaagcactgggagcttactgcggaggg

SEQ ID NO: 308995 - DNA, 100 bp, Homo sapiens
ccggtatattgcaaataccgtagagtggaagcatcagttcacagcagtaatgcacactgtacagataagacaattgaagctgctgaagccctgcttcata

SEQ ID NO: 308996 - DNA, 100 bp, Homo sapiens
tggcaataagaaacaaaatgatatcagaaggactagacccagatcttcttgaattttgtacttcagctgctgatatgaaaattagattatttacttcaga

SEQ ID NO: 308997 - DNA, 73 bp, Homo sapiens
ctggagcgaccccttgttctttggtggcgctggtcctatggcagcgtatacaaagctattcataaagagaccg

SEQ ID NO: 308998 - DNA, 90 bp, Homo sapiens
aaaaatgactacttgcagtacttgaccctgtattcagtggatcagctggcaccacccaaatagataaattggcccatctggtcttgtggc

SEQ ID NO: 308999 - DNA, 75 bp, Homo sapiens
ccctggaatctgaagagacatgagatggtagacaaaaccccaggtaagaatgattgatgttggctgatattggag

SEQ ID NO: 309000 - DNA, 75 bp, Homo sapiens
gaaaaagctgtggaaggctctggataaggaccagtacctgcccaggaaactggagattgcatcctacctgatcac

SEQ ID NO: 309001 - DNA, 100 bp, Homo sapiens
agacactgcgactccggagacagcccaaatatcctcggaagagcgctcccaggagaaacaaggaaatgtttcaacgtgcgcaagcgttgcggcggcgggc

SEQ ID NO: 309002 - DNA, 50 bp, Homo sapiens
ctccagaaactttccctccttcagggatgcttgaagatggaaagaaattt

SEQ ID NO: 309003 - DNA, 74 bp, Homo sapiens
agacgctccgatttcttggactctacagccctgaatcgtgtgcacttacttgggcgagtgggtcaggaccctgt

SEQ ID NO: 309004 - DNA, 100 bp, Homo sapiens
gaaacactggcttctctccttcagctccaggctaggtactccaaagattcaggtttactcacgtcatccagcagagaatggaaagtcaaatttcctgaat

SEQ ID NO: 309005 - DNA, 98 bp, Homo sapiens
caggacgtgatggaggggctgaggaagaacaacccctcccggggcacggacaccgccaagcacagaggtctcctctgagcctccggcctccataagac

SEQ ID NO: 309006 - DNA, 75 bp, Homo sapiens
agcgggggggcaggcgatcgaagcatgatgccttcttctgtagagtgggcgctttgcagaatacgtgttgaatga

SEQ ID NO: 309007 - DNA, 75 bp, Homo sapiens
gttcgtcgtagaatgatgatgcagtccggccggaaaggggttcattcaatgtgtcatgagtgtttaaatcaagag

SEQ ID NO: 309008 - DNA, 100 bp, Homo sapiens
attcgataagtcgaaactgaagaagacagagacgcaagagaaaaatccactgccttccaaagaaagaccatcagcctagaagaagattacgtaatagagc

SEQ ID NO: 309009 - DNA, 115 bp, Homo sapiens
catcaaggtgaacgggcggcccctggagatgattgagccgcgcacgctacagtacaaggcagctgaactctccatcaagtttctgcctccccaacgtaatatggaagtcgttctg

SEQ ID NO: 309010 - DNA, 75 bp, Homo sapiens
tttgagctggtggaagtggttggaaatggcacctatggacaagtctataaggcagtataactccaactgtggaac

SEQ ID NO: 309011 - DNA, 82 bp, Homo sapiens
ggccacttgcttgggatcctttatcctggtcatcttctatttccaaagtccggcctctttggcctacccccgttggctccgc

SEQ ID NO: 309012 - DNA, 98 bp, Homo sapiens
tgggactgttggtcaccctacctggcagccagtgataaggtcaatgagctgaaggagaaaggcaacaaggccctgagcgtgggtaacatcgatgatgc

SEQ ID NO: 309013 - DNA, 82 bp, Homo sapiens
ctcccgagtggctgggattacaggatttgaactcagaggatcaaaaagccttcagtgttgaacatacaagctgcaatgagga

SEQ ID NO: 309014 - DNA, 100 bp, Homo sapiens
aaaagacagccaaggcaaagaatgaccgttcaaagagcgaaagcaaccggtacaagccagctgccatgttgtgagcacataccacatagctccatggaga

SEQ ID NO: 309015 - DNA, 75 bp, Homo sapiens
tcaggaaggaggtggaggggctgcggagacagagccctccggccagcggggagggctccccagaccccgacagca

SEQ ID NO: 309016 - DNA, 100 bp, Homo sapiens
gctatgagctttgaagcctttcagagacagatctttgatgaagatcagaatgatccccttctgccagggagagcaggagggtgatgaggaagaggagggg

SEQ ID NO: 309017 - DNA, 75 bp, Homo sapiens
gatttttggattcttcaacgatggcgaacctcccaccaaaaagcccagatggagtttcactcttgtctcccaggc

SEQ ID NO: 309018 - DNA, 117 bp, Homo sapiens
aagaaattccacccagtatttcaagagtcacttctttacttggtgcaggaaggcagtctttgctacgtacagcaaaaggatggtgccatgacaatggtgtgaactacaagattggag

SEQ ID NO: 309019 - DNA, 102 bp, Homo sapiens
ggggcctggactgcacggcccggcagcaggggacaagacgttcgaggagtacctggatgagtattaccggctggactacgaggacatcatcgacgacctgcc

SEQ ID NO: 309020 - DNA, 100 bp, Homo sapiens
cgctctaatctggacttagcctacctaaatagtcctcctgtgttaccaggaatgtgaccaagtccatatagatgatgtttcttcagatgataacggacag

SEQ ID NO: 309021 - DNA, 51 bp, Homo sapiens
atctccgtgctggccgatgagtaccagaatgcagagagctggaattccttg

SEQ ID NO: 309022 - DNA, 130 bp, Homo sapiens
ccaagcttctgagggaggaggacaacaagtactgcgccgactgcgaggccaaaggatcaccccttctgtgtcattctctgaggaaaacaagttcttctcaaggaggaaagtctgaacttgtcaaacagtc

SEQ ID NO: 309023 - DNA, 100 bp, Homo sapiens
tgacgatctggggcagctgactgccctccaggaacagaggcggctgagccaggaacgggatcgcctagagggtcttcgccagagactccgcaaggcccag

SEQ ID NO: 309024 - DNA, 75 bp, Homo sapiens
catcctgctctcaactacaacatcgtttcagggcataaacttggaggaggcagtggagagagcatcctggtatca

SEQ ID NO: 309025 - DNA, 100 bp, Homo sapiens
ccgaaccaagctttagccgccgaggccgcgtgtcccaaaggccaggactgtgaaggccttattgttcgctctgccaccaaggtgaccgctgatgtcatca

SEQ ID NO: 309026 - DNA, 82 bp, Homo sapiens
gggatccggagggaggaagctgggacacccgggagtcaggaaatggtcaaaatgcagatcttcgtgaaaacccttaccggca

SEQ ID NO: 309027 - DNA, 82 bp, Homo sapiens
gtacttgagcagtcacctggcacaggcagaatccagagaccacatttgaagtatatgttgaagtggcctatcccaggacagg

SEQ ID NO: 309028 - DNA, 107 bp, Homo sapiens
tgccccttggcctaactttttctttcccctgtcgacagactaaactggaagagtgttctggacttggtgcctctttctgttatatgctttcctatttagttgggaga

SEQ ID NO: 309029 - DNA, 74 bp, Homo sapiens
gaggagatcacaccccgacggcagtccatgacggtgaagaagggagaggtcatcttccacgatgttgctgtgct

SEQ ID NO: 309030 - DNA, 75 bp, Homo sapiens
atgatttatctggtgacagaatatgctagtggaggggaaatatttggcgtataaagcagttgttaatgatgctac

SEQ ID NO: 309031 - DNA, 106 bp, Homo sapiens
cggggatccccggccagaccccgccggttgcctctgctcagcgtcctgctgctgccgctgctgggcgacaatgcagatcttcgtgaagactctgactggtaagacc

SEQ ID NO: 309032 - DNA, 98 bp, Homo sapiens
gcagatggcttatgaaccacaggcggcttacagggagaacacagttggcctccaccgtttctgccccacagaaaacgtagcaaagatcaaccgagagg

SEQ ID NO: 309033 - DNA, 100 bp, Homo sapiens
aagcataggtcatcgattcaaaagatctggttttcccatcatatgattcccggtcctcctggtccccacacaactggcatccctcatccagctattgtaa

SEQ ID NO: 309034 - DNA, 97 bp, Homo sapiens
gattgcttgaagaaatccatgccatgaaggtgtgagatcaaccatgagttccgttgcagttttgacccaagagagttttgctgaacaccgaagtggg

SEQ ID NO: 309035 - DNA, 90 bp, Homo sapiens
cctatgaagatttttgacaacgaccctacacaggatgaaatgggttcatagtggcgtcatgcacgcagactcctgcaagttcccctaagt

SEQ ID NO: 309036 - DNA, 75 bp, Homo sapiens
ggagtcaactgagagttcaaatacaacaattgaggatgaagatgtgaaagccatccctccattcattatgaacac

SEQ ID NO: 309037 - DNA, 83 bp, Homo sapiens
cctcaacttcgtctggagaaaagtggtgacttattgactcaaatccagtacctcaagcaagtccagcagccgagcgttgccca

SEQ ID NO: 309038 - DNA, 98 bp, Homo sapiens
ggagtctgcgcgatgggcgacccggaaaggccggaagcggccgggctggatcaggatgaggatgaagatgagctggattcccacaccatggtgaagac

SEQ ID NO: 309039 - DNA, 100 bp, Homo sapiens
cagctcggaacccgccagggtccagggtccaggttccagcgcccggcggcccagtatgaaatgcttcatgtcacacctccaatgagcccaccagatgtcc

SEQ ID NO: 309040 - DNA, 83 bp, Homo sapiens
ctggaccacggcgcagacgcgggcgagctgcggctcggacgccagcggacacgcgggcgagaccatggtgaatccgggcagca

SEQ ID NO: 309041 - DNA, 98 bp, Homo sapiens
gcagagcagcacctccatcaggtacaacctcgaggagctctaccaggtaaatgagctggatggtatcccgttgatcctggacaactgcaacatcagtg

SEQ ID NO: 309042 - DNA, 96 bp, Homo sapiens
gtgagcagtgacaattgctaggcggagacagtgcagggaagagagaccttagaaaggatcaggactggcgggaaatttggtgagcggcctccacct

SEQ ID NO: 309043 - DNA, 100 bp, Homo sapiens
ttgctgaagaagaaatcatagacgatgatgatgatgacatcacccttacagtttgaacgccatgaccctgtggatgggagaattactgagaggcagtttg

SEQ ID NO: 309044 - DNA, 100 bp, Homo sapiens
tatactctgcaaggtggtgttccagtggcaaacagctgtataaactcttgtaaacagtatatcctttcgggctctgatgacttcaacctgtacatgtgga

SEQ ID NO: 309045 - DNA, 100 bp, Homo sapiens
ttcagtagtggtctcaataagtgtgttatacttgctttggtgattgcaatcagcatgggatttggccatttctatgatacagtctcgctgtgatgcccag

SEQ ID NO: 309046 - DNA, 73 bp, Homo sapiens
agaggagctgtggataacgggaggtgaatttccatgtcaacatagtcctggaacagtggaggccatgtgtctt

SEQ ID NO: 309047 - DNA, 99 bp, Homo sapiens
cccgccccaccgccatcccgtcccggggagcccctaggcccgggtcccggatccccgcgcacccggccaggtttgatctgtggatgaaatgaatcatga

SEQ ID NO: 309048 - DNA, 82 bp, Homo sapiens
cccacctgagcccccgctgagcagcccagccagtcagcacaaaggaggacgtgatgagattgtggggaacctgggtgaaggc

SEQ ID NO: 309049 - DNA, 75 bp, Homo sapiens
agcctggggactctgcctcgtgccgctgagcctggcgcagatcgatactgtggcctcatgaataggaatgtctgc

SEQ ID NO: 309050 - DNA, 90 bp, Homo sapiens
cacagaggaatcatcacctccaaatactggtcccacgctttctgaaacaaaggtcttcactgcctcatctgctccagcagagaatcacat

SEQ ID NO: 309051 - DNA, 82 bp, Homo sapiens
ccgcacacaagtcccgcatcgtggagaacctgcagtcctttaacgagatcactgctatgtagagacggggtttcaccgcgtt

SEQ ID NO: 309052 - DNA, 50 bp, Homo sapiens
caactttcagaagtggtcccagttgcagaactgctttattcactgcagtg

SEQ ID NO: 309053 - DNA, 82 bp, Homo sapiens
aaccccatccggaccccgccgcccgagcgcgcggccccggaagcacccggtactccaaagattcaggtttactcacgtcatc

SEQ ID NO: 309054 - DNA, 96 bp, Homo sapiens
gttgctggtgctcagcttcgtgtttggatgcaatgttcttaggatcctcctcccgtccttctcatccttcgtcatatatcagttatgtgcatgctc

SEQ ID NO: 309055 - DNA, 75 bp, Homo sapiens
actacgagggctccagaacccaggaagattatttctcaagatgaagctgacagaagagggaaagtgtatgataaa

SEQ ID NO: 309056 - DNA, 96 bp, Homo sapiens
gctgatgaagtaatttgcagtgaaattttaagcgactgtgactctgctgcaagttccccagatcttgagggcagcccaatggatccaatggtgatg

SEQ ID NO: 309057 - DNA, 88 bp, Homo sapiens
gagcagccaacgtggtgggacccaaaatctgcctggaagataatgtgtgtatgcaacagcgttattgcaacaggctaacgaaaacaga

SEQ ID NO: 309058 - DNA, 98 bp, Homo sapiens
tacagtcagggcagcctgaaggatgcagtggttattaacttggtgatgcttttggctgaaatgaaaatacaggaccgcgctgttccatccttggccat

SEQ ID NO: 309059 - DNA, 83 bp, Homo sapiens
tatggacagacgcacagacacctgcaggtgacttaagagattaaaattaatttggttgctgttggttctgaacaaataatgag

SEQ ID NO: 309060 - DNA, 75 bp, Homo sapiens
ttgtggctgtgcttgccaggcctggctccataagactttgaccccgacgcaggcttcagtgattgccgcggatca

SEQ ID NO: 309061 - DNA, 74 bp, Homo sapiens
ccgcaatgccaacctcagcaccatcaagcagggacctgatttcccatcgccttctgtccccctaaaggcttcag

SEQ ID NO: 309062 - DNA, 100 bp, Homo sapiens
gacaggctgagcgacttcgaggggaagaaggctgaaaagaagggagccagcaatacaattatcggtatgatctttggatgttttgctttgttcgagttgc

SEQ ID NO: 309063 - DNA, 75 bp, Homo sapiens
cataaagagacacataccaaattggatctatccagcacttttccagccattaactccaggctctcgagaatttga

SEQ ID NO: 309064 - DNA, 83 bp, Homo sapiens
ggaccaaggtggaaatcaaacatatgagatcctgactccaaactccattcccaagggtttcatggacgggaagcaggcgtgcg

SEQ ID NO: 309065 - DNA, 101 bp, Homo sapiens
gatgatgctggcacagggccttctgctgcatttcctgcccagaggatcaggagcgtctgggcaagcagctcaagttacgtgcagaaagggaagaaaaggag

SEQ ID NO: 309066 - DNA, 100 bp, Homo sapiens
gtcttcggctagcaagttcaccagcatccctgcagccttctggtataccatcgtcaccatgacaacactagggtctgccatcatggatgttctcgcagaa

SEQ ID NO: 309067 - DNA, 100 bp, Homo sapiens
tcgcattttggaaggtctttctgatcctaagctgccttgcagaaattggaatgggattaacaggatttggagtgtttttcctgttctttggaatgattct

SEQ ID NO: 309068 - DNA, 90 bp, Homo sapiens
aaactgggcgtctgttccggcgccggacccctatttgcaaaggctggagcattggatttgctaaaggagcttaagaatattcctatgacc

SEQ ID NO: 309069 - DNA, 50 bp, Homo sapiens
cgaggagctggggccatcaaggactatgtgaaaatgagcttagcccctgg

SEQ ID NO: 309070 - DNA, 74 bp, Homo sapiens
atctgaatgagccaattaaacgagatggcaaaaaggagtgtgatattgatctgaagaagctgaagaaaaacagg

SEQ ID NO: 309071 - DNA, 75 bp, Homo sapiens
caaaacgctgattaaaagaagcacgtgccaggccgggcacctggtgtgtaaccaatgccgccagaagttgagctg

SEQ ID NO: 309072 - DNA, 100 bp, Homo sapiens
ctcttctaagagaagtagtaaaaccagctgcagtgttatcaaaggcactatgacatgcggaggaacgacgacattataaacttcttcaatgacttcagtg

SEQ ID NO: 309073 - DNA, 75 bp, Homo sapiens
gaagttctacgcacgcgtctgcagaagtggctcaggcctggttggccgccagggtctcactctgtcactcaggct

SEQ ID NO: 309074 - DNA, 100 bp, Homo sapiens
gtattcacagggaaagctgtgagggtgaccaaagccacgtaatgtccgtagttcgctcatccgtccatgccagatggattgtggggaaggtgattgggac

SEQ ID NO: 309075 - DNA, 83 bp, Homo sapiens
cccagctttaccgcaaccaccgccaccagtccacggagggcatgaggtctcctctgagcctccggcctccataagacccaaaa

SEQ ID NO: 309076 - DNA, 100 bp, Homo sapiens
ccaaaatggccacttacctgactggggaactgacggacatagggcctgattacattccaacagaggaagaaaggagagtcttcgcagaatgcaatgatga

SEQ ID NO: 309077 - DNA, 83 bp, Homo sapiens
ctggtccggaatccctaagccagtgcgtccaatgacgtggaagctcctctcattcatggcccaggggaagacagggagcagct

SEQ ID NO: 309078 - DNA, 51 bp, Homo sapiens
aagaagctgctatgaggtctcgtaaacagataataattgtgcagtttggtg

SEQ ID NO: 309079 - DNA, 100 bp, Homo sapiens
gggcaagccctccgagaagaacctctacgccgacatcgacgccgcgtggcaggcgctgcgcacccgagagaatcatagtgaaatcgaaaggcgcagacgg

SEQ ID NO: 309080 - DNA, 50 bp, Homo sapiens
gggggcctggccgcgcagccgtaaaatgtttattggaggcttgagctggg

SEQ ID NO: 309081 - DNA, 90 bp, Homo sapiens
cggctgcggaggtggcggccgggctgggatagcgcgagtgtccgcggccgagcagcagatttgggaatggatgatgaaggagatgatgac

SEQ ID NO: 309082 - DNA, 100 bp, Homo sapiens
tacaaaggtctggacactgaaaccaccgtggaagtcgcctggtgtgaactgcagctagatgctggtgtgccagaaaaaataagcctgatttccagagatg

SEQ ID NO: 309083 - DNA, 100 bp, Homo sapiens
tgaagatgaggttgaaaaacctgacttttatcatcatattgataatctcaggagaactctatgcagaagacacctcctgtgtgaatccgcccacagtaca

SEQ ID NO: 309084 - DNA, 100 bp, Homo sapiens
cccagaatgccagcaaaacgtgggaactgagtctgtatgagctgcaccggaccccgcagataattgcctttgatgagttaaggacagattttaagagccc

SEQ ID NO: 309085 - DNA, 98 bp, Homo sapiens
ctggagtcgccgggactcaccagcggcagcgacaccccgcagcaggacagattgacatctttaagtatgtgatctacggcatcgcagctgcgttcttt

SEQ ID NO: 309086 - DNA, 88 bp, Homo sapiens
gagtttgagccccggaggcagagcggctgccatggaccacggaggggtgatcgtgaacatcactgccaccctggggaaccgggggcag

SEQ ID NO: 309087 - DNA, 87 bp, Homo sapiens
atgccagcagcttgttgtacaatgtggtggtacagtgggagctattctgacatgtccactggaagttgtaaaaacacgactgcagtc

SEQ ID NO: 309088 - DNA, 100 bp, Homo sapiens
tgccatgcagcttaccaaccatcgagtctgggactatgctggagtgaagcagaggagagcagtaagatccgtgctcccactaccatgaagaaatttgaag

SEQ ID NO: 309089 - DNA, 101 bp, Homo sapiens
ttggattctgttgcctgggtaccaccagagggaaagctggggcgattgtcagcagcctgctgcctccgtaccgccacagtgctcacaactagccgggaggc

SEQ ID NO: 309090 - DNA, 97 bp, Homo sapiens
gtcgtgccgcttttggaggatgggagaggccatggcaaagattcaaatgtaccagctgtccaggctccttcatgactatcacagagatctctacaat

SEQ ID NO: 309091 - DNA, 80 bp, Homo sapiens
gggaaccctggtcaccgtctcctcagctggagaagaagcaggcgctccctccattccagccacagatcacagacgactac

SEQ ID NO: 309092 - DNA, 74 bp, Homo sapiens
aaccaacattttatacatctgatggtgttcctttcactgcagctgatccagctggccaactcagccaatccgca

SEQ ID NO: 309093 - DNA, 87 bp, Homo sapiens
aaagatctggaacatcgaaaggaccaagtaacacagctttcacaagagtggaggcgctccatttgggaacattaatggctgcccacg

SEQ ID NO: 309094 - DNA, 82 bp, Homo sapiens
gaaccggtgcccatccagtccggtgccatctgaagcccccttcccagctctggattaatcgaattacagctgctagccagga

SEQ ID NO: 309095 - DNA, 51 bp, Homo sapiens
aagtacatcgggatgaggaatgagcaagcgcaagagtgagccatggagcta

SEQ ID NO: 309096 - DNA, 90 bp, Homo sapiens
gagagggggcgctgagctgttggggcatgtactggcattgaaaacattgacgaagctattacattgcttgaacaaaataattgggactta

SEQ ID NO: 309097 - DNA, 100 bp, Homo sapiens
gaaggccgggacccggttccccggcccacagtgggggtgtgcaaacccgagagaactggcgagtaaccagctcataaatcacatcgaacagtttttggat

SEQ ID NO: 309098 - DNA, 100 bp, Homo sapiens
cgccgccacaccgccgccacaccgccgctgcctcagtcatgccggatgatccagattccagtaccagtacattaggaaacatgctagaattacctggaac

SEQ ID NO: 309099 - DNA, 100 bp, Homo sapiens
gtgttcctgaatgaaagaagtcaggcagactggagctggctgtggattttatttctcaggagaaggaggtgggagctggagagagtgacccgtgcatctt

SEQ ID NO: 309100 - DNA, 82 bp, Homo sapiens
gcctcccggctctcgtcagcctcccgccggccgtctccttaacaccgaacacctaagactttgaccccgacgcaggcttcag

SEQ ID NO: 309101 - DNA, 100 bp, Homo sapiens
gctgggcgacgagctgaccctgggagacatcgacgtattaaaggtggaagaaggtccatatctttttctgtgggtgcttcaagtgttgttggaagtggag

SEQ ID NO: 309102 - DNA, 100 bp, Homo sapiens
aaacgaggactgatgcctggcctcacattttctaatgaacttattagcagagatgagacacctgaaagaccccgccgtggcatcccagggcttcctgatg

SEQ ID NO: 309103 - DNA, 100 bp, Homo sapiens
gggcagtgaatcctcaggatcgaagtggtatcaccccaaaaggattagctattgacctgaaaagtggttctggaaaagtgtaccaaggccctgcaaaagg

SEQ ID NO: 309104 - DNA, 100 bp, Homo sapiens
ccacctcacagattccagcttcggaacaagagaccctgtttttggctttcacccccaaccagtgaccaaagacttgaccactcaaagtccagctccccag

SEQ ID NO: 309105 - DNA, 90 bp, Homo sapiens
aaatatcatccagataaaggaggtgatgaggttatgttcatgaggatagcaaaagcttatgctgccttacagttgaacatgagtcttctt

SEQ ID NO: 309106 - DNA, 100 bp, Homo sapiens
cgagaactccgccagcgagtcgtctgacacggagctgccaggagagaaatatgagttggagggaaggaaaagtggttctactaatgttccaaaatcctca

SEQ ID NO: 309107 - DNA, 99 bp, Homo sapiens
tggaagaagattgctaccatccagcagaccactgaggtcttcacttcgattctgctcagcaatcctcagatgtggtggttaaatgattccaatcctgaa

SEQ ID NO: 309108 - DNA, 90 bp, Homo sapiens
catcttttcagcaagcctatatcacatgtttatgttctatgctccctaatgaagatgctattaaggaggaagattttcagtcaatgactt

SEQ ID NO: 309109 - DNA, 75 bp, Homo sapiens
tgaacaaagagaagatcacaccactcacgctcaaggaagcgttgttgacgaccatggacatcatccacgatggat

SEQ ID NO: 309110 - DNA, 100 bp, Homo sapiens
gtttaagacttcgcgagaacagaatttcttttggcacctcctctccgcgcgttcttgggtggattaatccctcacctcctgggcgatgtggttttcttgt

SEQ ID NO: 309111 - DNA, 75 bp, Homo sapiens
gatcctctactgtgcatctccttgactgccgcatcatgggaatatggaatgtgcagatgtcccactattaactcc

SEQ ID NO: 309112 - DNA, 100 bp, Homo sapiens
cgcgccctggcgggtccggaccaaggtcttgctcagtgtgcagaactctgctggcagctgagaggggaagccggaaagaggcaagttcctggtgcaaagg

SEQ ID NO: 309113 - DNA, 83 bp, Homo sapiens
ttacaacattaatcagatactgcatttaagggctccagcggggccccacagacgagcaggatgcctgtccccatgagtgccaa

SEQ ID NO: 309114 - DNA, 75 bp, Homo sapiens
caagaagctctacctgctcaagacggagaataccaagctgcgtaggaccaagtcagataccaggcccaggttcca

SEQ ID NO: 309115 - DNA, 50 bp, Homo sapiens
gcgtctccttcccgttctccaggcggagcagcggagagcctacctggagg

SEQ ID NO: 309116 - DNA, 76 bp, Homo sapiens
gttcagcgcagcgactcggggacctggagctgacgcctacaggctaatcctagtgttttggagagagatgtggata

SEQ ID NO: 309117 - DNA, 98 bp, Homo sapiens
ggcactcccaggctgggagctggatacctgccctggcagcatggctcagactgcatgacaggtggatcttatatgggaggatgcactgttcatgtttg

SEQ ID NO: 309118 - DNA, 83 bp, Homo sapiens
cctggccccgatggctctgtgcaacggagactccaagttcaaatctgaacatcaatgatgtactagggaactactcattgact

SEQ ID NO: 309119 - DNA, 115 bp, Homo sapiens
ctacagcaagatgtggaagacacaaagcctgcgaaagtgctcgggaagagggagagcaaacttggctcagcccaagctgggcctccagaagagaggatgctgtctggtgctgggc

SEQ ID NO: 309120 - DNA, 80 bp, Homo sapiens
gcctggtgagacggagctatcggcgccgcggcaagagccagtaagactttgaccccgacgcaggcttcagtgattgccgc

SEQ ID NO: 309121 - DNA, 98 bp, Homo sapiens
ctcaatgacgacagtgaaggaatttgaaagggtctggagcccggcactgtggtcataacagagcaggcagtggatacctgcttcaaggcagagtttga

SEQ ID NO: 309122 - DNA, 75 bp, Homo sapiens
gaccagtgcatcccatgctgtggctccccttcaggaaataaagcaggaattgaatgatctggcacgggaccctcc

SEQ ID NO: 309123 - DNA, 48 bp, Homo sapiens
ggaccaccgcggggtccccggcaaggtaaaataccatgaagattttga

SEQ ID NO: 309124 - DNA, 75 bp, Homo sapiens
cgtgggggccgggagtttgcggattttgaatataggggacagtatggaaattaccagcagtgaaaaagtacttac

SEQ ID NO: 309125 - DNA, 76 bp, Homo sapiens
aaactgctgtgccagcaaccaaaagtactatactggcaattgctggagaagattttgcaattgttgcttctgatac

SEQ ID NO: 309126 - DNA, 75 bp, Homo sapiens
tgatgaaagcattggaccttgtttcagatcctgaatagtggaataacactcccatggatgaagcactgcactttg

SEQ ID NO: 309127 - DNA, 83 bp, Homo sapiens
ctcggaagagcgctcccaggagaaacaacctgaagtgattcagaacatgaccgaattcaagcgtggtctgccactgtttcccc

SEQ ID NO: 309128 - DNA, 90 bp, Homo sapiens
ctggcggcatttgattgtattgatgatactaagcttgtgaagcagataatcatatcaataagccaatggacacgtcagtgttatctgaag

SEQ ID NO: 309129 - DNA, 75 bp, Homo sapiens
cgcgccggctgctctttccggtaagactttgaccccgacgcaggcttcagtgattgccgcggatcagaagcctga

SEQ ID NO: 309130 - DNA, 100 bp, Homo sapiens
ctgacctctgacgagctgcaatttggttatgagcataaagatgcctatcaagtgatattggatggtgtgaaaggtggtactaaggaaaagcgattagcag

SEQ ID NO: 309131 - DNA, 82 bp, Homo sapiens
gtgtgcctgcaacctgtccggggatcccagggagaacatccagtcatggataaaaatgagctggttcagaaggccaaactgg

SEQ ID NO: 309132 - DNA, 100 bp, Homo sapiens
gagtgttgggaagaggagcgcgtccccggggaaatgagatagtcgtgcaagcactgcagtgttcccattattcgattctttggcagttggtgaaaattac

SEQ ID NO: 309133 - DNA, 82 bp, Homo sapiens
tggaaaacttccagaacctggcctcactaggccaattctcccccagtgattgtcaacacagataccctagaagccccaggat

SEQ ID NO: 309134 - DNA, 90 bp, Homo sapiens
gcggtggggactgcacgtagcccggcgctcggcatggctctcctggtgctcgtttctccacagacactacccaaagcagtccttcactac

SEQ ID NO: 309135 - DNA, 83 bp, Homo sapiens
gattgtctcggctcttgagtacttgcactcgcgggacgtggtataccgcgacatcaaggtacgagtggctgctttacagaatc

SEQ ID NO: 309136 - DNA, 90 bp, Homo sapiens
tcgcagtggtcgcttcttctccttggtggaattctactaagtatcagtcggccctacaagacaaagcccacccacggcattggaaagtac

SEQ ID NO: 309137 - DNA, 100 bp, Homo sapiens
aacaactaaaacagtatgaaataaacgccactcctaaaggctggtcctgccactgggacaggactctgtttggaaacaagatcaagtctgtggctaagag

SEQ ID NO: 309138 - DNA, 101 bp, Homo sapiens
cgcatcacatggggacttctgcaaatacagagactcggattaaaggtggaaaagatcggagagggcacgtacggagttgtgtacaaagccagaaacaagtt

SEQ ID NO: 309139 - DNA, 106 bp, Homo sapiens
cagagcagcacggtgcccaggacacagagctcagtgcaggcactggcaacttctatttgaaatcatgaccaccccaggaaaagagaactttcgcctgaaaagttac

SEQ ID NO: 309140 - DNA, 75 bp, Homo sapiens
gccgggcgcaatggagcggaagaggccccttcccagctgcctgcctgccctagccagctcccaggtgaagagact

SEQ ID NO: 309141 - DNA, 100 bp, Homo sapiens
gaggcgggtggatcatgaggtcaggagatcgagaccatcctggctaacaaggctttctgctgtgcgctccccacggaggcgggaggcgcctgcaccgtcc

SEQ ID NO: 309142 - DNA, 91 bp, Homo sapiens
ctccgccgctgcctcaggagcggaacaacgtcggcgagcgggggagatgcagttaaagacttgatgcttcgctttctgggtgaaaaagctg

SEQ ID NO: 309143 - DNA, 98 bp, Homo sapiens
ggcggcggcagcgggtcttgggtcctccgagagcagcagcgatatcagttttagagaatgtggcgtggagaaattctcaaggaaagagtaaaatgctg

SEQ ID NO: 309144 - DNA, 75 bp, Homo sapiens
cactcaagaggttatcactacatgctcgctaacctggagcgtgaggatcatccccggagaggacgggaggatcgg

SEQ ID NO: 309145 - DNA, 83 bp, Homo sapiens
ccttcggcagtccacccaccgccgccgcctcccaggcagtcatggatcaggtaatgcagtttgttgagccaagtcggcagttt

SEQ ID NO: 309146 - DNA, 51 bp, Homo sapiens
gccaaaatcactcagcagatgccaaaggtatgaaaatgaaagtcttcagaa

SEQ ID NO: 309147 - DNA, 75 bp, Homo sapiens
gccaggccagccgggacggacgccgatgcccggggctgcgacggctgcaggaaatagacagacggttggaaaaaa

SEQ ID NO: 309148 - DNA, 83 bp, Homo sapiens
accacgtcacgcacacgctcggcgctgcgatccgcgcatataacgacctgcctagagctggaacgttacctccagagcgagcc

SEQ ID NO: 309149 - DNA, 50 bp, Homo sapiens
aagccttagcagccttgatctgaagtgattcgcctttgccagtctcatct

SEQ ID NO: 309150 - DNA, 83 bp, Homo sapiens
tgacagacatccctgaatcttggtgtttggacataggagacctgcctagagctggaacgttacctccagagcgagccctgcta

SEQ ID NO: 309151 - DNA, 96 bp, Homo sapiens
atgaccatgttttctcctgccagtttggaaacttccttggtaactgccagaaggatcgggaagatctaagacggaagtgaaaatgtgacaggattg

SEQ ID NO: 309152 - DNA, 74 bp, Homo sapiens
gccagggtccctgaagagggaagacacgcggaaacaggtctctggacctctgactgacactgtgcctgcccagg

SEQ ID NO: 309153 - DNA, 127 bp, Homo sapiens
ggatctggtgtaccaggcgaagctggccgagcaggctgagcgatacgacggccatttcataattctgaatcatgtctgataacggagaactggaagataagcctccagcacctcctgtgcgaatgag

SEQ ID NO: 309154 - DNA, 100 bp, Homo sapiens
ccgccgattcctcctccttggtcgccgcgtccttggctggcgtctgtgagccgtgagctttgaggcggtgggatgtgtcagcagaatgtctcctgccccc

SEQ ID NO: 309155 - DNA, 93 bp, Homo sapiens
ttgagagtcacagaggaaggacagtggagtctggcatcttattgacctgcctagagctggaacgttacctccagagcgagccctgctatgttt

SEQ ID NO: 309156 - DNA, 50 bp, Homo sapiens
cttggacattcagacttcagaatgggcagctcagttctggcaccaaacca

SEQ ID NO: 309157 - DNA, 97 bp, Homo sapiens
ggccgaggcggtgctgcaagagaaggcactcaagtttatgaaaataatgttgagtttccatgaagaacaggaagtactgccagaaactttccttgct

SEQ ID NO: 309158 - DNA, 100 bp, Homo sapiens
cagatcatccatgtgagtgaccatgcagcaaaagaaggagggtcctctcagtgattaagtctatccttcactggagtctgatgatgatgaccctgctttg

SEQ ID NO: 309159 - DNA, 83 bp, Homo sapiens
acattgatggaaaacaaatcaaactgcaaatctgggatacggagctgtgactgatgagaattaaaggccatggatgaagatgg

SEQ ID NO: 309160 - DNA, 100 bp, Homo sapiens
ctagcttcactcaatgttagtaagaaaagttgccagacggccagcattgccactgccagtgcatccgcccaggccaggaatcatgtggacgcccaggtgc

SEQ ID NO: 309161 - DNA, 83 bp, Homo sapiens
tcattttacttacaggttaactgaagtccaaaagatgtctagaacactgatatttgcatttaatggggaacaaaagatgaaga

SEQ ID NO: 309162 - DNA, 75 bp, Homo sapiens
gattcgcagtggtcgcttcttctccttgatgcaccttggtgtggagtcaaaagtacacatgctggatcaaaatat

SEQ ID NO: 309163 - DNA, 83 bp, Homo sapiens
acctggaagcagtaacatgcaagaaataatgcaaaaggtgtcccaaggctcctgaccagtgaacaaagatttgagaaagacag

SEQ ID NO: 309164 - DNA, 100 bp, Homo sapiens
aatgcagggcttggcacgatacgtgttccagtcaggtgaattatgtaacctcattacgctggatgtagctcacaatcaacttgaacaccttccaaaggag

SEQ ID NO: 309165 - DNA, 50 bp, Homo sapiens
cgaagaaccattgggtctgccgctgtgcagcagatactgtgatgatggat

SEQ ID NO: 309166 - DNA, 118 bp, Homo sapiens
gctactgcagacgacgagctgagcttcaaaaggggggacatcctcaaggttaatggtgcaatgtaagaaacctttaaaagtttctgatgaattagtgcagcaatatcaaattaaaaac

SEQ ID NO: 309167 - DNA, 100 bp, Homo sapiens
cgccgctctgccacggtctgcccacccaacgcgaagacggtaacccgtgtgactttgactggatctccagcaccctgccggtggcactactgagagacga

SEQ ID NO: 309168 - DNA, 100 bp, Homo sapiens
caatgaggctgctggccctggattatggagcggacattgtttactgtgaggcctataatgaggaaatttctgtctgaccaatatcaggggcacatcagct

SEQ ID NO: 309169 - DNA, 82 bp, Homo sapiens
agctgctgacaaaaggcatggtgatccttcgggacaagattcgcttctatgagggtgacagagctgaatgaacctctctcca

SEQ ID NO: 309170 - DNA, 83 bp, Homo sapiens
acattagccagtgtgaagacctccgaaggaccataggtttggacatatttgactcttttccccccaggttgaattgaccaaag

SEQ ID NO: 309171 - DNA, 100 bp, Homo sapiens
ctgttccaccttcagagcgtcacggcgtacgccctcatggggaaaatctccccggtgactttcagactttgaaatactcgtgggatatgaagtggaggtg

SEQ ID NO: 309172 - DNA, 100 bp, Homo sapiens
aagtttgcctccttcatagacaagaactgtcaagtaatccacctctggctaccatccttattcctcctcatgctcggattcaagcagctgcttcaacccc

SEQ ID NO: 309173 - DNA, 87 bp, Homo sapiens
gctgtcatataactcctgagaatagtggttcttaactctaaatggagtctccctgtgttgttcaggctggtcttaaactcctaggct

SEQ ID NO: 309174 - DNA, 100 bp, Homo sapiens
ttggctgtgggtccattctgtagacgagtatctgatttaggaaagtcctatcggatgctgagatcattcagaacacggctcgatgaactgagaatgttct

SEQ ID NO: 309175 - DNA, 100 bp, Homo sapiens
ccggggctttcgacatgccccccagagtctctggccagccgcagagtgtgaccgcctcctcggacaaggcttttgaagactggctgaatgatgacctcgg

SEQ ID NO: 309176 - DNA, 83 bp, Homo sapiens
aagggacagcccagaaggcatcgtctgcactccccatacagggtgtcttttatgaataatcaaaagcagcaaaagccaacgct

SEQ ID NO: 309177 - DNA, 96 bp, Homo sapiens
agtactcttgccgctatcatacgccagctgagcagtctgacagaaaggacccaggagcgataacagtaaatcaaataagatatttgtcggtggaat

SEQ ID NO: 309178 - DNA, 50 bp, Homo sapiens
gattctgagatgattggagaccttcaaggctcattggtgggcagtattac

SEQ ID NO: 309179 - DNA, 100 bp, Homo sapiens
gttcaagtttactgcgaagtccacccagcgttccggagatgcttgtggttggtggcatcgaccgggtttatgaaattggacgccagttccggaatgaggg

SEQ ID NO: 309180 - DNA, 75 bp, Homo sapiens
gtcagctgtgtgtccagaacgtgccatggagacgcttaacgggatcacatgcagtggtctaaggaagaagaagca

SEQ ID NO: 309181 - DNA, 94 bp, Homo sapiens
ggctgtgcttaagagtaaaacttcagcgatgtttaccatttaaacataagttccagtctcatcagattttccatgtcctggtggtggcagcagc

SEQ ID NO: 309182 - DNA, 100 bp, Homo sapiens
tactggagcaagggaaagagtcctgcatggtttcaagggacgtaccaggaggatggtgcccagggatgcttgaagatggaaagaaatttgattcctcccg

SEQ ID NO: 309183 - DNA, 101 bp, Homo sapiens
cgccagaaggaagatggcggatctggaggagcagttgtctgatgaagagaaggtttgggtagaggcaatccaaaagggctggattgctgcttagattggag

SEQ ID NO: 309184 - DNA, 98 bp, Homo sapiens
cgcggcctgccgcaatggaaacatctatattctgagaaggtgcggtcttgctctgttgcctaggctggagtacagtggtatgagtatggctcaatgca

SEQ ID NO: 309185 - DNA, 75 bp, Homo sapiens
gccttcgggagccgcgcgccttctccggcgtccgggtcgagcgcaggacgagattgaggagctgcgggccgagat

SEQ ID NO: 309186 - DNA, 100 bp, Homo sapiens
acgtgtacgacctgtccaaaggcctggcccggcggctcagccccatcatgctgggctgattcaccccaagagtggccgttcctaccacgaggagttcaac

SEQ ID NO: 309187 - DNA, 100 bp, Homo sapiens
gctgccgtctcttaccagccagccccaccaagtgctggccagtgagcccatcccgttctctgatttgcagcagccccctccatcccatcggaagaggaag

SEQ ID NO: 309188 - DNA, 100 bp, Homo sapiens
cattcattagttttggaatccttgaagagactcgaggataatttcatgtagagcgcatgaagtacaggacaataaagcttcctacacatatcaccaggag

SEQ ID NO: 309189 - DNA, 100 bp, Homo sapiens
gcggtcgccttcggagcgaagggtaccgacccggcagaagctcggagctctcggggtatcgaggaggcaactttggctttggggattcacgtggtggcgg

SEQ ID NO: 309190 - DNA, 99 bp, Homo sapiens
aaaataatccagagatttccacagaaggactgggatgatacaccttttccacagggaattgagttggaggataagatcaatgccctcattaaagcagcc

SEQ ID NO: 309191 - DNA, 74 bp, Homo sapiens
gaacaccctgccgaccaaagagaaaagctgccttggaagacacactggcagaaacggaggcgcgctttggagcc

SEQ ID NO: 309192 - DNA, 73 bp, Homo sapiens
aatcctaccatgtcagccttcccagtagctggaactacagttgatttatgaagactctatggatctaatcgca

SEQ ID NO: 309193 - DNA, 74 bp, Homo sapiens
ccgagccctctctccatttcccacaattgtgctggtcctcagaatggttggaatgaccctccagctttgaacag

SEQ ID NO: 309194 - DNA, 78 bp, Homo sapiens
aaaatcaacgacaacttgagcacagaataatcatgggccagactgggaagaaatctgagaagggaccagtttgttggc

SEQ ID NO: 309195 - DNA, 50 bp, Homo sapiens
ccagatccatttacactttacaacaagttggatggcttgaggactggtac

SEQ ID NO: 309196 - DNA, 90 bp, Homo sapiens
tgatgagcatttttcgacaaagcttatgtatgaaggagctccagcaccacctccagccttcagtgactgtctggagcaggcatccggatg

SEQ ID NO: 309197 - DNA, 125 bp, Homo sapiens
accgggacttgaagctggaaaatatactgctcgatgacaactgcaatattaaggaagccatgcagtgtgtggaagagctgaatgcccagggcctactacatgtttttgtgagagtgggagtggag

SEQ ID NO: 309198 - DNA, 80 bp, Homo sapiens
ccaaggaaaaactggagagcttcatcaaaaatagtgatagctttgataaaacctgtggcatattccttggagtatctcca

SEQ ID NO: 309199 - DNA, 90 bp, Homo sapiens
acagcatcactaacaacttcccattcagcaccagcaggcagctggctccggttttggggtatctgggctccaggcagaagcacagcctcc

SEQ ID NO: 309200 - DNA, 73 bp, Homo sapiens
tctactccagagctccgacttatttctgtgggcagacattaacattcagggtgacgcagacttacgatgcagg

SEQ ID NO: 309201 - DNA, 83 bp, Homo sapiens
ccgttctttaatatgctggatgagctgctgaagcccaccgaattaggactgcctccgggcctgccaggagcagatcgaagccc

SEQ ID NO: 309202 - DNA, 100 bp, Homo sapiens
ccaagctttgggagaccgctggggaaatttcccacttcctctcctgagaccaggaactcagcagagaaactttgtgggaaacttcgtggcttgcatgaca

SEQ ID NO: 309203 - DNA, 75 bp, Homo sapiens
atcgtaacccccaaagagaaaaagaaatgatgcaattgtatatcagaagccctaatttgtttagaactgtaatat

SEQ ID NO: 309204 - DNA, 95 bp, Homo sapiens
gatgacataaaaatccacaccctgtcctacgatgtggaggaggaggaggagttccaggagctggagtcacccacaaaagctgtatataatgccag

SEQ ID NO: 309205 - DNA, 98 bp, Homo sapiens
tcatcaaggtgaacgggcggcccctggagatgattgagccgcgcacgctacagtacaagattactgacagccctgtcctaggagcacaacgtccgaga

SEQ ID NO: 309206 - DNA, 91 bp, Homo sapiens
ggagagcaaccccttggaggtgcatgaagagccactctcagggatcttgaaagcgccacaagcagcagctgctgagccatggctgaagggg

SEQ ID NO: 309207 - DNA, 100 bp, Homo sapiens
gataccttcatcgctgacctggttgtggggctgtgcactgggcagatctggctggataatgttcagtgtcggggcacggagagtaccctgtggagctgca

SEQ ID NO: 309208 - DNA, 100 bp, Homo sapiens
ggacgaagccggagtgtaggcggcagaggattcgctcccagagcagctgcggccagttggaggtccccctccccactaagtgcctctttgcatagcacca

SEQ ID NO: 309209 - DNA, 100 bp, Homo sapiens
cttatgtggcatatttcatcacaagttgctgaacttaaggatggtcttgttaatgtaggatggatggactgtgccacccaggataacctttgtaaaagct

SEQ ID NO: 309210 - DNA, 75 bp, Homo sapiens
ggacagggaggtgcgtctgcagctggcgcggaagaggaggagagacttcagcatgcaaaccttcatctgttcggc

SEQ ID NO: 309211 - DNA, 82 bp, Homo sapiens
cgaagtggccaagaaggagaagcagctgcggaaaatgctagaagacaaatttacatgtattggagaccagaccagaagccct

SEQ ID NO: 309212 - DNA, 90 bp, Homo sapiens
agccaggcggggacaggacggcggggcgagccagcaagacactaagggcgactaccagaaagcgctgctgtacctgtgtggtggagatga

SEQ ID NO: 309213 - DNA, 101 bp, Homo sapiens
aaaaagatactcgacaagactcggatcagtatcttgccacagaaaccatacaactcaagactgcagtgcagatgacgacaacttccttgtgcccatagcgg

SEQ ID NO: 309214 - DNA, 88 bp, Homo sapiens
tttcaacagatttcaattacaaacccccacagaacataccagaaggattatcattggcaatggcgttcattccttacgagtggcttta

SEQ ID NO: 309215 - DNA, 75 bp, Homo sapiens
tgggactcttggaactgggcttggtgcaggatttggaacaggtgctggaaacgtgcgtagcaacagtaggccgag

SEQ ID NO: 309216 - DNA, 76 bp, Homo sapiens
gacatgctaaacagagaatacaagaggattatcttagaattttaagatacttcagattcgtattttacatggagaa

SEQ ID NO: 309217 - DNA, 100 bp, Homo sapiens
gggcttctgcgacgagcgcctcgtgcccttcgatcacgccgagagcacgtacggcctctaccggtttgtagatgcggacaacctgatcctcaaccctgac

SEQ ID NO: 309218 - DNA, 75 bp, Homo sapiens
gctaagccagaccggtcctcgtttgtaccgtccctcttcagagaccgtccaggctggacttgaactccttcctcg

SEQ ID NO: 309219 - DNA, 82 bp, Homo sapiens
cgtgttcatgctgtccacgtatcagacagacttcatcctgctggttgaagccctggacctgtttgagaggcagatgctgaag

SEQ ID NO: 309220 - DNA, 100 bp, Homo sapiens
gactgtcttacgctgacaaagattattgaagcaagactaaagattctttcttgtggagaagttattcatgtgaagatccttggaattttggctcttattg

SEQ ID NO: 309221 - DNA, 100 bp, Homo sapiens
agggaaatatgtcatgtatcccatagctgtgagtggcgatcacgagaacaataaggtttgatctgtggatgaaatgaatcatgattttcaagctcttgca

SEQ ID NO: 309222 - DNA, 100 bp, Homo sapiens
ggtgacagcacgcccagcccggacctgctgatggcccgcagcttcggtgacaaggattatgaagaagctgtgctcttgctgttagaaggagctgcctggg

SEQ ID NO: 309223 - DNA, 75 bp, Homo sapiens
tggaggaagaatgatagcacagaaaatctctgtcagaactgatttctttggtgcgaatgccttacgcatgcaaac

SEQ ID NO: 309224 - DNA, 100 bp, Homo sapiens
cctgtctgagacaagaaaaggaaggaacaatgaatactgagaaacaactgcaatactttaagaacaagttgaaatcatcgcagaaggataaagttcgtca

SEQ ID NO: 309225 - DNA, 97 bp, Homo sapiens
tggaaattcttcaggcagaaaatgggcacatatggttatcacagaaaagctgttttaaagccagttttaaggaaccctcttcataaatcaaactcag

SEQ ID NO: 309226 - DNA, 100 bp, Homo sapiens
gccgggatctcaggtcctcgggggcggcggccacgccaaggacgggagtctaccatggctcaagaatctcccaaaaattcagcagcagaaattccagtga

SEQ ID NO: 309227 - DNA, 100 bp, Homo sapiens
tccgacacgccggggcgcccgcgcgcggggaccccacggggctccttcgagagcagtggatccgggccaagtacgagcgacaggagttcatctacccgga

SEQ ID NO: 309228 - DNA, 98 bp, Homo sapiens
gtgcgtttggcgggatcctggtgagatcatgatgcagccgtccttttggatttctttttaataatgtgtgacccttcacctttgatcccctgacctgc

SEQ ID NO: 309229 - DNA, 75 bp, Homo sapiens
ctgggttctgcccgcacggacccccatgttggtggttctgtcagatgaaagcaaagcgaggctggatcccagcgt

SEQ ID NO: 309230 - DNA, 78 bp, Homo sapiens
gagttccaccaggccgggaagcccatcgggctggagcagccctacttcagcgccaacgcccagttcttccaggcgctg

SEQ ID NO: 309231 - DNA, 90 bp, Homo sapiens
gcagcggcggccccagtgccgcccccgggcgcattactcttgtctctgctgctcctgggaaagtgatttgtgaaatgaaagtagaagaag

SEQ ID NO: 309232 - DNA, 83 bp, Homo sapiens
gtcctgaacctggaagttgtgctttttaaggcaaggattactgcaaagtaatatttccatatgaggcacagaatgatgatgaa

SEQ ID NO: 309233 - DNA, 108 bp, Homo sapiens
ccggttggaaacgccaagccagctgcgtcctaatccaaaagagattgagaatttatcacaagttgatggtcctcaagtggaagagcaacttctttcaaccacagttca

SEQ ID NO: 309234 - DNA, 100 bp, Homo sapiens
cggagagaagagatcagtgctcagcaacacagtcactcctggcggcaaaccaaacaaaaccagagtcatctggggaaaagtaactcgggcccatggaaac

SEQ ID NO: 309235 - DNA, 75 bp, Homo sapiens
catctcgctcggctgcgggaaatcgggctgaagcgactgagtccgcgatggagtggaaggaatgaaggccagctg

SEQ ID NO: 309236 - DNA, 90 bp, Homo sapiens
cgcttcgagggttacaagctctctcttgagccgctgccttgttaccagctggagcttgacgcaggttttgattcccaccatggccatcac

SEQ ID NO: 309237 - DNA, 86 bp, Homo sapiens
ggggcggcaccggatcaccaagacggaggtgagaagccctaccactgcaactgggacggctgcggctggaagtttgcgcgctcaga

SEQ ID NO: 309238 - DNA, 100 bp, Homo sapiens
gccgccggcgggtcgggccgggcaatgcctcgcgggcgcaatgaatccgcggcagttctaaatggagcccctggatttataaacttgtgcgatgctttga

SEQ ID NO: 309239 - DNA, 89 bp, Homo sapiens
gtattactgcaccctgaccattcgggagagcattctcatcagcaacggctcaagggaccaaagcggatgttggatgctcaagtgcaaac

SEQ ID NO: 309240 - DNA, 127 bp, Homo sapiens
cggcctgaaagtggtggcgctggccagactgacacccataccttttgggcttcagaatgcagtgttttcggtaaatatttccaactacagtctggtgatggagtctgacgcaggaaccttcttaccc

SEQ ID NO: 309241 - DNA, 75 bp, Homo sapiens
gccactgcagagcctgtccgtcagtccctaggtatccgcactgctcagggactatgtcttcagcagtggtgcagt

SEQ ID NO: 309242 - DNA, 98 bp, Homo sapiens
ccaggaccttgcccagcctttctggacaactggaagacagttacgcttcgtcctccacctctccctccaactccggggctacctgcctggcacggctg

SEQ ID NO: 309243 - DNA, 75 bp, Homo sapiens
gagaggctctcgcagaggatgtgttagactcagagataacttagaagatgatgatgtggaaatgaaaaatggtat

SEQ ID NO: 309244 - DNA, 50 bp, Homo sapiens
aggaagctgaagcagaggtttcccagaacttcagatggtggcaaagtggt

SEQ ID NO: 309245 - DNA, 100 bp, Homo sapiens
cagattattcagttcatggagggggacaagggaggcgtggaccctgatgcttggtgtgacctgagtaaatttgacctccctgaggaaccatctgcagagg

SEQ ID NO: 309246 - DNA, 50 bp, Homo sapiens
gtgaggcctccccagccacgtgaaactggaagcagagactttcaaggaac

SEQ ID NO: 309247 - DNA, 100 bp, Homo sapiens
cagaaatgttacacacggagtatcaaactctgctgccaaggcctcccagtagcattggatgcaggaaaaaatacattgacggtgaaaaacaagccgaacc

SEQ ID NO: 309248 - DNA, 98 bp, Homo sapiens
gtgagagcggtgtggaggccttcacccagatctcgagggagattgtttatatcctggaacctggagatcctcctttgttacagcaaccactacagaca

SEQ ID NO: 309249 - DNA, 100 bp, Homo sapiens
ggaggaatttgtggctggctggatctctggtgagacatttttcttccttctgtcacatcacacccaatgccatcatctgccctccaccatccatacctac

SEQ ID NO: 309250 - DNA, 83 bp, Homo sapiens
ggggccaccccgtgaccatgcgcaccatcacctatagcatcaacttcttctccaagacaatgcagatcttcgtgaagactctg

SEQ ID NO: 309251 - DNA, 100 bp, Homo sapiens
ggaaatgataaatggctctctcttgatttggagcagaatgttgttccagctgaggtgtcccttgtttgtgtggtaaagccagatgaattctgggataaga

SEQ ID NO: 309252 - DNA, 100 bp, Homo sapiens
tccaagacctcatcaacaattaaggttatcaagtgcaaggctgcagttgcttgggaggctggaaagcctctctccatagaggagatagaggtggcacccc

SEQ ID NO: 309253 - DNA, 112 bp, Homo sapiens
tgaatatgccagcagacaccgtgtttgataaggaaacactctttggccttatgtttgatcatcggccaaggtcctggcgagaactgcctctgcggctagctgattttggggt

SEQ ID NO: 309254 - DNA, 75 bp, Homo sapiens
atgatgcgctgctgccgtggcccttccggaacaagcgcaccctttgcatatctctacctacttgtgcataattca

SEQ ID NO: 309255 - DNA, 75 bp, Homo sapiens
gaatgcagtgcgcatggacgaggctcgggataacgcctgcaacgacatggttgatcatggccttgccaggttggt

SEQ ID NO: 309256 - DNA, 75 bp, Homo sapiens
caacttggttattgtaaaaaaaggagaaaagaaatgggtcgctccaattctagatcacattcttcaaggtcaaag

SEQ ID NO: 309257 - DNA, 50 bp, Homo sapiens
gttttgctaccgtgaccgtttaggagtccaggcatgataaagaaaagata

SEQ ID NO: 309258 - DNA, 95 bp, Homo sapiens
atagcccagagcattcagagcgatgtccagaacctgctggcggtactcaagatgagcgcggccctgcccgcggggcacccaactccgacaatgct

SEQ ID NO: 309259 - DNA, 100 bp, Homo sapiens
ggcagccctcatacctcaagggttctcttgtttatcgagggttttgggctggtggtctcggcagctctggaagagaaatggccccagttcatcacccttc

SEQ ID NO: 309260 - DNA, 90 bp, Homo sapiens
tcctgtacagcctgcagaaccaaaagcacatctcccaggatcctgagagagcttgaaccagaccactgtggacacggtggccacccgtca

SEQ ID NO: 309261 - DNA, 101 bp, Homo sapiens
tgcgttatggatacataacctgaggagccgggggaagctggccttggggtactaggttttgacaagcttgcatcatgcgtgagtataagctagtcgttctt

SEQ ID NO: 309262 - DNA, 95 bp, Homo sapiens
agctctgcgaggccatctgccccgcccagagctccaagagtcaggatcgcaagtcagaaagcaaagaaaagagagacatcttgtcgtttgataaa

SEQ ID NO: 309263 - DNA, 97 bp, Homo sapiens
gatttttacaacctattctgaagaaagtgaccaagaatatggcccaggtgaccaaagccctggacaaggccctgagcaccatggacctgcagaaggt

SEQ ID NO: 309264 - DNA, 93 bp, Homo sapiens
ggacaatcgcactttataccacctgcgattactgtcagcccaaggccaaccccactgtcactctgttcccgccctcctctgaggagctccaag

SEQ ID NO: 309265 - DNA, 75 bp, Homo sapiens
aggcagcggaggtggtggtggaggtggagatgcggcattccaaaagaactcactgtcctgattgggatagcagag

SEQ ID NO: 309266 - DNA, 99 bp, Homo sapiens
ctgtacttttggtggttggatcatttgaagtggtgtctacacttataaaagagcgagaacccgagcagcgccatgagcaacactaccgtcgtccccagc

SEQ ID NO: 309267 - DNA, 73 bp, Homo sapiens
ccggaccctggaagagaagagggtggctaatgattaagtggtctcacgtgtgaaacatggctacagattggct

SEQ ID NO: 309268 - DNA, 83 bp, Homo sapiens
cagatggccagtcacgagaacccagacttcccaagtaagaagcggaagaggagccgctggaaccaagacacaatggaacagaa

SEQ ID NO: 309269 - DNA, 74 bp, Homo sapiens
tgaacttaatacagcaagaaagaccatcaagtttaccactgagatctgtatctgtggacctgaatgttgatccc

SEQ ID NO: 309270 - DNA, 50 bp, Homo sapiens
aagcctgcattcattggtaaagatggcccactgcgtgaccttggttcagc

SEQ ID NO: 309271 - DNA, 82 bp, Homo sapiens
cacgactggaggcacaaggaggacgccggcgtcttctgctcagaagctggcagggcggagatgctggaccacgccgtcctgc

SEQ ID NO: 309272 - DNA, 100 bp, Homo sapiens
ggttctccttcgaggaacagagaaaatgaaaccagcagacagaatttgtcagagaaagcttcttgctatctacctccaccatgatgaaagtgtgttaacc

SEQ ID NO: 309273 - DNA, 101 bp, Homo sapiens
ctgccaaaattatcaacaccaaaaagctttctgctagggttctttaaggaaaaacagtagtgctctgcatagtttactgaaacgagtggtcagcacattta

SEQ ID NO: 309274 - DNA, 82 bp, Homo sapiens
gccagcggcaggaccagcgggcgggggcccacgactcctgcccctcctaaagctgaagccaaagcgaaggctttaaaggcca

SEQ ID NO: 309275 - DNA, 50 bp, Homo sapiens
tcctgcccttttaggagtgcaaaaaggggctgcgatttatccagttgaaa

SEQ ID NO: 309276 - DNA, 90 bp, Homo sapiens
acaccatagtctccctggatgcagcccgcagggacaaggagattgcaaaagttgagaagctcaaaccattagaggtagagctgcgacgcc

SEQ ID NO: 309277 - DNA, 51 bp, Homo sapiens
gccacctttccctttatttccggaggttgcttagccagacaatgaaggatc

SEQ ID NO: 309278 - DNA, 82 bp, Homo sapiens
ctaaagcagattggagctctgcagtaaccacagcggagctggagtttgttcagatcatcatcatcgtggtggtgatgatggt

SEQ ID NO: 309279 - DNA, 100 bp, Homo sapiens
gccggccgcgggcgcgaccggaggcagatcttgtagaaaatttcagctgtagcccttggactagaagctgaaataacagaagctgtgtacgatgcattag

SEQ ID NO: 309280 - DNA, 75 bp, Homo sapiens
tgctgccccatctgctcctgtgctttggggatggaaaccagtatgtgcgtgagtttgatggtatccatgtggtga

SEQ ID NO: 309281 - DNA, 98 bp, Homo sapiens
aactggtcgtcttcagttaatggcaagacttgcagagggtcagcaaaacggttactggaccagattgttgaaaaaggaagaccagctcctggcttcca

SEQ ID NO: 309282 - DNA, 100 bp, Homo sapiens
ttggtgcagcgctacctggctgacggcaggctgtaccatcgccactgcttccggaaagaccacagcaagattctttcattcgtctcctcctagcctgggg

SEQ ID NO: 309283 - DNA, 75 bp, Homo sapiens
gagaggagttccgcatggagaagttgaaccagctgtgggagaaggcccagcgaaaacaggtggcatctgcatcgc

SEQ ID NO: 309284 - DNA, 80 bp, Homo sapiens
ctgctgggcctgtgtgcctggaaaggaattgttttggcctaggatcatccaggtacaaactcttaatgagcaggattggg

SEQ ID NO: 309285 - DNA, 50 bp, Homo sapiens
ccaggtggggccaggctgactgaagcgaagctggtccgttacatttgtaa

SEQ ID NO: 309286 - DNA, 80 bp, Homo sapiens
ttgagaacacgacacaacgaactttatattttaccacttccttgaataggttataaacaacttgtgaaatgagtgatttg

SEQ ID NO: 309287 - DNA, 90 bp, Homo sapiens
gttttgcaggaaatgtgaatctcaggagagagcagccagagtggaaacttggatttaactggccagaagcaggtattcaaagcagagaac

SEQ ID NO: 309288 - DNA, 97 bp, Homo sapiens
gagatctccatccatcaaactgcgcaggagtaaggcaggaaaccgacgagaggacctcagctccaaggttctgcggcatgaggaatttgaagaaggc

SEQ ID NO: 309289 - DNA, 100 bp, Homo sapiens
gagagcgtgaccgagagcgcgaatatcgtcatcgttagaagtttgccaaggcacgagtaacaagctcacgcagttgggcacttttgaagatcattttctc

SEQ ID NO: 309290 - DNA, 80 bp, Homo sapiens
caaagcaagcgagaagtcgcgggcccagcccacagcaggcctcttctgaaacagtctccctggagcaaccatcagagcag

SEQ ID NO: 309291 - DNA, 100 bp, Homo sapiens
ggaggaggatccccaagtagggggagtcgggggagatgtccaggatcaggcagctagagacatgaagaggcttgaagaaaaggacaaggaaagaaaaaac

SEQ ID NO: 309292 - DNA, 83 bp, Homo sapiens
ggcaccggcctgaggtcaaggagaaattgaactaaactctcctttgaagactttgttgacctcctgtactggagagacattaa

SEQ ID NO: 309293 - DNA, 82 bp, Homo sapiens
cacagttccaggctacatgcaggacttggaggtggagcaggccctgactccagatttcgctgcctcatcacccacatctccc

SEQ ID NO: 309294 - DNA, 83 bp, Homo sapiens
cgggcacctccgagcgcaaggacagcgcgaggtccgcgcagcccagcgcagccatgattatatctgtccaagatgcgagtctg

SEQ ID NO: 309295 - DNA, 90 bp, Homo sapiens
gtgatacaatgatggggcagcaagtggccaagcttgagaaagagatccaagatcttgaaaaagctgaactgcaaatctcaacgaaggaag

SEQ ID NO: 309296 - DNA, 152 bp, Homo sapiens
tcaatatgtctcaagatggcggccaatgtgggatcgatgtttcaatattggaagcgctttgatttacagcagctgcaggttggcaaaagcagcttttgatgatgcaattgcagaactggatacgctgagtgaagaaagctataaggactcta

SEQ ID NO: 309297 - DNA, 75 bp, Homo sapiens
gcatgtttgctgactacctcgcccacgagagtcggagtggtgcctgtggagaggtaaagctggctttcgagagga

SEQ ID NO: 309298 - DNA, 75 bp, Homo sapiens
tcagcctcctgagtacctgggactacagcccttcaagaagaggtatgattgctaccacttttccccacaaagtga

SEQ ID NO: 309299 - DNA, 96 bp, Homo sapiens
cgacctaaagcctgactggggcaagggtgtccgcaatgttgccagtgtctgtctgcagattggctacccaactgttgcatcagtaccccattctat

SEQ ID NO: 309300 - DNA, 51 bp, Homo sapiens
ctcctgagtacctgggattacaggtgtgcgactctgacactgtgctggatc

SEQ ID NO: 309301 - DNA, 97 bp, Homo sapiens
tgctggtgttagcgctcagtcaagataatgaaggttctggaagcaaaaggcccaaggtggagtattcagaagaggagctgaagacccacatcagcaa

SEQ ID NO: 309302 - DNA, 142 bp, Homo sapiens
agtgagagcattttggaagaggaaccacaagaaaatcaaaagaaacttttgcccttatcagtaacacctgaggaattgggacactcacccaggacacactatggtgcttcagccaagtgaaaggcactatcgagattggaac

SEQ ID NO: 309303 - DNA, 100 bp, Homo sapiens
tatatctgaagctcaagaatccgtaacaaaaacaactaactactctacagccttatgcaaaaagagctcgtcaggagttcccctgggaagaagagtacag

SEQ ID NO: 309304 - DNA, 98 bp, Homo sapiens
caggcgttgaggaagaagccacccgagcggactcccgagttattttaccaagaaaatggtttgcacgactttgaacatatactatccatgctgatggg

SEQ ID NO: 309305 - DNA, 100 bp, Homo sapiens
aatggctctggtgaaactggcaaagcctgaattattggaacaactttggaaagccagagctgaaaaaaagaaactacgcaaaacgttgcgggaatttgaa

SEQ ID NO: 309306 - DNA, 75 bp, Homo sapiens
cagcacttcatccagcagtgcacagtacctggggtcctgggccacaggaaaagttaaaggaagagtcattgaaat

SEQ ID NO: 309307 - DNA, 82 bp, Homo sapiens
ctctagccagctaggttcctggtgctttggggtgatgaccagatcctggaatggtgtggggaggacgccatccactacctgt

SEQ ID NO: 309308 - DNA, 50 bp, Homo sapiens
cgggaccggccgaaaggcgaggaaccgatggttggcaatggctgataaat

SEQ ID NO: 309309 - DNA, 74 bp, Homo sapiens
cggactacatgtcggaggagaagctgcaggagaaaggttccaagttccccatcaagtggacagccccagaagct

SEQ ID NO: 309310 - DNA, 74 bp, Homo sapiens
tccaccaggacttgatgaatataatccattctcggattctagaacaatttgcatctgctggtgatgatggaatt

SEQ ID NO: 309311 - DNA, 90 bp, Homo sapiens
agaaaccagccgaacttcagggtttccaccgttcgttcaaggtggtctttgggaagaagcttcctgcctttgccaccatccccatccacc

SEQ ID NO: 309312 - DNA, 75 bp, Homo sapiens
ctggaacctgctgtatctactcaagagtggaagttttcacaggtgctcctgacctctgataaagctgcagccaat

SEQ ID NO: 309313 - DNA, 96 bp, Homo sapiens
ctagcagctcgggcaaggatggtggaggcgagaacactgaggagactccatcagcagctatgaagcccagatcaccgccctgaagcaggagcgaca

SEQ ID NO: 309314 - DNA, 100 bp, Homo sapiens
ttactgtcaagacatttcttcggcattctgcaacagggaggtatatcatacaaagagaatgcaacatgttatctgtgtaaaatggacttctgacagcaag

SEQ ID NO: 309315 - DNA, 100 bp, Homo sapiens
ccgcctcctcctctcccgcgggcaccgaggactccgctcctgcccagaagatgaatccggcctcggcgccccctccgctcccgccgcctgggcagcaagt

SEQ ID NO: 309316 - DNA, 74 bp, Homo sapiens
ccaacagtatccagtgcaacaccaggccatttatgccagtgttcttcctggagagttgatgagggggtacatga

SEQ ID NO: 309317 - DNA, 100 bp, Homo sapiens
catcgtgctgcaggtgctccggggcctccagtatctgcacaggaacttcattatccacagggttggatgggctgtctgagcgctgtgcccagtacaagaa

SEQ ID NO: 309318 - DNA, 101 bp, Homo sapiens
ctgtgcctcaacaaccatttctaagtggagcctcacagtctactcagagaaaaataaaagaaggcaaaatgagtcctccccatttccatgcaagccagaac

SEQ ID NO: 309319 - DNA, 100 bp, Homo sapiens
cgaggttcgggctggttgttccgttgcgagctgcagctgcgatctctgtggtaggcccagtactatactggcaattgctggagaagattttgcaattgtt

SEQ ID NO: 309320 - DNA, 80 bp, Homo sapiens
agtaacagtacttgggatcccccagttccaaagtgtcttaaagggagtgcatccgccccaacccttttccccctcgtctc

SEQ ID NO: 309321 - DNA, 100 bp, Homo sapiens
ttgacatcttgcaaagtgccatcagtaagcatttgtttaaggaagaaatctctaaacgttttaaatcacatactgaccaacttgtgttgatatttgctgg

SEQ ID NO: 309322 - DNA, 51 bp, Homo sapiens
cgcagctccacgagcacatcaaggtgtccggctttgctggcccagcaagcc

SEQ ID NO: 309323 - DNA, 111 bp, Homo sapiens
gtttgcgactcgcggaccggcgtccccggcgcgaagaggctggactcggattcgttgcctgagtaagactttgaccccgacgcaggcttcagtgattgccgcggatcagaa

SEQ ID NO: 309324 - DNA, 107 bp, Homo sapiens
cggaatgtggactcgagcggcaacaagagcgttttgatggagcggctgaagaaggtgtccctggccagtgtccttccacctgtccacaagcatggggaacatcttcg

SEQ ID NO: 309325 - DNA, 83 bp, Homo sapiens
ctgtgtgtgacaagaaggctccctatgaatctcttatcattgatgggttatggaaacaaaggacatgctttacatcgtcactg

SEQ ID NO: 309326 - DNA, 97 bp, Homo sapiens
tgacaccaagttggatgccatgctggaggagttcaagaaggaaatgaccatggttgacacagagatgccattctggcccaccaactttgggatcagc

SEQ ID NO: 309327 - DNA, 75 bp, Homo sapiens
gttgagtggagatgcttctgtggaagatgatgcttttatcaagatactggctccaatactacagaatgaatagaa

SEQ ID NO: 309328 - DNA, 90 bp, Homo sapiens
ttttattactggcagcatgtatatcttttttacagccaagttctacttctgaatctatggatcaactactaaacaaaaatagagagggag

SEQ ID NO: 309329 - DNA, 101 bp, Homo sapiens
aactccgttccttgaggttataactcatgagttacaagactttgctgtagatgatccacatgatgacaaggtaatgctggaggatggaagaagcaaagggt

SEQ ID NO: 309330 - DNA, 83 bp, Homo sapiens
cggatctgtgtgcccacagctcctggagccccacaggagtacgaccccagcaaagcgacctttgtgaaggtggtgccaacccc

SEQ ID NO: 309331 - DNA, 51 bp, Homo sapiens
tgctggcaagccatcactccaggctcccggggagctttctgtgaagtgaga

SEQ ID NO: 309332 - DNA, 101 bp, Homo sapiens
gtttatcgcatacttgtactgggttagattaccttacggaaaagtgtggaatcagcattaagacagttagaaagagaaaaggcgcttcttcagcacaaaaa

SEQ ID NO: 309333 - DNA, 51 bp, Homo sapiens
gcgtgaccctcgcctgatccagccctcccaggcccaatacttcaaagcatc

SEQ ID NO: 309334 - DNA, 98 bp, Homo sapiens
gccacctcaatgatggagatgaagtggtctgtgactggtgtgccccgggctactcaggagcttggtgtgagagtgagaaagatcagtctaaagaaaag

SEQ ID NO: 309335 - DNA, 100 bp, Homo sapiens
ctgtgacttagtggccctcctggaagatgacagtggcatggaggagaacgtatttaccgggcagtcaaagatctattcctacatgagcccgaacaaatgc

SEQ ID NO: 309336 - DNA, 100 bp, Homo sapiens
gcagcaaaactaacttcaactccatcgccaagatcttggcccagcagacaggccgtagggagtcagggctaaaggtcaaccagccagcctcttttgcagt

SEQ ID NO: 309337 - DNA, 89 bp, Homo sapiens
ttcagatcagtagaagcagatttcttttggatagtgatgggaaaaggtatgaacatgctaatgatgataagagcagtttgaaatcagat

SEQ ID NO: 309338 - DNA, 73 bp, Homo sapiens
tgagctactttttacagggcaaaataactgaagtgaagtgatggactccgatttggagagtagtaagacgtga

SEQ ID NO: 309339 - DNA, 100 bp, Homo sapiens
acacggtggcaagcaagtttaatcagacctgctcacacttcagaatagagaaggagaggcgggagatttttgagcagcacctgaagagcctgaagctgac

SEQ ID NO: 309340 - DNA, 51 bp, Homo sapiens
ggaaaacaacttcgagggcagagccaagaagcttgagagaagaaaaatttc

SEQ ID NO: 309341 - DNA, 90 bp, Homo sapiens
agatgaaggtagtcggcttagcaggtttcgaatgctctttacttcctttgtggagcatgacgaagatgatcctgcagaagctgaaaagga

SEQ ID NO: 309342 - DNA, 74 bp, Homo sapiens
acagctacatatttgttattggggagaaaatcttcagagtgtattgagagtgagaacacttggagagatttaat

SEQ ID NO: 309343 - DNA, 75 bp, Homo sapiens
tttgaaaatgctgcacatcccttaatagtcatctacatagttactccacaggatccgctgaacataggatgttgc

SEQ ID NO: 309344 - DNA, 96 bp, Homo sapiens
tttaaactgcacataccatatgctggagagacattaaagttaaacattgctatcttcagaaattaaggaatgagaggcaaggaagaaaggacattc

SEQ ID NO: 309345 - DNA, 82 bp, Homo sapiens
aactgcagcgagctgcaattgcccagaaaaaggttcctgatgaaaagttatgatcaggtgcactcaggaaagttggtgtgtg

SEQ ID NO: 309346 - DNA, 75 bp, Homo sapiens
cctgaggagccgggggaagctggccttgggaaccttaagcgggtggccgaagtgtggatggatgagtacgcagag

SEQ ID NO: 309347 - DNA, 85 bp, Homo sapiens
tctgtgtccaaaactccacgttttctgctacctggaaccgaggcttacctatttctactccatgtaccaccataaacaaagtttg

SEQ ID NO: 309348 - DNA, 75 bp, Homo sapiens
cttgtgggagcaaaaccaacgcctggctcggagcagcagcctctgagctcattgctatggacagtgctatcaccc

SEQ ID NO: 309349 - DNA, 83 bp, Homo sapiens
cgcgccggctgctctttccgggtcttgaggaccggcccagctcaggctcctggggcagcggcgaccagagcagctcctccttt

SEQ ID NO: 309350 - DNA, 75 bp, Homo sapiens
tcctcggcccctggctcctgctcctgggtcacagactgggatgagcaacgggctgaaggcacgtttcccgggaag

SEQ ID NO: 309351 - DNA, 101 bp, Homo sapiens
gcgggaaagacaccacacattgcgcagtcgggaccatcgccggagcctgaggacacttctctgtcgtcacagttagttaccggtattgtaagaacaagccg

SEQ ID NO: 309352 - DNA, 90 bp, Homo sapiens
aagcaagccatcgagatggtggagactgggatactgagctctacagctttctccataccccatcaatcctctcatttggaagactatccc

SEQ ID NO: 309353 - DNA, 74 bp, Homo sapiens
aaggaatatatcctgactgattgaacgtcaaggtcgtgggaaataaaaggcagttctacacagactgcagcaac

SEQ ID NO: 309354 - DNA, 90 bp, Homo sapiens
ttggacttgtccaagtacatcgacaagacgatccgggtaaagttccagggaggccgcgaagtactgctgcgcacggccactgccaacggc

SEQ ID NO: 309355 - DNA, 87 bp, Homo sapiens
aggccgaggagaagctggaggagcggctgaagcgcgtgcgcatgatagcagaccccacgttagctgaaatgggaaaaaacttgaagg

SEQ ID NO: 309356 - DNA, 75 bp, Homo sapiens
gggccgcgtctgtggacgttgtgaggccccgcagggtggagcccgtctgctcagggttgcaggcccagattctcc

SEQ ID NO: 309357 - DNA, 100 bp, Homo sapiens
aagcgacccggcctcctagggggtcgtcgtggtccagacagtttagcagaacagcctccgcggctccggggagaagagtgctgatggcagagattggtga

SEQ ID NO: 309358 - DNA, 100 bp, Homo sapiens
gccttctgcccctgatcgcttggttttccttgcagtcgcctgctgctgtcgtcgggagggacttagtcatgcattgagaaagcaagcatggaaatttctt

SEQ ID NO: 309359 - DNA, 100 bp, Homo sapiens
gccaagatctatgccgacacctttgaaatggctgagcaggagcgctttctactgcatcaggagaccctacctgaacagctgctggcggagaaacagctaa

SEQ ID NO: 309360 - DNA, 100 bp, Homo sapiens
agtacatcaacctcctgctgtccatgtatttcttcgtgctgggaatcctggccctgtcccacaccatcagaccattcctcaagaattttgtatccaaggc

SEQ ID NO: 309361 - DNA, 119 bp, Homo sapiens
gtctggagaccatggagaccctcacggagctgggcgacgagctgaccctgggagacatcgacggtcaaaatgcagatcttcgtgaaaacccttaccggcaagaccatcacccttgaggt

SEQ ID NO: 309362 - DNA, 82 bp, Homo sapiens
ccagccccacagaccagcccagcattcaggttgggacagcgtcttcgctgctgctggatagtcgtgttttcggggatcgagg

SEQ ID NO: 309363 - DNA, 100 bp, Homo sapiens
aaccggatatttaagtacaatggtgggcttaattttaggtgaatctggattgggaaagtcgacattaatcaactcattattcctcacagatttgtattct

SEQ ID NO: 309364 - DNA, 75 bp, Homo sapiens
tggcagtgcccgaggagcacgtgtggggcctgctgcggcctgtgtatgatccggattacggtgggatcatggcag

SEQ ID NO: 309365 - DNA, 82 bp, Homo sapiens
cgacaaaagaaccattgaaaaatttgagaaggaggctgctgaggctattataatggttttagagtcaactggagaaagtaca

SEQ ID NO: 309366 - DNA, 74 bp, Homo sapiens
cgctgtggtgtgactggggcaggaccatcagaaagtctggagtaagtgaccactgggctttggatgatcatcat

SEQ ID NO: 309367 - DNA, 74 bp, Homo sapiens
cagctgccacctttacaagaaaactggtatggaagatattctacaggcacagaccccacaggctcctcggacac

SEQ ID NO: 309368 - DNA, 75 bp, Homo sapiens
gaaaatccccgttgtttttcgattgcaagagggaatcccaggatttcctggaaaccgaggattaatgggccaaaa

SEQ ID NO: 309369 - DNA, 73 bp, Homo sapiens
tttatcctggtcatcttctatttccaaaaccctctttcccagctgcccgctcctcagcacccgaagattcgcc

SEQ ID NO: 309370 - DNA, 90 bp, Homo sapiens
ggcgttcttccgctggctcagccgcaagtacccgtccatcatagtcaactgcgtggaagagaagacctggacaaacaccagactcagacg

SEQ ID NO: 309371 - DNA, 75 bp, Homo sapiens
gctccagtatgaccattgtaagctgactgcagatgatgaggccttcttgtcagcaaatgcaggtgctatactcag

SEQ ID NO: 309372 - DNA, 100 bp, Homo sapiens
cccgttctccctccagaacatacacttacatctctagataacagtctgcactttcacccgtttcagcgctagtcctgctgatgggcaaagaaggtgtcca

SEQ ID NO: 309373 - DNA, 100 bp, Homo sapiens
ggacgcgacgcgccccgcctcccccgtccggtccctctctccacggtaaggggtggcaccaacagaaggtttctgcaaggctgagagctccttttaccca

SEQ ID NO: 309374 - DNA, 75 bp, Homo sapiens
atctccggtagcactcgggccggcggacagtgagggcgcgaatatgcttttaaggctattaaccagggtggcctt

SEQ ID NO: 309375 - DNA, 103 bp, Homo sapiens
tatggctgctgttgtccaacagaacgacctagtatttgaatttgctagtaacgtcatggaggatgaacgacagcctccttcaacatataatccacataaacct

SEQ ID NO: 309376 - DNA, 85 bp, Homo sapiens
cccgcttcgaggccgctttggcgccaaatcctgaggtgagaagccctaccactgcaactgggacggctgcggctggaagtttgcg

SEQ ID NO: 309377 - DNA, 82 bp, Homo sapiens
gtgcgggactccatgtttcagaaccctctcatcgtcaagaagaagaaaggagggcgcgggctaatgaccgagaatacaatga

SEQ ID NO: 309378 - DNA, 75 bp, Homo sapiens
ggcctttccagcccgtggtccttctccatattcgagataacgaaggaggcccaacttcattcaataaggagcctg

SEQ ID NO: 309379 - DNA, 95 bp, Homo sapiens
cttccgacggggcggccgggggctcagagatccaagtgcgcgccctggcgggtccggaccaagaccaagctgtacaccctgcctgcaagccacgc

SEQ ID NO: 309380 - DNA, 100 bp, Homo sapiens
ggccagttcctgccgtctgctcttctgcctcttgatctccgccaccgtcttcaggccaggagctgttcacccgctcactggctgagagcgagctccgtag

SEQ ID NO: 309381 - DNA, 100 bp, Homo sapiens
cagaccctgactgcccacaggatctttggacactttgccaccatcaccttgaccttcatcgacaagaacggagagactgagctgtgcatggaaggtcgag

SEQ ID NO: 309382 - DNA, 83 bp, Homo sapiens
caagaaggcaacgacgttccatctgtggaaggacctaccaaccagcttgccaacacttggtgtcacatgtgagcctcccacat

SEQ ID NO: 309383 - DNA, 100 bp, Homo sapiens
atcaagtgcccttggacaaagcctgaaaccagatcagcttgaacgggtctttttacgacttggccatgctgaaacagatgaacaattacagaatattata

SEQ ID NO: 309384 - DNA, 98 bp, Homo sapiens
aaagacgacatccggtgcgccgaggctgctcacaaaaaattcctagaggacctgtgcaacaacctcttgaggatcgaatcttcactcccgctgtctca

SEQ ID NO: 309385 - DNA, 83 bp, Homo sapiens
cgatcagggcatacatctttcttcgacaaaggggcactttccctcatggtattgatattttgaccacagctgactattttgcc

SEQ ID NO: 309386 - DNA, 50 bp, Homo sapiens
ctcaattctctgagtaggaacaatgaaagggtacaccacccggactacaa

SEQ ID NO: 309387 - DNA, 75 bp, Homo sapiens
ctatggggaaatccctgttcaaggagctcgaggccatgagcagatataccagcccagtgaacccagctgtcttcc

SEQ ID NO: 309388 - DNA, 75 bp, Homo sapiens
ctgccggggccgccctactctggggcttcctgctccagctgggaacccaccaagaccaacctggtcacattcttc

SEQ ID NO: 309389 - DNA, 50 bp, Homo sapiens
gcaagcctatggactcaaaggctatcctgaatatcctccgaatcctaaat

SEQ ID NO: 309390 - DNA, 75 bp, Homo sapiens
ccctgctccaggaatgggacctcgagtcactgtgggcatggtgctgatgtgaaatgtgtagactggcatccaacc

SEQ ID NO: 309391 - DNA, 98 bp, Homo sapiens
ctaagttcaacatacctcacagtgttacacttgattcagctggtcgggcatctaataggattcaggaatcaaagaatcagtgtactcaggtggtacag

SEQ ID NO: 309392 - DNA, 82 bp, Homo sapiens
gaagatggcggcagccgaggccgcgaactgcatcatggaggtgcatggctgcctcctaatcccatagtccagaggaggcatc

SEQ ID NO: 309393 - DNA, 96 bp, Homo sapiens
cgccatcgttgctgccttcttcgtcaaggatgcccaggctgaggaagagatcaagcaagagatgaacacactgcagcagaagctgaatgagcagca

SEQ ID NO: 309394 - DNA, 82 bp, Homo sapiens
gtgtggccaacgagctcaacgccaggcgccgctcctttacaggatgcagcagtctcggccctggctgctctatgcagtgaat

SEQ ID NO: 309395 - DNA, 99 bp, Homo sapiens
acggcactgttagaatctgggactttcttcgttgccatgaggaaagaattctccgaggtggatctccttacgtagcagccaaaataaatgaagcaaaag

SEQ ID NO: 309396 - DNA, 83 bp, Homo sapiens
tgtagacatttctttgtggtttatctaaaaaccaaagggagtcgtcgcatggtggatgtcatggacgtgaacacacagaaagg

SEQ ID NO: 309397 - DNA, 100 bp, Homo sapiens
gaggtggaggaggaggaggaagaggttactggagttggctataatcaatttggggaagtgattgttgatggtgatgttgttcatggattctataacccag

SEQ ID NO: 309398 - DNA, 100 bp, Homo sapiens
agtttctctggaatgcactttatcgctaccgaggcgtggaagacattttggtgaagccaaaggcagatgtcaagaggcaacgtatcattgaagaatccac

SEQ ID NO: 309399 - DNA, 90 bp, Homo sapiens
gcaacagcagcaactgccgcacccttgaaaggaggcccctgccgtgtggacccgtaaaataaaatgggctctgtgtgctccgggatggag

SEQ ID NO: 309400 - DNA, 104 bp, Homo sapiens
ccattgctggggtcctcggcgatgcccgtgtgcgcagccccgcgagtctcagacaatgcagatcttcgtgaagactctgactggtaagaccatcaccctcgagg

SEQ ID NO: 309401 - DNA, 90 bp, Homo sapiens
ggcggaagcggaggagtctccaggagacccggggacagcatcgcccaggcccctggtgcaacccagtttatgcctgaccccaagctcatg

SEQ ID NO: 309402 - DNA, 103 bp, Homo sapiens
ctgcgcgcgcgcctgaagtcggcgtgggcgtttgaggaagctgggcccagctgagagccagcctggaggttacccagcagcaggccacccaggccgaaggcca

SEQ ID NO: 309403 - DNA, 100 bp, Homo sapiens
gatgaacccaacctagtgggtgtaatacatcatgaactgcagggcagaatccagagaccacatttgaagtatatgttgaagtggcctatcccaggacagg

SEQ ID NO: 309404 - DNA, 98 bp, Homo sapiens
ttggttgttttttcctgtatgaagcggttggcaccactgaagtgaccgaatgagaggttacgcacagaaaatagacttttaaaacagcgcatcgagac

SEQ ID NO: 309405 - DNA, 100 bp, Homo sapiens
gtttccagcctcaggaatttatggtcgcctttttgaatgaggtgtcatggagaaactccagctgggcccagagattctgcagcgggaaaatccaaggctt

SEQ ID NO: 309406 - DNA, 89 bp, Homo sapiens
ggagtcctattaccagctcatgaagacagccctcaaggaagatggtgtcctctgctgccaggattgcgcagtctctttgtggagaggac

SEQ ID NO: 309407 - DNA, 98 bp, Homo sapiens
aagttgagaaaatgggagcagttttcatggatgcccctgtttctggtgcttgcctgggaccagtggcagggaccccggaacctgaaggtgctgacaaa

SEQ ID NO: 309408 - DNA, 75 bp, Homo sapiens
aggacaagtatccattaattattgtgtcagaagaggcagaaaccactaatactagcctcttgcaggtgcaactgg

SEQ ID NO: 309409 - DNA, 89 bp, Homo sapiens
ctataccatctcttgttgatgtggatatcaaagtattgcagagtgccttagcagccatccgacatgcccgctggttcgaggaaaatgct

SEQ ID NO: 309410 - DNA, 100 bp, Homo sapiens
attaccaaacagaatggacaagcttaataaaataaccgtccccgccagtcagaagttgaggaacgaatgcaggaatttgggaactgagctgtgcaagtgc

SEQ ID NO: 309411 - DNA, 82 bp, Homo sapiens
ggcagacggtggaactgggcgagctgcggctgcgggtgcggcgggtcctggccgaaggctttgacacatcttcctcatcttc

SEQ ID NO: 309412 - DNA, 74 bp, Homo sapiens
gcgaactggaacccactcggggactctgccttttaccgaagctggcagggcggagatgctggaccacgccgtcc

SEQ ID NO: 309413 - DNA, 101 bp, Homo sapiens
agtcgctttcatggtcttgctgattccactcaacggagctgtggccgtgaagatgcgcgccttccagagccgaaaggaagcagtggtggctatggctctgg

SEQ ID NO: 309414 - DNA, 50 bp, Homo sapiens
tcccggatctggtaacatggcaaaagattcatccgtccttggctcaggat

SEQ ID NO: 309415 - DNA, 74 bp, Homo sapiens
tatattatgccagttttttggaagtcttagttcgagatgtgtgtatttcatatcgagacatgtaagcagcatca

SEQ ID NO: 309416 - DNA, 50 bp, Homo sapiens
ggcccggagcccccagcgcagcggccgcgattgccatcacgaaagccaaa

SEQ ID NO: 309417 - DNA, 50 bp, Homo sapiens
ttcggtaaagtttctgttctctggtacgtcagcctgtcatatgcatcaac

SEQ ID NO: 309418 - DNA, 50 bp, Homo sapiens
gcgtacccccgtagcggaaaaactgctctggaactgaacccgcagtatct

SEQ ID NO: 309419 - DNA, 100 bp, Homo sapiens
agctcaagatggaaccacgatgtacattcataacaaagttcacaaccggacaaggaccctcacatgtgcagggatctctgtggtaagaagtgctacttta

SEQ ID NO: 309420 - DNA, 100 bp, Homo sapiens
gagctcagacctgccaatttaccagagataattgataacaccctgtaacagctgatctctgctggatgaaccgaatcctaacagtccagccaatagccag

SEQ ID NO: 309421 - DNA, 100 bp, Homo sapiens
tcaggcacttcttggatatcatcgaccctcgcacactctttgtcactgaggacttcattgacttaactagagagaccagaccaaggacaaaagatcgcag

SEQ ID NO: 309422 - DNA, 99 bp, Homo sapiens
gccatcttcgaacttagacttccggaaggactttggcgaggagtgggttcagatggctccaactctattttctaaatttattccaaacattctccctcc

SEQ ID NO: 309423 - DNA, 100 bp, Homo sapiens
actgctcccggacctgtgggggaggagcatcatattctctgcggagatgtttgactggaagaatatcagctgcatccagtgtccccagacgagaatacaa

SEQ ID NO: 309424 - DNA, 75 bp, Homo sapiens
caggagaaattcgccctcaaagttcttgggtgtctctggggagtccctgggccagaccttcctccagactccagc

SEQ ID NO: 309425 - DNA, 83 bp, Homo sapiens
caatgatgttggaacttgctcgtgccttagacaagaaactcctttccttaaagcgctggccgcgcgccgaacccgagtccggc

SEQ ID NO: 309426 - DNA, 74 bp, Homo sapiens
agcaggagtgctcattgtgaagaaatatgtctgtgggggaagcccaagatcatctggctgaagaacaagatgga

SEQ ID NO: 309427 - DNA, 100 bp, Homo sapiens
cagccagcaccgcacgccctgcaagggagactccgcgtgcagcagcgccccaggctccggacccagctcacccaacaacagctccgggagcgtcagcgcg

SEQ ID NO: 309428 - DNA, 98 bp, Homo sapiens
gaggaaactgccgccgctctgccacggtctgcccacccaacgcgaagacggtaacccgtgtgactttgactgggctggagcattggatttgctaaagg

SEQ ID NO: 309429 - DNA, 90 bp, Homo sapiens
cgccgctttcctccaacttgctgcgggtggatctccgctggacacaccgcctccgagggccgttgctccagggagaactgcaaatatctt

SEQ ID NO: 309430 - DNA, 100 bp, Homo sapiens
cacatctgtggtccagggcagggccactccaggatcaccccttctgtgtcattctctgaggaaaacaagttcttctcaaggaggaaagtctgaacttgtc

SEQ ID NO: 309431 - DNA, 88 bp, Homo sapiens
aaacatccatatcataagtggaattttggagatattcaaagtgtgaaggaagaagtgttctggaggaactacttttaccgcgtctccc

SEQ ID NO: 309432 - DNA, 100 bp, Homo sapiens
tcacttctttacttggtgcaggaaggcagtctttgctacgtacagcaaaaggccaatggaagcactgttgtgaagaacttatgaaaattgagattatgtc

SEQ ID NO: 309433 - DNA, 100 bp, Homo sapiens
ggaaaccgatctgcccgttgtgtttgtgaaacagagaaagataggcggccatggtccaaccttgaagatctgtgatattgccattaactgggctggtggt

SEQ ID NO: 309434 - DNA, 100 bp, Homo sapiens
tgaagatcatctgcctgggagacagcgcagtgggcaaatccaagtgcccgaaatcaggtggtgataagagcagagccccaactctgtgccttgtgtgcgg

SEQ ID NO: 309435 - DNA, 50 bp, Homo sapiens
gaagtctcagctcactttgaaagttccccctgcagtggtttggagtccct

SEQ ID NO: 309436 - DNA, 82 bp, Homo sapiens
aaacaatcggctgagaatgagaagaggtgtacaagggagaagaagccacattccaaatctcaggcctccagaccaacacaga

SEQ ID NO: 309437 - DNA, 98 bp, Homo sapiens
ttgtgccctagcaccccgagaaccgtcagtttgagccagatggaaaagctgaatctcagttgtatccatagtcctgttgttaatgaacttatgagagg

SEQ ID NO: 309438 - DNA, 82 bp, Homo sapiens
atggtttctgcagatccactccttcacagctataccaaacttaaagacccaacatgagtgaagtttcctgcaagaaacggga

SEQ ID NO: 309439 - DNA, 100 bp, Homo sapiens
agagttccattttggaacgcccgtgccgcgtctccgcgttcccagcccgggtccccgcgttcacagccccagcgcagtcagattctgaggaagatgaacc

SEQ ID NO: 309440 - DNA, 75 bp, Homo sapiens
gagaacctggcacttatatcctccctggcgggacctggacttcaccatcgacctggacttcaagggccagctgtg

SEQ ID NO: 309441 - DNA, 100 bp, Homo sapiens
gaagaggcgccgtcttcccgggtcccgagcactctgtgccggaggtgtcatggagaaactccagctgggcccagagattctgcagcgggaaaatccaagg

SEQ ID NO: 309442 - DNA, 82 bp, Homo sapiens
cccgggtgccgaggagcgggaagagttgctgggggtcctgcagttctgagcttgggttccctttgcctggacaccaaccaag

SEQ ID NO: 309443 - DNA, 82 bp, Homo sapiens
catcatcctgctcctgggtgccgtggcatgtcgatttgtccttcactacagaaatatggctacacacacctttctgcaggag

SEQ ID NO: 309444 - DNA, 104 bp, Homo sapiens
tccaggctccggacacgatgcaggccatcaagtgtgtggtggtgggagatggggtgtcgtagtcattcttcagcacaattcttaattggagaccaagaaccctg

SEQ ID NO: 309445 - DNA, 51 bp, Homo sapiens
cgccgcattttttaaccctagatctcgggcaaacactgtatccttgatgtg

SEQ ID NO: 309446 - DNA, 75 bp, Homo sapiens
ctgcatcatggtcttccttctcttcattgccttcaactttggacctgtcagtgactgtgaagtgctgaccacact

SEQ ID NO: 309447 - DNA, 59 bp, Homo sapiens
gaacatcattctcaccaccagtctcttctctggttacttcttgctgcagattctgcgca

SEQ ID NO: 309448 - DNA, 100 bp, Homo sapiens
cagcagcagtgaggtccttgtggactgcctccgggcctgccaggagcagatcgaagccctgctggagtcaagcctgcgccaggcccagcagaacatggac

SEQ ID NO: 309449 - DNA, 51 bp, Homo sapiens
ggagctgcagtgctgtactctaaggctggagtgcactggtgccatctcagc

SEQ ID NO: 309450 - DNA, 75 bp, Homo sapiens
cctgaacccagctccctgcccattccacaccaggaacttctcagagagcgggacttgattattcttagaaatgca

SEQ ID NO: 309451 - DNA, 90 bp, Homo sapiens
tggggatgctggaagggagatgccctgcccgttgccctgtgatgaagaaaatattaatgaatgtcagctacaaggtgtatgccctaatgg

SEQ ID NO: 309452 - DNA, 100 bp, Homo sapiens
gaatgagagaagtcatatgcccggcacatttccagagtgtggattctttggcatgtatgacaaaattcttctctttcgccatgacatgaactcagaaaac

SEQ ID NO: 309453 - DNA, 90 bp, Homo sapiens
caccaacagataagaagcagaaagttgagcgcattgcatcacatgattttgaccccacagaatcactacggtgggctggatggaggccac

SEQ ID NO: 309454 - DNA, 88 bp, Homo sapiens
gaggtgtcggcgcgggagcagcacttccacagccaagtgcgggagtccacggcttccgaagatcttctcaaggaacactacgttgacc

SEQ ID NO: 309455 - DNA, 83 bp, Homo sapiens
cacgcttcctctccagagtgatcaagtgtgacccgatacgtaggtaacctttccagagatgtgacagaagtccttatacttca

SEQ ID NO: 309456 - DNA, 100 bp, Homo sapiens
gttcaaacagcagtgttagcaagacctgggggagaggttcaagccaaatgttaccagcttctcctctcagtcttccagcattccaatcgtgccctttcaa

SEQ ID NO: 309457 - DNA, 75 bp, Homo sapiens
ctggaaggacctaaaggcaaccctgggccccaaggtcctcctgggagaccagagaagtagctgattttcagcttt

SEQ ID NO: 309458 - DNA, 50 bp, Homo sapiens
tgagatggtagctaaacatttaggttccccttctactttgaactgaagat

SEQ ID NO: 309459 - DNA, 98 bp, Homo sapiens
tcaaacgtccagtcctcgtgcgaccgcgctgggtcggaagtgagcaggcgtgcaatggaattgagttttgccctggtaaatgggaataatatccgagg

SEQ ID NO: 309460 - DNA, 100 bp, Homo sapiens
cggccacctctgagaagggagacgacgctgctgggtccgctgagcggggcgacccgagtggactgcccctgatggtgattattcataaatcctggtgtgg

SEQ ID NO: 309461 - DNA, 100 bp, Homo sapiens
cacacccaatggacagcatgcctcaccaagtcacatgacaagcaatagaagagtgatggatgtcatttctcgttcacagctttacttggatgatcttttt

SEQ ID NO: 309462 - DNA, 75 bp, Homo sapiens
cctatgtgaaactgctttctaaaacaccagaactcaacctgggaggaagttttattttgtcttcatcaggaagcc

SEQ ID NO: 309463 - DNA, 110 bp, Homo sapiens
cctgaggaaaaaactaaaatagaaaaatctccagctcctcaaaagattacgctcgatttgaggccaaaatccatgacctacgagagcagatgatgaaccacagcatgagc

SEQ ID NO: 309464 - DNA, 100 bp, Homo sapiens
gggacagtacgacttcgtggactaccatttggttgcagcaaagaggaaatagttcagttctttcaaggaggaatgcaggctcaggttggaatgccaggaa

SEQ ID NO: 309465 - DNA, 98 bp, Homo sapiens
ttatggcggcgctggagagggggcgctgagctgttgggaattaaacaaccaccatgtcgagcaaaaaggcaaagaccaagaccaccaagaagcgccct

SEQ ID NO: 309466 - DNA, 100 bp, Homo sapiens
cccgtggaactccagcctgcgccaccacgtcacgcacacgctcggcgctgcgatccgcgcatataacgaacaccttccaccatgaccacctcagcaagtt

SEQ ID NO: 309467 - DNA, 110 bp, Homo sapiens
ggaacagctgcggtgctctgccatattgtgtcttccccggccggtccctcgcctcccggccgagctgacggtgctggagaatctggtaaaagcaccattgtgaagcagat

SEQ ID NO: 309468 - DNA, 100 bp, Homo sapiens
cgcttcgtcctctgcagtcaagacgctgggcgcgtcgaggactggtgagaaagatcagtctaaagaaaaggagaagaaagtgaaaaaaacaattccttcc

SEQ ID NO: 309469 - DNA, 74 bp, Homo sapiens
ggatttgttaaggattccaagtaactcttatttgacaatacacattccaactatggagaatggtcctaagctgg

SEQ ID NO: 309470 - DNA, 83 bp, Homo sapiens
gggaggacggagagaaggcggcgcgggaggtgaagttgctgctgttgggtaaaaaagagtgtcaagtggacatgcaaagcttg

SEQ ID NO: 309471 - DNA, 100 bp, Homo sapiens
aatagtaaccctgccaaatacatcagcttgtaggagacagagcgggctacattgagagacctcagctgattcgagcaaaagtgccaattgtgaagttcag

SEQ ID NO: 309472 - DNA, 83 bp, Homo sapiens
ttcaccgcgggcgccaatggggagcagaaggactcggacacagcaattctgtggtgttcttggtcacacatttatggagtttc

SEQ ID NO: 309473 - DNA, 82 bp, Homo sapiens
ctgctgctgctgctggtggcccctttgcagacaatgcagatcttcgtgaagactctgactggtaagaccatcaccctcgagg

SEQ ID NO: 309474 - DNA, 100 bp, Homo sapiens
caagttctttgccccgaaaatggtatcagagaaaaagatctatgatgtggaacaaacacgttataaggtggaagatggatgcctgaagtgtagactgctg

SEQ ID NO: 309475 - DNA, 71 bp, Homo sapiens
cgcgtgaggctgcggctctgacggtcctgacctgagggctgcatcaagatcttgtcattccacatcgtggt

SEQ ID NO: 309476 - DNA, 100 bp, Homo sapiens
cgggatttcgatctggacctggcctggcggttaatggagaatcatcctcatttgcaccaactgataatgcgtctgtcacgggtactccagtagtgtctga

SEQ ID NO: 309477 - DNA, 71 bp, Homo sapiens
cgagtcgcgcggaggcggaggcttggggacctgaaggagaagaaggagaaggtggaggagaaggcaagccg

SEQ ID NO: 309478 - DNA, 75 bp, Homo sapiens
tgtgagctggaggaaaggttcgccctggtgctgatgtccagctcgccgctgtccaagaaacgtcgcgtgtccggg

SEQ ID NO: 309479 - DNA, 50 bp, Homo sapiens
tttcaacctccggggccacaatagcgagccaccattggttcaggcaatct

SEQ ID NO: 309480 - DNA, 90 bp, Homo sapiens
caccccgagaaccgtcagtttgagccagatggctacccacctttctgttctgagacccctcaagagacatataagaaggtgatgaactgg

SEQ ID NO: 309481 - DNA, 104 bp, Homo sapiens
ccgcgggcgcccgaggggccgagcgaggttttgaacgaagaatgtgatcagaactggtacaaggcagagcttaatggaaaagacggcttcattcccaagaacta

SEQ ID NO: 309482 - DNA, 75 bp, Homo sapiens
gtccaaactgcaggatccccgccaatatcgtcagggtgtggaacgtccgctacaaccactctcatgaccagctgg

SEQ ID NO: 309483 - DNA, 100 bp, Homo sapiens
gattaatgtctgcaagagcacgctatgagagatacagtggcaatcaggttctcttttggtgcaagcggtcttctctgtcttctttatggccagtaaaatt

SEQ ID NO: 309484 - DNA, 101 bp, Homo sapiens
accttgtttgcctggggcaatggagaaaaagcctaacccagatggagagggagaagattgtttgggagtttgagcagctgtatcactccttaaaggagcat

SEQ ID NO: 309485 - DNA, 100 bp, Homo sapiens
cctcgatcgaggacgacttcaactatggcagcagcgtggcctccgccaccgtgcacatccgaatggtcaatcctttcccatggtaccgtggcagactgtg

SEQ ID NO: 309486 - DNA, 108 bp, Homo sapiens
gtccgcgagatggcttgctccattgtcgaccagaaggcaagaaaattggatgtatattttgaatatgaagaaaaaataatgagcaaaactactctggataaatctctt

SEQ ID NO: 309487 - DNA, 100 bp, Homo sapiens
ggtttttctgccacttttgcaagggcgaggtcagccccaaactaccggaaatgactataccctggtgcttaaggagagcggaacttgtgttcaagtgtgt

SEQ ID NO: 309488 - DNA, 82 bp, Homo sapiens
ggacagccgcgcgctgagggtctcggggcgggcgccgcgggacctctccgggccatggccctgccaggagcccggaagtggg

SEQ ID NO: 309489 - DNA, 80 bp, Homo sapiens
ctggggtcccttttgcctcagatactattttgaagtatgtctgccatttcctaagtgagtatccatcagttaatttatgg

SEQ ID NO: 309490 - DNA, 50 bp, Homo sapiens
accgaagaggtgagaacaaaatcatgatggctatatgcatccagttcatc

SEQ ID NO: 309491 - DNA, 100 bp, Homo sapiens
gccaaagatcccagaaggggagcgcgttgacttcgatgcagatataatgcacctgactgactctgtggtgcgtcgccagctctttcttgacgtgcttgat

SEQ ID NO: 309492 - DNA, 50 bp, Homo sapiens
ctactattcaggtgtatgaagaaacttctatgttcaatggccagctgcta

SEQ ID NO: 309493 - DNA, 122 bp, Homo sapiens
ccctaacgcaggtttccccgcaaatgactggtcacgcgggactgaacaccgcacaggcaggaggcatggccaaggacccccgcagcaaacacaagtttaagatccacacgtactccagcccc

SEQ ID NO: 309494 - DNA, 86 bp, Homo sapiens
catagacatttacgcggatgtcggcgaagagttcaaccagctcaaactggaggattataaggatcgcctgaaaagtggagagcatc

SEQ ID NO: 309495 - DNA, 100 bp, Homo sapiens
atccgcttcggccacgactgggatcctacgtgcatgaagatggacgaggtcctgtacagcatcgccgagaaggaccttttttctatcagtgcttatgttt

SEQ ID NO: 309496 - DNA, 75 bp, Homo sapiens
cggagcccggagctggggcgacgaggcgattgcgggggcctgggctagagcacgaacttccaggagccggtgcag

SEQ ID NO: 309497 - DNA, 82 bp, Homo sapiens
agaaagctaccgagatttcatataccaaaatccacatatcttcaaagacaaggagggatttgttcgtgttgaccgagattat

SEQ ID NO: 309498 - DNA, 100 bp, Homo sapiens
aggttcaagatgtaaagaagactattcagaaaaagatgattgacgctaactacctgaagaagcaggtcacacccctcttcattcacttcagaaataatac

SEQ ID NO: 309499 - DNA, 89 bp, Homo sapiens
tggcgaagtccccggagaactctaccctggaggagattctggggcagtatcaacggagtctccgggatgcgtatgacatcacgtttgac

SEQ ID NO: 309500 - DNA, 105 bp, Homo sapiens
aggagttcgtctcttacgtctgcggaagtgcagctgcctcagttcttagcgcagatataattgaccctgcaatcctgcgcccgggccgcctggacaaaacactgt

SEQ ID NO: 309501 - DNA, 80 bp, Homo sapiens
ccagcggttccatcctacacttggagatgggcagtagcgaaccccttcccatcgcagatggtgacaggaggaggaagaag

SEQ ID NO: 309502 - DNA, 115 bp, Homo sapiens
aagttcctcacagtttaggtctcaaggcaagcctattgagttaacacctctgccgctgctaaaagagcgacctgcgggttgggctgagtctgtccttgaggaagatgcatcggag

SEQ ID NO: 309503 - DNA, 100 bp, Homo sapiens
ccgtgcctgtcttcagatcttcacagcacagttcctgggaaggtggagccaccagcctctccctgattgccacggcagtgaagtttctacagaattcccg

SEQ ID NO: 309504 - DNA, 90 bp, Homo sapiens
caacgctctctgctgagcagaacgcacacatggaggctgtcctgcagagaagtgccgcgcacatgagtagagacggggtttcgccatgtt

SEQ ID NO: 309505 - DNA, 75 bp, Homo sapiens
gagaggaaactccttggctgagcagcgcaagactctccaaaaaaagttggtgatgacattgccaaggcaacgggt

SEQ ID NO: 309506 - DNA, 75 bp, Homo sapiens
cttcaagaagctttgaatcaactgatgagacaattgcagaggtggtcagaatggcttcaacattcctcaagtcac

SEQ ID NO: 309507 - DNA, 82 bp, Homo sapiens
tgcccaggccggaccgggccgggcgcccgcaggaggcaacgcacgggccacaggcatgttcctgcagtatacagtgccgggg

SEQ ID NO: 309508 - DNA, 75 bp, Homo sapiens
tctttgagaaaaacctgaaagatgtctcacacatcaaccccgtggccgcctccctcatccagaagatgcttcaga

SEQ ID NO: 309509 - DNA, 83 bp, Homo sapiens
ggcgggcgccgcgggacctctccgggccatgggatctctctaggagctgacactcgaaccttcacgacccattcggatttttc

SEQ ID NO: 309510 - DNA, 101 bp, Homo sapiens
gagagggggcaccggaggtgacaacaataacaagactgtccttcggacaagttttaggtgctggagaatctggtaaaagcaccattgtgaagcagatgagg

SEQ ID NO: 309511 - DNA, 83 bp, Homo sapiens
tttcgtcaaacacagtttcgaggtgcgggagatgttaaagatgagggactccaatggggcccgcatgttgaccttgataacag

SEQ ID NO: 309512 - DNA, 98 bp, Homo sapiens
tgctaaacacagaaggaatcaacctcccagagctattcaagtatgcagagaattatatccagatcgagagacagaagattctgaaagggttcaatgaa

SEQ ID NO: 309513 - DNA, 100 bp, Homo sapiens
gtcctagtcaggaagaggacacacagagtattggtcctaaagtccagagacagagcactaattaggggaaccccctcggaaggggaagggttgggtgctg

SEQ ID NO: 309514 - DNA, 101 bp, Homo sapiens
gtgctgaatggcaatggcacaaagttctctcgatcagggcatacatctttcttcgacaaaggatacactgcctctaggactgggacagatagccactgagt

SEQ ID NO: 309515 - DNA, 97 bp, Homo sapiens
agcctctgagctcaacggaggattgtgcctgagaagaacccacagagctcctctagagacacgaggcatcccttttatacccatgatttccccaagt

SEQ ID NO: 309516 - DNA, 82 bp, Homo sapiens
tccgtaaccacaaggaggacgagcttcgagagcatgcagaggctctgcgacaagtacaaccgtgccatcgacagcatccacc

SEQ ID NO: 309517 - DNA, 100 bp, Homo sapiens
catcagaaaccctgatttgagccagacgtccaaagtgaaacctccgggtggacattcccctcagagatgcagaggatgctatttatggaagaaatggtta

SEQ ID NO: 309518 - DNA, 124 bp, Homo sapiens
tgagccagagggagttgagccgcggcgtgtgcgccgagcgctactcgcaggaggtcttcgggactttgaacatgtcggggatcgccctcagcagactcgcccaggagaggaaagcatggaggaa

SEQ ID NO: 309519 - DNA, 88 bp, Homo sapiens
ctaagccaagggattcaggtgtggtgccggtgggaactgaggaagcgcccaagagaggtgtgggaaatggaactggatagactcaaga

SEQ ID NO: 309520 - DNA, 101 bp, Homo sapiens
catcgtgaccaccggcctggtattgggatggatttctctctgatcaaacggacagttcaggactcagaatctaaggatgaatgttcaccgtggcagtgaca

SEQ ID NO: 309521 - DNA, 74 bp, Homo sapiens
ccggcgccgctctccgagctcgatccgctgctcgcacgggagccagctgggtgcctctccagcttctgcagtgc

SEQ ID NO: 309522 - DNA, 76 bp, Homo sapiens
ccctgggggctatttcagctcaggttcaagaagacgtggaagctgcgggctctgaaggaaggcaagacaagcatgc

SEQ ID NO: 309523 - DNA, 74 bp, Homo sapiens
cactgctgggccctgaggctgcaccaagtggcgaaggagccggctccaagggtcgcggagcctcgccggccgcc

SEQ ID NO: 309524 - DNA, 74 bp, Homo sapiens
ctgatgctgaacttaggaggactttatggactcccaagacagctgggctgcgaccaatggaaacaaaggacatt

SEQ ID NO: 309525 - DNA, 100 bp, Homo sapiens
cggccgcggcgatgactcggacccaggtcatcatcctgaaccacccggggcagattagcgccggctactccccggtcatcgactgccacacagcccacat

SEQ ID NO: 309526 - DNA, 101 bp, Homo sapiens
tccgtgtctgcagctagtgtgtcaactcagcgtttctcctctcgtccctggtgaaatgacaatggatgctctgttggctcgattgaaacttctgaatccag

SEQ ID NO: 309527 - DNA, 76 bp, Homo sapiens
ttcaaactggtcaaatgcactgtccagacggagatccggaatgatatggaacctagcaaagctgttccactgaatg

SEQ ID NO: 309528 - DNA, 51 bp, Homo sapiens
tcccagcactttaggaggccaaggcaggcggatcacaaggtcaggagttcg

SEQ ID NO: 309529 - DNA, 75 bp, Homo sapiens
catgcatcggctaatagcccggagacaagcattaattggaggatctgacaacaaactgatttatagacattatgc

SEQ ID NO: 309530 - DNA, 116 bp, Homo sapiens
gcctactgaagccggcgctgctctgtggggctctggccgcgcctggcctggccgggaccatggtggaccagatgttccagttcgcctccatcgatgtggcgggcaacctggactac

SEQ ID NO: 309531 - DNA, 100 bp, Homo sapiens
ggcgacccggtgtgtgggccagcggagctccgggccgttgctccagggagaactgcaaatatcttcatccacccccacatttaaaaacgcagttggagat

SEQ ID NO: 309532 - DNA, 104 bp, Homo sapiens
tcggctgcgggaaatcgggctgaagcgactgagtccgcgatggagtttcaccagtgatcattaaagaatgggcagcttacaaaggaaagtctcctcaaaccccg

SEQ ID NO: 309533 - DNA, 83 bp, Homo sapiens
cctgctcctggtggcacccagtggcctgtactactggttttgtagtgcatccctgagcatgagcacagaatgaagcggcgttt

SEQ ID NO: 309534 - DNA, 76 bp, Homo sapiens
ttatcctgtgggggccgccgggctgcggcaagggcccatttggaggccagcgctgagaagtggaacaggttgctga

SEQ ID NO: 309535 - DNA, 100 bp, Homo sapiens
catcaaacctggttcgaatgagaaaccagtcccttggacagtctgcaccttctcttactgctggcctgatgttttctggcaaaggccttcctgcatttat

SEQ ID NO: 309536 - DNA, 82 bp, Homo sapiens
atgaggagtataggagcaagggcgtctttgtgcaggttgaaaggattgttgacaaaaggaaaaataaaaaagggaagacaga

SEQ ID NO: 309537 - DNA, 98 bp, Homo sapiens
agaaggatgaaaaggctttattgccaaactgcagcctgcttctgcaaagtggtacgatcgaagggactatgtcttcattgaattttgtgttgaagaca

SEQ ID NO: 309538 - DNA, 50 bp, Homo sapiens
aaaacatggcggatccagaattctgaccatgggggatgtgaagctggttg

SEQ ID NO: 309539 - DNA, 90 bp, Homo sapiens
aagttaaaaaaagacatcagccagccccagtgaaattgaggcgggtccatatggaatatttgctggtagggatgcctccagaggactggc

SEQ ID NO: 309540 - DNA, 75 bp, Homo sapiens
gcttcatatgcaccagaaggagatgaagctttcaccaacaatcaccagtggtttacacaacattgcaaggagcat

SEQ ID NO: 309541 - DNA, 75 bp, Homo sapiens
ttttccctcaggagcgaagccccctttggcagattacagagtcacgggagacaccgttctgtgttactgctgtgg

SEQ ID NO: 309542 - DNA, 75 bp, Homo sapiens
gactgcacctggctatcccaaccaggagggacgataaggtgtttgcacttgtgacagcagtatgctgtcttgccg

SEQ ID NO: 309543 - DNA, 76 bp, Homo sapiens
cgaatcatccacgcacctgcagctctgctgagagagtgcaagccgtggggtcctcagaatggttggaatgaccctc

SEQ ID NO: 309544 - DNA, 75 bp, Homo sapiens
agaacgaacatcttctggacctttgtccagcggatctgaaaagaacaattgctgtccttctggatgacattttgc

SEQ ID NO: 309545 - DNA, 76 bp, Homo sapiens
gttcaacttctgctgactctgcttcctcctccgatacttcccgcagtcggctccgtgctctatcacctctttatgt

SEQ ID NO: 309546 - DNA, 100 bp, Homo sapiens
tcgtgaggctgctcttcgagcgtttaattggttggggtcagataagaagaggagtgacaatcaagccaacagtagatgatgactgaagaataccagttaa

SEQ ID NO: 309547 - DNA, 87 bp, Homo sapiens
cattacttcacaaacaagccttcagaatcagatgaatggaggacctttttatagccagaatccaggaactgcaagcacatgttgacc

SEQ ID NO: 309548 - DNA, 74 bp, Homo sapiens
atgttgaacaacttggaattccaaaattcatctgttgccatgggagcctcactttcttgctcagaatattccct

SEQ ID NO: 309549 - DNA, 83 bp, Homo sapiens
gcagcggggagggacgccctctgccttcgaccggatcctgcgtactgagcgctttgggcagggaggtgcggggcctgtgggtg

SEQ ID NO: 309550 - DNA, 90 bp, Homo sapiens
gcagtcatcgtggctcgaacggcacttctaccctagccgggcccagcccccgagcagtgcagcctcccgagtgcagagtgcagcccctgc

SEQ ID NO: 309551 - DNA, 83 bp, Homo sapiens
ccgggtgtccggccgtgtcccgaggaagtgcaagacccgacaatgcagatcttcgtgaagactctgactggtaagaccatcac

SEQ ID NO: 309552 - DNA, 87 bp, Homo sapiens
gcttatactcctcccagtgacgggtctggagtgcgtgggggaccggctgttggcgggaagctcttcgtgggcggtcttgactggagc

SEQ ID NO: 309553 - DNA, 100 bp, Homo sapiens
cgaagttcagcccagaggagaaactcgctcgccttcagaagacagggcgtctctggccgagcctctttttgtggaaaacgacagcagcagcagtggcctg

SEQ ID NO: 309554 - DNA, 75 bp, Homo sapiens
ctaggatcacgcggcatgtattgaggaccgtgtgtatgtacaacaaaataatgtggagaacgtctacaatttggg

SEQ ID NO: 309555 - DNA, 98 bp, Homo sapiens
aggcctcgtgccgttacggccatcacggcggccgcagtggcgtcctggagccctcctcagcctcttccttggttgtgccactactgagttctccagtt

SEQ ID NO: 309556 - DNA, 101 bp, Homo sapiens
tggaacaggaggattttgtaatggaagggcatggcaagactccacctcctggtgaagaaagcaaacaggcccacagcctgtcacccacagatcaccaagca

SEQ ID NO: 309557 - DNA, 100 bp, Homo sapiens
tgggtctcagccgccaaagaccccgtccggtaggtgactgtggccttcccccagatgtacctaatgcccagccagctttggaaggccgtacaagttttcc

SEQ ID NO: 309558 - DNA, 75 bp, Homo sapiens
agaactggctgctgccctggatgccgaaggggaaggagctccactggttcaacagcctctcctccagtttcgacc

SEQ ID NO: 309559 - DNA, 96 bp, Homo sapiens
ctgcagcagacattacttcaggacaacctcttgggcagggattctgaaaccttccttgtatccctcctgagacatctttgctgcaagatcgaggct

SEQ ID NO: 309560 - DNA, 82 bp, Homo sapiens
ttgacgccatgtcgggttattcgagtgaccgagaccgcggccgggaccgaggttctagcgactgcgaagatagctcgctgag

SEQ ID NO: 309561 - DNA, 100 bp, Homo sapiens
tcactggcatttacgaactcagcttatgcaaaatgtcagacacaggtagtccagcctctcattttgaaaagacatgtttttcttcaagcaacaaaggtgg

SEQ ID NO: 309562 - DNA, 127 bp, Homo sapiens
gcaggctgccttccctgacccccagttacgcctggaatatgaaggcttccccgtcccgagaaatggtcaatgcatggtttgctgagagagttcacaccatccctgtgtgcaaggaaggtatcagagg

SEQ ID NO: 309563 - DNA, 75 bp, Homo sapiens
cagcactctgggcgaaaattggatgtgaaaatgaagccagaccgagcatcactgtcctggtaactggggccaagt

SEQ ID NO: 309564 - DNA, 101 bp, Homo sapiens
aggacataaggaactagtcacagtgttgctgcaacatagagctgacattaactgtcaggtcaggacctggattctcaccgtgggctacacgaccgcttttg

SEQ ID NO: 309565 - DNA, 50 bp, Homo sapiens
cagaggggtccatacggcgttgttctgggctttgtcttcaggatcaggtt

SEQ ID NO: 309566 - DNA, 83 bp, Homo sapiens
taacgcctcccggctctcgtcagcctcccgccggccgtctccttaacaccgaacaccacgttggacctctcgaacaaccagct

SEQ ID NO: 309567 - DNA, 100 bp, Homo sapiens
aagaacatccgagggtgcctgggaatcggtcgcctggaggaccagtatttcccatggagggtgcccaattacctgccctcggtgagctcagccatcggcg

SEQ ID NO: 309568 - DNA, 82 bp, Homo sapiens
aataagcacaagagaaagaaggttaagctggctgtcctgaaatattataaggtgtttgatgcgatcatgaatttcaagaaag

SEQ ID NO: 309569 - DNA, 50 bp, Homo sapiens
cacatgggcttcaatgacgacatgtctctctctgtgcccctcactcatct

SEQ ID NO: 309570 - DNA, 82 bp, Homo sapiens
gccgctgccgctgccgctgccgcacctccgtagctgactcggtctcggcgcggaagatggccggcggcgtggacggccccat

SEQ ID NO: 309571 - DNA, 122 bp, Homo sapiens
tcttgagtcgggaaatggccgctgtgtggttgcaacggagataaattcccggaaccgcgattcggcgtgtcagactcaaatccagtacctcaagcaagtccagcagccgagcgttgcccaac

SEQ ID NO: 309572 - DNA, 75 bp, Homo sapiens
ccggctgcgaagacgcggtgggccgcccctccgtctgttctctggggaggcagtaaggggccgtggagctggcct

SEQ ID NO: 309573 - DNA, 75 bp, Homo sapiens
gcggaggagcccgaccgacccgaccttattgcaatatgcaagcaacaagaatgcatcagaacatattgtgtatct

SEQ ID NO: 309574 - DNA, 100 bp, Homo sapiens
agaggatccagtgttcaccatcctggccccggaagatctgccgacaccccaggccatcgagccccaggccatcgtgcagcaggtcccagcccccagtcga

SEQ ID NO: 309575 - DNA, 75 bp, Homo sapiens
cgcgggcagagcgcggcggcgcggggatctgaaacttgcccacccttcgggatattgcaggacgctgcatcatga

SEQ ID NO: 309576 - DNA, 82 bp, Homo sapiens
aaagcgctggactttattgccagcaaaggcgtcaagctggtctccatcggggcagaagccggcaaagcctgcgaccccgcag

SEQ ID NO: 309577 - DNA, 100 bp, Homo sapiens
tggaagtggtccccgaaggctatttcgccgctggcgtcaggactattttcacgttttaatgccgagagatttggattcaagatgtgaaataatcagcgat

SEQ ID NO: 309578 - DNA, 109 bp, Homo sapiens
cagagcggttcttgcagatgtgcaacgatgacccagatgtcctgccagttggatggcaagcatgtggtgtttggcaaagtgaaagaaggcatgaatattgtggaggcca

SEQ ID NO: 309579 - DNA, 98 bp, Homo sapiens
cgaaagccaacggcgaggactgcctcaaccagtattaaaggtggaagaaggtccatatctttttctgtgggtgcttcaagtgttgttggaagtggagg

SEQ ID NO: 309580 - DNA, 95 bp, Homo sapiens
cctggaactagcgtcaaccttgaaggcatcgtgtggcaggaaacagaagatggaccgccgggagagcctgcccacctccccaccctggacgccgg

SEQ ID NO: 309581 - DNA, 100 bp, Homo sapiens
agaaaagggactttggaaaaaggctgtctctagacagcagtcttgtgggcatggtgctgatgtgaaatgtgtagactggcatccaaccaaagggttagtt

SEQ ID NO: 309582 - DNA, 83 bp, Homo sapiens
accgtctgagcggcctaacccgcgcccgggtagaggccaaaagccagttcaagcggcggtcaacagccaacaacgtggagatc

SEQ ID NO: 309583 - DNA, 100 bp, Homo sapiens
tatagaggcctgattaaatactggtttcacactccaccaagcatcccattacagatagaagaggtgattgcatactcggaacatcgttaccgtatctttg

SEQ ID NO: 309584 - DNA, 83 bp, Homo sapiens
atttgattgcctccagtggagatatcatcaagggttggggtctgctaggtccccggaatgagttgtttgacgcagccaaatac

SEQ ID NO: 309585 - DNA, 80 bp, Homo sapiens
tgcagcgcaaccacgagacggccttccaaggggttggccggagacctacgacatgaatacctcggagcccaagacggagc

SEQ ID NO: 309586 - DNA, 75 bp, Homo sapiens
gccaagccactcactctgctctgggttggtgtaatacggtgcccagtatgccgccaagaatgcagacagatagac

SEQ ID NO: 309587 - DNA, 90 bp, Homo sapiens
cacctttcacgagaggagtccttgagaagagcctctccagccagaaccaggttcttgggtgtctctggggagtccctgggccagaccttc

SEQ ID NO: 309588 - DNA, 75 bp, Homo sapiens
aaagttgtcatccgtggagcaggaaaccagaacattgatgatggcacctcagatcgcccctacagccatgctctg

SEQ ID NO: 309589 - DNA, 100 bp, Homo sapiens
tttttcattggcaagccaactctgagagagccaccattggttcaggcaatcttcagcggtgatccagaggagatccggatgctcatccataaaactgaag

SEQ ID NO: 309590 - DNA, 98 bp, Homo sapiens
aactctaccctggaggagattctggggcagtatcaacggagtctccggggtgttagaagataatgactatggccgagcagtagactggtggggcctag

SEQ ID NO: 309591 - DNA, 75 bp, Homo sapiens
ggtccagcaagactatgaatctctgttccaaatgctttgctggtgtggatccggagttgtatgagttaacaactt

SEQ ID NO: 309592 - DNA, 100 bp, Homo sapiens
ggaaggcgcttttcaccgcggccatcctgcaggcacagttgccgattacaggtgcagtacagaaggtttctaaaaaattagaaatgcacgtttacagcaa

SEQ ID NO: 309593 - DNA, 100 bp, Homo sapiens
gtcggggcgccctctccactgcgcgcgttcctcctaagatatatgacatctcaaatgatatgaccgtcaatgaaggaaccaacgtcactcttacttgttt

SEQ ID NO: 309594 - DNA, 97 bp, Homo sapiens
gcataatgacattgtggacagtgacagcgatgctgaggatcgaggaacgttgtctgagaagctggacgagatgctggcagccgccgcagagccaacg

SEQ ID NO: 309595 - DNA, 100 bp, Homo sapiens
atcctggaaaccatgcctttcccctaaaagtgactcagcccacctgcacccaggtgaaataaacagctttattgctcacacgaagcctgtttggtggtct

SEQ ID NO: 309596 - DNA, 73 bp, Homo sapiens
aaaaggctaagcaagcatctaaaaagactgcaatggctgctgctaagattgctgctaaaattgattcaattcc

SEQ ID NO: 309597 - DNA, 83 bp, Homo sapiens
gccgtctcttcgagttcttcgtgctgctcaagttggaatcgaagcctcttaaaatggcagatgacttggacttcgagacagga

SEQ ID NO: 309598 - DNA, 50 bp, Homo sapiens
gcccactgaagtttggaagctgtgaaagcccagcctccgtggttcttaat

SEQ ID NO: 309599 - DNA, 74 bp, Homo sapiens
ccgggaaaagaggaactaaggcggaggaactgagacgtttcgaattccaggaactgtggctgcaccatctgtct

SEQ ID NO: 309600 - DNA, 50 bp, Homo sapiens
atcacagacttgaaattgtatggtgtgtggaggtcattgcaaaggaagga

SEQ ID NO: 309601 - DNA, 74 bp, Homo sapiens
atcaagaggatcttaaagtgtggtctttagtggaaaaaaagtggatcaggcagatccatttgcacatgtggctg

SEQ ID NO: 309602 - DNA, 110 bp, Homo sapiens
atgttccacatcctcacgaagcaggtccagaagcccttcctcagaccggtacaggtttgcagattccgccagcagcacagcaagctctacagatgagtggctctttggca

SEQ ID NO: 309603 - DNA, 136 bp, Homo sapiens
tgatttcgcagcttttgtagagaagtgctgcaaggctgacgataaggagacctgctttgccgaggagggggaatcctagcaggacacagccttggatcaggacagagacttgggggccatcctgcccctccaaccc

SEQ ID NO: 309604 - DNA, 75 bp, Homo sapiens
gcggcggcggagcgggagcgggtaccgggcgcgggcagagcgcggcggcgcggtagaggcggggttttgccatgt

SEQ ID NO: 309605 - DNA, 75 bp, Homo sapiens
ggcaacatgacagaggaccatgtgatgcacctgctccagattgtccccttggggcggaaagaagccaaggccaag

SEQ ID NO: 309606 - DNA, 83 bp, Homo sapiens
aatgcaaacagatgataaccaagcgccagatcacccagaacacagatgtcatcgcaacagataaagaagacgttgccttcaaa

SEQ ID NO: 309607 - DNA, 78 bp, Homo sapiens
gcattttggcattgacatttaattttagggtcctttatatagaagggagagtagctcctgaaactgggcactggtctc

SEQ ID NO: 309608 - DNA, 100 bp, Homo sapiens
cgcgaggacgggcgccccgagctgcccccgcaggcccacggtctcggcgtagacgcaatggctgccatccggaagaaactggtgattgttggtgatggag

SEQ ID NO: 309609 - DNA, 83 bp, Homo sapiens
cctccctcttctcccgactatttggcaagaagcagatgcgcattttgatggattgatatgctgctgaaagaatatttactctc

SEQ ID NO: 309610 - DNA, 75 bp, Homo sapiens
attagttcagtgcagtgtctgacttgtgacagggtttttagaacttcagccataaaaatgggcagaattttcctt

SEQ ID NO: 309611 - DNA, 75 bp, Homo sapiens
caacgaccacgtctccaaaatgagtcgcatcttcaacccccatctaaagttcaggagccctggaaaggagaagga

SEQ ID NO: 309612 - DNA, 100 bp, Homo sapiens
ctggctcggagcagcagcctctgaggagccatgtggctagaaatcctcctcacttcagtgctgggctttgccatctactggttcatctcccgggacaaag

SEQ ID NO: 309613 - DNA, 76 bp, Homo sapiens
tctacgcctcctacgtttacctgtccatggttcgttaccgtgaacgcatcaccattcttcgagggaatcatgagag

SEQ ID NO: 309614 - DNA, 100 bp, Homo sapiens
ccggtgctcttcatcaccttcgtggtcgtctggtcctactacgcgtacgtggtggagctctgcgtgtctccatcaagtatgatggtgaaggatgaatatg

SEQ ID NO: 309615 - DNA, 101 bp, Homo sapiens
gctgcagagccagatgatccacaggatgctgtagtagcaaatcagcaagtctggaaaagtttgaaattccagtaaaaattcgtttgagtcctgaaccgtgg

SEQ ID NO: 309616 - DNA, 75 bp, Homo sapiens
tctgcaactgtattattcactccttcaagagaacttgccacttgaaaggaaggaggctgaactggagaaaagtag

SEQ ID NO: 309617 - DNA, 74 bp, Homo sapiens
ttgaattactcaaggctgcctctctgcaaagttgaggccggagcctcaacagaaagctcctttagttcctcctc

SEQ ID NO: 309618 - DNA, 99 bp, Homo sapiens
cgagagcgcgaatatcgtcatcgttagaaggggccctggcctccagtctgagtgctgacctcgaagagcccctgagtgaggaggagacagaacaccctc

SEQ ID NO: 309619 - DNA, 50 bp, Homo sapiens
cccaactacagctgctatacagaacgggccggagatggttgttggttggt

SEQ ID NO: 309620 - DNA, 80 bp, Homo sapiens
ctgccttgtgctcacagcttttgtcagaagtgtattgataaatggaaaaccagcattggaatcagctgattcaggatgct

SEQ ID NO: 309621 - DNA, 75 bp, Homo sapiens
ggcgctacactagagcagagtacgagtctgaggcggagggagtaatgggctttttggattttggaactggggact

SEQ ID NO: 309622 - DNA, 98 bp, Homo sapiens
gcaggggcaataagctgctgttcaggtaccccttccagagaagccaggagcacccggcgtcccagacaatgtggccagactccactgatgatagctgc

SEQ ID NO: 309623 - DNA, 101 bp, Homo sapiens
gcctggcgactttggccggacttttgctaactgcggcgggcgagacgttctcagattttgatccgatttcaaatccagaggaatgtgatagtgatccccgg

SEQ ID NO: 309624 - DNA, 90 bp, Homo sapiens
gtttctggtcactccccaggattatgcgcgaaaagagaagacctgagctcattcctgaggatctgcatcgccactatatccaaactatgc

SEQ ID NO: 309625 - DNA, 50 bp, Homo sapiens
tgcatccggagagtggacaagaaacatgatgccttcttctgtagagtggg

SEQ ID NO: 309626 - DNA, 76 bp, Homo sapiens
cctttgggaagcatgtcaccaacccggccttcaccaaactccctttggcctggttgaagctctgtgaggagcaaag

SEQ ID NO: 309627 - DNA, 101 bp, Homo sapiens
agagaaggctcactcaaggatcagttggctttagcaattgctctccaatcctgaagtcaaaatggaatgcatctctgctcttcctctgggcatcatctaat

SEQ ID NO: 309628 - DNA, 100 bp, Homo sapiens
gagcggctcacggcggaggacgacgcgctcaaccagatcgcgcgggaggccagcgatctgtacatgagacccaggaattatttccaaagcaagattcata

SEQ ID NO: 309629 - DNA, 107 bp, Homo sapiens
acgactcggagatctcctgccacatccagtaacagatcaactcctagcaatcatgatcggatacagcgtctgaggcaagaatttcagcaagcaaagcaagatgaaga

SEQ ID NO: 309630 - DNA, 121 bp, Homo sapiens
gccgcccgtgaggatctgagagccatgtcggccagcagcctcttggagcaggtacactaagatgaagacggccaccaacatctacatcttcaacctggccttagccgatgcgctggccacc

SEQ ID NO: 309631 - DNA, 50 bp, Homo sapiens
cctcaacaagggaatttaaaagtgagggtatcgtgcagcagtttttggtg

SEQ ID NO: 309632 - DNA, 96 bp, Homo sapiens
atcagaggaataatgtggggaggccagccagtcggtctaatttgaaagaggagaggagacgccgtgagcgggacgaccagatgtaccgagagcggc

SEQ ID NO: 309633 - DNA, 75 bp, Homo sapiens
tgtatctctaattggaagcagtgctcagatggaagtagattatacagagcaactgaatttcagtgatgatgatga

SEQ ID NO: 309634 - DNA, 75 bp, Homo sapiens
tgtcttcactggaatccattctggcacctcaacggctgatgatttctggacctggcctttcattatcaaaagtcc

SEQ ID NO: 309635 - DNA, 74 bp, Homo sapiens
gcttccagggaccccgctgtcagtatggcactttgatccggttttccagttcttgcacaagcaagtttgtgtca

SEQ ID NO: 309636 - DNA, 100 bp, Homo sapiens
caccaaccctgccatccgggagcagacggtcaaggtggaacacctgcagcaggagactgctgctctgaaaaagcaaatgcaaaaaataaaggaacagttt

SEQ ID NO: 309637 - DNA, 75 bp, Homo sapiens
cccgagttcatggccaacctcaggctcaggtggttgtactacaatcccagagtcagacctagaagaaagatcagt

SEQ ID NO: 309638 - DNA, 82 bp, Homo sapiens
ggtgggattctgctcgtgttccaaatcatcgcctttctggtgggaggcttgattggtgagaagccctaccactgcaactggg

SEQ ID NO: 309639 - DNA, 83 bp, Homo sapiens
atttgatttccggagtcagtcattttactgtcaagacatttcttcggcattctgcaacagaactctcagaaattgagcccaat

SEQ ID NO: 309640 - DNA, 100 bp, Homo sapiens
gtggtaattaccatcaatactatggaatgcattttgaaacttaaggatgggatacagggctttctctacgtgctgttgtctcactgggtttttgtcggag

SEQ ID NO: 309641 - DNA, 90 bp, Homo sapiens
gtgaagcaatggtatgggaaaattgtttgcagaaggatgaaaaggctttattgccaaacttgttcctgcaagggctggtgtggaaacaag

SEQ ID NO: 309642 - DNA, 88 bp, Homo sapiens
cctgctgttcggatttaacttcatcttctgggcctcattgctacgatttcagagtaccctggtaatagctgagcatgcaaatgattcc

SEQ ID NO: 309643 - DNA, 82 bp, Homo sapiens
tcatgtggcagtggaaaatgcgctcgggctggaccagcagttgatattcactgatggactccaaagaatcattaactcctgg

SEQ ID NO: 309644 - DNA, 90 bp, Homo sapiens
aaatctacttttgggttacaaaaatccagaccaggtgcagattcactttataggaacagcttcagcttcagtgatgaaaaactgaattct

SEQ ID NO: 309645 - DNA, 99 bp, Homo sapiens
taacataacaaagggaattattcatcaagaagaggccctttagcaggaaattgacaatggcccttcagctatgctaggtctataatgggaagtgtcaca

SEQ ID NO: 309646 - DNA, 82 bp, Homo sapiens
tccttttgtggaggagaacttagtttcatgagaaagatcagtctaaagaaaaggagaagaaagtgaaaaaaacaattccttc

SEQ ID NO: 309647 - DNA, 75 bp, Homo sapiens
gcccccagctcagctcttactgcgggccgctccgacggcggtccatcctgaaacctctgcgccatgagagccaag

SEQ ID NO: 309648 - DNA, 101 bp, Homo sapiens
ctgcactccatactgaggaggaaaattataatgtggttgcaccaggctgtctttcacaatccaggtatggcatttcaaatatagatacaaccattgaagga

SEQ ID NO: 309649 - DNA, 75 bp, Homo sapiens
ctgcgcccccgggagcgggcgcccagagggagtgaggattctttggacaccagcctgagagctcacggggtccat

SEQ ID NO: 309650 - DNA, 89 bp, Homo sapiens
ctgggcgccttcgcgggccacagccaggcggcagccaacggcctgcacggcctcaggtgttcaggcgcttcgtggaggttggccgggtg

SEQ ID NO: 309651 - DNA, 100 bp, Homo sapiens
gtggaccccaagaagaccattcagatgggatctttccggatcaatccagatggcagccagtcagtggtggagatttcaggtatgctgctgaaagtgggaa

SEQ ID NO: 309652 - DNA, 120 bp, Homo sapiens
gttccctactcccctgctatccccaacaagaggaaagacacacctaccaagaagccagtcaagcggccaggtgtcgtgaaaactacccctaaaagccaaaatgggaaaggaaaagactca

SEQ ID NO: 309653 - DNA, 98 bp, Homo sapiens
gttggtgccagttggaaagaaccttttccagtaatgattgatgaatccctttcatccgatgaccctgattcatatgtgacattgacggttgtccggtc

SEQ ID NO: 309654 - DNA, 80 bp, Homo sapiens
cacacgtgcgggacacgccctcccccgacggcggcgctaacctctcggaagtgtttggattgtgagctatttcagaactg

SEQ ID NO: 309655 - DNA, 71 bp, Homo sapiens
gaccagccgcacgccgaccggcgccgggagatcctggatttcgggcagacaacttgaacaagctgaagaac

SEQ ID NO: 309656 - DNA, 99 bp, Homo sapiens
ccaagatgctggaccgaggcctggatcccaatttccacgacccggagaccggagacggccaatgggaacgtggaggccaaagtggtgtgcttctaccgg

SEQ ID NO: 309657 - DNA, 100 bp, Homo sapiens
agaaatgagcccattgaaggcaaactctcactgtataggcaacagggtgccattattatccatgaagtttatgaagaaggagcagcatgtaaagatggaa

SEQ ID NO: 309658 - DNA, 82 bp, Homo sapiens
ggccgagggtttgatgaaggtggaggcagcgcggctctcaggtttggttttcctaaacaaatcctttcacagggaccgacgg

SEQ ID NO: 309659 - DNA, 104 bp, Homo sapiens
gctctgggtctccaggcccgcgaccgtccgccagtcgtcccgaggtgtggacactgccagcggctgcagccgacttggaatgacctgggagacaaatacaacag

SEQ ID NO: 309660 - DNA, 77 bp, Homo sapiens
aaaggcctgacatatctgagggagaagcacaagatcatgcacagaggactgtagaagcggccaggaagaaaaccacc

SEQ ID NO: 309661 - DNA, 100 bp, Homo sapiens
gctctcagccccgacatgctggccactgaccttgcctattacctggtccgcaaagggtaacgaatccagaaaactctggagagcccttcagagcatacac

SEQ ID NO: 309662 - DNA, 99 bp, Homo sapiens
atgacagaagcagaacggtttcagcctccagtactggggatttgccaaaaggaaatccagttatcaaaattgactcaagaagagagaacctaacagaac

SEQ ID NO: 309663 - DNA, 60 bp, Homo sapiens
cttctaaatctgttgatgaagtgcccctgggcgctgggattgctctagcctgtaagtata

SEQ ID NO: 309664 - DNA, 76 bp, Homo sapiens
ccccgcccggccagccgccccgtccgggaggcacactctggctcccccacttatctccagctccccccgcggcccc

SEQ ID NO: 309665 - DNA, 98 bp, Homo sapiens
cgagctgtcagcctctccaaagcctgcgcgagaggagccgggacacgcctagcgcgggctccaggggatgacggagtgacgtcacctgtgtggactca

SEQ ID NO: 309666 - DNA, 101 bp, Homo sapiens
tgtggacttgaaagaagctgcagcggaggaaggcgaggggggacacagcgattgccacgcgccattggaatgtccctggccaaggagctcatattctctgc

SEQ ID NO: 309667 - DNA, 75 bp, Homo sapiens
aactctgtcatagtagatgaatgcaaggcctcctcgaaagatgttgtcagacagctgtgtcaagaaagcttttcc

SEQ ID NO: 309668 - DNA, 100 bp, Homo sapiens
cgaggctatctcagacacgctgtggcacacgccacggggagccagagaacgtgtggtgggggtggcgaagagacattttaaatccaaaggatgtgattag

SEQ ID NO: 309669 - DNA, 100 bp, Homo sapiens
cataccactatatcagataagcttgacattacagccaagatggtgctgtcccagagacaacgagatgaacttgccggtggtggtgtgcacattgagcccc

SEQ ID NO: 309670 - DNA, 75 bp, Homo sapiens
tgacctatggatcatttggtggtgtaaaaggtcattgctgtggtcatggacctcttcactgatggtgatatcttt

SEQ ID NO: 309671 - DNA, 75 bp, Homo sapiens
gactggaccaagatcgagcccagcgtcaacttcctcaagtcgcccaaaggatcctgttcccagtgggttttctgc

SEQ ID NO: 309672 - DNA, 100 bp, Homo sapiens
gttttggtggaagaagctcgggcagtccctatggtgcataatgcagtgaagatgggtgaagagagatgtgtttcatctgaaatttgaagggctttacaac

SEQ ID NO: 309673 - DNA, 51 bp, Homo sapiens
gtttccctttctatgacaaacctatggtggtaggcagctccctcctcttcg

SEQ ID NO: 309674 - DNA, 82 bp, Homo sapiens
ccacaccacggggagggatttttttctattttccctacgaaaaacagatctttttaaggttaacacagaaatctgcctcctg

SEQ ID NO: 309675 - DNA, 83 bp, Homo sapiens
ctcctgtcgccttcgcctcctaatccctagccactatgcctcccgcgacgatgcccctcaacgttagcttcaccaacaggaac

SEQ ID NO: 309676 - DNA, 100 bp, Homo sapiens
gacggccttcagcgactgcaccagcaagatcggcaggcgagattgcctgacccaggcctgctcggccctcacagggacttgatgtggcgtatggagcact

SEQ ID NO: 309677 - DNA, 100 bp, Homo sapiens
aatgatcagaaagatatgaaggactgggttgaagccctgaaccaagccagcaagatcaccgaggagctgcgttgggtcagagctggtagactggcttcta

SEQ ID NO: 309678 - DNA, 76 bp, Homo sapiens
acgcctagctggcaaagaagtgaggatagcattgctgaccagatgggtatttagacagtgtgaccaataaagacag

SEQ ID NO: 309679 - DNA, 101 bp, Homo sapiens
ccgggagctgtacttctatatctacaagggggtccgcaagctccaattaaggaacagctatatcctgcttccttctgtaagcagcatcgacttgtgcaagg

SEQ ID NO: 309680 - DNA, 74 bp, Homo sapiens
cctcgacctctcagggaacgtccttcgtggagatgacctctcagaaggtgaaccttccggaaagagaaaagcag

SEQ ID NO: 309681 - DNA, 82 bp, Homo sapiens
aagatccctggaatatgaagagacacagtatggtagccacacccccaggctgctctttggcgtaaattgcaatcgattaggg

SEQ ID NO: 309682 - DNA, 90 bp, Homo sapiens
ccggccgcggccccctgttgtgttgctgcggagagccgtgctatcaagactaatcaggaccttctcccagaaactccatggacgcacatt

SEQ ID NO: 309683 - DNA, 99 bp, Homo sapiens
aacctgctccatgcttgaaaacatggggattggaattcgaactctaagaaggagctgatgtggaggagcagctgagacagttcaagatgacgaccacag

SEQ ID NO: 309684 - DNA, 75 bp, Homo sapiens
cggagaccgagcccgaacagcaggtactccaaagattcaggtttactcacgtcatccagcagagaatggaaagtc

SEQ ID NO: 309685 - DNA, 74 bp, Homo sapiens
tgaagatgatacctttctaacagcccaagtgaaacttccaccgatgatggaaatcataactgctgagcagctga

SEQ ID NO: 309686 - DNA, 98 bp, Homo sapiens
tgcggcctcctcgcaaaacaagctgacatcatctctaccgttgagttcaaccacacgggagagctgctggccacaggtgacaagggcggccgggtcgt

SEQ ID NO: 309687 - DNA, 100 bp, Homo sapiens
atttaaggaaacttgcagagaatgaaatcactttgtgtcaaaaagaaataactcagctgaagcatcaggttttgcacactagggaccaagaagccctcgg

SEQ ID NO: 309688 - DNA, 92 bp, Homo sapiens
ggtttcgggatctcggtgctgcagacggcgagacctcctgcacaggtgagtggcatcaaggcgctgtacgagtcggagctggccgatgcccg

SEQ ID NO: 309689 - DNA, 83 bp, Homo sapiens
cggcgagcgcgagcggcgcgagaaacgttacagtgtttctgccacctctgtacaaaagacaattttacttgtgtgacagatgg

SEQ ID NO: 309690 - DNA, 100 bp, Homo sapiens
ccgccatacgcgctctccctgtttagtgggagagtcccaatgtcttatgtctcgtctatgatgtgaccaatgaagaatccttcaacaactgcagcaagtg

SEQ ID NO: 309691 - DNA, 100 bp, Homo sapiens
aataatcggtctgccagttgcgatgccctcacagggaagtagatcgagattcagatggtcacgtcagctttagagactttgaatatgccctgaactatgg

SEQ ID NO: 309692 - DNA, 98 bp, Homo sapiens
ctccatgcgcagtcatgagtcgcttcaagtttatcgtgggaatgtaagacggacttagatattgcatacaaatttggaaaaactgtggtgagctgtga

SEQ ID NO: 309693 - DNA, 96 bp, Homo sapiens
cgcggtggcggcgctgccgcctgaagtgcgggcgcagctggcggagctggagctggagctctcggaggccctactgccaataaagggaaaataaga

SEQ ID NO: 309694 - DNA, 100 bp, Homo sapiens
aactggatcatcatcgacaggcaggcagaggatgggcacttcctggagaagggccctgtggtcatgacatccatgcagacggagtctcgctctgtcgccc

SEQ ID NO: 309695 - DNA, 98 bp, Homo sapiens
gcaaacaagccaatcccaggaggaaaaacgtaagactttgaccccgacgcaggcttcagtgattgccgcggatcagaagcctgagcactttggctcga

SEQ ID NO: 309696 - DNA, 102 bp, Homo sapiens
ccttattacgccgtctccaagatgtagctaatgaccgtggttcccactgagtttcatccaggatcgagcagggcgaatggggggggaggcacccgagctggc

SEQ ID NO: 309697 - DNA, 83 bp, Homo sapiens
agacccggtttgctgatcgccccagggatcaggaggagagagaagctcttcagaaacagctggatgaagcaaatcgagaagca

SEQ ID NO: 309698 - DNA, 100 bp, Homo sapiens
cgggagcttccgggagggcggctcgcaggtgctggagaatctggtaaaagcaccattgtgaagcagatgaggatcctgcatgttaatgggtttaatggag

SEQ ID NO: 309699 - DNA, 98 bp, Homo sapiens
ctcgttacctgcaggtattgggagatccacagctaagacgccaggacccactggaagcctagaaatgtttccgttactatggcaatgacggcagggac

SEQ ID NO: 309700 - DNA, 82 bp, Homo sapiens
accgagaagtccagcgggagtacaacctgaacttctcaggaagcagtactattcaagaggatgatccagattccagtaccag

SEQ ID NO: 309701 - DNA, 98 bp, Homo sapiens
ttgctattaatattccaaggctcttacttgacaaaattgagaaacaaatgtttcaggtgtatcagttcctatccctgtgattggactgagggacgaag

SEQ ID NO: 309702 - DNA, 100 bp, Homo sapiens
gcccggcggctcagccccatcatgctgggctgttttggagtcagcggaagatcaccaaggccagggagtggttccaccgcactgtgaagattgactcgga

SEQ ID NO: 309703 - DNA, 100 bp, Homo sapiens
ctgaggaggacccagagcaggacagcggcccggaggacctgcctctcgtcagacaatgcagatcttcgtgaagactctgactggtaagaccatcaccctc

SEQ ID NO: 309704 - DNA, 98 bp, Homo sapiens
atttataataggagtccagctattgctgctgttgggctccatcttccacagaaatttctctgaaactccatattgctcaaccagaaaacaatacccat

SEQ ID NO: 309705 - DNA, 100 bp, Homo sapiens
ctgaaattcatcctgagatgagggacgcactctctgagatattttcgcctgggcgtttcggatcccatccatggggtccctgaatttatttcggttgggt

SEQ ID NO: 309706 - DNA, 83 bp, Homo sapiens
tcaggagcccatggtgcgccatgaggcaggatgagacctgcacgcagtggctcacagcagcacgatttgtgacagcccgaggc

SEQ ID NO: 309707 - DNA, 87 bp, Homo sapiens
agaagcctgttctattgcctgcaacaagaacacctgtccagaggagaaggcagagcccccccaggctatgaatgccctgatgcggtt

SEQ ID NO: 309708 - DNA, 80 bp, Homo sapiens
agtgcacatggctgaccacccctaaaagcacctggccccgctacagcaaaccagctggtactcctggttaatcaacagct

SEQ ID NO: 309709 - DNA, 90 bp, Homo sapiens
gagccctcgcgacgcgcccggcccggagcccccagcgcagcggccgcggtgcaagtgaaagtgtaggaaaacatatgcttgaagcgtgca

SEQ ID NO: 309710 - DNA, 98 bp, Homo sapiens
gctgaatccagtaccaaaaacgtcaacaacagttttacgaaaactgtcgctgaaaagcaggagaagagaaatcaggatcgcttgaggaggagagagga

SEQ ID NO: 309711 - DNA, 100 bp, Homo sapiens
ggggcttgatgaaggcgtggatagcctgaaggcagccattcaggccattgaacacccagttcgaaccaatcagattccacgtcagattcctgaacagtcg

SEQ ID NO: 309712 - DNA, 100 bp, Homo sapiens
aatgaactggtggactacattacaataagcagaggctgtttgacagagcagacttaccctgaagtagttagaatgctactctccagagagaccggatctt

SEQ ID NO: 309713 - DNA, 115 bp, Homo sapiens
gccactgtccaaaaagtcatggaaaggctggagtactgcaacccctaccgactggtgtggcaatccaaggtcaaaatgcagatcttcgtgaaaacccttaccggcaagaccatca

SEQ ID NO: 309714 - DNA, 75 bp, Homo sapiens
ctgatttctgcagctctgtgtgaagaagctgcacacatacatgtaagagaagcaaaaatgtcagatgatatcagg

SEQ ID NO: 309715 - DNA, 80 bp, Homo sapiens
cagcgcggagtgggcgatgccagcgtgccaggactttaggttcaagatggtgactgcagccatgctgctacagtgctgcc

SEQ ID NO: 309716 - DNA, 75 bp, Homo sapiens
atatcatgttgcctttcattactacgttcagatctgtgcaggtcacgggaatccccatgaactgctctgtgaaac

SEQ ID NO: 309717 - DNA, 75 bp, Homo sapiens
tttggccactggacatcagaaccacattttgggtttgaagaatcttctacatggaaaatgtttataggaggcctt

SEQ ID NO: 309718 - DNA, 82 bp, Homo sapiens
gccaaacggaggaatacctcgtatgcaacctcaggcttcagccaaatccacattcatctcaatggaaggatcctgccttaag

SEQ ID NO: 309719 - DNA, 97 bp, Homo sapiens
ccgggcccaggccccggcagcgcctgggacaagatgtcatttgtcagagtgaaccgctgtggtccccgagttggtgtaagaaagacaccgaaagtaa

SEQ ID NO: 309720 - DNA, 121 bp, Homo sapiens
cggcggatggagctggagcagaaggtgcaggaggtgctgaaggccagatgaaggtcaccgtgtccaaagggggcgaccgggacagtgacgacgacagcgtcctcgaagccaccagctcccg

SEQ ID NO: 309721 - DNA, 83 bp, Homo sapiens
gaagaaatggacatgattgcctaaatcagccaaacacaggaacccagtgacttgattgtaaaaatttacagagcggaatcata

SEQ ID NO: 309722 - DNA, 100 bp, Homo sapiens
ttgtaaatattgctttaccaaacaggtgtgatgaatgcagactctgctaccattttggctgtttggatcctcctttgaaaaagtctcctaaacagacagg

SEQ ID NO: 309723 - DNA, 97 bp, Homo sapiens
cgcccctggacatggaggagaaggtccgcttcaagttggaagtactccatgacacacactcggagaaagtcccttcccatgctgagttcgggcctca

SEQ ID NO: 309724 - DNA, 90 bp, Homo sapiens
gcttccagctggacccccacacgaaggcctgcaaggctgtgggccaggagtggtggctcacacctgtaatcccagctctgggaggccaag

SEQ ID NO: 309725 - DNA, 75 bp, Homo sapiens
aaatacagaaatccactggagcaccttgataggttttttgcatgtctgacacccatgactccacctggaccttat

SEQ ID NO: 309726 - DNA, 90 bp, Homo sapiens
cccggtccgcccgtcggtctgcagcgcggctgagactattgggaagaagttacctgcaactacagcaactccagactcatcaaaaacaga

SEQ ID NO: 309727 - DNA, 100 bp, Homo sapiens
tgaaatggcagacgatctcggagacgagtggtgggagaaccagccgactggagcaggcagcagcccagggtatttgaagtataccatacaactgttttga

SEQ ID NO: 309728 - DNA, 74 bp, Homo sapiens
acagaacagttaatcctcaatttaagcctgatctaacccctagaaacaggggatggactatttgggttctcggc

SEQ ID NO: 309729 - DNA, 90 bp, Homo sapiens
cagcggctcggcggtgagatcgtcagcgctgactccatgcagggaaaagttcagttagaagacatacttcaccatcttgaaaaagaagaa

SEQ ID NO: 309730 - DNA, 90 bp, Homo sapiens
tgctcatcaactttgcctctctccgctctgcctatgacagcaccatggagaccatgaactatgcccagccccaggaccaaattaccatca

SEQ ID NO: 309731 - DNA, 96 bp, Homo sapiens
ctatgataagctgagcagagccctgcgatactattatgacaagctcgcagacctctgaagagagtgccattgagacgggttccagcagttccacct

SEQ ID NO: 309732 - DNA, 75 bp, Homo sapiens
tggagaccagaccagaagcccttctgaattaaggactggaatgtcacgtggaataccagcaaccccgacttcacc

SEQ ID NO: 309733 - DNA, 73 bp, Homo sapiens
gccactacagttcatcaacatcaactacgtccctctgaagttgcctgtgtccctggagtgttacacagtgcct

SEQ ID NO: 309734 - DNA, 75 bp, Homo sapiens
tcttctccaagctcgatctgattaagggacatggcttgcagtgtggcaggcataacttctgatgctaatgttctg

SEQ ID NO: 309735 - DNA, 82 bp, Homo sapiens
gctttgagtaacattgccagagaggtcatttggatccaggattcctagcaagtgacaaaacatctggcaatgcgccactcaa

SEQ ID NO: 309736 - DNA, 99 bp, Homo sapiens
ggacaagatcatgggcaaaggacagatccagggcaccttcagcctgcggaagctatgggccttcacggggcctggcttcctcatgagcattgctttcct

SEQ ID NO: 309737 - DNA, 100 bp, Homo sapiens
acccagatactgattccttcaacactgtagcagagatcactgggagcaaatatccagaacagcagctgctcagccaggaactgagatctttaatctgcca

SEQ ID NO: 309738 - DNA, 87 bp, Homo sapiens
gccgacaacttttctcctgatttgaggggcagcccaatggatccaatggtgatgaagagacctcagttgtatggcatgggcagtaac

SEQ ID NO: 309739 - DNA, 75 bp, Homo sapiens
caccatcctttcttccagctgccacacagaagatcttaccaatatatttgagtccttcctgcctcagttattggc

SEQ ID NO: 309740 - DNA, 75 bp, Homo sapiens
tgttcccacctgactttgaaggtggaattctcatcaacagttgtggaatatggggatctgttctggagccagaag

SEQ ID NO: 309741 - DNA, 100 bp, Homo sapiens
ctcagagcaatctttggtaaaactaagatccagaatgctgttcactgtactgatctgccagaggatggcctattagaggattaacacagattcctcagat

SEQ ID NO: 309742 - DNA, 51 bp, Homo sapiens
aggaagctcaagtggagctgcagaaggtccggcccggagcggccatgtccc

SEQ ID NO: 309743 - DNA, 98 bp, Homo sapiens
cgctggagcggagccggccgtacgcggtgctgcgagggcagaacctgggtttattgttggccaaaaccaggctttgattgaaccaggatgaatgcggg

SEQ ID NO: 309744 - DNA, 75 bp, Homo sapiens
aaatttgcaaatgatatacaacttctaagtgctacagctagaatgaagcacatcaacctatcatttgcagcgtgt

SEQ ID NO: 309745 - DNA, 98 bp, Homo sapiens
gtgtcccggcctgaggtgtcggccggatccctccttctcccggcgcctcaagcggaagataatcaatatgcatttccaagccttttggctatgtttgg

SEQ ID NO: 309746 - DNA, 74 bp, Homo sapiens
tactcctgttgcttgcctactcctgaccagttagtaacaggagtatgggaaggcaaatacaacttcttctgtca

SEQ ID NO: 309747 - DNA, 76 bp, Homo sapiens
aggctggcctgcacgagatggacatccgctatgacaacatgcacatcccaggctgactgtgctgtcctgattgttg

SEQ ID NO: 309748 - DNA, 100 bp, Homo sapiens
cttcacgcagtcaagaacgacttccagactccaggggcctgaagcccctgcaggaggacaccccacagctgatgcgcacacgcagtgatgttggggtgcg

SEQ ID NO: 309749 - DNA, 74 bp, Homo sapiens
tgaagaaataaaaaagaggtttcggcagatggttccaatccctatacattgaagctttgcttttctacatcatc

SEQ ID NO: 309750 - DNA, 100 bp, Homo sapiens
ctcggagcacttcctagcatgccccgagccctggcctttcaagcaccagtcaatatccagtttaacccagaactggtgctggtctcagctggctttgatg

SEQ ID NO: 309751 - DNA, 75 bp, Homo sapiens
ttatgggggacaaaaaagacctttagaagatggaggcttttgaacacttgcagcaattagaattaataaagccca

SEQ ID NO: 309752 - DNA, 83 bp, Homo sapiens
attcaaacaaggtcatcatcacgggacagatggcatccacccgttttgtcaagtgtgaaaagtgtcatcatttttttgttgtg

SEQ ID NO: 309753 - DNA, 87 bp, Homo sapiens
ccaagccagaagaaatcaacctgctcaccggggagtctgatacacagttcttggccaggctgactgagagatttgtgctgggagtgg

SEQ ID NO: 309754 - DNA, 51 bp, Homo sapiens
tgaggtcagcttcccagagaggaaggtctatcagccacagtctctgcaagt

SEQ ID NO: 309755 - DNA, 85 bp, Homo sapiens
gaaaagagaacaagagagtgagaaaccaagccaagtcagcagataagcagagagccctagaagaaaccaaagcctacaccaccca

SEQ ID NO: 309756 - DNA, 101 bp, Homo sapiens
gatggcatggatcctcgtggagctgttgagaacaaaaacaggatttattcctgacgacattgaatgccaccactagtaccttccagtttgaaatatgggaa

SEQ ID NO: 309757 - DNA, 75 bp, Homo sapiens
ttgttgagaaatgtgtggaatttattgaagatacagggacttacccttttgtaacctcttcaaattgtactgttg

SEQ ID NO: 309758 - DNA, 90 bp, Homo sapiens
gctcattccggagaagaagggcctcttcctgaagcatgtggagtatgaggtttccagccagatgcctgaaaacttcatgcctcctgttcc

SEQ ID NO: 309759 - DNA, 74 bp, Homo sapiens
gagaagacaagctaaaaatgattcgggaatatcggcaaatggtagagtacagagagatggatgaaagcttggcc

SEQ ID NO: 309760 - DNA, 88 bp, Homo sapiens
agattcgcagtggtcgcttcttctccttggaagcagaatctggtaatataagtcaaaagtctgatgaagaagattttgtaaaagttga

SEQ ID NO: 309761 - DNA, 88 bp, Homo sapiens
caacataatgaaatcactttctgctcggagcccaagatcctcttctcctacaaatgccaagtggacgagacagaggagccagatgtac

SEQ ID NO: 309762 - DNA, 74 bp, Homo sapiens
gttcgcggctctaacggggctttctacaagtgttctaagaacggaagcatctgggctggatggaatttagcatc

SEQ ID NO: 309763 - DNA, 100 bp, Homo sapiens
gtggccccttcgacctgcgctccgcgctctggcgctacggtctggccgtcggctgcggcgccatcgttcgctcccaggaccccgggcagcggcgggtgct

SEQ ID NO: 309764 - DNA, 80 bp, Homo sapiens
cgctgagcttggcgcacgggccgaccaggtgagcacctgcggatctgtccccagggctacacctgctgcaccagcgagat

SEQ ID NO: 309765 - DNA, 100 bp, Homo sapiens
gcgagccccagattattgcccagagacaatggatgaaaactttcggaagagaaagttgcctgtggtaagttcagttgttaaagtaaaaaaattcaatcat

SEQ ID NO: 309766 - DNA, 100 bp, Homo sapiens
gtgggatgccccgagcattgtgggcctcatcatcttcctcctgtgcaccctcttcatcagacaatgcagatcttcgtgaagactctgactggtaagacca

SEQ ID NO: 309767 - DNA, 75 bp, Homo sapiens
ttgaagccaccggcgttgagtacttcaacacgacaaatacaacgacttcatcgaggccaaccgcattgaggacgc

SEQ ID NO: 309768 - DNA, 88 bp, Homo sapiens
gaagatagagacaggtctcatcgggaggaaatggagaggaaggaacagagccacagagaaaaatgacttgctcacaacagaagagcca

SEQ ID NO: 309769 - DNA, 88 bp, Homo sapiens
agacagacaggatggggaggaggttcttcagtgtatgcctgacttaattcagtgcacaaatgagatgaatgtgaacatcccacagttg

SEQ ID NO: 309770 - DNA, 75 bp, Homo sapiens
agagatcaccgacaagatcaccacggacgagatgatcaaacgcctgaagatggagtctcgctctgttgcccaggc

SEQ ID NO: 309771 - DNA, 82 bp, Homo sapiens
ctgctcaggttgcagcaggagagaggtgatgtgtccaatctagatcccaacttctcatttgaaggcaccaaactggatgtgg

SEQ ID NO: 309772 - DNA, 76 bp, Homo sapiens
atgttccattttggcagaaaaagacttttccaggtgctggagaatctggtaaaagcaccattgtgaagcagatgag

SEQ ID NO: 309773 - DNA, 100 bp, Homo sapiens
caagagaggcatcctccttgaagtatttggctgaggagttttcaatcccatgagtgatagttgcttcaggaatcttgcagaagaccgcagtgggataaat

SEQ ID NO: 309774 - DNA, 100 bp, Homo sapiens
agcgaaggaatttcgcagagctgaagatcaagcgcctgagaaagaagtttgcccaaaagatggaactgttgacattcagggatgtgaccatagaattctc

SEQ ID NO: 309775 - DNA, 75 bp, Homo sapiens
caatgaaaacaacgtcagggaattttgcaatgttattgattgtaatcaagcactgccagtgaaagatgtagaaga

SEQ ID NO: 309776 - DNA, 100 bp, Homo sapiens
gtgccctatggggcctcgtgcacgacttcgtcgtgggtcagcaagagggccccgctgaccaggtggctgcagggaactctaatgatccaggacaaagaag

SEQ ID NO: 309777 - DNA, 100 bp, Homo sapiens
attgactatgctgaattggtgtttatggctatgaccagggccagagcactcagatctcagtcagaggagtctgcttctgcctttagtgctgatgacctta

SEQ ID NO: 309778 - DNA, 90 bp, Homo sapiens
cccaggaaagggacatctgctcctccaaggcagagcggctcccccctttcggatatatgggacacctgcaccggcattggatttggcccc

SEQ ID NO: 309779 - DNA, 75 bp, Homo sapiens
cgctggggatccctgctcttcgctctcttcctggctgcgtccctaggtctcctctgagcctccggcctccataag

SEQ ID NO: 309780 - DNA, 75 bp, Homo sapiens
tcaggaaaagtggcagtggatgatagtgaggtggtgaaaacaggaatgagaacgaggagtcaacctcaaaggctg

SEQ ID NO: 309781 - DNA, 97 bp, Homo sapiens
cttgttggtgcttcctcatgtattgaagaattccaatcccagttcatttttgacaagaagaggtatttacgcctcctggagattcacaaaataatgc

SEQ ID NO: 309782 - DNA, 75 bp, Homo sapiens
gcacctcatcccctggatgggggaccacaagatcctcatcgacagcctgacatttaccccggtaactgctgggca

SEQ ID NO: 309783 - DNA, 100 bp, Homo sapiens
gtggaagctcgaccgccagaaacttccttctcctgactcaggccacagtcttctgtgtggtccagggtggcgcgtggctgctgagcccccgcctgtgcga

SEQ ID NO: 309784 - DNA, 83 bp, Homo sapiens
gcaggtctaccgggccacgcaccgcctgctgctgctgggctgaccccgcactacatctacccaccagccatcgtgcagcccag

SEQ ID NO: 309785 - DNA, 51 bp, Homo sapiens
cctggatgatctccagagccgtggtgatgctcgacatgcagcagaaggaga

SEQ ID NO: 309786 - DNA, 83 bp, Homo sapiens
tgcgaaggggagcctatcaaacgagagattgtcagaagcttcagttctggtaaaagagaaggtggggactttgtttgctgtgc

SEQ ID NO: 309787 - DNA, 50 bp, Homo sapiens
gaaacatcagttcttgatcctgatgagcttaattggcttagtgtcgactt

SEQ ID NO: 309788 - DNA, 100 bp, Homo sapiens
gccagtcttctatgtttccacatcggtcagaaaaagattgcacacatggtcttctgaagaagccatgggtagctgttgtagctgtccagataaagacact

SEQ ID NO: 309789 - DNA, 114 bp, Homo sapiens
atgaagtattaattcttccactgatatctcaaaaggtgatctggacaaaggaacaggtatctcagaatggacagcaaattatggatgaacctatgggagaggaggagattaacc

SEQ ID NO: 309790 - DNA, 96 bp, Homo sapiens
tgcagatgttgggatgagagtcggagccgaataccaagctcggatccctgaatttgatccaggacacattcagctaacgtattttagcaggtggag

SEQ ID NO: 309791 - DNA, 83 bp, Homo sapiens
actatcctcggtgctgtggtgcagagctagttcctctccagctcagccgcgtaggctgaccccgcactacatctacccaccag

SEQ ID NO: 309792 - DNA, 100 bp, Homo sapiens
cgggatcgtgaccgagaccgtgaccgagagcgtgaccgagagcgcgaatatcgtcatcgttagaaggtgaaatggcatttcaatatcaaccaaaaaagat

SEQ ID NO: 309793 - DNA, 43 bp, Homo sapiens
cttcgtacccgtcttgattgagaacatggtccaagacaattcc

SEQ ID NO: 309794 - DNA, 85 bp, Homo sapiens
tacctttcctgagtgtagtacggaaggcaatgagaagcacgaccttcatgttacctcccagcagggcagcagtgaaccagttgtc

SEQ ID NO: 309795 - DNA, 51 bp, Homo sapiens
catcttccatcctgagaatgcagtacatggaaaacttggggatttcacaat

SEQ ID NO: 309796 - DNA, 50 bp, Homo sapiens
ttatcagacgaaggcaaaatgtatggcagtggagctactgctgtggttca

SEQ ID NO: 309797 - DNA, 90 bp, Homo sapiens
gctagttagctgtctgttgtctgtagcccagtgtaaacaggaacatcgataagtagtgtaaaaacttgcacaatgaaatccgaagccaag

SEQ ID NO: 309798 - DNA, 82 bp, Homo sapiens
ttccagtggaaaaggcattttggaggcaggctcttgtcaggatggtgaagctgttcatcggaaacctgccccgggaggctac

SEQ ID NO: 309799 - DNA, 75 bp, Homo sapiens
ggtgaagcagtgcttcgtggtgactgaaaaagttgttgtggtgctgggacagctgcagacacagacatgacaacc

SEQ ID NO: 309800 - DNA, 100 bp, Homo sapiens
acagacaggaggagggaccacactggtggtaagagattctggcatccacgtgagcccagtgatcccaatgagcgctgcgttgtgctaaattttcgtaaat

SEQ ID NO: 309801 - DNA, 75 bp, Homo sapiens
ccgccaccgtctgaactaggatgtcccgacatgaagccatccaacatattctttacaatggatgatgtggtcaag

SEQ ID NO: 309802 - DNA, 100 bp, Homo sapiens
gaaacaaggcttccagtgccaaggtttggtgcacctcgatttggaggaagtagggcagggcccttatctggaaagaagtttggaaaccctggggagaaat

SEQ ID NO: 309803 - DNA, 82 bp, Homo sapiens
gggggattcgcagggaggatgtcgggacaccccggaagctgggaaatggattttttatcaagcagaaatgcatcgaacaacg

SEQ ID NO: 309804 - DNA, 82 bp, Homo sapiens
cgagagcgtgaccgagagcgcgaatatcgtcatcgttagaaggcctctttgtgcagcgccttgctgacgcccagggttctga

SEQ ID NO: 309805 - DNA, 75 bp, Homo sapiens
ctgatgctctctctccagtccttgctgaagagactttccgttacatgagcagtaacgtgatgagatctattcatg

SEQ ID NO: 309806 - DNA, 50 bp, Homo sapiens
tgaaaaagttggatgtcagttaagggccataggaaaaggatacagagtag

SEQ ID NO: 309807 - DNA, 82 bp, Homo sapiens
cagagtccgcggccggggcgcgggaggtgtcccgacccaggctaagcttgagcatggctgagcaggagcccacagccgagca

SEQ ID NO: 309808 - DNA, 100 bp, Homo sapiens
tatgtcttcacagaccgagattttgatgatggcgtacttggtctggcttgggttggagcaccttcagcaagaaaagcctaggcttctcgagcctttggat

SEQ ID NO: 309809 - DNA, 100 bp, Homo sapiens
tcttggagctggaccagtacttgagaatgcctggtttcggaaatctcgattcaaaggagggaaaggaaaaaagctgaacattggtggaggaggcctaggc

SEQ ID NO: 309810 - DNA, 74 bp, Homo sapiens
gatggattattgacggtggagcaggctcttgcagaccaatttgaagataaaactacatctgtattggaacgcct

SEQ ID NO: 309811 - DNA, 82 bp, Homo sapiens
catccctgcctggactggtcctgagattcctgaatcaggtcctactgctctgttggctcatgaaataggttttggaagtaaa

SEQ ID NO: 309812 - DNA, 50 bp, Homo sapiens
ggcatttccagcccgcccacccagggcgaactttctgaccaagtatacaa

SEQ ID NO: 309813 - DNA, 87 bp, Homo sapiens
tgaagaaggtgctgagcgggcaggacacggaggaccggagcggcctgtccgagagatccgtgctcagctcacagagcagatgaaatg

SEQ ID NO: 309814 - DNA, 100 bp, Homo sapiens
aaaaatgtttctgtccaggcaagggtgtgtgctgaatgactcaaggattttttggacaccattcgcttttcacccaagatgatttgatgtcttataaaac

SEQ ID NO: 309815 - DNA, 75 bp, Homo sapiens
tcactcgaggctgtgcattgcagtatggtggccaagaacatttggatgcccctccagctgaattgcttttagccc

SEQ ID NO: 309816 - DNA, 90 bp, Homo sapiens
atccagttccaaggactccacgggggatcgtgggactttaccagatcggtttgtaataacacctcgaagacgctatccgatccatcaggc

SEQ ID NO: 309817 - DNA, 100 bp, Homo sapiens
gtcagcggtggcagtgtacagttatagctgtgaagtggattcaaggatcattcatgaaaacatagtagaaaaagagagagtccaacgaataactcaagaa

SEQ ID NO: 309818 - DNA, 100 bp, Homo sapiens
ggagtgcaagaagaaattcccacctgtcaaagagctctccaatcctgaagtcaaaatggaatgcatctctgctcttcctctgggcatcatctaatttttt

SEQ ID NO: 309819 - DNA, 100 bp, Homo sapiens
cttgttgctggactagtgatcactgtcattgtcattgttggagccattcttttcgtcccaggtgggagaaggagaagcacgaagacggggtgaagtggag

SEQ ID NO: 309820 - DNA, 139 bp, Homo sapiens
ccgagtttgcgactcgcggaccggcgtccccggcgcgaagaggctggactcggattcgttgcctgagggaactctaatgatccaggacaaagaagttaccctggagtatgtatcaagcctggatttttggtactgcaaa

SEQ ID NO: 309821 - DNA, 75 bp, Homo sapiens
gccgcttccctcaagagtaactacaacgtcaccagtggctacctctacgtgaccatcatctacaacatctccgtc

SEQ ID NO: 309822 - DNA, 97 bp, Homo sapiens
tttcatactctggcttggcaaagactgaagggaagccatggtgaatgcacagcaacttctaaacttgaagggtcaaagtgcaaagggcagcttttga

SEQ ID NO: 309823 - DNA, 98 bp, Homo sapiens
cccaaatcgtggccccttcgacctgcgctccgcgctctggcgctacggtctggccgtcggctgcggcgccatcgttccgcaagaaccgtgggcgacag

SEQ ID NO: 309824 - DNA, 100 bp, Homo sapiens
taataacctgcttaacaccacccccgacagggcggagcagatctgaacagaattaagacgaacgagctttcacaattgcagcagatgaagatccattggt

SEQ ID NO: 309825 - DNA, 98 bp, Homo sapiens
ggaacaataccaacaattggatattacatcaaccaagctgaataaccagtgtgagatcagagagttgtactgtacatgtttagaaaagaacatatggg

SEQ ID NO: 309826 - DNA, 50 bp, Homo sapiens
ctccttgttccgacatcccaaacagagatggtgaattgtctttgagtcgg

SEQ ID NO: 309827 - DNA, 83 bp, Homo sapiens
gcctgcacagccgcggcggcagcagcagtgagaggacctgaaggagaagaaggagaaggtggaggagaaggcaagccggaaag

SEQ ID NO: 309828 - DNA, 112 bp, Homo sapiens
ataaaacagctgttttgcagattggactacaagaggctaagaatattgtacacaaagattcttgatgttcttgaggaaatccctaaaaatgcagcatatagaaagtatacag

SEQ ID NO: 309829 - DNA, 100 bp, Homo sapiens
cgggctgcatgggcagcgcccgcgccccgccgctgagccgtcgcggagccgcgcagccctcggagcacgtgcttcaccgatatagacacattttgggatt

SEQ ID NO: 309830 - DNA, 75 bp, Homo sapiens
gtggtacagagtgttgagaagtttattcagaaaagcttacgatgtgaagaacttcatcttcatgcagaaaatctg

SEQ ID NO: 309831 - DNA, 75 bp, Homo sapiens
tgtcgctcgtctacttcctcagcagcaccttcaagcagatcctgtttgaccaaactcagagatcaattaaggcac

SEQ ID NO: 309832 - DNA, 100 bp, Homo sapiens
cttcggggcgcgatgcccaggccgcgccgccacgagttctccaaggagaagtacatcctggactcatcgccagagaaactccacaaggaattggaggagg

SEQ ID NO: 309833 - DNA, 100 bp, Homo sapiens
aaattctgcatggggtggagaaggcaggttcttcctcatgtgctacctgttcgtgaacctggcctgcgccgtgcagaccctgctacgtacccccaactgg

SEQ ID NO: 309834 - DNA, 100 bp, Homo sapiens
tctgagcaaggaggagaaagaggcagccgagaggcaaactgggtaggaggggagaagggtgaccgcggagatcgaggcctccaagggaaatatggcaaaa

SEQ ID NO: 309835 - DNA, 110 bp, Homo sapiens
cctctttcccccctctggagacgggccggaacctcaagaaggaggtcagccgggtgctgtgcaagcggtgcggttcacgcaaagaatctgctccacaagttttgcttcca

SEQ ID NO: 309836 - DNA, 80 bp, Homo sapiens
agcaccatggggaagcgggacaatcgggtgggaaatcctcattgacgattcaatttgttgaaggccaatttgtggactcc

SEQ ID NO: 309837 - DNA, 90 bp, Homo sapiens
ggatccgagcgaccatggtggcccgggtgtggtcgctgatgaggttgctatggcatccgtcccgagctggtcaatgaaggctggacgtgt

SEQ ID NO: 309838 - DNA, 51 bp, Homo sapiens
agcagagatgataacatgtttcaggcaagatcacgtctctggataccagca

SEQ ID NO: 309839 - DNA, 100 bp, Homo sapiens
gcgggtgacatggaaggggcagtacaagcttacgtctctgctcttcagtacaatcctgttgctgcttttgctcagaggacatccatgaccctaatggtct

SEQ ID NO: 309840 - DNA, 100 bp, Homo sapiens
atggcagccagtcagtggtggagatctcgacatggcaggagctgaggcagctgcaggagcagatccggagcctggaggaagagaaggcagctgtgactga

SEQ ID NO: 309841 - DNA, 101 bp, Homo sapiens
gtacgtgctggtcgaggaagcggagtgtgccatgagcgagagggaggctgccccaaatgaggaagtggagctgatcagaataatgttcagcatcaaccccc

SEQ ID NO: 309842 - DNA, 82 bp, Homo sapiens
ccgagcgggcggcttcctggcctgggcgctccggtggcggcggaggttagctttatacgtctacgaatatttactgcacgta

SEQ ID NO: 309843 - DNA, 75 bp, Homo sapiens
ccacctgtggatcccaagaagctgattgattctttagaagacgagttgtactgctgtcacaggaaatggacgctg

SEQ ID NO: 309844 - DNA, 75 bp, Homo sapiens
cgggcgcagtcgggctctgcaggagcgcgcggaggaaagaccacagcaagattctttcattcgtctcctcctagc

SEQ ID NO: 309845 - DNA, 75 bp, Homo sapiens
tgatgatgaaaaccctagcgcctattatagtgatatggttcacaggcaccagccagaccccctaaaccacgaccg

SEQ ID NO: 309846 - DNA, 100 bp, Homo sapiens
agccagcgcagcagccggaggaagcacagacggcggaggaggcgcagccggacatttagccgctcatcttcggaggaagagcaagcaggccctgagggac

SEQ ID NO: 309847 - DNA, 51 bp, Homo sapiens
ctaacgtgaacgcggaccaggaggcaatactgaacactgcgcagcttgcag

SEQ ID NO: 309848 - DNA, 97 bp, Homo sapiens
ccacgcgccccgcgcggcccgcccggatcgtggcctctcgagagcaaggccagccctccagatctctatattgaaagatttaatatagctcttggac

SEQ ID NO: 309849 - DNA, 50 bp, Homo sapiens
cccggcagctcgctctctcccctcagcctcccagaaggcaggattctgaa

SEQ ID NO: 309850 - DNA, 98 bp, Homo sapiens
ggggtcgggagccgcccggggcagggctcgggagagcgggtttcagaaccttctgtggtccagaaagacatttgtggacaacatgaaaatttataacc

SEQ ID NO: 309851 - DNA, 100 bp, Homo sapiens
ttataacatagcattaaggtggacagccaaacagaagctttatttgagaacaggctgaggctgaggtggcctccttgaaccgtaggatccagctggttga

SEQ ID NO: 309852 - DNA, 50 bp, Homo sapiens
gcaggcagtacccctcttctctcttattcagctgattctgaatcatctta

SEQ ID NO: 309853 - DNA, 98 bp, Homo sapiens
ggggacagggctctgtctcgcacttcccaggcccgatgagagaaagggaaagttaaggatgctggagcagaacaatggatttctctttctctttcatg

SEQ ID NO: 309854 - DNA, 100 bp, Homo sapiens
cagttgacacacctcatggtatatttgcagccagtactctatatgaacaatccgtctggatcacggatgtaggaagtgatggagcagatggtgcttttta

SEQ ID NO: 309855 - DNA, 100 bp, Homo sapiens
agctgatggttgccctggcaaaggatgatcagaagtgtgtggagactgtggagctgggcagctatgagaagtgccaggaccttcgtgccctcctcaagcg

SEQ ID NO: 309856 - DNA, 75 bp, Homo sapiens
gaaaaagcatccccgaggaggaagacgaatcgttaaacatcttaggtcaggttttgaacgaagaatgtgatcaga

SEQ ID NO: 309857 - DNA, 83 bp, Homo sapiens
cagccgccaaagaccccgtccggtaggagaatggggtactaagagaaaagcacgaagctgtggatcatagttcccagcatgag

SEQ ID NO: 309858 - DNA, 101 bp, Homo sapiens
cgagaagccccagctgcactacgcgctttctacaagttctgattaaagtcagaaatagacacaatgatgtggttcctacaatggcacaaggagtgattgaa

SEQ ID NO: 309859 - DNA, 74 bp, Homo sapiens
actcttcccggttgatcgtggattatttgaggttgctttggttgccataaatatcattggagaccctgcagatt

SEQ ID NO: 309860 - DNA, 83 bp, Homo sapiens
ccccgaacgggttgcttcccccgctgcgagatttggtcgtattgggcgcctggtcaccagggctgcttttaactctggtaaag

SEQ ID NO: 309861 - DNA, 82 bp, Homo sapiens
ttgcttttctggggagtcctggcggtttttattaaggctgttcatgtgaaagctgcgtgcccagatgcgcgacctggcacgg

SEQ ID NO: 309862 - DNA, 75 bp, Homo sapiens
caggaactcagttggtcaaaccaaagtctgaacctcagcctaataagactttcaagatattccatattctgattg

SEQ ID NO: 309863 - DNA, 75 bp, Homo sapiens
tggaaactcatctgattccagatatgatgatggaagaggcatccgcacttccactaatagccaagtagacaagct

SEQ ID NO: 309864 - DNA, 100 bp, Homo sapiens
ctctatagattctgctggtatacagctacatccaggagagaatgctgacagtcctgcagctggagctctcaaacactgctgtcctgcaccagatgcggcg

SEQ ID NO: 309865 - DNA, 100 bp, Homo sapiens
ggttcacaggaggcagaagctccaggagcagttgctggtgctgctgaagtccctagggaaccaccaattcttcccaggaaattatctcattcaaagctag

SEQ ID NO: 309866 - DNA, 90 bp, Homo sapiens
ggctgcgggaccccaggatgggggacaggaggctgcggggcctcagattaataaagaactcttcagaattcctggtgtttcatcatatat

SEQ ID NO: 309867 - DNA, 74 bp, Homo sapiens
ccatggtggccaagtcaacattggatattgttctggccaataaagatttcttctcaccactaaatccaatacga

SEQ ID NO: 309868 - DNA, 106 bp, Homo sapiens
gctccaggagggcgcaggagcgggactgagagcgcctggaggctcgagcggaggagcattggggagtcagcaatgtccgttgtgttaaatcagctgctgcccatga

SEQ ID NO: 309869 - DNA, 57 bp, Homo sapiens
cgtggacggcttgacagccctgcaccaggcagtcgatgatgtgaagaaaggttacat

SEQ ID NO: 309870 - DNA, 137 bp, Homo sapiens
cttccccaagaggaaaacacaggagaggaaggaatggctgctggtctcctcacagctgggccccgggagtgaagcatggaggtggggacagacttcaagcgatggagatataaacaacctaggtcagtcatacgcag

SEQ ID NO: 309871 - DNA, 75 bp, Homo sapiens
ggcgcccgaggggccgagcgagactattgggaagaagttacctgcaactacagcaactccagactcatcaaaaac

SEQ ID NO: 309872 - DNA, 99 bp, Homo sapiens
cggtgccatgttcttcatcggtttcaccgcgctcgttatcatgtggcagaagcactatgatgaggaggaggaggaggagaacctagatgatcaggatga

SEQ ID NO: 309873 - DNA, 74 bp, Homo sapiens
gtaaccagagaagaaaggagactcacttatgtgcacaatggagtggagaattctggaaaggtggacatctctac

SEQ ID NO: 309874 - DNA, 101 bp, Homo sapiens
ccgatcatggcggatggcccccggtgcaagaggcgcaaacaagccaatcccaggaggaaaaacgcaacgaaggttttgggaacagtaaaatggttcaatgt

SEQ ID NO: 309875 - DNA, 88 bp, Homo sapiens
gccgcccagtgggcctggagcagctgcggcggctcggggtgctctactggaaggcacgtgccttaacacctcaaactgcagaaacaga

SEQ ID NO: 309876 - DNA, 98 bp, Homo sapiens
ggagaccagacctactgcagccacgcgggcgagcggctgtgtggatgtcggcgaagccgcgggcgagggcgaagctgtgctcaggcccgggctggacg

SEQ ID NO: 309877 - DNA, 82 bp, Homo sapiens
agagctttcacgaaggcaccgacgtcatcatgctgaccaccaatcagatccgtaagaaggatatggccctgaagccacatga

SEQ ID NO: 309878 - DNA, 80 bp, Homo sapiens
gctttcaagaaattggcattgaagttacatcctgataaaaacccgtacctggagtagaacagaaaaattattatgtctgt

SEQ ID NO: 309879 - DNA, 78 bp, Homo sapiens
ttgttttttctacctgttgacgtgtcaagcactaactgaaacgatttgaacagcagcaaaaactcttagaagaagaaa

SEQ ID NO: 309880 - DNA, 97 bp, Homo sapiens
cgaaggtgctaccatcgtgagagtaaggtgggtcctacgtgtatgaactcagcgcagtcctcatacacagaggagtgagtgcttattctggccacta

SEQ ID NO: 309881 - DNA, 100 bp, Homo sapiens
gagctcagacacagagcagcagtcccctacaagtgctgtcaaagggaaaaccccccaagtaggtgacagagtattggttgaagctacttataatcctaat

SEQ ID NO: 309882 - DNA, 100 bp, Homo sapiens
gttgatgaacaatcatcagctggaactggcaaagcagctacacaaagagggtcatctcttctattgtacctgcaggtgtggactgccgctcttctaccaa

SEQ ID NO: 309883 - DNA, 99 bp, Homo sapiens
ccagaggaggcgccggtcgctggcagctgagcggcggaacccttcgctggcgggagcgcggttcggggccgcagagtaccttaacaagaaatatccgac

SEQ ID NO: 309884 - DNA, 75 bp, Homo sapiens
acatggaggcggaggtcgataagctggaactgatgcatgcatatgcgctagaacttctatttgatcagttgcatg

SEQ ID NO: 309885 - DNA, 75 bp, Homo sapiens
gaacgagtccctcttcactttcctcggcaagaaatgtgtggttcattttccagacactgaaagagcagaatggct

SEQ ID NO: 309886 - DNA, 100 bp, Homo sapiens
ctggatctcagtccacgagcccctcatctggagctttgctggccctgttgtcctggtcatagtggctccaggaggccagagctctactgaagcggcggcg

SEQ ID NO: 309887 - DNA, 88 bp, Homo sapiens
aaaagaaaagccctgaatggttcaataaggctcgggttatgtatgattttgctgctgaacctggaaataatgaactgacggttaatga

SEQ ID NO: 309888 - DNA, 95 bp, Homo sapiens
gaatctggactgtggatgattatcgattacgggggtctcgccaactcctgggctcaagtgattctcctgcttccacctccccacagtgctgggat

SEQ ID NO: 309889 - DNA, 75 bp, Homo sapiens
cgaaaagcaaggacaagaagctgtccgggacagactcggagcaggagggcgtgatggtgggcatgggtcagaagg

SEQ ID NO: 309890 - DNA, 100 bp, Homo sapiens
cccatttctacagtaacagaactaagaaaccggcatgcccagggagaaaaaactgcaggcattaatgtccgaaaggtagatcgttggccggagacaggat

SEQ ID NO: 309891 - DNA, 75 bp, Homo sapiens
ctgggtcgtcacggaggacgggaaaatccagcagcagttgtcacaggtagtactgatggaattggaaaatcatat

SEQ ID NO: 309892 - DNA, 100 bp, Homo sapiens
ggctccagacaaataaacatggagtccatcttccacgagaaaacaaaacttacctggggtccctacttatggttttacatgcttcgggctgctacatcaa

SEQ ID NO: 309893 - DNA, 50 bp, Homo sapiens
ttgagccgcgcacgctacagtacaagggatgtgcccttctcgtaaagttg

SEQ ID NO: 309894 - DNA, 124 bp, Homo sapiens
cccggccggagctgggtctggagacgccgtggcagcctgaacggagtgtgcgacggattgggaggtctgaatttcctgctgctgttcacaaagatgctttttatctttaactttttgttttccc

SEQ ID NO: 309895 - DNA, 100 bp, Homo sapiens
gcagccatggtgcggttcaagcacaggtaccgctagagcgacatgatggtggaatctgcctcggagacaatcaggtcggctccatctggtcagaatggcg

SEQ ID NO: 309896 - DNA, 83 bp, Homo sapiens
cccggctcacctggcggtgcccgaggagtagtcgctggagtccgcgcctccctgggtaagaagtttgatagctgtaggactgg

SEQ ID NO: 309897 - DNA, 100 bp, Homo sapiens
gccaatgtgacctttaaaacctatgaaggtatgatgcacagttcgtgtcaacaggtgaccaagaatatggcccaggtgaccaaagccctggacaaggccc

SEQ ID NO: 309898 - DNA, 83 bp, Homo sapiens
gtggagaaagtcgtcttccacttgcacgaaagctttcctaggccaaaaagaggtaatctgtaagtcagatgctccaacagggg

SEQ ID NO: 309899 - DNA, 90 bp, Homo sapiens
aaagccaagctcatctctgagacccggaggaggttcgaagctgagtatgtgacagaaggacagaataacgggctcccagattcacaagcc

SEQ ID NO: 309900 - DNA, 100 bp, Homo sapiens
cctgtacccattcaccggcggctaccggcggcggcgcgcagcgtgtcaggcggagagacccgccgccaggcccgcagccgtgccgggtgctcttcagcat

SEQ ID NO: 309901 - DNA, 100 bp, Homo sapiens
gtggaagttactgccgcgccaccgagtccggaccggagactttggggcctaactagattgtctaaagccccaggaaaaatggtggaaaattcaccgtcgc

SEQ ID NO: 309902 - DNA, 100 bp, Homo sapiens
tccagagctgaggactgcctgtttgcagagtacccaagtggccttggaccatctggagtctgtgcctgagaaactgagcctactagaagatttcaaagac

SEQ ID NO: 309903 - DNA, 99 bp, Homo sapiens
ggaaacctggagcggtcagagcagctggagccagacggactgctggtgtgggtcctggcaggcgccctggggctcagcctcgtcttctccctggtctca

SEQ ID NO: 309904 - DNA, 75 bp, Homo sapiens
ccattttaccttgtacccaagcatgcaaaggaaggaaatggtttccaagcttaccctgaaagaagcagatcccag

SEQ ID NO: 309905 - DNA, 75 bp, Homo sapiens
taaggaaaagaccgagcccaaggcccgctcgtgggatgagagcagatgccgcgacaatgcagatcttcgtgaaga

SEQ ID NO: 309906 - DNA, 75 bp, Homo sapiens
acttcgagttcttcgccgccgacctgaggtcatcatcagatttgaaatatttaaagtggatacaaaactatttca

SEQ ID NO: 309907 - DNA, 90 bp, Homo sapiens
gttctgcacctcaggagggaattcagcctcagtgatgtccatgagagcgtttcccaaagtgtattctgcggaactagcacctactgtgtt

SEQ ID NO: 309908 - DNA, 100 bp, Homo sapiens
cctcgagcccggggggcaccaacagtgccaggatacagggcacctcctcctccagcccatgaagcttatgaagaatatgatgtagctgagctgattcggg

SEQ ID NO: 309909 - DNA, 100 bp, Homo sapiens
tgggatcttccagttagatgaaagacggagagatgcagtgattgcattgggcatttttctgattgaatctgatcttcagatgactttgaagaagccaagg

SEQ ID NO: 309910 - DNA, 75 bp, Homo sapiens
cgggaggaacatgacatcgcggagttccaagattatcccctaaaactcatagacccaggtctcccagacagaaca

SEQ ID NO: 309911 - DNA, 82 bp, Homo sapiens
tgataaggtcaaggagcctcggaagtcaagagactcagagtcccatagattccttatggcagaaagtatgacaaggcatggc

SEQ ID NO: 309912 - DNA, 100 bp, Homo sapiens
cacgtggtacggaaccggcgccgcgcttgctgctggtaacagggccttgcctagtgggccttccttcccaggagccatgtggctagaaatcctcctcact

SEQ ID NO: 309913 - DNA, 75 bp, Homo sapiens
cccttccagctgcagcagccgcaccagcgccgggacgggggtggccgtgcagcggacaaggcaaaatctcagcaa

SEQ ID NO: 309914 - DNA, 99 bp, Homo sapiens
ctaggaagagtactccagagagcagggatatgtcaccaggactcctgacaaccaggaaggaggagtctactcttcatcttgtgttgagacttcgtggtg

SEQ ID NO: 309915 - DNA, 51 bp, Homo sapiens
gtggtcaggcggccggcatgaggaggagataagcaaggacctcagagccac

SEQ ID NO: 309916 - DNA, 98 bp, Homo sapiens
cggcctggaggagccgcagtgggtcccggacaaggaggtcgcctgcgaggccgctggccaggcctgagcctctgccaccatggccattgtgcagactc

SEQ ID NO: 309917 - DNA, 80 bp, Homo sapiens
caacgctgtgaccctgggagattactaccagggccggaggattaccatcaccggaaaccaagatcactccatggatgaaa

SEQ ID NO: 309918 - DNA, 100 bp, Homo sapiens
ttcctagagttgttcagaatcctccaaaaccagtcatgaccactagacccacagctgttaaagcaacaggtttgttggcatccaaagctgttggggttga

SEQ ID NO: 309919 - DNA, 100 bp, Homo sapiens
cttgaacaaagcagctgctttttaaaagcggtacaagaactgcaaagccctccaagagccagccaggtggtaaaggattgtgtgaaggcctgtttgaact

SEQ ID NO: 309920 - DNA, 98 bp, Homo sapiens
caaagcgttgggattacaggagtgagccaccgcgcccggccgcttgggtgatggttgcagttttccaactcgccttgtggggatggatccagaacaag

SEQ ID NO: 309921 - DNA, 75 bp, Homo sapiens
ggtgtaccaggcgaagctggccgagcaggctgagcgatacgacggtgagtggcatcaaggcgctgtacgagtcgg

SEQ ID NO: 309922 - DNA, 97 bp, Homo sapiens
gcgagtaaagtcttggacagacttaaaccagttataggggtaaacactgatccagaacggtgtttgatcagtatgtaaagaccagggcagaggaaga

SEQ ID NO: 309923 - DNA, 100 bp, Homo sapiens
taacaaggggagcttttgttggggcgacagctgctcctggctacatagctccagccgattacacctcaacaagaaggcaactgacaaacagccttatagc

SEQ ID NO: 309924 - DNA, 82 bp, Homo sapiens
cggacaaattcataaagctttacaaggttctcagagtacattcacgcccaggtggcatctggcaaagggaaactcgctcctg

SEQ ID NO: 309925 - DNA, 75 bp, Homo sapiens
atgatcgcgggctcccttctcctggaaagaccacagcaagattctttcattcgtctcctcctagcctgggggacc

SEQ ID NO: 309926 - DNA, 82 bp, Homo sapiens
tctgtcactaacaagctgcgtgatcttcggtttcctatcctgggagcaggagagtgtgcctatttgaatgacaaaggtgcca

SEQ ID NO: 309927 - DNA, 82 bp, Homo sapiens
ggcatggagcgttgccgaatccttttggaggctgccaggataataagggtgaaaaaccatacaagtgtcaaatttgcaatca

SEQ ID NO: 309928 - DNA, 100 bp, Homo sapiens
tttgaaaaagacaccttatcacccacacccacacgtgttcaatacacctcccacctgtcctcaggcatatcaaagaagctccaccatgaggcgaggtgga

SEQ ID NO: 309929 - DNA, 98 bp, Homo sapiens
ttcagtggaagcccctgcttggatgcctgtccaccactgtactgcagttcaattaacctccagaagatggctgaacctgcaggaataccagagcaaga

SEQ ID NO: 309930 - DNA, 82 bp, Homo sapiens
aaccgtgaatggtgtctggaggagtgagagccggcaggtgtggacactgccagcggctgcagccgacttggaatgacctggg

SEQ ID NO: 309931 - DNA, 88 bp, Homo sapiens
aatcctgaggaagatgaagaccagagaaaccctgcaaaggagtccctagagacacctagtaatgtctccccgagtgaaagaatcaata

SEQ ID NO: 309932 - DNA, 101 bp, Homo sapiens
gtggaaaaaacctgagaacttcctgatctctctcgctgtgagacatgtctgagactcctgctcagtgtagcattaaggatacttttgtggaactctatggg

SEQ ID NO: 309933 - DNA, 100 bp, Homo sapiens
ctggtagccaccggcactcacggagcccaggatgtgcgagttcaagtgctacccgaggtgcgaggccagctcgggggcaccgtggagctgccgtgccacc

SEQ ID NO: 309934 - DNA, 123 bp, Homo sapiens
ttttaaatcaagatttaacattccaacacataaaaattatttatccaacagctcctcccagtggttggatttcatcccttactggtctcaaccaaaatattcctgttggaatcatgatgataa

SEQ ID NO: 309935 - DNA, 100 bp, Homo sapiens
aaatcttcgacaagagctagaagataattccaatcatcttacaaaactggaaactgaggcatctaatatgaagagtgatcagcagctggactgtgccttg

SEQ ID NO: 309936 - DNA, 119 bp, Homo sapiens
ctgaatcacctcatgactagcggggcaggcctctaattcaccgcaggatttccgcattatgccagtacatacaggcttctaaagccagggatggtgccagccctttcatttcaagtacg

SEQ ID NO: 309937 - DNA, 127 bp, Homo sapiens
agagtgtgttgtgaacgaagtcagaatttcctgtgttccctttgccgctcctggagttcactgctgataccccaatgtccttctttgactttgtggttgatcctcattctttcccccgtacagtgga

SEQ ID NO: 309938 - DNA, 75 bp, Homo sapiens
gaggagtggaatgaaatacggcaccagattggaaacacactgatccgattgacatggtacatcgtaacaagtccg

SEQ ID NO: 309939 - DNA, 75 bp, Homo sapiens
cggcggcggcgctgctcccgggggcgacgggtttctgctgatgtactccacggttctgtgcagctattacaattc

SEQ ID NO: 309940 - DNA, 100 bp, Homo sapiens
gcaggtgtgtttgtacgccttcgacctcatctacctcaatggagaggtatcgaaggatgatcgcagtgatgtggagagcagctcagaggaagaagatgtg

SEQ ID NO: 309941 - DNA, 82 bp, Homo sapiens
ttacgtcctcgtgggattcgttggcggtggctgagggcagtccagatgaaaagagtaccaatgaatctgcctccagctgaat

SEQ ID NO: 309942 - DNA, 82 bp, Homo sapiens
aggagctaaagcagcgtgcgttcagccctgggctgccactgcagagccccgccatggaagacacgccgttggtgatatcgaa

SEQ ID NO: 309943 - DNA, 75 bp, Homo sapiens
aaagaccctgctcctctgttctccgcagcctgatggtgcagctggacctagctgagacagacctttcccagggtg

SEQ ID NO: 309944 - DNA, 75 bp, Homo sapiens
cttttcaatgctgcgaaagctgccaaaagtgacatgcaggctaaaggttggtcttcaggttgtggcagtcaaggc

SEQ ID NO: 309945 - DNA, 100 bp, Homo sapiens
tttcctacaactcatgcccagcagcagcaagcagaggacagttatgggatggatgggaaggttaatcagccccgtctcactgcagacatcaactggcaag

SEQ ID NO: 309946 - DNA, 143 bp, Homo sapiens
agcagagaactcggcgccgccaaacagcccagctcgcgcttcagcgtcccggcgccgtcgcgccactcctccgagcttatgcatctggatgtgacattgtaatactgggaagcgattttgaaagattacagataatcccagga

SEQ ID NO: 309947 - DNA, 101 bp, Homo sapiens
gagaaaccttggacagcagattttggtttaatatctgattgggacaacattcagacccatttccagtcatgagaattgcattttgtgaaaaaagaacaaga

SEQ ID NO: 309948 - DNA, 92 bp, Homo sapiens
ggaggacatctgggggccacaaatgctccttctcctggagacgcaactcaagacttcccaagtaagaagcggaagaggagccgctggaacca

SEQ ID NO: 309949 - DNA, 82 bp, Homo sapiens
aagcctcttctgaaggaaaagacagtgtagtcctgcaaaacattttgaggaagcctgtctagcagtccagaggagatgtctg

SEQ ID NO: 309950 - DNA, 85 bp, Homo sapiens
ttcattgagatcaacctgaatgaccaggtgtaaagtgcaagagtaatatgctatgactgaggttcatgtcagggctggtcttttt

SEQ ID NO: 309951 - DNA, 100 bp, Homo sapiens
ctgtgacctgccggtattggatgattcgtatctaagactctgggacactcctgaagtcgggaaatgtttcaccagtgatcattaaagaatgggcagctta

SEQ ID NO: 309952 - DNA, 75 bp, Homo sapiens
ccgcccgtccacacccgccgccagaagaggactgtcagaaggacgtagaaggcacggttttactgtgaggagcaa

SEQ ID NO: 309953 - DNA, 75 bp, Homo sapiens
tatggcagtggcagaagattttaattagggacagagcagaatgggctgatatagatccggtgccgcagaatgatg

SEQ ID NO: 309954 - DNA, 74 bp, Homo sapiens
caaagagcttgctccctacgatgagaactggttctacacgcgagctggtgacatccatggacaatactatgatt

SEQ ID NO: 309955 - DNA, 75 bp, Homo sapiens
caaatgcctggatcctgttgacaccccaaacccaaataaggagggttcctgcccccaggtgaacattaactttcc

SEQ ID NO: 309956 - DNA, 89 bp, Homo sapiens
gccggccaggagaaattcggtggactgagagatggctattatatccaagaggatattcctcaaagcagaaagtgaagaagaaatttttg

SEQ ID NO: 309957 - DNA, 101 bp, Homo sapiens
attcagtgtcctgaacttatgatggacagacatctggaccagttattaatgtgtgccatttatgtgatggcaaagctctattaccaggttttaaacttcgc

SEQ ID NO: 309958 - DNA, 85 bp, Homo sapiens
aaaaggatcctgactgaaagctagaggcattgaggagcctgaagattctcagatacctgtgttttgactctgttcctgtggatag

SEQ ID NO: 309959 - DNA, 73 bp, Homo sapiens
cgatcggaaaacttcgaggaattgctcaaagtgctggctggatggaggcctgcctgaaggaggagcttccttc

SEQ ID NO: 309960 - DNA, 50 bp, Homo sapiens
ctgacacttgtgtttgaatatgtgaactcaagctccatgaggagatgttt

SEQ ID NO: 309961 - DNA, 75 bp, Homo sapiens
tttgctactggtggaccctgagggtgtggttgcttcgaggagacgccgtggtggagctgggcctcaacgattacc

SEQ ID NO: 309962 - DNA, 80 bp, Homo sapiens
acaacaagcaagcatgcagcttactgcttgaaagggcatgaccattcggcccctggtagacctgttggctgtgaagaaaa

SEQ ID NO: 309963 - DNA, 51 bp, Homo sapiens
aaaagagcaggtggaaaaggaaagctgtccagaccaaaacgaagaagacgt

SEQ ID NO: 309964 - DNA, 100 bp, Homo sapiens
atcttgagtctactctgtcgctcttgtgccctagcaccccgagaaccgtcagtttgagccagatggattcaagccaaaactcgagaatttagggaacgac

SEQ ID NO: 309965 - DNA, 75 bp, Homo sapiens
ggctacacttcgatggacctgttgaaaaaaatctgggaggttgaacttattaattctttaacacctctgtgtgaa

SEQ ID NO: 309966 - DNA, 75 bp, Homo sapiens
atgcttaaaaatcaccagttactttaatgagaaactactaaagttcctggggaagcaaagtagaatttcataaga

SEQ ID NO: 309967 - DNA, 118 bp, Homo sapiens
gctacagctgcgggagagccgggtaccggccgtggaagcggccaccgactactgtcagcagctgtgccaggatatggtgcctgtcatagttgattactgccttctgctgcagcgaaag

SEQ ID NO: 309968 - DNA, 74 bp, Homo sapiens
acggcggcgagcccttccttataggcgtcagcgggggaacagctagcggcaagattcttctaacagagaaaatg

SEQ ID NO: 309969 - DNA, 100 bp, Homo sapiens
tcctggtgtccgagtgcgccctgatgctggcgcagggcacggtgggcgcctacctgggggacttgatctcatcttcatgccaggccttgggtttgacaaa

SEQ ID NO: 309970 - DNA, 74 bp, Homo sapiens
gggatcctttatcctggtcatcttctatttccaaatctgaagatgatgagaaactgaaaaagaggaaggagcga

SEQ ID NO: 309971 - DNA, 82 bp, Homo sapiens
cccaagtcgccctcggggtggcagttcccgttaaccttagccacaaagtcaaaggttcattttccagacactgaaagagcag

SEQ ID NO: 309972 - DNA, 75 bp, Homo sapiens
gacactatagtcgagccaaacagacgctccctgtgatttatgtcaagagaacctttacctactatgttcagcatg

SEQ ID NO: 309973 - DNA, 98 bp, Homo sapiens
atgagaccgcaattcgagaatcaaagggccgggagcgatgcatggcggacaccgacctgttcatggaatgtgaggaggaggagttggagccatggcag

SEQ ID NO: 309974 - DNA, 75 bp, Homo sapiens
tgggtggggacaggaaatggtgtcattatctccatcccattgacagaaagcactttaaagaggaggagacctcca

SEQ ID NO: 309975 - DNA, 50 bp, Homo sapiens
ggaagctattgctgggattttgaggagggcaatagtctgaccttgattga

SEQ ID NO: 309976 - DNA, 100 bp, Homo sapiens
ccaggacctggacccggacccaaagtgccatgtctttaatacaggggcaagtgtccgagtggtgaatcagctacttacagagatggatggtctggaagca

SEQ ID NO: 309977 - DNA, 121 bp, Homo sapiens
gccagtgcctgggccgctgggagccgttattggctgccgttaaggaccgttacgtttcccgggtcatcatggtcacaggagaccatccaatcacagctaaagctattgccaaaggtgtggg

SEQ ID NO: 309978 - DNA, 100 bp, Homo sapiens
caaaagcctttcatgattattttctctgtttgaagaacataaggacatttctcacggcctgttgtgagacgtttggaatgaggaaaagtgaacttttcga

SEQ ID NO: 309979 - DNA, 74 bp, Homo sapiens
caatggcacaaagttctctcgatcagggcatacatctttcttcgacaaaggaaccacctctgtgcagaaaagca

SEQ ID NO: 309980 - DNA, 139 bp, Homo sapiens
cgcggggagagtagggtgctgtggtctgagctagagggtgaagctggcggagcaggaggatgggcggtggacgacatccttggagaaggcagcgacgacagcgacagcgagaagaggaggcctgaggagcaggaggagg

SEQ ID NO: 309981 - DNA, 90 bp, Homo sapiens
agcagattccaaaggcacaggaagaagcttgcaggtatgatctcgtgaaatcttgagagaaactgaatgacgaatgaaactattgttcct

SEQ ID NO: 309982 - DNA, 82 bp, Homo sapiens
gccatgacgatttcaagttcaagagtgtaccttcattgtgctggatgccgagaagtggcaggcccagccaggcgccaccgaa

SEQ ID NO: 309983 - DNA, 82 bp, Homo sapiens
cccaggtggataaggaacatctcttcccagcggctcaggtgaaaggtgtagcagtcactcggcctacacccacagcatcgac

SEQ ID NO: 309984 - DNA, 88 bp, Homo sapiens
ccagtccagcttgatccacctggtggggccttcagactgcaccctgcacggctttgtgcacggagaccatatactccttgacgacagg

SEQ ID NO: 309985 - DNA, 75 bp, Homo sapiens
gccagcgcattatcaccaagtcacttggcaagcgtttagcagatcatgatcagaagcatcttcctgttcttggac

SEQ ID NO: 309986 - DNA, 90 bp, Homo sapiens
gagatatctggccgcctctgccgcagctggagaggcggggtttcaccatgttgcccagactggtcttgaactcctgagcttaagcaatcc

SEQ ID NO: 309987 - DNA, 90 bp, Homo sapiens
tgggggattcgtgcgcggtaagaagctgcgcggtagcgcggtgagcgcctagaagcctgcagctccggagcagtggccgcgccacgccgg

SEQ ID NO: 309988 - DNA, 74 bp, Homo sapiens
tgcggggctccggagaggcgcggaggccgcgctgtgcgcgccgccgaggtagttgatgtcacttggcgatattc

SEQ ID NO: 309989 - DNA, 51 bp, Homo sapiens
gtctcggagctgtggaaggatggcttgtccaaaaggaaacatcggaatgac

SEQ ID NO: 309990 - DNA, 83 bp, Homo sapiens
cgacgatcgggcctacagcagcttcggcggcggcagagggtttgcctgcaatgagatttcattctctacatttaaaggacatc

SEQ ID NO: 309991 - DNA, 83 bp, Homo sapiens
gggacaagagggatggaggcgaaaggctggatccttaatccaggccggagacaaagggcgtgatggtgggcatgggtcagaag

SEQ ID NO: 309992 - DNA, 49 bp, Homo sapiens
catgctctacacagagctgtttacagtgaagtacctggctttcctccgc

SEQ ID NO: 309993 - DNA, 100 bp, Homo sapiens
cgcctccggctgatcaagtctcctgcagaaattgaacgaatgcagattgctgggaagctgacatcacaggttttatgacttacctagtggagcctttatt

SEQ ID NO: 309994 - DNA, 87 bp, Homo sapiens
gagccgatcgccgcggggcagttcgggccggctgtcctggcgcggcctccaccatcatgttttccatcactttaatcaatcattttg

SEQ ID NO: 309995 - DNA, 51 bp, Homo sapiens
cgcggggaccgctgtgctctcgcacatccgggcaacgtttgatcctgacac

SEQ ID NO: 309996 - DNA, 83 bp, Homo sapiens
tgaagacagggagacgctgctgcagctccgggacacctggggccgccgaggcaaagatagcctgggctggaagctcttctacg

SEQ ID NO: 309997 - DNA, 83 bp, Homo sapiens
gaaccaaggagaaaccatttaaaacaggtctaaagggcatgagccagaaggagagctctaagtctgccatgatgtatattcag

SEQ ID NO: 309998 - DNA, 100 bp, Homo sapiens
gtagccgcagccgtagccaccagagaagtcggcacagttctagagataggagcagagaacgatccaagaggaggtatggacctgtctgccaatcaggacg

SEQ ID NO: 309999 - DNA, 100 bp, Homo sapiens
tgtcgatgaagatcttgattgtgacctctgtggaaaatgagccatgaaccaaccaattgtttgatgatggtgatgagcgaacattgagacgtacctcact

SEQ ID NO: 310000 - DNA, 100 bp, Homo sapiens
gaaattgcgctggaccgtcgccttgctcctcgccgcggcggggactgcagggccgagatggacgaaaaaatgtggttccttgtgttctctctgtaaatgg

SEQ ID NO: 310001 - DNA, 110 bp, Homo sapiens
cgactgtcgcttcctctccaaggatcagatgataaaccactacgcccgggctggctcctttaccacaaagggaagaaggagaaagggccaacccctgaagaagcaataca

SEQ ID NO: 310002 - DNA, 90 bp, Homo sapiens
cctattttactgataagaaaacacatctttacacactaacccaagaagatgaaaggattgttcttgttgacaacaaatgtaagtgtgccc

SEQ ID NO: 310003 - DNA, 88 bp, Homo sapiens
ctgattacaagaatcctatagaccagtgtaataccctgaatcccgtgcattccttgtaaaggttctcggtttcccccaacccttccac

SEQ ID NO: 310004 - DNA, 95 bp, Homo sapiens
gcatgggtcggtgggcggggcccagaccttttgatcctcagtattatgaagatgaatttgaagatgaagaaatgctggatgaagaaggtagaacc

SEQ ID NO: 310005 - DNA, 83 bp, Homo sapiens
cagccgcttcctggcatgtcagagaacccctccgtctatgtgcctgcaaattgtggctactaatttgccccctgaagatcaag

SEQ ID NO: 310006 - DNA, 75 bp, Homo sapiens
cctttcccgctggcgcgcagcctcagctaggtggctctggtaggcgaggaggaaggttttctgctcaaggaatgg

SEQ ID NO: 310007 - DNA, 74 bp, Homo sapiens
cggcggtccccatcagaggcctgggctgagtcctcagggttgtgagtcccggcccagcccctccacccccctgc

SEQ ID NO: 310008 - DNA, 75 bp, Homo sapiens
ggcaagaccaccttcgtcaacgtgatcgcggccctccacgcccttcaggaggagcaggccagactcaagatgagg

SEQ ID NO: 310009 - DNA, 76 bp, Homo sapiens
aaggctaatggcacaactgtccacgtaggcattcaccccagcaaggatggccaggccatgttatgggatctcaacg

SEQ ID NO: 310010 - DNA, 74 bp, Homo sapiens
tggtggccgccactgcctgcgtggccctcatcatcattgccttcagccaggggtccttgcctgcattaattgaa

SEQ ID NO: 310011 - DNA, 100 bp, Homo sapiens
ccgaccgggagggctcggcccaggtcaccggcagcccaggcgcaggtatatgccctcattttgcttaagacctctggccagagcagggcatggaagattc

SEQ ID NO: 310012 - DNA, 75 bp, Homo sapiens
ctaaaatacgaaggtttctggctgggtgcggatagatttcctaaaccgacagtggacatcttcccttgtcctggg

SEQ ID NO: 310013 - DNA, 100 bp, Homo sapiens
gggcaagcagcgcggcctcggcctatgcgaccggtggcgccggcgcggcttctgcctggagagtctgttcggcacttgaagtactccttgtttaagaaat

SEQ ID NO: 310014 - DNA, 101 bp, Homo sapiens
gcaccagcagacgtttttgaatcaactgagagaaattacggggattaatgacacccagatactacagcaagccttgaagctgcagatctgggacacggccg

SEQ ID NO: 310015 - DNA, 100 bp, Homo sapiens
cagagtgatgatgatgaggacgaaggcgtgcctgccagctaccatacggtgtctttacagatttctactgaagagggatccaccaaaagaaaaaagagcc

SEQ ID NO: 310016 - DNA, 100 bp, Homo sapiens
tcggctgttcagctgcgctccagtcggcccaggcgccgcggcgaggagcgagcgctgcgaggtggcggcctgagatcctgaggtgcagaggcaattcccg

SEQ ID NO: 310017 - DNA, 83 bp, Homo sapiens
cagcccaagtggccccaggccccgtgggagagcagcccctgtcaaagggaacaggaagcagtccacggagggtgacgccctag

SEQ ID NO: 310018 - DNA, 100 bp, Homo sapiens
ctggtgctgctgaagtccctagggaaccaccaattcttcccagagtaaagccaatcccagctgaaggaatcaagtcaaatccttccaagcggcatagaga

SEQ ID NO: 310019 - DNA, 98 bp, Homo sapiens
agaaacaaaatgtcaacaaattgatggcattcctctgaatattgatttgctgaatagcccagacttattggaagcaacgattggtgatgtaattgggg

SEQ ID NO: 310020 - DNA, 80 bp, Homo sapiens
gtgcaaccttgactgccaggaagagccagattcctgcatcagatcaatgtccgagttaccaccatggatgcagagctgga

SEQ ID NO: 310021 - DNA, 75 bp, Homo sapiens
cctggccttgggcgcttgcacagctttagcccattttcagaggttggcgatttgaaggagctgcagacactagac

SEQ ID NO: 310022 - DNA, 135 bp, Homo sapiens
cgcctgtcggcttctgacgtttaaaacagggggagcggaagggagccactggccgcggtggcagggccagcctcctgacaaggtgatccgggcgggccccgcaggaattttatcccctcaccggcctcacactag

SEQ ID NO: 310023 - DNA, 90 bp, Homo sapiens
tcactgcaacctcctcctcccagattacgctctggggaaggactgtattatgcacgggtacatgctgaaactgggaaacccatttctgac

SEQ ID NO: 310024 - DNA, 82 bp, Homo sapiens
gaagctaatcttgtacttcaagaggaggaatcacgctcggaaacaatggttgatattcactgatggactccaaagaatcatt

SEQ ID NO: 310025 - DNA, 100 bp, Homo sapiens
agcggcggcggcggtggcagcggcggaaaccgaaggggagccatggcggctgacagtcgggaggagaaagactctatcaagaagaatatctaatccgtac

SEQ ID NO: 310026 - DNA, 75 bp, Homo sapiens
cggctgcagacttggccaaatggacgggactattaagtaatctatgccagcaattatgacaatgttagcagacca

SEQ ID NO: 310027 - DNA, 100 bp, Homo sapiens
cagaatgtaccagggacacatgcagatggagtttcactcttgttgcccaggctggagtgcaatggcgtgacctcggctggctgcaaccttcacctcccgg

SEQ ID NO: 310028 - DNA, 100 bp, Homo sapiens
gttcctgcgtcccgccaaagagagagaatggcttactacacctccaggatgcagttccccatggagatggcggcagctccgggacgaccagggcctccag

SEQ ID NO: 310029 - DNA, 100 bp, Homo sapiens
tggggaggagtccagggagcccagcacaggaactcgtgtccctgaagccttgtaaagctgcggagctggttgccacccacttttctggacatattgaaac

SEQ ID NO: 310030 - DNA, 80 bp, Homo sapiens
gagtggccgattgcatcactatcagcttgtgctgcattgcacctgtcctcgcggccaaggtgctcagaggcgtcgaggtg

SEQ ID NO: 310031 - DNA, 100 bp, Homo sapiens
tggagctggtcgcagatcctgagacccggacagtggcagtgaaacaggcccagctgatccacgacaggaacaccgcgtcccacaccgcggcggcagccag

SEQ ID NO: 310032 - DNA, 156 bp, Homo sapiens
gccgccactgccattactgcaaggagggctactaccgcgacatgggcaagcccatcacccaccggaaggcctgcaaagggatgatcatggtgattttactgctgcttgtggctatcgtggttgttgcagtctggccgaccaactgatggcagtaaa

SEQ ID NO: 310033 - DNA, 110 bp, Homo sapiens
tggtttggattggatgcagaagaagtatcaaatccgctgctaaattacattggagctgggctatcagtagtaagcttaggcttgatttccgactcttttcacatgttttt

SEQ ID NO: 310034 - DNA, 100 bp, Homo sapiens
ccttgtggtcttgctgacagcgagaagcagtgggactgcttccttgacgccttagcttggagccccgttatgagtactatactggcaattgctggagaag

SEQ ID NO: 310035 - DNA, 100 bp, Homo sapiens
ctgaattgtgctgccttggccaaaagagtttcttcaaaggaaagaagcaactggaacacacatataacactaacccttccagctgcattatgagggacca

SEQ ID NO: 310036 - DNA, 87 bp, Homo sapiens
gcccatgagccggttgcgccacccgaggacaaggctttgatgaactaggtggacttctcaaaccaacagtggcctctcagaaccaga

SEQ ID NO: 310037 - DNA, 83 bp, Homo sapiens
caggtgaccggcgcgcgggagcgctacggccccaacggtcacaccgacaaatctgaagcgggtttgccaggggagtgtacccg

SEQ ID NO: 310038 - DNA, 83 bp, Homo sapiens
gctgagaagcctgacataccaggactgcctgagacaagccacaagctgataagccaatggacacgtcagtgttatctgaagaa

SEQ ID NO: 310039 - DNA, 100 bp, Homo sapiens
aaagaagaaaaactttcgcctgagcctattttggaagttcagaaacgttttcctgacggcatccccttattagaccctattgatgatatgggcattcaag

SEQ ID NO: 310040 - DNA, 75 bp, Homo sapiens
ggatctggtgtaccaggcgaagctggccgagcaggctgagcgatacgacgcgatgccctcctagctagccgtcac

SEQ ID NO: 310041 - DNA, 88 bp, Homo sapiens
agtttacacatctcacccaattcaggttaaacccatccagagtaatggctgcggccttacccaggaccctgggggagttgcagctgta

SEQ ID NO: 310042 - DNA, 82 bp, Homo sapiens
tccgcggctacgtgggcaaccgggcggccacgttcccgctgcagccctgggcgctgcctatggcacagccaagagcggtacc

SEQ ID NO: 310043 - DNA, 96 bp, Homo sapiens
aagcgttcagcctccccagacgacgatgtctcttatttggcgtgatgtgtacctctatggctgtggctgcatctgtcatgggaggtgttgtgcagg

SEQ ID NO: 310044 - DNA, 59 bp, Homo sapiens
cccagggcgccctggagcgccccccaggggtgagcccctccagactccgaataggagat

SEQ ID NO: 310045 - DNA, 98 bp, Homo sapiens
cgtgttgtccacccaagatggagttcctcctggggaacccgttcagcacaccagtggggcagtgcctcgcgtgctgagctacgtggcgggcatcgcct

SEQ ID NO: 310046 - DNA, 100 bp, Homo sapiens
tgggattggaactgtgtttgggagcctcatcattggttatgccaggccataggaaaaggatacagagtagagtttcatgaacctgaaacttggtggaaat

SEQ ID NO: 310047 - DNA, 90 bp, Homo sapiens
aatcggggagcgtccggagctagctggatcctctaggcagcattccccgtcggagccctttctagagaaaccagtgccggatatgactca

SEQ ID NO: 310048 - DNA, 100 bp, Homo sapiens
ctgctatcagtgcccgctttgttcagctgcagcatggagagatagataaacgggttatacattggctcttcaaagacgttcacctcatcagagaaatccc

SEQ ID NO: 310049 - DNA, 82 bp, Homo sapiens
tagaagaataagagatgtgattaatgtattccaccacctccgccagttaagaggaaaaagggctcagatgagaccatccgtg

SEQ ID NO: 310050 - DNA, 100 bp, Homo sapiens
ataaacccaaagaaaccaagtctgaagagaccctggatgaggtgtccaaggcagctgcagatttgatggcctactgtgaagcacatgccaaggaagaccc

SEQ ID NO: 310051 - DNA, 115 bp, Homo sapiens
ccccgcagaggaccccccgacaccagcatggactgctgcaccggccgttgctccagggagaactgcaaatatcttcatccacccccacatttaaaaacgcagttggagataaatg

SEQ ID NO: 310052 - DNA, 100 bp, Homo sapiens
gattacccgttaagtcccccaaagatgagatttacctgtgagatgtttcatcccaacattgttgacctcctgtactggagagacattaagaagactggag

SEQ ID NO: 310053 - DNA, 100 bp, Homo sapiens
aggacccagagcaggacagcggcccggaggacctgcctctcgtcagcctggcatgggagggcaggattgtggtggtgggatttgctggaggaaacattgc

SEQ ID NO: 310054 - DNA, 97 bp, Homo sapiens
ggggagcaaacacccaccttagcacctttagtttcacgaaggtcgacgtgggccagcagactgctgtggatgtttttcgaaggataattttggaggc

SEQ ID NO: 310055 - DNA, 75 bp, Homo sapiens
cgcggccctggaggccaggctgtgggagaccgaggtctgctggagtttgctggaggtccactccagaccctgttt

SEQ ID NO: 310056 - DNA, 98 bp, Homo sapiens
cggccgcctggctccccatactagtcgccggtggtgaaattgcctctacctttgatcacccagaactggtgaagcttggaagttgcaaacttatcgag

SEQ ID NO: 310057 - DNA, 50 bp, Homo sapiens
cgggaaaacactttccttctcaagtttaatgtctacacaaggaagtacag

SEQ ID NO: 310058 - DNA, 101 bp, Homo sapiens
gtaaaaggctgagaagcttaaggtgtcatttgcctatgctgtatattggattagaatatggtttgaccaataactcaaaactagctgaaaggttcttcagc

SEQ ID NO: 310059 - DNA, 97 bp, Homo sapiens
accgaatggtcaaccattttattgctgagtttaagcgcaagcataagaaggacatcagtgagaacaagagagctagaccttacatgacccttggaac

SEQ ID NO: 310060 - DNA, 100 bp, Homo sapiens
cagaagtacgaaatgctgtgccgtggggagggtatcaaaatggaactcgaatcatttatgacagaaagtttctgttggatcgtcgcaattctcccatggc

SEQ ID NO: 310061 - DNA, 100 bp, Homo sapiens
tggcgctgaaacggattaataagtactatactggcaattgctggagaagattttgcaattgttgcttctgatactcgattgagtgaagggttttcaattc

SEQ ID NO: 310062 - DNA, 75 bp, Homo sapiens
ggcggttctgctttgaggtggtgtccaccagcaagccctgagcctgtgcaattatttcgagagtcaaaatgtgga

SEQ ID NO: 310063 - DNA, 50 bp, Homo sapiens
ctcggaatggaaggatgacgagttcgaagcattcagcaaacaatggcaag

SEQ ID NO: 310064 - DNA, 100 bp, Homo sapiens
tgatgctggtggaccctctgatccgaaagccggatgcatatactgagcaactgcacaatgaggaggagaatgagcctggcagtgagctggacaacttgga

SEQ ID NO: 310065 - DNA, 100 bp, Homo sapiens
ctgctccgtggtctcagcccaggacctccaggggaacaatgaggcctacgcagagctcatcgtccttgatggcagtggcagcaccatgatgcaaaccaag

SEQ ID NO: 310066 - DNA, 80 bp, Homo sapiens
gccggggcagtttcagtctccaccccaaatgcagagaggagtctgcaatgccgagtggaggaaggaggaaccggagtgtg

SEQ ID NO: 310067 - DNA, 83 bp, Homo sapiens
cttcactccagtgcctccgacgcctcctgatgtctatccagaagttaaaggagagattgctcgtaaagatgaaaagctgctgt

SEQ ID NO: 310068 - DNA, 75 bp, Homo sapiens
tacagcatcgtggcgctgggcaatgacatctacgtgacgggtgtgaccatgaagctcatggatgaggtcgccggg

SEQ ID NO: 310069 - DNA, 100 bp, Homo sapiens
ctcggagaccccgcgccgacggctgctcaaacatcaggggggggccctcagcctcttggccttgaacgggctgttcatcttgattcacaaacacaacctg

SEQ ID NO: 310070 - DNA, 87 bp, Homo sapiens
cacagccggcgctgatgctgggaggcctccagggatggagagtggcctggctggcaacggcacagcatctggaatcaagagacccat

SEQ ID NO: 310071 - DNA, 75 bp, Homo sapiens
aagaaacatcgagtcactttgcctggacaggaggaaccctctcgagatgctgctgtgcagaagattgagactatt

SEQ ID NO: 310072 - DNA, 83 bp, Homo sapiens
gaagaatattcccaagtccttcacccggaaagaagcttccggttctgaggtcctggaggtgccatttccctctctgttgaagc

SEQ ID NO: 310073 - DNA, 100 bp, Homo sapiens
tgagccttacggagccgtctaccagatcaacgtcctccgggaccggagtcagaaccctccgcagagtaaagttgaatggatcgcagcagttaccattgct

SEQ ID NO: 310074 - DNA, 98 bp, Homo sapiens
ttgaagatcccccggaccaggggcgagggctacccgctctttgccgtgacaacaccgttcccccagccgggctgggaaaacaaagtgcatgatgaagt

SEQ ID NO: 310075 - DNA, 83 bp, Homo sapiens
cctttcccggagagtacatccccaccgtaaattccgggtagatatgcctggctcaggcagtgcattcatccccaccatcaacg

SEQ ID NO: 310076 - DNA, 82 bp, Homo sapiens
cagagagaggacgtggctgaagacaccaaagatgggggaggggaaggagcagctgatgagccagatccgggagacgcagcag

SEQ ID NO: 310077 - DNA, 98 bp, Homo sapiens
aggacgttggggcggcctggctccctcagggctgaaaacacagttaaatcactttcaaagttaaaagactattaagaacacaagatggggactcctgc

SEQ ID NO: 310078 - DNA, 98 bp, Homo sapiens
ggcagactggtgacttcacttttgagtgcaactgccttccagaggccatgtggaagtgttacatcaccttttgcttggaaagatttactaagaagtca

SEQ ID NO: 310079 - DNA, 83 bp, Homo sapiens
cccacctggcggccatcgtcatcctgctgctgaagatctggaagacgcgctcctgcgccgatggtcagtaggacagaaggtaa

SEQ ID NO: 310080 - DNA, 83 bp, Homo sapiens
catgggtgtcagggttatctgtggacattgcaagaatacttttctgaacacaccacagccatcagcactggaatgcaaagacc

SEQ ID NO: 310081 - DNA, 75 bp, Homo sapiens
gactgcgcccccgggagcgggcgcccagaggtgaaaggtgtagcagtcactcggcctacacccacagcatcgacc

SEQ ID NO: 310082 - DNA, 82 bp, Homo sapiens
tgaacttatccagaaggatatggatattaccctggtcaggcaacagctggaaacagagaagaaaaggagagaaaccgtggag

SEQ ID NO: 310083 - DNA, 83 bp, Homo sapiens
cttagtttttgaacaaagaaaatcagatggagttcacacctcaacgggacccaggtggagtctgtacagctcaaagtcaacat

SEQ ID NO: 310084 - DNA, 75 bp, Homo sapiens
tatcctggacacggcatgatgttcgtccgcaacgattgcaaggtgccagaggacgagctggtgtccacgctgaag

SEQ ID NO: 310085 - DNA, 75 bp, Homo sapiens
ggaaggcgtccgttggccttcgtacccgtcttgattgaggtattttgaaggtggcgtctcatctgtctacctctg

SEQ ID NO: 310086 - DNA, 121 bp, Homo sapiens
ctcaagaaccagctggaaagcctgcagcggcgtgtagaagacgaagtcaacagtggagtgggccaggtgcagcagttcctgcggcaagcccagcgggggacagaggaaaaggagagagagg

SEQ ID NO: 310087 - DNA, 74 bp, Homo sapiens
caaaaatgctactgtgcacccaggcctggagttgccatgcaaagggcgttgtgaatacagctgtgtctgcagca

SEQ ID NO: 310088 - DNA, 75 bp, Homo sapiens
caaattcatcccagaaatctaagagcctactttggggataaaggattatttggtcttctggatttggaggcaatc

SEQ ID NO: 310089 - DNA, 90 bp, Homo sapiens
ctagccagactggaatttgagtctttggaggcactcaagcagcagcaggcgcggggcgaaggagctgctagaacaatgctgaggcgggtg

SEQ ID NO: 310090 - DNA, 83 bp, Homo sapiens
tggagatgaagaagaagattaacctggagttaaggaacagatccccggaggagaacccagtgacttgattgtaaaaatttaca

SEQ ID NO: 310091 - DNA, 82 bp, Homo sapiens
aaaagagcaaagataagaagagaaaaagagaagatgaagaaacccagcttgatatgttgtatcaccttttgccatgatagca

SEQ ID NO: 310092 - DNA, 50 bp, Homo sapiens
tcaagaacaaaggccgcgacttggagccatggaattccatgaacacttgc

SEQ ID NO: 310093 - DNA, 98 bp, Homo sapiens
aagggtcgcctaatcatcgaatttaaggttcctggatgcctatgctgagcacaagttacagttctgggcagtgacagctgaaaatgagccttctgctg

SEQ ID NO: 310094 - DNA, 124 bp, Homo sapiens
cggctctcggagccggcgcgaatccggcccccgcagcgggacccggtgtcatgcggttcctggtgtccaagcggaagttcaaggagagcctgcggccctacgacgtgatggacgtcatcgagca

SEQ ID NO: 310095 - DNA, 74 bp, Homo sapiens
ctccctgcgaccgtcgcggaccatgggcgacaaagggacccggattttttatcaagcagaaatgcatcgaacaa

SEQ ID NO: 310096 - DNA, 75 bp, Homo sapiens
gccaggacccactggaagcctagaaatgaaatctctaccccaaatttgcgtcaccctgggcatcttcaccttgtc

SEQ ID NO: 310097 - DNA, 83 bp, Homo sapiens
cagacctctgacagacctgattagcctgctcattccactgctgatcctggagaaactaaaaccttctgcacagcaaaggaaac

SEQ ID NO: 310098 - DNA, 98 bp, Homo sapiens
acaggctcagtctgcggccaagactccatcctgcaaggtatgattatcgggaaatgctgcacaatgccactttctgtctggttcctcgtggtcgcagg

SEQ ID NO: 310099 - DNA, 75 bp, Homo sapiens
tagatgcttaccaaaaacatcctgaatcagaatggccgagtgacagtgaggattcacatttgggttatttcaaga

SEQ ID NO: 310100 - DNA, 96 bp, Homo sapiens
cgaagagcccgggcggcgctcgtacttctggccactgggcgagcgtctggcagtctattcttattctgagaaggaacttatatgccacaatcagtt

SEQ ID NO: 310101 - DNA, 76 bp, Homo sapiens
ggaggcgagctagccgggagttacaccgccaccgccaggacatcaatgcaagcttgaataagaaaaacaaattctt

SEQ ID NO: 310102 - DNA, 99 bp, Homo sapiens
tcaaaagaattggccaaagaagttgagaaaatgggagcagttttcatggatgcccctgtttctggtgaaacctctgtagaggagcaggatgcaaccgac

SEQ ID NO: 310103 - DNA, 90 bp, Homo sapiens
accgcaaggagatgcagctgtacaacagcatcttcagcctgctcagcttcgagaagattggctacacagatgacggtcgaaccaaaccca

SEQ ID NO: 310104 - DNA, 90 bp, Homo sapiens
gggagacacgccaaagctcccaagaaggcagacggtaacaagtactccttgctggattgaacttcatctgaatggacctctacagtggtt

SEQ ID NO: 310105 - DNA, 83 bp, Homo sapiens
cagagggccgagaaggacaggatcaggaatacggggtgctttgcattcaggaatacagaaaaaacagcaaagtggagtcaagt

SEQ ID NO: 310106 - DNA, 82 bp, Homo sapiens
tttctgttaaggaactcgatttatatttggcatactttgtgcatgcagcagttaataaaggtatccatggagaacactgaaa

SEQ ID NO: 310107 - DNA, 82 bp, Homo sapiens
ggagcgtcaacagcagcaccatgggatgtccttacggacctgtcagcggagagtgaggtgctggacgtggagtgtgaggtgc

SEQ ID NO: 310108 - DNA, 75 bp, Homo sapiens
ggagccagttaccatgactcatccagaacacagatatgtagaactcttcttgaattctacagcaggagcaagcgg

SEQ ID NO: 310109 - DNA, 80 bp, Homo sapiens
aggaggaagaagaggaggaggaagaaggtggatgtcaccagcaaggcggtgacagaagtgctggccaggaccatcgagta

SEQ ID NO: 310110 - DNA, 75 bp, Homo sapiens
gctgccgctgctggcggccctgcttcagggggatatgagactttctactcggaatatcctgagtgttgcgtggat

SEQ ID NO: 310111 - DNA, 118 bp, Homo sapiens
tggagctgcccggggcggtccctggctgcgtgcacagcgccttgttccagcagggcctgatccaggtccagtggcattgcagagcacggatggttgcaggagccaacttttacattgt

SEQ ID NO: 310112 - DNA, 88 bp, Homo sapiens
agcacctcgtgaaccactactactgcaagcgccccatctatgagttcaagatcacatggtgagaatgtaactggtcactacatttccc

SEQ ID NO: 310113 - DNA, 82 bp, Homo sapiens
cgggcggcttcctggcctgggcgctccggtggcggcggaggtcctcagccctcgctctcgctggcggagcagcacctggagt

SEQ ID NO: 310114 - DNA, 80 bp, Homo sapiens
ctctccagcaccagcttccagttagtggatatagcacaccatccccagccagtctgcagggaactggccaggcaaggggg

SEQ ID NO: 310115 - DNA, 75 bp, Homo sapiens
tccgatgcaccctttttgtcagattatcaggatgaggaattcaattcgtcataatctgtccctacacagcaagtt

SEQ ID NO: 310116 - DNA, 100 bp, Homo sapiens
gaggtgcttggtagcgcgccgtagctgcttccacgtccttgcttcacctcaggtaaagatataaagatgaagcgcagctgtataaagaagagcacctgag

SEQ ID NO: 310117 - DNA, 90 bp, Homo sapiens
ctgctcgggccgcgggctgcggacgctcggtcccgcgctgcgcatccccgcggacgccacagcgctttcaaaaggtgatgacctatcaac

SEQ ID NO: 310118 - DNA, 83 bp, Homo sapiens
tcacccgcgtgctaatggtggaaacccacaacggtttccagccaatggattctggtcaactggtggagattggctgacaccct

SEQ ID NO: 310119 - DNA, 100 bp, Homo sapiens
ccctcttgtcctctttgaagcagaaattgaaaagtactgcccagagaattttgtagacatcaagatgtgcatgacatcacgttcgacccggacacagcac

SEQ ID NO: 310120 - DNA, 74 bp, Homo sapiens
ggggattctcgacctgctaacagaactggaccttttcggtgtactttcggctccatgcttccatcctgaagctc

SEQ ID NO: 310121 - DNA, 75 bp, Homo sapiens
cgaaggagcggccgggagcccgccgcgctggtagcgaagcttgggaatgatgccgtatcccaggattcttccagc

SEQ ID NO: 310122 - DNA, 83 bp, Homo sapiens
gtcctcacctcgctactcgcttgcctacccgccggcccgcgggtctacttcctcaaagagtgtgaacatggctacgcctcttc

SEQ ID NO: 310123 - DNA, 75 bp, Homo sapiens
ctgacccctcgggcacataccatgcctggaaggaatcagagatcattgatttcttcctgggggcctctctcaagg

SEQ ID NO: 310124 - DNA, 100 bp, Homo sapiens
gcagatcgatggccgagtgctcgagttctggtcagcctccgtctcatgccagtcccaggaccagactgccgtgcgcctcgccctggagcagattgacctc

SEQ ID NO: 310125 - DNA, 49 bp, Homo sapiens
tttgaattcacgcttatggtagtgggaataagacgagttggaagaagac

SEQ ID NO: 310126 - DNA, 100 bp, Homo sapiens
cccactacctcctcgtgctcagcctggcgccggagctgaaacacgacgtgaaggtataaatgaccaaggattgtacagagttgtgggggtgagttcaaag

SEQ ID NO: 310127 - DNA, 75 bp, Homo sapiens
gaagatcgccaagactcacgaaggctaaaggttggtcttcaggttgtggcagtcaaggctccagggtttggtgac

SEQ ID NO: 310128 - DNA, 74 bp, Homo sapiens
aatttatctagaggaaaacccagagaaaagtgaaacaattcaggacactgttaaagtattgcacaatcagctgg

SEQ ID NO: 310129 - DNA, 100 bp, Homo sapiens
ggtgatccgagaggagagcgcggccgactgccagccccctgccctgagccagctggtgaacctgtaccttgggaggtcacactttctctggaaagagccc

SEQ ID NO: 310130 - DNA, 82 bp, Homo sapiens
tggccgtggctaccccggatttgctccaagctatggctatcagttcccagatatgacaatggatgatgttcgggaatacgag

SEQ ID NO: 310131 - DNA, 82 bp, Homo sapiens
cgcgtcccgctcgctgggagagagccaacatgcccatcactcggatgcgcatgagaccctggctagagatgcagattaattc

SEQ ID NO: 310132 - DNA, 75 bp, Homo sapiens
atcggtagcgcctgctgcccccaccagtctctcagcaaacctgctgggcgacagcggactcagatgccttctgga

SEQ ID NO: 310133 - DNA, 106 bp, Homo sapiens
gggccacaaagtgaccaagaacgtgagcaagcccaggcacagccgacgccgcggggctcgggacgtgtacgaggaggccatccggacagtgatgaccgtgcgggac

SEQ ID NO: 310134 - DNA, 101 bp, Homo sapiens
cttgattttaggatttctgacctccagactaatcccacgtggcgaagtctcgattttggaattatgccagaccgtcttgatacatctgtgtcttgtttcgt

SEQ ID NO: 310135 - DNA, 51 bp, Homo sapiens
tttatccaacagctcctcccagaaatgcactcggtgatggaaagagagcca

SEQ ID NO: 310136 - DNA, 83 bp, Homo sapiens
atcggccagaaccaccagggcgacctggacgtagccaagcgcatgatccgcatggccaagaactcccccactggaaaggattc

SEQ ID NO: 310137 - DNA, 75 bp, Homo sapiens
acacatcaagttaaatttggtcaacaaaatccacgtcagtctggcttgccacgcaaaaccacagcgccctggtaa

SEQ ID NO: 310138 - DNA, 83 bp, Homo sapiens
atctggcctccatcttcggcaccgagaaagacaaccgcggcgagtcctttgcacatgttggcaacacacgcatccgcatcggc

SEQ ID NO: 310139 - DNA, 100 bp, Homo sapiens
gacgccctgagctcccattaggagccgctggctgcggcagcaggggactagcgtgagaggtaatcagatcctgtcccttgggagcctctcaaaagatcag

SEQ ID NO: 310140 - DNA, 83 bp, Homo sapiens
gtacatgaagacacggcttttccagacctcgaagtagggggaaaactgcagtggaagatgaggacagcatggatgggctggag

SEQ ID NO: 310141 - DNA, 100 bp, Homo sapiens
caagatggccgcagtcggcaaggagagacgtcgctgaggggcttgcctgaagcgagggcggactctgacaagcgtcatgccagtgacttcgccctgtgga

SEQ ID NO: 310142 - DNA, 90 bp, Homo sapiens
ttccagaacatctgggagaatatttaatggaaaatcgcttggttaaaacctgacacttttaacagactccacgttttgcaaagatcggtt

SEQ ID NO: 310143 - DNA, 97 bp, Homo sapiens
ccagatgctcataaggattgtcctctttctacaaaagtgagaaagatcagtctaaagaaaaggagaagaaagtgaaaaaaacaattccttcctgggc

SEQ ID NO: 310144 - DNA, 75 bp, Homo sapiens
cggggctgtcccagtattaaaaggtggccatccagctgaacgacacccaccccgccctctccatccctgagctca

SEQ ID NO: 310145 - DNA, 75 bp, Homo sapiens
gagagcgcgctctgcctgccgcctgcctgcctgccactgagggtggcccagttgaaatccttcccttcctctacc

SEQ ID NO: 310146 - DNA, 82 bp, Homo sapiens
aagatttcatggaaaacttttctcaagttactgtaaaatggggaaaggagaaatttgaaggtgtagaattgaatacagatga

SEQ ID NO: 310147 - DNA, 83 bp, Homo sapiens
gaaggagcgcacggagtttctgcagcgggactcatctgatgatgtgagaagagttcagaggagggagaaaaatcgtattgccg

SEQ ID NO: 310148 - DNA, 100 bp, Homo sapiens
agtccaactacttccttaagatcatcgactggacctacagagacatctgggattttctgcgtcagctgtttgtcccatactgtatcctgtatgaccgagg

SEQ ID NO: 310149 - DNA, 83 bp, Homo sapiens
cgcagcccgggcccaggccccggcagcgcctgggacaagtacctggagtagaacagaaaaattattatgtctgtgttcccttg

SEQ ID NO: 310150 - DNA, 100 bp, Homo sapiens
ccggtgcccgaggaggcagccaagctcatggcctgccactgcgtgcgaaaaccaattctgtgtcctcggaggaccacagcccagttgggccccaggcgaa

SEQ ID NO: 310151 - DNA, 83 bp, Homo sapiens
cttagacgctggatttttttcgggtagtggaaaaccagggggagaagcgagcggacatccagctgaacagcttcggtttctac

SEQ ID NO: 310152 - DNA, 100 bp, Homo sapiens
ccggcctgaggtgtcggccggatccctccttctcccggcgcctcaagcggaagtgaacacctacctcttcatgatgcaagcccaaggcattctgatccgg

SEQ ID NO: 310153 - DNA, 100 bp, Homo sapiens
tttcacacttcctgtcattggcttatacccctacctgtgtcattggccttaacaaggacttaaaggtggtctccgtgggcatcaaagacgtgtttgactt

SEQ ID NO: 310154 - DNA, 82 bp, Homo sapiens
agccgatccagcctgcggagcctgtggggcaggagagaacattgaaagtattctctaagctatttgaagagagtgactaaat

SEQ ID NO: 310155 - DNA, 100 bp, Homo sapiens
aggggaatttccttgtgcctccattcccgggaggggggagcggcgttggaggccaccgtttccagtgaacagagtatctgtcaggcaagagctgctgtga

SEQ ID NO: 310156 - DNA, 95 bp, Homo sapiens
ctgtcatcccacctgagaaccatgctcaccgaccctcttgcattcacaagagatgggctctgtggtctgtggaatgaaatggttaaagatggaga

SEQ ID NO: 310157 - DNA, 100 bp, Homo sapiens
ccggccagcggtccggccaaggacgctgagcctcccaaagtgaaatgcctgaccaagatctggcaccccaacatcacagagacaggggaaatatgtctga

SEQ ID NO: 310158 - DNA, 118 bp, Homo sapiens
agaccctggagcctcagttggaagcagccgatccagcctgcggagcctgtggggcagacaatgcagatcttcgtgaagactctgactggtaagaccatcaccctcgaggttgagccca

SEQ ID NO: 310159 - DNA, 106 bp, Homo sapiens
ccacagaatagacctgaagacaaaaatccagaagtacaagcagtctggtgttccatcttaacataagtcaccaacttctaaacctggcactgggcatttgaagaat

SEQ ID NO: 310160 - DNA, 75 bp, Homo sapiens
ccttcctctcctgcgtgagaccagaaagctgggagccctgcgtggagtttaatggatcgagaagtggcgttgctt

SEQ ID NO: 310161 - DNA, 100 bp, Homo sapiens
gacagccggcggcggagcggccggtccacggaggagagaatcacattttggaagatgtgaacaaatgtgtcattgctctccaagagaaggatgtggatgg

SEQ ID NO: 310162 - DNA, 89 bp, Homo sapiens
ggcggcggcggcagctgcagtgacatgtccagcatgaatcccgaatagcccacgaggactcggagaagctgcgggagatcgtactgccc

SEQ ID NO: 310163 - DNA, 75 bp, Homo sapiens
gccagaaggaagatggcggatctggaggagcagttgtctgatgaagagaagtgatcgtaaacttgttgataaaga

SEQ ID NO: 310164 - DNA, 100 bp, Homo sapiens
cgcgccggctgctctttccgggactctgtctactagtgacgatgtcgaagacagggaaaatgaaaagggtcgccttgaagaagcctacgagaaatgtgac

SEQ ID NO: 310165 - DNA, 75 bp, Homo sapiens
ccgccagctgctccggagatacggatttgcatgaagatgtcgaagaagctggtgcactgcagaaaaatcatgctc

SEQ ID NO: 310166 - DNA, 98 bp, Homo sapiens
cactgcccgaggactggaagaaggaaaagaaggcagtcacgtttttcgatgatgtcacagtctacctgtttgaccagcctccagggtcgtatagacct

SEQ ID NO: 310167 - DNA, 51 bp, Homo sapiens
caggcggcggcggcggaacgccaggcaggtaccaaaggtgaaatgggtatg

SEQ ID NO: 310168 - DNA, 75 bp, Homo sapiens
agaaacacaaagtttggatgtcatatttactgaaagacaagcaatagaaatgtactgtcgagagctgacagaaag

SEQ ID NO: 310169 - DNA, 98 bp, Homo sapiens
cggagcggccgacgcccgcctcggcgcgcacatcccgcggggcccggccgggtggctgaccccgcactacatctacccaccagccatcgtgcagccca

SEQ ID NO: 310170 - DNA, 100 bp, Homo sapiens
tcccctcgtcgcagtttccagcccgacgagcttgttttgtcccggactcgtccaatggatgggaccccaatgaaatgttcaagttcaatgaggagaacta

SEQ ID NO: 310171 - DNA, 51 bp, Homo sapiens
gttgggcccagcgtccctcccggaacgtgttctaagaacggaagcatctgg

SEQ ID NO: 310172 - DNA, 82 bp, Homo sapiens
atgctggatgttcatggagtgaggccctgagcctgtgcaattatttcgagagtcaaaatgtggatttccgaggcaagaaggt

SEQ ID NO: 310173 - DNA, 100 bp, Homo sapiens
ggtgaatctggcaatggtggactatccttatgcctctaactttttacagcctttgcctgcttggcctatcaaggtcacagagttgtcaagtgaaactcaa

SEQ ID NO: 310174 - DNA, 100 bp, Homo sapiens
ctcagttgcagacatctatccgggacagagcgggatgccaccagcttgtccaaagggaagttccaggagctcctggtgggcatcgttgtggagaatgacg

SEQ ID NO: 310175 - DNA, 133 bp, Homo sapiens
acggagcacaaagacattccccttggcatcagggctgaagtggctgcgatttatgagccacctcaggcggtggaagaagatatccccatagcgaaagaacggacacatttcaccgtccgcctgaccgaggcga

SEQ ID NO: 310176 - DNA, 89 bp, Homo sapiens
cgaggcctgggacagctaccgcagcatgagcgaaagctacacgctggagggtgtgggccgaagatatgctcatgtggtgttgaggaaag

SEQ ID NO: 310177 - DNA, 100 bp, Homo sapiens
gaacctgtgatgaaaacatctgtaactactagcccacaggaaacagagcaaatgcagcgttacaatcaaagacttattgaggaattgaaaaacagacaga

SEQ ID NO: 310178 - DNA, 71 bp, Homo sapiens
accttcgacctgctcttcatctccctgctctggatcatcgaactgaatggcagagcggcttgggtaaatcc

SEQ ID NO: 310179 - DNA, 50 bp, Homo sapiens
ctaggactctatgacacggccggacagagtgatcagcagctggactgtgc

SEQ ID NO: 310180 - DNA, 82 bp, Homo sapiens
cggatcacctgaggtcaggagttcgagaacagcctggccaacatgcaaacggggattcagcgtccgatcctttggaacaggg

SEQ ID NO: 310181 - DNA, 88 bp, Homo sapiens
cctcatagagtggccaagtttccagaaaacagaaatcgaaacagatacagagatgtaagcccatctgtgtattcttattacaaccaag

SEQ ID NO: 310182 - DNA, 98 bp, Homo sapiens
ccactaccgaaaagctgtctattgaaaacacagatcctggtgccgaacatgaggacagggcaggccgaaggagaaagtggaaggaggggagcttctct

SEQ ID NO: 310183 - DNA, 83 bp, Homo sapiens
cttccctgggctggtgaagtacatgaactcagggccggttgtggccatggttggatggcaagcatgtggtgtttggcaaagtg

SEQ ID NO: 310184 - DNA, 75 bp, Homo sapiens
ccagctacatcgagaaggttcgcttcctggaacagcaaaacaaggccacctgaaccccatgtcgtacacccagca

SEQ ID NO: 310185 - DNA, 98 bp, Homo sapiens
tcactgcagaggtgctggagctggcaggacccgagtcggcccccttttggtactcccagatgcttgcaaacaacctattcgtcctcggccttggtgcc

SEQ ID NO: 310186 - DNA, 82 bp, Homo sapiens
cgggctgaagcgactgagtccgcgatggagatgcggattatatcagtgccgatgagctggcccaagtggaacagatgctggc

SEQ ID NO: 310187 - DNA, 82 bp, Homo sapiens
gggactaatgtgcggacgccgggagcttctgcgcttgctacagtccgggcgtcgggccaagtcaaattcctgcagagctttg

SEQ ID NO: 310188 - DNA, 100 bp, Homo sapiens
ctctctccagtccttgctgaagagactttccgttacatgaatgaacgggaccgggttcagaagaaaacgttcaccaagtgggtcaacaagcacttaatga

SEQ ID NO: 310189 - DNA, 50 bp, Homo sapiens
catgtccaaaccaggaaatggacaggagaagtacagcatcggggagccca

SEQ ID NO: 310190 - DNA, 75 bp, Homo sapiens
tgaaagggtcaaagtctttgaggaatgctcgaatggttgtaaatataatgaactatctctagatgatattcgaac

SEQ ID NO: 310191 - DNA, 80 bp, Homo sapiens
ataaatttcaacctccggggccacaatagcgaggggccaaaccagtgctcctgccacctctctggctgccccctagagcc

SEQ ID NO: 310192 - DNA, 75 bp, Homo sapiens
ttatgatttactggatgaactgataaaacccaccagtctagcaattctgtggtgttcttggtcacacatttatgg

SEQ ID NO: 310193 - DNA, 100 bp, Homo sapiens
ctctgccaagcgtattagctaagcatagccacgcatctgaccgatttcttaagcaggatattcaaatagaagccttgctgatgagagcctgtgagcccat

SEQ ID NO: 310194 - DNA, 73 bp, Homo sapiens
ctgctgctgttcttcgtaggcggagtcgccgagtcgcttaagagttggacagtggaggaccttcagaagaggc

SEQ ID NO: 310195 - DNA, 100 bp, Homo sapiens
gcccctcgcgtccggagtccccgtggccaggtggtgatctttgtgaagtctgtgcagcggtgcattgccttggcccagctactagtggagcagaacttcc

SEQ ID NO: 310196 - DNA, 100 bp, Homo sapiens
attggatttaaaagacagtcctcgtcagcactgactttcagctatggaatcggtctatcagccacagtctctgcaagtttccaagagcagcagaaaatga

SEQ ID NO: 310197 - DNA, 76 bp, Homo sapiens
aaaggaaggaatatatcctgactgatttgagaaggcaaccaaagtgcaggacatcaaaaacaacctgaaagaggcg

SEQ ID NO: 310198 - DNA, 83 bp, Homo sapiens
cccgctgcaaggagaagctgcacgacgtggacttctacaaggcccgcatggaggttttaaaatcaaagatgggaaaatcggag

SEQ ID NO: 310199 - DNA, 75 bp, Homo sapiens
gattgtagccataagtggacttacagcccacctgaggatattgaccataaggactcatatctcattacaagaagc

SEQ ID NO: 310200 - DNA, 101 bp, Homo sapiens
tggacgatttgggaattcaaaacttgggacaaactgtcagccttgggcgccctgcgtccggcagaggaggcgagcatcccgctcaggtgatgaggaacccc

SEQ ID NO: 310201 - DNA, 100 bp, Homo sapiens
attccggacacataacaagcagcagtgaggacaccaaaggatccacccacttcagtttcccttggactgcgaatggaagaaatgattttcaacttggcag

SEQ ID NO: 310202 - DNA, 89 bp, Homo sapiens
agaggaagatgcctagcacagaccttctgatgttggagtgtgaggaagaggctgtctgtgtcattatgtgtgcgtcggtcaagtataat

SEQ ID NO: 310203 - DNA, 75 bp, Homo sapiens
agcacagctggccaatgaaaagcagaagtgtattgattctgcaaatttaaagattaaggcagttgacaatggtcg

SEQ ID NO: 310204 - DNA, 97 bp, Homo sapiens
gcaaccgatggagacgcagtaagcgagaatatgacagatacctagcatctagcaaaataatggcagctgcttaccttgaccccaacttgaatcacac

SEQ ID NO: 310205 - DNA, 90 bp, Homo sapiens
attggtggatctgaagtacaaaatattttccaggagccagatgaccaagatgctccagatgaacatgagtcgcctccacctgaagatgcc

SEQ ID NO: 310206 - DNA, 100 bp, Homo sapiens
caaaaacataaagctctcagaaagagtactgattcctgtcaagcagtatccaaagaatgtgacagtgatgataacatgggtgccaaaaatacttcaatag

SEQ ID NO: 310207 - DNA, 100 bp, Homo sapiens
aaggaagctatgaaagcagaggcaggcccagttgaacaacactgggctggcttagatgaagatgaagatgcacatgtctgggaggataattgggatgatg

SEQ ID NO: 310208 - DNA, 100 bp, Homo sapiens
caatgttctcgatgccaatctctgcttgaaaggagaagacttggattctcaggaggtgggccccactatggtgggcgatgaacagtcggatccagagctg

SEQ ID NO: 310209 - DNA, 95 bp, Homo sapiens
cttcacaagctaatggatggttccttgcaaagggcacgtatagcattggtaaagaacgatcgtccagtggaggcatatggctacccattctcccc

SEQ ID NO: 310210 - DNA, 75 bp, Homo sapiens
catcagaggcagacaaaaacctttccaagcaagcatgggacaccaagaaggttgggcccgaaggcatcctgcaga

SEQ ID NO: 310211 - DNA, 98 bp, Homo sapiens
caacctggtccgctgcctcttcggccatggaagctgccggcagccctgcggctacggagacaggatgaccagtgtcccagtgaaggaacgagtgaagg

SEQ ID NO: 310212 - DNA, 100 bp, Homo sapiens
attggctgttcagaggacctcaaagactgtgagatggacagagacgtatgtgcgttggtctcctaagggcacctacctggctacctttcatcaaagaggc

SEQ ID NO: 310213 - DNA, 98 bp, Homo sapiens
agaacgttgcaaactctggaaaaaaacttgggttggtcaaagaaaaagtgatgtatgaaaaagaggcaaaacaacaagaagaaaagattgaaaaaatg

SEQ ID NO: 310214 - DNA, 80 bp, Homo sapiens
cctttctggtgggaggcttgattgaactcccccactggaaaggattctgaaagaaatgaagtcagccctcagaaatgaag

SEQ ID NO: 310215 - DNA, 82 bp, Homo sapiens
acgtcttccccaaccagcctggaggcaagaggctcctgcagacccctggcttcctccagggtgtcggcgccgagctgatggg

SEQ ID NO: 310216 - DNA, 83 bp, Homo sapiens
tctgacagcatactggaggccattcagaaaaagcttgtatttgtgtggaagtaatcgaaaagacaacatatttattgatcctg

SEQ ID NO: 310217 - DNA, 98 bp, Homo sapiens
aactgggcaaaagaagtacaaggaatttcagaacaacagaaccaagttgtattgttagacacactggaacaagagatttcaaaatttaaagaatgtca

SEQ ID NO: 310218 - DNA, 75 bp, Homo sapiens
ctggcacgggaccctccagcacagtgttcagcaggtcctgttggagatgataacaatgcagatcttcgtgaagac

SEQ ID NO: 310219 - DNA, 75 bp, Homo sapiens
gaacctccggagcaatgatacaggattactaggccaatgtctgcagcggtttcatccccgtgtactgtgggctca

SEQ ID NO: 310220 - DNA, 100 bp, Homo sapiens
aagcagatggcaactctgatcccaactctgaaagaatcttcaagagggagacatagggaaaaggaagacataaaaatcactaaggaaagaactccagaaa

SEQ ID NO: 310221 - DNA, 98 bp, Homo sapiens
aaagatgccagatgtgggagacacgccaaagctcccaagaaccagcatatccaagaggagattcaagtgggtccacaagaagaagttgggaacttcgg

SEQ ID NO: 310222 - DNA, 90 bp, Homo sapiens
gaacttttggaactagtgccggcggctctccaccccccagctgtcacgggaagtctttttaggataaacgtaggcctgcgtggcctggtg

SEQ ID NO: 310223 - DNA, 82 bp, Homo sapiens
gtttctctgccacaagaaccaccaaagaaaccagggtggttatgaccgctactcaggaggaaattacagagacaattatgac

SEQ ID NO: 310224 - DNA, 100 bp, Homo sapiens
tggcaattggttttcggctttggcgctcggggtgactcttctcaaatgccttctcatccccacatagactacttccagcaacccagtctcctgccatgtc

SEQ ID NO: 310225 - DNA, 50 bp, Homo sapiens
aaggaattctgtcttcacaagcagaagttggaatcgaagcctcttaaaat

SEQ ID NO: 310226 - DNA, 90 bp, Homo sapiens
ctgcagaccttcccaggaagccagagccacacacaccatcatggtcctgagacgagttgtactgctgtcacaggaaatggacgctggatt

SEQ ID NO: 310227 - DNA, 142 bp, Homo sapiens
agcgagggtctgaagttcacgactactagaaggggaggggagtggaaaggctctcagtgaaaaagcatgttggcagataaattgaacatgactccagaagaagctgaaaggtggattgtaaatttgattagaaatgcaagac

SEQ ID NO: 310228 - DNA, 83 bp, Homo sapiens
gcgctcgctccggcgccggcctcgcctcctcgcagcagcgccatgcaggatgatgggcaggacagggagaggctgacctactt

SEQ ID NO: 310229 - DNA, 100 bp, Homo sapiens
tcttaatgcttttcggactcctgatggcatgcctgtaaagaacttgcagttgaaggagtataacacaggctctgtgtgctccgggatggagcaggtgtgc

SEQ ID NO: 310230 - DNA, 97 bp, Homo sapiens
gtctccagcgggcctggactgtgggctggtgtgtggaactgcgctgctgggacatcgccttgggtcccctcaaacagattcccatgaatctcttcat

SEQ ID NO: 310231 - DNA, 133 bp, Homo sapiens
gcggcaatgccggcttggggcttggagcaacgcccgcacgtggcagggaagccaagagccgccgtttccctggggagatggtaaccatactctattccataaccctcatgtgaatccacttccaactggctac

SEQ ID NO: 310232 - DNA, 83 bp, Homo sapiens
ggtctctggctgtccagagttgcttcctgttgacgacagctctcctcaggtggaatgaatcttacttgttgaatatcttctgg

SEQ ID NO: 310233 - DNA, 90 bp, Homo sapiens
cccggagcagctgccacaatgggacatgtgcaacctcctctcaagtcctcactgccatctcttccaaacactttctgatgactgccaacg

SEQ ID NO: 310234 - DNA, 100 bp, Homo sapiens
ctggcatcgcaagatacattgaacaagccaccgtccactctagcatgggaacagtgttgataaagactgctgaagaattgatgaattttagtaagggaga

SEQ ID NO: 310235 - DNA, 75 bp, Homo sapiens
cctgctcctgctcatggacgacgcgtctacggtgacgtgcagcgcgtgaagatcctgttcaataagaaggagaac

SEQ ID NO: 310236 - DNA, 87 bp, Homo sapiens
caaagccccggaagctgcggaaccggcacctgcggaagccactggtggtccaggtacttcgactccgtggacatctgtaaggtgcac

SEQ ID NO: 310237 - DNA, 83 bp, Homo sapiens
gggcgctcgagacttaccagagccacaagcctcgaggtgcataccggacccccattcgcatctaacaaggaatctgcgcccca

SEQ ID NO: 310238 - DNA, 100 bp, Homo sapiens
aggccgcgacggacgcaagatggcgacggcgaccatagctctcgccatcagcatcagcaaagccatcaacacccaggaggcccccgtgaaggagaagcac

SEQ ID NO: 310239 - DNA, 75 bp, Homo sapiens
gcctgggccgccgctgctacctgcagcgccgtgtggcacgacacaaaaatcagcacatgcttgactatctttggc

SEQ ID NO: 310240 - DNA, 100 bp, Homo sapiens
cgaggcaagaaggtgatcgaactgggtgcggggacaggcatcgtggggatcttggcagcgctgcaggactgcctgcgctgctgacttaaggccccaacac

SEQ ID NO: 310241 - DNA, 90 bp, Homo sapiens
ccactctccagcaccagcttccagttagtggatatagcacaccatccccagccaaaatgggcaagttcatgaaacctgggaaggtggtgc

SEQ ID NO: 310242 - DNA, 98 bp, Homo sapiens
agaaccattagacacatcagtggagtccatgctacctgattgcccccgggtctcagcaggcttatgcatctggatgtgacattgtaatactgggaagc

SEQ ID NO: 310243 - DNA, 50 bp, Homo sapiens
gagaagacgtctgtgtcgtgcggttacttcctcagaatgttggcctcctg

SEQ ID NO: 310244 - DNA, 97 bp, Homo sapiens
ctgggagcaaactgggcagaaacaaaggacactgccaaccttgataagatggcttcggagggaatgagattctgctcctaagtgtaggagagaactt

SEQ ID NO: 310245 - DNA, 101 bp, Homo sapiens
ggaggagctgcacaaggcggaggacagcctcctggccgccgaagaggccgccgccaagggatcaagcatgaattgcaagcaaactgctacgaggaggtcaa

SEQ ID NO: 310246 - DNA, 83 bp, Homo sapiens
gacggctgcgtcgcccgaggcgaggaggagcgctggcggtgaagtggaggttctggatccgaacgaccctttaggaccccttg

SEQ ID NO: 310247 - DNA, 90 bp, Homo sapiens
cgagtgggcacgcctggcgctcttcgacttcctgttgcagatggagtttcgctccgtcgcccaggctgaagtgcagtggcgtgatcttgg

SEQ ID NO: 310248 - DNA, 83 bp, Homo sapiens
ccaccctcctcatcgcctgcctgctgctgcgcgtcttcaggtgaaatgtgaggccaggtcagccttgaccaagccgaagaata

SEQ ID NO: 310249 - DNA, 98 bp, Homo sapiens
aggaaacagaaatattttttcagccatcacaaggttatcaatactctggctgaccatcatcatcgtgggactgactttggtggaagtccttggttaca

SEQ ID NO: 310250 - DNA, 108 bp, Homo sapiens
cctgtggttttggatcctggagtacctgtctggtacctggtacccggcacactgtgagttcctggacatcaagggctggctctgtcaacagactcaatagaaagactc

SEQ ID NO: 310251 - DNA, 83 bp, Homo sapiens
caagaagctgttccgcaggaggagaaatgatcgaagacccaacatgagtgaagtttcctgcaagaaacgggacgactatttgg

SEQ ID NO: 310252 - DNA, 110 bp, Homo sapiens
tcaggcgatcgacgccaccgactcttgtatcatgagcattggatttgatcacatgggatctaagcattgaagaacagtcagagtgtgctcaggatttctaccacaatgtg

SEQ ID NO: 310253 - DNA, 98 bp, Homo sapiens
tggaggcggaggggagcggagcccggagcgtcgtggaaagagaaccatggagtctggcagtaccgccgccagtgaggaggcacgcagccttcgagaat

SEQ ID NO: 310254 - DNA, 80 bp, Homo sapiens
ccgcgagagggccgcgcgccggccgccgccgccccggcgcccaggctcgacagccctgacagcacgctccagccctctgg

SEQ ID NO: 310255 - DNA, 100 bp, Homo sapiens
gtcacctatagcctatgagagaggaagaatatattttgacaattatcggcgctgtgtcagcaggcacgggcgagagcgggaagagcacgttcatcaagca

SEQ ID NO: 310256 - DNA, 100 bp, Homo sapiens
gcggcccggcggggggacgccgctgctgaacggggctgggcctggggctgcgcgccagggtggatgtgaacactgaccggaagatcagtgccaaggagat

SEQ ID NO: 310257 - DNA, 100 bp, Homo sapiens
gaaagtgctcctgcggctgtatggagcgattttgcagatggacttctgtaacgataagagttatatttcagaagagacaagagtacttctgttaacagga

SEQ ID NO: 310258 - DNA, 88 bp, Homo sapiens
aagaaaactgtctttggaaaacaagctactgcaactcaaatccagtgctacatatggaaaaaggcccgcaatggatgccctgcaacta

SEQ ID NO: 310259 - DNA, 101 bp, Homo sapiens
gtgaaccttcgcattcagaatttgaccatcttggtgagaaacattaagacctactaccaggattttttatcaagcagaaatgcatcgaacaacgagaatca

SEQ ID NO: 310260 - DNA, 80 bp, Homo sapiens
cccaggcctccgcttctccggcctccctgctcttaccgggagattttaccaaatgttgcaagaactctggagttcttatg

SEQ ID NO: 310261 - DNA, 104 bp, Homo sapiens
agcgccggttccttgcggtcaagatgctgcaaaacgtgactccccacaataatgcagagcagagcgggcggaggaccccgggcgcgggcgcggacggcacgcgg

SEQ ID NO: 310262 - DNA, 100 bp, Homo sapiens
ggccaagcctcatataactgctgcagagggtaaacttcacaacatgatagttgatctggataatgtggtcaaaaaggatctagtttgaagcactaagaag

SEQ ID NO: 310263 - DNA, 98 bp, Homo sapiens
aaaaagatgttttgatccctaaaataatgagagaaaaggccaaagagaggtgttctgaacaagttcaagcaaaagctggcaggctgacagaggcggcc

SEQ ID NO: 310264 - DNA, 96 bp, Homo sapiens
caacaaggccagtgccaagttatattcaaagaccagattatgctgatcatcccttagaaattgcatctgatggtctcaagggtcgtgtgtttgaag

SEQ ID NO: 310265 - DNA, 82 bp, Homo sapiens
tagaatcaactgagagagatgcttaaaaatcaccagttactttaatgagtcagtatcattgacagtgttcaacaggaaacag

SEQ ID NO: 310266 - DNA, 100 bp, Homo sapiens
gaagcagataacccagctcctaccagaggacctcagaaaggagctctatgaactttgggaacctactttggggataaaggattatttggtcttctggatt

SEQ ID NO: 310267 - DNA, 96 bp, Homo sapiens
aggtggatgccttgcagggccatcttcaacaaatggagcaggaagccctggtgaagcaaactttgggggctcaaatgcaaggtggttttggatgtg

SEQ ID NO: 310268 - DNA, 82 bp, Homo sapiens
tgagggactcacagctgatgacctgctgctcgtgctgatctcagatgccgacaaaaggatcaaggtggcgaagcccgtggtg

SEQ ID NO: 310269 - DNA, 100 bp, Homo sapiens
cgaagagggggtcgaggagagccggagtcggggacccaggagtttcctgtgtccagcgctgccggagccgcctgagactgtgccctgtccacggtgcctc

SEQ ID NO: 310270 - DNA, 96 bp, Homo sapiens
ctcgtcgagttcttcgccccctgattgtgttgtatcgcgagcaggaagtcctggactgtgactgtgacatggcctcggtccaccacctgttgtccc

SEQ ID NO: 310271 - DNA, 100 bp, Homo sapiens
tctttatgataattggatcaaagatgctgctggaatagtcaaatgatttcagttcgtgaagccaaagccattccaaggcctgatggtattgaatggagaa

SEQ ID NO: 310272 - DNA, 100 bp, Homo sapiens
gcactggtgagaagggcttcggctacaaaggctccaccttccacagggtgatcccttccttcatgtgccagggaaaccgtgatgaaagcacaaacgtgga

SEQ ID NO: 310273 - DNA, 90 bp, Homo sapiens
aaatcaagaaaagaccaatggaagttgttaatacagagagtaaagccaatcccagctgaaggaatcaagtcaaatccttccaagcggcat

SEQ ID NO: 310274 - DNA, 75 bp, Homo sapiens
tttctgtgatggcaaaagcaaagggtttggaagttccatcactattcctgatcagagaactccagttgcttcaac

SEQ ID NO: 310275 - DNA, 75 bp, Homo sapiens
aaatatttctttaaggactcatcaaactgtgtgcaaacaaggtggtggaggagtcatccttcctgaccctggaca

SEQ ID NO: 310276 - DNA, 100 bp, Homo sapiens
aggaggggccccagcagcccccgaaggccctatcaggacatggagtatgaaagacggtacaccaggggttggaaaaaccacactaggcaaagaacttgcg

SEQ ID NO: 310277 - DNA, 53 bp, Homo sapiens
gtccaaacatggatagagctactcactgctggggccacaactttggtgaagaa

SEQ ID NO: 310278 - DNA, 75 bp, Homo sapiens
aaagcatgtgcctcttttatacgaaccaggtgagccctattcccagaggcaggtggtgctgaccctgtaacccaa

SEQ ID NO: 310279 - DNA, 90 bp, Homo sapiens
actcaatatggagtctcccagcgatatcctggatgagaagcagatctctcgagccttgggcacagaagtgattcaactcttccccgagaa

SEQ ID NO: 310280 - DNA, 50 bp, Homo sapiens
cgctaccggaaggccatcgccaaggattgttaaaatgagtcttcggaagc

SEQ ID NO: 310281 - DNA, 98 bp, Homo sapiens
gattccagatgttcctgtggaccccagtccagggtgatgaattagaagacaatggaaagaatttctacgaatctgatgatgatcagaaggaaaagact

SEQ ID NO: 310282 - DNA, 75 bp, Homo sapiens
ccgccggccccaaagacgctaaacgtgccctactctgccccgggggagagacacaagatggtgaaggagacccag

SEQ ID NO: 310283 - DNA, 108 bp, Homo sapiens
gcagcgccagcggccgagcgggcggcttcctggcctgggcgctccggtggcggcggagcttccccgggcgctgcctggacaggcctgcctgcgtgctgggacatgtct

SEQ ID NO: 310284 - DNA, 50 bp, Homo sapiens
ccagagaacatgctggctacaactaatgccttagattttagtgatgatga

SEQ ID NO: 310285 - DNA, 95 bp, Homo sapiens
tcatccacagagatctgaaggctggcaacattctctttaccttagatggagatatcaaattggatcagcaaggattttcacctaaagctcagaaa

SEQ ID NO: 310286 - DNA, 90 bp, Homo sapiens
gtggtggctgccatgatgatttccattgtggggtactggcggaggacattgggcatgcaagtccgctatgttcaccatgaagactatcag

SEQ ID NO: 310287 - DNA, 83 bp, Homo sapiens
cagtcagattggaccctgtaaaagctgtaaaatgataacagaggcttcaacggaccacaccaaaatgccatctcaaatggaac

SEQ ID NO: 310288 - DNA, 74 bp, Homo sapiens
ccgagccagccgctgttttgccggaggagcccctcaggccaagtcgaaaggtgagaaaccccaagctgcacgtg

SEQ ID NO: 310289 - DNA, 75 bp, Homo sapiens
cctgttcctccctgcgcgtaagacgccaaggacttattgttgtgctaacactgaagacttggagacagttattca

SEQ ID NO: 310290 - DNA, 88 bp, Homo sapiens
actgggttcgcctgcccagcaaatgcgaagggctcaaaatctccttcgccaagaccaaacatgcctgttcgatacttcataatgaaga

SEQ ID NO: 310291 - DNA, 82 bp, Homo sapiens
cgacgttccatctgtggaaggacctaccaaccaggggcactatgaacgaagaggagcagtttgtaaacattgatttgaatga

SEQ ID NO: 310292 - DNA, 75 bp, Homo sapiens
cagcgcaccgtcatcgccatgaatgggggtcgggaccctgagttaggcctgaagtctgtgcagaagctactggat

SEQ ID NO: 310293 - DNA, 100 bp, Homo sapiens
tgctttggctgcccggctgctgcagcccgcgcacagctgctcccttcgccttcgccctttccacctcgcggcagttcgcatgtccggcatgatttcgggt

SEQ ID NO: 310294 - DNA, 100 bp, Homo sapiens
agttgtttgatttcatcgatgatctggcagacctcagctgcctggtgaagaattccaaagtccctttgcaagtcaaagtcgaggatattttttattcagg

SEQ ID NO: 310295 - DNA, 90 bp, Homo sapiens
ctggctgtgctgcgcgacccccgcgcatgaaaaagcttgtggtgaaggggggcaaaaaaaagaagcaagttctgaagttcactcttgatt

SEQ ID NO: 310296 - DNA, 96 bp, Homo sapiens
tggtgggtaacaaaattgatctggaacagttccgccagagcctggcccaactagagaatctgtgcaaacagctgtatgaaaccacagacacaacca

SEQ ID NO: 310297 - DNA, 51 bp, Homo sapiens
acaacgccatgtcctccctgtactcggtgtctctgtggtccttgaatcctg

SEQ ID NO: 310298 - DNA, 100 bp, Homo sapiens
gtccccgcggcgcaggaggcggtggagcgcagagcgggcgagcgcggatatccgacatgaagccagtgacttcccatgtagagtggccaagcttcctaag

SEQ ID NO: 310299 - DNA, 96 bp, Homo sapiens
cttatcaatattgctgtttgatgcgatcctgaccagtgcaaccacgggatggccccttcacagatgtagtcactacaaatcttaaattgcgaaatc

SEQ ID NO: 310300 - DNA, 51 bp, Homo sapiens
gtcaacatgaacagacttcctgaaaatgctgaaccagatctggacgacaat

SEQ ID NO: 310301 - DNA, 83 bp, Homo sapiens
tccggctgtaaggagccgcggcggggggaaaatggagcccttcaccaatgttctccagtgctgatgaagcggctttaaaagag

SEQ ID NO: 310302 - DNA, 83 bp, Homo sapiens
cgcggaggcgcctccgctgcagtcgctgcgtctccaagcagcccctgtcaaagggaacaggaagcagtccacggagggtgacg

SEQ ID NO: 310303 - DNA, 76 bp, Homo sapiens
ccctatgggagggccaccaatgggacaagtgatgagacaaaccatgcttctgccacatcaacacaggactttctgg

SEQ ID NO: 310304 - DNA, 74 bp, Homo sapiens
agaagcgccaagctaaatttataatgaacagattgaaaatattgaacttcccatggatacaaaaacaaatgaaa

SEQ ID NO: 310305 - DNA, 100 bp, Homo sapiens
ctctatcagactgacccctcgggcacataccatgcctggaaggctccagaaatgggaattaaatacatacttgtatgccccaaaagatgactacaaacat

SEQ ID NO: 310306 - DNA, 85 bp, Homo sapiens
gagcagagcggagggagccccagacacgaagctggcagggcggagatgctggaccacgccgtcctgcttcaggtgatcaaagaac

SEQ ID NO: 310307 - DNA, 74 bp, Homo sapiens
agcgccgtcccgtccgacagccaggcccgggagaacgaagaaagctaccgtgaatttactgggtgaagaaaaga

SEQ ID NO: 310308 - DNA, 97 bp, Homo sapiens
cgagggttcccgggattggaccgacgcagccatgcttactgaaacaaatgcaggtatcaagtgcttggactccatgtgctgtttcccggaaggagaa

SEQ ID NO: 310309 - DNA, 50 bp, Homo sapiens
tgcctatagaggtacctcttaccagaaagaatcaggaaacccaggcccaa

SEQ ID NO: 310310 - DNA, 100 bp, Homo sapiens
tgaactggagaaaaatctgtatccaacagatgcctgtgaggagccaccaacatttgaagctatggagctcattggtaaaccaaaaccctactatgagatt

SEQ ID NO: 310311 - DNA, 98 bp, Homo sapiens
gccggggcccaaccacaagacgactcaataggaggaaggttatactggagagctttgccagtccaagattgattactgcatcctagacccatgcagaa

SEQ ID NO: 310312 - DNA, 90 bp, Homo sapiens
ttgagaaaaggcctaagaattttggcattgttcacacaaaagatgttggacaatttctacaattttgcttcatcatttgctgtctctcag

SEQ ID NO: 310313 - DNA, 87 bp, Homo sapiens
accctggaggtgcagagcgactactccaggtgggcgtggacttcactggctccaatggagacccctcctcacctgactccctacact

SEQ ID NO: 310314 - DNA, 95 bp, Homo sapiens
tgttagacagtgaatgtggaaaggagattgacagtcacaattttgtaataaggtacttctactcccgaaggattgacatcaccctgtcgtcagtc

SEQ ID NO: 310315 - DNA, 102 bp, Homo sapiens
gggaagacgcggcggcggcggcggaggatgagcctgcagagcgcgcagtacctccggaaggaatgcagctcatttcagaaaagcctgagacggaagctgtgg

SEQ ID NO: 310316 - DNA, 131 bp, Homo sapiens
atgggctcctaccagcagaactccatggggagctatggtccccaggggggtcagtatggcccacaaggccctcttcaatgccatcatcccagatcaccatgcagaagccttctctcctcctcgcctggccc

SEQ ID NO: 310317 - DNA, 100 bp, Homo sapiens
gaatcccaacccaagcaagtccatctttgaacaataaacatctccagtactgctggctttggaagaccccatgggtgcctgtgcagcagtattcactgtg

SEQ ID NO: 310318 - DNA, 51 bp, Homo sapiens
ccctggcccggaggaagaaagccaaggaggcttccttcaaaatgtctactg

SEQ ID NO: 310319 - DNA, 76 bp, Homo sapiens
aatttacatgaagtttatgagactgcatcagaaatgatcttagttctggaatacacacaggtgaactccagaaaga

SEQ ID NO: 310320 - DNA, 139 bp, Homo sapiens
gcgaggagccggcgcggtcgcagtctccacggcgcaggcccacggtagcgcagccgctctgaggctggcgcccatgcggctctacacgctctccaagcgccactttgtcctcgtgtttgtcgtcttcttcatctgcttt

SEQ ID NO: 310321 - DNA, 75 bp, Homo sapiens
agaaaattgaaatcagccagcacgccaagtacacttgctctttctgtggcaaattggacatgatataggtcgtgg

SEQ ID NO: 310322 - DNA, 50 bp, Homo sapiens
ggttcactctggatcatcccccaaaagattttgaacaaagtagaggaaag

SEQ ID NO: 310323 - DNA, 75 bp, Homo sapiens
tacatgagtggctatcatactggctattatatgctggattgccttttgcaattcttacttcaaggcataccccct

SEQ ID NO: 310324 - DNA, 75 bp, Homo sapiens
ctgagggtggaagcggcccccgcagacgctcggcaggggcggcctgtggtaatttgtgataaggaggatactgag

SEQ ID NO: 310325 - DNA, 110 bp, Homo sapiens
aaaacagtcgcctttcagctcagcgcacacaagctggatggttgctgatttctgctctgatgacattagcctttgaagtaaattttatggatgatgtaggtcagactcta

SEQ ID NO: 310326 - DNA, 75 bp, Homo sapiens
acgggccccacatcagctccaaggtcagggtgattaagctgtcaggtgggttttggaaaatatgtcccatggagc

SEQ ID NO: 310327 - DNA, 75 bp, Homo sapiens
cctgaggattgctgagaaaaggcagaggagagaagtttgctgaggaatgccttcaagcacaaagtgatgaatgac

SEQ ID NO: 310328 - DNA, 50 bp, Homo sapiens
attaaaatgaggaccaaaaggagtcccagatggagtctcattctgtcacc

SEQ ID NO: 310329 - DNA, 83 bp, Homo sapiens
cctggagcctcagttggaagcagccgatccagcctgcggagcctgtggggcaggtttgaactgcactggtccactgatagaca

SEQ ID NO: 310330 - DNA, 100 bp, Homo sapiens
cctagcgataccaagaggtctcaggggtcaccagtcgttggcacaccaagaagctgccccgcaagacccaccgaggcctgcgcaaggtggcctgtattgg

SEQ ID NO: 310331 - DNA, 87 bp, Homo sapiens
catctgcacacaaggagtgtctggggagggtccctccatgtggccgacatgggcaagatttatgttgaaattgagcgtgcgcgactg

SEQ ID NO: 310332 - DNA, 100 bp, Homo sapiens
gccagagcctggagtctgcgaaggccgggacccggttccccggcccacagtgggggtgtgcaaacccgagagaactgggctctcaccacacacttgttca

SEQ ID NO: 310333 - DNA, 101 bp, Homo sapiens
cgacttcaacatgttccgcagccaggccgggggcgcctgcgactgcggggacagcaacgtgatgcgggagagcggggatcacatgcagtggtctaaggaag

SEQ ID NO: 310334 - DNA, 76 bp, Homo sapiens
tccctcaacttgctaaaaatcaagtctccgtgaggccgggtgacgctccagaatgggagacaagccaatttgggag

SEQ ID NO: 310335 - DNA, 75 bp, Homo sapiens
cgacaaagcggctctccagcaagaaggtggcaagctcctgcttcaggtgcagaaatacagcgatttccagtgcca

SEQ ID NO: 310336 - DNA, 82 bp, Homo sapiens
ctggaatgtgttcaagtcttggcagagccaggttattggagtgatgagtaaagaatacataccaaagggcacacgttttgga

SEQ ID NO: 310337 - DNA, 98 bp, Homo sapiens
agatgccctggctcgccgtcccctacacggatgaggcccggcggtcgcgcctcaaccggctgtacggaatccaagagttccgttctggaaaggcaccc

SEQ ID NO: 310338 - DNA, 58 bp, Homo sapiens
gacgaacgtggggcaggatggacggcaaggatgccagatgatatgaacttcagtgatg

SEQ ID NO: 310339 - DNA, 74 bp, Homo sapiens
agttacatgtgaaagaagatatattccaggaattactctgcttaatgtaagcaagctgaacattttgaagcttg

SEQ ID NO: 310340 - DNA, 83 bp, Homo sapiens
caggcctcggactccgcggccggcccggcgcggcccagcgccctcagacaatgcagatcttcgtgaagactctgactggtaag

SEQ ID NO: 310341 - DNA, 148 bp, Homo sapiens
ttaactgccctatccaaaaagacaagacctatagctacctgaataaactaccagtgaaaagcgaatatccctctgcaatctttggcagccagacactacctaactccaatttatggacaatgaataatggtgcaggttgtagaatttc

SEQ ID NO: 310342 - DNA, 98 bp, Homo sapiens
cacagctccagggaaggcactcaaaagtggggggcaggaaaggggatcatggaagctgataaagatgacacacaacaaattcttaaggagcattcgcc

SEQ ID NO: 310343 - DNA, 74 bp, Homo sapiens
ttctgcatccttaactgagaatgagggaagaggaagaacgtctgagaaataaaattcgagctgatcatgagaag

SEQ ID NO: 310344 - DNA, 88 bp, Homo sapiens
tgtatatggctgcgccccaaatcagcaccggcagctgctgaaggacagcttcatggtggagctggtggagggggcccgcaagctgcgc

SEQ ID NO: 310345 - DNA, 83 bp, Homo sapiens
cgcagaagtcgcgtgtctaggtgagtcgcggtgggtcctcgcttgcagttcagcgaccacgtacctggagtagaacagaaaaa

SEQ ID NO: 310346 - DNA, 100 bp, Homo sapiens
ccgcgcgggaagccccagcccgcagccctcgggggggtgctgagttcttcacctccttttagactgagatctgccaagttttccggcattgctcttgagg

SEQ ID NO: 310347 - DNA, 100 bp, Homo sapiens
cccgggagaaggcagccaaggagttcggagtgtcccctgacaagatcagtctccagcaagataagtatgctgtgcgcttcatccctcgggagaatggcgt

SEQ ID NO: 310348 - DNA, 100 bp, Homo sapiens
caactcttcgttcgattattagctttagtgaaatgggctaataatgctggcaaagtggaaaaatgtgcggttttgattcccaccatggccatcacccagt

SEQ ID NO: 310349 - DNA, 74 bp, Homo sapiens
agggaatgccacagcatcctccagcacctcaggtctgtctgacacttactgccaaacgcatggcaaggaaaaac

SEQ ID NO: 310350 - DNA, 100 bp, Homo sapiens
aacttttaagagccctttgttccaacgttagtgtggacgatgctcttgcaggatgcctttccttttgggtcttagacagtcagagcaccataacatggtg

SEQ ID NO: 310351 - DNA, 98 bp, Homo sapiens
caagatccacgctgacgcagagcggaaggagcacttgcacctcctgcgccgccgccccccatccaaggatatgccttcaagcctccacctagacccga

SEQ ID NO: 310352 - DNA, 74 bp, Homo sapiens
ctcctcggcctcctctctcactgcacaggaaaatgagcgtaccaaggatctaatcattgagcaaagatttcatc

SEQ ID NO: 310353 - DNA, 75 bp, Homo sapiens
ccagcacctccttgctgcctagaaaataatcgcagatacgtgcaaaaaggtgtttgatcagtatgtaaagaccag

SEQ ID NO: 310354 - DNA, 75 bp, Homo sapiens
gttcttgaacagacagaaggatgtaaaggatggaaaatacagccaggaacgtatcaatgagtgtgatgagatatg

SEQ ID NO: 310355 - DNA, 90 bp, Homo sapiens
cagcgagcaggcgcgcagccacctggagaaggcgattagcctgaggcctgctcagtcgttcctaatgaataaaaatcaagtgccaaagct

SEQ ID NO: 310356 - DNA, 110 bp, Homo sapiens
atatcgatgggaaattatctgacggtggtgctggcctctctgttggtttgcccatacctggatgttgcttcagagtgtgaagtcaaatgcatgccaacattccagttttt

SEQ ID NO: 310357 - DNA, 74 bp, Homo sapiens
tgatcatggctaaagatgacctctctggtgctgacatcaagcttctgaaagaccatgcctcatccatgcctaac

SEQ ID NO: 310358 - DNA, 80 bp, Homo sapiens
ggaaactttcctcctccaccacctcttgatgaagaggctttcaaagtacaggactccttgctccggctgaaggactatcg

SEQ ID NO: 310359 - DNA, 50 bp, Homo sapiens
gaagaaccagacctggactttcttagatgatgaataaggtatttggaggt

SEQ ID NO: 310360 - DNA, 100 bp, Homo sapiens
aggggtccctggagtttgatgatgctggaggtgaagagcttgggaaagtcgaggtgacggtgtttgaccctgactccctggaccctgatcgctgtgagag

SEQ ID NO: 310361 - DNA, 100 bp, Homo sapiens
gctgtgcaatgtcacccaggacatgctgtgcactcatgaagagactttcgggcctctggcaccagttatcaacacctgtggaatcctctcaagaggaaca

SEQ ID NO: 310362 - DNA, 75 bp, Homo sapiens
ccaggatctcgggctcggaacgagactgcacggaatgtttacccttgcggaagttgcatcacttaatgacattca

SEQ ID NO: 310363 - DNA, 90 bp, Homo sapiens
cttcatcgtgctattcctggtctacatcctgcgggtgcctttgaaaatcaacgacaacttgagcacaggctctatcaaagaaagcaagag

SEQ ID NO: 310364 - DNA, 84 bp, Homo sapiens
acatgtgaacactcaagtgaagcaaaagccttccatgattacctgagaaacatgctggagtttcctgcgttacagcctcagtgg

SEQ ID NO: 310365 - DNA, 74 bp, Homo sapiens
gtcggcgatccggggtctgggcgcggcgagacctattcaggcctgttctgtgtggtcatcaatccttacaagaa

SEQ ID NO: 310366 - DNA, 100 bp, Homo sapiens
gacacccatgttgtcatggcttaacatcagaagtctgggaagttgacgagcagatagatcactacaaggaaagccaagacaaatttctgtggcaagctgc

SEQ ID NO: 310367 - DNA, 108 bp, Homo sapiens
aagtagcaaaggcaagaaggcaacgacgttccatctgtggaaggacctaccaaccaggttaatgttgaagaaggaaaatgcggaagtcgtcatttgacaagttttata

SEQ ID NO: 310368 - DNA, 100 bp, Homo sapiens
aatggcccacatcaggacagctgttccttggccatcccaaagctattctgggggcaacagaggaggtctggtcttgttggattgaactgcttcactattt

SEQ ID NO: 310369 - DNA, 51 bp, Homo sapiens
tttggatccaagctggagtgcctggacaatgaaggccaaacagctctacat

SEQ ID NO: 310370 - DNA, 95 bp, Homo sapiens
tgacacagtcattttggacccaccactggtagccctggataaagatgcaccggttccttttgcaggcaacttcaaagtgggagttcacattgctg

SEQ ID NO: 310371 - DNA, 75 bp, Homo sapiens
caccccctgggacagcgccacattcgccgggctatgtcttgcccagccacgtgactgaggagatgctatgggagt

SEQ ID NO: 310372 - DNA, 75 bp, Homo sapiens
caggaaccattggataaggataaaggtcgtttatacgcaatgcagactggaatgaagatcgatagtaaaactcct

SEQ ID NO: 310373 - DNA, 89 bp, Homo sapiens
agacgagaagccgccgagagccgactaccctccgggcccagtctgtctgtccgtggtggatctaagtattatcagaaaatccacccagc

SEQ ID NO: 310374 - DNA, 51 bp, Homo sapiens
cgtcagcactcagcgcgggccgctggctggaggcgtgatcctgggtgtggc

SEQ ID NO: 310375 - DNA, 100 bp, Homo sapiens
ccggcaactcagaaacatcaggtccaagagctccagagattatattggggttgccattttgtgaagccatagacatgtggtcattgggatgtgtgattgc

SEQ ID NO: 310376 - DNA, 90 bp, Homo sapiens
ggactgtccaagtgggaggctaaatctcgaggaatttcagcagctctatgtgaagaagaacttctgcttgggtggctgaactctgatctt

SEQ ID NO: 310377 - DNA, 90 bp, Homo sapiens
caacactcgcttggttggggagatcggcgcttggccggtagaacacctgaaggagaagctcattagccaggcccaggaagtgagccgact

SEQ ID NO: 310378 - DNA, 100 bp, Homo sapiens
aaggagcagcttccaggatcctgagatccggagcagccggggtcggagcgggtacccattcctggcccagtgggtaacaagagaatggttcatttttccc

SEQ ID NO: 310379 - DNA, 101 bp, Homo sapiens
gactttgggtctgggtgagccttctcgtggcggcggggaccgtccagcccagcgattctcagtcagctcatcaggtgtggctgaggtaggagtaacagtcc

SEQ ID NO: 310380 - DNA, 82 bp, Homo sapiens
cgggcctggtgctgctcgcctacttcctgccggcgcaggggggatatgagactttctactcggaatatcctgagtgttgcgt

SEQ ID NO: 310381 - DNA, 100 bp, Homo sapiens
gtaaacgcggttagtgcaagcatctgggccatcttcaatgctgaaagtcacaacatgaaaaaccaacagatggatccctttactcggcggcagtgcaagc

SEQ ID NO: 310382 - DNA, 90 bp, Homo sapiens
tcatttctgtggaatctgaagaagcccacgcagattttaattcccactctagattctgaatcaagatttctacagtctctggatgaagac

SEQ ID NO: 310383 - DNA, 75 bp, Homo sapiens
cgactggttctccctgggctgcatgcttttcaaacttctgagagggtactccaaagattcaggtttactcacgtc

SEQ ID NO: 310384 - DNA, 74 bp, Homo sapiens
gagcgggccgacctgcccgcggctgacgggtggcccagttgaaatccttcccttcctctaccttggaagtgcct

SEQ ID NO: 310385 - DNA, 98 bp, Homo sapiens
ctgcattgtgttgctgcagattgccaaagccgattcaacagtcattgagaagtggatggatggcgtgaaagacttcttaatgaaacagcaggctgccc

SEQ ID NO: 310386 - DNA, 73 bp, Homo sapiens
ggagaacagttcctccccagggatgatggacatgcatggaaggatttgatgccctggatccctttattcccat

SEQ ID NO: 310387 - DNA, 90 bp, Homo sapiens
atttgccatcatggaactgcaagtagttcatgaaagccttaagttatgcatcattagataaagaagatttattgagtcctattaatcaaa

SEQ ID NO: 310388 - DNA, 100 bp, Homo sapiens
acgagaagccccaacagcacggcgtggcctctcagcctcgttctggatagtaaagcaatagaccttatgaatgcactaatgaggctaaatcagatcaggc

SEQ ID NO: 310389 - DNA, 100 bp, Homo sapiens
gttaacctctctgcatcatccatgctaatgattgcaatgcagtacacatccaatccagactaacagcggagttgctgcgcctactttgtgcagagcccca

SEQ ID NO: 310390 - DNA, 83 bp, Homo sapiens
gcaagaacgagtcgggcagccgctccaatgatagcctgggctggaagctcttctacgtcacaggctgcctgtttgtggctgtg

SEQ ID NO: 310391 - DNA, 75 bp, Homo sapiens
acagcatgagatccaaaggcagggcaaggaaactggccacaatttgaaggatgacctctaggaagaaagtgttgc

SEQ ID NO: 310392 - DNA, 75 bp, Homo sapiens
gcaagatgctggtgatgcaggaccccatctacagccccatctgctttgatatgattgaagaagcatacatgacaa

SEQ ID NO: 310393 - DNA, 50 bp, Homo sapiens
aatccactaggaatgtcattgagtgttgagatctgcatagccactcctgg

SEQ ID NO: 310394 - DNA, 75 bp, Homo sapiens
ctcggacgcacggaccaggcccatttccctttcatctagtcgacttcaatgttcctatgaagaacaaccagataa

SEQ ID NO: 310395 - DNA, 86 bp, Homo sapiens
tgacgaagctgccatcagtaagctatactccaccatccggccctacctagaggaactgtggctgcaccatctgtcttcatcttccc

SEQ ID NO: 310396 - DNA, 88 bp, Homo sapiens
gcagtgtcttcagcgcattgctacctaccggctagccggtggagctcacgtttattcaacagaataggatgagtgataatccacccag

SEQ ID NO: 310397 - DNA, 111 bp, Homo sapiens
aaataacccgtatttgtgtgtcatgtttgcatttctgacaagtgaaacaggatcttacgatggagttttgtggagagtggatttgcactttctgccgagacttatctaaac

SEQ ID NO: 310398 - DNA, 100 bp, Homo sapiens
gaatcacttgggttcattctattcagcaggagcgagaacccgagcagcgccatgagcaacactaccgtcgtccccagcactgcaggtccgggccccagcg

SEQ ID NO: 310399 - DNA, 75 bp, Homo sapiens
agatccaggtcaccagcatccactggagctacaagaaggtctgcggggtttccgagaggctcgccgggatttctg

SEQ ID NO: 310400 - DNA, 87 bp, Homo sapiens
ccaagatgtagctaatgaccgtggttcccactgagatgtgctcatcttttgctacgggacccagacaatacgatggaatattctatg

SEQ ID NO: 310401 - DNA, 90 bp, Homo sapiens
aaatcgtgacaccagaagaatattataatgtcacagttcaatgggaagcggtctcgagcagaagccccactgaagtgtcccctggcagac

SEQ ID NO: 310402 - DNA, 96 bp, Homo sapiens
tgaagatccaagatgttctacaggccaaagatgaagaggaagcctttctggattggagtgatgatgatgatgatgatgatgatggatttgatccaa

SEQ ID NO: 310403 - DNA, 75 bp, Homo sapiens
tttgaagacacatatggggagttggaattcaagaatgatgaaactgtgctgtctcctggttcggacatctatgtg

SEQ ID NO: 310404 - DNA, 95 bp, Homo sapiens
aaggcaatgatttataccatgaaatgattgaatctggtgttatcaacttaaaagatgccacctctaagatggtcagtaggacagaaggtaacatt

SEQ ID NO: 310405 - DNA, 100 bp, Homo sapiens
ccggatcctgaggaggcagctgcggtggcagctgctgagttctcggtgaaggttgtgaccgagattcccgacgagagagactgaggggaagagaggaagg

SEQ ID NO: 310406 - DNA, 88 bp, Homo sapiens
gtgtggcgcgcccagagccccgcgtttcagccctagggaaggttgaaatcacaaagattagacacctttttagataggtgttcttcag

SEQ ID NO: 310407 - DNA, 90 bp, Homo sapiens
cgccactgccgcaggaggcgtgagctttgacagtgagaaggctggggaccgggaggtgcagaggacaatgctggagcttctgaaccagct

SEQ ID NO: 310408 - DNA, 100 bp, Homo sapiens
ctggagtctgcgaaggccgggacccggttccccggcccacagtgggggtgtgcaaacccgagagaactgggtaaagtgttgagagaggagaaccagtgca

SEQ ID NO: 310409 - DNA, 100 bp, Homo sapiens
gtgaagatgagcacttacttggttgctttcattgtgggagagatgaagaacctgagtcaggacgtaaatggaaccctgataataccagaagatttcagca

SEQ ID NO: 310410 - DNA, 109 bp, Homo sapiens
tcagcagggctgtggctaccatgttctctcgcgcgggtgtcgctgggctgtcggcctggaccttgcagccgcaatgctgtcacgaccggaggggggactcgcagcctta

SEQ ID NO: 310411 - DNA, 90 bp, Homo sapiens
gtgagcctgaacaatttggagttgtgaactggtcatgctgctggagtggtggtcctgcacggagtgtacactgttcacggaccaggccac

SEQ ID NO: 310412 - DNA, 100 bp, Homo sapiens
cccgcgagtgccatggcggccgccctgggagcgagcggaggagcaggcgccggaggttcctcaagccaggacctacgcacctgttgtgagtggtgttata

SEQ ID NO: 310413 - DNA, 51 bp, Homo sapiens
cctgaaagaacactctgaacttcaggcctgatcacttgaacggacatatca

SEQ ID NO: 310414 - DNA, 74 bp, Homo sapiens
agcaacaggatcagagcatgaaggaaggggtggtgatctttgtgaagtctgtgcagcggtgcattgccttggcc

SEQ ID NO: 310415 - DNA, 98 bp, Homo sapiens
gaagtgcttaaggaagagtgatgaaggattattgcatcgagcttttagtgtcttcttattcaacaccgaaaataagcttctgctacagcaaagatcag

SEQ ID NO: 310416 - DNA, 51 bp, Homo sapiens
ccacagcctagcagtcgggaccgtactgagaatggagatgtatgcatttcg

SEQ ID NO: 310417 - DNA, 75 bp, Homo sapiens
ccctcacggagctgggcgacgagctgaccctgggagacatcgacgaaacagaaaatctgtgggagcttaactttg

SEQ ID NO: 310418 - DNA, 83 bp, Homo sapiens
gcaaagggcagtcggcggagcttcgccaaggctggcgcagtcgacaatgcagatcttcgtgaagactctgactggtaagacca

SEQ ID NO: 310419 - DNA, 104 bp, Homo sapiens
caggcagtcaaccctaaacagtggactcaacttcaaagacgttctcaaggagaaggcagacctgggccaatggaagcactgttgtgaagaacttatgaaaattg

SEQ ID NO: 310420 - DNA, 75 bp, Homo sapiens
tgacaatgtccctcacaccccttccagctacatcgaaacgaactaagcgtcttgtagaaggaactattaatccag

SEQ ID NO: 310421 - DNA, 100 bp, Homo sapiens
tcggagggcggggatgtccccgaggtaacaactccaagtttcctttggataatacacctgttcgaaatcggggcgatggagatggagattttcagttcag

SEQ ID NO: 310422 - DNA, 80 bp, Homo sapiens
aggacgtctgtgccgagccctgagcactccataatgggagaagtaaagaacaaagacttaaggaacagcttggcgctcaa

SEQ ID NO: 310423 - DNA, 99 bp, Homo sapiens
ccgggggagcggcgcggcggcgcgggagaaagcatgtacctacatcagatctaaccttgatcccagcaatgtggattccctcttctacgctgcccaggc

SEQ ID NO: 310424 - DNA, 76 bp, Homo sapiens
cttctctagagctgcttacatttgataatgaggaagctcaagctaggtttttcattagtcaatacagtgaaggctg

SEQ ID NO: 310425 - DNA, 110 bp, Homo sapiens
ggtttgtactatcctcggtgctgtggtgcagagctagttcctctccagctcagccgcgtaggcacagtgaaggtgaagagttctaacatccaagttggagaccttatcat

SEQ ID NO: 310426 - DNA, 100 bp, Homo sapiens
ttcagaaatgccttgcagtggggatgtctcataatgaattcagagagatttctctataccagtgctgaccaatgaaaacataatgtaagaaacaaaggtg

SEQ ID NO: 310427 - DNA, 75 bp, Homo sapiens
cactctgctggttgctgagcaagtgtaaagacctcagccaggtggacgagacggtcatctgttccagccgggcca

SEQ ID NO: 310428 - DNA, 73 bp, Homo sapiens
gacagtgcggctactcttgatcctctccggctgcttggtctacggcacaggtttatgtgagattaagaccatt

SEQ ID NO: 310429 - DNA, 75 bp, Homo sapiens
ggccctgcggagctgcttcgccgctgcgaaaaatggctacaaacttcctagcacatgagaagatctggttcgaca

SEQ ID NO: 310430 - DNA, 88 bp, Homo sapiens
ctaggccgggccctgccagggagcaagtctgcatcgcagaggccagggtgacagagttagtccttgataattgcctgtgtgtcaatgg

SEQ ID NO: 310431 - DNA, 98 bp, Homo sapiens
accaggactacagtaaggctgaaatcattgaagtgcttggagtgcagaactgaaagagaaatgcactcggtgatggaaagagagccactattctgaag

SEQ ID NO: 310432 - DNA, 95 bp, Homo sapiens
gggaatgtgtttttattggatgccacaaaagaaggaaatgtcggccgcttccttaatgacttaaagcccagtaatatagtagtaaaatctgattg

SEQ ID NO: 310433 - DNA, 100 bp, Homo sapiens
ttacatgtatggagaatggctggtctcctactcccagatgcatccgtgtcataacttcaaatgagcatttttcaactgcagaagaaagtgagtcctgctt

SEQ ID NO: 310434 - DNA, 83 bp, Homo sapiens
cacgaggttggtcatgaaagagattccttgcagagacagctcaacacggcacttccacagacctgcctagagctggaacgtta

SEQ ID NO: 310435 - DNA, 101 bp, Homo sapiens
attgcactgctgtaaaaactcagttactcaaactgaaacgtctcctgcatcaggaatgtatcctgtcaggtataatgtcagtgaatggcaagaaagttctt

SEQ ID NO: 310436 - DNA, 82 bp, Homo sapiens
ggcttgccgttcgttcgtttccagcctcaggaatttatggtcgcctttttgaatgagttaagtgggcagaccaacatccacc

SEQ ID NO: 310437 - DNA, 98 bp, Homo sapiens
tggaacacatttatgcattgatgtggaagatgcaaaactggcagacctttcacttcgtatccaacaaattgaaacaactctcaatattttagatgcaa

SEQ ID NO: 310438 - DNA, 100 bp, Homo sapiens
ctggcggtgcagagaccagcatccttggagaaggattactacagcatcccatttcccacacccactactccgctgactgggagggatggtagcctggcca

SEQ ID NO: 310439 - DNA, 83 bp, Homo sapiens
gacgaagaagcagaagcgtctgctcaggttgcagcaggagagagccctgggcgctgcctatggcacagccaagagcggtaccg

SEQ ID NO: 310440 - DNA, 80 bp, Homo sapiens
cagcggccggagccgggccgggcagctagcagggcgcttcggctcctggccactctgaatccacttcctggctctggatt

SEQ ID NO: 310441 - DNA, 75 bp, Homo sapiens
cttacccaagtacatatcctgtaagaccagaattgcaaggccaggaaaatgtttcaacgtgcgcaagagttgcgg

SEQ ID NO: 310442 - DNA, 50 bp, Homo sapiens
gaccctcaggctggtagtgcgcaggtgaaggctgaagtgttagacatggc

SEQ ID NO: 310443 - DNA, 101 bp, Homo sapiens
tatggagcgattttgcagatgtctttcccagggaactccgatgaagtgttccaacaaaatgagcgagtgaaccaagaagaggatgacattagatccaggag

SEQ ID NO: 310444 - DNA, 104 bp, Homo sapiens
tgtgtgctgtcggacccagagggtgacggcgccgctaggatgaagctcgtgagatgatcacagtcgtgttaaactgcaaaatgctgagaatgattatattaatg

SEQ ID NO: 310445 - DNA, 100 bp, Homo sapiens
cgctgaggccgaggcggagaaggggcttcctgagcgtcccagtacactgacagagcttccatgcctatggctgttctaaaattgggccaaatatatccat

SEQ ID NO: 310446 - DNA, 77 bp, Homo sapiens
ccgcatccgctacctgggcgaaaggagagttgctgcccattgaaagagctgctcggaagcagaaggcccgggaagct

SEQ ID NO: 310447 - DNA, 75 bp, Homo sapiens
aactaacacaatttgtaagaagtgtgctcaaaatgtgaagcaatttgggacggttccctacttcagcaaagcgtg

SEQ ID NO: 310448 - DNA, 100 bp, Homo sapiens
ggattgtcacctttgctgcaaaaaattacgggcttccaggcctttgaggtccaactggtgctgaggcaggccctccccaacatctggacggtgctgaaag

SEQ ID NO: 310449 - DNA, 82 bp, Homo sapiens
ctatcggggccgcactgtggtattcgccggcacgcgaagtggccgcatccgcaagatataacacgtgggaaccggaggagaa

SEQ ID NO: 310450 - DNA, 100 bp, Homo sapiens
ccgcagccggacttctgctgcactggggctccgaatgacccagaatctggggtgggcttaggccccgggtacgaggggttcagattcagaacaagaaagt

SEQ ID NO: 310451 - DNA, 74 bp, Homo sapiens
agggatccacatcttctggacccaactgtggaatatgtgaaggtcatactactagatattacactggaacttca

SEQ ID NO: 310452 - DNA, 97 bp, Homo sapiens
accaacactggctactgccaagccgccatatgtttgtgatatcacagtccccgatgcctatctgatcacaactggtcacaaaccatgggcggggaac

SEQ ID NO: 310453 - DNA, 100 bp, Homo sapiens
ggcagcagcacggcacagcacgctcgacttcatgctcggcgccaaagccaggaaatgtgaagaattcacctggaactaagtagaaaactccatgctctgc

SEQ ID NO: 310454 - DNA, 98 bp, Homo sapiens
accatgaagacttgaacttaatacagcaagaaagaccatcaagtttaccagaatacggttggacagaatgaactgaagattacaagtgatcaagtgat

SEQ ID NO: 310455 - DNA, 87 bp, Homo sapiens
gaggcggagacccgacagaggctgctacgcaccgtcaagaaggagttactaaaccaaggagatttaactgaaagacggacatgagcg

SEQ ID NO: 310456 - DNA, 98 bp, Homo sapiens
ctgcggaccggcggcccaggcacggagaggcggcgagaccgcagacacgtccccatcagaaggcaccaacctcaacgcgcccaacagcctgggtgtca

SEQ ID NO: 310457 - DNA, 50 bp, Homo sapiens
cttcgaccagcttcatcctcagacaggggatcatggaagctgataaagat

SEQ ID NO: 310458 - DNA, 74 bp, Homo sapiens
ctgagccacagcagcaacagcagctcagaaacatggtccaagacaattcctgggaaagttcagttcttctcaag

SEQ ID NO: 310459 - DNA, 101 bp, Homo sapiens
acccaaggaaagcacttaaaagtggaaagatgacggatgaaaagaatgaacactgtccttcaaaacgacggttaagaagattgtctaccaaatatagaaca

SEQ ID NO: 310460 - DNA, 78 bp, Homo sapiens
cagcatcaaccaggagctctgccggctcaacacgatggacttactgctggtacacggtcctcttctcgcacggcaatg

SEQ ID NO: 310461 - DNA, 100 bp, Homo sapiens
tggacaagcccatgctgaagcaggccggctctggcgtccacggtgcagaaaagactgactcattttatcattcttctggtgggctggagttatatggaga

SEQ ID NO: 310462 - DNA, 100 bp, Homo sapiens
gccttgggacagggggatttggaaatgtcatccgatggcacaatcaggtgctatgacaagcgtctgtggcctcgaatggacctgagccggcggaagtcac

SEQ ID NO: 310463 - DNA, 100 bp, Homo sapiens
gccagttccggcccgaggacaccgactaccagcaggttcgtgctggccgtgggcagcgccgtctttgatgccatgttcaacgggggaatggccacaacat

SEQ ID NO: 310464 - DNA, 98 bp, Homo sapiens
gccggcccctgcggccgcaggtcgtcacagacgatgatggccaggccccggaggctaaggacggcaggtcctggctataagtcaccatggcacagcaa

SEQ ID NO: 310465 - DNA, 100 bp, Homo sapiens
ctgcatttgtcagcacctggaaacatctgccttcttaaatgcagtacattctaaagagagtgagcatgaggtgttactgcggaaatgcaaaacttagtcc

SEQ ID NO: 310466 - DNA, 100 bp, Homo sapiens
gccgggaggctcctgggggccggggctccgagccgttggacataccagatggtcgaagagctccacttcctgctcattaccggagcagtagtactcgcag

SEQ ID NO: 310467 - DNA, 51 bp, Homo sapiens
cgaggttcctgtgcaactcttcacagactggaaagctacccttgaggagaa

SEQ ID NO: 310468 - DNA, 81 bp, Homo sapiens
tcacctggcggtgcccgaggagtagtcgctggagtccgcgcctccctgggttggtgacagcgtcccaagctggtgacagac

SEQ ID NO: 310469 - DNA, 100 bp, Homo sapiens
aaaattttccttgacctttaggtgcttttatattcatctcaaaaacaaaattctgaactcaggacttggcaaatgccgatagacaagattccattaatct

SEQ ID NO: 310470 - DNA, 75 bp, Homo sapiens
gactgggtttggattgtagtgggcatcctcaacttcgtagcctacactctaggcatctggctattcttggtgcag

SEQ ID NO: 310471 - DNA, 100 bp, Homo sapiens
tgacaacggttcaaaaatcaccaactaccttttagagtgggatgagtaataagaaacctgactcagaagcaagtgctttgaagaaaaaggtcaacaaggg

SEQ ID NO: 310472 - DNA, 74 bp, Homo sapiens
ctcttctggtgtcaaagcttttggacattcctggggtgacttaagagattaaaattaatttggttgctgttggt

SEQ ID NO: 310473 - DNA, 100 bp, Homo sapiens
gaggaggaacttcgaaccatggaccaggccctcaagtccctgatggcctcagaggaggaggtgaccgtgctctttgctggccagaacattgaacgcagtc

SEQ ID NO: 310474 - DNA, 76 bp, Homo sapiens
gtcaagtatgtggagtgttctgcacttacacagagtgatcagcagctggactgtgccttggacctaatgaggcgcc

SEQ ID NO: 310475 - DNA, 114 bp, Homo sapiens
ggaaaattaagcagatgctccagtttgagaaacctggatctgcgatctgtttgtgggtctagacagtttcaaagtgaaacagaagttcttcgctggcagccaggagccaatggc

SEQ ID NO: 310476 - DNA, 83 bp, Homo sapiens
ttcatctaatgaaaatgattcatcccaacttatacaggatagacagattgacagatgagaaatgtccagaaggaagaccgcac

SEQ ID NO: 310477 - DNA, 51 bp, Homo sapiens
cgggagtattatgaaaagatcgacatgatccacatcgcggacaccaaggtc

SEQ ID NO: 310478 - DNA, 90 bp, Homo sapiens
agaaagaggaggggaggaggaggaggattcagggaataggagctggggagcccttctgcgccacaggagattgcatcctacctgatcacc

SEQ ID NO: 310479 - DNA, 74 bp, Homo sapiens
cggccgaggcggtgctgcaagagaaggcactcaagtttatggcaaattggcccaagaactttggtgtggtctga

SEQ ID NO: 310480 - DNA, 100 bp, Homo sapiens
gcagagctaaatgggggcctctccagggagtgctctgttcacggctccatcgctgttagtactccaaagattcaggtttactcacgtcatccagcagaga

SEQ ID NO: 310481 - DNA, 75 bp, Homo sapiens
accaccgtggaagtcgcctggtgtgaactgcagacaaacctacctatcttcaagctaaaggagtcctgcgtacgg

SEQ ID NO: 310482 - DNA, 100 bp, Homo sapiens
tggctctgtgacctgcaggtattgggagatccacagctaagactccaggaccctctggaagcctagaaatgatataaagatgaagcgcagctgtataaag

SEQ ID NO: 310483 - DNA, 76 bp, Homo sapiens
caaaattctgaactcaggacttggcaagctgttttggagtcagcggaagatcaccaaggccagggagtggttccac

SEQ ID NO: 310484 - DNA, 103 bp, Homo sapiens
ccgtgcagcccaacttccagcaggacaaggaaagaccacagcaagattctttcattcgtctcctcctagcctgggggaccaggctcgaactgaccctggacat

SEQ ID NO: 310485 - DNA, 51 bp, Homo sapiens
gacataagcaactgaagtccgctgggttggggtctgctaggtccccggaat

SEQ ID NO: 310486 - DNA, 90 bp, Homo sapiens
ctcggagttggcaggaagccaggttgcagggtgtccgcttcctcaggactccaacctgtctgtgcacacagaaaacccggacctcactcc

SEQ ID NO: 310487 - DNA, 106 bp, Homo sapiens
gtttgaacaaactcgaagaacagctgtggaaagaagttgcaaaacactggatgaagttgcggagaataatgaacatgatgtcacttctactgaattagatcccttt

SEQ ID NO: 310488 - DNA, 100 bp, Homo sapiens
gggaggcctgggctgtgacgcgcgcgccggagcggggtccgatggttctcgaaggcccgcggcgccccgtgctgcaggcaatctttggcagccagacact

SEQ ID NO: 310489 - DNA, 100 bp, Homo sapiens
ggagaaccaactggtcccgaaagaggtcaaaatgcagatcttcgtgaaaacccttaccggcaagaccatcacccttgaggtggagcccagtgacaccatc

SEQ ID NO: 310490 - DNA, 96 bp, Homo sapiens
catttcatccctcgtcgaaaggattggattggcatctttagattggcaaacatgaattgactgggcataaagtagctgtgaagatactcaatcgac

SEQ ID NO: 310491 - DNA, 90 bp, Homo sapiens
ctgttgagtatgctccatgtagatcactaagagttccctatttcattgatttgaaaaaaccacaggatcaaggtttgaatcacacgtgta

SEQ ID NO: 310492 - DNA, 100 bp, Homo sapiens
ttatgaccggctgagcccccatcattgggagaaatccccactcctccaagaaccaacccccaaattggctgggacagtacaagccagctgccatgttgtg

SEQ ID NO: 310493 - DNA, 100 bp, Homo sapiens
gtatttatgagcctccatttcttatactactgcagtgaaccaacattggatgtgaaaattgccttttgtcagcggtgcagaggggcaggatgccgccgac

SEQ ID NO: 310494 - DNA, 51 bp, Homo sapiens
cgttacagccggcgaagaagaagcagagatgtaaaacagatgctcttgaag

SEQ ID NO: 310495 - DNA, 82 bp, Homo sapiens
aagaactcgcaagctcctacgaaagaaagctcatcgagggggatatgagactttctactcggaatatcctgagtgttgcgtg

SEQ ID NO: 310496 - DNA, 75 bp, Homo sapiens
ggaggctgaggcgggcggatcacgaggccaagcaaataaagtagccaaagaagctgctaacagatggactggtat

SEQ ID NO: 310497 - DNA, 50 bp, Homo sapiens
cggcttcatcagcaccttggggttatcaatactctggctgaccatcatca

SEQ ID NO: 310498 - DNA, 109 bp, Homo sapiens
tgtcctggtcttcaagctcactgccgacttcagggaggatccggacccccgcaaggtcaacctgggagtgggagaaatgacgctcctctcctcccagtcttcatcactg

SEQ ID NO: 310499 - DNA, 106 bp, Homo sapiens
gaccgagagcgcgaatatcgtcatcgttagaaggtggtggaggtggatacagcagtcggagaacatctggcagagacaaatacggaccacctgttcgtacagaata

SEQ ID NO: 310500 - DNA, 98 bp, Homo sapiens
ctcccaagtagctgggactgcaggtacaccaaaccgctcacctttgctgactgcattagtgatgagttgccgctaggatgggaagaggcatatgaccc

SEQ ID NO: 310501 - DNA, 75 bp, Homo sapiens
accaaataagctatatactttggttacctatgtacctgttaccactttcaaaaacctgggagacgggctggagaa

SEQ ID NO: 310502 - DNA, 76 bp, Homo sapiens
gagggagccgcgggatggaccgcaggtcacagagatgcggcggaccctgacgcctgccagctccccagtgtcctcg

SEQ ID NO: 310503 - DNA, 100 bp, Homo sapiens
aaggtgatgcccaagatggaccaggatcagttcttaagagcagccccggtaactggaggaatgggagccgttttgatgagaaaaatgggctggagagaag

SEQ ID NO: 310504 - DNA, 82 bp, Homo sapiens
cgaggactcggagttcacctgcaggtttttcccactcggctttcacgtttgggattgagagccacatcagccagtccaacat

SEQ ID NO: 310505 - DNA, 97 bp, Homo sapiens
cctgacaatgatagcctcgtagtactctttgcacaggattcttgggatgagcttcttattggtgacgtggaactgaaaagggtgatggcttgttcca

SEQ ID NO: 310506 - DNA, 83 bp, Homo sapiens
ttcgagtgcatcgaggacctgtctgaagaccatggtgaatccgggcagcagctcgcagccgcccccggtgacggccggctccc

SEQ ID NO: 310507 - DNA, 82 bp, Homo sapiens
cgaggacggacaggtggtgctcatcaagcaggagaaagaccgaatgccggtggccgtgggtccctacggacagtcccagcca

SEQ ID NO: 310508 - DNA, 100 bp, Homo sapiens
cgaagatccggactctgggtgttttgctaccgtgaccgtttaggtctctggacactatgggcacacgactcctcccagctctgtttcttgtcctcctggt

SEQ ID NO: 310509 - DNA, 100 bp, Homo sapiens
cctgcagcacatcagcgaccgggagaacatagacggtgccagtcacgaattgcccgaacattacctgctgatcagaagccagaatgtcggccatactggg

SEQ ID NO: 310510 - DNA, 50 bp, Homo sapiens
ctggagttattggctagtaagaaagagaatgtaactggtcactacatttc

SEQ ID NO: 310511 - DNA, 100 bp, Homo sapiens
gcccgccgcgcggagcgccccttcgcgtcccctgcaccatgagctggggcaccgagctctgggagggccctcctggacccgggagcggaccctggtggcg

SEQ ID NO: 310512 - DNA, 82 bp, Homo sapiens
gacaagaaagcgcaaggaatgtcctgaccaacttggacccaggaatagctattcagtcagacagaaccacttatcacgtttt

SEQ ID NO: 310513 - DNA, 75 bp, Homo sapiens
caaacagccctcagtttctggagctgttccgagggctcgtgcaatccgcttcagacaggatggtaacgaagccgt

SEQ ID NO: 310514 - DNA, 99 bp, Homo sapiens
gaggtcacattgttggtgcaacgaggagatcatatactcctatgaaaggaggaatctccaatgtatggtttgacagatttaaaataaccaatgactgcc

SEQ ID NO: 310515 - DNA, 90 bp, Homo sapiens
ccacgctcctgatgatcacgtataaaagctgacgtgatggcagacagggttccccgctgcccggtctgcaccggcgttgtgaagcccgac

SEQ ID NO: 310516 - DNA, 82 bp, Homo sapiens
gcgcggcttcctccagacctctcggcgcgggagtctgcactatggaaacaacctgtcaatccagctcaaggcacacatagcc

SEQ ID NO: 310517 - DNA, 88 bp, Homo sapiens
cctccagtcaccctcgtcttgcattttcccgcgtgcgtgttttggtgccctggttgtcagatgttggaaagcagtaggacggaacata

SEQ ID NO: 310518 - DNA, 74 bp, Homo sapiens
aggattccaagtaactcttatttggtttgaagactgcttcattctgcctctagtaccagcggtttctctgttct

SEQ ID NO: 310519 - DNA, 90 bp, Homo sapiens
agaaggagcaggattaccaaaggtggtccacatgtgccaggagatgtgggaatggctacccctgaagtcatatggagaaatggggtcctc

SEQ ID NO: 310520 - DNA, 75 bp, Homo sapiens
aaccatgaagacttgaacttaatacagcaagaaagaccatcaagtttaccagttcatcgttgggtcaattatgaa

SEQ ID NO: 310521 - DNA, 88 bp, Homo sapiens
gcataatgacattgtggacagtgacagcgatgctgaggatcgaggaacgttgtctggtgagaagccctaccactgcaactgggacggc

SEQ ID NO: 310522 - DNA, 100 bp, Homo sapiens
aaacacaagaatagaagaggcttgtgaaatgtataccagagctgcaaatatgttcaagatggctaaaaattggagtgcctcgagctgtggcaggttttcg

SEQ ID NO: 310523 - DNA, 100 bp, Homo sapiens
cgggctgcccaagcgacagctgtcagaggggcaggagcttctgggagccaccgtctgaaggtatctttcagatgaaggcattgaagcttgcacaagctct

SEQ ID NO: 310524 - DNA, 100 bp, Homo sapiens
ccctgccaggccgcacacaagctggctgacccgggtggttattaacttggtgatgcttttggctgaaatgaaaatacaggaccgcgctgttccatccttg

SEQ ID NO: 310525 - DNA, 101 bp, Homo sapiens
aggggccccagcagcccccgaaggccctatcaggacatggagtatgaaagacggttgcagaaaatcctcactctgagtacggtctcacagacaacgttgag

SEQ ID NO: 310526 - DNA, 98 bp, Homo sapiens
accgctcatcacgaacatcatcgtctgatgaagaagaggagagccagatgaccaagatgctccagatgaacatgagtcgcctccacctgaagatgccc

SEQ ID NO: 310527 - DNA, 75 bp, Homo sapiens
agccgagtcactactgcctgcctgcctgcctgctacgaatgattacggacctgaagccaaagaacaagatgcgct

SEQ ID NO: 310528 - DNA, 75 bp, Homo sapiens
cagggaccacactgcaattctggatttcctgccagcaggtctttcccgcggtgacttcccttgggctgaatgaac

SEQ ID NO: 310529 - DNA, 90 bp, Homo sapiens
ctgggcttggccaagtccatccaccacgctcgcgtgctgatccgccagcgccatatcaggatttttttcccaggaagccatcccgtcaga

SEQ ID NO: 310530 - DNA, 75 bp, Homo sapiens
ctgaggagaggagcgtcaacagcagcaccatggcgctccattagcttccgcagtgagagccgccctgacatcctc

SEQ ID NO: 310531 - DNA, 95 bp, Homo sapiens
cggagaggcgcatcgtgttcgaggcggagaccgagggggagccccgcgcgcggcgtcgatgccagaggaacaagcattctgtgttttggtgaaaa

SEQ ID NO: 310532 - DNA, 100 bp, Homo sapiens
taggggtgcacctcagcactatcccaagactgctggcaacagtttcataaacagaccttgagttccatcatgatgcctcatccagcaagtgcaccttttg

SEQ ID NO: 310533 - DNA, 95 bp, Homo sapiens
gcgaggcaggagagaggaggaggagtgcggcgcggcggccccgggaccaaggaggtattgttgcagcatctggcagtgagactgaggatgaggac

SEQ ID NO: 310534 - DNA, 82 bp, Homo sapiens
ctcagtctcccgagtagctaggactacaggtggatgcgagcacggcccataggatcgatggcctggcagcactgagcatgga

SEQ ID NO: 310535 - DNA, 100 bp, Homo sapiens
gggctctgggagtggctgccagggcctgccttaagtgtgaaagtaatgactgatgaaagtggaaaatccaaaggatttggatttgtaagctttgaaaggc

SEQ ID NO: 310536 - DNA, 75 bp, Homo sapiens
ctggattggacaagcaggcaaagctgagggaacagaaagaacagcttcaaaagatgaaagacttcgggtctgagc

SEQ ID NO: 310537 - DNA, 82 bp, Homo sapiens
ctcgggcggccccggcccgcgcccttgcccctcggccgggcggacggctggcagtgatggtgaaagcataggaaactgcccc

SEQ ID NO: 310538 - DNA, 75 bp, Homo sapiens
caagactaaaaacacttctctcagaaacagagcgccctcacaaagccaatgctgaggagatgaccaagtaccaca

SEQ ID NO: 310539 - DNA, 50 bp, Homo sapiens
caatatcccatttttgcagcttcagcatccgcagtgtcatgcagaagtac

SEQ ID NO: 310540 - DNA, 75 bp, Homo sapiens
cggcaggggcggggacgcccggcctgtggcccccgcgccccccatggtcctcagtctcctccaacccctctggct

SEQ ID NO: 310541 - DNA, 100 bp, Homo sapiens
tccagatgaaagagaagtttctggtcactccccaggattatgcgcggtcatctcgatgcactcctgaggggcttggttctgggaaaactaggaaaagcag

SEQ ID NO: 310542 - DNA, 90 bp, Homo sapiens
ccttattggacagaaacgacccaggaatgcgcctcgcttttccacctatttccctggatattttgatggtcagtactggctctggtgggt

SEQ ID NO: 310543 - DNA, 100 bp, Homo sapiens
catctcgctcggctgcgggaaatcgggctgaagcgactgagtccgcgatggagtcttactactttgaccgcgatgatgtggctttgaagaactttgccaa

SEQ ID NO: 310544 - DNA, 97 bp, Homo sapiens
acagttcagtgtattcgttctgtgcctgaactcaaagatgcccttaaaagagttcgaaatttgagcaacccagccaagaagttcaagattgaagcca

SEQ ID NO: 310545 - DNA, 100 bp, Homo sapiens
cttccctttccacctccctgaccctgtcggattcggatgagcccattgcaaggagaagacgcagccgtcagtcggatacgctaaaaatcaagcagttgcc

SEQ ID NO: 310546 - DNA, 100 bp, Homo sapiens
aagttcttactagctgtttccagagatcgaacctggtcattgtggaaaaagcaggatacaatctcacctgagttcggccaactgtgatttgagacggcag

SEQ ID NO: 310547 - DNA, 74 bp, Homo sapiens
aattatttcgagagtcaaaatgtggatttccgaggcaagaaggtgactgcccaggatgtgcggaaggaaagccc

SEQ ID NO: 310548 - DNA, 90 bp, Homo sapiens
tgaagtgctccactcgaacagatgtgagcgagaaagccgttgcctccagcaccacttctaatggatctgaagaagctgaagaaaaacagg

SEQ ID NO: 310549 - DNA, 75 bp, Homo sapiens
atccaaaggcagacagtacgggctcccttcgccaaactcttcattttctctattcctcttctcctgtaaatgacc

SEQ ID NO: 310550 - DNA, 90 bp, Homo sapiens
caggaatgcttactgttgcgtggttcgttattaacaggaagatgttaccgagtacttcagtgaattccttagtgcaggggaacggagtct

SEQ ID NO: 310551 - DNA, 100 bp, Homo sapiens
cccccatccaggcggtctgaaaacagagtggttgtctctggtaagaagacaagaggtttcttctcctagaaaagaaacttcagcaaggagtcttggcagt

SEQ ID NO: 310552 - DNA, 127 bp, Homo sapiens
cagacatgcacaggacctggcgggagacttttctggataatcttcgtgcggctgggctgtgtgtagaccaggagttcatccgtgagggctgccttcacaagctcaccaagaagggcctgcagcagag

SEQ ID NO: 310553 - DNA, 100 bp, Homo sapiens
gagcttcctggagcggctggaagcgcggggcggccgggagggggcagtcctcgccggcgagttcagcgctaaccttgccgcgggccgagccctgcctcgc

SEQ ID NO: 310554 - DNA, 100 bp, Homo sapiens
atttcactggcaaagtggttgtggtcactggagctaattcaggaatagacagatacattgataactccatttgtgggtttaatagaccacaacttccagg

SEQ ID NO: 310555 - DNA, 100 bp, Homo sapiens
cacttagtaaactaatgaaagcctattgtgaacgacaggatcccaaaatggctgggcgaaaacttgctctaaaaaccattgactgggtagcttttgcaga

SEQ ID NO: 310556 - DNA, 83 bp, Homo sapiens
cgtcaccccagaccttgccagagacctggcaaatgacatcatgacactgttacagaatgtctgaaggggacagtgtgggagaa

SEQ ID NO: 310557 - DNA, 83 bp, Homo sapiens
ttagcagatatactattgtactatggacttcatcgctttatagtgatggtgtttgtacatgctcgaaatgccactgtaagaac

SEQ ID NO: 310558 - DNA, 101 bp, Homo sapiens
tatccaaccttgcgctgcatccgctcgacctcgtgaagatccgcttcgccggtgaatactgatggtctggtgctaagaggctggtataactgtctgacact

SEQ ID NO: 310559 - DNA, 75 bp, Homo sapiens
ttgcactgtaaaaaacccagctgaagaccactttagaaactcaattaaatgacccctaaatccaaaaggaagagt

SEQ ID NO: 310560 - DNA, 99 bp, Homo sapiens
aaacaaatgaagttcaaggatttctctttgggaaactaaaggatgcccgggtagttaaagacatggcaactggaaaatccaaaggctatggttttgtat

SEQ ID NO: 310561 - DNA, 87 bp, Homo sapiens
caggagcttgggtgtgctgacgagcagggtgggtcgggtgtgctgacagccggctgttaagccctgcctgccccgcgccaaaggaag

SEQ ID NO: 310562 - DNA, 100 bp, Homo sapiens
tcgatcccttctctgatttgctgtcagccatgaacggatggatgtgatgcctgctagccaaaaggagacacccgccatttcacccagtaagcgggcccgg

SEQ ID NO: 310563 - DNA, 100 bp, Homo sapiens
gcatatgattggctctttagctgaaatacttctgaagggtgttcatttagaagaaagcaacactaatgattcaaacagcttcctgaattttaattttgtg

SEQ ID NO: 310564 - DNA, 100 bp, Homo sapiens
gctggcaattcacatgccatggcctttttgggaaagctctctgatgtaaaggatggagtaaatcaagcagcacctgcatttggatttggcagcagtcaag

SEQ ID NO: 310565 - DNA, 50 bp, Homo sapiens
ttggggcaaaatgtggacaaggcctaccgtatgtgaacgggagctgtgtg

SEQ ID NO: 310566 - DNA, 75 bp, Homo sapiens
tgtgttctggttccagtcaagcaaaattattcagcaccagcctgtagtggtggagacacgcccagtggatgatcc

SEQ ID NO: 310567 - DNA, 98 bp, Homo sapiens
tccatcaatgacatgatgagcagcatgtcagaccagaccgtccgggtgaaggtatttataacagcaatgatgtagcagtatcgtttccaaatgtagta

SEQ ID NO: 310568 - DNA, 89 bp, Homo sapiens
tatcccaaccaggagggacgataagggagcgcatgaacctgaaggtgcccatctacttctccacggggctgaccgagaaggccaaccac

SEQ ID NO: 310569 - DNA, 74 bp, Homo sapiens
acagtgatgtgaagaggttcagctgtcctaatcctcactgccgaaaggatgacagtgatgggattccgtggtca

SEQ ID NO: 310570 - DNA, 98 bp, Homo sapiens
ccacccccattctcttcaggggggcttcctctatcggcccgccgctgctcaccctggtgaactttgaagtggaaaatctggcgtacatgctggtgtgc

SEQ ID NO: 310571 - DNA, 83 bp, Homo sapiens
cttcgtctccgccatcagctcggcagtcgcgaagcagcaaccatgggtcctgccctccggaggagcagcctcgaggctggtgg

SEQ ID NO: 310572 - DNA, 112 bp, Homo sapiens
acaggaagaagactgctgcaggcagggcatcagtggtttttgtggacagaaccctggatctcacaggtacagcagggaagaactggaaactcagagaaagaaactgcccttc

SEQ ID NO: 310573 - DNA, 75 bp, Homo sapiens
caacgatcccgtcaacacgaaaatcccaggaatcagagatttgctatgggatcatttatggaatgggagctaaat

SEQ ID NO: 310574 - DNA, 75 bp, Homo sapiens
tgactattgcaccacgcccggggggacgctcttctccaccacaccgggagccactgaggcggctcccagctgcgt

SEQ ID NO: 310575 - DNA, 100 bp, Homo sapiens
ctgggtcctcggtcggtacagtctctgcacctcgcgccccagcagagctccaaacgagaatggaagccgctggaggaccgtagctgcacagacataccat

SEQ ID NO: 310576 - DNA, 75 bp, Homo sapiens
caacattggagtgtgtgaaaaaaaatatgcccgtggaagggctgaagaagatgcagagcagcctgaagctggtgg

SEQ ID NO: 310577 - DNA, 86 bp, Homo sapiens
gatggagattttgatgtggatgatgccaaagttttattaggctggtgcagtggtgtcatcttggctcagtgcagcctcgacttcct

SEQ ID NO: 310578 - DNA, 75 bp, Homo sapiens
ggccgagccgggatctcaggtcctcgggggcggcggccacgccaaggacgggaaacctgtccagtttaagtcgtc

SEQ ID NO: 310579 - DNA, 121 bp, Homo sapiens
gcttcgccccgggccccccagcatgaagaccccggcggacacagggtgaggtggctttgaccccgggttgcccggccagcacgaccgaggaggtggctggacagctggaggatgaacggag

SEQ ID NO: 310580 - DNA, 101 bp, Homo sapiens
ctgttcttcgtaggcggagtcgccgagtcgtcttactactttgaccgcgatgatgtggctttgaagaactttgccaaatactttcttcaccaatctcatga

SEQ ID NO: 310581 - DNA, 78 bp, Homo sapiens
cggggcgcttcgccccgggccccccagcatgaagaccccggcggacacaggtgaccatggaggaagaagatgagtctc

SEQ ID NO: 310582 - DNA, 100 bp, Homo sapiens
cagggcgtcgcagcgccgcgtgcggcccactcacgggccggtggtggtcaatgcatcatcaagattaatgctcagttatgacctcaagacttatctcacc

SEQ ID NO: 310583 - DNA, 100 bp, Homo sapiens
atcatcaaatccaactatcaaggcctcccagtacgttgtgtgaagagtatcattcgacagattgtagaaggcatgaaacaaaaaatgtggagtattgaaa

SEQ ID NO: 310584 - DNA, 75 bp, Homo sapiens
tggagactatcctggagaaccctttattttacatcattcaacatcttgtcggatcatgctaaaaggagataatat

SEQ ID NO: 310585 - DNA, 100 bp, Homo sapiens
tgttttctgagcgagccttgaaagagataaaagcggaagtttgccacacggaaaagtgtactggctcctgtcctggatcaactcagaaaatgaaacacat

SEQ ID NO: 310586 - DNA, 82 bp, Homo sapiens
cagcacaagaaatgtgtataggataatcagtttagatggctcaaagatacttgtttgccttgcaacttaagagagacctgct

SEQ ID NO: 310587 - DNA, 75 bp, Homo sapiens
gggtgttgatgaagaaattgtttatgccaaatcaactgccttacagagggagcactatgtctgcggaagtccccg

SEQ ID NO: 310588 - DNA, 100 bp, Homo sapiens
taaagaaatggattagtgataactcaagtttcatcacctgactgaagtgtgtatgtcttttgtgtgattcttcaaacttcacctgccaaacagaaggagc

SEQ ID NO: 310589 - DNA, 118 bp, Homo sapiens
taaacccttggaaaatttccggaaggaacaaataggcttcaccaagtacttgattctaaagctcgaaaggcctgctatagttcagaatatcacatttggaaaatatgagaaaactcat

SEQ ID NO: 310590 - DNA, 98 bp, Homo sapiens
cccagacccaggccaatgccagggccatccacaggctccggaagcagctggtgtggcagtcctgcgttaactgcggccgggaggctatgagcgagtgc

SEQ ID NO: 310591 - DNA, 100 bp, Homo sapiens
aatttgaggaagaacgcgccagagcaaaatgggacacaatttctaccactccaaacgccggctgatcttctccaagaggaagccctaatccgcccacagg

SEQ ID NO: 310592 - DNA, 100 bp, Homo sapiens
caagcaagtaactcccagttcatccccattcatcaccctggagccttccctcctcttcccagcaggccaggtgaggaggtgttacttatccaggaaaaac

SEQ ID NO: 310593 - DNA, 100 bp, Homo sapiens
gaagctgtggagttggtccagtatgcttactttaagaagcgtgagtgcatctccatccacgttggccaggctggtgtccagattggcaatgcctgctggg

SEQ ID NO: 310594 - DNA, 82 bp, Homo sapiens
agaaagcaggcgaacccgcggcgcaataacgaccccctcgaggacggtgccagactcggaggcccccccagggtgggatcgt

SEQ ID NO: 310595 - DNA, 100 bp, Homo sapiens
ttggatctaagcaaaaagaagtttgtatcaacccataccactataagagagtggagagtccaggacttagatggtaatctccttgactcctgggaagggg

SEQ ID NO: 310596 - DNA, 75 bp, Homo sapiens
gccggttcgctgcccggtccgcccgcggtgagaggtggtataagttgaaatccaaaccaggaaagaaggacaagg

SEQ ID NO: 310597 - DNA, 73 bp, Homo sapiens
tgaggccaatgtcagagaaatctttgacaaggtgccaagtcctgccctgccaacttcttggcagctgccgacg

SEQ ID NO: 310598 - DNA, 75 bp, Homo sapiens
tgagcctgactccttgctacaggaaagacaatgtttatgtaagcagcagttcgtgccctcgtgaggctggcatgc

SEQ ID NO: 310599 - DNA, 100 bp, Homo sapiens
catgtgtcgtatcatagttcattttatgtgggaggatgttcagcagcgcggcagagtcatggggggtggttctcttcccaaagtggaagccaaattcatc

SEQ ID NO: 310600 - DNA, 50 bp, Homo sapiens
ggagagtatgaatgggtccataaggtgaccaggcattgatgcacccccag

SEQ ID NO: 310601 - DNA, 98 bp, Homo sapiens
gctgaaccccgtgaaggcctctcggagtcaccaggagctccaccgggagctgctcatgaaccacagaagggagctcactcagtgggtttgatgtggtg

SEQ ID NO: 310602 - DNA, 100 bp, Homo sapiens
ctaagactgcaataagctcttttacaggcaaatgaagaggattcttccagttctctagtgaaggatcacctttttcagcaagagacagttgttaccagtg

SEQ ID NO: 310603 - DNA, 70 bp, Homo sapiens
catcgttgcccaggaacagacagtgaccaatcagggatctggatctgaagaagccaatttatcagaggac

SEQ ID NO: 310604 - DNA, 82 bp, Homo sapiens
tgaggatggacccaggagatcccgctggtgaccctgccgctggcgagcgccaccgcatggtaagactttgaccccgacgcag

SEQ ID NO: 310605 - DNA, 83 bp, Homo sapiens
aatatggagactgttcaatcaccaggggaagcagctcgagagtgtcgtagaaagaagaaagaatatgtgaaatgtttagaaaa

SEQ ID NO: 310606 - DNA, 75 bp, Homo sapiens
tgtgcgaacatgtaacaagaatccaaagaaaacaaaatggtggtatcatggatattagaaatggctactccccag

SEQ ID NO: 310607 - DNA, 101 bp, Homo sapiens
gcagcgggacccggcgaagacgcgaccgcggcgcgagtcaccatgcaaacggggattcagcgtccgatcctttggaacagggactcacgtgaagcttccag

SEQ ID NO: 310608 - DNA, 101 bp, Homo sapiens
gtggcctccgtgggacatggagtgttccttccgctagtgatcctttgcaccctgcttggagacggacttgcttccgacattcacggcatggtgtaactccc

SEQ ID NO: 310609 - DNA, 100 bp, Homo sapiens
tggaggcagaggtggcatgggcatcccagccatcactcttccacctgctccttagagaagggaagatgagtgagtcgagctcgaagtccagccagccctt

SEQ ID NO: 310610 - DNA, 100 bp, Homo sapiens
gcgggctccatccgggaagccggtggggccttcggaaagagagagcaggaagataaggctttcaagcagaaacaaaaagaggagcagaagaaactcgagg

SEQ ID NO: 310611 - DNA, 100 bp, Homo sapiens
gagccgcggaactcggcggccgccatggcgtccaacatggaccgggagatgatcctggcggattttcaggagttgtaagacgttcatcgccgtgttatcc

SEQ ID NO: 310612 - DNA, 100 bp, Homo sapiens
gagggagaaatgttttgtttgactccagtgttaagagaagaaatgaggacatatcagtatcggagtggagtcaacatatcaatggagcaagtcacagtcg

SEQ ID NO: 310613 - DNA, 90 bp, Homo sapiens
aatcgcttggttaaaacctgacacttttaacagaaaatgtgccagaggaacttcaagaaccattttacacagatcagtatgaccaggaac

SEQ ID NO: 310614 - DNA, 83 bp, Homo sapiens
ggcaaagttggtgtatgaagaagataagatttgtgaccaaatcagtgatgctgtccttgatgcccaccttcagcaggatcctg

SEQ ID NO: 310615 - DNA, 75 bp, Homo sapiens
gacaaggatagcattatgaacatagaaagttactgtggcccatgtcctaaaaactggatatgttacaaaaataac

SEQ ID NO: 310616 - DNA, 51 bp, Homo sapiens
ggagctgcaggctgccctggccaggcttgacgatgaaatcgctcagaagaa

SEQ ID NO: 310617 - DNA, 75 bp, Homo sapiens
ctcccgggtagctgggactacagctcctaaaagacgacggcctgcacgttcaatttttgatggtttccgggattt

SEQ ID NO: 310618 - DNA, 100 bp, Homo sapiens
caccttcagagcgtcacggcgtacgccctcatggggaaaatctccccggtgactttcagagttcaccgaacagcagaaagaatttcaagctactgctcgt

SEQ ID NO: 310619 - DNA, 83 bp, Homo sapiens
atttttttctattttccctacgaaaaacagatctttttaaggatttttagactctgaggagcagttggagctaatccacatta

SEQ ID NO: 310620 - DNA, 74 bp, Homo sapiens
ccaatgtagaagaggtgacacttcccaaaacaggtgaatatgaccatctcccagaacaggccttctatatggtg

SEQ ID NO: 310621 - DNA, 100 bp, Homo sapiens
tggcagattccaggaaaggctcaagaggaagtgccgcgtcttggtgggtctggagctggctgacaatgcagggtgctcctgacctctgataaagctgcag

SEQ ID NO: 310622 - DNA, 83 bp, Homo sapiens
tctggacccggagcccggcggcctcctcaccagccaagatccctgaatattgccgagccttagaagagaatgaaatatctgag

SEQ ID NO: 310623 - DNA, 100 bp, Homo sapiens
gcagaccacagttacatgtatggagaatggctggtctcctactcccagatgcatccgtgtcattaaacacagtgggaatatcacttttgatgagattgtc

SEQ ID NO: 310624 - DNA, 90 bp, Homo sapiens
tccaaacaagcttcattgttttcagctaacagtaaccccaggtaaagatgatgattcttttgatcggaaatcagtgtaccgaggctcgct

SEQ ID NO: 310625 - DNA, 90 bp, Homo sapiens
cctgcagcctcctggcaccaaagagatcatgatgcagccgtccttttggatttctttttaataatgtgtgacccttcacctttgatcccc

SEQ ID NO: 310626 - DNA, 100 bp, Homo sapiens
gtcagtccgccgctcaccccgcggccgcaccttcccgccttctcagtgagctgaagcagaagctggatgaggaaggcagcaagtgcagcatcctctcgaa

SEQ ID NO: 310627 - DNA, 95 bp, Homo sapiens
gatcgacttatcgccattggaggtctctacagcggaacaatgtcgttcttcccccaaaagcatgatttgctgcaataaaaaatccctatatcttc

SEQ ID NO: 310628 - DNA, 98 bp, Homo sapiens
cagccagttactatggcagttgcaaaatattcaggagaccgtcgttgccttgtatttccagagaacagccatccgggtgacctgcataggttcctgcg

SEQ ID NO: 310629 - DNA, 106 bp, Homo sapiens
tgagcctcctgcaacacctgcggcctcactgggacccccaggaggtgaccctgcaggatgcatcatctgcagacatcagaaaagcatatcgtaagctttcactaac

SEQ ID NO: 310630 - DNA, 75 bp, Homo sapiens
ctgttgtatgcagtgaaagagttgctgaactacaaagaaagggttctgatcccactgcattctccgtccttaccc

SEQ ID NO: 310631 - DNA, 75 bp, Homo sapiens
ttttaccattgtttcatcaacgtctaagaaacttggagaactccagatgcaggccctgacttcctgtgagtgcac

SEQ ID NO: 310632 - DNA, 50 bp, Homo sapiens
aagactatggcatcacaagtgtcgttgtatcagagtaagatggacggtag

SEQ ID NO: 310633 - DNA, 100 bp, Homo sapiens
cttggccagatgattgtggattatgaaaaccctttaaagaagatgatggaagaatttgtaccccatagcaaggttaaacccatccagagtaatggctgcg

SEQ ID NO: 310634 - DNA, 100 bp, Homo sapiens
cggccatcgtggctaaacaggtactgctgggctgactgtgctgtcctgattgttgctgctggtgttggtgaatttgaagctggtatctccaagaatgggc

SEQ ID NO: 310635 - DNA, 75 bp, Homo sapiens
cggcagcgtcccggacgaggagatattgatgatgttaagaagttcaaaccgggttacctggaagctactcttaat

SEQ ID NO: 310636 - DNA, 89 bp, Homo sapiens
ccagcctgctcgtcaacatcccacagctccaggcctggtctcggcgactcctgggctcccggctctcaggcgcatttctccgagcatcc

SEQ ID NO: 310637 - DNA, 98 bp, Homo sapiens
ccagctcagcgtgcccatcccggggggcagcaacggcgacatccagcaaggtgttgacttcaaaatcaaaactgtagagctaagaggaaagaaaatta

SEQ ID NO: 310638 - DNA, 82 bp, Homo sapiens
ggatcagatgagcagattggttagtgaagcacaacatgcctttctggcggatatcctgccacgcagacctggaggcactgag

SEQ ID NO: 310639 - DNA, 83 bp, Homo sapiens
aaaagccaccgcggctccaggagtcctgtgactcagcagaatggggaaatggagagagaacctgaaagagccccaaactcgag

SEQ ID NO: 310640 - DNA, 106 bp, Homo sapiens
aaagtcgtcttccacttgcacgaaagctttcctaggccaaaaagagctttggaggaattttttacatcacttgtgaagcaagaaatggtgaatatgcctcgtggga

SEQ ID NO: 310641 - DNA, 96 bp, Homo sapiens
ggcgcgctcacccgccccgttcagttgttgacctcctgtactggagagacattaagaagactggagtggtgtttggtgccagcctattcctgctgc

SEQ ID NO: 310642 - DNA, 83 bp, Homo sapiens
ccaaaactaacttgccttcagaatttaaaatggtccacagcagtcgaattttgtaaaagatttgttaaggattccaagtaact

SEQ ID NO: 310643 - DNA, 99 bp, Homo sapiens
atcctcggggaactggccatggtgctggaccagattgaggcggagctggagaagaggaagctggagaacgaggaagtgatttcctctgaagatattgga

SEQ ID NO: 310644 - DNA, 101 bp, Homo sapiens
aaatcaactaaaaacaaaattgccagaaaatctttcctctaaagtcaaactgagcttttcatcctactataaaggaggatttgaacagaaaatgagtaggc

SEQ ID NO: 310645 - DNA, 75 bp, Homo sapiens
ctgcatgaagaaggtggtggctgtccacctccaccagacggtccagattgatgtggacatcttcgagccccaggg

SEQ ID NO: 310646 - DNA, 83 bp, Homo sapiens
ctgggaaatgccgtgtcagtggggttgttttgggtggacaagagcaaggaccaagtgtggaaggtcttaatgtaccaacaaag

SEQ ID NO: 310647 - DNA, 97 bp, Homo sapiens
ggagatggagcgcttttctactttgggctcaacattgagacagctagccacagtgcagcctggccagaatttccacatgttcacaaaggaagaactt

SEQ ID NO: 310648 - DNA, 98 bp, Homo sapiens
ggcgagctagccgggagttacaccgccaccgccagtgccggatggagtgctgtgatgtgccagccgagacactctacgacgtcctacacgacattgag

SEQ ID NO: 310649 - DNA, 98 bp, Homo sapiens
ccgaccagaatgatagccagtccctggagctggtgcacaggttccagaatctccctggggtgccctccccaggcagcaatgccaggatgcctgtgtcc

SEQ ID NO: 310650 - DNA, 98 bp, Homo sapiens
tcttcctcggagagatcccctcctgtggaaggagcctgggagaggccaggcctccccggactgctagcctgcttttcctggggtccctggagccggag

SEQ ID NO: 310651 - DNA, 100 bp, Homo sapiens
gcagcagcagcgcctgggccgcgcgctatggcaccttcgcctggcccaccactcccagagacaatgcagatcttcgtgaagactctgactggtaagacca

SEQ ID NO: 310652 - DNA, 100 bp, Homo sapiens
tgaagaaaataaataagcctgggaatatgattatggctttcagcaacttggcagagagaatcaaggattctgaaggtgatacccctcttcatgatgcaat

SEQ ID NO: 310653 - DNA, 100 bp, Homo sapiens
cgtgaacgaaagcagtgacggaggagcttgtaccaccggaaatacaactggagcacgcaaagcaagcctttgtgcaacgggacaatgctaggactgggag

SEQ ID NO: 310654 - DNA, 73 bp, Homo sapiens
ttttacattggctgttttcctcacattcctcaagcaggagaccagcataaacactttggggactgagaggata

SEQ ID NO: 310655 - DNA, 74 bp, Homo sapiens
cgtcatcgagtgtgacgtggtgaaaggtggacgcggatctgtcaacatgggtaaaggagaccccaacaagccgc

SEQ ID NO: 310656 - DNA, 100 bp, Homo sapiens
tcatgtccgtgggggctacatcctgccctggcaagagcctgcactgaacacccacttaagctaccaagtcaggattgttacccccaccacctgcgctccc

SEQ ID NO: 310657 - DNA, 75 bp, Homo sapiens
gcggcccgtcctggctcccttgtccgggaagcccgcccaggcaaagatgccttttgatgccaacaaactgtattg

SEQ ID NO: 310658 - DNA, 82 bp, Homo sapiens
ccacccaccgccgccgcctcccagggagtaccctgacttctaccggaagctctacggcctcttggacccctctgtctttcac

SEQ ID NO: 310659 - DNA, 101 bp, Homo sapiens
gttctcgctccggagccgctgcacatttcgtgtggcttcctgttgtggtgcatggccccgagcccttctaatggggctgaactgctctacaagcgcatcat

SEQ ID NO: 310660 - DNA, 75 bp, Homo sapiens
ccttctgagccatcaggaagtcaaagttcaagttcctctcctggctgaaatttatggtatagaaggaaacatttt

SEQ ID NO: 310661 - DNA, 75 bp, Homo sapiens
ccagcttcagtggcctgtcgttggaagagtacaagctgatcctgtccacagacctgcctagagctggaacgttac

SEQ ID NO: 310662 - DNA, 75 bp, Homo sapiens
ccgggacctcctggaagccaaaaatggacctcagcaggaccccaggctatactggcaggggggcccagcactggg

SEQ ID NO: 310663 - DNA, 82 bp, Homo sapiens
tcagagagggaagagattcagccagcacactcctcgcgagcaagttctccaaggagaagtacatcctggactcatcgccaga

SEQ ID NO: 310664 - DNA, 90 bp, Homo sapiens
gcgaagctggccaaagcctgcccagacggctcacctgtgcgggatggaacaaaagtcattatttagaagcaaggtccttgaatgagcgag

SEQ ID NO: 310665 - DNA, 100 bp, Homo sapiens
cgcgagtgccatggcggccgccctgggagcgagcggaggagcaggcgccggaggcattatccaattggtttgctatttgatcttcttgcatcaagttcag

SEQ ID NO: 310666 - DNA, 75 bp, Homo sapiens
cgaggcgactgtagcgtgcgggtatgcccgggcccagcacgtgcggctcctggtggatgcggagtacacctcact

SEQ ID NO: 310667 - DNA, 100 bp, Homo sapiens
cagtaggagtggctggttctggtgctggtattggaacagtctttggcagccttatcattggttatgccaggaaagtggagaatgaggacatgaataaaga

SEQ ID NO: 310668 - DNA, 99 bp, Homo sapiens
ctcttgacaaccaagggcctccgtctggatttccaaggaagaatttcctctgaagcaccggtagtgggcagcagtcagtgacaggtgtaacctctgtgg

SEQ ID NO: 310669 - DNA, 78 bp, Homo sapiens
cggaacccgccagggtccagggtccaggttccagcgcccggcggcccagatctgcgagtgaagagggacgagggaaaa

SEQ ID NO: 310670 - DNA, 82 bp, Homo sapiens
ctcagccaagttccccaacggctccccgtcgtcctggtgctgcagcggcaagtgaaccggagcaaacgacttccgatccagt

SEQ ID NO: 310671 - DNA, 76 bp, Homo sapiens
tgactaccctggttacctcatatttcacagaagaaaagcttggccaggctgagaagacagaattggatgctcactt

SEQ ID NO: 310672 - DNA, 74 bp, Homo sapiens
agcctcccaagtagctggaattacagcggagtttaagagagctgtgaaagtagcaacaggacaagaactctcaa

SEQ ID NO: 310673 - DNA, 51 bp, Homo sapiens
ttctagttgaggataaggaaacaggagactttgagaatcactacaagaaaa

SEQ ID NO: 310674 - DNA, 75 bp, Homo sapiens
aggatagctttgaggataagctgcggatgagcggtacaccagaggatcgcttcctggcagaatttgggagctgtt

SEQ ID NO: 310675 - DNA, 82 bp, Homo sapiens
ctaaattattccatttgcaacttatccccaacagaaagagactccttcaaatccagtggccacagtgaaagcgggagaacga

SEQ ID NO: 310676 - DNA, 87 bp, Homo sapiens
tgacatcagtcagttgtttgatttcatcgatgatctggcagacctcagctgcctggtgttcattgtgggatcagaccgtgctatctt

SEQ ID NO: 310677 - DNA, 100 bp, Homo sapiens
caaggacaacaatgagatcgtggacaagatcatgggcaaaggacagatccaggctgagtcatcactagagagtgggaagggcagcagcagcagagaatcc

SEQ ID NO: 310678 - DNA, 71 bp, Homo sapiens
atcgagttcatcgggcagatcgatggagtttcactcttgtctcccaggctggagtacaatggcatgatctc

SEQ ID NO: 310679 - DNA, 96 bp, Homo sapiens
agtgagcagcttgtttcacatgctggtggactcacccatcgacccgagcgagacttctgcctggtgtcgaaggtggtgggcagatgccgggcctcc

SEQ ID NO: 310680 - DNA, 102 bp, Homo sapiens
gacatcgtcccaggggacattgtagaagtggcagccttgttcgggagtctagcagttctcgctcaccaaccccaaagcagaagaagaagaaaaagaagaaag

SEQ ID NO: 310681 - DNA, 90 bp, Homo sapiens
ttgaaatccttggcactacctatagtgagacttttggcaaagacatgcgcaagttgagcaacttgcatcttaaggaagagaaaatcaaac

SEQ ID NO: 310682 - DNA, 96 bp, Homo sapiens
ccgactcgggcttggcgcggcggccagaggaaccccgagaactctactacgatcgcgggaaccaccatgagtttgtgtccctggtgaaggacctgg

SEQ ID NO: 310683 - DNA, 100 bp, Homo sapiens
ttgttccagagcatggagatcaaggatcagcactgccagtggagatgggcgtcactactgctaccctcatttcacctgcgctgtggacactgagaacatc

SEQ ID NO: 310684 - DNA, 74 bp, Homo sapiens
cgacaagcacacactatggcgctgaaacggattaataaggtgctggagaatctggtaaaagcaccattgtgaag

SEQ ID NO: 310685 - DNA, 89 bp, Homo sapiens
cggcgcagccagagccaccagcgcagcgctgccatggagcccagcagcaagaggaagctcgtgaaagtgactgggatggtatcattgct

SEQ ID NO: 310686 - DNA, 100 bp, Homo sapiens
tctttatgcaaagccagcgttacagtaatgttccaggaagaggagcaggacttggatggtgagaaggggccatcatcggaagggcctgaggaggaggacg

SEQ ID NO: 310687 - DNA, 50 bp, Homo sapiens
tctgcgtcctcatcgggcttatgttcgagatcctgcccggcctgtacatc

SEQ ID NO: 310688 - DNA, 80 bp, Homo sapiens
agttggaagcagccgatccagcctgcggagcctgtggggcaggcctccccatggccacccatggaccagtcggcattcac

SEQ ID NO: 310689 - DNA, 88 bp, Homo sapiens
ttgtggtctgacacacactgctgtggttcccctggatttagtgaaatgccgtatgcaggtggaattaagaaatctggcaaaaagtaag

SEQ ID NO: 310690 - DNA, 100 bp, Homo sapiens
gggccactcagagtcgcccgagaagtcagaatggcggcagtggagcatcgtcattcttcaggattgccctactggccctacctcacagctgaaactttaa

SEQ ID NO: 310691 - DNA, 83 bp, Homo sapiens
ccatgcgcgagatcgtgcacatccaggcgggccagtgcggcaaccagatcggcgccaaggtgacagagctgaatgaacctctc

SEQ ID NO: 310692 - DNA, 100 bp, Homo sapiens
tgttggacgatatctaatattacagctggaaatagggcacagatccagggccgttgctccagggagaactgcaaatatcttcatccacccccacatttaa

SEQ ID NO: 310693 - DNA, 100 bp, Homo sapiens
ccaccaagggagagagaggaatgtgctcttgtcctggcattgcatccacaggaggggcaggaaattctttgaaggcagcccatggaggacaggcatctct

SEQ ID NO: 310694 - DNA, 75 bp, Homo sapiens
aggaggccaggacacctggaagccgggaaatggcccgggtggaacgcatggagcagttccagaaggagaaggagg

SEQ ID NO: 310695 - DNA, 75 bp, Homo sapiens
catccacttatccagacccaatggaacatcagcaatgcttctgattcctggcaagtttgcagagattgaatgtca

SEQ ID NO: 310696 - DNA, 75 bp, Homo sapiens
actgggactgcaagtatacataccgtgcctgacgaaatatcacaatatttgggtcgacaagaagatgctgaggaa

SEQ ID NO: 310697 - DNA, 100 bp, Homo sapiens
aaggggaccgggaagcgaaggaagaagcgtccctccaggagccaggaaggggtcagcttgctggtgcccaatggagccattccccagggcaagttctacg

SEQ ID NO: 310698 - DNA, 88 bp, Homo sapiens
tggaatacaagttacatgattttggctacagaggagtctcttcccaagaggttggcgtgcagtggtgtgatctcagctcattgcaacc

SEQ ID NO: 310699 - DNA, 100 bp, Homo sapiens
aggctcctcggtccttcagcacccctcggcccgacgcacccacgcccctcaccccccgagagccggttattaacacggggatcaaagtctggtgtagaaa

SEQ ID NO: 310700 - DNA, 75 bp, Homo sapiens
ggataagctggagtctattcctggattcaatgtcatccagagcccagagcaggtggaacggcacatgtgtgatgg

SEQ ID NO: 310701 - DNA, 51 bp, Homo sapiens
ctcataacagttgatgaaaaattgtttttgagacagtgtccttgagttcag

SEQ ID NO: 310702 - DNA, 51 bp, Homo sapiens
ctcattgctttctactgcatcagcaggacctgatcccaaccttgaagaaag

SEQ ID NO: 310703 - DNA, 126 bp, Homo sapiens
tccttaacgcctttcaccattaagaggaaagcgatggaggagctgagcgctgatgaggtattgactttgccactcgtaaaatagccaagttgctgaagccacagaaagtgattgagcagaatgggg

SEQ ID NO: 310704 - DNA, 75 bp, Homo sapiens
cctaaagttaggcggcactccagccccagctcggtgaagtgccagcattataagaaaaaacgaacggagcaagaa

SEQ ID NO: 310705 - DNA, 95 bp, Homo sapiens
ctgcaggcggcccactggcagttcgagctcccggagccctgcctgttccctgtccatccaggccagcagctgaaggagcctcacctgcctccctt

SEQ ID NO: 310706 - DNA, 80 bp, Homo sapiens
gacgttcccagggagttgataggtcagcccaaggccaaccccactgtcactctgttcccgccctcctctgaggagctcca

SEQ ID NO: 310707 - DNA, 75 bp, Homo sapiens
gacagttgcgtcaaaaatatcaattttttgctccactcaagcctgttagaatcaccatggaatacagctccagtg

SEQ ID NO: 310708 - DNA, 49 bp, Homo sapiens
attccaagtaactcttatttgaaattccatgagtgaaaccgtcagactg

SEQ ID NO: 310709 - DNA, 96 bp, Homo sapiens
agcaaggtacccaccaggccgattatgtccattgttctcttggagcagctggtcatcatggcacgccccaaaggcgagggcctgactccataccag

SEQ ID NO: 310710 - DNA, 82 bp, Homo sapiens
ggagaagaggagccccagcgccccggtttgcaaagcagggtttccaggcctgaggtgcccgccctggccccaggagaatgaa

SEQ ID NO: 310711 - DNA, 82 bp, Homo sapiens
ctggagcttgacgcgctggagcttgagaggtctctaattaacagaagatggcaaagcccagccacagcagctatgtccttca

SEQ ID NO: 310712 - DNA, 83 bp, Homo sapiens
ccgactgccatcgcccggcccggccgcgcccgcggaaccagaccaggtaagaatgattgatgttggctgatattggagtgctc

SEQ ID NO: 310713 - DNA, 97 bp, Homo sapiens
gtgggctggtgttccttgactggagacaacctgcagcctcctggcaccaaagtgaatgatgaacccacaacagccactgatcccgaagaaccttccg

SEQ ID NO: 310714 - DNA, 101 bp, Homo sapiens
tgatcgagaggatctggtgtaccaggcgaagctggccgagcaggctgagcgatacgacggatgatcacggacgtgcagctcgccatcttcgccaacatgct

SEQ ID NO: 310715 - DNA, 82 bp, Homo sapiens
gaagtggtgagcctttttgtcactggcttaacagcattgcgcagtgatgaagtgattgatttaatgataaaagaatatccag

SEQ ID NO: 310716 - DNA, 100 bp, Homo sapiens
ccccatcaacgtggagggcctgctggttcccccgcctgcacagcgcggtgatcaggacctttgttctcgtgcagcactacgcggccgccctgatggccgt

SEQ ID NO: 310717 - DNA, 75 bp, Homo sapiens
cccaaagatgagatttacctgtgagatgtttcatcccaacagtaaccatgtgcgaccgaaaggccgtgatcaaaa

SEQ ID NO: 310718 - DNA, 98 bp, Homo sapiens
acatggagctgatggtgaagttgaagcaaaatgaggccttccctggccccaaggctctgtgtgctccgggatggagcaggtgtgcagagggtgagaac

SEQ ID NO: 310719 - DNA, 100 bp, Homo sapiens
gctgagtctccccagaagaggaagtttcttccatgcctatggctgttctaaaattgggccaaatatatccatttcagagaggctttttctgtaaagacaa

SEQ ID NO: 310720 - DNA, 83 bp, Homo sapiens
ctctagaaactcgctctaaagacggaaccgccacagcactcaaggaacggcaggagcagctgatgggatatcggaagagaggg

SEQ ID NO: 310721 - DNA, 83 bp, Homo sapiens
ctgccgtgtaaccctcacggcaacgggctgctctacgccggcttcaaccaggaccacggtgtcccgacccaggctaagcttga

SEQ ID NO: 310722 - DNA, 88 bp, Homo sapiens
tagcaaaagaaacaactcttctgggataaagctagattcttccaaagacagcaactctggaaagtggcttctaactcggcgcattttc

SEQ ID NO: 310723 - DNA, 90 bp, Homo sapiens
ccaagcgccgcggacggccggggcaccgccatcacccacgctctgacctctgctttctctcctttgaaaacactaagaataatgtcactg

SEQ ID NO: 310724 - DNA, 100 bp, Homo sapiens
ctcttcttcttcgagaattacaccggggtccaggttccagcaacagatagaaatgctttaagttcactctggggaaagctggcctctgaaatcttaatgc

SEQ ID NO: 310725 - DNA, 98 bp, Homo sapiens
tggcagtacaaaaaagaaatactcgtttgcaaagaaaaaggtctctccaggtgacactggatgggatgtcttcagcctcgattatcatgttgacggac

SEQ ID NO: 310726 - DNA, 100 bp, Homo sapiens
tggaattctaatttgaaccatgtttggattgaagccgcctctgtattacttaccagataaaataccatgaggagtttgagaagagccgcatgggccctag

SEQ ID NO: 310727 - DNA, 100 bp, Homo sapiens
gggagccgaagccagactgggcacacaccggcagccacagctccgaagctggcaagaagggggggccctcagcctcttggccttgaacgggctgttcatc

SEQ ID NO: 310728 - DNA, 133 bp, Homo sapiens
acgttggaagtagctgatgaagataacagtgaaatatcagattcagaggatgacagttgcaaatactgatggaacgtcgaattagaccatggattaataagaaaatcatagaatatataggtgaagaagaagc

SEQ ID NO: 310729 - DNA, 50 bp, Homo sapiens
gagaagaaagacagctttgtggaagaggtctgcgcaggcatggcactaag

SEQ ID NO: 310730 - DNA, 74 bp, Homo sapiens
gtgggtaacaagagaatggttcatttttccccggattctcatcaccatgagcttctctgcagaatgtcaaacaa

SEQ ID NO: 310731 - DNA, 151 bp, Homo sapiens
ggaatccgccgtgcaaatctgtccgcccccttggccactgatcccccgaagagcttctgtcgccgctctaggagcaggcagatggcttgtgcagaagattggagaaggcttgtattagtcccaagccacagaagccatgggataaagatgc

SEQ ID NO: 310732 - DNA, 86 bp, Homo sapiens
gctgcgaggacacactgtgatcctgcacgcccagcccgggctccagagcactacaaacaccactggtttcccgaaaagccgtccaa

SEQ ID NO: 310733 - DNA, 75 bp, Homo sapiens
atacaggagggacgtgcaccagatgccatggacaatattaccaggcagaaccaattctacgatacccaagtcatc

SEQ ID NO: 310734 - DNA, 100 bp, Homo sapiens
agttcctgggtgatccccatctctccatatcacatgtcaactacttcctagaccagattgttgatccatttcagatacttgtggcagcaaacaaagcagt

SEQ ID NO: 310735 - DNA, 75 bp, Homo sapiens
ctacagagtgtgcacactggctatcattgatccaggtcagaaagcaacattgaatgcagaagaaatggcggactt

SEQ ID NO: 310736 - DNA, 90 bp, Homo sapiens
cagattcgcagtggtcgcttcttctccttggatgtctccccgttcaatgttgtggcctggcacgggaattatacaccctacaagtacaac

SEQ ID NO: 310737 - DNA, 73 bp, Homo sapiens
aaagcctgaacaggcagggccagacccagggcgtgatggtgggcatgggtcagaaggattcctatgtgggcga

SEQ ID NO: 310738 - DNA, 90 bp, Homo sapiens
ctggagctgcagaagctggtcctctggcttctgtccctgctcagtcggccaagaagccctgcccagatgacagagcacgtagatcgccac

SEQ ID NO: 310739 - DNA, 75 bp, Homo sapiens
cctatcgtcgttatagtgacttccatgacttccacatgagaatcactgaacagactgctcactagaagctcagcc

SEQ ID NO: 310740 - DNA, 100 bp, Homo sapiens
tcctgcggctgcgactcaggctccggcgtctgcgcttccccatggggctggcctgcggcgcctgggcgctctgaggtgtggtcactgtcaaagattaaca

SEQ ID NO: 310741 - DNA, 80 bp, Homo sapiens
ctccgtcccccgcgggtctgctctgtgtgccatggacggaacatccagtcatggataaaaatgagctggttcagaaggcc

SEQ ID NO: 310742 - DNA, 100 bp, Homo sapiens
gtgggaatgacaacttcggtcgtggaggaaacttcagtggtcgtgttggctaagtggaagacagctgaggaggtggccgccctgatccgatctctgcctg

SEQ ID NO: 310743 - DNA, 100 bp, Homo sapiens
tggacgccgtcaacgccttcaaccaggaggtgccaagactggctagaggccctgcactggtacaacactgccctggagatgacggactgtgatgagggcg

SEQ ID NO: 310744 - DNA, 113 bp, Homo sapiens
caaccgccagatcaacctggagctctacgcctcctacgtttacctgtccatgttctgtcaggccaagcagaaggcagccttgctggagctgctgcatgaactctacaatttcc

SEQ ID NO: 310745 - DNA, 118 bp, Homo sapiens
ccagcatccttcagaaaaagcatccccgaggaggaagacgaatcgttaaacatctgaaagggtcagacaatgcagatcttcgtgaagactctgactggtaagaccatcaccctcgagg

SEQ ID NO: 310746 - DNA, 100 bp, Homo sapiens
gaagaaataatggcaaataacttttccttggagagtcataacatatcactgactggtagtaagcattaataatgtctttcatctttgagtggatctacaa

SEQ ID NO: 310747 - DNA, 82 bp, Homo sapiens
ccgtgccgcagatgcccaccggaatggagaaggaagaggagtcgccccgagcctggagatgagggggagccggggcggtcgg

SEQ ID NO: 310748 - DNA, 75 bp, Homo sapiens
gtcgcttcccctactgcgtggtgtggacgcccatcccggtgctcaccattagtgccagcagtagttcccaagggc

SEQ ID NO: 310749 - DNA, 100 bp, Homo sapiens
cagctttggttggaagacctattatcagatcaaccaccaaagtgggaaacattgaaatcaaggtttaaacttacacgaatcgctttctggaggaggaggg

SEQ ID NO: 310750 - DNA, 82 bp, Homo sapiens
ggagatgcacagctaagatgccaggaccacctggaagcctagaaatggtaagaacaagagagttggaaagcagttagcctca

SEQ ID NO: 310751 - DNA, 101 bp, Homo sapiens
cgctgagccatgaataagggtgggggagcaatgggaagaaatattcgatgggcttctccaaggttgcactgctgtgatccatcctcatctcctaaagatgc

SEQ ID NO: 310752 - DNA, 100 bp, Homo sapiens
gaagatatagaagcatttgaaatgatggagaaggatgagctatgacttgctaaacaatctgttgaagtccccacgagaagaagaagaagaggcggtcccg

SEQ ID NO: 310753 - DNA, 97 bp, Homo sapiens
ggagatttggagcccattttagaggcatctgttctatcttcccatcataaaaaaattggcttctctcacatggcaagaaacattgctgctagcactt

SEQ ID NO: 310754 - DNA, 83 bp, Homo sapiens
gccttggccgcctgagcccttgagttggtcacttgaaccttgggaatattgagggcatggtgctgatgtgaaatgtgtagact

SEQ ID NO: 310755 - DNA, 75 bp, Homo sapiens
ttgacgcgctggagcttgagagactggagcgctgctcagcgctttcgttcagctgtgccacatttccacgacgct

SEQ ID NO: 310756 - DNA, 99 bp, Homo sapiens
gaagcagcaggcgccaagtgatgaagtgtcaggggaagctgatggagaatcgagctctggatccagggactcgggactcctatggtgccaccagccacc

SEQ ID NO: 310757 - DNA, 124 bp, Homo sapiens
attacatgggccagcactgcttcatccgggaagtgcttggggatggagtgcctccaaaggttgctgagataaagccaccaatccttccaaccgccaggaggactgggaatacataattggcttc

SEQ ID NO: 310758 - DNA, 106 bp, Homo sapiens
tacatcccgcagtacaagaactggagaggtgaggtggcggcgtgggcagcgattgcgtggtcagtgattgcgagaaggagctgagtctccccagaagaggaagttt

SEQ ID NO: 310759 - DNA, 95 bp, Homo sapiens
atgcttttgatggctacaatgcatgtatctttgcctatggacagactgacagaatgttgctgcgggatgtaaaagctcttaccctccactatgac

SEQ ID NO: 310760 - DNA, 101 bp, Homo sapiens
agacgatagagaaggaggatcaaaatcagacagtgaagatataacaagatcagcaaatctaactgaccagatccagacatttaatgtggatgcaccatgcc

SEQ ID NO: 310761 - DNA, 75 bp, Homo sapiens
tttatcccagggtggctgaatcacggaatggcgttgcttgagtccatggttgatgctgctgagaatctttgtccc

SEQ ID NO: 310762 - DNA, 75 bp, Homo sapiens
ccgcgccccgccatgccgctctactccgggattttttaacctggccctgctaatcgaggaaggtacgataatccc

SEQ ID NO: 310763 - DNA, 82 bp, Homo sapiens
atgtctgcgagccaggattcccggtggacgacatccttggagaaggcagcgacgacagcgacagcgagaagaggaggcctga

SEQ ID NO: 310764 - DNA, 100 bp, Homo sapiens
tccttttaccaacattttgtgcggaattatttttgtggaaagaagatacacagcagttgtcttaaacaggttatttggaaatagcggtgcttgcagcgct

SEQ ID NO: 310765 - DNA, 96 bp, Homo sapiens
attttggcattgacatttaattttagggtcctttatatagaagggagagtagctggactgggcagcctttggggtcatgacccttccctccatcgg

SEQ ID NO: 310766 - DNA, 75 bp, Homo sapiens
catgaactcagggccggttgtggccatgctaagggagaacattgagcaattcttcaccaaatttgtagatgaggg

SEQ ID NO: 310767 - DNA, 75 bp, Homo sapiens
gtgcagcccaaacccttgccttcccaggatgaaattgattctgcagtaaagatgttggtgtcattaaaaatgagc

SEQ ID NO: 310768 - DNA, 89 bp, Homo sapiens
gcggctcagacacaacatctgctgaggtgttcattgaaggatgctgaatatgcatattttgattttcctgaacttctttcattgaggac

SEQ ID NO: 310769 - DNA, 100 bp, Homo sapiens
gttaacaagagtagaatggggaaaaattcggcggcttatgggaaaaccacggagctgtccctgccacagagccaggaaataagaagccccgtggtcagag

SEQ ID NO: 310770 - DNA, 100 bp, Homo sapiens
agatgtttctggaagactcatgggctctcctccagaaactgcccttggtgcattagcaagggtcctgagagaagactggaagcaaagtgtcgagttagct

SEQ ID NO: 310771 - DNA, 74 bp, Homo sapiens
tgggaatttccaaggggattcaaacttcaacagaatgtggcaaccaggactccctggaggaaaagcggaagcgg

SEQ ID NO: 310772 - DNA, 100 bp, Homo sapiens
gggagagccactgacgccgggaccgggaccgccgccgccgccgccaccatggtactggttttggattaggaattgttttctcacttaccttctttaaaag

SEQ ID NO: 310773 - DNA, 83 bp, Homo sapiens
cggatgtgaggcgatccgctggcgctagtctgaccctccgccaggcaaaaggaagcgccatcatgaccgggtcctataacaac

SEQ ID NO: 310774 - DNA, 100 bp, Homo sapiens
gaccttagtgctggataatggagcttacaacgccaaaatcggttacagccatgaaaatgtgtcgcattatattgtacttctagcaagtgcaccaacagaa

SEQ ID NO: 310775 - DNA, 100 bp, Homo sapiens
aaatctactacagggacaagtttcagagctgccactcagaattccttcgacaatcctgagtggttttatcggcatgtggaagcacacagtctgtgctgtg

SEQ ID NO: 310776 - DNA, 95 bp, Homo sapiens
acggcgttgatatcggtggtaacgacggcctcagcaggcggggaagatgaaagggtgggagagttcagagcacacgctgctgagtggacagccaa

SEQ ID NO: 310777 - DNA, 100 bp, Homo sapiens
gaagaatcagcatcatgtttggcagctgagtattggagccaggagcctgccatgaggcaggatgacgcaaaacacggtgattgtgaatggagttgctatg

SEQ ID NO: 310778 - DNA, 75 bp, Homo sapiens
gccaccaatgctggatttccatgaacaatgcaagcctcccctatccagccccattctagaactgcattcagagga

SEQ ID NO: 310779 - DNA, 82 bp, Homo sapiens
tctctcggacaccattttctgccgctggacgcaagtggatgaggatcgcagtacggaacctgaccgattgcaggtgtttcac

SEQ ID NO: 310780 - DNA, 75 bp, Homo sapiens
gcggtgatgaagaatccccccgaaaggaccccccagtttgcagacagtaggttgcatgcctccgcctgtgtcttc

SEQ ID NO: 310781 - DNA, 50 bp, Homo sapiens
cgtggtccttctccatattcgagaccatcatcaaagaggggatgctgacc

SEQ ID NO: 310782 - DNA, 83 bp, Homo sapiens
cggggcggacggcgacgcagcccgcggcagaaggtttttcgttggaatatacgttgcacatttatggcgattctgagtgtgag

SEQ ID NO: 310783 - DNA, 83 bp, Homo sapiens
ctgggcgctccggtggcggcggagagatcctgaaggagctagacgagtgctacgagcgcttcagtcgcgagacagacggggcg

SEQ ID NO: 310784 - DNA, 101 bp, Homo sapiens
cagctgagccccagcaccagtcacctccagcgttacagtgtttctgccacctctgtacaaaagacaattttacttgtgtgacagatgggctctgctttgtc

SEQ ID NO: 310785 - DNA, 75 bp, Homo sapiens
ttctcccgcctcagcctcccagatcattcccgagaagtgttggagcaattagtaggcccaaacaaactaaagcaa

SEQ ID NO: 310786 - DNA, 100 bp, Homo sapiens
agaagagtatgaacatccaaatccctggaaagagagtttccagcagttgattgatctggagccagaaggaagagtgtatgtgatcatcgatctctcaggg

SEQ ID NO: 310787 - DNA, 80 bp, Homo sapiens
cgcagacagcatgctgctagacctcgactccatcaagaatgctggaggaagggtgtttgtccactgccaggcaggcattt

SEQ ID NO: 310788 - DNA, 90 bp, Homo sapiens
ctgggactcgtctggcgtccctcagcttcggaaccaaaaagaagcttcccagagccggggccaggagccccaagcgccctctagcagcaa

SEQ ID NO: 310789 - DNA, 97 bp, Homo sapiens
gtaccatccacaccttcccctgcctcaaggagctgtgcaccagcccccgggatagctgggagtatggccaccctgctccacgatgcggtaatgaatc

SEQ ID NO: 310790 - DNA, 75 bp, Homo sapiens
aaaatcttgtggacaaatccaggggaagggctccagcggggccccacagacgagcaggatgcctgtccccatgag

SEQ ID NO: 310791 - DNA, 98 bp, Homo sapiens
gtgtaccaggcgaagctggccgagcaggctgagcgatacgacggacttgaaaatactggaaatctgtccggatccaaattattttgcaagccagatga

SEQ ID NO: 310792 - DNA, 75 bp, Homo sapiens
gaggcctggaggacaccaacatgattctctttgtggccagatgggtttgtatggacaggcttgtccatctgtaac

SEQ ID NO: 310793 - DNA, 75 bp, Homo sapiens
gtccccctctccgccccccaggaggggcgagagggagccgcagctgatgtcagattacttctctaacaggatcac

SEQ ID NO: 310794 - DNA, 98 bp, Homo sapiens
gctgctggtcggctccagcaccctcttcttcgtgttcacgttgaaatcacaaagattagacacctttttagataggtgttcttcagcaccactgacaa

SEQ ID NO: 310795 - DNA, 100 bp, Homo sapiens
acgcgcgcagcccgcccgcccggcgaccagcaaggtagttagaaacaaacctgtggcaaggcaggctcctggcaaacggaagtgcaattgtcggcaagag

SEQ ID NO: 310796 - DNA, 75 bp, Homo sapiens
ctgcgctaccggaatgtcatccagcgagtgattagctttgaagatactgctataatttgaaaatttgaaattagt

SEQ ID NO: 310797 - DNA, 51 bp, Homo sapiens
gtattgaaggggttgttctcagagacaaactccccatccccaggatgtcaa

SEQ ID NO: 310798 - DNA, 97 bp, Homo sapiens
gtttcgggccagcgacccgctgctcagcgtcctcatgtggggggtaaaccactcgctggttcgatgcccagaactgaatgctgtgctccagctgtgg

SEQ ID NO: 310799 - DNA, 100 bp, Homo sapiens
gcagtctcattcagaatggacattccgttgataggtatatcgagaacaggtacgtgacaacagtttatattccatgatagaaagctaaagtccatagaaa

SEQ ID NO: 310800 - DNA, 75 bp, Homo sapiens
cctgtcacagtggatgatgatgatgacgacaatgatcctgagaatagtgcacagccagagaacaacacatcacac

SEQ ID NO: 310801 - DNA, 74 bp, Homo sapiens
tattaaggagcttcgcaaggctactgaagcactgaagggtgcaaatagctatgggcaacttggcctcggccata

SEQ ID NO: 310802 - DNA, 58 bp, Homo sapiens
gtcatcccacctgagaaccatgctcaccgacccttccacaggtcctggctaccctggg

SEQ ID NO: 310803 - DNA, 82 bp, Homo sapiens
agctcagctcttactgcgggccgctccgacggcggtccatcctggtgtcttggctgggcatgacaaccgcgtcagctgcctg

SEQ ID NO: 310804 - DNA, 75 bp, Homo sapiens
ctcgccctcgtgcggctgaggagcctgggatcccagacctgaacaagcaaaatgatgcttcaacacccaggccag

SEQ ID NO: 310805 - DNA, 60 bp, Homo sapiens
cgggattcctgtttaagaacagtatcaaggtgaaaaaccatttcgctgtgatgaatgtgg

SEQ ID NO: 310806 - DNA, 100 bp, Homo sapiens
gaaaatcggggactttgggatgtcccgggacgtgtacagcactgactactacagggtatggcccatctcctgtacgcttggagcgacctttggctacgtg

SEQ ID NO: 310807 - DNA, 74 bp, Homo sapiens
tgcggcgcttctggaggagcacaggcttctgtcagcgtcaccgtggggggcaagcagtacctcctaggactcta

SEQ ID NO: 310808 - DNA, 121 bp, Homo sapiens
ggaaaaagaacatgatttagaacgacggtatgagctgctgaaccgggaattgagggcaatgctagccattgaaggctgtgggtgagcgtggaggatgctcagatgcacaccgtcaccatct

SEQ ID NO: 310809 - DNA, 100 bp, Homo sapiens
acttggccaagctagatgtcaaggggcctttatcatctgctggactcctggattggttttgttacttctagacgtgtgctgtccacagtgcgacgtgctg

SEQ ID NO: 310810 - DNA, 89 bp, Homo sapiens
cttgcctcaggccagtcgcctccaggccaagagggatccttcacccgtgtctgaagctccaccatgaggcgaggtggatggaggaagcg

SEQ ID NO: 310811 - DNA, 80 bp, Homo sapiens
gggagcgcttggaccccggcttctgggacgcgtcaggtgccaagtcctgccctgccaacttcttggcagctgccgacgac

SEQ ID NO: 310812 - DNA, 83 bp, Homo sapiens
agaccctccagcagcagaccttcaagatagacattgaccccgaggagacggtgccggagcaattcttattcctcgtttagaca

SEQ ID NO: 310813 - DNA, 100 bp, Homo sapiens
tctgtgactgatgatgattttggaaagaaagattgtccctggccttgtatggtggtgatattacccgaaaaatgaagcttttgaagagacaagcagaagg

SEQ ID NO: 310814 - DNA, 82 bp, Homo sapiens
ccgcgaaccgcagtatcatgctggccaagaagatcatcattaaggacggaggcacggtttaaatgtgatactggtgtagatc

SEQ ID NO: 310815 - DNA, 100 bp, Homo sapiens
gacctctcatctgccagaatcagaaagaattcatcacactgtaacaccttccaccatgaccacctcagcaagttcccacttaaataaaggcatcaagcag

SEQ ID NO: 310816 - DNA, 125 bp, Homo sapiens
ggcccatatatgccagggttatccagaagcgagtccccaatgcctacgacaagacagccttggctttggagaaatggtggagtcaatgaagaaagtagcagggatggatgtggagctgacagttg

SEQ ID NO: 310817 - DNA, 122 bp, Homo sapiens
cgcttgtcctgagctggttgccggggcaggggcggaggcggaggcagaggtggaggcgctttgaaaggtactccaaagattcaggtttactcacgtcatccagcagagaatggaaagtcaaa

SEQ ID NO: 310818 - DNA, 90 bp, Homo sapiens
cgagcagtgacaacagtttggggcagagcggcttgggtaaatccaccttaatcaacaccctcttcaaatccaaaatcagccggaagtcgg

SEQ ID NO: 310819 - DNA, 87 bp, Homo sapiens
gccaagagctagagcagactcagaatgagctcaccagggagctgaaactcaatgatggaatggggagaagatattaaagcagtttca

SEQ ID NO: 310820 - DNA, 82 bp, Homo sapiens
ggatatgaaactggaagacatcctgtttcttgcagaacataaattattaggaaacattaaaaatgtggccaagacagctaac

SEQ ID NO: 310821 - DNA, 100 bp, Homo sapiens
cttgggtttagcaaaagttcatctccttctgcatccttaactgagaatgagtattctaccttgtaaatactgttatttgtatatactgtaaatgatgaca

SEQ ID NO: 310822 - DNA, 82 bp, Homo sapiens
ccgccccggccggctggcggtcacctggcacaccagcgcccgcaggatgcccagggatccatatggctttggagacagtcga

SEQ ID NO: 310823 - DNA, 82 bp, Homo sapiens
gagcgcagactgatggcgcaaagggtttctctccatggaagaggagaagaccagaggcatctagtcagacatcttgaagcca

SEQ ID NO: 310824 - DNA, 51 bp, Homo sapiens
gagaagggaacggagttttcatcagggtgtcaaattgagaaccaggtagat

SEQ ID NO: 310825 - DNA, 100 bp, Homo sapiens
aagaggctgctgagaaacgacgccccagaggaagctggagagggatgtgtggctgcgatcctcggggaaaccgaggcgaacagctgcttggagaactaca

SEQ ID NO: 310826 - DNA, 82 bp, Homo sapiens
gaactgtatcgagatttagcacttcactttgcagctccataatgggagaagtaaagaacaaagacttaaggaacagcttggc

SEQ ID NO: 310827 - DNA, 100 bp, Homo sapiens
cctggaggtggaggcctgttgagctggtgtgatctgctacggattattggagaatccatatgctacactgaccatgactttggcacagaccaacttctgc

SEQ ID NO: 310828 - DNA, 49 bp, Homo sapiens
gaacagcacaaggaatgtgatgaatcaggaaacccaggcccaacggcag

SEQ ID NO: 310829 - DNA, 100 bp, Homo sapiens
cggcactgcctggctgcgagcacatgatggcgatacgggagctcaaagtgtgccttctcggggtggtgatgatgtccagcaactctgtgaagcaggagaa

SEQ ID NO: 310830 - DNA, 75 bp, Homo sapiens
cgcaaacatgctccgccagatcatcggtcaggccaagaagcatccgagcattcaaccctatgaaaagataaaggc

SEQ ID NO: 310831 - DNA, 100 bp, Homo sapiens
ccaaggtcctagaactcaggaagagtgatgtggttttggataaggacttgatagacgacctgaagtcagaactgagtggcaacttcgagcaggtgattgt

SEQ ID NO: 310832 - DNA, 98 bp, Homo sapiens
tggcaaggaaggtgtgatttacaatggcctcagtgactggctgtatgaaggtgccctgatgatcagatcagaggatgctggctttgtggtgattacag

SEQ ID NO: 310833 - DNA, 75 bp, Homo sapiens
tgctggcgctgctgctgcacgggcggctgctggcggtggacatcttcaataaggagctactgctaatccccatcc

SEQ ID NO: 310834 - DNA, 100 bp, Homo sapiens
tgactgcaaaggagacccaaggaacagtgccaagttagatgccgattacccacttcgagtcctttattgtggagaaggaagaggcccagcagaagggact

SEQ ID NO: 310835 - DNA, 73 bp, Homo sapiens
gaacagattcagaaggagcaggattaccaaaggagaatgcagaagagggctgaacgattcaatgtacctgtga

SEQ ID NO: 310836 - DNA, 107 bp, Homo sapiens
tatgcctcaatttgctggatttaagcactgctgcactttatgagggcagatgattctggaccagatgaagcctgaggagccttccagctctaagatagcaggatagg

SEQ ID NO: 310837 - DNA, 82 bp, Homo sapiens
ctggtcgccgtggagatgggccacgtggagacttccccgggcgctgcctggacaggcctgcctgcgtgctgggacatgtctg

SEQ ID NO: 310838 - DNA, 74 bp, Homo sapiens
cagggagtatcaaatatgagaaagctaggccatctgaataactttactaagtttcactgttacatgccttgaag

SEQ ID NO: 310839 - DNA, 97 bp, Homo sapiens
cgctcttgacagccaggtaccagatttgctgtcatgaaccgaaaagtccttgatgtttttggtactggtgcatctaaacactttcaggatttcatcc

SEQ ID NO: 310840 - DNA, 100 bp, Homo sapiens
gcaagatggcggacatctccctggacgaactcatcaggaagcgcggggcggcggcgaaaggacggggatgagctgaccaagatggaggacgaggatgagc

SEQ ID NO: 310841 - DNA, 100 bp, Homo sapiens
aatcgcccgaccgcacacgttgccaccctgagctgcaagctttcttcctggtggcagatgacatcatggattcatcccttacccgccggggacagatctg

SEQ ID NO: 310842 - DNA, 83 bp, Homo sapiens
aagaagcttctccagaaaaaactacactgtctactgccaagttctgcagaatcagaagatttggcagtacatttatatccagg

SEQ ID NO: 310843 - DNA, 100 bp, Homo sapiens
ttacctgccacccattgtgtcttctcaagaagatccggccagttattgaacaaacctttcctttttctaaagttccagaagccttcctgaaggtggaaag

SEQ ID NO: 310844 - DNA, 90 bp, Homo sapiens
cgcccgccgtgagcgcccggagcggtccgcgagccaccgaggcccagctgtgtcagcgtgttatgatgccgtcccgtaccaacctggcta

SEQ ID NO: 310845 - DNA, 100 bp, Homo sapiens
tttgatattgatgtgaacgcctctgtgtttgaaacaaacattcgagtggtggacttgctttgtgaagagacagttcatgaacaagagtctttcaggacct

SEQ ID NO: 310846 - DNA, 101 bp, Homo sapiens
cttggaatcttcttttagacttcagtacgatgattgcagatgacatgtctaattatgatgaagaagtgtgactatgaaaatgttccaaccactgtatttac

SEQ ID NO: 310847 - DNA, 50 bp, Homo sapiens
gccccgccccgctccacccgtgaggattgtaaaccatggctgtgtggata

SEQ ID NO: 310848 - DNA, 75 bp, Homo sapiens
gcgtctctccacagagccatccagcgaggtctggagataagcaaacaacgcctcctttctggaaactactccttc

SEQ ID NO: 310849 - DNA, 75 bp, Homo sapiens
agaagactcccccacatctggggattgcttggcattttgtacagaaccagtttttgccagtttagccaatgttct

SEQ ID NO: 310850 - DNA, 101 bp, Homo sapiens
gaatacacctgttcaaagtccagtatctctaggagaagatttgcagtggtggcctgataagttggaaaatggatataccttatttgattatgatgttggac

SEQ ID NO: 310851 - DNA, 83 bp, Homo sapiens
gcacatgacccaggcctatgccaatcagcatttcacattcctcatggttggttcaaagggagtgcatccgccccaaccctttt

SEQ ID NO: 310852 - DNA, 74 bp, Homo sapiens
cacacccggcatcagacctggcactacttgtccaagacgtactggtggcgagacctttgaaactcacaactcta

SEQ ID NO: 310853 - DNA, 100 bp, Homo sapiens
taaattgcagaagttacttattcttttaagaggtctgcctggttctgggaaaacaacattgtctcggattgcacctctgcctccacctcccctactacca

SEQ ID NO: 310854 - DNA, 75 bp, Homo sapiens
tgttcttctaatactcctcctctaacatgtcagcgttattgtaatgcaagacctatttcccattttcctgctctt

SEQ ID NO: 310855 - DNA, 75 bp, Homo sapiens
tagaagataaaaaagtgaatcagcagccaaatacaagaacgtttgtctgcctgatgagagccacttgggttaaga

SEQ ID NO: 310856 - DNA, 101 bp, Homo sapiens
ggaaaggttggcgctaatggtcagaatgctgctgggccctctgcagattctgtaactgaaaattcctggtccagaactttacacagaaaaggtgctcaaag

SEQ ID NO: 310857 - DNA, 50 bp, Homo sapiens
cgccgctgctggttgctgtccctggtttacccaaggtccagcctagcccc

SEQ ID NO: 310858 - DNA, 80 bp, Homo sapiens
accctggagcctcagttggaagcagccgatccagcctgcggagcctgtggggcaggtgaccgggctggtccacaagtggg

SEQ ID NO: 310859 - DNA, 73 bp, Homo sapiens
ctgcctcctttattgcagcaggaatttggccgttgatgctcactgccatcagctgcatcctccctatggcact

SEQ ID NO: 310860 - DNA, 98 bp, Homo sapiens
agggattacataaacctgtgtaccatgcactgagtgtgcctacaggggttgtggaaggagacgctgcccccggtctatgccctggaattgctgaccat

SEQ ID NO: 310861 - DNA, 100 bp, Homo sapiens
gccatgtcgggttattcgagtgaccgagaccgcggccgggaccgagggaactgctgctggagtttgaatcgaaaatgcggaagagggagcacgaattccg

SEQ ID NO: 310862 - DNA, 75 bp, Homo sapiens
cgattacccacttcgagtcctttattgtggagctctacgtctcctccgagagccgcttcaacaccctggccgagt

SEQ ID NO: 310863 - DNA, 87 bp, Homo sapiens
tctgcttggtgacttggatacagaaatttcctgggctaaaatgattcctccccggggctgtgcttatgtctgcatggttcatcgaca

SEQ ID NO: 310864 - DNA, 80 bp, Homo sapiens
agggccttggaccccgcggcgcccctcggcctcggagcaacgagcgcagcgccgaggccacaagaggaagctgaatgaag

SEQ ID NO: 310865 - DNA, 98 bp, Homo sapiens
tctgagctccacaatgataacttctccctctccaccattgccgagggctctcacccaaattgtcttgggacaaggtgcgcattcctggtgtgctgcag

SEQ ID NO: 310866 - DNA, 74 bp, Homo sapiens
ctgcgaccgcaacggcaacttccaccccaagcagtggaagaactggccagagagtctggaagtttgggttctgg

SEQ ID NO: 310867 - DNA, 100 bp, Homo sapiens
tttgagaacctcctctcccacttcttgccccagaaagccccagacggaaagagctacttgctgagtggcaattttggaggtagccccggttatggaggag

SEQ ID NO: 310868 - DNA, 100 bp, Homo sapiens
attccctttccagaagatgattccaacgccaccaattccaacctgatccggggatttctttcacggtttgataatgtccttcccgtcagcctggcatttg

SEQ ID NO: 310869 - DNA, 105 bp, Homo sapiens
aagcaaaactccatgaagaagaacaggaaaggaaacgcatgcaagctaaggcagctgagaatcctcactatggatgggctcattgaggacattaagcatcggcgg

SEQ ID NO: 310870 - DNA, 90 bp, Homo sapiens
gtgtgaagtcaaatgcatgccaacattccagttttttaagaagggacaaaaggttcctccagaagaaattaattatttaacacgaattca

SEQ ID NO: 310871 - DNA, 130 bp, Homo sapiens
gcgacgtgggcaagggcgagatcctggagagcctgcaggacggcgcggcagagtccccgtacgcctacagtaacggtgtgaccatgaagctcatggatgaggtcgccgggatcgtggctgcacgccactg

SEQ ID NO: 310872 - DNA, 75 bp, Homo sapiens
tgaagagggaagacacgcggaaacagttacatgagcatgcagcataccttgtggatagcatgtgggactgtgcta

SEQ ID NO: 310873 - DNA, 73 bp, Homo sapiens
gagcgcctggctcttctccacaaagacacgcttcttccccgggagctcgcagggctgcgacgccttcctgcgg

SEQ ID NO: 310874 - DNA, 76 bp, Homo sapiens
cagaagaagtatttgatgtcttagagaaacttggagaaggcactgcagcagcacctggcagacattaatgtggatg

SEQ ID NO: 310875 - DNA, 116 bp, Homo sapiens
acaagactgaggatagtttagaaggatgcttggattgtctgcttcaagccctggctcaaaatagatggacagattcctggtgaaaggggctcaagggggccttttgaggaagcagg

SEQ ID NO: 310876 - DNA, 133 bp, Homo sapiens
agcaggacaccatgctgaaggccatgttcagcgggcgcatggaagtgctcaccgacagtgaagccctttggagtgaatcaacctggaccttatatcatgtatacaactgtagatgcaaatgggtatctgaaaa

SEQ ID NO: 310877 - DNA, 73 bp, Homo sapiens
ggagaagaaaaccttgaaaaaaatctccctgagtttgccaaaagcaccaaggattctcttttgttgaatttga

SEQ ID NO: 310878 - DNA, 100 bp, Homo sapiens
ggatacctgaaaggtctcctaaccgctgcagagagtgctttcttccagaggagaaaatgtccaccttggttctggtgatgggcagtcaaaagattctggg

SEQ ID NO: 310879 - DNA, 105 bp, Homo sapiens
tccaccaggcctcttccctgctacaagcttccatcgaggaattcgagaaggccgacccccctggggggatgcagagctggtcttagagaggtgtgatctggagct

SEQ ID NO: 310880 - DNA, 96 bp, Homo sapiens
ctggacacccagcggtctgacatcgcgacgctgctcaaaacctcgctccggaaaggggacacctgtcaagctacaacttcaagcagaagagagagg

SEQ ID NO: 310881 - DNA, 75 bp, Homo sapiens
atgacattggtgtgatcaatgcacctcaacagatgacctgagaattaatttatggcacttagaaatcacagatag

SEQ ID NO: 310882 - DNA, 50 bp, Homo sapiens
gtctttggaggatgcggctttgatggcaatggctgccatccggaagaaac

SEQ ID NO: 310883 - DNA, 90 bp, Homo sapiens
ctggtggggactcgctctcggcttgaccgcattcttcctcccagctgctgccccggcgcaccgactggaccgggaaggagcatcccagga

SEQ ID NO: 310884 - DNA, 100 bp, Homo sapiens
gtcggttctgcgtgcgctgccggacgaggctcccgccgccgattgacccgcgctccgcccgtagtcgggccggcttcctgacaatgtcacctttgaggaa

SEQ ID NO: 310885 - DNA, 98 bp, Homo sapiens
attttttctcatggatgttcttcttcgagtatttgtagaaggtctgatcttgtggatcaaagtatatttaattttatcccagaaggggaacattcaga

SEQ ID NO: 310886 - DNA, 100 bp, Homo sapiens
gcacctgtcggcagactggtgacttcacttttgagtgcaactgccttccaggtcagtatgggaatcctttaaataaatatatcagacattatgaaggatt

SEQ ID NO: 310887 - DNA, 83 bp, Homo sapiens
ttgggtcgcagttcttgtttgtggatcgctgtgatcgtcacttggaagcgccgcggagccatcaacagcaagcagctcaccta

SEQ ID NO: 310888 - DNA, 82 bp, Homo sapiens
cacccgagccctgagagtccgccgccaacgcgcaggtgctagcggccccttcgccctgcagtgttatagttttgccgctgga

SEQ ID NO: 310889 - DNA, 75 bp, Homo sapiens
gcggacacgagcgctcagaccgtctctggcaccgccacaagctatcagcttcccagtttgcacaattcatcaaga

SEQ ID NO: 310890 - DNA, 80 bp, Homo sapiens
cagattccagcttcggaacaagagaccctggaactgtggctgcaccatctgtcttcatcttcccgccatctgatgagcag

SEQ ID NO: 310891 - DNA, 75 bp, Homo sapiens
actcacccggcagatatccgtgaaggctctaggtatctactgagcgtttcagtcaacaatacagctcgtgttcga

SEQ ID NO: 310892 - DNA, 80 bp, Homo sapiens
gtcaggcgtcgtgcgaacagcagctggtaccgaaggcggaggtggagcccgagaggtggtggaggtggatacagcagtcg

SEQ ID NO: 310893 - DNA, 75 bp, Homo sapiens
gaccccgtcccgaccctggccgccccgagcggagcctggaggaagactatgaccgtctgaggcctttatcttacc

SEQ ID NO: 310894 - DNA, 89 bp, Homo sapiens
ggaacgagttataggaagatgtagtccaacccacatcagcagtgtttctgaaagatctatccagcactccgatggccagcaacaacacc

SEQ ID NO: 310895 - DNA, 90 bp, Homo sapiens
ctccgccgcggcactgatccccacagggtcccgggattcttgagctgtgcccagctgacgagcttttgaagatggcacaataaccgtcca

SEQ ID NO: 310896 - DNA, 75 bp, Homo sapiens
ggaggatgggaaggtggactacagaatccaagaaaacaggggcccgaaacccaaggcagtacagcagaattaatt

SEQ ID NO: 310897 - DNA, 90 bp, Homo sapiens
ttggtggtagcaggaacatggggggaccatatggtggagtgttcggccaagaacctgaggaacatctcagagctgttctactacgcccag

SEQ ID NO: 310898 - DNA, 75 bp, Homo sapiens
tcagctaacatggcaacagaataatgttcagagcctcagagaaccgtgaaagctctgtatgactacaaagccaag

SEQ ID NO: 310899 - DNA, 100 bp, Homo sapiens
tcgtaattacattctctcggccagcgcctccgcgatgtaccggctcacgctgcgcacaagtaaggaagccgtttctcagagattatgtgaattgctctca

SEQ ID NO: 310900 - DNA, 98 bp, Homo sapiens
gagaaacaggagtcccagttcctccttttggatgtaccttctcttctggtatggagatggtccacgtcctcccaagatggcccgatacgacaatggaa

SEQ ID NO: 310901 - DNA, 75 bp, Homo sapiens
cacgtatcctcctgcctagcgcaggtatctgcccaaactggaacttatgctgtagacatttctttgtggtttatc

SEQ ID NO: 310902 - DNA, 130 bp, Homo sapiens
gtggtaatggcggcgaccgagccggagctgctcgacgaccaagaggcgaagagattgattttgtagcccatgatgatattccttattcatctgctggcagtgatgatgtttataagcacatcaaggaggc

SEQ ID NO: 310903 - DNA, 50 bp, Homo sapiens
agctttacctcgctgaccctatgaagcccgagcgggaagaagttccgcag

SEQ ID NO: 310904 - DNA, 100 bp, Homo sapiens
tttttcatcagcttctctcctaaattgccttcacttcaaatcaaggactacatttggtcaattttgtggaacctgtgggcctcaattactccatgtttat

SEQ ID NO: 310905 - DNA, 74 bp, Homo sapiens
ttctgttgtgacagacacttcacatactgctgagcatattgatgagagaaggatctgcaatgctgtttctccag

SEQ ID NO: 310906 - DNA, 90 bp, Homo sapiens
gaaacagaaaccacctctgccatcctcgcctcagtcaaagaacagcctcctgacaaggtgatccgggcgggccccgcaggaattttatcc

SEQ ID NO: 310907 - DNA, 100 bp, Homo sapiens
gccggtccatgttttcagcacccattgcctgaagtgttagcaccttcactccgaggttgacggatatattcagacgttacgacacggatcaggacggctg

SEQ ID NO: 310908 - DNA, 100 bp, Homo sapiens
ctgacatggaggatgatttcatgtgcgatgatgaggaggactacgacctgaatgtcaagctgtcagctgaggtggagccatttattccccagaagaagag

SEQ ID NO: 310909 - DNA, 98 bp, Homo sapiens
gcagggggactctggccgcggctactacctggagatgctgatcgggacccccccgcagaagccaaaactggacaagccaaggcatctgtagccaaagt

SEQ ID NO: 310910 - DNA, 82 bp, Homo sapiens
cctctacgagctggaggaggagtattactcgtccaggattgaaagaaggtggcaagaggaagaagcagaagcagagagagga

SEQ ID NO: 310911 - DNA, 60 bp, Homo sapiens
gaggacttcatgaggaacctgcagctcaggagcacttctcttgatgtagaacctatctat

SEQ ID NO: 310912 - DNA, 90 bp, Homo sapiens
ggcgtaggaccctccgagccaggtgcaccaatgaagagttaaacagtatgcatttgaccacacatactactcgtgatccaactgggaata

SEQ ID NO: 310913 - DNA, 101 bp, Homo sapiens
tgtttaaccggatcccattgtacccagagtgcagagccgcctttccagcatgcaggggctgctcagctccagtaataaaccgattcacaaggcgtgcctca

SEQ ID NO: 310914 - DNA, 102 bp, Homo sapiens
aagaggtcccaatcccccactctttccgccctaatggaggtctccagtttcggtgcgcgcggagccatggttatcatgtcggagttcagcgcggaccccgcg

SEQ ID NO: 310915 - DNA, 82 bp, Homo sapiens
atcagaattactagattttctctcaaactacgaggggatggagaagtttatgtttgggatgtgaactcaaggaagtgcctta

SEQ ID NO: 310916 - DNA, 73 bp, Homo sapiens
aagttgaaaaacgcttttcacgtcacctggagagatgcacaggatcagttgtgtggccgggaccctactctca

SEQ ID NO: 310917 - DNA, 100 bp, Homo sapiens
caaagatgagatttacctgtgagatgtttcatcccaacaatcctaattatctcatggctaatgaacgcatgaacctcatgaacatggccaagctgagtat

SEQ ID NO: 310918 - DNA, 75 bp, Homo sapiens
ctttggaagatgcagatgagaaggttcagttggcaaaccagatatatgacttggccaactgtgatttgagacggc

SEQ ID NO: 310919 - DNA, 75 bp, Homo sapiens
ttggaaaatactcagtttcctgcttactgcttcattatggattatacagattgttgtgtccactgtatcctggct

SEQ ID NO: 310920 - DNA, 74 bp, Homo sapiens
cgggaccccagcttttcagaactgcagggaaacagccatcatgaggtttttggattcaaagcataaaaaccatt

SEQ ID NO: 310921 - DNA, 80 bp, Homo sapiens
ggtgaagtgcgcacccacattcgtgtgggtgttgtgggcttttgatattatgagagtgacacatggcagagaacacagcc

SEQ ID NO: 310922 - DNA, 75 bp, Homo sapiens
ctgaattagaactgcagaggttcctctacagcaaggttcccagaccagaggactgttgttaggtgattggctgtg

SEQ ID NO: 310923 - DNA, 113 bp, Homo sapiens
aatgatgtagccacctcctaaccttcccttcttgaacccccagggagaaagagagagcgcgaaagagagaggatgtctctctcagactggcacctggcggtgaagctggctga

SEQ ID NO: 310924 - DNA, 51 bp, Homo sapiens
accttttggttcaatctttattgaaatgatgacacagcaagaaggccctca

SEQ ID NO: 310925 - DNA, 49 bp, Homo sapiens
cctaggcactgagagcacgagcatggggtggaccggctgcgccatcacc

SEQ ID NO: 310926 - DNA, 88 bp, Homo sapiens
ggtcggtacagtctctgcacctcgcgccccagcaggctgcagtgcagaaggcaattcctatgtacaaaattgccaccaaaaacgatgt

SEQ ID NO: 310927 - DNA, 83 bp, Homo sapiens
cagctagagaccatacagacctaccggtctgtcagtgagatggcttctaacaaggtcagcccaaggccaaccccactgtcact

SEQ ID NO: 310928 - DNA, 95 bp, Homo sapiens
ctgagcctgccgccaagatgccggcctattttcagaggccggaaaatgccctcaaacgcgccaacgtatgaagtgaaggctcctgttccttctgc

SEQ ID NO: 310929 - DNA, 75 bp, Homo sapiens
gggacccgcggtccccaccgtgcagcggggcatcatcaagatgagcaatgctaagaagacgtttggtttaaagaa

SEQ ID NO: 310930 - DNA, 82 bp, Homo sapiens
cagcaccctcatcgccctggccgacaagcacgcaagtctcggcgcggaagatggccggcggcgtggacggccccatcgggat

SEQ ID NO: 310931 - DNA, 75 bp, Homo sapiens
tggtaacgtttttatccatggatgacttgcttgggatgtggctgatgaagaaattgctgccctcccccgggatag

SEQ ID NO: 310932 - DNA, 75 bp, Homo sapiens
gacagtttcaactgaaaaaatgcagcgcctctctcgatttttaggtatgatctcgtgaaatcttgagagaaactg

SEQ ID NO: 310933 - DNA, 90 bp, Homo sapiens
ctctgcggcgcatggaggaggaggagggagtgcatccgccccaacccttttccccctcgtctcctgtgagaattccccgtcggatacgag

SEQ ID NO: 310934 - DNA, 51 bp, Homo sapiens
ctctgaagtagctgggactacagacaaatttacatgtattggagaccagac

SEQ ID NO: 310935 - DNA, 75 bp, Homo sapiens
aaagaacagaatgctaaggaagctgtggcaagagatgtattcgaaaggaataattcccctttctgctatatcaac

SEQ ID NO: 310936 - DNA, 96 bp, Homo sapiens
gggacaggaggctgcggggcctcaggggagaagccgcaccagtgcgccgtgtgctggcgatccttctctctacgcgactacctgctcaaacacatg

SEQ ID NO: 310937 - DNA, 99 bp, Homo sapiens
acgaggacctagactgtgacaacgaccacgtctccaaaatgagtcgcatcttcaacccccatctgtttaagaattgtttaagctgcatcaatggagcac

SEQ ID NO: 310938 - DNA, 76 bp, Homo sapiens
gtgctgagcccgcggaaccgcagccatggtgctggagaatctggtaaaagcaccattgtgaagcagatgaggatcc

SEQ ID NO: 310939 - DNA, 49 bp, Homo sapiens
cgggccccggacgccgcgcggaaaaggtctgccatcatggatgttctcg

SEQ ID NO: 310940 - DNA, 75 bp, Homo sapiens
gtgaatgtcgtgctggtgatggcctacgggagcctggtgtcacgtcttgaaattttaaatgtcctcagtgactct

SEQ ID NO: 310941 - DNA, 100 bp, Homo sapiens
ggaaactggaagaaaaaagaaaagaaactgacaaaaacatttctgagggggacttgatctcatcttcatgccaggccttgggtttgacaaacatggcaac

SEQ ID NO: 310942 - DNA, 89 bp, Homo sapiens
gtgcccgccgtggcgccgcagacctccatccttgcaccgtccaggtgaggttagagctggggcatcgcgcccaactgcgcaagaagccc

SEQ ID NO: 310943 - DNA, 90 bp, Homo sapiens
catctgttgccatcccggccggccgaggccattgcaggtcggttgtacgccgtgcagcaagtcttttaagtaaagtagtggacagcctgg

SEQ ID NO: 310944 - DNA, 100 bp, Homo sapiens
caaagtcaaatttacagtgcacacaaaggcaatctgaaagcaaatcctgtttagatgcaggcgaaggttcctggtgacccaggctctcaccttaccgtcc

SEQ ID NO: 310945 - DNA, 75 bp, Homo sapiens
cccgtggccgcggccgtctcgtagacggttgatgatgaagcgccggccgtgtaaatgaagatcgggtgaggagca

SEQ ID NO: 310946 - DNA, 75 bp, Homo sapiens
gctgagagggacacgcagtgacgagcggccgaagcagctttgcgtgtcttgggacaaggtgcgcattcctggtgt

SEQ ID NO: 310947 - DNA, 100 bp, Homo sapiens
tgatgctcagtttgatgcgtcacactacgacagtgagaaaggaggttccataggcagttcttaccaagaagatgtcgattccattctccaacacccacta

SEQ ID NO: 310948 - DNA, 50 bp, Homo sapiens
gagggtcccacgactcccgcctgacaatgcagatcttcgtgaagactctg

SEQ ID NO: 310949 - DNA, 75 bp, Homo sapiens
gaaacatgaaaacatcgtggccctgtacgacttccaggacattgacaagcagtacgtgggcttcgccacactgcc

SEQ ID NO: 310950 - DNA, 100 bp, Homo sapiens
tcgccgatcccgccggaagcgccaggacaatggggacccgggacgacgagtacgactacctattcaaaggctgtattcatcaccaaagaaaaaacttaca

SEQ ID NO: 310951 - DNA, 90 bp, Homo sapiens
gcagatttgtggtgcgttctgagccgtctgtcctgcgccaagtggcagatgaaatgctgcaagtgtgactccaggcagcctcacaactac

SEQ ID NO: 310952 - DNA, 74 bp, Homo sapiens
agagggagaacacagttggagaaaatcggcagctgagacggccttggccggaatcagagatcattgatttcttc

SEQ ID NO: 310953 - DNA, 74 bp, Homo sapiens
cttgctgctgctcaaagctgctgccgccccttgggctaaaaggatttggagttccatggagtgatgagatttta

SEQ ID NO: 310954 - DNA, 90 bp, Homo sapiens
agaaattcaggaaacctttatcaaaaatatattcacaaagaaacggtgtctaaatgaggtatcagacttggtgataattctgaattatga

SEQ ID NO: 310955 - DNA, 91 bp, Homo sapiens
tcttcctattcaccgtgggcagcagagggatggctgctcagctgctgactgatgaggcactggaagaaggtagataatgactataatgccc

SEQ ID NO: 310956 - DNA, 98 bp, Homo sapiens
gaagatccggactctgggtgttttgctaccgtgaccgtttagtcactgtgtgcccagtattctgcagacaaacgagaagatgagaagatgtgtgatca

SEQ ID NO: 310957 - DNA, 83 bp, Homo sapiens
agcttcatcaaaaatagtgatagctttgataagtgagacatggaatccattaaaattgcattatcagttaagaaatgtacggg

SEQ ID NO: 310958 - DNA, 82 bp, Homo sapiens
cagaaggtctctggagacatcttcagcaggacccgctacatcagcacggagctgggcatcaggcagaggctgctggtggcgg

SEQ ID NO: 310959 - DNA, 101 bp, Homo sapiens
atgtctccatccccgaccgccctcttctgtcttgtgctgaggtagggaccatctttgccctcagctggctcatcacctggtttgggcatgtcctgtctgac

SEQ ID NO: 310960 - DNA, 99 bp, Homo sapiens
gcctcgaactaaacaaattcatcccagaaatctaagaggcccgccatgttcatagaggataaagcagtagacaccctggcttacctcagtgacggtgac

SEQ ID NO: 310961 - DNA, 100 bp, Homo sapiens
tctcccacttggaggcactgctggatgacagcaaggagttgcagcggtctggaggcggctggtggaaatccaattccccgcggagcatggctggaaggag

SEQ ID NO: 310962 - DNA, 128 bp, Homo sapiens
cgtaaactggacaaacttacagttttaagaatggctgttcaacacttgagatctttaaaaggtgccacttcggataaaccctttggactcctaactccaatcaggtgtctgctttgttgaggactcac

SEQ ID NO: 310963 - DNA, 74 bp, Homo sapiens
tcagaccctgtaatcattgacaggaagggaaaaggccgaggcatcagcgtgtgaagaccgcaaagacgatcccg

SEQ ID NO: 310964 - DNA, 90 bp, Homo sapiens
ctgaaaaggaaaaggagagtattgccagagcaagagctggatctcgtctttctttgcatttgctggtctggcctttgcgtccttctacct

SEQ ID NO: 310965 - DNA, 100 bp, Homo sapiens
ctcattcctacacaacaaggcggagtggaggaaatgggtcctgatgaatatgaagagatggaagaagaggaggaggaggaagaggaggaagacgaggatg

SEQ ID NO: 310966 - DNA, 82 bp, Homo sapiens
cagcggtctgacatcgcgacgctgctcaaaacctcgctccggaaaggggacacctggttttaaaatcaaagatgggaaaatc

SEQ ID NO: 310967 - DNA, 98 bp, Homo sapiens
aagcgcagcgccctcagcagctccctgcgggacctctcggaagccggatctgtgccagttcagaagcaggcgagcctcttccctgatgaaaaagaaga

SEQ ID NO: 310968 - DNA, 100 bp, Homo sapiens
gagaacttctttatccttcgaaggaagcctgtggagcgtgtgaaggcaaagaagaatgctgctccattcagaagtgaagtctgctttgggaaagagggcc

SEQ ID NO: 310969 - DNA, 75 bp, Homo sapiens
caatgcacagccaatttcatgctccactataggttttgacctgtagcagagaaccaattctggagaacagcctca

SEQ ID NO: 310970 - DNA, 88 bp, Homo sapiens
agattcgcagtggtcgcttcttctccttggcctatggcatgtctgcgttacctttaaatctgataaaaggcactagaagcgctgctta

SEQ ID NO: 310971 - DNA, 97 bp, Homo sapiens
ctggacagatgaagagtgacttgtttctggatgattctaagagactgcttttggcttctggatgccctcctccagtacacatcgtatggggtgacac

SEQ ID NO: 310972 - DNA, 75 bp, Homo sapiens
ttttgttttgaattgtgaaatacttccacctcttttagagaggcaggtggaagtcatcataaagtttctgtttca

SEQ ID NO: 310973 - DNA, 78 bp, Homo sapiens
ctggacctggaaggggagactctgctgacacccatcacccacatctcacacaaaagctggcaggctgacagaggcggc

SEQ ID NO: 310974 - DNA, 74 bp, Homo sapiens
ggcaaaaccacttacagctgaaaaggtggaacggccgccttctccattctccatggccccacaagcttcccttc

SEQ ID NO: 310975 - DNA, 75 bp, Homo sapiens
aattttctacctccatcatggcggaagctcatgagtgatcctatgtggaagatgtcaagtttgtgatcaactatg

SEQ ID NO: 310976 - DNA, 90 bp, Homo sapiens
agcaggtgttattatggactttcaaacatctgaagatgacaatttattagatggtgacactgcagttggccctgggaggagcggggacac

SEQ ID NO: 310977 - DNA, 98 bp, Homo sapiens
gccagtggagcacccccaagccccactgccaggatggacagtgggcagccgaaagaggaagctggcagccaaggcatacatgcccctgcgggcaaagc

SEQ ID NO: 310978 - DNA, 51 bp, Homo sapiens
gcttcatcgccttggcctactccctcaaaatggaatcttgctctgttgccc

SEQ ID NO: 310979 - DNA, 95 bp, Homo sapiens
cctcccgcgccgcacggtggacgagcctacaacacagcagtcccctcaggatgagcaggaaaagctcttggatgaagccatacaggctgtgaagg

SEQ ID NO: 310980 - DNA, 90 bp, Homo sapiens
tgggaacttgtgtgttaaagtaacagatgatttagttattgttaaaggaaatgggctggcaggaagacagtgaaaatgatgaaacatgtg

SEQ ID NO: 310981 - DNA, 75 bp, Homo sapiens
ctcagatgctgccagggtccctgaagagggaagacacgcggaaacaggagaactttgaggtctttctttcatttg

SEQ ID NO: 310982 - DNA, 100 bp, Homo sapiens
gacgaggagtcggaggagccgcgggcggcgcggcccagctcgttccaggttctgctccagacgagcccttaccacgttgactcactcctgcagctcagcg

SEQ ID NO: 310983 - DNA, 97 bp, Homo sapiens
acagttctgcatgtccattacagggtccaccaaaatatactaaatctgttctgaaaaagggagataaaaccaactttcccaaaaagggagatgttgt

SEQ ID NO: 310984 - DNA, 90 bp, Homo sapiens
gagcccgctttccaccccgacctctgcccaggccgcagatgagacaaaaggacccagtgaaaggaatgacagcagatgactaaagccgcc

SEQ ID NO: 310985 - DNA, 82 bp, Homo sapiens
cgaagcttaagtagctacaggggaaaatattctgagccagaggaagagcatttggcctgtgatatcaccggatccagttcat

SEQ ID NO: 310986 - DNA, 90 bp, Homo sapiens
tggacactgctcccccatttcctttcatttcccccgtcttctcagtgagatttccttggtgccgacgccaccgccgagcccatgatcctg

SEQ ID NO: 310987 - DNA, 76 bp, Homo sapiens
aaccagatgaagaagatgagatttcgctttggagtttaacccttctgccaatccagaggcaagcacaatattccag

SEQ ID NO: 310988 - DNA, 75 bp, Homo sapiens
cagctcatgttggatcaggagacctgttcagtggaatgaattcaaaggccaatgatgaggccaatcagagtgata

SEQ ID NO: 310989 - DNA, 75 bp, Homo sapiens
ggacagttgtttggtgttttgcttcaggttatagatggagagacctataaagtattctaccttgtaaatactgtt

SEQ ID NO: 310990 - DNA, 83 bp, Homo sapiens
ctgtacttgagcagtcacctggcacaggaactgtggctgcaccatctgtcttcatcttcccgccatctgatgagcagttgaaa

SEQ ID NO: 310991 - DNA, 74 bp, Homo sapiens
ccctgcgttgtaccatccgcctgtgggacacctaccagaacatgctgtttgagagcatccaggagggcaagtac

SEQ ID NO: 310992 - DNA, 51 bp, Homo sapiens
accaggactatctctcgggaatggaggactccctcaatgtggctgacttga

SEQ ID NO: 310993 - DNA, 100 bp, Homo sapiens
acttaaaggaaccatcggtgatatgggttttccaggccaagacccatgttcttgacattgagcagcgactacaaggtgtaatcaagactcgaaatagagt

SEQ ID NO: 310994 - DNA, 100 bp, Homo sapiens
ctgtcgcccgaatgcaggaagaccgtgatgggagctgcagcacagtcgggggtgtaggttatgggggccggagcctcaacagaaagctcctttagttcct

SEQ ID NO: 310995 - DNA, 75 bp, Homo sapiens
cggcggtcgcgcctcaaccggctgtacggaatccaagtttctcttcagcaacgggtagcagaattggaaaaaatt

SEQ ID NO: 310996 - DNA, 100 bp, Homo sapiens
tccagcccgccgagctgtagacgtgggtgcctttttgcgggatctgcgagatacttccctggctcctccaaacaaagctctgatggcaccaaatcttgac

SEQ ID NO: 310997 - DNA, 100 bp, Homo sapiens
taaggattccaagtaactcttatttgaatatccaagggactgagtgaaaagatatttgcaaaacctgaagaacaaagaaaaacactggaagaagatgtag

SEQ ID NO: 310998 - DNA, 75 bp, Homo sapiens
gcggccgcgcggctgggcgttcatctaccacgcctacgtggagtaccctgacttctaccggaagctctacggcct

SEQ ID NO: 310999 - DNA, 100 bp, Homo sapiens
tgttgcagcgggactttattaccgctttaccagattgagaggatccagaatccagatctctggaatagctaccaggcaaagaaaaaaactatggatgcca

SEQ ID NO: 311000 - DNA, 100 bp, Homo sapiens
tgcacatctataagaagaacgggagccagtgggtgaaagctcatgaactcaaggagcacaacggacacatcacagctccggtgtcggcgggtggcgcggc

SEQ ID NO: 311001 - DNA, 82 bp, Homo sapiens
cgctcgctgggagagaggtacctctccttttccctctccctttccctaaggacttgcaccttcgagatcccctgtgtttacc

SEQ ID NO: 311002 - DNA, 98 bp, Homo sapiens
aaagacatggcctctgactgctccaaaaaaggataagcagggcttcacagaagaggtgacagggacttgccatgaggtgttgaagccttgtttcactg

SEQ ID NO: 311003 - DNA, 75 bp, Homo sapiens
gtgagttcaacatgatagagcagagtggaccaccccatgaacctcgcctgggctctgagcagagcttccggattc

SEQ ID NO: 311004 - DNA, 82 bp, Homo sapiens
cctggaacccctagtctcaagagatcctccagcctcagcctccctgccaccattggttcaggcaatcttcagcggtgatcca

SEQ ID NO: 311005 - DNA, 50 bp, Homo sapiens
gccactcgccatggactcccagaaagttatcaggacaccccatgggagag

SEQ ID NO: 311006 - DNA, 75 bp, Homo sapiens
gaaggagcaggcagctgagcactataagctgcaggaattgaatgatctggcacgggaccctccagcacagtgttc

SEQ ID NO: 311007 - DNA, 100 bp, Homo sapiens
cgagagtcgcatctccgacacgggctctgcgggcctcatgctcgtcgagttcttcgccccctgacaatgcagatcttcgtgaagactctgactggtaaga

SEQ ID NO: 311008 - DNA, 90 bp, Homo sapiens
gtattcttgaaccaggtcatgctccaaataatcatggtgtcatggaaagggatttactttatactgactctgttttggggaagctttttt

SEQ ID NO: 311009 - DNA, 75 bp, Homo sapiens
ctgctcagggtgccagacctcatcaatttcttcaggttgaattacctagaagtttgtcactgacttgtgttcctg

SEQ ID NO: 311010 - DNA, 100 bp, Homo sapiens
gtgaagaagcaggaggctaagaaagtggtgaatcccctgtttgagaaaaggcctaagaattttggcattggaaggcaacagcccccaggggagcaaccag

SEQ ID NO: 311011 - DNA, 100 bp, Homo sapiens
ctgcccggacgtggaagcagcaagaggcgcttggtcaagacacactgacgagctcttcagaaaccaggctgctttcaggaacattgctgtggattcccag

SEQ ID NO: 311012 - DNA, 99 bp, Homo sapiens
accaagaatttggcatttcaagcaagaagttgagaagtttacagacctagagaaactctacctctaccttcagctgccttctggtctcagcaatggaga

SEQ ID NO: 311013 - DNA, 100 bp, Homo sapiens
ctgggagtgacgcggctcctggaccctgaggcccgacggccatggaggctgaagagacgatggaatgccttcaggagttccctgaacatcataaaatgat

SEQ ID NO: 311014 - DNA, 75 bp, Homo sapiens
tgtggcttcaagagactgatcaaattgtgagaggaaaacagcctacccgtaccttggccatgtagaagttgatga

SEQ ID NO: 311015 - DNA, 101 bp, Homo sapiens
gccgacttcgatgatcgtgtgtcggatgaggagaaggctaatctagacgaaatccagatgagttcacctacattccttagagctttaatgactgctgtttg

SEQ ID NO: 311016 - DNA, 83 bp, Homo sapiens
caactttgcgacggaaatgtgtcatcgaaagccaggttgatgataattagaagcatgctttccactgaacttcccgacaacat

SEQ ID NO: 311017 - DNA, 96 bp, Homo sapiens
acgcggcgggccaccggccggcacgaaggcgtccccacgctggaagggataagtgcaagaaggctgcttccagctccaaagcacctaagaatggag

SEQ ID NO: 311018 - DNA, 48 bp, Homo sapiens
ggagattcatgacaaaatcatggagaagtacatccaggaagccaggac

SEQ ID NO: 311019 - DNA, 75 bp, Homo sapiens
acagcctccaagtctctgacttgtgcttggcagcaacatgaagatcattttgccactgaagatcctggtgtcgcc

SEQ ID NO: 311020 - DNA, 80 bp, Homo sapiens
caacctgaaagtggaggctgcgaaaataggggcggcctgtggtaatttgtgataaggaggatactgagaccattaagaac

SEQ ID NO: 311021 - DNA, 96 bp, Homo sapiens
gttctgacttctttaacaaggctgtgccccctgatgtttatacagaccagcttgctatggcatcgttcaggtgccaacgggaccctggttctgccg

SEQ ID NO: 311022 - DNA, 83 bp, Homo sapiens
ggaggcaaaagcagaaaacttacacagaggggctcatcattatacagggagtttattaaccacttaacctctcagaactgaac

SEQ ID NO: 311023 - DNA, 98 bp, Homo sapiens
ataaaattggactcagagtttccattgacactgatatggaatttcagggaagagccaggtcctgtttgctgtggtgttcactgcccgatatctggacc

SEQ ID NO: 311024 - DNA, 51 bp, Homo sapiens
ggaaagaagttgcaaaacactggtgaattttgaagattgcaccggtcgaca

SEQ ID NO: 311025 - DNA, 75 bp, Homo sapiens
cagccgaccttgaggctgccgccgcgagtctgccatcgtccaaggaggtggcagccctgggcgctgcctatggca

SEQ ID NO: 311026 - DNA, 75 bp, Homo sapiens
gtatcactcgctcccttgatgatcttgaggtacaaggattccttgaaagaagacattcagaaagcagatcttgtt

SEQ ID NO: 311027 - DNA, 97 bp, Homo sapiens
ccttcagagcgtcacggcgtacgccctcatggggaaaatctccccggtgactttcaggcatgctggaagatggactgccctccaatggtgtgccccg

SEQ ID NO: 311028 - DNA, 98 bp, Homo sapiens
gcctcgctgatgtggtcaagctgggtgcagccagcctgggagctgaggaccctgagacccaggtggtccataaggctgtgcttgatgtatttgaggag

SEQ ID NO: 311029 - DNA, 88 bp, Homo sapiens
ccagagctgagcggcgcgggctccagactcgccgtggtcaagttcaccatgagaggattgctcgctgtaagcagctcatctgtgaccc

SEQ ID NO: 311030 - DNA, 100 bp, Homo sapiens
gagacacgccaaagctcccaagattcctggtgcccctgatgatgaagcagtacggatatttttagaatttgagagagttgaatcagcaattaaaggttag

SEQ ID NO: 311031 - DNA, 100 bp, Homo sapiens
gaggcgtctgtcagcgacccaacctgagccccagagaggagcactgggtaccacacagccccaaggatcatccagcagctcgtcaacggcatcatcacgc

SEQ ID NO: 311032 - DNA, 100 bp, Homo sapiens
gaggctcctttaagacggtctacaaaggtctggacactgaaaccaccgtggaagtcgcctggtgtgaactgcagatcctgtttgaccaaactcagagatc

SEQ ID NO: 311033 - DNA, 75 bp, Homo sapiens
ggagctatcctgagatctgtactgctagaaattatggaagtggaaattacaatgattttggaaattataaccagc

SEQ ID NO: 311034 - DNA, 100 bp, Homo sapiens
aaaaattgaaagagaaaaggaattagcagaagacattatgtcaggagacgttgatccagcagcacgtgtcatttcattaggtcctgtatctgatgttgtg

SEQ ID NO: 311035 - DNA, 100 bp, Homo sapiens
gggtccatcacagaagagtctctacagagatgtgatgcaggaaaccatcagaaacctggactgtataggtgtgatgaatgcagactctgctaccattttg

SEQ ID NO: 311036 - DNA, 137 bp, Homo sapiens
tgcaatctggactgcaaagctgtgctccatgctgtggctccatactggaataatggagcagagacttcttggcaggtgtatcctgagtttgaagaccagagagcttgtttgccatcaggatcctttctgacttgttc

SEQ ID NO: 311037 - DNA, 74 bp, Homo sapiens
tgcagtcggcactgctactgcgaagacagctggcagaccatggtgaatccgggcagcagctcgcagccgccccc

SEQ ID NO: 311038 - DNA, 83 bp, Homo sapiens
ctcgctgggagagaggtacctctccttttccctctccctttccctaagggttacacatcattttggaatgactgtatatcatc

SEQ ID NO: 311039 - DNA, 100 bp, Homo sapiens
gaggccgtcaccttcaaggccgtcagacaaggaggatcccttttcccccagaaattactcaatgctgaaacctctcaaagtggtattagagacgctgaaa

SEQ ID NO: 311040 - DNA, 96 bp, Homo sapiens
ttgactgtgtatactctacaatctaagaaggatttcagcaaatttggagcaggaacacccatctcggctttctcgcaagataacatctatgaagtt

SEQ ID NO: 311041 - DNA, 50 bp, Homo sapiens
cctccctcagcttccgccccaaaagtgtgaaaaactcaaattactgtctt

SEQ ID NO: 311042 - DNA, 87 bp, Homo sapiens
cctacagtcgcagccaagcatcaccctcacctcccaggttaacttcttaaaaccaccccccaattttaattttgatgaatttttcac

SEQ ID NO: 311043 - DNA, 50 bp, Homo sapiens
ccatgacaacgcccaattaatcacgccgctgtgctcgctgtggagaaaac

SEQ ID NO: 311044 - DNA, 100 bp, Homo sapiens
gatttggaggttcgtacacgcctgaaaattctcataccgctcccctcactgctaacagaaacagtctccgccagtcaagaaaccctcaaaagtattttgc

SEQ ID NO: 311045 - DNA, 98 bp, Homo sapiens
ttcacttgaaaccaggaactggcccacagactacgtctactttgagaactcctccagcaacccatacctgatccggagaatcgaggagctcaacaagg

SEQ ID NO: 311046 - DNA, 82 bp, Homo sapiens
accctggagcctcagttggaagcagccgatccagcctgcggagcctgtggggcagagacattttaaatccaaaggatgtgat

SEQ ID NO: 311047 - DNA, 101 bp, Homo sapiens
gagcttctcagaagacagagggttttcttttgagaatcattccgcgcacccacgttttcatacggacctgatggaaatggtttctctcttggatgcagtaa

SEQ ID NO: 311048 - DNA, 83 bp, Homo sapiens
cggagccctggaagcagcagctcaccgaggacggggactcatgcctgaggaaacccagacccaagaccaaccgatggaggagg

SEQ ID NO: 311049 - DNA, 90 bp, Homo sapiens
agggactttaatcactgaccatcccaatatacaggttgaatgatcctaaaatgtctgaaacggagcgccagtccatggaaagcgagcgtg

SEQ ID NO: 311050 - DNA, 90 bp, Homo sapiens
cggcgctgctcccgggggcgacgggaatatatgcagaacatgtcctgcggcccaagaatcttggacttgcacatcagaggcaacagcaac

SEQ ID NO: 311051 - DNA, 100 bp, Homo sapiens
gctcgcagataagcatgctagtcatgcttcaccccttcctccatctgctgcacctaccactgattctacagattccataacaggacagaattcaagacag

SEQ ID NO: 311052 - DNA, 100 bp, Homo sapiens
gagtgcggccctgggcgcagctggtgtcatcctctggggtgacgcggggtacaccacaagcacggaatggaagttggatacactttgtgacttgtacgag

SEQ ID NO: 311053 - DNA, 100 bp, Homo sapiens
aaaagagcaggaagtcattacatgattcttatagaacagattggtactcaggtgatacataaacagcatccagatcctgattcttcagtgaagatacaaa

SEQ ID NO: 311054 - DNA, 90 bp, Homo sapiens
gcagaagaaaatggatttcgttatatcccctttagaatatatcaggaaagaccacagcaagattctttcattcgtctcctcctagcctgg

SEQ ID NO: 311055 - DNA, 83 bp, Homo sapiens
tgtttcctgacacagccagtggcccctgagagcacagagatcctgagagtgagaagcctgactgaccccgcctagacgccagg

SEQ ID NO: 311056 - DNA, 109 bp, Homo sapiens
ctgcacatctaccacgccgtcaaggaccggcacaaggacgttctcaagtggggcgatgaggttttaaaatcaaagatgggaaaatcggagaaaattgcccttccccatg

SEQ ID NO: 311057 - DNA, 100 bp, Homo sapiens
gtggaaggtgaagattgtatctggaagatccacgtgggagaagagaaacggatcttcttagatatccagttgccaagattgacagacacctaatattcat

SEQ ID NO: 311058 - DNA, 75 bp, Homo sapiens
cgatgtcgggaaggtcactgaacctgttacttgttggtttcagaaaactataagaaatttacaggaacaaagtct

SEQ ID NO: 311059 - DNA, 74 bp, Homo sapiens
cgcgcgccatggcttctggagccgagactatcctattaagtgtaatctcactgcttaatgagcccaacaccttc

SEQ ID NO: 311060 - DNA, 82 bp, Homo sapiens
ccacagaggactttaggagaaagttgctgaaggcaggagggaattgcggcgagcagtaagaagcagcgtgtggaaaagggag

SEQ ID NO: 311061 - DNA, 100 bp, Homo sapiens
gttcgcctcagacgcggtggagccgccggagtctgagaagggatcctggtgtacgggctgagcctgttatgcttttctgcccttcggccctttggggagc

SEQ ID NO: 311062 - DNA, 75 bp, Homo sapiens
caagagccccctggagagatactacgactacagcggggccttccgaaattgcatctgatggtctcaagggtcgtg

SEQ ID NO: 311063 - DNA, 100 bp, Homo sapiens
atccagatgatgtcttggcagatgttgttgaagataaagacaagggcctattccactagaagcaagatggctgaactcaatactcatgtgaatgtcaagg

SEQ ID NO: 311064 - DNA, 83 bp, Homo sapiens
caagaaggaccagctcatcaccaagtgcaatggtgggtcatgataactgggtacgtggagttctgttccattctggggggaag

SEQ ID NO: 311065 - DNA, 83 bp, Homo sapiens
caccgggacctcaagtccatcaacattttcggctttgtgagaaaccttaccatcaaacacgatggccagcaacgttaccaaca

SEQ ID NO: 311066 - DNA, 80 bp, Homo sapiens
agatcgaggctgtcctctggtgagaaggtggtgaggcttcccgtcatattccaggctgtggaaaatctctgttctcacaa

SEQ ID NO: 311067 - DNA, 90 bp, Homo sapiens
cgaccgatatagctcgccaggtggaaaaggccaaagttgttgagcccctggactatgagaatgttattgcccaaagaaaaacccagattt

SEQ ID NO: 311068 - DNA, 80 bp, Homo sapiens
cggtccctgtattggtctcctgctcctagaggtgcgcgcggagccatggttatcatgtcggagttcagcgcggaccccgc

SEQ ID NO: 311069 - DNA, 83 bp, Homo sapiens
aaaatctttgtcaagatcagcaacactatttctgccaggcgggcaccacggcaggggctgagctaccctcatggaagggagag

SEQ ID NO: 311070 - DNA, 83 bp, Homo sapiens
gtgtcgacccacacagttcagcacttagaggaagaatcttatggcaagggccttatatgacaatgtcccagagtgtgccgagg

SEQ ID NO: 311071 - DNA, 99 bp, Homo sapiens
cagattcagaaggagcaggattaccaaaggtttcggagcaacatcccctgtcacctggttgatatctcttgcggattaccctgcagtgccacgctacca

SEQ ID NO: 311072 - DNA, 104 bp, Homo sapiens
acggcgttgccctgtgccagtgcaagtcgggatactttcagttcaacaagatggaccactcctgccgaggatccaaggagctggttctgctggttggaccaaac

SEQ ID NO: 311073 - DNA, 140 bp, Homo sapiens
ctgaggcagctcggcctgcagatgagcctacccctgccagcaagtgctgcagcaagccacaggtggagagcctgtcccgcctcctgtccacctgtggcctcgtccagtctgtagagttgcaggagaagccggacctggct

SEQ ID NO: 311074 - DNA, 100 bp, Homo sapiens
ctgccaaggctccttctcaagctgcttgagtcaatgagggtttatcttgcagattatggactttcctacagatattgtcccaatgggaaccacaaacagt

SEQ ID NO: 311075 - DNA, 82 bp, Homo sapiens
aacctgggggctccctggacaactccgagcaggcctgtttaaagaagaaaacccgtatgctagatttgaaaacaactaaagc

SEQ ID NO: 311076 - DNA, 97 bp, Homo sapiens
cagtgttgtggctcatgccatatgaatgggctcactggcctggcccagaccctgactgcccacaggatctttgcaaagagagcaggatgaatggaca

SEQ ID NO: 311077 - DNA, 50 bp, Homo sapiens
gctgcgttcacggcaggattcggttaggttatcctgaatacatgtctaac

SEQ ID NO: 311078 - DNA, 60 bp, Homo sapiens
ccttgatgaaaatgaggcacttagagagcgtgtggacccctccacgtcgctgcgcgcaat

SEQ ID NO: 311079 - DNA, 90 bp, Homo sapiens
gaagacttgaacttaatacagcaagaaagaccatcaagtttaccagtcctctcagggtgcgccatcattgtccgaggtcagcctcgtggt

SEQ ID NO: 311080 - DNA, 83 bp, Homo sapiens
caggctggaacttgccctgtctcctcgcagatgaggatttgcagatttacagaatggctgcacattaatggaaagagaagcat

SEQ ID NO: 311081 - DNA, 103 bp, Homo sapiens
attccacctgcagatgaaacttattgaacaggatctgtgtcgaggtcctgtccaaaatgcattgctgtcttcacaagagtcagtgagccaaggatacaatttc

SEQ ID NO: 311082 - DNA, 75 bp, Homo sapiens
ccgccagcgcctgagcatccccgtcatggtggtcaccctgggatacatcattcactctttggggacgtgaagaag

SEQ ID NO: 311083 - DNA, 80 bp, Homo sapiens
gccttctctgtcagctctttccccgtcagcatcccagccgtgctcacgcttgccttgcgccatggactggcagccagacg

SEQ ID NO: 311084 - DNA, 100 bp, Homo sapiens
ccgaggctcgcgggcggcgggcccgggcatgagccatgagcccaagtccccttcgctagggatgctttccaccgcgaccaggaccaccgccaccgtcaac

SEQ ID NO: 311085 - DNA, 100 bp, Homo sapiens
aacatccacagaatagacctgaagacaaaaatccagaagtacaagcagtctgcagaaaaatatggctcaggagactaaccagaccccggggcccatgctg

SEQ ID NO: 311086 - DNA, 90 bp, Homo sapiens
ggcacccgaatgctgcccgggtgaggaaagaaccggaggctgaagcaggccaaagaagaagctcaggctgaaattgaacagtaccgcctg

SEQ ID NO: 311087 - DNA, 100 bp, Homo sapiens
aaacgaaacccatgtttctaatgaccagcagctgcatcttcctcccgtgaggctggccgagctccacgctgatctgaagatacaggagagggacgaactc

SEQ ID NO: 311088 - DNA, 100 bp, Homo sapiens
actacagaacagcacgtaccagaggtggaagtccaagtcaaacgcagaaggactgcctcactgagcaaccaagagatgggaaggccattgtgactatgtg

SEQ ID NO: 311089 - DNA, 90 bp, Homo sapiens
tggatgtaatagatgaaggcaaagcaaaccgacacgtggctgtgacaatatctctcagaagatagaagtgtgcaagaagtactacagaag

SEQ ID NO: 311090 - DNA, 96 bp, Homo sapiens
cccatctgcagggacgcgtacgagctgcaggaggttatcggtgctggagaatctggtaaaagcaccattgtgaagcagatgaggatcctgcatgtt

SEQ ID NO: 311091 - DNA, 83 bp, Homo sapiens
aatgatgccacaacccttacgcaaaggtttccaatacttatctacaggaatcgccatgaccccagctctgagggaggcaacag

SEQ ID NO: 311092 - DNA, 100 bp, Homo sapiens
gggaggggacctggatcatggctgccgcgccgccgctacgggaccgcctgagctttctacaccgggattcttgggatgagcttcttattggtgacgtgga

SEQ ID NO: 311093 - DNA, 82 bp, Homo sapiens
tggaccagaccatgggcctgagcatcagacaatgcagatcttcgtgaagactctgactggtaagaccatcaccctcgaggtt

SEQ ID NO: 311094 - DNA, 75 bp, Homo sapiens
taacgcaggatccggctgccgaaggtcctcgccagaccctgaaggaagattgggaatctgaaaaagatttatgtt

SEQ ID NO: 311095 - DNA, 96 bp, Homo sapiens
caagttcagcaaatttggagatggtattaatctctggagaagacacatccacagttagcactttcttcagatgctgacgctcggtgaacagttgcc

SEQ ID NO: 311096 - DNA, 90 bp, Homo sapiens
attggggccatgccaaggactatgtggagtttggaaattttagcattcaggtgccaggaatgcagatgggacagccagtgccagaaacag

SEQ ID NO: 311097 - DNA, 100 bp, Homo sapiens
ctcagccaggtgtgaggagcaggagatggaagtctatgtgactgagaccaagaactctcctctgatggaggatttcttcgaagaaggattctcccaggag

SEQ ID NO: 311098 - DNA, 90 bp, Homo sapiens
cttcgtggcgacctatggccgtggctaccccggatttgctccaagctatggctatcagttcccaggtgaccaagaatatggcccaggtga

SEQ ID NO: 311099 - DNA, 83 bp, Homo sapiens
ttcggtggactccttcggcagtccacccaccgccgccgcctcccaggggtgagcccctccagactccgaataggagatcaaga

SEQ ID NO: 311100 - DNA, 83 bp, Homo sapiens
gctgcacactgccctccgaagtcggggacgcgggctcggcagcgtctatcccagactaccggggccctaatggagtgtggaca

SEQ ID NO: 311101 - DNA, 100 bp, Homo sapiens
ggcagcgcatggacatcctggatcatcgtcatcagacagtgaggaggacccagaagccttggagaagcagaagaaagtgcggcccatgtacctgaaggac

SEQ ID NO: 311102 - DNA, 50 bp, Homo sapiens
ttcctgtacagcctgcagaactacttggacatccctgacatccctggact

SEQ ID NO: 311103 - DNA, 75 bp, Homo sapiens
tctgagtacggtctcacagacaacgttgagcaattctcagtgaaggagttctacctgaagatcatcccctggcgc

SEQ ID NO: 311104 - DNA, 111 bp, Homo sapiens
gacagccgcgcgctgagggtctcggggcgggcgccgcgggacctctccgggccatgggaggagatgaccgccgggttctgctatggcacatggaacaagccatccactcca

SEQ ID NO: 311105 - DNA, 100 bp, Homo sapiens
cggatcggattcctcagctacgaggaggcgctgaggagagatggggcattctcttctcccaccctcgggactttaccccagtgtgcaccacagagcttgg

SEQ ID NO: 311106 - DNA, 100 bp, Homo sapiens
ttttatggctgtgagacacgttaaaatttcagggtgcagacccacctcgaaaaccccaccaagtaccacatacagcaagcccaacggcagcaggtaaagc

SEQ ID NO: 311107 - DNA, 100 bp, Homo sapiens
gtcggacctttcccgctggcgcgcagcctcagctaggtcagcccaaggccaaccccactgtcactctgttcccgccctcctctgaggagctccaagccaa

SEQ ID NO: 311108 - DNA, 75 bp, Homo sapiens
gtcgctgagagctgggaagaggcggcagacagcggggtaccaggtcatcagtacaccatctgatattttcatggt

SEQ ID NO: 311109 - DNA, 74 bp, Homo sapiens
agcaaacaaaaacgccagcattttgttagaggagttagacttggaaaagcattatagccttcagaaaggccaac

SEQ ID NO: 311110 - DNA, 83 bp, Homo sapiens
tggtggtggaaacagtggacttccaacccaatgagcaagaactctgtgaaggtgatgtacaagtgcctgtggccaaactgtgg

SEQ ID NO: 311111 - DNA, 89 bp, Homo sapiens
gtgcaaagctgcagaaaccacagtggtagagctctttcaccatgcctggatcacttcctttgaatgcagaagcttgctggccaaaagat

SEQ ID NO: 311112 - DNA, 99 bp, Homo sapiens
agcaccgacgaacccccaatgctgaccaaggaggagcctgttccagaactgctggaagctgaggtcccctctgagccctctcaccttgtcctgtggaag

SEQ ID NO: 311113 - DNA, 100 bp, Homo sapiens
caggacttgagtaacagcaacatgtccggttccagttgttggcaaaggagaggaagaggaagaggaagatggcatgcggctttgtctgccagccaacccg

SEQ ID NO: 311114 - DNA, 89 bp, Homo sapiens
ctgccgcagagtcggcacctgaaggacatggagatataattgaccctgcaatcctgcgcccgggccgcctggacaaaacactgtttgtg

SEQ ID NO: 311115 - DNA, 75 bp, Homo sapiens
cccagcggagtactttctggagggaagcaaaccctgcaaagcgatggagttttaacattgaatgcggagaacact

SEQ ID NO: 311116 - DNA, 100 bp, Homo sapiens
cgattgtcgatgggctcgctccagaggacatgagcaaggagcaggtgcggtggaatgatcccggtgcacaatattccttagttgacaaagagaagctgcc

SEQ ID NO: 311117 - DNA, 76 bp, Homo sapiens
caggaagagagactgactgggcaacatgttattcaggtcccctgacaagcccaccaggccccctgctgagatggct

SEQ ID NO: 311118 - DNA, 75 bp, Homo sapiens
tccatcgaatcatcaccaatgagacggtggctcagggagtaaaggaaggccagttgagcaaacagaagtgttcct

SEQ ID NO: 311119 - DNA, 100 bp, Homo sapiens
cagctatgatgaactttactatgagattatccgcatgcaccagagctttgacaacctctactccatgggtggacactcactgacctgtcacaaggttgcc

SEQ ID NO: 311120 - DNA, 83 bp, Homo sapiens
ctgaaaggagagacacttgtgaacattcaagtgaagcaaaagcctttcatgattatgaaatctggcattttttaaagtttgcg

SEQ ID NO: 311121 - DNA, 82 bp, Homo sapiens
ctcaccccgcggccgcaccttcccgccttctcagggcccagtaaatcctttagggccacctgtaccccatgggccccatggt

SEQ ID NO: 311122 - DNA, 100 bp, Homo sapiens
gtcgccatgggccgccgccccgcccgttggtatcagtgctgcagaatcagggcagagagatgatgctggtgaccagtggagccgtagcctttggcaaaca

SEQ ID NO: 311123 - DNA, 50 bp, Homo sapiens
cgagcttttcctccaggcctttgagagggctgcttgctctcggtgactac

SEQ ID NO: 311124 - DNA, 124 bp, Homo sapiens
gcgtctgcccggccaagaggcaaaggggaggttacgcagcaaaccatccagaaggccaagtcctgtatctgccatgtctgtggcgtccacctcaacaggctgcattcctgcctctactgtgtct

SEQ ID NO: 311125 - DNA, 75 bp, Homo sapiens
atgatctggcagacctcagctgcctggtcgacatagacctggtggtcttcgggaaatgggagcgtcctcctttac

SEQ ID NO: 311126 - DNA, 82 bp, Homo sapiens
ctcatgatcgacttcctcacccgcgcctgcgacctcgatttctccacccaggtgaactcctccctcacctccccgacggggc

SEQ ID NO: 311127 - DNA, 82 bp, Homo sapiens
gaaggcaccaccacagccgcccacttctggaaggttccatcccctgcagcacctgaactcctggggggaccgtcagtcttcc

SEQ ID NO: 311128 - DNA, 114 bp, Homo sapiens
ggatgttggcggtccctgtgacctgtggagacacggccagatctgccctccaacaatgcagatcttcgtgaagactctgactggtaagaccatcaccctcgaggttgagcccag

SEQ ID NO: 311129 - DNA, 90 bp, Homo sapiens
cttggaggcattcatggctgaagtggaggtgctggagaatctggtaaaagcaccattgtgaagcagatgaggatcctgcatgttaatggg

SEQ ID NO: 311130 - DNA, 100 bp, Homo sapiens
cgcgcccggactcggcggccaggcttgcgcgcggttcccctcccggtggtgcagcggaactgctgcctgacgctctgcaacttcagcatccccgaggagc

SEQ ID NO: 311131 - DNA, 98 bp, Homo sapiens
cctacctaggtaatgtgtagttctcaatgcatcatgtcaggcagcttatgatgccaatttgtcccatgacacatcatctcagagttggagcacctgac

SEQ ID NO: 311132 - DNA, 82 bp, Homo sapiens
caggcgctgcccagccccttgtcagccagggctgaacccccgcaggtacctttgacaggagcgtgaccctgctggaggtgtg

SEQ ID NO: 311133 - DNA, 75 bp, Homo sapiens
actctctctttctggcctggaggctatccagcgacacaatgtttgcacgaggactgaagaggaaatgtgttggcc

SEQ ID NO: 311134 - DNA, 73 bp, Homo sapiens
gcctggggaccatgggctccaggatcaaagatcaactgtggcaaccctccagaaatgcggcacgccatcttgg

SEQ ID NO: 311135 - DNA, 100 bp, Homo sapiens
tggcggccaacgggccaggtaggatttccgggagaggctgctgtggaggctgaggaggcggcggcggagatctggtaagactttgaccccgacgcaggct

SEQ ID NO: 311136 - DNA, 100 bp, Homo sapiens
ccgaccccgcaacgactgcccgggctgcgggaggggaggagagcagagaacgtccccaggttttcaaaattcacttctacagatcgtaattccagagaaa

SEQ ID NO: 311137 - DNA, 87 bp, Homo sapiens
gacctgggcggaggccgccaagacggcatttgggcagtccttctccatccaccggaaggttgctgaagatggagagactcgggagga

SEQ ID NO: 311138 - DNA, 82 bp, Homo sapiens
ggaggagaacatcctggaccccaggctgctgatcgccttccagaacagatgatcaagcggtgctgattcacgagagtggaag

SEQ ID NO: 311139 - DNA, 100 bp, Homo sapiens
gtcttcacccaggccctggagtgcatgcgcaggtttccttaatgacaacaaaaaagggagtaatcctacccactgtaagagtcatgactcttgattgcag

SEQ ID NO: 311140 - DNA, 107 bp, Homo sapiens
gggatgacccatactatgacatcgcccggcaccagatcgtggaggtggcagctctgtctcccactccgtgctgtctgagatgcaggtgattgagcaggaaaccccag

SEQ ID NO: 311141 - DNA, 100 bp, Homo sapiens
cgcagcagggaaaggcaaaggcaaaggcggctcgggagattcagccgtgaagcaagtgcagatagatggccttgctggagcattggatttgctaaaggag

SEQ ID NO: 311142 - DNA, 96 bp, Homo sapiens
cccaaatgaggccatggtggtctccgatgctacaaaacttagagtttctcctaagaatcctcgtatccccaaattgcatatgcttgaattacattg

SEQ ID NO: 311143 - DNA, 106 bp, Homo sapiens
aaagacaccacacattgcgcagtcgggaccatcgccggagcctgaggacacttctctgtcgtcacagttaggattgtataccatctcttgattcttcacagtcaac

SEQ ID NO: 311144 - DNA, 75 bp, Homo sapiens
ggtggttgaaagttttccttcttacagagatgtgactctgtttgaggtgaacctgccgctgctcaccctgagcca

SEQ ID NO: 311145 - DNA, 75 bp, Homo sapiens
tcccgccggccgtctccttaacaccgaacacctacctggagtagaacagaaaaattattatgtctgtgttccctt

SEQ ID NO: 311146 - DNA, 78 bp, Homo sapiens
gtagaaaactggtcaaggaagctatgagtttcgaccaggtataagatataattttttcctgtatggatgcagaaatca

SEQ ID NO: 311147 - DNA, 96 bp, Homo sapiens
ctcagaagccatgcccctcaggctggaacttgccctgtctcctcgcagatgaggtgtgaacctcaaatggactgaataaccctgagttggttgcag

SEQ ID NO: 311148 - DNA, 50 bp, Homo sapiens
ctgagatccatctgcaccacggtgctggttgacatcatggacatatgtga

SEQ ID NO: 311149 - DNA, 98 bp, Homo sapiens
ttacatccaacattaccagctggccgatactctttgaatgtcacatacaatattgatcagtggaataaagttattgaacagcttggaacaccatgtcc

SEQ ID NO: 311150 - DNA, 75 bp, Homo sapiens
cagttgataaaatggctggagaggttaaggaccgagaggagcggaagctgctgctggaccctagcagccccccta

SEQ ID NO: 311151 - DNA, 50 bp, Homo sapiens
ctgtgagacactaaagtccccactgtgtttgctttcacaaccaaagttct

SEQ ID NO: 311152 - DNA, 75 bp, Homo sapiens
cagcgctcggacccccctacccacgctgaacgagagggacacggagcagtgacccaacaggagaagaccccaccg

SEQ ID NO: 311153 - DNA, 82 bp, Homo sapiens
cgaggacgatgactgcttagaccacagcgacgaggacgactgccctgcatcttcctcccgtgaggctggccgagctccacgc

SEQ ID NO: 311154 - DNA, 75 bp, Homo sapiens
cgctgtacgccgagcacccaggcgactgcctcatcttcaagctgcaggacaagttcgagcatcttaaaatgattc

SEQ ID NO: 311155 - DNA, 104 bp, Homo sapiens
taatggtggatgaagttgttcattgtttgtcaccacaaaaaggacaggaactctaatgaatcattgattgaccagcactattttaccagttggaatgaatgatc

SEQ ID NO: 311156 - DNA, 74 bp, Homo sapiens
aacttcaggataattttgaaacagttgacattttgctaaaggctgtgggagacactcctattatgaaaacaaag

SEQ ID NO: 311157 - DNA, 90 bp, Homo sapiens
gtcgtttgtcatgcttttggctgccctgagctggcagtacctgaccactctctcccaggacgtgttcctcatgatccggcgccacaagac

SEQ ID NO: 311158 - DNA, 74 bp, Homo sapiens
tctccatgaagcagttcctggacttcgatcaccggggaacccttgatccgtcgatcagatgataatgaaaaggc

SEQ ID NO: 311159 - DNA, 98 bp, Homo sapiens
ttcaacctgctgtacagattggcaacggaagaacaggagggccgcgatgggcctcttggaacattggtgtgttcatctgcattcgatgtgctggaatc

SEQ ID NO: 311160 - DNA, 100 bp, Homo sapiens
tgcatttgcgaagtattcgtacgaagttgatgcttatgtccagaaatgaagaggccactaagcatttagaattcagcctgagaaaactcctgagcatgtg

SEQ ID NO: 311161 - DNA, 82 bp, Homo sapiens
accatgccgctcctaagcctgcacagccgcggcggcagcagcagtgagaggaatgtgggtgccggcaggacaggcgattggt

SEQ ID NO: 311162 - DNA, 112 bp, Homo sapiens
cctcaacccgtcttacctcttcttgacctgaacaatcagtctgtgggaattgagggctgtcacatggtgactgaagaacttcattccataacgtttgaaacacagatctgcc

SEQ ID NO: 311163 - DNA, 76 bp, Homo sapiens
agcctcctaagtagctgggactacagttggaactgataatgggagagaagcaattgaaagtggggctgcatttctc

SEQ ID NO: 311164 - DNA, 101 bp, Homo sapiens
ccaatatgttatctccagatgccgcgcaactgtctgatctcagttcatgcattagtgccagcagtagttcccaagggctgtctcagccatccacccagacg

SEQ ID NO: 311165 - DNA, 76 bp, Homo sapiens
gtttgaacggaatgctggagtcagtggaagacggagctggtcggcccgaagtttaagctatgaagaaggacatccc

SEQ ID NO: 311166 - DNA, 77 bp, Homo sapiens
ttcgcagtggtcgcttcttctccttgatatgtgcagcgggggctacagcgagtggggctagatccccagctgccact

SEQ ID NO: 311167 - DNA, 74 bp, Homo sapiens
aagttgaacagaacgcggctcccagccacaccaagttcagcctgtgcctactacactggcacaagtggatagag

SEQ ID NO: 311168 - DNA, 82 bp, Homo sapiens
agaaaatacaaatcacacgcataatggatgaaaggaaccgacagtatcctaagaaatccggtaaccaataagaagcattaca

SEQ ID NO: 311169 - DNA, 75 bp, Homo sapiens
ggagatgctctggggaaagcacttgcttcgctgcttattactgtggcattcaatcaacctgttaagctttattcc

SEQ ID NO: 311170 - DNA, 75 bp, Homo sapiens
tgacgcctgagcagagaaggtcccggcaggggaacccagtcgcccctataaagtcagcccaaggccaaccccact

SEQ ID NO: 311171 - DNA, 100 bp, Homo sapiens
cccccctcaagaccatatcagcttctctgggatacaatgtctctttgctatatgaccttgaaaatcttccggcatccaaggattccattgtgcatcaagc

SEQ ID NO: 311172 - DNA, 95 bp, Homo sapiens
ctgcggggcaagatggaggcgctgattttgattgcagcaggagagaagattcctttgagccaggaagaaataactctgcagggccatgccttcga

SEQ ID NO: 311173 - DNA, 50 bp, Homo sapiens
atcaaacaatgggtcagtgttctcggtaacaaggagggagcgcattcttc

SEQ ID NO: 311174 - DNA, 74 bp, Homo sapiens
aaacctatgcaaatcctctacaaggtctctgaagcaaaactgagggcagatgaggcaaaacaaagtgctgaaga

SEQ ID NO: 311175 - DNA, 100 bp, Homo sapiens
ggaagctggagagggatgtgtggctgcgatcctcggggaaaccgagatatttggttcccgggtaagagttgactctacagcaaaggttgcagaaatagaa

SEQ ID NO: 311176 - DNA, 75 bp, Homo sapiens
gccatcggcacccgttctggagccatcaagctctttctgcaccagtggagacttcgtgtccccagggccttcccc

SEQ ID NO: 311177 - DNA, 100 bp, Homo sapiens
tctttcctgctggctttggagcctgagctcgaggcccggctggcgcacctgggcgtgcaggactggactcgggccatatccgtggtgccgtcaacatgcc

SEQ ID NO: 311178 - DNA, 100 bp, Homo sapiens
gcgttccttgtcctccctctgcacaaggcttttatacagaaaaacctaagacaattaaactacgtatggattgggcttaactttacctccttgaaaatga

SEQ ID NO: 311179 - DNA, 98 bp, Homo sapiens
gagcagggagcattgcagcagccactggctttgtcaaaaaggaccagttgggcaaggtttgctcctaaatctcaaaatatggaaagcacctcatgtgg

SEQ ID NO: 311180 - DNA, 82 bp, Homo sapiens
aaagactcaactgagcaggtgatgcagctagctccctgtgctgtcaggaatctacaggacttggctcgtatttacattcgac

SEQ ID NO: 311181 - DNA, 50 bp, Homo sapiens
ggccgagcaacttaagaaccagattcgagagattacctggggcaattgat

SEQ ID NO: 311182 - DNA, 100 bp, Homo sapiens
aatgttttttgctgcaatgctgcaaattaattcatcattagagaaattagatctgggtgactgtgatctgagtgaaagcagcagcagtagcaacatctcc

SEQ ID NO: 311183 - DNA, 75 bp, Homo sapiens
cgaaaagcaagaaatcaaataacacagttggaatccttggaattgaatgatctggcacgggaccctccagcacag

SEQ ID NO: 311184 - DNA, 50 bp, Homo sapiens
gggggccttcgcgctctgcgtcctgtatattgagatcttcagaagtagca

SEQ ID NO: 311185 - DNA, 77 bp, Homo sapiens
gctacgcctacatcaacttccagcagcccgcggacggtgctggagaatctggtaaaagcaccattgtgaagcagatg

SEQ ID NO: 311186 - DNA, 118 bp, Homo sapiens
cggaatttttaaagtctttagtatgttgaactggaaatataggacatgcgtttgagatctactgtgataagtcaaggaacaccttataatcctgatggacagcccatgggaggtttcg

SEQ ID NO: 311187 - DNA, 51 bp, Homo sapiens
ccttccgagtagctgggactacagtcttgaggatccattttctgagacggt

SEQ ID NO: 311188 - DNA, 98 bp, Homo sapiens
cttaggccctccccctgcaggtgccctcgcgcccctcccggggtccccaggtactccaatatctttgttacctccccaagccctgataacctccatac

SEQ ID NO: 311189 - DNA, 75 bp, Homo sapiens
ccgaagcaaggatttccgggactacctcatgagtactatactggcaattgctggagaagattttgcaattgttgc

SEQ ID NO: 311190 - DNA, 100 bp, Homo sapiens
ggaggtggacgcagagcagctgatccaggaagcctgtcggagctgcctggagcaggggtatagaacaggctatgcttacaggcatcctctcattcgagag

SEQ ID NO: 311191 - DNA, 50 bp, Homo sapiens
gcaccactgaagtgaccgaatgagttataggtatggacacagtaagagtc

SEQ ID NO: 311192 - DNA, 100 bp, Homo sapiens
ctgtgctgagggtggcggccggataggcattgaagttgatatcgatgtggagcacggagggaaaagaagccgcctgacccccgtctctccagagagttcc

SEQ ID NO: 311193 - DNA, 100 bp, Homo sapiens
ggccgcggaggaggaggaggtggagttgctgcccttccggagtccgccccgtgaggagaatgctcggcttattccaggggtgtgtttcgtcgagatgcac

SEQ ID NO: 311194 - DNA, 75 bp, Homo sapiens
cctggtgatcggctccttaccagctcacctctcaccgcgcatgtttggagatgtagaagacagaagtagctcagg

SEQ ID NO: 311195 - DNA, 100 bp, Homo sapiens
ccaagccaatgcccaagacattataaaccatttgacattgtgcagcaaagaaatggttatggagaagcccagtccgctgcttgtagggcgggagtttgtg

SEQ ID NO: 311196 - DNA, 75 bp, Homo sapiens
cccggtcccaggggaggcccccacctccccttctattgttctgtggcccagtgacagacatcacacctccagtgc

SEQ ID NO: 311197 - DNA, 50 bp, Homo sapiens
gagcaccaggagactgcctatgctgacctgaataatgtcagattctcagc

SEQ ID NO: 311198 - DNA, 75 bp, Homo sapiens
ctcgcacaaccccagttaagctgcgctccgggaggttattgaagagagggaaaaactaaagaatgaccgggaagc

SEQ ID NO: 311199 - DNA, 101 bp, Homo sapiens
cggcgcggtagcgaaggccgccgaacctgcctggctagccggcgacttgagtgacgagttatgaagttcatggaatggaaaaaataccagaagatggacca

SEQ ID NO: 311200 - DNA, 100 bp, Homo sapiens
tgccggaccccagcacacagaagccgagacgggtgataaaagaaaatgtggctgaagttacccgaagttcagcttgcagtgtaattcagaagagttaaga

SEQ ID NO: 311201 - DNA, 75 bp, Homo sapiens
gagacacggcttcccccaaggaatatacagggctgaaggagataacttattaatctgtcgaaggcttatgccgag

SEQ ID NO: 311202 - DNA, 75 bp, Homo sapiens
caggacagcgagaggaaggcgcacaggcagaagagcagcagcgtcaggaaggtggccggaaacttccactttgcc

SEQ ID NO: 311203 - DNA, 100 bp, Homo sapiens
ggtcttctcgtcggattgcccatgcacttgttgcagaaacagccaagttcctaaggacggtctgaagagccaagagctatttgatgaaattagaatgacc

SEQ ID NO: 311204 - DNA, 50 bp, Homo sapiens
ggacttctacaatgcagacgagctcaaggatttccagatgtgacttgcac

SEQ ID NO: 311205 - DNA, 82 bp, Homo sapiens
tggaagtgttggctgggtcctctccgaaatcgacagcctcaaccttcataaacaggtcttccccagggaggtcctgaactac

SEQ ID NO: 311206 - DNA, 49 bp, Homo sapiens
gaaagaggtcccatcaaaaccaaacagttccctggcttcaaggaggtcc

SEQ ID NO: 311207 - DNA, 97 bp, Homo sapiens
ctgccaatttaccagagataattgataacaccctgtaacagctgaaatttcgaggatgtcagatgtaaatgtatctgccctccctataaagaaaatt

SEQ ID NO: 311208 - DNA, 90 bp, Homo sapiens
actttgggcgtcccattgccatgactatggaaatgatgttagacaaaaagcaaattcaagcgattttcttattcgagttaaaaatgggtc

SEQ ID NO: 311209 - DNA, 75 bp, Homo sapiens
gacagattcgcagtggtcgcttcttctccttgggacccgagctgatccagaaagccaacggtctccacggcttca

SEQ ID NO: 311210 - DNA, 100 bp, Homo sapiens
gacgcggagccatggccgaggtgttgcggacgctggccggtttttctatatgagtggagaagacagctgttaccagggaggtcatacaacatttttttag

SEQ ID NO: 311211 - DNA, 74 bp, Homo sapiens
cgagacatgtgggctgattacatcctggaacctggaggagaagcggctcacttggaggcttccagatgtgtccg

SEQ ID NO: 311212 - DNA, 83 bp, Homo sapiens
tctccttatgctgggtgaaaacaaaggttcctttgcccaaagactcaacaggtgcagcagatcccccccagccccacatcgta

SEQ ID NO: 311213 - DNA, 90 bp, Homo sapiens
gcttcctgacgctcctggcgcatctggtggtcgtcatcaccttattctggtcccgggtggttatcactaggctaaaactggacaaagacc

SEQ ID NO: 311214 - DNA, 82 bp, Homo sapiens
gggggtcttcctcctccgccgttgacaggtcaccgacgatgagggcgcacctgctgtcctggagcttccgatctctgttcgg

SEQ ID NO: 311215 - DNA, 111 bp, Homo sapiens
gggctgagcagaggacgacatgttgcttttcgtggagatgaagttggagcccttgtttttgacattggatcctatactgtgagagctggttatgctggtgaggactgcccc

SEQ ID NO: 311216 - DNA, 74 bp, Homo sapiens
cggctctttggcgcggattagggggtctcggcgaggaaagaccacagcaagattctttcattcgtctcctccta

SEQ ID NO: 311217 - DNA, 83 bp, Homo sapiens
gtttccgctttgtggccacatggtgtcagatgaatatgagcagctgtcctctgaagtggccctgttccagtattggttatgag

SEQ ID NO: 311218 - DNA, 100 bp, Homo sapiens
tggatcgaaatgtccatgagaaaaagcttggagataaagttgctttttactgggattaaagcctgtggtttccacagaagcaccacctatcatatttgcc

SEQ ID NO: 311219 - DNA, 100 bp, Homo sapiens
tcttggacaagttgaacatggtcacccagttctttgatagatttcacctgctcattcagggagagcctggggatgtacaggagatgcctgctccagaatc

SEQ ID NO: 311220 - DNA, 98 bp, Homo sapiens
gctactcctgtgctctccattactggaacagattcctctgtggaagccagggagaagaggagagcaacttctgaagaattgcatacgtttagcctttc

SEQ ID NO: 311221 - DNA, 78 bp, Homo sapiens
tcaagacagtttctctgggtttgcccctctgcaaccacaggtggcaagtgcaggcagctgtcccggttatgccggaat

SEQ ID NO: 311222 - DNA, 101 bp, Homo sapiens
aaagttggagataaaattctcggagatctgagctacagaagtgcagttaagctgaaggaatctgttgttgaaaatcatgcagtgttaagttatgctgtgga

SEQ ID NO: 311223 - DNA, 83 bp, Homo sapiens
catggaccacacccagcggaaccctgccaaggtaaccctgctggggtcagttatcttcacattccagcacacccagcatctgg

SEQ ID NO: 311224 - DNA, 142 bp, Homo sapiens
tttcaagtttggattggagtccagataaaaggggtctctgcgtctgtagttcatttgaccaaacgccagtgttttagaaggagtatgtggaagggcaaggagtacctatagaaccccggaggagggtgaggagcagagctgg

SEQ ID NO: 311225 - DNA, 99 bp, Homo sapiens
ggattcacgagaagaaaattggcaagagtggagacaaagagatgagcagagctacagagacttctgaagtggagagtctgcgacctcctcggttcttca

SEQ ID NO: 311226 - DNA, 122 bp, Homo sapiens
caggaattgatggcgagaaggagcacgccaatgccaagaagatcctgctggagatgggggagttctttcagattcagggcacctacatctactttgactacgagaagtggggccagcggaag

SEQ ID NO: 311227 - DNA, 83 bp, Homo sapiens
tgatgattagagacatactaatgtacatgatgtctttggtggacttgggaaagaggttgctagaagcagcaagaaaaggccaa

SEQ ID NO: 311228 - DNA, 100 bp, Homo sapiens
ccaccatctccatcacccaccaacaacaccacaataatccacagccaagattctgaagggagtggtaatggaagtgaagatgcttcaaaggacagtggag

SEQ ID NO: 311229 - DNA, 98 bp, Homo sapiens
agttacagtagatggacctcgggaacccagaaccagaataaaagctacttggccgtaaggctaaaagaccaagatctgagagattcaaggcaacaagc

SEQ ID NO: 311230 - DNA, 100 bp, Homo sapiens
tacaaatcatggagccgctggggtcccttttgcctcagatactattttgaagagcagcccgacggccatggaggctgaagagacgatggaatgccttcag

SEQ ID NO: 311231 - DNA, 96 bp, Homo sapiens
atgaccgtgttcaggcaggaaaacgtggatgattactacgacaccggcgaggaacttggcaggcagagattgtcaagaggctgaatgctatctgtg

SEQ ID NO: 311232 - DNA, 75 bp, Homo sapiens
ggagccggccgtacgcggtgctgcgagggcagaacctgggtgaccatgctttgggattttcatagtttgagtaat

SEQ ID NO: 311233 - DNA, 75 bp, Homo sapiens
ggatcgacagattgaccagtttttagttgtagcacgaatgctgaagcttggaacaatttgtcaacttcctatatc

SEQ ID NO: 311234 - DNA, 83 bp, Homo sapiens
agctccgagcgagcgagcggcgcccagcccagcgcctcggccgaacccctccgcagcaggtgtcaaattggtttgctaatgca

SEQ ID NO: 311235 - DNA, 51 bp, Homo sapiens
accagaagccagtggtcatgatgaaaatggccctcgggaccaaggatcacg

SEQ ID NO: 311236 - DNA, 75 bp, Homo sapiens
tgtgatggtacaggaagggaacgtggaaagcgcatacaggaccctaaacagcatctggaatcaagagacccatgg

SEQ ID NO: 311237 - DNA, 83 bp, Homo sapiens
ccgggatttgggtcgcagttcttgtttgtggatcgctgtgatcgtcacttgttccatctcccaacctctatagccagctgaat

SEQ ID NO: 311238 - DNA, 50 bp, Homo sapiens
tccactagaagctcttctgagggagaaagtttcctacactactgaggttt

SEQ ID NO: 311239 - DNA, 100 bp, Homo sapiens
aaagaaaaggcttctcagctccaggaacaatccagcaacagctctggaaaagaggcacttgcagttacattcaccacatttgtaacggagccattgaagc

SEQ ID NO: 311240 - DNA, 90 bp, Homo sapiens
tggaattttgccgatttcatgactaaccagtatggccgccaagaacgagtcatgtttgacaaaattacatctcgaatccagaagctttgt

SEQ ID NO: 311241 - DNA, 83 bp, Homo sapiens
tgtcccaaggaacacctgggcaacagaatattggtcaagttgctgaccttgaaaccctacagcttggggcctgggctcctctg

SEQ ID NO: 311242 - DNA, 98 bp, Homo sapiens
atgcatcgctggagtccccactgcgcgctgggctggctgcaggctgagctagaagaggcggagcaggaggcagagacggagtttcactcttgttgccc

SEQ ID NO: 311243 - DNA, 108 bp, Homo sapiens
cgtggaacagagttgttgttcagcagaaataatcaagagttgacatcataccaggtccctgtgcgttttattgcgacctgccggtgggaactttgtctccgagtcgga

SEQ ID NO: 311244 - DNA, 50 bp, Homo sapiens
tggtgaagagttactagctcaaggtgtgcccccgagagcctgaagacacg

SEQ ID NO: 311245 - DNA, 80 bp, Homo sapiens
gaatcgtatcgtatgtccgctatccagaacctccactctttcgttaagtgggcagaccaacatccacctcagcaaaaact

SEQ ID NO: 311246 - DNA, 75 bp, Homo sapiens
aaacactttcagaggatatatcccagcaaaacaaaccgagactgcagttcgtcatgaatcatgcagtggtctcta

SEQ ID NO: 311247 - DNA, 74 bp, Homo sapiens
cgctgttgctgccgccatacgcgctctccctgtttagaattttgtagccaccttggctaatgggatgagcctcc

SEQ ID NO: 311248 - DNA, 98 bp, Homo sapiens
tccagtcagattgctcaggaccatcagaagaaggagacagttgtgaaagaggatgaaggaaggagagagagtattagggatgtatggcattgagaatg

SEQ ID NO: 311249 - DNA, 80 bp, Homo sapiens
agctctctgaaaagaaggtggcagacccggtttgctgatcgccccagggatcaggagaaatatggctacacacacctttc

SEQ ID NO: 311250 - DNA, 75 bp, Homo sapiens
ccgccccccactccgcctccgggagaggtcatcatcagatttgaaatatttaaagtggatacaaaactatttcag

SEQ ID NO: 311251 - DNA, 98 bp, Homo sapiens
cgttctgcacaagctccttaggagaaactaacaagaggaacacggtagatctatttgtgaagtgtggatatgcaggctctaactttccagaacacatc

SEQ ID NO: 311252 - DNA, 75 bp, Homo sapiens
cgacggagcagggggccagtggggccagctcagggaggacctgcctgggtgctaaagtggaattttactacccca

SEQ ID NO: 311253 - DNA, 100 bp, Homo sapiens
ggagcaattctgaatactgtaaagaccaaagcaaatccggccatgaagactgtctacaagttcatgatgaaccaggtggaagggcagcagaagaaccttg

SEQ ID NO: 311254 - DNA, 100 bp, Homo sapiens
agttctggaacgggactttgcagaaatgtgtgcagactacatggcatctaccatagggaggccattgcccaagtctggccaggctgatgggaccagcgag

SEQ ID NO: 311255 - DNA, 100 bp, Homo sapiens
cgcaagttcaagaggttgtgtgcatcaacagtgatggatcacagaagaactgcagcttcctggggagcagtttcacctccacaggcatcgcttcatactc

SEQ ID NO: 311256 - DNA, 102 bp, Homo sapiens
aaatgaaggcatgccaatttatcgtagaccatatgaaaagggtcgcctaatcatcgaatttaagctcctggtaacgtttttatccatggatgacttgcttgg

SEQ ID NO: 311257 - DNA, 96 bp, Homo sapiens
caccaagagcagcctcacatggtgtgggccgacatcaagagctgcgagatccaacagggggtgaagccagccagttttgacaaagtagcaattcct

SEQ ID NO: 311258 - DNA, 100 bp, Homo sapiens
cgtgactataaatattcatactggagattgggtacgaaaagacgtgcttgtttggagcaatgatcgagtgattcgctggatcctgtcaattggccttaaa

SEQ ID NO: 311259 - DNA, 101 bp, Homo sapiens
gagcattcctgtgagcgagcatcctgacacggaagccgcgttgagagcggtctcagggcaccatgccggtggaaaggatgcgcatgcgcccgtggctggag

SEQ ID NO: 311260 - DNA, 73 bp, Homo sapiens
gaacttgccggtgccagctgagaaactatccaactctggccaatattgaaaggaagaagaagttaaaacttga

SEQ ID NO: 311261 - DNA, 83 bp, Homo sapiens
cgagcacagagcctcgcctttgccgatccgccgcccgtccacacccgccgccaggtctctcaggcagctgcagagcttcaaca

SEQ ID NO: 311262 - DNA, 50 bp, Homo sapiens
ttatcgaacttaccctgaaggccgagcagtctattatcctcccagtccac

SEQ ID NO: 311263 - DNA, 83 bp, Homo sapiens
aagatcagcattggacacagctgcacgttgtatgctccagaatcactgacagagagcaagttttctgtggcctcagatgtttg

SEQ ID NO: 311264 - DNA, 100 bp, Homo sapiens
caacaacgacgccgaattacatctgtccagccacctacaggcctccaggaatggctaaaaatgtttcagagtcctgtgtatggaaactcacatgagtcag

SEQ ID NO: 311265 - DNA, 118 bp, Homo sapiens
agccgcccgcttcaaccccaggggaccagaggaactcagccctgattgcgagccagagcccagaggtggagcagttagggagggttgtggaactggacagtgacatggtagatatcac

SEQ ID NO: 311266 - DNA, 100 bp, Homo sapiens
tatgatgctgatggtgatggagattttgatgtggatgatgccaaagttttattaggctgttataatggattagtttatgttctgaaaagtaatagtggag

SEQ ID NO: 311267 - DNA, 49 bp, Homo sapiens
ccaatcccaggaggaaaaacggcctcacgtgtaccagctctctgctctc

SEQ ID NO: 311268 - DNA, 75 bp, Homo sapiens
ggactatggcatctatgttatcaaccaggatcttaagtaccaggcccaagataactttatgatgatggatgatgc

SEQ ID NO: 311269 - DNA, 100 bp, Homo sapiens
ggctgctgctggccatccacctgtgcctcttcaccatgttcggaatgctgctgttcgctggtgggaaggttcagagaagattcttcatgggaaatcaagt

SEQ ID NO: 311270 - DNA, 77 bp, Homo sapiens
cccacctatgggccgaggagcaccccctccagacctaacccagaccatctccccccgccgggctacgatgacatgta

SEQ ID NO: 311271 - DNA, 100 bp, Homo sapiens
gaccaacgcccaaggcagccactggaagcaaaaacggaaattcctggaccccagagagatgcccaggcagcccgagaattcattctgaagatgttcgtgg

SEQ ID NO: 311272 - DNA, 74 bp, Homo sapiens
tggcttccgaggagctgtacgaggacccagatgatgtggtaccagttggccaaagaagagcctggtgttggtgc

SEQ ID NO: 311273 - DNA, 90 bp, Homo sapiens
cccatctgatgaatacaaagacaacctgcaccagcagtaagccgaaaggatgaagagttagaccccatggaccctagctcatactcagac

SEQ ID NO: 311274 - DNA, 97 bp, Homo sapiens
ctccttccatctggatgtcaaagtattctaccttgtaaatactgttatttgtatatactgtaaatgatgacatcggtgggcactaaccgagcccggg

SEQ ID NO: 311275 - DNA, 100 bp, Homo sapiens
tccctcacatccgatgcaccctttttgtcagattatcaggatgagggctctctaggaaacaccagaattatcagtgaagaatatattaaatggctcacgg

SEQ ID NO: 311276 - DNA, 75 bp, Homo sapiens
ggcttcctggacaccaaccctgccatccgggagcagacggtcaagaatgatctctgcctttcacaaagaccacct

SEQ ID NO: 311277 - DNA, 73 bp, Homo sapiens
ccagtgcagaagcagacccgtgccggccagcgcaccaggttcaagggctccgaccaggccatcatcacgctcc

SEQ ID NO: 311278 - DNA, 50 bp, Homo sapiens
aacaggattcagaaatcatggaaagcagtactatactggcaattgctgga

SEQ ID NO: 311279 - DNA, 100 bp, Homo sapiens
caatcctggagccccccagtgaggatttttcggacgccgcccgatactacattccctgagcccacctgcctgtcagcatcacccccaaatgcgccaccaa

SEQ ID NO: 311280 - DNA, 50 bp, Homo sapiens
gcacaattcagtagattcaccctgtcctctccacccggatcctggccatg

SEQ ID NO: 311281 - DNA, 50 bp, Homo sapiens
attggaccctcctcccaactgtaggactgaagcgggtcacgggcgggttt

SEQ ID NO: 311282 - DNA, 90 bp, Homo sapiens
gattatcaagcgttttgagcagaaaggattccgccttgttggtctgaaattcatgcaagttcaagaacatgaagactcgggtgactcaga

SEQ ID NO: 311283 - DNA, 98 bp, Homo sapiens
atcaaatctgtgtgggaatcgagcatatggaaaatctctgatgttctcaaatagtgatgaagctgtaatcaataaaaaacttcccaaagaactcctgt

SEQ ID NO: 311284 - DNA, 97 bp, Homo sapiens
gttctctatcgaacaaaagtagagataccatgtttgtgtggaagtgccccgtgtttgctatgccgatgctgtcctagtggaaacaactccactgtaa

SEQ ID NO: 311285 - DNA, 100 bp, Homo sapiens
ctgacagtggagacactggcattggaacttcctgttctgatagcgtggaagatcacacgcgctgcaacgtgtggattctggatggagacttgtaccacaa

SEQ ID NO: 311286 - DNA, 100 bp, Homo sapiens
tgtgaggtgctgaagaaaaaagtagggcttctcaaggagacagctctggctctggctattgctcaggagctgggtagtaaggtccccttctgcccaatgg

SEQ ID NO: 311287 - DNA, 83 bp, Homo sapiens
cgggctttctgctgccgcccgcaagcagaggtctgccctacttgagagaatgcctgtcatggaaaaagtgaccacaaatggcc

SEQ ID NO: 311288 - DNA, 90 bp, Homo sapiens
tggacggcgcggccacggagaagggcgcgagacctttggccagagcaagacataaaagattcttttcaacaagtgatactgagaagacat

SEQ ID NO: 311289 - DNA, 100 bp, Homo sapiens
cagacagcatatttgagtcatttccttcgtacccacagtgcttcatgagagggcagtcagggcgacagcaagaatgccaagaagaagaacaacaagaaaa

SEQ ID NO: 311290 - DNA, 75 bp, Homo sapiens
tctgatgaaaattctcttcattctcttggactgaacttaaatactgataggatgtacagttacccagcacgtgta

SEQ ID NO: 311291 - DNA, 100 bp, Homo sapiens
gtgcctcgagcgctcaggatggaggaagactcgatccgcctgcctgcgcacctgcagtgaagttcccagaccctacgccccgctgtcaggcagcccgccg

SEQ ID NO: 311292 - DNA, 98 bp, Homo sapiens
ctgggtggtgttcaagctcagcagcgctccgcgcctgcacgagcagcgcgtgcgggacatccagaagcagagtgcagcagctgccccgagccccgtgc

SEQ ID NO: 311293 - DNA, 100 bp, Homo sapiens
ctcctgaggagtttgacgaggtgtctcggatagtgggctctgtagaattcgacagtatgaaaccagcctggacaccaagtctgtgtcagaaggccacctc

SEQ ID NO: 311294 - DNA, 76 bp, Homo sapiens
tgaagttgggttcaggagtgtagaattggcaaagttattgccagcttcctgacgaaatctcacaaaactgtccctt

SEQ ID NO: 311295 - DNA, 83 bp, Homo sapiens
ggccgaagcctcaaggccacaaatcctggttttgacttcagtggagcagaaatctcaggaaactacactaaaggtggaccaga

SEQ ID NO: 311296 - DNA, 75 bp, Homo sapiens
tcgacgtcgtgatccagaagtccagagctgaggactgcctgtttgcagagttgcatgctgagaatttgaaaaatg

SEQ ID NO: 311297 - DNA, 100 bp, Homo sapiens
cggggagccccagagcacttctgcttccagaacctcggaggcggggaacatcatcttcagcgggctatttcagcacagcaggtgtatggcgagaagaggg

SEQ ID NO: 311298 - DNA, 100 bp, Homo sapiens
ggctgctgttgtccaacagaacgacctagtatttgaatttgctagtaacgtcatggaggatgaacgacaggtaactataactacccaatattgcagccat

SEQ ID NO: 311299 - DNA, 97 bp, Homo sapiens
tatcacttttacaccagaatatcccttcaagcctccaaaggcagagatcctacaagaatccaggatgatgatcccagattgccagcgcaggttggaa

SEQ ID NO: 311300 - DNA, 83 bp, Homo sapiens
cattcacctgacttctgcagaacaaaacagttgcctagaagtgatatttgggtcctgaaggcctggggtgagcaacatgcgga

SEQ ID NO: 311301 - DNA, 75 bp, Homo sapiens
cggcagccggcacctgacggcgtgaccgacccgagccgggggatatgagactttctactcggaatatcctgagtg

SEQ ID NO: 311302 - DNA, 100 bp, Homo sapiens
catggtcacccaggagagtgacagcagctttctggtcaagggtttcaaagacaacctccacgctgtgttctgcttggctgagaactcggtggggcccaat

SEQ ID NO: 311303 - DNA, 75 bp, Homo sapiens
gaacttgaacaatgaggtcatgatgaagctgaccacagtggccgagaagtcgcgcgtgctgcagctggaggagga

SEQ ID NO: 311304 - DNA, 83 bp, Homo sapiens
ggccaagaagatcatcattaaggacggaggcacgagacaagaggagcagcagcggcaccgcccctcaccctggagggtcctgt

SEQ ID NO: 311305 - DNA, 75 bp, Homo sapiens
gcgcctgttacattctctatctgcgcaccttggagtccaagcttgtgctctttgttcctgagagtggagatctgg

SEQ ID NO: 311306 - DNA, 74 bp, Homo sapiens
gtgggaatcggtgctcaccaacacagctggctgccttagtggttggaataaaaacagggttgaatgagttccag

SEQ ID NO: 311307 - DNA, 75 bp, Homo sapiens
caaatatggaggggctggttcagcacagagtggggacccagcaggtggctgagggtatttgaagtataccataca

SEQ ID NO: 311308 - DNA, 75 bp, Homo sapiens
ggctgaggcggcgcggcagcggagggacggcagtctcgcgcgcaccagtatgcatgagcgggtgaaccgaacaga

SEQ ID NO: 311309 - DNA, 100 bp, Homo sapiens
gatgtttgatattgaatatttcagaaaagatccaagaccattcttcaagtttgcaaagggattaatgaaaatcaagttccatcctcagacaagaggtaaa

SEQ ID NO: 311310 - DNA, 100 bp, Homo sapiens
gcagccagtgcggagagaggctgcctcctgcagcccccatagcaggtgactgctggctgctggcagccattgcctccctcaccttgaatgaagaaatcct

SEQ ID NO: 311311 - DNA, 90 bp, Homo sapiens
gtcagctgggctgatgaaacggatgacctggaaggagatggtgccgtgagcgatgtggagatgcaggaacactatgatgagttttttgag

SEQ ID NO: 311312 - DNA, 101 bp, Homo sapiens
accatgatcttggaatcattttgctctcagtcatccttacccctaaagaaggagagtccagggatgtggtgatcctgctatctgggctgggctaatggcag

SEQ ID NO: 311313 - DNA, 98 bp, Homo sapiens
gggagacactgcgaaagcaaaccgaggagaatttatagagcggcagcacgcaaagaacaggtattactactaccaccggcagtaccgccgcgtgccag

SEQ ID NO: 311314 - DNA, 100 bp, Homo sapiens
actctatggtggaatttaacgggaagctgttagccagcatcaatagcacggcgcgggtttaagtggacgccaggtgcaccggacacaggctgtgtttaac

SEQ ID NO: 311315 - DNA, 100 bp, Homo sapiens
atgggaaaggaaaagactcatatcaacattgtcgtcattggacacgtagattcggggattaacatctgctcgtgcagctgagatcctggcgcgagatggt

SEQ ID NO: 311316 - DNA, 82 bp, Homo sapiens
gcaacttcctggagggggactggaagaccatctcgctgcctgtggaggaaccgattgtgtccacagatgaggtcatcttccc

SEQ ID NO: 311317 - DNA, 75 bp, Homo sapiens
ctggtggagcccatcagctgccacgcctggaacaaggaccgcacccgtatggacctgtctgccaatcaggacgag

SEQ ID NO: 311318 - DNA, 83 bp, Homo sapiens
tggtctacggcgcctgcaagttcctgagagccgggtgtggaatatcaaacaaatgattaagttgacacaggaacatatagagg

SEQ ID NO: 311319 - DNA, 100 bp, Homo sapiens
tgatcctctgtccctcaagctgttaacagatgtcataggaaagggctacagaactggctacccttatcgataccctgctctgagagagaagtctaaaaaa

SEQ ID NO: 311320 - DNA, 82 bp, Homo sapiens
ggacccccattcaagttcaagttcacaattggctgtcttgggacaaggtgcgcattcctggtgtgctgcagcgattgggagt

SEQ ID NO: 311321 - DNA, 50 bp, Homo sapiens
acctactggggacgtacaccttgaccaagagatggggttttgccgtgttg

SEQ ID NO: 311322 - DNA, 88 bp, Homo sapiens
gcgcggctatcccaccatcaagttcttcaggaatggagacacggcttcccccaaggaatatacagacaaggcgaccagccagctcctg

SEQ ID NO: 311323 - DNA, 100 bp, Homo sapiens
acatattaaattggctaaatttggactttatcacatgacagctcatggtgatgatgttgatttcccaataggaaatgcactcggtgatggaaagagagcc

SEQ ID NO: 311324 - DNA, 83 bp, Homo sapiens
cctgctgtgttcttcaggagaaacgtcaggggccttcctccaaggtgaagtcccgcttggcttttgggaagcccctggtggag

SEQ ID NO: 311325 - DNA, 98 bp, Homo sapiens
ggaaaggatgttggcggtccctgtgacctgtggagacacggccagatctgccctccaccaccctgaagggtcccttcccaagcccttagggaccgcag

SEQ ID NO: 311326 - DNA, 90 bp, Homo sapiens
atcagaagcatcaggattctgttacgttaatgatattgtgcttgccatccttgaattactaaagcaagaggaggaacgacgtagaagaga

SEQ ID NO: 311327 - DNA, 98 bp, Homo sapiens
ttacgcttgcataccaccaatcacaggcacgaggcggccctgaagctctacaaggctgtccatctggcccaggcaagcttccagattgaagccttcgg

SEQ ID NO: 311328 - DNA, 83 bp, Homo sapiens
cacacctttccaaaggacgcgaccataactctaaaaggtaatagcctgcagctggtgttttgagaagccctactgctgaaaac

SEQ ID NO: 311329 - DNA, 98 bp, Homo sapiens
ctggagtgccacctcctcagcagtctttctcagtgccaatgcatttatggctagcacaaagttatcattgttgggctggataatgcagggaaaactac

SEQ ID NO: 311330 - DNA, 90 bp, Homo sapiens
gcagcaaggctacggcccgcagggtgcacccacctccttctccaatcagatgtagtctggcctgccgaggaggaactgaagacgaagaac

SEQ ID NO: 311331 - DNA, 98 bp, Homo sapiens
gacgctgagcgcccagcacttggagcgtgaggaattaatgatctttaacatcagcgccaccgttctctacatcaccgccttcatcgcctgctctgcgg

SEQ ID NO: 311332 - DNA, 82 bp, Homo sapiens
ggcgcatctctggagttgatcgttactatgtgtcaaaggtgattgcatactcggaacatcgttaccgtatctttggggaaac

SEQ ID NO: 311333 - DNA, 78 bp, Homo sapiens
ccctggtcttgctcggccgatgaagtgcagaggtttttttctggtctcagccttagatccaaggacagtccaaggaag

SEQ ID NO: 311334 - DNA, 82 bp, Homo sapiens
agcgacaagccgctggcagccgcggatctcaccgccgctcaggtaatctatgccagcaattatgacaatgttagcagaccat

SEQ ID NO: 311335 - DNA, 75 bp, Homo sapiens
ggccggagcggcgccatggaggagggggcgccgcggcagattctgaggttgggaccaagaaggaactatctattt

SEQ ID NO: 311336 - DNA, 100 bp, Homo sapiens
gcctactccccgacttcttgctggagcgccgcctcacgctagccgatgccctggaaaagtgcctcaagaaaggctttggtcgatggaccttgcactcaag

SEQ ID NO: 311337 - DNA, 76 bp, Homo sapiens
catttcctctagtttctggataatgagcaggcacacaggtgctggagaatctggtaaaagcaccattgtgaagcag

SEQ ID NO: 311338 - DNA, 80 bp, Homo sapiens
acctggatcatggctgccgcgccgccgctacgggaccgcctgagctttctacaccggcaaatggagctgctcctggtgaa

SEQ ID NO: 311339 - DNA, 88 bp, Homo sapiens
cggctgcggaggaggatggactcggggagaaagaacaggccgcaggatgaaagtcctggacagacttatcacagagagagaagaaacg

SEQ ID NO: 311340 - DNA, 89 bp, Homo sapiens
gcggagagaactcagcgaggattctgagtcccaggctgtccaatcttcctggctggtccctgaaggatggaaatgctttcttggacaag

SEQ ID NO: 311341 - DNA, 97 bp, Homo sapiens
gatggagaagtatatgctacaggaggagaggttcaaattgcaatgaattaaacaaccaccatgtcgagcaaaaaggcaaagaccaagaccaccaaga

SEQ ID NO: 311342 - DNA, 100 bp, Homo sapiens
tcgctactaccccgcagttcccggacatgatcctctccgcctctcgagatgtgctggtggacggacagccatgtgaccgcgaggctgtggcggcctgcca

SEQ ID NO: 311343 - DNA, 50 bp, Homo sapiens
ggctgctcacaatttatatggccaacttgaacagctttgctgagccatca

SEQ ID NO: 311344 - DNA, 100 bp, Homo sapiens
cctgccaggcccgggctgcagccgcgtctgatcgccgagcgcgccgcgtagacctccgctcccccaggtgtatgtgctcaagaggccttatgtggatgag

SEQ ID NO: 311345 - DNA, 98 bp, Homo sapiens
tttgaagtacaccgtggtgacattgtatcattggttgctacagttgaaactccagcagcgccggacccgggaagaactggtgagccaagggatcatgc

SEQ ID NO: 311346 - DNA, 100 bp, Homo sapiens
tatggagggaggtttggcagatggagaacctgatcgaacttcgctaatggcagcattagccgctgttgggcctcctaatcctcgggcagatccagagtgc

SEQ ID NO: 311347 - DNA, 75 bp, Homo sapiens
gtctttccacctttggatccgcagaaatcgaggctcccacatcaggacgagaaggagccctcgagttaccgtggg

SEQ ID NO: 311348 - DNA, 100 bp, Homo sapiens
tgtgattaccactccagctgctgggaacgggcgagaaagaggaggaggcgagaaactcccaccgacccacagaggcattgtgtccagatctggcaccctg

SEQ ID NO: 311349 - DNA, 74 bp, Homo sapiens
tcaatttaagcctgatctaacccctagaaacaggtggcggatgaggcgttgaaggtagatgattgtgactgtca

SEQ ID NO: 311350 - DNA, 96 bp, Homo sapiens
gccagtacttgggcttgccagtggcggattacttcaagcagtggattaatctgaaaaaggttagctttatacgtctacgaatatttactgcacgta

SEQ ID NO: 311351 - DNA, 80 bp, Homo sapiens
ctccaggtggccatcaaagtgattccccggaatcgtgtgctgggctggtcccccttgaactcccccactggaaaggattc

SEQ ID NO: 311352 - DNA, 96 bp, Homo sapiens
tgataaacagggtatagcagatacatggcaagttgttggaacagtgacttgcaaggaagcaagatttccagatgtagcaaatgggtttattgagga

SEQ ID NO: 311353 - DNA, 82 bp, Homo sapiens
ccgcaactgtgacacaggagcctttgagctcatctataagcaggtattgccaatgaaaatggagggataacattcttccctg

SEQ ID NO: 311354 - DNA, 83 bp, Homo sapiens
ggacaatggtcaccgtctcttcagaatccacattcatctcaatggaaggatcctgccttaagtcaacttatttgtttttgccg

SEQ ID NO: 311355 - DNA, 75 bp, Homo sapiens
tgagtagtattactgcctgcatacttcttcagcagactctcctgctaccgttgactcagaaacaataacactaaa

SEQ ID NO: 311356 - DNA, 83 bp, Homo sapiens
ggaggtttgtggcagccctgcatggagcaagtctgtcagcaccatctttctaacagtaactaggatttctacctcaaccgcga

SEQ ID NO: 311357 - DNA, 100 bp, Homo sapiens
ggggcggctccttcctcgtcatccccctggagcaggctgaagccgacgtagcttctctgaacagacgcatccagctggttgaggaagagttggatcgtgc

SEQ ID NO: 311358 - DNA, 100 bp, Homo sapiens
tgatccaccggcctcggcctcccaaagtgctgggattataggcgtgagccaccgtgcctggctgaagcggagtttaagagagctgtgaaagtagcaacag

SEQ ID NO: 311359 - DNA, 74 bp, Homo sapiens
ttttattgaaagatgtattgagtacattgaagccacagatgccatggacaatattaccaggcagaaccaattct

SEQ ID NO: 311360 - DNA, 100 bp, Homo sapiens
cgagtgtgaagtgggctgggtgctggacgagggcgcctgtgtgggtcacaccgacaaatctgaagcgggtttgccaggggagtgtacccgtctccccagc

SEQ ID NO: 311361 - DNA, 87 bp, Homo sapiens
atctgcaagacaaagaagttggagatggaactacttcagtgactattgcagatatcatccgaacatgtttgggacccaagtccatga

SEQ ID NO: 311362 - DNA, 50 bp, Homo sapiens
gtccagcccaggaaaatggagagataaacattgacgatcttgaggatgac

SEQ ID NO: 311363 - DNA, 83 bp, Homo sapiens
gacgaagttcaccaggacacatacaggcaggaactgtggctgcaccatctgtcttcatcttcccgccatctgatgagcagttg

SEQ ID NO: 311364 - DNA, 100 bp, Homo sapiens
gcccaagctactggtgccagaacacagagacagcagcccagtgcaatgtgtggacactgccagcggctgcagccgacttggaatgacctgggagacaaat

SEQ ID NO: 311365 - DNA, 100 bp, Homo sapiens
aggctctactatgctatgaaaggtgctggcacagatgactccaccctggtccggattgtggtcactcgaagtgagaaacctctgcgccatgagagccaag

SEQ ID NO: 311366 - DNA, 100 bp, Homo sapiens
atttggtatactgggcacaatccatctggtggcagggtgtatgtacaaagacttttgaagaggtgtgggagcacacatgatttaaaggaaaacaaagacc

SEQ ID NO: 311367 - DNA, 75 bp, Homo sapiens
caaactccctggtctctgttggtgtagaagccaaaatcaggaaaaatgaggaagctgtgagtaccagtggaagga

SEQ ID NO: 311368 - DNA, 100 bp, Homo sapiens
aggggcccatgttttccctcagcagtcggatgggggaggactgctttatggacttgcatcaggagtagcaaccaaaccaaacaggaagcttacttttctc

SEQ ID NO: 311369 - DNA, 75 bp, Homo sapiens
gaagaagatgaagaaacccagcttgatattgttgaacctgatgatttggaaacagaaattctacaagagccaagt

SEQ ID NO: 311370 - DNA, 100 bp, Homo sapiens
gctggctgcagggacccggtgacagcgtgagagacctagaggatcaagacataatgggagcatttttagacaagccaaagatggaaaagcataatgccca

SEQ ID NO: 311371 - DNA, 75 bp, Homo sapiens
ccgcggcggcagcagcagtgagaggctgaagctcagggccctgtctgctctgtggactcaacagtttgtggcaag

SEQ ID NO: 311372 - DNA, 100 bp, Homo sapiens
atgcctggaccctgcccagcagaatttgtatagagatgtgatgttggagaactacagaaacctggtctccctaggtcaccagcaccctcggaacccagag

SEQ ID NO: 311373 - DNA, 89 bp, Homo sapiens
gccaaccttcccgccagactacggcttccccgaacgcaaggagcgcggtcaccttccgcaaccctgtcattgagaggattcctcggctc

SEQ ID NO: 311374 - DNA, 82 bp, Homo sapiens
ctctggctctggctgtgcgcgctggcgctgagcctgcagccggccctgccgtaagactttgaccccgacgcaggcttcagtg

SEQ ID NO: 311375 - DNA, 90 bp, Homo sapiens
acaaccaattttctggattggactgatcagttcagtttgctgtgtgtttgctcaaacagataacagtcttcactcctatgctgatttttc

SEQ ID NO: 311376 - DNA, 82 bp, Homo sapiens
ttcctaccactatgggtgtggttgctgggatcttagtacaaaacgtgttaaagattattgcatcgagcttttagtgtcttct

SEQ ID NO: 311377 - DNA, 83 bp, Homo sapiens
gtcccggcctccgtaatgagagcccggaaccactctttgtgccgcagcttcgcaggttctgggtccctccgagcaaaatttga

SEQ ID NO: 311378 - DNA, 80 bp, Homo sapiens
aactacccattttcttttttggaactcatgagacacacgaatgcagagtttgagtccagatcccaaagcccagtacacaa

SEQ ID NO: 311379 - DNA, 100 bp, Homo sapiens
ccctgggtcgcttggaagaagccaaggtcgacgtgttgatgcccaatgttggtgagattgtgggaggctcaatgcgtatctttgatagtgaagaaatact

SEQ ID NO: 311380 - DNA, 100 bp, Homo sapiens
atgttaaatgttgatacaaacacattagaatcaccatttagtgacttgaacaacctaccaagtgatgtgccgtgcaaggttataaacgcaaaagatgttg

SEQ ID NO: 311381 - DNA, 75 bp, Homo sapiens
cctacatcccacagagatacccagacaacaggatcgtctcgtccaaggttaaagatcgaggtccggaagccacta

SEQ ID NO: 311382 - DNA, 100 bp, Homo sapiens
ccgcagcagagacgacgcctgcagcaaggagaccaggaaggggtgagacaaggaagagggtcgtaagagtgaggctgaaaagctcttcttgaaggctatt

SEQ ID NO: 311383 - DNA, 98 bp, Homo sapiens
tagagatatagttggcaacctcactgagttagaatcagagttacagccaagttctacttctgaatctatggatcaactactaaacaaaaatagagagg

SEQ ID NO: 311384 - DNA, 134 bp, Homo sapiens
ctcctttacacacagacaactatgatagcacaaacatgccattgatgcaaacgcagcaggaactcttttctggaggcaacactgggattaattttgagaaatacgatgacattccagttgaggcaacaggcaac

SEQ ID NO: 311385 - DNA, 100 bp, Homo sapiens
gtcaggtggggccggtgaagcagtgcttcgtggtgactgaaaaaggttatcaatactctggctgaccatcatcatcgtgggactgactttggtggaagtc

SEQ ID NO: 311386 - DNA, 90 bp, Homo sapiens
ctgggaagtgctacgtggacatgtcaacagtggacgctgacaccgtcactgagctggcccagcgagaattagaactgcagcgtcagcgtg

SEQ ID NO: 311387 - DNA, 100 bp, Homo sapiens
tggtgcgggagatcgtggagacagagcgcatgtacgtacaggacctgcgcagcatcgtggaggtacactgaggaggggacggctccgtcttcacattgtg

SEQ ID NO: 311388 - DNA, 90 bp, Homo sapiens
cagcaagctgttcaatgaggaggagatcatgcacgccctgaagatgacctggcacgtgcactgctttacctgtgctgcctgcaagacgcc

SEQ ID NO: 311389 - DNA, 100 bp, Homo sapiens
tggcgtgggagctgcctaggccgggccctgccagggagcaagtctgcatcgcagaggccaggactgattcttgctattccaaatcctcttccacgttgac

SEQ ID NO: 311390 - DNA, 51 bp, Homo sapiens
tgaagacttcagatctggttgtctgaagacttgcggcgtgaatttggtcgt

SEQ ID NO: 311391 - DNA, 100 bp, Homo sapiens
cggccgcagcagcagcggcagtcacaggcacatcagcaaagagtgccgcagaatggaattcggcattgttcctacacagcttctcggcaacatctctatg

SEQ ID NO: 311392 - DNA, 100 bp, Homo sapiens
ggattattggagctcctttctcaaagggacagagctggactggccattatggaggaggagctgcagcattcccattgtgtgaattgtgtcagtagacggt

SEQ ID NO: 311393 - DNA, 75 bp, Homo sapiens
atgcacaaaataagctggaaaaatctgaggctgaagaactatgccctggttattctaatcccaattacatgtact

SEQ ID NO: 311394 - DNA, 100 bp, Homo sapiens
atcgtgaaaagcctccttctggttccaaatggagaataaaggcagccccgttgatgactgaaaatgacaaagcatccacctaacagacgaggaatcagct

SEQ ID NO: 311395 - DNA, 83 bp, Homo sapiens
gggacgggtcccgcggcgagcgagctcctgagacccaacatgagtgaagtttcctgcaagaaacgggacgactatttggaatg

SEQ ID NO: 311396 - DNA, 98 bp, Homo sapiens
tgttcttgaacccgttttggagaggtgtacacctgatcagctgtatcgcatagaggaatacaatcatgattctgtccgcgtggtcttgggaaacttgg

SEQ ID NO: 311397 - DNA, 75 bp, Homo sapiens
cagaagcaaagaggctactgataaatctttacaagcttgtaaaatctcagggttatgtggtccgaatcagtggtg

SEQ ID NO: 311398 - DNA, 100 bp, Homo sapiens
aaaacctacaattgtagaggaggatgatcctgagctgtttttccagaaaggaggagtcaaggaagcccttagtgaacgagaactcttcaatgctgtttca

SEQ ID NO: 311399 - DNA, 98 bp, Homo sapiens
caaaatgtccctaaaattgccaaggaactgggatttcaacctgaaagtggaggctgcgaaaataggaagaacccgtggaaattcagtgacccagatgg

SEQ ID NO: 311400 - DNA, 82 bp, Homo sapiens
cagaaagcaggcgaacccgcggcgcaataacgatggcgattttgctgacagctgccaagaaaatgcttcactcaacagtcct

SEQ ID NO: 311401 - DNA, 100 bp, Homo sapiens
gtgagagtccgtaaggagcagcttccaggatcctgagatccggagcagccggggtcggagcggagctttcagcagaggccaaggcagcattgcttgaatt

SEQ ID NO: 311402 - DNA, 100 bp, Homo sapiens
gacgagcgggccctggctcaggaacagggacagcacctcatcccctggatgggggaccacaagatcctcatcgacagactgtgccctgtccacggtgcct

SEQ ID NO: 311403 - DNA, 115 bp, Homo sapiens
gaataaaactgaccatagccagagaacagccctccatcttgcagcccagaagcctggacagtttttgacggtgcagtcttgctatatggtgtgagaaatggctgtaggaaacaac

SEQ ID NO: 311404 - DNA, 100 bp, Homo sapiens
gaggttctgaagactgccctcatccacgatggcctagcacgtggaattcgcgaagctgccaaagccttagacaactaccagagattcactgactgctata

SEQ ID NO: 311405 - DNA, 94 bp, Homo sapiens
cgaacttttgacacggctttggaaacgacgtcatgtgttaggcaaatgttctgaaaaagactctgcatgggaatggcctgccttacgatgacag

SEQ ID NO: 311406 - DNA, 88 bp, Homo sapiens
ctggaggtccccgaggatatcagggcagccctggaggcttactgcaagaagtatgagcagctcaagacaggacagctggagcccctgc

SEQ ID NO: 311407 - DNA, 75 bp, Homo sapiens
tggtgggccagtacagcaccggcaagaccaccttcatcagatcaccgaagtggccttggagtacaacaactgtca

SEQ ID NO: 311408 - DNA, 75 bp, Homo sapiens
cgggctaccaaccgtggctacaggtcctcagaatggttggaatgaccctccagctttgaacagagtacccaaaaa

SEQ ID NO: 311409 - DNA, 74 bp, Homo sapiens
gagcctgcagcctgccccgcggccaacatgagcttcttgttttctccaaggagaagtacatcctggactcatcg

SEQ ID NO: 311410 - DNA, 75 bp, Homo sapiens
cggacggctgcgtcgcccgaggcgaggaggagcgctggcggaatcaagaacccagtctcggttgccaacagactc

SEQ ID NO: 311411 - DNA, 75 bp, Homo sapiens
agataaagtgttttggttttgatatggattatacccttgctgatggctatcgtgttcaaccaggagggcctgaac

SEQ ID NO: 311412 - DNA, 82 bp, Homo sapiens
gcttcttgaatttctctctgtaaaggaggaggaggaagccaagaatctggtgagcgaagccatcgcagctggcatcttcaac

SEQ ID NO: 311413 - DNA, 75 bp, Homo sapiens
caggacccgcctggctgcgagatatttatggctgcagcttcgattgccaatattgtaaaaagttctcttggtcca

SEQ ID NO: 311414 - DNA, 90 bp, Homo sapiens
agtccctctgacacatccaacttcgacgtggatgacgacgtgctgagaaacacgggtcaaagaaggctcttccaagaaacatgtagaaga

SEQ ID NO: 311415 - DNA, 100 bp, Homo sapiens
cttaaagaaggcctgcggcaaagagatgagcttattgaggctgaattctcagagttgaacctagctgcctatgtgaccgggggctgcatggtggacatgc

SEQ ID NO: 311416 - DNA, 51 bp, Homo sapiens
caatggtataagcctcattatcaagtcatccatctccagccccacctgacc

SEQ ID NO: 311417 - DNA, 98 bp, Homo sapiens
aaaagctgatgatcggaatgattacagatcaaaggtccatcatcaaaacaccaaagactcaagacacagaagatgatgagggagctcagtggaattgt

SEQ ID NO: 311418 - DNA, 74 bp, Homo sapiens
agaagactgagagtcaccacaaggccaaggcactttatgaaaatgcatgctgagaagaagcacaaatgtagtaa

SEQ ID NO: 311419 - DNA, 96 bp, Homo sapiens
cgccacccaagacagagccagaatgttcaggatgctgaacagcagttttgaggatgaccccttcttctcgagctgctaagccgcacatctcttgag

SEQ ID NO: 311420 - DNA, 101 bp, Homo sapiens
accaagaactaacacatcctggagctgcccggagttccgctcctgcgggcttagcaggaaagggtgcctaagacacgatgaggcgagtggtacgacagagc

SEQ ID NO: 311421 - DNA, 51 bp, Homo sapiens
aaagaaactagaagatgaggctgcaaggatattgtggctggagacatgagc

SEQ ID NO: 311422 - DNA, 82 bp, Homo sapiens
gacctgcatcaacctgatcaccagccaggagtacgccgtcaagacaatgcagatcttcgtgaagactctgactggtaagacc

SEQ ID NO: 311423 - DNA, 100 bp, Homo sapiens
ggaacgtggaaagcgcatacaggaccctaaacaggtgtagtattgagtcctgtttgagctattgttctctttttcctgaaaaatggcactgtcaaagagg

SEQ ID NO: 311424 - DNA, 100 bp, Homo sapiens
tgagacagatcaagatcaagaccggcgtggtgaagcggatgctccaaagtgacctgcatcagcttgacccgggaggcctccattaaactgtcacccttgc

SEQ ID NO: 311425 - DNA, 100 bp, Homo sapiens
agatcagaatctcagtccaacaaaagagtgaattactggaactgaaacggcagcagcaagagcaagaaagagccaaaatccaccagactgaacacaggag

SEQ ID NO: 311426 - DNA, 75 bp, Homo sapiens
cgaaaacggacaaaacctccaccaccggcagcatcctgaatcttaacctggatggctctgagagattcctctgcg

SEQ ID NO: 311427 - DNA, 96 bp, Homo sapiens
tctttaatgtgaccacactccagaaggagctgtatgactttgctaaggaaaatataatggatgatgatgaggctgaccggttccctgatgtgttac

SEQ ID NO: 311428 - DNA, 100 bp, Homo sapiens
ccgtggcatccgaggagctgtggtccagcctgcgcggcgggaagcggcggcggcggctccagcgtcctaagagccaaaccaaacaggaagcttacttttc

SEQ ID NO: 311429 - DNA, 82 bp, Homo sapiens
caagaagatcatcattaaggacggaggcacgcgtgaagcctctgcgggccttcttttcgtcttatttgaagtcattgccgga

SEQ ID NO: 311430 - DNA, 100 bp, Homo sapiens
acgtggatgatgaagaatttgaagagctgattgaaaacaccacagggatggcgagaagtatttgttgacattgatccacaggtttctgataaactgaggt

SEQ ID NO: 311431 - DNA, 50 bp, Homo sapiens
ggagattctcagggcaacccagatcttattgcctaagtgtaatcttgaac

SEQ ID NO: 311432 - DNA, 82 bp, Homo sapiens
ctctgctttatgctgtacatggaaatcatgtgaaatgtgtaaagatgctcttagtgaagcctgcctacagttttcacaaatc

SEQ ID NO: 311433 - DNA, 82 bp, Homo sapiens
gcggcgcccccgccgctgccgccgcgacccttggcgcctgcccctgcaacgggagggtggcccagttgaaatccttcccttc

SEQ ID NO: 311434 - DNA, 100 bp, Homo sapiens
caggacctgagcaggaacctggagttttcaggtttgatttcctctgcatgcctgtcttccatccgcgtttcaagagggagttcattcaggaacctgctaa

SEQ ID NO: 311435 - DNA, 88 bp, Homo sapiens
aatgtctccatcgtatcatcagtccaaaggggatcccactgctaaaaaggtggtgaagaaggtgaagtccatgcagatgttccacatg

SEQ ID NO: 311436 - DNA, 101 bp, Homo sapiens
agccccacctgacctctacttccaggactcggggctctcacgctttctgctcaagtcctgtcctcttctgaccaaagaatgctgtcttcgcaggtgccatg

SEQ ID NO: 311437 - DNA, 95 bp, Homo sapiens
gcctcagttggaagcagccgatccagcctgcggagcctgtggggcagcactgccagtgaaagatgtagaagataaacctgaacaacaaaccagaa

SEQ ID NO: 311438 - DNA, 82 bp, Homo sapiens
acgaagttccggcgcatcctccacaccgacaccatctggaggaggcgttgccgtgaggatggtggagccagggcaagattta

SEQ ID NO: 311439 - DNA, 83 bp, Homo sapiens
ctggtgtcgccatgggccgccgccccgcccgttggtcatcatcagatttgaaatatttaaagtggatacaaaactatttcagc

SEQ ID NO: 311440 - DNA, 90 bp, Homo sapiens
ctacttacctccagcagcaaacagcacacagtctttcctgcgaaaggatcaagggataaaccatggtagcacaggcggagtgcagcggag

SEQ ID NO: 311441 - DNA, 98 bp, Homo sapiens
gcagaggaaaataagaacacagtggatgtcgagaacggtgcttctatggcaggatatggctcatgagaggctagaagattccaaactagaagctgtca

SEQ ID NO: 311442 - DNA, 89 bp, Homo sapiens
tgcaactgcaaagcactgatccctacctggatgatttttattaccaggtgtgagccatgcaatgggagggagaggaggaataaacagag

SEQ ID NO: 311443 - DNA, 75 bp, Homo sapiens
gaaatgcgcagagcaaacatctttcaaagttactccacaggatccgctgaacataggatgttgccacaaaatcta

SEQ ID NO: 311444 - DNA, 100 bp, Homo sapiens
cttcagagacactgccaagcagccttagccctagtgtagagacggagtctcagtggcgtgatcctggttcactgcaacctctgggccccccccaacccac

SEQ ID NO: 311445 - DNA, 100 bp, Homo sapiens
aatcgcctcccgagaagaagttgaggcgctatcttattgcaggagtgaccaggacactacctcctagaagtaatgcccacagaaagcgcaagttgttcga

SEQ ID NO: 311446 - DNA, 50 bp, Homo sapiens
taatcccctcacggtgactgaatatgatactcctgctgcccagatgcctg

SEQ ID NO: 311447 - DNA, 90 bp, Homo sapiens
ctgagatcaaatggcacttcattggccacctacagaaacaaaatgtcaacaaattgatgggtcacaatccaaggtccggctcctccgcgt

SEQ ID NO: 311448 - DNA, 74 bp, Homo sapiens
atgcagatgcccctcctccaccagaggactgggaggagcatgtcaacagaaacgcttcgttaagggactcaggc

SEQ ID NO: 311449 - DNA, 112 bp, Homo sapiens
tttcaaagaatttttgatcaggatgcaaaccaagagaccgtttttgaaaacattgccaaaccagttgctgggagaactggttagatcctgctaaagaaataaagagacaact

SEQ ID NO: 311450 - DNA, 100 bp, Homo sapiens
ctcccctgcagcgactcggaagattcgaggcggcgggggacaagtcggcgccccagagcggacgaggtagtgaagctgattttagctcctcgagcagcac

SEQ ID NO: 311451 - DNA, 98 bp, Homo sapiens
ggcgcccgggagacccaggaggagcccgcaggttcctcaagccaggacctacgcacctgttgtgagtggtgttatagttctgcagggcgcacaggtgc

SEQ ID NO: 311452 - DNA, 82 bp, Homo sapiens
ctatctcgcttttcccctggccttctgtatcttcatggtgcggctcatcttcgagaggcctgacggagatggcggtcttcag

SEQ ID NO: 311453 - DNA, 90 bp, Homo sapiens
tgcctgggcaaaatcggctcctacctcagtgctagcggggcgacggactcagagaaaagggttcagcatctgactctggagaacgaggcc

SEQ ID NO: 311454 - DNA, 75 bp, Homo sapiens
ggctttgcatcggaaatcagctctacagttcaggtcgtttatacgcaatgcagactggaatgaagatcgatagta

SEQ ID NO: 311455 - DNA, 83 bp, Homo sapiens
gctgaacttcaccttttggctttcttggcctgatgctgaactctcgaggctctttcaccatgcctggatcacttcctttgaat

SEQ ID NO: 311456 - DNA, 75 bp, Homo sapiens
ccagagcggggccgtggaccgcgtgttgcaagtgggtgttggggatgtcctttgcactgaccctgaactgccaga

SEQ ID NO: 311457 - DNA, 100 bp, Homo sapiens
aatacaaagacagatgtatggctgacaagacgctcccagagtgttcaaaattacctgatgtctccccgttcaatgttgtggcctggcacgggaattatac

SEQ ID NO: 311458 - DNA, 83 bp, Homo sapiens
cacccgccgacgcctcagccgcttggggcccgcacggaccctctacttcagtggacatcttcaataaggagctactgctaatc

SEQ ID NO: 311459 - DNA, 91 bp, Homo sapiens
caagcaaacccgattctggaggctttcggcaacgccaaaacagtgaagaacgacaactcctcacgattcggcaaattcattcgcatcaact

SEQ ID NO: 311460 - DNA, 90 bp, Homo sapiens
gaacaccccgagcgaggccaaccttcaggaggaggaggggtcggcaccaggaattattatagaaagatcggctacagattacaaggcccg

SEQ ID NO: 311461 - DNA, 82 bp, Homo sapiens
catcctggttctggaatcctcagttcaaggtgccagaaccctgtggagcatcatgaactgggaagagtagctgagccccaga

SEQ ID NO: 311462 - DNA, 95 bp, Homo sapiens
attgcgtgttttgctataggaattctctgctcactgctggtgctggtgattgggtgtggcaactcagaactgagtgagcaactgtatgatgtggg

SEQ ID NO: 311463 - DNA, 100 bp, Homo sapiens
tggcgagcgcccggattggggatgagtatgcggaggacagctctgatgaggaggcctccggtgtggctgtctctgatggtgtcatcaaggtgttcaacga

SEQ ID NO: 311464 - DNA, 98 bp, Homo sapiens
tgtccttactccctctttaagattgcgtacccactgcagagtgctgaagacggggtagccacgaggaactgtggaaggtgcatcagtgaagaaatgga

SEQ ID NO: 311465 - DNA, 96 bp, Homo sapiens
gaagccggggcggagcacgcgagctatgctggcccgagataacttcttccgctgtggtgtgctgtatgaggactccctgtcctcccaggtccggac

SEQ ID NO: 311466 - DNA, 82 bp, Homo sapiens
cttcgatgttcttctaatactcctcctctaacatgtcagcgttattgtaatgcaacttacaaaacactacacagcaaaataa

SEQ ID NO: 311467 - DNA, 75 bp, Homo sapiens
cgactgaagacgatgggacccactgccctgcattcgggactgccaaaaagagcaagatcctgtccaaggaagaac

SEQ ID NO: 311468 - DNA, 101 bp, Homo sapiens
ggttatggatttttctaccatatcagagatgacagggtgactccggggggccgctggtctgccccatcaatgatacgtggatccaggccggcattgtgagc

SEQ ID NO: 311469 - DNA, 89 bp, Homo sapiens
tgcagggttttgtttatataactcaagttgtttggctaaattcttcagttcccagtgacctgacagcagaggagcgtcaagaactggag

SEQ ID NO: 311470 - DNA, 51 bp, Homo sapiens
gacgagtgctgtgactgtgttggtgttgacttcaaaatcaaaactgtagag

SEQ ID NO: 311471 - DNA, 98 bp, Homo sapiens
tacaagtccagacccaggagagcaaggcccagaaagagcaaccctggtgaccctgctctttggtctctgttgtctcgagttgttgcacagtatgctca

SEQ ID NO: 311472 - DNA, 90 bp, Homo sapiens
gccagaacagcccaagatggccgacttcgatgatcgtgtgtcggatgaggagaaggttgtgaactaaaggccgacaaagattatcacttt

SEQ ID NO: 311473 - DNA, 74 bp, Homo sapiens
tttgttaaggattccaagtaactcttatttggtcatttaggaaatcgtaaatcatgtgaagatgggactcttgg

SEQ ID NO: 311474 - DNA, 130 bp, Homo sapiens
ggagtgtctgctgatcacttggagtgctgtcccttggaacaggaggagtaagattgagcttcccatcgacggtcagtgcgcacgttgtaatcagctgaggccatgtcaggagacggagccacggagcagg

SEQ ID NO: 311475 - DNA, 100 bp, Homo sapiens
ggaacaggcatcatggactgtgcgcccaaggtctacaaggaagtcttcacgaggagcagtgagaactcagcgtcgtcgacgttctaagtctcctgtcctt

SEQ ID NO: 311476 - DNA, 97 bp, Homo sapiens
accccgcggagacccttcgagaaatctcgtctcgaccaagagctgaagctgatcgtttttccagaaaggaggagtcaaggaagcccttagtgaacga

SEQ ID NO: 311477 - DNA, 95 bp, Homo sapiens
ctcgggaggaggacctgatcaagactgatgatgtcctggatctgaaaagcgtggatacccatcaacgaagttttgatattggaattcagattggc

SEQ ID NO: 311478 - DNA, 75 bp, Homo sapiens
aaaaattcaccgtgagcctgaaccacaagctggacagccatgcgcatctgacgacaccaaaaagaagatgtacag

SEQ ID NO: 311479 - DNA, 74 bp, Homo sapiens
gcttgctcaggctcagagggacctcacccctgagcagattacacagacagaggtccagcaaggacagcagcagt

SEQ ID NO: 311480 - DNA, 50 bp, Homo sapiens
ccgattcacaaggcgtgcctcaggtaaaaagatggcctatcagaaggtcc

SEQ ID NO: 311481 - DNA, 100 bp, Homo sapiens
aataccagccactgcagatagagacatatggaccacatgttcctgagcttgagatgctaggaagacttgggtactactgagcgagtgtgcttgatccagg

SEQ ID NO: 311482 - DNA, 75 bp, Homo sapiens
attccgccgaaaaagagaagacgctttacccgactctttgggccgttatctcactgtcttgggacaaggtgcgca

SEQ ID NO: 311483 - DNA, 103 bp, Homo sapiens
gctgccgccgccgccaccgcagcaggtcacagcccctcgaggcgacagcggccccgccgcaccagagcaggtactataagatctccgtggtgctcatgtgctt

SEQ ID NO: 311484 - DNA, 90 bp, Homo sapiens
gttctactgccctctgcctgcggttgcaagaaagctcaagtagcctatggagaggatgcaaggcttccagctgatgccctcagccaggct

SEQ ID NO: 311485 - DNA, 82 bp, Homo sapiens
cgtggaagcaggactgcgccgcgtcttcctcaagggatgtctgacttccagtacttggctgtgcatacggaagcaggcggca

SEQ ID NO: 311486 - DNA, 101 bp, Homo sapiens
cagcgcgacgagggcgccgccgcggccgccccagaggccacaagaggaagctgaatgaagaggacgccgccagcgagtccagcagggagtccagcaacgag

SEQ ID NO: 311487 - DNA, 100 bp, Homo sapiens
taaagcagatgatgatgtctttgagaagaagcagaaagaacttgaggctgccagtgctgcctctgagcccaagctaagccatcatgtcctctgtaacctg

SEQ ID NO: 311488 - DNA, 100 bp, Homo sapiens
ctggaggcccagggcaacagcagtcacctgcatcaggcggggcaggccccacacttgggcagtggacagccacagcagaatctgtaccacccaggggccc

SEQ ID NO: 311489 - DNA, 75 bp, Homo sapiens
acggacgagaactggagagaactgctggaaggagactggatgatagaattgagtggacctaccctatgagacgag

SEQ ID NO: 311490 - DNA, 75 bp, Homo sapiens
gggcccgggggtggtgacagcaggtctgagggtctgggggtggtggcatctcccctaaaggaagtggtccctctg

SEQ ID NO: 311491 - DNA, 83 bp, Homo sapiens
ctcggagcgcggtccctgtattggtctcctgctcctagagtgcagagcagagcgggcggaggaccccgggcgcgggcgcggac

SEQ ID NO: 311492 - DNA, 74 bp, Homo sapiens
tcgtgaaggattcgggcgcctgcttcagtgccatcgacgagtacaagccccaggatgctaccaccaacccgtcc

SEQ ID NO: 311493 - DNA, 100 bp, Homo sapiens
agcgatgatgaggacattgacccctgtgagccgagctcagtttcttgcagaacataaattattaggaaacattaaaaatgtggccaagacagctaacaag

SEQ ID NO: 311494 - DNA, 80 bp, Homo sapiens
ggcggcgttgaggcgggatccgggcgagccgagtgaagctcatggctgacgccgtggccaccttcctgcagctggctgac

SEQ ID NO: 311495 - DNA, 100 bp, Homo sapiens
attgtggtgctggaaggggccagtctggagacagtcaaggtttggtgcacctcgatttggaggaagtagggcagggcccttatctggaaagaagtttgga

SEQ ID NO: 311496 - DNA, 50 bp, Homo sapiens
gaaacaaggcgccttggagttcagggtttccaggcctgaggtgcccgccc

SEQ ID NO: 311497 - DNA, 101 bp, Homo sapiens
tcctgctcctgtgctggggcccaggtgaatgcccaggcccttaccagtgccttctctccacacaccaagccttggattggtctggcagaagctctggggac

SEQ ID NO: 311498 - DNA, 100 bp, Homo sapiens
ggcggggcagaccgctggggactgcgggcggcgctgtgtccgtcgccatgacaggttaatgttgaagaaggaaaatgcggaagtcgtcatttgacaagtt

SEQ ID NO: 311499 - DNA, 75 bp, Homo sapiens
atccacctgatcttagaagcactaggagggctgtacagtggtgaggtgttggtgtgggacctgagccgtcttgag

SEQ ID NO: 311500 - DNA, 90 bp, Homo sapiens
gatcgtcaaaaagagaaccaagaaattcatccggcaccagtcagaccgatatgtcaaaatcaagcatttcagagaaaagctgccttcgta

SEQ ID NO: 311501 - DNA, 100 bp, Homo sapiens
tgaaggacaagcgcgggacccgctatgagagatggcagatcctgaggtagttgtgagtagctgcagctctcatgaagaggaaaatcgctgcaattttaac

SEQ ID NO: 311502 - DNA, 95 bp, Homo sapiens
ttgtctctgctgggcctgtgtgcctggaaaggaattgttttggcctaggatcatccaggatgaggaagagtccttgaatgaagtagggtatgatg

SEQ ID NO: 311503 - DNA, 90 bp, Homo sapiens
cgctctggctgtgctgcgcggcccccgcgcatgattttatcatgtgggcaacctgctgcaactggttctgcctggatggacagcctgagg

SEQ ID NO: 311504 - DNA, 73 bp, Homo sapiens
gtgcatctggctgttagaagaattcatgctcatccgggccggatcacctcaacagtcacgtcagacaagtgca

SEQ ID NO: 311505 - DNA, 83 bp, Homo sapiens
ggaaaacaacttcgagggcagagacaaacagaggatgtgcagatgctcctgcgctttggggcagatcccactttgctggatcg

SEQ ID NO: 311506 - DNA, 82 bp, Homo sapiens
gaaattccagcgctgcttcatcttccagtgctgataattatggcattagccatcctgggggtgctcaaaggatttaaaggag

SEQ ID NO: 311507 - DNA, 83 bp, Homo sapiens
cgggaaatctccaagtcagaaagctcccgattctcctgaaggggacgtccgatgatgatgtcccgtgtccgggctacctgttt

SEQ ID NO: 311508 - DNA, 100 bp, Homo sapiens
caggagacacagtatagcttctgacagtggagacactggcattggaacttcctgttctgatagcgtggaagtgcttttttaggaccaaaggatatatttc

SEQ ID NO: 311509 - DNA, 50 bp, Homo sapiens
ttcactctaggaggaacaaatacagttgctctatatgcaatcagtgctgt

SEQ ID NO: 311510 - DNA, 82 bp, Homo sapiens
catcctgtcacaggccatgctctggcaaaaacaaaaggttaagaagttcttacaagagttctaccaggatgatgaactcggg

SEQ ID NO: 311511 - DNA, 98 bp, Homo sapiens
ccacgcgtcctactacaaagatgctctgcggtttttgggctgtgttgacatcaaggatctaccagatcctgcagctccaccaaagaaaccgcctcgcc

SEQ ID NO: 311512 - DNA, 83 bp, Homo sapiens
cttggagtttgagcatcagagggcccctagggtctcggtggcccagttgaaatccttcccttcctctaccttggaagtgccta

SEQ ID NO: 311513 - DNA, 100 bp, Homo sapiens
gccattagcacctacgccgcctacatcgggggctacgtccactacggggactggctgaagtggaaatttaatggagccaccatttcagaaccaaaagaaa

SEQ ID NO: 311514 - DNA, 90 bp, Homo sapiens
ggaagagttgtggcgaggcagatcctgccccgtggccgcggccgtctcgtagctctagccggcccggtccttggactgaaagaatgcacc

SEQ ID NO: 311515 - DNA, 75 bp, Homo sapiens
ccctgaagagggaagacacgcggaaacaggtatcttattgacagccggtggttcaagcagtggaagaagtatgtg

SEQ ID NO: 311516 - DNA, 100 bp, Homo sapiens
cttggaaaaccagatccagaaactggaggagtcccgctcgaagctagattgttaaaggaaatgggctggcaggaagacagtgaaaatgatgaaacatgtg

SEQ ID NO: 311517 - DNA, 135 bp, Homo sapiens
gtagcaagaaggaaatgtctaaaagagatggcaaggagaaaaaagacagaggagtgacgagggcaaagattgaaaatgtgcagaaaacaggtttcatcaaaggaccaatgttcaaaggtgttgcttctagtcgat

SEQ ID NO: 311518 - DNA, 83 bp, Homo sapiens
aaccaacccactttctcggcgccgcggctcttttctaaaagtgaaggaactgcaggagctgcagaatctttacaaacagaaca

SEQ ID NO: 311519 - DNA, 51 bp, Homo sapiens
cggttaagtatgcggcgccaggagctaatgtcatacccaggctatccccca

SEQ ID NO: 311520 - DNA, 50 bp, Homo sapiens
gaggttacgcagcaaaccatccagaagctatacacagaatgggattttac

SEQ ID NO: 311521 - DNA, 75 bp, Homo sapiens
tgacctgtaaatcatcctttagctgcaggtggagctggagcaagaataccaagacaaattcaaaagactgcccct

SEQ ID NO: 311522 - DNA, 98 bp, Homo sapiens
catcttcccatcatggccgccgcctgtgcgcctctgctgagtcggctgaagctgccctcgaggacctggtctccaccattcgagtctgaagattctca

SEQ ID NO: 311523 - DNA, 100 bp, Homo sapiens
gtgggaggctctaggctccaagacgccgtcgcttgaggcgcatattaaatttcctattgactacccctattcaccacctaccttcagattcttgaccaaa

SEQ ID NO: 311524 - DNA, 75 bp, Homo sapiens
aagataagaaaatcactgtgttactggatgaagttgcagaagatgaacacgtcactgctgggaagcatcggcatg

SEQ ID NO: 311525 - DNA, 100 bp, Homo sapiens
ggccgatatggaacccaagcagtggcgaagggaatcgcaaggctcttccctgaccattttctactgtccctgcgcgaggagcccagcagccggggccgcc

SEQ ID NO: 311526 - DNA, 98 bp, Homo sapiens
ggggaagctggtaggcacgggcggctccgcagtgaccggactcgggggagtcaccaggagactaaagtccatcaaaaacatccagaaaattaccaagt

SEQ ID NO: 311527 - DNA, 97 bp, Homo sapiens
gaaagtacttcagggagtcaacggtgaggctgctgccttggttcacatttatcttgatggctctgtgctggtcactcacggtggaattgaaatgggg

SEQ ID NO: 311528 - DNA, 156 bp, Homo sapiens
agacagaagaactaagaaagcaagaggaatgtttattcttccttaaaggaacagaaggccgggaaagggcctttaaacaaacgctagccctaattaaaccagatgcaatatcaaaggctggagaaataattgaaataataaacaaagctggattta

SEQ ID NO: 311529 - DNA, 75 bp, Homo sapiens
accaagtcctctccatctgatcccatgaccacctccagagctaatcagacccactccttgccagttgtggtgatc

SEQ ID NO: 311530 - DNA, 83 bp, Homo sapiens
aaaagtttgaacctgagtattcccagatcaagtttgcattgagactccttgcattccgccagatacacaaagttctaggcatg

SEQ ID NO: 311531 - DNA, 82 bp, Homo sapiens
caggagcccggcaccccccgccgacaaggagggtgacttaagagattaaaattaatttggttgctgttggttctgaacaaat

SEQ ID NO: 311532 - DNA, 100 bp, Homo sapiens
gaaagcggcttatcgaacagagccgggagttcaagaagaacactccagaggccggacgcggtggttcatgcctgtaatcccagcactgtgggaggccgag

SEQ ID NO: 311533 - DNA, 90 bp, Homo sapiens
tgtccaagttgtaaacctggatccagcagcagaacacttcaactactccgtgatggctgcttttcatgcaacacccaacacttataagcg

SEQ ID NO: 311534 - DNA, 100 bp, Homo sapiens
gtttgaaagtgcgattgtggaagctgctcgggtggacccaagtggagagattgtggaactggcgaaaggtgcatgtccctggaaggagcatctctaccac

SEQ ID NO: 311535 - DNA, 75 bp, Homo sapiens
gacagcattcagcagatggaaaacaattggttccctccgtcctatgaagcaggtcgttgaggacttccacatgga

SEQ ID NO: 311536 - DNA, 87 bp, Homo sapiens
agaaaaattaccgagccagccagcaggaaatacagcatggccttcatcctagaataatcactgaaggatttgaagctgcaaaggaaa

SEQ ID NO: 311537 - DNA, 104 bp, Homo sapiens
gcggcgctggcggcggccctgggacccgcggaagccggcatgctggagaagctggagttcgaggacgaaggtgctgtaaaatacctggagtgctcggcgctcac

SEQ ID NO: 311538 - DNA, 82 bp, Homo sapiens
tttgacaatacaggaaatgtttaatccaaaggactgcatgacacaccataggatatagtcaagaagcctttggacatgggag

SEQ ID NO: 311539 - DNA, 98 bp, Homo sapiens
gcagcccgagggcggcgcaaggcctgaggcccagcacagggggggccctcagcctcttggccttgaacgggctgttcatcttgattcacaaacacaac

SEQ ID NO: 311540 - DNA, 82 bp, Homo sapiens
atttaaacaagagatttccacagaagggtctgggggtggtggcatctcccctaaaggaagtggtccctctgtggcaagtgat

SEQ ID NO: 311541 - DNA, 75 bp, Homo sapiens
agagagaggtggacagatctgagagatactgaggtacaatgactggtggtggaagcaaagtaatgaaaggaagaa

SEQ ID NO: 311542 - DNA, 74 bp, Homo sapiens
gggtcctttatatagaagggagagtagtggaaaccagccagtttgacggcacggtgcggatacaggactccatc

SEQ ID NO: 311543 - DNA, 75 bp, Homo sapiens
ggaatttcagaattttgaacaaatctttgagtatcaccttttgccatgatagcatttctttcattggacagttcc

SEQ ID NO: 311544 - DNA, 75 bp, Homo sapiens
ccagctcgccctaaacttcgcctggtccaacttcaggtggagacagattactgtctgctgctggctctgccctgt

SEQ ID NO: 311545 - DNA, 75 bp, Homo sapiens
gttgtgttcctggcttccctctggatgctgacagaaacaagggtgccatcgcctgcaggattctttattcagctc

SEQ ID NO: 311546 - DNA, 100 bp, Homo sapiens
ccggacactacgctggtgaagcggcctgtggagccccaggctggggccgagcctagcacagatgctttggagtctgcaatgaagaatggcctgtggggtc

SEQ ID NO: 311547 - DNA, 49 bp, Homo sapiens
gcggaggagagctcaagctaaggagaccaagacacattccaccccagtg

SEQ ID NO: 311548 - DNA, 100 bp, Homo sapiens
cggcacggcagccaccatggcgctcctgctgtgcttcgtgctcctgtgcggagtagtggtggaaggagcctgggagaggccaggcctccccggactgcta

SEQ ID NO: 311549 - DNA, 100 bp, Homo sapiens
aagtcttacaccactcccaagaagaataagcacaagagaaagaaggttaagctggctgtcctgaaatattataaggtggaattgcggagtgcagtggagc

SEQ ID NO: 311550 - DNA, 100 bp, Homo sapiens
tcgtgctggcggcggcggcggcggcggcggcggcgctgctcccgggggcgacggggcaagttaaagtcttcagagccctgtatacgtttgaacccagaac

SEQ ID NO: 311551 - DNA, 83 bp, Homo sapiens
cctgtgggcacagacaaggagctcagtgacctcctggacttcagcatggtgagtggcatcaaggcgctgtacgagtcggagct

SEQ ID NO: 311552 - DNA, 98 bp, Homo sapiens
aggggtgcagatcccggaatgcctgaaccaactgttttgaggattactacagcatcccatttcccacacccactactccgctgactgggagggatggt

SEQ ID NO: 311553 - DNA, 75 bp, Homo sapiens
acagtgccctgagggccttcgagagctaccgcgccagacagcaaattgtggctactaatttgccccctgaagatc

SEQ ID NO: 311554 - DNA, 98 bp, Homo sapiens
ttccgtccgagaaattctcgcagagcttacaggctccacaattactgctgagatccagggggtgattgatgcctgtgtcaagctgactggcatgccag

SEQ ID NO: 311555 - DNA, 98 bp, Homo sapiens
tcatgaggaactttcagaagggccaggtgacccgagacggcttcaagttggtgttggtattaggagatctgcacatcccacaccggtgcaacagtttg

SEQ ID NO: 311556 - DNA, 75 bp, Homo sapiens
gaggagccccttggggccagcacccaggttgtcccaccagatccaggatgccagaaaccatgtgagccaagccat

SEQ ID NO: 311557 - DNA, 100 bp, Homo sapiens
ggaagatggaaggaaggagcgcagcggcgtgcaatggaattgagttttgccctggtaaatgggaataatatccgaggcatgatgaaagaattactttatt

SEQ ID NO: 311558 - DNA, 90 bp, Homo sapiens
ccggctgctgaggcgcattgtggagctggagaaggtgagcctcacgtggatggggagcctggagatttacggttccgaatcaaagttgtc

SEQ ID NO: 311559 - DNA, 77 bp, Homo sapiens
tgctcccggagaccatgaccaagagcaaagatggcttcctagggcattaccgctacattggcaagaccatggattac

SEQ ID NO: 311560 - DNA, 51 bp, Homo sapiens
ccttttccacagggaattgagttgcaagcttgggcaacagatgatgtagct

SEQ ID NO: 311561 - DNA, 90 bp, Homo sapiens
gcaagatatctcagtgttctccgctctcataggtcagcttacaaaacactacacagcaaaataatgatctgctagactgctaacccgagc

SEQ ID NO: 311562 - DNA, 98 bp, Homo sapiens
caaagcggtggccaccccccgtcccgagagcatcattgtcgccagtatcacggcccgcaagccgctgccaaggaatcagtaacatgatagccaagctt

SEQ ID NO: 311563 - DNA, 98 bp, Homo sapiens
gtttcctgagttgaagggaattattttcatgcagacagcttgtcaagctgtgcagcatcaaagaggcaggagaattgctggaatccacaaataccaaa

SEQ ID NO: 311564 - DNA, 83 bp, Homo sapiens
cacagaccgggtggaaatgggacaaatggcctccatgttcttcaataaaggaatccccacatcgtcctcaacattgacctggc

SEQ ID NO: 311565 - DNA, 115 bp, Homo sapiens
cagtgtgtgaagctgggacgccagccatgttccagaccgcttggcgccagtagcgtttccattccccaaacctgctctgatctcccacctggagagaggggaagcaccatggggc

SEQ ID NO: 311566 - DNA, 95 bp, Homo sapiens
gcaggtgtggcaggttgcagaggacagtgtcctcatcaccgggggcatcgtggccacagctgggcgcttcacccagtggtactttggtgcctact

SEQ ID NO: 311567 - DNA, 72 bp, Homo sapiens
tgcatgcagcttttggcgcagacattcccgtttgtagatgacaatgagggccatgatccaaaggaaccagag

SEQ ID NO: 311568 - DNA, 98 bp, Homo sapiens
acagataaatcatcctgagctacacatggtactcagtaatctagctgcagttttgatgcacagagatccagacatttaatgtggatgcaccatgccag

SEQ ID NO: 311569 - DNA, 100 bp, Homo sapiens
tgaggagctggcattggagcaagccaagaaagaatccgaagatcagaaacgagctgttgcgcagccattggtacctgtattggggaaacatagcatacaa

SEQ ID NO: 311570 - DNA, 88 bp, Homo sapiens
cgccccctcctcgtcgggaagaatcgtttggtctcctgccgtgcccggaagaagtaagtctaacttgggctggacacctctacatctg

SEQ ID NO: 311571 - DNA, 101 bp, Homo sapiens
tcccggccctggcgtggagcagagggacacaggttcccacgctggcgcccggcgaccgggtggggctgcggtacatgtcccttgctgtgtgtgaacttgac

SEQ ID NO: 311572 - DNA, 100 bp, Homo sapiens
ctggcctgttcaccagagatctcccacctcagtgtgggttccatcttacttgtcacttccgatgaagttaaattccgtcaagatttaatgaatattgcgg

SEQ ID NO: 311573 - DNA, 100 bp, Homo sapiens
attggatttgccgaagattaggaagaatccactgatagaaatcatttccatcaataccggttcagggcgacagctcagtgaagtcttcattcagttacct

SEQ ID NO: 311574 - DNA, 100 bp, Homo sapiens
gccaaatgcacagccaagcctagcagctcgggcaaggatggtggaggcgagaacactgaggaggtgcagcggaactgctgcctgacgctctgcaacttca

SEQ ID NO: 311575 - DNA, 100 bp, Homo sapiens
gaacatctcgctgtcggtgaagaagccatgcctttcttggacatccagaaaaggttcggccttaacatagatcgatggttgacaatccagagtggtgaac

SEQ ID NO: 311576 - DNA, 90 bp, Homo sapiens
cttagtacaaaacgtgttaaaattgaagaattggaggagaaacttaatgatgcacttcaccagaagcagctactaacattgagattagac

SEQ ID NO: 311577 - DNA, 75 bp, Homo sapiens
aataagaacacagtggatgtcgagaacggtgcttctatggcaggatatggaatatattattcgagtgcaaagagg

SEQ ID NO: 311578 - DNA, 83 bp, Homo sapiens
gatgattacgataaaaagaaactagtgaaggcgtttaagaaagtgcaggagaacccggggaggaggcccaggctctgctggag

SEQ ID NO: 311579 - DNA, 100 bp, Homo sapiens
gtcgcctctgtgctcgtgagtgcatggggtataagagccccccaagatgaacccagtggtggagccactgtcctggatgctgggcacctggctgtcggac

SEQ ID NO: 311580 - DNA, 98 bp, Homo sapiens
gtgtgtgcgtgagagaagaccagtctttcctctagatcatatctgaagatattagtgagctacaaaagaatcaaactacatctgtagccaaaattgca

SEQ ID NO: 311581 - DNA, 74 bp, Homo sapiens
tttttaaacttaggtatttaagtactgaaagcacaacattctgaaattttttggttattgtaatgatgttgatc

SEQ ID NO: 311582 - DNA, 90 bp, Homo sapiens
ccaagtgcgcgccctggcgggtccggaccaaggtgctgctacccccgtatgatgatgccactgtgaatggtgctgccaaggagccaccgc

SEQ ID NO: 311583 - DNA, 80 bp, Homo sapiens
atggatgggaatggatcaaagctgtgatcacagcgtccgtctccaagagagtatgaagagagtgcgtctgtagggcaggg

SEQ ID NO: 311584 - DNA, 97 bp, Homo sapiens
acggtggacaagaagatggtggagaagtgctggaagctcatggacaaggcattgaacctggccacatcccaggtaccgtgaacatccccttcacaga

SEQ ID NO: 311585 - DNA, 95 bp, Homo sapiens
gtccatatgaccccagaagggatctcttcagggtggaatacgtcattgtggacagtttgcggttgtgaagaaatgccgtgagaaaagcaccggcc

SEQ ID NO: 311586 - DNA, 74 bp, Homo sapiens
caggcatacatttggcagaataaatgaaccaggctgagcggaaggaggagaaaaaggcggctgcccctgctcct

SEQ ID NO: 311587 - DNA, 82 bp, Homo sapiens
ggaggaccttggagtccagcactctgcatgtgactccccgcagcctggacaggaagaggatcacctagcccgggtagaagag

SEQ ID NO: 311588 - DNA, 100 bp, Homo sapiens
ttctgagaacagcagcagcagcagtgatggtggcagcaacaaggagggaaaaaagagcaggtggaaaaggaaagaccacccgttagccgagcagctcccc

SEQ ID NO: 311589 - DNA, 75 bp, Homo sapiens
cgcgggggctgtggctccgggactgcggaagacgtattttagcagatgaagcactcaagctgggcattctagata

SEQ ID NO: 311590 - DNA, 97 bp, Homo sapiens
tcgccgagccgcaggagagacacgctgggccgaccccagagcggcgctggacaggttagaaccatcagagagccttgaggaaaaccagcggaacctc

SEQ ID NO: 311591 - DNA, 97 bp, Homo sapiens
acctgcggccagatagccagttacccgctggccctggtccggacccgcatgcaggcacaaggtttcgagacaaggagtggatcaggccagataagta

SEQ ID NO: 311592 - DNA, 100 bp, Homo sapiens
aggatgcagagagaaaggagagcaagaggtggaaacatacagaagaagcaaggaaattacagttagaggtcacaactgcccgaagccagttctaaatttt

SEQ ID NO: 311593 - DNA, 75 bp, Homo sapiens
cagaagaaaccagccgaacttcagggtttccaccgttcgttcaagttccttccctggctgccggaggagacccca

SEQ ID NO: 311594 - DNA, 100 bp, Homo sapiens
cttcgacagctacacaaatctggaacgggtggccgattactgcgagaacaactacatacagacattcacggcatggtgtaactcccacctccggaaggcg

SEQ ID NO: 311595 - DNA, 75 bp, Homo sapiens
cccattaggcagactctcccggaggtggagaagatagacaatgaggtccttatggctgcctttcaaagaaagaag

SEQ ID NO: 311596 - DNA, 50 bp, Homo sapiens
gaatgacatccgagcgaaagagaaagaggctaccacatactgttgattgt

SEQ ID NO: 311597 - DNA, 101 bp, Homo sapiens
ggagggggataaagatcccccgccgccggcccatgaggatattgccgtgaaagacatggctccttactatgaagccttgtgcaaatccctcgactggcaga

SEQ ID NO: 311598 - DNA, 75 bp, Homo sapiens
taaaaacaagactggggctgctcccatcattgatgtggtgcgatcgtgagttggactatggatcaggtactgtgc

SEQ ID NO: 311599 - DNA, 100 bp, Homo sapiens
cttagcccagctccagtgggcgggtggcaggctaaccggcctcctgcaaagctcaacctgctaacctgccaggtgaagaccaaccctgaggagaagaagt

SEQ ID NO: 311600 - DNA, 100 bp, Homo sapiens
cgagccggagaccgagcccgaacagcaggtgcgtgagcatctgctccctggccttcagcatggacggcatgttcctctccgcctccagcaacactgagac

SEQ ID NO: 311601 - DNA, 83 bp, Homo sapiens
ccccactctttccgccctaatggaggtctccagtttaggaaggtgggagtcaatcattttgacaagtctcctgaaaggaacag

SEQ ID NO: 311602 - DNA, 83 bp, Homo sapiens
gcataccagaggtactacagtttacagtctgactactggaagaagtctggcaagttgatgagcagatagatcactacaaggaa

SEQ ID NO: 311603 - DNA, 138 bp, Homo sapiens
ctcggagcgcatgcagctgctgctgaccctggccttcaaccccgagccgctggtgctacagggccgttgctccagggagaactgcaaatatcttcatccacccccacatttaaaaacgcagttggagataaatggacg

SEQ ID NO: 311604 - DNA, 120 bp, Homo sapiens
ccccaagaatcctcatgctcctactatccatttcaactacagatactttgaagtagaagaagctgatggtatattgaagcaagtcaaagattacattaaacagtgtagcaaatgccagga

SEQ ID NO: 311605 - DNA, 75 bp, Homo sapiens
gtgctgaggtggcacctgtggcacaggatttaataagaaggcagtaactgacacacatgaaaatggagacctggg

SEQ ID NO: 311606 - DNA, 100 bp, Homo sapiens
ggaaagcgacggaaggcggacggcgaggacgcgggcgcagctcccggtggcagcatctttgcccccaaggagggctcctccgtgcacggcctgcccagcc

SEQ ID NO: 311607 - DNA, 100 bp, Homo sapiens
gcccgcccgccagccatgagctccacgcagttcaacaagggcccctcgtacgggctgtcggccgaggtcaagaaccgggaagaagtctggaagaagagga

SEQ ID NO: 311608 - DNA, 75 bp, Homo sapiens
atcatgctgcgcggccttcccatcaccatcacagagagcgatctgtcttgtcgacggtctcactgatgcctcttc

SEQ ID NO: 311609 - DNA, 75 bp, Homo sapiens
gacagtcctcgtcagcactgactttcagctatggaatcgagcgccgccctgtgctgggctgccgggagctcgtct

SEQ ID NO: 311610 - DNA, 50 bp, Homo sapiens
gtgcatcaaaggtgtgaacacagttgtgctgcatggaaacaacctgttag

SEQ ID NO: 311611 - DNA, 100 bp, Homo sapiens
gtgtgcagctccctaatgatgatgctcagtttgatgcgtcacactacgacagtgagaaaggagctgcattaatactacattgtcaaagacaaagacgaac

SEQ ID NO: 311612 - DNA, 100 bp, Homo sapiens
ggagagacgccggccgtggacatcggggcagctgacctcgcccacgcccagcagcagcagcaacaggactcagcccaggagagtgttattactcgagata

SEQ ID NO: 311613 - DNA, 50 bp, Homo sapiens
ctgactcctgcttcccgggtgttgctcgtctattgacctgaaaagtggtt

SEQ ID NO: 311614 - DNA, 101 bp, Homo sapiens
catggaagaacttcacaatcaagaaatgcagaaacgtaaagaaatgcaattgaggtttggaaagcagagtggagaacaaagagttgattccaatgcaacaa

SEQ ID NO: 311615 - DNA, 101 bp, Homo sapiens
aactgacgaaattgaaacaaaatgtaaaattaaagaattcacaagaaaccattccaaatagtggatctgcatttactgctcaaccacatctaatttgatgt

SEQ ID NO: 311616 - DNA, 75 bp, Homo sapiens
gctactcgggacgctgcacctcccgcgccgcacggtggacgagaaaactttagaaactgttcctttggagaggaa

SEQ ID NO: 311617 - DNA, 73 bp, Homo sapiens
ccagatacacctgaagagaaaataagggagtactttggtggttttggtgaggaatgggtaccacagaccatgt

SEQ ID NO: 311618 - DNA, 75 bp, Homo sapiens
gagcttcaggggaaatggcttcagcgcagtatattactgcaggcttcagggatgacttcttagggggcaggggag

SEQ ID NO: 311619 - DNA, 98 bp, Homo sapiens
acttctatatctacaagggggtccgcaagggattcgcaacagttcttgctgaagcagttacatccctggatctgcctgtggccattattaatctaaaa

SEQ ID NO: 311620 - DNA, 100 bp, Homo sapiens
tgggcaccttgcgcttcttgcagtcgacaggggcaagtgtccgagtggtgaatcagctacttacagagatggatggtctggaagcacgccagcaggtttt

SEQ ID NO: 311621 - DNA, 100 bp, Homo sapiens
gcggaggcggaggcagaggtggaggcgctttgaaaggtccacaaaaggtggctccgattcctccctttctgagccagggccaggtcggtccggccgcggc

SEQ ID NO: 311622 - DNA, 104 bp, Homo sapiens
gaggcggcgccgctgcctgccgaggtgcgggagagcctggctgagctggagctggagctgtcggaagaaatgcactcggtgatggaaagagagccactattctg

SEQ ID NO: 311623 - DNA, 73 bp, Homo sapiens
ccaccagcacttcacctgcaccatctggaggcatggaaaagaccttgccagagcctgtgggcacccaagtcag

SEQ ID NO: 311624 - DNA, 75 bp, Homo sapiens
gggacgccggcgccgccgcggagagggcaccggtgcaagagaagcctgagccagtgccgctggagagccgctcct

SEQ ID NO: 311625 - DNA, 75 bp, Homo sapiens
ccagagcgaagactgcctatatttaaatatatatgtcccgactgaggatgcatcaacaacagcaacttgtgattg

SEQ ID NO: 311626 - DNA, 101 bp, Homo sapiens
gctaccgctcaggtgctgcaggcacagcccgagaaaccgcagcactacacgacttgaagaactaattaatctgactagactaaatgtatcttataaccaca

SEQ ID NO: 311627 - DNA, 90 bp, Homo sapiens
gtaccgggggtgacagctccgggaccggccgaaaggcgaggaaccgggcctgggtcccttgtgagggtcgctgatggcagaacagaagcc

SEQ ID NO: 311628 - DNA, 74 bp, Homo sapiens
gaagtctgggatgtagtagacaaaggcgatcagtgggtgaccgcggctgcgagggactttgtcatccgtcctcc

SEQ ID NO: 311629 - DNA, 50 bp, Homo sapiens
tgtcgggacaccccggaagctgggaaatgtttggaaattttagcattcag

SEQ ID NO: 311630 - DNA, 90 bp, Homo sapiens
gattggtctatgaaacatcagttcttgatcctgatgagaccccaccaacaactgaacgctttggtcaggctgctacaatggaaggaattg

SEQ ID NO: 311631 - DNA, 75 bp, Homo sapiens
aaacgagccaaacttcgtgaaattgaggtagaggggaagagattgaactttgctgacctttgatgtgaggcgctc

SEQ ID NO: 311632 - DNA, 101 bp, Homo sapiens
tgcaaagtggctcagggcaaaaagctgaaacttctctggaagaaagagaagttcagagaattccaattttggcagtggatatcaaagtattgcagagtgcc

SEQ ID NO: 311633 - DNA, 126 bp, Homo sapiens
ggtggatgcggccaactccaatgggcctttccagcccgtggtccttctccatattcgaggtatggaacgccgtggactccgggcactgcctgcagacctactccctgcacacagaggcagtgcggg

SEQ ID NO: 311634 - DNA, 83 bp, Homo sapiens
aagactatgtagtattgatgaaaagagggactgccataacattcccaaagattaaagagtctattgttggggaaatcagacgg

SEQ ID NO: 311635 - DNA, 100 bp, Homo sapiens
agcaagcttcttggtacattcacaaatacgtacaggtcaccacgtacttgaactggctggttcggatgtcatctgaaatggaaaccaacatcgtggccgt

SEQ ID NO: 311636 - DNA, 103 bp, Homo sapiens
tggaatattgagaaggctgaggaactcagcaaccagctagctactcgagaggctgtgcgtgttacaaaacccaaaatcccagaagccataagaagaaattttg

SEQ ID NO: 311637 - DNA, 75 bp, Homo sapiens
gcctttcttcgtagcacctttgctgtattcacacaccttccttggatgattcaacagccacacaaagcagcaaca

SEQ ID NO: 311638 - DNA, 100 bp, Homo sapiens
gcagagtggaccaccccatgaacctcggtctccaggaaacctagagaaaaaccgttatggggatgtaccctgcctggaccaaactagagtgaagctaaca

SEQ ID NO: 311639 - DNA, 90 bp, Homo sapiens
tccagcctgcgccaccacgtcacgcacacgctcggcgctgcgatccgcgcatataacgcagaagatggctgtgccacccacgtatgccga

SEQ ID NO: 311640 - DNA, 82 bp, Homo sapiens
ctggagtccccggcaggcacagctcggccgtcgatcacctccgggcacaggatgcgagacttgccttcaaggtgtgcaagta

SEQ ID NO: 311641 - DNA, 75 bp, Homo sapiens
gaacagttggatcttgctcagtctctgtcagaggaagatcccttggatccagtgctgcctccttgtaccctgtgc

SEQ ID NO: 311642 - DNA, 100 bp, Homo sapiens
cattcattctccaagggtcagtctggtgtttggaattagcaagaaatcctttggacccaagactgctgacttcaggtggaggcgctgcagggccaccgtg

SEQ ID NO: 311643 - DNA, 100 bp, Homo sapiens
aagagattggactgggagggcaacgagcacaacaggagctacgaggagttgactactgttttccaaagtgaagttgcagtcactctgccgaggcccggac

SEQ ID NO: 311644 - DNA, 75 bp, Homo sapiens
tggaatcctcaaaatgctgtggctcttcttccagagaatgacacaggtgaaagatggcccactgcgtgaccttgg

SEQ ID NO: 311645 - DNA, 75 bp, Homo sapiens
catgggccctggcggtggacgagcaggaagctgcggctgagtcgatggacgtgcacattactccggggacccatg

SEQ ID NO: 311646 - DNA, 75 bp, Homo sapiens
atcgggactactatagcagatcatacagataattgtatggaagagatacagtgattttaagaaactacacaaaga

SEQ ID NO: 311647 - DNA, 90 bp, Homo sapiens
ggacgttggggcggcctggctccctcaggtccaggtgcaggtacagcagtctccgcaacaggtctcggctcagctctccccacaactcac

SEQ ID NO: 311648 - DNA, 78 bp, Homo sapiens
ccggatccagcatctctccaccatcgactacgtggaggacggagttaaagttcctcgtaattttcgcttgttggaaga

SEQ ID NO: 311649 - DNA, 75 bp, Homo sapiens
gtgataacctgtctcaaaaccctcctcatcatctactccttcgtcttctggttggaaaatggatataccttattt

SEQ ID NO: 311650 - DNA, 98 bp, Homo sapiens
ttaatgaagaaaagaaaggaatccgtaaagacccatttctctatgaggtctgggaggggctgaacgtggtgaagacaggccgagtgatgcttggggag

SEQ ID NO: 311651 - DNA, 90 bp, Homo sapiens
ctgctggggacctgtttgacatcatccctccccagagtctcgctctgtcgcacagtctggagtgcaatggcgtgatctcggcccactaaa

SEQ ID NO: 311652 - DNA, 100 bp, Homo sapiens
aggccatcaggggccttgataacacagagtttcaaggacaatgaaaagcgaaccccattgcacgccgcagcttaccttggagatgcagaaatcattgaac

SEQ ID NO: 311653 - DNA, 75 bp, Homo sapiens
ctgcccgccaggccccgtgatggggcccctgagccagacaatgcagatcttcgtgaagactctgactggtaagac

SEQ ID NO: 311654 - DNA, 98 bp, Homo sapiens
cagcagcgaatgttctttctctttgaccaccagctcatctactgtaagaagactggggcagcacctactccgtgtcagtggtggagaccgactacgac

SEQ ID NO: 311655 - DNA, 90 bp, Homo sapiens
tcagaaatggatatggatttataaatcgtaattctacaataatgcgtttttcttctgggagaggagaatgtgcatttttgacctcaacaa

SEQ ID NO: 311656 - DNA, 100 bp, Homo sapiens
gaggatttgcttttgtaacttttgatgatcatgatacagttgataaaattgttggcggccttctgatctgtttaccacgtgagcaagcagctcggttctg

SEQ ID NO: 311657 - DNA, 90 bp, Homo sapiens
gttgttctaacgctgcctttgctttaaaacagtattacttgcgtgccggtggtggtgtgcacattgagccccggtatagacagttccccc

SEQ ID NO: 311658 - DNA, 90 bp, Homo sapiens
gtgatggatgaggtggtgctgacaatcgagcaaggaaacctggctctggtagctgaagaacatctcacagtggacgccagggtctattcc

SEQ ID NO: 311659 - DNA, 74 bp, Homo sapiens
tcaagaatgaagccgcggaccctcctgaattactggatcttcagcctttaccaatcacagctttgggatgtaaa

SEQ ID NO: 311660 - DNA, 100 bp, Homo sapiens
tcagctctcgcagtcggagaggcggctaaggaaaggtgccacagcagagacgcgaaggagaggccctagaaccccgccctgcccgcaggccatgtggccc

SEQ ID NO: 311661 - DNA, 75 bp, Homo sapiens
aaagtagagttatctgaatcgggagctacagaaggcccaaaagaagaaatatatcaagaagaagcctttgctgaa

SEQ ID NO: 311662 - DNA, 100 bp, Homo sapiens
caaggccgccaggcactgagctggagcccgcctggagagacagacacgtatcccgatggaggagaaaaggggctggtatttcaccatggcaacactctac

SEQ ID NO: 311663 - DNA, 51 bp, Homo sapiens
ccagaagcgggcggcgcgggggagatggacctttattgggcttgaggtcac

SEQ ID NO: 311664 - DNA, 100 bp, Homo sapiens
ggaccccttctttgtggtgaaaggggcgcaacctatatcctggtgatggtggatccagatgcccctagcagagcagaacccagacagagattctggagac

SEQ ID NO: 311665 - DNA, 50 bp, Homo sapiens
ctcctgacacaacaccactcactcgagctaatccaagatatggggttcca

SEQ ID NO: 311666 - DNA, 100 bp, Homo sapiens
caagaacagagggattctttgactcagaaactacaggagtcttttagtcctgctatacagctgcaccttgtacatcaagctccatgtaatgttcctcctt

SEQ ID NO: 311667 - DNA, 82 bp, Homo sapiens
aggagatgtactgtgcttggctggaaaaccccaaaagtgtacataagataccgacatgaaattgcacatgacgggcagagga

SEQ ID NO: 311668 - DNA, 100 bp, Homo sapiens
caatgaggaggagacggagcacgccaaagggcgtctgtagaggcttctggtgaaatcgcattatgcaagactggatttcctgaagatgtttacagtgcag

SEQ ID NO: 311669 - DNA, 89 bp, Homo sapiens
tcatcgttttgaagagttctgcgttttgccagtcacctctcaactgtgtgccaaaggctaattcacctaaataagattgatcctcatgc

SEQ ID NO: 311670 - DNA, 75 bp, Homo sapiens
ctggtctcctactcccagatgcatccgtgtcaaatgcgattcacacctttgtgcagtccggatctcacttggcgg

SEQ ID NO: 311671 - DNA, 83 bp, Homo sapiens
aggcaaggagctaaagcagcgtgcgttcagccctgggtcgaccgtgtgtgagaagatcatggagttgctgggacagaacgagg

SEQ ID NO: 311672 - DNA, 74 bp, Homo sapiens
agacattctcacctcctcctccgcctccaaagtcgcggattttgtgtcatgtatagagaactacagaagaagag

SEQ ID NO: 311673 - DNA, 75 bp, Homo sapiens
ctcaacagatgccactgtaagtggggagagaagctgctcagtttaattggttggggtcagataagaagaggagtg

SEQ ID NO: 311674 - DNA, 88 bp, Homo sapiens
gggatccacacagctcagaacagttggatcttgctcagtctctgtcagaggaagatcccttggactccaacctgtctgtgcacacaga

SEQ ID NO: 311675 - DNA, 79 bp, Homo sapiens
gtggttggagagctcatctggaattttgccgatttcatgactaaccagtattcatgatgttgctatcaaaagttgagaa

SEQ ID NO: 311676 - DNA, 75 bp, Homo sapiens
ggaaaaagcagtaaagccagaggaagatgaagttggagcccttgtttttgacattggatcctatactgtgagagc

SEQ ID NO: 311677 - DNA, 103 bp, Homo sapiens
ggaggaaggaacgaggcaaggagctaaagcagcgtgcgttcagccctgggaggctgggaggcggcagaatgcagccagaggagggcacaggctggctgctgga

SEQ ID NO: 311678 - DNA, 83 bp, Homo sapiens
atttgctacagcatcccacattaagtcaacggagtgatacgcgccccctgaggcacacctggaaacccagccctctgattgtc

SEQ ID NO: 311679 - DNA, 75 bp, Homo sapiens
aagcaggactgcgccgcgtcttcctcaagggccgagaactactggtggcgtggccagaacacacggacgctgtgt

SEQ ID NO: 311680 - DNA, 76 bp, Homo sapiens
agggcagaaggttgaagaacaggaggaatcagagatcattgatttcttcctgggggcctctctcaaggatgaggtt

SEQ ID NO: 311681 - DNA, 101 bp, Homo sapiens
caactttcatggagaatggctggaagttcttggctgcggggtgatggaacaacaactggtcaattcagatgatgctgtgtatctggacaatgagaaagaaa

SEQ ID NO: 311682 - DNA, 100 bp, Homo sapiens
tcttgggtgatacggcgtcttgccaccgggcctgtcagttgacctaccccttgcacacctaccctaaggaacaagttccagttccagtctaccacccaac

SEQ ID NO: 311683 - DNA, 100 bp, Homo sapiens
aaaaggccggcagaagggaggcacttgagtactatactggcaattgctggagaagattttgcaattgttgcttctgatactcgattgagtgaagggtttt

SEQ ID NO: 311684 - DNA, 90 bp, Homo sapiens
atctgcttctatttggaggctggggacctctcaaagacatggcccatgaacatggacatgagcatggacatcataaaatggaacttccag

SEQ ID NO: 311685 - DNA, 100 bp, Homo sapiens
caccgaagttctacgtggccctaacaggcacttcctcactaatatcagggcttattttgtttcaccagtgatcattaaagaatgggcagcttacaaagga

SEQ ID NO: 311686 - DNA, 75 bp, Homo sapiens
ttgaagcaacccttaatgtgcatgatggttgtatgaccagctgaactcagaagaaaaaaagaagagaaagcagcg

SEQ ID NO: 311687 - DNA, 100 bp, Homo sapiens
caactctgcagtggaccacagcattcctgaaatacatccaggaaagacatggagattctcttaaaaagatatgtgattctgttggactggcaaaacagat

SEQ ID NO: 311688 - DNA, 82 bp, Homo sapiens
atgaatcctgcggcagaagccgagttcaacatcctcctggccaccgactcctacaagacggtctggaaaatcccgaagcaga

SEQ ID NO: 311689 - DNA, 100 bp, Homo sapiens
ggccgaccgggcgcaccgaccatggcctccaaatgccccaagtgcgacaagaccgtgtacttcggttactctctggtgacccacatcccggctggtgccc

SEQ ID NO: 311690 - DNA, 75 bp, Homo sapiens
tcagccaggttctccagagataaactgttttggctgggcctacttcacctataccttctctgggaaatgtgagtg

SEQ ID NO: 311691 - DNA, 83 bp, Homo sapiens
atcatttcactgttagtttcaaaggaaacccagcgtttgctggcagaaccagttcctggcatcaaagccgaaccagatgagag

SEQ ID NO: 311692 - DNA, 83 bp, Homo sapiens
gggaaatcgtgcacatccaggctggtcagtgtggcaaccagatcggtgccaaggaaaaggggaagatagtgatgtactcagta

SEQ ID NO: 311693 - DNA, 106 bp, Homo sapiens
gagcttttaatctgaccactggaccagcccattgggagttacttcagcgaagccgatatcacacttcagtggcttattcagcattcaaaatctagaagaagctgaa

SEQ ID NO: 311694 - DNA, 74 bp, Homo sapiens
aaattgctggaataatgaccttgaatagaggaaatgggatatcatctggacccatggatgaaggaccagatctt

SEQ ID NO: 311695 - DNA, 109 bp, Homo sapiens
aaaataagtggtccatgtgttgtgtgcagctgttgtggagatgttgattttgagggtgaagttgaacaaattgctatgatgaaaccaaaaggccagactgaacacgatg

SEQ ID NO: 311696 - DNA, 90 bp, Homo sapiens
ctctaagcactgaagtcggtgtttggagaaaaggactcaggtgctttgtaccgttacatttgattcattagaatctggtattaagtcaga

SEQ ID NO: 311697 - DNA, 100 bp, Homo sapiens
agagcctgcggggcaagatctgtggacggcctgttcatcatcgggtggatgtacctgcctccccatgacccccacgtcgatgaccctatgagattcaagc

SEQ ID NO: 311698 - DNA, 50 bp, Homo sapiens
atacttcatagattcatcaaagaatcagagatcattgatttcttcctggg

SEQ ID NO: 311699 - DNA, 75 bp, Homo sapiens
ggcgggtgttgtgagcgggaagctatgccctttgccttctgtacgagagagaagcttccttggacagaatttgct

SEQ ID NO: 311700 - DNA, 74 bp, Homo sapiens
cttctgcagagagagtgcgcagaaggattccgggagcacagttccgccgaagctgtaggtaaaacttgcctact

SEQ ID NO: 311701 - DNA, 100 bp, Homo sapiens
atttacaacccccatactgtaccaggcaaggacatggatttgattgacatactttggaggcaagatatagatcttggagtaagtcgagaagtatttgact

SEQ ID NO: 311702 - DNA, 100 bp, Homo sapiens
gcaaagttgcgccggggaacttgtgagcctgcggtgaaagggatttgaaactggacaacatccttctggatgcagaaggtcactgcaagctggctgactt

SEQ ID NO: 311703 - DNA, 136 bp, Homo sapiens
tgtagtatatacctgggcaactggagctacatttgcccatatctgcaaaatgacagatgtctttgaagggaacgggtatggcaatccccgaaactcaccaggtctgctggtctcacctggtaacttgaacaagaat

SEQ ID NO: 311704 - DNA, 100 bp, Homo sapiens
aatctgccaggcggagggggctttgctggtctttcttggactattccagagagaaaccgaagctgaaagactggcatcctcctgggggctttattctggg

SEQ ID NO: 311705 - DNA, 96 bp, Homo sapiens
cctgggccacccctcctttcaggtcaaggacttcctcccagctgacatccaggctcagtttgccatcagccgggagctgatccggaacatctacaa

SEQ ID NO: 311706 - DNA, 90 bp, Homo sapiens
ctctcatgtatcatacctggaatgggatccgacacttggagctggtgactgccctcatgtgtgatttgcggcggccagcggcaggtggga

SEQ ID NO: 311707 - DNA, 100 bp, Homo sapiens
gggccctcttgataaaaagagatgtggggggattctcgacctgctaacagaactggaccttttcggcctcagctgttgaagaacgctctgcagagagcag

SEQ ID NO: 311708 - DNA, 83 bp, Homo sapiens
gccaaggttattctgggccggtaccagaaaggcctaaagaatgtatttgacgaagcaatattggctgccctggagcctccaga

SEQ ID NO: 311709 - DNA, 100 bp, Homo sapiens
aggaccaacaaattcatcaaagacgtaatcaaagacggcaacgcgcttatcagcgctatgagaaagactaaggtgtcagtatgttcttcaagctgctctg

SEQ ID NO: 311710 - DNA, 100 bp, Homo sapiens
gtggctgcaaccttagcgacatcaggaagaacagggtcgaggatcgagctatgaagtcttacactccatatttcattctcctgtggagtgctgttgggat

SEQ ID NO: 311711 - DNA, 100 bp, Homo sapiens
ggagactgcatagggagcacggtctacagcaaacactggctcttcggcgtcctcagcggactcatccagggtgttttgaatgctgtatcaaatgcctggg

SEQ ID NO: 311712 - DNA, 100 bp, Homo sapiens
cagggtccggcgagcatcacgccgaggcccattttccagacgaccacgacgaggccggggtcacgttcgtcaaaaaatgttgtatgcagcaacaagagca

SEQ ID NO: 311713 - DNA, 96 bp, Homo sapiens
catcgactgtgtcctactggagtgtgggcacatggttacctgcaccaagtgcggcaagcgcatgagagtctcaggagcaggggctgcggcagaggc

SEQ ID NO: 311714 - DNA, 100 bp, Homo sapiens
atgcataaaggcagctttgaaacagagtccttcaataatgttaaacagtggctgcaggaaatagatcgttatgccagtgaaaatgtcaacaaattgttgg

SEQ ID NO: 311715 - DNA, 82 bp, Homo sapiens
gaggcctccccagccatgtggaactattggtggtacctttgccaaaccagtgataatgccacctgaagtagccattggggcc

SEQ ID NO: 311716 - DNA, 75 bp, Homo sapiens
gaaatattggaaatgcaggaatggtgccatggatgtagctttgggatcaggtgccactggggtctttaccaattc

SEQ ID NO: 311717 - DNA, 100 bp, Homo sapiens
tcgggctgaggagccagtggaggaggcagtgctgctactgtttgaacggtcttggatgaacagatggaagtctgctgttctgcatgaaggggaagggaac

SEQ ID NO: 311718 - DNA, 87 bp, Homo sapiens
gcatattagatgaactggtaaaaagcttgaattttgcacggtaacacgtacacagacctctcggccggaatctccagggatgaccag

SEQ ID NO: 311719 - DNA, 85 bp, Homo sapiens
gaaagtggctgacatggccaccaacacacgtgactttgagaatcactacaagaaaaactccttgtggtgaaggttctaagacgtg

SEQ ID NO: 311720 - DNA, 100 bp, Homo sapiens
tcatcgatctctcagggtcgtcgggtgaaggaagactatgaccgtctgaggcctttatcttacccaatgaccgatgtcttccttatatgcttctcggtgg

SEQ ID NO: 311721 - DNA, 98 bp, Homo sapiens
gagatcatagcagagtacgatactcaggtcaaaggtactaggttttgacaagcttgcatcatgcgtgagtataagctagtcgttcttggctcaggagg

SEQ ID NO: 311722 - DNA, 50 bp, Homo sapiens
ccgggagttcaagaagaacactccagagacgcccactattgcttggttct

SEQ ID NO: 311723 - DNA, 75 bp, Homo sapiens
gttgtacttaaatgcagacacaagatgccttcaattaagttgcagagttctgatggagagatatttgaagttgat

SEQ ID NO: 311724 - DNA, 100 bp, Homo sapiens
tggagcaaggcgacgaaccttggagagaggagaacgaacatcttctggacctttgtccagtttcttcagatggaggtactgagccctctgccttagtgga

SEQ ID NO: 311725 - DNA, 74 bp, Homo sapiens
tacctcctggctgccgtgaataggcagcctaaagtggacggaaagtcccgggattctttgcgagccttcacccg

SEQ ID NO: 311726 - DNA, 105 bp, Homo sapiens
cttcaactcttttctctcgggcttcatctcttgtgtggggagtttcatcctagcggccatcactggtgcaagctatatttaacggagatcctgatgaagttcgag

SEQ ID NO: 311727 - DNA, 100 bp, Homo sapiens
ctggactgctccctggagcacgagttcaggaaggctcaggaagaggagagcagcaagcgggtgggccatgcacagacacagctcatgtctcattaatcac

SEQ ID NO: 311728 - DNA, 80 bp, Homo sapiens
gaacagaaacacctaggaagggagaactggtgagaagccctaccactgcaactgggacggctgcggctggaagtttgcgc

SEQ ID NO: 311729 - DNA, 83 bp, Homo sapiens
aacttcgccaccctgcggtggattgactacggcaaagtggccactcagccacacccactcgcccgggtctatggccacggtcg

SEQ ID NO: 311730 - DNA, 82 bp, Homo sapiens
tcggagcccggagcgtgcctcggcggcctgtcggtttctgtcctcctacaagggaaagtcatgattacactaactgagctaa

SEQ ID NO: 311731 - DNA, 120 bp, Homo sapiens
ctccgcagcagctccccagggcccacgggccagccccgccgccctcgcaacctggcagccgccgccgtggaaggctgcagttcatggagctcgtttcaaagggcaagatctaaaactggc

SEQ ID NO: 311732 - DNA, 100 bp, Homo sapiens
gggacgtgggatccccacggacctggaaattctcgcctgtcttcccttcacccagagcaaattgagacgtcccgggatcatagacggtatttctatgtaa

SEQ ID NO: 311733 - DNA, 100 bp, Homo sapiens
gccacgctgcgggcccgggccatggccgccgccgatgccgaggtacctgcaccagtcaggggccctgaccatggaggccctggaggacccttcccccgag

SEQ ID NO: 311734 - DNA, 97 bp, Homo sapiens
cgctggggactgggaaatcagggcatcggagagtgccacattaatgggtgcactttacaggtccccgatgaaccaagagaaccctccaccatatcca

SEQ ID NO: 311735 - DNA, 89 bp, Homo sapiens
tcctacatgggaaccaaagataaaagggctataacagttcaagaaattgctgttctcaagagtctcacaactcaagaaagaaacgggaa

SEQ ID NO: 311736 - DNA, 90 bp, Homo sapiens
aaagttattgccagcttcctggtacccactgatggtaatgctggcctgctggctgaaccccagattgccatgttctgtggcagactgaac

SEQ ID NO: 311737 - DNA, 100 bp, Homo sapiens
gtgaggattaaaaagagcatgaatgtcacttctaggactttatcccaaatgtacactcacacagttctggctgaccatgttctacttgtcgaagatgaca

SEQ ID NO: 311738 - DNA, 100 bp, Homo sapiens
ggccttccacaccccctccgtgggtgtgtggatgaaacaggcgcctatttaatcgacagagaccccacctactttgggcctgtgctgaactacctgagac

SEQ ID NO: 311739 - DNA, 75 bp, Homo sapiens
cagaggacgacatgttgcttttcgtggaggaagatgatccctatgatcttgaagatgtttctgcacagaaatgag

SEQ ID NO: 311740 - DNA, 100 bp, Homo sapiens
gagtccccgtacgcctacagtaacgccaaaatgaagtttaatccctttgtgacttccgaccgaagcaagaatcgcaaaaggcatttcaatgcaccttccc

SEQ ID NO: 311741 - DNA, 100 bp, Homo sapiens
cttgttttgaatacgtagtctgtcctgttctttcaaagtggatccataaagaacccagccaacccgcagagggaggggaggggctgagctgtgaggagag

SEQ ID NO: 311742 - DNA, 110 bp, Homo sapiens
aatgccctcattaaagcagccggtgtaaatgttgagcctttttggcctggcttgtttgcaaaggcctcattgctacgatttcagagtaccctggtaatagctgagcatgc

SEQ ID NO: 311743 - DNA, 73 bp, Homo sapiens
gagttaacttctgtttacatggaactcagacatctgcaaatcatggtgctcctgacctctgataaagctgcag

SEQ ID NO: 311744 - DNA, 74 bp, Homo sapiens
ctacagggaccatgggacactattacgcaacaggtacgttgaagatggagaacaactgatgtcaagacacattt

SEQ ID NO: 311745 - DNA, 100 bp, Homo sapiens
tgcttcggaccatggcttttcatgatcatcacgggggaattctaccggatctattacctgaagaagtcgcggtcgacgattcagaacccctacgtggcag

SEQ ID NO: 311746 - DNA, 125 bp, Homo sapiens
agcaggagagacagatcacagccagagaaggggccagtcggaaagacccagatgatgtggtaccagttggccaaagaagagcctggtgttggtgcatgtgctttggactagcatttatgcttgca

SEQ ID NO: 311747 - DNA, 82 bp, Homo sapiens
gcccttcacctgcagaagcgtgtcgttctgcaccagcgccttgatcgagtacttgaggtattagaaaactactcggatgctc

SEQ ID NO: 311748 - DNA, 99 bp, Homo sapiens
gggccggctgaccaggaacctgggcgagcagcggcgggggcccgaggggtgtcgtgaaaactacccctaaaagccaaaatgggaaaggaaaagactcat

SEQ ID NO: 311749 - DNA, 74 bp, Homo sapiens
atccacattctcttcagatagtaagaaagtatacgcctcttcgggtgacaaagttgttgtcacgtactccaaag

SEQ ID NO: 311750 - DNA, 50 bp, Homo sapiens
tttttattcagccagattcttgggcctgtggacatctctacagcaatgag

SEQ ID NO: 311751 - DNA, 100 bp, Homo sapiens
gtataatcggctggttcctttagtgaatggtgtcagagaattttcagaaattcagcttgctcggctaaaagtaaggagggcaaaaccccctctaaggaga

SEQ ID NO: 311752 - DNA, 90 bp, Homo sapiens
agaaattgcagccagggatattgagaaacttctgagcaacagatctaaagccctggtgctgacaatactatgaatgacactgatgttcct

SEQ ID NO: 311753 - DNA, 80 bp, Homo sapiens
ggctttcgcatttgggaccctgcaggcggagctggagtttgttcagatcatcatcatcgtggtggtgatgatggtgatgg

SEQ ID NO: 311754 - DNA, 74 bp, Homo sapiens
tcccgtgagcacaggccccgtactgcttccatcagctccagccccggggtgcatgtgagacagaccaaggaggc

SEQ ID NO: 311755 - DNA, 74 bp, Homo sapiens
gttcaaacagctgcttatttcggctgtgaaggacctgtttggggaggtgataaatatgcgtaccattagaccaa

SEQ ID NO: 311756 - DNA, 83 bp, Homo sapiens
gttttctgggagaggcaggcggaagacagtgagctgttcgagctggattattgcctcaaaggggaccagctgctgagtgcccg

SEQ ID NO: 311757 - DNA, 96 bp, Homo sapiens
ttggaccagcttgtgatctccgctttcgaagcattgtacagtgtggcaatgttgtttaatgtagaaaatggaaccccagcttcacgtgaagccttg

SEQ ID NO: 311758 - DNA, 82 bp, Homo sapiens
ttggagtgcgttcggtgtgccgtgggtccgcgctgcttccacccaacttcctgttaggtgtggacactgccagcggctgcag

SEQ ID NO: 311759 - DNA, 71 bp, Homo sapiens
cggattcgccgaggcaccgaggcactcagaggaggtggagtattgctcctggaaaatccaaaaggtgacaa

SEQ ID NO: 311760 - DNA, 50 bp, Homo sapiens
cgctctactcttgctcagcggagagttgtgaatgggagagttcacatccg

SEQ ID NO: 311761 - DNA, 51 bp, Homo sapiens
tgacggcggagaggcgccccccgcagcagggtttgccttcccggattgggc

SEQ ID NO: 311762 - DNA, 51 bp, Homo sapiens
aaatcaccagttactttaatgaggtgccttgtactgtctccttggaaatca

SEQ ID NO: 311763 - DNA, 103 bp, Homo sapiens
ctcatcgctcagctgcggcctggccaagaaattgacctgctcatgcactgtgtcaagggcattggaaatgtgcatagttgacgaacctttagaggaattcact

SEQ ID NO: 311764 - DNA, 90 bp, Homo sapiens
gcctctgcctgttcttctggaatgtcttgggggttttgatcctgtcactgtggtgcccccttgtttctctcccatcctcacttcctcaac

SEQ ID NO: 311765 - DNA, 75 bp, Homo sapiens
actggatccaaagcatgtctgcaacccagccattttcaggttctccagcatttggctcaaggccccaagggcaca

SEQ ID NO: 311766 - DNA, 100 bp, Homo sapiens
atgaggaggagggggacgagcagcagcggctcctcaacacccctcgaaggatgaccatgaaagctgtggttctaattctaccaaccgtagtactgctgag

SEQ ID NO: 311767 - DNA, 74 bp, Homo sapiens
ccgagatgacgggctttctgctgccgcccgcaagcagaggcagccagcagttagattccattcatgtaacacag

SEQ ID NO: 311768 - DNA, 80 bp, Homo sapiens
gcttcctctccagagtgatcaagtgtgacccggcgaagttcttctgtgttgtgcaggcggagctgaaccattgcaacagc

SEQ ID NO: 311769 - DNA, 83 bp, Homo sapiens
ctgccagcacctggaccttggacattcagacttcagaatgcgccaaatcttaaaggcagaccacgcaaaaagaaaccatgccc

SEQ ID NO: 311770 - DNA, 100 bp, Homo sapiens
ccttgggacagggggatttggaaatgtcatccgatggcacaatcaggccaagaataaaatctttatgaactaacaagatgaattaaagatggaatgattc

SEQ ID NO: 311771 - DNA, 100 bp, Homo sapiens
tcccgatgattccatacggaataagctcattttaattgccagaaacaaagccgagaccgacccgcccgcccgcggccccgcagcagctccaagaaggaac

SEQ ID NO: 311772 - DNA, 100 bp, Homo sapiens
cggtgcaggagtcggcggctcagttgtccatgaccctgaaggtccaggagtacccgaccctcaaggttttggctacgggcctccacctccaccgccagat

SEQ ID NO: 311773 - DNA, 100 bp, Homo sapiens
tcccaagagcagcggaaaatgatccagtcacagggactggtgacattcagggacgtggccatagagttctctctggaagaatggaagtgcctggaacctg

SEQ ID NO: 311774 - DNA, 89 bp, Homo sapiens
ccgctctgctcggccgcgggctcccggaggactgcaggtttgatcccatataatttcatctgtgtgcagacagggtccatcctgtcaac

SEQ ID NO: 311775 - DNA, 74 bp, Homo sapiens
gtggaacctggatgaatgtagagagaaagtacttcaagcttaaagcttttcaagccaggccaagaagctgtgaa

SEQ ID NO: 311776 - DNA, 89 bp, Homo sapiens
gagtgcaggaagcatataaatgactgggtggcagagaagactgaaggtggacaagagcaaggaccaagtgtggaaggtcttaatgtacc

SEQ ID NO: 311777 - DNA, 100 bp, Homo sapiens
cggagcgcggcaggacttggctggacggcgcggccacggagaagggcgcgtgccggtggtggtgtgcacattgagccccggtatagacagttcccccagc

SEQ ID NO: 311778 - DNA, 100 bp, Homo sapiens
cccagctaaagtgggttgaattgccatggctgctggaagaagtctcaaaaagctcccgactagggtttggttttcagataggagttaggtatgagaacaa

SEQ ID NO: 311779 - DNA, 100 bp, Homo sapiens
cttattttttctcatggatgttcttcttcgagtatttgtagaaggggagtctgaagatacagtattgctcgtcctcaaagagatctaccaaacccagggt

SEQ ID NO: 311780 - DNA, 115 bp, Homo sapiens
tggcccgggccggcgcgggagggctgtgtgatggcctcggagcgcccggagccggagggttcccccgagggacttggctgtgctgctgtgcaacaaatcaaatgcatttttcagc

SEQ ID NO: 311781 - DNA, 75 bp, Homo sapiens
gtcccgttgcaggtgaaatgcaaagactgtgaggagagcttcttcacaaaataattgatggcatttgtggtcgag

SEQ ID NO: 311782 - DNA, 75 bp, Homo sapiens
gtgcagagccgcctttccagcatgcaggggctgctcaggtgacttaagagattaaaattaatttggttgctgttg

SEQ ID NO: 311783 - DNA, 82 bp, Homo sapiens
acgtagtcacggtcttgtgctctaaggagcttactccacgggaacagcctctagataatctgagttgttgaaaatacgaagc

SEQ ID NO: 311784 - DNA, 100 bp, Homo sapiens
gcagcatattgtactggcctgctgctggcccgcaggacttccatggagtcactgattcatcactttaagttgtatactgagggctaccaagttcctccag

SEQ ID NO: 311785 - DNA, 75 bp, Homo sapiens
gatgcttccgaactgtgggcaaaaatggcggagctcagtctgaatattcttggagaaagatgctgagtggcattg

SEQ ID NO: 311786 - DNA, 75 bp, Homo sapiens
ctatagcagagatctggacccaagactctggactcccggctttgggctggcagggtgtccgcaatgttgccagtg

SEQ ID NO: 311787 - DNA, 100 bp, Homo sapiens
atcgtcgagaagcctatcatcgtgggcgacagatgcgaaagaaacgagttccagtgccaagacgggaaatgcatctcctacaagtgggtctgcgatggca

SEQ ID NO: 311788 - DNA, 112 bp, Homo sapiens
caggaagtgaaggagatcctcctccggaagggcgtgcagctgctgctgaccacagttccacaatggcgagtctgaggagagccacgagcagttcctgaaggcgctgcagaac

SEQ ID NO: 311789 - DNA, 100 bp, Homo sapiens
caggagggtgcctcccgccagtatctgatgaaggtaagagaaatgaagctgttgtcatttctggaaggaaactggcccagcagatcaagcaggaagtgcg

SEQ ID NO: 311790 - DNA, 82 bp, Homo sapiens
attttggctgctgcaggagccattttagacaatgcagatcttcgtgaagactctgactggtaagaccatcaccctcgaggtt

SEQ ID NO: 311791 - DNA, 90 bp, Homo sapiens
ccggaatatggagccctgggcgcgggggcggcgtgtcaggtggttgcggagctgtttccacgggctcccttgctcagcagtatgcgcacc

SEQ ID NO: 311792 - DNA, 100 bp, Homo sapiens
cggggttctggcctgggtgaaggagaaggtagtggtagcagagaattttgatgaaatagtgaataatgaaaataaagatgtgctgattgaattttatgcc

SEQ ID NO: 311793 - DNA, 90 bp, Homo sapiens
ctgcagtactcttggcccatggacctgaaggagaagcacctggttatgatgtgattgctcaagcccaatctgggactgggaaaacggcca

SEQ ID NO: 311794 - DNA, 100 bp, Homo sapiens
gtaactccacagcatgtgtcttcaagagcttccctaaaagtagagaaatggtcagaaggaacgacaccacagaagaaattagaatgtttaaaagaaccag

SEQ ID NO: 311795 - DNA, 51 bp, Homo sapiens
tcgaggagctgcggctctaccccccggagccgcattgacaggaagattgag

SEQ ID NO: 311796 - DNA, 112 bp, Homo sapiens
agctctgctctgcctgtgatgtcgagaacactgggttcgatacaagaggctgttttcctagcgtggcttgctgcctttggtaagaacatgtcgtccatcttgccattcacgc

SEQ ID NO: 311797 - DNA, 90 bp, Homo sapiens
ggttgagttccctgttgcccttggtctcggggtcgctgtaggcgctgaggctgcagatgcagacagacatgctgaactatctggaagtcc

SEQ ID NO: 311798 - DNA, 75 bp, Homo sapiens
ggacacatggcctggagttcattctttaccacattttaagccagattcccaaatgctggaaaatcctctttgcta

SEQ ID NO: 311799 - DNA, 78 bp, Homo sapiens
caccaacattcttggcattacgcaggccagcaactcccagctcaatgcaatgtctgatgatttgaagaagagaagaga

SEQ ID NO: 311800 - DNA, 100 bp, Homo sapiens
gtgaccttcgcttggtgtcctcctggcctcagcaacctgacaattctgtcgtgtcccggcactttgaggtgaatgaccggaaggacccccaagagacggc

SEQ ID NO: 311801 - DNA, 90 bp, Homo sapiens
tcatcctgcagtatggcttgaccctcagtgatctggatcgacacccagagttttcaaagaagaatggaagaaaccatgaagcttgctacg

SEQ ID NO: 311802 - DNA, 74 bp, Homo sapiens
gatgcaaagccgtggccaacgggaaggttacttcctcagaatgttggcctcctgtatgttggaggttatgaaag

SEQ ID NO: 311803 - DNA, 74 bp, Homo sapiens
cgcgcttgctgctggtaacagggccttgcctagtgggccttccttcccaggtcaaactgtgctgaaaatatccg

SEQ ID NO: 311804 - DNA, 97 bp, Homo sapiens
ccggaatctgtctcctgatcatcattcaggatctgaacgtctatgacactctttcgagctgacacagtgaagaacatagaaggagaactcacccagt

SEQ ID NO: 311805 - DNA, 74 bp, Homo sapiens
agttctgcagccagtgcggagagaggctgcctcctgcagcccccatagcaggcctggagctgctgaagactgct

SEQ ID NO: 311806 - DNA, 83 bp, Homo sapiens
ccgccgaagaagcatcgttaaagtctctcttcaccctgccgtcatgtctaagtcagagaaaatgcttggacagaagagatgag

SEQ ID NO: 311807 - DNA, 99 bp, Homo sapiens
gacgactgtgcaggaagaaaacgagccagtgatttacaatagagcaaggacagagcgggatgccaccagcttgtccaaagggaagttccaggagctcct

SEQ ID NO: 311808 - DNA, 75 bp, Homo sapiens
ctatttcaagatgatatttattcaccaaacaaggttttgattcccaccatggccatcacccagtttcggttattt

SEQ ID NO: 311809 - DNA, 100 bp, Homo sapiens
tcctgagcaggcagagagcagaagatattcacagacatgcggaatttgagatccctttcagctccctgcaaaaacagaaccaataaaagaacgagcagtt

SEQ ID NO: 311810 - DNA, 75 bp, Homo sapiens
cattagctgctgtcatcaagccctttgccaccattccttcaaatgagatctcccagctgatgacagagagtagcc

SEQ ID NO: 311811 - DNA, 82 bp, Homo sapiens
atgagcgtcccggccttcatcgacatcagtgaagaagatcagacactgccctaaccatcatggaggtggccgaggtggaaag

SEQ ID NO: 311812 - DNA, 75 bp, Homo sapiens
cgtccgggtgcacgtgccacgcacgcggtgcagaggggcaggatgccgccgacccagccgacccacgggcagttc

SEQ ID NO: 311813 - DNA, 50 bp, Homo sapiens
acaaatcccaggagcacttcacggcagcctcagtcagagcaccctgaagt

SEQ ID NO: 311814 - DNA, 130 bp, Homo sapiens
tactatcctcggtgctgtggtgcagagctagttcctctccagctcagccgcgtagctgatgttctaatcatgtcagataaagatgatattgagactccactgctaactgaagcagcccccatccttgaag

SEQ ID NO: 311815 - DNA, 80 bp, Homo sapiens
caaggtacccaccaggccgattatgtccattgttctcttggagcagctggtcatcatggaccatcagcacgtgcccatcg

SEQ ID NO: 311816 - DNA, 100 bp, Homo sapiens
atagaggatgtggatgccctcaagtcctggctggccaagttactggagccgatggaaatcctcattgacgattcaatttgttgaaggccaatttgtggac

SEQ ID NO: 311817 - DNA, 82 bp, Homo sapiens
agcatttgactagacggtatgaatttctaagtaaggttgtccgagcggaactgcattgagattgttaataaattgattgctc

SEQ ID NO: 311818 - DNA, 75 bp, Homo sapiens
aggatctcatagaccgaggatggcgaaggtaggagcattgcttttcgtggtgaaagaggcaatgatgaatctgcc

SEQ ID NO: 311819 - DNA, 98 bp, Homo sapiens
actactacacgaccatccaggacctgcgggacaagatgcgtctgttactagagtggagagtctaccttcgtctcacatgtgccacaaaggatggcatg

SEQ ID NO: 311820 - DNA, 100 bp, Homo sapiens
ggccggcttcccggaactggaagggatgaggagaatttctgtgccactgtgcccaaggatggacgttcctattccccaactctctttgcacagacagttc

SEQ ID NO: 311821 - DNA, 80 bp, Homo sapiens
ccatcttcggaccccccaacaccctctacgaaggcggctacttcaaggttatcaatactctggctgaccatcatcatcgt

SEQ ID NO: 311822 - DNA, 98 bp, Homo sapiens
tggagggctgagcagtcaactcaaatgcaagtccaagaggaggaggaggcggaggtccaagcggaaagcgaatgacaacagagctgctcaaggcggga

SEQ ID NO: 311823 - DNA, 90 bp, Homo sapiens
gccttcagtgggactcccccagcagatacattctcagttgggtgggactatatcagcatacaagatagtaccagatgaaatagaagaaat

SEQ ID NO: 311824 - DNA, 75 bp, Homo sapiens
ggggaaactaggtcgatggtcggcggcgcccggatgggcagctgagaaagcataacccctactgtagaactaaat

SEQ ID NO: 311825 - DNA, 83 bp, Homo sapiens
gtggaggagaatatatcctctaaatctgataaaaggcgacggcggattgacagaagtatgattggagagcccacaaactttgt

SEQ ID NO: 311826 - DNA, 75 bp, Homo sapiens
aaagtccttggacgagttgtctgcttgcggagaggtgtctgcggctcagaacgtgcgcatcgaccccagtagcct

SEQ ID NO: 311827 - DNA, 100 bp, Homo sapiens
gcgacggaccagcgacccaagcgccgcggttaaccacgtctcgtccacgacctccctagaaaacctcggatcaattctcagctggtggcacaacaagtgg

SEQ ID NO: 311828 - DNA, 74 bp, Homo sapiens
gaactgggtgctcctgcccgctggcccctcgcgcgtgaggatctatctcagactttgtgtggacagtaatgacc

SEQ ID NO: 311829 - DNA, 50 bp, Homo sapiens
tggtgcttcgtgtgctccaaaggaagggaaaaggccgaggcatcagcgtg

SEQ ID NO: 311830 - DNA, 75 bp, Homo sapiens
ggcctcctcagtgcgaagaagctgcagccgcacctggccaaggccttggtcatctataatttcctgagcctgtgc

SEQ ID NO: 311831 - DNA, 100 bp, Homo sapiens
cagacccagaaaattcttgctctctttgcacctgaagattcactgacaggacttcctcgttctgcccatcttcctaacaaggctatggctgataacagca

SEQ ID NO: 311832 - DNA, 100 bp, Homo sapiens
ggagagtttgctccaccaggccagtggtctggaactgaaagtgatgcgtatttctgagttatgcctgtatttaagaagctgagtgaaacccaaagaagtc

SEQ ID NO: 311833 - DNA, 101 bp, Homo sapiens
gccgtatccagcgactacgcggccgcggagacctacctgcggcgtcggcagctgctgctccgaggcggtaaccagcgtgagctcgcccgccagaagaatat

SEQ ID NO: 311834 - DNA, 101 bp, Homo sapiens
cttcagagtccttggggtgattgacaaggtttaccgacaagactgtgaaactttcgggatggtggtgaaaatgctgattgaaaaagatccttcattagaaa

SEQ ID NO: 311835 - DNA, 100 bp, Homo sapiens
caccacagatgcaaacggacgggccaacgccgtggccagctccactgagagaaccccaggctagacagcaacaagcagaattggcccaacaggaatggct

SEQ ID NO: 311836 - DNA, 82 bp, Homo sapiens
gaggaattcgccgtgcccgagaatagctccgtccagcagtggtcccaggctgcacccatggcagaaggaggagggcagaatc

SEQ ID NO: 311837 - DNA, 95 bp, Homo sapiens
gtcaagctatgtgccttattgtttacatgatggtcatggtcattggaaacctggtggtccaactggcccaccttcaacactccctctaagcaccc

SEQ ID NO: 311838 - DNA, 97 bp, Homo sapiens
cgaggagaagcgcagcgacggcgtcgggagagcgcgcctagccggctcgcgaaggtgtgctctgaacaagccgagacggggccgtgccgagcaatga

SEQ ID NO: 311839 - DNA, 96 bp, Homo sapiens
ggcctgtggactgcagcctcggcggtcagcaggtcacaagacacccacttcaggagtcctgcctcacacccacaggaaggaatcctgcacagagag

SEQ ID NO: 311840 - DNA, 74 bp, Homo sapiens
cactaaatactactctgaggggcttagaaattaacaggcacagcttgagacaagccttggaaccttctatgctc

SEQ ID NO: 311841 - DNA, 83 bp, Homo sapiens
tcatgaatttcaagagagtaccattggggagtaaagatgggaaaaccccactacacatgactgctctccacggtagattctcc

SEQ ID NO: 311842 - DNA, 75 bp, Homo sapiens
tgctaaatttgtgaatgctgtgtatgataccttacttaatactgaagcaagatttccagatgtagcaaatgggtt

SEQ ID NO: 311843 - DNA, 82 bp, Homo sapiens
gcggcctggcggcttccaggcgcactaccgcggctatgactttgcagccgtcctggagtggttcgcggagcgtgtggaccgc

SEQ ID NO: 311844 - DNA, 100 bp, Homo sapiens
gccgggctcggggcctccgcagcgacaacatggaggccgtgaagaccttcaatagcgagagtcctgtgtatggaaactcacatgagtcagctcagtctag

SEQ ID NO: 311845 - DNA, 90 bp, Homo sapiens
cacggatggaaagatggagatgaacctctaacacagtggaaaggaaccgttctggatcagcctttagtccagcagcccattttgcctgtt

SEQ ID NO: 311846 - DNA, 90 bp, Homo sapiens
gccagatagaaaacggcgagagtgggcgagaacgtccactgcgggccggcgaaagctgggggggccctcagcctcttggccttgaacggg

SEQ ID NO: 311847 - DNA, 51 bp, Homo sapiens
gccatgcacaagctgcacttcctgcacaggcactgttatgtggtatacttg

SEQ ID NO: 311848 - DNA, 82 bp, Homo sapiens
ttcacctgcagaagcgtgtcgttctgcaccagcgccttgatcgagtacttgagattggtttatcttggaagctaaagggcat

SEQ ID NO: 311849 - DNA, 90 bp, Homo sapiens
ccatgctcacccctgagccagttttaaatggcagctctcgccgtcgggattactatgacagaggatatgatcggggctatgatgatcggg

SEQ ID NO: 311850 - DNA, 76 bp, Homo sapiens
atcatgctgcactaaggggaaatcccaggaattactctcacttccaccacccgatgtatggaaactgctatacttt

SEQ ID NO: 311851 - DNA, 82 bp, Homo sapiens
cgcgcccagagccccgcgtttcagccctagggaagcaaaatgatgcttcaacacccaggccaggtctctgcctcggaagtga

SEQ ID NO: 311852 - DNA, 75 bp, Homo sapiens
ctcaagagcctcattatctaccacccgagatgccccaagggtttttaatgaccacaacaagcaagcatgcagctt

SEQ ID NO: 311853 - DNA, 100 bp, Homo sapiens
ccctcattgagattgactacggtgatctgtgtgaggatctgaagctggaggagagcaggagtgttcagaagcaaatgaagatcctgcagaagaagcaagc

SEQ ID NO: 311854 - DNA, 97 bp, Homo sapiens
gaatgagttaatctcctcagaaatcactaaatactactctgaggggcttagaaattaacaggacagttgatattcataaagagaaagttgcaagaag

SEQ ID NO: 311855 - DNA, 75 bp, Homo sapiens
agcaactatattagcaacatttgtcaattgtcttcacaatagtcttcaacaagttccgatgaagttaaattccgt

SEQ ID NO: 311856 - DNA, 75 bp, Homo sapiens
aggtgttcgagaacgaccccgagacgattctgaggttgggaccaagaaggaactatctattttaaaccaaaaatt

SEQ ID NO: 311857 - DNA, 82 bp, Homo sapiens
gaaggcggatggccacgcagccaccctggtgatgaagctgcagctgttcatccaagagatgaggtggaaagtgagaaatggt

SEQ ID NO: 311858 - DNA, 71 bp, Homo sapiens
tacatgtggttgtgctgctgcttcggggactcagccagaaagctactgagaatgccagctgatgaagaccg

SEQ ID NO: 311859 - DNA, 80 bp, Homo sapiens
agctaatggaaatggagaccttgattctggtatacaaaactaggatatgctggaaatacagaaccacagtttatcatccc

SEQ ID NO: 311860 - DNA, 100 bp, Homo sapiens
gtgctgtgtatgaagaggcagtgaagactctgccaacaggctctggagacaaaattcttgctctggcaagttttgaggttgaaaaaacaaaaaaatgaca

SEQ ID NO: 311861 - DNA, 75 bp, Homo sapiens
gagacggcggcagcagcggcattcagtgctcttaaagttccgtacagataaaggaagagatcccagttctgatac

SEQ ID NO: 311862 - DNA, 50 bp, Homo sapiens
gaggattgggcagttggtacagagatggggttttgccgtgttgcccagac

SEQ ID NO: 311863 - DNA, 90 bp, Homo sapiens
gggaggagtacgagggcaacctcctggaggcgggcctggagctggagcgggacgaggacgactgcctccgggcctgccaggagcagatcg

SEQ ID NO: 311864 - DNA, 82 bp, Homo sapiens
ccccagtgagggtgtacaaatacccctttgaattaattatggctgttttcccatcatatgattcccggtcctcctggtcccc

SEQ ID NO: 311865 - DNA, 50 bp, Homo sapiens
ggagagtccggccgcgacaggacggctatgactttgcagccgtcctggag

SEQ ID NO: 311866 - DNA, 100 bp, Homo sapiens
cgagaggtggttacattcgttgaaggacaccagctgcggaatttgcggctttggcagatccagctccaggtcccacaggggctcttcttccccacgaaaa

SEQ ID NO: 311867 - DNA, 83 bp, Homo sapiens
aaggagcctgggggaggttcgtttcggtgacaacatccgggaattcttgctgagcctcagatactttcgaatcttcatcgccc

SEQ ID NO: 311868 - DNA, 75 bp, Homo sapiens
cgaatgtgactgactagcagcttcattttgaaatctctggaaacatggctacagaacatgttaatggaaatggta

SEQ ID NO: 311869 - DNA, 101 bp, Homo sapiens
gttgttctcagctacttgggactcctctctcaagagaagctgcaagagcaacatctttcctcaccccaagttcttcgtgccatgaaggaggacagtgaaaa

SEQ ID NO: 311870 - DNA, 84 bp, Homo sapiens
atctgtcttcggtggactccttcggcagtccacccaccgccgccgcctcccagccgcggcgagtcctttgcacatgttggcaac

SEQ ID NO: 311871 - DNA, 83 bp, Homo sapiens
caccggggtatcttcagccgcctccttgacagtcttcggcaggaagattattttcgaaataccagtatttcgactccaggggg

SEQ ID NO: 311872 - DNA, 101 bp, Homo sapiens
tcgagcagatcgacaagtccgggagctgggcggccatttaccagacatccacgacagcgatggcagttccagcagcagccaccagagcctcaagagcacag

SEQ ID NO: 311873 - DNA, 100 bp, Homo sapiens
ggactacaaggtggactgcttgctcagctcagtatcaacacttatggtactatcttggtcgtcggatgtttattgttatttctgagccagacatgatcaa

SEQ ID NO: 311874 - DNA, 105 bp, Homo sapiens
gaaatgcctagaccctgcccaacagaatttatatagagatgtgatgttggagaactacagaaacctcgtctccctgggccaaaatcctgagcatgatggaagaca

SEQ ID NO: 311875 - DNA, 96 bp, Homo sapiens
ggaacagagactctttggtcaaaagatatggcgccatatcagggttacacttccaggggctccccactcagtccccagtcatctatcgacagtgag

SEQ ID NO: 311876 - DNA, 50 bp, Homo sapiens
gcctggtcctggacatcgttgaggaaaactttagaaactgttcctttgga

SEQ ID NO: 311877 - DNA, 50 bp, Homo sapiens
gtgaatgtcctcacggaacacagtgattcgcctttgccagtctcatctcg

SEQ ID NO: 311878 - DNA, 98 bp, Homo sapiens
gaaggtctcacgaggtcaacccagcagcgcatctcacaggggaaagctctggcaatttaaatgacccaaataaggaggcactggctaagacggaagtg

SEQ ID NO: 311879 - DNA, 75 bp, Homo sapiens
ctttctgtacagcctgcagaactgtgctgtccctggacaccaacatcacaaaccaggtgaataagctgaaccgag

SEQ ID NO: 311880 - DNA, 100 bp, Homo sapiens
cctgcctactgggtcgtcttctcggcgacaactgccctgctcttcatcccagagacagaagagatgggtgatgaagaagttttctcctggttgaagtgtg

SEQ ID NO: 311881 - DNA, 89 bp, Homo sapiens
tttggaagaggagcgctaagctgccggggagatgagcagcaccagcagtaagagggctccgaccacggcaacccagaggctgaagcagg

SEQ ID NO: 311882 - DNA, 75 bp, Homo sapiens
tggggatcttcgcactatcccaagtggatcaatcttcctgtcctacaactgacaaaggatcccctaaagacccct

SEQ ID NO: 311883 - DNA, 100 bp, Homo sapiens
aagatcttggacagcgtgggtatcgaggcggacgacgaccggctcaacaagctgctacaggagctgagagaccctaccctcactttccgtctgcttggct

SEQ ID NO: 311884 - DNA, 128 bp, Homo sapiens
aagtctgaaaagcccagaacttttcctctgttataagagagggagagataaaccaccgcttacagatattggggtcaaagaattgactgtagatccaactgctgctggtgatgttcgtccaataatgc

SEQ ID NO: 311885 - DNA, 83 bp, Homo sapiens
gattttggacttcatagcctctagaactgaattacatgaatgacagtcttcgaaccaatgtgtttgttcgatttcaaccagag

SEQ ID NO: 311886 - DNA, 100 bp, Homo sapiens
gccctcccggggctgtcctgggccctccggccgccgcctcccgctccagttcgcagctgggcgacaagtggctgcttagaccatgctcagcctccaagca

SEQ ID NO: 311887 - DNA, 83 bp, Homo sapiens
tcttctggcaaacagtgtttgcctctggttcagctcatacaacagcttcttagccaatggagatcttcgtggatgatgagacg

SEQ ID NO: 311888 - DNA, 87 bp, Homo sapiens
tggagccatcctctacaggacccgctttctaccattaagcctcctgacaaggtgatccgggcgggccccgcaggaattttatcccct

SEQ ID NO: 311889 - DNA, 100 bp, Homo sapiens
tcttggcaagttatggcaatgtgatcgtcatcacagtcaactatcgacttggagtactcgtatgtgccaagagttgtaacctctgcacaacagaaagcag

SEQ ID NO: 311890 - DNA, 90 bp, Homo sapiens
gtctgccttcgcttcacggcgccgagccgcggtccgagccttccggagcagtactacagcctcacctggttcctgagccccatccttggc

SEQ ID NO: 311891 - DNA, 98 bp, Homo sapiens
gagaaggggcttcctgagcgtcccagtacactgacagaggtgggtgatggcaccacctcagtgaccttgctggctgcagagtttctgaagcaggtgaa

SEQ ID NO: 311892 - DNA, 120 bp, Homo sapiens
ccactttctccttatcgcatccgagccacacagacgggtgatgccagcaagtgcctggccacggagaagctgatcgtcgaagggcatctaaccaaagcggtagaagaaacaaagctttca

SEQ ID NO: 311893 - DNA, 83 bp, Homo sapiens
aggaggcgcgggaggtgttcgagaacgaccccgagacggagcggtggtgccccccccgggcacggggccatgtacaacgggat

SEQ ID NO: 311894 - DNA, 50 bp, Homo sapiens
cggaagtgaattcggattgtttgctgattgcaacacctgctcggtatacc

SEQ ID NO: 311895 - DNA, 100 bp, Homo sapiens
agtatttaaggaccatttatttcaaaagaaaattttcgtgctctgagcactggagagaaaggatttggttataagggttcctgctttcacagaattattc

SEQ ID NO: 311896 - DNA, 88 bp, Homo sapiens
cttgaaggaatcaaacagttttatattaatgttgagagagagggcacctcaacacctttgcttcgaatagcctgggctcgaatcatat

SEQ ID NO: 311897 - DNA, 96 bp, Homo sapiens
ggaaggcaaggagccaggccacggggccacagccgcgggggccaccacactggcccaaatatttcctgcagacatcccagttaccagtgtccttga

SEQ ID NO: 311898 - DNA, 100 bp, Homo sapiens
tcgaactagccagaagcgatccctctatgtcagggggacttgatctcatcttcatgccaggccttgggtttgacaaacatggcaaccgactggggagggg

SEQ ID NO: 311899 - DNA, 100 bp, Homo sapiens
agctgctggagacactactgttattgaaaatagtgatgtttccccagaaacgtgtttgatgatggtgatgagcgaacattgagacgtacctcactttgtc

SEQ ID NO: 311900 - DNA, 75 bp, Homo sapiens
gaaagtgaaaatgttagaagaactcgtgagccggattgatggtccagcctgatgagtgaagaggctaagcgagga

SEQ ID NO: 311901 - DNA, 99 bp, Homo sapiens
aatgaagccacggactgtcgcgctcagtgctaccggagaacaaaaaaccaaacccacccaaaacagcgtccgcgcactgaggggtttaggcctgtctcc

SEQ ID NO: 311902 - DNA, 100 bp, Homo sapiens
caacaacccactcaggcacttccggaaattcagtgaacattatcactccttgtgtaaagcagtgcatcacctagcaactgttgactgcattttctccctg

SEQ ID NO: 311903 - DNA, 75 bp, Homo sapiens
aaagatgcatgctgatggcgataagtcattaccacagacctagaggatcaagacataatgggagcatttttagac

SEQ ID NO: 311904 - DNA, 101 bp, Homo sapiens
tttcctaggtgtcattacagtgatcatcataggcttatgtcttgctgcagccagaggaagagcatttggcctgtgatatcaccggatccagttcatccacc

SEQ ID NO: 311905 - DNA, 100 bp, Homo sapiens
gcaatttagaggaaaaattttcatccaaggacagatcagttgaatggatcgcagcagttaccattgctgctgggacagctgcaattggttatctagctta

SEQ ID NO: 311906 - DNA, 87 bp, Homo sapiens
atggtgctgtaaccacctcacagattccagcttcggaacaagagaccctgttttctggatatgccgcagaaggatccgtgccagaag

SEQ ID NO: 311907 - DNA, 98 bp, Homo sapiens
gctggaggtcctctctggagagaggctggtgatcgtgcagtccggccgccaccccacagtgctgcagaagctctgccagttgcccttccagtatttca

SEQ ID NO: 311908 - DNA, 100 bp, Homo sapiens
tctttcaagaggactttagactaattgcagataattaagatcacaaggtttacatctggcacaaacgtagtgaactgccaattgcggagctgacagggca

SEQ ID NO: 311909 - DNA, 96 bp, Homo sapiens
cacccggggggcatctgagaactgtgtccttccattcctgagtccagcacttcccaggccagctccgccgcatgcaagagatgattgcaaggatgc

SEQ ID NO: 311910 - DNA, 80 bp, Homo sapiens
tgcgggccctctggaccctggagtacaccccgcagcacagccgcgacttcaagcgatctgaaggtgaagagaagacatta

SEQ ID NO: 311911 - DNA, 90 bp, Homo sapiens
ggctcgcgcccgggccgccacgctctcgggctctgcctcgggttatgagagaatttacaatgaaattccggacattaatctggatgtccc

SEQ ID NO: 311912 - DNA, 50 bp, Homo sapiens
ggggccttttgacaactccaatgttgactcttttatcaaaatacaactca

SEQ ID NO: 311913 - DNA, 83 bp, Homo sapiens
atctgtcttcggtggactccttcggcagtccacccaccgccgccgcctcccagggccgccttcaacaacaacgtgagcgtggc

SEQ ID NO: 311914 - DNA, 90 bp, Homo sapiens
gttcatgtaaacagcatgacgtgaggccgtggatgcaggcattaagctatacacagaatgggattttacatatgctggacagaaataaga

SEQ ID NO: 311915 - DNA, 90 bp, Homo sapiens
tccggcctccccgggcctcccattgcagcatctgtgacaactgtgtgggagctgttatgagaagaatctgggattgcaatgtccccccaa

SEQ ID NO: 311916 - DNA, 75 bp, Homo sapiens
gggcgcgtcaggccgcgacgagggcgctgaggtacttcaaaggctcatcaagtcccgaggaaagtctcagtccaa

SEQ ID NO: 311917 - DNA, 132 bp, Homo sapiens
ttttaaatcaagatttaacattccaacacataaaaattatttatccaacagctcctcccaggaactgcaagcacatgttgaccagataactgaaatggcagcagtaatgaggaaagccattgaaattgacga

SEQ ID NO: 311918 - DNA, 95 bp, Homo sapiens
acaacagcctggcgtccgccacgggtttgtggatgcacttagatgtttgcaatgagcactgtggctggcatgccccagtgttttggataccaatg

SEQ ID NO: 311919 - DNA, 74 bp, Homo sapiens
ggccgggtgttgcgcctggcctacagcgaggctggcactttgtgagtgtgccctccagactccttatgacagct

SEQ ID NO: 311920 - DNA, 100 bp, Homo sapiens
ccctggtcgaccagagggagctgtacctgggcctgctctaccccacggaggactacaaggtccccaagcaagaactattcttatgcagtcaagtttacca

SEQ ID NO: 311921 - DNA, 73 bp, Homo sapiens
ccagactgtttgatgctgaacttcaccgttaagaaaaagtcgctggagtcgatcaactctaggctccaactcg

SEQ ID NO: 311922 - DNA, 74 bp, Homo sapiens
actctagaagggacaatggacttctggctttggccactttacttcctgccagttaaagaagtcctggctgtccc

SEQ ID NO: 311923 - DNA, 100 bp, Homo sapiens
gtctgccggctcccctacgacgttacccgcttcatgatcgagtgcgacgcctgcaaggactggttccacggcaggtgtcatggagaaactccagctgggc

SEQ ID NO: 311924 - DNA, 75 bp, Homo sapiens
cagaggatcatggcagctcctatgagttttcggctttgtgagaaaccttaccatcaaacacgatggccagcaacg

SEQ ID NO: 311925 - DNA, 74 bp, Homo sapiens
ggcaactctttgatgtactactataatgggaaagcggtgaaagaaaagatgttgtcccggttaagagtagtttc

SEQ ID NO: 311926 - DNA, 100 bp, Homo sapiens
ctcagtggagcaggatggaaaagtcaaaaccctcatggaattcattacctcaagggtcccaagcaagacagaactgcagaagggcaagcactaagtgaag

SEQ ID NO: 311927 - DNA, 90 bp, Homo sapiens
aatgaacagctaaagcaggaaaataaaactcttttgaaagttgtgggtcagctgaccagacttggattctcacttgcatttatcttcagc

SEQ ID NO: 311928 - DNA, 76 bp, Homo sapiens
tggaatcgggggaaccaaagcttcaagttcttggaacaaattcttgcctgatgttgcacatttgccacttgagaag

SEQ ID NO: 311929 - DNA, 135 bp, Homo sapiens
cctgccttctgtgatcactgcggggagatgctcttcggcctagtgcgccagggcctcaagtgcgatgatccgctttatcctcatccagaaccgggcaggcaagacgcgcctggccaagtggtacatgcagtttga

SEQ ID NO: 311930 - DNA, 126 bp, Homo sapiens
gccggatagtgctgaagaggagggggcgttccccagaccatggcatctacggaaggtggcttacagaagagacgaaatgtggtctgagggacgatatgaatatgaaagaattccgagagaacgagc

SEQ ID NO: 311931 - DNA, 100 bp, Homo sapiens
cacaatgtgatcttcaccttggattctttgttaaaaggagacctaaagggagtcaaaggaggcgccgccggcaccagaaacaggacgaagagccaagtga

SEQ ID NO: 311932 - DNA, 100 bp, Homo sapiens
cttgaagactgaaagcctgttattcaaagaggttagcagtagactgttggaagtaagaccagcatctcagacatgtcgaaaaagatgttttgatccctaa

SEQ ID NO: 311933 - DNA, 124 bp, Homo sapiens
ggaagaccgcgcgcagggcctgcagcgggagctggacggcgagcgcgagcggcgcgagaaagaggctactcacagtcgaactacaactccccggggtccggccagaactacagtggccctccca

SEQ ID NO: 311934 - DNA, 92 bp, Homo sapiens
ttcgaggaggtcatgaaggacctgagcctgacgcgggccgcgcgggattctgtttcactgaggccatctatccgatttcaaggaagccaagg

SEQ ID NO: 311935 - DNA, 100 bp, Homo sapiens
ccggaagccctgagggcagctgttcccactggctctgctgaccttgtgccttggtgcagaggccaagaccgttttgcccaagaaggagaaaatgaagctg

SEQ ID NO: 311936 - DNA, 98 bp, Homo sapiens
agagctgctcacggagaagtccgcctgtaagagccagtcagaagtccagaaagaagagatagaaaagcatcagctaatgctcgaaagaggaaacattc

SEQ ID NO: 311937 - DNA, 49 bp, Homo sapiens
atcgaactcaaggaatcttcagcaaagttttgtccatcaactaaaggca

SEQ ID NO: 311938 - DNA, 101 bp, Homo sapiens
gaagaaaaggtgtacttgcaagaaacctcaggacttgagtaacagcaacatgatggactagaggcttttaccagatttcttaaaactgaattcagtgaaga

SEQ ID NO: 311939 - DNA, 100 bp, Homo sapiens
ggaggaccatgtgaatggggccagagggctcccgggctgggcaggttgtacatcctggagacctgaagaattctgttgaagtcgcactgaacaagttgct

SEQ ID NO: 311940 - DNA, 73 bp, Homo sapiens
agaaacaggaagtggcaaaactggtggtgtgaaggagctgtgtctgctgctgcttaaccagtccctcctgctt

SEQ ID NO: 311941 - DNA, 75 bp, Homo sapiens
tcggaatcacgacccctccctgccatgtatccgcagggcagacatccggtcatcatcagatttgaaatatttaaa

SEQ ID NO: 311942 - DNA, 101 bp, Homo sapiens
cgcctggcccagcgctctgcctcttcgacgtggatgggaccctcaccgccccgcggcagagtgtgaaccggttggcaatggagacaagaaaagtaatgaaa

SEQ ID NO: 311943 - DNA, 51 bp, Homo sapiens
gcgcgagtgaggaaaggaggtactgtagagtcatcctttttgaacttccat

SEQ ID NO: 311944 - DNA, 83 bp, Homo sapiens
cgtggaggtgaatggcagcaaggtgggcccggacggcacaccctacgttaccgtgctcaagcacacttccaccctgggcagcg

SEQ ID NO: 311945 - DNA, 82 bp, Homo sapiens
cccctgaggccccagaactatcttttcgaaattccgggtagatatgcctggctcaggcagtgcattcatccccaccatcaac

SEQ ID NO: 311946 - DNA, 50 bp, Homo sapiens
ccggaatgtcatccagcgagtgattagctgccaaggggccaagggatgag

SEQ ID NO: 311947 - DNA, 101 bp, Homo sapiens
aggagttggtggtgaccccgcccagttggcccagaggatctcttctaacatccagaagatcacacagtgttatgccttcaattaagttgcagagttctgat

SEQ ID NO: 311948 - DNA, 83 bp, Homo sapiens
acaagtgtttccggaagtgtatagggaaacctgggggctccctggacaactccgagcagcatcatcggctggttcgtgcgaag

SEQ ID NO: 311949 - DNA, 100 bp, Homo sapiens
tttctgaaattattgatgggctctctgagcaggagagagacaagagagacacctccaacttcgacaaagagttcaccagacagcctgtggaactgacccc

SEQ ID NO: 311950 - DNA, 92 bp, Homo sapiens
cgacaagccgctggcagccgcggatctcaccgccgctcaggggcagctggtggaatttttgaagaaaatggaatctcgaggccccctttcgt

SEQ ID NO: 311951 - DNA, 100 bp, Homo sapiens
aaaccgcgttggcctgtgttccttctccagtggactgccaagtcaccggtctctgacccctcccaaggatcatgccgcagccccactgacccaggagtag

SEQ ID NO: 311952 - DNA, 75 bp, Homo sapiens
gttccgggaagatggtgctgatcaaggaattagctctcgatgttctgaagtatgaggaagttgacatggattcat

SEQ ID NO: 311953 - DNA, 100 bp, Homo sapiens
atttttggacctgaaacagaaattctggaacacctatatgatgacaacggcaacacgacaagaagtccttggcctctaccgcagcattttcaggcttgcg

SEQ ID NO: 311954 - DNA, 100 bp, Homo sapiens
caatgacctgatcaagcgggcacggctggccaaggagattgctgcgatgattgacactgagtttgccaagcagacctccctggacgcagtggcccaggcc

SEQ ID NO: 311955 - DNA, 83 bp, Homo sapiens
ctcagctccgagtccagggcgagggccgccttcaacaacaacgtgagcgtggcctacgagtgcctgagcgccggcgggcgcag

SEQ ID NO: 311956 - DNA, 50 bp, Homo sapiens
cggagttgtagccatgccctaggccctcgggaccaaggatcacgtcatga

SEQ ID NO: 311957 - DNA, 83 bp, Homo sapiens
attgtggtttctctggcaatgaatacaagaagtgtgccactgggtggctgaatccacagaggagcctgctggttctaatcggg

SEQ ID NO: 311958 - DNA, 100 bp, Homo sapiens
taaacaggagcagaacttggaccagacctacttggatgatgaactccatccggcacaacctgtcactgcatagtcgattcatgcgggtccagaatgaggg

SEQ ID NO: 311959 - DNA, 75 bp, Homo sapiens
actcagggatcaaagagcaaacagattcagtggcctgcattgaatcatccagaaccgcatcctgctcgtcatcct

SEQ ID NO: 311960 - DNA, 100 bp, Homo sapiens
taatggtggatgaagttgttcattgtttgtcaccacaaaaaggacaggacatgatcatttctgggctccagcctgaaacttcctactccctcaccgtcac

SEQ ID NO: 311961 - DNA, 51 bp, Homo sapiens
acctggaggaggtggagttctgtgtggaagctcaaactggaggattataag

SEQ ID NO: 311962 - DNA, 102 bp, Homo sapiens
tccagatggcgtcttccgtgggcaacgtggccgacagcacaggtcaaaatgcagatcttcgtgaaaacccttaccggcaagaccatcacccttgaggtggag

SEQ ID NO: 311963 - DNA, 95 bp, Homo sapiens
cttaggagacaggagcagaatataaagagttttgaggagacctatgaccgaaagctcaagaatgaacttctaaatctctggaaagtacgaggaga

SEQ ID NO: 311964 - DNA, 100 bp, Homo sapiens
ctcttctccgccgcggcactgatccccacaggtgggactcttccctggacactgtgttgagttaattaaccaaaaagttccccagtcagtgaccaactca

SEQ ID NO: 311965 - DNA, 100 bp, Homo sapiens
agcaatgtttgaacaaactcgaagaacagctgtggaaagaagttgcaaaacactgggtactgggcctaatcgctacgtgcctctttggctatgatgccta

SEQ ID NO: 311966 - DNA, 75 bp, Homo sapiens
ggaggcagaagcatgctaagaacaacagtcaggccaagccttctgcctgtgatgaatcagcttaaaatggctcgt

SEQ ID NO: 311967 - DNA, 100 bp, Homo sapiens
gccgcccagctctctcgggactaggcaggaaagaccacagcaagattctttcattcgtctcctcctagcctgggggaccaggctcgaactgaccctggac

SEQ ID NO: 311968 - DNA, 101 bp, Homo sapiens
ctggcagggagcctggtggggtggcggagggggagactgtgccgtggagggcctcgccatgtcctgctgcccgatttgtccaatatgtgcagcgttacctg

SEQ ID NO: 311969 - DNA, 87 bp, Homo sapiens
gtttgggacgaggagaggatccaggaggaggagttgcagagatatggacatttctggaattacagagccccctctacattgagcaca

SEQ ID NO: 311970 - DNA, 90 bp, Homo sapiens
gaacagcccccatcttcccatgcttgtcaaaaatcagaggcaactaacactgcggcttcctgagatggagtctcgctctgtcacccaggc

SEQ ID NO: 311971 - DNA, 88 bp, Homo sapiens
cagagcccgccagaccttcctctgaaggcaaagtgacctgtgaccaagtgtgacctacgacatcctccaggcaatgagatttaccgca

SEQ ID NO: 311972 - DNA, 83 bp, Homo sapiens
cttcagcagaggctgcagggccagcaggccagtgaagaagcaaaggaagacatgaaaattgacgctcattcttcttcctattg

SEQ ID NO: 311973 - DNA, 50 bp, Homo sapiens
ccagcagctgtcgccgccgctctcaggtgttacagcacatgaaggccgtg

SEQ ID NO: 311974 - DNA, 80 bp, Homo sapiens
aagcaccatgtccggatgagatcgcacttcctgcagtgggcattagccacgtccagttggttgaatctggcgatgtggaa

SEQ ID NO: 311975 - DNA, 82 bp, Homo sapiens
gcgcagcgtgtcaggcggagagacccgccgccagatttccatggagaatgattatctgggacctcgaagaattgagagtcta

SEQ ID NO: 311976 - DNA, 101 bp, Homo sapiens
gcggcggctgcgggctgagcggcgagtttccgatttaaagctgagctgcgaggaaaatggcggcgggaggtgtcgtgaaaactacccctaaaagccaaaat

SEQ ID NO: 311977 - DNA, 100 bp, Homo sapiens
taggcagctcaatgacagtcaagtggaaacaactgtctggagtaagtccatgagtgatgtcagcgcagaagatgttcaaaacttgcgtcagctgcgttac

SEQ ID NO: 311978 - DNA, 100 bp, Homo sapiens
actacacccttaagtcgagggacgtatgaggtgggactggaagacaacataggttccaacaccgagggatgtgaagttaccccagatgtaaacatttcag

SEQ ID NO: 311979 - DNA, 75 bp, Homo sapiens
ttcagccggagaagcgagtttcagctgggcttatttcaaaacctttgtccctcagttccaggaggcagcatttgc

SEQ ID NO: 311980 - DNA, 83 bp, Homo sapiens
gaaggacctgtgtcagcgtgctgagtaccagacggcgtgtgagcagctgggacaggtatcatgatattagctggtttgacatc

SEQ ID NO: 311981 - DNA, 101 bp, Homo sapiens
taaatacaacttagcagtcacagacaagttgaagatgaccttgcacttattttagaggagattgcaattgattgtcataataaggaaactgaacagaggct

SEQ ID NO: 311982 - DNA, 99 bp, Homo sapiens
cagagacccaacagcttatgcattagctgaacatctttcagagttgtatccacatggagattaagtagcttgcccaagatcacccagccagtaaagtgg

SEQ ID NO: 311983 - DNA, 82 bp, Homo sapiens
agcccaaagacccctggagacatgaattaaatgtgagggagtctgacgtaagagtttgtgatgagtcatcatgtaaatatgg

SEQ ID NO: 311984 - DNA, 75 bp, Homo sapiens
ttagatgcccttaaaaaaaccattgacaatattttctatgtgatggagtaccgagaactattcctggcacttttt

SEQ ID NO: 311985 - DNA, 100 bp, Homo sapiens
ttggagttttttgcttggggactattgacagcacccaccttggtggtaatattcagatgaatgctccaaggaaatcagtaggcagaaatgaggaggagcg

SEQ ID NO: 311986 - DNA, 80 bp, Homo sapiens
gccgggagttcaagaagaacactccagaggttttaaaatcaaagatgggaaaatcggagaaaattgcccttccccatggc

SEQ ID NO: 311987 - DNA, 50 bp, Homo sapiens
ccgagaaccgcagggactggccgagaagaatcgcattctgattttccata

SEQ ID NO: 311988 - DNA, 78 bp, Homo sapiens
cctcccaaagtgctgtgattacagggctgtgggacagatgatgtctaccatgttctacccactggtcacctttgtcct

SEQ ID NO: 311989 - DNA, 97 bp, Homo sapiens
agccgcccgcttcaaccccaggggaccagaggaactcagccctgattgcggtccgggctctgtttccctgtgagaagccgcctcggcccaccgagat

SEQ ID NO: 311990 - DNA, 98 bp, Homo sapiens
agagatacagcaaaagagtctacataggctaactatatgtcagaaagcatcagcttttctcgatggacccattcatctaatgaaatatgcctgtacta

SEQ ID NO: 311991 - DNA, 100 bp, Homo sapiens
atggcgaccggcaactactttggattcacccacagcggggcggcggcggcggcggctgcggcccaatatagactccgacctgagcatgcgcacactgagc

SEQ ID NO: 311992 - DNA, 100 bp, Homo sapiens
cgtgaaacgtcatttgactggtgaatttgagaagaagcacaacgtgtttgattgctctgctatcagataaagacctcactgtggccaacgtgggtgactc

SEQ ID NO: 311993 - DNA, 100 bp, Homo sapiens
gcaacgccattcgccaggctcttcaggatctgctttcagagtacatgaacaacgtgccgacgccaccgccgagcccatgatcctggaacagtacgtggtg

SEQ ID NO: 311994 - DNA, 112 bp, Homo sapiens
ttccggatcaatccagatggcagccagtcagtggtggaggcagcctggcatcctcgctacaacctcattgttgtgggccgatacccagatcctaatttcaaaagttgtaccc

SEQ ID NO: 311995 - DNA, 100 bp, Homo sapiens
atggcagccggcttcaagcagatgacttcctccaggactatactttattgatcaacatccttcatagatcctgataacttaagtgactctctcttttccg

SEQ ID NO: 311996 - DNA, 98 bp, Homo sapiens
acatgtacgggaaacacatcggcgcaagcaaactgtcgagtaggagttgcagcactgaatactctagcaggctatattgactgggtgtctatgagtca

SEQ ID NO: 311997 - DNA, 50 bp, Homo sapiens
gctaatccagtggaaatcaggagaggtgaatggaactctggtgactcatt

SEQ ID NO: 311998 - DNA, 75 bp, Homo sapiens
tttatgtattcaaagcagaggatgctcattcggctcagaaactttatattcagagcaccaatcaaattaagcaag

SEQ ID NO: 311999 - DNA, 98 bp, Homo sapiens
agggcggacacggccaccgcctcagcgggagaggagtctccaccaggactgaccgctgccgcccagcacgtccagataacggaggagatgatggatca

SEQ ID NO: 312000 - DNA, 100 bp, Homo sapiens
ggcgttccaggtgttggtgtcccaggagctgggattccagttgtcccaggtgctgggatcccaggtgctgcggttccagctcaacgggacccaggtggag

SEQ ID NO: 312001 - DNA, 100 bp, Homo sapiens
agaagatggacagaaacaaggatggtgtggtgaccattgaggaattcattgagtcttgtcaaaagacagaggaccccagtaagtgcagtcctcggttttg

SEQ ID NO: 312002 - DNA, 83 bp, Homo sapiens
tcctatagtgggaagcagacccatgagtgggaatgtaagacggacttagatattgcatacaaatttggaaaaactgtggtgag

SEQ ID NO: 312003 - DNA, 130 bp, Homo sapiens
gccagccgcaccatgccgctcctaagcctgcacagccgcggcggcagcagcagtgagaggttttaaaatcaaagatgggaaaatcggagaaaattgcccttccccatggccagcttgttcatggtataca

SEQ ID NO: 312004 - DNA, 51 bp, Homo sapiens
gcctgcggcgcctgggcgctctgagattacaggctgtgccagccctggaaa

SEQ ID NO: 312005 - DNA, 51 bp, Homo sapiens
gcaggactctaaaagctttggtttgcagaaaaaacttcagcatgtgccagg

SEQ ID NO: 312006 - DNA, 50 bp, Homo sapiens
agaagtaatcgctgtttatcaaacaaatggacacctaccagggaacggag

SEQ ID NO: 312007 - DNA, 75 bp, Homo sapiens
ctggacccggaccggttttggtaatctcaggggcgatataatcaatgaggtggtcctaaagttgctcaaggctgg

SEQ ID NO: 312008 - DNA, 101 bp, Homo sapiens
tccaatcagccatctacatcagctcgtgcccgtcttattgatcctggctttggaatatataagattaacttcatctaccttgccaagagcacaaaaaaaac

SEQ ID NO: 312009 - DNA, 50 bp, Homo sapiens
aaacgggctctaacaatgacagattgtaagtggaaaatgtatatggagat

SEQ ID NO: 312010 - DNA, 88 bp, Homo sapiens
cgggggtggaggtggtgcctctggcagtgacgaggacgaagtgtccgagaacactctgctccagccaaggtggtgagggcagctgttc

SEQ ID NO: 312011 - DNA, 75 bp, Homo sapiens
tggaaatggaacatacgggcaagtttataaggtttcttgagtacaggcgatcaggctgcaaaggggaactatgga

SEQ ID NO: 312012 - DNA, 100 bp, Homo sapiens
tccttgaagtatttggctgaggagttttcaatcccacatcagaggctccttgaaatgctagatacagagaaggaactgttaaaagaaaaaataaaggaag

SEQ ID NO: 312013 - DNA, 100 bp, Homo sapiens
ggttattttactctacaggagtggttaaaaggaatgacttctctccagattggtccaaaggaagattttttccattgtttgaaatgtaacttatgcctag

SEQ ID NO: 312014 - DNA, 142 bp, Homo sapiens
gtgtggatcaaagcgtatgcttttgtgcacactggtgacaactcaagagcaatcagtaccatctgactctgtttgctggctacacggacaacctggtgcgagtgtggcaggtgaccattggcacacgctagaagtttatggc

SEQ ID NO: 312015 - DNA, 83 bp, Homo sapiens
attgccttattttttctcatggatgttcttcttcgagtatttgtagaaggggcagtcagggcgacagcaagaatgccaagaag

SEQ ID NO: 312016 - DNA, 83 bp, Homo sapiens
caggcatcagtcaggcagatgtttgtcgactggaatggggaggaggtacaggagaactgtgtgcggtggcgaaagaggttcac

SEQ ID NO: 312017 - DNA, 101 bp, Homo sapiens
gaccgcgcggagcaggcggaggcggataagaaagccgctgaggacaagtgcaagcaggtgcaccccagacatggatgtcatcctcaacattcctgtggaag

SEQ ID NO: 312018 - DNA, 83 bp, Homo sapiens
cacctcacagattccagcttcggaacaagagaccctgggtaaagcaccttcacctcgtgctgcccatgcctgtgcaactgtcg

SEQ ID NO: 312019 - DNA, 90 bp, Homo sapiens
gaggacaacttcgcccgggacttcatgctcagaggctgagaatggtgtggaggagaaaaagaaagcctgcaggtcgccaacagcccaatc

SEQ ID NO: 312020 - DNA, 82 bp, Homo sapiens
caacattcagacccatttccagtcatgaggtcctgaggacaccgtgagccagccaggcctggccgctgggcctgaccggccc

SEQ ID NO: 312021 - DNA, 120 bp, Homo sapiens
aaggcacttagtgcccacaaccgcaccaagaagcacgacctgctgagatcaacaacccctccccgtcgtaaacgctgaggaatgatgtggcaagaatgccatgatgttctttaaaaaaat

SEQ ID NO: 312022 - DNA, 89 bp, Homo sapiens
ttgaggcagaggcagctggaccgagctgcggctgctgtggatttgggaatggatgatgaaggagatgatgacccagttcctctaccaaa

SEQ ID NO: 312023 - DNA, 80 bp, Homo sapiens
ccggggtgcgagaggtggtgtgcatgacactcctggaaaacagacgggctcatcttcgcttgtgcctggagaagttgaag

SEQ ID NO: 312024 - DNA, 83 bp, Homo sapiens
aagagcgctgggttggacctttacctgtggaggcaacactggccaagaagaggaaagatatcattaacggagctcaagaaaaa

SEQ ID NO: 312025 - DNA, 75 bp, Homo sapiens
cggcgccgcgcccatagccggacggggatctgagctggcaggcaagtatatcgcgtcaacacagcgacctgacgg

SEQ ID NO: 312026 - DNA, 75 bp, Homo sapiens
aaccatccttgtggttgcttctgtgaacctcttccagggtactccaaagattcaggtttactcacgtcatccagc

SEQ ID NO: 312027 - DNA, 100 bp, Homo sapiens
ctgggcctagggtgcagcgggcgcgtctgcggctggtgttggcgcatctctagatcatgtatcagttggaggacttggagacagcttctatgagtatttg

SEQ ID NO: 312028 - DNA, 85 bp, Homo sapiens
aaaatatcccaaggactaatctgatcgggtcttccttcatcaggtagatgaaactcaagagaaaaggtgtggataaatgaaacta

SEQ ID NO: 312029 - DNA, 50 bp, Homo sapiens
tttaggcatacaagtaccctggctgaaatgaccatggttgacacagagat

SEQ ID NO: 312030 - DNA, 101 bp, Homo sapiens
gcatatcaaactaccctcatcttttgagaaatgggagattgcaagaggaaatactcctggagtgcccttgagtctaaatggtgtttggctgaacagagcgc

SEQ ID NO: 312031 - DNA, 97 bp, Homo sapiens
tgatggattactgatggattcttctcaggggcttgcttctgacatgtctgatgagcgcattcctgctgttgctcctggctattacaaggtgtcgctg

SEQ ID NO: 312032 - DNA, 88 bp, Homo sapiens
gattcgcagtggtcgcttcttctccttgatgatcatctggttggagaagatgttagataaaataattagcattttcatcatatttttg

SEQ ID NO: 312033 - DNA, 82 bp, Homo sapiens
aagcaaaggccctcctcttccacttcgcggggataacaccttgttaacaggaaaactcctccttaacttggtagatcatact

SEQ ID NO: 312034 - DNA, 98 bp, Homo sapiens
ctgccgtgaataggcagcctaaagtcactgcttcaaccacctgtgagaaattagaaaaagccaggaatgagttacaaacagtgtatgaagcattcgtc

SEQ ID NO: 312035 - DNA, 97 bp, Homo sapiens
gtctgtgtaagaagtactccagggaaacctcccaggtctcctctgagcctccggcctccataagacccaaaacagatgacacctcttcccagtcccc

SEQ ID NO: 312036 - DNA, 75 bp, Homo sapiens
gcggcaacaccagtcagactgtgtggcttttgagatacagaagatcattgagacactgacacagcagcttcaggc

SEQ ID NO: 312037 - DNA, 85 bp, Homo sapiens
cggctggcaaacctcacgcaaggcgaagaccagtactatctgcgggtcaccacgctggtgaaactgcgtgctgtaagctgggacc

SEQ ID NO: 312038 - DNA, 100 bp, Homo sapiens
ctgctgcggaggcgttggagcgcggaaatctggaaccgggatggcgacgtctacactgagtcggaggcgaaggatgccgaggaatgtgacagggctggga

SEQ ID NO: 312039 - DNA, 82 bp, Homo sapiens
ttgtggaatgagagaaccgaggaacgaagaaacagacattcaacatgattgcatttgaacattttgaaagcgaagcagaagc

SEQ ID NO: 312040 - DNA, 75 bp, Homo sapiens
ggcctgaccgcctgggtcagctccctcagcatgggcatcaccttgatagtggtgaatggtagtgtctagaaaggg

SEQ ID NO: 312041 - DNA, 90 bp, Homo sapiens
tgtgttattcttgaaggactgaattggggatttgctaaacagctggatcagctcctttgtggcagtaaagcagacacttgggatgcaaag

SEQ ID NO: 312042 - DNA, 82 bp, Homo sapiens
gcatgtcggtggcggggctgaagaagcagttctacaaggcgagccagtctctgctttctatccgtcaagatgataaagtcgt

SEQ ID NO: 312043 - DNA, 82 bp, Homo sapiens
ggaaacaagcactttgccaataaaaacgagagaggccttacctgaaagtgggttccaagaccaaagattaaattaagagaag

SEQ ID NO: 312044 - DNA, 98 bp, Homo sapiens
gccgggtccaccgtggaagatgtcctgaagaaggcccatgagttaggaggattcacggtaactttttggaagagtactttgtaacaataaagtgctgt

SEQ ID NO: 312045 - DNA, 100 bp, Homo sapiens
tcctgatgggtatgaaaagtcccaggaaggtgtggggatattcagctttgccaggtatggcagtgatttttatagcatgcactataaaggcaaagtgaag

SEQ ID NO: 312046 - DNA, 89 bp, Homo sapiens
ggaggggcgctgtgtgtacatcacccccatggaggccctggcagagcaggttgcagatatcaagaaagtcaacaacttcatcagagaac

SEQ ID NO: 312047 - DNA, 142 bp, Homo sapiens
ctggattttcggacactgagcgccatggccctgcctctgctgccgggcaacagcttcaaccgcaacgcatcaacttctaactcatctcgccaggagaggcctccagtgaaacccttcattctcactcggaacatggctcaag

SEQ ID NO: 312048 - DNA, 100 bp, Homo sapiens
aagaggtgtttcgagtaaacaagccaggtctgagttcactgacaccatcctgtccgtgcacccctctgatgtgctggacatgcccgtggacccaaacgaa

SEQ ID NO: 312049 - DNA, 100 bp, Homo sapiens
gggggcaccggaggtgacaacaataacaagactgtccttcggacaagttttaggtaaatcaacagactgggaagatgatggttggggagcatgggaagaa

SEQ ID NO: 312050 - DNA, 82 bp, Homo sapiens
gtttggggcatctccgcggtccggcccggggccccgggatctcggctgtccttcctcccggaaatggccaaggaggaccctg

SEQ ID NO: 312051 - DNA, 89 bp, Homo sapiens
gtccacctcttccgcttctaccgcgtgctcacctgtatcagctggcccctgtcggagttggtaaaatattaaagaagatcaacaaggcc

SEQ ID NO: 312052 - DNA, 50 bp, Homo sapiens
aactatggactcattatgatgtgatgatgaacagtctacacagatggctg

SEQ ID NO: 312053 - DNA, 100 bp, Homo sapiens
cctggggatgaggcctggtcttgtggaactgaacttagctcgacggggctgaccgctctggcccagggtggtttgtgaatcttatctcagagaggaagac

SEQ ID NO: 312054 - DNA, 75 bp, Homo sapiens
agcagccgccggcgcctaagagcaactgatttggtgctgagaaaggttatcaatttttctgactgtacagtttgt

SEQ ID NO: 312055 - DNA, 75 bp, Homo sapiens
acattacctgtatctttgccagtttagctggatgctcattcagcggttcagcgaggaagaatgcctccaacccag

SEQ ID NO: 312056 - DNA, 76 bp, Homo sapiens
aggtgttcaagaaggcggtggtactgcatgtgcttccagaggagcccaaagaggtatgaaggttattgaaaaccgg

SEQ ID NO: 312057 - DNA, 75 bp, Homo sapiens
gcccctgtggagtctgcttctctgggaaggtgtcagttgtacccgaggcgttctcagcagcagcaagtacctgtg

SEQ ID NO: 312058 - DNA, 75 bp, Homo sapiens
ctcagctatgctcggcacttccagccctttgctcggctgcaccagcgggcaggttcaggagaagtggcacctggt

SEQ ID NO: 312059 - DNA, 96 bp, Homo sapiens
cttcgctaacgcctcccggctctcgtcagcctcccgccggccgtctccttaacaccgaacaccgtcgtggagtcagatttgagtgatgatggcaaa

SEQ ID NO: 312060 - DNA, 82 bp, Homo sapiens
gctaggcagcttcagccggaccgggtgagaagccctaccactgcaactgggacggctgcggctggaagtttgcgcgctcaga

SEQ ID NO: 312061 - DNA, 100 bp, Homo sapiens
tctgcaagctcatgaaagaaatcttagataagaaggttgagaagatttctggtgttcagcaaattcagttttcatgatctgaagaaatgatggaatgggg

SEQ ID NO: 312062 - DNA, 75 bp, Homo sapiens
atcttttcctcttctgaacatgcacccccagcagccaccagcagacgtgctatgggaagagggcaaggcagcctt

SEQ ID NO: 312063 - DNA, 75 bp, Homo sapiens
ccagcaggttgggagatggcaaagacatcttctggtcagagatacttcttaaagggagttgctgagtcagcccag

SEQ ID NO: 312064 - DNA, 100 bp, Homo sapiens
gagaccttgagggatatctttcttcactcctcttcacttcttcagatggagacattccctgcagtggctgagaaggtcctcaaggagttccaggtgttac

SEQ ID NO: 312065 - DNA, 74 bp, Homo sapiens
ggaagcagccgatccagcctgcggagcctgtggggcagcaataccaagtttccaggcccgaagagcatcccaga

SEQ ID NO: 312066 - DNA, 75 bp, Homo sapiens
ggaaaaatcgagcagaaagaatgtctttcaggccatccggctgtccttagagcaagccctgcctcctgagccaaa

SEQ ID NO: 312067 - DNA, 100 bp, Homo sapiens
gaacgccctgcgctacgatgccatggagttacttaaagatccactctacattggactacggcagagaagagtaagaggttctgaatatgatgattttttg

SEQ ID NO: 312068 - DNA, 75 bp, Homo sapiens
ttggcaagaagataggatgtgggaacttcggagagctcagattaggttctgcaccagtattgtggctcaagactc

SEQ ID NO: 312069 - DNA, 88 bp, Homo sapiens
gagagccgagacctcagttcccggcggctcttgcggggcacaggccgctgcgcggccctgcgcatgctgctggcagatcagggccaga

SEQ ID NO: 312070 - DNA, 82 bp, Homo sapiens
ctgaagagcgacaagccgctggcagccgcggatctcaccgccgctcagggtcacgacccccaggagacctggaggactgaat

SEQ ID NO: 312071 - DNA, 100 bp, Homo sapiens
caggttgccttggaaaatgccaacgccgtgtctgaaggacacattcagctaacgtattttagcaggtggagtgaggttgaagattcctgtgacagcgatg

SEQ ID NO: 312072 - DNA, 101 bp, Homo sapiens
gaagaatgtctcatgttcgagtctggggctgtcgctgtgctctttacagcagaaagttttcatggagaaatggaatcacacttcaaatgatttcattttgt

SEQ ID NO: 312073 - DNA, 83 bp, Homo sapiens
gccgcgattttctgcaggccccacgagtgggaggtgctgagccgctcagatgatgctgtgtatctggacaatgagaaagaaag

SEQ ID NO: 312074 - DNA, 100 bp, Homo sapiens
aggagcagaagtacgaccggcagctgaggtatctagagatcaggttctggacaatgctgcagttcaattctgtgcccgcaaagtctctgctgtttcagga

SEQ ID NO: 312075 - DNA, 100 bp, Homo sapiens
taagaatcttccacccagtggagctgttccagttactgggataccacctcatgttgttaaagtaccagcttcacaggattcacaagacagtgatgatgaa

SEQ ID NO: 312076 - DNA, 83 bp, Homo sapiens
cgcggggaccgctgtgctctcggtttatggagccgtacatctttgggagccgcctggaccacgacatcatcgacctggaacag

SEQ ID NO: 312077 - DNA, 83 bp, Homo sapiens
gatctggggatcttcgcactatcccaagtctttcccagggaactccgatgaagtgttccaacaaaatgagcgagtgaaccaag

SEQ ID NO: 312078 - DNA, 100 bp, Homo sapiens
tggggcggaagaaaatacaaatcacacgcataatggatgaaaggaaccgacaggattcacctttacttagtctccttggacagacaagctcactttcatg

SEQ ID NO: 312079 - DNA, 100 bp, Homo sapiens
agcagccgatcatggcggatggcccccggtgcaagaggcgcaaacaagccaatcccaggaggaaaaacggaggaagttaagtcttcagagcctactgagg

SEQ ID NO: 312080 - DNA, 100 bp, Homo sapiens
agctgacccttgagccataacccatccgatggatgcactgactggtctatcgatatcaagaaatatcaagttttggtgggagagcctgttcgaatcaaat

SEQ ID NO: 312081 - DNA, 98 bp, Homo sapiens
gcgttctaaaggaaggcgtccgttggccttcgtacccgtcttgattgaggtgtcgtgaaaactacccctaaaagccaaaatgggaaaggaaaagactc

SEQ ID NO: 312082 - DNA, 75 bp, Homo sapiens
ggacattgctgatcttttccaagttcccaaggcctacagctgaagatggatgatgctgaccctgaggaaagaaac

SEQ ID NO: 312083 - DNA, 74 bp, Homo sapiens
gacacagtatggtagccacacccccaggccctgggaggagcggggacactgaggacctctctccaaattggcct

SEQ ID NO: 312084 - DNA, 82 bp, Homo sapiens
tggtattttttggagcttccatcctggttcttccaaagtgcccggacccaaaacaggaatgctgggattacaagcgtgagct

SEQ ID NO: 312085 - DNA, 102 bp, Homo sapiens
cttctccactttcgccagcccgtgccgcgagcgcggcctgcaggagatcatgatgctgccgccaccgccgccaccacggagcgagaagcccagatagacgcc

SEQ ID NO: 312086 - DNA, 82 bp, Homo sapiens
agactacggacctgtctgggtctcagccgccaaagaccccgtccgatgcctgaggaaacccagacccaagaccaaccgatgg

SEQ ID NO: 312087 - DNA, 83 bp, Homo sapiens
cggctggcgaggaggccccagccgcgaaggagccgggcgcgcaggccggcctggagggataaggaagcctgtgtgggtaccaa

SEQ ID NO: 312088 - DNA, 75 bp, Homo sapiens
cctctctaagcctatggaaaagcttctgggtggtgaggatccaggaaagccaagcgatgccatgttaaagaatgg

SEQ ID NO: 312089 - DNA, 83 bp, Homo sapiens
gaggacaacagaggagacagaggggctgagaggtggagaagagcgagtacttgagaaagaagaggaagaagatgatgatgaag

SEQ ID NO: 312090 - DNA, 100 bp, Homo sapiens
ccgaggtagaagaagatgaacccacagatttggtcacaccagatgtattacatgtttggcttcctatttctggtgtttatcattttggttattacctgtt

SEQ ID NO: 312091 - DNA, 75 bp, Homo sapiens
atgtgcatactcacagagttagagagagggatggtgcttattgcaggagtgaccaggacactacctcctagaagt

SEQ ID NO: 312092 - DNA, 51 bp, Homo sapiens
tgatcttggcgtccgccagtggtgatgatccttatcacaggtgctcacaag

SEQ ID NO: 312093 - DNA, 98 bp, Homo sapiens
tatggcaacatcaggtgactgtcccagaagtgaatcgcagagaacaccttctgcagtggggaccatgtgtcctggcacagccctttggataacagtga

SEQ ID NO: 312094 - DNA, 83 bp, Homo sapiens
ccagagatgtggatagtcagtatttatcagaacaagacaggttttgatgatgatggttcagaatttcatgaacatatatttct

SEQ ID NO: 312095 - DNA, 83 bp, Homo sapiens
cagcagatggcggatgccctgcagtacctgcagaaggtctctggagacatcttcagcaggatagtaatgatgacactgaagat

SEQ ID NO: 312096 - DNA, 108 bp, Homo sapiens
gggcagagcactgcgccgtttgggaacgcaactttgaggagacagtgcggtggaaattgttccaactgctggtgttctgcaagatggagccaggaggagagcccacag

SEQ ID NO: 312097 - DNA, 100 bp, Homo sapiens
tggatcaccacaacctccgtctcccaggttcaagcgattctcccgcctcagcctcctgagtagcaattacagtgtcaaaagtttggacagtataacaaag

SEQ ID NO: 312098 - DNA, 51 bp, Homo sapiens
tttaaagattcatgttcacagaaaacagagaatagtgacagtggtacagga

SEQ ID NO: 312099 - DNA, 75 bp, Homo sapiens
acagggccgtgatgttggagaactacaggaacctggagtctgtggccattggaaaagaagtttgttcgagtttca

SEQ ID NO: 312100 - DNA, 82 bp, Homo sapiens
caaagatgagatttacctgtgagatgtttcatcccaacagtgctacaaagtacacagataaagacaatggagggatgcttgt

SEQ ID NO: 312101 - DNA, 103 bp, Homo sapiens
tcttccccacctgcccggtgcccgaggaggcagccaagctcgtagcctgccactccgtgcgtgacttaagagattaaaattaatttggttgctgttggttctg

SEQ ID NO: 312102 - DNA, 90 bp, Homo sapiens
ggcagaatacatcgattgcatcagcaatgtggcgcacggaggctgtaggagtgcaattggaacctgagcgcttggtcaagatcctagagg

SEQ ID NO: 312103 - DNA, 75 bp, Homo sapiens
aaagaggagaggcacccgatatatgttctctaggccttttagaaaacatggagaagatttacaaatctctgcctg

SEQ ID NO: 312104 - DNA, 83 bp, Homo sapiens
gcctgtaggaaagcggaagcggcctggcaggggaaggatcgagcaacatggctgacaaggccaagcctgccaaagctgccaac

SEQ ID NO: 312105 - DNA, 74 bp, Homo sapiens
gaatatcatgctggtggctctacccagaattcaattaaagtggctcagtcccctgttttcatagcccaagttgg

SEQ ID NO: 312106 - DNA, 90 bp, Homo sapiens
cggcggagaaaaggccgctgcgcaggggagctggtgctggagaatctggtaaaagcaccattgtgaagcagatgaggatcctgcatgtta

SEQ ID NO: 312107 - DNA, 75 bp, Homo sapiens
agaccttcaagcagcgccgcaccttcgatagcctgggctggaagctcttctacgtcacaggctgcctgtttgtgg

SEQ ID NO: 312108 - DNA, 101 bp, Homo sapiens
tctggacacagaagtatttgtgacagaaatgacctccaccttcaacccccgagaatgtaaactgtccaagcaagaagggcaaaactatggcttcttcctgc

SEQ ID NO: 312109 - DNA, 100 bp, Homo sapiens
ggaatttgccaagaaggtacaagagctgcagaaaagcaatcagggtctccatcacccaactccatgcttcgagtcctgctctctgctcagacctcccctg

SEQ ID NO: 312110 - DNA, 83 bp, Homo sapiens
gtctgtctctgctcgaattgacagaaaaggattctgtgaaggttgttgatcattatgaaaatcctagaaacgtggggtccctt

SEQ ID NO: 312111 - DNA, 82 bp, Homo sapiens
cgaagctcggggacgcgaggagccggcgtggccctggatctctggaaacatggctacagaacatgttaatggaaatggtact

SEQ ID NO: 312112 - DNA, 100 bp, Homo sapiens
cggggaggcgcggagcgcgcgtgtggtccttgcgccgctgacttctccactggttcctgggcaccgaaagatgaaatatattcaggacttccagagagag

SEQ ID NO: 312113 - DNA, 80 bp, Homo sapiens
gcggggagcacacggagcactgcaggcgccgggtgagaagccctaccactgcaactgggacggctgcggctggaagtttg

SEQ ID NO: 312114 - DNA, 98 bp, Homo sapiens
aatgatgatggtggacaatttgtcgtcaccacaaatccagtgaacaacgatggcattttgaaaacagcaaagatcactttgggaagcagtgacatcca

SEQ ID NO: 312115 - DNA, 101 bp, Homo sapiens
gttcagcttccaaagagatacagggcagaggaaaatgcaagaagactgatggagcaggcttgcaatattaaagctgatgtggtcatcaagttccctgagga

SEQ ID NO: 312116 - DNA, 88 bp, Homo sapiens
cacacgctgatggtgcagcaccgcatgatggtacccaaagtcagagtacaggggctcaggtccaggtggcaggggatatgctacccaa

SEQ ID NO: 312117 - DNA, 105 bp, Homo sapiens
ggaggaggctgtgctgcaccagcacctcttgctccacatctccagagagcccaggttgtaggtcataaagaaggtctggatgttatggagagagctgatccttta

SEQ ID NO: 312118 - DNA, 75 bp, Homo sapiens
tctcttacaacaaaatggttttccactccattgttgttagaagccagttctgctgagacacaacttcccctggga

SEQ ID NO: 312119 - DNA, 98 bp, Homo sapiens
gctacagcatcccacattaagtcaacggtctcccaggcagctgcggacctcctggcctactgtgaagctcacgtgcgggaagatcctctcatcattcc

SEQ ID NO: 312120 - DNA, 100 bp, Homo sapiens
tcaacacctgctacaaacacttctattactttgtcacagagatgaacctcatagaccgcaaggagctagagcctttggatcaaccccaaacgtgcctgca

SEQ ID NO: 312121 - DNA, 101 bp, Homo sapiens
agaaacaagccgtggaataggtgtatcaagtaatggtgcaaagcctgaactcacagcgctccttcaccactattacccaattgagatcgacccacaccgga

SEQ ID NO: 312122 - DNA, 80 bp, Homo sapiens
ggaccggaggctctggatggaagccatggatggccgggaacctagtcactttgtggcatgtatgacagccatcttaaacc

SEQ ID NO: 312123 - DNA, 75 bp, Homo sapiens
agaccgccggggcattattcatttctccagctctggatatgggccctcacattttccaaacctgtccatctgcta

SEQ ID NO: 312124 - DNA, 60 bp, Homo sapiens
ctcggcctctgccggagaaacagctccttcgagaactcatagaacggaagaccagctcct

SEQ ID NO: 312125 - DNA, 98 bp, Homo sapiens
taaggattccaagtaactcttatttggtggcagagcgagctctctattactggaataatgaatacatcatgagtttaatcagtgacaacgcagcgaag

SEQ ID NO: 312126 - DNA, 75 bp, Homo sapiens
gtcagactcccgaaccattgctccaaatatccgttgaagcagaccaagatcactccatggatgaaatgacagctg

SEQ ID NO: 312127 - DNA, 100 bp, Homo sapiens
aggtccccaaatattgaccaactggcatcccacagcctcctcttccagaatgcctttgcgcagacaatgcagatcttcgtgaagactctgactggtaaga

SEQ ID NO: 312128 - DNA, 75 bp, Homo sapiens
cagcttttggcagcatgaaagttagcagctcagcttgtcaatcggaaacagaaattagagtctgtggaactttct

SEQ ID NO: 312129 - DNA, 82 bp, Homo sapiens
cagagggctctgatctgtgcgacagactgagcgggctttggacaccatgaactttgatgtgattaagggaaagccaatccgc

SEQ ID NO: 312130 - DNA, 83 bp, Homo sapiens
caccgccctccgccacaactgtcgcagcgagtttaatgacgccatcgtcatctccaaccgagtctgaaggaaggcctgacggt

SEQ ID NO: 312131 - DNA, 75 bp, Homo sapiens
gatgatgttgaagttgtttatacaattggtcacccctcctaatttctcagtgtcacaagtgcccaacatgcccag

SEQ ID NO: 312132 - DNA, 103 bp, Homo sapiens
agcgagctgagtggttgtgtggtcgcgtctcggaaaccggtagcgcttgcagcatgaactgaaggcagaagctagtctaatggaccagatgagtagttgtgat

SEQ ID NO: 312133 - DNA, 97 bp, Homo sapiens
aaacgggtcctgctgctcaccaaggtgttgcaccctggcctgctcgctcaggtgcatatggacctgctgctgatgaagattggcagccgagtcctgg

SEQ ID NO: 312134 - DNA, 75 bp, Homo sapiens
cctacagcagcggggagtcctacgataagaaaatcagcctgactagacaggaattctggcaactgctccagcaga

SEQ ID NO: 312135 - DNA, 100 bp, Homo sapiens
attcccttcgagctgcgcatcgtggatctgattaaaggtgaactaccgaggccaggtggtgagcctgatccggatgcggaacccctggggcgaggtggag

SEQ ID NO: 312136 - DNA, 100 bp, Homo sapiens
atcaagtatacagaaaatcggtgaagagaggttttgaattcacgcttatggtagtggatgttgaaacatttgtagcagatatactgaaaggagaaaattt

SEQ ID NO: 312137 - DNA, 75 bp, Homo sapiens
gattctgagcaagagaatgggctgggcagcctgagtcccagtgatggtctcctcatgctgctacagaacctacct

SEQ ID NO: 312138 - DNA, 100 bp, Homo sapiens
gggaccatgggatcaataaaaatttgtgccaaagccccagatgtccctgaagagaaacccagtaacagaaacttaccaactgtaagagtggatactctag

SEQ ID NO: 312139 - DNA, 51 bp, Homo sapiens
atgcaatcttcaggaaagtaagaggtacttgattctaaagctcgaaaggcc

SEQ ID NO: 312140 - DNA, 100 bp, Homo sapiens
ggcaaccaatcaatgaaacagacacacctgcacaggcaccgggagcctggccgctgcagtggagacagcctcgggacgccaggccctggtggtgggcaag

SEQ ID NO: 312141 - DNA, 100 bp, Homo sapiens
gaaaacctaaagtatttgccgttggtgattcaaggatttgataatgggctgcattaaaagtaaagaaaacaaaagtccagccattaaatacagacctgaa

SEQ ID NO: 312142 - DNA, 101 bp, Homo sapiens
cgcggggaccgctgtgctctcgagccaggactgtctccagtttggtcctcctgctgaaggggaagtggtccaagtgagatggacagacggccaagtctatg

SEQ ID NO: 312143 - DNA, 98 bp, Homo sapiens
actgggattacgggcgtgaaccaccacgccaggatgacgtcatgatgccccagcgggtgaggctgcaacacgaggctgccgttcagcacccgtcgagc

SEQ ID NO: 312144 - DNA, 105 bp, Homo sapiens
gaggaaacagctatatgggaacaacatacagtgacgcttcacaggctctattatcaagtcctaaattttggaatgattgtctcatcggcactaatgatctggaag

SEQ ID NO: 312145 - DNA, 100 bp, Homo sapiens
gtggggtgaagaccccagttttgctgaccttattcaccatgacttatcagacaagttggatggcttgaggactggtactaaaaggaaacgtgactgggag

SEQ ID NO: 312146 - DNA, 101 bp, Homo sapiens
aggcgagctagccgggagttacaccgccaccgccagagagacaagagagacacctccaacttcgacaaagagttcaccagacagcctgtggaactgacccc

SEQ ID NO: 312147 - DNA, 82 bp, Homo sapiens
gcctgggacccgtcgcgtcagagccaggtctcctctgagcctccggcctccataagacccaaaacagatgacacctcttccc

SEQ ID NO: 312148 - DNA, 75 bp, Homo sapiens
tcggcagagcaaggggcttacgcagaaggacctggccacggaggtcctcaggccctatggagccttctggcttgc

SEQ ID NO: 312149 - DNA, 101 bp, Homo sapiens
gctgcagggccgagatccaggagaaccacgacgagacctacggcgtgccctccctggaggagctggggaagaaggagaaagggccaacccctgaagaagca

SEQ ID NO: 312150 - DNA, 75 bp, Homo sapiens
cgcgaatatcgtcatcgttagaagtcgatctaggtcaaatgaaaggaaatagaagacagtttgcaagagaagtgg

SEQ ID NO: 312151 - DNA, 100 bp, Homo sapiens
tggatttaaaagacagtcctcgtcagcactgactttcagctatggaatcggcaactgcgatgtctgtggactgtcttgggcagcatgcagtgctttctgg

SEQ ID NO: 312152 - DNA, 118 bp, Homo sapiens
ctgcgcgggacggctctgtaggaaggaacttggttccccctccctcagcttccgccccaaaaggtactaggttttgacaagcttgcatcatgcgtgagtataagctagtcgttcttgg

SEQ ID NO: 312153 - DNA, 83 bp, Homo sapiens
gttttgaaatcgacacacaaagaatagagttgagcctgtgggacacttcggaatgcgataagttgcggcatgatggctaccgc

SEQ ID NO: 312154 - DNA, 100 bp, Homo sapiens
ttcctttaaatccggagggggaaaaaatcccaaggtctgcaaaggatatggaatattatcttgtaaaatggaaaggatggccagattctacaaatacttg

SEQ ID NO: 312155 - DNA, 100 bp, Homo sapiens
cagaaggctgacaagctccatgaggacgagcctgtggagtgggagacacctgacctttctcaagctgagattgagcagaagatcaaggagtacaatgccc

SEQ ID NO: 312156 - DNA, 100 bp, Homo sapiens
gttctttgtggatggacttgattctgatgagagggtactgccagggggatggttaccgcatcggctttggccagtgtgctggaaaagtgctgcctgctct

SEQ ID NO: 312157 - DNA, 100 bp, Homo sapiens
catgcgcctggatggactcactccacccgccctcccccgctgcgtgagcaccatgttcagtttcaccgggatgtggagtatgaagtgtaacagaacagac

SEQ ID NO: 312158 - DNA, 83 bp, Homo sapiens
gcaacgttttgagccacaactgtcacaactccaggtagtaagcattaataatgtctttcatctttgagtggatctacaatggc

SEQ ID NO: 312159 - DNA, 114 bp, Homo sapiens
cttcaccacgcggctgcacaactgcaggaacaccgtcacgctgctggaggaggtggtcttcaagctgacagagaagctgacggaacagaaggagtggatgaagatataattgtg

SEQ ID NO: 312160 - DNA, 74 bp, Homo sapiens
ctgagatcgtcaagtctcccagcgaccccaagcaataccggggccagtgtcattcaaagatgtggctgtggatt

SEQ ID NO: 312161 - DNA, 82 bp, Homo sapiens
cagagactgcggcgagtgtgaagtgggctgggtgctggacgagggcgcctgtgtgggggctttgttatgcacctaaagccat

SEQ ID NO: 312162 - DNA, 100 bp, Homo sapiens
actatatttgaaagaagccatattttcagggcagagcggcttgggtaaatccaccttaatcaacaccctcttcaaatccaaaatcagccggaagtcggtg

SEQ ID NO: 312163 - DNA, 83 bp, Homo sapiens
catgtattgaagaattccaatcccagttcatttttatggagaacttaatgttctggatgatattttaactgaagtaccagaac

SEQ ID NO: 312164 - DNA, 81 bp, Homo sapiens
ccgtctccaagatgtagctaatgaccgtggttcccactgaggatttccagatgtgacttgcactcagaagatcagtggtca

SEQ ID NO: 312165 - DNA, 75 bp, Homo sapiens
acactgtattatacggttactatagatatgttcaaggaatgagtgatttactttcccctcttttatatgtgatgg

SEQ ID NO: 312166 - DNA, 100 bp, Homo sapiens
ctcccaaggtgctgggattacaggtggatattccatctattataaccaagaaactattaaaagcagcaatgaagcatatagaagtgatagttaaagccag

SEQ ID NO: 312167 - DNA, 98 bp, Homo sapiens
gtggagatcaagcgcagcgatggtatctcagcgtttgagtcagccaggagtagcaataggtttggcttggactcccttaggtggagaaatcatgttcg

SEQ ID NO: 312168 - DNA, 100 bp, Homo sapiens
tcaaagagctcaggaacggacaggacatgggtgccgacccccacatcctggcaaaagagcgagagagcgccctgtcgctggccagcacaggcggctacac

SEQ ID NO: 312169 - DNA, 74 bp, Homo sapiens
tggcggggccaggacgctggttcatacactccaaggccatctccccggttgttgtgcacagccacgaaacaaaa

SEQ ID NO: 312170 - DNA, 100 bp, Homo sapiens
gaagaggtggccccggatgctgcggcgcccgctggccgggctggctgcggccgccctgggccgggccccaccggacggggttggctgtgttccggccgca

SEQ ID NO: 312171 - DNA, 83 bp, Homo sapiens
ggtcctactaactgctggagagcacaataaagcaggtacagccaaagaccggagctttggagagatgaagtttaaacagtgtc

SEQ ID NO: 312172 - DNA, 90 bp, Homo sapiens
agagccattggagatggctcataagtggaaggagaacatgaatctctcagaggcccaagtacaggcgttagcattaagtagacaagccag

SEQ ID NO: 312173 - DNA, 100 bp, Homo sapiens
ggttgatggtgctgaaaaaaaggaagactacaatgaaacagctccaatgctggagcagctttcactcaggcccatttctaatgaaagtcccaaggagatc

SEQ ID NO: 312174 - DNA, 100 bp, Homo sapiens
aagactggggctgctcccatcattgatgtggtgcgatcggagcctcgaccacacctctttggtcagatgttcgtccgcctgcagcttctgagagctgtgc

SEQ ID NO: 312175 - DNA, 83 bp, Homo sapiens
cacaaagtgaccaagaacgtgagcaagcccaggcacagccgacgccgcgggaattcagaaggagctggcggacatcactttag

SEQ ID NO: 312176 - DNA, 100 bp, Homo sapiens
tgatcttcaggctgcaacaaggagaagagccatggaaacaggaggaagaattcccaagccaaagctttccaggagatgcctacatagaagagtgacagca

SEQ ID NO: 312177 - DNA, 100 bp, Homo sapiens
cgcggcggcggtggagatcgcaggtcgctcagacccaacatgagtgaagtttcctgcaagaaacgggacgactatttggaatggccagagtattttatgg

SEQ ID NO: 312178 - DNA, 75 bp, Homo sapiens
ctcagcaccactgcagaggacagccttgacaatgcagatcttcgtgaagactctgactggtaagaccatcaccct

SEQ ID NO: 312179 - DNA, 83 bp, Homo sapiens
cgccagatcaacctggagctctacgcctcctacgtttacctgtccatggcttgcagccaatttactggagcagggatgacgta

SEQ ID NO: 312180 - DNA, 73 bp, Homo sapiens
ggctgcgtgtgggacgggtttagcggcagcctcttcgtcatccgtccttggctcaggatttggagagcttgca

SEQ ID NO: 312181 - DNA, 90 bp, Homo sapiens
gatgaactgatgaagacaaggccttccagtttggaagtgtgatgaatgcagactctgctaccattttggctgtttggatcctcctttgaa

SEQ ID NO: 312182 - DNA, 98 bp, Homo sapiens
cttcatattttggaaagcagtttttaagacaaggtgactctggggggcccctgatctgcaacgggtacttgcagggccttgtgtctttcggaaaagcc

SEQ ID NO: 312183 - DNA, 75 bp, Homo sapiens
ctgaatgcactaaacatgaagagcttgaaagcgaagttcaggaagagtgacgtacccactgatggtaatgctggc

SEQ ID NO: 312184 - DNA, 100 bp, Homo sapiens
gaggaaattgttcgctccctggataagatggaaaatgccaacattccttctgtgtccctgtccaagcgagaggttctcttgctgcaaatggccctaccac

SEQ ID NO: 312185 - DNA, 85 bp, Homo sapiens
cccatggttgccggctcccctctcaggacaacccagatgtgcaacaaagtgcgatgctgtttgcagacaaggtcccaaagacagc

SEQ ID NO: 312186 - DNA, 100 bp, Homo sapiens
ccaggcctgttcctccctgggtcctgtcttgaatgagtctagacctgtcgtttgtgaaaggctcacagaacatttcctgcctgttgctcacactctgttg

SEQ ID NO: 312187 - DNA, 75 bp, Homo sapiens
gtcggaggctgatcgcgcccagaagaagtccaaggcttgcgagaaggtcatttccgtgggtcaaacggtcatcac

SEQ ID NO: 312188 - DNA, 74 bp, Homo sapiens
gagactccaggccgcttccagggcgaaaactaaatccgtctcagaatgctgcaggcaccagccgttcagaatct

SEQ ID NO: 312189 - DNA, 82 bp, Homo sapiens
catgtccctgcacgacctggacgtgggtgaaatctgcaccgtggacccgtgccacaagcaaatggagctgctcctggtgaac

SEQ ID NO: 312190 - DNA, 98 bp, Homo sapiens
gcttccagcagtcccatgtgcacgggttgcttcaatcagcttttgtatgacatccgaactaatgcagtcaccgtgggtggtgtggcagctggaattgg

SEQ ID NO: 312191 - DNA, 96 bp, Homo sapiens
ttcgggtggcaagaaaaaccgacgaatctttacctacactgactctgatagatacaccaatttggaggaggagccagatgaccaggatgccccaga

SEQ ID NO: 312192 - DNA, 74 bp, Homo sapiens
ttgataacaacaagaataaagggcagctgactaagcctggttgcagtatgcctgaaatttgggatgtagaagat

SEQ ID NO: 312193 - DNA, 82 bp, Homo sapiens
tcctcaccaacctgccagaggagaccaacgagctcatgctgtccatgcttttcaatcatgagaaagatcagtctaaagaaaa

SEQ ID NO: 312194 - DNA, 74 bp, Homo sapiens
ctagtgagcgcctagtcccagacccgccgaatgacctccggatgcagactcatctgagcgtatcattgctccca

SEQ ID NO: 312195 - DNA, 98 bp, Homo sapiens
ccggacatggtggtgtcccacctttttgggaagatttggagtctctctacctttggtcttctccatacttttgtcagtgaacatgctcggcagtccat

SEQ ID NO: 312196 - DNA, 50 bp, Homo sapiens
aaaatgcgcgtcccgggcgcgggtaggtcttattagtaggtaagaaacag

SEQ ID NO: 312197 - DNA, 100 bp, Homo sapiens
gcagagaagctctgacaacgtgtcagtgacagtgcttcgcgcagcctactccacaggagggacttgcaacaaagcattgccagagaacctagtgctcctt

SEQ ID NO: 312198 - DNA, 100 bp, Homo sapiens
ctaggctcaacagaatattccacctgccttgacatgtgaaatgacagactttttcattgaatgatgaggacacagcagccatattatgccaagaggaaaa

SEQ ID NO: 312199 - DNA, 147 bp, Homo sapiens
ctgaaattcttgcagatcatcccgatgcacccatgtcccaggtgtatggagcgccacatctcctgagattatttgagcctaccttgtacaatgctgtgtgctacatctgtgggtacaaaaagaagtgtggcgtgaatttggtcctca

SEQ ID NO: 312200 - DNA, 73 bp, Homo sapiens
ttctttaaggatggtttagaaatggaaaaatgtgaatttgtttcctcggagtctgtcactccagaagataatg

SEQ ID NO: 312201 - DNA, 100 bp, Homo sapiens
agaagggcttgttccggtttcagaggatcctgtagccataaagattgcagctttgaaaagtccagccgcatttcatgagcagagaaggagcttggagcgg

SEQ ID NO: 312202 - DNA, 100 bp, Homo sapiens
ccagctctgccccgacagagacggaggagccggggtccagtgcaggccaagtcctgtatctgccatgtctgtggcgtccacctcaacaggctgcattcct

SEQ ID NO: 312203 - DNA, 50 bp, Homo sapiens
tgctaatgagaaggaggtggaggcaagttaggaaatcaacattgaatccc

SEQ ID NO: 312204 - DNA, 100 bp, Homo sapiens
aaagctgtggttaccttagatgcaagtgatgatggaatcttggccaaaatcgtggaagaggcagaaatccaggcagaacttgaacgtttggaaagagtca

SEQ ID NO: 312205 - DNA, 100 bp, Homo sapiens
agcgctgataaagtagacacaatgattgttcaggcaatttatgggatggaggtggataccacaccaacagttgctggacagtttgaggatgcagatgttg

SEQ ID NO: 312206 - DNA, 94 bp, Homo sapiens
ctctatcgtggtcgtaggaggctgtcctgtctgcagtgtcaacagcatctccaccctggagcctgtgagccggtgccagcgcctgagtgagctg

SEQ ID NO: 312207 - DNA, 100 bp, Homo sapiens
tcagagagcattttactactgagctgcaaagccgggtgggcttggactgggcgtgctccatggcagagatcctgcggtcactcaacagtgccccactgtg

SEQ ID NO: 312208 - DNA, 75 bp, Homo sapiens
caaaaattgttttttctacctgttgacgtgtcaagcactaacttactgtaagattgatgttaaaggcatggtgtt

SEQ ID NO: 312209 - DNA, 75 bp, Homo sapiens
acagttcctgggaaggtggagccaccagcctctccttggttccagcaacagatagaaatgctttaagttcactct

SEQ ID NO: 312210 - DNA, 100 bp, Homo sapiens
ctctttcctccctgaccatgctcccaaagagggtatcactgggatacatcagattggatgccaagcgttcctctgccggacatacaagagttccccaact

SEQ ID NO: 312211 - DNA, 96 bp, Homo sapiens
gccatgggcctcactatctcctccctcttctcccgactatttggcaagaagcagatgcgcattttgatgggaatagccaggccagaagaaggaagg

SEQ ID NO: 312212 - DNA, 90 bp, Homo sapiens
ggaccttccggagcttctcagaagacagagggttttcttttgaggagaaacttagagccatccaagtggacagcaatcctaggcctgcat

SEQ ID NO: 312213 - DNA, 96 bp, Homo sapiens
gcaatgccttcacccgggatacgctgcaagagattttccagaggcttgccttctaatgatactgactgcccccagaaaaaggagggaaaggcccaa

SEQ ID NO: 312214 - DNA, 100 bp, Homo sapiens
caccagaggagttcagcaagagaagggatttaaggggaaggggaggagttacagcccggccagttggagttgtagtaccacgagggacgccaactcccag

SEQ ID NO: 312215 - DNA, 97 bp, Homo sapiens
ggcccctggtagcggcgctgttgctgggctcggcgtgctgcgggccatgatccaaaggaaccagagcagttgagaaaactgtttattggtggtctga

SEQ ID NO: 312216 - DNA, 115 bp, Homo sapiens
ctcgtcatgctctttgtagcgtggtgcttctgttgctcacagactatatcatcatgtacatagaaaaatccaaaggattctgcaaaaaagctactagaaccactgacttcatcaa

SEQ ID NO: 312217 - DNA, 100 bp, Homo sapiens
atacacagtctcagttcagtgctccccgggattactctggctatcaacgggtggtttgtgatgaaaatggttccaagggctatggatttgtacactttga

SEQ ID NO: 312218 - DNA, 75 bp, Homo sapiens
atcctgacactatgaatgctacttggatgcctcttaagtcctggaatcaagatgtgagaccaagaaattatttct

SEQ ID NO: 312219 - DNA, 100 bp, Homo sapiens
gggctatgcagcagcagctcctgcctattctcctaacatgtatcctggagcgaatcctaccttccaaacaggagagaagagaatagttttgatagagaca

SEQ ID NO: 312220 - DNA, 74 bp, Homo sapiens
ccggtttctcactgtgatgatgaagcatgcaaaccctcctggggcttgcccatagatgctgttcagtgggatat

SEQ ID NO: 312221 - DNA, 90 bp, Homo sapiens
ctgggcccgtgacgtcaccccgctgtgacgcgcacgctgtaggaaaactatacctctactaagaagacagaagacttactttcatcatct

SEQ ID NO: 312222 - DNA, 98 bp, Homo sapiens
ttgaggcggtcctcctagcggcctgaacaagttgaaatcatcgcagaaggataaagttcgtcagtttatgatcttcacacaatctagtgaaaaaacag

SEQ ID NO: 312223 - DNA, 82 bp, Homo sapiens
agcggagagactcgccggccgagggtggccctaggggcagcgagcaagacagcaagcagcacaggaagtcctggagaacctg

SEQ ID NO: 312224 - DNA, 85 bp, Homo sapiens
acgtgtctagcttctaccacgccttctctggagcccagaaggaggagatgaccgccgggttctgctatggcacatggaacaagcc

SEQ ID NO: 312225 - DNA, 100 bp, Homo sapiens
cgccccgggacccgcgccgctgccctccggctccgcgggcggcccacggcgaggtcaaaatgcagatcttcgtgaaaacccttaccggcaagaccatcac

SEQ ID NO: 312226 - DNA, 101 bp, Homo sapiens
tctgccaccaagatggctctgcccagccagcattccctgcaggagccctacacagcctccgtgggtgctgtaaaatacctggagtgctcggcgctcacaca

SEQ ID NO: 312227 - DNA, 96 bp, Homo sapiens
aggggaggccgtgccaggcagggccggttcgtgcggaaccgccatggccgagccggcttcgttcctccaggagtgatccaaaatggagcgcgggtc

SEQ ID NO: 312228 - DNA, 75 bp, Homo sapiens
gtgctagtatcggacatgatcctcatcttttatacactcttagtgctgtccagcaggtattaatctctggagaag

SEQ ID NO: 312229 - DNA, 82 bp, Homo sapiens
gttcgtactggaagtcatgaggacagggatcatagacggtatttctatgtaaacgaacagtcgggcgagtctcagtgggagt

SEQ ID NO: 312230 - DNA, 100 bp, Homo sapiens
aggaactggtgctgcagcgagagggttacacatcattttggaatgactgtatatcatctggattacgtggctgtatgttaattgaattagcattgagagg

SEQ ID NO: 312231 - DNA, 90 bp, Homo sapiens
gtgaggcctccccagccacgtggaacttgaatggtagtgtctagaaagggtatgtcccttcaagagagaggtgccaatgtccaaccggcc

SEQ ID NO: 312232 - DNA, 100 bp, Homo sapiens
gatgatggggccttgcagtaagcagacggtttgccagtcagtccttagaagaacaacacaggaatgcccagtgcggacatctctagacttagaactggac

SEQ ID NO: 312233 - DNA, 75 bp, Homo sapiens
cttcacctcatttgtctacaccatcaaggaggaaggcctggttcttcaaggctttcatgagaaggacaagaagcc

SEQ ID NO: 312234 - DNA, 100 bp, Homo sapiens
gatggagtgcctccaaaggttgctgaggttgagtgaacccaacatggcttccatcagtgggcagctggaggaactgtacatggcccacagcagaaaggac

SEQ ID NO: 312235 - DNA, 75 bp, Homo sapiens
caggagtttcctgtgtccagcgctgccggagccgcctgagcacctgttccgcgagcctgagaagaggccccccac

SEQ ID NO: 312236 - DNA, 100 bp, Homo sapiens
gtgaaaactcatcaccttaaggtgttaagtgtaaggatcttcatgatgaaatttctgtaaatgacctcctgccccccgaggtctgcagtctcctgaaccc

SEQ ID NO: 312237 - DNA, 75 bp, Homo sapiens
caagcacctgcgcatcgtcatcgatgtcctaaacgatgctatatttgatgaagatcatgatgagatggtgattgt

SEQ ID NO: 312238 - DNA, 90 bp, Homo sapiens
atcagatagtgatgaagaagaggaatccaaagagccccctatcaagcttccaaagagaccagaacctggaaaatttaattgaagtaaatt

SEQ ID NO: 312239 - DNA, 87 bp, Homo sapiens
cagatggacttcaaatgctgtttgtattccagagactaggaatacctccacgggcccattcccgagattctagtgattctgctgatg

SEQ ID NO: 312240 - DNA, 78 bp, Homo sapiens
tagagttcagttgtgtgcaaaaatgatgagaatgaggacccgggaagaaatggtactggtagttaactctcaaggaga

SEQ ID NO: 312241 - DNA, 83 bp, Homo sapiens
aggataatcactaaattctgccgaaaggactgaggaacggtgcctggaaaagttttcggctttgtgagaaaccttaccatcaa

SEQ ID NO: 312242 - DNA, 101 bp, Homo sapiens
ccgcaggccaagaggaggccagagcccattatccctgtcactcagccccgtgcctgatcaactttctagcgggagaacgatcatggaggtggtgccagctg

SEQ ID NO: 312243 - DNA, 90 bp, Homo sapiens
tggtcccaaacgttctgtactgtccaagtcagttcctgggtacaaggggactcgggcaagggtgccgaagatagacaagaggcacacaga

SEQ ID NO: 312244 - DNA, 51 bp, Homo sapiens
ggcgaaggtcgtattgaatggtgttgtaggatttaagtgccctgtatgctc

SEQ ID NO: 312245 - DNA, 100 bp, Homo sapiens
tttgactggttgggccggagcctcacagctgtattcatgtgggtaaactgtcttgagccccaccctcacctgcctgtgctggcaaccagtggcctagacc

SEQ ID NO: 312246 - DNA, 82 bp, Homo sapiens
gtgaactcagtactgatgcccagtggggcattcgtcttggtaaacttggtctcattgctatggacagtgctatcaccctgtg

SEQ ID NO: 312247 - DNA, 100 bp, Homo sapiens
gcgcctgggggcaccgctgccgttccgaggtcagaagccaatgacctggccctgaggctggctcgccactacacgggacaccaggacgtggtggtattag

SEQ ID NO: 312248 - DNA, 115 bp, Homo sapiens
acgtgcctcgtggtctaaagcttcggcacaagggcccaactggaattccacttacgggtcagcccaaggctgccccctcggtcactctgttcccgccctcctctgaggagcttca

SEQ ID NO: 312249 - DNA, 97 bp, Homo sapiens
ggatttaaccgctctctgcctcccaggtattttgaaggtggcgtctcatctgtctacctctgggatctggatcatggctttgctggagtgatcctca

SEQ ID NO: 312250 - DNA, 50 bp, Homo sapiens
cgagggagcgatgcggtgcagcgcgaacctccagtgggcccgcgacgtgt

SEQ ID NO: 312251 - DNA, 50 bp, Homo sapiens
gtttctggaacattgcgatttggaatggattaatgaaaatcaagttccat

SEQ ID NO: 312252 - DNA, 75 bp, Homo sapiens
cttggatccgcgggacaagaaaattcatgcgtttgctaatccagactttacacaacctatctcagaagttgtaga

SEQ ID NO: 312253 - DNA, 100 bp, Homo sapiens
atggatttttgcatgagacgcttctggacagatcaggatcctcatgaccagccaaagagaagaagaattaggaagcataaatcaaagaaaaaatttaaaa

SEQ ID NO: 312254 - DNA, 75 bp, Homo sapiens
caacatgcctctgacaatctctagtctccctcgtgaaagatgcttctgttcctctgattgatgttacaaacctcc

SEQ ID NO: 312255 - DNA, 75 bp, Homo sapiens
atccagcctgcggagcctgtggggcaggtacaatggcttggtgaccggcacgagggctaagggcatcattgccat

SEQ ID NO: 312256 - DNA, 75 bp, Homo sapiens
tcgccgccgccaccatgcccaagagaaaggttcgtgctggccgtgggcagcgccgtctttgatgccatgttcaac

SEQ ID NO: 312257 - DNA, 100 bp, Homo sapiens
cagctcatcgctcgcatcgctgccgccaacgggagatgagtatgaagaagatggattctgtcagccatacagagggattgcatgtgcaagatttattggc

SEQ ID NO: 312258 - DNA, 51 bp, Homo sapiens
acagccaacaaaatattcatggttcttgagaaataatagtgtaatccttgc

SEQ ID NO: 312259 - DNA, 75 bp, Homo sapiens
cctgttccaccagactttaccagaattagctacatccatctgatggcacattttcgaatgcacactcaaataaaa

SEQ ID NO: 312260 - DNA, 90 bp, Homo sapiens
agcgcctcgtcgacatgagtgatgtggaggaaaacaacttcgagggcagagcggtgcgtctttctacgtgaataggattttgtggctggc

SEQ ID NO: 312261 - DNA, 100 bp, Homo sapiens
ggcagcctcacctcaccatttctagcttgttgaaacccaaaactaaaagtatgctgaggccttggattaccaccgtcaggcactggtgttgattcctcag

SEQ ID NO: 312262 - DNA, 75 bp, Homo sapiens
tagaggaccagtattagaaagcatagttgcccgtactttacggcaggtcatgatgatgggcagcgcccgagtggc

SEQ ID NO: 312263 - DNA, 95 bp, Homo sapiens
tttaaatgcaggagcaggaggaattgctggtgccttcattcatgaaaagcatgcccatacgattaaacctgccttttaatctagacaacgagcaa

SEQ ID NO: 312264 - DNA, 82 bp, Homo sapiens
ctgaaggatggggtcttcaccacttcttctgacatgtggtggtttgtgatgaaaatggttccaagggctatggatttgtaca

SEQ ID NO: 312265 - DNA, 80 bp, Homo sapiens
aagacattcacaacatggatgttaagtgggcagaccaacatccacctcagcaaaaacttcttcctgacgaatcgcgccag

SEQ ID NO: 312266 - DNA, 49 bp, Homo sapiens
agagcgcttcctgcggagacttcaggatgaccggaaagaagggatgacc

SEQ ID NO: 312267 - DNA, 101 bp, Homo sapiens
ccggagatccctcagccctggctggaaccgaatattgtatctgacgcatcctgtaatactgaagagcaactgaagacagttgatgatgtccttattcattg

SEQ ID NO: 312268 - DNA, 75 bp, Homo sapiens
tgttttgatgattggcagagacccactgtctggtcattcaacatttattcaaccaaaaatactaagtcagctcta

SEQ ID NO: 312269 - DNA, 99 bp, Homo sapiens
aaacttcagaatacttcaagaatagcagaggagcaggtggaaatggatattgttgaaaaactggtgaaaatgataccttgtgagcatgaagacctgctg

SEQ ID NO: 312270 - DNA, 88 bp, Homo sapiens
cttaagtggggaatggagtacaagggctatctggtatctgtagatggctacatgaacatgcaggatgatgatgctgaagctatccttg

SEQ ID NO: 312271 - DNA, 82 bp, Homo sapiens
ctccttcacctgccctgcagccattcagttacagaatgtctgaaggggacagtgtgggagaatccgtccatgggaaaccttc

SEQ ID NO: 312272 - DNA, 127 bp, Homo sapiens
ctcgagaacagaaggatctctccttaacgcctttcaccattaagaggaaagcgatggaggagctgagcgctgatgagtttcttgcagaacataaattattaggaaacattaaaaatgtggccaagac

SEQ ID NO: 312273 - DNA, 82 bp, Homo sapiens
cggcaggcgagattgcctgacccaggcctgctcggccctcacagggccgacgcctccccccagggtcagctgcgggctccca

SEQ ID NO: 312274 - DNA, 100 bp, Homo sapiens
taaaatggatatgaaaagtgaagaaagtgatcataggagaaaaccatttcagacatatctgaagagatggattaagaatgctttggattaaggattgtgg

SEQ ID NO: 312275 - DNA, 83 bp, Homo sapiens
cgcgcctgcgacctgcccgcctgggttgacatcatggacatatgtgagtccatcctggagaggaagcggcatgacagcgaaag

SEQ ID NO: 312276 - DNA, 73 bp, Homo sapiens
agactccctcagatccagtgataattgacagttaagttgcttttacagagttaacaggtctccaagaaatttt

SEQ ID NO: 312277 - DNA, 75 bp, Homo sapiens
aacgagatcttccgccactacgatttgtacaatgacgacagaaacctgcttcgaattagagagaaggaaagacgc

SEQ ID NO: 312278 - DNA, 131 bp, Homo sapiens
taggatttgttagaaaggagacccgactgcaactgctggattgctgcaaggctgagggacgagaacgaggtgctggagaatctggtaaaagcaccattgtgaagcagatgaggatcctgcatgttaatggg

SEQ ID NO: 312279 - DNA, 50 bp, Homo sapiens
tccgtgtcaccgccggaacctggcgcagtttccaacatggctagatccat

SEQ ID NO: 312280 - DNA, 100 bp, Homo sapiens
agaaatcaaaaatctggtgaaattgccggcaagagggagttaaggacattccaggcagaggcaagtgggagattttgataagatctggcgagaacactgt

SEQ ID NO: 312281 - DNA, 97 bp, Homo sapiens
tcggaaatcttgatcagccagatctttattacgagtactacccgcacgtgtaccctgggcgcaggggtctaacataagaccagactatgcagactcc

SEQ ID NO: 312282 - DNA, 98 bp, Homo sapiens
ggagacaacaacctgctgggcaccttcatctggaataaggatgcaatgcagtatgcttctgaatctaaagatactgaattggctgaagaactcctgca

SEQ ID NO: 312283 - DNA, 100 bp, Homo sapiens
cttgggtcctccgagagcagcagcgctgcaagctttcttcctggtggcagatgacatcatggattcatcccttacccgccggggacagatctgctggtat

SEQ ID NO: 312284 - DNA, 106 bp, Homo sapiens
caagtaaagctcttcatgcaaggaaacataagttggaggttctggaatctcaggttcaaaccttgtactactcagctgatcacaagctgcttgatgggaacctact

SEQ ID NO: 312285 - DNA, 98 bp, Homo sapiens
tcgagagattcactatggaatcggtcttggatgtgctggatctgtgtgtggttgttcttcagtcccacaaaaaccagctgcttcccttggctcatcag

SEQ ID NO: 312286 - DNA, 100 bp, Homo sapiens
tgcatgtacatcagccccccaaaagactggtgggacgccggagacccttctctccccatcagacaatgcagatcttcgtgaagactctgactggtaagac

SEQ ID NO: 312287 - DNA, 100 bp, Homo sapiens
cacgaactgctcttggctctgagcgggtaccctgggtccattttcacctggaacaagcggagtggcctgcaggaaacagatattgatgacagatatggag

SEQ ID NO: 312288 - DNA, 83 bp, Homo sapiens
tcgagcactaatatttaagaaagaagatgttaactttcagaggactcaggagagtgcagcttgctctgtgagtgggtgacaac

SEQ ID NO: 312289 - DNA, 121 bp, Homo sapiens
gcatcctctacaacccgcagtgggcccatcttccgcacgacctcagcaaggcaaagtctggcaagttgatgagcagatagatcactacaaggaaagccaagacaaacttccttggcaagct

SEQ ID NO: 312290 - DNA, 75 bp, Homo sapiens
tctcaaataaaatcaccagttgtatttttcagttattacaggaagcaggaaacccatcaacagctggctgataag

SEQ ID NO: 312291 - DNA, 90 bp, Homo sapiens
caaaaattggtatcaccttcaaggagcacaagtagctgctcttccaagcaaggaagtcgacagacccaacatgagtgaagtttcctgcaa

SEQ ID NO: 312292 - DNA, 82 bp, Homo sapiens
acatcttaattgggcacgaaagaggtcttgccccagaagctgcgggcacatccacgcctgaaatgcggcgctcagtcctggt

SEQ ID NO: 312293 - DNA, 75 bp, Homo sapiens
gttctaacagacaaaattgatgtacttctgcaacaggtgctcctgacctctgataaagctgcagccaatttctca

SEQ ID NO: 312294 - DNA, 75 bp, Homo sapiens
aacagccaccgattttgctatgtctctgagctgcgaggaaaatggcaaatgcacgacagcggcctcctgaacatc

SEQ ID NO: 312295 - DNA, 74 bp, Homo sapiens
gccatcacgcccagctagccatcttctaattttcattccttcaaagggctgaagctgccctcgaggacctggtc

SEQ ID NO: 312296 - DNA, 100 bp, Homo sapiens
tggacagtaacaaaacatataaagcccgagcccaaaccccgccaccatcatagttctaatacccgatttacaattacattgaactacaaggatcccctca

SEQ ID NO: 312297 - DNA, 80 bp, Homo sapiens
agcagcagtatggcttccagtacccccttgccatggcagcaaagaaaacaagttgaagtttgctgcctacctagagaggg

SEQ ID NO: 312298 - DNA, 82 bp, Homo sapiens
atttgatggccgaaatattttaaagctggccactgccccaacccaggcatttcactgggcgcagtgcggacaggcttccgct

SEQ ID NO: 312299 - DNA, 82 bp, Homo sapiens
ctcagttggaagcagccgatccagcctgcggagcctgtggggcagaggctgacccgcggctgattgagtccctctcccagat

SEQ ID NO: 312300 - DNA, 96 bp, Homo sapiens
ttctttcataaaacccagttgcctgggattcaaggggctgcctcgagatccacgggttcttggcatggagtagagggtgagggggcccatcccaag

SEQ ID NO: 312301 - DNA, 75 bp, Homo sapiens
gttgtcgtctcctctctggctggaaatgggtcctgatgaatatgaagagatggaagaagaggaggaggaggaaga

SEQ ID NO: 312302 - DNA, 82 bp, Homo sapiens
gccatgggcaattgccacacggtggggcccaacgaggcgctggtggtttcaggaagcggggagaggtggtgagagatgaccc

SEQ ID NO: 312303 - DNA, 73 bp, Homo sapiens
agcacagaaatatcttcaacgttttgtgatttcctgacgatgtcacactcgtcctacagagcaacccagtgtt

SEQ ID NO: 312304 - DNA, 100 bp, Homo sapiens
gccgcgccatgtggctgctggggccgctgtgcctgctgctgagcagcgccgcgggaatatgcactttctggttggaatttgaataacatgcctgtcctgg

SEQ ID NO: 312305 - DNA, 82 bp, Homo sapiens
ggccagccaactggacagcggagcacgatgattgataggtctctaattaacagaagatggcaaagcccagccacagcagcta

SEQ ID NO: 312306 - DNA, 75 bp, Homo sapiens
ctgaccttgagtgcagctccccctataagcctcggcctccacagcggcgtcttcgacatcttcggaacattgctg

SEQ ID NO: 312307 - DNA, 100 bp, Homo sapiens
tcgagttaaagttggatgtgctggaacagaacatccatgatagcagtcttctgtaaatcgaacttttcaagaattctctgaaggaaccaagtaggatatt

SEQ ID NO: 312308 - DNA, 75 bp, Homo sapiens
gccctgcggaggcggcggtgcagcgctccggaattacatgaatgacagtcttcgaaccaatgtgtttgttcgatt

SEQ ID NO: 312309 - DNA, 80 bp, Homo sapiens
ggaggagcagaactttgagggcgaaggggccttgtggtgggcaccatgtccttgaagcttcaggcaagcaatgtaaccaa

SEQ ID NO: 312310 - DNA, 97 bp, Homo sapiens
gatgctggaggacatctgggggccacaaatgctccttctcctggagacgcaactcaaggatcagttcttaagagcagccccggtaactggaggaatg

SEQ ID NO: 312311 - DNA, 95 bp, Homo sapiens
tgcccgagaatagctccgtccagcaggattcaacaggcacaacaacatttttaggattcacagctgcaggctttgtggtctttcagggaaataag

SEQ ID NO: 312312 - DNA, 100 bp, Homo sapiens
gggagacgctgcagaccatgggccccctccacggcaccatcaccgttctggaaagaccacagcaagattctttcattcgtctcctcctagcctgggggac

SEQ ID NO: 312313 - DNA, 101 bp, Homo sapiens
ctatcctctttttaagggctgggagaactcaggaagcctggcctgctgaattagccaccaagtacgcaaacttttcagagggagcttgcaagcctggctat

SEQ ID NO: 312314 - DNA, 82 bp, Homo sapiens
gagaacagcacgtccccgctgagtggagaggagttcattacttcggaagtggtacaatttaatgatacaaaataaggatgac

SEQ ID NO: 312315 - DNA, 79 bp, Homo sapiens
cacataaagacgtacgaagccgtcgccaacaagagacagagcgacatgagagattggaccgcgggctgcactggagaat

SEQ ID NO: 312316 - DNA, 99 bp, Homo sapiens
tgcatcatgccagctttgtcaacgggatctgggagtgacactggtgttgactttaaggtgaaaacaatttcagtggatggaaataaggctaaacttgca

SEQ ID NO: 312317 - DNA, 75 bp, Homo sapiens
caagtgcaaccaccagcacctgttgatccaccagtggaccccgcagggatctttgaattggtggaacttgttgga

SEQ ID NO: 312318 - DNA, 97 bp, Homo sapiens
gggaaggtgacatgaaaggagctcagacaatttctgtccagcaacatgacagcaagctcaggctggttaaacactttaagatgagaaaaattgatct

SEQ ID NO: 312319 - DNA, 100 bp, Homo sapiens
gaagggcattcagaagtttcctggcatcaactacccagtcctgaccccaaatttgaaaggcttcgaggcagcggaattgaatgatctggcacgggaccct

SEQ ID NO: 312320 - DNA, 75 bp, Homo sapiens
gcacatcgtggtggtcggatttcaccacaagaagggctgccagagacagggtctccctctgtcacccgggctgag

SEQ ID NO: 312321 - DNA, 75 bp, Homo sapiens
ttgtggatcgctgtgatcgtcacttgattgttgttataatgagaggattacctggcagtggaaagacacatgttg

SEQ ID NO: 312322 - DNA, 75 bp, Homo sapiens
ctgccaggacagagtgctcagagttttacagaattatatccagatcgagagacagaagattctgaaagggttcaa

SEQ ID NO: 312323 - DNA, 90 bp, Homo sapiens
tcaagcatgtcatcagatttgccagggagccgatatgtggatttactcccttgatggaagcagctgctgctggccatgagataatcgtgc

SEQ ID NO: 312324 - DNA, 98 bp, Homo sapiens
cgcagtgctgccaacgccccggtggagaagctgaggctttgaacttggcctactccagcatttacggcagctaccggaacttcgtgggacctccacac

SEQ ID NO: 312325 - DNA, 101 bp, Homo sapiens
cagcactccaagcctgtggatgtggagccttgtaacacgcagccctgtcatctcccccaggacctaatctgggagcctgcaagtgacaacagcctttgcgg

SEQ ID NO: 312326 - DNA, 75 bp, Homo sapiens
aaggattccaagtaactcttatttgtggtgggcatgttaagcttgaagaagatgtagatcttggctatgtggaag

SEQ ID NO: 312327 - DNA, 50 bp, Homo sapiens
ggagttcacagaagagtcgaggagccaaaagctcaccagttcagcatcaa

SEQ ID NO: 312328 - DNA, 75 bp, Homo sapiens
cttaagagaatctcaagctgctaaggaagggaaaaggccgaggcatcagcgtgtgaagaccgcaaagacgatccc

SEQ ID NO: 312329 - DNA, 89 bp, Homo sapiens
taccgcgacctccggaggccggcgtgacaggctctgtcactaaaatagtggtgccaccgaacatcgcagaactgaagaatttggaggtg

SEQ ID NO: 312330 - DNA, 83 bp, Homo sapiens
aacggactcatggccgccttcttcgcgctggcggccttggtgcagacagcacccaagaaaacctcatttggctcgctgaagga

SEQ ID NO: 312331 - DNA, 75 bp, Homo sapiens
gactctgacagtcctcccactaaggtgaagatttggttccagaaccggcggatgaaatggaaacgcagcaaaaag

SEQ ID NO: 312332 - DNA, 100 bp, Homo sapiens
ggagatgctgcaggccagaaaaaggaggactgaaactgttgaggagcccatggaggaagaagaagcagccaaagaagagaaagaagaatctgatgatgaa

SEQ ID NO: 312333 - DNA, 73 bp, Homo sapiens
gcagtggtcgcttcttctccttgttccagaaacgccgctggactgcgaggtctccctgtggtcgtcctgggga

SEQ ID NO: 312334 - DNA, 90 bp, Homo sapiens
aacaagatgttgtcctgtgctggggctgacaggatctcaaagatttcatgagacaagctggggaagtaacgtttgcggatgcacaccgac

SEQ ID NO: 312335 - DNA, 76 bp, Homo sapiens
gtactatgagatgtcctatggcttgaacattgaaatgcacaagcaggtcagaagttgagtagcaggggcctaggag

SEQ ID NO: 312336 - DNA, 102 bp, Homo sapiens
catcagcattgctggagccaagggagatctattgggaaactgattataaccactcgggcaccatcgatgcccacgagatgaggacagccctcaggaaggcag

SEQ ID NO: 312337 - DNA, 100 bp, Homo sapiens
aggaatgctacaactaaaaatagcaggtgcacccgagctgtttttcagagtgacggatgaccgggccaagcaatctgaactgtacttagttggaatgatc

SEQ ID NO: 312338 - DNA, 100 bp, Homo sapiens
acgaaattgaaattacctccgagggaaacaagaaaacatcaaagaggtctagcaaagggatagctgggagtatggccaccctgctccacgatgcggtaat

SEQ ID NO: 312339 - DNA, 97 bp, Homo sapiens
gggactgccccggcaactccagggtgtctggtccacgacctatcctaggcgccatggtcatactccctgtcacaaactccagctgaactaacttgga

SEQ ID NO: 312340 - DNA, 100 bp, Homo sapiens
gcgaagtctgtggtttatcattgtaatcagcttcttaccaaatacagaaggttgttaccccttctacaaaactgacccgttcatcttcccagagtgcccg

SEQ ID NO: 312341 - DNA, 101 bp, Homo sapiens
gttgaattcccctcctcacgccagcctaggagaagaagttcgtagtcccagagcccaagaagatgaaaggattgttcttgttgacaacaaatgtaagtgtg

SEQ ID NO: 312342 - DNA, 100 bp, Homo sapiens
gtcacagatgctatagtctggtatcaaaagaaggtgatgcagaagatggggaagaatatgatgacccttttgctgggcctccagacactatttcattagc

SEQ ID NO: 312343 - DNA, 51 bp, Homo sapiens
cacggcgaaaccttcaccttcagagttaaaggaaggctggaaccctcacct

SEQ ID NO: 312344 - DNA, 74 bp, Homo sapiens
cttcctgtgtggttttaccgcccagagagcgtcatggacctggaccaagatcactccatggatgaaatgacagc

SEQ ID NO: 312345 - DNA, 100 bp, Homo sapiens
ctgaaaacactgattttggatgctctgaagaaagatcgggctgacgcacgaggcacacaggaaggaggtggagcaggtgtatctgcgctgtgcggcgggt

SEQ ID NO: 312346 - DNA, 98 bp, Homo sapiens
gagaagaacctctcataccctcggtaaaatacctgttttctgacaagactaggactcttacatagactgccatgaactacaagaagtatagcattgct

SEQ ID NO: 312347 - DNA, 75 bp, Homo sapiens
ctgggagagaggtacctctccttttccctctccctttccctaaggatggtgattgctcacaccaaagccttggac

SEQ ID NO: 312348 - DNA, 112 bp, Homo sapiens
gcagtgaaatggggtgaatcatttgacaaactgctttcccatagaggaggcaagtgaggcctatctggttggcctttttgaagacaccaacctgtgtgctatccatgccaaa

SEQ ID NO: 312349 - DNA, 98 bp, Homo sapiens
ggaagaattaaggggcatgttggtgcatttaactacaaaaccagctggtgctcaagaccgaatcggctgggcttttggcctaggattagaaaggctag

SEQ ID NO: 312350 - DNA, 71 bp, Homo sapiens
aggccatcaggggccttgataacacagagtttcaaggccatttgcatcccactgtccttgtgttcggagcc

SEQ ID NO: 312351 - DNA, 100 bp, Homo sapiens
ttggcagtgccacgaccatctcgcactaccctgactacagctggagcgcccagaggcgagccctggtggaggaagaggcatctctgacacgctgtgggcc

SEQ ID NO: 312352 - DNA, 82 bp, Homo sapiens
ctgtcgctgcccgtgtgattactgagactcaggtagctaaaattggtgctttctgctgtggccttagtttatgtaaccagca

SEQ ID NO: 312353 - DNA, 75 bp, Homo sapiens
cgatgcgtcaagtacactgaaattcatcctgagatgagcgggcgatgatgagatctcatttgaccctgatgacat

SEQ ID NO: 312354 - DNA, 74 bp, Homo sapiens
gaatcatccacgcacctgcagctctgctgagagagtgcaagccgtgggtttctgtagaaaatgtttcctgactg

SEQ ID NO: 312355 - DNA, 75 bp, Homo sapiens
acaacccggacatgaacacagaggactaccttttccaagaaaactgcctggagcagttggagatgggatttccac

SEQ ID NO: 312356 - DNA, 75 bp, Homo sapiens
cgcaaccaagacccagcgagtgcagcggcggccgccgaggagtctttaaaccagaggagttacgccaggccctca

SEQ ID NO: 312357 - DNA, 75 bp, Homo sapiens
ccaggccgccacctgcaaccacactgtgaacctgcacttgttgccaagtcttccatcttactagatgtgaaacct

SEQ ID NO: 312358 - DNA, 100 bp, Homo sapiens
ccgagaaccgcgtcctgcagaactccaggcaccccttcctcacagttcatgggacggctccagacattgcaggcaaggacatggcgaatcccacagccct

SEQ ID NO: 312359 - DNA, 74 bp, Homo sapiens
tggtgcagctcctggtgcgtggcccagcctcagaggagtgcatccgccccaacccttttccccctcgtctcctg

SEQ ID NO: 312360 - DNA, 82 bp, Homo sapiens
cctcaccatgcccttctgcttcaaacaggtacaccaggggttggaaaaaccacactaggcaaagaacttgcgtcaaaatcag

SEQ ID NO: 312361 - DNA, 101 bp, Homo sapiens
tgagtgagcccagctgagagcagtgcctgatgttgcacatttgccacttgagaagctgggaccctgtctccctcttgacttaagtcgtggttcagaagtta

SEQ ID NO: 312362 - DNA, 98 bp, Homo sapiens
gagcagaatgaagagaagaagcggctgctgatcaaacaggtgcgggagtatgagttaagaaaaaacaacttctcagatactggaaactttggttttgg

SEQ ID NO: 312363 - DNA, 75 bp, Homo sapiens
aggggtaaacactgatccagaacgaattcagcattattctggcagacattcacaaagaactgacaaggaaagaag

SEQ ID NO: 312364 - DNA, 90 bp, Homo sapiens
ctttgtggctttgctaaaggacaggagctctttgttcaatgcctagccacctattcctacagacacggcagtggaaaggaaaagaaagta

SEQ ID NO: 312365 - DNA, 88 bp, Homo sapiens
taaacgcccccaatttcccagctgctaaaggaagaggaagtaaagatgacggcgccttgaggtaagctacaggcaacaccacttccgc

SEQ ID NO: 312366 - DNA, 75 bp, Homo sapiens
agttgtcgccccgctgggagaagtgaccctcctgcgcctggtccctgtgcgttttattgcgacctgccggtggga

SEQ ID NO: 312367 - DNA, 100 bp, Homo sapiens
tatgaagtggtgaaggagtgtgtgcagcgtggcaagctggtgtctcccaagtggaagaatttcaaaggcctcaagctgctctgcagagacaagatccgcc

SEQ ID NO: 312368 - DNA, 75 bp, Homo sapiens
cctcatcatcccgtcagagctgaggtacttcgtgaagattctctcgggcctagccgtccttggaacccgatattc

SEQ ID NO: 312369 - DNA, 74 bp, Homo sapiens
cagtacttgaagatttgcataaagccaacattcgcaccgtcatggtcacagttatggctgcagcttcgattgcc

SEQ ID NO: 312370 - DNA, 90 bp, Homo sapiens
ggggatgcgcctgcgcaacaagttcggcggggaagatggcggatgacaagattggtttttcagcagcagatgctgtaacaggactgaaat

SEQ ID NO: 312371 - DNA, 75 bp, Homo sapiens
ggccagcaggggcagatggcaagtggagacagcaatctcaacttcaggtcagtcatatcatttggatcaaaaaat

SEQ ID NO: 312372 - DNA, 97 bp, Homo sapiens
gcgatcctcacccccagagtgaagaccattgcccggggcttggttgggggcctcaagaacacgctggttcataggccttcaatcaagcaggggcagg

SEQ ID NO: 312373 - DNA, 103 bp, Homo sapiens
caccgtcttcggtctcctggggtcggcgccgagtgggaggatggcggaagaacttgctactaccagcaccatgccctaccaatatccagcactgaccccggag

SEQ ID NO: 312374 - DNA, 75 bp, Homo sapiens
ctggaagatgggaagaaagaagcagctgccagtcactctgagaggagtgataccaatgaaaaaaggtcagttgat

SEQ ID NO: 312375 - DNA, 83 bp, Homo sapiens
aggcaccgaggcactcagaggaggccccccggacagaccacccagccctgtacagggacctgctgaggaccagccgcgtgcac

SEQ ID NO: 312376 - DNA, 100 bp, Homo sapiens
tcttcaggtccatcaatgacatgatgagcagcatgtcagaccagaccgtccgggtgaagtgtggggtgatcagccccagatttgacgtgcaactcaaaga

SEQ ID NO: 312377 - DNA, 100 bp, Homo sapiens
catcccctcttcagtgcaggaatatgttagcgttgtatcttgggagaaagacacagtctccatcatcccaggtctcggcgcggaagatggccggcggcgt

SEQ ID NO: 312378 - DNA, 90 bp, Homo sapiens
ctttacagaggaatagtctacaaaggaagacttgtaacctggagaagagcaataatgacgatgaggacctgacaccagagcagaaggcag

SEQ ID NO: 312379 - DNA, 100 bp, Homo sapiens
agttctagtataggagcgcagttcaaaattgaggttgatgagggattctgtagccccaaaccttctgaaattaaaagttcactcgtgtcaatatgggtgt

SEQ ID NO: 312380 - DNA, 83 bp, Homo sapiens
cgccaagctgtcatcacaaaagagttgattgaaattatctctggtgctgcagctctagctggtggagttgagatctataatgg

SEQ ID NO: 312381 - DNA, 75 bp, Homo sapiens
ccgggctccgggaaaactacactggccagcataagctgtggccatgactactgaagtaggctctgtgtctgaagt

SEQ ID NO: 312382 - DNA, 100 bp, Homo sapiens
cgaggacagtgcagccgagttgcgtctccctcgcgcgaggaagttgctgatagtagaatattgtgcttagccttggtgcatcttcctgttgaaaaggaaa

SEQ ID NO: 312383 - DNA, 96 bp, Homo sapiens
aaacggccaagaggcagacctaggaaatggatttcaagttccacctataaagacaggaatgaggaatacagaagacagttcacacatctacctgat

SEQ ID NO: 312384 - DNA, 75 bp, Homo sapiens
aagaagaagctataaaaccccctttgaaagcataagctgtggccatgactactgaagtaggctctgtgtctgaag

SEQ ID NO: 312385 - DNA, 51 bp, Homo sapiens
cgcagtggtcgcttcttctccttgccacagagctcctgatcctggcccatc

SEQ ID NO: 312386 - DNA, 88 bp, Homo sapiens
gcagagcgttcctcatggagctggcccgcaggaaagggttcagggttgaaaatgagctcagataacgaaggaggcccaacttcattca

SEQ ID NO: 312387 - DNA, 75 bp, Homo sapiens
actggactcatggaggctgagcatttattcaggtgtgccacggaccacaatgtggacaacaccacagagatgctg

SEQ ID NO: 312388 - DNA, 87 bp, Homo sapiens
gctccaacagggatgcgctgagcgatttcttcgaggtggagtcggagctgggacggtgtgtggaggtcattgcaaaggaaggacaaa

SEQ ID NO: 312389 - DNA, 51 bp, Homo sapiens
gggaagcgcgcacctgccaagcaggtctgaagaactgttgcccaattcaac

SEQ ID NO: 312390 - DNA, 90 bp, Homo sapiens
agctctcagcggctgcgaagtctgtaaacctggtggccaagaagatgagaatgtgcctactgctcctgatcctccaagtcaacatttacg

SEQ ID NO: 312391 - DNA, 75 bp, Homo sapiens
cgggagaggcaccaaatctggcctgggggcccgagaagcttcctctcagattgacttgatgcacaacatcacaaa

SEQ ID NO: 312392 - DNA, 51 bp, Homo sapiens
ggaggacaattcaccatagttttctttaagtcataccctaatgatcccagc

SEQ ID NO: 312393 - DNA, 87 bp, Homo sapiens
gcccttcgagccatcccccccgcgcagctgcaggaggaggccttcatgtcacagcaacactgcccactcagcgaggaagcagccgcg

SEQ ID NO: 312394 - DNA, 100 bp, Homo sapiens
cgccagcggccgagcgggcggcttcctggcctgggcgctccggtggcggcggaggtattagaaaactactcggatgctccaatgacaccaaaacagattc

SEQ ID NO: 312395 - DNA, 87 bp, Homo sapiens
cagatcctgagacccggacagtggcagtgaaacaggttgcccccaagtttcctggcagtgtgtgatactgaggaggtgagcttgttt

SEQ ID NO: 312396 - DNA, 100 bp, Homo sapiens
ggccgcgaaccgcagtatcatgctggccaagaagatcatcattaaggacggaggcacggctggcagtgatggtgaaagcataggaaactgccccttttcc

SEQ ID NO: 312397 - DNA, 98 bp, Homo sapiens
gagcccggagggaaccggcgacgaggggaccatgtaccgggacccggaggcggccagcccaggttgggcccgaaggcatcctgcagaacggggctgtg

SEQ ID NO: 312398 - DNA, 100 bp, Homo sapiens
ggactgccacgtccaagcaaaccgggaaaggagaggatcccggagccggtctccggcaagaatatgcagccaccacgtctcggcgcagttctggttcatc

SEQ ID NO: 312399 - DNA, 122 bp, Homo sapiens
gccatcgaaatgccctcacaccagacctacggagggagctggaaattcctgacgttcattgatctggctcattggtgggcagtattacttatgggaattgctctgatcatgctaatggctgg

SEQ ID NO: 312400 - DNA, 98 bp, Homo sapiens
acaagacgactcaataggaggaaggtgcgagaagatgtactaaattcattgaataacaactttcttcaaacgctaaatcaagcttggaatgatcatca

SEQ ID NO: 312401 - DNA, 100 bp, Homo sapiens
ttctacaccaccgccacactcatcatagccttcacctctgcagataagaaacctgatcgggaagaaattcagatgagcaatatgggatcaaacacaaaat

SEQ ID NO: 312402 - DNA, 100 bp, Homo sapiens
cagttcaccaccgtggtggccgacacgggcgacttccacgccgaggcctgcctggagccccagatcaccccttcctactacaccacttctgacgctgtca

SEQ ID NO: 312403 - DNA, 50 bp, Homo sapiens
cgacgtcttgaagacttccgagtagatggaagacatgtaaggaatttgca

SEQ ID NO: 312404 - DNA, 98 bp, Homo sapiens
tcggggcagccgctcgcccctcttttccatgtatccgtccagcgctcctttaccctcatcgtggaggcctgggactgggacaacgataccaccccgaa

SEQ ID NO: 312405 - DNA, 102 bp, Homo sapiens
ggaattgagagtcacagaggaaggacagtggagtctggcatcttattgaacagctttgctgagccatcaaggtctaatggaagcatggttcggcattcttca

SEQ ID NO: 312406 - DNA, 50 bp, Homo sapiens
agaaccctgggattttctactattgtctacaaagcctggctctgttccca

SEQ ID NO: 312407 - DNA, 100 bp, Homo sapiens
tcacagctgcccattgcctaaagaaagctctgcgtgcctcttgctgtgccctacctggacaaacccccaactccgctccacttctaccgggactgggtct

SEQ ID NO: 312408 - DNA, 100 bp, Homo sapiens
catcattgctctttgtactaagaacctggaacaccctattcagtggctgtacatcacctgcagtaacaaatgtggcaattattttggatctatcacctgt

SEQ ID NO: 312409 - DNA, 50 bp, Homo sapiens
gacaggaaagtgtaacatcagttacagaataagatgctcccaagtccctt

SEQ ID NO: 312410 - DNA, 100 bp, Homo sapiens
cccagtcggtgctccggggaggtcacctgacgaggagaaacgcttcgttaagggactcaggcagtacgggaagaacttcttcagaattagaaaggagctg

SEQ ID NO: 312411 - DNA, 100 bp, Homo sapiens
catatagtattttactaggtcatgaagggaagatggctgtggaaggtgttttaaagaatactggccatggtgcaacttctggttttggcagtgcttttac

SEQ ID NO: 312412 - DNA, 85 bp, Homo sapiens
agagcaatgacattgggggcctgtggaaattttcagtgatggaactgtactggaacaatgggagaagctggtagcttataggaag

SEQ ID NO: 312413 - DNA, 75 bp, Homo sapiens
ccggactcaaccgcgtaaaagccatccggctgtccttagagcaagccctgcctcctgagccaaaggaagaaaatg

SEQ ID NO: 312414 - DNA, 100 bp, Homo sapiens
cttgcttggaattctgcccactctgcggagttagcagtcacgacctccagcacaggctaaaaggtcagattcctgaaattaaacagactttggaaattct

SEQ ID NO: 312415 - DNA, 118 bp, Homo sapiens
gcgtaagcggactgcagccgcgagctcctggaggcggcgggatggaggcggcggccgacaatgcagatcttcgtgaagactctgactggtaagaccatcaccctcgaggttgagccca

SEQ ID NO: 312416 - DNA, 75 bp, Homo sapiens
ttgagagagtatttcgggcacacaacttgagttggtggaaccaagtggctggattcatgttcccttaactgacaa

SEQ ID NO: 312417 - DNA, 82 bp, Homo sapiens
ccaacatgcctcaccctcatctatatcctttggcagctcacaggtgacaatctccaatagacttgtgtcttcaccttgctgc

SEQ ID NO: 312418 - DNA, 100 bp, Homo sapiens
tctcaatgaactgggacgccacaaggaggcctacgagtgcagcagccggtgttccctcgccctgccccactggtgtttgagtccgatgggcctcggggtt

SEQ ID NO: 312419 - DNA, 100 bp, Homo sapiens
gacggtccaaatttggaatgaaggtttgcaatggattttggataaacaagatctgttgaaggagcgccaaaaggatttaaagtttctctcagaggaagaa

SEQ ID NO: 312420 - DNA, 100 bp, Homo sapiens
gatgccctgcagtacctgcagaaggtctctggagacatcttcagcaggaaatctggcattttttaaagtttgcgccccacaaagaggaaatattccaaag

SEQ ID NO: 312421 - DNA, 82 bp, Homo sapiens
tggtgaagacatgacgaccctggactccaacaacaacacagcatttaaatcaaacggtattgagatggattgggttatgaaa

SEQ ID NO: 312422 - DNA, 80 bp, Homo sapiens
cgcttcgaaagcatcatccacgagttcgacccgtgatccagacatttaatgtggatgcaccatgccagaccgtggaagat

SEQ ID NO: 312423 - DNA, 100 bp, Homo sapiens
ctggtcgccatcaagaaagtattgcaggacaagagatttaagagatagatgattttccctcttatttccaccagtttggcttttcagggaaggtggcagc

SEQ ID NO: 312424 - DNA, 88 bp, Homo sapiens
ctccttatgctgggtgaaaacaaagtggaatactagagcaaagagagagaaactgacagagttaatgtttgaacactacaacatccct

SEQ ID NO: 312425 - DNA, 83 bp, Homo sapiens
aggaggaaacagctggctaagctcatcattgttactgtattgcctaagtgtaatcttgaacatgggcggtgctgtgagtgctg

SEQ ID NO: 312426 - DNA, 99 bp, Homo sapiens
cttaatctgggccaaaaggaatgaccctagccagactcagggatcaaagagcaaacagattcagtggcctgcattggaacagaggcggctgagccagga

SEQ ID NO: 312427 - DNA, 80 bp, Homo sapiens
tgcctttcaccttccaccatgattgtgaagccttcccagacatgtgacacagctttcagtccagtgtaaagctgttggag

SEQ ID NO: 312428 - DNA, 50 bp, Homo sapiens
ttcagtctggatacctccatgtgatgtaaattggagtcaaccaggtgaaa

SEQ ID NO: 312429 - DNA, 82 bp, Homo sapiens
cgagcctgctagtgcgccacggctcggatgtggacgagtgctcactagcagaaaaaacctgtgtgaggaaaaacgaaaactg

SEQ ID NO: 312430 - DNA, 50 bp, Homo sapiens
acgccaacctcaggcgagatggaaaacaatgaagagtcgttatatggaac

SEQ ID NO: 312431 - DNA, 83 bp, Homo sapiens
ggaaaatgtcctcagtgcaagagcaacacgtttccacaggccagaagcggactcctagaagaggggagcagcaaggatggaat

SEQ ID NO: 312432 - DNA, 50 bp, Homo sapiens
gtgccatcatcgtggtagttattgtaagtcacaccgacaaatctgaagcg

SEQ ID NO: 312433 - DNA, 98 bp, Homo sapiens
ctggcggccaacgggccaggtaggatttccgggagaggctgctgtggaggctgaggaggcggcggcggagatctgggggttatggttttgtgaaattc

SEQ ID NO: 312434 - DNA, 78 bp, Homo sapiens
tatgatgataaagactacaggagaattcggtttgtaggtcgtcagaaagagagcagcccgacggccatggaggctgaa

SEQ ID NO: 312435 - DNA, 130 bp, Homo sapiens
ctattcaccgtgggcagcagagggatggctgctcagctgctgactgatgaggcactgactcggggtctaaatgtgagaccaagaagttacctccaaatcaatgcaacaaatctgggcaaagcatctgcca

SEQ ID NO: 312436 - DNA, 97 bp, Homo sapiens
atagttggactatctactgcattagctaatgccagagaccttgctgattggctcaatattaagcagatggacagatggatgacttggtgtgctttga

SEQ ID NO: 312437 - DNA, 75 bp, Homo sapiens
gaataaccctgcagaaaatggagatgccaaaacagaccagataactgcctacaacaggcgcacctttgagactgc

SEQ ID NO: 312438 - DNA, 100 bp, Homo sapiens
cttacggcaagcctgtccatcatggtgttaaccagctaaagtttgctcgaagccttcagtccgttgcagaggaacggcgtgagcgagaacagcaggactt

SEQ ID NO: 312439 - DNA, 100 bp, Homo sapiens
cttacctatttgatgaagatgtcttttgaaaggtgtactgcaaggaacaaaatgtttgtaaattctccttttaccaaggggcccatcctgatggagctgc

SEQ ID NO: 312440 - DNA, 96 bp, Homo sapiens
gcagaatacagagatatggaatcaggaaactaaatatattttgccaactttggaaaaagaattattcttggcagagcacagtgaccttgaagaagg

SEQ ID NO: 312441 - DNA, 82 bp, Homo sapiens
ggaaggaaaaacctgtatgtggaaccacctaaaatgatgcatcctgttgccagcagtaatccagctttctgtgggcctggca

SEQ ID NO: 312442 - DNA, 100 bp, Homo sapiens
aaaagagaaaagaaatgaaccagtattcttaaattgatttcaagtttgaacaagaaatacagtccatactgcccggaatctctgcaaagctgacttggac

SEQ ID NO: 312443 - DNA, 100 bp, Homo sapiens
cgctggcccaacaggcaaaaatgaagaaaaaattcaggttctaacagacaaaattgatgtacttctgcaacagaattggcagagggggtcgatttgggag

SEQ ID NO: 312444 - DNA, 100 bp, Homo sapiens
ctcgaattgctgtggatgaagttcactgctgtagtcagtggggacatgatttcagacctgatgaaccagaaactcgagatgcatggtgggcagaaatcag

SEQ ID NO: 312445 - DNA, 75 bp, Homo sapiens
gtttccttaaagtgcctcgatctaaggatgaccctggaaaggtgcatcatttctggcatggcttcaggaagcatt

SEQ ID NO: 312446 - DNA, 75 bp, Homo sapiens
cacactgctgtttaccttggcgaggcctttcaccaagtccatgaaagggtctcactcttttgcccaggctggggt

SEQ ID NO: 312447 - DNA, 90 bp, Homo sapiens
tcatggggcccaagaaaaagcacctggactatatacccctgctccctggctccccacgccggctgagccctcaggcagggtccagagggg

SEQ ID NO: 312448 - DNA, 100 bp, Homo sapiens
caaaaattgtggcctccatgtgggatagtcttggagaggagcaaaaacaggtggtcctggctctgccatatgacacccccgtgcccggctacatgaataa

SEQ ID NO: 312449 - DNA, 90 bp, Homo sapiens
aggcttcaatgaagggctgtgggagatccagaacaacccccacgccagctacagcgcccctccggttttgcacactagggaccaagaagc

SEQ ID NO: 312450 - DNA, 100 bp, Homo sapiens
tgaccctcgaaaaaaagatggagccctgcatatgattggctctttagctgaaatacttctgaagtggcaccctgtgctgcgcacactaaagaaccgcatt

SEQ ID NO: 312451 - DNA, 74 bp, Homo sapiens
cgccagcgaatacatgataaagctgttgctctggaggtcacaatttgaagaactctgtgctgaacttctgcaaa

SEQ ID NO: 312452 - DNA, 51 bp, Homo sapiens
ccacccattgtgtcttctcaagaagccacacaacagccacttagtttacca

SEQ ID NO: 312453 - DNA, 76 bp, Homo sapiens
aagaatagcaaaaaaaagggggccaagaaggaaggaaggtgtcttgctgcaggtaactaatgaagaagtggtcaac

SEQ ID NO: 312454 - DNA, 60 bp, Homo sapiens
gctcgtcgcgctccgcacaaagtgcatctgcagacgcagcaggaggtgaagctgcgcatg

SEQ ID NO: 312455 - DNA, 75 bp, Homo sapiens
ctggaagacgcgctcctgcgccgattttgcaagaacgaggctcaaggatgtgagggacacagtattgacagctga

SEQ ID NO: 312456 - DNA, 74 bp, Homo sapiens
tcttcagggaccacactgcaattctggatttcctgccagtgcatccactctgggagagcgtggacctggttcct

SEQ ID NO: 312457 - DNA, 101 bp, Homo sapiens
ggccttcggaaagagagagcaggctgaagaggaacgatatttccgccttgcagtctcatcctactcaagtgtggctctgtatccaacaacagtcttggaga

SEQ ID NO: 312458 - DNA, 98 bp, Homo sapiens
cagcctgcgtggcctcaatgtggcagaggtccagaagagtgagttcagctgctcagcggcctggatgaaagagcggacttcacctggggcgattcact

SEQ ID NO: 312459 - DNA, 100 bp, Homo sapiens
ctacctgcacgacatcatcacggaggttgcttagccagacaatgaaggatcatctagtaagagtagcaaatgaagctgaatttatcctgagcaggcagag

SEQ ID NO: 312460 - DNA, 74 bp, Homo sapiens
gcctcttccaggacttcaacccgaggaattgtcttagaagaaagaaggcaagccaccattttacccacgtaaat

SEQ ID NO: 312461 - DNA, 74 bp, Homo sapiens
gtcctcgtccgtctcatcaaagctggaccaagctgactgaaagattcttcaagaatacaccttggcccgaggct

SEQ ID NO: 312462 - DNA, 95 bp, Homo sapiens
tcaagcagacattccagaaatgctgttagaaggtcctgtacatgggattgtcaccaggacctagactgcaaatgcacatgaggtctcagcaatgt

SEQ ID NO: 312463 - DNA, 108 bp, Homo sapiens
agtcacacacactggcagactccatccccagcagccctgcttcttcacagttaactactttgaaagaacatttgagaatccacagtggagaaaagcctcacctttgta

SEQ ID NO: 312464 - DNA, 99 bp, Homo sapiens
gtggagggcaagcgtgtcggcaagtccttcagccctgccagggacctgcctgacagcagcctgatccagggcgcggcccacgccatcgtggccgccatc

SEQ ID NO: 312465 - DNA, 100 bp, Homo sapiens
ctgggaggtcatcgaaggctaccgggcccagcacagccagcaccgcacgccctgcaagggaggcttctccagggaaagtgaccgaggcagtgaaagaggc

SEQ ID NO: 312466 - DNA, 101 bp, Homo sapiens
caagtttcacatccttgtctgtgaagctaaactcaatgctgctgtgtgggaagaagatttgtaaagaaaactcttaggagccctctggcacaaatggaaga

SEQ ID NO: 312467 - DNA, 50 bp, Homo sapiens
gcctcattggacagcattcgagatttgaacatggaattcaatccttcaga

SEQ ID NO: 312468 - DNA, 82 bp, Homo sapiens
cgagggctgagttgtccgcgaggccccgcgctcaagccgccttctcctgccgatgacttcaaacctgcttctattgacactt

SEQ ID NO: 312469 - DNA, 100 bp, Homo sapiens
ttgccgctgccgctgccgccatcgtgccagcccctcggggcgtctctggccgagcctctttttgtggaaaacgacagcagcagcagtggcctggaagacg

SEQ ID NO: 312470 - DNA, 100 bp, Homo sapiens
ctcatgagcagcatggacgacctgatacgccactgtaacgggaagctgggcagctacaaaatcaatggccggacgaaaggtccaatgtgtgacttgctgt

SEQ ID NO: 312471 - DNA, 100 bp, Homo sapiens
ctgagttggtgctgaaaacagactcctgtgatgtaaatgactgtgtccagcaagttgtggaacttctacaggaacggatccccttggaaaggacttccag

SEQ ID NO: 312472 - DNA, 100 bp, Homo sapiens
cgggtccaggaaagaggaggaggaagacagcacattcaccaacatttctcttgcagatgacatagctacaagagactgtgaaaaggaagttggaaggagc

SEQ ID NO: 312473 - DNA, 83 bp, Homo sapiens
tcatccgttcttccgaagatcctaatgaggacattgtggagagaaacatccgaattatggctgtgcttaagagtaaaacttca

SEQ ID NO: 312474 - DNA, 75 bp, Homo sapiens
agtgaattaggagaacttggaaaggttcagtttcgtgacccaatggagatcttcgtggatgatgagacgaagttg

SEQ ID NO: 312475 - DNA, 100 bp, Homo sapiens
agtactcccgcagcctggagaagctggctgagcgcttctcctccaaaatccgcagctcccgggagcaccagttcaagtgtggaaacaggaagagaactag

SEQ ID NO: 312476 - DNA, 74 bp, Homo sapiens
ctgcccgctgtagatgagaaactcaggctgaggcctggaatcccccaccacccacaggagttctgtgctgagcc

SEQ ID NO: 312477 - DNA, 75 bp, Homo sapiens
gggttcctccaaatgttggctgaaattcatcccaaggctggtctgcaaggtggagagattcaaccagttagcgtg

SEQ ID NO: 312478 - DNA, 75 bp, Homo sapiens
aagcttgaaagacttggtaatggcgacgggtttggcatggaagaggagatggttcgtgttacgcagtggccgttt

SEQ ID NO: 312479 - DNA, 100 bp, Homo sapiens
cacgagccaggaactgcgcagcctcttcgagcgccgcggacgcgtcatcgagtgtgacgtggtgaaaggatctcgaggacctggaagaagcagaggagcc

SEQ ID NO: 312480 - DNA, 100 bp, Homo sapiens
aatctcgatgctggcctggagcagaaactgagctggaccactggagcctcggtgaggggaagcaatgaggctccccaagaacacacctgaggaaaaggac

SEQ ID NO: 312481 - DNA, 75 bp, Homo sapiens
ggagaggctgcggctgaaacagcaagaactgcttcggcaggttggtgttcgaggaagagacattgttgttcttgg

SEQ ID NO: 312482 - DNA, 100 bp, Homo sapiens
gggtctggaggatcagccccatgttcaaagcctgattcggactccaccaaacactcaactccatcgaatagctccaaccccagcggcccaccgagcccca

SEQ ID NO: 312483 - DNA, 100 bp, Homo sapiens
tctccgcgttcccagcccgggtccccgcgttcacagccccagcgcagttattggagggtggtgaagagaggatggagacaccccaggaagaccacctcag

SEQ ID NO: 312484 - DNA, 82 bp, Homo sapiens
cacgcttgcttgcatcctggaatattctcaaccagatgcccagacctggaggatccccagggtcttctcatggttgcagcag

SEQ ID NO: 312485 - DNA, 75 bp, Homo sapiens
cgggtcttgggtcctccgagagcagcagcgaagtttccaagggtcacttgtgtctcgtccgtgggaagaccgggg

SEQ ID NO: 312486 - DNA, 87 bp, Homo sapiens
ttggtgctgttggcatggcctgtgccatcagtatcttaatgaaggatctggttatggatatcctaagagtattgagcacaccagact

SEQ ID NO: 312487 - DNA, 98 bp, Homo sapiens
tctcagcaggcctttgctggacagatgaagagtgacttgtttctggatgattctaagaggtaaggggcctggataccaagaagtgactgctcatctaa

SEQ ID NO: 312488 - DNA, 75 bp, Homo sapiens
gacttccccgttagaactcgcgtttccacttcagagatctggctggagcattggatttgctaaaggagcttaaga

SEQ ID NO: 312489 - DNA, 75 bp, Homo sapiens
tttggagcccattttagaggcatctgttctatcttcccatcataaaaaacatcaaagctaagccagaagatttat

SEQ ID NO: 312490 - DNA, 99 bp, Homo sapiens
atgaagcttctgggtgtcactatggagctctcacatgtggaagctgcaaggtcttcttcaaaagagccgctgaaggatctagtgaaaagccatttgatg

SEQ ID NO: 312491 - DNA, 87 bp, Homo sapiens
agcacctacgtcccgctgccgtcgccgccgccaccatgcccaagagaaaggtaacacgtacacagacctctcggccggaatctccag

SEQ ID NO: 312492 - DNA, 99 bp, Homo sapiens
gcagcagcagccgcggagcagtagccgccgtgggagggagccatgaagcattacgaggaaacattggcaaatttggagcgacagatctatgcttttgag

SEQ ID NO: 312493 - DNA, 100 bp, Homo sapiens
acttctttgtaatagaattcgaggaaagtgccacacgctagaggctgtgatggaatctgaaatgaagtttgacaaggaccatgatggactcattgaaaat

SEQ ID NO: 312494 - DNA, 75 bp, Homo sapiens
gcagctggcccggctgggcccggggcgcgcagctgcccgccggggcggggaaaatgtttataggaggccttagct

SEQ ID NO: 312495 - DNA, 90 bp, Homo sapiens
cctgtctgggtctcagccgccaaagaccccgtccggtagatgagacccacccatcggagccaggctttgaaggaactgaccgcagtgtgc

SEQ ID NO: 312496 - DNA, 89 bp, Homo sapiens
agagtgttgccaaggccaaatatgaatttttatttggcagatctgaagggaaagctccagatactaatccttgccagcacattacagaa

SEQ ID NO: 312497 - DNA, 75 bp, Homo sapiens
ctgggatcccggccaccagcaattgtccgttgccagagtctgccctccgagacctcatcgtagccaccattgctg

SEQ ID NO: 312498 - DNA, 100 bp, Homo sapiens
gtgaatcttgtagtcagaaacttgaaagagagaataaccgttgtaacatcagtcacagcataaatcccatgctgttggcccccaggaaatccgagagcga

SEQ ID NO: 312499 - DNA, 96 bp, Homo sapiens
tagtgatctctataatggttccagtatagtctctagtggcattggcctggccctctgcaagcggctgctggcggaagatgatgagcttcatctgtg

SEQ ID NO: 312500 - DNA, 90 bp, Homo sapiens
gaaaaagcaagagtttgttatatagcagtgctggagaatctggtaaaagcaccattgtgaagcagatgaggatcctgcatgttaatgggt

SEQ ID NO: 312501 - DNA, 50 bp, Homo sapiens
cagattactgagagtcttccgttactagaggcggatttccctgactgaag

SEQ ID NO: 312502 - DNA, 80 bp, Homo sapiens
aaggaattctgtgccacctgccgtccggcaattccctttgccagggcccccagatgccgacggccctctctacctcccct

SEQ ID NO: 312503 - DNA, 75 bp, Homo sapiens
agcccagacactgagagccgctttcatcaagtaagtacaaggtggactgtgcatgcctcaaagaaaacccagagt

SEQ ID NO: 312504 - DNA, 90 bp, Homo sapiens
agacttcatcatctgcctggggggagacgggacgctgctgtacgcttcctcgcttttccagagtacaggggctcaggtccaggtggcagg

SEQ ID NO: 312505 - DNA, 83 bp, Homo sapiens
tattgggccatcttggctccaccaccctgaacactctgctccagccaaggtggtgagggcagctgttcctaaacagcgcaaag

SEQ ID NO: 312506 - DNA, 82 bp, Homo sapiens
agagcgtttggaagatctggatacctgtatggaggaaaacggcaaaccagttaaatctcagggaattcctattgtgtgtcca

SEQ ID NO: 312507 - DNA, 71 bp, Homo sapiens
ttgtggaggtcgagtgtcattacgctcaaacaaggttggaagtacaagcagatgtacagaaagaacggtac

SEQ ID NO: 312508 - DNA, 51 bp, Homo sapiens
tcatatgaccatgctcacaagcagatttcttcggtgcagaaaaaaaatgaa

SEQ ID NO: 312509 - DNA, 100 bp, Homo sapiens
ctacttgcaggtcagcttgtctcacataacaggtctatgttaacaatgaatgggcaaccagtgttggggaaggagggagctttggagaacttgctttgat

SEQ ID NO: 312510 - DNA, 75 bp, Homo sapiens
actcaacttcaaagacgttctcaaggagaaggcagacctgggtatccgttacagcactgatgtgagtgtagatga

SEQ ID NO: 312511 - DNA, 98 bp, Homo sapiens
gcatggagtttcatttcacgacaatgacatattctccggtcaagtgaacaagtttccagatgtttgagacggaggcagatgagaagagggagatggcc

SEQ ID NO: 312512 - DNA, 88 bp, Homo sapiens
aggatctggtgtaccaggcgaagctggccgagcaggctgagcgatacgacgttcttggccaggctgactgagagatttgtgctgggag

SEQ ID NO: 312513 - DNA, 82 bp, Homo sapiens
attatccttttctgggtgctatgggtgatcattccaagagtgaaagaacttgtcctggacaacagtcggtcgaatgaaggca

SEQ ID NO: 312514 - DNA, 97 bp, Homo sapiens
ataccttactgctcctgcaccacggggacttctcagcagaggccaacagagcacttatggcaaggcatctcgagggggtggcaatcaccaaaacaat

SEQ ID NO: 312515 - DNA, 75 bp, Homo sapiens
actgccttcagcagcaccgagactggctctgcggagggagaggctcttctgcagaagctgcagcagctgctgggc

SEQ ID NO: 312516 - DNA, 76 bp, Homo sapiens
aagcacgaaaaatgctaacaacagcttcacgtcaaaacttctttgagacgatgctgtcggccttggccaatcggag

SEQ ID NO: 312517 - DNA, 75 bp, Homo sapiens
ataccaacttatacttcctggcgctgaccttctttgtcgcagcgttccatgtactccaaagattcaggtttactc

SEQ ID NO: 312518 - DNA, 100 bp, Homo sapiens
gtccgcgccgcgaggaggaggccctgctggtttctgtgcgggagcgagcccagggcgtggtgctgaaagtgctcacaaacttcaagagcagtgagattga

SEQ ID NO: 312519 - DNA, 82 bp, Homo sapiens
actggaccaagatcgagcccagcgtcaacttcctcaagtcgcccaaaggccctgggaggagcggggacactgaggacctctc

SEQ ID NO: 312520 - DNA, 74 bp, Homo sapiens
tcagtagtaaccttggtgaaacctcatttagtaaaggcaggacaagcgtttagaaagtttcttccactctttga

SEQ ID NO: 312521 - DNA, 95 bp, Homo sapiens
cgggcgttttcttggatgaattgcttgctttggaggactttccttatcccagttgattgtgcagaatacactgcctgtcgcttgtcttctattca

SEQ ID NO: 312522 - DNA, 100 bp, Homo sapiens
ttttcaccagtcacatctcttactactgctagtcgctgcaacactcctctacagtttgagctgcaggactcatgcacacgttcaatgcccacgccgccac

SEQ ID NO: 312523 - DNA, 100 bp, Homo sapiens
ctactctgtgctgtgcgagctgctgcccgcaggagtcccgtccctggccgcctgcctgcagttgcttctacgcggtggccaatggcatcgaggtctacag

SEQ ID NO: 312524 - DNA, 90 bp, Homo sapiens
aagaattctctgaaggaaccaaatttccatggtgtcagtgattcatattcctgataggacttataaactatcctgcagaatattgtatca

SEQ ID NO: 312525 - DNA, 100 bp, Homo sapiens
tcaagccctggctcaaaatagttcttcacacacccccattcggcgtagtacccagagagctcaagatgtgtggcagttttcggatggaagctcgagagcc

SEQ ID NO: 312526 - DNA, 75 bp, Homo sapiens
ccgcccaccaacctgcgcagcgtgtcgccctgggcctacagcccgaccctgcccgccctggactggcagctgccg

SEQ ID NO: 312527 - DNA, 100 bp, Homo sapiens
ctctaggaaacatatgttacgatagcctgtcccttttgatgagaagaataagcctcattctgattcaacagcagagatcaaagaaaagacttctgttttc

SEQ ID NO: 312528 - DNA, 96 bp, Homo sapiens
aaggatctggggatcttcgcactatcccaaggattacggtgggatcatggcagggctgggctccgatccctggtggaagaaaaccctttacttgac

SEQ ID NO: 312529 - DNA, 96 bp, Homo sapiens
atgtgcgtggctacggtcctcacggccggcgcttacctctgctacagggagaaccagcagaaatccaccaatgtagtctatcaggcccaccatgtg

SEQ ID NO: 312530 - DNA, 50 bp, Homo sapiens
ggaggagctgagcgctgatgaggcaatactgaacactgcgcagcttgcag

SEQ ID NO: 312531 - DNA, 80 bp, Homo sapiens
atgcctatgccatctgcaaatacgcctttctcatatccactgccaaagggaccagtatggatttaacagtcacgggcttt

SEQ ID NO: 312532 - DNA, 100 bp, Homo sapiens
cacctgccatcaccactgtaacggtgccaactccaatttaccaaactagcagtggacagtataatttagctttggagtcaaacccttctgaccatccaag

SEQ ID NO: 312533 - DNA, 75 bp, Homo sapiens
cctcccaccgtgattctgaggcctccccaaccatgtgcaattgattttgacacttcatgacatgtcattatttag

SEQ ID NO: 312534 - DNA, 60 bp, Homo sapiens
tgtttccaaccactatggagggatgggaggaggacactgccaagctataacatcagaaat

SEQ ID NO: 312535 - DNA, 75 bp, Homo sapiens
gcgcgggatcccagcctcaggcgtgcgcggacggtgtgcgggctgagtttgagaaagctgcagaggaggttaggc

SEQ ID NO: 312536 - DNA, 109 bp, Homo sapiens
tcaaagagcagtgggggttgctgacccagaggagagttctccaaacatgatcgtttactgcaaatttgcctgagaatacagatcaacccacagaacaaagcggatttcc

SEQ ID NO: 312537 - DNA, 90 bp, Homo sapiens
gcaacagctctgccggctggaagggctccaaggtcctggccaagaaagagctggcctatgtcccaattatcggctggatgtggtacttca

SEQ ID NO: 312538 - DNA, 71 bp, Homo sapiens
ggagcataggaggaaaattcatcatctggtatctcgggggagctttgtgccttgatggatcaagttcatca

SEQ ID NO: 312539 - DNA, 90 bp, Homo sapiens
caacagaatacactggacctgaaagttatgtggctcaaatgattgtggtgacatttacaaagaggaaatttgggttgatgaagaaggctt

SEQ ID NO: 312540 - DNA, 83 bp, Homo sapiens
ttcatgatcctggccagcctgctcatcgcctactgcagtcagaagttgagtagcaggggcctaggagggctcgaagccttcac

SEQ ID NO: 312541 - DNA, 100 bp, Homo sapiens
atactcctcccagtgacgggtctggagtgcgtgggggaccggctgttggcgggtaagagcaaagaggcggaaattaagagaatcaacaaggaactggcca

SEQ ID NO: 312542 - DNA, 111 bp, Homo sapiens
ttgggacacaggggtctttcgaggcccggtactacccaaacgtcagtcgaatcacaggcaggagaaacacagtggagcgaatgtatcgagacacattctcctacaactttt

SEQ ID NO: 312543 - DNA, 88 bp, Homo sapiens
ttccgtggcctcgcccaggccgacgggtgcaccccagacatggatgtcatcctcaacattcctgtggaagagccactacccttctaga

SEQ ID NO: 312544 - DNA, 100 bp, Homo sapiens
gcaacgggctcatcaactcctacgaggacaaaagcaacgacttcgtatgggtgagcccatcactttctgtgaggagagttttgtaaagcaccgctcaagc

SEQ ID NO: 312545 - DNA, 101 bp, Homo sapiens
tgaggagcagacgagtggccaggcttctggggctgactcaactggaactgaagctctcttcccacgaggaggccttgtcctttgtgtccctggtagatggc

SEQ ID NO: 312546 - DNA, 90 bp, Homo sapiens
tttaaaaattaaacttcaacacaatgagatgaaagctcaagaagtggagctggctttggaagaagtagaaaaagctggagaagaacaagc

SEQ ID NO: 312547 - DNA, 75 bp, Homo sapiens
aaaggctgctctgaagcgcacgacctccgactactttctccttcaaggtaaaccgtcctattggcagggtacaga

SEQ ID NO: 312548 - DNA, 75 bp, Homo sapiens
tggacgattccagccaatgaagctgtttgctatatgcctgaatcaaacccatcttcccagaaggaaagatgtaac

SEQ ID NO: 312549 - DNA, 100 bp, Homo sapiens
ggaagaggcattgaggactttccttacctgtttttccagctcacccactgccagcagagtgcaaggatgatgctgaaaggaataacaaggcttatctcta

SEQ ID NO: 312550 - DNA, 75 bp, Homo sapiens
aaagtactccaaaagtttcagtgatactctgaaaacgtattttaaagatggcaaatgccgctcctacgaggactg

SEQ ID NO: 312551 - DNA, 100 bp, Homo sapiens
tgtttatgcattaaagaattatgggttctacttattcatcttctagaccacagaagtaaatggtttgtctcggaaggcagccattctacaaaagtggaag

SEQ ID NO: 312552 - DNA, 101 bp, Homo sapiens
gatcatgtatgagatgctcatcgtatcatttccatccataatggtcccactggcccggattttgcccaataagaaccgagacgaactgaatggctttttta

SEQ ID NO: 312553 - DNA, 75 bp, Homo sapiens
tgaccgagagcgtgaccgagagcgcgaatatcgtcatcgttagaaggctgagcagtccaaagtcctgagcgccgt

SEQ ID NO: 312554 - DNA, 103 bp, Homo sapiens
gagactcatgagatcgtggctctgaaacgggtgaggctggatgacgatgatgaggtaaatggttgcagttttgtgatgagaacaggaaagcctacaaatttat

SEQ ID NO: 312555 - DNA, 100 bp, Homo sapiens
ccgcgagccgagggggaccggcgaccgctgccgaagcatgaagaaggggtaaggcgtgagcccccaagatttcacgtccaaaagaaactcttccttcaaa

SEQ ID NO: 312556 - DNA, 100 bp, Homo sapiens
tgctcatccattctcctgccacccccagacctcctcagctccagggttttggccaaattgggcgagggcacaaaataaccacttaccccttctcaccgag

SEQ ID NO: 312557 - DNA, 83 bp, Homo sapiens
ctgccaccagagtatcccatgaaaccaccaagcattattctcctaacgggctaattgactataattttcattgcttccggaag

SEQ ID NO: 312558 - DNA, 75 bp, Homo sapiens
cgccgcagaccccttcaagttctagtcatggtggacccaagtggagagattgtggaactggcgaaaggtgcatgt

SEQ ID NO: 312559 - DNA, 95 bp, Homo sapiens
gtgtcctgccatctgatattacaatctaccaccttattcagactgacttccttttggtagtactgcgtgatgttgttcaggcttatcctgaagtt

SEQ ID NO: 312560 - DNA, 100 bp, Homo sapiens
gcggggccgccggggccgccatggagcccgactcggtgattgaggacaagaccatcgagctcatgcgggctacattgagagacctcagctgattcgagca

SEQ ID NO: 312561 - DNA, 75 bp, Homo sapiens
cttggactgagtcctgcaggacacagtctacccatggtgttggaatgaatggaaataatgcagcagcagggaaaa

SEQ ID NO: 312562 - DNA, 76 bp, Homo sapiens
tccaacacgagaagtatatgtccctcacactgtgtacaggcaagaaactatattcagtctttgactcagatgccga

SEQ ID NO: 312563 - DNA, 100 bp, Homo sapiens
aaacaaatcaactaaaaacaaaattgccagaaaatctttcctctaaagtcaaactgatagggatgaggaagaaatgaccaaacgagatgacaaaagagat

SEQ ID NO: 312564 - DNA, 100 bp, Homo sapiens
ctgagggtgcgactccgccgcgatggtgacccggttcctgggcccacgctaccgggagctggtcaagaactgtgccgtattcacctggaccaacctgctg

SEQ ID NO: 312565 - DNA, 101 bp, Homo sapiens
gaagtgcagctgcctcagttcttagcgcagggctttgttcgcgggggtcacagctctcatggctgcagctagcgtgaccccccctggctccctggagttgc

SEQ ID NO: 312566 - DNA, 83 bp, Homo sapiens
ggattcaccacagtacttcacatcgtcgttcacatgggagatctgttggtaatctgaggatttttattctacgtcgtcttgac

SEQ ID NO: 312567 - DNA, 87 bp, Homo sapiens
acccaacctagtgggtgtaatacatcatgaactgcagggtgaaatgacaatggatgctctgttggctcgattgaaacttctgaatcc

SEQ ID NO: 312568 - DNA, 109 bp, Homo sapiens
aaggatttatgtcttgaagacaaaagacgcattgcaaacttaattaaagaactggccaggtcatcaccgagtggtcttctcacatcatccttcaggcagcaccaagagt

SEQ ID NO: 312569 - DNA, 100 bp, Homo sapiens
tttgtttgtcatccttgtacagcaatctcctcctccactgccactacagggaagtgcatcacatgtcaggatacctgcccactatgtctatccgcaggct

SEQ ID NO: 312570 - DNA, 50 bp, Homo sapiens
caaacttgatcaaactatgtcagagatagggtttcatcatgttggctcgg

SEQ ID NO: 312571 - DNA, 96 bp, Homo sapiens
ctgggattcgcgctgctgggcacccacggagcctccggggctgcgctaagctgcaacgaaaacgacgcagagcacctggaccgtgaccagccatac

SEQ ID NO: 312572 - DNA, 100 bp, Homo sapiens
ggcagcgcagtgcagatccgcaggcgcaaggcttcaggcgacccgtactgggcctactctgctggtcctatagtacccctcctcaggaatgtctccccag

SEQ ID NO: 312573 - DNA, 75 bp, Homo sapiens
cccggacgaaggtactcgcagcacttggagcgcagaaccggccgcgcccggctgacactgacatggagggcagtg

SEQ ID NO: 312574 - DNA, 101 bp, Homo sapiens
ggcgcgcctggccgcgaacccggaccctaagaagcaattctgtggtgttcttggtcacacatttatggagtttctgaagggcagtggagattactgccagg

SEQ ID NO: 312575 - DNA, 82 bp, Homo sapiens
aagaataagagatgtgattaatgtattccaccacctccgccagttaagaggaaaaaggtagttagaaacaaacctgtggcaa

SEQ ID NO: 312576 - DNA, 75 bp, Homo sapiens
ccagccagcagctccattgacaaggacgccgtggaggaccggctggacaggaacctgtggcccttcgtatccgac

SEQ ID NO: 312577 - DNA, 90 bp, Homo sapiens
cttctgatttcttttgcaaccctctgcattccatctctatgagccaccatgtcagatttaatgtactacaatatgttgtcccagaagtga

SEQ ID NO: 312578 - DNA, 100 bp, Homo sapiens
cacgtcatccgcatcaacaagatgttgtcctgtgctggggctgacaggatcaggagactagtagatggtagatcacagaaataaagcagatcgtcctttc

SEQ ID NO: 312579 - DNA, 100 bp, Homo sapiens
cctgtcctggatcgacaccctctacagcaaactggtcatgctgctggagtggtggtcctgcacggagtgtacactgttcacggaccaggccacggtagag

SEQ ID NO: 312580 - DNA, 83 bp, Homo sapiens
aggaagtcgcctctgtgctcgtgagtccagggatctaagacaatgcagatcttcgtgaagactctgactggtaagaccatcac

SEQ ID NO: 312581 - DNA, 75 bp, Homo sapiens
ctgtaatttctgttttcaaagaaatcaggtatggatcagctttgctcagtttgagttgtcttcaggaaaagaagg

SEQ ID NO: 312582 - DNA, 100 bp, Homo sapiens
ggccgcgcctggtgatcggctccttaccagctcacctctcaccgcgcatgtttggagggggaaatttgcagtggtgagaaaatgtataaagaaagattct

SEQ ID NO: 312583 - DNA, 100 bp, Homo sapiens
cgagtaagatggaagatgaggaggtcgctgagagctgggaagaggcggcagacagcgggttgatcatggccttgccaggttggtgacagtatattgtgag

SEQ ID NO: 312584 - DNA, 74 bp, Homo sapiens
tccacagtggcctttgatgaggctgatatctacctcaacataacggaatgatgagaagacagcagctgattaca

SEQ ID NO: 312585 - DNA, 98 bp, Homo sapiens
tccactggctcacctttaggcttctgacacttttacctacggatttctctctgatcaaacggacagttcaggactcagaatctaaggatgaatgttca

SEQ ID NO: 312586 - DNA, 100 bp, Homo sapiens
gtgctcagctcgctgctcatgtctgtgggactctgcacactcttcggcctgacgcccaccctcaatggcggagtgaagacatttccacctggacacctga

SEQ ID NO: 312587 - DNA, 90 bp, Homo sapiens
caacaagaaaactggctctgcaaaagaatgtgatttgtgacaaatgtgaagatagtggagttggagcagggattgattcatattatgaat

SEQ ID NO: 312588 - DNA, 100 bp, Homo sapiens
gcaggagcacgacatcaccctcttcgtcaagatacaaggcagatccaaccatccccaccgtggtcctacgatcagtcctaccaatacctgggatccattg

SEQ ID NO: 312589 - DNA, 74 bp, Homo sapiens
tgctggacccggcctgggagaagcagcagcgcaagatttctcacattggcaaactgagagattttcttctggaa

SEQ ID NO: 312590 - DNA, 88 bp, Homo sapiens
ggatgttggttctctttgtcattttcaacagtctgcaggttcgatacaagaggctgttttcctagcgtggcttgctgcctttggtaag

SEQ ID NO: 312591 - DNA, 96 bp, Homo sapiens
atgttgagttccggcttgccgcggcctgccgcaatggaaacatctatattctgagaagccatgcagtttggtcagctcctgacacacttggatacc

SEQ ID NO: 312592 - DNA, 101 bp, Homo sapiens
ggacccgcctgctgagtggacccgggtccggcattttgcacagaggccgtgtcttatgcggaatacagggtgggtgtgcatggattcgggcatgaagaaca

SEQ ID NO: 312593 - DNA, 60 bp, Homo sapiens
catctgcttacgagctgccctatgggaccaaggggagtgatctgggctgcaggagctggg

SEQ ID NO: 312594 - DNA, 100 bp, Homo sapiens
ttcttgcctggatttataccggttcagcaagtatgttctcagaagctatacactcattatctgatacttgtaatcaggcactgcctccttacctgtgagg

SEQ ID NO: 312595 - DNA, 82 bp, Homo sapiens
agccccgtgccccccacaaagaaaggacagagcgggatgccaccagcttgtccaaagggaagttccaggagctcctggtggg

SEQ ID NO: 312596 - DNA, 50 bp, Homo sapiens
aaccgtcagtttgagccagatgaagacttgcactatctgccagatgctgc

SEQ ID NO: 312597 - DNA, 82 bp, Homo sapiens
gtacactgaaattcatcctgagatgaggctgaagctcagggccctgtctgctctgtggactcaacagtttgtggcaagacaa

SEQ ID NO: 312598 - DNA, 76 bp, Homo sapiens
gcggcgactggcaatgtttggcctcaaaagaaacgcgaggagaggagacgccgtgagcgggacgaccagatgtacc

SEQ ID NO: 312599 - DNA, 100 bp, Homo sapiens
aatttccccagagcgtcttgatccttttgcagatggttgttgcttagaatatgctaccatgttggataaagaagccaaaccatacaaagttgatcctttt

SEQ ID NO: 312600 - DNA, 50 bp, Homo sapiens
acaggggccactcagagtcgcccgagaaggcagtcagggcgacagcaaga

SEQ ID NO: 312601 - DNA, 100 bp, Homo sapiens
cttcctcatcgtggccgagatcgtttacccagggttgatgataaccgctggccttattcattggattttaaatacattgaacataactgttcacataaga

SEQ ID NO: 312602 - DNA, 100 bp, Homo sapiens
caagagaagcagaggtgtggacgctgtgtatgcgttacatccttactattcaaagtgccatccacagacctgctgatgggcagcatgagcatcacctggg

SEQ ID NO: 312603 - DNA, 73 bp, Homo sapiens
gacagccctgtgtgacaccaagataagtaacaaactggcagacctttcacttcgtatccaacaaattgaaaca

SEQ ID NO: 312604 - DNA, 74 bp, Homo sapiens
ggcaaactaagccgattttccggaaaaaggtgtcagaaatggctgtttctgagctacctggtaaccccaacgct

SEQ ID NO: 312605 - DNA, 90 bp, Homo sapiens
gttgtgaaatccgatacttagaagggggtcatattagtgcttatctttttaaacaaggactcttcaggttaaagtattgcacaatcagct

SEQ ID NO: 312606 - DNA, 101 bp, Homo sapiens
tgctcttgaaaaagaaactgcatctaagctgtcagaaatggattcttttaacaatcaactaaaggaaagattctgaagcttggcggagaggggtgtgtgag

SEQ ID NO: 312607 - DNA, 83 bp, Homo sapiens
cccgctccgcagccccgggcacggcggaggcagcggagccctgggccatcggaaatctggcattttttaaagtttgcgcccca

SEQ ID NO: 312608 - DNA, 92 bp, Homo sapiens
caacggcggcctgcctccgggcacacccggctccccggacgcctcgcaaaatgatgcttcaacacccaggccaggtctctgcctcggaagtg

SEQ ID NO: 312609 - DNA, 100 bp, Homo sapiens
gaccaacgtggaggagctgtgggtggaaggaaaagtacccagatgccgtgtacctctcggaggggccctcctcctgctccatggggatccgcagcgccag

SEQ ID NO: 312610 - DNA, 75 bp, Homo sapiens
aggacccctacctggttaactttttcctagagggcatttgacactcttgcaaaagcattgaatcctggagagagc

SEQ ID NO: 312611 - DNA, 98 bp, Homo sapiens
gagaagggagacgacgctgctgggtccgctgagcggggcgacccgagaacccttaggagaaatcttgagagtggacagcaattgtgaagatcgccaga

SEQ ID NO: 312612 - DNA, 100 bp, Homo sapiens
tttgatcctgattctacccaagtacatatgatttcagctgcaatggcagttcctactgcggagctcaaacctgttacactcagaactgagacttgggtga

SEQ ID NO: 312613 - DNA, 90 bp, Homo sapiens
cgtcaaggactccccgcgcttcaggacctgaaggagaagaaggagaaggtggaggagaaggcaagccggaaagagcgaaagaaagaagtg

SEQ ID NO: 312614 - DNA, 74 bp, Homo sapiens
agatgaagaagaagattaacctggagttaaggaacagatccccggaggagaatagcctaacatggcagaccaga

SEQ ID NO: 312615 - DNA, 97 bp, Homo sapiens
ggaggaacttcgaaccatggaccaggccctcaagtccctgatggcctcagaggaggaggagctccccacaccaagtgagaatagcatgccaccaggc

SEQ ID NO: 312616 - DNA, 90 bp, Homo sapiens
agagaatatgatacagatgtattcaaatggatcttcaaaggttgatggaaatcacaatcttctgacaaagctttctctggaagaggaaaa

SEQ ID NO: 312617 - DNA, 83 bp, Homo sapiens
cgccatcgttgctgccttcttcgtcaaggtcagcccaaggccaaccccactgtcactctgttcccgccctcctctgaggagct

SEQ ID NO: 312618 - DNA, 100 bp, Homo sapiens
gtttttccagaggtgccctgaggagcagggaagcatggctattgtggatgtaaaagccatgttcaagctacccagaatggaatcctgacaatgatacagg

SEQ ID NO: 312619 - DNA, 98 bp, Homo sapiens
atttcctattgactacccctattcaccacctaccttcagattcttgaccaaaatgtggcaccccaacatttatgagctattccaatagaaactgctaa

SEQ ID NO: 312620 - DNA, 100 bp, Homo sapiens
gtccccccaagtctcctgaagaggaaggagcggtgtcctcttaagaaaatggtatcggacagatgaagtagaggtgacctggagggactaataagatcaa

SEQ ID NO: 312621 - DNA, 83 bp, Homo sapiens
gagcggacggggtcgagtcagtgcgttcgcgcgaggtagctcgtaagctggtcatcctggagggtgagctggagagggcagag

SEQ ID NO: 312622 - DNA, 100 bp, Homo sapiens
caggcatcgtggggatcttggcagcgctgcagggtccccacgatggtccctgtggtccacatgggccccctgttcggtgacgtgctctgagggctcccag

SEQ ID NO: 312623 - DNA, 98 bp, Homo sapiens
cggcgcgctgcccgaggggagcaaggacagtgtaaactggagttgctggtgggcagccctgcttcctgcatggaactggagctgtatggagttgacga

SEQ ID NO: 312624 - DNA, 100 bp, Homo sapiens
ccaggtgctggaggacttcccaacgacacggcatcagcgaggagatacgcatcctctaaccttagatgaaattttggatgaaacacaacatttagatatt

SEQ ID NO: 312625 - DNA, 98 bp, Homo sapiens
tcaggagcgaagagctgcttctgtatcttaagacagagcctgcagccaatgccccaggagccctcggttccaaccaactgatgcccctgtgcccactg

SEQ ID NO: 312626 - DNA, 130 bp, Homo sapiens
ggtttttgggaaagccaaatggagctcagaaagctgtatggacctctgtgtggatatgtcttgtcgttcaagacttgcaacactaaacgagaaattgacagcccttgaacggagaatagagtacattgaa

SEQ ID NO: 312627 - DNA, 100 bp, Homo sapiens
atgaggaagtactgagcctgttggaggaactggcccggaaacaggaggacctctaatggtaccaagtgacaggttggctttactgtgactcggggacgcc

SEQ ID NO: 312628 - DNA, 90 bp, Homo sapiens
gctggatggaggggattttgtcagcttgtcgtcaagggtcctctccagccagagcccaccagccggcctttctccagcctcctgaagaag

SEQ ID NO: 312629 - DNA, 121 bp, Homo sapiens
gtcgttccgcttcggggagaagctcttctccggggtcctcatggatctgtccaaaaggctgcttctgatgcttggaagatatcctctcagccacaaagatggtaataaatctttgcctccc

SEQ ID NO: 312630 - DNA, 83 bp, Homo sapiens
cttgcatgtatttggaacaaaaaaaggagatgcctggcagccccgctctctgcagacatggatttgattgacatactttggag

SEQ ID NO: 312631 - DNA, 100 bp, Homo sapiens
ccaggcaccagctgctcagccactacagattcagtcaggagttctcacgcagaatggaatgactcctctaatgcatgcagcatataaaggaaaactcgat

SEQ ID NO: 312632 - DNA, 83 bp, Homo sapiens
gtcggcgcaggcccagatgcgcgcgatgctggaccagttgatgggcacctcccgggacgaactatgttgtgcttctggactcc

SEQ ID NO: 312633 - DNA, 99 bp, Homo sapiens
cacagatctctgtctacagtggttcagaccgacatgctgtacagacaatgcctgtggaagacaagtcagaccccccagaggggtctgaggaagccgcag

SEQ ID NO: 312634 - DNA, 51 bp, Homo sapiens
caaccagcagcagccatcatggaggtgggagaaatgttttagaggcaagag

SEQ ID NO: 312635 - DNA, 50 bp, Homo sapiens
cagcctgcagatcatccccacgtacagggattaatgaaaatcaagttcca

SEQ ID NO: 312636 - DNA, 100 bp, Homo sapiens
tccgcccggcagctgccccgtctgagaaggtagatacaacaagaattgaatactccattcctttaagagaaaactgggcactaccatattttgcatgcca

SEQ ID NO: 312637 - DNA, 51 bp, Homo sapiens
aaaagaaatcctgataagaactgctttaaataggaaggttgttgattactc

SEQ ID NO: 312638 - DNA, 74 bp, Homo sapiens
ctgagtacgacttagataaatatgatgaggaaggtgacccagagtacagttgtgaatttggctccgcgaagtat

SEQ ID NO: 312639 - DNA, 98 bp, Homo sapiens
acctcggtgtccacgctgtccccgcagcccggcagcgaacctatgagaaccccaaagacattaaagattgctgaaatacaggcaagacggattgctgt

SEQ ID NO: 312640 - DNA, 100 bp, Homo sapiens
cttcattgcaagttcttatttgtaagattagtgatgatgaaccaggttatgaccttgatttattttgcatacctaatcattatgctgaggatttggaaag

SEQ ID NO: 312641 - DNA, 82 bp, Homo sapiens
gctactctctctttctggcctggaggctatccagcctcaaaagccaaaagtctctgagaacgactttgaagatctgttgtcc

SEQ ID NO: 312642 - DNA, 100 bp, Homo sapiens
atctgtgtggattactacgagaacaagatgtacctgactcccagtgagaaacatatgctcctcaagcaccaatgttgttatgaattattcagagatcgag

SEQ ID NO: 312643 - DNA, 75 bp, Homo sapiens
ccccggagacgatgcgccccgcgcagccgcctgcgcctgcgggagccacaatgcagatcttcgtgaagactctga

SEQ ID NO: 312644 - DNA, 100 bp, Homo sapiens
cgagttcaaagagaccctcggaacgttgatgataattagaagcatgctttccactgaacttcccgacaacatttgttatgcagaatgtctctgagtgaga

SEQ ID NO: 312645 - DNA, 74 bp, Homo sapiens
atttaccacgtgaaatacgacgagaagagagaagggcacagttacctaagtatcaacgtaatcttcctcggcca

SEQ ID NO: 312646 - DNA, 133 bp, Homo sapiens
ggagcagacttacgcactgtggatccagagacacaggcacgactagaagcattgctagaagcagcaggtttattcttcagtccaaggaagcaattcacagtcagctgttagagaagcagaaaatagcagaaga

SEQ ID NO: 312647 - DNA, 100 bp, Homo sapiens
ttccagcctgagatctatgtaactatccaggcctactcctccatcattggactgcagtcccaccaggtctcctctgagcctccggcctccataagaccca

SEQ ID NO: 312648 - DNA, 83 bp, Homo sapiens
cgcatttgtgggcgcgcggcacgcagccgggaggccgaggactcggagttcacctgcagcccctgtcaaagggaacaggaagc

SEQ ID NO: 312649 - DNA, 75 bp, Homo sapiens
gccaggaccggccgaacgcagagctctgctgtgtgcgtgcaccagctgcctccaggccaactacacgtgtgagac

SEQ ID NO: 312650 - DNA, 100 bp, Homo sapiens
ccgacgtcgctgaacttctggtggttgaaaaggacactcgatttattcctggattacagggaagtatggccacggctgcattaccggaaagcgggtcttc

SEQ ID NO: 312651 - DNA, 100 bp, Homo sapiens
gaagaaatgccctccgggtcacaggataaggcagatgaagcatattccatcggccccgctccctcccagcagagctacctatctatggagaaaatcattc

SEQ ID NO: 312652 - DNA, 50 bp, Homo sapiens
cggacgccgagcgcagtgccccgcgggagtaccctgacttctaccggaag

SEQ ID NO: 312653 - DNA, 83 bp, Homo sapiens
gttcaaagactaaactgccaaagttcaccatcctccaaacaagtgaagaactgtggctgcaccatctgtcttcatcttcccgc

SEQ ID NO: 312654 - DNA, 96 bp, Homo sapiens
acgaattccaacttgtttcacgctatatcaggatgagataactgaaagggaagcagaaccatactatctctccactccttcattgggacggaagtg

SEQ ID NO: 312655 - DNA, 51 bp, Homo sapiens
cccacgtgcacacgcctctcctacaggttatggaggttttgatgactatgg

SEQ ID NO: 312656 - DNA, 75 bp, Homo sapiens
gctggactatggcatctatgttatcaaccagatcgcccaggaccacaccgcagcgtaactgcaggcctctcagcg

SEQ ID NO: 312657 - DNA, 100 bp, Homo sapiens
ggattattgtatggctgtgtgtaaagcgatgacactattcctgatcagagaactccagttgcttcaacacacagtatcagtagtgcagccaccccagatc

SEQ ID NO: 312658 - DNA, 75 bp, Homo sapiens
cagaacagttaatcctcaatttaagcctgatctaacccctagaaacaggacctttgcaagaatgtggaactgctg

SEQ ID NO: 312659 - DNA, 98 bp, Homo sapiens
agggagggaggctggtggagaaggccacgcccagatttcttctaccgctgcttccctgatgggctagcccattctgacttgatgtgtacaggggataa

SEQ ID NO: 312660 - DNA, 74 bp, Homo sapiens
acggatcggattcctcagctacgaggaggcgctgaggagaggctttacaggaagtatggtgctggcatctgctt

SEQ ID NO: 312661 - DNA, 88 bp, Homo sapiens
accatttctaagcaacttacattagaacaggcacattgcaagcaacccgtgccttgatggtggttggcatcctcctgggagtgatagc

SEQ ID NO: 312662 - DNA, 100 bp, Homo sapiens
gccattgctccacaggttggcaatggcccggaggctgtttgatgtcctgcacgagcccttcttgaaagtaccctgatgaccccagctgccaaggaaaccc

SEQ ID NO: 312663 - DNA, 82 bp, Homo sapiens
caatccaagttccacaatatattgactactgccacaattccggccaatagcttcaccgtctcctctgtcgccgccccttcct

SEQ ID NO: 312664 - DNA, 82 bp, Homo sapiens
gggctttaggctggaagcgccttagaggagccatttttccaggaacgtcaaggtcgtgggaaataaaaggcagttctacaca

SEQ ID NO: 312665 - DNA, 101 bp, Homo sapiens
ggacagggatgtctacctggtaatagaggacttgaagcagaaagcaagtgaatacgagtcagaagttgaagactgggatagtttccaagctattttggatc

SEQ ID NO: 312666 - DNA, 82 bp, Homo sapiens
catcacacaggatccgcccctggacatggaggagaaggtccgcttcaagtgcaaggaatatgtagagataattccactatca

SEQ ID NO: 312667 - DNA, 80 bp, Homo sapiens
tttgctaaatttgaaaaggagaaaatgaatgccaaatgggacacgtttgtgaatagcacaatggaagaagctggactttg

SEQ ID NO: 312668 - DNA, 100 bp, Homo sapiens
tccatggcccggccacagctgtcacacacgatcctcaccgagaagaactggcgactggactcaaacacacttcactgcgactgtgaaatcctgtggttgg

SEQ ID NO: 312669 - DNA, 91 bp, Homo sapiens
gaggaggaagacgaatcgttaaacatctgaaagggtcagagtatcctgagctccagctggaccctaaattggatcctcttcctgctgagag

SEQ ID NO: 312670 - DNA, 100 bp, Homo sapiens
catatccgggtgcggctccaccccttccacgtcatccgcatcaacaagatgttgtcctgtgctggggctgacagctccgtggatggccgcgtgagacgct

SEQ ID NO: 312671 - DNA, 74 bp, Homo sapiens
ccaaagcaattacacccagaagattacctttgactcttgtcccaggttcaaaagatgtcgtgataaaggcacag

SEQ ID NO: 312672 - DNA, 126 bp, Homo sapiens
ttaaaactgaagatttcctctggaagctaccacatgcaaacatacaagcagtctcacctcaggtctgtgccatagggattctcgaagagaacagcgttgtgtcccagtgcacatgctcgcatcgct

SEQ ID NO: 312673 - DNA, 98 bp, Homo sapiens
aatgaagatgcagtcagagagactttcgaaagaatatgatcaactcctgaaagaacactctgaacttcaggtgaatgaaatcctgtgccgttcttcag

SEQ ID NO: 312674 - DNA, 82 bp, Homo sapiens
gttggtcctgtgcggtcacttagccaagtgctgggattacaagcgtgagctaccacacccagcgaggaagccaagtttaacg

SEQ ID NO: 312675 - DNA, 74 bp, Homo sapiens
gcggagcttcgccaaggctggcgcagtcgctgatgtagcccagcagttccagtatgctgtgcgggtgattggca

SEQ ID NO: 312676 - DNA, 101 bp, Homo sapiens
aagagttctgcgttttgccagtcacctctcaactgtgtgccaaagttttttgctccactcaagcctgttagaatcaccatggaatacagctccagtgggaa

SEQ ID NO: 312677 - DNA, 83 bp, Homo sapiens
cgagcagatcgacaagtccgggagctgggcggccatttaccaggctccataaaaatacagactcaccagttcctgctttgatg

SEQ ID NO: 312678 - DNA, 98 bp, Homo sapiens
tagaatctgccgtcttttgaagcaccctaatattgcacaaacgtgcagatatctgatagccctttccgttgcactcaagaggaagcaagatcattagt

SEQ ID NO: 312679 - DNA, 100 bp, Homo sapiens
actgaaggggagcttcccggagaacctgagacaccttaagaacaccatggagaccatagactggaagccagctgaggtgggtgtcctggttggcaaagac

SEQ ID NO: 312680 - DNA, 98 bp, Homo sapiens
agatgtgctctactatattttcctgtgtattcaaaagggcttccgagtggacctgccaatcaagtcggcccgctaccgtggccagtacaacacctatc

SEQ ID NO: 312681 - DNA, 82 bp, Homo sapiens
gggctggagttgttttgaatgggcgcccgtaagagaggtgcgcgcggagccatggttatcatgtcggagttcagcgcggacc

SEQ ID NO: 312682 - DNA, 128 bp, Homo sapiens
gtatggtgtgttcagcattgctgaattcttctctgatatcttcctgtcatggttccccttctactacatgctgaagtgtgaacacagcaggtgtgagatgtcatcttggaagacaggccttgcagaaa

SEQ ID NO: 312683 - DNA, 75 bp, Homo sapiens
cactaaaatgaaagaaaccgctgaggcttatttgggaaagaagggagattatttctttggcaaatgttttgacgc

SEQ ID NO: 312684 - DNA, 82 bp, Homo sapiens
cgagaaagcacggggtgaaactgaccacagtgctcaccacccaccaccactggtgtttcccattaaacactaccaggacaaa

SEQ ID NO: 312685 - DNA, 96 bp, Homo sapiens
aagaagtagagatgctggtggcagggcatgaggacagcaatggttgtatcaactatgaaggcttcagcaaccaggagggattgactgagatcttaa

SEQ ID NO: 312686 - DNA, 100 bp, Homo sapiens
gcggtggtcaccggacaccggcggcagagcacagcaggaagaagatgagccttaggtctgaacgccgaggaattcatgtggatcctgtgcaagaaaggat

SEQ ID NO: 312687 - DNA, 100 bp, Homo sapiens
aagaaatagttacctatgatccttcaggatgagttagagaaaggtgaacgggacaatgcagaactgcaggagtttgccaacgccattcttcagcagatag

SEQ ID NO: 312688 - DNA, 82 bp, Homo sapiens
tggtggataaccaacaagatggggaagaaaaggattgagaactttaagagtggtgtgataacaacgaacttgatgcaagtga

SEQ ID NO: 312689 - DNA, 98 bp, Homo sapiens
ggtactgttacaatgacagcagctgtaaggaagaaggagagacgaccatcttgcaactagaaaaagatttgcgcacccaagtggaattgatgcgaaaa

SEQ ID NO: 312690 - DNA, 100 bp, Homo sapiens
cagtcacagagcaggaggtggctcaggtggccagtgccatcctctccctcaggccttgtctctgaaggagtctgagaagatggcgctgtcagagaagttg

SEQ ID NO: 312691 - DNA, 100 bp, Homo sapiens
agcccaaactgtgaagaagatggaagccaaagttcatcagagtccaaaatggtgatcaggaaggtcgggattactgttcggaagaagaggatatcacata

SEQ ID NO: 312692 - DNA, 100 bp, Homo sapiens
agccgagccgcgaggagcgcactccgtggccccgatggagcggtacaaagcttcatggcggctgaagagatgcattggcctgtccctatgaaggccattg

SEQ ID NO: 312693 - DNA, 75 bp, Homo sapiens
agagttaaatgccctcaagtcgacaggggatgggaccctagcctcccaaagtgaaatgcctgaccaagatctggc

SEQ ID NO: 312694 - DNA, 106 bp, Homo sapiens
gaaaatgcctttaagggacaaatactgtcagactgaccaccatcatcacggatgctgtgaaccaggtcctctcagggtgcgccatcattgtccgaggtcagcctcg

SEQ ID NO: 312695 - DNA, 75 bp, Homo sapiens
gcagtgtctacgaacaattattgaaggcacaagaaggtggacccaagtggagagattgtggaactggcgaaaggt

SEQ ID NO: 312696 - DNA, 100 bp, Homo sapiens
ttcaaggcaagaccgaattcagaaggatatcgacgtcgtgatccagaagtccagagctgaggactgcctgtttgcaggagccgtgccgctcttggccacc

SEQ ID NO: 312697 - DNA, 83 bp, Homo sapiens
agcgcggggcaagtggctcggaacacagatgcctgaggaaacccagacccaagaccaaccgatggaggaggaggaggttgaga

SEQ ID NO: 312698 - DNA, 100 bp, Homo sapiens
caagaaatgaagaacgagattcagacacaggtagttggcaaaaaaggagaaagccactaaggtacaaaagacactggacaaccatattgcaatcagatct

SEQ ID NO: 312699 - DNA, 115 bp, Homo sapiens
cttctggaaatgatccacagtatccaaaatagccaggacatgaggcagatcagtgacgtttacacatgaatatgagcaaatttttaaatttaaaatgaaggcatactgaaaaaga

SEQ ID NO: 312700 - DNA, 75 bp, Homo sapiens
gctgggggccggggcgcgtcgcaggatttaagtgccctgtatgctcaaaatttgtatcctcagatgaaatggatt

SEQ ID NO: 312701 - DNA, 75 bp, Homo sapiens
gagcagccagcccgtgggcgagccgcccgcccgccgagcagccatgaggggcactatggcagacaaagttaggag

SEQ ID NO: 312702 - DNA, 82 bp, Homo sapiens
tccaacctgggagcagctggctctgggccttgaacattccgaaactgtcaagattggcaagcacttttcaggattagaagag

SEQ ID NO: 312703 - DNA, 85 bp, Homo sapiens
ctaaaagaatatgatccagatgatcatctgatagaagagaccactctgcttcatttttgggagaaaacttctcacactatggcag

SEQ ID NO: 312704 - DNA, 101 bp, Homo sapiens
gcaaagagctgcatcatgaattcaggagcatcatgatgaggatggtatggactgcatggacaatgagaggcggccgcatttccctcaattttcctactctg

SEQ ID NO: 312705 - DNA, 90 bp, Homo sapiens
ccgtcgtcatagatggagaagagaagcctggagcattggtaagcgtcacactgccaaagtgagagctgctggagaactcataatcccagg

SEQ ID NO: 312706 - DNA, 100 bp, Homo sapiens
tggggacgaagagctgcagctcctcctgtgcgggatgccaggccaaggtggagcaagcggtggagacagagccggagcccgagctgcgccagcagaccga

SEQ ID NO: 312707 - DNA, 77 bp, Homo sapiens
tagctgtgctcgcgctactctctctttctggcctggaggctatccagcgaaacttcctcctggccaaccctgtgtct

SEQ ID NO: 312708 - DNA, 90 bp, Homo sapiens
caacaaaggatgcgaatgctggccgcttcctgtgggcttcgtgtcacccagaggaaactgggaagaactggtgaagtacttgcagatggc

SEQ ID NO: 312709 - DNA, 124 bp, Homo sapiens
gctgccgagaaggagggaggggaaacacaaagccggctacgcgctgcgagacgagctcatctgcgcctttgtttagaacgcttaaaagttctgattccactaggaccagactgcacccggcaca

SEQ ID NO: 312710 - DNA, 75 bp, Homo sapiens
tatctacaagggggtccgcaagggggatatgagactttctactcggaatatcctgagtgttgcgtggatgtaaaa

SEQ ID NO: 312711 - DNA, 83 bp, Homo sapiens
caggttcgtggctatcccactcttctctggttccgagatgggaaaaaggtgtccagtgtcaggtgcagctggtggagtctggg

SEQ ID NO: 312712 - DNA, 73 bp, Homo sapiens
ggccccgagcccgagcgccccagcccggggcgcaccctacgacgcgcacaccaccggcatgaccggcgccatc

SEQ ID NO: 312713 - DNA, 97 bp, Homo sapiens
gagcgtaaggtccagctggtcaccgacagggatcacttcatccgaaccctcagcctcaagccgctgctcttcggtttctgacctcctgcagcctcct

SEQ ID NO: 312714 - DNA, 87 bp, Homo sapiens
actgacttttcatcttctagaatttcctgaaggaaaaggagtggctgtcaaggccagagatcctcagcaggagcctatggaagagat

SEQ ID NO: 312715 - DNA, 75 bp, Homo sapiens
agggatctatttgtttttagtccatcccaatgaaatgactgtgcaggtgcctgtgtactcggagcaggagtacca

SEQ ID NO: 312716 - DNA, 89 bp, Homo sapiens
ttcaaatcctagcactctgggagaggtgctgatattcgtggcttcagtgctcctaggacatttggccttacactgggacatgtagtaga

SEQ ID NO: 312717 - DNA, 75 bp, Homo sapiens
actgcaccttaaaaacaaaagattgagctgcactgtattcctgatcagctcagctactatttaataaaacaaaat

SEQ ID NO: 312718 - DNA, 90 bp, Homo sapiens
gaaatttcactggcctagtgggaggtcctgactttgcccactgtctgctgaaatcatgttgttgatgtcagtgttgcggtcagtactcct

SEQ ID NO: 312719 - DNA, 100 bp, Homo sapiens
tgagactttgaaccgtatcctgggcgacccagaagccctgagaggctttccatctgatggtcccctggtgtgtgccctggaacaggagcgaaggctccgc

SEQ ID NO: 312720 - DNA, 82 bp, Homo sapiens
gaaaatacaaatcacacgcataatggatgaaaggaaccgacagggcaattcaagctgctggaacaagaccgagatataaagg

SEQ ID NO: 312721 - DNA, 95 bp, Homo sapiens
agcacaatattcctcagtaaatctcagacggacggttcctcatgccatgcacctgctgtcacccagcatgcaccctattttaagggtacagccgt

SEQ ID NO: 312722 - DNA, 98 bp, Homo sapiens
ttcattattacatgaagtatcatgtttctgatctccaaagatgggtaaatggtgctaatgaacatggctttgtcttggtgtcttttggagctggtgtc

SEQ ID NO: 312723 - DNA, 98 bp, Homo sapiens
ggctgtggtggagaatgtagtgaagctaaaggcacttggggtcttatctgttggactctgaaaacacttcaggcgcccttccaaggcttccccaaacc

SEQ ID NO: 312724 - DNA, 75 bp, Homo sapiens
gccaaatttgaagcagaacgatcaaaagccaagtggcaaacggttccatgcctctgcagcggtgcctcatgtttg

SEQ ID NO: 312725 - DNA, 90 bp, Homo sapiens
cttgatgccaagagttcgagaccagctggggcaacaaaggacgacctggcccagctgcccttcctgaccatgtgcgtgaaggagagcctg

SEQ ID NO: 312726 - DNA, 74 bp, Homo sapiens
ttgagatggagtctcactctgtcgcccaggctgagcggaaggaggagaaaaaggcggctgcccctgctcctgag

SEQ ID NO: 312727 - DNA, 90 bp, Homo sapiens
tcacttaaggagcgagggaggcctcgggggtccccagccggcttcgccgacacgaggtgaccatctgcaattacgaagcatctgccaacc

SEQ ID NO: 312728 - DNA, 82 bp, Homo sapiens
cccgtgtggcgctgattggatttccctctgtgggtaagaatgtggccccgtcccagagcaccacccgagacatcaggagccc

SEQ ID NO: 312729 - DNA, 74 bp, Homo sapiens
ccaggacagcacctagtcgtggccggaggagtctcagagctgtcagaaaggtgaccagtatgcactgaagatga

SEQ ID NO: 312730 - DNA, 50 bp, Homo sapiens
gtcgggtcagatccgacagaagaagtctggaacgttttttcttagagttc

SEQ ID NO: 312731 - DNA, 100 bp, Homo sapiens
cacgaaagctcagagaaagcagcagatggcagagtataaagtttggataaagcctggtgcagagcagtccttcctgtatgggaaccatgtgttgaaatct

SEQ ID NO: 312732 - DNA, 100 bp, Homo sapiens
cgatacttagaagggggtcatattagtgcttatctttttaaacaaggactcttcagtttgtcagaggaatggctgtgaatggatgcctggaaggaccatc

SEQ ID NO: 312733 - DNA, 96 bp, Homo sapiens
gaacgaccggctcctgctcaagatctcagagaaggaggaggtgaccacgcgcgagttgccaagtttccaggacagtgaagatgatgatgatattct

SEQ ID NO: 312734 - DNA, 100 bp, Homo sapiens
gaccctcaggctcagatcagtggccgaggccccagaggtggctccacaggatctggtccaagctacctttatggggtcactcaaccaaaacacctctcag

SEQ ID NO: 312735 - DNA, 75 bp, Homo sapiens
cacggccagatctgccctccacaattaccagctctggctgggtcgccacaacttgtttgacgacgaaaacacagc

SEQ ID NO: 312736 - DNA, 50 bp, Homo sapiens
gtcaatcagagcgtcctgtgcggctgacttgacaggaattaagtggaaaa

SEQ ID NO: 312737 - DNA, 90 bp, Homo sapiens
ctttccctctcccaacatggcggcctcagtgctgtcccacgtccccacccctgtggccagctccgcccactcagcctcagccttgctggg

SEQ ID NO: 312738 - DNA, 83 bp, Homo sapiens
ctgcgaggctcggagaaacaggcgccgcgggctccgcgcccggccggacccgggcccgaggccccttcccagctgcctgcctg

SEQ ID NO: 312739 - DNA, 75 bp, Homo sapiens
taaggcgtgagcccccaagatttcacgaactccatccggcacaacctgtcactgcatagtcgattcatgcgggtc

SEQ ID NO: 312740 - DNA, 98 bp, Homo sapiens
ggggaccaaaaatgaacctgtgttaaaacctggagacaggggctcaccagcatttcagcttcaggatggttgtgagtacgtgtttatctggagaactg

SEQ ID NO: 312741 - DNA, 100 bp, Homo sapiens
agtacgactggcgggttgacctcagtctcctggagcttccagccagagggggccgacactactgtgtcggttcgaactctggccagtgcaggaggaccag

SEQ ID NO: 312742 - DNA, 90 bp, Homo sapiens
acctgtttcggaatgcttttgtgctgctcacagtcaccgctgtcattgtggctgctccctgcatgaggaggacacccagagacatgagac

SEQ ID NO: 312743 - DNA, 82 bp, Homo sapiens
gacaatccaaaacaaacgctattcctctcactttgcttgcctaaactggacttgaagcaatttaaactactggagatctgcc

SEQ ID NO: 312744 - DNA, 99 bp, Homo sapiens
gcgaatatcgtcatcgttagaagagaacatcatgggaatgctatgcagccatctgtcaaggataacagtggtagccatggctctcctatcagtggaaaa

SEQ ID NO: 312745 - DNA, 75 bp, Homo sapiens
ccgttgacactgacctcatctgggccaaaatgctgagttctaaggaggctgggttttccagcttgcagctcatct

SEQ ID NO: 312746 - DNA, 74 bp, Homo sapiens
tggcacttcattggccacctacagaaacaaaatgtcaacaaattgatggctggatctaccatgaaagacttgtg

SEQ ID NO: 312747 - DNA, 101 bp, Homo sapiens
catggctgtagctgcagtaaaatgggtgatgtcaaagagaactatcttgaaacatttatttccagtccaaaatcataggtatattgaactgttcctgaatt

SEQ ID NO: 312748 - DNA, 95 bp, Homo sapiens
caccggcctgaggtcaaggagaaattgaactaaactctcctttgaagactatgaatggaccaggtagtttgtttgcttcagagaatttcctggga

SEQ ID NO: 312749 - DNA, 90 bp, Homo sapiens
ttttaagcctatactttctaccagaagcttgaagggtttggttaaggcactcaaggagttgcccctggtcctgtaattggacttcaggca

SEQ ID NO: 312750 - DNA, 100 bp, Homo sapiens
gaggaggcaacggcagcacctgcagcaatccattgcaaacatggtgctttcctgtgacaagcagccccacaatgtcagtccgggaccatgtctggagaac

SEQ ID NO: 312751 - DNA, 75 bp, Homo sapiens
ccacgagatcatggggcccaagaaaaagcacctggactaaaagagtagttgaacagctacggaagaacctgatag

SEQ ID NO: 312752 - DNA, 82 bp, Homo sapiens
gggacgagtgagtggatcctgggaagcgctgtgaaatgggctggtgcggccggccggacggacctactacgactgcgcagac

SEQ ID NO: 312753 - DNA, 100 bp, Homo sapiens
gaaggccgtgttgtttgtctacctgggactaaattatatccagatcgagagacagaagattctgaaagggttcaatgaaatgagagtcatcttggacaat

SEQ ID NO: 312754 - DNA, 100 bp, Homo sapiens
cacgccagccatcaccctcgagagcccggacatcaagtacccgctgcggctcatcgaccgggagcatcccggaaccacttcctttggaatgtcttcattt

SEQ ID NO: 312755 - DNA, 90 bp, Homo sapiens
tggaattatgccctgttggttccaatgctgggattggctgcttttccctgctcgcctggattttttaagtttgaggcatctgagagcccc

SEQ ID NO: 312756 - DNA, 82 bp, Homo sapiens
gctctgctgcttctggcctctgggcatcgcagccttctacttgtcccatgagatgggaaagggctccttcaagtatgcctgg

SEQ ID NO: 312757 - DNA, 98 bp, Homo sapiens
tattggagaaggccaatttggagatgtacatcaaggcatttatatgagtccagcatcataggcgagtattagtggaatggctaagagatccatctcag

SEQ ID NO: 312758 - DNA, 100 bp, Homo sapiens
cgggctgaagcgactgagtccgcgatggagacactcgcctatggggacatgaaccacgagtggatcggcaacgagtggctccccagcctgggcctccccc

SEQ ID NO: 312759 - DNA, 98 bp, Homo sapiens
ccagacatcaagctctttgggaagtggagcaccgatgatgtgcagatcaatgacatttccctgcagaatggagatttacagacagtcatctgggtgga

SEQ ID NO: 312760 - DNA, 75 bp, Homo sapiens
ataggatttctccccagtgtgaaagtgtattctggaggtcgaatggtcacatatgaacatctccgagaggttgtg

SEQ ID NO: 312761 - DNA, 100 bp, Homo sapiens
cgccttgctcgcccgcagccccgagaccgcaggtgaaaggtgtagcagtcactcggcctacacccacagcatcgaccttgtgaacccagcgacctgactg

SEQ ID NO: 312762 - DNA, 49 bp, Homo sapiens
caggaactctacaacccaatccagatcagtgtgcgtgtgaccaccatgg

SEQ ID NO: 312763 - DNA, 98 bp, Homo sapiens
tgacctgcaggtactgggagatccatagggaagaaggcggaacatccggaggctgggaaatgggtatttaaagtgcccaggtacttacaataacaagt

SEQ ID NO: 312764 - DNA, 101 bp, Homo sapiens
acttcacggagctgaaggatgaccaggtcaaaaagggagtaactattcccagtcagaggcgctatgtgtattattatagctacctgttaaagaatcatctg

SEQ ID NO: 312765 - DNA, 89 bp, Homo sapiens
ccatgctttaagaattgggatgggtccccagtgagctcctggattctgctggtttacgtgcggaggggctacatcgcctatgagttaaa

SEQ ID NO: 312766 - DNA, 100 bp, Homo sapiens
aaatattcaagatgtgcagagtcaaatcagtaaaattggtcttaaggatcctactgttccagctgtgaaacatcggagtatgctgctgctgttccgcttt

SEQ ID NO: 312767 - DNA, 75 bp, Homo sapiens
accctgaggtagacatctttagactcatcagaacttcctacgagaactttccatttgcagtgtgcaacagaaaaa

SEQ ID NO: 312768 - DNA, 74 bp, Homo sapiens
tcacccccatggaggccctggcagagcaggtggaacggcacatgtgtgatggggacattgttatcttcaaccgg

SEQ ID NO: 312769 - DNA, 75 bp, Homo sapiens
gcgacttcaagacgcggcccaaggtgtcccttggcggcgcgagcaggaagaaactggcagacctttcacttcgta

SEQ ID NO: 312770 - DNA, 101 bp, Homo sapiens
tttctgtttgtttgtcacctttgacctcttattcgtaacattactgtggataatagagttaaatccaaaccagatctccctggaagagaacattttggtct

SEQ ID NO: 312771 - DNA, 100 bp, Homo sapiens
aggacgtcatccgggggtgcttgctgcagaggattgaccaaggggtctctctttttggcatgtcggccctgttactccctgggaactttgagtcttattt

SEQ ID NO: 312772 - DNA, 100 bp, Homo sapiens
cgggcctgcaccatgagcgtcccggccttcatcgacatcagtgaagaagatcaggtgtcgtgaaaactacccctaaaagccaaaatgggaaaggaaaaga

SEQ ID NO: 312773 - DNA, 95 bp, Homo sapiens
ttggatacgaacatgttatatgtgatgtacagttacccagcacgtgtacctcctcctcctcctattgctcgggctgtagtgccctcgaaacgtca

SEQ ID NO: 312774 - DNA, 102 bp, Homo sapiens
cctgacaagccacccatcctacttgtggctgagggcagtggaagcatgagaggaggaggtgggggcaatgccagagagtacaaaattaaaaaagtcaagaag

SEQ ID NO: 312775 - DNA, 100 bp, Homo sapiens
taactcggccctagttacctggccagggtacgcgacaattggcggaggaaaaccaattctgtgtcctcggaggaccacagcccagttgggccccaggcga

SEQ ID NO: 312776 - DNA, 98 bp, Homo sapiens
gaactgtccttccaacggggtgacctcatccgtattctgagcaagggtcatggaggacgctggcggcggcgaggagaccccggccccggaggccccgc

SEQ ID NO: 312777 - DNA, 100 bp, Homo sapiens
gcacttcaagggctcggtggagaagctgtgtagtgtggagcaggtggggcaagtccgtgggcatcatgttgaccgagctggagaaagccttgaactctat

SEQ ID NO: 312778 - DNA, 90 bp, Homo sapiens
tgttgctgttttatttaagagtgttgatttcaactggcttcaagcaatggtaaaaaaggaaaccctggttcttgcacgcattgcaaatgc

SEQ ID NO: 312779 - DNA, 82 bp, Homo sapiens
cacagataccaaaaaaatctggggtagagggtgggattaaaaactcagcctgaatcaaaatgccctgagctgcttgccaatt

SEQ ID NO: 312780 - DNA, 83 bp, Homo sapiens
taacgccccacctcctgagctgcttgaggtggactgtgcattgtcacttattcgacttgggatggagcggaatattcctggtt

SEQ ID NO: 312781 - DNA, 106 bp, Homo sapiens
gttttccaaacgtatggacagctttttatcctccgttgcagacatggttcaaagatcttcgcaaatactgtggacaatgcccgcatcgttctgcagattgacaatg

SEQ ID NO: 312782 - DNA, 104 bp, Homo sapiens
gacagctcaggctgcccagatggtggctcccggagtccaggtacatgtcccagagcaagcacacggaggcccgggagctcatgtactcgggagccctgctcttc

SEQ ID NO: 312783 - DNA, 100 bp, Homo sapiens
acagttgccaaagccaaaccaagacacaatgcagattcttttccgacatctcagaagtcagccataatggcaggtgaagaaattaatgaagactatccag

SEQ ID NO: 312784 - DNA, 101 bp, Homo sapiens
tgtgctcgcgctactctctctttctggcctggaggctatccagccatgcagcagattggaataaatatgatgaccgattgatgaaagcagcagaaaggggg

SEQ ID NO: 312785 - DNA, 75 bp, Homo sapiens
agggaccacggtcaccgtctcctcagatgaaggatttgggggcagagcacttggcaggtcatgaaggggtccaac

SEQ ID NO: 312786 - DNA, 100 bp, Homo sapiens
gtggaatgaaaaggaagtattagaaatgagctgaagaccattcacaggcttttgaacacttgcagcaattagaattaataaagcccatggaaagaacttc

SEQ ID NO: 312787 - DNA, 88 bp, Homo sapiens
agagaaggaatccaccttcttacgctatggcagattgaccctcttgctggaatgacatctcttagtataggtggttcagctgcccctc

SEQ ID NO: 312788 - DNA, 50 bp, Homo sapiens
gtgggaggcgatccaggccttgacggtgtgctacattgagggtcatcggg

SEQ ID NO: 312789 - DNA, 97 bp, Homo sapiens
aggtcatccagtccgtcgctaagtgaagcccaacactcctgtcttaatgtgctctgtgcctggttatgatgccagtggacatgtcgaggaccttgca

SEQ ID NO: 312790 - DNA, 98 bp, Homo sapiens
gattttcagcttcagcaagcaggaaaaaaggggtgctggaaacattctccggaacagaaaccaacaagatttggccctatgtatatgctttcctacaa

SEQ ID NO: 312791 - DNA, 100 bp, Homo sapiens
accatctcgcactaccctgactacagctggagcgcccagaggcgagccctggtggaggaagaggcaatgtcccctgatggggaggccatcgtcactggtg

SEQ ID NO: 312792 - DNA, 75 bp, Homo sapiens
gtggtgtgcgacaacggcaccggggttcagccgtctgtatatctccccagatacctgaaactgaccacctgagta

SEQ ID NO: 312793 - DNA, 75 bp, Homo sapiens
agataggactcttggtttggacatactacatggatcagttgttgacctcctgtactggagagacattaagaagac

SEQ ID NO: 312794 - DNA, 75 bp, Homo sapiens
gtttatgtcaaatctttaagagatttttctacagaatcaatgtctttggtggaagacatgcagtgggctcataga

SEQ ID NO: 312795 - DNA, 85 bp, Homo sapiens
ccgcgctgcagaactctgtgggcagggtgggcccagatgcccttccagagaggagctctaaattgggaagtaatgcaggaaacaa

SEQ ID NO: 312796 - DNA, 100 bp, Homo sapiens
cggctggatgttctcatcgtccctgccaactttccaagtctggggatggccagctgtgttggggtggaagaggaggaggcgcccgacatcgacatatacc

SEQ ID NO: 312797 - DNA, 88 bp, Homo sapiens
aaattcagactcgccaggacaacaaagttgttattggatttgttcccttagcagaaattatggcatcctctggtatcacgattccaaa

SEQ ID NO: 312798 - DNA, 75 bp, Homo sapiens
ccacaccacccacacaccagtcggcagcctccctggctaagacatcaagcacacaaagaattttatgcctacaaa

SEQ ID NO: 312799 - DNA, 110 bp, Homo sapiens
ggaactcgggcatcatggcctcagggccttcatcctagaataatcactgaaggatttgaagctgcaaaggaaaaggcccttcagtttttggaagaagtcaaagtaagcag

SEQ ID NO: 312800 - DNA, 90 bp, Homo sapiens
catggctgcctttgtcccagctgccactgaagacctctggttttttacacacattctattagatgaagctgcccaggccatggagtgtga

SEQ ID NO: 312801 - DNA, 102 bp, Homo sapiens
ggagaccttcgggtagcaactgtcaccttgatgctggcgatgctgagctccctactggctgagggcagagactctcccgattcttcgctgctgctgccttac

SEQ ID NO: 312802 - DNA, 97 bp, Homo sapiens
cttctcacttggcctatggaaaacggggatttccaccatctgtcccaggctgggtggagaaggaaacctactattagccccccgtcctgcacgccgt

SEQ ID NO: 312803 - DNA, 75 bp, Homo sapiens
atcgtggccaacacggtcttgctgaaagccagggaaggcagtcgacaagtactttaagcttcctcatgcttccag

SEQ ID NO: 312804 - DNA, 90 bp, Homo sapiens
acagattctgttgcgaaggcagccatctttagttcgtctttcctagagaggttactgaagctaaaggagatgtttaactccaagtttgga

SEQ ID NO: 312805 - DNA, 99 bp, Homo sapiens
aaatcccttattgatgctgccaaatttcctcttccaatggaagtgtttaagattgctcgctgtaagcagctcatctgtgaccccagctacgtaaaagat

SEQ ID NO: 312806 - DNA, 78 bp, Homo sapiens
tgatgccaccggcccattacgatgccaagcagttgaagaaggccatggagctcttgaggctagtgcgcctctaggcaa

SEQ ID NO: 312807 - DNA, 98 bp, Homo sapiens
cacctttgtcttcctggcaagcctccttgttctcattgaggaggtgaaacagcagaaatgcctgacatgtatccccctggagagtatgacctagctgg

SEQ ID NO: 312808 - DNA, 100 bp, Homo sapiens
agagagagagagagatagacggagatctctggagcagacctcaaggtacagcctgtacacccgcacctggctcgggtacctcttctaccgacagcagctg

SEQ ID NO: 312809 - DNA, 82 bp, Homo sapiens
cggcgaacgcggagagcacgccatgaaggcctcgggcacgggaaggtctgtttctctaacaactttttatcgaacagcgagg

SEQ ID NO: 312810 - DNA, 82 bp, Homo sapiens
cgccagcagccgtccggagccagccaacgagcgcgtgagtgcatctccatccacgttggccaggctggtgtccagattggca

SEQ ID NO: 312811 - DNA, 51 bp, Homo sapiens
cgtttgttcaggaaccaccagtgacagagagtatagtcatggccaacagca

SEQ ID NO: 312812 - DNA, 83 bp, Homo sapiens
acggagatggtgcagaagatggaggaggcaccatgactcctgtgaggatgcagcactccctggcaggtcagacctatgccgtg

SEQ ID NO: 312813 - DNA, 98 bp, Homo sapiens
tgtctcaatttggctacaaaagctaagaaacctttccagcttggacctacgtcatatcactgaactggataatgaaaccgtgatggaaattgtcaaga

SEQ ID NO: 312814 - DNA, 101 bp, Homo sapiens
agaggcgttcgctgcgcgtgcacattccggggatcctgctaaagcggagcggcaagtccctgaacaaggagtggaagaagaagtatgtgacgctctgtgac

SEQ ID NO: 312815 - DNA, 76 bp, Homo sapiens
cttgccctcatcctggttctggaatcctcagttcaaggatgaagagactcggcacagccttgagtgcatccaggcc

SEQ ID NO: 312816 - DNA, 87 bp, Homo sapiens
aaggttctggaaacaactgggcatatggcaaagccttctagacaagctcagtggaatctgaagggcccaccccatggaggaatgctg

SEQ ID NO: 312817 - DNA, 100 bp, Homo sapiens
tcttcgtctgcttcttcctcttcagtcaagtggtttccagtgacagtgacagtgactcggatcttagctcctccagcctagaggacagactcccatccac

SEQ ID NO: 312818 - DNA, 100 bp, Homo sapiens
ggaatgtgctcttgtcctggcattgcatccacaggaggggcaggaaattctttgaagccacattgctgtgaggaagcctgggctacatggagaagcccac

SEQ ID NO: 312819 - DNA, 82 bp, Homo sapiens
cgggagcggagacctcgctgcgctcatggcgtcgcccggggggaaatttgcagtggtgagaaaatgtataaagaaagattct

SEQ ID NO: 312820 - DNA, 50 bp, Homo sapiens
ggaacagaggaacattttgaaacctaaaccaggtggacaggtgaaatgtc

SEQ ID NO: 312821 - DNA, 83 bp, Homo sapiens
cgggttcagttcgtcatggggctgtttggaaagacccaggagaagccgcccaaagaactggttcagccgtctgtatatctccc

SEQ ID NO: 312822 - DNA, 73 bp, Homo sapiens
ggcatcttacagggcagatttctggtcgaaatgagaaggggcagctgggacatggtgacaccaagagagtaga

SEQ ID NO: 312823 - DNA, 140 bp, Homo sapiens
cacagttatttgcaaagtcccaggtgaactcgtggcgagagaaggaaaatgcgcgtcccgggcgcgggtgggaccagggagattggatctgctctcaccaggatgtgcatgaggcacagaagcattgaagccaagctgag

SEQ ID NO: 312824 - DNA, 85 bp, Homo sapiens
gacatggtcctctgcgttcaggggtctcattcaggaacgtcgcctgataacactgcaccaccacctccccctccaaggccacagc

SEQ ID NO: 312825 - DNA, 100 bp, Homo sapiens
agaagaagctggctcccatcacctacccgcagggcctggcactggccaaggagattgaggctgggaggcggcagaatgcagccagaggagggcacaggct

SEQ ID NO: 312826 - DNA, 104 bp, Homo sapiens
atacccctttgaattaattatggctcaaagaacagtctgaacttgatcaagatttggatgatgttgaagaagtagaagaagaggaaactggtgaagaaacaaaa

SEQ ID NO: 312827 - DNA, 83 bp, Homo sapiens
tgatagtttgtggcttgtagaattctatgctccatgtgcataactcctcctcagagccctgatctcgtggagccatcgacaag

SEQ ID NO: 312828 - DNA, 50 bp, Homo sapiens
atctcccataggcactcagtcaaggatggcacatttcctagaggcagaat

SEQ ID NO: 312829 - DNA, 74 bp, Homo sapiens
ggatgtgacccaaggagagtgctacccggtgtactggaaccatggaccacacatccccgacctacatgcttgct

SEQ ID NO: 312830 - DNA, 75 bp, Homo sapiens
ggaacatgcagagtctgcacaagtttaagaaaatctacgaagaaacgcagtgagtctccacctgctgagctcccc

SEQ ID NO: 312831 - DNA, 100 bp, Homo sapiens
cttccggcgcattgataaggaccaggatgggaagataacacgtcaggagtttatcgatggcattttagcatccagcaatagagcatatgttctacaggag

SEQ ID NO: 312832 - DNA, 100 bp, Homo sapiens
caacctctcctcttcgtctccgccatcagctcggcagtcgcgaagcagcaaccatggtctccctgagtctttgaggacacagcctcgctggaggcagttt

SEQ ID NO: 312833 - DNA, 90 bp, Homo sapiens
cggaagagtggattatttggtcactgaggaagagatcaatcttaccagagggccctcaggtggtgatcagggaagtggctttgggaccac

SEQ ID NO: 312834 - DNA, 100 bp, Homo sapiens
ggatgaggaaactgaggcctggagaggttaaagagacccgttcagagtcctacagtggcaggcaacaagaatgggtgaatcagcaaagggaagatattga

SEQ ID NO: 312835 - DNA, 97 bp, Homo sapiens
tccagcctcttgcgaccacagccagagcctcagcaggagcctgttctcatcaccatggcaacaggcgaggaaacgagacctctttcgttccttctag

SEQ ID NO: 312836 - DNA, 90 bp, Homo sapiens
tgcagaggtgataggggttcttgcccaatcaaagaaacttgagatggaagcaaagagaaaacaagaagaagaagagagaaagaaaaggga

SEQ ID NO: 312837 - DNA, 75 bp, Homo sapiens
tttcacagcactctgggcgaaaattggatgtgaaaatgaagccagaccgagaacatggtccaagacaattcctgg

SEQ ID NO: 312838 - DNA, 98 bp, Homo sapiens
aagtattggtgctcagaaggctaaacttggacagaggttggaaagaaccatgactgtattcaggaaggcacatgaactgaagcttctgtcagaatgcc

SEQ ID NO: 312839 - DNA, 75 bp, Homo sapiens
cgaggagtagtcgctggagtccgcgcctccctggacacgaatgcagagtttgagtccagatcccaaagcccagta

SEQ ID NO: 312840 - DNA, 75 bp, Homo sapiens
tgaaaacattggaccacacaaagtcttactggaagatgatccctatgatcttgaagatgtttctgcacagaaatg

SEQ ID NO: 312841 - DNA, 100 bp, Homo sapiens
atggacatggtgtatgcaagtggccaggctgtgaagcagtgtgcgaagatttccaatcatttctaaaattgagaggatccagaatccagatctctggaat

SEQ ID NO: 312842 - DNA, 100 bp, Homo sapiens
agctaactttcaacaaccccacagaggactttaggagaaagttgctgaaggcaggaggggtggatatgcagtgggtgcaggttttggcagaaggttgggc

SEQ ID NO: 312843 - DNA, 100 bp, Homo sapiens
cgcagtcgcagccgctctccacggagggaatgccaatactggggctcagagctccagctacccactttggattttgaagatgttttaagatatgatgaac

SEQ ID NO: 312844 - DNA, 75 bp, Homo sapiens
gcggatcgggtggagtgtaggtcatatcgccgcgacaaagatcattccactcagcctgggacgatggggaggaaa

SEQ ID NO: 312845 - DNA, 107 bp, Homo sapiens
gggagcaaaaccaacgcctggctcggagcagcagcctctgagtactatactggcaattgctggagaagattttgcaattgttgcttctgatactcgattgagtgaag

SEQ ID NO: 312846 - DNA, 74 bp, Homo sapiens
cgggacccgcgccgctgccctccggctccgcgggcggcccacggcgagacaatgcagatcttcgtgaagactct

SEQ ID NO: 312847 - DNA, 100 bp, Homo sapiens
cctggaaggggagactctgctgacacccatcacccacatctcacagacactcacatgggagtcaagaaggtggagcaaacacaacctctggtcctataag

SEQ ID NO: 312848 - DNA, 100 bp, Homo sapiens
ccaacactgataagattgaatgccaagcagaaaattacctaaatgcactctttcgaaagaaaggttacacggtgtgggcacacaacctcattgccattgc

SEQ ID NO: 312849 - DNA, 100 bp, Homo sapiens
tgtcaagaggctgaatgctatctgtgcacaagtcattcctttcctgtcccaagagagtaattccctcctggtcccagacagtctaagaggcacagataaa

SEQ ID NO: 312850 - DNA, 75 bp, Homo sapiens
ccatggcaaaataactggctcccaggcccctacaaaggcttcagagtagatatctctgccaacatgaggacagaa

SEQ ID NO: 312851 - DNA, 95 bp, Homo sapiens
gctgatctcaaccttgtacaagccttaagcagaatggggaaatggagagagaacctgaaagagccccaaactcgaggacctattgctccccaaga

SEQ ID NO: 312852 - DNA, 76 bp, Homo sapiens
tccccggctcgcggggcccggcgaagggcagctcaaactggaggattataaggatcgcctgaaaagtggagagcat

SEQ ID NO: 312853 - DNA, 100 bp, Homo sapiens
tccctgaccccttcttgccatcgccccagacatggggaacgcggcgaccgccaagaaaggcagcgaggtggagagcgccaataggagctctgaacccaaa

SEQ ID NO: 312854 - DNA, 100 bp, Homo sapiens
gttttgcccttgcattggggagcctggttagaactctgtaacctgatcacagacaaagagatgatttgggaatggatgatgaaggagatgatgacccagt

SEQ ID NO: 312855 - DNA, 100 bp, Homo sapiens
gtccactctgcgagaatgggctgtcatctggcgaaagctctacgtgattgtagaaggcatgaaacaaaaaatgtggagtattgaaaatattgccttcggt

SEQ ID NO: 312856 - DNA, 90 bp, Homo sapiens
ctgatggctagcgtgttggtcacctctgccactccacagggcagcagaagaagcctttgtaaatgacattgacgagtcgtccccaggcac

SEQ ID NO: 312857 - DNA, 100 bp, Homo sapiens
cgcaaactcttaaggtcactttctgaaggcggcctcatcacagtcggaggtgaaggagtacctcctggcaactatgggaactatggctatgctaatagtg

SEQ ID NO: 312858 - DNA, 100 bp, Homo sapiens
ttgtgaggattaaaagttggatgtaacggcttgatggcagaagattttcaagtcccggctggtggagttgttagtgtcctatggcaacaccttctttgtg

SEQ ID NO: 312859 - DNA, 100 bp, Homo sapiens
ccggcgcggtcgcagtctccacggcgcaggcccacggtagcgcagccgctctgagatgaggtggaaagtgagaaatggtacctgtctacagacttccctt

SEQ ID NO: 312860 - DNA, 95 bp, Homo sapiens
gagaagctgtcggagcttcccaaggcttggccggtacaggtgtgagaaagggactactgcagtcctcactgagaaaatcactcctctggagattg

SEQ ID NO: 312861 - DNA, 74 bp, Homo sapiens
cttcagcaccgcgcccatggcagagccagaccgacacagctatttcatcataagaatggggcccgaaaaagtgc

SEQ ID NO: 312862 - DNA, 100 bp, Homo sapiens
actcttcttcaaacttatcttccccaactcttttatcatctacgagaaattggggctcaaccggaccatggctaaacctcctggatcattagccagaagc

SEQ ID NO: 312863 - DNA, 89 bp, Homo sapiens
tgcagttgctcgatgtgcctcctggtgaagacaaggggggatatgtgatcaaagcatcagaagcagtctctggtcccagcccaccccat

SEQ ID NO: 312864 - DNA, 99 bp, Homo sapiens
tagtagtattactgtggaagtacctacaacttcagagaagatggcgaattagaagatggtgaaatagacgatgcaggatttgaagaaatacaagaaaaa

SEQ ID NO: 312865 - DNA, 96 bp, Homo sapiens
ccatggaggggctgctgaaggcggagatcgcccgccgagcttgctttttgctgagaaagcttcctgccctggaagatggcacccttccccatccag

SEQ ID NO: 312866 - DNA, 100 bp, Homo sapiens
gacctactgcagccacgcgggcgagcggctgtgtggatgtcggcgaagccgcgggcgagggtttccaggcctgaggtgcccgccctggccccaggagaat

SEQ ID NO: 312867 - DNA, 82 bp, Homo sapiens
taccagggaggccaagcgaccacccaaagaaggaaacatgccctgaactgtcacagaatgaaaccagcgctcttcagcgtcc

SEQ ID NO: 312868 - DNA, 50 bp, Homo sapiens
ccttctgattctaactgcaaagatggcagtcttgggcacgtccatctgta

SEQ ID NO: 312869 - DNA, 50 bp, Homo sapiens
atataatgaagactagttttccagcactattcctgatcagagaactccag

SEQ ID NO: 312870 - DNA, 90 bp, Homo sapiens
cttccaaggaaccagtgcgaaggattacctcaacctctcttggaactcaatgactctcctgtcttcaaaaccgtcttggaaagaatgcag

SEQ ID NO: 312871 - DNA, 90 bp, Homo sapiens
ccaggacagttacacttagaggccttggtgtccgcaatgttgccagtgtctgtctgcagattggctacccaactgttgcatcagtacccc

SEQ ID NO: 312872 - DNA, 88 bp, Homo sapiens
aggagaagagcccagcacaacgaaggtcgctttgctgttcgtgatatgagacagacagttgcggtgggtgtcatcaaagcagtggaca

SEQ ID NO: 312873 - DNA, 100 bp, Homo sapiens
atggcaaggacagttgcatcatcaaagaaggagacgtggggtcactggtgtatgtcatggaagaggtgacgttaaaggtgcacatcagcgacgccagcac

SEQ ID NO: 312874 - DNA, 100 bp, Homo sapiens
ccacaacgccgcttcggggctcctaggtgaggctgctgtcagaaaggaacttttacacagtttgccttcagagacagtctatcggcatgttgtagagttt

SEQ ID NO: 312875 - DNA, 88 bp, Homo sapiens
tagcaaacatcgatggcctactggggataacattcatgcagaacatcagcttttcttggacagtgacttactttgattcttttgaacc

SEQ ID NO: 312876 - DNA, 74 bp, Homo sapiens
accaagcctctcattgttcagagttaagggagcatggagaaaagaagaaacgctcgcgagaggatgctggagat

SEQ ID NO: 312877 - DNA, 82 bp, Homo sapiens
aaggagcatcccggctggagcagagccaggcgaccactttatcaagttcttcgctccgtggtgtggtcactgcaaagccctg

SEQ ID NO: 312878 - DNA, 51 bp, Homo sapiens
agtcgatctggagcttttcccctccccgggattctccttttacaaatgcag

SEQ ID NO: 312879 - DNA, 100 bp, Homo sapiens
gccacgccgtcttctttatgatccccacctgggttctggtggacctctcggctttcctggtcagcagcgacttgacacgatgaggcgagtggtacgacag

SEQ ID NO: 312880 - DNA, 125 bp, Homo sapiens
gctgagagacggcggcggccgaaagcggagagatgctgggcgtggcggccgggatgacccacaggtttattcagtcaccatgaagctgctgctgctgcacccggccttccagagctgcctcctgc

SEQ ID NO: 312881 - DNA, 75 bp, Homo sapiens
ggtcagttggcagccatcaaagttatggatgtcactgaggtttatcttgcagattatggactttcctacagatat

SEQ ID NO: 312882 - DNA, 100 bp, Homo sapiens
tcttcctacaagaccctcaaagccaggagctcgatgtgcaagtaaagaagcttcttaataaagtagtgctccgtgaatcttgcttttaccggaaattaac

SEQ ID NO: 312883 - DNA, 82 bp, Homo sapiens
ggggatggttccatcatggcgtcaatgcagacagggaaaaatgcattttttgtgggagatcttggaaagattgtgaagaaac

SEQ ID NO: 312884 - DNA, 100 bp, Homo sapiens
ctctacaaggatctgcagccatttatattgcttaggctactgcgaactctagttggcctagtaagagacctgagagggatcgctttcgctttcaatgcca

SEQ ID NO: 312885 - DNA, 75 bp, Homo sapiens
agaacatcatccagtggcagacactgaaaataatgggtcaccagaagaaatggtcttgctgccaagacaggctcg

SEQ ID NO: 312886 - DNA, 74 bp, Homo sapiens
gtgtaagcagtgtgcaaacaaggtctgggaggggctgaacgtggtgaagacaggccgagtgatgcttggggaga

SEQ ID NO: 312887 - DNA, 97 bp, Homo sapiens
ttcatgtgttcctgtagctctgatgagtgcaatgacaacatcatcttctcagaagggtcctgatgaagaagctgttgtggatcttggcaaaactagc

SEQ ID NO: 312888 - DNA, 100 bp, Homo sapiens
tgaacctttagatgaatttacagaatcccgttctgcttccagaagtggaagtgctcacggatcggggaaatctgcaaggcatacccctgcaaggtctcgc

SEQ ID NO: 312889 - DNA, 90 bp, Homo sapiens
cggagctgtctcgagctgagccccctaccgggccggatcccgaggtgatgcaggttctgaatgctgatgccattgttgtgaagctgaact

SEQ ID NO: 312890 - DNA, 82 bp, Homo sapiens
ggaggcgccgctctagcggccgggactctgaactatggcgtttaagctatgaagaaggacatccctcacactctgaaacaga

SEQ ID NO: 312891 - DNA, 96 bp, Homo sapiens
tagataacagcttccgccaggcggtgatgaagaatccccccgaaaggaccccccagtcaagctacaacttcaagcagaagagagaggagttgtgtc

SEQ ID NO: 312892 - DNA, 82 bp, Homo sapiens
gagtagatattgtcctagatgctggaggcctatgagagctacaagaagaaggactacacccaggtggactacttaatcaacg

SEQ ID NO: 312893 - DNA, 75 bp, Homo sapiens
tggatatcaagccagagaagtgcccgaggagagttaacaggtgcctaatggataagaacttcgttaggattggga

SEQ ID NO: 312894 - DNA, 100 bp, Homo sapiens
accgcctccgtctcaggctgccccggacatgagcaagcccccgacagctcagccagacttcccctatggtcagtatggtgcagagcagacagagaaagcc

SEQ ID NO: 312895 - DNA, 100 bp, Homo sapiens
caaccagcggcagaacgtctgtgctgagcctagatattatcctactgaagatgtgcctcgaaagctgttgagccacggcaaaaaacccttcagtcagcac

SEQ ID NO: 312896 - DNA, 90 bp, Homo sapiens
acttattcctgtccggagacagcctaagggtgggcacaggcttcagttttactgatgatacccacggatatgcagtcaatgaggacgatg

SEQ ID NO: 312897 - DNA, 100 bp, Homo sapiens
taaaatgcaagttggataaaaggaggacctctcgccaagggccccaatgagtggcacacagtctactatcaccgacaggcgaaacctaaccaaactgtcc

SEQ ID NO: 312898 - DNA, 75 bp, Homo sapiens
gtggcagctgctgagttctcggtgaagtaagactttgaccccgacgcaggcttcagtgattgccgcggatcagaa

SEQ ID NO: 312899 - DNA, 100 bp, Homo sapiens
cacgggtgaatgctgctaaaaacaagactggggctgctcccatcattgatgtggtgcgatcgtggtgaaatagggccttctaaacctgtggagaagtgag

SEQ ID NO: 312900 - DNA, 100 bp, Homo sapiens
actgttttctcactgtacttctgggtaaactggagaagagcttcaactctgttcacctgcttgcagaatcgcctaccatttggtgcaagcaaaaagcaat

SEQ ID NO: 312901 - DNA, 75 bp, Homo sapiens
actatgaatgctacttggatgcctcttaagtctccttatatacatttgacaaagccaaacagtgtattggcacaa

SEQ ID NO: 312902 - DNA, 90 bp, Homo sapiens
gcctagcgtcctggaattacttcaatcaaattttaggtgatgggcaagtcagaaagtcagatggatataactgatatcaacactccaaag

SEQ ID NO: 312903 - DNA, 82 bp, Homo sapiens
gaagctgatttgtcagcagttagagagatatatgggccacatgcagtttctctcaggctgcagccacgcccctgctgcagag

SEQ ID NO: 312904 - DNA, 89 bp, Homo sapiens
aaatgccttggcaagcgtgcctaagttctatgtacaggcagtataactccaactgtggaactgaatgggcttgctatgaaaaggggaga

SEQ ID NO: 312905 - DNA, 95 bp, Homo sapiens
atggtgatctgtctgagatgtacgctaagactgaacaggatattcagagaagttctataggagcatgctgctatgtggaatgttcagctttaacc

SEQ ID NO: 312906 - DNA, 100 bp, Homo sapiens
tccagcgcgtggtgggggaactgctggggaaggcgattggcatcgatctctccatcccttccgaggcccgacttcgtatagcgtaagcactgtccacctg

SEQ ID NO: 312907 - DNA, 111 bp, Homo sapiens
ctggttccatgccgcagtaggacagcaggcccaagtctgcacatcccaggaaaggccgagggggacggcaagatgcacatcaccctctgtgacttcatcgtgccctgggac

SEQ ID NO: 312908 - DNA, 74 bp, Homo sapiens
tggatcctgcggctccctccaggtattaagggagatatcccaaaggtgtggacattgcaagcagtttgctccgg

SEQ ID NO: 312909 - DNA, 106 bp, Homo sapiens
agtggtctccagcactaactatttcaaaaggtgactctcctattccatctgtttcttcgggatcatcttcacctctttcagccacttctgccccaccaacgttggg

SEQ ID NO: 312910 - DNA, 98 bp, Homo sapiens
aaaacttcaagccaaacatcaagcagaatgtgatttgcttgaagatatgaggatcctcagtcttccacaatgaaccctgtttacagccccgtgcagcc

SEQ ID NO: 312911 - DNA, 75 bp, Homo sapiens
gcgtgtctaggtgagtcgcggtgggtcctcgcttgcagttcagcgaccacgcgtgagtgcatctccatccacgtt

SEQ ID NO: 312912 - DNA, 98 bp, Homo sapiens
cttgatgttctcatcaagcccacgagtttagttggctggggaacagaccagggaattggtggatttggagaagagccgggaattaaatcacagctaat

SEQ ID NO: 312913 - DNA, 97 bp, Homo sapiens
aggaaaacagggaaaaatacttgcaaatacgtttataacatacactactcagacagtaccttctccaggcaaattccgttcccctgcagcaccatct

SEQ ID NO: 312914 - DNA, 83 bp, Homo sapiens
ggcagaagatgatgatgaaagtgttttcctttggaatatggataaatacaccatgatacggaaactagaaggacatcaccatg

SEQ ID NO: 312915 - DNA, 80 bp, Homo sapiens
tttgggggcaagtacggagttgagagggacagggcagacaaggtgtgcattgctaagtgcaacagtacctcttccctgga

SEQ ID NO: 312916 - DNA, 90 bp, Homo sapiens
tcaggcctgaccgggataagctccagttggtcctgagaaaagggtgccagcgatgcctggatcgcctgtggaagtgaagatacagtccag

SEQ ID NO: 312917 - DNA, 100 bp, Homo sapiens
gaggcggcgaatcacttataaatggcgccgaagcaggacccgaagcctaaattccaggagggcaaccaagaatcccttctacctccatgtaggaatggat

SEQ ID NO: 312918 - DNA, 83 bp, Homo sapiens
cagggctgagccgtgaccatgagggccatcccgaaactgtgattgttttctggctgtcgagaaacggcgtttatcttcgctat

SEQ ID NO: 312919 - DNA, 100 bp, Homo sapiens
tccgtggccttagctgtgctcgcgctactctctctttctggcctggaggctatccagcgtgacagagttagtccttgataattgcctgtgtgtcaatggg

SEQ ID NO: 312920 - DNA, 100 bp, Homo sapiens
ctcaccggtttctcccacatcgacctgctgattgggcagaaagtggcccatgctctggcagagggactcggagtaatcgcctgcattggggagaagctag

SEQ ID NO: 312921 - DNA, 100 bp, Homo sapiens
atgaaggcgttgtggaccaccaaacagaactttctaatttagccaaggaaggacaatgtgttgaacatcattaaccagatcatggatgagtgcatccccc

SEQ ID NO: 312922 - DNA, 83 bp, Homo sapiens
ggacagccgcccctggtgcacacaccctcgtattctcctgcccttccccagtgttcctctgaacaacagggagaatatctctg

SEQ ID NO: 312923 - DNA, 86 bp, Homo sapiens
cttagctgtgctcgcgctactctctctttctggcctggaggctatccagcgaagccatcttcgacaagagcacagggaaggttgtt

SEQ ID NO: 312924 - DNA, 95 bp, Homo sapiens
gagacttaaaggaggccctcataagctatgcagtcatgcagatcagtatgtgcaaaaaggttgcagatattttattccaaactgcccaaaatgca

SEQ ID NO: 312925 - DNA, 97 bp, Homo sapiens
atcagaagcaggcggaggagacggcggccttcgaggaggtcatgaaggacctgagcctgacgcgggccgcgcggaacaagaggaaagtatggggaag

SEQ ID NO: 312926 - DNA, 101 bp, Homo sapiens
gaaatttttgggaaggtgcaaggggtgtttttccgtaagcatactcaggaagatatggggatgacatatgcggagctctcggtctatgggaaactcaggaa

SEQ ID NO: 312927 - DNA, 81 bp, Homo sapiens
ggtcggaacacgccccgcgctgctgggtcccgccagacacgccgccgccgcagtgaacagagtatctgtcaggcaagagct

SEQ ID NO: 312928 - DNA, 100 bp, Homo sapiens
accggcggctaccggcggcggcgcgcagcgtgtcaggcggagagacccgccgccagtcctgacacagctctccctgaggagcagccacattccagctccc

SEQ ID NO: 312929 - DNA, 75 bp, Homo sapiens
ctcctgctcagtgtagcattaaggccccttcacagatgtagtcactacaaatcttaaattgcgaaatccatcgga

SEQ ID NO: 312930 - DNA, 101 bp, Homo sapiens
ctactcaaaggagacccagactcctcttgccacgcatcagtctgaaggaacatcatttacagcgagcaatttcagcacagcaagtgtttagagaaaaaaaa

SEQ ID NO: 312931 - DNA, 100 bp, Homo sapiens
gtacaaactgaaagaccactatctggagtttgagactcaagtttttagaagctagaatatagatccctttaagaaaaaaaaaggaagaaagaagaatttg

SEQ ID NO: 312932 - DNA, 83 bp, Homo sapiens
agaaaacacaggagccggagcagaagcaaagaggaactgtggctgcaccatctgtcttcatcttcccgccatctgatgagcag

SEQ ID NO: 312933 - DNA, 76 bp, Homo sapiens
gacagaatgaagacagggacagtggcattgctcgatcaggaatctggtggacagtaacaaactttggtgaaatttc

SEQ ID NO: 312934 - DNA, 100 bp, Homo sapiens
ctccatccccagcagccctgcttcttcacagttcgttctaagaagggaggagagtttgatgaatttgtcaatgatgacactgatgatgacctacctatat

SEQ ID NO: 312935 - DNA, 100 bp, Homo sapiens
tggaaactggggtgatcaaaagaaagctcatcaagccagagctggagtatctcaggtgcctgtggtagccatattgggttcaggtgggggtttccgagcc

SEQ ID NO: 312936 - DNA, 75 bp, Homo sapiens
ggtttacatgagcatctgtggggagaatgaaaactgccctcctggcgtggccaaagtggaacaggtgaagttcga

SEQ ID NO: 312937 - DNA, 100 bp, Homo sapiens
gacaatacaaaaagctgatgaagttgtttgggtacgtgcaagagttcatacaagcagagctaaaggtgctggagaatctggtaaaagcaccattgtgaag

SEQ ID NO: 312938 - DNA, 87 bp, Homo sapiens
gaaggggaacggatctgtgtgcccacagctcctggagccccacagacttcccaagtaagaagcggaagaggagccgctggaaccaag

SEQ ID NO: 312939 - DNA, 113 bp, Homo sapiens
gtctgaaaggcactttattatgcaggtggtctgtgaagccacacagtgtccagatacgagggaagattttcagtcaatgacttatggatttaaaatggctaacagtgtgacag

SEQ ID NO: 312940 - DNA, 99 bp, Homo sapiens
tgacacggatcggcccctgctcagcaccttagaggagacttgatcctgctccctcggtgtctgcattgactcctcatgctgggactggacccgtcaacc

SEQ ID NO: 312941 - DNA, 101 bp, Homo sapiens
caacatcatgcagtggaatgcagttatatttggcaagggcaagtattttgtaaccttcccatatccatatatgaatggacgccttcatttgggacacacgt

SEQ ID NO: 312942 - DNA, 50 bp, Homo sapiens
cacaacgatgcgtctcctggatggatatgaatgaaagcagaccccctgtg

SEQ ID NO: 312943 - DNA, 100 bp, Homo sapiens
agagagacatttctggctctgaaggcgaacgcttcgctggccatttaggagctctgctcaaagccagacgatatttggagttcttacaacatggcagaca

SEQ ID NO: 312944 - DNA, 75 bp, Homo sapiens
tggattatgggcctttcagagatgtgcctgcctatagtcagtttgaaggatgacctctaggaagaaagtgttgct

SEQ ID NO: 312945 - DNA, 83 bp, Homo sapiens
taaaactgaactttacagatgaatggatctgtctggctccattgatgacctccccacgggaacggaagcaactttgagctcag

SEQ ID NO: 312946 - DNA, 100 bp, Homo sapiens
tgatgcttttgtgcgagaagaccttgcccgccgggtgaacctcaccgaggcgagagtgcagcagatccagtttgctgaccagaagcaagaattcaacaaa

SEQ ID NO: 312947 - DNA, 105 bp, Homo sapiens
tgatggaaacaccatggctgcggcggcccagctctctctgacacagagtactattaatcccgtagatgcaatatatcaacctagtcctttggaacctgtgatcag

SEQ ID NO: 312948 - DNA, 103 bp, Homo sapiens
catgccgtgtgtgtgctgggcaccttgactcagcttgacatctgcagatgagacgtgcaggtaccatcaggaagcagcgggataagctgataaaggaaggaaa

SEQ ID NO: 312949 - DNA, 75 bp, Homo sapiens
gaaagtacggaccataataatcaggagtgaagtcccagggatattctgtgctgatcagacactcctctaatttac

SEQ ID NO: 312950 - DNA, 73 bp, Homo sapiens
ttccaaccaggggctgagcttctgcgctgtggagaagccagaggagaaggcagagcccccccaggctatgaat

SEQ ID NO: 312951 - DNA, 100 bp, Homo sapiens
tggggactgtccaagatgcatgtgctcgggacgaccctgggacagtctccactggggcagatccagctgaccatccggcacagctcgcagagaaacaagc

SEQ ID NO: 312952 - DNA, 90 bp, Homo sapiens
aggagccatcctgcttcaggataagaagctcatggccatgttcctagtcgcaatgtatctgctgagcaaaaagatgaaaacaaagaagca

SEQ ID NO: 312953 - DNA, 100 bp, Homo sapiens
atggaaggttgcaagtaggagatagactactaatggctaggcagctggaagagaaagaccgagtgctaaagaagcaggatgcattctacaaagaacagct

SEQ ID NO: 312954 - DNA, 80 bp, Homo sapiens
tacagagccacgtcatccgcggctacgtgggcaaccgggcggccacgttcccgctgcagacaatgcagatcttcgtgaag

SEQ ID NO: 312955 - DNA, 82 bp, Homo sapiens
aaattaatgattttgtattatcacctggaccccaaccatacaaggtggcagaactggtgaagccattgtagatgctgcgctg

SEQ ID NO: 312956 - DNA, 75 bp, Homo sapiens
cagcctgcggagcctgtggggcaggtctgtccacgttctctgtgggttcattgccggacttgagtctgagttcat

SEQ ID NO: 312957 - DNA, 100 bp, Homo sapiens
ggactcgcctttgccctggcaaacactggaatcctactttttctgaaacccttttccaaagagaaatgaagaagaaaactgtatgtaccctaaatatggg

SEQ ID NO: 312958 - DNA, 75 bp, Homo sapiens
taccatctaaaatacgaaggtttctggctgggttctatttcaccaattggcatggaaccaacgacaatgagcagt

SEQ ID NO: 312959 - DNA, 90 bp, Homo sapiens
cagggagagccccaggtccagttcaaagatcaagtcttccataccagggaccaggccaaaaccagactgccactgcccctacttgggccc

SEQ ID NO: 312960 - DNA, 75 bp, Homo sapiens
agtttctcacgacgggccgagcctgccactgtgtgttccagagaacaagccttcagacatttgctatattgacgc

SEQ ID NO: 312961 - DNA, 75 bp, Homo sapiens
acgctatgtccttttggcttcgaggtttaccccttccaggtgctacaaagtacacagataaagacaatggaggga

SEQ ID NO: 312962 - DNA, 83 bp, Homo sapiens
gtcggcttcaaagagaaaaggcaacatcctgtcacaggccatgctctggcaaaaactgggaatgtaagacggacttagatatt

SEQ ID NO: 312963 - DNA, 75 bp, Homo sapiens
ggagaggatatgtagcgaggaggaacgcgctaaggcaaagcacctggacatggatttgattgacatactttggag

SEQ ID NO: 312964 - DNA, 88 bp, Homo sapiens
agacttaaatgtttttttcagctgggatccaaaagacagcccaaagagattacttggagcccctcgcgagtgtttccgcctgttcgag

SEQ ID NO: 312965 - DNA, 74 bp, Homo sapiens
aagtagaaggaaaaacagaacgttgcaaactctggaaaaaaacttggggtcgtctcttttatacatgtgatgga

SEQ ID NO: 312966 - DNA, 90 bp, Homo sapiens
ctcaatgtcaagtcatctttggctcaaggtttagatgtagattctctggtcattgagcatatccaagtgaacaaagcacctaagatgcgc

SEQ ID NO: 312967 - DNA, 100 bp, Homo sapiens
gtcttccatcaatcatatctcacagctgctgctggacacccactcgctgaagatggtcctgctcgatctcccctccatcagctcgcaggtggtgaggaag

SEQ ID NO: 312968 - DNA, 127 bp, Homo sapiens
agatgtcagaagattcagaaaaggaagactattcagacagaacaatcagtgatgaagatgaatcggtgaccaagaatatggcccaggtgaccaaagccctggacaaggccctgagcaccatggacct

SEQ ID NO: 312969 - DNA, 75 bp, Homo sapiens
acaggccttccactggacaaccccagcgtgctttcaggccccatgcaggctttatcctgtggataaacgcagagt

SEQ ID NO: 312970 - DNA, 76 bp, Homo sapiens
ggcaggctctggactcctaaagctctggagcgacactacctattgcattaaaaaactcccacggaatcctcagaga

SEQ ID NO: 312971 - DNA, 100 bp, Homo sapiens
ttggccacatggtgctggccttgggaggttactaaggagcgcacagctcagtgtttcctgcgtgtggacgatgagtcaatgcagcgcttccacaaccgcg

SEQ ID NO: 312972 - DNA, 76 bp, Homo sapiens
caacgcatcatgccagggagccaagcgtcctgcccggccgatgacagtgatgggattccgtggtcagaagaacggg

SEQ ID NO: 312973 - DNA, 100 bp, Homo sapiens
cttgtggatggacttgctacctcttgggtgaactctagcaattacaaggctaggcagctggaagagaaagaccgagtgctaaagaagcaggatgcattct

SEQ ID NO: 312974 - DNA, 100 bp, Homo sapiens
tgcttatggagacactcaatgccactacccctcactatgtgcgctgtatcaagcctaatgacttcaagttcccattcactgcgtaagagacgagttgaag

SEQ ID NO: 312975 - DNA, 76 bp, Homo sapiens
accttctcgctgccgccataccctgccttctccagcgacagccggttttggctacgggcctccacctccaccgcca

SEQ ID NO: 312976 - DNA, 90 bp, Homo sapiens
gcatttctggggaccaacagctggccgaggctcagggatagagacggctgctccagctaaagccgaggcctgcctggagccccagatcac

SEQ ID NO: 312977 - DNA, 75 bp, Homo sapiens
cgaggaggagagcaactcggacgaagatgaggtcatccccgacatcgctcaggttcagattgaaggagatttttt

SEQ ID NO: 312978 - DNA, 49 bp, Homo sapiens
agcccaacaccttcccccactggatatcctaaacctgaggaaggaatac

SEQ ID NO: 312979 - DNA, 75 bp, Homo sapiens
gtcgccctcacttaaggagcgagggaggcctcgggggtccccagccggggcagtcagggcgacagcaagaatgcc

SEQ ID NO: 312980 - DNA, 101 bp, Homo sapiens
ctggtacctcttttgtgaagcggcagctgaggagactccggcgctcgccatggccgacgaaaagcccaagatcaggatcctcatgaccagccaaagagaag

SEQ ID NO: 312981 - DNA, 98 bp, Homo sapiens
ttcactgacctaccccctggacctggtcagagcgcggatggccgtaaccccgaaggaaatgaccaattctgactccgccctgcaccagagcacaatga

SEQ ID NO: 312982 - DNA, 83 bp, Homo sapiens
cggagctgctgaaccctgagcccaggagactgagcccagacaatgcagatcttcgtgaagactctgactggtaagaccatcac

SEQ ID NO: 312983 - DNA, 82 bp, Homo sapiens
aacctgggcgagcagcggcgggggcccgagggggagtgcatccgccccaacccttttccccctcgtctcctgtgagaattcc

SEQ ID NO: 312984 - DNA, 75 bp, Homo sapiens
cgctgggcagcttcgtggaggagtacaacaacaagcgacgagtagaacagcccctctatggtttagatggcagtg

SEQ ID NO: 312985 - DNA, 83 bp, Homo sapiens
gtgtcagcagctagcccttttcctcaagttcattccttggaagaagctgtaccatcgatacctgatgaatgaagagcaagctg

SEQ ID NO: 312986 - DNA, 75 bp, Homo sapiens
gccacggcggagacccccgccctcaactgagaccccaactgtaaacttgaagacaagactgaagatggagaggca

SEQ ID NO: 312987 - DNA, 75 bp, Homo sapiens
ctagtgactggacgtggatgtgaccgctgcctgatgagtcagtctgacagtggggtggacctgagtggggattct

SEQ ID NO: 312988 - DNA, 82 bp, Homo sapiens
cacaggacaccgaagaaaccatcacgtacacggtcagggaagtcaaagatgcatccctgagttcttcctagcaggcaagcag

SEQ ID NO: 312989 - DNA, 90 bp, Homo sapiens
tggtgttatcaacttaaaagatgccacctctaagtcctccatgaatgccatgggctccctttccgtcctgtcgccggaccgggtcctccc

SEQ ID NO: 312990 - DNA, 100 bp, Homo sapiens
cgcgaaccgcagtatcatgctggccaagaagatcatcattaaggacggaggcacgcaaattcaacacccaacagcttccttaatagcaaaggtagcaaca

SEQ ID NO: 312991 - DNA, 88 bp, Homo sapiens
ggcttgccctggtcttgctcggccgatgaagtgcagaggtttttttctgagtaaaggtgctagtgctggaagagaatggactgaacag

SEQ ID NO: 312992 - DNA, 75 bp, Homo sapiens
acgaaaccatcggtagactccacaagaagcggcaccatgtactacagacggctcatccctcccctttgtcagtgt

SEQ ID NO: 312993 - DNA, 97 bp, Homo sapiens
attctttggcagttggtgaaaattactgatggctctccttccaaaagtgaaccagaggaaatgcctccagaagcaaagatgaggatgaagaatattg

SEQ ID NO: 312994 - DNA, 95 bp, Homo sapiens
cggcgcaactccgcaccgcagagccggcgcctcctcggcagtactgtcaagatgataagcatggaataaagcttcagaagggtctttaccaatct

SEQ ID NO: 312995 - DNA, 94 bp, Homo sapiens
gcagctccagcccggcccggcagcgacatggaaggtgctggagaatctggtaaaagcaccattgtgaagcagatgaggatcctgcatgttaatg

SEQ ID NO: 312996 - DNA, 100 bp, Homo sapiens
tgtcagtgccaattttgccggtcacactggggtccccaaagaggtcaaggtaatcatggccacaaacagagcagacaccctggatccggccctgctacgg

SEQ ID NO: 312997 - DNA, 75 bp, Homo sapiens
aacatcctcctggccaccgactcctacaaggtgacttaagagattaaaattaatttggttgctgttggttctgaa

SEQ ID NO: 312998 - DNA, 80 bp, Homo sapiens
gggggcaccaccctccatgcctttgcagattgactggggcgactttggggtagaggcagtgtctgaggggactgactctg

SEQ ID NO: 312999 - DNA, 100 bp, Homo sapiens
tcgctgattacagctggaaacaattgatttgctcttacgtatttgtgtgacttgactcttcaaacacaaagactcagcccgcctgcacccaggtgaaata

SEQ ID NO: 313000 - DNA, 82 bp, Homo sapiens
ggcctcccgcccgccgcgctccagatgaagtgtgagcactgcacgcgcaaggtgagaagccctaccactgcaactgggacgg

SEQ ID NO: 313001 - DNA, 75 bp, Homo sapiens
aatgtcaaatgggaccggattgcccccttgcaaacatttgctattccaggctctatatttctcagtatactctca

SEQ ID NO: 313002 - DNA, 118 bp, Homo sapiens
ggccatccttccccacccaggaccacctcccggccacgccccgggtccggctctcattcaaagaacgaggtcaatgccatcaaatgggatccttctggaatgttgctggcgtcctgct

SEQ ID NO: 313003 - DNA, 100 bp, Homo sapiens
cgtgaattaaaggaggaggtgacacggctgaaggaccttcttcgtgctcagggcctgggagatattattgataaatttctctgcaaagaatgtccaaaaa

SEQ ID NO: 313004 - DNA, 75 bp, Homo sapiens
ctgcttacattccaacaaatgtcatttccatcactgacggacagattaatcctcgagcactgttgtttggtcata

SEQ ID NO: 313005 - DNA, 83 bp, Homo sapiens
gtctagttgcaagaaaacaagctcagggctcccactgattctacattacggccccttcacagatgtagtcactacaaatctta

SEQ ID NO: 313006 - DNA, 75 bp, Homo sapiens
tctgtaccaactgccggaaagtgctgcggaaggaaaatgtttataggaggccttagctgggacactacaaagaaa

SEQ ID NO: 313007 - DNA, 96 bp, Homo sapiens
gaccagtttcagttcgccgatgggaaacccggagaccaaatccttggatacagcagttaaaacagttactggaggattctacctcaggtgaagata

SEQ ID NO: 313008 - DNA, 75 bp, Homo sapiens
ccggatctcctggaagtgttggcggaggaagggaaggagattacagcagaaacttttatggagaagttggacaat

SEQ ID NO: 313009 - DNA, 99 bp, Homo sapiens
gataatgacagccaccaaggagatttggagcccattttagaggcatctgttctatcttcccatcataaaaaagattgtgcagactggtgcttaaaatgg

SEQ ID NO: 313010 - DNA, 75 bp, Homo sapiens
tggacggtttcgccggcagtctcggaggcaggtggaagtcatcataaagtttctgtttcacccgtcgtccatgtt

SEQ ID NO: 313011 - DNA, 75 bp, Homo sapiens
aaaaaggaagctattcaccattgaggtcaaaatgcagatcttcgtgaaaacccttaccggcaagaccatcaccct

SEQ ID NO: 313012 - DNA, 82 bp, Homo sapiens
caaaaagataggaccaacaggctctgggccacttctacatatcccacatagtgtggcttcctgttgtggtgcatggccccga

SEQ ID NO: 313013 - DNA, 104 bp, Homo sapiens
agtatatcaacaaaggagtgaaatttgtgaagagaaatgatatcatcaaaattggttgaacaagagatttttcaatcaagactttggaactacgaagatggaag

SEQ ID NO: 313014 - DNA, 83 bp, Homo sapiens
gggcgcaactgagaggaactgagacccaagcagctcagtaaatatgattcatccagccttccagctctgttatttaaagcaag

SEQ ID NO: 313015 - DNA, 50 bp, Homo sapiens
tggaggagagaagatggcggaagcggaacatcaactagtcaggcagtctt

SEQ ID NO: 313016 - DNA, 100 bp, Homo sapiens
tcccccgtcctccgttagctaattaaaacatttttcagggacgtagccatccagagcgctttgaacttcaagattcaggaagctctctacttcctaaaga

SEQ ID NO: 313017 - DNA, 78 bp, Homo sapiens
attgctccacgcccagagcacacaaaatctctaatcacatatggctctgatagaactgaggcactgaagagaatggca

SEQ ID NO: 313018 - DNA, 88 bp, Homo sapiens
ttgagcagcagattggaaaagtgaatggtgtgcatcacattaagacatttctcttgggaagttgtgcatctgacaggaatatagtact

SEQ ID NO: 313019 - DNA, 87 bp, Homo sapiens
ttcttccagcttctgctgtccttctttgtggagagcaagatgagaaatattcgattatctgacttcactgaatccttgaaaaaaata

SEQ ID NO: 313020 - DNA, 99 bp, Homo sapiens
gtccacagctggcaaattcagtgcagatcagagccatcctcctcaaggtgcgagacatggtcagcagccatgtggagcgagtgtttcagatctatgagc

SEQ ID NO: 313021 - DNA, 100 bp, Homo sapiens
ctccagcccctaccagcttgggccattaccttgccctggtctgcaggtggagtcttcatgtaagtatcggttttatggagaacctgtaataaaagcatgt

SEQ ID NO: 313022 - DNA, 101 bp, Homo sapiens
cgaaaggagcaagagcaagatcaccgtgacatccgaggtgcctttctccaaaaggtacgccaggatctgccatccccttcggatttttattctactcctct

SEQ ID NO: 313023 - DNA, 96 bp, Homo sapiens
tggcggatgccctgcagtacctgcagaaggtctctggagacatcttcagcaggtcccgagcagccccgcccaacatggacccagacccccaggcgg

SEQ ID NO: 313024 - DNA, 75 bp, Homo sapiens
tcgggagcagttcatgcagcacctctacccacaggaaatctactttcttcaatgtgttaaccaatagtcaggctt

SEQ ID NO: 313025 - DNA, 59 bp, Homo sapiens
tgttagagaccactggattagcagaccctggtgtacaagggagaagaagccacattcca

SEQ ID NO: 313026 - DNA, 100 bp, Homo sapiens
gaggaggacatggagatgaagaagaagattaacctggagttaaggaacagatccccggaggaggtggacaaagctgcttctggcctcctgagcattggcc

SEQ ID NO: 313027 - DNA, 98 bp, Homo sapiens
tttaagcggaccaagacgctcatggagagaactgtttccttgtctcagatgctggagagcatgatcaagaagccccgccccactcgggctgaaggcag

SEQ ID NO: 313028 - DNA, 100 bp, Homo sapiens
ccagggtccctgaagagggaagacacgcggaaacagatagggccagatttgagtgtgtgaatttttgagtgaaacctggaacccaaatgagaagaaatct

SEQ ID NO: 313029 - DNA, 100 bp, Homo sapiens
ggaagggcgcgtcgcctcggacgtccactgcaccctgcgcgagaaggaggaagagttcatcgattggtggagcaaattctttgcctccataggggagagg

SEQ ID NO: 313030 - DNA, 90 bp, Homo sapiens
taaggcaccaaaggggtctaagggcatggatttcattggtcgcgacgccctcctgcagcagaagcagaatggagtgtataaacgcctcac

SEQ ID NO: 313031 - DNA, 75 bp, Homo sapiens
acccaaccagtggctctgggatattatcgatgagttcatctaccagatatgcacccaatgtccagggagcgtgca

SEQ ID NO: 313032 - DNA, 82 bp, Homo sapiens
ctgctggcgctgaccttcatcacagacaacagcctggtggcagcgcaggttcacaactacatgatgccacccctcgaccgaa

SEQ ID NO: 313033 - DNA, 75 bp, Homo sapiens
aagcagttttcaggacttaaggctctgggagagcggtggtgccccccccgggcacggggccatgtacaacgggat

SEQ ID NO: 313034 - DNA, 97 bp, Homo sapiens
gaaaaatcaaaaggagttcatgcttatgaatgctcgacttcaggatagaatttttgcggcatttgaagagctttttccagattatgtttaaaattga

SEQ ID NO: 313035 - DNA, 98 bp, Homo sapiens
ctcagagaagcctgtataaagatgtcatgatggagaattatggaaacctggtctcactgggtgtcatggagaaactccagctgggcccagagattctg

SEQ ID NO: 313036 - DNA, 100 bp, Homo sapiens
cggggaatggaggtagaataaacgtgggacccggagtgcaccaaggatcctcagtcttccacaatgaaccctgtttacagccccgtgcagcctggggctc

SEQ ID NO: 313037 - DNA, 50 bp, Homo sapiens
gagattctgctcacggaactgcaggtactaggttttgacaagcttgcatc

SEQ ID NO: 313038 - DNA, 100 bp, Homo sapiens
tcgaggtgtgaagctgatgcccagcaaagacaacagccagaagacgtctgtgtgttttaaaatcaaagatgggaaaatcggagaaaattgcccttcccca

SEQ ID NO: 313039 - DNA, 100 bp, Homo sapiens
ggggctgtggcgccggcgacggaccagcgacccaagcgccgcggttaaccacgtctcgtccacgacctccctaggtggatggaagtttgcttagttgaag

SEQ ID NO: 313040 - DNA, 75 bp, Homo sapiens
acagccccccacagcagaaccccagctctacccacgaagctggggaaactgtgccccccgacacctccaagatgc

SEQ ID NO: 313041 - DNA, 50 bp, Homo sapiens
cctggagagtgttgccgagggccgagctggcaggggccgcctgaagtggg

SEQ ID NO: 313042 - DNA, 90 bp, Homo sapiens
atccatttcgtggttcacccgctgccgggcaccgaggaccagctcaatgacagaatcgcctaccagaggaatgacgatgatgaagaggag

SEQ ID NO: 313043 - DNA, 50 bp, Homo sapiens
caggcagaagattgcatcacacgcttggtaaaatgcggctgacaattccg

SEQ ID NO: 313044 - DNA, 100 bp, Homo sapiens
agcctggcgtgggagctgcctaggccgggccctgccagggagcaagtctgcatcgcagaggccaggaaaactttagaaactgttcctttggagaggaaaa

SEQ ID NO: 313045 - DNA, 83 bp, Homo sapiens
cagaaagcaggcgaacccgcggcgcaataacggcgggcgctaatattgacacctgctcagaagaccagaggaccccgttgatg

SEQ ID NO: 313046 - DNA, 108 bp, Homo sapiens
gtctggagtttatctggagtgaggtggccggttcttggtgggatctgagcagacctgcctagagctggaacgttacctccagagcgagccctgctatgtttcagcctc

SEQ ID NO: 313047 - DNA, 95 bp, Homo sapiens
gaaggaggaggcggcgaatcacttataaatggcgccgaagcaggacccgaagcctaaattccaggaggcacttgcacctcctgcgccgccgcccc

SEQ ID NO: 313048 - DNA, 80 bp, Homo sapiens
tggaagcagccgatccagcctgcggagcctgtggggcaggtcctcagccagcagagccacgttccttatgagcaccgtgg

SEQ ID NO: 313049 - DNA, 90 bp, Homo sapiens
gtcccagaagatggcggaggcggggtaatctatgccagcaattatgacaatgttagcagaccatgcagctcgtcagctgcttgatttcag

SEQ ID NO: 313050 - DNA, 75 bp, Homo sapiens
agaggagtcaggcatgccacttactcagagaggagtctgcaatgccgagtggaggaaggaggaaccggagtgtga

SEQ ID NO: 313051 - DNA, 100 bp, Homo sapiens
ctccctaccaggagtttctagcactgaaggttattgagccacatgatatatcagtggcactcaacacccgaaaattgtggagcatgcaccttcatgttca

SEQ ID NO: 313052 - DNA, 95 bp, Homo sapiens
ggagccgtggccgctgggggttgcggcggcgctgagccagcggggccggtcaaaatgcagatcttcgtgaaaacccttaccggcaagaccatcac

SEQ ID NO: 313053 - DNA, 100 bp, Homo sapiens
ggtccttcaatagtgctgaaggctttgccgacttcagccagatgtccaaggtcagcgccaacggcaatgtcctgcgcagcgagatcgtgggctccatcaa

SEQ ID NO: 313054 - DNA, 50 bp, Homo sapiens
ctgggaggttgaacttattaatatcattcccgagaagtgttggagcaatt

SEQ ID NO: 313055 - DNA, 96 bp, Homo sapiens
tcagcagggggccagctcaggacacacagacccagctggaactcgtggatctcttagagttgagtacaacaaatgaaattttcaaacagcacaagt

SEQ ID NO: 313056 - DNA, 50 bp, Homo sapiens
cggcggccacgccaaggacgggcagtggaccaatccagctatggcagttt

SEQ ID NO: 313057 - DNA, 100 bp, Homo sapiens
cggtggggaggcttcccatggtttggaggatagcaacatcagttttcctcacgggagaaaaagccaattccatattaaaacgctacccaagagctaatgg

SEQ ID NO: 313058 - DNA, 100 bp, Homo sapiens
aatagtaaccctgccaaatacatcagcttgtaggagacagagctggcggaggcagtgacctcagactctggacggtgaacggggatctcgttggacatgt

SEQ ID NO: 313059 - DNA, 97 bp, Homo sapiens
ccctctaactggtgtgatggcgtgtcacactgccccggcggggaggacgagaatcggtgtggaaccagcagcacaaacactgttggggcaacagtga

SEQ ID NO: 313060 - DNA, 74 bp, Homo sapiens
agacggctcgcactgcgacccgaagatgccatggacaatattaccaggcagaaccaattctacgatacccaagt

SEQ ID NO: 313061 - DNA, 75 bp, Homo sapiens
gaaaccagcagacagaatttgtcaggccggaaggtggtggtcgtacgctgtgaaggcatcaacatttctggcaat

SEQ ID NO: 313062 - DNA, 80 bp, Homo sapiens
gcactgtgacatgtctgatcccttgctcccatccctgcagcatgaacaaggaaaggagagtgaatatctatggatattgc

SEQ ID NO: 313063 - DNA, 75 bp, Homo sapiens
ggtacaggcgttgctgaaccagaagaaaatgtggacacagacttgccaggcagcctggggcagagtgaagagaag

SEQ ID NO: 313064 - DNA, 74 bp, Homo sapiens
tcaccgcacgctgacgcccaccctggaggcactgctccactggggccatgtcagagcgagaagagcggcggttt

SEQ ID NO: 313065 - DNA, 101 bp, Homo sapiens
caagcctccagtcgcaattgccagagatgtgactacccctgaatctacaaagaatcttgtggagtcatctatggtgaatggaggtttgacatcacaaacaa

SEQ ID NO: 313066 - DNA, 100 bp, Homo sapiens
cgacaaggaggcccctgactcggatgctgagggctacgtggagggcctggatgatgaggaggaggatgaggatggccagtgacatcctcatcctccggag

SEQ ID NO: 313067 - DNA, 98 bp, Homo sapiens
acttgactactcgcatcgcgcactttttggatcggcatctagtctttccgcttcttgaatttctctctgtaaaggagggttctccaaaaaatgtggaa

SEQ ID NO: 313068 - DNA, 75 bp, Homo sapiens
cgcgctcgattccccccacgcggcggcgccgcctgtttacgggcactgcgtggacctgccagacacaggactctg

SEQ ID NO: 313069 - DNA, 75 bp, Homo sapiens
gtgttatcaacttaaaagatgccacctctaagtgtccagctctgaagggcaaagtgcagaagatcctaatctgga

SEQ ID NO: 313070 - DNA, 76 bp, Homo sapiens
ttggcctgtccctcacatccgatgcaccctttttgtcagattatcaggatgaggtgaagcccaagagccaaaggaa

SEQ ID NO: 313071 - DNA, 75 bp, Homo sapiens
gcgccccggagaacaccttgcccactcccatggtcctgcagagacttcagctacgggacggacgagtacgacgga

SEQ ID NO: 313072 - DNA, 75 bp, Homo sapiens
gatcccttacacaccttctccgagttcaagcaggcctatatcacctgtcaagccagcgcctttagaaataaaacc

SEQ ID NO: 313073 - DNA, 73 bp, Homo sapiens
ctattaaaaccagggctccacagttaggaggccagcattgaaacaggggaccgtgtctggaggatgcctctct

SEQ ID NO: 313074 - DNA, 96 bp, Homo sapiens
cggtgctcatagacgaactccgcaatgaggacgttcaggaacaagcacatcatgattgacttggggactggcaacaacaacaagattaactgggcc

SEQ ID NO: 313075 - DNA, 100 bp, Homo sapiens
tccaacgccttcacgcttctcctccgggcggcattccagagtctgctggacgcccaggcggacgaggccgtgttaggtgctggagaatctggtaaaagca

SEQ ID NO: 313076 - DNA, 101 bp, Homo sapiens
gacatggggcacccggtgtaccgcggcgagaagccccagctgcactacgcggcaaatgttctgaaaaagactctgcatgggaatggcctgccttacgatga

SEQ ID NO: 313077 - DNA, 88 bp, Homo sapiens
tgctgctcaccatcagtgaatttaagcccacatatcaggaccgagtggccccgccaggctggctacagcaaacatcattcaagatgtc

SEQ ID NO: 313078 - DNA, 75 bp, Homo sapiens
ctggccacgggccagcctgcgggatctgaagacctcaccaagggagtaccctgacttctaccggaagctctacgg

SEQ ID NO: 313079 - DNA, 75 bp, Homo sapiens
gtaatcagaaggcacagattagaggaaggaagagatccagaatataagaagtttttagaaacctactgtgtggag

SEQ ID NO: 313080 - DNA, 83 bp, Homo sapiens
aacttagttccctcctatactccttcactctaccctaagtaagactttgaccccgacgcaggcttcagtgattgccgcggatc

SEQ ID NO: 313081 - DNA, 83 bp, Homo sapiens
cagggttctgcatcttagcctgctggacctgctgaagttcccatgatgtcacccaatggatccattcctcccattcatgtgcc

SEQ ID NO: 313082 - DNA, 100 bp, Homo sapiens
gactacggcaaagtggccactcaggcgatcagtgggtgaccgcggctgcgagggactttgtcatccgtcctccaggatctggggagaaagagccccatcc

SEQ ID NO: 313083 - DNA, 50 bp, Homo sapiens
ggcatttccagcccgcccacccaggtcaaaatgcagatcttcgtgaaaac

SEQ ID NO: 313084 - DNA, 100 bp, Homo sapiens
tgggatctttccggatcaatccagatggcagccagtcagtggtggaggtgtccctgttacctgagaatgacagatggaatgaaactagagcccagctgct

SEQ ID NO: 313085 - DNA, 97 bp, Homo sapiens
tgatcaaacttgaggaatctgggtggcaagtcaataataatatgaatcataatatgaacaaaaatgtctttaggctcttggagcagtcggagtggca

SEQ ID NO: 313086 - DNA, 100 bp, Homo sapiens
ttggtgggggagccctgccctcctggttcggcctccccgcgcactagaacggtgtcatggagaaactccagctgggcccagagattctgcagcgggaaaa

SEQ ID NO: 313087 - DNA, 83 bp, Homo sapiens
ttgggcagcacctcccgacagccggctcgggacccaactctgcgagccagaactgtaagagtaaatgggtccagtaattggaa

SEQ ID NO: 313088 - DNA, 97 bp, Homo sapiens
agaccttgcaacggaaccggaagatggcaatgggcaggaagaagttcaacatggaccccaagaagatcctctggaccttctccatctacctggagtc

SEQ ID NO: 313089 - DNA, 100 bp, Homo sapiens
aaatggtgaactaaaaattgaaagcaagattgaagagatttttcgaaagaaagcagtggaacttggggtaaaattgctacctgcatttcatactccctct

SEQ ID NO: 313090 - DNA, 75 bp, Homo sapiens
acgggagttgggaggacccgggacaccgcacagccgggaaatggcggggagacaaccccttccccaagaatgctg

SEQ ID NO: 313091 - DNA, 100 bp, Homo sapiens
ggcgaaacgaggaggagataacgcggccttgggctctggtgctggagaatctggtaaaagcaccattgtgaagcagatgaggatcctgcatgttaatggg

SEQ ID NO: 313092 - DNA, 75 bp, Homo sapiens
tgactcaagcttgcatggagctggaaatggaatttcaagaatacaatcttgtagggataaaaacattcagatggc

SEQ ID NO: 313093 - DNA, 75 bp, Homo sapiens
cctgtctcgccgagcgcacgccttgccgccgccccgcaggtacactcacgtggaagctgagtgtcctttcctgac

SEQ ID NO: 313094 - DNA, 100 bp, Homo sapiens
gcccccctctgtcaagactccgacacctgaaccagctgaggtggagactcgcaaggtggctacgagcagtgtttttcaggaggtgaccctcagactgaca

SEQ ID NO: 313095 - DNA, 94 bp, Homo sapiens
cgaggagatccagctgggcgaggacgaggacgaggacgagatggacctggagcccaacggcctcgaaggagctccagcaagcccagacaaccag

SEQ ID NO: 313096 - DNA, 99 bp, Homo sapiens
aaacaatccatatgcgaccacagaaggaaattcaacagaacttagcataaatgctgaagcctccttctgaagaaataaaaacaggtgaggatgaagatg

SEQ ID NO: 313097 - DNA, 50 bp, Homo sapiens
tgctaacagaactggaccttttcgacctccgtgtggatggccgtggctgt

SEQ ID NO: 313098 - DNA, 97 bp, Homo sapiens
cttcagtccgaaggaggaagggaaccaacccactttctcggcgccgcggctcttttctaaaagttatcttaaatagtgaagatggagaaatattcaa

SEQ ID NO: 313099 - DNA, 90 bp, Homo sapiens
gcagtacggagcctcaggcggacagatggactgtaagacaggggcaagtgtccgagtggtgaatcagctacttacagagatggatggtct

SEQ ID NO: 313100 - DNA, 82 bp, Homo sapiens
ctcagctcctggggctcctgctgctctggttcccaggttccttgatggagccggtggagaaggaacgagcatctactcccta

SEQ ID NO: 313101 - DNA, 100 bp, Homo sapiens
aaaaagaacgacatgatgcaatcttcaggaaagtaagagggaaccctgtggaatctttcatcccatgactcaatcaaaatggagattgtggaccatgcac

SEQ ID NO: 313102 - DNA, 76 bp, Homo sapiens
cccaagatccttaagttcgtcgtcttcatcgtcgcggttctgctgccgaaatgcgtgtactgccggaagcggatga

SEQ ID NO: 313103 - DNA, 98 bp, Homo sapiens
cctgtatgagctgctgacgcactgtgactccagccagagcccccccacggttcaagggcagcaggaaagacgagatcctgggcatcgccaacaaccga

SEQ ID NO: 313104 - DNA, 75 bp, Homo sapiens
ctggtggtgctgcgctgtgtgggacagtcattttgtttactcattcagccctgttgcaggtcccaataaactctt

SEQ ID NO: 313105 - DNA, 101 bp, Homo sapiens
ggagtccgggccctcgtgtcaccgctctgaagtcaaggaggtactccaaagattcaggtttactcacgtcatccagcagagaatggaaagtcaaatttcct

SEQ ID NO: 313106 - DNA, 100 bp, Homo sapiens
aaagacagtgttctgctttcatggagttcacagaagagtcgaggagtactatactggcaattgctggagaagattttgcaattgttgcttctgatactcg

SEQ ID NO: 313107 - DNA, 90 bp, Homo sapiens
ctgatgagctcattgagagaaccatgatggtcaattgccatgcacacttctgggtggatttgacatggaagtgaaaggttggggtggaga

SEQ ID NO: 313108 - DNA, 100 bp, Homo sapiens
acgaaaacgtagggaccacatcaaagacagctttcacagtttgcgggactcagtcccatcactccaaggagagaagctcctcagtgggtagtgcacttcc

SEQ ID NO: 313109 - DNA, 100 bp, Homo sapiens
ctcaagggcagcaatcggagccagtgtctagaggaccacacctgggcacctccctttcccatctgcaaaagtagaaaatctctaacttccaaggtcccac

SEQ ID NO: 313110 - DNA, 100 bp, Homo sapiens
aagtttattattaattcataccccaaatattttcagaaggacatagctgaacctcatataccgttgaccactgaaaaacacacatactatctgactgcag

SEQ ID NO: 313111 - DNA, 82 bp, Homo sapiens
gctggaaggaaccgctctcgcttcgtcctacacttgcgcaaatgtctccgagacgagttgtactgctgtcacaggaaatgga

SEQ ID NO: 313112 - DNA, 100 bp, Homo sapiens
tcctgtatagagcgtacctggcgcagtttaagtgctgtggggctgctaactacacagattgggagaaaatcccttccatgtcgaagaaccgagtccccga

SEQ ID NO: 313113 - DNA, 100 bp, Homo sapiens
ttcttgtactggagaaatggttggcccgggaaaagactgctctggcccatttagagtctcttgcagtggatgttgaggtggccaatccaccagctagtaa

SEQ ID NO: 313114 - DNA, 96 bp, Homo sapiens
agagagcaattggatattattcagcgactagtaagcctatgtcatttcatccaccacattacttagcacacgacggttctgccctttatattaatc

SEQ ID NO: 313115 - DNA, 97 bp, Homo sapiens
gtggcactggtattgctttgagtgcagggtattaacgtgtcagggctgagtgttctgggatttctctagaggctggcaagaaccagttgttttgtct

SEQ ID NO: 313116 - DNA, 80 bp, Homo sapiens
gtggtgctgctgctgcggtgagcgtgagacccgcacccccgaggagctgcagcctcccgcgacgatgcccctcaacgtta

SEQ ID NO: 313117 - DNA, 100 bp, Homo sapiens
ctgcgtgtccctccgtcatgtgacagacaacagtgattgactacgtgaagccctcggatctcaagaaggacatgaacgagaccttcaaggagaagtttcc

SEQ ID NO: 313118 - DNA, 85 bp, Homo sapiens
ggaatccatcctgcagtcagacaaagccctcactgctggagagaaggccatagcagatcaagggaatgaaggaccgcctggagtt

SEQ ID NO: 313119 - DNA, 82 bp, Homo sapiens
gcagtgctacaagggatcaagatcagctccaggcctgggaaagtgaaggctcgtggtgcagagagcattatgttaaacctgg

SEQ ID NO: 313120 - DNA, 101 bp, Homo sapiens
aacaacagccaccacagccagcaccaccaccaccactgtttccacgacagcagcagatcactttgggaagcagtgacatccaacctgtatcaagtcttcta

SEQ ID NO: 313121 - DNA, 90 bp, Homo sapiens
cggcttcctagtgagtcggcggctgatttagaaggaggttcaggctacggtgagccgaaggaagagagaagggcacagttacctaagtat

SEQ ID NO: 313122 - DNA, 90 bp, Homo sapiens
atgagggggatattgccttgttgaaaacttattcgtgatgagaggagatggattgaaaagcagaacagagcaacaagagcacaaagaaaa

SEQ ID NO: 313123 - DNA, 101 bp, Homo sapiens
gcttagtagctggaaccaaatgtgacaagttctttatagctccaagctctacagattcttcaaatatattgagaatagggatgttgcaaaaacagtgttaa

SEQ ID NO: 313124 - DNA, 75 bp, Homo sapiens
gagttaaagttggatgtgctggaacaggttggtgttcgaggaagagacattgttgttcttggtgtggagaagaag

SEQ ID NO: 313125 - DNA, 86 bp, Homo sapiens
gacaaaaagtttgtcattaaacccatcgacaagaaggcacctgtgtcgtgaaaactacccctaaaagccaaaatgggaaaggaaaa

SEQ ID NO: 313126 - DNA, 90 bp, Homo sapiens
agagcatggccaagtccagatatatggagctctacacctatacacagaatgggattttacatatgctggacagaaataagagaatcaagc

SEQ ID NO: 313127 - DNA, 88 bp, Homo sapiens
actcctaaaggctggtcctgccactgggacagactttgagaatcactacaagaaaaactccttgtggtgaaggttctaagacgtggga

SEQ ID NO: 313128 - DNA, 75 bp, Homo sapiens
aagcttgaaggcaatcagtacctctgcttttcaaaggaaatgggtcctgatgaatatgaagagatggaagaagag

SEQ ID NO: 313129 - DNA, 100 bp, Homo sapiens
ccagagctacaaaagtttttccagaccatcatcaaagaggggatgctgaccaaacagaacaattcattccagcgatcaaaaaggagatactttaagcttc

SEQ ID NO: 313130 - DNA, 75 bp, Homo sapiens
ccactgcagagcctgtccgtcagtccctaggtatccgcactgctcagggttaatgaaggagttcccccttctgag

SEQ ID NO: 313131 - DNA, 90 bp, Homo sapiens
gaccgagaccgtgaccgagagcgtgaccgagagcgcgaatatcgtcatcgttagaaggtacacatgggcactcacatgtggaatagcacc

SEQ ID NO: 313132 - DNA, 82 bp, Homo sapiens
ccctactctgccccgggggagagtaaggtacctgccgtgggcagatctgagctttcttcttggacaccccatacccacagtc

SEQ ID NO: 313133 - DNA, 83 bp, Homo sapiens
aacagcaacagcaagaagaagagcccagctagcaccttcgccctctccagccaggtaactaggatttctacctcaaccgcgag

SEQ ID NO: 313134 - DNA, 100 bp, Homo sapiens
cagacattcatcattgacttactattgcactgtcacagcaagcctggttgcagtatgcctgaaatttgggatgtagaagatcctgccaatgctgggaaaa

SEQ ID NO: 313135 - DNA, 97 bp, Homo sapiens
ggaagatctttttcctcaattggttaaacccatccagagtaatggctgcggccttacccaggaccctgggggagttgcagctgtatagaatattaca

SEQ ID NO: 313136 - DNA, 90 bp, Homo sapiens
gattctgaggaccagcagatggccagtcacgagaacccaggaatatattaaaggaatctgtgaacctgaactagaagaaagagaatgtta

SEQ ID NO: 313137 - DNA, 85 bp, Homo sapiens
ggcaaaaatcccatctaccgcaactctcagttcgagagtaaagggggatatgagactttctactcggaatatcctgagtgttgcg

SEQ ID NO: 313138 - DNA, 100 bp, Homo sapiens
cccggctccgtgaccagccggctgggctcggtattccccttcctgctagtcctggtggatctgcagtacgaagatcctgctctctctcagccgcctgtgg

SEQ ID NO: 313139 - DNA, 100 bp, Homo sapiens
cggcggcggcggcggcagtgacgtcgccgggctatgactttgcagccgtcctggagtggttcgcggagcgtgtggaccgcatcatcctgctcttcgacgc

SEQ ID NO: 313140 - DNA, 100 bp, Homo sapiens
ccgacatcaattacgccaatgtggacggactcactgccctgcaccaggcccacaatgccccgctgagccggtgcagcagctgagtggatccaagcagaga

SEQ ID NO: 313141 - DNA, 83 bp, Homo sapiens
tataaagttctgccgggaagcaagaggcaaagagaatcggttgcccatcatcttcgtttcggacagagcaaacagcaacaagg

SEQ ID NO: 313142 - DNA, 82 bp, Homo sapiens
ggctgatctcgtatctcaggaacctcaggccctgcttgacagtgatacttcgttgaaagttgccaccctgatgtaatccagc

SEQ ID NO: 313143 - DNA, 50 bp, Homo sapiens
tcagcctcccaaagtgccaggattacaggcatgagccaccgtgcccggcc

SEQ ID NO: 313144 - DNA, 87 bp, Homo sapiens
caactagcggcgggtcgtgggcacctccaggatgtaactcacaaaatagtggatgcaattggtgcaattgctggttcttctctggaa

SEQ ID NO: 313145 - DNA, 125 bp, Homo sapiens
gaggaattagactggtgtttagaccagctagagaccatacagacctaccggtctgtcagtgagatggcttctaacaaggaggacgaatccatgaaccaaccaggaccaatcaaaaccagactggc

SEQ ID NO: 313146 - DNA, 75 bp, Homo sapiens
acaatcgcttcaatgatgggaaggtggatcccgccgggaggtactttgctggaactgttgacattcagggatgtg

SEQ ID NO: 313147 - DNA, 115 bp, Homo sapiens
gaaaagactgggcttgtccttgctggtgcatgcgtcgtcggcctctgggcagcagccatggtctgaaaaagttcttttcttgtcgtggaattgcaattgcagttgaatatttttg

SEQ ID NO: 313148 - DNA, 166 bp, Homo sapiens
ctccattgaggacgtcagcatgaagttcgacgagctgcagcggctgcggctcaacgactggaagatgatggagtccccggaaagaaagattgaagatggatacgtgacaatcccagggaccgctgcactgacttcatttccttagacaagacacagtgtagggccc

SEQ ID NO: 313149 - DNA, 78 bp, Homo sapiens
gatcgcctgggtggttgttggcgtgtccctgcagcgaaggatcctgcggcctcccagccaacatccagctggacattg

SEQ ID NO: 313150 - DNA, 100 bp, Homo sapiens
ccagaaggagtcgaccctgcacctggtcctgcgtctgagaggtggcggggcaggatggttctgtggtgcagtttaagattaagaggcatacaccacttag

SEQ ID NO: 313151 - DNA, 75 bp, Homo sapiens
cctcgctggagatcgagtaccaacttctgcagaaagccgtcattacacctgattttgaaaaaaaccactgtgttc

SEQ ID NO: 313152 - DNA, 74 bp, Homo sapiens
ggcagagcgagactcggatgatgagaggcccagctttggaggcaaacgtgattacagtggcgagatcttgaaca

SEQ ID NO: 313153 - DNA, 148 bp, Homo sapiens
aggtgatggcaacggccaacttcggcaagatccagatcgggatttacgtggagatcaagcgcagcgatggagaccttaatggacagaatcaagaaacagctacgtgaatgggatgaaaatctaaaagatgattctcttccttcaaatc

SEQ ID NO: 313154 - DNA, 74 bp, Homo sapiens
gaatcgtaggccaggctgatggagagctgaacattactcttccagaagagctggaagacccaggagaaggcgga

SEQ ID NO: 313155 - DNA, 76 bp, Homo sapiens
ggactggaaaactcacacccggtctggacacagaaagagaagaatgatgagaagacagcagctgattacaagattt

SEQ ID NO: 313156 - DNA, 74 bp, Homo sapiens
gttcacagagctagccggacgtcctccgactcaagtttggtgaggattcatcaacctccagtatgatgtctgtg

SEQ ID NO: 313157 - DNA, 100 bp, Homo sapiens
cctagatctgatgggggaagccaccaggattacatcatctgctgggtaagcttgatgattaccaggaacgaatgaacaaaggggaaaggcttaatcaaga

SEQ ID NO: 313158 - DNA, 82 bp, Homo sapiens
cactgatgaaattcaagttaactatcctggaatgtttgaattgatggaagatttacaagtgttctaagaacggaagcatctg

SEQ ID NO: 313159 - DNA, 100 bp, Homo sapiens
ggagagtgatgacacccccgtgacagagtccgacctcagtcgcgcacccataaaaatggtctcggcgcggaagatggccggcggcgtggacggccccatc

SEQ ID NO: 313160 - DNA, 83 bp, Homo sapiens
atcgggtggcggctcgggacggaggacgcgctagttcctcctgcatatgcccaagaggattgggagtggaatggacaccagca

SEQ ID NO: 313161 - DNA, 100 bp, Homo sapiens
aacaaactggagagagaccagacctgcaagctctttgacacacagcagttcttgtcagctggaagccaaacatctggaaagacaatctggctcagaaacc

SEQ ID NO: 313162 - DNA, 100 bp, Homo sapiens
tgcgacgcctgcctcggcaaaggagctatgaagacatgattggtgaggaggtgccatcggatcaatactactgggctcctttggcccagcatgagcgagg

SEQ ID NO: 313163 - DNA, 83 bp, Homo sapiens
ccctgctgctgtcttcaaagaagcaattctgtggtgttcttggtcacacatttatggagtttctgaagggcagtggagattac

SEQ ID NO: 313164 - DNA, 100 bp, Homo sapiens
aagtggaaatatccaaacaggccctccagaatgagctggagagactgaaagaggaaactggccaagaagcggaaagagaccatgagcagcacccgacagg

SEQ ID NO: 313165 - DNA, 83 bp, Homo sapiens
tctgaaccatccacacatcataaagctttaccaggtggaggagttactgatggccatggagaaggtaaagcaggaactagaat

SEQ ID NO: 313166 - DNA, 82 bp, Homo sapiens
cacaaactttgtgcatacagctcatgttggatcaggagacctgttcagtggaatgaattcacttataggctttatactgtgg

SEQ ID NO: 313167 - DNA, 75 bp, Homo sapiens
catcaggaaatacctcactgcctttggtgctcaaaaaggtattgttgcagcatctggcagtgagactgaggatga

SEQ ID NO: 313168 - DNA, 100 bp, Homo sapiens
tggaagtgttggaaaagtccagtactttaaatgtgcccccaagtatggacctgatcccaaccttgaagaaagtcctaaaagaaaaaatattacatatgag

SEQ ID NO: 313169 - DNA, 90 bp, Homo sapiens
cggagtaccagcacttcatccagcagtgcacaggttgagataagtcgaagagtgactctggaaaaactccctcctgtcctcgtgctgcac

SEQ ID NO: 313170 - DNA, 82 bp, Homo sapiens
gcctcttaccttattatcttacaggtgggtttggaggatttgggacaacatctacaactgcaggttctgcattcagcttttc

SEQ ID NO: 313171 - DNA, 82 bp, Homo sapiens
aagtcccacagaagctacagctgccaggtcacgcacgttgaaccatgggagaaaggaagcaggaaaacagcgggccagacag

SEQ ID NO: 313172 - DNA, 74 bp, Homo sapiens
tgagagacgcggcaaggaggcagcctgtggaggaactggatccaggtgattgagaatgatagagccagcagagg

SEQ ID NO: 313173 - DNA, 75 bp, Homo sapiens
ggtcgtgccactagccagctcggaagcccagcccgcgggccagcaccatggaggacgtgaagctggagttccctt

SEQ ID NO: 313174 - DNA, 75 bp, Homo sapiens
cgacatgagtgatgtggaggaaaacaacttcgagggcagaacaaagaaacagccttggtataatagcacgttagc

SEQ ID NO: 313175 - DNA, 71 bp, Homo sapiens
atgagtttggttcttggcaggaatatggaagacaggtccagtccaggtgcagcagcaaggagaacattctc

SEQ ID NO: 313176 - DNA, 80 bp, Homo sapiens
cggcaaactccctggtctctgttggtgtagaagccaaaatcagtggatctccagcttgtagctgcatcagcccctcctcc

SEQ ID NO: 313177 - DNA, 83 bp, Homo sapiens
tagccggctgcggtgtgagaatggagtgggcaggaaagcagcgggactttcaggttcatcatgcctagtggcgtataagaaga

SEQ ID NO: 313178 - DNA, 100 bp, Homo sapiens
caggacacggcctacaacaccaagaggtcaaaatgcagatcttcgtgaaaacccttaccggcaagaccatcacccttgaggtggagcccagtgacaccat

SEQ ID NO: 313179 - DNA, 100 bp, Homo sapiens
ccagggcaccaactcagcctccctcctcaacggctccatgctgcagagagctttgcttttacagcagttgcaaggcctttgaagacctcagcaaactaat

SEQ ID NO: 313180 - DNA, 100 bp, Homo sapiens
gttcaacatcctcctggccaccgactcctacaagggtatgagtattatagaacaattagaccctgtatcttttagcaattacttgaagaaataccataat

SEQ ID NO: 313181 - DNA, 75 bp, Homo sapiens
gtggcccttctatcacttctatgcaggttccggaatgaggactacaccatacatgtgcagctgaatgactacgtg

SEQ ID NO: 313182 - DNA, 95 bp, Homo sapiens
tttataagacaaaagaaatagcaagaactgaggagcaccaggagacgcaactcatcggtcgtgagatggagaataaagaaactctcaaagggttg

SEQ ID NO: 313183 - DNA, 100 bp, Homo sapiens
agttaaccagagccatccttcgggagaggatatgtagcgaggaggaacgcgctaaggcaaagcacctgatccgggtggatggacccaggggcaacgccct

SEQ ID NO: 313184 - DNA, 83 bp, Homo sapiens
agtggccaagtttccagaaaacagaaatcgaaacagatacagagatgtaagcccatctatgaaacccacgtagtcgaacaccg

SEQ ID NO: 313185 - DNA, 75 bp, Homo sapiens
ttcatcgtcatgcagagcgtcttctaccccgccggccgcatctccgagagcctccccggtgattgagaatggcca

SEQ ID NO: 313186 - DNA, 98 bp, Homo sapiens
cagtctcaggcctttagtgatgatgattgcagcaattctccggaaacggaaattagactattatttacacaaactactccctgagatcctacaatccg

SEQ ID NO: 313187 - DNA, 76 bp, Homo sapiens
ctgcccgcctgcggctgctccgggttattcttggacagtataattggctttcctatgaagatgtctttgttcgagc

SEQ ID NO: 313188 - DNA, 107 bp, Homo sapiens
ggggaaactaggtcgatggtcggcggcgcccggatgggcagctgaggccaagatcaaggctcgagatcttcgcgggaagaagaaggaggagctgctgaaacagctgg

SEQ ID NO: 313189 - DNA, 100 bp, Homo sapiens
gaactgaatgtgcaacttgcaagggaactggagacaatgaaaatcttgtcaggaattacatgaacgacagccttcgcaccgacgtcttcgtgcggttcca

SEQ ID NO: 313190 - DNA, 100 bp, Homo sapiens
agccgccacccctgcgttcagagccgggcacactgggctctgcagcctcatcctacagccccctaggtctataagaaggagaaagctcgagtcatcactg

SEQ ID NO: 313191 - DNA, 75 bp, Homo sapiens
acccttcatgcatgaaagacaaagctactcaggtgctacagaatattttagaaacagaaaatgaatattctaaag

SEQ ID NO: 313192 - DNA, 128 bp, Homo sapiens
cttgagtctactctgtcgctcttgtgccctagcaccccgagaaccgtcagtttgagccagatgagtgcttgtgatttcacgtatttttgctgaactcgtaaaagagacacttggatggtggattaacc

SEQ ID NO: 313193 - DNA, 100 bp, Homo sapiens
cttggcttctgaggcatctgacaagcactttcatttggacccgtggatacccattgaacagatgcttgaaacctgcaagtaatcttcagatcctagcaga

SEQ ID NO: 313194 - DNA, 100 bp, Homo sapiens
cggcgctctcctggctcccttctgccccagctccgtctcggcggcggcgggattccagctttccctcctggccagaaatgttcagcctggactcattcag

SEQ ID NO: 313195 - DNA, 90 bp, Homo sapiens
ggcatatgggagccattggctgtgaagctgcagacttataagacagcagtggaggaatgcccttcaatcagctgggcaccctggcaggca

SEQ ID NO: 313196 - DNA, 100 bp, Homo sapiens
agaagtcttaccctcaggtcaaaaggtttttcattagtcaatacagtgaaggctggcatgatcatcagcttcccatccaataatatctactcatcagtgt

SEQ ID NO: 313197 - DNA, 88 bp, Homo sapiens
acacgtcctcgtctcgttcctgatcgaacgtggtggcttcctgtgtccagtaccggttagtggtccgggatgtgaacacccttcagat

SEQ ID NO: 313198 - DNA, 78 bp, Homo sapiens
cgtgttctagtgaaacagaagaaggccagctttgaggaagtgccgcagaatggaattcggcattgttcctacacagct

SEQ ID NO: 313199 - DNA, 98 bp, Homo sapiens
ggatctggaggagcagttgtctgatgaagagaagaggtggtgcggagctcctgtttgacggtattaagaaacatcgagtcactttgcctggacaggag

SEQ ID NO: 313200 - DNA, 51 bp, Homo sapiens
aggctcccgggctggactcaggcttctcagtaagactttgaccccgacgca

SEQ ID NO: 313201 - DNA, 95 bp, Homo sapiens
tgagtcagacaaggactctggcttttcagatcaatgagctgagcaatgttcctgttcctgtcatgctaatgccagatgacttcaaagcctacagc

SEQ ID NO: 313202 - DNA, 80 bp, Homo sapiens
aagcaaactgcaatttggacatctccaacaagggtcaggctctggagcaggccatcatcagtcagaagcctcagctggag

SEQ ID NO: 313203 - DNA, 82 bp, Homo sapiens
aagtcagtagcaagcagctaagacaacatggtacatgtggcggtctatgcttgcttggtgcttatgctgacagtgatgacga

SEQ ID NO: 313204 - DNA, 100 bp, Homo sapiens
gaaccaacaatagcagctccatttctggagtctgggtcttccgaggccaggagcttgcctttccggtaatggtttttacaaaggaccaaacagaaaagga

SEQ ID NO: 313205 - DNA, 82 bp, Homo sapiens
ccgcgttctcgcacgcgtcatggggtgagcccctccagactccgaataggagatcaagagtttgattcattgcctgctttac

SEQ ID NO: 313206 - DNA, 100 bp, Homo sapiens
tcatgttactgatatcattgatggaaacccatccattatccttggcctaatttggacaattatcctgcactttcattgtcctgttggataaacgttttcg

SEQ ID NO: 313207 - DNA, 82 bp, Homo sapiens
ctgaccagttgcgtgtgattttcgcagggaaggagctgaggaatgactggactgtgcagtgaactccggagacggcattgac

SEQ ID NO: 313208 - DNA, 75 bp, Homo sapiens
gttcccccaaatgtctgactctgactctcggactgagaaacgcaaggagtgcgccggtctcggggaaatgcccgg

SEQ ID NO: 313209 - DNA, 50 bp, Homo sapiens
cggcgcagaggaggagcttgctgcagagttactatactggcaattgctgg

SEQ ID NO: 313210 - DNA, 100 bp, Homo sapiens
gaggtccggggcccagttttccggagttgcggagcggtttaaagaagctgaagaaatataccaaactggaataaagaactgtccagacagctcagattta

SEQ ID NO: 313211 - DNA, 98 bp, Homo sapiens
gctcgaaactttagtcggcctgatggcttagaggactctgaggatagcaaaaaaatgagatcatcaccccaggaagatgtctgcactctcatgttctc

SEQ ID NO: 313212 - DNA, 74 bp, Homo sapiens
gcatatgattggctctttagctgaaatacttctgaagcttactttgcaaagaaggaagatggttgtttccgaag

SEQ ID NO: 313213 - DNA, 89 bp, Homo sapiens
tgaatctccgcggggaggctcttccaaccaggggctgagcttctgcgctgtggagaagccaggtgtcatggagaaactccagctgggcc

SEQ ID NO: 313214 - DNA, 97 bp, Homo sapiens
agaaactcaagaagagattagtgctgaagtagcagcaaaggcagcactccacggaacgacccctcggtctctgtcgactacaacaccactgagccag

SEQ ID NO: 313215 - DNA, 74 bp, Homo sapiens
aacgttttagaaaatcataacaagcggttctctaccctgtaaaggtttgtttctgcgtcacatgatcttggcct

SEQ ID NO: 313216 - DNA, 100 bp, Homo sapiens
cactcgtaacctggatcccagaaggtcgcgaaggcagtaccgtttcctcagcggcggggcaccacacctcctattgaggctgacactctggactcttctg

SEQ ID NO: 313217 - DNA, 75 bp, Homo sapiens
gatttcccaggtccaccacctgctccatttgcaagaagtgggaaaactcttgcctttgccatcccaatgattcat

SEQ ID NO: 313218 - DNA, 80 bp, Homo sapiens
cttagaagaaacaattcttcgacatactctccagcttcaaggatgagagtccaatgaaagcaaacttccttcaaaacatg

SEQ ID NO: 313219 - DNA, 98 bp, Homo sapiens
ggccgcggatccccaagcccgccacgccgcccagcccggccccgcccgcgccggaagagccacgccgtaaaggcatgacttcctggcaccacagggaa

SEQ ID NO: 313220 - DNA, 75 bp, Homo sapiens
gcagggtggacctcaggagcctcctaaaaccacaggtgaatatgcaggttttgatgagacgcagccaacagctga

SEQ ID NO: 313221 - DNA, 83 bp, Homo sapiens
atcccccttcggcgacgtctcctcccgcctcaccacaggttcccgtgtcagtggctatgatgacacctcaagttatcactccc

SEQ ID NO: 313222 - DNA, 114 bp, Homo sapiens
tgcaaattctgggaacactttgcagaaatgacgagaagcccctcggagcaggcctacaatgcagatcttcgtgaagactctgactggtaagaccatcaccctcgaggttgagcc

SEQ ID NO: 313223 - DNA, 82 bp, Homo sapiens
gctggagagaacagttcattgaagctatcactgtcagtgctgcgccaaatcttaaaggcagaccacgcaaaaagaaaccatg

SEQ ID NO: 313224 - DNA, 100 bp, Homo sapiens
cgggttcctctgaggattggaattctagaccccccagttcccttcaggatgatggaggatgcggaggccccgggagagcagctctaccagcaaagccggg

SEQ ID NO: 313225 - DNA, 50 bp, Homo sapiens
caagaagcctgctgagttcaccacaggtgtattccgaacttaagtaccac

SEQ ID NO: 313226 - DNA, 51 bp, Homo sapiens
ccattggcgtggatccgctggcctgaaaaacagcactggaggcaatgtttc

SEQ ID NO: 313227 - DNA, 90 bp, Homo sapiens
gacagcttttctcgtgctgtggttgcctcactggggattgtacattttctctttggcccaggtgaacagtggtatagcagccactccagc

SEQ ID NO: 313228 - DNA, 98 bp, Homo sapiens
cttgtacagagatgtgatgttggagaactatagcaatctggttttcttggcataagcagtactataatggatgtagacagcacaatttccagtgggcg

SEQ ID NO: 313229 - DNA, 119 bp, Homo sapiens
ccatcactctgcgcagagaagccgatgtcaagaagaggatcaaggaggccaagcagcggatcatgaggatgagaatgaagaaggtggtgaggtcccctgggccccgcctgaaggatcag

SEQ ID NO: 313230 - DNA, 100 bp, Homo sapiens
ccgctgctctgcctgccccaaggggttccgcgactccaccggcctgctgcaccaccagcctgctgagggatgcccaagaagttccagggtgagaacacca

SEQ ID NO: 313231 - DNA, 97 bp, Homo sapiens
aagaaaatatgatttcctcataatagaagatgatccttactattttctccagtttaacaagtgcaaattgggaatcgtgaaattcatagaagctgaa

SEQ ID NO: 313232 - DNA, 100 bp, Homo sapiens
ccatgcccaccaccatcgagcgggagttcgaagagttggatactcagcgtcgctggcagccgctgtacttgctcctgcccctcctaaagctgaagccaaa

SEQ ID NO: 313233 - DNA, 51 bp, Homo sapiens
ctaccggatcggtcggaaatgaatggtagctgagtggaggttgtctcgagg

SEQ ID NO: 313234 - DNA, 50 bp, Homo sapiens
tgggactgaagtacactgaagcaggcaaatgtttgcagactacggctgac

SEQ ID NO: 313235 - DNA, 101 bp, Homo sapiens
aagaagaccaagtagcatccaagattaaaggtggtggctgtggccttgaaaacagtcatgtgaaaactcatcaccttaaggtgttaagtgtaaggatcttc

SEQ ID NO: 313236 - DNA, 90 bp, Homo sapiens
cagtcatctcagtaagttaagatcttcctgaggacaatggcgcaagatcgtcttcagctgttcatagcatactgaacggctgtattcagt

SEQ ID NO: 313237 - DNA, 74 bp, Homo sapiens
gcgaccgccctgcgcttcgtgcaccggggcggtccgttgccaaagccaggcatccgtgtcattctggaccttac

SEQ ID NO: 313238 - DNA, 97 bp, Homo sapiens
ttccagaggatcactgtcgctgtcctttgagcgggaaccttcaaccagcgggttcccttctggagaagagtcaccgggtttggttctgtttcccctt

SEQ ID NO: 313239 - DNA, 75 bp, Homo sapiens
gataaagaggtcatcaaatctcaggagctcccctcccacccggtcactccgtccagcaagcacgcagacagcaag

SEQ ID NO: 313240 - DNA, 51 bp, Homo sapiens
tacaaagctgctttcattggaatagagacagatgggaccgtgttcagaatt

SEQ ID NO: 313241 - DNA, 82 bp, Homo sapiens
cgggatcctcatgttcactacccttcatgcatgaaagacaaagctactcaggctgtgagatttactctgattctgggaacca

SEQ ID NO: 313242 - DNA, 74 bp, Homo sapiens
caatctaactgggcaaaagaagtacaaggaatttcagaacaaggaagtccacaaatgaaggggacaccccattt

SEQ ID NO: 313243 - DNA, 75 bp, Homo sapiens
tggtggagtctttagatgcactgttggcttgcgagacaaatatgattgattataccggaacagagccttccagtc

SEQ ID NO: 313244 - DNA, 100 bp, Homo sapiens
gtttctttgctgtagccgtagtatcacctcatacttttcatttgcgacctcatcatccactccacgtcagcactgagaccagactcgagcacccctgtcc

SEQ ID NO: 313245 - DNA, 100 bp, Homo sapiens
ccaaggaggagcctgttccagaactgctggaagctgagtttcttgcagaacataaattattaggaaacattaaaaatgtggccaagacagctaacaagga

SEQ ID NO: 313246 - DNA, 49 bp, Homo sapiens
ggccgaggcaggtggatcacttgaggctggtctcaaactcctgacctca

SEQ ID NO: 313247 - DNA, 75 bp, Homo sapiens
tcagcagtcggatgggggaggactgctttatggacttgcatcaggagtagcaaacaagttggatggcttgaggac

SEQ ID NO: 313248 - DNA, 87 bp, Homo sapiens
tggtagaagcaccacaccaacatctagtcccttccgacagatgccttggggaaacagtctgtgaacagaggattcactaaggacaag

SEQ ID NO: 313249 - DNA, 82 bp, Homo sapiens
tgaaaccagtgggtagatgtcgttctgaaacgcagatggcccactgcgtgaccttggttcagctgtccatttcctgtgacca

SEQ ID NO: 313250 - DNA, 75 bp, Homo sapiens
agaagaaggaacggaaacaaagttattttgctcgaaatacaaacctggtcgatgtgatgatattttgaaatggaa

SEQ ID NO: 313251 - DNA, 95 bp, Homo sapiens
tggttgttggcgtgtccctgcagcgaaggatcctggggactttcccatgcctttcatatctgccaaatcgagtcctgtgattcccttggatggat

SEQ ID NO: 313252 - DNA, 75 bp, Homo sapiens
aaccagctgaggtgtccgtaaagattccagagaagcctgtgaacaaaggtgtccgcaatgttgccagtgtctgtc

SEQ ID NO: 313253 - DNA, 75 bp, Homo sapiens
acgcgggccttcgagcagctcatgaccgacctcaccctgtcgcggataaaccgagaaaactggtgtacaatagag

SEQ ID NO: 313254 - DNA, 75 bp, Homo sapiens
cgaggacgacgtggaggcggagtggcgcccggcgaggtagcgccaggcgagctgagatctgtatctgtggacctg

SEQ ID NO: 313255 - DNA, 80 bp, Homo sapiens
ggatcggaagcctgcgtaactttctcccttgatccgggagtctttccactgggttggaagtactccatgacacacactcg

SEQ ID NO: 313256 - DNA, 82 bp, Homo sapiens
gatgttcttctaatactcctcctctaacatgtcagcgttattgtaatgcaaggctacttctacaagtccgaacagccagtcc

SEQ ID NO: 313257 - DNA, 100 bp, Homo sapiens
taaagtctgagagagggaagtcgcctctgtgctcgtgagtgcatggggtataagacaatgcagatcttcgtgaagactctgactggtaagaccatcaccc

SEQ ID NO: 313258 - DNA, 100 bp, Homo sapiens
ccagagcagcgttcagcagggactgcagactcaggactggaaagttcaggagccctggaaaggagaaggaataagacggcaggaggaagagagagagagg

SEQ ID NO: 313259 - DNA, 100 bp, Homo sapiens
ttatgccaggatgggacatgctttggaagaaatcaaaaagttcctcatccctgcaaaagtcaacaactctagcttaattggagtaggctatactcagact

SEQ ID NO: 313260 - DNA, 82 bp, Homo sapiens
cagagagacgtgaaacatgtgaacactcaagtgaagcaaaagccttccatgattacttggttggcagagaatttgaactgga

SEQ ID NO: 313261 - DNA, 82 bp, Homo sapiens
aacaaggtgacacatattctgtctgtccacgatagtgccaggcctatgttggaggtgtcagaaactatttaaaagaagcact

SEQ ID NO: 313262 - DNA, 98 bp, Homo sapiens
ccttcccagttatcataaccttgaatggcgactagatgtacagaagatgaatccggcctcggcgccccctccgctcccgccgcctgggcagcaagtga

SEQ ID NO: 313263 - DNA, 75 bp, Homo sapiens
cagacccatttccagtcatgagacaaggaagatggggagccaaagaccaagcatctcagagaagaggaggaagaa

SEQ ID NO: 313264 - DNA, 75 bp, Homo sapiens
acatatgatgattccgttggagtagaagtgtccagcgacagcttctgggagatgccttcaattaagttgcagagt

SEQ ID NO: 313265 - DNA, 98 bp, Homo sapiens
tcactgtgatgatgaagcatggcgtaacctgatgatggaaggtgcagcgtcaagtgctggagaacagctggttgatctgacttctcgggatggagcct

SEQ ID NO: 313266 - DNA, 100 bp, Homo sapiens
ctgctcttcaaagcgatccacaatctgttagaaaggactgatcctttgaaatactccagccatgactaaaagagaagcagaggagctgatagaaattgag

SEQ ID NO: 313267 - DNA, 95 bp, Homo sapiens
gccctctcggccctctcgctgggagcgagctggacgccactgtggggctctgagagtcctgaattcttactgggttggtgaagattccacataca

SEQ ID NO: 313268 - DNA, 100 bp, Homo sapiens
tctgaagaaaaccacaaccatgccaatgaacgaatgctatttcatgctacagaatccagaagtcagatttcagcaacaactggaacaactcagtgcaatg

SEQ ID NO: 313269 - DNA, 82 bp, Homo sapiens
acagctaagacaccgggacctcctggaagccaaaaatgaagtgtatgctgacttgtaaagtgaagaagccagtggtgctgcg

SEQ ID NO: 313270 - DNA, 98 bp, Homo sapiens
ggcgtccccggcgcgaagaggctggactcggattcgttgcctgaggctgagtcatcactagagagtgggaagggcagcagcagcagagaatccaaacc

SEQ ID NO: 313271 - DNA, 95 bp, Homo sapiens
ctcgacctgctgctggagacctggatctcgcgccacaaggagatggttggacgtgataagtatgagcctgcagctgtttcagaacaaggtgataa

SEQ ID NO: 313272 - DNA, 98 bp, Homo sapiens
ggccttccaacggcttcccagggccccaggggctttttggtggtgctggagttggcaagactgtactgatcatggagttaatcaacaatgtcgccaaa

SEQ ID NO: 313273 - DNA, 82 bp, Homo sapiens
ggcgccgccgccggacgtcggcaacggagaaggctatgactttgcagccgtcctggagtggttcgcggagcgtgtggaccgc

SEQ ID NO: 313274 - DNA, 82 bp, Homo sapiens
ttgttgaagccacacaaagaacaaattgcagttgtttgagaagtcaatgaaaggattctattttgcaaagctgtattatgaa

SEQ ID NO: 313275 - DNA, 100 bp, Homo sapiens
tgtttgtctgttcgacacaggcttggggccgacgggggagacggagccccaggaagaccaacactgtcatctgaagttggaatcatcatctgtgatattg

SEQ ID NO: 313276 - DNA, 80 bp, Homo sapiens
cagacgttagcgtgagtgatcactctcaatcccgggcctatgaaaggaggttccctacatgtcctttgattccgatgttc

SEQ ID NO: 313277 - DNA, 101 bp, Homo sapiens
ggaggcgggagaggcgagctcgcgatgagtggtctcggcaggctcttcgggaagggaagatgaagatcctgccaaaggtgatcagagtcgatcagttgacc

SEQ ID NO: 313278 - DNA, 120 bp, Homo sapiens
caaagagatctttctgagagagctcatttcaaattcatcagatgccttggacaagattcgctatgagagcctgacagacccttcgaagttggacagtggtaaagagctgaaaattgacat

SEQ ID NO: 313279 - DNA, 100 bp, Homo sapiens
ctctccgacgcaagactgtcccggcccggttccaggaagaggccgactcagtcagccagaccctggcgaagctcaactccaacttggatgccaagtacag

SEQ ID NO: 313280 - DNA, 75 bp, Homo sapiens
aacttcaacagaatgtggcaaccagagtcacttggaactcttctgtggcatctgaagcagatggacgaagccaag

SEQ ID NO: 313281 - DNA, 89 bp, Homo sapiens
cccagacggctcacctgtgcgggatggaacaaaagattcatgatgttgctatcaaaagttgagaaattgtcagaagaaatcatggagat

SEQ ID NO: 313282 - DNA, 135 bp, Homo sapiens
gccgtgttgaccggtttggttgaagttggagaagtatccaatagggatattgtagaaactgtctttaacctggatctaagcctttcccacgttatggttataaaccctccccaccgaatggatgtggctctccac

SEQ ID NO: 313283 - DNA, 82 bp, Homo sapiens
gttgagggtctccagggttctttggggcccgaggatctattcctctatgtgatataaatgtcactgtgcttctgagttttat

SEQ ID NO: 313284 - DNA, 100 bp, Homo sapiens
tggccttagtgccccaggatcagggaggactggctgcccaggctttgctgaggttctgcagaccttcagcacctgcaaggggatgctgggtgagatcctg

SEQ ID NO: 313285 - DNA, 75 bp, Homo sapiens
gtctaggcggggctggaggcggtggctgcggttgcgggaccggaaagatgaatgggagggctgattttcgagagc

SEQ ID NO: 313286 - DNA, 96 bp, Homo sapiens
gcaggagctggatccggcttccggaagacataatgaagcctacacctggaccaaccccacctgctgcgtccacaacgtcatcatcgggaagctgtg

SEQ ID NO: 313287 - DNA, 82 bp, Homo sapiens
catggagcaacaggatcagagcatgaaggaaggggggctacttcagtcagggggatcaaagatactttattgaacctttaag

SEQ ID NO: 313288 - DNA, 75 bp, Homo sapiens
ttctttggaattccattcttttccttattcttctgatgtggatccaggtacaactccaaaaggagacattggaga

SEQ ID NO: 313289 - DNA, 100 bp, Homo sapiens
gccctggtcctggcccaggctcctgcagctttagcagatgttctggaaggagacagctcagagaggcagccgctatgatgggcaaattgcagtgtttggg

SEQ ID NO: 313290 - DNA, 90 bp, Homo sapiens
ctactatgacaggaacctggcactgtttgagaacctgaaggcggctaacacagaccccacagccccgccctacgacaccctcttggtgtt

SEQ ID NO: 313291 - DNA, 50 bp, Homo sapiens
ggaggaacccctccaagcactacgtgaattttaagaaggacaccacttcc

SEQ ID NO: 313292 - DNA, 100 bp, Homo sapiens
agaggcaccgggatcgtgaccgagaccgtgaccgagagcgtgaccgagagcgcgaatatcgtcatcgttagaaggtaatcatagcctcctggtgtcgcac

SEQ ID NO: 313293 - DNA, 90 bp, Homo sapiens
gcagctgcctcagttcttagcgcaggcccagagccatggctatctcctcttcctcctgcgaactgcccctggtggctgtgtgccaggtaa

SEQ ID NO: 313294 - DNA, 99 bp, Homo sapiens
aaaggatttgagagcccgtctgacaatagcagtgctatgttactgcaatggcatgaaaaggtacctgtacaaactccgcgatcttcacctggactgtga

SEQ ID NO: 313295 - DNA, 100 bp, Homo sapiens
aagttgatgaatttgtgactcacaatctgtcttttgatgaaatcaacaaagcctttgaactgatgcattctggaaagagatccaaaatacggagctggca

SEQ ID NO: 313296 - DNA, 100 bp, Homo sapiens
ctgagatcagagtcacgcccttggttacagaatgtctgaaggggacagtgtgggagaatccgtccatgggaaaccttcggtggtgtacagatttttcaca

SEQ ID NO: 313297 - DNA, 100 bp, Homo sapiens
tctcagtgggccggcccgggacttcgccctgagactctggaacaagagtgcatctccctcgccccctgagagtctcgtggaggaggagcgaccgagtggc

SEQ ID NO: 313298 - DNA, 74 bp, Homo sapiens
gtggctatggtgggcaaactaagccgattttccggaaaaagcttgtattggttggtgatggtggtactggaaaa

SEQ ID NO: 313299 - DNA, 78 bp, Homo sapiens
gagtggccctgacggaggggaggaagattgacttggcctctacttcttgttaaggaaattcatctcttgttttatcag

SEQ ID NO: 313300 - DNA, 73 bp, Homo sapiens
atgagcagctgcaccctactagtggagcatattaatgaaaagtgccataaactgaaaaaccaaacatgagggt

SEQ ID NO: 313301 - DNA, 80 bp, Homo sapiens
agcggctctgctcggtcctcaaagggaaagcaggcaggatgggagagtcgccgatagaaccacctcttccctgcctcctg

SEQ ID NO: 313302 - DNA, 90 bp, Homo sapiens
gataaccagattggattttaagaagaataaattaaccttggtggttgtagaagatgatgatcagagaaccatggagtctggcagtaccgc

SEQ ID NO: 313303 - DNA, 87 bp, Homo sapiens
gagactggagtcgaaggccgtgaggttctgaagcaaaaacacctggatgattgcctgcgacatgtatctgtaagaagatttgaatca

SEQ ID NO: 313304 - DNA, 50 bp, Homo sapiens
aatgatcttagttctggaatacccgagaggaagtttggcgtggtggtggt

SEQ ID NO: 313305 - DNA, 74 bp, Homo sapiens
gattttgcgtgaattagaaaaggatcatgtatcagttggaggacttggagacagcttctatgagtatttgctga

SEQ ID NO: 313306 - DNA, 95 bp, Homo sapiens
taagcacaagttcacgaaagcctacaaaagtgtggagaggttccttcaggaggatcaggttcccgtgtcagtggctatgatgacacctcaagtta

SEQ ID NO: 313307 - DNA, 98 bp, Homo sapiens
gggagccccgggagccgcacgaattgagcacttcgccagaatctacagtcaaaaaattggcatcaaaaaggaagttcttatgaaaaccttgtggggag

SEQ ID NO: 313308 - DNA, 100 bp, Homo sapiens
aactctgcagtggaccacagcattcctgaaatacatccaggaaagacatggagattctcttaaaaaggagtctatgggtaaaacatcagggaagctgttt

SEQ ID NO: 313309 - DNA, 97 bp, Homo sapiens
gtcccgcgcgagctttcccgggataagtagctttagcgatcgggagacagccgggcgctgcaagggtacaggcatccttcacctgctattgttgcaa

SEQ ID NO: 313310 - DNA, 75 bp, Homo sapiens
cgacaagctgcccatcgaggagacgctggaggacagcccgcaggtagttacttttggtgacgctgtccagttccc

SEQ ID NO: 313311 - DNA, 75 bp, Homo sapiens
acgcctttcagaaagtggctgacatggccaccaacacacgtgtgctacagttgaaactccagcagcgccggaccc

SEQ ID NO: 313312 - DNA, 100 bp, Homo sapiens
aggctttcagccttgaggcaacattggatattattgagactttattacaactaccacctgctatggtagaagagggtgaggaagttcaaaatcaagaaac

SEQ ID NO: 313313 - DNA, 100 bp, Homo sapiens
gaagtgtgaatcctgctgaaaacttccgtgttctagtgaaacagaagaaggccagctttgaggaagaacgagcctctgactccaggttatcatggattcc

SEQ ID NO: 313314 - DNA, 90 bp, Homo sapiens
gcacgataaaggaactcaggcgcctcttcttagttgatgatttagttgattctctgaagaacaccttccaccatgaccacctcagcaagt

SEQ ID NO: 313315 - DNA, 88 bp, Homo sapiens
gctggccgacaacagcctggcgtccgccacggactcacaccacccggcaagaactgctcactacggctccctgccccagaagtcacac

SEQ ID NO: 313316 - DNA, 100 bp, Homo sapiens
ttaagcacaagttcacgaaagcctacaaaagtgtggagaggttccttcaggaggatcagcgatggcaagccggcaggtggatattgcaactcagggctgg

SEQ ID NO: 313317 - DNA, 100 bp, Homo sapiens
aagcactaagtgaagcaagaaagcatttaaaagaagagacacaattacgattgttttttgctccactcaagcctgttagaatcaccatggaatacagctc

SEQ ID NO: 313318 - DNA, 82 bp, Homo sapiens
ctgacattttgccttctgattctaactgcaaaggctttatcctgtggataaacgcagagtgaacgagtttggggagtcctac

SEQ ID NO: 313319 - DNA, 100 bp, Homo sapiens
cacagatcctgtttcagccccctgtgcgccaccattgcagccaaagtacatccagcagtggtcattcgacaacgaaagtcataccgtagaaaagatggcg

SEQ ID NO: 313320 - DNA, 100 bp, Homo sapiens
cttccatgacccaccatctgtcttctacgaggtctgcgggacccccagttacctggcccctgagattatcgagtgctccatgaatgaggaccacccgggc

SEQ ID NO: 313321 - DNA, 90 bp, Homo sapiens
ccagctggaggccgcccaagctggctacctcatgtccttcttcgggctcctccagatggtttttgccaatccagaagactgtgtagcatt

SEQ ID NO: 313322 - DNA, 100 bp, Homo sapiens
gtcaggatcccaggtggaagtgaatgacatcaaaaatgcctttgagagaggcaagtgaaccggagcaaacgacttccgatccagtctgcgctgttgcggc

SEQ ID NO: 313323 - DNA, 83 bp, Homo sapiens
cgggagcctcgtggctgcgtcaccgccgcccccccagacaagatggacaccgcggaggaagacaatgcagatcttcgtgaaga

SEQ ID NO: 313324 - DNA, 90 bp, Homo sapiens
ccctcattaccgtcgccagcggagcgaacccgagagcgtggagcgggctgggccagctgaagaagcatctgtagggaatccagaaggagc

SEQ ID NO: 313325 - DNA, 111 bp, Homo sapiens
atgctggtggctctacccagaattcaattaaagtggctcagccccgtgctgatcccattccaatatgtagcttctgtttggggactaaagaatcaaatcgtgaaaagaaac

SEQ ID NO: 313326 - DNA, 83 bp, Homo sapiens
cttgcaaaagttcacaaaattgatcctgatatcattgtgctggaggaaagcaggaatgttcagaggcaaatgaagattctgca

SEQ ID NO: 313327 - DNA, 75 bp, Homo sapiens
tgcagttgcttccacaggagaatgtttcgctgtgtttgctttcgcaccagccacaggtggaattaagaaatctgg

SEQ ID NO: 313328 - DNA, 100 bp, Homo sapiens
ctgggctcaacagaacacaggggaagatgatccctatgatcttgaagatgtttctgcacagaaatgagggaaatacaaagaaccaaatacagttctgaaa

SEQ ID NO: 313329 - DNA, 100 bp, Homo sapiens
agctcaagcaaatgtttggtaatgcagacatgaatacatttcccaccttcaaatttgaaggtgctatacttggtagatcagaaactcaggagtgtctttt

SEQ ID NO: 313330 - DNA, 90 bp, Homo sapiens
ctaagacgccaggacccactggaagcctagaaatgatgatgattattctccaccgtctaagagaccaaaggccaatgagctaccgcagcc

SEQ ID NO: 313331 - DNA, 95 bp, Homo sapiens
cggcttcggagcgggagtgttcgttgtgccagcgactaaaaagagcgttacagtgtttctgccacctctgtacaaaagacaattttacttgtgtg

SEQ ID NO: 313332 - DNA, 100 bp, Homo sapiens
tccagacagttacaggacaggctaacaccaatggaggctttacttcagacaagaacattactactggatggaaatccattccgagttcctcgagcagcca

SEQ ID NO: 313333 - DNA, 50 bp, Homo sapiens
gtgcaagctcagcttggagggtgatgagaacggcctcaaggaagactaac

SEQ ID NO: 313334 - DNA, 75 bp, Homo sapiens
cggagtttatcatcaccgcggaaatactgagaaccatgctcgacagctgaccaaggccatgatgcgaaaggccac

SEQ ID NO: 313335 - DNA, 75 bp, Homo sapiens
gcgagcgcggcgcggtccgggccggggggatgtctcggcggacgcgctggaacatgacatcgatacaagtgaaac

SEQ ID NO: 313336 - DNA, 98 bp, Homo sapiens
tgaggcccatgacccgctagttgaagcactagttacagaagcatggagaaggctagaaagggacagatatggcttttctaaagactgctttggaaatg

SEQ ID NO: 313337 - DNA, 96 bp, Homo sapiens
gccatgattgcatttttcttcatcatcatttacctgggaccaatggttttgatgataatcgtacttcaagaaggacaaagcagtttggtacttttc

SEQ ID NO: 313338 - DNA, 75 bp, Homo sapiens
gcggcggcgaacatgcgcttttgacacattggaggaggaggaaaggcaagctctgactctgaggttggaggcaga

SEQ ID NO: 313339 - DNA, 88 bp, Homo sapiens
tgcttgagatctgtttctggggcctctggcggtggcggcctggggcggcgcgacggctggtgcgcagactaagaaaaatggctttgtc

SEQ ID NO: 313340 - DNA, 100 bp, Homo sapiens
gctgcgcctggataaattctacatgtttcgccgtgaggaagatgcggaaaaggctgtgattgacttgaataaccgttggtttaatggacagccgatccac

SEQ ID NO: 313341 - DNA, 75 bp, Homo sapiens
gttacagaaacagattcgacaactggagagccacctgagccttggaagaaagcttggggaggaagttagtatact

SEQ ID NO: 313342 - DNA, 120 bp, Homo sapiens
caaaaatcaactgcagcgatggttacattgaatactacatatgtcgagggaatgcagaaagagttaaggaaggcagctccctgggctctgtcagctagcagagcatttggtggaagaaag

SEQ ID NO: 313343 - DNA, 100 bp, Homo sapiens
acagatgattccccaaagtacaattaccatttggactccagtggtagctatggagccgtgtaaagccagtggaatatagtcagatgtacagttatagcta

SEQ ID NO: 313344 - DNA, 109 bp, Homo sapiens
gatgtggtggaatatgccaaggaaaaactggagagcttcatcaaaaatagtgatagctttgataagttggtcaaagaaaaagtgatgtatgaaaaagaggcaaaacaac

SEQ ID NO: 313345 - DNA, 101 bp, Homo sapiens
gcccggcagacatgcagaaagtacgaatctgctctgagggcggatggatgtgtcttagtgcctgctccttgcacagaagctgaatccaaacaagccactga

SEQ ID NO: 313346 - DNA, 88 bp, Homo sapiens
ccctgaaatccatctctgccacagagacagctcaggaagcaactttgtattcacaggcctccactgggctctcagtaggtgggatttg

SEQ ID NO: 313347 - DNA, 52 bp, Homo sapiens
tataatcccagcactttgggaagccaaggcaggcggatcacaaggtcaggag

SEQ ID NO: 313348 - DNA, 100 bp, Homo sapiens
cgacgctatggcgcactggagtaccctgttcctggcatttacaggctggtaacctacatctttgtctacgagaatcccatctccctgctctgcggcgcta

SEQ ID NO: 313349 - DNA, 100 bp, Homo sapiens
caaaagtagagaaaatgaaaggagagcaagaatctcataggacattcacttggccagaagattgtacgacatggctgctcaaacgagtccagatgcccac

SEQ ID NO: 313350 - DNA, 142 bp, Homo sapiens
ttaacacctatgaacagtctggccacctctgtattcagcatagctattcctgttgatggtgatgaagacaggtcctggcctggcaatcagagtaatatgtgctgaagaaccttatatttgtaaggactttcctgaaaccaac

SEQ ID NO: 313351 - DNA, 82 bp, Homo sapiens
agcaggctgcctgacacaggagagggccccagcagggccaccgggcggcaagtgcccttgctaccagttccgagccagccga

SEQ ID NO: 313352 - DNA, 75 bp, Homo sapiens
cggcggcccggcccggctcgacgccaatgggacctgggcatggagtcgacctcgctagacgacgttctgtatcgc

SEQ ID NO: 313353 - DNA, 75 bp, Homo sapiens
gcggggaaccaaggagacgctcctggcactgcaggttcgtaagaagaactcgctgaaggactgcgtggcagtggc

SEQ ID NO: 313354 - DNA, 100 bp, Homo sapiens
ctgtcttggaggacatcagaaggttcgttccaccagtcataaaccagatgaaatctatggcatgattgaaagactatctcctggcactcgcaagattgag

SEQ ID NO: 313355 - DNA, 95 bp, Homo sapiens
gcatcagtcttgcagctgctgagggggtcctgatgacaacttaattgaaggtggaggaacaaaatttgtctgcaaacctggagccagaaacatta

SEQ ID NO: 313356 - DNA, 100 bp, Homo sapiens
tgcggaagaagtgcccgtccacgcacagcgaggagtgaagagtgaatctaccaagaacgttggcaatgaaaattgagcattttttctggaagaagaaagt

SEQ ID NO: 313357 - DNA, 75 bp, Homo sapiens
ccgcgatggctgcgcagggagagccccaggtcctggctataagtcaccatggcacagcaagctgccgataagtat

SEQ ID NO: 313358 - DNA, 80 bp, Homo sapiens
gagaaagattttcacctttgcagagaaggaacgtcaaggtcgtgggaaataaaaggcagttctacacagactgcagcaac

SEQ ID NO: 313359 - DNA, 100 bp, Homo sapiens
ttataccgagaacttaattcttcacctcaaccttaccttgtgcctttcctgaagaggccctgcctgagctgccccctggggagccggaattccgctgccc

SEQ ID NO: 313360 - DNA, 100 bp, Homo sapiens
gggaaaggaactgaaagagattgagccaccacacgagcaattcacaaagatgtaggcgaataacatgaacattgcttcatctttgttccacaagtttctg

SEQ ID NO: 313361 - DNA, 90 bp, Homo sapiens
agaaagaatgtgaagataccagtttgcgtcaggagacacagttccatttagaaatgtaatgacagctttgcagtttccgaagataatgga

SEQ ID NO: 313362 - DNA, 75 bp, Homo sapiens
gatttgggagataaagctgtgtactgccgttgttggaggtccaaaaagggtggttctcttcccaaagtggaagcc

SEQ ID NO: 313363 - DNA, 75 bp, Homo sapiens
cgaccatcctttctacagcaacatcagtaagtctttcccagggaactccgatgaagtgttccaacaaaatgagcg

SEQ ID NO: 313364 - DNA, 75 bp, Homo sapiens
caagaacatatgagtattcacacaggcattgtgtggctgctcaattaatgtaccaacactggatggaagaaacat

SEQ ID NO: 313365 - DNA, 75 bp, Homo sapiens
agacagagccaggatttgaaaccaggattgacttggcctctacttcttgttaaggaaattcatctcttgttttat

SEQ ID NO: 313366 - DNA, 111 bp, Homo sapiens
aagattatgacagattacgccccctatcctatccgcaaacagtgaaagaagaacgtccagaaaaaataccagatttaaaattattggtagagaagaaatttttggctttac

SEQ ID NO: 313367 - DNA, 51 bp, Homo sapiens
ttccagaccattcacaagacgttggatggcaagcatgtggtgtttggcaaa

SEQ ID NO: 313368 - DNA, 75 bp, Homo sapiens
gaaccgggaactccactttgtggcaccgtgagattctccagaaagcgtggatacccatcaacgaagttttgatat

SEQ ID NO: 313369 - DNA, 100 bp, Homo sapiens
agtggttaaatgaggagaaaattatccagaggcttgtggaaatagttcatccatcgcaagaagaagatgcattatcctgcactgaaaactctggaacatc

SEQ ID NO: 313370 - DNA, 90 bp, Homo sapiens
aatcaggctcccctgagatgagcagcagcgcagaggaggtgcccctctcttactacaccaacttcagatgaagcagatgatgatgatgat

SEQ ID NO: 313371 - DNA, 130 bp, Homo sapiens
gacgggcatcttcgccaagaacgtccagaagcgactcaaccgcgcgcaggaaaaggcaaatgtttgcagactacggctgaccgtacctcctgagagtccagttcctgagcaatgtgaaaagaagattgag

SEQ ID NO: 313372 - DNA, 88 bp, Homo sapiens
tctactactctgaggagaccagcagtgaccagggcaacgaggatgaggaggagcccaaggagaggacactggaggtgaagaaggaagc

SEQ ID NO: 313373 - DNA, 100 bp, Homo sapiens
cagagactcagccggacctgcttccgccagtggagacaacagaccatgccagatgatgtccaaggcactgttgcaaccatttatacaagcagtgaacagc

SEQ ID NO: 313374 - DNA, 88 bp, Homo sapiens
aataccagtccccagtgagggtgtacaaatacccctttgaattaattatggctagtcctgtgtatggaaactcacatgagtcagctca

SEQ ID NO: 313375 - DNA, 98 bp, Homo sapiens
tcgtaatagagccttaaatggggatctggtggtcgtgaaactgcttcccgaggagcattggaagcagaagatggctgtgccacccacgtatgccgatc

SEQ ID NO: 313376 - DNA, 82 bp, Homo sapiens
cggcccgcgggggagccccgggagccgcacggtgaatgactggcaggaggactgggtcgtgttctatgcccggcagcgcatt

SEQ ID NO: 313377 - DNA, 83 bp, Homo sapiens
agagagggccagagcgtcggggaggcaagatgatccaccagcggttccatcctacacttggtgatgctattgctgagattaga

SEQ ID NO: 313378 - DNA, 100 bp, Homo sapiens
gtgcagcttcttcagttccaggaagatgcctttgggaagcatgtcaccaacccggccttcaccaaactccctactgacttccttttggtagtactgcgtg

SEQ ID NO: 313379 - DNA, 88 bp, Homo sapiens
tgaacgggtccacgttcgtgctacagaagaagggcatcgtgcgtgccaagcggcgagggtgtcaaattgagaaccaggtagatcccca

SEQ ID NO: 313380 - DNA, 50 bp, Homo sapiens
ggcagccagtactcgggcagcctgttggtttcttcaaacggaacctgaag

SEQ ID NO: 313381 - DNA, 71 bp, Homo sapiens
attttggggcagaatacagagatatggaatcaggacgaaaaggaggttgtgctaaagggaaaggaggatcg

SEQ ID NO: 313382 - DNA, 82 bp, Homo sapiens
cctttgaaaatcaacgacaacttgagcacagcctccaggaccactggctgcccatgagagacgaaggatggcatccaagggg

SEQ ID NO: 313383 - DNA, 88 bp, Homo sapiens
tatgagctcggttttcttatgcttataagagtggaacagggcgccctgcgtccggcagaggaggcgagcatcccgctcaggtgatgag

SEQ ID NO: 313384 - DNA, 75 bp, Homo sapiens
ccctgatcgagcggcgggagcgaggtatgcgagaccacccacccatccccatcaccgacctggcggacaacatcg

SEQ ID NO: 313385 - DNA, 100 bp, Homo sapiens
aagggctctgaaagctagaagaaaaggtgtacttgcaagaaacctcaggacttgagtaacagcaacatggatttaggtcctgaatatgaaggtatattta

SEQ ID NO: 313386 - DNA, 74 bp, Homo sapiens
ggagagagtcctttacatgcctagctcgatcaagtcatccgccaaagaagcctgtccagtttggaactgttcct

SEQ ID NO: 313387 - DNA, 80 bp, Homo sapiens
ttcaacaagaggacccaggagaaattcgccctcaaagacttaaacaggcacaatcaaaaccatctcagtcagaagtcaga

SEQ ID NO: 313388 - DNA, 75 bp, Homo sapiens
caaacagattcagtggcctgcattgagggttctcgtggcaaccttttactacctttgccttaacctttggccact

SEQ ID NO: 313389 - DNA, 100 bp, Homo sapiens
agaggccctgtgatgatcgtgtcaggtgaagcggtgagtgctggagatgcattatgtgaaattgagactgacaaagctgtggttaccttagatgcaagtg

SEQ ID NO: 313390 - DNA, 100 bp, Homo sapiens
tgttgaagagcctcacacggagaccgtacgaaagtacttccctgagacatggatctgggatttggtggtggtaaagaacctcactctggagcctgagatc

SEQ ID NO: 313391 - DNA, 50 bp, Homo sapiens
catacatctttcttcgacaaagggtggtgatggcacttctcaaatactgg

SEQ ID NO: 313392 - DNA, 89 bp, Homo sapiens
atgcatcagatcatgcccaaagggatcaaggtggtcggacattgtgtggtgtaatgaggattggcctggttgcaaaaggcttgctgatt

SEQ ID NO: 313393 - DNA, 50 bp, Homo sapiens
gtctgcgagccaggattcccgcgggctgacgcacgaggcacacaggaagg

SEQ ID NO: 313394 - DNA, 74 bp, Homo sapiens
cgtgagctgcggcaggacggctggagatgccagagacgcggaacaattgagcaagaacaaggtgacacatattc

SEQ ID NO: 313395 - DNA, 74 bp, Homo sapiens
tcagcgcgggagcagtgcttctgcggcagcaagaaggattacatggagacagtgatgtcgaggagggttggctt

SEQ ID NO: 313396 - DNA, 101 bp, Homo sapiens
ggaaaagcccctttactgtaaaaggaaattggtacccctataatgggcagtgtctaccagatattgtgaagaaagttacaacgtcaatgattattccttaa

SEQ ID NO: 313397 - DNA, 74 bp, Homo sapiens
tagtcattcgtaatcagcaggccaaagactcagaggtgtttgctgagaacaaggatgagattgctttagtcctg

SEQ ID NO: 313398 - DNA, 101 bp, Homo sapiens
cgccgggtggtggttaaaccatgttaaggaggattttacagaggcaacagaagaaccttgaaggctatgtgggatttgccaatctcccaaatcaagtatac

SEQ ID NO: 313399 - DNA, 100 bp, Homo sapiens
ttttggaactgtcaggtacctcaaagcgccgactgaaccaagctaactcctccggaagagagtccaaggtgcctggtgcccgaagcgctcagaatctgcc

SEQ ID NO: 313400 - DNA, 100 bp, Homo sapiens
aaggaggaagaggagagcaagttctgctggttcagtattgaactgcaagctggaggctctcaggtcatttttaccaacccattggagatagtgaagattc

SEQ ID NO: 313401 - DNA, 100 bp, Homo sapiens
aacattttctatatccttttttagttcatgtgaattgcactttctgcctgcttctagaattcctccaagcatgccaatgaagatgtggaaagaatgttac

SEQ ID NO: 313402 - DNA, 51 bp, Homo sapiens
atcactacctccaccagatgttggggcatgcagcagattggaataaatatg

SEQ ID NO: 313403 - DNA, 98 bp, Homo sapiens
acgctcttccagacctggatggtgcccgctgtgcgtgtggacttctacaatgcagacgagctcaagaatctttggctgctcctgacctcagcaaacca

SEQ ID NO: 313404 - DNA, 75 bp, Homo sapiens
ggacgccgggacacctggaagccgagaaatgggaatgctggcagactttgtgtcccagacttctccaatgatccc

SEQ ID NO: 313405 - DNA, 82 bp, Homo sapiens
ttttgtcttctgtgtggattcttcagaaagtgaacttggcattttagatctaattcaagttaccattaagaatatcgaaagg

SEQ ID NO: 313406 - DNA, 75 bp, Homo sapiens
tcagatactctggtgattcctccaagactgttttaatgacaacagaaaccagtggtaggactctgccagacaagg

SEQ ID NO: 313407 - DNA, 90 bp, Homo sapiens
aggaagtagccaaagagcaactaactgatgctgacaccaaagtgagaaagatcagtctaaagaaaaggagaagaaagtgaaaaaaacaat

SEQ ID NO: 313408 - DNA, 100 bp, Homo sapiens
cagctggtcaccgacagggatcacttcatccgaaccctcagcctcaagccgctgctcttcgtcactgttggaggcccatgatattgtggcatcaaagtgt

SEQ ID NO: 313409 - DNA, 141 bp, Homo sapiens
aacaaactctgatgagcacagatctcttagcaaacagttcggatccagatttcatgtatgaactggggtgagcccctccagactccgaataggagatcaagagtttgattcattgcctgctttactggaattctacaaaat

SEQ ID NO: 313410 - DNA, 75 bp, Homo sapiens
gccgggtaccggccgtggaagcggccaccgactactgtcagcagctgtgccaggcaattgctggctactttgata

SEQ ID NO: 313411 - DNA, 100 bp, Homo sapiens
gcgcttcttcccacactgtgagcctcagcagctccagccagcggacccgacggctgagaggtcccgagcagcccggcccaccatggacccctctgcccac

SEQ ID NO: 313412 - DNA, 78 bp, Homo sapiens
ggcagtgttagcatcatggatggatccgacgaagagaggctgatcatcaggggttcactttcagagaagttgagaatg

SEQ ID NO: 313413 - DNA, 100 bp, Homo sapiens
ctgcaggatgggggactccaaagtgaaagtggcggtgcggatacgacccatgaaccggcgagcaaaaaatcccagaagtgggatgaaatgaacatcttgg

SEQ ID NO: 313414 - DNA, 75 bp, Homo sapiens
gaacaagacatggaaggaaatgagggcaacttctgaagacttcaacaagaccatatactccttgacgacagggac

SEQ ID NO: 313415 - DNA, 82 bp, Homo sapiens
catggatctggaagctgagggcacgtgtttgcggttcagccctttgatgaccgcagcaggtgcaggagaacccggggaggag

SEQ ID NO: 313416 - DNA, 49 bp, Homo sapiens
gacggcggcagcagcggcattcagtggttctatagatggtaataaccaa

SEQ ID NO: 313417 - DNA, 89 bp, Homo sapiens
tcgaaatgaagcggaaagcagatatgcgcgtcagcatactttggcggaaataggaaggttgttgattactcacagtttcaggaatctga

SEQ ID NO: 313418 - DNA, 96 bp, Homo sapiens
ttgaagtcaacattcgatttattggaggcctacttgcagcatattacctatcaggagaggaggaggagatgttaaagtaacccatcttgcaggacg

SEQ ID NO: 313419 - DNA, 90 bp, Homo sapiens
caacactgttattgtaaacaaagggtgggagactacactggaaaataaagagttagctccaaattctgacattcctgaggaagaaccagc

SEQ ID NO: 313420 - DNA, 90 bp, Homo sapiens
ctggaagcccgtactcaccagtgcagtcccagtgaagatagtgatccggggagacaggaacacgggcaagacagcgctgtggcaccgcct

SEQ ID NO: 313421 - DNA, 49 bp, Homo sapiens
ctttactgaagaggaggaagcccagcaatgcatgagagctggaagtgga

SEQ ID NO: 313422 - DNA, 75 bp, Homo sapiens
ctttttcgcagtactcgaacgttgttattttcggtgtgcctcagatgtctcatataatggcagcaaaggctgtag

SEQ ID NO: 313423 - DNA, 76 bp, Homo sapiens
aggtgtccagcatcaaccaggaggcgttggtgctcacggccaaggccacgaaacctgatgtgagactctctcgagg

SEQ ID NO: 313424 - DNA, 92 bp, Homo sapiens
aagtacaagttagaactctttatctttctgtggatccttacatgctgcagaaccttggcctgaaaatgctacattatatcagcaattgaaag

SEQ ID NO: 313425 - DNA, 82 bp, Homo sapiens
ggcgaacgcggagagcacgccatgaaggcctcgggcacggaaggtgggagtcaatcattttgacaagtctcctgaaaggaac

SEQ ID NO: 313426 - DNA, 75 bp, Homo sapiens
tacatcaagagcatagcccctatcactgactttgaatattcccagctttaccgatttgttacaactcaagcaagg

SEQ ID NO: 313427 - DNA, 100 bp, Homo sapiens
aggtctggacactgaaaccaccgtggaagtcgcctggtgtgaactgcagcaaaagcagacatgtgtcaatttaaattctacatctatgtatttggtaagc

SEQ ID NO: 313428 - DNA, 75 bp, Homo sapiens
atggacacagcttctagtgttgctttggatcttgtggaaagtcagatgaagtacatgcgagaagccacgccctat

SEQ ID NO: 313429 - DNA, 75 bp, Homo sapiens
gagtaacggaggacaattcaccatagttttctttaagggcaccatgccggtggaaaggatgcgcatgcgcccgtg

SEQ ID NO: 313430 - DNA, 78 bp, Homo sapiens
gacaacagcctggcgtccgccacggactgagcagggggaggaacatttaagctgatggaagtggaagtggaagttgct

SEQ ID NO: 313431 - DNA, 95 bp, Homo sapiens
tgatgagaaataaggacaaaagccaagaggaggacagttcgctacacagcaatgcatcgagtttatcatctggacttcaagctgcaggcagttct

SEQ ID NO: 313432 - DNA, 75 bp, Homo sapiens
ctccaggcttccgacggcctggtcctgttgcaccaattccagctggacatcactgtgaaaatgggacgggataaa

SEQ ID NO: 313433 - DNA, 100 bp, Homo sapiens
ggcttcaaccccctcgagttcgagaacttcagctggaggggctacgcgcagatggcacctgtccaggtgcatcctgagctctacgtggacaagtcgcggg

SEQ ID NO: 313434 - DNA, 99 bp, Homo sapiens
gcggtgacgacaggcagcaaaagaccagccagtggtggcggcgccagtgggtggaggagttcttcccatccgtgtccctgggggaccccacgctggaga

SEQ ID NO: 313435 - DNA, 76 bp, Homo sapiens
ctccggagacagcccaaatatcctcggaagagcgctcccaggagaaacaagttttgcggctagttggctattcaag

SEQ ID NO: 313436 - DNA, 100 bp, Homo sapiens
aaatctacacagtaccagaggtggggactgttgttggaggaacactttccagacttgtgtgcgagacagagccactctttctatcctggctgttaggaat

SEQ ID NO: 313437 - DNA, 100 bp, Homo sapiens
tgagcagtttgtggaagcgatcaaaacatgatcaggggcaagtcttgttggatgtcgtcttcaagcatctagatttgactgagcaggactattttggttt

SEQ ID NO: 313438 - DNA, 100 bp, Homo sapiens
cgagattcctggggaggcgattcatgacagctgagttccttttggaggatccgtcttcaggcagtgccggtggtggtgtgcacattgagccccggtatag

SEQ ID NO: 313439 - DNA, 82 bp, Homo sapiens
ggtgcggaagctggtgggcactcagcaccctctgcttaccacagccaggtgcagaccatgaattacgtggggcagttagccg

SEQ ID NO: 313440 - DNA, 100 bp, Homo sapiens
cacattgctgttcatgagtggaatccatgtttctggacgcggatttttggcctcatactctgttatagataaacaaggacagtctcatcgaactcaagga

SEQ ID NO: 313441 - DNA, 90 bp, Homo sapiens
gcaagaacagagagagaggtggacagatctgagagatactgagacatcgctattgcggttccgaggcagtgggaagagatgcggcccctg

SEQ ID NO: 313442 - DNA, 90 bp, Homo sapiens
ggaaacatgctagaattacctggaacttcatcatcatctacttcacaggaattgccatttttggctgattgcaattctggcccaactcaa

SEQ ID NO: 313443 - DNA, 74 bp, Homo sapiens
tcctgacgtgtatcgaacctccacagcccaggcaagatgtgctgaatgtagagcagagccggagccaggtgcag

SEQ ID NO: 313444 - DNA, 82 bp, Homo sapiens
agaaaccagccgaacttcagggtttccaccgttcgttcaagatgacgacaacccccccgtgtcttttgtgaagttctccccg

SEQ ID NO: 313445 - DNA, 98 bp, Homo sapiens
cgtgtggcttcggccccagcttctttctgagccaccagacagcactgggtagtgctttccaagactggcacagcctccaggttggcgggctcatctgc

SEQ ID NO: 313446 - DNA, 101 bp, Homo sapiens
ctccatctgtctccttgagcaaaaaagaaaagttgtttcctccaacattgatgttcctccagcaagtttgcagaaaaaacttcagcatgtgccaggaacac

SEQ ID NO: 313447 - DNA, 99 bp, Homo sapiens
gcgcgccaaaaccgggacggacaagaccctggtgaaggaggtcgtacagtggtctaccatcacggcaacagtgcgacgggcggccattacactacagac

SEQ ID NO: 313448 - DNA, 100 bp, Homo sapiens
ccatttgccgtggccaggctagaggtgacgcagaagttctccctggtgattgtgcagggccacctggtgtcagaaggggtcctgctttttggccaccaac

SEQ ID NO: 313449 - DNA, 100 bp, Homo sapiens
ccggagcttctcagaagacagagggttttcttttgagttttgtgcaccgagggcggcctgagcctctggatcttcacttgggcatgttcctgcccacctt

SEQ ID NO: 313450 - DNA, 100 bp, Homo sapiens
tggaatatacattcagtaggtctgatccaacttcgtatgcagggtacattgaagaccttaagaagtttctaaaacacgaagcttcacaaaagatgtctaa

SEQ ID NO: 313451 - DNA, 73 bp, Homo sapiens
aggctttgcactccttggcatttctttctttgcacttcctgccgttggagtaatagatttttccctctacctt

SEQ ID NO: 313452 - DNA, 100 bp, Homo sapiens
gaagtctggatgtcggtgggcctctgagatatgccgtttacggtcaaggcggataagaaggcggcacaagaaaagatgatccagcaggagcatgagcggc

SEQ ID NO: 313453 - DNA, 50 bp, Homo sapiens
ttgccacctttccctttatttccggagccttatgccagcctggaccatct

SEQ ID NO: 313454 - DNA, 100 bp, Homo sapiens
tgagatggtagccaaacccccagaacaaactgcctattttattggcatttttaccttcctgtgggtagaacggcccatgacggcaaaaaaaaagcccaac

SEQ ID NO: 313455 - DNA, 100 bp, Homo sapiens
cgtgatgtgacgctggagaacctggcacttatgtcctccctggggttcgccaaaaagacattcatttcttactcggtgactttcaaggacaacttccggc

SEQ ID NO: 313456 - DNA, 88 bp, Homo sapiens
ggtgctcgtcgggagtgatcacctaccctacaggacacggagttgcagaggaagctagaccatgagatccggatgagggaaggggcct

SEQ ID NO: 313457 - DNA, 152 bp, Homo sapiens
gaaaaattagtcctttctaaactttatgaagaaggttccaacaaaagactttttaatgttgatcggcatgttggaatgagagttggaaactcaactattggaacaatgtactgttgacacaagtgttgctaaagaacagagccttccctcag

SEQ ID NO: 313458 - DNA, 75 bp, Homo sapiens
gcattccctcagttttttatagtatactggctggctccttctttagacggagtctcgctttgtcgcccaggctgg

SEQ ID NO: 313459 - DNA, 75 bp, Homo sapiens
gtcatcggggatgtggacgaaggggccgacctcctagacaatgcagatcttcgtgaagactctgactggtaagac

SEQ ID NO: 313460 - DNA, 98 bp, Homo sapiens
agattttgaagaagggccgtcgaggaaaaggaggaagacaatggtcctataatgcccttggataagaaaaggaaacttttgagctgcaccttcagttt

SEQ ID NO: 313461 - DNA, 101 bp, Homo sapiens
cggaccatgataatttccccagagcgtcttgatccttttgcagatggccggtctaattgaagccaacggagaactcaaggtcttcatagaccagaacctta

SEQ ID NO: 313462 - DNA, 83 bp, Homo sapiens
caggccggcaggctgagaaaagcgagaccgcgtgcgaggaccggctacaaagtttggatcccaagcgagtcagaaggtaacag

SEQ ID NO: 313463 - DNA, 100 bp, Homo sapiens
gaattaccttatacagatggcaagatatggacaactaagtgagaaggcatacttctccgccttcccaccacccggattcatagtgtgaattcctgcccgg

SEQ ID NO: 313464 - DNA, 101 bp, Homo sapiens
cggaacagccacagcagcctcccaaggagtctgcaagttgggtgactgtcgttcctacagttacgtgtgtggaatctccagtaaagatgaacctgactggg

SEQ ID NO: 313465 - DNA, 80 bp, Homo sapiens
gtcttggtctcccaagaagagggcaattggattgctcagccagatgagaaatattcgattatctgacttcactgaatcct

SEQ ID NO: 313466 - DNA, 75 bp, Homo sapiens
cggaagtggctttgggtcacgaggcttcacggaggaggacagtcattttgtttactcattcagccctgttgcagg

SEQ ID NO: 313467 - DNA, 88 bp, Homo sapiens
ttcgtttcagaattgagcagaaaacaacactgacagccagtgcaggtcctactgctctgttggctcatgaaataggttttggaagtaa

SEQ ID NO: 313468 - DNA, 102 bp, Homo sapiens
ggatgcaggtggagcagaatttatcagatcatatcaaactctcaggttcgttccaccagtcataaaccagatgaaatctatggcatgattgaaagactatct

SEQ ID NO: 313469 - DNA, 75 bp, Homo sapiens
atgcaaccctgcagcatgttttaatgagtgactggaaccactgtgtctcttgaaacaacaaatagtctcttggat

SEQ ID NO: 313470 - DNA, 100 bp, Homo sapiens
gttgaccaactggtggaacccctggatgttttactgtgcctggctaactatagtcgagggggtgatggtcctatgtgtcgcccagtaattctgttgccgg

SEQ ID NO: 313471 - DNA, 90 bp, Homo sapiens
gccggcgtcttcgtttgggacgaggagaggatccaggaggaggagttgcagagcagtctctggtcccagcccaccccatggcccctccca

SEQ ID NO: 313472 - DNA, 98 bp, Homo sapiens
gccgatcccgccggaagcgccaggacaatggggacccgggacgacgagtacgactacctattcaaagtggtgtctatcgaagatccctttgaccagga

SEQ ID NO: 313473 - DNA, 80 bp, Homo sapiens
gatcagccctcacagacaagcactcagatactttctgagtgcctactatgtgccagcctgtgctaggcactgaggacaca

SEQ ID NO: 313474 - DNA, 100 bp, Homo sapiens
tccaatgggcctttccagcccgtggtccttctccatattcgagaaaaatccagttacactcttaaaggaattgtcagtgataaagtctcgatatcaaact

SEQ ID NO: 313475 - DNA, 90 bp, Homo sapiens
gtaacaccgccctggtgctctgcccattcaaagactccggctgcaagcacaggcctgctataactgcggtagaggtggccacattgccaa

SEQ ID NO: 313476 - DNA, 100 bp, Homo sapiens
ctgcgggcccgggccatggccgccgccgatgccgagatctttagcagttaaggagtttttttcaaagcccaagtataaccacattttgaaaccagaagac

SEQ ID NO: 313477 - DNA, 75 bp, Homo sapiens
cagatttctccgaagaccctacctcctcaggtctgctggagtttgttggagttccactccagaccctgtttgcct

SEQ ID NO: 313478 - DNA, 100 bp, Homo sapiens
tgctgaggctttgagatgcttaaatgatgtgcccagggtctagaagtccctgcatcccatgactcggagctgatggccttcatgacgaggaagttgtggg

SEQ ID NO: 313479 - DNA, 101 bp, Homo sapiens
tatgcatctttatccaatcaagtgcccttggacaaagcctgaaaccaggcaaagaggccatgctgcgacagaaggactatgagaccgccaccctctcggag

SEQ ID NO: 313480 - DNA, 83 bp, Homo sapiens
gacagaagatggtgcagaagaaaccagccgaacttcagggtttccaccgttcgttcaaggttgtgaccgagattcccgacgag

SEQ ID NO: 313481 - DNA, 75 bp, Homo sapiens
agacaaaaggaaatgcttcgaaataatgaatccaaaatccttcatttacagtagaacttcatggaggaacacgga

SEQ ID NO: 313482 - DNA, 82 bp, Homo sapiens
gtgaggtcagcttcacattctcaggaactctccttctttgggcaggagtgcagtggtgcgatccgggctcaccgcgatctcc

SEQ ID NO: 313483 - DNA, 117 bp, Homo sapiens
aagtccaagaagcaaaaaagggactgctaagaagataccaccaggcgaggattaaatccaccacacagggtgaaatctatctccatgacaacattcacacaacaggaaattgaattc

SEQ ID NO: 313484 - DNA, 73 bp, Homo sapiens
cggggaatgggcccgcacttgcccaggattccagacagcattggaaaagacatagaaaaggcttgccaatcta

SEQ ID NO: 313485 - DNA, 75 bp, Homo sapiens
gcagcagtagaatcacttgggttcattctattcagatttcaaggccagagaatggcaggggaacagaaaccctca

SEQ ID NO: 313486 - DNA, 104 bp, Homo sapiens
gttccaggtcccggatagcgagggcggccgcgccggctccaggtgtggccgacgacgatgccctcgctgaggagcgcatgcggagaggccagaacgccctgcca

SEQ ID NO: 313487 - DNA, 95 bp, Homo sapiens
ttaaaggaacctctacaacgaaggtgaagccacggaagataagaaacttgtggtggagaatgttgatgtgttaacacaaatgaggaccagctttg

SEQ ID NO: 313488 - DNA, 98 bp, Homo sapiens
tcccctttaccatttcagaatagctttctctcctttgaaaacactaagaataatgtcactgcatcagtttttactagagccaatcacctgtcatgcct

SEQ ID NO: 313489 - DNA, 90 bp, Homo sapiens
cctgcctctttcaataatattcagacagcaattaacaaagaccagccagctaaccctacagaaggtattagaaaactactcggatgctcc

SEQ ID NO: 313490 - DNA, 98 bp, Homo sapiens
tggtcagagactattacattttatgcagcaaaacccagatgtcctgcagcaggccttcacctaccaccatatccaggagatcatggtccagctgctgc

SEQ ID NO: 313491 - DNA, 99 bp, Homo sapiens
ggagggggaaaaaatcccaaggtctgcaaaggttgaattgaccaaagcaatggtgatggagaagcctagtcccctgctggtcgggcgggaatttgtgag

SEQ ID NO: 313492 - DNA, 82 bp, Homo sapiens
aacccggccctcggcaaaacggccacggactctgacgaaaggatatgggccctcacattttccaaacctgtccatctgctaa

SEQ ID NO: 313493 - DNA, 100 bp, Homo sapiens
cgtctgtaccctcccccgggagagcaagccgggcggcctgccccgccggagcagcatcatcaagtacaaaattggacagctgtacatgatcagcaaacac

SEQ ID NO: 313494 - DNA, 90 bp, Homo sapiens
atcagtgagaaagactccaacttccagaacccatttaaaatcgaccgcacagaggcaccatactggacataccttttatgtgcactggga

SEQ ID NO: 313495 - DNA, 90 bp, Homo sapiens
ctttccttcctggcgctttcctgggttgcttctggcggccatggtgttgctgctgtactccttctccgattacatgaagcagatgacatt

SEQ ID NO: 313496 - DNA, 90 bp, Homo sapiens
gagagatttttgggacctgaaatcttttttcatccagagtactatactggcaattgctggagaagattttgcaattgttgcttctgatac

SEQ ID NO: 313497 - DNA, 75 bp, Homo sapiens
cacgccctgtgcacgcttggaatgctggatcggataaggagccccgtggaatcatccctttagagaatctgagta

SEQ ID NO: 313498 - DNA, 50 bp, Homo sapiens
ctatcgtgtggcattttatgggcagcttggaacatcacccctccaccttg

SEQ ID NO: 313499 - DNA, 82 bp, Homo sapiens
gttgtggccgtaggactgaacacggggaggtactggtgtggcatactcggacagagaagcccaagatgaagcaggaggagca

SEQ ID NO: 313500 - DNA, 97 bp, Homo sapiens
tgagaatgcagccgtgtgacagtaactgaacattggtctaaagtctttccaaaaggtcaaggttcacaagtaataaaagactagtggccttagtgcc

SEQ ID NO: 313501 - DNA, 100 bp, Homo sapiens
aggatgttctaccggccctccagttaccagccccctctgcagaatgccaaggccgccagatcccacccttggacccccatgaaaatggaaacaatggaac

SEQ ID NO: 313502 - DNA, 101 bp, Homo sapiens
gtgttggagaaagaaaaggcttctcagctccaggaacaatccagcaacagctctggaaaagaggtgcttccatacaaaggggacagaagagatgatggaag

SEQ ID NO: 313503 - DNA, 100 bp, Homo sapiens
ccagacttggcccagtgtttcttctgcttcaaggagctggaaggctgggagccagatgacgaccccatgtatgctgttgtgaaatgttctaagtctggag

SEQ ID NO: 313504 - DNA, 82 bp, Homo sapiens
gacaacagcctggcgtccgccacggatattagaaatggctactccccagtcaattttcatctttgcaatctgcattttaatg

SEQ ID NO: 313505 - DNA, 51 bp, Homo sapiens
gtctttgttccctgcagccctcccacggttcttcagacccagaagaagaaa

SEQ ID NO: 313506 - DNA, 83 bp, Homo sapiens
ttaaaacatttttcagggacgtagccatccagaggaatgtatcctgtcaggtataatgtcagtgaatggcaagaaagttcttc

SEQ ID NO: 313507 - DNA, 51 bp, Homo sapiens
attgcttgcaacaattgttatgcttggtggacggcgaagtaaagcattgtg

SEQ ID NO: 313508 - DNA, 121 bp, Homo sapiens
ggaagaacaaaatggcctctaatatctttgggacacctgaagaaaatcaagcttcttgggccaagtcagcagtatttggcatgatcattactatcggccagtctatcgtgtatgtgatgac

SEQ ID NO: 313509 - DNA, 100 bp, Homo sapiens
cgaagttggaagtgtctcttagcagcgcgcggagaagaacggggagccaggtcaaaatgcagatcttcgtgaaaacccttaccggcaagaccatcaccct

SEQ ID NO: 313510 - DNA, 75 bp, Homo sapiens
acccggagttcagcgcggactcccccagcccaggttggatggcaagcatgtggtgtttggcaaagtgaaagaagg

SEQ ID NO: 313511 - DNA, 96 bp, Homo sapiens
ccctaagatacctggaagattttgtttttaacctcacattaaggaaagcacacatcaccttgaaagttgaccagcaagtcaagtccctgtcgtcgg

SEQ ID NO: 313512 - DNA, 50 bp, Homo sapiens
agaagatgaagatgagaacattgagggtggtgacttcacacgccataatg

SEQ ID NO: 313513 - DNA, 75 bp, Homo sapiens
agagaagatggcgcttgacggaccagagcagctcggccatcctgatttacctgagctgtaagtaccagacgccgg

SEQ ID NO: 313514 - DNA, 75 bp, Homo sapiens
caggcacgggccatgggtgactacctcatcgtaggcgtgcacaccgatgctctggcaggctgccctgagcacgct

SEQ ID NO: 313515 - DNA, 100 bp, Homo sapiens
tatcattctcttcactcgagagatgaggacactgaaattcagagaggggaagtgatttgcctcagcttgtacttccatttgacgtggaggacatgaccgc

SEQ ID NO: 313516 - DNA, 100 bp, Homo sapiens
aaatctggaggcagtatcacctaacgaccacagagtattcagccatggcctcgctggctggtgggctggacgacatgaaggccaatctggccagccccac

SEQ ID NO: 313517 - DNA, 82 bp, Homo sapiens
ctcagggcagctttgactgcatccagcaaacattctccagttttcggctttgtgagaaaccttaccatcaaacacgatggcc

SEQ ID NO: 313518 - DNA, 98 bp, Homo sapiens
gtgaagagaggatgttctagaggcatggttgaaattgaattgtgaaagacccctgacaaaagacaatcatcttctgggtacatttgatctgactggaa

SEQ ID NO: 313519 - DNA, 90 bp, Homo sapiens
agctgggccggagcagccgcgggcgcccgaggggccgagcgagtgccggtggtggtgtgcacattgagccccggtatagacagttccccc

SEQ ID NO: 313520 - DNA, 83 bp, Homo sapiens
tgcagaaggaggtcctgccgtccatgcggaagatcgtcgccacctggatgctggagagagcgcctgctcgctgtgcccccggg

SEQ ID NO: 313521 - DNA, 83 bp, Homo sapiens
ctgaccacggcgactggacttacgaggagcagtttaagcagttccagggtctccctccactgctgtagtaacccgggtccggg

SEQ ID NO: 313522 - DNA, 83 bp, Homo sapiens
acaatgtcacgctcccaccagcagcgcctatgagtttgtcacctggctcgatggcattaaatccactccttataccgccgcac

SEQ ID NO: 313523 - DNA, 83 bp, Homo sapiens
atttgaaccatgtttggattgaagccgcctctgtattacttaccagggcaaaataacatggcagccagacgaattacacagga

SEQ ID NO: 313524 - DNA, 75 bp, Homo sapiens
gctgcttagacgctggatttttttcgggtagtggaaaaccagagctccacgcaggagatcggtgaggagctgatc

SEQ ID NO: 313525 - DNA, 100 bp, Homo sapiens
gccagccgagctgcagcagcccgtctcgtgggcgccgcagcctcccggggccctacggccgcccgccaccagattccaaacagaggcattgatttactga

SEQ ID NO: 313526 - DNA, 50 bp, Homo sapiens
catctcttctgaactcaagaccaggaggacatagcaaagctgctgcgcta

SEQ ID NO: 313527 - DNA, 59 bp, Homo sapiens
aaaaatcgagcagaaagaatgtctttcaggttgagcaatgtttaaagcgtttgaaaaac

SEQ ID NO: 313528 - DNA, 97 bp, Homo sapiens
ccagccttggttcccagcggctcagagcgcagcgttttgatgtggacaatggcacatctgcgggacggagtcccttggatcccatgaccagcccagg

SEQ ID NO: 313529 - DNA, 100 bp, Homo sapiens
ggtgctgctggttagtgtgctctgagggagggtccgagccagccgctgttttgccggaggagcccctcaggccgtatcgagaaccttccctgcgaacttc

SEQ ID NO: 313530 - DNA, 74 bp, Homo sapiens
ggagacttggatgaggtgaaagactatgtggccaaggtcactctgtgagactgctgggtcagaaaaaggataat

SEQ ID NO: 313531 - DNA, 83 bp, Homo sapiens
cgggaactgcggacggtggcgggcgagcggctcctctgccagagtttggtgccctggttgtcagatgttggaaagcagtagga

SEQ ID NO: 313532 - DNA, 80 bp, Homo sapiens
cggccccgacatcttcctgcacatctctgaggactggtgattgcagctggaagtgcccatgaccgagctggcgtcctccg

SEQ ID NO: 313533 - DNA, 88 bp, Homo sapiens
cgaatatttaacttatatctgcctgtcagatgctggcatcaccatctacatcaggtcagctgtctcagtttggggcaagtttatacgg

SEQ ID NO: 313534 - DNA, 88 bp, Homo sapiens
gcgagtaagatggaagatgaggaggtcgctgagagctgggaagaggcggcagacagcgggatgaagggcgccctaatggagatcatcc

SEQ ID NO: 313535 - DNA, 100 bp, Homo sapiens
cccactcccaccgccagctggaaccctggggactacgacgtccctcaaaccttgcttctaggagataaaaaggtcccagagaactacttctatgtgccag

SEQ ID NO: 313536 - DNA, 100 bp, Homo sapiens
tttctgcaagtcaaaagacattgttctggttgcctatagtgctctgggatcccatcgagaagaaccatgggtgaacgagggcctcggggcttggatggtg

SEQ ID NO: 313537 - DNA, 100 bp, Homo sapiens
cagaaaagatacgaggctctaggagaggatggcccaacagcaggccttgaggttccgaggtccggctcccccaccaaatgcagtgatgcgaggcccacca

SEQ ID NO: 313538 - DNA, 82 bp, Homo sapiens
tcggccctggcctgaccccggcggccctgcccgcccctccctccaggtacctgcaccagtcaggggccctgaccatggaggc

SEQ ID NO: 313539 - DNA, 82 bp, Homo sapiens
cagaaattgagcaagcagcaagtcggctttcagatcagaatcctcactatggatgggctcattgaggacattaagcatcggc

SEQ ID NO: 313540 - DNA, 100 bp, Homo sapiens
tttgcagttgcaatctgcattttagaaataagcatcctcacagcacagtacacgaccagggtagtatccacatgccattctttggtggttggtatttttg

SEQ ID NO: 313541 - DNA, 73 bp, Homo sapiens
atttatgttttccttacatctcaatgaagcaagggactatgaagacttgtgcaccatggacaattttgctgag

SEQ ID NO: 313542 - DNA, 82 bp, Homo sapiens
aaggaagcgagactcatacgcaacctcaatgttctgcaggctgggaagcccaaggtcgaggggctgcctttggtgacttatg

SEQ ID NO: 313543 - DNA, 90 bp, Homo sapiens
gacgaattcctgaactgtaagctggctaccagggccaagctcttccgccctctctggatgagggaacagaagtggaggaaacaaaagaag

SEQ ID NO: 313544 - DNA, 83 bp, Homo sapiens
ctcgctcggctgcgggaaatcgggctgaagcgactgagtccgcgatggagggagttaaatacctgtgcatcccagcagcggat

SEQ ID NO: 313545 - DNA, 98 bp, Homo sapiens
aagaatccactgatagaaatcatttccatcaataccgggttggcccagcacatcacctatgtgcaccagcacagccggcagcccccctcccagtttga

SEQ ID NO: 313546 - DNA, 97 bp, Homo sapiens
tggagacatgagcaagaaaagcctctgggagcagaagggaggctccaagacctcatcaacaattaaggttcccatgatcagtggtgaaatatagtga

SEQ ID NO: 313547 - DNA, 75 bp, Homo sapiens
tccacccttgagagggaggtaactgatgtggactctgtggttgaattcaaagaagctttttcactatttgacaaa

SEQ ID NO: 313548 - DNA, 74 bp, Homo sapiens
ccccatctggtccagttactatggaaactgccgttctctcctgttcgatatctcaatgcctatactggaatagt

SEQ ID NO: 313549 - DNA, 75 bp, Homo sapiens
tctccgccggggtcgtcggacaagaaggagccaggcagttaagtgggcagaccaacatccacctcagcaaaaact

SEQ ID NO: 313550 - DNA, 98 bp, Homo sapiens
ttctgcggggagacaagttcatccccattttccaaggggacgacagcgtcgttattgggctacaagcaggggggtgtcgcctctgggatgaagcacgt

SEQ ID NO: 313551 - DNA, 73 bp, Homo sapiens
tagtcgctgttggatcgggttctaaaggaaaggccaccatgaagactttgcttagaacttggtcagaattata

SEQ ID NO: 313552 - DNA, 100 bp, Homo sapiens
gcctggcgtgcactccgcacctcggggacattattgcgcgtggaacggctgcttttggaaggtatcatgatattagctggtttgacatcaagtcatttgt

SEQ ID NO: 313553 - DNA, 100 bp, Homo sapiens
cgcgaatggcacgagctggagggagaatttcaagaactgcaggcatgtcagagcgggagcgacaggtgatgaagaagctgaaggaggtggtggacaaaca

SEQ ID NO: 313554 - DNA, 100 bp, Homo sapiens
cctgaagatctctaccatttaattaagaaagcagttgctgttcgaaagcatcttgagaggaacagaaaggttatcagtgagctgaatggaaaaaacattg

SEQ ID NO: 313555 - DNA, 99 bp, Homo sapiens
ttggaggtggcaaacagcttcgcagtcactaatgcttgtctcggcgcggaagatggccggcggcgtggacggccccatcgggatcccgttccccgacca

SEQ ID NO: 313556 - DNA, 50 bp, Homo sapiens
tggccctctaccaaaccgtgggtgtgaaatctaagaatcccctgccaact

SEQ ID NO: 313557 - DNA, 74 bp, Homo sapiens
gggaaagaccttgatcccaacaatgttatcattgaggagaacggagggtcctagcagagaaaacttctgaattt

SEQ ID NO: 313558 - DNA, 88 bp, Homo sapiens
ccaagtgccatcttcaaaatttcaggtcttaaatctggccctgaagaggaaagtgaggatgactctcatctcgaaggcagggatcctg

SEQ ID NO: 313559 - DNA, 100 bp, Homo sapiens
tgaggatggttctacacagccacccggagttccttagttgaaaggtgcgccctgctgtgacagaatgaacactattcagtgcagagccctcttctgtctc

SEQ ID NO: 313560 - DNA, 75 bp, Homo sapiens
cgcgggatcccagcctcaggcgtgcgcggacggtgtgcgggacttgaactgccatgtcctctgaagaaggaaagc

SEQ ID NO: 313561 - DNA, 75 bp, Homo sapiens
gtgacaggccaagtgcaggggccagaagacaaagtcaattccatgacctgtagttcataaacatcaattcaacag

SEQ ID NO: 313562 - DNA, 74 bp, Homo sapiens
tttgaacactggcctcatatttgcacgatgcctgggaaccactcacctccttctgtgccatgaggccacctcag

SEQ ID NO: 313563 - DNA, 74 bp, Homo sapiens
ccgccgtctacccgtggccgctgccggtctactggaatcctgaagggcttcgacccactcctcaaccttgtgct

SEQ ID NO: 313564 - DNA, 83 bp, Homo sapiens
cttggactgagtcctgcaggacacaggcagatcttgtctggactaccagactcaagagaccaaatcaagcctttctaagaccc

SEQ ID NO: 313565 - DNA, 100 bp, Homo sapiens
cacagaaggtgtgaccccaacgaagagtggagaacggcaacccatccagatcaccatgccgtgacagctatattgtgcgtgtcaaggctgtggttatgac

SEQ ID NO: 313566 - DNA, 100 bp, Homo sapiens
atgaacgtgctgcatatttcaggtgttatcataagaacaatttcatcaacctcagcttcctccgcctctttcgagctgcgcggctgatcaagctgctccg

SEQ ID NO: 313567 - DNA, 98 bp, Homo sapiens
cggctccttaccagctcacctctcaccgcgcatgtttggagggaaacagtgcttcttagtcctacgtcagcagcagtttaatgtccaggctcttgtgg

SEQ ID NO: 313568 - DNA, 97 bp, Homo sapiens
tttcatcttgggggaccagcagttggaccaagaggaaatctggctgcaaggtctcgaaggtcgagagaatttagcccgagatttaggtataattgaa

SEQ ID NO: 313569 - DNA, 88 bp, Homo sapiens
ttctgcaaagaaatgtgcgcaggattataatatgctttctgatgatgcccgtctcttcacagaggagtgagctgagtcgacagaaact

SEQ ID NO: 313570 - DNA, 83 bp, Homo sapiens
gtcagtgagatggcttctaacaaggatgagtctgctccagctgacaaacagtgtaaaccagaggcgacccaggccacttactc

SEQ ID NO: 313571 - DNA, 80 bp, Homo sapiens
cgcttgcctacccgccggcccgcgggtctacttcctcaaagaccattaaaaatctcaagtgacgactttgggaaactctg

SEQ ID NO: 313572 - DNA, 100 bp, Homo sapiens
gctggaacttttccgaaccagtctcatcattcttcagggaacctggttctggcagggatttactgtcccacagctctggaggctggaagccaagatcaag

SEQ ID NO: 313573 - DNA, 98 bp, Homo sapiens
gagagacctctacagaaacaacttcgaagatcttcattgcaaattctaccagttggagagactaatgcaggataaatgctaccagtattggccaaccg

SEQ ID NO: 313574 - DNA, 50 bp, Homo sapiens
acatgcaatgaacccaaaagggtctgcggatcaatggagagctaatcact

SEQ ID NO: 313575 - DNA, 110 bp, Homo sapiens
agcgacagggggttccggctgaccagttgcgtgtgattttcgcagggaaggagctgaggaatgactggactgtgcaggtggttaaataaacttggatcggctgtaatcca

SEQ ID NO: 313576 - DNA, 76 bp, Homo sapiens
caacgaaggtgtgaaggggaagaagctgaccttcgagtacagagtctccgaggatgaaactgattccaagacagcc

SEQ ID NO: 313577 - DNA, 90 bp, Homo sapiens
tttggtgaacagacactcccttctgtagtaccaaaccctgctgcagctgcaattcctcgaacgcccctgagcccaagtcctatgaaaacc

SEQ ID NO: 313578 - DNA, 90 bp, Homo sapiens
cagctcccgggagactcgaaatgccaccacagctgagatctgtatctgtggacctgaatgttgatccctcgcttcagattgacatacctg

SEQ ID NO: 313579 - DNA, 51 bp, Homo sapiens
tagaagaggtgatgatagctttggagacaatggagtttcactatgttgccc

SEQ ID NO: 313580 - DNA, 100 bp, Homo sapiens
gtaaactgcagtcctttgaggatttagccagtatttctacctatggctttcgaggtgagtcaggtgacacacagtcttttgcacagaagctccagctccg

SEQ ID NO: 313581 - DNA, 89 bp, Homo sapiens
agaccccagttttgctgaccttattcaccatgacttatcagatgatgattattctccaccgtctaagagaccaaaggccaatgagctac

SEQ ID NO: 313582 - DNA, 74 bp, Homo sapiens
tgggccggcgccctggggccccggagaggtacaacagaatagctcgggaatggactcagaagtatgcgatgtaa

SEQ ID NO: 313583 - DNA, 80 bp, Homo sapiens
ccctggagcatgtccttcactttatcaccattttcactggaagcatagaaagacaaagggttcttcaactgcgatggttt

SEQ ID NO: 313584 - DNA, 100 bp, Homo sapiens
caactcaagcaatttctcacctttgacaaacaggtcaatgtgacggtggactacattagaccagccagcccagccacagagacagtgcctgccttttcag

SEQ ID NO: 313585 - DNA, 75 bp, Homo sapiens
ggaggattcagggaataggagctggggagcccttctgcgccacagaattcagaaggaacttgcagaaatcacatt

SEQ ID NO: 313586 - DNA, 100 bp, Homo sapiens
gtttttataaactggtttatacagagtgaagtcaccctgctgagaaatgaagtggcacagctgaaacagcttcttctggctcataaagattgccctgtaa

SEQ ID NO: 313587 - DNA, 100 bp, Homo sapiens
caagatggccgcagtcggcaaggagagacgtcgctgaggggcttgcctgaagcgagggttttccaagagataacttcaccaagatgtccagtgataggca

SEQ ID NO: 313588 - DNA, 100 bp, Homo sapiens
ggatgggccccgagaacctcgaagccgaatacatcaagcaatggtaacatctttaaatgaagataatgaaagtgtaactgttgaatggatagaaaatgga

SEQ ID NO: 313589 - DNA, 90 bp, Homo sapiens
gcgccgcggggcagccgccgctcctccggggtcattacacctactctgagaatcgtgtggaaaaagacggcctgattcttacaagccggg

SEQ ID NO: 313590 - DNA, 95 bp, Homo sapiens
tagaagaacgcttagcccaggctatggaggaatttgctgattcccttggaattccgtttttggaaaccagtgctaagaatgcaacgaatgtagaa

SEQ ID NO: 313591 - DNA, 98 bp, Homo sapiens
gccaaactggtaaatgacgaaggggcttcttccagagccaaggaggaagggttgtccggcatggcctgtatgagaagaaaaagacctcaagaaagcaa

SEQ ID NO: 313592 - DNA, 82 bp, Homo sapiens
cggagcgcggccgggcgcgcggcgccgccacaagttgcgctgctcgcgacgagatgatatcatcaagttgaatcgaaaggaa

SEQ ID NO: 313593 - DNA, 82 bp, Homo sapiens
cagactccccagggcctgatgccctatggtcagccccggcccccgatcttgggctatggagcatgctacaagtgaaaactga

SEQ ID NO: 313594 - DNA, 101 bp, Homo sapiens
ctgcaacactcctctacagtttgagctgataccccaatgtccttctttgactttgtggttgatcctcattctttcccccgtacagtggaaaacatctttca

SEQ ID NO: 313595 - DNA, 50 bp, Homo sapiens
acgaaactgacagtaaacccatgattctaacattttcagagaaccttttg

SEQ ID NO: 313596 - DNA, 51 bp, Homo sapiens
tattaaaaccagggctccacagttaggagtctttggtagatgagtggctgg

SEQ ID NO: 313597 - DNA, 76 bp, Homo sapiens
gtttggtttgatcttgttgactatgaggaagttctagtgaagctgtggtctaccaatctagacaactcagtggcaa

SEQ ID NO: 313598 - DNA, 82 bp, Homo sapiens
ggacattcgtgcaaagaagcgggttcttcggaaagaaaaacaagagctggatctcagaggatgacttctaccggccttcccg

SEQ ID NO: 313599 - DNA, 98 bp, Homo sapiens
cacaaaccaggatgttcctccacgaagttgccagggcctgtccagaacttgaaggtgcacattcttgatactgaaagttttgaaactacatttggccc

SEQ ID NO: 313600 - DNA, 90 bp, Homo sapiens
ggcatctcccggaaagtgcgttttaaggcgaagtcatgatgtattctcccatctgtctcactcagcaagagtgagccatggagctacgtg

SEQ ID NO: 313601 - DNA, 88 bp, Homo sapiens
ctgatacccggatgtgaggcgatccgctggcgctagtctgaccctccgccaggcaaaaggaaggggccggacatggtacattctttca

SEQ ID NO: 313602 - DNA, 100 bp, Homo sapiens
ggactgcgaagctatacaggctctttttggagaccacggcatatttcttcatgaaaccaaaacttggagagaaggaggtgtccccaaatgctttcttcag

SEQ ID NO: 313603 - DNA, 50 bp, Homo sapiens
tttctccacccatcccgagaacatttccaacatggctagatccatcagaa

SEQ ID NO: 313604 - DNA, 100 bp, Homo sapiens
agagggccaacccatacttcatcctgcagcggaggaagggccacgccggcgatggaggcggcggcggcggactggcggaatgtgaaaacctttgcatctt

SEQ ID NO: 313605 - DNA, 86 bp, Homo sapiens
tttagagcttctagttggcaatggggccgatgtcaatatgaagagctaatgtcaaaccccgaaattccacaccacctagtttggca

SEQ ID NO: 313606 - DNA, 82 bp, Homo sapiens
aagacgctgggcgcgtcgaggactgggacttacacatattattgaaactcgaaaagtccttgatttaaggataaatctgaag

SEQ ID NO: 313607 - DNA, 100 bp, Homo sapiens
ctgtggtccctggatccagtgctactgctacaaataagatacactgcctctaggactgggacagatagccactgagtacctgcttcaaatcaccctgcac

SEQ ID NO: 313608 - DNA, 100 bp, Homo sapiens
ggggccgccatggggaaagtgaatgtggccaagttgcgttacatgagccgagatgacttcagggtcttgaccgcggaggttcgtaaagtgaatgaaagca

SEQ ID NO: 313609 - DNA, 75 bp, Homo sapiens
gaaaagaagaagaagagggatactcccatgctgccaaaggttaatgttgaagaaggaaaatgcggaagtcgtcat

SEQ ID NO: 313610 - DNA, 75 bp, Homo sapiens
ggcaagtctcactagataccttcaatcatcattttgagctcaaagtatggtcgatacatccgctctgctctgcgt

SEQ ID NO: 313611 - DNA, 100 bp, Homo sapiens
ggaatgaagtagaggtgggacgtccaaggatgatgggcactggcatccgtgtcattctggaccttactcccaactaccggggtgagaactcgtggttctc

SEQ ID NO: 313612 - DNA, 100 bp, Homo sapiens
attcccaagtccttcacccgggacccttgaacatctgtgaagaaatgactattctgcatggaggcttcttgctggccgagcagctgttccaccctaaggc

SEQ ID NO: 313613 - DNA, 119 bp, Homo sapiens
gtgacatgtgagacgaacaccggtgaggtatatcgggggaagctcattgaagcagaggacaacatgaactgccagcccagagcatgttccagatcccagagtttgagccgagtgagcag

SEQ ID NO: 313614 - DNA, 100 bp, Homo sapiens
cacatcgaccggcgacagcagccaggagtcatgagcgacagcggcgagcagaactacggcgagcggggttatatcctgtgttgtgacctcatggtttaag

SEQ ID NO: 313615 - DNA, 83 bp, Homo sapiens
aggaggaggaggactgcagcctagcaggtttttagaacttcagccataaaaatgggcagaattttccttgatcatatcggtgg

SEQ ID NO: 313616 - DNA, 90 bp, Homo sapiens
aggctcaagaaaaaggaagattggactatgctaagacaggcaaatgtacactggggaccaccatgttcacgtgacatcaagaggaagcgg

SEQ ID NO: 313617 - DNA, 75 bp, Homo sapiens
ttgctgcagtggtggaacagattcacaagtttgcccagatgcattaggacaccagaaaaggaagaaaagacagtg

SEQ ID NO: 313618 - DNA, 73 bp, Homo sapiens
ctgcccttgccagaatttcctgcgctgttccacctcattcaacttcagccgctgccatggcccagacactgca

SEQ ID NO: 313619 - DNA, 98 bp, Homo sapiens
actacataataaggatgatgaattgtactctacagtgtttctacacctgtgggttatgacaaagacaactgccaaagaatcttcaagaaggaggactg

SEQ ID NO: 313620 - DNA, 100 bp, Homo sapiens
ggatactcatcatttgcagcaaactcagcactggaccaggggaagagacatgcgagggcctcatcatgccccagtagctcagacctgagcaggctgcaaa

SEQ ID NO: 313621 - DNA, 83 bp, Homo sapiens
tttttttttttttttctgttcagtgacatctggacactcatgaggaccatgatacttccactgagaatacagacgagtccaac

SEQ ID NO: 313622 - DNA, 87 bp, Homo sapiens
ggagcggagccggccgtacgcggtgctgcgagggcagaacctggattagctttatttgctcaccgtgaagatggacctggaatccca

SEQ ID NO: 313623 - DNA, 100 bp, Homo sapiens
gctactacgtcaacaacgagtacctcaaccctgagctgcgtgagaacccgcccatgaagccagatttctcccagggagtggagcttggtttcgggatctc

SEQ ID NO: 313624 - DNA, 90 bp, Homo sapiens
tcgagctagctgcgaggccaggacagggcccccgccttgcatcacctcgagacaggcattgcttcaccggcagctacccggtcattgagc

SEQ ID NO: 313625 - DNA, 98 bp, Homo sapiens
cccaggagcctccccaccagcccctgaaatggaaaggcctccagctattcctgcaccaactgacctgaagttcactcaggtcacacccacaagcctga

SEQ ID NO: 313626 - DNA, 100 bp, Homo sapiens
gcatggtggagtcgcctctgatctgcaaagaaggagaaagcgtgcaggtcgttccaggggtagaggaggcatgaaggatgaccgtcgggacagatactct

SEQ ID NO: 313627 - DNA, 80 bp, Homo sapiens
gttttgccggaggagcccctcaggccggctccttggtaatgaccagtctaagggattaggaccagcatcagaacagtcag

SEQ ID NO: 313628 - DNA, 138 bp, Homo sapiens
gccctgtctgctctgtggactcaacagtttgtggcaagacaagctcagaactgagaagctgtcaccacagtttctacagcagtataatcactacaaatccaatgtggagattttcaaattgcaaccaaataaacccag

SEQ ID NO: 313629 - DNA, 93 bp, Homo sapiens
agtagctcctgtatttgcagaatgaattctcggtgggacctttggctgctgaacaggatgtcctcggacgacaggcacctgggctccagctgc

SEQ ID NO: 313630 - DNA, 50 bp, Homo sapiens
cagacagatcgctgtcaaaaccctagtcggctactttcagtggcagaaga

SEQ ID NO: 313631 - DNA, 100 bp, Homo sapiens
ggtcagtccgccgctcaccccgcggccgcaccttcccgccttctcagaccaagatcactccatggatgaaatgacagctgtggtgaaaattgaaaaagga

SEQ ID NO: 313632 - DNA, 100 bp, Homo sapiens
accggcaaagaggtgttgcagaacctcggccccaaggacaaggcaggtgacagcagggacatgtctcgggagatgcaggatgtagacctcgctgaggtga

SEQ ID NO: 313633 - DNA, 90 bp, Homo sapiens
ctttcggagtacatgggcaattcttatcgggacctcaaagaagtaactcctgaagggctccaaatggtaaagaaaaactttgagtgggtt

SEQ ID NO: 313634 - DNA, 100 bp, Homo sapiens
tcctcacctgcgggaggagatcctcagcggcgccttgcggagggaccccagctctagaccaagatagaacagcccttcagaaagtgaagaagtctgtaaa

SEQ ID NO: 313635 - DNA, 100 bp, Homo sapiens
tgcgcttggggatcctctgtacgcccgttcactgaaaaagcttgtggtgaaggggggcaaaaaaaagaagcaagttctgaagttcactcttgattgcacc

SEQ ID NO: 313636 - DNA, 75 bp, Homo sapiens
agatgatgtttgagaaaggtgaaccaactcaaactaaggacattgatatgcagctgagtgaaataatgaacaatg

SEQ ID NO: 313637 - DNA, 100 bp, Homo sapiens
gcttggtttcgggatctcggtgctgcagacggcgagacctcctgcacagatgtccagctcgccgctgtccaagaaacgtcgcgtgtccgggcctgatcca

SEQ ID NO: 313638 - DNA, 50 bp, Homo sapiens
gctgcttccacccaacttcctgttagggtttggaaatcccttgtctccag

SEQ ID NO: 313639 - DNA, 83 bp, Homo sapiens
gaagaagagcatgatcggcatgtccaccaaggcaggttttaaaatcaaagatgggaaaatcggagaaaattgcccttccccat

SEQ ID NO: 313640 - DNA, 85 bp, Homo sapiens
tacattgaatactacatatgtcgagggaatgcagaaagagttaaggaaggcagatgacaagattctgcagatcattacggaattg

SEQ ID NO: 313641 - DNA, 98 bp, Homo sapiens
cgagggtctgaagttcacgactactagaaggggaggggagtggaaaggctctcagtgaaaaagggacagagcagaatgggctgatatagatccggtgc

SEQ ID NO: 313642 - DNA, 75 bp, Homo sapiens
gccaatcggatcaccaatggaaccctcccctggcggtttgcagatcccgtgccgtgagcgatgtggagatgcagg

SEQ ID NO: 313643 - DNA, 98 bp, Homo sapiens
ggagcctagaatgcatcagtgcccttgtggcgaatggggctcacgtcgagtttggtgcaagtgccaaagttgtgcatttcctgggacgagtcaaacca

SEQ ID NO: 313644 - DNA, 75 bp, Homo sapiens
ccttaagccattttgtaattgcaggaggtgttatccacgtgaccaaggaagtgaaagaagtggcaacgctgtcct

SEQ ID NO: 313645 - DNA, 74 bp, Homo sapiens
ggtggggctggagctgagtcccaaggtgagcgtgtaggagccttcactatggtctgcaaagatgcggatgaagc

SEQ ID NO: 313646 - DNA, 75 bp, Homo sapiens
cctccatgcgcagtcatgagtcgcttcaagtttatcgagctgcagcagttctataacagccagggccggcttcct

SEQ ID NO: 313647 - DNA, 100 bp, Homo sapiens
tgtgtacgagctgtgcgaggtgatcggaaaagagtatgaagcccgcttggaaaggtacagtgagcgcatttggacgtgcaagagtactggaagcagtcag

SEQ ID NO: 313648 - DNA, 97 bp, Homo sapiens
gcctcatggaaagcgaccccggggtcttcaccgagctcattaaaggattcggttacccctgtttcaggccagtgcttttgcatttttggcccctgct

SEQ ID NO: 313649 - DNA, 102 bp, Homo sapiens
gccgagagtacacagctgctgtagaagccaaacaagtggggtcaccgaagtccccacacgctggctctccacacccctcctgttccagaaagcatgtccgaa

SEQ ID NO: 313650 - DNA, 90 bp, Homo sapiens
aagaggtggcggcggtggcggtggtcgtagcggtggcggaggaggcggggcttccgttacaagatgaggtctgtgtatgctcacttcccc

SEQ ID NO: 313651 - DNA, 100 bp, Homo sapiens
tcctggccaagacatgcagcaccaaggaccagcaattcaaatggggcattctcttctcccaccctcgggactttaccccagtgtgcaccacagagcttgg

SEQ ID NO: 313652 - DNA, 75 bp, Homo sapiens
aaccaccgtgtaaccactatgagcagtgcctacaaaaccttaaagctacagactgcaatacatagagtgacacta

SEQ ID NO: 313653 - DNA, 100 bp, Homo sapiens
tgggattggaactgtgtttgggagcctcatcattggttatgccagcttcagcgcctgctcctggtcatcactaaccagatttacttggagtacatgtgaa

SEQ ID NO: 313654 - DNA, 82 bp, Homo sapiens
tctcgaaagcctatcagcatagttaagatgagcagcaccagcagtaagagggctccgaccacggcaacccagaggctgaagc

SEQ ID NO: 313655 - DNA, 100 bp, Homo sapiens
gtctggggctgtcgctgtgctctaatccaaaggactgcatgacacaccataggatatagtcaagaagcctttggacatgggagtttcaagctcaaaggag

SEQ ID NO: 313656 - DNA, 100 bp, Homo sapiens
ggagatgaagcctaagaatatgatcagtcattttttgagaccagtactgttataatccctatttacagatgaagaaactgagcttcaaaatgattaagtg

SEQ ID NO: 313657 - DNA, 100 bp, Homo sapiens
agcaacagaagtttatcaaggctgtcacacatcaagttaaatttggtcaacaaaatccacgtcagtgaagggaatttggctacaaagcagatcgtattcc

SEQ ID NO: 313658 - DNA, 100 bp, Homo sapiens
agatcttcatatgctctccggccacacttcatgttaatatcatcccggattcctgcgtatgagagcaccataaccttagatgggggtgtcctggtacatg

SEQ ID NO: 313659 - DNA, 99 bp, Homo sapiens
ttctccctgaggacaacctgaggtgaccaagaatatggcccaggtgaccaaagccctggacaaggccctgagcaccatggacctgcagaaggtctcctc

SEQ ID NO: 313660 - DNA, 82 bp, Homo sapiens
gcagcccctgcgtcgccgggaccctcgcgcgcgaccgccgaatcgctcctgcagcagagccctgggcgctgcctatggcaca

SEQ ID NO: 313661 - DNA, 100 bp, Homo sapiens
gaagacttcttcaaggaggtgctcaagccatgttttggaaaagagaactcaaggtctggcagggagaaaggagcaaggtttctgcggcactgaaacaagg

SEQ ID NO: 313662 - DNA, 90 bp, Homo sapiens
tcctcagaatgtgaaggattatttactcgatgatggaactctggtggtttcaggaaggaagcagtcaattatagatttcttcaaaccagc

SEQ ID NO: 313663 - DNA, 99 bp, Homo sapiens
attttttggagcttccatcctggttcttccaaagtgcccggacccaaaacaggaatatgaatctgatgaacaagaaaagagtgcctatcaagagtatga

SEQ ID NO: 313664 - DNA, 98 bp, Homo sapiens
acaggccaatgtgaccgtggggacttgctcgggcttttgttcccagaaagctcttgcagccaatgccggaacaggatttgctgttgctgagcctcaaa

SEQ ID NO: 313665 - DNA, 75 bp, Homo sapiens
gaaagctcaagaatgaacttctaaaaggcttcgtgacggagttatcagagacattgagaggcaaattcggaaaaa

SEQ ID NO: 313666 - DNA, 74 bp, Homo sapiens
ggaaagaaccctggctggggaaaagggaagtgaaaagagatctgttttcagggcctgccttaagtgtgaaagta

SEQ ID NO: 313667 - DNA, 82 bp, Homo sapiens
tatgattaggccacaatcttcaatgagtaaacatattcctgctcttgtcaggatggtgaagctgttcatcggaaacctgccc

SEQ ID NO: 313668 - DNA, 85 bp, Homo sapiens
gccgcagcgcccgcgggcccgggtgcgggcccggcgccgcaccagcagaacggtcctgaccactggcatgaacttttcccaaatg

SEQ ID NO: 313669 - DNA, 74 bp, Homo sapiens
atggcggaggcgcctcctgtctcagaagaggtgcagtatattcaggctgagaaaaacaacaagggcccaatgga

SEQ ID NO: 313670 - DNA, 78 bp, Homo sapiens
gggaagttcgtactgggcagaacgcgacgggtctgcggcttaggtgagggagataaatctgcaggacatcaaggaaga

SEQ ID NO: 313671 - DNA, 96 bp, Homo sapiens
gttcaacgctgccccggaagtccccctttgtccgaaatactttggaaagacgaacccttcgctataagcaggaatccgagcggctggaactcatga

SEQ ID NO: 313672 - DNA, 75 bp, Homo sapiens
gatggacatggacatgagccccctgaggccccagaactatcttttcggttcgttccaccagtcataaaccagatg

SEQ ID NO: 313673 - DNA, 100 bp, Homo sapiens
gattccaagctgaagaagagcaaaaggcggagctgtagccactgtagcagcaagatggcttggaaagatgtgagacatgagatggtggtgaagaaaggcc

SEQ ID NO: 313674 - DNA, 83 bp, Homo sapiens
tgtttcttatctattatataagcacacagcaagcaccttctgaggtgctaaaatgatgtattttctggacaagtcaaggcagg

SEQ ID NO: 313675 - DNA, 96 bp, Homo sapiens
tcaaggcaatggacttccactggattgagaccatcctgagtgataagaagcggaacccgatcatcagccagttcttccccaccctcctgctctggt

SEQ ID NO: 313676 - DNA, 90 bp, Homo sapiens
gggaggcgcctacgtggacccgacacccatcgccaatcatgttatcagtgcagatgcaatagaaggctgttcggctcttgaatcccagcg

SEQ ID NO: 313677 - DNA, 100 bp, Homo sapiens
aatactacagtgatctctgagaagaacaaattagaatcagattatatggccgcatcttcacaactccgtcttacagaggaaggatcgagatcgagaccgg

SEQ ID NO: 313678 - DNA, 96 bp, Homo sapiens
tcacaagctgcaccagcttctaaccgagaagtgggaaaactcttgcctttgccatcccaatgattcatgcggtgttgcagtggcagaagaggaatg

SEQ ID NO: 313679 - DNA, 98 bp, Homo sapiens
tagctcaaggaaacctttccaacacagatgtccaagctgccaatgatcttaatcatagcacgcaattcgtacaggggttagcactttgtaccctcggc

SEQ ID NO: 313680 - DNA, 87 bp, Homo sapiens
ggaatcattcccttggctgttaatttctcagaggtgatcgaggaaacatctcaacatcttctaaaccagcctctacatcaggaaaat

SEQ ID NO: 313681 - DNA, 75 bp, Homo sapiens
actccaggaagtgaaaatgtgctgcctcgagagccgctgtgataatagagtgacatccttcagagacctcattca

SEQ ID NO: 313682 - DNA, 73 bp, Homo sapiens
agaatttcgatctccgccctggggtcattgtcagctgaggagaagaaagtggaagcaaagaaagaagaatccg

SEQ ID NO: 313683 - DNA, 99 bp, Homo sapiens
tatggcaccgagacctatgctgatggagcattgcagtgtcgagatggctatgaaccctgtgtaaatgaaggaatgtgtgttacctaccacaatggcaca

SEQ ID NO: 313684 - DNA, 82 bp, Homo sapiens
cgtcccgctggatctgacccgagatgatatcatcaagttgaatcgaaaggaagggaagaagcagaattttccaagactaaat

SEQ ID NO: 313685 - DNA, 90 bp, Homo sapiens
atatttttggacctgaaacagaaattctggaacacctatatggttcaagtgctggattgtgtcatgtgaccatcccaaaactcagagcac

SEQ ID NO: 313686 - DNA, 100 bp, Homo sapiens
gacggctcctgggaggtcatcgaaggctaccgggcccagcacagccagcaccgcacgccctgcaagggagaattctagatttggacctggtggttagaga

SEQ ID NO: 313687 - DNA, 75 bp, Homo sapiens
cccatccctgcagcatgaacaaggtgtgggcagaagaaaaagctagtgatcaacagtggcaatggagctgtggag

SEQ ID NO: 313688 - DNA, 80 bp, Homo sapiens
gccactgcagcttatcaagtagaagcttaaagcttttcaagccaggccaagaagctgtgaagtaccagggtcctcgggac

SEQ ID NO: 313689 - DNA, 74 bp, Homo sapiens
cgcggctggggttccctcctccgtttctgtatccccacgaggatatccgacatgaagccagtgacttcccatgt

SEQ ID NO: 313690 - DNA, 106 bp, Homo sapiens
caggacttcatccaggcctacgaggaggtgcgcgagaagtacaaagttccagggtctccctccactgctgtagtaacccgggtccggggcctcggtggtgctcctg

SEQ ID NO: 313691 - DNA, 83 bp, Homo sapiens
acggaggacggcaggactgtggccgtgggggacatcgtctggggtgagaagccctaccactgcaactgggacggctgcggctg

SEQ ID NO: 313692 - DNA, 100 bp, Homo sapiens
ggctcagatggcctctgccggccagggcaaggaggaggcggtgaagcagcttcgcaagatgcaggaggatgaagaaggttataacgatggagaggtagat

SEQ ID NO: 313693 - DNA, 100 bp, Homo sapiens
tatgcccagttcgctagtcaaacctgtgagttcaacatgatagagcagagtggaccaccccatgaacctcggtcttgggcgtctttggtactggcttttt

SEQ ID NO: 313694 - DNA, 100 bp, Homo sapiens
gcacccacgaatctgcccacccctcctgtaacccagcctgtttcacttcttgatatgtcttctccgactactatgaagaagcctgaaaagccattgttca

SEQ ID NO: 313695 - DNA, 50 bp, Homo sapiens
ccgggctgcgcccgcttcttgcagcttaaagaaagtggttattgtacagg

SEQ ID NO: 313696 - DNA, 83 bp, Homo sapiens
cggcgcagacatggacccctcgcgagccatccagaacgagatcagctccctcaaaggaagcgccgcggagccatcaacagcaa

SEQ ID NO: 313697 - DNA, 112 bp, Homo sapiens
aagacttacaagagaacctcctaagagtcacccaaacaatcggctgagaatgagaagagttaaccccttagtacccaaaagaagcacagaggggtcccaggttgaaaaagga

SEQ ID NO: 313698 - DNA, 75 bp, Homo sapiens
catgagtggctatcatactggctattatatgtatcgggaaaattgcctggcagcaaaagcactttttcctgactt

SEQ ID NO: 313699 - DNA, 100 bp, Homo sapiens
gaggagctcatcgggcagattagcgacatccgagtgcagaacctgcaagaacatcgtagctgtgggagctgggttctgcgacggcctccgctgtggagac

SEQ ID NO: 313700 - DNA, 109 bp, Homo sapiens
ctgcagtggcgcctaaagtctgagagagggaagtcgcctctgtgctctactatactggcaattgctggagaagattttgcaattgttgcttctgatactcgattgagtg

SEQ ID NO: 313701 - DNA, 75 bp, Homo sapiens
gctcgccatcttcatcctggtgatggcaaatgtcgtggacatgagtccgtgtgagaaccgggacacctgtcctgt

SEQ ID NO: 313702 - DNA, 100 bp, Homo sapiens
taattatactggtgagaaatcctagaaatctgaagagtgagataaagcctttaaatggttgtcacacttcattgtagggactcttgacgtttaggtatgt

SEQ ID NO: 313703 - DNA, 50 bp, Homo sapiens
tcttctaatggatgggaacatggggatagagattccttctgccatcagat

SEQ ID NO: 313704 - DNA, 101 bp, Homo sapiens
caaggatgttcgtcgtggcaacgttgctggtgacagcaaaaatgacccaccaatggaagcagctggcttcactgctcagacttcacagagaatgcagttgt

SEQ ID NO: 313705 - DNA, 98 bp, Homo sapiens
gctgggaattgctgaattagaactgcagaggttcctctacagcaaggtatcttggagatggccgcttccatctggagtctgtcatgattgccaacccc

SEQ ID NO: 313706 - DNA, 74 bp, Homo sapiens
gaaaattgagacggagctaagagatatctgcaatgatgtactggtcaatgagctgaaggagaaaggcaacaagg

SEQ ID NO: 313707 - DNA, 86 bp, Homo sapiens
ctgggaccgtgcgcgtgcgcctgggggcaccgctgccgttccgagacaatgcagatcttcgtgaagactctgactggtaagaccat

SEQ ID NO: 313708 - DNA, 100 bp, Homo sapiens
ggacctgcgatggggacaatgactgcggagactacagtgatgagacacacgccaactgcaccaaccagggtgctggagaatctggtaaaagcaccattgt

SEQ ID NO: 313709 - DNA, 51 bp, Homo sapiens
gcagagcctgcggggcaagatctgtaagaatgattgatgttggctgatatt

SEQ ID NO: 313710 - DNA, 95 bp, Homo sapiens
cgctgatcttccagctcccctcacccaacgtcgtactgtgccctgtccacggtgcctcctgcatgtcctgctgccctgagctgtcccgagctagg

SEQ ID NO: 313711 - DNA, 83 bp, Homo sapiens
cctggatccaggataacggaggctgggtgtccctggccagtgtccttccacctgtccacaagcatggggaacatcttcgccaa

SEQ ID NO: 313712 - DNA, 83 bp, Homo sapiens
tatgaccagcaagaggatggggccctggatgagggggaagggcctcaaagccagaaggtaataaaaggcctgacatatctgag

SEQ ID NO: 313713 - DNA, 90 bp, Homo sapiens
ctcgccggtcttggggggatggttccatcatggcgtcaatgcagtccaatatcagatggaaatgatgcggagccttcgccatgtaaacat

SEQ ID NO: 313714 - DNA, 100 bp, Homo sapiens
aaactggaacttatgctgtagacatttctttgtggtttatctaaaaaccaaaggtgagcaagaggatgctggcggggggcgtgaggagcatgcccagccc

SEQ ID NO: 313715 - DNA, 59 bp, Homo sapiens
cccgcgggggagccccgggagccgcacggtaagaatgattgatgttggctgatattgga

SEQ ID NO: 313716 - DNA, 90 bp, Homo sapiens
ggaggaggaatgccaatggggaccctgtctgcaatgcctgtgggctctactacaagcttcacaatattgctcgctgtaagcagctcatct

SEQ ID NO: 313717 - DNA, 110 bp, Homo sapiens
tgcagcggcattttattgatgaaaacaaagaactctttcagcagacattagaactggatgcctcaacctctgctgttcttgatcataggagctgatagattccagagaga

SEQ ID NO: 313718 - DNA, 75 bp, Homo sapiens
gaggagatccggatgctcatccataaaactgaagatgtgaatactctggtgttgtcagtgctaaagcattcattg

SEQ ID NO: 313719 - DNA, 74 bp, Homo sapiens
gaacgtgaattccaaactcaccaaggattcagtgtgtgtggcgtgtggaaagaagaggaaccagaaaagaatgt

SEQ ID NO: 313720 - DNA, 74 bp, Homo sapiens
tcgccaaggctggcgcagtcgacacgatgaggcgagtggtacgacagagcaagtttcggcatgtatttgggcaa

SEQ ID NO: 313721 - DNA, 74 bp, Homo sapiens
gcacaaccatcgcagttggaagcccatggggcagcaagaggtggaaacatacagaagaagcaaggaaattacag

SEQ ID NO: 313722 - DNA, 83 bp, Homo sapiens
ctcgcgctactctctctttctggcctggaggctatccagcaaaacctcggatcaattctcagctggtggcacaacaagtggca

SEQ ID NO: 313723 - DNA, 82 bp, Homo sapiens
ttcccttcgctccggcccggtgaaactgaacttataatcgtcactggattgtgaacggaagagtccttatgttgcagtatgc

SEQ ID NO: 313724 - DNA, 95 bp, Homo sapiens
ggcagggcgggaaggaagatccggcgcggggcacaggatccggagctggagcccccagcacagcccgttcttcgccgagcagctgaccgcattcc

SEQ ID NO: 313725 - DNA, 82 bp, Homo sapiens
aacgaggcaaggagctaaagcagcgtgcgttcagccctggggtaaagaagctaagtggaagagtgtttcctcctctggccgt

SEQ ID NO: 313726 - DNA, 90 bp, Homo sapiens
tcggaccagctctgtaaaagccccgcctctgccttcggataggttctccgtggaggagccagccaacgtcctttgaccccaaaccagaac

SEQ ID NO: 313727 - DNA, 98 bp, Homo sapiens
acagatgtgcgtgaggaggtctctggtcggcctcaccttttgtacctgctacctggcttcttacctcacgaacaagaacactgatatttgcatttaat

SEQ ID NO: 313728 - DNA, 75 bp, Homo sapiens
gagcaggcccggggagggtggttaccgctgaggagctgcagtctctgtcaaggtatctggccaggaacagtcttc

SEQ ID NO: 313729 - DNA, 100 bp, Homo sapiens
ccgctgctgctgccgctgccgccctgagtcactgcctgcgcagctccggccgcctggctccccatactagtcgccggctccagggagttccacgctgtcc

SEQ ID NO: 313730 - DNA, 87 bp, Homo sapiens
gccgctcgcaggcgccgcacggagttgcgtcccggggacttggggccgcagggagataaggaaattgagatttggagaagttaaata

SEQ ID NO: 313731 - DNA, 100 bp, Homo sapiens
gtttctccgacgtgtgcgagaggatggaggagctgcggaaacggcgggtttcccaggacctggaagtgtgaactccggagacggcattgactacagccag

SEQ ID NO: 313732 - DNA, 83 bp, Homo sapiens
caggccccggctcagaccacaagggcagaaccgttggaatcgaagcctcttaaaatggcagatgacttggacttcgagacagg

SEQ ID NO: 313733 - DNA, 100 bp, Homo sapiens
ctctacctgagcgaggacgaggtgcgccggctgatcgctgtctgtgatcctggaaacatacgtgtgactgaagctcccaaacacccaatctctgaagaac

SEQ ID NO: 313734 - DNA, 83 bp, Homo sapiens
gtacctggaggaaggaagtgcggagccagcctgagttgggagaagagctccagagagtcttccccagggaggtcctgaactac

SEQ ID NO: 313735 - DNA, 100 bp, Homo sapiens
ctgtggacatcagcgccatccccgagcagcggtggaagctgcagaagatggctgtgccacccacgtatgccgatcttggcaaatctgccagggatgtctt

SEQ ID NO: 313736 - DNA, 97 bp, Homo sapiens
taccgctatgcccggagcctggaggagctgctgctggacgccaaccagctccgcgagctgcccgaggtatctggtgacccatctcatgggggcagat

SEQ ID NO: 313737 - DNA, 86 bp, Homo sapiens
gaagcagctggacccgctcaccatctacggcatccggttgcctccggagccagcgtggtggccatagacaacaagatcgaacaggc

SEQ ID NO: 313738 - DNA, 73 bp, Homo sapiens
ggaacctgggcgagcagcggcgggggcccgagggtgtcttcgagagaactctgacgtgaagacgcacgggcct

SEQ ID NO: 313739 - DNA, 82 bp, Homo sapiens
acaaacaggacctgcctaattaccttcaaacctgtacctggagtagaacagaaaaattattatgtctgtgttcccttgggac

SEQ ID NO: 313740 - DNA, 51 bp, Homo sapiens
gagaacgaagcctcggctgggagcgctgttaaacgtttaatgaaagaagcg

SEQ ID NO: 313741 - DNA, 90 bp, Homo sapiens
cccagcctcaggcgtgcgcggacggtgtgcgggatccaatgagttccacctacatagaggaattgggtaaaagagaagtcacaattcctc

SEQ ID NO: 313742 - DNA, 50 bp, Homo sapiens
cctggacaaaatgtttacttgtctggaaattacctgatgttccaaacccc

SEQ ID NO: 313743 - DNA, 83 bp, Homo sapiens
gtttattggagcgcagactgatggcgcaaaggccatggacctggctcaggcaggcagcacagtggaatctaagatctacgaca

SEQ ID NO: 313744 - DNA, 75 bp, Homo sapiens
gagcacataacggggttcgggtgtctcgtgtgtgaacatcacagttggagtcattcgttgcccagtttgcagcca

SEQ ID NO: 313745 - DNA, 100 bp, Homo sapiens
gcctgcgaccccagtcggtgctccggggaggtcacctgacgaggagatgaggtttatataactttccaagacaaggaagttgtgcaaagcctcacagcta

SEQ ID NO: 313746 - DNA, 83 bp, Homo sapiens
ctggccctggccctgatcatcctgctgggcttcgtccagatcgggaaggggacccagacatggagctgcgggaagaagcctgg

SEQ ID NO: 313747 - DNA, 90 bp, Homo sapiens
cgcatcaacaagatgttgtcctgtgctggggctgacaggagagcaaagcagttagagttcagaggccagcggcctcagggccactccctc

SEQ ID NO: 313748 - DNA, 100 bp, Homo sapiens
tccatcgcgcgcacggcagcctagcgcaatgaggcgggcagcactgcggctgaccggttccctgatgtgttacctgcttctgctactgatccaaactgca

SEQ ID NO: 313749 - DNA, 90 bp, Homo sapiens
caccacgataatgcagttcttattactaggtgcttgaagtttctgggaagtcggcatccaaccctggtgcttcccttggtgccagagctt

SEQ ID NO: 313750 - DNA, 100 bp, Homo sapiens
ggaaaagactcatatcaacattgtcgtcattggacacgtagattcgggccgacaacccctcattccccaacccacgccggaggctgcgcctgcaggacct

SEQ ID NO: 313751 - DNA, 49 bp, Homo sapiens
cttctgttaacagggtcctggcagggaaatcctcattgacgattcaatt

SEQ ID NO: 313752 - DNA, 100 bp, Homo sapiens
gcggcgcaggaggcggtggagcgcagagcgggcgagcgcggcagaatccagagaccacatttgaagtatatgttgaagtggcctatcccaggacaggtgg

SEQ ID NO: 313753 - DNA, 82 bp, Homo sapiens
taaaagaagccctaagagcaggtttgaattgttctacagaaaacatgcccattaagaaactaatctggattcactccctctg

SEQ ID NO: 313754 - DNA, 102 bp, Homo sapiens
tcacaccgtcttcggtctcctggggtcggcgccgagtgggaggatggcggaagtgagaagccctaccactgcaactgggacggctgcggctggaagtttgcg

SEQ ID NO: 313755 - DNA, 91 bp, Homo sapiens
ccgcgccacttccgcaaacaggtgcaggtgctggagaatctggtaaaagcaccattgtgaagcagatgaggatcctgcatgttaatgggtt

SEQ ID NO: 313756 - DNA, 51 bp, Homo sapiens
gccgctacgtgactcttttctccaggttcaccaatttttaaaatccaaata

SEQ ID NO: 313757 - DNA, 90 bp, Homo sapiens
cgagcgccgcggacgcgtcatcgagtgtgacgtggtgaaagccaaggctaagtcgaaatgtggcccaaccttcttcccctgtgccagcgg

SEQ ID NO: 313758 - DNA, 76 bp, Homo sapiens
aataaatcctgcacagactgctggtggtgaagcagtattttccaatttgaagattcatttgaaggtggctcctgcc

SEQ ID NO: 313759 - DNA, 97 bp, Homo sapiens
cggcaccccccgccgacaaggaggatatgattcatcaacttccactgttgacagaaaaacagtacattgcaacaattcactctcgtcttcaggactc

SEQ ID NO: 313760 - DNA, 100 bp, Homo sapiens
agaacatgcatatttgggtccaactgtgaagccagatgataaggatgaccatgaaagctgtggttctaattctaccaaccgtagtactgctgagagcaca

SEQ ID NO: 313761 - DNA, 83 bp, Homo sapiens
aaagagcggcagagccaactccttccctggattttttatcaagcagaaatgcatcgaacaacgagaatcaagatcactgagct

SEQ ID NO: 313762 - DNA, 100 bp, Homo sapiens
gctgacatatgaaggactcattgatgaaatttatggcattcagaacagtttcgtttataatgtcagcccttatatggagtatcatcctggtggagaagat

SEQ ID NO: 313763 - DNA, 97 bp, Homo sapiens
accgaggccagtgtccttcactcctactgcatgtgagccctattcccagaggcaggtggtgctgaccctgtaacccaaaggaggaaacagctggcta

SEQ ID NO: 313764 - DNA, 100 bp, Homo sapiens
ccccaaatgtctgactctgactctcggactgagaaacgcaaggctgccccgggagacgctggccttcagggaggagctggatgtcctcaagttcttgtgc

SEQ ID NO: 313765 - DNA, 75 bp, Homo sapiens
acgacatcgatggcctggagaaggatgaatttttagatgtgatctactggttccgacagatcattgctgtggtcc

SEQ ID NO: 313766 - DNA, 87 bp, Homo sapiens
agcagattgccaacattgaccgtattacaaaatatctcccggggccaattcagcatctctacctggccatcctaacaaggtgatttg

SEQ ID NO: 313767 - DNA, 100 bp, Homo sapiens
ctgtcctgaatacagtatctccttaaggtacttctcccagcagctggtctcttacagttacaggatgtgaagaagacttgttgtgaatttttggaatccc

SEQ ID NO: 313768 - DNA, 100 bp, Homo sapiens
ccattccaaaaaaataagaaaaacagaaaaataataattacatctgcaaagaccttatttccagacttcccagactcccggccagccatcgaggacctca

SEQ ID NO: 313769 - DNA, 75 bp, Homo sapiens
ccgtgaccgagagcgtgaccgagagcgcgaatatcgtcatcgttagaagagcccagcattacatcaacatgcccg

SEQ ID NO: 313770 - DNA, 74 bp, Homo sapiens
ctgagcagctttcagcactggagggggggccctcagcctcttggccttgaacgggctgttcatcttgattcaca

SEQ ID NO: 313771 - DNA, 49 bp, Homo sapiens
catcccattacagatagaagagattatcccaacggcaagtgcatcccag

SEQ ID NO: 313772 - DNA, 96 bp, Homo sapiens
gtttgacgcacacggcaccaaactgtgtggatgaggtcaccattgtcaacattttgaccaaccgcagcaatgcacagagacaggatattgccttcg

SEQ ID NO: 313773 - DNA, 75 bp, Homo sapiens
ggccacgtgaagatgctgcggctgtcacagcccgttggagattgtgattttaatgttcgtctgcagtgtatagaa

SEQ ID NO: 313774 - DNA, 98 bp, Homo sapiens
ttcagagggctctctgcaggaaggacaccgattatggattggcaacctggaccccaaaattaccgagtccagtccaggtgcagcagcaaggagaacat

SEQ ID NO: 313775 - DNA, 101 bp, Homo sapiens
ctaccattcttggcaacagcaagaaaagcaagccattttcaagatacagccaggctgatgccctgaagtatgtcggcatcgaaagagaaatggaaatccct

SEQ ID NO: 313776 - DNA, 87 bp, Homo sapiens
gaaaaaacaaaacaaatatgaactatgataagctgagcagagccctgcgatactattatgacaagcaaagtgtgggatgctgtctca

SEQ ID NO: 313777 - DNA, 90 bp, Homo sapiens
ccggcgttcttccgctggctcagccgcaagtacccgtccatcatagtcaactgcgtggaagagaagactttgagagttttgacctgcctg

SEQ ID NO: 313778 - DNA, 98 bp, Homo sapiens
taacctctaagccctatgcctttactgcccggccttgggaaacaagaaacgccacctcctggatatatcagtgaagatggagaaacaagtgaccaaca

SEQ ID NO: 313779 - DNA, 82 bp, Homo sapiens
aatttgaaccatgtttggattgaagccgcctctgtattacttaccagatatggctcgtggacagcagaaaattcagtctcag

SEQ ID NO: 313780 - DNA, 82 bp, Homo sapiens
atattggggggctcggctgcagacttggccaaatggacgggactattaaggtgagaagccctaccactgcaactgggacggc

SEQ ID NO: 313781 - DNA, 50 bp, Homo sapiens
atttgcaacagctcacgggagcaagaacgttaaagagaagttgactgcgg

SEQ ID NO: 313782 - DNA, 100 bp, Homo sapiens
tcgaccacatcaagaagctcagcactgatgtggacttgattgtggaagtgctaagattgcgtcagcatttatcccgtttgccaaccattgatccgaatac

SEQ ID NO: 313783 - DNA, 90 bp, Homo sapiens
tcaatgtataggatcaagtcaaaaattccaaatgaacacaagaaacctgctgagatctcccctgcgaccatgtcttccattaagattgag

SEQ ID NO: 313784 - DNA, 100 bp, Homo sapiens
ggcagagaggatatcttgggcgggggatgtgagcgctgagcccttggcagactgggccagtgccattcgcgtcgcagctctggactgcatggaagagaag

SEQ ID NO: 313785 - DNA, 50 bp, Homo sapiens
gattgcagtagctacagtacatactggaggagattgtatttcgttactac

SEQ ID NO: 313786 - DNA, 75 bp, Homo sapiens
ccgcaactttaaagtcatgatctaccaggtactctgtggatatccccttggacaaaactgtcgtcaataaggatg

SEQ ID NO: 313787 - DNA, 50 bp, Homo sapiens
agaaaacttcgaaggcttaagtactcgtcctcacaagtgcccagactgcg

SEQ ID NO: 313788 - DNA, 110 bp, Homo sapiens
cttcctggaagctgccctccagagcgcctatgtgaaaaacctgaagaagggaattcaaagaagctttttcactatttgacaaagatggtgatggaactataacaacaaag

SEQ ID NO: 313789 - DNA, 100 bp, Homo sapiens
agcataatgacattgtggacagtgacagcgatgctgaggatcgaggaacgttgtctggtttttcgttggaatatacgttgcacatttatggcgattctga

SEQ ID NO: 313790 - DNA, 83 bp, Homo sapiens
cggcagtggcccccacgccagccacagaagtctctgctttctatccgtcaagatgataaagtcgtgtgcccgagaaccaaaga

SEQ ID NO: 313791 - DNA, 88 bp, Homo sapiens
cggaagctcaagagcttcaacctgtcagcgctggagaaacatgggcctgtttatgaggatgccgaggcctgcctggagccccagatca

SEQ ID NO: 313792 - DNA, 100 bp, Homo sapiens
agatgatgagaaataaggacaaaagccaagaggaggacagttcgctacacagcaatgcatcgagcaaatgcagccctgaggatttggctactgcatataa

SEQ ID NO: 313793 - DNA, 75 bp, Homo sapiens
gaaacaagccgtggaataggtgtatcaagtaatggtgcaaagcctgaagaggcagtggagaaggtgacacagcac

SEQ ID NO: 313794 - DNA, 80 bp, Homo sapiens
cgcaactctcagttcgagagtaaagagatgccctgtatccaagcccaatatgggacaccagcaccgagtccgggaccccg

SEQ ID NO: 313795 - DNA, 50 bp, Homo sapiens
cacaggagtcatgcccagtgtgtgaagtcacagaagatcttattagacgg

SEQ ID NO: 313796 - DNA, 100 bp, Homo sapiens
aggttctgcagaaggttgtgactttagtatacattggttaccacagagaagcgcttcctcaaagacagtttgtacaatgaaggaatcctaattgtatggg

SEQ ID NO: 313797 - DNA, 100 bp, Homo sapiens
gtaagatcgtcgagatgtctacttcgaagactggcaagcacggccacgccaaggtcctggtgcttgatggtcgaggccatctcctgggccgcctggcggc

SEQ ID NO: 313798 - DNA, 98 bp, Homo sapiens
cggcatgcagcagttacttccactcaagaatcgtaggccaggctgatggagagctgaacattactcttccagaagagttttcggctttgtgagaaacc

SEQ ID NO: 313799 - DNA, 85 bp, Homo sapiens
cagatattaggagtgcctcgaaatgccagccagaaagagatcaagaaagcctattatcagtcctggatcagtgacattcgagcag

SEQ ID NO: 313800 - DNA, 90 bp, Homo sapiens
gaatgagttgctaaccccccagggtcccagcagtaagtggaaaaggcaagactccacttcgaaagaggtacaactcccatcagatgggcc

SEQ ID NO: 313801 - DNA, 90 bp, Homo sapiens
gattcctgagattccaggaggaagtactggcgaagtgctccatggaggcgcgtgtgctggaggaggccagccggctagaggaggaagcac

SEQ ID NO: 313802 - DNA, 100 bp, Homo sapiens
aggtgaatggcagcaaggtgggcccggacggcacaccctacgttaccgtgctcaaggtcttaaccatgaacttctctggaggagggaggcaggaagcagc

SEQ ID NO: 313803 - DNA, 100 bp, Homo sapiens
ctttggaagatttcaaaaaagcatttaggcaggtggctcccaaattaccggaaaggactgttcttgaggtattcagtgacagaaaatctggttctcttgc

SEQ ID NO: 313804 - DNA, 82 bp, Homo sapiens
ccgaggagcgcgccgcgcccttctccctggagtaccgagtcttcctcaatgtgaagttcatttccaatccgccctccatggt

SEQ ID NO: 313805 - DNA, 74 bp, Homo sapiens
tcaaggaagccatcgcggagcatgctaaggacacaggtgaagcaagctatagtcagcagactggacctcaacaa

SEQ ID NO: 313806 - DNA, 100 bp, Homo sapiens
gccaacagtgtaccagcagggcgttggctatgtgcccatcacaggtctctaattaacagaagatggcaaagcccagccacagcagctatgtccttcagca

SEQ ID NO: 313807 - DNA, 100 bp, Homo sapiens
tgccatagaacttgcagagcttcagcctcctatgtttgacttacacccaatgagacataaaggtgagatggcctacatcgtggtgcagaaccacatgaac

SEQ ID NO: 313808 - DNA, 93 bp, Homo sapiens
cttgttcccccaaatgtctgactctgactctcggactgagaaacgcaaggccgccatggcatcagatgaaggcaaactttttgttggagggct

SEQ ID NO: 313809 - DNA, 82 bp, Homo sapiens
gcactttgaggacatggcctccgacgaggacatgctgaccccgcactacatctacccaccagccatcgtgcagcccagcgtg

SEQ ID NO: 313810 - DNA, 75 bp, Homo sapiens
gtggagtgacggtcacaccgcggcggcttattgtgtaacagaacctggagcaggctctgatgtagctggtataaa

SEQ ID NO: 313811 - DNA, 90 bp, Homo sapiens
actaccatgacgaaaacatgtactacagccagtcttctatgtttccacatcggtcagaaaaagatctctacattaatcatactcctccac

SEQ ID NO: 313812 - DNA, 90 bp, Homo sapiens
gggactgcacttttattcatcaattcatagaatgccagaatcagaatcaagctttgcgactctgtctgggtagcactagtgttggaggtc

SEQ ID NO: 313813 - DNA, 98 bp, Homo sapiens
aaggtgctgctggtggtcgacgagccgcacgccgactgcagaagaagatctttacaatccaaggctgctacccggtgatccggtgtctcttgcgccgg

SEQ ID NO: 313814 - DNA, 101 bp, Homo sapiens
gctgccttttgcatccgcgttggctccgtccccaggatcttcccggttcagggacctggcgatttctgagtgttccgagatggggtcttgctatgttgccc

SEQ ID NO: 313815 - DNA, 83 bp, Homo sapiens
aaaggaagacttgtaacctggagaagaggaattacatgaatgacagtcttcgaaccaatgtgtttgttcgatttcaaccagag

SEQ ID NO: 313816 - DNA, 90 bp, Homo sapiens
tagggacattggggttgatgaaacttacctctttgaatctgaaggtttagcggatactctgttttcaaggaagctgaatgggaaatacag

SEQ ID NO: 313817 - DNA, 75 bp, Homo sapiens
aaacagatggaagaactggttcacaaacatcccaactctctcctgccaaggccctgagcctgtgcaattatttcg

SEQ ID NO: 313818 - DNA, 82 bp, Homo sapiens
ctcagttggaagcagccgatccagcctgcggagcctgtggggcagttattcaagcggagaaatgttgctacagcagaagaag

SEQ ID NO: 313819 - DNA, 75 bp, Homo sapiens
tggcgctgtcttcagtggcacagtggagcagctctgaagatgcaaagggtgtttctgtggcctgggactggttag

SEQ ID NO: 313820 - DNA, 100 bp, Homo sapiens
cgaagatgggggatttctacgacccggagcacccgacccctgagatgctttcattggatttggaggaaatgtgatcaggcaacaagtcaaggataacgcc

SEQ ID NO: 313821 - DNA, 51 bp, Homo sapiens
gtggagtgtaggtcatatcgccgcgatgacagatttgaagatctggaagag

SEQ ID NO: 313822 - DNA, 90 bp, Homo sapiens
gaagctcaacaaggcttcgattaacatgctgaggattgtagagccatatattgcatggggtccagttacaacacagggatcacaacaaac

SEQ ID NO: 313823 - DNA, 98 bp, Homo sapiens
gtctggcactgttcccgctgtttgtgccagcatctgctgtcaggtggctcagctgacagtgaagatagtactgtgtccatccagataaaattagaaaa

SEQ ID NO: 313824 - DNA, 83 bp, Homo sapiens
caaccattgacgccatgtcgggttattcgagtgaccgagaccgcggccgggaccgagggactggttgccataaaggaagccca

SEQ ID NO: 313825 - DNA, 101 bp, Homo sapiens
gtacttcgttccaacatggacatcctgaagccaatcctgtttcagtcattcagtcagtaccgctgtaagactgccaagaagtcagaggaggagattgactt

SEQ ID NO: 313826 - DNA, 118 bp, Homo sapiens
catacttcgtggagcccagcgagcatcccgggcaagcactaccaggctgtgggtctgcacctctggaaggtggtcgctctggccgaaggcagagagtggtctctggagtcatcacctg

SEQ ID NO: 313827 - DNA, 82 bp, Homo sapiens
gggagcttctcagccattttccacagatcagggtcaatgtctgtggagggcggtgctgtcatggctggagtaaggcccctgg

SEQ ID NO: 313828 - DNA, 75 bp, Homo sapiens
atatggcccatggaaaagattttgcatctagaggaattgaaagagtcacagttgaaaccacattgaaaaatatta

SEQ ID NO: 313829 - DNA, 100 bp, Homo sapiens
gaccagaatgatagccagtccctggagctggtgcacaggttccaggatgctgatatgctaactggtgatgagcaagtatggaaggaagttcaagaatccc

SEQ ID NO: 313830 - DNA, 82 bp, Homo sapiens
caaaaactcaggcttcgccacctgcgtgcaaagagcatcagatccatgctgctgctgactcggagccccacagcttggcaca

SEQ ID NO: 313831 - DNA, 82 bp, Homo sapiens
gctcgatcttgggacccaccgctgccctcagctccgagtccagggcgagctccggtgtcggcgggtggcgcggcgcccccgg

SEQ ID NO: 313832 - DNA, 102 bp, Homo sapiens
tccagaaaacggcgaggaagctgtggctctggttgaggatgtacagagagctcctggacaacaggccaagaaccccatgtggggctgtgacaggcagaagga

SEQ ID NO: 313833 - DNA, 73 bp, Homo sapiens
gaccacagacctgcgctgcttcctacacagcctcctgtcgtggacgtttttactgtaagtgttggaaacttac

SEQ ID NO: 313834 - DNA, 75 bp, Homo sapiens
gaggaggtcccacaggctcctgccctggactaccgagatagcagactccttgaaagcagggtccttgtttagtgc

SEQ ID NO: 313835 - DNA, 100 bp, Homo sapiens
ggttacaaccgcagcagtggtggctatgaacccagaggtcgtggaggtggccgtggaggcagaggtggcatgggggattttatattggaagacatggatc

SEQ ID NO: 313836 - DNA, 97 bp, Homo sapiens
ccccggagcccggccccggggaactagggagcgtctccggctgcacagcgctcaggtctttcactaccattcctacagtgattggcaagataccgtt

SEQ ID NO: 313837 - DNA, 100 bp, Homo sapiens
cataagacctgctctcccgcgtccctgagccaggccagcgccgacctggaggccaggctaccaacgtctttgtgaacatggaggaggacttcatgaagcc

SEQ ID NO: 313838 - DNA, 50 bp, Homo sapiens
ccacacctccggaccgagggacgcgggactccagaagacctttccagatt

SEQ ID NO: 313839 - DNA, 96 bp, Homo sapiens
agaactcatgcaagtggaacttacagcttccttgatcggactcagcattcaacttaattcagtgcacaaatgagatgaatgtgaacatcccacagt

SEQ ID NO: 313840 - DNA, 82 bp, Homo sapiens
tggggtttccggctgcagggcggtaaggatttcaacatgcctctgacaatctctagtgagtccaaaactacttacctggaag

SEQ ID NO: 313841 - DNA, 114 bp, Homo sapiens
gtcggagcgcagcgtcctttgtgcccggcggccgccccgggatgcgtccgagctaggagccagattattgtggatgatgatgacagtaagatatggtcgctctatgacgcgggc

SEQ ID NO: 313842 - DNA, 134 bp, Homo sapiens
catttaatggtggatttctcacaggaaagacagatgctgcaaactttgaagtttttgccagactcatcatattcagagcccccagatgttcagcagcagttgaaccactatcagtcagctgccctggcaaggaa

SEQ ID NO: 313843 - DNA, 101 bp, Homo sapiens
tgaagaagtaatgacccattcggggctgtggaggacctgctgcctagaagctgatgaccaaacacccaggcaaacgtctgggttgtggacctgaaggcgaa

SEQ ID NO: 313844 - DNA, 73 bp, Homo sapiens
tcatgaccgacaagggttgtgtgaagacaggtggagagtctggctcagcaggcaacagtgacaatgccccctg

SEQ ID NO: 313845 - DNA, 86 bp, Homo sapiens
tcagactccagcagccaagatggtgaagcagatcgagagcaagcggggatctgatgagcttctttcttctggcatcattaacggac

SEQ ID NO: 313846 - DNA, 83 bp, Homo sapiens
agaaccgaagccggggccaaggctatgaaactaatctggattcactccctctggttgatacccactcaaaaaggacacttctg

SEQ ID NO: 313847 - DNA, 100 bp, Homo sapiens
aatgccaacgccgtgtctgaaggtttcccaaaccactccttatgatccagtgaatattcaagagagctacatttgaagcctgtacaaaagcttatccctg

SEQ ID NO: 313848 - DNA, 75 bp, Homo sapiens
caagatgtccagtaatgtcccggcggatatggccttggatggtatactgtaaattcagcatatggagataccatt

SEQ ID NO: 313849 - DNA, 75 bp, Homo sapiens
caggacttccaaggagagcatgtcggaggctgatcgcgcccagaagggtggcccagttgaaatccttcccttcct

SEQ ID NO: 313850 - DNA, 75 bp, Homo sapiens
caagaactgaaaactctgagtgatgttcagaagtttgcagagataaatggaattaaggataacctagacgacata

SEQ ID NO: 313851 - DNA, 78 bp, Homo sapiens
agaaccaacccccaaattggctgggacaggtaaccatgtgcgaccgaaaggccgtgatcaaaaatgcggacatgtcgg

SEQ ID NO: 313852 - DNA, 100 bp, Homo sapiens
cgagagccgagaggtgagggtgcccccgcctcacctgcagaggggccgttccgggctcgaacccggcaccttccgggtggctctcgggggctggtccatg

SEQ ID NO: 313853 - DNA, 100 bp, Homo sapiens
gtccgcggcgggcagccagagcccaggatacaatgtctctttgctatatgaccttgaaaatcttccggcatccaaggattccattgtgcatcaagctggc

SEQ ID NO: 313854 - DNA, 100 bp, Homo sapiens
ttggaggagatacccattttgactcagatgagccatggacactaggaaatcctaatcatgatggtttgttggcatccaaagctgttggggttgatggtgc

SEQ ID NO: 313855 - DNA, 101 bp, Homo sapiens
aatgaagattcagtggatgctaagccagaccggtcctcgtttgtaccgtccctcttcagaccagcatctcagacatgtcgaaaaagatgttttgatcccta

SEQ ID NO: 313856 - DNA, 100 bp, Homo sapiens
ccaagactcagtataaccaagtaccaagtgaagactttgaacgcactcctcagagtccgactctcccacctgctaaggcactcaaggagttgcccctggt

SEQ ID NO: 313857 - DNA, 73 bp, Homo sapiens
agattcgcagtggtcgcttcttctccttgtggaggccatagtggagtttgactaccaggcccagcacgatgat

SEQ ID NO: 313858 - DNA, 74 bp, Homo sapiens
cctgactaaagcttgaaatgctacatttccaaggatttgaaaaatactttcctaatggaaaaaatggaaaaaaa

SEQ ID NO: 313859 - DNA, 101 bp, Homo sapiens
ctacacacaatgagctggaaaagaatcggcacgccccaaaggcgagggcctgactccataccagggcaaaaagcgctgcttcggcgagtacaagtgtccca

SEQ ID NO: 313860 - DNA, 75 bp, Homo sapiens
aggtgcttggcaaaatcgagcgggccattgatgactagtcctcacttcaggctcttttcatcaaaaattccacac

SEQ ID NO: 313861 - DNA, 100 bp, Homo sapiens
ggcgcagattctttctgtacgggacagtggccttagagctattgagaatttgatgcaaaagaaggggaaatttgattacatactgttagagaccactgga

SEQ ID NO: 313862 - DNA, 101 bp, Homo sapiens
aataagtctttagctgcaggtgtgtgggtaaatctgtaggtgtgtctaaccggcagaataagaaagtagaagaagaagaaaagttgctgaagctctttcag

SEQ ID NO: 313863 - DNA, 100 bp, Homo sapiens
gtgcaatgtttagccaacccaaattaccttaattatggagatggacacatggatcatttactgccaggctgtgaagataaaaattgccaaaagagtacca

SEQ ID NO: 313864 - DNA, 95 bp, Homo sapiens
ctgccttccagcaccttctgctcctcgtgggcatccacctcctcaaggactgctgtgtaagctatggtggcatgtggtaccttaaagggacagta

SEQ ID NO: 313865 - DNA, 95 bp, Homo sapiens
caaggcgaagaccagtactatctgcgggtcaccacggctgacgttcctcagggagtgattcgagtgcaagctccccatctttcgaaagtttccat

SEQ ID NO: 313866 - DNA, 103 bp, Homo sapiens
gagagacgagccccgagcccggctggacgccgctgcctcagctgacaaagatgttcttcctcttccccgacccacatttcaagcggacaaagcacaagtggcg

SEQ ID NO: 313867 - DNA, 88 bp, Homo sapiens
tctgaggaccgaagatgagcttcctcttcacaaccagtgtctctgaagaagatgtctcaagtagatattctcgaacagatagaagtgg

SEQ ID NO: 313868 - DNA, 96 bp, Homo sapiens
ctgcagcgggagctggacggcgagcgcgagcggcgcgagaaactccaattaaggaacagctatatcctgcttccttctgtaagcagcatcgacttg

SEQ ID NO: 313869 - DNA, 96 bp, Homo sapiens
tggtgacacgttattacagagcccctgaggtcatcctggggatgggctacaaggagaacgaagtggtacaccatccccaaaacgaacatctgtagg

SEQ ID NO: 313870 - DNA, 100 bp, Homo sapiens
aaactactcatgtcagctgttctgcaggatcccatgagaaggttaaagatcgaggtccggaagccactaggagattttttaattggttttattggagcat

SEQ ID NO: 313871 - DNA, 83 bp, Homo sapiens
ccccgccgagtcctagcgcctggcctgcgcgccgctgcccgcgccacaggagccttcacgtaaatgggtccagtcatgcctcc

SEQ ID NO: 313872 - DNA, 75 bp, Homo sapiens
ggctcctgcagcatggctgtcagcaggaaggactggtccgcgctgtccagccgcttacaaacacgcagatggcaa

SEQ ID NO: 313873 - DNA, 95 bp, Homo sapiens
gcggctgatttagaaggaggttcaggctacggtgagccgaagaaagtggatctcttcagcctgggaattatcttctttgagatgtcctatcaccc

SEQ ID NO: 313874 - DNA, 89 bp, Homo sapiens
gttccttcagccaaagaaacaagccgtggaataggtgtatcaagtaatggtgcaaagcctgaaataacaactattccacaccaaatgag

SEQ ID NO: 313875 - DNA, 90 bp, Homo sapiens
cagaccaggatgtagcactcaaacttgcccaggagcgagctgaaatagttgctaaatatgacagaaggggacagggagctccagcccgag

SEQ ID NO: 313876 - DNA, 98 bp, Homo sapiens
gaaggctgcagtgagccctgtttttgccaccacactccagcctggggggctgttgtggttccgactataaacagtacgtgtttggcggctgggcctgg

SEQ ID NO: 313877 - DNA, 100 bp, Homo sapiens
ttcttaattattcagaatgctgcggttttccaagggacacgtcaaaggctacatatcgcatcagcatcagaagctggtggtcagcaagcagaacccattt

SEQ ID NO: 313878 - DNA, 137 bp, Homo sapiens
gccgactcttcccttgaaagtcccgaagaaaataaccccctcagactttccgagagcaaaaagaattagagcccattgggaacgatgccaccaccgtcagacattgtcaaagtggccattgagtggccaggtgctaa

SEQ ID NO: 313879 - DNA, 100 bp, Homo sapiens
acggggcaccaggcgccggcaacggctccctctcgggcgactggtaccgcaggaaccagcttgtggagagactccagagcaaatacgagcaccaagtggc

SEQ ID NO: 313880 - DNA, 101 bp, Homo sapiens
ctccccccggagccaggctggtttcggaaatgcccttacagcagcaggtttttcgttggaatatacgttgcacatttatggcgattctgagtgtgagggca

SEQ ID NO: 313881 - DNA, 82 bp, Homo sapiens
ctgcccgccccgcgcctccgtctcccacggtgagaagccctaccactgcaactgggacggctgcggctggaagtttgcgcgc

SEQ ID NO: 313882 - DNA, 75 bp, Homo sapiens
cgctgagggccttgagaaacttaaggagtgtgtgttgcgtgacggtggctattatcatggaaaactaatttttcc

SEQ ID NO: 313883 - DNA, 100 bp, Homo sapiens
aatacagaccagatctgcaagcccgagcaatatcaaggcccagtttagtttttacagagtcaagaggatcctatgaatttcccactgggttaaaaatatg

SEQ ID NO: 313884 - DNA, 50 bp, Homo sapiens
taaagacaagaaggtttccaatcagagctaatgtcaaaccccgaaattcc

SEQ ID NO: 313885 - DNA, 74 bp, Homo sapiens
atacaaaggcatggaagtatgaaaatgatgatatcaccatggtcatctgccctggaattgccaatcacagcgag

SEQ ID NO: 313886 - DNA, 100 bp, Homo sapiens
cctcccaactagctgggaccacaggtaatctttagatggtggaagatctctctaaggagtgagtatcgatcaacaaaacctggagaagcaaaagaaaccc

SEQ ID NO: 313887 - DNA, 76 bp, Homo sapiens
cgcgcttatcgtgcggccagtccggcgctggcgccgcgtggcagtgggggatcgcttacacctgagacgaactaca

SEQ ID NO: 313888 - DNA, 98 bp, Homo sapiens
tgaagatggcggctgctgtaggacggttgctccgagcgtcgaggaatacccacacaccgaagttgggtgaggaagattcgttttgctcctggtaaagg

SEQ ID NO: 313889 - DNA, 75 bp, Homo sapiens
tgcagctgcgatctctgtggtaggcccaggtgaccagtatgcactgaagatgaggtttgtggaccatgtgtttga

SEQ ID NO: 313890 - DNA, 83 bp, Homo sapiens
ctggacgggcggcgggtgaagctgcagctctgtcttgctctgttgcccaggctggagtgcagtggtgccatcatgccaacctc

SEQ ID NO: 313891 - DNA, 50 bp, Homo sapiens
caatgcttgaggctccttacaagaagcacgtagacagactatgctctttt

SEQ ID NO: 313892 - DNA, 82 bp, Homo sapiens
agggatgtcgtctcagcagtgctcgggcgcagggtgcttcaaggatgaccgcatcgtcttctggacttggatgttctccacc

SEQ ID NO: 313893 - DNA, 89 bp, Homo sapiens
ctccagagtagctgggaccacaggcagaagtcaattcatctggaaagactatctctgagtcagacttaaaccactctttttcactaact

SEQ ID NO: 313894 - DNA, 100 bp, Homo sapiens
cagaatggcagatggcttatgaaccacaggatctgaagttttcacttgagagtcagaaacaaaggaatcttcagctaaatctacttttggaacaacagaa

SEQ ID NO: 313895 - DNA, 100 bp, Homo sapiens
atgaagcccagacctgcagggttcgtggataataaactcaagcagcgagtcatccaggaaggaagcagccaccctcgccatggcctccccgcccgcctgc

SEQ ID NO: 313896 - DNA, 100 bp, Homo sapiens
aaagttgaaaacaaagtgctgaagaaaaagtcagcactttttgaagtgtctgaggttataccagtcatgacaaataattatgaagaaaatatcctgaaag

SEQ ID NO: 313897 - DNA, 100 bp, Homo sapiens
gtttcaaggagaggcccagcatatacaaaggcatggaagtatgaaaatgctttaccactcctgaaggccctaaaccccgttccagatgctctgactgggc

SEQ ID NO: 313898 - DNA, 90 bp, Homo sapiens
attcttggaggaattcttgctttgctaatccctgcactaggtcagacaatcccctttggggtacaggaaacaaagcaggaggagtttgag

SEQ ID NO: 313899 - DNA, 75 bp, Homo sapiens
tggctatggtgggcaaactaagccgattttccggaaaaagctcccatggtgaatagatcaaccaagccaaattcc

SEQ ID NO: 313900 - DNA, 100 bp, Homo sapiens
cagagaagaagggctgaaagcactctactcgggtaacaaatgtggcaattattttggatctatcacctgtcatcataactggcttctgcttgtcatccac

SEQ ID NO: 313901 - DNA, 100 bp, Homo sapiens
ctcctggaaaggaccgtccacccctccgcgctggcggtgtggacgcggaactcagcggagaaacgcgattgaggtacatcaggaacgtctctatcaagaa

SEQ ID NO: 313902 - DNA, 75 bp, Homo sapiens
agctctttcgaatcaagttgtccccaacagtggagctacttcctcagccgagcccagagcctgtgtggccccgag

SEQ ID NO: 313903 - DNA, 82 bp, Homo sapiens
cgagcgctcgcgagcggctgcgggacgcgaggtttccggaataccctctaccatctgctttggtcagggtgccgctcgagga

SEQ ID NO: 313904 - DNA, 101 bp, Homo sapiens
cttggccggtgcttccaggaaaccattgggtcacaggtgactgtaggacgaggatttggtgtcacataccaactggtatcaaaaatctgccccctgatgat

SEQ ID NO: 313905 - DNA, 51 bp, Homo sapiens
agccacaatgcatcgctggaagtagccaatgacttcaaacctgcttctatt

SEQ ID NO: 313906 - DNA, 90 bp, Homo sapiens
catttgccagtgatggaccgtgctagtgacctgactgatgccttcgtggaggggcttctttcctgtcgttgttggctttattagaagagt

SEQ ID NO: 313907 - DNA, 82 bp, Homo sapiens
aaggggaaggatcgggagtacacagacatcatccgccctgggcgctgcctatggcacagccaagagcggtaccggcattgcg

SEQ ID NO: 313908 - DNA, 97 bp, Homo sapiens
ttacctttatgtatttacctacggagtcagattcctgaaaaagatcagaccccaacaccaacaagattcttgaaaaactgtgaagaagtgggtttgt

SEQ ID NO: 313909 - DNA, 87 bp, Homo sapiens
caactctgccagtcacactggggtccccaaagaagtcaagtgccggtggtggtgtgcacattgagccccggtatagacagttccccc

SEQ ID NO: 313910 - DNA, 75 bp, Homo sapiens
aacggtgcttctatggcaggatatgagtatgttggataaaggacattgttgtggcagtaactggagagaacatgg

SEQ ID NO: 313911 - DNA, 100 bp, Homo sapiens
cttgaaacagcaatcaaaaggactgaagtggggttaagaaatgaagaagcagtacgacgtctcatctgggaaaagaatctaaagtttgtgatgcttcaca

SEQ ID NO: 313912 - DNA, 100 bp, Homo sapiens
cggaaagccccccaggctgagtgcggcatgatctccatcaccgaatggcagagaaactaaatatattttgccaactttggaaaaagaattattcttggca

SEQ ID NO: 313913 - DNA, 82 bp, Homo sapiens
ggagaccctcatccagctgatgcccttcttcgtgaaacttccattttagaagaatacagtatcaattggactcagaagctgg

SEQ ID NO: 313914 - DNA, 100 bp, Homo sapiens
ggggtgaaagagactcggtgacagatacagatggacctccagttgtagctcattatgatatgtctgacaccaactctgacccagaagtggtaaatgtgga

SEQ ID NO: 313915 - DNA, 98 bp, Homo sapiens
ggcacgacaagtttctggacactctccgagaggtgaaggttgaggaacaggttagcaccactgagagagtgtttcaggatagacaatatcagattgat

SEQ ID NO: 313916 - DNA, 101 bp, Homo sapiens
gaaggaggcagaggcacttatgcttgtcagagtctgataaggaggagaaaccacaacattctgtgatacccaaggaagtgacaccagccctatgctcacta

SEQ ID NO: 313917 - DNA, 100 bp, Homo sapiens
agcattccagccatttttcttcactggagcatttccatttaatatgcaaggcatcgttggcttcacagtatgactgatgatcctccaacaacaaaaccac

SEQ ID NO: 313918 - DNA, 80 bp, Homo sapiens
agatgacggatgaaaagaatgaacactgtccttcaaaacgaacaaatttacatgtattggagaccagaccagaagccctt

SEQ ID NO: 313919 - DNA, 74 bp, Homo sapiens
taatcctcaatttaagcctgatctaacccctagaaacaggttttgattcccaccatggccatcacccagtttcg

SEQ ID NO: 313920 - DNA, 82 bp, Homo sapiens
gaaatcgggctgaagcgactgagtccgcgatggagttctgggaagtcatcagtgatgagcatggcatcgaccccagcggcaa

SEQ ID NO: 313921 - DNA, 80 bp, Homo sapiens
aagagctcatgcaaaattgactactttttatggagcatttggaccagaaaaattcaggcgtaacctgatgatggaaggtg

SEQ ID NO: 313922 - DNA, 87 bp, Homo sapiens
ttactggagtaggtgttagtaagactggatacacgtctgtttaactacgcaaaaggtaatgctggcatggcttactgggaccctaag

SEQ ID NO: 313923 - DNA, 101 bp, Homo sapiens
gcgacgaaggcaaagggaaggtggtggacctgctggcgcaggacgccgacatcgtgtgccgctgccagattgtagaaggcatgaaacaaaaaatgtggagt

SEQ ID NO: 313924 - DNA, 100 bp, Homo sapiens
tgtgacctgccccttctctttacgaagatgttaccgagtacttcagtgaattccttagtgcaggggaacggagtcttgaattccagggatgcggcaagac

SEQ ID NO: 313925 - DNA, 82 bp, Homo sapiens
ctcactgtcagcgcctggaaacttgctcacacctgcctagagctggaacgttacctccagagcgagccctgctatgtttcag

SEQ ID NO: 313926 - DNA, 80 bp, Homo sapiens
cctgtcccagtttttccctgaggccatttctttcatagtttcctcgctgatctcttcatgccgtgtaatttcacatggac

SEQ ID NO: 313927 - DNA, 82 bp, Homo sapiens
ctggagcctcagttggaagcagccgatccagcctgcggagcctgtggggcaggctggaggaagtacccctggaggtgctgag

SEQ ID NO: 313928 - DNA, 83 bp, Homo sapiens
gtgctggtccccagtagcctccggattggaatcattcccgcagccgcggcgagtcctttgcacatgttggcaacacacgcatc

SEQ ID NO: 313929 - DNA, 102 bp, Homo sapiens
gggtctgcagggacatgatcacccgccgctccttgggctacgcgtatgtgaacttccagcagccggcggacgcgaatgctgatgtcttaaaggcgatggtag

SEQ ID NO: 313930 - DNA, 83 bp, Homo sapiens
gtggccagtagaggaggaggtgaacaaggaggagggcgtgatggtgggcatgggtcagaaggattcctatgtgggcgacgagg

SEQ ID NO: 313931 - DNA, 75 bp, Homo sapiens
ccccagggttggccccgtcagcagagagcactggactatggctcacagtctgggagggaaggccaaggatttcac

SEQ ID NO: 313932 - DNA, 83 bp, Homo sapiens
caaagatgtgagagagaaaagtgagtttattctgaagagcatccagccacttggagccagtgactatttggaactatcaaaga

SEQ ID NO: 313933 - DNA, 98 bp, Homo sapiens
ccggccgctagcgtcagcgccagccaggtgcttttgaagatgatgatatcacgcacgttgaaggaagtgtagatcctattcgagatatagaaataata

SEQ ID NO: 313934 - DNA, 75 bp, Homo sapiens
gtacgctgtgcgcgggaaccacgtgaaatgcgttgaggccttgctggatccaggatgggggccccgtttgtctgg

SEQ ID NO: 313935 - DNA, 82 bp, Homo sapiens
gcctcattcccataacgacccaggtccttttggaataaatcatgggattgagcttcattcagatgtggtggaatatgccaag

SEQ ID NO: 313936 - DNA, 76 bp, Homo sapiens
tgctgtataagaacctggccaacaagattgtccccattgccatccaggtgatccatgctctagggcaatcatggca

SEQ ID NO: 313937 - DNA, 98 bp, Homo sapiens
gaagccacagaaaccgtccctgctacagagcaggagttgccgcagccccaggctgagacagaaaaagcttgtggtgaaggggggcaaaaaaaagaagc

SEQ ID NO: 313938 - DNA, 75 bp, Homo sapiens
acagctaagacgccgggactccctggaaacctagaaatgacgctgcatccaggtagtacacaaactgctctgcta

SEQ ID NO: 313939 - DNA, 83 bp, Homo sapiens
cgagtgctttgtgatcgaaaccctgaccggatcccataaacactgtcggctctccagcagaactatctcctactactctttcc

SEQ ID NO: 313940 - DNA, 82 bp, Homo sapiens
ttcgagttcaaagagaccctcggaacataacgaaggaggcccaacttcattcaataaggagcctgacggatttatcccagac

SEQ ID NO: 313941 - DNA, 113 bp, Homo sapiens
gtggcggcagcgagttgaactttaggagagctgtgttctctgcagattctaagtgtccttaagtttgctcgcttggtcaagtcctacgaagcccaggatcctgagatcgccag

SEQ ID NO: 313942 - DNA, 98 bp, Homo sapiens
tgagttcaatacgtctgaacctttgctgtctatggatctgctctaaaccttatagcctgcttatgggggaaggtgctggagaatctggtaaaagcacc

SEQ ID NO: 313943 - DNA, 109 bp, Homo sapiens
gccgcctggctttcgtattcgttgttctcggcgggctgtggggcctccgcgccgcggccgttagtcatgtcgggtgctggagaatctggtaaaagcaccattgtgaagc

SEQ ID NO: 313944 - DNA, 100 bp, Homo sapiens
taccttgccgcagccaccactgccgtctatgaggccatgactgcaggggtgctgggcctaaacctacagccagagcagccccatgggctctaccttctgc

SEQ ID NO: 313945 - DNA, 75 bp, Homo sapiens
catcaccaacatagccatcgacttcggggagcaggacccattccaacaatctcgtaaaacatggtggattactat

SEQ ID NO: 313946 - DNA, 75 bp, Homo sapiens
atcaaatccaagggcggtgttgtgggcatcaaggtagatgatgagctggagatcaaggcctactatgcaggccac

SEQ ID NO: 313947 - DNA, 116 bp, Homo sapiens
gggacagtgacgacgacagcgtcctcgaagccaccagctcccgggacccgctcagcgatacaatgcagatcttcgtgaagactctgactggtaagaccatcaccctcgaggttgag

SEQ ID NO: 313948 - DNA, 103 bp, Homo sapiens
gggcgcgctcccgcggagccggagccgcagaggctcccgggctggactcaggcttctcaggccgtcctcatcgtcagcgggaacctcagcttcctgaactggc

SEQ ID NO: 313949 - DNA, 101 bp, Homo sapiens
gtcgtctgccttcgcttcacggcgccgagccgcggtccgagatccaaactactggatacaggtgcatcgcttggaacatggagatggaggaatactagacc

SEQ ID NO: 313950 - DNA, 82 bp, Homo sapiens
ccttcggcagtccacccaccgccgccgcctcccagctttgatgaccatgacccagctgtgatccatgagaacgcatctcagc

SEQ ID NO: 313951 - DNA, 50 bp, Homo sapiens
tgtgtatgaccttcacctcattaacagatgagcacaagcctgggagatgg

SEQ ID NO: 313952 - DNA, 98 bp, Homo sapiens
atgcgcgagcctgtgcaggtttccacctgcggccaccgtttctgcgatacctgcctgcaggagttcctcaggttgggtgggtgacgtagacgactact

SEQ ID NO: 313953 - DNA, 82 bp, Homo sapiens
cagagagggcctgggagcttgctgcagcttcagggcagcgggtggcatgagacgtgggaacatgggccacctcacacggatc

SEQ ID NO: 313954 - DNA, 75 bp, Homo sapiens
gagctgaccctgggagacatcgacggtaagaatgattgatgttggctgatattggagtgctcattcacatgaagt

SEQ ID NO: 313955 - DNA, 75 bp, Homo sapiens
ccctagtgtcagcagattcagcggtactggtgtataataggaaaaccagtagattcccagacatcgcgaagtgaa

SEQ ID NO: 313956 - DNA, 82 bp, Homo sapiens
gatatttagaggacattatcatgggcacatgaggatttcatgtatgacatcatacgagacaataaacaacatgaaaagaatg

SEQ ID NO: 313957 - DNA, 74 bp, Homo sapiens
aatagctcttctgcacagataccagtcacagtattatcagaaaatccacccagcttcaccattactgtgacgtc

SEQ ID NO: 313958 - DNA, 100 bp, Homo sapiens
aagggaaggaaatcatgtcaagcgaagccttgaaaaagctgccctgagacggtgtcccgccgaaagatctgttacctaaagcaataaaaaatggccagag

SEQ ID NO: 313959 - DNA, 51 bp, Homo sapiens
gaggactccagcacaccgagggacttcagggccacaggtgctgccaagatg

SEQ ID NO: 313960 - DNA, 51 bp, Homo sapiens
cttgtctggaaatggattatgagtacgaattggagcaatgttggcttatac

SEQ ID NO: 313961 - DNA, 83 bp, Homo sapiens
gcgacctgagaccagtggtcatcgatgggagcaacgtggccatgaggctgttttggagtcagcggaagatcaccaaggccagg

SEQ ID NO: 313962 - DNA, 74 bp, Homo sapiens
atctacaaccttcgatctcctgacgagtgagaaattgcagtttattttcactaatattgaccctaagaatcctg

SEQ ID NO: 313963 - DNA, 106 bp, Homo sapiens
aagccccacgctggccggacagggccgcctgtcgccggatcgcccaggaccacaccgcagcgtaactgcaggcctctcagcgaaaaagggggaaagcaaagacccg

SEQ ID NO: 313964 - DNA, 75 bp, Homo sapiens
aggtgctaatccagtggaaatcaggagaggtgttgcttttgaacagggcaaaatccttcctactcctgagacagt

SEQ ID NO: 313965 - DNA, 100 bp, Homo sapiens
ttgaatgttcaaaaggcatctactgaaaggggaatagtgcctaccgatcagctgcatctaaaacaatgaatatttatttccctaaaaaagaggctgtcac

SEQ ID NO: 313966 - DNA, 74 bp, Homo sapiens
ctgggctctggactccagaggcagtgatagaacacccagacgcagggatggaagcttcctggcgccaggtggcc

SEQ ID NO: 313967 - DNA, 75 bp, Homo sapiens
aaggacatcttcttctctataggattcggaaggacgttggtactccaaagattcaggtttactcacgtcatccag

SEQ ID NO: 313968 - DNA, 82 bp, Homo sapiens
gcgccagcggccgagcgggcggcttcctggcctgggcgctccggtggcggcggagttactccacaggatccgctgaacatag

SEQ ID NO: 313969 - DNA, 75 bp, Homo sapiens
tgagaattacaggcttggatctcaaaccgccgcgatgtgtgcaacagcaccgatcttccggaagtcgagatcatt

SEQ ID NO: 313970 - DNA, 100 bp, Homo sapiens
tggaaatacaacaattccgtttagcagctgttgggccaactacacagaccttactccccttagaacagattaaatctcttgatgaacagtgtgtggttgg

SEQ ID NO: 313971 - DNA, 95 bp, Homo sapiens
gaatcgttaaacatcttaggtcagggtgaaatagttaagaagtatactcagttcaatcctaaaacctatgaagagaggattaatttaatcctaca

SEQ ID NO: 313972 - DNA, 74 bp, Homo sapiens
cgatattgatattgaagcaatgcttgaggctccttacaagaagatccatccttttacaatccctgctattattc

SEQ ID NO: 313973 - DNA, 97 bp, Homo sapiens
cttgccctggtcttgctcggccgatgaagtgcagaggtttttttctggtcgggtcacaaatcttcgaagagtgacatatgttgttttagatgaagca

SEQ ID NO: 313974 - DNA, 101 bp, Homo sapiens
ttccggaagaattttactgcgaagttttgctcctggatgaatccaagttaacccttaccacccagcagcagggcatcaagccaccagtggtaaaaacagag

SEQ ID NO: 313975 - DNA, 87 bp, Homo sapiens
ccaatttcatgaatttcaagagagtaccattgggggccagccctttgtgaatcccgatggaactcctgcaatatacaacccacccac

SEQ ID NO: 313976 - DNA, 82 bp, Homo sapiens
cagccgcggcggcagcagcagtgagaggtcgcctgcgaggccgctggccaggcctgagcctctgccaccatggccattgtgc

SEQ ID NO: 313977 - DNA, 123 bp, Homo sapiens
ctagtcaggaagaggacacacagagtattggtcctaaagtccagagacagagcactaattagaattttccagttcatatgaagaggtgatctctcaaataaatacgtcattacctgctcccca

SEQ ID NO: 313978 - DNA, 117 bp, Homo sapiens
ccgaaacctagccccggacgagaagcgcagcaacgtgcggtgggaccacgagagcgagaatggggtactaagagaaaagcacgaagctgtggatcatagttcccagcatgaggaaaa

SEQ ID NO: 313979 - DNA, 101 bp, Homo sapiens
tgacagggatgatgaagaagacctgctggatgaattctgcttggtcagaatcgtgatggcattgtgttcagcactgatgactattttcaccatcaagatgg

SEQ ID NO: 313980 - DNA, 102 bp, Homo sapiens
cacgaccacatttgtcatgatgacagtgacaaggagcaaccagggttttatgcacatgaaactggccaaaaccaaagagaaatacgttctgggtcagaacag

SEQ ID NO: 313981 - DNA, 90 bp, Homo sapiens
atgattgaaaatgacattgccaaagcaacaggggatatcaaagtgacagggctcgccattcactgtgatggtgaggagaaagcaccgccc

SEQ ID NO: 313982 - DNA, 80 bp, Homo sapiens
caaggcggcgcggcggccactgggcgcagcacccaggattttttatcaagcagaaatgcatcgaacaacgagaatcaaga

SEQ ID NO: 313983 - DNA, 83 bp, Homo sapiens
aatacatatgtgccttctgcttcacacttgtatgtacttcatacacagccattaaggtttctctggaaacccccctggtaagt

SEQ ID NO: 313984 - DNA, 100 bp, Homo sapiens
agccgaggactgcggggtccggtgtccacgcagatgttatccaagataaattctgtgggattataaacatttcagtagaaggcctgcatgatgtcatgac

SEQ ID NO: 313985 - DNA, 100 bp, Homo sapiens
ggccgccgtcggcagcaagaacagagagagaggtggacagatctgagagatactgagttggccagtcagtgctgaaagatgtaagcaaagtgaagaagct

SEQ ID NO: 313986 - DNA, 98 bp, Homo sapiens
tgaagcgactgcagagccagaagggagtgcagggaatcatcgtcgtgaacacagaagctatgtgatgatgatgccatttaaacgacaggctctagtgg

SEQ ID NO: 313987 - DNA, 100 bp, Homo sapiens
cagcatcaagatgatttatggtaataaggtacaggtttgcagattccgccagcagcacagcaagctctacagatgagtggctctttggcatttggtgctg

SEQ ID NO: 313988 - DNA, 97 bp, Homo sapiens
gccgatgacctgggctctgggcctctgaaggtacaaggaaatggtagaactagtgatctcacccagcctcactgtaaacagcgattgtctggataaa

SEQ ID NO: 313989 - DNA, 74 bp, Homo sapiens
attttggcatcaaggacaaacccaccttcatcaaagggtggaatgcagtagccctctgggcctgggatattgtg

SEQ ID NO: 313990 - DNA, 50 bp, Homo sapiens
tgaccgtgtcttacatcagttcagagagtattctaccttgtaaatactgt

SEQ ID NO: 313991 - DNA, 90 bp, Homo sapiens
gggtggaagaaaatcataccatatcagatgcctcgcagagcaccaggcccaccgtgaaagaaggacagaataacgggctcccagattcac

SEQ ID NO: 313992 - DNA, 90 bp, Homo sapiens
aatttgggcctgactccggcgggagagtaaaggtgtttgagaagctgcagctgctcaaccctgaaatagaagcagaacaaatattaatgt

SEQ ID NO: 313993 - DNA, 96 bp, Homo sapiens
gaggcctccccagccatgtggaactatgatagtatttctgctgcaagtacttctgatgttcaagatcgcctgtcagctcttgagtcacgagttcag

SEQ ID NO: 313994 - DNA, 100 bp, Homo sapiens
agaaaagcgagaccgcgtgcgaggaccgcaaagtacccacgtttgttcgaatgctggccccagagggagccctgaatatacacgagaaagcctggaatgc

SEQ ID NO: 313995 - DNA, 75 bp, Homo sapiens
ccgaggcggccacccgagacgcggcgcgcacgctccggcctgcgggggaaatttgcagtggtgagaaaatgtata

SEQ ID NO: 313996 - DNA, 100 bp, Homo sapiens
agaccatggatcacaaccggaaccgcagggtgtcagcacagcgggctactcctagggataagcccccggtcccctcatccctggccagtgtccctgaccc

SEQ ID NO: 313997 - DNA, 82 bp, Homo sapiens
ggaaagacctcagagtgttctcagcttttaaagaagcagttttttcaccgagccctaaaagtaatgaaaatgaaatatgata

SEQ ID NO: 313998 - DNA, 89 bp, Homo sapiens
atgtccttcacctgggctaggctgagaccagcaccaaggagctcttcagaaaccaggctgctttcaggaacattgctgtggattcccag

SEQ ID NO: 313999 - DNA, 78 bp, Homo sapiens
tcgattttaccttggataccctgctttggcctgcctagggtagttaaaagacgagtgaatgctctcaaaaacctgcaa

SEQ ID NO: 314000 - DNA, 75 bp, Homo sapiens
acgggtgaagtacaggctcagtctgcggccaagactccatcctgcaagatgataatctacctcactttccctgtg

SEQ ID NO: 314001 - DNA, 89 bp, Homo sapiens
gccatgaggcgccagcctgcgaaggtggcggcgctgctgctcgggctgctcttggaggattaagcatgaaaatattgttgccctggaag

SEQ ID NO: 314002 - DNA, 90 bp, Homo sapiens
cggtccctggctgacattgggaagacagtctccagtgcaagtaggatgtttaccaaccctgataatgttgacttgctggtgaaggtgggg

SEQ ID NO: 314003 - DNA, 111 bp, Homo sapiens
gagggagcggtcgccgcgggatttggagctgcctagcctcgcggtcgatgtttctttctcagcaaaatagaggagaagcttacccctcttccagaagataatagtatgaat

SEQ ID NO: 314004 - DNA, 75 bp, Homo sapiens
tctgcacgagaccgggctggccatgatctatgatctaaagcgggaagccagtatctgtcatatgctgaaacatcc

SEQ ID NO: 314005 - DNA, 99 bp, Homo sapiens
ttttgtcagtcctgttcgaaaccaagagccctatgagtttgtctctctggaatggctgcaaaagtggttggatgaatcaacacctaccaaacctattga

SEQ ID NO: 314006 - DNA, 75 bp, Homo sapiens
gcagctacgaacgggaccggaggaagcagcgggatggaggtggtatgcagatcttcgtgaagaccctgaccggca

SEQ ID NO: 314007 - DNA, 100 bp, Homo sapiens
ctttgttccaccagagtcattgcaggaagtggatgagttccacctcattttagagtatcaagcaggatgaatcaactggagaaattacgttttacatgaa

SEQ ID NO: 314008 - DNA, 97 bp, Homo sapiens
aatgatcaacaaaagaagaagtatttggggagaatgactgaggagccattgatgtgtgatatgataccaccaagccaaacgtcatcattaagttgga

SEQ ID NO: 314009 - DNA, 82 bp, Homo sapiens
tgaagtagacattggtggaaacatttaatctttccctagatcattctgacctagttgcagagttgttgaaggagctgtctaa

SEQ ID NO: 314010 - DNA, 50 bp, Homo sapiens
agcccacggacaccacctcaacggatttaagtgccctgtatgctcaaaat

SEQ ID NO: 314011 - DNA, 129 bp, Homo sapiens
ccaccaaagaaagtgacctctgagaaagtgagccagaaacatgctgagcctttgacagttatcttcaggcagagtgagaagctgcagcaatgtctgattttgtggaaagcgaggctgaggagtcagagg

SEQ ID NO: 314012 - DNA, 87 bp, Homo sapiens
ccgctaaacaaagatgcattgacatagcccggcaccttttttgctccctgatggactggttcgcttggttaataaacagataaactg

SEQ ID NO: 314013 - DNA, 100 bp, Homo sapiens
ggaccaagaactcaaactttttgtatctcgacactctgcaagattctctcctgaagtcccaggttgggggccgtcccgctcctaaggcaggaagatggtg

SEQ ID NO: 314014 - DNA, 100 bp, Homo sapiens
cccctctccagctcgaaatcattgtctccagctttaagaccacgacatcgagagctgcctgccagctcgtgaaggagtacatcggccaccgggacggcat

SEQ ID NO: 314015 - DNA, 100 bp, Homo sapiens
ccaccagcctttccagtgactggaataaaaacagagtccgatgaaaggaatgggtctgggaccttaacagggagccatgaattgcagaatttacctcaag

SEQ ID NO: 314016 - DNA, 50 bp, Homo sapiens
gtttctaggaaaggccggacaccagcaggagcgagaacccgagcagcgcc

SEQ ID NO: 314017 - DNA, 83 bp, Homo sapiens
ggaccttggacattcagacttcagaatgaaagtttcctacactactgaggtttaggggcactgtgaagcaaaagccacgcctc

SEQ ID NO: 314018 - DNA, 100 bp, Homo sapiens
atacagagggacacacggaggtctgttttgatgattctgggagatgtcctaaacgatgctatatttgatgaagatcatgatgagatggtgattgtgaagg

SEQ ID NO: 314019 - DNA, 75 bp, Homo sapiens
gccttgaggacctactcacagataggaattgaagggtgtgctggcctccctggcctaccagcgctacaaggctgg

SEQ ID NO: 314020 - DNA, 83 bp, Homo sapiens
tctctcaggagatctggacagctgtccctccactacagaaacctcacagaacacagcaaagactcaaatccagtacctcaagc

SEQ ID NO: 314021 - DNA, 100 bp, Homo sapiens
aggacatcccacctgcagacctcagtgaccaagtcccggacaccgagtctgagaccagaattctcctgcaaggtgcaggtgatggtcctaccagtgtgtc

SEQ ID NO: 314022 - DNA, 87 bp, Homo sapiens
ggagcgtccggagctagctggatcctctaggcaggtattgttgcagcatctggcagtgagactgaggatgaggacagcatggacatt

SEQ ID NO: 314023 - DNA, 100 bp, Homo sapiens
cttattgcctatgctgtattccataatatacagaaatctccagagcattccaaaatatgcccggtgctatccgcccagctgctcctagaccaccatttag

SEQ ID NO: 314024 - DNA, 98 bp, Homo sapiens
caggagacccaaatctgcttgttatctacagaactcaaagttgtcaatacgtagaggttttgtagtgcatccctgagcatgagcacagaatgaagcgg

SEQ ID NO: 314025 - DNA, 80 bp, Homo sapiens
aggaagagagcactgcagccagtgaaaccactgagctgaaagtgcccactacggaaaagccaacagtgactgtgaacttc

SEQ ID NO: 314026 - DNA, 75 bp, Homo sapiens
ggccaagaggcaaaggggaggttacgcagcaaaccatccagaaggagatggtaacctgcacctcaatgtgacggc

SEQ ID NO: 314027 - DNA, 78 bp, Homo sapiens
gttgatatcggtggtaacgacggcctcagcaggcggggaagatgaaaggactgcctgaagttacatttagagactgaa

SEQ ID NO: 314028 - DNA, 48 bp, Homo sapiens
aggacatggagtatgaaagacggtaaaattgcggagttgctctctccg

SEQ ID NO: 314029 - DNA, 100 bp, Homo sapiens
ctttgtccagagcagaacaggatggccatgtcccagtggaaagaggcaaaacctgatgaattaatggattccaaattgagatgcgtatttgaaatgccca

SEQ ID NO: 314030 - DNA, 100 bp, Homo sapiens
ctcctattctgattgctacagatgtggcctccagagggctaggtgcccagtcccctggaaggcagtgaaggggacggagacactgactgaggcgatggga

SEQ ID NO: 314031 - DNA, 75 bp, Homo sapiens
cagcaacatgcatgaagccgaagagtggtaccgctccaagttgcaggtttcagagattagaccgtatatatctaa

SEQ ID NO: 314032 - DNA, 83 bp, Homo sapiens
gcaggcccacatcaaagaggtggtgcggaagatgatcagccaggcacagaagggcgtctctggccgagcctctttttgtggaa

SEQ ID NO: 314033 - DNA, 147 bp, Homo sapiens
gagaaatcccttcctgctaaagtggaacagattctcagggtggagatgtcagcccttcagaaacagtattacaagatgcttctggctggcacacctggcttcccctccatgctcagaactgcttcctactctacatccaggctcctg

SEQ ID NO: 314034 - DNA, 100 bp, Homo sapiens
accactcctttgtggaggtcgccagggtcattgtcgtggatttgcacagtcggctgggcggtgcaatggcggttgaagaagaggatgaacttgaatctgg

SEQ ID NO: 314035 - DNA, 83 bp, Homo sapiens
ggcggaggcagcggagccctgggccatcggctgaaggtgatgtggccgccctcaaccgacgcatccagctcgttgaggaggag

SEQ ID NO: 314036 - DNA, 83 bp, Homo sapiens
attcagaaggaacttgcagaaatcacattggaccctcctcccaactgtagattttgagaagagggggaaaaaggaagtttgtc

SEQ ID NO: 314037 - DNA, 75 bp, Homo sapiens
cgaggaccatgctgggccggagcctccgagaactgagatctgtatctgtggacctgaatgttgatccctcgcttc

SEQ ID NO: 314038 - DNA, 90 bp, Homo sapiens
tggtgctgctcctcacggacgaccaggacgaagtgctcggcggcatggaagagtgctgaaaagattgaggaaactgttagcgatagctcc

SEQ ID NO: 314039 - DNA, 100 bp, Homo sapiens
gcacacctggatccaggataacggaggctggcacccaccaaggctccggatgtgttccccatcatatcagggtgcagacacccaaaggataacagccctg

SEQ ID NO: 314040 - DNA, 101 bp, Homo sapiens
cccttctttcgatcagagatcggcggagaccctcgaagtgcgcaaacttgacactcaccctgaccggcctgatcaaccccgtataaccaaagatgtaattt

SEQ ID NO: 314041 - DNA, 75 bp, Homo sapiens
acgttacgctattcgttgtggtccaaaacagtttacctcttatctaacagactacacttgctgctttgaaggatg

SEQ ID NO: 314042 - DNA, 100 bp, Homo sapiens
atgcattggctgcagctttagcccacatttctggtgcatcaagctttgaaccacgatctttgatcacctctgataaggaaggtggagtgtttacttttgg

SEQ ID NO: 314043 - DNA, 82 bp, Homo sapiens
taattttagggtcctttatatagaagggagagtcttatcgaatgttacttagcctccaacagtattcgagaagcaatggtaa

SEQ ID NO: 314044 - DNA, 82 bp, Homo sapiens
cgacctcgacgtcttgcctgtgtcccacttgttcgcggcctatagttccaaagaactactggttcagattttagctcttccc

SEQ ID NO: 314045 - DNA, 80 bp, Homo sapiens
ggagcctcagttggaagcagccgatccagcctgcggagcctgtggggcagccttgttcgggagtctagcagttctcgctc

SEQ ID NO: 314046 - DNA, 100 bp, Homo sapiens
tcctgctctgagataaaaatgaacaagaaaggcgctagaattgattttaaaggcaatcaggatgagtgaaaaattgatttgcagctgacctgcaaatgga

SEQ ID NO: 314047 - DNA, 87 bp, Homo sapiens
ggcgccaggaccggccgaacgcagaggttgaaatcacaaagattagacacctttttagataggtgttcttcagcaccactgacaaca

SEQ ID NO: 314048 - DNA, 100 bp, Homo sapiens
tggggttccccagagcccgcgcgggctaagtgatggatcttgtactccgtgttgcagattactatttttttacaccatacgtgtatccagccacatggcc

SEQ ID NO: 314049 - DNA, 75 bp, Homo sapiens
gaaagacgctcgtcaccaggacccaaggaaccaaactgataaatttcaaacggaagagagtggcagcatttagaa

SEQ ID NO: 314050 - DNA, 98 bp, Homo sapiens
cgaattgtggcagagtgtaatgctgtccgccaggccctgcaggacctgctttcggagtacatgggcaatcaagccagggctgagcaggaagaagaatt

SEQ ID NO: 314051 - DNA, 74 bp, Homo sapiens
gttggaagtgtgaaagcattgatggaatgtgctttagaagttaaaaagacagcagtgaagaccgtttgggtaga

SEQ ID NO: 314052 - DNA, 83 bp, Homo sapiens
acaagaaaatcaacaggctttcagccttgaggcaacattggatattattgaggctgttcacggaagaccaggatgtagatgag

SEQ ID NO: 314053 - DNA, 49 bp, Homo sapiens
tgactgggcaacatgttattcagacggggtctcactctgtcgcccaggc

SEQ ID NO: 314054 - DNA, 82 bp, Homo sapiens
cgacgactgtgacgaggacgaggaggcagccacggggcccctggacctcctgccccccgaggtctgcagtctcctgaaccca

SEQ ID NO: 314055 - DNA, 100 bp, Homo sapiens
tgtgtaaaggattgcaagagaagttcttcaagaggaaacccaaagtccttgggattccattggccgtgacatccccaaaatgcttgaattatttaaaaat

SEQ ID NO: 314056 - DNA, 98 bp, Homo sapiens
ctggtgggatccccggagcgtcacatcactttccgatcacttcaaagtggtgaatcatttgatgtaaaagacttgactccataatctgcatctgtcct

SEQ ID NO: 314057 - DNA, 90 bp, Homo sapiens
taagaagaggtcccaatcccccactctttccgccctaatggaggtctccagtttcgatgggggctccggaggtggcgcccaggctctgag

SEQ ID NO: 314058 - DNA, 75 bp, Homo sapiens
cggcagacaagcagtctgtgcacaattcttgagtatcagaacaccaccttctttggtggaacctgtatatccatg

SEQ ID NO: 314059 - DNA, 51 bp, Homo sapiens
gggtcgcgccgtggcggagcagagcaggtatcttgagaagccaatggagat

SEQ ID NO: 314060 - DNA, 50 bp, Homo sapiens
cagcctcgattcattcaactctttcaggtcactccatggattcctttggg

SEQ ID NO: 314061 - DNA, 100 bp, Homo sapiens
cccatggcatcttttgttaccactcctgttccaccagactttaccagccaagacaatgcaaactccagtgaacattcccgtgcctgtgctccggctgccc

SEQ ID NO: 314062 - DNA, 100 bp, Homo sapiens
acagaaaatcggtgaagagaggttttgaattcacgcttatggtagtggctgtgatgcagatccatccgccctagcaaaatatgttctggctttggtaaag

SEQ ID NO: 314063 - DNA, 51 bp, Homo sapiens
gcggttcagccctttgatgaccgcagcaggatgcagtgaaaggggattgcc

SEQ ID NO: 314064 - DNA, 51 bp, Homo sapiens
tccttattcttctgatgtggatccagacgcaaacatgcagatctttgtgaa

SEQ ID NO: 314065 - DNA, 80 bp, Homo sapiens
cttgggacccaccgctgccctcagctccgagtccagggcgagcatcaacaacagcaacttgtgattggcggtgaccggat

SEQ ID NO: 314066 - DNA, 100 bp, Homo sapiens
gtccagcgcagtgcccactaaacacgccaagacgttggacctctcgaacaaccagctgagcgagatccctgcagagcttgcggactgccccaagctcaag

SEQ ID NO: 314067 - DNA, 82 bp, Homo sapiens
cagcgccagcggccgagcgggcggcttcctggcctgggcgctccggtggcggcggaggagtccaaaactacttacctggaag

SEQ ID NO: 314068 - DNA, 75 bp, Homo sapiens
tatttttctaggtcctaggcctacttacaagcctccagtctcaaattatccagcccacatttttggattatgtcc

SEQ ID NO: 314069 - DNA, 100 bp, Homo sapiens
tgagccacgtgcatgaaccaaacccacttcgttcaagacaggtgtttaagcgtacaggtttgcagattccgccagcagcacagcaagctctacagatgag

SEQ ID NO: 314070 - DNA, 75 bp, Homo sapiens
ggggctggcctgcggcgcctgggcgctctgaggttgacatcatggacatatgtgagtccatcctggagaggaagc

SEQ ID NO: 314071 - DNA, 95 bp, Homo sapiens
cagatgaggatgtcattaggctaataggacagcacttgaatggcttagggctcaacggggatctgatgagcttctttcttctggcatcattaacg

SEQ ID NO: 314072 - DNA, 88 bp, Homo sapiens
accctctcctgaccctgaagaactgtggcagcggaggaggagaaagagatggacctcccggactcggcctcgagggtcttctgcggcc

SEQ ID NO: 314073 - DNA, 50 bp, Homo sapiens
cggtgattctccaggccttgggtgctcctgacctctgataaagctgcagc

SEQ ID NO: 314074 - DNA, 96 bp, Homo sapiens
gatgagctgcgggacaagctgctggagcgagtgtcagccatcgcttcggaggggaaggctgaggaaagttacgttatgatgatgaagtgaagcggg

SEQ ID NO: 314075 - DNA, 100 bp, Homo sapiens
tcccagaagtggaattgcttggtcaaacggttcaaaccttgtactactcagctgatcacaagctgcttgatgggaacctactagatggacaggctgaggt

SEQ ID NO: 314076 - DNA, 96 bp, Homo sapiens
aagagacatgagaccatagccaaacccccaggccaggagtggtggctcacacctgtaatcccagctctgggaggccaaggccagtggattgcttga

SEQ ID NO: 314077 - DNA, 74 bp, Homo sapiens
ggaaatgtccggcaagatcgagaaagcagttcttcagtgccctactccacagccaaaacacctcacccagtgtt

SEQ ID NO: 314078 - DNA, 51 bp, Homo sapiens
acatcctggagatgtacgagggatatccaggaggtgcagggctacgtgctc

SEQ ID NO: 314079 - DNA, 75 bp, Homo sapiens
gtccacagcatctggggtcttcactacgggatctgatgtgatgtatgcagttgaagttcctggaccccctactgt

SEQ ID NO: 314080 - DNA, 75 bp, Homo sapiens
ggaacaagcaactggctattgaaaagtgcatctgggggaggtgttgtagccattgacaacaaaatagaacaagca

SEQ ID NO: 314081 - DNA, 98 bp, Homo sapiens
ttctttggcttttactaaaaatggacgcctggcaaccaaggtacccagtgtgttgaacaaattcaagagttggttctacgcttctgtgagaagaactg

SEQ ID NO: 314082 - DNA, 100 bp, Homo sapiens
ccctcggcagcgatggcactgaaggactacgcgctagagaagggccttactctgtgcccccctgtgtggaggaggctctgggacagaagcgcaagaggaa

SEQ ID NO: 314083 - DNA, 100 bp, Homo sapiens
gcgtgagaacccgcccatgaagccagatttctcccaggatcttaagattgaaagtgatgttcaagaaccaactgaaccagaggatgaccttgacattatg

SEQ ID NO: 314084 - DNA, 82 bp, Homo sapiens
aaaagtagagaaaatgaaaggagagcaagaatctcatagacatcttcatttgattgtacaccatctcccagcaagacaccag

SEQ ID NO: 314085 - DNA, 74 bp, Homo sapiens
agtccctaggtatccgcactgctcaggggactctgtctactagtgacgatgtcgaagacagggaaaatgaaaag

SEQ ID NO: 314086 - DNA, 83 bp, Homo sapiens
atccccgaggaggaagacgaatcgttaaacatcttaggtcagcaatggctgccatccggaagaaactggtgattgttggtgat

SEQ ID NO: 314087 - DNA, 98 bp, Homo sapiens
ccggcgtgctccttctgctgctctcgctctccggcgcgctccggggcgccctgcgtccggcagaggaggcgagcatcccgctcaggtgatgaggaacc

SEQ ID NO: 314088 - DNA, 100 bp, Homo sapiens
cggcactgggacttctcgatctctggaggcacctgttgcaagtgacagctccttcgagaactcatagaacggaagaccagctccttggatcccaacgatc

SEQ ID NO: 314089 - DNA, 100 bp, Homo sapiens
gaagtctggaggactgagcgaatgtcatatgaaggacccactgcagaagtggtggaggcctcaggagtgcaagtagctgatgaagtatgtcgcatttttt

SEQ ID NO: 314090 - DNA, 95 bp, Homo sapiens
ttggggggaaactaggtcgatggtcggcggcgcccggatgggcagctgaggtattttcaaccaccaggaacttggatacagtgtgctttagaatc

SEQ ID NO: 314091 - DNA, 98 bp, Homo sapiens
ttacgctggccacaacgatgacgtgaagtgatgatcccagactttaaacagcaaatttcagaattggagaaacagaagcaagatcttgaaatccgcct

SEQ ID NO: 314092 - DNA, 90 bp, Homo sapiens
ctctgcgggactctgaggaaaagctcgcaccagtcctcaaccactgaagaagaagcttgatgcttggctgtcagaagacatgaattacgc

SEQ ID NO: 314093 - DNA, 50 bp, Homo sapiens
cctgtcccctacgtcctacatgaggctgaccccgcactacatctacccac

SEQ ID NO: 314094 - DNA, 90 bp, Homo sapiens
gtgcaatcctcacattcaagctgataggctgcgctaccggaatgtcatccagcgagtgattagcttagaccatgctcagcctccaagcag

SEQ ID NO: 314095 - DNA, 100 bp, Homo sapiens
gtagccgttcttcaggcacttgcatccacagtaaacagggccagatggggactgtgcatcttcccttaatggtggaaatattaaaggcattgaaggacat

SEQ ID NO: 314096 - DNA, 75 bp, Homo sapiens
gtggaggcgccgctctagcggccgggactctgaactatggcgacactcgcctatggggacatgaaccacgagtgg

SEQ ID NO: 314097 - DNA, 101 bp, Homo sapiens
ttgtgcaggacaccgacatggaacagggactcactgggggaatttagataatgggctgtgtgcaatgtaaggataaagaagcaacaaaactgacggaggag

SEQ ID NO: 314098 - DNA, 75 bp, Homo sapiens
atggaaatctgctctgagcctgtggcagcctcccctgcaccggcagggttgtgagtcccggcccagcccctccac

SEQ ID NO: 314099 - DNA, 50 bp, Homo sapiens
cagctcactgcaacctcctcctctcgggttcaagcaattctcctgcctca

SEQ ID NO: 314100 - DNA, 90 bp, Homo sapiens
gctcgataaatcagacagaacagttaatcctcaatttaagcctgatctaacccctagaaacagagctgtgttaaaagtgaccactcgtgc

SEQ ID NO: 314101 - DNA, 100 bp, Homo sapiens
cttgacctcaggaccctacccagggttctagaaatccaggcaggcatctatcttgaagatacttggtgcttgaaaaactgaagaaggaagacgctgaccg

SEQ ID NO: 314102 - DNA, 48 bp, Homo sapiens
cttcccgtctcagaggcaaactgtgccgtgagcgatgtggagatgcag

SEQ ID NO: 314103 - DNA, 100 bp, Homo sapiens
ccagaagctggagatgatgctggagcagaagttagcgcttctctctcggtaaatgaattggtggatgccagagatgtcggccttggtgcttggtttgaag

SEQ ID NO: 314104 - DNA, 100 bp, Homo sapiens
cttgcagtcccccggagcctggctcccggctcgggccgcaccgccagggactggggtgagcggcccaggtggtcttcaagctgacagagaagctgacgga

SEQ ID NO: 314105 - DNA, 100 bp, Homo sapiens
gctcttgcgtatgtggatggcaaatgctgtaaggaatgcaaatatctggcaggggatcgacattgagaccaagatgcacgtccgcttccttaacatggaa

SEQ ID NO: 314106 - DNA, 100 bp, Homo sapiens
ggggagaccccgacgtggagtgccgagggctattgagtggccagacttccccaacaaatgccaaattggagaaactggactctcagcaggtgttgcagct

SEQ ID NO: 314107 - DNA, 83 bp, Homo sapiens
aattcaacaacctcttcaagaaaaattgaatctacctgttactcgtattttggacaatcttatggagatgaagtcaaaccccg

SEQ ID NO: 314108 - DNA, 100 bp, Homo sapiens
ccggctactgccgcttcagttctcccggtgtggccacgagtcggcgactgcatttgcctccagacttgtcagacacagtgagccgctcaagcaaaatgga

SEQ ID NO: 314109 - DNA, 74 bp, Homo sapiens
gaattaccttggagaggctgtgagccacaatgcatcgctggaagtagccagagatatgtcagtattgaattctc

SEQ ID NO: 314110 - DNA, 80 bp, Homo sapiens
ctttcagttcttaggctcagcgtcagttacctgagagccaagagcttctttgatggaatgaaatggaaaggcattttctg

SEQ ID NO: 314111 - DNA, 89 bp, Homo sapiens
ccacgatttggatcaccgtggtgtgaataactcttacatacagcggttatcctacctacaaagaaaaagtaaagaaaaggcctggaggc

SEQ ID NO: 314112 - DNA, 74 bp, Homo sapiens
ggaaggcttcaaaggctgtcgcaaggaggaagttccagggtcacccccgagaggacaacaggcatctggaagtg

SEQ ID NO: 314113 - DNA, 100 bp, Homo sapiens
ctcgaacgcgaggccaacagccccgattcactgcgtgctgtcctcacttgttctacaatgagtgccaaatctgctatcagcaaggaaatttttgcacctc

SEQ ID NO: 314114 - DNA, 100 bp, Homo sapiens
gtgcctatgccttccaaacgcaggtccctggtcgtgcagacctcgatggacgcctacacccctccaggtatatgtctcgagtccacggtatgcaccctaa

SEQ ID NO: 314115 - DNA, 100 bp, Homo sapiens
gaggcggtgaagtgccatcttcggctaggtcgtcacaggctccggctcatggcatcaagtggcatccatcataagacaccattcgcttttcacccaagat

SEQ ID NO: 314116 - DNA, 100 bp, Homo sapiens
cttctccctctccgagtgctgctcctgtcattgtggccatggacggctgaaaggttccctgagtcgaggtgactggtacaagacaaaggagatcctgctg

SEQ ID NO: 314117 - DNA, 90 bp, Homo sapiens
ccgttgctttactttttgcttcaccgacatagtcattatgccgaagagaaagtctgtgatcaaaacagggcgactgctaatcagtcacga

SEQ ID NO: 314118 - DNA, 100 bp, Homo sapiens
cgggaaccgagtcggcccagggtcccccgggcccggcagcgtcgctggagctgtggctcagcgactttctcctgctgctgtgcgcctcccagcagtggca

SEQ ID NO: 314119 - DNA, 105 bp, Homo sapiens
tgaagaaaagtagaaggaaaaacagaacgttgcaaactctggaaaaaaacttgggttctcagaggcactgtgactgacttccctggatttgatgagcgggctgat

SEQ ID NO: 314120 - DNA, 101 bp, Homo sapiens
ctctggagggattctggcatcagggaggctttcagccggagaagcgagtttcagctgtgaaaatgcctcgtgtaaaagcagctcaagctggaagacagagc

SEQ ID NO: 314121 - DNA, 75 bp, Homo sapiens
gcgccctgggagccctcacgagtcccgattagatcctgtgctgaaagagaaaccaagaaaaaagatgacattcca

SEQ ID NO: 314122 - DNA, 75 bp, Homo sapiens
gctattgcacaccttatatggaagggagtctactcttcatcttgtgttgagacttcgtggtggtgctaagaaaag

SEQ ID NO: 314123 - DNA, 100 bp, Homo sapiens
cgacgcctgcagcaaggagaccaggaaggggtgagacaaggaagaggtgcccaaatgtgagtctgcaaaagctgccagaacagtggctatggagtgtttt

SEQ ID NO: 314124 - DNA, 50 bp, Homo sapiens
aatccgagaacctgggccaaggcgacaagatggctctgagtaaatcaatg

SEQ ID NO: 314125 - DNA, 101 bp, Homo sapiens
gcttgtcttcctgagagtgattggaggtctccttgccttggctgcggtttccaacctagatgaggaaagccgatggacagtccactacactgccccgtggc

SEQ ID NO: 314126 - DNA, 50 bp, Homo sapiens
cgtggagatatggcgcaactgcggcgcagctgtaggtaaaacttgcctac

SEQ ID NO: 314127 - DNA, 90 bp, Homo sapiens
ggtgatatgatctgtcctgaatgtggcttggttgtagaatatgacagatacctagcatctagcaaaataatggcagctgcttaccttgac

SEQ ID NO: 314128 - DNA, 96 bp, Homo sapiens
ggggagggtggttaccgctgaggagctgcagtctctgtcaaggtggcagctgccaacaagaagcattagaacaaaccatgctgggttaataaattg

SEQ ID NO: 314129 - DNA, 82 bp, Homo sapiens
cgccaagatcccagtcacaattatcaccgggtatttaggttctccttactatgacaatgtccgccccctctcttaccctgat

SEQ ID NO: 314130 - DNA, 100 bp, Homo sapiens
cctgaatcgagcagagaaacttactcactggcctacgcctgcttgaagttagtgaattactccttcttcttctggctccccttttatctgagtaacaact

SEQ ID NO: 314131 - DNA, 75 bp, Homo sapiens
aatgatgaagacatccggaagaagtgtttcctgaggttataggcgggtgtttgaggagtacatgcgggttattag

SEQ ID NO: 314132 - DNA, 100 bp, Homo sapiens
tggaagaaggtgaagtgaaggaccccagtgacaggaaggtgaggcctcgtcccacctgccggttcttcatgaaagaatttcgctaaggagtttgtgatca

SEQ ID NO: 314133 - DNA, 100 bp, Homo sapiens
aaggctctgctagaccaagaagggaaccgacggcacagcagcctaatcgacatagacagcgtagcccacacgtgtatccctgagaacaacggaggcgcgg

SEQ ID NO: 314134 - DNA, 100 bp, Homo sapiens
ctgattcctgccttgtcttctccactgttcctggaggaatccgagaagagcagagcggagggagccccagacacgttggaatcgaagcctcttaaaatgg

SEQ ID NO: 314135 - DNA, 100 bp, Homo sapiens
gcagaaaccccgttgacaaggcactgctttttcatgacgtacctggagtagaacagaaaaattattatgtctgtgttcccttgggactcattggaaattg

SEQ ID NO: 314136 - DNA, 80 bp, Homo sapiens
tgctcctggctggtgcggacacaacccaataggtgttttggggaacgagtttagtatattaaaatcaccagggtctgttg

SEQ ID NO: 314137 - DNA, 90 bp, Homo sapiens
ggcgaccgagacggtggagctccataagctaaaggtcaagtctggcaccatctttgacaacttcctcatcaccaacgatgaggcatacgc

SEQ ID NO: 314138 - DNA, 50 bp, Homo sapiens
gcgaagtggagagcgccagagtaatgggcttttatcttgagaacatggtg

SEQ ID NO: 314139 - DNA, 100 bp, Homo sapiens
agaggagaccgaaaagtggatggaggaggcgatgcacatgtgtatgtggtagaagaccaaagaagagatgagctaggaccatccacctgcctcacagcct

SEQ ID NO: 314140 - DNA, 75 bp, Homo sapiens
gaactttgcacttacgtcctccctggttgcattaaaatcctcccctactgaaagaaacggaggccaggataactg

SEQ ID NO: 314141 - DNA, 88 bp, Homo sapiens
gaagctggccgagcaggctgagcgatacgacgattagtgatgatgaaccaggttatgaccttgatttattttgcatacctaatcatta

SEQ ID NO: 314142 - DNA, 90 bp, Homo sapiens
gcagaggaaagagctgtctgcgaatgggcaagagagaaggtcggattgtttgtgctgaacgaactgtcctcttgcttcagaagccccttt

SEQ ID NO: 314143 - DNA, 100 bp, Homo sapiens
ttgtgtcctggaagagtcgtaccaagtacaccattacaccagtgaagatgaggaagtctgggggccgagaccacacagaggtacttggaaggctccatcg

SEQ ID NO: 314144 - DNA, 90 bp, Homo sapiens
gggaaacagcaagcggcgtggacgaccgttgctgagctggtgtggaacgtctgtgatcaggtttaagtttttgaaactgaagtaggccta

SEQ ID NO: 314145 - DNA, 97 bp, Homo sapiens
aagttgaaaaacgcttttcacgtcacctggagagatgcacagtattctaccttgtaaatactgttatttgtatatactgtaaatgatgacatcggtg

SEQ ID NO: 314146 - DNA, 75 bp, Homo sapiens
gcgccgtgtggcacgacacaaaaatcaggaattacgtatggaaattgcaaaacaagaattaatcgctcatgcccg

SEQ ID NO: 314147 - DNA, 100 bp, Homo sapiens
cccaccttcagtcctggctctgacaagccctccagacaccattcgcttttcacccaagatgatttgatgtcttataaaactctgatgaaccatgatggct

SEQ ID NO: 314148 - DNA, 100 bp, Homo sapiens
ggacacctaaaacccacagtcctccagcctgcttagacgcctggtgactctcatttcgcagcaggccacgctgctggcctccaatgaagcctttaaaaag

SEQ ID NO: 314149 - DNA, 75 bp, Homo sapiens
cagaaattatagaagatttggccttctactctagtacagtagtatctctattgtatctgatgaaaaggataccac

SEQ ID NO: 314150 - DNA, 75 bp, Homo sapiens
tgttaagagtggacaggttaagggactcccaggaatatcaggtgctggagaatctggtaaaagcaccattgtgaa

SEQ ID NO: 314151 - DNA, 100 bp, Homo sapiens
agtgactgtttccaaaacagcaagcatagggagagccgccggaagtattgacggaaagcttgaattacctacatggtttcttgagtacaggcgatcaggc

SEQ ID NO: 314152 - DNA, 83 bp, Homo sapiens
ttttcggatcatgtctggtggctccgcggattataacagtctgctccatctggacacaagcatctgacggtagaagagttatt

SEQ ID NO: 314153 - DNA, 99 bp, Homo sapiens
tggttctttgtgtaggttgttcaacagtgttgtgccagcctacaggaggaaaggccagactcacagaagagaacggagaccaacctgggctgaagaaag

SEQ ID NO: 314154 - DNA, 100 bp, Homo sapiens
ccccggccgaggtggcggcggctcctcaggccagaagcggactcctagaagaggggagcagcaaggatggaatgacagccgtgggccggaggggatgctc

SEQ ID NO: 314155 - DNA, 100 bp, Homo sapiens
tctttttgttcaagataaagtgattttttgcctttgttgattaactggacaaattcaggttttcaaatggaacattttgatgcatcacttagtacctatt

SEQ ID NO: 314156 - DNA, 74 bp, Homo sapiens
tcgacagcatctcgggtaacaaccgagcccctcctcgcagcgtgctggagaatctggtaaaagcaccattgtga

SEQ ID NO: 314157 - DNA, 90 bp, Homo sapiens
gggggcaggaaattctgtattgctggtcagcaacctcaacccagaggtggaaacttcagaacattttcgtatagatggtccagtaatttc

SEQ ID NO: 314158 - DNA, 95 bp, Homo sapiens
cccctgctggccatggagtactgccaaggaggagatctccggaagatgttcagaaaatcattggtaaagatgtttgaagataaaggattagactg

SEQ ID NO: 314159 - DNA, 100 bp, Homo sapiens
cggaggctgcacctcgcccccagggcgtccctgctggccgcgctgctgtttgctgtccatcctgtgcacaccgagtgtgaatgtgttccagaagatctag

SEQ ID NO: 314160 - DNA, 101 bp, Homo sapiens
ctcttcaagacagaattgatcgccttgctgtcaaagtcacccagctggattcaacagtggaagaggacacgttggtcgtcattgcctccgagcccacttta

SEQ ID NO: 314161 - DNA, 50 bp, Homo sapiens
gaatttttgactggagactatagtagacttgtgtatgcggatacctgctt

SEQ ID NO: 314162 - DNA, 90 bp, Homo sapiens
gtggtgcagaacctcatcttcagatacttacaaaatactccctgagaaatgtttcctcagccggtcatggcccccgctcttctccagctg

SEQ ID NO: 314163 - DNA, 98 bp, Homo sapiens
cagctctccgtgttccggtgtggtggtggaggtggatacagcagtcggagaacatctggcagagacaaatacggaccacctgttcgtacagaatacag

SEQ ID NO: 314164 - DNA, 90 bp, Homo sapiens
cgggcctgcaccatgagcgtcccggccttcatcgacatcagtgaagaagatcagggaaactgaacagccaagactcctataacaatttta

SEQ ID NO: 314165 - DNA, 100 bp, Homo sapiens
ctggcccaaacattcatgaagaagacaccaagtcagaagagacttcctcctttgcatgatcctgtaaggacggaagaggctggagtacaatggcgtgatc

SEQ ID NO: 314166 - DNA, 76 bp, Homo sapiens
tgcgcgcctccatctgggccatggatggagggccaagatcagtcagggaaccaaggtcccggaagaaaagacgacc

SEQ ID NO: 314167 - DNA, 90 bp, Homo sapiens
cagactaatcttttggcttatgatgtctacaataattcggatttgttctacagagaggccgctacctgtctgaggaacccgagccctacc

SEQ ID NO: 314168 - DNA, 87 bp, Homo sapiens
ctaagcagaataaaaaaaattcgtcatgctttttacttggttctctgacagcagacgaagagattgggtctctccacattgccccgg

SEQ ID NO: 314169 - DNA, 124 bp, Homo sapiens
ctgttgtaccccactgctggggtggtggttccaatgagacagggcacaccaaactccatctgagtccggcagcgtcttctcttgagggagcaatttggagaagagctggaacccagactcgcgc

SEQ ID NO: 314170 - DNA, 98 bp, Homo sapiens
cattgaccggatacttacagatgtaaatgttgatggatgcatctggaccctcagatagtgatatgccaagtcggacacgacctaagagcccaagaaaa

SEQ ID NO: 314171 - DNA, 101 bp, Homo sapiens
cactgttggcagccaccagcacagctgggagccaggacatcaagcagattggctggctaactgagcagctgccctcccctcatggttgtggccaccacaag

SEQ ID NO: 314172 - DNA, 100 bp, Homo sapiens
gtgactccaaaacctcaggaaggaaaccctagacccagagtcttccgcctccctgaggaccaagctgtcattaacagttctgaatcagccaggggccccc

SEQ ID NO: 314173 - DNA, 80 bp, Homo sapiens
gcagccatgaagccaaccgtcccgagattggcggcagtaagcacacaatgaatgatcacctgcatgtcggcagccacgct

SEQ ID NO: 314174 - DNA, 98 bp, Homo sapiens
aggtcttatacagccaggggatattattcggttgaccagagggactgccccattgcctgggccaacctcatgctgtttgactacaaggaccagcttaa

SEQ ID NO: 314175 - DNA, 50 bp, Homo sapiens
cttcgagtcctttattgtggagaaacgggctgtaaaggcagaaaaccacg

SEQ ID NO: 314176 - DNA, 75 bp, Homo sapiens
gaggagccatgaggcagctcccctacttcatccggccagctgtccccaagagagacttccaccgctgtcagaagg

SEQ ID NO: 314177 - DNA, 101 bp, Homo sapiens
attctatgaccaggcctctccggacaagaggactgaagcagatggcaactctgatcccaactctgaccagagtctcactgtcgcccaggctgcagtgcagt

SEQ ID NO: 314178 - DNA, 75 bp, Homo sapiens
atcatgatccaccagccctcaggaggcgcccgggcatcatgacggtgatgtcagctctgtcggtggccccctcca

SEQ ID NO: 314179 - DNA, 100 bp, Homo sapiens
ggatttctcaaggactgtccaagtgggaggctaaatctcgaggaatttcagcagctctatgtgaagaataactgaagtgaagtgatggactccgatttgg

SEQ ID NO: 314180 - DNA, 100 bp, Homo sapiens
actgctaagaagataccaccagctggtagcagtgtttgatgagcaggatccacatcacggaggtgatggcaccagtgccagttccacgggtacccagagc

SEQ ID NO: 314181 - DNA, 123 bp, Homo sapiens
ggccatggccgaggcgtcgccgcatcccggacggtacttctgccactgctgctccgtggagatcgtcccgcgcctgccgtaagactttgaccccgacgcaggcttcagtgattgccgcggatc

SEQ ID NO: 314182 - DNA, 100 bp, Homo sapiens
ggatggagaagaccagccaaagcaagtttatgttgataagttggctgaattaaaagctatctatgtgcctgctgatgacttgactgaccctgcccctgct

SEQ ID NO: 314183 - DNA, 51 bp, Homo sapiens
gaccgggcgagcagagtaagaagcaggcatccaaagcctctgggatgtgtt

SEQ ID NO: 314184 - DNA, 75 bp, Homo sapiens
gcaaaacttcggacatagaggccaaccaacctttggaggagccaagggagaacccaagacagagaatagtggccc

SEQ ID NO: 314185 - DNA, 101 bp, Homo sapiens
agtagctatggcagtggcagaagattttaattagaggaagtgctcttcagaaaaggttgcgtgatagagaaaaggaaatggaagcagatgaacgagatagg

SEQ ID NO: 314186 - DNA, 100 bp, Homo sapiens
gcggcctcaccatacaggaacagggcagacgttagcgtgagtgatcactctcaatcccgggtatgggctacgtgagttcgtggtgattgcccctgctgca

SEQ ID NO: 314187 - DNA, 100 bp, Homo sapiens
gggatgcttcccccagggtcacttctcaggaaggccccagaaaaccaggaggaagaggaggagcgtgcagaactgaatcagtcggaggaacctgaggcag

SEQ ID NO: 314188 - DNA, 101 bp, Homo sapiens
gacgttattctgatctcaccaccctggtggcctttccctccagctctgtctatcctaccaagacaatattgactcacgcctactccagagtggtcctgaga

SEQ ID NO: 314189 - DNA, 125 bp, Homo sapiens
aactgatgagcaatcactttggattgaagatactacaaaatcagtttatcaagtttgaagatgccgcatttggattggatgaattccaaattctgcttgcttgctttttaatattgatatgctta

SEQ ID NO: 314190 - DNA, 96 bp, Homo sapiens
agagagccttgttggacactgaagaagggacggggatttctcctcctaatctgggcctcttgtcatggtaaaataccatgaagattttgaaaaaac

SEQ ID NO: 314191 - DNA, 90 bp, Homo sapiens
atcgactggaccaagatcgagcccagcgtcaacttcctcaagtcgcccaaaggaataaaacatcagcttcgagttcacttgtcttttgga

SEQ ID NO: 314192 - DNA, 100 bp, Homo sapiens
cggcaacgaccgcaaccgcatcgtgctgcctttcagtttcgcctggccggatgagaacaagttgagcagtgccaacggccatgaagaacgtagcaaaaag

SEQ ID NO: 314193 - DNA, 80 bp, Homo sapiens
cgccccctccggcgtgttcatgcccccggggctgaccctgggcaagccccttggggagggctgcttcggccaggtggtca

SEQ ID NO: 314194 - DNA, 74 bp, Homo sapiens
ccctctgagactggagtgagagggtcttctgtgtggcaaaggagcagagaactttgacaagttcttcacacgag

SEQ ID NO: 314195 - DNA, 50 bp, Homo sapiens
gttctcgtggagtcagacaatgaggacactgtcttcagccttttcttcaa

SEQ ID NO: 314196 - DNA, 80 bp, Homo sapiens
gttctctcgatcagggcatacatctttcttcgacaaaggccagatgaaaactcgctggatttttcctcctgtatgttacg

SEQ ID NO: 314197 - DNA, 101 bp, Homo sapiens
tgaaccaagacttacccgaagttgccgcggggccttccgatcccctgaagaagaactttggcatcagctacctgggccgggaccggctaggacaggaagtt

SEQ ID NO: 314198 - DNA, 100 bp, Homo sapiens
ggacctgctggcgcaggacgccgacatcgtgtgccgctgccaggaagaaatgcagagtaacgtggaagtggtccacacctaccgccagcacattgtgaat

SEQ ID NO: 314199 - DNA, 82 bp, Homo sapiens
atccgcaaaggctttctcgcttgtcaccttgccatgtggaagaaactgggtttggtgcacctcgatttggaggaagtagggc

SEQ ID NO: 314200 - DNA, 75 bp, Homo sapiens
gacggctgcccttcaagtaccaagaatctcgatgctggcctggagcagaaactgagctggaccactggagcctcg

SEQ ID NO: 314201 - DNA, 75 bp, Homo sapiens
ccaaaaatggagaaatttttggggtttcctggaagcaccttcatgtcatcctatcaaaaccataaatgagaaact

SEQ ID NO: 314202 - DNA, 82 bp, Homo sapiens
tctagatgactttatccagaatgaccgagcagcagagtgtaacatcgtagtaactcagaaatgcactcggtgatggaaagag

SEQ ID NO: 314203 - DNA, 98 bp, Homo sapiens
tattaacacctcttgccactcagctgacatatgaaggactcattgatgaaatttatggcattcagaacagtgctttcgtgctacagaggcgtagttga

SEQ ID NO: 314204 - DNA, 74 bp, Homo sapiens
acaatagtgagctggttagtgaagcactattcctgatcagagaactccagttgcttcaacacacagtatcagta

SEQ ID NO: 314205 - DNA, 75 bp, Homo sapiens
atttctggtcgacctgttgtgttgtggtgccatcctcttcccagtggtgtgattcctcttctcctgtaaatgacc

SEQ ID NO: 314206 - DNA, 100 bp, Homo sapiens
ccgacatgttcacgcacgggatccagagcgccgcgcacttcgtcatgttcttcgcgccctgaggctgaggggatctggcggtggagcgctaggatcagac

SEQ ID NO: 314207 - DNA, 75 bp, Homo sapiens
cacggatcggattcctcagctacgaggaggcgctgaggagagatgccatggacaatattaccaggcagaaccaat

SEQ ID NO: 314208 - DNA, 50 bp, Homo sapiens
ggaaggagatgctgcagcgcgcggaacccccaaagacacacgtgacccac

SEQ ID NO: 314209 - DNA, 90 bp, Homo sapiens
gcctcgtgcagctcttctggtctccggcgcccgcccctcagacgtaatgtgtgatgatgatcagatgtctaacgataaggagcggtttgc

SEQ ID NO: 314210 - DNA, 98 bp, Homo sapiens
gaccagccagtggagctgctgaatcctgcccgcgtgaaccacatgcccagcacgggcctccggtgtggctgtctctgatggtgtcatcaaggtgttca

SEQ ID NO: 314211 - DNA, 82 bp, Homo sapiens
tgcctgcgtctacagtaagaagaaacgcttcgttaagggactcaggcagtacgggaagaacttcttcagaattagaaaggag

SEQ ID NO: 314212 - DNA, 100 bp, Homo sapiens
gtctgtggcctattggctgaagaagctggagagcagacgaggtgctattcgagtgctagtggtggaacgggaccacacgtttaattggttggggtcagat

SEQ ID NO: 314213 - DNA, 75 bp, Homo sapiens
agcttttggagtccctgttcgtacttacacccatgagcgtcagcttttctttcgcaaaaagctgcttcactcatc

SEQ ID NO: 314214 - DNA, 101 bp, Homo sapiens
cggaagaggaccggaggctctggatggaagccatggatggccgggaacctgtgagacatggaatccattaaaattgcattatcagttaagaaatgtacggg

SEQ ID NO: 314215 - DNA, 94 bp, Homo sapiens
gcgaatggcacgagctggagggagaatttcaagaactgcagctgtcccccgaggcagcctatgatgtgctgagcgtcgccgacatgtacctgct

SEQ ID NO: 314216 - DNA, 101 bp, Homo sapiens
atccattggtaaattgatcaggatttttggcctaccctccaaagaaaagtctcccatcaaaggacgtgcacagccttatgatcccaatttttacgatgaaa

SEQ ID NO: 314217 - DNA, 104 bp, Homo sapiens
accatgatggactcattgaaaatggaggctatgcagaccagacctatgatggatgggtgaccacaggccccagcctgtttgcccagtgccacgcactggtgccc

SEQ ID NO: 314218 - DNA, 83 bp, Homo sapiens
atgcgtgttcgcgggtgtgtgctgcgttcacaggtgtttctgcggcaggttgtgaccgagattcccgacgagagagactgagg

SEQ ID NO: 314219 - DNA, 100 bp, Homo sapiens
gcatggaaatggagggcatcttcaaccacaaagcttggtgtgtgccttgcctagtttcacttgatactcttcaggaattatgtagaaaagaaaagctcac

SEQ ID NO: 314220 - DNA, 73 bp, Homo sapiens
ctgaaccccaaggccaaccgcgagaagatgacccaggctggatcaagacctttgacaagtactacacagagca

SEQ ID NO: 314221 - DNA, 100 bp, Homo sapiens
cgacgatcgggcctacagcagcttcggcggcggcagaggatgacttcaaacctgcttctattgacacttcttctgaaggataccttgaggttggtgaagg

SEQ ID NO: 314222 - DNA, 100 bp, Homo sapiens
ccgaggcctctataaacaaggacaacattggctagagaaaaaagatgttgtggggagagccaggggggctccaaatgtgaagtacaagtgaaaaatggag

SEQ ID NO: 314223 - DNA, 139 bp, Homo sapiens
ggggaagtggcggcgccggcagcggacagctcggacagcgcccagggccggagcccgagcccttggagatgtaaggaggccaccagccaagaaatgctgtcagtgcctggaagctggaaaggcaatgaaatggattttc

SEQ ID NO: 314224 - DNA, 82 bp, Homo sapiens
gttccgcggcccaggggcgccgggtttggtggcacagcgagccccctttctctagcgggggagaagcgagcggacatccagc

SEQ ID NO: 314225 - DNA, 75 bp, Homo sapiens
ctcacacagtggcttctgctcaccaacagatgaagacagatgcaccaacgagtcagtactgctccccagcctaaa

SEQ ID NO: 314226 - DNA, 87 bp, Homo sapiens
tgatagaaacaactttagatatggatcagagttacatccatatgggagaatagtctccagatcactacaatttctagctttgtagga

SEQ ID NO: 314227 - DNA, 113 bp, Homo sapiens
ggagacgagaagcctgaaaagtcgcagcgagctggagccgccggaggtgctggagaatctggtaaaagcaccattgtgaagcagatgaggatcctgcatgttaatgggtttaa

SEQ ID NO: 314228 - DNA, 87 bp, Homo sapiens
ggagctaaagcagcgtgcgttcagccctgggggtcgagctgtgcagttttagcgggtacaagatctaccccggacacgggaggcgct

SEQ ID NO: 314229 - DNA, 90 bp, Homo sapiens
gcatctttatgataattggatcaaagatgctggtcattgctagaatcgtggatggaagcagattcactgagttcaaagccttttatggag

SEQ ID NO: 314230 - DNA, 75 bp, Homo sapiens
ctggaaactgacaggaaaggatgacaagttgggagtcacagatggcttgttcaatcagtatatcagtcaacagga

SEQ ID NO: 314231 - DNA, 96 bp, Homo sapiens
tgcgttatgcccagacgcagctggataagctgaagaaaaccaacgtctttaatgcaaccttccacatctgattctggcatccacgtgagcccagtg

SEQ ID NO: 314232 - DNA, 100 bp, Homo sapiens
aagagaaaaagcccaggcataaaatcatctccatattctcaggcacagagaaaggtgaaaggtgtagcagtcactcggcctacacccacagcatcgacct

SEQ ID NO: 314233 - DNA, 98 bp, Homo sapiens
atgtcattataccttcacccagcatttcatccctcgtcgaaaggattggattggcatctttagaaaattgcttcccaagaagaaggtgctactataca

SEQ ID NO: 314234 - DNA, 82 bp, Homo sapiens
ccccgctctgctgtgggcgctgctggcgctctggctgtgctgcgcgacccccgcgcatggctgaccaactgactgaagagca

SEQ ID NO: 314235 - DNA, 100 bp, Homo sapiens
gagagcaagaccatcatgctgcgcggccttcccatcaccatcacagagagcgatgaattgaatgatctggcacgggaccctccagcacagtgttcagcag

SEQ ID NO: 314236 - DNA, 75 bp, Homo sapiens
gctgccccgcaggcaccttcgggccctcctgccttcgctagtcttgaattcctgacctcaggtgatcctcccgcg

SEQ ID NO: 314237 - DNA, 74 bp, Homo sapiens
ccgaggcgcaggtggcgctgggaccctgatgcttggtgtgacctgagtaaatttgacctccctgaggaaccatc

SEQ ID NO: 314238 - DNA, 83 bp, Homo sapiens
acgatggagagcagggaaatggactgctatctccgtcgcctcaaacaggagctggatgtctcagtggtacgaacttcagcagc

SEQ ID NO: 314239 - DNA, 100 bp, Homo sapiens
cagaacctgagcaccttttgcctgttgctgctatacctcatcggggcggtgattgccggatatggatgctaacaggcgataaactcgagacagctacctg

SEQ ID NO: 314240 - DNA, 90 bp, Homo sapiens
cgaggctgatgacaccatggagccatgcaatggcagattgtccttctagcatacagctgctttgtgaccatggggcctctgtgaatgcca

SEQ ID NO: 314241 - DNA, 73 bp, Homo sapiens
aaacaacaactcttagaatataaatcaatggttgatgcaacttccaaactacaaaaactttaaaggcacgatt

SEQ ID NO: 314242 - DNA, 100 bp, Homo sapiens
acccaccaggcatggatgaccaactttgggagaaggtaaagcttgatgctgaaagggaaaaactagagaggcttcaggagctttactccgagcagaagac

SEQ ID NO: 314243 - DNA, 101 bp, Homo sapiens
ggcaaaacgggatgctgaggcccacccctggctttctgactatgatgaccttacgtcagctacctatgataagggcggcgactggcggcgcgatggacctg

SEQ ID NO: 314244 - DNA, 51 bp, Homo sapiens
cctccacttagtgagcggaagaatgaactgccattggatgtccagaatccc

SEQ ID NO: 314245 - DNA, 131 bp, Homo sapiens
gcaagagtgcccgctacaaccgcttctccggggggcccagcaatcttcccaccccagacgtcaccacagggaaaattgacgtcctttgtggaattggaataaaaaaggttgcttgtggaactcagttttct

SEQ ID NO: 314246 - DNA, 126 bp, Homo sapiens
taagtaactggtcgaggttgtatcagtaagaagggagcacggaacagattcaagctcagagctccactggttcaacagcctctcctccagtttcgaccccagtcacaggacacaagagaatggtca

SEQ ID NO: 314247 - DNA, 100 bp, Homo sapiens
gagatgtttggatggagctttgtctttgaggactttgtctctgatgagctgagaaacaaagccacccagccaatgaagcgtctgcttctgcgctttgcct

SEQ ID NO: 314248 - DNA, 100 bp, Homo sapiens
tgaatttgtcacattctcctgccctggcgctgacaagggtccagcctccgatgttacagcaactccatgtaaagatgatggtgatgcaaggatttcagcc

SEQ ID NO: 314249 - DNA, 72 bp, Homo sapiens
cagctgctggaagtcgaacatggcacgaaagagatcaaggggggacacagcgattgccacgcgccattggaa

SEQ ID NO: 314250 - DNA, 103 bp, Homo sapiens
ccgggacccggttccccggcccacagtgggggtgtgcaaacccgagagaactggtaacaaatgtggcaattattttggatctatcacctgtcatcataactgg

SEQ ID NO: 314251 - DNA, 101 bp, Homo sapiens
gggccgctgaataagcttccaaaatgatgtcatccgtccttggctcaggatttggagagcttgcaccaccaaaaatggcaaacatcaccagctcccagatt

SEQ ID NO: 314252 - DNA, 75 bp, Homo sapiens
cagccagtctctttcatcatcaagcagacatactcaagaagcagaagtgtcagaacactccacaggtataaccca

SEQ ID NO: 314253 - DNA, 82 bp, Homo sapiens
gtgatggtggagtaggaggcaggtctccgcgggggatatgagactttctactcggaatatcctgagtgttgcgtggatgtaa

SEQ ID NO: 314254 - DNA, 51 bp, Homo sapiens
ggaccatgtgatgcacctgctccagatttttgggaacgttacagatgctac

SEQ ID NO: 314255 - DNA, 90 bp, Homo sapiens
tgtagcgaggaggaacgcgctaaggcaaagcacctgagcctgatccagggatgtctggatggccggatggcagaatggagacctccaccc

SEQ ID NO: 314256 - DNA, 75 bp, Homo sapiens
aggcaggtggctcccaaattaccggaaaggactgttcttgaggtattcagcacatcaggtccacccatctggccg

SEQ ID NO: 314257 - DNA, 88 bp, Homo sapiens
ccaggcttctatccaggtgcaagccctacagaatttgggacctacgggcttccgttacaagatgaggtctgtgtatgctcacttcccc

SEQ ID NO: 314258 - DNA, 51 bp, Homo sapiens
cttcatagactcccaaagggaaattcttgcctgaagaataagtagtgaaag

SEQ ID NO: 314259 - DNA, 99 bp, Homo sapiens
gtcttcaagctcactgccgacttcagggaggatccggacccccgcaaggtcaacctgggagtgggagctttatcttcaagccaggatgaagggagactg

SEQ ID NO: 314260 - DNA, 100 bp, Homo sapiens
tccagaattcatacaaagagtctggtcaattcgggagaggatgtcctcgtgttctacaacgacagagcctctttccagactctgatccagatgatgcggt

SEQ ID NO: 314261 - DNA, 100 bp, Homo sapiens
cgccgggcgggagaagagcggagcagtggtcggagatgtggcgaccggtgctggagaatctggtaaaagcaccattgtgaagcagatgaggatcctgcat

SEQ ID NO: 314262 - DNA, 75 bp, Homo sapiens
tgtaacaagagcatcacagccaaggaagccctcatctgcccaatcaatgcagaccctgcaggacttgctcactga

SEQ ID NO: 314263 - DNA, 101 bp, Homo sapiens
ccctcggatcgaataacgataaactggcaaaactcaaggctcagaaactgcagggcccccaaaaaagaaaaggaagaaaacacaaaagaaattccggaagc

SEQ ID NO: 314264 - DNA, 75 bp, Homo sapiens
aactgctttccaaagagaaacagaaaatgattgagtcccaggctcagcaacagcctcaccaaggactccatgaat

SEQ ID NO: 314265 - DNA, 101 bp, Homo sapiens
gctgagtggttgtgtggtcgcgtctcggaaaccggtagcgcttgcagcatgagcaaattggtcaggagatgttggaaaaccttagtcatgacagagaaaag

SEQ ID NO: 314266 - DNA, 75 bp, Homo sapiens
agatttcagccctgacgggggttatattccacgaatcctttttctggatggcttcagtgacagatggtaaaactg

SEQ ID NO: 314267 - DNA, 51 bp, Homo sapiens
aaactgaaggactctgaagctgagggtgctgtgattacaccaaccatggac

SEQ ID NO: 314268 - DNA, 75 bp, Homo sapiens
aagcatatggaaatgtctctaaaagtgcttctccagggaaagtgaccgaggcagtgaaagaggccattgacgcag

SEQ ID NO: 314269 - DNA, 149 bp, Homo sapiens
tccatgcatccagttttgagtcatctgattccaggcctatctctggcacacgtcttagtccactagagctgatgcacccactgggcctatgtaataacaatgacgaagaggacttgtatgaatatggctgggtaggagtggtgaagctg

SEQ ID NO: 314270 - DNA, 75 bp, Homo sapiens
cggaaaaagtcgatctggagcttttcccctccccgggggcggagaaactcatcatccacctgcggaaacatggca

SEQ ID NO: 314271 - DNA, 98 bp, Homo sapiens
ctgggagatggcagctgcacttcttgcggctggatcacaggcagcctggcatcctcgctacaacctcattgttgtgggccgatacccagatcctaatt

SEQ ID NO: 314272 - DNA, 75 bp, Homo sapiens
cagggagtgcatcaaaggtgtgaacacaggcaccacactgtaactcgaggcatcaccaaaggcgtgaaggaggac

SEQ ID NO: 314273 - DNA, 82 bp, Homo sapiens
caagggaccaaggtggaaatcaaactcttacaggccccagaatcagaatgcctgctcctcggaaatgttcactttgatatgc

SEQ ID NO: 314274 - DNA, 89 bp, Homo sapiens
agaggaggagaacactcctgagaagagggtggaccggatctttgccatgatggataagcggcagactgaaggacgggtgcctgttttca

SEQ ID NO: 314275 - DNA, 133 bp, Homo sapiens
cttcctggtgcaggaggctcactccgatttaaggtgcccgagtccacgctgatggactgccgtagacaattggatttgcaactcaaaaccaaaggctccccactgctgcaagatatttctgcagaaagatcac

SEQ ID NO: 314276 - DNA, 83 bp, Homo sapiens
catgcaggaaccacatcaaatcaagctgcagcttgatcgccttcaactccgaccgtcctgtaagactttgaccccgacgcagg

SEQ ID NO: 314277 - DNA, 96 bp, Homo sapiens
aacagctactacgcagacacgcaggagatgctgtgagagaagtaaggaaatattcctcagttcataccattgagaagagctccaccagcagacctg

SEQ ID NO: 314278 - DNA, 101 bp, Homo sapiens
ggattccttgggcaatggtgaatttgaaaaggggcataaggaaatggtggcaggcacttcctcctaacaagaaggaagtagttaaagaaaatataaggaag

SEQ ID NO: 314279 - DNA, 74 bp, Homo sapiens
tcttcaatgctggtaccaaccgcccacaactttctaggcaccacactgtaactcgaggcatcaccaaaggcgtg

SEQ ID NO: 314280 - DNA, 95 bp, Homo sapiens
cactgattcttaaggctctgttccttagagatccaaaggtaacacgtacacagacctctcggccggaatctccagggatgaccagcccctcccca

SEQ ID NO: 314281 - DNA, 98 bp, Homo sapiens
aacctgaagccatctgaattaaaaaaagatacatgctactctccaaaggaatcattttctcactgaatgataaatcaagctcatcgaatttgaagatc

SEQ ID NO: 314282 - DNA, 75 bp, Homo sapiens
aacattcttggcattacgcaggccagcaactcccagctcaatgcaatggtatatttgaaggctcccatgattctg

SEQ ID NO: 314283 - DNA, 100 bp, Homo sapiens
taggtgccaacattatgcgaagaactttacgtggacatcccatttaattctcagaagccgatcacaaggtgctgctacccccgtatgatgatgccactgt

SEQ ID NO: 314284 - DNA, 75 bp, Homo sapiens
ctggaacttctgcccagctctccttgacaaatcttcctattttcaagctgaaagaatctactgttagaagaagat

SEQ ID NO: 314285 - DNA, 75 bp, Homo sapiens
cggaaacaaagttattttgctcgagtgcctggaagagctgggatgtctggttgagtcctatggcatgaatgtttg

SEQ ID NO: 314286 - DNA, 146 bp, Homo sapiens
agcggcgtctggctgctgcggaccccgccgagtcctagcgcctggcctgcgcgccgctgcccgcgccacagatccagacatttaatgtggatgcaccatgccagaccgtggaagatttaacgaatggggttgtgatggcccaggtt

SEQ ID NO: 314287 - DNA, 75 bp, Homo sapiens
cctgccagcacgctgtcacgtctcagcaatagactgctcttgagggtgtcaaattgagaaccaggtagatcccca

SEQ ID NO: 314288 - DNA, 50 bp, Homo sapiens
caaatggttgaaaacagatatacagaaatgcactcggtgatggaaagaga

SEQ ID NO: 314289 - DNA, 90 bp, Homo sapiens
aataccgcttcctggagttcacgactctgagtgctggtattaatctctggagaagacacatccacagttagcactttcttcagatgctga

SEQ ID NO: 314290 - DNA, 95 bp, Homo sapiens
gtccctctctctgtccccggccgccatggagcagccgccggcgcctaagaggctcttaaaaacatgggtgaaattctgaaagctgcaggctgtga

SEQ ID NO: 314291 - DNA, 100 bp, Homo sapiens
cgccgcgggccaccgcgccgaactgctccggttcccgggtatcgagaaccttccctgcgaacttcagaggaacttccagctgatgcgagagctggaccag

SEQ ID NO: 314292 - DNA, 100 bp, Homo sapiens
agcagctaacttcacacgccgaaacctggctgactgtcttcggagtcggtttgtgaagaaatatgggaacctttttagcttggagcttggtgacatatct

SEQ ID NO: 314293 - DNA, 88 bp, Homo sapiens
gagcggcggccgcgccatgtggctgctggggccgctgtgcctgctgctgagcagcgccgcggacgggcaccctcactgaggacggctt

SEQ ID NO: 314294 - DNA, 75 bp, Homo sapiens
gtcggcgccgagtgggaggatggcggaaatgttccaggtcatccagccagagcgtgcgctgtacatccaggccaa

SEQ ID NO: 314295 - DNA, 102 bp, Homo sapiens
cgcttgagttggtcgggggcagcggcagggaagtgtttaaaacctataacgttgctgtggactacattactgttgcactcctgatctggaattttggtgtgg

SEQ ID NO: 314296 - DNA, 75 bp, Homo sapiens
ggaaaacccaagatatttatcattcagctgcagaaccttggcctgaaaatgctacattatatcagcaattgaaag

SEQ ID NO: 314297 - DNA, 101 bp, Homo sapiens
atatgaatgcacgatatgaagagcctggttacagtttcgactcctctctgcaagtgaataggcccagaaaggtagaaagatgctggtttcgagttttggag

SEQ ID NO: 314298 - DNA, 100 bp, Homo sapiens
cgcagaaaccccgttgacaaggcactgctttttcatgacggctgaaggtgatgtggccgccctcaaccgacgcatccagctcgttgaggaggagttggac

SEQ ID NO: 314299 - DNA, 75 bp, Homo sapiens
tgaggccggcatcgtctttccgtcctctgaggcgacggccgcggctgcacaggtgattggcgtgaagctgacggg

SEQ ID NO: 314300 - DNA, 90 bp, Homo sapiens
cggacctcgaccctgagctctatctcagtgtacacgcggctgcatttcaacaaggaaagatacctcctactccattctctgctcctcctc

SEQ ID NO: 314301 - DNA, 98 bp, Homo sapiens
ccttgggtttctttcttaaaggactgatttttagaactccacatttgagggatcgtgggactttaccagatcggtttgtaataacacctcgaagacgc

SEQ ID NO: 314302 - DNA, 100 bp, Homo sapiens
gtcatttccttcgtacccacagtgcttcatgagaggttttatgacttacctagtggagcctttatttacagaatgggccaggttttccaatacaaggcta

SEQ ID NO: 314303 - DNA, 100 bp, Homo sapiens
tgaaacaagaagaaaatttgagtgtaccgtttgctgctgagcttcgtgcttatctgaaatctaaaggagctgagatttcagaagagaactcggaaggtgg

SEQ ID NO: 314304 - DNA, 100 bp, Homo sapiens
agctcacccactgccagcagagtaagactttgaccccgacgcaggcttcagtgattgccgcggatcagaagcctgagcactttggctcgagacaattaag

SEQ ID NO: 314305 - DNA, 50 bp, Homo sapiens
gcctaccacctagaactggattgtgcggctcccagtaccagccttgcaag

SEQ ID NO: 314306 - DNA, 100 bp, Homo sapiens
gttggcaatggggccgatgtcaatatgaagcccacacatcttgctgacttcactcaagtgcaaaccattcagtattcaaacagtgaagacaaggacagaa

SEQ ID NO: 314307 - DNA, 100 bp, Homo sapiens
tatgacagacgggatgatcggtcgtggagctccagagatgattactctcgggatgattataggcgtgatgatagaggtgctggagaatctggtaaaagca

SEQ ID NO: 314308 - DNA, 101 bp, Homo sapiens
ccaaccaaaccctttgaaaaatattctaaatgaaaatgacatagtattcatagtggaaaaagtggtggacactatatagcctactgccgaaacaatctaaa

SEQ ID NO: 314309 - DNA, 78 bp, Homo sapiens
atgtgcaaacttaatatattgaaggccctgggaattgtggtgaagcaaatcatggaggaggctgtcaccaggaagttt

SEQ ID NO: 314310 - DNA, 100 bp, Homo sapiens
aactgttaggtttttatccaaaatgtttcatccaaatgaaaatgatgcatcctgttgccagcagtaatccagctttctgtgggcctggcaagccttcctg

SEQ ID NO: 314311 - DNA, 82 bp, Homo sapiens
gaaagcaaaggctgctctgaagcgcacgacctccgactactttctccttcaaggtagttgatgtcacttggcgatattcctg

SEQ ID NO: 314312 - DNA, 75 bp, Homo sapiens
aaagaagttgcaaaacactgggaatactcccccagttgcaagaggcgcaggaccgtggaagacttcaacaaattc

SEQ ID NO: 314313 - DNA, 98 bp, Homo sapiens
ggcgcgtgagcggcactgatttgtccctggggcggcagcgcggacccgcccggagatgagattccagaattctctgatggtttctggactgggtccca

SEQ ID NO: 314314 - DNA, 87 bp, Homo sapiens
caattgaagcaagagatttctgaatgccttaattttaaagaccccgaagcagtcagagctctgacgtgtactctcctaagggaagat

SEQ ID NO: 314315 - DNA, 76 bp, Homo sapiens
gatgttgaatgatgctttaacacattctgcagttttaattcagggaagtctgttagaactgctgtgctgatcaacg

SEQ ID NO: 314316 - DNA, 101 bp, Homo sapiens
aggtccgccagatctacggagccaagggcttcagcctgagcgacgtgccccaggcggagatctcggtcaggatggctaaaggtgaccccaagaaaccaaag

SEQ ID NO: 314317 - DNA, 98 bp, Homo sapiens
gagactgtgccgtggagggcctcgccatgtcctgctgcccgccccgtcgcagaatttagtctcaaaggaaacttcaaccacagcactgcaggcctctg

SEQ ID NO: 314318 - DNA, 82 bp, Homo sapiens
gcgggaggtgttcgagaacgaccccgagacggtcaccgacgatgagggcgcacctgctgtcctggagcttccgatctctgtt

SEQ ID NO: 314319 - DNA, 74 bp, Homo sapiens
ctgagcagagccctgcgatactattatgacaagaatgaaatgaatgatgtgcctttctttgatatccaactgcc

SEQ ID NO: 314320 - DNA, 83 bp, Homo sapiens
gaggacgaggaggcagccacggggcccctggaccaagctccacgaagatctctgtgagaagaggacggctgccacccttgcca

SEQ ID NO: 314321 - DNA, 100 bp, Homo sapiens
gacaagttgccctcaagaagataactatccaaatagtctatgtataaaagtaaatgggaagctatttcctttgcctttgcaggcagaggcaccaaggctg

SEQ ID NO: 314322 - DNA, 100 bp, Homo sapiens
ctgaatcaagtgcagagatgggatggcaaagagacaaccataaagagaaagctagtgaatgggaaaatggtagcggaatcccttggcaccatgtcctgtg

SEQ ID NO: 314323 - DNA, 75 bp, Homo sapiens
aagacagagctggtgtgcgagctacagaagcttcaatgttcaactgcatcacggagctggtcctccgagcaaaga

SEQ ID NO: 314324 - DNA, 98 bp, Homo sapiens
gaattggagaacttgttggagtgctggtgaatcatttcaagaggcgcattctacattctaaaggggagctcagtgaagatagacataaacagtatgag

SEQ ID NO: 314325 - DNA, 75 bp, Homo sapiens
cgactggggcatcttcccggaatcagattcaaaggtacgagtggctgctttacagaatctggtgaagataatgtc

SEQ ID NO: 314326 - DNA, 100 bp, Homo sapiens
tgcactcatcattggctttggtatttcaggcattgatctggagaacattgtgtactacaaggacgacacccactactttgtgatgacagccaagaagcag

SEQ ID NO: 314327 - DNA, 82 bp, Homo sapiens
ggccatcaagggtttccgcaatgcccctgttgctgcaggccaacttcaccatccgggaagatgccaaccccagctcccgaca

SEQ ID NO: 314328 - DNA, 96 bp, Homo sapiens
gccaagaatagtgcttgctgctgctggagttcttcaccaaaggacatggatgaaaatgaaagcaaccagtctctgatgacaagcagccaatatcct

SEQ ID NO: 314329 - DNA, 74 bp, Homo sapiens
aaaaggttgatctcatagacaagtttgtacatccaaagatactgctattgttcatccagttcccattcgtatga

SEQ ID NO: 314330 - DNA, 96 bp, Homo sapiens
gacgaagttgatggcctggagaagaaagatgttttgcctactgttgatccgaatatgcttttaaggctattaaccagggtggccttacatcagtag

SEQ ID NO: 314331 - DNA, 87 bp, Homo sapiens
ggagcagaaggactcggacacaggagccccttgtggcagcagcactacctgcccagaaaaatgctggaggctgggcgtggccccagg

SEQ ID NO: 314332 - DNA, 119 bp, Homo sapiens
tgtcattacagtgatcatcataggcttatgtcttgctgcagttccatgccattgcagtgtcaactaggcctcagttacttttcagtttgcccaaattgagcccatctcaacatttggca

SEQ ID NO: 314333 - DNA, 100 bp, Homo sapiens
tatattaaaagagaaagtaaaagaattgaatttacatgagactgcttttcaggaagccttggacgctgcaggtgataaacttgtagtagttgacttctca

SEQ ID NO: 314334 - DNA, 100 bp, Homo sapiens
gaagatttaacgaatggggttgtgatggcccaggttcttcaaaagatgtcgtttaggccaattgggtttgaaagaaggatttccatctgctgtgaaaaat

SEQ ID NO: 314335 - DNA, 75 bp, Homo sapiens
ctcaggctgctcttggctctcaacttattcccttcaattcaagtaacaggtactgggcctaatcgctacgtgcct

SEQ ID NO: 314336 - DNA, 100 bp, Homo sapiens
cttcgaccacttccagatccttcgggccattgggaagggcagctttggcaaggcctaagcagcgagagctggtccatcatgaagaacatggccacggagc

SEQ ID NO: 314337 - DNA, 75 bp, Homo sapiens
ggggaacccgtgcggctggagagagggaagaactgctaaagctttgaggtcattacaatttacgaatccaggaag

SEQ ID NO: 314338 - DNA, 100 bp, Homo sapiens
cagctattaaaaccagggctccacagttaggaggtatgacttgctcttcatgccaccgtcctttccatttggaggaatggagaacccttgtctgaccttt

SEQ ID NO: 314339 - DNA, 50 bp, Homo sapiens
aagcctgtcccgttgtcagagtggaagtcataccctaatgatcccagcaa

SEQ ID NO: 314340 - DNA, 100 bp, Homo sapiens
cttcagagtactatggtcctttgaaaactttgctgctaaaatcaccagatgttcaagaatcccgttctgcttccagaagtggaagtgctcacggatcggg

SEQ ID NO: 314341 - DNA, 83 bp, Homo sapiens
ggagaggcgagctcgcgatgagtggtctcggcaggctcttcgggaagggcatccgtgtcattctggaccttactcccaactac

SEQ ID NO: 314342 - DNA, 100 bp, Homo sapiens
ggacatcactttagaccctccacctaattgcaggtttaactatagatcaacacatcatcttgcatctcatgggttctatgaatttttaaattggtttgat

SEQ ID NO: 314343 - DNA, 90 bp, Homo sapiens
ctgaacaccagatggaagcttctgcagcccccaggctccgctcttgccagagggacaggagccatggctcagaaaatggactgtggtgcg

SEQ ID NO: 314344 - DNA, 100 bp, Homo sapiens
ctgagggaagaggagtggagtaggggggacgcggcggcggcgttgacaatggaaggacttttgactagatctgctcaggaaacagtcaagcattctgatt

SEQ ID NO: 314345 - DNA, 83 bp, Homo sapiens
ccaagatgcggatccgggcctttccgatcaacagtacaaattctgaagtttgtaaacttgctgatggtggtggtaagccatgg

SEQ ID NO: 314346 - DNA, 75 bp, Homo sapiens
cacctctcaccgcgcatgtttggagaaattgttgccaaggtcagagaagtctcccagcccgactggacgcctcca

SEQ ID NO: 314347 - DNA, 90 bp, Homo sapiens
atcaaatataccaaaaatgtagaagttctccatcttgggaaagtctggactgcctgcgctgctgacttaaggccccaacaccaaacacag

SEQ ID NO: 314348 - DNA, 83 bp, Homo sapiens
ttggaatgacttcgccgactttgagaaaatctttgtcaagatcagcaacactatttctgaaacctctgtagaggagcaggatg

SEQ ID NO: 314349 - DNA, 83 bp, Homo sapiens
ctttgtgagcgagttcagtgcgtgcgtgagcgagtgagcgaaaatccaatatcagatggaaatgatgcggagccttcgccatg

SEQ ID NO: 314350 - DNA, 90 bp, Homo sapiens
aaagatggagatgtgattaagactgagggagccactctaaggtattggtttgccttaaaaaggggttaccatgcagcttttaaatatgac

SEQ ID NO: 314351 - DNA, 83 bp, Homo sapiens
gtctcggaaaccggtagcgcttgcagcatggtatgacgctgggcgggatggcttcatcgacctgatggagctgaagctgatga

SEQ ID NO: 314352 - DNA, 89 bp, Homo sapiens
ctttaatgagaagatctccattcctgaggaggaggagagaagatgactgaggaggaggtggagaccgttctggcaggacacgaggacag

SEQ ID NO: 314353 - DNA, 98 bp, Homo sapiens
gtggcgaatatcttcccttacaagggttatatatggaattatggtaccctccctcaggtgttggagagcacaatggctgaacaagtccttcctcaggc

SEQ ID NO: 314354 - DNA, 99 bp, Homo sapiens
accttattggtgtggacgttgtctaaatttcggtagccatggcacaagaatataagttttactacccttggatgctgctgttgacatggaaaagattga

SEQ ID NO: 314355 - DNA, 100 bp, Homo sapiens
caccctgatctggcatggacatggagaagatgtcaaccggacactagaaggtggaaggaaacctcttcattatgcagcagattgtgggcagcttgaaatc

SEQ ID NO: 314356 - DNA, 83 bp, Homo sapiens
catggatgggctggagacaacagaaacagaaacgattgtggaaacaggtgtacaagggagaagaagccacattccaaatctca

SEQ ID NO: 314357 - DNA, 100 bp, Homo sapiens
caaggccctcttcccgccggagcccctgaaagtttcctacactactgaggtttaggggcactgtgaagcaaaagccacgcctcagaatcccaggcggaga

SEQ ID NO: 314358 - DNA, 98 bp, Homo sapiens
cacctcctccaagaccgtgctggtctttctcaacctcatcttctggaacggaaagatgctgaaggatgggagaccgttcagagaggaaggcctattcg

SEQ ID NO: 314359 - DNA, 83 bp, Homo sapiens
cacggagcagcaaacgcagagacaaaagaaacgggccccgactgacaatgcagatcttcgtgaagactctgactggtaagacc

SEQ ID NO: 314360 - DNA, 82 bp, Homo sapiens
agaccctggagcctcagttggaagcagccgatccagcctgcggagcctgtggggcagaatcattgatcagcgattcgagaag

SEQ ID NO: 314361 - DNA, 100 bp, Homo sapiens
agcgattcctgcaggcgttggttcccctctttgacctgaatcgagagctccagatcatgagaaagctagatcactgtaacatagtccgattgcgttattt

SEQ ID NO: 314362 - DNA, 75 bp, Homo sapiens
tcacggcgtacgccctcatggggaaaatctccccggtgactttcagggtgcaggagccgtgggcggacagagcca

SEQ ID NO: 314363 - DNA, 74 bp, Homo sapiens
tttgagactgttggagacatcattgccatcattgaggacaaggcctgaattattggaacaactttggaaagcca

SEQ ID NO: 314364 - DNA, 100 bp, Homo sapiens
ctgagagcgacgagcagccggtcagcatgagcgagctctaccctctgcagatctcccccgtgtcttcctatgcaggtaaccacctgctgttccaacaagt

SEQ ID NO: 314365 - DNA, 100 bp, Homo sapiens
cccggctatacaaggatcagaaaggactccagcacctggcaaattcaacatccaacagcttccttgatagcaaaagtagcaacagctcaggatgacgtca

SEQ ID NO: 314366 - DNA, 82 bp, Homo sapiens
cctctaccttaaggatgtgcaggatcttgatggtggcaaggagtactaggttttgacaagcttgcatcatgcgtgagtataa

SEQ ID NO: 314367 - DNA, 101 bp, Homo sapiens
actatcaggtggatgtcaaagaagtagcgtcagaaatctggaaaattgtacgctcccatggagttcaaaatatcaacatggcaggagagcccaaaccatac

SEQ ID NO: 314368 - DNA, 100 bp, Homo sapiens
gacaaaatggcgaagatcgccaagactcacgaaggtatgagggtgctggttgatgctcgagagaagcttcatattccctggggagacaactcaaaccaac

SEQ ID NO: 314369 - DNA, 140 bp, Homo sapiens
cgtcgagactggaggctgagtgctaaactgtgtggggcgcggatgggatccagctgttagtcgggtctgtgagagccacttcaggaattttttgcttggagttacatgacgaaatttgcatttcagaaaggccacctgat

SEQ ID NO: 314370 - DNA, 82 bp, Homo sapiens
ctgactcaagcggaggcgcgcggaacagtcgccgaggcgattcccgcccaggggtcgggccccggctcagtggtcccaggca

SEQ ID NO: 314371 - DNA, 100 bp, Homo sapiens
ctgttctccagcctttctggagggatgcagagcctttccttaggacaaacaagattcccaaatgctggaaaatcctctttgctaagttgtgtttctcatg

SEQ ID NO: 314372 - DNA, 98 bp, Homo sapiens
tggagtctgcgaaggccgggacccggttccccggcccacagtgggggtgtgcaaacccgagagaactgggccagatcagaaaagggagctcaggtacc

SEQ ID NO: 314373 - DNA, 101 bp, Homo sapiens
gggagcgcagatcggcgcccagcaatcacagaagccgacaaggcgttcaagcgaaaacatgaccgctgagcccatgaggttgtttacattcagagctctat

SEQ ID NO: 314374 - DNA, 60 bp, Homo sapiens
gctgcggacccagggctttggagatcaactttctcgcttacacatgattttgaagccatt

SEQ ID NO: 314375 - DNA, 75 bp, Homo sapiens
cgcgctgggattgttgcggtgcgctggagccgatgaggagactgtccttcctgtttcgcagatgaggaaactgag

SEQ ID NO: 314376 - DNA, 76 bp, Homo sapiens
gggcaaggaagtgctgctggaagccgatacggaagatgtgtgcattgtagagagattgttctccagcagcctagtg

SEQ ID NO: 314377 - DNA, 74 bp, Homo sapiens
tgcgctctgctcggtgtcgtggcctcgcagatgcttagaccatgctcagcctccaagcagccttgtcatcgaca

SEQ ID NO: 314378 - DNA, 99 bp, Homo sapiens
gttgaagaatgtccctcaagtggtaaatgtgcaggaattgaagaataaccctgcaaccccttctacagccatggggaacgggattttccaacagaaacc

SEQ ID NO: 314379 - DNA, 100 bp, Homo sapiens
ggagatggtgcagaagatggaggagggtcgggaccctgagttaggcctgaagtctgtgcagaagctactggatgctgtggacacttacatcccagtgccc

SEQ ID NO: 314380 - DNA, 90 bp, Homo sapiens
gcggctgcagcgctctcgtcttctgcggctctcggtgccctctccttttcgtttccggaaacatgttgcttctgcaggaagcctttttgg

SEQ ID NO: 314381 - DNA, 75 bp, Homo sapiens
cgcaaggtcgccctcaaggccatgatcaaaacgacactgcccatctctaagataagaacctggaaaggggactct

SEQ ID NO: 314382 - DNA, 100 bp, Homo sapiens
gtgggacgcgccgagccggaggctgcaggatgagtgatcagcagctggactgtgccttggacctaatgaggcgcctgcctccccagcaaatcgagaaaaa

SEQ ID NO: 314383 - DNA, 100 bp, Homo sapiens
ctccccgggaggagcccttgacccccaggtttaaaaacctcacagcttgtataatgtaaccatttggggtccgcttttaacttggactagtgtaactcct

SEQ ID NO: 314384 - DNA, 83 bp, Homo sapiens
tgcctgtgtccctgaccatggctccctgcagtaccctttaacgatggggcgcctacccttcttcagcaagatgggaacagctg

SEQ ID NO: 314385 - DNA, 90 bp, Homo sapiens
tggccatcttcggaccccccaacaccctctacgaaggcggctacttcaagatgaccgcacctcgagcaggagtggggatgccacgtctgc

SEQ ID NO: 314386 - DNA, 87 bp, Homo sapiens
accaaagtgggaaacattgaaatcaaggtgctggagaatctggtaaaagcaccattgtgaagcagatgaggatcctgcatgttaatg

SEQ ID NO: 314387 - DNA, 75 bp, Homo sapiens
gtggaacagacagctccttctttattggatcttttgccagaaatgagggcatactggcctgacgtaattcactcg

SEQ ID NO: 314388 - DNA, 100 bp, Homo sapiens
gtttgactgtgtatactctacaatctaagaaggatttcagcaaatttggagcagggtacgaagatgccctggtgctcctgctcacagaggtgttgaatcg

SEQ ID NO: 314389 - DNA, 82 bp, Homo sapiens
ggggacttggtgttcgctaagatgaagggctaccctcactggcctgccaggagctgtgaaccaaccccgctcacggctaaca

SEQ ID NO: 314390 - DNA, 100 bp, Homo sapiens
tgaccctaatggtctttttgttcaagataaagtgattttttgcctttgttgattaactggacaaattcaggtgacagcttcgccgtgagcgctgcctggg

SEQ ID NO: 314391 - DNA, 90 bp, Homo sapiens
ctgacaggttgtgaggaccaagcacgcctcttcaaagacgagtattaaaggtggaagaaggtccatatctttttctgtgggtgcttcaag

SEQ ID NO: 314392 - DNA, 101 bp, Homo sapiens
aggaccaaaagaggaagatagtcttgggacccttgcatggtgtttcaaagggtggtgaagaactaaggataagctgctgcaggcaaagaaagaaattgaaa

SEQ ID NO: 314393 - DNA, 90 bp, Homo sapiens
attggatgaagtggctccggagatacaccattcgcttttcacccaagatgatttgatgtcttataaaactctgatgaaccatgatggcta

SEQ ID NO: 314394 - DNA, 83 bp, Homo sapiens
gagctcagccctccacctccacagggatcgcttacacctgagacgaactacagaacagcacgtaccagaggtggaagtccaag

SEQ ID NO: 314395 - DNA, 50 bp, Homo sapiens
cggggaccttgccttgcccggggccaagctataacatcagaaatggtgaa

SEQ ID NO: 314396 - DNA, 100 bp, Homo sapiens
tttcaagcagatgccatattttggggaaaaggaaattgaaatgtaccaaggagcgggctctctaaatacgtacagattctgcgataatgtgtggactttt

SEQ ID NO: 314397 - DNA, 75 bp, Homo sapiens
ctaccaagtgcagtttaaataatgtatcctccactcctcgctggccaccatcctgctgcccaacagaagaagctc

SEQ ID NO: 314398 - DNA, 99 bp, Homo sapiens
gcctcagcctcctgagtagctggtatttcaggacagccaggagggggcgcacatccgccgcgaaactgtgagcaagagcgtctgtgctgaaccatggcg

SEQ ID NO: 314399 - DNA, 75 bp, Homo sapiens
aacacaagattaatcaatgtcaactgacagctcctctggtgcaagtgtggtagctattgacaacaaaatcgagca

SEQ ID NO: 314400 - DNA, 83 bp, Homo sapiens
ggcagctgcggtggcagctgctgagttctcggtgaagttgcagaggaaagtggtcgcttatggtcagaggagcagcctgctca

SEQ ID NO: 314401 - DNA, 100 bp, Homo sapiens
ggaggttttcaggaccaaaattgtggaaaagtcactctgaaggtcagtgcaccagatattctgaaacctctcaatcaagaggatcccaaatgctctacta

SEQ ID NO: 314402 - DNA, 98 bp, Homo sapiens
aaagtatagaagacgtggatgatgaagaatttgaagagctgattggagtgaaaaggctctcagtgtctgagttaaatgaaatcctggaagaaattgag

SEQ ID NO: 314403 - DNA, 75 bp, Homo sapiens
aaactctggaaaaaaacttgggattttaaactgtctacggttcttaacctcatctgttaagttcccatgcctgga

SEQ ID NO: 314404 - DNA, 100 bp, Homo sapiens
gcgagggtctgaagttcacgactactagaaggggaggggagtggaaaggctctcagtgaaaaagggatcatagacggtatttctatgtaaacgaacagtc

SEQ ID NO: 314405 - DNA, 98 bp, Homo sapiens
agcggagcttcgcggggatcctgctggactgcacgaaaaagattttttatcaagcagaaatgcatcgaacaacgagaatcaagatcactgagctaaat

SEQ ID NO: 314406 - DNA, 119 bp, Homo sapiens
ccctccctaccctctgatgcaccaccagatgccaccacctcatccaccccagccaggatgatcctagtgctccccacaaaatccaggaggttctcaagtcctgcctgaaagaggaggag

SEQ ID NO: 314407 - DNA, 82 bp, Homo sapiens
ctctcatcaaaaagaaacctggatactccgtgagcacaaagcagtcatcattcagaagcgagtccggggctggctggcccgc

SEQ ID NO: 314408 - DNA, 98 bp, Homo sapiens
catgcctcaccaagtcacatgacaagcaacttaattcagtgcacaaatgagatgaatgtgaacatcccacagttggcagacagtttatttgaaagaac

SEQ ID NO: 314409 - DNA, 75 bp, Homo sapiens
gcaaaaccaacgcctggctcggagcagcagcctctgagggcgaactttctgaccaagtatacaactacccagagg

SEQ ID NO: 314410 - DNA, 100 bp, Homo sapiens
ctaatttctgctgctatagaaccagtggtattcatgggtagtttgaaatatccagatgagaatggatttgatgccttcctgaagaagcatgggggtagtg

SEQ ID NO: 314411 - DNA, 76 bp, Homo sapiens
cctacatcatcgcgggcttacactttgaccaggactcgctcagcagcagcctgaaaacttgctacaagtatctcaa

SEQ ID NO: 314412 - DNA, 90 bp, Homo sapiens
cttgtagagtcattcctgcctttgagcggactcccttttaagctaccagctcaggaagcacctgtcccaccttcggcatatgaagcagct

SEQ ID NO: 314413 - DNA, 100 bp, Homo sapiens
tgatcagcgggtggctctttttccgttacttggctattggctctgtccagaccaaaacgaagaagacgttagccaaacccaatataaggaatgttgtggt

SEQ ID NO: 314414 - DNA, 90 bp, Homo sapiens
gagggtacgagtggccgaccacggatttgcattgccgaggacgggaccccagggcagcgaagcagggcattcttagcagggttacagaat

SEQ ID NO: 314415 - DNA, 100 bp, Homo sapiens
aaagctgttctgcagatcagaaagaaggggttcctggtcatacaccagtactaccaaggacagcttttttcctgcaaggccatcgaagacggcaatttgg

SEQ ID NO: 314416 - DNA, 100 bp, Homo sapiens
ggcacatttcagagagaatccagtatgcaatggatgtcgcacacaagagagagagacgcagaccagcatctcagacatgtcgaaaaagatgttttgatcc

SEQ ID NO: 314417 - DNA, 83 bp, Homo sapiens
cagccagtgatatgctatacatgagatgctgttcagttaaatgtgattgcaacgcgacagcttattctccttgcacaacaaat

SEQ ID NO: 314418 - DNA, 75 bp, Homo sapiens
gcggggacccggctgcggtggctgcgggactgacgaagccagtcttggtgctctgtgttcacctggttcatctga

SEQ ID NO: 314419 - DNA, 82 bp, Homo sapiens
aagcatttaaccagcatggctacttcatattttggaaagcagtttttaagacaagttggtcaaagaaaaagtgatgtatgaa

SEQ ID NO: 314420 - DNA, 90 bp, Homo sapiens
caacttcgctgtggtgaagctggggcggcaccggatcaccaagacggaggccatgtttttggtatactgtgcactggagaaagaacctgt

SEQ ID NO: 314421 - DNA, 74 bp, Homo sapiens
cgacggcaggaattattggaggccaggtttactggagtaggtgttagtaagcccatccttccggaaatcacgaa

SEQ ID NO: 314422 - DNA, 75 bp, Homo sapiens
gccatggggagcctcagcggtctgcgcctggcagcaggaacacgatgaacctattctgaagcacttgaaagatat

SEQ ID NO: 314423 - DNA, 96 bp, Homo sapiens
gccgagcacaggcacaagaaggggctgatgtacccctacatcttccatgtcctgacgaaggattttgtgtcatgtatagagaactacagaagaaga

SEQ ID NO: 314424 - DNA, 51 bp, Homo sapiens
atgccagcatctgccaagcagcagttatttggcagaaaagcagagtatcag

SEQ ID NO: 314425 - DNA, 100 bp, Homo sapiens
caataatatttgtggagacaaagagacgctgtgatgatctgactcgaaggatgcgcagagatggataattttgctcatcgagctgaagttcggaaagcct

SEQ ID NO: 314426 - DNA, 111 bp, Homo sapiens
agaccctggagcctcagttggaagcagccgatccagcctgcggagcctgtggggcagagtccggcagcgtcttctcttgagggagcaatttggagaagagctggaacccag

SEQ ID NO: 314427 - DNA, 75 bp, Homo sapiens
cccgctgtgtgtctcgggcgttcagccgctcgctctccgccttccagaagggaacagaaagaacagcttcaaaag

SEQ ID NO: 314428 - DNA, 48 bp, Homo sapiens
tcaaagatgccaagaaaccctaaatgtctttcctccaggacccaagtt

SEQ ID NO: 314429 - DNA, 90 bp, Homo sapiens
catcttgtaaaattggacaatggctctttagagagttatctgagttctctagtgatccctgaaaagttccagcatattttgcgagtactc

SEQ ID NO: 314430 - DNA, 51 bp, Homo sapiens
cagattcgcagtggtcgcttcttctccttgaaggaagactcgccagccaga

SEQ ID NO: 314431 - DNA, 74 bp, Homo sapiens
gactacaaggacagcagcgactttggggcccgtcaccctcagcaagcgagacattgagttgctgctgaaactca

SEQ ID NO: 314432 - DNA, 100 bp, Homo sapiens
ttttcagaaactgccttctaaagtgactacatttggtcaattttgtggaacctgtgggcctcaattactccatgtttattcctaccttgctgaatcaggg

SEQ ID NO: 314433 - DNA, 100 bp, Homo sapiens
ccgggcctcccagccgacatgtctctagtggcggaagccttcgtctcccagattgcaggtgattaaagtatacagtgaagatgaaaccagcagggcttta

SEQ ID NO: 314434 - DNA, 100 bp, Homo sapiens
cagtgtacaacgccaacattaacctgttctgtgtggtcagagttaaacatgaagtttctggagagacagtggtatttcaagggggagctcttggcaaaac

SEQ ID NO: 314435 - DNA, 75 bp, Homo sapiens
caaaattatccgaaaccgcctcactggttcaaacaagctgtatataaacagacaatgaaactctttgcagagctg

SEQ ID NO: 314436 - DNA, 88 bp, Homo sapiens
cagggtaacatggcggatgcggaaggcctggcgcaagcgctggtttgtcctccggcgaggccgcatgagcggcaaccccgatgtcttg

SEQ ID NO: 314437 - DNA, 100 bp, Homo sapiens
gcatccgatgtgcaatccgaatcgcctgcatctttggaatgcaggtgccaaaagaacatcttttagtctcgattcctctcttgattaatcatcttcaagc

SEQ ID NO: 314438 - DNA, 50 bp, Homo sapiens
ggatgatgctgactttgatgaagacggttgaagaacagcaaggcatctac

SEQ ID NO: 314439 - DNA, 131 bp, Homo sapiens
tttcacaattgcagcagatgaagatccattggtaaattgatcaggatttttggcctaccctccaaagaaaagatatagccagtaccaacgtatgctgagcacgctgtctcaatgtgaattttcaatgggca

SEQ ID NO: 314440 - DNA, 50 bp, Homo sapiens
cgcagtggtcgcttcttctccttggtatttgaaatggacatcgctaaaca

SEQ ID NO: 314441 - DNA, 75 bp, Homo sapiens
ttgcactcaccattaaatctatcaggtatcaggacctcccctgtcagatgattcaggggctgatttgcctcaaat

SEQ ID NO: 314442 - DNA, 83 bp, Homo sapiens
tcagacaccatggggaaggtgaaggtcggagtcaacggagatagagtttcaccatgttgtccagggtggtctcaaaactcctg

SEQ ID NO: 314443 - DNA, 100 bp, Homo sapiens
actcgctgacttcggccttgcccgcatctatagtttccagatggctctaacctcagtgacacagataatgtacaagtggatagagcccaaaatctgccgg

SEQ ID NO: 314444 - DNA, 75 bp, Homo sapiens
ggagcccagggagcgccgcgcgaccaggaggcggcggcgccgccggctttgtttcctccagcttatggaggcata

SEQ ID NO: 314445 - DNA, 100 bp, Homo sapiens
acaatggtgggcttaattttagaaatggatgaaaagaggctgctggatccagggttgaaggttcataaaggcctctgggattatactctgaagaacccgc

SEQ ID NO: 314446 - DNA, 75 bp, Homo sapiens
gcaagaggtactgtccatcaaacatcttccaccacagcttagaggaaattctgaaacagccacacctacaaatgt

SEQ ID NO: 314447 - DNA, 74 bp, Homo sapiens
gaaatgttagagaagaaagacagctttgtggaagagctgcccaaactccaaaatgatggtagagaattgaccaa

SEQ ID NO: 314448 - DNA, 98 bp, Homo sapiens
ggtgagatcgtcagcgctgactccatgcaggtagagttggctttgtgggacacagctgggcaggaagattatgatcgcctgaggcccctctcctaccc

SEQ ID NO: 314449 - DNA, 100 bp, Homo sapiens
ggccgcccatcagggggaagaggcgtcctgttcttcctgggggactggcaggattcgataccagcatcttgccaatttgcaaggactcacttggctggat

SEQ ID NO: 314450 - DNA, 100 bp, Homo sapiens
gacgccttcaacaccaccttcatctccaccatcgttatgtcacgcatctgatgaagcgaattcagagaggcccagtaagaggtatctccatcaagctgca

SEQ ID NO: 314451 - DNA, 87 bp, Homo sapiens
tcttaacctgggaagtggaaccggatatttaagtacaatggtgggcttaattttagaaaaattggaagctccaccacccaccccagg

SEQ ID NO: 314452 - DNA, 75 bp, Homo sapiens
gctggagccctgcattcgcggcgtgtgcagaacatccagtcatggataaaaatgagctggttcagaaggccaaac

SEQ ID NO: 314453 - DNA, 100 bp, Homo sapiens
taccaccgagccatcaaggtgaccgtggacggaccccgggagcccagacgtgcccgtggttgacacgagctgtgtccccagctgttcccgtctacaatgg

SEQ ID NO: 314454 - DNA, 100 bp, Homo sapiens
atcgcgggcatcttgctgttcgtgattatatttcttggagttgtgttggtaatgaagaaaagttcaagcaagtttgctgctgttggatttcataaaactt

SEQ ID NO: 314455 - DNA, 100 bp, Homo sapiens
tgcatccactacaacattgtcatgccagttcaaaccttgtactactcagctgatcacaagctgcttgatgggaacctactagatggacaggctgaggtgt

SEQ ID NO: 314456 - DNA, 75 bp, Homo sapiens
acaataaaagagacctctacttagctcagcaattcttaccttgaactgcaagcacatgttgaccagataactgaa

SEQ ID NO: 314457 - DNA, 91 bp, Homo sapiens
cagctctgtccgctgcccacagcctagcagtcgggaccgtactgagacctgcctagagctggaacgttacctccagagcgagccctgctat

SEQ ID NO: 314458 - DNA, 100 bp, Homo sapiens
ccgccccggatgcggccggagggcgcgggaatggagctcggaggcggcgaggagcgcctgcctgaggagagcagctccagtcagcccggtcaagcatgac

SEQ ID NO: 314459 - DNA, 83 bp, Homo sapiens
gccgtcagctgccggccgagttgggtctccgtggttcaggtcaaaatgcagatcttcgtgaaaacccttaccggcaagaccat

SEQ ID NO: 314460 - DNA, 100 bp, Homo sapiens
ccccacgggcatccatgtggtggtgagcaacgagaatgaaactagtgatcgagaagatggcctccccaaaggacatcatgtgacagactctgagaacgat

SEQ ID NO: 314461 - DNA, 100 bp, Homo sapiens
gaatatcctgcagaagaaaatggatttcgttatatcccctttagaatatatcagctcaatgtcaattgctgcaagcttagtgagtgaagatacaaagacc

SEQ ID NO: 314462 - DNA, 75 bp, Homo sapiens
ggaaccacatctgccagcaccttgatcttgaacttctcagcctccagaacgcctcctgacaaggtgatccgggcg

SEQ ID NO: 314463 - DNA, 100 bp, Homo sapiens
ctgacttccagagagcaatatggctggttccccaacatgcctcaccctcatctatatcctttggcagctcacagacgccttctggcaagaggggagagcc

SEQ ID NO: 314464 - DNA, 50 bp, Homo sapiens
ggggaacccaagccagccaccaggtctcctaaaaacccagaacagaagat

SEQ ID NO: 314465 - DNA, 89 bp, Homo sapiens
tgaagatttacagcctcagctgcggcaagtcccttcctgagatcaccggcgtaatcaacccagcgttggacaaatactttccgtcagac

SEQ ID NO: 314466 - DNA, 75 bp, Homo sapiens
cgggatgaggaggtggaggaggcccggcagtcgtgtcagaagaagcaaaagtaccggcgtgtcaaaaaaatgtca

SEQ ID NO: 314467 - DNA, 76 bp, Homo sapiens
tattgctactccagcagtatttgaacacatggaacaggccataggaaaaggatacagagtagagtttcatgaacct

SEQ ID NO: 314468 - DNA, 88 bp, Homo sapiens
ccggttcgagatcagcttcgagtgcagtgaagccctggcggacgattgaccctcttgctggaatgacatctcttagtataggtggttc

SEQ ID NO: 314469 - DNA, 96 bp, Homo sapiens
actctgaagatccctgtggtagagagaaaaatcctggatctgtatgctttgagcaagatcattgccactgcggtttgccacaccgatgcctatacc

SEQ ID NO: 314470 - DNA, 100 bp, Homo sapiens
aggcgcagatgcgggccctgctggaccagctcatgggcacggctcgggacgaataaactactctctaaaggcctgtctcatactcatcctccatctcctc

SEQ ID NO: 314471 - DNA, 100 bp, Homo sapiens
taatcccattttcctgcttatcacctgaactgtggatacattggcctgcaggtcccagttcacatgtagtcccctgctcaccattggagaatcagctcac

SEQ ID NO: 314472 - DNA, 75 bp, Homo sapiens
cggaagatggcggccggcgaaaggagctggtgcctgtgcaagttgttgaggtaatgcatgtccatggtacacaaa

SEQ ID NO: 314473 - DNA, 100 bp, Homo sapiens
cgccaccacgtcacgcacacgctcggcgctgcgatccgcgcatataacggtggccagaatggatttgtggccaggggcatggatgctgctgctgctgctc

SEQ ID NO: 314474 - DNA, 83 bp, Homo sapiens
ccggcgtctgcctcgagactgaagaccgacctgcctagagctggaacgttacctccagagcgagccctgctatgtttcagcct

SEQ ID NO: 314475 - DNA, 90 bp, Homo sapiens
tgaaccaagacttacccgaagttgccgcggggccttccgatcccctatgagctccccacacaagaactctgtgccatcatccctaaatga

SEQ ID NO: 314476 - DNA, 83 bp, Homo sapiens
ctactgttgaaaaaatttccagtgagcaagagtgagccatggagctacgtgtggggaacaagtaccgcctgggacggaagatc

SEQ ID NO: 314477 - DNA, 50 bp, Homo sapiens
cgacctcagccgcccgccgcccgccggggcaagaaccagttgagtcatct

SEQ ID NO: 314478 - DNA, 101 bp, Homo sapiens
gaagctatgcagtatttctttggcatcactgcagctagtaatttgccttctggattgttgcaaaagcttctcatttcagagagatgccaggatcctaagtg

SEQ ID NO: 314479 - DNA, 100 bp, Homo sapiens
cacaagaaatgtgtccccacagggatagaagatgaagatgctctcattgctgatgtaaagatgaccacctaagaaaggaggaacagaaaagtactaacat

SEQ ID NO: 314480 - DNA, 100 bp, Homo sapiens
gttggaacttcgttgcttgcttgcctgtgcgcgcgtgcgcggacatggcctcaaacgtaagactttgaccccgacgcaggcttcagtgattgccgcggat

SEQ ID NO: 314481 - DNA, 100 bp, Homo sapiens
taccgcggcgagaagccccagctgcactacgcgttgctgatagtccaactccaccgccaccacctccaccagatgacattcccatgtttgatgactctcc

SEQ ID NO: 314482 - DNA, 80 bp, Homo sapiens
ccggctccgcagcaagatggcggacgagaaggacagggaaggtctcggcgcggaagatggccggcggcgtggacggcccc

SEQ ID NO: 314483 - DNA, 118 bp, Homo sapiens
gggagcttctgctctgggcctctctccccggcttgcctgtggccatcttcccactctctcttcgcatcatcttccctctcagaagatgactcaagaccggcctctgcttgccgtgcag

SEQ ID NO: 314484 - DNA, 75 bp, Homo sapiens
tcctcaaggagaaagccatgaccgacactttcactcttcaggcacatgaactggtcatgctgctggagtggtggt

SEQ ID NO: 314485 - DNA, 98 bp, Homo sapiens
tggaaaaggagttcgagcagatcgacaagtccgggagctgggcggccatttaccagggtcagtttgaaaaggaggatcgagctcactgtggagtatcc

SEQ ID NO: 314486 - DNA, 75 bp, Homo sapiens
tgacctcatgggcaagaccatgacggaggatgatgacatcactaccggaatttggtgttcacttggcagaactga

SEQ ID NO: 314487 - DNA, 82 bp, Homo sapiens
gatggacctcgggaacccagaagtcagcccaaggccaaccccactgtcactctgttcccgccctcctctgaggagctccaag

SEQ ID NO: 314488 - DNA, 100 bp, Homo sapiens
ctttcacaaatttggaatctgccttctactccatcgtgggactcagcagccttggtgctcaggtgccagatgcaaagcccaattattgaagacagtcgtg

SEQ ID NO: 314489 - DNA, 100 bp, Homo sapiens
cctcaatttaagcctgatctaacccctagaaacaggtggtccattatggctgacatgcaaaatctggtagaaagattggagagggcagtgggccgcctgg

SEQ ID NO: 314490 - DNA, 75 bp, Homo sapiens
ggagaaggacagcagagaataagctggacaccaaatacccgtacgcaagaaaagcctaggcttctcgagcctttg

SEQ ID NO: 314491 - DNA, 100 bp, Homo sapiens
gaaggtggtggtcaacgggcgggtgctggagctgttccgggccgcgcagctgccgaacgacgtggtcctacagctacttgaaggaaattttgccaaagaa

SEQ ID NO: 314492 - DNA, 100 bp, Homo sapiens
gcggcggcggcgccgggcccgggggtggtgacagcaggtctgagggcacctttgatgattacttggagttattcctgcagtttggttatgtgagcctttt

SEQ ID NO: 314493 - DNA, 80 bp, Homo sapiens
agtccccgcgcgtggtcatccaggtcacccgtgtgaacagaaagtgagaggttgtagcacattgccaccgtccagatctc

SEQ ID NO: 314494 - DNA, 83 bp, Homo sapiens
cggccaactccaatgggcctttccagcccgtggtccttctccatattcgaggtcaataagcatgcgttttctggagggagaga

SEQ ID NO: 314495 - DNA, 90 bp, Homo sapiens
ggcggtgcgtgttgctgcgagtgggacgcgcactggtcggtgccggctcaggagccgggtgtgagccactgccccatgttgtgttgatgc

SEQ ID NO: 314496 - DNA, 97 bp, Homo sapiens
atgcaccatgccagaccgtggaagatttaacgaatggggttgtgatggcccaggttcttcaaaagatgtcgtcccattccacctacatcctcgccta

SEQ ID NO: 314497 - DNA, 82 bp, Homo sapiens
gaacgaggcaaggagctaaagcagcgtgcgttcagccctgggactgacgataagatcaattcggaaccgaagattaaaaaac

SEQ ID NO: 314498 - DNA, 50 bp, Homo sapiens
cgaggtgcccaccatcgagtccctgatagaatgtctacacaaggaagtac

SEQ ID NO: 314499 - DNA, 51 bp, Homo sapiens
atgcaggttcctatgcgtcactagggccaggtctggattaatggctttaac

SEQ ID NO: 314500 - DNA, 58 bp, Homo sapiens
accttgaacaaggcaaatatggttttgctgagatctgtatctgtggacctgaatgttg

SEQ ID NO: 314501 - DNA, 100 bp, Homo sapiens
gcgggatcttcaaccacctcgagcggctgctggacgaaggagagcaagccctggaggttcactctttcaagaagtcgtgtgctgaggtgtaatgctacac

SEQ ID NO: 314502 - DNA, 82 bp, Homo sapiens
ctggattcgtggcgccacaagctcattcactgtgtagacaatgcagatcttcgtgaagactctgactggtaagaccatcacc

SEQ ID NO: 314503 - DNA, 74 bp, Homo sapiens
agagcctcagtttgtgcaggacaccgacatggaacagggactcactgggggtggctagaggtgcaggtagctaa

SEQ ID NO: 314504 - DNA, 75 bp, Homo sapiens
gcctcctgctgtccctctctgagctgaagacatttcgaattatatccagatcgagagacagaagattctgaaagg

SEQ ID NO: 314505 - DNA, 98 bp, Homo sapiens
gcaggagcagatccggagcctggaggaagagaaggcagctgtgactgaggcagtgcgggccctgctggctgaaactgccgccaaccggatctgtaagg

SEQ ID NO: 314506 - DNA, 100 bp, Homo sapiens
gcggcggcgccgggcccgggggtggtgacagcaggtctgaggggtccaacatcactgacacctgcactgaaatgctaatgtgtggagtcttactgaaaat

SEQ ID NO: 314507 - DNA, 75 bp, Homo sapiens
cctcatcaaaaagagagagttttaccgtgacaagaagtacgaggaagtgagacccaacatgagtgaagtttcctg

SEQ ID NO: 314508 - DNA, 74 bp, Homo sapiens
gccccgaaactttcaccgcgagcggttttctgagtttaaccagtaatgccattcagttgccaatctcaagcaaa

SEQ ID NO: 314509 - DNA, 100 bp, Homo sapiens
gcaaaatccaacagcatcattgtgagccctcggcagtacaagattctgctgtactcattggatggccggttgttgtccacgtacagcgcttacgagtggt

SEQ ID NO: 314510 - DNA, 87 bp, Homo sapiens
gaagaggaggcggaaaaggacgcaaagttctccggcgaggtggaaattaaaggtggagcacatgattattacaatgttcttcccaat

SEQ ID NO: 314511 - DNA, 50 bp, Homo sapiens
ctaatattggctgatgtagagctataggaatgctgtctctgcaatttgag

SEQ ID NO: 314512 - DNA, 50 bp, Homo sapiens
gcactctcaggaacctggcaacaggtccagatacttcgtctgcttcggat

SEQ ID NO: 314513 - DNA, 100 bp, Homo sapiens
ggaacagattgttcctaaaccagaagaggaggttgcccagaagaaaaagctttggacatcagacagtgcaggagaagaatgtgatgcggcagaaggggct

SEQ ID NO: 314514 - DNA, 100 bp, Homo sapiens
acttcttcggggtctggtggaaaaacaagcccaagtggctcctccagggcatctagacgagttgtactgctgtcacaggaaatggacgctggattacaag

SEQ ID NO: 314515 - DNA, 74 bp, Homo sapiens
ccctgatgaattcaatcaattctttgtgactcctcgatcttcagttgaggctggagtgcaatggcgcgatctcg

SEQ ID NO: 314516 - DNA, 100 bp, Homo sapiens
tgctgttgaaaaagaaacaagcccgctgtcagggagtagtttgtgccatgaaggtggcattggtgaggctgtgtccagtgcagtagtgggcgagcctggc

SEQ ID NO: 314517 - DNA, 90 bp, Homo sapiens
gttttacaagatttaacctgtcatcaagacctgggattttggtgcagccctagcaaaccaagagtgagccaccttggaagtagatcctgc

SEQ ID NO: 314518 - DNA, 100 bp, Homo sapiens
ccccggtcggccgccgctccccgcctagtccacggagctcaatggcggcagtcgcgctgagggactcggctcaggtgccccctgataagtgccgatgtgc

SEQ ID NO: 314519 - DNA, 82 bp, Homo sapiens
aggatacagggtcaaaggagagcacaaccatcgcagttggaagcccatggggcagccttatacaggatgctgtgttctttgc

SEQ ID NO: 314520 - DNA, 141 bp, Homo sapiens
ctgtactccagacacaacccggccatcgaggccctgctgcacgacctcagctcccagaggatcaccagcgtggaaattgataaagaaggtgtgattgaaccagacactgatgctcctcaagaaatgggagatgaaaatgcg

SEQ ID NO: 314521 - DNA, 80 bp, Homo sapiens
cggtgggcactgtgatctcagacttccagccttcagaactgtacgtacctgtgggcatcatgttccttgttggaagcaag

SEQ ID NO: 314522 - DNA, 115 bp, Homo sapiens
aaaaagatgaaaaaatagcctgggcgctctccagaaaagctacacttgagctgacacagtgctatgcttacatttgaaaagatttcattggacagcatatttaagaaataaagtt

SEQ ID NO: 314523 - DNA, 50 bp, Homo sapiens
ggaagaacctcatcgctgcgacgaaaaacatctttccaggaacagcgtga

SEQ ID NO: 314524 - DNA, 51 bp, Homo sapiens
ggataccaaatagcagtggaaaccgtacaaggtgaatatcttaaccagact

SEQ ID NO: 314525 - DNA, 88 bp, Homo sapiens
tcctgggctgcgggcaaggcgatccggaacatggtggcggtgctggaagtcatctccagcctggagaaataccctattaccaaagagg

SEQ ID NO: 314526 - DNA, 51 bp, Homo sapiens
tggcattccagaatatctcagatgagcaggactttgaagaatatcctgaac

SEQ ID NO: 314527 - DNA, 98 bp, Homo sapiens
ggcgcgcaccgttggcgctggacgcttcctccttggaagcgcctctccctcagtggaggacttttgacccgtctcctcaccttctgatacacaccaac

SEQ ID NO: 314528 - DNA, 100 bp, Homo sapiens
tgctgctggttagtgtgctctgagggagggtccgagccagccgctgttttgccggaggagcccctcaggccgtggatatcatccagtgaaaattggagac

SEQ ID NO: 314529 - DNA, 75 bp, Homo sapiens
tgaagtatttgaagcacatttgggaagccacattttgcagatggcagatgatcagggctgtattgaagagcaggg

SEQ ID NO: 314530 - DNA, 87 bp, Homo sapiens
tattaattcttttcaaagtattagacaagaaatggaagcttatacacccaagttaactcaggcatgtccagatcagcaatgagtcgg

SEQ ID NO: 314531 - DNA, 98 bp, Homo sapiens
ggaatttttgtagaaaaatacgatcctacgatagaagattcttatagaaagtataacaagaggattgcctgatccagccaagatgcagagcacttcta

SEQ ID NO: 314532 - DNA, 75 bp, Homo sapiens
ccgccctccaggagaaggagtcgatgcgcaacagcctggctgagtagaggaagtgttttagatcacagtttggaa

SEQ ID NO: 314533 - DNA, 75 bp, Homo sapiens
ataaatgaaatcttcctaagtatagactaagaaaaatggctttgtcagcccaacagatacccagatggtttaact

SEQ ID NO: 314534 - DNA, 82 bp, Homo sapiens
gtgatgtggaggaaaacaacttcgagggcagaaccacagagtattcagccatggcctcgctggctggtgggctggacgacat

SEQ ID NO: 314535 - DNA, 100 bp, Homo sapiens
gcgggttcgcgtctgggaggccaagaccgctgtgtggaggtagccgcagcgccagcaccagttttcggctttgtgagaaaccttaccatcaaacacgatg

SEQ ID NO: 314536 - DNA, 100 bp, Homo sapiens
tcatcgaacagctggagcaaggcgacgaaccttggagagaggagaacgaacatcttctggacctttgtccagtttgtgtttaaggagaaactaacaatga

SEQ ID NO: 314537 - DNA, 82 bp, Homo sapiens
agacacatcagtggagtccatgctacctgattgcccccgggtctcagcagttactggctgaccaacaaagttcctatcaaaa

SEQ ID NO: 314538 - DNA, 75 bp, Homo sapiens
cttccactgattctacattatgatattgatgatgttaagaagttcaaaccgggttacctggaagctactcttaat

SEQ ID NO: 314539 - DNA, 100 bp, Homo sapiens
gacaagaccaaggtcaacaaggacaacaatgagatcgtggacaagatcatgggcaaaggacagatccagctcttggagtttgacaaggagttgtctgtct

SEQ ID NO: 314540 - DNA, 97 bp, Homo sapiens
tcgcgagcggctgcggaccatttataaccgcgacttcaagatcagggcaacagaacggaactgcctcatcacggaagaccctctggaatcaagaact

SEQ ID NO: 314541 - DNA, 75 bp, Homo sapiens
taagtggaattttggagatattcaaagaaagcgtggatacccatcaacgaagttttgatattggaattcagattg

SEQ ID NO: 314542 - DNA, 83 bp, Homo sapiens
gtcccgagcatggcaggctccctgcctccctgcgtggtggactgtggcaccgggctggcgcccatgcggctctacacgctctc

SEQ ID NO: 314543 - DNA, 82 bp, Homo sapiens
ccgcctgagcccagcccccagaaaggattgtgacatatcgttggacccagaattgagctgaatgcaatatccatacatctcc

SEQ ID NO: 314544 - DNA, 83 bp, Homo sapiens
caggggtaacacccttccagatgatttttgagcaaaatgatgcttcaacacccaggccaggtctctgcctcggaagtgagtgc

SEQ ID NO: 314545 - DNA, 98 bp, Homo sapiens
cacatactttaaagccaaagcagcaggagtttggaagcccttttcctccaaatcctgggaaaggcaatgagaagcacgaccttcatgttacctcccag

SEQ ID NO: 314546 - DNA, 98 bp, Homo sapiens
accttccggcggccgaagacactgcgactccggagacagcccaaatatcctcggaagagcgctcccaggagaaacaaatatgaagatcaatgatgcag

SEQ ID NO: 314547 - DNA, 75 bp, Homo sapiens
tgcggacatcagcagagtttctaatgaagaactcggatttatatggcgccaagattttgaacacagcacgaaaac

SEQ ID NO: 314548 - DNA, 100 bp, Homo sapiens
tgaaccggacagtcatcaccatgggccgggatcacattctgattttccaaagaactactggttcagattttagctcttcccaagttgtgaaaatagtgaa

SEQ ID NO: 314549 - DNA, 85 bp, Homo sapiens
attctccggggacccttccgtatctgcctaggcattttgctgtctcctcctaatacgctgtcccctttcctccaacccaacggct

SEQ ID NO: 314550 - DNA, 50 bp, Homo sapiens
cagcagccgccatggctctgctccgagagaatggtggcatgaagctcaaa

SEQ ID NO: 314551 - DNA, 100 bp, Homo sapiens
ccatgcactaccaggacagcctgcccagatgctgggctcttgcactgtttggtggaaatggtgagacaggatttgagcaaaattctacttattcagtgtt

SEQ ID NO: 314552 - DNA, 83 bp, Homo sapiens
cctcggagtccttggggacggagcagcgcgtcgtggggcgagcggcagcccgcggcgccatggctcacgtcggctcccgcaag

SEQ ID NO: 314553 - DNA, 100 bp, Homo sapiens
aggcagtaccttcaccaacctcaagtactgtaatcacccaggcaccatcctctaacaggccaattgtgtcttcatcctccaggtccacctttagcaagac

SEQ ID NO: 314554 - DNA, 90 bp, Homo sapiens
aacaaattcagtcccttctccatgaaatggtacacgcagaacatggatataagtatccagtatatggtgtccagtggcatccagagaaag

SEQ ID NO: 314555 - DNA, 100 bp, Homo sapiens
aagtgtgtgggaggcgttgacctgccccttgtcctggccccgtgtggacgaatgtggaacctcgctctgtggctgtgttcccttggcactccttagtccc

SEQ ID NO: 314556 - DNA, 100 bp, Homo sapiens
aaccacgtggttcgatggcggtggtggccacgctgaggctctctgctcagaaggtgcttcctggaggggcctgccccactgttcctgtgctgagttccag

SEQ ID NO: 314557 - DNA, 100 bp, Homo sapiens
gaacccgcaccaagctctgctccacactgccaaccggccagaggacgagtgtgattggcacagcaacgaggggacagtgaggacggaagcccaagtggca

SEQ ID NO: 314558 - DNA, 89 bp, Homo sapiens
ccgagccagccgctgttttgccggaggagcccctcaggccgtgctggagaatctggtaaaagcaccattgtgaagcagatgaggatcct

SEQ ID NO: 314559 - DNA, 101 bp, Homo sapiens
ccgaaatgccggtgcgaggagaccgcgggtttccaccccggcgggagctgtcaggttggctccgcaatgctatgaacctacctcctgacaaagccaggtta

SEQ ID NO: 314560 - DNA, 98 bp, Homo sapiens
ccaagtctctttccagaggccaggctttatgggagcatgggttaccagcgacgcaccctgtgacaatctccaatagacttgtgtcttcaccttgctgc

SEQ ID NO: 314561 - DNA, 74 bp, Homo sapiens
gtgcctggggcaacctccaccttgacggttccagggcagtattcaggccacacggttcaataacgggaaagaat

SEQ ID NO: 314562 - DNA, 109 bp, Homo sapiens
ccagactcaagacacacaactcataacagttgatgaaaaattgaacattctagtatgccagtagaaaaaaatatcactttagaaaggccttctaatgtaaatctcacat

SEQ ID NO: 314563 - DNA, 100 bp, Homo sapiens
aagctggtgctgagacagatgttgtcaactctgtgggaagaacagcagctcagatggcagcctttgtgggatgatcagaagctacaggagagtttaaggc

SEQ ID NO: 314564 - DNA, 115 bp, Homo sapiens
tgatgacgagtatcttgccctccccgctcggctgacacagatacacacacaggcacattggaaacgcagtagaaaatggctgccaatttaaaaccagaagttaagaagagcaaac

SEQ ID NO: 314565 - DNA, 58 bp, Homo sapiens
aaggccgagtacctctgccggataggtgacaaagaatcgggattaaaagttaaccagc

SEQ ID NO: 314566 - DNA, 89 bp, Homo sapiens
ggtgctcgtgatggggctgatcttcgccaaactgtggagcctcttctgtaaccaagttaccttatcccatatcacacaactggtcctca

SEQ ID NO: 314567 - DNA, 82 bp, Homo sapiens
ccatcgaagctctgcagacacctcgctggagaccccatgggatgtttcagcagcccctgagaaggaagaggaggaagctgag

SEQ ID NO: 314568 - DNA, 100 bp, Homo sapiens
ctgagagtgaccggcgaggtgcacattggaggcgtgatgcttaagctggtggagaaactcgtgcagtcattggagaaatcgatgaagaaacagattctgc

SEQ ID NO: 314569 - DNA, 75 bp, Homo sapiens
tatggtagctctatttagtaactgtcctgttgcttaccaaatcctgcagggacaggaccagatggtagaatcacc

SEQ ID NO: 314570 - DNA, 99 bp, Homo sapiens
ggcccccgcttcatcagcatagctggactcactgtgctggggacccaggaccttggggaaaagactttcgaggtgactctcctattccatctgtttctt

SEQ ID NO: 314571 - DNA, 82 bp, Homo sapiens
gaagagcggcagtttcgtgagcgacctcagcaggtaagaatgattgatgttggctgatattggagtgctcattcacatgaag

SEQ ID NO: 314572 - DNA, 100 bp, Homo sapiens
tgagcatgcgctggacgatagaagtacagcccaatgtagagtacaaatgcaggttgtacagcagttagagctacaggaaggagccatggctctggacggg

SEQ ID NO: 314573 - DNA, 83 bp, Homo sapiens
ggttattcgagtgaccgagaccgcggccgggaccgaggggcctgcacccagagagggtgagctacgtccttggggccacaggg

SEQ ID NO: 314574 - DNA, 74 bp, Homo sapiens
atttacggcatgtacttctgcatgaacatctccagccagggttggagcaaaacgtcccactcactggaggcacc

SEQ ID NO: 314575 - DNA, 75 bp, Homo sapiens
ggaacctactgtggggccgcggccggaccgagcgcctcgacctcggtctgagctgatgaacttattagtcctaaa

SEQ ID NO: 314576 - DNA, 86 bp, Homo sapiens
gtgggaggagtcctggcagcaggtgaagcagccaaaacagagtggagtacgagaaaagggtccgagcacaagccaagaagtttgcg

SEQ ID NO: 314577 - DNA, 98 bp, Homo sapiens
ggaggagtcagtcagaggggcgagcaggagcgattccgtcgccaaacaggccccttcacagatgtagtcactacaaatcttaaattgcgaaatccatc

SEQ ID NO: 314578 - DNA, 90 bp, Homo sapiens
gggttggtggcctgaatgtattagcttcgctgcgtctgcccaagagctaactgccttctatgaaagcagtcattattcaaggtgatcgta

SEQ ID NO: 314579 - DNA, 100 bp, Homo sapiens
gaggagcgcgtcgtgcgcctgggggtgcgcgcctgcgacctgcccgcctggtgaacttgaagatgatttacttggagaagatttgctatctggcaaaaag

SEQ ID NO: 314580 - DNA, 100 bp, Homo sapiens
ctggacctcagctacccccgcacccacgcggccctgctgaaagtggcgcaaatggttgatgagccaaccctttcctggtcacgtccatccactagagcca

SEQ ID NO: 314581 - DNA, 100 bp, Homo sapiens
gtccgtgacgctgagcgaggcggagaaggtgtacatcgtgcatggcgtccaggtccaggaggcccaggaggtcctgggggacccatgggtcgcatgggag

SEQ ID NO: 314582 - DNA, 80 bp, Homo sapiens
ggcgatgggatgcgggggctcgcggtgttcatctccgacatccggaactgaaggtgctcgggtcttcggggcactgggtc

SEQ ID NO: 314583 - DNA, 100 bp, Homo sapiens
ctaaatgaagattttaggcggtatcaaatggaaagtttttccaaatattcatctgtacagatgagttgatccgggaggtcaccatcaactgtgcggagag

SEQ ID NO: 314584 - DNA, 100 bp, Homo sapiens
cgtcctcaagttcttcatggtcaagtccgtcatctttctttccttctggcaaggcatgcttcggaaactggacatcaaaaacgaagacgatgtgaaatcg

SEQ ID NO: 314585 - DNA, 50 bp, Homo sapiens
ctttttctccaaacaccatttcaaggacatgtcctcatagagatttcaag

SEQ ID NO: 314586 - DNA, 100 bp, Homo sapiens
ggctcttcagctgccccaactttcagattgcgaagagcgccgctgaggacccagatgatgtggtaccagttggccaaagaagagcctggtgttggtgcat

SEQ ID NO: 314587 - DNA, 100 bp, Homo sapiens
tgcagatgacaccagggttcaggaaagtgagaaagatcagtctaaagaaaaggagaagaaagtgaaaaaaacaattccttcctgggctaccctttctgcc

SEQ ID NO: 314588 - DNA, 75 bp, Homo sapiens
gttgataaggaaagtactgtccaaatgaattatgtcagcaacgtatccaagttgagtcagcagatactggagtta

SEQ ID NO: 314589 - DNA, 98 bp, Homo sapiens
aaagattttactgtaacccagaaaatgatagaatgagaatgaagtatggtgctgggcctaaaggagataacatttatgaatggagatcaactatactt

SEQ ID NO: 314590 - DNA, 76 bp, Homo sapiens
atcagcgcggcctgtctcctcagttggtgttgttgggattttctaggatgtcttctgagattggaagggaaaagag

SEQ ID NO: 314591 - DNA, 100 bp, Homo sapiens
gaaataccagtccccagtgagggtgtacaaatacccctttgaattaattatggctgatctcatagatcagaacatactggagcctgtaacccgtgcacag

SEQ ID NO: 314592 - DNA, 151 bp, Homo sapiens
cgggccgccagtgccttcttcacctacgtgtcgctgagccaggaaggcaggtcgctgcctgtgccccagctggtgaaaaagcttgtggtgaaggggggcaaaaaaaagaagcaagttctgaagttcactcttgattgcacccaccctgtag

SEQ ID NO: 314593 - DNA, 95 bp, Homo sapiens
caagattcgtttaagacaacaactggaaatgtattccatttgatgtaatccctgttcattactacttaatacctccaccaacaaagactaagaat

SEQ ID NO: 314594 - DNA, 50 bp, Homo sapiens
acgacctgacggacaccacccgggcgggagttggtaaaatattaaagaag

SEQ ID NO: 314595 - DNA, 100 bp, Homo sapiens
ctgctcatgtccttgatccagacaaagtgtgccgacgacgccatgaccctggtactaaagaaagagcttgttgcgccctcccaggcccaatacttcaaag

SEQ ID NO: 314596 - DNA, 100 bp, Homo sapiens
gcggctgccgtacgtggccctcgatgtgctctgcgtgttgctggccttgatccagagcagaaggaaatgttaattgaagtaattgaaaaacttctgaaag

SEQ ID NO: 314597 - DNA, 75 bp, Homo sapiens
gaaggttgaagtctgggatgtagtagacaaagcccgcagggccccggaccccggcttccaggagcgcttcttcca

SEQ ID NO: 314598 - DNA, 75 bp, Homo sapiens
gctacaagacaacaccctgatctggcatggacataaactatgttccaacttcctgtcaacaatcttggcagttta

SEQ ID NO: 314599 - DNA, 92 bp, Homo sapiens
tggagaccttcgagcaccccaacgtggtcagagctattaagaatggcaaaggattgcatagcaagaaggaagtgcctatccaccgtgttgca

SEQ ID NO: 314600 - DNA, 96 bp, Homo sapiens
cggagaagacaagggcatcgccgcctcagccgccgccgccgccgttttcgcctgcagctgctcaccgataggtgaaaatggtgatcccaaagcctt

SEQ ID NO: 314601 - DNA, 75 bp, Homo sapiens
cagtcctagcagcatgcagtgactatttccggttgtggacatcggatacccaaggagacgaagctgaagcaggag

SEQ ID NO: 314602 - DNA, 101 bp, Homo sapiens
ccacgggcaggacttcgaccagcgcgcgcgcgaggagttccgccccaccatctacagcaacgtgatcaaaggtggtctttgggaagaagcttcctgccttt

SEQ ID NO: 314603 - DNA, 100 bp, Homo sapiens
gcgcgggttgtggatgttgtcggctccgtgttgtgatgacaggagaatgtgtgtgtgtcccgggcccagacgaattggttgaaagacttgaagccaaagt

SEQ ID NO: 314604 - DNA, 76 bp, Homo sapiens
catgtattacaccagagttgcttcgtatatttcagaatatgtcaccacttcttgatggagtttcactcttgctgcc

SEQ ID NO: 314605 - DNA, 100 bp, Homo sapiens
cttcgggagcgacgccgacagcgaagctgagcgtaaagaatggagagagaccatctcatgaagtacaaataataaaaaatatgccccagatggcaaactt

SEQ ID NO: 314606 - DNA, 90 bp, Homo sapiens
gagcggggccttccacaccccctccgtgggtgtgtggttatgaagacagtatggagtttccagaccatagtagacatttgctacagtgtc

SEQ ID NO: 314607 - DNA, 75 bp, Homo sapiens
ttttggagcttccatcctggttcttccaaagtgcccggacccaaaacaggaaacttatgaaaatatgcatcagtt

SEQ ID NO: 314608 - DNA, 80 bp, Homo sapiens
gagtatgcggaggacagctctgatgaggagacctcctgccccccgaggtctgcagtctcctgaacccagcagccatctac

SEQ ID NO: 314609 - DNA, 74 bp, Homo sapiens
tgagctggagaacccaccctacgtgcctggtaatagcctgcagctggtgttttgagaagccctactgctgaaaa

SEQ ID NO: 314610 - DNA, 51 bp, Homo sapiens
caaaggcatggaagtatgaaaatgtttctggagcagcagagctgaaggaac

SEQ ID NO: 314611 - DNA, 90 bp, Homo sapiens
gagccactgacgccgggaccgggaccgccgccgccgccgccaccatgcacctttggggagttgaagacggtccgcctgccaaagaagatg

SEQ ID NO: 314612 - DNA, 98 bp, Homo sapiens
caatggcatttacagaaagagtcaacagcagtggcaacagcccgacattgtcacctcctctttgaggggttagaagaagctgagatctcccgacagag

SEQ ID NO: 314613 - DNA, 98 bp, Homo sapiens
tttctgggatgggaagggatgtgagatgatctgttactgcaacttcagcgaattgctctgctgcccaaagcatggaggagtgacggcaggaactttct

SEQ ID NO: 314614 - DNA, 75 bp, Homo sapiens
cagtcctttgatgcagagacccagcagctgctgaagacagcactcaaaggatcaggcagctagagacatgaagag

SEQ ID NO: 314615 - DNA, 75 bp, Homo sapiens
aataacctttgacaagattttcaatcagaaaattggtgtcgtgaaaactacccctaaaagccaaaatgggaaagg

SEQ ID NO: 314616 - DNA, 74 bp, Homo sapiens
tgaagattgtgacctattagaaggacagtattagttcagaagcaggcctagaaattgatagccagcaggaagaa

SEQ ID NO: 314617 - DNA, 82 bp, Homo sapiens
ggagtcggaggagccgcgggcggcgcggcccagctcgttccagaacctgcaaccatggtcgtgccactagccagctcggaag

SEQ ID NO: 314618 - DNA, 98 bp, Homo sapiens
ggtcgtatagaaaaacaaccagtgctgcgacccttggaactaaaaacttttctcaaagttggcttacctgcgagccatcgatgtgaagatcctgcagc

SEQ ID NO: 314619 - DNA, 75 bp, Homo sapiens
gtatcacagaagttataaagttattgctaagtgtgggaattttagctaactcaatgtcaattgctgcaagcttag

SEQ ID NO: 314620 - DNA, 75 bp, Homo sapiens
cgccacacccttgttttgagatcctctctaagataagaccatcatcatgtggaaactgaccagggatgagaccaa

SEQ ID NO: 314621 - DNA, 100 bp, Homo sapiens
aacccgggaaaagaggaactaaggcggaggaactgagacgtttcgaattccagatgaaatcagacatcactgaaggagttgatattccaaagaaacctag

SEQ ID NO: 314622 - DNA, 101 bp, Homo sapiens
aagcactgtatcgacaggacccagagtcattacctttccggcagcctgtagatccccagctcctcggaattccagagtctcgctctcagtcaaaatctcca

SEQ ID NO: 314623 - DNA, 83 bp, Homo sapiens
ccagacccggaggaccgaagcttccggacgacgaggaaccgcccaacatggcctcggaggaaagaaccggaggctgaagcagg

SEQ ID NO: 314624 - DNA, 90 bp, Homo sapiens
gcacccctgcagtttaagagaatccactagtttataagctcctactgaagcccaagttcagcggcgtggagaagatcaagaccatcggca

SEQ ID NO: 314625 - DNA, 95 bp, Homo sapiens
gacccaagggcgccaaaggagaagtgggcccccccggaccaccagggactcggagatcatgcagcagaagcagaaaaaggcaaacgagaagaagg

SEQ ID NO: 314626 - DNA, 82 bp, Homo sapiens
cctggttctggaatcctcagttcaagatgacagtcatgtccctttccagggacctcaaggacgactttcacagtgacacggt

SEQ ID NO: 314627 - DNA, 82 bp, Homo sapiens
gaagagcgctgggttggacctttacctgtggaggcaacactggccaagaagaggaaagatgcagcagcttttttatgagaat

SEQ ID NO: 314628 - DNA, 51 bp, Homo sapiens
tacagtttacaggctgactactggaagtcctggagcagaacaatttttccc

SEQ ID NO: 314629 - DNA, 101 bp, Homo sapiens
tcccagctacttggaaggctgaggaaactgtggagatataaatttagtacgactgggtccagaaaagtctattaatagtgaggttctaaagttcagtttgg

SEQ ID NO: 314630 - DNA, 50 bp, Homo sapiens
ccaaaaacgtcaacaacagttttacgaccttaactgatgtaagaaatctc

SEQ ID NO: 314631 - DNA, 101 bp, Homo sapiens
tcaacaatgattgctcaagacttctttgtggctttgctaaaggacagggaagacaaaggcgctttggctaagctggtggaagctatcaggaccaattacaa

SEQ ID NO: 314632 - DNA, 75 bp, Homo sapiens
aagcagtcctcctgcctcagtctcccaaagtgctggaattacaggggatgaaaactcctcctctactaatctctg

SEQ ID NO: 314633 - DNA, 83 bp, Homo sapiens
cgagcagaggcttaaggtcttcagcggggcgctccaggaggcactcacagaacactctgctccagccaaggtggtgagggcag

SEQ ID NO: 314634 - DNA, 88 bp, Homo sapiens
gtagtctgaatcaacctaagttttaaacagaaggtgaacctctgagggtgaggctggtattccaggtgttccaggagctaaaggcgaa

SEQ ID NO: 314635 - DNA, 83 bp, Homo sapiens
aaccaacccactttctcggcgccgcggctcttttctaaaagtggggaacacacctgaaactagaggaacagcttatgtggtct

SEQ ID NO: 314636 - DNA, 106 bp, Homo sapiens
cgggagcccggccggagctgggtctggagacgccgtggcagcctgaacggagtgtgcgacggattgggagaaaaggcgacggcggattgacagaagtatgattgga

SEQ ID NO: 314637 - DNA, 90 bp, Homo sapiens
aggaattcgccgtgcccgagaatagctccgtccagcagaatcagcatgattcttcagaggctcttcaggttctcctctgtcattcggtca

SEQ ID NO: 314638 - DNA, 100 bp, Homo sapiens
ccagccgcggtgcgccttctccacgctgggccgggtgttgcgcctggcctacagcgaggctggtaaaaatgtctccatcgtatcatcagtccaaagggga

SEQ ID NO: 314639 - DNA, 100 bp, Homo sapiens
gaaattaatgccgtggaagcaattcatagagctgtggaatttaatcctcatgttccaaaagtgtcccgacccaggctaagcttgagcatggctgagcagg

SEQ ID NO: 314640 - DNA, 89 bp, Homo sapiens
ctaatgcagttcatcacatcattcatgattttcaggttgactatagtcaatggggccaatggagccaagtgtatggaaacccacaacag

SEQ ID NO: 314641 - DNA, 75 bp, Homo sapiens
atggtgctgtaaccacctcacagattccagcttcggaacaagagaccctgctatgtttccagtgtcctctgggtg

SEQ ID NO: 314642 - DNA, 83 bp, Homo sapiens
gctgctgttgcagcacttgttccccaaacaagtgctcctacattctggtgaaagaaaatggcccgaaccaagcagactgctcg

SEQ ID NO: 314643 - DNA, 75 bp, Homo sapiens
ccgcaactccgccgcccaccatggcttccgaggagctgtacgagattacaacagcagtgaattgaaaacagcctg

SEQ ID NO: 314644 - DNA, 114 bp, Homo sapiens
agaccaccaccagaaccatcacctcggagacccagacaatcacaggaaaatatatgcagatgatgaacattcttaagccaattgcctttgatgttattcatttcatgtctcaac

SEQ ID NO: 314645 - DNA, 90 bp, Homo sapiens
tggcatttcagtcactggtttgcagagtccagacacagagattgactggaaggcctacatggccgaggtagaaggcgtcatcaatggtac

SEQ ID NO: 314646 - DNA, 99 bp, Homo sapiens
ctggagcatcgtcggagccttttgcctcatgtgtcaggcgtgtgcgtgcagacggagacagtgctgcggcaggccattgccgagcgcatcaagcctgtg

SEQ ID NO: 314647 - DNA, 82 bp, Homo sapiens
ccgagcgcttgatgtgcgcggagagcaatcgccgggacagctgcaagggagtgcatccgccccaacccttttccccctcgtc

SEQ ID NO: 314648 - DNA, 83 bp, Homo sapiens
tgcagggcggtaaggatttcaacatgcctctgacaatctctagtttaagtgggcagaccaacatccacctcagcaaaaacttc

SEQ ID NO: 314649 - DNA, 100 bp, Homo sapiens
gccctctgaggagatggtcatgacagatgaaggtcaccgtgtccaaagggggcgaccgggacagtgacgacgacagcgtcctcgaagccaccagctcccg

SEQ ID NO: 314650 - DNA, 100 bp, Homo sapiens
aaactgcccctcctttgacattcacaccatccacgtgtgtctgcaccttgcagtcttacttgttccttcttggagggaccactcagtagagcctctaagg

SEQ ID NO: 314651 - DNA, 96 bp, Homo sapiens
gcacaggatgcggtcagcccgcggggcctggagcccgtggtccttcaccgcgtggatgcgcagtctcggaagggtgctgacctggaccgggagaag

SEQ ID NO: 314652 - DNA, 75 bp, Homo sapiens
tcttggtccgccgggagtctgagctcaggttcatattgccaacactcctgatagctgaatgtgtgctggtttaca

SEQ ID NO: 314653 - DNA, 75 bp, Homo sapiens
cttcgaaaaatgatcaactattgaccatataggaggagatgttaaagtaacccatcttgcaggacgacattgaag

SEQ ID NO: 314654 - DNA, 90 bp, Homo sapiens
agcgcactctggagggattctggcatcagggaggctttcagccggagaagcgagtttcagctgtgataatatgcagcatgcatactggga

SEQ ID NO: 314655 - DNA, 97 bp, Homo sapiens
aaaactcgtgtccatcaaaatccagatgctggatgacacccaggaggcatttgaagttccagctggagcattggatttgctaaaggagcttaagaat

SEQ ID NO: 314656 - DNA, 101 bp, Homo sapiens
aagcattcttgttgagctggtgtcagctgtgtaaagaacatgatctggccatgattaaccagttgctggatgacccgaagctgacagccaggaaatacaga

SEQ ID NO: 314657 - DNA, 75 bp, Homo sapiens
gtttttaaagtaggagagcctacatattcttgcagcctagaacattccatattctgcttcacacacggtgactca

SEQ ID NO: 314658 - DNA, 102 bp, Homo sapiens
gaatgcttgtgaaaagttgcccaaggccaatcacaacaacatccggcacagaaaactgaatctgtagataacgagggagaatgaattgtcatgaaaaattgg

SEQ ID NO: 314659 - DNA, 90 bp, Homo sapiens
agccctagagaggacaccgggacacccagaagccgggaaatggttcttgggtgtctctggggagtccctgggccagaccttcctccagac

SEQ ID NO: 314660 - DNA, 48 bp, Homo sapiens
tgaaaaagtgtgacttggcagctggtcctggctataagtcaccatggc

SEQ ID NO: 314661 - DNA, 89 bp, Homo sapiens
atgcttgggatgtgaagatgttgctagagcttggaactgcagttggctttttgctaccaccagttttagtacccaacacacagaatgac

SEQ ID NO: 314662 - DNA, 75 bp, Homo sapiens
gatgggctcttcggtggatcctccatgttttggacaaaacttaattcagtgcacaaatgagatgaatgtgaacat

SEQ ID NO: 314663 - DNA, 50 bp, Homo sapiens
tccatattggggagatgaagcaggtgcgagaagatgtactaaattcattg

SEQ ID NO: 314664 - DNA, 83 bp, Homo sapiens
accgccagatcaacctggagctctacgcctcctacgtttacctgtccatgggctgtggtggaggctgtgcatcgacttgacct

SEQ ID NO: 314665 - DNA, 104 bp, Homo sapiens
aaaaattattagaaattccgcgggcggtgtagaggcggcggacgggccggagggaggatgttaaagccccgcgggatcgaaaattgtacaatttgggattaaaa

SEQ ID NO: 314666 - DNA, 100 bp, Homo sapiens
ggaagctctttcacttcggaggattgctcaacaaccatgctgggcatctggaccctcctacctctggtcatcatcagatttgaaatatttaaagtggata

SEQ ID NO: 314667 - DNA, 75 bp, Homo sapiens
cccgacttcctctacgaccacatccagccggtgcgcgcagagctcatgcagtatgaaaacaaagttgcagtacgt

SEQ ID NO: 314668 - DNA, 100 bp, Homo sapiens
gtatcagtgctgatattgaaacaattggagaaattctgaagaaaatcatccctaccttggaagaggtggatccttttcataccttatttggaattgctgg

SEQ ID NO: 314669 - DNA, 100 bp, Homo sapiens
cctggcactccgagtacaaggacagcgcctggatcttcctgggtcattacacctactctgagaatcgtgtggaaaaagacggcctgattcttacaagccg

SEQ ID NO: 314670 - DNA, 75 bp, Homo sapiens
cctgacggcgtgaccgacccgagccgaaaatggtgtgaatggaacattaacttcaaatgtagcagactctccccg

SEQ ID NO: 314671 - DNA, 82 bp, Homo sapiens
gctcctcctgaagtgtctttggtccaacgttgttccagattgggaaaatgaggtacgttagtgttcgcgattttaaaggcaa

SEQ ID NO: 314672 - DNA, 75 bp, Homo sapiens
ctcaagcaaagaagagttgagcacaatcaggtggaagcagggaaaggcctggagatgaggaagctggttctctcg

SEQ ID NO: 314673 - DNA, 82 bp, Homo sapiens
tagccctcctactgatgaacagttgaacatgaagaatactggaaagttgctatgttttgcaatggctgccatccggaagaaa

SEQ ID NO: 314674 - DNA, 101 bp, Homo sapiens
caagaacctggcttttagctgaactaaggagaaagtcctacaacagtttggcgtgcaacatggggcttgagaaagggaaccttcagaagtttagtcttttt

SEQ ID NO: 314675 - DNA, 75 bp, Homo sapiens
agcggccagggacggccgcagaagtgcctccggagccagcgtggtggccatagacaacaagatcgaacaggccat

SEQ ID NO: 314676 - DNA, 75 bp, Homo sapiens
cctgcatggattgggagatactggtcctgccattgactctaccagaggagattcttcaagcttagttgctgaact

SEQ ID NO: 314677 - DNA, 78 bp, Homo sapiens
gctgcggctctgcgcggtccccgccagcgccccatcctgagccgtggacagaggactgcagaaaatcaacctatcctc

SEQ ID NO: 314678 - DNA, 98 bp, Homo sapiens
aacattttgaagaacacaattccatgaatgaactgaagaatgagagggagaaacttcaaataaagatagatgagatggataaaatacttaagaagatc

SEQ ID NO: 314679 - DNA, 98 bp, Homo sapiens
ttcgttatatcccctttagaatatatcagtgtcacatttgaagacgagcactgaggatgaggaaccaactgaagaatatgaaaatgttggaaatgcag

SEQ ID NO: 314680 - DNA, 100 bp, Homo sapiens
ctagggaccccccccgcgcctgcacttagccccgcgcccgaggttgaaggtttagaacagatgtggaaaaatgtttacttcagagaaaggggttgtggag

SEQ ID NO: 314681 - DNA, 97 bp, Homo sapiens
aacgaggtactgagtgtcggcatcagcactgagctagacatggcagtgtcaggatcaaggccttgttagatgacttggataaagaactaaacaacta

SEQ ID NO: 314682 - DNA, 96 bp, Homo sapiens
gaggagtctctgtccgggggcctggctaaggaaaccctattacctccagtaagactttgaccccgacgcaggcttcagtgattgccgcggatcaga

SEQ ID NO: 314683 - DNA, 100 bp, Homo sapiens
gatcctatacctgccacgccaataactcagtcactggctgcaacaggaccacagtcaagacgatcatagtcactgattcacatgcatgggaacaactaca

SEQ ID NO: 314684 - DNA, 75 bp, Homo sapiens
accctgactcgggccaaatttgaagagctcaacatgaatgcttccaggaccactcatgatgtaccagtttcaaag

SEQ ID NO: 314685 - DNA, 98 bp, Homo sapiens
gcattctgtgaattggctgactccacttctatggtgagagagaggagtgcatcaaagattactcccagcccttgaaggtagtggacccagatcatccc

SEQ ID NO: 314686 - DNA, 100 bp, Homo sapiens
gccgcgtgctgggaggagactggagcccggttaggaagaatggagttggcgactcgctaccaggtgaaaagagatttgaatgcccggaatgttctaaaag

SEQ ID NO: 314687 - DNA, 50 bp, Homo sapiens
tgcacctgctgcattgctgttttcctgaaatcttacaggctggtgttaaa

SEQ ID NO: 314688 - DNA, 83 bp, Homo sapiens
gccgggccggccgcccagacgctgcccgcgggcccggccacggcggagccaaggccctgtttgtgctcttcgtcctggcctac

SEQ ID NO: 314689 - DNA, 100 bp, Homo sapiens
gatccctgaatgggcccgtgggcatatttagtcattcatttttgatcaggagaaagaagacagccatcatttgaaaggtctgccatcatggatgttctcg

SEQ ID NO: 314690 - DNA, 75 bp, Homo sapiens
ggcagctgagcctggtggcctccgttctcttggcccaggagccaaggcaaagagggaccactgtgctcatggacc

SEQ ID NO: 314691 - DNA, 75 bp, Homo sapiens
atgaacagaaacacctaggaagggagaactggtccggcctctttggcctacccccgttggctccgctgccccagg

SEQ ID NO: 314692 - DNA, 76 bp, Homo sapiens
gcgcgatggagcagcgaaaacgtggttgtagagttccgtgactcccagctatgacatggtgcattacggccactcc

SEQ ID NO: 314693 - DNA, 129 bp, Homo sapiens
ccaacaagacgcacccgtccatcttcgggatcttcgacgggcacgggggagagggccgttgctccagggagaactgcaaatatcttcatccacccccacatttaaaaacgcagttggagataaatggac

SEQ ID NO: 314694 - DNA, 90 bp, Homo sapiens
cggaggctggcggccgaggagctgggggtcgtcaccatgcaggtacgacagtgccagcccacagggccatcctggtggcccgttgtgaag

SEQ ID NO: 314695 - DNA, 75 bp, Homo sapiens
ctctgatatttggccccaagccgatgcatcacagtgacatcccggagactgtgcctttgtccactgtcaatagac

SEQ ID NO: 314696 - DNA, 90 bp, Homo sapiens
cgaaaacggactcttatcttcaacttcacaataaaaaaagaggggaatctcatccagaacagattcaatgccatccccatcaagctacca

SEQ ID NO: 314697 - DNA, 82 bp, Homo sapiens
acagtctctgcacctcgcgccccagcagatgctttcttcacatgtcgaaaaaatgtccttctggcgaacagctcatcccccc

SEQ ID NO: 314698 - DNA, 50 bp, Homo sapiens
agattactctgcaacagctaaaggctggcaaagcacacaggctgagcgct

SEQ ID NO: 314699 - DNA, 104 bp, Homo sapiens
cgagcgcccctccgagctggggttggacgctgccagtttgcacagcagcagcggagctggagtttgttcagatcatcatcatcgtggtggtgatgatggtgatg

SEQ ID NO: 314700 - DNA, 73 bp, Homo sapiens
ggcaccccccgccgacaaggagggctccggtagattgcaaatgacctgctttctttctgttcccgggcgtttg

SEQ ID NO: 314701 - DNA, 89 bp, Homo sapiens
cagccaatcaatgaaactgacactccagcacaggggcccagaagacacctgctttgagtttggtgtttttcctgccatcctgagtttcc

SEQ ID NO: 314702 - DNA, 75 bp, Homo sapiens
gatcctctgtacgcccgttcactggtgttggagcgggccggagagaagtagagtgggctgcgaggagaaggaaac

SEQ ID NO: 314703 - DNA, 80 bp, Homo sapiens
ttcgccgttaccttcttgctggcgttggtgggagccgtgctctacctctatccggtctcggcgcggaagatggccggcgg

SEQ ID NO: 314704 - DNA, 100 bp, Homo sapiens
tgcatgtactgggggattcgcagggaggatgtcgggacaccccggaagctgggaaatggtgtcatggagaaactccagctgggcccagagattctgcagc

SEQ ID NO: 314705 - DNA, 90 bp, Homo sapiens
acctgctcctggacccggcctgggagaagcagcagagaaagttgctgattgttggaggttcttttggtcttcgtgagttttctcaaatcc

SEQ ID NO: 314706 - DNA, 83 bp, Homo sapiens
ctcccaagtagctggaattacagattccattggccgtgacatccccaaaatgcttgaattatttaaaaatggacatgaaatta

SEQ ID NO: 314707 - DNA, 100 bp, Homo sapiens
gtctaatgtggctgctgcctcgtgtcacatctgaaactcatctgtacctcacttagaaagtatatttgccttccctccatgatctccaacactatccgat

SEQ ID NO: 314708 - DNA, 87 bp, Homo sapiens
ggaacacccctggcacaacaacgagattctacaagcctctgtagatggtccaggtatctcagatgaagacatcatcaacattactct

SEQ ID NO: 314709 - DNA, 88 bp, Homo sapiens
ggaacagagcaaagagttcctgaggctagagtaccgtggcacaatctcagctcattgcaacctctgcttcctgggctcaagcactctg

SEQ ID NO: 314710 - DNA, 100 bp, Homo sapiens
ggaggaacactctctgaggaagcccaactcctatgagctcctctctggcagagttttgattcatcatggataatctgtcatcagaagaaattcaacagag

SEQ ID NO: 314711 - DNA, 100 bp, Homo sapiens
ggcgcttcaaggagttcctgcggcagtaccgagtgggcaccgaccgcacgggcttcaccttcaaatacagtctccagaacacagaggagtccctgcgcca

SEQ ID NO: 314712 - DNA, 100 bp, Homo sapiens
catggagacccgctacaacctgaagagtccgggtgtccctggccagtgtccttccacctgtccacaagcatggggaacatcttcgccaacctcttcaagg

SEQ ID NO: 314713 - DNA, 100 bp, Homo sapiens
aaggaactttgggtcctgaatcttctgggagctgaggaaccagatatcttgaaaagctgccagaaagaataactgaagtgaagtgatggactccgatttg

SEQ ID NO: 314714 - DNA, 75 bp, Homo sapiens
ccgagctcgttggagcttgaacccattgtcacccctccggaacccaagacagaccaggatgaggagcattgccgg

SEQ ID NO: 314715 - DNA, 82 bp, Homo sapiens
cgccagcctgcgaaggtggcggcgctgctgctcgggctgctcttggaggattctgtttcactgaggccatctatccgatttc

SEQ ID NO: 314716 - DNA, 83 bp, Homo sapiens
gttcttgtttgtggatcgctgtgatcgtcacttggttcgtgctggccgtgggcagcgccgtctttgatgccatgttcaacggg

SEQ ID NO: 314717 - DNA, 100 bp, Homo sapiens
ggcggatctggaggagcagttgtctgatgaagagaagggaaatgatattgaccctgaagcagttaaaggtgaagtgttaaaagttggaaataagagctgt

SEQ ID NO: 314718 - DNA, 75 bp, Homo sapiens
gaaggggtcccgaagccccctgcaggaactctacaacccaatccagtcatatttgatcagaaattggatgaacct

SEQ ID NO: 314719 - DNA, 80 bp, Homo sapiens
ggccgtgccgcagatgcccaccggaatggagaaggaagaggagtcggaaatttggtgagcggcctccacctaaacgactt

SEQ ID NO: 314720 - DNA, 85 bp, Homo sapiens
gcagtccggaggtgaggcggaactctgaggaaaggccttggaaagcagtcgttgcgccagacagcccagggaagagcggcagcct

SEQ ID NO: 314721 - DNA, 75 bp, Homo sapiens
cgatgtttcaatattggaagcgctttgatttacagcagctgcagatggagttggctgtgggtccattctgtagac

SEQ ID NO: 314722 - DNA, 51 bp, Homo sapiens
ctgcaggcagaagctgagacggctaaggtacaggaagaaggaatggaatcg

SEQ ID NO: 314723 - DNA, 121 bp, Homo sapiens
gcctgtagactggaagtcatcgcatactaggaccttgcacttgcttactctgaacctctcagaaaaaggggcttatatttggcaccctttaccctgcgtattattcctacaaggctgtgaa

SEQ ID NO: 314724 - DNA, 75 bp, Homo sapiens
ctctctgttctagtaactatagaaatgtgtaacgccctcaacaggagcttcctccagctgggcgccggcctgagc

SEQ ID NO: 314725 - DNA, 75 bp, Homo sapiens
gctacggtgacatttctgccactgttggaagtttcttggaccatggctaaacctcctggatcattagccagaagc

SEQ ID NO: 314726 - DNA, 76 bp, Homo sapiens
ggccgattactgcgagaacaactacatacagatcttagcaaagcaatgtctcaagatggtgcttctcagttccaag

SEQ ID NO: 314727 - DNA, 48 bp, Homo sapiens
cgaatcccggctccaagaaaccggaatcccagtcagaagttccagcct

SEQ ID NO: 314728 - DNA, 80 bp, Homo sapiens
aacagtttgtggcaagacaagctcagaactgagaagctgtcaccacaggtgatttgatgaaggctgctgcaggagagttc

SEQ ID NO: 314729 - DNA, 98 bp, Homo sapiens
gtttggttttgtagacttcaacagtgaggaggatgccaaagctgccaaggagctgaagtcgcttgagaaagaaattgctggccaagatgaggaccact

SEQ ID NO: 314730 - DNA, 90 bp, Homo sapiens
actggagatgttcaaacagcaagttactgtatgttacaggtagatgacattaatgctgataagaatatctcttctgcacagattgttggt

SEQ ID NO: 314731 - DNA, 75 bp, Homo sapiens
aagatttgcagtggtggcctgataaggcattgaatgccccagaggagcccgaaacctcccaggcttggtgcagga

SEQ ID NO: 314732 - DNA, 75 bp, Homo sapiens
ggaccaagttccggagcctgctcctcaacatgctgcaggtgtttcccattaaacactaccaggacaaaatcaggc

SEQ ID NO: 314733 - DNA, 83 bp, Homo sapiens
agcaacctgacaattctgtcgtgtcccggccatggcccaaaaggaagatatggaagagagaatcactactcttgaaaaacgct

SEQ ID NO: 314734 - DNA, 98 bp, Homo sapiens
ggtgggcatcaccttctgggtcattcacagggtggcatgtattatagctgcaaatgtccttgtattctgtttatggagagtaccttctctgcagcgga

SEQ ID NO: 314735 - DNA, 100 bp, Homo sapiens
ggaaccgcaggactgcagggtctctccaggtgtatgcaacagcgttattgcaacaggctaacgaaaacagacaaaattcaactggaaaagcatgttttgg

SEQ ID NO: 314736 - DNA, 75 bp, Homo sapiens
agcagcccagacagcggccacctcaaggccctggccaacgtcaacattgggagcctcatctgcaatgtaggggcc

SEQ ID NO: 314737 - DNA, 100 bp, Homo sapiens
gggaaaccagctgagccaacccacattctgacctaaggagcactgagacaccattcgcttttcacccaagatgatttgatgtcttataaaactctgatga

SEQ ID NO: 314738 - DNA, 74 bp, Homo sapiens
atatgaacctgagccttcagtcaagaccctccagcttgcctttgtcggacaagtaaccgcaagagcttgattgt

SEQ ID NO: 314739 - DNA, 75 bp, Homo sapiens
gggaaatgggaatgtacacgataattaaagagtaaagttgtgctcaacggtgaatcagctcccggccgactttag

SEQ ID NO: 314740 - DNA, 83 bp, Homo sapiens
gccggcttggagaggccgagggtttgatgaaggtggaggcagcgcggctctcaggagcatcagatccatgctgctgctgactc

SEQ ID NO: 314741 - DNA, 82 bp, Homo sapiens
ggttaacttgggagaaagtttcatctgtggatggagtattgagtcatcttagtgggatttggggaagcaacagggctgtgtg

SEQ ID NO: 314742 - DNA, 98 bp, Homo sapiens
ttgccgatagtcttccttgtgcagaaggagagtttatcttccttcggcttaatgttcttcgtgagtggtctctcccgacatcacttctgactatctca

SEQ ID NO: 314743 - DNA, 90 bp, Homo sapiens
caaagcctgaactgatagctgcagagaagaaatatttttctttaaagcctgaagaaaaggagattcctgaaattccagaaagcatttcat

SEQ ID NO: 314744 - DNA, 100 bp, Homo sapiens
gatttactggagttgcaagtgggagcactggaagtacgggcagttgcagtgttggagctaaaggcctgctttcttccccgggcgatgtgcagagatcttt

SEQ ID NO: 314745 - DNA, 75 bp, Homo sapiens
ggggattgcagaaagtttttgaacatgacaggagtcagtggatcggtggggaaaatgctgcttaccctgggccct

SEQ ID NO: 314746 - DNA, 100 bp, Homo sapiens
tgcaatagaagctgtggatgaatttgcttttctggaagctgcctactgaatcactcttctatcgtgctgttcttcaggatattattaaagattgttatgg

SEQ ID NO: 314747 - DNA, 75 bp, Homo sapiens
cactgcaagcggctgagggacctcagacggtctggaaaatcccgaagcagaagcccgtattcatctaggcattca

SEQ ID NO: 314748 - DNA, 48 bp, Homo sapiens
agatgctccaaaggaaatgagcaaggtgccaagtctagtggtggcagg

SEQ ID NO: 314749 - DNA, 74 bp, Homo sapiens
agcaaggaggtgaccctgaacctctacgacacggccgggcacctggacgatgacggattaccgcacgggttctg

SEQ ID NO: 314750 - DNA, 50 bp, Homo sapiens
cgactcctttgttactcactgtgttcgggcatacagattctctctcctca

SEQ ID NO: 314751 - DNA, 75 bp, Homo sapiens
aaactggaggagtcccgctcgaagctagtggctgcttcaacccccaactccactgctggtgcagccatgaactcc

SEQ ID NO: 314752 - DNA, 74 bp, Homo sapiens
gaagaaatacagcttggtgaagagttactagctcaaggtccttatgtcgtcagaagatcgagaagctcaggagg

SEQ ID NO: 314753 - DNA, 100 bp, Homo sapiens
gtgcagccagttcaaagactaaactgccaaagttcaccatcctccaaacaagtgaagaatgtcgttgtctgctgggtcttcccctcttcattcccccaag

SEQ ID NO: 314754 - DNA, 90 bp, Homo sapiens
ctgccgccggcgaaggaggaggcgttgccggtttcaccagtgatcattaaagaatgggcagcttacaaaggaaagtctcctcaaaccccg

SEQ ID NO: 314755 - DNA, 100 bp, Homo sapiens
agaccagctgcccccaggaagattattttccccccaacctctttgtcaaggtcaatgggaaactgtgccccctgccggagttcaaagaaggacgcagagc

SEQ ID NO: 314756 - DNA, 98 bp, Homo sapiens
tgcatgaaccaaacccacttcgttcaagacaggtgtttaagcctggagaatgctggaggagaccttaaggatggccaccaccactatgaaggagctgt

SEQ ID NO: 314757 - DNA, 87 bp, Homo sapiens
caggacccacttgcagcatggagtcgcccgcctcgagccagcccgccagcatgccccagtccaaagctttcgccgtcatgattgtgc

SEQ ID NO: 314758 - DNA, 83 bp, Homo sapiens
tttgagattgacgcggtgaactctgtccagttttcaaaccacacagctccccgcagccaccgccacccattggaatggccaac

SEQ ID NO: 314759 - DNA, 74 bp, Homo sapiens
attttgtctaaatcctaaaactaacctttgccagaagataagggaccacgggatcattcgaactctggatttac

SEQ ID NO: 314760 - DNA, 75 bp, Homo sapiens
gatcctaattcccttgctgatgatattgttaatgacagttcggactatcacaggaaatatctactatgcaaggtc

SEQ ID NO: 314761 - DNA, 90 bp, Homo sapiens
acctgtgagatgtttcatcccaacacctcagggatttagagatactgttgttacttctgcatgttcattgcaaacagaaggttccttgag

SEQ ID NO: 314762 - DNA, 101 bp, Homo sapiens
ttcccctcccttgcatgatggaaacaccatggctgcggcggcccagctctctctgacacagacctagaggatcaagacataatgggagcatttttagacaa

SEQ ID NO: 314763 - DNA, 100 bp, Homo sapiens
ttagaacaactggggacaaccctggatatgggggaactgagagaaggccaatgatgaggccaatcagagtgatacaagtgtctccttgtcagaacccaag

SEQ ID NO: 314764 - DNA, 83 bp, Homo sapiens
gacatccacttctaccccaccttccgggtatctacgagaccccagcaggcaccatcctttaccatgctcatttagacatcgag

SEQ ID NO: 314765 - DNA, 98 bp, Homo sapiens
taataatgaacccacatgcctctaccaatggacagctctcagtccacactcccaaaagggaaagcaaatgatgtgcttgcttttggaacattggtcag

SEQ ID NO: 314766 - DNA, 75 bp, Homo sapiens
cacatgggatatcccaagtagtacccgtcttccaggcagaatatctcttcaagaacaatcctgaagcacagtgaa

SEQ ID NO: 314767 - DNA, 101 bp, Homo sapiens
gaggagcagggcctgactgcgcagctgactgcctgcatccacgggtctgcggcgatgctctaccccatgtactggcagcacgtgtacatccccgtgctgcc

SEQ ID NO: 314768 - DNA, 98 bp, Homo sapiens
tcccactggctctgctgaccttgtgccttgggtgcttcaaggatgaccgcatcgtcttctggacttggatgttctccacctacttcatggagaaatgg

SEQ ID NO: 314769 - DNA, 100 bp, Homo sapiens
acagaggtcaaaggaaaaagaaaaaggggtcgtcctggccggcctccagagattatttggtagcaattgaagagaaaaacaaagctacatttctacgtgc

SEQ ID NO: 314770 - DNA, 100 bp, Homo sapiens
aaggcaaagcgaaattggtcattctcgctaacaactgcccagctttgagaactcaagacatggctgcccagtgtgtcacaaaggtggcgctgaatgtttc

SEQ ID NO: 314771 - DNA, 100 bp, Homo sapiens
cggaataccgagacgggcctctgctgttccctgagcttgctgtcagcaaatgtttgacgtgcagttcctggcctcggtgctgcccccagacacggatcct

SEQ ID NO: 314772 - DNA, 74 bp, Homo sapiens
agtgtcgctttctacgtattgcagccaaagaagcctaaagccccagacaatccatttcatggcattgtttccaa

SEQ ID NO: 314773 - DNA, 98 bp, Homo sapiens
tcaccatacaggaacagggcagacgttagcgtgagtgatcactctcaatcccggaaatgcactcggtgatggaaagagagccactattctgaagaaca

SEQ ID NO: 314774 - DNA, 82 bp, Homo sapiens
aacaaggtggcccctgttgtgatcacagcaatggtggaacaaagcggcaaaagatatcccatcaaaattatatagcctatca

SEQ ID NO: 314775 - DNA, 74 bp, Homo sapiens
ctgtgtggtgtgtgatgagcagcatgtcttccaaaatggatctatgctgaaggacctcagcagccatgtcgaag

SEQ ID NO: 314776 - DNA, 100 bp, Homo sapiens
ttcctaccatctaaaatacgaaggtttctggctggcaggcagcataagaggccgagggcgaggtgcagctggcaacagagccccagggcctaggggttcc

SEQ ID NO: 314777 - DNA, 75 bp, Homo sapiens
gggagcacttcgagaagctggagaaggacctgaaggagaagaaggagaaggtggaggagaaggcaagccggaaag

SEQ ID NO: 314778 - DNA, 83 bp, Homo sapiens
cccagaagaagtccgtccatgtcaaagatgagacaatgcagatcttcgtgaagactctgactggtaagaccatcaccctcgag

SEQ ID NO: 314779 - DNA, 101 bp, Homo sapiens
atttcttagagatcaagaataaatttctagctcgaaggtttaagctggagaagcgactggaggagtggttggggaggacattgcctggcagtgactggaca

SEQ ID NO: 314780 - DNA, 83 bp, Homo sapiens
cagatctagaaaacaaggtgattacgatgcggcattccaaaagaactcactgtcctgattgggatagcagagaaagctgggga

SEQ ID NO: 314781 - DNA, 83 bp, Homo sapiens
ccggaagaagcagcaggagcagcagctgcagctctactccaaggagagagtgatcagcagctggactgtgccttggacctaat

SEQ ID NO: 314782 - DNA, 82 bp, Homo sapiens
ccgggcaccgaggaccagctcaatgacaggtgtggacactgccagcggctgcagccgacttggaatgacctgggagacaaat

SEQ ID NO: 314783 - DNA, 82 bp, Homo sapiens
gtgtgaggcgaacagccatcccgggcactatgtgaatttggggagtccaaaactacttacctggaagaccttccaccacccc

SEQ ID NO: 314784 - DNA, 75 bp, Homo sapiens
aacaagactggggctgctcccatcattgatgtggtgcgatcgcatggagatatggaccaaaaggaacgagacgtg

SEQ ID NO: 314785 - DNA, 83 bp, Homo sapiens
gtatatttgggatttgcattgatgaaacagcttcaagtctggatagtcagaagtttgtgacagtgccctccagtaatgaagtg

SEQ ID NO: 314786 - DNA, 98 bp, Homo sapiens
tccagcactggactcatggaggctgagcatttattcaggtgctggagaatctggtaaaagcaccattgtgaagcagatgaggatcctgcatgttaatg

SEQ ID NO: 314787 - DNA, 100 bp, Homo sapiens
cacccacaaggacccgaagacaggaaagctgaggacttcaccagcgctggtctctgcccttcatagacgcataaaggctatcgtagaggtggctgcaatg

SEQ ID NO: 314788 - DNA, 83 bp, Homo sapiens
cgagtcgaagcaccgcagcctggtgcagatcatctacgacgagaaccgggaacaagatcactcaaggtgaaggataatctact

SEQ ID NO: 314789 - DNA, 87 bp, Homo sapiens
aaggaccgggaggcaaaggtgaggaagttggcgaaggaacggctctcctttgtttgcagtttccaacatggctagatccatcagaaa

SEQ ID NO: 314790 - DNA, 90 bp, Homo sapiens
tagagaatgatcttctgcaaagccatgaactcatgcagtttgcagaaaaaacttcagcatgtgccaggaacacaacctcaccttgatcag

SEQ ID NO: 314791 - DNA, 98 bp, Homo sapiens
ttcgtcagcggccgcgagacggccaaggactggaagcgcagcatccgccacaaaggcatgagccatgagcccaagtccccttcgctagggatgctttc

SEQ ID NO: 314792 - DNA, 83 bp, Homo sapiens
ccttacgacgggttggggatggcgtgcagcgcaaccacgagacggccttccaagaaaactttagaaactgttcctttggagag

SEQ ID NO: 314793 - DNA, 95 bp, Homo sapiens
ctggaggagggaatgatattcagtggtgtttttctcaggtgaaaggagcagtagatgatgatgtagcagaagagactgacttgcataccaaatgt

SEQ ID NO: 314794 - DNA, 95 bp, Homo sapiens
ctcttccagggccagcgctatatctggatcgagacccagcaagccttctaccaggtcagcttcaaggttactgactttttatgatgtttggtggc

SEQ ID NO: 314795 - DNA, 90 bp, Homo sapiens
gaccaagcagcgtcttcagaggaaggatagctgtacagcgtggtgaaggactcaatgagaagaaatgcactcggtgatggaaagagagcc

SEQ ID NO: 314796 - DNA, 82 bp, Homo sapiens
ggatcatgtctgcgagccaggattcccgacaggccgacggtcgcaaggtcctacggtcaagcatccgggagtttctatgcag

SEQ ID NO: 314797 - DNA, 100 bp, Homo sapiens
gttgatctccaagaacatgccctggcggcggctgcagggcatttccttcgggatgtattcggctgaagagctcaaatggtatagctgcatgctgggaaag

SEQ ID NO: 314798 - DNA, 99 bp, Homo sapiens
cgaccggtttctgagggttgttcaccttgctgctcagacgctccgagaagcttcaggcagcataacacttacaggttcttctgtgtggcagttcagaat

SEQ ID NO: 314799 - DNA, 125 bp, Homo sapiens
tccaacatcccattcagcagggtgaaccacagcaagttcatggtcacggagaaggcagcctacatagggcgtctctggccgagcctctttttgtggaaaacgacagcagcagcagtggcctggaa

SEQ ID NO: 314800 - DNA, 100 bp, Homo sapiens
caaggatgagattttgccagagaaaggacgagcagcaagtcagggagcttaagaacccttaggagaaatcttgagagtggacagcaattgtgaagatcgc

SEQ ID NO: 314801 - DNA, 75 bp, Homo sapiens
gccgctggcagccgcggatctcaccgccgctcagggcaacgtcacacctcctgaggacagccaggactccagctt

SEQ ID NO: 314802 - DNA, 99 bp, Homo sapiens
gctgttccagctgtcctaattctccacctgaaaagatttcatcagttatccaagcattaggtgaacatcttaaattaagacaacaagttattgccactg

SEQ ID NO: 314803 - DNA, 74 bp, Homo sapiens
tcctgagctgccaacgatacctgaggggggttgttttgatgaaagtgaaagggtggagagattcaaccagttag

SEQ ID NO: 314804 - DNA, 73 bp, Homo sapiens
tccccagctggtggctggagcgaccccttgttctttggtggcgctggctgcaagcatcaggacagcagagacc

SEQ ID NO: 314805 - DNA, 100 bp, Homo sapiens
cgcgaagtgaagctgtgggacacgcggttcttctccagcgccctggcctccctcaccttggacacctcgcttgggtgcctgtgaagcatgtgtaccgtgt

SEQ ID NO: 314806 - DNA, 90 bp, Homo sapiens
cggagaaccattaatcatctctaaggtgagacaggcattggcaaatccacgttaatggacactttgttcaacaccaaatttgaaagtgac

SEQ ID NO: 314807 - DNA, 74 bp, Homo sapiens
cgttctgcagggtgttgaggctgacctttacctcacaggtgttctgtgtggggctctggtgcctggatgagtac

SEQ ID NO: 314808 - DNA, 80 bp, Homo sapiens
cctaagggatataattacctacaaaatcagcaaaggaaccctatttctcttatgggcaaagcccaacaccttcccccact

SEQ ID NO: 314809 - DNA, 100 bp, Homo sapiens
ctgtatataggagatggctacgtgatccatctggctcctccaaaccattactgggacttccacccccaccacgtgcacagcgagttcgagagcttcgccg

SEQ ID NO: 314810 - DNA, 90 bp, Homo sapiens
agaattgcacttggaggacaagttcctcagcactttgtttgcccccttaaactttgtcatggagaaagtggagagcatcctcccatccag

SEQ ID NO: 314811 - DNA, 100 bp, Homo sapiens
gccaagaagcagccgccagttgggatcaaatgtgagcctatggatcaagaggtacttggaaggctccatcgcccctgaagacaaaggaagctgctcattg

SEQ ID NO: 314812 - DNA, 75 bp, Homo sapiens
gagatatggcgcaactgcggcgcggttgtgggaagaaaatgtattcctttttgagaggaaccaaacaactgcagg

SEQ ID NO: 314813 - DNA, 100 bp, Homo sapiens
gatctaactctagaagaaatgaaaaaacaggctgctgtccagtgtcttcgatctgcttctgatgaacacaacaccccgatcccccaaggaggcagaggag

SEQ ID NO: 314814 - DNA, 75 bp, Homo sapiens
agaccggcggactggagtcggggaaccggagtctctgctttctatccgtcaagatgataaagtcgtgtgcccgag

SEQ ID NO: 314815 - DNA, 82 bp, Homo sapiens
ggagttcgaagagttggatactcagcgtcgctggcagccgctgtacttgttcgtgtttagtaggagcacagtagctgtttgg

SEQ ID NO: 314816 - DNA, 90 bp, Homo sapiens
ctccattctccatccgctgcgtggaggtgtcggacgatcaggacacagcattgttggttttgccatgtactattttacctatgacccgtg

SEQ ID NO: 314817 - DNA, 83 bp, Homo sapiens
acccgaaagccgctgggaaaaatcacccggaagttcaggctgaattctgaaggcaaacttgagcagacggtctccatggcaac

SEQ ID NO: 314818 - DNA, 95 bp, Homo sapiens
tctgtctgcagcccagacactgagagccgctttcatcaagggtaaaggagctggaagtgcgaaaattgatgcatgtgagaggagatggaccctgg

SEQ ID NO: 314819 - DNA, 51 bp, Homo sapiens
gtgcaggggactctgtcacagaaagatatgatccgccaaatgatgattaaa

SEQ ID NO: 314820 - DNA, 75 bp, Homo sapiens
gctgctggtctatgagaatgaggactacaaagctgatgaagacccagcattattccagtcagtcaagaccaagag

SEQ ID NO: 314821 - DNA, 100 bp, Homo sapiens
gttcgcttttcagcacctccaaattctttggtttctttttttgatgcatctctacctggaactttgccgcacaacaccatggagtctctgttagagcgag

SEQ ID NO: 314822 - DNA, 100 bp, Homo sapiens
caccaacttgcgcaaaaacaacagacagccctatgctgtcagtgaattagcaggtggcgcccctcccaatgtggatcctgaggcctactcctggttccag

SEQ ID NO: 314823 - DNA, 82 bp, Homo sapiens
cattttcagagactgtaacaagatcgcattttacagacaagttggatggcttgaggactggtactaaaaggaaacgtgactg

SEQ ID NO: 314824 - DNA, 100 bp, Homo sapiens
tgggagaaagtttcatctgtggatggagtattgggcaattgaaggaacagactaaaaatcgtgtcctggaaggaaactacaggtactaccagggattttc

SEQ ID NO: 314825 - DNA, 97 bp, Homo sapiens
ttatctgcagagggagtcatgctttcaaggacctcatgtggcccgtaagctggtcatcattgagagcgacctggaacgtgcagaggagcgggctgag

SEQ ID NO: 314826 - DNA, 78 bp, Homo sapiens
cgagtctccgccgctgcgggcccgctccgacgcggaaggaatactcccccagttgcaagaggcgcaggaccgtggaag

SEQ ID NO: 314827 - DNA, 98 bp, Homo sapiens
attttattccaatatctcaaggggcaggtcaaattcaaaaggttctttcctggaagtggcggagatatgtgttcccataccatctctgtgtgtacagc

SEQ ID NO: 314828 - DNA, 73 bp, Homo sapiens
ggagaaggaggtcgacgaggacacgacagtcacaatcccctcggccgtgtgtgatccctcacatccacaaatc

SEQ ID NO: 314829 - DNA, 51 bp, Homo sapiens
gggctgcaggctctcggctgcagcgctggatgacttggaagactccatgat

SEQ ID NO: 314830 - DNA, 98 bp, Homo sapiens
cgaagagcagcaaaaaagactgcaggcgatcataaagaaaatcgacttggactcagatggctttctcactgaaagtatggcctcacaagtcttggtct

SEQ ID NO: 314831 - DNA, 98 bp, Homo sapiens
taaatcagacagaacagttaatcctcaatttaagcctgatctaacccctagaaacagctgtgatgcagatccatccgccctagcaaaatatgttctgg

SEQ ID NO: 314832 - DNA, 100 bp, Homo sapiens
gcgggtacctgcggccaattcggtggaacgaggacgcggactgcgaaggcaggtatgagttaatacagaaaggagtgactgaacttagaactgttgggaa

SEQ ID NO: 314833 - DNA, 75 bp, Homo sapiens
cctggacccggacccaaagtgccatgtctttaattttgaaattggcacaatggaagaagctggaatttgtgggct

SEQ ID NO: 314834 - DNA, 100 bp, Homo sapiens
agctgggcatccgacacgtactgctggtggccggcattcacaagaaggtggcccggaccatcggcatttctgtggatccgaggaggcggaacaagtccac

SEQ ID NO: 314835 - DNA, 100 bp, Homo sapiens
ctgaaacgtgtgaaggaaaatgatcagaaaaagaaagaagccaaagagaaaggtacctgggttcaactaaagcgccagcccagctcaacattggcaatgt

SEQ ID NO: 314836 - DNA, 100 bp, Homo sapiens
cgcggcgcccctcggcctcggagcaacgagcgcagcgccggatgatcggctgaatgtaacagaggaactaacgtccaacgacaagacgaggattctcaac

SEQ ID NO: 314837 - DNA, 82 bp, Homo sapiens
ctctgtccagttttcaaaccacacaggtactccaaagattcaggtttactcacgtcatccagcagagaatggaaagtcaaat

SEQ ID NO: 314838 - DNA, 76 bp, Homo sapiens
tgaagatctggagctcggagcacgtgtttggtccatgctgctcctggccccaaagctgaacgaggccaacctcaat

SEQ ID NO: 314839 - DNA, 76 bp, Homo sapiens
ctcctccacccctgtatttcacttggctctccaaattgactcaactccaggctgtcagccagatgaaacagcaaaa

SEQ ID NO: 314840 - DNA, 83 bp, Homo sapiens
cgcttcttctggtcactccgccaccgtagggcatcatgctggtctacgacatcaccaacgagaagtccttcgacaacatccgg

SEQ ID NO: 314841 - DNA, 74 bp, Homo sapiens
ggtaccaaggattggagcacagaggctcagaagcaagtccagtccctgcatcccatgactcggagctgatggcc

SEQ ID NO: 314842 - DNA, 100 bp, Homo sapiens
ggactccttctatggctggacgcccgtgcactgggccgcgcatttcggcaagtgtgtgacgttcctctgtatgacatttgtgactacaacgtctccaggg

SEQ ID NO: 314843 - DNA, 75 bp, Homo sapiens
gaagccgcctctgtattacttaccaggtctacgacgttcctccatcggtgagcaaggatgtgcccgatggcccac

SEQ ID NO: 314844 - DNA, 50 bp, Homo sapiens
gaaggaggaccagatcaagaagtttgccaggcagtatagcaggaatgagc

SEQ ID NO: 314845 - DNA, 98 bp, Homo sapiens
tggaggacctgcggcgggaacagcaggccacagagctgcttgcggccaagtacaaggttgaaggggcccggccaggactcggggaagggtggcctgag

SEQ ID NO: 314846 - DNA, 80 bp, Homo sapiens
gcactttattatgcaggtggtctgtgaagccacacagtgtccagatacgaggaatcaggaaacccaggcccaacggcagg

SEQ ID NO: 314847 - DNA, 82 bp, Homo sapiens
ctgcaaagtaaaccctttccccaaggacaggctaaaggttggtcttcaggttgtggcagtcaaggctccagggtttggtgac

SEQ ID NO: 314848 - DNA, 100 bp, Homo sapiens
cgccacccgatggaagattcgatggacatggacatgagccccctgaggccccagaactatcttttcgctcattgctatggacagtgctatcaccctgtgg

SEQ ID NO: 314849 - DNA, 80 bp, Homo sapiens
acaactccagtgctaactcaacagtcttgtgaaaatgccattgtgtgctggaaacctggcaagatggaagatgatataga

SEQ ID NO: 314850 - DNA, 100 bp, Homo sapiens
gttccctcccccgatccaagttggaattagcatcctctcggggcgccatcatgaccgggtcctataacaacttcttcaggatgtttgatagagacacgcg

SEQ ID NO: 314851 - DNA, 82 bp, Homo sapiens
tggcagccccgctctctgcaatccacatgaagaccatgcccgccgccatgttcaggctcctcacgggtcaggagaccccgct

SEQ ID NO: 314852 - DNA, 75 bp, Homo sapiens
gccgggaggcagagcggctcagccagcggcagacagaacgggacctgtgtcagccttacccctcgtgaattcaac

SEQ ID NO: 314853 - DNA, 83 bp, Homo sapiens
cggattcgccgaggcaccgaggcactcagaggaggtgattacgtttttgaagaagaaggacaagttcatcagcctggtgttga

SEQ ID NO: 314854 - DNA, 83 bp, Homo sapiens
ctctacctcctgcgaggcctcccgggctccgggaaaactacactggccaggtgctgtccttattcccagcccagtcaagagct

SEQ ID NO: 314855 - DNA, 98 bp, Homo sapiens
aaatactgcctctggactctgaatacgaaagtaggcggtacgaaccctaatggaggcagttttgaggaggtcctcagctccacggcccatgccagtgc

SEQ ID NO: 314856 - DNA, 50 bp, Homo sapiens
cccctgtcccgaacgcagtgtgtggaaagagagaagaagaaggaggttcc

SEQ ID NO: 314857 - DNA, 73 bp, Homo sapiens
agagaccttcccacctccaggagaggaagagggtgaggaagaggatggagatgaagatgaggaagctgagtca

SEQ ID NO: 314858 - DNA, 82 bp, Homo sapiens
gtttctctccctctgcccccccttccccacgcaaccccagatccatttacactttacaacgagccaaactcaggctgtacct

SEQ ID NO: 314859 - DNA, 100 bp, Homo sapiens
ggctggagcccacctgctttgagaagagcaatgacattgggggcctgtggaaattttcaggacatccaacgggctcatagagtggtagctgagcttcagg

SEQ ID NO: 314860 - DNA, 100 bp, Homo sapiens
agtgcttccagcagttcccagaaggactcttctatgagaaacaccaagggacccacgacaggcctgccccgcatcgcagggcatgctgcgagccatggac

SEQ ID NO: 314861 - DNA, 100 bp, Homo sapiens
ctggctccctcattaccgtcgccagcggagcgaacccgagagcgtggagcgggctgggccaggtagagtacagagagatggatgaaagcttggccaacct

SEQ ID NO: 314862 - DNA, 97 bp, Homo sapiens
agggaaagcgccgagatgacgggctttctgctgccgcccgcaagcagagataccagcgggcaagcagaaaacaagaggctcaagaggggcagccccc

SEQ ID NO: 314863 - DNA, 98 bp, Homo sapiens
gcagaacgctgcggaccgcggcggaggacgcgcccggcgcccctgagccggccgagcggcgacggaccgcgagagttgcatgctgagaatttgaaaaa

SEQ ID NO: 314864 - DNA, 100 bp, Homo sapiens
cgtcaacgccgtatccagcgactacgcggccgcggagacctacctgcggcgtcggcagctgctgctccgagcccgtggaacacagagcattcctaatgac

SEQ ID NO: 314865 - DNA, 82 bp, Homo sapiens
tcgagatcccctgtgtggccaagaagctggtgtgcggagatgaagttggacaacatacatgttcttcagcattttgagcctc

SEQ ID NO: 314866 - DNA, 100 bp, Homo sapiens
gtcttgggcagcatgcagtgctttctgggcaccgctctaaagagggtctgactgagcgctttgagctgtttgtcatgaagaaagagatatgcaatgcgta

SEQ ID NO: 314867 - DNA, 98 bp, Homo sapiens
aaatacaacaattgaggatgaagatgtgaaaggtgactgtggaagaggtcatgaccacaactgcatatctggaccttttcctgcgtagcatctccgag

SEQ ID NO: 314868 - DNA, 96 bp, Homo sapiens
ctccaacatggcagccttttccttagaacaccaaagattgtctctggcaaaggagctgcgggcgtctttggagacacagcgtgctcagagcagtcg

SEQ ID NO: 314869 - DNA, 90 bp, Homo sapiens
cagattcgcagtggtcgcttcttctccttggacctgaaggagaagaaggagaaggtggaggagaaggcaagccggaaagagcgaaagaaa

SEQ ID NO: 314870 - DNA, 95 bp, Homo sapiens
cttgaagtttgtggatgaaaattgggaaggttccctcaagtccaagattttctctgtgggcagttctttttgttttgggaagacttctgacttta

SEQ ID NO: 314871 - DNA, 74 bp, Homo sapiens
agccagagaataacaataaaaaacccaaaacctcaggctcccaggctgtgtttgatgtggacaagaagaaaggg

SEQ ID NO: 314872 - DNA, 95 bp, Homo sapiens
gggagttcgacacccaagagcagcttgtgcacgtactgtccaagaagctggaacattattatccagcaagaatgttcgtgtcaactgtttggacg

SEQ ID NO: 314873 - DNA, 100 bp, Homo sapiens
ggcctttgccccaatcttgtgtgggcactgaagggggactacaggttcgagaccctgccaaggtaaccctgctggggtcagttatcttcacattccagca

SEQ ID NO: 314874 - DNA, 50 bp, Homo sapiens
gtttgggttctgccccatggctgtaggtgagtcaacacaagatggcaaat

SEQ ID NO: 314875 - DNA, 82 bp, Homo sapiens
accgggccaaggatggcagcgggaccggcggctctaagatttgaggcttaagcaacttcttccggggaagagtgccagtgca

SEQ ID NO: 314876 - DNA, 100 bp, Homo sapiens
ccgcgggccagcaccatggaggacgtgaagctggagttcccttcccttccacagtgcaaggaagacgccgaggtatatgagtagaccagtgatgagtggc

SEQ ID NO: 314877 - DNA, 75 bp, Homo sapiens
gtttcctgaggcctccccagccatgctgaactgattggagaatccatgttgaccaaatgcaccagcacagaagtg

SEQ ID NO: 314878 - DNA, 75 bp, Homo sapiens
ggaagctcaacgactccattgccgaggagctgaacaagaagttggccaacaagaattctggggagacattgccaa

SEQ ID NO: 314879 - DNA, 75 bp, Homo sapiens
agaacaagccgtacccaaagtctcgcttctgccgaggtgtccctgtgcaccaattccagctggacatcactgtga

SEQ ID NO: 314880 - DNA, 75 bp, Homo sapiens
cgatgacaagatggtctttaagacagaaatacatgctacaggatttaactatcagaatgaagatgaaaaagtcac

SEQ ID NO: 314881 - DNA, 100 bp, Homo sapiens
aacactgacttctacatcggtggtgaagtaggaaacaaagcttagcaggagaggagagccagagaagtgacagggaagctacaggttacaacagatttgt

SEQ ID NO: 314882 - DNA, 98 bp, Homo sapiens
tggcacagcatctgacaaacactgtattcgttgacagagctttgatagtcgtaccatatgcagaaggtccaaacactgcagtttcatccatttgaagc

SEQ ID NO: 314883 - DNA, 90 bp, Homo sapiens
gtttctgagcatccctgcaatgaagagaacccagggaagttcctttttgaagtagttccaggtttaagtggaaaccctgcagatttagaa

SEQ ID NO: 314884 - DNA, 82 bp, Homo sapiens
tgcctccgagaactcagccccgacatcgcccacctggcctcgctcaagctctggattaatcgaattacagctgctagccagg

SEQ ID NO: 314885 - DNA, 98 bp, Homo sapiens
aggacccgctttctaccattaagtgtttgtggagaaggtgctgcagagactttttcctcctgttccaagtggccaaggaaagagggaaccccagacgc

SEQ ID NO: 314886 - DNA, 51 bp, Homo sapiens
atcaggcggccgcccctggggaggtctcggagaccttggtacaacgcaacg

SEQ ID NO: 314887 - DNA, 107 bp, Homo sapiens
cttcaatttagcagcaaatgctggcaattcacatgccatggcctttttgggaaaggagctccagaggagatgtaataccttaattactttgattgaaagagaaaaca

SEQ ID NO: 314888 - DNA, 98 bp, Homo sapiens
ctacctcaaccaatcggacacctaccaggtggacggcacggacgacagaagcgactttggtgagactctggctgacctcagtgacagatgagctggct

SEQ ID NO: 314889 - DNA, 100 bp, Homo sapiens
cgacaagtccgggagctgggcggccatttaccaggtgctgcccataaactcgtgtgttatttcaccaactgggcacacagtcggccaggccctgcctcga

SEQ ID NO: 314890 - DNA, 108 bp, Homo sapiens
caaacccttctagacagccggggagtgttcctcgacatgtttctccagtgacacctcccagagaagttacacatcatctcagagttggagcacctgacgtttgtcaac

SEQ ID NO: 314891 - DNA, 101 bp, Homo sapiens
cttcttatgacccatccagtccacaaaccagccagatcattgagactgaaaatatgatggaccgaattgtgactggcttgtctgagtctagtgtcaaggtg

SEQ ID NO: 314892 - DNA, 99 bp, Homo sapiens
gtaggagtgacccagcctcgaagagtggctgctgttacatgcttgaatttcagccacatccctaagctgccatctcagaccagaggaacagggaggggg

SEQ ID NO: 314893 - DNA, 75 bp, Homo sapiens
tgctgcatgacagctatgactacgacctgcaggaacagaccctacagcttggggcctgggctcctctgaccatcc

SEQ ID NO: 314894 - DNA, 75 bp, Homo sapiens
accaaaattgaaaaaatggttgacctcacccagatctgacaggatggcatctgatgactttgacatagtgattga

SEQ ID NO: 314895 - DNA, 74 bp, Homo sapiens
tggaggatgatttcatgtgcgatgatgaggaggactacgacctggctgccaaacgagggattctttcatctggt

SEQ ID NO: 314896 - DNA, 51 bp, Homo sapiens
cgacgaccgcccgacgtgcattcccgcccgtggaacacagagcattcctaa

SEQ ID NO: 314897 - DNA, 83 bp, Homo sapiens
ctcgctttccctctcgcgtctctggctgcaggctgttactgaggcggagacacgggtgatgattggctttctggggagagagg

SEQ ID NO: 314898 - DNA, 97 bp, Homo sapiens
ggatatgacccatatgccaacccacctaactacggaaaacctgatcccaaaattattgaaaacactcgaaggggcttaaagaagacatgtgtgacca

SEQ ID NO: 314899 - DNA, 117 bp, Homo sapiens
gtttaggtccattccatttggcatcagcagacatggtagcactttactgatcagacactcctctaatttacaaagcagtgcccagctggtttgtgcgagtggagaacatggtggacc

SEQ ID NO: 314900 - DNA, 75 bp, Homo sapiens
gctgaagcgactgagtccgcgatggagattctgaaaaagagttccacgtcctcccttatcgagtctttgttcccc

SEQ ID NO: 314901 - DNA, 98 bp, Homo sapiens
tggaaagttcctcaagatggagactttgactttgttaatttggagtggcccctggagtcagtttcctacaccatccgaggccccacccagcacgagct

SEQ ID NO: 314902 - DNA, 100 bp, Homo sapiens
gaggattggaggtgtcagtgttaaaggaacctctacaacgaaggtgaagccacggaagataagaaatctcctttacagacaataggtgaagaacaaaccc

SEQ ID NO: 314903 - DNA, 100 bp, Homo sapiens
ttcagatggaggataagaatggacggtagttcaacttatcagcaatgagatactaccttatgccaattttattcctaaggaatttgttggtcaaataatg

SEQ ID NO: 314904 - DNA, 91 bp, Homo sapiens
tcctaagcctgcacagccgcggcggcagcagcagtgagagaataccctctaccatctgctttggtcagggtgccgctcgaggatttaaaag

SEQ ID NO: 314905 - DNA, 49 bp, Homo sapiens
ggagccggcagcccagcactccgttacagaatgtctgaaggggacagtg

SEQ ID NO: 314906 - DNA, 51 bp, Homo sapiens
gattccaagtaactcttatttgtatggtttgaagtggtgaacatggatttt

SEQ ID NO: 314907 - DNA, 101 bp, Homo sapiens
agcgaggtcagcggggctgcgagcactatgacagaggatgtctcctaaaggtgcagcagtgaacagcagtgagagtctccctccatcctcgtctgtcaatg

SEQ ID NO: 314908 - DNA, 109 bp, Homo sapiens
ctccgcaccgcggcttaaatgatgtattttgtgatcgcagcgatgaaaggtacggacattgctgcaggagaagaggttgccatcaagcttgaatgtgtcaaaaccaaac

SEQ ID NO: 314909 - DNA, 82 bp, Homo sapiens
tagttagtggttctgatgacaacactttaaaagtttggtcagcagtcacaggcaaagtacaatgactcttcttgcttttcac

SEQ ID NO: 314910 - DNA, 75 bp, Homo sapiens
cgccatgatttgcctttagaaggagctaagaatataacaccagcaatcctgacttgttgctagtcatatttcaag

SEQ ID NO: 314911 - DNA, 83 bp, Homo sapiens
ccaggagtcatcggacgccagaatctgccggcacagtcttcactaccgtagaagaccttggctccaagatactcctcacctgc

SEQ ID NO: 314912 - DNA, 100 bp, Homo sapiens
ttaaggtctggtcggatggggcaggatggctgcgttgacacgtcttatttaatccacatcatagaaggaaacttctaacggaagtagattttaataaaag

SEQ ID NO: 314913 - DNA, 75 bp, Homo sapiens
aactgaatggaatgaacgacagcctgcaccaggtctcttgcagctgaatggggtaaatatggaatgcgattcaat

SEQ ID NO: 314914 - DNA, 108 bp, Homo sapiens
gccggcctgagccccagagtcagctcccctttctcgcccagcgcccccaggccgctcccggggctcacgggaggagctttatctttatatactgcccttaccacacag

SEQ ID NO: 314915 - DNA, 98 bp, Homo sapiens
tcagaatgggaagaatgagagaagtcatatgcccggcacagatgaagtaggtgttccaggtagcaattcagctgacctattgcgctggaccactgcta

SEQ ID NO: 314916 - DNA, 100 bp, Homo sapiens
caaagatgagatttacctgtgagatgtttcatcccaacaaggaaatatcattctgcaaaagaagcttatgaacaacttttgcagacagagaatctttctg

SEQ ID NO: 314917 - DNA, 88 bp, Homo sapiens
tgggccccatctgccagctggccttcccggttggatggcaagcatgtggtgtttggcaaagtgaaagaaggcatgaatattgtggagg

SEQ ID NO: 314918 - DNA, 100 bp, Homo sapiens
gaagtgaagtgcaaatcttccaagtctaatagacctaaagccacagtcttcaagagcccacggacaccacctcaacggttccaaaacatttctgaaaagc

SEQ ID NO: 314919 - DNA, 100 bp, Homo sapiens
ttctgtgcgctaaccccggagcccggccccggggaactagggagcgtctccggctgcacagcgctcagttgcagcatgagaaagccgaactagaacagca

SEQ ID NO: 314920 - DNA, 75 bp, Homo sapiens
agatgaattagaagaacttatcaactactatcaggacacaggttgaacatcacggcggagaacgactgccggcgg

SEQ ID NO: 314921 - DNA, 90 bp, Homo sapiens
gagctcagagctccacatctgaccttctagtcatgaccaggaccagggcagcactcctcctgttcacagacgcctgtgtgagcacaagta

SEQ ID NO: 314922 - DNA, 75 bp, Homo sapiens
cctctgcatcggtcggctcaggacttacggaaacagttattggagggtggtgaagagaggatggagacaccccag

SEQ ID NO: 314923 - DNA, 100 bp, Homo sapiens
cgggagtgtagagactcggaggccgagagcaaatttttcagaacataaaacaagaatatagtcgttatcagaggtggagacatttagaagttgttcttaa

SEQ ID NO: 314924 - DNA, 98 bp, Homo sapiens
ttgcattgtacgtgggaaggcacggacggaatagacctcagcagcggcgtggtgaggacttagctgggacctggaatcgtatcctcctgtgttttttc

SEQ ID NO: 314925 - DNA, 101 bp, Homo sapiens
gggaagggcaggcgcgctgggccttggggagctgcgctcggcgggcggacgcggccacaattacaagttcatccgaaaatgatgaccggagtggctccagt

SEQ ID NO: 314926 - DNA, 100 bp, Homo sapiens
caaagttaatgccaagaagcagccgccagttgggatcaaatgtgagcctatggatcaagatgcttccctgcaggtggacacagtggtccccaatgccacg

SEQ ID NO: 314927 - DNA, 100 bp, Homo sapiens
gatgttcgttggcttcctgggctgctacggggccatccaggaatcccagtgcctgctggggacgaacttcgactctgagatctgtggtgttgtgtcagat

SEQ ID NO: 314928 - DNA, 75 bp, Homo sapiens
ggaggatccctggatctggtggactttgtgaggcaacatcggataccactggaagccaagtacaagaagctggag

SEQ ID NO: 314929 - DNA, 100 bp, Homo sapiens
ttagagagtccaatgcaatgctcagttccaagttcttcgatttgatttgtctaatggaacaaattgatgttaccttgaagtggtatgaggacctgatacc

SEQ ID NO: 314930 - DNA, 87 bp, Homo sapiens
taacaccaatggaggctttacttcagacaaggtgcaaattgagcatgacccagaattagaaaaagaaaggtatgttgctttatgttt

SEQ ID NO: 314931 - DNA, 73 bp, Homo sapiens
ctgctgctggtggcgctactggtgctgtcctggccacccccaggaaccggccctgggtgccaggccctgtgga

SEQ ID NO: 314932 - DNA, 98 bp, Homo sapiens
aggtggataatgatgaaaatgagcaccagttatctttaagaacgggagatacatctggggactataagaaagctcttctgctgctctgtggagaagat

SEQ ID NO: 314933 - DNA, 101 bp, Homo sapiens
cgagaccagacgcggagccatggccgaggtgttgcggacgctggccggttcgagaacttgtcttggacaattgcaaatcaaatgatggaaaaattgagggc

SEQ ID NO: 314934 - DNA, 100 bp, Homo sapiens
cattcaagctgtgctctccctctatgcctctggccgcacgacaggggcgctgcatcaacttcaccagggtcaagaacaaccagccagccaagtacccact

SEQ ID NO: 314935 - DNA, 91 bp, Homo sapiens
atcgctctcggcctcggcctcggcctccgacacgatgctattaactgagtacttggatatgaaaaatactcgtacggcctctgaaccatca

SEQ ID NO: 314936 - DNA, 89 bp, Homo sapiens
aaggtgcggggagcggagccatggcctccggtgctggagaatctggtaaaagcaccattgtgaagcagatgaggatcctgcatgttaat

SEQ ID NO: 314937 - DNA, 90 bp, Homo sapiens
aaaaacaccaacacaatcaataatggcactcagcagcaagcacagagtatgaccaccactattaaagtcaacaaacactcgggtcctata

SEQ ID NO: 314938 - DNA, 80 bp, Homo sapiens
attggagccaagaaatgagtatagtttctcttcagcaacgggtagcagaattggaaaaaattaatgcagaatttttacgt

SEQ ID NO: 314939 - DNA, 75 bp, Homo sapiens
gcagcgggtcctacgaggagggctgtcagagcctcatggagtacgccctccaggggacccctctctcagccaccc

SEQ ID NO: 314940 - DNA, 83 bp, Homo sapiens
agcgcgtcccccgactcgccgcccggagaccccgaggctccaacgaggcattccagtgcctctcaaaggcatacaagtgtgac

SEQ ID NO: 314941 - DNA, 100 bp, Homo sapiens
tggagacatgcgtagggctctgaacattttgcaggtatcacctgattttgatacagcagcaggaagcttgttcccagcctaccagaaacaccaaaaccgg

SEQ ID NO: 314942 - DNA, 75 bp, Homo sapiens
gcggaacctgcgcggctactacaaccagagcgaggacgaaggcgtccagctcagcgcatgaaggtcgcctcagtg

SEQ ID NO: 314943 - DNA, 83 bp, Homo sapiens
gaacgaagtggccaagaaggagaagcagctgcggaaaatgctagaaggcataatcaccagcaacacccgggacaataatacgg

SEQ ID NO: 314944 - DNA, 82 bp, Homo sapiens
gtagagtcgctggagcgggcggagctgtgcgagagcctcctcacttgggtgcacattcaggttcccgagcacaaacatcaag

SEQ ID NO: 314945 - DNA, 74 bp, Homo sapiens
gctgactaagggtggacgtgatcggctctttcgacgtgtagcagcagctttgccgggaatggaaagcacacagg

SEQ ID NO: 314946 - DNA, 90 bp, Homo sapiens
ctccctacgatgagaactggttctacacgcgagctggcatgtcgggccccaggcctgtggtgctgagcgggccttcgggagctgggaaga

SEQ ID NO: 314947 - DNA, 80 bp, Homo sapiens
atttcggagatgggggagttgggtgtgctgggccccaccatcaaaggtttttcttcccccagtccctcagctgctgctgc

SEQ ID NO: 314948 - DNA, 82 bp, Homo sapiens
cttgattccagggcctgccctgctcctggtggcacccagtggcctgtactactggagtggagtcaacatatcaatggagcaa

SEQ ID NO: 314949 - DNA, 83 bp, Homo sapiens
cagaaatcacattggaccctcctcccaactgtaggtttgacatctacaggaaggtgcccaaggaccttacgcagccaacgtac

SEQ ID NO: 314950 - DNA, 98 bp, Homo sapiens
gacactgttagtacacaggaagggatccacccgcgctttccctcctcaccatcccctcattgctgttgattaccaagacagtcattttgtttactcat

SEQ ID NO: 314951 - DNA, 90 bp, Homo sapiens
ggaggatgtcgggacaccccggaagctgggaaatggcctcatggcggtccgagcttcgttcgagaacaactgtgagatcggctgctttgc

SEQ ID NO: 314952 - DNA, 98 bp, Homo sapiens
tgagcctgagccttgtgaggcgtccgagctgccagcaaagagattgaggaggtatattttcctggagtacgcgtcccctgcccacgctgtggatgctg

SEQ ID NO: 314953 - DNA, 112 bp, Homo sapiens
tctgcacattcccagagtgttgccaaggccaaatatgaatttttatttggcagatctgaagggaaagctccagatactatggacagaggactgcagaaaatcaacctatcct

SEQ ID NO: 314954 - DNA, 96 bp, Homo sapiens
tcagttttcttcagaagaaggacttcggaatgcactacaacaggaaaatcatattatagatggagtaaaggaaatgttggcagtagatgctccaag

SEQ ID NO: 314955 - DNA, 100 bp, Homo sapiens
acacagtagtggtttctgctcctaaccaaccccgacaaaaggcactgcctccttacctgtgaggaatgcaaaataaagcatggattaagtgagaagggag

SEQ ID NO: 314956 - DNA, 88 bp, Homo sapiens
ggcacgtcctgttacaccaaaagtggcatgatcctttgcagaaatgactacattaggaagtgcacggctgtctataacgtgctgccgg

SEQ ID NO: 314957 - DNA, 83 bp, Homo sapiens
ccggccactttaagaattactggttacaaaagatataccatggggtatacagttagcagccgtgtatgctctttgtgacttga

SEQ ID NO: 314958 - DNA, 88 bp, Homo sapiens
ctgaagggcaccatcgacccgaagttgcggattgcagccgagaacgagctcaaccaggtgaatgaaaactttgccattgatttgatag

SEQ ID NO: 314959 - DNA, 100 bp, Homo sapiens
cgagcggggacttcactgctctgctgtctcctgcaagaactggctcaagaaatttgcctcgaaaaccaacccgaccctgcccgccctggactggcagctg

SEQ ID NO: 314960 - DNA, 75 bp, Homo sapiens
catgaggagaaatgaacagctgaccctacatgatgagaggtttgagaagattgtagaagattaaataggtaccag

SEQ ID NO: 314961 - DNA, 90 bp, Homo sapiens
gggcgaggaagaccagccccggggccccggttggttcatgtgatcctggttaatggaacataagtgagattttatgggtgacagggagag

SEQ ID NO: 314962 - DNA, 74 bp, Homo sapiens
cgctcactgtagaccatctcaagcagttgcccctcgccatggcctgcagagtctcgggaaagttgccattgccc

SEQ ID NO: 314963 - DNA, 83 bp, Homo sapiens
cttaccaaggaatctgcttttcaagtatgccaccaacagtgaagaggtgacaaccaaagccaagcaactgaaggattcagtga

SEQ ID NO: 314964 - DNA, 50 bp, Homo sapiens
aaggattccaagtaactcttatttgtgcaccaattccagctggacatcac

SEQ ID NO: 314965 - DNA, 82 bp, Homo sapiens
ggacgtggttggtgattggcaggatcctggtatccgctaacagcgtggggtagagcagcggctgccatgctcttctgtggct

SEQ ID NO: 314966 - DNA, 75 bp, Homo sapiens
cagtgcccttgtggcgaatggggctcacgtcgacttaggcctgggggagcccatccaggaacatgcagtcccagc

SEQ ID NO: 314967 - DNA, 100 bp, Homo sapiens
agagataattacacaaaagccgaggaaattttgagtagatccatagtgaaacggtgggcaaattttgcaaaatatggcatgcttgagagttcaaaccggc

SEQ ID NO: 314968 - DNA, 83 bp, Homo sapiens
aagataaagcccttaaggacaagaacattgatgatggcacctcagatcgcccctacagccatgctctggtggctggaattgac

SEQ ID NO: 314969 - DNA, 102 bp, Homo sapiens
cccagtgctgcagccacgccgggggccgccgctaccactgcactcgcaggcctcgaggcccacacccacataggtcggtaggctccacgacaaaagtcaacc

SEQ ID NO: 314970 - DNA, 83 bp, Homo sapiens
gcagatcttcaacaagaggacccaggagaaattcgccctcaaaaccatggtgaatccgggcagcagctcgcagccgcccccgg

SEQ ID NO: 314971 - DNA, 88 bp, Homo sapiens
gcccgggctgcggcgtgtgcgcgcccgccagctgctccggagatacgggggatatgagactttctactcggaatatcctgagtgttgc

SEQ ID NO: 314972 - DNA, 100 bp, Homo sapiens
cagaatggtcagaaaccctccataacctgaagctggcccggtgatcatgtccattgaggagaagatggaggctgatgcccgttccatctatgttggcaat

SEQ ID NO: 314973 - DNA, 75 bp, Homo sapiens
aatccaagcaacaggctctgtccaatatgaatagcctaacatggcagaccagagacagcgctcactgtctacctc

SEQ ID NO: 314974 - DNA, 74 bp, Homo sapiens
tcttcctcatcatctcagccacgaagtacagccggagggtcaaaagcggctggtgctttccgaaagctgctccc

SEQ ID NO: 314975 - DNA, 98 bp, Homo sapiens
agtgaccaagcaaggtacccaccaggccgattatgtccattgttctcttggagcagctggtcatcatgtcctgaaaagctcatctatgcagacaagaa

SEQ ID NO: 314976 - DNA, 75 bp, Homo sapiens
gcccatgctgcagcgggaaagagaacagagagtcctggggacagaacagatacagcacgggcagcggcagtgcaa

SEQ ID NO: 314977 - DNA, 100 bp, Homo sapiens
gatggcccccggtgcaagaggcgcaaacaagccaatcccaggaggaaaaacgccaaatttgtatcctactgtggggcttcaaacaccaggagaagtggtc

SEQ ID NO: 314978 - DNA, 83 bp, Homo sapiens
ctcggcggtaccccagctccatctcttcatcaccccaaaaggacctgactcaggcaaagatgagtgatgtgtctgcaggagga

SEQ ID NO: 314979 - DNA, 74 bp, Homo sapiens
aaactgaattactggatggaaaaaccaagctaatattgtctccatatggccaaagagtgtggccagatgcaaaa

SEQ ID NO: 314980 - DNA, 75 bp, Homo sapiens
agtctggatgtcggtgggcctctgagatatgccgtttacgggatgaccattgatgccggatgctcactccacatg

SEQ ID NO: 314981 - DNA, 75 bp, Homo sapiens
caggaacattgctgtggattcccagtggttagcaggaagaagatgagccttaagtctgaacgccgaggaattcat

SEQ ID NO: 314982 - DNA, 82 bp, Homo sapiens
ggccaagttcatctcctccgtcaccagccacatctaccagggactggtgattgcagctggaagtgcccatgaccgagctggc

SEQ ID NO: 314983 - DNA, 74 bp, Homo sapiens
tggacctctacagcatcaactacctgcactttggagaaccaaagtcctggatctcatggtccggaatgacaccc

SEQ ID NO: 314984 - DNA, 71 bp, Homo sapiens
gcgccataggagaggaggccccgcagatgaactacatccaggtgtgcgactctgacactgtgctggatcca

SEQ ID NO: 314985 - DNA, 100 bp, Homo sapiens
aaacagaggactaattttggcagttctaaatttgaatttgagatgttccaacagtatccgaggatgacatatcctcctctacatggtcccatgagattcc

SEQ ID NO: 314986 - DNA, 80 bp, Homo sapiens
gagcaagtggtttttaaatatcttcgagctgaacctgaggaccattattttttaatgttggagtcattcgttgcccagtt

SEQ ID NO: 314987 - DNA, 82 bp, Homo sapiens
caacttcctggagggggactggaagaccatctcggaacagacaacgcaagctggggacgaaactgcagtgaccagtgggtgt

SEQ ID NO: 314988 - DNA, 82 bp, Homo sapiens
cagcaagcgtggcggcaagatcatcgtgggcgacgccacagagaaaggttatggaaacaaaggacatgctttacatcgtcac

SEQ ID NO: 314989 - DNA, 75 bp, Homo sapiens
aaactgtcaggagcatacaagaggctccagcaattctgtggtgttcttggtcacacatttatggagtttctgaag

SEQ ID NO: 314990 - DNA, 103 bp, Homo sapiens
gtaaattacggaagatcatttatatacacatgcacaacattctgaaattttttggttattgtaatgatgttgatcgggagttgagaaaatgcctgaagaatga

SEQ ID NO: 314991 - DNA, 89 bp, Homo sapiens
gattattacaccaaattctgcatggggtggagaaggcagctttccctggcaggctaagatggtttcccaccataatctcaccacaggtg

SEQ ID NO: 314992 - DNA, 100 bp, Homo sapiens
ggcaaagccagagtgcagtttggagcaaataaggttctcaagggtatatcaccttattttggatattcaattgctggaaacatggaccttgatcgaaatt

SEQ ID NO: 314993 - DNA, 100 bp, Homo sapiens
aacaattcagaatgaaactccaaagaaaaagcccaaattggaatctaagccatctaatggagatagttttgattacgaagatgcaggctaccagactgca

SEQ ID NO: 314994 - DNA, 100 bp, Homo sapiens
gccgaagtcctggaggtgttccacccgacgcatgagtggcaggcccttcagccaggctggacgtaaagaaagaagtgatgcactcaattctgcaatagat

SEQ ID NO: 314995 - DNA, 98 bp, Homo sapiens
cccagattccctagttactatctctaagcactgaagtcggtgtttggagaaaaggactcagacagcccacctgaggatattgaccataaggactcata

SEQ ID NO: 314996 - DNA, 80 bp, Homo sapiens
caaagggactcactcaaaatgagacaaggacccttcaaagttgtacaagaaagcagatgatgttgcagccattgaatgcc

SEQ ID NO: 314997 - DNA, 100 bp, Homo sapiens
taaggaagaagcctagaagaggaggaagaggaaagaaaaggagtcaggaatgcctcttagaggagcaggatgcaaccgacaggctgtggccggacagctg

SEQ ID NO: 314998 - DNA, 83 bp, Homo sapiens
gggggagtgctgatcaactaaaagagcatccggtgaaagacagagatcacatttcaactagattcttaggaagtatggattca

SEQ ID NO: 314999 - DNA, 100 bp, Homo sapiens
cggagtagcaagtggccatggggagcctcagcggtctgcgcctggcagcaggtagatgctggctggattggattttggtccatagttggaggctgtgttg

SEQ ID NO: 315000 - DNA, 82 bp, Homo sapiens
tcagttggaagcagccgatccagcctgcggagcctgtggggcaggctttcatgagaaggacaagaagccatattgccgaaag

SEQ ID NO: 315001 - DNA, 96 bp, Homo sapiens
gccagtgaggaagtcttgaagaatagagccataaagaaagcaaagcgcagaaatgttggatttgaatgagatggaagattttcgaggtatagcaga

SEQ ID NO: 315002 - DNA, 98 bp, Homo sapiens
gtggacttgaaagaagctgcagcggaggaaggcgaggaaatgagtggcttatactctcctgtcagtgaggatagcacagtgcctcaatttgaagctcc

SEQ ID NO: 315003 - DNA, 100 bp, Homo sapiens
gaaatgtgtgagcgaagcccagacatgcttgcgcatttcagaaaggaaattttatgctttggatccttcattcccaaggatgaatttgttaactcggact

SEQ ID NO: 315004 - DNA, 82 bp, Homo sapiens
cagagacatgctgaaacatcgaaggcataatcaccagcaacacccgggacaataatacgggggccacctacccccacctgaa

SEQ ID NO: 315005 - DNA, 100 bp, Homo sapiens
ggacagcagccccgagcactgtggccgaggcccacctgctgacatctacctgccaggatcatccagcagctcgtcaacggcatcatcacgcccgccacca

SEQ ID NO: 315006 - DNA, 100 bp, Homo sapiens
agcgcttccacaaccgcgtgcgtcagattctcatggcctctgggtccaccaccttcaccaagagcagcccgacggccatggaggctgaagagacgatgga

SEQ ID NO: 315007 - DNA, 90 bp, Homo sapiens
tgttgggcggccacagagagattggtgtttttgtgaggcagtgagacctaaggctgttcttcgctggagcccgagagggccaccttccca

SEQ ID NO: 315008 - DNA, 75 bp, Homo sapiens
ctcgcattgtggagttctagggtgaaaccagcagtgtgtgtagcagcagtgacactgggctctttaccaatgatg

SEQ ID NO: 315009 - DNA, 99 bp, Homo sapiens
gccacagcggcctcggcctccccttggattcagacgccgattcgcccaggtgaatctgattaacgagcccctggtgatatttgtttgtgcaactacagg

SEQ ID NO: 315010 - DNA, 83 bp, Homo sapiens
caacagtgtaccagcagggcgttggctatgtgcccatcacagacagtactactggtatgacgagcgggggaagaaggtcaagt

SEQ ID NO: 315011 - DNA, 96 bp, Homo sapiens
cgcctgtgagtcagcctgcagcctcgtcagactcggagacgtctgacagtgacgatgagcagaaggtgatttactacctctgcatcttattgaaag

SEQ ID NO: 315012 - DNA, 100 bp, Homo sapiens
gccacgccctcaccaagcatcgcagacagcacacaggttcacctttccttgccagtgaagatggcgtgcttggcggagtgattgtcctccgttcatgcag

SEQ ID NO: 315013 - DNA, 82 bp, Homo sapiens
ctcgcgctactctctctttctggcctggaggctatccagcggaacccaccaagaccaacctggtcacattcttccataccga

SEQ ID NO: 315014 - DNA, 98 bp, Homo sapiens
aatgcagaatttgaacgacagtacttatctggtgaattagaagtggagctgacaccacaggctaaagtaaataatgccagcctgattggactgggtta

SEQ ID NO: 315015 - DNA, 75 bp, Homo sapiens
cgcgtcttcccggtctcctttcccggccgcacaggaacatggtttcattggatattcacccgaactgctacagaa

SEQ ID NO: 315016 - DNA, 75 bp, Homo sapiens
ctaaaaccacctttgtcaccagaatgaatgaagtgcttcagatttaaatatcctcctccgcctcctcctctctgc

SEQ ID NO: 315017 - DNA, 100 bp, Homo sapiens
ctttaaatccggagggggaaaaaatcccaaggtctgcaaaggacatggatttgattgacatactttggaggcaagatatagatcttggagtaagtcgaga

SEQ ID NO: 315018 - DNA, 75 bp, Homo sapiens
aaagagtcaacagcagtggcaacagcgtggtaccatgcgacgacgctatgaagatgatggcatttcagatgatga

SEQ ID NO: 315019 - DNA, 100 bp, Homo sapiens
gatgataaccacccaaggcccaaaagcgtcaaactcaccaaaaacaacatctttccagaaagagatgcagacagacatgctgaactatctggaagtccac

SEQ ID NO: 315020 - DNA, 87 bp, Homo sapiens
ggagacgggagccaaccagggctgcattggaggatttttagactctgaggagcagttggagctaatccacattatggaaatggaaac

SEQ ID NO: 315021 - DNA, 76 bp, Homo sapiens
tccattgtgatgaaagcacatggtacagtatcccttttactattcagcgactatgtgaattgttaacagatccaag

SEQ ID NO: 315022 - DNA, 76 bp, Homo sapiens
gggagaagaggaatgttccctgacaatttcgttaaggaaccctgattgctgtccttcaacgtgttcattatgaagt

SEQ ID NO: 315023 - DNA, 75 bp, Homo sapiens
aggctgcagaatatgctaaacttttggccaagagaatgaagtttgtcgctgatggcatcttcaaagctgaactga

SEQ ID NO: 315024 - DNA, 101 bp, Homo sapiens
atctttgtctagccccagtgcaggctggtgcagtggtgtcatcttggctcagtgcagcctcgacttcctgggatccagcgatcctcccgcttcagcctcta

SEQ ID NO: 315025 - DNA, 75 bp, Homo sapiens
cagcgactttggggcccgtcaccctcaggtatgatgaagccagcagggcctttgggggccaccgccactagggga

SEQ ID NO: 315026 - DNA, 90 bp, Homo sapiens
caaacatttaatgccaacccaaattatacctggttctggtcgaggggtaacatatctctttcctattcaagttaagacctttggtcctgt

SEQ ID NO: 315027 - DNA, 104 bp, Homo sapiens
ccggcggcggtttcggcgcgcggccgggctggcgatggaagatggaaggaaggagcgcagcggtgtgtcaaggatgccacaatgccatcgacccagaagtgcag

SEQ ID NO: 315028 - DNA, 76 bp, Homo sapiens
ggaaagtttgccttgtctacaaaagtgggaaaccagataattttccccagatggcccatcagaagcggttcatcga

SEQ ID NO: 315029 - DNA, 100 bp, Homo sapiens
caaaaagacacttatactatgaaagaggtgcttctggcctccgtgctctgcttcacctcttctgtggacacaagataccaagtccagatagtggggctgt

SEQ ID NO: 315030 - DNA, 76 bp, Homo sapiens
ggactgaggagtcgccgccgccccgagtcccgtgacagccccaatgctgttcatgaggtggagaagtggctgcccc

SEQ ID NO: 315031 - DNA, 117 bp, Homo sapiens
cgcggaggcggcagcggcgggcctgaggcgaaggagcggccgggagcccgccgcgctggtagcggttaatttggagtggcccctggagtcagtttcctacaccatccgaggccccac

SEQ ID NO: 315032 - DNA, 75 bp, Homo sapiens
gacagccagatagtggaatatcctccatccgttcttttaagcaccgaacaagatttgtgatgaaatggagcctgg

SEQ ID NO: 315033 - DNA, 100 bp, Homo sapiens
cagagatcgtgttggacattagctcccgagcgctggccttctggacatatcaggaagagagaagggcacagttacctaagtatcaacgtaatcttcctcg

SEQ ID NO: 315034 - DNA, 50 bp, Homo sapiens
caacaagagcactggccaagtcaggcatcctctggtatcacgattccaaa

SEQ ID NO: 315035 - DNA, 100 bp, Homo sapiens
cgcccgggaagtacatggccggcctgaatctccatccgcacccggggccaattcctgtccccccagcagcatggcatcgtgtgctgaaccctctgagccc

SEQ ID NO: 315036 - DNA, 82 bp, Homo sapiens
atgataacgaaccacaaatacctggctatattgtcgatgattcagtcagagctgtaaaaaatgtgatcctacagaagtggag

SEQ ID NO: 315037 - DNA, 48 bp, Homo sapiens
accgtgggatgccccaggaggagagggcaacaaaccatggatttctct

SEQ ID NO: 315038 - DNA, 80 bp, Homo sapiens
tcatcatctacttcacaggaattgccatttaatgaggacctaatttgcttcaaagatatcaaaccagcagcaactcatca

SEQ ID NO: 315039 - DNA, 82 bp, Homo sapiens
accctggtccggcagccgcacaccatcctgcgcgtcgtgtcttggctgagctgactgctgcccactttggaggaggcggtgg

SEQ ID NO: 315040 - DNA, 83 bp, Homo sapiens
gttgcatttcctcgtcgagcgcaacccaaggctgagagcagtttcagtgaagaagaggaagaaaaacttcaagcggcattttc

SEQ ID NO: 315041 - DNA, 90 bp, Homo sapiens
cggaggcgttcagctgcttcaagatgaagattacccagcagttagagaatatctgtctacggatcattgatcttgttctgcagaaacatg

SEQ ID NO: 315042 - DNA, 100 bp, Homo sapiens
attaaaatctcccaagaggaatgacaaacaaccagctcttcaggtttctgagtcccttcaacatgatcctgggaggaatcgtggtggtgctggtgttcac

SEQ ID NO: 315043 - DNA, 128 bp, Homo sapiens
tgaatcagcagcattactttgctgtgaatgtgaagaatcagaaatctttactgattccaatagtacagttgtgaatttggctccgcgaagtattatgcactgtgtggctttggtggggtcttaagttg

SEQ ID NO: 315044 - DNA, 93 bp, Homo sapiens
cctggagcctcagttggaagcagccgatccagcctgcggagcctgtggggcaggcgctttgctctgtccaccaagattcctgacaccaaaggc

SEQ ID NO: 315045 - DNA, 103 bp, Homo sapiens
gaagctgcggtctctggccagcacgctggactgcgagacggcccggctgcagcgagcgctggacggagaggaaagcggtaaaacttcagtcaagaagctgaca

SEQ ID NO: 315046 - DNA, 75 bp, Homo sapiens
cggttccgggtcttggccccgtccttacctcacagatttgataatgggctgcattaaaagtaaagaaaacaaaag

SEQ ID NO: 315047 - DNA, 100 bp, Homo sapiens
agacagcatactgaagtggtttgcaacatccttcttctggataacactgtacaagctttcaaagtcaatgatacattaattgtttggtcagaagcagaga

SEQ ID NO: 315048 - DNA, 82 bp, Homo sapiens
taaccatttctaaagtcctcctttctatctgctcacttcttacagactgtaatcctggtggtgatctttgtgaagtctgtgc

SEQ ID NO: 315049 - DNA, 87 bp, Homo sapiens
tgacttggacatgactgaagaggaggtgcagatggcactttccaaagtggatgcctccggggaggctcagccggagatgggccctga

SEQ ID NO: 315050 - DNA, 90 bp, Homo sapiens
cctgtggctgtgtaagatctgcagtgagcaaagagagaaatgagccgtcagactgctacagcattacctaccggtacctcgaagtgtcca

SEQ ID NO: 315051 - DNA, 74 bp, Homo sapiens
ccgcggcctcggacgactcgccttcagaagacgaaggccttcatccaccacgagctgctggcctacctatactc

SEQ ID NO: 315052 - DNA, 75 bp, Homo sapiens
tgggaagaagcgttagagcgagcagcactcacatctcaaggaaatgctcggaacttctttacgtttttcaaacgc

SEQ ID NO: 315053 - DNA, 100 bp, Homo sapiens
gtggtggttaatcttttacaagaaaccaaacaagcctttgaaagatgtcatagggttttgatgatgatggttcagaatttcatgaacatatatttctgga

SEQ ID NO: 315054 - DNA, 86 bp, Homo sapiens
gtgggtcctcgcttgcagttcagcgaccacggagggtgtgaagacagagaatgaccacatcaacctgaaggtggccgggcaggacg

SEQ ID NO: 315055 - DNA, 101 bp, Homo sapiens
atcctcctcttgacccacggctcaccaaaaagctttgaagacaagattcccaaaaggagattctctgagatgcaaaatgaaagacgagaacaggcacagcg

SEQ ID NO: 315056 - DNA, 75 bp, Homo sapiens
aaactggagagcttcatcaaaaatagtgatagctttgataagacagtcattttgtttactcattcagccctgttg

SEQ ID NO: 315057 - DNA, 98 bp, Homo sapiens
agtgaagggcctgatggaagcggttttgattcccaccatggccatcacccagtttcggttatttaaattttgtacctgcctagcaacagtattctcat

SEQ ID NO: 315058 - DNA, 115 bp, Homo sapiens
gtgggagatccttgttgccgtcccttcgcctccttcaccgccgcagaccccttcaagttctagtcatggtgctggagaatctggtaaaagcaccattgtgaagcagatgaggatc

SEQ ID NO: 315059 - DNA, 76 bp, Homo sapiens
caactgcctgccgcgccgagggaccgccgggcggcggaaagcaggaatcatcatgttggttggctggttactggga

SEQ ID NO: 315060 - DNA, 95 bp, Homo sapiens
ccacctgggaggtggaccggagctcgtccagctgcgtgcctagccctggcaggtgcccggcccgccccccaccctccggctcccagggcctgctg

SEQ ID NO: 315061 - DNA, 100 bp, Homo sapiens
ccccaaatcgccctggaatcacttttgagattggtgctcgtttggaggcactggactacttacaaaaatgggacgcactctctgagatattttcgcctgg

SEQ ID NO: 315062 - DNA, 100 bp, Homo sapiens
gaagactcttcccggttgatcgtggattatttgagaattgggttcttaaccaaaagcacctgcaggattttcctggggaagataagtgagaacaaacaca

SEQ ID NO: 315063 - DNA, 75 bp, Homo sapiens
agctgaccctgggagacatcgacggtgcgcgcggagccatggttatcatgtcggagttcagcgcggaccccgcgg

SEQ ID NO: 315064 - DNA, 76 bp, Homo sapiens
cctgcctggacccctactattgcaacaaggctggagcattggatttgctaaaggagcttaagaatattcctatgac

SEQ ID NO: 315065 - DNA, 100 bp, Homo sapiens
gtgctgatgaattactacaaaactcccatcgcgtcgtggaggagtactttgtggcccccccaggaatactcccccagttgcaagaggcgcaggaccgtgg

SEQ ID NO: 315066 - DNA, 98 bp, Homo sapiens
gcgagggcgaagacgagatccagttcctgcgaacttactatactggcaattgctggagaagattttgcaattgttgcttctgatactcgattgagtga

SEQ ID NO: 315067 - DNA, 80 bp, Homo sapiens
atttttttcgggtagtggaaaaccaggctccccaaaaaggccacaaagacagccccacctgccctgcctacaggttatga

SEQ ID NO: 315068 - DNA, 83 bp, Homo sapiens
agaagacgtccaatctgagcgtgctgcggacggcgctgcggtacatccagctggcccgagataacttcttccgctgtggtgtg

SEQ ID NO: 315069 - DNA, 75 bp, Homo sapiens
cgtgatcgtgctgggcaccggcctgacggtatttataacagcaatgatgtagcagtatcgtttccaaatgtagta

SEQ ID NO: 315070 - DNA, 51 bp, Homo sapiens
ccagtatttaaagctattcaaccagatattacaaggcttcctcggagatgg

SEQ ID NO: 315071 - DNA, 100 bp, Homo sapiens
cacgctttctgctcaagtcctgtcctcttctgaccaaagagtggttagctcaaccaatggagagctgaatgttgatgatcccacgggagcccactccaat

SEQ ID NO: 315072 - DNA, 82 bp, Homo sapiens
cgccggggaagcagccgccattgtccgcggctgagcagcctcccgcgacgatgcccctcaacgttagcttcaccaacaggaa

SEQ ID NO: 315073 - DNA, 98 bp, Homo sapiens
tgcctcttgggaacaaaatacaaatcatggagccgctggggtcccttttgcctcagatactattttgaagaataactgaagtgaagtgatggactccg

SEQ ID NO: 315074 - DNA, 97 bp, Homo sapiens
cgaagcttaagtagctacaggggaaaatattctgaggcaggtgacaaacattaccaccccagctgtgcacgatgcagcagatgcaaccagatgttca

SEQ ID NO: 315075 - DNA, 137 bp, Homo sapiens
ggccgagatgtctcgctccgtggccttagctgtgctcgcgctactctctctttctggcctggaggctatccagcactgtgccctgtccacggtgcctcctgcatgtcctgctgccctgagctgtcccgagctaggtg

SEQ ID NO: 315076 - DNA, 100 bp, Homo sapiens
aagcttgcaactgaactccctgatgctgaacttaggaggactttatggggcagctgtgctgagaatacagcaaagaagctgaatattgcacgaaatgaac

SEQ ID NO: 315077 - DNA, 100 bp, Homo sapiens
caaagtcttttgtgctcccctcccccatcaaaggaaaggggaaaatgtctcagtcgaaagccgtttgcgagccgccgtgccagaaccggggctcctgcag

SEQ ID NO: 315078 - DNA, 50 bp, Homo sapiens
tcgtatgcaacctcaggcttcagccagcttgtctggagcgggaaagacta

SEQ ID NO: 315079 - DNA, 75 bp, Homo sapiens
tggcctgtcaaaatgaccattctagtgctctccaggtatataatgtttacatggcagggaggcagctgtgttcta

SEQ ID NO: 315080 - DNA, 82 bp, Homo sapiens
gatttccacagtgcatttccagtccagcaaatggaaatctggggttccaaggagcaggggcctcgacaaaggaagggagcag

SEQ ID NO: 315081 - DNA, 98 bp, Homo sapiens
acttcaacagaatgtggcaaccagctgagccagttccagctgttggaacaagagattacaaagcccgtggagaatgacatctcgaagtggaagccctc

SEQ ID NO: 315082 - DNA, 87 bp, Homo sapiens
gcgtgaaaagaaaaaactgaagaaaaaacttgtcaggtctgaagaaaacatctcagcacgtgtggttctcaaatataggcattctga

SEQ ID NO: 315083 - DNA, 83 bp, Homo sapiens
cattcgagagacatatggctacgacatgaagattctggaaaccaaaatggaggaaatgatgataagactaagaatgctgagag

SEQ ID NO: 315084 - DNA, 98 bp, Homo sapiens
gcgtcaccgccgcccccccagacaagatggacaccgcggaggaagataaggagacaaggaggcatccagctcctggtggacctgttggatcatcggat

SEQ ID NO: 315085 - DNA, 83 bp, Homo sapiens
cactcaagtatctcagcgaccaggagcacaagcacttaaatataatgaagatctggaacttgaagatgccattcatacagcca

SEQ ID NO: 315086 - DNA, 120 bp, Homo sapiens
gccgggccctcttcgacagctacacaaatctggaacgggtggccgattactgcgagaacaactacatacagtcactccatggattcctttgggcaacccagaccagaagataatcagtca

SEQ ID NO: 315087 - DNA, 75 bp, Homo sapiens
cgcggcccgggcgccatcgagccttggcggcggacgtgcagcgccgtgccgtccctgcagtgacaccgaggtgct

SEQ ID NO: 315088 - DNA, 82 bp, Homo sapiens
ggaactcaggcgcctcttcttagttgatgatttagttgattctctgaagatatgaatatcactgggcagatggtactaatat

SEQ ID NO: 315089 - DNA, 75 bp, Homo sapiens
gatcccagcctcaggcgtgcgcggacggtgtgcggatattaataaggcagcggaaagaagaaatatgaatacggc

SEQ ID NO: 315090 - DNA, 74 bp, Homo sapiens
agagtatggctgcagaggatccatctgtcttagcaaggctgtcatcacagtggaagaactcagtaaaatactcc

SEQ ID NO: 315091 - DNA, 100 bp, Homo sapiens
agatttctctgctattaaggaactagatactcttaacaatgaaatagttgacctacagagagccctaatttgtttagaactgtaatatgcacagttaaaa

SEQ ID NO: 315092 - DNA, 96 bp, Homo sapiens
ctccctagtggtcccacagctgcggccgccgccttcttcctccatgaacatggtccaagacaattcctgggaaagttcagttcttctcaagtgagg

SEQ ID NO: 315093 - DNA, 88 bp, Homo sapiens
gcattctccagggaaaggatgacatatttttggacctgaaacagaaattctggaacacctatatgagagaactcgatgccaccgcaac

SEQ ID NO: 315094 - DNA, 96 bp, Homo sapiens
gatggccgctgacaggggacgcaggaaacccgaaccctagcggagattgccaaagtggagctggacaatatgccactccgtggaaagcagctgcgt

SEQ ID NO: 315095 - DNA, 100 bp, Homo sapiens
cctgcctgctgatgagctacgccaacgacgccttcccagaggaatacgtgcccactgtgtttgaccactatgcagatatacctgtgtttcccacaatcac

SEQ ID NO: 315096 - DNA, 89 bp, Homo sapiens
ggctgccctgtggcctcgctcctcggaggattactgatctctcattacccaactatctgatggcatcttcggttggactgcttcctacc

SEQ ID NO: 315097 - DNA, 90 bp, Homo sapiens
gccttccaggttgttatctgcaggtgtggcaggttgcagaggacagtggacagtcattttgtttactcattcagccctgttgcaggtccc

SEQ ID NO: 315098 - DNA, 98 bp, Homo sapiens
tggagctgggtcagtccgccgctcaccccgcggccgcaccttcccgccttctcagaccatggtgaatccgggcagcagctcgcagccgcccccggtga

SEQ ID NO: 315099 - DNA, 100 bp, Homo sapiens
gaatgaagaatttgaggacaccatggttattgatctgatgggatggaggtggataccacaccaacagttgctggacagtttgaggatgcagatgttgatc

SEQ ID NO: 315100 - DNA, 98 bp, Homo sapiens
tggactgtcctctacagaaggaagcacaaaaagggacagtcggacaacagctttgagcagttcattattaattattgtaacgaaaagctgcaacaaat

SEQ ID NO: 315101 - DNA, 83 bp, Homo sapiens
tcagctccgagtccagggcgaggggcactatggcagacaaagttaggaggcagaggccgaggaggcgagtctgttgggccttg

SEQ ID NO: 315102 - DNA, 83 bp, Homo sapiens
tttggtcacggtccagcggtcacctacccccagcaccacctccagcccctgcgcctcgcctttggaatgagtacacatccagg

SEQ ID NO: 315103 - DNA, 100 bp, Homo sapiens
ggactcagtcccatcactccaaggagagaaggtctggctctgggagaggagtggacagcagctggttgagatacatccccatctggagacaggactgcca

SEQ ID NO: 315104 - DNA, 75 bp, Homo sapiens
cggcgctgctgctcgggctgctcttggaggacatggacatcttccagcaacagatctcgagaagacagctggcta

SEQ ID NO: 315105 - DNA, 50 bp, Homo sapiens
cctcgctggagatcgagtaccaactcctggtaacgtttttatccatggat

SEQ ID NO: 315106 - DNA, 75 bp, Homo sapiens
cgggacggccggtcaggctcgccgccgagctgtgccggtggtggtgtgcacattgagccccggtatagacagttc

SEQ ID NO: 315107 - DNA, 50 bp, Homo sapiens
tgggacttgaagactatgggaagcaagcaaaagatacagatattgtggat

SEQ ID NO: 315108 - DNA, 96 bp, Homo sapiens
aaaatggcggacgggaaggcgggagacgagaagcctgaaaagtcgcagcgagctggagccgccggagaaatctcctgcaaagaagctgagccatgc

SEQ ID NO: 315109 - DNA, 98 bp, Homo sapiens
gagtctgagaggcgtggagaattttgcttgtgcaagattatttcagagcaaggtcgtgcggtgtgtgtagaaggtatccttctgatgaagagaagaaa

SEQ ID NO: 315110 - DNA, 82 bp, Homo sapiens
ctaaaagatcctttacacaataaagtagatgatcatgataaatgaggtggaccaaactacgaattaacatgcttcctgctac

SEQ ID NO: 315111 - DNA, 75 bp, Homo sapiens
cgaaggggaaggcgcctgaagaggacgaagtcctgacacagctctccctgaggagcagccacattccagctccca

SEQ ID NO: 315112 - DNA, 51 bp, Homo sapiens
aatggttctggcaaactgctcaagaaactgttcaggttccattatcaaaac

SEQ ID NO: 315113 - DNA, 101 bp, Homo sapiens
ctccattgccctgcgcatcgatgaggatgagaaagatgtgaatgaatgtgaactgctcagtggggtgtgtggtgaagccttctgtgaaaacgtggaagggt

SEQ ID NO: 315114 - DNA, 101 bp, Homo sapiens
cccttagggtcctgctcggccaagactatgagaagatgtttggcacgaaatgccatggctgtgacttcaagatcgacgctggggaccgcttcctggaggcc

SEQ ID NO: 315115 - DNA, 117 bp, Homo sapiens
cctctgtggagaacacccccccatggaggcgaggtagagttggggtcgcaggcttattgtgtaacagaacctggagcaggctctgatgtagctggtataaagaccaaagcagaaaag

SEQ ID NO: 315116 - DNA, 74 bp, Homo sapiens
caagccatgggagacaagaagagccccaccagacctgcctagagctggaacgttacctccagagcgagccctgc

SEQ ID NO: 315117 - DNA, 89 bp, Homo sapiens
cgctgcggcgacgcctggatcctgcctccgccaggccggccaagagctcgcaagacgtcaagggagaggaaggctccgccgccccagac

SEQ ID NO: 315118 - DNA, 101 bp, Homo sapiens
tgagcggcgagtttccgatttaaagctgagctgcgaggaaaatggcggcgggaggatatgttcaaggaatgagtgatttactttcccctcttttatatgtg

SEQ ID NO: 315119 - DNA, 75 bp, Homo sapiens
cgcgagcacggcgagccgctggtcatcaccaaggagcattggtttgaaaaggccctacgagacaagaagggcttc

SEQ ID NO: 315120 - DNA, 90 bp, Homo sapiens
agaggaacgaggggaagcagttgatgaaggagaaattgctgaaaatctccctgaacaagaggtggcacatttagaacgaacagggcatta

SEQ ID NO: 315121 - DNA, 50 bp, Homo sapiens
tctggatgctggtgccaccaatattggagccctctggcacaaatggaaga

SEQ ID NO: 315122 - DNA, 51 bp, Homo sapiens
agagctgaggctaatgaaaaacagtcgcccaaaatgtgtggatgaagttgc

SEQ ID NO: 315123 - DNA, 75 bp, Homo sapiens
agtgaagtgattaagaattccttgatgccagaagtgggtggagaactgtaggagagcagacttagaagataaaac

SEQ ID NO: 315124 - DNA, 82 bp, Homo sapiens
ctcgcctcgggacccgcggtccccgctcttgctgtaagactttgaccccgacgcaggcttcagtgattgccgcggatcagaa

SEQ ID NO: 315125 - DNA, 80 bp, Homo sapiens
ttctctgcccagcagcacaagggcagtttgcaggtttttagaacttcagccataaaaatgggcagaattttccttgatca

SEQ ID NO: 315126 - DNA, 100 bp, Homo sapiens
ggaaagggcagcagcagccaggtgtggcagtgacagggagtctgcgctcctcagaccaccggcaggtgaacagcctgatgcagaccgaggagtgcccacc

SEQ ID NO: 315127 - DNA, 75 bp, Homo sapiens
tctgggatcccggccaccagcaattgtccgtatcaccttttgccatgatagcatttctttcattggacagttcct

SEQ ID NO: 315128 - DNA, 75 bp, Homo sapiens
cctcagggcatccccgttttcgcttctgcagaaagccgtcattacacctgattttgaaaaaaaccactgtgttcc

SEQ ID NO: 315129 - DNA, 100 bp, Homo sapiens
gcgcagaaagcaggcgaacccgcggcgcaataacggccaaagaactgccaactctgaaagataatgatttcattaatgagggccaaaagatttatattga

SEQ ID NO: 315130 - DNA, 100 bp, Homo sapiens
aaaagataaagtgttttggttttgatatggattatacccttgctgatatcatggtgacagagtacgtggagcacggacccctggatgtgtggctgcggag

SEQ ID NO: 315131 - DNA, 51 bp, Homo sapiens
ctcaaagttgtcaatacgtagaggtggcagttaaaatgaagcagtacaaag

SEQ ID NO: 315132 - DNA, 100 bp, Homo sapiens
ggcacaagtatagactcagttcggtctgtccttgctaaaaacaaagtttgtttgttggatgttcagcctcattgcgtgtgctaagctcaggtctgagcac

SEQ ID NO: 315133 - DNA, 75 bp, Homo sapiens
caggtagccgcggagcgcacccccgtgcccttttcaggctggacctgtaccgagcctcgggtaaatttgagcttc

SEQ ID NO: 315134 - DNA, 100 bp, Homo sapiens
ccggtggagttccggaaccatttgaaggaacagcatcctgacatcgaaaacccggacctcgcttacctgcatgctggtgggaaagcagtgccactctccg

SEQ ID NO: 315135 - DNA, 82 bp, Homo sapiens
gggaaaaagaggccaaagatctgacagaactggttcagcggagaataacatatcttcagtactgtaagattgatgttaaagg

SEQ ID NO: 315136 - DNA, 96 bp, Homo sapiens
gtggaaacatctgaatatgctcaaggaggagatttatactatggtggggaagctttctctgtagagcagccacagtcttttacttgtccctattgt

SEQ ID NO: 315137 - DNA, 75 bp, Homo sapiens
gaagattgcttctcttctctcctccaaggggaaagctctggcaatttaaatgacccaaataaggaggcactggct

SEQ ID NO: 315138 - DNA, 100 bp, Homo sapiens
cgacctctccactgtatctgggaattgccaaggagaagagtaccaaggctgctagtgaacagcgacgtggtctggagcccccaactcccttgacagtgta

SEQ ID NO: 315139 - DNA, 75 bp, Homo sapiens
gtccctttgcctcatcccaggttgccttggaaaatgccaacgccgtgtctgaagctgtttcagatagagagcctt

SEQ ID NO: 315140 - DNA, 100 bp, Homo sapiens
tagtgggctccgtgctgaattggttttctccggtccaggctttacagaagggaagaacttttaacttgacagcagtgtccccagttgtcctcatccaggg

SEQ ID NO: 315141 - DNA, 75 bp, Homo sapiens
ctgaattcaagttggtcgaccagtccggacctcctcacgagcccaaatttggtgcttccagatgtgagttatcag

SEQ ID NO: 315142 - DNA, 76 bp, Homo sapiens
cgagtcaacaaccgcttcgagctggaaatctgaaatagagtactatgctatgttggctaaaactggtgtccatcac

SEQ ID NO: 315143 - DNA, 75 bp, Homo sapiens
aaggaaaacctatatccttatttaggccccagcacactcagagacagggaagtgaggttagggcgaaatggtgta

SEQ ID NO: 315144 - DNA, 109 bp, Homo sapiens
ggcttcagcagaagaaacacttcctataaatctcgcccaaacaggaaaggctttatcctgtggataaacgcagagtgaacgagtttggggagtcctacgaggagaaggc

SEQ ID NO: 315145 - DNA, 100 bp, Homo sapiens
aaaaatgaacagttttgtggaatagatgaccaaataaaaccatgagctgttttccaagagcttcatctccatggaagtgcctgtcatggtagtaaatggc

SEQ ID NO: 315146 - DNA, 74 bp, Homo sapiens
cctccaccgagtcgtgctctcgccccaacccgcgcgccaggcaccatgactcctgtgaggatgcagcactccct

SEQ ID NO: 315147 - DNA, 75 bp, Homo sapiens
caatggtggagaagaaaacttcggggagaactaatgccgacgtgatgaccgccctgtcccagggctacaggatgc

SEQ ID NO: 315148 - DNA, 78 bp, Homo sapiens
ttccggttcttcctacaagaccctcaaagccaggagctcgatgtgcaagaagtggacaaaattatcctacagatgatg

SEQ ID NO: 315149 - DNA, 73 bp, Homo sapiens
gacagttcgctacacagcaatgcatcgagatctgaattctacaaacacattgtgctttctggagggtctacta

SEQ ID NO: 315150 - DNA, 75 bp, Homo sapiens
ctcttttgtctgcccctattgtaagtgcagatggaacacaacagttctgcatcctccaggctctggttcccatgc

SEQ ID NO: 315151 - DNA, 74 bp, Homo sapiens
gagagagcttggttaacttgggagaaagtttcatctgtggatggagtattgggatttggacatttggtgccatc

SEQ ID NO: 315152 - DNA, 95 bp, Homo sapiens
cgaggccagagcctagggctagcggccatgcaattgcctgtggttacctccagtacaattgtgagatgccgttcatgcaggacgtacatcaatcc

SEQ ID NO: 315153 - DNA, 82 bp, Homo sapiens
cagttggaagcagccgatccagcctgcggagcctgtggggcaggcccagctgagagccagcctggaggttacccagcagcag

SEQ ID NO: 315154 - DNA, 50 bp, Homo sapiens
aaaaagccgaaataccctcccaacaaagcccccaaatacatcaagatgtt

SEQ ID NO: 315155 - DNA, 98 bp, Homo sapiens
tccattggatttaaaagacagtcctcgtcagcactgactttcagctatggaatcgcagtagcagccagatgaagaagcggccaacatctgcagtgggc

SEQ ID NO: 315156 - DNA, 95 bp, Homo sapiens
ggaaaaacctgtgctcatatcactgggaaaaggactgcaaaattcaaaatggggctcaaggtattcgtttcatctacaccagagaaggcagacca

SEQ ID NO: 315157 - DNA, 74 bp, Homo sapiens
caaacagtggttctgctggattgataaacccagctgctacaggttttgctgttactgctcagtgtagtcacacc

SEQ ID NO: 315158 - DNA, 100 bp, Homo sapiens
gtacctgaaccggcacctgcacacctggatccaggataacggaggctgggtattggcaagcttgccagtgtacctgctggtggggctgtagccgtctctg

SEQ ID NO: 315159 - DNA, 83 bp, Homo sapiens
tcggtcctccacctgtccgctacgctcgccggggctgcggccgcccgaggctgctctttggcgtaaattgcaatcgattaggg

SEQ ID NO: 315160 - DNA, 83 bp, Homo sapiens
tcctcggtggctgcgccggaggcctgactctgggagcacgcaatttggtgttgtactgcgaggcattcctgaccacctacagg

SEQ ID NO: 315161 - DNA, 100 bp, Homo sapiens
gtgaggccctaatccaagatttaatcaactactgtctgagctacattgcgaaaattaaactcccgaagaagagggtatttaaaggatccacgataccagg

SEQ ID NO: 315162 - DNA, 75 bp, Homo sapiens
cagtcttcttgcttcctgaaatttcctctgttttcggctttgtgagaaaccttaccatcaaacacgatggccagc

SEQ ID NO: 315163 - DNA, 90 bp, Homo sapiens
gactggggtccaagtgagttcaagaatctttatggtgtggctcattactcacagtataaaaccattatcaggaactgttgccgttattac

SEQ ID NO: 315164 - DNA, 89 bp, Homo sapiens
gcccacgccagacacgacgtctggcaggaacctcggcctcagaggtgctggagaatctggtaaaagcaccattgtgaagcagatgagga

SEQ ID NO: 315165 - DNA, 108 bp, Homo sapiens
ggaacacccaggtgaacaattaggtcctccacaatgaagacaggtaatgtggaggaaagagagcttgtcatggggccttcagaaggaagaagttgttttgcttacaca

SEQ ID NO: 315166 - DNA, 100 bp, Homo sapiens
atgtgtctgacgtcatcaggcttgttcaagacacaccggaggcgacggccatggccacagaacgacaccgtaactatccgcactagaaagttcatgacca

SEQ ID NO: 315167 - DNA, 95 bp, Homo sapiens
ctgccaaccggccagaggacgagtgtgggtcaaaagcggctggtgctttccgaaagctgctcccgggactccatgagcagtcagcctagttgtac

SEQ ID NO: 315168 - DNA, 89 bp, Homo sapiens
gtagactacgagggctccagaacccaggaaggaatccagaaccctggctgaaattgcaaaagcagagctggacggcaccattctcaaga

SEQ ID NO: 315169 - DNA, 98 bp, Homo sapiens
tcgtcgacatgagtgatgtggaggaaaacaacttcgagggcagagagtgtacctcacagccttctaggatctccagagtggacaggaatctcacttgg

SEQ ID NO: 315170 - DNA, 96 bp, Homo sapiens
cctactcagaagaacttgtacagagatgtgatgttggagaactatagcaatctggttttcttggcctgagaaatgccagtggcctgacagcagcag

SEQ ID NO: 315171 - DNA, 100 bp, Homo sapiens
acaggatgcctctcagctgccacctgcctttgacctttttgaagcctttgcaaaagaaggcccttttgtctacttgtctttagtaggaaacgttgcaaat

SEQ ID NO: 315172 - DNA, 99 bp, Homo sapiens
acggcggcggcgagggtggtggcggaaacctgtaggaagtgtcagggactctggaaagaacataatggcctcacctgtgaagagctggctgaaaaagac

SEQ ID NO: 315173 - DNA, 100 bp, Homo sapiens
cagttcgctagtcaaacctgtgagttcaacatgatagagcagagtggaccaccccatgaacctcgggctgtgggacagatgatgtctaccatgttctacc

SEQ ID NO: 315174 - DNA, 75 bp, Homo sapiens
ctctaaaaatgcagatcatttactgcacctaaagacaaagaagaggtgtggtggaaaggtcttccagaaccagag

SEQ ID NO: 315175 - DNA, 95 bp, Homo sapiens
cacgacctgacggacaccacccgggcggaaagtgaagtcactgcttttgctgtcttggatcaagaccagaaagaaattattgataccaatggagc

SEQ ID NO: 315176 - DNA, 83 bp, Homo sapiens
tgagggtgtaacttacaaaaagatgatgataattccgaagaaggcttccacactattcattcaggaaggcatgaatatgcatt

SEQ ID NO: 315177 - DNA, 100 bp, Homo sapiens
agagcttctcctgtgtctgccccacgggctggcaaggtccagccctgctgggagttttctgccacacagatttgcggaagaacctgaccgtggacgaggg

SEQ ID NO: 315178 - DNA, 101 bp, Homo sapiens
ctgccagacagctccatgatgaagctcgcaaatggtccagcaaggcaggtgacaaacattaccaccccagctgtgcacgatgcagcagatgcaaccagatg

SEQ ID NO: 315179 - DNA, 101 bp, Homo sapiens
cttcttcccacgctgctactgcctgggggctgaggatgacaaaaaagccttcataggggatggagaagtttatgtttgggatgtgaactcaaggaagtgcc

SEQ ID NO: 315180 - DNA, 100 bp, Homo sapiens
aaacacttcatagaaaactatccaagaatgtgacttcctggagtagagtcttttttcactgaggaaacctctgtagaggagcaggatgcaaccgacaggc

SEQ ID NO: 315181 - DNA, 90 bp, Homo sapiens
ggagcttctcagaagacagagggttttcttttgagaccattaaaaatctcaagtgacgactttgggaaactctggttatccttcgcaaat

SEQ ID NO: 315182 - DNA, 100 bp, Homo sapiens
gcacatgatcatctcagctgctggccctaagacggaatcagtccccaatgcctggaaattcctcattggattactgtgttttaaacagaatttcgtgaac

SEQ ID NO: 315183 - DNA, 75 bp, Homo sapiens
ccacgggggtcatgggcaacattcagctttttaaagatgacatcaggtatctgttgacaatggacaaactatggc

SEQ ID NO: 315184 - DNA, 88 bp, Homo sapiens
aagccatcgtgaaggagctcctggagctggtgagagtctgagaaaactgtgcgtcttcaagaaaattgagaggcattccattcactgg

SEQ ID NO: 315185 - DNA, 82 bp, Homo sapiens
cctttactgcccagcatgtgacaaatcgttcaagacagaaaaggcgtgggagaaggagagaaattggtgagggctctttttg

SEQ ID NO: 315186 - DNA, 100 bp, Homo sapiens
cagcctgtccggacccgctgtggccacgtcttcttggacacttaatgattgttggcaagaaatgtgctgctgatctgggcctgaataagggttatcgaat

SEQ ID NO: 315187 - DNA, 90 bp, Homo sapiens
ctttcgaaagaatatgatcaactcctgaaagaacactctgaacttcagcttattaatgtggctttgggtaaatgcatttccattgaaaac

SEQ ID NO: 315188 - DNA, 83 bp, Homo sapiens
tggactcggcccgcggcggcgcgctcacccgccccgttcagatgaaggatttgggggcagagcacttggcaggtcatgaaggg

SEQ ID NO: 315189 - DNA, 78 bp, Homo sapiens
gctaagaaagtggtgaatcccctgtttgagaaaaggcctaagaattttggcattggagtacaagcgcaagctagccag

SEQ ID NO: 315190 - DNA, 98 bp, Homo sapiens
ggatatttaagtacaatggtgggcttaattttagagccatccaaaactctgtttgtcaaaggcctgtctgaggataccactgaagagacattaaagga

SEQ ID NO: 315191 - DNA, 100 bp, Homo sapiens
gacgacatctacgaggacatcatcaaggtggaggtgcagcagcccatggacaagatcgcagaggaaggtgggcggcgggagtgcccagccgtgtgacagc

SEQ ID NO: 315192 - DNA, 101 bp, Homo sapiens
ttcgaatgtgggcagatgaaggtagtcggcttagcaggtttcgaatgctctttacttcctttgtggagcaaatgagccgtcagactgctacagcattacct

SEQ ID NO: 315193 - DNA, 100 bp, Homo sapiens
gggaactgactgctgtagttcagaagaggtttggctttccagagggcagtgtagagcagtgcctgatttgagatggggtcccaggtctcggtggaatcgg

SEQ ID NO: 315194 - DNA, 83 bp, Homo sapiens
tagattttctctcaaactacgagctctattatcaagtcctaaattttggaatgattgtctcatcggcactaatgatctggaag

SEQ ID NO: 315195 - DNA, 100 bp, Homo sapiens
ggagagcttcgagaaggcgtaccaggcgcttctcgtccctgaagacgttcctctggttcctgctgccgctgctcttgctgacgtgcctgacgtatggtga

SEQ ID NO: 315196 - DNA, 80 bp, Homo sapiens
cagacggggtggagcccatggaatcggtcctggaggacagatgactttgaagaagccaaggaaattttgacaaagatgag

SEQ ID NO: 315197 - DNA, 98 bp, Homo sapiens
gtagcagagaacagctctttgcatccggagagtggacaagaaaagttctaaagttcctgttgcttcagacaatggatgagcaatcacaaggaatgcaa

SEQ ID NO: 315198 - DNA, 82 bp, Homo sapiens
ttcaggaaaacagagaaagaagtgataggagggctctgtagccctgggcgctgcctatggcacagccaagagcggtaccggc

SEQ ID NO: 315199 - DNA, 83 bp, Homo sapiens
cgtgcctgcctggtttcccaggggccccttgtgccattaaaatcagcaaagtcaaaatgcagatcttcgtgaaaacccttacc

SEQ ID NO: 315200 - DNA, 106 bp, Homo sapiens
ggccacgggcctctccgggcgggagcccagggtggcggcgcctgcggccgagcgccgggagcagggcagcagaagaagcctttgtaaatgacattgacgagtcgtc

SEQ ID NO: 315201 - DNA, 75 bp, Homo sapiens
gttacctctcatcattgtgttaatggtgaagcacagcgattccccattcgggtgtccacctggaacagactgaac

SEQ ID NO: 315202 - DNA, 100 bp, Homo sapiens
cccatggtgacggtggccctgtcagtggctctcttggccctcctgaaatggatttaagtgccctgtatgctcaaaatttgtatcctcagatgaaatggat

SEQ ID NO: 315203 - DNA, 100 bp, Homo sapiens
catcatagtcaactgcgtggaagagaagattaacgtcttcaaggacccagttgctgatcccaacaaaaggtccaaaaagggccgattatctttacatagg

SEQ ID NO: 315204 - DNA, 95 bp, Homo sapiens
tcattcctaatgttgtaaaatacagcccgaactgcaagttgcttattgtttcaaatccagggaagaaggagaaagggccaacccctgaagaagca

SEQ ID NO: 315205 - DNA, 100 bp, Homo sapiens
tttgactcctgatcaagatgagcccccttttaaatcagcttatagttcttttgtaaatctctttcgttttaacaaaggttcactggttgaggacccagtt

SEQ ID NO: 315206 - DNA, 71 bp, Homo sapiens
taaccaggtgcttggcaaaatcgagcgggccattgacgcaaacatgcagatctttgtgaagaccctcactg

SEQ ID NO: 315207 - DNA, 51 bp, Homo sapiens
ctgtcattcacaaccccctgaaagccggggatctgatgagcttctttcttc

SEQ ID NO: 315208 - DNA, 82 bp, Homo sapiens
aggatttgctgactttggctcagctgctgcatcaggcagtttcccttcccaaggtacgttcttcagatgtgtcatggtctga

SEQ ID NO: 315209 - DNA, 83 bp, Homo sapiens
ggggccgcagtctggccacccgcttccatgcggttcgggtccaagatgatgccgacaatgcagatcttcgtgaagactctgac

SEQ ID NO: 315210 - DNA, 83 bp, Homo sapiens
ccgagaccgcggccgggaccgaggtactatactggcaattgctggagaagattttgcaattgttgcttctgatactcgattga

SEQ ID NO: 315211 - DNA, 75 bp, Homo sapiens
tggccggccgtgtgtgaacactttggggtggaagccactggcgaggagtccagggccaaatccttgtagctgtct

SEQ ID NO: 315212 - DNA, 50 bp, Homo sapiens
gaactctgtcagcgagtgtacagccgaggccctcgggaccaaggatcacg

SEQ ID NO: 315213 - DNA, 75 bp, Homo sapiens
aacatggagaaagttgtgaagatggatcgagacatgaccaagggcacctcaacacctttgcttcgaatagcctgg

SEQ ID NO: 315214 - DNA, 75 bp, Homo sapiens
gcctgcagtgtgctgtgagagatctaccactaggaccttttttctatcagtgcttatgtttatgctcagaaacca

SEQ ID NO: 315215 - DNA, 83 bp, Homo sapiens
cgtccttctccactttcgccagcccgtgccgcgagcgcggcctgcaggagattattttcgaaataccagtatttcgactccag

SEQ ID NO: 315216 - DNA, 98 bp, Homo sapiens
agcagtcctcccagaaggagtgtgggcaacctgcagggcctccatgaagaagtggactattctgagaaactgaagttcagtgatgatgaagaggagga

SEQ ID NO: 315217 - DNA, 83 bp, Homo sapiens
gtgttgattgaggacgttcccttcacggagaaagattttgaataacgaaggaggcccaacttcattcaataaggagcctgacg

SEQ ID NO: 315218 - DNA, 90 bp, Homo sapiens
cgcacaggatgaccaccaccctcgtgtctgccaccatcttcgacttgagcgaagttttatgcaaggggcttacggtgagacatatcctgc

SEQ ID NO: 315219 - DNA, 100 bp, Homo sapiens
tgtaatgttgatggccgccatcctcatgacatcatcgatgacatcaacagtggtgctgtggaatgcccagccgaaccgaatattgtatctgacgcatcct

SEQ ID NO: 315220 - DNA, 100 bp, Homo sapiens
tgatgctctctctccagtccttgctgaagagactttccgttacatgagatatggaaagagtttgtgcttccagtatccacctgtttatgtaggcaagatt

SEQ ID NO: 315221 - DNA, 73 bp, Homo sapiens
cacagtgcaccctgctggtgaaggacaagtcagccaagatgtttaactacgcgggatggaagaacacctgcaa

SEQ ID NO: 315222 - DNA, 101 bp, Homo sapiens
ctgtgattcactagtgtgcctctgcgaatttaaagctcatgaaaacagtccatgaaggctctggagaaactagtcaaaaggagacatccacctgtgatatt

SEQ ID NO: 315223 - DNA, 78 bp, Homo sapiens
actggtctctcccaccacacagagtccagcctagggtgaatgtttccccctccaagaaggggcccttgcagcaccaca

SEQ ID NO: 315224 - DNA, 100 bp, Homo sapiens
ccagttagtggtgctcaacgtgtacgacatggctggctacagcaaacatcattcaagatgtccagcaaagggagcagcacagatggcagaacagacttag

SEQ ID NO: 315225 - DNA, 96 bp, Homo sapiens
cgcggagtcctgaagccggcggacggttttcgtacgggcggccgtgcgcgaggcgagcaaacggggattcagcgtccgatcctttggaacagggac

SEQ ID NO: 315226 - DNA, 100 bp, Homo sapiens
gaaacagataaaacttcagatatgggatacggacctatatccagactttgcctgacactgcagggtccaagagaattaaagaaatatggaatgacatgaa

SEQ ID NO: 315227 - DNA, 90 bp, Homo sapiens
tcctttatatagaagggagattgttcccatgactttgccgactaaagttctaagtgcccaccgtaaatcactgaatcttgttgattctcc

SEQ ID NO: 315228 - DNA, 100 bp, Homo sapiens
gtcgaatatcatgctggtggctctacccagaattcaattaaagtggctcagctggattgccttttgcaattcttacttcaaggcatacccccttccaacg

SEQ ID NO: 315229 - DNA, 99 bp, Homo sapiens
caatttgccagtgtttccacaatggaaccaattgttttacagtctgttccacatgatcattgtaataaggtggagccgccaccaaaatgcagattttcg

SEQ ID NO: 315230 - DNA, 100 bp, Homo sapiens
tgagatgagtcttcctctggaaaacacaatgtgaaaaactcaaattactgtcttccatcatataccgcttataagaactatgattattcggaacctggaa

SEQ ID NO: 315231 - DNA, 83 bp, Homo sapiens
cgagaggggctgtgacagtcggagtcccaagctgcggttcggctgctgccgagcggagctggagtttgttcagatcatcatca

SEQ ID NO: 315232 - DNA, 96 bp, Homo sapiens
aaggccttggagagcccagagcgacccttcctggccatcctgggcgggatgtgtgctgtgtttggtggaatttattgtcttcgccattcagtacag

SEQ ID NO: 315233 - DNA, 83 bp, Homo sapiens
gggtgttcgactgctagagccgagcgaagcacgccgcaccaggctgcaggccagcccttcaagttcactatcccggagtccct

SEQ ID NO: 315234 - DNA, 130 bp, Homo sapiens
cggagaagcagtggtgggttccatgtgatggtggagtaggaggcaggtctccgcgagctatagtgaagtggccaaccacatcctcgacacagcagccatttcaaactgggctttcattcccaacaaaaat

SEQ ID NO: 315235 - DNA, 75 bp, Homo sapiens
tttgctggcactgttattacaaccatagtttatttacaaatgttggagtaataaagaaggcagaacaaaatgagc

SEQ ID NO: 315236 - DNA, 90 bp, Homo sapiens
taacattgttacactggacagattaattctctgcctgggaggagctttatctttatatactgcccttaccacacagcagaaactggcagg

SEQ ID NO: 315237 - DNA, 100 bp, Homo sapiens
cgcatgctctttgtcactccccggcggcagcacgaaagtaccatatttggagcaagaggtggtggtggccttcccccgaagaaatttggtaatcctgggg

SEQ ID NO: 315238 - DNA, 100 bp, Homo sapiens
gtggattctgctgatgcggaggaggatgactcggatgtctggtggggcggagcagacacagactatgcagatgggagaaagaagatgctgatatgctaca

SEQ ID NO: 315239 - DNA, 100 bp, Homo sapiens
aagcgctgtgcgccgcgggccaccgcgccgaactgctccggttcccgggagttaacagagcagtttcataaagttgaatctcaactgaataagctaaatc

SEQ ID NO: 315240 - DNA, 82 bp, Homo sapiens
gggcgggacagcggccccctggagggggcagtcccgggagaacctgcggcggccggagcgttccagtgtctcgccccatcct

SEQ ID NO: 315241 - DNA, 100 bp, Homo sapiens
ccagaagcgagatgccatggagctgccggattatgtacttctaacagctactgccaaagtgaagattccaaacagaggcattgatttactgaaaaaagat

SEQ ID NO: 315242 - DNA, 75 bp, Homo sapiens
agcagatcttcttttggagcagcagagactggattggcagccaccatttgcatgtgatgttgataaacttcattt

SEQ ID NO: 315243 - DNA, 98 bp, Homo sapiens
gaggctgcaccaagtggcgaaggagccggctccaaggggacagagggacttggactggctttggcccaataatcagagtggcagtgagcaaagggtgg

SEQ ID NO: 315244 - DNA, 50 bp, Homo sapiens
ccaagctgacagaatccatgagagttgtaagacgttcatcgccgtgttat

SEQ ID NO: 315245 - DNA, 82 bp, Homo sapiens
ctggaccaacgagcgaacgctggacgatggcatgttacatggaattggaaaatttatagttgaaataatttgctgtcgtttc

SEQ ID NO: 315246 - DNA, 121 bp, Homo sapiens
cttcatccgggaagtgcttggggatggagtgcctccaaaggttgctgagggtttggaaatcccttgtctccaggttgctgggattgacttcttgctcaattgaaacactcattcaatggag

SEQ ID NO: 315247 - DNA, 89 bp, Homo sapiens
cgggccatggccgccgccgatgccgagcaacacagtcactcctggcggcaaaccaaacaaaaccagagtcatctggggaaaagtaactc

SEQ ID NO: 315248 - DNA, 75 bp, Homo sapiens
tgccctggtcttgctcggccgatgaagtgcagaggtttttttctggtcagaaagcaacattgaatgcagaagaaa

SEQ ID NO: 315249 - DNA, 74 bp, Homo sapiens
cagcagatgatccagcttttggctggaagtggaaactcacaggcaaggggatcaggcgagtgaagccgaagcgc

SEQ ID NO: 315250 - DNA, 82 bp, Homo sapiens
ttgctaaagagccgagcacgcgggtctgtcatcatgtcgcgttacgggcggtacggaggagcttttacccagcacctgtcca

SEQ ID NO: 315251 - DNA, 90 bp, Homo sapiens
gactgccctcatccacgatggcctagcacgtggaattcgcgaagctgccaaagccttagacaagacactgcccatctctaagataagaac

SEQ ID NO: 315252 - DNA, 87 bp, Homo sapiens
gcttctggatcaccgagcgccaagtaatgtgaggctacaggagatgatggcaacaatgtgccaggaacgtggagcccggctttttgc

SEQ ID NO: 315253 - DNA, 100 bp, Homo sapiens
tacaacggtgctggtgacacagcggccctggccctggccagagctgcccgggagcacccttccctggaactgctacagcgaaacctaaccaaactgtccc

SEQ ID NO: 315254 - DNA, 82 bp, Homo sapiens
gcggaccgggcccggcgggattagcagacaatgcagatcttcgtgaagactctgactggtaagaccatcaccctcgaggttg

SEQ ID NO: 315255 - DNA, 98 bp, Homo sapiens
gctcagccaccggggcctgccgcgcctgtcctggatcgacaccctctacagcagacccttgaacatctgtgaagaaatgactattctgcatggaggct

SEQ ID NO: 315256 - DNA, 100 bp, Homo sapiens
aaagatggcggcagccgtgcgacaggatttggcccagctcatgaattcgagcggctctcataaagatctggctggcaagctcttaaagactctgaccaag

SEQ ID NO: 315257 - DNA, 82 bp, Homo sapiens
tcagatcttcacagcacagttcctgggaaggtggagccaccagcctctccttgaaaactttagaaactgttcctttggagag

SEQ ID NO: 315258 - DNA, 75 bp, Homo sapiens
aacaattatactcaatcttatccaatgaggaacccaacggataccttgtagcagtacctgggaacctgcatcctg

SEQ ID NO: 315259 - DNA, 116 bp, Homo sapiens
cccatcctgccgtccttctccactttcgccagcccgtgccgcgagcgcggcctgcaggaggcgccatgtcagaaccggctggggatgtccgtcagaacccatgcggcagcaaggcc

SEQ ID NO: 315260 - DNA, 83 bp, Homo sapiens
gttcatcgagtcacagtttggtatcccagcctccaatgccagcatctacactgtccaatatcagatggaaatgatgcggagcc

SEQ ID NO: 315261 - DNA, 50 bp, Homo sapiens
atgtgaggaaaggcacctccaccagaaataaactatcaatcttgcccaga

SEQ ID NO: 315262 - DNA, 82 bp, Homo sapiens
cggcttggagaggccgagggtttgatgaaggtggaggcagcgcggctctcagatggagttttaacattgaatgcggagaaca

SEQ ID NO: 315263 - DNA, 111 bp, Homo sapiens
cagatcctggaggatgtgcggggtgcgccggcagaggatccagtgttcaccatcctggccccggaaggtacaccaggggttggaaaaaccacactaggcaaagaacttgcg

SEQ ID NO: 315264 - DNA, 95 bp, Homo sapiens
tttggatcttatatgtagagcccatcaggttcgatcaaggggactggatgcccaagtgattttctctaataatcgggttgggacttaactttaag

SEQ ID NO: 315265 - DNA, 75 bp, Homo sapiens
gtggaatattcattgtactgaatattacccttgtgcttgccggctctgcttgaccccctcataggcctgctgtgt

SEQ ID NO: 315266 - DNA, 83 bp, Homo sapiens
taatatgctggatgagctgctgaagcccaccgaattaggctgaccccgcactacatctacccaccagccatcgtgcagcccag

SEQ ID NO: 315267 - DNA, 100 bp, Homo sapiens
gccctatacacccatctccagcgatgatgacaagggcttcgtggacctggtcatcaaggctcgctcgcctccgtgttcgtccggctcccttgcggtggtg

SEQ ID NO: 315268 - DNA, 95 bp, Homo sapiens
catgtctttcagagcccggcaccacccatcttgagtatctgaatcttatcttggctttggatcttagaagagaatcactaaccagagacgagact

SEQ ID NO: 315269 - DNA, 100 bp, Homo sapiens
cttcgacctgagctgggaggccactagcagccagttccggcccgaggacaccgactaccagcagggaaatcgtggaacacatggtccagcactttaaaac

SEQ ID NO: 315270 - DNA, 83 bp, Homo sapiens
caatgatggcggtcacagcaggtgccgacttctgctatgccatcgaggtcccaggtgtgacaccttcagcaggtctcagggaa

SEQ ID NO: 315271 - DNA, 75 bp, Homo sapiens
aaaggagcaagagcaagatcaccgtgacatccgaggtgcctttctccaaaagaaacctctgcgccatgagagcca

SEQ ID NO: 315272 - DNA, 82 bp, Homo sapiens
gtaccaggcgggcagtgcccgctcagggcctgttacagtctacccctacatgcatgatggaataaaaaggcctacctcattg

SEQ ID NO: 315273 - DNA, 122 bp, Homo sapiens
tctgagggagcagctgcgtgagtggagatgctttcagtggtggagaatggactggacccccaggctgccatcccgtacaacaaacacctcttcgtgcacattgggcatgccaaccattctta

SEQ ID NO: 315274 - DNA, 101 bp, Homo sapiens
caaacacaaagtcgggctcatccaaggatgagattttgccagagaaaggacgagcagcaagtcagggagcttaagaattcagtgacgcgcagcgcccccat

SEQ ID NO: 315275 - DNA, 80 bp, Homo sapiens
ccctggagcggccgccttccagcgctttttagaccccgagaagaagcttttttctcaccgaatattatcaagggatgaat

SEQ ID NO: 315276 - DNA, 83 bp, Homo sapiens
gtgcgtgggggaccggctgttggcgggaacccaagacagaccaggatgaggagcattgccggaaagtcaacgagtatctgaac

SEQ ID NO: 315277 - DNA, 75 bp, Homo sapiens
gttgtgagggaagagacaggaagatggtgcccagattctgaaaaagagttccacgtcctcccttatcgagtcttt

SEQ ID NO: 315278 - DNA, 75 bp, Homo sapiens
agggccaaattgaattgactgggaaaagctgcagaaccttggcctgaaaatgctacattatatcagcaattgaaa

SEQ ID NO: 315279 - DNA, 98 bp, Homo sapiens
aacaatcatcagctggaactggcaaagcagctacacaaagagggtcatctcttctattgtacctgcaggtgaatactgctatgcatgaggcaaaactt

SEQ ID NO: 315280 - DNA, 82 bp, Homo sapiens
agaagaataagagatgtgattaatgtattccaccacctccgccagttaagaggaaaaagatgctattaacattctgaaggag

SEQ ID NO: 315281 - DNA, 75 bp, Homo sapiens
gaaaaatctgaggttatcaatgacgaggtgaatgaaaactttgccattgatttgatagcagagcagcccgtgagc

SEQ ID NO: 315282 - DNA, 100 bp, Homo sapiens
ctggtccggaatccctaagccagtgcgtccaatgacgtggaagctcctctcagaggcactggctacaattaggcttctcgacgtcctgtgcgaaatgact

SEQ ID NO: 315283 - DNA, 101 bp, Homo sapiens
cagacttgggctcagagcaaggatgcgtgaaattgtccatattcagattggccagtgtggcaaccagatcggagccaaggatgatgatgctgaagctatcc

SEQ ID NO: 315284 - DNA, 100 bp, Homo sapiens
gtggctgcaacagttttagagtactttataaaattttggacgcctgtgcctactacactggcacaagtggatagagaaaagatctatcagtggatcaatg

SEQ ID NO: 315285 - DNA, 98 bp, Homo sapiens
ttggaagaatgctggaacgagttataggaagatgtagtccaacccacatcagcagagcatgtctgttcgatcctggcttccctcctgcggaacctgag

SEQ ID NO: 315286 - DNA, 75 bp, Homo sapiens
ggaaaagacaaagaatatgctgaaattattaggggcaagattcttgccaagagaattaatgtgcgtattgagcac

SEQ ID NO: 315287 - DNA, 100 bp, Homo sapiens
cgccacgctcagcagcatcagacacatgatccgcaagaacaagtaccgccccgacctgcgcatggcagccacactcgatttgaaatcaaaggaggagaag

SEQ ID NO: 315288 - DNA, 75 bp, Homo sapiens
tcattctgcaagcaggcaacctgaatacaggtggtttgtgatggggccaccacgctccggaactgggattcacat

SEQ ID NO: 315289 - DNA, 85 bp, Homo sapiens
cctaattgactgcttgtcccagaagcaatttaaggagcagatccccgtcgaggtcaagatcaagatccaggtctatttcacgacc

SEQ ID NO: 315290 - DNA, 100 bp, Homo sapiens
agatggcgagagagaaacatcaggcttcccagaaggaaaataaacagctgagtctgaaggtggatgaactggagaggaacagttgggaccctaggaggca

SEQ ID NO: 315291 - DNA, 75 bp, Homo sapiens
acctcactgcagaggtgctggagctggcaggatgcagaaagtagatgacattccatccacactgtgtgagcaaat

SEQ ID NO: 315292 - DNA, 100 bp, Homo sapiens
tgtcagacgcagccgtagacaccagctccgaaatcaccaccaaggctaccggctctctgaccagttccacgacatcctcattcgaaagtttgacaggcag

SEQ ID NO: 315293 - DNA, 98 bp, Homo sapiens
ggagagccccggagtgagcggagtagcgagtcggcaacccggaggcaactatggagaaagtgggatggaagccttcaaagatatgtcagcgaaggaag

SEQ ID NO: 315294 - DNA, 99 bp, Homo sapiens
actgcgtgcccggcgtgctggaccgccgcgactccgccgcgctgcgcacgcccagagagttaagaaagacgtggacaagggcacacggcactcagacat

SEQ ID NO: 315295 - DNA, 74 bp, Homo sapiens
aaaatgaaactgagcctaatcagcagaaatctgaaatagagtactatgctatgttggctaaaactggtgtccat

SEQ ID NO: 315296 - DNA, 82 bp, Homo sapiens
cgaccccgtcccgaccctggccgccccgagcggagcctggaggtgacttaagagattaaaattaatttggttgctgttggtt

SEQ ID NO: 315297 - DNA, 55 bp, Homo sapiens
tggagggggagttctcagagtcattacagaaacctcgacctgtctcccagttggt

SEQ ID NO: 315298 - DNA, 58 bp, Homo sapiens
tgagtggttccatgatgggaagtgacatgctgcctgtgtcagggaatctgcttgatgt

SEQ ID NO: 315299 - DNA, 96 bp, Homo sapiens
catgttgctgaaagctgtttggaagaaacaggtggcctgggagtagatattgtcctagatgctggaggtggaatgaatcttacttgttgaatatct

SEQ ID NO: 315300 - DNA, 74 bp, Homo sapiens
aggacgaaggccctactgggcaagaaagacttccgagtgcaggaactcccactggctcgtattaagaagattat

SEQ ID NO: 315301 - DNA, 100 bp, Homo sapiens
gccaaccgcaaccattgacgccatgtcgggttattcgagtgaccgagaccgcggccgggaccgagggtatttaacagactcccgacaaaaagcagaatga

SEQ ID NO: 315302 - DNA, 122 bp, Homo sapiens
aacaagaacagctgttactcaagaagatgtatttaatgcttgacaataagagaaaggtcgttccaggggtagaggaggcatgaaggatgaccgtcgggacagatactctgcgggcaaaaggg

SEQ ID NO: 315303 - DNA, 100 bp, Homo sapiens
ctgattgtcaggagaagagaagttctggtccatcctccagtttggacaatggcaatagcttggatgttttaaagaaagatgaattacttactgagccaaa

SEQ ID NO: 315304 - DNA, 100 bp, Homo sapiens
tgaagatagagagaccataattatgaatcaaattctgccttatataaaggtgaaatgacaatggatgctctgttggctcgattgaaacttctgaatccag

SEQ ID NO: 315305 - DNA, 97 bp, Homo sapiens
cgccgcatccacagctaccgagagagagtctacaaggagattgaacaggtggttggcccacatcgccctccagcgcttgatgaccgagccaaaatgc

SEQ ID NO: 315306 - DNA, 75 bp, Homo sapiens
agccaaacgaggagaggaattattaaagagtctattgttggggaaatcagacgggaaattgtaagtggacttttg

SEQ ID NO: 315307 - DNA, 100 bp, Homo sapiens
gctgctgccgacgacgaccgcggggggaggcgggcaggggcccatgcccagggtcagatactatgcaggacatagagacactgcatattttaccaaggct

SEQ ID NO: 315308 - DNA, 98 bp, Homo sapiens
ggaggattgtaaatgcaccaatcagcatgctgtgtctagctcaaggtgtcatggagaaactccagctgggcccagagattctgcagcgggaaaatcca

SEQ ID NO: 315309 - DNA, 76 bp, Homo sapiens
cccggcgacatactacctctggccccgagatcagaatgccgcctccaccaggcggtgtgaagatgcctaatgtacc

SEQ ID NO: 315310 - DNA, 75 bp, Homo sapiens
caaaacatgggtctccacctcgaagctggctcagcctttgttcaggaaccggcagcctggcatcctcgctacaac

SEQ ID NO: 315311 - DNA, 113 bp, Homo sapiens
cccggcgccagcccgggccctcggcagggaggatgacggagctgcagtcggcactgctactgcgaagacagctggcagaatgattacggacctgaagccaaagaacaagatgc

SEQ ID NO: 315312 - DNA, 75 bp, Homo sapiens
ctcaaggccatgatcaaaacgggaatctaccgtgagatattattcctgacaatggctgctctgggcaaggaccac

SEQ ID NO: 315313 - DNA, 100 bp, Homo sapiens
cctgggggctgaggatgacaaaaaagccttcatagaggagaaggcagagcccccccaggctatgaatgccctgatgcggttgaaccagctgaagccaggg

SEQ ID NO: 315314 - DNA, 74 bp, Homo sapiens
atttcccgctggagctcactcagaaagcagccagatgggatggaggtggataccacaccaacagttgctggaca

SEQ ID NO: 315315 - DNA, 112 bp, Homo sapiens
cggattttgcggggttcgtcgggcctgtggaagaagcgccgcgcacggacttcggcagagttacatggacacagaacagtatgaagaagcagtacgagactatgaaaaagta

SEQ ID NO: 315316 - DNA, 90 bp, Homo sapiens
gcaatctcctcctccactgccactacagggaagtgcatcacatgtcagttaccttatcccatatcacacaactggtcctcagccataaca

SEQ ID NO: 315317 - DNA, 83 bp, Homo sapiens
gtggtttatcaaaatcacgttataatcagattttgaccaagcattttgtaaggtgctgactgggttacttttttaaacactag

SEQ ID NO: 315318 - DNA, 100 bp, Homo sapiens
ctagcaaagctacctcaggatggagcaggaaggagatgattcactacttataactgtggtacctgtcaaatcatataaaacatctggaaaaatgaaaaag

SEQ ID NO: 315319 - DNA, 100 bp, Homo sapiens
atgaccccgcgtcaccactgtgaggcctacagctctgccggggaggaggaggaggaggaagaggaggagaagctcttatcaaaggtgctggaagtgcttg

SEQ ID NO: 315320 - DNA, 83 bp, Homo sapiens
acaaaacaaatatgaactatgataagctgagcagagccctgcgatactattatgacaaggatggcaagcttaccaaggaggag

SEQ ID NO: 315321 - DNA, 100 bp, Homo sapiens
cgtgagctggaggagtaccgcagggaggtggagaggaagcagaagggctctgaaggggagaacattaatatctgctggagtcctgatgggcagaccattg

SEQ ID NO: 315322 - DNA, 101 bp, Homo sapiens
ccaagagagatgtacgatctcatgaatctgtgctggacatacgaataacgaaggaggcccaacttcattcaataaggagcctgacggatttatcccagacg

SEQ ID NO: 315323 - DNA, 82 bp, Homo sapiens
cctgagtgtcttcatgtcccgcaccaaatctggatccaagtcttccatatgtgagtttggacggtggagaactctttagccg

SEQ ID NO: 315324 - DNA, 82 bp, Homo sapiens
tttaatggaccttataaattttttgagaagcatctttcaagtgtttactcatttgcctgaactgtggctgcaccatctgtct

SEQ ID NO: 315325 - DNA, 82 bp, Homo sapiens
caccgctgccctcagctccgagtccagggcgaggatgccggctccaggagcagcagtggaggtcgggaacgcctcattgtgg

SEQ ID NO: 315326 - DNA, 100 bp, Homo sapiens
ggaaagtggtggaggatgatcttgcggccaaaggggacctcggcgcagtaatgtcaacatatccaaaaggaaagtcctcggccgtagagattcagatgat

SEQ ID NO: 315327 - DNA, 75 bp, Homo sapiens
tagggtatggtccagctgtgccgcaccgaggcgagcaggagcagggaacagttcattggaaatcctgggattcag

SEQ ID NO: 315328 - DNA, 106 bp, Homo sapiens
ccgggaggaaggaacgaggcaaggagctaaagcagcgtgcgttcagccctggggtgaaaggtgtagcagtcactcggcctacacccacagcatcgaccttgtgaac

SEQ ID NO: 315329 - DNA, 100 bp, Homo sapiens
gatgtaccgcatgtgatcactctgggactcgtggggctgcagcaccggatcccaatgaagatacagaatggaatgacattttaagagatttcggcattct

SEQ ID NO: 315330 - DNA, 75 bp, Homo sapiens
gcctcccgagtggctgggactacagatacgggcagctgtatgttctcttcttgaggcatcattctcggacctcca

SEQ ID NO: 315331 - DNA, 74 bp, Homo sapiens
tctgaatctggtgatgaacttagcagcagctccactgaacagataagggcactaagtgaccgcttcagcggtga

SEQ ID NO: 315332 - DNA, 101 bp, Homo sapiens
tcaccgtcaacgtggtggccgtgattgtggccttcacaggcgcctgcatcacgcaggtgaatcaaaaactctggttttaagcaacctctcctacagtgcaa

SEQ ID NO: 315333 - DNA, 51 bp, Homo sapiens
gcccaatccagtagctgttaaacctgagaaagatcagtctaaagaaaagga

SEQ ID NO: 315334 - DNA, 50 bp, Homo sapiens
agactgattaaaaatcttggtggcccagcagcttccacacaagaaaagaa

SEQ ID NO: 315335 - DNA, 82 bp, Homo sapiens
gaagacagagggctctgatctgtgcgacagagcaccatgactcctgtgaggatgcagcactccctggcaggtcagacctatg

SEQ ID NO: 315336 - DNA, 82 bp, Homo sapiens
gtgcgtggccctgggacagctggaccggcctccagacctcgcccatgacggctcctcttttgacttggactatgactttcaa

SEQ ID NO: 315337 - DNA, 137 bp, Homo sapiens
aaaacaaatacagtgacagcacaggtcacagtaaggccaaaaatgtgcatactcacagagttagagagagggatggtgagtcgtccttgtctactccactaccaaatgttgaagttcttcaagaatcagtcctttgg

SEQ ID NO: 315338 - DNA, 95 bp, Homo sapiens
ctcggactcccgacccgccgccggctccggccgcgtttcccgggtaaaggggagcagtttttgcaagaaaggatcaaagtgaacggaaaagctgg

SEQ ID NO: 315339 - DNA, 75 bp, Homo sapiens
agcggatcagagagggctaccttgtgaagaaggttgggagccacgtgtaccagtgtgtgttgatcttggcttgat

SEQ ID NO: 315340 - DNA, 98 bp, Homo sapiens
cttccgtgtcttcctgcaatatgagttcacccacttgggcctggacctgtacttggaggaaatgggtcctgatgaatatgaagagatggaagaagagg

SEQ ID NO: 315341 - DNA, 75 bp, Homo sapiens
tcaatgccatgaacgagaccaacttcttcggggtcacggagctagtgaagatcctgcacaaggcactggaggccg

SEQ ID NO: 315342 - DNA, 83 bp, Homo sapiens
gtgcaacgcggagtggagctcagccaggggcagccggctctggtgctcccagaagagcattttgaaagcgaagcagaagccgt

SEQ ID NO: 315343 - DNA, 82 bp, Homo sapiens
aaaagcaattaagagagctcaaacaatgggggttctgaaggaacattaaatgactgcaagataatatctgtagatgaaatct

SEQ ID NO: 315344 - DNA, 101 bp, Homo sapiens
ctgcgccctggggcttcaggctctcagggggcatagacttcaaccagcctttggtcatcaccagggttatcaatactctggctgaccatcatcatcgtggg

SEQ ID NO: 315345 - DNA, 111 bp, Homo sapiens
cacgactgcctgggacctggccaagggctccacacaccaagaccaaggtacatgtcccagagcaagcacacggaggcccgggagctcatgtactcgggagccctgctcttc

SEQ ID NO: 315346 - DNA, 89 bp, Homo sapiens
gggcaccgtgggccgactgaacatcacggtggtacagcgtgaagcctctgcgggccttcttttcgtcttatttgaagtcattgccggat

SEQ ID NO: 315347 - DNA, 75 bp, Homo sapiens
ggaaggggcagtacaagcttacgtctctgctcttcagtacaatcctgtggacatcttcaataaggagctactgct

SEQ ID NO: 315348 - DNA, 100 bp, Homo sapiens
ccctcctcccagggccaggcgccgctcagaacgtcactcagcctctgaagaagcttcgggttcagactcaggcagtcagtcggaaagtgagcagggaagt

SEQ ID NO: 315349 - DNA, 82 bp, Homo sapiens
cactgccatggcccctgtgctcagtaaggactcggcggacatcgagacctgcctagagctggaacgttacctccagagcgag

SEQ ID NO: 315350 - DNA, 75 bp, Homo sapiens
tatgggatctgatgatgctgcctacacacaagatgatgattattccccaccttctaagagacaaagaccaacgag

SEQ ID NO: 315351 - DNA, 75 bp, Homo sapiens
cttggagtccggacatctgaaacttgataaggagggttcctgcccccaggtgaacattaactttccccagctcgg

SEQ ID NO: 315352 - DNA, 100 bp, Homo sapiens
ggagagtagatctggagaaaccaacagctgtgttgaagaaataatccggggaagagacttccaccttaggatagtgttgcctgaagatttacaactgaag

SEQ ID NO: 315353 - DNA, 100 bp, Homo sapiens
accattacatatggcagcttctgagggccatgccagcatagtagaggttttacttaaggtgctgatgggaagggtgcctgacaggggaggccggccgaat

SEQ ID NO: 315354 - DNA, 122 bp, Homo sapiens
tcctgggctacaagacgctggccgcgggctccatcagcatggctgagtcccgcagcgtggacaagcagcatgccgtcatcaactacgaccaggacagggacgagcactgggtgaaggacctg

SEQ ID NO: 315355 - DNA, 98 bp, Homo sapiens
ccaaaaacccaccaattctggacacattgggattaaaggttggctgctttacctgagaatccaccagctatcgactgggcttactacaaggccaatgt

SEQ ID NO: 315356 - DNA, 51 bp, Homo sapiens
gacaagaatgctaatgcttaagaggagtgattcgggaaagttacctcaaag

SEQ ID NO: 315357 - DNA, 90 bp, Homo sapiens
acgccagggaccctgtgcaggcctgctcctccgtttgcaagccttgaaaagatcttttgaggtcgaggaggtcgagacacccaactccac

SEQ ID NO: 315358 - DNA, 75 bp, Homo sapiens
aacaaagtagaggggatcctggtgctggaaacatgcatgaagagctgcggcaagcggttccacgacgaagtgggc

SEQ ID NO: 315359 - DNA, 80 bp, Homo sapiens
ctgacggagatggtgcagaagatggaggagaccttcacggcatggtgcaactcccacctgcggaaggcaggcacacagat

SEQ ID NO: 315360 - DNA, 90 bp, Homo sapiens
ttgaattacagagaaactttcagctcatgagggacctagaccaaagaacagaggactataatgtaactgcaaactccaagctggtcatta

SEQ ID NO: 315361 - DNA, 96 bp, Homo sapiens
gacagaattccatcaccattaaacacaaccagtgttgcggttgacaatggtaatagaggacacatctcttaactgggttgctctaagaactgatgt

SEQ ID NO: 315362 - DNA, 101 bp, Homo sapiens
tggccgaaaaaaacgacgcggccaaggggatcgccgacctgctgtcaaacggtcgcatgaggcggggggtgagaacatcaaaagcatcaaccagcagtcag

SEQ ID NO: 315363 - DNA, 95 bp, Homo sapiens
cgaagtccccgtctccagttcagggcaagaagagtccgcgactcctgccttgaagacagtaccatgggaagtgttgcagacacagtggcaagggt

SEQ ID NO: 315364 - DNA, 100 bp, Homo sapiens
ggccctggctgcgctgctggcctttgtgagcctcagcctgcagttctgtttgcatcactggttgctgtttatgttgttggggggttcctataccagcgac

SEQ ID NO: 315365 - DNA, 58 bp, Homo sapiens
gtttcagccatcttcgataaaggcaaaaaggatctcaaagatttcatgagacaagctg

SEQ ID NO: 315366 - DNA, 75 bp, Homo sapiens
gcactggactcatggaggctgagcatttattcaggttttattgtgactactgcgatacatacctcacccatgact

SEQ ID NO: 315367 - DNA, 75 bp, Homo sapiens
cggcgcctcaggcacctcggcccgggcccgccatgttcatagaggataaagcagtagacaccctggcttacctca

SEQ ID NO: 315368 - DNA, 101 bp, Homo sapiens
ggacggcaaagccattcctgacctcaccgcgcccgtggccgccgtgcaggcggccgtcagcaacctcgtccggatcgagcctgcgtgctgccgaagcaggg

SEQ ID NO: 315369 - DNA, 100 bp, Homo sapiens
gctgatgtggcaactgctgatgctcatggtccccatggcatgggggcctcagggcagcctgcctggagttacatggacacagaacagtatgaagaagcag

SEQ ID NO: 315370 - DNA, 82 bp, Homo sapiens
gtcaggggcacagagagatggagagagacctagttaggttcttgctcaagtaccaactctatggacccaggacaggtttgtc

SEQ ID NO: 315371 - DNA, 75 bp, Homo sapiens
gaaagaactaggaagatgtgcacaggaggagagggcagtgagagataggaatctcctccaggttcatgaccataa

SEQ ID NO: 315372 - DNA, 87 bp, Homo sapiens
catcctctgagtttgagattgtcaaggccataaaagaaggacaactacggcttcgtcacttatcgctatgctgaggaggcatttgca

SEQ ID NO: 315373 - DNA, 79 bp, Homo sapiens
gattcgcagtggtcgcttcttctccttgaatcaaatggctatagcatgtggatctcgagctcatttagaaaaagaatca

SEQ ID NO: 315374 - DNA, 75 bp, Homo sapiens
caatagcaatgaagccttctaacaaggaagatgagaatgtgcctactgctcctgatcctccaagtcaacatttac

SEQ ID NO: 315375 - DNA, 75 bp, Homo sapiens
cttgttccgaggcggccccagaggctgcctgctgtttcccggggagatcatgaaacgaggtcgccttcccagcag

SEQ ID NO: 315376 - DNA, 83 bp, Homo sapiens
cctcagtacgccacctactattacccccagtatctgcaagccaaggccgaggagtcttgtaaatgtaatggctggaaaaaccc

SEQ ID NO: 315377 - DNA, 98 bp, Homo sapiens
cggaacaccctggaagccgagaaatgtctgcgggccaggcatcgacatccgcaacgactatcagcagctgaagcgcctggagaactgcacggtgatcg

SEQ ID NO: 315378 - DNA, 98 bp, Homo sapiens
gtggaagacattcagcatgacctcacatacaacctccgagaaggtcatgagagtgatattactgaagatttcattgctacatatcaggccaattatgg

SEQ ID NO: 315379 - DNA, 100 bp, Homo sapiens
aaataagagcccggatgctgaagcaaaattcagagagattgcagaaggcttgttgattggtgctggctgtgccctctaccccttgggctgggacagtgag

SEQ ID NO: 315380 - DNA, 101 bp, Homo sapiens
tgggggcctcagggcagcctgcctggaggacacattcagctaacgtattttagcaggtggagtgaggttgaagattcctgtgacagcgatgccatagagag

SEQ ID NO: 315381 - DNA, 75 bp, Homo sapiens
gaagattcgaggcggcgggggacaagtcggcgccccagagcggacgaggtagtaacactctggtacagatctcca

SEQ ID NO: 315382 - DNA, 51 bp, Homo sapiens
agacaaggccttccagtttggaagaggaagaggaagaggaggaattagtgg

SEQ ID NO: 315383 - DNA, 100 bp, Homo sapiens
gagaggccggccaaggaagctcactgccatgtcctcctgcagccggcgctccaagctcaagggaatccctgtgctgatcgtggggcatcatatcctgtat

SEQ ID NO: 315384 - DNA, 83 bp, Homo sapiens
caaaccttgcttctaggagataaaaaggacagaactgtaccgctctctttttggccagctccaccctcccgacgaaggccacg

SEQ ID NO: 315385 - DNA, 50 bp, Homo sapiens
cttcgcagccgcgcaaaaaaaggttggaaatcgtgccaaatgggataaca

SEQ ID NO: 315386 - DNA, 75 bp, Homo sapiens
caacatctgccacaagtgttcccttcgctgcaacagccacagccaaccagatggagtctcgctctgtctcccagg

SEQ ID NO: 315387 - DNA, 100 bp, Homo sapiens
agatacttctcaagaaatctgttctcccagactccccatttcagcatcccactcgtcgaaaactcgttcactagtgttccattggcaagctacaataatg

SEQ ID NO: 315388 - DNA, 109 bp, Homo sapiens
tctggaggagcagttgtctgatgaagagaagatgcgatctgtgagccgagtctttaagttcattgacatgccaacagaaggtaaacctaccaagtcaaccaaaccatac

SEQ ID NO: 315389 - DNA, 85 bp, Homo sapiens
atgaatagactctcccatcccaacatccttagggagcctgcacacatgatcctgaccgtcggaaacaaggcagatggagtcctgg

SEQ ID NO: 315390 - DNA, 102 bp, Homo sapiens
tgggctggtgaagtacatgaactcagggccggttgtggccatgatcagtgtgcgtgtgaccaccatggatgcagagctggagtttgccatccagcccaacac

SEQ ID NO: 315391 - DNA, 101 bp, Homo sapiens
gaggagcctcctggcctgcagcttctgtgtgctcctgagaggtgtgtgcagtggcctcagggatccggaaagtctaggactgaacttctcctaacatccag

SEQ ID NO: 315392 - DNA, 75 bp, Homo sapiens
gcaggacaccgacatggaacagggactcactggggtttaatggatcgagaagtggcgttgcttgctgaaatggac

SEQ ID NO: 315393 - DNA, 98 bp, Homo sapiens
gtgaatcccctgtttgagaaaaggcctaagaattttggcattgatctgagtgggacatacttttgaaggatgtgcaatgttcaatcataagtgtgaca

SEQ ID NO: 315394 - DNA, 98 bp, Homo sapiens
aagcgaaattggtcattctcgctaacaactgcccagctttgagggctgggtataagtaagcaagaagagggcctgggagaagagtctgacgagcaagg

SEQ ID NO: 315395 - DNA, 90 bp, Homo sapiens
aaagtatctcatatgaccagtgctcttcagccgtctatgaaagggggaggcacactccctccatcattttcagaagacctgaggaggctg

SEQ ID NO: 315396 - DNA, 98 bp, Homo sapiens
tctcagtccacccaaggtctcctcggatcgcctggagaggcactcggacctgtccgatacatacttctgcatgtctatgcgaataccagtggatgagg

SEQ ID NO: 315397 - DNA, 83 bp, Homo sapiens
cgcgcactggtcggtgccggctcaggagccggggcaatactgaacactgcgcagcttgcagaggtctcctggcagccctcatt

SEQ ID NO: 315398 - DNA, 101 bp, Homo sapiens
gggcgccaccgctgccacctccgcgagcaaagaagttgccattctctgcagttttctgttgggccttggagacagctgctttaatacccagctgcttagta

SEQ ID NO: 315399 - DNA, 50 bp, Homo sapiens
cgagccgccgacccgccgagcaaaatgcagtagaagactcagaaagtggt

SEQ ID NO: 315400 - DNA, 90 bp, Homo sapiens
atggcggacggcgtggaccacatagacatttacgcggatgtcggcgaagagttcaaccaggcttcctgttggataaaaaaattggagtaa

SEQ ID NO: 315401 - DNA, 83 bp, Homo sapiens
caagttttggtggcacgcagcctggggactctgcctcgtgccgctgagcctggcgcagatcgagtctcccccccctccttact

SEQ ID NO: 315402 - DNA, 117 bp, Homo sapiens
gagaatacagctgtgaggcacggaatgggtatgggacacccatgacttcaaatgctgtgcgcatggaagctgtctaacaaagtgccagtggtgcagcaccctcaccatgtccacccc

SEQ ID NO: 315403 - DNA, 83 bp, Homo sapiens
aagaagtgcttcagcgggccaggaagcgcatccaggagttgttcttcctaacataaaatcagaagatacaccatgccttctgt

SEQ ID NO: 315404 - DNA, 75 bp, Homo sapiens
gacccgcttcaagaagcctgctgagttcaccacaggatgagattgtggactttctgactggagtgctcactcgtg

SEQ ID NO: 315405 - DNA, 89 bp, Homo sapiens
ggccgccaccgagcgtgctgagcaaccgcagcctccgcggccgagagtgcagcgaggcagcaggatgggtgtggaagcagtgatggcac

SEQ ID NO: 315406 - DNA, 73 bp, Homo sapiens
gaggtgctgggacagccatggtttcagacgcctgaaaactggttttttaaaatggaagccagattatgacagt

SEQ ID NO: 315407 - DNA, 75 bp, Homo sapiens
ccacctgaacttgttgagcagtttggacgaaacatgacagctgccctacaggcagctctgaagaacccccctatc

SEQ ID NO: 315408 - DNA, 50 bp, Homo sapiens
cgctctattgctatgcagtacttgagacggggtttcaccacgttggccag

SEQ ID NO: 315409 - DNA, 100 bp, Homo sapiens
ttggaaatgatacaattacctgcacgacacatggaaattggactaaattaccagaatgcaggggatggaagagtgtagaaagtgtcccaaagttggtgtc

SEQ ID NO: 315410 - DNA, 100 bp, Homo sapiens
tactgttgcgttttgcagacaacactttctcagtacatccagcagtggtcattcgacaacgaaagtcataccgtagaaaagatggcgtgtttctttattt

SEQ ID NO: 315411 - DNA, 100 bp, Homo sapiens
cggatactcatcatttgcagcaaactcagcactatccctgcatgtcactgagtccaccatgctttacagaagaagacagatttagtctggaagctcttca

SEQ ID NO: 315412 - DNA, 100 bp, Homo sapiens
gttaaggattccaagtaactcttatttgggaggaaatccttcaacaatctttgtgggaaagagtatcaactcatgtgattgaaaacatctaccttccagc

SEQ ID NO: 315413 - DNA, 75 bp, Homo sapiens
gcggcgcttctgtcctcctactcggacccgcagagtattgggaaagggtcgttgtggtgcatagacccagagtat

SEQ ID NO: 315414 - DNA, 100 bp, Homo sapiens
aaagacagaggcagaaaggaagatggcttactgcctgacaaattgttatcagagagagggtctctctctgttgaccaggctggtcttgaactgctggact

SEQ ID NO: 315415 - DNA, 75 bp, Homo sapiens
atagccccttcgcccctgcaacaggcacttctccccaccttcgcctcaacagcatcaagaagctgtccaccatcg

SEQ ID NO: 315416 - DNA, 83 bp, Homo sapiens
ccgagcagcgccagcggccgagcgggcggcttcctggcctgggcgctccggtggcggcggagagacactatggacagcgtgaa

SEQ ID NO: 315417 - DNA, 74 bp, Homo sapiens
ctggcatgacgtgcaggtctctagcgcgaacggcagagtcgaaacaaacaatgagggcgaaccagtttcttaca

SEQ ID NO: 315418 - DNA, 75 bp, Homo sapiens
cagcagccctttcctgagcaagcggtctctgagtcggagtccactccccagggtgaagagggaacagaaatcttt

SEQ ID NO: 315419 - DNA, 90 bp, Homo sapiens
aggaccagcgggtactgacccccaacctggtggccgccctgccccccagcacccatggggcagacaacccctcccaacctgagaccagcc

SEQ ID NO: 315420 - DNA, 82 bp, Homo sapiens
gaaaagtcgcagcgagctggagccgccggagatgatcatgacgcagtcctgaggtttaatggggcacccacagccaacttcc

SEQ ID NO: 315421 - DNA, 100 bp, Homo sapiens
gcaaggccctggccgagtggctggtcctggaggccaacgggaggaagatcctgaaggacacgcaggtgactcgacaggccttaaatgagatctcggcccg

SEQ ID NO: 315422 - DNA, 74 bp, Homo sapiens
gttgtggcaatagaaacgaaacgccctcagaccctgtaatcattgacagccctgactataatgtggaatttttc

SEQ ID NO: 315423 - DNA, 89 bp, Homo sapiens
catgcacttaatgaagttgatcctggtgactggcagaaattcgtgaagaagggactcaaactctgtttgctggctacacggacaacctg

SEQ ID NO: 315424 - DNA, 100 bp, Homo sapiens
cccaagaaaaagaagcaaacagcctggcttcatctggtcctcataatcttacttatcctctaggtcccaggaatgaagatgagtgatgtgtctgcaggag

SEQ ID NO: 315425 - DNA, 100 bp, Homo sapiens
ctgaaggacgcgcaggagaagctggagctcacggagaagaaggcctccgacagaggtggagaagagcgagtacttgagaaagaagaggaagaagatgatg

SEQ ID NO: 315426 - DNA, 88 bp, Homo sapiens
ttgatttgattcttctgtttcgtgaactgcgagtggaacaggaatctctgttgacaggagctgctgctcttcctccagaacctgccca

SEQ ID NO: 315427 - DNA, 90 bp, Homo sapiens
gctttggagcctgagctcgaggcccggctggcgcacctgggcgtgcagaggatttttctccaacaattatagaagatcaggctcgtgaac

SEQ ID NO: 315428 - DNA, 75 bp, Homo sapiens
agaagagaagcagtgaaggagtgcagaggcatcacctgaaaggagaagtacagcatcggggagcccacagtgcca

SEQ ID NO: 315429 - DNA, 100 bp, Homo sapiens
tccgccgctgccgagcgcgtccaggtgaaggagtacctcctggcaactatgggaactatggctatgctaatagtgggtatagtgcctgtgaagaagaaaa

SEQ ID NO: 315430 - DNA, 90 bp, Homo sapiens
ttcttaacccagaagtagctgaatgtgttactccattgctgaggagtggaaaagagcactggttgccattggtacccatgatttggacac

SEQ ID NO: 315431 - DNA, 73 bp, Homo sapiens
gggtgaagtgctccgccgcccttgcctccagcaaagtgtgggatgctgtctcaggagatgaattgatgaccct

SEQ ID NO: 315432 - DNA, 100 bp, Homo sapiens
cagttcctgccctttctcaccacggaagtcaagagaagatggggagccccgaggatgacctgattgggattccattcccggaccacagcagtgagctcct

SEQ ID NO: 315433 - DNA, 74 bp, Homo sapiens
tctatggctggacgcccgtgcactgggccgcgcatttcggcaagctggagagatttaccagcatgagaattaag

SEQ ID NO: 315434 - DNA, 76 bp, Homo sapiens
atgaaaactgcactttattgcaaacatatctgaagagatggattaagaatgctttggattaaggattgtggagcac

SEQ ID NO: 315435 - DNA, 82 bp, Homo sapiens
caggcgccaggacagtcaggaggccaggcctgggccgaggccactggtgcatatgttcccgggagggataagccagacctgc

SEQ ID NO: 315436 - DNA, 82 bp, Homo sapiens
ggaagacgccctggtgctcaccaagcaaggtactccaaagattcaggtttactcacgtcatccagcagagaatggaaagtca

SEQ ID NO: 315437 - DNA, 98 bp, Homo sapiens
cgactccatggccctcggcaacccagtgtttctgaaagatctatccagcactccgatggccagcaacaacaccgccagcatagcacaagccaggaagc

SEQ ID NO: 315438 - DNA, 75 bp, Homo sapiens
ctaagactctgggacactcctgaagtcgggaaatgaattctgcttggtcagaatcgtgatggcattgtgttcagc

SEQ ID NO: 315439 - DNA, 100 bp, Homo sapiens
ttgggtgtgctatgcatcctatgttgtcttcagaatcatctacatgttactcatcacgatagcaactgattccaaatctaagaagtcagtagcttataat

SEQ ID NO: 315440 - DNA, 100 bp, Homo sapiens
cagagccctattacccggaatctggatgggaccgcctccgggagctgtttggcaaagagttatcagtgagctgaatggaaaaaacattgaagacgtcatt

SEQ ID NO: 315441 - DNA, 100 bp, Homo sapiens
cttggaggagcatatcagaaacataactgccatagtgaagcaacttaatcgggatatcgagggaagcaaaggtgtctaccagtaccactggcaaagccac

SEQ ID NO: 315442 - DNA, 100 bp, Homo sapiens
ctcaagctttcaaccacattgccaagttatgcagccttaaacgacttgttctctatcgaacaaaagtagaggtcgttgaggacttccacatggagattgg

SEQ ID NO: 315443 - DNA, 100 bp, Homo sapiens
caatagggatattgtagaaactgtctttaacctggtcttgttgcagtaggagaaagagcacaaaagaggtctgggaacttctctgctgcaatgaaagatc

SEQ ID NO: 315444 - DNA, 143 bp, Homo sapiens
cgctgcccgcggctgcagtcggggcggcagctgaggcggaggctgacgaggaggcggatcccccggcgtcagacaatgcagatcttcgtgaagactctgactggtaagaccatcaccctcgaggttgagcccagtgacaccat

SEQ ID NO: 315445 - DNA, 98 bp, Homo sapiens
ggccgctcccctagccaggaagagccgccgtccgcaccgggaccggagaggaagcggagcgtttagtgggctacagatggcatggcatctaaaacctt

SEQ ID NO: 315446 - DNA, 75 bp, Homo sapiens
cagcatggaaccaaagcggatcagagagggctaccttgtgaagaaggcgtggaagacattttggtgaagccaaag

SEQ ID NO: 315447 - DNA, 76 bp, Homo sapiens
cgccgctcccagccacagcctcccgcgcctcgctcagctccaacatggtgtgaaagcctggtggacatttattccc

SEQ ID NO: 315448 - DNA, 82 bp, Homo sapiens
gaatccccccgaaaggaccccccagcctggtccgacccccagtggcactaacgtgggatcctcagggcgctctcccagcaaa

SEQ ID NO: 315449 - DNA, 100 bp, Homo sapiens
tgggggtgaagctggagatatttcggtattggtaaaggttttcaaggtgtcatgaaaagatggggatttaaaggccagcctgctacgcatggtcaaacga

SEQ ID NO: 315450 - DNA, 97 bp, Homo sapiens
caaaatgcaactggacaaccccagcaaggttcagcaggctaaagaattacctccaaagccattgtcaagaccacagcagtcatctgcaccagtccag

SEQ ID NO: 315451 - DNA, 75 bp, Homo sapiens
aagaattttccaaatgaatttgcaaaacttactgtagatatgagggaaggcaccattggagatatggctatcctg

SEQ ID NO: 315452 - DNA, 115 bp, Homo sapiens
tttatcactgccttcttgggaattgcttcgtttgccattttcttatggagaactgtccttgttgactactgttcgaagatttttggaagaatactgagaacggcataaagtgaag

SEQ ID NO: 315453 - DNA, 136 bp, Homo sapiens
ccgaagtcagttccttgtggagccggagctgggcgcggattcgccgaggcaccgaggcactcagaggagtcctgacacagctctccctgaggagcagccacattccagctcccagtgcgcccctctccactgtctc

SEQ ID NO: 315454 - DNA, 98 bp, Homo sapiens
cgtcagtccctaggtatccgcactgctcagggacttaattcagtgcacaaatgagatgaatgtgaacatcccacagttggcagacagtttatttgaaa

SEQ ID NO: 315455 - DNA, 74 bp, Homo sapiens
ggcagtggtgctttcccgaatctcagaatgccatttctcactatgtgcaatagacactttggcagtgttgtggc

SEQ ID NO: 315456 - DNA, 100 bp, Homo sapiens
aaaattattatgtctgtgttcccttgggactcattggaaattgtacagtgacatcttctgggatttagtctggtatctagaagagcagaagacagagaat

SEQ ID NO: 315457 - DNA, 118 bp, Homo sapiens
atacacagcccagaatatggagcttcagaacaaagtacagcttctggaggaacagaattttgaggccctggcctgggccagtgcccaaatccactgccagttccatgccagtgagagt

SEQ ID NO: 315458 - DNA, 100 bp, Homo sapiens
ttcaaagatgaagatgaaaccaagcccttggaaggatcgagatcgagaccgggatcgtgaagatcggtctaaagatcgagaccgagaacgtgatagagga

SEQ ID NO: 315459 - DNA, 75 bp, Homo sapiens
gaaaaattatgcaggtggtggatgaaaaattggccaaatttgagtttcatcatggtgactatgaaaaacagtttc

SEQ ID NO: 315460 - DNA, 90 bp, Homo sapiens
gcgcggtggcaggagctgacagagtgatgggaaacgcgtgagccaggccgagagtgatgtcttggcattgcccattttcaagcaggaaga

SEQ ID NO: 315461 - DNA, 51 bp, Homo sapiens
ctgtatttgggctgcagcacaggttgggggccgtcccgctcctaaggcagg

SEQ ID NO: 315462 - DNA, 100 bp, Homo sapiens
aggagaccgaaaagtggatggaggaggcgatgcacatggtgactgcttagaaaactgcacagcatctgatgaaattagcgaataagaacatcaaccatgt

SEQ ID NO: 315463 - DNA, 100 bp, Homo sapiens
gaacgtctacaaagccgtaggccactacaacgtggctatcccctctgacgtctcccacttccgcttccatgctgtcattatttgtatcaaaaacaaagaa

SEQ ID NO: 315464 - DNA, 83 bp, Homo sapiens
gtcacgggcctagaactccaaggagaaaggcggcgcctggagcattggtaagcgtcacactgccaaagtgagagctgctggag

SEQ ID NO: 315465 - DNA, 82 bp, Homo sapiens
ttacagaggagcccatggcatcatagttgtgtatgatgtgacagatcagattcgacctcacattactactttgcgcaaatac

SEQ ID NO: 315466 - DNA, 100 bp, Homo sapiens
agctttgtgatgctatgaagatcctggatgggaagaagttgtacaaggattacttgctgaaaatcaacttcacggatgataagagcacttttgaagaaac

SEQ ID NO: 315467 - DNA, 75 bp, Homo sapiens
cagcagcgccgtcccgtccgacagccaggcccgggagaactggagagatttaccagcatgagaattaagaaggag

SEQ ID NO: 315468 - DNA, 50 bp, Homo sapiens
aacgaatcgaaggacttggtgggagaatggagatgtatgcatttcgattc

SEQ ID NO: 315469 - DNA, 131 bp, Homo sapiens
gaaggattgctttctcattatttgccagatctgcagagatcaaaacaagccctccaggaactcacattctggctgtgactcagtcactgacactgagcctgaggacgagaaggttgtttcctactcgaagc

SEQ ID NO: 315470 - DNA, 98 bp, Homo sapiens
aggactcaggagcaaatcagtaattgtaatgaacaagtctggggtgaatcgtgtagtttggaaacgacctcgactcactcacaatggacctgttagaa

SEQ ID NO: 315471 - DNA, 100 bp, Homo sapiens
cgccgagggcttggaatctcgagcgggaaaagatgcggaaaacgccatgcggtacataaatgggacgcgtctggatgaccgaatcattcgcacagactgg

SEQ ID NO: 315472 - DNA, 97 bp, Homo sapiens
tgagtggagtgattgtgaagatcattagcacagagcctctacctggcaggaaacaagtccggaccatattttacatccttccacgcctttcaggcct

SEQ ID NO: 315473 - DNA, 75 bp, Homo sapiens
caagaagaggctgagctgcggtgcttgtaaggtcgtcatgttggcaatgtacaacttgtctctggaaggaagtgg

SEQ ID NO: 315474 - DNA, 74 bp, Homo sapiens
tacgacacggacagaaatgggatcctggacagctcaaacctagaagtcggaatccggaagaagatcgaacatga

SEQ ID NO: 315475 - DNA, 50 bp, Homo sapiens
aggtgctggaggacttcccaacgatgtctcagagcatgtcttcagtatct

SEQ ID NO: 315476 - DNA, 83 bp, Homo sapiens
gccagagcgtcggggaggcaagatgatccaccagcggttccatcctacacttggacaatgcagatcttcgtgaagactctgac

SEQ ID NO: 315477 - DNA, 50 bp, Homo sapiens
ctcagacatctgcaaatcatgacattcaatccacgtcaaggaagagccag

SEQ ID NO: 315478 - DNA, 96 bp, Homo sapiens
cagacaagactggtacacttacaacaaaccagatgtcagtctgcagggccctgttaaacctggcagagcgactgggagaggcaaagcctcgtggac

SEQ ID NO: 315479 - DNA, 75 bp, Homo sapiens
cttaaggtcttcagcggggcgctccaggaggcactcacagcccgcggcgccatggctcacgtcggctcccgcaag

SEQ ID NO: 315480 - DNA, 76 bp, Homo sapiens
cgacaacagcctggcgtccgccacggaaagaccacagcaagattctttcattcgtctcctcctagcctgggggacc

SEQ ID NO: 315481 - DNA, 100 bp, Homo sapiens
caaaggcagaaacaggaaagtgccctgcactgtattggctctcagataagctgtcattggaaggaatagtggtacaaagagctgaatgccgaccagctgc

SEQ ID NO: 315482 - DNA, 80 bp, Homo sapiens
cctcagcctcccaaagtattgagattacagatgtgaagttcatttccaatccgccctccatggtggcagcggggagcgtg

SEQ ID NO: 315483 - DNA, 102 bp, Homo sapiens
gacgcgactcgagggtgacgctcgctccgctcgtcccgctcgtcatggcctacccgggatacggaggagggcggtcttgcgagtggctggttccctgcagaa

SEQ ID NO: 315484 - DNA, 100 bp, Homo sapiens
tctgaagatggatccctctggcactgggatgcttccacagatgtacctgaaaagtcgtcactctttcaccaagagcctgatttgaaaaagcggatccgtg

SEQ ID NO: 315485 - DNA, 89 bp, Homo sapiens
gctttttgatactgattcgcgtacacctgttgtttgaaagctctcagcgggacaatgctgacccaggttcttggtgagattcaggaaat

SEQ ID NO: 315486 - DNA, 100 bp, Homo sapiens
cccaagaccaggaactcctgctgcaaaaatggaacaagttccagcacaagtggtggttgatttgctgagatatttttcctgggccgagccccagttgaag

SEQ ID NO: 315487 - DNA, 74 bp, Homo sapiens
tacgcggtgctgcgagggcagaacctggggtgaaaggttgagccatgcagtaggctgtgcttttgcagcctgtt

SEQ ID NO: 315488 - DNA, 75 bp, Homo sapiens
ctttggcagaagcctggaactctacagggagctggacctcaacagtatttttgacaggtagtgatcgcattccta

SEQ ID NO: 315489 - DNA, 75 bp, Homo sapiens
tcagtggtggagaatggactggacccccaggctgccatcccgggagtgcatccgccccaacccttttccccctcg

SEQ ID NO: 315490 - DNA, 74 bp, Homo sapiens
acagcccccttctcagttttcctggccagcgttaatgactgccattgatggaagacatgatgtttgtatccgtg

SEQ ID NO: 315491 - DNA, 100 bp, Homo sapiens
gctaagggtagctaccatagcctttattattcaattgaaaagcctttgaaattctttcaaactggagccttattggagtgtatgtggtagaagaccaaag

SEQ ID NO: 315492 - DNA, 98 bp, Homo sapiens
gcggtgggaccagcggctgaggccaggatgccgtccaggcggcgcggcggctcctcactcatcccaggagcctgaacgaactgcgggtgttgctgctg

SEQ ID NO: 315493 - DNA, 100 bp, Homo sapiens
tgaaatcctccccacttatgtttgtaaatgtgagtggaagccatgaggccaaaggcagttgtattgctccaaatgagaagatgaagcaagtgttaaagaa

SEQ ID NO: 315494 - DNA, 82 bp, Homo sapiens
ctgggagcataaaggtgacctgaaggaccaagaatcgccttcagccctgtctggtgcatccttggcagaaagtgaggaggaa

SEQ ID NO: 315495 - DNA, 75 bp, Homo sapiens
ggcaccaacggcaccaactattcgcggagctggaatgactggcaacccaggtgtgactgaagaaatatcaaatgt

SEQ ID NO: 315496 - DNA, 75 bp, Homo sapiens
gatgacaaactctggagtaattggagccaagaaatgagtataggtaatctgctgtcttccagtgtctctgcatta

SEQ ID NO: 315497 - DNA, 50 bp, Homo sapiens
ctgactttacttgagacacgacgaccaacacaagagtgagaatggtgagg

SEQ ID NO: 315498 - DNA, 74 bp, Homo sapiens
tacaagtgcaactgcctgctgccctacacagaggcatttcatccttcatgaagccattcaggattttgaattgc

SEQ ID NO: 315499 - DNA, 75 bp, Homo sapiens
ttccgccctaatggaggtctccagtttcggttttgggatttgagattgacgcggtgaactctgtccagttttcaa

SEQ ID NO: 315500 - DNA, 82 bp, Homo sapiens
gaaaagcttctgaaggttggagatagcctttgtcaaatgaaagcctgggttctgaggaaaacgcaatggtggccatggactt

SEQ ID NO: 315501 - DNA, 95 bp, Homo sapiens
gcccttgtccacgggctctccttgcatcaggtaggggctttgcagagaccatcgacgggctgacttgaatgaaggttattctttcagcagtgtcc

SEQ ID NO: 315502 - DNA, 90 bp, Homo sapiens
ggctctggctgtggcaaatgtgactgccatggagtgaagggacaaaagtttaaggaagaaatctctaaacgttttaaatcacatactgac

SEQ ID NO: 315503 - DNA, 75 bp, Homo sapiens
tatggcaacatcaggtgactgtcccagaagtgaatcgcagctccagtgatccacaagctcagaaatacatcgcgg

SEQ ID NO: 315504 - DNA, 50 bp, Homo sapiens
cagcgctcagcccacctgtgattatgcctcctgcccgaaggccacctgaa

SEQ ID NO: 315505 - DNA, 100 bp, Homo sapiens
gtgccgcgctcctggccccgcgcgggcggacggcggaggcgcctcccaggtggatgggcaggtggtagcactgctggtacagaatctggagcgcctggat

SEQ ID NO: 315506 - DNA, 102 bp, Homo sapiens
cttattatcggaccccgaggatcaggaaaaactatgatctatgaagactccatcgtcttgcagtcggtcttcaccagcgtgcggcagaaaatcgagaaggag

SEQ ID NO: 315507 - DNA, 101 bp, Homo sapiens
cgctcttccccacctgcccggtgcccgaggaggcagccaagctcgtagcctgccactccgtgcgtaagaatgattgatgttggctgatattggagtgctca

SEQ ID NO: 315508 - DNA, 100 bp, Homo sapiens
cacggtgcgggccccggtgggagtcggcagcagtgaggatgccagagttcatgggtttctagaagacaagttttcaactgcagatacaaacatcaggacg

SEQ ID NO: 315509 - DNA, 100 bp, Homo sapiens
ctcagcctctgcccaaagaaagaaggagtctagtatagagatggattaacagtaggaagagtttaatattacaagaacaaaggaagcaaaacagcaattt

SEQ ID NO: 315510 - DNA, 101 bp, Homo sapiens
ctcagattcattcttaaggaactgagaacttaatcttccaaaatgtcaagttaacctcaccctacagatgaagataatagagcaagaaaaagaaattgcag

SEQ ID NO: 315511 - DNA, 100 bp, Homo sapiens
cgagaacttaaacagctttacttagaacgagttttgaagggtgatgtggaaaaactttctattcaagatggaaaaggtgatgtaaccattacaaatgatg

SEQ ID NO: 315512 - DNA, 100 bp, Homo sapiens
cagaactgttccttcagccaaagaaacaagccgtggaataggtgtatcaagtaatggtgcaaagcctgaagcaacactagctgcagttatgacagagaag

SEQ ID NO: 315513 - DNA, 73 bp, Homo sapiens
gaacactctctccccagaaatccaacttctcaaggttatcaatactctggctgaccatcatcatcgtgggact

SEQ ID NO: 315514 - DNA, 83 bp, Homo sapiens
acctgggattcaaatgaaagtgaaaatgttagaagaactcgtgagccggattgatggtgttgacttcaaaatcaaaactgtag

SEQ ID NO: 315515 - DNA, 100 bp, Homo sapiens
agggattctggcatcagggaggctttcagccggagaagcgagtttcagctggtgctaagagatgccgtttgcaggcctcatctctgcttgagaatcgggg

SEQ ID NO: 315516 - DNA, 97 bp, Homo sapiens
aaagattacagagaaaaaaccaacaccttcctgtgcagtcctgttggaattttcctctttgatacgcaacctacggctctctgagtccttgaaaaag

SEQ ID NO: 315517 - DNA, 75 bp, Homo sapiens
cggcaaactccctggtctctgttggtgtagaagccaaaatcagatgggacaccaggtccaataccacctccaagc

SEQ ID NO: 315518 - DNA, 100 bp, Homo sapiens
accggcccaccctacatttagcgcatcatgtgatccgggcaaagccaaagctaattgagccactcgactatgaaaatgtcatcgtccagaagaagactca

SEQ ID NO: 315519 - DNA, 80 bp, Homo sapiens
ccgccatgcaaggctggcgcgtctccatggagattagtgggatggtttggccatgaactcagcaccagatttaagatgga

SEQ ID NO: 315520 - DNA, 101 bp, Homo sapiens
tctccatcccttccgaggcccgacttcggagtcagagtattcatcgaaaagaaagcacagctaacacttttaggaacagaaatggactatgttgaagacaa

SEQ ID NO: 315521 - DNA, 82 bp, Homo sapiens
ctcaccgagacggcgatccgggcgctcgagacttaccagagccacaagcggagctggagtttgttcagatcatcatcatcgt

SEQ ID NO: 315522 - DNA, 101 bp, Homo sapiens
accgatatctgctcctctgccaggcccagctgctggtctatgagaatgaggcatagaatgtcaagctaaccaggcgtccgctacttcagaagagtgtactg

SEQ ID NO: 315523 - DNA, 100 bp, Homo sapiens
ccccccttccccacgcaaccccagatccatttacactttacagtgatgtgtccaatctagatcccaacttctcatttgaaggcaccaaactggatgtggg

SEQ ID NO: 315524 - DNA, 82 bp, Homo sapiens
ccctcaaggatgcccggtccccatcaccggcacacattgtcgctactgcagcactggggtgtcagttgttggtccgacccag

SEQ ID NO: 315525 - DNA, 75 bp, Homo sapiens
gtaagttgatccatccagatgaggatatatccctgatacaaaagttttgcagtactatttcaatctaggattgca

SEQ ID NO: 315526 - DNA, 100 bp, Homo sapiens
cttacgtctgcggaagtgcagctgcctcagttcttagcgcagactatgcaatttgaagatgatgatcatggcccaccagctcctcctaacccatttagtc

SEQ ID NO: 315527 - DNA, 76 bp, Homo sapiens
ctcagacctggcccgggacatgctcatgcacagagcatcctggccagaacaagccaaggagccaagacgagaggga

SEQ ID NO: 315528 - DNA, 50 bp, Homo sapiens
aggtgtccgccatggctgatgaaatgcttcggttacccacagtctttcgc

SEQ ID NO: 315529 - DNA, 100 bp, Homo sapiens
agacaattgttcagttgcaaaaagaaactggagccaccatcaagctgtctaagtccaaagatttttacccagttccctgaatgtggtttctacggaatgt

SEQ ID NO: 315530 - DNA, 100 bp, Homo sapiens
ccctggcattttaggtgtcggttgggtagaacaccttccaccatgaccacctcagcaagttcccacttaaataaaggcatcaagcaggtgtacatgtccc

SEQ ID NO: 315531 - DNA, 90 bp, Homo sapiens
cagcttcctggagcagctgcgtaaaacatacaggccggagcttatcaaaggttcacctttccttgccagtgaagatggcgtgcttggcgg

SEQ ID NO: 315532 - DNA, 74 bp, Homo sapiens
cggcgggtcatggagccgctcactgccagccgtctgcagatgcgacctaaagtcatgtggcacctccttcgaag

SEQ ID NO: 315533 - DNA, 89 bp, Homo sapiens
ggacaggccacgctgtccgtccgcagtaccgacgcctgcagggtgaatttggaagtgaaaagaaaactgctttgcatgaaaaagaggag

SEQ ID NO: 315534 - DNA, 90 bp, Homo sapiens
caaagctcaagatggcggacaaaacgccaggcggatctcagaaggccagttcaaaggtggtcctgccatcatggctgtcctctgcaaagg

SEQ ID NO: 315535 - DNA, 83 bp, Homo sapiens
cccagacgcggcacagagagggcctgggagcttgctgcagcttcagaattcagaaggagctggcggacatcactttagaccct

SEQ ID NO: 315536 - DNA, 90 bp, Homo sapiens
ccgtgatgaagttcgcttaccgggtgctggagaatctggtaaaagcaccattgtgaagcagatgaggatcctgcatgttaatgggtttaa

SEQ ID NO: 315537 - DNA, 99 bp, Homo sapiens
agcaggtttaaaattttacataagaagttacctttttcagagctgtaggtaaaacttgcctactgatcagttacacaaccaatgcatttcctggagaat

SEQ ID NO: 315538 - DNA, 75 bp, Homo sapiens
ctcatacggctgcttctggagaagacatttctcttgggaagttgtgcatctgacaggaatatagtactgtacgat

SEQ ID NO: 315539 - DNA, 100 bp, Homo sapiens
gtttcagctttaatgcagccttcccaaaaacggagtgtggccatctggggccgtgtggtatttgccactcaggagacatgtccctatgacatagcagtgg

SEQ ID NO: 315540 - DNA, 117 bp, Homo sapiens
gtggaccaggctatcatatcatgttgcctttcattactacgttcagatctgtgcagatgacaagagcacctcaaaggcagcagcctcaaggagcagccatggccccagacttgtcgc

SEQ ID NO: 315541 - DNA, 74 bp, Homo sapiens
cgtctcttacgtctgcggaagtgcagctgcctcagttcttagcgcagatattggaaggctccctctgaagcgac

SEQ ID NO: 315542 - DNA, 75 bp, Homo sapiens
ggaatgatgatgtctcatatgtctcaggcttccatgcagcctgccttaccgcagtctctggtcccagcccacccc

SEQ ID NO: 315543 - DNA, 83 bp, Homo sapiens
cggagggtttgcccatgtcattgaagatcagcacaaattccctcattactttggaaagcttaaagcttttcaagccaggccaa

SEQ ID NO: 315544 - DNA, 75 bp, Homo sapiens
gccggcgacttgagtgacgaatatatttttgccatcatggatcagtttggagatatattagaaggtgaagtggac

SEQ ID NO: 315545 - DNA, 100 bp, Homo sapiens
ccagcgtcctcaccgactcctcggccacctcctccgcggacgccggggagaacccagtggaacatgacaaggaattcttccacccacgctaccaccatcg

SEQ ID NO: 315546 - DNA, 82 bp, Homo sapiens
ttgggctgaacttcactgtggtgaacaatgacctgggagaggcgcagcacagttttctgtacttccagaaatgttaccactt

SEQ ID NO: 315547 - DNA, 75 bp, Homo sapiens
gctggctgcaaagaagggactgctgattgggcagaaagtggcccatgctctggcagagggactcggagtaatcgc

SEQ ID NO: 315548 - DNA, 74 bp, Homo sapiens
ctcacaaacggccacggctctgcacactggatcgtcggaaactggagcgaggactcagcccaaaaccatgtttg

SEQ ID NO: 315549 - DNA, 95 bp, Homo sapiens
aaaatggtcagtacaattctcaagggaaggactttcagattatattacagatgaatccattccctcttattctggaagtgatatgccaagaaatg

SEQ ID NO: 315550 - DNA, 81 bp, Homo sapiens
ttctctccctctgcccccccttccccacgcaaccccagatccatttacactttacaatgacccctaaatccaaaaggaaga

SEQ ID NO: 315551 - DNA, 100 bp, Homo sapiens
ggagcatcgcatcgtggggcccgggccgtaccgagctaccaggctgtttgtgatgtctggctggggtataggttattcatttcgatgtgacattgttgac

SEQ ID NO: 315552 - DNA, 83 bp, Homo sapiens
cttgcttggagatcaggacgcaaagtcattgaaattatgagactatcattcaaatggaagcattatagttcttcggaaccatt

SEQ ID NO: 315553 - DNA, 87 bp, Homo sapiens
tgagcgggagaagacgcccctggagcacatctttagagccatcctgatcaagaaaaccgacagcagtcactcaggaaatgttgttta

SEQ ID NO: 315554 - DNA, 98 bp, Homo sapiens
cgaaatcatcttgttcacaaactatccccataccgagtgtgcctacgttccagccgtctacacctgtccctgagcgcctggaagctgtgcagcgctac

SEQ ID NO: 315555 - DNA, 77 bp, Homo sapiens
ctacagtatgccacccccgtgttccaggaggtggcaccaagagagcaagatggagtctcgctctgttgcccaggctg

SEQ ID NO: 315556 - DNA, 90 bp, Homo sapiens
agcagtcggaaggggttggagcgagggtccggagaagcattggcagacccgaggttcatcttccttcctgtacagtattttcaaacttcc

SEQ ID NO: 315557 - DNA, 74 bp, Homo sapiens
aagcactgtgatcttcaaatattacaggctgtgccagccctggaaaaacagttacaattgttgttcgtggttct

SEQ ID NO: 315558 - DNA, 75 bp, Homo sapiens
cagggcagacccctgtgttttccaaagcctgagacagctgtcttgtgagggactgagatgcaggatttcttcacg

SEQ ID NO: 315559 - DNA, 100 bp, Homo sapiens
ttgctggtttctttgctggagcacttgagccacgtgcatgaaccaaacccacttcgttcaagacaggtgtttaagcgactcgggacctggttcgggccgg

SEQ ID NO: 315560 - DNA, 74 bp, Homo sapiens
ccagagccaccagcgcagcgctgccatggagcccagcagcaagtgatagactggagtgatgttagaaaacacaa

SEQ ID NO: 315561 - DNA, 100 bp, Homo sapiens
atattacagctggaaatagggcacagatccaggcataaacttggaggaggcagtggagagagcatcctggtatcacagcttcagcatggactgacgttag

SEQ ID NO: 315562 - DNA, 98 bp, Homo sapiens
atggacaccttgaagcagaggagcagcaggaccaggtgctggcccagcagggggagtacagtgaggccatccccatcctgagggcagccctgaagctg

SEQ ID NO: 315563 - DNA, 88 bp, Homo sapiens
catatatgattttctttaaggatggtttagaaatggaaaaatgtgaagctgaatatggtgggcatgatcagatagatttgtatgacga

SEQ ID NO: 315564 - DNA, 97 bp, Homo sapiens
cgggcggcgtgcctgtgcttccggagcgagcaggaggacgagatactggaggagtctctgtgtgaactggttgcgaaacaattgaagcaacatcaga

SEQ ID NO: 315565 - DNA, 100 bp, Homo sapiens
ctttaacagaaattcaggagttcatcagctttataagcaaacaaggggagtccaggttgtcaatcggtcacagagaaagaagcatcttcattcctgcctt

SEQ ID NO: 315566 - DNA, 90 bp, Homo sapiens
gccatttattaccatgcttcaagagccattccttttggaacaatgtggatcaatcttcctgtcctacaactgacaaaggatcccctaaag

SEQ ID NO: 315567 - DNA, 100 bp, Homo sapiens
ctcaagcaatcctaccatgtcagccttcccagtagctggaactacaggaatttgcaggtgaagacacttctgatttgtttttggaagagagagaaatagc

SEQ ID NO: 315568 - DNA, 87 bp, Homo sapiens
caaaaaatggacttgactatgcactcagagaatggaggtgttgtccaagttggagaattgttaccttgcaagatttgtggaagaaca

SEQ ID NO: 315569 - DNA, 98 bp, Homo sapiens
cacacatcactaaaaattatccctactacaggactgcggacaagggctggcagggctgctcttcacctatcgtggtgaagtttgctgacactcagaag

SEQ ID NO: 315570 - DNA, 90 bp, Homo sapiens
gatatcttcggggacctgaagaagatgaacaagcgccagatgccagaagtgggtggagaactgtaggagagcagacttagaagataaaac

SEQ ID NO: 315571 - DNA, 98 bp, Homo sapiens
gtgaacggacagtcccccccaggctatttttatgattcccacaaatccaccaccaacattcagaaagccagaactttggtccgatgatttcaccgatt

SEQ ID NO: 315572 - DNA, 82 bp, Homo sapiens
ctgaaggtcacaccacagcgcgcggctatgagaggttttcctccgagtacccagaattctgttctaaaaccaaggccctggc

SEQ ID NO: 315573 - DNA, 98 bp, Homo sapiens
ggagctgttcctattcggccatctttgctcctccctgcaactaactccattcttaattggctgctttgactctcccgcgaagacctttccttcactgt

SEQ ID NO: 315574 - DNA, 82 bp, Homo sapiens
cctgtcgtccgttctctcaggctcccgttcagaacatgaaaggctcccggagcagcgctgactcctccaggaaacactgagg

SEQ ID NO: 315575 - DNA, 98 bp, Homo sapiens
cctcactgaaaattggtattgttggattgccaaatgttggagttgctggagaatgtaaccctaatccataaaccagtgtcgttgcaaccccgtgggct

SEQ ID NO: 315576 - DNA, 90 bp, Homo sapiens
gacgaccgacagggtggtgaaaggcttatgcaagcaaagatctggaggagcagttacggtctgtgtccagtgtagatgaactcatgactg

SEQ ID NO: 315577 - DNA, 75 bp, Homo sapiens
tgtgagggatgttgaacactatgttgctgagctgcccctcctggacctgatgaagctgtacgaaggcgccttcct

SEQ ID NO: 315578 - DNA, 99 bp, Homo sapiens
gtccacccaggagctggaggaagcagggacggagctgtgcaggttaacacagaaatctgcctcctgggccatgccgcttctaaggcctgtttcttctca

SEQ ID NO: 315579 - DNA, 98 bp, Homo sapiens
tttcgtggctcactccctttcctctgctgccgctcggtcacgcttgaactgccattggatgtccagaatcccctgtagttgataatgttgggaataag

SEQ ID NO: 315580 - DNA, 90 bp, Homo sapiens
cagacttttcagcctttgacccaaagactgagtgagtcacctgttttcagaataagtcagcaacctgatccaggctttactggggctacg

SEQ ID NO: 315581 - DNA, 90 bp, Homo sapiens
ggcggaggtcgataagctggaactgatggtgaatctggattgggaaagtcgacattaatcaactcattattcctcacagatttgtattct

SEQ ID NO: 315582 - DNA, 83 bp, Homo sapiens
gatgagtctcaagatggacaaccgggatgttgcaggaaatctggcattttttaaagtttgcgccccacaaagaggaaatattc

SEQ ID NO: 315583 - DNA, 74 bp, Homo sapiens
ggatggtggtgtttgccattggagtctgcactggcctgcacttttcaggattagaagaggctgtgtatagaaac

SEQ ID NO: 315584 - DNA, 97 bp, Homo sapiens
cccgcactcaagtcagaggagaaggtatccctgttgatccgccgggagctgacagagagggccaaggacttcagcctcatcctggatgatgtggcca

SEQ ID NO: 315585 - DNA, 75 bp, Homo sapiens
ttcgatattgaagtgtcaaaatccatagatggaaaagatggtggaagcctcttcggcctgctgagcaagaacaat

SEQ ID NO: 315586 - DNA, 100 bp, Homo sapiens
ccgggagcgcggcggagacgatgcctgagatcagagtcacgcccttggatttttacataccgttgctcaaaagagggctgcaagaagaaagagatgctgc

SEQ ID NO: 315587 - DNA, 100 bp, Homo sapiens
agccaggcaactacatcatcaacatcaagtttgccgaccagcacgtgcctggcagcccagcaaatcatcgaactccaggaagctgcacaaatcaacgcag

SEQ ID NO: 315588 - DNA, 82 bp, Homo sapiens
gagcctctctcctctgcaacctgataggatttggctacccagcctacatctcaaaatataacctgttgggaaactgtttctg

SEQ ID NO: 315589 - DNA, 100 bp, Homo sapiens
gttgaatccttgcagcactaaaatttggttggactccatgaaagaattgcacaaaacaaatcgacagcagcatgagaaacatctgcaaagccgagtggac

SEQ ID NO: 315590 - DNA, 101 bp, Homo sapiens
ccggctgcaggccagagagggcctcgggaagagatgcgaggatgacaagtccatcaataaagccatggagaaagaccatgaagaatacaacattggcgtcc

SEQ ID NO: 315591 - DNA, 80 bp, Homo sapiens
ggggccttcagagccgcaatcaagcagacctcctgccccccgaggtctgcagtctcctgaacccagcagccatctacgcc

SEQ ID NO: 315592 - DNA, 83 bp, Homo sapiens
acatcactggctacacatttccagcaggctgcagatacgagtggacaataaaataaaacagggtctgttacctagcttggaag

SEQ ID NO: 315593 - DNA, 113 bp, Homo sapiens
attccaagcataagagccagcaagatacattccctcaagtgtccagaatttccaattacagacgacaaagtagcactgctgagatctgtatctgtggacctgaatgttgatcc

SEQ ID NO: 315594 - DNA, 83 bp, Homo sapiens
ctgaggtcgtctgagccctgcgacagcctggacagcaactcaggaaattcaatcatatctgtgaacagacaaggttcaaaaac

SEQ ID NO: 315595 - DNA, 50 bp, Homo sapiens
ggagatatggcgcaactgcggcgctgatgtcttggcattgcccattttca

SEQ ID NO: 315596 - DNA, 100 bp, Homo sapiens
tttaagcctgatctaacccctagaaacaggaagtagaccagttgcgtttggagagattacaaattgatgagcagttgcgacagattggagctagttctag

SEQ ID NO: 315597 - DNA, 105 bp, Homo sapiens
gggttatcgcacttaagcctcggaacaactttaccaggtgtgatgaatgcagactctgctaccattttggctgtttggatcctcctttgaaaaagtctcctaaac

SEQ ID NO: 315598 - DNA, 96 bp, Homo sapiens
ggggattctcgacctgctaacagaactggaccttttcggtagttgatgtcacttggcgatattcctgcaaacatgaagaggtgattgccagaagaa

SEQ ID NO: 315599 - DNA, 100 bp, Homo sapiens
tcccagagatggaccagatcttcactgaggtggagatgacaacgttagagaaagtcatcaatgagacctgggcggccaggaattctggtgctgattaacg

SEQ ID NO: 315600 - DNA, 95 bp, Homo sapiens
catccacagcgaggcaatgaagaagcccctgccaaggaggagcccgcttctcagtgggacaccgggaaggtcaaaatgcagatcttcgtgaaaac

SEQ ID NO: 315601 - DNA, 100 bp, Homo sapiens
aatcttaaagaccaggaagtgagagagtttgaggagacaatggatgcactccaggctgacatcgaccagctggaggcagagaaggcagaactaaagcagc

SEQ ID NO: 315602 - DNA, 75 bp, Homo sapiens
gcgtgggggaccggctgttggcggggtgaggtggctttgaccccgggttgcccggccagcacgaccgaggaggtg

SEQ ID NO: 315603 - DNA, 75 bp, Homo sapiens
tttatatgataccttctccacctttgggaacatcctctcttgcaaggtgcataaggcaaatccaatacgcaagta

SEQ ID NO: 315604 - DNA, 78 bp, Homo sapiens
cggagcgcaacactcgcttggttggggagatcggcgcttggccgattgagaggatccagaatccagatctctggaata

SEQ ID NO: 315605 - DNA, 75 bp, Homo sapiens
gggaagaatcaaagtcgagcatgaaagattaaggatgctcaactgcaaaatgctcggtgtgtcctgcaaattgat

SEQ ID NO: 315606 - DNA, 101 bp, Homo sapiens
cgcgccactcctcccggaggcgacatggggcacccggtgtaccgcggcgagaagccccagctgcactacgcgctacccaggtggatttagacaagtaacag

SEQ ID NO: 315607 - DNA, 83 bp, Homo sapiens
agtgtgcttgcttggagatcaggacgcaaagccatcgtcagccagtggcagcaggagtccaaagagaaggtggtgtccctcct

SEQ ID NO: 315608 - DNA, 83 bp, Homo sapiens
tcaacactaccagtggccttccttatccaagatgcagtcattggagaaatcgatgaagaaacagattctgcgcttgatttggg

SEQ ID NO: 315609 - DNA, 88 bp, Homo sapiens
caaaagtttataccaagtcttctcatttaaaagctcacctgaggactcacactggtgaagaatatgtaaagagcctaactgctaaccc

SEQ ID NO: 315610 - DNA, 90 bp, Homo sapiens
gcggctccgggctccgctggctcgggcgtcggatcggagccgccggggcgcgggcggcccaggattggaacatcagttaacatctgacca

SEQ ID NO: 315611 - DNA, 75 bp, Homo sapiens
gaacaaatgtttccttaaagtgcctcgatctaaggatgaccctggaaaggaacatcatcttcagcgggctatttc

SEQ ID NO: 315612 - DNA, 100 bp, Homo sapiens
cataaacaacagaggactcaacatatttgcagtagaagtgggacccaaatctacaatgggtggctagtgctacaaagattgctttgtatgagaccccaac

SEQ ID NO: 315613 - DNA, 100 bp, Homo sapiens
cttcagcttctttgtcaccataggagacatggacgaagccttcaaatccatcaagctcatcaaaagatgtttgggtcattgctgtgattgttattgccat

SEQ ID NO: 315614 - DNA, 80 bp, Homo sapiens
gtgtcgagttcccaaaaagctccgcaggggctgtagggaggttgaagagatggtgcagaaccacatgacttactcattac

SEQ ID NO: 315615 - DNA, 46 bp, Homo sapiens
cctgccaggctcttcatccaagatggctgatcactgggaaactgca

SEQ ID NO: 315616 - DNA, 99 bp, Homo sapiens
gtctccttccgcagacgggctatgtgcacccagatgagttcttccagtcccctgaggtgatggcagcctatttcaatgatattgctgtaggtgcagtat

SEQ ID NO: 315617 - DNA, 97 bp, Homo sapiens
cacctcctcgccagcagccgtccggagccagccaacgagcgatgtcctaaacgatgctatatttgatgaagatcatgatgagatggtgattgtgaag

SEQ ID NO: 315618 - DNA, 101 bp, Homo sapiens
tggacaggatggattgccagggcttcctggcccgaaaggagagcctgatcccaggagggcactcatggtggtttatgggactctggactcctgagaagcgg

SEQ ID NO: 315619 - DNA, 100 bp, Homo sapiens
atgtatcataggtactgggaagaatacagcaagggtgcagactatatggactgcttatataggttgctccttgagggcaggacagttcttatggctttat

SEQ ID NO: 315620 - DNA, 100 bp, Homo sapiens
atttggcagaataaatgaaccaggtgattatgttgtcatgactatatattttgaattgagtagaagaatgggatacttcaccattcagacatacattccc

SEQ ID NO: 315621 - DNA, 90 bp, Homo sapiens
ggaaaaccccaaaagtgtacataaggttacaataagctcttgtgacctcctggttgtaagtgttggccagatgtctatgtccagggccat

SEQ ID NO: 315622 - DNA, 75 bp, Homo sapiens
aaatattgttgacaagactgccagctttgtggccagaggctgcctgacccaggagaagattgtggctggctatgc

SEQ ID NO: 315623 - DNA, 82 bp, Homo sapiens
tagaaggccagagtcacacacggtcctaagagctgggcaccaggaagcgaaggctgaagtccattggaatattaagcccagg

SEQ ID NO: 315624 - DNA, 100 bp, Homo sapiens
atcagcacgtcgttcgtgctcaagggggacgcgacgcacaaccaggcgatggtgcactggacgggcgagaacagcagcatgccttcaattaagttgcaga

SEQ ID NO: 315625 - DNA, 96 bp, Homo sapiens
tcacggatcggattcctcagctacgaggaggcgctgaggagagctggtacaggacgagaacgtgcgcggggtgatcaccatgaacgaggagtacga

SEQ ID NO: 315626 - DNA, 96 bp, Homo sapiens
cgcctcctacgtttacctgtccatggcatcatgacggtgatgtcagctctgtcggtggccccctccaaggcccgcgagtactccaaggagggctgg

SEQ ID NO: 315627 - DNA, 100 bp, Homo sapiens
cctgagagtgacctttgcatctgcctgtccagccagcatggaaccaaagcggatcagagagggctaccttgtgaagaagatggtggttgctatttcaggc

SEQ ID NO: 315628 - DNA, 105 bp, Homo sapiens
ggagcgtgaaagggaagagcaagagcttcagcaggcactggctcagagccttcaagagcaagaagatcagcccatctacttggcagtgaagggagtggtgtttga

SEQ ID NO: 315629 - DNA, 100 bp, Homo sapiens
ttcaacatacagcacaattctggacacattgtattggtttgatgctcctacctggaacagaccccagttattaaagcttttggcatcttgaagcgagcgg

SEQ ID NO: 315630 - DNA, 82 bp, Homo sapiens
tggagcacttccacaagtatatggggattccgcagatccggcagctttccgaaagcaagagtgagccatggagctacgtgtg

SEQ ID NO: 315631 - DNA, 50 bp, Homo sapiens
ctggacacagaagtatttgtgacaggtttccgttcagccgcccggagctg

SEQ ID NO: 315632 - DNA, 104 bp, Homo sapiens
gcgtcgcgcccgggaggaaggaacgaggcaaggagctaaagcagcgtgcgttcagccctgggcactctcgagtggaccctgaggagctcttcaccaagctcgac

SEQ ID NO: 315633 - DNA, 100 bp, Homo sapiens
aaaagaagagcagtcacagatcaccagccaggtccctgtacccctacccgaccggcgtcgccgcttcctagccatgaagtggatgatcactgagtgccgg

SEQ ID NO: 315634 - DNA, 75 bp, Homo sapiens
ggcgatgtgccaccgaggctgaggatgatggtagattgccagggccaattcctgtccccccagcagcatggcatc

SEQ ID NO: 315635 - DNA, 102 bp, Homo sapiens
ctggaacagatctatgaatgcagtatttctgggaaaagccagcttctgtttgcactggtcttcacaactcgttacctggatctttttacttcatttatttca

SEQ ID NO: 315636 - DNA, 98 bp, Homo sapiens
ccagaatgcagccccgacccaagtttgtaaggcaggcggggcaccatgagctggcggaaaggctggttgagtgccaatatgagctcactgaccggctg

SEQ ID NO: 315637 - DNA, 83 bp, Homo sapiens
gtcgggttattcgagtgaccgagaccgcggccgggaccgagggtagctacagcaagctgggtagcaggcagatccaaaggata

SEQ ID NO: 315638 - DNA, 98 bp, Homo sapiens
gtttgtacggaaagaagatatgacctatgcagttcgaaaactggataacactaagtttagatctcatgagggtgttggaactcgccataaggcattga

SEQ ID NO: 315639 - DNA, 75 bp, Homo sapiens
gagtctgcatgtggctgcaggacctctgtcagagaatgaaacactcatcgcatgcttctttgtgatattggccac

SEQ ID NO: 315640 - DNA, 95 bp, Homo sapiens
aagcattcctcgtcagcaacatgctcctagcagaagcctatggatctggaggttaatttggagtggcccctggagtcagtttcctacaccatccg

SEQ ID NO: 315641 - DNA, 100 bp, Homo sapiens
gtcagaaccctccgcagagtaaaggtgtacacttaaagcgttctgggaatatgaatcccttctgcaccctggaatcaccagtccagccatgcatggagct

SEQ ID NO: 315642 - DNA, 100 bp, Homo sapiens
atcaagattaaaaagggagtagatttacttcagaatctgatcaaatactttcatgcccaatgcaagaccacctttcactcacctgaggactccacagaag

SEQ ID NO: 315643 - DNA, 100 bp, Homo sapiens
gaaaatgaagacgacattcagtttgtcagtcatctcttgggcagtgaacagcagtcttctgtccagctctgggtctcctttggccggaagcccatgagag

SEQ ID NO: 315644 - DNA, 100 bp, Homo sapiens
ccgccccttcccaactgcggacatgctgggtggatccggatcgcatggaagacgcagcctggccgcgctctcccatcagagcaccataacatggtgtggg

SEQ ID NO: 315645 - DNA, 75 bp, Homo sapiens
gaggcagaggtggaggcgctttgaaagctaacaggcctcacctcttccattccggagatgatccttggacatctt

SEQ ID NO: 315646 - DNA, 75 bp, Homo sapiens
caaggactaatctgatcgggtcttccttcattttcgagccagaggaagaggctggggcagaggcaactactctgg

SEQ ID NO: 315647 - DNA, 100 bp, Homo sapiens
ctgcgtcctttttcgtttttcggatgatgccttcaatactacctttatttccaccatagataaacttattggtgtccactgtacccatggtttaaacagg

SEQ ID NO: 315648 - DNA, 126 bp, Homo sapiens
gcaaacaaaccttctcatctttgtggtcgtgtttttaaagtaggagagcctacatattcttgcagggaacgtgctcagtcactttcaatgggcaccaggagaaaggttttggttcttggatctggc

SEQ ID NO: 315649 - DNA, 83 bp, Homo sapiens
cctcgctaaggaattcccggcccctcagggccacggctttagcggtgtcttttgcgacaatgcagatcttcgtgaagactctg

SEQ ID NO: 315650 - DNA, 90 bp, Homo sapiens
cctcaatgaatgtgtactcgctgagtgtggaccctaacacctggcagactctgctccatgagagctggaaacaacgtggaggtagatgag

SEQ ID NO: 315651 - DNA, 80 bp, Homo sapiens
atgtcagcgttattgtaatgcaaggcaataaatgtgttcgtaagtgccaaccgactaattcatcaaaccaacttaatact

SEQ ID NO: 315652 - DNA, 97 bp, Homo sapiens
gcagctgtgaaattgacttaccaagatgcagtaaacttacagggatgctgtggagatgataatggtctcatggaagtagagggagctcatacatcac

SEQ ID NO: 315653 - DNA, 82 bp, Homo sapiens
aataccaggctaccatggtctacaagactctcttcgctctttgcatcttaactgcagggaaccctactctggaaactgtcag

SEQ ID NO: 315654 - DNA, 75 bp, Homo sapiens
atggctttaaagaatacacttcaaaataccaagctgctattttacacttgaagagggagcacaaagaagaaattg

SEQ ID NO: 315655 - DNA, 100 bp, Homo sapiens
agaaacacccagggatcccggtgacgtcgggaagcagcacccagaccatgatttatgagcagcttccagaagtacagaaaaagagagaagaagagaagag

SEQ ID NO: 315656 - DNA, 75 bp, Homo sapiens
caggaatttatggtcgcctttttgaatgaggtcttcatcctccaggtccacctttagcaagacctattctccccc

SEQ ID NO: 315657 - DNA, 82 bp, Homo sapiens
gaagctccagatggcgtcttccgtgggcaacgtggccgacagcacagggggatatgagactttctactcggaatatcctgag

SEQ ID NO: 315658 - DNA, 90 bp, Homo sapiens
cccgtactggcaggcatggagccaacaaggagaacctggagctcaacggcagcatcctgagtggtcaaaatgcagatcttcgtgaaaacc

SEQ ID NO: 315659 - DNA, 114 bp, Homo sapiens
gactacccatgctcactcgtgggcaactggaacacgtggtatggggagcaggaccaggcagagctgccaggaactcgtggcatcccgggagccgccacagctggacgctgatgg

SEQ ID NO: 315660 - DNA, 75 bp, Homo sapiens
catcccggtccagacccagcaccccatacggaagggtctgcatcacaaggattaaactgcaaatatctcatgaag

SEQ ID NO: 315661 - DNA, 75 bp, Homo sapiens
gtcctgctgtcatctcaaacttttctccaggaacagcttactcaggagtgagctgttgccgcagaatgggctgct

SEQ ID NO: 315662 - DNA, 78 bp, Homo sapiens
gcgccgcgggacctctccgggccatggaaactagatgatggccatttaaacaactctttgagctctccagttcaagcg

SEQ ID NO: 315663 - DNA, 75 bp, Homo sapiens
cctgtgggcacagacaaggagctcagtgacctcctggacttcagcatggccagcggaagcctgccacctcctatg

SEQ ID NO: 315664 - DNA, 75 bp, Homo sapiens
cgcgcagtcgccgggtgggtctctccccagcgacgatttgggtgcagaagatggctgtgccacccacgtatgccg

SEQ ID NO: 315665 - DNA, 75 bp, Homo sapiens
acccagtgcgcacagactcgcccaggaacaacgttcaggagtttgagcatgtcaacgggaagtacagcaccccag

SEQ ID NO: 315666 - DNA, 90 bp, Homo sapiens
gtggttttgatcatgttgttaccctcggacgtagcccggcttgtattggaacccctgaacagtgcccaagtgttgtctctttgttgtcag

SEQ ID NO: 315667 - DNA, 74 bp, Homo sapiens
agcgggagctggacggcgagcgcgagcggcgcgagaaatggacatcctcatcatggatgatgacgacgtcccca

SEQ ID NO: 315668 - DNA, 83 bp, Homo sapiens
gtcagctgtgtgtccagaacgtgccatggagacgcttaacgacttaagcccttagatgtggcgtttatgaaggcaatacacaa

SEQ ID NO: 315669 - DNA, 96 bp, Homo sapiens
gtcaactctaccatgtgctagagacagccaacaaaatattcatggttcttgagagcatgaccttcctcttgatgttgctgctcatcttcttctaca

SEQ ID NO: 315670 - DNA, 98 bp, Homo sapiens
ctgccaatttaccagagataattgataacaccctgtaacagctgagttccgaggcctcatcctgctgctgaccttcctaatttacgcctgctatcaca

SEQ ID NO: 315671 - DNA, 100 bp, Homo sapiens
ccgggatcgtgaccgagaccgtgaccgagagcgtgaccgagagcgcgaatatcgtcatcgttagaaggccaggccattgctcggcgtctgaaaccattcg

SEQ ID NO: 315672 - DNA, 96 bp, Homo sapiens
cttctccgccatgcaaggctggcgcgtctccatggaggatgatcacggacgtgcagctcgccatcttcgccaacatgctgggcgtgtcgctcttct

SEQ ID NO: 315673 - DNA, 94 bp, Homo sapiens
acctcctccaagaccgtgctggtctttctcaacctcatcttctggactagacgcttgaagcaaagctgccatcccagaagacgacatgctctca

SEQ ID NO: 315674 - DNA, 90 bp, Homo sapiens
gtacaacgtgcgatccatgcccatccgaaaggatgatgaagttcaggaacaacatcaagcctttttgtatcagttaatgcaacatcacca

SEQ ID NO: 315675 - DNA, 100 bp, Homo sapiens
aaaaaacacaataccaggcatacatttggcagaataaatgaaccagtcattgaaattatgagactatcattcaaatggaagcattatagttcttcggaac

SEQ ID NO: 315676 - DNA, 75 bp, Homo sapiens
aaagtatgttgtaccttgtgacagaatatgccaaaaatggagaaatttttgtgtggtcttcagcatagagtgagc

SEQ ID NO: 315677 - DNA, 83 bp, Homo sapiens
ggacaagagacgatcattctgcaagcaggcaacctgaatacagggtggcacactgtgtttttcaaaacttgattatgcagtcg

SEQ ID NO: 315678 - DNA, 82 bp, Homo sapiens
gtgctgatggacaccgtctccatgcccgagttcatggccaacctcaggctcaggtgagaagccctaccactgcaactgggac

SEQ ID NO: 315679 - DNA, 82 bp, Homo sapiens
cgccgtgagttcgccgctggtggctccgggagcccagcagccggggccgccctattacaccgacccaggaggaccggggatg

SEQ ID NO: 315680 - DNA, 100 bp, Homo sapiens
tactcgccggacccggtggtcgtccgcggctccggtcacgtcaccgtggccggtgcataaacttctcccgagttccatctcagtaaaagggaagcaggaa

SEQ ID NO: 315681 - DNA, 100 bp, Homo sapiens
gaagatactatggtggagaccattgctctttgccagagaaattcacataatttgaaccagcagcaacgtgaggccaagatgctgaattatcagggacact

SEQ ID NO: 315682 - DNA, 82 bp, Homo sapiens
ttctgccacatttgttttgagctaaatattgaggttttggaaaatatgtcccatggagcacattctggttcgtctggaaact

SEQ ID NO: 315683 - DNA, 74 bp, Homo sapiens
gccagtactctatatgaacaatccgtctggatcacggatgtaggaagtggcttcctggactgggtccccaagaa

SEQ ID NO: 315684 - DNA, 90 bp, Homo sapiens
ggcggagaccctcgaagtgcgcaaacttgacactcaccctgaccgcattgatgttgatgggacaatgacagtggactggaatgaatggag

SEQ ID NO: 315685 - DNA, 98 bp, Homo sapiens
cgaagaagcatcgttaaagtctctcttcaccctgccgtcatgtctaagtcagagagctgtggaatcagcagtgtttttggttggcaacaaacgagatc

SEQ ID NO: 315686 - DNA, 75 bp, Homo sapiens
tccaggtacagtcctccagggtatacttcgtggcctgcaccatcgctcctactccaatgtggccagatgacctgc

SEQ ID NO: 315687 - DNA, 101 bp, Homo sapiens
tgaagaaggaaaagacggccaagctgatccccaacgccatccagatctgcacggagagcgagaagtcctcactgggctttgtggccctcgtgctgagcaca

SEQ ID NO: 315688 - DNA, 50 bp, Homo sapiens
aaagattctttaaattacatcagctccttcttcacatcgtagaaacatgg

SEQ ID NO: 315689 - DNA, 101 bp, Homo sapiens
tgtgtttccgcagcgagagcgaggaggagattgtaaaccatggctgtgtggatacaagctcagcagctccaaggagaagcccttcatcagatgcaagcgtt

SEQ ID NO: 315690 - DNA, 75 bp, Homo sapiens
cactgaccctctgagccacagcagcaacagcagctcagagtctgccatcatggatgttctcgcagaagcaaatgg

SEQ ID NO: 315691 - DNA, 75 bp, Homo sapiens
aagctgtggaaggctctggataaggaccagtacctgcccaggaaactgcttgcacagaagatgggatttccacct

SEQ ID NO: 315692 - DNA, 75 bp, Homo sapiens
ataaagtgattttttgcctttgttgattaactggacaaattcaggacagaatgacttggaagataacggagcttc

SEQ ID NO: 315693 - DNA, 82 bp, Homo sapiens
cagagctagttcctctccagctcagccgcgtggtacagaagttggtcctgccctttgggcgactgaactacctgcccctgga

SEQ ID NO: 315694 - DNA, 115 bp, Homo sapiens
ccgggtccctcaaggacaacccgtacatcaccgacggctaccgggcctacctgccgtccaggctgtgtatcaaaaggctagagaagatggcctgactgttattcagcctcattcc

SEQ ID NO: 315695 - DNA, 90 bp, Homo sapiens
tgagaacttgtgccccagttgctgtgctccaaggacacacaggatcaattacatctttacagaagttgcttgatagatttgactatgatg

SEQ ID NO: 315696 - DNA, 75 bp, Homo sapiens
gtgcttggtggagcagctgcctgggagaatgttgactctactgcagctgcccaacatgttcggcgaccttcggtc

SEQ ID NO: 315697 - DNA, 100 bp, Homo sapiens
tccgcatggtcagtgccatttcgcctttatcgtggtggagtccaccctggctgtggtactccaaagattcaggtttactcacgtcatccagcagagaatg

SEQ ID NO: 315698 - DNA, 101 bp, Homo sapiens
cgagaggggctcctggagctgtgagctctgctacttcaagtaccaggtcctggcgatcagcaccaagaacccactgcagaattacctctctgaacaggact

SEQ ID NO: 315699 - DNA, 100 bp, Homo sapiens
caagttcagagtcccccatccagagttgagacatcagttattaagcctagatctgttgatcttagtaacaatgaagcatcctctagcaatggcttcttgg

SEQ ID NO: 315700 - DNA, 100 bp, Homo sapiens
cagcagctccctggcagaggcccagccacccctggctgctccaccacagaagccccagcctcacccacagctcaagtttttggggaacaggtggtgtttg

SEQ ID NO: 315701 - DNA, 96 bp, Homo sapiens
ccgaggcccctatggcagatttgaaaattcacccttgtagagtcattcctgcctttgagcggactcccttttaagctccaccgggggacggctacg

SEQ ID NO: 315702 - DNA, 75 bp, Homo sapiens
ttcaatactacctttatttccaccatagcgccctcacaaagccaatgctgaggagatgaccaagtaccacagcga

SEQ ID NO: 315703 - DNA, 89 bp, Homo sapiens
tggatagagctcattaaactgaaagctcagaccataaggcgtggatcaattaagacaaatgaggatgggtggcgtgcggaacagagaga

SEQ ID NO: 315704 - DNA, 90 bp, Homo sapiens
gcctcggaggcgttcagctgcttcaagatgaagcctaattcagtggtttgagacagcaccaagtcggacctgcccacagtgccgaatcca

SEQ ID NO: 315705 - DNA, 83 bp, Homo sapiens
ggggacaccagtagccgcggacctcgtacttggaccatgagactgtttcagccactttcatcgacagcagtggacagtttgtt

SEQ ID NO: 315706 - DNA, 88 bp, Homo sapiens
agcagccccgcagcggcgccgaggacagtgcagccgagttgcgtctccctcgcgcgaggtttaccgacaagactgtgaaactttcggg

SEQ ID NO: 315707 - DNA, 100 bp, Homo sapiens
accgccggccgggggacgagctcggagcagcagccaggatgaccagtgtcccagtgaaggaacgagtgaaggtgtctcagaactggagactggggcgctg

SEQ ID NO: 315708 - DNA, 97 bp, Homo sapiens
ggaagcactcagtcaatgaaaaatgtaatatgaaaatcgagcactatttttctccgaaattggaatgggattaacaggatttggagtgtttttcctg

SEQ ID NO: 315709 - DNA, 50 bp, Homo sapiens
aacgaactgggcaacatctacacgcacgactgattcttgctattccaaat

SEQ ID NO: 315710 - DNA, 82 bp, Homo sapiens
gtgtctttggtccaacgttgttccaggttgctccttgagggcaggacagttcttatggctttatccgttgcgtaagcacaga

SEQ ID NO: 315711 - DNA, 51 bp, Homo sapiens
ctggccgagcaggaggcgccatcatgggagaccagtgtaaatttgatcatg

SEQ ID NO: 315712 - DNA, 50 bp, Homo sapiens
ttcaacaccaccttcatctccaccatcgatcttcgtgaagactctgactg

SEQ ID NO: 315713 - DNA, 97 bp, Homo sapiens
gctggccatggcgaggggtgcacggcggccacctgagtggcgcggcggtgtcaggttgaaggtttagaacagatgtggaaaaatgtttacttcagag

SEQ ID NO: 315714 - DNA, 96 bp, Homo sapiens
cttctcaggtgtaactccacagcgacaagttgtacagactccaaacacagttctctctactccattcaggccctggccaacgtcaacattgggagc

SEQ ID NO: 315715 - DNA, 82 bp, Homo sapiens
gacaaccaagcattttcatgaaacaaccccaaataaaggaagtggaaccacttcagattgttcagattccattctgtgggga

SEQ ID NO: 315716 - DNA, 100 bp, Homo sapiens
gcttctaactataacgtgacttcagattatgcagtgcatccaatgagccctgtaggcagactacagattctcgttgacactggaagcagtaactttgccg

SEQ ID NO: 315717 - DNA, 83 bp, Homo sapiens
tttgtcagtgcacaaaatggcgccctacagcctactggtgactcggctgcagggctgaaatctctttaatgatggagggaagc

SEQ ID NO: 315718 - DNA, 100 bp, Homo sapiens
tccttttccaagcggctgccgaagatggcggaggtgcaggaggtggacatctataccgtcaaggtggaagacctgaccttcacctccccgttctgcctgc

SEQ ID NO: 315719 - DNA, 83 bp, Homo sapiens
gcgctgctggcgctctggctgtgctgcgcgacccccgcgcatgaagaagaaaggagggcgcgggctaatgaccgagaatacaa

SEQ ID NO: 315720 - DNA, 90 bp, Homo sapiens
aagaaagtgcgcagcctgcaagattgtggtgcacacgccctgcatcgagcagctggagaagctgattggggccctggtcctgtctgtggg

SEQ ID NO: 315721 - DNA, 100 bp, Homo sapiens
ctttaaggtggataatgatgaaaatgagcaccagttatctttaagaacggtattctctactgccgctgatggtcaaacgcaagtggaaattaaagtgtgt

SEQ ID NO: 315722 - DNA, 100 bp, Homo sapiens
ctcaagctccagttctgccacctcacttcttactctcagcccaaaagcagtttcagaatggcttcggttattgcctttccttggtgtactcgcacttctt

SEQ ID NO: 315723 - DNA, 101 bp, Homo sapiens
aaagaatatactacccgtacccaagctccatatgggcacggttatgaaatattttgtgttacttgtaacagttcaaagactctgcttgcctcagcttgtaa

SEQ ID NO: 315724 - DNA, 95 bp, Homo sapiens
agattttgcattggatattcgcatgcctggggttacacctaaacaggttccagcaacagatagaaatgctttaagttcactctggggaaagctgg

SEQ ID NO: 315725 - DNA, 90 bp, Homo sapiens
gttcttcttctttttagatcctttaagaacaggaattacagtttgaaaggctgacccgagagctggaggctgaacggcagatcgtagcca

SEQ ID NO: 315726 - DNA, 98 bp, Homo sapiens
ctacagcctgtacacaacaagacagtttatcttgtccatggggcacagaacaaactttattcagaatgcacaatggatttagtatcatcagtgacaac

SEQ ID NO: 315727 - DNA, 80 bp, Homo sapiens
tttgcttggaaaaacgtgtgggtacgaccttgagtcttttattcaaaacttcagcgttctctatagtcccttgaaaaggc

SEQ ID NO: 315728 - DNA, 96 bp, Homo sapiens
cagagggacttgtacagggatgtgatgttggagaactacagcaacctgatctcattggacttctgcctggtgtcgaaggtggtgggcagatgccgg

SEQ ID NO: 315729 - DNA, 74 bp, Homo sapiens
cggtccgacagagtcctccgtgtcctcccccgcatgacccccttgcttgaactcagtgaaaatagaatctttgg

SEQ ID NO: 315730 - DNA, 100 bp, Homo sapiens
cattgtgtaaaacagtaggcggatctttcagagactccaaatcattgacaattcagactctgaagaagaagctatggagactacaccagccaaaggaaag

SEQ ID NO: 315731 - DNA, 100 bp, Homo sapiens
gcaggtggtcagctgcgaatcaaaccgggtggttctcttcccaaagtggaagccaaattcatcaattatgtgaagaattgcttccggatgactgaccaag

SEQ ID NO: 315732 - DNA, 100 bp, Homo sapiens
cccagcagcccccgaaggccctatcaggacatggagtatgaaagacgtccgtgaggctggtgagcaaggtgacattgaaccccgaagaatggtgagacac

SEQ ID NO: 315733 - DNA, 110 bp, Homo sapiens
gagactggaggaagaattcccaagccagagctttccagaatcagcatgattcttcagaggctcttcaggttctcctctgtcattcggtcagccgtctcagtccatttgcg

SEQ ID NO: 315734 - DNA, 83 bp, Homo sapiens
cctttaggtgcttttatattcatctcaaaaacaaaattctgaactcaggacttggcaagtaccccctgtaccggctgggtggc

SEQ ID NO: 315735 - DNA, 98 bp, Homo sapiens
aaaaacaaaaatattgacaactttttaagcagatatcgagctgggagcattagtacccttgattctttagactttgcaagatattcagatgatggtaa

SEQ ID NO: 315736 - DNA, 75 bp, Homo sapiens
tccaccaaaggtctcgtacctctcagaggcacgtgtggttctcaaatataggcattctgatgggaacttgtgtgt

SEQ ID NO: 315737 - DNA, 100 bp, Homo sapiens
tgcaaaccgcagcccaggagctcctggaagatctccgcactctggagcataatgtacaccattcgcttttcacccaagatgatttgatgtcttataaaac

SEQ ID NO: 315738 - DNA, 75 bp, Homo sapiens
ccaccctacatttagcgcatcatgtgatccgggtaaaatttggtaataccacctttaaaacagatgtgtacctta

SEQ ID NO: 315739 - DNA, 116 bp, Homo sapiens
cggaaatgtgggacgcaaggctggggtgtcgcggcagtggctgaagcttcccttcgccgcatctctctgcagcaactcgacccaacatgagtgaagtttcctgcaagaaacgggac

SEQ ID NO: 315740 - DNA, 110 bp, Homo sapiens
tgggagccccgagaacgcctccagcggggatgacacagaagctccagggtttgagccacaatgtgatcttcaccttggattctttgttaaaaggagacctaaagggagtc

SEQ ID NO: 315741 - DNA, 51 bp, Homo sapiens
taccctggaccagcagaaacctagagtggccgaatacatcaagcaatggta

SEQ ID NO: 315742 - DNA, 100 bp, Homo sapiens
cagtccagctacgccacccccgtggatctctggagtgttggctgcatatttgcagaaatgtttcgtagaaaatgtcgaactctctcaggttcacccagac

SEQ ID NO: 315743 - DNA, 125 bp, Homo sapiens
taatgaaccaaaaaccaaactttatcttaagctaagtcggaaggaaagatcttcagcttatagcaaaagatggaagagtgtagaaagtgtcccaaagttggtgtctgaatatatgtccaaaaaga

SEQ ID NO: 315744 - DNA, 131 bp, Homo sapiens
agattttgtgggaatgatgctagctgctgccacctcaaaaacttgtgccacaactatagcatatccacatggttttgctatcggcatgccagtgtgtgaatttgatatggttaaagatccagaagtacagg

SEQ ID NO: 315745 - DNA, 74 bp, Homo sapiens
acagcagttcaaggaaagtgacttatcacatgttcagccttcacagttgttgatcacatagcatggtcatccac

SEQ ID NO: 315746 - DNA, 90 bp, Homo sapiens
atggatccatttctcctattgaggagtcaacgacttatcaaactggtttcaaagcacagagctcaagtaatttacaccagaaataccaag

SEQ ID NO: 315747 - DNA, 100 bp, Homo sapiens
ccggaagacctcactgaccccagagtggcagaaaggctgatgcagcaggtgatgcaggttctgaatgctgatgccattgttgtgaagctgaactcaggcg

SEQ ID NO: 315748 - DNA, 78 bp, Homo sapiens
aaagacaccgaaagtaaagaagaagaaaacttcagtgaaacaagaatgggatataccatgctgtgaagtccaggccac

SEQ ID NO: 315749 - DNA, 100 bp, Homo sapiens
taaaggcgggactgccacgtccaagcaaaccgggaaaggagaggatcccggagccggttccagcaacagatagaaatgctttaagttcactctggggaaa

SEQ ID NO: 315750 - DNA, 98 bp, Homo sapiens
ctgtttcgccacagttcctaccttatgagctcggttttcttatgcttataagagtggaacagcattcaacagaaggtgtcaaattgacagctctcaat

SEQ ID NO: 315751 - DNA, 75 bp, Homo sapiens
cacaactcttgtcctaccacctcatgggtgaatttgtaagtgatgtcctgctagttccagaaaagtgccagtttt

SEQ ID NO: 315752 - DNA, 85 bp, Homo sapiens
agtacctgaaccggcacctgcacacctggatccaggataacggaggctgggttgcatcccagcgcattagctcagtggacctctc

SEQ ID NO: 315753 - DNA, 100 bp, Homo sapiens
tttgaaggagaatacacacatcacaaagatcctggaatatataaatgtgttgtttgtggaactccattgtttaagtgttcttccagagagcaaagccctg

SEQ ID NO: 315754 - DNA, 100 bp, Homo sapiens
cccgagcgaggccaaccttcaggaggaggagtgtgttgttggtggctgcaatgccagctttgcttctcagggagggctagctcgtcatgtacccacacac

SEQ ID NO: 315755 - DNA, 97 bp, Homo sapiens
aggaaaaataaaaaaccagcctcgttttatagaatctgcatatgatatcataaaactgtgtgggttgaggaacaggttagcaccactgagagagtgt

SEQ ID NO: 315756 - DNA, 100 bp, Homo sapiens
ggggagaaggtgttgttgccggagctgagaccgggcggccacagtccgcagggatgaacctcgagttgctggagagaacatatgatgagctgttactggg

SEQ ID NO: 315757 - DNA, 100 bp, Homo sapiens
tgcaggcaaaaccactcttcttcacatgctcaaagatgacagattgggccaacatgttccaacactacatccgaagttttcttgaagtacaactaaggac

SEQ ID NO: 315758 - DNA, 75 bp, Homo sapiens
caacctgtccggggatcccagggaggtgagaagccctaccactgcaactgggacggctgcggctggaagtttgcg

SEQ ID NO: 315759 - DNA, 98 bp, Homo sapiens
ctcctccaaggtctacatgattacctgaagtttaataagatggacaaccggaaattttctacacattttggaattcagttactcaggcactttcttct

SEQ ID NO: 315760 - DNA, 114 bp, Homo sapiens
ctggaagacatggccactccagtcggtgttgagcacggcgagcagtctcaggcctttagtgatgatgcatgttggcagataaattgaacatgactccagaagaagctgaaaggt

SEQ ID NO: 315761 - DNA, 83 bp, Homo sapiens
cagtgaagcaacccactggagtgagcattgctgcatttggagagtcagatgccattttgggagactgcattgcttattgatcc

SEQ ID NO: 315762 - DNA, 80 bp, Homo sapiens
atggatccatttctcctattgaggagtcaaccttaaagcttttcaagccaggccaagaagctgtgaagtaccagggtcct

SEQ ID NO: 315763 - DNA, 87 bp, Homo sapiens
ctttggacgccggtggagacgcaggcgaggtgacttaagagattaaaattaatttggttgctgttggttctgaacaaataatgagtt

SEQ ID NO: 315764 - DNA, 46 bp, Homo sapiens
gatgtgcaacaaagtgcgatgttctaatacccgatttacaattaca

SEQ ID NO: 315765 - DNA, 83 bp, Homo sapiens
gccgggggtcgctggctctgctgctgccgccggcgaaggaggaggcgttgccggccatcatgtatgtcatgggagcacttggc

SEQ ID NO: 315766 - DNA, 75 bp, Homo sapiens
gcggcagacgcctgaggatgatgccccagctgcagttcaaagatgccttttggccaacacaagccatcagcccca

SEQ ID NO: 315767 - DNA, 90 bp, Homo sapiens
gttagattaccaccaccacctgatataaaaaaagaaattagtgaaggagatgaagtagagacaggtgctctagttcacagctatagggga

SEQ ID NO: 315768 - DNA, 100 bp, Homo sapiens
ggagagaaggcgcaaagaagaagaggagaggagacgggcagaagaagaaaagaggagagttgaaagagaacagggtctcatgattccttcagcttctaca

SEQ ID NO: 315769 - DNA, 100 bp, Homo sapiens
tgaacattctgccgaagagaacaagacgtgtgaagactcaggcttattgtgtaacagaacctggagcaggctctgatgtagctggtataaagaccaaagc

SEQ ID NO: 315770 - DNA, 51 bp, Homo sapiens
ctagattccttaaaaaccctagcaggtcatcactccccaaaatggacgtta

SEQ ID NO: 315771 - DNA, 75 bp, Homo sapiens
gcctgggtgccaactcctcaggtgcagggaccgtgaccacctgggggctagttttgctcttgttgcccaggctgg

SEQ ID NO: 315772 - DNA, 99 bp, Homo sapiens
acaggctcacattctggtggactgtggagaagacaatctgtgtgttcctgacttgaagctgtcggctagaccgatctcaaagatttcatgagacaagct

SEQ ID NO: 315773 - DNA, 100 bp, Homo sapiens
cgtcccggccctgagcgcactctggagggattctggcatcagggaggctttcagccggagaagcgagtttcagctggaagttttgcgaagcagcttggtc

SEQ ID NO: 315774 - DNA, 100 bp, Homo sapiens
ctgattttatgggaaaattaagcagatgctccagtttgagaaacctggatctgcgatctgtttgtgatgctgttgatggagtaatgaatggtgaatacta

SEQ ID NO: 315775 - DNA, 100 bp, Homo sapiens
gcgtccggtgttcaccgagtatcaggccagtgcgtttgggaatgtcaagctggtggtccacgactgtcccgtctggatctttgtagaatttgatggctgt

SEQ ID NO: 315776 - DNA, 75 bp, Homo sapiens
ggaacatgaagatgaaagccgtgctggctcagagaaggtggctttctggtgactcagagaatgctggacatgttc

SEQ ID NO: 315777 - DNA, 80 bp, Homo sapiens
cttggactgagtcctgcaggacacaggtaccaggatcatctatgaccggaaattcctgatggagtgtcggaactcacctg

SEQ ID NO: 315778 - DNA, 49 bp, Homo sapiens
gttcattacatgattcatgagccagaaatggaatctatttggaatttgc

SEQ ID NO: 315779 - DNA, 97 bp, Homo sapiens
gagacgtcgctgaggggcttgcctgaagcgaggggtctgctgagaacagacccagtccctgaggaaggagaagatgttgctgccacgatcagtgcca

SEQ ID NO: 315780 - DNA, 75 bp, Homo sapiens
ccgcgcgccttctccggcgtccgggtcgagcgcagagagaagaagaaggaggttcctgctgtgccagaaaccctt

SEQ ID NO: 315781 - DNA, 88 bp, Homo sapiens
tgctgagtcagtgtgacagtccatatgtaaccaaatattatggatcctatctgaaggctgtggaaaatctctgttctcacaaagtctc

SEQ ID NO: 315782 - DNA, 100 bp, Homo sapiens
aagagatcaaggtcctttccgacaagctgaaggaggctgagacccgtgctgaatttgcagagagaacggttgcaaaactggaaaagacaattgatgacct

SEQ ID NO: 315783 - DNA, 82 bp, Homo sapiens
ggcatcttcttcgtgaggctgctcttcgagcgcctaaattatacagatctgtgattgaagatgtcattaatgatgtgagaga

SEQ ID NO: 315784 - DNA, 90 bp, Homo sapiens
gttggaccctgggaagatgcatgccaaaatctggttaatgaaggttcattgtgggatcagaccgtgctatcttcatgcttcgcgatggga

SEQ ID NO: 315785 - DNA, 115 bp, Homo sapiens
gttacagaagagtcaattaaggaattctttcgaggattaaattaggagagaagtttgctgaggaatgccttcaagcacaaagtgatgaatgactgccttcaagtctcaagaaaac

SEQ ID NO: 315786 - DNA, 75 bp, Homo sapiens
agccccagcccgcagccctcgggggccaagactaaggggctgcagagcggggtggacattggcgtcaagtactcg

SEQ ID NO: 315787 - DNA, 83 bp, Homo sapiens
cggaggccgcccccgcggcggccgcgctcttcgcctggggaccatgctggcgggaatgagaaactggtcaagctggagtcggg

SEQ ID NO: 315788 - DNA, 100 bp, Homo sapiens
aagcaaacagaaatttgtgctcaaaacccccaagcatccagagatacgctgtcatccctttatcgaccaactcgggcctcattggctgggttccccactg

SEQ ID NO: 315789 - DNA, 73 bp, Homo sapiens
tatgaagcaacatgagatggtggatgaacccacaggttctaagctggtctatgtccatcaccttcttggagaa

SEQ ID NO: 315790 - DNA, 83 bp, Homo sapiens
cttggtggccttaacactattgacattttgactgccattagaaatgctactgtatcttttggataatcctgatgttgtcagag

SEQ ID NO: 315791 - DNA, 75 bp, Homo sapiens
gagtaacccggagtttgaaaatgaagaattggacagtcattttgtttactcattcagccctgttgcaggtcccaa

SEQ ID NO: 315792 - DNA, 50 bp, Homo sapiens
ctggcccaggaccgggaggagatgaagcgatgccctcctagctagccgtc

SEQ ID NO: 315793 - DNA, 74 bp, Homo sapiens
tccagcctctttcatgttgaggatgttggcttcacttaatcatatccgagctgatcgggcccgggacacccaga

SEQ ID NO: 315794 - DNA, 100 bp, Homo sapiens
atgacgcaaccaaccttaatatacagccagcctgtcatgagacctccaaacccctttggccctgtatcaggagcacaggatcctcagtcttccacaatga

SEQ ID NO: 315795 - DNA, 75 bp, Homo sapiens
tagacaaagagacggacaacatgtacagactgggaaacttcaggcagtgagaaacacggcttcatcagaatcccg

SEQ ID NO: 315796 - DNA, 100 bp, Homo sapiens
ccaccatcaacaatgagtacaactaccgctgctggaccacaaaccgctgccagaaaaaaaatggccacccagcagaaagcctctgacgagaggatctccc

SEQ ID NO: 315797 - DNA, 98 bp, Homo sapiens
cgatccctgcgcgggctcgagagctcgccccgaacgggggtcttcctcctccgccgttgacagccacaccaagagcccaaacctggagacctgattga

SEQ ID NO: 315798 - DNA, 101 bp, Homo sapiens
tactgcaccatccccacctaccccagcggccagatcggcttcatgctgtgcagcaagaacccgcccaaggagctggatccctctgctgtgctccccttaga

SEQ ID NO: 315799 - DNA, 100 bp, Homo sapiens
tcggcggagaccctcgaagtgcgcaaacttgacactcaccctgaccgattactacaagggaagacataaattcaaagcaggttgctacagtgaaagcaga

SEQ ID NO: 315800 - DNA, 87 bp, Homo sapiens
ggtgagaaacaaaacttctttccattgtcctgcccgtttctgcggacttgttctgaggccgagacagaatgttgctgcgggatgtaa

SEQ ID NO: 315801 - DNA, 100 bp, Homo sapiens
ggattatgggcctttcagagatgtgcctgcctatagtcagggcagggtgccatttgccgtgcctgacaaagtgctgtggccacagctgtgtgaggcgctc

SEQ ID NO: 315802 - DNA, 100 bp, Homo sapiens
gtaaggctaggccgcgagcttagtcctgggagccgcctccgtcgccgccgtcagagccgccctatcaggtgaactactgagttcttcattatgtctgatg

SEQ ID NO: 315803 - DNA, 50 bp, Homo sapiens
gtcttccggacagactatggtcaggaagagtttttcagcctggcgtggtg

SEQ ID NO: 315804 - DNA, 99 bp, Homo sapiens
aaaatgatgaagagcagatggaaacacatgaaagacttcctcaaggactacagtatgcacttaatgtccctctgccactgcagagccccgccatggaag

SEQ ID NO: 315805 - DNA, 100 bp, Homo sapiens
ctaaaatagagctctcaaaacctggctgttttccttcagagcactggcctccaattattgcccaaggactccagatactccaaataatgaccctcgttgt

SEQ ID NO: 315806 - DNA, 75 bp, Homo sapiens
ctctgcagcgggatcaagctgtgtgcattagtacaaatgacgaagttatacggaagcgtctcctcattgatggag

SEQ ID NO: 315807 - DNA, 74 bp, Homo sapiens
ccagctctgcagcctgatgcccccagtccaggcattgtttccaagtcgtacgagtgccgtctaaagggacaagg

SEQ ID NO: 315808 - DNA, 90 bp, Homo sapiens
cccttgcatggtgtttcaaagggtggtgaagaactaagtctgaagatgatgagaaactgaaaaagaggaaggagcgatttgggattgtca

SEQ ID NO: 315809 - DNA, 100 bp, Homo sapiens
cggcaacggggcactgacctgggtggaagctgccctctgtcgacagctccccatggaagctgagactcttgccccagttcaggctgctgtcaacccaccc

SEQ ID NO: 315810 - DNA, 100 bp, Homo sapiens
cgcagcaagacccgcgccgccgggacccccaggacgacgtgtacctggacatcaccgacacgatgaggcgagtggtacgacagagcaagtttcggcatgt

SEQ ID NO: 315811 - DNA, 82 bp, Homo sapiens
cgatgtttcaatattggaagcgctttgatttacagcagctgcagaaattggcgtgttagccaaggctttcattgaccaaggg

SEQ ID NO: 315812 - DNA, 80 bp, Homo sapiens
aaatccacaagaacgcactttcctcccagggactttgaacatgtcggggatcgccctcagcagactcgcccaggagagga

SEQ ID NO: 315813 - DNA, 125 bp, Homo sapiens
catcatcaaagaaggagacgtggggtcactggtgtatgtcatggaagtgcacttggaggctcctcagctcttcatatcccagcttttccaggaggaggatgtctcattgattacgttcctcaagt

SEQ ID NO: 315814 - DNA, 100 bp, Homo sapiens
ctcctggcagtgcgtcaatcagagcgtcctgtgcggtgtgcaactgaggaacatggctcaagaaactaatcacagccaagtgcctatgctttgttccact

SEQ ID NO: 315815 - DNA, 75 bp, Homo sapiens
ccgacgtcatcatgctgaccaccaatcagatccgtaagagaggtggagaagagcgagtacttgagaaagaagagg

SEQ ID NO: 315816 - DNA, 90 bp, Homo sapiens
gcagcggccgcggtgggttcttcagagccaaagccttggctggacagtcagtacgaatctgtaaaggccccagggctgtgttttcccgca

SEQ ID NO: 315817 - DNA, 76 bp, Homo sapiens
cacctctgtgggggcaatgggctgctgacccagacagctcctcctgctggaccctccagccccgggcctcaggagc

SEQ ID NO: 315818 - DNA, 75 bp, Homo sapiens
ggtgccttcgttccccccgagttcgacgtgaccgggaacacctttgaggccctgggaggagcggggacactgagg

SEQ ID NO: 315819 - DNA, 82 bp, Homo sapiens
gcgagattgcctgacccaggcctgctcggccctcacagggcatctgcatctgggaccgacctcctgggctggctgatcaaag

SEQ ID NO: 315820 - DNA, 100 bp, Homo sapiens
atctttccttctgtcaacggcaggggcaggcctagtttgactctgacagtcctcccactaaggcagctgccagacccggccatcgaggaccagggtgggg

SEQ ID NO: 315821 - DNA, 99 bp, Homo sapiens
atagacatgccgcccttcttcccctccgaaagtttttcttcccccagtccctcagctgctgctgctgctcaggaggtcagatctgccactgatggtaat

SEQ ID NO: 315822 - DNA, 82 bp, Homo sapiens
cagcctccggagtagctgggactacagcattttgaaagcgaagcagaagccgtagaatcagcggcgagcctgttgaaagaac

SEQ ID NO: 315823 - DNA, 75 bp, Homo sapiens
gttaaagtcatggaagccctaacattggctgaagatcctgaggaggatgaaggggctggccctggaggccgagag

SEQ ID NO: 315824 - DNA, 73 bp, Homo sapiens
aagagcacacctgttaagaccctgcccttctcgccctcccagactccattaataatatacctctttcatttcc

SEQ ID NO: 315825 - DNA, 100 bp, Homo sapiens
ccgttcttgcctcaggccagtcgcctccaggccaagagggatccttcacccgtgtctgaaccacctggccgtgtttgcagcggtccacccgccggccccc

SEQ ID NO: 315826 - DNA, 100 bp, Homo sapiens
ccagcacctaccgagaagctgccacaaaccaggccaagatccacgctgacgcagagcggaaggaggggccagcagcctcccccgatgggtcgtcagcaac

SEQ ID NO: 315827 - DNA, 98 bp, Homo sapiens
cggcagcgcggacccgcccggagatgagggatcgcttacacctgagacgaactacagaacagcacgtaccagaggtggaagtccaagtcaaacgcaga

SEQ ID NO: 315828 - DNA, 82 bp, Homo sapiens
aacggctgaaggccctacgggagaaaaccgggcgcaaggacactcatgaggaccatgatacttccactgagaatacagacga

SEQ ID NO: 315829 - DNA, 97 bp, Homo sapiens
tatgatgcaagatgtggcagaagaacaagaagttgagaccgagaatgtggaaacagactggaatcagccattttaccaagaaagttgggtttctttt

SEQ ID NO: 315830 - DNA, 100 bp, Homo sapiens
ctcagcccagcctcccccagccaaggtgtcatgctgccttgtggggtgactgaggaaccccagcgactcttttatggttcgatacaagaggctgttttcc

SEQ ID NO: 315831 - DNA, 83 bp, Homo sapiens
gccatgtaagatcgtcgagatgtctacttcgaagactggcaagcacggccacgccaagcaggctctccccggaggctcagccc

SEQ ID NO: 315832 - DNA, 86 bp, Homo sapiens
aaatgttggcaaaagtgaagcaagttcacaaagaagtattaaactgtgatcaaattttctccggtggctaaaaagttgtttgtggt

SEQ ID NO: 315833 - DNA, 100 bp, Homo sapiens
catggaggatcgtcaggctctaaacaaaattctgcccctcatatggaaaatttgaaatgcagaggggaaacagtagcaaaggagatcagtgaagccatga

SEQ ID NO: 315834 - DNA, 82 bp, Homo sapiens
gcctgacaaccttggaacagaacaagaggacaggaggtgtcgttccagagtctcactgtcgcccaggctgcagtgcagtggt

SEQ ID NO: 315835 - DNA, 101 bp, Homo sapiens
ggcgaggggggagcctcagcaggattgctgtgtgaaaaccgagctgctgggagaagatcgcccaggaccacaccgcagcgtaactgcaggcctctcagcga

SEQ ID NO: 315836 - DNA, 76 bp, Homo sapiens
gcggcagacggcgacagtggcggcggcgccatggcagggcttgcagcttccttcaaaatgtctactgttcacgaaa

SEQ ID NO: 315837 - DNA, 90 bp, Homo sapiens
aagttgcagcgaggagaagcgcagcgacggcgtcgggagagcgcgcctagccggctcgcgagtcatggagaaatgttgtagagggaagga

SEQ ID NO: 315838 - DNA, 75 bp, Homo sapiens
caagagcttctttgaggccaaggtccaggcgcaggtaaagttgctggagaagcgtgtggtgcacctgggtgtagg

SEQ ID NO: 315839 - DNA, 100 bp, Homo sapiens
gagctggccagcgagagccagggctccaaagaactcgctgggagtgtccactcgccttccaccagcatggcaacgtcttcacagtaccgccagctgctca

SEQ ID NO: 315840 - DNA, 74 bp, Homo sapiens
ctgggctgtctggaaatctgagagagaagaagaaggaggttcctgctgtgccagaaacccttaagaaaaagcga

SEQ ID NO: 315841 - DNA, 100 bp, Homo sapiens
cccatgggccggacatctactgggtcagcttcatcctcggcggcggtggccgctagctccaaggaagtgggctcgggatgagtttgaaggcctcttcaag

SEQ ID NO: 315842 - DNA, 75 bp, Homo sapiens
aatgactaatcaagagtctgccgtacatgtgaaaatgaataatgcatatactgccatgtcagattcctacttacc

SEQ ID NO: 315843 - DNA, 50 bp, Homo sapiens
agcagttccacaaagccagccaggaggtgctaatgatgctggataactat

SEQ ID NO: 315844 - DNA, 116 bp, Homo sapiens
caagtaagtggatcacacgcgccggctgctgctactactaccactttgggctgatggcaactggtctcctctgagcctccggcctccataagacccaaaacagatgacacctcttc

SEQ ID NO: 315845 - DNA, 60 bp, Homo sapiens
gcctgacacatatggactgctcgacagataagcatggattcctggttcattcttgttctg

SEQ ID NO: 315846 - DNA, 90 bp, Homo sapiens
gggctggtgaaaaggaagccacaggcctggaccgagaggagcggaagctgctgctggaccctagcagcccccctaccaaagctctcaatg

SEQ ID NO: 315847 - DNA, 100 bp, Homo sapiens
agaaaatgaaaccagcagacagaatttgtcaggcaccacaaggccacataaggagggtgaggtccctggagtggattatattttcatcactgttgaagat

SEQ ID NO: 315848 - DNA, 90 bp, Homo sapiens
agttgctgtacgagagcaagctctataagattcttcaaggtggggttggcatcccccacatacggtttggacatatttgactcttttccc

SEQ ID NO: 315849 - DNA, 74 bp, Homo sapiens
aattggagtcctccacacatgcttgtaaaataaaggcagagactccccctaatgggccagattgtggctatggc

SEQ ID NO: 315850 - DNA, 98 bp, Homo sapiens
cgtgaacggggtcctcttctgcaaggtccggctgctggatggaggggattttgtcagcttgtcgtcaagggctacttggtgaattgggatgttcagag

SEQ ID NO: 315851 - DNA, 82 bp, Homo sapiens
aaacagcccgcccgaccccgtcccgaccctggccgccccgagcggagcctggagctgggattctgtccctgaccgtcttcac

SEQ ID NO: 315852 - DNA, 74 bp, Homo sapiens
agttaaccggtgtaggagaagaaatccgcagaagcttattaaagttaagaaacgactcaaattattggtatgag

SEQ ID NO: 315853 - DNA, 100 bp, Homo sapiens
gtaagtaatgaaaagagacatgaagaattggtatttcaaatgaccaccatgttgcaaaagtatcaccttttgccatgatagcatttctttcattggacag

SEQ ID NO: 315854 - DNA, 90 bp, Homo sapiens
tggaagcgccgcgaagtctttcgcaagtcaggggccacctgtggacgctcagacacctattaccagagggcagctgcaatgactctccgc

SEQ ID NO: 315855 - DNA, 50 bp, Homo sapiens
gcagcctccagctagcactggacaggtttgaggaaccactggccaacctg

SEQ ID NO: 315856 - DNA, 75 bp, Homo sapiens
tggtgcagggtagcctctatctggcgccttctgcggcaggcggacagatcctcggcgcggcagggccggggcaag

SEQ ID NO: 315857 - DNA, 100 bp, Homo sapiens
cgccatctgcagggtccaggtgatggggttttttgattaactcaaaaccagagaatgcctgtgaacccatagtgcctccaccagtaaaagacaattcatc

SEQ ID NO: 315858 - DNA, 98 bp, Homo sapiens
tttcctaccatctaaaatacgaaggtttctggctgggctgcctttaatattggttgggaacaaatctgatctggtggaatatagtagtatggagacca

SEQ ID NO: 315859 - DNA, 75 bp, Homo sapiens
ttagaagtgcttaaggaagagtgatgaagtttgaaggatgacctctaggaagaaagtgttgctgaaggttatcat

SEQ ID NO: 315860 - DNA, 75 bp, Homo sapiens
ttttcctatggattctagtaacggaaactgtagaggggcaagcagtgtgctgggcctaaaggagataacatttat

SEQ ID NO: 315861 - DNA, 96 bp, Homo sapiens
ccagcccagcgattctcagtcagattcctacgagaagcaacaggcacaaggctctggtcggaaaaaattactgtcttctactctaattcctccgct

SEQ ID NO: 315862 - DNA, 100 bp, Homo sapiens
tcaacggcaaagttttgcagatcttcaacaagaggacccaggagaaattcgccctcaaagtgaccagaagtcagcagcttcccagaagccccgaagccgg

SEQ ID NO: 315863 - DNA, 75 bp, Homo sapiens
ctgctggggtgcaggagaggagaactgccagaaacaacatctaaatatattgctgtttgggttagcacaaaacct

SEQ ID NO: 315864 - DNA, 75 bp, Homo sapiens
atgaaatcatgtgatgacgaagatgattacagtttaagatcaaagacacagctctccccttctatcaagcgcaag

SEQ ID NO: 315865 - DNA, 96 bp, Homo sapiens
tcatcatgatggacttggagctgccgccgccgggactcccgtcccagcagacaatgcagatcttcgtgaagactctgactggtaagaccatcaccc

SEQ ID NO: 315866 - DNA, 80 bp, Homo sapiens
atcctggtcatcttctatttccaaaatatttcagcagttgaatcagttgaattcacttcatcaagaaactatcatgaaat

SEQ ID NO: 315867 - DNA, 82 bp, Homo sapiens
ctccggcccctgctcggggatagacagtatatcagaaaattctacacagcatggaggagcaggacttggagcgaaggttcga

SEQ ID NO: 315868 - DNA, 50 bp, Homo sapiens
cggcttgtagagagattgcagtttctgagtcccttcaacatgatcctggg

SEQ ID NO: 315869 - DNA, 98 bp, Homo sapiens
cgctggctccgggtgacagccgcgcgcctcggccagaaagccaaacttggccctgctggcaacaaagtcatcagtccctctgaagacaggaaacaacc

SEQ ID NO: 315870 - DNA, 82 bp, Homo sapiens
tcgagtatctggtgaagtggaaaggatggcccccaaagttatggaaacaaaggacatgctttacatcgtcactgaatttgct

SEQ ID NO: 315871 - DNA, 129 bp, Homo sapiens
tcttccctgggctggtgaagtacatgaactcagggccggttgtggccatggtctctgcaatgaaatgtggcctcttgccaatctccccggaggcgctttcccttggagaagtggcttatcatgactacc

SEQ ID NO: 315872 - DNA, 50 bp, Homo sapiens
ggagatcgagaggaaataatgagtacataccgagcatcaaatattaaggc

SEQ ID NO: 315873 - DNA, 75 bp, Homo sapiens
ggagaagggatggaaatacttcaacaaggagttggcctgggccctgccctggagttttgtattgctgtcaacccc

SEQ ID NO: 315874 - DNA, 101 bp, Homo sapiens
acactttctgaagctcatgaagactgtgtaaataatatcagaatcggtcgaggtggacggtttggccgtaaaggtgtggctattaacatggtgacagaaga

SEQ ID NO: 315875 - DNA, 100 bp, Homo sapiens
tacttcttcctcaacaccagcaccgcagatgttgtcaaggtggcctaccaggaggccaggggtgtcgccatggtgcccctgggcgctgggattgctctag

SEQ ID NO: 315876 - DNA, 74 bp, Homo sapiens
agaaattggcaagctgctactacagcatgggggctgcaaggtgtgactgttgtaaatctcaaggaactcttaaa

SEQ ID NO: 315877 - DNA, 98 bp, Homo sapiens
gcattggggagtggcattgccaacctttacagacctatccaacaaagtggaagatgctttctacaaaggtgaactcaggctgaatgaggaaaaattat

SEQ ID NO: 315878 - DNA, 98 bp, Homo sapiens
gccggatatttaccaggtgtcctacttctcatttaagctactcaagaaagagtgcccaattccaaatgtacaggttatggatgatgaatcagatgaaa

SEQ ID NO: 315879 - DNA, 74 bp, Homo sapiens
tggcgacctgcatcggggagaagatcgagagcaaacatgaacgttggagttgcccacagtgaagtgaatccaaa

SEQ ID NO: 315880 - DNA, 75 bp, Homo sapiens
gaggcaagttatcctttggaaatgtgctcacactccgagcctcttgaagccattcttacagatgatgaaccagac

SEQ ID NO: 315881 - DNA, 100 bp, Homo sapiens
ggatgacttctcagcgttcccctctggcgcctttgctgctcctctctctgcacgggaatgaccctgcataaaaaggcagctgaagatagactggcaagca

SEQ ID NO: 315882 - DNA, 82 bp, Homo sapiens
aggcaacgacgttccatctgtggaaggacctaccaaccaggtacgcagacagcacatggaaagatgcctgcatttcttggtg

SEQ ID NO: 315883 - DNA, 95 bp, Homo sapiens
gattcctttcttggcaactggaggtcaaggcgaatatttaacttatatctgcctgtcaggtaccaggatcatctatgaccggaaattcctgatgg

SEQ ID NO: 315884 - DNA, 100 bp, Homo sapiens
gctcacattccagcctacttacaagtatgatacgggctctgacgactgggataccagaatggcatttacatgttcattttgtaaatttcgaacatttgaa

SEQ ID NO: 315885 - DNA, 90 bp, Homo sapiens
cgcgcctggacgccgctgacggccccgagcacggccgcccggccacgaggctgacccgcggctgattgagtccctctcccagatgctgtc

SEQ ID NO: 315886 - DNA, 101 bp, Homo sapiens
acttgcaaaagcttgtgaactctgtccagaggaggttacaagtgaacctgaaatgattggagctgaagttatttcagagttcttaattaatggcgaagaat

SEQ ID NO: 315887 - DNA, 100 bp, Homo sapiens
gaccgtgaccgagagcgtgaccgagagcgcgaatatcgtcatcgttagaaggtacatggacgcactggaacacgcgtacccaggaatacctgtatccgtc

SEQ ID NO: 315888 - DNA, 75 bp, Homo sapiens
ggaagccacgtgcagacatctacaaccttcgatctcctgacgacttgctgatgaccgtatggcactggtgtcagg

SEQ ID NO: 315889 - DNA, 100 bp, Homo sapiens
tagcaaaccgtttgcggaggtacggatactcagttgtggagagctgattcccaaatctaaaggaggaatgccagctcctgagcaggcctcattggtggag

SEQ ID NO: 315890 - DNA, 78 bp, Homo sapiens
agctcccctcacccaacgtcgtgaaagaccacagcaagattctttcattcgtctcctcctagcctgggggaccaggct

SEQ ID NO: 315891 - DNA, 98 bp, Homo sapiens
ggagtgtatgaccacaaacagccatcaaggctgcatgttaaatggccaagaggtgaggcttactattcactatgaaaatgggttcaccatctcaaggg

SEQ ID NO: 315892 - DNA, 102 bp, Homo sapiens
ctttgtcatctcaatggctggggaaggtgctcaattcccatacatgcactagaggataactgggatgacgatgatgatgaaaaaaaagaggaagcagaagta

SEQ ID NO: 315893 - DNA, 100 bp, Homo sapiens
cgctgctactgcctgggggctgaggatgacaaaaaagccttcataggatttcaaatatgcgtgcattagagaatgattttttcaattctcccccaagaaa

SEQ ID NO: 315894 - DNA, 97 bp, Homo sapiens
catgtcctcaactttctgggcgttcatgatcctggccagcctgctcatcgcctactgcagaagcggggagaggtggtgagagatgacccctgttgag

SEQ ID NO: 315895 - DNA, 96 bp, Homo sapiens
attttttgaacctaaaatactttacagggcagcaggagagaaggatattcctggactgactgatactacagtgcctcgccgcctgggccccaaaag

SEQ ID NO: 315896 - DNA, 50 bp, Homo sapiens
gaaacacctaggaagggagaactggatcgaatcatcaatttagttgttgg

SEQ ID NO: 315897 - DNA, 74 bp, Homo sapiens
atgtcgagggaatgcagaaagagttaaggaaggcagtactatactggcaattgctggagaagattttgcaattg

SEQ ID NO: 315898 - DNA, 100 bp, Homo sapiens
aaaagagccctggaatatgaagcaacatgagatggtggatgaacccacaggtaaactttggagtcggagtttaaaactagcttatactctacttaataaa

SEQ ID NO: 315899 - DNA, 50 bp, Homo sapiens
aagaattcatagatttcagtgatacagtggatcaatcttcctgtcctaca

SEQ ID NO: 315900 - DNA, 100 bp, Homo sapiens
tttcctggcacaggagacttgaggaatccagactccaaaatgatgcaaatcaacctgactggatttttgaatggaaaaaatgctcgagaatttatgggag

SEQ ID NO: 315901 - DNA, 101 bp, Homo sapiens
ctgagacatgagatcttcagcctccaggctctccagtttttcgtcgagagattcactatggaatcgacactcgcctatggggacatgaaccacgagtggat

SEQ ID NO: 315902 - DNA, 100 bp, Homo sapiens
tgtttacctgaaacttctcatgcatgagacgcagcctccatctcatttctccgtcagcacaataaccaggtgtaccttcagttgaatttttagaatctcc

SEQ ID NO: 315903 - DNA, 100 bp, Homo sapiens
gcaggtgtgcggcccagtccgagacagcagcattgtgatgaccacctgctccaccttctgtgcccttggcatgatgcctctcctcctgtacatctactcc

SEQ ID NO: 315904 - DNA, 60 bp, Homo sapiens
aggaccctgcggactactgcaaaggacgctgtgcagagctgcaagtccgtatcactgagg

SEQ ID NO: 315905 - DNA, 73 bp, Homo sapiens
gcttagtgaatatgatcaagttctcgtggagtcagacaatgagataaccatgatgactacacagacttctact

SEQ ID NO: 315906 - DNA, 100 bp, Homo sapiens
gttccatccaaactcttgccctttgagggaccaggcagcagaacttgctgaattcactgccaagattgcacttctagaggaagccaagaagaaaaaggaa

SEQ ID NO: 315907 - DNA, 90 bp, Homo sapiens
tccaatactaagtttgtggcattggctagtaatgagaaatgggcatacaacaattcagctggaacagatggtgatcaaaatggacttgat

SEQ ID NO: 315908 - DNA, 90 bp, Homo sapiens
aagaaatataatgacacagcagaaggactccttcgaaatggaagagatattgtcagcatgtgctttgtgaaactgttcgaactgccaaac

SEQ ID NO: 315909 - DNA, 75 bp, Homo sapiens
ccgcgaaccaacggttagcggtggcaggggctgactgagagcgtctgcttggcgaggattaaatccaccacacag

SEQ ID NO: 315910 - DNA, 100 bp, Homo sapiens
aaaatacgaaggtttctggctgggaatgggtaccacagaccatgtcatcgtcctggcgtccacgaaccgagctgacattttggacggtgctctgatgagg

SEQ ID NO: 315911 - DNA, 75 bp, Homo sapiens
gcactgacacgtttacccacttgaaacaggaatggaagttggatacactttgtgacttgtacgagacactgacca

SEQ ID NO: 315912 - DNA, 90 bp, Homo sapiens
tgagtatagaggtcccgtcaccttcccaggtttgtggtaaatatgccagctctagaacacatgaatcagattttacacatcttgtttgta

SEQ ID NO: 315913 - DNA, 74 bp, Homo sapiens
cgcaaagatattcaaactctaaaccatctgaattggctcaatgatgagtttgacaagtatgcgcccaagctgga

SEQ ID NO: 315914 - DNA, 100 bp, Homo sapiens
tcctgcgcatcgtctgcaagaccgcgaggcgagacctcttgaaactactttgcttcgcactttttcatgggaggagagaaattcgacaccccccaccctg

SEQ ID NO: 315915 - DNA, 74 bp, Homo sapiens
tttcccaagaccaaattaatggctgtgaacccaggcaggtccctgttcctgctatacgccctcaagagctcccc

SEQ ID NO: 315916 - DNA, 74 bp, Homo sapiens
gaggctgggaagaaggggttgcccagatatggatcagaaactttcgaagttggtagaagagctcacaacttcag

SEQ ID NO: 315917 - DNA, 71 bp, Homo sapiens
gggcttggcttccggctccccccatctggctggaacacacatcagtcacatgcctgtgaggagccaccaac

SEQ ID NO: 315918 - DNA, 110 bp, Homo sapiens
cacccgggcacacaaaaaacgggtcgcccgcgattctcagggattgatcgcctcttcagacaatgcagatcttcgtgaagactctgactggtaagaccatcaccctcgag

SEQ ID NO: 315919 - DNA, 50 bp, Homo sapiens
agctccattgaagccagccatgatcaggggtttgttaaagttgttaagaa

SEQ ID NO: 315920 - DNA, 50 bp, Homo sapiens
tttgggagctgagcgaccagaaacagacagggtctccctgtcacccaggc

SEQ ID NO: 315921 - DNA, 100 bp, Homo sapiens
ggcggcgacggcggcaaatctaagaaatttctgctgtgacttactcgaagcctcgattggccacattttggtactacgccaaggttgagctggttcctcc

SEQ ID NO: 315922 - DNA, 96 bp, Homo sapiens
gagccagtacatcaagttcatcagcgagactctgcggcgcatggaggaggaggaggcagcaagagcaactcaccaccagccttgggcccagaagca

SEQ ID NO: 315923 - DNA, 76 bp, Homo sapiens
gttcagcagtacagtcttcatcttttgaaaggtactccaaagattcaggtttactcacgtcatccagcagagaatg

SEQ ID NO: 315924 - DNA, 82 bp, Homo sapiens
gaaatttggagtgtgcgtgcgcgccgagcgatataacacgtgggaaccggaggagaacatcctggaccccaggctgctgatc

SEQ ID NO: 315925 - DNA, 99 bp, Homo sapiens
gccggccttcgggtcgggcgtctccgccggctactgccgcttcagttctcccggtgtggccacgagtcggcctatgaccttctactttggctttaagaa

SEQ ID NO: 315926 - DNA, 75 bp, Homo sapiens
atgggataccaagtctcccaacaacagagacagacaccagagaagcctatgatgacaagcaggtggtcacagaga

SEQ ID NO: 315927 - DNA, 95 bp, Homo sapiens
gcttgggcttgcgccgttgaagcctgcggcgagagggctacaccgtgcaggtgaacgtgaacgactatctggatatttactgcccgcactacaac

SEQ ID NO: 315928 - DNA, 100 bp, Homo sapiens
atgaaatttgctctgctaaaaggctccttcagtgagcaaggcatcaacgagtttctcaggtatggaattggcaattggacaaatgtatctttctacgagg

SEQ ID NO: 315929 - DNA, 51 bp, Homo sapiens
agagcgcgaatatcgtcatcgttagaaggaaagtccatcagcttgataatg

SEQ ID NO: 315930 - DNA, 49 bp, Homo sapiens
gcttgaaatgctacatttccaaggtgctgctgcaggtcctgattatcat

SEQ ID NO: 315931 - DNA, 100 bp, Homo sapiens
cgggggcgctaaagtcgcaggggcagggcgggaaggaagatccggcgcggggcacaggatccggagctggagcccccagcttcccccacgccacgagcca

SEQ ID NO: 315932 - DNA, 100 bp, Homo sapiens
cttgggcccagtttatggcttccagtggaggcattttggggcagaatacagagatatggaatcaggttacaggaggttccagtggcatcgggaagtgcat

SEQ ID NO: 315933 - DNA, 100 bp, Homo sapiens
tcagaatggtttgcaaagtatttgcaatcatcagcagctgcatgttgggtctccagaaatgctttgggttcatctttcattgctgcaaggaacttccatg

SEQ ID NO: 315934 - DNA, 100 bp, Homo sapiens
ttagatattccaagtcagttcagaagtaagcgctctaagaatcaagaaaatggaccagtttgttcgttacgaggaaatggtgttcacactggccctgaat

SEQ ID NO: 315935 - DNA, 90 bp, Homo sapiens
aaagcgcagaaatgttggatttgaagactttgcctcccgggccaaactggcagttcaaaaactagtacagaaagttggattttttggaat

SEQ ID NO: 315936 - DNA, 75 bp, Homo sapiens
gatgcaatggatgttcagcagctttcacaaatagtaccaaagggcggcgactggcggcgcgatggacctgaccgg

SEQ ID NO: 315937 - DNA, 75 bp, Homo sapiens
aaatccttattccccaaatccaccagctgaagtaaggcctatggcatgtctgcgttacctttaaatctgataaaa

SEQ ID NO: 315938 - DNA, 106 bp, Homo sapiens
gaaatctacattcagctacagcgagaataccagatttctgcaggggacttccctgaggtcaaggctatgcaggatgaagatgtgaattactgtattttaaagaaac

SEQ ID NO: 315939 - DNA, 100 bp, Homo sapiens
cactgcctcccccaccaccgcctcatctgtatcctaatacacagtatggaagaaatgctttagaaattgtcatgaaatccattgtaaacttggattctcc

SEQ ID NO: 315940 - DNA, 75 bp, Homo sapiens
agacacggtggaaacgcttatgctaaagattccaggcttcaagatcagaggcagaactctcctgcagggaataaa

SEQ ID NO: 315941 - DNA, 50 bp, Homo sapiens
gtcctcgcttgcagttcagcgaccacggaggaagtgaggaaggcagcccc

SEQ ID NO: 315942 - DNA, 98 bp, Homo sapiens
ttccccagagctcctcaagaataacggaagggaggggacaagcaggccttcgcactatcacgtcctctgggacgacaatcgtttctcctctgatgagc

SEQ ID NO: 315943 - DNA, 90 bp, Homo sapiens
gacagttgaagacatggtgaaaaagaacctgcccccggctagcagcccagggagcttgaagaaatccgcaaatgtgggatgaaaaacttc

SEQ ID NO: 315944 - DNA, 82 bp, Homo sapiens
agaaacgcctggtgcagagccccaattcctacttcatggatgtgaaatgcccagatcgagggcacccagaaactgctcaaca

SEQ ID NO: 315945 - DNA, 119 bp, Homo sapiens
cgcgccgcttaggagggagagcccacccgcgccaggaggccgaacgcggactcgccacccgggaacttagtgatttggcccgtgaccctccagcacaatgttctgcaggtccagttggg

SEQ ID NO: 315946 - DNA, 97 bp, Homo sapiens
aacaccacagtactatcgtctatcattggatgaagtggctccggagatcaaaagtactttgactcaggagactacaacatggccaaagccaagatga

SEQ ID NO: 315947 - DNA, 50 bp, Homo sapiens
ggttttcttcaggcagagggtctcttcagtcgaggggagctgcagcggga

SEQ ID NO: 315948 - DNA, 75 bp, Homo sapiens
tcttccagagcgtgaagatcaagatcgatggagttttaacattgaatgcggagaacactaattatgcctatcaag

SEQ ID NO: 315949 - DNA, 74 bp, Homo sapiens
tcgctgtgagacatgtctgagactcctgctcagtgtagcattaagtaagactttgaccccgacgcaggcttcag

SEQ ID NO: 315950 - DNA, 80 bp, Homo sapiens
atgatggtcacttcatgcctgtcctgggatttggcacctatgcgcctgcagaggatgataatgaagataattcaaatgat

SEQ ID NO: 315951 - DNA, 101 bp, Homo sapiens
gggatccgacttgccggcagaacttacgctgcgggaccccgggcactgttgctgctgcgggagaatcctaatgtacctggctagctggtggtgagtagggg

SEQ ID NO: 315952 - DNA, 99 bp, Homo sapiens
cgatatatgttctctaggccttttagaaaacatgaaaagcacttggttctgcttcgagatggaaggacacttataggctttttaagaagcattgatcaa

SEQ ID NO: 315953 - DNA, 82 bp, Homo sapiens
tttggatgtagcaaggaagaaattgttcagttcttctcagaatgcagccaatcggggcttaaaagccagcgagtgggtgcag

SEQ ID NO: 315954 - DNA, 100 bp, Homo sapiens
agttggcattcatcattttctaatcatcagcatttacatgacagaaatcacctatgtttacagcgacaggtgtccttcttcacatcattatggaatcacc

SEQ ID NO: 315955 - DNA, 83 bp, Homo sapiens
ccccaatttagtgggggtagccccttccagataggtgcagatggtcacaactccggagtacggcaggctgttggaatccagaa

SEQ ID NO: 315956 - DNA, 97 bp, Homo sapiens
ccaaaatgacagagctctaccagtctttaggaatctaggtaaaaatggcttatctaacagtagcattttgttggataaatgtccacctccaagacca

SEQ ID NO: 315957 - DNA, 70 bp, Homo sapiens
gacgtacttgacctgtggaccctgatgcaggacagccagcaagtgcggaggcaagacacatcaaagcaga

SEQ ID NO: 315958 - DNA, 75 bp, Homo sapiens
tatacacaggaagtctccacttccaagatctaggaagacggctacaaatgatgctttcattaaagatagaaccag

SEQ ID NO: 315959 - DNA, 100 bp, Homo sapiens
ccatgggactctacctggggatatacatgcatgcaccaaaacgaggacagatgtcactaatgatgaccattatcaatttggctcagaattttgtgggtag

SEQ ID NO: 315960 - DNA, 74 bp, Homo sapiens
tttttctcatggatgttcttcttcgagtatttgtagaaggatcgaaattgcccagaagcatcctgatatctatg

SEQ ID NO: 315961 - DNA, 100 bp, Homo sapiens
agctcctcctggaaaaagcaagctgaagacatcaagaagatcttcgagttcaaagagaccctcggaaccttctaagtgccagatgatggaggagcgtgcc

SEQ ID NO: 315962 - DNA, 100 bp, Homo sapiens
cgatttcctccgcctcttccaaagcgggaggagctttatctttatatactgcccttaccacacagcagaaactggcaggtgtcactgcactcagttgctg

SEQ ID NO: 315963 - DNA, 90 bp, Homo sapiens
cacggtgcaccggaccctgccagagtgtgaacatggctacgcctcttcattcccgtccatgccgagcccccgactgcagcattcaaagcc

SEQ ID NO: 315964 - DNA, 101 bp, Homo sapiens
agtgagacttttggcaaagacatgcgcaagcctctacggcagacacatgcaggccaacccagaaccaccgaagaagaataatgacaaatcgaaaaagatca

SEQ ID NO: 315965 - DNA, 122 bp, Homo sapiens
gtggttacaaccgcagcagtggtggctatgaacccagaggtcgtggaggtggccgtggaggcagaggtggcatgggattcatgatgttgctatcaaaagttgagaaattgtcagaagaaatc

SEQ ID NO: 315966 - DNA, 51 bp, Homo sapiens
tgtctactgctatgcagaatgaacggatttggtgctatggagaaatttttg

SEQ ID NO: 315967 - DNA, 74 bp, Homo sapiens
ggtgctcgagtgcctgcaggatgtgagggaggctcagaacgcccagcagctccatgaacgaatccagtcctcga

SEQ ID NO: 315968 - DNA, 100 bp, Homo sapiens
gcctctgcttcggcgtcggagtcatcctcggctccctgctgggcgggaccctggtctccgcgtacgggatggcatcaggcagggcacgctgcacccgaaa

SEQ ID NO: 315969 - DNA, 75 bp, Homo sapiens
gcatcgagaaagcccggccctactatgaggctcggcggctggctaaggagagcagccagcggcggacaatccttg

SEQ ID NO: 315970 - DNA, 90 bp, Homo sapiens
agaggaggcagtggccctggtggaagacttgcagaaagaacctggaagacagaggctggagatggagtccactttctcatccaggctgga

SEQ ID NO: 315971 - DNA, 97 bp, Homo sapiens
gctgcaagccggtgcagcagccttcagcttttggcagcatgaaagttagcagtcactgcagccagaggggtccagaagagagaggaggcactgcctc

SEQ ID NO: 315972 - DNA, 82 bp, Homo sapiens
agacatggcggacggcagcggctggcagctcaccatggatgatgatatcgccgcgctcgtcgtcgacaacggctccggcatg

SEQ ID NO: 315973 - DNA, 100 bp, Homo sapiens
gataaatcccaaacttcttaacccctagaccggtttttagtccattgactatgcagcctaatgagatccagttgtcatcggtatccaggaagctctcctc

SEQ ID NO: 315974 - DNA, 74 bp, Homo sapiens
ctgtggtaggaattggaaagcatctgtgtggtatggcaacaggaccctgatgctcccataagacagaaaatgcc

SEQ ID NO: 315975 - DNA, 100 bp, Homo sapiens
ctcctccaacaaatccctcaacttgctaaaaatcaagaacttgctactaccagcaccatgccctaccaatatccagcactgaccccggagcagaagaagg

SEQ ID NO: 315976 - DNA, 97 bp, Homo sapiens
aacaaaagattttcgagcctctctagaaaatggtgttctgctgtgtgactcttcttggatccctcgtggaaactacatagaatctaatcgtgatgac

SEQ ID NO: 315977 - DNA, 83 bp, Homo sapiens
ctgaacttataatcgtcactggattgtatttctgggaaaagccagcttctgtttgcactggtcttcacaactcgttacctgga

SEQ ID NO: 315978 - DNA, 102 bp, Homo sapiens
aggacttgagtaacagcaacatgaataatccagaatggctactctgatctatgttgataaggaaaatggagaaccaggcacccgtgtggttgctaaggatgg

SEQ ID NO: 315979 - DNA, 82 bp, Homo sapiens
ctcggcctcgcggcgacggcggcggtggcggcttggacgactcggagagccgattgacttgatgcacaacatcacaaaggcg

SEQ ID NO: 315980 - DNA, 51 bp, Homo sapiens
cggagagaacacgagcccatcaggaatatattaaaggaatctgtgaacctg

SEQ ID NO: 315981 - DNA, 100 bp, Homo sapiens
agacccaggagaagccgcccaaagaactggtaagaagagttcctgggtcaagtggtcaccttcataaaaccgaagacggggactgggagtggagtgacga

SEQ ID NO: 315982 - DNA, 100 bp, Homo sapiens
atttggggtctacctcctgtggtttttgattcaagtcctgttctacctactgccaattggaaagggaggagagagcgatggcttttttcacccagaaggc

SEQ ID NO: 315983 - DNA, 50 bp, Homo sapiens
ggaaaatgccaacgccgtgtctgaaggaggagatgttaaagtaacccatc

SEQ ID NO: 315984 - DNA, 100 bp, Homo sapiens
gaggagcgcagcccggcctcgtacgaggatgtcgtccaggaaagattgtgcagatgactgaagcagaagttcgaggcttatgtatcaagtctcgggagat

SEQ ID NO: 315985 - DNA, 90 bp, Homo sapiens
tcggggccggctgaccaggaacctgggcgagcagcggcgggggcccgagggaaaaccagtctatccaagaccaggcacctatgttggaag

SEQ ID NO: 315986 - DNA, 75 bp, Homo sapiens
tgaagggcccgaatgacgccctgctgcggtggcccttcaaccagaaggctatcttagcggcacagagacgaggag

SEQ ID NO: 315987 - DNA, 100 bp, Homo sapiens
tttgaccatcagtctgtgacctgccccttctctttacaccttctctgatggatgacctctgtgaagcaaatggcacttttgccatcagcttatttaaaat

SEQ ID NO: 315988 - DNA, 83 bp, Homo sapiens
ctggaggtgatcaagggagaccatgaatttactgactacatgatacggtccaatgagagagactctgacctgtttttgttgga

SEQ ID NO: 315989 - DNA, 74 bp, Homo sapiens
gctgagtggtttttcggatcatgtctggtggctccgcggattataacagaatgttggctaccagggtatttagc

SEQ ID NO: 315990 - DNA, 100 bp, Homo sapiens
gcgggcccttgaagtcttcaagcagcagagacaagagagacacctccaacttcgacaaagagttcaccagacagcctgtggaactgacccccactgataa

SEQ ID NO: 315991 - DNA, 98 bp, Homo sapiens
gggcctcccggtgtcctcgggatatcgccaatgtgatgcagaggctgcaaggtctccgaattcaatcctttgacgttcaccagcgtgatcgaatgcga

SEQ ID NO: 315992 - DNA, 75 bp, Homo sapiens
cgggtggtcaccgagaagtccccgaccgactggatcaccattaacaaggacaccaaggtacccaatgcctgttta

SEQ ID NO: 315993 - DNA, 74 bp, Homo sapiens
ctgccatcttagtctagggactgaggagtcgccgccgccccgagtcccgtcgcaatgtatctgctgagcaaaaa

SEQ ID NO: 315994 - DNA, 73 bp, Homo sapiens
aaccagctgctcctgcccctgctgcagaaggtggtcttctgccctgttaaagaagccctggaggtggactgga

SEQ ID NO: 315995 - DNA, 73 bp, Homo sapiens
tttagggtcctttatatagaagggagagtaggccatggcccaaaaggaagatatggaagagagaatcactact

SEQ ID NO: 315996 - DNA, 75 bp, Homo sapiens
accacatggaaatgaattctaaggcaggtaaagtgaggaaacatgcaactgaacaggaaaaaactgaagagggat

SEQ ID NO: 315997 - DNA, 50 bp, Homo sapiens
gttcaagaagaacactccagaggcgtgcaatggaattgagttttgccctg

SEQ ID NO: 315998 - DNA, 90 bp, Homo sapiens
tgggagtgcagcggcctctcctacaggctcgcaggaaggaggtatttatccaggaacggtatgggagatttaatctaaatgacccgttcc

SEQ ID NO: 315999 - DNA, 75 bp, Homo sapiens
aagaccacactgtcagacagaaagaggaagtatctccaggggtgagcttatggaaccaaggaagagctgatgaag

SEQ ID NO: 316000 - DNA, 100 bp, Homo sapiens
ccgcgccgtgctggactccaccaacgccgacggtatcagcgccctgcaccagaacactctgctccagccaaggtggtgagggcagctgttcctaaacagc

SEQ ID NO: 316001 - DNA, 97 bp, Homo sapiens
ggcttccagagtggagaaatgtccactaacatggcttctgtgagagagaacatatgatgagctgttactgggagcagcccaggcccatggcctcacg

SEQ ID NO: 316002 - DNA, 96 bp, Homo sapiens
caaatgcacagccaagcctagcagctcgggcaaggatggtggaggcgagaacactgaggaggtgttgaaagacagagaagcgaagacagagacgtg

SEQ ID NO: 316003 - DNA, 75 bp, Homo sapiens
cagcttcggaacaagagaccctgggtttgtgtttagtgaatcagagggatctgcattagaacagtttgaaggtgg

SEQ ID NO: 316004 - DNA, 89 bp, Homo sapiens
tggaggaggaccaggtggtggccgtgttcgtggtcaccttcgacccccgctcggggaaatcctcattgacgattcaatttgttgaaggc

SEQ ID NO: 316005 - DNA, 75 bp, Homo sapiens
tagcaagcggctctcctcttcatctgcaactttactaaattctccagatagagcatgacgacagagatgatggtg

SEQ ID NO: 316006 - DNA, 50 bp, Homo sapiens
gacgttttagcatttcttactggccagtgtaaacaggaacatcgataagt

SEQ ID NO: 316007 - DNA, 75 bp, Homo sapiens
aaaaggccctcttcaagcctggaatttttgagagatatcttcaatctcctgtttttgttgccaagtctaaaggac

SEQ ID NO: 316008 - DNA, 100 bp, Homo sapiens
tccaaaaacgtttttcctgataactggaaagttcctcaagatggagactttgactttcggggatctgatgagcttctttcttctggcatcattaacggac

SEQ ID NO: 316009 - DNA, 75 bp, Homo sapiens
ctctgttccaaatgctttgctgcaagtgaattcatggtattttacttttttgggaaatactggaaatgaagacct

SEQ ID NO: 316010 - DNA, 75 bp, Homo sapiens
aaaaagtctcttaaaagccgtaattgtggcgagagtccatcccgatccggctcttcctggccgggtatgagctca

SEQ ID NO: 316011 - DNA, 100 bp, Homo sapiens
gcaaataaattcaacaagaagagaaaattccagccagatggtagaagcgatgttcgccgtgtcccaccaagattctctatcccacccactaatcatgaaa

SEQ ID NO: 316012 - DNA, 80 bp, Homo sapiens
cgtctgcggaagtgcagctgcctcagttcttagcgcagatgctgggctcttgcactgtttggtggaaatggtgagacagg

SEQ ID NO: 316013 - DNA, 50 bp, Homo sapiens
gtgactaccctggttacctcatatttcacacaaaagatgttggacaattt

SEQ ID NO: 316014 - DNA, 101 bp, Homo sapiens
gctaccgcagccatgaagaaccaggttgcaagatttaatgacctcaggtttgtcggtcgaagtggaagaggctattcaagatctctggcagtggaggaagt

SEQ ID NO: 316015 - DNA, 50 bp, Homo sapiens
aaagtatcgtcgagaagcctatcatcgtttttgaagagcctgaagatccc

SEQ ID NO: 316016 - DNA, 109 bp, Homo sapiens
ggtggcgccgcgctgctcctgctgctcatcccggtggccgccgcgcaggagcctcccggagctggtgtcatggagaaactccagctgggcccagagattctgcagcggg

SEQ ID NO: 316017 - DNA, 90 bp, Homo sapiens
gtttgatatcaccaaactggaggatgcctatgtattccctggggatggcgcatcacacaccaaagctgttctccatagtggtgttcggct

SEQ ID NO: 316018 - DNA, 76 bp, Homo sapiens
ctggactacagctgagattgagaactgcttcataatcctcagtgccctacgagacgctgaacaaacgctttcgcgc

SEQ ID NO: 316019 - DNA, 74 bp, Homo sapiens
gcagcttcaagcttaggaccacccaccatgcctatccaggtggccactaacacggacaccagccgaaatgccgg

SEQ ID NO: 316020 - DNA, 98 bp, Homo sapiens
ctgcaggccccatcccttcccagaaagaagaggaaatgactgagtcccagattgcaaatagaagagtcttccaaaccagtgaggctatcacaacagct

SEQ ID NO: 316021 - DNA, 101 bp, Homo sapiens
aaccaagttccaacaaaagaatgctgccgcagcggggctcattccaccggatgccaccctctacttcgatgtggttctgctggatgtgtggaacaaggaag

SEQ ID NO: 316022 - DNA, 50 bp, Homo sapiens
atcattgatgtggtgcgatcgatttatgtgatcagtttggctgaaccccg

SEQ ID NO: 316023 - DNA, 88 bp, Homo sapiens
aatcagcagatgtgtacggatgaaaatacagttgctgatcatctgggctgtgatccacaaacccggttctttgtccctcctaatatca

SEQ ID NO: 316024 - DNA, 82 bp, Homo sapiens
cgcgtgttccaagaactgcctgtgcgccctcaacctgctttacaccaggctgacccgcggctgattgagtccctctcccaga

SEQ ID NO: 316025 - DNA, 75 bp, Homo sapiens
tctggaaagtacgaggagaatcctgggtttagccattgaggacttgatagacgacctgaagtcagaactgagtgg

SEQ ID NO: 316026 - DNA, 83 bp, Homo sapiens
cggaaggagctggagacggtcgtagctgcggtcgcgccgagaaagttacttacacattgggcatgcaaaagctgctcttctga

SEQ ID NO: 316027 - DNA, 49 bp, Homo sapiens
ccaaagtcaagcatgtgataaagcaggtgctggagaatctggtaaaagc

SEQ ID NO: 316028 - DNA, 97 bp, Homo sapiens
cacaaatgctccttctcctggagacgcaactcaaggatctagtgaaaagccatttgatgtatgcggtcagagaagaagtggaggtcctcaaagagca

SEQ ID NO: 316029 - DNA, 100 bp, Homo sapiens
ctctcccagcctggagcagccggaccagcccagaaggcagcggcggcccaggccagcattcccgcagttttgcacactagggaccaagaagccctcgggg

SEQ ID NO: 316030 - DNA, 83 bp, Homo sapiens
tcagccttgcccagtatctcatcaacgccagatacttgccagaactaatacagctgatgaaatacctgaccttttctgctcca

SEQ ID NO: 316031 - DNA, 98 bp, Homo sapiens
gtcaacgacctggcggtggggctgcggcgcctgggactgcaccgcaccgagggcgagctccaggaaagaccacagcaagattctttcattcgtctcct

SEQ ID NO: 316032 - DNA, 126 bp, Homo sapiens
aagagtcagactggggggccccgcgaggccctggaggctgccgagcgtgaggagactcagcagaaggtgcaggttgggcccgaaggcatcctgcagaacggggctgtggacgacagtgtagccaag

SEQ ID NO: 316033 - DNA, 76 bp, Homo sapiens
cgactaccaccgcagcgacgagcaggtgtgctggtgtctctaagcctttctgggccgcagctggagaaagtggtga

SEQ ID NO: 316034 - DNA, 83 bp, Homo sapiens
agaggatccagtgttcaccatcctggccccggaaggccctgggaggagcggggacactgaggacctctctccaaattggcctc

SEQ ID NO: 316035 - DNA, 73 bp, Homo sapiens
agaggaagccatggcgctccgagtcaccagggggtcttgttcctcgccttctaggtgacatcctttctttgtg

SEQ ID NO: 316036 - DNA, 75 bp, Homo sapiens
aggattcgttacagccagagattgcacccaactggtcagctaactttgatgtcccaatggaaacaacccacggtg

SEQ ID NO: 316037 - DNA, 96 bp, Homo sapiens
tgccttcctgttcacggtgaccttcgcttggtgtcctcctggcctcagcaacctgacaattctgtcgtgtcccgcccgcatcgccacatccctgga

SEQ ID NO: 316038 - DNA, 76 bp, Homo sapiens
gcaaatctgtttttgagcctgaagattcttcaatagtagataatgaggaattgaatgatctggcacgggaccctcc

SEQ ID NO: 316039 - DNA, 98 bp, Homo sapiens
gagggctgagcagtcaactcaaatgcaagtccaagaggaggaggaggcggaggtccaagcggaaaggagacagagcatgtggtatccagccagtcaga

SEQ ID NO: 316040 - DNA, 96 bp, Homo sapiens
ccgggcgcttagaacagaggcttgcacaggtggagtacaaaattggacagctgtacatgatcagcaaacacagccatgaacagagtgaccggggag

SEQ ID NO: 316041 - DNA, 100 bp, Homo sapiens
gtcgatcctgagagagaaatttataaaagattgggaatgaaaagaggtgaagaaattgcttcctcagggttaaagaagttgtactaaaagaagacctgga

SEQ ID NO: 316042 - DNA, 82 bp, Homo sapiens
aaggagctcagtgacctcctggacttcagcatggttttggctacgggcctccacctccaccgccagatcagtttgcccctcc

SEQ ID NO: 316043 - DNA, 100 bp, Homo sapiens
cagagcggagggagccccagacacggccaagactaaggggctgcagagcggggtggacattggcgtcaagtactcggagaagcaggagcggaatttcgac

SEQ ID NO: 316044 - DNA, 76 bp, Homo sapiens
ccaatgaactcatcagcagagatgaaaattccctgaccaggagcgcacccctccccaacgactcccaggcccgcag

SEQ ID NO: 316045 - DNA, 97 bp, Homo sapiens
gacatggagattctcttaaaaaggcaaaatacatatctcagtgcattgatgagatcaagcaggagctgaagcaggacaacatagcggtgaaggcgaa

SEQ ID NO: 316046 - DNA, 100 bp, Homo sapiens
gagctccaggtagaagctgcggaggtgtttcaggcctcacctgaagatcatgaaaaatacggtggggatccacagaaccctcataaactgcatattgtta

SEQ ID NO: 316047 - DNA, 75 bp, Homo sapiens
tccgttctctcaggctcccgttcaggtgtcgtgaaaactacccctaaaagccaaaatgggaaaggaaaagactca

SEQ ID NO: 316048 - DNA, 75 bp, Homo sapiens
tctgaccccaagaagaccaaaccatcccacggctccaagacttcccaagtaagaagcggaagaggagccgctgga

SEQ ID NO: 316049 - DNA, 98 bp, Homo sapiens
ggggacccgctgatcttccagctcccctcacccaacgtcgtaaagtgaatggcttggaggaaggcgtggagttcctgccagtcaacaacgtcaagaag

SEQ ID NO: 316050 - DNA, 52 bp, Homo sapiens
aaatggagcccttcaccaatggtttattttcttgaaaaggctccaggcttcg

SEQ ID NO: 316051 - DNA, 97 bp, Homo sapiens
gtgaggccggccacgccccgcacggcctagtaaatgacaaagactcaaaagattctatgacagaaggagaaaatcttgaagaggatgaagaagaaga

SEQ ID NO: 316052 - DNA, 82 bp, Homo sapiens
cctgcccattctaggacagccgccgcggcgagtcctttgcacatgttggcaacacacgcatccgcatcggcctccctgccca

SEQ ID NO: 316053 - DNA, 108 bp, Homo sapiens
ctcgaagagattgtagagaagctaaaaggagaacttgaaagttcggaccaggaactacatattgtccataagtgcttcatcaggactcatcgccctcctgtctactgg

SEQ ID NO: 316054 - DNA, 83 bp, Homo sapiens
gccccctgctcctgtgcctgctgcaggccgctccagacaatgcagatcttcgtgaagactctgactggtaagaccatcaccct

SEQ ID NO: 316055 - DNA, 100 bp, Homo sapiens
ccttagccatcagccccacccacgtgaagagcatgcagcgactgaagggctttcgaggaggaagaagacgtcgctctggtttgtggggtctctgctgctg

SEQ ID NO: 316056 - DNA, 82 bp, Homo sapiens
gcacgccacatctgcagaagacgctgaatcagtggaaagaggccagaagatcagtgagcagattgtcattggcacccctggg

SEQ ID NO: 316057 - DNA, 82 bp, Homo sapiens
gcctcactgggacccccaggaggtgaccctgcaggtctaacttcaaacttgtggctgttaattcaaaactctatgccatcgg

SEQ ID NO: 316058 - DNA, 117 bp, Homo sapiens
cggattttgcggggttcgtcgggcctgtggaagaagcgccgcgcacggacttcggcagagaagatggctgtgccacccacgtatgccgatcttggcaaatctgccagggatgtcttc

SEQ ID NO: 316059 - DNA, 101 bp, Homo sapiens
cgctgggaaccttccccagccatggcttccctggggcagatcctcttctggaggcgtaatagattggaactcagtgaagacacagatgttcctgttcagag

SEQ ID NO: 316060 - DNA, 100 bp, Homo sapiens
ggcgtcgcgcggcgtgccctgcttgtcacaggtggactgtgcattgtcacttattcgacttgggatggagcggaatattcctggtttgctggttctctgt

SEQ ID NO: 316061 - DNA, 75 bp, Homo sapiens
gctctttgcatccggagagtggacaagaaagtgtttgatcagtatgtaaagaccagggcagaggaagaacgcagg

SEQ ID NO: 316062 - DNA, 76 bp, Homo sapiens
ttaaagagtaaagttgtgctcaacgaacacagatatgtagaactcttcttgaattctacagcaggagcaagcggtg

SEQ ID NO: 316063 - DNA, 98 bp, Homo sapiens
gcaagggagtgatgccggttatctctgtgaatctcagattcaagatggaaaaggtgatgtaaccattacaaatgatggtgctaccattctgaaacaaa

SEQ ID NO: 316064 - DNA, 82 bp, Homo sapiens
tcgcacttgctcaacaagggcctgccgcttgcctgacatttaccccggtaactgctgggcatttaaaggctcccaggggtac

SEQ ID NO: 316065 - DNA, 100 bp, Homo sapiens
gctggggagcccttctgcgccacagccatggaattccatgaacacttgcacagcataggcaccaaggaaggtttgaaggaaagaaaactacaaaaagcag

SEQ ID NO: 316066 - DNA, 75 bp, Homo sapiens
gtgaaccagcagaatttttgaacaggtcataactccatgcaggaagctcatcttgtgtgctgataacagaaaaga

SEQ ID NO: 316067 - DNA, 100 bp, Homo sapiens
tcatagcagagtacgatactcaggtcaaagggatctgaaacttgcccacccttcgggatattgcaggacgctgcatcatgagcgacagtaaatgtgacag

SEQ ID NO: 316068 - DNA, 75 bp, Homo sapiens
actatgaggctatccgcagcgagatggagcagctcaaggaggatcagttccacaagatggttgagctgacagtgg

SEQ ID NO: 316069 - DNA, 82 bp, Homo sapiens
aatgaccatggcaagaactggcgtcacgtttacaagatgaggctgccagccttgagagcaccaccgttacctggttgaagag

SEQ ID NO: 316070 - DNA, 88 bp, Homo sapiens
acccagaacggatagctccctcctggaaaagggtaaaatatttggagtaccttttaatgcactgccccattctgctgtaccagaatat

SEQ ID NO: 316071 - DNA, 96 bp, Homo sapiens
cagattttggcagattatggctttgtccccacccagcactgatgatattataaagtcttcatcctccaggtccacctttagcaagacctattctcc

SEQ ID NO: 316072 - DNA, 100 bp, Homo sapiens
aacccagggactggcgcactcacagctttccagtttgcctgagaatacagatcaacccacagaacaaagcggatttccaaggcatctccccagagcgagc

SEQ ID NO: 316073 - DNA, 145 bp, Homo sapiens
tgggaaagacaaatgctaaagcagtttctgaaatgagacagaagatctggaataatatgccgaaggatcatccttgtttgcagaagccaaacctgaccacagacactaaggacaaggagtacaaaccccatgatattccccagag

SEQ ID NO: 316074 - DNA, 100 bp, Homo sapiens
aaaacatctatcgtaatccccaaaacagtgcacagacggctgacggctcacactgagtgggaatagctttgcgaaaaatgggcgcaatggccaagccaga

SEQ ID NO: 316075 - DNA, 75 bp, Homo sapiens
caacgggaggtgtgagcccaaagacctgtcgcgaaatcgcctttcagaaattcctatagaagcatgtcactttgt

SEQ ID NO: 316076 - DNA, 90 bp, Homo sapiens
tggggaaggcgattggcatcgatctctccatcccttccgaggcccgacttcgagccatgggaccacaccaccaccaccacaaccaatagg

SEQ ID NO: 316077 - DNA, 116 bp, Homo sapiens
tgggtgcgagtggggaagctgctaacccgacccggattggcgctgaggtggcccgtggggcaggtgtcatggagaaactccagctgggcccagagattctgcagcgggaaaatcca

SEQ ID NO: 316078 - DNA, 100 bp, Homo sapiens
aagctaaactcaatgctgctgtgtgggaagaagatttgtaaagaaaactcttagactgtacaatttgttcaaggaatttttgtagaaaaatacgatccta

SEQ ID NO: 316079 - DNA, 82 bp, Homo sapiens
agccgaagaagctcatcgcaccgccgggccgggcgggtctcgtgcccatgacgcttccggagacaaccctggaaacactgaa

SEQ ID NO: 316080 - DNA, 98 bp, Homo sapiens
ggacagccggcagcgccgcctcctcgcggctaaagcttcctgcctgacacagctcacttcaagaagtgcacaatgtcagaacgtggaattaagtgggc

SEQ ID NO: 316081 - DNA, 75 bp, Homo sapiens
gggaaaatgggatttaaacacccaaaggtgtatactcttgatgtaccagatgcattctattactgttatagtcca

SEQ ID NO: 316082 - DNA, 98 bp, Homo sapiens
tggcgctgggagcaacgggagtgtcctggacccagctgagcgggcggtcattcgcatcgcagatttctccacccaggtgaactcctccctcacctccc

SEQ ID NO: 316083 - DNA, 90 bp, Homo sapiens
ggtgcccgaggaggcagccaagctcgtagcctgccactccgtgcgttggacgtgataagtatgagcctgcagctgtttcagaacaaggtg

SEQ ID NO: 316084 - DNA, 100 bp, Homo sapiens
aagggacccggaagcatttcttgtccaggcaattcttcagttagatagtcctgaatctgctcagtcaatgtatagctttctgaaacaaaatccacaaaat

SEQ ID NO: 316085 - DNA, 117 bp, Homo sapiens
cccactcaagatgtcctttccatgctgggtgacatccgcaggagcctggaggagggtctcttgcaacgtgtgagctgcctcttgccaagagtgagtggcaaaagaaactaaccccgg

SEQ ID NO: 316086 - DNA, 50 bp, Homo sapiens
caagcatcccattacagatagaagagcttcacggtgatgatatggcatct

SEQ ID NO: 316087 - DNA, 74 bp, Homo sapiens
cattccaacagacatttatagtatgtccacctgcgtttcaaacaactgctccaaggatagatgatgaaatcccc

SEQ ID NO: 316088 - DNA, 100 bp, Homo sapiens
tgttagtagcgaatcgcttcagtctttgttctcagaatgggacaatccagtatttgcccgttatccagagatgtgccgtttgggggtgctaaagctggtg

SEQ ID NO: 316089 - DNA, 100 bp, Homo sapiens
ctcttcgcggagcggcgccgcgtagcttccatccgccagctgccatgagcgagcgcctccgtcccagccgcctctttgggttcgtgagatttcatgaaga

SEQ ID NO: 316090 - DNA, 75 bp, Homo sapiens
ttatttacttgatgtccaggggaacatcactcagaagtttgatgtattcgtctaatgattgaaaatccttacgag

SEQ ID NO: 316091 - DNA, 83 bp, Homo sapiens
ccagcctgctgcgcaggataaaaggcaaactcttcacctgattactgatctctcattacccaactatctgatggcatcttcgg

SEQ ID NO: 316092 - DNA, 98 bp, Homo sapiens
agcagtgttaggctttacattcctaaagaccttcggccggtggacaatagacagagtgttttaaaatcaatacaggctgtatatgtatcggatttctt

SEQ ID NO: 316093 - DNA, 75 bp, Homo sapiens
aggcttacacaccatctcttttgcatcttcatgatacagttaagaggaatcttgacagcgccacttcccctcaga

SEQ ID NO: 316094 - DNA, 100 bp, Homo sapiens
gctggagaactacagccacctcgtctcagtggaggtggccggcaggttcctggcgttggaggccagcacacacctgctggtgttcggcatggagcagcgg

SEQ ID NO: 316095 - DNA, 100 bp, Homo sapiens
cttcactccagtgcctccgacgcctcctgatgcttactaccagcccagtctgactgcggagtatgatgaagacagcccaggaggggactttgactttttc

SEQ ID NO: 316096 - DNA, 100 bp, Homo sapiens
tctccagaaaaacagtagcagtttcctggtcctgttcctcatcaacaccaaggatctgcatcaccgagacttggagccagaatctgagcctcagctggag

SEQ ID NO: 316097 - DNA, 82 bp, Homo sapiens
caaatgcctgcagtttgcccgggagtcgtctctgcaactggccaacctagagcccccctgctaatataatgccttcgtcgtc

SEQ ID NO: 316098 - DNA, 100 bp, Homo sapiens
gccgccgctgcagacgacgagtccgccctcgtcccgcgcccccggggctcgcggagccagctgggagtgtccactcgccttccaccagcatggcaacgtc

SEQ ID NO: 316099 - DNA, 75 bp, Homo sapiens
ctcggcgccaagatcccagtcacaattatcaccgggtatttaggtaaacctagcctttaagcaacctggaaagag

SEQ ID NO: 316100 - DNA, 100 bp, Homo sapiens
accgggtccctcgcccaggtccccttggacaaatggactatctgttatagtccctgggtcaagacaacaatttttataccttcgtcgtggttcagaaagg

SEQ ID NO: 316101 - DNA, 50 bp, Homo sapiens
caagtccgatggagaggctaagcatataaagatgaagcgcagctgtataa

SEQ ID NO: 316102 - DNA, 100 bp, Homo sapiens
cccggctcccttcgcctccaggatgcgctgagccctacaacacccccagcggccgccggctcccccacgaggagccgaggaggtgctgctgctggcccgg

SEQ ID NO: 316103 - DNA, 80 bp, Homo sapiens
ctaccacaagaagcggaagtatgagttggggcgcccagctgccaacaccaaggaagtccatgaagacccagggcaggcca

SEQ ID NO: 316104 - DNA, 90 bp, Homo sapiens
tccctgacgtttcccgatcctaccactttggcatcgtcggcctcaacatgaatggctactttcacgtggggaagctgaggcaggaagccc

SEQ ID NO: 316105 - DNA, 97 bp, Homo sapiens
cagagcgtcacggcgtacgccctcatggggaaaatctccccggtgactttcagtctcagaccagtatccttcaggggttctcttactctgatttgcg

SEQ ID NO: 316106 - DNA, 97 bp, Homo sapiens
gcgggcgagggcgactacgaccagtgaggcggccgccgcagcccaggcgcgggggcgacgacaggaaggagttttttgatggctgcaaagcaataag

SEQ ID NO: 316107 - DNA, 100 bp, Homo sapiens
gtgacgggcggtggcactctgtgcaggtgcagtactacaacaaggtaaaagtacacctgtaagccagcttggttccgcagactttcccgaggcccccgat

SEQ ID NO: 316108 - DNA, 76 bp, Homo sapiens
agttccctgcatcctaagactcgaaggcagcacaggacctggaaaaattacataaaagagtagttgaacagctacg

SEQ ID NO: 316109 - DNA, 75 bp, Homo sapiens
cactggcccaaggagacgaaatcagttaagtgggcagaccaacatccacctcagcaaaaacttcttcctgacgaa

SEQ ID NO: 316110 - DNA, 50 bp, Homo sapiens
acaggcgacagcgacctgcggcagtgaatgatgaacccacaacagccact

SEQ ID NO: 316111 - DNA, 50 bp, Homo sapiens
gcttacatcttgcatcctcaagcgccaatcctgaggcaaaagaaacattt

SEQ ID NO: 316112 - DNA, 100 bp, Homo sapiens
ctgagcctccaggccggggaggtggtggatgtcatcgagaagaacgagagcgtcttcacagaaaagtactgtacagctaaccatgtggataagcttcctg

SEQ ID NO: 316113 - DNA, 95 bp, Homo sapiens
actaagatggcagtagtacgttacatgttcttcaacagagaggaggaagcttgacgctgtctattactatatgcgcagtttagctgccagcaacc

SEQ ID NO: 316114 - DNA, 82 bp, Homo sapiens
gtgggagcaaaaccaacgcctggctcggagcagcagcctctgaggacttgtttacactgggcatgtaaacgaaaccatggtc

SEQ ID NO: 316115 - DNA, 73 bp, Homo sapiens
cagtggtcgcttcttctccttgagccaatggccaaaggccctgccaagaattcagaaccagaggaggtcatcc

SEQ ID NO: 316116 - DNA, 83 bp, Homo sapiens
cgtgggcctgtggactgcagcctcggcggtcagcagggcgaagctgtgctcaggcccgggctggacgcagagccagagctgtc

SEQ ID NO: 316117 - DNA, 100 bp, Homo sapiens
gagagcatcacaatataatattaggggtgttacgtataggctcactcaagcagccaactcttcctgccaaataaatagagtcatcagtcatcctactctt

SEQ ID NO: 316118 - DNA, 83 bp, Homo sapiens
agtccacccaccgccgccgcctcccagggctgggttacgacccctacaaccctgagctgcccaagccccccgcgcagagggag

SEQ ID NO: 316119 - DNA, 71 bp, Homo sapiens
tctgtggtgcctggggctgaacgcggctttctgggaaaggggctgtttgccacacagctcatccggaaggg

SEQ ID NO: 316120 - DNA, 74 bp, Homo sapiens
caagtcttattttcctcctaaaggaaggagatggataaagcagatgtttattggggcattccttatcccagcta

SEQ ID NO: 316121 - DNA, 111 bp, Homo sapiens
ttcctcactggtttgcggggaaggctgggcagaaaaaggatgcaaccttgttctcaaccacttgctatctcggaatatcctggaaccttcttttgtttgtcagcagccaag

SEQ ID NO: 316122 - DNA, 100 bp, Homo sapiens
ccacttcctctatctcaatgtggctcccagccggtactttaggcactaaaacaggtgcagatcttagtgatggtacttgtgagcctggactggcttcccc

SEQ ID NO: 316123 - DNA, 74 bp, Homo sapiens
ctgcctgtacccacgagccctaacatccagccgtccccagctcacggtggatgaaaatactaggaaaagtttat

SEQ ID NO: 316124 - DNA, 100 bp, Homo sapiens
cagctggacctagctcagcggaccctgtaccaggaggtgatgctggaaaactgtgggctcctggtgtctctggtcttcccgaggctgctgtccatgacac

SEQ ID NO: 316125 - DNA, 100 bp, Homo sapiens
tgctactgtggggccacctggacgcccagcccgcggagcgcggaggccaggagctgcgcaaggaggcggagggtgattctgggggtccacttgtctgtaa

SEQ ID NO: 316126 - DNA, 51 bp, Homo sapiens
cggacccaaagtgccatgtctttaataacccacaatacattatatgcacca

SEQ ID NO: 316127 - DNA, 76 bp, Homo sapiens
aagaggcctgcaaagctgtacaagagatcatgcagggcttggactgtggtcctgaaagcagcaagaagtatgctga

SEQ ID NO: 316128 - DNA, 100 bp, Homo sapiens
gcagccgccgcgacggcggcctccagctccgacccgagcgggacaaggagaaccggcatcggaagcgcagccacagccgctctcggagccgggaccgcaa

SEQ ID NO: 316129 - DNA, 75 bp, Homo sapiens
cgaccagccgcacgccgaccggcgccgggagatcctgggaacgtggtcaggccgggtgctggtgtttgacatccc

SEQ ID NO: 316130 - DNA, 100 bp, Homo sapiens
aaatcatttcggctctcatgttcctccatgataaaggaatcatctataggttcctcagaaaattttgagtaaatgggaagccagtgttggacttgcagaa

SEQ ID NO: 316131 - DNA, 100 bp, Homo sapiens
cgccctcttgcagtctgcagcttctcctgtcatcggaaatgccaggccaaggtttgagcatggcagaaggaaacaccctgatatcagtggattatgaaat

SEQ ID NO: 316132 - DNA, 100 bp, Homo sapiens
tagaagacattactcaagaggagagagttcttctcttacagtttgttacgggcagatacttggagatgaagttcaacttttttcacttgatgaagaattt

SEQ ID NO: 316133 - DNA, 82 bp, Homo sapiens
cgattccggagaatcgcgaggcagagcgggagcgcgcagccagacttcccaagtaagaagcggaagaggagccgctggaacc

SEQ ID NO: 316134 - DNA, 75 bp, Homo sapiens
ccgcagagtctgatggcagcggccactctgaggacgccaactcagtctgcgctcctcagaccaccggcaggtgaa

SEQ ID NO: 316135 - DNA, 101 bp, Homo sapiens
ccgtggagaaggaagaactgtgctgagtgtatgggtttcgacagaccatgatgaaattgagaatgtggccaaacaatttggtgcacaagttcatcgaagaa

SEQ ID NO: 316136 - DNA, 75 bp, Homo sapiens
ccatggtatagctgggaccagccgggcctgaggttgaactggggtgaaccgatgaacacaggcttcacagtggca

SEQ ID NO: 316137 - DNA, 51 bp, Homo sapiens
gaggcggacgcgcggctgcgtcaggcagcggaggaggaaatggcaggtcct

SEQ ID NO: 316138 - DNA, 97 bp, Homo sapiens
gggggccgccgcagcaccatggcgaccaccgtcagcactcagcgcgggccgacagtactactggtatgacgagcgggggaagaaggtcaagtgcacg

SEQ ID NO: 316139 - DNA, 75 bp, Homo sapiens
cacagaccttccgggaaagcgcggaattcagaggcagaggttttttgcatgtctgacacccatgactccacctgg

SEQ ID NO: 316140 - DNA, 82 bp, Homo sapiens
caccacagacctcatcgtccagcggatcatcaccaacagatgtgaagttcatttccaatccgccctccatggtggcagcggg

SEQ ID NO: 316141 - DNA, 101 bp, Homo sapiens
cctcaggccggggcgcacgtcggctcccacgcttagccagctcccggagctcaacaggacctgtcgggccatgcagcagcgcatcgtggagctcatctccc

SEQ ID NO: 316142 - DNA, 90 bp, Homo sapiens
ctcgattggttctactgtgggtctggactgatctccatgtcctgttgtggggcttttacagcctttggagcccacccacctttgggttcc

SEQ ID NO: 316143 - DNA, 100 bp, Homo sapiens
aggaaaaatcgagcagaaagaatgtctttcaggatgagctgacaactaccaagaggagttacgaggatcagttaagtatgatgagtgaccacctgtgcag

SEQ ID NO: 316144 - DNA, 83 bp, Homo sapiens
atttaaaatggtccacagcagtcgaattttgtaaaaagaaccacacagtgtagtatatgatacaagcaatggaaagaaggtag

SEQ ID NO: 316145 - DNA, 75 bp, Homo sapiens
gaccttctgtgggactccagattatatcgccccagaggtcatgttggcagcttcctattggtctcttctggcccc

SEQ ID NO: 316146 - DNA, 90 bp, Homo sapiens
tcaatggcacccatcacgggggaaaacataagaccatttattagtaggtgtggagggcttcatcaccggcctcctcgacctcctcccggc

SEQ ID NO: 316147 - DNA, 75 bp, Homo sapiens
cccggcccgtagtgtggaagcagcttcaggagcagatctgcagatggggccaagaattacttcgaacatgaggag

SEQ ID NO: 316148 - DNA, 83 bp, Homo sapiens
aaacaagacagttctgtctgcagaagcccattatggctgtaactggagatgacacagcaagcaaggatttggcacagacatcc

SEQ ID NO: 316149 - DNA, 87 bp, Homo sapiens
cttttcgaactccgcgacccgagcgcaaggattggtagcttatgtcgatcttgatgaaagagcaattgatgctctcagggaatttaa

SEQ ID NO: 316150 - DNA, 82 bp, Homo sapiens
tgcagcgggagctggacggcgagcgcgagcggcgcgagaaattatgcaaagggtgacctggacatatcttacatcacatcca

SEQ ID NO: 316151 - DNA, 50 bp, Homo sapiens
gttggacagtcagcatttgcagactttgttgctgatcccacaccctttca

SEQ ID NO: 316152 - DNA, 82 bp, Homo sapiens
gaagtcgggtgatgcccgtgtggcgctgattggatttccctctgtggacccaacatgagtgaagtttcctgcaagaaacggg

SEQ ID NO: 316153 - DNA, 90 bp, Homo sapiens
ctctggcagaactgtagcacctcttcctcaggaaatgtccaccactgtttctcatcatcaccaaacgcccggcatgccagtgcttcctcc

SEQ ID NO: 316154 - DNA, 80 bp, Homo sapiens
ctcagccaggcctgcgcgggcccgaggccggaggaacccggactccggcgtagcgatcaaatgatgccgtttggaaaaat

SEQ ID NO: 316155 - DNA, 51 bp, Homo sapiens
ctttaatcctgaaagccatgcagcggacccatcctcatgccaacaaactac

SEQ ID NO: 316156 - DNA, 82 bp, Homo sapiens
cagagcgccgcgcacttcgtcatgttcttcgcgccctgagtccactgccagctggttcgactctttgcacgaggaattgaag

SEQ ID NO: 316157 - DNA, 82 bp, Homo sapiens
tggagcctcagttggaagcagccgatccagcctgcggagcctgtggggcagtgagggagactctgatgtggactcggagctg

SEQ ID NO: 316158 - DNA, 100 bp, Homo sapiens
ccctgcagacattagctggagcaacggctggcctcaatgttggctctttggcaggaatgtctgaagccgaagaagcctgtctgtggggtgtgtcgcagcg

SEQ ID NO: 316159 - DNA, 100 bp, Homo sapiens
taagtcccccaaagatgagatttacctgtgagatgtttcatcccaacaatatggtattagacaacatgatagcttctggccaattagacgagtccatacg

SEQ ID NO: 316160 - DNA, 100 bp, Homo sapiens
aggcagctgtgccacgcacacctcctccccgcagccccaacccatctccagagagaccaagggatgcttgaagatggaaagaaatttgattcctcccggg

SEQ ID NO: 316161 - DNA, 103 bp, Homo sapiens
gaagggcaccggatgcccaggaatcaccacctggtaccagaagcggtgccagccagcaggtcctatgcccaaacacttgaattctcaatcgcaatcctctgac

SEQ ID NO: 316162 - DNA, 82 bp, Homo sapiens
tcgactatggcaacaagtacaagcggcgggtgccccggggacagaagatgagcctgtcggtcctggagggtatggggttccg

SEQ ID NO: 316163 - DNA, 98 bp, Homo sapiens
cgggctggctgcggccgccctgggccgggccccaccggacggtcgataagggagacctggtggccctgagcctccccgccggccatggtgacaccgac

SEQ ID NO: 316164 - DNA, 100 bp, Homo sapiens
tgagaagctgtcggagcttcccaagaatacttcagagagtcagagttgtgccagaagtctcttaatggcagatagaatgcaaatagttgtgattctctca

SEQ ID NO: 316165 - DNA, 100 bp, Homo sapiens
aggactgttccatttttgccaaagtactctgctggattagaattacttagcagctcattgctatggacagtgctatcaccctgtggcagttccttcttca

SEQ ID NO: 316166 - DNA, 100 bp, Homo sapiens
gtgaatttcccatatgatgatcgagttcctggggaaaaccccagggcaaaacgctcagaaatggattcctgcacgaagcactagacgagatgacaactcc

SEQ ID NO: 316167 - DNA, 50 bp, Homo sapiens
ttatgggagcgcatttccccaggagatgcccgagtggtaaaagacatggc

SEQ ID NO: 316168 - DNA, 101 bp, Homo sapiens
agaagctggtgcccttggtgcggaccgtgtgcgtccgaagcccgaggcagaggaaccggctcccaggttttaaaacatgaatcctacactcatccttgctg

SEQ ID NO: 316169 - DNA, 90 bp, Homo sapiens
tatgaataatgactttcctccaagagcacattgcctggtaagatgtgacaaccatgagtggaaaaaactaattatggttcagcactggcc

SEQ ID NO: 316170 - DNA, 98 bp, Homo sapiens
gaaaacactgcaagtatcatcatggtgaccaatcttgtggaagtgggaagggacatcttgagctctaaactgaatggaaaattcaacaaacatctcca

SEQ ID NO: 316171 - DNA, 50 bp, Homo sapiens
gcattcaaatcctagcactctgggagagtactatactggcaattgctgga

SEQ ID NO: 316172 - DNA, 75 bp, Homo sapiens
gattgggacaacattcagacccatttccagtcatgagtacttgaagctggtgtgtgtttcctttcagcgtcaagg

SEQ ID NO: 316173 - DNA, 50 bp, Homo sapiens
ttatagacttccagctgaaggtttaaagaaagcccgcttatctaccattt

SEQ ID NO: 316174 - DNA, 88 bp, Homo sapiens
ctaatttgggaaaaagctccaggattctgacagggatgttgcgaagaaactagaaaaactgcttttggaattatctctacagtgaaga

SEQ ID NO: 316175 - DNA, 75 bp, Homo sapiens
cggatctggaggagcagttgtctgatgaagagaagactggactattcctctttgtatatgtgtaaacccaaaagg

SEQ ID NO: 316176 - DNA, 76 bp, Homo sapiens
ctcctctctgcaagtgaataggcccagaaaggtgtgggcaagagcagtttactgttgcgttttgcagacaacactt

SEQ ID NO: 316177 - DNA, 100 bp, Homo sapiens
caggcttgcacccagacacgacaccatgcatctcctcggcccctggctcctgctcctggaaactcctgattggtccgaagggccacgtgatctcccagat

SEQ ID NO: 316178 - DNA, 100 bp, Homo sapiens
acgacgaggaagaggaggtttctgagggaccatggctaaacctcctggatcattagccagaagcagcagcctgtgccgttcacgccgcagcattgtgccg

SEQ ID NO: 316179 - DNA, 100 bp, Homo sapiens
ccgagccgcagccgagcggccgtgggcccgggcggcgggcggagacgtgggcgccctccccgccaaggcccgtgcgagagtgtgaacatggctacgcctc

SEQ ID NO: 316180 - DNA, 90 bp, Homo sapiens
ctgaaacaatgggacccatgggttggaggaagaaggcacctacgatcaaactctggagttccgtaggggaggtgatggccagccaagacg

SEQ ID NO: 316181 - DNA, 101 bp, Homo sapiens
gagaccagcccggccgagccgagggccaccccctggtcctctgccctcgcgccccgctagggccaggtgattttacaacgagatgctgctctccataggga

SEQ ID NO: 316182 - DNA, 100 bp, Homo sapiens
ccctgaggggcggccgggcagcgccgccaccatgttcctgggcaccggggagccggccttggacacggcagcctggcatcctcgctacaacctcattgtt

SEQ ID NO: 316183 - DNA, 75 bp, Homo sapiens
ggccaacaagcagaccatggaggagctgaaggacctgctgaagactccgtgggaaggaggcttgtttaaactacg

SEQ ID NO: 316184 - DNA, 100 bp, Homo sapiens
ttgttaaggattccaagtaactcttatttgatggcttaatggtacaaataactccagagaccatgaatggcttgcggctagctttacgagaacagaaaga

SEQ ID NO: 316185 - DNA, 87 bp, Homo sapiens
tgcagccaccgcggcccccgcgggaactacttccagtagcaatacaatggtagctcccacagatggcaatcctgataataagcccat

SEQ ID NO: 316186 - DNA, 73 bp, Homo sapiens
gggtgccgtggcatgtcgatttgtccttcactacagattgaagaatggggcccatttgacttggtgattggcg

SEQ ID NO: 316187 - DNA, 75 bp, Homo sapiens
ctgatggagctgcaggaggctgtgcggtggactgagatgatcaggaaagaaaagagccagctgcagaatagccga

SEQ ID NO: 316188 - DNA, 98 bp, Homo sapiens
gatgaaccttgttcatgcaccccaggacctgcaaatgcaactggttgatcctgaagacataccagctatggaacgcctgacccaggaagtcttacttc

SEQ ID NO: 316189 - DNA, 50 bp, Homo sapiens
tggttggggaggaccagaaatcaggcacttctgtctcctgctgccatgtg

SEQ ID NO: 316190 - DNA, 80 bp, Homo sapiens
cagaccctggagcctcagttggaagcagccgatccagcctgcggagcctgtggggcagttatacatgggaagctgttgat

SEQ ID NO: 316191 - DNA, 100 bp, Homo sapiens
cacgcagaacgtcaacaccaagtgcatcaccatccccagccacccaggctactttgggaaagttggtatgaagcattaccacttaaagaggaaccagagc

SEQ ID NO: 316192 - DNA, 104 bp, Homo sapiens
cttgatgacacggctgttcctccttttggttgcttcattccagcctcgcagtcacctctgtgccctgctggttgtcttcccagcgctgctgtagttgccttcca

SEQ ID NO: 316193 - DNA, 83 bp, Homo sapiens
gcgataaacactcgctggagagggagacgcaggaagcgatgaaagagatgtctgcgtgtgagttcttgatacgaatgaaaggc

SEQ ID NO: 316194 - DNA, 100 bp, Homo sapiens
gcaaccctctgcattccatctctatgagccaccatgtggaatacatgttggtatcttttgatcatgaaaataaaaaagtccggttggtcctgtctgggga

SEQ ID NO: 316195 - DNA, 101 bp, Homo sapiens
cttcagattttgaagaagggccgtcgaggaaaagtataaccccgttttcacacgaatggccccttcacatatttgaagactaccgtcgtgtccgtgctgac

SEQ ID NO: 316196 - DNA, 100 bp, Homo sapiens
cagtcttatcgaaggatgtgcatgaaggacagcctcttctcaatgggggacagccgcgccgctgctgcttttccgaagaggtgacttcgaccgagctctc

SEQ ID NO: 316197 - DNA, 102 bp, Homo sapiens
tataagaccatttatttctttggagacaaaactatgccagtcagccatgtcatctgagcctcccccaccaccacagccccccacccatcaagcttcagtcgg

SEQ ID NO: 316198 - DNA, 100 bp, Homo sapiens
tgtatttggtgtctgccatatctttgcatccttcaatgacacttttgtccatgtcactgatctttctggcaaaccaatgatgcgagctcagagtcaatag

SEQ ID NO: 316199 - DNA, 98 bp, Homo sapiens
gggcggcggccacgccaaggacggtgtttctgaaagatctatccagcactccgatggccagcaacaacaccgccagcatagcacaagccaggaagctg

SEQ ID NO: 316200 - DNA, 139 bp, Homo sapiens
atttgctttaccctcttcttcttctgcaacacggccactgtgtacaagatatgtgcctggatgcagctcacctccgatgcagaatcctgatacactatcagcaatgtcaaaccctagagcaatgcaggccttgttacag

SEQ ID NO: 316201 - DNA, 100 bp, Homo sapiens
aagctatccagcatctttgggcagccattgagattatacggaaccagaagcagattgccaacattgaccgtattacaaacttcagaggatgattccgaag

SEQ ID NO: 316202 - DNA, 100 bp, Homo sapiens
cctcgctgcctggaccgggtctgagcgcggctgcccaggttgacctttctgcgggagaacatccagtcatggataaaaatgagctggttcagaaggccaa

SEQ ID NO: 316203 - DNA, 100 bp, Homo sapiens
aaacatcgtggccaacacggtcttgctgaaagccagggaagaaatgagccgtcagactgctacagcattacctaccggtacctcgaagtgtccaccatcc

SEQ ID NO: 316204 - DNA, 74 bp, Homo sapiens
ggatctgaaaccagagaacattctcttggactgccaggtaaccatggagaaagagctgcggagcaccattcttt

SEQ ID NO: 316205 - DNA, 82 bp, Homo sapiens
gatgggctggagacaacagaaacagaaacgattgtggaaacagatgatgactttgaccagtttgataagcctggcgcggaac

SEQ ID NO: 316206 - DNA, 75 bp, Homo sapiens
agcttctacgtgtgccgggcagacacgtgcagcttcgtgcgggccaccgaaggcaaaatcagtaaaggcttggag

SEQ ID NO: 316207 - DNA, 98 bp, Homo sapiens
aacttgggccaaaggacagttagaagacagtaggtgaacaaatagaagctgagggtgaaggacctacagctgtcaccttcatctcttctcaacactgc

SEQ ID NO: 316208 - DNA, 83 bp, Homo sapiens
cagggccggcgcggcgatgatgaacaggttccgaaagtggctctacaaacccaagcatttgacattgtgcagcaaagaaatgg

SEQ ID NO: 316209 - DNA, 143 bp, Homo sapiens
ccaggagctgccagcatgtaccagcctgccctgccacacagtgtgcctgcaacctgtccggggatcccagggagcacatgattaagtaccggtacatcccgttcacacatgggaagagaaggtacagaggcaaggaggatgcc

SEQ ID NO: 316210 - DNA, 83 bp, Homo sapiens
gctgttgctgccgccatacgcgctctccctgtttaggtcccaagctctttaaggagcccagtagtaaatcaaacaagccgatt

SEQ ID NO: 316211 - DNA, 98 bp, Homo sapiens
aattcgccgtgcccgagaatagctccgtccagcagaattgtctatttcacagcaatattaccagtgacttgaaagcatttacagacaagtttggtttt

SEQ ID NO: 316212 - DNA, 98 bp, Homo sapiens
ggaaaagcaacgtggggcattccaggtgtccttgaatggccattttggacaaaactggttgtggtagccattggcttcacaggaggtcttgtcttcat

SEQ ID NO: 316213 - DNA, 75 bp, Homo sapiens
agatgagctcagaggtggtggattcgaatccctacagtggatctcttgagcctgtcagctgcatgtgatgccttg

SEQ ID NO: 316214 - DNA, 50 bp, Homo sapiens
cggcaactcagaaacatcaggtccaagtaagactttgaccccgacgcagg

SEQ ID NO: 316215 - DNA, 98 bp, Homo sapiens
tctatatacccaatgattctgtacgggttactcatcctgatgaagctagacaggaatttgctgttgctggctatgaattctgcatttcaactctagag

SEQ ID NO: 316216 - DNA, 99 bp, Homo sapiens
tcccagaccaccagtaacacatcccgttatgccgctgcactctacaggcaaggttgggggccgtcccgctcctaaggcaggaagatggtggccgcaaag

SEQ ID NO: 316217 - DNA, 77 bp, Homo sapiens
tgagattatccgcatgcaccagagctttgacaacctctactccatggttcatccagagcagcttcctccgaggccat

SEQ ID NO: 316218 - DNA, 75 bp, Homo sapiens
ctgaagttgcgccgctgccggtcgggggaagagacctgacagcgccctcacaaagccaatgctgaggagatgacc

SEQ ID NO: 316219 - DNA, 100 bp, Homo sapiens
ccggagcatccgggcggccgcttgagatcggcgctttgagaactgagcgcatgtggagttcggaggaaaagggctcaggcaaatgaagaggattcttcca

SEQ ID NO: 316220 - DNA, 49 bp, Homo sapiens
agagcgtcctctttggagaagtcctgttttgctgcgttcctactgtctc

SEQ ID NO: 316221 - DNA, 50 bp, Homo sapiens
ggccagacacctggaagccggaaaatggaagatgatccctatgatcttga

SEQ ID NO: 316222 - DNA, 75 bp, Homo sapiens
acacagcaatatctctgggctttcacagtcgtgtgctgcctgcaaaagccctgagctgacttcaaacctcttcaa

SEQ ID NO: 316223 - DNA, 100 bp, Homo sapiens
agaatttatatagagatgtgatgttggagaactacagaaacctcgtctccctggctggagagacagccactctgcgctgcactgcgacctctctgatccc

SEQ ID NO: 316224 - DNA, 51 bp, Homo sapiens
gtgcggatcctgctggtgggagaacattcactgcgtgctgtcctcacttgt

SEQ ID NO: 316225 - DNA, 76 bp, Homo sapiens
gagcatacttgtacaaatattttgcacttcaagaagaagaatttggtgttgatgattcttattctgaacaaggagc

SEQ ID NO: 316226 - DNA, 83 bp, Homo sapiens
cggcgagttctacatgatcggctccgaggctttatcctgtggataaacgcagagtgaacgagtttggggagtcctacgaggag

SEQ ID NO: 316227 - DNA, 101 bp, Homo sapiens
cattcaccccccaggagaagctgtggcagcagctcagaagaggacgagtcatttgatgtggtcacaaaatgtgtgagtttcacactaactgagcagttcat

SEQ ID NO: 316228 - DNA, 100 bp, Homo sapiens
ggaggagaacactcctgagaagagggtggaccggatctttgccatgatggataaggggagaatttgatagagaagatgaagacccagaatataaaccaac

SEQ ID NO: 316229 - DNA, 98 bp, Homo sapiens
ctcggccacggctccctcctcggtggtcgcggcgacctccggcggcgggaggcccggcctgggcaggacctagaagaatcccttaggatgaagctgag

SEQ ID NO: 316230 - DNA, 100 bp, Homo sapiens
gccctgaaaaaagacagagaaactatgggacacagatatgttgaaggtgaggacaccagtgatgaattctgaagcaaaagttctggtgcctgggattcct

SEQ ID NO: 316231 - DNA, 82 bp, Homo sapiens
gagtgaggtggccggttcttggtgggatctgagcagttgccgaggtactgtctgaatgccgcctgctcgcctacatatccca

SEQ ID NO: 316232 - DNA, 100 bp, Homo sapiens
agattgaagaactgatccaggggacaaaagaggggaaactgagagttcccaattaataatgaagcagggaggttatattcaaaagaaaaaggaactgtgg

SEQ ID NO: 316233 - DNA, 101 bp, Homo sapiens
agaagaagtttagcagggcccaggagaaggtttttcgttggaatatacgttgcacatttatggcgattctgagtgtgagggcagacttctgccaggctcag

SEQ ID NO: 316234 - DNA, 100 bp, Homo sapiens
ctggagggagacaaagcagcgcccgtctgcttcgggcctctggaatttagcgctcgcccagctagccgcagggcctgatcaagatccggggggaccggtg

SEQ ID NO: 316235 - DNA, 78 bp, Homo sapiens
gagaaaccgcagcactacacctcaaggagttatgaccactcagaaaattctgatttggtctttggtggccgcacagga

SEQ ID NO: 316236 - DNA, 83 bp, Homo sapiens
tctggatggttggggagaacgacaatgcagatcttcgtgaagactctgactggtaagaccatcaccctcgaggttgagcccag

SEQ ID NO: 316237 - DNA, 90 bp, Homo sapiens
ctccgttgggtccggccgctctgcgggactctgaggaaaagctcgcaccaggtttattgggcacttcctagcaccaggcactgcaataag

SEQ ID NO: 316238 - DNA, 98 bp, Homo sapiens
tctgctgttgctcttctccgccgcggcactgatccccacaggatctggagtgggagagcaggatgggggactgatcggtgccgaagagaaagtgatta

SEQ ID NO: 316239 - DNA, 100 bp, Homo sapiens
gacccggttccccggcccacagtgggggtgtgcaaacccgagagaactggataaactcatcctgaaagtcgctgttgttctcctgctgagcaagaatgga

SEQ ID NO: 316240 - DNA, 100 bp, Homo sapiens
tgagcgggcgccccgtcaaaatccgaaagattcgggccagagacgacaacccgggcctccgaggtatgttgagtcgatgggatgatagccagagattttt

SEQ ID NO: 316241 - DNA, 75 bp, Homo sapiens
aacaaaggcagactgagcgccagagaggacgtttccaactcaaacaaccgcctccacgtttgataaactttcaga

SEQ ID NO: 316242 - DNA, 74 bp, Homo sapiens
aacttcgacgtggatgacgacgtgctgagaaacacggcataccatgaagttccctacacaacgtcctttacctt

SEQ ID NO: 316243 - DNA, 101 bp, Homo sapiens
gggcctttgcctttgttacatttgcagatgatcagggaatcatcgcagaagagaacaagaacctgcagccccagggagacgaggaccccgggaagttcaag

SEQ ID NO: 316244 - DNA, 100 bp, Homo sapiens
ggcggcggcagcggggtccgggtccggagcgccacaaaggaagaggcccagcagaagggactcgctgagccaccccccgccccactccatgttggctgtg

SEQ ID NO: 316245 - DNA, 97 bp, Homo sapiens
caagaaacagattgtgcccaaaacaaaaaagcttgtggtgaaggggggcaaaaaaaagaagcaagttctgaagttcactcttgattgcacccaccct

SEQ ID NO: 316246 - DNA, 80 bp, Homo sapiens
cagggctgagtcacagggaagaaagcgatttcctccgcctcttccaaagcgccggtggctgctggcagcggaatccccca

SEQ ID NO: 316247 - DNA, 75 bp, Homo sapiens
gtcggcactgctactgcgaagacagctggcagaggctgaggggatctggcggtggagcgctaggatcagacgccc

SEQ ID NO: 316248 - DNA, 75 bp, Homo sapiens
tgagatcgtcaagtctcccagcgaccccaagcaataccgttgtatcacggactgattcaccgagcccaaccgtac

SEQ ID NO: 316249 - DNA, 85 bp, Homo sapiens
agagctgccaagaaggacctgctcaccctgatgaagctggaaactacgcgtttgttcacatggagaaggaagcagatgccaaagc

SEQ ID NO: 316250 - DNA, 98 bp, Homo sapiens
tcagaacacatttgcctgtcagagcttccttttgtcatgagagcaattggcttttacccatctgaagagaagcaatgcaaacctcacaagaggcctgt

SEQ ID NO: 316251 - DNA, 82 bp, Homo sapiens
attcggggtgccagaaggaaagcatagggtacccagtgtgttgaacaaattcaagagttggttctacgcttctgtgagaaga

SEQ ID NO: 316252 - DNA, 83 bp, Homo sapiens
cagacgctggcgggcgcagtttctcacgacgggccgagcctgccacttaagactttgaccccgacgcaggcttcagtgattgc

SEQ ID NO: 316253 - DNA, 75 bp, Homo sapiens
cttgtggccagtaggcaatcacctgaaggatctgacttccagaaggttctcgcaactatggaaagactagagaaa

SEQ ID NO: 316254 - DNA, 90 bp, Homo sapiens
gtggtggccaagaccttctcttgccaggccctgccctccgagggcttcagtctggagccgcccagagtaccttctccaggcaaattccgt

SEQ ID NO: 316255 - DNA, 73 bp, Homo sapiens
gtgacatccgaggtgcctttctccaaaaggcaaaagtcaacaactctagcttaattggagtaggctatactca

SEQ ID NO: 316256 - DNA, 100 bp, Homo sapiens
ccatctgccctgtgatgctgggtgatgcccggctggcctctcgcatggcggatgacatgctgaagagagggggagaggcccgaggaaggagtggctgggg

SEQ ID NO: 316257 - DNA, 82 bp, Homo sapiens
ggactccgcggtgggcgagcgccctgtgagtctggtggaaaggacagaggactaagtccatggactggaaattggaagggag

SEQ ID NO: 316258 - DNA, 83 bp, Homo sapiens
tggcgcccgtgtcggagaccccgcgccggaccctgaggcagcgacacttgcacctcctgcgccgccgccccccatccaaggat

SEQ ID NO: 316259 - DNA, 99 bp, Homo sapiens
gcaacaacggaactgtcagtgcggagtagggctaaactcagttccattgttaagcaaggatttcttcagtaaatctgacccatttctggaaatttttcg

SEQ ID NO: 316260 - DNA, 80 bp, Homo sapiens
gatcactgcggggagatgctcttcggcctagtgcgccagggcctcaagtgcgatggactccatgttttcgttggccctga

SEQ ID NO: 316261 - DNA, 130 bp, Homo sapiens
gagaagcatgggaaggaggccgagccgggatctcaggtcctcgggggcggcggccacgccaaggacgggcctaatgggattgtttgaaaaacgtcgcttcaggaaattcctagtgtatgttgccaacttc

SEQ ID NO: 316262 - DNA, 100 bp, Homo sapiens
cacatacagcgagagcttcaaggacgcagccacagaggtatacatggactggtacgagaagttccaggacaggctcaacaagaaggtggtactcctgaca

SEQ ID NO: 316263 - DNA, 100 bp, Homo sapiens
ttaggagagctgtgttctctgcagattctaagaccaagaatcgccttcagccctgtctggtgcatccttggcagaaagtgaggaggaaaacacccccatt

SEQ ID NO: 316264 - DNA, 82 bp, Homo sapiens
gttcgttgtgccagcgactaaaaagagtttaagctatgaagaaggacatccctcacactctgaaacagatctccttcagaga

SEQ ID NO: 316265 - DNA, 103 bp, Homo sapiens
agacctgctcaatgttaagatggcccttgacattgagattgccacctacaggaagctgctggaaggcgaggagagcagttgtgtgaattacgtgcctgagcct

SEQ ID NO: 316266 - DNA, 88 bp, Homo sapiens
tggagtgtaggtcatatcgccgcggtgcagtagacattgttgcaatcatgatcggcaatctgaaaggcacaaaaattctgcaatctat

SEQ ID NO: 316267 - DNA, 107 bp, Homo sapiens
cggggagcttacccagcttaaagagctccacattcaggggaaccgcctcaccgttctgcccccagaactagattcagaccaggatgtagcactcaaacttgcccagg

SEQ ID NO: 316268 - DNA, 97 bp, Homo sapiens
gtttggattccagatttgtattcgatagaccactgcctgtgtctcgtcttgtatctctaattggaagcagaaatagcaatgttttttgagtatggca

SEQ ID NO: 316269 - DNA, 98 bp, Homo sapiens
tgctattgaaagagagtatgcacagctgggatctagcaattgggaggcagcagacttgggtaatgaagagagaaaacaaaagttcttgagacttatgg

SEQ ID NO: 316270 - DNA, 75 bp, Homo sapiens
cggctcacctggcggtgcccgaggagtagtcgctggagtccgcgcctccctgggaaaatgttggggcttttcagg

SEQ ID NO: 316271 - DNA, 102 bp, Homo sapiens
ggaaatcagccctggacctggcagatccttcagcaaaagctgtccttacagtctatccttcactggagtctgatgatgatgaccctgctttgaaatctcgac

SEQ ID NO: 316272 - DNA, 74 bp, Homo sapiens
ccggctactactatgacccccagaccggcctctactatgaccccaactcccagccaagctctaaagcacatgta

SEQ ID NO: 316273 - DNA, 90 bp, Homo sapiens
tccagggaaggcactcaaaagtggggggcaggaaaggtgactgtaatcaatgagagactgaagacagatcaacatacatcttacccatgc

SEQ ID NO: 316274 - DNA, 100 bp, Homo sapiens
tagtgcatttcacaaagtattgtctgaaaaagctcaaaatgaggaaattctgtatgttcttcgccattatattcaggtggacgtgcaagtcagagaaatg

SEQ ID NO: 316275 - DNA, 83 bp, Homo sapiens
gagagagaagatcggggggctgaaatccatcttcatcctaccgctccgcccacaatgcagatcttcgtgaagactctgactgg

SEQ ID NO: 316276 - DNA, 86 bp, Homo sapiens
cgagccagcccgccagcatgccccagtccaaagggggatatgagactttctactcggaatatcctgagtgttgcgtggatgtaaaa

SEQ ID NO: 316277 - DNA, 100 bp, Homo sapiens
aactccaagctcttctggcgggcgctggccatgctgcaggatgatcgctgcaagatccctttattcatgctaatgtcctttatgccggcctctgctgtcc

SEQ ID NO: 316278 - DNA, 96 bp, Homo sapiens
tcctactacgcgtacgtggtggagctctgcgtgttgcagaatacagaaactgcagccatgaccacgcacgtcaccctggaagatgccctgtccaac

SEQ ID NO: 316279 - DNA, 75 bp, Homo sapiens
gaagctgttgaagaccctcctggatattcctgcaaacccaacagagatcatgatgcagccgtccttttggatttc

SEQ ID NO: 316280 - DNA, 100 bp, Homo sapiens
ggccaatgatggctttgtacggcttagaggacttccctttggatgtagcaaggaagaaattgttcagttcttctcaggaagaagctccatgggcactggt

SEQ ID NO: 316281 - DNA, 76 bp, Homo sapiens
tttcaccattaagaggaaagcgatggaggagctgagcgctgatgagtgcatttgcccagtataacatggatcagtt

SEQ ID NO: 316282 - DNA, 100 bp, Homo sapiens
ccaacctggatggagagaccaacctgaagcggcggcaggtggtccgcggcttctcggagcttctgcagaaccttggcctgaaaatgctacattatatcag

SEQ ID NO: 316283 - DNA, 101 bp, Homo sapiens
gcactgtgacctacactagtcgcgggagccacgcagaggacgccggaacaccctggaagccgagaaatgttttaacttctagtcatggcgaatgatcgcag

SEQ ID NO: 316284 - DNA, 78 bp, Homo sapiens
gacagtgggcaaagcgaggtgtttgtgtccaatgattatctccgagaagaagctgaagaggaggcggaagccggagtt

SEQ ID NO: 316285 - DNA, 100 bp, Homo sapiens
gaggcgcttggttccttacttctagagtctggaatatttaaaaaggcctcaggagtgcaagtagctgatgaagtatgtcgcattttttatgacatgaaag

SEQ ID NO: 316286 - DNA, 75 bp, Homo sapiens
ttgcgccgctgacttctccactggttcctgggcaccgaaagactatgtcttcagcagtggtgcagttatatgcag

SEQ ID NO: 316287 - DNA, 98 bp, Homo sapiens
cggccacagcctgcagcggagcccacgagaggcagcgccatggcggagcagacctactcgtgatgaccgcacctcgagcaggagtggggatgccacgt

SEQ ID NO: 316288 - DNA, 76 bp, Homo sapiens
caaagaccggcagatggtggtgctggaggaagaatttcagaacctcaagaaggcatgaagccagcccctgcagtgc

SEQ ID NO: 316289 - DNA, 82 bp, Homo sapiens
ccgaccccagagaggcgctggacagcatcatggcagaacaggatgtggaaaacgatcttttggattacgatgaagaggaaga

SEQ ID NO: 316290 - DNA, 100 bp, Homo sapiens
ggcagagcaaggggcttacgcagaaggacctggccacggtgaacgaggtggtcttcagccccggggagtcccactgcgccacatgcagtgaggatgggag

SEQ ID NO: 316291 - DNA, 74 bp, Homo sapiens
ctcatcccagccatgtcatcttatctacgaaatgattcagatcagccagtagacatgatgagcatcaaagcctt

SEQ ID NO: 316292 - DNA, 82 bp, Homo sapiens
agcagtcttccccagcaccccaccagagaggaaatctcggcgttactaccccacacgcctggccatcaatctctcatcaggt

SEQ ID NO: 316293 - DNA, 100 bp, Homo sapiens
agtgagacacaatttatcattgaataagtgttttaagaaagtggacaaagagaggagtcaggttgcttttaactttgacagaggaagaattttccaagac

SEQ ID NO: 316294 - DNA, 83 bp, Homo sapiens
aaaagtttgatttgatctggaaccgggctcagtcctgtccaacagacttctcccacgtggaaggccttctttctcaatctctt

SEQ ID NO: 316295 - DNA, 78 bp, Homo sapiens
gaatcccctgtttgagaaaaggcctaagaattttggcattgggacagtggccttagagctattgagaatttgatgcaa

SEQ ID NO: 316296 - DNA, 100 bp, Homo sapiens
ggccacgacccacgagatcatggggcccaagaaaaagcacctggactggggacttgatctcatcttcatgccaggccttgggtttgacaaacatggcaac

SEQ ID NO: 316297 - DNA, 98 bp, Homo sapiens
aaggcatggtcacaaagaactcaagaaaatcttcgaagacttttcagtggataagattgtggaccagctgcagcagttaatgcaggtgtatgacttgg

SEQ ID NO: 316298 - DNA, 100 bp, Homo sapiens
ccgactaccagaagtactaccgccagatgcgcaagtttgcctgggagcttgaaaggagaaagcacggggtcgccccaaaccccttctgcttctgcccatc

SEQ ID NO: 316299 - DNA, 100 bp, Homo sapiens
ttcctaacatccaggccgtgcttctgcctaagaagaccgagagtcaccacaaggccaagggcaagtgatttgacagatatttggagttcttacaacatgg

SEQ ID NO: 316300 - DNA, 98 bp, Homo sapiens
cttgtgccctagcaccccgagaaccgtcagtttgagccagatgggttttggccaaattgggcgagggcacaaaataaccacttaccccttctcaccga

SEQ ID NO: 316301 - DNA, 75 bp, Homo sapiens
aaagacagcaccccaagttctctggactcagatcctctggctttcaaggatatgctgtattcagctcaggaccag

SEQ ID NO: 316302 - DNA, 90 bp, Homo sapiens
cgaccaccgtcagcactcagcgcgggccgcctgcggcgagagggctacaccgtgcaggtgaacgtgaacgactatctggatatttactgc

SEQ ID NO: 316303 - DNA, 98 bp, Homo sapiens
ctcaaactaggcttcatgtcggcatttgtgaaggcctcagcctttgccttgcaggaacagcctgttgtaaatgcaggatcctggggcgtcctttggca

SEQ ID NO: 316304 - DNA, 100 bp, Homo sapiens
gccgccgcgcaggagcctcccggagctgagataattgacgaccttgccaacctagtggagaacacagatgaaaaacttcgcaatgaaaccaggcgggtaa

SEQ ID NO: 316305 - DNA, 75 bp, Homo sapiens
acctcatgtccctgtgggacacaatgcccccaagtctgaagttgcagccggagtgaagaagagcggaccgctgcc

SEQ ID NO: 316306 - DNA, 83 bp, Homo sapiens
tgttgtggggcttttacagcctttggtttccctgaaacctgggctcttgaagacgcatcactggagcagatggataatggaga

SEQ ID NO: 316307 - DNA, 99 bp, Homo sapiens
gtctgaaactggttgttccagtgaccaagaatatggcccaggtgaccaaagccctggacaaggccctgagcaccatggacctgcagaaggtctcctcag

SEQ ID NO: 316308 - DNA, 100 bp, Homo sapiens
aaggggattgcctggcaggacgtgaaggggaagaggcccaccctggagtaaccctcactggagaatccagagaaatgagccgtcagactgctacagcatt

SEQ ID NO: 316309 - DNA, 100 bp, Homo sapiens
gtttatcctataagacttcatccactgcataaaagagaggccaaagagccagagcaacagcaggcttatggctatgggccatacggtggtgcgtacccgc

SEQ ID NO: 316310 - DNA, 100 bp, Homo sapiens
cttgagtttggccgaatcaaacagggcattcagggagactggaataactgatgaggaacaagccattagcaggaaagaccacagcaagattctttcattc

SEQ ID NO: 316311 - DNA, 98 bp, Homo sapiens
aaagacaatgctcattgtacatcacagaactcacacgggagagagaccctatggctgtgatgagtgagatcatgaatcagacagataaaaatcaacaa

SEQ ID NO: 316312 - DNA, 89 bp, Homo sapiens
ggggtaaaagagatcaccgacaagatcaccacggacgagatgatcaaacgcctgaagctgcaggacaagttcgagcatcttaaaatgat

SEQ ID NO: 316313 - DNA, 98 bp, Homo sapiens
ttgaagacagagatttattcgtaatgcgactcaaagctgcacggcagtctgtttatgagaacattaaccaggtggtatttgttggaaatttcttgaga

SEQ ID NO: 316314 - DNA, 98 bp, Homo sapiens
tacgcagcaaaccatccagaagtgacccaggaggctctcacgtggagtccccagaacagcatcaactcctcacgatgctcctgacggtggtggacaga

SEQ ID NO: 316315 - DNA, 105 bp, Homo sapiens
cttccgcctcgtgggcggcaaggacttcgagcagcctctcgccatttcccggatctttaatctcatgaagtacgacagctacagccgcttcttaaagtctgactt

SEQ ID NO: 316316 - DNA, 100 bp, Homo sapiens
tgacatcagcggctctttgtatgatgaccttgctgagcgagagcgagaagcggcccttcgtggaggaggcagagcgccttcgcgtgcagcacaagaagga

SEQ ID NO: 316317 - DNA, 100 bp, Homo sapiens
gggaggcaaaggctacaagctgtccccagaggactacacgctcaaggtccagcaccatgtgctaggtcactcccagcgcgaggccacacctgggccgtcg

SEQ ID NO: 316318 - DNA, 75 bp, Homo sapiens
cctacccacgctgaacgagagggacacggagcagatgtttccattcctgaaaaacccaagcttagatttattgaa

SEQ ID NO: 316319 - DNA, 75 bp, Homo sapiens
ccccgtgaccaccgctgcgttttctcgggcatgtgagtcaggatctggaagcctcgtcatgttcttcaacacaag

SEQ ID NO: 316320 - DNA, 88 bp, Homo sapiens
cacgatcccggggctcaagtggcttaacaaggatgaagcctgctgggagcgtgaatgacatggccctggatgccttcgacttggaccg

SEQ ID NO: 316321 - DNA, 100 bp, Homo sapiens
gcctgcgccccgcacccctccgagcagcccggggatccagcacgcaggaacttggatacgattggtgttgctgttgatttgattcttctgtttcgtgaac

SEQ ID NO: 316322 - DNA, 74 bp, Homo sapiens
caaaggggagcccaggtctgaggccataggaaaaggatacagagtagagtttcatgaacctgaaacttggtgga

SEQ ID NO: 316323 - DNA, 75 bp, Homo sapiens
cttcagtgagcaaggcatcaacgagtttctcagattcttctgatgtagagcgactggaaagattcttcgactcag

SEQ ID NO: 316324 - DNA, 100 bp, Homo sapiens
ccaggatcttataaaacaaatgctgctgctatgaatatgggtcgaccattccaaaaaaatcgggagcacatggcaagcctgtcaggcggacacaggaaca

SEQ ID NO: 316325 - DNA, 100 bp, Homo sapiens
tcaaatggcacttcattggccacctacagaaacaaaatgtcaacaaattgatgggccattatgctgctggattggacctcaatgacacctactctgggaa

SEQ ID NO: 316326 - DNA, 82 bp, Homo sapiens
aggcgcgggaggtgttcgagaacgaccccgagacgaggagaagtatgtcaccgtgcagccttacaccagccaaagcaaggac

SEQ ID NO: 316327 - DNA, 100 bp, Homo sapiens
tacgtctgcggaagtgcagctgcctcagttcttagcgcagacttatgaaaatatgcatcagtttaatactgtcttggaattcatgagatggaagcatagg

SEQ ID NO: 316328 - DNA, 82 bp, Homo sapiens
gaagatgactattttttggagaggcctgatgcccgaatttcaggaagctgtgctgaatggtttggtggccactgaggtgttg

SEQ ID NO: 316329 - DNA, 100 bp, Homo sapiens
gagaaggcggcgcgggaggtgaagttgctgctgttggtactactataattccttgacccagcagtacctttactgggatggggaaaaagagacctacgtg

SEQ ID NO: 316330 - DNA, 49 bp, Homo sapiens
ctgtttgtcttctgctttggcccagatgagcagcaccagcagtaagagg

SEQ ID NO: 316331 - DNA, 130 bp, Homo sapiens
ctgcacttcgcattttggcattgacatttaattttagggtcctttatatagaagggagagtaggtctgtttctgtcgactgtggaccacttatgtgcgatccgtggaccacttgcgtgcgatctgtcggc

SEQ ID NO: 316332 - DNA, 89 bp, Homo sapiens
ggcattgacatttaattttagggtcctttatatagaagggagagtaggtacccgggctccacattcatggatcatgtgttacgctatca

SEQ ID NO: 316333 - DNA, 100 bp, Homo sapiens
gactgctacacctcagcccggggctgcactgccaccctgggcaacttcggaggagacatcacagctttcccagatcgggaggaaaaatatggaatgtgtt

SEQ ID NO: 316334 - DNA, 101 bp, Homo sapiens
ccactctgggggacaaacggggatggggacgaaactgcagagaaagagcccccagcggccgaagatggtctcctgatcctggctgataagctccagggccc

SEQ ID NO: 316335 - DNA, 82 bp, Homo sapiens
ctgtctttatctgctgtcaaggatcttgtgtgctccatagtttatcaaaaggctgaccaactgactgaagagcagattgcag

SEQ ID NO: 316336 - DNA, 109 bp, Homo sapiens
tattcttaatcaggatgcaaagaattatcatgcctggcagcatcgacaatgggttattcagatccagacatttaatgtggatgcaccatgccagaccgtggaagattta

SEQ ID NO: 316337 - DNA, 51 bp, Homo sapiens
gggcagcacccccagccgcagcccccgctgaacactctgctccagccaagg

SEQ ID NO: 316338 - DNA, 98 bp, Homo sapiens
catcgacatcagtgaagaagatcagggacaccatgtggcggatctttactggatcgctgctggtagaggagaagtcaagtgcccttctgcatgacctt

SEQ ID NO: 316339 - DNA, 88 bp, Homo sapiens
cgcatcgagcagaaggacttcaaggcactatgggaggaccttaaatatatttttggaagatatgttgacttttcatcagaaacacagc

SEQ ID NO: 316340 - DNA, 74 bp, Homo sapiens
tcctcccagtgacgggtctggagtgcgtgggggaccggctgttggcgggtcaaaatgcagatcttcgtgaaaac

SEQ ID NO: 316341 - DNA, 83 bp, Homo sapiens
caagtacctgtcccggaaccacatgcacgagctcccagctcctccagcagccgacaggaggcccgtcaagatgcaggcaggca

SEQ ID NO: 316342 - DNA, 100 bp, Homo sapiens
cagaagccgacgttcgagaggaagattcttacctctttgatctcgacaataagtaataaaagactagtggccttagtgcccatgcccagtgaccctccat

SEQ ID NO: 316343 - DNA, 50 bp, Homo sapiens
caggtgactgtcccagaagtgaatcgcagcctttcatccgctgtagttta

SEQ ID NO: 316344 - DNA, 75 bp, Homo sapiens
tgagccgccccgcgcccccgccgcgccctcagacttgtgcaccatggacaattttgctgagggagatttcactgt

SEQ ID NO: 316345 - DNA, 101 bp, Homo sapiens
cgacatcacgcacaaggtgctcaggtttgggtacccagaccccacctacctgacccgggtgcaagaggagctgagagcgaagggtatcacagatgactgaa

SEQ ID NO: 316346 - DNA, 98 bp, Homo sapiens
atactccacagttgtatgtggcctgtggtaggggaccccgatcatctctgagagtcctaagacatggacttgaggacaaggacacactcagcattcac

SEQ ID NO: 316347 - DNA, 113 bp, Homo sapiens
cctcaggaagccgtggaagctcgaccgccagaaacttccttctcctgactcaggccacagtcttctgtgtgatggccgccaagaacgagtcatgtttgacaaaattacatctc

SEQ ID NO: 316348 - DNA, 50 bp, Homo sapiens
cctgaggagagaatggcatgccagtactatactggcaattgctggagaag

SEQ ID NO: 316349 - DNA, 75 bp, Homo sapiens
ttgattctgacagcaatcttctggctctcattcgagatgtcttacttccccattggatgaaaaatctgacaaaca

SEQ ID NO: 316350 - DNA, 100 bp, Homo sapiens
agggggggggcggcggccgaacgatgtgcgagaactgcgcagacctggtggaggtgttaaatgaaagcagaatccagagaccacatttgaagtatatgtt

SEQ ID NO: 316351 - DNA, 74 bp, Homo sapiens
cctcccaagtagctgagattacaggaactttatattgctgttggaatatctggagccatccaacatttagctgg

SEQ ID NO: 316352 - DNA, 90 bp, Homo sapiens
ccccgcaccacctcctgctgccttcccgtcgccgctcccgaagcttttccagatggcccactgcgtgaccttggttcagctgtccatttc

SEQ ID NO: 316353 - DNA, 75 bp, Homo sapiens
gtttttcaaagcctaccaaaatctgagggaaaacccctgatcctaaaatgaatgctaggacttacatggatgtaa

SEQ ID NO: 316354 - DNA, 100 bp, Homo sapiens
ttccagccagagagcatcgcctgtgcctgcatttatcttgctgcccggacgctggagtttcatcaagaccaacttctcctgaaaaattttcagtgcctca

SEQ ID NO: 316355 - DNA, 74 bp, Homo sapiens
tccaacacagatgtccaagctgccaagacgcgagaactcttggaactgggtattgataatgaagattcagaaca

SEQ ID NO: 316356 - DNA, 100 bp, Homo sapiens
ttcgccagcaccgtgctctccaccacagctattgacctgaaaagtggttctggaaaagtgtaccaaggccctgcaaaaggtgctgctgatacaacaatca

SEQ ID NO: 316357 - DNA, 75 bp, Homo sapiens
tcggcctcggagcaacgagcgcagcgccgtgtcaaatcaacagtgccttgacatctttccacactgctttggaac

SEQ ID NO: 316358 - DNA, 100 bp, Homo sapiens
cgacgggcgggtgaagatcggacactacgtgctgggcgacacgctgggcgtcggcaccttcggcaaagtgaagagaattgaaagatgttggccatcgtga

SEQ ID NO: 316359 - DNA, 85 bp, Homo sapiens
ggcctgactgctgcggaggcctcggcaatattgattttagacaggtgaaaggtgtagcagtcactcggcctacacccacagcatc

SEQ ID NO: 316360 - DNA, 75 bp, Homo sapiens
ccgcgctgccgagaagctttacctcgctgaccctatgaaggtccttcgattctatgcaatctgggatgatacaga

SEQ ID NO: 316361 - DNA, 100 bp, Homo sapiens
tgaaaatggaactccaggtcaaacagaggagatgttaaagtaacccatcttgcaggacgacattgaagattggtcttctgttgatctaagatgattattt

SEQ ID NO: 316362 - DNA, 100 bp, Homo sapiens
ccggacgagaagcgcagcaacgtgcggtgggaccacgagagcataaaataccatgaggagtttgagaagagccgcatgggccctagcgggggcgagggca

SEQ ID NO: 316363 - DNA, 98 bp, Homo sapiens
agggaaaagcgaggcaaggcaggcgggttgtggtttctcgatcaggaccatcaacccctcatgtgaattttctcctggactcccatccagtgtctcca

SEQ ID NO: 316364 - DNA, 100 bp, Homo sapiens
tggtcgtcgtcctctgctgcatcatgatgtcaacaaccgtggctcacaagatgaaagagcacgttagtaaaactggagctgaaggtgctgtgctggatga

SEQ ID NO: 316365 - DNA, 82 bp, Homo sapiens
cagacactggaaaactggatgctgcagacactgaacgaggagccagtggttcattttccagacactgaaagagcagaatggc

SEQ ID NO: 316366 - DNA, 100 bp, Homo sapiens
ggtgcttcaggaaacctgcattctcgaaaacttgttagctttacattgtcagggaggagatatcaccaaacatgatggaacaggcggacagtccatttat

SEQ ID NO: 316367 - DNA, 50 bp, Homo sapiens
ccatcctctacctcaagtatgagccagtgtgactgtgggaagatggagga

SEQ ID NO: 316368 - DNA, 100 bp, Homo sapiens
gcgcagcggaactcgaccggatccaacccagttagttacttcctgtctagagttgtagcttccacctgctattgacctgaaaagtggttctggaaaagtg

SEQ ID NO: 316369 - DNA, 116 bp, Homo sapiens
gggctccgtggaagcgtggccggcagcgtcccggacgaggagtgtggacaacagtgagtatatgcggaatggagacttcttacccaccaggctgcaggcccagcaggatgctgtca

SEQ ID NO: 316370 - DNA, 100 bp, Homo sapiens
cttcagatctcagaatgttgaggatgtctcctgacactgtgccaaaggctcctaaacatttaaaagcagaccggaacatgaacattttgcagtactgccc

SEQ ID NO: 316371 - DNA, 75 bp, Homo sapiens
ccgggcgggggcaccgagggctaccacgttctgcggacaagttggatggcttgaggactggtactaaaaggaaac

SEQ ID NO: 316372 - DNA, 75 bp, Homo sapiens
tggagcctcagttggaagcagccgatccagcctgcggagcctgtggggcagatcaccggggaacccttgatccgt

SEQ ID NO: 316373 - DNA, 82 bp, Homo sapiens
aggaatccgagaagagcagagcggagggagccccagacacggggatggagaagtttatgtttgggatgtgaactcaaggaag

SEQ ID NO: 316374 - DNA, 90 bp, Homo sapiens
cagcgcccgcgccccgccgctgagccgtcgcggagccgcgcagccctcggagcacgtgatgaacggcagcagccactcaccaacagccat

SEQ ID NO: 316375 - DNA, 60 bp, Homo sapiens
cagagatggacggtcactcagcctatggagggttgaagctttgagagaagcagcaactgc

SEQ ID NO: 316376 - DNA, 97 bp, Homo sapiens
caggcagggcccccatggtcagaaccctgctagagccatcaaggtcccagggtttggaaatcccttgtctccaggttgctgggattgacttcttgct

SEQ ID NO: 316377 - DNA, 83 bp, Homo sapiens
gcccgcgcctgggctgccggcacttcgcggcagcaggatgatgggcaggacagggagaggctgacctacttccagaacctgcc

SEQ ID NO: 316378 - DNA, 73 bp, Homo sapiens
aatttatcaaggagaagatctgcctcaccccaagtccatgcttcagacccagattgatcactatgttggcatc

SEQ ID NO: 316379 - DNA, 103 bp, Homo sapiens
gtcttcggtggactccttcggcagtccacccaccgccgccgcctcccagggagtgcatccgccccaacccttttccccctcgtctcctgtgagaattccccgt

SEQ ID NO: 316380 - DNA, 90 bp, Homo sapiens
gaacttacgcagatcagccgaaaggccaatgatgaggccaatcagagtgatacaagtgtctccttgtcagaacccaagagcaaaagcagc

SEQ ID NO: 316381 - DNA, 50 bp, Homo sapiens
ggggagcagaaggactcggacacagggatcactgagattctgatgaacag

SEQ ID NO: 316382 - DNA, 82 bp, Homo sapiens
ccgacatcgacgccgcctggcaggccctgcgcaccagtgtccccaactcctgcccagccagtccacgcggtgccggctcctc

SEQ ID NO: 316383 - DNA, 111 bp, Homo sapiens
ctatgttctccgccgcagcccccaggactttgacagcttcctcctcactgtctgtgtccaggagatcaaagacgctggccttcagacctgatcagactcccaggggcagcc

SEQ ID NO: 316384 - DNA, 82 bp, Homo sapiens
gatcttttggaggaggaggatgaatttgatagagagacatatctgaagagatggattaagaatgctttggattaaggattgt

SEQ ID NO: 316385 - DNA, 100 bp, Homo sapiens
aacacgtcatctttccaaagaagagtgagtagcttggttggtggtaccctaaaattagggcatgattaagatgggtcccatcagcctgctgatcataggc

SEQ ID NO: 316386 - DNA, 100 bp, Homo sapiens
tttcacaataagagcagaggatggaacacttcagtgcattcaaggaacggaaaacagttcttccttcaaagcatgcagtacctgaagtaatagaagactt

SEQ ID NO: 316387 - DNA, 50 bp, Homo sapiens
gtttgtcaccacaaaaaggacaggaagcaagatttccagatgtagcaaat

SEQ ID NO: 316388 - DNA, 101 bp, Homo sapiens
cttggactgagtcctgcaggacacaggaggatacgaagcgttttcggcttcctgcccggagctgtgcagcaaacagtcgacccccatggggctcagccttc

SEQ ID NO: 316389 - DNA, 87 bp, Homo sapiens
gcaaaagctcagacttttgagcagtgtgaaacccaagattttagaaagagaaggggaagaaaatgaagccttacataagatgattgc

SEQ ID NO: 316390 - DNA, 50 bp, Homo sapiens
ggctgccctgggccactggctacgcagagatttgcagatttacagaatgg

SEQ ID NO: 316391 - DNA, 50 bp, Homo sapiens
gctgggcctaggtctgcgccctgatggagtcttgctctgttgccaggctg

SEQ ID NO: 316392 - DNA, 98 bp, Homo sapiens
gggtgttcccgaactagagtgggttacaggaggttccagtggcatcgggaagtgcattgctatcgagtgctataaacaaggagcttttataactctgg

SEQ ID NO: 316393 - DNA, 100 bp, Homo sapiens
aaaactcggtctcctgttgctcactttcctgggtattgtagccgctgtgcttgtcaaggccaagtcctgtatctgccatgtctgtggcgtccacctcaac

SEQ ID NO: 316394 - DNA, 75 bp, Homo sapiens
aacaaggccaaccatggaaatggataaatggtactgaatggacaagacacatcaattcctgaagattgccaagcc

SEQ ID NO: 316395 - DNA, 98 bp, Homo sapiens
gggaccggcgtcagggacacggggtgctgcgctgcgccgacggctccacctacaaggagtctcaggagcaggggctgcggcagaggctgctggacgag

SEQ ID NO: 316396 - DNA, 75 bp, Homo sapiens
gttctttatgaagagctttctcttggcactacctcctaggacagagaaaatggctgttgaccaggactggcctag

SEQ ID NO: 316397 - DNA, 100 bp, Homo sapiens
cgccgattcctcctccttggtcgccgcgtccttggctggcgtgtgtcggtgtcagaggtcaaagcagtggctgaaatgcagtttggggaactccttgctg

SEQ ID NO: 316398 - DNA, 100 bp, Homo sapiens
gccgccatcatggacaccagccgtgtgcagcctatcaagctggccaggaatttcgctaaggagtttgtgatcagtgatcggaaggagctggaggaagatt

SEQ ID NO: 316399 - DNA, 100 bp, Homo sapiens
atcggcgcccagcaatcacagaagccgacaaggcgttcaagcgaaaacatgaccgctgagcccatgagaacaaaatccagtctcatagcagaggagaata

SEQ ID NO: 316400 - DNA, 100 bp, Homo sapiens
ggggctggagaaacgactctgcgccgccgctgcctccatcctgggcaaacctgcggacggacaagctgtggggggtctgtgtctccatcctggctctctt

SEQ ID NO: 316401 - DNA, 99 bp, Homo sapiens
ctccacggaaagcagcttcagcagcactccagtctgacagcaatgcaagcttcctccgtgctgccagagcaggcaacctggacaaagttgtggaatatc

SEQ ID NO: 316402 - DNA, 76 bp, Homo sapiens
cgggagtattatgaaaagatcgaatgtatcctgtcaggtataatgtcagtgaatggcaagaaagttcttcatatgg

SEQ ID NO: 316403 - DNA, 100 bp, Homo sapiens
gtgagtccctcacaaagggcggagcggggctgtcacctggagatcacggagggaagaattcccgtactgattagtcaacagtggaaaatctgaagagatg

SEQ ID NO: 316404 - DNA, 83 bp, Homo sapiens
cagaactttgagggcgaaggggccttgtgcaaattgtggctactaatttgccccctgaagatcaagatggctctggggatgac

SEQ ID NO: 316405 - DNA, 83 bp, Homo sapiens
tggaaaaattgccacccaactactccatgcattctgctgagggaagacaaaggcgctttggctaagctggtggaagctatcag

SEQ ID NO: 316406 - DNA, 51 bp, Homo sapiens
tggcattttagatctaattcaagcaaccctgctcagcccacttccctccac

SEQ ID NO: 316407 - DNA, 76 bp, Homo sapiens
gcgcctgggctgccggcacttcgcggcagacaaactttctgcctccttggaaagctctacatctccttgtgattgg

SEQ ID NO: 316408 - DNA, 109 bp, Homo sapiens
cagctggagctgagcaaagtgcgtgaggagtttaaggagctgaaagcgcggagcttgcaagtttttgaagaaacaggaatctctcatagtgaatttctccatcgtcaac

SEQ ID NO: 316409 - DNA, 99 bp, Homo sapiens
gccagcctgcgaaggtggcggcgctgctgctcgggctgctcttggaggcagttgtgaaaaacttcaggacaaaaatgtttcatttaaggacttgtgctg

SEQ ID NO: 316410 - DNA, 100 bp, Homo sapiens
gtccttctgcccaagatgaagcctctcctctatcagaatggagggccagttataacagtgcagacacctgaaagaccccgccgtggcatcccagggcttc

SEQ ID NO: 316411 - DNA, 90 bp, Homo sapiens
cgggccatggccgccgccgatgccgagtgatgttcctccatcttacgttcaaactaaattttctaggctgaaagctgtctatgttccatt

SEQ ID NO: 316412 - DNA, 90 bp, Homo sapiens
cccagatccaaaataacttttcactagagatcaatgggaagggtgagtttgtagatgatgggactgaaactcacttcagtatcgggaacc

SEQ ID NO: 316413 - DNA, 100 bp, Homo sapiens
cggccctgtgcccccatcctgggtgccaaggtgcagagctacgagaaggaggaggacctgctgcaggtcctggtgaacgccatcatcaacagtggtcccc

SEQ ID NO: 316414 - DNA, 89 bp, Homo sapiens
gagagcgtgaccgagagcgcgaatatcgtcatcgttagaaggaatattccctgggcttttgaggcaataaagcaagcaagtgaatgggt

SEQ ID NO: 316415 - DNA, 98 bp, Homo sapiens
cacttcctggtgggcaaggggctcagctcgcagcgcatccccgcgcacagggtcctggcggcagagaccacgtcccagcaggagcggctgcaggccat

SEQ ID NO: 316416 - DNA, 90 bp, Homo sapiens
ggctctactgcgtctaccagagcatggtgctcttcttcttcgagaattacaccggggtccagaatgtgaaagatgttgcagaagtgttcc

SEQ ID NO: 316417 - DNA, 105 bp, Homo sapiens
cagtccagaaagcggcttatcgaacagagccgggagttcaagaagaacactccagagttcctggtccagaactttacacagaaaaggtgctcaaaggatatttgt

SEQ ID NO: 316418 - DNA, 51 bp, Homo sapiens
gagaggagctgctgctcggaccagcgcgggtctcgctctgttgcccaggct

SEQ ID NO: 316419 - DNA, 97 bp, Homo sapiens
acgttctaaaaagaggcgaaaggaagcaagcagttcagaagagccaaggaataaacatgcaatgaacccaaaagggctaaagaatccctgaaacagg

SEQ ID NO: 316420 - DNA, 49 bp, Homo sapiens
cttgctcaagaacttatggtctagttgcagaggaaagtggtcgcttatg

SEQ ID NO: 316421 - DNA, 100 bp, Homo sapiens
tcaagtgaagcaaaagcctttcatgattatctgaaccttagccggccgatcgaggagcagggccccctggacgtcatcatccacaagctgactgacgtca

SEQ ID NO: 316422 - DNA, 50 bp, Homo sapiens
ggaacacttcagtgcattcaaggtgtcagctgtgatgcatgtttaaaagg

SEQ ID NO: 316423 - DNA, 96 bp, Homo sapiens
cgaaggcggctttagtggcagcatgaagcgcaccccgactgccgaggaacgagagcgcgaagctaagggcttcctgaagaatgagaaggacaatgc

SEQ ID NO: 316424 - DNA, 100 bp, Homo sapiens
tcaatcttgagagatgagcaccagttacacaaggacttctttatccgagcgctggattgcatgagaaggttttacagaaggcgacacatgttgttcagag

SEQ ID NO: 316425 - DNA, 109 bp, Homo sapiens
cggtggggactgcacgtagcccggcgctcggcatggctctcctggtgctcgacaatgcagatcttcgtgaagactctgactggtaagaccatcaccctcgaggttgagc

SEQ ID NO: 316426 - DNA, 83 bp, Homo sapiens
ctcgtattctcctgcccttccccaggtgacttaagagattaaaattaatttggttgctgttggttctgaacaaataatgagtt

SEQ ID NO: 316427 - DNA, 98 bp, Homo sapiens
aaaattttagaagttcatattgacaaagaaaggatctatgtttatgaaaataaaaaggaagcattgcaagctgtcaagatgatcaaagggtcccgatt

SEQ ID NO: 316428 - DNA, 100 bp, Homo sapiens
tttgtgaagagcatcaaggactatggcgtgttcatccagttcccctcaggtcttagcggactggccccaaaagctgcatcttgacagcagtagcaatgag

SEQ ID NO: 316429 - DNA, 97 bp, Homo sapiens
aaccaaaagattcacctttggatttcatcgcttagaccaagatcactccatggatgaaatgacagctgtggtgaaaattgaaaaaggagttggtggc

SEQ ID NO: 316430 - DNA, 100 bp, Homo sapiens
cggcgcacgcaccacgacggcgccatcaccgagcgcttgatgtgcgcggagagcaatcgccgggacagctgcaagggacccagacatggagctgcgggaa

SEQ ID NO: 316431 - DNA, 100 bp, Homo sapiens
attttggcattgacatttaattttagggtcctttatatagaagggagagtagctgttctaaagaaatccaaatggcagttctgctgaaatttgtttcaga

SEQ ID NO: 316432 - DNA, 97 bp, Homo sapiens
ccacttcgcctaagtttccagaagactttgacgatggagagcatgcaaagcaggacactcatgaggaccatgatacttccactgagaatacagacga

SEQ ID NO: 316433 - DNA, 98 bp, Homo sapiens
cgcggagggccctcgagccgtgttcgtgctgttggaggagcgcaggccggccgactcggctcagctgctcagatcagcttgaacgggtctttttacga

SEQ ID NO: 316434 - DNA, 71 bp, Homo sapiens
aaaacatcatagttgaaccgtcctggaatagaagagaattactggctccagtagccgcagaagccatggag

SEQ ID NO: 316435 - DNA, 82 bp, Homo sapiens
ctgagtaccaaggaatgattgagattgtggaggagggtgatgaaacttatcaggacatatttcgtgatttttcccaaatggc

SEQ ID NO: 316436 - DNA, 50 bp, Homo sapiens
gatgctggtttataccaaggacagcctaccgtatgtgaacgggagctgtg

SEQ ID NO: 316437 - DNA, 100 bp, Homo sapiens
ggcccctattttggaatacattgtgaaatatagaagtgaagcgaaatgtggtgattttaaagctgttatagtggaagtatcaggacaagcccattacacg

SEQ ID NO: 316438 - DNA, 85 bp, Homo sapiens
tcagaaacacagcctgatgaggaggaagaagaagaagaagaaaaagtttctcaaccagagattcaaccctatgaaaagataaagg

SEQ ID NO: 316439 - DNA, 82 bp, Homo sapiens
gttggaagcagccgatccagcctgcggagcctgtggggcaggctactgcagcactggggtgtcagttgttggtccgacccag

SEQ ID NO: 316440 - DNA, 75 bp, Homo sapiens
cttgctcgtgccttagacaagaaactcctttccttaaagctcggggtgtggttttctctcggttgtgcctatttg

SEQ ID NO: 316441 - DNA, 101 bp, Homo sapiens
ctaagagaagtcacaaaacagcagatttcccaagagcagcggaaaatgatccagtcacaggtgtgctgggcatcaaggtgaagatcatgctgccctgggac

SEQ ID NO: 316442 - DNA, 90 bp, Homo sapiens
agaagctccccacgtggttccgttgtctcaatgagatcttggagtcagcagatgcacccttagaagtcactgaaggattcattcagtcaa

SEQ ID NO: 316443 - DNA, 100 bp, Homo sapiens
cacctgctctcccggcaaggaaacttcgcaggctggagcggcctattgccaattcatggacatgctcttccctggctgcattagtttgaagaaagtaaaa

SEQ ID NO: 316444 - DNA, 100 bp, Homo sapiens
gtggacgttgcatcggacccaaccgctgtgcttgtgtttatgggttcactggtccacagtgtgaaagagattttaccaaatgttgcaagaactctggagt

SEQ ID NO: 316445 - DNA, 100 bp, Homo sapiens
gccaatttcatgaatttcaagagagtaccattggggggtaagatgatcatgcaggataaactggagaaggagcggaatgatgctaagaacgcagtggagg

SEQ ID NO: 316446 - DNA, 100 bp, Homo sapiens
agatattttgtgtgttctgacaagagatgattgttttaaagggaaacgatggggagcccagacttggtcattaaggttattggatcaaaaagagatgaag

SEQ ID NO: 316447 - DNA, 75 bp, Homo sapiens
tggacctgtacagcatcaactacctgcactttggggagcctaagtcctggaggcaacgcacgggccacaggcatg

SEQ ID NO: 316448 - DNA, 75 bp, Homo sapiens
ctgggacaagataactggagagcctctctacaatgctgtggctctgtcagattcagggagttttgtatcttctcg

SEQ ID NO: 316449 - DNA, 117 bp, Homo sapiens
cctggcctgaagacatttcctctcctcccctctggatttctcagagaaactgccagaggcatgcagcattggtgatggaaagccctttgtcatgaatctgcaggatctgtatatggc

SEQ ID NO: 316450 - DNA, 75 bp, Homo sapiens
acccttgcatggtgtttcaaagggtggtgaagaactaaggtaattctgttccacaggatatctgctgtatggcag

SEQ ID NO: 316451 - DNA, 90 bp, Homo sapiens
ccttgacaacacagcccatggcaacatggcctgctttgtgctgatgaacatggtcaccttgaaaggtgtgttgaatatggcagagccaga

SEQ ID NO: 316452 - DNA, 78 bp, Homo sapiens
atcaggtataataatgttctgcagtgaaaagaaattgcgtggtacagaggtgcagttccatggtacaccataaatctt

SEQ ID NO: 316453 - DNA, 100 bp, Homo sapiens
caagaccacatctgctgtgaagaacctgcagcagctagcccaagatgcggacctggccttgctgcagagtgggaagctttggggtggccggtttgtgggt

SEQ ID NO: 316454 - DNA, 100 bp, Homo sapiens
gagactccaaggacaactgcaagggggaagtagagagataacaaaagctgctcagagtctcaatgaacttggatcgtttagaaagaggcaacaagaaaag

SEQ ID NO: 316455 - DNA, 100 bp, Homo sapiens
ggaaaacaacttcgagggcagagctccccaaaaaggccacaaagacagccccacctgccctgcctacaggttatgattcagaggaggaggaagagagcag

SEQ ID NO: 316456 - DNA, 83 bp, Homo sapiens
cggttccgcggcccaggggcgccgggtttggtggcacagcgagccccctttctctagcgacctcctgccccccgaggtctgca

SEQ ID NO: 316457 - DNA, 50 bp, Homo sapiens
tgctatgttactgcaatggcatgaaaaggaagaaggtagataatgactat

SEQ ID NO: 316458 - DNA, 74 bp, Homo sapiens
ggaaccctggtcaccgtctcctcagataaagatgatattgagactccactgctaactgaagcagcccccatcct

SEQ ID NO: 316459 - DNA, 100 bp, Homo sapiens
ggaatctgttcttcttttgcatcctacgtaaccagaccaagctgtgggacccgtgagcagctacaagccgaagtgcagagggcacaggcgcggatagagg

SEQ ID NO: 316460 - DNA, 100 bp, Homo sapiens
cgcgcacaggccggtggaatgggtccaggccgtggtcagccgcttcgacgagcagggtccaaattccaagcctgtagtgtccttcattgctggtttaact

SEQ ID NO: 316461 - DNA, 90 bp, Homo sapiens
tgcattggaacatgacatgagattaagcggcacccgacctgacagcgttcagcgacccgcgccagttccccgcgctgccctccatctccg

SEQ ID NO: 316462 - DNA, 101 bp, Homo sapiens
gtgatcgtcaataacaccgagagggttttggaaatttgcccatctgcatggcaaagaccgatctttctctgtctcaccaacctgacaaaaaaggtgtgcca

SEQ ID NO: 316463 - DNA, 100 bp, Homo sapiens
gtcctgaattagaaaaggtattcattaaagaaaataatgggaaggaagaagtatccaagcctttgaagaagatggtggagagaattcgcaagttccagat

SEQ ID NO: 316464 - DNA, 50 bp, Homo sapiens
agaaatggagcccttctccaagagtcataaacattctaagtgcatacggc

SEQ ID NO: 316465 - DNA, 90 bp, Homo sapiens
ttgataaaaagagatgtggggggattctcgacctgctaacagaactggaccttttcgctttaccaacagggacgcttatgtcaactgggc

SEQ ID NO: 316466 - DNA, 100 bp, Homo sapiens
cgccgctgccccggctgcctcctccctgagctggagatggagctgaagatgctgaagtctcagtccagctctgccgaacagagcttcctgttctccaggg

SEQ ID NO: 316467 - DNA, 100 bp, Homo sapiens
ggaaactcatcaggacggaagcacaggggccactcagagtcgcccgagaagctcatcagattcaagagatgtttccccaggttccataccatctggtact

SEQ ID NO: 316468 - DNA, 100 bp, Homo sapiens
tggcggtccctgtgacctgtggagacacggccagatctgccctccagaattacatgaatgacagtcttcgaaccaatgtgtttgttcgatttcaaccaga

SEQ ID NO: 316469 - DNA, 75 bp, Homo sapiens
gaacgaattaattgcatccctgaccagccgccaacaaagaaactctataaaacaggtcgggagatgcaggagagg

SEQ ID NO: 316470 - DNA, 126 bp, Homo sapiens
tggtaaactgtgggatgaactcagtctggttgggcttccagatgccattgatatccaagccttatttgattctacagctgtcaattccatgccagtggataacaggaaccacaatgaaggaatggt

SEQ ID NO: 316471 - DNA, 100 bp, Homo sapiens
agtctgtgcagtggcacctgcgcgaagctggccaaagcctgcccagacggctcacctgtgcgggatggaacaaaagggtccaccaaaatatactaaatct

SEQ ID NO: 316472 - DNA, 101 bp, Homo sapiens
gcgggctccagactcgccgtggtcaagttcaccatgagaggaactatggagatgggactccctatgaccacatgaccagcagggaccttgggtcacatgac

SEQ ID NO: 316473 - DNA, 100 bp, Homo sapiens
ctttcctctgctgccgctcggtcacgcttggtttccatgggtgaactatcaagatggcaacctcaacatttcaattccagtgtttagtattcatggcaat

SEQ ID NO: 316474 - DNA, 89 bp, Homo sapiens
atcagactgacccctcgggcacataccatgcctggaaggatgacgacagatatgagcaggcgagtgacgtccgggcacagctcaagttt

SEQ ID NO: 316475 - DNA, 118 bp, Homo sapiens
gacagccgcgcgctgagggtctcggggcgggcgccgcgggacctctccgggccatggccttatgccagcctggaccatcttggaggcagtgtaggatcatggaagaactttgaattag

SEQ ID NO: 316476 - DNA, 80 bp, Homo sapiens
gcctttgacaggagaggctgcttcttgtagaggtgtcgtgaaaactacccctaaaagccaaaatgggaaaggaaaagact

SEQ ID NO: 316477 - DNA, 100 bp, Homo sapiens
caaactggaaaataaagattacagagaaaaaaccaacaccttcctgtgcagtcctgttggaatttatttaacagaggctttggatgaagatgcagacccc

SEQ ID NO: 316478 - DNA, 85 bp, Homo sapiens
tctacacactacagctattgttaggggttggggacatgggcagagcctattgggacataatgatatccaatcaccaaaattcaaa

SEQ ID NO: 316479 - DNA, 82 bp, Homo sapiens
ggcgggcccgacacacgccggaggagccggacaatgcagatcttcgtgaagactctgactggtaagaccatcaccctcgagg

SEQ ID NO: 316480 - DNA, 100 bp, Homo sapiens
aagaacgctctcatccggaggcaggaccagctgcagctgctgaaagaccacagcaagattctttcattcgtctcctcctagcctgggggaccaggctcga

SEQ ID NO: 316481 - DNA, 83 bp, Homo sapiens
cagacccgtttgggttctccacgcattctagactcccgaagaggagcccagcagccggggccgccctattacaccgacccagg

SEQ ID NO: 316482 - DNA, 74 bp, Homo sapiens
tattggaaggaggagattctgaagataaggaggttttcctttggaatatggataaatacaccatgatacggaaa

SEQ ID NO: 316483 - DNA, 100 bp, Homo sapiens
aaagaggtcagatgatgacagctgtgtccttaacaaccaggccccagggaacagtgttgataaagactgctgaagaattgatgaattttagtaagggaga

SEQ ID NO: 316484 - DNA, 90 bp, Homo sapiens
tatcacttgtataaaataggctgagatatagtgactgtaagctgtgatctcagtatacaaagtcattgaaattatgagactatcattcaa

SEQ ID NO: 316485 - DNA, 83 bp, Homo sapiens
ctgtgagcaagaggaagctgcagcccacccgggcagccctcaccctgacaatgcagatcttcgtgaagactctgactggtaag

SEQ ID NO: 316486 - DNA, 83 bp, Homo sapiens
ctaccccatgggtcgacctatcagatgcgccggccgggcggagagctgccactgatcctctggaccttctccatctacctgga

SEQ ID NO: 316487 - DNA, 88 bp, Homo sapiens
gaagtgcttgatatcacagaggaaactctgcattctcgcttcctggagctgctgaatgccatggtggcaaaactggggaaccgggagg

SEQ ID NO: 316488 - DNA, 74 bp, Homo sapiens
ttgtctccttcgacttggagtctttgtccaggacgtatggactttctgtcagattttgagatgatgttgcagcg

SEQ ID NO: 316489 - DNA, 100 bp, Homo sapiens
ctgatgaagttcgagcactaatatttaagaaagaagatgttaactttcaggtgacttaagagattaaaattaatttggttgctgttggttctgaacaaat

SEQ ID NO: 316490 - DNA, 100 bp, Homo sapiens
ttacaaccgcagcagtggtggctatgaacccagaggtcgtggaggtggccgtggaggcagaggtggcatggggctggacaccgccccccaaatcctgcct

SEQ ID NO: 316491 - DNA, 75 bp, Homo sapiens
gaggtgtagagaggaccccgggacatctgaaagccaggaaatgggtgatctggaccctctggcatctctcaaatc

SEQ ID NO: 316492 - DNA, 100 bp, Homo sapiens
cattgccgcatctaccaacagagatgctcaagccgcttgtggagaagcggcgccgggaccgcatcaaccgcagcctggaagagctgaggctgctgctgct

SEQ ID NO: 316493 - DNA, 100 bp, Homo sapiens
gtattgggagatctacagctaagacgccaggaacccctggaagcctagaaatgttcgatcctttggtacagaagacagaccgacagatcgtccaatacca

SEQ ID NO: 316494 - DNA, 95 bp, Homo sapiens
tgcctgctggcaagaatctccagtttttgacgggggccattcagcaactgggtgggataaacattgacgatcttgaggatgaccctgtggtgaac

SEQ ID NO: 316495 - DNA, 50 bp, Homo sapiens
gaaatggcacctatggacaagtctataagaccagaatccgtagaagctag

SEQ ID NO: 316496 - DNA, 74 bp, Homo sapiens
aagttctgtatgagacgtatcatggcgtgtttgtcaacattcaggacttggagaagactctagatgtttttaac

SEQ ID NO: 316497 - DNA, 83 bp, Homo sapiens
tccccatggggctggcctgcggcgcctgggcgctctgaggtgtggacactgccagcggctgcagccgacttggaatgacctgg

SEQ ID NO: 316498 - DNA, 75 bp, Homo sapiens
cgttttagaaaatcataacaagcggttctctaccctgtaaaggctttcatgagaaggacaagaagccatattgcc

SEQ ID NO: 316499 - DNA, 48 bp, Homo sapiens
acctgttaccactttcaaaagtagcttcctattgaagtttattcggaa

SEQ ID NO: 316500 - DNA, 74 bp, Homo sapiens
gagtccctccggaactcacactccagcactattcctgatcagagaactccagttgcttcaacacacagtatcag

SEQ ID NO: 316501 - DNA, 75 bp, Homo sapiens
atttcaacttgccaatgtgcaaagctgcagaaaccacagtggtagaggctaggcagctggaagagaaagaccgag

SEQ ID NO: 316502 - DNA, 100 bp, Homo sapiens
ggtccccgtggtgaagtgggtcttccaggcctctccggccccgttggacctcctggtgctactggtttccctggtgctgctggccgagtcggtcctcctg

SEQ ID NO: 316503 - DNA, 82 bp, Homo sapiens
gaaaataatctagatattgatggctttgcaggaacgaatgcaggaatttgggaactgagctgtgcaagtgctgaagaaggag

SEQ ID NO: 316504 - DNA, 100 bp, Homo sapiens
gacacccaacctacccgtggccgaggctgggaggcggcagaatgcagccagaggagggcacaggctggctgctggagctgctgtccgaggtgcagctgca

SEQ ID NO: 316505 - DNA, 98 bp, Homo sapiens
tctgtccccatcggctggcagcgctgtgtgcgagagggtgctgtgctctacatcagattcttcaggagatgatgaaagagattgactatgatggcagt

SEQ ID NO: 316506 - DNA, 50 bp, Homo sapiens
aaactgaatcacaggagatatttccaggcattagatggcttcattatcgc

SEQ ID NO: 316507 - DNA, 80 bp, Homo sapiens
ctgccttgggctctgttgcttctctgggtcccaggagatgttacagcccagatagctcttcagcctgcactgaagttcaa

SEQ ID NO: 316508 - DNA, 100 bp, Homo sapiens
ggacacagcagccatggaggctgagaggctgcacgtgtcagctacgctagcctgcctcaccgccatcatccaggagatacttgagagggaccatgcccgg

SEQ ID NO: 316509 - DNA, 82 bp, Homo sapiens
agaagcagcagcagcaactcctgatttaggggcaatcgatgtatcatgatattagctggtttgacatcaagtcatttgtgag

SEQ ID NO: 316510 - DNA, 100 bp, Homo sapiens
ctaacagcagctgggaaagaagttatgcttgttggaattggtgacaaaatcagaggcatactttatagcctaccatgagaataagagaaagaaaatgaag

SEQ ID NO: 316511 - DNA, 75 bp, Homo sapiens
taaggcaacacttccttgaagaaacaagcttacaggatgtaatccctgttcattactacttaatacctccaccaa

SEQ ID NO: 316512 - DNA, 101 bp, Homo sapiens
cagcaaggaatcgagctactcacattagatgcatcctggttggaaagggcaaagaaattacaagaacagcgagaaaaggaaatggttgaaaaacaaaaaca

SEQ ID NO: 316513 - DNA, 100 bp, Homo sapiens
gaaggtttctatcctgcaccaggactaaaggcttatgacaacttaagcttgagtgatcacttactaagagcagtactaaatctcttgagaagggaagttt

SEQ ID NO: 316514 - DNA, 83 bp, Homo sapiens
cagagagctccctggaccatctaatggctatgggagatgtgtttcctgaggttataggcgggtgtttgaggagtacatgcggg

SEQ ID NO: 316515 - DNA, 82 bp, Homo sapiens
atttggagtgtgcgtgcgcgccgagcggctgctgagaactagccctagacctctgcgtgagggttcttctgccgaagacatc

SEQ ID NO: 316516 - DNA, 75 bp, Homo sapiens
gtgaccctgggagattactaccagggccggaggattaccatcaccggaaatcaccgaagtggccttggagtacaa

SEQ ID NO: 316517 - DNA, 100 bp, Homo sapiens
cctctccgccccccaggaggggcgagagggagccgcagctgatgtcagaaataagcgggttttgaaaacaaaaaaaagaaggagtggaagagggggccag

SEQ ID NO: 316518 - DNA, 96 bp, Homo sapiens
tcatcaaaagtacattgttcaccgtgatcttaaggctgaaaaatcatcagtactaaagtcaaaagaggaaagccatgaacagtcagcagaacaggg

SEQ ID NO: 316519 - DNA, 75 bp, Homo sapiens
aaaggagaggatcccggagccggatatgggccctcacattttccaaacctgtccatctgctaactattttgactg

SEQ ID NO: 316520 - DNA, 101 bp, Homo sapiens
gtggcgggaccttttttataaactggctgaagcccatccagactgtttgatgctgaacttcaccgttaaggacaagcaggaggacatgaagactattttgg

SEQ ID NO: 316521 - DNA, 100 bp, Homo sapiens
cagccaacgatgaccagtccaggcccagcctctcgaatgggcacacctgtgtagccactgaggcggctcccagctgcgttggcgacatggccgacacccc

SEQ ID NO: 316522 - DNA, 100 bp, Homo sapiens
ctcggagttggcaggaagccaggttgcagggtgtccgcttcctcaggtctccaccagctcctggccgggttcgaggacaagtcagcctatgcgctctgca

SEQ ID NO: 316523 - DNA, 100 bp, Homo sapiens
gtgggagagcgaggcctgagcctctgcgtctaggtttctgagtcccttcaacatgatcctgggaggaatcgtggtggtgctggtgttcacagggtttgtg

SEQ ID NO: 316524 - DNA, 107 bp, Homo sapiens
cgggcactatgcttggtgtaatggtgaatgagacagaagtggtatttgtcctcgtagtgcataaagagcaatggtggaacaaagcggcaaaagatatcccatcaaaa

SEQ ID NO: 316525 - DNA, 90 bp, Homo sapiens
gattcgcagtggtcgcttcttctccttgggatgcccgggtagttaaagacatggcaactggaaaatccaaaggctatggttttgtatctt

SEQ ID NO: 316526 - DNA, 96 bp, Homo sapiens
tgacagaggctgaagacaaaattaaagagctggaggcctcaaagattttgcctgcctgagctcctctagtagtggccacaattgccagagaagata

SEQ ID NO: 316527 - DNA, 75 bp, Homo sapiens
cggagagctcgccttggagagcccaggagcaggggagacatggagggctccccgaggactttctgaactccctgg

SEQ ID NO: 316528 - DNA, 100 bp, Homo sapiens
cagcccgtctgccccgcccacatctagaacgcttttcctactcttgccaagagggagaaaccaaggagctctggtcatcaggtcaccatctcaaggcctg

SEQ ID NO: 316529 - DNA, 82 bp, Homo sapiens
ggccacaatcttcaatgagtaaacatattcctgcttgggcactgtttaaaggaaagttccgagaaggcatcgacaagccgga

SEQ ID NO: 316530 - DNA, 100 bp, Homo sapiens
ttcaaggacccgggactagtggaccagctggtgaaggcagacagcgagtggcgacgatataattgtatggaagagatacagtgattttaagaaactacac

SEQ ID NO: 316531 - DNA, 100 bp, Homo sapiens
gctgaccggcgtgtggaacactggtggtttgcagatcactgagccgcagcaatggcgctgagttcctctgctggagttcatcctgctagctgggttcccg

SEQ ID NO: 316532 - DNA, 90 bp, Homo sapiens
accaaacactagtgtctcccctgcttcaggggacacccactgtcagagtgaacgacaaaggaatgtttggatgaagcaaatgctgcattg

SEQ ID NO: 316533 - DNA, 83 bp, Homo sapiens
tgcagatcgagctgggcaagtgcaaggcggaacacgaccagctgctcctcaatttggtgccctggttgtcagatgttggaaag

SEQ ID NO: 316534 - DNA, 75 bp, Homo sapiens
gtttccgatttaaagctgagctgcgaggaaaatggcggcgggagacatgttttgagcgcctgctgtgtctcaagc

SEQ ID NO: 316535 - DNA, 82 bp, Homo sapiens
tcaaggaggtgctgaagagcgaggagacacgatgaggcgagtggtacgacagagcaagtttcggcatgtatttgggcaagcg

SEQ ID NO: 316536 - DNA, 101 bp, Homo sapiens
cccttagcggcccggcgttgaattccgggaagtgggagcttcaggctcgctccgtgcggggaccgcagatgttcatggactgcagcccacaggccctgccc

SEQ ID NO: 316537 - DNA, 98 bp, Homo sapiens
ggtgatgcagaagctgctccgcaagcaggaggaaacgggattatgaaggttatttatgctccctgctgctccctgcagaatcccgaagctctgttttt

SEQ ID NO: 316538 - DNA, 82 bp, Homo sapiens
cagctctttgcatccggagagtggacaagaaatatgtggagggatcttttgagaaatacctggaacggttgggagatcccaa

SEQ ID NO: 316539 - DNA, 100 bp, Homo sapiens
ggaagaggcatgccagaggtagagcaggagtgtggccatctggggccgtgtggtatttgccactcaggagacatgtccctatgacatagcagtggtgagc

SEQ ID NO: 316540 - DNA, 75 bp, Homo sapiens
ggggatcggcgctctggctgtttcgtgaaggagagagagcctgcttgaatttcttgaaactgtgcaaaataaaat

SEQ ID NO: 316541 - DNA, 157 bp, Homo sapiens
gccagagcctggagtctgcgaaggccgggacccggttccccggcccacagtgggggtgtgcaaacccgagagaactggttccaaaagctgagacaagatcttgaaatggtactgtccactaaggagtcaaagaatgaaaagttaaaggaagacttag

SEQ ID NO: 316542 - DNA, 75 bp, Homo sapiens
ccaagctgaagccactgagaaaagctaaagaattacctccaaagccattgtcaagaccacagcagtcatctgcac

SEQ ID NO: 316543 - DNA, 75 bp, Homo sapiens
ccaggcctgagcgaagcccacaaccccgccgggcacatgtgaaagatcaaaggctcgtggtccagcaagaggggc

SEQ ID NO: 316544 - DNA, 98 bp, Homo sapiens
aattcatctgggcggtatctggaacttgagatggggtctcactgcgtcttccaggctggagtgcagtggtatgatcatagctccctgcagccttaaac

SEQ ID NO: 316545 - DNA, 100 bp, Homo sapiens
tgagagctacaacttggagaatggaaaagaaccattgaagcttgagagaaaagcccccaaaagcagctattcagatgaggacggggacttggttgccttt

SEQ ID NO: 316546 - DNA, 80 bp, Homo sapiens
cggtgctccggggaggtcacctgacgaggaggatcccggctactcaacagaaatgaaggaggaatctgtaaagaaacacc

SEQ ID NO: 316547 - DNA, 75 bp, Homo sapiens
agagtacacacccaaaagcaagaagtattacttgaccaaactgcagctggaatacccagtacagttctgcttact

SEQ ID NO: 316548 - DNA, 97 bp, Homo sapiens
gagataactttcgtatcacaaaagcagatgctgctgaattctggagaaagttttttggagacaagtgattttacaacgagatgctgctctccatagg

SEQ ID NO: 316549 - DNA, 75 bp, Homo sapiens
ttctcactctttgacagtaaagagaaccggccaatcaggatattagaaatggctactccccagtcaattttcatc

SEQ ID NO: 316550 - DNA, 75 bp, Homo sapiens
ggagaggcgagctcgcgatgagtggtctcggcaggctcttcgggaaggatggtgtcggacggcatgacaggcagc

SEQ ID NO: 316551 - DNA, 74 bp, Homo sapiens
acctttccaacacagatgtccaagctgccaatgatgatgatgatgattttgatgatgaggaagctgaagaaaaa

SEQ ID NO: 316552 - DNA, 82 bp, Homo sapiens
tgagcctgcagccggccctgccggtatcgtccttggagaagatggaagcggagaggcggccggcgccgggctcgccctccga

SEQ ID NO: 316553 - DNA, 96 bp, Homo sapiens
gccgctcgcggagggagaggctgcagagcgagggcaggaggactttccttatcccagttgattgtgcagaatacactgcctgtcgcttgtcttcta

SEQ ID NO: 316554 - DNA, 82 bp, Homo sapiens
agatgcttgtggaagccacccgggagtttgaggaggttgtggaactgtggctgcaccatctgtcttcatcttcccgccatct

SEQ ID NO: 316555 - DNA, 59 bp, Homo sapiens
gaaaatgagcagatactgaatgtaaaccctgcagatgatgaggagtctgatgaggaagc

SEQ ID NO: 316556 - DNA, 100 bp, Homo sapiens
aaaaagctgcttgaatgtctgccgaaatgttcaagtttaccaaaagagaggcaccgctggaacactaatgaggatggagatattctagcatccaacttct

SEQ ID NO: 316557 - DNA, 100 bp, Homo sapiens
aatgtaaaactccaatcagataaattacaacacggatgtggtgaagtattacagacacttagcacctgatcacttgctgcaaatatgtcatcgactagga

SEQ ID NO: 316558 - DNA, 100 bp, Homo sapiens
gcgcatccccgcggacgccacagcgctctgggagtgtccactcgccttccaccagcatggcaacgtcttcacagtaccgccagctgctcagtgactacgg

SEQ ID NO: 316559 - DNA, 107 bp, Homo sapiens
ggatatggtcgtgatcgtgactattcagatcatccaagtggaggttcctacagagattcatatgagagttatgctcctggtaacgtttttatccatggatgacttgc

SEQ ID NO: 316560 - DNA, 80 bp, Homo sapiens
gtcgtgccggcgccgcccggaccgccaggctgaccccgcactacatctacccaccagccatcgtgcagcccagcgtggtg

SEQ ID NO: 316561 - DNA, 100 bp, Homo sapiens
gagagggttaaaccacagggtcccgagggtcccttccagctgtcacattctggagcgtatgagatgaggagattagcagaggcatttcatatcagtgagg

SEQ ID NO: 316562 - DNA, 100 bp, Homo sapiens
aaaggatgacatatttttggacctgaaacagaaattctggaacacctatatggcgcccgctccggccggcaccatggacagcgaggcattccagagcgcg

SEQ ID NO: 316563 - DNA, 75 bp, Homo sapiens
aataccaggatagctgttgtttcagagaaagtaacggcacagccaacaagatgaacggagctttggatcactcag

SEQ ID NO: 316564 - DNA, 98 bp, Homo sapiens
tatgatctacctaccaatcgtgaaaactatattcacaggaggagtttgcaaaccaaagctgatcagcaagtcaaacagcaggaaatctaagtctccta

SEQ ID NO: 316565 - DNA, 71 bp, Homo sapiens
agcagaaagttgaacagaacgcggctcccagccacaccaagttcagataattcagcattggcgtatttgct

SEQ ID NO: 316566 - DNA, 73 bp, Homo sapiens
tatcagaacagatccgggaattaagagagttgctcgataatgtggaaaataagatgaaaggcacctgtgtaga

SEQ ID NO: 316567 - DNA, 75 bp, Homo sapiens
gtctcctgcaagaactggctcaagaaatttgcctcgaaaaccaactgaagacctaactgcagcatgtctgtattt

SEQ ID NO: 316568 - DNA, 100 bp, Homo sapiens
agcccagatgagctgccctcggcgggcggcgacggcggcaaatctaagaaattttgttgctaacaaccacaagcagaatttgatgacggtggcaaacctt

SEQ ID NO: 316569 - DNA, 143 bp, Homo sapiens
gctcacccacttggccgaggctctgcaccaggcccggctgctggccctcctggtcatcccgcctgccatcacccccggagacactatggacagcgtgaagcagagcgcggccctgtgcttgctgcgcctgtacaggacgtccc

SEQ ID NO: 316570 - DNA, 89 bp, Homo sapiens
gcgggtgaagatcggacactacgtgctgggcgacacgctgggcgtcggcaccttcggcaaagtgaagaaggtgtgctctgaacaagccg

SEQ ID NO: 316571 - DNA, 82 bp, Homo sapiens
aaacccctcgcctggctcggacccacggagccggcagcccagcactccggtcctgaacgaggctgtgggggccctgatgtac

SEQ ID NO: 316572 - DNA, 83 bp, Homo sapiens
aaggccagccctgcaggctccaagcaagaggctactcacagtcgaactacaactccccggggtccggccagaactacagtggc

SEQ ID NO: 316573 - DNA, 100 bp, Homo sapiens
gccgtggacatcggggcagctgacctcgcccacgcccagcagcagcagcaacaggcatttatgtttgaatcatctttaagtctggcggtcacaaagtggg

SEQ ID NO: 316574 - DNA, 98 bp, Homo sapiens
agaagcgagtcaaggcctcccactccttcctccgagggctgtttgggagtacaagcgcaagctagccagagtttccctggtgcgcaaagaactcaggt

SEQ ID NO: 316575 - DNA, 87 bp, Homo sapiens
ctctggaccaggagaggcccgcggtgaccgaggcctgggccccggggaaatcctcattgacgattcaatttgttgaaggccaatttg

SEQ ID NO: 316576 - DNA, 95 bp, Homo sapiens
tgggtttgaacggaatgctggagtcagtggaagacggagctggtcggcccgaaggctgaccccgcactacatctacccaccagccatcgtgcagc

SEQ ID NO: 316577 - DNA, 75 bp, Homo sapiens
tcgggaagagatagatcatgcagagtattacctttacaactattgcagatcccaaccccctgctagactaataag

SEQ ID NO: 316578 - DNA, 100 bp, Homo sapiens
ccagtacggatggtctggcaacatggagagaatcatgaaagcacaagcgtaccaaacgggcaaggacatctctacaaacctaatgcatggaaagctaaca

SEQ ID NO: 316579 - DNA, 80 bp, Homo sapiens
ctctgctgtgcttgccttattggtgatgtgcattgtcttacgcccttcaagaggtctggacaaagtgccaaaggatcttc

SEQ ID NO: 316580 - DNA, 80 bp, Homo sapiens
gcagccaccctcgctccctctgctcttcctcccttcgctcgcaccatggctccataaaaatacagactcaccagttcctg

SEQ ID NO: 316581 - DNA, 75 bp, Homo sapiens
cgatgctttaacatacagccactagactctgctaacaccagatagtggaaagaaaccatgtgctgaaatgtttga

SEQ ID NO: 316582 - DNA, 83 bp, Homo sapiens
ctgcaggtggtggaaaagcagaaccttagcaaagaggagctgatagcggagctgcaggagcaggccgggctctcgccatgggt

SEQ ID NO: 316583 - DNA, 97 bp, Homo sapiens
gatggctctcattgacatcactgtgcggcacatcgcagacctgtcaccaggagacaagaccctctttcccagctgcccgctcctcagcacccgaaga

SEQ ID NO: 316584 - DNA, 74 bp, Homo sapiens
gtagctgttcctctggcaatacaaactttctgctttcagaatgggaagcatgcccaatctgtccattcctcagc

SEQ ID NO: 316585 - DNA, 98 bp, Homo sapiens
cggagcggcccgcgcctgggctgccggcacttcgcggcaggtggccagcatcgaaatgttcagccttttagtgatgaagatgcatcaattgaaacaat

SEQ ID NO: 316586 - DNA, 100 bp, Homo sapiens
ctcacgacagaaggcgtctcatggcgttggaataccggctctcagcggcttctcgtttcctctcagtccatccacccttcatggggccagagccctctct

SEQ ID NO: 316587 - DNA, 74 bp, Homo sapiens
cccagctactacacaaaactaccaggaggacactgcatgtgagacttcagattggacctggagatagtaatgac

SEQ ID NO: 316588 - DNA, 90 bp, Homo sapiens
tgcacggattagaactgggccacaccctgaaccagttcgatgttgtgataaggaagatgagaatgtgcctactgctcctgatcctccaag

SEQ ID NO: 316589 - DNA, 91 bp, Homo sapiens
ggaagaactcgtcatgctctttgtagcgtggtgcttctgttgctcacagcatttcagataagagatactcaacctgcaacttatagaggtg

SEQ ID NO: 316590 - DNA, 75 bp, Homo sapiens
agctatccgggttcatcctacatttttgtgcaagaggagttcaaagaaggacgcagagccagccacacagcccca

SEQ ID NO: 316591 - DNA, 83 bp, Homo sapiens
gaaacattggaaaagaaatcctgataagaactgctttagtcatcttagtgggatttggggaagcaacagggctgtgtggggta

SEQ ID NO: 316592 - DNA, 75 bp, Homo sapiens
acagaaatcacctatgtttacagcgacagatgcctttgagtaatggacagatgggccagcctctcaggcctcagg

SEQ ID NO: 316593 - DNA, 101 bp, Homo sapiens
cggccaacttcggcaagatccagatcgggatttacgtggagatcaagcgcagcgatggtgctgaccccatatgctgtctcgactgcaatgacaaagtatct

SEQ ID NO: 316594 - DNA, 75 bp, Homo sapiens
atcagccaccgattcccagaagatcatgatcccaccattgaaatggctgcaagcaactgacctcactagagaagt

SEQ ID NO: 316595 - DNA, 74 bp, Homo sapiens
tccactaatcaccagaacaaaatgtgcaggccaaccaagccctcgagcagttattcccatgtcctgtataacca

SEQ ID NO: 316596 - DNA, 75 bp, Homo sapiens
tgtgaagagaggagttgagaacatctctgttgacattcattgtggtgctggagaatctggtaaaagcaccattgt

SEQ ID NO: 316597 - DNA, 101 bp, Homo sapiens
cagaaaagcatgttcagttagtgttgggacaactgatagatgagtttctgaaggtttgtggatccgaattagtacgccttgaattgtcttgcagccacttt

SEQ ID NO: 316598 - DNA, 90 bp, Homo sapiens
gttaatctgaggtgaagcaaacagaaaattgtggaggttttgttggacccaagtttcttcaccatggggatgtggtccattggtgcagga

SEQ ID NO: 316599 - DNA, 100 bp, Homo sapiens
ctttagatgcactgttggcttgcgagacaaatatggggtgaagctaagtagtcttcttggtaaaaagggaaacttggaaaaactccagagctactgggaa

SEQ ID NO: 316600 - DNA, 100 bp, Homo sapiens
gctcagaaagctgtatggacctctgtgtgggttgtatttaaaaggtcacactgggacagcaggaaaacagagcagcctgatcttacacggtgctgatttc

SEQ ID NO: 316601 - DNA, 75 bp, Homo sapiens
caggggaccaagctggagatcaaacaacagatctcggcccctttccaaacactcctgatgcctcatttgcctctc

SEQ ID NO: 316602 - DNA, 74 bp, Homo sapiens
ctgcgcagggcctgccaggtggcgctcggtctcaccaacggctttgggggtgcgaggagcgagcaggagccggg

SEQ ID NO: 316603 - DNA, 109 bp, Homo sapiens
agaaactgaggcctggaatttgattaactcattcaaggttacccagttggtgctggagaatctggtaaaagcaccattgtgaagcagatgaggatcctgcatgttaatg

SEQ ID NO: 316604 - DNA, 50 bp, Homo sapiens
cgggccatggccgccgccgatgccgagtggtttatcagatactatcattt

SEQ ID NO: 316605 - DNA, 80 bp, Homo sapiens
ctttcaactctacttcaacccgcaccttgtgttccggaagttccaggtgggatgctatggaatatgatgagaagctggcc

SEQ ID NO: 316606 - DNA, 100 bp, Homo sapiens
agcagcatggcatttcagtcactggtttgcagagtccaggtccctttctagagataggagaagagagagatcgctgtctcgggagagaaatcacaagccg

SEQ ID NO: 316607 - DNA, 82 bp, Homo sapiens
tccggagcaagcgggcgagggcagcgccctaagcagacatatctgaagagatggattaagaatgctttggattaaggattgt

SEQ ID NO: 316608 - DNA, 75 bp, Homo sapiens
ccgaggcgaccactcctgtgatcgttgcggctggggctggaggggaggaaggccataaaattttgagtagaaaaa

SEQ ID NO: 316609 - DNA, 88 bp, Homo sapiens
accacctggaagcctagaaatgccctgaccctctattctgcaccctgtgagccaccgagactgaaccaaacccaggaagcggcgccac

SEQ ID NO: 316610 - DNA, 85 bp, Homo sapiens
ttctcagaacggatctccatcgttaagtgacgcatgactaacaatatgatgcgtttgtgaagtttacgcatgatcaaataatgcg

SEQ ID NO: 316611 - DNA, 50 bp, Homo sapiens
ctccccagtagctgggactacagagcaagatgagacaggccttaggattt

SEQ ID NO: 316612 - DNA, 75 bp, Homo sapiens
tgcggctccaggtgggctcacgcggtaaggggcctggataccaagaagtgactgctcatctaatccataaagcta

SEQ ID NO: 316613 - DNA, 83 bp, Homo sapiens
ccgcccgcccctcggacactgcccccgccgccgccggagctctgcagcacggtcagcccaaggccaaccccactgtcactctg

SEQ ID NO: 316614 - DNA, 74 bp, Homo sapiens
cgaaaaggagaacttcttaagaagagtgaatcctcactatggatgggctcattgaggacattaagcatcggcgg

SEQ ID NO: 316615 - DNA, 89 bp, Homo sapiens
agaagatgtccacgcctgttgaagttttatgtaaggagacagcaatatgttgggaaggtcaagtttgcctccttggaattttcccctgg

SEQ ID NO: 316616 - DNA, 99 bp, Homo sapiens
ctgagcgcctggagttggagacaattcctggttcagaatttaaacatctttctagagcactagacaaactgaatggatttcagttagagaatttcacct

SEQ ID NO: 316617 - DNA, 82 bp, Homo sapiens
gactcgcggaccggcgtccccggcgcgaagaggctggactcggattcgttgcctgagctgtgggacacagtccgtgggcagc

SEQ ID NO: 316618 - DNA, 75 bp, Homo sapiens
ctgtgcgtatctggcgtcagtatctaccaggcaatgaacaagtaatagctcttcaagtctgcaataaaaaatggc

SEQ ID NO: 316619 - DNA, 83 bp, Homo sapiens
gtcggcccctgcgccggcctcggccaccgagatcctgctgacgccggctagggtcgcgtggggcaggcagtggcgctgcgggc

SEQ ID NO: 316620 - DNA, 98 bp, Homo sapiens
tctgattccaagcaaaaaccaggagtagcccatcgaagccagagcagtgaaggagtcagttctctcagcagctcgccctctaatagccttgaaacgca

SEQ ID NO: 316621 - DNA, 75 bp, Homo sapiens
tgaaactggatctacggccctttccatagccagagcagtacaagaatacagaagtttacggtgagttttatcccg

SEQ ID NO: 316622 - DNA, 50 bp, Homo sapiens
acattcacattccactccttcctcatctgaaattcacagtatggccaaca

SEQ ID NO: 316623 - DNA, 83 bp, Homo sapiens
ggaaattatgaccaagtacctcaccccaaaggtactccaaagattcaggtttactcacgtcatccagcagagaatggaaagtc

SEQ ID NO: 316624 - DNA, 100 bp, Homo sapiens
agctgcccactcctcctggggaggctgccgtggaggccatggagatccctgccccggagcccgagaagacagttcgcctctacggaccaaacttcatcct

SEQ ID NO: 316625 - DNA, 101 bp, Homo sapiens
atgatccggaccctgagactcccctaaaggccagaaaggatccaaactactggatacaggtgcatcgcttggaacatggagatggaggaatactagacctt

SEQ ID NO: 316626 - DNA, 75 bp, Homo sapiens
agagcctgctgatgtcagtgggacccattcagatgaggtggaaagtgagaaatggtacctgtctacagacttccc

SEQ ID NO: 316627 - DNA, 50 bp, Homo sapiens
gttcaagaagaacactccagagaatcccctactttgaaactagtgctgcc

SEQ ID NO: 316628 - DNA, 95 bp, Homo sapiens
gcagagacaaaccagtatattatgctttggaacaagatggattctggatatactctgagtattgtaacaaccacctggatgcttgcatggagctc

SEQ ID NO: 316629 - DNA, 96 bp, Homo sapiens
tgagatagaaggggaggggttacagactgtggtgcctacccccatcactgcttccctcagccataacaggtatacccgaaatcttgtggatcaagg

SEQ ID NO: 316630 - DNA, 80 bp, Homo sapiens
gagatgcacactgccttaatggaggcctgcatgggcaaagaaggagccttcatggtaagggattccaggactgcaggaac

SEQ ID NO: 316631 - DNA, 82 bp, Homo sapiens
aaaattcggccagggttctcgctcttgacaatgagttacaaggcactaatagttctggatccttgggtggtcttgatgttcg

SEQ ID NO: 316632 - DNA, 100 bp, Homo sapiens
ttcgcgattacaatgatgcagacatggcgcgtcttctggagcaatgggagggatgttggtggtaaatgtaacgtggaggaacaagacatatgtaggtaca

SEQ ID NO: 316633 - DNA, 100 bp, Homo sapiens
cgcttatcagcattatctagtcctttccaccccgaaattcgccccgattaaagactgtgttgcattatcagggccaattcctgtccccccagcagcatgg

SEQ ID NO: 316634 - DNA, 75 bp, Homo sapiens
cagacttggattatgacatcgaagaggataaactaggaggaagaaggtgggaaaggtgaaaagaggaagagagaa

SEQ ID NO: 316635 - DNA, 82 bp, Homo sapiens
tgcaagttcttctacagccccagttatgtggacgagctgttaaaccagatgatatcatcaagttgaatcgaaaggaagggaa

SEQ ID NO: 316636 - DNA, 101 bp, Homo sapiens
attgctgcgaatcagccaggagaaggcgggcatgctggatgtcaactttgacaagggttatggttttgtgaaattcacagatgaactggaacagaagcgag

SEQ ID NO: 316637 - DNA, 100 bp, Homo sapiens
gtgcggcatcacctcctccaagaccgtgctggtctttctcaacctcatcttctggttttttgtagcatcagatccaacagttaaaacagatcgactgtgg

SEQ ID NO: 316638 - DNA, 83 bp, Homo sapiens
atcaaaaatcttgtacctgatgccgatattcaacgctttcgtgggcgacagatgcgaaagaaacgagttccagtgccaagacg

SEQ ID NO: 316639 - DNA, 83 bp, Homo sapiens
tgactacaagctgaaaaacatttttagactccatgaacttccagtgagctggttagctccattcagaaccaaatgcagtccaa

SEQ ID NO: 316640 - DNA, 110 bp, Homo sapiens
acagaattaaccagagaaggtgaaacgatcatcgagctaaaatatcgtgttggactgcatcaaaacatgtaaacaaggacctcggtaatatggaagaaaacaaaaagtta

SEQ ID NO: 316641 - DNA, 95 bp, Homo sapiens
gggaagatgtggcctgtgttgtggacactctgtgcagttgtctattcataagaaccccaacacatcggagccccaacacctgttggtgatgaagg

SEQ ID NO: 316642 - DNA, 49 bp, Homo sapiens
ccgggccatggccgccgccgatgccgagccaacagctcatcaaggaagt

SEQ ID NO: 316643 - DNA, 75 bp, Homo sapiens
cagcaatggacgcatcaaacagctgcgatcaggtgcagcttcaagcttaggaccacccaccatgcctatccaggt

SEQ ID NO: 316644 - DNA, 100 bp, Homo sapiens
tctattctccgtggtgtcatccttgccaagtcttaatgccagaatggaaaagaatggcccgggtactagcaaaggccagacgtcttactcaacaacttcc

SEQ ID NO: 316645 - DNA, 98 bp, Homo sapiens
acaggtgaatttaaaggagcagccctggtgtcacctatcagtaaaagacagttgaatttctgaatgaaaagctggaaaaaagggaggctcagttatta

SEQ ID NO: 316646 - DNA, 82 bp, Homo sapiens
ccaggacctccaggggaacaatgaggcctacgcagagctcatcgtccttgagctagagccggtgcaggccacgcagaacaag

SEQ ID NO: 316647 - DNA, 100 bp, Homo sapiens
gacttttcgtgtcccgctgtaaggaaacaagatggtccttaaaaccgaagaggaggacggaactgtggaaggtgcatcagtgaagaaatggaccaatgtg

SEQ ID NO: 316648 - DNA, 100 bp, Homo sapiens
aggaggaagaaacctcagacagatcgccggggaggcagcgcgggatcccagcctcaggcgtgcgcggacggtgtgcgggaagctgccacttttgctagag

SEQ ID NO: 316649 - DNA, 100 bp, Homo sapiens
ccgagcccggaggccagatgagcggacacagccccacgcgcggggccatgcaggagacgttctcttccagatggctgaagtccacaggcagatccagaat

SEQ ID NO: 316650 - DNA, 100 bp, Homo sapiens
ttggcaaaccagatatatgacttgactgtgagctgcttgtccccatcctgcggccgtcctggggacacagagccctccgtggtgcccggggattggattg

SEQ ID NO: 316651 - DNA, 100 bp, Homo sapiens
ctccagaaccgtgagaagtaaatttctgtttcttctcggacaaactatttagtggaaaaggcttacattttcagccatcagttttagattttggaataca

SEQ ID NO: 316652 - DNA, 98 bp, Homo sapiens
ggccgggaggggacggccgccggagccgcgaggccaaccttgaaaagatcttttgaggtcgaggaggtcgagacacccaactccaccccaccccggag

SEQ ID NO: 316653 - DNA, 96 bp, Homo sapiens
cgggggaatgtggcgctggatccggcagcagctggtattccggaaggacctcatcagtgccatgaaacttccagattctcaccacattaatcctga

SEQ ID NO: 316654 - DNA, 100 bp, Homo sapiens
gcgagcagaactacggcgagcgggaggctgaaccgtctgagcccagaagtgctgaggtgacgaggaagcccaaggctgctgttccttctgtgaacaagag

SEQ ID NO: 316655 - DNA, 101 bp, Homo sapiens
agcaggatgaggaagtgagctcgctcacttgtgatgccctgactgagctgctggctaagatcaccaacacagacgtgaaatacggggttgtagaaggcaaa

SEQ ID NO: 316656 - DNA, 83 bp, Homo sapiens
ggacaagagacgatcattctgcaagcaggcaacctgaatacagaggaaatatcattctgcaaaagaagcttatgaacaacttt

SEQ ID NO: 316657 - DNA, 90 bp, Homo sapiens
cgctgccgccgccactcacgctccactgcaacatcacggtgggcaccatgtccttgaagcttcaggcaagcaatgtaaccaacaagaatg

SEQ ID NO: 316658 - DNA, 100 bp, Homo sapiens
ccccagcccccaccgtcgcgccaggacccgaggacagcaccgcgcaggagcggctggaccagggcggcgttcctgctcattttccacaaggccgcggcag

SEQ ID NO: 316659 - DNA, 75 bp, Homo sapiens
ctggccactgggcgagcgtctggcaggtactaggttttgacaagcttgcatcatgcgtgagtataagctagtcgt

SEQ ID NO: 316660 - DNA, 50 bp, Homo sapiens
tcgggaagcagggattccagtgccaaggcgccatgtcagaaccggctggg

SEQ ID NO: 316661 - DNA, 98 bp, Homo sapiens
gagcgggccctggctcaggaacagggacagcacctcatcccctggatgggggaccacaagatcctcatcgacaggcagaggtggaggagacactgaag

SEQ ID NO: 316662 - DNA, 82 bp, Homo sapiens
aaagaactggctaggcaaataagctttaaggtcttgctatcacagatgaaattttgctgagtaaggcagagtggtccaaact

SEQ ID NO: 316663 - DNA, 101 bp, Homo sapiens
tgatcccagctttaaaggagatgcaggagaaaatacggcattgctaggaaccactcgttttgactattattttatcactctttgtgaaacttcacaatgtt

SEQ ID NO: 316664 - DNA, 51 bp, Homo sapiens
tctgtttgcaaagcacctgaactgcttaacagagcgttccaaaaagaggac

SEQ ID NO: 316665 - DNA, 100 bp, Homo sapiens
tttggtgtggacatctgctgccggaaggggtcccgaagccccctgcaggaactctacaacccaatccagcacagtggagaatttacagtctctctcagtg

SEQ ID NO: 316666 - DNA, 75 bp, Homo sapiens
ggttccagctgcagcacgtggacgctgactcggaagtgcagtgtaaatgagcaaagatggatcaggaaggtgggg

SEQ ID NO: 316667 - DNA, 100 bp, Homo sapiens
cgaaaggaacgcaagaacagaatgaagaaagtcagggggactgcaaaggccaatgttggtgctggcaaaaaggttcttgcacgcattgcaaatgccacga

SEQ ID NO: 316668 - DNA, 50 bp, Homo sapiens
gtggagcctgcgcgcggcagggaggctggggaggacgaggaagaaacgaa

SEQ ID NO: 316669 - DNA, 100 bp, Homo sapiens
cacgggcattgcaaggtacattgagcaggctacagtccactccagcatggtaccctttgagacactagcccagtggaatctagaacacgctactttaaat

SEQ ID NO: 316670 - DNA, 90 bp, Homo sapiens
accttctatgaggattgcccagctcaagcatcgagagtaaacatgaggttacgatcctgggaggacttaatgaatttgtagtgaagtttt

SEQ ID NO: 316671 - DNA, 98 bp, Homo sapiens
cttcagacctccgaacaccatcctttcttccagctgccacacagaagctggacctgtgatctgcagaatgctgagttatcccccaactcgccgagctt

SEQ ID NO: 316672 - DNA, 100 bp, Homo sapiens
cacagttctccatgagttggacagataccaaagagggaaagaccacagcaagattctttcattcgtctcctcctagcctgggggaccaggctcgaactga

SEQ ID NO: 316673 - DNA, 97 bp, Homo sapiens
agaagctgggattggagattccacccaaacttgctggtcactgggaggtgccccacctcaaccagaatgcctggaacaacctggagaaatatagccg

SEQ ID NO: 316674 - DNA, 75 bp, Homo sapiens
cattcaagaagacccatctgaacaacaatattgactcacgcctactccagagtggtcctgagagtcctggaagca

SEQ ID NO: 316675 - DNA, 100 bp, Homo sapiens
gtcgactacaagaagagggcggagcggagacgggagtattatgaaaagatcgggagatcgtggtgaaatggtttgaggctgtccagactggcctgcccat

SEQ ID NO: 316676 - DNA, 50 bp, Homo sapiens
acagcatcctccagcacctcaggaaacatgccctgaactgtcacagaatg

SEQ ID NO: 316677 - DNA, 51 bp, Homo sapiens
tgttggtctcggccctgcggaaggaactttgtgttaaagcatcatgtattc

SEQ ID NO: 316678 - DNA, 100 bp, Homo sapiens
aaaaggtgatctggacaaaggaacaggtatctcaggttgctatcaagatcatagataagacccagctggatgaagaaaacttgaagaagattttccggga

SEQ ID NO: 316679 - DNA, 75 bp, Homo sapiens
gccagtcttaaatatctacccatggaataaagagctgtatttgatcagagtctcactctgtcgccaggctggagt

SEQ ID NO: 316680 - DNA, 80 bp, Homo sapiens
tcactacccttcatgcatgaaagacaaagctactcagagcagcagagagcggatggcgcccaaggccgggaccctctgct

SEQ ID NO: 316681 - DNA, 75 bp, Homo sapiens
aatccgcaagaccatcatgcaggcagcacgctggctcttctcctgaacttcctcgcctgcctggccagcttctgt

SEQ ID NO: 316682 - DNA, 100 bp, Homo sapiens
acaccggcacctaccgcacgagcacagggcaaacttgaagataaatcttttgactccagctctttagaggatctaaagtgaccttgatggacagtggaag

SEQ ID NO: 316683 - DNA, 90 bp, Homo sapiens
gcactatcccaagactgctggcaacagggttgctcatcacccatggtggtaaaatttgctgatacacagaaggacaaagaacagaagaga

SEQ ID NO: 316684 - DNA, 83 bp, Homo sapiens
agagaagaggcggtggaggacacgacgcgcttaaaggacagcatcaactgggcaagtggtgaggatgaccatgtagttgccag

SEQ ID NO: 316685 - DNA, 100 bp, Homo sapiens
ctccagccccgtccgggagtccccggcccgctgcggtgccggcgtctctggccgagcctctttttgtggaaaacgacagcagcagcagtggcctggaaga

SEQ ID NO: 316686 - DNA, 89 bp, Homo sapiens
aacttctcttcgcatcggcggcggcttccgtcacctccgctcccccgatcctattcccagtcgtgaacctacaagcagcaattggcgcc

SEQ ID NO: 316687 - DNA, 100 bp, Homo sapiens
aaaaaaatagctcagttaatgaaggatcaacgtatcataaaagctccaaagcctgaactgatagctgcagagaagaaatatttttctttaaagcctgaag

SEQ ID NO: 316688 - DNA, 100 bp, Homo sapiens
cttctgtatcttcatggtgcggctcatcttcgagaggccctgccctgggagaagccctgccacacgtcgtgcccacgctgagggcctgtctgcagccctc

SEQ ID NO: 316689 - DNA, 75 bp, Homo sapiens
ccacccttccgagacatgaagaaagaagttggtgagatggcaaagcagtatatagagaaaagtcttttggttcca

SEQ ID NO: 316690 - DNA, 90 bp, Homo sapiens
ggctgagacatgagatcttcagcctccaggctctccagtttttcgtcgagagattcactatggaatcgagcgatcgtcttctgatcaaag

SEQ ID NO: 316691 - DNA, 100 bp, Homo sapiens
ggcgccgcgcccggcccggctggggaacgcagagtcagccataatggcaggtgaagaaattaatgaagactatccagtagaaattcacgagtatttgtca

SEQ ID NO: 316692 - DNA, 100 bp, Homo sapiens
ctcgctcggagcttcgctcggaagggtctttgttccctgcagccctcccacgggaggagagagcgatggcttttttcacccagaaggccagccccagcgg

SEQ ID NO: 316693 - DNA, 87 bp, Homo sapiens
ccgcctgccctcagccgcccgctggccgggagcggagcccctgtggtggacagaggactgcagaaaatcaacctatcctccttcagg

SEQ ID NO: 316694 - DNA, 74 bp, Homo sapiens
gagcccctcggcggcgccaccatgtactcgggagccggccccggtactccaaagattcaggtttactcacgtca

SEQ ID NO: 316695 - DNA, 50 bp, Homo sapiens
gggacacccccgcaagcgagcagacaaatttacatgtattggagaccaga

SEQ ID NO: 316696 - DNA, 74 bp, Homo sapiens
tctcaaaactggaaggcgctgcaagagggaccaagacaaagcatgggacatgaaattaagagtgaacttcttat

SEQ ID NO: 316697 - DNA, 100 bp, Homo sapiens
gagttcacctacgactatgtggatgccgatagggtctcctgtattgtgagtgcggccaaaaactctctcttcaaaccagtccagctacgggggcccagcc

SEQ ID NO: 316698 - DNA, 75 bp, Homo sapiens
atctttggcagctgcatggccacagttacaccaggctttcaccaacaatcaccagtggtttacacaacattgcaa

SEQ ID NO: 316699 - DNA, 75 bp, Homo sapiens
cagagtttgtagcctattggaggaaaacacaccaagcactgtctccaagcaaagaaaaaacgtcatcagctgtgt

SEQ ID NO: 316700 - DNA, 97 bp, Homo sapiens
actcttggaatcaaagataaatccaaatactgcatatcagaaacaacagttatcaggaactgttgccgttattacatcagatgggagaatgattgtg

SEQ ID NO: 316701 - DNA, 100 bp, Homo sapiens
gacctactggaagatctagatcaagctttgaaggcagcagtggtttgtgatgaaaatggttccaagggctatggatttgtacactttgagacgcaggaag

SEQ ID NO: 316702 - DNA, 75 bp, Homo sapiens
caggtctctgtcgagcagcggacgccggtctctgttccgcaggatggagggagccatggatttgctgcgggagct

SEQ ID NO: 316703 - DNA, 100 bp, Homo sapiens
ctacaccatcgacaccgaaaactccaccgtagcccttgccaaagctaataatcacaagaagttgtcagaatttggaattagaaatggcagccggcttcaa

SEQ ID NO: 316704 - DNA, 75 bp, Homo sapiens
tgctagcatggcggtgatggaaggagacttggtgaagaaggaaagggaaatgtttcaacgtgcgcaagcgttgcg

SEQ ID NO: 316705 - DNA, 100 bp, Homo sapiens
gaacaaagtctgctcaaatctcctgctgtgaaccagcagaatttttgaacagctcgagctaatccaagatatggggttccatgtcatttactgaatgaaa

SEQ ID NO: 316706 - DNA, 75 bp, Homo sapiens
ccagccaagatgagctgcagagcaagcagtccaaaggcctggaggagagtccttgctggtgcagacgaagcggcg

SEQ ID NO: 316707 - DNA, 82 bp, Homo sapiens
ccggggaccaggacagtcgcgaggttcgagtgttgcagagcctgcggggcaagatctgtctgtgacaagcagggaacaaggc

SEQ ID NO: 316708 - DNA, 98 bp, Homo sapiens
aacttttaagaggtgcagaatcaccaacacgcaattcaaaattgaacaggttggtaaaaactcaaagctaacaccattcagaacttacctaatgatgt

SEQ ID NO: 316709 - DNA, 96 bp, Homo sapiens
cgcttgtcctgagctggttgccggggcaggggcggaggcggaggcagaggtggaggcgctttgaaagttccagaaagctgagtctgatctggatta

SEQ ID NO: 316710 - DNA, 83 bp, Homo sapiens
cccgtaggcgagcgagcggctaggttcgtgatctggagagacgctcagctttgccaatttgagaatttacccacatggattgg

SEQ ID NO: 316711 - DNA, 83 bp, Homo sapiens
gctggagcgggtgctgcaggcgccgccgccggacgtcggcaacggagaagatgtttgagacggaggcagatgagaagagggag

SEQ ID NO: 316712 - DNA, 74 bp, Homo sapiens
gacagaatcgaggccctgaaacagtcaaaatgcagatcttcgtgaaaacccttaccggcaagaccatcaccctt

SEQ ID NO: 316713 - DNA, 90 bp, Homo sapiens
cccgatcccgaccccaaaagagtattcttggatcttgcacaggaaggaattaaagtccggttccagttgttggcaaaggagaggaagagg

SEQ ID NO: 316714 - DNA, 96 bp, Homo sapiens
tgacagtggacatagaggacaacgcagatatagaacatttcttttatcacagttatactggagagctttgccagtccaagattgattactgcatcc

SEQ ID NO: 316715 - DNA, 100 bp, Homo sapiens
cgggttcatcaacatcaattccctcaggcatcagagcggagacttcagggagaccagagcccagcttgccaggcactgagctagaagccctgccatggca

SEQ ID NO: 316716 - DNA, 89 bp, Homo sapiens
actaaggaaatgctgaagcttttgccttacgacagtctgcctacctcacagacctgcttcttccagctgaggctgcccccgtactccag

SEQ ID NO: 316717 - DNA, 99 bp, Homo sapiens
gaatagtctacaaaggaagacttgtaacctggagaagagcaataagagctaactgccatcaagagccatcagtatgtcttcaagctgcatgcccagaaa

SEQ ID NO: 316718 - DNA, 98 bp, Homo sapiens
aattttacaaccgtgaagccggaagatgcatatgaagactttattgtgaaacctcccgtgagaaagttccaagatgagatgggattctccaacatgga

SEQ ID NO: 316719 - DNA, 83 bp, Homo sapiens
cgctccgtggccttagctgtgctcgcgctactctctctttctggcctggaggctatccagcagtaatcaagtcagaggattat

SEQ ID NO: 316720 - DNA, 100 bp, Homo sapiens
aacatacgggcaagtttataagtgtccgagctgcaggaggagggaatgaacgccatcaacctgcccctcagcccaattccctttgagctggaccccgagg

SEQ ID NO: 316721 - DNA, 98 bp, Homo sapiens
gccaagcggagggtgcgcgagctctaccgcgcctggtatcgggaggtgccgaacactgcattgttggtgctctgagggtgtcagccaggccactcatg

SEQ ID NO: 316722 - DNA, 115 bp, Homo sapiens
gctacagtgcttggctactggaaactggaattctgttcctccagaatgccaagggacaatgactcattcttcccaggacactggttcttgtggcattcaggaagatggaaagctt

SEQ ID NO: 316723 - DNA, 75 bp, Homo sapiens
ggcctacgtgcgggtggtcaccgagaagtccccgaccgactggtacctgtttcccaggcaactactgatcaggca

SEQ ID NO: 316724 - DNA, 100 bp, Homo sapiens
ctctgggctacagagtccttgctgggggttcggggagcgcttggaccccggcttctgggacgcgtcaggctagcttgtcactttctgcaaaggtttccct

SEQ ID NO: 316725 - DNA, 75 bp, Homo sapiens
ctgtccccaaggaaaccatggaggagcactgcaagcttgagcaccagcagattgagtttgtgacgggcaccaaaa

SEQ ID NO: 316726 - DNA, 90 bp, Homo sapiens
atcccctgttgtcagagaagaaatggagaaagtattagctggaggtgaaaggcaggattgggaaccccacagaccgcagctcctcccagg

SEQ ID NO: 316727 - DNA, 100 bp, Homo sapiens
cgggcggacgccgcagagcgccgaggaggctttcctgctggtggcaaccgcctacgagacactcaagtttggaaattttagcattcaggtgccaggaatg

SEQ ID NO: 316728 - DNA, 101 bp, Homo sapiens
gttggaagacctattatcagatcaaccaccaaagtgggaaacattgaaatcaaggaaatcatggatcggatctacaaaaatgtcatgaataaagtcagtga

SEQ ID NO: 316729 - DNA, 50 bp, Homo sapiens
tattcctcatgacattgctgtctggagcttgggcccctgccgcagcccgg

SEQ ID NO: 316730 - DNA, 82 bp, Homo sapiens
tcgcgtttccacttcagagatctgacacgatgaggcgagtggtacgacagagcaagtttcggcatgtatttgggcaagcggt

SEQ ID NO: 316731 - DNA, 100 bp, Homo sapiens
gtatggaatactgtggtggcggatcacttcaagatatttaccatgaggagaaggcagagcccccccaggctatgaatgccctgatgcggttgaaccagct

SEQ ID NO: 316732 - DNA, 80 bp, Homo sapiens
catatgacagtggacatagaggacaacgcagatatagaacatttcttttatcacagtgatgatgaacagtctacacagat

SEQ ID NO: 316733 - DNA, 95 bp, Homo sapiens
atggcacttcattggccacctacagaaacaaaatgtcaacaaattgatggttgctgatagtccaactccaccgccaccacctccaccagatgaca

SEQ ID NO: 316734 - DNA, 75 bp, Homo sapiens
ctgcattctcttaggccagctgtcttgactggggtagctgaagctgttgtagctcaattgggcagatgtgtgagg

SEQ ID NO: 316735 - DNA, 75 bp, Homo sapiens
gaaacaacataaagaacttaaatggactgctgaactgtcccaagcaataaacagtggtacattgttatcaaaacc

SEQ ID NO: 316736 - DNA, 90 bp, Homo sapiens
gtctgacagtggatcacaacttggttcaatgggtagcctcaccatgaaatcacagcttcagatcactgatgccacagggcccagtgggct

SEQ ID NO: 316737 - DNA, 82 bp, Homo sapiens
gactgtctatgatgtcatgtttgtcagcacagcatgcccccggagtccccaagatcctggtggggaaccgcctgcacctggc

SEQ ID NO: 316738 - DNA, 75 bp, Homo sapiens
tgtgtaaaacaaaaatattatggtctttgtgcacatttacatcaaggttgatggacggatggctacatggatgtg

SEQ ID NO: 316739 - DNA, 75 bp, Homo sapiens
tcgcgggagtcgtagggaggacgccgggacacctggaagccgagaaatggtggagattctggacgcaaagacaag

SEQ ID NO: 316740 - DNA, 74 bp, Homo sapiens
gtctggccgccggccacctggtccagctgcccgcaggggtgtgtggacgaatgtggaacctcgctctgtggctg

SEQ ID NO: 316741 - DNA, 78 bp, Homo sapiens
ccattcatgtgcctccaggttatatctcacagagcagaaggagaaacgtgtgtggagtttaaagccatgttgattgca

SEQ ID NO: 316742 - DNA, 100 bp, Homo sapiens
ctggctcaatcaagaaaggagaaagagagctcaaaatcggagacagagtattgcttgcaaaccatactgggtacatcaaagttgactggcaacgagtgga

SEQ ID NO: 316743 - DNA, 106 bp, Homo sapiens
cgtggacggcgtgttccagaggcgcggggcgccgccgctgcagctgccgcgcgtcgggctgacgcacgaggcacacaggaaggaggtggagcaggtgtatctgcgc

SEQ ID NO: 316744 - DNA, 83 bp, Homo sapiens
tctgcagtgagcccttggattctagccagcacgactgaaggagttccagtgtctcgccccatcctcaccctcagggttcccag

SEQ ID NO: 316745 - DNA, 100 bp, Homo sapiens
ccaggacacagagactttatcaaaaacatgattacagggacatctcagcgccttcaacaacatcctcagcaacctggggtacatcctgctggggctgctt

SEQ ID NO: 316746 - DNA, 100 bp, Homo sapiens
gaggacacatggcctggagttcattctttaccacattttaagccagcacacagcaagaaggaggccatcagcaaactgggaagaggaccctcaccaggaa

SEQ ID NO: 316747 - DNA, 100 bp, Homo sapiens
tctccaaaagaagagccaagagaaggtccttttctacaaatatcagagccatggctcaggcctggtcaaaaaaacagttcacctaccaatttttccaaac

SEQ ID NO: 316748 - DNA, 101 bp, Homo sapiens
cgatcaccggcgccggcccggcggccgcggcgcccgccctcgcccgcgccccatggggtcacagatcttcagtgtctattggatttttccaagagaaagtt

SEQ ID NO: 316749 - DNA, 51 bp, Homo sapiens
ctgcagagcgcgcagtacctccgagtggatcatgacccatgaagagcacca

SEQ ID NO: 316750 - DNA, 114 bp, Homo sapiens
cctgtttctcacatttgtttcattgaagaaatagttaaggatggaggtttgcttctgaataacccttcggcattagctatgcatgagtgtaaatgtctttggccagatgtgccg

SEQ ID NO: 316751 - DNA, 83 bp, Homo sapiens
gagatcctgatgaagttcgagcactaatatttaagaaagaagatgttaactttcagattgacttgatgcaaaacatcacaaag

SEQ ID NO: 316752 - DNA, 82 bp, Homo sapiens
tggaccggggtcacttagactaccccaggaacccgcgccgcgagggctccttccctcagttctgaatgcagtgatggggaat

SEQ ID NO: 316753 - DNA, 97 bp, Homo sapiens
gaatatctgcattgaacctgacaccatcagcaaaggagactttataactatagggaatcctatccatcttcttcaccgatatggtttgtggattctg

SEQ ID NO: 316754 - DNA, 101 bp, Homo sapiens
caccagcaggacccgaggccaggagccaggggcccagaaggaactgtggctgcaccatctgtcttcatcttcccgccatctgatgagcagttgaaatctgg

SEQ ID NO: 316755 - DNA, 82 bp, Homo sapiens
cttgttcccccaaatgtctgactctgactctcggactgagaaacgcaaggtcattagtaattatcagcactttagatgggag

SEQ ID NO: 316756 - DNA, 102 bp, Homo sapiens
cagtgggggtgtgcaaacccgagagaactgggtgtgttccagagaacaagccttcagacatttgctatattgacgctgagctgtcaggggactcaggcttat

SEQ ID NO: 316757 - DNA, 100 bp, Homo sapiens
ctaaaaatcacgagttcaggcgtctgagacttggtgggaacggaccttcctcttaggctttaaaggagatagatgaagttggggacctattgcagctgaa

SEQ ID NO: 316758 - DNA, 100 bp, Homo sapiens
ccagcacatggtcaggttcctcttggacagtggagccaatgccaacgtgaggtatgccattgcattggccttaagggaaaagcagcgtgtaatatttacc

SEQ ID NO: 316759 - DNA, 100 bp, Homo sapiens
caggcggcggccgagggcgtcgcggactctccccgcgatgatgccgcctgcctagggtagttaaaagacgagtgaatgctctcaaaaacctgcaagttaa

SEQ ID NO: 316760 - DNA, 100 bp, Homo sapiens
tgccacctggtttcattaaatctacacagaaaagtgacaagggcagagatgatccaggacaacagatgctgagggttggaaaagcaaaagcagatgtgtg

SEQ ID NO: 316761 - DNA, 101 bp, Homo sapiens
tcgcgatgctgcccggtttggcactgctcctgctggccgcctggacggctcgggcgctggagttgatttggagcatatgcgaacaataaaacctgaaaaac

SEQ ID NO: 316762 - DNA, 82 bp, Homo sapiens
acctcactgcagaggtgctggagctggcaggtgtgatccctcacatccacaaatctctgattggaaagaagggacagcagaa

SEQ ID NO: 316763 - DNA, 75 bp, Homo sapiens
gcaaatattctcttctgttctacagacctctctcctcttcctgctcatgggaaaaccagcattggaatcagctga

SEQ ID NO: 316764 - DNA, 99 bp, Homo sapiens
gtacaatttgccagtgtttccacaatggaaccaattgttttacagtctgttccacatgatcattgtaataaggtaaaatacctgttttctgacaagact

SEQ ID NO: 316765 - DNA, 100 bp, Homo sapiens
ggactcccaattatattgcacctgaagtgttgctacgaacagaccctcaccaggacctagaaaacgccaatcttctcagtacagtgaccctaaatcacat

SEQ ID NO: 316766 - DNA, 71 bp, Homo sapiens
tcaatactacctttatttccaccatagctcggggattggatcatattgctgagaacattctgtcatacctg

SEQ ID NO: 316767 - DNA, 100 bp, Homo sapiens
caacaaccgcttggaatgctgcaacaatggcaaaaatctccagccctacagagactgagcggtgcatcgagtccctgattgctgtcttccagaagtatgc

SEQ ID NO: 316768 - DNA, 98 bp, Homo sapiens
cctccgttagctaattaaaacatttttcagggacgtagccatccagaggttcgagaacttgtcttggacaattgcaaatcaaatgatggaaaaattga

SEQ ID NO: 316769 - DNA, 75 bp, Homo sapiens
gaatgggcattgtcgccaattttcagtctgaagatgatgagaaactgaaaaagaggaaggagcgatttgggattg

SEQ ID NO: 316770 - DNA, 82 bp, Homo sapiens
gccggacagggccgcctgtcgccggagaggaggttcagatgagcccctgctgacttgagagagacagagagaccacgccgat

SEQ ID NO: 316771 - DNA, 87 bp, Homo sapiens
gggcggcgcgcggcggcggcgctcggcgatggtaggcgtccctggagcggccgccttccagcgcgaaagggcgtgtggttgcgcctg

SEQ ID NO: 316772 - DNA, 82 bp, Homo sapiens
aggcggaggcagaggtggaggcgctttgaaaggagtaaacatggaagtactaacttcattccagaacaatttttggatgact

SEQ ID NO: 316773 - DNA, 100 bp, Homo sapiens
cccaatcagcaacattcgtcggagagttctactgtttcgaaccatggttaccaaggagaaggagaaactggggctggtggaaaccagctctgcctccccg

SEQ ID NO: 316774 - DNA, 75 bp, Homo sapiens
ctactggctgggaagaagcatatacttttgaaggtgcaagatactatataaagtacctggaactggaaagtagtg

SEQ ID NO: 316775 - DNA, 90 bp, Homo sapiens
gtttgaattggctctgcagctcgcaagatttaccgcattgtttctcagaagcaaatgtcagacagacgcgaaaatgacatgtctccaagc

SEQ ID NO: 316776 - DNA, 50 bp, Homo sapiens
actggctgagggcagagactctcccgggctcattgtcatccccaagccag

SEQ ID NO: 316777 - DNA, 100 bp, Homo sapiens
gggacgcgcggcggcaccgggaggccgggccgagcggccaacagagattttgagaaacacattgaaggatctgttaacacttgatatacccaataaaagc

SEQ ID NO: 316778 - DNA, 122 bp, Homo sapiens
cgagaaggaagttgtaggaatagcacataaattctttggagctgaaaatagcgtgaacttgaagtggaaaacaggcagaagcttcgggttgatgagctgcggagagaatattacgaggaaca

SEQ ID NO: 316779 - DNA, 90 bp, Homo sapiens
ctcccgaagtgctgggattacagtggtgtgccctctcccctgcatgaatggcggccagtgctcctcgcgaaaccagtgcctgtgtccccc

SEQ ID NO: 316780 - DNA, 82 bp, Homo sapiens
tagtaatcaagcagcagccagagaatgggaggaatactcccccagttgcaagaggcgcaggaccgtggaagacttcaacaaa

SEQ ID NO: 316781 - DNA, 74 bp, Homo sapiens
atctgtatcctctgcagcatccttgatgataaaccagtaaatggcccgtcacagctggagctgactctccaggc

SEQ ID NO: 316782 - DNA, 97 bp, Homo sapiens
gttggctctggtcctggtcgtcatggtgtggtattccatctcccgggaagacaggtacatcgagctcctggcgctggccaacaatagcaccctcacc

SEQ ID NO: 316783 - DNA, 90 bp, Homo sapiens
cttcatgcagttcattgaaggagggaggcgtttccagtgctgtttttgcagctgtatcaatgatggcattttccctgaagatgagatccc

SEQ ID NO: 316784 - DNA, 74 bp, Homo sapiens
gagaagctgggatttgaaggagctatcctgagatctgtactgctacggagtttaagagagctgtgaaagtagca

SEQ ID NO: 316785 - DNA, 82 bp, Homo sapiens
cgtggaacggctgcttttggaagatgttagtaggcaggaagaggcggagggagagctcagtgaaggagaacactggtatgga

SEQ ID NO: 316786 - DNA, 76 bp, Homo sapiens
ttacagcgagctgcttactatcaggatcttcaagatgaagttcaaagggagaatactaatctgcaaaaactacagg

SEQ ID NO: 316787 - DNA, 51 bp, Homo sapiens
cgccggacgtcggcaacggagaagattcagaatggacagtttagaagaacc

SEQ ID NO: 316788 - DNA, 100 bp, Homo sapiens
cggccgcggcgggtcggtctcctaggagtacgagagggcctccaaagtggaccagtttgtgacgcgcttcctgctgcgggagacggtgagccagctgcaa

SEQ ID NO: 316789 - DNA, 88 bp, Homo sapiens
tcttgggtccgaaggggacggacgtcctcccacgtaccatttagaagaacctttcagctcttggggcattggtgagtctcagtaatgc

SEQ ID NO: 316790 - DNA, 100 bp, Homo sapiens
gtaaatgtcagtggaaaggagagctaccatcactaagttatattctactctgaaagaaggcaacccaccctgggaggtgacagaagcggttctctttatc

SEQ ID NO: 316791 - DNA, 100 bp, Homo sapiens
cctgctggagcaagaggcagagctgtgggcggtggagtctagacttccccaaggcgtgtacccagacatagggcctgattacattccaacagaggaagaa

SEQ ID NO: 316792 - DNA, 74 bp, Homo sapiens
cacatccagcccgcagcgctcagcgagtgcagtggtgagatcctgaacaactgctgcgtgatggagtaccacca

SEQ ID NO: 316793 - DNA, 80 bp, Homo sapiens
ccatgtccgaggagaagcccaagcaaacggggattcagcgtccgatcctttggaacagggactcacgtgaagcttccagg

SEQ ID NO: 316794 - DNA, 50 bp, Homo sapiens
gacttgccatggtcgtctttgtctgccgggcactgtttgaagaagcaaac

SEQ ID NO: 316795 - DNA, 51 bp, Homo sapiens
actgagtccaacactatgctggtttgagggtaagatgataatgcaagataa

SEQ ID NO: 316796 - DNA, 73 bp, Homo sapiens
atagctcaaggaaacctttccaacacagatgtccaagctgccaaattgcgcagtctctttgtggagaggactt

SEQ ID NO: 316797 - DNA, 83 bp, Homo sapiens
cgacgagcgctgcactaacgcaggatccggctgccgaaggtcctcgccaggtcctccagcagcctgacctgagtgggttagtg

SEQ ID NO: 316798 - DNA, 100 bp, Homo sapiens
cccagattccaaaacttatgtcaaaatattaggtgttccagtcaaagtcacccagatttgccaaaagacctggcacaaatgtcacttccactatgaagtc

SEQ ID NO: 316799 - DNA, 101 bp, Homo sapiens
cttggtggcattgttttaccaaatgatggacaatgtcacctggaaaataatatgtacacaatgagccattattatatattctgcctccatggtggcctctc

SEQ ID NO: 316800 - DNA, 74 bp, Homo sapiens
aaaaaacctctgaccgtgaagagacatgagatgattgccaaacccccagataagccaatggacacgtcagtgtt

SEQ ID NO: 316801 - DNA, 75 bp, Homo sapiens
tcgtcttcatccagggcatcggggccagtgtcattcaaagatgtggctgtggatttcacccaggaggagtggcgg

SEQ ID NO: 316802 - DNA, 83 bp, Homo sapiens
cgagcccaccgcgccgggccccggacgccgcgcggaaaagatgatgataattccgaagaaggcttccacactattcattcagg

SEQ ID NO: 316803 - DNA, 90 bp, Homo sapiens
cttggatgggagcacctggtgcctcgggactgctccgatgcccgtcaattccacagtgtaatgtggaagaactgacatggctcaaagtta

SEQ ID NO: 316804 - DNA, 101 bp, Homo sapiens
ttcgtactttctatgagaagcgtatggccacagaagttgctgctgacgctctgggtgaagaatggaagggccgagaactactggtggcgtggccagaacac

SEQ ID NO: 316805 - DNA, 131 bp, Homo sapiens
ggaacatcccctgttggcatcatgtgagagtgaagacagtatttgccagctcattgttccaggcgaaccctgactatcaaatgagtggagatgacacccagcatatccagcaattctatgatctcctgact

SEQ ID NO: 316806 - DNA, 98 bp, Homo sapiens
ttcgcgctgccggctcagtcccagcggcgacagcggccctccaggcactgaagcgtaagaagaggtatgagaagcagctggcgcagatcgacggcaca

SEQ ID NO: 316807 - DNA, 75 bp, Homo sapiens
aaatcctaagactcagcactgttgcgggacaggcaaatgtacactggggaccaccatgttcacgtgacatcaaga

SEQ ID NO: 316808 - DNA, 101 bp, Homo sapiens
gacaaggtggatggggacatctgcctcctgaatgagttctccatcaccggctccacttacgctccagagggagaggtaccatggtgaatccgggcagcagc

SEQ ID NO: 316809 - DNA, 100 bp, Homo sapiens
gccgaatcagccttttcacgctcaagattgctgctaaaattgattcaattcctcacttgaataattccacacctctagtggacccctcagtatatggata

SEQ ID NO: 316810 - DNA, 96 bp, Homo sapiens
gagcgattgttcagcttttgtgaaagcaacagaggatcaagcgtgctttccttatcgaggagcagaaaatcgttgtgaaagtgttgaaggcacaag

SEQ ID NO: 316811 - DNA, 75 bp, Homo sapiens
ccagactaaatcagtcacaagaggaaatcagtagctctgatgagatcaccatgaagagtgaattcccgcttctgc

SEQ ID NO: 316812 - DNA, 100 bp, Homo sapiens
cgggatcctttctggaatggaggtcttatgagctgctattgaacacggcaggctttcaccagttctcaggatgcccatagggatgggtgaagcctgcctg

SEQ ID NO: 316813 - DNA, 76 bp, Homo sapiens
aaggattccaagtaactcttatttgactcccaagacagctgggctgcgaccaatggaaacaaaggacattccagta

SEQ ID NO: 316814 - DNA, 75 bp, Homo sapiens
aggtgggcaagatgaaggctatcgttgagaagcttcgcttcacatacagtctccagaacacagaggagtccctgc

SEQ ID NO: 316815 - DNA, 100 bp, Homo sapiens
gccagttgcttgatcaggtggaacagattcagaaggagcaggattaccaaaggggagatgcacttatttacatggaaccagagaaacaagtgatgtccag

SEQ ID NO: 316816 - DNA, 100 bp, Homo sapiens
gccgctagtgctgctgctgagcggccgccccacgcgcgccgacagtaaggttgaaaactaagcatggggaagagctgcaaggtggtcgtgtgtggccagg

SEQ ID NO: 316817 - DNA, 100 bp, Homo sapiens
ccgggggggcggagacgcacggagcggccgggggctcggccgggccgtcccggcctgcgcagcctgaggcaccaccttccatggtcaataatgaacaacg

SEQ ID NO: 316818 - DNA, 75 bp, Homo sapiens
cgccgccgctgccgctgccgctgccgcacctccgtagctgactcgagccagccccagtgcctgctgagccgtttg

SEQ ID NO: 316819 - DNA, 97 bp, Homo sapiens
tacatccaggaaagacatggagattctcttaaaaaggcttattgcagtatattatatctaaagccaagaatgcagatcatcctacgtggacagaaag

SEQ ID NO: 316820 - DNA, 74 bp, Homo sapiens
cgtcctgctcttccagttcgggatgaccccaccaacaactgaacgctttggtcaggctgctacaatggaaggaa

SEQ ID NO: 316821 - DNA, 100 bp, Homo sapiens
gttgaggatgtacagagagctcctggacaacaggtctcctctgagcctccggcctccataagacccaaaacagatgacacctcttcccagtcccccgcgc

SEQ ID NO: 316822 - DNA, 100 bp, Homo sapiens
ctttgctgacatggaattgctaagaaaagtagtagtccctgggatccgtatgtccattaaacttcatcaggttataggttgagtcctcaaacattaacta

SEQ ID NO: 316823 - DNA, 88 bp, Homo sapiens
catcgccgccatattgtctgtgtgagcagaggggagagcggccgccgccgctgccgcttccaccacaggatatcattaacaacacatc

SEQ ID NO: 316824 - DNA, 100 bp, Homo sapiens
cggccagacaaacagcccgcccgaccccgtcccgaccctggccgccccgagcggagcctggaggcgggcgctaatattgacacctgctcagaagaccaga

SEQ ID NO: 316825 - DNA, 100 bp, Homo sapiens
cagacagccccagctcggtgttcctcaggaagatgaagtcctcagtacattctgaagaagatgattttgttccagagctacatagaaatgtacaccctcg

SEQ ID NO: 316826 - DNA, 50 bp, Homo sapiens
gcagccggccttagtgctcgcgcaggttatgaagacagtatggagtttcc

SEQ ID NO: 316827 - DNA, 74 bp, Homo sapiens
caaattcaactagcaaaagaaagctttctgcacagagaagtagctgattttcagctttctgtggattctttatt

SEQ ID NO: 316828 - DNA, 78 bp, Homo sapiens
tgagtccaagttcaaccaagccattcaccccgagcagaaggcagaccggtattttgtgttatacaaaccgccccctaa

SEQ ID NO: 316829 - DNA, 100 bp, Homo sapiens
atcgtctacatgatgaaagcgttcgacctcatcgtggaccgacccgtgaccctcgtgagaggtcagaatggcggcagtggagcatcgtcattcttcagga

SEQ ID NO: 316830 - DNA, 100 bp, Homo sapiens
cgactagcggcggcgggagcggcgccgagaggccgtgcgggacgcgggcgccaggaccggccgaacgcagagaacaccttccaccatgaccacctcagca

SEQ ID NO: 316831 - DNA, 75 bp, Homo sapiens
tccacttccgcaaggaccctttggaaggccgggtgggccgagtccatgatggcagtgaagaagaagacgatgact

SEQ ID NO: 316832 - DNA, 100 bp, Homo sapiens
acctcgagacacaacaatgaccttcacatgctttgtgttttttgacatgttcaatgcactaagttccagatcccaggtaactcagatgattcaccgtgag

SEQ ID NO: 316833 - DNA, 98 bp, Homo sapiens
agggccgtgccgcagatgcccaccggaatggagaaggaagaggagtcggtaccagcaactaaggtttcagagctgaaccctaatgcagaagtgtgggg

SEQ ID NO: 316834 - DNA, 75 bp, Homo sapiens
cagaatgtcgtgtgctgcagaagctgggagcagacgctgttggtaatgtgaggctacaggagatgatggcaacaa

SEQ ID NO: 316835 - DNA, 83 bp, Homo sapiens
cgaaagtgaacaggagccgctcttaggcgacacacctggaagcagcacttgcacctcctgcgccgccgccccccatccaagga

SEQ ID NO: 316836 - DNA, 100 bp, Homo sapiens
cctgcctctttcaataatattcagacagcaattaacaaagaccagccagctaaccctacagaagacagtatttgatctttcaccacagcagaaagagtgg

SEQ ID NO: 316837 - DNA, 82 bp, Homo sapiens
ctcaagtcagagggcttttactcctacctgtgtaccgagccaggtgccccacctcaaccagaatgcctggaacaacctggag

SEQ ID NO: 316838 - DNA, 100 bp, Homo sapiens
ttggagtgtgcgtgcgcgccgagcgggagtgcatccgccccaacccttttccccctcgtctcctgtgagaattccccgtcggatacgagcagcgtggccg

SEQ ID NO: 316839 - DNA, 90 bp, Homo sapiens
ggctgttgggccaggccagtcatgctagaacgaaggctgtgctctagcccacctgaccctgtctgcaaaccacctgggggacaaggctgt

SEQ ID NO: 316840 - DNA, 100 bp, Homo sapiens
cagtacagctgcctcaaacctttgggggaaacactactatgaagtatcctgtcatgaccaagggttatgcagggtcgggtggtctaccatgcaggcctct

SEQ ID NO: 316841 - DNA, 100 bp, Homo sapiens
ctcccggggaaatgtaccgtccagcgagttgcagatctacacttgggttgagaatgcttgcaccaagcttgtccaggcagctcagatgcttcagtcagac

SEQ ID NO: 316842 - DNA, 109 bp, Homo sapiens
ccgggcacctccgagcgcaaggacagcgcgaggtccgcgcagcccagcgcagccatcgcgagcccagcattgacctgctgcaggccttcgtggagcactggaagggcat

SEQ ID NO: 316843 - DNA, 75 bp, Homo sapiens
gattcgaggctccctggccagggcagcccttcaggagctccttagtaaaggctggagtgcagtgacgtgatctcg

SEQ ID NO: 316844 - DNA, 100 bp, Homo sapiens
agcttttcggaacagcagagacacagagggcagtcatgaggctatggagttactagtagagaaagcaatcagcagtgcttctagccctcagagccctggg

SEQ ID NO: 316845 - DNA, 133 bp, Homo sapiens
gtgaaggagcacgtgggcacggaccaattcgggaacaaatactactacatcccgcagtacaagaactggagagaacccattaaaagagccagtaaatcctgtggaaaatggccttcagtgatcttacatcgag

SEQ ID NO: 316846 - DNA, 90 bp, Homo sapiens
gaaaatcgcttggttaaaacctgacacttttaacagagaggaggttcagatgagcccctgctgacttgagagagacagagagaccacgcc

SEQ ID NO: 316847 - DNA, 95 bp, Homo sapiens
aaatattttgctaaatacagaaggacatgcaaaacttgcagattttggggtagcaggtcaacttacagtgtcactgacattcgaggacgtggctg

SEQ ID NO: 316848 - DNA, 100 bp, Homo sapiens
gggtgctcacagctgcccattgcctaaagaaggagagcctggggatgtacaggagatgcctgctccagaatctcctcctggaagggatccagctgcaaat

SEQ ID NO: 316849 - DNA, 76 bp, Homo sapiens
cgccaccgcctcatgcactgtgtagatccctgcatgtcactgagtccaccatgctttacagaagaagacagattta

SEQ ID NO: 316850 - DNA, 90 bp, Homo sapiens
agttcgtcatggggctgtttggaaagacccaggagaagccgcccaaagaactggctactgcagcactggggtgtcagttgttggtccgac

SEQ ID NO: 316851 - DNA, 98 bp, Homo sapiens
cgagcagaaagaatgtctttcagttgttcacagggcttagagctcctgccagagggctgttactctttggtccacctgggaatgggaagacaatgctg

SEQ ID NO: 316852 - DNA, 75 bp, Homo sapiens
gcgaccacgcaggcactttcccggtccccaggttacaggaaatacaggaggcagaggaacaaataaaagacacca

SEQ ID NO: 316853 - DNA, 96 bp, Homo sapiens
agaaactggacaaccaacggctcaagaatttcaagaacaaaggccgcgacttggagctaggtgacgtgatggttgacattgcaagtaacatcatgt

SEQ ID NO: 316854 - DNA, 100 bp, Homo sapiens
cctcaccttataatagcatcttggcaatgaaggaacttaatgagcatgcagactgtgtattgcccattgacaatcaaaggcttcgtgacggagttatcag

SEQ ID NO: 316855 - DNA, 75 bp, Homo sapiens
tcttgtttgtggatcgctgtgatcgtcacttgaagctggcagggcggagatgctggaccacgccgtcctgcttca

SEQ ID NO: 316856 - DNA, 95 bp, Homo sapiens
agcgtgcctggttacagctgtttccacgtgcggtgctcgtcgggagtgatcacctaccctacaggtgtccctggccagtgtccttccacctgtcc

SEQ ID NO: 316857 - DNA, 100 bp, Homo sapiens
tcccatttgggagcaagagccatctactcgtccgttaccgggcatcaacttctaactcatctcgccaggagaggcctccagtgaaacccttcattctcac

SEQ ID NO: 316858 - DNA, 90 bp, Homo sapiens
acgtagcaagcgcacacagttagaagagattcaacagaaggtaatgcaggggaaagcgcgaatgcagtcccccactacaacaaattatgc

SEQ ID NO: 316859 - DNA, 98 bp, Homo sapiens
cccccagcggcagccgagcccgcccgcgcgccgcttcttccagaccagctggtcttgcttctggagcatctcttggagcagaagactctgagcccccg

SEQ ID NO: 316860 - DNA, 74 bp, Homo sapiens
caaacctgagtttctacagaaatgagatccgcttcctgcccaacgggtgtggttccaactgctcagcgtgctgc

SEQ ID NO: 316861 - DNA, 100 bp, Homo sapiens
gaaaactaggaatctatgatgctgatggtgatggagattttgatgtggatgatgccaaagttttattaggaattacatgaacgacagccttcgcaccgac

SEQ ID NO: 316862 - DNA, 88 bp, Homo sapiens
tggattccagtgggcccgacagcgcaacagctaatggcagcattagccgctgttgggcctcctaatcctcgggcagatccagagtgct

SEQ ID NO: 316863 - DNA, 98 bp, Homo sapiens
cagaaggaagatggcggatctggaggagcagttgtctgatgaagagaaggaaatgcttccagactgcacacttttacttagaggacagtacatcccct

SEQ ID NO: 316864 - DNA, 100 bp, Homo sapiens
gaggggactgggcgccggcggggaaggaggagcgctaggtcggtgtacgaccgagattaggacaatgcagatcttcgtgaagactctgactggtaagacc

SEQ ID NO: 316865 - DNA, 80 bp, Homo sapiens
accccaacaagccctacaagaaggtgctcagggtatgctttttccaagccagatttgatcacatggatggaacaagggag

SEQ ID NO: 316866 - DNA, 75 bp, Homo sapiens
aagatgttgtcctgtgctggggctgacagaatgagtctgcaggtcttaaacgacaaaaatgtcagcaatgaaaaa

SEQ ID NO: 316867 - DNA, 100 bp, Homo sapiens
ggaagagaggaagaggcaactttggagggcagagtgagcaggagaacacactcaaccagctgctggtggagatggatgggggagtaaaacttggattggg

SEQ ID NO: 316868 - DNA, 100 bp, Homo sapiens
agctgtggataacgggaggtgaatttccatgtcaacatagtcctggtgcttacatgttgcagaagctaattgaagagacagataggtttgtagtgttcac

SEQ ID NO: 316869 - DNA, 100 bp, Homo sapiens
ttcatcttctctgtggccaacatgaggaacagcaagctgaaggacatccggaacgcctggaagcacagccggagtcttctgagaaggagacaatgtctgt

SEQ ID NO: 316870 - DNA, 50 bp, Homo sapiens
tagagcaaataaccgttttgaaattatttctcatcttcgggaactggggc

SEQ ID NO: 316871 - DNA, 100 bp, Homo sapiens
cagcaacagcagcgtcctccccaccccacctgccaccgaggccccctcttcgcctcctccagctgacatagcccagagatacaggataagcaaataccca

SEQ ID NO: 316872 - DNA, 90 bp, Homo sapiens
gttgttgccgaagagattggactgggagggcaacgagcacaacaggagctacgaggagttgggatcagagaaggctgaagaaggtggaga

SEQ ID NO: 316873 - DNA, 75 bp, Homo sapiens
gtttaaggaaacaggtgtaattaccccagaagagagaaacttgcccaggccaaagaagagaacgtgggcttacat

SEQ ID NO: 316874 - DNA, 100 bp, Homo sapiens
gcgaggtcagccccaaactaccgaaaaagcttgtggtgaaggggggcaaaaaaaagaagcaagttctgaagttcactcttgattgcacccaccctgtaga

SEQ ID NO: 316875 - DNA, 75 bp, Homo sapiens
ttttattcttcctggttcgtgcattcatcctccataagagagttaattgttaaatccagtatggccacaggagga

SEQ ID NO: 316876 - DNA, 80 bp, Homo sapiens
cgactgctagagccgagcgaagcatgcgagccacccctctggctgctcctgcgggttccctgtccaggaagaagcggttg

SEQ ID NO: 316877 - DNA, 87 bp, Homo sapiens
ggcgccgcgggctccgcgcccggccggacccgggcccgagtgatgaacggcagcagccactcaccaacagccatcaatggtgcaccg

SEQ ID NO: 316878 - DNA, 142 bp, Homo sapiens
gtgatttacctgggtgagacagcttgagccccatcgtggattccaagacatccctgctgagagagccaagaccaagatcactccatggatgaaatgacagctgtggtgaaaattgaaaaaggagttggtggcaataatgggg

SEQ ID NO: 316879 - DNA, 75 bp, Homo sapiens
tgatgctggagaattatggaaatgtgacctccctagattccaaaggttttcctaaaaatataaccaacaacaggg

SEQ ID NO: 316880 - DNA, 75 bp, Homo sapiens
ccattgaagggaacaacacccttgatggtacatcaggaacgtctctatcaagaatacaatttcagcaaggctgag

SEQ ID NO: 316881 - DNA, 103 bp, Homo sapiens
ggctcacctggaggccgcccgcacagtggcacaccacggaggcctgtaccacaccaatgctgaagtcaagctgcaggatggagtctcgcactgtcgcccaggc

SEQ ID NO: 316882 - DNA, 50 bp, Homo sapiens
gacgctgacctacctcaaccaagggacctggaagccagagcacagaatga

SEQ ID NO: 316883 - DNA, 101 bp, Homo sapiens
agatcgagcgctactcgcgcttttcgccgtcgccgctctccatcaaacaattcctggacttcggtaagtgacatgaggtagagttggttttagcttccccc

SEQ ID NO: 316884 - DNA, 100 bp, Homo sapiens
agcatctcaaggaaggaggcctcctgaccttggctggcgcaaaggctgccctggatgggactcctgtgatctcagtgaaaaccaaattcaggcaatccca

SEQ ID NO: 316885 - DNA, 75 bp, Homo sapiens
agctggccaacaaggagtccctgcaccgccaggagaataagccaatgcatggcaagcactaaatcttagatcctg

SEQ ID NO: 316886 - DNA, 96 bp, Homo sapiens
gctgctaaaaacaagactggggctgctcccatcattgatgtggtgcgatcgggtatcactgggatacatcagattggatgccaagcgttcctctgc

SEQ ID NO: 316887 - DNA, 98 bp, Homo sapiens
gcatgcagcagttacttccactcaagaatcgtaggccaggctgatggagagctgaacattactcttccagaagagatgttcgaagaagaacaatttat

SEQ ID NO: 316888 - DNA, 75 bp, Homo sapiens
gtttgatattagtgaagatgagccactgtggaagaagtatatttctcagctctccttgaggaggcggcagatgct

SEQ ID NO: 316889 - DNA, 127 bp, Homo sapiens
ggggagccgggccctcccctcaggaacgtgtcccggggccgacccggcccgtagtgtggaagcagcttcaggtgtgttccagagaacaagccttcagacatttgctatattgacgctgagctgtcag

SEQ ID NO: 316890 - DNA, 116 bp, Homo sapiens
gccgctgtgtggttgcaacggagataaattcccggaaccgcgattcggcgtgtcagggcgtgatggtgggcatgggtcagaaggattcctatgtgggcgacgaggcccagagcaag

SEQ ID NO: 316891 - DNA, 75 bp, Homo sapiens
gcctgatctaacccctagaaacaggattccggagtttgaatccacctttgacaattgtccgaaagacgtttgaat

SEQ ID NO: 316892 - DNA, 75 bp, Homo sapiens
ctcagcctcacaagtagctggaactacagactgataggctggatgtggatagcttgtttagcaacattgagtccg

SEQ ID NO: 316893 - DNA, 100 bp, Homo sapiens
gactactataaagctttggaagatgcagatgagaaggttcagttggcaaaccagatatatgacttggtatgatctcgtgaaaccttgagagaaactgaat

SEQ ID NO: 316894 - DNA, 97 bp, Homo sapiens
gaaaatctactgcgtggcttgtcaggaactcgactcagacgtggataaagataatcccgtgggctgagagtggttactcttcccagtggtgctatga

SEQ ID NO: 316895 - DNA, 75 bp, Homo sapiens
attgttttacagtctgttccacatgatcattgtaataaggaatttttaccattcgcctgcccaaagaaacccctg

SEQ ID NO: 316896 - DNA, 75 bp, Homo sapiens
ggaaccgaagagagctctgttgttgcagaattgcgaaaagccttgcagcagctacaagaagaattgcagaataag

SEQ ID NO: 316897 - DNA, 100 bp, Homo sapiens
tatctgtgtaaaggattgcaagagaagttcttcaagaggaaacccaaagtccttggggtgtggtcactcacctgtctaccactcccgtgaaatggcagct

SEQ ID NO: 316898 - DNA, 98 bp, Homo sapiens
tggagtgtccgctgtgcccgggcctgcaccatgagcgtcccggccttcatcgacatcagtgaagaagatcaggtatcttggagatggccgcttccatc

SEQ ID NO: 316899 - DNA, 83 bp, Homo sapiens
gcctcgttgcgaagggaccagcgcagccaatcaggcgtcgttgctacctcgacctgtccttcgacaacagtgacctggtgatg

SEQ ID NO: 316900 - DNA, 90 bp, Homo sapiens
ggagtactggtttgtgctgactgccgagtcactgtcctggtacaaggatgaggaggtcatctgtgggaagtgctccgagttcaaggccga

SEQ ID NO: 316901 - DNA, 100 bp, Homo sapiens
aaggaggccttccagctgtttgaccgaacaggctaccaagcagtttctcgaagagattaacaagtggacagttcagtacaatgtttccccgctgtcttgg

SEQ ID NO: 316902 - DNA, 75 bp, Homo sapiens
agacagcctgatgtgcagtggtctctggcatctctatcccctatgaggcaccacgtaagacctcctgcccttagc

SEQ ID NO: 316903 - DNA, 75 bp, Homo sapiens
aagatgaagaaacccagcttgatatgttgatatctcccggggccaattcagcatctctacctggccatcctaaca

SEQ ID NO: 316904 - DNA, 100 bp, Homo sapiens
gtgccctctttgcaacatttcaggaaaacagagaaagaagtgataggagggctctgtaggaacttgctactaccagcaccatgccctaccaatatccagc

SEQ ID NO: 316905 - DNA, 100 bp, Homo sapiens
gaacgaggcaaggagctaaagcagcgtgcgttcagccctggggtgaaagaaaatggcccgaaccaagcagactgctcgtaagtccaccggtgggaaagcc

SEQ ID NO: 316906 - DNA, 100 bp, Homo sapiens
tagaggcatggttgaaattgaattgctaatggaggttggcaggatgctactaccccttcatcagtgacctcccctacagaaggccctggcagtgttcact

SEQ ID NO: 316907 - DNA, 96 bp, Homo sapiens
ataacctgaggagccgggggaagctggccttgggtgggatggagtaggacctcttccagactgtgctgaaccaccaaaagggatccagatgctgtg

SEQ ID NO: 316908 - DNA, 121 bp, Homo sapiens
cacatatgacagtggacatagaggacaacgcagatatagaacatttcttttatcacagatttgaatttgttgaaatgagcagtcgtaaatcaaagagtaacagcttaattcacacagagtg

SEQ ID NO: 316909 - DNA, 82 bp, Homo sapiens
ctctacctccagcacatccggacttcccaagtaagaagcggaagaggagccgctggaaccaagacacaatggaacagaagac

SEQ ID NO: 316910 - DNA, 95 bp, Homo sapiens
cggggctgaccctgcccaccaggaccgccatggggacacggcactgcatgctgctgcccgccagggcccagatgatgtccagaccaagatagaac

SEQ ID NO: 316911 - DNA, 48 bp, Homo sapiens
gtcactctggatgaggccaggtcctcctccgcctcctcctctctgcat

SEQ ID NO: 316912 - DNA, 82 bp, Homo sapiens
aaaacactaggactaactcagcatgttcagggattgcctacagcgctcctttaaggcacaggttttctcctgccctgcttgc

SEQ ID NO: 316913 - DNA, 82 bp, Homo sapiens
cccttgcggagttccgcgtccgaggtgtgaagatgtgaagttcatttccaatccgccctccatggtggcagcggggagcgtg

SEQ ID NO: 316914 - DNA, 90 bp, Homo sapiens
tctgaacccggcagccagcagaacaacgacagagaacatggctccaataccaggtaaattcgaaccaccattatttcacccgaatgtgta

SEQ ID NO: 316915 - DNA, 82 bp, Homo sapiens
ttccagaaaaattacagcacatctcagtgaatttgcaagtgctggaaaggcagctcatcatgcagagtgaaatgagggaaag

SEQ ID NO: 316916 - DNA, 121 bp, Homo sapiens
gagactctccttgcttggaattctgcccactctgcggagttagcagtcacgacctccagcacagaaatgaaagctcattagcatctacactgaagacgctcctgttcttcacagctttaat

SEQ ID NO: 316917 - DNA, 82 bp, Homo sapiens
agcgggcggtcattcgcatcgcagggagtgcctgcagggcaccatccgcaacagccaggaggcggaggtctcctgccccttc

SEQ ID NO: 316918 - DNA, 100 bp, Homo sapiens
catgtggggcctgggaaatgaaagagcgccttgggacagggggatttggaaatgtcatccgatggcacaatcaggaatgggtagctctcgagaatctaga

SEQ ID NO: 316919 - DNA, 100 bp, Homo sapiens
aagatggctcttcatggaaatgcattgtcagcctctactcaatagtccccccagctttgtgtgctggtctcggggcttcatggagatgaatgggcggggg

SEQ ID NO: 316920 - DNA, 122 bp, Homo sapiens
caagaagaccattcagatgggatctttccggatcaatccagatggcagccagtcagtggtggaggaattgaatgatctggcacgggaccctccagcacagtgttcagcaggtcctgttggag

SEQ ID NO: 316921 - DNA, 100 bp, Homo sapiens
gtccgggcttggagttcgcctcagacgcggtggagccgccggagtctgagaagggctggtgaattaccatatctccgtcaagtgcagtaaccagttcaag

SEQ ID NO: 316922 - DNA, 90 bp, Homo sapiens
tctggctgctgcggaccccgccgagtcctagcgcctggcctgcgcgccgctgcccgcgccacaggactgcaatgtgccgatcttagctgc

SEQ ID NO: 316923 - DNA, 100 bp, Homo sapiens
gagagaggcaccgggatcgtgaccgagaccgtgaccgagagcgtgaccgagagcgcgaatatcgtcatcgttagaagggatcatgtaccgcaagtcctgt

SEQ ID NO: 316924 - DNA, 99 bp, Homo sapiens
cgcggagccgaggcggagccgctgtcctcgtccccagcggtcccgcccaacgcccgactctagcagtcattatggcgaaccttggctgctggatgctgg

SEQ ID NO: 316925 - DNA, 96 bp, Homo sapiens
cgagagcgtgaccgagagcgcgaatatcgtcatcgttagaagagccagccccagtgcctgctgagccgtttgacaacactacctacaagaacctgc

SEQ ID NO: 316926 - DNA, 50 bp, Homo sapiens
tatcggaaggatgatttcgttatgagttccgttctggaaaggcacccatc

SEQ ID NO: 316927 - DNA, 50 bp, Homo sapiens
cgacgacgaggaagaggaggtttctgagcctaccgtatgtgaacgggagc

SEQ ID NO: 316928 - DNA, 83 bp, Homo sapiens
tgggcttcgtccagatcgggaaggggagaagtggtgccacatgacccaggaggagcgcgacgacagcctccggttcaacgaga

SEQ ID NO: 316929 - DNA, 139 bp, Homo sapiens
cttcccctccgtggtgacagcctctgggtcctcggtcggtacagtctctgcacctcgcgccccagcaggaaaggccgagggggacggcaagatgcacatcaccctctgtgacttcatcgtgccctgggacaccctgagc

SEQ ID NO: 316930 - DNA, 100 bp, Homo sapiens
catggtgccgcagggccagggccaaggctgttcgcctattgcgggaggagctacagctgctgcaggagcagggctcctatgtgggggaagtagtccgggc

SEQ ID NO: 316931 - DNA, 82 bp, Homo sapiens
aagaactttcagcctcagaaaatggtgacactccatggatgagagagattcagccatccttcccctgcggagtatgtcgagg

SEQ ID NO: 316932 - DNA, 97 bp, Homo sapiens
ccagaagacttaaaaaagatagaatattatctggaagaggagcaagggcctgcagatcatcctagtttgatccccaaggattaccgatctctgaaaa

SEQ ID NO: 316933 - DNA, 90 bp, Homo sapiens
ctcggacgtgcggggcctgggcctcccggtccgcaagcaggccctgagcctgtgcaattatttcgagagtcaaaatgtggatttccgagg

SEQ ID NO: 316934 - DNA, 100 bp, Homo sapiens
gatgattccatacggaataagctcattttaattgccagaaacaaaggtgttggctgaggtgacttcgtgggacctgcccccgttgactgaccgctaccgc

SEQ ID NO: 316935 - DNA, 100 bp, Homo sapiens
gcccccctgaaaaacggatgagacttcatactatactggcaattgctggagaagattttgcaattgttgcttctgatactcgattgagtgaagggttttc

SEQ ID NO: 316936 - DNA, 88 bp, Homo sapiens
gcctctctagaaaatggtgttctgctgtgtgagttatacattggctcttcaaagacgttcacctcatcagagaaatccctgactcctt

SEQ ID NO: 316937 - DNA, 100 bp, Homo sapiens
tgatttataagaacagggtacgaatgaatacctttccatgggcctgctttcttccccgggcgatgtgcagagatctttgccaggggtcaaagcgtcggga

SEQ ID NO: 316938 - DNA, 97 bp, Homo sapiens
cgaattattccaacaacaagcccaggctgttccgaggcctcatcctgctgctgaccttcctaatttacgcctgctatcacatgtccaggaagcctat

SEQ ID NO: 316939 - DNA, 75 bp, Homo sapiens
cacgagggcatatatgaagaaggcatttctattttagaaagcagttcggcagcctggcatcctcgctacaacctc

SEQ ID NO: 316940 - DNA, 100 bp, Homo sapiens
ggcttagaggacttccctttggatgtagcaaggaagaaattgttcagttcttctcagcttagcagtgtctgcaaaaacgaatcttttcctacaacctgtt

SEQ ID NO: 316941 - DNA, 50 bp, Homo sapiens
tggggatggtatgctggatatacaggaagaaatgttggctatttggcgat

SEQ ID NO: 316942 - DNA, 50 bp, Homo sapiens
tgtaatcccagcacttcgggaagctgaggcaggtggatcacctgaggtca

SEQ ID NO: 316943 - DNA, 90 bp, Homo sapiens
gctctccctgcgctctccgcaccgcggcttaaatgatgtattttgtgatcgcagcgatgaaagggcgccctgcgtccggcagaggaggcg

SEQ ID NO: 316944 - DNA, 98 bp, Homo sapiens
ggggcagcatgcacacggcgctctccgacctctacctggagcatttgctgcagaagcgtagtcggccagaggcttccaactgaatatgagaggaacgg

SEQ ID NO: 316945 - DNA, 74 bp, Homo sapiens
agattcgcagtggtcgcttcttctccttgatccaaggttttgccatcaaggggggacgatttaccaaagcccaa

SEQ ID NO: 316946 - DNA, 82 bp, Homo sapiens
ccaagaggatcaacagaacttctttgtcttcgggtgccactgtaagaaggcagtcgatgatgtgaagaaaggttacatcaaa

SEQ ID NO: 316947 - DNA, 100 bp, Homo sapiens
cgtgtgcgctccttatattcccccgcagaggacaaccctccatatgataagggagccttcagaatcgaaatcaactttccagcagagtacccattcaaac

SEQ ID NO: 316948 - DNA, 80 bp, Homo sapiens
aaaggagcagccctggtgtcacctatcagtaaaaggtgttaccgatttggaaactagaaatcacctttttacttaaaaag

SEQ ID NO: 316949 - DNA, 50 bp, Homo sapiens
gataatataatcaactcctctgcctggtgagccgttctccaaccctttgg

SEQ ID NO: 316950 - DNA, 100 bp, Homo sapiens
ggaggagttggcggaagcacttggaactcctttataagtgtcagctgtgaggaatggcggcgctagatagtaaggcatcagggaagatgggaatgcgagc

SEQ ID NO: 316951 - DNA, 80 bp, Homo sapiens
ttcagatgatggaatcaggatgctgtatttagattttggaggcaaagatggagagattactatggaaatgatgttagaca

SEQ ID NO: 316952 - DNA, 75 bp, Homo sapiens
cctcatcctggttctggaatcctcagttcaaggtgggatgttgagcactacagacctcacagtgccaaatggagc

SEQ ID NO: 316953 - DNA, 100 bp, Homo sapiens
gaaactcttcagtttaaagctcaagttcaggacctcaaggggctcggctatgagaaggggaagcctgtgggtctagtgggcgtcacagagctttcagacg

SEQ ID NO: 316954 - DNA, 83 bp, Homo sapiens
cgaaggccgccgaacctgcctggctagccggcgacttgagtgacgagttgacatcatggacatatgtgagtccatcctggaga

SEQ ID NO: 316955 - DNA, 75 bp, Homo sapiens
tccattggcaagctacaataatggggccattgtcatttacgtgctgaagcatattgacttgaggaaaacgccttc

SEQ ID NO: 316956 - DNA, 80 bp, Homo sapiens
atccgcatcaacaagatgttgtcctgtgctggggctgacagggaaccagcggggaaactgaggctcggggtggagcgcag

SEQ ID NO: 316957 - DNA, 95 bp, Homo sapiens
tcatctgggcggtatctggaacttggaggactatcgggtctgtatggactttaacattattcggaaagactcactccctgtttgccctgtggatg

SEQ ID NO: 316958 - DNA, 78 bp, Homo sapiens
gtggcctcctctccgccctagcgctgaggttaacgtccctaaaacccgccggactttctgtaagaagtgtggcaagca

SEQ ID NO: 316959 - DNA, 75 bp, Homo sapiens
gggcggggaccttgccttgcccgggaaagcgtggatacccatcaacgaagttttgatattggaattcagattggc

SEQ ID NO: 316960 - DNA, 75 bp, Homo sapiens
agacagagtactgggagcacatattcttggaccaagtgttgcggagataggaacatgggagagaaacaatctggg

SEQ ID NO: 316961 - DNA, 100 bp, Homo sapiens
gggacagagcgcctgcgaccccagtcggtgctccggggaggtcacctgacgaggagatccattacaagattttggcttttctgttgaaaagtgttccaag

SEQ ID NO: 316962 - DNA, 100 bp, Homo sapiens
ccaccagaaaacttgatcacatcaatatctgcagttccaatttcccaaaaagaggaattcacaattgaaactgaagggaaaacatttcagttaacaaaag

SEQ ID NO: 316963 - DNA, 91 bp, Homo sapiens
gaaagatctaccttctggaagctactactacgtggtgcttggaaagagctatcagcttcccagtttgcacaattcatcaagaaattatgcg

SEQ ID NO: 316964 - DNA, 83 bp, Homo sapiens
gctcatcttcgtggggcgtgaggagtgtgagctcatgctacagtaagactttgaccccgacgcaggcttcagtgattgccgcg

SEQ ID NO: 316965 - DNA, 75 bp, Homo sapiens
ctgagcttggcctcggcgtcctcgggagttgatccccctcatattgtgtacagcatgtctacatcctgagcctaa

SEQ ID NO: 316966 - DNA, 75 bp, Homo sapiens
tgcaagctcttggacatggagctggaaatgattgcccgtgaggcagaggctgccatctaccacttgcaattattt

SEQ ID NO: 316967 - DNA, 74 bp, Homo sapiens
atgtgcccctctccatttcccggtcacccttctagacttcagaccacagacaacctgctccccatgtctcctga

SEQ ID NO: 316968 - DNA, 127 bp, Homo sapiens
cccaatgccatccagagctgtgcctcccagcaccacagtccttctgcagtccctcgtccagccacccccagaaaccagcctggacaccaagtctgtgtcagaaggccacctcaagaggaacatcgtg

SEQ ID NO: 316969 - DNA, 113 bp, Homo sapiens
cggagcgagagcgagtgcctgagcaacatccgcgagttcctgcgcggctgcggggcttccctgcggctggagttgatgcggatgaaattaaaaggctaggaaagagatttaag

SEQ ID NO: 316970 - DNA, 101 bp, Homo sapiens
cgccactgccctggggcagctgaactgagcgtatgtgccacgccgcccaggagacccctctgctgcaccacttcatgaaatctttagagatggatcatttt

SEQ ID NO: 316971 - DNA, 75 bp, Homo sapiens
acatcacctacactaccacggccacactcaccactccatggccacacagttcatagccctgatgaagcaagttac

SEQ ID NO: 316972 - DNA, 90 bp, Homo sapiens
gagaactggtcgccatcaagaaagtattgcaggacaagagatttaagttaattggccttggtcctcacagctccaaaaagaaacaggatc

SEQ ID NO: 316973 - DNA, 75 bp, Homo sapiens
agatcgaagcggatttccgattgaatggtgctggagaatctggtaaaagcaccattgtgaagcagatgaggatcc

SEQ ID NO: 316974 - DNA, 90 bp, Homo sapiens
ctaatggtctttttgttcaagataaagtgattttttgcctttgttgattaactggacaaattcaggaccgtataatagacgctggcccca

SEQ ID NO: 316975 - DNA, 75 bp, Homo sapiens
ccaccgctgccctcagctccgagtccagggcgagattgtcactgctgttccaagggcacacgcagagggatttgg

SEQ ID NO: 316976 - DNA, 100 bp, Homo sapiens
aggccatcaaatgcagaattcacaagatccaatcccttgtccttaaaaggattttgtgccactgtatcaagactttgaaaatttttatacaagaaacctt

SEQ ID NO: 316977 - DNA, 88 bp, Homo sapiens
tgatggtggatgacaggctagtcacaatgcaggctgcagaagatgtcaatgttactttcgaagatcaacaaaagataaacaaatttgc

SEQ ID NO: 316978 - DNA, 101 bp, Homo sapiens
aaagagggaagaaagaaatcgatccgtgtcttggtggctgtggggaacggaaaaggagctgcaggtacatgtgacagcactgcagcgatgagtggaatttt

SEQ ID NO: 316979 - DNA, 75 bp, Homo sapiens
cacatttgcagctcattgaaggaaaggttcaggcccctcctgttgttgctgcaactccctcacccacagcagtac

SEQ ID NO: 316980 - DNA, 75 bp, Homo sapiens
tttctagggacaaacctatcacatttactcagggcaattgaaggaacagactaaaaatcgtgtcctggaaggaaa

SEQ ID NO: 316981 - DNA, 96 bp, Homo sapiens
aatactgcagcaatgagtgtgtggtgaagcactgcagggaaaacctgaggtgcttggaggtccagacacaagaagaggattggaaccagttccgat

SEQ ID NO: 316982 - DNA, 101 bp, Homo sapiens
accgagtccggaccggagactttggggcctaactagatcactggcgttatccttcttgcagttggcatttggggcaaggtgagcctggagaattacttttc

SEQ ID NO: 316983 - DNA, 74 bp, Homo sapiens
taagctcggctgatctgttcgaggagccgaggaagcagccagcagtgacctgtgtaattatgcagaagaatgga

SEQ ID NO: 316984 - DNA, 88 bp, Homo sapiens
accccgagcgaggccaaccttcaggaggaggagcagtcctatgcaccagctccccaccccatggctcctcccagccccagcacaaaca

SEQ ID NO: 316985 - DNA, 90 bp, Homo sapiens
gcgggctggagcctgacgagctggcggcatccagagctgctgttggcggattgtacccacggggagatgattcctcatgaagagcctgga

SEQ ID NO: 316986 - DNA, 75 bp, Homo sapiens
caggagctctacgcccagatcgcgggcgcgtttgaaatctcgccgtcggagctcaccatctgctacctggatatg

SEQ ID NO: 316987 - DNA, 100 bp, Homo sapiens
cagaagatggaggaagctgtaccgtgccaacggccacctcttccaagccaagcgctttaacagggtctcctctgagcctccggcctccataagacccaaa

SEQ ID NO: 316988 - DNA, 74 bp, Homo sapiens
caaagatggtacaaaagagtctttggaggatgcggctttgatgggcaccatggtgcaggaatttgtacacctgg

SEQ ID NO: 316989 - DNA, 100 bp, Homo sapiens
tccagcggccacttcttgcgggagaacatcaaggccagcaccgttcctcctaagatatatgacatctcaaatgatatgaccgtcaatgaaggaaccaacg

SEQ ID NO: 316990 - DNA, 100 bp, Homo sapiens
ccgcgggccaggagagcgctcggcgggtgctggagaatctggtaaaagcaccattgtgaagcagatgaggatcctgcatgttaatgggtttaatggagag

SEQ ID NO: 316991 - DNA, 100 bp, Homo sapiens
ggcaacctcggagcttatactcctcccagtgacgggtctggagtgcgtgggggaccggctgttggcggggtcctgtattaataggaagttcacatggtgg

SEQ ID NO: 316992 - DNA, 108 bp, Homo sapiens
ggacccaagagtcagcggtatattagttcagttaccactaccaggtccgtggcactcaggtagttggttctgacatgactgtgacagttgagtttaccaatcctttaa

SEQ ID NO: 316993 - DNA, 100 bp, Homo sapiens
tgtcccagagggagaagcagctagaaccagtaccatgcaggatgaaacattaaattcttccgttcagagtattaggttgtccttctattcaggccactct

SEQ ID NO: 316994 - DNA, 82 bp, Homo sapiens
tcctgggatcagatgtgcattgaggaattgaatgatctggcacgggaccctccagcacagtgttcagcaggtcctgttggag

SEQ ID NO: 316995 - DNA, 100 bp, Homo sapiens
tggcaaacagtgtttgcctctggttcagctcatacaacagcttcttaggagaattctcaccaaatgttcccaaatccttatcctcagctgtgaaggtaaa

SEQ ID NO: 316996 - DNA, 83 bp, Homo sapiens
ctgtggaggagcagcagtagtcggagggtgcagcatccggtgaaagacagagatcacatttcaactagattcttaggaagtat

SEQ ID NO: 316997 - DNA, 100 bp, Homo sapiens
ggactcgacatgattgataccatcacgtggaacaatccaaagttttaatcaaagaaggtggtattcagttgctgcttacaatagttgataccccaggatt

SEQ ID NO: 316998 - DNA, 73 bp, Homo sapiens
aattcatgtcggttttgatgctgtcacaggggagtttacgggaatggccaagaacggcagtgaagcagacata

SEQ ID NO: 316999 - DNA, 88 bp, Homo sapiens
gaagaaacatctccaaagacccatctttagctcgagagctagccttgcagcaggaggaagggaagaccgtgatgtacacagctgtggg

SEQ ID NO: 317000 - DNA, 74 bp, Homo sapiens
cggaactggagaaagctgaggtggggccgacttgcttgctgtcaactcggatgggaacatgccatatgacctct

SEQ ID NO: 317001 - DNA, 89 bp, Homo sapiens
cgctgatctagtgcttctcgaaaaaaaccttcaggcggcccatgggaattacatgaacgacagccttcgcaccgacgtcttcgtgcggt

SEQ ID NO: 317002 - DNA, 100 bp, Homo sapiens
tccttgggaaacctggacgcatccagctccagggacctgtccggcaagtggtgacatgcaccgtccagggagaaagcagaacgagatcttgtggcgggag

SEQ ID NO: 317003 - DNA, 51 bp, Homo sapiens
agagatattttcaacaaaggatttggttttctgtctcaactggtctctgac

SEQ ID NO: 317004 - DNA, 75 bp, Homo sapiens
cgggaggtgaatttccatgtcaacatagtcctggattcttctcatcgcagtgctccaggcagccactaccaatcg

SEQ ID NO: 317005 - DNA, 74 bp, Homo sapiens
ttggcggtccctgtgacctgtggagacacggccagatctgccctccagtgtgaatgacagaggtggtgccatcc

SEQ ID NO: 317006 - DNA, 100 bp, Homo sapiens
atcctttgcaccctgcttggagacggacttgcttccgctgttccatttcctccaagtcaccggcttacagcaaaagaagtgtttgataatgatggaaaac

SEQ ID NO: 317007 - DNA, 82 bp, Homo sapiens
ctctcgtcttctgcggctctcggtgccctctccttttcgtttccggaaacatggctgcaagatcaaggccctgcgggccaag

SEQ ID NO: 317008 - DNA, 100 bp, Homo sapiens
acttgaattagattacagcgatggggacacagaaggtccaactggcccaccttcaacactccctctaagcacccagacctctagtggcagctccacccta

SEQ ID NO: 317009 - DNA, 99 bp, Homo sapiens
gcaacaccctcagcctcatgcattcctgcggcatgtatgacttctctggccagtttgccttccacggtgaggacgcttgagcggaagttagaagcaaaa

SEQ ID NO: 317010 - DNA, 82 bp, Homo sapiens
ggctttcggcaagaactggattcgtggcgccacaagctcattcactgtgtagacctgcctagagctggaacgttacctccag

SEQ ID NO: 317011 - DNA, 82 bp, Homo sapiens
tcctgtcaccaacaaagatttcaggttttttggaacgaagtggatgatgttcctcgctgtgggcatctacgccctctttgtc

SEQ ID NO: 317012 - DNA, 100 bp, Homo sapiens
tcgcgggcgcaatgaatccgcggcagaatctggtcaacctgtagttccgttggacagacagtttctcatccatgaactaaatgcatttgaagaatcaaag

SEQ ID NO: 317013 - DNA, 75 bp, Homo sapiens
tgctgatggtgatggagattttgatgtggatgatgccaaagttttattaggacaaatatcagtggatgggttcat

SEQ ID NO: 317014 - DNA, 75 bp, Homo sapiens
acgtttttacacctgcaaggtctctggaggaattcaatgatgtagttttccagaaaaagaccttctgcactgtcc

SEQ ID NO: 317015 - DNA, 100 bp, Homo sapiens
catctcctgggccatttactacctgtacaactccttcaccacggtggaaccgtcccaaaatgtcccttgctcagaagaaggatcgggtagctcaaaagaa

SEQ ID NO: 317016 - DNA, 83 bp, Homo sapiens
agaagtgctccagaaacagcttctagttacatcatgctgatgacagcttcctggtcctcaccacagatggaattaacttcatg

SEQ ID NO: 317017 - DNA, 82 bp, Homo sapiens
ctagggggaagaaagccatgctgcccagccgggagtgcatccgccccaacccttttccccctcgtctcctgtgagaattccc

SEQ ID NO: 317018 - DNA, 100 bp, Homo sapiens
cactctgtgctagtgatgtgagcaaatgcctcattcagatggactagaggcttttaccagatttcttaaaactgaattcagtgaagaaaatattgaattt

SEQ ID NO: 317019 - DNA, 100 bp, Homo sapiens
gcagctattctcaggatatgacaggggtaacacccttccagatgatttttgagtgcttagatgagtacgaagatgatgaagcagggcagaaagagcggaa

SEQ ID NO: 317020 - DNA, 76 bp, Homo sapiens
acgtgagcaagcccaggcacagccgacgccgcggggatgaccggaaagaagggatgaccgcgtttgtggaaaagag

SEQ ID NO: 317021 - DNA, 100 bp, Homo sapiens
gttgactttaatttgatggatcctaaactcttggcttcaggttctgatgatgcaaaagacaatacaatggtgggtgaagagaagatgtctctaagaaacc

SEQ ID NO: 317022 - DNA, 100 bp, Homo sapiens
tatcatcccggagcagtcattagaattctcgcttgttctgcaaatccttattccccaaatccaccagctgaagtaagtggatcaatcttcctgtcctaca

SEQ ID NO: 317023 - DNA, 75 bp, Homo sapiens
ggactgctaagaagataccaccagacttaattcagtgcacaaatgagatgaatgtgaacatcccacagttggcag

SEQ ID NO: 317024 - DNA, 76 bp, Homo sapiens
acagctttcagcaacacagaaattcaggaagctgctttcaaaaggtgctggagaatctggtaaaagcaccattgtg

SEQ ID NO: 317025 - DNA, 51 bp, Homo sapiens
cgcggatctggggccgtcctcagcatcagacaacagtcagcgctttcgaga

SEQ ID NO: 317026 - DNA, 82 bp, Homo sapiens
agtcgccgctgcagccctagtgactgcggcctgcatcccgcacttctcagaacttctggatgagttttcccagaacgtcttg

SEQ ID NO: 317027 - DNA, 100 bp, Homo sapiens
atcgtgctctatgactgccaggagggcaagccaagatcaaggctcgagatcttcgcgggaagaagaaggaggagctgctgaaacagctggacgacctgaa

SEQ ID NO: 317028 - DNA, 100 bp, Homo sapiens
cctccagtctgggcgcatgacagccgcagactccggccagccagtggtccatgctgtggacggcaccgccgagaacgggatccaccccctgagctcctcc

SEQ ID NO: 317029 - DNA, 101 bp, Homo sapiens
ctgactttggtgtctgggaaagaggaagcaaatataataatggcagcacagagctacattcgagggaggttcccctgaaggatgctaaggaatacgctgaa

SEQ ID NO: 317030 - DNA, 82 bp, Homo sapiens
tgaggccccagaactatcttttcgaagctcattcacacagaagacccatttaatgatgaacatcaggagaggcaagaggtgg

SEQ ID NO: 317031 - DNA, 88 bp, Homo sapiens
ttctgttttgcctgaatacatgatttaaacaagagatttccacagaaggaatcatgggtaaagaaggaagacaggctgcaagaaacag

SEQ ID NO: 317032 - DNA, 75 bp, Homo sapiens
aagagagccgaggtcgctccccatccactctcacaagatgtctttggtggacttgggaaagaggttgctagaagc

SEQ ID NO: 317033 - DNA, 101 bp, Homo sapiens
cggctccgcgggcggcccacggcgaggtgcaatggatgagcttcatagtctggatccaagaaggcaagagttattggaagctagatttactggagttgcaa

SEQ ID NO: 317034 - DNA, 90 bp, Homo sapiens
tctccatcgaaggcaacattgtgtacagctgcagctatcaaggctataagagaaagtggaatgaatctgaacccagaagtggaagggacg

SEQ ID NO: 317035 - DNA, 50 bp, Homo sapiens
gtgagaggaaaacagcctacccgtgccccaggtgctaaagagctgtgcag

SEQ ID NO: 317036 - DNA, 100 bp, Homo sapiens
gacacgggctgcaacctgcagcacatcagcgaccgggagaacatagacgcggagggtgcaggacgtcatcagcccgatcgtgtttgaagcagcctacagc

SEQ ID NO: 317037 - DNA, 100 bp, Homo sapiens
gtgcgaggagatcgccattatccccagcaaaaagctccgcaacaagatagcagggaaaatgatgaagttctggttgctggatttggtcgcaaaggtcatg

SEQ ID NO: 317038 - DNA, 98 bp, Homo sapiens
cctcatgtacgagtccgagaaggttggggtcgcctcttccgagatctgtgactttggcctggcccgtgttgcagatccagaccatgatcacacagggt

SEQ ID NO: 317039 - DNA, 99 bp, Homo sapiens
ctagccctgccaataaaatcaacctcattttgtgaatgcctgttgtgtgccaaggaccctgctaagtgctttgcttgtgttccctcggaagttaggaat

SEQ ID NO: 317040 - DNA, 75 bp, Homo sapiens
gcgcggggaccgctgtgctctcgagtgcgcccccacccctgtgtccaagtggccgcactccagacctgaaggctc

SEQ ID NO: 317041 - DNA, 100 bp, Homo sapiens
cagggacgtgatgttggagaactacaggaacctgctttctctcgatgaggataacatccctccagaagatggcgcatattaaatttcctattgactaccc

SEQ ID NO: 317042 - DNA, 82 bp, Homo sapiens
tgatggccagagagatgacgatcttaggttctctccataaatgaagaagggctaaggcgatgcgaagagaatacaaaagtct

SEQ ID NO: 317043 - DNA, 75 bp, Homo sapiens
ggagttcttacaacatggcagacattgacaatctgttcggcacttgaagtactccttgtttaagaaatcactact

SEQ ID NO: 317044 - DNA, 74 bp, Homo sapiens
ctcaggggccgtccccaggacactgtccggatcttccctccctggcaggcagaagtcctgaaggctgacatgac

SEQ ID NO: 317045 - DNA, 83 bp, Homo sapiens
gatttctcagaaaacgcactcaaagaagttcccctgggacttttccagcttgataattttgtagccaccttggctaatgggat

SEQ ID NO: 317046 - DNA, 100 bp, Homo sapiens
cccaccagttcgcccgtccccctgccccgttcacaatgagaaccaggtgcatcagcgcattgcggagctgaggaaagcaggtctgtggtcccagaggcgt

SEQ ID NO: 317047 - DNA, 83 bp, Homo sapiens
tcaacagtcaattgtgtactagcattccaaggctatcgccccattccagcggagacttatgtaggagggaccttccctctacc

SEQ ID NO: 317048 - DNA, 103 bp, Homo sapiens
gcggcgagccggagcgcggagcccggctcccgcaccatggaggaggacgacagctacgaattcttccatctctatgacaacaagcccattttagctttctgga

SEQ ID NO: 317049 - DNA, 75 bp, Homo sapiens
caagatttaacattccaacacataaaaattatttatccaacagctcctcccagaaggtgggtgcggctgctattt

SEQ ID NO: 317050 - DNA, 83 bp, Homo sapiens
aaaactggagttgcagctctcctgtcttccccgggaattgggacctgaggcttctccagaaatcttcccaaggctgcagacac

SEQ ID NO: 317051 - DNA, 83 bp, Homo sapiens
ggagaagtcagtagcaagcagctaagacaacatggtacatgtggcaaatcctgatcctaactgttgtcttggagtatttgggc

SEQ ID NO: 317052 - DNA, 50 bp, Homo sapiens
gttcgatatatacagagacagtagggagtgctcagattgctgacctacag

SEQ ID NO: 317053 - DNA, 95 bp, Homo sapiens
aataaactgaaagatatcagcaccttggaacctttgagccagcccctgggcaacaaagtggaaatggagattgtgagcatgttggaaaaaaacgc

SEQ ID NO: 317054 - DNA, 100 bp, Homo sapiens
agagacagaaaagtattgtggcatcttagaaaaacacttgaatttgtcttccaaaaagaaagaatctcagcttcaggagcaggcgcggggcgaaggagct

SEQ ID NO: 317055 - DNA, 75 bp, Homo sapiens
ggagaatggaactgtatgccagcagcttgttgtacaattttaccaaatgttgcaagaactctggagttcttatgg

SEQ ID NO: 317056 - DNA, 100 bp, Homo sapiens
accaagcccaaagaggagaaagatgcttctaaggccatcatcgtctacagactgccgtggacctggaaatgcagcaagctcctgatgaaatccatccatg

SEQ ID NO: 317057 - DNA, 88 bp, Homo sapiens
aggatcgtgggagctaagaagttgttttggaaaccgaaataacaaataagtccgctttgaaactttatgaaaatcttggttttgttcg

SEQ ID NO: 317058 - DNA, 50 bp, Homo sapiens
cctggatgtatctgacgaaaaaatggttactcaaatgagtcgtccagact

SEQ ID NO: 317059 - DNA, 83 bp, Homo sapiens
gcggaacttagacatcaccggagtcaagaccgtgctcatctcccgactcaagcagcttccttcaaaatgtctactgttcacga

SEQ ID NO: 317060 - DNA, 98 bp, Homo sapiens
caatgcacgggtcgctccatttcgaattctgcttcaagttcccggctcccaggtttattctcccatagcatgtgttaccaccaccctgtgaatctgcc

SEQ ID NO: 317061 - DNA, 50 bp, Homo sapiens
ctacaaccttcgatctcctgacgatacaaggcgagtggataattccaaca

SEQ ID NO: 317062 - DNA, 100 bp, Homo sapiens
ccaccctgttcttccgtgtctccctctgcctggcggcagtcacggccaaggttgagataagtcgaagagtgactctggaaaaactccctcctgtcctcgt

SEQ ID NO: 317063 - DNA, 75 bp, Homo sapiens
agattcagtatcactcgctcccttgatgatcttgagatacttgccagaactaatacagctgatgaaatacctgac

SEQ ID NO: 317064 - DNA, 82 bp, Homo sapiens
tcagttggaagcagccgatccagcctgcggagcctgtggggcagaagtgctttggggacgagtactacggggccgtggagga

SEQ ID NO: 317065 - DNA, 75 bp, Homo sapiens
tcattatttgccagatctgcagagatcaaaacaagccctccaggaactcacgtgatcgtgttgccatcgagcctg

SEQ ID NO: 317066 - DNA, 75 bp, Homo sapiens
aggcaattgaacgagtgattggtggccagacgggtgcagggaacaactgggcgaaagggcactacacggagggcg

SEQ ID NO: 317067 - DNA, 99 bp, Homo sapiens
tcaaagaacagaatgctaaggaagctgtggcaagagagtcgcggttgctgatcgtggtgcttgagtagagccgtggttggtgacagcatgacgagcgag

SEQ ID NO: 317068 - DNA, 82 bp, Homo sapiens
cgcagtggtcgcttcttctccttgtggactcccgaaaaattgaccaggaagggaaaatcccagatgaaactttggagaaatt

SEQ ID NO: 317069 - DNA, 80 bp, Homo sapiens
agcctcagtttgtgcaggacaccgacatggaacagggactcactggggaactcccccactggaaaggattctgaaagaaa

SEQ ID NO: 317070 - DNA, 75 bp, Homo sapiens
aggaaaacgagggcgtgtataatggaagctggggaggccggggagaggtactgttatggataccaaggtcgatga

SEQ ID NO: 317071 - DNA, 100 bp, Homo sapiens
ggtgtcaggccctgcgacatctccaggcagcttcgggtcagccatggttgtgtcagcaaaattcttggcagtcctcctgcatatgcccaagaggattggg

SEQ ID NO: 317072 - DNA, 98 bp, Homo sapiens
aacacatccacagatgcaacaaggctatttgctttctagaagagaaggccaagcagggtctcctgaaaagcctctctccgatctgggccgtctctcct

SEQ ID NO: 317073 - DNA, 100 bp, Homo sapiens
gtggcaagaagcatgctggattgtaatcagggtctaaaattcccaggactccacagctttgcaccagataagcctggaggaatactaatgatggatctaa

SEQ ID NO: 317074 - DNA, 82 bp, Homo sapiens
cgggcgggcccgacacacgccggaggagccggggggatatgagactttctactcggaatatcctgagtgttgcgtggatgta

SEQ ID NO: 317075 - DNA, 100 bp, Homo sapiens
actacaatacctcttgggactgggctcgatttgaggaatcaaggccagaggtgtgaacaaggtgtcagctctgaagggaaggtttttctaaggatggacc

SEQ ID NO: 317076 - DNA, 113 bp, Homo sapiens
gatgggcctgtgaccatagagctggaatcgccagctcccggcactgctacctctgacccaaagcaggagcttggtgttggtggcacgagtcagtggaaaatctgtggcctaga

SEQ ID NO: 317077 - DNA, 75 bp, Homo sapiens
ctttcgcgtgtcctggaggatgacccagaagctgcttatacaacaagagtattaatgctccctggaaatgctttc

SEQ ID NO: 317078 - DNA, 100 bp, Homo sapiens
gtgccagccgcggtgcgccttctccacgctgggccgggtgttgcgcctggcctacagcgaggctggccttggatggtatactgtaaattcagcatatgga

SEQ ID NO: 317079 - DNA, 100 bp, Homo sapiens
ccgagatgtctcgctccgtggccttagctgtgctcgcgctactctctctttctggcctggaggctatccagcacaggtgatttggcttctgcacagttag

SEQ ID NO: 317080 - DNA, 87 bp, Homo sapiens
catttcctggagaatatatccctactgtgacagtcattttgtttactcattcagccctgttgcaggtcccaataaactcttcataag

SEQ ID NO: 317081 - DNA, 80 bp, Homo sapiens
tttctggggtggctggccatgctccctgagagcccagctgtggcgatgtctgagcagcgcgagcttcggcctcggctctg

SEQ ID NO: 317082 - DNA, 96 bp, Homo sapiens
caggacagttttgtcacatcaggtgtttttagtgtcactgagctagtaagagtgtcacagatttcctgttttccagcacccaacataacttgtaag

SEQ ID NO: 317083 - DNA, 100 bp, Homo sapiens
aggacacggtgctggccgccggttgcaagcagatactggtgcctgtgaaatgtctagaagatgaacgattaagaacagaagatgaattatcaaaatataa

SEQ ID NO: 317084 - DNA, 75 bp, Homo sapiens
acacatgctaaaagatgacagacttggacaacatgtcccaacattacatcccaggagccgatatgtggatttact

SEQ ID NO: 317085 - DNA, 75 bp, Homo sapiens
tccgacgttacaatggtggagttggcaggtgtgcgcagaaagccaagatgacagattttgatcgttttaaagtta

SEQ ID NO: 317086 - DNA, 98 bp, Homo sapiens
ttttttcctccgcggtggggcgttgccatggagacgcgggcggcagagactaagaaagcactgtgcatcaccttgaccctggggaccttcctcgtggg

SEQ ID NO: 317087 - DNA, 50 bp, Homo sapiens
tggaacacttcagtgcattcaagatcccatgcgaggcccaagaaaactag

SEQ ID NO: 317088 - DNA, 90 bp, Homo sapiens
gattgaccagctcatcgaaggacaccagtggctggagagaaatcttgcttccagctcttctgatgagctcagttggatcattgagctgct

SEQ ID NO: 317089 - DNA, 100 bp, Homo sapiens
tacattatcgtcactacattggaataatgttacctagattcaagatgaatagcgatcaagttacactggttggtcaagtgtttgagtcatatgtttcgga

SEQ ID NO: 317090 - DNA, 100 bp, Homo sapiens
agaccaagttccctgcggagctggagaaccggatgccatggacaatattaccaggcagaaccaattctacgatacccaagtcatcaaacaagaaaacgag

SEQ ID NO: 317091 - DNA, 97 bp, Homo sapiens
attagcgacaggagaacttggaactcttactaatgtctataaagccagtatgatagcaatgatggcagctccatcaagtatgatggtgaaggatgaa

SEQ ID NO: 317092 - DNA, 100 bp, Homo sapiens
gacaaacagaagaagaagaaggagcgcacgtgggccgaggccgcgcgcctggaccgtagcatcctgagacattttgaattgacacttctcaagatttgac

SEQ ID NO: 317093 - DNA, 48 bp, Homo sapiens
aatccttaaaagagtcttaacgtgtaaacaggaacatcgataagtagt

SEQ ID NO: 317094 - DNA, 83 bp, Homo sapiens
tagctgaagaaggtgacgataatttggctaacacacgatagtaaggagcatttagcaatgatggaaaggattcttggacctct

SEQ ID NO: 317095 - DNA, 100 bp, Homo sapiens
agaagggagtttgctaaatttgaaaaggagaaaatgaatgccaaatgggacacggctttgaagacaagattcccaaaaggagattctctgagatgcaaaa

SEQ ID NO: 317096 - DNA, 78 bp, Homo sapiens
ttttagagctggcagcagcatctcagcccaagagaaggaaccagtgatgcccatggatcagtcatccatgcattctga

SEQ ID NO: 317097 - DNA, 124 bp, Homo sapiens
aaatgaaaaaacaggctgctgtccagtgtcttcgatctgcttctgatgaatgttaagtccaaaagtgctgggcattgccatcgctcggtatgacttctgtgcaagagatatgagagagttgtcc

SEQ ID NO: 317098 - DNA, 100 bp, Homo sapiens
gtccgagcatgcattgccattatctgtgaactaggactcagcccaaaaccatgtttgcccaagttgaatctgatgatgaggaagcaaagaatgagccaga

SEQ ID NO: 317099 - DNA, 50 bp, Homo sapiens
aggatcaaaatcttcgaaggagggaatacccgttcattcttgatgctttt

SEQ ID NO: 317100 - DNA, 50 bp, Homo sapiens
ggagttgtacttaaatgcagacacaaggccctggccaacgtcaacattgg

SEQ ID NO: 317101 - DNA, 100 bp, Homo sapiens
tgaagatgaggactccacagtattcgacatcaaatacaggaatcctatccatcttcttcaccgatatggtttgtggattctgaagacccaaatctgacat

SEQ ID NO: 317102 - DNA, 75 bp, Homo sapiens
cgaatctcttctccctccccttcttggttattctggtacaagttaacccaggagaagcatttacaataagaagag

SEQ ID NO: 317103 - DNA, 100 bp, Homo sapiens
agagcggcggctcctccgggggacccgcggtccccaccgtgcagcggggcatcatcaagatggtctgttgccacagttattgggagttgccccagagaag

SEQ ID NO: 317104 - DNA, 114 bp, Homo sapiens
gactctctgaggctcattttgcagttgttgaaattgtccccgcagttttcaatcatgatcatggaagggaagtggttgctgtgtatgttactggtgcttggaactgctattgtt

SEQ ID NO: 317105 - DNA, 100 bp, Homo sapiens
ccaaagatgaccaagtgtttgaagccgtgggaactacagatgaattaagttcagctattggattcttcaaacttcatgagagaaagtgtgaacctattat

SEQ ID NO: 317106 - DNA, 100 bp, Homo sapiens
cgagccagagcggggaggccggcgccggccagctgctcttcgccaacttcaaccaggacaacacttgctcagaggtggagctgccataccctgacctgca

SEQ ID NO: 317107 - DNA, 100 bp, Homo sapiens
tgaagggcgacggcccagtgcagggcatcatcaatttcgagcagaagcaaatcctgaaggaacccaaagtggctgcttctgttttgaatccctatgtgaa

SEQ ID NO: 317108 - DNA, 82 bp, Homo sapiens
gaagtgtctcttagcagcgcgcggagaagaacggggagccaggcacaacttcctgaatggaccatgactcccaccaaagatc

SEQ ID NO: 317109 - DNA, 100 bp, Homo sapiens
tgcaattctgtccaactttccagagaccacttctccacatgaatattctgttttgctgcccgaagcttggaaaatgtttataggaggccttagctgggac

SEQ ID NO: 317110 - DNA, 82 bp, Homo sapiens
taatggctgaggggcgagaactgatcctggacctggagaagaatgattggcaaacatgaattgactgggcataaagtagctg

SEQ ID NO: 317111 - DNA, 80 bp, Homo sapiens
cagagcgccgcgcacttcgtcatgttcttcgcgccctggaacatcatcttcagcgggctatttcagcacagcaggtgtat

SEQ ID NO: 317112 - DNA, 80 bp, Homo sapiens
gagctggacctctacctggcctacttcgtgcgtgagcgagagaggtggagaagagcgagtacttgagaaagaagaggaag

SEQ ID NO: 317113 - DNA, 97 bp, Homo sapiens
gggaaatgcaacaatccaaatggccatgggcacaattataaagaattccttgtgtggatatcagatccggatggaatctcgagcttgtgaatctacc

SEQ ID NO: 317114 - DNA, 100 bp, Homo sapiens
gattgacagtcacaattttgtaataagagggagacgtggtgggcggtccttcctgtgacacgacccttgagtgacagttctatttgattgcctccggtac

SEQ ID NO: 317115 - DNA, 100 bp, Homo sapiens
ctgctgccttcataaacccacccattgggacagtgacccctgctctgaagctcaccaaaaccatccaggacgcggattctgatagcggggacgattctga

SEQ ID NO: 317116 - DNA, 100 bp, Homo sapiens
attgaaaggcttcaaagctagcaggtgtctgacttccagcaactgctggcctgtgccagggtgcaagctgagcactggagtggagttttcctgtggagag

SEQ ID NO: 317117 - DNA, 80 bp, Homo sapiens
gtgaagtgctccgccgcccttgcctccagaaccacgaagctgccctgagacgctcactcacgctgtggggatgtcagaga

SEQ ID NO: 317118 - DNA, 75 bp, Homo sapiens
ctcaagccttccaacctgctgctcaacaccacctgtgatctcaaggcttcccagctggcgtgtatgttgtaaaga

SEQ ID NO: 317119 - DNA, 75 bp, Homo sapiens
gaacatctgttggatatgctattgtgattcccaccaacttctgcagtttaattcccgtaaaccaattacacctga

SEQ ID NO: 317120 - DNA, 100 bp, Homo sapiens
gggcagtatcaacggagtctccgggatattcccagacacccgatgccatttgctgcaaaaaacatgttttatgatgaacgctggaaggaaaagcaggaac

SEQ ID NO: 317121 - DNA, 125 bp, Homo sapiens
cccgacgaggaagttttctactgtaaagtcaccaacgagatcttccgccactacgaggctcaagatccagctgctgccactgcttcttccccctccacacctgaccctgcctcagcaccctccac

SEQ ID NO: 317122 - DNA, 98 bp, Homo sapiens
gaaagcgggctggcaggcgagggagcccgcgtcggctgagagcccacaggcccccacaggccgccgcccaccgcccgccgccatggggctgaaggccg

SEQ ID NO: 317123 - DNA, 75 bp, Homo sapiens
agtttgtgtaaaacaaaaatattatggtctttgtgcacatttacatcaagagtccagcctctgatgaagcaggag

SEQ ID NO: 317124 - DNA, 88 bp, Homo sapiens
caaatggcacttcattggccacctacagaaacaaaatgtcaacaaattgatggagtacccaaaggcaagtggaacagctctaatgggg

SEQ ID NO: 317125 - DNA, 75 bp, Homo sapiens
ttgcagctcatctctattgatgaaaaggagaacaacttcccgccactgcccaagttcatccctgtgaagccctgc

SEQ ID NO: 317126 - DNA, 78 bp, Homo sapiens
agaactagtgaatatgatactaatgaagatgggtttttcagatttctcataggcatcagaaagaaaaggatctctttc

SEQ ID NO: 317127 - DNA, 87 bp, Homo sapiens
tatggttgtttggctatgatgagaagctatggagatattttgcatagaatgaaggatctctgcagatacatgaacaactttgatagt

SEQ ID NO: 317128 - DNA, 100 bp, Homo sapiens
tttgggatatcaagagtataatgtctatggtgaagtcttttgtacagtggttaggcctcaagaaaggagaactagttatgaaccgtttcatccaggccca

SEQ ID NO: 317129 - DNA, 83 bp, Homo sapiens
tttggattttcagaatggggatacttgaatgcaaaatgatgcttcaacacccaggccaggtctctgcctcggaagtgagtgct

SEQ ID NO: 317130 - DNA, 100 bp, Homo sapiens
acgagctgtttctcatctttatactcttccagacctgcctgaccagtgcacgcccaacccctgcgataggaaggggacccaagcctgccaggacctcatg

SEQ ID NO: 317131 - DNA, 80 bp, Homo sapiens
cttagctgtgctcgcgctactctctctttctggcctggaggctatccagcgctcacagaacatttcctgcctgttgctca

SEQ ID NO: 317132 - DNA, 50 bp, Homo sapiens
tggccctctaccaaaccgtggctacaagcaggggggtgtcgcctctggga

SEQ ID NO: 317133 - DNA, 87 bp, Homo sapiens
ggagtctgatattgaagaggaagaactgaccagagctgatcccgagcagcgtcatgtacccctgcctatgaaaggaggttccctaca

SEQ ID NO: 317134 - DNA, 82 bp, Homo sapiens
aaccctggtcaccgtctcctcaggttgacatcatggacatatgtgagtccatcctggagaggaagcggcatgacagcgaaag

SEQ ID NO: 317135 - DNA, 96 bp, Homo sapiens
agccgagacggagccggacccgccgcctcccgggtgctggagaatctggtaaaagcaccattgtgaagcagatgaggatcctgcatgttaatgggt

SEQ ID NO: 317136 - DNA, 103 bp, Homo sapiens
ctggcccggaggctccagaaacgggtcctgctgctcaccaaggtggtctttgggaagaagcttcctgcctttgccaccatccccatccaccagctgcagcatg

SEQ ID NO: 317137 - DNA, 100 bp, Homo sapiens
gaaggatgttaattcatcttcacccgtgatgttggcctttaaatgtatgactggtatcaaacagaatctcaagtagtcattacacttatgatcaagaatg

SEQ ID NO: 317138 - DNA, 100 bp, Homo sapiens
cggcgtctgcccagggcagggctcctaaggaaggacccgcctttaggtctgggaagaaaggcgtaaggatggtgaagctgaacagtaaccccagcgagaa

SEQ ID NO: 317139 - DNA, 82 bp, Homo sapiens
agcccccagcggcccaggcccaacaatgcagatcttcgtgaagactctgactggtaagaccatcaccctcgaggttgagccc

SEQ ID NO: 317140 - DNA, 82 bp, Homo sapiens
acacggtctgggccgccgaatctccggccgaagagcggcggcggcagcggcggtcgcgtggggcaggcagtggcgctgcggg

SEQ ID NO: 317141 - DNA, 80 bp, Homo sapiens
actctccaggctccggacacgatgcaggccatcaagtgtgtggtggtgggagatggcaggagagcctgtcctgcctccag

SEQ ID NO: 317142 - DNA, 100 bp, Homo sapiens
tctgccaatgaccgtggaggagtaccgcatcgcccagctgtacatgatacagcaatggctgccatccggaagaaactggtgattgttggtgatggagcct

SEQ ID NO: 317143 - DNA, 100 bp, Homo sapiens
agttgttcattgtttgtcaccacaaaaaggacaggacctgctgtcctttgagctgttggatataaacattgttcaagagttggagagagtgccccacaac

SEQ ID NO: 317144 - DNA, 87 bp, Homo sapiens
gggaacctagctgatgataggggggttccatctcccaacttgtccatgcagtataactccaactgtggaactgaatgggcttgctat

SEQ ID NO: 317145 - DNA, 74 bp, Homo sapiens
tggctgcctgcagcgactacttcagggaaagcaggcaggatgggagagtcgccgatagaaccacctcttccctg

SEQ ID NO: 317146 - DNA, 50 bp, Homo sapiens
agctcagtgacctcctggacttcagcatgaaaaggtgtaccatacctgag

SEQ ID NO: 317147 - DNA, 83 bp, Homo sapiens
ggcgcagggcggctggcacaaacggcggcgccggggccggaggaaaaagctcggcaacatgagtgagaatgaggaagaggaaa

SEQ ID NO: 317148 - DNA, 100 bp, Homo sapiens
ttgacgatctggacgccgatgccgatgatggctgggcagatactccaagtatcacagctaaattaattagtgaacaaaaagatgacaaagaaaagaaaaa

SEQ ID NO: 317149 - DNA, 96 bp, Homo sapiens
ctacagtggcactcctgggtctggtgcaccactcctcaggagcatctcagttactatgcgagtcagaagaaaacatttgaaattaatcccagacac

SEQ ID NO: 317150 - DNA, 96 bp, Homo sapiens
ttcctacctgttcagcacttctttcagcgatatgaagttaaatccaggtagatgacattaatgctgataagaatatctcttctgcacagattgttg

SEQ ID NO: 317151 - DNA, 100 bp, Homo sapiens
cactaattgtggcattcacattccaccaggtgagaagagtgatgaccatccttttccttactatggttatttcatactttggttgcatgaaggctgcccc

SEQ ID NO: 317152 - DNA, 100 bp, Homo sapiens
cctggaagatcatgcatccaacgtcaagtacaccatgcacaaggtcttccagtttctgaacctaggtcaaaatgcagatcttcgtgaaaacccttaccgg

SEQ ID NO: 317153 - DNA, 75 bp, Homo sapiens
agaggcggaggctcaggcagcttgagataacggcaaaagcttctatcatttttgttactcttcagtacaatgtca

SEQ ID NO: 317154 - DNA, 98 bp, Homo sapiens
aatctgccaggcggagggggctttgctggtctttcttggactattccagagagggctgacagatgaagagattgatatggccttccagcagtcgggca

SEQ ID NO: 317155 - DNA, 83 bp, Homo sapiens
tgaagcgggcgacgctatgggtcccacaggtggagccatcgaagcccccacccacaggctgacagaggcaccgttcaccagag

SEQ ID NO: 317156 - DNA, 75 bp, Homo sapiens
gaaagaccgattttctgcagaagatgaagctttgagtaacattgccagagagggtcctgatgaagaagctgttgt

SEQ ID NO: 317157 - DNA, 98 bp, Homo sapiens
cttctcttccatgcccactgcctacaacacagggagtcacgaagcccccatcccaaccttcagcaccttccagatcacagacatgacccgcaggagct

SEQ ID NO: 317158 - DNA, 82 bp, Homo sapiens
ggcgcggattcgccgaggcaccgaggcactcagaggaggttgcgaggggcggtgttgaagaatgtgtgggcgaacatcctgt

SEQ ID NO: 317159 - DNA, 100 bp, Homo sapiens
tgtgtgcataaagccacagacaccgagtatgccgtgaaggctcgggttatgtatgattttgctgctgaacctggaaataatgaactgacggttaatgaag

SEQ ID NO: 317160 - DNA, 83 bp, Homo sapiens
gcatctttttgaaccaaattatgctgcaaatgcctgtttaaagaagaaaacccgtatgctagatttgaaaacaactaaagcgc

SEQ ID NO: 317161 - DNA, 98 bp, Homo sapiens
ttgaatccattaaggggattgcggtcatggacaaggaaggcaatgtcctgggtcattccagaattgctgggacaaagcctgccgagtgcctgcgattg

SEQ ID NO: 317162 - DNA, 76 bp, Homo sapiens
tcggaatgcactacaacaggaaaatcatattatagatggagtaaagggttggggtctgctaggtccccggaatgag

SEQ ID NO: 317163 - DNA, 144 bp, Homo sapiens
aggagattggctttgagacgaccagaaatattggttcagcccctgaaagtttccaacaggaaatcatgtacagaaattcctactggggctgaagaacaatttgccatccacaaacgtcttagacaagacatggccagccgcccc

SEQ ID NO: 317164 - DNA, 98 bp, Homo sapiens
tgaccctgtcggattcggatgagcccattgcaaggagaagacgcagccgtcagcttatgttcctgaggaagaattgaaggcagcagaaatagatgaag

SEQ ID NO: 317165 - DNA, 111 bp, Homo sapiens
gaagctatgtttagcatcttctgtcatgagaagtggcgatcaaaattgagacagaagagatgggtgatgaagaagttttctcctggttgaagtgtgcaaagggacagtccc

SEQ ID NO: 317166 - DNA, 82 bp, Homo sapiens
caacgccgacggtatcagcgccctgcaccagacgcaaacatgcagatctttgtgaagaccctcactggcaaaaccatcaccc

SEQ ID NO: 317167 - DNA, 98 bp, Homo sapiens
cccaccctggagtaaccctcactggagaatccagaggtgctcctgacctctgataaagctgcagccaatttctcagatcgttctttgctgaagaactt

SEQ ID NO: 317168 - DNA, 98 bp, Homo sapiens
gctaaaccctgacccatctcagaagcagaatctcctagccccacagatacagtgccctctcccagggacctgcagtttgtggaagtgacagacgtgaa

SEQ ID NO: 317169 - DNA, 76 bp, Homo sapiens
gccacgtgcagaccggaagagacacgcggggcttcaggctactgaaagcattaaaatgctggtgacattgtgtcaa

SEQ ID NO: 317170 - DNA, 51 bp, Homo sapiens
ggctcaaagaaagatgattatatggggcttttgctgctaagtgtggtggtg

SEQ ID NO: 317171 - DNA, 75 bp, Homo sapiens
agcgcgggatcccagcctcaggcgtgcgcggacggtgtgcggaaatgcatcttctgcagacaccgggttaagagg

SEQ ID NO: 317172 - DNA, 75 bp, Homo sapiens
ggtgaatcccctgtttgagaaaaggcctaagaattttggcattgtccagggagctcccagggaagtggtcgaccc

SEQ ID NO: 317173 - DNA, 98 bp, Homo sapiens
gcagctgctgccgccgccgccagggcccggactcggacgcgtggtaggtacggtggcgccccccaggccctcaccctgaagctcccagtgaccatcaa

SEQ ID NO: 317174 - DNA, 116 bp, Homo sapiens
catcaaccgccagatcaacctggagctctacgcctcctacgtttacctgtccatgctccctggaattcccatgccaccaccacctttgggactcccccctctgcagcctcctccgc

SEQ ID NO: 317175 - DNA, 100 bp, Homo sapiens
gtcagccaaagctactcctactcatctattttgaataaatcagaaactgggtacaggcatccttcacctgctattgttgcaagaacagtcagaattttac

SEQ ID NO: 317176 - DNA, 100 bp, Homo sapiens
gccttcttcagagcggggcatggcatcgaacagcatcttcgactccttcccgacctactcgccgaccttcatccgcgatgaaggatttgggggcagagca

SEQ ID NO: 317177 - DNA, 100 bp, Homo sapiens
agcgagaagttgcccaaagaacaagtgagggggccatgttgccgaacaagcaaccggaaaagcttaataggcaatgggcagtcaccagcattgcctcgac

SEQ ID NO: 317178 - DNA, 90 bp, Homo sapiens
cgcgggcgccgggagcgagctgggagggagccgcgcgcctttgtgcgcgcgccgagagttggtgttgaccccgatcaagacccaccaccc

SEQ ID NO: 317179 - DNA, 83 bp, Homo sapiens
gtccttctccactttcgccagcccgtgccgcgagcgcggcctgcaggagatataacacgtgggaaccggaggagaacatcctg

SEQ ID NO: 317180 - DNA, 100 bp, Homo sapiens
tgcagatagagacatatggaccacatgttcctgagcttgagatgctaggaagacttggagtccatgtcagacgcacagacaaagtgggaacagaagctgc

SEQ ID NO: 317181 - DNA, 100 bp, Homo sapiens
gtggtatcagccttgaccttcgtgtgcctcatccttctcattgctgtgctcgtttactggaggttttaaaatcaaagatgggaaaatcggagaaaattgc

SEQ ID NO: 317182 - DNA, 89 bp, Homo sapiens
cgcggtgcaccgcctgctgggagcgccgctcaaggccaggtcagagcagcccaccatgggatggggagggggtggaggctgcaccccgc

SEQ ID NO: 317183 - DNA, 75 bp, Homo sapiens
atgtgcggcggatgaacaagcggcagtacgagctcaactggaggcagtcctgtgcggaaatctgaagaaaaaaca

SEQ ID NO: 317184 - DNA, 88 bp, Homo sapiens
acccgcagagcgttcctcatggagctggcccgcaggaaagggttcagggttgaaaatgagctcaggctccgtgtgtttgacagtggcg

SEQ ID NO: 317185 - DNA, 100 bp, Homo sapiens
ctggtggggggagtcctcatcatcatcgcctcctgcgtcatcaacttaggcggttatgcctccgcctcgttgccctgaaagccgcagcgacagcgaaaag

SEQ ID NO: 317186 - DNA, 100 bp, Homo sapiens
agagtttgaaagtgcgattgtggaagctgctcgggcctactgaacttgacgcactggtatttggccatctatacaccattcttaccacacaattgacaaa

SEQ ID NO: 317187 - DNA, 71 bp, Homo sapiens
agaaaaccaaggctgaaggggatcgtctaaaagaggttttctggatatgccgcagaaggatccgtgccaga

SEQ ID NO: 317188 - DNA, 82 bp, Homo sapiens
tggagagcgacccgtggccttgtgtttcagtgcagagcagagcgggcggaggaccccgggcgcgggcgcggacggcacgcgg

SEQ ID NO: 317189 - DNA, 100 bp, Homo sapiens
tagtgaatatgatactaatgaagatgggtttttcaggaactaagcgtcttgtagaaggaactattaatccaggagaaacctgtttaatcattgaagatgt

SEQ ID NO: 317190 - DNA, 83 bp, Homo sapiens
cttggactgagtcctgcaggacacaggagcttactccacgggaacagcctctagataatctgagttgttgaaaatacgaagcc

SEQ ID NO: 317191 - DNA, 90 bp, Homo sapiens
atgaaatacatgaaggagacctagtggaagtggttctttcagggagcgcatggagcttttggaagaagccaagaagatggagatggccaa

SEQ ID NO: 317192 - DNA, 75 bp, Homo sapiens
ttatgctgccagccgcctgctggctgctgcctgcatttatttcgtcatggctattgtaaaggaaaccctaggaaa

SEQ ID NO: 317193 - DNA, 75 bp, Homo sapiens
aaacagaccagaagattaccaaggcattttaaattatacctgacatcaagtactgaacgtttttcacaaaatttc

SEQ ID NO: 317194 - DNA, 101 bp, Homo sapiens
ctcagccggcccagcctcatctgccccaggcccaactcatgttgacgggcagccagctagctgggctggtggttaagcgtctgggatatgacacccgggtt

SEQ ID NO: 317195 - DNA, 90 bp, Homo sapiens
cagctgccatgagcgagcgcctccgtcccagttggttgaatctggcgatgtggaacccatggatatggagggctgactatatacaccatg

SEQ ID NO: 317196 - DNA, 51 bp, Homo sapiens
aggaaagcagacccatggctcagatgtgcacccccgccaatacccctgcta

SEQ ID NO: 317197 - DNA, 98 bp, Homo sapiens
agctctagccctggcaaacctaaccacttgcaaccctgctaatgcaaaggaatgggtactgttcaaaaaggaatgccccacaagtgttaccatggcaa

SEQ ID NO: 317198 - DNA, 115 bp, Homo sapiens
attttcagtattgtgagcaagcaaaatcagtaattgtggtatgtcgagagtaccaacgtggcaattgcaaccgaggagaaaatgattgtcggtttgctcatcctgctgacagcac

SEQ ID NO: 317199 - DNA, 100 bp, Homo sapiens
aggcggccgtcatggcggtgtcggagagccagctcaagaaaatggtgtccaagttgacttgctggtgaaggtgggggaggttgtggacaagctctttgat

SEQ ID NO: 317200 - DNA, 50 bp, Homo sapiens
caatatgtgactggaaccattggcgagataatgttaattcaagactctcg

SEQ ID NO: 317201 - DNA, 83 bp, Homo sapiens
cggggcgccggcgccgccgcccccgggctcgcggcctgcagggatcgcttacacctgagacgaactacagaacagcacgtacc

SEQ ID NO: 317202 - DNA, 75 bp, Homo sapiens
gaagccattgccattccctgtcctggcccccttcagcaaccctgttgatattcactgatggactccaaagaatca

SEQ ID NO: 317203 - DNA, 75 bp, Homo sapiens
cacttaccccttctcaccgaggaagagcgggagaaagggaaatttacatgccacttatgtgatagaagtttcaca

SEQ ID NO: 317204 - DNA, 83 bp, Homo sapiens
cgcggattcgccgaggcaccgaggcactcagaggaggactgaatgtgggcccagttggcgtcattctgctttgacctaaacat

SEQ ID NO: 317205 - DNA, 74 bp, Homo sapiens
gtcttctggcccctcctgaaagctgtcacccacaaaggtctgcggggtttccgagaggctcgccgggatttctg

SEQ ID NO: 317206 - DNA, 100 bp, Homo sapiens
ttcaaaaggaaaacccttcaggcaaccttgctacaaaaattgtgaagatggttctggtaaaacaaccctcatgactaaactacaaggagctgagcatggc

SEQ ID NO: 317207 - DNA, 82 bp, Homo sapiens
cgagcgctggggccccctgctcctgtgcctgctgcaggccgctccagactatggaaatgatgttagacaaaaagcaaattca

SEQ ID NO: 317208 - DNA, 75 bp, Homo sapiens
aacatcaaagaggtctagcaaaggtgcatccactgtggtgtcgtccacctgaccttggccttgctgaaaagccac

SEQ ID NO: 317209 - DNA, 112 bp, Homo sapiens
ccctctgcgaccccagtcgcctggcgcaccggcttttggtgctgttactgatgtgcttccttggctttgacagagtgggaagctttggagctgacggatcaccagtgggcac

SEQ ID NO: 317210 - DNA, 75 bp, Homo sapiens
ccgggatggagaaggaggaggaatcgagttgcatgctgagaatttgaaaaatgaagatgatgtagacactggact

SEQ ID NO: 317211 - DNA, 156 bp, Homo sapiens
cccagaacaggagtcggacgaacggaagtgtaactacgagcgctacagaggcctggtgcagaacgactttgccggcaacgtgctatgggaagagggcaaggcagccttggagcagctgcttaagttcatggtgcaccctgccatctcctccatcaa

SEQ ID NO: 317212 - DNA, 82 bp, Homo sapiens
tctaccctccaggggatgaggaagaagtttgcctgcaatggtactgtaattgagcatccggaatatggagaagtaattcagc

SEQ ID NO: 317213 - DNA, 100 bp, Homo sapiens
aatgcccagcggcccgccaggtcccggctcaggctgcacgaagaaaaggttattaaagatagacgtcatcatctcaagacctacccaaactgttttgtcg

SEQ ID NO: 317214 - DNA, 93 bp, Homo sapiens
acctcttcgggctggggctggaggaggccggacccaaggagagcagtgaggaagaggatggagatgaagatgaggaagctgagtcagctacgg

SEQ ID NO: 317215 - DNA, 83 bp, Homo sapiens
tctggacgggccaaaggagctttcgaggagagaacgcagaatggggaaatggagagagaacctgaaagagccccaaactcgag

SEQ ID NO: 317216 - DNA, 82 bp, Homo sapiens
accgacagtgccctgagggccttcgagagctaccgcgccagacaggtgacaaaccgatacctgtcccagctgaaggatgccc

SEQ ID NO: 317217 - DNA, 75 bp, Homo sapiens
ggagcagcaggcctccgggcccggcgccgccgcccgcagttacattacttcgttcagaaccatttcacaagtgca

SEQ ID NO: 317218 - DNA, 100 bp, Homo sapiens
tcaggcagttggttgggacccgctccaaccctcgcactggatttcctggaacaaattttgacatttagccccatggatcggttaacagcagaagaagcac

SEQ ID NO: 317219 - DNA, 75 bp, Homo sapiens
caagctggagcccaactgataatccttgaacatgcagtcagtggaagagcatctgcaatgtcaaacactcctacc

SEQ ID NO: 317220 - DNA, 100 bp, Homo sapiens
catccggagagcggcgaagaagcggtgacccttgtggaggatatgcagagagagcttgggagactgagacaacaggcatttgcaagtaaaatcactggca

SEQ ID NO: 317221 - DNA, 101 bp, Homo sapiens
cagtcctgtatcaaaactgaagatggtttgaaacagcttcacaaggtcccttcaccgatgttgtcaccaccaacctaaagcttggcaacccgacagaccga

SEQ ID NO: 317222 - DNA, 100 bp, Homo sapiens
caccaaccactttggctccacctattcacataaggccaggctcaccgtgaatggtactgcttctccgagatggccccagtgtgtgcggtggttggaggga

SEQ ID NO: 317223 - DNA, 75 bp, Homo sapiens
ctgggcacaatccatctggtggcagatggaatcttgctctcttgctcagactggagtgcagtggcatgaccttgg

SEQ ID NO: 317224 - DNA, 75 bp, Homo sapiens
gctcatacagaattacgcatttccacttctaatgataaagtgaaatctttccgtgcagctctacaagaggaggaa

SEQ ID NO: 317225 - DNA, 50 bp, Homo sapiens
tgctgaaggatgtgtctcacaaaggaactgtggaaggtgcatcagtgaag

SEQ ID NO: 317226 - DNA, 50 bp, Homo sapiens
aagtgatttccagaggatttacactagaaagatgctggtttcgagttttg

SEQ ID NO: 317227 - DNA, 100 bp, Homo sapiens
gaaaaataccacgacaaaaccaccctactagctgtgttccgccatgtcagaatggagggatgtgtctccggccacaactctgtgtgtgtaaaccagggac

SEQ ID NO: 317228 - DNA, 101 bp, Homo sapiens
gcccaccatggctgtggcccagcagctgcgggccgagaggtacggctcctacctggtctggaaagagctgggaggcttcacagagaaggctgtggttcccc

SEQ ID NO: 317229 - DNA, 100 bp, Homo sapiens
agtgctgaccaattgccactggacatacttgaaacaaaataggaaaatggcagcaaactcttcaggacaagtgaacacttgtcctgctccttcacctttt

SEQ ID NO: 317230 - DNA, 80 bp, Homo sapiens
caggcgatgccctccacaggtatggcagtttggtgccctggttgtcagatgttggaaagcagtaggacggaacatactct

SEQ ID NO: 317231 - DNA, 82 bp, Homo sapiens
gtaaaccacatcaccagtttaaagaatctgattggaattacatgaatgacagtcttcgaaccaatgtgtttgttcgatttca

SEQ ID NO: 317232 - DNA, 90 bp, Homo sapiens
cgggtggcggctcgggacggaggacgcgctagtgttcgagaacttgtcttggacaattgcaaatcaaatgatggaaaaattgagggctta

SEQ ID NO: 317233 - DNA, 101 bp, Homo sapiens
ttcctgatctctctcgctgtgagacatgtctgagactcctgctcagtgtagcattaagctttaccaacagggacgcttatgtcaactgggcagtgaatttt

SEQ ID NO: 317234 - DNA, 75 bp, Homo sapiens
gtataacctagaccagtcctgtttgcctcatgatatcagggtggactccattatgctggtggaagagggcttcag

SEQ ID NO: 317235 - DNA, 74 bp, Homo sapiens
ctacggtcacgtctacaaggcgaggcggaaagatgggctcttgatggaaatgtgtatgatcatctcaaggatta

SEQ ID NO: 317236 - DNA, 75 bp, Homo sapiens
gagacacagtatggtagccacacccccagatggagtgaaggtacctgagcgcaggaaccatggtcttcattgctg

SEQ ID NO: 317237 - DNA, 100 bp, Homo sapiens
ggaggaaccggctccttgcgtcccgcctccctgggagctccgcacgggggtccagattttatggaaatgagctcaagaaagaaaagcaagtcaaccaacg

SEQ ID NO: 317238 - DNA, 101 bp, Homo sapiens
atctccgtgagaaaggtgcccccgaagtgaaagagatggcctggtggaaagcctgggtgaaaaggagaacagcttgaagacagatgattatggccgagacc

SEQ ID NO: 317239 - DNA, 83 bp, Homo sapiens
cctcgtcagcactgactttcagctatggaatcgatccagacatttaatgtggatgcaccatgccagaccgtggaagatttaac

SEQ ID NO: 317240 - DNA, 100 bp, Homo sapiens
actgtttgtgttgcgggggccggacttcaaggtttcagaaggatcccacttggtcagagactggagaccgttatctgttgaaactctttagggatcatct

SEQ ID NO: 317241 - DNA, 78 bp, Homo sapiens
ttttcaacagttttcttcatactgcattaaaggttttagaaatactacataggaagcatcaagtgtacctgatttgtg

SEQ ID NO: 317242 - DNA, 104 bp, Homo sapiens
gaacgacatgatgcaatcttcaggaaagtaagagggcagcctggcatcctcgctacaacctcattgttgtgggccgatacccagatcctaatttcaaaagttgt

SEQ ID NO: 317243 - DNA, 88 bp, Homo sapiens
tctgcataagattttcaattccctctggaacttggaccaaactaaaattttaaaaggactggaggagcttgagtttcctcagacttca

SEQ ID NO: 317244 - DNA, 119 bp, Homo sapiens
accagtatcaccaggaaaaactgtaaatgatgtcaacagcaataataacatgtcttacaggtctgaatttcctgctgctgttcacaaagatgctttttatctttaactttttgttttcc

SEQ ID NO: 317245 - DNA, 75 bp, Homo sapiens
agcctcctgagtagctgagactacagggtatgttagagcccaccaaggaaccactgaaaccactttctgctgcag

SEQ ID NO: 317246 - DNA, 75 bp, Homo sapiens
acctctttggacccgaaattgtaagttgtcggacaagtaaccgcaagagcttgattgtgacctctagcacatcac

SEQ ID NO: 317247 - DNA, 75 bp, Homo sapiens
gctttgcgcggcggccccagaccctgctccgggtcgcgtcctggattttgcaagaacgaggctcaaggatgtgag

SEQ ID NO: 317248 - DNA, 100 bp, Homo sapiens
cgccgccatattgtctgtgtgagcagaggggagagcggccgccgccgctgccgcttccaccacagaagatggcagtgaacgtatactcaacgtcagtgac

SEQ ID NO: 317249 - DNA, 100 bp, Homo sapiens
atccttctgctgctgaaccaatgccaacaggtaactgtgacatttgatgatgtggccttatatttttcggaacaagagtgggagatcctggagaagtggc

SEQ ID NO: 317250 - DNA, 90 bp, Homo sapiens
cccatggcggcggccgcgctaaggttccccgttcagggaaatgtttcaacgtgcgcaagcgttgcggcggcgggcagaggactactacag

SEQ ID NO: 317251 - DNA, 80 bp, Homo sapiens
aagccaagaggaggacagttcgctacacagcaatgcatcgaggccacgtgctgtacgccgacatcaagatggagaatggg

SEQ ID NO: 317252 - DNA, 75 bp, Homo sapiens
cagcgccgagggcccctcccccaggcctctgggctctgagtatgtgggtgccccggtggcttatgtccagcagat

SEQ ID NO: 317253 - DNA, 100 bp, Homo sapiens
ccgccaaccgcaaccattgacgccatgtcgggttattcgagtgaccgagaccgcggccgggaccgagggttcttgctggtgtgaaatgactgagtacaaa

SEQ ID NO: 317254 - DNA, 102 bp, Homo sapiens
tcctgtatgaagcggttggcaccactgaagtgaccgaatgagggtgagaatccttttgaaattcaagaccattctcaggatcagcaaatagaaggagatgag

SEQ ID NO: 317255 - DNA, 100 bp, Homo sapiens
caaaccaatgagggagaagtatcggaagaaagcagttccaaggtttatgctaaaactatcgatgggcaacagactattattgcatgtattgaaagccacc

SEQ ID NO: 317256 - DNA, 101 bp, Homo sapiens
ccaaactcaaggaacaatacaaaaaggagagaaaggggaaaaagggggtgaagagttttcctttggaatatggataaatacaccatgatacggaaactaga

SEQ ID NO: 317257 - DNA, 90 bp, Homo sapiens
atggtggtgatggaagcaggtggaattatgccctgttggttccaatgctgggattggctgcttttcgaacgtctggtcctaaccagtgag

SEQ ID NO: 317258 - DNA, 106 bp, Homo sapiens
aaaagatgtcacaaaggaaaacgaggaaagtcccaggatgactactgtgtcaaaccccacatataggaaccatcggatccctgtgtacagatgaagaactgagtct

SEQ ID NO: 317259 - DNA, 89 bp, Homo sapiens
cgcgggcggcggcgccggcaggaaggaacaagcacatcatgattgacttggggactggcaacaacaacaagattaactgggccatggag

SEQ ID NO: 317260 - DNA, 74 bp, Homo sapiens
cgggggctgcacttgacaaccagcatgccgagatggaggaggaagccaagaatctggtgagcgaagccatcgca

SEQ ID NO: 317261 - DNA, 50 bp, Homo sapiens
ccaacacagatgtccaagctgccaagtaaaatatacccaggaccataaac

SEQ ID NO: 317262 - DNA, 80 bp, Homo sapiens
ccactgtcctcatcctagtgggggttggcttgcccatttcctctattgtgaatcggcacggtcctgaggcagacaggcat

SEQ ID NO: 317263 - DNA, 108 bp, Homo sapiens
gggtgcctcaaccacactccgtccacggactctccgttattttaggaggtcagcccaaggccaaccccactgtcactctgttcccgccctcctctgaggagctccaag

SEQ ID NO: 317264 - DNA, 75 bp, Homo sapiens
gccgtcagttcctcttcaggtcccaggacgttggtgctgctgttcctgctgccccgtgggctgtgccaagtgtgc

SEQ ID NO: 317265 - DNA, 75 bp, Homo sapiens
ggtgaatttccatgtcaacatagtcctggtctccaattgagaaacatggcactgtttttcctgcactctacccac

SEQ ID NO: 317266 - DNA, 75 bp, Homo sapiens
tctcatccggaggcaggaccagctgcagctgcttggctgtcgctgggcgcggactccaacgggagcggcgtctct

SEQ ID NO: 317267 - DNA, 98 bp, Homo sapiens
ctgggacagtgaggaagtccggcagacttgtggctacacttctggccagtttgacctggatgtgatgaatatgtcacccagttggatgagatgcagag

SEQ ID NO: 317268 - DNA, 83 bp, Homo sapiens
cccggccgcagcgcaggcagcccagcagagctccacgcaggagatcggtgaggagctgatcaacggagtcatctactccatct

SEQ ID NO: 317269 - DNA, 80 bp, Homo sapiens
cgacctcatcagtgagctgtccctgctggaggagcgcttccgggtcagcccaaggctgccccctcggtcactctgttccc

SEQ ID NO: 317270 - DNA, 75 bp, Homo sapiens
aagtcctacaacagtttggcgtgcaacatggggcttgagaaaggtcttcccaagggattgttgaagaaacttctg

SEQ ID NO: 317271 - DNA, 137 bp, Homo sapiens
gggaacaagcaaggagtcatatatccttcatatgatccatcttagtgaagaattaggatacagaacccctgaacagtgcccaagtgttgtctctttgttgtcagagagttacaaccctcatgtgcgctacggagctg

SEQ ID NO: 317272 - DNA, 75 bp, Homo sapiens
gaacttttggaactagtgccggcggctctccaccccccaggtactaggttttgacaagcttgcatcatgcgtgag

SEQ ID NO: 317273 - DNA, 100 bp, Homo sapiens
gtcgtccgcggctccggtcacgtcaccgttctataggatcgggtgaaccaccaaccggcaattgaaagctgcacagcctgaaattacctttattcaatta

SEQ ID NO: 317274 - DNA, 75 bp, Homo sapiens
ggaagccggagacagcagggtgacagtcagcagataagcagagagccctagaagaaaccaaagcctacaccaccc

SEQ ID NO: 317275 - DNA, 51 bp, Homo sapiens
ggcacagatctggctccatgcagatggaatcgccacttatatatgtttcag

SEQ ID NO: 317276 - DNA, 90 bp, Homo sapiens
ggcaagagccaaggtgctgcaaatacgacttcaggtacaggtttgcagattccgccagcagcacagcaagctctacagatgagtggctct

SEQ ID NO: 317277 - DNA, 82 bp, Homo sapiens
ctcctggccctggccctgatcatcctgctgggcttcgtccagatcgggaagggtgaaatgacaatggatgctctgttggctc

SEQ ID NO: 317278 - DNA, 82 bp, Homo sapiens
gaagcattacttcgagacactattaatgggcttaataagcaggtatagtcgtctccccctccaccacggcaagtcctgcaga

SEQ ID NO: 317279 - DNA, 100 bp, Homo sapiens
tagaaactatccagcaactcctaactgcagtagtaaagaagattccattaatcactgcaaaaagtgtattccagagcaaatgaaaaagagccttgctgtt

SEQ ID NO: 317280 - DNA, 100 bp, Homo sapiens
tttcctgaacacaccattatgcatcttggtgccattccccctgagagtggggattttcaggagatggtatgccaggcctgcatgaaacgttgttcttttt

SEQ ID NO: 317281 - DNA, 75 bp, Homo sapiens
ttcggtgggtgtgccctgcacctgcctcttcccccattctcagtttcagaaaagggatccctaacatcagaagag

SEQ ID NO: 317282 - DNA, 100 bp, Homo sapiens
cgacctactgcaatgtgtgccgtgaggctctgtctggggtcacgtcgcacgggctgtcctgcgagggtgaatgaaaactttgccattgatttgatagcag

SEQ ID NO: 317283 - DNA, 75 bp, Homo sapiens
attcagtcagaagaaggctgctattgaaagagagtatgcacagggaggacaagctctttggggctaccaaacaga

SEQ ID NO: 317284 - DNA, 82 bp, Homo sapiens
ccgcccgtgccctcccgctcggccccgccagcagcactgtggaggccgtcctcgggggcgacgcttcagagactgacaacct

SEQ ID NO: 317285 - DNA, 50 bp, Homo sapiens
taaaaggtgtcaagaagctcagaatggtttaagggaaaccacaggctccg

SEQ ID NO: 317286 - DNA, 97 bp, Homo sapiens
ggagataccatgtcctgtttctcggaacaggtggataatattaatgcagctgtgatggatttgaaaaaaaagaagatccgcagtctaagtgaagagg

SEQ ID NO: 317287 - DNA, 82 bp, Homo sapiens
agaagatcggctgcggcaacttcggggagctccgcctagggtttgccttcccggattgggcctacaagccagagtcgtcccc

SEQ ID NO: 317288 - DNA, 97 bp, Homo sapiens
ccctgtgaatgggaagttacgcgaagtccacccagcgtttctgagctcctggatctcccaggtatcattgaaggtgccaaggatgggaaaggtagag

SEQ ID NO: 317289 - DNA, 100 bp, Homo sapiens
gagacagatcctctgctcattgccatgaaggaactcaaggaactctaatgatccaggacaaagaagttaccctggagtatgtatcaagcctggatttttg

SEQ ID NO: 317290 - DNA, 74 bp, Homo sapiens
tatgctgtagacatttctttgtggtttatctaaaaaccaaaggcagctgaaaaagttggatgaagatagtttaa

SEQ ID NO: 317291 - DNA, 76 bp, Homo sapiens
agccacagtcttcaagagcccacggacaccacctcaacggtatctagaagagcagaagacagagaatggaaaagat

SEQ ID NO: 317292 - DNA, 83 bp, Homo sapiens
agcatgctcagaccttcattgctctgtgtgccaccgtacttagtcatggattactatgtgggtggtgatttactgaccctgct

SEQ ID NO: 317293 - DNA, 98 bp, Homo sapiens
tttggggtcatcgtcgcaattcttcagattaacgtcttcaaggacccagttgctgatcccaacaaaaggtccaaaaagggccgattatctttacatag

SEQ ID NO: 317294 - DNA, 90 bp, Homo sapiens
aagtgtctgaacaaaaaccccaggctacatattataacgttgacatgctcaaatatcaggtggatattccatctattataaccaagaaac

SEQ ID NO: 317295 - DNA, 100 bp, Homo sapiens
ggctgactctgcttgtgttcgtggccacgctgctgatcgtcctgctgctgatggtgtgcggtgttcctgatccaagcagaaccctgttatttgaagagcc

SEQ ID NO: 317296 - DNA, 50 bp, Homo sapiens
atcagttgttggagaaaattaaaggtggcagggcccagccccgaaccaga

SEQ ID NO: 317297 - DNA, 50 bp, Homo sapiens
cggaacaacgtcggcgagcggggtattcaggagtctccggtgccgaacgg

SEQ ID NO: 317298 - DNA, 89 bp, Homo sapiens
gttgcatctgtggagctaaagttgaagaagaggatgaacttgaatctggagaccaagaggatgaggatgatgaaagtgaagatcctggc

SEQ ID NO: 317299 - DNA, 82 bp, Homo sapiens
gccaagaggactcagactgtggaacttccgtgccccccaccctcaccaagcttcatcacgtttcgctcctgtgcctacctgg

SEQ ID NO: 317300 - DNA, 100 bp, Homo sapiens
gcccggaaccactctttgtgccgcagcttcgcagggatacccacccaccatcccagggtctacaacatccacagccggaccgtcacccgctatcctgcca

SEQ ID NO: 317301 - DNA, 100 bp, Homo sapiens
gccagctgactgcacttcttttttgagaaaggaaggaatatatcctgactgattgcttgttgattggtgctggctgtgccctctaccccttgggctggga

SEQ ID NO: 317302 - DNA, 75 bp, Homo sapiens
cctccctgatggttgggctgatccggcagggctacgcctgcgaggagtatcttaaagtgaggtcacatgaccctg

SEQ ID NO: 317303 - DNA, 75 bp, Homo sapiens
atgacacaaaagctgataccagagctatacagctgctattaggcaggtcagaagccaatgacctggccctgaggc

SEQ ID NO: 317304 - DNA, 75 bp, Homo sapiens
tgcaatgaaccccaccaacacagtttttgataacgaaggaggcccaacttcattcaataaggagcctgacggatt

SEQ ID NO: 317305 - DNA, 51 bp, Homo sapiens
ccatgatcgttatgaatgatcagaaactgttcaggttccattatcaaaacg

SEQ ID NO: 317306 - DNA, 73 bp, Homo sapiens
acggccactccagtgccaacagccaattctacaggtggggtggaatggctgcaaataaaggataatgatttct

SEQ ID NO: 317307 - DNA, 75 bp, Homo sapiens
gctgagagctgggaagaggcggcagacagcggggtggtgaccatcgctatgtgaacaactacacgaacagcttcg

SEQ ID NO: 317308 - DNA, 83 bp, Homo sapiens
gttacacttgtccgggggagaccttgaatttggtgtggaagaaataacatcagtagttcagcattttgaaagcgaagcagaag

SEQ ID NO: 317309 - DNA, 100 bp, Homo sapiens
gcacagccccatccaggttcccatggttgccggctcccctctcaggacaacccagatgtgcaacaaagtgcgatggttaccatgccagcaatgattcctt

SEQ ID NO: 317310 - DNA, 90 bp, Homo sapiens
aagcttctcagtgaaaataaaattagagatgaacagcctaaacatcagccagatatatgtggtgttaacggtttgaggatgctggggatt

SEQ ID NO: 317311 - DNA, 131 bp, Homo sapiens
taatgcattaatccttaagaataaactgaaagtgcgaactgcctatccgtcattgagacttattcatgctgtcagaggagattcagttgtggaaattctttttgaacaagataatgaagagcaatcagttg

SEQ ID NO: 317312 - DNA, 89 bp, Homo sapiens
gttttcctggagggaccaagctgtgctgcggcaggacggtccccacccaaaggagccactatcccctaccatccgagcctctccctagg

SEQ ID NO: 317313 - DNA, 82 bp, Homo sapiens
gggaaccctggtcaccgtctcctcagacgcatcttctctccagactgccgatcccagaaagccaggtgatcaccattaaccc

SEQ ID NO: 317314 - DNA, 75 bp, Homo sapiens
aaagattttctgctgctacatacttaatggataagtttaggtagcagtcaccattatgctcaaagcggtgatcct

SEQ ID NO: 317315 - DNA, 107 bp, Homo sapiens
ccgggatctcaggtcctcgggggcggcggccacgccaaggacggtcaccaggagactaaagtccatcaaaaacatccagaaaattaccaagtctatgaaaatggtag

SEQ ID NO: 317316 - DNA, 74 bp, Homo sapiens
gagatgtggaggctcatgtcgagctgacggcccagagggtgggtgccaattccaccagcagctgcaactgaaaa

SEQ ID NO: 317317 - DNA, 75 bp, Homo sapiens
ctgcagaggacacgaggcggcgggctggagacatggaccgcggcgagcaagtttgaaggatgacctctaggaaga

SEQ ID NO: 317318 - DNA, 83 bp, Homo sapiens
tgctgtagtcctgttcttctggctctaagatctgaatgttgtgaccactaatttgaaatcctaagtaatgcactgaagagagg

SEQ ID NO: 317319 - DNA, 75 bp, Homo sapiens
ttggccctgaaaaaagacagagaaactatgggacacagatatgttgaaggcccacccacccccatcagatccgtc

SEQ ID NO: 317320 - DNA, 83 bp, Homo sapiens
cgtgcctttgaccttctgccatgattgtgaggcctccccagccacgtgaaactgcctgctggtgggtacccttgatgttgtgt

SEQ ID NO: 317321 - DNA, 97 bp, Homo sapiens
gggaggtgaatttccatgtcaacatagtccagatgatgattattctccaccgtctaagagaccaaaggccaatgagctaccgcagccaccagtcccg

SEQ ID NO: 317322 - DNA, 100 bp, Homo sapiens
ccaggatcctgagatccggagcagccggggtcggagcggattcagtgtaccactttgataagtcgacttcatcttgcatttctaccaatgctcttcttcc

SEQ ID NO: 317323 - DNA, 75 bp, Homo sapiens
gcatcgtctgcaagaccgcgaggcgagacctcttcaccgcggaggcagccgccctggagcgggagctgctggagg

SEQ ID NO: 317324 - DNA, 82 bp, Homo sapiens
tatccaatagggatattgtagaaactgtctttaacctgaactcctttaatgtgaaagtttttgctggcatcacttcttctgg

SEQ ID NO: 317325 - DNA, 74 bp, Homo sapiens
cgaaggtttcagaggaagccgagtcccagcagcagtgagacacggagcttttgtacagagagagataaaaccag

SEQ ID NO: 317326 - DNA, 50 bp, Homo sapiens
ccgccacccaaaccagtcaaaccagagccctatgagtttgtctctctgga

SEQ ID NO: 317327 - DNA, 89 bp, Homo sapiens
agaaggttcaaacaaatttgcaaatgatatacaacttctaagtttgccatcaaaaatagatttaggcatcggagtaaggcatttcccaa

SEQ ID NO: 317328 - DNA, 90 bp, Homo sapiens
gtccatggccccagatgacacttcaggaaatgggtcctgatgaatatgaagagatggaagaagaggaggaggaggaagaggaggaagacg

SEQ ID NO: 317329 - DNA, 75 bp, Homo sapiens
ggatcctcgtggccagcttggccaagatcgatgaggacggggacttggttgccttttccagtgacgaggaattga

SEQ ID NO: 317330 - DNA, 124 bp, Homo sapiens
gaagttgatggcctggagaagaaagatgttttgcctactgttgatccggatgaaatctttgacatggtaaaaccaaaggatcctttgaaaatctctcttcaggatttaatcaacagtaatcaag

SEQ ID NO: 317331 - DNA, 98 bp, Homo sapiens
gtcatcatgagcgatgttaccattgtgaaagaaggttgggttcagaagagggatcatatactcctatgaaaggaggaatctccaatgtatggtttgac

SEQ ID NO: 317332 - DNA, 76 bp, Homo sapiens
gctggatttgtccatcaacttcagggtaatctacagttgctgcagaactgcctggcagtgttaaatggagacacat

SEQ ID NO: 317333 - DNA, 78 bp, Homo sapiens
gccaatctagaatactctgcggctggtgtacagggagcaacaccggagctggtgcacgctggggtttgtgcagagcat

SEQ ID NO: 317334 - DNA, 82 bp, Homo sapiens
tccttcctgctgagcggactggtcaggatggctaaaggtgaccccaagaaaccaaagggcaagatgtccgcttatgccttct

SEQ ID NO: 317335 - DNA, 75 bp, Homo sapiens
agatgaggaggatgggagtcccatcgcgctcaacgaacccaccatcgattatggtttccagaggttacagaaggt

SEQ ID NO: 317336 - DNA, 82 bp, Homo sapiens
tccgccgccccgaaactttcaccgcgagcggatgaaggatttgggggcagagcacttggcaggtcatgaaggggtccaactt

SEQ ID NO: 317337 - DNA, 98 bp, Homo sapiens
ggaagaagaggacgacgacgacgaggaagaggaggtttctgagccaactgcacctataatatgtgaatttcttacaatgatggcagtctgtcacacag

SEQ ID NO: 317338 - DNA, 50 bp, Homo sapiens
agtcaccactcgcaaacaccactgtagagacggggtttcgccatgttggc

SEQ ID NO: 317339 - DNA, 73 bp, Homo sapiens
ccagctcccgtagggagccgtgggcgctcggtgcccgggccgggcagatggtgatggaatttcctgataatgt

SEQ ID NO: 317340 - DNA, 83 bp, Homo sapiens
cccgggcaccgcggtgctgctggtcacggccaacgtgggctcgctcttcgacgaccgggctgacgcacgaggcacacaggaag

SEQ ID NO: 317341 - DNA, 109 bp, Homo sapiens
gcggaccccgggagaagtttcccagaaaaaatgcccagcgcggcgcggggctgcggagtcgtccggagccgctgcgcggacatggatttgattgacatactttggaggc

SEQ ID NO: 317342 - DNA, 95 bp, Homo sapiens
ggggcctcaaacgtggagatcaactcctctctgttaatggagtgctaagaaacctttccagcttggacctacgtcatatcactgaactggataat

SEQ ID NO: 317343 - DNA, 82 bp, Homo sapiens
agcgacaacccgtcctctcccgagtttttcatgaactgtggctgcaccatctgtcttcatcttcccgccatctgatgagcag

SEQ ID NO: 317344 - DNA, 95 bp, Homo sapiens
gaggagcaggtgcagagcactgcgctgtcagcgatagcccagtggatggccattccaggacaacttgcctttgatgattttcaagagagttgtgc

SEQ ID NO: 317345 - DNA, 82 bp, Homo sapiens
gcccgtgccgcgagcgcggcctgcaggaggtttgcctgcaatgagatttcattctctacatttaaaggacatcctttctgag

SEQ ID NO: 317346 - DNA, 100 bp, Homo sapiens
ttctctctgccccgccctggcaggcgaggctccaggcctccagtctccatgcagtaaacagacccagcagaacctgcccgtggtgagctcagccaagact

SEQ ID NO: 317347 - DNA, 100 bp, Homo sapiens
ttgccatcaatggagtgacagagtgtttcacatttgctgccatgagcaaagaggaggtcgacagcatttggaaacagagccctgggctccagctggcttg

SEQ ID NO: 317348 - DNA, 100 bp, Homo sapiens
tgaagagaaagcaaggataatctatgaagactacatttctatactttctcctaaggagtttcttggcggatctgatggataactcagagctcatcagaaa

SEQ ID NO: 317349 - DNA, 75 bp, Homo sapiens
cgccgctctagcggccgggactctgaactatggcggtgtccctggccagtgtccttccacctgtccacaagcatg

SEQ ID NO: 317350 - DNA, 96 bp, Homo sapiens
ggtggtaaagacacttgtggggtgagtcatccctactcccaacatctggaggggaaagcaaaccagtccagctacgggggcccagccagccagcag

SEQ ID NO: 317351 - DNA, 100 bp, Homo sapiens
aatggcacaactgtccacgtaggcattcaccccagcaagatacaatgctcctgagaagacagcattttccacaggaggctgtttcctcccctggtggatt

SEQ ID NO: 317352 - DNA, 100 bp, Homo sapiens
aaggggcttacgcagaaggacctggccacgtctcggaagggtgctgacctggaccgggagaagaaggctgccgagtgcaaggtggacagcatcgggagcg

SEQ ID NO: 317353 - DNA, 90 bp, Homo sapiens
atcccaggttgccttggaaaatgccaacgccgtgtctgaaggctgcaggggacagcgctggaccgtacagacctgcctaacatgccagcg

SEQ ID NO: 317354 - DNA, 75 bp, Homo sapiens
cgcaagggcggcggggagcacacggagcactgcaggcgccggtgcctccggagccagcgtggtggccatagacaa

SEQ ID NO: 317355 - DNA, 101 bp, Homo sapiens
ccttcaccatggcctcggcagagctggactacaccatcgagatcccggatcagccctgctggagccagagggcaggacaggaagtacagacagagaacgtg

SEQ ID NO: 317356 - DNA, 88 bp, Homo sapiens
cggcgcttgttggcggcgctgcgaggccagagcctagggctagcggccatggttatcaatactctggctgaccatcatcatcgtggga

SEQ ID NO: 317357 - DNA, 74 bp, Homo sapiens
actcctagctcatttcgacagccttgtgtgcaagcatttcctggaagctattgaaaacaacaagtatggctggt

SEQ ID NO: 317358 - DNA, 100 bp, Homo sapiens
ccggctactgccgcttcagttctcccggtgtggccacgagtcgggtagcagaaggtcaagaaatttgtgtgattgaagccatgaaaatgcagaatagtat

SEQ ID NO: 317359 - DNA, 80 bp, Homo sapiens
gatcagatgatgaggagcaagaggaccctgcggactactgcaaagattcgtgtgagggatgacaagatgcctttggcgca

SEQ ID NO: 317360 - DNA, 50 bp, Homo sapiens
tcccaagtccctgggactacaggccaacagagattttgagaaacacattg

SEQ ID NO: 317361 - DNA, 98 bp, Homo sapiens
cttggtttcgggatctcggtgctgcagacggcgagacctcctgcacagcaattctgtggtgttcttggtcacacatttatggagtttctgaagggcag

SEQ ID NO: 317362 - DNA, 120 bp, Homo sapiens
gccagtattatgatgctcaatgtcaagtcatctttggctcaaaatttggaggttttggttcagttagtggaaaaattgaaatagaaatcaagatcaaccatgaaggagaagtaaacaggg

SEQ ID NO: 317363 - DNA, 75 bp, Homo sapiens
ccactttgtaattccagcgagtcgacttcccatcctgagttgtatgttggtgagagtgaacgtgctgtgcgacaa

SEQ ID NO: 317364 - DNA, 100 bp, Homo sapiens
gtttatctcggctgcggcgggaactgcggacggtggcgggcgagcggctcctctgccagagaacaccaccgatagccacaccgaagagttctcccatttg

SEQ ID NO: 317365 - DNA, 87 bp, Homo sapiens
caacgggattacatattcttcagatttcacagacagtgatctgacacaaacacagctgaagcaaacagaggtcctagtgacagctga

SEQ ID NO: 317366 - DNA, 100 bp, Homo sapiens
agagagggaaggtcttcattgttgggggagcaaatccaaacagaagcttctcagacgtgcacaccatggatctggtagagacagggtttcgccgtgttgg

SEQ ID NO: 317367 - DNA, 100 bp, Homo sapiens
ccgggaagtgcttggggatggagtgcctccaaaggttgctgaggaagctgaagaaatgcacatcaaagcaattcagattaaagaacaacttcttggtcaa

SEQ ID NO: 317368 - DNA, 82 bp, Homo sapiens
atcctgccgtccttctccactttcgccagcccgtgccgcgagcgcggcctgcaggaggttggacgtgataagtatgagcctg

SEQ ID NO: 317369 - DNA, 89 bp, Homo sapiens
tgagacatttgctacagcatcccacattaagtcaacggacagaactgtaccgctctctttttggccagctccaccctcccgacgaaggc

SEQ ID NO: 317370 - DNA, 51 bp, Homo sapiens
gagcggcctaacccgcgcccgggtagagagaatgtaactggtcactacatt

SEQ ID NO: 317371 - DNA, 90 bp, Homo sapiens
cagagaagggccaggagaggagcactttgaggacatggcctccgacgaggacatcgagcagctgatgcagctgtacagtgcgcgccagcg

SEQ ID NO: 317372 - DNA, 82 bp, Homo sapiens
ccttccagatatacagtcatatttcttatattacacgctgatgttctaatcatgtcagataaagatgatattgagactccac

SEQ ID NO: 317373 - DNA, 74 bp, Homo sapiens
ggaagcggcccccgcagacgctcggcagggggatatgagactttctactcggaatatcctgagtgttgcgtgga

SEQ ID NO: 317374 - DNA, 100 bp, Homo sapiens
gactctgctgtagcctcacctcagcgcattcagaacggccggtttgtgggcgatgctgaccttgaaagacagaaattttcagatttgaaactcaacggac

SEQ ID NO: 317375 - DNA, 100 bp, Homo sapiens
gccgagcccgcccgcgcgccgggcttccgttacaagatgaggtctgtgtatgctcacttccccatcaacgttgttatccaggagaatgggtctcttgttg

SEQ ID NO: 317376 - DNA, 87 bp, Homo sapiens
gctctcgctcctctggccaccgcccctgggaagcccttttggaaagaaccaggaagacagcgcttccagcaacccgtttgcactccc

SEQ ID NO: 317377 - DNA, 97 bp, Homo sapiens
gcctctcccaggacccgcctggctgcgagatatctacctctgacttttgaggatgttgctatttatttctccgagcaagaatggcaggatctagagg

SEQ ID NO: 317378 - DNA, 95 bp, Homo sapiens
gttgaggctgcggtcatggagggagcaggagctggatccggcttccggaagctcaccatggatgatgatatcgccgcgctcgtcgtcgacaacgg

SEQ ID NO: 317379 - DNA, 100 bp, Homo sapiens
aagctctatgccaatatgtttgagaggctggctgaggaggagaacaaggagtctgcagtttctgggagcagtgaacggtgcccccgtccagtctctctac

SEQ ID NO: 317380 - DNA, 149 bp, Homo sapiens
ggaaagagtcctgcatggtttcaagggacgtaccaggaggatggtgcccaggcgaaagggcgtgtggttgcgcctgaggaagatacttttctgtgttttggggttgtacattgccattccatttctcatcaaactatgtcctggaatac

SEQ ID NO: 317381 - DNA, 80 bp, Homo sapiens
gaagaggattccggcgggaactcgactcttggcgccaccgcctcatgcactgtgtaggaattcatgatttgttcctgtag

SEQ ID NO: 317382 - DNA, 82 bp, Homo sapiens
cttggagccagaagctacatgacccctaaacggaactgtggctgcaccatctgtcttcatcttcccgccatctgatgagcag

SEQ ID NO: 317383 - DNA, 98 bp, Homo sapiens
agcacccgagcaaaccccagcaagatgcggaggctgcctcggcggagcagaggaaccacacgctgatcatggttcacgcaaagaatctgctccacaag

SEQ ID NO: 317384 - DNA, 90 bp, Homo sapiens
tatgaaataaatgtggaagatactaatgaaatagactgggaagatcttgctagtgccataggggaacttaggctgcggaactatgtcccg

SEQ ID NO: 317385 - DNA, 82 bp, Homo sapiens
ggaaaaactggagagcttcatcaaaaatagtgatagctttgataaggctcacgagcagctaaatgtgaaacatgaaccactc

SEQ ID NO: 317386 - DNA, 101 bp, Homo sapiens
ctgaatcatcgggtgttctctactccagagctccgacttatttctgtgggcagacattaacattcaggtgaaaggtgtagcagtcactcggcctacaccca

SEQ ID NO: 317387 - DNA, 107 bp, Homo sapiens
gcaagcgtacctgagaatacttttaaaggaacctgttgataaatgcaaaacagtggctgttgcagacatgggaaagcggaaccaccaaaaggagtgatgatcaacga

SEQ ID NO: 317388 - DNA, 83 bp, Homo sapiens
tcccccgtcccaccactgaggctgttgggccaggccagtcatgctagaacgcagcctgcttctgcaaagtggtacgatcgaag

SEQ ID NO: 317389 - DNA, 100 bp, Homo sapiens
actggccagactcctggagatcgacccgtacttgaagccctacgccgtggacttccagcgcagtgatgtcttggcattgcccattttcaagcaggaagat

SEQ ID NO: 317390 - DNA, 74 bp, Homo sapiens
gcctctacggcctttggatacatcccagagttcacgcctcctgacaaggtgatccgggcgggccccgcaggaat

SEQ ID NO: 317391 - DNA, 50 bp, Homo sapiens
atcaagtctacactgttcaaataaggattcaagttcgaaatatggcaact

SEQ ID NO: 317392 - DNA, 78 bp, Homo sapiens
gttcttgcctcaggccagtcgcctccaggccaagagggatccttcacccgtgtctgctgcctgtggaggaaccgattg

SEQ ID NO: 317393 - DNA, 98 bp, Homo sapiens
ggcaccgggatcgtgaccgagaccgtgaccgagagcgtgaccgagagcgcgaatatcgtcatcgttagaagcctacgaggacaagcagaaactcaagc

SEQ ID NO: 317394 - DNA, 95 bp, Homo sapiens
gtggcaatgaaacacattttactgggaacgaagttggttttttcaagcccatatcttgccgaaatgtgcaatctgaaggcaaatcctgtttagac

SEQ ID NO: 317395 - DNA, 82 bp, Homo sapiens
ggcaaacagtgtttgcctctggttcagctcatacaacagcttcttagctaaggcaggaacggatccaaattcagcagcttgg

SEQ ID NO: 317396 - DNA, 97 bp, Homo sapiens
cgcatggggctgctgagaccgctccggacgtgcgaagcgttcgcggtgcggtaggtgtcatggagaaactccagctgggcccagagattctgcagcg

SEQ ID NO: 317397 - DNA, 97 bp, Homo sapiens
acctcagagataactggaccgatgcagaaggctattatcacgacatagtaaggccagagacagtgatgaagagaatgacccagacgatgaggatgct

SEQ ID NO: 317398 - DNA, 90 bp, Homo sapiens
agccgattcctggccacctccatagcaagcagtatggtttgaagtggtgaacatggatttttctcggcttcacatgtacagtcctcccca

SEQ ID NO: 317399 - DNA, 88 bp, Homo sapiens
aggatctggtgtaccaggcgaagctggccgagcaggctgagcgatacgacgagtgatagattcgtgtggcctttcaaatgattgtgaa

SEQ ID NO: 317400 - DNA, 75 bp, Homo sapiens
ctctgtgggacctcagagaatgatgccgccatggcatcagatgaaggcaaactttttgttggagggctgagtttt

SEQ ID NO: 317401 - DNA, 95 bp, Homo sapiens
gactcacggcagaagtgagctggaaggtcttggagcgaagagctcggaccaagcgctcaggtgaaaggtgtagcagtcactcggcctacacccac

SEQ ID NO: 317402 - DNA, 87 bp, Homo sapiens
gcggggctgaggcggccgcggggcccgagcgcaggcatatgatgctgagctggctgctccagaatgaaccacagctctgagaagggg

SEQ ID NO: 317403 - DNA, 90 bp, Homo sapiens
gggacaagtacctttatgaaccagtgtatcccaaaattgcctgaggttctgtccattgaggaggaagtggaagaaacagagtcttgggcg

SEQ ID NO: 317404 - DNA, 75 bp, Homo sapiens
gtacaccctcgtcagcggctccctgcccttcgacgggcacaacctcaaggccagcgatctgtacatgagacccag

SEQ ID NO: 317405 - DNA, 100 bp, Homo sapiens
gaaaagggagaacaagccggatcagaagacgaaaactctgcggaagttctgaatcaagaggagagtaaagatgggaaaaccccactacacatgactgctc

SEQ ID NO: 317406 - DNA, 101 bp, Homo sapiens
gggagtcctggccccctaactcaagcatccgtgtcattctggaccttactcccaactaccggggtgagaactcgtggttctccactcaggttgacactgtg

SEQ ID NO: 317407 - DNA, 100 bp, Homo sapiens
agctgggtggtcccagcctggagctgtgccagcctgacatgggtcagcccaaggccaaccccactgtcactctgttcccgccctcctctgaggagctcca

SEQ ID NO: 317408 - DNA, 88 bp, Homo sapiens
tggaccttggaaatccaagatctgccatcccaggtccgcaacccggagaagcaaggtggagccccctgagctgcccgctgatctgcag

SEQ ID NO: 317409 - DNA, 101 bp, Homo sapiens
agccttgggtttctttcttaaaggactgatttttagaactccacatttgagttgagtcgtggggacagcttgaaggagccaacctcaattgcagagagcag

SEQ ID NO: 317410 - DNA, 96 bp, Homo sapiens
acctttgcacaaaactgcaggaacattgaagtactgaatctaaatgggtgtacaaagacaacagacgctttaagctatgaagaaggacatccctca

SEQ ID NO: 317411 - DNA, 95 bp, Homo sapiens
ttctgcattcacggagaatgcaaatatatagagcacctggaagcagtaacatgcaagtaatagcctgcagctggtgttttgagaagccctactgc

SEQ ID NO: 317412 - DNA, 83 bp, Homo sapiens
cgcctttgccgatccgccgcccgtccacacccgccgccaggccctgtttgtgctcttcgtcctggcctacatccacatcgtct

SEQ ID NO: 317413 - DNA, 98 bp, Homo sapiens
ttagctgttgatgctgtaattgctgaacttaaaaagcagtctaaacctgtgaccacccctgaagaaattgcacaggtcaaaatgcagatcttcgtgaa

SEQ ID NO: 317414 - DNA, 87 bp, Homo sapiens
ctgcgcaaagccagcgtgaccatcattaatcctaccatatgaaagatttattaaaggagaagaagataagcccctgcctccaatcaa

SEQ ID NO: 317415 - DNA, 82 bp, Homo sapiens
gggccatcgacaatgcggcagatcttctcatattcgggaaggagctaagacaatgcagatcttcgtgaagactctgactggt

SEQ ID NO: 317416 - DNA, 95 bp, Homo sapiens
gagaggagcatgaatggagcaaaatggcggatcatgtgcagattgggaaaatgaggtacgttagtgttcgcgattttaaaggcaaagtgctaatt

SEQ ID NO: 317417 - DNA, 75 bp, Homo sapiens
attgatgatgatgctacaagccagcttgcaagaaattggggatcgaagttgcttgatagatttgactatgatgat

SEQ ID NO: 317418 - DNA, 75 bp, Homo sapiens
ggaccaagagaacaatgggaaccagtctttcaaaataaacctctgtagaggagcaggatgcaaccgacaggctgt

SEQ ID NO: 317419 - DNA, 97 bp, Homo sapiens
ggaacggctccagcatcaagatccgtctgacaggatagcaaaacctgatctcataaaacctaggtcacaaaggacagccctgcaaaacagaccctat

SEQ ID NO: 317420 - DNA, 100 bp, Homo sapiens
tgcacttcaaaatggttaagatggttatgaagacagtatggagtttccagaccatagtagacatttgctacagtgtctgagcgagcagagacaccagggt

SEQ ID NO: 317421 - DNA, 98 bp, Homo sapiens
gtccggtgtccccgcaacgccacaggctgtgctgcaggcgctggggtccgtggtggcagtggaggagcgctcgctcacagggacctgggatttgagca

SEQ ID NO: 317422 - DNA, 74 bp, Homo sapiens
ttccgtgctgttcctgagtgtcaactatctgggggggacattcccagtggtggacttgctttgtgaagagacag

SEQ ID NO: 317423 - DNA, 90 bp, Homo sapiens
cgacctccaagtacacaggccccctgcagtacaccatctggaagtccctgttccaggacatccacccagacggagtttcgctcttgttgc

SEQ ID NO: 317424 - DNA, 96 bp, Homo sapiens
cttgccttctgagctttgtaccaaagacctgggaaaaggacctccgaaacaatcttattagtagtatagatccaggtgccttctggggactgtcat

SEQ ID NO: 317425 - DNA, 75 bp, Homo sapiens
gaaatgtccaccactgtttctcatcatcaccaaacggaggagacatcacagctttcccagatcgggaggaaaaat

SEQ ID NO: 317426 - DNA, 71 bp, Homo sapiens
atgttggtgctgtttgaaacgtctgtgggttacgccatctttaagctgggcctgaactgatatctgaagag

SEQ ID NO: 317427 - DNA, 101 bp, Homo sapiens
cgcagcagccgagtctgacggcgccggttcgctgcccggtccgcccgcggtgagagatgatgattattctccaccgtctaagagaccaaaggccaatgagc

SEQ ID NO: 317428 - DNA, 87 bp, Homo sapiens
tgaatccacatagagaaagtgatggggttcagcctggagaaggaaataaagctgctttcaatgacatgagagccttgtctggaggtg

SEQ ID NO: 317429 - DNA, 83 bp, Homo sapiens
atcctcgtgggcaacaagagcgacctggtgcgctctcgtgaggtctcggtggatgcaccgaacaagatttgtgatgaaatgga

SEQ ID NO: 317430 - DNA, 96 bp, Homo sapiens
actcaaagctgcacggcagtctgtttatgaggaaaaacttgacatgtctaggtttcctgttgaaaatattagaaatttcagtattgttgcacacgt

SEQ ID NO: 317431 - DNA, 75 bp, Homo sapiens
gtcgttgcacccagctgccctcccgggaggctgcctgcctgtcctgaacgaggctgtgggggccctgatgtacca

SEQ ID NO: 317432 - DNA, 153 bp, Homo sapiens
ataagtctggaactatcccatctgacagccaaggagccacacctttgcactatgctgctcagagtaactttgctgtggagaaaccttgcagtggtggccaagatttacttctttatccagctaagagaaagcagcttttgagaagtgaactgg

SEQ ID NO: 317433 - DNA, 100 bp, Homo sapiens
gccgaggaacgagagcgcgaagctaaggctaaacatatttttgactggtatgaacccattctactttcatgcagtaaatataattttacactgcttagtg

SEQ ID NO: 317434 - DNA, 51 bp, Homo sapiens
gagagggacctggtggaccgactaaagaggaagctggcgcgtatggcagcc

SEQ ID NO: 317435 - DNA, 75 bp, Homo sapiens
ctggcctgcagcttccagcacagctaccgcctgctggtgcctggtttaccaaagatgcaggtcattaggaactat

SEQ ID NO: 317436 - DNA, 74 bp, Homo sapiens
gggcgctgtgtccccaagctccccgtcctcggggacaagaatccttcaagaaacaggaaaaaactcctaaaaca

SEQ ID NO: 317437 - DNA, 100 bp, Homo sapiens
cgctgctcaaggacacggtctacaccgacttcgacgtaaaatgtttattggaggcttgagctgggatacaagcaaaaaagatctgacagagtacttgtct

SEQ ID NO: 317438 - DNA, 99 bp, Homo sapiens
gacctgaagcagtatctggaccactgtgggaacctcatgagcatgcacaacgtcaagagcccgaacccagccctcaccttctgcgtaaagacccatgac

SEQ ID NO: 317439 - DNA, 126 bp, Homo sapiens
tgggccataggtctcctggcggctgggcagagctccaccatgacgggcacctacgcgggacagttcgtgatggagtctggcttcagccttgtcatgaaccacccagcctgtgtcaatgagattgct

SEQ ID NO: 317440 - DNA, 83 bp, Homo sapiens
gcgttgcagaggcgcttcgccaagggggtgcagtacaacagtgtccctggccagtgtccttccacctgtccacaagcatgggg

SEQ ID NO: 317441 - DNA, 95 bp, Homo sapiens
ctgcttgggagtcagctgtgtactctttgtgattgcaagagaaactccagaaaatcttgccaaacttctgaccaggatgtatttaaaatcagaag

SEQ ID NO: 317442 - DNA, 73 bp, Homo sapiens
gtacgctgtgaaggcatcaacatttctggcaatttctacagaaacaagtctgggaacttctggggtaggacgt

SEQ ID NO: 317443 - DNA, 97 bp, Homo sapiens
atgcagatgcccctcctccaccagaggactgggaggagcatgtcaacagcattatctgcataccagaggtactacagtttacagtctgactactgga

SEQ ID NO: 317444 - DNA, 80 bp, Homo sapiens
tggctgtaaggacccctaaggttgaagatggggaagtatttgatttcagaggaatgagattagattggtttaggttacag

SEQ ID NO: 317445 - DNA, 83 bp, Homo sapiens
ccctggggccggcgatgtgccaccgaggctgaggatgatggtagattgccaggaaacccggggatggcgtggagttctttgcc

SEQ ID NO: 317446 - DNA, 100 bp, Homo sapiens
ggacaaggagaacaccggaagttggagaagactcagaaccgtgctgcatactatcctcctagccaaattgctcaactaagaccaagtcctcgctggactg

SEQ ID NO: 317447 - DNA, 90 bp, Homo sapiens
gtcagctacgggaattcagtactctgtaacacccagctaccaggataactttccatttgatcctccatttgttcgagtggtgttacctgt

SEQ ID NO: 317448 - DNA, 76 bp, Homo sapiens
gttaaagtctctcttcaccctgccgtcatgtctaagtcagaggtatcgaaggatgatcgcagtgatgtggagagca

SEQ ID NO: 317449 - DNA, 100 bp, Homo sapiens
aaaaattaaattttaaccatgagggaaatcgtgcacatccaggctggtcagtgtggcaaccagatcggtgccaagtgatctcagtgaaaaccaaattcag

SEQ ID NO: 317450 - DNA, 95 bp, Homo sapiens
agcattgatgtcagtgaaggagatggctaagggcattacgtatgatgaccccatcaaaaccaggctgcccttttcttgggcctgggggtgttgtt

SEQ ID NO: 317451 - DNA, 50 bp, Homo sapiens
acaatgggaaccagtctttcaaaatagacaaggtctcactatgttgccca

SEQ ID NO: 317452 - DNA, 73 bp, Homo sapiens
tgtggagagcgacccgtggccttgtgtttcaggaaattgatgaagcctgtaagagaataaagcgtgaagttga

SEQ ID NO: 317453 - DNA, 100 bp, Homo sapiens
gtagctcagagggtgaaaaagactctcctccaccggagtgggattccgttccagttcacaaacctggcagctgaaatatattcttccctctctcctgcct

SEQ ID NO: 317454 - DNA, 48 bp, Homo sapiens
ggcgccggcctccggggagaaacgagacgatctgccgaccctctggga

SEQ ID NO: 317455 - DNA, 106 bp, Homo sapiens
acgagcgacaggagttcatctacccggagaagcaggagccctactcggcaggtgtttccccccgggccggcctgccgtgacgatcacagccctgccgtctcaggtc

SEQ ID NO: 317456 - DNA, 82 bp, Homo sapiens
cagggcctgcagcgggagctggacggcgagcgcgagcggcgcgagaaaagtgaagatagtccaagtcctaagagacagcgcc

SEQ ID NO: 317457 - DNA, 98 bp, Homo sapiens
cagccggaggatcgcggagtcccaatgaaacgggcagccatggccctccacagcccgcaggtggcggctttgaaatacatcccatctgtcctgcatga

SEQ ID NO: 317458 - DNA, 100 bp, Homo sapiens
gtggtaaaggaaattcgtttcagaattgagcagaaaacaacactgacagccagtgcaggttggatggcaagcatgtggtgtttggcaaagtgaaagaagg

SEQ ID NO: 317459 - DNA, 50 bp, Homo sapiens
ggaatttcagcagctctatgtgaagatgtacattgaagatgtcagtttct

SEQ ID NO: 317460 - DNA, 100 bp, Homo sapiens
gaaagaccgagtgaagaaaggtggatcctacatgtgccatagggaagtaacagctagcagtcgccactatgttgacaggctatttgaccctgatccccag

SEQ ID NO: 317461 - DNA, 100 bp, Homo sapiens
cagcatcatgaccgagcggagcgtgccccacctccagaaagaggagaaggcagagcccccccaggctatgaatgccctgatgcggttgaaccagctgaag

SEQ ID NO: 317462 - DNA, 100 bp, Homo sapiens
ttcgtcgcctccttgcccgtgaccgtcgctagaactcagttgtgcgttgcggccagtcgccactgctgcagatcgggagcggtgccgagaaaaatttcct

SEQ ID NO: 317463 - DNA, 83 bp, Homo sapiens
ggaacgcagctgaaagcgtgaactgctcgtggaggagttcatgctcttggccaacatggcagtggcccacaagatccaccgcg

SEQ ID NO: 317464 - DNA, 83 bp, Homo sapiens
caaaagggacccccccgtgttcatcccttgtaaggactgatcctttgaaatactccagccatgactaaaagagaagcagagga

SEQ ID NO: 317465 - DNA, 75 bp, Homo sapiens
gccctgcctctccctgggctctggtggtacagaagttggtcctgccctttgggcgactgaactacctgcccctgg

SEQ ID NO: 317466 - DNA, 152 bp, Homo sapiens
aagatgatacatttggatcagaaacgggaggcattggaagccaggaatcaaaagtgaagaaactctgcaagcccttagccggatcgagctgggagatgtgacaccacacaatattaaacagttgaaaagattgaatcaggtcatctttccag

SEQ ID NO: 317467 - DNA, 101 bp, Homo sapiens
atagtagcaggcggcggcggcggaacgccaggcagaaactgccaagttttggaccttatctggaacagcgcaagaaaatcatagcagaaaacaagattaga

SEQ ID NO: 317468 - DNA, 74 bp, Homo sapiens
ggactcagagtttccattgacactgatatgtttcgccgtgaggaagatgcggaaaaggctgtgattgacttgaa

SEQ ID NO: 317469 - DNA, 100 bp, Homo sapiens
tgttgtgaggactaagggtgcggcagtgcctggtacatggatggcactggatctttaaaacgcagtggttcctttagcaaactccgggcttccattagac

SEQ ID NO: 317470 - DNA, 102 bp, Homo sapiens
ccgccactgccgcaggaggcgtgaggcctcagagaaccatggctactgccaagggaatcgccataggcatcgacctgggcaccacctactcctgtgtggggg

SEQ ID NO: 317471 - DNA, 83 bp, Homo sapiens
cggcgggtgcagcggaggcggcggcggcggcggcagtgacgtcgccggcttagaccatgctcagcctccaagcagccttgtca

SEQ ID NO: 317472 - DNA, 49 bp, Homo sapiens
tcctaatcctcactgccgaaaggtagcctttccagtaaatatatgactc

SEQ ID NO: 317473 - DNA, 90 bp, Homo sapiens
tggcctctcttccctgcgggacctcaatgtccggaggaaccagctcagtacgctgcccgaaggagaccatactcaggaagagcctgactc

SEQ ID NO: 317474 - DNA, 100 bp, Homo sapiens
ggaatttcctcaggctattaaagcccttcctagccttaaagagcttgtattggaacaacacaaactaacaaaagaacagtgggaagaaagaatacagaac

SEQ ID NO: 317475 - DNA, 101 bp, Homo sapiens
ctttgtcagcgctcctaaagcaaacgccaccattgaagtgaaagtgtactaatggtcacttgatgtgcgctggctgttttatccacctactagcagatgcc

SEQ ID NO: 317476 - DNA, 97 bp, Homo sapiens
cgcagtcagccggggacctcgtccgagcccacccgcctttggaggcccgccaagctgccccctgtgtgctattctttgatgagctggattcgattgc

SEQ ID NO: 317477 - DNA, 100 bp, Homo sapiens
aagccttcctttatcgctttcagatcatcaatgctgtggtactgttgattttattgagtgccctggctgatccggatcagtataacttttcaagttctga

SEQ ID NO: 317478 - DNA, 98 bp, Homo sapiens
tcagcgcatgatcagttctcaggtgtgactgcacagaaaagttacaaaacaaatttgactttttgcgctcacagttgaatgatatttcgtcatttaag

SEQ ID NO: 317479 - DNA, 120 bp, Homo sapiens
gggggttcgcgcccgccgacccgcgccctgctccctctcagcacctgggcggacgggtgtggatgaatggaacatagctcgcctcaatacagtcttggatgtggttgaagaagagtgtgg

SEQ ID NO: 317480 - DNA, 75 bp, Homo sapiens
cgaaaaaataagaaggaacccaaagaaccatctcccaaacaggatgttgctgatgtatattcaagatgagtggat

SEQ ID NO: 317481 - DNA, 98 bp, Homo sapiens
gaagctcgggcgctccggctgtaaggagccgcggcggggggaaaatggagcccttcaccaatggtcgttgaggacttccacatggagattggcacagg

SEQ ID NO: 317482 - DNA, 51 bp, Homo sapiens
ctggactcggattcgttgcctgaggttaaacccatccagagtaatggctgc

SEQ ID NO: 317483 - DNA, 98 bp, Homo sapiens
cggctaccggccgaggaagcccgagagccgcgagccccagggcgccctggagcgccccccagatgggatccggacgggccagcaccgttcactcttcc

SEQ ID NO: 317484 - DNA, 80 bp, Homo sapiens
ttgttccgttgcgagctgcagctgcgatctctgtggtaggcccagctcctctggtgcaagtgtggtagctattgacaaca

SEQ ID NO: 317485 - DNA, 74 bp, Homo sapiens
tgacctctgtggaaaatgagccatgaaccaaccaattaatagttatgcacgagtgcgagctgtggtgatgaccc

SEQ ID NO: 317486 - DNA, 101 bp, Homo sapiens
acgagactcaaacaacttgctgggaccatcccaaaatgacagagctctaccagtctttagggcgtctctggccgagcctctttttgtggaaaacgacagca

SEQ ID NO: 317487 - DNA, 100 bp, Homo sapiens
gaacaatggcctcaagatggaccagttctgcaaggagcacggtttcgtaggatggtttgaaacatcagcaaagttggctgattgcaattctggcccaact

SEQ ID NO: 317488 - DNA, 74 bp, Homo sapiens
ctagcaccccgagaaccgtcagtttgagccagatgtgacttttttgaacgaaccattctgtgcaacagccttgt

SEQ ID NO: 317489 - DNA, 74 bp, Homo sapiens
ctcgtcagcactgactttcagctatggaatcgactgattcttgctattccaaatcctcttccacgttgacagcc

SEQ ID NO: 317490 - DNA, 73 bp, Homo sapiens
ctgagaggagcgtggctgtctcctctctccgccatgatattatcgtggagctgtaggtgccttattggtttat

SEQ ID NO: 317491 - DNA, 100 bp, Homo sapiens
aggagttccaccaggccgggaagcccatcgggtatcatgatattagctggtttgacatcaagtcatttgtgagtcatcagatcttctcctgaaaatggga

SEQ ID NO: 317492 - DNA, 75 bp, Homo sapiens
ccccaccatcaacatggagaacaagaccacgtggttttttgctccactcaagcctgttagaatcaccatggaata

SEQ ID NO: 317493 - DNA, 100 bp, Homo sapiens
cagatatggacacacccagccgctgtgcctatgctcagctgcagccacaccagctcctcccacagccatcctcaaagcacctgcagccccaatttgtgat

SEQ ID NO: 317494 - DNA, 75 bp, Homo sapiens
aggatataactaccttggagcaaagtgagccagcaccgctctttgaccttgccatgcttgccttagatagtccag

SEQ ID NO: 317495 - DNA, 102 bp, Homo sapiens
tcacggaggacggcaggactgtggccgtgggggacatcgtctgggaccacaggcacccaggataactcagtacacatgggttctcagcttcctgttcacaga

SEQ ID NO: 317496 - DNA, 109 bp, Homo sapiens
gcttctcccctacgcgctacacaagtggagctccttttcctccacctaccttcccgagtgattcgcaaggggtggctcaccatcagcaacattggcatcatgaaaggcg

SEQ ID NO: 317497 - DNA, 83 bp, Homo sapiens
tctcacctgggttttcttagccctctacttttcaagacaccaagtgagaggccaaccaggttgattcttcaccacactgaaac

SEQ ID NO: 317498 - DNA, 100 bp, Homo sapiens
ctgacacggaaccctcacctcaacaagaacttaacactacaagcggaagccttccttcaacaacaccgatgtctccatcggccatctcgactcagaacct

SEQ ID NO: 317499 - DNA, 75 bp, Homo sapiens
cgccgcggccgctgcggacggacgctcgcctgccggctgaggtgaagatggagctggaaaaacaagcttaataag

SEQ ID NO: 317500 - DNA, 75 bp, Homo sapiens
gccgtgcgcatgtttgctgactacctcgcccacgagagtcggaggtgcaggtgatggtcctaccagtgtgtctgt

SEQ ID NO: 317501 - DNA, 100 bp, Homo sapiens
ctcatatcctgtttatgctcctcaaaggggcctactctaggtgcggtacttcactatagtttataaaagatggtccctgtcagcaaagaactgtaacctg

SEQ ID NO: 317502 - DNA, 75 bp, Homo sapiens
accagaagcttgaagggtttggttaagggcaagactggagagttaaatcagcttttaaatgcagttaaatcaatg

SEQ ID NO: 317503 - DNA, 96 bp, Homo sapiens
agccccgtggatccgctggagcggagccggccgtacgcggtgctgcgagggcagaacctgggctggactctgtgaagctgagcaggagcagatgcg

SEQ ID NO: 317504 - DNA, 100 bp, Homo sapiens
gaaaaatggaccaacttctttggcaagtggacattttactggctcaaaaagaagagattttatcgacatcgaaagtaaatttgccctaaggacccctgaa

SEQ ID NO: 317505 - DNA, 82 bp, Homo sapiens
ggcggtcctcctagcggcctgaattcaattcgtcataatctgtccctacacagcaagttcattcgtgtgcagaatgaaggaa

SEQ ID NO: 317506 - DNA, 75 bp, Homo sapiens
cacagacggggtggagcccatggaatcggtcctggaggacagagattcagttgtggaaattctttttgaacaaga

SEQ ID NO: 317507 - DNA, 100 bp, Homo sapiens
caaccacgtccacgtgtcggtcaaagctggatgagtacagcattctgccctattcattcatcattggggtccatggttatgtgcttgtgtattctgtcac

SEQ ID NO: 317508 - DNA, 74 bp, Homo sapiens
aaaaacatgattacagggacatctcaggccaatgccataggtcggggtgccaagtcagtgcgcgagttcctgga

SEQ ID NO: 317509 - DNA, 75 bp, Homo sapiens
cagggtaacatggcggatgcggaagggcatttgcacgccaaaggcaaagaagaaaaaatgtccaaatcattaaag

SEQ ID NO: 317510 - DNA, 75 bp, Homo sapiens
cgcccctggacatggaggagaaggtccgcttcaacatgtgccgaagcgccacctcagaagataaaaagaaatgag

SEQ ID NO: 317511 - DNA, 75 bp, Homo sapiens
aacaaagtctgctcaaatctcctgctgtgaaccagcagaatttttgaacagctccataatgggagaagtaaagaa

SEQ ID NO: 317512 - DNA, 74 bp, Homo sapiens
acttccaggaccgacagcctgaagacatcccgcagtgctaactttgagtacatcatcgcagaaaaaagagggaa

SEQ ID NO: 317513 - DNA, 100 bp, Homo sapiens
accagaaaaacaaggactgggaggtgtcctgacttgcccaggcagagactgcgggacgaccctgggacagtctccactggggcagatccagctgaccatc

SEQ ID NO: 317514 - DNA, 97 bp, Homo sapiens
ccggttccccggcccacagtgggggtgtgcaaacccgagagaactggatgtctttggtggacttgggaaagaggttgctagaagcagcaagaaaagg

SEQ ID NO: 317515 - DNA, 97 bp, Homo sapiens
cttagtgaggctcagagatgcctgtaccgtgatgtgacgctggagaacctggcacttatgtcctccctgggttgatagatccacagactcaagtatc

SEQ ID NO: 317516 - DNA, 83 bp, Homo sapiens
ccacgctctcggaatcacgacccctccctgccatgtatccgcagggcagacatccgttgcagatctgatctcttctgaacacc

SEQ ID NO: 317517 - DNA, 89 bp, Homo sapiens
cttcaccaggggagatggcacaggaggctattgagggcacctacattgacaagaaatgccccttcactggtaatgtgtccattcgaggg

SEQ ID NO: 317518 - DNA, 83 bp, Homo sapiens
tcgcctccaggccaagagggatccttcacccgtgtctggacgtagacaagtttggcaacgagatcacccagctggcccggccc

SEQ ID NO: 317519 - DNA, 75 bp, Homo sapiens
cacacagtctactatcaccgacagagagcatcagtgatgtcacgtttggagcaggggtcagttacatcgggacac

SEQ ID NO: 317520 - DNA, 51 bp, Homo sapiens
ctcaactggaaccacattagaggtgttgaagcacaacgggtcatccgagat

SEQ ID NO: 317521 - DNA, 100 bp, Homo sapiens
ctgagcctgtaaaacgctgtggaaagtctgcactctttcaactggcagagggaaacaaaggacccatcgcaaatgttttccatgctgatctccaaagtgg

SEQ ID NO: 317522 - DNA, 75 bp, Homo sapiens
ccgggaggggcgaaggcgggcggcagaggcgatcagtctggatgtggatagtgaagctaagaaactattgggttt

SEQ ID NO: 317523 - DNA, 100 bp, Homo sapiens
tctgctcgcggttagcccgtcagtccctgctctgtgcgcgcctccatctgggccatggatgggccatcgaagacggcaatttggaggaaatggaagagga

SEQ ID NO: 317524 - DNA, 51 bp, Homo sapiens
aacccagcctgtttcacttcttggtgtgttttatggcccagaacatggtct

SEQ ID NO: 317525 - DNA, 101 bp, Homo sapiens
ctgatttcatcaatgtttgtcagcactagtatttcatgttgcacacccactcagctccgtgaacttgtgagaacacagccgattcacctgagcaggacctc

SEQ ID NO: 317526 - DNA, 113 bp, Homo sapiens
accagctcaagcagttcaccaccgtggtggccgacacgggcgacttccacgatctttaatctcatgaagtacgacagctacagccgcttcttaaagtctgacttgtttttaaa

SEQ ID NO: 317527 - DNA, 50 bp, Homo sapiens
aacagccaaggactgaggatggtacctactgtcaacaacgggaagtggag

SEQ ID NO: 317528 - DNA, 135 bp, Homo sapiens
atgcggaagatagacggcctgctgaatgagcacaagaagaaagtcctgaagcggctgtcgctaagcccagccctgcagcgagccatccagcaggctgtgggaagctccctgcagggggacctgcccaatgataaa

SEQ ID NO: 317529 - DNA, 50 bp, Homo sapiens
aaggccaagggcaagtgatttgacaggttactcaaatgagtcgtccagac

SEQ ID NO: 317530 - DNA, 96 bp, Homo sapiens
agatggtgcagaagatggaggagctgggagtgtccactcgccttccaccagcatggcaacgtcttcacagtaccgccagctgctcagtgactacgg

SEQ ID NO: 317531 - DNA, 100 bp, Homo sapiens
cagtatgaatctctgcccgcaacacatatcagaattctgcttggtcagaatcgtgatggcattgtgttcagcactgatgactattttcaccatcaagatg

SEQ ID NO: 317532 - DNA, 98 bp, Homo sapiens
tttcgacgacatcatcgtcttcgcctatgcctgccaggctgctgaggctgacccgcggctgattgagtccctctcccagatgctgtccatgggcttct

SEQ ID NO: 317533 - DNA, 75 bp, Homo sapiens
gatgacatgtccagaccaggtctcatgcttggtgcctggtgccaggtggaggaaccactgagtcaggagagcgag

SEQ ID NO: 317534 - DNA, 100 bp, Homo sapiens
gacctctggaaagctcacccaggaaaaatatgcaatcgtcccattgatatacagtattacatcattgaagtgaatgccaggctctctcgcagctctgccc

SEQ ID NO: 317535 - DNA, 100 bp, Homo sapiens
aactgggagcagtgtctctggatggctactttcatctctggaaggctgaaaatacactatctaaggttatcaatactctggctgaccatcatcatcgtgg

SEQ ID NO: 317536 - DNA, 50 bp, Homo sapiens
tttgacatgggttttgaaccccagctctattaccaggttttaaacttcgc

SEQ ID NO: 317537 - DNA, 75 bp, Homo sapiens
atggccgcggttcccgagttgctgcagcagcaggaggaggaccgcagcaagtgcctttgttccattgaatgttcc

SEQ ID NO: 317538 - DNA, 82 bp, Homo sapiens
ggagagcgcgcgggagcgagctcaaggcggcgcggcggccactgggcgcagcacccaggtgtccctggccagtgtccttcca

SEQ ID NO: 317539 - DNA, 85 bp, Homo sapiens
aggtggaggaggagggggaggacgagtatgtgaacatgcaggatcccgagatggacatgaagtcagtgactgaccgggcagcccg

SEQ ID NO: 317540 - DNA, 82 bp, Homo sapiens
cggagggggcggcggcagcgacggcagcggcggcggctggactaaacaggtcacctgcagggtgaatctgtaaaatatttcc

SEQ ID NO: 317541 - DNA, 100 bp, Homo sapiens
attctgcaagcaggcaacctgaatacagtggagttggatcacaggattgattttgaactcagagaaggccttgtggagagccgctattggtcagctgtca

SEQ ID NO: 317542 - DNA, 75 bp, Homo sapiens
atggcagcctcactcccagtagtttctgcatttagtgagataaggaaatgcttccagactgcacacttttactta

SEQ ID NO: 317543 - DNA, 50 bp, Homo sapiens
gcacgtggacgctgactcggaagtgcagggtgactatgaccagagcagga

SEQ ID NO: 317544 - DNA, 100 bp, Homo sapiens
gcctgcgcagctccggccgcctggctccccatactagtcgccgaataatcatgggccagactgggaagaaatctgagaagggaccagtttgttggcggaa

SEQ ID NO: 317545 - DNA, 100 bp, Homo sapiens
atctgtgaatgaatgcatggaagcctgaagagttgagagaaatcattgagaagacaagagagatggagcagaacaatggccactactttgatacggcaat

SEQ ID NO: 317546 - DNA, 50 bp, Homo sapiens
tgagagccttggatgtgaacattttccagtgcctgatcaactttctagcg

SEQ ID NO: 317547 - DNA, 88 bp, Homo sapiens
agcaatgcttgaggctccttacaagaagtgcaactgcagatagaagacctgactcgtaaactgcgcacaggagacctgggcatccccc

SEQ ID NO: 317548 - DNA, 80 bp, Homo sapiens
gaattttgccgatttcatgactaaccagtcaactttttaactgtcagtctttacacaaactgagtttgccagacaatgat

SEQ ID NO: 317549 - DNA, 100 bp, Homo sapiens
cgcggagtcttcggcgagacctaccgggccctgtctgtgccggccgtgagctgcggcaggacggctggaggtcccagtagggatggcacaatcagcgagg

SEQ ID NO: 317550 - DNA, 50 bp, Homo sapiens
gtggaacctttgaaagacatagggtgaaggcaaatgtttgtcccaggaga

SEQ ID NO: 317551 - DNA, 75 bp, Homo sapiens
ctcctccctggtggggcctgtctgggtgaagcccctctgttcccgatgagcagcaccagcagtaagagggctccg

SEQ ID NO: 317552 - DNA, 137 bp, Homo sapiens
cgcctcacagagcccgtcgtgcccaaggattggcagcaggagtgccagctggcaagcggtcctgcagacacagggtacacgtcagagacagagaaatcaaagttaacatctttgatatggctggacatcccttcttc

SEQ ID NO: 317553 - DNA, 127 bp, Homo sapiens
cttgcccgaggacagagatggcgagcgcccggattggggatgagtatgcggaggacagctctgatgaggagatagcagaccccacgttagctgaaatgggaaaaaacttgaaggaggcagtgaagat

SEQ ID NO: 317554 - DNA, 100 bp, Homo sapiens
gacaaggaagagaaagaacaaaccactcaagatcctgacttgaccaccgattcgggaactggagcctctcctctgtcacagtgacaatccatctcagctc

SEQ ID NO: 317555 - DNA, 75 bp, Homo sapiens
ccctcggcactaggcagcggaggagcccgaccgacccgatttggaggccaatcactgccaccttttatttccctg

SEQ ID NO: 317556 - DNA, 90 bp, Homo sapiens
caccaccatctcaggagctacttgatgacattggttgtttacattcagagctctatcaataagaggaatacatattacagtgaattcgac

SEQ ID NO: 317557 - DNA, 100 bp, Homo sapiens
cttcaggtgatgccaccaatccagacagaatgtacgaccttgttgctgttgtggttcactgtggaaggatcaatgtgactctaagaacaaatggatgaat

SEQ ID NO: 317558 - DNA, 100 bp, Homo sapiens
ggaccaggaggaggttttcaggaccaaaattgtggaaaagtcactctgatcatccgggaagcccacgggaccctcaggcgggcaggatgaacgactggca

SEQ ID NO: 317559 - DNA, 101 bp, Homo sapiens
ccaggtccagaagtatgatgactcctttgacgacgttgaccgcacactggatgaatggaagcatacagaaggtggtcatggcactaggagactacatgggc

SEQ ID NO: 317560 - DNA, 50 bp, Homo sapiens
gtcaatcagagcgtcctgtgcgaacatccagtcatggataaaaatgagct

SEQ ID NO: 317561 - DNA, 74 bp, Homo sapiens
atggccgccaacatgtacagggtcggaggaccaggaatcaccttcaagcctatgtcgtgaggctttggcagaaa

SEQ ID NO: 317562 - DNA, 82 bp, Homo sapiens
ctcacgtttcccttcctccatatttactggacagagtgctgtcatgtcaatccaaagaagcaaacaataggtaattcttgta

SEQ ID NO: 317563 - DNA, 75 bp, Homo sapiens
ctccacattgagagcaaaatctacaagatgatgcagggaggaggtcccaggtgtgacaccttcagcaggtctcag

SEQ ID NO: 317564 - DNA, 90 bp, Homo sapiens
gttctacgagaccctccctgctgagatgcgcaaattcactccccagtacaaaggtgagcgtgtaggagccttcactatggtctgcaaaga

SEQ ID NO: 317565 - DNA, 74 bp, Homo sapiens
gcatctgttctatcttcccatcataaaaaaaccattcctcaagaattttgtatccaaggcccaaaagtttgtta

SEQ ID NO: 317566 - DNA, 83 bp, Homo sapiens
tcgaggcaggagccctctcatggtgaacagcaactattatgtcatggacagagcgggatgccaccagcttgtccaaagggaag

SEQ ID NO: 317567 - DNA, 75 bp, Homo sapiens
cccagagatggtcaccttacctctgcaacctagcagcacccgttcacgactcagcagctccctcgggccctcctc

SEQ ID NO: 317568 - DNA, 100 bp, Homo sapiens
aatggactccctggctgctggagagttgaatgccagccaccagccatggcttcctgatttctcccgattccttccttctccctggagcggccgacaatgt

SEQ ID NO: 317569 - DNA, 82 bp, Homo sapiens
agggagtgctctgttcacggctccatcgctgttaggccgcccaataactccagtatacacggtggctccaaacgttcagaga

SEQ ID NO: 317570 - DNA, 80 bp, Homo sapiens
agaacttcattggcagaagttgactgagatcagaggccctgtgatgatcgtgtcaggaactgtggctgcaccatctgtct

SEQ ID NO: 317571 - DNA, 76 bp, Homo sapiens
ggaacagggctgcacacctttctgctttatctggtcagccccagttgatgctgacagcaggacccagtgttgccgt

SEQ ID NO: 317572 - DNA, 100 bp, Homo sapiens
gagctagctggatcctctaggcagggaccttggggccagcttgcggtaagaacttgcctttagaagatcctttggttcccatcagtgtctccctctcctc

SEQ ID NO: 317573 - DNA, 99 bp, Homo sapiens
cactgctctgctgtctcctgcaagaactggctcaagaaatttgcctcgaaaaccaagaggaagtactcaatggtggaccacccatgaaaggcttaacag

SEQ ID NO: 317574 - DNA, 75 bp, Homo sapiens
gaaacaaggcttccagtgccaaggtggaccttcaatcctgctgttctcactaaagcgaacattgtccgaagtgga

SEQ ID NO: 317575 - DNA, 100 bp, Homo sapiens
cgccgtgcaggcggccgtcagcaacctcgtccgggtgtcagctgtgatgcatgtttaaaaggaaattttcgaggtcgcagatataagtgtttaatttgct

SEQ ID NO: 317576 - DNA, 100 bp, Homo sapiens
ccagttctttggcttttactaaaaatggacgcctggcaaccaacttttgtctggtcctctgagccccagtgagagtttcctgaggtacctcacccttcca

SEQ ID NO: 317577 - DNA, 100 bp, Homo sapiens
cctcccccagggccccgcacagctcagccctggggagatggaagagtctgatcaggggcacacaggtgattatcctgaaccatccaggccaaataagcgc

SEQ ID NO: 317578 - DNA, 99 bp, Homo sapiens
caaatagttgtgattctctcagaattttttaataccacatggcaggaggcaaattgtgcaatgttctaatcttaggcgcttcaggcggagttggtactt

SEQ ID NO: 317579 - DNA, 107 bp, Homo sapiens
cacgcagcctggggactctgcctcgtgccgctgagcctggcgcagatcgatatggaatgtgcagatgtcccactattaactccaagcagcaaagaaatgatgtctca

SEQ ID NO: 317580 - DNA, 74 bp, Homo sapiens
gtccccccgttccctggaggtcctgtggaatgaaccttcaacaactagtactgcttcaaattatccagatgtgt

SEQ ID NO: 317581 - DNA, 100 bp, Homo sapiens
gcaaaagttgtgcattggcccgatcaagcctgacttctagccaagaatccggacaatcagatagttcaaaccagcaaggagatgcggacatcaaaccact

SEQ ID NO: 317582 - DNA, 76 bp, Homo sapiens
ggacgagaggatgcggagcccgcagaacctccacagtcaagaggacggttttgagcaaaattttggactgtgaagc

SEQ ID NO: 317583 - DNA, 90 bp, Homo sapiens
ttcggttgcacgtcacagctctggattaccttgcaccttatgccaaggctgcccaagcgccagaggtgacctatgaggcagaagagggct

SEQ ID NO: 317584 - DNA, 98 bp, Homo sapiens
caagagcttactggtgaaggaatgggacaagacccatctttatgcaaagccagcgttacagtaatgttccaggaaatcatcgagttccccatcctaaa

SEQ ID NO: 317585 - DNA, 100 bp, Homo sapiens
cgggagtgccgtgcgccgcagcccgggcccaggccccggcagcgcctgggacaaggggacggggcttgcgtcttgctgcgagcactggagcccctggaag

SEQ ID NO: 317586 - DNA, 98 bp, Homo sapiens
cccttcccaggtcctcaactttgaagagatcgactacaaggagatcgaggtggaagaggatgcattcagtctactagcatattcagatccctggaaca

SEQ ID NO: 317587 - DNA, 75 bp, Homo sapiens
aagaacccctgcatcgtgtgtgcggacgctgactgtcccctgcctgtgcccttcaccaatggggagatacagaag

SEQ ID NO: 317588 - DNA, 90 bp, Homo sapiens
gtccgctgggagggcgtcttccgctgcatccccatcttcggcatgtccttcgcctgccagtcggcgtctctggccgagcctctttttgtg

SEQ ID NO: 317589 - DNA, 78 bp, Homo sapiens
ggcgcctcattcgggtggagctgagccggagacagtacacctccagcatgagagccaaatacctcgccacgagccagc

SEQ ID NO: 317590 - DNA, 121 bp, Homo sapiens
gtggggatgaacattgacattgccagcatcgatatggtttctgaagtcaatatgcttcactagccagaaatctgatgatgactatgaagattatgcttctaacaaaacatgggtcttgact

SEQ ID NO: 317591 - DNA, 51 bp, Homo sapiens
ccggacttcctctcagaagaggaccgcggatagggacggggtttcaccatg

SEQ ID NO: 317592 - DNA, 100 bp, Homo sapiens
tggaggagctgtgcagccgcgaggaggcgcgggaggtgttcgagaacgaccccgagacgaggaacagctgccccctgggttcccttccatcgacatgggg

SEQ ID NO: 317593 - DNA, 75 bp, Homo sapiens
ttggagttaatggtctaatttatgataggaaatgggtcctgatgaatatgaagagatggaagaagaggaggagga

SEQ ID NO: 317594 - DNA, 100 bp, Homo sapiens
ctcatgcccagcagcagcaagcagaagctgtacattggaatgcgtttacagtcattgtaatggaagcaaaatacatgaaggaaaaactgttatttgtatc

SEQ ID NO: 317595 - DNA, 50 bp, Homo sapiens
gataaatctgaatggaagagtgagctgccactgcagagccccgccatgga

SEQ ID NO: 317596 - DNA, 100 bp, Homo sapiens
tggggggggtggggggagctagtggaagttactgccgcgccaccgagtccggaccggagactttggggcctaactagctcggcttattccaggggtgtgt

SEQ ID NO: 317597 - DNA, 96 bp, Homo sapiens
ggaaaatggctctgtcggtgtaaaaaagagatgaccaggatagtgaaaagtcaaaaccagcaggctcagatggtgagcggcggggggtaaagagac

SEQ ID NO: 317598 - DNA, 75 bp, Homo sapiens
gactacagctctggagtttaggcaacggattatcttacgattttatggaaagaactcttcttatgtccatggggg

SEQ ID NO: 317599 - DNA, 100 bp, Homo sapiens
gagagatatttgaagttgatgtggaaattgccaaacaatctgtgactattaagaccatgttggaagggccaaatccttgtagctgtcttcttgccccggt

SEQ ID NO: 317600 - DNA, 88 bp, Homo sapiens
agcttcgagaagcggccgcgggcctccttccacactattcgttatatgtcttgtcgttcaagacttgcaacactaaacgagaaattga

SEQ ID NO: 317601 - DNA, 83 bp, Homo sapiens
gatcgctgtgatcgtcacttgagctgttgcgcagccattggtacctgtattggggaaacatagcatacaagcaagaagcttac

SEQ ID NO: 317602 - DNA, 82 bp, Homo sapiens
cttcgagttcttcgtgctgctcaaggtgccctacgagacgctgaacaaacgctttcgcgccgctcagaagaacattgaccgg

SEQ ID NO: 317603 - DNA, 74 bp, Homo sapiens
agcctcagttggaagcagccgatccagcctgcggagcctgtggggcaggtaccattgttggatactggtgacat

SEQ ID NO: 317604 - DNA, 75 bp, Homo sapiens
ggcattctgatgggaacttgtgtgttaaagtaacagatgatttagttcctaaattaacaatggcgaaatgcaggc

SEQ ID NO: 317605 - DNA, 82 bp, Homo sapiens
cgggagttcaagaagaacactccagaggtactccacatcagcattctcaagactggagaagttaggcctcagacatcccaag

SEQ ID NO: 317606 - DNA, 75 bp, Homo sapiens
gccgccgcagcagctgatgctgagcgcggcgctgcggaccctgaaggatgtctcccgtgctaagctagcagctat

SEQ ID NO: 317607 - DNA, 90 bp, Homo sapiens
gaccaatgccagaggagcaacagctgagctgcccctcctggacctgatgaagctgtacgaaggcgccttcctgccgagttctcagtggcc

SEQ ID NO: 317608 - DNA, 85 bp, Homo sapiens
agggctgagcacaaagcccaaggggatggcaagtccaggagaaaagcagcatctgttatagcaaaatacccacacaaaataaaga

SEQ ID NO: 317609 - DNA, 100 bp, Homo sapiens
agataaagaaaagcagtggtccaggtggaagtgattttatcttctgctctttcttcttccacacatgcaagggaatgaaggagacaacttctatgtcgtt

SEQ ID NO: 317610 - DNA, 98 bp, Homo sapiens
attcatttttgatcaggagaaagaagacagccatcatttgaaaggactgaagcgggtcacgggcgggtttaactccaagaacagatgtgatgccagga

SEQ ID NO: 317611 - DNA, 75 bp, Homo sapiens
gagagcggcgcctgggacattcctggaggtaaattggcaggatgaggagcagcaaatcaaaagaggtgcctttac

SEQ ID NO: 317612 - DNA, 83 bp, Homo sapiens
ttatagatattcagaagaaggatgctgttaaaagaatgagtccctggaacgccagatgcgtgaaatggaagagaactttgccg

SEQ ID NO: 317613 - DNA, 109 bp, Homo sapiens
gcccttgttcccccaaatgtctgactctgactctcggactgagaaacgcaagtgtactaatggtcacttgatgtgcgctggctgttttatccacctactagcagatgcc

SEQ ID NO: 317614 - DNA, 87 bp, Homo sapiens
ccgcttctcagaggacgccttcaacaccaccttcatctccaccatcggaaatttgcgagaatccccgatttatcattgatggagcca

SEQ ID NO: 317615 - DNA, 82 bp, Homo sapiens
ttgtgtcttgttgcgggcaccgcagtcgccgtgaagatggcgtctaccagccggggtgagcccctccagactccgaatagga

SEQ ID NO: 317616 - DNA, 82 bp, Homo sapiens
gaggatgaagacctttatgatgatccacttctacttattaaatattacatgagcatgcagcataccttgtggatagcatgtg

SEQ ID NO: 317617 - DNA, 98 bp, Homo sapiens
cggcctggagctcccagggccgaggaatactcccccagttgcaagaggcgcaggaccgtggaagacttcaacaaattctgcacctttgtcttggccta

SEQ ID NO: 317618 - DNA, 90 bp, Homo sapiens
accagaaaagtagccatggtcttgaaggaatttattgaccagatgttggcaccatcatgggagcagcattgctggaggactggtgaaggg

SEQ ID NO: 317619 - DNA, 100 bp, Homo sapiens
ttcgcggtcggccgccaccaggtcaccctggaagagtcgctggccgaagacacgatgaggcgagtggtacgacagagcaagtttcggcatgtatttgggc

SEQ ID NO: 317620 - DNA, 124 bp, Homo sapiens
cgaaggaaaaggaggaattcgccgtgcccgagaatagctccgtccagcagaacccttaggagaaatcttgagagtggacagcaattgtgaagatcgccagagagttctgtgtttcatcaccgcc

SEQ ID NO: 317621 - DNA, 109 bp, Homo sapiens
gggacgggcagctagcgcgaccctgagccggcgcccgtggtccggccatggacgacctcgtggccgccgccgacagcggcatcagccctcgggccgtgtggcagttccg

SEQ ID NO: 317622 - DNA, 90 bp, Homo sapiens
ccgccactccagaaatccaggagattgttgataaggactaatggctgaaggataaatcaacatggcaactatgattccaccagtgaagct

SEQ ID NO: 317623 - DNA, 75 bp, Homo sapiens
atgccaagaagaatctagacagacaggcctttctagggctgttgataatcaggtgtatgtggccacagcctctcc

SEQ ID NO: 317624 - DNA, 80 bp, Homo sapiens
ggagctcgccgaggaggtgctggcggacaagcggcaggtatcctgagcatgattatcattcggaccctccggaaggacat

SEQ ID NO: 317625 - DNA, 110 bp, Homo sapiens
gtccctgtgtgatgcttttgatatctggggccaagggacaatggtcaccgtctcttcagggccaccagatgcctccacccagaaaggtcagatgtgggagagttccagag

SEQ ID NO: 317626 - DNA, 100 bp, Homo sapiens
tccatttgaattgtatcaattctttgtcaggcaaccggacgattcagtggaaagttccagggtcacccccgagaggacaacaggcatctggaagtgctct

SEQ ID NO: 317627 - DNA, 117 bp, Homo sapiens
gatagagaaactgttggaactgctttacaaagtattttagttgtcctttgtggagggtcttctcgaatcccaaagctacagcaactgattaaagatcttttcccagctgttgagctt

SEQ ID NO: 317628 - DNA, 100 bp, Homo sapiens
tgatttccattcagaaaaccgtatataacgagttcattctgccttcggagcgagatggatttctcagacggattcgggagattatccagcgagtggagac

SEQ ID NO: 317629 - DNA, 97 bp, Homo sapiens
aaaggtcccctgggtatagatcctcagaaaggaataggaacagcatatgaaggtcatgtcaggagccctaatttgtttagaactgtaatatgcacag

SEQ ID NO: 317630 - DNA, 100 bp, Homo sapiens
aactcctgtttgctggaggaaaactttgacttcacaagtttggactatgagtcagaaggtgtccttaagtttgctcgcttggtcaagtcctacgaagccc

SEQ ID NO: 317631 - DNA, 50 bp, Homo sapiens
gagaagatggcggaagcggagtacgcatagctgctaaattcatcactcat

SEQ ID NO: 317632 - DNA, 51 bp, Homo sapiens
ggtaccctttacatcgctgagaggactacttccagcaacccagtctcctgc

SEQ ID NO: 317633 - DNA, 100 bp, Homo sapiens
cacgagcaccagcctagagccagccaaggccacctttgatgccatttctaagacctacagctacctgacccccgacctctggaaggagactgtattcacc

SEQ ID NO: 317634 - DNA, 50 bp, Homo sapiens
cgtggtggagctctgcgtgtgttcgagaacttgtcttggacaattgcaaa

SEQ ID NO: 317635 - DNA, 100 bp, Homo sapiens
tgcagttcccaaggaggcttcaagacaaagggccccttacacaccagacagttcccagtgacctgacagcagaggagcgtcaagaactggagaacatccg

SEQ ID NO: 317636 - DNA, 75 bp, Homo sapiens
gcctaagagggcagccgcctgaaggaacgcgacggcggcgcccgcagaatatgacagatacctagcatctagcaa

SEQ ID NO: 317637 - DNA, 100 bp, Homo sapiens
ctcgaggcccattgcgtggagttcctgaagaagaacctgcgagccgacaacgccttcatgctgctcacgcagattcgggaactggagcctctcctctgtc

SEQ ID NO: 317638 - DNA, 83 bp, Homo sapiens
gaagaaggcgcatcactcccagctgcgcaaagcttgcgaggtggcgttaggttgcatgatggaatttgaacattacttcaaga

SEQ ID NO: 317639 - DNA, 82 bp, Homo sapiens
gtttttcctgtcgtacgtgggacaggccacgctgtccgtccgcagtaccgacgcctgcagcaattctgtggtgttcttggtc

SEQ ID NO: 317640 - DNA, 100 bp, Homo sapiens
agtgccttcccacagaattctgtgatgcccttgaccgtttctccagtttctacagccagactgtgtggagctgaaccggtctgcattcctggaaccagag

SEQ ID NO: 317641 - DNA, 135 bp, Homo sapiens
ctgcactacatccgcaagtacaaccgcttcgagaagcgccacaagaacatgtctgtacacctgtccccctgcttcagcccagatggctacctgtatgagcgtgaggccatcctggagtacattctgcaccagaag

SEQ ID NO: 317642 - DNA, 75 bp, Homo sapiens
cccgtctgtgcagcaggacatcaagttcttgccgttcaagaatgatatggaacctagcaaagctgttccactgaa

SEQ ID NO: 317643 - DNA, 100 bp, Homo sapiens
tcggagcctcccctgcagcgactcggaagattcgaggcggcgggggacaagtcggcgccccagagcggacgaggttgggataattcttcactattccacc

SEQ ID NO: 317644 - DNA, 100 bp, Homo sapiens
ggtggatgtggatgcaaacaaggttattcttaatcctgtaaatacgaatctttccaaaggagatgcccgcaaagaacagtctgaacttgatcaagatttg

SEQ ID NO: 317645 - DNA, 50 bp, Homo sapiens
cgccaccggccgcttctgtcctcggagagaaaccttacaagtgtacctgg

SEQ ID NO: 317646 - DNA, 83 bp, Homo sapiens
cggaaccagacgatgagacagagttgcgaccgcgcggcaggggatcatcgtcttgctcttcttttatctcagtttgtgggtag

SEQ ID NO: 317647 - DNA, 100 bp, Homo sapiens
ttaattattcagaatgctgcggttttccaagctggttcgatgcccagaactgaatgctgtgctccagctgtggcctcaccggtgctgaatagagaggaag

SEQ ID NO: 317648 - DNA, 75 bp, Homo sapiens
cgccggccgcatggccagagggttgggtatctcagatgaagacatcatcaacattactcttcctactggagtccc

SEQ ID NO: 317649 - DNA, 78 bp, Homo sapiens
gacccttgaaggaatcaaacagttttatattaatgttgagagagaggaagaaaggcgaaggttgaaaaatgcaataat

SEQ ID NO: 317650 - DNA, 100 bp, Homo sapiens
catgccgcctccgggaatgagaccccctccaccaggcattagaggtgatttctagcttgtctcatgccataggcaagcaaaaggaaaagatagagttgat

SEQ ID NO: 317651 - DNA, 83 bp, Homo sapiens
agagaaaaggcaacatcctgtcacaggccatgctctggcaaaaacgtgagcgagtgctgtgctttcatgggcctcttctttat

SEQ ID NO: 317652 - DNA, 51 bp, Homo sapiens
gctcttaggcgacacacctggaagcagtggtcatctccatcagaggcaact

SEQ ID NO: 317653 - DNA, 83 bp, Homo sapiens
atcatcattaaggacggaggcacggagcagctgatgagccagatccgggagacgcagcagctctgccaccagaccctgttcat

SEQ ID NO: 317654 - DNA, 101 bp, Homo sapiens
acgaggctgtgacgcaccttgatgaccagatcctgcagctcacaggtttccagccaatggattctggtcaactggtggagattggctgacaccctggagaa

SEQ ID NO: 317655 - DNA, 96 bp, Homo sapiens
cagaagatgaagaagatgatagcagtggagaagagatacagccgtatgtgaatggagctctgtacagcatcctttctgttccatccattcgtgagg

SEQ ID NO: 317656 - DNA, 82 bp, Homo sapiens
cccgacgaggagcgcggcgagatctacgtgccagaaaccaaggtgtatgttggtaacctgggaactggcgctggcaaaggag

SEQ ID NO: 317657 - DNA, 98 bp, Homo sapiens
caaatttttggatgatgatggatccatttctcctattgaggagtcaacatacagtctcgctgtgatgcccaggctggagtgcaatggcgtgattttgg

SEQ ID NO: 317658 - DNA, 80 bp, Homo sapiens
ggcagaggagtttacctacaaccccttcatgagagtgaggcatgaggatgtggcctgcatgctgcctgatcttgcctaga

SEQ ID NO: 317659 - DNA, 75 bp, Homo sapiens
agacatctacaaccttcgatctcctgacgagagcctgcagacagggggatttgcctgggaaggagaagtagaaaa

SEQ ID NO: 317660 - DNA, 50 bp, Homo sapiens
gtcgttctggtaacatccctggaaggctaataataagccagagatcgaag

SEQ ID NO: 317661 - DNA, 101 bp, Homo sapiens
caggtattgggagatgcacagctaagatgccaggaccacctggaagcctagaaatgttcatccatgagctcggatttcccacattacaacttcaggatgcc

SEQ ID NO: 317662 - DNA, 96 bp, Homo sapiens
cgccgggcgccgcgcctttggatctttgtagaatttgatggctgtaactggaagcaacactcctgggtaaaagttcatgctgaggaagttatcgtg

SEQ ID NO: 317663 - DNA, 76 bp, Homo sapiens
cagcgagtcggaggaggacgaggacttggaaggaaaattgcctaagaattatgacccaaaagttaccccagatcca

SEQ ID NO: 317664 - DNA, 75 bp, Homo sapiens
tccttcaacaaggtcttaatgacagatcaggataacacctatcctgagattttgcgttctaatttaggatcagtt

SEQ ID NO: 317665 - DNA, 83 bp, Homo sapiens
tattacaatcgcttgtacaaaggagagtttaaacagccaaaacagttcattcatattcagcaactgataaatttcaaacggaa

SEQ ID NO: 317666 - DNA, 100 bp, Homo sapiens
caacctttcaggacggaacccccagaaacaggcccggacctcctcctctaccacccccaatcgaaagattgtagggaatggaagtgaacagcagctgcaa

SEQ ID NO: 317667 - DNA, 98 bp, Homo sapiens
attatgaccaacagacagcagctttggcaatggaggtatgagcagcagcgggacaatcttgcccaacagtcattcaacatggaacaagccaattatac

SEQ ID NO: 317668 - DNA, 100 bp, Homo sapiens
ccatgcgcccggccttggcggtgggcctggtgttcgcaggctgctgcagtaacgtgatcttcctagagctcctggcccgcttgcgcgatctctggcctct

SEQ ID NO: 317669 - DNA, 101 bp, Homo sapiens
ggcgcggagggaagacgccctggtgctcaccaagcaaggcagttccggcgaggggggagcctcagcaggattgctgtgtgaaaaccgagctgctgggagaa

SEQ ID NO: 317670 - DNA, 100 bp, Homo sapiens
ctctgagccagcggcggcttccagcccgactgggcctgccggggctgccccgcgcacggtcccagagaactacttctatgtgccagacctgggccaggtg

SEQ ID NO: 317671 - DNA, 118 bp, Homo sapiens
aactgaagatggcaaagtagaaaaacactatctcttctatgacggagaatccgtttcaggaaagaaagacgagaatccaggacttgaatcgtatcttcccactttctgaggactactc

SEQ ID NO: 317672 - DNA, 108 bp, Homo sapiens
tgcattaacctgccgccgcccctcaccagacagatcgctgtcaaaaccctagaaaatgcatccgatgcagatttatggctcctgaacagttgcactgtaaaaaaccca

SEQ ID NO: 317673 - DNA, 100 bp, Homo sapiens
gtgtacagcagcgggcgccaggacaccgaggagaatatcttgctgggagtggacttttccagtaaggaaaggagtaccaggctcaagtggaagaaatgag

SEQ ID NO: 317674 - DNA, 104 bp, Homo sapiens
cgggaagactcatcggagcgtgtggatttgagccgccgcattttttaaccctagatctcggttatcaatactctggctgaccatcatcatcgtgggactgactt

SEQ ID NO: 317675 - DNA, 82 bp, Homo sapiens
acacaggtagccctggacggcattcagtgttttgggtcatcacactgaaacggtgttcaaccgggttttgccagggcctatt

SEQ ID NO: 317676 - DNA, 101 bp, Homo sapiens
tgaatcccctgtttgagaaaaggcctaagaattttggcattggactcgctgattcttgagaagagtcaaaactggagctctcaaaaaatggaccatattct

SEQ ID NO: 317677 - DNA, 83 bp, Homo sapiens
atggaatatgagaaaatagcagaaacagattttgagaagcgagattttcggaagttggaggtccccctccccactaagtgcct

SEQ ID NO: 317678 - DNA, 83 bp, Homo sapiens
cgccgtgtgcccaggcgcctggcgtccgcgtcggcgatccggggtctgggcgcggcgagactacgtctactttgagaactcct

SEQ ID NO: 317679 - DNA, 74 bp, Homo sapiens
tggagccggagctgggcgcggattcgccgaggcaccgaggcactcagaggagcatcctgaggttagcattacac

SEQ ID NO: 317680 - DNA, 100 bp, Homo sapiens
cgcgtcgagccagacagactgctgagcgactatattgagaaggaggtaaagaatctgatgttccagcagaaatccaggtgttaaaagaacccctacaaca

SEQ ID NO: 317681 - DNA, 98 bp, Homo sapiens
ctggcagtcaggacatattcgatgccatcgtgatggcggatgagagtgaactttgaggcgctgatcatcaccatgtcggtagtcgggggaaccctcct

SEQ ID NO: 317682 - DNA, 100 bp, Homo sapiens
cgctacggaccttaaaatacccgcaacagccccttcgtcccaagtctcctctgagcctccggcctccataagacccaaaacagatgacacctcttcccag

SEQ ID NO: 317683 - DNA, 90 bp, Homo sapiens
gctcagttttgcttccggtgggctcctgggagatgctttcctgcacctcattcctcatgctcttggcaggatgtagccaatcaaatgtgc

SEQ ID NO: 317684 - DNA, 82 bp, Homo sapiens
ggcgcgggactcaagtacaactcccggcacgagggggatatgagactttctactcggaatatcctgagtgttgcgtggatgt

SEQ ID NO: 317685 - DNA, 98 bp, Homo sapiens
gttggaagcagccgatccagcctgcggagcctgtggggcaggtacttcgtactggatttcgaggctggcatcctgcagtattttgtgaatgagcaaag

SEQ ID NO: 317686 - DNA, 82 bp, Homo sapiens
ccgagctggacccggaccggttttggatgtgaagttcatttccaatccgccctccatggtggcagcggggagcgtggtggcc

SEQ ID NO: 317687 - DNA, 100 bp, Homo sapiens
tcccagtctggaaagggtagtaaaagaggcggaacgtgcgcatcgaccccagtagcctgtccttcaacatgtggaaggagatccctatccccttctatct

SEQ ID NO: 317688 - DNA, 98 bp, Homo sapiens
actagactcaggagtcgtcaagaggctctgcaccctggatggaaagcaggcatggaagaggagatggttcgtgttacgcagtggccgtttaactggag

SEQ ID NO: 317689 - DNA, 100 bp, Homo sapiens
ctctcagcttcggagaatggagtcttccatcaatcatatctcacaggacggttcactgggaaacatcgatgacctggcgcagcagtatgcagattattac

SEQ ID NO: 317690 - DNA, 80 bp, Homo sapiens
agggattccgcctcgtggccatgaagttcctccggtgcctacaccaactaatgttacaattgaatcctataacatgaacc

SEQ ID NO: 317691 - DNA, 78 bp, Homo sapiens
tttgtcggaagaggaccggaggctctggatggaagccatggatggccgggaacctgccttcacctaccaccatatcca

SEQ ID NO: 317692 - DNA, 80 bp, Homo sapiens
caaattcatcaaggagctcatcaaggacgggaagtcactcataagcgcgctcaagaatgcagcagcttttttatgagaat

SEQ ID NO: 317693 - DNA, 101 bp, Homo sapiens
ggcgcatatcttcaaagcacctagtacctcctaccattgtcaactggcgaggattaaatccaccacacagggtgaaatctatctccatgacaacattcaca

SEQ ID NO: 317694 - DNA, 87 bp, Homo sapiens
gttcagcggagaataacatatcttcagtttcttgcagaacataaattattaggaaacattaaaaatgtggccaagacagctaacaag

SEQ ID NO: 317695 - DNA, 99 bp, Homo sapiens
gtggcggaagccttcgtctcccagattgcagcgagtaaccagctcataaatcacatcgaacagtttttggatactaatgaaacaccgtattttatgaag

SEQ ID NO: 317696 - DNA, 82 bp, Homo sapiens
tggctgccgtccccgctgctgtgcattggggagtggagcttggtttcgggatctcggtgctgcagacggcgagacctcctgc

SEQ ID NO: 317697 - DNA, 83 bp, Homo sapiens
acactacagctggaggacagaaacaagagggctgaaatctctttaatgatggagggaagcaggcagacgcgagtgtctcggcc

SEQ ID NO: 317698 - DNA, 100 bp, Homo sapiens
gtggacaccgtgcaccctggatgggatgggggaaggcgcacacatgcaggccacagtgggaaaagcaaggatgaacaatttgcagttacctcaacatgaa

SEQ ID NO: 317699 - DNA, 98 bp, Homo sapiens
aagctctgactgatgacagtgatgaaaatgaagaagaagatgcctttaccgaccttttttgtagcatcagatccaacagttaaaacagatcgactgtg

SEQ ID NO: 317700 - DNA, 75 bp, Homo sapiens
acagtggacgaggtgttggcggaaggttgtatcagagtaagatggacggtagctttgattgtgattgtggtgagc

SEQ ID NO: 317701 - DNA, 100 bp, Homo sapiens
ccccttgagcctgtcccaagccctggtgccaggtgtccatccccgtgctgaggttgtgaagatgagaaaagaagtgaagagaattcgagttttagttatc

SEQ ID NO: 317702 - DNA, 98 bp, Homo sapiens
ttgactacggtgaaatccccaactttccccgaagtacaggtccctttctagagataggagaagagagagatcgctgtctcgggagagaaatcacaagc

SEQ ID NO: 317703 - DNA, 100 bp, Homo sapiens
gggagctgtgcgcgcagccgggccaggtggtcgccccaggggatttgtcttggctgttactatgacacgggaagcaattgatgaatttcggcgttttcag

SEQ ID NO: 317704 - DNA, 75 bp, Homo sapiens
caaactgaaaacgcaagccaggctaaacagttggcagtggatatgctgctgatgaaatcactcactgcatacggc

SEQ ID NO: 317705 - DNA, 112 bp, Homo sapiens
gggttgtcacttttgagaaatcccagccagccagagcagtcatgatttcattggagaatttacaacaagctatagggaactttctagagggcagtcacaattcaacgtatat

SEQ ID NO: 317706 - DNA, 100 bp, Homo sapiens
gctgttcctattcggccatctttgctcctccctgcaactaactccattcttaattgcaaacggggattcagcgtccgatcctttggaacagggactcacg

SEQ ID NO: 317707 - DNA, 100 bp, Homo sapiens
gacaatgtgaatgccctgaaagatcgagcagaggcctatttgatagaggaaatgtatgatgaagatcctgataacttaagtgactctctcttttccggtg

SEQ ID NO: 317708 - DNA, 96 bp, Homo sapiens
tgtaacgtcccactggtttggacatattcctctcctgatctggcctcatctgttccagggaggtgggattgaggagaagtctgttggaacttggag

SEQ ID NO: 317709 - DNA, 88 bp, Homo sapiens
cggacggcgtggaccacatagacatttacgcggatgtcggcgaagagttcaaccagcctacaacacagcagtcccctcaggatgagca

SEQ ID NO: 317710 - DNA, 100 bp, Homo sapiens
catcctctacaccatcgacaccgaaaactccaccgtagcccttgccaaagcactgtgctcacctggggtgctgcaaactgtgaaatggtttttagagttc

SEQ ID NO: 317711 - DNA, 75 bp, Homo sapiens
aggccctatcaggacatggagtatgaaagacgactcctcagacccctgcacaattgagagaaaagcccgaagaat

SEQ ID NO: 317712 - DNA, 100 bp, Homo sapiens
gacactgcgtcagatagatgtgcacattttcaatgcaggttcaaggagtagttccagttccagagaggccacctgaacctcgagccatggatgaccctgc

SEQ ID NO: 317713 - DNA, 82 bp, Homo sapiens
ccagcgccctggcctccctcaccttggacacctcgcttggaattcagaaggagctggcggacatcactttagaccctccacc

SEQ ID NO: 317714 - DNA, 110 bp, Homo sapiens
cctggcgctcggcgttccttgtctgcctcgctttctccttggccaccctggtccagcgagctgagctgactgctgcccactttggaggaggcggtgggctccttcacaag

SEQ ID NO: 317715 - DNA, 80 bp, Homo sapiens
ccaagctcctgaaggagcaccagggcatcttcaccttcctctgcgaggaggaagagctgatccagtcagagaactcggcc

SEQ ID NO: 317716 - DNA, 100 bp, Homo sapiens
cagcgactcggaagattcgaggcggcgggggacaagtcggcgccccagagcggacgagggaatttgaagtactgccttgtaattcttaatcagcctttgg

SEQ ID NO: 317717 - DNA, 101 bp, Homo sapiens
cccacctccccccggagccaggctggtttcggaaatgcccttacagcagcaggtgcaatggatgagcttcatagtctggatccaagaaggcaagagttatt

SEQ ID NO: 317718 - DNA, 50 bp, Homo sapiens
gcggtcaccaagtacaccagctcgaaccaacaaatggaattttcttgagc

SEQ ID NO: 317719 - DNA, 98 bp, Homo sapiens
cggggcacaggtgagccctggctgcgcgcgcggcccctcctccccggcgcctcccaggtacttcaactcccgcccccacctgtgtcccgctggctcct

SEQ ID NO: 317720 - DNA, 74 bp, Homo sapiens
gccgccccctccggcgtgttcatgcccccgggaacccagtgacttgattgtaaaaatttacagagcggaatcat

SEQ ID NO: 317721 - DNA, 49 bp, Homo sapiens
gttctgatcactactgacttgttgagctggaagtcgagtgtgctactca

SEQ ID NO: 317722 - DNA, 76 bp, Homo sapiens
atcatccacggggtgctgcagatcctgttccaggagccatgtctgaccaggacgtttggaagatcatatccatgcc

SEQ ID NO: 317723 - DNA, 100 bp, Homo sapiens
caagaagaccattcagatgggatctttccggatcaatccagatggcagccagtcagtggtggagggttgtactgaacgctttgtgtccagcccggaggag

SEQ ID NO: 317724 - DNA, 82 bp, Homo sapiens
cccaatgagtggcacacagtctactatcaccgacagggtaagcttgatgattaccaggaacgaatgaacaaaggggaaaggc

SEQ ID NO: 317725 - DNA, 101 bp, Homo sapiens
ggttgagaagcctgtacctgttttatacttgcttttgcttcagcgttctgtggttgtcaacaggtcatgttggccccccttatttccattgctctgaaagt

SEQ ID NO: 317726 - DNA, 50 bp, Homo sapiens
cccatcactccaaggagagaagttgtacaatggtagatggagtgatgatt

SEQ ID NO: 317727 - DNA, 74 bp, Homo sapiens
gcagctttgcgggccctacaagatcaggttctcccatgggcaggtggtctctctggatgagctgcgccccttcc

SEQ ID NO: 317728 - DNA, 50 bp, Homo sapiens
atttgacaccctagagcgcctcacagatattcagactgacaatgatttga

SEQ ID NO: 317729 - DNA, 75 bp, Homo sapiens
cgctgaggccttaagtgaaagaagtggaaacacccctaactctcccagctccagtgatccacaagctcagaaata

SEQ ID NO: 317730 - DNA, 114 bp, Homo sapiens
caagctagactttcagcctgacactgtggccaacattcagcagcgtcagaagaagaagctcattcacacagaagacccatttaatgatgaacatcaggagaggcaagaggtgga

SEQ ID NO: 317731 - DNA, 82 bp, Homo sapiens
accaatggcagtgatgatggagctcagccctccacctccacagattggaaccaaccagatggctgtgtgtgccaaagcacag

SEQ ID NO: 317732 - DNA, 99 bp, Homo sapiens
ttgacgaagtggacatcacctgcagtcagtccagagctgcccaagtactattaatcccgtagatgcaatatatcaacctagtcctttggaacctgtgat

SEQ ID NO: 317733 - DNA, 100 bp, Homo sapiens
ctggcagtctaactttcttcatcctgtcatctactactatagatacctccccaccggaggttcgggaactccaggagcagctggcccgacagcaggtcca

SEQ ID NO: 317734 - DNA, 83 bp, Homo sapiens
cctgcagatggccaatgagaaagccctgaagcagaagggcatcaccgtgaagcagaagaggaatgtctgatcacagatacggg

SEQ ID NO: 317735 - DNA, 75 bp, Homo sapiens
ggagcgcgcctctttttggcttggggagctgcagcgttcgctggagagatttaccagcatgagaattaagaagga

SEQ ID NO: 317736 - DNA, 89 bp, Homo sapiens
cttttctgtaggccatttgtccagtgatgttcctccatcttacgttcaaactaaattttctaggctgaaagctgtctatgttccatttt

SEQ ID NO: 317737 - DNA, 75 bp, Homo sapiens
aaaagaagagttaaatgccctcaagtcgacaggggatgggaccctagagattaaaagctgctttgacccagcaac

SEQ ID NO: 317738 - DNA, 87 bp, Homo sapiens
tggctcttcaagcaccgccgggtgcgctttctgcacgagaccgggctggccatgatctatggacgagattgaggagctgcgggccga

SEQ ID NO: 317739 - DNA, 100 bp, Homo sapiens
ccgcgtccagcacctacgtcccgctgccgtcgccgccgccaccatgcccaagagaaaggtgaccagaagtcagcagcttcccagaagccccgaagccggg

SEQ ID NO: 317740 - DNA, 90 bp, Homo sapiens
ttgaggagagaaacaggtagcaaataatggcagcagagcatgtgccggtggtggtgtgcacattgagccccggtatagacagttccccca

SEQ ID NO: 317741 - DNA, 98 bp, Homo sapiens
ccgtatcagatccgccgacgactgcaagcagtttcgggaggagttcaacggttcatagtggcgtcatgcacgcagactcctgcaagttcccctaagtt

SEQ ID NO: 317742 - DNA, 74 bp, Homo sapiens
caatcagcgagactccgtgggcgtaggaccctccgagccaggtggtggagaaaaatgcagatccagagacaacc

SEQ ID NO: 317743 - DNA, 101 bp, Homo sapiens
gccatatgcttcttcgtgcagcagttcacggacatggagcacaacaggaacctggagctggttgaaaaaggcttcagtaacttgaagaaacaaattgaaaa

SEQ ID NO: 317744 - DNA, 75 bp, Homo sapiens
ggaggccctgctgggccgcgtggccgtttccgcagcatgatccgctgggcccccagcgcatctcctggaagagcc

SEQ ID NO: 317745 - DNA, 74 bp, Homo sapiens
gtaagaaacggttgtggatcttgaagctttggaaaggtgagaattatgaagatgatgacctagtaaattctgat

SEQ ID NO: 317746 - DNA, 110 bp, Homo sapiens
ccagagaagagccaaagtttgtatcatccatatgtgtcaaggcttgaagacggctgagcagacagccagcagatatgaggggtgagcttatggaaccaaggaagagctga

SEQ ID NO: 317747 - DNA, 82 bp, Homo sapiens
aagcccatgcgggaccagatcatccgcgtgaagcgcttagcagtgtctgcaaaaacgaatcttttcctacaacctgttaact

SEQ ID NO: 317748 - DNA, 90 bp, Homo sapiens
cggctgatttgccttaaactccctaaaatctccgcagctctggttcctgttgcggccggtgtccaaggcagctgcagatttgatggccta

SEQ ID NO: 317749 - DNA, 83 bp, Homo sapiens
caaaggcaagagtaacagcagcgccgtcccgtccgacagccaggcccgggagaaataacgaaggaggcccaacttcattcaat

SEQ ID NO: 317750 - DNA, 75 bp, Homo sapiens
caccccgcggccgcaccttcccgccttctcagagacgaggtcttgctacattgtccaggatggagaagtaggaat

SEQ ID NO: 317751 - DNA, 99 bp, Homo sapiens
ataccacccacttctgatacaaagtcagatactgcaacaggtatgggctacgtgagttcgtggtgattgcccctgctgcacacagtgacgctgttctca

SEQ ID NO: 317752 - DNA, 101 bp, Homo sapiens
tcattgtttgtcaccacaaaaaggacaggccaaagatgaagaggaagcctttctggattggagtgatgatgatgatgatgatgatgatggatttgatccaa

SEQ ID NO: 317753 - DNA, 50 bp, Homo sapiens
gcaggcgcccgagctcctcaaggattcctgccagctcccaggggctttgg

SEQ ID NO: 317754 - DNA, 78 bp, Homo sapiens
tggctcggaggatcacgtgggcgcctaactttgttcacttgacactgagtcagtgctgattctctcaaatagagcttg

SEQ ID NO: 317755 - DNA, 90 bp, Homo sapiens
ctgcgtggtagcggtgttgctgttgaaacaggaacagtctcttcaagtgatgaaatggctagtgatgagctgaaagagatgcggaaaaac

SEQ ID NO: 317756 - DNA, 100 bp, Homo sapiens
tggatatggtggcagtggggatggctataatggatttggtaatgatgcaggttacgggcaggacttgagtggcttcggacagggcttctcagaccccagc

SEQ ID NO: 317757 - DNA, 96 bp, Homo sapiens
tctgcctgctgcactgctttggtgtggatgaggtcaccattgtcaacattttgaccaaccgcagcaatgcacagagacaggatattgccttcgcct

SEQ ID NO: 317758 - DNA, 97 bp, Homo sapiens
atcgaaggagagcttgtcctcgagctgcagcagtagagactgaggccctgggaggagcggggacactgaggacctctctccaaattggcctctcaac

SEQ ID NO: 317759 - DNA, 75 bp, Homo sapiens
cagcctgcggagcctgtggggcagacccttcttatgactcagtcagaagaggagcttggggcaataacatgaatt

SEQ ID NO: 317760 - DNA, 123 bp, Homo sapiens
ccgggcgccatcatgctgagccggctcggggcgctgctgcaggaagccgtgggggcgaaaagcagcatctgttatagcaaaatacccacacaaaataaagagtggagctgaagctaagaaatt

SEQ ID NO: 317761 - DNA, 82 bp, Homo sapiens
aagatcctggtgtcgccatgggccgccgccccgcccgttggtacaatgactcttcttgcttttcacctaagttgaataagca

SEQ ID NO: 317762 - DNA, 100 bp, Homo sapiens
tccgtattgctatggttactggaaaaagtatgcagaccttgaaaagcggcacgacaacattaaaccatcagatgagaagtttcaggcacctgcaagagag

SEQ ID NO: 317763 - DNA, 100 bp, Homo sapiens
aatcaggaatgtgaagaaattctacaggtttacaaagatgagcaggtggtggtgataaaggataaatacccaaaggcccgttaccattggctggtcttac

SEQ ID NO: 317764 - DNA, 51 bp, Homo sapiens
ggctctgtagaattcgacagtatgccacccaactaatttggaagaatttcc

SEQ ID NO: 317765 - DNA, 75 bp, Homo sapiens
ttttcctccacctaccttcccgactctaagcgaaagacatgaggcctcagcctgaaatgaggttgttttgaggtc

SEQ ID NO: 317766 - DNA, 75 bp, Homo sapiens
agaactgaaatggaggtcagagcttcattacagaaggtcaaaatgcagatcttcgtgaaaacccttaccggcaag

SEQ ID NO: 317767 - DNA, 82 bp, Homo sapiens
catggccacccgtgcagatgaggacggagacacgtgacttaagagattaaaattaatttggttgctgttggttctgaacaaa

SEQ ID NO: 317768 - DNA, 80 bp, Homo sapiens
gctccctgcctactcccccaccggggatttcaggagccttcacgtaaatgggtccagtcatgcctcccagtaagaagcca

SEQ ID NO: 317769 - DNA, 87 bp, Homo sapiens
caacaccgacaaccccttcggagacaacaacctgctgggcaccttcatctggaataaggaaattggatacactcacatgaaaatagc

SEQ ID NO: 317770 - DNA, 73 bp, Homo sapiens
tcatgtctgcgagccaggattcccgatgctgtgggccctgagggaaaggatcacagaggcgctgagccgggat

SEQ ID NO: 317771 - DNA, 87 bp, Homo sapiens
ggcggcggcagcgacggcagcggcggcggctggactaaacaggtcacctgcagaaacgaaatcctgaagttcgacatgtagatttgg

SEQ ID NO: 317772 - DNA, 100 bp, Homo sapiens
gcgtctaggggagcgaaggctgaggtggcagcggcaggagagtccggccgcgacaggacgatatggctcgtggacagcagaaaattcagtctcagcagaa

SEQ ID NO: 317773 - DNA, 96 bp, Homo sapiens
actggaaatcagtttgctgaaattaatcaacgattcttgaagttgaagaaaaggttacaggaggttccagtggcatcgggaagtgcattgctatcg

SEQ ID NO: 317774 - DNA, 98 bp, Homo sapiens
gtttgagaggctggctgaggaggagaacaagaagttcaccatgtctattctcaagatccatgccagggagatctttgactctcgcgggaatcccactg

SEQ ID NO: 317775 - DNA, 75 bp, Homo sapiens
ggccggaggagtctcagagctgtcagaaagggtcaacatatttcactggcacctattcacaagcttgaagaagct

SEQ ID NO: 317776 - DNA, 75 bp, Homo sapiens
gcccggagccccggcccccacagatacagatcacttggattcagtcgagtttgctttgctccgtgggaactgcac

SEQ ID NO: 317777 - DNA, 74 bp, Homo sapiens
acatggcctccgctatgaaggcggaaagaccacagcaagattctttcattcgtctcctcctagcctgggggacc

SEQ ID NO: 317778 - DNA, 100 bp, Homo sapiens
tgggggagataatgtaactgtgtgcaaggataacagcatgctacaagtgaaaactgatgagaaactgaatgtgtctgatgagaatacagcaagttgccct

SEQ ID NO: 317779 - DNA, 100 bp, Homo sapiens
cggaccccttctccaatcagactgtgagatctggttggagttggagggtgagagaaaatgaattctaatttacctgcagagaacttaaccattgcagtca

SEQ ID NO: 317780 - DNA, 100 bp, Homo sapiens
cgggccgccacgctctcgggctctgcctcggaattcagggctgggaaaatttagccgagtcatcacatttggctactacccgggaaagcagccctcccga

SEQ ID NO: 317781 - DNA, 99 bp, Homo sapiens
aggttgggcattgggtggaggagcagaatttactacagcatgtgatttcagattgaaaatcttcaagagcagcttagagacaaggaaaagcagatgagc

SEQ ID NO: 317782 - DNA, 100 bp, Homo sapiens
ggattttcagctcgatacaatttcacacctggtattcaaaacctttgaccacatggcccgtcaggatgatgagaagagaaggcaggaacttgaagagaaa

SEQ ID NO: 317783 - DNA, 90 bp, Homo sapiens
ggtatataacctggacttcaatccacctcatgtacatgtcgaattgacataaaacagttgatagcaaagaagataaagttgacagcagag

SEQ ID NO: 317784 - DNA, 74 bp, Homo sapiens
aaaaacactatctcttctatgacggagaatccgtttcaggaaagaaactgatgatggtgttgatgatctgaaaa

SEQ ID NO: 317785 - DNA, 100 bp, Homo sapiens
ggtacctgtgaaccaagtgtttgggcaggatgagatgatcgacgtcatcggggtgaccaagggcaaaggctacaaaggctgactgtgctgtcctgattgt

SEQ ID NO: 317786 - DNA, 50 bp, Homo sapiens
gacatgaagcggaagcagcagcggaccagacgactgggtttggattcaga

SEQ ID NO: 317787 - DNA, 100 bp, Homo sapiens
ttgggccatttccgagaactcccatcagtttctgtatagtgtaaaagatctctcaaaggccttggttctgacagaaattggccccaaacgtgaccctgcg

SEQ ID NO: 317788 - DNA, 83 bp, Homo sapiens
ccgccgcctcgggaccggctgtatgattaggccacaatcttcaatgagtaaacatattcctagatagagtttcaccatgttgt

SEQ ID NO: 317789 - DNA, 100 bp, Homo sapiens
cagggagaaggaagaggtgtttgaaaagcattagtgccagcagtagttcccaagggctgtctcagccatccacccagacgactcagtatctgagagcaga

SEQ ID NO: 317790 - DNA, 100 bp, Homo sapiens
ttagtccacagtcttcctctatagaattgcctgaggttctgtccattgaggaggaagtggaagaaacagagtcttgggcgaaacctctcatccacctttg

SEQ ID NO: 317791 - DNA, 74 bp, Homo sapiens
gatttctacgacccggagcacccgacccctgagatctatcttgggatcccatggctttctttactgggctctgg

SEQ ID NO: 317792 - DNA, 100 bp, Homo sapiens
tgaggaaccatgtctccatccccgaccgccctcttctgtcttggacattacctgttgattcttgggcaaggcccagaatttggtggacatacttaaagaa

SEQ ID NO: 317793 - DNA, 75 bp, Homo sapiens
ttggcattttagatctaattcaaccaaggccacctttgatgccatttctaagacctacagctacctgacccccga

SEQ ID NO: 317794 - DNA, 82 bp, Homo sapiens
ctgcagaacaatataatgctgggcatttatcaactgctttccacttagattcagacctgtgtttcctgaggttataggcggg

SEQ ID NO: 317795 - DNA, 89 bp, Homo sapiens
caaaattgtggaaaagtcactctgacggttgatgatgaagcgccggccgtgtaaatgaagatcgggtgaggagcaggacgatgcccaag

SEQ ID NO: 317796 - DNA, 100 bp, Homo sapiens
ttgaaactggacaatgtattactggactctgaaggccacattaaactcactgactacggcatgtgtaaggactctcgttggggagatagagattcagaag

SEQ ID NO: 317797 - DNA, 151 bp, Homo sapiens
tctgccctctacacagcggcctcttcaggtgcagggaggaaatggaagcacgttctatgctggttccaccccaggaaccagtgaccttccgggatgtggctgtggactttacccaggaggaatgggggcagctggaccctacccagaggat

SEQ ID NO: 317798 - DNA, 100 bp, Homo sapiens
aaccatctgaccttttagaagaaaataagataaattcatcggtgaaattcgcttctggtaatactgtagtatttagcgtggactacaatgatgaactgga

SEQ ID NO: 317799 - DNA, 49 bp, Homo sapiens
gagccagaaggaagacaatgctgctcggtcaaggagtgtgatgactggc

SEQ ID NO: 317800 - DNA, 99 bp, Homo sapiens
cggagaatctgctgtcgcctgcagctgctcgcctgtctccgtcggaagggagcccaagctttgcagaggcccaaactcgtgtaaaattgaatttcttgg

SEQ ID NO: 317801 - DNA, 90 bp, Homo sapiens
ctagtaattttgatgacaggagttgcttttgtacagatgtcctgtgaagtcaacgagtgccgaaaaattgagagtcttgaaaacttgtat

SEQ ID NO: 317802 - DNA, 90 bp, Homo sapiens
agaggatgatgaactcaagggcttactggggcttccagaggaggaaactgagcttgatagagcccgagcccagcacattgtgccctgtac

SEQ ID NO: 317803 - DNA, 50 bp, Homo sapiens
gctacaaccagtggcagcagggtaatgttggctcaattaagaaacatcag

SEQ ID NO: 317804 - DNA, 96 bp, Homo sapiens
tgcttgttcagcaagctttaccaaaagctaaacttaaagaaattgtggcagaatctgacgttatgctcaaggcctgcttccgcgaggccaacatcc

SEQ ID NO: 317805 - DNA, 100 bp, Homo sapiens
ctgaaataacccttgatcctcctcctaattgcagggttctcatgtatcagccatcttctgtaagggtgcccagtgtgacttcggttgatcctgctgctat

SEQ ID NO: 317806 - DNA, 88 bp, Homo sapiens
accccgcgccggaccctgaggcagcgaggaaggaagccatgctgaagcaccgggactacgagacggccacactatcggacatcaaagc

SEQ ID NO: 317807 - DNA, 129 bp, Homo sapiens
tggatgcccttgatgggaaatcaaatagcctggatgattcaactgaagaagttcagtctatggatgtgaggtctttatcaccagtacctagaaatgctgaacactacaagcaaagacattcacacgggc

SEQ ID NO: 317808 - DNA, 88 bp, Homo sapiens
ctcagattggtgtctactacatcgatcacatcaacagttaaacccatccagagtaatggctgcggccttacccaggaccctgggggag

SEQ ID NO: 317809 - DNA, 71 bp, Homo sapiens
caccaacctggagtgggatgacagtgcgattgccccatctagtgaggatgcagaggccaggatgtgggccc

SEQ ID NO: 317810 - DNA, 95 bp, Homo sapiens
tggctgaagccacggctgggacaggaagccacagatctgtgccagttcagaagcaggcgagcctcttccctgatgaaaaagaagataacttgctg

SEQ ID NO: 317811 - DNA, 98 bp, Homo sapiens
ttcccctggccttctgtatcttcatggtgcggctcatcttcgagagactactgtcagaggatgtaggaatggacatcccctttgaagagggcgtgctg

SEQ ID NO: 317812 - DNA, 112 bp, Homo sapiens
ggaaaagcaaaacacgaagaggttaaggagctgtaccaaaggttacctgctggagctggtgagaagaaatttgtttgtccagaatgttcaaaacgctttatgagaagtgacc

SEQ ID NO: 317813 - DNA, 75 bp, Homo sapiens
cggacaggtggtgctcatcaagcaggagaaagaccgagaatcagagatcattgatttcttcctgggggcctctct

SEQ ID NO: 317814 - DNA, 102 bp, Homo sapiens
cagcagtcagaaggggaacggatctgtgtgcccacagctcctggagccccacaggatgggagctacagtttttgtccagcccctggacctggtgaagaaccg

SEQ ID NO: 317815 - DNA, 100 bp, Homo sapiens
gccagctcactgtccacctgcgatcccacacggccaacaaatggaattttcttgagcatgtttctaatcgttttgccattggaatccatggctcatgggc

SEQ ID NO: 317816 - DNA, 83 bp, Homo sapiens
tttaccaggaattactatgttcgggccgtcctgcatctcctgcgccatgtcagaaccggctggggatgtccgtcagaacccat

SEQ ID NO: 317817 - DNA, 50 bp, Homo sapiens
atgatcatctcagctgctggccctaagacaatgcagatcttcgtgaagac

SEQ ID NO: 317818 - DNA, 100 bp, Homo sapiens
tgccaggtgtcccgttaacgtctctgttagttcagagcttttccttccctccatgagaaagaagccagctctgtctgacggcagcaatcctgacggcgat

SEQ ID NO: 317819 - DNA, 90 bp, Homo sapiens
aaggcagccatagttcacaatgttgattctgatgacctcattagcatgggatccaacgacaggccgttgctccagggagaactgcaaata

SEQ ID NO: 317820 - DNA, 100 bp, Homo sapiens
tctagtaacccgcgaaatgatgggatagcgttgcaaatccttaaaagagtcttaacggtaatagcctgcagctggtgttttgagaagccctactgctgaa

SEQ ID NO: 317821 - DNA, 121 bp, Homo sapiens
cctgtgagcagtgggaaaaatggaccaacttctttggcaagtggacattttactggctcaagtgaaagaaaagatgttgtcccggttaagagtagtttccaccacttgtactttggcatgt

SEQ ID NO: 317822 - DNA, 100 bp, Homo sapiens
gtgatgactgccctgtagaatcagtgctgtgaccccgagtaacaacgcgcgcttgagttggtataaactcctgaagaatttgaaagacatattggctgac

SEQ ID NO: 317823 - DNA, 98 bp, Homo sapiens
gtaccaacccttacggcaagtccaagttcttcatcgaggaaatgatccgggacctgtgccaggcagacaagctcttcctcggaggcagcattgttaag

SEQ ID NO: 317824 - DNA, 98 bp, Homo sapiens
gattttcagctcgatacaatttcacacctgtgagaaagatcagtctaaagaaaaggagaagaaagtgaaaaaaacaattccttcctgggctacccttt

SEQ ID NO: 317825 - DNA, 75 bp, Homo sapiens
tgcttggctccctgatataagctgctttaaccctgatgagctgataagctatcagaggactcctgaaacctggag

SEQ ID NO: 317826 - DNA, 78 bp, Homo sapiens
gagtgtgataatttcaactgtgatagatccaatggcttaatttgtggaggaaggtgatgaagacgtatacggggaggt

SEQ ID NO: 317827 - DNA, 75 bp, Homo sapiens
ttcgactatgcagagacatgagatggtagccaacccctcagggactgttgacatttagggatgtggccatagaat

SEQ ID NO: 317828 - DNA, 75 bp, Homo sapiens
gcggccccctgttgtgttgctgcggagaggagcactagacatctactatgactgacaccgtgttcagcaacagtt

SEQ ID NO: 317829 - DNA, 90 bp, Homo sapiens
ggtggccgcactgggaccccggaatcccgcgcgctgcccacgattcgcttctgagtgtaatgttcaagctcagaaatgccttatgtggat

SEQ ID NO: 317830 - DNA, 75 bp, Homo sapiens
aaatcccggttttggctgcttaaactgctggttggacaccgaggaacagtaagagattatccagactttagccca

SEQ ID NO: 317831 - DNA, 75 bp, Homo sapiens
agtgagtccagctcctctgacagcgaagactccgaaacagtcaggatggctaaaggtgaccccaagaaaccaaag

SEQ ID NO: 317832 - DNA, 98 bp, Homo sapiens
gcgccgcctggctttcgtattcgttgttctcggcgggctgtggggcctccgcgccgcggccgttagtcatgtcggccttgttagatgacttggataaa

SEQ ID NO: 317833 - DNA, 100 bp, Homo sapiens
aagaacaccttcagttacgacaagaagaaaaacggcaacgtgtaatcagaaggcacagattagaggaaggaagaggtgaatctggattgggaaagtcgac

SEQ ID NO: 317834 - DNA, 50 bp, Homo sapiens
tattggaggaaaacacaccaagtcctgcatgaccccttgttcactatcaa

SEQ ID NO: 317835 - DNA, 100 bp, Homo sapiens
agatgaagaaacccagcttgatatgttggcaggagtagggctgattggagccattgtacagtgtcgggaacataccaggacactgagaatagtgtcatgt

SEQ ID NO: 317836 - DNA, 75 bp, Homo sapiens
gccggtggcggatggagcccgcgatggagccggagactctggaggcgcgaatcacctgtgcaggagacatggcgg

SEQ ID NO: 317837 - DNA, 100 bp, Homo sapiens
gaaatatataggaagatccagcagggtttatttgatgtccacaatgagaagagacgctcaaaccgccaagttaagcgaaaaaaatatacagaggacctgg

SEQ ID NO: 317838 - DNA, 87 bp, Homo sapiens
gggaacggagggctgcagcgcccaccctgcgccagagaccagataaagttctcctgaaaagaaagctgaacattcatctataaatca

SEQ ID NO: 317839 - DNA, 74 bp, Homo sapiens
ggcacctacgtctgcactactaggcaagacatctgtatagattctgcttcatccgtgagagagaataagcaacc

SEQ ID NO: 317840 - DNA, 98 bp, Homo sapiens
gatgaggggagcatgggtgccaaggagtcacggatcggattcctcagctacgaggaggcgctgaggagaggcatcatggaccgatctaaagaaaactg

SEQ ID NO: 317841 - DNA, 75 bp, Homo sapiens
agtgttttaatgcatcagtttgatgatgccgtcagtatcactgtggtagaagatgacagattattgaggttgtcc

SEQ ID NO: 317842 - DNA, 120 bp, Homo sapiens
gccatgcacctctgtgggggcaatgggctgctgacccagacagagcctcctcaacaagcccaagagtgagatgaccccagaggagctgcagaagcgagaggaggaggaatttaacaccgg

SEQ ID NO: 317843 - DNA, 100 bp, Homo sapiens
ttatgaagtattaattcttccactgatatctcaaaaggtgatctggacaaaggaacaggtatctcagcccaaacgtgcagaatgccccacaagattggat

SEQ ID NO: 317844 - DNA, 100 bp, Homo sapiens
ctgcaccgcgcgggacaagtcgccggcggcgcccgacggagcagctgcaggactcatgcacacgttcaatgcccacgccgccactgacatcacgggcttc

SEQ ID NO: 317845 - DNA, 75 bp, Homo sapiens
aaaagaacaagaagtcttaccctcaggtcaaagtctcgtctacagaggactggtctttcaatagcaagttttcac

SEQ ID NO: 317846 - DNA, 83 bp, Homo sapiens
tttttatcagggcaagctgtgttccatggcagggaacttttggcagagctcccactatttatgtgaagaaccagctcagtggg

SEQ ID NO: 317847 - DNA, 83 bp, Homo sapiens
cagacatggacccctcgcgagccatccagaacgagatcagctccctcaaaggctgtagcaaggtgctgctgaggccacggacg

SEQ ID NO: 317848 - DNA, 82 bp, Homo sapiens
gcggaggcggcggaggccagggaggaagatgtcgtaatgagcgatgatgattattctccaccgtctaagagaccaaaggcca

SEQ ID NO: 317849 - DNA, 100 bp, Homo sapiens
cctactcattcatggaaagtaggagacaagtgtatggcagtctggagtgaagatggacaactgaacctccattgaatactccagaaaacagggaatatac

SEQ ID NO: 317850 - DNA, 89 bp, Homo sapiens
tgccggcgctgctgagtttcttcatctacaacccgcgcttctggccgcgggaaggagaggtgatggcatcagctgagaagggaaggaag

SEQ ID NO: 317851 - DNA, 75 bp, Homo sapiens
gttactcaaagatctgtttctccatcacctgtgcctgaaaggaaacagattcattgtctgtctgaggatgagtta

SEQ ID NO: 317852 - DNA, 100 bp, Homo sapiens
aagtactcgccggacccggtggtcgtccgcggctccggtcacgtcaccgtgttgagataagtcgaagagtgactctggaaaaactccctcctgtcctcgt

SEQ ID NO: 317853 - DNA, 82 bp, Homo sapiens
ccccacagtgccctgatcctggacgtggcctgtggcacaggcctagtggctgccgagagatggggtttcgtcatgttggcca

SEQ ID NO: 317854 - DNA, 74 bp, Homo sapiens
aaagagcagaggcggcggctggaggagttttatgtgctgaaagagttggccagatgactaagacatataatgac

SEQ ID NO: 317855 - DNA, 75 bp, Homo sapiens
tgtgtactttgccctcagcatctcccttcatgtctgggtcatgctgttcgctgatgtggtcctgctctgtcccag

SEQ ID NO: 317856 - DNA, 96 bp, Homo sapiens
ggcgcaaacaagccaatcccaggaggaaaaacggtaagaagagttcctgggtcaagtggtcaccttcataaaaccgaagacggggactgggagtgg

SEQ ID NO: 317857 - DNA, 90 bp, Homo sapiens
gggccgggaggggacggccgccggagccgcgaggccaaggcgccctgcgtccggcagaggaggcgagcatcccgctcaggtgatgaggaa

SEQ ID NO: 317858 - DNA, 100 bp, Homo sapiens
cttggagagcagcggcggcggcggcaccccgggcgcgggcaatttgcatatttctccaaagaaccatccagaacctgagcagcctgtcttcagacagaga

SEQ ID NO: 317859 - DNA, 96 bp, Homo sapiens
tggaagatgaggaggtcgctgagagctgggaagaggcggcagacagcgggatttgcttggaacggtagaagaaatccttccaagcctctcagaaaa

SEQ ID NO: 317860 - DNA, 90 bp, Homo sapiens
actgtgactggactgttagagggatccgtggagaggaggccaggacacctggaagccgggaaatggatcacctgctgttaccagctacca

SEQ ID NO: 317861 - DNA, 90 bp, Homo sapiens
cggtggcttcctttccgccactgcccaaactgctgaagcagctcccgcgaggaccacccggtaacttgggtttttactcctgtaacaact

SEQ ID NO: 317862 - DNA, 87 bp, Homo sapiens
aaaacaaaattctgaactcaggacttggcaagtgaggctccaggttgggctctatgctgtgtaccttctggactggctcagcgtttt

SEQ ID NO: 317863 - DNA, 82 bp, Homo sapiens
gagcccaaggcaattgatcccaagttgtcgacgaccgacagggtggtgaaaggattcttactacagatttaatgaccttaac

SEQ ID NO: 317864 - DNA, 88 bp, Homo sapiens
tactcagagattatagggagcatggctccagtggctgttggataattatgaaacagcggaaggtgtgagtctccccagaagttctctt

SEQ ID NO: 317865 - DNA, 75 bp, Homo sapiens
tgacaagtgccaaaaatggataccagccagcctcatggcggtccgagcttcgttcgagaacaactgtgagatcgg

SEQ ID NO: 317866 - DNA, 100 bp, Homo sapiens
caaatcatccgagacatgattggaccggaaaagactttgctcttagaacaagctctggtgattgaggaacagctgcgccgggctgcttacttgaacatgt

SEQ ID NO: 317867 - DNA, 98 bp, Homo sapiens
caatcatcttacaaaactggaaactgaggcatctaatatgaaggtggtgtaaattggtccaatgtaacttgccaggcaactcagaaaaaaccttggat

SEQ ID NO: 317868 - DNA, 89 bp, Homo sapiens
ggccgagggtggccctaggggcagcgagcaagacagcaagcaggttttttggaacgaagtggatgatgttcctcgctgtgggcatctac

SEQ ID NO: 317869 - DNA, 100 bp, Homo sapiens
ttagaagtggtgatgcaagaagtttctaggaaaggccggacaccagatctgactgcagccatgagcagcaatgagtgcttcaagtgtggacgatctggcc

SEQ ID NO: 317870 - DNA, 100 bp, Homo sapiens
gctgccgccgccgcgggagccgctgcccgaactcccggcccgaactccaggatgaagatgagctggattcccacaccatggtgaagactagtgtggagag

SEQ ID NO: 317871 - DNA, 75 bp, Homo sapiens
ctccgaaccagcatccccaccatcaacatggagaacaagaccacgtggctggtgaaactgcgtgctgtaagctgg

SEQ ID NO: 317872 - DNA, 100 bp, Homo sapiens
caagctgtcatcacaaaagagttgattgaaattatctctggtgctgcagctctgccaaaaagcaaatggatttccacctgacaaatcttcgggatccaag

SEQ ID NO: 317873 - DNA, 100 bp, Homo sapiens
ctatggatgatcgagaggatctggtgtaccaggcgaagctggccgagcaggctgagcgatacgacgatgaatttcctgaaataaaccgagcctcaattcg

SEQ ID NO: 317874 - DNA, 98 bp, Homo sapiens
gtggatcacacgcgccggctgctgctactactaccactttgggctgatggcaactggttgcactgctgtgatccatcctcatctcctaaagatgcatc

SEQ ID NO: 317875 - DNA, 100 bp, Homo sapiens
atcttatgatactcgagtatatatctgggatccacataatggagacattctgatggaatttgggctccttctcctgaaaaagccgaggaggagagtgaga

SEQ ID NO: 317876 - DNA, 51 bp, Homo sapiens
gcctgcagagcgcgcagtacctccgtcacaatatggagcttccgtttctgc

SEQ ID NO: 317877 - DNA, 75 bp, Homo sapiens
cagttagaacagataactggcaaaggtgcttcggggacattccaggtttgttgataagccggggcccttcgtggg

SEQ ID NO: 317878 - DNA, 74 bp, Homo sapiens
tatagggaaacctgggggctccctggacaactccgagcaggtcagtactgtaccgaggatgtggacgagtgcca

SEQ ID NO: 317879 - DNA, 109 bp, Homo sapiens
gcggcaccgcggtgcgcaagcgcaaccgtcggtgggtcggggatcggtcgcctgagagggctgggttacgacccctacaaccctgagctgcccaagccccccgcgcaga

SEQ ID NO: 317880 - DNA, 90 bp, Homo sapiens
cagccctttgatctctgctttgggggccgaaggcagttctgcaagaggagctattctgatcttgagcaactttagaggtggcagatgcca

SEQ ID NO: 317881 - DNA, 100 bp, Homo sapiens
ctacgcccgggctggctcctttaccacaaaggtgcacttacagagtgctacgatgaactggggaacagatatcagcttccagtgtattgcttggcaccgc

SEQ ID NO: 317882 - DNA, 50 bp, Homo sapiens
ttcattgcagaattgctgcctgacaaatagggccagatttgagtgtgtga

SEQ ID NO: 317883 - DNA, 101 bp, Homo sapiens
caggcgtgcgcggacggtgtgcgggttcaaaccttgtactactcagctgatcacaagctgcttgatgggaacctactagatggacaggctgaggtgtttgg

SEQ ID NO: 317884 - DNA, 100 bp, Homo sapiens
gccctgaatgcaggttcctatgcgtcactaggtctccaggaaacctagagaaaaaccgttatggggatgtaccctgcctggaccaaactagagtgaagct

SEQ ID NO: 317885 - DNA, 100 bp, Homo sapiens
cgcctacgccatccagctgtgcatagacacgaatgcagagtttgagtccagatcccaaagcccagtacacaagtatctacggagccctcaagaaaatcat

SEQ ID NO: 317886 - DNA, 74 bp, Homo sapiens
ccaggctcttcaggatctgctttcagagtacatgaacaacaataatccagaatggctactctgatctatgttga

SEQ ID NO: 317887 - DNA, 100 bp, Homo sapiens
gaccctggcctcttgggatgcaaagattgggtaactcaaggcgtccctggagtacactgaggataagtgtttgagaaatgctgtctgaaggaatgaagtc

SEQ ID NO: 317888 - DNA, 105 bp, Homo sapiens
cttacaacatggcagacattgacaagtgaatctggattgggaaagtcgacattaatcaactcattattcctcacagatttgtattctccagagtatccaggtcct

SEQ ID NO: 317889 - DNA, 75 bp, Homo sapiens
ctactggaacctgagatgttaatgatggcagtacagtcagatcaatgagctgagcaatgttcctgttcctgtcat

SEQ ID NO: 317890 - DNA, 100 bp, Homo sapiens
gaaacccacaggaggcaaccacactagtttaggagctgacatggacccaaatcctcgggccgccctggagcgccagcagctccgccttcgggagcggcaa

SEQ ID NO: 317891 - DNA, 90 bp, Homo sapiens
gggcaatccgggcttgcagacgagggagtgcatccgccccaacccttttccccctcgtctcctgtgagaattccccgtcggatacgagca

SEQ ID NO: 317892 - DNA, 83 bp, Homo sapiens
agcatcctgacatcgaaaacccggacctcgcttacctgcatgctggtgaaagacccctgacaaaagacaatcatcttctgggt

SEQ ID NO: 317893 - DNA, 75 bp, Homo sapiens
ttttgcctttgttgattaactggacaaattcaggttcatcctaagttccactataaacaggctcatgactcgggc

SEQ ID NO: 317894 - DNA, 75 bp, Homo sapiens
caaagtggatgaggtgaagtccacaatcaagttccaaatgaagaaggtgttatggtcgtgcattaaaactgatgt

SEQ ID NO: 317895 - DNA, 95 bp, Homo sapiens
gggcctcgccatgtcctgctgcccggtgtaatggataggtaacagagaagacctcgtcccttcctagtcagggcatcagcatgactgagtgcttc

SEQ ID NO: 317896 - DNA, 90 bp, Homo sapiens
gacagtaactgaacattggtctaaagtctttccaaaaggtcaaggttcacaagaaaaggcgacggcggattgacagaagtatgattggag

SEQ ID NO: 317897 - DNA, 100 bp, Homo sapiens
ccagcccgccgctgcgcccgacgctccctgtctgggaccttctccctgcctggacccctactattgcaacaagactggattatggacagaacttggaaat

SEQ ID NO: 317898 - DNA, 75 bp, Homo sapiens
cttgaagggccattagacctgataaattatatagacgttgcccaggccataggaaaaggatacagagtagagttt

SEQ ID NO: 317899 - DNA, 100 bp, Homo sapiens
cacccagcagaagaaaaacaccaaactctctagcaaaaccactgctaagttatccactagtgctaaaagataaaccacataatcctatggtaaatgctgg

SEQ ID NO: 317900 - DNA, 90 bp, Homo sapiens
gcggcgcccagtggcgtccacctgctcgtccgcagaggattactacagcatcccatttcccacacccactactccgctgactgggaggga

SEQ ID NO: 317901 - DNA, 82 bp, Homo sapiens
cccgcctccctggccggggcgcagttcggaggttcagcacaggaagtcctggagaacctgaaggaccgctggtaccaggcgg

SEQ ID NO: 317902 - DNA, 83 bp, Homo sapiens
ggcagcggtcccccctcctcacccgaacatcagggccctccagactcaggcgccccaacatttgatacaaccaagtcggatgg

SEQ ID NO: 317903 - DNA, 75 bp, Homo sapiens
taggaagaatccactgatagaaatcatttccatcaataccgggaacttgaacatcagagaggagcccttatgaat

SEQ ID NO: 317904 - DNA, 75 bp, Homo sapiens
ccgaggaggaagacgaatcgttaaacatctgaaagggtcagactcggtgaaatacctggagtgctcagctctcac

SEQ ID NO: 317905 - DNA, 98 bp, Homo sapiens
caaattctcagtaagatcccagatgagatcaatgacagagtgaggtttctgcagacaatcaagcacagttggtggatctgaaatctgaactgacagaa

SEQ ID NO: 317906 - DNA, 73 bp, Homo sapiens
gcaaagctcctgagaaacatgccagggaatttaatagcaagcctggctcattctagagctggtatcccagaag

SEQ ID NO: 317907 - DNA, 75 bp, Homo sapiens
ggaaacacctcaggacacggcctacaacaccaagagcttgatggaccagacaaataggatgatggctgcccccac

SEQ ID NO: 317908 - DNA, 101 bp, Homo sapiens
ggctctccgccgtccccagccctgcctctccctgggctctgggaacctcgagtggttggataagagcaagtccagcttcctgatcatgtggcggaggccag

SEQ ID NO: 317909 - DNA, 83 bp, Homo sapiens
ctagccaccgctcctcgcaccctgagcgctgggccacctcgtcccagctgacagctctgacaactctgatttggaagatgaca

SEQ ID NO: 317910 - DNA, 74 bp, Homo sapiens
ggtgaaaaatatatccgcagggttcggatgagaccagatgactttgaagaagccaaggaaattttgacaaagat

SEQ ID NO: 317911 - DNA, 100 bp, Homo sapiens
actgcgccgagctgcacgtcctcgaacgcgaggccaacagccccgctggcgctacgtacatctttgggaaaagtggtgggcttatcctctacacctggcc

SEQ ID NO: 317912 - DNA, 101 bp, Homo sapiens
tgccctctgaatctttgtgtttggctgcccaggctcgcctcgactccaaatggttgaaaacagatatacaggacgtgtttagctttcaagtgtctcctaat

SEQ ID NO: 317913 - DNA, 82 bp, Homo sapiens
aagaagttgcgaaggatccccaacggggaggccaacgtgaagaaaggctgggaggcggcagaatgcagccagaggagggcac

SEQ ID NO: 317914 - DNA, 100 bp, Homo sapiens
gaggctctgggaaactcagcctgtgaccccagcgtgggtgaagataggatcaagatggccatgtggcagggctgtgtggttccggtgctggtgccgtgga

SEQ ID NO: 317915 - DNA, 60 bp, Homo sapiens
catgtctactcgcaggcgtcatgttgggaatcgggtcaaaatgcagatcttcgtgaaaac

SEQ ID NO: 317916 - DNA, 83 bp, Homo sapiens
cgtcaccgccgcccccccagacaagatggacaccgcggaggaagaggttgacggatatattcagacgttacgacacggatcag

SEQ ID NO: 317917 - DNA, 75 bp, Homo sapiens
gagacgtgtgctacatacgggctgaatgtggagagggtcttccaggacgctattgacctgaaaagtggttctgga

SEQ ID NO: 317918 - DNA, 90 bp, Homo sapiens
ggccatctgcttaacccttggctccaccataaggcactgggactcggatttctctatctgatagagatgtgtcgaccctgcagaatgact

SEQ ID NO: 317919 - DNA, 88 bp, Homo sapiens
gctacgcccagcctacccctgccactgccgctgcctacagtgacagcttcagaggatgattccgaagaagacggagaccataacagga

SEQ ID NO: 317920 - DNA, 50 bp, Homo sapiens
atcatgaaggacgtgcccgactggaaggaaagagccagacttctcagagg

SEQ ID NO: 317921 - DNA, 51 bp, Homo sapiens
gatgattggcagagacccactgtctgtcatcaggtactcacaggttgactg

SEQ ID NO: 317922 - DNA, 50 bp, Homo sapiens
cgggagctactatgagcacgtgaagtctatccagaagttaaaggagagat

SEQ ID NO: 317923 - DNA, 75 bp, Homo sapiens
ttaaagctaaagacatagttcctggtgatattgtagaaattgctgaactgataaatttcaaacggaagagagtgg

SEQ ID NO: 317924 - DNA, 75 bp, Homo sapiens
gccggcacagctccgaccgcgaggacgacttctccgcaggtgctggagaatctggtaaaagcaccattgtgaagc

SEQ ID NO: 317925 - DNA, 75 bp, Homo sapiens
ccgcgaagtcatggggctctgtcgggaagatctgaaaaccatgagtgaacgcctcaagaataggtactacgtgtc

SEQ ID NO: 317926 - DNA, 100 bp, Homo sapiens
cacctgcaaggattcaaagaaggtgggtgtttctctatgagaagggctaccagacctcgagcggcctcatcagcagtgtctctgtgaaactcaagggcct

SEQ ID NO: 317927 - DNA, 90 bp, Homo sapiens
atggaaaatcgcttggttaaaacctgacacttttaacagctctgagaaagtggccgaaagaaaagaaactgaattttttagctctttacc

SEQ ID NO: 317928 - DNA, 60 bp, Homo sapiens
cacagctctgcggcccaggcccaaggttctcaacaggaggtgtgtagaagcggcggtgat

SEQ ID NO: 317929 - DNA, 48 bp, Homo sapiens
tggagcaattaaagccactgctttcgatgtgactacccctgaatctac

SEQ ID NO: 317930 - DNA, 50 bp, Homo sapiens
cgactatgacctcgagtctgacatgcaggttcaggagaagtggcacctgg

SEQ ID NO: 317931 - DNA, 98 bp, Homo sapiens
gtaggtagtgaataccgggagtcctggccccctaactcaaaggagaaggcagagcccccccaggctatgaatgccctgatgcggttgaaccagctgaa

SEQ ID NO: 317932 - DNA, 100 bp, Homo sapiens
ggcgggcggtgagcgcccatatgggggttctggagagcggggtgtgggtctgcgggccaggcatcgacatccgcaacgactatcagcagctgaagcgcct

SEQ ID NO: 317933 - DNA, 100 bp, Homo sapiens
ggaacaaagtcatcaagctagtggacatcacggacatccagaagatcgaacggttggaagtaagcagccttgcccaaacatccagtgcagtggcctccag

SEQ ID NO: 317934 - DNA, 100 bp, Homo sapiens
ttgtgggtgctgctgttctgggtgcctgtgcctcaggggatttcgcttctgtacagtttttcacagcatatggtcctgattatgtgctggaaatcacgcc

SEQ ID NO: 317935 - DNA, 100 bp, Homo sapiens
gtgcgctcagcaggacgtgggaggctccggcttcaagagccaaagaaatgtctgaggaccaggaatgtttcaaagtctctggaaaaattgaaagaattct

SEQ ID NO: 317936 - DNA, 100 bp, Homo sapiens
ctgttgatgctgtaattgctgaacttaaaaagcagtctaaacctgtgaccacccctgaagaaattgcacaggactcagtaatgttgaacggctttggcac

SEQ ID NO: 317937 - DNA, 90 bp, Homo sapiens
gttggcgctgaggacccggacagccggcatcttccttgacttgatgcacctgaagaaacctgggggctttgacatatccttgttctacag

SEQ ID NO: 317938 - DNA, 73 bp, Homo sapiens
tgatatgggagtataatgttgtggctattattcgtgaattgggtggtattccaattgttgcaaacaaaatcaa

SEQ ID NO: 317939 - DNA, 95 bp, Homo sapiens
gacacacctccattggatttaaaagacagtcctcgtcagcactgactttcagctatggaatcgaaattccgggtagatatgcctggctcaggcag

SEQ ID NO: 317940 - DNA, 82 bp, Homo sapiens
ggtgattctctgctagatgttgtggttgaaaataatctagatattgatggctttggtcttgggcgtctttggtactggcttt

SEQ ID NO: 317941 - DNA, 100 bp, Homo sapiens
aaaggactcttctaaaaggatatgtgttgctaatacccatctttactggcatcctaaagaatgtgaggaaattatcaggaaaggaggtgaaacatctgaa

SEQ ID NO: 317942 - DNA, 75 bp, Homo sapiens
ggagaggagtttccagaccctcagaggcaaagaaagctcatcacagctcacaacctgatgttgttgttaaacgac

SEQ ID NO: 317943 - DNA, 100 bp, Homo sapiens
gccggacccctgctctgaccgcagcttaagagttggacagtggaggaccttcagaagaggctcttggccctggaccccatgatggagcaggagattgaag

SEQ ID NO: 317944 - DNA, 98 bp, Homo sapiens
tggaagtgtcaccctaaaaatcttaccaagttatagagataccattactcctcaacagcatctctggaagttgatggtagaagaatccgatttactgg

SEQ ID NO: 317945 - DNA, 75 bp, Homo sapiens
tcctcgctgtggggcaatccgggcttgcagacgaggcacttcgtcttagtaacatggccatggggaagacaacca

SEQ ID NO: 317946 - DNA, 74 bp, Homo sapiens
aggtcctgtacagcatcgccgagaagttggagtcattcgttgcccagtttgcagccaagaatgtgcagagagac

SEQ ID NO: 317947 - DNA, 88 bp, Homo sapiens
gcgatggcgcagaaaccccgttgacaaggcactgctttttcatgacggagtacgagagggcctccaaagtggaccagtttgtgacgcg

SEQ ID NO: 317948 - DNA, 83 bp, Homo sapiens
ggccgactgagcaggagtcgtccgcttatagtggaggctgctaggagccggtcagaggaaagtggatctcttcagcctgggaa

SEQ ID NO: 317949 - DNA, 82 bp, Homo sapiens
tgcgcgcgggaagatggcggaacaggctaccaagtccgtgctgtttgtgtgtctgggttcccaacaaggctacgcagaagaa

SEQ ID NO: 317950 - DNA, 96 bp, Homo sapiens
gcccgtgcggaccacggcctgtcagcacgtatgatgattattctccaccgtctaagagaccaaaggccaatgagctaccgcagccaccagtcccgg

SEQ ID NO: 317951 - DNA, 82 bp, Homo sapiens
aaatgttggataaatatatctatggagcacagacaaaacttgccaatggcacttccagtatgattgtgcccaagcaacggaa

SEQ ID NO: 317952 - DNA, 100 bp, Homo sapiens
gcccgcttcaaccccaggggaccagaggaactcagccctgattgcgaaatatatgcaagaggcacgaagtttaggaaaaaacctgaggcaacccaaactg

SEQ ID NO: 317953 - DNA, 90 bp, Homo sapiens
cagatgtcttacttgtgaaactgtacagcagggaagaactggaaactcagagaaagaaactgcccttccatctacaaaagctgagtttac

SEQ ID NO: 317954 - DNA, 75 bp, Homo sapiens
cagtgcatattagtggacagcacttagtaggaactaagcgtcttgtagaaggaactattaatccaggagaaacct

SEQ ID NO: 317955 - DNA, 100 bp, Homo sapiens
atttacaaactggccaagaagggccttactccttcacagatcgcccccaaatacatcaagatgtttgtactggatgaagctgacgaaatgttaagccgtg

SEQ ID NO: 317956 - DNA, 50 bp, Homo sapiens
ccgctcgcagagagccggcttgcaggcactatgctgggccttcctaccac

SEQ ID NO: 317957 - DNA, 97 bp, Homo sapiens
ggcagggcttctcctatgactacgtctttgactggaacatgctgaaattcgcctcctcgctggggaggcagagtcctcgcgtggtctcctgcctcga

SEQ ID NO: 317958 - DNA, 73 bp, Homo sapiens
caggacgcccccgagggtgtagaccgcgcccctggaggttataaacaacttgtgaaatgagtgatttggaaga

SEQ ID NO: 317959 - DNA, 75 bp, Homo sapiens
ctatctccctaccaggagtttctagcactgaaggcatgatgggcccacctcctggtatgagacctcctatgggtc

SEQ ID NO: 317960 - DNA, 48 bp, Homo sapiens
gtgcctccgacgcctcctgatgactacagtggtagtggaggccgaagc

SEQ ID NO: 317961 - DNA, 76 bp, Homo sapiens
cttgctctggagggaagagcgatgggagaggagtcagaaataccatcagaggaggggtactgtgactttaatagta

SEQ ID NO: 317962 - DNA, 83 bp, Homo sapiens
aagactgcaacaatgcaatgtatggggagatggaggtttgccccttccaccaggaactgtggctgcaccatctgtcttcatct

SEQ ID NO: 317963 - DNA, 98 bp, Homo sapiens
ttcagacagaatcttttccaggagtcggagtctagccagtcagaggcgtctgtccggagggaggaatcacccatggatgtggaccagccatctcccag

SEQ ID NO: 317964 - DNA, 100 bp, Homo sapiens
ccagttctggcagattctggaaactgtacattgaagcagaggagcgggacggtatgcgggccatcctggggtcctacgacagcgagctgaccccggccga

SEQ ID NO: 317965 - DNA, 100 bp, Homo sapiens
gttcagtccgacccgcagagggctttcttcgccgtgctggccgcggcccgcctcagcatctggtacagccgaagtggagcctttcaggctggcatggaga

SEQ ID NO: 317966 - DNA, 75 bp, Homo sapiens
cgacagagacaagctgagcttgccgcacaaaaagctagagagtttttggctttcacccccaaccagtgaccaaag

SEQ ID NO: 317967 - DNA, 98 bp, Homo sapiens
agtcttcaagagcccacggacaccacctcaacggtgaagagtcttttgaagacctgaccgaagaaagcaaaacactggcctggaataacatcaccaaa

SEQ ID NO: 317968 - DNA, 75 bp, Homo sapiens
cgtctggatcacggatgtaggaagtgatgacttgcagggtgcacagtcagaaattgaggcaaagcaagaaataca

SEQ ID NO: 317969 - DNA, 100 bp, Homo sapiens
acatgccggggccagggcaggctgccagctgctcatgaggcaacccacacaggcaggctggagaggagtggcaagaagctcaccttcggacagtagtgag

SEQ ID NO: 317970 - DNA, 51 bp, Homo sapiens
aagcagatggttaaatttgctgccaaatacttgccagaactaatacagctg

SEQ ID NO: 317971 - DNA, 100 bp, Homo sapiens
tgaaataacccttgatcctcctcctaattgcaggtgcaatggatgagcttcatagtctggatccaagaaggcaagagttattggaagctagatttactgg

SEQ ID NO: 317972 - DNA, 98 bp, Homo sapiens
cgaccacctcgtgaacgaagattcgaaaagccacttgaagaaaagggtgaaggaggcgaattttcagttgatagggcctccaaggatgtccccaaagg

SEQ ID NO: 317973 - DNA, 133 bp, Homo sapiens
ggagcttttcgtaaagggaagtcatttctactggacttcatgcttagatacatgtataacaaggcgcgagggctggacttgtcccgagtgaggacctgcgtggttgtggcggaagagaggcctcggatcgcac

SEQ ID NO: 317974 - DNA, 50 bp, Homo sapiens
tgcacctcccgcgccgcacggtggacgagaagccaagtacaagaagctgg

SEQ ID NO: 317975 - DNA, 74 bp, Homo sapiens
ggctgagaggctcaagaagctgattgagcagtatgagctgcgcgaggagcttcgccgacacgaggtgaccatct

SEQ ID NO: 317976 - DNA, 100 bp, Homo sapiens
accttcagcgtctcggcaaagcgtcaggagtccccagcggccggctgggacgcagagaccggcagcgattcggaggacgggctgcggcctgacgtgctgg

SEQ ID NO: 317977 - DNA, 83 bp, Homo sapiens
gtggaggaaaacaacttcgagggcagaaactgcaacttccagtgagtccctctgtgtgtctggatcagggaatgcaattaaag

SEQ ID NO: 317978 - DNA, 88 bp, Homo sapiens
gccgccgaagaagcatcgttaaagtctctcttcaccctgccgtcatgtctaagtcagaggcaagcacgaggagcggcaggacgagcat

SEQ ID NO: 317979 - DNA, 75 bp, Homo sapiens
catgaaagcacaagcgtaccaaacgggcaaggacatctctacaaaggaggagatatcaccaaacatgatggaaca

SEQ ID NO: 317980 - DNA, 90 bp, Homo sapiens
ccgggggaagctggccttggggtactttgaactcaagtaaacaaaagggaagattttctcgttgatactggagactgcacaacaatgggg

SEQ ID NO: 317981 - DNA, 51 bp, Homo sapiens
gaccaatcacccacccagtgtgcgccctccagaatacccatcatatagccc

SEQ ID NO: 317982 - DNA, 101 bp, Homo sapiens
tatcagaaaagaacctctctcaaatagaaaatgtccatggatatgtcttgcagtctcatatttctcctctgaagggtgggcttggtggaatcaaaaatccg

SEQ ID NO: 317983 - DNA, 88 bp, Homo sapiens
agaaaactgcagttcatgtgctaaacttttggtgcttaaatccagctgtgcttaccctcttctccacctgctccccggctgcccgcac

SEQ ID NO: 317984 - DNA, 89 bp, Homo sapiens
ggcgtgagcaagagttgcggcagaagcatgcggcccaggttcgccagcagcccaagagcctcaaagcaaagcagagagcagaggttctt

SEQ ID NO: 317985 - DNA, 83 bp, Homo sapiens
gtggcctcctctccgccctagcgctgagtgaatgagttcacggtgatcaggaagaagttcaagtgtccgtactgcagcttctc

SEQ ID NO: 317986 - DNA, 85 bp, Homo sapiens
tgccactgctgctccgtggagatcgtcccgcgcctgccgatgtgaagttcatttccaatccgccctccatggtggcagcggggag

SEQ ID NO: 317987 - DNA, 101 bp, Homo sapiens
aacacagttacagcagttgcttcaggcggtaaaccaacagctcacaaaggagaaagagcactaccaggtgttaggactttctgtctcttctgaaggccctt

SEQ ID NO: 317988 - DNA, 100 bp, Homo sapiens
cttggagaagatttgctatctggcaaaaaggccagggagctggagagcagagaggcagagctaagacgccgtgacaccttctacaaggagcagctggagc

SEQ ID NO: 317989 - DNA, 82 bp, Homo sapiens
ccacctgctttgtggacgctggcaacgcattcaagaaagccgacccccaaggaggctactcacagtcgaactacaactcccc

SEQ ID NO: 317990 - DNA, 100 bp, Homo sapiens
gaggatatggtggtggaggacctggatatggcaaccagggtgggggctacggaggtggttatgacaactatggaggaggcttccgaggaggcagaggagg

SEQ ID NO: 317991 - DNA, 100 bp, Homo sapiens
cctttatctcttccatttgatcaccatggcacacatgcttcagatactacttacagtagacacagaaccttcagggtttataaatctgacctcattttct

SEQ ID NO: 317992 - DNA, 90 bp, Homo sapiens
gtcggaggtctcatctttgaactactgccggagcttctgccagggatgatcatggtgattttactgctgcttgtggctatcgtggttgtt

SEQ ID NO: 317993 - DNA, 50 bp, Homo sapiens
ctccctcagcttccgccccaaaagcatatcctcttctcagtttattcatt

SEQ ID NO: 317994 - DNA, 90 bp, Homo sapiens
aattaaaagaaaatagaatgtggccacttatttcactatcttcttcaaatacaaagagctcatgggacacatgtagctagtatagctgct

SEQ ID NO: 317995 - DNA, 99 bp, Homo sapiens
gccctttgcgcagccgccgggaccctggcccctgtcgaggggtcgggccccggctcagtggtcccaggcagctcgggtgtcggaacccccagacagttc

SEQ ID NO: 317996 - DNA, 100 bp, Homo sapiens
cggccaccgagatcctgctgacgccggctaggatcctggccatgaggttggatgcctcaccttactgaaaggagacactggacctaaatggcgcagcatg

SEQ ID NO: 317997 - DNA, 75 bp, Homo sapiens
ggcggcgcgatggagcagcgaaaacgtggttgtagagttccgtgactcccaggctgttgaagccaaggaaaaaca

SEQ ID NO: 317998 - DNA, 75 bp, Homo sapiens
tggaagctactactacgtggtgcttggaaagggtggcccggtggaaatcctgccctttctgtacctgggcagtgc

SEQ ID NO: 317999 - DNA, 100 bp, Homo sapiens
agcatttcggctcagctggaggaggccagctctacaggcgagttttccgtctgatgaaggttggccatttgcaaagtatcttggagcttgtggaagaatg

SEQ ID NO: 318000 - DNA, 74 bp, Homo sapiens
cgcagtcacgcctgggacccccgaccccacttgtgctggaagcttcacgcaggccatgctgagccagcccagga

SEQ ID NO: 318001 - DNA, 100 bp, Homo sapiens
gcgtgatctaaaagctgttgggaaaaaattcatgcatgttttgtacccaaggaaaagtaatactcttttgagagattgagttggcctgggccctgccctg

SEQ ID NO: 318002 - DNA, 82 bp, Homo sapiens
aacgaggcaaggagctaaagcagcgtgcgttcagccctggggataaagataaagtttctctaaccaagaccccaaaactgga

SEQ ID NO: 318003 - DNA, 100 bp, Homo sapiens
tcaactttgcctctctccgctctgcctatgacagcaccatggagaccatgaactatgcccagttcaagaatgctaatgcagtcatggaatatgagaaaat

SEQ ID NO: 318004 - DNA, 82 bp, Homo sapiens
ccgggtctggatcccgctgcctcggccaccgctgctgccgccgccagccactggctgccagaaactcattgaagtggacgat

SEQ ID NO: 318005 - DNA, 98 bp, Homo sapiens
tgttttctccgtgaccacaatattaaccaggatgaatggcggatgcgctaatgcagctcgccaaagctgtggcaagtgctgcagctgccctggtcctc

SEQ ID NO: 318006 - DNA, 50 bp, Homo sapiens
ggacattcgtgagaacttccagtatgcaggtgatagactagagaacaaga

SEQ ID NO: 318007 - DNA, 100 bp, Homo sapiens
tctgctgtagtcctgttcttctggctctaagatctgaatgttgtgaccactaatttgattggctgcaatgccgtcagctgggcccctgctgttgtacctg

SEQ ID NO: 318008 - DNA, 82 bp, Homo sapiens
catggagaacaagcccctgtatcagatgcggctgctgtcggaggcttttgtcatcaaagacaatgcagatcttcgtgaagac

SEQ ID NO: 318009 - DNA, 98 bp, Homo sapiens
ccatccatgccatcctgctttacaggcgcaaactggaccgggaggaaatcaaaccagaatgtatcctgtcaggtataatgtcagtgaatggcaagaaa

SEQ ID NO: 318010 - DNA, 50 bp, Homo sapiens
cgggaacagtctcctccactcggagcgggagactcatgcatctgtatgcc

SEQ ID NO: 318011 - DNA, 73 bp, Homo sapiens
ccgccgccgccgccgccgccgccggagctaacctcggggaccgagatgcaggaacttgctactaccagcacca

SEQ ID NO: 318012 - DNA, 75 bp, Homo sapiens
gcggaattgttcacaaatacacgttctgatcttgtgcttctgttttgaagaacaaaggcttaatccccaagagga

SEQ ID NO: 318013 - DNA, 76 bp, Homo sapiens
gctggcaagcaagattataatcaggaagtggatgcctccatttttaagggtttttaatgaccacaacaagcaagca

SEQ ID NO: 318014 - DNA, 100 bp, Homo sapiens
gaggagacgtgcagctacgaggaggccttcgaggctctggagtcctccacggctacgggtctcctatggacagaagtgcgggcaaggagctttgttcctc

SEQ ID NO: 318015 - DNA, 100 bp, Homo sapiens
ggccaaccaagccctgttgaaacacagggaagaaattggtaatcgctttcaccaacaatcaccagtggtttacacaacattgcaaggagcattgaaactc

SEQ ID NO: 318016 - DNA, 90 bp, Homo sapiens
aacacgtgcccctacgtgcacaacatcacccgcaagagctgaggcttcgaagacctcagaggacttctctcagcactcacagaaacctcc

SEQ ID NO: 318017 - DNA, 101 bp, Homo sapiens
caacttcgaccccaccggcctggagcgcgccgccaaggcggcgcgcgagctggagcactcgcgtgtctgacttccagcaactgctggcctgtgccagggtg

SEQ ID NO: 318018 - DNA, 82 bp, Homo sapiens
ggacagcttgaaactccagttcatacacgggtttgggccccatggtatccctgtgacagtatttcccaaaagggaatataag

SEQ ID NO: 318019 - DNA, 98 bp, Homo sapiens
aagatgacaatttattagatggtgacactgcagttggctattcagcttgaccctgaagaaactcgtcatgctaaaagaaatggacaaagatcttaact

SEQ ID NO: 318020 - DNA, 82 bp, Homo sapiens
ggccagcggagtcttcagcacccccacaagcatgcagtgctggctgaagatgcaatcaaggccgccctggctgattacaaat

SEQ ID NO: 318021 - DNA, 74 bp, Homo sapiens
gcagattgttgtccaggcaggacagattcagcagcagacagagggggcgagccccccattcacagcacgggttc

SEQ ID NO: 318022 - DNA, 75 bp, Homo sapiens
cgagaccggctacttctcggcgctgccgtctctggaggagtactggcaacagaatccacattcatctcaatggaa

SEQ ID NO: 318023 - DNA, 100 bp, Homo sapiens
atggacttgctacctcttgggtgaactctagcaattacaagggggaagcgagtagcattatctgatgatgagacaaaggaaactgaaaacatgaggaaaa

SEQ ID NO: 318024 - DNA, 100 bp, Homo sapiens
caagctgggcatccagggctcgtacttctgctcgcagacaatgcagatcttcgtgaagactctgactggtaagaccatcaccctcgaggttgagcccagt

SEQ ID NO: 318025 - DNA, 73 bp, Homo sapiens
agaaatcaaaataaaggaaacacatttcatatactgcagcttctttgcccaaaatgcagtgccaagttgggtt

SEQ ID NO: 318026 - DNA, 98 bp, Homo sapiens
ccaccgccgtgctgggcaatcaggttgaatataagctgggattccaagtggacaatgttttggcaatggatatgccccaggtcaacatttctgttcag

SEQ ID NO: 318027 - DNA, 74 bp, Homo sapiens
gcaactctcagttcgagagtaaagccagatgaattatactttgaggaaggtgatattatctacattactgacat

SEQ ID NO: 318028 - DNA, 98 bp, Homo sapiens
atgtgaacacgctgcttgcttcctagaagccttgctttgaaaaagaaggtctgcccatccacatcattttggctggagtccaggcatgataaagaaaa

SEQ ID NO: 318029 - DNA, 100 bp, Homo sapiens
aaggggctcctctccttgaccttcgtgctgtttctctccctggcttttggggcaagctacggaacagattgagaggatccagaatccagatctctggaat

SEQ ID NO: 318030 - DNA, 88 bp, Homo sapiens
ttcctgggaaggtggagccaccagcctctccctgtgataagacagaggcaaccacaaagcttcatgacatggtagaccaactggaaca

SEQ ID NO: 318031 - DNA, 82 bp, Homo sapiens
gtgagctcggccggcaaccgagggacccgcgtccaggtttggaaggcgctttgagtccccgctgctgtggcagagcgccatc

SEQ ID NO: 318032 - DNA, 95 bp, Homo sapiens
gcaagagctcggtgctggagaacttcgtgggccggctgaagtggagagatcgcctgagcccaggaggtcaaggctacagtgagccgtgactgcac

SEQ ID NO: 318033 - DNA, 74 bp, Homo sapiens
ccccatcctcaatgcccaccagcccagcacccagcgggcagagattgacgcccccggtctttgcctctgagcgg

SEQ ID NO: 318034 - DNA, 82 bp, Homo sapiens
gcctgaagctcaagggactgtgtccaccctcagaaggatatggccctgaagccacatgagcggaaggagaagtgggagcgtc

SEQ ID NO: 318035 - DNA, 51 bp, Homo sapiens
gggggaccccggtacggacctgtgcagctgccccagagcacatcagctatg

SEQ ID NO: 318036 - DNA, 100 bp, Homo sapiens
gcgatcttgattcacttcaacctctgctctccgggctcaagcaattctcccacctcagcctgcttttgaagaccctgatagtgccgtcgatgaccgagat

SEQ ID NO: 318037 - DNA, 50 bp, Homo sapiens
ttcaagggggaggagtgtccagcagctaccaagtcaggattgttaccccc

SEQ ID NO: 318038 - DNA, 50 bp, Homo sapiens
cggcgccctgcaccgcgcctcgcaaaggccaattcctgtccccccagcag

SEQ ID NO: 318039 - DNA, 75 bp, Homo sapiens
gatctgcacacagaaatgtgccctgaactggacggacataccagtggccatggacctcccagtgccaagtgtata

SEQ ID NO: 318040 - DNA, 97 bp, Homo sapiens
ggcttttgtctacttggctgacctcctgatgcctcacttgctttgatgaccatgacccagctgtgatccatgagaacgcatctcagcccgaggtgct

SEQ ID NO: 318041 - DNA, 74 bp, Homo sapiens
gcgcgcgggcttcggggagcgccgggatgtggacgggtcattccaaaggccccttcctagtgagcgcccctctt

SEQ ID NO: 318042 - DNA, 100 bp, Homo sapiens
cgcctgcgcctccggggccggccctgcaggcctccggtgtggctgtctctgatggtgtcatcaaggtgttcaacgacatgaaggtgcgtaagtcttcaac

SEQ ID NO: 318043 - DNA, 82 bp, Homo sapiens
cgagggcggggaccggcggcgctggaggagcgaggcagctgtactaggactgggaacgggtcaccgacgatgagggcgcacc

SEQ ID NO: 318044 - DNA, 100 bp, Homo sapiens
agccccagagtcagctcccctttctcgcccagcgcccccaggccgctcccggggctcacgtgcagtcattggagaaatcgatgaagaaacagattctgcg

SEQ ID NO: 318045 - DNA, 100 bp, Homo sapiens
ggaggacggggccgggcgacctgggcaccagcaggacccgaggccaggagccaggggcccagaagggtgagcttgtcggccacagactgctacattgtgc

SEQ ID NO: 318046 - DNA, 76 bp, Homo sapiens
cagattcgcagtggtcgcttcttctccttggctttggatgaagagtatttaaaagtagatgcccaatttggaggca

SEQ ID NO: 318047 - DNA, 100 bp, Homo sapiens
gggtagatcctaacttaatcaacaacctggaaacattctttgaattggattatcccaaaagatccgtgctcagctcacagagcagatgaaatgcctggac

SEQ ID NO: 318048 - DNA, 75 bp, Homo sapiens
aagtcggccagcctgagcaagcggaggacctacgccggcctgggtgcacattcaggttcccgagcacaaacatca

SEQ ID NO: 318049 - DNA, 90 bp, Homo sapiens
atggaatgatggtgctaggctgtggtccatatcacattggtattgttgcagcatctggcagtgagactgaggatgaggacagcatggaca

SEQ ID NO: 318050 - DNA, 98 bp, Homo sapiens
cggctgctcctcccctccccgccgacagtgagaccgtgcactaccactatggccctaaggacctggtcacaatcttgttctacatcttcatcaccatc

SEQ ID NO: 318051 - DNA, 98 bp, Homo sapiens
ctgggaacgtgagtatcaaccaagatcaaacagatgatggaggcagcaacacgacaaatcgaggagaggaaaaaacagctgagcttcattagcccccc

SEQ ID NO: 318052 - DNA, 74 bp, Homo sapiens
tgctatagtctggtatcaaaagaagaagtctcaggggatccagaactgcagccagtccttgctgggctgttcct

SEQ ID NO: 318053 - DNA, 88 bp, Homo sapiens
cctacattagcgtctacgaccaccaaggacagttttggcatgtgactgacttacacttagaccctacttaccacatcacagatgacca

SEQ ID NO: 318054 - DNA, 50 bp, Homo sapiens
ggagaattttgacgtgaataaggtcctggacccaagccagaagcctctgc

SEQ ID NO: 318055 - DNA, 98 bp, Homo sapiens
gtcaaagccatcatatatcagtatatggaagagcgaaaccttgaaagccatttgatgtcccctgctgagattccaggccagcctgtccctaagaacat

SEQ ID NO: 318056 - DNA, 58 bp, Homo sapiens
gagggcaccccgggcgggcggcggctgctccggcacagtcttcactaccgtagaagac

SEQ ID NO: 318057 - DNA, 100 bp, Homo sapiens
accaggaaatttatggtggaagtgacagcagatttgctggatacgtgacatcaattgctgcaactgaacttgaagatatatgggacacagcaggacagga

SEQ ID NO: 318058 - DNA, 100 bp, Homo sapiens
ggcagccccgggaggagcactggcgtctgtttccttcgggccattatgctgtgatgaacaaccccaccagacagcctttggccctaaacgttgcatacag

SEQ ID NO: 318059 - DNA, 75 bp, Homo sapiens
gacatcgcgacgctgctcaaaacctcgctccggaaaggggacacctggtctgagcgggaaagttccgaagaatag

SEQ ID NO: 318060 - DNA, 97 bp, Homo sapiens
tagactcaacagaacctctggatatcctggagaaagatcactttgattcaggtgtctttacatttggcaatctccgtcctacagagggctggaaaag

SEQ ID NO: 318061 - DNA, 98 bp, Homo sapiens
aggagtagtgtcgacttggtcccgtcagccggaccccacctggacggctggggccacttgtggtcgccgggagttttcggctttgtgagaaaccttac

SEQ ID NO: 318062 - DNA, 123 bp, Homo sapiens
gatgccgtgatctccagcgccggcctcctcagtgcgaagaagctgcagccgcacctggccaaggaccggcatgggctgcaggagccgcggcgggtggaggagctgcagaaccgcatcgccagc

SEQ ID NO: 318063 - DNA, 152 bp, Homo sapiens
ccgctgctgctgccgctgccgccctgagtcactgcctgcgcagctccggccgcctggctccccatactagtcgccggtttatggctacaaatgatttgatgacggaactgcagaaagattccatcaagttggatgatgatagtgaaaggaaa

SEQ ID NO: 318064 - DNA, 74 bp, Homo sapiens
aaagagcttgctccctacgatgagaactggttctacacgcgagctggtgcagcttcaagcttaggaccacccac

SEQ ID NO: 318065 - DNA, 100 bp, Homo sapiens
ccctttcccgcttcccatcatcgggaacctcttccagttggaattgaagaatattcccaagtccttcacccggcgtctgcttctgcgctttgcctgggag

SEQ ID NO: 318066 - DNA, 100 bp, Homo sapiens
aaagaaaaggtccaaactcctatctccttacagcccgcagacacaagagaaaatttgtcaaaggatctttacttgatatctcaaatggatagtgatcagt

SEQ ID NO: 318067 - DNA, 75 bp, Homo sapiens
ttctctgtgctccacacttaccaggaccacttgtggtacaatgccagggagtactacgaccacctgcccgagctg

SEQ ID NO: 318068 - DNA, 101 bp, Homo sapiens
ctgagctgctccaggacttggggtttttcttcccccagtccctcagctgctgctgctgctcaggaggtcagatctgccactgatggtaataccagcaccac

SEQ ID NO: 318069 - DNA, 88 bp, Homo sapiens
cgaaccccttcatgcccaaatcccggaaactccagcgtgtctccagccgtggtcaactttgtagtgtgccaactctttgccttgctag

SEQ ID NO: 318070 - DNA, 75 bp, Homo sapiens
acaacttttatgtatgcaaacaaaagcattgtaaatcaggtttttctaagagttatgatggctttgtcaaatcac

SEQ ID NO: 318071 - DNA, 100 bp, Homo sapiens
acccaaaccatgttccctgtgaaggtgaaagtggagaaatcagctactctcggaaccgcacgtttgacacgtacattgggcagggctacgtgattcctgg

SEQ ID NO: 318072 - DNA, 98 bp, Homo sapiens
tttggatatccctagaacgttgagggcacgagtcgggtcctgagaccagattcgacacagagttgcagcctgtcaagaccttttggatcctgattcag

SEQ ID NO: 318073 - DNA, 50 bp, Homo sapiens
gcggccctaggattatgtactcactgctctttctatgggaggattctcgt

SEQ ID NO: 318074 - DNA, 75 bp, Homo sapiens
ggacctccagtggccggctccggaggcttggtgactccagtggcccagaaaaacacaccttgactttagtcagat

SEQ ID NO: 318075 - DNA, 100 bp, Homo sapiens
ggctcggcggcgggcggcagcatgtcggtggcggggctgaagaagcagttctacaaggcgagccaggctccaaccaggaatggagacgccattggatgtt

SEQ ID NO: 318076 - DNA, 75 bp, Homo sapiens
cctgaatacatgatttaaacaagagatttccacagaaggtgctggaaacgtgcgtagcaacagtaggccgagtat

SEQ ID NO: 318077 - DNA, 98 bp, Homo sapiens
atcatcttccacactaaacccttctatgggggcaagaagcacagaattactgccgagattttggctcctttcggatctaccctctgccggatgacccc

SEQ ID NO: 318078 - DNA, 98 bp, Homo sapiens
gatcttgatttccttagagagtgaggaaagaggggagctagagagaatcctagcagatcttgaggaagaaaacaggtcctgcaaccctggttccagtc

SEQ ID NO: 318079 - DNA, 100 bp, Homo sapiens
aggcgaagctggccgagcaggctgagcgatacgacggtgaccagaagtcagcagcttcccagaagccccgaagccggggcatcctccactcactcttctg

SEQ ID NO: 318080 - DNA, 100 bp, Homo sapiens
agaaggaccgcacctgggccgaggctgcccgcctggtaaaacagaaaggggctcatactcatcttatgggagagaatcaaacttacagggttgccaccag

SEQ ID NO: 318081 - DNA, 88 bp, Homo sapiens
gcggccgggccccggtgtctgggaccccaactgggacagctccaattaaggaacagctatatcctgcttccttctgtaagcagcatcg

SEQ ID NO: 318082 - DNA, 82 bp, Homo sapiens
gtcatgaagatggaacctctgaataacctccaggagaacatttcaggataggaataggccaagtgctgagaagatgagtctt

SEQ ID NO: 318083 - DNA, 90 bp, Homo sapiens
gagaaataaggacaaaagccaagaggaggacagttcgctacacagcaatgcatcgagcaacatctgaatgaattgatgacgaagaagtgg

SEQ ID NO: 318084 - DNA, 96 bp, Homo sapiens
agacgaactacgaacccctggacgggagagtctgccggcggagaatataaggcaaccactgagaaaacggaaccgaatagtcaagaggacaagaat

SEQ ID NO: 318085 - DNA, 75 bp, Homo sapiens
cagccccgccgccctcgcaacctggcagccgccgccgtggaagctcccctcccacccggtcactccgtccagcaa

SEQ ID NO: 318086 - DNA, 90 bp, Homo sapiens
cggctctccgccgtccccagccctgcctctccctgggctctggccaggacgactggaatgggaccaggccgtcgctgaaggcccctcctg

SEQ ID NO: 318087 - DNA, 100 bp, Homo sapiens
gcactgtgacctacactagtcgcgggagccacgcagaggacgccggaacaccctggaagccgagaaatggtggacccccaaaagtacaagggcatattta

SEQ ID NO: 318088 - DNA, 100 bp, Homo sapiens
ggcgcggggcgccgccgctgcagctgccgcgcgtgcaacatgagtgagaatgaggaagaggaaatttctcagcaagaaggcagtggggactatgaagtcg

SEQ ID NO: 318089 - DNA, 50 bp, Homo sapiens
gcagctcttcttcgtccgtttgacttttgcccgctacctttcattccggc

SEQ ID NO: 318090 - DNA, 75 bp, Homo sapiens
gtctagtccctggccatagctccgccgctgcccgcactggagaggggtctcctgaaaaccctgcagaaactggat

SEQ ID NO: 318091 - DNA, 98 bp, Homo sapiens
actggaaaattggcagaggctaaaaataaaggagaagtatttccaacaactgaaggaagacaactgttagttttgtggcttactgctgctccacccag

SEQ ID NO: 318092 - DNA, 100 bp, Homo sapiens
ttcagaatcctccaaaaccagtcatgaccactagacccacagctgttaaagcaacaggtcatcctgtacagttctacagcatgaataggcctgcctctcg

SEQ ID NO: 318093 - DNA, 100 bp, Homo sapiens
cgcggagctcgggcggccggcgcggagcttggttctacagccattgggatccagacatcagagggtgtgtgcctagctgtggagaagagaattacttccc

SEQ ID NO: 318094 - DNA, 100 bp, Homo sapiens
tctaggactgaaccaagacttacccgaagttgccgcggggccttccgatcccctagttatcattaccatgttggtgacctgttcagtttgctgctatctc

SEQ ID NO: 318095 - DNA, 75 bp, Homo sapiens
tgggccgccgaatctccggccgaagagcggcggcggcagcggcgcatttgacattgtgcagcaaagaaatggtta

SEQ ID NO: 318096 - DNA, 98 bp, Homo sapiens
gtgtcctgtgtttccttctgctgcttggattccagttcgtctgcccacagccctccactcaacacaggaaggctcaactttaaagaagcttctacaca

SEQ ID NO: 318097 - DNA, 90 bp, Homo sapiens
cttcaaatggaaattagatgcaatattgaaaaacgtgcccaatttgttacacatggtgtatgcctggaagggcgaaacggacgaggagta

SEQ ID NO: 318098 - DNA, 75 bp, Homo sapiens
gtttgtggatcgctgtgatcgtcacttgatgccggagaccccaactggggactcagacccgcaacctgctcctaa

SEQ ID NO: 318099 - DNA, 50 bp, Homo sapiens
ccccgagaaccgtcagtttgagccagatgaaacagtccaactcttacgat

SEQ ID NO: 318100 - DNA, 82 bp, Homo sapiens
tttcatctgtggatggagtattggtcccagccctacctgtcctgatgcctgaccagcaggatgcaagcccaggaggccatcc

SEQ ID NO: 318101 - DNA, 98 bp, Homo sapiens
tcttctaggagacgagagagcgaacgccagggaccctgtgcaggcctgctcctccgtttgcaaggtgtcccaccggccttccgggttccagcgccagg

SEQ ID NO: 318102 - DNA, 88 bp, Homo sapiens
tggctttaatcctgaaagccatgcagcgggtgaaaggtgtagcagtcactcggcctacacccacagcatcgaccttgtgaacccagcg

SEQ ID NO: 318103 - DNA, 78 bp, Homo sapiens
ttggccatgtgagatacaaggctacacagagacagatcaaagcagctcgcacagatgaggagagcatcctgactctgt

SEQ ID NO: 318104 - DNA, 82 bp, Homo sapiens
ctttcgtttccctctgagggaattgggaggtcggcggccccaaaataagactttgaccccgacgcaggcttcagtgattgcc

SEQ ID NO: 318105 - DNA, 82 bp, Homo sapiens
ccgccccccaccgccgccccctccggcgtgttcatgcccccgggattcccactggaaattcgttgtatgaatcttattacaa

SEQ ID NO: 318106 - DNA, 78 bp, Homo sapiens
cggcggcgcgcggcggccgaggccagtcatctgcaagcagcagaccccggagctggagccagccgccaccatgccacc

SEQ ID NO: 318107 - DNA, 100 bp, Homo sapiens
gatatggcaaccagggtgggggctacggaggtggttatgacaactatggaggaggtattcttgtacttctccaaggaccaggggaaggacgaggacaccg

SEQ ID NO: 318108 - DNA, 87 bp, Homo sapiens
agcgatggcatagtaaatgaaaacttgaggagaattctgcctaagccaactcgaaaaagccgtacaaaaaataagcaaaagcgtccc

SEQ ID NO: 318109 - DNA, 100 bp, Homo sapiens
gactcagaggcattccaaagagcagtttgaggcggcgcagaagcttgagcaggagtacagcaggtacttcacagcaggatggagctggagtgaggtggag

SEQ ID NO: 318110 - DNA, 80 bp, Homo sapiens
gtcacaggagctgtagagaggaccccggtacatctgaaagccgggaaatgggttcttgaagcttttgagattaacaatgg

SEQ ID NO: 318111 - DNA, 98 bp, Homo sapiens
gcgttttggttctttttgttcattgagcgcaggcagctatgtcttcttcaaaggagaggagcaaagcttcttccagaccagctggtcttgcttctgga

SEQ ID NO: 318112 - DNA, 51 bp, Homo sapiens
taaggagctctggcccagcgctgacgggttggtgtgtgctggattggctga

SEQ ID NO: 318113 - DNA, 75 bp, Homo sapiens
cgcaaagtcatccaggagcttgtggacacagagaagtcctacgtgaaggacccagatgatgtggtaccagttggc

SEQ ID NO: 318114 - DNA, 75 bp, Homo sapiens
ctggttcctaagcctgtaccacctccttccaagagaaagtttcattgtgcaaatctaacttcatggcctcgctgg

SEQ ID NO: 318115 - DNA, 100 bp, Homo sapiens
acatttgctacagcatcccacattaagtcaacggttcctgcgccacgtgcctgtcgtgtatgtggattacccgggccccgcctccctcacacagatctac

SEQ ID NO: 318116 - DNA, 100 bp, Homo sapiens
gcaggatgaagagtacttcggcagctatggaactctggtccccttcccctgagcccatctacaatagcgaggggaagcggcttaacacccgagagttccg

SEQ ID NO: 318117 - DNA, 100 bp, Homo sapiens
aggatgccacacgaagagctgccgtcgctgcagagaccccgctatggctctgcggttggatttctcacgatgtccagtgttatctccatgtctgcccctt

SEQ ID NO: 318118 - DNA, 83 bp, Homo sapiens
aagaggaaagacacacctaccaagaagccagtcaagcggccaggtggaagttaaacgagctgagcctcgggacagcaagagcc

SEQ ID NO: 318119 - DNA, 124 bp, Homo sapiens
gcggggagccctgggtcactttcagtgagtcatcgctgacagctgaggaagtctgcatccacattgcacataaagttgagcccccctccatgcgcctgaaggcccgacccagcagccctggctt

SEQ ID NO: 318120 - DNA, 50 bp, Homo sapiens
gtggccctgcgacagtatctgtggcaggagatcaaaacgtggagtacaag

SEQ ID NO: 318121 - DNA, 100 bp, Homo sapiens
aaggtattcacacagaccacaatacactgagttggtcaaagaaaaagtgatgtatgaaaaagaggcaaaacaacaagaagaaaagattgaaaaaatgaga

SEQ ID NO: 318122 - DNA, 82 bp, Homo sapiens
caactggattttttaactgaagatagtgcctttcagccctaccaggcctcaactccatatagcatagattcagattctttgg

SEQ ID NO: 318123 - DNA, 100 bp, Homo sapiens
ccgaggccccctcttcgcctcctccagtggaaggagaacatgaatctctcagaggcccaagtacaggcgttagcattaagtagacaagccagccaggagc

SEQ ID NO: 318124 - DNA, 75 bp, Homo sapiens
ctgtctgtccgtggtggatctaaggatattggtgctggaaaaggcaaatactatgctgtcaattttccaatgaga

SEQ ID NO: 318125 - DNA, 50 bp, Homo sapiens
cggggagcggagccatggcctccgataacaattggtgtatatgatccctg

SEQ ID NO: 318126 - DNA, 74 bp, Homo sapiens
tgtgaatgcagccagggctggaatggagagcactgcactatcgcatgcagtgacctggagttcagggaagtggc

SEQ ID NO: 318127 - DNA, 100 bp, Homo sapiens
caggccctgaggggcgccgagatgtgggagctgctggccgcggcgtgggcagttcaggggctgggcggctgaggaggaggaagccaagaatctggtgagc

SEQ ID NO: 318128 - DNA, 90 bp, Homo sapiens
caacgccttaacccaaggaagtgactcaaactgtgagaacttcaggtgacgatgcctggggagcctgtggacgtggcatgtggcgtggac

SEQ ID NO: 318129 - DNA, 51 bp, Homo sapiens
gctgatcaaagaagagcagcccatgattgatcagggaccatgaaaagaaac

SEQ ID NO: 318130 - DNA, 100 bp, Homo sapiens
tgacgctcttccgccagtacctgcgtatccgcactgtccagcccaagcctgactatgatcgagaacggctactttgtacactactttgcccccgagggcc

SEQ ID NO: 318131 - DNA, 75 bp, Homo sapiens
ataccatatgctggagagacattaaagtgaatcttctgcggcttgtccatagtgtgaataaaaactaaatcacat

SEQ ID NO: 318132 - DNA, 100 bp, Homo sapiens
atacaaagtcttgtagtgtggatatggctcgtggacagcagaaaattcagtctcagcagaaaaatgccaaaaagcaagctggacaaaagaagaaacaagg

SEQ ID NO: 318133 - DNA, 80 bp, Homo sapiens
acccgggacgacgagtacgactacctattcaaagggtttccaggcctgaggtgcccgccctggccccaggagaatgaacc

SEQ ID NO: 318134 - DNA, 50 bp, Homo sapiens
agataatgaagactttccatcaaggtagtggaggtatatggccttctcgc

SEQ ID NO: 318135 - DNA, 83 bp, Homo sapiens
gagctctgcgccatggccgtgctgctcaccaaagctcactgatgatgtgaagaaggagaaagagaaggagccagagaaacttg

SEQ ID NO: 318136 - DNA, 101 bp, Homo sapiens
ccgggatcgtgaccgagaccgtgaccgagagcgtgaccgagagcgcgaatatcgtcatcgttagaaggtagttggcaaaaaaggagaaagccactaaggta

SEQ ID NO: 318137 - DNA, 58 bp, Homo sapiens
caagggcccaactggaattccacttacggccaaagaatttagaacgagtctacgtgga

SEQ ID NO: 318138 - DNA, 90 bp, Homo sapiens
acggccgccaagaagcacggcaccaaaaacaagcgcggcattcccatcaagagcaccatggacaaccccaccaccacccagtatgccagc

SEQ ID NO: 318139 - DNA, 100 bp, Homo sapiens
aaccattgacgccatgtcgggttattcgagtgaccgagaccgcggccgggaccgaggattagaaatgatatttgccaaatttgatgaagtgcaaagttca

SEQ ID NO: 318140 - DNA, 120 bp, Homo sapiens
cccacttcctgaacgtgcagggccggacgctctatgacgtcatcttgtacgggtgtccctggccagtgtccttccacctgtccacaagcatggggaacatcttcgccaacctcttcaagg

SEQ ID NO: 318141 - DNA, 75 bp, Homo sapiens
ccgcgctgcgcagttttgttctgctccagctgttcgaaggtgatccaggcataacctgggtcctggtttacagga

SEQ ID NO: 318142 - DNA, 100 bp, Homo sapiens
ccatcacgagtgccgccagcatgtctgacaaactgccctacaaagtcgattcatgatgttgctatcaaaagttgagaaattgtcagaagaaatcatggag

SEQ ID NO: 318143 - DNA, 100 bp, Homo sapiens
aaggtttttgctgcgccaacgcagtgaccgaaggctccgctcacgcccggaattaaacaaccaccatgtcgagcaaaaaggcaaagaccaagaccaccaa

SEQ ID NO: 318144 - DNA, 83 bp, Homo sapiens
tagagaccttggctggtcagagggctgtgaagacgcacggtgccaggaccaagtatctggtggctgagatctgcgttgaaatg

SEQ ID NO: 318145 - DNA, 98 bp, Homo sapiens
aacgaatggggttgtgatggcccaggttcttcaaaagatgtactactgagcgagtgtgcttgatccagggaacggttgaagcactgaatgcagttcat

SEQ ID NO: 318146 - DNA, 100 bp, Homo sapiens
ttgtgggagccgtggtctttgctgtgagaagtcggcgatccatgaatctccactacttacttgctgtgaagccatgcagtgacacccgctaagacttgtt

SEQ ID NO: 318147 - DNA, 101 bp, Homo sapiens
cgacccttcacgcttcgtactcattgagcgccgattttatgccaggcaccgtgctggacctcccttgagaggattccttctggatggagatttctttgttg

SEQ ID NO: 318148 - DNA, 90 bp, Homo sapiens
cgccgcggcactgatccccacaggatcctcagtcttccacaatgaaccctgtttacagccccgtgcagcctggggctccttatggcaacc

SEQ ID NO: 318149 - DNA, 124 bp, Homo sapiens
catgaattcagctctgactttaaagacttctggaagaaagagaacaaacttcttctacaagagaggattaataagaaaattccccggggaccaccttctcctcctgcgcctgtcatgcattctc

SEQ ID NO: 318150 - DNA, 82 bp, Homo sapiens
ggagctggacggcgagcgcgagcggcgcgagaaagtgtgggcaagagcagtttactgttgcgttttgcagacaacactttct

SEQ ID NO: 318151 - DNA, 83 bp, Homo sapiens
ggaggaggtgcagctcaacttctaccagttcctcggggtgcagcagtttgacaaatggacagactctcaaagaagaagaatcc

SEQ ID NO: 318152 - DNA, 82 bp, Homo sapiens
gcccctcttcctggctcagctgaaggatgagggtcagcgccaaactggaggggaatgaaacactaaaagttgtagaactcga

SEQ ID NO: 318153 - DNA, 82 bp, Homo sapiens
aaatcaagcaaggcaatgacaatgaaagctgtctgccaaggagaaggagacgacacatttgaaaacctagtatttgaccaaa

SEQ ID NO: 318154 - DNA, 100 bp, Homo sapiens
tacaaaagagtctttggaggatgcggctttgatggtgcaccgtccaggtgaggttagagctggggcatcgcgcccaactgcgcaagaagcccaccacgga

SEQ ID NO: 318155 - DNA, 100 bp, Homo sapiens
gtggcagactgacaactgtgagacatgcacttgctacgaaacagaaatttcatgttgcaccctgaaaatgtttcaacgtgcgcaagagttgcggtggcgg

SEQ ID NO: 318156 - DNA, 100 bp, Homo sapiens
cccgcagaacattgaccgagttaaagcccttatcgctgagcatcaggctacccacctttctgttctgagacccctcaagagacatataagaaggtgatga

SEQ ID NO: 318157 - DNA, 90 bp, Homo sapiens
cagctttgatgactacccacctagaagaggtgatgatagctttggagacatggatccaaacttctacagcaaaaacttacttcttttagg

SEQ ID NO: 318158 - DNA, 73 bp, Homo sapiens
tcgggagctggctgaagatggctactctggagttgagaatgaggaaaatggggagcaggaggctgacaatgag

SEQ ID NO: 318159 - DNA, 75 bp, Homo sapiens
tcaaagagaaaaggcaacatcctgtcacaggccatgctctggcaaaaacttaccggtattgtaagaacaagccgt

SEQ ID NO: 318160 - DNA, 100 bp, Homo sapiens
agatgtttgccaggatgtctgatctccatgttctgctgttaatggctctggtgggaaagacagcctgtgggctgtgttggagtagaagaacatcatgctg

SEQ ID NO: 318161 - DNA, 74 bp, Homo sapiens
tccttggctcactgaggaggtttggtgtcatggagaaactccagctgggcccagagattctgcagcgggaaaat

SEQ ID NO: 318162 - DNA, 98 bp, Homo sapiens
gggacttgggcccagtttatggcttccagtggaggcattttggggcagaatacagagatatggaatcagggtggattatgatcgcatcagggatgttg

SEQ ID NO: 318163 - DNA, 75 bp, Homo sapiens
caagggggaggagtgtccagcagacacgaatgcagagtttgagtccagatcccaaagcccagtacacaagtatct

SEQ ID NO: 318164 - DNA, 83 bp, Homo sapiens
cgactcgcggaccggcgtccccggcgcgaagaggctggactcggattcgttgcctgagatctgagtgggacatacttttgaag

SEQ ID NO: 318165 - DNA, 76 bp, Homo sapiens
ctcatcgagggacgcccggcccaagtgaggacgattatttatcatttctactaaagcaggatctctaggaattaat

SEQ ID NO: 318166 - DNA, 98 bp, Homo sapiens
cctccagaaccgcgtgaccgagctggagagcgtggacaagagcgcggggcaagtggctcggaacacaggaacagattatggcctttgcaagcaaatga

SEQ ID NO: 318167 - DNA, 98 bp, Homo sapiens
tcagctcgcccggtttctcggcgaatgacagcacagtgttcctttctgccgaaattctccattcatatagaaaccaagtatgaggacaacaaaggaag

SEQ ID NO: 318168 - DNA, 96 bp, Homo sapiens
ccctgggcatcaccaacatagccatcgacttcggggagcagggaaggatggagacgctgaaggataagaccctgcaggagctggaggagttgcaga

SEQ ID NO: 318169 - DNA, 100 bp, Homo sapiens
cacggcctttgtcagcacctggaagcacctgcccgcgtgaggagcacctgctgagcccagccagagatcgagatggtgatcatggagcgtagcaagctct

SEQ ID NO: 318170 - DNA, 100 bp, Homo sapiens
gacgacgaggaggagacgtaccggctctggaaaatccgcaagaccatcatgcaggtccaaccgtgactgccagatcgaccagcaccaccggaaccagtgc

SEQ ID NO: 318171 - DNA, 100 bp, Homo sapiens
gcccttgcagatcgagatttgcgtcctagagtgggaaaaaagcagaggccagggcgccggtgattttcttccacccccacctccacctctagatgattcc

SEQ ID NO: 318172 - DNA, 83 bp, Homo sapiens
aaagaccacgggctcctgtgctagtaccaggatgttcacggaagaccagggtgtagatgacaggctgctctatgacattgtat

SEQ ID NO: 318173 - DNA, 100 bp, Homo sapiens
ctggtgctcttgctccagaaagactcactgctcacagctgcccagctgaaagccaaggttcgtgctggccgtgggcagcgccgtctttgatgccatgttc

SEQ ID NO: 318174 - DNA, 75 bp, Homo sapiens
gtacaaaagaagcagctcaggaggctgttaaactgtctgagaataaaggattagaaactaccaagaacaatgtag

SEQ ID NO: 318175 - DNA, 100 bp, Homo sapiens
ggctgatatctttcgtatctatgccccagaagctccatatacttcccatgataaacttaagtgtggcaaaggagcagagaactttgacaagttcttcaca

SEQ ID NO: 318176 - DNA, 96 bp, Homo sapiens
aggcgatccgctggcgctagtctgaccctccgccaggcaaaaggaaggccgactcgcgggccgctgcacccaccgccaaggacaaaaggagcccag

SEQ ID NO: 318177 - DNA, 101 bp, Homo sapiens
cggcggtccagggtcctgggcagtcgcgccagagctgagcggagggcgcggcgcgagaacattaagcctgatcaagatgacaacctcccaaaagcaccgag

SEQ ID NO: 318178 - DNA, 76 bp, Homo sapiens
attaagaggaaagcgatggaggagctgagcgctgatgagaaaggcctaaagaatgtatttgacgaagcaatattgg

SEQ ID NO: 318179 - DNA, 105 bp, Homo sapiens
gtgctgtgccgcgcagttaggcagcagcagccgcggagcagtagccgccgtgggagggagccatgaagcattacgaggttccagcaacagatagaaatgctttaa

SEQ ID NO: 318180 - DNA, 99 bp, Homo sapiens
cttatactcctcccagtgacgggtctggagtgcgtgggggaccggctgttggcggctacgagttccagggagctctgtcctggtgaccgtgcccgggtt

SEQ ID NO: 318181 - DNA, 82 bp, Homo sapiens
aggagggcgtccgagtcaacaaccgcttcgagctggtgctcgcggtgaggatcgatgacctggaccacctcccggagaccac

SEQ ID NO: 318182 - DNA, 97 bp, Homo sapiens
aaatcagggtagggacttctcccgcagcgacgcggctggcaagactgtttgtgttgcgggggccggacttcaagggcaatttggttttgatgctgtg

SEQ ID NO: 318183 - DNA, 100 bp, Homo sapiens
ctcacatgctagaaagagtcaccttcttgatctacaaccttttcaagaagtctgggagggacgttggagggtcatcccatatgatgtgctccctgactgg

SEQ ID NO: 318184 - DNA, 100 bp, Homo sapiens
cctccggatattacctgtggagaccctcctgagacgttctgtgcaatgaaaaacacaccttgactttagtcagatacatcactgtctgttaaaggaaacc

SEQ ID NO: 318185 - DNA, 100 bp, Homo sapiens
ggaaagacccaggagaagccgcccaaagaactgattgagaggatccagaatccagatctctggaatagctaccaggcaaagaaaaaaactatggatgcca

SEQ ID NO: 318186 - DNA, 89 bp, Homo sapiens
ccggatattcagttgcacatccccacatcaatgcactgccaatggtggtcataatgtcacaatctccttgcagtccaggactgggcata

SEQ ID NO: 318187 - DNA, 98 bp, Homo sapiens
cgctttcccgagaccgtcctggcgcgatgcgtcaagtacactgaaattcatcctgagatgaggagccatgtggctagaaatcctcctcacttcagtgc

SEQ ID NO: 318188 - DNA, 75 bp, Homo sapiens
gtcggagatccgctcgcgcgccgaaggctttgaaatttctgaaaaccagaagaggcaggctgcaatgactgtgag

SEQ ID NO: 318189 - DNA, 100 bp, Homo sapiens
ctacgagtgcaacatctgcaaggtccgcttcaccagaatgtcatcaaattggtggatgaactgatggaagctcctggagacgtagaggccctggcgccac

SEQ ID NO: 318190 - DNA, 100 bp, Homo sapiens
agctacaacttgtccacgacaccggctacttctcagctttaccatccctggaggagacctggcagcaggatcagtgaatgcttgtgaaaagacctcattt

SEQ ID NO: 318191 - DNA, 108 bp, Homo sapiens
gtcgcgcccgggaggaaggaacgaggcaaggagctaaagcagcgtgcgttcagccctggggccagaagcggactcctagaagaggggagcagcaaggatggaatgaca

SEQ ID NO: 318192 - DNA, 80 bp, Homo sapiens
cctctgcgatcccgggtcatctccagatgctagggttatggttttgcagaacactgaaatctatggactctaaaatggac

SEQ ID NO: 318193 - DNA, 99 bp, Homo sapiens
ctggccttgtgggattggctgtgtgcaatactcctcacgaggtgctgttgatgggtaaaagtgggtctggtaagaccagcatgaggtctattatctttg

SEQ ID NO: 318194 - DNA, 75 bp, Homo sapiens
tcttatttggacattgccaaaggcgctgtggagttattcttgaagatccatgttcactagcggccttacagaaag

SEQ ID NO: 318195 - DNA, 82 bp, Homo sapiens
ctgggggatgagatgttggcggctgcgctcctaaaggccaagtcccagatatggtgttggtcctgccacaatggaagtgccc

SEQ ID NO: 318196 - DNA, 75 bp, Homo sapiens
ctccaaggagaggaagcagtgatgcattgagtgattacagtggcgagatcttgaacaactgctgcgtcatggagt

SEQ ID NO: 318197 - DNA, 75 bp, Homo sapiens
cgcatctccccgacaaacaccacgagaattccgcagcccacacgtacctggagtagaacagaaaaattattatgt

SEQ ID NO: 318198 - DNA, 100 bp, Homo sapiens
tttccagcccgtggtccttctccatattcgaggtgaatgaaaactttgccattgatttgatagcagagcagcccgtgagcgaggtggagactcgggtgat

SEQ ID NO: 318199 - DNA, 90 bp, Homo sapiens
ggctccgcagcaagatggcggacgagaaggacagggaagagctacttcctcagccgagcccagagcctgtgtggccccgagcacagtgct

SEQ ID NO: 318200 - DNA, 83 bp, Homo sapiens
aagtccggaagcttgtggcgctgaaaacgaacggattggtcttgatttgagcaatggtaaacctcgagacaacaaacaagcag

SEQ ID NO: 318201 - DNA, 100 bp, Homo sapiens
aacatacagtgacgcttcacagggcaagaaaattggatgtatattttgaatatgaagaaaaaataatgagcaaaactactctggataaatctcttctaga

SEQ ID NO: 318202 - DNA, 100 bp, Homo sapiens
gattgggattgaggaggaagatcggaagcatacctggatggaggatgctgacagtactggtcaaacaaatggattttacagaggcttacgcggacacgtg

SEQ ID NO: 318203 - DNA, 83 bp, Homo sapiens
ctcggctgcagacttggccaaatggacgggactattaaggaagcagttcaggtacttttgaagcattctgcagatgttaatgc

SEQ ID NO: 318204 - DNA, 96 bp, Homo sapiens
caccaggttgacagcactggaaactgaagtaccagttgtcgctagaacagtgcccaggattgtaatattaggtccacccgcctcagggaaaacaac

SEQ ID NO: 318205 - DNA, 98 bp, Homo sapiens
agcacagccagcaccgcacgccctgcaagggaggatgacatctgaactggagagcagcctaacgtctatggactggttaccacagctcaccatgagag

SEQ ID NO: 318206 - DNA, 101 bp, Homo sapiens
tgctgatgtggcaactgctgatgctcatggtccccatggcatgggggcctcagggcagcctgcctggagagcttgggaaagtcgaggtgacggtgtttgac

SEQ ID NO: 318207 - DNA, 130 bp, Homo sapiens
aacaatttcacctttgaattcagccagtggtcacagctggatgtttgcgacatcccagagagcttccagagttgcttatcaagtgtcccacaaatgaaaaaaatttctacatcttacgaggaaagacgga

SEQ ID NO: 318208 - DNA, 101 bp, Homo sapiens
tgttttataagtattgacattacacagtgttaacaatgcatccacagaggttcgagaacttgtcttggacaattgcaaatcaaatgatggaaaaattgagg

SEQ ID NO: 318209 - DNA, 83 bp, Homo sapiens
tggtccccaagccagaagaaatcaacctgctcaccggggagtctgatacacagggtaacaagatgctcaactatagtgctccc

SEQ ID NO: 318210 - DNA, 75 bp, Homo sapiens
tgaaagtcttctaaccattccaaaatctctttcaggttatgatgtgattgctcaagcccaatctgggactgggaa

SEQ ID NO: 318211 - DNA, 73 bp, Homo sapiens
ggtggtagtgcggctggacggccggaatttccatcgcttcttggacacttaatgattgttggcaagaaatgtg

SEQ ID NO: 318212 - DNA, 50 bp, Homo sapiens
aacagtatttactgagagctcatcagacaagttggatggcttgaggactg

SEQ ID NO: 318213 - DNA, 100 bp, Homo sapiens
ttttttgaagaagttctcctttttgaggatgaacttcatgatcatggagtttcaagcctgagtgtgaagattggccctggaaatacaaggataaatggag

SEQ ID NO: 318214 - DNA, 83 bp, Homo sapiens
ccggcagctgccggcggcgcggcgagagagcggctgacagaggggatgcgagtcaggatggctaaaggtgaccccaagaaacc

SEQ ID NO: 318215 - DNA, 75 bp, Homo sapiens
ccgcatggaggccggctgaggagcgccgctgcctcgcctcggttatgaagacagtatggagtttccagaccatag

SEQ ID NO: 318216 - DNA, 83 bp, Homo sapiens
atttgagattgacgcggtgaactctgtccagttttcaaaccacacagggcttgtcaatgaggcagatcagattcaggttcgac

SEQ ID NO: 318217 - DNA, 97 bp, Homo sapiens
gcagctcatcccagaattggtgcgaaatggagatgaggagaatcccctcaaactcctggaactgagagtgggccctggggtgtgtaggatgcgccaa

SEQ ID NO: 318218 - DNA, 75 bp, Homo sapiens
cagaattacaaggtgagatcagccgcccggccaagctatcttctcgctagcaggattttttatcaagcagaaatg

SEQ ID NO: 318219 - DNA, 111 bp, Homo sapiens
cagcctggaaggtgcgtgtggggctgggtctcggagtgggagacgtggagtgcaggatgtaatccctgttcattactacttaatacctccaccaacaaagactaagaatgg

SEQ ID NO: 318220 - DNA, 75 bp, Homo sapiens
gccctgctggaccagctcatgggcacggctcgggacggagcagacaagatggagacaaattcctctctccccacg

SEQ ID NO: 318221 - DNA, 83 bp, Homo sapiens
actcttcagggatgagtcatgtggcagtggaaaatgcgctcgggctggaccagcagagtttatgtggccgaggcagacaagtg

SEQ ID NO: 318222 - DNA, 50 bp, Homo sapiens
ctcctgctctgcagcttctgttcagatttgaacatggaattcaatccttc

SEQ ID NO: 318223 - DNA, 83 bp, Homo sapiens
gagctgagcttcaaaaggggggacatcctcaagaatcgatgatgcaaccaacttggtccagctgtatcacgtgctccatccag

SEQ ID NO: 318224 - DNA, 82 bp, Homo sapiens
caaagcagcgcccgtctgcttcgggcctctggaatttagcgctcgcccagctagccgcaggcaagccgattttttcagttga

SEQ ID NO: 318225 - DNA, 99 bp, Homo sapiens
agcgctaccagaatctaaagcctattggctctggggctcagggcatagtttggtacagcagggaagaactggaaactcagagaaagaaactgcccttcc

SEQ ID NO: 318226 - DNA, 86 bp, Homo sapiens
gggagctggacggcgagcgcgagcggcgcgagaaagtcatcttccacgatgttgctgtgctgacggataagctcttccccatcgtg

SEQ ID NO: 318227 - DNA, 82 bp, Homo sapiens
aagaagttaaggagtatgcccaagttttccgtgaacatgccaacaaattgattgaggatgcctgccatattagatggagagg

SEQ ID NO: 318228 - DNA, 97 bp, Homo sapiens
agcgctgcgcccggacagacaaggagcttggaccccgattggctgcaatgctgaactttaatcttcagcaactttgtggccccaagtgccgtgacct

SEQ ID NO: 318229 - DNA, 75 bp, Homo sapiens
ccttgctccaagatgcttcccaaaaacaccagtgacaatgtcagtgcctactgcctgcatattgctgaggatgat

SEQ ID NO: 318230 - DNA, 83 bp, Homo sapiens
gtcgtctttgcttcagccgcagtcgccactggctgcctgaggagcaggccgggctctcgccatgggtcactgtcgcctctgcc

SEQ ID NO: 318231 - DNA, 83 bp, Homo sapiens
cttcttcgagtatttgtagaaggggtatttgtggtgcagcagattcccaacagtaacctcctcctcctggtgacagaccccac

SEQ ID NO: 318232 - DNA, 96 bp, Homo sapiens
gccagtcgcctccaggccaagagggatccttcacccgtgtctgacgcaaacatgcagatctttgtgaagaccctcactggcaaaaccatcaccctt

SEQ ID NO: 318233 - DNA, 98 bp, Homo sapiens
tccacgcaggggctccggaatcgcccgaccgcacacgttgccaccctgagatctttgtagaatttgatggctgtaactggaagcaacactcctgggta

SEQ ID NO: 318234 - DNA, 75 bp, Homo sapiens
tgagaaaggagacattgtcactgttgtgtcacctgcgctgctggaccgagagcaacagggagctgccaccaccgt

SEQ ID NO: 318235 - DNA, 83 bp, Homo sapiens
ctcattttacttacaggttaactgaagtccaaaagatgtctaggtagttggcaaaaaaggagaaagccactaaggtacaaaag

SEQ ID NO: 318236 - DNA, 100 bp, Homo sapiens
acatcgcctcggtgcagggctccaccccgtcgcctcgacaggttgccaaggaaagtgtactgcagttttacccgaaagctaatatcgttgcctaccatga

SEQ ID NO: 318237 - DNA, 74 bp, Homo sapiens
ggcagatatgtttcaagacgctgtaaacctctgaagagttatggagtggctgccagcaagagacagtgttcaga

SEQ ID NO: 318238 - DNA, 83 bp, Homo sapiens
cgagtgcgaggcgaggtggctcctgacgctaagaggatagcagtgagattcacttcaaagtgaaaatgacaacacatctcaag

SEQ ID NO: 318239 - DNA, 83 bp, Homo sapiens
ctggaatgcatccaagagaatccctcaacatgctggaactgtggctgcaccatctgtcttcatcttcccgccatctgatgagc

SEQ ID NO: 318240 - DNA, 82 bp, Homo sapiens
cgcagtggtcgcttcttctccttgcacacgttagatgtcaagagtacaatgttacctgctgccgttcgttgctctgagtccc

SEQ ID NO: 318241 - DNA, 90 bp, Homo sapiens
cgacggcggcaaatctaagaaatttcatccagttttggatgaaccaatagcagaagctgtctgtattatagctgacatggataaatggac

SEQ ID NO: 318242 - DNA, 75 bp, Homo sapiens
aagagccaagagtcagtattccggccagcttcacgaagtcagagagagctttttagatgaggaatttcctcacta

SEQ ID NO: 318243 - DNA, 51 bp, Homo sapiens
ccacagtgcaccctgctggtgaaggacaagaactacattaccatggacgag

SEQ ID NO: 318244 - DNA, 100 bp, Homo sapiens
gagctgtcctgaccaagaggaccagactttgttaatgaaggtacggttgacatttagggatgtggccatagaattctctcaggaggagtggaaatgcctg

SEQ ID NO: 318245 - DNA, 100 bp, Homo sapiens
aaggactcctgaaccagctcgtcctggagcacctgcagctggcgcctctgcagtggggtccagcaccatgtgctaggtcactcccagcgcgaggccacac

SEQ ID NO: 318246 - DNA, 100 bp, Homo sapiens
ctcttatatgccatctccaagctggggccaggggctggcgtcttcttcctgtcctcggccgagggggagcagatcagcttcctgttcgactgcatcgtcc

SEQ ID NO: 318247 - DNA, 114 bp, Homo sapiens
aaggtactctcgcaggaaatgggaattctacttgtgtgggcggaagcccggctcgctgcaaaacgggcggcccgcgcggaggctcgcgagatccgcatgaaggagctggagcgg

SEQ ID NO: 318248 - DNA, 89 bp, Homo sapiens
ggaaaatgacggttataagaccatttatttctttggagacaaaactatgccaagtaatcaagtcagaggattatatgacttttatctgc

SEQ ID NO: 318249 - DNA, 75 bp, Homo sapiens
cctgcgggcgctgggcgagcggcacaccatggacctcactgtgggacctcctctgtcagagagagcagctttgtg

SEQ ID NO: 318250 - DNA, 90 bp, Homo sapiens
actggcaaaacagatagctttgcatgctgaactgttggattggatgctgctggcaagacaaccattctgtataaactgaagttaggggag

SEQ ID NO: 318251 - DNA, 87 bp, Homo sapiens
ccggccaggtagcttatgtccaacaggatgctacagctcagcagcttgtcagctcatttgcagcttacatttttggtttcttccaca

SEQ ID NO: 318252 - DNA, 75 bp, Homo sapiens
gatggttcctacctggctgagttcctgctggagaaaggctatgaggaagctgccacttttgctagagagcaaggc

SEQ ID NO: 318253 - DNA, 100 bp, Homo sapiens
ttcaatgctgcgaaagctgccaaaagtgacatgcagatgcagaggccaggatgtgggcccagccctgtgccaggaggctggctggaataaaggtacagat

SEQ ID NO: 318254 - DNA, 101 bp, Homo sapiens
tccttatgtctccaacatggaccgcctgggggactcggaactatgctgggctcttgcactgtttggtggaaatggtgagacaggatttgagcaaaattcta

SEQ ID NO: 318255 - DNA, 80 bp, Homo sapiens
gagcagagggacgtggagcgagcgggtggaaaccaggcggccagccagctggagggggaggagccccagccccgcgacga

SEQ ID NO: 318256 - DNA, 75 bp, Homo sapiens
gggatgagcatttggactttatccagtcacacctgcggaggttctgccttcagtaggaagaagtctgctgtgaag

SEQ ID NO: 318257 - DNA, 50 bp, Homo sapiens
ttcggggcatgtacaatcagagaccactaaggcttttcttcctacgatgc

SEQ ID NO: 318258 - DNA, 150 bp, Homo sapiens
tgcggagcttttttggtggttcgagaatgtcaagccagattttgttcagcccagggatgttcaggagctgaaagacgcccttagagatttgtttgattccatggataaaacttcttccagtattccacctattattctactgcagttttt

SEQ ID NO: 318259 - DNA, 75 bp, Homo sapiens
ctacttggacgcctgcattgatgttgttcagtttaattggttggggtcagataagaagaggagtgacaatcaagc

SEQ ID NO: 318260 - DNA, 74 bp, Homo sapiens
gcagagcgcgcagtacctccgaccttagctggatctccaaaatacaagtgaatcacccggcagttctgaggcgt

SEQ ID NO: 318261 - DNA, 100 bp, Homo sapiens
ccgtccctgggggcgggcggagggggcggcggcagcgacggcagcggcggcggctggactaaacaggtcacctgcaggagcaggggagagaagacagaag

SEQ ID NO: 318262 - DNA, 82 bp, Homo sapiens
ggatgatggcatttctcttttaatatctgatactcagcctgaagaaccaggaagacagcgcttccagcaacccgtttgcact

SEQ ID NO: 318263 - DNA, 100 bp, Homo sapiens
tgtgtggaggacatctatgccaacatcttcatcatcaaatgcagccgagagacagagaaggtcctgtcggcggcaagcgagcagcctgcgcaggtggctg

SEQ ID NO: 318264 - DNA, 98 bp, Homo sapiens
cggcagggacagcaggagcagtggtgctgtcagcgcggccgtcggagacatgggagacccggggtcggaggacctgaaggagaagaaggagaaggtgg

SEQ ID NO: 318265 - DNA, 75 bp, Homo sapiens
cggaaaatggccttgtctccggtcgttcccgttcaggagcagtaaagaatttcgtgaaggaggacgtattctagt

SEQ ID NO: 318266 - DNA, 74 bp, Homo sapiens
ccagttgcacatttcctgcaaggactccaaagtggtgaggtactcaccagatgagctgcggtatctgccattaa

SEQ ID NO: 318267 - DNA, 100 bp, Homo sapiens
tctgtcttggaggacatcagaagcaactacactgcgctgcatcggactcgacgcccgctggtgacgcacacgctgcgccggaagtgtgaactgtctgcct

SEQ ID NO: 318268 - DNA, 76 bp, Homo sapiens
accccacaagaggcctattctcacctcaagaatattttagaacagaaggacagaataacgggctcccagattcaca

SEQ ID NO: 318269 - DNA, 74 bp, Homo sapiens
tgcaggcacaggcagcctcagaaattgctgtagggcaccagtataagcatcagacggagtctcactctgttgcc

SEQ ID NO: 318270 - DNA, 96 bp, Homo sapiens
gggatgtctacctggtaatagaggacttgaagcagaaagcaagtgaatacgagtcagaagacatcaactagtcaggcagtcttccgtctccagtct

SEQ ID NO: 318271 - DNA, 75 bp, Homo sapiens
gaaccactgaccattgcccatggcggccctaaattgtattcccattggagagcagcttcagtcggtgttgggcaa

SEQ ID NO: 318272 - DNA, 75 bp, Homo sapiens
aaccctacggagccagagacttcaattgatgaattcctaggacttccggctgctctttggcgtaaattgcaatcg

SEQ ID NO: 318273 - DNA, 75 bp, Homo sapiens
aagccatgcccctcaggctggaacttgccctgtctcctcgcagatgaggcaacatcagatgctgacctgaaagaa

SEQ ID NO: 318274 - DNA, 100 bp, Homo sapiens
cgggaacttggagatggtcagcctgctgctgagcacaggacaggtggacgtcaacgcccaggcacctgcggaactcgagtcatgcaggagcttttgtgat

SEQ ID NO: 318275 - DNA, 83 bp, Homo sapiens
gacaggggtaacacccttccagatgatttttgaggggtagagaagatgaagtccatgtcacagcttgcagttttgtcaagacg

SEQ ID NO: 318276 - DNA, 87 bp, Homo sapiens
ccgaagaggagagagcgcgggcctctaggaagggagtgcatccgccccaacccttttccccctcgtctcctgtgagaattccccgtc

SEQ ID NO: 318277 - DNA, 100 bp, Homo sapiens
aaggagagcccttcagcgaggaagctacacttttcaccaaggaactggtgctgcagcgagaggaattcatgatttgttcctgtagctgaaacatacattg

SEQ ID NO: 318278 - DNA, 97 bp, Homo sapiens
ggagccaacatggcagcggggttcgggcgatgctgcaggcaccaggccatagaaagattttatgataaaatgcaaaatgcagaatcaggacgtggac

SEQ ID NO: 318279 - DNA, 115 bp, Homo sapiens
caggcaacgtgttggaccttccggagcttctcagaagacagagggttttcttttgaggtgtcatggagaaactccagctgggcccagagattctgcagcgggaaaatccaaggct

SEQ ID NO: 318280 - DNA, 51 bp, Homo sapiens
aatctcttctccctccccttcttgattactacaatgcagctagaacgtgaa

SEQ ID NO: 318281 - DNA, 75 bp, Homo sapiens
cggaaactccagcgtgtctccagccgtggtgaatctggattgggaaagtcgacattaatcaactcattattcctc

SEQ ID NO: 318282 - DNA, 97 bp, Homo sapiens
tgagttctgcacccagtcaagctcaggaaggccaagaaaaggtagctacagcaagctgggtagcaggcagatccaaaggatatcatgaagtttccag

SEQ ID NO: 318283 - DNA, 75 bp, Homo sapiens
gtccccctgccccgttcacaatgtaaactgtcttgagccccaccctcacctgcctgtgctggcaaccagtggcct

SEQ ID NO: 318284 - DNA, 100 bp, Homo sapiens
caagctgaagacatcaagaagatcttcgagttcaaagagaccctcggaacgaggaagaaggcacctacgatcaaactctggagttccgtaggggaggtga

SEQ ID NO: 318285 - DNA, 105 bp, Homo sapiens
tagagtcgctggagcgggcggagctgtgcgagagcctcctcacttgggctggagcattggatttgctaaaggagcttaagaatattcctatgaccctggaattac

SEQ ID NO: 318286 - DNA, 90 bp, Homo sapiens
cacaaatgtttttctgttttgcctgaatacatgatttaaacaagagatttccacagaagctgcaggacaagttcgagcatcttaaaatga

SEQ ID NO: 318287 - DNA, 82 bp, Homo sapiens
ctcgatcttgggacccaccgctgccctcagctccgagtccagggcgagatagcagaccccacgttagctgaaatgggaaaaa

SEQ ID NO: 318288 - DNA, 98 bp, Homo sapiens
cgctatgaagagagcgacctggagcggggatacacggttgcgacatgtgcgcggacaaccgcaacggcgagtgccctatgcatgggccactgcactcg

SEQ ID NO: 318289 - DNA, 97 bp, Homo sapiens
agagcacgcccatgctggagaaggagaagtttccgcaggactacttccccgagacaatgcagatcttcgtgaagactctgactggtaagaccatcac

SEQ ID NO: 318290 - DNA, 99 bp, Homo sapiens
acaacagtgatgaggaaagctgtgaaagttctcaaggtttaagtattgaacagacaatgttgaaagatctaaaggagctgtcagatggagaaataaaag

SEQ ID NO: 318291 - DNA, 75 bp, Homo sapiens
caggcaggaaaacgtggatgattactacgacaccggcgaggaacttggcagtgagccatctttatggatttggac

SEQ ID NO: 318292 - DNA, 50 bp, Homo sapiens
aagcactctcaggaacctggcaacaggttatcaatactctggctgaccat

SEQ ID NO: 318293 - DNA, 75 bp, Homo sapiens
atttattatattatcaaaactgagagggtggaccccaagttcctgaggaacatgcgctttgccaagaagcacaac

SEQ ID NO: 318294 - DNA, 100 bp, Homo sapiens
catcctttgaaacgtgtgctgaaaaagaagaatcagcaaatactactgaaagtgcaatatttgagtatcactgcgaggaagtactgtgagagtcttgcct

SEQ ID NO: 318295 - DNA, 75 bp, Homo sapiens
ctttttcagaaatgcgcagagcaaacatctttcaaagatggtttagctgcattgtcattttctatcagttctctg

SEQ ID NO: 318296 - DNA, 50 bp, Homo sapiens
gcgggggagccccgggagccgcacggacacattcagctaacgtattttag

SEQ ID NO: 318297 - DNA, 98 bp, Homo sapiens
ggtgaccaagacgctgcgggagcccggcgccggagcccaagatcaatgaactgagccatgttcaaatccctgttatgttgatgccagatgacttcaaa

SEQ ID NO: 318298 - DNA, 75 bp, Homo sapiens
catctcccttcatgtctgggtcatgatctccagtctatgtgctgaagaagcagcagcccaagagcagacaggtca

SEQ ID NO: 318299 - DNA, 95 bp, Homo sapiens
tggctcggatgctgatggggctggacctgctggtgttcgcccacgaccatgacgaagttatacggaagcgtctcctcattgatggagatggtgct

SEQ ID NO: 318300 - DNA, 101 bp, Homo sapiens
ggaaggaaacctctctgaaatctgacacctgctctcccggcaaggaaacttcgcaggctggatcatccagatgcttggtctttgattggcaatcttcattt

SEQ ID NO: 318301 - DNA, 75 bp, Homo sapiens
cggatgccctgcagtacctgcagaaggtctctggagacatcttcagcagactgtattggtgatcacgtaccgaga

SEQ ID NO: 318302 - DNA, 90 bp, Homo sapiens
cgccgcggggctggccgccatgcacaagctgcacttcctgcacagcttcctggaaagaatcgacagcgtcagcttggttgactacacacc

SEQ ID NO: 318303 - DNA, 73 bp, Homo sapiens
tgaaggctgcgagggactaagagcagagatgtatgacaatcctgcccacaattctgttcttaattgcaagaat

SEQ ID NO: 318304 - DNA, 100 bp, Homo sapiens
tgagaacatcaccgtggtgaagggcatccggagcacaatcattgtggagaagacagttcaagacctcctgaacctgatgcatgacttgagtgcatattca

SEQ ID NO: 318305 - DNA, 98 bp, Homo sapiens
tcgtatcatagttcattttatgtgggaggatgttcagcagcgcggcagagtcatgggggaactcttaacattcagggatgtggccatagaattctctc

SEQ ID NO: 318306 - DNA, 136 bp, Homo sapiens
cagactgttactgctacaatcaaaattcccaagtggagtggaaatacatatggtcaactatgcagaaaatgctgggactgaggaaataaagaatgaaataaatggaaattggatttcagcatcctccattaacgaa

SEQ ID NO: 318307 - DNA, 90 bp, Homo sapiens
cattgaatctctgctctggaaagttcttgtcaataccaaggttgatactgcctctccaagcccaatggaaacatctggatgtgcccctgc

SEQ ID NO: 318308 - DNA, 97 bp, Homo sapiens
tctgcagaagagcatggacctcttaggaaaacaactttccttttactcctttggtataatagtgcatttgcccagtataacatggatcagttcacgc

SEQ ID NO: 318309 - DNA, 59 bp, Homo sapiens
ccatattaatgcagatgaggcgttctttgttccaagatgagatgggattctccaacatg

SEQ ID NO: 318310 - DNA, 88 bp, Homo sapiens
ggagaacaagaaagctcagctggtggtgattgcacacgacgtggatcccatcgaggccaacatagccgaggtagaggtctccatccct

SEQ ID NO: 318311 - DNA, 51 bp, Homo sapiens
cttttgcaccatttggaagaatatcgactcagaattcatgattgaagaaat

SEQ ID NO: 318312 - DNA, 100 bp, Homo sapiens
tatagctttctgcagcaaggaagcccacgtaccaggggctgtcttggtggaatgaagtaacgcgaagaatagaaatgtggatctccatattagaattgaa

SEQ ID NO: 318313 - DNA, 100 bp, Homo sapiens
ttgatcttgcccaggaggaggagaatgtcttggatgcagaattcttaaaggctgaaggccggatgaggggccccagtgttggagcctcaggaagaaccag

SEQ ID NO: 318314 - DNA, 90 bp, Homo sapiens
ggccgcggccctgggagctggaggaaccgcgcaatggcaccagcatgatatcattgatcattcctcccaaagaccagatttcacgagtgg

SEQ ID NO: 318315 - DNA, 82 bp, Homo sapiens
gactcgctactacagagcacccgaggtcatccttggcatgggctacaaggaaaacggccctgaagaggaaagtgaggatgac

SEQ ID NO: 318316 - DNA, 100 bp, Homo sapiens
cagcatgtcggtggcggggctgaagaagcagttctacaaggcgagccaggactggacctacagagacatctgggattttctgcgtcagctgtttgtccca

SEQ ID NO: 318317 - DNA, 100 bp, Homo sapiens
aaaaaaatgactccaaggagaaggtggtcatttcctagagtctggcttgtcagttgtctcctctgagcctccggcctccataagacccaaaacagatgac

SEQ ID NO: 318318 - DNA, 74 bp, Homo sapiens
ctcggcagtcgcgaagcagcaaccatggcttcaccggccagaactgtgaggaaaatatcgacgattgtccagga

SEQ ID NO: 318319 - DNA, 82 bp, Homo sapiens
gtggcccactacgacgcctttggagtggcccccaaagaagatgctgatatgctacaacacggatgaacctggaggacgtggt

SEQ ID NO: 318320 - DNA, 97 bp, Homo sapiens
tgggtgcctggagatgaagctggaaaggcacgtctgagaatggtggatgtggtggagaaagaagatgtgaatgaagccatcaggctaatggagatgt

SEQ ID NO: 318321 - DNA, 75 bp, Homo sapiens
caggtgtaagcgcagaaagcaggcgaacccgcggcgcaataacggtttccacttgagcggcacagtgacagaacc

SEQ ID NO: 318322 - DNA, 100 bp, Homo sapiens
ctggactctactcaaagacgcctgtaccaggatgtaatgttggagaactacagccacctgctctcagtggggctacaatagaagtatctcccgaacagaa

SEQ ID NO: 318323 - DNA, 132 bp, Homo sapiens
taaactaaggcgtctgcgagatgagctgagggctgtggtgcggcaccggcgagccagcacgatgttccacaggagcccgtgcccacgctgtggaacgagccggccgagctgccgtcgggagaaggccccgtg

SEQ ID NO: 318324 - DNA, 90 bp, Homo sapiens
ctccatcctgctggccatgctctacgggacaggtggccatggtggaggtgcagctggagagtgaccacgagtacccaccaggcctgctgg

SEQ ID NO: 318325 - DNA, 100 bp, Homo sapiens
gtgcggtctgggccttttgggcagcttttccggcctgacaacttcatctttggctcccgagccagccgggaggacacttactacagctgctcagaagcac

SEQ ID NO: 318326 - DNA, 74 bp, Homo sapiens
cgatgttccgccggagcttgaatcgttttatctttctcctggcctgccctccatgtcggggagctatcgtcgtc

SEQ ID NO: 318327 - DNA, 75 bp, Homo sapiens
cagacctctgtttggggagacgtccgccaaggtcaaaatgcagatcttcgtgaaaacccttaccggcaagaccat

SEQ ID NO: 318328 - DNA, 86 bp, Homo sapiens
aaacctcgtggcctggtctccattatttgagatgagttacatcttggaggccttttaaaggaccatgggctgtttgaggggccaac

SEQ ID NO: 318329 - DNA, 75 bp, Homo sapiens
ccaggagtttcctgtgtccagcgctgccggagccgcctgaggatgcttaaatggcagaggccaagcccagactcc

SEQ ID NO: 318330 - DNA, 75 bp, Homo sapiens
ggacaagtacttcgacgaacactacgagtaccgttcaacttcctcaattgctttgcctcactcttctatattgcc

SEQ ID NO: 318331 - DNA, 83 bp, Homo sapiens
ccggccttcatcgacatcagtgaagaagatcagggccagctctcaatgttgcaagaaaaaatagaccatttggagcgtttgct

SEQ ID NO: 318332 - DNA, 102 bp, Homo sapiens
ggacgaccggtggctgtggcgacatgtcgacctgacgctctacacgatcgccacatcacagaatcgtatctatctcacagctgacaaccttgtgctgaacct

SEQ ID NO: 318333 - DNA, 100 bp, Homo sapiens
cggactagaatttctacgcagaagtctccctcaggatcagaccgtagcccttccggaaacctccatgggaccagccaccactgttgccttttcaagaacg

SEQ ID NO: 318334 - DNA, 100 bp, Homo sapiens
ccaaaaaaacctttcaagcaagtactcattacagaaggaccatatgttccaaggtggtgaagcagtattttccaatttgaagattcatttgaaggtggct

SEQ ID NO: 318335 - DNA, 51 bp, Homo sapiens
gcaggcgctcaccatgttccctggagtggaggtgaagccggtgctgccaag

SEQ ID NO: 318336 - DNA, 82 bp, Homo sapiens
gcagaacttacgctgcgggaccccgggcactgttgctgctgcgggagtggtgtttccccaggatctgctggagaaaggcctc

SEQ ID NO: 318337 - DNA, 100 bp, Homo sapiens
ggcctaccaggaggccaggggtgtcgccatggagacacagcaggtccccacagaggaagtgtccttggaagtgctgctcagcaacgggcagaaagttctg

SEQ ID NO: 318338 - DNA, 100 bp, Homo sapiens
tgcggctcatggagcagatgaagcacatcaatgagcactccttcaacaatttccagatgaagattggacttcctcgttctgcccatcttcctaacaaggc

SEQ ID NO: 318339 - DNA, 99 bp, Homo sapiens
tctactgcaacttcaagtagtggaaggagtacagggaagtctataagctttgcaacagaattacagagtatgatgaagatgagaatgtgcctactgctc

SEQ ID NO: 318340 - DNA, 101 bp, Homo sapiens
cagctctaagaattcctgctacgacactgaattcaaccaggaggctcttgcagccaatgccggaacaggatttgctgttgctgagcctcaaatcgcaatgt

SEQ ID NO: 318341 - DNA, 98 bp, Homo sapiens
acctttgcagctgccctttgttaaagtttaaggaagaaatctctaaacgttttaaatcacatactgaccaacttgtgttgatatttgctggaaaaatt

SEQ ID NO: 318342 - DNA, 98 bp, Homo sapiens
gcggacggtgctggccccgggcaacgatcggaactcggacacgccaagacaatgcaaactccagtgaacattcccgtgcctgtgctccggctgccccg

SEQ ID NO: 318343 - DNA, 75 bp, Homo sapiens
gagcgacaagccgctggcagccgcggatctcaccgccgctcaggggctggtgaattaccatatctccgtcaagtg

SEQ ID NO: 318344 - DNA, 98 bp, Homo sapiens
ccggactcctgcacgacctgctcctacagccggcgatccactcccggctgttcccccggaggcctggtccagatccctgtgagcatgtaccagactgt

SEQ ID NO: 318345 - DNA, 82 bp, Homo sapiens
tcagaagagccaaggaataaacatgcaatgaacccaaaaggtggattgtattacacagagcatgaatatacttctttaggtt

SEQ ID NO: 318346 - DNA, 101 bp, Homo sapiens
gagccatgccagcaaacgtctacactgtacatgctttttattacaagactacggagcataggaggaaaattcatcatctgtcctgccattgactctaccag

SEQ ID NO: 318347 - DNA, 100 bp, Homo sapiens
agggcggtaaggatttcaacatgcctctgacaatctctagtgtaggtgagctcgtgaaacaatatgaagaggagaaaatagccttttaaggaaattggcc

SEQ ID NO: 318348 - DNA, 100 bp, Homo sapiens
caagatgccgctgccggttcaggtgtttaacttgcaggcagtaccaccgggctctggtggcggtgctcctgagccgcacctggcacgtccgcaggcaggc

SEQ ID NO: 318349 - DNA, 82 bp, Homo sapiens
gcaaggtgggcccggacggcacaccctacgttaccgtgctcaaggtgtggacactgccagcggctgcagccgacttggaatg

SEQ ID NO: 318350 - DNA, 129 bp, Homo sapiens
gcctgcgctatgccctgctgtagtcacaggagctgtagagaggaccccggtacatctgaaagccgggaaatggctcccagccaacctctgataaaccctcccagcggccatcagagagcacaaattgta

SEQ ID NO: 318351 - DNA, 102 bp, Homo sapiens
cgcggccgaagccctggacgactttactgccatccgaggcaactacagcctagaggtgtgagcctcagcagcgatttcattgctggcttttgtggtgagacg

SEQ ID NO: 318352 - DNA, 98 bp, Homo sapiens
aaaggagagcctctgagctcaacggaggattgtgcctgagaagaacccacagaggtcgttcttccctctttccaatagatgatggcttgcttgatgat

SEQ ID NO: 318353 - DNA, 49 bp, Homo sapiens
gtcgctgctggcacttcaggctctgccctggcctcccacgactacatcc

SEQ ID NO: 318354 - DNA, 82 bp, Homo sapiens
cagcccaagaaacatctcaccaatttcaaatccgctgtacccaagaattaaaccaagacaaaggagcttggcctgaaacttc

SEQ ID NO: 318355 - DNA, 83 bp, Homo sapiens
cggactgggaagatggacgcagacaatgcagatcttcgtgaagactctgactggtaagaccatcaccctcgaggttgagccca

SEQ ID NO: 318356 - DNA, 73 bp, Homo sapiens
ccaaatccaagcgcgacaagaaagccgaggcctgcctggagccccagatcaccccttcctactacaccacttc

SEQ ID NO: 318357 - DNA, 80 bp, Homo sapiens
cactgcgtgctgcagtttctttatccctttatctgtgcatgaacagtctgcgggccaggcatcgacatccgcaacgacta

SEQ ID NO: 318358 - DNA, 75 bp, Homo sapiens
ccggggcgccgctggcaggagcgcttggggatcctccaagcgagctggattactacgactcccacaatgtcaaca

SEQ ID NO: 318359 - DNA, 100 bp, Homo sapiens
cgggccatggccactctgccgagcgcagagcgccgcgcgttcgcgctcaagatcaacagctggaaaggcagctcatcatgcagagtgaaatgagggaaag

SEQ ID NO: 318360 - DNA, 143 bp, Homo sapiens
ctatatttaacggagatcctgatgaagttcgagcactaatatttaagaaagaagatgttaactttcagatgacatttgatccagaaatcttcttcaatgttttactgccaccaattatatttcatgcaggatatagtctaaag

SEQ ID NO: 318361 - DNA, 100 bp, Homo sapiens
tcggtccccgccgaagtcaccgtgatcctgttagatatcgaagcaggatgaagttaaaggaagtagatcgtacagccatgcaggcatggagccctgccca

SEQ ID NO: 318362 - DNA, 74 bp, Homo sapiens
ctgttgtagttgcaactcagcttcctgaaaggctcctggaccccgccaatacccagcaatttgatgactttaag

SEQ ID NO: 318363 - DNA, 100 bp, Homo sapiens
ctgaagcagatgattaaggatttagccaaagaaaaagataaaactgagaaagaattgcccaaaatgagccagatagaagagtgatggatgtcatttctcg

SEQ ID NO: 318364 - DNA, 75 bp, Homo sapiens
ctggtccacgccgtggccggagccgtggatttcatgatgtgctgggcaatgaaagaccttctgcttacatgaggg

SEQ ID NO: 318365 - DNA, 100 bp, Homo sapiens
aactgtttaaccggatcccattgtacccagagtgcagagccgcctttccagcatgcaggggctgctcagatcttatgccttcattcatccggcatggtcc

SEQ ID NO: 318366 - DNA, 100 bp, Homo sapiens
gctgcatcagaggctgcagctgtgtgttttccagcaggacgttcagcaggtatacccctagaaacacttaaagaagaaagtcagtcaagacatgttctac

SEQ ID NO: 318367 - DNA, 51 bp, Homo sapiens
ggttaaaacctgacacttttaacagtttttcagaaactttggaattggcag

SEQ ID NO: 318368 - DNA, 96 bp, Homo sapiens
aagatggccgggctgccccgcaggatcatcaagaatgaaatgaatgatgtgcctttctttgatatccaactgccttacgaattggcaatcaatata

SEQ ID NO: 318369 - DNA, 75 bp, Homo sapiens
agggaaccctggtcaccgtctcctcaggcagtataccttaaatggcaagaaggaaataaatcatctgacatcact

SEQ ID NO: 318370 - DNA, 50 bp, Homo sapiens
cttctggacatggggtttgaggcaagcctgaagatgaccatggacaagac

SEQ ID NO: 318371 - DNA, 83 bp, Homo sapiens
cttcagtcctggctctgacaagccctccagtaatagttatgcacgagtgcgagctgtggtgatgacccgagatgactcaagtg

SEQ ID NO: 318372 - DNA, 74 bp, Homo sapiens
gagaaggactccaaggcggagcaggccaaagtgaagaagggaaatgtttcaacgtgcgcaagcgttgcggcggc

SEQ ID NO: 318373 - DNA, 101 bp, Homo sapiens
ccaacatcctgctcctgctcatggacgacggtgacgagaacaagtcagtgcgcgaccgtttcaacgcccgccagttcatctcctggctccaggacgtggat

SEQ ID NO: 318374 - DNA, 100 bp, Homo sapiens
atttcagaatgtttcatcattactaacaggatattcctcatgacattgctgtctggtttcccaggcagctgcagacttgaaacagttctgtctgcagaat

SEQ ID NO: 318375 - DNA, 96 bp, Homo sapiens
cagatgaacacaatgacgtacagaagaaaacctttaccaaatggataaatgctcgattttcaaagtactatactggcaattgctggagaagatttt

SEQ ID NO: 318376 - DNA, 130 bp, Homo sapiens
tcagatattttccgacgagcatttgcttcccgagtatttcctccagagattgtggagcagatggcatcatctgagggttctccataaacacggttagccttccaagctgctgtcctgccagttgatatga

SEQ ID NO: 318377 - DNA, 82 bp, Homo sapiens
actcatcatggggctcctgtacaagggcgaccattgacgaggtggagacggacgtggtggagattgaggccaaactggacaa

SEQ ID NO: 318378 - DNA, 50 bp, Homo sapiens
gctgcagtctttgtgggacaaggtctcggcgcggaagatggccggcggcg

SEQ ID NO: 318379 - DNA, 75 bp, Homo sapiens
ggcactgccatggcccctgtgctcagtaaggactcggcggacatcgagattgcttccaagtatgatcatcaggca

SEQ ID NO: 318380 - DNA, 100 bp, Homo sapiens
tctcgctatagccgtttgagggaagaaggaggaaaattacccggtatcgttagaggtttgtgaaatggctgctgacatttctgaatccagcggggctgac

SEQ ID NO: 318381 - DNA, 88 bp, Homo sapiens
cgactccaaggaaacgcggctgaccctgatggaggaagtgctcctgctgggcctcaaggaccgcgagtaacaatttggacaagacagc

SEQ ID NO: 318382 - DNA, 82 bp, Homo sapiens
tgccaaggtgaagaaaagagggatatcgagtagcaatggtctcagatgatgataaagaaaagggagagggagctcttccaac

SEQ ID NO: 318383 - DNA, 98 bp, Homo sapiens
ggatacatgccctacctcaacaagtacatcctggacaagtggctgcaggtttcgtcctccgccagtgtggcagtgatggccaatggggactttggaga

SEQ ID NO: 318384 - DNA, 99 bp, Homo sapiens
gctgctgcgactgccctcgctgcgcaccgtgtcctcctccgtcatcgagcagctcttcttcgtccgtttggagctgggcaacagcctggacaagtgcaa

SEQ ID NO: 318385 - DNA, 82 bp, Homo sapiens
aagaacccgggcctggtcctggacatcgttgagggggcctggaatgagatggtgactcaccccgggtactatgctgagctgg

SEQ ID NO: 318386 - DNA, 100 bp, Homo sapiens
gatgacccttttgattctgacttttcttgtccagtcaaacttcatagagaggccagtaagcttgtcatgtcctatgtggcagctgtttgtggaaaaggag

SEQ ID NO: 318387 - DNA, 83 bp, Homo sapiens
gctggaggttccttcactgtgcgtgctgaccatgcactgccagtgaaagatgtagaagataaacctgaacaacaaaccagaac

SEQ ID NO: 318388 - DNA, 98 bp, Homo sapiens
ccaccaggatccagtttcaccccccatagctccccctagttgggttcctgaccctcctgcgatggatcctgtacgctacttcctgaagaataaggtca

SEQ ID NO: 318389 - DNA, 100 bp, Homo sapiens
atcagtttttactagagccaatcacctgtcatgcctggaacagggatcgtactcaaagtgaaattcgttattctacatggaagaaagctgtgatgaagtc

SEQ ID NO: 318390 - DNA, 100 bp, Homo sapiens
cgcaggcctcgtgccgttacggccatcacggcggccgcagtggcgtcctggagccctcctcagggaggagagagcgatggcttttttcacccagaaggcc

SEQ ID NO: 318391 - DNA, 75 bp, Homo sapiens
atggacaaaatgctatgttaagattgtgcttcaagaagaccatagggaagaacgcattttcatcttgctgcaaaa

SEQ ID NO: 318392 - DNA, 75 bp, Homo sapiens
tgctgcctgtgatgggagattcaaagtccagcatggaggtggcaactatggcggtggtcctggttatagtagtag

SEQ ID NO: 318393 - DNA, 74 bp, Homo sapiens
ggaaacccacaggcacacccaacacaagcccaccgtactgttgtgtggatctgtattcacttcgtactggggag

SEQ ID NO: 318394 - DNA, 75 bp, Homo sapiens
gtcaagcgggagtatgaccacatgaatggatccaggtctctgagcggcccctgatgttcctgttggacactcctg

SEQ ID NO: 318395 - DNA, 100 bp, Homo sapiens
gaaggtggcctccagaatcgccgagggcttcagcgacactgcgctcatcatggacactcatgaggaccatgatacttccactgagaatacagacgagtcc

SEQ ID NO: 318396 - DNA, 75 bp, Homo sapiens
agggtgattctgaagagggtctggaggagccttctcaagaacagaggttgctatcaagatcatagataagaccca

SEQ ID NO: 318397 - DNA, 129 bp, Homo sapiens
taggcacccgagcagcgccagcggccgagcgggcggcttcctggcctgggcgctccggtggcggcggagctcaccatggatgatgatatcgccgcgctcgtcgtcgacaacggctccggcatgtgcaag

SEQ ID NO: 318398 - DNA, 51 bp, Homo sapiens
gacctcatctttcacaaaggccttcacaacagctcacaatgtctctctgca

SEQ ID NO: 318399 - DNA, 95 bp, Homo sapiens
ggggagtgtgtgttgccatcgcgtctccgcctgcaggatgctttggagtctgcaatgaagaatggcctgtggggtcacgctctgctacttgcaag

SEQ ID NO: 318400 - DNA, 97 bp, Homo sapiens
ctacagaagatgctgaagctgaggacacacccaggaaaagactcaggacggacaagcacagtcttcggaagcctgatctagttgaatctgaagatgt

SEQ ID NO: 318401 - DNA, 83 bp, Homo sapiens
gctgggacagccatggtttcagacgctcaaccagaacgtaagttctttccaaagaaaatttgttggtgaggtgaagaggtgtg

SEQ ID NO: 318402 - DNA, 75 bp, Homo sapiens
gctgagccgcgctgcgcagccgacgcgggaatgaagcgggcgctgggcaggctgaccccgcactacatctaccca

SEQ ID NO: 318403 - DNA, 100 bp, Homo sapiens
ttgggacttattgcctgttcagtactgtgggtgatatttgcctttagtgcactcttctccttcacagtaaagtggctggagtggacgcttctcttgtgag

SEQ ID NO: 318404 - DNA, 100 bp, Homo sapiens
gtttgcgctgccatccgcaaaggctttctcgcttgtcaccttgccatgtggaagaaactggaaaatgcatccgatgcagatttatggctcctgaacagtt

SEQ ID NO: 318405 - DNA, 101 bp, Homo sapiens
aggaacaagttcatcaagcagatcttccaggccgatgtcgccatggacacagcattgttggttttgccatgtactattttacctatgacccgtggattggc

SEQ ID NO: 318406 - DNA, 96 bp, Homo sapiens
agaaaatccatgctggcgatgaagtgattcaagttaatcatcagactgtgtattgacttgaagctgaaagaaaagccttagttggccatgctggaa

SEQ ID NO: 318407 - DNA, 50 bp, Homo sapiens
gcctcctgagttgctgggactacaggagcccatgatgctgcccaaacctg

SEQ ID NO: 318408 - DNA, 87 bp, Homo sapiens
caacttcaactccttgatggcgataatctatgatgataattccgaagaaggcttccacactattcattcaggaaggcatgaatatgc

SEQ ID NO: 318409 - DNA, 75 bp, Homo sapiens
accagacaagttcagagaatatcatgcttccagtctactgtaaagcatgcttgagagttcaaaccggcttgatga

SEQ ID NO: 318410 - DNA, 75 bp, Homo sapiens
cctggaggggcgaagaggacgagggggccaaggcttcctccggggcacagtatgaaaacccaccacatatctatg

SEQ ID NO: 318411 - DNA, 94 bp, Homo sapiens
cgggacagctctctagaaactcgctctaaagacggaaccgccacagcactcaaggtgttcctgaaaagccccatagtgattgagtcttcaaaac

SEQ ID NO: 318412 - DNA, 75 bp, Homo sapiens
tgggccaacatgttccaacactacatccgaaacatcgatatattgaactcttcttgaattctactcctggaggcg

SEQ ID NO: 318413 - DNA, 75 bp, Homo sapiens
tggaggaaattcagaagaaattagaagctgcagaagaaagacgcaagaagttgattcaagtcagttgagacgcca

SEQ ID NO: 318414 - DNA, 83 bp, Homo sapiens
cggcgcccggatgggcagctgagatatctcccggggccaattcagcatctctacctggccatcctaacaaggtgatttgtgaa

SEQ ID NO: 318415 - DNA, 82 bp, Homo sapiens
gcagcggggacttcggcggcggcgcctcaggcacctcggcccgggttccacgcaggcgcgggggacgacggcgggggctaca

SEQ ID NO: 318416 - DNA, 76 bp, Homo sapiens
caaggaaatgaccaccaaggacaaaactcgagtaaccagctcataaatcacatcgaacagtttttggatactaatg

SEQ ID NO: 318417 - DNA, 75 bp, Homo sapiens
aatggatgaaaggaaccgacagggaaaaatatttacttccttggagccagagcatgaccttaatgatgtttgtct

SEQ ID NO: 318418 - DNA, 75 bp, Homo sapiens
cccctcgttgatgagagcattcgaagtgacctcagcagggcatccagcgcacgcaggagatggccaccctgtggg

SEQ ID NO: 318419 - DNA, 51 bp, Homo sapiens
cggcgtttcacggtggcacatacatgggtaattcaatattcccagctcctg

SEQ ID NO: 318420 - DNA, 89 bp, Homo sapiens
gaaagggaaaaccttctcagagagcatgaaaggctgctaaaacacaagctgaaggatatatcccctggggcagctggtggggctgaaga

SEQ ID NO: 318421 - DNA, 96 bp, Homo sapiens
gccggctgaggagcgccgctgcctcgcctcgcgtttgcctcagcatggagggcggggccgcggcagccacccccacagcactgccttactacgtgg

SEQ ID NO: 318422 - DNA, 73 bp, Homo sapiens
gcctcccgagtagctggaattacaggttgaaaaagatcatctagcaaagccttttttcccagctacatataag

SEQ ID NO: 318423 - DNA, 100 bp, Homo sapiens
gaacgggagcggctgaagaaaaggggatgatgtgcattgtgaaaccagatggacctccccagctctgcaaaacagatgaaattggagaaatctgtgttag

SEQ ID NO: 318424 - DNA, 100 bp, Homo sapiens
gagggcagggacgtgttggacacgctgactttgtaggctccgccaagaggcgccgcaggagagctccaaacgagaatggaagccgctggaggaccgtagc

SEQ ID NO: 318425 - DNA, 100 bp, Homo sapiens
accagtgttctagaagagtgtgaacagaggaagtacacatcggtttcccttccagccattggaacagtttatctggaagaatgtgaactggctaaacagc

SEQ ID NO: 318426 - DNA, 100 bp, Homo sapiens
gggctcctgtagaggaggctggagattccacccaaatcctcttctccaagaaggtgacttcatggtcatgacgattttcttcaatgtgagcaggcggttt

SEQ ID NO: 318427 - DNA, 75 bp, Homo sapiens
gatctcgggctcggaacgagactgcacgtctgcgctcctcagaccaccggcaggtgaacagcctgatgcagaccg

SEQ ID NO: 318428 - DNA, 85 bp, Homo sapiens
cacgtgaagctcaccgacagtgccctgagggccttcgagagctaccgcgccagacaggtcgcaatggaagaagagatcgccgcgc

SEQ ID NO: 318429 - DNA, 74 bp, Homo sapiens
gagacgcgctgccgaggagaacccagcgggacaggaagatgtcacccaagcgcatagctaaaagaaggtccccc

SEQ ID NO: 318430 - DNA, 75 bp, Homo sapiens
cagctattgccataccttgctctactaaccattccaatgagaaatcaagctgctgatgaagaagcatttgaagat

SEQ ID NO: 318431 - DNA, 75 bp, Homo sapiens
ggggcccgcgctgcagccggagacccggagaaaggataaggagggttcctgcccccaggtgaacattaactttcc

SEQ ID NO: 318432 - DNA, 75 bp, Homo sapiens
ccaccgaggctggagggggagaacacccagggacaagctgtggggggtctgtgtctccatcctggctctcttgcc

SEQ ID NO: 318433 - DNA, 82 bp, Homo sapiens
gggcacatgtacgggaaggacaaagtggctcttggagtttgacaaggagttgtctgtctttaaggacagactgtatgaactg

SEQ ID NO: 318434 - DNA, 75 bp, Homo sapiens
gagaattggaggatcccgagtctgccatgctagatacgctggatagaacaggtggtgaaattgcctctacctttg

SEQ ID NO: 318435 - DNA, 100 bp, Homo sapiens
caggaacaaacggagacatgtgactttaccctcttcccctcgaagcaacactccaatgggccctttggacaggcacttcggcccctcctggactccattc

SEQ ID NO: 318436 - DNA, 80 bp, Homo sapiens
tgacacgtggggattatggggattacaattcaaggcagcggaggaggagaaagagatggacctcccggactcggcctcga

SEQ ID NO: 318437 - DNA, 90 bp, Homo sapiens
gaaaagcagaggctatactttaagactgtgaaagagttcaaggaggaactggcgctgaagaccctggggacagatggcctttttctcttt

SEQ ID NO: 318438 - DNA, 92 bp, Homo sapiens
ggcggcggcgggtcaggagcagccgcagcgacggcggcgacagcaggtcaaaatgcagatcttcgtgaaaacccttaccggcaagaccatca

SEQ ID NO: 318439 - DNA, 56 bp, Homo sapiens
ccgagttccccacctgcgattgcgtcgctcaccaagatggaggaacagagcccatg

SEQ ID NO: 318440 - DNA, 105 bp, Homo sapiens
aaggcttcaaaattgacactatgggaacctaccatggtatgacactgaaatctgtaacggttgccgaggagcccaagtagaagaaatatggagtttagagcctga

SEQ ID NO: 318441 - DNA, 48 bp, Homo sapiens
tgttcatgaggtggatattttcagtactatactggcaattgctggaga

SEQ ID NO: 318442 - DNA, 83 bp, Homo sapiens
cggggatgtacactcactgattcttaaggctctgttccttagagatccaaagatttgactgatgaattagctcagaagttatt

SEQ ID NO: 318443 - DNA, 90 bp, Homo sapiens
gtcaattctggagacctgggtgtgggtcaagcaaccagagctgcagctttggaacagttcaagtctcttggtgctgagcccttggaggtg

SEQ ID NO: 318444 - DNA, 101 bp, Homo sapiens
ggcaatgaaagaaattacagcaggcttaccagtgaaagttgtggtggatgtcttaagacaagcttctaagcggcccagcccaatccagctttactcccctc

SEQ ID NO: 318445 - DNA, 98 bp, Homo sapiens
tcaaagacgccgtggtgcagcacagccagctcgccgcagccgtggagaacctcaagaacatcttctcagggaaggtgaagaaggagctggaccctgac

SEQ ID NO: 318446 - DNA, 100 bp, Homo sapiens
agatggcatcattcgtccttatgacagacaggaatctgagggctctgacttacttgagtgggatggagtaggacctcttccagactgtgctgaaccacca

SEQ ID NO: 318447 - DNA, 98 bp, Homo sapiens
gaaaagctggaaaaagttcaaaataaagcagcatcacttattcagcatccacctccagatcgacaggcagtacctggaagaccaggcccctttccctc

SEQ ID NO: 318448 - DNA, 76 bp, Homo sapiens
ctggccgagccgtggatgtcgctgaattgcccgtgcccccagtgctacaaggtgagctgcctggaaatccctgggc

SEQ ID NO: 318449 - DNA, 82 bp, Homo sapiens
gccgatccagcctgcggagcctgtggggcagggtcctgcagttctgagcttgggttccctttgcctggacaccaaccaagcc

SEQ ID NO: 318450 - DNA, 98 bp, Homo sapiens
acatatctgggacagaacctctggaaataacctgtatacatgcagaggagacatttcaggtgactggccaacagggctgccagaggaacccgaccaga

SEQ ID NO: 318451 - DNA, 100 bp, Homo sapiens
cccccccaccccttggagccaggcgccggggtctgaggcccctccagccagcgtcaggtgcagaatggcccctctcctgatgagatggacatccagagaa

SEQ ID NO: 318452 - DNA, 90 bp, Homo sapiens
cttcccatcgaagctctagaaatgaatgtttccatctcttcagagatgaaccaggaagctcttcgtgggcggtcttgactggagcacgac

SEQ ID NO: 318453 - DNA, 71 bp, Homo sapiens
cagcagctctcgctccagaagcttcactttggatggctgcagctcctccaagttactgttttgttgccttc

SEQ ID NO: 318454 - DNA, 75 bp, Homo sapiens
gcggcatcctgctgctctccaagcagcactaccggctggtgaatccagtctggaaaaagtgtttggaagaacaag

SEQ ID NO: 318455 - DNA, 76 bp, Homo sapiens
gctgtatagcctgcagaacagacttgcaccttcgagatcccctgtgtttacccagctggaggatgatgaacagtcg

SEQ ID NO: 318456 - DNA, 90 bp, Homo sapiens
agactatcaggctgaaagttctgcataataaatgtgcttctcatctaaaacctgaatgtgactgtggacctttgaaggaccatattttac

SEQ ID NO: 318457 - DNA, 100 bp, Homo sapiens
acagaagcataaccgttggtcgtggggaggctctctccatgggagccctagcatccacagtgcagcaaatgcagccctgaggatttggctactgcatata

SEQ ID NO: 318458 - DNA, 100 bp, Homo sapiens
aaggaaatcatgtcaagcgaagccttgaaaaagctgccctgagacggtgtcccgccgaaaggtaaaatcccagaggaatccaaagccctctctttattgg

SEQ ID NO: 318459 - DNA, 100 bp, Homo sapiens
gccctgtccctggctccctcattaccgtcgccagcggagcgaacccgagagcgtggagcgggctgggccagcctgtgggccaaagctgaccaactccccc

SEQ ID NO: 318460 - DNA, 83 bp, Homo sapiens
gccttaacaagcgcacggagccctcaagacaatgcagatcttcgtgaagactctgactggtaagaccatcaccctcgaggttg

SEQ ID NO: 318461 - DNA, 118 bp, Homo sapiens
agggagcattgcagcagccactggctttgtcaaaaaggaccagttgggcaagcccaggaacagcaaagtttgatacacaccaaccaggctgaaagtcatacagctgttggcagaggag

SEQ ID NO: 318462 - DNA, 75 bp, Homo sapiens
ctttgatggtggccctcttgatccccggcttgctgaagtcaaagcctgaggccaagtgcccatcttggtgtcttc

SEQ ID NO: 318463 - DNA, 74 bp, Homo sapiens
ttgtcttacttggctgttgcttctcctgctgctggggaaaaggaacttgtctgtgtgtccagaggaggagtcca

SEQ ID NO: 318464 - DNA, 99 bp, Homo sapiens
ctcatatcttcacttggcaaactcaacaagggtcaaggagctgagcccccacagtgggcccagtggagagcagttgattcaaatggaaacagaagagat

SEQ ID NO: 318465 - DNA, 101 bp, Homo sapiens
gaaaggcccacctgtgtcctggttgagggtctccagggttctttggggcccgaggataaaagaatcagagtgtctcaacccttgacaagaggaccaagtgc

SEQ ID NO: 318466 - DNA, 100 bp, Homo sapiens
ctcagagcaggcagctaataaagatgtcaacggtcaggagtccactcctggaattgttccagatggtatgatctcgtgaaatcttgagagaaactgaatg

SEQ ID NO: 318467 - DNA, 100 bp, Homo sapiens
gcgggacggagcggccggggcctggggctgcctgccgggcggccgggcgcggcgagcccagtctgaaatggttgtgacaaataatctcttggatctgccg

SEQ ID NO: 318468 - DNA, 75 bp, Homo sapiens
gtgccacgccgcccaggagacccctctgctgcaccacttcatggcctatgaaggggtgctgcagctggtggaggc

SEQ ID NO: 318469 - DNA, 75 bp, Homo sapiens
gccattctacaccaaccccatcatgtacaaaatcatcaggtgtgatccctcacatccacaaatctctgattggaa

SEQ ID NO: 318470 - DNA, 100 bp, Homo sapiens
ctgggatatccgcacgttgtactcaacagtacctgaagatgcagagcacaaggcagaaaatttactggttaaggaggtcaaagagttagtggaagcagag

SEQ ID NO: 318471 - DNA, 100 bp, Homo sapiens
cgcaggcctgtcttcctattcaccgtgggcagcagagggatggctgctcagctgctgactgatgaggcactggagcagacaagatggagacaaattcctc

SEQ ID NO: 318472 - DNA, 74 bp, Homo sapiens
catggagtgatggtcccaccgcagcggtgtgctgatgtatcgggactaccccctggaactattcatggcccagt

SEQ ID NO: 318473 - DNA, 98 bp, Homo sapiens
gaagcatcgaaagcgttggagaggtgttaccggaacggcggcgacaagggtgttcccgaactagagtggaatccagcaagctaaagtgcaaattcttc

SEQ ID NO: 318474 - DNA, 75 bp, Homo sapiens
tctcagatgacttcgtctcccaccgactgcctgtttaaggatcctggtgatgcggcccaacaggaagcaaagcac

SEQ ID NO: 318475 - DNA, 100 bp, Homo sapiens
gataaacgaggggctggaacacctcgccaaagcagagaaatagagaggcagatgcgaaccagaacaatgggacctcctctcaggacacagcggtgactga

SEQ ID NO: 318476 - DNA, 75 bp, Homo sapiens
ccttggaagcagaacccatagaactcgtggaaactggtgagcagtaggtcatccagtcccagtgtcagaatgatt

SEQ ID NO: 318477 - DNA, 107 bp, Homo sapiens
cccgagacacaccaggccggcaggctgagaaaagcgagaccgcgtgcgaggaccggtgagaagccctaccactgcaactgggacggctgcggctggaagtttgcgcg

SEQ ID NO: 318478 - DNA, 50 bp, Homo sapiens
caggcgctcaccatgttccctggaggagaaggaccgtccccacgagggga

SEQ ID NO: 318479 - DNA, 98 bp, Homo sapiens
ttaagatttctgttgacaaagaaacccaggaaggaatcattactatacagaagcggacgcccgtggtttactgtgtgaggttagccaaggcccttgta

SEQ ID NO: 318480 - DNA, 80 bp, Homo sapiens
acgaccacgtgcggaggaaggactcctcgctctatatagtatcagatgtagaaggtggtgatggactgcagctcagaaag

SEQ ID NO: 318481 - DNA, 105 bp, Homo sapiens
gcgccagatagaaaacggcgagagtgggcgagaacgtccactgcgggccggcgaaagctgtgccggtggtggtgtgcacattgagccccggtatagacagttccc

SEQ ID NO: 318482 - DNA, 100 bp, Homo sapiens
cgttcttggagttgctggtgttctatactggaagaggcatgccagaggtagagcagaaatcaggacctttgatatttaggaaaactatgtttaactctac

SEQ ID NO: 318483 - DNA, 77 bp, Homo sapiens
gcggcgctggagagggggcgctgagctgttggggtaagaatgattgatgttggctgatattggagtgctcattcaca

SEQ ID NO: 318484 - DNA, 51 bp, Homo sapiens
ttatattatcaaaactgagaggtatctagttacagaatggttgaatgacaa

SEQ ID NO: 318485 - DNA, 101 bp, Homo sapiens
tcttgagaataaagatgagctctgaaaattgtttcgtagcagagaacagctctttgcatccggagagtggacaagaaagatgctccagaccttgtatgatt

SEQ ID NO: 318486 - DNA, 100 bp, Homo sapiens
atctcagcttctggtttctaagtccatgtgccaaaggctgccaggaaggaggcacaactacaagagcggaatgaccctcagcaactgctattagatgcca

SEQ ID NO: 318487 - DNA, 90 bp, Homo sapiens
gaaaatctacacagtacagacagtacagattttgagaagagggggaaaaaggaagtttgtcctgtcctggatcagtttctttgtcatgta

SEQ ID NO: 318488 - DNA, 98 bp, Homo sapiens
gtgtggatgctttacttttagacctcagacaaaaatttccacccaaatttgtgcagcattgacaagatatctaaagtcacctctcctgtgttggtcat

SEQ ID NO: 318489 - DNA, 95 bp, Homo sapiens
gttttagtcttgggggtagagtgactgcttgcgaaccagttcagcagtgcctcagggaatcttgatcacgtggacaaagggttttaaggcaacag

SEQ ID NO: 318490 - DNA, 100 bp, Homo sapiens
cgacctggccgagctgcccagcgagatcctcggggccccagaggccgcggacaccgacctggaggttatcaatactctggctgaccatcatcatcgtggg

SEQ ID NO: 318491 - DNA, 74 bp, Homo sapiens
gggcgaaaaggacctgcgcctgggggaccgcgtgctggggatggccaggtggattttgatgaattcatgaccat

SEQ ID NO: 318492 - DNA, 82 bp, Homo sapiens
ccagaaactagcaccagccccaaatttcgtccggcgccagctgccagtcgaggaaccgaacccagccaaaaggcttctcttt

SEQ ID NO: 318493 - DNA, 101 bp, Homo sapiens
aaggaataatttatgaagctccgttgactaccgtggagagatcataatttggggttcaagattccagacctttaatgaactctttgatgctcacaaaacag

SEQ ID NO: 318494 - DNA, 117 bp, Homo sapiens
ctcctggtcagtgtaattctaatctcacggatatcctctgttgggggagaagtctcaaatatctatcagtgtagaagagtgggaagacaccaaagactccaaagaacaagggcacca

SEQ ID NO: 318495 - DNA, 100 bp, Homo sapiens
gggacatggagtgttccttccgctagtgatcctttgcaccctgcttggagacggacttgcttccgcacaacattctgaaattttttggttattgtaatga

SEQ ID NO: 318496 - DNA, 100 bp, Homo sapiens
ctcggagtcggagggcttggagttccaggtgttgggggccttggaggttggatggcaagcatgtggtgtttggcaaagtgaaagaaggcatgaatattgt

SEQ ID NO: 318497 - DNA, 90 bp, Homo sapiens
cttcgctggccatttaggagctctgctcaaagccagacggtcgttgaggacttccacatggagattggcacaggaccagactcaagacac

SEQ ID NO: 318498 - DNA, 83 bp, Homo sapiens
tgaacttaggggcacttctgttttcctgagggctacaccgttttcttttgaaagagaatccacattcatctcaatggaaggat

SEQ ID NO: 318499 - DNA, 83 bp, Homo sapiens
tgaccgctcgcggcctggcccttggcctcctcctgctgctactgtgtccagcgcagacaatgcagatcttcgtgaagactctg

SEQ ID NO: 318500 - DNA, 50 bp, Homo sapiens
gtggacatcacggacatccagaagccgggtgttcccagacaaagaggtca

SEQ ID NO: 318501 - DNA, 75 bp, Homo sapiens
attttggaccagggagccctacagcgtctcttcaaaaaggtcattgattacaacggggaacgcacgctggatggt

SEQ ID NO: 318502 - DNA, 75 bp, Homo sapiens
gaggaaccattgtgtgtacacttttggccaggggaccaagctggagatcaaactactgccaaatctgtcgaaagg

SEQ ID NO: 318503 - DNA, 76 bp, Homo sapiens
cttctccaagggggacataatctactctcatcagccagttttcaggtgttggagcgggccggagagaagtagagtg

SEQ ID NO: 318504 - DNA, 75 bp, Homo sapiens
gataggcacggacgcaacacttttggaacttagacgctagatgaaacaggcgcctatttaatcgacagagacccc

SEQ ID NO: 318505 - DNA, 82 bp, Homo sapiens
tccggatacatccacccagcccaagatgaccggtgagaagccctaccactgcaactgggacggctgcggctggaagtttgcg

SEQ ID NO: 318506 - DNA, 85 bp, Homo sapiens
caggactctttctgttcaggccagaccctctgggagcttctcagccattttccacagatcaggttttgggatttgagattgacgc

SEQ ID NO: 318507 - DNA, 51 bp, Homo sapiens
tcaggaaccaccagtgacagaattgagcattctgcacagctgaaggcccag

SEQ ID NO: 318508 - DNA, 90 bp, Homo sapiens
gaaagtacttggctagtggatcctttgacaagtatgttcatatctggaatactcagaatgacatgtcacatagaccagctgaacacttgg

SEQ ID NO: 318509 - DNA, 50 bp, Homo sapiens
ggatgatgtttgtgcgcaaagccaggcgtcgaccagaagattatgatatt

SEQ ID NO: 318510 - DNA, 78 bp, Homo sapiens
aaacatccatatcataagtggaattttggagatattcaaaggagtggaagctggacacactatgtgacttgtatgaaa

SEQ ID NO: 318511 - DNA, 83 bp, Homo sapiens
ccggactcatacagagattgaaatgttccttagaaaggagcagcaggactattggaaatgcacttcatgcaatgaaatgaatc

SEQ ID NO: 318512 - DNA, 75 bp, Homo sapiens
ggaccgggagatgatcctggcggattttcagttggagaaggaggagcagatacacagtgtggacattgggaatga

SEQ ID NO: 318513 - DNA, 75 bp, Homo sapiens
aggacggatgaggaaagctttattgtattcagttacagaacctgtggagatgcccgagtggtaaaagacatggca

SEQ ID NO: 318514 - DNA, 75 bp, Homo sapiens
gacccgttaacgcgttgattcgttccgtgctgctgcaggttttgctgatttgggaaaataaagactatggatcaa

SEQ ID NO: 318515 - DNA, 100 bp, Homo sapiens
ctgaggtccagatgaaagagaagtttctggtcactccccaggattatgcgcgggcagctgcaatgactctccgcacggtattattgtcattgcaagcact

SEQ ID NO: 318516 - DNA, 50 bp, Homo sapiens
cagacagcagtggccccgagcgctgctgatgtgtgggactggagacatca

SEQ ID NO: 318517 - DNA, 100 bp, Homo sapiens
ggatggtggactcagagaccaataaaaataaactgcttgaacatcctttgactggttagccaggaaaaagtgacccattttgtgtggtagaactgaacaa

SEQ ID NO: 318518 - DNA, 100 bp, Homo sapiens
aaagattgaaggaaggtgatacaatgatggggcagcaagtggccaaagtaagccatatcaaagacttcattgaaaaataccaaggatctcaaagaagtcc

SEQ ID NO: 318519 - DNA, 100 bp, Homo sapiens
gaggatctggcttcccatttttagaatcagagaatgaaaaaaacgcaccttggagaaaaattttaacgtttgaggtgtgagttcttgatacgaatgaaag

SEQ ID NO: 318520 - DNA, 60 bp, Homo sapiens
agcctcccaaatagctgggactacaggtgccccccactcggccagcagcgcatccctgca

SEQ ID NO: 318521 - DNA, 134 bp, Homo sapiens
cccaacacttaggcaggaggatcactcgagcccagaagatcaagactagtgtgagcaacaaagagctgctgctcaagaggtcatcaaaataatcaccaaacaatttgtaatttttaataatacttacatttaca

SEQ ID NO: 318522 - DNA, 74 bp, Homo sapiens
caaatgtctttcgtggaagacataagcctgcctagggtagttaaaagacgagtgaatgctctcaaaaacctgca

SEQ ID NO: 318523 - DNA, 82 bp, Homo sapiens
agtgcatgatgtgcgatgtgcggaagggcacctccacccgacttcccaagtaagaagcggaagaggagccgctggaaccaag

SEQ ID NO: 318524 - DNA, 100 bp, Homo sapiens
cactgtgtttgaccactatgcaggtgattctggacaaggattaagaatgtggatcaagcaggttttaaatcaagatttaacattccaacacataaaaatt

SEQ ID NO: 318525 - DNA, 80 bp, Homo sapiens
tggtcttcgatgcacaggagtggccgttatggaacgcaggtatatgccctcattttgcttaagacctctggccagagcag

SEQ ID NO: 318526 - DNA, 82 bp, Homo sapiens
cggcgctgttgctgggctcggcgtgctgcgacagtcagtcggatgcggagactgcagccgccgcgggcgaagtgctagacct

SEQ ID NO: 318527 - DNA, 51 bp, Homo sapiens
cgaggacaaaagcaacgacttcgtatggtgaaggaaatactcatgaccagc

SEQ ID NO: 318528 - DNA, 100 bp, Homo sapiens
atgcggaggctgcctcggcggagcagaggaaccacacgctgatcatgtgtggcaaaggagcagagaactttgacaagttcttcacacgaggacagcccgt

SEQ ID NO: 318529 - DNA, 75 bp, Homo sapiens
cggggatcagcggctgtccttccacctgcacgtggcagtgtcaacagcatctccaccctggagcctgtgagccgg

SEQ ID NO: 318530 - DNA, 71 bp, Homo sapiens
ttttggacctgaaacagaaattctggaacacctatatgaggtgaatacgctttggccgaatacacagaagt

SEQ ID NO: 318531 - DNA, 50 bp, Homo sapiens
cgaggtctatggccccatgaaggtgcactacatcctccaggaggtggtga

SEQ ID NO: 318532 - DNA, 52 bp, Homo sapiens
tgtgaggcctccccagccatgtgaaactattcattccacttaaaacctgaaa

SEQ ID NO: 318533 - DNA, 101 bp, Homo sapiens
cagaaagtgaagctgtttcgggccagcgacccgctgctcagcgtcctcatgtggggggtaaaccactcgaggatcattgctgtcttcaaacccaagaatga

SEQ ID NO: 318534 - DNA, 99 bp, Homo sapiens
ccaaggtctctcgcgggcgggagaacggaaaactcccaacttcctggtacaagatggtggtgaccccccggagggcggcggtggccatagccggctgct

SEQ ID NO: 318535 - DNA, 100 bp, Homo sapiens
tcttacgtctgcggaagtgcagctgcctcagttcttagcgcagtacagtgctgtggataccaatccactttctctgtatgtcatgcatccattctggaac

SEQ ID NO: 318536 - DNA, 101 bp, Homo sapiens
cagccctacagagcgcacacataaagtcattgcagtcgtcaacaagatggtgagcatgatggagggtgtcatccagacccctggctgtggagtgagcaaca

SEQ ID NO: 318537 - DNA, 75 bp, Homo sapiens
cggctgcgggaggaggccatcctgcagatggaggcctccggtgtggctgtctctgatggtgtcatcaaggtgttc

SEQ ID NO: 318538 - DNA, 51 bp, Homo sapiens
gaagcctcattgcggaagtcctgaaaccaaagcccaaaccccggccatcca

SEQ ID NO: 318539 - DNA, 101 bp, Homo sapiens
tgcccgcgcaggcacccctctggctgctcagtcctgcctcagatgcacgaaggagagagagtgagaagtctctagaaaatgaaacactcaataaggaggaa

SEQ ID NO: 318540 - DNA, 75 bp, Homo sapiens
ggaaccgctggctgtcagacagcttcaaggagacggattgaaagaaggtggcaagaggaagaagcagaagcagag

SEQ ID NO: 318541 - DNA, 74 bp, Homo sapiens
ctggcgcatctggtggtcgtcatcaccttattctggtcccgggccagaagcctgtcttagatgttcatgcagaa

SEQ ID NO: 318542 - DNA, 100 bp, Homo sapiens
gacgctctctttggtgtttacataagaagaggacttccaccatctcatgcccaggaactgaagctgcccaccttccgagcccactccccactcctgaaga

SEQ ID NO: 318543 - DNA, 49 bp, Homo sapiens
ggccaggagccaggggcccagaagtctgaaccggacggcttttctcatt

SEQ ID NO: 318544 - DNA, 90 bp, Homo sapiens
cacagaactctgtaaatctgtctcccagcagtcacgcaaacaacttatcagtagtgacttacagtaagtctagggacaggaagatggttg

SEQ ID NO: 318545 - DNA, 75 bp, Homo sapiens
cgggtggtggttaaaccatgttaaggaggattttacagaggttgtctatcaacgtctatgactacaactgccatg

SEQ ID NO: 318546 - DNA, 82 bp, Homo sapiens
cctggctccggaggccagcggccgggatagccccggcggagcccgcagcttccctgccgtgtgtcccggcatggatatccgg

SEQ ID NO: 318547 - DNA, 99 bp, Homo sapiens
tctgcgccatcctgcaccgccaccggcccgacctcatgtatgctgccccacaaaaccaagcgaggccaggccgctctggaccgtctcaaggtgtttgac

SEQ ID NO: 318548 - DNA, 100 bp, Homo sapiens
gaccccactcccatgccgacagtatgggctgctgtcttcaggaccattgcaaggaattttggagagtaaaaggctgaaccttgttaaagagaaaaccatt

SEQ ID NO: 318549 - DNA, 100 bp, Homo sapiens
gccgccgcagcccccagcatgtcgggcccagacgtcgagacgccgtccgccatccagatctgccgacaactcgagagatgatcgctcgttctgctgctac

SEQ ID NO: 318550 - DNA, 100 bp, Homo sapiens
cggccaaggacctggccgacatcgcggccttcttccgatccgtcacagtgagggcgcatctcaccgggtggctgatgacactgaagaaaaccttcgtcct

SEQ ID NO: 318551 - DNA, 100 bp, Homo sapiens
gcagactcaaccctatgctgtctaccctcaggcaacccaaacgtatggactacctccttttggtgttggtggaatgagcgttgcatgtgtcttgaagaga

SEQ ID NO: 318552 - DNA, 99 bp, Homo sapiens
aactgagaacaatgacacagtcattttggacccaccactggtagccctggataaagatgcaccggttccttttgcagcttgcattgaaaggctctagtt

SEQ ID NO: 318553 - DNA, 75 bp, Homo sapiens
gttgaaggctgcagtgagccctgtttttgccaccacactccagcttggggtcctaaaaaggtggggacgctgtgg

SEQ ID NO: 318554 - DNA, 50 bp, Homo sapiens
gaagtggtgaaggagtgtgtgcagcgggtctgcccagggagccccgtcac

SEQ ID NO: 318555 - DNA, 100 bp, Homo sapiens
acagaatttctcatacgtgacttgactggttcgaggacagcacccgccaacctcctggaaggtgctaggcagctggaagagaaagaccgagtgctaaaga

SEQ ID NO: 318556 - DNA, 100 bp, Homo sapiens
ccaccctccaactttgcgacggaaatgtgtcatcgaaagccaggattgatgaggagcttctgggagatggacacagctatagtcctagagctattcattc

SEQ ID NO: 318557 - DNA, 100 bp, Homo sapiens
ggaagatagtcttgggacccttgcatggtgtttcaaagggtggtgaagaactaagattctgaagactactttgaggtcaacattccaacagacctacgag

SEQ ID NO: 318558 - DNA, 83 bp, Homo sapiens
cgtggacttctgcaccctgttccactaccaccaaatcctggcccggctgcaggtatcactcctccttgcttcaatctctttgc

SEQ ID NO: 318559 - DNA, 78 bp, Homo sapiens
caagccagcaaggacaggagcctgctgcgtgggccagagtcacagtacctccctgcacttggctattcaaaacgggtc

SEQ ID NO: 318560 - DNA, 80 bp, Homo sapiens
agtgatcttggtgccatagagagtctccgggtccctggaaagacttaattcagtgcacaaatgagatgaatgtgaacatc

SEQ ID NO: 318561 - DNA, 100 bp, Homo sapiens
tctgatgtggtgcttttgaaccactggaaagtgaggaattttgaagtacaccgtggtgacattgtatcattggtttcttcaccaaaggacatggatgaaa

SEQ ID NO: 318562 - DNA, 99 bp, Homo sapiens
ctgcacgacgatgaggtgacagtcacggtggcccgggagagtggcccaccccacatgaagaactttgtgaccaaggtttcggttggggagtttgtgggg

SEQ ID NO: 318563 - DNA, 120 bp, Homo sapiens
catgagttagtcgcagacatggacaccaaacatttcctgccgctcgagacacctatggctgccgatgaaggctcagcagagaaacaggcaggagaggcccacatggctgcggacggtgag

SEQ ID NO: 318564 - DNA, 83 bp, Homo sapiens
ctcggacccatcgccgcttctagaccctactgcggtctcggatattgccgggccaagaagcttgagagaagaaaaatttcaga

SEQ ID NO: 318565 - DNA, 82 bp, Homo sapiens
ctgtaaagggtatctgatcaagccaacaacagtgacggaatgcctccatacatttttctggatatgccgcagaaggatccgt

SEQ ID NO: 318566 - DNA, 82 bp, Homo sapiens
ctcgggcagaacggtctggataatgggagccttcacgtaaatgggtccagtcatgcctcccagtaagaagccagaaagctca

SEQ ID NO: 318567 - DNA, 82 bp, Homo sapiens
tgaagtcggcgtgggcgtttgaggaagctgggaattctgtggccacactgcgaggagatcggttctgggtcggaggctacag

SEQ ID NO: 318568 - DNA, 51 bp, Homo sapiens
agctgctgcaggactacatgctgacggatgtcctgggctgcaatgtctcac

SEQ ID NO: 318569 - DNA, 98 bp, Homo sapiens
tgtagtcacaggagctgtagagaggaccccggtacatctgaaagccgggaaatggttcctttgcccaaagactcaacaggtgcagcagatccccccca

SEQ ID NO: 318570 - DNA, 75 bp, Homo sapiens
tgtgaagagaccaccaaacaggctttgtatcaatgtccgagttaccaccatggatgcagagctggagtttgcaat

SEQ ID NO: 318571 - DNA, 100 bp, Homo sapiens
cggcgagtttccgatttaaagctgagctgcgaggaaaatggcggcgggagcgggagatacagatgacccaccaagaattactcagaaccctgtgatcaat

SEQ ID NO: 318572 - DNA, 101 bp, Homo sapiens
aatgagacagcaaaagttcaaatggcctgtttcaagtttctgatataaaacgatgacattttcaggaaaatcctgtttggtgaggattcatcaacctccag

SEQ ID NO: 318573 - DNA, 101 bp, Homo sapiens
gtacacggcatgcggaggggtgaacccgcagcagtgcctccctgtgctgctggacgtcggcaccaacaatgagggtctaaaattcccaggactccacagct

SEQ ID NO: 318574 - DNA, 88 bp, Homo sapiens
cgcagtggtcgcttcttctccttggaaggcagcaacaactcatctccagtggattttgtaaataacaagaggacagacttatcttcag

SEQ ID NO: 318575 - DNA, 73 bp, Homo sapiens
agattcagtatcactcgctcccttgatgatcttgaggtcattcccaaaagcaagttcgtcttggtgaagttcg

SEQ ID NO: 318576 - DNA, 90 bp, Homo sapiens
gtggacccttggagccatcctctacaggacccgctttctaccattaagggaaaagcttcactctgaccatcactgtcttcacaaacccac

SEQ ID NO: 318577 - DNA, 100 bp, Homo sapiens
aacaagccgtggaataggtgtatcaagtaatggtgcaaagcctgaaatcatgtttgagaccttcaacaccccagccatgtacgttgctatccaggctgtg

SEQ ID NO: 318578 - DNA, 104 bp, Homo sapiens
gagcacagagcctcgcctttgccgatccgccgcccgtccacacccgccgccaggtaatctgtaagtcagatgctccaacaggggatgttcttcttgatgaagct

SEQ ID NO: 318579 - DNA, 88 bp, Homo sapiens
gactccacgattatggttgtttggctatgatgaggatcagttccatgacaagaccccttatacgattatgtttggtccagataaatgt

SEQ ID NO: 318580 - DNA, 82 bp, Homo sapiens
tcaccgacagtgccctgagggccttcgagagctaccgcgccagacagggcgtgatggtgggcatgggtcagaaggattccta

SEQ ID NO: 318581 - DNA, 51 bp, Homo sapiens
ccgcgatctgcaccgggggaagcgcatgaaaaagcttgtggtgaagggggg

SEQ ID NO: 318582 - DNA, 100 bp, Homo sapiens
tgaagactcaatccgagctagaccgcatcaatgcccagtacctggaagtcaagtgcggtgctatgatccttaagctgagttctggatgcgggtacccttg

SEQ ID NO: 318583 - DNA, 75 bp, Homo sapiens
ctcttctgcctcttgatctccgccaccgtcttcaggccagagtgcctggaagagctgggatgtctggttgagtcc

SEQ ID NO: 318584 - DNA, 98 bp, Homo sapiens
acacatgtcaagcaggagccccgggagcgggagaacagcgagtccaaagaggaggaggagatgttaaagtaacccatcttgcaggacgacattgaaga

SEQ ID NO: 318585 - DNA, 100 bp, Homo sapiens
ctgcgctcctgcagccttgtgctggagcaccagccagacaacatcaaggctctcttccgcaagggcaaggttgattgtacacagcactatgaactctgct

SEQ ID NO: 318586 - DNA, 74 bp, Homo sapiens
ggcgctgcaacaagaccctgcccgtggccttcaagcatttatgacattaacagagaacaggactatgtcaagaa

SEQ ID NO: 318587 - DNA, 100 bp, Homo sapiens
tataaaagttgctgtttactgttgctgtccgtaaactggaacctctgttcactcaagcacaacattctgaaattttttggttattgtaatgatgttgatc

SEQ ID NO: 318588 - DNA, 90 bp, Homo sapiens
atggtggactacctggtgcctctagtgaaaagaacaagaagtcttaccctcaggtcaaatgtttaaatgggtgagaagaacattaattgc

SEQ ID NO: 318589 - DNA, 89 bp, Homo sapiens
cgccgctgcaccttcaccgcgtacccgggacccgcccgcccgcgggagatgctgggctcttgcactgtttggtggaaatggtgagacag

SEQ ID NO: 318590 - DNA, 100 bp, Homo sapiens
cagggagcaggcacagccccgcaggatcccaagccctgcagactaccgcagccagcggatttgacgggatctgaactatacacccaggcggccagcctcc

SEQ ID NO: 318591 - DNA, 96 bp, Homo sapiens
tccagaatatctggcaccagagctgttcatagtttcaagttgagtcgaaaccatgtggactggcacagtgtggatgaagtatatctttatagtgat

SEQ ID NO: 318592 - DNA, 100 bp, Homo sapiens
tattaggccgtgctccaaagtcatcgtccggtttctcactgtgatgatgaagcatggccataggaaaaggatacagagtagagtttcatgaacctgaaac

SEQ ID NO: 318593 - DNA, 100 bp, Homo sapiens
aggaggggaacactggagactgggagatggcagctgcacttcttgcggctggatcacagtgtggcaaaggagcagagaactttgacaagttcttcacacg

SEQ ID NO: 318594 - DNA, 75 bp, Homo sapiens
tggcacccctgtaaccataatcattccgaagcaagaattctgcttggtcagaatcgtgatggcattgtgttcagc

SEQ ID NO: 318595 - DNA, 90 bp, Homo sapiens
cggcattggagccctcatcgaggaggagcgcaccgctgtcaagctcaacactgggatgggcagccagatatatcaaggccttttggatct

SEQ ID NO: 318596 - DNA, 88 bp, Homo sapiens
actacctgaatttggcatcactcacttcattgcaagttccagcgcacttttccaacacatcactgcattatttgaatgcagcatggca

SEQ ID NO: 318597 - DNA, 75 bp, Homo sapiens
cgcgcctctcccaggacccgcctggctgcgagatatgctgaaggggatgctaagggagataaagcaaaggtgaag

SEQ ID NO: 318598 - DNA, 86 bp, Homo sapiens
aaatgccagccagaagaggcgttcgctgcgcgtgcacattccgggggcccgtctgggcagaaaccatgtggaagagctgctgcgct

SEQ ID NO: 318599 - DNA, 90 bp, Homo sapiens
ccacgacccacgagatcatggggcccaagaaaaagcacctggactgtggaattctactaagtatcagtcggccctacaagacaaagccca

SEQ ID NO: 318600 - DNA, 82 bp, Homo sapiens
acaaatatacgtgtatgttcacttacgcctctcaaggagggaccaatgaggtgtgtccagcatcatggcctcctcccagtaa

SEQ ID NO: 318601 - DNA, 75 bp, Homo sapiens
tttcatgttgctggtggaccagattggtaactcccatgtgcattctactgacggcatgggtagcaagaaactaaa

SEQ ID NO: 318602 - DNA, 83 bp, Homo sapiens
ctgggagggagccgcgcgcctttgtgcgcgcgccgaggagctggcgttacagcccaaagatgatattgtagaccgagcaaaaa

SEQ ID NO: 318603 - DNA, 83 bp, Homo sapiens
caagtattgctgtgggtgctgggacttcccgtccgcggcgtggaggctgatgcttttttcaaagccgctataagccttgttcc

SEQ ID NO: 318604 - DNA, 87 bp, Homo sapiens
cgaggcctgggttacaagcagcaagtgcgcggttggggccactgcgaggccgttttaggtcctagcagaagatgtgactcagactgc

SEQ ID NO: 318605 - DNA, 90 bp, Homo sapiens
caacggcatagcaatcgcacagctgaggaggatggcagaatagctgtgaaggcatgtgaaggcttgatgctgttagtaagtttgccagag

SEQ ID NO: 318606 - DNA, 97 bp, Homo sapiens
cagggaccagcagttactgggaaggtatatgactgatgggatgttacttcgtgaagctatgaatgatcccctcctggagcgttatggtgtaataatt

SEQ ID NO: 318607 - DNA, 100 bp, Homo sapiens
cgtcccatttcgcccctcgcgtccggagtccccgtggccagcttggtgtaaaaattgccaaagcagttgcctgccacaactttgtaaaagccaaaaagga

SEQ ID NO: 318608 - DNA, 100 bp, Homo sapiens
tgatggcccggcagacgggcgtcttctacctgacgctcgtcctcatcctggtcactagcggactcttcttcgccttcgaaggatgagaagaatatcgtcg

SEQ ID NO: 318609 - DNA, 100 bp, Homo sapiens
gggacgtgtacagcactgactactacaggagtgatttgccccggatcaaaacggagattgaggccttgaagaacctgagacatcagcatatatgtcaact

SEQ ID NO: 318610 - DNA, 97 bp, Homo sapiens
ctccggccgcagccatgtgggacccgcgggcagctagacgaagttatacggaagcgtctcctcattgatggagatggtgctggagatgatcggagaa

SEQ ID NO: 318611 - DNA, 95 bp, Homo sapiens
atcgagttgagtacttggatagacttatacctcagaaaatttttactactggagatgtcaacaaagatgggaagctggattttgaagaatttatg

SEQ ID NO: 318612 - DNA, 71 bp, Homo sapiens
tctccttccccgctctccaaaacaaaagcaagccgggaggctggctgcctctcctcctgctgtctctgctg

SEQ ID NO: 318613 - DNA, 75 bp, Homo sapiens
attcctccaaacctggcaggaatccctggggggaaacccgtccagtacaacaagttcacggctgccggggcccag

SEQ ID NO: 318614 - DNA, 90 bp, Homo sapiens
cgcacttccagcatgctgaagtcaggacctgtatgaggctggagagaagaaatgggggacagatgaggtgaaatttctaactgttctctg

SEQ ID NO: 318615 - DNA, 83 bp, Homo sapiens
ggagagtacatccccaccgttcctcctgcaaggagaatccttttaaccggaagccatcacctgcagcgtccccagccacaaag

SEQ ID NO: 318616 - DNA, 75 bp, Homo sapiens
cgtcaacgccatcgcagtgctgcacgaggagcgattcctcaagaacaatataatgaagatctggaacttgaagat

SEQ ID NO: 318617 - DNA, 90 bp, Homo sapiens
ccggcctagcgtcctggaattacttcaatcaatttcggagcaacatcccctgtcacctggttgatatctcttgcggattaccctgcagtg

SEQ ID NO: 318618 - DNA, 94 bp, Homo sapiens
accgcagtatcatgctggccaagaagatcatcattaaggacggaggcacggtcaaaatgcagatcttcgtgaaaacccttaccggcaagaccat

SEQ ID NO: 318619 - DNA, 75 bp, Homo sapiens
gagtgcagcaggacactatcctggccgagggccttcacttcagaggtctgcggggtttccgagaggctcgccggg

SEQ ID NO: 318620 - DNA, 100 bp, Homo sapiens
aattggggaagtctgttgtatatcaagagaccaatggagacgaacaggaggcattgaactcaatcatgaacgatctggtggccctccagatgaaccgacg

SEQ ID NO: 318621 - DNA, 75 bp, Homo sapiens
gaatttgattaactcattcaaggttacccagttgctctattaccaggttttaaacttcgccatgatcgtgtcttc

SEQ ID NO: 318622 - DNA, 82 bp, Homo sapiens
ctcgactcttggcgccaccgcctcatgcactgtgtagcaccagcaggcagctggctccggttttggggtatctgggctccag

SEQ ID NO: 318623 - DNA, 87 bp, Homo sapiens
caatctctcctgcaagtatcccagtgatcctgccatgaagcagtttctgctgtacttggatgagtccaatgccctggggaagaagtt

SEQ ID NO: 318624 - DNA, 87 bp, Homo sapiens
cggtgcgggctccttgcggcaggtcccaagagcctccggtgtggctgtctctgatggtgtcatcaaggtgttcaacgacatgaaggt

SEQ ID NO: 318625 - DNA, 73 bp, Homo sapiens
acgcagccgcccgtggcgcttaagaaagaagctccagtggctgttggacaattatgagacagcagaaggagtg

SEQ ID NO: 318626 - DNA, 75 bp, Homo sapiens
ggcgaagtggagagtgacatgcagttggatggcggtgactgcgtggttgatgtaagacatgaccatagaaagaac

SEQ ID NO: 318627 - DNA, 82 bp, Homo sapiens
cgccatgaaggcctcgggcacgcatgatgccttcttctgtagagtgggcgctttgcagaatacgtgttgaatgaaatcactg

SEQ ID NO: 318628 - DNA, 49 bp, Homo sapiens
caaccggttcctcccaggcggcaagagcttgtcaggaagatcggaggtg

SEQ ID NO: 318629 - DNA, 82 bp, Homo sapiens
cctgacagggccacgcacctgatcgccgcgcgagctgatagcagaccccacgttagctgaaatgggaaaaaacttgaaggag

SEQ ID NO: 318630 - DNA, 72 bp, Homo sapiens
caaatggcgtgcaggcacagatggctaagttgtcactcagcccagtccatcagtttctcagcccagtacttc

SEQ ID NO: 318631 - DNA, 101 bp, Homo sapiens
attatattggaccagagcttgattctgatgaagatgatgatgaattgggtagagagaccaaagatcttgatgaggacccagatgatgtggtaccagttggc

SEQ ID NO: 318632 - DNA, 97 bp, Homo sapiens
caacagcaggggtcagctgggccgcaggggcgcgcagcgcggggagctgccagggctgaccccacattggacaccgctgcatccatgtccatcacac

SEQ ID NO: 318633 - DNA, 100 bp, Homo sapiens
ataatgatagaatgaagaccacaataaaagagacctctacttagctcagcaattcttaccttaatcctaatgtacctggctagctggtggtgagtagggg

SEQ ID NO: 318634 - DNA, 100 bp, Homo sapiens
cgcctcgcacccccagccagtccgtcgatccagctgccagcgcagccgccagcgccggtgccggtggtggtgtgcacattgagccccggtatagacagtt

SEQ ID NO: 318635 - DNA, 82 bp, Homo sapiens
gaggaattcgccgtgcccgagaatagctccgtccagcaggctgaaggtgatgtggccgccctcaaccgacgcatccagctcg

SEQ ID NO: 318636 - DNA, 95 bp, Homo sapiens
gggtgaagtgctccgccgcccttgcctccaggggacaagggcctgtccgacacgccctacgacagcagcgccagctacgagaaggagaacgaaat

SEQ ID NO: 318637 - DNA, 97 bp, Homo sapiens
tccttctgaaaaggcgatcttcctgtttgtggataagacagtcccacagtccaggatacagttgatatattagttggatggcatatagatcatactc

SEQ ID NO: 318638 - DNA, 90 bp, Homo sapiens
tgccccaaatgctgcagcatcaagcccgaccgagcccaccactgcagaacaccttccaccatgaccacctcagcaagttcccacttaaat

SEQ ID NO: 318639 - DNA, 129 bp, Homo sapiens
tacatcagacaatataatcatgggacaagctgatgtctccagaccggtaaatccagatgcagttggacaggaagatgtcacccaagcgcatagctaaaagaaggtcccccccagcagatgccatcccca

SEQ ID NO: 318640 - DNA, 98 bp, Homo sapiens
tgcttcagagactcaggggcatcctctgcgccctccggaggaggcggacactgctgacgggaccagcacctacaagcagcactgcaggacaccctcct

SEQ ID NO: 318641 - DNA, 98 bp, Homo sapiens
cacctcgctgttcgcggtgacggtggcgccgcccggggcgaggcagggccagcagcaggcgggagcgctaagctgcaacgaaaacgacgcagagcacc

SEQ ID NO: 318642 - DNA, 75 bp, Homo sapiens
acgcccctccctgctgtcacccagacccgcggtgcgacagatggcgttcaggaagtggcttatattcactcaaac

SEQ ID NO: 318643 - DNA, 96 bp, Homo sapiens
aatgccaccgaggaatctgatgctttggcaaaacttcggaaaaccatcataaacgagagccttaatttcaagatcatcgcacccccagagcgcaag

SEQ ID NO: 318644 - DNA, 100 bp, Homo sapiens
ctgcgctgacccaggggctggagcgaatcccagaccagctcggctacctggtactgagtgaaggtgcagtgctggcggtactctgatggctaccgcagct

SEQ ID NO: 318645 - DNA, 100 bp, Homo sapiens
tgacccaggatggcatccaggagagcccatggcaggaccggcacggcgaaaccttcaccttcaggatcagttcgacagcttagacaagcatacacaatgg

SEQ ID NO: 318646 - DNA, 75 bp, Homo sapiens
tgaagaaggttccaacaaaagactttttaatgttgatcggcatgttggaatggatggagcgtatccgtgccaagc

SEQ ID NO: 318647 - DNA, 75 bp, Homo sapiens
ttggtgttgaaagtgaaatgtcatgcctctgaaaatgaagttaaagccttccatctgaagtatgatgaagttcgt

SEQ ID NO: 318648 - DNA, 82 bp, Homo sapiens
attttttccttcaacttgtggatgcaggcaaggtggatgatgccagagctctcctacagctccctgtgctgtcaggaatcta

SEQ ID NO: 318649 - DNA, 100 bp, Homo sapiens
ttggcacctatgcgcctgcagaggtctatgcctctcagcgaatgagagctggcaaaggcaaaatgagaaaccgtcgccgtatccagcgcaggggcccgtg

SEQ ID NO: 318650 - DNA, 75 bp, Homo sapiens
cagctttggataatgacgacagcaacccgaagacagggaaatttagctatgtcttctcattacactgaagacctt

SEQ ID NO: 318651 - DNA, 100 bp, Homo sapiens
atgcattgaggatgtgtttaaggatggccaggccatgttatgggatctcaacgaaggcaaacacctttacacgctagatggtggggacatcatcaacgcc

SEQ ID NO: 318652 - DNA, 74 bp, Homo sapiens
ttttatacctttggtaatatcgcatcaattgggaggaatccatcaacagcatcaagtccagactaagcaaaagt

SEQ ID NO: 318653 - DNA, 98 bp, Homo sapiens
cggagatcctgatgaagttcgagcactaatatttaagaaagaagatgttaactttcagattttaccaaatgttgcaagaactctggagttcttatggt

SEQ ID NO: 318654 - DNA, 75 bp, Homo sapiens
ggtcccgcctgctcaacacgccgggagctgtgaaattagttgtaactgaaaatgtctgacggtctggataatgaa

SEQ ID NO: 318655 - DNA, 100 bp, Homo sapiens
gtgcgcggaggcttggtgtgccagcaacagggagctgccaccaccgtgtactgtgctgctgtcccagaactggagggtctgggagggatgtacttcaaca

SEQ ID NO: 318656 - DNA, 83 bp, Homo sapiens
ggcggatgaagcagctggtggggctctactgcgacaaggctgaccccgcactacatctacccaccagccatcgtgcagcccag

SEQ ID NO: 318657 - DNA, 82 bp, Homo sapiens
caaaatggcggatcatgtgcagcttgataaagatgacatggtatacatggaagcatatgataaattgttggagtcctggtta

SEQ ID NO: 318658 - DNA, 101 bp, Homo sapiens
agtgaggcagctgcaaggagggcggcgggactgcactcgagtgtccagacctgctcgatggtggaatgaatcttacttgttgaatatcttctggttactag

SEQ ID NO: 318659 - DNA, 96 bp, Homo sapiens
ttttctgggggctcgtgacaagcggggcgcagactaggcaccagcatgcagagtagtcctcgatgggcttcctggaatattggtgtgtttatttgc

SEQ ID NO: 318660 - DNA, 115 bp, Homo sapiens
ctaaccagacttacctggtgtcagaacgcctagaaagattcaattagcagagcctcacagacaatggccaaatgtgtcaaagctgtcacagagggtgcccaggcagtagaggaac

SEQ ID NO: 318661 - DNA, 90 bp, Homo sapiens
gtgaggaggaaaacacccccattattcgccatgaagtcagcgtaaataatgtaacacataaactgtgcagtaaccattgctttaataagt

SEQ ID NO: 318662 - DNA, 90 bp, Homo sapiens
attgcgcgtggaacggctgcttttggaagaacagagtgttctgaacatcaacacaaagtggaagaaccttaagctgaaggtacagtatat

SEQ ID NO: 318663 - DNA, 100 bp, Homo sapiens
gatccacagctaagacaccgggacctcctggaagccaaaaatgtattctgaaaaggaggacaaatatgaagaagaaattaaacttctgtctgacaaactg

SEQ ID NO: 318664 - DNA, 75 bp, Homo sapiens
ctcagccactggttgccttggtaggcaataaaagcagtcctgttcagaatgagcaaggctttgtggagttcaaaa

SEQ ID NO: 318665 - DNA, 100 bp, Homo sapiens
ctccaggtgacagcaatcagctggcctggtttgatactgacctgtaaatcatcctttagggtcatcacactgaaacggtgttcaaccgggttttgccagg

SEQ ID NO: 318666 - DNA, 141 bp, Homo sapiens
ggagccagcggctgaggaggggccccagcagcccccgaaggccctatcaggacatggagtatgaaagacgaccaagatcactccatggatgaaatgacagctgtggtgaaaattgaaaaaggagttggtggcaataatggg

SEQ ID NO: 318667 - DNA, 101 bp, Homo sapiens
cccgcgcctgcacttagccccgcgcccgaggtgaatacatcaagacctggaggccacggtacttcctgctgaagagcgacggctccttcattgggtacaag

SEQ ID NO: 318668 - DNA, 76 bp, Homo sapiens
atcatttaaaccacatggctatctaaagaggtcatgttccttggggaactggaagaaatattggatgtgattgaac

SEQ ID NO: 318669 - DNA, 98 bp, Homo sapiens
gcaccttcaaatgctggagctcaggcaatcctcttacctccgctttccaagcagctgggaccacagctgtaagagctcattttggaggaataatggat

SEQ ID NO: 318670 - DNA, 75 bp, Homo sapiens
cagattcgcagtggtcgcttcttctccttggtaattgaacggcgcattcggcaagagctgcctttcatggccaca

SEQ ID NO: 318671 - DNA, 83 bp, Homo sapiens
cagttttgaaatcgacacacaaagaatagagttgagcctgtgggacacttcgggtggtggcctctgccatccccgacgaccag

SEQ ID NO: 318672 - DNA, 90 bp, Homo sapiens
gccacttggggccaccgcttctggcggccgcaggagcgacccacagacagatatcagttttagagaatgtggcgtggagaaattctcaag

SEQ ID NO: 318673 - DNA, 82 bp, Homo sapiens
gtgcagccgcgaggaggcgcgggaggtgttcgagaacgaccccgagacggaatgggcaaagaagtggggaatctgctactgg

SEQ ID NO: 318674 - DNA, 96 bp, Homo sapiens
cggaggaggatgctcctgcctcccagagaggggagccggcgaggatcaaaatcttcgaaggagggatcgccacgacgggagcagcaatgggaatcc

SEQ ID NO: 318675 - DNA, 82 bp, Homo sapiens
ccctcaaaccttgcttctaggagataaaaaggtcactgaactgatgcaggagcagtcatacctgaagtctgaattgggcctg

SEQ ID NO: 318676 - DNA, 83 bp, Homo sapiens
ccacacaggagatccaggtcaccagcatccactggagctacaagaacagccctcagcgcctttttccaggagaccaacatccc

SEQ ID NO: 318677 - DNA, 75 bp, Homo sapiens
gttttgctatgcttttctccaaagaatcagcatgattcttcagaggctcttcaggttctcctctgtcattcggtc

SEQ ID NO: 318678 - DNA, 100 bp, Homo sapiens
gtggtggtcttcaaatctctcattacaactcatcatttgatggtgtatggaaatgaggactaccgaccagactcccggaaatcatgttggtaggatccca

SEQ ID NO: 318679 - DNA, 90 bp, Homo sapiens
ccatggcagatggcaacagaggatgtcaacaattttttggaggaaacttttgagaagaactttgaaagagaaacccataaaataagtgag

SEQ ID NO: 318680 - DNA, 134 bp, Homo sapiens
cccaccccaaactggatcctacagccaagctccaagtcaatatagccaacagagcagcagctacgggcagcagagtcctccccttggaggggcacaaacgatcagtaagaatacagagcaacggccccagccag

SEQ ID NO: 318681 - DNA, 90 bp, Homo sapiens
tgggatttgaacacctgaagctccccatcaagggaatgaacttcacactaatggcagcattagccgctgttgggcctcctaatcctcggg

SEQ ID NO: 318682 - DNA, 100 bp, Homo sapiens
ttttgctgtgatcaaggctatgttgcctctgtgttaggccaatgagccctgggctcccccagtgttgcctgggtctgactttgcctcagtgaaaactgcc

SEQ ID NO: 318683 - DNA, 76 bp, Homo sapiens
ttctcctgcctcagcctcctaagtagctgggactacaggtgtggatgaggtcaccattgtcaacattttgaccaac

SEQ ID NO: 318684 - DNA, 100 bp, Homo sapiens
ttgttaaatccatcccaagggggcgagccagtgcagccttgaactgtttaaaacgcttccatgaaatgaagaaacgaggacctaagccttatagtcttca

SEQ ID NO: 318685 - DNA, 100 bp, Homo sapiens
attctgcaagcaggcaacctgaatacagaatgatctttgctgagtgttcccccaacacttgcccatgtggcgagcaatgctgtaaccagaggatacagag

SEQ ID NO: 318686 - DNA, 76 bp, Homo sapiens
atgcaggaaaatttcgatattgaagtgtcaaaatccatagatggaaaagatggcaaatggcatcttggacaccacg

SEQ ID NO: 318687 - DNA, 90 bp, Homo sapiens
ccgcagatccggcagctttccgaaagggtctcctatggacagaagtgcgggcaaggagctttgttcctccccgatgtcaccctcccacag

SEQ ID NO: 318688 - DNA, 101 bp, Homo sapiens
caagtggacattttactggctcaaacgaagggaacgtcatcgtttggaaagcgtcgcaataagacgcacacgttgtgccgccgctgtggctctaaggccta

SEQ ID NO: 318689 - DNA, 86 bp, Homo sapiens
gcacggcccactccgacgtgtgctccgcccagggggtgcgaggataccccacgacagaataacgggctcccagattcacaagcccc

SEQ ID NO: 318690 - DNA, 100 bp, Homo sapiens
ccccaccgtgttcttcgacattgccgtcgacggcgagcccttgggccgcgtctcctttgaggttctctgtgaaaacgctgctggagaagtacacagcgga

SEQ ID NO: 318691 - DNA, 100 bp, Homo sapiens
gtctggtagaaacaccaacaggatacattgaaaggtactaggttttgacaagcttgcatcatgcgtgagtataagctagtcgttcttggctcaggaggcg

SEQ ID NO: 318692 - DNA, 100 bp, Homo sapiens
ccatgtcatccacttcgcccaacctccagatgtcaagccctccaacatcctagtcaactcccgtggggagatcaagctctgtgactttggggtcagcggg

SEQ ID NO: 318693 - DNA, 97 bp, Homo sapiens
gtgctgcatgcagagatgctgtggttcggggggtgctcgatctgtgccatcattggcgggaccttcaccgtcgccggcatcctggactcatgcatct

SEQ ID NO: 318694 - DNA, 101 bp, Homo sapiens
ctgaacggggcgcacttcgacccggaagtttacctagacaaggcctccggtgtggctgtctctgatggtgtcatcaaggtgttcaacgacatgaaggtgcg

SEQ ID NO: 318695 - DNA, 101 bp, Homo sapiens
cctgtgacctgcaggtactgggagttacatagctaagatgccaggacaccccgaaagccggaaaacggtactaggttttgacaagcttgcatcatgcgtga

SEQ ID NO: 318696 - DNA, 100 bp, Homo sapiens
agggaggacgccgggacacctggaagccgagaaatgttggctagagatttactacatccgtccttggaagaggaaaagaaaaaacataaaaagaaacgcc

SEQ ID NO: 318697 - DNA, 90 bp, Homo sapiens
cagcgtgcctggttacagctgtttccacgtgcggtgctcgtcgggagtgatcacctaccctacagagaacctttacctactatgttcagc

SEQ ID NO: 318698 - DNA, 100 bp, Homo sapiens
ggaagattcgaggcggcgggggacaagtcggcgccccagagcggacgaggtcaaagaatcaatggagacacactttggcagccatggccgaagggccata

SEQ ID NO: 318699 - DNA, 98 bp, Homo sapiens
tcttccttcgtcatgaacgcccccctggcagggacattggcagagaagaggcgatggcggcgatggcatctctcggcgccctggcgctgctcctgctg

SEQ ID NO: 318700 - DNA, 90 bp, Homo sapiens
gccgcggcggccgcgcagggagctctcgaggcaacgccggggcgcccgaggtctggaaggcgcagttttagaaagagcgttttcgctacg

SEQ ID NO: 318701 - DNA, 98 bp, Homo sapiens
gaagtggccgtagcggcttgttggataaggcatgaagaatcgagaggaaagatcccagcattttttcgacacatcagtaccactaatggatgatggag

SEQ ID NO: 318702 - DNA, 78 bp, Homo sapiens
gatgatccagttggaccttttggacaggaaagtgtaacatcagttacagagtttgggttggtaccattgggtcaggcc

SEQ ID NO: 318703 - DNA, 100 bp, Homo sapiens
aataaaacagctgttttgcagattggactacaagggtcaaggtggaaggtccaaggactgagaaagaccctcgaaggcatccactttagtcctccattcc

SEQ ID NO: 318704 - DNA, 51 bp, Homo sapiens
gtcgccaactccatggctttccaggacccagccctgaagctgtgccttgtc

SEQ ID NO: 318705 - DNA, 98 bp, Homo sapiens
aaatcctgctaattgaggacgaggtggatgttatctggtggatgttatagagcactctgctatttggtcctgaagcagtacacagaagcagtgaagga

SEQ ID NO: 318706 - DNA, 100 bp, Homo sapiens
acggagaatgcaaatatatagagcacctggaagcagtaacatgcaagtcctaaagaagacgaagagaagccttcagcctcagcacttgagcagccggcca

SEQ ID NO: 318707 - DNA, 100 bp, Homo sapiens
tgctgaatcaggaataataaaagttaaaacaattgctgcacgaaacactgaaattttggcagcacttttgtgtaatggaaaatttcacaaacacttgcaa

SEQ ID NO: 318708 - DNA, 75 bp, Homo sapiens
agagttgctcatggaggtgcacggaaatgggaagaggcccagtccagagagatgatacagacctacgtggagcac

SEQ ID NO: 318709 - DNA, 82 bp, Homo sapiens
cttttaacctatgtcttacaaaggcccaagtttgggaattatttgccatttttgtaagcgaaactctttacctcaataccaa

SEQ ID NO: 318710 - DNA, 50 bp, Homo sapiens
ccccagtgcagcatagctcccacagtaatctcaggggcgatataatcaat

SEQ ID NO: 318711 - DNA, 75 bp, Homo sapiens
atttgatgaagtccagaaatctggaaacatgatacaatctgcaaatgagcctagaacagaattccagccaagttt

SEQ ID NO: 318712 - DNA, 98 bp, Homo sapiens
gggtttctgttaaggaactcgatttatatttggcatactttgtgcatgcagcaggaccctttagatcctacaagatcagtgattgtgatccgctccct

SEQ ID NO: 318713 - DNA, 90 bp, Homo sapiens
gggagcaggtggaatatgcagaaatgagaagaagagctgtgtcatcattccagttcttcaactccattggcagcagacaaggagtcccag

SEQ ID NO: 318714 - DNA, 75 bp, Homo sapiens
gccattggagggcgcggggactgcaaccctaatcagggtgtccgcaatgttgccagtgtctgtctgcagattggc

SEQ ID NO: 318715 - DNA, 75 bp, Homo sapiens
cagggtccctgaagagggaagacacgcggaaacaggtggagcagctcctgtacgaaagccctgagcggtactccc

SEQ ID NO: 318716 - DNA, 82 bp, Homo sapiens
ctatatcctttggcagctcacaggaaaaccaattctgtgtcctcggaggaccacagcccagttgggccccaggcgaaaccca

SEQ ID NO: 318717 - DNA, 49 bp, Homo sapiens
ttcaaaggctgtcgcaaggaggaaggctcttgaactagacccatcaaat

SEQ ID NO: 318718 - DNA, 82 bp, Homo sapiens
cgaaggcggcggctcctgccctctcgctttccctctcgcgtctctggctgcagtgtgccggtccaacaaaagcccttgggtc

SEQ ID NO: 318719 - DNA, 96 bp, Homo sapiens
ccggctgcctggggccacccctgggctcaccacggtggagatagtgacaatgtctcaccaagatgaagatgtgtgtgtctttaagtgctcagtgtc

SEQ ID NO: 318720 - DNA, 82 bp, Homo sapiens
aaccgggagcggctcacggcggaggacgacgcgctcaaccagatcgcgcgggagaaacgcttcgttaagggactcaggcagt

SEQ ID NO: 318721 - DNA, 98 bp, Homo sapiens
agcaccaacccatgggttcagttcttttgttccacggagaacagtgactacctgtttaagctgcttttgattggcgactcaggcgtgggcaagtcatg

SEQ ID NO: 318722 - DNA, 48 bp, Homo sapiens
cctggtgatattgtagaaattgctggggttgcagatggtgtaggaggc

SEQ ID NO: 318723 - DNA, 82 bp, Homo sapiens
accagggtatcgccgtggtcatggaggagctgctgaaggtcgtcaagagcctgggagaaaacatggagatatgaatgactgt

SEQ ID NO: 318724 - DNA, 130 bp, Homo sapiens
tttgatgaaattgagtcatgaaactgtaaccattgaattgaagaacggaacacaggtccatggaacaatcacaggtgtcgtgaaaactacccctaaaagccaaaatgggaaaggaaaagactcatatcaa

SEQ ID NO: 318725 - DNA, 90 bp, Homo sapiens
catcgcttgtcagcgaccagtaggactggtccttatggaaggagtgacagatactaagccagctatgttagatactaaagaaggcttccc

SEQ ID NO: 318726 - DNA, 83 bp, Homo sapiens
tcagcacccggggagctgactccattgcatgtgggaccttcagccgtgaactggtttttagaacttcagccataaaaatgggc

SEQ ID NO: 318727 - DNA, 82 bp, Homo sapiens
gacgaggcgattgcgggggcctgggctagagctccatgaacctgcctccagacaaggcccggctcctgcggcagtatgacaa

SEQ ID NO: 318728 - DNA, 100 bp, Homo sapiens
aggccggcggacccaggcgctcgctgcttaccaagagggtcgccgcaccccaggatggatcccccagagggtaccagggatcttagtcctcagcatatgg

SEQ ID NO: 318729 - DNA, 50 bp, Homo sapiens
cacagacagaatccctgctaccaggcaagaatatcacggcatgggcatga

SEQ ID NO: 318730 - DNA, 121 bp, Homo sapiens
gcctgtgggaagtctccatggtgaagtataggctgaggctacctgtgaacagtacgcagtgaatgttgtatgaggatacatgggctgcacttcacagaagagccaaagactgtgcaagtgc

SEQ ID NO: 318731 - DNA, 101 bp, Homo sapiens
ttcaaaaggtggcctttccactggagttgcttcacttagctctacaatcaacccatgtgtgatttcctaaataaaaaccaagagctgttgcaagatttgtc

SEQ ID NO: 318732 - DNA, 100 bp, Homo sapiens
ccgacgtgcagcctggcagtgcagtgtttaaatttgtggggctaaagaacttcccttgcactcccgaaagcctgtgtgatgtgctatctatggatttccc

SEQ ID NO: 318733 - DNA, 75 bp, Homo sapiens
tcatctggggcgtcgtgcgcaaaggcctgcagtgcgcgctgccctctggtggtcagaagatgctgtgctgtctcg

SEQ ID NO: 318734 - DNA, 90 bp, Homo sapiens
caaggagaagagccatggaaacaggaggaagaattcccaagccaaagctttccagctccagggttccttgaaaagaaaacaggtagttaa

SEQ ID NO: 318735 - DNA, 101 bp, Homo sapiens
gtgacagtgaaaaaccgcatgatccgtcttcaccctgatgggacagtgctgtatgggctcaggcgcttcatctaattgatgaaatggatttgaatggtgac

SEQ ID NO: 318736 - DNA, 98 bp, Homo sapiens
tggtgcccactcagaaggtgccctctttgcaacatttcaggaaaacagagaaagaagtgataggagggctctgtagagtcttaccagcaaggggtcct

SEQ ID NO: 318737 - DNA, 101 bp, Homo sapiens
ggcggggccacgctgcgggcccgggccatggccgccgccgatgccgagcgttacagtgtttctgccacctctgtacaaaagacaattttacttgtgtgaca

SEQ ID NO: 318738 - DNA, 83 bp, Homo sapiens
ctttgcttcagccgcagtcgccactggctgcctgaggtgccatgcctctgcaactcctcctgttgctgatcctactgggccct

SEQ ID NO: 318739 - DNA, 130 bp, Homo sapiens
tttccaaagttgaagaagtcttgaatgactggaaactgattggaaactctttgggaaagccactcgaaaagatgatgaggagtctgatgaggaagctgtgaagaaaaccaacaaatgtgtactagtctgg

SEQ ID NO: 318740 - DNA, 96 bp, Homo sapiens
cgtggagttcctgaagaagaacctgcgagccgacaacgccttcatgctgctcacgcaggtggtttcatggccccctgaacagggcggatgcagaga

SEQ ID NO: 318741 - DNA, 82 bp, Homo sapiens
accaaggaatctgcttttcaagtatgccaccaacagtgaagagccttagccccgtgggccccacggagtgagcggcatgcag

SEQ ID NO: 318742 - DNA, 75 bp, Homo sapiens
ggatcccagttttctctggatgacgtggaggctctgtcggtggtgagcgacgaccagtccctctttgactcagcg

SEQ ID NO: 318743 - DNA, 83 bp, Homo sapiens
cagactcatggggaagggccaggtccaggtgacagagctgaatgaacctctctccaatgaagatcgaaatctcctctctgtgg

SEQ ID NO: 318744 - DNA, 100 bp, Homo sapiens
tcatagtcaactgcgtggaagagaaggaagatgatgttgatgttaggcctgcaagaaaaagcgaggctccatttactcacaaagtgaatatgaaagctag

SEQ ID NO: 318745 - DNA, 100 bp, Homo sapiens
cgggaagcggcgatcctgccaccgggaggtgtggaagagccggactctccagaaagagcaacagtaatggagtacatgagcactggaagtgacaataaag

SEQ ID NO: 318746 - DNA, 90 bp, Homo sapiens
aaggcatcgtcgtcttccggacagactatggtcaggtcctgactttttggaatgcccttcttcctccttggctggcaatcaatctttgag

SEQ ID NO: 318747 - DNA, 100 bp, Homo sapiens
ctgatctctctcgctgtgagacatgtctgagactcctgctcagtgtagcattaaggtccagcccagaatcaaatgcaggttccatctggatatggattgc

SEQ ID NO: 318748 - DNA, 100 bp, Homo sapiens
ccgggaggaggggagggggcgatgctggaagccatggcggagcccagtcccgaagaatcacggtcactttcaacattaacaacagcatcccaccaacatt

SEQ ID NO: 318749 - DNA, 98 bp, Homo sapiens
ctactcctcacctgccaacctctacgtgcgaggagaccagtatgatgtctgtgccatttgcctggatgaatatgaggatggggacaagctgcgggtac

SEQ ID NO: 318750 - DNA, 100 bp, Homo sapiens
tcgtgaccgagaccgtgaccgagagcgtgaccgagagcgcgaatatcgtcatcgttagaaggggccactgtattttgtgttgctccgaatgcagtatttc

SEQ ID NO: 318751 - DNA, 100 bp, Homo sapiens
cgtcgctcctgcgcctgcgccgtgcccaccgaccggcctcgagcgccccggcgggaggtccagctgggagctccccgacctccaggagggcaagatccaa

SEQ ID NO: 318752 - DNA, 100 bp, Homo sapiens
gcggagggaacctctagagctccaggacattcaggtaccaggtagccccaaggaggagctgccgacctggcagatactttcattcagaaaaccaagaagc

SEQ ID NO: 318753 - DNA, 100 bp, Homo sapiens
gtgattaccatggcgaggagtctctgtccgggggcctggctaaggaaaccctattacctccagaacccttaggagaaatcttgagagtggacagcaattg

SEQ ID NO: 318754 - DNA, 75 bp, Homo sapiens
tcagcccgaatggagagtggctggcaagttcatgctgttcggctcttgaatcccagcgatgaaaccaggaactca

SEQ ID NO: 318755 - DNA, 74 bp, Homo sapiens
ctgccgcttatcttcaggagcgaagagctgcttctgtatcttaaggaattgtggtgcttggaataaacagagct

SEQ ID NO: 318756 - DNA, 100 bp, Homo sapiens
cgatgatgtccctgcagggaaggtcttgagtcaccacgtccgaatataattcttgggttagtaatctgccaaaaaatcaaacgtcccgcaaacagtggag

SEQ ID NO: 318757 - DNA, 98 bp, Homo sapiens
aagcaaagcattttaaatgccatatatgtcacaagaaattgtatacaggacctggcttagctattcattgcatgcagttccatgccattgcagtgtca

SEQ ID NO: 318758 - DNA, 82 bp, Homo sapiens
gtaggagaccgaggaaagtgtgtgggaggcgttgacctgccccttgtcctggccccgggggatatgagactttctactcgga

SEQ ID NO: 318759 - DNA, 83 bp, Homo sapiens
cgggtctggagtgcgtgggggaccggctgttggcggggaaagcaggcaggatgggagagtcgccgatagaaccacctcttccc

SEQ ID NO: 318760 - DNA, 100 bp, Homo sapiens
tgtgaccacacagttctccatgagttggacagataccaaagaggcctggagatgcccaaagatgagctgcccaaccataactgcattaagcacctgcgct

SEQ ID NO: 318761 - DNA, 74 bp, Homo sapiens
gcttcatatggacagatggacttcaaatgctgtttgtattccagagactagatatcaacaagtttctttggatg

SEQ ID NO: 318762 - DNA, 82 bp, Homo sapiens
gagacattacatcaggaagatactgcagagatattctactccatctcattcattgtacagcaccagcaggcagctggctccg

SEQ ID NO: 318763 - DNA, 100 bp, Homo sapiens
tatgacttcaaagctactgcagacgacgagctgagcttcaaaaggggggacatcctcaagcacgagggccgggaggaggatcagcggttgatcaacttgg

SEQ ID NO: 318764 - DNA, 98 bp, Homo sapiens
tcaactctttcccatttggaggagtggggaaatcctcattgacgattcaatttgttgaaggccaatttgtggactcctacgatccaaccatagaaaac

SEQ ID NO: 318765 - DNA, 127 bp, Homo sapiens
ggtgcagctgtgaacgggacagtcacacccttgtatgcctttttattcagccagattcttggggttttgacactccacggagatatcagatacagaaaaacattgattgccaatgatgggacagctc

SEQ ID NO: 318766 - DNA, 99 bp, Homo sapiens
ccggaatcccgcgcgctgcccacgattcgcttctgaggggctatacaaagcggaccagcggtttgggccaggtgtcgagacctaccccgatggcagcca

SEQ ID NO: 318767 - DNA, 83 bp, Homo sapiens
agcagatctgagaaatgtttgtactgaagcagttggttgaatctggcgatgtggaacccatggatatggagggctgactatat

SEQ ID NO: 318768 - DNA, 146 bp, Homo sapiens
ctcggatcccatgcaacagccacgatgtgaagcggggcagagccgggggagcccagcccagccagcctccaggttggtgttcgaggaagagacattgttgttcttggtgtggagaagaagtcagtggccaaactgcaggatgaaag

SEQ ID NO: 318769 - DNA, 50 bp, Homo sapiens
cacccagaggaccaggcggcggtcatagcaaatgacagaagtcccttggt

SEQ ID NO: 318770 - DNA, 51 bp, Homo sapiens
actacaacagcagccacaggaaccttgatgaaagatgtcatgtatatctgc

SEQ ID NO: 318771 - DNA, 71 bp, Homo sapiens
tgtgctaggggatgatccgcaactgatgaaggatcgacgagaacgtgctaggagcccagctggacgttgag

SEQ ID NO: 318772 - DNA, 82 bp, Homo sapiens
gcagccaggagtcatgagcgacagcggcgagcagaactacggcgagcggatgccccctaaaaagggaggtgatggaattaaa

SEQ ID NO: 318773 - DNA, 96 bp, Homo sapiens
tttctagaagcctgtcgaaaaatgggggtgcctgaggctgaccccgcactacatctacccaccagccatcgtgcagcccagcgtggtgatcccagc

SEQ ID NO: 318774 - DNA, 100 bp, Homo sapiens
atcattttagtgctggagaatctggaagaattttaaatcgtttctccaaagacattggacacttggatgatttgctgccgctgacgtttttagatttcat

SEQ ID NO: 318775 - DNA, 75 bp, Homo sapiens
tatcaaacggcaagatgtccagtaatgtcccggcggatatgactctcagcgttctcatctctcttccttcaccat

SEQ ID NO: 318776 - DNA, 87 bp, Homo sapiens
caagcaggacctggatgctgtcactctctgggcttatgatgtcctggaacaggtggaggcctatcaagctgaggctcgtgaggctct

SEQ ID NO: 318777 - DNA, 82 bp, Homo sapiens
gtttgatttgccctatgggatgagaacatcaggtctcctgcaagcgcaaaatcttctaacgcaactacctcagcaaagccaa

SEQ ID NO: 318778 - DNA, 75 bp, Homo sapiens
tctattttccctacgaaaaacagatctttttaagataagatgctcccaagtcccttgcagctctcttcagaagaa

SEQ ID NO: 318779 - DNA, 95 bp, Homo sapiens
ctggagctgagcgggaaacggccgcgctcgatgctgccaatgtcaccaacagcaatggggcccaccatcagcctggacctggacgtggatgatgt

SEQ ID NO: 318780 - DNA, 100 bp, Homo sapiens
aatggatgtgaaggagttcaaagttaataagtctctagtgatccctgaaaagttccagcatattttgcgagtactcaacaccaacatcgatgggcggcgg

SEQ ID NO: 318781 - DNA, 51 bp, Homo sapiens
cgcgagcaaggccgccagatgtgcagactccgtgggaaggaggcttgttta

SEQ ID NO: 318782 - DNA, 98 bp, Homo sapiens
ccagcggcgtcgagaggaccatcctgggtgctggccctgtgctggaggctgttcggctcttgaatcccagcgatgaaaccaggaactcactttcccgg

SEQ ID NO: 318783 - DNA, 83 bp, Homo sapiens
cgcctggagcggctggccatcgataacgaaggaggcccaacttcattcaataaggagcctgacggatttatcccagacggtag

SEQ ID NO: 318784 - DNA, 98 bp, Homo sapiens
tgcaagcatggcaaagactggcaaaagcacaaggattctcgctgtgacagagacaacaccgagtatgagaagtggtgagcttcattttctccaaattg

SEQ ID NO: 318785 - DNA, 83 bp, Homo sapiens
gaaaccaacattcccaacagccaccaccaccaccagatgcttccccgggcgctgcctggacaggcctgcctgcgtgctgggac

SEQ ID NO: 318786 - DNA, 100 bp, Homo sapiens
ctctccactaaaggatgtgtgactttctggggacagaagagatgagtgaatttcataattataacttggatctgaagaagagtgatttttcaacacgatg

SEQ ID NO: 318787 - DNA, 97 bp, Homo sapiens
ggcaggcctggacttccagtgctcagagggcggggagaatctcagatttcagaaatggccaaagaatccataccatgcccaacagaaagtgtttacc

SEQ ID NO: 318788 - DNA, 98 bp, Homo sapiens
aaacagctgcaaaggttgcattgatgaaattaaagatgcatgctgatggcgataagtcattaccacagcacaacctccaagagggaaaacatttctcc

SEQ ID NO: 318789 - DNA, 101 bp, Homo sapiens
gtggtgccccggggcgtcaacctgcaaggttgttggaagaggagcctttggagttgtttgcaaagctaagtggagagcaaaagatgttgctattaaacaaa

SEQ ID NO: 318790 - DNA, 116 bp, Homo sapiens
ggagtgcgatgtggtaatggcggcgaccgagccggagctgctcgacgaccaagaggcgaagagaccgaagccaggacagcacagccgtagcactctcagactctagctcaacgcag

SEQ ID NO: 318791 - DNA, 98 bp, Homo sapiens
gtcaaaggaagaactccttaaactaactggtatatttcagaaatcgctgggtaaagactgtccacccagttgtgcatcagtactgtttgatctcaagc

SEQ ID NO: 318792 - DNA, 49 bp, Homo sapiens
gcatttccagcccgcccacccagcctccagtctgtggactttgaagctg

SEQ ID NO: 318793 - DNA, 101 bp, Homo sapiens
ttcacttccctcggtctgggcttctctgaggcggcgagagatggtcaggtctggagctcgaccgggccagggctccagcggggccccacagacgagcagga

SEQ ID NO: 318794 - DNA, 90 bp, Homo sapiens
ccgcctgccgcctgtcctttctcatcccatctttgacaatcctagtccctgagcacgtcgtcatgaccaaggaggaggtgacagagctgc

SEQ ID NO: 318795 - DNA, 75 bp, Homo sapiens
tgtggccagtaggcaatcacctgaaggatctgacttccagaaggtaagaatcaggccttattggagacattcaag

SEQ ID NO: 318796 - DNA, 147 bp, Homo sapiens
ctcggctacagcttcggcggcgaaggtcagcgccgacggcagccggcacctgacggcgtgaccgacccgagccgggagtaccctgacttctaccggaagctctacggcctcttggacccctctgtctttcacgtcaagtaccgcgcc

SEQ ID NO: 318797 - DNA, 100 bp, Homo sapiens
ttcaccagcatccctgcagccttctggtataccatcgtcaccatgacaacactagggttactttccgcaccagaatctatcactgcaacatcaacagtca

SEQ ID NO: 318798 - DNA, 90 bp, Homo sapiens
tcctcatggaagaagagcaagatttaccagagcaaccaaagggagagaaggtacccaaagggaaaaagggaaaagctgatgctggcaagg

SEQ ID NO: 318799 - DNA, 75 bp, Homo sapiens
cttagataacagccatcctattgaaaaccgagctgaagctgccatggaattcttacaagaattaaatagcgatgt

SEQ ID NO: 318800 - DNA, 75 bp, Homo sapiens
tggtgttgtgaagttctttaagcccccatatctaagcaaaggaactgctgcggtctcctgtttgataaaagaata

SEQ ID NO: 318801 - DNA, 80 bp, Homo sapiens
agatggggttgtcctctttaagaagaataccctctaccatctgctttggtcagggtgccgctcgaggatttaaaagcaac

SEQ ID NO: 318802 - DNA, 83 bp, Homo sapiens
ctccattggatttaaaagacagtcctcgtcagcactgactttcagctatggaatcggatgcagcagtctcggccctggctgct

SEQ ID NO: 318803 - DNA, 51 bp, Homo sapiens
gagcgtgaggacagtgagactcgaacacatgaagaagactttgaattacgg

SEQ ID NO: 318804 - DNA, 51 bp, Homo sapiens
ggcggaggtcgataagctggaactgatggttctggggctgctggtatggac

SEQ ID NO: 318805 - DNA, 101 bp, Homo sapiens
gtacctgtctggtacctggtacccggcacactgtgagttcctggacatcaagggctggtttactcctggcttgggggcattaggaagcactggaggctctt

SEQ ID NO: 318806 - DNA, 90 bp, Homo sapiens
ccccatccgccgccgagaggaggcctatgagaatcaggttgaaaacgaggagctgaggcacctcatgtggtcctcggtggtgttctacca

SEQ ID NO: 318807 - DNA, 75 bp, Homo sapiens
gtgcccagcacagggtgtgctgctggtggcagacagtccagaagacatgcacagctggattaaggagattggcgc

SEQ ID NO: 318808 - DNA, 74 bp, Homo sapiens
tgttctttgcctcaagacccagctattgttcagcatgcagcagattggaataaatatgatgaccgattgatgaa

SEQ ID NO: 318809 - DNA, 100 bp, Homo sapiens
cttttacctacgttggcggccccagaaggtggattcaccaatgaacttgaagcatcctcatgacctagtcatattaatgagacaagaagcaacagttaac

SEQ ID NO: 318810 - DNA, 83 bp, Homo sapiens
ctgaataacccttttaacgagtattccaaatttgatggcaaggaaaatcagaggctccttaaaaatatgttcaaaatcggtga

SEQ ID NO: 318811 - DNA, 100 bp, Homo sapiens
ggatggttccatcatggcgtcaatgcagtactatactggcaattgctggagaagattttgcaattgttgcttctgatactcgattgagtgaagggttttc

SEQ ID NO: 318812 - DNA, 75 bp, Homo sapiens
gtggagctggtcaacgaccgcggggcgcaggcgagaaccgaagtttggaggtagacgagcaggcgagcggtttgc

SEQ ID NO: 318813 - DNA, 98 bp, Homo sapiens
ctggaaaatatactgctcgatgacaactgcaatattaaggagatcatgaatcagacagataaaaatcaacaagaaatcccatcataccttaatgatga

SEQ ID NO: 318814 - DNA, 83 bp, Homo sapiens
ggaagaagctaatcttgtacttcaagaggaggaatcacgctcggaaacaatggggcttctttcgccgaagcatccagaagaac

SEQ ID NO: 318815 - DNA, 50 bp, Homo sapiens
gacgaagtcaacagtggagtgggccagggcagctgcaatgactctccgca

SEQ ID NO: 318816 - DNA, 83 bp, Homo sapiens
ggcaggctgcgtggactcgacagctcttccacagctccctcagcccttggcgagcgaggctaagtcctatcagccatggaaac

SEQ ID NO: 318817 - DNA, 90 bp, Homo sapiens
cggcagcagcggcctcgccgccgcccgtctcctgtcgcgcagcttcctccacgctgaccggaaaggagattgagattgacattgaaccta

SEQ ID NO: 318818 - DNA, 100 bp, Homo sapiens
ataagattgaatgccaagcagaaaattacctaaatgcactctttcgaaagaaaggaacttagtgatttggcccgtgaccctccagcacaatgttctgcag

SEQ ID NO: 318819 - DNA, 83 bp, Homo sapiens
taaggcaaagggaagttcttcggaacctttcttcccctggatgggaaaacatctcaaggaactgtggctgcaccatctgtctt

SEQ ID NO: 318820 - DNA, 74 bp, Homo sapiens
tgcctacagaaccgtcccaaaatatggcaaagaaacctattctgagatccaggatgccagaaaccatgtgagcc

SEQ ID NO: 318821 - DNA, 73 bp, Homo sapiens
tttaatggaaaatcgcttggttaaaacctgacacttttaacaggtaaacaagacattaagtgtttaaggcaaa

SEQ ID NO: 318822 - DNA, 50 bp, Homo sapiens
gagcgacgaagccaactgtccagtttgctgggatggagtcaggctatgct

SEQ ID NO: 318823 - DNA, 90 bp, Homo sapiens
ggcggcggagcgcgagagcttcgagcggactcaggaccagcccggtggcaccctggatctgaccctgatccgtgcccgcctccaggagaa

SEQ ID NO: 318824 - DNA, 74 bp, Homo sapiens
gcccagcgcctcggaggccgcccccgcggcggccgcgctcttcgcctggcacacgccaaagaagatgagtcaag

SEQ ID NO: 318825 - DNA, 83 bp, Homo sapiens
ctcagttggaagcagccgatccagcctgcggagcctgtggggcaggatccaaactactggatacaggtgcatcgcttggaaca

SEQ ID NO: 318826 - DNA, 100 bp, Homo sapiens
gtagaaggaataagtcctgaattagaaaaggtattcattaaagaaaataatgggaaggaagaagtatccaagctcattgctatggacagtgctatcaccc

SEQ ID NO: 318827 - DNA, 78 bp, Homo sapiens
agcagattcagtgtcatgtgaggacgtgcttcctgcttcatagataagagggtcactgtccacagcaccccggttaga

SEQ ID NO: 318828 - DNA, 100 bp, Homo sapiens
ggagtgggcgaagctctatgagtttgttcacagttttcaggatgagaagcgtcagctggcttaccagaatctccctggaaaaggagacatgaatgtctgc

SEQ ID NO: 318829 - DNA, 90 bp, Homo sapiens
ccgtcctctgggctcaagcagtcctcgcatctcagcctcccaaggagctgggacctcagggcacctttcacagccagcaggcattggaat

SEQ ID NO: 318830 - DNA, 90 bp, Homo sapiens
tatgtacctgttaccactttcaaaaacttaccccgaatagatttcagtagtatagctgtgcctggcacatcaagtccccggcagcgccag

SEQ ID NO: 318831 - DNA, 50 bp, Homo sapiens
ggaaccctggtcaccgtctcctcagtttcagtggcgattctccagagaag

SEQ ID NO: 318832 - DNA, 120 bp, Homo sapiens
ctaggagctggcggcgacggccacaggggcggcgacggcgcagtgcgaagcgaaacagccgccgccatgtctgcgcatctgcaatggatggtcgtgcggaactgctccagtttcctgatc

SEQ ID NO: 318833 - DNA, 75 bp, Homo sapiens
gcctgatctgctatggcgagctgcgcaagaagattgggggctagctgcggtgcaaccctgggcagtttgcgtgtc

SEQ ID NO: 318834 - DNA, 51 bp, Homo sapiens
atataagatctggagacccaatgtggattttatccaaagccaagaaagacg

SEQ ID NO: 318835 - DNA, 100 bp, Homo sapiens
agagtttgtatgccgcaagacaatattttgttcagtggtgtgcagacagaaatttcaccaagccgcagtgtgaagagtgccagtgctggcagcatggggt

SEQ ID NO: 318836 - DNA, 50 bp, Homo sapiens
gccacagctgcagatccggggagtagggacttatcaaactggtttcaaag

SEQ ID NO: 318837 - DNA, 95 bp, Homo sapiens
cactggtctcctcccgaagagaacctcccccgtacggataccggaaaggctggatacctcggttattagagatcacagattctgctggccatatt

SEQ ID NO: 318838 - DNA, 100 bp, Homo sapiens
ccataaatatagaggtagaccccaggcatcctactatgcttcctgagtgcttctttcttggagctgaccatgtttatttggcaacccaaggagttaatcc

SEQ ID NO: 318839 - DNA, 100 bp, Homo sapiens
ctttcgtggcgctgggaggtgacaacgtgactggcgtggactgcgtgaagggcatagaggtggggctggtgtccgagcacttctcgcaggccccgcagag

SEQ ID NO: 318840 - DNA, 114 bp, Homo sapiens
cccagaccctggagcctcagttggaagcagccgatccagcctgcggagcctgtggggcaggagccctctggcacaaatggaagaagaaagaagggagcaagtagctaaaattaa

SEQ ID NO: 318841 - DNA, 100 bp, Homo sapiens
ctgcagaatcttataaagtattaccatgcacagtgcaagtggtttcagacaccctcacaggttttctaccatgcagcaactgaacatggaggaaaagatg

SEQ ID NO: 318842 - DNA, 90 bp, Homo sapiens
acagcacagttcctgggaaggtggagccaccagcctctccttggataattctggcctcatagaacaagttgggaagtgttccctcctccc

SEQ ID NO: 318843 - DNA, 83 bp, Homo sapiens
aagcggcagaattgaaagatccaacagatcattaccatgcgcagcctttagaggtactccaaagattcaggtttactcacgtc

SEQ ID NO: 318844 - DNA, 74 bp, Homo sapiens
ggagcggctgctggaaacgcaagacggtgccgagaagcagctgcgagattaactcaacagtgtcactccctggg

SEQ ID NO: 318845 - DNA, 80 bp, Homo sapiens
atgagtatgcggaggacagctctgatgaggagggcacagactccatcaagatggagaacgggcagagcacagccgccaag

SEQ ID NO: 318846 - DNA, 50 bp, Homo sapiens
ccacagtgatgttgatgctagttctgtggttcacgggggcaagtgacagc

SEQ ID NO: 318847 - DNA, 83 bp, Homo sapiens
gacagctggcaagaggcagcctgggggccacagctgcttcattttcggctttgtgagaaaccttaccatcaaacacgatggcc

SEQ ID NO: 318848 - DNA, 100 bp, Homo sapiens
gttctttcttgacattaccttttcaccagactatccgtttaaaccccctaagcatatagcactttctacattgtgggtttaatattatcaatgcagatac

SEQ ID NO: 318849 - DNA, 75 bp, Homo sapiens
gaccagtccatttggggaaatccttcggatggtgaactcattagaagttcgagaacttgtcttggacaattgcaa

SEQ ID NO: 318850 - DNA, 50 bp, Homo sapiens
tggtgcgcgacgtgttctatgatgatagaaaaggagggagttacactcag

SEQ ID NO: 318851 - DNA, 83 bp, Homo sapiens
gtttgtggatcgctgtgatcgtcacttgcgtgagtgcatctccatccacgttggccaggctggtgtccagattggcaatgcct

SEQ ID NO: 318852 - DNA, 82 bp, Homo sapiens
gacaaatatacgtgtatgttcacttacgcctctcaaggagggaccaatgagattcctggtcgggtggcttccagtggtcttc

SEQ ID NO: 318853 - DNA, 75 bp, Homo sapiens
aaaagggaagtgaaaagagatctgttttcaggaaaaccaattctgtgtcctcggaggaccacagcccagttgggc

SEQ ID NO: 318854 - DNA, 75 bp, Homo sapiens
tcgcctcgactccaaatggttgaaaacagatatacagctcgtttgacagcaagtttgtttaccagcaaataggac

SEQ ID NO: 318855 - DNA, 100 bp, Homo sapiens
gttctctctcgaccccttctgcccggcgcttcggcccgggccgctcaggtgcaggcagagattgtcaagaggctgaatgctatctgtgcacaagtcattc

SEQ ID NO: 318856 - DNA, 97 bp, Homo sapiens
tgacatccaacctgtatcaagtcttctaatctgtgaacatggtatggctctgtgggggcagcatggaggtccttccttgctcacgggtggcccacat

SEQ ID NO: 318857 - DNA, 82 bp, Homo sapiens
ttgccctggtcttgctcggccgatgaagtgcagaggtttttttctggtgatggcccgctccctctccccacccccggagctg

SEQ ID NO: 318858 - DNA, 98 bp, Homo sapiens
atgatggcgtacttggtctggcttgggttggagcaccttcagcatttaaatcaaacggtattgagatggattgggttatgaaacataatggtccaaat

SEQ ID NO: 318859 - DNA, 98 bp, Homo sapiens
acgtgtatgtgtgtgccagcgatgtccccatccgccgccgagaggaggcctatgagaatcagttgtcaggaggaagaagacctagctttagcacaagc

SEQ ID NO: 318860 - DNA, 83 bp, Homo sapiens
ctggacaggcagagtgctgatgtgaaaaataccacgacaaaaccaccctacaaattgtggctactaatttgccccctgaagat

SEQ ID NO: 318861 - DNA, 100 bp, Homo sapiens
cattttaccgatggtatcaacttgagaagacaaaccctgggaaatcctcattgacgattcaatttgttgaaggccaatttgtggactcctacgatccaac

SEQ ID NO: 318862 - DNA, 75 bp, Homo sapiens
ctgcaggtgctccggggcctccagtatctgcacaggaacttcattatccacaggagttgtttaaaggctttgccc

SEQ ID NO: 318863 - DNA, 115 bp, Homo sapiens
agggctgaggaaccatgtctccatccccgaccgccctcttctgtcttggccaggagtggtggctcacacctgtaatcccagctctgggaggccaaggccagtggattgcttgagc

SEQ ID NO: 318864 - DNA, 90 bp, Homo sapiens
ggaaggtacacccaggcatgacaatagcttctctcctcacagaaatttaactggaagatgttaccgagtacttcagtgaattccttagtg

SEQ ID NO: 318865 - DNA, 82 bp, Homo sapiens
tgctggtgggccagtacagcaccggcaagaccaccttcatcagcgtggtgacccgggctgtgtggaaattcactgggcctga

SEQ ID NO: 318866 - DNA, 76 bp, Homo sapiens
gcgcaccatgccgttgtcgggcgcatgcagtttgtgatggacgcctctgaccccacccagctctctgcatcctgtg

SEQ ID NO: 318867 - DNA, 100 bp, Homo sapiens
gtccctcaaggacaacccgtacatcaccgacggctaccgggcctacctgccgtccaggctgtgtatcaaaagacccaacatgagtgaagtttcctgcaag

SEQ ID NO: 318868 - DNA, 74 bp, Homo sapiens
cggaaatgaggaggagatggtggaggaggctgaagattcctagaggggagtgcctgcgagcctcgggtgagcct

SEQ ID NO: 318869 - DNA, 75 bp, Homo sapiens
ctttgtcttggtatactacatggcaaaatgggaaaggacccattccaacaatctcgtaaaacatggtggattact

SEQ ID NO: 318870 - DNA, 83 bp, Homo sapiens
ctcggagccagaggagaggcgcccccgccggccgccgcgccgcccggcagcctcggcaggaataatcggtggagatggattgt

SEQ ID NO: 318871 - DNA, 76 bp, Homo sapiens
ctcctgaatagctgggactacaggtgactgcagcaacaaggagtgttccttcctccatgtgaagccagctttcaag

SEQ ID NO: 318872 - DNA, 75 bp, Homo sapiens
agaaattgaacagaactatgcgaaacaattgagttcttttagaactcatcaaattgaagctgttccaaccagctc

SEQ ID NO: 318873 - DNA, 82 bp, Homo sapiens
ccaagatcaaggtcaacaatcaccttttccacaggctggacggcagtctggaaacgaccaatgagatcttggactctgcctc

SEQ ID NO: 318874 - DNA, 100 bp, Homo sapiens
gaagatcgcttaccctccgggggtaaaagagatcaccgacaagatcaccacggacgagatgatcaaacgcctgaaggagatctataaggacaggcagaaa

SEQ ID NO: 318875 - DNA, 100 bp, Homo sapiens
ctgctatgttcaatataagaaatattggaaagacgctcgtcaccaggacccaaggaaccagaccgcaagtacactctaaccatggaggacttgacccctg

SEQ ID NO: 318876 - DNA, 100 bp, Homo sapiens
aatcaaaaatcttgtacctgatgccgatattcaacgctttcggcaaataagggcgagactgaaaaatcaagtcactcagttgaaggagcaagtacctggt

SEQ ID NO: 318877 - DNA, 90 bp, Homo sapiens
ccacagctaagacgccaggacccactggaagcctagaaatggtgaatctggattgggaaagtcgacattaatcaactcattattcctcac

SEQ ID NO: 318878 - DNA, 100 bp, Homo sapiens
tccttcacccatctgaagggaggaaatagtggcaggtgacagtctgcatgtgcagttttcaggttcctgggtggagctacccatgaacagcagcaatggc

SEQ ID NO: 318879 - DNA, 80 bp, Homo sapiens
ttcttcaggagagcgccccagggcaagccccgctccggccaacaagtgacaaaacacgacagccttcttcaagcccctcc

SEQ ID NO: 318880 - DNA, 100 bp, Homo sapiens
gccgtggcggggatgctgcgagggggtctcctgccccaggcggattttctctgtgggcagttctttttgttttgggaagacttctgactttaattctttc

SEQ ID NO: 318881 - DNA, 101 bp, Homo sapiens
cgaaaggagctggtgcctgtgcaagttgttgagacaagcaaagtggatcagcaaaggctgcagtcaccagcatcttttccaaccttaatgaactgtatcct

SEQ ID NO: 318882 - DNA, 50 bp, Homo sapiens
gtgtgttagctttccccaatgtcacaatatggagcttccgtttctgccaa

SEQ ID NO: 318883 - DNA, 90 bp, Homo sapiens
ggcgcgcgacgccatgggccggccgggcccagagctcctgtctctcagtacatgctgctgttattgctattaatgaagctattgaccgta

SEQ ID NO: 318884 - DNA, 83 bp, Homo sapiens
cttgaagctgtcggctagaccatgcagctgtcttctcctcagtgctggcgctctgactacccttcccaaagaaccacggccct

SEQ ID NO: 318885 - DNA, 100 bp, Homo sapiens
atggcgttccctcacctgcagcagcccagctttctactgaccattcaatgtcccagcctattatggtacagagaagatctggacagggttttcatggaaa

SEQ ID NO: 318886 - DNA, 75 bp, Homo sapiens
gttggtcttgcctgctcccagtatggacacatctttagaagacctaacttaaagaagtcttctgctgaactgaaa

SEQ ID NO: 318887 - DNA, 100 bp, Homo sapiens
gcgccgccgcctcccgccgcgccccgccatgccgctctactccggtgtgggccatgtttgaggattgccccagcattcagttctatgagtaataaatatc

SEQ ID NO: 318888 - DNA, 90 bp, Homo sapiens
gtgacatgcccatgcgagtacctgaggaaggatgtggcagataaccagatagactctggggacctgatggagtgtctgatacagaacaaa

SEQ ID NO: 318889 - DNA, 100 bp, Homo sapiens
gagaaagcacaaagcatggagaccctccctccaggtgctgctacccccgtatgatgatgccactgtgaatggtgctgccaaggagccaccgccaccttac

SEQ ID NO: 318890 - DNA, 98 bp, Homo sapiens
cttcatcctggggctgggcaccctccttccctggaacttcttcatcaccgccatcccggcctagttccccgagagcgttcagacagtgggggctcaag

SEQ ID NO: 318891 - DNA, 74 bp, Homo sapiens
agaaggagaagtggagaagaaatcagtcagccgcaggaaggagattatactacccctgctactctgcagcgtgg

SEQ ID NO: 318892 - DNA, 100 bp, Homo sapiens
ggctgcccgtactgcccgtggcatgagggagccggaagagctgatgcccggtgaggaagatcttctcagtcctccccaggacacaagcacagggttagag

SEQ ID NO: 318893 - DNA, 82 bp, Homo sapiens
cttggtttgcgtcctgcactgaaaggaaatgacggattttacaatgcagatcttcgtgaagactctgactggtaagaccatc

SEQ ID NO: 318894 - DNA, 96 bp, Homo sapiens
tttccttacctgtttttccagctcacccactgccagcagagagcctccaagctcatggcctccttaggagcgaacccaaggaggacaccgcaggga

SEQ ID NO: 318895 - DNA, 89 bp, Homo sapiens
ggaatcttggatccaaaaatatgacagagagcccgagcccagcacattgtgccctgtactatatctcagctgctttctgccactttggt

SEQ ID NO: 318896 - DNA, 87 bp, Homo sapiens
agagctctccgggttccccggctcgcggggcccggcgaagggcaggtcatcatcagatttgaaatatttaaagtggatacaaaacta

SEQ ID NO: 318897 - DNA, 100 bp, Homo sapiens
gtgctggcggcggcgggtcaggagcagccgcagcgacggcggcgacagcaggatattagaaatggctactccccagtcaattttcatctttgcaatctgc

SEQ ID NO: 318898 - DNA, 100 bp, Homo sapiens
ccatcttcttctatttggtggatgcagagcagggacggctgtgtggatatcggcttcgaaaggacaggaagatgtcacccaagcgcatagctaaaagaag

SEQ ID NO: 318899 - DNA, 50 bp, Homo sapiens
cttcgttgagttcgaggacccgcgcggaaggcagacagattgctgccaac

SEQ ID NO: 318900 - DNA, 100 bp, Homo sapiens
ttccagggtcgtctactcaatttgagctgctccacagttcccacctttgttctgtccatcacagccacaacacagggctattcggagtcaccagacctgg

SEQ ID NO: 318901 - DNA, 75 bp, Homo sapiens
atggacgtgatgttggtgtgttcacatttgatcatggcatggaacaggagtacagctgtgtagtaaagatgcctt

SEQ ID NO: 318902 - DNA, 122 bp, Homo sapiens
ggaagaccgcgcgcagggcctgcagcgggagctggacggcgagcgcgagcggcgcgagaaaccctgggcgctgcctatggcacagccaagagcggtaccggcattgcggccatgtctgtcat

SEQ ID NO: 318903 - DNA, 100 bp, Homo sapiens
cagattcgcagtggtcgcttcttctccttgccgtttccctggggagatggtaaccatactctattccataaccctcatgtgaatccacttccaactggct

SEQ ID NO: 318904 - DNA, 80 bp, Homo sapiens
cctgaggccccagaactatcttttcggggttggctgtgttccggccgcagagcaccgtctgcgtgaggagatcctggcca

SEQ ID NO: 318905 - DNA, 82 bp, Homo sapiens
tgacggctgtacttgagcagtcacctggcacagacaatgcagatcttcgtgaagactctgactggtaagaccatcaccctcg

SEQ ID NO: 318906 - DNA, 83 bp, Homo sapiens
tggagacccacaggagccccggacttcacctgagctacctcaggctatgactttgcagccgtcctggagtggttcgcggagcg

SEQ ID NO: 318907 - DNA, 49 bp, Homo sapiens
ctggcatggagaccagatggcaaacgtagttgtgtcaactaacatagca

SEQ ID NO: 318908 - DNA, 101 bp, Homo sapiens
gagggtctggaggagccttctcaagaacagagcgccacccaagactgtcaaaccccctgaggatcaactgaagtcggagaacctcgaggtgtccagttcct

SEQ ID NO: 318909 - DNA, 75 bp, Homo sapiens
ccgcctcctgctagagcggcgaaccgtgggcagtgagctcatcatccatggcagctatgctctgatccagctgcc

SEQ ID NO: 318910 - DNA, 75 bp, Homo sapiens
ctcaactttctgggcgttcatgatcctggccagcctgctcatcgcctactgcaagctccacgcaggagatcggtg

SEQ ID NO: 318911 - DNA, 82 bp, Homo sapiens
catctctggtgcatgctgatgacgaaaaactgctggtcccaaaggcgataacatctatgaatggagatcaaccattctaggg

SEQ ID NO: 318912 - DNA, 98 bp, Homo sapiens
atccttgccaagtcttaatgccagaatggaaaagaatggcccggacacgatgaggcgagtggtacgacagagcaagtttcggcatgtatttgggcaag

SEQ ID NO: 318913 - DNA, 101 bp, Homo sapiens
gtataatccagcaggcaaccaaaggtggtatttccaacattttggaggaactggttgtccagcctctgttggtatcagtcagtgctctgactcttgcaact

SEQ ID NO: 318914 - DNA, 100 bp, Homo sapiens
gacgacgccggcgaatgcccagaatgccagcaaaacgtgggaactgagtctgtatgagctgcaccggaccccgcagattatgtttgagaccttcaacacc

SEQ ID NO: 318915 - DNA, 95 bp, Homo sapiens
tgtggatcccattcagagtgtaaaaggaaaggctgagtatgagtttatcagctctggtctctacctagtggtgttattgcacttgtgcgaacaaa

SEQ ID NO: 318916 - DNA, 51 bp, Homo sapiens
tccaaatgaatttgcaaaacttactgtaggggcaagattcttgccaagaga

SEQ ID NO: 318917 - DNA, 100 bp, Homo sapiens
cggacaaggctccggcctgcgaggaggaaacctcgacctgtctcccagttggttgcacagcaggttactcagcagtttgtgcctcctacacagtcaaaga

SEQ ID NO: 318918 - DNA, 90 bp, Homo sapiens
gcttttctgccccaactaacacaggcactactgcgtccgtctccaagagagtatgaagagagtgcgtctgtagggcagggaagatggcgg

SEQ ID NO: 318919 - DNA, 73 bp, Homo sapiens
gaagattgagcatggggctctagtgcatcacagtgcacttgcacctcctgcgccgccgccccccatccaagga

SEQ ID NO: 318920 - DNA, 100 bp, Homo sapiens
ggaggacccagagcaggacagcggcccggaggacctgcctctcgtcaggttcctctcctggctgaaatttatggtatagaaggaaacattttcaggctta

SEQ ID NO: 318921 - DNA, 98 bp, Homo sapiens
gagatgatgctggagcagaagttagcgcttctctctcgtttgaaagatgatgacagtggggaccatgatcagaatgaagaaaacagcacacagaaaga

SEQ ID NO: 318922 - DNA, 100 bp, Homo sapiens
gagaacacatttatgatttacgatccctggaaaattaccactttgtagctttagcgtcacctccctcactgggcagcatgggggagaagtcagagaactg

SEQ ID NO: 318923 - DNA, 100 bp, Homo sapiens
ttttggatggtgaaccctgaagtcggtgtctgctgcgttcacggcaggattcggttagaatgttcgtggcatcagagagaaagatgagagctcaccaggt

SEQ ID NO: 318924 - DNA, 74 bp, Homo sapiens
aatggtctgaggcagagtgtggttcaagtcgacttcaatgttcctatgaagaacaaccagataacaaacaacca

SEQ ID NO: 318925 - DNA, 75 bp, Homo sapiens
cgagcacagagcctcgcctttgccgatccgccgcccgtccacacccgccgccagttcatggcctcccacgggaac

SEQ ID NO: 318926 - DNA, 100 bp, Homo sapiens
gcattgctgaaaatgatgttggaaatgcacaagctggagcccaactgataatccttgaacatggcctttggaaatgcaaagacagctcataataacaatt

SEQ ID NO: 318927 - DNA, 90 bp, Homo sapiens
tgcctgtgatggcatctttcatctaacacgatagtggccaaagcctccaagaacctcatgtccacgcaaagcttggggattgtatttgga

SEQ ID NO: 318928 - DNA, 97 bp, Homo sapiens
gttcgggtgcgctgctcaaggacacggtctacaccgacttcgacgtctcgcccaagaacttcaaggtgaaaatgatcatgaagacatcagttctgct

SEQ ID NO: 318929 - DNA, 100 bp, Homo sapiens
gagtggggacctctggatcccagtgaagagcttcgactccaagctttcagtgaaaggttacaatgacaagcagccaattttactaaagaagattattgag

SEQ ID NO: 318930 - DNA, 82 bp, Homo sapiens
tgaactcttcagataatcagagtggaggaagtacagccagcagatgatgtgaggcataaagttcatctgaacacctttggct

SEQ ID NO: 318931 - DNA, 128 bp, Homo sapiens
aaactgaagtttcttctgggtccatcaccaaagagcagatgccaaatctgtgacaaaggagagcatgcttccagctggagctgagtccaagcacacagccactcctgcacacgcatgcgtgcaaacag

SEQ ID NO: 318932 - DNA, 83 bp, Homo sapiens
cgccgggaccctcgcgcgcgaccgccgaatcgctcctgcagcagagacacagccgccagcccaaacagcagcggcatgggcag

SEQ ID NO: 318933 - DNA, 142 bp, Homo sapiens
ctcagtccttcttttctctgtctccacaggaggtccccagctgctagtcagcctcctgtctccagagtcaacccacaagaattccaagtcaaattctgttccaattatcctggccatcgtgggattgatgctggtcacagtc

SEQ ID NO: 318934 - DNA, 50 bp, Homo sapiens
tgccaggcacttggaaatgtttggccaagttgatagaatttagtcctctg

SEQ ID NO: 318935 - DNA, 75 bp, Homo sapiens
ttgactggtcttacattgctgcatcaagaaacccaagctgctgaggttttaaaatcaaagatgggaaaatcggag

SEQ ID NO: 318936 - DNA, 75 bp, Homo sapiens
gcccagacggctcacctgtgcgggatggaacaaaagctcccgttctctgtcatcggttccctcaatggagtccac

SEQ ID NO: 318937 - DNA, 100 bp, Homo sapiens
ggtggtggagacgggccccacatcagctccaaggtcagggtgattaagctgtcaggtgggaagaagctcattcacacagaagacccatttaatgatgaac

SEQ ID NO: 318938 - DNA, 100 bp, Homo sapiens
cctacattgaatgcaatcggccccagcctgctcatagcattaccgctacattggcaagaccatggattaccggggaaccatgatccctagtgaagccccc

SEQ ID NO: 318939 - DNA, 90 bp, Homo sapiens
ctcagggatcaaagagcaaacagattcagtggcctgcattgctggccgccaagcactgccggaggccagtgatcaatgctggggatgggg

SEQ ID NO: 318940 - DNA, 90 bp, Homo sapiens
atgttgttgccgtgtgtgctggaaacaaaatattcatgctggatattgaggttccacacagtaggactgaaggtttaaagccaagggaga

SEQ ID NO: 318941 - DNA, 100 bp, Homo sapiens
ccccggcgccacctggagagaggccgcgtcctgggcagagttggaaatgcagaaatcacctgtcttctgcgtcgatcaggctgggagctgcagaccggag

SEQ ID NO: 318942 - DNA, 74 bp, Homo sapiens
gttaggaccaaacctcaaagcatggctaagagtgttcagtagaaatggagatggagtctcactgtattgcctag

SEQ ID NO: 318943 - DNA, 75 bp, Homo sapiens
acgtgttggaccttccggagcttctcagaagacagagggttttcttttgaggcctgtatccggtgtccgaggcga

SEQ ID NO: 318944 - DNA, 82 bp, Homo sapiens
ggccacaaagtgaccaagaacgtgagcaagcccaggcacagccgacgccgcgggcaagagtgagccatggagctacgtgtgg

SEQ ID NO: 318945 - DNA, 74 bp, Homo sapiens
ccggaacagtccgtgatgcaagctctcgagagtctcacggagacgcaggactcctcctattttgaggacttctc

SEQ ID NO: 318946 - DNA, 75 bp, Homo sapiens
ggactagacccagatcttcttgaaacattaaccaggtggtatttgttggaaatttcttgagaattaatacgatcg

SEQ ID NO: 318947 - DNA, 82 bp, Homo sapiens
aattgtagctgacgaagcattttgcaacgcagttcggagttattatgaggtctgtagcatctctgtctgttggagaaggcac

SEQ ID NO: 318948 - DNA, 75 bp, Homo sapiens
gtttgtattttggctgctgcaggagccattttagtcaggatggctaaaggtgaccccaagaaaccaaagggcaag

SEQ ID NO: 318949 - DNA, 82 bp, Homo sapiens
ctgtggacgggcgaaggaaagtacagtgaagcagaggagagcagtaagatccgtgctcccactaccatgaagaaatttgaag

SEQ ID NO: 318950 - DNA, 82 bp, Homo sapiens
ttctcctctccatctgctcacttcttacagattgcaaccctggtcagcccaaggccaaccccactgtcactctgttcccgcc

SEQ ID NO: 318951 - DNA, 96 bp, Homo sapiens
ttttccgctacgtcctgagcttcctgcggacgtccaagctgctgcttccggatgactttaagatgtgtcttgctgaatcagggctctcttatccct

SEQ ID NO: 318952 - DNA, 123 bp, Homo sapiens
ggcgcggggccccagggggcacaagaagtccggaaccatcccttcttccagaatgcccacaaggtccctcccccatggctgattgccatgcagcgatatggaccacccccatcgtatcccaac

SEQ ID NO: 318953 - DNA, 90 bp, Homo sapiens
gaggattttgaggacacttgtggagagctcgaattccagaatgatgaaattgtgtctctggggaacaagactcatggaggaaagcagcac

SEQ ID NO: 318954 - DNA, 74 bp, Homo sapiens
gaaaacttgactgtatacagaatcttgaatcagaaattgagaagctggttttgcaaattgatgatgtcacaata

SEQ ID NO: 318955 - DNA, 129 bp, Homo sapiens
ctggacttctcaactgccattctggattccagaagatttaactacgtggtccgggtgcccgtggggcaggaggtggaggggatgaacatcctgggcttggtagtgtttgccatcgtctttggtgtggcg

SEQ ID NO: 318956 - DNA, 82 bp, Homo sapiens
ttggaaacgacgtcatgtgttagggtgaggaccctttcaccagtgaaactgttgatccagaaatggaaggagatgacaattt

SEQ ID NO: 318957 - DNA, 82 bp, Homo sapiens
taggcaggaccccgggacaccctggaagccaggaaatgggggatatgagactttctactcggaatatcctgagtgttgcgtg

SEQ ID NO: 318958 - DNA, 90 bp, Homo sapiens
aacttagcagcagctccactgaacagataagggtgcattggatcgttgtgtgatggggataacagcagttgagattctaaacgcttgtga

SEQ ID NO: 318959 - DNA, 51 bp, Homo sapiens
atcctagaggtcaagatcagctctggctagcatggcctgtatgagaagaaa

SEQ ID NO: 318960 - DNA, 100 bp, Homo sapiens
agcacatgtgccgcctggacattgattcaccacccatcacagcccggaacactggcatcatctgtaccattggtgctggagaatctggtaaaagcaccat

SEQ ID NO: 318961 - DNA, 76 bp, Homo sapiens
tggcccaggctgaggagcagctagagcaagagaccagcagcagtgttgtactgctacttctataaacggacagccg

SEQ ID NO: 318962 - DNA, 100 bp, Homo sapiens
atctggattggggcgtgctgatccaccttatactcatactatacagacagaggaccccagtaagtgcagtcctcggttttgggaggagctctttctcatg

SEQ ID NO: 318963 - DNA, 100 bp, Homo sapiens
cgcggagcacggaggacggggccgggcgacctgggcaccagcaggacccgaggccaggagccaggggcccagaagagaggcgtttccatcaaccagtttt

SEQ ID NO: 318964 - DNA, 82 bp, Homo sapiens
gtgcgagaggcacagtgaggggagcaatggctgccatccggaagaaactggtgattgttggtgatggagcctgtggaaagac

SEQ ID NO: 318965 - DNA, 100 bp, Homo sapiens
cattgaagataatgaactaaacatagttttggaactagcagatgctggcgacctatccagaatgatcaagattcaaccctatgaaaagataaaggccagg

SEQ ID NO: 318966 - DNA, 82 bp, Homo sapiens
gcgaggccctcatgtaccacacgcgtccgtctccaagagagtatgaagagagtgcgtctgtagggcagggaagatggcggac

SEQ ID NO: 318967 - DNA, 100 bp, Homo sapiens
atgcaccgttggattctttgtcgttcaagtgaatgttgactatttacagaaaccccatttcatttcactttgcctaaagaaggtgatatcatcccaccat

SEQ ID NO: 318968 - DNA, 100 bp, Homo sapiens
gcagcccttgggggagagcaaggagcatccgcggtgggaagagaactgcgaggaggaagctggtggagggccagctagggtctcgctctgtcgcccaggc

SEQ ID NO: 318969 - DNA, 100 bp, Homo sapiens
gatttaaacaagagatttccacagaagatttgtcccatcagatgaaaagaagaaacaaggttgtcaacgagaaaatgaaactctaatacaaagaagaaaa

SEQ ID NO: 318970 - DNA, 75 bp, Homo sapiens
ggaatttcttcactttttaacggaccagttcagcgcgttccttcacctcgggcagaataactttgcagaagccca

SEQ ID NO: 318971 - DNA, 100 bp, Homo sapiens
gtcgaaaatggagcacgtccaggctgaccacgagcttttcctccaggcctttgagagaaaggcagcaacaggtggaagctgttgagttggaggctaaaga

SEQ ID NO: 318972 - DNA, 100 bp, Homo sapiens
cctcaacttcttgtcctcaagtgatcctcccaccttagcctcctaagtagctgggaccacaggtgaccaagaatatggcccaggtgaccaaagccctgga

SEQ ID NO: 318973 - DNA, 100 bp, Homo sapiens
gccttgtcccagacttatggatccgttacagtcagtacctagtttgagaaatttctgtggttcattagctcagagaactatctaattataggtggacgag

SEQ ID NO: 318974 - DNA, 100 bp, Homo sapiens
acgcttgtgaagcaccggcgggacggcaagcagggacctcaaactggacaatgtgctgctggaccgggatggccacatcaagattgccgactttgggatg

SEQ ID NO: 318975 - DNA, 104 bp, Homo sapiens
aaaagatcagcgaggagcagcagcagctccagcaggcgctggctcctgctcagtgtactaatggtcacttgatgtgcgctggctgttttatccacctactagca

SEQ ID NO: 318976 - DNA, 100 bp, Homo sapiens
gctccggagaggggaaaaccacgctcctcggaccaagcctcgggagctaaggcttttatacagaaaaacctaagacaattaaactacgtatggattgggc

SEQ ID NO: 318977 - DNA, 76 bp, Homo sapiens
ttcacccagcatttcatccctcgtcgaaaggattggattggcatctttagagactccctggcactggggaaaacag

SEQ ID NO: 318978 - DNA, 100 bp, Homo sapiens
ctacagcagccaaaacgagaagaagaagaagtgttagaccaggtcaagtccatcatctccagaaccagctagtcttcctgcagaagatattagtgcaaac

SEQ ID NO: 318979 - DNA, 134 bp, Homo sapiens
cacttgcttgacctacaaggaatctgagggtgccctcaatgagcacatgaccagcttagcttctgtcctaaagattcaggcttcttcaggagaaagcaagtacactggtaccttggactgtgcaaagaagctgt

SEQ ID NO: 318980 - DNA, 74 bp, Homo sapiens
agtctccaatacagaagaatgaaggctgcaatcacatgcagtgtgctaaggatatgatgtttcagcttctccga

SEQ ID NO: 318981 - DNA, 118 bp, Homo sapiens
agatgccctgttccaggaggacagctacaagaaacacctgaagcatcactgtaacaaggtctggaacagaatctgacagtgatgaatcagtaccagagcttgaagaacaggattccac

SEQ ID NO: 318982 - DNA, 90 bp, Homo sapiens
gtctaagcaagcatttgaggccgacttacatcacaacaagttcctggagacggtggagttgcagatcagcttgaagaactatgatcccca

SEQ ID NO: 318983 - DNA, 75 bp, Homo sapiens
cgcgcgtacagcccgggcatccagggttgccaccttccagagaagaggtacgagatgacaagacaaccataaagt

SEQ ID NO: 318984 - DNA, 51 bp, Homo sapiens
tttacatgtatgagattctgaagctagagagggccatcaagacgatcttga

SEQ ID NO: 318985 - DNA, 75 bp, Homo sapiens
ctggattactggccctcttcaccctcagacatcacaaatatgaacgtgctggccaaagcgctctatgacaatgtg

SEQ ID NO: 318986 - DNA, 75 bp, Homo sapiens
aagaccaagaagtgggattactggattatatggtggccccagcagatggcttctctgatcttgccatgcaagtaa

SEQ ID NO: 318987 - DNA, 83 bp, Homo sapiens
ctttctgctgctgaagtaatgcaatggtctcaatctctggaaaaacttcttgccaaccaaagataaaattgtccatggaccac

SEQ ID NO: 318988 - DNA, 83 bp, Homo sapiens
gccgcacctccgtagctgactcggtcgcaatggaagaagagatcgccgcgctggtcattgacaatggctccggcatgtgcaaa

SEQ ID NO: 318989 - DNA, 101 bp, Homo sapiens
ggggacgctaagcctcagcccgttgattcctgggtctagcttgcatgcctgcgccctgcccacccttggagccaggcacacagtgacgactcggaggccac

SEQ ID NO: 318990 - DNA, 98 bp, Homo sapiens
tcagcctccggagtagctgggattacaggtattcccatctgtcgacaacacttaatttggaataacatggaacttgaaaatgattattgcttgaatga

SEQ ID NO: 318991 - DNA, 82 bp, Homo sapiens
gaccctggagcctcagttggaagcagccgatccagcctgcggagcctgtggggcaggggctatacaaagcggaccagcggtt

SEQ ID NO: 318992 - DNA, 96 bp, Homo sapiens
gatggatatatcttccttgacagcaaaggtaacagtacttcaatttctaccttaaggacttcctgtctactgggttgtgcagtaatgcaagataac

SEQ ID NO: 318993 - DNA, 50 bp, Homo sapiens
gtcccgccaccggccgcttctgtcctcgacgttcatcttcactgacgggg

SEQ ID NO: 318994 - DNA, 135 bp, Homo sapiens
cgtgtgggaaaacatgcatccaagttccagtttgtggcctcctaccaggagctcatggttgagtgtacgaagaaatggagtacaagatcctcagcatgagagaattattactgtgtctactaatggaagtattca

SEQ ID NO: 318995 - DNA, 100 bp, Homo sapiens
ctcagcagcagtcagcaggaactgatcatcaaagaggaggaacccgttttcactagacaagacagcaatcgcagtgaaaaggaagccacaccagtggtgc

SEQ ID NO: 318996 - DNA, 100 bp, Homo sapiens
ttgaagtcgattgccaacagtgtatgctcgaaatcctggatactgcagggacagttatggtggagaattcagactttaccccctcacaagtaggatgtct

SEQ ID NO: 318997 - DNA, 74 bp, Homo sapiens
cccacgctcatgatcgacttcctcacccgcgcctgcgacctcgctgtcgcctggttgggcccggaaatgggacg

SEQ ID NO: 318998 - DNA, 100 bp, Homo sapiens
tcccacctgccgcccttcttcgatgtggaaactaaagcccagagagaaagtctgacttgccccacagccagtgagtgactgcagcagcaccagaatctgg

SEQ ID NO: 318999 - DNA, 97 bp, Homo sapiens
cagatgaagagggaggcctgagaggctgctgttctaactcgctcccagatggagaggagaaaacctatggtggctgtgaaggacctgatgccatgta

SEQ ID NO: 319000 - DNA, 98 bp, Homo sapiens
aagtggatggcgtggagatatggcgcaactgcggcgcctggaccaagcaacactctccctggccgtgagggaagactaccttgataacagtacagaag

SEQ ID NO: 319001 - DNA, 88 bp, Homo sapiens
tcgcgacgactaaatacccgtgtctgaagtcttcaggcgagctcaccacatgctacagatttacactgactgggccaaccactaccta

SEQ ID NO: 319002 - DNA, 100 bp, Homo sapiens
ggaggagcaggggctcagctgggctcaaatgatggctcagacattcattctgctgtgctctccacaattagaaaactagaggatggatattttggaggag

SEQ ID NO: 319003 - DNA, 112 bp, Homo sapiens
gagaagccagtcacgccgggagctggtacacagcctcagcaatggcaccagcatgatatcattgatcattcctcccaaagaccagatttcacgagtggcaaaaatgttagcg

SEQ ID NO: 319004 - DNA, 100 bp, Homo sapiens
ttggagcaagggaaagaaccctggctggggaaaagggaagtgaaaagagatctgttttcagaggagtgtgcttcagttgctgcactccacgagcgacgtg

SEQ ID NO: 319005 - DNA, 100 bp, Homo sapiens
ccgagtgtcctttcccccctaagctggcacataggagcaaaagttcactaaccctgcagtggaagaaaggatttatatgtactgttgacaccataaaaga

SEQ ID NO: 319006 - DNA, 100 bp, Homo sapiens
ctggaccaggaaactctccacggaggaaaagactgagcagttgttggattgtaaacaagaacttgagcaaatggaaatagaactcaaaaggctgcaacaa

SEQ ID NO: 319007 - DNA, 100 bp, Homo sapiens
tggagctctacgcctcctacgtttacctgtccatgattgtagaaggcatgaaacaaaaaatgtggagtattgaaaatattgccttcggttctggtggagg

SEQ ID NO: 319008 - DNA, 50 bp, Homo sapiens
gaagtgtccaccctccggaacacaagatgatgattattccccaccttcta

SEQ ID NO: 319009 - DNA, 75 bp, Homo sapiens
ctcagccagggcctccccttctcttccatgcccactgcctacaacacaggagctgggcatccaagaagaagcagc

SEQ ID NO: 319010 - DNA, 100 bp, Homo sapiens
tggaaatcagtttgctgaaattaatcaacgattcttgaagttgaagaaaaggcagccttaagtgccttgaaacaattttctgaacaaggactggatccaa

SEQ ID NO: 319011 - DNA, 75 bp, Homo sapiens
gtacactacgtggattcacgggggttagtcgtattaagacagatctgaaactcagcaccgaggctctgctcccca

SEQ ID NO: 319012 - DNA, 82 bp, Homo sapiens
gctatcagtgcccgctttgttcagctgcagcatggagagatagataaacgggttgcaataaattgacagaccagaccctgat

SEQ ID NO: 319013 - DNA, 100 bp, Homo sapiens
ccggctttctgggcttttggaggcagaggaggaagatgagttctaccagacgacttatgggggtttcacagagatgttagaagctgaagtttctataaac

SEQ ID NO: 319014 - DNA, 75 bp, Homo sapiens
accaaaacaaggagaaggtgcaagactgtccgtgtggaccctgactcacaggtgtgatccctcacatccacaaat

SEQ ID NO: 319015 - DNA, 146 bp, Homo sapiens
caccatcctcaccatctggctcttcaagcaccgccgggtgcgctttctgcacgagaccgggctggccatgatctatgtttggtaactctcattcgacatccatctgaactaatgaatgttcctcttcagcaacaaaacaaatgtac

SEQ ID NO: 319016 - DNA, 99 bp, Homo sapiens
ccagggacctgcttggccagcgacagatcctttgctgctctgtctgccggttcttgagggtatcagcatggaagccatgagtgagaataaaatggtgcc

SEQ ID NO: 319017 - DNA, 49 bp, Homo sapiens
tcataggattactgatgctggaggccctggccaacgtcaacattgggag

SEQ ID NO: 319018 - DNA, 100 bp, Homo sapiens
gcagctgggatgttatctggcgtattcaccacaggaatcatgactcctggagaacggatcaagtgcttattacaggtaccaaagcagtcagactcacagc

SEQ ID NO: 319019 - DNA, 82 bp, Homo sapiens
ctcagttggaagcagccgatccagcctgcggagcctgtggggcagaggatgccagcccccatcagattgcgggagctgatcc

SEQ ID NO: 319020 - DNA, 82 bp, Homo sapiens
ccgcgaggcaggagagaggaggaggagtgcggcgcggcggccccgggaccaaggaggttcgagaacttgtcttggacaattg

SEQ ID NO: 319021 - DNA, 90 bp, Homo sapiens
atgggaataggactctcggctcaaggcgtcaacatgaacagacttcctgactcagattgatggacaacttttcttaattaagcacctttt

SEQ ID NO: 319022 - DNA, 50 bp, Homo sapiens
atacgacagagaatcagagtggaaacttctatggaactcccaagcctcca

SEQ ID NO: 319023 - DNA, 73 bp, Homo sapiens
gcgcctgcgacctgcccgcctggcagggaggagagagcgatggcttttttcacccagaaggccagccccagcg

SEQ ID NO: 319024 - DNA, 100 bp, Homo sapiens
gctgagttgccgctacatcatctcccgcaagcccgagggctcccctgtcacggagaggatcaagcgcatggcaggcatgaaggaatcgcagatcagcgca

SEQ ID NO: 319025 - DNA, 82 bp, Homo sapiens
ctgcgttctgctcctactgcttcgcgtccagacagggggggccctcagcctcttggccttgaacgggctgttcatcttgatt

SEQ ID NO: 319026 - DNA, 117 bp, Homo sapiens
cgaccaggccgggcacctccgagcgcaaggacagcgcgaggtccgcgcagcccagcgcagccatgtgctggagaatctggtaaaagcaccattgtgaagcagatgaggatcctgcat

SEQ ID NO: 319027 - DNA, 74 bp, Homo sapiens
tgttggcgttgatatcagtggcaggtttatgacctcaggaaagggaataaccagcaagtacctgtcaagaatga

SEQ ID NO: 319028 - DNA, 100 bp, Homo sapiens
gtgcgctgccggacgaggctcccgccgccgattgacccgcgctccgcccgtagtcgggccgacttgtgcaccatggacaattttgctgagggagatttca

SEQ ID NO: 319029 - DNA, 99 bp, Homo sapiens
cggttccccggcccacagtgggggtgtgcaaacccgagagaactggacaggtgatttggcttctgcacagttaggaggagcaccaaaccgatgggaggt

SEQ ID NO: 319030 - DNA, 100 bp, Homo sapiens
cgcaggagcacggatgccccccggagccgcgggctggcaggtgctggagaatctggtaaaagcaccattgtgaagcagatgaggatcctgcatgttaatg

SEQ ID NO: 319031 - DNA, 75 bp, Homo sapiens
tagaaactcacatgagacaaatgcgctcagcttcaattggctagtcaaatgaagcagtgggatatgctgcatttt

SEQ ID NO: 319032 - DNA, 100 bp, Homo sapiens
attctgttccagaacactcccaaccgcacctgggactgcgtcctggtcaaccccaggaactcacagagtggattccgatttggagcaagaggtggtggtg

SEQ ID NO: 319033 - DNA, 100 bp, Homo sapiens
ggggtgacagctccgggaccggccgaaaggcgaggaaccggtggcatggaatattcacatgggagagccgcatgaggccgcccaccacgcttcctgaagg

SEQ ID NO: 319034 - DNA, 51 bp, Homo sapiens
tatcacacaactgaaaacagattctgagaaccttcggctcgcgtgcttctg

SEQ ID NO: 319035 - DNA, 98 bp, Homo sapiens
gagagcccggagacggtgtcccagctggattcggtgcgggtctggctgggcaagcactacaagaagggcaaactctttgattctacaatagctgatga

SEQ ID NO: 319036 - DNA, 100 bp, Homo sapiens
ggagctgagaggagctgctgctcggaccagcgcggtttctgacaaagcgggagcaaaaattaatgcaacggcgacaacatgcagaggagctcctagagtg

SEQ ID NO: 319037 - DNA, 51 bp, Homo sapiens
gagtattgccgcggtggaaatggagttgctgcgaaaccagagatttcctgc

SEQ ID NO: 319038 - DNA, 82 bp, Homo sapiens
cagaccaagtcctccacagagggcgagccagggtggagaagagccagcccaggaaaattgcctaagaattatgacccaaaag

SEQ ID NO: 319039 - DNA, 50 bp, Homo sapiens
aaacagaatcagctgttccctgcgaaagacaatgcagatcttcgtgaaga

SEQ ID NO: 319040 - DNA, 75 bp, Homo sapiens
atcgtggccacgcttctcatcctggacatctggactccctggaggaaaagcggaagcggcagcggtctgaacgcc

SEQ ID NO: 319041 - DNA, 100 bp, Homo sapiens
gaagggggagaagatctacctgtacacgcacctgaagcaacagcccatctgggaaggtctgtttctctaacaactttttatcgaacagcgaggaatatca

SEQ ID NO: 319042 - DNA, 100 bp, Homo sapiens
agaggtgccttaccaccctgtttggagttgatccctgaattttattatctccctgagatgtttgtcaacttcaataattataatcttggagtgatggatg

SEQ ID NO: 319043 - DNA, 75 bp, Homo sapiens
ggcggcagcgctggactaggtggcagctccatctggctcctgctgaagaaccccacgttcatcctgctctgcctg

SEQ ID NO: 319044 - DNA, 100 bp, Homo sapiens
gaccatcaacagtttgactacataataaggatgatgaattgtactctacaggtaaacgcaaagcactgaagttgaattttgcaaatccacctttcaaatc

SEQ ID NO: 319045 - DNA, 95 bp, Homo sapiens
agacagctcaggctgcccagatggtggctcccggagtccagcaaattgtggctactaatttgccccctgaagatcaagatggctctggggatgac

SEQ ID NO: 319046 - DNA, 100 bp, Homo sapiens
gggtggtgaccatcgaaaggagcaagagcaagatcaccgtgacatccgaggtgcctttctccaaaaggaagccgagatcccccgcgaggtgatcgagagg

SEQ ID NO: 319047 - DNA, 82 bp, Homo sapiens
ttcagacattcctgggataaacagtgtgaccgatgtcatatgctaggccactatacagatagctcacaatgtctctctgcac

SEQ ID NO: 319048 - DNA, 75 bp, Homo sapiens
ctacactgaatttcctacagttcttgatattacagtgggcaagttacggaagcaatggctaaaggaaagtatctc

SEQ ID NO: 319049 - DNA, 76 bp, Homo sapiens
gcagccttcagggagcgtggagacagtgtttgccagctctgagcctgtgccaggattccagggggataccctgcag

SEQ ID NO: 319050 - DNA, 100 bp, Homo sapiens
tcaaactcgagcagcctcagctgactaccttcgcccaagaataccatcaccaattggacattctgagcatgtgagacctgaggactgcaaacagctataa

SEQ ID NO: 319051 - DNA, 83 bp, Homo sapiens
ggacaccaagatgcggatccgggcctttccgatttctggacttcaagaaacattgaagaaactgcaaagaggacatagttacc

SEQ ID NO: 319052 - DNA, 82 bp, Homo sapiens
ccggcggcggcgcgcagcgtgtcaggcggagagacccgccgccagaatccagcaactatcacaagaatactccttagccact

SEQ ID NO: 319053 - DNA, 82 bp, Homo sapiens
ccctcatcctggttctggaatcctcagttcaaggtgggtttgatctggacatcaaaggctggggcggagaggatgtgcacct

SEQ ID NO: 319054 - DNA, 100 bp, Homo sapiens
ccatggggaaagtgaatgtggccaagttgcgttacatgagccgagatgacttcagggtcttgaccgcgcctctacagctttacgttccagtccaataatg

SEQ ID NO: 319055 - DNA, 100 bp, Homo sapiens
gtcattcacaaccccctgaaagcgttgtggcagcactgcctgaaggtatgagaccagattctaatctttatggttttccatgggaattggtgatatgtgc

SEQ ID NO: 319056 - DNA, 87 bp, Homo sapiens
cggcgttgccaccaggggccaattaagccttaccagcaggggcgacaacagcatcagttgactatattgtggagtatgactatgatg

SEQ ID NO: 319057 - DNA, 101 bp, Homo sapiens
atctccttgatcctggctgtggactggctagttctccaatggccccgtggaatcggtcaccctggagaacagcccgttggtgtggaaggaggggcggcagc

SEQ ID NO: 319058 - DNA, 90 bp, Homo sapiens
caggcactttcccggtccccaggaatcccgttctgcttccagaagtggaagtgctcacggatcggggaaatctgcaaggcatacccctgc

SEQ ID NO: 319059 - DNA, 100 bp, Homo sapiens
gcctatgacagagagatgatatacccgaagctgctggataattttatcccagggtggctgaatcacggaatggccaaagaagccctcgaaaatactgaag

SEQ ID NO: 319060 - DNA, 75 bp, Homo sapiens
tgctcaaagccctgggtcgcttggaagaagccaagagcctgccctcgcaaaacccgatcttgaagaatatcaccg

SEQ ID NO: 319061 - DNA, 100 bp, Homo sapiens
cggggcatggccctccggagtgcgcagggcgacggccccacctccggccactgggacggcggcgcggagaaggcagattatttggaagctcggaagtgaa

SEQ ID NO: 319062 - DNA, 100 bp, Homo sapiens
ggggagacagcgccgggagaggccggcagccccgggacacccccgcaagcgagcaggtcactcctggaagcaaggcggctctagctaatttatgtattgg

SEQ ID NO: 319063 - DNA, 96 bp, Homo sapiens
gcctgttaaaaagaaagtaaagaaagtccaacaaaaggaaggaggaagtgatctgggaatgtctggcaactctgttggattggatgctgctggcaa

SEQ ID NO: 319064 - DNA, 100 bp, Homo sapiens
gccttggtagcagcgggtgacatggaaggggcagtacaagcttacgtctctgctcttcagtacaatcctgtttggcttgagcaacaagtttgatactgaa

SEQ ID NO: 319065 - DNA, 82 bp, Homo sapiens
tcaagaaggaagtgtatcttcatacatcaccacacctgaaagcagaaagcttatagcttcattgcaccatgtgtggcatttg

SEQ ID NO: 319066 - DNA, 99 bp, Homo sapiens
gtctgggcttctctgaggcggcgagagatggtcaggtctggagctcgaccgggccaggaaactttaccctcccagaggtagctgagtgctttgatgaaa

SEQ ID NO: 319067 - DNA, 89 bp, Homo sapiens
agggcgcggcctctccgccgggtgtaccacctgtcgcggcgcgagacctctggatggattggatgctttggtatatgatttggattttc

SEQ ID NO: 319068 - DNA, 74 bp, Homo sapiens
ctcgctccggaaaggggacacctgttggatccttatgactatgaaatgattgaagttgtcttgaaagttataga

SEQ ID NO: 319069 - DNA, 75 bp, Homo sapiens
tgtccgagcccgaggccagcgccgcggcattcctgcatcgcatccggcagaacgtggccgactcagtggagaagg

SEQ ID NO: 319070 - DNA, 100 bp, Homo sapiens
ccggaaaacctaaccatgaagacttgaacttaatacagcaagaaagaccatcaagtttaccaacaaatcttcctattttcaagctgaaagaatctactgt

SEQ ID NO: 319071 - DNA, 74 bp, Homo sapiens
gtggaagcagcaccatcggggagacaagcaacttcttggacacttaatgattgttggcaagaaatgtgctgctg

SEQ ID NO: 319072 - DNA, 100 bp, Homo sapiens
gaacctcagcaccgagaacatctactctttcaactacaccagccagcccgaccagtgtgcccaagagtgtaaacatcttcctgaatctctttatccacat

SEQ ID NO: 319073 - DNA, 100 bp, Homo sapiens
ttggaaagacccaggagaagccgcccaaagaactgggacccaaccagagcctggcctgggagccaggatggccatccacaaagccttggtgatgtgcctg

SEQ ID NO: 319074 - DNA, 75 bp, Homo sapiens
cccaaccggcggccttgagcgctgagcaagcaaaggggtaatcactttgatcagtatgaggaaggacacttggaa

SEQ ID NO: 319075 - DNA, 100 bp, Homo sapiens
tatcattcggaccctccggaaggacattgccaactacaacaaggaggatgacattggtatccattactgtcagctgagatagaagaaatagaagatgcac

SEQ ID NO: 319076 - DNA, 98 bp, Homo sapiens
tggtgcattgcagttgcgtgttgttcagaaagctgaccacagtggccgagaagtcgcgcgtgctgcagctggaggaggagctcaccctgcgccgaggt

SEQ ID NO: 319077 - DNA, 75 bp, Homo sapiens
accctctggattatcacatgaaggccatggagaagtgtaaagatgcaggattggccaagtccatcggggtgtcca

SEQ ID NO: 319078 - DNA, 100 bp, Homo sapiens
attttgtgaatatggtggaaaaaggaatcattgacccaacaaaggctatgtccaaactgggtcttcggcaggttacaggagttactagagtcactatccg

SEQ ID NO: 319079 - DNA, 75 bp, Homo sapiens
agcttctctagctggccttgctgttgaattggaggcatatgctggagttatcagtgcacttcgggcacaggggga

SEQ ID NO: 319080 - DNA, 75 bp, Homo sapiens
cctgatccatggacccgatgaacatagacacagttccatggaaaatgggagaccacctgatcctgcagactgggc

SEQ ID NO: 319081 - DNA, 134 bp, Homo sapiens
cgtggcaacgttgctggtgacagcaaaaatgacccaccaatggaagcagctggcttcactgctcagtgctccaggaaagtacctgattgacaagatctacatccaatgcccagaaaacacatcctacacaggca

SEQ ID NO: 319082 - DNA, 90 bp, Homo sapiens
gtcaggtggttgcggagctggtaagccctgggcgctgcctatggcacagccaagagcggtaccggcattgcggccatgtctgtcatgcgg

SEQ ID NO: 319083 - DNA, 100 bp, Homo sapiens
atctcctgtttgttatgtttgccgtggtttttatcaccacacgactgggtatatttcctctctgattatggtgacaagctgaacatggagctgagtgaga

SEQ ID NO: 319084 - DNA, 71 bp, Homo sapiens
caagatggcggacagtgcggaactaaagtagtttatgccaacgtgacttcattcatacagatgaaccaagg

SEQ ID NO: 319085 - DNA, 100 bp, Homo sapiens
acgacggcaggaattattggaggccaggtttactggagtaggtgttagtaagggacagaatgatgctgctgaaattggaacaagaaattttagatttcat

SEQ ID NO: 319086 - DNA, 82 bp, Homo sapiens
aaatctggagtgaagaacgccgccatccagccaccattccaaggcacttcaggtggcaagacagctccttcttcagcagcaa

SEQ ID NO: 319087 - DNA, 100 bp, Homo sapiens
ctgaccacgaggcaagctcgcagcttctgagcaacatcctggaggtgctggacaggaaggatgtggttttaaaaagttgcagaaagaagaaaggaaaggg

SEQ ID NO: 319088 - DNA, 100 bp, Homo sapiens
agagcctgaggatgtcgccgtcccgggcggcgtggacctcctcaccctgccgcagctgtgcttcccagagcaggcagatggcttgtgcagaagattggag

SEQ ID NO: 319089 - DNA, 101 bp, Homo sapiens
ggccaacgtgggctcgctcttcgacgacgcctccggtgtggctgtctctgatggtgtcatcaaggtgttcaacgacatgaaggtgcgtaagtcttcaacgc

SEQ ID NO: 319090 - DNA, 100 bp, Homo sapiens
gcccaagagctccatctttgatgctgatgaagaaaagtccaaggaatcagagatcattgatttcttcctgggggcctctctcaaggatgaggttttgaag

SEQ ID NO: 319091 - DNA, 83 bp, Homo sapiens
agaaaagattgtgacagatcactggacccagcacctagtgcctccggagccagcgtggtggccatagacaacaagatcgaaca

SEQ ID NO: 319092 - DNA, 83 bp, Homo sapiens
ttcctggcctgggcgctccggtggcggcggagatgctgtgggccctgagggaaaggatcacagaggcgctgagccgggatggc

SEQ ID NO: 319093 - DNA, 100 bp, Homo sapiens
atcataatccctcgaaacacaacctttaatgttgagtctaccaaaaagaatgaaccgcttgcttcttatttaggatttgttaaggattccaagtaactct

SEQ ID NO: 319094 - DNA, 85 bp, Homo sapiens
atcttctgggagctgaggaaccagatatcttgaaaagctgccagaaaggcatttatgtttgaatcatctttaagtctggcggtca

SEQ ID NO: 319095 - DNA, 100 bp, Homo sapiens
ggcgggtcgccggagctctgatcgccgggaacccttgccgctgctgtcctgcgaccccaagcagggcagcacgctgaggaaacgcaagatgtacgaggag

SEQ ID NO: 319096 - DNA, 90 bp, Homo sapiens
cctcggagcttatactcctcccagtgacgggtctggagtgcgtgggggaccggctgttggcgggtgctggagaatctggtaaaagcacca

SEQ ID NO: 319097 - DNA, 82 bp, Homo sapiens
gagttcaacatcctcctggccaccgactcctacaagggttgtgagtcccggcccagcccctccacccccctgcccccccgat

SEQ ID NO: 319098 - DNA, 98 bp, Homo sapiens
gtcctgagcttcaatatgtaggcttcatgggttgttcagtcacttctaaaggagtcattcacctaaccaaggtaaaacatggctaaaagcttacggag

SEQ ID NO: 319099 - DNA, 51 bp, Homo sapiens
agaagaaacaaaagtgccaccgaagagatcgtctggggaatatttttcatc

SEQ ID NO: 319100 - DNA, 114 bp, Homo sapiens
agagtaagccgggctgccgtcttctcgccatgggctccggtactccaaagattcaggtttactcacgtcatccagcagagaatggaaagtcaaatttcctgaattgctatgtgt

SEQ ID NO: 319101 - DNA, 75 bp, Homo sapiens
caggagctgggcctaggtctgcgccctggtttgtggtaaatatgccagctctagaacacatgaatcagattttac

SEQ ID NO: 319102 - DNA, 106 bp, Homo sapiens
agcaccgcagccttgggcctcgcgccggctatggccgtgccctggggctgagccctcaggcttgggcactgtttaaaggaaagttccgagaaggcatcgacaagcc

SEQ ID NO: 319103 - DNA, 90 bp, Homo sapiens
tttcattcaaactctagatcctaaactgatacttcaggtgcaagtggcatgaagaaaatgatattctcttctgtgctttagctgtttgca

SEQ ID NO: 319104 - DNA, 50 bp, Homo sapiens
ctacctggcattgccttttgttgaggtagctacagcaagctgggtagcag

SEQ ID NO: 319105 - DNA, 50 bp, Homo sapiens
ccagtgcgcccgcatcgtcgagcaaactgactcgggaaagtggtaccgac

SEQ ID NO: 319106 - DNA, 99 bp, Homo sapiens
gttcagaaagaaggacagggatcacaaacactcagagtggaaaaagtaccatcatttgaaacaggtgagcctgaatttaaatacattgggaatatgcat

SEQ ID NO: 319107 - DNA, 82 bp, Homo sapiens
gcagcgtgcgttcagccctgggaatctccggcctgtgaaactgtgaggggattcggccaagacgtcctcttccctctgcctc

SEQ ID NO: 319108 - DNA, 74 bp, Homo sapiens
cacgtgaggatcccgtgcacgagtgtggcacccagcctggtccgggcagcctgcttctgcaaagtggtacgatc

SEQ ID NO: 319109 - DNA, 101 bp, Homo sapiens
aaatagaaggctttccttctccacccgacttcatactgatggccgactgcatatactatgaagaggtggaaccgtcccaaaatgtcccttgctcagaagaa

SEQ ID NO: 319110 - DNA, 124 bp, Homo sapiens
gtcaatttgtcttgatgggctacagttagagtctgaagttgttaccaatggtgaaactacatgttcagaaagtgctggagaatctggtaaaagcaccattgtgaagcagatgaggatcctgcat

SEQ ID NO: 319111 - DNA, 83 bp, Homo sapiens
cgccaaagaccccgtccggtaggtgccctacgagacgctgaacaaacgctttcgcgccgctcagaagaacattgaccgggaga

SEQ ID NO: 319112 - DNA, 100 bp, Homo sapiens
ctccctcagcttccgccccaaaaggttgacattgattgcagtcagaaggttgtagtttacgatcaaagctcccaagatgttgcctctctctcttcagact

SEQ ID NO: 319113 - DNA, 100 bp, Homo sapiens
gctttaaagataaaactgctggacttacaactggcgatggcgtgaacgatgctcctgctctgaagaaagccgagattggcattgctatgggctctggcac

SEQ ID NO: 319114 - DNA, 95 bp, Homo sapiens
gcaagagcgagccgcctgccccggtgcgcagacagagctattccagcaccagcagagagtaaccagagagcacagagaaatgctggtgaaactgg

SEQ ID NO: 319115 - DNA, 90 bp, Homo sapiens
caggtctacacacagaatgctgaaatgaggcctcttggttgttgtttcctatcctgggagcaggagagtgtgcctatttgaatgacaaag

SEQ ID NO: 319116 - DNA, 91 bp, Homo sapiens
gagggagactgcaaatgctattgtcagtcagcaaactccacaaagggtgataaaagaaaatgtggctgaagttacccgaagttcagcttgc

SEQ ID NO: 319117 - DNA, 75 bp, Homo sapiens
gcaggctgagcagctgcaaacccccgaaaaagggagaagatgaatcagttatcctcaaatcctgcacacggcgga

SEQ ID NO: 319118 - DNA, 100 bp, Homo sapiens
tggacagtccaggggacgaagacagaagaagtagagaggcagggccgtgggcatgaccattcggcccctggtagacctgttggctgtgaagaaaaagcaa

SEQ ID NO: 319119 - DNA, 98 bp, Homo sapiens
aaaaataagaagaagaaaggagacagagtcaacaattcaattggcttaattggaaatctctatctgaatgattcacccctgaaaaacttcagaatcta

SEQ ID NO: 319120 - DNA, 145 bp, Homo sapiens
gaacaaattgtcatccgtggttccaagtgtctataagaacctggttcctaagcctgtaccacctccttccaagtctggatgtggatagtgaagctaagaaactattgggtttaggacagaaacatctggtgatgggggatattcc

SEQ ID NO: 319121 - DNA, 82 bp, Homo sapiens
cggtggctgtcgccccccaccctgcagccaggactcgatggagggtaaaccagacttgaatacaacattgccaattagacaa

SEQ ID NO: 319122 - DNA, 98 bp, Homo sapiens
tgctgtaaggccgaggttgcggcggaagcggagaccatgttccgagcggcggctccggggcagctccggcgggcgtgacttttttgaacgaaccattc

SEQ ID NO: 319123 - DNA, 96 bp, Homo sapiens
gcagcgctgggtgcggcggctggaggcggagctgcaacgctacagagatgaccaagcgagacgtgcctggcttcgccatcgggggcctgagcgggg

SEQ ID NO: 319124 - DNA, 100 bp, Homo sapiens
cgaacgtgggcgtggggatggccaccagtttccggacagcttcgtgctggtctggatgtggatagtgaagctaagaaactattgggtttaggacagaaac

SEQ ID NO: 319125 - DNA, 100 bp, Homo sapiens
ccgcctcaaaggaagaagagtccaccttgcgaccgtatccgctagcgcggcctgggatgcgcttgggctccctggacccttcaaaaaatgatacatgcaa

SEQ ID NO: 319126 - DNA, 100 bp, Homo sapiens
tttgaatgcatcagaaccatgcacggagaattctcaccaaatgttcccaaatccttatcctcagctgtgaaggtaaaaattggaacatcactggaatggg

SEQ ID NO: 319127 - DNA, 88 bp, Homo sapiens
cggggcgaccgcgagctcgggatacgctcttcgaagtccgcagtgacaatgtcagtgcctactgcctgcatattgctgaggatgatgg

SEQ ID NO: 319128 - DNA, 113 bp, Homo sapiens
cccatcctgccgtccttctccactttcgccagcccgtgccgcgagcgcggcctgcaggaggatgatcggctgaatgtaacagaggaactaacgtccaacgacaagacgaggat

SEQ ID NO: 319129 - DNA, 50 bp, Homo sapiens
ctctggagtagctgggactacagttctggatgagatcaatccccagtctg

SEQ ID NO: 319130 - DNA, 75 bp, Homo sapiens
aaccagtattcttttcacacagcgggagatacagatgacccaccaagaattactcagaaccctgtgatcaatggg

SEQ ID NO: 319131 - DNA, 99 bp, Homo sapiens
gaagcagcgtgtgcatctgttggaagaatgctggaacgagttataggaagatgtagtccaacccacatcagcaggaacttagtgatttggcccgtgacc

SEQ ID NO: 319132 - DNA, 100 bp, Homo sapiens
atgaaagagtagatgaaacttccgaacagaaacgcctacagttgcggccccctgtagtgcaatttgtgtcagtctagggagagtggatttggagcccaac

SEQ ID NO: 319133 - DNA, 75 bp, Homo sapiens
gctggcgcttcctgcgcatcgtctgcaagaccgcgaggcgagacctcttccctgggcgctgcctatggcacagcc

SEQ ID NO: 319134 - DNA, 75 bp, Homo sapiens
tcttattgattcacttaagaaaactcagcctgagaatgtgaaagagtttctagccaaagccaaagaagacttttt

SEQ ID NO: 319135 - DNA, 100 bp, Homo sapiens
cacagagagaaccaccagcattgccaccaccaccaccaccaccacagagtctgtggaagaggtggttcgagattcaagtcaatctgaaagtcccagccag

SEQ ID NO: 319136 - DNA, 75 bp, Homo sapiens
agcaatgcctccatgaacaatctcacccaattactctgctcagggccttcatcctagaataatcactgaaggatt

SEQ ID NO: 319137 - DNA, 75 bp, Homo sapiens
gggccagtcttaaatatctacccatggaataaagagctgtatttgatcagaaactcattttaaccagcagtgcca

SEQ ID NO: 319138 - DNA, 51 bp, Homo sapiens
agtttccattgacactgatatgggatttgtggaactgactatatttcccac

SEQ ID NO: 319139 - DNA, 100 bp, Homo sapiens
gtgcaacaagtgtctttggttataaattatgatctacctaccaatcgtgaaaactatattcacagtgcagtcattggagaaatcgatgaagaaacagatt

SEQ ID NO: 319140 - DNA, 82 bp, Homo sapiens
cgccgagggtggggtcgacgacgaagacagcggagaggagagcggtgcggaggactgagtgtggacgaatgtggaacctcgc

SEQ ID NO: 319141 - DNA, 75 bp, Homo sapiens
cttgataactctgtattcagtgaacacaggaccaagatcttcatccgcttccccaagaccctgtttgccacagag

SEQ ID NO: 319142 - DNA, 83 bp, Homo sapiens
cttggaccgagccgatcgccgcggggcagttcgggccggctgtcctggcgcggaactgtggctgcaccatctgtcttcatctt

SEQ ID NO: 319143 - DNA, 98 bp, Homo sapiens
catgacgtccatccatttcgtggttcacccgctgccgggcaccgaggaccagctcaatgacagggaggagatatcaccaaacatgatggaacaggcgg

SEQ ID NO: 319144 - DNA, 98 bp, Homo sapiens
cgccgcagtgttcgtgggatggggcagcgggctgcagctggcggccggaatccgcgcgcagcccgggttgaaatcacaaagattagacacctttttag

SEQ ID NO: 319145 - DNA, 99 bp, Homo sapiens
tctacctgcacaacgaactgggcaacatctacacgcacggttcgttccaccagtcataaaccagatgaaatctatggcatgattgaaagactatctcct

SEQ ID NO: 319146 - DNA, 80 bp, Homo sapiens
ccttccttactgctgtatctgctgcttgaactggcagaagttcagttctgcaagcaagtatgctgctctctctgttgatg

SEQ ID NO: 319147 - DNA, 75 bp, Homo sapiens
tttgagccatcggatctaagatccaaaagtgccggtggtggtgtgcacattgagccccggtatagacagttcccc

SEQ ID NO: 319148 - DNA, 82 bp, Homo sapiens
cgcaactctcagttcgagagtaaaggtgtggacactgccagcggctgcagccgacttggaatgacctgggagacaaatacaa

SEQ ID NO: 319149 - DNA, 100 bp, Homo sapiens
acatggaggtggagtgcaactaccactgctaccacgagaaggacccggacgggagctcactcagtgggtttgatgtggtggatgctggctcgggaagttc

SEQ ID NO: 319150 - DNA, 100 bp, Homo sapiens
cgacaagaagctcatgagcagcctgcccaacttctgcgggatcttcaaccacctcgagcggctgctggacgaagggagttctgggaaatcgttcattcat

SEQ ID NO: 319151 - DNA, 100 bp, Homo sapiens
tcacgtcctgccctataaccgattaattaattgatccccagctagactaggagagatgaatggagagtatagaggcagaggatttggacgaggaagattt

SEQ ID NO: 319152 - DNA, 83 bp, Homo sapiens
gcaagcgcggggaaccaaggagacgctcctggcactgcagtttgttgcatattctaaggacccagacataggcttggtggccc

SEQ ID NO: 319153 - DNA, 83 bp, Homo sapiens
agcccccggcccgcgctgcccgcactcctggtcctgctcggggctctgttcccaggaagagacctgggaaattaagtttcttg

SEQ ID NO: 319154 - DNA, 74 bp, Homo sapiens
cgactgtggagaagtgtccggggtagccccgttacagttatgcatactgaagagaagctatgaaaagcttcaga

SEQ ID NO: 319155 - DNA, 50 bp, Homo sapiens
tattctctcggcctgtcagcaaaggcacctggacgatgacggattaccgc

SEQ ID NO: 319156 - DNA, 96 bp, Homo sapiens
ggagggaccctggcccggaggaagaaagccaaggaggggaggacccatccagaaccgcaagtctaagcgctgtctggagctgcaggagaatagcga

SEQ ID NO: 319157 - DNA, 100 bp, Homo sapiens
cttctctcatcacgtggcagcatctttttaaaggtgtgatgatctgaagaatcatgaaactctgcggggtttcctaggaagattgttgatcgaatcgaca

SEQ ID NO: 319158 - DNA, 112 bp, Homo sapiens
cgcgcgcagggcctgcagcgggagctggacggcgagcgcgagcggcgcgagaaactggagcagttcaacatgatggagaacgccatcagctccagcagcctgtacagcccgg

SEQ ID NO: 319159 - DNA, 75 bp, Homo sapiens
tggcaatggcacaaagttctctcgatcagggcatacatctttcttcgacaaaggccaacacatatctctttatgg

SEQ ID NO: 319160 - DNA, 98 bp, Homo sapiens
agaacatgtttacctttgagattgaaaaggacacttttgccctcaaacccatgaattgtccagggcactgcaatactggagtaaccgcttcctaaacc

SEQ ID NO: 319161 - DNA, 75 bp, Homo sapiens
ccgggcccggcgaggcagaccactgccgccgcatactggtgcgagggtctgggggtggtggcatctcccctaaag

SEQ ID NO: 319162 - DNA, 100 bp, Homo sapiens
ctccgagccttcagcagaggcggcagcctggagagtcgaagcagcagctctcgctccagaagcttcactttgagaccaagaagcgggacgttcaccatgg

SEQ ID NO: 319163 - DNA, 50 bp, Homo sapiens
attttggaaagcagtttttaagacaacttattgacatgtgtgtgcagaac

SEQ ID NO: 319164 - DNA, 83 bp, Homo sapiens
ctgtgagcaagaggaagctgcagcccacccgggcagccctcaccctgatcaatgtccgagttaccaccatggatgcagagctg

SEQ ID NO: 319165 - DNA, 100 bp, Homo sapiens
cctccatgcgcagtcatgagtcgcttcaagtttatcggaagaaggtagataatgactataatgcccttcgagaaagactcagcaccttgcctgataaatt

SEQ ID NO: 319166 - DNA, 101 bp, Homo sapiens
ggcctagtggagtgaggggtaacaagatggcgaccgagacggtggagctccataagctaaaggtgccacatctgccccattcctcatcttcatcttccctg

SEQ ID NO: 319167 - DNA, 98 bp, Homo sapiens
atcgcatcccagcctactttgtcactgtcagtgacccagcggtgccccctggggaggacttcctgctgctgcggtacaaggtggtgatcatcgacgag

SEQ ID NO: 319168 - DNA, 75 bp, Homo sapiens
ctggcgggatgggcgtttgcctaacgtatttaatggaggaactaagcgtcttgtagaaggaactattaatccagg

SEQ ID NO: 319169 - DNA, 75 bp, Homo sapiens
acgctttacccgactctttgggccgttatctcacgaagctcttcgtgggcggtcttgactggagcacgacccaag

SEQ ID NO: 319170 - DNA, 75 bp, Homo sapiens
ggctccgggagtctggttcttccgggccttctccagggacagctggtggcaaagaaacacagcatgatgtttgga

SEQ ID NO: 319171 - DNA, 75 bp, Homo sapiens
tttgatttgggactttggttacctggaccacatggtgacaatgcatgatgtgcttgatgctcagtggctgtatga

SEQ ID NO: 319172 - DNA, 75 bp, Homo sapiens
aggaaacctactgttgcactgtctgctgttggtctggagcccggcactgtggtcataacagagcaggcagtggat

SEQ ID NO: 319173 - DNA, 46 bp, Homo sapiens
tggaggccagtggctggtctcagggcttttgttgtaacaccctgac

SEQ ID NO: 319174 - DNA, 100 bp, Homo sapiens
actgctgaaccgactctgagaaatttgagagaagaagaaggaggttcctgctgtgccagaaacccttaagaaaaagcgaaggaatttcgcagagctgaag

SEQ ID NO: 319175 - DNA, 98 bp, Homo sapiens
cgactccgccgcgctgcgcacgcccaggttacacgacagatccatgagcatgagcaggagaacgagttgcgggaacagatgtcaggttataagcggat

SEQ ID NO: 319176 - DNA, 100 bp, Homo sapiens
gagctaaacatggaaatattcaagtgggatgtgtagactgttcaatgcaacaaggcaaggttgggtatctacagccattggttgctgttcaggtcagctt

SEQ ID NO: 319177 - DNA, 80 bp, Homo sapiens
tcagaagagccaaggaataaacatgcaatgaacccaaaaggccagaagatacctgaaattcctgcagatgttgtgggtgc

SEQ ID NO: 319178 - DNA, 75 bp, Homo sapiens
ctttcaatgacaaaaagtttgtcattaaacccatcgacaagaaggcacctattcagaatggacagtttagaagaa

SEQ ID NO: 319179 - DNA, 90 bp, Homo sapiens
ccccggcacagcatcgggctggcccagctgctgctcttcgcccagcagatctgcgagacagtggtgaccgaggattttagccacttgccc

SEQ ID NO: 319180 - DNA, 75 bp, Homo sapiens
agtctaaacctgtgaccacccctgaagaaattgcacagggtcgacctcttagtgtgcagcagcaaatgatgcaac

SEQ ID NO: 319181 - DNA, 82 bp, Homo sapiens
aggaatctcactctgttaaagctggtctgttctaactgaggttcaggaagatttgactgaagagaaaaaaagggaactggag

SEQ ID NO: 319182 - DNA, 82 bp, Homo sapiens
ccaggatttgggccgccaggcttgggctggggctgggatgtacagttacccagcacgtgtacctcctcctcctcctattgct

SEQ ID NO: 319183 - DNA, 51 bp, Homo sapiens
tttgtgcctcctggacacctcagatgctggctatgagtttgacatctgctt

SEQ ID NO: 319184 - DNA, 82 bp, Homo sapiens
ccgcgcgtgctgcgggtctgctcgggggtctacttcgagggagcatcagatccatgctgctgctgactcggagccccacagc

SEQ ID NO: 319185 - DNA, 87 bp, Homo sapiens
cggcgaccgctgccgaagcatgaagaaggggtaaggcgtgagcccccaagatttcacggattgacttctaaggactcttggtacatg

SEQ ID NO: 319186 - DNA, 100 bp, Homo sapiens
aaggaacgaggcaaggagctaaagcagcgtgcgttcagccctggggaagcaggtcctggggaccaaggtggacgcggagcgtgacggcgtgaaggtgccc

SEQ ID NO: 319187 - DNA, 97 bp, Homo sapiens
gaagaaagctggtaatagatgtctgacaaactaaagaaagacttgtgttacgcaaatacgccatgcgagacctagtccacaggcttccaggagggaa

SEQ ID NO: 319188 - DNA, 109 bp, Homo sapiens
tcacttcacaagttgtctaccgcctgtccaggaagggttgaatacaaagacttccccaaaaacaacaagaacgaatttgtatctcttatcaattgctcctctcagccac

SEQ ID NO: 319189 - DNA, 100 bp, Homo sapiens
cgggatcgtgaccgagaccgtgaccgagagcgtgaccgagagcgcgaatatcgtcatcgttagaagattgatgcctgaattaccacagtatgatcaggat

SEQ ID NO: 319190 - DNA, 76 bp, Homo sapiens
tgtggattcttcagaaagtgaacttggcattttagatctaattcaaggttgaccagaagactgggcacatcattaa

SEQ ID NO: 319191 - DNA, 100 bp, Homo sapiens
tgtcattgacatgtcctctttcacaaagtttgagataacagcatggcgatttgttgttcctgtttccctcgagccttgctgggccctcatctgaaatgga

SEQ ID NO: 319192 - DNA, 82 bp, Homo sapiens
cctagcgtcctggaattacttcaatcaaatacatgataatcagttgacatcccttccttctgctataagagagctagaaaat

SEQ ID NO: 319193 - DNA, 78 bp, Homo sapiens
gagcgtgaccgagagcgcgaatatcgtcatcgttagaaggtgatctgtgaaaatggttcgctattcacttgacccgga

SEQ ID NO: 319194 - DNA, 100 bp, Homo sapiens
catcattttgccattaattatatccagcatgattacaggtatgttgagtcgatgggatgatagccagagatttttgtctgaccatccataccttgtatgt

SEQ ID NO: 319195 - DNA, 80 bp, Homo sapiens
attcacgctctgtgcttgtgccaaggccatcatgaggaagccacgagcagccgtgggaagtggtcacaggaagcaggcag

SEQ ID NO: 319196 - DNA, 121 bp, Homo sapiens
ggaagtactactttttactgcatcctgcaacaaatatcactgaaatgattcatttctggaagcattctacttccctggctctacctcttctgccacaaacgtcagcatggtggtatctgcc

SEQ ID NO: 319197 - DNA, 80 bp, Homo sapiens
cttaatacagcaagaaagaccatcaagtttaccaatgttctcagtgcagctgagtcttggtgagcagacatgggaatccg

SEQ ID NO: 319198 - DNA, 100 bp, Homo sapiens
cacaattggaatccaccctgtctgtgcagaggatcttaagattgaaagtgatgttcaagaaccaactgaaccagaggatgaccttgacattatgcttggc

SEQ ID NO: 319199 - DNA, 75 bp, Homo sapiens
cccaactcccagcggagagcaagatcaatgtccgagttaccaccatggatgcagagctggagtttgcaatccagc

SEQ ID NO: 319200 - DNA, 75 bp, Homo sapiens
aagcccttcgcctgcacctggccaggctgcggctggaggaagctcttcgtgggcggtcttgactggagcacgacc

SEQ ID NO: 319201 - DNA, 97 bp, Homo sapiens
gcgggaacagatgagtgaagcagaggtgggggtgtttgtccagcgactccggggcctgatgaatgacatcgaactacctgaagaagcaggtcacacc

SEQ ID NO: 319202 - DNA, 100 bp, Homo sapiens
ttacctgtttggattaatatgtctctgttcagctgctgcattttttatcacctatgaatatgtgaagtggtttttgcatgctgattcatcttcatatttg

SEQ ID NO: 319203 - DNA, 98 bp, Homo sapiens
ctgttgttaaacggggcagaaagaaactcctgtatatattcaaacaacttcccagtgacctgacagcagaggagcgtcaagaactggagaacatccga

SEQ ID NO: 319204 - DNA, 75 bp, Homo sapiens
agctcacccactgccagcagaggatgtgttcgaaatgcgctttgccaagatgccggacgagcctgaggagccagt

SEQ ID NO: 319205 - DNA, 101 bp, Homo sapiens
cgccgaagaagcatcgttaaagtctctcttcaccctgccgtcatgtctaagtcagagtgctgtccccggcataggtccatctctgcagaagccatttcagg

SEQ ID NO: 319206 - DNA, 97 bp, Homo sapiens
cgcaggagaagaacaccctgccgaccaaagagaccattgaggatgagtacagcggacccaagcttgaagacggcaaagtgacaatcagtttcatgaa

SEQ ID NO: 319207 - DNA, 80 bp, Homo sapiens
tgctgcctccaccagacaccaaaccaggtgagaagccctaccactgcaactgggacggctgcggctggaagtttgcgcgc

SEQ ID NO: 319208 - DNA, 100 bp, Homo sapiens
gaagattcctgtgacagcgatgccatagagagaatgtactgtgccccaggtgtgataaagcggaattgggaatatatatgtagccatgataaagaaaaaa

SEQ ID NO: 319209 - DNA, 80 bp, Homo sapiens
aaaaatgaccctgaactggaccagcaggtttggtgcacctcgatttggaggaagtagggcagggcccttatctggaaaga

SEQ ID NO: 319210 - DNA, 82 bp, Homo sapiens
attcccagaaagaggggcaagaaccccatgaaagctgtgggactggcctggtaatagcctgcagctggtgttttgagaagcc

SEQ ID NO: 319211 - DNA, 50 bp, Homo sapiens
ggctcttcgtgcccaaccacagatgatatcatcaagttgaatcgaaagga

SEQ ID NO: 319212 - DNA, 83 bp, Homo sapiens
cgaagagctgccgtcgctgcagagaccccgctatggctgtcaatgagctgaaggagaaaggcaacaaggccctgagcgtgggt

SEQ ID NO: 319213 - DNA, 100 bp, Homo sapiens
tcccaatcacaggtacacatttacactgaagacacatccatcggtggttccagggagcattgcattcagtttacctcagcggaaatccgaacgccagcag

SEQ ID NO: 319214 - DNA, 83 bp, Homo sapiens
tccaaccaaaaccgtgaatggtgtctggaggagtgagagccggcagctgcatcttcctcccgtgaggctggccgagctccacg

SEQ ID NO: 319215 - DNA, 90 bp, Homo sapiens
cgcgagcgaacgaccaagagggtgttcgactgctagagccgagcgaagcgttaacatgtttgttgaaggattccacgatgccatcctcct

SEQ ID NO: 319216 - DNA, 83 bp, Homo sapiens
tgcaggcaagatggcggaagggctctgacgcccgctctgcggcttcggtgtttgaacaggccacagtccaggagcgcttacat

SEQ ID NO: 319217 - DNA, 74 bp, Homo sapiens
gggactgggtgtgctgctctacgagatgctggttggcgaggagagagccttgaactctgccagcacctcgcttc

SEQ ID NO: 319218 - DNA, 76 bp, Homo sapiens
ggagaaggatcgtctggtacagcagcttaagcagcaggtgaacaaatagaagctgagggtgaaggacctacagctg

SEQ ID NO: 319219 - DNA, 100 bp, Homo sapiens
gctcactgaggaggtgagcgagaagaagtcatatgccctagatggaaaagaccgggaaggtttctttaccaacggtttgactcttggcgcgaagaaatgc

SEQ ID NO: 319220 - DNA, 75 bp, Homo sapiens
gtcacaaagattaatctgctgaacaaggaaacacttcaagttgaagaagatgatcgacctgagttaccatggtgg

SEQ ID NO: 319221 - DNA, 75 bp, Homo sapiens
acgctttctgctcaagtcctgtcctcttctgaccaaagagtagttcctgaaatgactgagatattgaagaaaaaa

SEQ ID NO: 319222 - DNA, 83 bp, Homo sapiens
caggggcgagggctacccgctctttgccgtgacaacaccgttcccccagccgggctgatgagctttgatccaaaccttctcca

SEQ ID NO: 319223 - DNA, 98 bp, Homo sapiens
ggtttttgcacaccttattaaggcattgacaaaggatccccaggattaccctgataaaaaaagcctacctcatgtacatgttgccctctggataaatt

SEQ ID NO: 319224 - DNA, 74 bp, Homo sapiens
aagtgcgagttcttagaaatgatcgacgagaaggcagccgggattgcttaccacctgcagcgtgctttcggagg

SEQ ID NO: 319225 - DNA, 82 bp, Homo sapiens
ccaaggcccaaactgcactgcacatgatttttagactctgaggagcagttggagctaatccacattatggaaatggaaacca

SEQ ID NO: 319226 - DNA, 75 bp, Homo sapiens
accgaccaggacctggtgaagctctgtcaaccgctgctggaaagtacagacaacaaggcagaaattatattgttg

SEQ ID NO: 319227 - DNA, 96 bp, Homo sapiens
ccccccaggaagtgccaggaccttccagaccagctgcatcttcctcccgtgaggctggccgagctccacgctgatctgaagatacaggagagggac

SEQ ID NO: 319228 - DNA, 100 bp, Homo sapiens
aaaggaagatgcattttctaagctgaaggagaagtttatgaatgagttgcataaaattccattgctaatgtgtccggaattggtgggttcttcgtctcac

SEQ ID NO: 319229 - DNA, 100 bp, Homo sapiens
aagcatgatctttcgaagggaaccattcttccatggacaggacaactatgaccaggctcagtttatgaacctcttaaaagcattaatcttccaagacctg

SEQ ID NO: 319230 - DNA, 83 bp, Homo sapiens
ctgctctgtgtgccatggacggcaaatggagctgctcctggtgaacaagctcaagtggaacctggccgcaatgaccccgcacg

SEQ ID NO: 319231 - DNA, 93 bp, Homo sapiens
acctgtggagacacggccagatctgccctccagtgtgatgaatgcagactctgctaccattttggctgtttggatcctcctttgaaaaagtct

SEQ ID NO: 319232 - DNA, 75 bp, Homo sapiens
caagaggcgtttctataagaattgggcaaacttgaagataaatcttttgactccagctctttagaggatctaaag

SEQ ID NO: 319233 - DNA, 80 bp, Homo sapiens
ccacctgcctggcctggtgccatgacaacaagtcccggctccggaagatgaaggtgagaagccctaccactgcaactggg

SEQ ID NO: 319234 - DNA, 101 bp, Homo sapiens
gggagaggcgagctcgcgatgagtggtctcggcaggctcttcgggaaggaacaccaatcagggtcttcaggcctggaagattgaagacattccagccaaca

SEQ ID NO: 319235 - DNA, 90 bp, Homo sapiens
cctgattctacccaagtacatatgatttcagctgcaatggcagtacgtagagaaatcgacactcttaatgaacgtttagctgctgaagga

SEQ ID NO: 319236 - DNA, 100 bp, Homo sapiens
aacatgtctgtacctactgatggtgctgtaaccacctcacagattccagcttcggaacaagagaccctggtactaggttttgacaagcttgcatcatgcg

SEQ ID NO: 319237 - DNA, 75 bp, Homo sapiens
tattcgaattgagtcaagcccatttcctcttgtggactcagatgatctccccttgaatgtttcccgcgagactct

SEQ ID NO: 319238 - DNA, 83 bp, Homo sapiens
gaatatgccaaggaaaaactggagagcttcatcaaaaatagtgatagctttgataagggaatgactctgactttgagacggtg

SEQ ID NO: 319239 - DNA, 51 bp, Homo sapiens
cctctgcacatccattcttcgactgtagagacggggtttcaccatgttagc

SEQ ID NO: 319240 - DNA, 87 bp, Homo sapiens
cggccaagtcgacagcttgccccaaacaaacctaggttcttgcacgcattgcaaatgccacgaggccaactattcatctgtgtgaga

SEQ ID NO: 319241 - DNA, 73 bp, Homo sapiens
tcactggtaatgtgtccattcgagggcggatcctctctggtgtggtgactctgctgtctgactacgaggtgtg

SEQ ID NO: 319242 - DNA, 101 bp, Homo sapiens
ctgctggacgccaaccagctccgcgagctgcccgagcattgatatgaaccatggacaagtatattctgctgccacaaagactgtaaagtgcttcatttcaa

SEQ ID NO: 319243 - DNA, 82 bp, Homo sapiens
aatttcgtagtctacactttctgaattttccaggatttacttcagatgcaatatgaaggagtagctgtaatgaaaatgtttg

SEQ ID NO: 319244 - DNA, 80 bp, Homo sapiens
cgttcttgcctcaggccagtcgcctccaggccaagagggatccttcacccgtgtctgtaaggaagagcccaacactgctg

SEQ ID NO: 319245 - DNA, 75 bp, Homo sapiens
gtccaggcctgacagctctgcggctcgggccctgaggtcttaaaattttggtagcagaaagcaaatgtgcaaaga

SEQ ID NO: 319246 - DNA, 75 bp, Homo sapiens
ctgaaatctggagtgaagaacgccgccatccagccaccattccaagaaagtgactgagaccgaagatgatagtga

SEQ ID NO: 319247 - DNA, 76 bp, Homo sapiens
cgacccggtaccaagaaggggagtgcccgcggcagattgcaaatagaagagtcttccaaaccagtgaggctatcac

SEQ ID NO: 319248 - DNA, 75 bp, Homo sapiens
catagacatttacgcggatgtcggcgaagagttcaaccagtgatgtcttggcattgcccattttcaagcaggaag

SEQ ID NO: 319249 - DNA, 50 bp, Homo sapiens
gtgccacggtgtccggatatggttgtagatgagcatgagagtgtggagca

SEQ ID NO: 319250 - DNA, 75 bp, Homo sapiens
aagaggaagatgctgatgatggctgtcggaaaaggtaacagaagatggaactcgaaatcccaatgaaaaacctac

SEQ ID NO: 319251 - DNA, 100 bp, Homo sapiens
cttgcggccctagtggaccactgccaaggcttcctgtttgggctgaaaggagcaaaaggaagagcaggcttccctgggcttcccggctcccctggagccc

SEQ ID NO: 319252 - DNA, 75 bp, Homo sapiens
agtaccctattcacgctctgtgcttgtgccaagaccgtagctttatgggatctgcgtaacttaaaattaaaactc

SEQ ID NO: 319253 - DNA, 98 bp, Homo sapiens
agagggaagcaaattgttggatgattgcgagctgttaatgctcagtggggccccaggggaggtgggctctgtgctcttctccctgttctggtccgtcc

SEQ ID NO: 319254 - DNA, 74 bp, Homo sapiens
catgatgatttccattgtggggcatttttagatgaattcactaactggtcaagaataaatcccaacaaggccag

SEQ ID NO: 319255 - DNA, 127 bp, Homo sapiens
ggaagatcgcttaccctccgggggtaaaagagatcaccgacaagatcaccacggacgagatgatcaaacgcctgaagaaaatgtgccagaggaacttcaagaaccattttacacagatcagtatgac

SEQ ID NO: 319256 - DNA, 82 bp, Homo sapiens
gctcttttcatcttcacggccacccacagaaatgaagcagagtggcctagtaatctcaggggcgatataatcaatgaggtgg

SEQ ID NO: 319257 - DNA, 100 bp, Homo sapiens
ctggatgttatcagatcacagaccatggtctcagtgtggtggaaaaggaagagagagctgaggcagacgatgtaagatctgctgttacttcttgctgtgt

SEQ ID NO: 319258 - DNA, 75 bp, Homo sapiens
ggccagcggggccggaagcggcggcgcagcctaaaatgaccaatgtgtgatttcagtggaataaatggcgtccaa

SEQ ID NO: 319259 - DNA, 90 bp, Homo sapiens
aaacagggagatcacattttaaatcagtcttaagagagggtgaaatcaaaattgctgtttctattgaagatgaagccaacaaggacctgc

SEQ ID NO: 319260 - DNA, 74 bp, Homo sapiens
cttccctgtactctcatcgctctcggcctccgacacggtgttctgggaagatggcatcatgtctggctaccgcc

SEQ ID NO: 319261 - DNA, 98 bp, Homo sapiens
gcagagatgatggagctcaatgaccgctttgccagctacatcgagaaggttcgcttcctggaacagcaaaacaaggctggcatgactcacatcgtgcg

SEQ ID NO: 319262 - DNA, 75 bp, Homo sapiens
ggagccatgcattttatgacagtcaaacatgggaaaacattcttaagacagaactgtaccgctctctttttggcc

SEQ ID NO: 319263 - DNA, 100 bp, Homo sapiens
ttgtgttaaagcatgtgacacacctaatttcagaaaccagaggggaaatcgccgctcattaaagttcaaggacatggatttgattgacatactttggagg

SEQ ID NO: 319264 - DNA, 82 bp, Homo sapiens
tgcggagctgagaggcctatggatgaggaggacgcggcggccccgctctagaggacaaaatcccagtccttggcacaaactc

SEQ ID NO: 319265 - DNA, 75 bp, Homo sapiens
actcttagatcaaaatggatttacagcagatgatatcaacaaggcaggcattcaacaacatgttttgctgtacct

SEQ ID NO: 319266 - DNA, 75 bp, Homo sapiens
cgtctcttacgtctgcggaagtgcagctgcctcagttcttagcgcagcggacaaggcaaaatctcagcaagttcg

SEQ ID NO: 319267 - DNA, 51 bp, Homo sapiens
ctcaaagtgtgccttctcgggagaggtggagaagagcgagtacttgagaaa

SEQ ID NO: 319268 - DNA, 76 bp, Homo sapiens
cccgacagccttgctgactatttcaagaagacaagcagaatgatgtggagatcccatctcctacccagaaagacag

SEQ ID NO: 319269 - DNA, 74 bp, Homo sapiens
tcgccggccgagggtggccctaggggcagcgagcaagacagcaagcaggtacatgtcccagagcaagcacacgg

SEQ ID NO: 319270 - DNA, 99 bp, Homo sapiens
ctcccggccgggtggtgggcgcatatcctgggtagcctctaggaagcgctagacacatctgtctgagtggtggctcaagaccgcctacctccagtaccg

SEQ ID NO: 319271 - DNA, 100 bp, Homo sapiens
ggaactgaagcccagctgtgaaggccgcagactgcagtgagaggaggcccgcaatggatgccctgcaactagcaaattcggcttttgccgttgatctgtt

SEQ ID NO: 319272 - DNA, 100 bp, Homo sapiens
cccgcgcgcggggaccccacgggctgaaccttagccggccgatcgaggagcagggccccctggacgtcatcatccacaagctgactgacgtcatccttga

SEQ ID NO: 319273 - DNA, 90 bp, Homo sapiens
caaacataggatgttttggcgagagatgtattcagtggaggaagctgatacagatccacgggttttagaaaaacaagaattacagcagcc

SEQ ID NO: 319274 - DNA, 90 bp, Homo sapiens
tgggaattccttatagagttattcacaatgcctccataatgaatgctgtaggctgctgtggtttacagcctcaaggaataggttctccta

SEQ ID NO: 319275 - DNA, 83 bp, Homo sapiens
ctcaatatctgtcttcggtggactccttcggcagtccacccaccgccgccgcctcccaggacttgatcatcttccctgacgac

SEQ ID NO: 319276 - DNA, 74 bp, Homo sapiens
ctaaaggtttctccacctggctgaaactcaataagaaggtgacataccagctgaagatcctgaccacagcgctg

SEQ ID NO: 319277 - DNA, 137 bp, Homo sapiens
tggtcccaagggaacatcagttctacgagaccctccctgctgagatgcgcaaattcactccccagtacaaagggactaggccctggccaggcccccgaggtggcccccacgcggacagcccctgaacgcttcgcccc

SEQ ID NO: 319278 - DNA, 73 bp, Homo sapiens
gacccatctttatgcaaagccagcgttacagtaatgttccaggtatggagagtcggcttgactacactgtgtg

SEQ ID NO: 319279 - DNA, 83 bp, Homo sapiens
caaaacattcatggagggggaagaactgtggctgcaccatctgtcttcatcttcccgccatctgatgagcagttgaaatctgg

SEQ ID NO: 319280 - DNA, 76 bp, Homo sapiens
caccttcctggacaccatcgccacccgttttgacggaacacaaaccgaagctgaaagactggcatcctcctggggg

SEQ ID NO: 319281 - DNA, 100 bp, Homo sapiens
ccacatacagaaagccaccgaccttattccggtgctaatctgtggaaattttaagggaatgaaaattaaacctggctcaatgggaaaaccttctcctgct

SEQ ID NO: 319282 - DNA, 88 bp, Homo sapiens
ttttcttcatccagtcctagcaagatatatgggagagccttagaaaaatgcagatcacatcctgagataacaacgaacttgatgcaag

SEQ ID NO: 319283 - DNA, 90 bp, Homo sapiens
cggagaggagatgcacacggcactcgagtgtgaggtttccaatacttatctacaggaatcgccatgaccccagctctgagggaggcaaca

SEQ ID NO: 319284 - DNA, 75 bp, Homo sapiens
ccgcggactccggagccgcacaaaccagggctcgccatgaagccaggatgagagccactcagagtgggtgtcttg

SEQ ID NO: 319285 - DNA, 100 bp, Homo sapiens
taaactattggattcataacctgctccatgcttgaaaacatggggattggaattcgagactaaggtgtcagtatgttcttcaagctgctctgctcctggg

SEQ ID NO: 319286 - DNA, 76 bp, Homo sapiens
taagcaccgttggtatcctcatggacgcttgcttggctcaggaacaacagaagagaataaagaaaatgacctcaga

SEQ ID NO: 319287 - DNA, 74 bp, Homo sapiens
ctccctcctcaccaaacccattccggatgtgcatttttttgctccactcaagcctgttagaatcaccatggaat

SEQ ID NO: 319288 - DNA, 76 bp, Homo sapiens
gtccacgtggccagagggcggccacccggagccagcggagggacagtatttgataggtacaagagttacagccctt

SEQ ID NO: 319289 - DNA, 83 bp, Homo sapiens
ggggattctcgacctgctaacagaactggaccttttcggtgaaggaaatacaggtgctgcagaatcttctttttctcaggagg

SEQ ID NO: 319290 - DNA, 100 bp, Homo sapiens
ctccggatctcttcgtctttgcagcgtagcccgagtcggtcagcgccggaggtgattcggtctgggcaaaaattaaggaaaaagtctgctgacacaggcg

SEQ ID NO: 319291 - DNA, 98 bp, Homo sapiens
atgggctggcatggtcatattacatcggatatctgcggctgatcctgccaggtcgccccacggctgaattctcggtgataaaggcgcccactggaccc

SEQ ID NO: 319292 - DNA, 73 bp, Homo sapiens
ggaggccgaggcgggcggatcacaagaaatgatcctagataattgatagatcctgtggttcaactggatttct

SEQ ID NO: 319293 - DNA, 83 bp, Homo sapiens
cagcggctctttgtatgatgacgcgagaaccactgtctctgatcaacgtgcggaagaggaacgtggaatctggggaagaagag

SEQ ID NO: 319294 - DNA, 100 bp, Homo sapiens
gtacccagtgggctccgagtgctgccccaagtgcagtccagccgcctggataaggggctggccgcactggtgcgggagcgtggcgcggatctggtggtca

SEQ ID NO: 319295 - DNA, 82 bp, Homo sapiens
ccctgggccgggccccaccggacggagcaggccgggctctcgccatgggtcactgtcgcctctgccacgggaagttttcctc

SEQ ID NO: 319296 - DNA, 83 bp, Homo sapiens
cgtgcaggcgtacgaggatgtgctggagcggtacaaagcagcagcagctccaggcgcagcacctctcccatgccacacacggc

SEQ ID NO: 319297 - DNA, 109 bp, Homo sapiens
ctttggcatgagccatgtggcccgaggagataaacagacagagagaggaacattgatgcgtgtgaaatgttggcaggtactgcttctccgagatggccccagtgtgtgc

SEQ ID NO: 319298 - DNA, 100 bp, Homo sapiens
aacttctgagaaacttggagagtggaatgagaaagtgacccagtcagacctgtggccctcatgacactgacgctcttcccggtccggctcctggttgccg

SEQ ID NO: 319299 - DNA, 50 bp, Homo sapiens
gggagccacagagaggcgcccgcacaggaccgtatccttgatgagcttga

SEQ ID NO: 319300 - DNA, 83 bp, Homo sapiens
ctcagcccccggatcagcctgcctctggcggagctggagtttgttcagatcatcatcatcgtggtggtgatgatggtgatggt

SEQ ID NO: 319301 - DNA, 100 bp, Homo sapiens
gccagtacttgggcttgccagtggcggattacttcaagcagtggattaatctgaaaaaggttaatggggttgacctgaggaactccagccacgaagaagc

SEQ ID NO: 319302 - DNA, 78 bp, Homo sapiens
aattttccccccaaactgcaataagccgccttccaagggaagatcagttttcctgccatccaggctgctccctccttc

SEQ ID NO: 319303 - DNA, 83 bp, Homo sapiens
ggaagacccagatctgtcatacgctagctgtcacctgccagagtcctgccaaatatcacaaaacctagatattatgaaggaga

SEQ ID NO: 319304 - DNA, 83 bp, Homo sapiens
gattccagcccggccggggcctgcgggcgcccagagccgcgccgtccgcgccgcccgttctgtgatgtcttggcattgcccat

SEQ ID NO: 319305 - DNA, 74 bp, Homo sapiens
ggaaagtagcctcttctgcaagtggggcattcacacagcctccagggtcgtatagacctccccctcctatgggc

SEQ ID NO: 319306 - DNA, 75 bp, Homo sapiens
aatgagacagggcacaccaaactccatctgtgcccatgacgcttccggagacaaccctggaaacactgaagcata

SEQ ID NO: 319307 - DNA, 101 bp, Homo sapiens
ccgtgagccggctgagcaggaagcggccgccgtcaggtcgccactgggacactgtgaaccaggagtgagtcggagctgccgcgctgcccaggccatggact

SEQ ID NO: 319308 - DNA, 100 bp, Homo sapiens
ccaagcatgtggctcctggtcagtgtaattctaatctcacggatatcctctgttgggggagaagatgattcattccggactcgtaatgccagtagcgttc

SEQ ID NO: 319309 - DNA, 100 bp, Homo sapiens
aggcacggtgggctttccttggttcaaaccacagattacatttacccgatcgtagacgacccttacatgatgatgggaaaactgacaaccatgcctgcag

SEQ ID NO: 319310 - DNA, 83 bp, Homo sapiens
ggtctggctccttcggggacatctatttggcgatcaacatcaccaacggcgagagaaaccctaaagcaggcagcagctcagaa

SEQ ID NO: 319311 - DNA, 100 bp, Homo sapiens
gtatttactcctatgttctgccatagtgatgagaacaaatcacctgctgcagtaacagaaccagagacaaataaatttgatagtaccggatatgataaag

SEQ ID NO: 319312 - DNA, 100 bp, Homo sapiens
atggcagtgggggcggcggcttctttgagtctttcaagtggtggggtcagatgctgtggactctgggacctgcagctctgcctttgctggctgggaggtg

SEQ ID NO: 319313 - DNA, 75 bp, Homo sapiens
ttcaactacgctgtgcacgagggtctcggcctcgcggtgcagctcttagcttctgccagctatgatgacacagtg

SEQ ID NO: 319314 - DNA, 75 bp, Homo sapiens
cctgcacttcagtggatatagcagtgtgccagatgggaagcaaggtgtccctgccttcactgtgctccaacctga

SEQ ID NO: 319315 - DNA, 53 bp, Homo sapiens
agtgcggcaaccagatcggcgccaagttctgggaggtgatcagtgatgaacat

SEQ ID NO: 319316 - DNA, 100 bp, Homo sapiens
ttacgccaatgtggacggactcactgccctgcaccagagaaccatggagtctggcagtaccgccgccagtgaggaggcacgcagccttcgagaatgtgag

SEQ ID NO: 319317 - DNA, 95 bp, Homo sapiens
tgcgaacatgtaacaagaatccaaagaaaacaaaatggtggtatcatgcctatgaaagagacaaccagcaccaagatgaagcagaaggagatcca

SEQ ID NO: 319318 - DNA, 100 bp, Homo sapiens
agcggctgcaggactgggcacagcatgagatccaaaggcagggcaaggaaactggccacaaattttaccaaatgttgcaagaactctggagttcttatgg

SEQ ID NO: 319319 - DNA, 97 bp, Homo sapiens
cacatacagtgccctttgtattaaggatgaaggtgtcatggagaaactccagctgggcccagagattctgcagcgggaaaatccaaggcttatttat

SEQ ID NO: 319320 - DNA, 100 bp, Homo sapiens
cctggttgaaacaaaattggcgattattcctggtggagatgcatatgaaacagccaagatgctgtgtgaacagtattacctggtagctccagagctggaa

SEQ ID NO: 319321 - DNA, 75 bp, Homo sapiens
ctgggttggaagtcagagctgcacaaagggaaaggctgcggttggatttctcacgatgtccagtgttatctccat

SEQ ID NO: 319322 - DNA, 82 bp, Homo sapiens
cgggaacagatgcagaactttgacaaatcctgacacagctctccctgaggagcagccacattccagctcccagtgcgcccct

SEQ ID NO: 319323 - DNA, 83 bp, Homo sapiens
gtccagagctgaggactgcctgtttgcagtaagactttgaccccgacgcaggcttcagtgattgccgcggatcagaagcctga

SEQ ID NO: 319324 - DNA, 100 bp, Homo sapiens
tctgttcttcgagaggacctgggtcaactggaatacaagtttcagcctaaatgcgatggccaggtattactgacacaagtgtggaagcgtttaaacctgg

SEQ ID NO: 319325 - DNA, 100 bp, Homo sapiens
ggagccatagtacctacagcagcactccagggtggttctcttcccaaagtggaagccaaattcatcaattatgtgaagaattgcttccggatgactgacc

SEQ ID NO: 319326 - DNA, 96 bp, Homo sapiens
cccggggcccaggcgccgcggcccggcaccccgtggaagagccgcgcgtacagcccgggcatccagggagatgctgatgaaaccaaagaatggatt

SEQ ID NO: 319327 - DNA, 97 bp, Homo sapiens
cacctccaaatcatgcaagacacagggtgcctgcaggccctgcagcgacgctgagctgctcctggccgcatgcaccagcgacttcggtgagtgtccc

SEQ ID NO: 319328 - DNA, 100 bp, Homo sapiens
aggaaacaaaaccaaaggccgaagtacaagatctaaggctcttgtctggaataattctgctacaaggctgatttcaaggacatgaattgttgacctcatc

SEQ ID NO: 319329 - DNA, 100 bp, Homo sapiens
tcggcgccgcttctgtggccacggcagcaccctggaggagaagaggttctgctggaacaagctggtgtagatgcaagtgaaagctttgaagatgtaggac

SEQ ID NO: 319330 - DNA, 73 bp, Homo sapiens
accattgaaaaatttgagaaggaggctgctgagatgtgggcaggacatcaaccctcaaagagtagcctgggtc

SEQ ID NO: 319331 - DNA, 75 bp, Homo sapiens
cgagcacgcgggtctgtcatcatgtcgcgttacgggcggtacggaggagctctattaccaggttttaaacttcgc

SEQ ID NO: 319332 - DNA, 83 bp, Homo sapiens
ctcggcgctgccgtctctggaggagtactggcaacagatgtccctggtagatttgggaaagaagcttttagaagcggcacgag

SEQ ID NO: 319333 - DNA, 82 bp, Homo sapiens
ccaagtacctgcagatcctgacctctctgatgagatggatcgagaacgtgactgtcattcctaaccaggtgtatcagcccct

SEQ ID NO: 319334 - DNA, 75 bp, Homo sapiens
tggaagcagccgatccagcctgcggagcctgtggggcaggtccctcgtctgagctggctcactcgcccaccaaca

SEQ ID NO: 319335 - DNA, 82 bp, Homo sapiens
aggagctggagacggtcgtagctgcggtcgcgccgagaaaggtcaagtctggcaccatctttgacaacttcctcatcaccaa

SEQ ID NO: 319336 - DNA, 82 bp, Homo sapiens
ctgaagatcctggtgtcgccatgggccgccgccccgcccgttgatcgacctgatgccccatgacctcatcactcagctcttg

SEQ ID NO: 319337 - DNA, 100 bp, Homo sapiens
actccccagctgcactgaccagtgtttccggcaaaaccacattcatgggacacttctccaggagaatgtactactcatcacctcccacctgtgaaagccc

SEQ ID NO: 319338 - DNA, 75 bp, Homo sapiens
tggtggagtttttgacacttttgttcaagtacacatttcatcagcctacaacacagcagtcccctcaggatgagc

SEQ ID NO: 319339 - DNA, 100 bp, Homo sapiens
tgatgtgactcgtcggcgaatgcaattaggaactgttctgccggaatttgaaaagtgccttactaaggctcgtacgtctgcatcgattatcttacgtggg

SEQ ID NO: 319340 - DNA, 100 bp, Homo sapiens
caccatcagtgaatttaagcccacatatcaggaccgagtggccccgccagctctccttggaggcattttttattttttgaacatttttagccatggcgag

SEQ ID NO: 319341 - DNA, 100 bp, Homo sapiens
aggccattaatatcaccaacaatgagagagtggttgtaaaaatcctgaaggtacggaatggccacatcaaaagaatcactgataatgacatccagtccct

SEQ ID NO: 319342 - DNA, 74 bp, Homo sapiens
aggcggcgggcggaggcggcggacggttgatgatgaagcgccggccgtgtaaatgaagatcgggtgaggagcag

SEQ ID NO: 319343 - DNA, 83 bp, Homo sapiens
cggccacttctcgttttcatctgggccaagatcctcgcagtggacagcatcagtcgcatcgaatacattcattcaaagaactt

SEQ ID NO: 319344 - DNA, 100 bp, Homo sapiens
cttggcccttgttcccccaaatgtctgactctgactctcggactgagaaacgcaagcacaggaagtcctggagaacctgaaggaccgctggtaccaggcg

SEQ ID NO: 319345 - DNA, 96 bp, Homo sapiens
gtcagaaagtcctgaattggctgttgtcctacaatcctttgtggcttcgaattggtctagagtgagaaagatcagtctaaagaaaaggagaagaaa

SEQ ID NO: 319346 - DNA, 75 bp, Homo sapiens
caagccggtgcagcagccttcagcttttggcagcatgaaagttagcaacttcaggcccgcatagctcataggata

SEQ ID NO: 319347 - DNA, 50 bp, Homo sapiens
cccgccaccatgagctacacaggctgactgtgctgtcctgattgttgctg

SEQ ID NO: 319348 - DNA, 90 bp, Homo sapiens
ggacctgagcctgacgcgggccgcgcggggtggtgagaagctgcaggatgcctactacatcttccaggagatggctgacaagtgctcgcc

SEQ ID NO: 319349 - DNA, 88 bp, Homo sapiens
cgcagcccgggccacctccaggagggaagaggcggggtttcaccatgttgcccagactggtcttgaactcctgagcttaagcaatcca

SEQ ID NO: 319350 - DNA, 83 bp, Homo sapiens
agacaagagcatcttggatgtaggacaatggaagagttaggtctataacttgacccaggagttcttccggcacgataaaccag

SEQ ID NO: 319351 - DNA, 118 bp, Homo sapiens
ggcggatggccccaggtgtaagcgcagaaagcaggcgaacccgcggcgcaataacggtggcagggcccagccccgaaccagacaagggacccctcaaggagcttcattctagcaggag

SEQ ID NO: 319352 - DNA, 90 bp, Homo sapiens
ctgcgatggacagaataactgtcaagacaacagtgatgaggaaagctgtgaaagttctcaaggaagaaggagagacgaccatcttgcaac

SEQ ID NO: 319353 - DNA, 100 bp, Homo sapiens
atgaaaatgaagacgacattcagtttgtcagtggtgataaaagaaaatgtggctgaagttacccgaagttcagcttgcagtgtaattcagaagagttaag

SEQ ID NO: 319354 - DNA, 100 bp, Homo sapiens
ttggtctcactgacttcaagaatgaagccacggacccttgcggctcggggccaggcttgtatgtcctgccgtccaccgtgggcttcatcaaccacgactg

SEQ ID NO: 319355 - DNA, 98 bp, Homo sapiens
tttattcagcggcagtggtgctttcccgaatctcagaatgccgttggatacactccagattggatatttctgctgagaaatgtaatgcgaatcagtcc

SEQ ID NO: 319356 - DNA, 100 bp, Homo sapiens
tactgggcatccactgccaaaatgcagctcttacagaaatgtgtcttgttgcatttggtaatttagcagaacttggtttttgccaatccagaagactgtg

SEQ ID NO: 319357 - DNA, 100 bp, Homo sapiens
ataaaatggcggatttcgaagagttgagggttggagtcagttagctgctatgcactgtgttatgctgccagacctactgggattggataaatttaggcct

SEQ ID NO: 319358 - DNA, 139 bp, Homo sapiens
gtgaagaccatcacctccgtggccatgaccagtgctctgcccatcatccagaagctagagccgcaaaaggctaagaatattgtacacaaagattcttgatgttcttgaggaaatccctaaaaatgcagcatatagaaag

SEQ ID NO: 319359 - DNA, 100 bp, Homo sapiens
acccgctggtttattgcgacgggcacggctgcagcgtcgcggtgcatcaagtgccggtggtggtgtgcacattgagccccggtatagacagttcccccag

SEQ ID NO: 319360 - DNA, 97 bp, Homo sapiens
gacgagatctccaagctccgcaagctggaggcctcgggcaaggggccagaggagaaggcagagcccccccaggctatgaatgccctgatgcggttga

SEQ ID NO: 319361 - DNA, 88 bp, Homo sapiens
gacgttcaacctccaaagcagcaaccaatgatatatatctgtggagatatgagatcctgactccaaactccattcccaagggtttcat

SEQ ID NO: 319362 - DNA, 50 bp, Homo sapiens
ctgccttccacctccagtgctggacattggctccctggattatcaagagt

SEQ ID NO: 319363 - DNA, 50 bp, Homo sapiens
agtggtttgtcatctttaaaaaattaacattgatgggcaggatattagga

SEQ ID NO: 319364 - DNA, 75 bp, Homo sapiens
cccgtggccgctgccggtctacgtctcggcgcggaagatggccggcggcgtggacggccccatcgggatcccgtt

SEQ ID NO: 319365 - DNA, 82 bp, Homo sapiens
ctcgatcttgggacccaccgctgccctcagctccgagtccagggcgaggtcctcagccctcgctctcgctggcggagcagca

SEQ ID NO: 319366 - DNA, 83 bp, Homo sapiens
ctgggatcccggccaccagcaattgtccggagccttcacgtaaatgggtccagtcatgcctcccagtaagaagccagaaagct

SEQ ID NO: 319367 - DNA, 100 bp, Homo sapiens
ctgctaaccttagcagaagaaaggacggtagacctgcccaagtctcccaaggccctggagagtgaatttgtttcctgccagcttcaccaatggattgatc

SEQ ID NO: 319368 - DNA, 100 bp, Homo sapiens
atgaaactcaagtcagactaactgcagatggttgctgtactttgccaacaagctcaccaagctcctgtatctactggaaaatggaagtccagccttacca

SEQ ID NO: 319369 - DNA, 74 bp, Homo sapiens
caaggagaagaggacagaggcgcggtcatcagatgaggagaatgggccggctgaaactgccgccaaccggatct

SEQ ID NO: 319370 - DNA, 125 bp, Homo sapiens
ccacctcgaagcaggtcatcccatagcttgccttcagaagcttcctcacaaccgcaagtcttttccaatggtcaccttggaagtgaagaatatgatgttcctccccggctttctcctcctcctcc

SEQ ID NO: 319371 - DNA, 75 bp, Homo sapiens
ggattctcgacctgctaacagaactggaccttttcgatctttgtagaatttgatggctgtaactggaagcaacac

SEQ ID NO: 319372 - DNA, 100 bp, Homo sapiens
atggaatggtctcctgatggtgaatattttgctactgctggaaagagcgatcgtcttctgatcaaaggaggtaaaattgttaatgatgaccagtcgttct

SEQ ID NO: 319373 - DNA, 98 bp, Homo sapiens
ggatcctcaaagaactggtgatcgaattaggggaaaaggggcctcgtcggagagtagaggtggtcaagtaccccctgcacgccatcatggagatcaag

SEQ ID NO: 319374 - DNA, 82 bp, Homo sapiens
ttccccagctgcccggtgcccgaggaggcagccaagctcatggcctgccactgcgtgcgttaccatgccagcaatgattcct

SEQ ID NO: 319375 - DNA, 75 bp, Homo sapiens
gctcaacaagggcctgccgcttgcagcgtccgtctccaagagagtatgaagagagtgcgtctgtagggcagggaa

SEQ ID NO: 319376 - DNA, 51 bp, Homo sapiens
cctccttgcgcctccgattcccaggaaatttggtgagcggcctccacctaa

SEQ ID NO: 319377 - DNA, 97 bp, Homo sapiens
tggggactggagagacaagtaaactctcagagtaactgtcccctctgactaccatttctaaggaatatgttctgtctcacacggagatgccagggac

SEQ ID NO: 319378 - DNA, 75 bp, Homo sapiens
agagcggccgccgccgctgccgcttccaccacaggccactgtggctgtccccgttccaggtggtggtcatccctg

SEQ ID NO: 319379 - DNA, 75 bp, Homo sapiens
cgattgccgattcagcccagcagttggtctcttcccatggcgatgtccatctgccaccgtggcactggtattgct

SEQ ID NO: 319380 - DNA, 100 bp, Homo sapiens
aggagcaagaccaagaccgcaggaaggactggggccacgtggagctgctggagggatgttttgctctgagcaaatgcaggaccgtggcgggccccgtggg

SEQ ID NO: 319381 - DNA, 90 bp, Homo sapiens
ccgtcctccttcgccgccgcgcacaaccgcacgtgcagaagaacatgagctgcctgtggacatggaaaccatcaacctggacagagatgc

SEQ ID NO: 319382 - DNA, 82 bp, Homo sapiens
ctttgtgacagaccgggacaaagtgacagccacgaagccgctggagttctggagtgggtggaagtggtggaggatcctctgg

SEQ ID NO: 319383 - DNA, 51 bp, Homo sapiens
gccggttcagagcaaaccgcagaaggcagccacctggacagccaccggagg

SEQ ID NO: 319384 - DNA, 100 bp, Homo sapiens
atggagatgaacctctaacacagtggaaaggaaccgttctggatcagaggatgaagtttttgctgctgcagcagaagtacctagaatacctggaggatgg

SEQ ID NO: 319385 - DNA, 121 bp, Homo sapiens
gttgttgatgtcaatgaatcaagaatcaatgcgtggaattctcctacacttcctatttatgagtcaacaggtgaaaagaatggaaaactgtggtctccagatgaagaggtttcccctgaag

SEQ ID NO: 319386 - DNA, 100 bp, Homo sapiens
gtgcctgaactcaaagatgcccttaaaagctcctgggcaacgtgctggtctgtgtgctggcccatcactttggcaaagaattcaccccaccagtgcaggc

SEQ ID NO: 319387 - DNA, 100 bp, Homo sapiens
gtaatactaaatgtgttaccataccaaggccccttcacagatgtagtcactacaaatcttaaattgcgaaatccatcggatagaaaagtgtgtttcaaag

SEQ ID NO: 319388 - DNA, 100 bp, Homo sapiens
catggttcggaagaatttcagatacatgttttctcctgtgaaattaaagaggcagctgaccggttccctgatgtgttacctgcttctgctactgatccaa

SEQ ID NO: 319389 - DNA, 97 bp, Homo sapiens
aatgtctgtcagcttcgctttaactcagatgcaagaagttatgaaatggaatggatggggatataatgattctaaattcatcttcaataagaagggc

SEQ ID NO: 319390 - DNA, 49 bp, Homo sapiens
aaggattccaagtaactcttatttggtaattaataatgcttgtgctact

SEQ ID NO: 319391 - DNA, 100 bp, Homo sapiens
attcctgatgaatttatatgtccaataactagagaacttatgaaagatccggtcatcgcatcagatcgggaaaaagagctaatccgccaagcagctctgc

SEQ ID NO: 319392 - DNA, 83 bp, Homo sapiens
ccgtccttctccactttcgccagcccgtgccgcgagcgcggcctgcaggaggctccccacaggtgcaggaagccgccgcccag

SEQ ID NO: 319393 - DNA, 100 bp, Homo sapiens
tgtcatggctgccatctctacttccatccctgtaatttcacagccccagtggtttgaagaaaagcagcagcaatttgagaatctggatcagcaacttagg

SEQ ID NO: 319394 - DNA, 74 bp, Homo sapiens
cacaaaagctggacaagcgaagtactatgacgacacctaccccagtgtcaaggagcaaaaggcctttgagaaga

SEQ ID NO: 319395 - DNA, 75 bp, Homo sapiens
ggattcagcaaggaaccttccgagcactagacaaactgaatggatttcagttagagaatttcaccttgaaagtag

SEQ ID NO: 319396 - DNA, 90 bp, Homo sapiens
gctgctctactcagcctacggagatgagacaggcgtgcagtgtgcgctgagatggacacccgctccgggagccagtgttccgtcacccca

SEQ ID NO: 319397 - DNA, 49 bp, Homo sapiens
ttgcccactcccatggtcctgcagagtgcccttccagctgtcactgaaa

SEQ ID NO: 319398 - DNA, 76 bp, Homo sapiens
ctttaatcctgaaagccatgcagcggaaatcttcccaaggctgcagacaccgacggatttgctttgggagccagag

SEQ ID NO: 319399 - DNA, 100 bp, Homo sapiens
catgagcggaagcttcgaggcatgatggtcgactacaagaagagggcggagcggagacgggagtattatgaaaagatcacttggcatccagagatgagcc

SEQ ID NO: 319400 - DNA, 51 bp, Homo sapiens
gacaagaggtggatgaagcagagcaagacatgctgctgctgaagaaacaca

SEQ ID NO: 319401 - DNA, 100 bp, Homo sapiens
gcatggccatgaactggccgcagtttgagcctgcctgctccgcttcagcggactctcgctggtctacctgctcttcctgctgctgctgccctggttcccc

SEQ ID NO: 319402 - DNA, 80 bp, Homo sapiens
cgagaagccctacgagtgcaacatctgcaaggtccgcttcaccagtcaaggagaagctgcgccttgatcctgacagcgag

SEQ ID NO: 319403 - DNA, 83 bp, Homo sapiens
gtgtaatgctagaagtcctagaagaaatttggagtgtgcgtgcgcgccgagcggactcagtggcttttgaggatgtgtctgtg

SEQ ID NO: 319404 - DNA, 100 bp, Homo sapiens
ttttgttcaagataaagtgattttttgcctttgttgattaactggacaaattcagaaaaggaaccagtgatttacttgcttgggaccccctatttggacc

SEQ ID NO: 319405 - DNA, 100 bp, Homo sapiens
gccacgcaccttctgccagctgatcctggaccccatcttcaaggtggttgaagatggatatgaattttttgcaaagaggcagttggtcactctgttttct

SEQ ID NO: 319406 - DNA, 90 bp, Homo sapiens
ggacgcgcagtccatctctctcaggaaggacttttgactagatctgctcaggaaacagtcaagcattctgatttattttcttcatcatcc

SEQ ID NO: 319407 - DNA, 100 bp, Homo sapiens
gcttggggggaactctgtcccccagcctggctgcacttgaggttcccgcccaggaaggaccatcagcacgtgcccatcgacatccagaccagcaagctgc

SEQ ID NO: 319408 - DNA, 87 bp, Homo sapiens
gcactgtggaaacacattcctggatgctgaaaacgccattcaacagatgggtggccagtggcttggtggaagacaaatcagaactaa

SEQ ID NO: 319409 - DNA, 98 bp, Homo sapiens
ggagaatgaggtgcgaacaatggtggatccaaactcacgcagtgaccccaagcttcaagaactgatgaaggttaattccaccatccccatcacagcag

SEQ ID NO: 319410 - DNA, 88 bp, Homo sapiens
tggccaataagttcgccaaagcgacaggagctcgttctcccggggaagtacttggaagagatcgccacacagatgcgcacgcacagca

SEQ ID NO: 319411 - DNA, 75 bp, Homo sapiens
taccaggaggccaggggtgtcgccatgtacaaaattggacagctgtacatgatcagcaaacacagccatgaacag

SEQ ID NO: 319412 - DNA, 82 bp, Homo sapiens
ctcggaggcggcgtgggcggcagagagcggggcggcggcagatggtcatcatgggccagtgctactacaacgagaccatcgg

SEQ ID NO: 319413 - DNA, 101 bp, Homo sapiens
cgattctgcaaccaagcacctgaaacagcaggttcatgccctcctttctccgcttgggttcctggaacgtggtgatgttcgtcacctatgagcagctgaaa

SEQ ID NO: 319414 - DNA, 100 bp, Homo sapiens
atttaaacaagagatttccacagaaggtcatcatggtcacaggagaccatccaatcacagctaaagctattgccaaaggtgtgggcatcatctcagaagg

SEQ ID NO: 319415 - DNA, 100 bp, Homo sapiens
agatggctgcacagtcagcgccgaaagttgtgctaaaaagcaccaccaagatgtctctaaatgagcgaattatatccagatcgagagacagaagattctg

SEQ ID NO: 319416 - DNA, 75 bp, Homo sapiens
ccagcggtcacctacccccagcaccacctccagcccctgcgcctcgctttggtgtcatccccagcactcctctgg

SEQ ID NO: 319417 - DNA, 83 bp, Homo sapiens
gccgcagcggctgggacgtacggagcccgcaagtcccggcccgagtattaaaggtggaagaaggtccatatctttttctgtgg

SEQ ID NO: 319418 - DNA, 124 bp, Homo sapiens
ttttggcttagagatcactaatccatcttcagcttcaattacaagtgaattcatcattggccgagttatcaaagccatgaataacagctggcatccggagtgcttccgctgtgacctctgccag

SEQ ID NO: 319419 - DNA, 75 bp, Homo sapiens
agaagataaagttgacagcagaggcagaggatcacctgctgttaccagctaccacccataacaagaccacaagac

SEQ ID NO: 319420 - DNA, 83 bp, Homo sapiens
atattcactgctgtacagtattggaaatggatctgtctttggtaaagatcagctgcacatcattgactcctgggcccaactgt

SEQ ID NO: 319421 - DNA, 83 bp, Homo sapiens
cttctcgtggcatccatgtggtttatccagttttctgaaaagctttccttaaagtttcccatgtctcaatggactcctgaata

SEQ ID NO: 319422 - DNA, 100 bp, Homo sapiens
gcaggaagagcaaagctgtcctaggccaaccagagattcatctttcatgcagtgacatgttgataaaaaatgatgatggagtgaaggtacctgagcgcag

SEQ ID NO: 319423 - DNA, 100 bp, Homo sapiens
ggaagcactacaagggtcctgaagtcagttgttgcatcaaatacttcatatttggcttcaatgtcatattttggggaataaccagcaagtacctgtcaag

SEQ ID NO: 319424 - DNA, 80 bp, Homo sapiens
caagcagagaaaacctgccaatcaagatgagtatggaaacctctgtagaggagcaggatgcaaccgacaggctgtggccg

SEQ ID NO: 319425 - DNA, 75 bp, Homo sapiens
gaggttcttcagtgtatgcctggtacatcaggaacgtctctatcaagaatacaatttcagcaaggctgagggcca

SEQ ID NO: 319426 - DNA, 100 bp, Homo sapiens
atgatcgtgtgattgactttgatgagaacactgctctggatgatgcagaagaggagtcctttaggaaggctgagtcatcactagagagtgggaagggcag

SEQ ID NO: 319427 - DNA, 100 bp, Homo sapiens
agctggtcgcagatcctgagacccggacagtggcagtgaaacagttcgaagcattcagcaaacaatggcaaggcagagccaccagaaacgtacacctgat

SEQ ID NO: 319428 - DNA, 75 bp, Homo sapiens
tgaaaatatggtaataaagctagccaaggaattaccgcttgaattcggagtgatttaccactgcacagaggagcg

SEQ ID NO: 319429 - DNA, 82 bp, Homo sapiens
ggaagggaaccaacccactttctcggcgccgcggctcttttctaaaagtttttgattacgaagatgcaggctaccagactgc

SEQ ID NO: 319430 - DNA, 96 bp, Homo sapiens
aaacaccctgatatcagtggattatgaaatttttgggaaggtgcaaggggtgtttttccgtaagcatactcagagtgaaccagaggaaatgcctcc

SEQ ID NO: 319431 - DNA, 50 bp, Homo sapiens
ggaagatcgatgtgtgcattgaataactgaagtgaagtgatggactccga

SEQ ID NO: 319432 - DNA, 74 bp, Homo sapiens
agaccttatcctgatcctgaagacgaggttgcagagcctgaggcctgtgatcagatgtacgagagcttagcgcg

SEQ ID NO: 319433 - DNA, 75 bp, Homo sapiens
cagtctcttccttcttgcactgatgttcctggggcttcagagacggcaaggctgtgtgccgagcttggaagaaag

SEQ ID NO: 319434 - DNA, 75 bp, Homo sapiens
gttctttcacctcctctgaatgtccacagtggaatgttggctgtccgtgaaaaccgctacattgtcctggccaag

SEQ ID NO: 319435 - DNA, 100 bp, Homo sapiens
cggtgttaaaaggcggcgccctgaagaagtgcaagagcagaggccttctctagaccttgccaagatggcacagattgacttacgcaggattctcagccct

SEQ ID NO: 319436 - DNA, 95 bp, Homo sapiens
tcaacctggatatcagcccccagcggcccaggcccatgtaaacaggaacatcgataagtagtgtaaaaacttgcacaatgaaatccgaagccaag

SEQ ID NO: 319437 - DNA, 83 bp, Homo sapiens
caggcggcggcggcgactggcaatgtttggcctcaaaagaaacgcgggaagatcagttttcctgccatccaggctgctccctc

SEQ ID NO: 319438 - DNA, 100 bp, Homo sapiens
gaacggggcatcgcggttccaacggtttattcttcagtccaaggaagcaattcacagtcagctgttagagaagcagaaaatagcagaagaaaaaattaaa

SEQ ID NO: 319439 - DNA, 74 bp, Homo sapiens
aagatcaagcactggaaccgcttccgagacggacttaagtcacaacagattatctttcatcaaggcaagttcca

SEQ ID NO: 319440 - DNA, 119 bp, Homo sapiens
ggcggacggcccggatgagtacgataccgaagcgggctgtgtgccccttctccacccagagatttcaccacccaatcctcagtcctttggaaagcagtttccagctggaagttgacgtc

SEQ ID NO: 319441 - DNA, 100 bp, Homo sapiens
gacacgcagtgacgagcggccgaagcagctttgcggtcagactatgatgactggagaccgtctctggccagtttgcttcaacccattccattccccaaag

SEQ ID NO: 319442 - DNA, 100 bp, Homo sapiens
aacggggcaacagaagaagatggggttccttccaaagtgcagcgctgtgcagtgccagatgaattatactttgaggaaggtgatattatctacattactg

SEQ ID NO: 319443 - DNA, 50 bp, Homo sapiens
gagatggctgcgacgcgtgcgcaggactcatgttcaacacggggattggg

SEQ ID NO: 319444 - DNA, 100 bp, Homo sapiens
gtctcttccgcggaaactgacattgcgtttccgttgtcggcctcccactgcagcttgagcaatttcggaccctgcttttcacttccgaaggggagaaaga

SEQ ID NO: 319445 - DNA, 83 bp, Homo sapiens
aagacaggagcgtcccggtgcggctgcacgtctcgcggatcatgctgtgatgtgtccaatctagatcccaacttctcatttga

SEQ ID NO: 319446 - DNA, 93 bp, Homo sapiens
tcccgggtggcttacagacgctgccagcatcgccgccgccagggggatatgagactttctactcggaatatcctgagtgttgcgtggatgtaa

SEQ ID NO: 319447 - DNA, 75 bp, Homo sapiens
gtggatcgctgtgatcgtcacttggtggacacctgcgcaggtgtgtgccctccggcccctgaagcatggccagca

SEQ ID NO: 319448 - DNA, 73 bp, Homo sapiens
aattatccactgaagttcagtctttgtacagagagataaaggatttcaaatatgcgtgcattagagaatgatt

SEQ ID NO: 319449 - DNA, 49 bp, Homo sapiens
taactgtacaaactacacagctcatgaactgttttgacacaagaagcca

SEQ ID NO: 319450 - DNA, 83 bp, Homo sapiens
aaactccaggctcagatgtcacaggcatctaataggattcaggaatcaaagaatcagtgtactcaggtggtacaggaaagaga

SEQ ID NO: 319451 - DNA, 83 bp, Homo sapiens
gtttggtgttcttgctaagattgtgaattacatgaagtttttcagaagaagtgaagtcaagatgaagaaccatttgcttttct

SEQ ID NO: 319452 - DNA, 74 bp, Homo sapiens
tgagagcttctcagactatccacctttggaagaaacatggcggctatccttctctcacatcgaaaaggaaattt

SEQ ID NO: 319453 - DNA, 75 bp, Homo sapiens
gcgggggtcagcagcagcggctccgagggcgcggcggacgcaggctgttttggagtcagcggaagatcaccaagg

SEQ ID NO: 319454 - DNA, 98 bp, Homo sapiens
aaggcagtctttgctacgtacagcaaaagtttcaccagtgatcattaaagaatgggcagcttacaaaggaaagtctcctcaaaccccggaactggttg

SEQ ID NO: 319455 - DNA, 100 bp, Homo sapiens
gggacgtgagcccagccgaggtaccgctgaagaggaatcaattttggtgcaattaaaaactagcatttctagtcagtatgtaattcggatgcagccgact

SEQ ID NO: 319456 - DNA, 75 bp, Homo sapiens
accaggactccaaaatggcgtcagttggtgagtgtccggccccaggttagcatacgtatcaaggacagtaactac

SEQ ID NO: 319457 - DNA, 75 bp, Homo sapiens
cgggaagaagcagttcaagtatgggaaccagttgctacagaatccagaagtcagatttcagcaacaactggaaca

SEQ ID NO: 319458 - DNA, 96 bp, Homo sapiens
gcgccgcggccgccaggagcggctccgcgccgcagtccccaggtgtaatcctgagagattcacatggtgttgcacaagtacgttttgtgacaggca

SEQ ID NO: 319459 - DNA, 100 bp, Homo sapiens
aaagcagcagccttctcgacagccttttactgtgaacaggcctgatcaaccccgtataaccaaagatgtaatttgttttcatgctgaagatttcttagaa

SEQ ID NO: 319460 - DNA, 100 bp, Homo sapiens
tttacctacaaatttgttcctgctcttccaggaatattgggatactgtaaggcccttgctccagaggcctgtagtggtggagacacgcccagtggatgat

SEQ ID NO: 319461 - DNA, 100 bp, Homo sapiens
ctcctcgccagcagccgtccggagccagccaacgagcggtaaacagattcaagtgttatcgggccacctgcagtgggtttactgctgttccatctcccca

SEQ ID NO: 319462 - DNA, 100 bp, Homo sapiens
ggttcagttcgtcatggggctgtttggaaagacccaggagaagccgcccaaagaactgatttgttattgggcgggaaaaaccaggacaagtgagcgaggt

SEQ ID NO: 319463 - DNA, 90 bp, Homo sapiens
gctaccgatacatcaatggtaggaactcctctgatgtcctggtttatgttaccagcaatgacactacgggaagctgccaaagaatgtcga

SEQ ID NO: 319464 - DNA, 95 bp, Homo sapiens
ggatacagaaggagaaacctgtggaaatgcagaaaagcttgcagaatatatttgttccattgtgtcagtctgtgatgcctgctggtgttgataaa

SEQ ID NO: 319465 - DNA, 100 bp, Homo sapiens
gcagcaaccactattttcttcctgcccctcgttgatgagagcattcgaagtgacctcagcagggcatccagatgaggtttatataactttccaagacaag

SEQ ID NO: 319466 - DNA, 51 bp, Homo sapiens
gctgctggggaacgggagctggatgagtgcacgatctgattttctggagag

SEQ ID NO: 319467 - DNA, 135 bp, Homo sapiens
gccggccgtgtccaagggggacgggatgcggggcctggcggtcttcatctcggatatccgcaactggactgaaaggaggacttcaagaatgtccactgtgcttaagcaggtagtgccaggacatttggatgtaaa

SEQ ID NO: 319468 - DNA, 73 bp, Homo sapiens
taatgatcacttacaaggacgaccaggccaagcttaagaagactctgtgttgatccagacgctggccgagatg

SEQ ID NO: 319469 - DNA, 100 bp, Homo sapiens
atgcaccctttttgtcagattatcaggatgaggaagttatttctggacagtctacgaaaagctcttgctggccatggaggaagtaggcagctgacagaaa

SEQ ID NO: 319470 - DNA, 98 bp, Homo sapiens
gtcagagtgccggaccccagcacacagaagccgagacgtaccttctccaggcaaattccgttcccctgcagcaccatctcctttggctcttcggcaac

SEQ ID NO: 319471 - DNA, 75 bp, Homo sapiens
ttgtcatctcgaacagtatcttcttcttcgctccctagcttagaagagattttcgacaatgaagccaaagacgtg

SEQ ID NO: 319472 - DNA, 109 bp, Homo sapiens
gcttgggccgccgagctggacccggaccggttttggtctgcccagtcaagcccgtccaactccagctccagctcagactccagctcagactcagacttcgagccatccc

SEQ ID NO: 319473 - DNA, 100 bp, Homo sapiens
gaagatctgattcgctgtgctgccatcccttcactccttaatgctgctgaactgtcccaagcaataaacagtggtacattgttatcaaaaccgtccccac

SEQ ID NO: 319474 - DNA, 100 bp, Homo sapiens
gtaagaagtgccttttgcctcccaccgtgattctgaggcctccccaaccatgtgcaattaggaccccgcctatacaccccgcgagtgcttccagcgcatc

SEQ ID NO: 319475 - DNA, 74 bp, Homo sapiens
tcatgttctgcacctcaggagggaattcagcctcagtgatgtccatgagagatgcaaccactgcatgaagataa

SEQ ID NO: 319476 - DNA, 75 bp, Homo sapiens
gtgggcgagctgggcgacggcgccttcggcaaggtttacaaggtgtcgtgaaaactacccctaaaagccaaaatg

SEQ ID NO: 319477 - DNA, 82 bp, Homo sapiens
gggcgccccgccggtcacctccgcgcggacaccagccgaggaggagctggtggaggctgacgaggcgggcagtgtgtatgca

SEQ ID NO: 319478 - DNA, 100 bp, Homo sapiens
tcccgcgtagacgcagtggcctccaaggtgcagacagctgtgactatgaagggggttatcagtgagctgaatggaaaaaacattgaagacgtcattgccc

SEQ ID NO: 319479 - DNA, 100 bp, Homo sapiens
cctggcccaggcgcacacggaagtggtgaaatgacaatggatgctctgttggctcgattgaaacttctgaatccagatgaccttagagaagaaatcgtca

SEQ ID NO: 319480 - DNA, 100 bp, Homo sapiens
cagcgcgagccccttggaggggctgctggacctcagctacccccgcacccacgcggccctgctgaaagtggcgcaaatgcagctgctgaaatgggttgcg

SEQ ID NO: 319481 - DNA, 50 bp, Homo sapiens
aggatccggaggcgccagctcaaccctactgatagtctttataaactttc

SEQ ID NO: 319482 - DNA, 75 bp, Homo sapiens
ttatgcaggagaattatggaaatgttgtctcactagttcctggtccagaactttacacagaaaaggtgctcaaag

SEQ ID NO: 319483 - DNA, 138 bp, Homo sapiens
gtcaaggagtgggaagtgtacaacttccccgcaggcggcgtgggcatgggcatgtacaacaccgacgaggtcttgggcgtctttggtactggcttttttaggggtctgcctggggattacccttgctgtggatagaag

SEQ ID NO: 319484 - DNA, 97 bp, Homo sapiens
ctgtggcaaccgaaatgagactccctcagatccagtgataattgacagtgtctcaatttaaaatggtgaattactcctatgatgaagatctggaaga

SEQ ID NO: 319485 - DNA, 76 bp, Homo sapiens
cgtccctcaaaccttgcttctaggagataaaaagatgccatggacaatattaccaggcagaaccaattctacgata

SEQ ID NO: 319486 - DNA, 76 bp, Homo sapiens
gctgagcagagccctgcgatactattatgacaaggataaaagaatcagagtgtctcaacccttgacaagaggacca

SEQ ID NO: 319487 - DNA, 98 bp, Homo sapiens
gtcagggacaagatggtgccaccggtgcaggtctctccgctcatcaaggccctgggctgcatcttgtacctgctgtgcttccggcagcacccttttga

SEQ ID NO: 319488 - DNA, 100 bp, Homo sapiens
ctcaagtgcaacaagtcccacttccgaaaccacaagtttgccgatgccacatccacgtcctccgagcctacatcaagacccaagtgaacaaagagctgga

SEQ ID NO: 319489 - DNA, 90 bp, Homo sapiens
ccgagcccaaggcaattgatcccaagttgtcgacgaccgacagggtggtgaaagcttcagaatggcagaagatgatccatatttgggaag

SEQ ID NO: 319490 - DNA, 108 bp, Homo sapiens
agactaatgaacttcaagcagaatgctgctccattggttaaatacttccaggaaaaggggctcatcatgacacatctgaagatccagagtgtgccccttgcccaatcg

SEQ ID NO: 319491 - DNA, 98 bp, Homo sapiens
cggcggcttccgtcacctccgctcccccgatcctattcccagtcgttattggtaaaggttttcaaggtgtcatgaaaagatggggatttaaaggccag

SEQ ID NO: 319492 - DNA, 100 bp, Homo sapiens
aaaacatctgccagtttctcttggagcaactggatgatgctcgcaacaaagctgacaatcaagaaaaggcaatacttaatattcaagccagatgtgatgc

SEQ ID NO: 319493 - DNA, 100 bp, Homo sapiens
ccagattcgtggagctgccccaccgtacgtctatgctgtggggagaggtatttctcaaagagactacacacaatactatgatcatatttctaaacaaaag

SEQ ID NO: 319494 - DNA, 100 bp, Homo sapiens
cacggctccatcatcacccaggcgcggagggaagacgccctggtgctcaccaagcaagatctgcaaatggaataaatgcaaatgggataaatgcaaaatg

SEQ ID NO: 319495 - DNA, 75 bp, Homo sapiens
atgatagcagtgggcttttcacagtgggctttactgtgttgaggatgtgatggagctgcttgaagaagatctcac

SEQ ID NO: 319496 - DNA, 100 bp, Homo sapiens
tggaggaggtggcaggcctcggcgatctgcagcctcatgagagggggcattgctgagcgagggggcgtccgtgtgggccaccgcatcatcgagatcaacg

SEQ ID NO: 319497 - DNA, 75 bp, Homo sapiens
gaggggtctgacttcaagttctacgccaagccatactttctcaggtacaatgactcttcttgcttttcacctaag

SEQ ID NO: 319498 - DNA, 83 bp, Homo sapiens
cccggacacagtgcagaggagaagcagtctgtatggcagaaagcaatggatcatattgagttgaggtactaaagaaaattgac

SEQ ID NO: 319499 - DNA, 90 bp, Homo sapiens
gtgagactattgccaagtggtgagaccatcaccaagcggtgagactatcacctatcgccaagtgagagctgcttttgcacattttcctga

SEQ ID NO: 319500 - DNA, 130 bp, Homo sapiens
tcaatgatgatgatgaggaagcagatgatacccgctacacccagggaacaggtggtgatgagggtggagagattcaaccagttagcgtgaaagttggagataaagttcttctcccagaatatggaggcac

SEQ ID NO: 319501 - DNA, 90 bp, Homo sapiens
gacagctgtaaagcacgaacaggaatacatggaagtccgggagagaatacacagagccaccgctgtacaaccagccctccgacacccggc

SEQ ID NO: 319502 - DNA, 82 bp, Homo sapiens
aaaagccaagaggaggacagttcgctacacagcaatgcatcgagatagattctgttgctgttaacatttcaaacttggtgct

SEQ ID NO: 319503 - DNA, 88 bp, Homo sapiens
tggctgcaaccttagcgacatcaggaagaacagggtcgaggatcgagctctagccggcccggtccttggactgaaagaatgcaccagg

SEQ ID NO: 319504 - DNA, 98 bp, Homo sapiens
ggtaggctgcgttgaggatctttgctcttccatccgcctttgatcgtcttcctcttcagccatccaggtctgaatttcctgctgctgttcacaaagat

SEQ ID NO: 319505 - DNA, 75 bp, Homo sapiens
gcaatctcctcctccactgccactacagggaagtgcatcacatgtcagtcttattgttacaggtatcgctgtgct

SEQ ID NO: 319506 - DNA, 82 bp, Homo sapiens
ccatgccagtctctccggcaggcagtcacaagcagcagaacttcgggttggtcactttccgtatcctgatccttcccagtgg

SEQ ID NO: 319507 - DNA, 75 bp, Homo sapiens
ctgatactaacagttttacgatttaaaacttcgccagaattttgaaaggagatgaccttcaggccattaagaagg

SEQ ID NO: 319508 - DNA, 76 bp, Homo sapiens
gccagccccagcagcaacagcagcacaggagctatcgaaaaaccttgaactgagtactaacagtttccaacgacag

SEQ ID NO: 319509 - DNA, 75 bp, Homo sapiens
gtcactgcctgcgcagctccggccgcctggctccccatactagtcgccgtgtgtggaccagttgacaaagatcca

SEQ ID NO: 319510 - DNA, 50 bp, Homo sapiens
attgggaaaattcaacttcattcaggtgaccgaagaggcctatgtcccag

SEQ ID NO: 319511 - DNA, 74 bp, Homo sapiens
gcctgtgtctcgtcttgtatctctaattggaagcaatatctgcatggtatttgaagttttggggcatcatctgc

SEQ ID NO: 319512 - DNA, 87 bp, Homo sapiens
tgaattggcaccaagccttcccagttatcataaccttgaatggcgactagatgtacagagtttatgtggccgaggcagacaagtgga

SEQ ID NO: 319513 - DNA, 88 bp, Homo sapiens
gtgagccaaggaattttgtgtttcttgccatcttacaaggtgaccaagaatatggcccaggtgaccaaagccctggacaaggccctga

SEQ ID NO: 319514 - DNA, 73 bp, Homo sapiens
cagatgttctcagatatggtcttaaaagggccgcctttttgcctatcctgacactcaccgccatcgcctggga

SEQ ID NO: 319515 - DNA, 119 bp, Homo sapiens
gagatgggcagacggattcatttagagctgcggaacaggacgccctctgatatcaggatcctcatgaccagccaaagagaagaagaattaggaagcataaatcaaagaaaaaatttaaa

SEQ ID NO: 319516 - DNA, 97 bp, Homo sapiens
tgcacacactaggagatctcctcaaagaagtttgtccttctgctattgatcctgaagttttctggatatgccgcagaaggatccgtgccagaagcaa

SEQ ID NO: 319517 - DNA, 100 bp, Homo sapiens
acgtgggatccccacggacctggaaattctcgcctgtcttcccttcacccagagcaaattgagacgtcccggaacatggcgctgctctgggggctcctgg

SEQ ID NO: 319518 - DNA, 75 bp, Homo sapiens
tactcgggagctggctgaagatggctactctggagttgagaatgccagctgatgaagaccgagaggccgcgaccc

SEQ ID NO: 319519 - DNA, 75 bp, Homo sapiens
cactgcatcggctacgcgcccacttggcgggccctggctggggatgtgcgagaaacctgtttccctccaatcttg

SEQ ID NO: 319520 - DNA, 76 bp, Homo sapiens
tggaagtgctgaaaaatgctcatctctcacacagacttttgatggacaggagatctcacattcttgaaggtggcat

SEQ ID NO: 319521 - DNA, 50 bp, Homo sapiens
cctcctgagtagctgggattacagatggggacattggttttggaccttta

SEQ ID NO: 319522 - DNA, 82 bp, Homo sapiens
tagcaccccgagaaccgtcagtttgagccagatgactgtgtcagggaaaagggaggcaaggtcctggtccactgtgaggctg

SEQ ID NO: 319523 - DNA, 101 bp, Homo sapiens
gaaaactgtgggctcctggtgtctctggtggagacctttggcgacttggcctttggcgacatcttcctccacctgctcacgggcaaccttgcgctgctggc

SEQ ID NO: 319524 - DNA, 73 bp, Homo sapiens
tccagcatcatgattacctcccaggtgacttcccaagtatgcctggccacaatacctccaggaattcctcttg

SEQ ID NO: 319525 - DNA, 75 bp, Homo sapiens
tccagtacttctctcctgtagtaaggctccacaaggctgacttcaggacctgggcctgcatggatttgtgccgag

SEQ ID NO: 319526 - DNA, 50 bp, Homo sapiens
aaggagaagacttggattctcaggctattcaagatctctggcagtggagg

SEQ ID NO: 319527 - DNA, 75 bp, Homo sapiens
ctgggagccgcaccacctaacgctggccgacaacagcctggcgtccgccacgatcaatgtccgagttaccaccat

SEQ ID NO: 319528 - DNA, 100 bp, Homo sapiens
aagtactgagcctgttggaggaactggcccggaaacaggaggacgtgatggtaatgcccgaaggagcagacacggtgtccaggcccagtcccgactaccc

SEQ ID NO: 319529 - DNA, 75 bp, Homo sapiens
ccgcggtccccgggaggctagagtgattgccattgatatcgatcctgttaagattgcccttgctcgcaataatgc

SEQ ID NO: 319530 - DNA, 78 bp, Homo sapiens
cggagggacggcagtctcgcgcggtattgttgcagcatctggcagtgagactgaggatgaggacagcatggacattcc

SEQ ID NO: 319531 - DNA, 83 bp, Homo sapiens
actaggagatctcctcaaagaagtttgtccttctgctattgatcctgaagggaaagaatatggcaaagctgatgcaagatggg

SEQ ID NO: 319532 - DNA, 50 bp, Homo sapiens
tcaaagaaatgaaaatattgatgtcgagaccattaaaaatctcaagtgac

SEQ ID NO: 319533 - DNA, 51 bp, Homo sapiens
ggcgcttaatcggcctccaacgtgtacaggtttgcagattccgccagcagc

SEQ ID NO: 319534 - DNA, 100 bp, Homo sapiens
gtcagggaagaagcgcagaaaactcctccagcagatccggcttgcccagaaagagaagacagccatggaagcaaccatgtccaagggacctgcagttggt

SEQ ID NO: 319535 - DNA, 100 bp, Homo sapiens
gaatcagttgctgaaacagcacaaacaataaagaaatccgtagaagaaggaaaaatagatggcatcattgacaagtatgaatcaaatgcaacaggaaaaa

SEQ ID NO: 319536 - DNA, 75 bp, Homo sapiens
cgagccccgctacgccacgctgcccaacatcatgaaagctgggctggagaactcactggccgagacagagtgccg

SEQ ID NO: 319537 - DNA, 75 bp, Homo sapiens
agcatgcacttccttccagcagctacacagatcactgagacccagaggctgggcctggctatggccctagaacct

SEQ ID NO: 319538 - DNA, 100 bp, Homo sapiens
cttcagtgcattcatgaagcatctgaaaaagctgtggaaggctctggataaggaccagtacctgcccaggaaactgagggtggtgaaggcagatattgta

SEQ ID NO: 319539 - DNA, 82 bp, Homo sapiens
acttcgagccatcccagaaccacagccaaggagaactacgatgacccgcacaaaacccctgcctccccagttgtccacatca

SEQ ID NO: 319540 - DNA, 119 bp, Homo sapiens
ggaagaccgcgcgcagggcctgcagcgggagctggacggcgagcgcgagcggcgcgagaaagatgatcggctgaatgtaacagaggaactaacgtccaacgacaagacgaggattctca

SEQ ID NO: 319541 - DNA, 107 bp, Homo sapiens
tgaagctgaggacacacccaggaaaagactcaggacggacaagcacagtcttcggaaggaaccaacacctatacagcgtcaggcaattcccattgggctacagaatc

SEQ ID NO: 319542 - DNA, 75 bp, Homo sapiens
aaagtggaagatttgcttaaaagaccagatgtggattttcgccgtgaggaagatgcggaaaaggctgtgattgac

SEQ ID NO: 319543 - DNA, 49 bp, Homo sapiens
agggatagcagcccctcatgcagggtggggagcattaagcgggaaatga

SEQ ID NO: 319544 - DNA, 75 bp, Homo sapiens
acctccaccaccgtcagctcggccagggaaataatgcaaaaggtgtcccaaggctcctgaccagtgaacaaagat

SEQ ID NO: 319545 - DNA, 82 bp, Homo sapiens
cttagctgtgctcgcgctactctctctttctggcctggaggctatccagcctcggtgccaatgccttgctcttcgtcggtgt

SEQ ID NO: 319546 - DNA, 73 bp, Homo sapiens
cggactggaagagcaggaaacaaggaaagaatttaatgtttctggtgttgcgagatggtacaggttatcttca

SEQ ID NO: 319547 - DNA, 100 bp, Homo sapiens
aaggaaatcattctggtggatgacaacagcgacgaagatccggagttaggtgttggcacgctaccagaacatgacagccaggatgcagggccgattgtcc

SEQ ID NO: 319548 - DNA, 98 bp, Homo sapiens
tcagcagttgtggcacagcatctgacaaacactgtattcgttgacagagctttgatagtcgtaccatatgcagaaggcagagaacatttataatgatg

SEQ ID NO: 319549 - DNA, 99 bp, Homo sapiens
ctccgagggaaaaggccttgaagggccattagacctgataaattatatagacgttgcccaggtgaagaacgaggtggagaagctcccccgacagcagcg

SEQ ID NO: 319550 - DNA, 83 bp, Homo sapiens
ctacatggacgtctggggcaaagggaccacggtcaccgtctcctcagggaaagcaggcaggatgggagagtcgccgatagaac

SEQ ID NO: 319551 - DNA, 83 bp, Homo sapiens
cgagggctacccgctctttgccgtgacaacaccgttcccccagccgggctggtggagccatcgaagcccccacccacaggctg

SEQ ID NO: 319552 - DNA, 100 bp, Homo sapiens
gtcagtataaactcatggattgaactggcctcgaaaaagcccaagacagcagaagcagacacctccagtgaactagcaaagaaaagcaaagaagtattca

SEQ ID NO: 319553 - DNA, 90 bp, Homo sapiens
cggggcagaagggaggatgcagagggagaaacagggcagaagtgatagttcaagtaagaaggatgtgattgagctgacagacgacagctt

SEQ ID NO: 319554 - DNA, 100 bp, Homo sapiens
tggctggaaagcacggttctcctctgccttaaaaacagtgcccaacagtgaactgcccctccgaggacttgaaaaatggacccaagtggggtcaaagtgc

SEQ ID NO: 319555 - DNA, 75 bp, Homo sapiens
ttttggagcaaaggtcacaaatgaggatcatggggttgacagcagcattttccagaatcctaaaaagcttcatct

SEQ ID NO: 319556 - DNA, 74 bp, Homo sapiens
ttcgctacacagcaatgcatcgaggtttgtggtaaatatgccagctctagaacacatgaatcagattttacaca

SEQ ID NO: 319557 - DNA, 49 bp, Homo sapiens
gcaggaactctacaacccaatccagttgttgaatgttgggtcacgaaga

SEQ ID NO: 319558 - DNA, 75 bp, Homo sapiens
ctttcaggatgtggaggcccaggccgccacctgcaaccacactgtgattgaagaatgtcccggattccactgggg

SEQ ID NO: 319559 - DNA, 101 bp, Homo sapiens
aggttctcggctctcaggacgtcccagcaagtggagcccagaggtttgctgggactcccagccaggtgggaacattctccatggccagtgaggaagtcttg

SEQ ID NO: 319560 - DNA, 100 bp, Homo sapiens
cgaggacggtcggactcccgcggcgggaggagcctgttcccctgaggagagaagcctcatcagtgccaagtctgtgggaagaccttctctcagagtggaa

SEQ ID NO: 319561 - DNA, 101 bp, Homo sapiens
gagcgtggggaatctggaagaggctggggagtctgtgtccttccagctgcagatacggaggtggctgagcatcggagtggagttcgtggggaactgcgtgg

SEQ ID NO: 319562 - DNA, 75 bp, Homo sapiens
ccggcctcgtcctcggcgccgccctgcgtggagccgccgccggccacccgggcggccggcgcggggcgcaggcgg

SEQ ID NO: 319563 - DNA, 75 bp, Homo sapiens
gctagagggtgaagctggcggagcaggaggatgggcgtataaggatgcatttatgaaagcaaatcctggctacaa

SEQ ID NO: 319564 - DNA, 50 bp, Homo sapiens
gaaaatctccccggtgactttcagtgctccactccagctacgagaactag

SEQ ID NO: 319565 - DNA, 90 bp, Homo sapiens
ggccgctacccgccctacgaacgagtggtgttgcgagaagcctataaagacctgcagtctcgggaggagactcgaaacgctgcctggagg

SEQ ID NO: 319566 - DNA, 101 bp, Homo sapiens
aggccgtccagcagatggcggatgccctgcagtacctgcagaaggtctctggagacatcttcagcagaaaccgaccagagggcaaagtgttggagacagtt

SEQ ID NO: 319567 - DNA, 90 bp, Homo sapiens
agaacttgctcgtcatcagagaattcatactggaatcaccccaatgctacagctgatccgggccatcctgaaagtccctgaagatccaac

SEQ ID NO: 319568 - DNA, 88 bp, Homo sapiens
gaggcgctggagctgggtcagtccgccgctcaccccgcggccgcaccttcccgccttctcagtatgaccctcaatttggcgatgcctt

SEQ ID NO: 319569 - DNA, 83 bp, Homo sapiens
ggtgttcgggctcctggaggacgaggctgcctgctgtttcccggggagatcatgaaacgaggtcgccttcccagcagcagtga

SEQ ID NO: 319570 - DNA, 96 bp, Homo sapiens
ttacaccactcccaagaagaataagcacaagagaaagaaggttaagctggctgtcctgaaatattataaggtggattttctgattgaaaatgatgc

SEQ ID NO: 319571 - DNA, 75 bp, Homo sapiens
ccccaagctggttcccgctgtagcaaacgtccgcggcctctcaggtggctttcctgggggaatgcctggtaattt

SEQ ID NO: 319572 - DNA, 82 bp, Homo sapiens
ctcacctttaactctccttatgctgggtgaaaacaaagctgccccagtgctcagctgtgaagctgcaacacagactgaaagg

SEQ ID NO: 319573 - DNA, 76 bp, Homo sapiens
cggaagcggagagcaacagcgcgccggaataatgtatttgtggccttggacatgaggcagtcagtcctctgttgct

SEQ ID NO: 319574 - DNA, 100 bp, Homo sapiens
ccgcgaaggagcccgagaagcagccacgatgtgcgcgctgtgcttcgccgtgagccgctcgctgctgctgacgtgcctggtgccggccgcgctgctgggc

SEQ ID NO: 319575 - DNA, 100 bp, Homo sapiens
tcccaccattgccacgggcattctccatctccttgcagctatgcagtcagaagggcctgtggaacatgttccagtttttggaagcacaagtggatccgtt

SEQ ID NO: 319576 - DNA, 75 bp, Homo sapiens
gaatcctgcaaaaatgtctctctatccatctctcgaagacttgaagtaacaacatgctgtaccccaaggaagaca

SEQ ID NO: 319577 - DNA, 80 bp, Homo sapiens
aacaagtatgggtctccgtacaccaaaaactcaggcttcgccacctgcgtgcaaagaatggtcctcgtccgaagtgagaa

SEQ ID NO: 319578 - DNA, 74 bp, Homo sapiens
aagaaggataaggaccaggattctattactggtggtgcaggtgatggtcctaccagtgtgtctgttgaggtcac

SEQ ID NO: 319579 - DNA, 100 bp, Homo sapiens
tgacctggccgatgaggaagtactgagcctgttggaggaactggcccggaaacaggaggacgatgaatttcatcctttcatcgaagcacttctgccccac

SEQ ID NO: 319580 - DNA, 123 bp, Homo sapiens
ggagaggctcgtgtggttttggctcatggctctcaccttgctcacggcatgaatgctttacagttgcagaacctggcgacgctggctgctgctgcagctgcggcccagacctcagccaccagc

SEQ ID NO: 319581 - DNA, 100 bp, Homo sapiens
gagagaaagaagtgatgaaactctggaatctccatgtcatgaagcatggggtgtatgtacaaagacttttgaagaggtgtgggagcacacatgatttaaa

SEQ ID NO: 319582 - DNA, 82 bp, Homo sapiens
catcattgtgttaatggtgaagcacagcgattccctgaagctgtggtctaccaatctagacaactcagtggcaagcattgag

SEQ ID NO: 319583 - DNA, 98 bp, Homo sapiens
aaaggtggaagaggtgctgcagctggtggacgaggtggtacgaggggtcgtggccgaggtggtgaagcagtattttccaatttgaagattcatttgaa

SEQ ID NO: 319584 - DNA, 100 bp, Homo sapiens
gtggcagcggcaggagagtccggccgcgacaggacgcaaagaatggctcaagaagtactgacacatttaaaggagcatcctgatgcttggacaagagtcg

SEQ ID NO: 319585 - DNA, 96 bp, Homo sapiens
ctggactctgcagagtgaagagaaaatagcaaacgatccagacggcagggagtgcatcaaaggtgtgaacacaggaactgcaagcacatgttgacc

SEQ ID NO: 319586 - DNA, 73 bp, Homo sapiens
catgccagagccagtttattttcactgtgcagctgttacaccaaaagtgaaattcgttattctacatggaaga

SEQ ID NO: 319587 - DNA, 82 bp, Homo sapiens
caggagtcatcggacgccagaatctgttgagcagctgaacagaggccatgccggggcactccgaggcctgagacgaccacgc

SEQ ID NO: 319588 - DNA, 80 bp, Homo sapiens
agtacgtgttggaggtacagaagactgcttttcaggaagccttggacgctgcaggtgataaacttgtagtagttgacttc

SEQ ID NO: 319589 - DNA, 83 bp, Homo sapiens
caggcccttgttggggcacaaggtggcagtttggatgctcttccaagagtcacatgtccaaaccatccagatgcgattttagt

SEQ ID NO: 319590 - DNA, 83 bp, Homo sapiens
gtggcggcgaacgcggagagcacgccatgaaggcctcgggcacggcgccatgtcagaaccggctggggatgtccgtcagaacc

SEQ ID NO: 319591 - DNA, 87 bp, Homo sapiens
ttcaagactgggcttccaccgagcaggtgtggaaacaggaagagaactagaactggaagtaaagcattgaagatgtgactgaattgc

SEQ ID NO: 319592 - DNA, 75 bp, Homo sapiens
agtacatggatgcttgttggatgaattaatgaaccttgacccacaccaaggactgcccacagatcctgccctcca

SEQ ID NO: 319593 - DNA, 82 bp, Homo sapiens
gcctgcggagcctgtggggcagcacatgcagatgacaatccaggctctccaggatgaattgcggatccagagggacctgaat

SEQ ID NO: 319594 - DNA, 83 bp, Homo sapiens
agacacaatctattctgctgattcacaattatggagactgttgagtgacctgcaggaagaaggcaagaatgccatcaactcac

SEQ ID NO: 319595 - DNA, 101 bp, Homo sapiens
aaagctgtgagaacaactacacgttacgctattcgttgtggtccaaaacagtttacctcttatctaacagctattggatgaactcccaatgatatacagct

SEQ ID NO: 319596 - DNA, 98 bp, Homo sapiens
caggagcattgtgtaattctaatccagagctggtgagagcggtgactttggaggaaactcaagagtatacccgaaatgttgttagatattgccttgaa

SEQ ID NO: 319597 - DNA, 50 bp, Homo sapiens
aaagagcttctctccagagtagaaagatggagtctcactttgttgcccag

SEQ ID NO: 319598 - DNA, 76 bp, Homo sapiens
ggctatggtcaatattcctaggaatgggaacattactctggggccaggtttcctatcctgggagcaggagagtgtg

SEQ ID NO: 319599 - DNA, 101 bp, Homo sapiens
aagcctgcccagacggctcacctgtgcgggatggaacaaaaggtaccgggaagccagtgttgaagtgatggagataatgtctcgttttgctgtgattgaac

SEQ ID NO: 319600 - DNA, 74 bp, Homo sapiens
aggttagaaggccttgtgctcacccaccaacaatttagtagttgcaggaccagctctgccccctaattataaaa

SEQ ID NO: 319601 - DNA, 74 bp, Homo sapiens
aaagggaagtgaaaagagatctgttttcagaaagcggcagcccagaatctcgtgttaatgcgatccatttcttg

SEQ ID NO: 319602 - DNA, 75 bp, Homo sapiens
aaaaacaatagctcaaggaaacctttccaacacagatgtccaagctgccaaaaatgttttagcaagtgcatcagc

SEQ ID NO: 319603 - DNA, 82 bp, Homo sapiens
tcaaggcacagcataaacacctaaaagaattggaggctttcaggtgtgagctctttgaccagaacctgaagctagctctgga

SEQ ID NO: 319604 - DNA, 101 bp, Homo sapiens
aaactgcagccagttactatggcagttgcaaaatattcaggagaccgtcgttgccttgtatttccagagaacaggcccatctttggaaaaaagatctggga

SEQ ID NO: 319605 - DNA, 85 bp, Homo sapiens
aagccaggggacatccgccatgctccaaacaacttggcctcaggtgtttgtaaaatgtatgaagaacatctgaaaagaatgaatc

SEQ ID NO: 319606 - DNA, 100 bp, Homo sapiens
tgttggactcatagtcactgccagaaaggtgtctgacttccagcaactgctggcctgtgccagggtgcaagctgagcactggagtggagttttcctgtgg

SEQ ID NO: 319607 - DNA, 75 bp, Homo sapiens
ctttgtacatcctcacccacaagcgcattctgaagttcctcaaattgtttgtggcagctgccaacaagaagcatt

SEQ ID NO: 319608 - DNA, 75 bp, Homo sapiens
cttacttctccgccaacgcggtcatctcgcagaacgccatcaaccagcttctgaacaacccagtcctgccagctc

SEQ ID NO: 319609 - DNA, 97 bp, Homo sapiens
acagattggaaattaattgctatcaatgcgaatgatcctgaagcctcaaagtttcatggtgtcatggagaaactccagctgggcccagagattctgc

SEQ ID NO: 319610 - DNA, 100 bp, Homo sapiens
gtttgctgctgccactggagccactccaattgctggccgcttcactcctggaaccttcactaaccagatccagctgcgatctcttggagcgaccagaccc

SEQ ID NO: 319611 - DNA, 75 bp, Homo sapiens
caaaccggggtctccctcccaggacacaggagtcaagattcacaatgacatcctttcaagaagtcccattgcaga

SEQ ID NO: 319612 - DNA, 80 bp, Homo sapiens
tcaggcaatttccctgagaaccgtttacttccagaagattggtggagcttgatctgaagcatttcagagaaaagctgcct

SEQ ID NO: 319613 - DNA, 100 bp, Homo sapiens
cttggtgctgctagaatgcaggaacagcagccgctttggcagagatcacggagatggtggcacagctccacggtacgatgatcaagatggagaatttcca

SEQ ID NO: 319614 - DNA, 82 bp, Homo sapiens
ggcgcagtttctcacgacgggccgagcctgccactaccatggtgaatccgggcagcagctcgcagccgcccccggtgacggc

SEQ ID NO: 319615 - DNA, 102 bp, Homo sapiens
gcgggagcaccggaggcgggggcggcttcgaccccccgcccgcctaccacgaggtggtggacgcggagtacgacaaagagattattgtcatcaatacagcag

SEQ ID NO: 319616 - DNA, 103 bp, Homo sapiens
atggctggacagctagctgcttatggctataaaattacaggccaaatttgagtttcatcatggtgactatgaaaaacagtttctgcatgtactgagccgcaag

SEQ ID NO: 319617 - DNA, 95 bp, Homo sapiens
agatggcagcgtcgaagttggtattaaacaattgcctgaaagtgaaagcttcaaactgattgcagcaattctccggaaacggaaattagactatt

SEQ ID NO: 319618 - DNA, 90 bp, Homo sapiens
gttgttgctgttcagttctgtaacaatggagacagtccaatggatgggaccccaatgaaatgttcaagttcaatgaggagaactacggtg

SEQ ID NO: 319619 - DNA, 59 bp, Homo sapiens
gttcccaccggcagcaaatatggaatatatggaaaatcatcagcgtgttagcattttct

SEQ ID NO: 319620 - DNA, 83 bp, Homo sapiens
aggagctgtgcagccgcgaggaggcgcgggaggtgttcgagaacgaccccgagacgagaggtggagaagagcgagtacttgag

SEQ ID NO: 319621 - DNA, 100 bp, Homo sapiens
ccggggacactttgcgttcgggctgggagcgtgctttccacgacggtgacacgcttccctggattggataaacaggggtcacatgacgacagaagccaag

SEQ ID NO: 319622 - DNA, 101 bp, Homo sapiens
gctgcccagaaagcagttaacagtgccaccggtgttccaactgtttaaagtgtttggaaaaattacagcctgcctatcaagtgacccttcccggacaagag

SEQ ID NO: 319623 - DNA, 100 bp, Homo sapiens
gagagccctctccacctcggaagagctgtgtaatggaacaactagatgttggtattgttccatatattgtccttttagttgttcctgtattaggaagaat

SEQ ID NO: 319624 - DNA, 100 bp, Homo sapiens
agagaaatggagcccttctccaagggctgggagagggttctgccctccttcatccagacagcaggtctcatcctaggtccttagagaaaagtgcctggag

SEQ ID NO: 319625 - DNA, 100 bp, Homo sapiens
aattgttaggcgtggagagggagtgatgtcttccagactcggtgctgtacccgcctatcgtcgtcctccccgcagtcaggctgcccatcacccaccattc

SEQ ID NO: 319626 - DNA, 82 bp, Homo sapiens
gcagaaagcaggcgaacccgcggcgcaataacgccgaggtgctcggtggagtcatggcagtgccctttgtggaagactggga

SEQ ID NO: 319627 - DNA, 74 bp, Homo sapiens
atgcccttcgaaaaatgatcaactattgaccatatagatgatccagtattcctggaagaagcagggaaagcaga

SEQ ID NO: 319628 - DNA, 90 bp, Homo sapiens
gaaaacccccattcattctggattggtggatctgaagtacaaaatattttccagcaattctgtggtgttcttggtcacacatttatggag

SEQ ID NO: 319629 - DNA, 100 bp, Homo sapiens
taacggagatcctgatgaagttcgagcactaatatttaagaaagaagatgttaactttcagatgttggccgatgatgcagaagcaggtgccgaggatgag

SEQ ID NO: 319630 - DNA, 82 bp, Homo sapiens
cgggctcctggacttcgcctttcccgagccctggaggtggggagaaaagagctgttccagacaactataaggtgatttttct

SEQ ID NO: 319631 - DNA, 98 bp, Homo sapiens
agaagaggagatgcgtgataccaacgaccctgtgtgagcagcttcggaaggagaacgaggctctgaaggccaagttggataagggcctggaacagcgg

SEQ ID NO: 319632 - DNA, 100 bp, Homo sapiens
gctggatttaagcactgctgcactttatgaggacctcagcagccatgtcgaagccccatagtgaagccgggactgccttcattcagacccagcagctgca

SEQ ID NO: 319633 - DNA, 98 bp, Homo sapiens
agaaccagatccgggagcacgtcatcgccatcgaagctgggagtgtccactcgccttccaccagcatggcaacgtcttcacagtaccgccagctgctc

SEQ ID NO: 319634 - DNA, 83 bp, Homo sapiens
ggatcaagatcagctccaggcctgggaaagtgaagatttcgatggggtcctctatcatatttcaaatcctaatggagacaaaa

SEQ ID NO: 319635 - DNA, 75 bp, Homo sapiens
atttgatcctgattctacccaagtacatatgatttcagctgcaatggcaggttacaggaaatacaggaggcagag

SEQ ID NO: 319636 - DNA, 98 bp, Homo sapiens
tgttttggggattccactctccagtgtaatgattattgacaacagatacgtggacagttcaaaggctgttattgagacagcagatagagccaagctgc

SEQ ID NO: 319637 - DNA, 100 bp, Homo sapiens
aggagaccatcaaaggattccagcagattttggcagatactagagtaaaaggatggtttcttctggacaattatatacccacatttatctgctctgtcat

SEQ ID NO: 319638 - DNA, 104 bp, Homo sapiens
gaatttgacagtttcctgccaggcgccatcatcggcatagcccgggagatgcagccagtttacagcaaaaaatcccagaagtgggatgaaatgaacatcttggc

SEQ ID NO: 319639 - DNA, 80 bp, Homo sapiens
cggagattcagactttccacctgcaggtgaggtcccagcttgaagagaaagaaaacaagaagttccctgtgtttaaggcc

SEQ ID NO: 319640 - DNA, 96 bp, Homo sapiens
gaatcattctcaccttgtatgctttactggaagagaaagccaatacccacctcctcttgggcatgtgcttagacgcctgtgctcgctaccttctgt

SEQ ID NO: 319641 - DNA, 82 bp, Homo sapiens
cgtcgctgaagctggcgtggcgaggcacgttctgcagctccagtttaaagatctcagaggtgaaatgacaatggatgctctg

SEQ ID NO: 319642 - DNA, 50 bp, Homo sapiens
cgcagagtcggcacctgaaggacatggagtaatctcaggggcgatataat

SEQ ID NO: 319643 - DNA, 98 bp, Homo sapiens
ctgtggcagcagctcagaagaggacgataccatgctgtgaagtccaggccacatggaggtgtcctgtgtagatgctccagctgaaatcccaagctaag

SEQ ID NO: 319644 - DNA, 75 bp, Homo sapiens
attgtgaaggagggttggctgcacaaacgaggtgtttcagtcacctccagtaacacgggcgtgccagatatctcg

SEQ ID NO: 319645 - DNA, 46 bp, Homo sapiens
tttactgaagaggaggaagcccagggaaacaaaggacccatcgcaa

SEQ ID NO: 319646 - DNA, 100 bp, Homo sapiens
ctgctgtctccttctcttcctcagggctcccgtgtctgctcgccctccgacgctgctcagttgccaccttccagagaagaggtacgagatgacaagacaa

SEQ ID NO: 319647 - DNA, 74 bp, Homo sapiens
tgcgggtgtctgtaggtcttctcctggtgaaaaggcactgcctccttacctgtgaggaatgcaaaataaagcat

SEQ ID NO: 319648 - DNA, 50 bp, Homo sapiens
cggtctccgaggatggagatagctcaggaaaggttatttgtcaatgaaga

SEQ ID NO: 319649 - DNA, 90 bp, Homo sapiens
agaagaccaagtacctgcagatcctgacctctctgatgagatggatcgccctgctggtttaccgtgtcttcaggaacgaagctaaacgca

SEQ ID NO: 319650 - DNA, 100 bp, Homo sapiens
cagtccgtatagtgtagtgtgcaagtattttcagcgagggtactgtatttatggagaccgctgcagaatagctgaaacctttggacttcaagaaaattat

SEQ ID NO: 319651 - DNA, 98 bp, Homo sapiens
gaaagagaagctcttcctgtgagaatacagtcgttttgaagctaaaatacatgatttacgggagcagatgatgaatagtagtattagttcagggtcag

SEQ ID NO: 319652 - DNA, 75 bp, Homo sapiens
agctcggatccatgtcacttgacgagcaacagggcagagatcctacaagaatccaggatgatgatcccagattgc

SEQ ID NO: 319653 - DNA, 50 bp, Homo sapiens
gaagaaatccacagatttagttctgtatcaaattgtagtggaaataatcc

SEQ ID NO: 319654 - DNA, 98 bp, Homo sapiens
tcactggtttgtgtccagagccggactgattctctcaatttgcacatccgggaactgatcgaggtggatgatgtaatggaggatgattctctgcgatt

SEQ ID NO: 319655 - DNA, 74 bp, Homo sapiens
acagccactgcagtatcacagccagaccttaacacgtgaacagaaagaaggagccttctccaattttcctattt

SEQ ID NO: 319656 - DNA, 82 bp, Homo sapiens
tccgatcggaatcagccctgtccgagaggaaatggtcaacaagaggctcagagtcccatgagcttaatgaaggaggagatga

SEQ ID NO: 319657 - DNA, 83 bp, Homo sapiens
gctgcctctgtcactcctggtgaccagcattcaaggatcaccccttctgtgtcattctctgaggaaaacaagttcttctcaag

SEQ ID NO: 319658 - DNA, 99 bp, Homo sapiens
catacttggacatatcaagcattggtgcacgatgtactgatctacaactcttgaaaaagaagttcctgtcatcttcatccaccctttaaacactggatt

SEQ ID NO: 319659 - DNA, 100 bp, Homo sapiens
gaccccgtcccgaccctggccgccccgagcggagcctggaggatgaagccaacgcacacgatggtcaactgctggttctgcaaccaggatacgctggtgc

SEQ ID NO: 319660 - DNA, 100 bp, Homo sapiens
tgagaaacccaaacctgtaaaaccagtgacgttttccacaggcatcaaaatgatctactggaagagacccaaagaaaagatgaagaaatgggatctctgc

SEQ ID NO: 319661 - DNA, 50 bp, Homo sapiens
cctatatcagacttaatccttaaaagaagtttgtcccatgaggagcaccc

SEQ ID NO: 319662 - DNA, 101 bp, Homo sapiens
tgaagctagctaaagaagttgatcctcaaggcgaaacctaaccaaactgtccctcatcttcagccacatgctggcagaactaaaaggaatctttccaagtg

SEQ ID NO: 319663 - DNA, 75 bp, Homo sapiens
catgaatggagcaaaatggcggatcatgtgcaggtggtcttcaagctgacagagaagctgacggaacagaaggag

SEQ ID NO: 319664 - DNA, 100 bp, Homo sapiens
gaaagttcgggatttctgggatggtttcgagatcatatgcagtacaggtttgcagattccgccagcagcacagcaagctctacagatgagtggctctttg

SEQ ID NO: 319665 - DNA, 100 bp, Homo sapiens
tgcacactgggttgcagcctatggcctgttatttgtctcaacaaaagacaagatggattctggatatactctgagtattgtaacaaccacctggatgctt

SEQ ID NO: 319666 - DNA, 100 bp, Homo sapiens
ggcatcttgacttagttgctgggagcctggcatttccctggaaatggcagctgtgacagtaaaggaagaatcagaagatcctgattattatcaatataac

SEQ ID NO: 319667 - DNA, 100 bp, Homo sapiens
ataacggcaacatgtacaagagcatcatgaccgtctgttcccgttcagttccaatattttttgccaacttaccccccttctgcatacccactggcggcac

SEQ ID NO: 319668 - DNA, 75 bp, Homo sapiens
cgtctctctgctgcggcgcggggaccgctgtgctctcggcatccgtgggctctgagaagctctttgcgccgggaa

SEQ ID NO: 319669 - DNA, 51 bp, Homo sapiens
caaggacgagccggggcgctgaaggatcagttcttaagagcagccccggta

SEQ ID NO: 319670 - DNA, 100 bp, Homo sapiens
ggttagtgtgctctgagggagggtccgagccagccgctgttttgccggaggagcccctcaggccgtagacatagctgacattgagaatgaagagaaccgc

SEQ ID NO: 319671 - DNA, 96 bp, Homo sapiens
atgacttcttcctccttgctgagctcctgagtgactacattcgcctcctggccatagtccgcccccggggcccagcgacctgacagttacaggact

SEQ ID NO: 319672 - DNA, 83 bp, Homo sapiens
ccagatcccggacccaaaccatgttccctgtgaaggtgaaagtggagaaatcagtgcatgcaagagatgggaaatggaaaggc

SEQ ID NO: 319673 - DNA, 80 bp, Homo sapiens
ttgctgtttgtgagcctgtggcgcggcttctgtgggccggaaccttaaagattggcggcagtaagcacacaatgaatgat

SEQ ID NO: 319674 - DNA, 100 bp, Homo sapiens
atttattagaaaaatgcctaaagaacatccacagaatagacctgaagacaaaaatccagaagtacaagcagtctggtgtcatggagaaactccagctggg

SEQ ID NO: 319675 - DNA, 82 bp, Homo sapiens
caggaacggcctgcctcaccgtctatgattactacaatgcagctagaacgtgaaaaggctcttgaacataagaatcgaatgt

SEQ ID NO: 319676 - DNA, 97 bp, Homo sapiens
gcgccgcgcccggggccgtgcgctctcgggccactcggccgcaggtatccgcccccagatcatgaacggccccctgcacccccgccccctggtggcg

SEQ ID NO: 319677 - DNA, 50 bp, Homo sapiens
gtcagaatgccaatacaagcagttggctcctaactgggcaactcaagatt

SEQ ID NO: 319678 - DNA, 75 bp, Homo sapiens
tatctgtgataaagttggtcagtctcgcactggaatcgagagctccagatcatgagaaagctagatcactgtaac

SEQ ID NO: 319679 - DNA, 75 bp, Homo sapiens
caaattcgcctccatctgtaccatgaggaggcctaccagaaactggccagcgagaccctggaggagctggactgg

SEQ ID NO: 319680 - DNA, 82 bp, Homo sapiens
cgagaaggaggacgggctccgtggctggttcccggcgagctacgtgcagttgctggagtgtactaatggtcacttgatgtgc

SEQ ID NO: 319681 - DNA, 100 bp, Homo sapiens
cttgccgcagccagcaactatttcaggtattatagctgcaaatgtccttgtattctgtttatggagagtaccttctctgcagcggacaatgatcagatat

SEQ ID NO: 319682 - DNA, 119 bp, Homo sapiens
gttccaccttcagagcgtcacggcgtacgccctcatggggaaaatctccccggtgactttcaggtattaatctctggagaagacacatccacagttagcactttcttcagatgctgacg

SEQ ID NO: 319683 - DNA, 74 bp, Homo sapiens
gacgatgaggatgacgaagatgatgaggatgacgatgacgatgaggaagatggctgcagagagactaagggcac

SEQ ID NO: 319684 - DNA, 75 bp, Homo sapiens
accgtatcctgggcgacccagaagccctgagagatgtatcggcaagcagtgtaaacggaggacttggggaaaaag

SEQ ID NO: 319685 - DNA, 90 bp, Homo sapiens
aaacattatcaggaaggagccaggacaaaggcttttgttcagatcatcagaaaagcccttactgaggaaaaacgtgtctcaacaaaaaca

SEQ ID NO: 319686 - DNA, 98 bp, Homo sapiens
gacccaggatgaagaggttggagatgggaccacatcagtaattattcttggcatcgccgaatggaggctgtgcgactgcgaaaagagaaccagatcta

SEQ ID NO: 319687 - DNA, 97 bp, Homo sapiens
gccggcggctgggactgaagagggacgggtcccgcggcgagcgagctcctgagtgaactttgaggcgctgatcatcaccatgtcggtagtcggggga

SEQ ID NO: 319688 - DNA, 100 bp, Homo sapiens
ccacctggaagcaagtctgcaactccttcaccatccagttcagtgcatgaagatgaaggcgatgatacctctaaggttacaactgatggaaaaccaaaaa

SEQ ID NO: 319689 - DNA, 75 bp, Homo sapiens
cagccacccatcacggaatggagagccagaggccccacagcctgggcaagcatggcgtgggccgtattgacatcg

SEQ ID NO: 319690 - DNA, 82 bp, Homo sapiens
gccagcaatcctcagacgcctcacttaggacaactggaaaaggattttggtctgagatgctgggcgtgggggacttctatta

SEQ ID NO: 319691 - DNA, 90 bp, Homo sapiens
ttgcggaagtaggaggaagtagaagtgctgagtaagccgagatcctcgttgcctgctaaccaacggcaagctgccactgtgggcaaagcg

SEQ ID NO: 319692 - DNA, 100 bp, Homo sapiens
aatcaccagaacaaaatgtgcaggtggtgcccaggcaacatgggtgactggagcgccttaggcaaactccttgacaaggttcaagcctactcaactgctg

SEQ ID NO: 319693 - DNA, 50 bp, Homo sapiens
agcctcccaaatagctgggactacagaggagaggagacgccgtgagcggg

SEQ ID NO: 319694 - DNA, 76 bp, Homo sapiens
accacagatttcagcagcacaatcaacgcaaccacagaaacaagtggtacaggagttgtaagacgttcatcgccgt

SEQ ID NO: 319695 - DNA, 75 bp, Homo sapiens
aaaccttacctttattggagacaaaaccagctccagcattgactttctagcaagccagggatttgattttaataa

SEQ ID NO: 319696 - DNA, 100 bp, Homo sapiens
ccgctcaccgcagacgtggtggctgcagtcagtcttcccgagtgagggatttcgccgcccgctttcaggcccgtatgcatttttgtagaagcattttgag

SEQ ID NO: 319697 - DNA, 101 bp, Homo sapiens
cagaacggcacggccatctgtgtgtctgggcagtgcaagagttttcggtttggtgtggaaatagcttatgtgggagctactatcttggatgtttgcaagag

SEQ ID NO: 319698 - DNA, 100 bp, Homo sapiens
cgacatggaacagggactcactggggcaaacccgcaggtctcctccacggctgtcagcagcttctcgtagagcttctcataggactcatatggtggaatg

SEQ ID NO: 319699 - DNA, 90 bp, Homo sapiens
gagagcttcatcaaaaatagtgatagctttgataagaccctgatgcttggtgtgacctgagtaaatttgacctccctgaggaaccatctg

SEQ ID NO: 319700 - DNA, 75 bp, Homo sapiens
gcctggaagaactcgtcatgctctttgtagcgtggtgcttctgttgctcacaggaactgtggctgcaccatctgt

SEQ ID NO: 319701 - DNA, 100 bp, Homo sapiens
cttggttatgacagtggaaccggggtttggagggcagaaattcatggaagatatgatgccaaaggtgttatatgaacttcccaccaacacacagtggtgc

SEQ ID NO: 319702 - DNA, 101 bp, Homo sapiens
aatgatctgttcacaaccgagatgagatatgcgccgactaccaggaacgcttcaaccccagtgccctgaaggactcggccctgtccacccacaagcccatc

SEQ ID NO: 319703 - DNA, 101 bp, Homo sapiens
ctcagaccctactttgatgtggagcctgctcaggtgcgaagcagaacaccttccaccatgaccacctcagcaagttcccacttaaataaaggcatcaagca

SEQ ID NO: 319704 - DNA, 100 bp, Homo sapiens
ggctgtgctcagcgttgtgggaagcccctgggaggccgaatgtgcaggatcaccgaggggaaagtgagcttgacagctgtgtcagcgtgttatgatgccg

SEQ ID NO: 319705 - DNA, 100 bp, Homo sapiens
gacagaaatggaaagacgccccttatggcgccatgatagcagtggcagtggacattcagcatttgagcccctggtggccaatggagtccccgcttctttt

SEQ ID NO: 319706 - DNA, 83 bp, Homo sapiens
gtcagtgatttccataaattgaagcaaagttaccttttcgacaaaatgattcatctagtcattgccagaagagtgggtctcct

SEQ ID NO: 319707 - DNA, 82 bp, Homo sapiens
ggctcgcctcgactccaaatggttgaaaacagatatacagttcgtaggtgtaaagctttgaaggaaaaagatttaattagaa

SEQ ID NO: 319708 - DNA, 100 bp, Homo sapiens
ctgagtgacctcagtagatgccacgtgggacaggagaattctctagtggaacctaacttcttgtggaacaagtgttgccagctcagaaggcagtgaggag

SEQ ID NO: 319709 - DNA, 83 bp, Homo sapiens
cactctgtgaccagctggagctgtgcctggagaaagaattgtgccatgaaaaatggaaaactcctgagaagctgttccagcgt

SEQ ID NO: 319710 - DNA, 90 bp, Homo sapiens
ggaggcggaactgcggagttgctgggtccaccgacccttaccctcagcgagagaagtaaccgttttcttggagcagaagaaaatgttaaa

SEQ ID NO: 319711 - DNA, 75 bp, Homo sapiens
caaagtgccatgtctttaatggtcgagctgtgcagttttagcgggtacaagatctaccccggacacgggaggcgc

SEQ ID NO: 319712 - DNA, 100 bp, Homo sapiens
gaaaccaatctagattttagaagtgggctggctatagtgagccaacatgatttagaccagggcactccacagaaggatgttattatcaagtcagatgcac

SEQ ID NO: 319713 - DNA, 108 bp, Homo sapiens
gaatgagtttcttactcgggagctggctgaagatggctactctggagttgaggcgcggatcaagaagatcatgcagacggacgaagagattgggaaggtggcggcggc

SEQ ID NO: 319714 - DNA, 100 bp, Homo sapiens
cggcctgcaggtcacctacctgaaggacaacagcacccgtaacatcttcatctaccatgaggacgggaagggcgaagctgtgctcaggcccgggctggac

SEQ ID NO: 319715 - DNA, 100 bp, Homo sapiens
ggaaaaagctccaggattctgacagggatgttgcgaaggttagctttatacgtctacgaatatttactgcacgtaggagcacagaaatctgcacagacct

SEQ ID NO: 319716 - DNA, 98 bp, Homo sapiens
tagggaccctgctgaatagctggggctacaggcgtgtgtcactgcgcccagataatctgcaaaatggcttcaatgctgagtaagagtaccgttgaacg

SEQ ID NO: 319717 - DNA, 100 bp, Homo sapiens
tggacaagaagattatgacagattacgccccctatcctatccgcaaacagtcttgtccaataagcatgtggctcctgatcatcttttgcaaatctgccag

SEQ ID NO: 319718 - DNA, 75 bp, Homo sapiens
acagtcaatcaggttctggcctcccgatacgggggcttccgttacaagatgaggtctgtgtatgctcacttcccc

SEQ ID NO: 319719 - DNA, 101 bp, Homo sapiens
gtcataaagaggaacaggcattatacgcaaggctgaagaagcagttggtaactaacagtacatctttttctaagaatcaaagaatcttcaggatggcagca

SEQ ID NO: 319720 - DNA, 98 bp, Homo sapiens
ggaagctacacttttcaccaaggaactggtgctgcagcgagaggtccttccatagtgacgccccccaaggacatctggaatgtcactggtgcccaggt

SEQ ID NO: 319721 - DNA, 50 bp, Homo sapiens
aaagaagatgatgtccgccagtatgttataaaagaagccaatttctgggg

SEQ ID NO: 319722 - DNA, 98 bp, Homo sapiens
tgatacatatctatgtgaacgttgtcagcctaggtgaaacctggagatgacttagaaagtgatcgatacttaatcacagttgaagaggttaaagttgc

SEQ ID NO: 319723 - DNA, 97 bp, Homo sapiens
tcctctcggtggtgcagctcaatcctttcccttcagaacagctgccctacctcaagtgtccgctgcacacagtcctgaagctgactcctgtggcata

SEQ ID NO: 319724 - DNA, 90 bp, Homo sapiens
cagtccccgcgcgtggtcatccagaaaaacgtttcttcatttcaactcaaacttgctgctaaagcgcctaaatctgaaaaggaaatggac

SEQ ID NO: 319725 - DNA, 90 bp, Homo sapiens
cagacaataggaggcaaaatgttggataaatatatctatggagcacagtcaagagaatccatcccattaaatgacctgaagtcagaagta

SEQ ID NO: 319726 - DNA, 96 bp, Homo sapiens
atggacccagccctgcgtgaggccgcggagcgccagctcaatgaagctgctgagcttcgtgcttatctgaaatctaaaggagctgagatttcagaa

SEQ ID NO: 319727 - DNA, 85 bp, Homo sapiens
acttcagcacctgtggcttcaggttcctgagggtctgtgtgccagctctcctacgctcaccagccctatggagtatccatctccc

SEQ ID NO: 319728 - DNA, 96 bp, Homo sapiens
ccgctcgctgggagagaggtacctctccttttccctctccctttccctaagtgccgcgtatgatgctgtccttgacagaaatgtggccattaagaa

SEQ ID NO: 319729 - DNA, 83 bp, Homo sapiens
ggagccctggaagcagcagctcaccgaggacggggactcaccctggctgggcatccatcagcaggggtgtgctggtgtgtgac

SEQ ID NO: 319730 - DNA, 100 bp, Homo sapiens
agaggcaaatgaagagatttttatcacagactggtggaagccagttgagggaagttctccatgaatgtacgtcacaatgatgatgaccgaccaaatccct

SEQ ID NO: 319731 - DNA, 75 bp, Homo sapiens
acgtcgtgatccagaagtccagagctgaggactgcctgtttgcagcccacagcccccatcccgtagcccttcctg

SEQ ID NO: 319732 - DNA, 100 bp, Homo sapiens
aagatcctcaagaagaagaagttgcgaaggatccccaacggggaggccaacgtgaagaagaatactcccccagttgcaagaggcgcaggaccgtggaaga

SEQ ID NO: 319733 - DNA, 119 bp, Homo sapiens
tcgacgtcgtgatccagaagtccagagctgaggactgcctgtttgcaggtgaaaggtgtagcagtcactcggcctacacccacagcatcgaccttgtgaacccagcgacctgactgcct

SEQ ID NO: 319734 - DNA, 100 bp, Homo sapiens
aaaggcagccgcggatcgccgcgctcagcgacaaacaagatgataatgaagataattcaaatgatgggacccagccatccaaaaggaggcgaatgggctc

SEQ ID NO: 319735 - DNA, 50 bp, Homo sapiens
tctgcacctcgcgccccagcaggtgaaaaaccatttcgctgtgatgaatg

SEQ ID NO: 319736 - DNA, 75 bp, Homo sapiens
atgtcccttcaatagtcatgcttcctggtacttgtcaaacccaagatttccatggagaatgattatctgggacct

SEQ ID NO: 319737 - DNA, 100 bp, Homo sapiens
gtcctttatggtgatgaacatgtggctcagtctccctatattttgaaaggcttacctatttctactccatgtaccaccataaacaaagtttgtgcttcag

SEQ ID NO: 319738 - DNA, 87 bp, Homo sapiens
ctggacacccagcggtctgacatcgcgacgctgctcaaaacctcgctccggaaaggggacacctggattttttatcaagcagaaatg

SEQ ID NO: 319739 - DNA, 100 bp, Homo sapiens
aaagaatggccatctaatttagatcttagaaaagagttgtctgaaccaagcagcacgcgtatctatgccattgccaagcttcgagctggtccatttgatg

SEQ ID NO: 319740 - DNA, 100 bp, Homo sapiens
atatgaacaatccgtctggatcacggatgtaggaagtgatggagtctgcacgcaaagcatgggagaattctccaaatgtaagggaaaaggggtctccagt

SEQ ID NO: 319741 - DNA, 75 bp, Homo sapiens
catgggcaagaagcacaagaagcacaaggccgagtggcgctcgtcctacgaggggtttgaagaagatctctgcct

SEQ ID NO: 319742 - DNA, 75 bp, Homo sapiens
caacatcgatgggcggcggaaaatagcctttgccatcactgccattaaggtgaatcacaagcctttgagaacagc

SEQ ID NO: 319743 - DNA, 100 bp, Homo sapiens
ggctgggagcgtgctttccacgacggtgacacgcttccctggattggtccaaaagaaactcttccttcaaaacctgtgaagaaagagaaggaacagagga

SEQ ID NO: 319744 - DNA, 90 bp, Homo sapiens
gttcgcgcccgccgacccgcgccctgctccctctcagcacctgggcggacgatcctaacacattttgaggtgcagcctgagccaggtgcg

SEQ ID NO: 319745 - DNA, 83 bp, Homo sapiens
caggaattatattatgtgtttgataagtttattttaacctctggcaaggcttgaaaaggaatacactacaataaaaacgaaag

SEQ ID NO: 319746 - DNA, 83 bp, Homo sapiens
gaagccgcaaccagagccgccgccacgcaattctgtggtgttcttggtcacacatttatggagtttctgaagggcagtggaga

SEQ ID NO: 319747 - DNA, 82 bp, Homo sapiens
gaattaggtggtctgactaccagtggctctgcagaggctaaatttggccgaagatggaccaaaatttcaaagctaattggaa

SEQ ID NO: 319748 - DNA, 75 bp, Homo sapiens
ctacagagcaggagttgccgcagccccaggctgagacagtctgaagatgatgagaaactgaaaaagaggaaggag

SEQ ID NO: 319749 - DNA, 75 bp, Homo sapiens
gagcgaggcagctgtactaggactgggaacgggtgtcacaacataatgaaagttgctcaagccaaactggaaatg

SEQ ID NO: 319750 - DNA, 87 bp, Homo sapiens
cgcagtggtcgcttcttctccttgggtaagcttgatgattaccaggaacgaatgaacaaaggggaaaggcttaatcaagatcagctg

SEQ ID NO: 319751 - DNA, 98 bp, Homo sapiens
gaataaccgaaaaattgcagaagcacaagccaaactgctgccactgcagagccccgccatggaagacacgccgttggtgatatcgaagcagaagacgg

SEQ ID NO: 319752 - DNA, 75 bp, Homo sapiens
ctgagtggttgtgtggtcgcgtctcggaaaccggtagcgcttgcagcatgggaacagattctccgtgtgaaggct

SEQ ID NO: 319753 - DNA, 82 bp, Homo sapiens
gaagcactttctgagaaggaagatgtttgcaaggtaactctagcttgaagtagaaaatgccatgatgagaaaaactattaaa

SEQ ID NO: 319754 - DNA, 99 bp, Homo sapiens
ggtgggttttaaggaacttctccgaagactgaaggttcaagatcagatgactaagcagcatcaaaccagattagattagagacggggtttcgccgtgtt

SEQ ID NO: 319755 - DNA, 108 bp, Homo sapiens
agtctctggacaagatgaccacactccaggaatgccagtgcatcttttgcacagctgaggatgttgacaaggcagtgaaggccgcaagacaggcttttcagattggat

SEQ ID NO: 319756 - DNA, 83 bp, Homo sapiens
ccttacccttcgctcccagcccagaggcaaatttctggagatgtgcaatgatctcttagctagagtggagccaccacttcgta

SEQ ID NO: 319757 - DNA, 100 bp, Homo sapiens
cccaaccccaccatcccaccaaagggggctgctgaccgagagagctcactcagccaggtctcctctgagcctccggcctccataagacccaaaacagatg

SEQ ID NO: 319758 - DNA, 50 bp, Homo sapiens
gaatacttcagaagtggggaaatggctgaccccgcactacatctacccac

SEQ ID NO: 319759 - DNA, 101 bp, Homo sapiens
aacaagcggcgtgagcaagagttgcggcagaagcatgcggcccaggttcgccagcagcccaagagcctcaaaccggtggctgctggcagcggaatccccca

SEQ ID NO: 319760 - DNA, 82 bp, Homo sapiens
cgcgcgcgaccgccgaatcgctcctgcagcagagcctcccgcgacgatgcccctcaacgttagcttcaccaacaggaactat

SEQ ID NO: 319761 - DNA, 83 bp, Homo sapiens
aggagctggcggacatcactttagaccctccacctaattgcagagccaatgaagagattgctcaggttcgaacaaaagcaaag

SEQ ID NO: 319762 - DNA, 95 bp, Homo sapiens
gttaccttcgactttcagataaccccaggaaggtgcttcaatattggatattcacacagagcccagtttttcaagtttgctttcacagtcatcgt

SEQ ID NO: 319763 - DNA, 74 bp, Homo sapiens
gctgcggcctggcggcttccaggcgcactaccgcgatgtacggagcgcaagaggacggcagcgtcggcgaaggt

SEQ ID NO: 319764 - DNA, 75 bp, Homo sapiens
ggatagccaatcggaccaaaaattcactcactttgcaatggaaggtggatctccttacgtagcagccaaaataaa

SEQ ID NO: 319765 - DNA, 99 bp, Homo sapiens
atggaaaacggggatttccaccatctgtcccagatcagcccggaggaagaggagcgccgccgagtaaggcgcgagcggaacaagctggctgcggccaag

SEQ ID NO: 319766 - DNA, 75 bp, Homo sapiens
aaatgagacaattgaagctcaagcagagcttacagtgcaaggtataacccggaaaaatcccagaacacctctttc

SEQ ID NO: 319767 - DNA, 100 bp, Homo sapiens
catggaattcatatggtccacacggaggtcagctgagtccgaggaggcctgcattgatgagaacctggaggtggtgcgcttcttggtggagcagggcgcc

SEQ ID NO: 319768 - DNA, 100 bp, Homo sapiens
ttttgattaacctctcaaaggatgactggagtccttcagctcctacttaatggaagcctcgcagatgcaagatggctccagcaggcccagcatcacttct

SEQ ID NO: 319769 - DNA, 100 bp, Homo sapiens
tggacaggaggtcatacagctgatactacccacccccggttacgcctgtcacataaagggttttggccaaattgggcgagggcacaaaataaccacttac

SEQ ID NO: 319770 - DNA, 88 bp, Homo sapiens
tgtggaagggctaaaggaactagtacatctggaatggctgaatttggcaggaaataatcttaagttggagttactggaagtgcgcaga

SEQ ID NO: 319771 - DNA, 80 bp, Homo sapiens
caagcaggtccggacccactggctgctggagcttgtcaccaccagactgtgccctgtccacggtgcctcctgcatgtcct

SEQ ID NO: 319772 - DNA, 76 bp, Homo sapiens
tcattatggagccatgggggttggccactgaaccctaaggactctgcaatatgaataattccctagagaacaccat

SEQ ID NO: 319773 - DNA, 76 bp, Homo sapiens
gtttttctcaaaggaaagctgttcttctcaccactaaatccaatacgagttcatattgatattggagctgatggca

SEQ ID NO: 319774 - DNA, 100 bp, Homo sapiens
cagccaccttccctctcacattcggattctgggctcggatggcgggtgagcgaggagccagtgctgtcctctttgacatcactgaggatcgagctgctgc

SEQ ID NO: 319775 - DNA, 100 bp, Homo sapiens
gatgccgtcacgtacctcgcaggggtctctggatccacttggtggctggcctacgtcctcctgctgctcctggagctgctggtctgcctcttcaccctcc

SEQ ID NO: 319776 - DNA, 95 bp, Homo sapiens
cgcagcacccctaccagtgggcgaagcccaagcccctgtcccctacgtcctacatgaggtgaaatgacaatggatgctctgttggctcgattgaa

SEQ ID NO: 319777 - DNA, 97 bp, Homo sapiens
acaccggcccggggaggttgagaactgaatatactgatgataatgctctgattcctaagaattcttctgtaattgttagaagaattcctattggagg

SEQ ID NO: 319778 - DNA, 100 bp, Homo sapiens
cttagcttgtcggggacggtaaccgggacccggtgtctgctcctgtcgccttcgcctcctaatccctagccactatgcttcggaaccaaaaagaagcttc

SEQ ID NO: 319779 - DNA, 96 bp, Homo sapiens
caccttttgagacttcttgcctaaaagagacctacctccggatcaagaagaatgaatacagtattcccaagccaaaggtcattccaaatgctatat

SEQ ID NO: 319780 - DNA, 75 bp, Homo sapiens
accctctacagcgacgctgatgaatgggaggccaggagtggtggctcacacctgtaatcccagctctgggaggcc

SEQ ID NO: 319781 - DNA, 100 bp, Homo sapiens
catggaaaacttgcctgctctctacactattttccaaggagagagtgcctggaagagctgggatgtctggttgagtcctatggcatgaatgtttgccaac

SEQ ID NO: 319782 - DNA, 100 bp, Homo sapiens
cccggcactgcctggctgcgagcacatgatggcgatacgggagctcaaagtgtgccttctcgggttccagtgtctcgccccatcctcaccctcagggttc

SEQ ID NO: 319783 - DNA, 87 bp, Homo sapiens
tcaagggcgccgggcccacgcccttctccaggtatgacctggacgcgtgtgacattcaagaaaaatacccggatttatttcaagtga

SEQ ID NO: 319784 - DNA, 75 bp, Homo sapiens
cgcaccggcggcggccggagagcgggagttgctacgatggaagttaaagggaaaaagcaattcacaggaaagagt

SEQ ID NO: 319785 - DNA, 100 bp, Homo sapiens
cgccatcagctcggcagtcgcgaagcagcaaccatgggggccgaaggccagagaccaggatttggctacggaggcagagcgtccgactataaatcggctc

SEQ ID NO: 319786 - DNA, 50 bp, Homo sapiens
ttccaacttggtctgattttccaagctggagtccttttatgacacattcc

SEQ ID NO: 319787 - DNA, 80 bp, Homo sapiens
cagcagatgataatatcaagacacctgccgagcgtctgcgggggtgctctacaagctggcatggagcgagagcatggaga

SEQ ID NO: 319788 - DNA, 101 bp, Homo sapiens
tgagacggcggcagcagcggcattcaggttcagtatgctgcgtatgtaactgtgggaggcatcacctctgttattaagctgatgtttgcaggacttttctt

SEQ ID NO: 319789 - DNA, 100 bp, Homo sapiens
ttcgacaagaatctgcaggacttggtccgcggcatccgtaaccacaaggaggacgagacctgtcatttactccatcctttatagtgatgctacaggacga

SEQ ID NO: 319790 - DNA, 101 bp, Homo sapiens
tgtgaaagcattgatggaatgtgctttagaagttaaaaagcaccactgccggaactgtggccacatcttctgcaacacctgctccagcaacgagctggccc

SEQ ID NO: 319791 - DNA, 83 bp, Homo sapiens
ggtgagtcgcggtgggtcctcgcttgcagttcagcgaccacgatgcttcaggactgccccaaggcccgcagggaggtggagct

SEQ ID NO: 319792 - DNA, 100 bp, Homo sapiens
accaacagacaatgccaatttacgtgtcattatggaactacttatgagacattccactgcccttctcccaaaaagatgtcttttcgaaaaatggatccca

SEQ ID NO: 319793 - DNA, 74 bp, Homo sapiens
agaaaacagttccccctgcatgaaaagggcattgacactgagaggcccattctgcaagtggacagctgtgtctt

SEQ ID NO: 319794 - DNA, 82 bp, Homo sapiens
aattatgaaagaagtcattccttttttgaaggttcatctctaacaagtatttagtgaaacgacagagcagagactatgatgt

SEQ ID NO: 319795 - DNA, 82 bp, Homo sapiens
ctggaaattcattggacctgatcaacatcgtaatttctattactgacaagctctctactgatgatctgaactccctcattgc

SEQ ID NO: 319796 - DNA, 82 bp, Homo sapiens
aagaggggacaagtacctttatgaaccagtgtatcccaagtgtccctggccagtgtccttccacctgtccacaagcatgggg

SEQ ID NO: 319797 - DNA, 98 bp, Homo sapiens
tgtagctgttttgaatactcagaaatctgttctacaggaagatgctgagaaactgcggaaagaattgcatgaaggttcaaccttaaagtgcaattgca

SEQ ID NO: 319798 - DNA, 75 bp, Homo sapiens
aaagatgctggtatcaggactttggttatgttggatgaacaaggaggcattgcttctatgacagtgccagtgtac

SEQ ID NO: 319799 - DNA, 83 bp, Homo sapiens
cgggaagtgtgaagcggccaatggcacggaggcctgcgtcaatgcagagtccctggacaggctcctgccacctgtgggcactg

SEQ ID NO: 319800 - DNA, 75 bp, Homo sapiens
ggcactttgtctgatagtgaaattgagaccaactctgccacaagcaccatctttcgatgtgcattttgtaagcac

SEQ ID NO: 319801 - DNA, 100 bp, Homo sapiens
cctttatatagaagggagagtaggtgctggtaaacaatgccaaaactcatggagatacaagagcattggaactgaatcagagattgtcctcacaataaca

SEQ ID NO: 319802 - DNA, 100 bp, Homo sapiens
ctcgcttttcccctggccttctgtatcttcatggtgcggctcatcttcgagaggcccacagcagcagaacttttaaaatgcaaattcttccagaaagcca

SEQ ID NO: 319803 - DNA, 75 bp, Homo sapiens
ggacaacatgtcccaacattacatcccaagacagagatcagtgagtctggcatgacagtgagaagtactggctct

SEQ ID NO: 319804 - DNA, 100 bp, Homo sapiens
ggggcaagacgggttcagttcgtcatggggctgtttggaaagacccaggagaagccgcccaaagaactggtgctttgaagaagagtctcacagccaagca

SEQ ID NO: 319805 - DNA, 111 bp, Homo sapiens
cgcaacatggctgcggccgccgcctccgcctcccaggatgagctgacccgtggaacacagagcattcctaatgacagtcctgcccggggtgagggcacccattctgaagag

SEQ ID NO: 319806 - DNA, 83 bp, Homo sapiens
ctttgggcggggcggagccgagagccacactttcaagtaaaccaggagggtgaggacaaaatcttcttaatcaacaagcttca

SEQ ID NO: 319807 - DNA, 83 bp, Homo sapiens
gtctgcgagccaggattcccgaagtttccaagggtcacttgtgtctcgtccgtgggaagaccgggggagcccagaaggccttg

SEQ ID NO: 319808 - DNA, 100 bp, Homo sapiens
cggaggccgagaggcttaaggaggtatgattatcgggaaatgctgcacaatgccactttctgtctggttcctcgtggtcgcaggcttgggtccttcagat

SEQ ID NO: 319809 - DNA, 82 bp, Homo sapiens
tgagcggcggcctcggcctccggcgcagcccggaaatgtccggcaagatcgagaaagcagtattctaccttgtaaatactgt

SEQ ID NO: 319810 - DNA, 75 bp, Homo sapiens
ctactctgcctcggggacgaaagcagaacaacatagacgtttgtcctgaatgtggtcacctgaaacagaaacatg

SEQ ID NO: 319811 - DNA, 73 bp, Homo sapiens
cgcgggacgtggtataccgcgacatcaaggggttgctcaagaggctgaaagagaagaaaaaggccaggttgga

SEQ ID NO: 319812 - DNA, 75 bp, Homo sapiens
cggcgccatgtccctaatctgctccagacacagcattgttggttttgccatgtactattttacctatgacccgtg

SEQ ID NO: 319813 - DNA, 100 bp, Homo sapiens
cggaggcgttggcaagtcagccctgacgcttcagttcatgtatgacgagggtaggagtcaatgaagacatcttagtcttaacaagttacagataatctct

SEQ ID NO: 319814 - DNA, 100 bp, Homo sapiens
ccgagatttgcgacagcaagggggttgtccacgaggaacaaattgtacatttgcccattctcaggaagagcttgaaaacctctcctcctcccagttctcc

SEQ ID NO: 319815 - DNA, 100 bp, Homo sapiens
cagatgcccgggccgtggctctagcaggctccactaactggggctacgactctgatgggcagccaaaactggacaagccaaggcatctgtagccaaagta

SEQ ID NO: 319816 - DNA, 75 bp, Homo sapiens
aggaacagcagctcaatgccactgtcacattggcaatcatcacagagtgtccgagccacacccagcctcttggcg

SEQ ID NO: 319817 - DNA, 50 bp, Homo sapiens
gttgccttggtaggcaataaaagaagagaagttaaacttctagagaaacc

SEQ ID NO: 319818 - DNA, 96 bp, Homo sapiens
gtcttcaccactgggttcagccgcatgagcgagcggcagctggctctctggaatccgtgcaagcatctcttggcagtttacctgagtcaggttatg

SEQ ID NO: 319819 - DNA, 98 bp, Homo sapiens
tgtatagagactttgattcttctggatcgactttgttacctgaaagagcagctattactggagcatttggagtgccttgtgtcacgacatgaaagatc

SEQ ID NO: 319820 - DNA, 75 bp, Homo sapiens
aaaaaactccagctgtgaaagcaacataaatgagcccacaggcggttttgtgagctgcttccccaggagcagcgg

SEQ ID NO: 319821 - DNA, 82 bp, Homo sapiens
ctccatggcgaccgggctcggggagccggtctatggactttccgaagacgagaggccacaagaggaagctgaatgaagagga

SEQ ID NO: 319822 - DNA, 75 bp, Homo sapiens
aacagtgtaccagcagggcgttggctatgtgcccatcacagaatcacttggatttggagagctgcgcactttaaa

SEQ ID NO: 319823 - DNA, 83 bp, Homo sapiens
cggagatgcctggaatacagtaaggagtcatactccatgggtttatgtgataaatgatcttggcatagaagagaatttaaaga

SEQ ID NO: 319824 - DNA, 74 bp, Homo sapiens
taccgcgccctgcggcccgacctggcgggaggctgccggcgtggaccgcgggaaggcggggctggggctcggcg

SEQ ID NO: 319825 - DNA, 110 bp, Homo sapiens
cggagagctccagtgagtccagctcctctgacagcgaagactccgaaacagcctggtggagttgacagaagagatcctgaagctgctgatggaactggtcttccgcctgg

SEQ ID NO: 319826 - DNA, 75 bp, Homo sapiens
agaggtcctttatggtgatgaacatgtggctcagtctccctatattttgaaaggctccttcctcagagaagcttc

SEQ ID NO: 319827 - DNA, 82 bp, Homo sapiens
ctggcgtaaagacactgctcccagtaccaagttttgaaggatgctttcattggatttggaggaaatgtgatcaggcaacaag

SEQ ID NO: 319828 - DNA, 75 bp, Homo sapiens
gcgcgcttctcgccgtccccgctctccatgaagcagttcctggacttcgggaactgctcgcagaaagaagaaggt

SEQ ID NO: 319829 - DNA, 82 bp, Homo sapiens
cttcagagttctttgtggatggacttgattctgatgagagggtcctgcagttctgagcttgggttccctttgcctggacacc

SEQ ID NO: 319830 - DNA, 100 bp, Homo sapiens
acctgggctgttgttgcggttgttttccttctctccgtgcaacgctggcaagtctcaaagtcgccacagctgtttgcagacaaggtcccaaagacagcag

SEQ ID NO: 319831 - DNA, 117 bp, Homo sapiens
gccagccgcaccatgccgctcctaagcctgcacagccgcggcggcagcagcagtgagagagacaagaggagcagcagcggcaccgcccctcaccctggagggtcctgtacaatctca

SEQ ID NO: 319832 - DNA, 75 bp, Homo sapiens
ccgcccgcagagcaagcgcggggaaccaaggagacgctcctggcactgcagaattgaagagatccctatatgccc

SEQ ID NO: 319833 - DNA, 100 bp, Homo sapiens
ggatttgttaaggattccaagtaactcttatttggtaatggattaggaattagaattgtgggtggtaaagaaatcccgggacatagtggagaaattggag

SEQ ID NO: 319834 - DNA, 100 bp, Homo sapiens
caatgtgcaaaagaaggtggcactggccaagaagctcctggcaaaactgcgctttctggctgaggagcactgccagtgaaagatgtagaagataaacctg

SEQ ID NO: 319835 - DNA, 100 bp, Homo sapiens
cccgccccagaatgttcatctttagagcaagaggagcttcaagcattgcagatagagcaaggaggccgaatacatcaagcaatggtaacatctttaaatg

SEQ ID NO: 319836 - DNA, 82 bp, Homo sapiens
aatcactattaccgcaacaataggcagaatccagagaccacatttgaagtatatgttgaagtggcctatcccaggacaggtg

SEQ ID NO: 319837 - DNA, 105 bp, Homo sapiens
caagccagaagtccgcctggtgaagctgccgttctttaatatgctggatgagctgctgaagcccaccgaattaggccctgtttgtgctcttcgtcctggcctaca

SEQ ID NO: 319838 - DNA, 128 bp, Homo sapiens
cacagattctgttgcgaaggcagccatctttagttcgtctttcctagagaggtgtctgatgatttgtgagcctcaagtgactactctgtggaatcatctgtccttgcctttgaattagctttccctag

SEQ ID NO: 319839 - DNA, 75 bp, Homo sapiens
tttgtatgcacgacttgaagacacgcacttatcattcagtggacaatgcagatcttcgtgaagactctgactggt

SEQ ID NO: 319840 - DNA, 100 bp, Homo sapiens
tgtggttgtcagtcttctcatccctaagaaacagcaaaccagaggtcccgtctggctggcatgaatggaagggcaaacgctccgaccaaattgctctggg

SEQ ID NO: 319841 - DNA, 74 bp, Homo sapiens
accaccaccaagaccaaaactgagtgctttagcagaagccaaaaaggtcatcagaagattgagagaaagaggag

SEQ ID NO: 319842 - DNA, 90 bp, Homo sapiens
ccatgatgccccacttggtgaatggagatgcagctcagcaggtctgcatgaatttgattccttgaaggatcctgaagtaaatgaatttcg

SEQ ID NO: 319843 - DNA, 83 bp, Homo sapiens
acaaagaatagagttgagcctgtgggacacttcgggagcacgtgaattgcctctgcttacgttcaggccctgtcctaaaccca

SEQ ID NO: 319844 - DNA, 100 bp, Homo sapiens
acaagaagactgtccataggtctagacaatggtacaatctcagcagcagaagatgtcgttttcattggacctgacacacatgctattcaagccatgggcg

SEQ ID NO: 319845 - DNA, 75 bp, Homo sapiens
ccgggtccccgcgttcacagccccagcgcaggagtgcctgtgaagaaaacggggtattgccctgaggcttatatt

SEQ ID NO: 319846 - DNA, 100 bp, Homo sapiens
agcacggatggaaagatggagatgaacctctaacacagtggaaaggaaccgttctggatcagagtgtgaacatggctacgcctcttcattcccgtccatg

SEQ ID NO: 319847 - DNA, 82 bp, Homo sapiens
gcaagcaaggcaaaccccagcacttaagcaaacgggaattctcgcacatatgtagagtgtgtcggtcagaaggaacacctga

SEQ ID NO: 319848 - DNA, 75 bp, Homo sapiens
ggcgcggggaagcagtgggaaaatcgcaaggaagccgggtattctctactgccgctgatggtcaaacgcaagtgg

SEQ ID NO: 319849 - DNA, 51 bp, Homo sapiens
aaggtctctggagacatcttcagcaggtggtacagaagttggtcctgccct

SEQ ID NO: 319850 - DNA, 100 bp, Homo sapiens
tgctctaaaccttatagcctgcttatgggggaagggatgaccaaggtcaaagtgggtaaagaagactcatcatccactgagtttgtagaaaaacggagag

SEQ ID NO: 319851 - DNA, 98 bp, Homo sapiens
tcttgataaaaagagatgtggggggattctcgacctgctaacagaactggaccttttcggtaaaatgtcggttccaggaccttaccaggcggccactg

SEQ ID NO: 319852 - DNA, 149 bp, Homo sapiens
agaagaaccagcccgaggtggacatgagtgaccggggcatctccaacatgctggatgtcaacggcctctcatgccaatgaagatgtggaaagaatgttactaggaaacaagtgtgatatggacgacaaaagagttgtacctaaaggaaa

SEQ ID NO: 319853 - DNA, 74 bp, Homo sapiens
gagcatcttggatgtaggacaatggaagagttagtgtggacgaatgtggaacctcgctctgtggctgtgttccc

SEQ ID NO: 319854 - DNA, 74 bp, Homo sapiens
ggcttctgagacggcggcagcagcggcattcagtccaagtggtaagaagttcagaagcaagcctcagttggcaa

SEQ ID NO: 319855 - DNA, 100 bp, Homo sapiens
ggctactatttcaccaatctgggattgtgctgcattctgacttggattctgccatcgaacacagaatgccctgatccttagatgcagaggcagctcttca

SEQ ID NO: 319856 - DNA, 97 bp, Homo sapiens
ccagctgcgctgtcctaaatgtggcgacttgtgcacacatgtagagacctttgtatgtcccagtagggatggcacaatcagcgaggacaccatccga

SEQ ID NO: 319857 - DNA, 75 bp, Homo sapiens
ctaatctaagaggatccagcctacctggaaagccaaccagtcctcataatggttctccaaaaaatgtggaatcct

SEQ ID NO: 319858 - DNA, 74 bp, Homo sapiens
tgattgacagacttgaaaaagccagttctaatcaggttattgaagaaattgaagaaatgatgcaggaatcaccg

SEQ ID NO: 319859 - DNA, 75 bp, Homo sapiens
tgtctaggtgagtcgcggtgggtcctcgcttgcagttcagcgaccacgtgccagcgccacagcccttcaatcatt

SEQ ID NO: 319860 - DNA, 83 bp, Homo sapiens
atgagagtcgaattggagaacttgttggagtgctggtgaatcatttcaagagttcaaatctgaacatcaatgatgtactaggg

SEQ ID NO: 319861 - DNA, 82 bp, Homo sapiens
gcttagagcgtctggccaagaatcagaggaagtggctttccgcttggccctcatccagcttcagatttcttccatcaaatca

SEQ ID NO: 319862 - DNA, 50 bp, Homo sapiens
gggaagttctgaatctggcccaagggtgcagaagctggatacctaccagg

SEQ ID NO: 319863 - DNA, 100 bp, Homo sapiens
gcccacataagagatgatgatgttataatcagaatcaacacagatggggccgaatataacatagagaccgagacaacacttggactcagttcatatcagc

SEQ ID NO: 319864 - DNA, 101 bp, Homo sapiens
gattgctcctggagcagttgtatgtgtagaaagtgaaatcagaggagatgtaactatcgctgcgactgatagattggggtctggcagaattctatcatcct

SEQ ID NO: 319865 - DNA, 75 bp, Homo sapiens
tatggactcctgacgaccaacagagaagctgatcgtcgaagggcatctaaccaaagcggtagaagaaacaaagct

SEQ ID NO: 319866 - DNA, 100 bp, Homo sapiens
ggaaatggagggcatcttcaaccacaaagtgtaaacaggaacatcgataagtagtgtaaaaacttgcacaatgaaatccgaagccaaggatggagaggag

SEQ ID NO: 319867 - DNA, 100 bp, Homo sapiens
tgcagagtgaagagaaaatagcaaacgatccagacggcagggagtgcatcaaaggtgtgaacacagtggatatcaaagtattgcagagtgccttagcagc

SEQ ID NO: 319868 - DNA, 82 bp, Homo sapiens
tgacgcggtgaactctgtccagttttcaaaccacacagcaaaagatacagatattgtggatgaagccatctattacttcaag

SEQ ID NO: 319869 - DNA, 82 bp, Homo sapiens
ccgcgtcatgcggctcctcggctggtggtcgcaatggaagaagagatcgccgcgctggtcattgacaatggctccggcatgt

SEQ ID NO: 319870 - DNA, 120 bp, Homo sapiens
gagaagaactgcatgactgaccttctggccaagctcgaggccaaaaccggcgtgaacaggagcttcatcgctcttgttacagctttcttcctggctaccataatgggtgtgagatttaag

SEQ ID NO: 319871 - DNA, 100 bp, Homo sapiens
gatttctgcatttccatctgagcctcggccttcatcatcgtcatgctcctggccagcctcaacagctgctgcaacccctggatctacatgctgttcacgg

SEQ ID NO: 319872 - DNA, 100 bp, Homo sapiens
aattacctggaacttcatcatcatctacttcacaggaattgccatttgtctgaatttcctgctgctgttcacaaagatgctttttatctttaactttttg

SEQ ID NO: 319873 - DNA, 75 bp, Homo sapiens
taaaattacgaactcactgagctggaagtcattcaacgggaattgaataggttcaagttctttcttcaaagagtc

SEQ ID NO: 319874 - DNA, 83 bp, Homo sapiens
tctgctggaggttccttcactgtgcgtgctgaccatgaaactaatctggattcactccctctggttgatacccactcaaaaag

SEQ ID NO: 319875 - DNA, 75 bp, Homo sapiens
cgccagatcaacctggagctctacgcctcctacgtttacctgtccatgcccgagaggaagtttggcgtggtggtg

SEQ ID NO: 319876 - DNA, 83 bp, Homo sapiens
aaagaggcaaagcaagcgagaagtcgcgggcccagcccacagcagggactctccagtcctcagtcaccttggacaaagaagtg

SEQ ID NO: 319877 - DNA, 100 bp, Homo sapiens
caagccgggtagcttccactgttcctgccacagcggcttcgagctctcctctgatggcaggacctgccaaggtacatgtcccagagcaagcacacggagg

SEQ ID NO: 319878 - DNA, 76 bp, Homo sapiens
cgcgaatatcgtcatcgttagaaggagcaatttacagcaatgagggatttatacatgaaaaatggacaaggatttg

SEQ ID NO: 319879 - DNA, 90 bp, Homo sapiens
gaaaagcgagcctcttctgataactcaggatttacttgaaacaaaaggagaccctaatcttcaggttcttgatagtccacaatgggtgaa

SEQ ID NO: 319880 - DNA, 100 bp, Homo sapiens
tgcaaactgaacagttcgagattgtcgtcatcctagaaggcattgtggaaacaactgctcagaattctgcaaatgcagattttgcaaactttgatgcatt

SEQ ID NO: 319881 - DNA, 82 bp, Homo sapiens
tctcatccgcacgcacaatatcgggcagaaagataatcacgggatcatagacggtatttctatgtaaacgaacagtcgggcg

SEQ ID NO: 319882 - DNA, 100 bp, Homo sapiens
ggggcgccgggggggcccaagcgtcagcggcccgcgcctgtcgggctgaactgagagttgtggaaagtaaaaatgtagccctaccaaaaggaactattgt

SEQ ID NO: 319883 - DNA, 95 bp, Homo sapiens
aagcacgtaattttttcctacaatcaggtctgccggcccctgttttagctgaaatatggatggattggatgctttggtatatgatttggattttc

SEQ ID NO: 319884 - DNA, 100 bp, Homo sapiens
tgagtcttctggcaaacagtgtttgcctctggttcagctcatacaacagcttcttaggttctgagatgcagtaaaatcgctggtgtgaaagtagcagaaa

SEQ ID NO: 319885 - DNA, 97 bp, Homo sapiens
ggggaaccatgtggaaacaactctatgtggtatggtgacatggtgccaaaaaccatagcagggaagatttttggttctatctgttcgctgagtgggg

SEQ ID NO: 319886 - DNA, 90 bp, Homo sapiens
ctcccaagtagctgggactgcagacctgtggatatctgggctttgggctgtatgatcattgagatggccactggaaatccctatcttcct

SEQ ID NO: 319887 - DNA, 75 bp, Homo sapiens
gtgcgcctgggggtgcgcgcctgcgacctgcccgcctggtgtcggagatgtatgcagtgtgacgccaagtttgac

SEQ ID NO: 319888 - DNA, 74 bp, Homo sapiens
gtcggcagactggtgacttcacttttgagtgcaactgccttccagctgatgaacttattagtcctaaagacatt

SEQ ID NO: 319889 - DNA, 100 bp, Homo sapiens
gcccaccagcagccccactcacagctgctgcaccaccaccttccgcaggatgcacaggacagagcgggatgccaccagcttgtccaaagggaagttccag

SEQ ID NO: 319890 - DNA, 73 bp, Homo sapiens
cgacttcgatgatcgtgtgtcggatgaggagaaggccgtcgctttcgggttctctcatcgcttcgtcgttcgc

SEQ ID NO: 319891 - DNA, 122 bp, Homo sapiens
tgaaacggagccagcggctgaggaggggccccagcagcccccgaaggccctatcaggacatggagtatgaaagacgagagaagaagaaggaggttcctgctgtgccagaaacccttaagaaa

SEQ ID NO: 319892 - DNA, 83 bp, Homo sapiens
ctcgagcgacagagacaagctgagcttgccgcacaaaaagctagagagaatacagatatggtccagaaatcagtcagcaaaac

SEQ ID NO: 319893 - DNA, 98 bp, Homo sapiens
agggatgggggcccatctgatgaccatcagcacggaagctgagcaggtgaggctccaggttgggctctatgctgtgtaccttctggactggctcagcg

SEQ ID NO: 319894 - DNA, 83 bp, Homo sapiens
caaggaggtcacccgcgtgctaatggtggaaacccacaacgacccaacatgagtgaagtttcctgcaagaaacgggacgacta

SEQ ID NO: 319895 - DNA, 98 bp, Homo sapiens
actgctggggacgcccaccgaggagcagtggccctctatgaccaagctgccagactataagccctcctgtacaagtgctgggcgcagcggcccagctg

SEQ ID NO: 319896 - DNA, 82 bp, Homo sapiens
cacaacgcagacggtgcgcctgtgcagccctcccaggtggagtacacggcagactgatcttctccatactgtcttcaagaat

SEQ ID NO: 319897 - DNA, 136 bp, Homo sapiens
cggggaagctcgggaatggaggtggtgcttcctttggatcctgccgtccccgccccgctgtgccctcacgttggatatgtcaagtgaccagatagctgccaatctgcaagcagttattaatgaagtttgtaggcac

SEQ ID NO: 319898 - DNA, 74 bp, Homo sapiens
gatcgaactggcagacggatatttactgttacttcctcagaatgttggcctcctgtatgttggaggttatgaaa

SEQ ID NO: 319899 - DNA, 100 bp, Homo sapiens
gcacccgcttcctgggacccagctgcttgatgttgctggaggcacaggcgaggaggatggccgagaccagtccaggttggagacccaggtgtgggaggcg

SEQ ID NO: 319900 - DNA, 90 bp, Homo sapiens
accagtccccagtgagggtgtacaaatacccctttgaattaattatggctgtttctctggaaacccccctggtaagtgtggaggaggcgg

SEQ ID NO: 319901 - DNA, 100 bp, Homo sapiens
ggtcctttatatagaagggagagtaggcccaaggagaggccatgagggcagtgctgatcccaattcgagaggttctgaccccagaatcggacatctccat

SEQ ID NO: 319902 - DNA, 96 bp, Homo sapiens
ccgcggcgcaggaggcggtggagcgcagagcgggcgagcgcggacattcggaaattctttggagtaataccaagtggaaagaaacttgtaagtgaa

SEQ ID NO: 319903 - DNA, 50 bp, Homo sapiens
aaacatacaggccggagcttatcaaagggtctcactctgtcactcaggct

SEQ ID NO: 319904 - DNA, 100 bp, Homo sapiens
ctcctccaacccagaactggacaatctggggctgaggaagctgccctcgaaaccctccagaagacatctgtcctgcagaggccctaccactgcgaggcct

SEQ ID NO: 319905 - DNA, 83 bp, Homo sapiens
ctgggaaagaagttatgcttgttggaattggtgacaaaatcagaggcatactttataggtacgtcgtttcagagaaaccagac

SEQ ID NO: 319906 - DNA, 75 bp, Homo sapiens
gctgctcaacagacctctgacagacctgattagcctgctcattccactggtccgcccgtctgcgcccctcacagg

SEQ ID NO: 319907 - DNA, 82 bp, Homo sapiens
tgaacggaagcgtctttgctcaaggatcccagttttctctggatgacgtgtttcactgttacatgccttgaagtgatgagga

SEQ ID NO: 319908 - DNA, 50 bp, Homo sapiens
cttcactttcctcggcaagaaatgtgtgattcccaaatgctggaaaatcc

SEQ ID NO: 319909 - DNA, 48 bp, Homo sapiens
aggattccaagtaactcttatttggtctgtctctcctgccagagtgta

SEQ ID NO: 319910 - DNA, 50 bp, Homo sapiens
cgcgaccgtccgccagtcgtcccgaggttcgtgctggccgtgggcagcgc

SEQ ID NO: 319911 - DNA, 76 bp, Homo sapiens
gacatcctgactcagctgaagattctcagacctcaggtaggaccattcttagtggcactggggaaatcttggcacc

SEQ ID NO: 319912 - DNA, 129 bp, Homo sapiens
gccgtttccaccgaggaaaaggaatcgtatcgtatgtccgctatccagaacctccactctttcgaacctttcagctcttggggcattggtgagtctcagtaatgcacgtctcagttccatcaaaactcg

SEQ ID NO: 319913 - DNA, 97 bp, Homo sapiens
agaggaggaggaggaggaggaggtggcagtggaggagtgtgacagggatgatgaagaagacctgctggatgtactatactggcaattgctggagaag

SEQ ID NO: 319914 - DNA, 75 bp, Homo sapiens
cacacactatggcgctgaaacggattaataagtgtggacgaatgtggaacctcgctctgtggctgtgttcccttg

SEQ ID NO: 319915 - DNA, 82 bp, Homo sapiens
gccgaggcaccgaggcactcagaggaggtgtggatgaggtcaccattgtcaacattttgaccaaccgcagcaatgcacagag

SEQ ID NO: 319916 - DNA, 100 bp, Homo sapiens
catatttcagcttgactagcactgaacagtctgtgaaaaatctctatcatgtttctgaaagatctatccagcactccgatggccagcaacaacaccgcca

SEQ ID NO: 319917 - DNA, 49 bp, Homo sapiens
cttcctccagacctctcggcgcgggctactgcagcactggggtgtcagt

SEQ ID NO: 319918 - DNA, 100 bp, Homo sapiens
ccagcgggagggggccaagtatgtgtcccacggcgccacaggaaagatctacgcagaccccaccaagaggctggagctgtacttccggcccaaggaccca

SEQ ID NO: 319919 - DNA, 80 bp, Homo sapiens
agaccctggagcctcagttggaagcagccgatccagcctgcggagcctgtggggcaggtgatggcatcagctgagaaggg

SEQ ID NO: 319920 - DNA, 75 bp, Homo sapiens
ttgtatcaacactgttactttcgtacattgccctcaaggacgttttgttctgaagactctcatattcagctctgg

SEQ ID NO: 319921 - DNA, 100 bp, Homo sapiens
gtccctttcccttgcacctgttaacatctttaaggcaggagctgatgaagagagagcagagacagctcgtctggtctgtgagtggaaggagcctgaggag

SEQ ID NO: 319922 - DNA, 76 bp, Homo sapiens
ggcatggcttctggggacctttacgaggatttgtaggtgaaaatgcccagccaatcctagaaaataatattggaaa

SEQ ID NO: 319923 - DNA, 97 bp, Homo sapiens
ctggactaccaaggagaagctatagactacttctactccaccaggaaggaagggaaaaggccgaggcatcagcgtgtgaagaccgcaaagacgatcc

SEQ ID NO: 319924 - DNA, 100 bp, Homo sapiens
aatatccaaacaggccctccagaatgagctggagagactgaaagagagtccgatgggtggtccttttattcctgctgctcctgtcaaaactgccttgcct

SEQ ID NO: 319925 - DNA, 75 bp, Homo sapiens
cagagtgatagtttgtggcttgtagaattctatgctccatgtggaagtagtggaggaagtggaagtcgagaaaac

SEQ ID NO: 319926 - DNA, 90 bp, Homo sapiens
gcctctcttggagcaaatgatgaagacatccggaagaagatacagaaggtggtcatggcactaggagactacatgggcgcctcctgtcac

SEQ ID NO: 319927 - DNA, 100 bp, Homo sapiens
ccgcgcctggtgatcggctccttaccagctcacctctcaccgcgcatgtttggaggtgtttggcccatgactgagagagaagatgacttgaacgtttctg

SEQ ID NO: 319928 - DNA, 90 bp, Homo sapiens
tccgcttccgctggggaggtcctccatgcgcagtcatgagtcgcttcaagtttatcggagcaggacatcgagactttacatggctctgtt

SEQ ID NO: 319929 - DNA, 83 bp, Homo sapiens
ttaatgtattccaccacctccgccagttaagaggaaaaagtgatttagaatctagaagagaagtaaaaaaagaagaaggtgaa

SEQ ID NO: 319930 - DNA, 75 bp, Homo sapiens
aagtggagcgtgtcctgaaggagttccaccaggccgggaagcccatcggaacactctgctccagccaaggtggtg

SEQ ID NO: 319931 - DNA, 100 bp, Homo sapiens
cagtttgtgcaggacaccgacatggaacagggactcactggggaaccgcatgcacgagtctctcatgctcttcgactccatctgtaacaacaagttcttc

SEQ ID NO: 319932 - DNA, 83 bp, Homo sapiens
agggctgcagcccaggagcctcaaggcggcccggcgggcgactggacggccggacaggacaagatcgcagaggaaggtgggcg

SEQ ID NO: 319933 - DNA, 100 bp, Homo sapiens
tgggatgacgcagtaagaaggccatcagtagatgccagtccctcaaccttgaactttccagacgcagaactttgactatattgtggagtatgactatgat

SEQ ID NO: 319934 - DNA, 74 bp, Homo sapiens
gcgctgggagattctgagtggttcccacaggaggatggactcagacaagttctggaggagatgaaagctttgta

SEQ ID NO: 319935 - DNA, 90 bp, Homo sapiens
ttactacctgaagatcaactactcctgcgaggaaaaggtctcggcgcggaagatggccggcggcgtggacggccccatcgggatcccgtt

SEQ ID NO: 319936 - DNA, 100 bp, Homo sapiens
ggcaacgtgcccctgtgcagttactgtatggtttgcaagcagcagtgtggctgtcaacccaagctttgcgattacaggagagacggggtttcaccatgtt

SEQ ID NO: 319937 - DNA, 95 bp, Homo sapiens
cacggaggggataggcacggacgcaacacttttggaacttagacgctagtgagaagccctaccactgcaactgggacggctgcggctggaagttt

SEQ ID NO: 319938 - DNA, 100 bp, Homo sapiens
tgtgccacaggaagccatcagcagtgccatccagcttctagaagacccattacagaggcttcggaaggagtatggggccaatgtgcttcctgcattcccc

SEQ ID NO: 319939 - DNA, 74 bp, Homo sapiens
tcctctccatggggttccccagagcccgcgcaccgcggccttcagtgtcacagcgtggccttgcttgtctgcca

SEQ ID NO: 319940 - DNA, 75 bp, Homo sapiens
ggagactctcaccactagcgtctggattggaatcgctctgacgcccgctctgcggcttcggtgtttgaacaggcc

SEQ ID NO: 319941 - DNA, 100 bp, Homo sapiens
tacgccaaggaggtttacaaaatagacatgccgcccttcttcccctccgaaagggtgccgattgccggaaggcatgctgtggtggttgggcgcagtaaaa

SEQ ID NO: 319942 - DNA, 111 bp, Homo sapiens
cacctacgtcccgctgccgtcgccgccgccaccatgcccaagagaaaggacatccggaacacggtgggcaacgtgcccttggagtggtacgatgacttcccccacgtgggc

SEQ ID NO: 319943 - DNA, 80 bp, Homo sapiens
agccccctgccgctgggcttctcccccgtctgcgaccccatggattccagcttcagggatgacttcttagggggcagggg

SEQ ID NO: 319944 - DNA, 82 bp, Homo sapiens
cgcagcaacaacagagagcacgtgatgaagatctccttcaacgacaaaagcctgcagaccacatttgagtacccttccgaga

SEQ ID NO: 319945 - DNA, 100 bp, Homo sapiens
aagaactgggcagcccggcagcccgagccgaccaaatttgactacctgaaggaggagaacaccttccaccatgaccacctcagcaagttcccacttaaat

SEQ ID NO: 319946 - DNA, 75 bp, Homo sapiens
gtctcaggttcctctgccaaagatgtggcaatagtgcttcgaagactgagggagctacagctacaggaagtggct

SEQ ID NO: 319947 - DNA, 80 bp, Homo sapiens
cagagactgtaacaagatcgcattttacagacaagatgaaccttccaatagcaaccaagaaataaactctgatgacagac

SEQ ID NO: 319948 - DNA, 83 bp, Homo sapiens
cagggagaaggaagaggtgtttgaaaagtgttctagaacagatcagacattttgtaatgatgcctgaaataaacactaaccac

SEQ ID NO: 319949 - DNA, 82 bp, Homo sapiens
agaaatttggagtgtgcgtgcgcgccgagcgccgcggcgagtcctttgcacatgttggcaacacacgcatccgcatcggcct

SEQ ID NO: 319950 - DNA, 50 bp, Homo sapiens
agctcattgccttcaaacccaaggtggaatgcatccttgggacatctttg

SEQ ID NO: 319951 - DNA, 98 bp, Homo sapiens
tgcagctgcagaagtgaaccggcaaatgctgcaggaactggtgaacgcaggatgcgaccaggtttactcctggcttgggggcattaggaagcactgga

SEQ ID NO: 319952 - DNA, 90 bp, Homo sapiens
aaaagtctcagatgagctcatgagtgaaagttggccagcgcagaagcttattgaatttatttaccttttcagagtttccctttaagcact

SEQ ID NO: 319953 - DNA, 74 bp, Homo sapiens
gcaacatctttcctaaccctgaagcgacttttgtcaaggaaatggccatggagttggggagagaatgtctaaat

SEQ ID NO: 319954 - DNA, 90 bp, Homo sapiens
tgttgtggctgttccaatcgctcctgtttgtcttctgctttggcccagtgggttgtatcccctgcagaaaaagctaaatatgatgaaatc

SEQ ID NO: 319955 - DNA, 100 bp, Homo sapiens
gatgaaaatcgagtttgggaaagtgacattaggtatgatctcgtgaaatcttgagagaaactgaatgacgaatgaaactattgttcctgtttcacacaga

SEQ ID NO: 319956 - DNA, 110 bp, Homo sapiens
aatggcgctgtcttcagtggcacagtggagcagctctgaagatgcaaagtgtttgatatcgtgaggaactatactgcagattatgacaagaccttaatcttcaataaaat

SEQ ID NO: 319957 - DNA, 100 bp, Homo sapiens
cagcaactacgtgcgcgaggtcaaggccagcgttttagaaagagcgttttcgctacgtaaagcacattcgataaaggatatggaaaatactttgcagctg

SEQ ID NO: 319958 - DNA, 75 bp, Homo sapiens
ggaactcagcagagaaactttgtgtgattcgcctttgccagtctcatctcgtgtctgctttgttaagttccatga

SEQ ID NO: 319959 - DNA, 50 bp, Homo sapiens
gaactcccggcccgaactccagtgctcctgcgggaagaagtgtcgcggct

SEQ ID NO: 319960 - DNA, 100 bp, Homo sapiens
agcccgcggccgcgccgagcgggcataagcagtactataatggatgtagacagcacaatttccagtgggcgttcaactccagcaatgatgaatggacaag

SEQ ID NO: 319961 - DNA, 75 bp, Homo sapiens
gccggccgtctccttaacaccgaacaccgacccagatgatgtggtaccagttggccaaagaagagcctggtgttg

SEQ ID NO: 319962 - DNA, 75 bp, Homo sapiens
ctctccagaaaatcttgtggacaaatccaggggaagaatactaagaagtttcagcagtggaatgcctactcttct

SEQ ID NO: 319963 - DNA, 100 bp, Homo sapiens
catccgcacccacacgggcgagaagccctacgagtgcaacatctgcaaggtccgcttcaccaggggaattgatccctatgacaaaccaaataccatctac

SEQ ID NO: 319964 - DNA, 59 bp, Homo sapiens
gaatttcaagagagtaccattggggtgatatcagtatcaagataaaagtttggaatggg

SEQ ID NO: 319965 - DNA, 100 bp, Homo sapiens
gaatgctcttttaccgatgctttaacatacagccactaggtaatatatgctttaaacactaaaaatgatgagcatgaatctgcaattcaagccctcaaag

SEQ ID NO: 319966 - DNA, 98 bp, Homo sapiens
ccttggtaaaagacaaggccttctccaaggtacctgaaagaattccgcacagagcagtgcccactctttgtgcaacacaaatgcacgcagcatcggcc

SEQ ID NO: 319967 - DNA, 75 bp, Homo sapiens
caacaatgagatcgtggacaagatcatgggcaaaggacagatccaggtttattgggcacttcctagcaccaggca

SEQ ID NO: 319968 - DNA, 75 bp, Homo sapiens
ttcacacttcagatgctgaagcgagtccctgagctcccggtatggcatttcaaatatagatacaaccattgaagg

SEQ ID NO: 319969 - DNA, 101 bp, Homo sapiens
tatcctaaaggagatggaagtgatgtaccatcatgggtagcctttgataaacaggaagctgaatatggtgggcatgatcagatagatttgtatgacgatgt

SEQ ID NO: 319970 - DNA, 100 bp, Homo sapiens
cgcggggactgcaaccctaatcaggattactcttgctgctgtcttgctgtactgtatgccactgggatctgaacactaaacattgctaagaaacccaccc

SEQ ID NO: 319971 - DNA, 102 bp, Homo sapiens
agcctctccataaacggagtgatcttcggcttgacatccacagatctgcttttccacctgggggccgaggagatcagtagccacgcagtgaacctcctgggg

SEQ ID NO: 319972 - DNA, 83 bp, Homo sapiens
gaggagcagcccaagcagatcattgtcaccaggaagggcatgctggacccactggaggccaagtcctgtatctgccatgtctg

SEQ ID NO: 319973 - DNA, 100 bp, Homo sapiens
ccaagagggtgttcgactgctagagccgagcgaagcgctatggtgaactaaacggtaatgctggagaaagagaaatatctttaaagaacctgagttctga

SEQ ID NO: 319974 - DNA, 98 bp, Homo sapiens
accctcacgctgatgaacttgtacttcacgcaggtccccagtctatgtgaggatctcctgtcttctgttgaccagccactgaaaattgccagagacaa

SEQ ID NO: 319975 - DNA, 82 bp, Homo sapiens
ctcgccctccgtctgggccgccgtccccgggaaaacgttcgtcaacatcacggaccatcagcacgtgcccatcgacatccag

SEQ ID NO: 319976 - DNA, 76 bp, Homo sapiens
aagaagacattagtgagatatggtttgaatatgaaggcacaccactgaaatggccctcgggaccaaggatcacgtc

SEQ ID NO: 319977 - DNA, 75 bp, Homo sapiens
gtgcttctcgaaaaaaaccttcaggcggcccatggccattcgttcctggttaactcggaaacacatccagaggct

SEQ ID NO: 319978 - DNA, 83 bp, Homo sapiens
ctgtacgagctgcacgtcttcaccttcggcagccggctgtacgcacacaccatcgcagaattctctggtggttgagatcccgc

SEQ ID NO: 319979 - DNA, 87 bp, Homo sapiens
gagggcctcgccatgtcctgctgcccgaactgtaagagtaaatgggtccagtaattggaatgactccagataagagagctgaaaccc

SEQ ID NO: 319980 - DNA, 50 bp, Homo sapiens
ttgggatatttgagagtccaactggcactctcgttcgaccagtcaccatg

SEQ ID NO: 319981 - DNA, 75 bp, Homo sapiens
ttggaagactatgtagtattgatgaaaagagggactgccataacattcccaaagtacgaggatgtcgtccaggaa

SEQ ID NO: 319982 - DNA, 50 bp, Homo sapiens
ctggaccagaccatgggcctgagcatcagaacactctgctccagccaagg

SEQ ID NO: 319983 - DNA, 100 bp, Homo sapiens
gaacccagggaagttcctttttgaagtagttccaggtcagcccaaggccaaccccactgtcactctgttcccgccctcctctgaggagctccaagccaac

SEQ ID NO: 319984 - DNA, 83 bp, Homo sapiens
caagcctctacaggggcctcccgcgccccccgggacccccacgccgccgccagcaaccaaccagtggttcatcccagccgtga

SEQ ID NO: 319985 - DNA, 75 bp, Homo sapiens
cggccgtggaagcggccaccgactactgtcagcagctgtgccaggcaaagggcgttgtgaatacagctgtgtctg

SEQ ID NO: 319986 - DNA, 100 bp, Homo sapiens
cgcggctgctggagccccggctggctcaccccggggccgggcagaattgggctccaggtactccaaagattcaggtttactcacgtcatccagcagagaa

SEQ ID NO: 319987 - DNA, 82 bp, Homo sapiens
agaccctggagcctcagttggaagcagccgatccagcctgcggagcctgtggggcagttacgccccatggtgtccatcctgc

SEQ ID NO: 319988 - DNA, 75 bp, Homo sapiens
gttcatctcctccgtcaccagccacatctaccaggggaacgcccttttgcttgtgactggcagggctgcgacaag

SEQ ID NO: 319989 - DNA, 75 bp, Homo sapiens
tacgatcctcgatggatgctagcaggccgtcctcacccaagtaaaagtttcatttgatctgaatagtattaaaat

SEQ ID NO: 319990 - DNA, 73 bp, Homo sapiens
gctgtgggaggctttgatgggagtacaggacctcagcaatggagaatatccccatcatcacaactgtcatcac

SEQ ID NO: 319991 - DNA, 75 bp, Homo sapiens
ggacaagtcttttcatgtggtttttctacgcattgattccatgtttgctcacagtcattcatacctagagaaatt

SEQ ID NO: 319992 - DNA, 71 bp, Homo sapiens
gatcctgagagcccgagcgcccagcgccgcgccgggaggtgtagaatgagccaaggagactcaaacccagc

SEQ ID NO: 319993 - DNA, 119 bp, Homo sapiens
gtacggcaaaggcaagagtaacagcagcgccgtcccgtccgacagccaggcccgggagaaaacactctgctccagccaaggtggtgagggcagctgttcctaaacagcgcaaaggcagc

SEQ ID NO: 319994 - DNA, 90 bp, Homo sapiens
tacatcttgcatcctcaagcggacctcagcagccatgtcgaagccccatagtgaagccgggactgccttcattcagacccagcagctgca

SEQ ID NO: 319995 - DNA, 75 bp, Homo sapiens
agctggcagacaagctgtacaatctgagggacctgaatcgctgcaccccagaggagcacagcaatggaggaaaca

SEQ ID NO: 319996 - DNA, 76 bp, Homo sapiens
cgggcttccagccctgagggtcgccacctcccttccccacagctaggaaccaagttccggaactttaagatcattt

SEQ ID NO: 319997 - DNA, 75 bp, Homo sapiens
cccttggccccctcgtcgtctgccccagaagaatccgggctgggacagaacttacttgggactacaactacgagg

SEQ ID NO: 319998 - DNA, 82 bp, Homo sapiens
atgcctgaagctcaagggactgtgtccaccctcagtgttctaagaacggaagcatctgggctggatggaatttagcatcaag

SEQ ID NO: 319999 - DNA, 119 bp, Homo sapiens
tgttttaggggccagcagatgcaggaaaatttcgatattgaagtgtcaaaatccatagatggaaaagatggtgctggagaatctggtaaaagcaccattgtgaagcagatgaggatcct

SEQ ID NO: 320000 - DNA, 90 bp, Homo sapiens
gcgtgttgtcgcaggtggacttcttgcaacaggttaacgtgtatggcgtgtgcgtgccaggggagaagccgcaccagtgcgccgtgtgct

SEQ ID NO: 320001 - DNA, 75 bp, Homo sapiens
gagggcttgcatgaagaggatggatcttctgatgagaacaagttgagcagtgccaacggccatgaagaacgtagc

SEQ ID NO: 320002 - DNA, 75 bp, Homo sapiens
agattgtgaagcaatagcctaagttgcagagtgggcaggatcttaagacccgataggtgcagaacccatctggac

SEQ ID NO: 320003 - DNA, 50 bp, Homo sapiens
ggagcagagggcaaattttctgcagcttcgcctcaacagcatcaagaagc

SEQ ID NO: 320004 - DNA, 114 bp, Homo sapiens
cggggccgagcgcggccctgcaggcgatgtcgccgaaaccgggctgcaggcggttttaccaacagactgcagtttcttcactaccaaaatgacatcattttccacctctgctca

SEQ ID NO: 320005 - DNA, 100 bp, Homo sapiens
cagaaacacaagaccttcgtggaaaaatacgagaaacagatcaagcactttgatcatgaatcggttcagtggtgttatgacaacttcattaactacaggt

SEQ ID NO: 320006 - DNA, 100 bp, Homo sapiens
ggaatctggccaggccctgcttaggcccccatcctggggtcaggaaatttggaggataaggcccttcagccccaagctctatgttctatgatgaggatgg

SEQ ID NO: 320007 - DNA, 75 bp, Homo sapiens
taaagcagtacaagtccagcggagaaacggacaaacataaattgcagagattcctgactgctgacatggccctgg

SEQ ID NO: 320008 - DNA, 83 bp, Homo sapiens
ctgggatcccggccaccagcaattgtccggaggaaaaggcttctcttttacatcgtactcaggaagaaagaagaaagagagag

SEQ ID NO: 320009 - DNA, 100 bp, Homo sapiens
gaaaggcagcagctcatcccagaattggtgcgaaatggagatgaggagaatcccctcaaaggcttggagaagatctctgcctacatgaagtccagccgct

SEQ ID NO: 320010 - DNA, 82 bp, Homo sapiens
aaggctacagtgatgacagaccgacttaagttcggattcggcttccaccgcttcttagtgacttaattcagtgcacaaatga

SEQ ID NO: 320011 - DNA, 100 bp, Homo sapiens
tccaagcatggaatgctgccgtcgggcaactcctggcacactgctcctctttctggctttcctgctcctgttgcggtccagcacagagctccatccagac

SEQ ID NO: 320012 - DNA, 83 bp, Homo sapiens
caagaacatgaaacacctgtggttcttcctcctgctggtggcagctcccagatggttacacatcattttggaatgactgtata

SEQ ID NO: 320013 - DNA, 119 bp, Homo sapiens
tgtttcgggccagcgacccgctgctcagcgtcctcatgtggggggtaaaccactcggatgcatcatctgcagacatcagaaaagcatatcgtaagctttcactaactttacatccagac

SEQ ID NO: 320014 - DNA, 82 bp, Homo sapiens
ggagttcctctttatgaaagtgccaccaccaggtctataaccgtttcagctgtgagttcaacatggaggcaaatcagtgccc

SEQ ID NO: 320015 - DNA, 83 bp, Homo sapiens
ggccaggttcggcgttccgtgagtgaacggatattagaaatggctactccccagtcaattttcatctttgcaatctgcatttt

SEQ ID NO: 320016 - DNA, 74 bp, Homo sapiens
agccaaacatcaagcagaatgtgatttgcttgaagatatgaggtatccaaatatatcttgtgagttgctcactt

SEQ ID NO: 320017 - DNA, 75 bp, Homo sapiens
ggaaaaaggaagagagcactgcagccagtgaaaccactgagggccaattcctgtccccccagcagcatggcatcg

SEQ ID NO: 320018 - DNA, 100 bp, Homo sapiens
caggcgggcggccccggagcgctggtgccggcagaggcggcgacggtggcgcccctcctcatcatgattgaggaagacacatggcagaaatactacttgg

SEQ ID NO: 320019 - DNA, 100 bp, Homo sapiens
cgatctatgcacgcagatgctggagaagtccccttatgaccaggactttctgcagggcgactgcaccaaagcgaaacagaagctgaactggaagccccgg

SEQ ID NO: 320020 - DNA, 90 bp, Homo sapiens
atgtggaaacggagtccctgtaatttggccataccttctgaagtagatgagccatttattgaaactcctcgccaggatggtgtctctcgc

SEQ ID NO: 320021 - DNA, 90 bp, Homo sapiens
caacgagcacaacaggagctacgaggagttgggccaccactgcccagttcgggaaatgagcagcactcatcagcctccatcttcgagcac

SEQ ID NO: 320022 - DNA, 101 bp, Homo sapiens
caggactcagaggccgccatcaaccgccagatcaacctggagctctacgcctcctacgtttacctgtccatggtggaatatgtgatcaagtgtgacatgtc

SEQ ID NO: 320023 - DNA, 77 bp, Homo sapiens
agaaaactaaagacattcatggaaattactttggaagaggatagcattgaaagaataatcatgggccagactgggaa

SEQ ID NO: 320024 - DNA, 100 bp, Homo sapiens
ccggatcaacttcgacaaatagatgttggttcctgcaaacaagaactgaccctatcacctctgcctcacagtgggtaaatatatcatacatctcttgaaa

SEQ ID NO: 320025 - DNA, 100 bp, Homo sapiens
gtctgttcacgtggacaattcccgagatcttgggaaacctccacagctgttgagaaaaaggagaaacctcttccaagacttaatatccattctggattct

SEQ ID NO: 320026 - DNA, 83 bp, Homo sapiens
caacaaactcgaagactggcatgagtttcagctgtgagttcaacatggaggcaaatcagtgccccctggttgtggaaccatct

SEQ ID NO: 320027 - DNA, 85 bp, Homo sapiens
tcgcttccggagggactgcaaaagctctcagggatgctggtctggcagtcagttgctgccaaacaaggtgaatccgacccagaga

SEQ ID NO: 320028 - DNA, 100 bp, Homo sapiens
aatgactttaaaacaacttaaagacaggtatcctcggaaacggtttgtggctggagtaggagcaaacagcaatggccacaagtaatcatcctgagactga

SEQ ID NO: 320029 - DNA, 90 bp, Homo sapiens
cgccccacttgctcgtgcactttacacacatgaggttggtgttcgaggaagagacattgttgttcttggtgtggagaagaagtcagtggc

SEQ ID NO: 320030 - DNA, 100 bp, Homo sapiens
gcggtggctcccaagaagtccgagacacgcggtgaggcggcgacgggctccggaagcgagttcttttcctgaccaatgactacttcttcacggacatcag

SEQ ID NO: 320031 - DNA, 87 bp, Homo sapiens
tttcgccgctggcgtcaggactattttcacgttttaatgccgagaggtctctgtgacgattttggcctgcttcggccttctgctctt

SEQ ID NO: 320032 - DNA, 51 bp, Homo sapiens
gtacattctcaggtggagacctgataagaatgcattacatctgttttctat

SEQ ID NO: 320033 - DNA, 100 bp, Homo sapiens
cccggccctccctggcaatccctgggctctcttgcacccctaactgccccctgcctgctccggcactgccccagggttccaggacatagtctgaggcaag

SEQ ID NO: 320034 - DNA, 100 bp, Homo sapiens
ctggttttcaggccacaaatgctttcacagctctcgtgctcattcccccatgatcgccgtaggaagtgatgacagtagccccaacgcaatggccaaggtt

SEQ ID NO: 320035 - DNA, 90 bp, Homo sapiens
gcgggactacaattcccaaaggacggtagcactcagcgccccgccaacagggggctagagagctgaaggagagccagtttccccaaaatt

SEQ ID NO: 320036 - DNA, 90 bp, Homo sapiens
ccgtgcatggggctgctccccaggacctgagcaggaacctggagttttcaggatcagttcttaagagcagccccggtaactggaggaatg

SEQ ID NO: 320037 - DNA, 100 bp, Homo sapiens
atttcttcactgggagtcgagacaaaaagcttcccagtcgactaagtttccctccatacaaaggttgtattgaattagatgacctcaatgaaaatgttct

SEQ ID NO: 320038 - DNA, 51 bp, Homo sapiens
ccacaagaacgcactttcctcccagatcgggagcggtgccgagaaaaattt

SEQ ID NO: 320039 - DNA, 74 bp, Homo sapiens
tgattcacgtgtgcccaggccctgaggtgggccggacctgggagtggcagaaacccgatggaggcaatgtaccc

SEQ ID NO: 320040 - DNA, 75 bp, Homo sapiens
agctcgtcctggagcacctgcagctggcgcctctgcagtggggaagggaaaaggccgaggcatcagcgtgtgaag

SEQ ID NO: 320041 - DNA, 100 bp, Homo sapiens
ggcaagtaacatgactaaaaagaagcgggagaatctgggcgtcgctctagagtttcatcgcaaaccagaaaaggttagaaatcatcaacgaagatgatgt

SEQ ID NO: 320042 - DNA, 101 bp, Homo sapiens
tccggcccgaggtgtccatggatggctgcaaggtccttccatagtgacgccccccaaggacatctggaatgtcactggtgcccaggtgtacttgagctgtg

SEQ ID NO: 320043 - DNA, 75 bp, Homo sapiens
aaaaaagaacttcgtgtgaaaattttcctgggacaacagaaagcctacatcgctacccaggggcccttggcagag

SEQ ID NO: 320044 - DNA, 100 bp, Homo sapiens
tgcagaagtttgagaggaacttcattgctcagggagatacaactcgtcaacgaatcaaattcagtgatgacagagtatgcaagagtcaccttctcaactg

SEQ ID NO: 320045 - DNA, 75 bp, Homo sapiens
attaagagcttggaggcggcccgcgggagccggtgaaacctgaagaaggcagagatatggcaaacaggattggcg

SEQ ID NO: 320046 - DNA, 100 bp, Homo sapiens
tgaggggatgcagttatgggctctgtcgccgtggatatgatggacgtggtcacctgcatgacctttctgagtacgatgctgagtattccacgtggaacag

SEQ ID NO: 320047 - DNA, 74 bp, Homo sapiens
agagctgcctgcctgctgctgcttggagagccccagacagtcgcttgaagaggagattacctggggcaattgat

SEQ ID NO: 320048 - DNA, 50 bp, Homo sapiens
ccgggctacgctcctccatcacgtgaattcagcttagagaactatcaaca

SEQ ID NO: 320049 - DNA, 98 bp, Homo sapiens
gctggtgtgagtgccctcaggggttccccaggaatatcgatacaacaccaacaggagaagatggtataaactggtccatcagtgacaaagacattgag

SEQ ID NO: 320050 - DNA, 50 bp, Homo sapiens
gcagttcttgtcaatgacctgaaaaaaccactgtctgcaataataaagga

SEQ ID NO: 320051 - DNA, 100 bp, Homo sapiens
ggggctcatactcatcttatgggagagaatcaaacttacagggttgccaccagttgcagatctgatctcttctgaacacctcatcgtgtctccatccctg

SEQ ID NO: 320052 - DNA, 75 bp, Homo sapiens
tcccaagaagagcaggaaatggccaaaccccaggaaaaggggaagatagtgatgtactcagtataaatgcagatg

SEQ ID NO: 320053 - DNA, 103 bp, Homo sapiens
agcagatctactactcggacaagtacttcgacgaacactacgagtaccgactctgctaacaccagatagtggaaagaaaccatgtgctgaaatgtttgacgac

SEQ ID NO: 320054 - DNA, 80 bp, Homo sapiens
ctcagctccgagtccagggcgaggacctggaggaacttgctttgtaccagatccagctgctgaaggacctcagacataca

SEQ ID NO: 320055 - DNA, 98 bp, Homo sapiens
tggcagcagcggaccggctccagaaaatattccccggtgtgggagaccaaattttgaggaaggtggaccaacatcagtagggagaaagcatgaattta

SEQ ID NO: 320056 - DNA, 85 bp, Homo sapiens
tttcttaactcagaaagaaacttccaacacagtttcccaaagaaaaatgggcaccaagggcaaaagtcacctaaggtcctgcgag

SEQ ID NO: 320057 - DNA, 101 bp, Homo sapiens
tatttaccaggtgtcctacttctcatttaagctactcaagaaagagtgcccaattccaaatgtacagacacagcaggatgccaatgcctcttccctcttag

SEQ ID NO: 320058 - DNA, 100 bp, Homo sapiens
gtgtctctgctgctcaaaatttctcttccagcaaatgccagatgttaatgtaagctgggatggagagggcccaaagcaactgccatttattgacatttca

SEQ ID NO: 320059 - DNA, 100 bp, Homo sapiens
atggcggacaaaacgccaggcggatctcagaaggccagttcaaagtttgaaggatgacctctaggaagaaagtgttgctgaaggttatcatcctgggaga

SEQ ID NO: 320060 - DNA, 75 bp, Homo sapiens
gaaaaactttcgcctgagcctattttggatgccccagtgaagttgtgtgactttggatttgccaagattgaccaa

SEQ ID NO: 320061 - DNA, 75 bp, Homo sapiens
cattttaattttgccggaatatttcaagacaccgaaagacttcagtgccctgaacggttagagaaattaatgaag

SEQ ID NO: 320062 - DNA, 90 bp, Homo sapiens
tccgcaccaggggccctcagggaagagaccctgcaaagatcctgggagaccaagataccccagaatcttccatgctccgtcacactgcag

SEQ ID NO: 320063 - DNA, 83 bp, Homo sapiens
tgcagacaagccatacacgtttgaggactatgatgtctcctttggggttatcagtgagctgaatggaaaaaacattgaagacg

SEQ ID NO: 320064 - DNA, 101 bp, Homo sapiens
cctggaaaacctggccctcttcaatttctgacaaaagagatgcccgagtggtaaaagacatggcaacaggaaagtctaagggatatggctttgtctccttt

SEQ ID NO: 320065 - DNA, 74 bp, Homo sapiens
cctgtttctcacatttgtttcattgaagaaatagttaagatgaataatacggcagctagtccaatgtctactgc

SEQ ID NO: 320066 - DNA, 98 bp, Homo sapiens
cttgtacagagatgtgatgttggagaactatagcaatctggttttcttgggttcagattctggagatgccctccaagacgtcagtgtgcgccctgaag

SEQ ID NO: 320067 - DNA, 50 bp, Homo sapiens
gcctgatgctgaactctcgaggatggttcacaggcaccagccagaccccc

SEQ ID NO: 320068 - DNA, 100 bp, Homo sapiens
gcctcagcaacctgacaattctgtcgtgtcccgatcatggaagggaagtggttgctgtgtatgttactggtgcttggaactgctattgttgaggctcatg

SEQ ID NO: 320069 - DNA, 98 bp, Homo sapiens
cggagccatggaggacgaagtggtccgctttgccaagaagatggacaagatggtgcagaagaagaacgcgggttctccaaaaaatgtggaatcctttg

SEQ ID NO: 320070 - DNA, 100 bp, Homo sapiens
attccagacagctcttccttaattgaagagggtgtgggccgaagatatgctcatgtggtgttgaggaaagcagacattgacctcaccaagagggcgggag

SEQ ID NO: 320071 - DNA, 75 bp, Homo sapiens
gaagacaatcgtcacttatacaggtggagccgccaccaaaatgcagattttcgtgaaaacccttacggggaagac

SEQ ID NO: 320072 - DNA, 105 bp, Homo sapiens
ttaccaccatggatgcagagctggagtttgcaatccagccaaatacaactggaaaacagctttttgatcagcattcttcaggtcatctgaaccttctgagaaaac

SEQ ID NO: 320073 - DNA, 76 bp, Homo sapiens
tacctcactgcagaggtgctggagctggcaggtcccagagggtggaaggagccaggacgcacccccactgctgctg

SEQ ID NO: 320074 - DNA, 75 bp, Homo sapiens
agaagctacaagaaggccggcagtttgccagcgagtaccgagcccctgaactgctgttgggaaccaccacgcaga

SEQ ID NO: 320075 - DNA, 82 bp, Homo sapiens
accagctgaagagcgacaagccgctggcagccgcggatctcaccgccgctcaggaggcatcccaacacgctgtcttttcgct

SEQ ID NO: 320076 - DNA, 100 bp, Homo sapiens
aatcacagtgctgagtcagtgtgacagtccatatgtaaccaaatattatggatcctatctgaagtggtgtggagattccagcactcccaggacagtggag

SEQ ID NO: 320077 - DNA, 97 bp, Homo sapiens
ctatggaatgcttgtgaaaagttgcccaaggccaatcacaacaacatccgacctcagttggatgaacccattccactgtatgaggcaaaagtttcca

SEQ ID NO: 320078 - DNA, 96 bp, Homo sapiens
ccatcagcagtgccatccagcttctagaagacccattacagagggcactctacgcttccaagatcatctcttacgctcaaggctttatgctgctaa

SEQ ID NO: 320079 - DNA, 100 bp, Homo sapiens
aagctagaaaaagccgagatcctgcagatgaccgtggatcacctgaaaatgctgcatacggcaggagggaaaggctctgtggatagcaactggatcgtgg

SEQ ID NO: 320080 - DNA, 49 bp, Homo sapiens
gtttttccaaatattcatctgtacaggaagtacatgacctgctcagtga

SEQ ID NO: 320081 - DNA, 115 bp, Homo sapiens
gctaaacgttttagagtaccaaccattgtgtgctgtgaggtaaagcttagaccatgctcagcctccaagcagccttgtcatcgacaaagaatctgaagtttacaagatgcttcag

SEQ ID NO: 320082 - DNA, 100 bp, Homo sapiens
gccgagcgcaccgacatctgcctgctcaaaggctgaaggtgatgtggccgccctcaaccgacgcatccagctcgttgaggaggagttggacagggctcag

SEQ ID NO: 320083 - DNA, 75 bp, Homo sapiens
gtcatacaccagtactaccaaggacagcttttttcctgcaagatactaaaatgtctgatgatgctggtgacacct

SEQ ID NO: 320084 - DNA, 90 bp, Homo sapiens
gtatcttcagcagcagcagacgtttggaaagcggaagcgagagagtgagagtgaaagtgacgagactcctccagcagctcctcagttgat

SEQ ID NO: 320085 - DNA, 82 bp, Homo sapiens
cggagcgcgagcagagcggagacccccaggtcctgcgggcgcggtcaaaatgcagatcttcgtgaaaacccttaccggcaag

SEQ ID NO: 320086 - DNA, 88 bp, Homo sapiens
gggagactgactgcctatgaatttgctaaacttaaaagcaagctggttctctgggatataaataagaaacgaaatcctgaagttcgac

SEQ ID NO: 320087 - DNA, 100 bp, Homo sapiens
gactgctaatcagtcacgaggctcccttgacaggcggctttgcatcggaaatcagctctacagttcagattgattataccggaacagagccttccagtcc

SEQ ID NO: 320088 - DNA, 50 bp, Homo sapiens
gttgaagaagattcgaaactggagggtgttccaggtgcgaaaggtgcaag

SEQ ID NO: 320089 - DNA, 82 bp, Homo sapiens
cccgcgagcacagagcctcgcctttgccgatccgccgcccgtccacacccgccgccagagttttccgtctgatgaaggttgg

SEQ ID NO: 320090 - DNA, 75 bp, Homo sapiens
ggaggaccttggagtccagcactctgcatgtgactccccgcagcctggacagctcaaatcccagccttctatatg

SEQ ID NO: 320091 - DNA, 100 bp, Homo sapiens
gcggagagcaatcgccgggacagctgcaagaccgagacatgggtgcccggcaccgcgcccgagcccactccattcagatcatgaaggtggaggagatcgc

SEQ ID NO: 320092 - DNA, 82 bp, Homo sapiens
gactctcttcgctctttgcatcttaactgcagattggtttatcttggaagctaaagggcattgctcatcctgaagatcagct

SEQ ID NO: 320093 - DNA, 83 bp, Homo sapiens
ctacggacctgtctgggtctcagccgccaaagaccccgtccggtttggtgcacctcgatttggaggaagtagggcagggccct

SEQ ID NO: 320094 - DNA, 75 bp, Homo sapiens
atattcggaagtcatatggaaatttttacaaggttgtctgcattcaaaagagcattctattaaagctaccttaat

SEQ ID NO: 320095 - DNA, 72 bp, Homo sapiens
aaaaattaatcaacagagtgggacctaatggtgagagcgggctacattgagagacctcagctgattcgagca

SEQ ID NO: 320096 - DNA, 75 bp, Homo sapiens
agaagcgccctgccccgcgcgcacccagcgcgtccccactggttttgatggcgacgactttgatgatgtggagga

SEQ ID NO: 320097 - DNA, 100 bp, Homo sapiens
ccctcacagtttgctctgctcttccaacaccagtggaagatgatcacatcccagtcaccaggagactaaagtccatcaaaaacatccagaaaattaccaa

SEQ ID NO: 320098 - DNA, 83 bp, Homo sapiens
gtcatcaccatgggccgggatcacattctgatttacctggagtagaacagaaaaattattatgtctgtgttcccttgggactc

SEQ ID NO: 320099 - DNA, 100 bp, Homo sapiens
cccctacaacttattcctgtccggagacagcctaaggctcagccagacgtccaggatcccaccccttgcaaaagaccaggccgtggaagccatgttccca

SEQ ID NO: 320100 - DNA, 100 bp, Homo sapiens
aggagggaagtgagaagcccaactaaagccccacatttgcagctcattgaaggaaagcctgtcatcaatggttaccgaaataagtccaccttctctgtga

SEQ ID NO: 320101 - DNA, 100 bp, Homo sapiens
ccgagcccaccgccttcgacatccaggatctcagccatgtgaccctgcccttctaccccaagagcccacaattgtggtggtgccatgcagcaagaatcag

SEQ ID NO: 320102 - DNA, 100 bp, Homo sapiens
gggtggccccagcgcttctatgagtccggggccaaccatcccgtctccagcccgggcttacgccccgccgacagaatatgcttttaaggctattaaccag

SEQ ID NO: 320103 - DNA, 90 bp, Homo sapiens
gaaagcatgaaaaatcaaaaggagttcatgcttatgaatgctcgacttcagcttattgcaggagtgaccaggacactacctcctagaagt

SEQ ID NO: 320104 - DNA, 90 bp, Homo sapiens
tgtacccactcaccttgtttgtcccaggactcctctatctcctccagtgccggtggtggtgtgcacattgagccccggtatagacagttc

SEQ ID NO: 320105 - DNA, 100 bp, Homo sapiens
aacaggatgctgatagtctccagcgggcctggactgtgggctggtgtgtggaactggaaccactcgttttgactattattttatcactctttgtgaaact

SEQ ID NO: 320106 - DNA, 98 bp, Homo sapiens
gagcagattctacaacacatggtggaatgtatccgggaggtcaacgaggtcatccaggttttctgtgaagaccctgattgatcggtcttgctttgaga

SEQ ID NO: 320107 - DNA, 75 bp, Homo sapiens
tacacattgtgctattcactctgctttacaagaacttcgatatgacctgccagcatcatacaagtttcacaaaaa

SEQ ID NO: 320108 - DNA, 98 bp, Homo sapiens
gaccctccggccgcagccatgtgggacccgcgggcagctagtttgtcccatgaggagcacccccatagccatcctctctatggacatggtgtatgcaa

SEQ ID NO: 320109 - DNA, 100 bp, Homo sapiens
taattttgcaattattaaatatgctatgccaagctcagccccgaagtgcttcagatgtagagaatgaaactagtgatcgagaagatggcctccccaaagg

SEQ ID NO: 320110 - DNA, 75 bp, Homo sapiens
ctgtaaacctgataacactgcatgaaatgttagagtatcaccttttgccatgatagcatttctttcattggacag

SEQ ID NO: 320111 - DNA, 75 bp, Homo sapiens
cggccgttccgcggagcccggccgaggagactgctggagttaataccaccgacaaagagatggaggtgcttcact

SEQ ID NO: 320112 - DNA, 101 bp, Homo sapiens
aagaagtaaaattacgaactcactgagctggaagtcattcaacgggaattgaatagctaggtcttgactccactaacggggacttctcatacggctttgaa

SEQ ID NO: 320113 - DNA, 90 bp, Homo sapiens
aaactgacctcagttcctaaagagatgaatcttacagtgatgtgtccttctattgacccactacattaccaccatttaacatacattcgt

SEQ ID NO: 320114 - DNA, 103 bp, Homo sapiens
atcaagttgataaggaaagtactgtccaaatgaattatgtcagcaacgtatccaagccttatgtttacacaacaccgccctttgtcagagtgacacatggaag

SEQ ID NO: 320115 - DNA, 80 bp, Homo sapiens
ttcttccacatgaaaaggataagaaaagcagcatctgttatagcaaaatacccacacaaaataaagagtggagctgaagc

SEQ ID NO: 320116 - DNA, 98 bp, Homo sapiens
ggacaactagccctcctactgatgaacagttgaacatgaagaatactggaaagttgctatgttttgctttgtgtccctggtgatgttggaacattaat

SEQ ID NO: 320117 - DNA, 100 bp, Homo sapiens
ctgggtctagtggacgtgctctacacagctgtgctggacctaaaccgctggagggctggaagaaagtactgaaatcccaccttatgtgatgaagtgtccg

SEQ ID NO: 320118 - DNA, 89 bp, Homo sapiens
gtttccttgcttaaacactacagtgatttcttccaaggtcaaaggacgaaggaacaagactgccaatggagactgccgcagagaccccc

SEQ ID NO: 320119 - DNA, 75 bp, Homo sapiens
caatgaaaacagagttcctacatgtgaagagggcatcctgtacctgaaccaggaggtgcccaaggagttactgga

SEQ ID NO: 320120 - DNA, 100 bp, Homo sapiens
aatctcatatgacatactggagattagagaacatagttgaaacattgtagtcggtatatacatgacttatttccttcactcatcaagaatttggatcccg

SEQ ID NO: 320121 - DNA, 95 bp, Homo sapiens
cgggtttttctagaacacggaggctgatcttcagacaagttctcagcgtttaaatctttcagcctccaatgctgcagtggctgaacttaaaccgg

SEQ ID NO: 320122 - DNA, 96 bp, Homo sapiens
aagaagcagctggacccgctcaccatctacggcatccggtgatgccggctccaggagcagcagtggaggtcgggaacgcctcattgtggagccccc

SEQ ID NO: 320123 - DNA, 97 bp, Homo sapiens
cagctccagagagacgtgaaacatgtgaacactcaagtgaagcaaaagccttccatgattacagcctggcccaactagagaatctgtgcaaacagct

SEQ ID NO: 320124 - DNA, 75 bp, Homo sapiens
gcctttgttcaccgccaaccccttcgagcaagacgtgggcttacggagttcctatgctagtcagcatagtcagct

SEQ ID NO: 320125 - DNA, 90 bp, Homo sapiens
tgcttgcctgcgtccccagactcagagtttgtaggggcctgataaaaaatggagaacgacaagatgaagaaagtcttggaggaaggcgca

SEQ ID NO: 320126 - DNA, 96 bp, Homo sapiens
caacgagtccctgggcgcggccgtggggcagctgcccatcacaaaccccatcatcacccagttcttccccaccctgctgctgtggtgcttctcggc

SEQ ID NO: 320127 - DNA, 80 bp, Homo sapiens
ctggattatactgtactgcccatgaaaaaggatgttgaccggacagagcttactcacatagcatattggtatatcaaaat

SEQ ID NO: 320128 - DNA, 80 bp, Homo sapiens
agctgtgcagccgcgaggaggcgcgggaggtgttcgagaacgaccccgagacgggaaccttctgaccagcctcatgggct

SEQ ID NO: 320129 - DNA, 80 bp, Homo sapiens
tcactcctactagtggagggggtccaatgtcaccccaggatgatgaagcagaagaggccatcagtggcctatgtacatac

SEQ ID NO: 320130 - DNA, 100 bp, Homo sapiens
gtttgtggcagccctgcatggagcaagtctgtcagcaccatctttctaacagctttaatgactgatgaaacaatatccaatgtgccaatccttatcttgg

SEQ ID NO: 320131 - DNA, 100 bp, Homo sapiens
gagggcagacaataggaggcaaaatgttggataaatatatctatggagcacagacagagtctcactcccatcgcccagacttgagtgtagtgatgtgatc

SEQ ID NO: 320132 - DNA, 82 bp, Homo sapiens
ggcactgctttccactcggctcctgtcgtccgttctctcaggctcccgttcagaataccctctaccatctgctttggtcagg

SEQ ID NO: 320133 - DNA, 83 bp, Homo sapiens
tacattctcgacccgtggttcgcggcctcctcctcagtcgggatcaaccgatggaggtgagaagccctaccactgcaactggg

SEQ ID NO: 320134 - DNA, 75 bp, Homo sapiens
gacattctggggcacgccaccatttccaagcaagagcagtatgaaagtaccatcggattcaaacttcccagttac

SEQ ID NO: 320135 - DNA, 97 bp, Homo sapiens
cagctgactattttgccgtcggtaacagatccaactgtttcctggttataaggtttggtgcacctcgatttggaggaagtagggcagggcccttatc

SEQ ID NO: 320136 - DNA, 83 bp, Homo sapiens
gtctgcgagccaggattcccgcagggtttccaggcctgaggtgcccgccctggccccaggagaatgaaccagccgcagaggat

SEQ ID NO: 320137 - DNA, 75 bp, Homo sapiens
cagacgcggtcctggatatacttcaggctgaaatgccacagcttcctcaagatttgaaaggagaaactttttctc

SEQ ID NO: 320138 - DNA, 100 bp, Homo sapiens
atcacttatcacaacgagctggacatgaacttatatatgagaattgctccagaactctatcataaggaattcctcctgatcagcagagactgatctttgc

SEQ ID NO: 320139 - DNA, 100 bp, Homo sapiens
cagcatggaccagcgagagcccctgcctcccgctcctgcagattggctcacagtggttgattgatcaaccccattggacgttggttctgtggtacaaatg

SEQ ID NO: 320140 - DNA, 81 bp, Homo sapiens
cgatcctgtaactgccaaacccaagttggttggagatgtggattttgaagatggagtgaaggtacctgagcgcaggaacca

SEQ ID NO: 320141 - DNA, 83 bp, Homo sapiens
caatgccattgaattctccaacaatggaggccagtggctggtctcagcttccccgggcgctgcctggacaggcctgcctgcgt

SEQ ID NO: 320142 - DNA, 75 bp, Homo sapiens
cttacctcacctctaattagggacgaattggagaagaaggatggaggccaaccccagtgctgatctctactacac

SEQ ID NO: 320143 - DNA, 83 bp, Homo sapiens
caagaatcctcgacatggcaaggaggagctcgttccagtcgtgtcagccatgccagtgacggtaacccgcaccaccatcacaa

SEQ ID NO: 320144 - DNA, 100 bp, Homo sapiens
tcccctgcaccatgagctggggcaccgagctctggattcctcttctcctgtaaatgaccacagaggaagacaatgaatgaggtgaaagaatcccttcgca

SEQ ID NO: 320145 - DNA, 75 bp, Homo sapiens
gccagaagtgcatcctctcacaccccagctgtgcatggtgcaagcaactgggcaattgaaggaacagactaaaaa

SEQ ID NO: 320146 - DNA, 80 bp, Homo sapiens
caaagaatagagttgagcctgtgggacacttcgggtattgatgtcaagctgaaccatcgtaggaagttgaaagccttaga

SEQ ID NO: 320147 - DNA, 75 bp, Homo sapiens
atttcatcagactaaaaagttacagggcatgtcggggaaaccagcacgatgtgccagtcattcctttggatgtag

SEQ ID NO: 320148 - DNA, 50 bp, Homo sapiens
atcagaaccggtacctggatggcatggcaaaaagggcagctagctgtaga

SEQ ID NO: 320149 - DNA, 101 bp, Homo sapiens
gcagggggacggggaccagcagctgtcgccgccgctctcaggtactccaaagattcaggtttactcacgtcatccagcagagaatggaaagtcaaatttcc

SEQ ID NO: 320150 - DNA, 100 bp, Homo sapiens
ctgcgcgggacggctctgtaggaaggaacttggttccccctccctcagcttccgccccaaaaggctttggtgttaagatgttgagtactgccaacatgaa

SEQ ID NO: 320151 - DNA, 75 bp, Homo sapiens
agggtcctttatatagaagggagagtaggctgtgctcctgtgtctgctggatttattccccatcctggagaaaac

SEQ ID NO: 320152 - DNA, 82 bp, Homo sapiens
cccccccggaattctgagcaccaaaagatgtgaagttcatttccaatccgccctccatggtggcagcggggagcgtggtggc

SEQ ID NO: 320153 - DNA, 75 bp, Homo sapiens
tttcaaagaacagaatgctaaggaagctgtggcaaccctggtacctgacagtgtaaagaaggagctcctacaaag

SEQ ID NO: 320154 - DNA, 101 bp, Homo sapiens
gacaaggaggttcagtggacccttggagccatcctctacaggacccgctttctaccattaaggctgggccagtaataaaggtgaaaattccaaaagataag

SEQ ID NO: 320155 - DNA, 82 bp, Homo sapiens
agtacctgcagaaggtctctggagacatcttcagcaggtgcagagcattgtagaccaaggagccatggataggagaagtatg

SEQ ID NO: 320156 - DNA, 74 bp, Homo sapiens
agcaatatctctgggctttcacaggtggataagattgtggaccagctgcagcagttaatgcaggtgtatgactt

SEQ ID NO: 320157 - DNA, 75 bp, Homo sapiens
ggagaattataggaacctggtctccctgggcttcagggatgacttcttagggggcaggggaggtagtcgcccagg

SEQ ID NO: 320158 - DNA, 74 bp, Homo sapiens
gagtttgtagcctattggaggaaaacacaccaaggagaactctcttcagaggtcgaagacgacgagaagatgac

SEQ ID NO: 320159 - DNA, 100 bp, Homo sapiens
gcttcggagcggccggtactgttgaaagcgacaagtggaggcgccgctctagcggccgggactctgaactatggcgtcctcctgcatatgcccaagagga

SEQ ID NO: 320160 - DNA, 100 bp, Homo sapiens
gccgcctcctccgccgcccgaaaacccggagtgccccgcacaggaatgtttacccttgcggaagttgcatcacttaatgacattcagccaacttaccgaa

SEQ ID NO: 320161 - DNA, 100 bp, Homo sapiens
acctggctggcctcaagtacagggtcatcaagggcacatcgtggtggccgtgtccgccgcgggcctcctggtgccgctgtccctcctgctgctgatccag

SEQ ID NO: 320162 - DNA, 87 bp, Homo sapiens
gcggcctcggcctccggcgcagcccggaaatgtccggcaagatcgagaaagcagtatgacgccgtgcccatccagtccagcgtggtg

SEQ ID NO: 320163 - DNA, 99 bp, Homo sapiens
gttgctgtcaaggctgacaattttctccacaaaccggaggactacccccagactgcagtaagtgttgtcatggagactacagctttcgaggctaccaag

SEQ ID NO: 320164 - DNA, 98 bp, Homo sapiens
gggatccggctcctccagctaccggcccaaggccatctacctggacatcgatggacgcattcagaaggggctgcagtgaacctcactctggtcactcc

SEQ ID NO: 320165 - DNA, 98 bp, Homo sapiens
agttacatactgattctttaagaaaatcagataacttgtactggagagaaatcctacaagtgtgaggaggaagaaggtgggaaaggtgaaaagaggaa

SEQ ID NO: 320166 - DNA, 100 bp, Homo sapiens
ttgatgatatgttatcaaaagtagagaaaatgaaaggagagcaagaatctcatagctatctcacgtgagagggcagtggaactccttaggaaatgtctgg

SEQ ID NO: 320167 - DNA, 87 bp, Homo sapiens
ctgttgtagctgttcctctggcaatacaaactttctgctttcattactgtaaaatggggaaaggagaaatttgaaggtgtagaattg

SEQ ID NO: 320168 - DNA, 75 bp, Homo sapiens
gcccaagatggccgacttcgatgatcgtgtgtcggatgaggagaaggcctcaggagtgcaagtagctgatgaagt

SEQ ID NO: 320169 - DNA, 123 bp, Homo sapiens
ccacgcccgcctccgccaactttcacgctgcctcggcggcccggcccggctcgacgccaatgggtgattgtgaagacaagaacggaatatcagccggaacagaagaacaaagggaagttccgg

SEQ ID NO: 320170 - DNA, 144 bp, Homo sapiens
ctgtccgggcgctcgccgagccgggccgcggcgccgagtcgaacggggagccgagctggagctgccgcggcgcagccaggattgtcagtggcttcgccccgaggagagctgactgccctgggctgctgcctccggcagagctga

SEQ ID NO: 320171 - DNA, 100 bp, Homo sapiens
ggtgaagctgtctcaaacattcaagaaaacacacagactccaactgtacaagaggagagtgaagaggaagaggatcgacgagaacgtgctaggagcccag

SEQ ID NO: 320172 - DNA, 84 bp, Homo sapiens
gcggatgccctgcagtacctgcagaaggtctctggagacatcttcagcagaattcagaaggagctggcggacatcactttagac

SEQ ID NO: 320173 - DNA, 90 bp, Homo sapiens
gttcagttcgtcatggggctgtttggaaagacccaggagaagccgcccaaagaactgtgtttgaaagatgtatggtgatcttgaaacctc

SEQ ID NO: 320174 - DNA, 49 bp, Homo sapiens
gaagcaggagccctactcggcaggctaccggctctctgaccagttccac

SEQ ID NO: 320175 - DNA, 75 bp, Homo sapiens
gtttagatatgctggtcctgaagatgatgctgccattaccttggttgctgctgactcagccattctagaagttct

SEQ ID NO: 320176 - DNA, 75 bp, Homo sapiens
ggaccagtgtgaatttggaagggatcgtgtggcatgaaacagaagaaggatgggaagcacaaaatgcaagaggaa

SEQ ID NO: 320177 - DNA, 100 bp, Homo sapiens
cgctgagtggtttttcggatcatgtctggtggctccgcggattataacagccatggccatgcagaaaatctttgcccgggaaatcttggactccaggggc

SEQ ID NO: 320178 - DNA, 98 bp, Homo sapiens
aaccaggcaatgctggatagataccgaattcttatcacaaagctcctgcccctcctaaagctgaagccaaagcgaaggctttaaaggccaagaaggca

SEQ ID NO: 320179 - DNA, 76 bp, Homo sapiens
ttctcagctggctctggatatctacggagggaccatgcttagctcaggatccggagaccctctgcagtgtggagcc

SEQ ID NO: 320180 - DNA, 101 bp, Homo sapiens
tatactggaagaggcatgccagaggtagagcaggtccagagggggcaaacctctttatttaccaccttccacaggaatttggagaccaggacattctgcag

SEQ ID NO: 320181 - DNA, 100 bp, Homo sapiens
cactgactcatgggccctggcggtggacgagcaggaagctgcggctgagtcggccacttcccctcaccagtcacagcagtccactgtggatgttggccag

SEQ ID NO: 320182 - DNA, 90 bp, Homo sapiens
cttccatagggctgagtctgggaccgagataatccaggcacatggcggcactgttgaccccaccttcacgagtcgatgcacgcaccttct

SEQ ID NO: 320183 - DNA, 101 bp, Homo sapiens
gaagaaaatacaaatcacacgcataatggatgaaaggaaccgacaggtgatttcctaaaaactttggaagacccagatttgaatgtgagaagagtagcctt

SEQ ID NO: 320184 - DNA, 96 bp, Homo sapiens
aacgacttcccgggagaaatggtcgtggtggacgacctggagaacacggagctgccctacttcgtgctggctccgagccctggaggagcagcacgg

SEQ ID NO: 320185 - DNA, 76 bp, Homo sapiens
agatgaactgtccttccaacggggtgacctcatccgtattctgagcaaggcatgtagaagtccaggtgtttggtga

SEQ ID NO: 320186 - DNA, 113 bp, Homo sapiens
cattatctcgaatgagaccagcctggagaagtcagtgcttttggagctgcagcagcacctgagaatgccgtgaatggagaacacctgtggctggagaccaacgtctcgggaga

SEQ ID NO: 320187 - DNA, 87 bp, Homo sapiens
aatgacagcactgtagaacagctttatgaaacagcttgcttcctacaggaacgatttgtaaccctggaccgcggaagtctatgtcta

SEQ ID NO: 320188 - DNA, 83 bp, Homo sapiens
cacaaagagcttgctccctacgatgagaactggttctacacgcgagctgatagcagactccttgaaagcagggtccttgttta

SEQ ID NO: 320189 - DNA, 101 bp, Homo sapiens
aagaacatggccatgttggcccagcaaatgcaactagccaatgccatgatgcctggtgccccattacaacccgtgtatgtgcagaagcttataatcctgat

SEQ ID NO: 320190 - DNA, 90 bp, Homo sapiens
ttgaggactgccagctggcgctgcagacttataagctagcaattacagatttaactacagctatcagcatggacaaaaatagttatacag

SEQ ID NO: 320191 - DNA, 100 bp, Homo sapiens
gtgatagaagaatttttggcaacaggagagaagctttttggaccttatgtttggggaagcgcccttgtggatgaattaaaggagagtatattcccagtcg

SEQ ID NO: 320192 - DNA, 100 bp, Homo sapiens
ggagaaaatggagagctccagcagcgatgatgaggacaaggaagaagaaatgaacagcaaggctgaagacagaggtttgctgaaaagcccagtgaacaag

SEQ ID NO: 320193 - DNA, 100 bp, Homo sapiens
cccaacacgtctctgttcgtcaggaacgtggccgacgacaccagaattcctagaggacctgtgcaacaacctcttgaggatcgaatcttcactcccgctg

SEQ ID NO: 320194 - DNA, 76 bp, Homo sapiens
acaagattgatataggcgcagtatattctcacagacttcttggacacttaatgattgttggcaagaaatgtgctgc

SEQ ID NO: 320195 - DNA, 100 bp, Homo sapiens
tgatttgctgtcagccatgaacggatggatgtgatgcctgctagccaaaagggtgggaagaagagcgctatcctgaaggcatcaagtggaaattcctaga

SEQ ID NO: 320196 - DNA, 100 bp, Homo sapiens
cgctatggatgatcgagaggatctggtgtaccaggcgaagctggccgagcaggctgagcgatacgacgttacagaatgtctgaaggggacagtgtgggag

SEQ ID NO: 320197 - DNA, 96 bp, Homo sapiens
caaccacatcctcctcctcctacacccaaaggctcccatggagagctcagtaaggaagagcccaacactgctggaagtgagcatgccccatttcat

SEQ ID NO: 320198 - DNA, 100 bp, Homo sapiens
atggtgatgccactttgaaatttgaaccatttgttcttcatgtgcagtgtcgacaattgcaggatgcacagattctggcagacctgttatcctaaactag

SEQ ID NO: 320199 - DNA, 98 bp, Homo sapiens
gggtattcactggggattctgagctttggctactccagtttcccacgacaccaccctggaggagaagaggttctgctggaacaagctggtgtagatgc

SEQ ID NO: 320200 - DNA, 90 bp, Homo sapiens
tggaagatttggaacctcactgaaaattggtattgttggattgccaaatgttgggggtcaggcccagccccaggcccagtggtattactg

SEQ ID NO: 320201 - DNA, 100 bp, Homo sapiens
ggatccggggatcaaagagcagtgggggttgctgacccagaggagagttctccaaacatgatcgtttactgcaaagttatcttgacgaatcagattacaa

SEQ ID NO: 320202 - DNA, 90 bp, Homo sapiens
gtgaatttcgtaaccagaagccgaagccggagaaccaaggtagctacagcaagctgggtagcaggcagatccaaaggatatcatgaagtt

SEQ ID NO: 320203 - DNA, 90 bp, Homo sapiens
gttgcttcagagtgtgaagtcaaatgcatgccaacattccagttttttaagaagggacaaaagctctgctctcgtcaagagagttaccca

SEQ ID NO: 320204 - DNA, 110 bp, Homo sapiens
aaaagatgtcagatgtgtacagtattttgcagagcatcccccaaagacagattgaagaaatgcagagacaggaagagaatggagactacacatatgtggaaagagtgaag

SEQ ID NO: 320205 - DNA, 132 bp, Homo sapiens
tgagccggcggtcggtgctggagctgggttcgggcaccggggccgtggggctcatggctgctaccctcggcattgttggtgctctgagggtgtcagccaggccactcatgcagaccattgcggcagcactga

SEQ ID NO: 320206 - DNA, 50 bp, Homo sapiens
ggcaaatattacacttctctccttgtagatgacattaatgctgataagaa

SEQ ID NO: 320207 - DNA, 80 bp, Homo sapiens
ttgatagaactgcaagctatgaggagctggagctctcaaacactgctgtcctgcaccagatgcggcgggaccaggtgaca

SEQ ID NO: 320208 - DNA, 82 bp, Homo sapiens
tttagctcggctgccgaacttcattgcacagttgagacccagccgatgcccaatcctgtggcgtactacctgcaccactcac

SEQ ID NO: 320209 - DNA, 98 bp, Homo sapiens
caaactcagctcgcccggtttctcggcgaatgacagcacaggaagacaactgttagttttgtggcttactgctgctccacccagtgtctgcagacttt

SEQ ID NO: 320210 - DNA, 100 bp, Homo sapiens
gcaccagtagcttttctgagaatacttgctgaaaaggaagttttctggaatggactatcaagaaatccaagtggtaatgggcgaagtttattcagcatcc

SEQ ID NO: 320211 - DNA, 83 bp, Homo sapiens
gggtgcccgtggaccacaggccctcgttgcccagataggagcagggacatggcatctctccggctgcacgcggcccgccaggg

SEQ ID NO: 320212 - DNA, 100 bp, Homo sapiens
gtgaagccaccgtcatcatgtctgaccagagaaaatgctgctgtgaagacccaattaaagctttcacataaatgaagctacagctatcatgatttagtgc

SEQ ID NO: 320213 - DNA, 75 bp, Homo sapiens
cgacatgaagaaagacgtgcggatcctgctggtgggagaaccctcctgacaaggtgatccgggcgggccccgcag

SEQ ID NO: 320214 - DNA, 90 bp, Homo sapiens
tataattaatgcaataaaacgcttccatctttatccagagagactaaggtgtcagtatgttcttcaagctgctctgctcctgggcccaag

SEQ ID NO: 320215 - DNA, 101 bp, Homo sapiens
ctggaactgaaccagaggttcacaaaacaagtgtagtaggccagccatgtgactgccttcctcccctgcgggcagcagccgagcagctacggcagaaggat

SEQ ID NO: 320216 - DNA, 74 bp, Homo sapiens
ggacagtacagacaagcagtgcaaaaggcatagactacgataagctcattggtgctgggcctgtacaagggcct

SEQ ID NO: 320217 - DNA, 50 bp, Homo sapiens
tttcatcacttctctccagaaggtatgaggatacatgggctgcacttcac

SEQ ID NO: 320218 - DNA, 75 bp, Homo sapiens
ccagcactaagaaaagaagggctaaaagatgaggaagatttctttttcgaagcattcagcaaacaatggcaaggc

SEQ ID NO: 320219 - DNA, 98 bp, Homo sapiens
aaatgaagttgatggaattacactgtgatacgactgactgtgctggagaatctggtaaaagcaccattgtgaagcagatgaggatcctgcatgttaat

SEQ ID NO: 320220 - DNA, 101 bp, Homo sapiens
ctttgcacaacaaaatgtttgagtcaattctgaaagctccggtattattctttgatagaaatccaataggtgctggagaatctggtaaaagcaccattgtg

SEQ ID NO: 320221 - DNA, 75 bp, Homo sapiens
aaaagatacaacgaactagcacaacgagggagaactacgatgacccgcacaaaacccctgcctccccagttgtcc

SEQ ID NO: 320222 - DNA, 97 bp, Homo sapiens
attaaagatgattatagccaaaaatggcccagacacagaaagatttggaggccaatcactgccaccttttatttccctgtgggtccaggaactggat

SEQ ID NO: 320223 - DNA, 90 bp, Homo sapiens
cccgcgcagtgctgccaacgccccggtggagaagctgagagccctatgagtttgtctctctggaatggctgcaaaagtggttggatgaat

SEQ ID NO: 320224 - DNA, 82 bp, Homo sapiens
tgatgatcctgccatgcaggcaggccctgagcacgctgctgtgtgagcagcaggtacaccaggggttggaaaaaccacacta

SEQ ID NO: 320225 - DNA, 100 bp, Homo sapiens
gtcccacctggcggccatcgtcatcctgctgctgaagatctggaagacgcgctcctgcgccggtccaacccagatcaaccaagtggtgagtcatccaaac

SEQ ID NO: 320226 - DNA, 75 bp, Homo sapiens
cagaaatgctaatcttgtctatttgaataggcctaaagggcactccacagaaggatgttattatcaagtcagatg

SEQ ID NO: 320227 - DNA, 100 bp, Homo sapiens
gggcatggtggctgggaccaccatggccatgtcagcaggttccctcggagacatggaggccagagaggaggtgcagttggtgggtgccagccacatggag

SEQ ID NO: 320228 - DNA, 78 bp, Homo sapiens
agcgatctacccaccttaccctcccaaagtggtgagattacaggatctcaccatcccggagtctagtaccgtgaaggg

SEQ ID NO: 320229 - DNA, 90 bp, Homo sapiens
tgctgccacgagagatcagttaaataacactcgtgaaactgctcaggccatcaagggtatgcatatacgaaaagccacgaagtatctgaa

SEQ ID NO: 320230 - DNA, 75 bp, Homo sapiens
accaacttggctcccaaaagcacagttggaaagatccaaataatgacttcagaaaaaacttgaaagtaacagcag

SEQ ID NO: 320231 - DNA, 100 bp, Homo sapiens
gggagacgagaagcctgaaaagtcgcagcgagctggagccgccggagggtcgacaagtgcccccaatgatttatggtacaacttcattgaactgccctac

SEQ ID NO: 320232 - DNA, 98 bp, Homo sapiens
cagggattgggaaaatctcttcagggtggccatgaacggtaaggcccgcaaagaggcggtgcagactgcggctaaggaactcctcaagttcgtgaacc

SEQ ID NO: 320233 - DNA, 98 bp, Homo sapiens
tacagcaggctgggtgtcctgtaccagaatacataaaaggttttcagaaactactaagctatttcaagaagcccctgaatatctactttggatttatt

SEQ ID NO: 320234 - DNA, 100 bp, Homo sapiens
tctccaagttcagcatccccaagcagggggagtactatactggcaattgctggagaagattttgcaattgttgcttctgatactcgattgagtgaagggt

SEQ ID NO: 320235 - DNA, 100 bp, Homo sapiens
agctttgtaggagcatggcttggagcacttcctattccactggattgggaaagaccatggcaggcaaagaggccatgctgcgacagaaggactatgagac

SEQ ID NO: 320236 - DNA, 74 bp, Homo sapiens
cttgggtcggagcccatctgatgaatacaaagacaacctgcaccagaaggtgactgaggggcagcaggagcgcc

SEQ ID NO: 320237 - DNA, 51 bp, Homo sapiens
actcggacctgagtgaccccatgtgggtattacaagtggataaataatgtg

SEQ ID NO: 320238 - DNA, 82 bp, Homo sapiens
agcgagaaggcacggagtcgccgcggagcgcagatgatatcatcaagttgaatcgaaaggaagggaagaagcagaattttcc

SEQ ID NO: 320239 - DNA, 82 bp, Homo sapiens
gggcaaactaagccgattttccggaaaaagccttacggacatccaaaaattgcttggaactgacttcatgggtaccataagt

SEQ ID NO: 320240 - DNA, 73 bp, Homo sapiens
gcacccacgaatctgcccacccctcctgtaacccagcctgtttcacttcttgatttgttggagaccaagaagc

SEQ ID NO: 320241 - DNA, 98 bp, Homo sapiens
ggagggcgcatttctcagctcttgctcttcaaacctgctgaaaggaattcctagatctaaacaccagtaccttccactggaagaatctcaaacagcgc

SEQ ID NO: 320242 - DNA, 75 bp, Homo sapiens
caggtctctgtcgagcagcggacgccggtctctgttccgcaggatgtgaaagcaagttgaatacattggtgcaga

SEQ ID NO: 320243 - DNA, 98 bp, Homo sapiens
ctcatcatgcagttgcttagagacaacctaacaggcatatctggaatctgaagttgctatatctgaggagttggttcagaagtacagtaattctgctc

SEQ ID NO: 320244 - DNA, 97 bp, Homo sapiens
ttgaagagactgctagattccagccaggatacagatcttaaatttgtcaggacccgtcgccatgggccgtgtgatccgtggacagaggaagggcgcc

SEQ ID NO: 320245 - DNA, 88 bp, Homo sapiens
ccctggtgcccagccgggaactccccatcgcgttttgccagcgataatacgcctcagggatttgtcttggctgttactatgacacggg

SEQ ID NO: 320246 - DNA, 100 bp, Homo sapiens
ctcagcttcacaccgtcaaaagagtcggactcaggcccttaagcaaaactgctggagccagttctgcttctcggcaaggagcgatttgctggtgtagaca

SEQ ID NO: 320247 - DNA, 98 bp, Homo sapiens
gcgccgatacttacataatcgcaaagtggaacatgaagctctagttacctagaaaagtacgagaaagttcatcattttggggaggatgatgatgaggt

SEQ ID NO: 320248 - DNA, 82 bp, Homo sapiens
gcacacgcgcagccccggcctctcggcctctgccggagaaacaggtgtcgtgaaaactacccctaaaagccaaaatgggaaa

SEQ ID NO: 320249 - DNA, 100 bp, Homo sapiens
gcggagcccagacctacccgggcgaagcgggcgagcggtggtttggacgccggcggagacgcgggcgagaatgtcatacccaggctatcccccaacaggc

SEQ ID NO: 320250 - DNA, 100 bp, Homo sapiens
cttaaaagcagcgtgcctggttacagctgtttccacgtgcggtgctcgtcgggagtgatcacctaccctacagagacaaagcatggaggacacaagaatg

SEQ ID NO: 320251 - DNA, 51 bp, Homo sapiens
aaaatgcaccacgaagccgtcagaggttctaaggcccagcagctactacaa

SEQ ID NO: 320252 - DNA, 75 bp, Homo sapiens
ctgtgaacagtttaacatcaacaagaggatgtccggttcaactttagttggcttaccaagagtgaagcgtgacaa

SEQ ID NO: 320253 - DNA, 75 bp, Homo sapiens
tccccaagtcgacgccgcaacccggggaaagcagcaagagtgagccatggagctacgtgtggggaacaagtaccg

SEQ ID NO: 320254 - DNA, 50 bp, Homo sapiens
caccgaatcgctgtcacgccggcaggtgcatggctgcctcctaatcccat

SEQ ID NO: 320255 - DNA, 74 bp, Homo sapiens
aaaagaaagctgcgttaatgtttgcaaatgcagaggaagaatttttctatgagttgatgcaaacactgaagaaa

SEQ ID NO: 320256 - DNA, 77 bp, Homo sapiens
agaggatcgcccaatccacatgcttttccaggaaagtgctgacgttggagaaggaggataaccagaccttcggcttt

SEQ ID NO: 320257 - DNA, 82 bp, Homo sapiens
cgccgcccgtccacacccgccgccagcaggacgaagccttctcgcaggatcaacccaactccggtgagcgaagagcggtcac

SEQ ID NO: 320258 - DNA, 74 bp, Homo sapiens
ttaggattcacggacttctcctgtaggaagtttcctcgcatttctcagataaagcttcaccaagaaggttgccc

SEQ ID NO: 320259 - DNA, 100 bp, Homo sapiens
ttcaggctgccgctgcattaggggcttcctgaggaagcgcgggcggacgacagaggatgccgaaccactccaattttgtgaacaatttggcatgaggaga

SEQ ID NO: 320260 - DNA, 75 bp, Homo sapiens
cggaggagcggctgctgctgctgctgctgctgctggtggcccctttgcaggacatggatttgattgacatacttt

SEQ ID NO: 320261 - DNA, 82 bp, Homo sapiens
gacagaggcaccaaggacctccaagacaggtgagaagccctaccactgcaactgggacggctgcggctggaagtttgcgcgc

SEQ ID NO: 320262 - DNA, 75 bp, Homo sapiens
ccgccctcgcaacctggcagccgccgccgtggaaggcagtgtgtgaagaaaccctgaaggtcgggcctcaagtag

SEQ ID NO: 320263 - DNA, 83 bp, Homo sapiens
ctgaagatagatcgccatcatggcataatcaccagcaacacccgggacaataatacgggggccacctacccccacctgaactt

SEQ ID NO: 320264 - DNA, 83 bp, Homo sapiens
agaactcccatcagtttctgtatagtgtaaaaggccaagattgacagacacctaatattcatgacttgagaatattctgcagc

SEQ ID NO: 320265 - DNA, 100 bp, Homo sapiens
aagtgaggaattttgaagtacaccgtggtgacattgtatcattggtgattcactccttctccagttgcacagccacacccttcagctggccttaatgttg

SEQ ID NO: 320266 - DNA, 100 bp, Homo sapiens
gctacaggctttaagaaaaatgcctcacattaaacatgtggatctaaggaggcaagtgaggcctatctggttggcctttttgaagacaccaacctgtgtg

SEQ ID NO: 320267 - DNA, 50 bp, Homo sapiens
cctacactacagtctaatgaatgtcggcagaaccaattgaaagaccaaca

SEQ ID NO: 320268 - DNA, 74 bp, Homo sapiens
aacgtcagctgcgctcccctaggagtgctgagcccgcggaaccgcagccatgggtgtccgcaatgttgccagtg

SEQ ID NO: 320269 - DNA, 75 bp, Homo sapiens
ggcccaccgccagagaccctcagccttgactgggtctgagcttcctgccaccgccctggggcgattgcagttcag

SEQ ID NO: 320270 - DNA, 75 bp, Homo sapiens
ggaccgcggggagcgcgggtttgacccggagccgcgagggacgaccgggagacatgaccgataatagcaacaatc

SEQ ID NO: 320271 - DNA, 82 bp, Homo sapiens
gagatgcggggcaatgcactagaaaagaagtctaactatgaagtattagagaagtgttgatggcgtctctgaatccaagttg

SEQ ID NO: 320272 - DNA, 89 bp, Homo sapiens
ggtttccctcggcgtgctactgtgcgctcgatccagcaccatggggaagcgggacaatcgggtgatttctcacattggcaaactgagag

SEQ ID NO: 320273 - DNA, 138 bp, Homo sapiens
gcctgatgttgctaaatgtagacaatggttagagaagaattttccaaatgaatttgcaaaacttactgtagtgctagttgccgcagaccaatcaaaggggctgcaggccggccattagaactcagtgatttcaggatg

SEQ ID NO: 320274 - DNA, 102 bp, Homo sapiens
agctaagaaggttcaaacaaatttgcaaatgatatacaacttctaaggatttgtactgtgttcgcagtgacctggggaacctgctcaaagccctgggtcgct

SEQ ID NO: 320275 - DNA, 75 bp, Homo sapiens
ctcactgcagcctccgcctcccagattacgctctggggaaggactgtattatgcacgggtacatgctgaaactgg

SEQ ID NO: 320276 - DNA, 50 bp, Homo sapiens
cggcagcgctggactaggtggcagctcttagaacaagctctggtgattga

SEQ ID NO: 320277 - DNA, 73 bp, Homo sapiens
ccgcgcccgcttcggagagagaaatgctggggtggtcataggtgacaaggtggttctgaaccccgtcaatgct

SEQ ID NO: 320278 - DNA, 101 bp, Homo sapiens
acaagtctctgaagccgtgcccgttcttcctggagggaaagtgccgctttaaggagaactgcaggttgaaggggcccggccaggactcggggaagggtggc

SEQ ID NO: 320279 - DNA, 74 bp, Homo sapiens
gctccgtcaggtcagaacgccacttgcacaagatacagcggctggactctattacctggcagaactgatagaag

SEQ ID NO: 320280 - DNA, 100 bp, Homo sapiens
gagtttcccacttgattacccgttaagtcccccaaagatgagatttacctgtgagatgtttcatcccaacagtcttatatccagatggccaggctcagat

SEQ ID NO: 320281 - DNA, 74 bp, Homo sapiens
ttcatcttctagaccacagaagtaaatggtttgtctcggaagcagcctggcatcctcgctacaacctcattgtt

SEQ ID NO: 320282 - DNA, 75 bp, Homo sapiens
atgagttggggcgcccagctgccaacaccaagatggtttcacccaaatatcactggtgtggaggcagaaaaccta

SEQ ID NO: 320283 - DNA, 83 bp, Homo sapiens
taaaatacctggatgaggaagatgaagaggccgccatggcatcagatgaaggcaaactttttgttggagggctgagttttgac

SEQ ID NO: 320284 - DNA, 80 bp, Homo sapiens
ctttggatcagacttttgtgttgcagttcgggaacatggagctgatccaggacacctcccgcccgccactggagtacgtg

SEQ ID NO: 320285 - DNA, 100 bp, Homo sapiens
gcccctagaggagtggtcacctgcctgagggcacttctgtcccaccagcatcagaccagtgaccaaagacttgaccactcaaagtccagctccccagaac

SEQ ID NO: 320286 - DNA, 83 bp, Homo sapiens
gtaaagtcagcatgagcaaaaactccaaactcctctccaccagcgccaagagtactatactggcaattgctggagaagatttt

SEQ ID NO: 320287 - DNA, 83 bp, Homo sapiens
acggggttcgggtgtctcgtgtgtgaacatcacaggttcaagcgttggccttttcatatatgctgctctgcagaggatgctgg

SEQ ID NO: 320288 - DNA, 96 bp, Homo sapiens
ggaagatgtgacaactaccggagcctcgtcacgtgttcaatatgctaaagaagtatgtccgcgcagaacagaaggacagacagcacaccctaaagc

SEQ ID NO: 320289 - DNA, 82 bp, Homo sapiens
agaactattaaccaccattcttcagtgggctgtgattttcagaggggaatactaagaacatccggtgaaagacagagatcac

SEQ ID NO: 320290 - DNA, 98 bp, Homo sapiens
taatttcaatttgaaaacaagtggaatagtgctgtcttccttgggaggccacggagaagatggtatctatgaagccaccaggtttccaggcatccctg

SEQ ID NO: 320291 - DNA, 100 bp, Homo sapiens
ctactagtacgactggcgggttgacctcagtctcctggagcttccagccagagggggccgacactactgtgtcggaaatcaatgtgttgacagttgcatt

SEQ ID NO: 320292 - DNA, 82 bp, Homo sapiens
caaaaatcaagtctgggaaggggaaaggtggtacacaagttgatacagaaattgaaggacatccccttgaatttttacggaa

SEQ ID NO: 320293 - DNA, 80 bp, Homo sapiens
ggaaactgattggaaactctttgggaaagccactcgaaaaggctttaaactccagagaacctcatatgtgtttagtaaga

SEQ ID NO: 320294 - DNA, 74 bp, Homo sapiens
ttatgtctctggtcagtgaagaatttccagaagagtttctctataacaacaatacaaggcaacaaactgaagca

SEQ ID NO: 320295 - DNA, 100 bp, Homo sapiens
cagcggagcacgcgggctgctcatcgtcagcagggagaggctgccccctcaagttctccccttttgaggggtttcggcccagccccagcctgccggagcc

SEQ ID NO: 320296 - DNA, 90 bp, Homo sapiens
atcacagcattaatgaaatgctctccacacaagccgattgcttatggatgcccaaatgcgttaagttcggatggtttctgccctatactc

SEQ ID NO: 320297 - DNA, 75 bp, Homo sapiens
ctggtcagtgccatgatccggcaggagcgctccacatcctaccaggagagtgatcagcagctggactgtgccttg

SEQ ID NO: 320298 - DNA, 100 bp, Homo sapiens
cgaaagcagtgacggaggagcttgtaccaccgggtgataaaagaaaatgtggctgaagttacccgaagttcagcttgcagtgtaattcagaagagttaag

SEQ ID NO: 320299 - DNA, 75 bp, Homo sapiens
ctcttgctgatggcatccgggctctggacaccactgacatggagaggcactgcattgatctcttcttagatttca

SEQ ID NO: 320300 - DNA, 75 bp, Homo sapiens
aagaagcgggccgcatgcctgtgtttccgcagcgagagcgaggaggagacaatgcagatcttcgtgaagactctg

SEQ ID NO: 320301 - DNA, 94 bp, Homo sapiens
gtaaaaatgagttggagccatgcattttatgacagtcaaacatgggaaaacattcttaaagctccttaataagcatttatagtcagtttttggc

SEQ ID NO: 320302 - DNA, 88 bp, Homo sapiens
aatatgaaaagaatgtatatgcaacaactgtggggacaccttacaaagactttgctaccaggacttgctggcccctctggggagatgg

SEQ ID NO: 320303 - DNA, 83 bp, Homo sapiens
tcggctttcgacaccaaccccttcgcggacccagtggatgtaaaccccttccaggtatatcccgtgccttacctgactggggg

SEQ ID NO: 320304 - DNA, 97 bp, Homo sapiens
aaaccggcgtctggacttggatgcctgcaaagcgaggctgaagaaggccaaggctgcagaagccaaagccacgagaaagcgtcgtggtggagcaata

SEQ ID NO: 320305 - DNA, 101 bp, Homo sapiens
ttgttcatttctaatcaactatgctagacagctgcaagctgaaaagtgcctgcaatttgccatttatttgtaataaggtgctggagaatctggtaaaagca

SEQ ID NO: 320306 - DNA, 75 bp, Homo sapiens
tcgacgtgctgtgcttactggtcggctaccggctctctgaccagttccacgacatcctcattcgaaagtttgaca

SEQ ID NO: 320307 - DNA, 95 bp, Homo sapiens
ccatctgtcgagatcacaagttgcatgttgactttagggtttttggaagaagctgaccgcctgaaaagaaattataaaacatgaaaatcgctttg

SEQ ID NO: 320308 - DNA, 75 bp, Homo sapiens
gtattctggtaatttcgaggaggtggaggaaggagaggccagtctaccctcccctgccatgaccctgtcatcagc

SEQ ID NO: 320309 - DNA, 50 bp, Homo sapiens
cggagctcccccaagagccggaaaggaaggagcagttggttcaatctctg

SEQ ID NO: 320310 - DNA, 80 bp, Homo sapiens
ccgacggcaccgtcaccgaggcgccgcgcacagtcaagaagtgatgtcttggcattgcccattttcaagcaggaagattc

SEQ ID NO: 320311 - DNA, 83 bp, Homo sapiens
tctgtctcgactgcactttgagaaggcatgatttcttggaaaggagagtccatatgtcaaacaatgtctcattgagaacatgg

SEQ ID NO: 320312 - DNA, 98 bp, Homo sapiens
gaaaagctgtgaaccgaaaaaccatagactacaatccatctgtaattaagtatttggaggattttaaacaagctgcactgataagccggactaacggg

SEQ ID NO: 320313 - DNA, 50 bp, Homo sapiens
agcagttctacaaggcgagccaggccaaacgtaccaagaaagtcgggatc

SEQ ID NO: 320314 - DNA, 98 bp, Homo sapiens
tcgcttcagtcagtcgggccgcgccgcgcctcagctctggttctcctgaaaagaaagctgaacattcatctataaatcaagaaaatggcactgcaaac

SEQ ID NO: 320315 - DNA, 74 bp, Homo sapiens
aaagacattacaccatctgaattgcctgcaaacccagccctgtatgatgagattcgtcagtttcgcaaggcctg

SEQ ID NO: 320316 - DNA, 101 bp, Homo sapiens
cagaagtgtcagagactgaggacttaaatgaagccactgattagcaatttaaagatcctctccaagacccaacatgagtgaagtttcctgcaagaaacggg

SEQ ID NO: 320317 - DNA, 74 bp, Homo sapiens
ctcacctggccagcgggacagcaggttcaacttcccaggtacatgtcccagagcaagcacacggaggcccggga

SEQ ID NO: 320318 - DNA, 83 bp, Homo sapiens
gtcattttactgtcaagacatttcttcggcattctgcaacagtcttatgatgtaatcagcgcgatttcacttcctgaatttcg

SEQ ID NO: 320319 - DNA, 49 bp, Homo sapiens
agaaaacaaaatggtggtatcatggtggtcttcaagctgacagagaagc

SEQ ID NO: 320320 - DNA, 50 bp, Homo sapiens
cccctgtcccctacgtcctacatgagacaatgcagatcttcgtgaagact

SEQ ID NO: 320321 - DNA, 76 bp, Homo sapiens
caactacctgcagcgggcctacatcaagcctgactggctcatggagaaagcctacctaagaatgaagccgggaccc

SEQ ID NO: 320322 - DNA, 85 bp, Homo sapiens
gcatccagattatccactgcaatcactgttacagatgaggaagttagtaatccatcctttttagatctggtgagaactccccaaa

SEQ ID NO: 320323 - DNA, 74 bp, Homo sapiens
cgtttcatacagaagtacctgcttcagagacatgagaagattcatactggatcagctcagctactatttaataa

SEQ ID NO: 320324 - DNA, 98 bp, Homo sapiens
gtgtctacagtgttctcgacttcgtcgctgaacttcatggaggaacacggagtgacccaaaccgaacatatggctaccatagaagcacatgcagtggc

SEQ ID NO: 320325 - DNA, 97 bp, Homo sapiens
aggatcagtaaagaaggaaaaagcagtaaagccagaggaaggtatgagaaagtgccagtcatcttggttgggaacaaagtggacctggaaagtgaga

SEQ ID NO: 320326 - DNA, 75 bp, Homo sapiens
ctgcgggtccgggattcccagccatggcagattcctccgggcagcagggccaccagcccctcgggttccaagatg

SEQ ID NO: 320327 - DNA, 98 bp, Homo sapiens
gatgaagaaccagtcagtaaagcaaaacagagtcggagtgaaaagaaggcacggaagctttctactcaacaggtctatccaggaaaatggtgaactaa

SEQ ID NO: 320328 - DNA, 100 bp, Homo sapiens
agctcatctctgagacccggaggaggttcgaagctgagtatgtgacagatggagttcgctcttgttgcccaggctggaatgcaatggcatgaccttggct

SEQ ID NO: 320329 - DNA, 75 bp, Homo sapiens
ccagagccccgcgtttcagccctagggaagatttcaatgggacagatgttacaagattttggaaaatttcttggg

SEQ ID NO: 320330 - DNA, 118 bp, Homo sapiens
ctggaggcggcgggagggccgccggaggaaacgctgtcactgtggaaacgtacatcgacgccatcagcaacaagcagggcgagctggagaattacgtgtccgacggctacaagaccgc

SEQ ID NO: 320331 - DNA, 80 bp, Homo sapiens
aatttacttctggatgccaatctgaatatcaaaatagcagggtcttactgaagtaacacaaagcttaaaaatggaaaatg

SEQ ID NO: 320332 - DNA, 88 bp, Homo sapiens
ggctcccgggctggactcaggcttctcagcttcctgcctgacacagctcacttcaagaagtgcacaatgtcagaacgtggaattaagt

SEQ ID NO: 320333 - DNA, 75 bp, Homo sapiens
gtggtgcacccagaggccggggaccttgccaaccctcccaagaagttcagagtatacacctgaagagcgtgatcc

SEQ ID NO: 320334 - DNA, 90 bp, Homo sapiens
gcgccgcggacgcgtcatcgagtgtgacgtggtgaaagagtgagtgtcgtggttggggtgctggacccagagtgcctaccctcgcctgcc

SEQ ID NO: 320335 - DNA, 101 bp, Homo sapiens
gtcggagtctgggggttcgcgcccgccgacccgcgccctgctccctctcagcacctgggcggacgattgatgtacttcaagctgaagtagctgcattgaag

SEQ ID NO: 320336 - DNA, 75 bp, Homo sapiens
gcagcaggtaccccctccacatccctagggctctgtgatgtaggcagagttcgttcccacatgcagggcagcaca

SEQ ID NO: 320337 - DNA, 101 bp, Homo sapiens
caactcttctctgacccataatgcctcaggtgatttcctaaaaactttggaagacccagatttgaatgtgagaagagtagccttggtcacatttaattcag

SEQ ID NO: 320338 - DNA, 75 bp, Homo sapiens
aggaacctgggcgagcagcggcgggggcccgaggggtgacttaagagattaaaattaatttggttgctgttggtt

SEQ ID NO: 320339 - DNA, 76 bp, Homo sapiens
tttgtttctccaaggtttgaaaagcagctggcctgcaaggtagaggaaggatggtgggaaggtgttctcaacggga

SEQ ID NO: 320340 - DNA, 76 bp, Homo sapiens
tggagtaagaggggttggctgtgaataatttcagaaactgtggaggagtgtcactgtagattccatggacgaggag

SEQ ID NO: 320341 - DNA, 98 bp, Homo sapiens
tttgagcttcctgtaccgctggatatatgatggggagcttgaggacacttaccacgaagcattgcaaaactggaagaaggagatgaactccaacttgc

SEQ ID NO: 320342 - DNA, 100 bp, Homo sapiens
aggcaccttcgggccctcctgccttcctgctggagccagttctgcttctcggcaaggagcgatttgctggtgtagacatccgtgtccgtgtaaagggtgg

SEQ ID NO: 320343 - DNA, 100 bp, Homo sapiens
gcgaggcggggccgccggggccgccatggagcccgactcggtgattgaggacaagaccatcgagctcatggtgtcatggagaaactccagctgggcccag

SEQ ID NO: 320344 - DNA, 100 bp, Homo sapiens
tggagacacggccagatctgccctccagtaccaggtcatcagtacaccatctgatattttcatggtgatggaatatgtctcaggaggagagctatttgat

SEQ ID NO: 320345 - DNA, 90 bp, Homo sapiens
gctacagggagggacccaccgtagagactaaggtctctcaggcagctgcagagcttcaacagtactgtatgcagaatgcctgcaaggatg

SEQ ID NO: 320346 - DNA, 100 bp, Homo sapiens
catgaacattatattccgttgaacttaccaatgccatttggaaaaggcaggattcaaagataccaaggtattggcatactccacacatctgtaccattct

SEQ ID NO: 320347 - DNA, 48 bp, Homo sapiens
tgcagagacagtagccatccagccagggactgttgacatttagggatg

SEQ ID NO: 320348 - DNA, 82 bp, Homo sapiens
tctcatctcgctcggctgcgggaaatcgggctgaagcgactgagtccgcgatggagaacattaaccaggtggtatttgttgg

SEQ ID NO: 320349 - DNA, 83 bp, Homo sapiens
ctccaaatggttgaaaacagatatacagatgtcaagccctccaacatcctagtcaactcccgtggggagatcaagctctgtga

SEQ ID NO: 320350 - DNA, 100 bp, Homo sapiens
atgtgcctacgccaaaacaattcgtagcagaaaatcagaaagtgcagttgacagaagggtcacgttcacactacaatatcaattgcaactcaacaaggac

SEQ ID NO: 320351 - DNA, 90 bp, Homo sapiens
gattattgaggttgtcccaaaagaagttctgtgctggtgggtcatatgttgtatgccctggagcgcttaaaggtcatgtgtgaggatgcc

SEQ ID NO: 320352 - DNA, 75 bp, Homo sapiens
ctgggaatgagcaagaatggaagatcaagctgcaagtgcttggaagaaaaaatgctgggcatcttggtgcagcac

SEQ ID NO: 320353 - DNA, 88 bp, Homo sapiens
tcatctggaattttgccgatttcatgactaaccagtatagccttctggcaggcattcctcagagagtcaagttcactgtcactaccgg

SEQ ID NO: 320354 - DNA, 108 bp, Homo sapiens
ctgcatcacagaagctggaagttctgatgttccactgaaatcacaatggaaagtcttgacttgactgggccgttgctccagggagaactgcaaatatcttcatccacc

SEQ ID NO: 320355 - DNA, 50 bp, Homo sapiens
tttctggcctggaggctatccagccatctactgccgaggatgttccaagc

SEQ ID NO: 320356 - DNA, 76 bp, Homo sapiens
attcatcccagaaatctaagaggctgattcaccccaagagtggccgttcctaccacgaggagttcaaccctccaaa

SEQ ID NO: 320357 - DNA, 75 bp, Homo sapiens
ccaagacagtggagtgggactggaaactgctcacctatgtcatggaggaagagttgaccatagtcggattaaact

SEQ ID NO: 320358 - DNA, 50 bp, Homo sapiens
agtgccaatgcatcttctgtactctggaacggaaaacagttcttccttca

SEQ ID NO: 320359 - DNA, 82 bp, Homo sapiens
agcgagctgagtggttgtgtggtcgcgtctcggaaaccggtagcgcttgcagcatggtattagaaaactactcggatgctcc

SEQ ID NO: 320360 - DNA, 101 bp, Homo sapiens
tagccacaatctccttgtttcagaagtgtacaaccagttgaaatttccagtaaaggccttcactattctgtgtgatattttgatgatcttcagccatcaga

SEQ ID NO: 320361 - DNA, 74 bp, Homo sapiens
ccttcaatactacctttatttccaccatagatttcctcctctgatgctcctcttcagcctttggtatcctctcc

SEQ ID NO: 320362 - DNA, 74 bp, Homo sapiens
atgggtccaagtgcgaccttaatgggaggccccgggaggccgaggttcgggaaggagtcaagactgagaacaac

SEQ ID NO: 320363 - DNA, 139 bp, Homo sapiens
cgcggccagaactgcggtcacttaagttttccgtgtgcgggttgcaaggagcgtgcgtgcgtctggcagaggtggaggagacactgaagcgactgcagagccagaagggagtgcagggaatcatcgtcgtgaacacaga

SEQ ID NO: 320364 - DNA, 98 bp, Homo sapiens
aactgcaccggaaatgtgcctaccaggctttactgcagatggtgcgtgacgagagccaccagatcctggcgctgtcagaaggccttgcacccccaagc

SEQ ID NO: 320365 - DNA, 104 bp, Homo sapiens
aagcggctcccagtccctgaaagcattaccgggttcgctaggctcacaggtctcgtctacagaggactggtctttcaatagcaagttttcacttcatcgacaac

SEQ ID NO: 320366 - DNA, 75 bp, Homo sapiens
acagaaacaaaatgtcaacaaattgatggtctcggaagggtgctgacctggaccgggagaagaaggctgccgagt

SEQ ID NO: 320367 - DNA, 100 bp, Homo sapiens
gcgcccgagtgccggcttctcccctacgcgctacacaagtggagctccttttcctccacctaccttcccgacaaatgaaccagtgagtgaagggcattat

SEQ ID NO: 320368 - DNA, 97 bp, Homo sapiens
gtttcaagggacgtaccaggaggatggtgcccagatgccttattggaggaactggaacgctccacccttcaggacagtgatgaatattccaacccag

SEQ ID NO: 320369 - DNA, 145 bp, Homo sapiens
tggcttgccggcttcagctcgcgcctcttcgccgtcatccgcttcgaaagcatcatccacgagttcgacccgtggggttcagctgttgcaaaaataattggtaataatgtcaagaaacttcagaaatttgcctccacagtcaaga

SEQ ID NO: 320370 - DNA, 75 bp, Homo sapiens
ttcctccttgggccaaaacctcagaagaatttgttcacataaacagattgcagatttctgctcatggcagatctt

SEQ ID NO: 320371 - DNA, 99 bp, Homo sapiens
gttgtcccaagacagtgcctcacccagctccccggatgaaacaggtggcatcccgttcatcttgactggtgagttcttccagcaatctcagcggccggc

SEQ ID NO: 320372 - DNA, 120 bp, Homo sapiens
ttttggtggagaattatccaacaagaaaaagacctgtggctattaagataggttggatggcaagcatgtggtgtttggcaaagtgaaagaaggcatgaatattgtggaggccatggagcg

SEQ ID NO: 320373 - DNA, 75 bp, Homo sapiens
aagttcagtataatcctacctatgagaccatgtttgctcctgagatggtctgtcagttcaaacagtggtaggaat

SEQ ID NO: 320374 - DNA, 100 bp, Homo sapiens
acagagctgtcatggctgccatctctacttccatccctgtaatttcacagccccagatgcggaaaacgccatgcggtacataaatgggacgcgtctggat

SEQ ID NO: 320375 - DNA, 74 bp, Homo sapiens
tggccttaaaattccaaaagaagcatttgaacaacctcagaccagttccacaaacctttcaacgaagtctaaaa

SEQ ID NO: 320376 - DNA, 74 bp, Homo sapiens
gccagccgctgttttgccggaggagcccctcaggccctacgagttccagggagctctgtcctggtgaccgtgcc

SEQ ID NO: 320377 - DNA, 100 bp, Homo sapiens
cgtcatcgagtgtgacgtggtgaaagaatttaagaagtgcaacatggccaggggctgcctctgctgcttgaagtacatgatgttcctcttcaatttgata

SEQ ID NO: 320378 - DNA, 75 bp, Homo sapiens
cagcaactcccccatcgtatgaatctcctgccctcaagtatgtgttgtatacattggttggctttgtgggttttg

SEQ ID NO: 320379 - DNA, 118 bp, Homo sapiens
cacgcagccgcggcttccggagccctcggggcggcggactggctcgcggtgcagggaaatcctcattgacgattcaatttgttgaaggccaatttgtggactcctacgatccaaccat

SEQ ID NO: 320380 - DNA, 75 bp, Homo sapiens
gtgcctgggtcaggagggcctggacaagatcctagaggtcaaaatgcagatcttcgtgaaaacccttaccggcaa

SEQ ID NO: 320381 - DNA, 83 bp, Homo sapiens
caggaattgagagtcacagaggaaggacagtggagtctggcatcttattgtacggactccagaattcctcagcagcatccttt

SEQ ID NO: 320382 - DNA, 83 bp, Homo sapiens
tgaccaccatggcagatggcaacagaggatgtcaacaattttttggagacagttgaatttctgaatgaaaagctggaaaaaag

SEQ ID NO: 320383 - DNA, 75 bp, Homo sapiens
tgtaagcgcagaaagcaggcgaacccgcggcgcaataacggcgcattctacattctaaaggggagctcagtgaag

SEQ ID NO: 320384 - DNA, 127 bp, Homo sapiens
agttatgcattggctggggagacccatctggactaccaaggagaagctatagactacttctactccaccaggaaggaactctcctgatgaatgcagtgtggccaaaggcgggaagatggtgggcagc

SEQ ID NO: 320385 - DNA, 100 bp, Homo sapiens
gagccagatgtttatgaaactagcgacctacctgaggatgatcaagcggagttcgatgcggcatttgatgaagcaattgctgaattggatacgctgaatg

SEQ ID NO: 320386 - DNA, 111 bp, Homo sapiens
ggtcattgttgcttccttcttcatattgaagaacttcaaccccacagtgtatccttttcaagatgtatggtctgctggctgtgtgttggctgagctgttactaggacaacc

SEQ ID NO: 320387 - DNA, 98 bp, Homo sapiens
agacacagtatagcttctgacagtggagacactggcattggaacttcctgttctgatagcgtggaagaacccttaggagaaatcttgagagtggacag

SEQ ID NO: 320388 - DNA, 100 bp, Homo sapiens
actgacggcaacctctacaaggccaagttcatctcctccgtcaccagccacatctaccagtgtactaatggtcacttgatgtgcgctggctgttttatcc

SEQ ID NO: 320389 - DNA, 75 bp, Homo sapiens
ttactttgaagtgaagattgtcagcaaaggaagagatggctgcggataaccgtctggtccttgtgcacaaaatcc

SEQ ID NO: 320390 - DNA, 99 bp, Homo sapiens
taaaggccaagatccaggataaggaaggtattgaagcccctgggtgataatttgatggaggaaaacataaggcagtctgtaacaaactctatcaaagca

SEQ ID NO: 320391 - DNA, 75 bp, Homo sapiens
cccgagcggccgccaaacaaaggtgagaagccctaccactgcaactgggacggctgcggctggaagtttgcgcgc

SEQ ID NO: 320392 - DNA, 108 bp, Homo sapiens
ctttttgcgagctttccgagtgccaggcgccggccggctgcgaagacgcggtgggccgcccctccgcccactgtttgtaacatggaagattggtcgagacaaaagatt

SEQ ID NO: 320393 - DNA, 90 bp, Homo sapiens
cggagtcgaggattccagggtcgaacactcgctgcagcatatcgtgagtgatgagatctgtgtgcaggtgactgacctttacctggcaga

SEQ ID NO: 320394 - DNA, 90 bp, Homo sapiens
gagaaagaatttgagcctctgctgaattggatgaaagataaagcccttaaggacaaggcatcaaacagtgcctcctacatccaggacgcc

SEQ ID NO: 320395 - DNA, 101 bp, Homo sapiens
ggtctgctcatggcgcacagccagcggctgctcttccgaatcgggtttttcgttggaatatacgttgcacatttatggcgattctgagtgtgagggcagac

SEQ ID NO: 320396 - DNA, 75 bp, Homo sapiens
ggaaaatgcgctcgggctggaccagcaggtggtcttactctgcagcagctgaaactgaagcacaagaagcccttg

SEQ ID NO: 320397 - DNA, 73 bp, Homo sapiens
tcctggagaaggcacagcggctgtatccgacgccgcgagttcgcggaaatgacttaatcgtctttttggcaga

SEQ ID NO: 320398 - DNA, 50 bp, Homo sapiens
gccaggacagaggaggctgtcggcaggacttcctcccagctgacatccag

SEQ ID NO: 320399 - DNA, 82 bp, Homo sapiens
tttcaagagagtaccattgggggtagctacagcaagctgggtagcaggcagatccaaaggatatcatgaagtttccagggcc

SEQ ID NO: 320400 - DNA, 100 bp, Homo sapiens
cggacctagacctggaatcgcccaagtccctctactcgcgagactgtgccctgtccacggtgcctcctgcatgtcctgctgccctgagctgtcccgagct

SEQ ID NO: 320401 - DNA, 96 bp, Homo sapiens
ggacggcggcgcggagaaggcagggcccacctttcctgtcctttgaggaggacccgcggcagcaggcactggagctggtggtgcaggaggtctcca

SEQ ID NO: 320402 - DNA, 75 bp, Homo sapiens
cggtatctctgtctgatgggagccagcgttgaggcgctgaccacgatctggcaggggatcgacattgagaccaag

SEQ ID NO: 320403 - DNA, 89 bp, Homo sapiens
gtgggagtctccgcgtcccgctcgctgggagagaggtacctctccttttccctctccctttccctaagccacacccactcgcccgggtc

SEQ ID NO: 320404 - DNA, 87 bp, Homo sapiens
cgggggagccccgggagccgcacgtgaagaggaagaaaagttccaaatcagaggccaagggcactgtgtcgaaagtcactgggaaaa

SEQ ID NO: 320405 - DNA, 75 bp, Homo sapiens
cggagtgagcggagtagcgagtcggcaacccggaggattatcgagattgcagcctgtcactccacacacacgtct

SEQ ID NO: 320406 - DNA, 96 bp, Homo sapiens
tgatgaaaaaaaggagagaggacttcctgctggagatgccaaaccaaacaggaagcttacttttctctacctagccaatgatgtcatacagaacag

SEQ ID NO: 320407 - DNA, 75 bp, Homo sapiens
ttgccactcagatctgcaaacagcaaagcccagagttccccaccaccaagttagagatgactgctgtggctgaca

SEQ ID NO: 320408 - DNA, 100 bp, Homo sapiens
ctacatgctggcgctgctgctcactgccgcgctcatcttcttcgccatttggcaccatacctccagataatctctctattcaagagtttcaaagaaatga

SEQ ID NO: 320409 - DNA, 98 bp, Homo sapiens
gccagaggaggaggccggggaatggccgcggtgtggcagcaagtcttagcagtggacgcgagattatgtttgagaccttcaacaccccggccatgtac

SEQ ID NO: 320410 - DNA, 50 bp, Homo sapiens
gttactccattgctgaggagtggagtgaaacctcggtccggctgggctat

SEQ ID NO: 320411 - DNA, 80 bp, Homo sapiens
acagattcgcagtggtcgcttcttctccttggtgaacctgccgctgctcaccctgagccagcccctgctgttgggcatcg

SEQ ID NO: 320412 - DNA, 151 bp, Homo sapiens
gggtcggttctgcagcgctgtatcgtgtcgccggcagggaggcatagcgcctctctgatcttcctgcatggctcaggtttttagaacttcagccataaaaatgggcagaattttccttgatcatatcggtggtacccgtctgttttcttgt

SEQ ID NO: 320413 - DNA, 129 bp, Homo sapiens
gaaaaaggggagcgcggagaggaggctggaagaggaagatgcctagcacagaccttctgatgttgtctggatgtggatagtgaagctaagaaactattgggtttaggacagaaacatctggtgatgggg

SEQ ID NO: 320414 - DNA, 75 bp, Homo sapiens
agcaaattgaagagacgttaaaatacttccatgaagctactgaatctttacatcaaacgtgcacaaacaggttct

SEQ ID NO: 320415 - DNA, 50 bp, Homo sapiens
gctattgaaagagagtatgcacagcttttttcaaggagcaaacctccaag

SEQ ID NO: 320416 - DNA, 50 bp, Homo sapiens
cgtggtcatcttgggggactccaccgcttacaaacacgcagatggcaaga

SEQ ID NO: 320417 - DNA, 75 bp, Homo sapiens
gccatccgggaggcccagggaaggtttatcatttaaaagtgcctgtgtgaagtcacttttgctggaaaactgcag

SEQ ID NO: 320418 - DNA, 100 bp, Homo sapiens
ttgagcagagggaaagggataggagaaggatgtggactgcagtgctgcagtgccagcaaatgcagccctgaggatttggctactgcatataacaacaggg

SEQ ID NO: 320419 - DNA, 82 bp, Homo sapiens
acagacggtggtgcctcaaaacacctacccagacgaagttatacggaagcgtctcctcattgatggagatggtgctggagat

SEQ ID NO: 320420 - DNA, 50 bp, Homo sapiens
gatgtggcctccagagggctaggggttgccctgctgtcagacgtctatcc

SEQ ID NO: 320421 - DNA, 75 bp, Homo sapiens
ctggaggagcggctgaagcgcgtgcgcatgcatcaagatggtgctcatgtggaccagtggtgacgccttcaagac

SEQ ID NO: 320422 - DNA, 82 bp, Homo sapiens
agagcatcacttttcctgagttaagcaataaagactccctggaggaaaagcggaagcggcagcggtctgaacgcctggaacg

SEQ ID NO: 320423 - DNA, 100 bp, Homo sapiens
gccagagtgaccaggctgaccagcaccagccctgatccaggctattcaagatctctggcagtggaggaagtctctttaagaaaatagtttaaacaatttg

SEQ ID NO: 320424 - DNA, 95 bp, Homo sapiens
taaattggaaggatgcacaagttccaaggttacgtttcaattccccacagatgaaaacatcaaaaggaaatgggtattagcaatgaaaagacttg

SEQ ID NO: 320425 - DNA, 100 bp, Homo sapiens
gcggtggcaggagctgacagagtgatgggaaacgcgtgagccaggccgagaggcagttgcagtggtgcagaatggctgacctcagtcttgcagatgcatt

SEQ ID NO: 320426 - DNA, 100 bp, Homo sapiens
tgagatttcatcaagatcaacttcagcagcttcttcttggcacaatcctgaactgggcagaacgtccttcccaaactcgcggaagacaaatggctcctgt

SEQ ID NO: 320427 - DNA, 100 bp, Homo sapiens
aggagcaaactggaagaatcccagcccactcatctcattccccggggatctgatgagcttctttcttctggcatcattaacggaccttttaccatgaata

SEQ ID NO: 320428 - DNA, 97 bp, Homo sapiens
cggggtccgatggttctcgaaggcccgcggcgccccgtgctgcagcctacaacacagcagtcccctcaggatgagcaggaaaagctcttggatgaag

SEQ ID NO: 320429 - DNA, 100 bp, Homo sapiens
ttgagttgattcaagcacgcttccatggtcatgagctctgtggttgcatctgtgtgttaggagcatgcagaccaattaagtactgcccagctggttgtct

SEQ ID NO: 320430 - DNA, 100 bp, Homo sapiens
catgagcgggagaagacgcccctggagcacatctttagagccatcctgatcaagaaaaccgacaggctccaccaaggacctgatcgagacttgctgcgca

SEQ ID NO: 320431 - DNA, 101 bp, Homo sapiens
ttccagaccctgccttctcttctgaaaggccaagactaaggggctgcagagcggggtggacattggcgtcaagtactcggagaagcaggagcggaatttcg

SEQ ID NO: 320432 - DNA, 100 bp, Homo sapiens
ctcggctacctggtactgagtgaaggttccatcttagcccacatccagaagcaaaagcacttcaatgagcgagaagccagccgagtggtgcgggacgttg

SEQ ID NO: 320433 - DNA, 101 bp, Homo sapiens
ggaggacagttcgctacacagcaatgcatcgaggttctcccatgggcaggtggtctctctggatgagctgcgccccttccaggacccagacctgagctccc

SEQ ID NO: 320434 - DNA, 75 bp, Homo sapiens
caactactcctgcgaggaaaagtggatcaatcttcctgtcctacaactgacaaaggatcccctaaagacccctgg

SEQ ID NO: 320435 - DNA, 82 bp, Homo sapiens
acaaatccgggggcaaggccaaaaagaagaattcccatttgcagaaaccctatgagattaacctgatggaggaactaactct

SEQ ID NO: 320436 - DNA, 100 bp, Homo sapiens
gaagaagcctgtgcccaagctcatcgagaagtgctggaccgaggacgaagtgtttctgggtggcttgctggccaccatcttcctggacatcgtgcacatc

SEQ ID NO: 320437 - DNA, 82 bp, Homo sapiens
ccgagtcatacccccaggagtaagagcccatagcagtctgccagacaatagagcatatgggagccaagcagctcaccctgga

SEQ ID NO: 320438 - DNA, 75 bp, Homo sapiens
gggcgtcggtcgtcggtggggtcggagctgggcgcggagcccctcacagtgcagtttgcagaaaaaacttcagca

SEQ ID NO: 320439 - DNA, 51 bp, Homo sapiens
cttggttaaaacctgacacttttaacagggtcctggcggcagagaccacgt

SEQ ID NO: 320440 - DNA, 89 bp, Homo sapiens
aaagaagaagctatggaaactcatctgattccagatatgatgatggaagagggcagaatccagagaccacatttgaagtatatgttgaa

SEQ ID NO: 320441 - DNA, 75 bp, Homo sapiens
tcgttttgatggatatatcttccttgacagcaaagggaagaatcccactgatgcataccttgatgccatgatgaa

SEQ ID NO: 320442 - DNA, 75 bp, Homo sapiens
cgtgcgtgtcacccacgcagacatcttcagccgctgccaggtgcagaggccaagaccgttttgcccaagaaggag

SEQ ID NO: 320443 - DNA, 100 bp, Homo sapiens
gagctcaccattgccaaagaccagctgaagtcccttcatggaactgttatgaaaattaaccaggagcgagcagaggagcagacgcctccgcctagacctg

SEQ ID NO: 320444 - DNA, 51 bp, Homo sapiens
aatccaagccagagggctgaggtggagagacatactttgaagacaacccta

SEQ ID NO: 320445 - DNA, 83 bp, Homo sapiens
cacagccaagtgcgggagtccacggggccctccaagacctgcgaggtgttcggctggtgcccggtggaagatggggcctctgt

SEQ ID NO: 320446 - DNA, 83 bp, Homo sapiens
cgagtactcttatgcagtccccatgggcactgtgttggcactcactgaaaataacttcgatgacaccattgcagaaggaataa

SEQ ID NO: 320447 - DNA, 74 bp, Homo sapiens
atttggttatattgcaaaggccattggaggactactgagcccagccaggctgtatgccattgctgccaaagaaa

SEQ ID NO: 320448 - DNA, 75 bp, Homo sapiens
acaatatgtcttgtgatgatgcaatagagcatatgttctacaggagaagcatggttgtggctgattcagtttcac

SEQ ID NO: 320449 - DNA, 100 bp, Homo sapiens
gcacagccaggcacactgcatcggcttcccggagctggtgctgcctgtggtcctgcagccgaggcctgcctggagccccagatcaccccttcctactaca

SEQ ID NO: 320450 - DNA, 90 bp, Homo sapiens
gccgcacctttgccgtgtacctcaatagcactggctaccggacaggcgtggtgtccctcgtggccgttcacccctccaccgtcaacccgc

SEQ ID NO: 320451 - DNA, 87 bp, Homo sapiens
ctcgcctggctcggacccacggagccggcagcccagcactccgatggtcatcatgggccagtgctactacaacgagaccatcggctt

SEQ ID NO: 320452 - DNA, 90 bp, Homo sapiens
gccggagcccaccaagttctgggaactgttgagtggaatgtcatggccagctcctcggacagtgaagatgacagtttcatggctgtggac

SEQ ID NO: 320453 - DNA, 75 bp, Homo sapiens
gtgcaacatggggcttgagaaaggttgccctcaaattggctgtagccacacggatataagaaagtcagatcttat

SEQ ID NO: 320454 - DNA, 75 bp, Homo sapiens
atggtgggaggagccgatactgagcttcttcctatttgccatggggcaaacttgaagataaatcttttgactcca

SEQ ID NO: 320455 - DNA, 82 bp, Homo sapiens
cgacaagccgctggcagccgcggatctcaccgccgctcaggtgaaggacgatgagaccttcgagatctccattcccttcgat

SEQ ID NO: 320456 - DNA, 90 bp, Homo sapiens
gagaagcatgggaaggaggccgagccgggatctcaggtcctcgggggcggcggccacgccaaggacgggaggaggaagccaagaatctgg

SEQ ID NO: 320457 - DNA, 82 bp, Homo sapiens
tggggccagggaaccctggtcaccgtctcctcaggcctcaggcccaggcccaaggccaagtgagagagcccaggccacagga

SEQ ID NO: 320458 - DNA, 50 bp, Homo sapiens
gcgacattgacaatgatggctttgaaggatttaagcgagagcctcactgg

SEQ ID NO: 320459 - DNA, 104 bp, Homo sapiens
gtagatttgtagtaggctgtgaaactgaaaaatggctgattgttgtgacattggccgtatgctggatgcccaaccagattcggaggatcatggctgcggccaaa

SEQ ID NO: 320460 - DNA, 83 bp, Homo sapiens
gtgttctggctttcagaggaatccctgtggacccaagtggagagattgtggaactggcgaaaggtgcatgtccctggaaggag

SEQ ID NO: 320461 - DNA, 75 bp, Homo sapiens
gaccttcattatgaaaacttccgttctgagagactcaagagaggcggcagcctgtcgtaggacactcgggagccc

SEQ ID NO: 320462 - DNA, 83 bp, Homo sapiens
gggctgggaagccagagactcatcgccacatttccagacaatgcagatcttcgtgaagactctgactggtaagaccatcaccc

SEQ ID NO: 320463 - DNA, 100 bp, Homo sapiens
ggcactatgtcgtccgaggcccagagatgaccccttatgaaggtgaccagaagtcagcagcttcccagaagccccgaagccggggcatcctccactcact

SEQ ID NO: 320464 - DNA, 74 bp, Homo sapiens
tgatgccctcctgtatagagccaccatgattcttacagttggtgatggcttaagcaaaatcagactaaactata

SEQ ID NO: 320465 - DNA, 75 bp, Homo sapiens
gttcgtcggctgccagcaacaatcaccaggcagaaggagaagacagcctgaagaagatgcagctgatggagcttg

SEQ ID NO: 320466 - DNA, 83 bp, Homo sapiens
gggattcgcagggaggatgtcgggacaccccggaagctgggaaatggtgcatggctgcctcctaatcccatagtccagaggag

SEQ ID NO: 320467 - DNA, 82 bp, Homo sapiens
ttagggcagacgctgtgctcgctggcaccccgaacgggttgcttcccccgctgcgagatagcctgggctggaagctcttcta

SEQ ID NO: 320468 - DNA, 90 bp, Homo sapiens
ccgcgaccactggcacattcttgctgacagtcagatgatcctgatggctctcaaattgagaaaataaaagaagaaataactcagctgcgc

SEQ ID NO: 320469 - DNA, 96 bp, Homo sapiens
ggaagatgaggaggtcgctgagagctgggaagaggcggcagacagcggggggccattaagtttaatgatggcctgagcttacaggaaagttgccgc

SEQ ID NO: 320470 - DNA, 90 bp, Homo sapiens
tgaaagtgcgaactgcctatccgtcattgagacttattcatgctgtcagagggttggttgaagactttcaatgactactttagagacaag

SEQ ID NO: 320471 - DNA, 96 bp, Homo sapiens
actacacagcctattgctacaacacagagggaggctgagattgagagctgctgagtggcagtgctccagaatcacgggatggggccttctgtttca

SEQ ID NO: 320472 - DNA, 51 bp, Homo sapiens
gagggcctggactgggacctcatgaaaacgctgccgcggtccacagtgtcg

SEQ ID NO: 320473 - DNA, 75 bp, Homo sapiens
ggaacaccacctccccacccctcaaccagtctcaggcccagatgtatctacggcgcccttgtggatgaattaaag

SEQ ID NO: 320474 - DNA, 100 bp, Homo sapiens
agaaaatcttgtggacaaatccaggggaaggttattctggactttatgaagccattgaaagttgggatttcaaaaaaattgaaaagttggaggagtatag

SEQ ID NO: 320475 - DNA, 98 bp, Homo sapiens
cgatctgcccgttgtgtttgtgaaacagagaaagataggcggccatggtccaaccttgaagattctgaagaatatttctgtgtaaaaagaattttctc

SEQ ID NO: 320476 - DNA, 87 bp, Homo sapiens
aatacttgggtgacatctgcctgagagatctccaagaattacaggtattttgaagctgtacagctgagctctcagcagcgcattcat

SEQ ID NO: 320477 - DNA, 74 bp, Homo sapiens
gtaaagatggaaaaccagttattgaatatcaagaggaggagttgttgttgtccctggcaaacctggtgagactc

SEQ ID NO: 320478 - DNA, 122 bp, Homo sapiens
cttgcgcctctccagcctccgcaggcccaaccgccgccagcaccatggccagcaccatttccgggggggccctcagcctcttggccttgaacgggctgttcatcttgattcacaaacacaac

SEQ ID NO: 320479 - DNA, 75 bp, Homo sapiens
atttgcacaacagatatcatcctctcgtttggaaattttagcattcaggtgccaggaatgcagatgggacagcca

SEQ ID NO: 320480 - DNA, 75 bp, Homo sapiens
atgtctgcgattcctgctgaggagagcgaccagctgctgatccgacccctaaataggaaggttgttgattactca

SEQ ID NO: 320481 - DNA, 50 bp, Homo sapiens
ggactgcttcttccccttggtgaaagtcgggaagacgtctctgattacga

SEQ ID NO: 320482 - DNA, 101 bp, Homo sapiens
tggtctcgaactcccgacctcaggtttttcgttggaatatacgttgcacatttatggcgattctgagtgtgagggcagacttctgccaggctcagcacagc

SEQ ID NO: 320483 - DNA, 75 bp, Homo sapiens
catcatcgtgcctatcttcctgctgctggacaagaggctggaagatggcagcccccggactgggcagatcttcaa

SEQ ID NO: 320484 - DNA, 83 bp, Homo sapiens
ctttacagaggaatagtctacaaaggaagacttgtaacctggagaagaggaggctgatccgatagagtaatacctaattatat

SEQ ID NO: 320485 - DNA, 100 bp, Homo sapiens
ggcacatcccgacgatctgctcgagtcacccgctcctcagccaggctaagccagagttctcaagattggagaaatgaaggcagaggtcaccaaactacat

SEQ ID NO: 320486 - DNA, 101 bp, Homo sapiens
gtcgccagccaaacataagtgaccaacaggtttctgccttatcatattctgaccagattcagcaacctctaactaaccagctctacccttctccaaaagaa

SEQ ID NO: 320487 - DNA, 126 bp, Homo sapiens
ctcgtgctggcggcggcggcggcggcggcggcggcgctgctcccgggggcgacggagtattggaacagttgtgctgctgccagcgatccgtgggagctgtgtacagattcagccgacaactatgag

SEQ ID NO: 320488 - DNA, 75 bp, Homo sapiens
acctctaattagggacgaattggagaagaaggatggagctgtgattgggttattatacccctgcattgacagaca

SEQ ID NO: 320489 - DNA, 100 bp, Homo sapiens
ggtggcttcctgccagccatgaaacagattggcaatgtggcagccctgcctggaattgttcatgatgaagctggaggcagattcgtcgctttctctggag

SEQ ID NO: 320490 - DNA, 99 bp, Homo sapiens
gtgggtctgtgacagggtccaacagggcctggtccgtgtccggtcccccaaatctgtcgtccctgcccccaggtgtctttggtgcaacactaacaaggc

SEQ ID NO: 320491 - DNA, 100 bp, Homo sapiens
aaagccagcctggcatactttgaagatcgtcatgggtgattcgcctttgccagtctcatctcgtgtctgctttgttaagttccatgatccagactcagca

SEQ ID NO: 320492 - DNA, 100 bp, Homo sapiens
agcagagaaacctgactgggaggcagaaaagaccactgaatctagaaatgagtctctagtgatccctgaaaagttccagcatattttgcgagtactcaac

SEQ ID NO: 320493 - DNA, 80 bp, Homo sapiens
aaacacctctacctcctgcgaggcctcccgggctccgggaaaactacactggccaggttaatttggagtggcccctggag

SEQ ID NO: 320494 - DNA, 100 bp, Homo sapiens
gctagacctacaggtggagttggagcagtagctctgctaattgggccaaatgctcctttaatttttgaacgaggacaggcccggcccctcgagttcctga

SEQ ID NO: 320495 - DNA, 82 bp, Homo sapiens
ttcggcaaacgtggtccttgcaacaaacacaggtatgcagtggaactgatgaagaccctgatgataaaaacgcaccctttcg

SEQ ID NO: 320496 - DNA, 100 bp, Homo sapiens
gcggcagggaccgcggctgcccgaggagagcaagccctggaggttcactctttcaagaagtcgtgtgctgaggtgtaatgctacacaagtcagaggaagg

SEQ ID NO: 320497 - DNA, 119 bp, Homo sapiens
ccacgttgctcctggagatgagcacgccctttacctgcgtttcctggatgctcttaaagatcaggatcctcatgaccagccaaagagaagaagaattaggaagcataaatcaaagaaaa

SEQ ID NO: 320498 - DNA, 51 bp, Homo sapiens
gatcgccccaagagcaccgcgaggggaacgacactagccccgagagtttcc

SEQ ID NO: 320499 - DNA, 80 bp, Homo sapiens
gacgtcttccccaaccagcctggaggcaagaggctcctgcagacccctggcttcctggctgatctatgactcggtcatgc

SEQ ID NO: 320500 - DNA, 83 bp, Homo sapiens
agaacatctcgctgtcggtgaagaagcaccaaatcagatgaaagccaaggaagggaggaatgtgtacagttcttcacgctatg

SEQ ID NO: 320501 - DNA, 74 bp, Homo sapiens
tgaggatgaagcagtcatagcatctttactggaaaaaagtgaagactacatgaggaaataattgacttttataa

SEQ ID NO: 320502 - DNA, 100 bp, Homo sapiens
ggagcacgtcatctccatcgaggatgaggagcgggaaggcctcctgcaccctggagaccgtgtgggaagacaagcacaagtatgaggaggccgagcggcg

SEQ ID NO: 320503 - DNA, 100 bp, Homo sapiens
aaccttcagtgaaagtaaaagaaccttcagtacaagaggctacttctactaggtgtcacgtcttgaaattttaaatgtcctcagtgactctctacctctg

SEQ ID NO: 320504 - DNA, 90 bp, Homo sapiens
cggaagacgtgtgaaatgtattacattacgttaaagaacgggatgccaaggacttcttgggcctactttatatgctgaagtcggagacat

SEQ ID NO: 320505 - DNA, 98 bp, Homo sapiens
ggaaagtatttgtggtaataacccttaccgggagtttcactgaaggtggcagaaagagcactctattattggaataatgaatacatcatgagtttgat

SEQ ID NO: 320506 - DNA, 75 bp, Homo sapiens
agacactgggtctgactatttctgaacaacaagcagagttgattcttcaaagaaaggcctaaagaatgtatttga

SEQ ID NO: 320507 - DNA, 100 bp, Homo sapiens
gcaccatccacacttcctgacgcacagaaccgactacggctttcaatctctttgttggaaacctaaactttaacaaatctgctcctgaattaaaaactgg

SEQ ID NO: 320508 - DNA, 82 bp, Homo sapiens
ctccagctccgctctcttcggctgccccaatccccggcagctctctcagacttaattcagtgcacaaatgagatgaatgtga

SEQ ID NO: 320509 - DNA, 90 bp, Homo sapiens
actactccatccgagaagagattactgcttttcaggaagccttggacgctgcaggtgataaacttgtagtagttgacttctcagccacgt

SEQ ID NO: 320510 - DNA, 100 bp, Homo sapiens
gggatttggccagtggaaaacttctaagatcaataacagatgctcatcctccaggaacagcaatattgcatatcaaggataatgttgtctgtctgtctcc

SEQ ID NO: 320511 - DNA, 51 bp, Homo sapiens
tttcacatttcctgcatctctcagacaggaagtgaggagcgtctctgcctg

SEQ ID NO: 320512 - DNA, 82 bp, Homo sapiens
gtttgccaatgttggagccgtctgcaaagtgtccccggcaagaaggaccatggccaacctggagcgcaccttcatcgccatc

SEQ ID NO: 320513 - DNA, 90 bp, Homo sapiens
gtgatgaccaatgggatgatgccgatgcagaagtgatctgcaggcagctgggcctcaggtagatgacattaatgctgataagaatatctc

SEQ ID NO: 320514 - DNA, 100 bp, Homo sapiens
ctggttgcagaatgcgaagtctgtggtttatcattgtaatcagcttcttaccaaatacagaagatgagcccattattgaagagccaagccgcctccagga

SEQ ID NO: 320515 - DNA, 101 bp, Homo sapiens
acgcacccgtccatcttcgggatcttcgacgggcacgggggagagatatgaccacattctgaagtgggaactcttccagctggctgacctggatacatacc

SEQ ID NO: 320516 - DNA, 83 bp, Homo sapiens
ataaaggccatggcgccagcagaaatcctgaacgggaaggagatctccgcgaactgtggctgcaccatctgtcttcatcttcc

SEQ ID NO: 320517 - DNA, 100 bp, Homo sapiens
ttccagactcggtgctgtacccgccgcacaactacaagagcggaatgaccctcagcaactgctattagatgccaagcacatgtttcctgttttgtttcca

SEQ ID NO: 320518 - DNA, 75 bp, Homo sapiens
aggagaagaagatgtcttgggggatgagagtcagacaaccccaaatcgaggattgggagatcctgcttgctttta

SEQ ID NO: 320519 - DNA, 100 bp, Homo sapiens
ttctacagcagagaccttgagggatatctttcttcactcctcttcacttcttcaatcccagacattgaccctaatgccaagctgctccagccacctgcac

SEQ ID NO: 320520 - DNA, 100 bp, Homo sapiens
tgctaaaggatctctgatctgggcttctctctgggctccacagtgcagtctcacactaaaggaatctggatgtggtgtatgccccatcccaagaagccag

SEQ ID NO: 320521 - DNA, 97 bp, Homo sapiens
aagatcaagaccggcgtggtgaagcggaagacctccgtgtggatggccgtggctgtgaggactaccgatgtgtcgaagtggaaactgatgtggtgtc

SEQ ID NO: 320522 - DNA, 82 bp, Homo sapiens
cacgcgtgtgatcgtccgtgcgtctagcctttgcccacgcagtaagactttgaccccgacgcaggcttcagtgattgccgcg

SEQ ID NO: 320523 - DNA, 99 bp, Homo sapiens
tcactgtcgtctcatgggagaaagacactgtttcacttgtctcaggatgaaaactttgacctgtcaaaaagactgagtgagaacgaaattatatgtaat

SEQ ID NO: 320524 - DNA, 75 bp, Homo sapiens
cattgggagagatcgttggttcacagggaagtcgcctggaaaaaccaatagtaagaacatgtgatcatccaggcc

SEQ ID NO: 320525 - DNA, 50 bp, Homo sapiens
gcatcatttacttatgtggaaagcctggctgggaagaaagaattcacttg

SEQ ID NO: 320526 - DNA, 83 bp, Homo sapiens
acgtctgcggcccgcgtcggcgctggggacaaagccctttggagtgaatcaacctggaccttatatcatgtatacaactgtag

SEQ ID NO: 320527 - DNA, 127 bp, Homo sapiens
cagaaagcacttgctggtctttgcattggcagcaccagttatgtccatggtgacatacttaggactgagtaaggtttttcatcatcaaagagagctttctgctttactactctgagagcgaaaaaaa

SEQ ID NO: 320528 - DNA, 75 bp, Homo sapiens
gaccaacctgtcagtgctgcaaggttccgagtctgaggaagacataaccttgtgcctgcctgcccacctctctct

SEQ ID NO: 320529 - DNA, 74 bp, Homo sapiens
cctaatgaaaatcttcacagtgctgttactaaagcctgcctttccaggtggatctccttacgtagcagccaaaa

SEQ ID NO: 320530 - DNA, 88 bp, Homo sapiens
aaagaatggcccttgtggataagcacaaagtcaagagacagcgattggacagaatttgtgaaggtgtgagatgcacaatgcgaaacct

SEQ ID NO: 320531 - DNA, 78 bp, Homo sapiens
tgcacttcaatatcactgaagacatgctccggggcatctttgagccctttggtaaattttgcacagtaataagttgac

SEQ ID NO: 320532 - DNA, 50 bp, Homo sapiens
gaatgacctgtcgcctgccagctctgggtgtccgcaatgttgccagtgtc

SEQ ID NO: 320533 - DNA, 82 bp, Homo sapiens
gaagctgggattggagattccacccaaacttgctggtcactgggagatctggtggctggacccagagctgacctatggctgc

SEQ ID NO: 320534 - DNA, 101 bp, Homo sapiens
aaagcagagcgactcggttaagggaaagcgccgagatgacgggctttctgctgccgcccgcaagcagagtgcctaagtgtctagagagctgagtgggttgc

SEQ ID NO: 320535 - DNA, 89 bp, Homo sapiens
catggaaaggactactgcaatttcgtcttcaaagactgggttcaacttgataaaccttttgctggttatttggaaatagcggtgcttgc

SEQ ID NO: 320536 - DNA, 74 bp, Homo sapiens
caagagggtgttcgactgctagagccgagcgaagcgtacactgaggaggggacggctccgtcttcacattgtgc

SEQ ID NO: 320537 - DNA, 78 bp, Homo sapiens
gttttctagaagcctgtcgaaaaatgggggtgcctgaggaagctcttcgtgggcggtcttgactggagcacgacccaa

SEQ ID NO: 320538 - DNA, 83 bp, Homo sapiens
atgcatacttggaatgaatccttctagagacgtccacgcttcctgcagatttcacaaaactgcatcttactgacagtctccac

SEQ ID NO: 320539 - DNA, 75 bp, Homo sapiens
tttctgcctgtgtctcaagatgcgtgcaaaaggacttaaccaccaccatgtcgagcaaaagaacaaagaccaaga

SEQ ID NO: 320540 - DNA, 100 bp, Homo sapiens
ggctcctttaagacggtctacaaaggtctggacactgaaaccaccgtggaagtcgcctggtgtgaactgcaggaagctgaatatggtgggcatgatcaga

SEQ ID NO: 320541 - DNA, 90 bp, Homo sapiens
gccgcgctgcgcagccgacgcgggaatgaagcgggcgctgggcaggttatttcttatgagggtcatggatatcccctatctaaacttgga

SEQ ID NO: 320542 - DNA, 90 bp, Homo sapiens
gtgttcaccgtcgagatggttttgaaagtcatcgcatttaagcctaagatgaattacttggtcctggaggagaatgtggacaatgatccc

SEQ ID NO: 320543 - DNA, 76 bp, Homo sapiens
ccgagctcgcggcacggtaggaggcccactgctcagtggagcgtggaggacgaggaggaggccgtccacgagcaat

SEQ ID NO: 320544 - DNA, 98 bp, Homo sapiens
gaagttccaattcaaaagatgtttgaaaagctgggtatctgtgcctaggtttgctgtggggattgtaataggaagaaacggggaaatgatcaaaaaga

SEQ ID NO: 320545 - DNA, 90 bp, Homo sapiens
aacagaaagaatttactgacaatgtgagcagtgcttttgaacaaggtaaaatatacccaggaccataaacagatgaaaggtagaccaagt

SEQ ID NO: 320546 - DNA, 100 bp, Homo sapiens
gtggcttctgctcaccaacagatgaagacagatgcaccaacgagcattcgcaacgacaggcgcctcctctgccaaccggtttgtcagcatcggaccccgg

SEQ ID NO: 320547 - DNA, 98 bp, Homo sapiens
agccggtggagctcacgtttattcaacaagctaatgtcaaaccccgaaattccacaccacctagtttggcaagaaatcctgccccaggtgtgcttaca

SEQ ID NO: 320548 - DNA, 83 bp, Homo sapiens
agggaggagactcctgaccctcagaatggagcttgaagaaatccgcaaatgtgggatgaaaaacttccgtaacatccaggttg

SEQ ID NO: 320549 - DNA, 83 bp, Homo sapiens
ctcggacgccagcggacacgcgggcgagaaaacctcggatcaattctcagctggtggcacaacaagtggcacaacagtatgcc

SEQ ID NO: 320550 - DNA, 101 bp, Homo sapiens
acttcgatgatttactgaaatttgatgacctagatggaacacatgctctgatggtgacctccttgttgcagttggttcattcctgcagtgagcagtctcct

SEQ ID NO: 320551 - DNA, 98 bp, Homo sapiens
gcctgttgcgccagtgccccctgcttctgccccagaaccggtcgaaaaccgtgtatgagggattcatctcggctcagagtctgagaagccaactgggg

SEQ ID NO: 320552 - DNA, 113 bp, Homo sapiens
atcatgttttccaggctgatctcaaactcccacggtcaagcgatctgctggcctcggcctctcaagtggtattcatgggtagtttgaaatatccagatgagaatggatttgat

SEQ ID NO: 320553 - DNA, 107 bp, Homo sapiens
cggagtccgactcgctacgcgggtcttgcgagatatctggccgcctctgccgcagctggagatgtctttggtggacttgggaaagaggttgctagaagcagcaagaa

SEQ ID NO: 320554 - DNA, 82 bp, Homo sapiens
tttcctaccatctaaaatacgaaggtttctggctgggaagtgagctcacaatgactcaagctgccacatagtgttgattgtg

SEQ ID NO: 320555 - DNA, 100 bp, Homo sapiens
agcatcccattacagatagaagaggatgagttccacccgttcatcgaggccctgctgcctcacgtccgcgccttcgcctacacctggttcaacctgcagg

SEQ ID NO: 320556 - DNA, 100 bp, Homo sapiens
ctagaattacctggaacttcatcatcatctacttcacaggaattgccatttaacattaaccaggtggtatttgttggaaatttcttgagaattaatacga

SEQ ID NO: 320557 - DNA, 109 bp, Homo sapiens
ccgcggggcgcagagcgcgatctctaccgggacacgtgggtgcgatacctggacctatgaggaccagcacagcagtgaggaggaggaggaagaggaagaggaagaggaa

SEQ ID NO: 320558 - DNA, 90 bp, Homo sapiens
tgaagagcgacaagccgctggcagccgcggatctcaccgccgctcaggttccagggtctccctccactgctgtagtaacccgggtccggg

SEQ ID NO: 320559 - DNA, 100 bp, Homo sapiens
gaacccagaggtcgtggaggtggccgtggaggcagaggtggcatgggggacagccctgccatcaaggaagacagcacaggactgggacccacccatgaac

SEQ ID NO: 320560 - DNA, 83 bp, Homo sapiens
cggcgatccgggcgctcgagacttaccagagccacaagagtgaagacatttccacctggacacctgaccatgtgcctgccctg

SEQ ID NO: 320561 - DNA, 85 bp, Homo sapiens
atctccctgctaaatgaaaaagggcaagatactgggtccaagccttatgcatttgatcgggtgttccagtcaagcacatctcaag

SEQ ID NO: 320562 - DNA, 96 bp, Homo sapiens
cctgccggggaagacaccagtgtatggcctgtctccactaactctggaccctaaaacagctcacccaaatctggtgctctccaaaagccaaaccag

SEQ ID NO: 320563 - DNA, 75 bp, Homo sapiens
ggagaccggcacccagacaggtggcgaaggcagaggagacctgaaggagaagaaggagaaggtggaggagaaggc

SEQ ID NO: 320564 - DNA, 88 bp, Homo sapiens
ggaagttgtagaagacattactcaagaggagagagttcttctcttacagtttgttacgggcagatctgagtgggacatacttttgaag

SEQ ID NO: 320565 - DNA, 98 bp, Homo sapiens
cgtggagaagccttggggtcaatttgttgtatagctgaggcatgtggagaccccaaggcaaaaccatcctatcttatcgacaaaaacctggaatctgc

SEQ ID NO: 320566 - DNA, 83 bp, Homo sapiens
tggatatttgcttggaaaaacgtgtgggtacgaccttgggagactcatgcatctgtatgccgtgtgcgtggactgcctggaag

SEQ ID NO: 320567 - DNA, 100 bp, Homo sapiens
ttatatgtcttcaaaagttaatggcagctgtgagggatattcttgaaggaattcaaaggagcagtatagcatcaagttctagaggaattgggagccattg

SEQ ID NO: 320568 - DNA, 101 bp, Homo sapiens
gagctctggaatctcctgaagattgcttgtgtgcatctgcagacgcagcaggaggtgaagctgcgcatgacgggcatggcgctgcgggtggtgcgtaccga

SEQ ID NO: 320569 - DNA, 82 bp, Homo sapiens
tacagaactacgatataagccaggcacggagtgtgaatgtgaagacacaagctctttctggatacagagaccaatttagttt

SEQ ID NO: 320570 - DNA, 99 bp, Homo sapiens
gcctgattctactcagctgatattggaacatgcagggtcctattttgacgccgtcgctttcgggttctctcatcgcttcgtcgttcgccaatgtttgag

SEQ ID NO: 320571 - DNA, 83 bp, Homo sapiens
cctcgcgccggctgctctttccggatgatatcatcaagttgaatcgaaaggaagggaagaagcagaattttccaagactaaat

SEQ ID NO: 320572 - DNA, 97 bp, Homo sapiens
catcgctgaggtggatggagaagcagctgggggccttggctgtaaggacccctaaggtaccttccactggaagaatctcaaacagcgctacttactc

SEQ ID NO: 320573 - DNA, 137 bp, Homo sapiens
tgtacgacgagggaggtctcatcggcggtgaggaagcccaggcgggtccccttcccagctgaaaggggttcggctgttgttatgtcagtcgaagacttagccagctatcaagtcatgatccgctgtggagaagacat

SEQ ID NO: 320574 - DNA, 100 bp, Homo sapiens
caccaacgggaagggccggcccgcctccctggccggggcgcagttcggaggttcaggtgaaaggtgtagcagtcactcggcctacacccacagcatcgac

SEQ ID NO: 320575 - DNA, 75 bp, Homo sapiens
cctttgttcaccgccaaccccttcgagcaagacgtggctgccgggccgcaagtacagccctgggtacaacaccga

SEQ ID NO: 320576 - DNA, 100 bp, Homo sapiens
gcgggtccctggtctgggccatgtctggctgtgatgctcgggagggagactgttgttcccggagatgcggcgcgcaggaaccttatgcaaaaatccagat

SEQ ID NO: 320577 - DNA, 75 bp, Homo sapiens
cgacagttgtgttgtgccaatggtggagaagaaaacttcgggagaccaagacacattccaccccagtggggggtc

SEQ ID NO: 320578 - DNA, 100 bp, Homo sapiens
tcatgtctgagatgttaacagaaatggtccctggacaggaggattcatctgatctggagttgctgcaggtttcgcgtctcgcatcttcccagaccctcgg

SEQ ID NO: 320579 - DNA, 100 bp, Homo sapiens
agaacatggacacgagaacccccataaataatcttcgcaaatacgccatgcgagacctagtccacaggcttccaggagggaacaacagcaacaacactgc

SEQ ID NO: 320580 - DNA, 90 bp, Homo sapiens
ccggaatccggacaattatgtccgcgaaaccaagttggacttacagagagatctcacattcttgaaggtggcattgaagagcactaagat

SEQ ID NO: 320581 - DNA, 100 bp, Homo sapiens
cccgccttccctgcaccatgctcatagaggatgtggatgccctcaagtcctggctggccaagttactggagccgatgagtctcagcagtccaattttggc

SEQ ID NO: 320582 - DNA, 100 bp, Homo sapiens
gctgatggtgatggagattttgatgtggatgatgccaaagttttattagggtgtcgtagtcattcttcagcacaattcttaattggagaccaagaaccct

SEQ ID NO: 320583 - DNA, 90 bp, Homo sapiens
ctcaagccagcatggctcacaccacaaaggttaacggcagtgcctcaggtgctggagaatctggtaaaagcaccattgtgaagcagatga

SEQ ID NO: 320584 - DNA, 100 bp, Homo sapiens
cgtacatcactgtcgtctcatgggagaaagacactgtttcacttgtctcagattttcagctgaactctcatctctcaacactggcaaatattcataagat

SEQ ID NO: 320585 - DNA, 99 bp, Homo sapiens
gctgttcttctgggtaaccaagaggaagttggaggtgccgacgggacctgaagtgcagacccctaaggtaaccagttaggggccttggtacatcaaagg

SEQ ID NO: 320586 - DNA, 73 bp, Homo sapiens
ggagagggaggccctgatgctgaaggtggagctgaagaagggagccactctcaaaatcacgctggataacgcc

SEQ ID NO: 320587 - DNA, 50 bp, Homo sapiens
ccacagctgcagatccggggagtaggatccgggatcagttgaaggaagag

SEQ ID NO: 320588 - DNA, 97 bp, Homo sapiens
cggcccaagggcgacttctccagccgggcccgcgaagtgggctgccacacttgtgtatcccttcttccttgaatttaaccaggagtgagcagtggac

SEQ ID NO: 320589 - DNA, 83 bp, Homo sapiens
agtagagcctcaacccctggtcaagccatcaggttctccccatgacaccacctgaacgtctcttcctcccaagggtgtgtggc

SEQ ID NO: 320590 - DNA, 98 bp, Homo sapiens
gtcataccgggcttccttgccctgtccgggggaccagttactctccacaagaaaattcacacaaccacagtgctcttcatagttcaaattcacattct

SEQ ID NO: 320591 - DNA, 75 bp, Homo sapiens
cgagaactgcgcagacctggtggaggtgttaaatgaaacatgatgccttcttctgtagagtgggcgctttgcaga

SEQ ID NO: 320592 - DNA, 100 bp, Homo sapiens
tctcgctccgtggccttagctgtgctcgcgctactctctctttctggcctggaggctatccagcctctaagcgaaagacatgaggcctcagcctgaaatg

SEQ ID NO: 320593 - DNA, 83 bp, Homo sapiens
gggctggtcccgggtctcgggcatcccctcccggcgccactggccggtgccctacaaatgtgtatatctcatgattgatatgg

SEQ ID NO: 320594 - DNA, 100 bp, Homo sapiens
gcggccggaagcgcggagggagccgcgggatggaccgcagggtggattacggaacaacaacgagaaagacatggccctcacggcctttgttctcatctcg

SEQ ID NO: 320595 - DNA, 75 bp, Homo sapiens
gggccacaaatgctccttctcctggagacgcaactcaaggtggttggttttggacacagagaccagagagatcgt

SEQ ID NO: 320596 - DNA, 100 bp, Homo sapiens
aggacatcccatgcggctactcctgcccagcgtggtggggcagcagaagctccagagcccagacttgcaggtgtctgagggttctgtggtccagttttca

SEQ ID NO: 320597 - DNA, 83 bp, Homo sapiens
ctggcctcctgctaggagaggcaggcaaacagctgaggcggagtcccccaaactccccagtggggcttatgagggtggggcac

SEQ ID NO: 320598 - DNA, 100 bp, Homo sapiens
agctgatgcaggtgaacgacactctgacttccgaagatgccggactccggaacagcaagaactgcaccgaaccagattcctttgtgggtggagtcatcgg

SEQ ID NO: 320599 - DNA, 100 bp, Homo sapiens
tcaggtcctcagaccgaccagcccaagaaacatctcaccaatttcaaatctgaaagcatgctctgaattgccatcggatgaagcctgctctgttcagcgt

SEQ ID NO: 320600 - DNA, 76 bp, Homo sapiens
tacgtcgctgtcatgaactacctgcccactctggagttctcccaccctcacaggcctcaagaaaggagaactagtt

SEQ ID NO: 320601 - DNA, 98 bp, Homo sapiens
tttccttcgtacccacagtgcttcatgagaggaataaaggttggggagactacacctgacaaacttttcactcttatagaagtggaatgtttaggggc

SEQ ID NO: 320602 - DNA, 71 bp, Homo sapiens
gaaagttattgaacggctgggccagagcgtggttgctgaccagttgaaagaagtgaccggggaggtgcgtc

SEQ ID NO: 320603 - DNA, 100 bp, Homo sapiens
cccatggggctggcctgcggcgcctgggcgctctgaggtggcacgtctctgagcttcctggtgttggtgacaggctgcacatctgtgggcagaattccag

SEQ ID NO: 320604 - DNA, 98 bp, Homo sapiens
gggccgtcccagttcgcaatgagaaagcccttcagggtttctcgctctctgctcctcgctggacagaaaagatcctggcagcctcgccctccaccctg

SEQ ID NO: 320605 - DNA, 101 bp, Homo sapiens
atgcagccaaaggctactttgacgccctggtgaagatgggggagctggccagcgagagccagggctccaaagaactcgatatttctccctcgagtggctgg

SEQ ID NO: 320606 - DNA, 75 bp, Homo sapiens
tggcaggcgtgcttgtgggacacccgtttgacacggtcaagctttgggacatccggaagaaagcagccatccaga

SEQ ID NO: 320607 - DNA, 74 bp, Homo sapiens
ctccaggttaggccgagctttgcgggaaagcagcggcgtccgacctccgatcatgaacgggcccctgcacccgc

SEQ ID NO: 320608 - DNA, 74 bp, Homo sapiens
aagggtgttcccgaactagagtgggcagcacacttctgcttttgttccttcatcaggacgaatttactcttttg

SEQ ID NO: 320609 - DNA, 100 bp, Homo sapiens
cagattgcagggagtatcaaatatgagaaagctaggccatctgaataactttactaagctctctatcaatatcagctcacatcattgaaaagataatttt

SEQ ID NO: 320610 - DNA, 74 bp, Homo sapiens
ggagtgcgcggcggccgcagctgccacaaaccagatccagacatttaatgtggatgcaccatgccagaccgtgg

SEQ ID NO: 320611 - DNA, 75 bp, Homo sapiens
gctctggctgtgccctggtccagctgcagccactgacagagacagggtctcactgcattgcctagtctggtcacg

SEQ ID NO: 320612 - DNA, 74 bp, Homo sapiens
gatcaaccaccaaagtgggaaacattgaaatcaagtctcaaaccatgaattatgtgggacagctggctgggcag

SEQ ID NO: 320613 - DNA, 100 bp, Homo sapiens
caacccccaaattggctgggacagtccacctggaaggccgctgtggtggaaggatgtttgactgcagagatgtggcattcactgtgggcgaaggagaaga

SEQ ID NO: 320614 - DNA, 100 bp, Homo sapiens
ggaaccggatttctcttcccagaaacttcaacatctggaacatgtgatggaaaattatactcagtggctgcaaaaacaggcattttggagatcaaagatg

SEQ ID NO: 320615 - DNA, 83 bp, Homo sapiens
atcaagtaataagaataaattaccttggcgattggggcatgcagtttggttttaaaatcaaagatgggaaaatcggagaaaat

SEQ ID NO: 320616 - DNA, 75 bp, Homo sapiens
ttggtcgccgcgtccttggctggcgtttttactctggacaccggtcccctcacatcccgtataagttgctgcacc

SEQ ID NO: 320617 - DNA, 80 bp, Homo sapiens
cttccccatcatcgccagctgcacactcttggggctctacctctttttcaaaatcaccgaagtggccttggagtacaaca

SEQ ID NO: 320618 - DNA, 100 bp, Homo sapiens
gaaggagaaggaccgggaaaagtccaagcatagcaacagaatgtgacagtgatgataacatgggtgccaaaaatacttcaataggagaagaatttatatc

SEQ ID NO: 320619 - DNA, 100 bp, Homo sapiens
ctgggatgtgatgttggagaactacaggaacctggtcttcctggagtacaggggctcaggtccaggtggcaggggatatgctacccaactcaactgagcg

SEQ ID NO: 320620 - DNA, 100 bp, Homo sapiens
gtccgagccagccgctgttttgccggaggagcccctcaggccaatgtgaaggctgtgtctgagactcctgcagtgccaccagtttcagaagatgaggatg

SEQ ID NO: 320621 - DNA, 122 bp, Homo sapiens
cggcgagccggagcgcggagcccggctcccgcaccatggaggaggacgacagctacggtttacccaaggtccagcctagcccctaggcaccatgtcggacagtgatctaggtgaggacgaag

SEQ ID NO: 320622 - DNA, 97 bp, Homo sapiens
aattattttactgacctgtggaatgtgatggacacgctggggcttttttacttcatagcaggaattgtatttcggtcctcgatgggcttcctggaat

SEQ ID NO: 320623 - DNA, 127 bp, Homo sapiens
cgggtggagctggatcggaagcacatgactgaccggaagctcaccatggagcagattgctgaaaagatcaatgctggtcccaggtgtgtgatggcggctgcaatctgtcttgtgggtattaatgcaa

SEQ ID NO: 320624 - DNA, 90 bp, Homo sapiens
cctctcgcaacgtggctgtggagcgtaagaacctgatcaccgtgtgcaggaagatgttaccgagtacttcagtgaattccttagtgcagg

SEQ ID NO: 320625 - DNA, 98 bp, Homo sapiens
tcgaccacgccccggaccttccgcggccagagtttcagaacaagcttcctggaacccatgacccatgaagtcttgtcgacatttataccgtctgaggg

SEQ ID NO: 320626 - DNA, 97 bp, Homo sapiens
atcaaatggcacttcattggccacctacagaaacaaaatgtcaacaaattgatgggtgtgtgtgtgcaggccacagcagcatgcccttggtgtagtc

SEQ ID NO: 320627 - DNA, 100 bp, Homo sapiens
cctagcccctttccttactggatcctcaaaccagaagaaaacctgaatctctgagaacaccttccaccatgaccacctcagcaagttcccacttaaataa

SEQ ID NO: 320628 - DNA, 83 bp, Homo sapiens
ctgggtcagtccgccgctcaccccgcggccgcaccttcccgccttctcaggtaaggctggcctctctgcagtcagaggtctga

SEQ ID NO: 320629 - DNA, 100 bp, Homo sapiens
ggatgacctcaattttaaatctactgaagtgcagaaatcacaaagtacagctcagaatttgacttcaggttgtgcaggcatgaggactgatactggggaa

SEQ ID NO: 320630 - DNA, 100 bp, Homo sapiens
gactgcacttcttttttgagaaaggaaggaatatatcctgactgattctagtatgttcaacacaccaggaatgcagagcttgttgcaacaaataactgaa

SEQ ID NO: 320631 - DNA, 97 bp, Homo sapiens
agagacattacatcaggaagatactgcagagatattctactccatctcattcattgtacagtgccggtggtggtgtgcacattgagccccggtatag

SEQ ID NO: 320632 - DNA, 101 bp, Homo sapiens
gcgcgactcgcttctttcggttctacctgggagaatccaccgccatccgccaccatggttcgtgctggccgtgggcagcgccgtctttgatgccatgttca

SEQ ID NO: 320633 - DNA, 100 bp, Homo sapiens
ctgatggagcaggcttgcaatattaaatctacgtaggagctggtatgaggatcacacaatgcaagcaaataaaatgagaaaagatgattcaacaagaggc

SEQ ID NO: 320634 - DNA, 100 bp, Homo sapiens
gtttatcattgtaatcagcttcttaccaaatacagaaggcaaacgaatgcacgtgcagttgtccaccagccggcttaggactgcgcccgggatgggagac

SEQ ID NO: 320635 - DNA, 101 bp, Homo sapiens
ccggccgcctcccgcggacgccagggctgcctgctggtacctgcgcgggacacgcactggcactaaatccacactgcccatctcggagacaggcggaggaa

SEQ ID NO: 320636 - DNA, 148 bp, Homo sapiens
gctcctgctggtgaccagcgtcacgctgctggtggcccgggtcttccagaaggctgtagaccagagtatcgagaagatcatatctgaagatattagtgagctacaaaagaatcaaactacatctgtagccaaaattgcacaatacaag

SEQ ID NO: 320637 - DNA, 98 bp, Homo sapiens
tttggttctcccggcagcagcccgacgcaaaccaaggatctggggatcttcgcactatcccaaggcgcattctacattctaaaggggagctcagtgaa

SEQ ID NO: 320638 - DNA, 104 bp, Homo sapiens
gagaagaaccagcccgaggtggacatgagtgaccggggcatctccaacatgctggatgtcaacggcctctacctaaggattgtcttcggtctattatgagaaga

SEQ ID NO: 320639 - DNA, 96 bp, Homo sapiens
gctgctccgcaccccggggtcccaggaagggcggcccagctgccctggaaggattgtgttcagcttctgtcatctatcactatcctggtggaactg

SEQ ID NO: 320640 - DNA, 90 bp, Homo sapiens
ccaagatgtattgcaggggaatctgtagcagaaggtcaagaaatttgtgtgattgaagccatgaaaatgcagaatagtatgacagctggg

SEQ ID NO: 320641 - DNA, 100 bp, Homo sapiens
gattctgcagcagattgaattagatctaaaagccacccaggccttggtcctagcacccactcgagaattggctcagcagagtgcaaggggtgtgattgag

SEQ ID NO: 320642 - DNA, 75 bp, Homo sapiens
ctagatactcttaacaatgaaatagttgacctacagagaacatccatgatagcagtcttctgtaaatcgaacttt

SEQ ID NO: 320643 - DNA, 100 bp, Homo sapiens
ctctgaggcggcgagagatggtcaggtctggagctcgaccgggccagccgccgccatgtctgcgcatctgcaatggatggtcgtgcggaactgctccagt

SEQ ID NO: 320644 - DNA, 48 bp, Homo sapiens
ctcaggacaagaacaaagtgtgctgcttgttctcagaacacaaacaaa

SEQ ID NO: 320645 - DNA, 88 bp, Homo sapiens
cagattatatcgcatcctatggctcaaagaaagatgattatattggtgctgaagacatggacggcttccaggcagacacggaggagga

SEQ ID NO: 320646 - DNA, 100 bp, Homo sapiens
gccctcgcctcccgagtcactgcagccaacccttcagcaagaccgagacatgggtgcccggcaccgcgcccgagcccactccattcagatcatgaaggtg

SEQ ID NO: 320647 - DNA, 82 bp, Homo sapiens
gcaaccattgacgccatgtcgggttattcgagtgaccgagaccgcggccgggaccgagggttgggttaacggcatggagaac

SEQ ID NO: 320648 - DNA, 100 bp, Homo sapiens
ctggggccagggaaccctggtcaccgtctcctcagatcggatcaacatcaagaggaagggagcgtggccctccaccctcctgtccgtgcagaacgtcatc

SEQ ID NO: 320649 - DNA, 101 bp, Homo sapiens
cggggccccggaacccgagctggagctgaagcgcaggctgcggggcgcggagtcgggagcgtctggatggttccatcaagggagaaatccgaaaacaggca

SEQ ID NO: 320650 - DNA, 80 bp, Homo sapiens
ggccatggcgtacgcctatctcttcaagtacatcataatcggcgacacagttgagtcagcagatactggagttatttgaa

SEQ ID NO: 320651 - DNA, 83 bp, Homo sapiens
agcgccccgggagccagagggcgggggtcctcgccgggaccctcctgtgggcccagggggccaaggagatctgttgaagaatg

SEQ ID NO: 320652 - DNA, 75 bp, Homo sapiens
tgagaatccagagaaagatctctgaccactaaatctgtgtgcagaggccacaagaggaagctgaatgaagaggac

SEQ ID NO: 320653 - DNA, 100 bp, Homo sapiens
attctggtgatgatatcaacaaatttctctggatggttaggatagctgaaggagaacatcccaaagacattcggatcgaacggttggaagtaagcagcct

SEQ ID NO: 320654 - DNA, 82 bp, Homo sapiens
agaagccgagttcaacatcctcctggccaccgactcctacaaggttgtatcagagtaagatggacggtagctttgattgtga

SEQ ID NO: 320655 - DNA, 75 bp, Homo sapiens
gcgcttcggcccgggccgctcaggtgcaggttctcctgcgctgcccaacagcatggtgtattttggaagctctca

SEQ ID NO: 320656 - DNA, 51 bp, Homo sapiens
tcagtatccaccgacagcattccaagagatgatttacacaatgaagaaagt

SEQ ID NO: 320657 - DNA, 89 bp, Homo sapiens
atctttatgtcagaaacacaaagcagcccaaccaaaggtgatccgtatgtgaaactttcattgtacgtagcggatgagaatagagaact

SEQ ID NO: 320658 - DNA, 75 bp, Homo sapiens
gttgaactggaaatataggacatgcgtttgagatctactgtgaatcaatgaactgagccatgttcaaatccctgt

SEQ ID NO: 320659 - DNA, 100 bp, Homo sapiens
cccgccctgcgccccgctctgctgtgggcgctgctggcgctctggctgtgctgcgcgacccccgcgcatgcggaaggagagttttacatggaagtggctt

SEQ ID NO: 320660 - DNA, 143 bp, Homo sapiens
cagtttgaatatgcactctttggaaaattcccttatcgatattatgagagcagagcatgatcctcttaagggatagattcccagaagtggaattgcttggtcaaacggtatgtgtatttctaattttaatagctatcacttta

SEQ ID NO: 320661 - DNA, 75 bp, Homo sapiens
agctcacgcccgaggtgcagctggccatcgagcaggtggacccccaaaagtacaagggcatatttaacggattct

SEQ ID NO: 320662 - DNA, 101 bp, Homo sapiens
gcggagccgggctcgggtcgccggagccgcgccccaccccgccagctccagagccactgcaccaattccagctggacatcactgtgaaaatgggacgggat

SEQ ID NO: 320663 - DNA, 100 bp, Homo sapiens
caatggcctgagcaagtaccagccagcgccagctgcagccctggccgcgcactcgcctcagctgagcctggcttctcacctggggcgggtgggttctgca

SEQ ID NO: 320664 - DNA, 74 bp, Homo sapiens
aaaagacctattatgagaggcttccatatcgggtgtcacatgaccaaacctgatgtgatcctcaagttggaacg

SEQ ID NO: 320665 - DNA, 75 bp, Homo sapiens
gtcataaagaggacgccgggacaccaagaagcagggaaatgtacactcagaagaagccttgtttttactggcaac

SEQ ID NO: 320666 - DNA, 98 bp, Homo sapiens
ccaacactaaaccacaaatatacaacaaggccattttctcaaacgagagtcagcctttaacggtcgcacggggcaggcggttgcagttcgagccaagg

SEQ ID NO: 320667 - DNA, 82 bp, Homo sapiens
gcagagatcagcaatccttggctcactgaggaggtttggactttgcaagaggataatccaagtggagtcattcttagtactg

SEQ ID NO: 320668 - DNA, 97 bp, Homo sapiens
actcgtgaccaacatgctgtgatgtgtgccgagggaggaattgttatttctcaaactctgaggctgcggagttcacacattgaaatctgtcatcttt

SEQ ID NO: 320669 - DNA, 76 bp, Homo sapiens
aaggggccagtctggagacagtcaagaaagtgttgtgaagagcgaagacttttcgctcccagcttatatggatcgg

SEQ ID NO: 320670 - DNA, 100 bp, Homo sapiens
gagagaagaggaggtggagaaggcttgggctcgcgccgctgaagcctcctgacaaggtgatccgggcgggccccgcaggaattttatcccctcaccggcc

SEQ ID NO: 320671 - DNA, 82 bp, Homo sapiens
agcccagacgcggcacagagagggcctgggagcttgctgcagcttcaggagccttcacgtaaatgggtccagtcatgcctcc

SEQ ID NO: 320672 - DNA, 82 bp, Homo sapiens
atcatgactcctggagaacggatcaagtgcttattacagggtgtgtgttgtattgatgaatttgataagatggacgtgcggg

SEQ ID NO: 320673 - DNA, 83 bp, Homo sapiens
gtgaatttagatgcccctgaagacaaggacagccctttcggaggaggatgattacgacgtgatgcaggaccccgagttccttc

SEQ ID NO: 320674 - DNA, 97 bp, Homo sapiens
atagcatgcggtggtgaagatggattactgaaagttttgaaattagagacgcagacaggagatggagaactgtcatgggaacattctgatggtgata

SEQ ID NO: 320675 - DNA, 100 bp, Homo sapiens
ggaaaaccgcggcccctgagttgcaaacaaatgtcagatcccagattgttcagattccattctgtggggaaattgactgtgaggactggatcaaaaagac

SEQ ID NO: 320676 - DNA, 100 bp, Homo sapiens
ctgaagggggactacaggttcgagaggcaccgcgtccgtgctgcagcgccggtcccccaatgaggagtacgtggaggtggggcgcctgggaccctctgac

SEQ ID NO: 320677 - DNA, 80 bp, Homo sapiens
gcgtgagttatcttctggaaatgagtcttcaagctctgtaagacatcttctaaccgaaaatcttcagttggcgtaaaaaa

SEQ ID NO: 320678 - DNA, 100 bp, Homo sapiens
tcagaatttgaccatcttggtgagaaacattaagacctactaccagggccacattgtccacaactggaaggcgcgatggttcatccttcggcagaacacg

SEQ ID NO: 320679 - DNA, 75 bp, Homo sapiens
tgctttggatcttggttgtggaagaggttacattgcacaatatttgaataaggtcttaaagaaagtgcagaagag

SEQ ID NO: 320680 - DNA, 100 bp, Homo sapiens
aagcggtgccatgaatttgtcacattctcctgccctggcgctgacaagggtccagcctccgatactatctgatcaacgtgatggatgccctgggcctgca

SEQ ID NO: 320681 - DNA, 75 bp, Homo sapiens
cacgacatgctggcctcgctggagtgtgacaagtttaaccaatgtgggacatgcaatgaattcaaagagtgccac

SEQ ID NO: 320682 - DNA, 75 bp, Homo sapiens
ccgagagcaacaaagcaggcgactacagccacgtgaaggtgaaaatggcattacggacatcaggacatctcttac

SEQ ID NO: 320683 - DNA, 49 bp, Homo sapiens
cggcgaccggcggcgtccgaggagtggagaacatgcagctgaccctgaa

SEQ ID NO: 320684 - DNA, 77 bp, Homo sapiens
tctcattctcatatttcaccaataaagccacataaagaagatccctaatagtcatttctcaacaattatatagtcaa

SEQ ID NO: 320685 - DNA, 90 bp, Homo sapiens
ctttgcctggacaggaggaaccctgctgtggatgagatgaacggaaaggagctcaatggaaaacaaatttatgttggtcgagctcagaaa

SEQ ID NO: 320686 - DNA, 96 bp, Homo sapiens
tgggctcaaaccatcctcccacctcagccttttcctctgtgacgagggtgcaggtatctctggggactacatcgatcgcgtggacgagcccttgtc

SEQ ID NO: 320687 - DNA, 100 bp, Homo sapiens
gtcagcactgactttcagctatggaatcgctctgaacagcaacatggggtgcaaagtcctgctcaacattgggcagcagatgctgcggcggaaggtggtg

SEQ ID NO: 320688 - DNA, 100 bp, Homo sapiens
gccctccatcttgcagcccagaagagctacagagacttctgaagtggagagtctgcgacctcctcggttcttcaatgaagatggagttatcagaccgtac

SEQ ID NO: 320689 - DNA, 93 bp, Homo sapiens
gtgaatcccctgtttgagaaaaggcctaagaattttggcattgaaggacagaataacgggctcccagattcacaagccccaccaagaggatca

SEQ ID NO: 320690 - DNA, 74 bp, Homo sapiens
gttacaatcaaggtctatgaaggaaattttatgctttggatccttcattcccaaggatgaatttgttaactcgg

SEQ ID NO: 320691 - DNA, 90 bp, Homo sapiens
gcaacagctcctgcagcagtaccgagtgccccggggaagccattccccaccccccaggggaagtcatctacaataagaccgaccgagccg

SEQ ID NO: 320692 - DNA, 87 bp, Homo sapiens
catggagatccctgccccggagcccgagaagacagatcgccacatcacagaatcgtatctatctcacagctgacaaccttgtgctga

SEQ ID NO: 320693 - DNA, 100 bp, Homo sapiens
gccgacaaggctaccacttgcagctgcaggcggatggaaccattgatggcaccaaagatgaggacagcacttacagtttgttgataagccggggcccttc

SEQ ID NO: 320694 - DNA, 74 bp, Homo sapiens
attgatgaaattaaagatgcatgctgatggcgataagtcattaccacagtttgagattacgggaaatgatgaga

SEQ ID NO: 320695 - DNA, 101 bp, Homo sapiens
gaagactgaggaggaagggatggctgtggatctgctgtctgctcaggcagttccggcgaggggggagcctcagcaggattgctgtgtgaaaaccgagctgc

SEQ ID NO: 320696 - DNA, 100 bp, Homo sapiens
ctgaaactgctgaagatattattgctaaagaaagagaacagaatgtattgcatatgctgcaccaggttgatgctatgaaactgggagtaaaggaaatgaa

SEQ ID NO: 320697 - DNA, 95 bp, Homo sapiens
gttcacacaatccatcaacatggttgtacctacaacagatcatatagatacagaaaaattgaaagccagagaacagattaagttttttgaagaag

SEQ ID NO: 320698 - DNA, 75 bp, Homo sapiens
gacgaggcgattgcgggggcctgggctaggctcctgctccagcccagcccccagagagcagaccccaggtgctgg

SEQ ID NO: 320699 - DNA, 90 bp, Homo sapiens
ctcgcctactgcctggccctccagctgtatgtgcggcgccgaaagaagctacccagtgtcctgaatgtcgttcatgagctaagaataacc

SEQ ID NO: 320700 - DNA, 100 bp, Homo sapiens
cccaaaggaaaaagtggttctggaaaagcggggaaaggatcccattgaagataccacgctgcatgtgtccttagtagtcatgtctccttaggctcctctt

SEQ ID NO: 320701 - DNA, 100 bp, Homo sapiens
gggacaggaggctgcggggcctcagaatgattacggacctgaagccaaagaacaagatgcgctagtggacagattgctgaccaggggcttgagagctggg

SEQ ID NO: 320702 - DNA, 75 bp, Homo sapiens
ttcaccccgtggtcgaggagtcgggaaggaaagtacgggcacgcggcctgctttggcctgcagcccggctgcctg

SEQ ID NO: 320703 - DNA, 74 bp, Homo sapiens
agtgacatgcccatgcgagtacctgaggaagatacctggaggcatcattgaagactcctgtgtcttgcgtggag

SEQ ID NO: 320704 - DNA, 75 bp, Homo sapiens
aagaccccggcgctggtgaacgtgagaagcgccaccttcaagtgaacgtcaccaacccagtacagtgcagcctgc

SEQ ID NO: 320705 - DNA, 82 bp, Homo sapiens
ggtgatcatcatggacacagttttgacagtaattcttttgggccgtttaatggatcgagaagtggcgttgcttgctgaaatg

SEQ ID NO: 320706 - DNA, 101 bp, Homo sapiens
acctcctccaagaccgtgctggtctttctcaacctcatcttctggggtatacctcagttaccatgtgccaaagcattatacaactatgaaggaaaagagcc

SEQ ID NO: 320707 - DNA, 82 bp, Homo sapiens
cctcgggcgccccgcagccccccaacatcctgctcctgctcatggacgacgtgcatctgcagacgcagcaggaggtgaagct

SEQ ID NO: 320708 - DNA, 89 bp, Homo sapiens
caccgaaggagacagtgaatcctgttcagccagagaacaagaatgtgagtgtgagccactgccccatgttgtgttgatgccaatctgcc

SEQ ID NO: 320709 - DNA, 101 bp, Homo sapiens
gcgggccctgggggtcctcagcgtggtctgcctgctgcactgctttggctgaaaatgatgagaatggacaagcagaaaacttttccatggacccacaattg

SEQ ID NO: 320710 - DNA, 100 bp, Homo sapiens
ctttccagtcagacacagatgcacaacaggctctggaatgggcactctccttatcagcaagatccgagaagaataccctgatcgcatcatgaataccttc

SEQ ID NO: 320711 - DNA, 75 bp, Homo sapiens
tgacaccatggatctcttcaggcacactacagaactaaatatgcatgccaggcacctcattgagaagtcagtgcg

SEQ ID NO: 320712 - DNA, 75 bp, Homo sapiens
ccagccccttgtcagccagggctgaacccccgcaggtttacccaaggtccagcctagcccctaggcaccatgtcg

SEQ ID NO: 320713 - DNA, 100 bp, Homo sapiens
attgtgtggcactggacggggaatcaagagacccggtttctaatccctgctctgtcactaacaagctgcgtgatcttcgaccatcatctgcaaatagcat

SEQ ID NO: 320714 - DNA, 116 bp, Homo sapiens
gtgaactctatagattctgctggtatacagctacatccaggagagaatgctgacagtcctgcaggcatggatagagtccagtgttctggtgatctacaattggctcaccagcttca

SEQ ID NO: 320715 - DNA, 83 bp, Homo sapiens
ccgaaccggtgcagttcaaggactgcggtacaatgactcttcttgcttttcacctaagttgaataagcaccctgtgcacttta

SEQ ID NO: 320716 - DNA, 74 bp, Homo sapiens
ggggacaaaaaagacctttagaagatggagcgggagatacagatgacccaccaagaattactcagaaccctgtg

SEQ ID NO: 320717 - DNA, 75 bp, Homo sapiens
gccgccgggcccgggcatggtggtctggggcaacgcggaagccctccagaatacccatcatatagcccctgaggt

SEQ ID NO: 320718 - DNA, 74 bp, Homo sapiens
ctgctcagccagcagtatgccgcctccctgggtctagaaggacagaataacgggctcccagattcacaagcccc

SEQ ID NO: 320719 - DNA, 76 bp, Homo sapiens
atttagcaaggattcaaggctttcagggttctccaaaaaatgtggaatcctttgcatctatgctgagacattctcc

SEQ ID NO: 320720 - DNA, 83 bp, Homo sapiens
tggcgtgcgacaacgcggcgcagaactgtttttggaaggaagaaagatggaaagcggtgcagttctgctggaatccaaatcct

SEQ ID NO: 320721 - DNA, 90 bp, Homo sapiens
ccgccgccgccgttggctggagggttgtctcctcacagactatgagctccttgaaagagggaatcgtgtcttactcatctttgtatcccc

SEQ ID NO: 320722 - DNA, 100 bp, Homo sapiens
agcggagcccacgagaggcagcgccatggcggagcagacctactcgtggaattacatgaatgacagtcttcgaaccaatgtgtttgttcgatttcaacca

SEQ ID NO: 320723 - DNA, 51 bp, Homo sapiens
tttggggtagcaggtcaacttacagtggaatatgtgatcaagtgtgacatg

SEQ ID NO: 320724 - DNA, 74 bp, Homo sapiens
tggacaacatgatggtcagaaaaggggacacggcggtgcttagagtgttgcggagataggaacatgggagagaa

SEQ ID NO: 320725 - DNA, 90 bp, Homo sapiens
gaatttgctaaaaatggagaaatgtttgtaatttctatgcagcccccgacccagagccgagctccacttctgctccggctgcccccgaag

SEQ ID NO: 320726 - DNA, 49 bp, Homo sapiens
aaggtctccaagtcccagctcaagatggcccactgcgtgaccttggttc

SEQ ID NO: 320727 - DNA, 80 bp, Homo sapiens
ccgggccggcgtggctgctgctggcaatctggggggatatgagactttctactcggaatatcctgagtgttgcgtggatg

SEQ ID NO: 320728 - DNA, 100 bp, Homo sapiens
atgagcctgccctttgaccagcctcacccccagattatctccgagaagaagctgaagaggaggcggaagccggagtttgacattgcccggaatgtcctgg

SEQ ID NO: 320729 - DNA, 74 bp, Homo sapiens
cactggcaccggcagcggcggcgcgggcggaggcagcagcaggcggaaagccgtggagagctgctccgacgtca

SEQ ID NO: 320730 - DNA, 97 bp, Homo sapiens
gttgaagaactacagcttgctaaaggaacggaagttcctgtctctggcaagtaatccaggcctaagatctggcaaacttggtgaacagtgtgaagca

SEQ ID NO: 320731 - DNA, 100 bp, Homo sapiens
tggccccggatgctgcggcgcccgctggccgggctggctgcggccgccctgggccgggccccaccggacggtggaagcagggaaaggcctggagatgagg

SEQ ID NO: 320732 - DNA, 90 bp, Homo sapiens
gccaccgcgcccagccccccatctttaattggcagatggctcagcgacttcttctgaggaggttcctggcctctgtcatctccaggaagc

SEQ ID NO: 320733 - DNA, 83 bp, Homo sapiens
aagaaaatgaaacaagcctttgctgaattggagagctgaggtaccaatcttgggaaaaagaagcaacacatttgtcatatacc

SEQ ID NO: 320734 - DNA, 83 bp, Homo sapiens
gggtgcccgtggaccacaggccctcgttgcccagatagccctttgctcctccctcagaatgaacggagaccagaattcagatg

SEQ ID NO: 320735 - DNA, 95 bp, Homo sapiens
gtgagaggagtcggcgtttgaagaggtggaactcctagggcttttttgagagtggttacacctatgtttgaggattggactactattgattggta

SEQ ID NO: 320736 - DNA, 82 bp, Homo sapiens
cttccttccacggtagcagtaacctctggtctgccgtggcccccggagctggtggaggtggtggtcacgaccatggagctac

SEQ ID NO: 320737 - DNA, 100 bp, Homo sapiens
tgcagagagagtgcgcagaaggattccgggagcacagttccgccgatgctctggtctggggtctctctgtgaaacacaatcctcagaaagtgggtaaaga

SEQ ID NO: 320738 - DNA, 50 bp, Homo sapiens
tgaagaacgagattcagacacaggtgatctgtgaaaatggttcgctattc

SEQ ID NO: 320739 - DNA, 75 bp, Homo sapiens
ggagtcagaaccctccgcagagtaaaggaaattaaggatgcagacactcagggcgtgtgtcttgcacagccagcc

SEQ ID NO: 320740 - DNA, 100 bp, Homo sapiens
ccctggaatatgaagcaacatgagatggtggatgaacccacaggtgaccaagaatatggcccaggtgaccaaagccctggacaaggccctgagcaccatg

SEQ ID NO: 320741 - DNA, 98 bp, Homo sapiens
ccaccgcatcaagagcttcaagaacaagggccgcgatgtggaagaatagcgggttttgcagcaattgttgcatatggattatataaactgaagagcag

SEQ ID NO: 320742 - DNA, 90 bp, Homo sapiens
caaaggtgatcctggtatttcaagcattggtcttccaggtcttcctggtccaaagactggtgaattttcagctcgtttccttttgaagct

SEQ ID NO: 320743 - DNA, 87 bp, Homo sapiens
gatggtcagcctgctgctgagcacaggacaggtggacgtcaacgcccaggtggtgatctttgtgaagtctgtgcagcggtgcattgc

SEQ ID NO: 320744 - DNA, 90 bp, Homo sapiens
tccgagaccctcgctcccccatcaacgtggagagcttgctggagccatcgtggtcatgtatgtcatctgctggctgccgtaccatgcccg

SEQ ID NO: 320745 - DNA, 82 bp, Homo sapiens
ctggctcttctccacaaagacacgatcatccagcagctcgtcaacggcatcatcacgcccgccaccatccccagcctgggcc

SEQ ID NO: 320746 - DNA, 50 bp, Homo sapiens
tttcagccggagaagcgagtttcagctgttatcaggaactgttgccgtta

SEQ ID NO: 320747 - DNA, 76 bp, Homo sapiens
caggtgacagtctgcatgtgcagttttcaggtgatctgtgaaaatggttcgctattcacttgacccggagaacccc

SEQ ID NO: 320748 - DNA, 82 bp, Homo sapiens
cgagccacgggggccgccgcagcaccatggcgaccaccgtcagcactcagcgcgggccggccactcttcacctccaccatga

SEQ ID NO: 320749 - DNA, 75 bp, Homo sapiens
aggcaactttgtctatcgcacaggggttggccggagacctacgacatgaatacctcggagcccaagacggagcag

SEQ ID NO: 320750 - DNA, 75 bp, Homo sapiens
agaattcggtttgtaggtcgtcagaaagagatgagtttgatgcctacatcattgtgtctttcgtgaatgccaccc

SEQ ID NO: 320751 - DNA, 100 bp, Homo sapiens
tctacgacagatccgacatcgacgcagtctacgtctcggcgcggaagatggccggcggcgtggacggccccatcgggatcccgttccccgaccacagcag

SEQ ID NO: 320752 - DNA, 82 bp, Homo sapiens
cggaagctggttttcaggccacaaatgctttcacagacaatgcagatcttcgtgaagactctgactggtaagaccatcaccc

SEQ ID NO: 320753 - DNA, 95 bp, Homo sapiens
gaggcacctaaaaattgtataccgcagattcaggaggaagaggtggtggacaagatggatgatgatgtcttcctgcgctgcatcgagtccaacat

SEQ ID NO: 320754 - DNA, 98 bp, Homo sapiens
ccgaccagaatgatagccagtccctggagctggtgcacaggttccagacaatgcagatcttcgtgaagactctgactggtaagaccatcaccctcgag

SEQ ID NO: 320755 - DNA, 96 bp, Homo sapiens
gaaagttattgaacggctgggccagagcgtggttgctgaccagttgaaagttgttgacctcctgtactggagagacattaagaagactggagtggt

SEQ ID NO: 320756 - DNA, 90 bp, Homo sapiens
attgatgcatgaagcaatgcagaagtggtattacaaagatcctcagggagaaattcaagagccccggagctatgtggagtctgtggcacg

SEQ ID NO: 320757 - DNA, 83 bp, Homo sapiens
atggagttcattgaattatggcatagatcttgggaaaattgcgacaggggcaagtgtccgagtggtgaatcagctacttacag

SEQ ID NO: 320758 - DNA, 75 bp, Homo sapiens
agaccatcatgctgcgcggccttcccatcaccatcacagagagcgatgagattaacgagaccagaaggaagcatg

SEQ ID NO: 320759 - DNA, 83 bp, Homo sapiens
ctgcccttcgccaaggagatcgtctctctcatcgaggcccaaaccgccaaggtccaggccatcaacgtgtccagccgcttcga

SEQ ID NO: 320760 - DNA, 97 bp, Homo sapiens
ggaagaggtgcttttggtgaagtgcagttgtatggaaccacccctttagtttgggctgcacgaaagggtcatttggaatgtgtgaaacatttattgg

SEQ ID NO: 320761 - DNA, 116 bp, Homo sapiens
aaccactcattcacttctagacgacaaaatgcaaaaaaggaggccaaagactttacccaagaaactcgagagatcttacatttccactataccacatggcctgactttggagtccc

SEQ ID NO: 320762 - DNA, 75 bp, Homo sapiens
ctcgctacacagcccagcagttccgaaatggtcttattagtaggtaagaaacagctgctcctccacctccacccc

SEQ ID NO: 320763 - DNA, 101 bp, Homo sapiens
gaaacttttgcccttatcagtaacacctgaggcaatctgaaagcaaatcctgtttagatgcaggcgaaggttcctggtgacccaggctctcaccttaccgt

SEQ ID NO: 320764 - DNA, 75 bp, Homo sapiens
agccgcgggcggcgcggcccagctcgttccaggtattgttgcagcatctggcagtgagactgaggatgaggacag

SEQ ID NO: 320765 - DNA, 100 bp, Homo sapiens
cgacactatccgtgcggccaggcggaggtctcctctgagcctccggcctccataagacccaaaacagatgacacctcttcccagtcccccgcgccttccg

SEQ ID NO: 320766 - DNA, 80 bp, Homo sapiens
ggcgggtgccgagggcccggacgagggttgaaaggattgttgacaaaaggaaaaataaaaaagggaagacagagtatttg

SEQ ID NO: 320767 - DNA, 98 bp, Homo sapiens
agatgatgagaaataaggacaaaagccaagaggaggacagttcgctacacagcaatgcatcgagaactaaggccacatttcagccttgcatctgagag

SEQ ID NO: 320768 - DNA, 74 bp, Homo sapiens
acagacctaccggtctgtcagtgagatggcttctaacaaggttgttgatcattatgaaaatcctagaaacgtgg

SEQ ID NO: 320769 - DNA, 75 bp, Homo sapiens
cagcttcaggtgaagaaggcagctctcactcaggcaaagcctgtgggccaaagctgaccaactcccccaccgtca

SEQ ID NO: 320770 - DNA, 101 bp, Homo sapiens
agtgccctgcctggagggagccctcctggctgggggcaagacaggggcaagtgtccgagtggtgaatcagctacttacagagatggatggtctggaagcac

SEQ ID NO: 320771 - DNA, 88 bp, Homo sapiens
gtcaggacaattccatttggggaccagagatggacggtcactcagcctatggagagtttttggtcatgaagaggaagagaggcaggcc

SEQ ID NO: 320772 - DNA, 98 bp, Homo sapiens
tcaactcaaatgcaagtccaagaggaggaggaggcggaggtccaagcggaaaggagaacatattgtgatgttcgtgcctcagagctaaaactatgagt

SEQ ID NO: 320773 - DNA, 50 bp, Homo sapiens
gcctcccaagtagctggaattacagggtaaatgggaagttggtagctctg

SEQ ID NO: 320774 - DNA, 48 bp, Homo sapiens
tttgccaggtgtttgttaccttggattacctcaacctctcttggaact

SEQ ID NO: 320775 - DNA, 82 bp, Homo sapiens
cagacctctgtttggggagacgtccgccaaggcggcggcggcggcgcccgggagccggagccttcgcggcgtccacgtccct

SEQ ID NO: 320776 - DNA, 82 bp, Homo sapiens
cgaggaggacgcgcccgccaccgacatctactttatgccatggacaatattaccaggcagaaccaattctacgatacccaag

SEQ ID NO: 320777 - DNA, 99 bp, Homo sapiens
gaagaagggaaggcgcgagtgaggaaaggaggtactgtaggagccctctggcacaaatggaagaagaaagaagggagcaagtagctaaaattaagaaga

SEQ ID NO: 320778 - DNA, 50 bp, Homo sapiens
gcagcagccggccgacccagagtgacacaatgtttgcacgaggactgaag

SEQ ID NO: 320779 - DNA, 83 bp, Homo sapiens
ggggcttctccttcgagaactgccaaagggcagccccgagaaccacaggtgtacaccctgcccccatcccgggatgagctgac

SEQ ID NO: 320780 - DNA, 78 bp, Homo sapiens
gtgcctctaagcagagggaaggagctgctgcagaaggctatcagaaaccaggaggaggaggaagagcagccgcaggca

SEQ ID NO: 320781 - DNA, 102 bp, Homo sapiens
caattcagatggcccaagaacaggctacagatactgaaattttggggtaaaagcatgtctacgaagaaaagtatgtgaacaggaagaaaagtatgaaattcc

SEQ ID NO: 320782 - DNA, 98 bp, Homo sapiens
gacagcagccaggagtcatgagcgacagcggcgagcagaactacggcgagcggtgtcaaaaacggtatttcgctgcctggcacaagctgattcttgat

SEQ ID NO: 320783 - DNA, 82 bp, Homo sapiens
ggcacacgcgcagccccggcctctcggcctctgccggagaaacagagtgcctggtgaagaatgtgatgggatcactagcatg

SEQ ID NO: 320784 - DNA, 83 bp, Homo sapiens
cttggactgagtcctgcaggacacaggtttttcacgactgaaaacaacatagcaaaataagccaagatgtctgtggatccaat

SEQ ID NO: 320785 - DNA, 83 bp, Homo sapiens
ttaaaaatcaccagttactttaatgattgaggagctcaagcttgggaaaatggtgtgcattccttgtatcgtcattccagttc

SEQ ID NO: 320786 - DNA, 51 bp, Homo sapiens
aggattccaagtaactcttatttgaaatggaatctatttggaatttgcaga

SEQ ID NO: 320787 - DNA, 117 bp, Homo sapiens
ccacgggggcgggggaaggactagtgagcagaaactcctcctcgccttatcaggtctgggaagaaaggcgtaaggatggtgaagctgaacagtaaccccagcgagaagggaaccaag

SEQ ID NO: 320788 - DNA, 74 bp, Homo sapiens
gacgcgaccgcggcgcgagtcaccatgtagtttatgccaacgtgacttcattcatacagatgaaccaaggatcg

SEQ ID NO: 320789 - DNA, 103 bp, Homo sapiens
cgggatcgtgaccgagaccgtgaccgagagcgtgaccgagagcgcgaatatcgtcatcgttagaaggtgaagatgcttttgatgccctccctccatctctccc

SEQ ID NO: 320790 - DNA, 90 bp, Homo sapiens
atgggaccttgtttgcctggggcaatggagaaaagttggatggcaagcatgtggtgtttggcaaagtgaaagaaggcatgaatattgtgg

SEQ ID NO: 320791 - DNA, 76 bp, Homo sapiens
tctgtggtgtaaagattgtggtagtagatgaaatcatgaagactttgatagttgcggtgctgttggctggagttgt

SEQ ID NO: 320792 - DNA, 50 bp, Homo sapiens
ggaactgtcaggtacctcaaagcgaatccagatcttacataagatggaag

SEQ ID NO: 320793 - DNA, 90 bp, Homo sapiens
gaccccggtacatctgaaagccgggaaatggagtgtgaggaagaggctgtctgtgtcattatgtgtgcgtcggtcaagtataatatccgg

SEQ ID NO: 320794 - DNA, 82 bp, Homo sapiens
tctcttcaccttttgtcttcaagctgttgctacatcgaccttttttcaggtgtttatctcagtggatgatctggaacccccg

SEQ ID NO: 320795 - DNA, 75 bp, Homo sapiens
cttccccaggcagtggaaccttcgggctcctgcttgtccagccggaagccctgagggcagctgttcccactggct

SEQ ID NO: 320796 - DNA, 80 bp, Homo sapiens
ggcgttctggatctcaaagcggagcatcagatccatgctgctgctgactcggagccccacagcttggcacaggctctctc

SEQ ID NO: 320797 - DNA, 101 bp, Homo sapiens
ggttttaaatcaagatttaacattccaacacataaaaattatttatccaacagctcctcccaggcctatggcatgtctgcgttacctttaaatctgataaa

SEQ ID NO: 320798 - DNA, 100 bp, Homo sapiens
tatggattcatctcactgactgaaacctgagttttgattcaccagaagtctctattatctgggggaatgtatcagaatttgtgagacggcagttaaccct

SEQ ID NO: 320799 - DNA, 83 bp, Homo sapiens
cgcgcgggggcgacgcgcgggaacaacgcgagtcggcgcgcgggacgaagcaattctgtggtgttcttggtcacacatttatg

SEQ ID NO: 320800 - DNA, 73 bp, Homo sapiens
aagagtccacaaagggacctgatgaagcgaagatcaaggtgtagagaggagagagagtgaacagggagcgggg

SEQ ID NO: 320801 - DNA, 90 bp, Homo sapiens
tgcccctcggccttccgacgtgggcggtgggccccagccccacagaccagcccagcattcagatatggctcgtggacagcagaaaattca

SEQ ID NO: 320802 - DNA, 90 bp, Homo sapiens
gggtattaacattggctggagtagcaaggatcttcaacactagaagatatttgctgcagcctttagaacctgcacttgttgccaagtctt

SEQ ID NO: 320803 - DNA, 100 bp, Homo sapiens
agagaaacaataggacggaaacgccgaggaacccggctgaggcggcagcatggtgacatggaccagaaggagagagatgttatcatgagggaattccggt

SEQ ID NO: 320804 - DNA, 88 bp, Homo sapiens
aaagaagatacaaaatcaacttcagattctgaggttaatttggagtggcccctggagtcagtttcctacaccatccgaggccccaccc

SEQ ID NO: 320805 - DNA, 74 bp, Homo sapiens
aggagctgtcccagaattcagctataaagcagccattggaaaagaagtttgttcgagtttcaggagaagcaact

SEQ ID NO: 320806 - DNA, 101 bp, Homo sapiens
ggttaagtatgcggcgccaggagctgcccacggatgacagtaaccagcccccgggccggggtgtcctctccatgcatggactgacctatggggtcattcgt

SEQ ID NO: 320807 - DNA, 83 bp, Homo sapiens
cagttggaagcagccgatccagcctgcggagcctgtggggcaggagtatgcgaccagtggttggaacctgaatgtgatgccag

SEQ ID NO: 320808 - DNA, 60 bp, Homo sapiens
aactggctcaagaaatttgcctcgaaaaccaagaggaaatgagtctcaaccagacagcca

SEQ ID NO: 320809 - DNA, 75 bp, Homo sapiens
tgatatgacagaaaggagccaaggatgactcaagtttttggccagagaattgaatgatctggcacgggaccctcc

SEQ ID NO: 320810 - DNA, 100 bp, Homo sapiens
gggaaggtactggttttaagtgtagttgccgacgcaatggcagcctttgcagtggaacctcaggggcccgcgttagacatggcccatgaacatggacatg

SEQ ID NO: 320811 - DNA, 100 bp, Homo sapiens
gacgagctgttccgccggagcccccggcccaagggcgacttctccagccgggcccgcgaagtggaaaattgggccgatttccacctatgatgcatcatca

SEQ ID NO: 320812 - DNA, 75 bp, Homo sapiens
gagcccagctcacagccaccggtaccttcttccagcaatcagccatgactgcctttgcactgtccatgctctcag

SEQ ID NO: 320813 - DNA, 90 bp, Homo sapiens
gattaaaatctcccaagaggaatgacaaacaaccagctcttcaggaagatcctagtacctccccctctccggggacccgagcagccagcc

SEQ ID NO: 320814 - DNA, 75 bp, Homo sapiens
ctgtttttaagaatgttgacttgctcagtgatatggttcaggattcgggaacaaaggcattctgcgatgttgctc

SEQ ID NO: 320815 - DNA, 51 bp, Homo sapiens
acaaagccacgaataacctataatgagtaaagccaatcccagctgaaggaa

SEQ ID NO: 320816 - DNA, 100 bp, Homo sapiens
agaacttctccaaaaagattcagcagtttcagcaagaaaaacatctgccagccagtgacccggaaaaccttcatgaaaaacaactttgaacacatccagc

SEQ ID NO: 320817 - DNA, 73 bp, Homo sapiens
ggacaacaaccggccgctggaggcgctcatggaggtgtctgtgtctggacaactacacctttgcccaacctgg

SEQ ID NO: 320818 - DNA, 100 bp, Homo sapiens
tcttcaaggaggtcacggacatgaacctgaacgtcatcaacgagggcggcattgacaagctgggcgagctttaatgcgcccaaatgtgggcggggcaaac

SEQ ID NO: 320819 - DNA, 76 bp, Homo sapiens
tcgacgtcgtgatccagaagtccagagctgaggactgcctgtttgcaggcttgttagcagtggcacaagatcttac

SEQ ID NO: 320820 - DNA, 102 bp, Homo sapiens
tttcaagttggtcgcggcttgggctccgctttggggaggggcagcaggacagagcgggatgccaccagcttgtccaaagggaagttccaggagctcctggtg

SEQ ID NO: 320821 - DNA, 100 bp, Homo sapiens
tccttccagtaggcaccgaacccagcattttcggcaaccgctgctggcagttttgccaggtgtttgttaccttgggaacattgaacattttggaagagga

SEQ ID NO: 320822 - DNA, 90 bp, Homo sapiens
tttagttctggggagcgcctcgtcgacatgagtgatgtggaggaaaacaacttcgagggcagagtgctgtacttctttgcagtatacaag

SEQ ID NO: 320823 - DNA, 100 bp, Homo sapiens
caccttcaggattgagacccggaaggcttcaaaggctgtcgcaaggaggaagatacaaactggactctcaggacaaaacgacaccagccaaaccagcagc

SEQ ID NO: 320824 - DNA, 76 bp, Homo sapiens
aattgcaagtttgtgccccatagctgcacaggagatgagtatgatgtatgtgccatttgtttggatgagtatgaag

SEQ ID NO: 320825 - DNA, 100 bp, Homo sapiens
gggaccatcaaagtcatcgacggcacctcgggggccacactgcaggcctccgcgctcagtgtattcagaggatatgaagcacaagaccactcttctggag

SEQ ID NO: 320826 - DNA, 100 bp, Homo sapiens
cggcgcggcgatgatgaacaggttccgaaagtggctctacaaacccaagtctctgctttctatccgtcaagatgataaagtcgtgtgcccgagaaccaaa

SEQ ID NO: 320827 - DNA, 90 bp, Homo sapiens
gaccttcagcccgtggcccggatgcaggacagacccctcaggtcggcttgggaaaccaaaaattacacagagtttaatggcatctgtgaa

SEQ ID NO: 320828 - DNA, 75 bp, Homo sapiens
ttcaaagagaccctcggaacggccaattcctgtccccccagcagcatggcatcgtgtgctgaaccctctgagccc

SEQ ID NO: 320829 - DNA, 75 bp, Homo sapiens
ctcagatgctgccagggtccctgaagagggaagacacgcggaaacagctatgtggtggtaatgcctaaaaagaga

SEQ ID NO: 320830 - DNA, 100 bp, Homo sapiens
tgtaatcttgctgcttatatgtacctgtgcttatattcgatccttggcacccagcctcctggacagaaataaaactgggaattttatcattggaacatct

SEQ ID NO: 320831 - DNA, 51 bp, Homo sapiens
gccgcatccacacagtccgtgtgcggggagttcctgagagtggagatctgg

SEQ ID NO: 320832 - DNA, 82 bp, Homo sapiens
cttcgagtgacccgggtgccgaggagcgggaagagttgctggggcgatcagtgggtgaccgcggctgcgagggactttgtca

SEQ ID NO: 320833 - DNA, 75 bp, Homo sapiens
atgggaagttaatgtttacggcgaagtctactcaacgtttccaaggataaggaagcctgtgtgggtaccaacaat

SEQ ID NO: 320834 - DNA, 100 bp, Homo sapiens
tttctctgagtcctgcccttctgtatcctgtgaaagacctgtcttgagaaaaggccagtgttgtccctactgcataggtgttctttgcagaagatgtggg

SEQ ID NO: 320835 - DNA, 75 bp, Homo sapiens
atcggacatgatcctcatcttttatacactcttagtgctgtccagggcctgctttcttccccgggcgatgtgcag

SEQ ID NO: 320836 - DNA, 83 bp, Homo sapiens
acttcactgccatcctcctcatcgaccaccaggcccaagaagatgaaaggattgttcttgttgacaacaaatgtaagtgtgcc

SEQ ID NO: 320837 - DNA, 75 bp, Homo sapiens
gccatctcctgcatcgtcataggctagaacgagtaaatctgtctgcagcccagacactgagagccgctttcatca

SEQ ID NO: 320838 - DNA, 100 bp, Homo sapiens
cttgaacaaggcaaatatggttttggtattaatctctggagaagacacatccacagttagcactttcttcagatgctgacgctcggtgaacagttgcctt

SEQ ID NO: 320839 - DNA, 82 bp, Homo sapiens
gtttgggaagaaagaaaacctaaagtatttgccgttggtgattcaaggaggaagtatcattctgcaaaggaggcatatgaac

SEQ ID NO: 320840 - DNA, 100 bp, Homo sapiens
gagggcggagctggcgcggcccctagctttctccttctggtgtggggcccgaggttccccctaaaggactcaaaacgtctaatccaatggttaaaagctg

SEQ ID NO: 320841 - DNA, 98 bp, Homo sapiens
tcagaattagaaaggagctgcttcccaataaggaaacatactatactggcaattgctggagaagattttgcaattgttgcttctgatactcgattgag

SEQ ID NO: 320842 - DNA, 90 bp, Homo sapiens
ccgagacgcactgggggccggatggtatggaatcttgcggcatccacgagaccaccttcaactccatcatgaagtgtgacgtggacatcc

SEQ ID NO: 320843 - DNA, 50 bp, Homo sapiens
cagaaacgtcactatcaagaaggaccctgatgctcccataagacagaaaa

SEQ ID NO: 320844 - DNA, 75 bp, Homo sapiens
ttcaagaatcatctgtaaacctgataacactgcatgaaatgttagagttacagaatgtctgaaggggacagtgtg

SEQ ID NO: 320845 - DNA, 100 bp, Homo sapiens
gtcgccaggaaagtggtgatccaggcaggaccaggctgcactgaagggacagaggaaaaggctccaagtagctcctctaactgtcctccatctgcaccaa

SEQ ID NO: 320846 - DNA, 100 bp, Homo sapiens
actcctcatcaccatccacgaccgaaaagaattcgctaaatttgaggaagaacgcgccagagcaaaatgggacacacttttcagaagagctggtagatga

SEQ ID NO: 320847 - DNA, 50 bp, Homo sapiens
cgtcaatcagagcgtcctgtgcggatgaaacgaggaggaagagatagtga

SEQ ID NO: 320848 - DNA, 50 bp, Homo sapiens
gggagtgcatcaaaggtgtgaacgcagagtctcactctgtcacccaggct

SEQ ID NO: 320849 - DNA, 98 bp, Homo sapiens
tgcgcgcctccatctgggccatggatgggcgcatattaaatttcctattgactacccctattcaccacctaccttcagattcttgaccaaaatgtggc

SEQ ID NO: 320850 - DNA, 97 bp, Homo sapiens
cttaatcctactcagaagaacttgtacagagatgtgatgttggagaactatagcaatctggttttcttgggcaccctcaggaagaccccaagcctct

SEQ ID NO: 320851 - DNA, 100 bp, Homo sapiens
tctagctgatgttgttgggctacaaactgaacaaagagctggagatctgcccaagacaatggaaggaagctgtgctgaatggtttggtggccactgaggt

SEQ ID NO: 320852 - DNA, 96 bp, Homo sapiens
ggtggactacagcgccacggtggatcagcgcctacccgagtgtgcgaagctagccaaggccccagatgagaccaccctaaaggagctggccgagac

SEQ ID NO: 320853 - DNA, 87 bp, Homo sapiens
gagagtttgaggtgtacggacctatcaaaagagtagtaagcattaataatgtctttcatctttgagtggatctacaatggcttcagc

SEQ ID NO: 320854 - DNA, 74 bp, Homo sapiens
attatgttggctgtgggtttgtcatagatggcttttgttacattaagttttcaccatggagcagctgagctcag

SEQ ID NO: 320855 - DNA, 98 bp, Homo sapiens
cttggagtgaaatcaggaacatctctttcaatgacaaaaagtttgtcattaaacccatcgacaagaaggcacctagcatgtcctttgcaacctgatca

SEQ ID NO: 320856 - DNA, 73 bp, Homo sapiens
ttgcttgcaacaattgttatgcttatgttcgcacacaagccatgtaccagatgatggatcaaggctttgtagg

SEQ ID NO: 320857 - DNA, 83 bp, Homo sapiens
cggagatggtgcagaagatggaggagctgtttttggaaggaagaaagatggaaagcggtgcagttctgctggaatccaaatcc

SEQ ID NO: 320858 - DNA, 100 bp, Homo sapiens
tggcgcgtacgagatctccgaccagtctgggggcgctggcggcctgcgcagccacctcaagctcttcagagaagtaagaataatgaagattttaaatcat

SEQ ID NO: 320859 - DNA, 101 bp, Homo sapiens
cagagtacgtgtcatcaggcagcctcaagcaattcctcaaaaagaccaagaagaaccacaaggccatgaacgcccgggttgaaggggcccggccaggactc

SEQ ID NO: 320860 - DNA, 130 bp, Homo sapiens
ttcccgcccgcttcctcctgcttcccatcgaagctctagaaatgaatgtttccatctcttcagagatgaaccagttaagatccttctattctacgtaatattttatggctgcctggctggcatcttcatc

SEQ ID NO: 320861 - DNA, 90 bp, Homo sapiens
ctggcgagggtggtctggaaaggcggtagccggtgtgttggtggtcccggaacctctcgtaaaccagacaacgtgcagtccgacctcctt

SEQ ID NO: 320862 - DNA, 94 bp, Homo sapiens
ccgtcccgaccctggccgccccgagcggagcctggaggccctgtttgtgctcttcgtcctggcctacatccacatcgtcttctcccgctcgccc

SEQ ID NO: 320863 - DNA, 83 bp, Homo sapiens
ctcccgggagcatgaaggaccgaacccaggagctccgcacgacaatgcagatcttcgtgaagactctgactggtaagaccatc

SEQ ID NO: 320864 - DNA, 100 bp, Homo sapiens
gctgcacagcggaatctatatagggatgtgatgttagagaactacagaaacctgatcttccttgggcaaaataacatggcagccagacgaattacacagg

SEQ ID NO: 320865 - DNA, 83 bp, Homo sapiens
cgacacacaaagaatagagttgagcctgtgggacacttcgggagcggaaagaatgtcggagcgggccgcggatgacgtcaggg

SEQ ID NO: 320866 - DNA, 106 bp, Homo sapiens
cctgacccggggtcactccgtcgccgttctcctcttgtctacgtgctggacccgacaatgcagatcttcgtgaagactctgactggtaagaccatcaccctcgagg

SEQ ID NO: 320867 - DNA, 101 bp, Homo sapiens
gaagtacccttttcccatgtccaacagagacgtatcctttccacaaggccctggagagtgaatttgtttcctgccagcttcaccaatggattgatctcatt

SEQ ID NO: 320868 - DNA, 100 bp, Homo sapiens
tgcccgaggccggcgaagccatgggcgccgggaccccgccgccgccgccgccgccgccgtctggccccagtatggcatgcagctgtaccagaattatatg

SEQ ID NO: 320869 - DNA, 50 bp, Homo sapiens
gcatcctgagcaagcggctccgcaaggtctgtctgacacttactgccaaa

SEQ ID NO: 320870 - DNA, 82 bp, Homo sapiens
ctgagctccggggtgtgtggacgccgctttgttgcctgagccggatcgagctgggagatgtgacaccacacaatattaaaca

SEQ ID NO: 320871 - DNA, 134 bp, Homo sapiens
atgaaatgaaccttcatcttcctcaaacagaagaagctaaagcagaggcccttgttctgatgggggttgcaaaagcttctcatttcagagagatgccaggatcctaagtgcctgccaaacttaccaattctaag

SEQ ID NO: 320872 - DNA, 89 bp, Homo sapiens
gtttcaactacactgaatgtggctcaggacaagatgacctcatccagcatcaagatatgaggatcttggagctaacgccagaaccagac

SEQ ID NO: 320873 - DNA, 100 bp, Homo sapiens
agaacatcctggtgcctctggccaacactgcctttttccagaagaatggtttattattgccagttttggcctcctcagtgccctcacactctgctacatg

SEQ ID NO: 320874 - DNA, 52 bp, Homo sapiens
ctcccaagtggctgggattacagctactacccacagatggcatgatccgaaa

SEQ ID NO: 320875 - DNA, 98 bp, Homo sapiens
gctctccgacctctacctggagcatttgctgcagaagcgtagtcggccagagaagttgattcaagtcagttgagacgccagttgtgtggaggaagtca

SEQ ID NO: 320876 - DNA, 83 bp, Homo sapiens
actctcagcctactatctgtctggagaagaggagcaattatgtttgcctctccacattttagaagagaaaggtttgagccagg

SEQ ID NO: 320877 - DNA, 98 bp, Homo sapiens
cattctgagtacttggctaatcaagtgatgaagagaaagaaatcgtggtgcttggagtaagtctgaaacccggaaactaatcaaggctgtcgaagaag

SEQ ID NO: 320878 - DNA, 75 bp, Homo sapiens
tggtcatcggagctgtggtcgctgctgtgatgtgtaggaggaagagttcaggagtttcgatacgatgaatttgat

SEQ ID NO: 320879 - DNA, 149 bp, Homo sapiens
gaagccgacgcccatccagctgaacccggcccccgacggctctgcagttaacgggaccagctctgcggaatgtgtgagatgccagtaaacacaccagaaagtccctggaaggtgagtcctgaagaggaacaaaaacgtaaagacttgag

SEQ ID NO: 320880 - DNA, 90 bp, Homo sapiens
ctcctgccttagcttccaagaatgctgaggttacagtcttaggaaaagtcctcagtgctgtgggcagtgcccagctactgatgtcccaga

SEQ ID NO: 320881 - DNA, 48 bp, Homo sapiens
atctggttcagattttacagctctggaacaatgagatggtggagctac

SEQ ID NO: 320882 - DNA, 100 bp, Homo sapiens
cgagatttgggagagacgctctgaactgactgccccgcatcaccggagcgtcccagctgcgaggaggtggccctggtacagtggacggaaagtgtgggct

SEQ ID NO: 320883 - DNA, 83 bp, Homo sapiens
ccaaaatgaggtcaacggctgtgctggacccaaaggagacaacatttatgaatggaggtcaactatattgggacccccaggat

SEQ ID NO: 320884 - DNA, 76 bp, Homo sapiens
aacgtctgtgggttacgccatctttaagagccgatgatgagcaccccacctcctgccagcgagctcccgcagccac

SEQ ID NO: 320885 - DNA, 80 bp, Homo sapiens
caaatacccctttgaattaattatggctgttcaaaccttgtactactcagctgatcacaagctgcttgatgggaacctac

SEQ ID NO: 320886 - DNA, 73 bp, Homo sapiens
gagatcagcaatccttggctcactgaggaggtttggttggagttgctgtgggtgagctgctgtggtctgtagc

SEQ ID NO: 320887 - DNA, 100 bp, Homo sapiens
ctttgggagggtcaagatgtgctggccagatggactgatgggctgctatacttgggtaccatcaaaaaggctacatccacgtgacgcagaccttcagcat

SEQ ID NO: 320888 - DNA, 82 bp, Homo sapiens
agattttgtacctcggggacctgctggagacctgccatttccaggccttctggatgaagttctcgctggagaagctgcacca

SEQ ID NO: 320889 - DNA, 98 bp, Homo sapiens
gctgtatattcactctgaactgagaggtggcacaagaatggctcaactctccaaatagagagaatttctatcagttgcaagtacgaaaatttcctgcc

SEQ ID NO: 320890 - DNA, 100 bp, Homo sapiens
gccgcacgagcaccagcctagagccagaccggtaccgggagtaccagtggatcggactcaacgacaggaccatcgaaggcgacttcttgtggtcggatgg

SEQ ID NO: 320891 - DNA, 80 bp, Homo sapiens
caggagaagttagcttcagagttctttgtggatggacttgattctgatgagagccatcactggtgcaagctatatttaac

SEQ ID NO: 320892 - DNA, 100 bp, Homo sapiens
gtagaccgactggaagaccacggcgtagcagaagccattccgacaatgataggagcaggagcagtgacttcacctgagaacatcccagcgggaggacaag

SEQ ID NO: 320893 - DNA, 88 bp, Homo sapiens
gcaacatttcccacaggacacgaagtttgtcggcccttgccttggcagagctgaggccatggaggaattgcaagaccaagagggctgg

SEQ ID NO: 320894 - DNA, 75 bp, Homo sapiens
cactacagacctcacagtgccaaatggagctggaagcagtccagtggaagaagctactatggaggaaactgggcc

SEQ ID NO: 320895 - DNA, 90 bp, Homo sapiens
cgctgcgaatgggcaggcgtatgccgtgccctaccagtacccatatgcaggttacactcctggcacaccttacaaagtgtcctgttcccc

SEQ ID NO: 320896 - DNA, 99 bp, Homo sapiens
catggaccagcgagagcccctgcctcccgctcctgcaggactttccttatcccagttgattgtgcagaatacactgcctgtcgcttgtcttctattcac

SEQ ID NO: 320897 - DNA, 50 bp, Homo sapiens
tccgccctaatggaggtctccagtttcgttgggacccctgattttagcag

SEQ ID NO: 320898 - DNA, 75 bp, Homo sapiens
tccgaggcaagcgttggttctgtgcgcctcaggaaagaccacagcaagattctttcattcgtctcctcctagcct

SEQ ID NO: 320899 - DNA, 100 bp, Homo sapiens
ctgtgctacaaccggggctgcggtcagcgcttcgatcctgagaccaattccgacgagtcaagggtccagagaaggaggagaagttgagacaggcggtcaa

SEQ ID NO: 320900 - DNA, 100 bp, Homo sapiens
tattcatcaagaagaggccctttagcaggtttcagcaacatttgctgcaagtttagtcaccagtcctgcaattggagcttatcttggacgagtatatggg

SEQ ID NO: 320901 - DNA, 100 bp, Homo sapiens
ttgcccagtgatgaagtttccagagcattccttgcttcttttatcttggtctttgaccttcttattgtgatgcaggcctcccagtagcattggatgcagg

SEQ ID NO: 320902 - DNA, 75 bp, Homo sapiens
caggcacaaggatgaacattctgccgaagagaacaagacgtgtgaagactcagcgtgagtgcatctccatccacg

SEQ ID NO: 320903 - DNA, 83 bp, Homo sapiens
gggagcacgctgagaacatttggcagctgagccattatctggatattgtggaagtaaacattgctcaccagatctctctacgt

SEQ ID NO: 320904 - DNA, 90 bp, Homo sapiens
gtggaagatggcgcctgttgtgacaggacatgtcatgctgcccaaggacatagccaagctggtccctaaaacccatctgatgtctgaatc

SEQ ID NO: 320905 - DNA, 83 bp, Homo sapiens
atcaacgccattcctgtagcctctcttgaccccatcaaggaatggttgaaatgtatcctccactcctcgctggccaccatcct

SEQ ID NO: 320906 - DNA, 75 bp, Homo sapiens
gtcagtacgcgaaggatatcggtttcattaagctaatcacatatggctctgatagaactgaggcactgaagagaa

SEQ ID NO: 320907 - DNA, 74 bp, Homo sapiens
tgtgcgtgagagaagaccagtctttcctctagggcaccatgccggtggaaaggatgcgcatgcgcccgtggctg

SEQ ID NO: 320908 - DNA, 73 bp, Homo sapiens
aagaattttccaaatgaatttgcaaaacttactgtagcaactccgaagtcaagcccgcactctgattaccttt

SEQ ID NO: 320909 - DNA, 75 bp, Homo sapiens
ggactgtttgtctttgttctctgcctcttgtattctagttgtggacatcggatacccaaggagacgaagctgaag

SEQ ID NO: 320910 - DNA, 100 bp, Homo sapiens
ccactatgttgacaggctatttgaccctgatccccagaaagttctacaaggtgtcataactctcttgatagagcccaagcagccaagaataaaggcaata

SEQ ID NO: 320911 - DNA, 87 bp, Homo sapiens
catcctcctggccaccgactcctacaagctatgacttcacacctatggattcttctgcagtttatgtgttaagtagtatggctcgcc

SEQ ID NO: 320912 - DNA, 50 bp, Homo sapiens
agagaacagggtggccgcttggtccagaaccaaccagttttgctttttgg

SEQ ID NO: 320913 - DNA, 100 bp, Homo sapiens
ctgggtgtctggcagagaggctgggttatcaatactctggctgaccatcatcatcgtgggactgactttggtggaagtccttggttacatgtcattattg

SEQ ID NO: 320914 - DNA, 89 bp, Homo sapiens
cgtgcttatgcagatagttactattatgaagatggagagtccctgtgaagcaggaagagtgagggcaggttcactgcagctcagcagca

SEQ ID NO: 320915 - DNA, 74 bp, Homo sapiens
tgggctttcgcccgcggctcctgagggatcggtctcagccgcgcggactgggccagtgccattcgcgtcgcagc

SEQ ID NO: 320916 - DNA, 120 bp, Homo sapiens
cagcctcaagggcttcagcaccgcgcccatggcagagccagaccatttggaatccagatatgacactaaaaagttatttcaaggaaaggatatttatgaaatgaacttatctcagtggaa

SEQ ID NO: 320917 - DNA, 100 bp, Homo sapiens
gggcgtggtgcacctggcgacagcggccgtcctaaacgcggtgtgggacttgtgggccaagcaggagggaaagggactgttgacatttagggatgtggcc

SEQ ID NO: 320918 - DNA, 98 bp, Homo sapiens
aaaagttcccagccttaaagaccaagggaaggaatatgatggattcacaatcacgattacaggagacaacaaatgcagccctgaggatttggctactg

SEQ ID NO: 320919 - DNA, 100 bp, Homo sapiens
tgatgctggaaaatctcaggaatctggtctcattggcaggagcgagaacccgagcagcgccatgagcaacactaccgtcgtccccagcactgcaggtccg

SEQ ID NO: 320920 - DNA, 75 bp, Homo sapiens
tttgaaagtttgtaaaacagaggatgaggctgtttacaagattgcccaaggactccagatactccaaataatgac

SEQ ID NO: 320921 - DNA, 100 bp, Homo sapiens
gatgctgttgccattgtactgtcctcgtggatgagaatggcaaaattagtcgccttcgtcgagagtgcccttctgatgaatgtggtgctggggtgtttat

SEQ ID NO: 320922 - DNA, 137 bp, Homo sapiens
accggcgtgccccaccatgtcagacgcagccgtagacaccagctccgaaatcaccaccaaggagctgacatggacccaaatcctcgggccgccctggagcgccagcagctccgccttcgggagcggcaaaaattctt

SEQ ID NO: 320923 - DNA, 100 bp, Homo sapiens
cagaacaactccgtctttaccctgtatgaactgactaatggggaagacacagaggatgaggagctggagaagcagttggtggctctcattccctatgggg

SEQ ID NO: 320924 - DNA, 83 bp, Homo sapiens
ggacttcacggagctctggagaaacatgaagttcgggactatcttctggaactgtggctgcaccatctgtcttcatcttcccg

SEQ ID NO: 320925 - DNA, 90 bp, Homo sapiens
gtcggcttcaaagagaaaaggcaacatcctgtcacaggccatgctctggcaaaaacgtgaatcagctcccggccgactttaggattcttc

SEQ ID NO: 320926 - DNA, 90 bp, Homo sapiens
ggagttcagtgactgctattgaaccaccaaaagtccattatgaaactggtctacggctctcgcaggctctgtgagggctttgctatgacc

SEQ ID NO: 320927 - DNA, 78 bp, Homo sapiens
cagagtcattgcaggaagtggatgagttccacctcattttagagtatcaagcaggaaaccacccctactcctaatccc

SEQ ID NO: 320928 - DNA, 100 bp, Homo sapiens
tggactctgcagagtgaagagaaaatagcaaacgatccagacggcagggagtgcatcaaaggtgtgaacacaggtgccgtgagcgatgtggagatgcagg

SEQ ID NO: 320929 - DNA, 82 bp, Homo sapiens
tcctttctttgtcaagccacccaatgcagagccacttgtggccccccagacagctacggcgtggacaagaagcggaaacggg

SEQ ID NO: 320930 - DNA, 100 bp, Homo sapiens
gtggtgcacacgccctgcatcgagcagctggagaagggacaccatgtggcggatctttactggatcgctgctggtagaggagaagtcaagtgcccttctg

SEQ ID NO: 320931 - DNA, 75 bp, Homo sapiens
gtcgtgccgcagcatggtgaacctcatggatgcatatccccccacgtccatgtccaggagcccccctactgtcct

SEQ ID NO: 320932 - DNA, 75 bp, Homo sapiens
gcatgatccataatcggtttcaaggtatgacaggtgtgcttctgctcctggtcctggccatcatgtatgtcttcg

SEQ ID NO: 320933 - DNA, 99 bp, Homo sapiens
ctactataaagctttggaagatgcagatgagaaggttcagttggcaaaccagatatatgacttggcacgtctgagaatggtggatgtggtggagaaaga

SEQ ID NO: 320934 - DNA, 75 bp, Homo sapiens
caacaaaaagggcctaaagaagatgcaggccaacctgaccgtcaagctgccagatggatacgaattcaagttccc

SEQ ID NO: 320935 - DNA, 90 bp, Homo sapiens
tcttggatttggctacacacttatagatcttctgcactgtttacaggcacagcgggagatacagatgacccaccaagaattactcagaac

SEQ ID NO: 320936 - DNA, 100 bp, Homo sapiens
gaaagagtcaacagcagtggcaacagagtcgcacctatctgggcatgtccacacttcgagacctgatcttcaagcgcccgtcccgccagttccagtacct

SEQ ID NO: 320937 - DNA, 74 bp, Homo sapiens
cagaaagcaagtcctattttccaccaaaagaactagacagtacggatggtgccaaagtttttagtaaacaacca

SEQ ID NO: 320938 - DNA, 101 bp, Homo sapiens
caagagtatgaggagctggtgtctgtgtcagatttgtagctgcggtataagaatgcgggagtgattgagttggaagcgtgcatcaaggctgtacgtgtcct

SEQ ID NO: 320939 - DNA, 82 bp, Homo sapiens
cgggaggtgttcgagaacgaccccgagacgatttgagaatggcagtgagtttccctcagagctggaggacggggacgaccca

SEQ ID NO: 320940 - DNA, 46 bp, Homo sapiens
caggtcagcttgtctcacataacagaacccagtgacttgattgtaa

SEQ ID NO: 320941 - DNA, 75 bp, Homo sapiens
ctggattctaaggcaacacttccttgaagaaacaagcttacagggcttcctgaagaatgagaaggacaatgccct

SEQ ID NO: 320942 - DNA, 100 bp, Homo sapiens
ggagaagggtgtgtttgtttccccatctgccatgattataagttttctgaggcatccccagccatgctgaactgggttgatagttcttggggaggtacct

SEQ ID NO: 320943 - DNA, 80 bp, Homo sapiens
gaaccacagctgctcagaaggccagatgcttgtttgctactgatgggtgtgagcaagttagatattctataccggagact

SEQ ID NO: 320944 - DNA, 100 bp, Homo sapiens
ccctgttaaggatgctactgctagtgagaagaatgaaccagaagttcaatgatatctcttccaaacgcatgatgaaggaggtcttgtcaacagggcaagg

SEQ ID NO: 320945 - DNA, 76 bp, Homo sapiens
gtcgacctgacttcttttgagcagttggcactacccgtcttgaggaatgtaattaataatgcttgtgctactcaag

SEQ ID NO: 320946 - DNA, 100 bp, Homo sapiens
gtggaaactttggtggtagcaggaacatggggggaccatatggtggaggccactgagaatgcaaaggaggaagtgaggcgaattctggggctgctggatg

SEQ ID NO: 320947 - DNA, 71 bp, Homo sapiens
gttccccggcccacagtgggggtgtgcaaacccgagagaactgggtttggccgtaagctgtgtctcctggg

SEQ ID NO: 320948 - DNA, 102 bp, Homo sapiens
atgggcaccatgatctgtggctgggataagagaggccctgaaactggtccacaatgtgcataaccacatcaccaatgacaagagattcaatgggtctgaaag

SEQ ID NO: 320949 - DNA, 75 bp, Homo sapiens
ccaacatccagagctgcatcattccttggggcaaaatgtggacaaggatatttcacattttcaggaacaaaatga

SEQ ID NO: 320950 - DNA, 83 bp, Homo sapiens
ttagaatctgggactttcttcgttgccatgaggaaagaattctccgaggaactgtggctgcaccatctgtcttcatcttcccg

SEQ ID NO: 320951 - DNA, 100 bp, Homo sapiens
tttggaggacagagactgcaagtgatgtacctgctcccccttcaccttctgccataattggaagcttcctgaggccctcaccagaagcagatgccggcac

SEQ ID NO: 320952 - DNA, 75 bp, Homo sapiens
ggccggccgggagggcctcgggggactgactgagcttgtggacaaatgtataggatcaagaattcacatcgtgat

SEQ ID NO: 320953 - DNA, 100 bp, Homo sapiens
atcgtctccaccttcttcctgcagacaccactcacagagctgatggacgggcccaaaggccacatctgccagagcctggagtctgcgaaggccgggaccc

SEQ ID NO: 320954 - DNA, 74 bp, Homo sapiens
cccctgaaggcctcgctggagatcgagtaccaacatgattccacctttccactgatagactcaagttcccagaa

SEQ ID NO: 320955 - DNA, 97 bp, Homo sapiens
ctggaaagctttaggagttcacagtgtaaagagaaatgtgtatgaccttacaagtatccccgttcgccaccaattatgggagggctggccaacttct

SEQ ID NO: 320956 - DNA, 97 bp, Homo sapiens
cgtggtgacattgtatcattggtgctggattctagtgacatttataacgaattgaaagaaacatatcctaattatcttcctctgtacgttgcacgac

SEQ ID NO: 320957 - DNA, 98 bp, Homo sapiens
ttaccagagataattgataacaccctgtaacagctgaatatcggaaactggcactgaagtggcatccagataaaaatcctgagaataaagaagaagca

SEQ ID NO: 320958 - DNA, 114 bp, Homo sapiens
ctgttgtccacactccccagctgcactgaccagtgtttccggcaaaaccacattcatgggacacttctccagcttttcggagactgggaagcccaactgcgaagaataatgaag

SEQ ID NO: 320959 - DNA, 75 bp, Homo sapiens
ttttgacacggctttggaaacgacgtcatgtgttagattttggggaatgtctcagaattccaaagagtggttgaa

SEQ ID NO: 320960 - DNA, 100 bp, Homo sapiens
gccggctgtactgtcgtggtgaagcctgccgaagacacgcccttctccgccctggccctggctgagaggccagcagaaatagtagacgaggaagaagatg

SEQ ID NO: 320961 - DNA, 100 bp, Homo sapiens
ctcgtactgtcgccgtcaccgccgcggctccggccctggccccgatggctctgtgcaacggagactccaaggttttaaatgcacagagagcaggatacaa

SEQ ID NO: 320962 - DNA, 100 bp, Homo sapiens
aaagatttcatgagacaagctggggaagtaacgtttgcggatgcacaccgacctaaattaaatgaaggcttcagccccaggaaatcagcccccctcctac

SEQ ID NO: 320963 - DNA, 76 bp, Homo sapiens
ctaaagagcaagcctaactcaagccattggcacacaggtcccagtagggatggcacaatcagcgaggacaccatcc

SEQ ID NO: 320964 - DNA, 100 bp, Homo sapiens
gttgctttgaccaaagatggtcatgtgtatacctttggtcaagtgctgggctttgacaaacttcctctgtggggtaccatcctcatctcggtgggatgtg

SEQ ID NO: 320965 - DNA, 90 bp, Homo sapiens
gacttcacagtttctgctctggttcaaaccttgtactactcagctgatcacaagctgcttgatgggaacctactagatggacaggctgag

SEQ ID NO: 320966 - DNA, 100 bp, Homo sapiens
ttcgtcaccccgctcctgctgctgccactcgtcattctgatgcccgccaagagctacttcctcagccgagcccagagcctgtgtggccccgagcacagtg

SEQ ID NO: 320967 - DNA, 100 bp, Homo sapiens
gcctccccaaccccaccatcccaccaaagggggctgctgaccgagagagctcactcagccagccttgaaaagatcttttgaggtcgaggaggtcgagaca

SEQ ID NO: 320968 - DNA, 100 bp, Homo sapiens
ctggacctggcgcgggcacaggcagtgctggaggaagaccactacggcatggaggacgtcaagaaacgcatcctgattgcagccaaaattggaggcgatg

SEQ ID NO: 320969 - DNA, 80 bp, Homo sapiens
cgcgtgtcctcggagcgcggtccctgtattggtctcctgctcctagagggcgccctgcgtccggcagaggaggcgagcat

SEQ ID NO: 320970 - DNA, 133 bp, Homo sapiens
gccggctccgggcccggccagtacctgcagcgcagcatcgtgcccaccatgcactaccaggacagcctgcccaggtctattgaatgatggaactgtgggtatttttaggggcaaccagatgcgcttaaagcga

SEQ ID NO: 320971 - DNA, 82 bp, Homo sapiens
ggcactgaggctctggaacttctgcccagctctccttggtgtcgtgaaaactacccctaaaagccaaaatgggaaaggaaaa

SEQ ID NO: 320972 - DNA, 90 bp, Homo sapiens
gttgcgatggcgcagaaaccccgttgacaaggcactgctttttcatgacggatgagctttctgatgttagccaaggcggatctaaagcta

SEQ ID NO: 320973 - DNA, 51 bp, Homo sapiens
gtcagcctctggttcagactgcagtaaccaaattcaaggaagccttctccc

SEQ ID NO: 320974 - DNA, 75 bp, Homo sapiens
cctgtggaaccactcaataattgaagaagaatttgtcaggtccagacccagtacttattatgaactgttgggggt

SEQ ID NO: 320975 - DNA, 75 bp, Homo sapiens
ttcaatgtgacacaaggaaagtattctacagttttctggatatgccgcagaaggatccgtgccagaagcaagcct

SEQ ID NO: 320976 - DNA, 82 bp, Homo sapiens
gaggaattttgaagtacaccgtggtgacattgtatcattggtgatgaaaggctgggtcgtgacagtgaaatccatagggaac

SEQ ID NO: 320977 - DNA, 90 bp, Homo sapiens
agagaacgttcgagatctcgtgggtcgaaatcaaggagtctactcttcatcttgtgttgagacttcgtggtggtgctaagaaaaggaaga

SEQ ID NO: 320978 - DNA, 100 bp, Homo sapiens
atgacattgtggacagtgacagcgatgctgaggatcgaggaacgttgtctgtgaggaggacatgtaccgtgctgcagatgaaatagaaaaggagaaagaa

SEQ ID NO: 320979 - DNA, 99 bp, Homo sapiens
aacgaattcagtgatatcattaagtccagatctggatgaccagtgtcccagtgaaggaacgagtgaaggtgtctcagaactggagactggggcgctgcc

SEQ ID NO: 320980 - DNA, 75 bp, Homo sapiens
agccaacttgcagatagaaaactcagtgatgcttctgatgagagagatggagtttcactcttgtctcccaggctg

SEQ ID NO: 320981 - DNA, 80 bp, Homo sapiens
attgaaaacattgacgaagctattacattgcttgaacaaaataattgggacttagtgtgggttgtatcccctgcagaaaa

SEQ ID NO: 320982 - DNA, 51 bp, Homo sapiens
tccccaaacaagtgctcctacattctgtgtctttggtgcaacactaacaag

SEQ ID NO: 320983 - DNA, 97 bp, Homo sapiens
cccttgtccagttactctaacaagtctggaggtttctttacctccagaaagaagaatattggccccttgaattctggaagttcattgaagagtctga

SEQ ID NO: 320984 - DNA, 75 bp, Homo sapiens
tcagctggagaacgcggctaaagttctgatggtgcctcatctccagacatggagcccagctatgggggaggtctc

SEQ ID NO: 320985 - DNA, 96 bp, Homo sapiens
ttgtcagtgacaaggcccgagatgcagctgctgtccttgtgtccaggtttggtgcacctcgatttggaggaagtagggcagggcccttatctggaa

SEQ ID NO: 320986 - DNA, 100 bp, Homo sapiens
tttcccttccttcatatgaggaagatcagggatcaaaactcattcgaaaagctaaagaggcaccattcgtacccgttggggtagaaatatttctgtcatg

SEQ ID NO: 320987 - DNA, 71 bp, Homo sapiens
ggtcttccggaaccacctgggccgctactgcttggaggctgtgatgcgccgctggctgcctgccggagacg

SEQ ID NO: 320988 - DNA, 100 bp, Homo sapiens
cgtcctccacccctggaatccctgtctgggtgcggactcggagaagccctcgagcatccccacaggttatcaatactctggctgaccatcatcatcgtgg

SEQ ID NO: 320989 - DNA, 83 bp, Homo sapiens
tagaaaagtgtggctggtctgaaggcagaagtcaattcatctggaaagactatctctgagtcagacttaaaccactctttttc

SEQ ID NO: 320990 - DNA, 75 bp, Homo sapiens
agggcgcagattctttctgtacggaggatacgaagcgttttcggcttcctgcccggagctgtgcagcaaacagtc

SEQ ID NO: 320991 - DNA, 50 bp, Homo sapiens
gttccctacacggtctcctgggtcaagacggggtcttgctgtatcaccga

SEQ ID NO: 320992 - DNA, 82 bp, Homo sapiens
ccggagatgcctgacgcatctgtctgaggagcggtcagtgacgcgatggagcgggcaagcggagctggagtttgttcagatc

SEQ ID NO: 320993 - DNA, 82 bp, Homo sapiens
gagcctgttggaggaactggcccggaaacaggaggacagtatggtgtttgcgaaaacttgcggaagctggagatcacaggcg

SEQ ID NO: 320994 - DNA, 100 bp, Homo sapiens
ggcatgggtaaaccagctattactaagagaaaattttctcctggtagacctcggtccaaacagccaacaaatggaattttcttgagcatgtttctaatcg

SEQ ID NO: 320995 - DNA, 100 bp, Homo sapiens
ataatcgaatagttgatgccctaaatgaattcaggtatgagaaagtgccagtcatcttggttgggaacaaagtggacctggaaagtgagagagaagtatc

SEQ ID NO: 320996 - DNA, 90 bp, Homo sapiens
cgcagcgccgagcgcggcccgggcgccatcgagccttggcggcggacgtgcaggccaggtcagagcagcccaccatgggatggggagggg

SEQ ID NO: 320997 - DNA, 75 bp, Homo sapiens
ctccaggctttctgactgtgtggaacgcttcctgcctgacacagctcacttcaagaagtgcacaatgtcagaacg

SEQ ID NO: 320998 - DNA, 75 bp, Homo sapiens
gatgcctttggaacgtcattcattctcgatgtcgtgctaaatcaaccctgtcattaattccatgtgtcaatactg

SEQ ID NO: 320999 - DNA, 100 bp, Homo sapiens
agcaagatggaatgattttttctgttctctgttctgtttcccaatgcagaaaagaagggatgtcatcattgccaagaagagcgaaagtacaggtccagga

SEQ ID NO: 321000 - DNA, 98 bp, Homo sapiens
gaaaatgaagattttgacagtcgtagatacaaatttttggatgatgatggatccatttctcctattgaggagtcaacccttctggctttgagccaaca

SEQ ID NO: 321001 - DNA, 82 bp, Homo sapiens
ggcggctgcggcaacagcggggccgacaatgcagatcttcgtgaagactctgactggtaagaccatcaccctcgaggttgag

SEQ ID NO: 321002 - DNA, 99 bp, Homo sapiens
agattcatgaagagaaactcctctactggaacatggctgttcgagacttcagtatcctcatcaacttgataaagggcggcgactggcggcgcgatggac

SEQ ID NO: 321003 - DNA, 71 bp, Homo sapiens
aaatctaatgaaccgaaactttgggagtctaccatggctcaagaatctcccaaaaattcagcagcagaaat

SEQ ID NO: 321004 - DNA, 90 bp, Homo sapiens
ctgggccagcctgacctccccaaggagatggcctctctgtttgatattcactgatggactccaaagaatcattaactcctggtagagaag

SEQ ID NO: 321005 - DNA, 110 bp, Homo sapiens
tttagatgcactgttggcttgcgagacaaatatggagctaatttcgttactcgaaaaattagccggtcagtagctaagatttaccttggacaactggaatgtttcagttt

SEQ ID NO: 321006 - DNA, 100 bp, Homo sapiens
gcggagaggcgggcgggaggccgctgtctgtggaagcccgtaaagagatgactagaaaggctattaagacagtcaaacattttattgagaagccaaggaa

SEQ ID NO: 321007 - DNA, 83 bp, Homo sapiens
cgacgcaaaccaaggatctggggatcttcgcactatcccaaggcaaaatacatatctcagtgcattgatgagatcaagcagga

SEQ ID NO: 321008 - DNA, 100 bp, Homo sapiens
ggagctgtaatcaattgtgctgacaacacagtttcagattggagaactggcaaataccctgacaagtaaattcgagtttctaggcattaatagacaatcc

SEQ ID NO: 321009 - DNA, 50 bp, Homo sapiens
atcccatgtgtctaaagagtgtaaagagcaagaaggctgcttgatcttgc

SEQ ID NO: 321010 - DNA, 75 bp, Homo sapiens
ggctggaagaggaagatgcctagcacagaccttctgatgttgattttggtgaccaatttggatttccatgatgag

SEQ ID NO: 321011 - DNA, 98 bp, Homo sapiens
ccatcgtgatggcggatgagagcaggatggcccaatggaatcagctacagcagcttgacacacggtacctggagcagctccatcagctctacagtgac

SEQ ID NO: 321012 - DNA, 100 bp, Homo sapiens
tgggaaggacctgatgatacagagatagtgtctcacttggtcacccaggctggagtgcagtggcgcaatcttagctctctacagcgtcgatcttcctcct

SEQ ID NO: 321013 - DNA, 75 bp, Homo sapiens
agcgggatcaagctgtgtgcattagtacaaatggtgggaacatccagttgcaggaaaacaagcttaacacgccca

SEQ ID NO: 321014 - DNA, 75 bp, Homo sapiens
ttgtacatcatcaccaaatggaaagttaatcgaagaggcacagttggtggatctgaaatctgaactgacagaaac

SEQ ID NO: 321015 - DNA, 75 bp, Homo sapiens
ttttcaatgcacaaggggaaatttggcttgcaattcatcactttgaaaagattggagctggagtgagccttccag

SEQ ID NO: 321016 - DNA, 100 bp, Homo sapiens
cctcagcaggcggggaagatgaaagggagttttgagagcaaaatgacaacacccagaaattcagtaaatgggactttcccggcagagccaatgaaaggcc

SEQ ID NO: 321017 - DNA, 75 bp, Homo sapiens
cctgagccatgcccatcgcagccgccccgaaggagccaggatttttagactctgaggagcagttggagctaatcc

SEQ ID NO: 321018 - DNA, 99 bp, Homo sapiens
atgaacttatctgtattagaaaaggagcagagcagaggacaacttgtagaagacatgaccattaagagacatcaacttcgcaacaaatataagacaagg

SEQ ID NO: 321019 - DNA, 83 bp, Homo sapiens
ggtgttcgagaacgaccccgagacgctggagcagatccgcagggacatccgagacttccggtctagcgcggggctggacaaag

SEQ ID NO: 321020 - DNA, 100 bp, Homo sapiens
ggccggcgaaaggagctggtgcctgtgcaagttgttgagataagctgtcattggaaggaatagtggtacaaagagctgaatgccgaccagctgccagtga

SEQ ID NO: 321021 - DNA, 100 bp, Homo sapiens
cggcggctccaagatggcgcaggcgatctttgaggccctggaggatattcaagagaagcttatgtggagttagttcaccatattagagaatctattccag

SEQ ID NO: 321022 - DNA, 100 bp, Homo sapiens
tgggagttcagcttttagagcaggtgtatgatcttttggaggaggaggatgaatttgatagagagatgccactgccgccaggagccctgtaacatcagcc

SEQ ID NO: 321023 - DNA, 98 bp, Homo sapiens
cagtttaggtctcaaggcaagcctattgagttaacacctctgccgctgctaaaaggcaatgtctacttcgatctgaagtctagaggagacaagtatgg

SEQ ID NO: 321024 - DNA, 99 bp, Homo sapiens
caaagaaattagaccattttcttcgtgagaaagaaatcgacgtgctgttttcataggttttcaatggttccagcaggtcaacacgggagaaggaacctg

SEQ ID NO: 321025 - DNA, 82 bp, Homo sapiens
gcgccggccagctgctcttcgccaacttcaaccaggacaacacgaccaagaatcgccttcagccctgtctggtgcatccttg

SEQ ID NO: 321026 - DNA, 50 bp, Homo sapiens
ctgcaccgcaccgagggcgagctccagttttacagctcccagcacagtag

SEQ ID NO: 321027 - DNA, 75 bp, Homo sapiens
tagctataaaccaaatgaccttgtggaagttagggattaatgaaaatcaagttccatcctcagacaagaggtaaa

SEQ ID NO: 321028 - DNA, 82 bp, Homo sapiens
cctacatagagtcgcagggagcccaccgggcgggcctggccaaggaattggtggagagaaggcgcaccatgatggaagattt

SEQ ID NO: 321029 - DNA, 75 bp, Homo sapiens
aggactttccaaagggtgtatgaaatagacatcacagatgcgcaattaccagctctggctgggtcgccacaactt

SEQ ID NO: 321030 - DNA, 100 bp, Homo sapiens
cagcactggttgtttctggtgggatcgttggctatgtaaaaacaggactggaatgtcacgtggaataccagcaaccccgacttcaccaagtgctttcaga

SEQ ID NO: 321031 - DNA, 100 bp, Homo sapiens
cggcttcaatatcttcacccagcatgatgcctgtgaggagccaccaacatttgaagctatggagctcattggtaaaccaaaaccctactatgagattggt

SEQ ID NO: 321032 - DNA, 90 bp, Homo sapiens
agttgaacaagacaacttatttgatgattttaaactgtctacggttcttaacctcatctgttaagttcccatgcctggagaagctaatgc

SEQ ID NO: 321033 - DNA, 88 bp, Homo sapiens
tggaaacgaactgaatactgtccgagaaattataggtgatgaactagtccaggaaggatatggagtaatagtactaaatcccaatgaa

SEQ ID NO: 321034 - DNA, 75 bp, Homo sapiens
ggaactgattccgcagccttccaatgaaggatcgccccaggacattcgacatgcactcactggagagttcactca

SEQ ID NO: 321035 - DNA, 100 bp, Homo sapiens
ctggaaaacctggtcgtcctggtgagcgtgggcctcctgggcctcagggtgctcgtggtttccctggaactcctggacttcctggcttcaaaggcattag

SEQ ID NO: 321036 - DNA, 74 bp, Homo sapiens
gccgagctgggctacgagcggaccccgtcccagtgccgggagcgcatcaagaaggacagaataacgggctccca

SEQ ID NO: 321037 - DNA, 83 bp, Homo sapiens
ctggccacttgcttgggatcctttatcctggtcatcttctatttccaaagacatggatttgattgacatactttggaggcaag

SEQ ID NO: 321038 - DNA, 90 bp, Homo sapiens
agtcaatggtcttctgtatgtttctggaggtcgatcttccagccatgattttttggctccaggatgtagtaactggagttagtcccctgc

SEQ ID NO: 321039 - DNA, 98 bp, Homo sapiens
tcagtttgacaatcagggttacttcaactcatgcaccatgaaaagctgctgttttgcaggagatcgtgaccagattacaggtccaccaggttgtggaa

SEQ ID NO: 321040 - DNA, 89 bp, Homo sapiens
tgattccagttcattcctagctcagaaagcaacgttttgagccacaactgtcacaactccagacaagcttaccattgttcagaagcaaa

SEQ ID NO: 321041 - DNA, 75 bp, Homo sapiens
aggccgtgaagaccttcaatagcgaggcatgcccaagagaatcgtaaatgcaaaaattgcttgccttgacttcag

SEQ ID NO: 321042 - DNA, 50 bp, Homo sapiens
tggaagctttggagcagtgtattttattataagcgccatggctatggcta

SEQ ID NO: 321043 - DNA, 80 bp, Homo sapiens
cttcagattggaaaataccacaggatggagactacgagttttcttactactttgaccgcgatgatgtggctttgaagaac

SEQ ID NO: 321044 - DNA, 100 bp, Homo sapiens
tcagcctcctcagtagctgagactacaggtgaagctcgtgtgtggagtgccacggtacaatcagacgacagatggacagtgtgacaaaagtgtcagaaag

SEQ ID NO: 321045 - DNA, 78 bp, Homo sapiens
acagataagggaccaaaatgactgactcaaaatatttcaccacgaccaagaaagtctccagaacacagaggagtccct

SEQ ID NO: 321046 - DNA, 100 bp, Homo sapiens
ctggaacagtatcctaccaggccgcacattgcaggtgaatatgcaggttttgatgagacgcagccaacagctgaatctggtggaaaaggaaaagtgatta

SEQ ID NO: 321047 - DNA, 75 bp, Homo sapiens
tttcaactacagatactttgaagtagaagaagctgatggttttgaacgaagaatgtgatcagaactggtacaagg

SEQ ID NO: 321048 - DNA, 90 bp, Homo sapiens
tgcggcccttccccgcgtcctacgcccgcggcgactgtaaggactttgaagccctgaaccctgccatcagcatcactgaaaacgtgctgc

SEQ ID NO: 321049 - DNA, 100 bp, Homo sapiens
agatgtggccgtcctgcggtaccagccaccccctgagtatggggtaacgaggatcaacactctgtggtaggccagaacacaggccccagtccaagtccta

SEQ ID NO: 321050 - DNA, 50 bp, Homo sapiens
cagggatgataattgggcctccaagagtttgtggtaaatatgccagctct

SEQ ID NO: 321051 - DNA, 75 bp, Homo sapiens
gacacatatggggagttggaattcaagaatgatgaaactgttctccggagtagagatgaagagagaatttctaaa

SEQ ID NO: 321052 - DNA, 86 bp, Homo sapiens
tgctgaagggcgacggcccagtgcagggcatcatcaatttcgagcagaagattgaagaggagctggctgcccttcagaaggaacgc

SEQ ID NO: 321053 - DNA, 100 bp, Homo sapiens
atggacacacctggttgctcagacagattctggggagcaggtcctggtggatgtggagaccaagagcaataaggagatcatggagcacatcagaaaaatc

SEQ ID NO: 321054 - DNA, 100 bp, Homo sapiens
ccgggcccgggggtggtgacagcaggtctgaggacttgatgacacgtaccttcgctgcattgagctgcacagccacacccttattcagctggagaggtgt

SEQ ID NO: 321055 - DNA, 98 bp, Homo sapiens
gccgggatgagggactgtggcggcgcggcccgcgcgcagccggccggttattcagcttctcaaggctggaaaagcgaaggaagtttcctacaatgcac

SEQ ID NO: 321056 - DNA, 100 bp, Homo sapiens
actgaggggatctctcacgtcacttcaccgagccaaactgcaggggcacgtggaaccactgaggaagcacctggaggcagtgcagaagatgaaagccaag

SEQ ID NO: 321057 - DNA, 82 bp, Homo sapiens
ggcagagcaaggggcttacgcagaaggacctggccacgatgtgttcagagcaacattgttttgttgacacaagcatttagaa

SEQ ID NO: 321058 - DNA, 127 bp, Homo sapiens
tacagtcaaaaccccagcgtttgcagaatctgtcacagagggagatgtcaggtgggagaaagaagggacaatggagaacattgcagcccaggctctggagcacattcactccaatgaggtgatcatg

SEQ ID NO: 321059 - DNA, 83 bp, Homo sapiens
cttgagtcagtgcgccgctctccagcccgcttgaacgggctagtcgttggatttatcctaaccattgcaaatttcagcttttt

SEQ ID NO: 321060 - DNA, 74 bp, Homo sapiens
cgcgattctcagggattgatcgcctcttcagatctgccgacaccccaggccatcgagccccaggccatcgtgca

SEQ ID NO: 321061 - DNA, 100 bp, Homo sapiens
ctgtcctggtcttcaagctcactgccgacttcagggaggatccggacccccgcaaggtcaacctgggagtgggagggcatacaaaaccattgaggatgag

SEQ ID NO: 321062 - DNA, 139 bp, Homo sapiens
ttttcaaaataagcatctcagcatgttcatcctactacccaaggatgtggaggatgagtccacaggcttggagaaggtactacacttcaacgaattttcccagaatgaaagcaaagaacctgacccttgtctgaaaagc

SEQ ID NO: 321063 - DNA, 96 bp, Homo sapiens
tgggcaccaaataccaggctaccatggtctacaagactctcttcgctctttgcatcttaactgcaggacgtagacaagtttggcaacgagatcacc

SEQ ID NO: 321064 - DNA, 108 bp, Homo sapiens
ccgtgcgttgcgttccaaggcatctgtgagcccgcggagtatacaccatgagcaaagctcaccctcccgagttgaaaaacagcagccgctcttctaaaacattcaaac

SEQ ID NO: 321065 - DNA, 51 bp, Homo sapiens
ttgacgggcactcggagcagttccgattctccggatatggccggagtgttt

SEQ ID NO: 321066 - DNA, 82 bp, Homo sapiens
cagcatgaagaggagagctggcctggggggcagcatgaggttttaaaatcaaagatgggaaaatcggagaaaattgcccttc

SEQ ID NO: 321067 - DNA, 100 bp, Homo sapiens
caccaacaacaccacaataatccacagccaaggatagaatttttgcggcatttgaagagctttttccagattatgtttaaaattgaaaccaagccatgtg

SEQ ID NO: 321068 - DNA, 99 bp, Homo sapiens
ggagctgggacacctcactcaccagcaggcaccgcctagaatccttcgatctcgcttcaggaagaaaagtacctcatcctcggccaccgaaaccacgtg

SEQ ID NO: 321069 - DNA, 100 bp, Homo sapiens
gacgcaaacggcgggaccagcagcgacggtagcagcagcatggccgcgatctatgggggtgtagagggggcctgacacatttagggaagggcacccttac

SEQ ID NO: 321070 - DNA, 51 bp, Homo sapiens
tgtcgctcggcggcgggagtcgaattctgcttggtcagaatcgtgatggca

SEQ ID NO: 321071 - DNA, 74 bp, Homo sapiens
ggacttgaagcagaaagcaagtgaatacgagtcagaagttgcactggaagggtactacaaggacaagctctttg

SEQ ID NO: 321072 - DNA, 100 bp, Homo sapiens
gatgaagaaagtgttagaaacagtagtggagaatcaagatttccatggagaatgattatctgggacctcgaagaattgagagtctacaaaaagaagatgc

SEQ ID NO: 321073 - DNA, 75 bp, Homo sapiens
tgtgactgctttggacgtgggagtcacctgaaagccaggaaatgggaaagcaggcaggatgggagagtcgccgat

SEQ ID NO: 321074 - DNA, 100 bp, Homo sapiens
cggggggcagcaacggcgacatccagcaagggagtgcatccgccccaacccttttccccctcgtctcctgtgagaattccccgtcggatacgagcagcgt

SEQ ID NO: 321075 - DNA, 98 bp, Homo sapiens
catgctgtgccaaatacacaactactctccagagagaccggatcttcaaacattttaccaggaagcgccaaagggctatgcgaaggcgagtccaccag

SEQ ID NO: 321076 - DNA, 83 bp, Homo sapiens
gtcacatgcatcaggaccagaggaactgcaagcacatgttgaccagataactgaaatggcagcagtaatgaggaaagccattg

SEQ ID NO: 321077 - DNA, 130 bp, Homo sapiens
gccgcggcgaccaccccggacggcccctgtccccgctggcgggcttccctgtcgccgttcgctgcgctgccggaaggaagaatcctgctcaaaaatgaggtgaattaatacttgggcgctcaggaaccct

SEQ ID NO: 321078 - DNA, 100 bp, Homo sapiens
ctcgaattagcaaaggaaacttttgccacagagctcctgatcctggcccatcattgcttcaccctgacgtgccacatggagggcatcatccgagtcctac

SEQ ID NO: 321079 - DNA, 75 bp, Homo sapiens
agcacctacgtcccgctgccgtcgccgccgccaccatgcccaagagaaaggaacttgctactaccagcaccatgc

SEQ ID NO: 321080 - DNA, 100 bp, Homo sapiens
acgctctcttcatgggccatgcccggtgaccacttttggaccaaaggcctgtgtgctgcagaacccccagaccatcatgaatacctcaatagcattctcc

SEQ ID NO: 321081 - DNA, 75 bp, Homo sapiens
cttttgacacggctttggaaacgacgtcatgtgttaggacgttctcctgctctattacgctccgtggtgcggctt

SEQ ID NO: 321082 - DNA, 90 bp, Homo sapiens
gagactgtggagtttgatgttgttgaaggagaaaaggttgttcctccaaaagagtggaagccacgagcatcctatgatgacattgatgat

SEQ ID NO: 321083 - DNA, 100 bp, Homo sapiens
cgccggaacaccctggaagccgagaaatgtccagatgtataatctcatccctgaacatttctgatggtgtgattatgacatgtgactttatctggcaaca

SEQ ID NO: 321084 - DNA, 75 bp, Homo sapiens
gcaggtgcttcggagtgcttatgccaagaggaacagcagtgtaaatgactcagcatgattatgatatgagggtgg

SEQ ID NO: 321085 - DNA, 113 bp, Homo sapiens
ctgacgctccgcattgcagactgcggagtcagacggcgctatgtacgccctcttcctcctggccagcctcctgggcgcggacaatgcagatcttcgtgaagactctgactggt

SEQ ID NO: 321086 - DNA, 98 bp, Homo sapiens
atcagctcatccgtcagctgaactagacccaggtttctggtcctcataccgtgtggttgagtgaaatcaaaacttccacgatagcaatgctgattgga

SEQ ID NO: 321087 - DNA, 98 bp, Homo sapiens
cgagtggtgccgagggagaggaaacgatcccgggccaaccggaaatcttgcgaagctggagaagtcactggagcatctccggaagcagatgcaggatg

SEQ ID NO: 321088 - DNA, 75 bp, Homo sapiens
actttctccacaagaagggttaagtctgggctgtgcagccagccagtgccctcagccagcatgacccgcctggca

SEQ ID NO: 321089 - DNA, 100 bp, Homo sapiens
tactgctggtaagctgactgttgtcattctggaggcaaagaacctgaagaagatggatgtgggtggcttatccgtgccttcagaatactattagaatctg

SEQ ID NO: 321090 - DNA, 74 bp, Homo sapiens
aactgggcgccggcgcttacagcatgaggactggctggacaatggcccagaacaagctattcaacaagatcctc

SEQ ID NO: 321091 - DNA, 97 bp, Homo sapiens
gcgcccagacgggccggcccagagctcccgggtcgtctttcgtgtggccgcgagctgatggtgagaccattctaaaaggcctccagtccattttcca

SEQ ID NO: 321092 - DNA, 90 bp, Homo sapiens
aagagaagtcacaaaacagcagatttcccaagagcagcggaaaatgatccagtcacagagaagccatttgaagcagaatccaaaccatga

SEQ ID NO: 321093 - DNA, 75 bp, Homo sapiens
cgactaccggcagctcgagaaggagctgcagggccaggattcgtgaagttttttggaaacctggctgtcatggat

SEQ ID NO: 321094 - DNA, 100 bp, Homo sapiens
ccggaaccgcgattcggcgtgtcagcggaatagaagatgaactcaactgaattcaccgaagatgtagaagaaggtaaaaaaaaaatgccctttttgaaaa

SEQ ID NO: 321095 - DNA, 82 bp, Homo sapiens
gaaactgccaagaaatccaaaaagccgagtagagaagttatcagagctccacgcaggagatcggtgaggagctgatcaacgg

SEQ ID NO: 321096 - DNA, 100 bp, Homo sapiens
caggggcggaggcggaggcagaggtggaggcgctttgaaagtgcaagagaagcctgagccagtgccgctggagagccgctcctgcgtcctcatccgccgc

SEQ ID NO: 321097 - DNA, 73 bp, Homo sapiens
cggttggcaccactgaagtgaccgaatgaggtgtgttccagagaacaagccttcagacatttgctatattgac

SEQ ID NO: 321098 - DNA, 82 bp, Homo sapiens
gctgcaaccttagcgacatcaggaagaacagggtcgaggatcgaggtagaagaagaaaggtgccactccggcatgaagacag

SEQ ID NO: 321099 - DNA, 75 bp, Homo sapiens
ctggtcttgctcggccgatgaagtgcagaggtttttttctggacagtcattttgtttactcattcagccctgttg

SEQ ID NO: 321100 - DNA, 74 bp, Homo sapiens
gcttccgcaccatcacctccacggaactgggaacagccaggtgccccaaagcaaatacgcggagctgctggcca

SEQ ID NO: 321101 - DNA, 87 bp, Homo sapiens
aaacatgagcattcagtttcttggtacagtgaatagctctccagacccccagctggccatgtggtgagttcagggcccaaatcaagt

SEQ ID NO: 321102 - DNA, 96 bp, Homo sapiens
ctgatgctgaagctgtgcaccgaggtccgtgtggccaacgagctcaacgccaggcgccgctcctttacagcctgagatcttctttgatgttgtcag

SEQ ID NO: 321103 - DNA, 75 bp, Homo sapiens
atcctctccggctgcttggtctacggcacaggcttccagctggtctttttaccctttgctgatgataaaaggaag

SEQ ID NO: 321104 - DNA, 98 bp, Homo sapiens
gctccccgcctagtccacggagctcaatggcggcagtcgcgctgagggactcggctcaggtattatcgggggacccacggggtcattgtggtttacga

SEQ ID NO: 321105 - DNA, 75 bp, Homo sapiens
cggatggcaacctgctccagcgatcagagcgttaagccatatcctgcaaatgagagttctaaacttgtctctgag

SEQ ID NO: 321106 - DNA, 51 bp, Homo sapiens
gttaaccttagccacaaagtcaaaggtactccaaagattcaggtttactca

SEQ ID NO: 321107 - DNA, 100 bp, Homo sapiens
ggctctggatggaagccatggatggccgggaacctgacccagatgatgtggtaccagttggccaaagaagagcctggtgttggtgcatgtgctttggact

SEQ ID NO: 321108 - DNA, 100 bp, Homo sapiens
tgctgtcgcagaaggtgcgggagagtgagcgagccttcacctacagcatcgtgggcgccggctcccagtttggcaattctgtggtgttcttggtcacaca

SEQ ID NO: 321109 - DNA, 75 bp, Homo sapiens
caaaccctttctatgtactgcgcctggatgtggccaggtaccaggatcatctatgaccggaaattcctgatggag

SEQ ID NO: 321110 - DNA, 80 bp, Homo sapiens
gttggcaagaaaaccccgaggagccctgttccaaagcctcctggaccgtccaagaagaattacatgaatgacagtcttcg

SEQ ID NO: 321111 - DNA, 130 bp, Homo sapiens
agtcccgcggagtctcgggccccggagacgggcgaggagcacggcagcagccagtgtaaacaggaacatcgataagtagtgtaaaaacttgcacaatgaaatccgaagccaaggatggagaggaggagag

SEQ ID NO: 321112 - DNA, 90 bp, Homo sapiens
gccgtatggagtatcacaaccctcaatgccccttctactgaattagtttctggaggatctgataatcaagtgattcactgggaaatagag

SEQ ID NO: 321113 - DNA, 100 bp, Homo sapiens
ccacaattgggttcattaataacttcggtcagatccctaaacaggtctaaaacaggctttggaaactgtgaatgactacaatcctctgatgaaagatttc

SEQ ID NO: 321114 - DNA, 98 bp, Homo sapiens
tgttgcgcttgatggatttactctggaaagaagctggtttggatcttcgtagtgagttgaaactcttggaggaagcaaccatttcagtctgcaggtca

SEQ ID NO: 321115 - DNA, 75 bp, Homo sapiens
aaagtgcctcgatctaaggatgaccctggaaaggcctccccatggccacccatggaccagtcggcattcacttcc

SEQ ID NO: 321116 - DNA, 75 bp, Homo sapiens
gccaagcagccaaccatgctcaacttcggtgcctctctccagcagactgcgcatcaagatggtgctcatgtggac

SEQ ID NO: 321117 - DNA, 74 bp, Homo sapiens
cggttccccggcccacagtgggggtgtgcaaacccgagagaactggtttggcgggggctgtgagcttgccatga

SEQ ID NO: 321118 - DNA, 112 bp, Homo sapiens
agtgttaaatatcagcaaagaaaacatgaccctcacagaaaatcgttgacagaaggctacgttggggccctgcacgagaatagacacggcagcgcagtgcagatccgcaggc

SEQ ID NO: 321119 - DNA, 50 bp, Homo sapiens
cgctgagcaggtcatctttgtccgagctcaaaagccaaaagtctctgaga

SEQ ID NO: 321120 - DNA, 100 bp, Homo sapiens
aagcatgtcgtctttatcgctcagatccataatgagatggcatcaacatcagataaaggtgcccaaggaagaaatgacaagaaagattctcaaggaagaa

SEQ ID NO: 321121 - DNA, 108 bp, Homo sapiens
cgggtgtccccgcggcgcaggaggcggtggagcgcagagcgggcgagcgcggcacctgaatggacagaagaggacctcagccaactgacaagaagtatggttaagttc

SEQ ID NO: 321122 - DNA, 100 bp, Homo sapiens
ctcggcctggccgtcgccgagcctgccgtctacttcaaggagcagtttctggacggagaagatgggggtgaagttgacaccccacaacaaggagacggtg

SEQ ID NO: 321123 - DNA, 100 bp, Homo sapiens
agcaaccaggaggcagtaaattcttcagctgctcggacagatgaagctccccaaggagctgcaggtttctaagcatgaattgaggaacagaagaagcaga

SEQ ID NO: 321124 - DNA, 100 bp, Homo sapiens
gccgcacccgccggccccatgaggagggacgtgaacggagtgaccaagagcaggtttgagttgtgaaactgcacaacatcacaatatcttcaaggccaca

SEQ ID NO: 321125 - DNA, 83 bp, Homo sapiens
cggctcttcccgcccgccttccgccgtctcttcgagttcttcgtgctgctcaagggctgaagaagatgcagagcagcctgaag

SEQ ID NO: 321126 - DNA, 75 bp, Homo sapiens
cgtggaacggctgcttttggaaggatgacagtgatgggattccgtggtcagaagaacgggtggtacgtaaagtcc

SEQ ID NO: 321127 - DNA, 100 bp, Homo sapiens
agaggctttcaaaagtgcgagatcaacttggacaggaattggaagaactcacagctagtctatttgaggttagcgtccccaaaatgaaacataagccaac

SEQ ID NO: 321128 - DNA, 100 bp, Homo sapiens
agcaaccaaggaacaagagatgcaagagtgtactatcaatgtccgagttaccaccatggatgcagagctggagtttgcaatccagccaaatacaactgga

SEQ ID NO: 321129 - DNA, 100 bp, Homo sapiens
ggtgctctgccatattgtgtcttccccggccggtccctcgcctcccggccgagctgacgatctgcgagtgaagagggacgagggaaaagaaacaaagcca

SEQ ID NO: 321130 - DNA, 83 bp, Homo sapiens
cgagcccagcgtcaacttcctcaagtcgcccaaaggttaccaggtgacaggggtgtttatgaagaactgggactcactggatg

SEQ ID NO: 321131 - DNA, 50 bp, Homo sapiens
cccgcgtttcagccctagggaagggtcatgatcagagttcgactcttgcc

SEQ ID NO: 321132 - DNA, 82 bp, Homo sapiens
tctcaacaagcgagtagaagccatgaaacagcttctttgtgatattggccacagtgaagaaaaactgggctttcactatgag

SEQ ID NO: 321133 - DNA, 74 bp, Homo sapiens
caaagtgattccccggaatcgtgtgctgggctggtcccccttggtgtttatctcagtggatgatctggaacccc

SEQ ID NO: 321134 - DNA, 74 bp, Homo sapiens
tccaggctgaccacgagcttttcctccaggcctttgagagttggatggcaagcatgtggtgtttggcaaagtga

SEQ ID NO: 321135 - DNA, 76 bp, Homo sapiens
tggcagaagtgaagtcaatgttccgggaagttcttccaaagcaagcattgacttgggcaaggcaaatgagcccaac

SEQ ID NO: 321136 - DNA, 75 bp, Homo sapiens
aataagaatggctgtagaggaacttcagtctataataaagagatgtgcgaacagctgcttggagaactacaagtg

SEQ ID NO: 321137 - DNA, 50 bp, Homo sapiens
tggaagaattcagtaaagtcacaggtgacgcatccaaagaagacattgac

SEQ ID NO: 321138 - DNA, 75 bp, Homo sapiens
tgtgtaagacgggatattctcttctgtgctgtcaaggatttatcagcaagactgttgaacgcataactgcccaag

SEQ ID NO: 321139 - DNA, 82 bp, Homo sapiens
caggaatatcgagagcgtcatgaacccgagctatagagaaaggagatgaggaagcggggagaggtggtgagagatgacccct

SEQ ID NO: 321140 - DNA, 75 bp, Homo sapiens
gccgcgtcccctccagtccgctccgggcaggtgctggagaatctggtaaaagcaccattgtgaagcagatgagga

SEQ ID NO: 321141 - DNA, 75 bp, Homo sapiens
agtgaccgagaccgcggccgggaccgaggtgaataaccctataccttccaatttgaaatcagaagcaaaaaaggc

SEQ ID NO: 321142 - DNA, 74 bp, Homo sapiens
aagtgcgcggttggggccactgcgaggccgttttaggagattcctgtcaacgtccgattctgcctcgaaggcat

SEQ ID NO: 321143 - DNA, 74 bp, Homo sapiens
gaatcatccacgcacctgcagctctgctgagagagtgcaagccgtggggagtgagctgagtcgacagaaacttc

SEQ ID NO: 321144 - DNA, 50 bp, Homo sapiens
gtacctgtgtgccgagtgtgggaaaggctgaccccgcactacatctaccc

SEQ ID NO: 321145 - DNA, 100 bp, Homo sapiens
tgcactcttctccttcacagtaaagtggctgctcccctcccacccggtcactccgtccagcaagcacgcagacagcaagcccgcgccgctgacgcccgcc

SEQ ID NO: 321146 - DNA, 75 bp, Homo sapiens
aaggacaactggcttttagcaagagttgctgtttacactggaatggaaaccaaaatggctttgaactaccaaggg

SEQ ID NO: 321147 - DNA, 99 bp, Homo sapiens
gggggtccgctgcccgagaatgggaattctcttcactagaatatggagactgttcaatcaccagggtacctcaataataatgagttgacagcggtacca

SEQ ID NO: 321148 - DNA, 128 bp, Homo sapiens
tttgaagcaacagaatctcccatccagtccggcacccagtaccatattctctggaggttttagacactacaaaattggacagctgtacatgatcagcaaacacagccatgaacagagtgaccggggag

SEQ ID NO: 321149 - DNA, 105 bp, Homo sapiens
ttaaggattccaagtaactcttatttggacctagatgtgaaggctggtggaggctgtgtaatgaccattggagaaatgctacgatcttttctcacaaaactggag

SEQ ID NO: 321150 - DNA, 87 bp, Homo sapiens
caaggatgaagaagtcaaggttgcccccaggcggtccttcctggacttgtgcaccatggacaattttgctgagggagatttcactgt

SEQ ID NO: 321151 - DNA, 100 bp, Homo sapiens
agaggccgggcgtcttctgagagtcagatcatggaagggaagtggttgctgtgtatgttactggtgcttggaactgctattgttgaggctcatgatggac

SEQ ID NO: 321152 - DNA, 100 bp, Homo sapiens
caggtgtatgatcttttggaggaggaggatgaatttgatagagagaataatccagaatggctactctgatctatgttgataaggaaaatggagaaccagg

SEQ ID NO: 321153 - DNA, 100 bp, Homo sapiens
accagcaagaaccatcgccaaacctttccagagagaaaaccagaggttacaggaaatacaggaggcagaggaacaaataaaagacaccacgagaaacaga

SEQ ID NO: 321154 - DNA, 98 bp, Homo sapiens
ttccatgcaagatctgtggagacaaatcatcaggaatccattatggtgtcattacatgtgaaggctgcaagatgggtgatagatctgccactctgaaa

SEQ ID NO: 321155 - DNA, 90 bp, Homo sapiens
ttttggggggaaactaggtcgatggtcggcggcgcccggatgggcagctgagggacacagcaggtcaggagagattcaacagcattacct

SEQ ID NO: 321156 - DNA, 75 bp, Homo sapiens
tgcccctcttcaacacctggacaccttgttagatggaacctacaagcagcatacatctgtggatggatatactga

SEQ ID NO: 321157 - DNA, 98 bp, Homo sapiens
tggaaacttgctaaagagctgtggtgaatcttgctacaacttcaatttccaaaatggctacggattttgcagagaatgaactggatttgtttagaaag

SEQ ID NO: 321158 - DNA, 100 bp, Homo sapiens
gagaaggtgtacatcgtgcatggcgtccaggttggacgtgataagtatgagcctgcagctgtttcagaacaaggtgataaaaagggcaaaaagggcaaaa

SEQ ID NO: 321159 - DNA, 75 bp, Homo sapiens
ggaaaacaaaagctgctacttatggaagatacaaaggagaaagcaaccagcgagatgaatactgctgaggactgg

SEQ ID NO: 321160 - DNA, 101 bp, Homo sapiens
gccgacggagccggagtcgcggacgccgcggggtctccgggacagaaatgcttcggttacccacagtctttcgccagatgagaccggtgtccagggtactg

SEQ ID NO: 321161 - DNA, 83 bp, Homo sapiens
gcagtggaatgcagttatatttggacctgcctagagctggaacgttacctccagagcgagccctgctatgtttcagcctcaga

SEQ ID NO: 321162 - DNA, 100 bp, Homo sapiens
ccgcaggtcgcagggcggcctgcagctgggccgcggccgaggaggcagcgcgacctccgcacggtcgttgaggacttccacatggagattggcacaggac

SEQ ID NO: 321163 - DNA, 100 bp, Homo sapiens
gaccctgacctcagagcagatccagaagctcttagccagcactcgctatccacctccagagacagagtttcaccatgttgcccagactggtctcaaacac

SEQ ID NO: 321164 - DNA, 87 bp, Homo sapiens
aaatcttcagcctccaaaaaaccactgaaggaaaaagtggtgctgatgtatgatgagatcttcatgattgaaatcatggcaggtcca

SEQ ID NO: 321165 - DNA, 74 bp, Homo sapiens
gtcacttctaaaggagtcattcacctaaccaaggctttttgaaatgggtttcgcagagcagctgcaggagatca

SEQ ID NO: 321166 - DNA, 85 bp, Homo sapiens
gatgttgatatcaatcgccttcgtgctgttgtctttcgggatgtgtttgcaatggattttggataaacaagatctgttgaaggag

SEQ ID NO: 321167 - DNA, 50 bp, Homo sapiens
gaccagctcactaagaacatggcacaatccctcgggggccaatgtgtgcc

SEQ ID NO: 321168 - DNA, 100 bp, Homo sapiens
cgctatggatgatcgagaggatctggtgtaccaggcgaagctggccgagcaggctgagcgatacgacgctatgtcttctcattacactgaagaccttttg

SEQ ID NO: 321169 - DNA, 96 bp, Homo sapiens
caaatgccaacaggagtacatgaccaaggtcctggaatgtctgcagcagggtttggagtggaagtcgagcgcttcactggttttactaaatcagac

SEQ ID NO: 321170 - DNA, 87 bp, Homo sapiens
gcgacttccggctcttcgtgcccaaccacagccaggacggcaaccttcccaccctcatatccagcgtccaccgcagccgccacctcg

SEQ ID NO: 321171 - DNA, 100 bp, Homo sapiens
tccatcaaccgggccgtgccccagatgcccaccgggatggagaaggaggaggaatcggggacggcaaaacagaacagaaaggcggagataaaaagagggg

SEQ ID NO: 321172 - DNA, 82 bp, Homo sapiens
acttaattgaacttagccaactggtcactgacttctctctcctagtgaatagctccaaacgagaatggaagccgctggagga

SEQ ID NO: 321173 - DNA, 75 bp, Homo sapiens
gcggcggcgaatctgaatgcggtgcgggagaccatggacgaacaccttccaccatgaccacctcagcaagttccc

SEQ ID NO: 321174 - DNA, 50 bp, Homo sapiens
attttctgacccaacaccagatggactgagagtggctttcacaatggaag

SEQ ID NO: 321175 - DNA, 82 bp, Homo sapiens
cttgcatggtgtttcaaagggtggtgaagaactaagaatactagttgatcagcaagtttggaaaatagaagatgtcttcaca

SEQ ID NO: 321176 - DNA, 83 bp, Homo sapiens
gcgacgccccggggcgggggcgatggcggcggcggcggccggagcttctctcagccgaggctgacccgcggctgattgagtcc

SEQ ID NO: 321177 - DNA, 78 bp, Homo sapiens
ctgctggggatcctctacgggaagaagtacgaggcggacatgtgcgtgagtcaccttcaggccattcagaggaggaaa

SEQ ID NO: 321178 - DNA, 85 bp, Homo sapiens
ccagaacttttggaactagtgccggcggctctccaccccccaggcctcggcaagacgcgcaggaagaccagcgcgcgggatgcgt

SEQ ID NO: 321179 - DNA, 90 bp, Homo sapiens
ctcagtttcaaatctccccaagctgcctaaattgaaaaagatggcagttgaattcctgcatgaactgaatgttccatttttcaaagttgg

SEQ ID NO: 321180 - DNA, 98 bp, Homo sapiens
gtgccctgcctggagggagccctcctggctgggggcaaggaaagaaccggaggctgaagcaggccaaagaagaagctcaggctgaaattgaacagtac

SEQ ID NO: 321181 - DNA, 75 bp, Homo sapiens
gctacgggaagcaggcctcgccacaggtcgcagcagttgtggtagaaatttctgggttagtggactctcttctac

SEQ ID NO: 321182 - DNA, 99 bp, Homo sapiens
agtagagtatttcaaccataaagacatcttaattgggcacgaaagagcaattctgtggtgttcttggtcacacatttatggagtttctgaagggcagtg

SEQ ID NO: 321183 - DNA, 76 bp, Homo sapiens
ccagcaccagcttccagttagtggatatagcacaccatccccagccagctgctcccggcagatcggcttctccttt

SEQ ID NO: 321184 - DNA, 100 bp, Homo sapiens
ccgtcaacagcaaggacctgcagcacatctgggtctggaagaggtcgggggcctggttctacaaagggctccccaagtatatcttgcccctgaagacccc

SEQ ID NO: 321185 - DNA, 98 bp, Homo sapiens
tggcttctggcacggcagcagtgggcatacagaggcagtcgggacccgtctggaagagcctccgcccgggtgtggaaggggagtatgtcccagtggaa

SEQ ID NO: 321186 - DNA, 100 bp, Homo sapiens
cgcctgcgaccccagtcggtgctccggggaggtcacctgacgaggagggagctgagcacataacgacttacacgttcaatactcacaaagcccagcatac

SEQ ID NO: 321187 - DNA, 83 bp, Homo sapiens
ccaacctgggagcagctggctctgggccttgaacattccgaaactgtcaagattggcaagggttatgtggtccgaatcagtgg

SEQ ID NO: 321188 - DNA, 75 bp, Homo sapiens
ctacagactgcagccactgcggcccagaattcctagaggacctgtgcaacaacctcttgaggatcgaatcttcac

SEQ ID NO: 321189 - DNA, 100 bp, Homo sapiens
atgaagatagcctgggtcggatgcatcctcgagttggagaaacactgaaaaatttagctgtgcttagatgcatcttcaaaaattggaatcagcacacaat

SEQ ID NO: 321190 - DNA, 100 bp, Homo sapiens
cgagaacgtgcgggaagagaagatcatcgagcatttcaaacgttccaaagaactactggttcagattttagctcttcccaagttgtgaaaatagtgaagg

SEQ ID NO: 321191 - DNA, 114 bp, Homo sapiens
gcagcgccagcggccgagcgggcggcttcctggcctgggcgctccggtggcggcggagaacatccagtcatggataaaaatgagctggttcagaaggccaaactggccgagcag

SEQ ID NO: 321192 - DNA, 98 bp, Homo sapiens
gccacccggaggctctagcctgacaaatgcttgctgacctgggccagagctcttcccttacgcaaggttttggccaaattgggcgagggcacaaaata

SEQ ID NO: 321193 - DNA, 100 bp, Homo sapiens
caccaatgtaagtctgccttatgttcctccagccaattgcaaaggcttagaccatgctcagcctccaagcagccttgtcatcgacaaagaatctgaagtt

SEQ ID NO: 321194 - DNA, 100 bp, Homo sapiens
atatgtttcttctggatatccttcacttcaaaatagcttcataaagtcagatgacgaagatgatcctgcagaagctgaaaaggagggaaatgaaatggag

SEQ ID NO: 321195 - DNA, 50 bp, Homo sapiens
gtcgcccatcgcagcagctcggagccccctggtgaaggccatcttccatg

SEQ ID NO: 321196 - DNA, 74 bp, Homo sapiens
caggagcttgacgccttagataacagccatcctattgaagtgtaattacttcaagcctccaggatggcaatcca

SEQ ID NO: 321197 - DNA, 99 bp, Homo sapiens
ccgagactctagaagaaatgccctccgggtcacaggataaggtgaccaagaatatggcccaggtgaccaaagccctggacaaggccctgagcaccatgg

SEQ ID NO: 321198 - DNA, 75 bp, Homo sapiens
gtctggaatactcctaaccaagaagttgcccagggaacagagttcagaggcagcagaaactggagttagtgaaaa

SEQ ID NO: 321199 - DNA, 78 bp, Homo sapiens
tcaaaggacctgcccccagagagaaggaagaacttgtcgcttttcctaagcattagtttgttaattttctggggttcc

SEQ ID NO: 321200 - DNA, 83 bp, Homo sapiens
atgtctgtggggccgccggcggcccggcttcagttggaatcgaagcctcttaaaatggcagatgacttggacttcgagacagg

SEQ ID NO: 321201 - DNA, 96 bp, Homo sapiens
cagaagcaaaagccttgatagcatggatttctgtgagctcactgtcatttggatccaggattcctagcaagtgacaaaacatctggcaatgcgcca

SEQ ID NO: 321202 - DNA, 75 bp, Homo sapiens
ggatatcgggtggcggctcgggacggaggacgcgctagtgtgctgcagggtgcacagctgatcgccgtggcctcc

SEQ ID NO: 321203 - DNA, 88 bp, Homo sapiens
ctctctatgatatgctaagaaagaatcttgtcactttagccactgctactacagctacccagaatggaatcctgacaatgatacagga

SEQ ID NO: 321204 - DNA, 75 bp, Homo sapiens
tgccctgagcacccttcagattaagcgtcagcttcctgttttataggttgatcttacagaagcatgggaaaccac

SEQ ID NO: 321205 - DNA, 100 bp, Homo sapiens
cggttatgaaatattttgtgttacttgtaacagttcaaagactctgcttgcctcagcttgtaaggaaaatttccagaccaaccaattcacatcgtgtatg

SEQ ID NO: 321206 - DNA, 75 bp, Homo sapiens
tctttgaagggctgggtaatgttgcatctgtggagctaaaatctttggatggattatatgaaagaagaattgaac

SEQ ID NO: 321207 - DNA, 100 bp, Homo sapiens
aaccctaaacagtggactcaacttcaaagacgttctcaaggagaaggcagacctgggtgaccaagaatatggcccaggtgaccaaagccctggacaaggc

SEQ ID NO: 321208 - DNA, 82 bp, Homo sapiens
aagaagactggtctctcccaccacacagaggttttaaaatcaaagatgggaaaatcggagaaaattgcccttccccatggcc

SEQ ID NO: 321209 - DNA, 102 bp, Homo sapiens
agtgttaaaggaacctctacaacgaaggtgaagccacggaagataagagttcaaagaggccttttcattgtttgaccggaccccgactggagagatgaagat

SEQ ID NO: 321210 - DNA, 117 bp, Homo sapiens
gccccgcgagcacagagcctcgcctttgccgatccgccgcccgtccacacccgccgccagggatccaggtccggcacgatcaagacccaggctacatgcatcacaagtttgccatcg

SEQ ID NO: 321211 - DNA, 96 bp, Homo sapiens
agcaatgcagcatgctgaagtctattacaagtacgagctcaactggaggcagtcctgtgcggaaatctgaagaaaaaacagatacaaagcgaactg

SEQ ID NO: 321212 - DNA, 100 bp, Homo sapiens
acaaatggctgagctatacactaggggttcatgttaaccaggccaaacaatgccagaagtgggtggagaactgtaggagagcagacttagaagataaaac

SEQ ID NO: 321213 - DNA, 82 bp, Homo sapiens
cacgccgggctttgttgtggaaatcccggttacctggagtacgagagggcctccaaagtggaccagtttgtgacgcgcttcc

SEQ ID NO: 321214 - DNA, 75 bp, Homo sapiens
atggagaaaaatggatcttagggcaattaagttggaatatgcaaggttggttaagttggcccaagaagacacccc

SEQ ID NO: 321215 - DNA, 100 bp, Homo sapiens
ggaaagtcaggaccgcgacggcagcagagcatgctgggagaaggactggccaagggagaagatgcctttcgggcagtgctttgctgcatgcagctgaaag

SEQ ID NO: 321216 - DNA, 100 bp, Homo sapiens
agatttcatagaagagaaggcatctcagaaccctgagagaatagtcaagctacacagacttcaggcccgcatagctcataggatacaagaactggaaaat

SEQ ID NO: 321217 - DNA, 96 bp, Homo sapiens
ccgcctccgtcgccgccgtcagagccgccctatcaggaccctatctgcagatgttctgaatacctctgagaatagagattgattattcaaccagga

SEQ ID NO: 321218 - DNA, 82 bp, Homo sapiens
agtgttccaccagttgcacgatcctcaccgcaacattccttatccaatcccttaccgccagatgaaaactcgctggattttt

SEQ ID NO: 321219 - DNA, 89 bp, Homo sapiens
ccattactgatgatgtggaggttaacagctatctttctgtgaagttaaaatgaactatttgggcaaaccatatgtagccatggttacaa

SEQ ID NO: 321220 - DNA, 90 bp, Homo sapiens
gtcctgggagccgcctccgtcgccgccgtcagagccgccctatcagtccaatatcagatggaaatgatgcggagccttcgccatgtaaac

SEQ ID NO: 321221 - DNA, 100 bp, Homo sapiens
cctcctctcctgccaggtgtgtggctgcacaggagtcttgctgatgcatttgatgaatacagaaatatcagccaaaaggacattgtggacagcataaaag

SEQ ID NO: 321222 - DNA, 101 bp, Homo sapiens
ctgaaaatgaagggtgattacttccggtaccttgctgaagttgcgtgtggtgatgatcgaaaacacccctttgctgatgcaagtaagggtgatgacctgct

SEQ ID NO: 321223 - DNA, 100 bp, Homo sapiens
cccaaatcgatgtgcatgcacttacggatttactggaccccagtgtgaaagaggtatcgacttcaatattataaagattctgaacaacccaagagcatat

SEQ ID NO: 321224 - DNA, 100 bp, Homo sapiens
ctgcaggtactgacagatccgtagggaggacaccgtgacttcccggacgctgggaaatgggtgtccgcaatgttgccagtgtctgtctgcagattggcta

SEQ ID NO: 321225 - DNA, 90 bp, Homo sapiens
gaagaaaacaactcaggtcaaagactacagctttgtcactgaagtgaaactggaacgccaagctgaagaagaacgaatacggaagcacaa

SEQ ID NO: 321226 - DNA, 75 bp, Homo sapiens
gttatgggatacaaaatcatcatgaagtttctactgagggtgaagaagaagaacctctaaaatgcagacctccag

SEQ ID NO: 321227 - DNA, 51 bp, Homo sapiens
ccttggatcccaaatacattgatattgattgccccagtggaaaatgacaat

SEQ ID NO: 321228 - DNA, 96 bp, Homo sapiens
ctggaaaggactggaattgatttgggaacaactggtcgtcttcagttaatggcaagacttgcagaggaatccagactccaaaatgatgcaaatcaa

SEQ ID NO: 321229 - DNA, 50 bp, Homo sapiens
ggcgcgctgggctggcgcggcctggactgtttattccatggctccgttcc

SEQ ID NO: 321230 - DNA, 100 bp, Homo sapiens
cggctcgggacggaggacgcgctagttccggttccagttgttggcaaaggagaggaagaggaagaggaagatggcatgcggctttgtctgccagccaacc

SEQ ID NO: 321231 - DNA, 95 bp, Homo sapiens
gccggggccgcctagagaagaggctgtgcttcggcgctccggctcctcagagagcctcggctaggttatttggaaatagcggtgcttgcagcgct

SEQ ID NO: 321232 - DNA, 95 bp, Homo sapiens
agaggaagaagatctaatcatatgtgggtggagccgctgactgccgagggcagagcctcgcttcggtgcccagcagcctcccgccccacgcccgg

SEQ ID NO: 321233 - DNA, 100 bp, Homo sapiens
gaagtggtgaaggagtgtgtgcagcgaaaccagcctggacaccaagtctgtgtcagaaggccacctcaagaggaacatcgtggtgaagaccgtggagatg

SEQ ID NO: 321234 - DNA, 74 bp, Homo sapiens
tttggatatcctgaaagatcaatgcatattgagtatcagtgctgatattgaaacaattggagaaattctgaaga

SEQ ID NO: 321235 - DNA, 51 bp, Homo sapiens
ctgcctcactgagcaaccaagagtgttgctgccatcactacctttcccttc

SEQ ID NO: 321236 - DNA, 100 bp, Homo sapiens
acaggcaggacagaagacttcagctgccctgtccacagtgggctctgccatcagcaggaagcttggagacatgagtgttctaagaacggaagcatctggg

SEQ ID NO: 321237 - DNA, 75 bp, Homo sapiens
cttaaactccctaaaatctccgcagctctggttcctgttgcggccgctgggcagatgctcaaactcaaatccaaa

SEQ ID NO: 321238 - DNA, 83 bp, Homo sapiens
tgtccactacatttcactggccgcttctgtgaaaaaggttactgaagctaaaggagatgtttaactccaagtttggatctatt

SEQ ID NO: 321239 - DNA, 75 bp, Homo sapiens
ggaagaccacttcagcagtttcggacctatctctgaggctactcccgagcccggagaggacccacgcgtgacccg

SEQ ID NO: 321240 - DNA, 82 bp, Homo sapiens
gtcccgctggatctgacccgagataacgaaggaggcccaacttcattcaataaggagcctgacggatttatcccagacggta

SEQ ID NO: 321241 - DNA, 90 bp, Homo sapiens
cgcctttggcggtaaattcggatgtattgctgtccttgaatattagcccatttgaaaacgcctgggaagttcagccatcagtatgtccaa

SEQ ID NO: 321242 - DNA, 102 bp, Homo sapiens
ggcagagtggaaaaaagagaggatttgcttttgtaacttttgatgatcatgatacagttgataaaattgttgaatctttagaacacgatgttcttgatgata

SEQ ID NO: 321243 - DNA, 100 bp, Homo sapiens
acttccgcgagtcggagcggcactcggcgagtccgggactgcgctggaacaatggataacttcttcaccgaggaaccgttttgattaaaagtaacagtgg

SEQ ID NO: 321244 - DNA, 75 bp, Homo sapiens
tgcaggcaggcgctgagaaggacgcgcagtccatctctctcagcctacttctgcttcctcctggccgctctgggt

SEQ ID NO: 321245 - DNA, 90 bp, Homo sapiens
agtgcagctgcctcagttcttagcgcaggatgattatgtacttgaagtgaggcactttcagtgtcctaaatggccaaatccagatagccc

SEQ ID NO: 321246 - DNA, 88 bp, Homo sapiens
ggagaggcctggaggacaccaacatgctggagaatgctggaggagaccttaaggatggccaccaccactatgaaggagctgttgtcat

SEQ ID NO: 321247 - DNA, 82 bp, Homo sapiens
tcaactattcaacatggaggcggaggtcgataagctggaactgatgggaaagcaggcaggatgggagagtcgccgatagaac

SEQ ID NO: 321248 - DNA, 75 bp, Homo sapiens
gagacgggtgaggtacaggctcagtctgcggccaagactccgtcctgcaagtccatccctcatgaaaaatgactg

SEQ ID NO: 321249 - DNA, 75 bp, Homo sapiens
gtcttaacttccaaacatcatgaaggccaaagaagccctcgaaaatactgaagttcctgttggctgtcttatggt

SEQ ID NO: 321250 - DNA, 82 bp, Homo sapiens
agcttggtttcgggatctcggtgctgcagacggcgagacctcctgcacagacttaattcagtgcacaaatgagatgaatgtg

SEQ ID NO: 321251 - DNA, 82 bp, Homo sapiens
ctcgggcagaggcgacctccccgcgttccatgcgcacagggacagggggcgtgatggtgggcatgggtcagaaggattccta

SEQ ID NO: 321252 - DNA, 83 bp, Homo sapiens
aacgaatgggacaagatcccgtccatgaatcaggaatttgagagcgtattttgcggtaaaactggccgaaggctaaagctgac

SEQ ID NO: 321253 - DNA, 83 bp, Homo sapiens
accctgcctcccctgcgtcccgccaccggccgcttctgtcctcggttttaaaatcaaagatgggaaaatcggagaaaattgcc

SEQ ID NO: 321254 - DNA, 100 bp, Homo sapiens
ccggcacctgcacacctggatccaggataacggaggctggaagaataactgtgtgatgcctgaagatgtgaagaacttttacctgatgaccaatggcttc

SEQ ID NO: 321255 - DNA, 88 bp, Homo sapiens
gccggcaccacgagagcccggcccgcctgtgtggacggacacattggcgtgagacctgggagtacgttgtgccaaatcattgccactt

SEQ ID NO: 321256 - DNA, 83 bp, Homo sapiens
ccatcacccaccaacaacaccacaataatccacagccaaggatttttagactctgaggagcagttggagctaatccacattat

SEQ ID NO: 321257 - DNA, 101 bp, Homo sapiens
ctgcgtggacgccccaactcagggcactgtcctcggagatgccaggatcccgagatggacatgaagtcagtgactgaccgggcagcccgcaccctgctgtg

SEQ ID NO: 321258 - DNA, 75 bp, Homo sapiens
atcaaccagattacggccaaattcaagggagtgatgatgaatacagtgatgatgatgacatgagttggaaagtga

SEQ ID NO: 321259 - DNA, 100 bp, Homo sapiens
atcagtgttcaaaagggacctgaatgtgataacttctgtacccagcgaattgtgtttacattcaagagaacaatcggatgatgagactgaggagtcggtg

SEQ ID NO: 321260 - DNA, 100 bp, Homo sapiens
ctgggccggcgccctggggccccggagagggctcacacagtcgacaaaagaaaacgtttttcttgggagatgggcagaagctgaaggactggcatgacaa

SEQ ID NO: 321261 - DNA, 75 bp, Homo sapiens
ctccttcgacttggagtctttgtccaggacggacacttaccgaagaaggcagatgcagaggaccatcactcgcca

SEQ ID NO: 321262 - DNA, 90 bp, Homo sapiens
caacagcagcaaccctatcatcgtctcctgtggctgggacaagctggtcaaggtccagccagatggtgtcaccctggagtacaaccccta

SEQ ID NO: 321263 - DNA, 100 bp, Homo sapiens
agctttcttcttggacacctaatacccacagtcctccagtctaccctgatgggagagtctgcatttccatcctccacgcgccaggcgatgaccccatggg

SEQ ID NO: 321264 - DNA, 100 bp, Homo sapiens
gaaagaagttgcaaaacactggatttatttaattgcccaactaccactgatgaagatatattggagtgactgctgaaattgcctttttgtttttaaccag

SEQ ID NO: 321265 - DNA, 87 bp, Homo sapiens
gccgacccctggcacctggcgcccagcgcgcccgtggccgctgccgcctccgccccagactgagaactatgagcagagaatacgtga

SEQ ID NO: 321266 - DNA, 83 bp, Homo sapiens
gacagtatgaggcaagcgcagggggacggggaccagcagctgtcgccgccgctctcaggtcccccacggcccttcaggatgaa

SEQ ID NO: 321267 - DNA, 100 bp, Homo sapiens
tggctctgctgctgccgccggcgaaggaggaggcgttgccgggactctgtctactagtgacgatgtcgaagacagggaaaatgaaaagggtcgccttgaa

SEQ ID NO: 321268 - DNA, 76 bp, Homo sapiens
tccgccgattcctcctccttggtcgccgcgtccttggctggcgtgtcctgaacgaggctgtgggggccctgatgta

SEQ ID NO: 321269 - DNA, 100 bp, Homo sapiens
gagccacacacaccatcatggtcctggcaaatacgccatgcgagacctagtccacaggcttccaggagggaacaacagcaacaacactgcaagcaaggcc

SEQ ID NO: 321270 - DNA, 80 bp, Homo sapiens
aagcctggctatgagcctgagaacagcgtggcatgcaaggatgtcaatagtgatggattcctggatgaacaagaattaga

SEQ ID NO: 321271 - DNA, 100 bp, Homo sapiens
ggtggagttccggaaccatttgaaggaacagcatcctgacatcgaaaacccggacctcgcttacctgcatgctggtagtgaaaagagaatactgaagaat

SEQ ID NO: 321272 - DNA, 75 bp, Homo sapiens
ctttgcattggttggacaccttttaaaagggcaattgaaggaacagactaaaaatcgtgtcctggaaggaaacta

SEQ ID NO: 321273 - DNA, 75 bp, Homo sapiens
ctggaggccgccgcgagcccgctttccaccccgacctctgcccaggccgcagatgacgaagatgatcctgcagaa

SEQ ID NO: 321274 - DNA, 100 bp, Homo sapiens
cagcctctgcttggcatccccttgctggacagtggctgtgatcggtttgggcttggccagccaggaagaatacctggttctgtgaatgccatgagagttc

SEQ ID NO: 321275 - DNA, 98 bp, Homo sapiens
tcttccatgagccggaggccattgagctgtgcacgaccacaccgctgatgaagacaaggactcacagtggctgcaagctgggcgccgtgtacacagaa

SEQ ID NO: 321276 - DNA, 76 bp, Homo sapiens
tgggagagcgaggcctgagcctctgcgtctaggtggtgactatcctgttgagaagcaaaagatactttgcaagtaa

SEQ ID NO: 321277 - DNA, 74 bp, Homo sapiens
gtgccctagcaccccgagaaccgtcagtttgagccagatgtatcctagaaggaaaacatcaccatggctacaga

SEQ ID NO: 321278 - DNA, 75 bp, Homo sapiens
ggactggagcacggagacctaccaggtgaggagatttctagtgaagatgatgagctggtagaagagaagaagcag

SEQ ID NO: 321279 - DNA, 75 bp, Homo sapiens
agggagcagaggggacagaggcaccaaggacctccaagacaggtgaatggctatgtggtgaaccttttctgggca

SEQ ID NO: 321280 - DNA, 74 bp, Homo sapiens
agatcattgctttttttgcccacctagcttgtaacgaagggtctgggggtggtggcatctcccctaaaggaagt

SEQ ID NO: 321281 - DNA, 100 bp, Homo sapiens
cctgtcagccctaattggggaagcgaccctgtcacactcactgaaaatggcggaccagaacctggagaaactgaagacggagtcagagcgtctggagcag

SEQ ID NO: 321282 - DNA, 100 bp, Homo sapiens
ggtgggacccatgagaggctgtagggttaaagatttattagacattgcaaatggccacctcaaagaacaagctgctgattctattttggtactagaagca

SEQ ID NO: 321283 - DNA, 100 bp, Homo sapiens
ctggatttcctggcgccaatggagagaagggcggcaggcaccacaccccactctggccggagcacgccaagcagctccccatcgctccggaaacggctgc

SEQ ID NO: 321284 - DNA, 98 bp, Homo sapiens
cccaggaagccgtaagcaggatcaaggccaaggtggaaatgcttgacaacctgctggacatcgaggtggcctacagtctgctcaggggagggtctgat

SEQ ID NO: 321285 - DNA, 88 bp, Homo sapiens
cagccgtcatcggtttccagacagctggaaatggagcagtcaatgaatatgctgaattccaaccatgagttgcctgatgtttctgagt

SEQ ID NO: 321286 - DNA, 90 bp, Homo sapiens
cttcctgatttctgcagctctgtgtgaagatcatgacaagatgtttaagatgagtgaaaagatattactcctgtgtgttggagaggctgg

SEQ ID NO: 321287 - DNA, 88 bp, Homo sapiens
tttgttcaggaaccaccagtgacagatttcttgcagaacataaattattaggaaacattaaaaatgtggccaagacagctaacaagga

SEQ ID NO: 321288 - DNA, 80 bp, Homo sapiens
aggatatcgtgtctggagcagtggagcccaaagacccctggagacatgttcagaatgaccgaagaagcatgccgaacacg

SEQ ID NO: 321289 - DNA, 90 bp, Homo sapiens
gcgggagcctgaccagagacaacctgtccggaattaccgaattgatgggatatgagccagaagaacttttaggccgctcaatttatgaat

SEQ ID NO: 321290 - DNA, 100 bp, Homo sapiens
aagttcgctgacaggtccagttgcagatacaaacttggattttttccagtctgatccttttgttggcagaatgggtaccacagaccatgtcatcgtcctg

SEQ ID NO: 321291 - DNA, 76 bp, Homo sapiens
tccgcatgcagcagaagatattcaaggagatgaccgatggatgtctcaggtgtcagttgtacccgaggcgttctca

SEQ ID NO: 321292 - DNA, 89 bp, Homo sapiens
gtgagtgaccatcctggagccttcctgaaagaggtggtgaaggcatttgtgatcctggcctcgcagttcctatcccatgacccagaaca

SEQ ID NO: 321293 - DNA, 100 bp, Homo sapiens
tgaatcgctgagcgatatcacagaacacaagattaatcaatgtcaactgacagccacccacacagaatatgcctatgggtcctggagggatgaatcagag

SEQ ID NO: 321294 - DNA, 135 bp, Homo sapiens
cagacactgtccatcttcgacagtgaggaagatatcaccaccttcgtcaagggcaagatacacgtgtctttcctgaagactatcttcccgtctcaaaatggacatgatggatccacggatgtacagcagagagcc

SEQ ID NO: 321295 - DNA, 136 bp, Homo sapiens
tctcggcttgccaggaagccggggttccccgggaagcgtggagttcacccgcgcactcgaagtgcctttgcaaactaactgccttctatgaaagcagtcattattcaaggtgatcgtattcttccagtgaaaacaa

SEQ ID NO: 321296 - DNA, 50 bp, Homo sapiens
tcttcgatgtgcgagactttggaaaggccctcgggaccaaggatcacgtc

SEQ ID NO: 321297 - DNA, 100 bp, Homo sapiens
gttctacagcagggcaccagagttgggacggcagccctcagtgcctgccatggactgaccctggaagctgtcctgaatttcaaatactctggaggcccgg

SEQ ID NO: 321298 - DNA, 75 bp, Homo sapiens
gtgattgccctgacaggaggagagctggtctatttcgagatggatcctctttcaggcagatcccaaaaaacccat

SEQ ID NO: 321299 - DNA, 74 bp, Homo sapiens
cgctgggagagaggtacctctccttttccctctccctttccctaaggaatgggtaccacagaccatgtcatcgt

SEQ ID NO: 321300 - DNA, 75 bp, Homo sapiens
ccgcctgagcgcaactagcggcgggtcgtgggcacctccagccagagactgctgctactttgaaacgtacgatag

SEQ ID NO: 321301 - DNA, 76 bp, Homo sapiens
tagtgtgtggaggcttccaccaggagactctgtttgctggctacacggacaacctggtgcgagtgtggcaggtgac

SEQ ID NO: 321302 - DNA, 82 bp, Homo sapiens
ctgtgcgcgctggcgctgagcctgcagccggccctgccggagggtgtgaagacagagaatgaccacatcaacctgaaggtgg

SEQ ID NO: 321303 - DNA, 50 bp, Homo sapiens
agtctggacatctgaaacttgccctcccaggcccaatacttcaaagcatc

SEQ ID NO: 321304 - DNA, 80 bp, Homo sapiens
ctcgctcggctgcgggaaatcgggctgaagcgactgagtccgcgatggagtttgacaagtatgcgcccaagctggacagc

SEQ ID NO: 321305 - DNA, 122 bp, Homo sapiens
aactgatgaagctgcagaaccaacgaggtggccgaatcttccttcaggatatcaagaatgacagcccatatcaaggcggtgtattctttttgacaattcattttcctacagactaccccttc

SEQ ID NO: 321306 - DNA, 98 bp, Homo sapiens
gaggggttacagactgtggtgcctacccccatcactgcttccctcagccataacagtgcttatcagattgttgtggaagaactgcacccacaccgaac

SEQ ID NO: 321307 - DNA, 74 bp, Homo sapiens
ctttggttacctatgtacctgttaccactttcaaaaggctgacgcgccactatgtagcgggtttcgggcgggcc

SEQ ID NO: 321308 - DNA, 100 bp, Homo sapiens
atttcttctgacttgagcctgcagtgtgctgtgagagatctaccactagggcgaactttctgaccaagtatacaactacccagagggcctaggagaagtg

SEQ ID NO: 321309 - DNA, 99 bp, Homo sapiens
cagaaggactgcctcactgagcaaccaagagtgaactactgagttcttcattatgtctgatggagattatgattacctcatcaagtttttagctttggg

SEQ ID NO: 321310 - DNA, 82 bp, Homo sapiens
ggagctggcatgacgtgcaggtctctagcgcgtgaaatgacaatggatgctctgttggctcgattgaaacttctgaatccag

SEQ ID NO: 321311 - DNA, 74 bp, Homo sapiens
ccctccttcacgccacacacacgaacttgctactaccagcaccatgccctaccaatatccagcactgaccccgg

SEQ ID NO: 321312 - DNA, 73 bp, Homo sapiens
gctggtcctgctgcgagccggcggcccggagtggggcggcggagagaaaaggaacagttccgtaagctcttta

SEQ ID NO: 321313 - DNA, 90 bp, Homo sapiens
ccgcctggacctgcacatttgtgatgatagccagtcccgagagccaggcctccgaccagggagaccttccatcctcctccacctgttcca

SEQ ID NO: 321314 - DNA, 90 bp, Homo sapiens
ggctttagtctcggagcgcgttctgccagcgcccgggagctcttcgccgcccgctcgcggtcgcagaagctgccccagcgctcgcatggc

SEQ ID NO: 321315 - DNA, 90 bp, Homo sapiens
ggatgacgtcatgatgccccagcgggtgaggctgcaacacgaggctgccgttcagcacccgtcgagcggcactttccctcatggtattga

SEQ ID NO: 321316 - DNA, 100 bp, Homo sapiens
caccgacctcatcagtgagctgtccctgctggaggagcgcttccggtggttttatgaagaaacagaaagcagtgatgatgttgaagtgctgactctcaag

SEQ ID NO: 321317 - DNA, 90 bp, Homo sapiens
ctcaagatggcggccaatgtgggatcgatgtttcaatattggaagcgctttgatttacagcagctgcagttcgtgccctcgtgaggctgg

SEQ ID NO: 321318 - DNA, 75 bp, Homo sapiens
gacgctgtgcgggtgctgagggacattgtgcacaagcctgggcagcagcagcggaaccgcttaggcagtggggga

SEQ ID NO: 321319 - DNA, 74 bp, Homo sapiens
ccaagctcatctctgagacccggaggaggttcgaagctgagtatgtgacaggtttttcccactcggctttcacg

SEQ ID NO: 321320 - DNA, 100 bp, Homo sapiens
ctgctgtactaaaagaacaactagaacgaaagagaaaggaggcttatgagagagaaaaaaaagtgtgggaagagcatgaggagcctgatctggttagtgc

SEQ ID NO: 321321 - DNA, 82 bp, Homo sapiens
cgcgcctgctgccgggttgcgctccgtgcacctcttgcggaaccctctgcaggtcctggtgaacgccatcatcaacagtggt

SEQ ID NO: 321322 - DNA, 76 bp, Homo sapiens
gcaagatcaccgtgacatccgaggtgcctttctccaaaagattttctggcatccttaaatcttgtgtcaaggattg

SEQ ID NO: 321323 - DNA, 75 bp, Homo sapiens
ggctagagaaaaaagatgttgtggggagagccaggggtgcatttctaggtcccaaagacctttttccatataagg

SEQ ID NO: 321324 - DNA, 75 bp, Homo sapiens
acaatttatcattgaataagtgttttaagaaagtggacaaagagaggagtcaggccaccccagcagacatgtttg

SEQ ID NO: 321325 - DNA, 82 bp, Homo sapiens
gggccagcaactacgtagatacaatgcagatcttcgtgaagactctgactggtaagaccatcaccctcgaggttgagcccag

SEQ ID NO: 321326 - DNA, 75 bp, Homo sapiens
aactatctgggggggacattcccagttacatggacacagaacagtatgaagaagcagtacgagactatgaaaaag

SEQ ID NO: 321327 - DNA, 72 bp, Homo sapiens
atcccggctgcttttgctgcgccctctcagcttcccaagaaagatggagatcttataacaatttttgatagt

SEQ ID NO: 321328 - DNA, 75 bp, Homo sapiens
gattacagagaaaaaaccaacaccttcctgtgcagtcctgttggaatttgttacaggaatacttaaagatgctgg

SEQ ID NO: 321329 - DNA, 100 bp, Homo sapiens
gaagatgtgaagtatggcctcgtcccggtcatctgggcgtgcgggtcccgggttttgatcgcgcgtttgtccttgccctcccaagacactgttcttcaag

SEQ ID NO: 321330 - DNA, 98 bp, Homo sapiens
agcttcaaacagctcacagttaaggaactagaggctgctatccagccagatactagcctggtgtcagtcatgactgtgaacaatgagattggagtgaa

SEQ ID NO: 321331 - DNA, 100 bp, Homo sapiens
tctttgcccctattatggagaaaggtgttccctaggtaaaagtgcagttttaaagtgtctcctggatattcacaaaatttttcaggaaaatgacccagcg

SEQ ID NO: 321332 - DNA, 100 bp, Homo sapiens
aaagatatacaagaaggagatacattaaatgcaatagcccttcagtactgttgtacggtgctcgcatttggcttttcgttggtttcatgttggcctttgg

SEQ ID NO: 321333 - DNA, 85 bp, Homo sapiens
gggtgggtgcaagatgccgctgccggttcaggtgtttaacttgcagttactacaaggggatccggcagatggtgcaggtcagcga

SEQ ID NO: 321334 - DNA, 118 bp, Homo sapiens
aatggagaatggcatgctggtgacggacagtgcagggaagcaactgcagagcgccggcatcggccgcacaggcaccatcattgtcatcgacatgctcatggagaacatctccaccaag

SEQ ID NO: 321335 - DNA, 83 bp, Homo sapiens
tggatactcagcgtcgctggcagccgctgtacttggctgaaggtgatgtggccgccctcaaccgacgcatccagctcgttgag

SEQ ID NO: 321336 - DNA, 75 bp, Homo sapiens
cctggaccaccgggcgctggtctgctcccagccgatgaaggatttgggggcagagcacttggcaggtcatgaagg

SEQ ID NO: 321337 - DNA, 83 bp, Homo sapiens
cgctttggatgccgagagcgagtatctgccaaaacaacttcccgacaagtggcagcacgatcttttcgacagtggcttcggcg

SEQ ID NO: 321338 - DNA, 110 bp, Homo sapiens
caaggattctcgctgtgacagagacaacaccgagtatgagaagatgaccagtgtcccagtgaaggaacgagtgaaggtgtctcagaactggagactggggcgctgccgag

SEQ ID NO: 321339 - DNA, 112 bp, Homo sapiens
acaaagccaccagtggatagctttaaagcaaagggggctccccctcgagatggaaaagctctctatcaatatcagctcacatcattgaaaagataattttgaagacatgttt

SEQ ID NO: 321340 - DNA, 75 bp, Homo sapiens
ggaagagttacagactaccggattacactttccagttctcagggaacaatagaaaccagtcttcaggatatcgac

SEQ ID NO: 321341 - DNA, 100 bp, Homo sapiens
gaaggcaatgatttataccatgaaatgattgaatctggtgttatcaacttaaaagatgccacctctaagaattttgaacagaaaatgctgaaaaaaggag

SEQ ID NO: 321342 - DNA, 87 bp, Homo sapiens
gccctgcagtcgatccggaacatgcgcgggaactcccactgtgtggactgcgagacccagaaaatggtggagtcaatgaagaaagta

SEQ ID NO: 321343 - DNA, 100 bp, Homo sapiens
agaagctatataaagtcaagtgtccattttctttcaactatatttgagcatacccagccactgttccatccctgacccatctttgtcgtttggaaattcg

SEQ ID NO: 321344 - DNA, 75 bp, Homo sapiens
cttccaaggaaccaaggcggccctggctgggggaaccactatgatcagagctggaggagggaatgatattcagtg

SEQ ID NO: 321345 - DNA, 75 bp, Homo sapiens
caacttggagatttagagttcaggtttattgctgacaatcaaatgaatcatgcctgtatgctgtttgtagaaaat

SEQ ID NO: 321346 - DNA, 75 bp, Homo sapiens
caccatgtacgacatgcaggcgctggtgggagcttgttggatctgtgtctcactgcagagctggagcaggagtag

SEQ ID NO: 321347 - DNA, 100 bp, Homo sapiens
gccgcctggtggaggctgtgctctcaggagaggaacagaagtgtgtcccggccagtggagaactctccccggagctccaggagtgggcaccttactcgcc

SEQ ID NO: 321348 - DNA, 115 bp, Homo sapiens
ttaatcctcaatttaagcctgatctaacccctagaaacaggtgtgatgaatgcagactctgctaccattttggctgtttggatcctcctttgaaaaagtctcctaaacagacagg

SEQ ID NO: 321349 - DNA, 100 bp, Homo sapiens
tgtgaggctggctacgtgggcccgcggtgcgagcagcattatgtttgagaccttcaacaccccggccatgtacgtggccatccaggccgtgctgtccctc

SEQ ID NO: 321350 - DNA, 100 bp, Homo sapiens
ctctgctcctctccagaaggcaccaccacagccgcccacttctggaaggttccatcccctgcaggcctgcacccccatgttccgggagtactccctgcag

SEQ ID NO: 321351 - DNA, 74 bp, Homo sapiens
atgagcctgcagagcgcgcagtacctccggtcaccatcagaaaagctaagtttgctgtatagtgaggatcagga

SEQ ID NO: 321352 - DNA, 75 bp, Homo sapiens
cccgggacaccctggaagccaggaaatgcagttggaattgatcacaccttttcagttgtacttcaatcctgaatt

SEQ ID NO: 321353 - DNA, 85 bp, Homo sapiens
caagaaatgatggaggtggtgaagagagatgacgaaaccataaaggagcatttatgtaagcctcttagcaaatatccggctgtga

SEQ ID NO: 321354 - DNA, 103 bp, Homo sapiens
ggaccccccgcgggagtaggcgacgggcgtgagggcgaggcggcggcggcggcggccagagagcagcagccgcctggcattatccaattggtttgctatttga

SEQ ID NO: 321355 - DNA, 110 bp, Homo sapiens
gaaggccaaggctaaggcagtatctcgctcacagagagctgggctacaggttggatggcaagcatgtggtgtttggcaaagtgaaagaaggcatgaatattgtggaggcc

SEQ ID NO: 321356 - DNA, 101 bp, Homo sapiens
gacaaaggcaactgtgaggactaccttatgatttcctgtcagtcttcactgtttccaatggaagatggattcttggatgatggccgtggggatcagcctct

SEQ ID NO: 321357 - DNA, 96 bp, Homo sapiens
taggattttactgtcgaaatgttcaggacttcaaacgagcttctgaagaaatcaccaagatcggtcgcttggttatcggacagaatggaatcctct

SEQ ID NO: 321358 - DNA, 100 bp, Homo sapiens
gcgaaggagcggccgggagcccgccgcgctggtagcggagtacgagagggcctccaaagtggaccagtttgtgacgcgcttcctgctgcgggagacggtg

SEQ ID NO: 321359 - DNA, 75 bp, Homo sapiens
ggctgcaatatggcggaggcggaaggggaaagcctggagtcctggctcagtctccagtgggggctgcagactaag

SEQ ID NO: 321360 - DNA, 82 bp, Homo sapiens
cttgctacaatagcagattctaatcaaaatatgcagtctcttttaccagcagtaaatgggcaatgtgctggccacacagcta

SEQ ID NO: 321361 - DNA, 50 bp, Homo sapiens
ttcgaagtgacctcagcagggcatccagggagtaactattcccagtcaga

SEQ ID NO: 321362 - DNA, 132 bp, Homo sapiens
catcacccatctggagcaaggaaaaaaaccttcgactatgcagagacatgagatggtagccaacccctcagctggagctccgttactctcatggggactttgagaatggtatctgggtgttatggatcatgg

SEQ ID NO: 321363 - DNA, 75 bp, Homo sapiens
tgatgatatccttctcaaccttgtgggatgtgaaaactctgttactgaagatttggcaaaagccttaatgaaggc

SEQ ID NO: 321364 - DNA, 89 bp, Homo sapiens
cgcgggcgagcggctgtgtggatgtcggcgaagccgcgggcgaggtgctgcccaccaaccctgaggagagctggcaggtgtacagctct

SEQ ID NO: 321365 - DNA, 50 bp, Homo sapiens
gagggcgcccctgaacctgcaccaggaactcttaacattcagggatgtgg

SEQ ID NO: 321366 - DNA, 98 bp, Homo sapiens
tccgcaaggtgtccacgtcgggtcagatccgacagaaggcaggtaaaaatcaaggtgaccccaagaaaatggctcctcctccaaaggaggtagaagaa

SEQ ID NO: 321367 - DNA, 98 bp, Homo sapiens
cttcaaacagtccttccactcataggtcatacaggtttccaggagtggccagaacaactccgtctttaccctgtatgaactgactaatggggaagaca

SEQ ID NO: 321368 - DNA, 97 bp, Homo sapiens
ctctagcacaattacttggactagtttatatgaaatttgtggagttttactacccttggatgctgctgttgacatggaaaagattgaggaacaattt

SEQ ID NO: 321369 - DNA, 82 bp, Homo sapiens
ccgagcctatgctgtcgccatcccactggctgcaggcctcctgctgctcctgtttgtggattcttcgctgctgctgccttac

SEQ ID NO: 321370 - DNA, 97 bp, Homo sapiens
tgattatatcgatgcagaacacctgggtgacttccacagactcacatttcaagacttcctcctggtgcggtggcaggacagtctgtggcaatcgaag

SEQ ID NO: 321371 - DNA, 98 bp, Homo sapiens
aaaaatcctggatctgtatgctttgagcaagggtcatcacactgaaacggtgttcaaccgggttttgccagggcctattgcaccagagagcagcaaga

SEQ ID NO: 321372 - DNA, 100 bp, Homo sapiens
gtgcaacctgtcccgactctagccgcctcttcagctcgccatggatcccaactgctcctgcgccgccggaaaaacagcactggaggcaatgtttctataa

SEQ ID NO: 321373 - DNA, 100 bp, Homo sapiens
tttactccattcaagagcagcattcataaatttccagtggtcagaatcgttgccagacttgtccgggggaggctggctggagaatgaagggaatgaatga

SEQ ID NO: 321374 - DNA, 100 bp, Homo sapiens
ggtgacttcacttttgagtgcaactgccttccaggagaaaatgcagaagtctccatggacgtttccctggcttaccgtgatgacgcgtttgctgagtgga

SEQ ID NO: 321375 - DNA, 83 bp, Homo sapiens
tgccacgttacttcaccgagcgagtaccggcaaaccgtgaaaactggattgtgatgatatcatcaagttgaatcgaaaggaag

SEQ ID NO: 321376 - DNA, 82 bp, Homo sapiens
ccaagtggaggttcctacagagattcatatgagagttatggatcttgctgtgtcacccagactggagtgcagtggtgcaatc

SEQ ID NO: 321377 - DNA, 75 bp, Homo sapiens
agcctcccaagtagctgagattacagaatttctacaagtgtgaaagaattagaaaacttcaggaacttgttacag

SEQ ID NO: 321378 - DNA, 90 bp, Homo sapiens
cggggaggagaccatggctgactacctgctgtacaccctcaacaaacaccagcgctttggtctaacaaagtgccagtggtgcagcaccct

SEQ ID NO: 321379 - DNA, 74 bp, Homo sapiens
gataatttgaaagaaaaagctctttcatttatgaggcaagggcggcgactggcggcgcgatggacctgaccggg

SEQ ID NO: 321380 - DNA, 80 bp, Homo sapiens
ggtgttcgagaacgaccccgagacggaagcggggagaggtggtgagagatgacccctgttgaggatttcattggtgtctg

SEQ ID NO: 321381 - DNA, 100 bp, Homo sapiens
tccggaggcggcgggacagagcgcctgcgaccccagtcggtgctccggggaggtcacctgacgaggaggggtttgttaaagttgttaagaataaggccta

SEQ ID NO: 321382 - DNA, 75 bp, Homo sapiens
tctgtcttcggtggactccttcggcagtccacccaccgccgccgcctcccagggaacccgagcgtcatgttaggg

SEQ ID NO: 321383 - DNA, 74 bp, Homo sapiens
ccgggctgttcatctacttcaggaatcagaaaggacccgtcgccatgggccgtgtgatccgtggacagaggaag

SEQ ID NO: 321384 - DNA, 75 bp, Homo sapiens
tgagaaacttaactccttgtgcatggcctggcttgtggatcatgagctgcccccatctgagttcctgcaagtagc

SEQ ID NO: 321385 - DNA, 82 bp, Homo sapiens
cagctgtggtcgtcagcactgctgagagctctggcaggctgccctgagcacgctcaaccccaaccccacggacagctgtccc

SEQ ID NO: 321386 - DNA, 98 bp, Homo sapiens
gcccgaggagcctcccctgctgccggagcccccagacaaccggtccagcgccccctgcggcttgatgagacccaggaggcagagttccaggcccttcg

SEQ ID NO: 321387 - DNA, 90 bp, Homo sapiens
cggctagtgggctcccaggaggaattggcatcatggggtcatgagtatgtcagacatgcgtcgggatgtccaggaaatttttcgcatgac

SEQ ID NO: 321388 - DNA, 83 bp, Homo sapiens
gctcagggtgccagacctcatcaggtggggaagcagatggtagaatcctggcatttcatgttggcagccatcatttaacccac

SEQ ID NO: 321389 - DNA, 146 bp, Homo sapiens
ggttcgtcgcctccttgcccgtgaccgtcgctagaactcagttgtgcgttgcggccagtcgccactgctagtgatcagcagctggactgtgccttggacctaatgaggcgcctgcctccccagcaaatcgagaaaaacctcagcga

SEQ ID NO: 321390 - DNA, 82 bp, Homo sapiens
tggagactgtaatttgggagatgaagcctcgagcctaaggcgctctcaggtccatgtttggtgcacctcgatttggaggaag

SEQ ID NO: 321391 - DNA, 100 bp, Homo sapiens
ctcgtggcagggcagtctgcggcggtgttctggtgcacccccagtgggtcctcacagctgcccactgcatcaggaagtggggaagctgaggcaggaagcc

SEQ ID NO: 321392 - DNA, 80 bp, Homo sapiens
ggtttcgggatctcggtgctgcagacggcgagacctcctgcacagccctctggaccccgaggttggaccctactgtgaca

SEQ ID NO: 321393 - DNA, 100 bp, Homo sapiens
aaaagctgcttgaatgtctgccgaaatgttcaagtttaccaaaagagaggcaccgctggaacactaatgagacatagggcctgattacattccaacagag

SEQ ID NO: 321394 - DNA, 100 bp, Homo sapiens
aaaaattatgcaggtggtggatgaaaaattggaatctggtctttctgtagacccaagtcagaaggaaccatttgtggagttaaatagaatattagaggca

SEQ ID NO: 321395 - DNA, 75 bp, Homo sapiens
agcacacactatggcgctgaaacggattaataaggaaaatggcattcctatgaagaaagcacgaaatgatgaata

SEQ ID NO: 321396 - DNA, 100 bp, Homo sapiens
cctttcctctgctgccgctcggtcacgcttggtgctcaaaaatgtgataactttgctgaaaaaagacccctccttggtgtttgtaagagcattggatctt

SEQ ID NO: 321397 - DNA, 100 bp, Homo sapiens
atggcagccgccgacggttcgctcttcgacaaccccaggacgttctccagacgtcccccagcccaggcgagtcgggttggctcaaaaacagaagttgctg

SEQ ID NO: 321398 - DNA, 75 bp, Homo sapiens
cagaacttgaaggttaaaccactagcccatttcacaggtcaaaatgcagatcttcgtgaaaacccttaccggcaa

SEQ ID NO: 321399 - DNA, 100 bp, Homo sapiens
accatgtcagacgcagccgtagacaccagctccgaaatcaccaccaagagcggttctggtgaggttggaaggatgcagccacccggttgtcatgaaaggc

SEQ ID NO: 321400 - DNA, 96 bp, Homo sapiens
ccacgaggagcacagccgggccgctgcgaagggtttcatcaccttaaatggttttgaaccaatgaaggtgtattcccttaaaaagacggacagccc

SEQ ID NO: 321401 - DNA, 90 bp, Homo sapiens
gagatattctgctgagtggaaggaggcagttccctccatccccatcagccccgaagatcccctcctggcagatcccagtcaagtcaccgt

SEQ ID NO: 321402 - DNA, 101 bp, Homo sapiens
agtctacgccatcgtggccacgcttctcatcctggacatctggcagtttgtacacttggccgtccatgcagagaacttccgctcggagatcgtcagcgtga

SEQ ID NO: 321403 - DNA, 75 bp, Homo sapiens
tcttcttcatagttacgttatactgcccctgcattgttggtattgaaaaaattccaacagaatgggtttcctgaa

SEQ ID NO: 321404 - DNA, 149 bp, Homo sapiens
ggcagaatcaaggcgcaggcgttcggctttgaccagacctttcagtcctatcggaaggatgatttcgttatggccttgttgctggtggcggccttggcgggcctgggcttgggcctgagcctcattttcatcgctgtctacctcatccg

SEQ ID NO: 321405 - DNA, 50 bp, Homo sapiens
gcctggcctgccatgtccgggagaagacaagttttgcggcctccaggtgg

SEQ ID NO: 321406 - DNA, 98 bp, Homo sapiens
ttctctcgatgaggataacatccctccagaagatgggcccctgggtagacagacacagcttgatttcagagcagacataggcgaagaaaacatggcat

SEQ ID NO: 321407 - DNA, 90 bp, Homo sapiens
aaaatcttactcatgttactattcaccatatatagtatttcgtcactgaagactttattcagttccatgccattgcagtgtcaactaggc

SEQ ID NO: 321408 - DNA, 50 bp, Homo sapiens
ctcggcagtcgcgaagcagcaaccatgattggcggcagtaagcacacaat

SEQ ID NO: 321409 - DNA, 97 bp, Homo sapiens
cttccagctccgcccggtgcccagcgttttcgcgccccaagagcaggaataccagcaggttagagcagccagcgggtacagaatggattttggaaga

SEQ ID NO: 321410 - DNA, 100 bp, Homo sapiens
aggtcaggtgaaacaggggacacccatgtgtgtcccaagcaaaaatatgatcacggaagccttggcccaaggtgggatgcacataagagcccggttcccg

SEQ ID NO: 321411 - DNA, 80 bp, Homo sapiens
cgaagcctcccgggtggcttacagacgctgccagcatcgccgccgccagggctttgttcgcgggggtcacagctctcatg

SEQ ID NO: 321412 - DNA, 76 bp, Homo sapiens
caaccaatagatgatgaaatttatgaagaacttccagtgtgttctaggtcagtggcttcaaagactccagttggat

SEQ ID NO: 321413 - DNA, 74 bp, Homo sapiens
accagtacagatggaaaagttggctccaaaggattctcatcgctttggaaggcacctgaaagaagcaatgactg

SEQ ID NO: 321414 - DNA, 89 bp, Homo sapiens
gacacagaagtatttgtgacagatgcctgtgaggagccaccaacatttgaagctatggagctcattggtaaaccaaaaccctactatga

SEQ ID NO: 321415 - DNA, 96 bp, Homo sapiens
gcagagactggtgaaactgtgcacccagaaacatcagttggacactgatctgtttccccatttaggctcctgttccaaagagtgcacttattcctg

SEQ ID NO: 321416 - DNA, 73 bp, Homo sapiens
attctagcgcctagaatttttggctccaataaatgctttgtttgctagcaaaatgctttaagcctgcccttcc

SEQ ID NO: 321417 - DNA, 98 bp, Homo sapiens
ccccccaccgtttccccctgttgcagggttttgtttatataactcaagttgtttggctaaattcttcagagataatagtagcagaatttcacaaaaaa

SEQ ID NO: 321418 - DNA, 110 bp, Homo sapiens
gggctcatgcttgttaccggctccatcaacacgctctcggcaaactggggtatggccgtcaatgtgtactccacatctgtgaccagtgaaaatctgagtcgccatgatat

SEQ ID NO: 321419 - DNA, 104 bp, Homo sapiens
atttcgtcccagcctgacaaccttggaacagaacaagaggacaggaggtgtcgttccagaacactcctatgccaccttcaccagctgtacaagtgcagggccag

SEQ ID NO: 321420 - DNA, 75 bp, Homo sapiens
ccccgtacgcctacagtaacggcgtccgagctgggccacagcctgaacgagaacgtcctcaagcctgcgcaggag

SEQ ID NO: 321421 - DNA, 82 bp, Homo sapiens
gttttttgtggcttccttcgttattggagccaggcctacaccccagtgctcctgcgggaagaagtgtcgcggctccaggagg

SEQ ID NO: 321422 - DNA, 77 bp, Homo sapiens
cagatagtaaagatgatgatgacattgacctctttggatctgatgatgaggagttgcagagttttcaaggcaaagat

SEQ ID NO: 321423 - DNA, 90 bp, Homo sapiens
tgcctgggccgctgggagccgttattggctgccgttaaggaccgttacgtttcccgggtgagcgacctgtgagagtttatgccgatggaa

SEQ ID NO: 321424 - DNA, 74 bp, Homo sapiens
agctgaagaagagcaaaaggcggagctgtagccactgtagcagcaagtgtggacaacagtgagtatatgcggaa

SEQ ID NO: 321425 - DNA, 100 bp, Homo sapiens
ggggcgccctccgccacgcagccggccaccgccgagacccagcacatcgccgaccaggtcctcagaatggttggaatgaccctccagctttgaacagagt

SEQ ID NO: 321426 - DNA, 97 bp, Homo sapiens
tcggggagggggtggagttcgatgtgctgcctgcctttgatgccctggcggaacggaagccgccccttttcaacatgaatgcaatgagtgccttata

SEQ ID NO: 321427 - DNA, 88 bp, Homo sapiens
ttaaggatgctttcaaatcaaatgactcacagcaggcctgtaaaagaggaaattcagacatcgtacgactcgtaattgaatgtggagc

SEQ ID NO: 321428 - DNA, 100 bp, Homo sapiens
aggaagtggaggaggcggctataataatagcaaacatcgatggcctactggggataacattcatgcagaacatcaggatcagttccatgacaagacccct

SEQ ID NO: 321429 - DNA, 100 bp, Homo sapiens
ggagaaggagaggagcgagctgaggaagaggaagctgttggctgaagtctgctggagccagttctgcttctcggcaaggagcgatttgctggtgtagaca

SEQ ID NO: 321430 - DNA, 97 bp, Homo sapiens
caccgggaggccgggccgagcgatggactcaccctgtcacccaggttggactgcactggcctcaacctcctgagttcaagtgatcgtcccacctcag

SEQ ID NO: 321431 - DNA, 80 bp, Homo sapiens
gggctgacgctgctgctgtgtgcggtgctgctgagcttggcctcggcgtcctcggacaagttggatggcttgaggactgg

SEQ ID NO: 321432 - DNA, 82 bp, Homo sapiens
gagtccccgtacgcctacagtaacgggtgcggggggcaatggcactgcagctctgggccctgaccctgctgggcctgctggg

SEQ ID NO: 321433 - DNA, 100 bp, Homo sapiens
aaatcagggtaacggttgttgatgtcaatgaatcaagaatcaatgcgtggaattctcctacacttcctatttatgagttggataacagggcaagattcag

SEQ ID NO: 321434 - DNA, 100 bp, Homo sapiens
gccatgcaaggctggcgcgtctccatggagggcttttttccagacttcaagctcccattccaacagtaagagcttcttccacatcacagcccttggatca

SEQ ID NO: 321435 - DNA, 100 bp, Homo sapiens
ccgggattcccagccatggcagattcctccgggcagcagggtatctacgagaccccagcaggcaccatcctttaccatgctcatttagacatcgaggcct

SEQ ID NO: 321436 - DNA, 75 bp, Homo sapiens
gagtcccaatgaaacgggcagccatggccctccacagcccgcagtgctacacacgcagggccctgtcgatggcag

SEQ ID NO: 321437 - DNA, 51 bp, Homo sapiens
ttccagtccagcaaatggaaatctgggcattgctatggcaacaaaagaaaa

SEQ ID NO: 321438 - DNA, 74 bp, Homo sapiens
ctttacaggggttatcgcacttaagcctcggaacaactttaccagttagcagacttgaagaaagagaagcagaa

SEQ ID NO: 321439 - DNA, 75 bp, Homo sapiens
ggaggtggatctgaagaacgggtggttctaactttgatggtttgagaccaaatgggaagggagtgcctatggacc

SEQ ID NO: 321440 - DNA, 88 bp, Homo sapiens
cgggcggcacgcacgcggtgcagggtaacatggcggatgcggaaggcgttaagatcatcttccgggtggccctggtcctgctgcgcca

SEQ ID NO: 321441 - DNA, 80 bp, Homo sapiens
cagagcaaggggcttacgcagaaggacctggccacgggtaattttatggagtgtcagcccgagagcagcatctctcaccg

SEQ ID NO: 321442 - DNA, 87 bp, Homo sapiens
ggcgcagcagtctccttcctgcgcgcgcgcctgaagtcggcgtgggcgtttgaggaagctggctttgcccgaagtttttacatacaa

SEQ ID NO: 321443 - DNA, 80 bp, Homo sapiens
gtaaatccatgatcctcaccgatgtcgggaaggtcactgaacctgtagacgcaccctctgaagatggtgactccctcctg

SEQ ID NO: 321444 - DNA, 50 bp, Homo sapiens
agacgcgaaggagaggccctagaaccaatgtcatacccaggctatccccc

SEQ ID NO: 321445 - DNA, 100 bp, Homo sapiens
tgtactttccatttgccttcctgggtctcagcatcagaggagcccaggaggaggaccctcccgatccccagctaatgagactggacaatatgcttttggc

SEQ ID NO: 321446 - DNA, 98 bp, Homo sapiens
gtcaggaccagaggccagagcgccgaggccgtgcaccagatgcccatctatgtcaccggcatcaccaaccaccagaaccctttctcctttggcaatgc

SEQ ID NO: 321447 - DNA, 100 bp, Homo sapiens
ctagagctgaaggctgtgataatgaggaagatcttcaaatgggcattcacaagaatccaactcaagtcggaacagctcttcaggttttctataatcttgg

SEQ ID NO: 321448 - DNA, 75 bp, Homo sapiens
ccgctgcggaagagcggctcggtggaaaacgggttcgatacccaggaccacagaatactggccatggtgcaactt

SEQ ID NO: 321449 - DNA, 82 bp, Homo sapiens
cggaggcacccgaatgctgcccgggtgagagtgcttgtgatttcacgtatttttgctgaactcgtaaaagagacacttggat

SEQ ID NO: 321450 - DNA, 98 bp, Homo sapiens
gttcatgcagcacctctacccacagcggaagatccatccaaaagctatgtgaaattacgagactttgtgcttgtgaagctttgtcaagatttgccctg

SEQ ID NO: 321451 - DNA, 100 bp, Homo sapiens
tggaacaccccctttctgctgacatcgccatggccacccgtgcagatgaggacggagacaccgagacggtcatctgttccagccgggccactgtgatgct

SEQ ID NO: 321452 - DNA, 78 bp, Homo sapiens
aggaagtgctggaaagactttcagtgtaactggctggaagggcactccacagaaggatgttattatcaagtcagatgc

SEQ ID NO: 321453 - DNA, 100 bp, Homo sapiens
gaagagtgagagatggaacccgaagaagaaaggattcgttacagccagagattgcttcagataaaccagtcgatcattttctgtaactcctctcagcgag

SEQ ID NO: 321454 - DNA, 107 bp, Homo sapiens
ctgggaattgccaaggagaagagtaccaaggctgctagtgaacagcgacgtgcctcctgacaaggtgatccgggcgggccccgcaggaattttatcccctcaccggc

SEQ ID NO: 321455 - DNA, 98 bp, Homo sapiens
aagaactggaaacggaatatacgttgtgaaggaatgaccctaggagagctgctgaaggaatcagttgattgggttggagactacaatgaaccattgac

SEQ ID NO: 321456 - DNA, 100 bp, Homo sapiens
accaagatcaggaacctgccctgagcaagcaccagaagcaccaggcttttgaagcagagctgcatgccaacgctgaccggatccgtggggttatcgacat

SEQ ID NO: 321457 - DNA, 80 bp, Homo sapiens
gagagcgcgttggtggcgacggccgagtcaggtacaaacacaagtgcgccttgcaaaaaaaaactttgacaaattgaaga

SEQ ID NO: 321458 - DNA, 100 bp, Homo sapiens
aaaactgatgcagcttgtggaccacagaggaggcggcggaggcgggggtaagggccatcaccatcgaggctgagccaagagctgatggcagccgccggac

SEQ ID NO: 321459 - DNA, 83 bp, Homo sapiens
gcgtctaggggagcgaaggctgaggtggcagcggcaggagagtccggccgcgacaggacgttcatgcgggagatggcaggggc

SEQ ID NO: 321460 - DNA, 73 bp, Homo sapiens
agccgccagttgggatcaaatgtgagcctatggatcaagatgagctttgatccaaaccttctccacaacaatg

SEQ ID NO: 321461 - DNA, 75 bp, Homo sapiens
atccaggattcatcccgtgtcaacaatggtaaaggggcaagaatggtgagggagctgtttgtcatggcacgggaa

SEQ ID NO: 321462 - DNA, 101 bp, Homo sapiens
caaattcaaaaaggataaggagatcatagcagagtacgatactcaggtcaaagaaagccaagatgacagattttgatcgttttaaagttatgaaggcaaag

SEQ ID NO: 321463 - DNA, 100 bp, Homo sapiens
aaaccaatgaattccaacaacttcaaagtaaaatcagtttaatttcagaaaaggtgttatgtattctctgggacatggaaactgaagaagttgaagacat

SEQ ID NO: 321464 - DNA, 50 bp, Homo sapiens
gatccattctcattaaataaatctctggctttctgaaaaggatatgagca

SEQ ID NO: 321465 - DNA, 100 bp, Homo sapiens
cgggggaagaggaagaagggctccaccatggagcgctggggagatggtgcgacaggcccgcatcctggcccaagccacatctgacctggtcaatgccatc

SEQ ID NO: 321466 - DNA, 101 bp, Homo sapiens
ctcaagatggcggacaaaacgccaggcggatctcagaaggccagttcaaaggtccagcccagaatcaaatgcaggttccatctggatatggattgcatcat

SEQ ID NO: 321467 - DNA, 98 bp, Homo sapiens
accagaaggtgtatgagatccaggacatctatgagaacaggtgtcggcggtgctccagcaccctgctccctggggcttatgagaatgggcctgaggag

SEQ ID NO: 321468 - DNA, 80 bp, Homo sapiens
aaaaggataaggagatcatagcagagtacgatactcaggtcaaagtgtctaccatcagagggagatctctgccccctggg

SEQ ID NO: 321469 - DNA, 50 bp, Homo sapiens
atccatttctcctattgaggagtcaacggacttgcaacaaagcattgcca

SEQ ID NO: 321470 - DNA, 51 bp, Homo sapiens
aagccaagcaaactgaagaggaggtacatgtcccagagcaagcacacggag

SEQ ID NO: 321471 - DNA, 75 bp, Homo sapiens
gtcaaggtggcctaccaggaggccaggggtgtcgccatgggcccaggagacaccagcgggggctgccgctgcagg

SEQ ID NO: 321472 - DNA, 74 bp, Homo sapiens
tgccgactggttctccctgggctgcatgcttttcaaacttctgagaggatggaaaatccccactcactgctcac

SEQ ID NO: 321473 - DNA, 75 bp, Homo sapiens
gcacgagggcgcgctcgagacgctcctgagatatgaagagcattttaagaggtgcagcctctggaagtggatcaa

SEQ ID NO: 321474 - DNA, 76 bp, Homo sapiens
gtttgactctgacagtcctcccactaagacctgcgaccgcatcaagcagtccgccagcggaaccaagcggcgcgtg

SEQ ID NO: 321475 - DNA, 98 bp, Homo sapiens
aaatctgcatattttgctgaaaagctctataaatcgatgaagatatttgttcagtcgaatcaaggtgaagaggaaacaacaagaatttcatattttac

SEQ ID NO: 321476 - DNA, 99 bp, Homo sapiens
gaggactcagatgagcaactggattatactgtactgcccatgaaaaaggatgttgaccggacagaaagaagatgctgatatgctacaacacggatgaac

SEQ ID NO: 321477 - DNA, 100 bp, Homo sapiens
agtttttacaaagaacatgctcacatcttcaggtgcctcattcacatacgtcaaggaaattgagtctctgctttctatccgtcaagatgataaagtcgtg

SEQ ID NO: 321478 - DNA, 100 bp, Homo sapiens
cgaatcgttaaacatctgaaagggtcagttgctagtgatatctcgctaacaggaggctcagtagtacagagaatacggctgcctgatgaagtggaaaatc

SEQ ID NO: 321479 - DNA, 76 bp, Homo sapiens
atcgcgggcaccggagccagccccgcagcggccttatgatctcctcattgcgtccccctctgcccactggacttgg

SEQ ID NO: 321480 - DNA, 94 bp, Homo sapiens
cgggtggcttacagacgctgccagcatcgccgccgccagtaagactttgaccccgacgcaggcttcagtgattgccgcggatcagaagcctgag

SEQ ID NO: 321481 - DNA, 80 bp, Homo sapiens
caggaacaaatagagctgccagaggttccctccgagccccttcctgagaagatcccagagaggtggagaagagcgagtac

SEQ ID NO: 321482 - DNA, 97 bp, Homo sapiens
tctgctcggagatcatttgggagatccaagagattcagtatcactcgctcccttgatgatcttgaggcagcggaggaggagaaagagatggacctcc

SEQ ID NO: 321483 - DNA, 50 bp, Homo sapiens
cccaagatgggcatctattacattccattaaaagatggtgctcgctctgt

SEQ ID NO: 321484 - DNA, 75 bp, Homo sapiens
ggttgtcgcccgttggccgcgcggcgccgcgctcggcggccgccattgcaggctggagtgcagtggcaccgtctc

SEQ ID NO: 321485 - DNA, 83 bp, Homo sapiens
aattggccttattaatgatatgtggatgacaatcgagcagcagaagaatggtgtgcctaccctttaatgctgcagtttaagag

SEQ ID NO: 321486 - DNA, 50 bp, Homo sapiens
ctcgctgtccctgcggcttctggggaaaaatggctactggacaggatcga

SEQ ID NO: 321487 - DNA, 100 bp, Homo sapiens
gcggaaggaagcagtgcccggcgacactgcacccatcccggctgcttttgctgcgccctctcagcttcccaagaaagacgctctgcacaaaagccaccat

SEQ ID NO: 321488 - DNA, 75 bp, Homo sapiens
ttattttctgcttccaaaggtccagagcattcagctgtctcaaatgcaggcgtccctgagggcctccatcctcgc

SEQ ID NO: 321489 - DNA, 100 bp, Homo sapiens
ggctccagcatcaagatccgtctgacagtggcttacagaagagacgaaatgtggtctgagggacgatatgaatatgaaagaattccgagagaacgagcac

SEQ ID NO: 321490 - DNA, 101 bp, Homo sapiens
aggacgtctacctgtccaccgtcgtgaccgagcgcgttccttcacctcgggcagaataactttgcagaagcccacaggttcttcacagagatcttaaggat

SEQ ID NO: 321491 - DNA, 95 bp, Homo sapiens
tcatgcatttattgatctgactgaagattttacagcaggtagtgggcagcagtcagtgacaggtgtaacctctgtggatgacagcaacagttact

SEQ ID NO: 321492 - DNA, 100 bp, Homo sapiens
gttttccgggagctgcagatcatgcaagggctggagcaccccttcctggtcaatctgtgggcactgcacttggctgtgattcatcagcatgaacccttcc

SEQ ID NO: 321493 - DNA, 90 bp, Homo sapiens
agatacagtgcactgaatgtccaacatcagatgttgaaaagtcgagagaaagaacttatgggtttcagcaaatcggtaaatgaagcacgt

SEQ ID NO: 321494 - DNA, 83 bp, Homo sapiens
caagtacatcataatcggcgacacaggggtttcttttgcgggacagaggatcagatgttgagagtttggacaaactcatgaaa

SEQ ID NO: 321495 - DNA, 75 bp, Homo sapiens
aggtttggcagatggagaacctgatcgaacttcgttccaagattatcccctaaaactcatagacccaggtctccc

SEQ ID NO: 321496 - DNA, 87 bp, Homo sapiens
gcagccatggccgaagcggcgcctgcccggtgatgactatgactccaagaaacgcaaacagcgggctggtggagagccctggggtgc

SEQ ID NO: 321497 - DNA, 100 bp, Homo sapiens
gccttgcgggcccggaactacgagtacctgatccgcctcttccaggagtgggagcgagggcggcactgctcacaggacggctacccatccgcaatggctt

SEQ ID NO: 321498 - DNA, 98 bp, Homo sapiens
ggcagctgcgaggctcggagaaacaggcgccgcgggctccgcgcccggccggacccgggcccgaggtccccagagtttcaccggtgaggactgcgtgg

SEQ ID NO: 321499 - DNA, 122 bp, Homo sapiens
ggacttgatcaggctctgccctgtctgacagaactcattctcaccaataatagtctcgtggaactggatgacatgcacttggtgataagaaagcagctctctagcaccgtattcaagtacaa

SEQ ID NO: 321500 - DNA, 75 bp, Homo sapiens
agcaaaggagatatcgcacaggcaagaaagctgtatagatgtccagaagaaagctgtggtgattcgtcacttgta

SEQ ID NO: 321501 - DNA, 83 bp, Homo sapiens
cgagggatgcggagagaccatatatgtcattgggcagggatcaggtctgaagaactgttgcccaattcaacagtgccagcatt

SEQ ID NO: 321502 - DNA, 101 bp, Homo sapiens
cgaacttagacttccggaaggactttggcgaggttcctgagactggcccagacgctgcggcactatggctacttgcgctttgatgcctgtgtggctgactt

SEQ ID NO: 321503 - DNA, 100 bp, Homo sapiens
cttctctgtggaactgctctggcagtcatcgtgcctgaaggagtacatgccctttatgaagatattcttgaggaaatcttcccaaggctgcagacaccga

SEQ ID NO: 321504 - DNA, 94 bp, Homo sapiens
cctgaatcctgaattttccttgatggtcaaaagattaagtcacccacaaaagctgtatataatgccagacattggaatcatccagattcagaag

SEQ ID NO: 321505 - DNA, 51 bp, Homo sapiens
tgcagggtaacatggcggatgcggaaggaatcagagatcattgatttcttc

SEQ ID NO: 321506 - DNA, 83 bp, Homo sapiens
cgaggaggcgcgggaggtgttcgagaacgaccccgagacgatttggtcgtattgggcgcctggtcaccagggctgcttttaac

SEQ ID NO: 321507 - DNA, 130 bp, Homo sapiens
gagaattggtgtaagacatcacaatcccattattcagagcgcgtatggagtggaaacgcttgtagggtttcaccaggaaggatttgatgccctggatccctttattcccatcctggtttccaactataac

SEQ ID NO: 321508 - DNA, 74 bp, Homo sapiens
gaggagctgctgcgcctcaaagccaaatgactttgaagaagccaaggaaattttgacaaagatgagatactttt

SEQ ID NO: 321509 - DNA, 88 bp, Homo sapiens
gccacgctcagcagcatcagacacatgatccgcaagaacaagtaccgccccgacctgcgcatggtgtgcctaccgcatgttgccgctg

SEQ ID NO: 321510 - DNA, 100 bp, Homo sapiens
cgtggagggcaggctggccttcgcgcccgtggtcatgcgcctgagctgcgggagctcgccccgggacccccacgctacgtcaaaagctacctcctcccgg

SEQ ID NO: 321511 - DNA, 100 bp, Homo sapiens
atacatttgtacacgatcccaagagacgtcactaacatatattggcacagtaatgtaattatagagcggattgagcacaacaaacttaggactatatcag

SEQ ID NO: 321512 - DNA, 75 bp, Homo sapiens
gatcttccgcaacctggagaacgccaagcgcttcgccatcgacatagatggcaggaaatccagaccagcaggagg

SEQ ID NO: 321513 - DNA, 83 bp, Homo sapiens
cccttagcgcggtcaggccgccctccttttccagccgaggtgctcggtggagtcatggcagtgccctttgtggaagactggga

SEQ ID NO: 321514 - DNA, 82 bp, Homo sapiens
gttgcgtgccctacttcaaggataagggcgacagcaacagctctgccggctggaaggtgggaggaggagctcgccaagcgca

SEQ ID NO: 321515 - DNA, 83 bp, Homo sapiens
ccaagatgtctgacatggaggatgatttcatgtgcgatgatgaggaggactacgacctgcttggacttaaagtatgatgttga

SEQ ID NO: 321516 - DNA, 80 bp, Homo sapiens
tagggggctgtgtggcttttatcctggataacaccatcccaggtcagcccaaggccaaccccactgtcactctgttcccg

SEQ ID NO: 321517 - DNA, 98 bp, Homo sapiens
aaatgaactgagtgcctggaagtttacgcctgataggttccttcaatggtgccttagctgctgttcctgtccaggacctgggctccactgtcatcaaa

SEQ ID NO: 321518 - DNA, 90 bp, Homo sapiens
tatcgatgatgaatggtctgggttaaatgtcctcctcgcactttcttaccagccctttgcaaaatttttcttgatgaaagtgctccagac

SEQ ID NO: 321519 - DNA, 90 bp, Homo sapiens
gtttgcatctctccctcctttaaacagcttctccgggtctcagcatgaggcggggtttcaccatgttgcccagactggtcttgaactcct

SEQ ID NO: 321520 - DNA, 83 bp, Homo sapiens
ctgctgcagagactcttcagtcgccaaggggatatgagactttctactcggaatatcctgagtgttgcgtggatgtaaaaccc

SEQ ID NO: 321521 - DNA, 85 bp, Homo sapiens
tgggccagtacagcaccggcaagaccaccttcatcaggtcaaaatgcagatcttcgtgaaaacccttaccggcaagaccatcacc

SEQ ID NO: 321522 - DNA, 100 bp, Homo sapiens
cgtcgccccgccgcgccgcgctccaaccgcctcctcctcctcagtaacgcgggtgaaattgatcttcaaattctctccaaagttcaggctcaatacccag

SEQ ID NO: 321523 - DNA, 75 bp, Homo sapiens
taaacctcttcctcttcataaaagtggagccgccaccaaaatgcagattttcgtgaaaacccttacggggaagac

SEQ ID NO: 321524 - DNA, 75 bp, Homo sapiens
tggaccccgatggtgtcatcgagcctggagatttgaaaaagagaattgaatctctgatagacagagactatatgg

SEQ ID NO: 321525 - DNA, 96 bp, Homo sapiens
gcgcgacggacgcacacaccgcccagcgctcgcacgacgggaagatcagttttcctgccatccaggctgctccctccttcagcaactcattcccac

SEQ ID NO: 321526 - DNA, 74 bp, Homo sapiens
attcaggttcctaggaatctcgttggtagtgggcagcagtcagtgacaggtgtaacctctgtggatgacagcaa

SEQ ID NO: 321527 - DNA, 89 bp, Homo sapiens
ggagcaacgaaaagagccctggaatgtgaagagacaggaggcagcagacggacatccagtgaaactggaacgccaagctgaagaagaac

SEQ ID NO: 321528 - DNA, 74 bp, Homo sapiens
cagatctgcgcttccagagcgcagctatcggtgctttgcagactgacttccttttggtagtactgcgtgatgtt

SEQ ID NO: 321529 - DNA, 90 bp, Homo sapiens
cttgggtgatttgttctgtatcagaagacaatatcatgcaagtgtggcaaatggaaagtacacaggaagatgctatgaaatttccatctt

SEQ ID NO: 321530 - DNA, 101 bp, Homo sapiens
cgagcacgagctgtgaggggattcacttgtgtgcggaactcctcggaaccatgaccatggtgaatccgggcagcagctcgcagccgcccccggtgacggcc

SEQ ID NO: 321531 - DNA, 75 bp, Homo sapiens
gccccgtcctattcgggctcccgcctctgttcagccgcctaaggacgacaagaagaagaaggacgctggaaagtc

SEQ ID NO: 321532 - DNA, 100 bp, Homo sapiens
ttattttttctcatggatgttcttcttcgagtatttgtagaagggttatgatgtgattgctcaagcccaatctgggactgggaaaacggccacatttgcc

SEQ ID NO: 321533 - DNA, 87 bp, Homo sapiens
tggcagcctgaacggagtgtgcgacggattgggaggttgtactcgtaaaacaaggatcatcgatgttgtctacaatgcatctaataa

SEQ ID NO: 321534 - DNA, 80 bp, Homo sapiens
aaaaagaggatacctctgcgatcccgggtcatctccagatgctagggttatggtgcctccggagccagcgtggtggccat

SEQ ID NO: 321535 - DNA, 82 bp, Homo sapiens
tgttggagaactacagccacctgatatcactgggagtggagtcaacatatcaatggagcaagtcacagtcgtcgatgccagc

SEQ ID NO: 321536 - DNA, 82 bp, Homo sapiens
ctctggaattgctactgctgcctctgtcactcctggtgaccagcattcaagaatcctcactatggatgggctcattgaggac

SEQ ID NO: 321537 - DNA, 51 bp, Homo sapiens
gctcagagcttggagacagacgaatggtaccaaaccaccactggatgcaga

SEQ ID NO: 321538 - DNA, 52 bp, Homo sapiens
gccctccatcttgcagcccagaagaaacctctgtagaggagcaggatgcaac

SEQ ID NO: 321539 - DNA, 83 bp, Homo sapiens
ccccagccccacagaccagcccagcattcagtgcagagcagagcgggcggaggaccccgggcgcgggcgcggacggcacgcgg

SEQ ID NO: 321540 - DNA, 50 bp, Homo sapiens
ggaggaggaagatggcggcgggggcgaggggcttagggaaggccgagcca

SEQ ID NO: 321541 - DNA, 112 bp, Homo sapiens
tttggactccctattgtatttgccagagcacatctggtccggaccctatttgtcagtggccttcctctggatatcaaacctcgggagctctatctgcttttcagaccattta

SEQ ID NO: 321542 - DNA, 83 bp, Homo sapiens
cgcgcggctcggagccctggaagcagcagctcaccgaggacggggactcgtgagaagccctaccactgcaactgggacggctg

SEQ ID NO: 321543 - DNA, 100 bp, Homo sapiens
ggcggcgggaacgattgggctgagcagaggacgacatgttgcttttcgtggaggtgtcatggagaaactccagctgggcccagagattctgcagcgggaa

SEQ ID NO: 321544 - DNA, 51 bp, Homo sapiens
gcatatgatgtgcagtgtccaaagagaggtgttgacagctcttctaccaca

SEQ ID NO: 321545 - DNA, 122 bp, Homo sapiens
ccgaggacctgaaggacgcgcaggagaagctggagctcacggagaagaaggcctccgacgtgagaagccctaccactgcaactgggacggctgcggctggaagtttgcgcgctcagacgagc

SEQ ID NO: 321546 - DNA, 100 bp, Homo sapiens
atcatcgacagtgccttcggccagagcggcaagttcaagatccacatcccaggttgaaatcacaaagattagacacctttttagataggtgttcttcagc

SEQ ID NO: 321547 - DNA, 99 bp, Homo sapiens
gtaacattcaaaaactatattaaaaggaactggagaattgtggcccgggagagtggcccaccccacatgaagaactttgtgaccaaggtttcggttggg

SEQ ID NO: 321548 - DNA, 75 bp, Homo sapiens
ggttgtctgtctgtccatccactcaggacatctgcagctgttcaacggttttgtgtatagcatttgaggttcttc

SEQ ID NO: 321549 - DNA, 90 bp, Homo sapiens
gcgggagtcgcggcagctccgctcccagagacccaggagttgggcccagcgtccctcccggaacggaattgaatgatctggcacgggacc

SEQ ID NO: 321550 - DNA, 100 bp, Homo sapiens
tcgtggcctccctactaccactcagagagtcggtctgcgcaggcatggcactaagtgtcccatggcacatttggccctcatggaggcctcaaaagggcag

SEQ ID NO: 321551 - DNA, 75 bp, Homo sapiens
cttgtatatactttgccactggaaaggacaaatacatttccagatcttgtggagaattttgatgaggcttccaag

SEQ ID NO: 321552 - DNA, 101 bp, Homo sapiens
atttaaacaagagatttccacagaagaggaatgtttgctgggggattgaaggagatggaacaggaagaggtcctgatccacggtgtgtcctacaatgctat

SEQ ID NO: 321553 - DNA, 119 bp, Homo sapiens
ggagcttggtggagcaggagcggctgggcatcctcctgagactccggggtcagacgcccactccagactactgtcagaggatgtaggaatggacatcccctttgaagagggcgtgctga

SEQ ID NO: 321554 - DNA, 75 bp, Homo sapiens
gcaactctgatgtggagttcttgaagcaactaagagtgatcagcagctggactgtgccttggacctaatgaggcg

SEQ ID NO: 321555 - DNA, 98 bp, Homo sapiens
cccagggaagaacatctactataaggagccccccaaggttgccaaatgcacagccaagcctagcagctcgggcaaggatggtggaggcgagaacactg

SEQ ID NO: 321556 - DNA, 99 bp, Homo sapiens
ctcagcgatgctgacgtgcaaaagcagccttcaccagcacaggctttgaccgtcacacttctccagtgttcagccctgccaatccagaaagctcaatgg

SEQ ID NO: 321557 - DNA, 95 bp, Homo sapiens
aggatgtggactcgggacagcatgatgagcagaaaggacccagggaagagatcgtctacctgccctgcatttaccgaaacacaggcactgaggcc

SEQ ID NO: 321558 - DNA, 96 bp, Homo sapiens
gagctgaatgactcaagtctggacctgggacccactgcaggtgaccattgtgaggtagatattttgttctaattttccagatgaggaagctgagac

SEQ ID NO: 321559 - DNA, 74 bp, Homo sapiens
agagaccatttttcccaatactttatgtaataaggatcactactcttggaatcaaagataaatccaaatactgc

SEQ ID NO: 321560 - DNA, 97 bp, Homo sapiens
gcacattttacaatatgggataagctattggaaagatctcggaaaatgcccctgcccttgatggatcagctggcaccacccagattgataaactggc

SEQ ID NO: 321561 - DNA, 98 bp, Homo sapiens
tccgccggctactgccgcttcagttctcccggtgtggccacgagtcgggttgaaatcacaaagattagacacctttttagataggtgttcttcagcac

SEQ ID NO: 321562 - DNA, 49 bp, Homo sapiens
tatggaaggaaacccaatcccatacctgtttccgaagtttacactgtgc

SEQ ID NO: 321563 - DNA, 100 bp, Homo sapiens
agggctcattgtacagtcaaggcggcaggaggaatatcacaaacgggacttcacggaggtgctctctcccaatatgtacaacagtaaactctgggaagcc

SEQ ID NO: 321564 - DNA, 74 bp, Homo sapiens
accacagtccttctgcagtccctcgtccagccacccccagctgctacaggagctgagagaccctaccctcactt

SEQ ID NO: 321565 - DNA, 100 bp, Homo sapiens
cggcgacagcagccaggagtcatgagcgacagcggcgagcagaactacggcgagcgggtggtacatgccagagtcctgctctcccggcccttgtccgtcc

SEQ ID NO: 321566 - DNA, 74 bp, Homo sapiens
ccaaggggggcctggccagcctggcaaaagatgctatcatggtgaacttacttcagattgtgcgggaccactgg

SEQ ID NO: 321567 - DNA, 84 bp, Homo sapiens
ggagagcacgccatgaaggcctcgggcacgacttcccaagtaagaagcggaagaggagccgctggaaccaagacacaatggaac

SEQ ID NO: 321568 - DNA, 100 bp, Homo sapiens
gagcagatcctggaggatgtgcggggtgcgccggcagaggatccagtgttcaccatcctggccccggaaggtggaagcagggaaaggcctggagatgagg

SEQ ID NO: 321569 - DNA, 74 bp, Homo sapiens
tagattttcatataaagggaaaagatgcccaacatgtcatagttggatggcaagcatgtggtgtttggcaaagt

SEQ ID NO: 321570 - DNA, 117 bp, Homo sapiens
gagcctcagttggaagcagccgatccagcctgcggagcctgtggggcagagccagagcccagaggtggagcagttagggagggttgtggaactggacagtgacatggtagatatcac

SEQ ID NO: 321571 - DNA, 75 bp, Homo sapiens
agaacagctgtggaaagaagttgcaaaacactggtaaggtacctgccgtgggcagatctgagctttcttcttgga

SEQ ID NO: 321572 - DNA, 83 bp, Homo sapiens
cggtcgtcggtggggtcggagctgggcgcggagcccctcacagtgcagcctgatgttcaccaaggtgaagctggagcaggtgc

SEQ ID NO: 321573 - DNA, 89 bp, Homo sapiens
cgcgcgcatctggctgcagctctgcggggcgcaggaggcggtgcacagcgccaagaaatgggacgtcggtcatcagatactgaagaaga

SEQ ID NO: 321574 - DNA, 100 bp, Homo sapiens
ctgcaggctctggggagtcgccatgaactgccattggatgtccagaatcccctgtagttgataatgttgggaataagctctgcaactttctttggcattc

SEQ ID NO: 321575 - DNA, 100 bp, Homo sapiens
ctcaggagtcatttctgttccgcacaggcctgctgaactgggtgctttatataggatatgaattgagaattcgttatttgccaaaaggatttctaaacca

SEQ ID NO: 321576 - DNA, 98 bp, Homo sapiens
tatttggcaagaagcagatgcgcattttgatggatagcaaagccattgtggatgggaacctgaagctcatcttgggtctggtgtggacgctgatcctc

SEQ ID NO: 321577 - DNA, 83 bp, Homo sapiens
ctttggcccccagcgcagtaaggcggtgagcctctccgtcactgttctgaagactgaagtcccacatcaaggtgtccgcaggg

SEQ ID NO: 321578 - DNA, 90 bp, Homo sapiens
cttgttcccccaaatgtctgactctgactctcggactgagaaacgcaagactgattcttgctattccaaatcctcttccacgttgacagc

SEQ ID NO: 321579 - DNA, 111 bp, Homo sapiens
tgaggaagtactgagcctgttggaggaactggcccggaaacaggaggacacagccctcagcgcctttttccaggagaccaacatcccctacagccaccatcaccaccagat

SEQ ID NO: 321580 - DNA, 100 bp, Homo sapiens
cctcatccttccttttctcggggctcccgtggatcgacgacatcgcggatggcgccgtgaagcccccacccaacaagtaccccatctttttctttggcac

SEQ ID NO: 321581 - DNA, 100 bp, Homo sapiens
gtgacttacaattggattcaagataaatgtgttcctcttgtccgagaaataacatttgaaaatggagagccagcccccggcctcccccagcacacaggaa

SEQ ID NO: 321582 - DNA, 83 bp, Homo sapiens
tcaagggcttggacctccttgagaaggctgccgaaatgttatcgcagctcgacttgttcaggccaatggaagcagtgctgtga

SEQ ID NO: 321583 - DNA, 82 bp, Homo sapiens
ctctctcatctcgctcggctgcgggaaatcgggctgaagcgactgagtccgcgatggagtgtactaatggtcacttgatgtg

SEQ ID NO: 321584 - DNA, 100 bp, Homo sapiens
atcagaactgctaaaggagagaagtttgtcatgcaggaggagttctcaggtgctgatactcaaagaaggtttaagttgtctgatctctctataaattcca

SEQ ID NO: 321585 - DNA, 98 bp, Homo sapiens
gaagatacatccatgatagaaaaacttctttcacatggtacaaatattgaagaatgcagcaagggtgctttcttctgcgacctggtactcatctacct

SEQ ID NO: 321586 - DNA, 106 bp, Homo sapiens
cggccgaggctgcccagaggcgcctcctccacaccccccgccgcagcagcaccggcgacagggggatatgagactttctactcggaatatcctgagtgttgcgtgg

SEQ ID NO: 321587 - DNA, 88 bp, Homo sapiens
tatcagccgaaccaagtactgggagctctctgatgtaaaggatggagtaaatcaagcagcacctgcatttggatttggcagcagtcaa

SEQ ID NO: 321588 - DNA, 82 bp, Homo sapiens
cgaccctagtgctcgtcgccgtggcgccatgggtgttgtccgcagccgcagactgtgccctgtccacggtgcctcctgcatg

SEQ ID NO: 321589 - DNA, 75 bp, Homo sapiens
agaacctcaccatgccgggcctcaggttcgacaacatccaggatgatccagattccagtaccagtacattaggaa

SEQ ID NO: 321590 - DNA, 76 bp, Homo sapiens
gtcacacacggtcctaagagctgggcaccaggaagcgaaggctggatctatctggttcaatagatgacctccccat

SEQ ID NO: 321591 - DNA, 90 bp, Homo sapiens
tagcatcagtgactcacaaatcagcaacacagaatttctgcaagtaattggaggtggaatttaattctcctccccttgaatatgggctgg

SEQ ID NO: 321592 - DNA, 100 bp, Homo sapiens
tgcggacgcggagctgggccagctccgagcccagggtggcagcagtgacagcagcctggctctacatctcgttagaactgtggtgcgccatcacgaggag

SEQ ID NO: 321593 - DNA, 50 bp, Homo sapiens
gctgctattctccgagcttcgcaatgctacgtcaaaagctacctcctccc

SEQ ID NO: 321594 - DNA, 98 bp, Homo sapiens
cacaacccctgcactgataacgtctgttacaggctccctgactggcagtcctcacctttccgagctgtctgtgaactcgcaggggggagtggcccctg

SEQ ID NO: 321595 - DNA, 75 bp, Homo sapiens
caatggtcagatattgaagagttctgcaatcctccaccaggtgctggttcagctccaggctggcgagaaggagca

SEQ ID NO: 321596 - DNA, 90 bp, Homo sapiens
cccatttctcctcctttgacagggacatcagtggagccttctcagacccacagaaccgggctgtgggtcggcccaaggggaagctgggcc

SEQ ID NO: 321597 - DNA, 74 bp, Homo sapiens
gcctcccagccgtgcttcctgttaagcctgtgaaactgtgcgagaagatgtactaaattcattgaataacaact

SEQ ID NO: 321598 - DNA, 75 bp, Homo sapiens
aagaatgattcagattttgaagctaaagttaagcaggtaaactttcctgagaatggctttctctctcctgataaa

SEQ ID NO: 321599 - DNA, 75 bp, Homo sapiens
cgtggctgtggagaaggcgctccggggcgaagcaggtcaacaacggttccagcctcagggatgagtgcatcacaa

SEQ ID NO: 321600 - DNA, 75 bp, Homo sapiens
tggacctcagctacccccgcacccacgcggccctgctgaaagtggcgcaaatggaactgtggaaggtgcatcagt

SEQ ID NO: 321601 - DNA, 83 bp, Homo sapiens
aatttgatgaagtttttacaaagaaaatgattgagtctatacctctcactcctgcctggtgttccaacccgttctgtggccag

SEQ ID NO: 321602 - DNA, 98 bp, Homo sapiens
ataaatacatgatacaagatcttactgagattggttgcacttacatttcaatcgaccaagttccaaggacctatgccataatgataagcagacccgcc

SEQ ID NO: 321603 - DNA, 83 bp, Homo sapiens
cagcagagacgcgaaggagaggccctagaaccgttgggaaaagtggaaacattccagcaggcacgactgtggacacgaaaatc

SEQ ID NO: 321604 - DNA, 95 bp, Homo sapiens
ggccgccgtcggcagcaagaacagagagagaggtggacagatctgagagatactgagggtgtcttttatgaataatcaaaagcagcaaaagccaa

SEQ ID NO: 321605 - DNA, 100 bp, Homo sapiens
cgggatcccagcctcaggcctgcacggacggtgttggttgggtggcaaaaatagaatgtttgaagtcattggagagaccctggagcacgatttcccaagc

SEQ ID NO: 321606 - DNA, 76 bp, Homo sapiens
ctgagattccaggaggaagtactggcgaagtgctccatgatccatccttttacaatccctgctattattcgtccat

SEQ ID NO: 321607 - DNA, 134 bp, Homo sapiens
ggaaaacctaaccatgaagacttgaacttaatacagcaagaaagaccatcaagtttaccatgtcatcttgcattacaacatataagaagacaccacctccagtcccacccagaactaccacgaaacctttcatt

SEQ ID NO: 321608 - DNA, 82 bp, Homo sapiens
cggagtccttggggacggagcagcgcgtcgtggggcgagcggcagggcgaccattgacgaggtggagacggacgtggtggag

SEQ ID NO: 321609 - DNA, 90 bp, Homo sapiens
gctgttttcgacaggtgtgcaggtttcggcacatggagattgatcaatgggtagaaggcctgagatcaatcatacacaacttcagggcca

SEQ ID NO: 321610 - DNA, 88 bp, Homo sapiens
ttgaagaatgattcgtgaatccggaatgggtgacagcgtcatcacggcattttattggcctccccatggccacccatggaccagtcgg

SEQ ID NO: 321611 - DNA, 74 bp, Homo sapiens
atatgttccagttgcacatttcctgcaaggactccaaagtggtgagcttcttggacacttaatgattgttggca

SEQ ID NO: 321612 - DNA, 75 bp, Homo sapiens
tgggagccgttatgccaaggcttgatgccttcaattaagttgcagagttctgatggagagatatttgaagttgat

SEQ ID NO: 321613 - DNA, 50 bp, Homo sapiens
cagaaaatctctgtcagaactgctgcagaaccttggcctgaaaatgctac

SEQ ID NO: 321614 - DNA, 90 bp, Homo sapiens
ctccaagaaacatcattcacccatactgactagtttcacatctctttgaattggggggttctatgctctttccccataccccggtctccg

SEQ ID NO: 321615 - DNA, 100 bp, Homo sapiens
ctcgccgctgctgccgccgccgccgcccagagactgctgagcccgtccgtccgccgccaccacccactccggacacaggccgatgctgctaccagctttc

SEQ ID NO: 321616 - DNA, 100 bp, Homo sapiens
tcggtgtcagcatgcagcgcatatcatcagcgagctgattcttacagcccagcctgtctctcttgctgatcgagaggtgatatcccggcttcggaactgc

SEQ ID NO: 321617 - DNA, 75 bp, Homo sapiens
aagatcgacagcttaagagataagttcttccctgtggaacagtagagacctagtctgccttctttcacaagataa

SEQ ID NO: 321618 - DNA, 100 bp, Homo sapiens
cggcggcagcccaggctgccgcgcagagcccggattccgcgactgccggggcaccgcaggttttggactcgctgaagcgacaaatttacatgtattggag

SEQ ID NO: 321619 - DNA, 75 bp, Homo sapiens
cagagtttctacaaatgctagaagctatcaaagcccttgaagtcaggggaagatggtgaaaggaatgggaggtgc

SEQ ID NO: 321620 - DNA, 75 bp, Homo sapiens
catttcagacagcaaaaggctggaagatgtctttccggcagacattgggttgatgataattagaagcatgctttc

SEQ ID NO: 321621 - DNA, 96 bp, Homo sapiens
ggctactcctactcctgcatggccctcagggtacagctcaaggagagctctttctggatgatgggcacacgttcaactatcagactcgccaagagt

SEQ ID NO: 321622 - DNA, 98 bp, Homo sapiens
aacgatggcctctcttttatctccagttctgtcatcatcaccaccacacactgtactggtgaattttcagctcgtttccttttgaagctgcccgtaga

SEQ ID NO: 321623 - DNA, 100 bp, Homo sapiens
gtacctccccctctccggggacccgagcagccagccagccacctaactcctcaggtcagccccagttgatgctgacagcaggacccagtgttgccgtccc

SEQ ID NO: 321624 - DNA, 101 bp, Homo sapiens
cttcttagtgaggctcagaggtgcttgtaccgtgatgtgatgctagagaacctggctctcatatcctcgctggcaaatggaactctgatttaaacagctgg

SEQ ID NO: 321625 - DNA, 98 bp, Homo sapiens
ggcagaacacagcagggcggaggaaagtgcagttgtcatggatgcactggtagaagatgatatctgtattctgaatcatgaaaaagcccataagagag

SEQ ID NO: 321626 - DNA, 58 bp, Homo sapiens
tacaggaacaatattgatgatgtagtaaggctattcagcttgaccctgaagaaactcg

SEQ ID NO: 321627 - DNA, 100 bp, Homo sapiens
tggagtaaccctcactggagaatccagagtcctgacacagctctccctgaggagcagccacattccagctcccagtgcgcccctctccactgtctctcca

SEQ ID NO: 321628 - DNA, 96 bp, Homo sapiens
tcaagaaatcaagtacttcagtaagagatgggaaagctacatccatattggaattttaccgggaacttggattgccgccgaaacagacagttaaaa

SEQ ID NO: 321629 - DNA, 100 bp, Homo sapiens
aagggaattaatttttccatctaattatgacctccttcgccacttacagtatgcaacacattttcctatacctctgactggtcgaattgacaaatcttac

SEQ ID NO: 321630 - DNA, 83 bp, Homo sapiens
cgaggagctcatcgggcagattagcgacatccgagtgcagaacctgcaagcagttggaattgatcacaccttttcagttgtac

SEQ ID NO: 321631 - DNA, 110 bp, Homo sapiens
ggagactgtaatttgggagatgaagcctcgagcctaaggcgctctcaggtccatggggatatgagactttctactcggaatatcctgagtgttgcgtggatgtaaaaccc

SEQ ID NO: 321632 - DNA, 75 bp, Homo sapiens
acatcagcgttctgcgtcatgggggagtgctgatcaactaaaagagggaattcagtttctaatagaaaatgacct

SEQ ID NO: 321633 - DNA, 98 bp, Homo sapiens
atgcacaaatgaatggtaggaaaattactctgaaaagagaacaagagagtgagaaaccaagccaagagggtgctcgagaggaagacctcgatgctgtg

SEQ ID NO: 321634 - DNA, 80 bp, Homo sapiens
agccacaaaaaatggacttgactatgcactcaggggcaagctctgtgtgattgattggaagacatcagagaaaccaaagc

SEQ ID NO: 321635 - DNA, 96 bp, Homo sapiens
tgaacattcacctgtttattaagacaatgaaagcacctctgttggtgactctgacatcattagaagcatgccagaacagactggtgaaaagtaaac

SEQ ID NO: 321636 - DNA, 75 bp, Homo sapiens
gattctcgtgcctcagcctcccagattatctttgacaataaagctcacagtggcaaaatcaaaatctattttgac

SEQ ID NO: 321637 - DNA, 89 bp, Homo sapiens
ctaagagtcacccaaacaatcggctgagaatgagaagagaaattgttccaactgctggtgttctgcaagatggagccaggaggagagcc

SEQ ID NO: 321638 - DNA, 82 bp, Homo sapiens
tccagatgcagtttcgaaaatggaagagagaagggcacagttacctaagtatcaacgtaatcttcctcggccaggacaggcc

SEQ ID NO: 321639 - DNA, 90 bp, Homo sapiens
tgccagccactgacagcaacaagcagaacctgcggcagtactttgaagaggcttttgagttcattgagttttgcggcctccaggtggtgg

SEQ ID NO: 321640 - DNA, 105 bp, Homo sapiens
ccaggttttataccatgtattttgaagaacctgattcctctggacatgcaggtggaccagtcagtgccagaaacttcagtgaagatttcatacattggcctcatg

SEQ ID NO: 321641 - DNA, 100 bp, Homo sapiens
atatattgactactgccacaattccgatggtctgtcttctgctgatcccaactctgattggaatgcaccagcagaagagtggggcaattgggtagacgaa

SEQ ID NO: 321642 - DNA, 101 bp, Homo sapiens
ttagtgctctggtctctgacccttgcagtcttcagtcgtcctcttgagttctggcgccttgactactgggaagatgacttgcggcgccggcgacgatttgt

SEQ ID NO: 321643 - DNA, 100 bp, Homo sapiens
ggcggcagcggcggcgcggaggcggctgaggtgcgagccgacctaatctgggagcctgcaagtgacaacagcctttgcggtccttagacagcttggcctg

SEQ ID NO: 321644 - DNA, 100 bp, Homo sapiens
cgcgaacccctctgggatccccgccgctctgtctacaacccgagcaaattgtggctactaatttgccccctgaagatcaagatggctctggggatgactc

SEQ ID NO: 321645 - DNA, 101 bp, Homo sapiens
gacagatgtgatcattgagaccatgaagtccaacccaggaggcttttaggcgtttgggtaatggggtgtctgatgacctgtcaagtgaagaagatggtgaa

SEQ ID NO: 321646 - DNA, 75 bp, Homo sapiens
ctggccgcgccgggagcggcgctggccccaaggcgctgccctgcgcaggaaggccaatgatgaggccaatcagag

SEQ ID NO: 321647 - DNA, 75 bp, Homo sapiens
ctacaactcttctacatgtaagaaagcatttgatgaatacagaaatatcagccaaaaggacattgtggacagcat

SEQ ID NO: 321648 - DNA, 75 bp, Homo sapiens
atgaagaagtcaaggttgcccccaggcggtccttcctgggtgttgacttcaaaatcaaaactgtagagctaagag

SEQ ID NO: 321649 - DNA, 100 bp, Homo sapiens
caacgacgccttcccggaggagtacgtgcccaccgtcttcgaccactacgcagggagtaccctgacttctaccggaagctctacggcctcttggacccct

SEQ ID NO: 321650 - DNA, 82 bp, Homo sapiens
tactattatgatgagtacctgggtcactgcatgtgggaaagcaggcaggatgggagagtcgccgatagaaccacctcttccc

SEQ ID NO: 321651 - DNA, 51 bp, Homo sapiens
gtggtctttagtggaaaaaaaggcttcgggagcaggaaagaaaagaagcag

SEQ ID NO: 321652 - DNA, 75 bp, Homo sapiens
tgggagggagccgcgcgcctttgtgcgcgcgccgagggcaagttaaagtcttcagagccctgtatacgtttgaac

SEQ ID NO: 321653 - DNA, 97 bp, Homo sapiens
ctccaggccaggtgccgcgcggcctccacctctgcgaggagctctacggtgactttgaagacttggaaacaggggacgtgcacaagggaaaatcagg

SEQ ID NO: 321654 - DNA, 99 bp, Homo sapiens
cccgaaggacggacacctgctgatggacgggggctacatcaacaacctcccaggacgaggttagccagccgctggctgcaccgccctccaagatccacg

SEQ ID NO: 321655 - DNA, 82 bp, Homo sapiens
aagaagttcagagctacatcaggaagagaacagcggaacatgaggcagcacagcaaggcagataagttgctgtcacaggatt

SEQ ID NO: 321656 - DNA, 117 bp, Homo sapiens
gctgcacccacgaatctgcccacccctcctgtaacccagcctgtttcacttcttggccttccggagcagtactacagcctcacctggttcctgagccccatccttggcctcatcttc

SEQ ID NO: 321657 - DNA, 50 bp, Homo sapiens
taagaagggcggtatcgggttcaagatgggttgttgttgtcccagagtcg

SEQ ID NO: 321658 - DNA, 82 bp, Homo sapiens
agtttgtaagagaagttctagaaaaatgtatgaggctttcgggtcacctccagcagctcccagttcagctcacgtgattcgg

SEQ ID NO: 321659 - DNA, 90 bp, Homo sapiens
gggacaccccggaagctgggaaatgctttacctgctgttcctgagccttacgctggccactgtcaacgcccgctggctggaaccccgcac

SEQ ID NO: 321660 - DNA, 83 bp, Homo sapiens
cttgcggtgaggctgcgcggggccgaggccgcctccgagcgccagacaatgcagatcttcgtgaagactctgactggtaagac

SEQ ID NO: 321661 - DNA, 100 bp, Homo sapiens
ggattactagctgtaattgcaaataacatcattaccattaacaagtggaaattgcaacactaacaagagagaatggaaagacagtaatcagagttctcaa

SEQ ID NO: 321662 - DNA, 51 bp, Homo sapiens
cagcaatgaatgagcgttccagcttctcctggtcgtttttgatgctcgatg

SEQ ID NO: 321663 - DNA, 99 bp, Homo sapiens
gtgtgacaccagctggactcattgtgtccattgctctcttgcagcacctggggctcatgggaaacatgccctgaactgtcacagaatgaaaccagcgct

SEQ ID NO: 321664 - DNA, 108 bp, Homo sapiens
tctcaggaaggcaagcagcagtatctgcagtccatagaagagcgtgagaaactgatccagatgcagaggtgtgccttcatgtactgaggcttgtccagtctgtggttc

SEQ ID NO: 321665 - DNA, 100 bp, Homo sapiens
gaaggcgctcagcgagtttgccctccagagcgacctggaccaacccgccttccaacagctgcaagagtgagccatggagctacgtgtggggaacaagtac

SEQ ID NO: 321666 - DNA, 74 bp, Homo sapiens
tccagcgagaagttgagggagaaaggcgggcccgggaacagggatcccaacggcttcaatgactggaccttctc

SEQ ID NO: 321667 - DNA, 101 bp, Homo sapiens
gaggagaggagcggccggcccgcctccatggcaatgacaggctcaacaccttgctcatccatgagtaaccacacaaaggaaagggtgacaatgaccaaagt

SEQ ID NO: 321668 - DNA, 75 bp, Homo sapiens
cagctgcaccggaccaccaacagatcctgcagctcctgaaaggcaagctggtggtgggtcatgacctgaagcacg

SEQ ID NO: 321669 - DNA, 100 bp, Homo sapiens
caatgttcagcacactcaggttctttgaaggattttgcctggctggaatcattctcaccttgtatgctttacggtacagctctgccggggggggaaaaag

SEQ ID NO: 321670 - DNA, 99 bp, Homo sapiens
cttttttgtttttaaaattaaaagttaaacccaggaagctttggatcagacttttgtgttgcagttcggtcactgtatatatgccttatttcctgggtc

SEQ ID NO: 321671 - DNA, 100 bp, Homo sapiens
cagcagccaataggacatgatccaggaagagcagtaagggactgagctgctggaggtgtcattaacttgtcagtacctatagttctgactgcgactcatg

SEQ ID NO: 321672 - DNA, 100 bp, Homo sapiens
ccgatgggaaacccggagaccaaatccttgggaccagttactctccacaagaaaattcacacaaccacagtgctcttcatagttcaaattcacattcttc

SEQ ID NO: 321673 - DNA, 74 bp, Homo sapiens
ctgggctggtgaagtacatgaactcagggccggttgtggccatgttctgggaggtgatcagtgatgaacatggc

SEQ ID NO: 321674 - DNA, 74 bp, Homo sapiens
ctctctgggcggccacctatgagacttcatctgtgtggttctgtacagagtaatgagatgtgtgacggctgcaa

SEQ ID NO: 321675 - DNA, 101 bp, Homo sapiens
acaacgaaggtgaagccacggaagataagacgaagttatacggaagcgtctcctcattgatggagatggtgctggagatgatcggagaattaatctgctag

SEQ ID NO: 321676 - DNA, 100 bp, Homo sapiens
tttgaagaaggtggtgatgtggacgatttagtaatagcctgcagctggtgttttgagaagccctactgctgaaaacttaacaattttgtgtaataaaaat

SEQ ID NO: 321677 - DNA, 82 bp, Homo sapiens
ggaaaagtctggcctcggcgccaagatcccagtcacaattatcaccgggtatttagcagcccctgtcaaagggaacaggaag

SEQ ID NO: 321678 - DNA, 75 bp, Homo sapiens
ggcggctggcggaccctgctgtcactgactttccagggggggctgtcggggggctgttaggtgcctggatgacaa

SEQ ID NO: 321679 - DNA, 98 bp, Homo sapiens
aaggttatctcctcagccaacagagctgtggttggttcccatgatcagtggtgaaatatagtgattttcacctgtgcttccattctgaagttctggaa

SEQ ID NO: 321680 - DNA, 98 bp, Homo sapiens
gagctccagccgaaggagaagggggagtgatcagcagctggactgtgccttggacctaatgaggcgcctgcctccccagcaaatcgagaaaaacctca

SEQ ID NO: 321681 - DNA, 98 bp, Homo sapiens
caattgaaaatgaatgaatgtacacacctcattgtgcaagaaccaaaagatcaaatgaatgcttcaggaccaattaaagagaagatggggatattcaa

SEQ ID NO: 321682 - DNA, 100 bp, Homo sapiens
ggaagcgtctcggagacagtctgcgaccggacgggtctaggtgagacagaagccaaacaggaggaggaagtggagggtgaacagccatataccaggaata

SEQ ID NO: 321683 - DNA, 98 bp, Homo sapiens
tgcaaggtccaaatctcagcaacccctgtgcttctccccaggtccagccaatgcattcagaagccaaaatgtttggaaattttagcattcaggtgcca

SEQ ID NO: 321684 - DNA, 75 bp, Homo sapiens
catgatggaccccaactccacccagcgctaccggctggaagccctcaaggacccagatgatgtggtaccagttgg

SEQ ID NO: 321685 - DNA, 108 bp, Homo sapiens
tgtgtcaaaagagcttctctccagagtagaaaggtactccaaagattcaggtttactcacgtcatccagcagagaatggaaagtcaaatttcctgaattgctatgtgt

SEQ ID NO: 321686 - DNA, 95 bp, Homo sapiens
gaaaacatccacaatcagaaccctgaagaactttgtacttcccccaccttaatgacatctcagggctcacccttcagaggacaatgacttttaca

SEQ ID NO: 321687 - DNA, 90 bp, Homo sapiens
gtggtgctgaccctgtaacccaaaggaggaaacagctggctaagctcatcattgttactgatggtaaacctatgctacgccagggagata

SEQ ID NO: 321688 - DNA, 98 bp, Homo sapiens
tgtcccaggtgcaggagctcttccatgaggcagcccagcagtgctgaagctgctgaaagatggcagaagaagtggtggtagtagccaaatttgattat

SEQ ID NO: 321689 - DNA, 101 bp, Homo sapiens
acggaacttgccgcgtcgaggactgtcgggcacaactccagatgttccgagctcagtggatgtttgaacttgctccaggtgtaagctctagcaatttagaa

SEQ ID NO: 321690 - DNA, 89 bp, Homo sapiens
cctcaacaccagcaccgcagatgttgtcaaggtggcctaccaggaggccaggggtgtcgccatgacgcatcttctctccagactgccga

SEQ ID NO: 321691 - DNA, 83 bp, Homo sapiens
gtttgagagtgggaacatgacgcaggatttttagactctgaggagcagttggagctaatccacattatggaaatggaaaccac

SEQ ID NO: 321692 - DNA, 76 bp, Homo sapiens
atcgtcagcatccgcgtgtggggcgtgggccgcgacaatggccggtgtgccacgtcatcaccgaggtgaaatctgg

SEQ ID NO: 321693 - DNA, 75 bp, Homo sapiens
accatggaccatcctgctggtcagcactgcggctggagctcgtgtaaatgccaaggacaacatgtggctgactcc

SEQ ID NO: 321694 - DNA, 100 bp, Homo sapiens
tggaaagctgcttaccaccactttcagaggtacagtgacgtccgggtcaaagctgccactgcagagccccgccatggaagacacgccgttggtgatatcg

SEQ ID NO: 321695 - DNA, 98 bp, Homo sapiens
atatgggtcatcctgtagcagattgggtttcaaaaattcggatgtaaacattgacatccagtttccagccattgcattgaacctggccacatcccagg

SEQ ID NO: 321696 - DNA, 100 bp, Homo sapiens
tggttgggagcagatcgattttaccttggataccctgctttggagtcacctaaggtcctgcgagtacaagggtcgacccccaaaggcaggggcagagcca

SEQ ID NO: 321697 - DNA, 83 bp, Homo sapiens
gacgcggctttcggcaagaactggattcgtggcgccacaagctcattcactgtgtagagaaagatgctggtttcgagttttgg

SEQ ID NO: 321698 - DNA, 100 bp, Homo sapiens
gcgagctgagtggttgtgtggtcgcgtctcggaaaccggtagcgcttgcagcatggcccagattgccttcctgcagggagaaaggaagggccaagaaaat

SEQ ID NO: 321699 - DNA, 154 bp, Homo sapiens
taggcaccaagaactaacacatcctggagctgcccggagttccgctcctgcgggcttagcaggaaagggtgcctaaggtactccaaagattcaggtttactcacgtcatccagcagagaatggaaagtcaaatttcctgaattgctatgtgtct

SEQ ID NO: 321700 - DNA, 76 bp, Homo sapiens
ggaatggatatgattaagcaggagggagacacaacacgggggatttgtattttgagaaagctgtgaatggtttcct

SEQ ID NO: 321701 - DNA, 83 bp, Homo sapiens
aaaattctgaactcaggacttggcaactatatgtgagacagagcctgaacagcctgttcgacattacccattatgggtaaaag

SEQ ID NO: 321702 - DNA, 77 bp, Homo sapiens
gcgtcgaagacatggaccagggctacggagagatgcctcggcagtggaatccaatttctttccagccacaacctacc

SEQ ID NO: 321703 - DNA, 100 bp, Homo sapiens
ggatgcaggaggagagcctgcaggcgccatcatgaccgggtcctataacaacttcttcaggatgtttgatagagacacgcggagggatgtgaccctggag

SEQ ID NO: 321704 - DNA, 90 bp, Homo sapiens
atactttggttacctatgtacctgttaccactttcaaaattttagagaacaacttgtaatggagccttcatctcttgagctgccggctga

SEQ ID NO: 321705 - DNA, 106 bp, Homo sapiens
cctgcctcctgttccgcttctcagaggacgccttcaacaccaccttcatctccaccatcggtcaaaatgcagatcttcgtgaaaacccttaccggcaagaccatca

SEQ ID NO: 321706 - DNA, 100 bp, Homo sapiens
cggcactgaatcactatcagataagagtgccgagaagccctcctatgacactgaaacagatcctagtgagggattgatgaatgttctaaagaaaatttat

SEQ ID NO: 321707 - DNA, 85 bp, Homo sapiens
ccagagcaatggccgctgagaacagcaagcagttttggaagaggagcgctaagctgccggggagtactatactggcaattgctgg

SEQ ID NO: 321708 - DNA, 75 bp, Homo sapiens
atggaagtgttatgatgcccttcgaaaaatgatcaactattgaccatataggtgcccttgctcgtgtgaatgaac

SEQ ID NO: 321709 - DNA, 82 bp, Homo sapiens
gggaccggaggagacatcggcctctgcaggcttgccgaagaagggaggtggctattatcatggaaaactaatttttcccaga

SEQ ID NO: 321710 - DNA, 100 bp, Homo sapiens
acctgatgacccacggccgcatggtgccgagagggacaggcttctccggaaggaacagattttagctgtggccaggatgcgggctccgggtgcgggcgcg

SEQ ID NO: 321711 - DNA, 90 bp, Homo sapiens
gcttatcacaactctgtagaatgtttgcaaatgttaattaatgcaggccgccccatgaacattcagcttgtcacgtcacagattgacgca

SEQ ID NO: 321712 - DNA, 100 bp, Homo sapiens
attactaccagggccggaggattaccatcaccggaaagcgtcgccaacatcatgccctaaactggcatccggccttgctgggagaataatgtcgccgttg

SEQ ID NO: 321713 - DNA, 82 bp, Homo sapiens
tgatattgaagcaatgcttgaggctccttacaagaagtcttaggaaaagtcctcagtgctgtgggcagtgcccagctactga

SEQ ID NO: 321714 - DNA, 83 bp, Homo sapiens
ctaattgtatgggacccatctgtataccactcagatatcccaaaggaggattccctgggagcacccaccagctgagatctgca

SEQ ID NO: 321715 - DNA, 76 bp, Homo sapiens
ccgcgatgtcaccattgttcagctgggtggccaaggtaaaaatgcatttgcaaagggagaaaatgaaggccaaaca

SEQ ID NO: 321716 - DNA, 80 bp, Homo sapiens
taactgcccagtggcttccagatgtaaccagagctgttccagacaactataaggtgatttttctgcaaggaggtgggtgc

SEQ ID NO: 321717 - DNA, 100 bp, Homo sapiens
gtaagaagaggtcccaatcccccactctttccgccctaatggaggtctccagtttcgttatttctcaaactctgaggctgcggagttcacacattgaaat

SEQ ID NO: 321718 - DNA, 97 bp, Homo sapiens
cgctgccgccgctctgaggagttaaagtgtacctcggtatgatcaaccacctcctgtcacataccagccacagcaaactgaaagaaatcagtccctt

SEQ ID NO: 321719 - DNA, 90 bp, Homo sapiens
agaggggacagaggcaccaaggacctccaagacagacaaaacctgctacaaccccctcttcaactacgaggacatgcaggagatcaccca

SEQ ID NO: 321720 - DNA, 75 bp, Homo sapiens
ctgcttgacatctctgctgtagtggacaaagatttccttgataaggctccacagagagctgcaacaccaccacag

SEQ ID NO: 321721 - DNA, 74 bp, Homo sapiens
ctttgctgagcacatcagtgatgaatgcaagaggcgtttctataagaattggccctttctggttactgtggctt

SEQ ID NO: 321722 - DNA, 98 bp, Homo sapiens
cgggttcagaagaaaacgttcaccaagtgggtcaacaagcacttaatgaagacttagaaatggctgttgcgtattggaaattagtgttatctggaagg

SEQ ID NO: 321723 - DNA, 104 bp, Homo sapiens
ggagaggacgggactgccaagagacatgttagaaggacaagttgtagacactcctgggatcctggaccaccctctggaggataggaacaccatcgagatgcagg

SEQ ID NO: 321724 - DNA, 99 bp, Homo sapiens
cggaaggacaccaagatgcggatccgggcctttccggagttcaaagaaggacgcagagccagccacacagccccacaggtcctctttagccacagggaa

SEQ ID NO: 321725 - DNA, 101 bp, Homo sapiens
cataagcctcttcaaggagggaaaagaaagaatgtatgaggagaattctcagcctaggatctagtgaaaagccatttgatgtatgcggtcagagaagaagt

SEQ ID NO: 321726 - DNA, 157 bp, Homo sapiens
cagcagcagttccccctgtacagcctgatcactccccagacgtggtcagcaacgcacagctatcttgacccacccttggatatctatagagaaatggggtttggtcactatgaagaagaagaaagctgttgggagaaacaaaagagtgaaaagagag

SEQ ID NO: 321727 - DNA, 75 bp, Homo sapiens
tgcggaaagatcgtgtcgcacacgcacctcggagtggtaagcttgatgattaccaggaacgaatgaacaaagggg

SEQ ID NO: 321728 - DNA, 76 bp, Homo sapiens
gctggggatgatgtcatcagagatttcttgaaagagaagagggaagctgtggagcatctggctattaagtgccact

SEQ ID NO: 321729 - DNA, 98 bp, Homo sapiens
accatggagaccctcacggagctgggcgacgagctgaccctgggagacatcgacgtgagtgacctgcaggaagaaggcaagaatgccatcaactcacc

SEQ ID NO: 321730 - DNA, 100 bp, Homo sapiens
ccgcagtcggcaaggagagacgtcgctgaggggcttgcctgaagcgaggggtctggagcccggcactgtggtcataacagagcaggcagtggatacctgc

SEQ ID NO: 321731 - DNA, 83 bp, Homo sapiens
accacatttgtgagaggaaaaatacagcaaaatcaccaggacagccaatacaagtggtttatgtaccatcccatctctatcac

SEQ ID NO: 321732 - DNA, 50 bp, Homo sapiens
cgcaaacttgacactcaccctgaccgtgcgatgtatgatgtatggctttg

SEQ ID NO: 321733 - DNA, 100 bp, Homo sapiens
atgggggacaggaggctgcggggcctcaggagttcaggagaagatgggcataatgaataaaggagtcatttatgcgctttgggattatgaacctcagaat

SEQ ID NO: 321734 - DNA, 99 bp, Homo sapiens
gagagaaaggtcaaaatcaagactatagaggtggaaagaatagcacttggagtgatatgacaatggatgatgttcgggaatacgagaaaaacatgcatg

SEQ ID NO: 321735 - DNA, 100 bp, Homo sapiens
tgtccgggtgggtggcaggaggtggaaacagccgaaagaaaagcagccaggttcaggacaaagaggtgtgggcaggccactgggccagctggtaacatca

SEQ ID NO: 321736 - DNA, 83 bp, Homo sapiens
tctgccagatgttcctggggttactgtaaatgggaaggacaggcagagctaaacaagatggccctgctgtggcaccagtgacc

SEQ ID NO: 321737 - DNA, 89 bp, Homo sapiens
cgttgcatcaccatcaagtcaacgaggaaaattcttccagcgatggtctcccactcagagctgaggaagcttttctactcagcagatgc

SEQ ID NO: 321738 - DNA, 75 bp, Homo sapiens
gagcgacgacggccgctgcctaagctggaaagttctgccacttgctgggaaaacagcaacagaaggatattaagg

SEQ ID NO: 321739 - DNA, 90 bp, Homo sapiens
gttgactgaaaatggggcggaagaaaatacaaatcacacgcataatggatgaaaggaaccgacaggaattacatgaatgacagtcttcga

SEQ ID NO: 321740 - DNA, 90 bp, Homo sapiens
cttcacaggactcttcattgctggttggcaatgatgtatcggacatttattcagaacagctggggatcaaccgtttaacctgtccacagt

SEQ ID NO: 321741 - DNA, 100 bp, Homo sapiens
ggaacataggacgacagttagctatggtaggtggagagttttcaaacactgttatcggccagatgaagaaatttggaaggattgccatatgtggagccat

SEQ ID NO: 321742 - DNA, 49 bp, Homo sapiens
gaggtgcccacgcagctgcctggacaaagacggagtttcaccgtgttag

SEQ ID NO: 321743 - DNA, 73 bp, Homo sapiens
tgggattaatgctaaatttgtgaatgctgtgtatgataccttacttaatactcacttttcaggattagaagag

SEQ ID NO: 321744 - DNA, 75 bp, Homo sapiens
atgctggattgtagaacttctctctctattgttgaacagataaatacgaaactgccatcatcatttgtagaaaaa

SEQ ID NO: 321745 - DNA, 98 bp, Homo sapiens
gtccgcactcctgttcctggtcctgacgcccccctcccgcccggaaagctgcccagccaccagcaaccccccagggtgaggtggctttgaccccgggt

SEQ ID NO: 321746 - DNA, 90 bp, Homo sapiens
aaaggattctcaagaagaagaaaagacagaagccttgacttctgcttcttcctcatctcagctgccctcttcatgggtggcagcttctac

SEQ ID NO: 321747 - DNA, 88 bp, Homo sapiens
tgcagctgcctcagttcttagcgcaggcagatctggagtcacttctgcagacaccgggtgggaagcctcgtggcttcagtgaagcagc

SEQ ID NO: 321748 - DNA, 101 bp, Homo sapiens
agttcttacaacatggcagacattgacaatgacttgctgtctcctgactcagtcctgagttgcttgtatcctggggatcatggaaagaaaactccgaatcc

SEQ ID NO: 321749 - DNA, 82 bp, Homo sapiens
cctacattagcgtctacgaccaccaaggcatcacgttgggtggtttccatttagaccgaggccggttcagaacttcccaaat

SEQ ID NO: 321750 - DNA, 100 bp, Homo sapiens
tgtgctggagggtggcgtcctgacattcttcaaggactcaaagacctcggctgcaggcggcctgagccacccaaacccttcatcaccagcaacaactcca

SEQ ID NO: 321751 - DNA, 96 bp, Homo sapiens
gaaacatccacagcagcgactggcccaagttctttgaaaagctattcaaagtgtgattagagctgggcttggtggcttgcatctacagttccagct

SEQ ID NO: 321752 - DNA, 98 bp, Homo sapiens
cgagccatggggctggcggatgcgtcggggtaaattcgaaccaccattatttcacccgaatgtgtacccttcggggacagtgtgcctgtccatcttag

SEQ ID NO: 321753 - DNA, 131 bp, Homo sapiens
aagctatatggagataaatggaattcttttaccatcttattaattcactctgatggttccaatccctatacattgaagctttgcttttctacatcatcccatttataagaagagaagagcatgttagaatt

SEQ ID NO: 321754 - DNA, 83 bp, Homo sapiens
gaggtggagctgcggggccctggcatgaaaggagcatcagatccatgctgctgctgactcggagccccacagcttggcacagg

SEQ ID NO: 321755 - DNA, 50 bp, Homo sapiens
tgccaagcagccttagccctagtgtagagcatttgacattgtgcagcaaa

SEQ ID NO: 321756 - DNA, 90 bp, Homo sapiens
caggaatggaagagaccacatcagaggcagacaaaaacctttccaagcaagcatgggacaccaagaagccacattgtaaatcaccttgtg

SEQ ID NO: 321757 - DNA, 80 bp, Homo sapiens
cctgttgggagctggatcggagcggtttggaacgacaagcccgaacaaatttacatgtattggagaccagaccagaagcc

SEQ ID NO: 321758 - DNA, 75 bp, Homo sapiens
gttgaagaagtgaagaaattattggtacctgcatattgctgacagacagaacgccttggaggctgagtggaggac

SEQ ID NO: 321759 - DNA, 97 bp, Homo sapiens
acttacgcacttaaaataattgggcagaagagaagcagtgaaggagtgcagaggcatcacctgaaagattcatcaataagctgcagccaggctccgt

SEQ ID NO: 321760 - DNA, 87 bp, Homo sapiens
cccacccattcctttaaatccggagggggaaaaaatcccaaggtctgcaaagcggaaggagagttttacatggaagtggcttacaga

SEQ ID NO: 321761 - DNA, 82 bp, Homo sapiens
catcgctgccagggcagaaattgagcaagcagcaagtcggctttcagatcagattctacgaatcatggagtctatttgggag

SEQ ID NO: 321762 - DNA, 100 bp, Homo sapiens
tagccgcttgcaggagatccgggagcggcagaagttacggcgacagctcctcgcgcagcaggttttatggcaattggatatattccgacgaagcttgcgg

SEQ ID NO: 321763 - DNA, 91 bp, Homo sapiens
aagcatcgtcctaggaatggatttctcctctaatgacagggtgctttccttctgccttgcttgtctctgctgccggcatccgtgtgagcct

SEQ ID NO: 321764 - DNA, 100 bp, Homo sapiens
gcccctgagccggccgagcggcgacggaccgcgagatcttatgccttcattcatccggcatggtccaacaattccaagacgaactgatatctgtcttcca

SEQ ID NO: 321765 - DNA, 151 bp, Homo sapiens
tctaccccgcggcggccggggaccctgccagcctggacttcgcgcagtgcctggggtactacggctacagcaaggattctgaaaccttccttgtatccctcctgagacatctttgctgcaagatcgaggctgtcctctggtgagaaggtgg

SEQ ID NO: 321766 - DNA, 97 bp, Homo sapiens
gttaggcctgttacattaaatatgaacgtggctatgccttcatggctggagcattggatttgctaaaggagcttaagaatattcctatgaccctgga

SEQ ID NO: 321767 - DNA, 100 bp, Homo sapiens
cacattggaacaaggagaagatccatggttattagagaaagagaaaggatttctaagcaggaactccccagagactccttcagggtgagcaaaggcctgg

SEQ ID NO: 321768 - DNA, 88 bp, Homo sapiens
cagctgactgcacttcttttttgagaaaggaaggaatatatcctgactgattattgtggtggtctgggtgggcaccaacaaccacgga

SEQ ID NO: 321769 - DNA, 100 bp, Homo sapiens
gtggtggccttcgcggtggcgatgctcttcttggaaaaccagatccagaaactggaggagtcccgctcgaagctaggtcacttcatcctggcccaggtac

SEQ ID NO: 321770 - DNA, 75 bp, Homo sapiens
ggtgctggccacttgcttgggatcctttatcctggtcatcttctatttccaaaggttacacatcattttggaatg

SEQ ID NO: 321771 - DNA, 103 bp, Homo sapiens
gcggcatctcggaccgcatgctacaggacacggtgctggccgccggttgcaagcagatactggtgcctggttatcgtgtgagcttcggtttccttgtttaccc

SEQ ID NO: 321772 - DNA, 103 bp, Homo sapiens
cgaagagtggatgaaaactgggctgaaggaatgctggcagacaaaataggaatatttccaatttcatatgttgagtgatttcctaaataaaaaccaagagctg

SEQ ID NO: 321773 - DNA, 82 bp, Homo sapiens
cttcttcgagtatttgtagaaggttgatttggagcatatgcgaacaataaaacctgaaaaacacttacggttttgccaggaa

SEQ ID NO: 321774 - DNA, 101 bp, Homo sapiens
attcccagaggactttggagaccagtatgtccgtggttcagaccctgtattaaagcttttggacgacaatgggaacattgctgaagaactgagcattctca

SEQ ID NO: 321775 - DNA, 125 bp, Homo sapiens
ctcacaatgacatcgtggctaccacctacctgagtatgtcgaaaatctctgcccctggaggagaaatagaaggtttggcagtgtcaaccatctcatcattctctccacctgggtaccaagtctct

SEQ ID NO: 321776 - DNA, 100 bp, Homo sapiens
caatagtgcaaaagtcatggcaacttctggatgtgcagcaatcagatttatcattcggagccgagactgtctgaagctgggcccacctgctgagggagaa

SEQ ID NO: 321777 - DNA, 75 bp, Homo sapiens
aaggtgaagaccagtttgatggaagaagctgtttgttttgattctgagctagatgaacatattaagtggttccag

SEQ ID NO: 321778 - DNA, 75 bp, Homo sapiens
gtcagatggattgactatggaaaagttgccaaattggatgcatcatctgcagacatcagaaaagcatatcgtaag

SEQ ID NO: 321779 - DNA, 83 bp, Homo sapiens
cccagctactcaggagcctgaggacatgggcaagttttgcctcacatacgaggcctccatgacccggctcttccgagagggga

SEQ ID NO: 321780 - DNA, 95 bp, Homo sapiens
gcgggtcctacgaggagggctgtcagagcctcatggagtacggaatcctgaagtgggtaaaactgattgacaactttgaaggggaatatgactac

SEQ ID NO: 321781 - DNA, 80 bp, Homo sapiens
cacacaggatccctggctgtagcgaacaacaacccaaccattactggatctaagcctttcccacgttatggttataaacc

SEQ ID NO: 321782 - DNA, 87 bp, Homo sapiens
ccctgatttcctgcttctccttttcatgagtgttcctgtggtctctgcacctcctttctatccgtgattctaactgcaactatgagg

SEQ ID NO: 321783 - DNA, 100 bp, Homo sapiens
atgcagaagaaatggcggacttctacaaggaatttttaagtaaaaattttcagaagcacatgtattataacagattttaggtgatgggcaagtcagaaag

SEQ ID NO: 321784 - DNA, 82 bp, Homo sapiens
caggcctgcagctgccacgaggacacgtgcgacccggtcactggtgcctgccacctagcaattctgtggtgttcttggtcac

SEQ ID NO: 321785 - DNA, 83 bp, Homo sapiens
agcagccaagatggtgaagcagatcgagagcaagctgtggaaagtgaagaaggcattgaagatgactattttttggagaggcc

SEQ ID NO: 321786 - DNA, 98 bp, Homo sapiens
atgaatggagcaaaatggcggatcatgtgcaggaacattttagtggacaaaccaaatgaccaatcttcaagatggtcttcagagagcaactatcctcc

SEQ ID NO: 321787 - DNA, 98 bp, Homo sapiens
agcgactgcaccagcaagatcggcaggcgagattgcctgacccaggcctgctcggccctcacagggtttggtgcacctcgatttggaggaagtagggc

SEQ ID NO: 321788 - DNA, 90 bp, Homo sapiens
gcggccgcgacgctatggcgcactggagtaccctgttcctggcaatgcacattgcttctgatgcatagatgaggatcagaagtcttcatc

SEQ ID NO: 321789 - DNA, 100 bp, Homo sapiens
tggctttgctcagcaacatcctagcggcctattcctttgtctcaggtgtcatggagaaactccagctgggcccagagattctgcagcgggaaaatccaag

SEQ ID NO: 321790 - DNA, 100 bp, Homo sapiens
ggagtctgatgatgagaatgctgtgtgcgcagcacagaactgccaaaggccctgcaaggacaagcactggatgtgtgtgagaagtggggagaaatgccac

SEQ ID NO: 321791 - DNA, 100 bp, Homo sapiens
ccaacttcggcaagatccagatcgggatttacgtggagatcaagcgcagcgatgaatggctattcaagtggacaagttcaactttgagagtttcccggag

SEQ ID NO: 321792 - DNA, 100 bp, Homo sapiens
tttctagatgaccaggaaactcgactgtgtgacaactgtggactcccgaaaaattgaccaggaagggaaaatcccagatgaaactttggagaaattgaag

SEQ ID NO: 321793 - DNA, 98 bp, Homo sapiens
gttggtactcgccatgaaactcaaagatcgagagattacataccggttacggcacctccttcgtgcaaggtgtgatgcatccccagtgaccaacaaca

SEQ ID NO: 321794 - DNA, 100 bp, Homo sapiens
ggggaatatcccagctacctgatgtgacagatctaaattgaaccaagtgtttttacatgacaagttctctgaggatggttctacagttgggattttggcc

SEQ ID NO: 321795 - DNA, 97 bp, Homo sapiens
aatatctgattgggacaacattcagacccatttccagtcatgagtgaccaagaatatggcccaggtgaccaaagccctggacaaggccctgagcacc

SEQ ID NO: 321796 - DNA, 107 bp, Homo sapiens
tagaactctgtggtgtaaagattgtggtagtagatgaagtcattcccaaaagcaagttcgtcttggtgaagttcgacacccagtacccctacggtgagaagcaggat

SEQ ID NO: 321797 - DNA, 83 bp, Homo sapiens
ctggactcggattcgttgcctgaggtgtggacacctcaagatcgccagtgtgtcctgagtaccttagcacagttgcttttgga

SEQ ID NO: 321798 - DNA, 87 bp, Homo sapiens
agactctgcctcctacaaatattccttcagtgaatctacagacctattttctcaggagctcagcctggccttacttcagtgataaaa

SEQ ID NO: 321799 - DNA, 75 bp, Homo sapiens
ggaggcgtgtttgacctggggcccttcattgtagatctccttcgctgactacaacctgctggacttgctgctgat

SEQ ID NO: 321800 - DNA, 87 bp, Homo sapiens
gcgaggagtccatggacttcctggataagagcacagaagtcacctgcaccggtgcccgtgacgtacgagctgcccacactgtatagg

SEQ ID NO: 321801 - DNA, 82 bp, Homo sapiens
aacctgtatcaagtcttctaatctgtgaacatggcctcttcttaggaattccctggatgatcttgttgggccaccttccaac

SEQ ID NO: 321802 - DNA, 82 bp, Homo sapiens
cagagggcttttactcctacctgtgtaccgagccaggtcagaagagatcaattctacagaaatttccagtggttctgttgag

SEQ ID NO: 321803 - DNA, 100 bp, Homo sapiens
tgcggcgcagggcgaggcggaggcgcccaccctctatctgtggaagactgagtactattaatcccgtagatgcaatatatcaacctagtcctttggaacc

SEQ ID NO: 321804 - DNA, 91 bp, Homo sapiens
ggacagttcgctacacagcaatgcatcgagcctgaagcaggacattctaaatgaaaagactgaattggaagcaacacttaaggaagcggag

SEQ ID NO: 321805 - DNA, 82 bp, Homo sapiens
attcctgccatggtcattggcattcctgtttatgttggaaggaagagaaatggaataatcgtatcgctgatctacgtaaaca

SEQ ID NO: 321806 - DNA, 73 bp, Homo sapiens
tttacagtacctaaaaacaggtccctggcgagccccttgcagacatatctgaagagatggattaagaatgctt

SEQ ID NO: 321807 - DNA, 82 bp, Homo sapiens
cagagcaccaggcccaccgtgaaaggaactgtggctgcaccatctgtcttcatcttcccgccatctgatgagcagttgaaat

SEQ ID NO: 321808 - DNA, 99 bp, Homo sapiens
agacacagaagtccatctattacatcactggtggagctgaagaagggagccactctcaaaatcacgctggataacgcctacatggaaaagtgtgacgag

SEQ ID NO: 321809 - DNA, 100 bp, Homo sapiens
aaacaaatcctggaggcagttgctgcgccatggctgcggagcggacccggccgctgcaaggctctggcggtccgagcgtgcctagtagctgtgaacccgg

SEQ ID NO: 321810 - DNA, 107 bp, Homo sapiens
aattaatcccagacacccgctgatcagagacatgcttcgacgaattaaggatggagatgaagatgaggaagctgagtcagctacgggcaagcgggcagctgaagatg

SEQ ID NO: 321811 - DNA, 100 bp, Homo sapiens
gacggaaacgccgaggaacccggctgaggcggcaggctcaaactgtccaggttgctgaagttgaaccacagtcacagccacagccttccccagaacttct

SEQ ID NO: 321812 - DNA, 50 bp, Homo sapiens
ggcgcgcccgcggagaggccggggtcaaaatgcagatcttcgtgaaaacc

SEQ ID NO: 321813 - DNA, 100 bp, Homo sapiens
cttcacccaggccctggagtgcatgcgcaggtgtgatgaatgcagactctgctaccattttggctgtttggatcctcctttgaaaaagtctcctaaacag

SEQ ID NO: 321814 - DNA, 83 bp, Homo sapiens
cgcggccctggggcccgggggcgcgggccggggtgctgtgagccgtgagctttgaggcggtgggatgtgtcagcagaatgtct

SEQ ID NO: 321815 - DNA, 83 bp, Homo sapiens
gttggctgtggtgaatcacaagtagatcacagcaccatacattctcagattgcgcagtctctttgtggagaggacttgatcat

SEQ ID NO: 321816 - DNA, 91 bp, Homo sapiens
tggagggagtggacatcagccccaaacaggacgaaggcgtgctgaagtgcctccggagccagcgtggtggccatagacaacaagatcgaac

SEQ ID NO: 321817 - DNA, 115 bp, Homo sapiens
agatgacagacttggacaacatgtcccaacattacatcccaatgcggaaaacgccatgcggtacataaatgggacgcgtctggatgaccgaatcattcgcacagactgggacgca

SEQ ID NO: 321818 - DNA, 75 bp, Homo sapiens
ctggaattaggcaaatatggacagattgagaggatccagaatccagatctctggaatagctaccaggcaaagaaa

SEQ ID NO: 321819 - DNA, 98 bp, Homo sapiens
gttccaccttcagagcgtcacggcgtacgccctcatggggaaaatctccccggtgactttcaggaaaccatcaacacaggcccttttgtgatgcgttc

SEQ ID NO: 321820 - DNA, 74 bp, Homo sapiens
cgaggcctttcaccaagtccatgcatttgacattgtgcagcaaagaaatggttatggagaagcccagtccgctg

SEQ ID NO: 321821 - DNA, 95 bp, Homo sapiens
gtatttggggtctacctcctgtggtttttgattcaagtcctgttctacctactgccaattggaaagaatgtctgtaaacctgtggaggagacaca

SEQ ID NO: 321822 - DNA, 83 bp, Homo sapiens
aagcagctgcggatctttgaccccagaacaaagccgcgggcctctcagagctccacgcaggagatcggtgaggagctgatcaa

SEQ ID NO: 321823 - DNA, 75 bp, Homo sapiens
gcgaaggagcggccgggagcccgccgcgctggtagcgaagtccattggaatattaagcccaggagttgctttggg

SEQ ID NO: 321824 - DNA, 83 bp, Homo sapiens
ctgcaatgacgagggcctggagtgtgtgcccactgaggagtccaacatcaccatgcaggaatcatgttcgttcaggaggaggc

SEQ ID NO: 321825 - DNA, 83 bp, Homo sapiens
ggatgccgagcgcctcaagcgcgagattgaaatcatggcaggtccagaaagtgatgcgcaataccagttcactggtattaaaa

SEQ ID NO: 321826 - DNA, 75 bp, Homo sapiens
aacctggttgttgtattgctgttcattgcgttgcaggccttgggaggttctcttattcaagtaccttccgttgag

SEQ ID NO: 321827 - DNA, 83 bp, Homo sapiens
cttcccgtccgcggcgtggaggggatctatttgtgatgactatatggcaactctttgctgtcctcattgtactctttgccaaa

SEQ ID NO: 321828 - DNA, 83 bp, Homo sapiens
aggaggatgtggcgcgcggaggggaaatggctgccgaaaacaagccggaagtgcagagcagagcgggcggaggaccccgggcg

SEQ ID NO: 321829 - DNA, 90 bp, Homo sapiens
ctaaagacccggtactaccagctcgtttcttcactcaacctgacaaggcaaaggctgccacccaaaaatgtttactactaccgctgcccg

SEQ ID NO: 321830 - DNA, 128 bp, Homo sapiens
cgacctcgctgtgggggctcctgtttctctccgccgcgctctcgctctggccgacgagtggagaaacggtgcagaggggcaggatgccgccgacccagccgacccacgggcagttcgcgctgaccaac

SEQ ID NO: 321831 - DNA, 83 bp, Homo sapiens
agcgccatccccgagcagcggtggaagctggttgacatcatggacatatgtgagtccatcctggagaggaagcggcatgacag

SEQ ID NO: 321832 - DNA, 95 bp, Homo sapiens
gcctcagcctccaaagtagctgagactacagtgccggtggtggtgtgcacattgagccccggtatagacagttcccccagctgaccagatcccag

SEQ ID NO: 321833 - DNA, 75 bp, Homo sapiens
gctttgcatggctcccggggcgctgactgcgtgttaacatcaggtgatactgtgcttgtccaccgagttcacagt

SEQ ID NO: 321834 - DNA, 100 bp, Homo sapiens
ctgttcatgtttttccgaagcctgcatttttttgtggagtggtttgaatatcgtaagcgcacgtttaaacatctcaagctcttcacagatggaatcacaa

SEQ ID NO: 321835 - DNA, 75 bp, Homo sapiens
ttcgattgtataacacagaatcacaaagtttcagaaagaagtgcttcaaaggtgaactgtcacccctacaactca

SEQ ID NO: 321836 - DNA, 75 bp, Homo sapiens
accgcgggtttccaccccggcgggagctgtcaggttggctccgcggtcatgtaggtacaacagcaaccaagaaga

SEQ ID NO: 321837 - DNA, 100 bp, Homo sapiens
ggggaatgttttctttggatccatttggcttttccaggaatggcgtcatgctcatggcatgaggtgtttgggcatcccaaacactgctcactttgctaat

SEQ ID NO: 321838 - DNA, 100 bp, Homo sapiens
acctccagggcccggggccgtggggcttccgcctcgtgggcggcaaggacttcgagcagcctctcgccatttcccggctagaacaacagaggcagcagtt

SEQ ID NO: 321839 - DNA, 73 bp, Homo sapiens
cggttcgcgtctctctgctgcggcgcggggaccgctgtgctctcgccccaactggaccctaggcaaaagtgag

SEQ ID NO: 321840 - DNA, 100 bp, Homo sapiens
gaaggaagatggcggatctggaggagcagttgtctgatgaagagaaggactcgctgattcttgagaagagtcaaaactggagctctcaaaaaatggacca

SEQ ID NO: 321841 - DNA, 101 bp, Homo sapiens
attcagaaggagctggcggacatcactttagaccctccacctaattgcagtacgctggggaggaggaggaggaagggagcggcagcagtgaaggatttgac

SEQ ID NO: 321842 - DNA, 97 bp, Homo sapiens
tgtggtgaggaattcaagagctgaaggacaaacactggttcagttcatcaatggtgctaaggaaatttgctatgctcttcgagctgagggttattgg

SEQ ID NO: 321843 - DNA, 100 bp, Homo sapiens
aaagtttcgttttcgcaaagaaacgaacaacgctgctattataactttgtgacaacaaactgtgctctgcagttttcatcccgtggaatccgacccggcc

SEQ ID NO: 321844 - DNA, 97 bp, Homo sapiens
tgcgtgaaatatctgaatctacccccgtggaacttctttgcccaaaatgcagtgccaagttgggttccttcaactggtatggtgaacagtgctcttg

SEQ ID NO: 321845 - DNA, 83 bp, Homo sapiens
tactttggtggacgagttggagtcatctttcgagccatcactggtgcaagctatatttaacggagatcctgatgaagttcgag

SEQ ID NO: 321846 - DNA, 96 bp, Homo sapiens
ggatattgacccggagggcaagaagtttgaccgaggctgcagagagactaagggcacttcctgaggttcattaccacctggggcagaaggacaggg

SEQ ID NO: 321847 - DNA, 100 bp, Homo sapiens
gctggagcaagaagaggacctgtgcagggcagagcaggaggccccccgagggaaaacaagtccaacctggaagaagacttccttctaaaccaggcagacg

SEQ ID NO: 321848 - DNA, 116 bp, Homo sapiens
cccatcctgccgtccttctccactttcgccagcccgtgccgcgagcgcggcctgcaggaggtctcggcgcggaagatggccggcggcgtggacggccccatcgggatcccgttccc

SEQ ID NO: 321849 - DNA, 75 bp, Homo sapiens
atttcttacgtgataatgtgaagcgtcagaggtccctgtttgataggcattttgttcccaacatcacctttggtc

SEQ ID NO: 321850 - DNA, 75 bp, Homo sapiens
tttttctgttttgcctgaatacatgatttaaacaagagatttccacagaaggatataattgatacagcatgtgaa

SEQ ID NO: 321851 - DNA, 75 bp, Homo sapiens
ctggggcttgagagctgccaaagaccttccttcgttgactatagtcaatggggccaatggagccaagtgtatgga

SEQ ID NO: 321852 - DNA, 74 bp, Homo sapiens
gatggacatggacatgagccccctgaggccccagaactatcttttcgtcaccaccaagtaagcgaagaaaatta

SEQ ID NO: 321853 - DNA, 83 bp, Homo sapiens
tccctcaagagaacacaagaagtgctttaagaggctggtcgtctgatgataaggaaattagttgcagagaaattgaatatccc

SEQ ID NO: 321854 - DNA, 82 bp, Homo sapiens
aagaaacaagatagggcaacagctagaggagaattcagagacacggagcttttgtacagagagagataaaaccaggcagtag

SEQ ID NO: 321855 - DNA, 101 bp, Homo sapiens
gtcgggaacagccatgcaaaggcaggggaggaagccacctcgaggtgatctgcaactctttcaccatctgtaatgcggagatgcaggaagttggtgttggc

SEQ ID NO: 321856 - DNA, 100 bp, Homo sapiens
ggaccagcgacctcttggcttccaacgttgcctacccagaggaaagccccactgagccatcaaccaagcttccggggtttgactcctgtggaaagactga

SEQ ID NO: 321857 - DNA, 83 bp, Homo sapiens
cgatccgccgcccgtccacacccgccgccaggacgtggcccagtggaacatcgggagcctccggaccatcctggacatggtgg

SEQ ID NO: 321858 - DNA, 100 bp, Homo sapiens
aggaagtggctgtgcgctagatgctgtcaccagagcgctgcaaggaccgcctgaactcgctggctatctcggtgatgaaccagtggcccggtgtgaagct

SEQ ID NO: 321859 - DNA, 89 bp, Homo sapiens
gggcttctgtgaaacatggcggtaggctgggaccataacacaagtatgggattgtgctggatgcgggttcttctcacacaagtttatac

SEQ ID NO: 321860 - DNA, 83 bp, Homo sapiens
cttggactgagtcctgcaggacacaggaactctccggagtcctttctgtattgttgtgattttgcttctggagctgtggagct

SEQ ID NO: 321861 - DNA, 100 bp, Homo sapiens
gctgctgagtttcttcatctacaacccgcgcttctggccgcgggaaggagagaaatctgacccggtcgtctcgtaccgcgagacggtcagtgaagagtcg

SEQ ID NO: 321862 - DNA, 82 bp, Homo sapiens
cccggagcccccagcgcagcggccgcgcaattctgtggtgttcttggtcacacatttatggagtttctgaagggcagtggag

SEQ ID NO: 321863 - DNA, 75 bp, Homo sapiens
ctgggaccaccatggccatgtcagcaggcgaggattaaatccaccacacagggtgaaatctatctccatgacaac

SEQ ID NO: 321864 - DNA, 101 bp, Homo sapiens
ttcagatgtatgatcgtgtgattgactttgatgagaacactgctctggatgatgcagaagaggagtcctttaggaaggtggaaaatgaggttgatcgcagc

SEQ ID NO: 321865 - DNA, 80 bp, Homo sapiens
caggaatccattatggtgtcattacatgtgaaggctgcaagcggtcttgcgagtggctggttccctgcagaagagcacag

SEQ ID NO: 321866 - DNA, 75 bp, Homo sapiens
cgaggaggaagacgaatcgttaaacatctgaaagggtcagcctacaacacagcagtcccctcaggatgagcagga

SEQ ID NO: 321867 - DNA, 100 bp, Homo sapiens
cttcttgaatttctctctgtaaaggaggccaccaccacctatcatgacagatggtgaagatgcggattacactcattttacaaaccagcagagttccaca

SEQ ID NO: 321868 - DNA, 82 bp, Homo sapiens
tcgcgtgtctaggtgagtcgcggtgggtcctcgcttgcagttcagcgaccacggaggcatacacggaatacctgaggagcat

SEQ ID NO: 321869 - DNA, 90 bp, Homo sapiens
cagttcccggccaggacacggtctgggccgccgaatctccggccgaagagcggcggcggcagcggcgggatcgcttacacctgagacgaa

SEQ ID NO: 321870 - DNA, 97 bp, Homo sapiens
ccaggggtgccctgggctccgcggaggaagagcaagcaggccctgagggactataagaaggttcagatccagctggagaatctggagagcagtgtgc

SEQ ID NO: 321871 - DNA, 100 bp, Homo sapiens
tgactgtgactgaggaagagtgagttcccgattttgaaatgctgggctcactcagaagtggcagccccttgtgctttggagaatgaggatatctgccaat

SEQ ID NO: 321872 - DNA, 82 bp, Homo sapiens
cagccagcaaagcagcagaattctttgatgcactgccagtgaaagatgtagaagataaacctgaacaacaaaccagaacaag

SEQ ID NO: 321873 - DNA, 75 bp, Homo sapiens
gcccctcgggacagtggctttcagtgctgtagctgccctcacaggtaccccaagctggcagctctgaaccctgag

SEQ ID NO: 321874 - DNA, 50 bp, Homo sapiens
ccaccttgatccagcggacttacgggcgtccgacctccgatcatgaacgg

SEQ ID NO: 321875 - DNA, 101 bp, Homo sapiens
ctgcggagccggaggaggaggggagaggcctggaggacaccaacatggcccacctgccgtttgctgtcattggcagcacagaagaactgaagataggcaac

SEQ ID NO: 321876 - DNA, 75 bp, Homo sapiens
tcggactgcaattacaacagcttcaatccgtcgtcatagatggagaagagaaggagctaaattgaagaaggagcg

SEQ ID NO: 321877 - DNA, 131 bp, Homo sapiens
cggggatcgtgagctccggcccgggcgagcgggtgcgtctgccgcagagtcggcacctgaaggacatggaggtttttaaagacaattgttgcaaaagagaagtcctcaacttatatgtatattgcagcaat

SEQ ID NO: 321878 - DNA, 100 bp, Homo sapiens
ggccacccccataaggcataggccaagaccatacccgccgaatgtaggacatcacctgttccaacccagtgtgatctattggctggagcaggaagaggag

SEQ ID NO: 321879 - DNA, 100 bp, Homo sapiens
agagccgccgacatgaagaaagacgtgcggatcctgctggtgggagaacttggttgaatctggcgatgtggaacccatggatatggagggctgactatat

SEQ ID NO: 321880 - DNA, 100 bp, Homo sapiens
gtcttccagaaggctgtagaccagagtatcgagaagcacgcactcctggctttaaagtttatacttgcatttgccatacctgataagccacggcatatcc

SEQ ID NO: 321881 - DNA, 100 bp, Homo sapiens
gggatcccagcagtgcaaacagacttcggagtacctgcgctatgaagacacgcttcttctggaagaccagccaacagaaatcaacgaccgggagcagaag

SEQ ID NO: 321882 - DNA, 100 bp, Homo sapiens
cctgagcccgtgcctgtcttcagatcttcacagcacagttcctgggaaggtggagccaccagcctctccttgccggaagtcggtgcagcccacctcagag

SEQ ID NO: 321883 - DNA, 153 bp, Homo sapiens
caacggggtcatctttaactgcttggccgtgcttgccctgtcatcccacctgagaaccatgctcaccgaccctctcctgggccatgatcccattttcatcagatgacttgagaacccagaagctctaccagcactgccattctgtcccgtctt

SEQ ID NO: 321884 - DNA, 83 bp, Homo sapiens
cgaagcttgaaagacttggtaatggcgacgggtttgggagattcggctgattcttttttcattgtagaatctggagaagtgaa

SEQ ID NO: 321885 - DNA, 90 bp, Homo sapiens
cttgtcccctgccccttgccctgcttctgcagaagatttgaacatggaattcaatccttcagatcatcctcgggccagcacaatattcct

SEQ ID NO: 321886 - DNA, 75 bp, Homo sapiens
gctcgcgagcggctgcgggacgcgaggtttccgggatgcccctggacgggacctggtctccctggctgccccctg

SEQ ID NO: 321887 - DNA, 75 bp, Homo sapiens
aacgtgtatggcgtgtgcgtgccagtgcctccggagccagcgtggtggccatagacaacaagatcgaacaggcca

SEQ ID NO: 321888 - DNA, 98 bp, Homo sapiens
ctaaacctgcccaatgccgtgatcaccaggatcatcaaggaggcgactggcatccttcgaaccaactgtgtggactgtttagatcgcaccaacacagc

SEQ ID NO: 321889 - DNA, 75 bp, Homo sapiens
ccggagcggtccgcgagccaccgaggcccaggtattgacctgatggacatggcttcggacatcctgcagcccaaa

SEQ ID NO: 321890 - DNA, 98 bp, Homo sapiens
cgctcggctgcgggaaatcgggctgaagcgactgagtccgcgatggagaataaagccattattgcccgtgtcacaaccttgtcagatgtagtagttgg

SEQ ID NO: 321891 - DNA, 75 bp, Homo sapiens
cgctactctctctttctggcctggaggctatccagcctgctggccaacgcagtcatcttcctgtgtgggaacctg

SEQ ID NO: 321892 - DNA, 75 bp, Homo sapiens
gtccaaggagtcggctccaggcctcatcatcgccactggtctggagcccggcactgtggtcataacagagcaggc

SEQ ID NO: 321893 - DNA, 93 bp, Homo sapiens
ggggactgcacgtagcccggcgctcggcatggctctcctggtgctcggcatgcttctgacggccaatgaaacccccaagatgggcatctatta

SEQ ID NO: 321894 - DNA, 95 bp, Homo sapiens
ggaggtacctcgggaagctaccatttcttatattaagcagctcattcttggaatcccagaacaggccttaagtcttctccacatggccatcgagc

SEQ ID NO: 321895 - DNA, 98 bp, Homo sapiens
gctcctcagcggatgtggcagccccgagccatggctctcgccgtccgagtcgtttattggagaccagtatgatgtctgtgccatttgcctggatgaat

SEQ ID NO: 321896 - DNA, 93 bp, Homo sapiens
gtgaataaagaagtggagcgtgtcctgaaggagttccaccaggccgggaagcccatcggccgcggcgagtcctttgcacatgttggcaacaca

SEQ ID NO: 321897 - DNA, 96 bp, Homo sapiens
tgtatagctgataatggaaatgagacaattgaagctcaagcagagcttacagtgcaagatgggaatttcttagccataggctcacatgacaactgc

SEQ ID NO: 321898 - DNA, 83 bp, Homo sapiens
cccctggtgctgctcagtgtggtggatcatttcaaccgctctcacgggagtgccgagctgaagtccaaaggatcctacaccag

SEQ ID NO: 321899 - DNA, 97 bp, Homo sapiens
cagagtcctttgtttccccagaggctgttgcagaacctcctcagccaacggcaggtgggtttggaggatttgggacaacatctacaactgcaggttc

SEQ ID NO: 321900 - DNA, 75 bp, Homo sapiens
ctgtaatgtttggcgagtctggaagaaaaaatgctgggcatcttggtgcagcacaaagtccggagtggcgtctcg

SEQ ID NO: 321901 - DNA, 98 bp, Homo sapiens
ccgcggtattcctggccctgttggtgctgccggtgctactggtgccagaggacttgttggtgaacctggtgctcctggcagcaaaggagacactggtg

SEQ ID NO: 321902 - DNA, 83 bp, Homo sapiens
cagtactccactgggaagaccaccttcatcagggatacccacccaccatcccagggtctacaacatccacagccggaccgtca

SEQ ID NO: 321903 - DNA, 89 bp, Homo sapiens
ttcgttcgattattagctttagtgaaatgggctaataatgctggcaaagtggaaaaatgtgcggtggtgaaggcatttgtgatcctggc

SEQ ID NO: 321904 - DNA, 101 bp, Homo sapiens
cttccctgaaaaagctaaggatatctttattgaagctcacctttgtctaaataaaactgagctctccatagacaaacataagtagcataacacagtgtctt

SEQ ID NO: 321905 - DNA, 73 bp, Homo sapiens
tctgtggcctcgtctgcttccagatttgttcccgacaaggagttttctggttcagaccgtagacagagaggcc

SEQ ID NO: 321906 - DNA, 98 bp, Homo sapiens
tgcagcctcatctgtttgcggatcagaacccgagctgtgcttgtggctgcggctgctaactggctgcgcacagaactatttgtcaatgaagattgtaa

SEQ ID NO: 321907 - DNA, 101 bp, Homo sapiens
cagctttttacttgtgcccttctggagtttcaaatcctgctctactcacagctgttctggacttggtgcctctttctgttatatgctttcctatttagttg

SEQ ID NO: 321908 - DNA, 74 bp, Homo sapiens
ctgctattgaaagagagtatgcacaggtgctgcgacaagagactttggacaaaaattgacttgagtaggtgtaa

SEQ ID NO: 321909 - DNA, 74 bp, Homo sapiens
gagaccccgcggctgggcgttcatctaccacgctttcgtgaaataagatatgtggaacggagttatgtatcaaa

SEQ ID NO: 321910 - DNA, 75 bp, Homo sapiens
cagattttgcaggtgtggaacgcctagctcttgtcacaggtttcctatcctgggagcaggagagtgtgcctattt

SEQ ID NO: 321911 - DNA, 82 bp, Homo sapiens
attgcctgaggccaggagtttgagaccagcctgaacaacatagtttacccaaggtccagcctagcccctaggcaccatgtcg

SEQ ID NO: 321912 - DNA, 90 bp, Homo sapiens
gccgcgtgtacccggttgtcctcaggcgctgtcagcgaccgtggcagccatgtattacagctactacatgctaccggacggcacttactg

SEQ ID NO: 321913 - DNA, 90 bp, Homo sapiens
gaacaatccataccaaaaatatccattgacttaagaggaggtctactacaggacattgcacttatcttaccaagctcttctgaaggttct

SEQ ID NO: 321914 - DNA, 82 bp, Homo sapiens
aaaagcgagaccgcgtgcgaggaccgcagcccctgtcaaagggaacaggaagcagtccacggagggtgacgccctagaccca

SEQ ID NO: 321915 - DNA, 100 bp, Homo sapiens
gtttcatgagtcgggccacgccttggtgggctggatgctggagcacacggaggccgtgatgaaggctcatcggaacctgtcccagctccctaattttgcc

SEQ ID NO: 321916 - DNA, 87 bp, Homo sapiens
gggccagtcggcgccctcgctcaccgccagcctgtggccagtttgccatcgtgaagaagtgccgggagaagagcacggggcttgagt

SEQ ID NO: 321917 - DNA, 98 bp, Homo sapiens
ggacaagaagatactgccctggttgggataattcttcactattccacccttgccacagtactatgggtaggagtgacagctcgaaatatctacaaaca

SEQ ID NO: 321918 - DNA, 78 bp, Homo sapiens
agccagacagctgggccggagcagccgcgggcgcccgaggggccgagcgagttcccagtgacctgacagcagaggagc

SEQ ID NO: 321919 - DNA, 88 bp, Homo sapiens
actgtgggtctggactgatctccatgtcctgttgtggggcttttacagcctttggagactctacaggggcaggtaattcactggtcca

SEQ ID NO: 321920 - DNA, 90 bp, Homo sapiens
gtcgccgctgggcctgtccgctggcgtcatggttcggagtgttcagtggacacacgcttggcagtgtaatttccacagatcctctgaaga

SEQ ID NO: 321921 - DNA, 100 bp, Homo sapiens
aatacaggatgcctctcagctgccacctgcctttgacctttttgaagcctttgcaaaagaggcaagtgaggcctatctggttggcctttttgaagacacc

SEQ ID NO: 321922 - DNA, 75 bp, Homo sapiens
taaaatgattggcttttctgaaacagccaaatgtcaggccatgaagaagagatctgtggtccaggccactccaca

SEQ ID NO: 321923 - DNA, 50 bp, Homo sapiens
cagattcccagccccctggaaaggatgagagctggcggtcaccatggcaa

SEQ ID NO: 321924 - DNA, 100 bp, Homo sapiens
tggccaactatcggaacacgagcgagattcctctggttctggtgggaacccaggatattgagctcctggcagcttgcagagaagaatttcataggagact

SEQ ID NO: 321925 - DNA, 83 bp, Homo sapiens
cgcctcgggtctcgggggccgctctgggatcccggccaccagcaattgtccgtgatgtcttggcattgcccattttcaagcag

SEQ ID NO: 321926 - DNA, 100 bp, Homo sapiens
tgcggcctgccgacgagcctacttcaagagaaataagttaacagccaggtccttgcctgctgtgcagtctgatgaaagacttcagcctctgctcaatcac

SEQ ID NO: 321927 - DNA, 100 bp, Homo sapiens
gccttcccaagattgtggactccgtaaactttggagtcggagtttaaaactagcttatactctacttaataaactgacaagtaagaatgaacctctactt

SEQ ID NO: 321928 - DNA, 87 bp, Homo sapiens
ttccgacgccacttcctggaaatgaagtcagctactgacagcttccaggaagctcgggatgagctagttgaattccaggaaggaagc

SEQ ID NO: 321929 - DNA, 75 bp, Homo sapiens
aagctacacttactccagtgggaggaggactccagcagttgtgaaaaacttcaggacaaaaatgtttcatttaag

SEQ ID NO: 321930 - DNA, 98 bp, Homo sapiens
ttgtgggccggatgggtccttgagttctaaaacagtgagaattacctttggattcaactgcagaaataaagatcattatgggataatgatgtatcaca

SEQ ID NO: 321931 - DNA, 50 bp, Homo sapiens
ataacagatgaagattcttttcagaaggtccacttcatcaacccggaaac

SEQ ID NO: 321932 - DNA, 95 bp, Homo sapiens
tgcggtggcagctgctgagttctcggtgaagggctgaagaagatgcagagcagcctgaagctggtggactgtatcatcgaggtccacgatgcccg

SEQ ID NO: 321933 - DNA, 75 bp, Homo sapiens
aaaatcctaagaaatggatctgtgacaagaagaattttggcacctggtgaagaagagaatttggaatttgaagaa

SEQ ID NO: 321934 - DNA, 96 bp, Homo sapiens
aaagagtcaacagcagtggcaacaggactatagagttaacatcttcctgagacaaaaatggaatgaccccaggctgaagctccccagtgattttag

SEQ ID NO: 321935 - DNA, 75 bp, Homo sapiens
cttcgatcctggacaggatgcaggcagatttaagtgggcagaccaacatccacctcagcaaaaacttcttcctga

SEQ ID NO: 321936 - DNA, 97 bp, Homo sapiens
gcccgggagcgcgatgtggagcgcttctttaagggctacgggaagatcctggaggtggatctgaagaacgggttaaacccatccagagtaatggctg

SEQ ID NO: 321937 - DNA, 97 bp, Homo sapiens
cgtgggagattccaggacttgtgctcgctgaagatacaactgttagtccaaggttttggcacaaataccagtgggaatagtatttttggaagtaaac

SEQ ID NO: 321938 - DNA, 90 bp, Homo sapiens
aagaactcgactgttacattggtcccagaacagaattgtggtggttttggactccatgattaaggtgttcacattcacacacaatcccca

SEQ ID NO: 321939 - DNA, 95 bp, Homo sapiens
ggggccttctacagtgacggggagatcagcatttgcatggaacacatgcaagagtgagccatggagctacgtgtggggaacaagtaccgcctggg

SEQ ID NO: 321940 - DNA, 100 bp, Homo sapiens
tgaaaagtttaaacaaccctgccatgttgcaagttcttctacagccccagttatgtggacgagctgttaaaccagttaagtgggcagaccaacatccacc

SEQ ID NO: 321941 - DNA, 100 bp, Homo sapiens
ttgattggcgcctttctcattattataggctccctcctgctgtcaggctacatcagcaaagggaaatcgagctatagcagattatcttcgttcaaatggc

SEQ ID NO: 321942 - DNA, 87 bp, Homo sapiens
aaacccaagatatttatcattcagactttcaaaattgtggactatgaagatgagttagatttgctttctgtggtagctgttactcaa

SEQ ID NO: 321943 - DNA, 90 bp, Homo sapiens
cgaccgccagactcggtgcctgtggactccttccctcctgccccgtccatggctgtgggatgtaccctgcccacatgtaccaagtgtaca

SEQ ID NO: 321944 - DNA, 75 bp, Homo sapiens
cgcagatgttgtcaaggtggcctaccaggaggccaggggtgtcgccatgtcttcaagagaattctctggggatgg

SEQ ID NO: 321945 - DNA, 95 bp, Homo sapiens
gtgaactgtggattgtagagaaagagaaatctgggcccgatttctagcatttgaaagtaatattggtgatctagctagtatactcaaagtggaga

SEQ ID NO: 321946 - DNA, 100 bp, Homo sapiens
gcttttcaggcactacaccgtgggctcctatgacagcttcgacacttccagggtgttaaataccacattatttgaaagctgggagatcgttggaccttac

SEQ ID NO: 321947 - DNA, 100 bp, Homo sapiens
ctacggagtgaacaagaaaaccccttgtttccaatctatgaaaatgtgaatccagagtatcacagagtcaacgttggtgaggactgtccagtattcgatg

SEQ ID NO: 321948 - DNA, 98 bp, Homo sapiens
acgtgctatcaaaatgttggttttggatgaagctgatgaaatgttgaataaagctccatctccagtcaccaatgtgaaaaaagggaaaattgcaaaaa

SEQ ID NO: 321949 - DNA, 74 bp, Homo sapiens
agcaatccttggctcactgaggaggtttggtgctttgaagaagagtctcacagccaagcaggtccaggcggatt

SEQ ID NO: 321950 - DNA, 100 bp, Homo sapiens
catattctctggaggttttagacacctccggtgtcggcgggtggcgcggcgcccccggagggggccatatctaacggggtttacgtactgccgagcgcgg

SEQ ID NO: 321951 - DNA, 74 bp, Homo sapiens
ctgaggcggcgagagatggtcaggtctggagctcgaccgggccagttgctgatagtccaactccaccgccacca

SEQ ID NO: 321952 - DNA, 96 bp, Homo sapiens
caagacaagctcagaactgagaagctgtcaccacagatgtaaaaaaagattggtctgaccatgctctctggtgggaaaagaagagaacttggcttc

SEQ ID NO: 321953 - DNA, 100 bp, Homo sapiens
agacccaagcactctgggactcactccatagtccaggagttccaggttccgggatttcagtcataatcggttgtctaactggaacatcagcttggaatca

SEQ ID NO: 321954 - DNA, 83 bp, Homo sapiens
cccggcaatgccgccatccgggagaagctggcctgggccaagctggactgggcagcctttggggtcatgacccttccctccat

SEQ ID NO: 321955 - DNA, 75 bp, Homo sapiens
cagttatccaattgatgaactagtagatagagccaaacaatcttttcaagatgctctacccatggtaccccagga

SEQ ID NO: 321956 - DNA, 83 bp, Homo sapiens
acggagctgcagtcggcactgctactgcgaagacagctggcagaacatccagtcatggataaaaatgagctggttcagaaggc

SEQ ID NO: 321957 - DNA, 82 bp, Homo sapiens
tcttgcacgtgcgaggggcatttcaggagtttcctgtctgtcagactgggaagaagagcaggtcagcagtccaaatattcta

SEQ ID NO: 321958 - DNA, 87 bp, Homo sapiens
ggattcagcttcttcttcaacatgctcttcgttttgatacaaccaagtcggatgggcagtttaagaagacagccagtaacagcaagc

SEQ ID NO: 321959 - DNA, 75 bp, Homo sapiens
gcgatggcggcggaagaggaggctgcggcgggaggtacgcatagctgctaaattcatcactcatgcacccccagg

SEQ ID NO: 321960 - DNA, 74 bp, Homo sapiens
ctccggcgctcgccatggccgacgaaaagcccaagcaaaagctggcaggctgacagaggcggcctcaggacgga

SEQ ID NO: 321961 - DNA, 50 bp, Homo sapiens
gtctgatccacatcttcaagtctgctatcatggtgaacttacttcagatt

SEQ ID NO: 321962 - DNA, 75 bp, Homo sapiens
tgcagacatctacaaccttcgatctcctgacgagagaaggaagccaacatccttttggagccatgaatattgtcc

SEQ ID NO: 321963 - DNA, 74 bp, Homo sapiens
ctgagaggagctgctgctcggaccagcgcggtgtggagggcgcagctttccagagccgacttcctcatgaccgg

SEQ ID NO: 321964 - DNA, 97 bp, Homo sapiens
gacctgcacgacgttcatagttgactccacagatccgggagccacccctgagtgacgacctgcagccttcctcagctgtgtccagccccacccagcc

SEQ ID NO: 321965 - DNA, 50 bp, Homo sapiens
aggattgaatacttggaccccagcacatggattaattgatgtatgttgag

SEQ ID NO: 321966 - DNA, 101 bp, Homo sapiens
ggctgcagtcctcgcccggttttaacaacctggatcttcgaacttttgacacggctttggaaacgacgtcatgtgttagtcacattaactttgctctagaa

SEQ ID NO: 321967 - DNA, 90 bp, Homo sapiens
atgatgagcattaatggtgatgaggacagtgctgctgccctcggcctgctctatgactactacaagagcctccacaaaattgcatcaggc

SEQ ID NO: 321968 - DNA, 98 bp, Homo sapiens
ccgccgcgcgcccgcgccctccgcgcgacgccaggcccctggccccaacatggcccgtcgctctcagagctcctcgcagggggacaacccactggcac

SEQ ID NO: 321969 - DNA, 83 bp, Homo sapiens
ccggaggcagagcggctgccatgaaactagatgatggccatttaaacaactctttgagctctccagttcaagcggacgtgtac

SEQ ID NO: 321970 - DNA, 90 bp, Homo sapiens
tgaagtactcacaggcaaatacttcagattttcctgtccttgatcccagctggactgctcaagaagaaatggcccttttagaagctgtga

SEQ ID NO: 321971 - DNA, 100 bp, Homo sapiens
ggtccaagtgcgaccttaatgggaggccccgggaggccgaggttcgggaaggggccctggaccttctgaagaagctgcacagctgccagatgtccatcca

SEQ ID NO: 321972 - DNA, 100 bp, Homo sapiens
cagagtgaaggggaggtgccagcccgcgaatccggccggaggagaccctcctgttcttaactgtgggcgatgagaaaggtggtggactcttcttactggc

SEQ ID NO: 321973 - DNA, 76 bp, Homo sapiens
accaagcttcacatggccctttatgttctccagcctagatattatcctactgaagatgtgcctcgaaagctgttga

SEQ ID NO: 321974 - DNA, 100 bp, Homo sapiens
agattcagcaacctctaactaaccagcatgcttcatgatgatccaagcagaagaattcctgctgaaatggcattgtgcagcccattctttagcattcctt

SEQ ID NO: 321975 - DNA, 74 bp, Homo sapiens
aagaaagtaaagttggaagttaagggagacaaagttgaaaacaaagtgctgatctgctttaacgttggaagtgg

SEQ ID NO: 321976 - DNA, 74 bp, Homo sapiens
atagcaagaactgaggagcaccaggagacgcaactcatcggatttaggcctattaaaggaaggcaggaagaact

SEQ ID NO: 321977 - DNA, 95 bp, Homo sapiens
cccaagcctggaagaactcgtcatgctctttgtagcgtggtgcttctgttgctcacagatgctgagggttggaaaagcaaaagcagatgtgtggc

SEQ ID NO: 321978 - DNA, 75 bp, Homo sapiens
ggtccggccaacagttctgatgcccttgtggaacgtgctggggtttgcactggatgtgtccatcgagatgccaga

SEQ ID NO: 321979 - DNA, 100 bp, Homo sapiens
cagattgaagatttcactgcatttccccactctgcccacctctctcatgctgaatcacatccatggagaaatggtagccttaaaaaaagtacgtctggat

SEQ ID NO: 321980 - DNA, 100 bp, Homo sapiens
tcaactgcgcagaatctaccaacttcgccaccctgcggtggattgactacggcaaagtggccactcaggtgtcttcaaaaacaaacatatttaaaagatt

SEQ ID NO: 321981 - DNA, 75 bp, Homo sapiens
tgaccgggtttctttgatgcgacctcaggaaggagatgaggcagctgcaatatttaattcagcctttggaagttt

SEQ ID NO: 321982 - DNA, 75 bp, Homo sapiens
tcgtggagtattacaacgacagtaacgagccatccaaaactctgtttgtcaaaggcctgtctgaggataccactg

SEQ ID NO: 321983 - DNA, 100 bp, Homo sapiens
agaaagcctccggaatctaaaaagccctcagtaccagagacagaagcagatggattcgtccttttagagcgtttcccaaagtgtattctgcggaactagc

SEQ ID NO: 321984 - DNA, 82 bp, Homo sapiens
cccagtctgtgtctcaaatcaaccacaagctggaggcagttcaattaacctccagaagatggctgaacctgcaggaatacca

SEQ ID NO: 321985 - DNA, 100 bp, Homo sapiens
ctgcgtcaaccagtgggagcagctgagggggccgggtggcaacgaggatgggccacagaagctggactcggaagctctggcgacggcgcttgacgtgggc

SEQ ID NO: 321986 - DNA, 50 bp, Homo sapiens
aacgtggatcgttgttttgaaacgttttttgcatgtctgacacccatgac

SEQ ID NO: 321987 - DNA, 74 bp, Homo sapiens
tcctgatcaagaaaaccgacagcctgccaggagtgaagaaagctttgggcaaatatggtcctgccgatgtggaa

SEQ ID NO: 321988 - DNA, 75 bp, Homo sapiens
catttgctacagcatcccacattaagtcaacggtctgcaaccaccactccatcaggctctcctcggacctctcaa

SEQ ID NO: 321989 - DNA, 100 bp, Homo sapiens
gagggcttctacgtcatcttcgacagagcccagaagagggtgggcttcgcagcgagcccctgtgcagttccgcctttcatacaaccctttgagtttccaa

SEQ ID NO: 321990 - DNA, 98 bp, Homo sapiens
caaaagttgctgcgcggagagaaagctatctcaaggctactcagccatcccttacagaactcaccacactcaagtgtgggccatgtttgaggattgcc

SEQ ID NO: 321991 - DNA, 85 bp, Homo sapiens
tccgccagatcatcggtcaggccaagaagcatccgagcaaaaacacaccttgactttagtcagatacatcactgtctgttaaagg

SEQ ID NO: 321992 - DNA, 100 bp, Homo sapiens
gggatgaactgatgaagacaaggccttccagtttggaaaggcatttcatccttcatgaagccattcaggattttgaattgcatatgagtgcttggctctt

SEQ ID NO: 321993 - DNA, 82 bp, Homo sapiens
ggttattcgagtgaccgagaccgcggccgggaccgagggcggtgcgtctttctacgtgaataggattttgtggctggccaga

SEQ ID NO: 321994 - DNA, 74 bp, Homo sapiens
ggcaattcctgctgaacaaataatttttcatggcgggacaaattattggattccagcacagtgactcacttatt

SEQ ID NO: 321995 - DNA, 90 bp, Homo sapiens
gccacacgttggtacagggctccagaaattatgttgaattccaaggtgctggaaacatgcatgaagagctgcggcaagcggttccacgac

SEQ ID NO: 321996 - DNA, 75 bp, Homo sapiens
gaaaaattttgtgaagacattggtgttgaacctgaaaatcttttctgggagaagaggctacaaggacttagtgca

SEQ ID NO: 321997 - DNA, 100 bp, Homo sapiens
tcgcagtgacctggggaacctgctcaaagccctgggtcgcttggaagaagccaagagcattagtttggatgaattcaagtcattttgccattttacaacc

SEQ ID NO: 321998 - DNA, 101 bp, Homo sapiens
gtgaaacctcctagtagaaaaagttcttgggacaaacttcatttggtgaccattgtgaggtagatattttgttctaattttccagatgaggaagctgagac

SEQ ID NO: 321999 - DNA, 100 bp, Homo sapiens
gatttgttctcagttgagtgaaagattggagaagcagcagacagccaataaggtggaaattgagaaaattcggttgtcagcagaagtatataggatactt

SEQ ID NO: 322000 - DNA, 99 bp, Homo sapiens
ccgcgtccccggctgctcctcctcgtgctggcggcggcggcggcggcggcggcggcgctgctcccgggggcgacggaaaccaatagagccatggcgact

SEQ ID NO: 322001 - DNA, 100 bp, Homo sapiens
caggcaggtgtgcctgtggaactcaatggaacacaggctggaatggaccaggctggtagattatgagaataatgttatcactattgatctggttcaaaat

SEQ ID NO: 322002 - DNA, 74 bp, Homo sapiens
gccgctgctacctgcagcgccgtgtggcacgacacaaaaatcagaactcacctgtgagtgaatctctgatccag

SEQ ID NO: 322003 - DNA, 83 bp, Homo sapiens
caacgccctgctgcggcggctggtccgcattggggtgctgggtaggccaggtttcagcatcgcagacaagaagcgcaggacag

SEQ ID NO: 322004 - DNA, 100 bp, Homo sapiens
atccacatgagagtccactctggggagaagcccaacaagtgtacggtatggcctcacaagtcttggtctacccaccatatgtttatcaaactcagtcaag

SEQ ID NO: 322005 - DNA, 90 bp, Homo sapiens
ggggcctcgggcgccccgcagccccccaacatcctgctcctgctcatggacgacgtcgcaatggaagaagagatcgccgcgctggtcatt

SEQ ID NO: 322006 - DNA, 75 bp, Homo sapiens
tacagtagaggacccttttcactcttggagtctcaaagaagatggagcaggaaccccctatgacaaggaatccac

SEQ ID NO: 322007 - DNA, 82 bp, Homo sapiens
cgagccggggctatttctggcgctggcgcggctccaagaaggcatggacacccgctccgggagccagtgttccgtcacccca

SEQ ID NO: 322008 - DNA, 97 bp, Homo sapiens
gctacaaaccatactaaattattccatttgcaacttatccccaacagggatctttgggcagcgcctagaggaaacagtccaccacgagcggaagtat

SEQ ID NO: 322009 - DNA, 98 bp, Homo sapiens
tgatttcttccaaagcacaggaatctcactctgttaaagctggtctgttctaactgaggtcacagtaatgaaaggcagtaatagaaataaggatcatt

SEQ ID NO: 322010 - DNA, 94 bp, Homo sapiens
cgacaggattcgttggctgccgtccccgctgctgtgcattggagtgaagacatttccacctggacacctgaccatgtgcctgccctgagcagcg

SEQ ID NO: 322011 - DNA, 50 bp, Homo sapiens
ctctgttccaaatgctttgctggatatcaaagcagactgcaatacctgcg

SEQ ID NO: 322012 - DNA, 74 bp, Homo sapiens
tgaagataccagtttgcgtcaggagacacagtctttaacacctctgtgtgaagatgacaaccaggcacaggaaa

SEQ ID NO: 322013 - DNA, 135 bp, Homo sapiens
tcaaaggccagttctggaatgatgacgactcggagggagataatgaatcagaggaatttctctatggcgttcagacagaagccctgcagcagctgcagaaggactctgaggccatccgcagccagtacgctcact

SEQ ID NO: 322014 - DNA, 100 bp, Homo sapiens
ctcgacactctgcaagattctctcctgaagtcccaggtaaaagatacctgctttcttcagcctatgtagacagccacaaatgggaagcaagagaaaaaga

SEQ ID NO: 322015 - DNA, 74 bp, Homo sapiens
aaccagtctacagccacgaccctctttcacagtctgccattgctcagattcctagaggggagtgcctgcgagcc

SEQ ID NO: 322016 - DNA, 82 bp, Homo sapiens
gaaaccccgttgacaaggcactgctttttcatgacgttgcagaggaaagtggtcgcttatggtcagaggagcagcctgctca

SEQ ID NO: 322017 - DNA, 90 bp, Homo sapiens
tacaaggaatctgagggtgccctcaatgagcacatgaccagcttagcttctgtcctaaagatgccttcaattaagttgcagagttctgat

SEQ ID NO: 322018 - DNA, 99 bp, Homo sapiens
tttgtatctatcctgcttatttaaataataagaagaccatcgcagagggaaggcgaatccccataagtaaggtcatatataccagaagttctgagattg

SEQ ID NO: 322019 - DNA, 75 bp, Homo sapiens
gcacattaccattaaccagtacctgcagcaggaaattgacaatggcccttcagctatgctaggtctataatggga

SEQ ID NO: 322020 - DNA, 75 bp, Homo sapiens
gtgatttctgcatttccaactgagagtaaaaggccaagctatgatagcaactggtggagtgataactggcctggc

SEQ ID NO: 322021 - DNA, 75 bp, Homo sapiens
gtggagctggtcgcagatcctgagacccggacagtggcagtgaaacaggtgttacagcacatgaaggccgtgcag

SEQ ID NO: 322022 - DNA, 75 bp, Homo sapiens
ggacgagcagcggaggcggtcgggagcgatggtcgcaatggaagaagagatcgccgcgctggtcattgacaatgg

SEQ ID NO: 322023 - DNA, 50 bp, Homo sapiens
cttgtccacccgccggccggaccagaagtaagcactttaaaggatctatt

SEQ ID NO: 322024 - DNA, 96 bp, Homo sapiens
tcctgctgctgattatcctccttgctgaggtgaccttggccatcctgctctttgtatatgaacagaaggaccgggacacagataagaaacgaattg

SEQ ID NO: 322025 - DNA, 80 bp, Homo sapiens
tcacgcggacatcgtctcctgtgtggcgatggtcttcctgctggggctcatgtttgagctgcctgtggaggaaccgattg

SEQ ID NO: 322026 - DNA, 90 bp, Homo sapiens
gaccgagtgttctttactttttgtttggttgaggtttcacgctagaaggtggctcaggaatcattaaccaatggcaacaggaatccaagg

SEQ ID NO: 322027 - DNA, 74 bp, Homo sapiens
tgtaacttacgtgtactttaccaacgagctgaagcagcattagtgccagcagtagttcccaagggctgtctcag

SEQ ID NO: 322028 - DNA, 83 bp, Homo sapiens
cccagccttgcctccacgagtccctccagcctccctaaacacaacgagcattttgaaagcgaagcagaagccgtagaatcagc

SEQ ID NO: 322029 - DNA, 75 bp, Homo sapiens
accaagaatcagccacagacggaacaagcatgcaggttcaaaccttgtactactcagctgatcacaagctgcttg

SEQ ID NO: 322030 - DNA, 97 bp, Homo sapiens
ggggcccgggccgccctctctcggagttggcaggaagccaggttgcagggtgtccgcttcctcagagatctggttggagttggagggtgagagaaaa

SEQ ID NO: 322031 - DNA, 75 bp, Homo sapiens
caattcgacaggatcacaaggggagattctatgaagacttttacaaggcctgccttaagtgtgaaagtaatgact

SEQ ID NO: 322032 - DNA, 74 bp, Homo sapiens
agactactaagcggaaaacatcttcagatgttagcaaaaggtgtgacaagcaacctgcctatgccccaaccacc

SEQ ID NO: 322033 - DNA, 75 bp, Homo sapiens
gaaaatggtgcctgctgaccttctggagttattggctagtaagaaagaagacttaactgatggttcatatgatga

SEQ ID NO: 322034 - DNA, 101 bp, Homo sapiens
ggaaggaggagaggtgctgtgctgtgtatgaagaggcagtgaagactctgccaacagactttgagagttttgacctgcctgaagagcaccagattgcgcac

SEQ ID NO: 322035 - DNA, 80 bp, Homo sapiens
taatggaactgaagacagctgggcctaacaagtgcccaggtgactcaggtgagaagccctaccactgcaactgggacggc

SEQ ID NO: 322036 - DNA, 80 bp, Homo sapiens
gtttaagaacatgacgccgtcacccttcctgcgattctacttaggttaaagcggcaactggggaagaagtatctgctgag

SEQ ID NO: 322037 - DNA, 100 bp, Homo sapiens
tccctttgtggctctatgtggaccctgcggaatccaccggcgcagtttcatctagcgactggtgcagatcccaagtctgtagtatgtgcattcttcaagc

SEQ ID NO: 322038 - DNA, 100 bp, Homo sapiens
aagcacagccccgaggtgtgcgaagccaccaagttttaccaattcttgagattctgtatcatgttgaagaaaggaattcacaccatgtgtatatggccct

SEQ ID NO: 322039 - DNA, 73 bp, Homo sapiens
aaaccatgtgctgaaatgtttgacgacactgatggtttggtcatcaagagagagggcacaggtacagagatgc

SEQ ID NO: 322040 - DNA, 98 bp, Homo sapiens
agagctggtggcctcaggtgaaaagcagttatttggcagaaaagcagagtatcagatcacaagatggctctcatgtcagttctggggactgctgttat

SEQ ID NO: 322041 - DNA, 100 bp, Homo sapiens
ttcgtctgctgagactcggctccaaggtcacagctcgtaacactgccctgtatgatgagattcgtcagtttcgcaaggcctgtggggaggctcatcttaa

SEQ ID NO: 322042 - DNA, 97 bp, Homo sapiens
ccaccatccgcgaggcaggagagaggaggaggagtgcggcgcggcggccccgggaccaaggagatggtgcaatgctgggccacagagcttgccccag

SEQ ID NO: 322043 - DNA, 80 bp, Homo sapiens
actcacctttggcaaagggactcatctaatcatccagccctgaaagaagcattggattttcatgtagatcaccagtcaag

SEQ ID NO: 322044 - DNA, 100 bp, Homo sapiens
tctcaaaactctctgaaaaatggctccctccgagttaaggcagacctcaacaccaacatcgaggatgaaggcagctccttctatggggtctccagccagt

SEQ ID NO: 322045 - DNA, 75 bp, Homo sapiens
cgccgggacacctggaagccgagaaatggtgcaatggatgagcttcatagtctggatccaagaaggcaagagtta

SEQ ID NO: 322046 - DNA, 83 bp, Homo sapiens
cccccgagggtcaacgagaaagagatcgcattttgaaagcgaagcagaagccgtagaatcagcggcgagcctgttgaaagaac

SEQ ID NO: 322047 - DNA, 90 bp, Homo sapiens
atgtaacaagaatccaaagaaaacaaaatggtggtatcatgtttgcagctcaccttgtgaagatgaaatatccaagaatctgtattctag

SEQ ID NO: 322048 - DNA, 51 bp, Homo sapiens
cctctcagagtgctgggattacagagcaacttatgactctcatctctgctg

SEQ ID NO: 322049 - DNA, 51 bp, Homo sapiens
tcctcccccgcatgacccccttgcaattctgtggtgttcttggtcacacat

SEQ ID NO: 322050 - DNA, 100 bp, Homo sapiens
ctggcagcagcccccggggcaagagcaggagcccggcaccccccgccgacaaggagggtgagaagccctaccactgcaactgggacggctgcggctggaa

SEQ ID NO: 322051 - DNA, 75 bp, Homo sapiens
aggaatgccagtgcatcttttgcacagctgttgatgataattagaagcatgctttccactgaacttcccgacaac

SEQ ID NO: 322052 - DNA, 100 bp, Homo sapiens
agatggcgaaggtctcagagctttacgatgtcacttgggaaggccaatagcttcaccgtctcctctgtcgccgccccttcctggcttcaccgtttcatca

SEQ ID NO: 322053 - DNA, 90 bp, Homo sapiens
ccacctactattacccccagtatctgcaagccaagggtgaggaccctttcaccagtgaaactgttgatccagaaatggaaggagatgaca

SEQ ID NO: 322054 - DNA, 75 bp, Homo sapiens
ttgttcccccaaatgtctgactctgactctcggactgagaaacgcaagcagttggaattgatcacaccttttcag

SEQ ID NO: 322055 - DNA, 75 bp, Homo sapiens
gacagagctttgatagtcgtaccatatgcagaaggtaatgtgaggctacaggagatgatggcaacaatgtgccag

SEQ ID NO: 322056 - DNA, 88 bp, Homo sapiens
agcggcgagcatggcccgcgcggcgccgggcgctgactgagggtcctgagaacattatctgtagctgtatctccccatgtggaagttg

SEQ ID NO: 322057 - DNA, 75 bp, Homo sapiens
cagagaattttgtagacatcaaggcttggccttcgtgcctctgcagatctggtccaaagtcctggccatctcagg

SEQ ID NO: 322058 - DNA, 100 bp, Homo sapiens
ttcttgatggtatccattacctccatgcaaattgggtgcttcacagagacttgtgggatgccatcactgaaatggatgaacataataggcccattcacac

SEQ ID NO: 322059 - DNA, 100 bp, Homo sapiens
agagagagggggactctgtgtgagggaaagaaaacaatttctcctgctctgcagcttctgttcagagccgagactgtctgaagctgggcccacctgctga

SEQ ID NO: 322060 - DNA, 50 bp, Homo sapiens
agccaaaacagttcattcatattcagcgtgctttacaaggccaagtacgg

SEQ ID NO: 322061 - DNA, 101 bp, Homo sapiens
gtcagcctcccgccggccgtctccttaacaccgaacaccggactttgaacatgtcggggatcgccctcagcagactcgcccaggagaggaaagcatggagg

SEQ ID NO: 322062 - DNA, 150 bp, Homo sapiens
gctgccctcctgccgtcgagatcgccgccgacgccgctgctgtggccgctgctgctgctgctgctcctggaaaccggtgctccaagtgaccagagcagtggcacctcctctcctctctgtgacagtggcttacatctcaactaccatccc

SEQ ID NO: 322063 - DNA, 96 bp, Homo sapiens
tgatcttgtacttggattcagcaaggaaccttccgtggcagctagactgtcttgcttgcttgctgaagttaatatgccagtttgcagtagatccat

SEQ ID NO: 322064 - DNA, 101 bp, Homo sapiens
cgccctgcgccagccttcgtccccgcagaggaccccccgacaccagcatggactgctgcaccgtttttcgttggaatatacgttgcacatttatggcgatt

SEQ ID NO: 322065 - DNA, 50 bp, Homo sapiens
gtgctctgttcacggctccatcgctgttattcaaatctgaacatcaatga

SEQ ID NO: 322066 - DNA, 89 bp, Homo sapiens
ctctctcggagttggcaggaagccaggttgcagggtgtccgcttcctcagcaatcatcctcttccagtggtagcgtgtttgggtctgga

SEQ ID NO: 322067 - DNA, 75 bp, Homo sapiens
ggctgaggcatccgggagctggcgtaatgcctggccgcagtgtggtgctggagatctagaagacccatggtagcc

SEQ ID NO: 322068 - DNA, 100 bp, Homo sapiens
tgtagcgtcagatccttgagtgataaaggagtagagagtcattcttatagaagagcatcagaggaagataaaaaagaatcctcaatgtcaggcccctgag

SEQ ID NO: 322069 - DNA, 89 bp, Homo sapiens
aggacagcacctagtcgtggccggaggagtctcagagctgtcagaaagtgactgtgaagtgctgaccacactcaccccagacactggcc

SEQ ID NO: 322070 - DNA, 100 bp, Homo sapiens
ggaaaagcagttgctcgaagaactcgagcgacagagacaagctgagcttgccgcacaaaaagctagagaggctgttgtagtgactgatggagagagaatt

SEQ ID NO: 322071 - DNA, 100 bp, Homo sapiens
acgtcccgacctccctatcataccacactcttcagcgaccacgcaggcactttcccggtccccaggtgtggatgaggtcaccattgtcaacattttgacc

SEQ ID NO: 322072 - DNA, 75 bp, Homo sapiens
gtcacctttgcattgcactcaggaaacgtaaatattttcaccacgatcgattagactgggatgaacacagttctg

SEQ ID NO: 322073 - DNA, 80 bp, Homo sapiens
cagacagcatatttgagtcatttccttcgtacccacagtgcttcatgagagtgttaaaagatcactgaagttggatggtc

SEQ ID NO: 322074 - DNA, 75 bp, Homo sapiens
atgcgcgcgatgctggaccagttgatgggcacctcccgggacggtgagttgggaatcagactcttgagttgacag

SEQ ID NO: 322075 - DNA, 74 bp, Homo sapiens
cgacgacatggcctccgctatgaaggcggatcaaaatacttgctggatggtggactcagagaccaataaaaata

SEQ ID NO: 322076 - DNA, 90 bp, Homo sapiens
caatggagctcatctggaacctgtgtgagattctttttattgaagtggccccagtgtgtttcctgtaacaaatcgttcaagaaactctgg

SEQ ID NO: 322077 - DNA, 83 bp, Homo sapiens
atgacacctgtttggagaagctcctggactggtttaaaacggtcactgaaggaggtctccaccagctcctggccgggttcgag

SEQ ID NO: 322078 - DNA, 83 bp, Homo sapiens
cggcgagcgcgagcggcgcgagaaacttcatggcggctgaagagatgcattggcctgtccctatgaaggccattggtgcccag

SEQ ID NO: 322079 - DNA, 100 bp, Homo sapiens
agacggtgctgggagcgcgtctccttgaacgttgtcccgcctgggattgcgagctatacctgcaggcccgcttcacttggcgaggagcccgcctgctccg

SEQ ID NO: 322080 - DNA, 75 bp, Homo sapiens
atagggagcttttggagagcaactttactttagtggatggtttgtgcttgtcggaatcagaaacagtcaacaaag

SEQ ID NO: 322081 - DNA, 80 bp, Homo sapiens
aaggcaacgacgttccatctgtggaaggacctaccaaccagggtgagcccatcactttctgtgaggagagttttgtaaag

SEQ ID NO: 322082 - DNA, 98 bp, Homo sapiens
aaatatggtaaaactattgctcgatcgaggagctaaaatcgatgccaaaaccagggttctccagagagcgggcatccagagaggagtcctgggagagc

SEQ ID NO: 322083 - DNA, 100 bp, Homo sapiens
ctggagacggcctgggtgctggcgaagcggaggccggagatgagacgttcctacagatggatgaggtgggccacatcccacagacagcagccagccacgt

SEQ ID NO: 322084 - DNA, 82 bp, Homo sapiens
gttggctgggaccgtgcgcgtgcgcctgggggcaccgctgccgttccgaggggaggtcatcaaggcttgggacattgccata

SEQ ID NO: 322085 - DNA, 99 bp, Homo sapiens
accatcatccttttgggcttgatcatcgcctaccacacacgtgaagtccaggtcacgcaatatttaaactcacgtatctaagcaatcacgactataaac

SEQ ID NO: 322086 - DNA, 48 bp, Homo sapiens
gatctcttgttggaagagaaaatgagaacccccagtcggatcttcagg

SEQ ID NO: 322087 - DNA, 75 bp, Homo sapiens
tagtgttgctttggatcttgtggaaagtcagaattttaccaaatgttgcaagaactctggagttcttatggtagt

SEQ ID NO: 322088 - DNA, 135 bp, Homo sapiens
cgctgctgccgccgccgccgcccagagactgctgagcccgtccgtccgccgccaccacccactccggacacagcaacacttcttgttgctgtaaatgaacttcgtaggaatgctcgggctaaaggaatgtcattt

SEQ ID NO: 322089 - DNA, 76 bp, Homo sapiens
tgtgaaaggccaatttcatgaatttcaagagagtaccattggggaacctatgagaaccccaaagacattaaagatt

SEQ ID NO: 322090 - DNA, 126 bp, Homo sapiens
aagaaaaaaaccacaaatgtttttctgttttgcctgaatacatgatttaaacaagagatttccacagaagagtacccaaaggcaagtggaacagctctaatggggttgaagaaaaggagacttggg

SEQ ID NO: 322091 - DNA, 82 bp, Homo sapiens
tcctgaaaggagagacacttgtgaacattcaagtgaagcaaaagcctttcatgattatccttatgccagcctggaccatctt

SEQ ID NO: 322092 - DNA, 75 bp, Homo sapiens
caacaagcttcactccatctacgagaggaaggagagggaggagaggagcagagcagcagctccgtgaagaaagat

SEQ ID NO: 322093 - DNA, 90 bp, Homo sapiens
cttgatggaagccatttccaaagacaacatcctttacctacaggcacaacccgatctcccagagaaggagaagtgcctggcgtggactat

SEQ ID NO: 322094 - DNA, 100 bp, Homo sapiens
cgagcaggaggcgccatcatgagggtctccccagacacccgagcacccacccgcttcgtggatgatgaggagctagcgtatgtgattcagcggtaccggg

SEQ ID NO: 322095 - DNA, 75 bp, Homo sapiens
cggagagggtgctggctgccgcgcggccgaggtttttctatatgagtggagaagacagctgttaccagggaggtc

SEQ ID NO: 322096 - DNA, 99 bp, Homo sapiens
gaagcggtgggcagagggcgctgagtccctagaggtgttggctgagcgaggcatttcatccttcatgaagccattcaggattttgaattgcatatgagt

SEQ ID NO: 322097 - DNA, 100 bp, Homo sapiens
ggatcatgaagcgctcggtagccgtctggctcttggtcgggctcagcctcggtgtcccccagttcggcaaagaaaaaagcagcaagcctcggcagcagtc

SEQ ID NO: 322098 - DNA, 88 bp, Homo sapiens
ccaagaaaagatggtcccaaacgttctgtactgtccaagtcagttcctgggtacaaggtggcctgtgagtacggcatggtgcacgtgg

SEQ ID NO: 322099 - DNA, 100 bp, Homo sapiens
tgaaaacagtcatgtgaaaactcatcaccttaaggtgttaagtgtaaggatcttcatgatgaaatttctgtaaatggtttcagaggagcgtgctcgacct

SEQ ID NO: 322100 - DNA, 82 bp, Homo sapiens
gccgccgcccgcctccgcctgccttctgccgccggccggcgcgtcgtccccacaggaaagtatgtgatggtgatgggagtgg

SEQ ID NO: 322101 - DNA, 98 bp, Homo sapiens
caagaatatctgttcctgcaactgcactgattctagaaacactctctattcgaactctcatgaggctcacagaacatttcctgcctgttgctcacact

SEQ ID NO: 322102 - DNA, 74 bp, Homo sapiens
tcgtaaagattatgacaaatcacaacttgtagagctggccagctcagcgtccctggaagggaagggacaactga

SEQ ID NO: 322103 - DNA, 90 bp, Homo sapiens
gctgtgatgcctgcagagctgtggcttaccaggaaggaggagacagttactgtctatcccgcagacgtggtgctctttgaagggatcctg

SEQ ID NO: 322104 - DNA, 100 bp, Homo sapiens
gagactcttgccaaacagaccttgaaagacaaaactggcactgattcaaattcaacagaatcctctgaaacttccacagaatactctgaaacatatttcc

SEQ ID NO: 322105 - DNA, 96 bp, Homo sapiens
gtgaaagtcctctttttctttgtaccacttactgagggtgtatcaaggtcagaagaagtcaaaagaagctttgtcccactatcaagcagctttgga

SEQ ID NO: 322106 - DNA, 100 bp, Homo sapiens
aggcaaccacgttctccaatgcaatgctgtttgccctgaacatcatgaattcccaagaaggaggtcagtatgggaatcctttaaataaatatatcagaca

SEQ ID NO: 322107 - DNA, 82 bp, Homo sapiens
cgcggatctcaccgccgctcagggcctcgggccagcggccaggagctgcctcccccagcccccgtcccgcggcccccagccg

SEQ ID NO: 322108 - DNA, 100 bp, Homo sapiens
tatcgtaatccccaaaacagtgcacagacggctgacggctcacactgtccttttggaataaatcatgggattgagcttcattcagatgtggtggaatatg

SEQ ID NO: 322109 - DNA, 100 bp, Homo sapiens
ggaagacgcgctcctgcgccggtgctgtaaaatacctggagtgctcggcgctcacacagcgaggcctcaagacagtgtttgacgaagcgatccgagcagt

SEQ ID NO: 322110 - DNA, 98 bp, Homo sapiens
cgcccgtcggacggggaggaggagcaggagctggaggaggagccgccgccgccagagttggattacagaaactcctatgaaattgaatatatggagaa

SEQ ID NO: 322111 - DNA, 76 bp, Homo sapiens
agcactggaagaaaatggtttggctgtgataggagtatttttaaaggtggagccgccaccaaaatgcagattttcg

SEQ ID NO: 322112 - DNA, 75 bp, Homo sapiens
aggaacgggggcaggggatggtgaatgacgggatgttccatttaagcagacctcttccatagctgtagctggagc

SEQ ID NO: 322113 - DNA, 50 bp, Homo sapiens
ggagaactatagcaatctggttttcttggactacacttgctgctttgaag

SEQ ID NO: 322114 - DNA, 80 bp, Homo sapiens
ggcgagaacgtccactgcgggccggcgaaagctggtggtctttgggaagaagcttcctgcctttgccaccatccccatcc

SEQ ID NO: 322115 - DNA, 90 bp, Homo sapiens
cacggtctgcccacccaacgcgaagacggtaacccgtgtgactttgactggtacggcaagaagaagctgaaatacctgccctacaatcac

SEQ ID NO: 322116 - DNA, 50 bp, Homo sapiens
cttcattgctccttcaggacatggccatctccagattcatttttaatcca

SEQ ID NO: 322117 - DNA, 75 bp, Homo sapiens
ttcgtctttgcagcgtagcccgagtcggtcagcgccggagcacaggaagtcctggagaacctgaaggaccgctgg

SEQ ID NO: 322118 - DNA, 75 bp, Homo sapiens
acgaggcaaggagctaaagcagcgtgcgttcagccctggggagggccctcctggacccgggagcggaccctggtg

SEQ ID NO: 322119 - DNA, 100 bp, Homo sapiens
cagcggctgaggaggggccccagcagcccccgaaggccctatcaggacatggagtatgaaagacggctgccgcgggcggacacgccagaggaggaggccg

SEQ ID NO: 322120 - DNA, 83 bp, Homo sapiens
ctctggaggagccccttggggccagcacccaggttgtcccaccagatatttggcatgatcttcagtatgatcttgtgctgtgc

SEQ ID NO: 322121 - DNA, 98 bp, Homo sapiens
gcagatgtgatctgcgctaggtggcatctcctctcacggatgcctcgcgtcgagggcgaggcccccagcagtgagactggcacatccctggacagccc

SEQ ID NO: 322122 - DNA, 100 bp, Homo sapiens
ctggaaccatctcagaagccatgcccctcaggctggaacttgccctgtctcctcgcagatgagagcacaatcattgtggagaagacagttcaagacctcc

SEQ ID NO: 322123 - DNA, 100 bp, Homo sapiens
aggtccctcaaagcgggaaatgcgtcaaaggaagctgagattgacagcattcaccagttagttgtgggggcaactgaaaatatcaaggaaggcaacgaag

SEQ ID NO: 322124 - DNA, 90 bp, Homo sapiens
attggatgatgtttgtgcgcaaagccaggtgaaaggtgtagcagtcactcggcctacacccacagcatcgaccttgtgaacccagcgacc

SEQ ID NO: 322125 - DNA, 89 bp, Homo sapiens
cgggttattcgagtgaccgagaccgcggccgggaccgagggaatactcccccagttgcaagaggcgcaggaccgtggaagacttcaaca

SEQ ID NO: 322126 - DNA, 83 bp, Homo sapiens
gatgcaccttccgcccgcatgaggaggagatgcctgaggaaacccagacccaagaccaaccgatggaggaggaggaggttgag

SEQ ID NO: 322127 - DNA, 75 bp, Homo sapiens
aagagttaaatgccctcaagtcgacaggggatgggaccctagggccgcgatgggcctcttggaacattggtgtgt

SEQ ID NO: 322128 - DNA, 75 bp, Homo sapiens
tgggaagccaacgaccacacgcagttcctgcacttggccatcatccatgaagaaaaggcactgaccatggaagtg

SEQ ID NO: 322129 - DNA, 90 bp, Homo sapiens
gaggagcgaggcagctgtactaggactgggaacgggttccaatgattcttgttggtaataagtgtgacttggaagatgaaagagttgtag

SEQ ID NO: 322130 - DNA, 100 bp, Homo sapiens
gtactgcccatgaaaaaggatgttgaccggacaggagaagacagactgctgctttggacctgttggtaatgatggcctgagctaaacatctaactagaag

SEQ ID NO: 322131 - DNA, 75 bp, Homo sapiens
ccttttgcctcagatactattttgaagatccgtatcagatcctgggcccgaccagcagtcgcctagccaaccctg

SEQ ID NO: 322132 - DNA, 75 bp, Homo sapiens
gaaggtcagcgccgacggcagccggcacctgacggcgtgaccgacccgagccggaacttaagagatttgagaact

SEQ ID NO: 322133 - DNA, 99 bp, Homo sapiens
gtgcaaacagacttcggagtacctgcgctatgaagacacgcttcttctggaagaccagccaacagctggcccgagataacttcttccgctgtggtgtgc

SEQ ID NO: 322134 - DNA, 82 bp, Homo sapiens
ggggagtcgggggagtcgtaaacaaccctgaagagaacagccaggcctgaaatctctgcccctgttagaaaatcaaatcaag

SEQ ID NO: 322135 - DNA, 97 bp, Homo sapiens
ttctgccgcaccaggctcatcctgtccatcgtgtgcctgatgatcacgcagctggctggcttcagtggaccagtgattaaggctgcagaagacagtg

SEQ ID NO: 322136 - DNA, 82 bp, Homo sapiens
gtcacaggccatgctctggcaaaaacggttccgagtctgaggaagacataaccttgtgcctgcctgcccacctctctctctg

SEQ ID NO: 322137 - DNA, 82 bp, Homo sapiens
cgcgcgcagggcctgcagcgggagctggacggcgagcgcgagcggcgcgagaaaaacctgcaaccatggtcgtgccactagc

SEQ ID NO: 322138 - DNA, 80 bp, Homo sapiens
gtggaagtaggatgtttggtggcagcaggagcaaaatcaactctggactggttgccataaaggaagcccacgacatagag

SEQ ID NO: 322139 - DNA, 75 bp, Homo sapiens
gaaagcggcttatcgaacagagccgggagttcaagaagaacactccagagtgagacggtttaagcggaagcatct

SEQ ID NO: 322140 - DNA, 50 bp, Homo sapiens
aaagaggaatgggcctggcctgtgggcagactacacttgctgctttgaag

SEQ ID NO: 322141 - DNA, 90 bp, Homo sapiens
ccttcccgagtgcagagcgggcagagaagatccgagggaagggcttcgactggccgctgctggtgaaggacttcaacctgcttcgctggc

SEQ ID NO: 322142 - DNA, 75 bp, Homo sapiens
tcgggacaccccggaagctgggaaatgatgatgggaaatattgcagcagttgcagcttcctgtgccaataatgtt

SEQ ID NO: 322143 - DNA, 82 bp, Homo sapiens
gaaagacacacctaccaagaagccagtcaagcggccagacctcctgccccccgaggtctgcagtctcctgaacccagcagcc

SEQ ID NO: 322144 - DNA, 75 bp, Homo sapiens
ctgcgacacatcgagcacatggagaccatctgcctgtgggacatcagtgccgttccaaaggagggaaaagtggta

SEQ ID NO: 322145 - DNA, 90 bp, Homo sapiens
ccaacactggctataagcccctgtatatcccctccaaccgggtcaacgatggtgtttgtggaggcaagtgaggcctatctggttggcctt

SEQ ID NO: 322146 - DNA, 90 bp, Homo sapiens
agcgaacaaggagtaagggaactttgcgatacatgagcccagaacagatcaaccttttcggccttccttgtcccgcaataacagcgtacc

SEQ ID NO: 322147 - DNA, 75 bp, Homo sapiens
cagttttctgcttaacacacttcaagaaaatgtaaacaagtatcagcaagtggctccggcagctgttgtgcctcc

SEQ ID NO: 322148 - DNA, 82 bp, Homo sapiens
gtaatcaattgtgctgacaacacagagctggaagtcgagtgtgctactcaactcaggagatttggagacaaactgaacttcc

SEQ ID NO: 322149 - DNA, 112 bp, Homo sapiens
tccttcctgtgcgtgtgtgctgatgaaaaccaagagtacagccccatgactgggcagtgccgctcccggacctccacaggagctgggaatcccaagtgcaaaattgcaattg

SEQ ID NO: 322150 - DNA, 75 bp, Homo sapiens
atgattgaatctggtgttatcaacttaaaagatgccacctctaaggttatcaatactctggctgaccatcatcat

SEQ ID NO: 322151 - DNA, 75 bp, Homo sapiens
gcaggatgcgccgctccactgtcggtagcaacaaggtgctccatacttgcttgcagtgcctacgtggctctggct

SEQ ID NO: 322152 - DNA, 101 bp, Homo sapiens
tcatgcatttgaagcccatttccagagagctgcggcgggagctgtatggccgccgtcgcaagaagcttgaaggtccccaccaccattactctgacacttcg

SEQ ID NO: 322153 - DNA, 90 bp, Homo sapiens
aggagattctggggcagtatcaacggagtctccgggctggaaactgacaaactagctctcccgatgagccccagcccgcttagcccgagc

SEQ ID NO: 322154 - DNA, 75 bp, Homo sapiens
catagggagagccgccggaagtattgacggaaagcttgaattacctacatgctgtgctgtcgtcatgcctcaaac

SEQ ID NO: 322155 - DNA, 87 bp, Homo sapiens
atgttgcgcgaggaaaatgcgggacgcccagggaagaaggagaaagggccaacccctgaagaagcaatacagaaactgaaggagaca

SEQ ID NO: 322156 - DNA, 75 bp, Homo sapiens
tgatgcctgcagagctgtggcttaccaggaagctgtgccagccacagagcactggcagcctccttggagaccctg

SEQ ID NO: 322157 - DNA, 75 bp, Homo sapiens
ccagcatcgagatgtagttcctgagcatgaggctcccagcagtgaggaacgagctagagcgacagtttcttgaat

SEQ ID NO: 322158 - DNA, 97 bp, Homo sapiens
aggattccaagtaactcttatttggttacagattatgccattgccaggcgcatagtagatttgcattcaagaattgaggaatcaattgatcgtgtct

SEQ ID NO: 322159 - DNA, 75 bp, Homo sapiens
acgcatttttgtttttggaaggagaaggatagacttggctttgagggagttggtctctcagtccatgggcaattt

SEQ ID NO: 322160 - DNA, 75 bp, Homo sapiens
cgcagctgcgggtccgggattcccagccatggcagattcctccgggcagcagggcgatggatgactacagtgtga

SEQ ID NO: 322161 - DNA, 100 bp, Homo sapiens
caggcctttcccagtcaccatgacaggagctatttgtgaacagcgagaactatctaggaaaggacgaggaccaaattaccaagcctttggatctaatcca

SEQ ID NO: 322162 - DNA, 51 bp, Homo sapiens
cattcgcttaaattttgcagagaaagaaacctctgtagaggagcaggatgc

SEQ ID NO: 322163 - DNA, 51 bp, Homo sapiens
ctcggggtcgtcccatgtccaaaaagaagattgatgccaagaaggaacagc

SEQ ID NO: 322164 - DNA, 126 bp, Homo sapiens
agaatctacaggagtaaagcgaattgtccaagccctgaatgccaatgtgtggtccaatgtagtgatgaagaatggaagaggcgtgcggctctactacatcggaggggaggtcttcgcagagtgcct

SEQ ID NO: 322165 - DNA, 98 bp, Homo sapiens
aacacttcaccctctcgcctcgggtctcgggggccgctctgggatcccggccaccagcaattgtccgtgacaaggtgcagtcgctgtgctaccttcag

SEQ ID NO: 322166 - DNA, 95 bp, Homo sapiens
actctccgcctgcttccctccgtgtcctgaaaagtgcgaccgttctcccaaggaatttccacgctcaccatggatgatgatatcgccgcgctcgt

SEQ ID NO: 322167 - DNA, 100 bp, Homo sapiens
aaataaacctgtggagactatcggttttgactctattatgaaacagcaaaggtgtgatgaatgcagactctgctaccattttggctgtttggatcctcct

SEQ ID NO: 322168 - DNA, 115 bp, Homo sapiens
atcaaatggcacttcattggccacctacagaaacaaaatgtcaacaaattgatgggtgagatcggactggaactgttcggctgcgaccagaaatttattttcctgagtaaattgc

SEQ ID NO: 322169 - DNA, 75 bp, Homo sapiens
tattcaacatgtggaagtattttgttatgccagatcctgtggtattgtggaaattcccagaggactttggagacc

SEQ ID NO: 322170 - DNA, 104 bp, Homo sapiens
cttagactaccccaggaacccgcgccgcgagggctccttccctcaggtgtgttccagagaacaagccttcagacatttgctatattgacgctgagctgtcaggg

SEQ ID NO: 322171 - DNA, 74 bp, Homo sapiens
gtttccgcagacagaagtggggagaagcggaggttcttttttcgatcggggaaacagacctagatccaaggcca

SEQ ID NO: 322172 - DNA, 96 bp, Homo sapiens
ctctactgatggcagtgttttagctgctggggtccagcgagggcactatctctatggccgagggtgaagacctcagtcttatggaagaagacaaag

SEQ ID NO: 322173 - DNA, 82 bp, Homo sapiens
tgacagtgttcgctctaaggggagaaggaatgtgtgaccatttccaacgctgcatcttcctcccgtgaggctggccgagctc

SEQ ID NO: 322174 - DNA, 83 bp, Homo sapiens
gaaacccccggcgctcctgccacgtcagcccaaggccaaccccactgtcactctgttcccgccctcctctgaggagctccaag

SEQ ID NO: 322175 - DNA, 98 bp, Homo sapiens
aagatttctggccagtggagagaggaattcctcaagacaccattccaggatgaccgagtgggagacagcagcaccagcggtggcagagaccccagaca

SEQ ID NO: 322176 - DNA, 90 bp, Homo sapiens
ctcaaattgatcaagcagatatgccaggagctcatgggacacatgtagctagtatagctgctggacactttccagaagaacctgaacgga

SEQ ID NO: 322177 - DNA, 100 bp, Homo sapiens
gatctatagtgattgtcagagcagggaaaatcacctttgcagaaaagtgcccaccagaagtatgtccgacaagcctggcagaaggcagacatcaatacaa

SEQ ID NO: 322178 - DNA, 75 bp, Homo sapiens
acagccccgacgaacatttctgggtgacactcaacaggattcccgagcccccctccatgcgcctgaaggcccgac

SEQ ID NO: 322179 - DNA, 75 bp, Homo sapiens
cgttttaatgccgagaggtctctgtgacgattttggaacagcatatgccatatatgagctggctgtggcttcatt

SEQ ID NO: 322180 - DNA, 113 bp, Homo sapiens
cctgccgtccttctccactttcgccagcccgtgccgcgagcgcggcctgcaggaggatgccggctccaggagcagcagtggaggtcgggaacgcctcattgtggagcccccgc

SEQ ID NO: 322181 - DNA, 98 bp, Homo sapiens
cgagaagcggccgagccagcagcagatgaagaggaagatgatgatgtagtggctcctaaaccacctattgaacctgaagaagagaaaactttaaagaa

SEQ ID NO: 322182 - DNA, 93 bp, Homo sapiens
gtttcgagatttgctgctaggggaccaaggatggcaaaacgacgacaggatggagagcaatacatcatcatctttggagaatttagcgacggc

SEQ ID NO: 322183 - DNA, 75 bp, Homo sapiens
ccatggaatcggtcctggaggacagcatggaggagcaggacttggagcgaaggttcgagctgctgagccgcgagc

SEQ ID NO: 322184 - DNA, 100 bp, Homo sapiens
atttcgtccaaggccatgggcatcatgaattcgtttgtgaacgacattttcgagcgcatcgcaggcatgcccaagagaatcgtaaatgcaaaaattgctt

SEQ ID NO: 322185 - DNA, 82 bp, Homo sapiens
caaggactaatctgatcgggtcttccttcatcctggagcattggtaagcgtcacactgccaaagtgagagctgctggagaac

SEQ ID NO: 322186 - DNA, 101 bp, Homo sapiens
caacgacctgtttgagagtgggaacatgacgcaggccgccatggcatcagatgaaggcaaactttttgttggagggctgagttttgacaccaatgagcagt

SEQ ID NO: 322187 - DNA, 75 bp, Homo sapiens
gcaggtctctgtcgagcagcggacgccggtctctgttccgcaggatggtaccaaggaaaggcagatgcccccgtg

SEQ ID NO: 322188 - DNA, 75 bp, Homo sapiens
aaaaatgactttactgaagaggaggaagcccaggaaaggccgagggggacggcaagatgcacatcaccctctgtg

SEQ ID NO: 322189 - DNA, 98 bp, Homo sapiens
ggcggccgaacgatgtgcgagaactgcgcagacctggtggaggtgttaaatgaaaatatatttttgccatcatggatcagtttggagatatattagaa

SEQ ID NO: 322190 - DNA, 75 bp, Homo sapiens
agcgctgcgctcgcgcccggatccctcaggacagagcgggatgccaccagcttgtccaaagggaagttccaggag

SEQ ID NO: 322191 - DNA, 75 bp, Homo sapiens
gcctcaccatgttggtgctgtttgaaacgtctgtgggttacgccatctttaagctcagcaaaacccagcagctca

SEQ ID NO: 322192 - DNA, 75 bp, Homo sapiens
ccatcaggggccttgataacacagagtttcaagcaatggctgccatccggaagaaactggtgattgttggtgatg

SEQ ID NO: 322193 - DNA, 75 bp, Homo sapiens
tcagggatggagccctctggcggaagccatcagctatggagataggcagatgagctttatgaaggcaaagaacag

SEQ ID NO: 322194 - DNA, 97 bp, Homo sapiens
acaatcaatacgattggaaccagcacaagtacaaactcacatttcaagacttcctcctggtgcggtggcaggacagtctgtggcaatcgaaggtggg

SEQ ID NO: 322195 - DNA, 74 bp, Homo sapiens
gtattggagacgagtttaacgcttactatgcaaggagggttttaaaatcaaagatgggaaaatcggagaaaatt

SEQ ID NO: 322196 - DNA, 98 bp, Homo sapiens
gccccgaagacgccgacctcttccactccgaggaaatcaagggagtccctggagttggaaaagagcaagcattaaaacttatacagattttgaaaggg

SEQ ID NO: 322197 - DNA, 101 bp, Homo sapiens
gtctgtgtccttccagctgcagatacggaggggccgctacctggtggcgctgggccacgcgtaccacccggaggagtttgtgtgtagccagtgtgggaagg

SEQ ID NO: 322198 - DNA, 76 bp, Homo sapiens
catacctatggctttattgacctcgactcccatgcgggtgtccgcaatgttgccagtgtctgtctgcagattggct

SEQ ID NO: 322199 - DNA, 89 bp, Homo sapiens
acgggcaccttctggctgacccggatcgtgctcctgaaggccctagccttcgtgtactggctggaccccaatggagaacaggtggtgtg

SEQ ID NO: 322200 - DNA, 75 bp, Homo sapiens
tctgcgatgtgaggaaaggcacctccaccagcggaatggccaaagactatgacgggtcttcctagcacatcaggg

SEQ ID NO: 322201 - DNA, 131 bp, Homo sapiens
agtgatctacgacgctccccaagtaagcctacacttgcctatccagaaagcaacagcagaggaaagaaccggaggctgaagcaggccaaagaagaagctcaggctgaaattgaacagtaccgcctgcagag

SEQ ID NO: 322202 - DNA, 109 bp, Homo sapiens
caaaacggcgctgatgagtctgtttgggatcccgctgtggtacttctcgcagtccccgcgcgtggtcatccaggtgcagaggccaagaccgttttgcccaagaaggaga

SEQ ID NO: 322203 - DNA, 75 bp, Homo sapiens
cattaatgaaaactgggatagattgcaccctggagaggaaaaatcagccgtagaattgttgattagtcttgcaga

SEQ ID NO: 322204 - DNA, 50 bp, Homo sapiens
caggaacaccgtcacgctgctggaggagttacatattattgaagttggca

SEQ ID NO: 322205 - DNA, 99 bp, Homo sapiens
gaacaagaagagaaccttgaagcaagtggaatggccaacctgctgacgggccccaaacggaacctgatggccctggcccggacatggtggaatcagttc

SEQ ID NO: 322206 - DNA, 98 bp, Homo sapiens
gccaacgagctcaacgccaggcgccgctcctttacagggagagtcccgtattctcagagtaaaagttgtttctggaattgatctcgccaaaaaggaca

SEQ ID NO: 322207 - DNA, 80 bp, Homo sapiens
cataaaaacaagtgtgtgcatctggctgttagaagaattcatgctcatccggaaacattgctgaggctcttgtcagcaaa

SEQ ID NO: 322208 - DNA, 100 bp, Homo sapiens
gaaggtccggggcttgccctggtcttgctcggccgatgaagtgcagaggtttttttctgctctgaaatagaaaatgtctgcagacggcggaggcatccag

SEQ ID NO: 322209 - DNA, 83 bp, Homo sapiens
ggaacagtacagagttgtacaggaggaaaaccagatcttcagtttagatcttggaggcatatcaactgtggttctaaatggct

SEQ ID NO: 322210 - DNA, 75 bp, Homo sapiens
caaagactctgggactcttggtgccaacagagttactctcacctgtggaatcctctcaagaggaacagtcattgt

SEQ ID NO: 322211 - DNA, 100 bp, Homo sapiens
tgcacaatcaggaatacagggaagggaaacacagcttcacaatggccatgaacgcctttggagacatgaccagtgaagaagtgatgtctttgatgagttc

SEQ ID NO: 322212 - DNA, 71 bp, Homo sapiens
agatctgaagacctattttactgataagaaaacacatctttacacactaaacctgagatccaagctggaaa

SEQ ID NO: 322213 - DNA, 98 bp, Homo sapiens
ctcatacagaattacgcatttccacttctaatggaaggcactgatcctgaaactgaagaccccaaccacctccctccagacagggatgtactagatgg

SEQ ID NO: 322214 - DNA, 100 bp, Homo sapiens
tcatttttggctcagacgggcgagttttcagttccactgaaatgttcaacaaagaaatgttcggtgacccttgcacggtgtcctcccagatggagctgga

SEQ ID NO: 322215 - DNA, 82 bp, Homo sapiens
ttggagtgtgcgtgcgcgccgagcggtgtggacactgccagcggctgcagccgacttggaatgacctgggagacaaatacaa

SEQ ID NO: 322216 - DNA, 85 bp, Homo sapiens
tcatgagcacatatgtcatgatgagctcttcagtatccccatcagccagtttccgaggtgctgagaagcacagaaactccgcaga

SEQ ID NO: 322217 - DNA, 83 bp, Homo sapiens
ccggcttctgctgttgctcttctccgccgcggcactgatccccacagtgcagggctcgcggcctggcaagaatgtacagctga

SEQ ID NO: 322218 - DNA, 91 bp, Homo sapiens
gactcctccgacgccgatccggacagcggcacagaggagggagtcacttatataagaagaaccttgatgtgaccaagatccggaagggaaa

SEQ ID NO: 322219 - DNA, 50 bp, Homo sapiens
tcgtgggggatctcttacggaaagtagggtcaccttcaggccattcagag

SEQ ID NO: 322220 - DNA, 75 bp, Homo sapiens
tttctggaatgtcattatcagacacaatgatgcctgaaaacttcatgcctcctgttcccatcacatcaccaatca

SEQ ID NO: 322221 - DNA, 100 bp, Homo sapiens
agaaaccaagaccacctcctgctctgggaccggaggagacatcggcctctgcaggcttgccgaagaagggaggtgcagcggaactgctgcctgacgctct

SEQ ID NO: 322222 - DNA, 93 bp, Homo sapiens
gtcggactcccgcggcgggaggagcctgttcccctgaggatttttagactctgaggagcagttggagctaatccacattatggaaatggaaac

SEQ ID NO: 322223 - DNA, 49 bp, Homo sapiens
gtggcctccgttctcttggcccagtcatctggggacctggagaatgatg

SEQ ID NO: 322224 - DNA, 100 bp, Homo sapiens
aaatgtgaatctcaggagagagcagccagagtgtactatactggcaattgctggagaagattttgcaattgttgcttctgatactcgattgagtgaaggg

SEQ ID NO: 322225 - DNA, 50 bp, Homo sapiens
gtgaaatcctgtcctgaagactgtaagacagcccacctgaggatattgac

SEQ ID NO: 322226 - DNA, 75 bp, Homo sapiens
gaggggctgcggagacagagccctccggccagcggggaggcctgtagtggtggagacacgcccagtggatgatcc

SEQ ID NO: 322227 - DNA, 75 bp, Homo sapiens
aaccctggatcaaatggagccttatctcatagaggaaacttttgagaagaactttgaaagagaaacccataaaat

SEQ ID NO: 322228 - DNA, 97 bp, Homo sapiens
tttaaagaaagatttgaagcactacaaacaagcagctgacgtcgaggtcctcagcgatcagttgatgtaatagtttcatctgctttcttattgacta

SEQ ID NO: 322229 - DNA, 100 bp, Homo sapiens
cggcagcgtcccggacgaggaggccgctttgaagaggaatttatcaaaatgcgcatggagagacttcaggcctggatgaccaggatgtgtcgccatccag

SEQ ID NO: 322230 - DNA, 90 bp, Homo sapiens
caacctgaggggcaagtcggggcagggctactacgtggagatgaccgtgggcagccccccgcagacgggtctcgctctgttgcccaggct

SEQ ID NO: 322231 - DNA, 75 bp, Homo sapiens
aaaaaagttctcattttgtgtcctcccatcccattctcctcactaaccaaagctgatcttgcatctttaatggat

SEQ ID NO: 322232 - DNA, 89 bp, Homo sapiens
tagaaatgaagtgacagtggaactgcggaaggtcaaaatgcagatcttcgtgaaaacccttaccggcaagaccatcacccttgaggtgg

SEQ ID NO: 322233 - DNA, 100 bp, Homo sapiens
ccggcatgggttaccgctgctgcccctgctgtcgctcctggtcggcgcgtggctcaagctagttatggctgcagcttcgattgccaatattgtaaaaagt

SEQ ID NO: 322234 - DNA, 75 bp, Homo sapiens
agcacaggacagccacctgctgtcgggccagctgcccacggctgtccccttttctgggactattcaaggaggtct

SEQ ID NO: 322235 - DNA, 75 bp, Homo sapiens
cacttcagaaggtctgcttggtgacttggatacagaaatttcctgggctaaaattgagaggatccagaatccaga

SEQ ID NO: 322236 - DNA, 100 bp, Homo sapiens
aacattgagacatttctttcgcttcatagtacagcgacacagctggcagcagatctattaaaataccatgctgatcatgtggttctaaaagcattaaaac

SEQ ID NO: 322237 - DNA, 90 bp, Homo sapiens
agttttcttatcactaaaacagcagtttccatgctgagctcctgcccatcttcagtcctgaactctctcccagaaacctggttctggtgg

SEQ ID NO: 322238 - DNA, 83 bp, Homo sapiens
ctttctgctgctgaagtaatgcaatggtctcaatctctggaaaaacttcttgccaaccaaagaattgaacaacacatgtgaac

SEQ ID NO: 322239 - DNA, 75 bp, Homo sapiens
gtgcatcatccacggggtgctgcagatcctgttccagttactccacaggatccgctgaacataggatgttgccac

SEQ ID NO: 322240 - DNA, 106 bp, Homo sapiens
agcgggcctggactgtgggctggtgtgtggaactggacgctgccaaggtctgcagagaattcaccgagcgtgagcaaggagaagtccgcttctctgccgtggctct

SEQ ID NO: 322241 - DNA, 100 bp, Homo sapiens
tgagtggaacatggctagcaggaatgcttactgttgcgtggttcgttattaacagtttgaaggaggagtttcctgcctggtatgagaagcttgttctgga

SEQ ID NO: 322242 - DNA, 90 bp, Homo sapiens
ggggcatgccgggtgccagttcaaagccctgctgtggaagaattggctctgcagactcaggaacccgactcaggaatttcaagtgtgcta

SEQ ID NO: 322243 - DNA, 83 bp, Homo sapiens
gtccccacttcatatgtcgaagtctgtttggacaaaaatgccaaaggtgatgatgaacagtctacacagatggctgcaagttg

SEQ ID NO: 322244 - DNA, 75 bp, Homo sapiens
aaacgcactcattcagtttgctactaggtcactggaaggactgagcgcattcaggagcctggaggaactcatctt

SEQ ID NO: 322245 - DNA, 76 bp, Homo sapiens
caggaggtggagcaaaacacaccaagcctggtgccaatcattgacaatattatgagtcctgatgggaaatacctag

SEQ ID NO: 322246 - DNA, 90 bp, Homo sapiens
cacatggagcgggcagaggatgcagtggaggccatcaggggccttgataacacagagtttcaagggttttggccaaattgggcgagggca

SEQ ID NO: 322247 - DNA, 83 bp, Homo sapiens
atcgacagcattatccaacggctgctggaagggggatatgagactttctactcggaatatcctgagtgttgcgtggatgtaaa

SEQ ID NO: 322248 - DNA, 74 bp, Homo sapiens
gccgacggcaaaggtgtcgtggtggtcattaagcggagatccgatctccaagaaggagaagcttctctcgcagc

SEQ ID NO: 322249 - DNA, 75 bp, Homo sapiens
gagcacacggagcactgcaggcgccggggtttccaggcctgaggtgcccgccctggccccaggagaatgaaccag

SEQ ID NO: 322250 - DNA, 100 bp, Homo sapiens
gcagctggcgcctctgcagtgggaacccagtgacttgattgtaaaaatttacagagcggaatcatatgctggtctccaagagtttaaagcagccatagaa

SEQ ID NO: 322251 - DNA, 90 bp, Homo sapiens
ttatgactgcatccgtgttcactgtaaggtcagccagagcagcctccccatgctgtcctcgccgtcaccgggccagcaggtgcagacccc

SEQ ID NO: 322252 - DNA, 75 bp, Homo sapiens
tactccgtgacctggtacatcgccgagttctatgttaactcattccagcaaactacaaagtggattgatgatgtc

SEQ ID NO: 322253 - DNA, 100 bp, Homo sapiens
gtgctgggggtggctcaccgggcagcgtgggtgagcggcgcagcggcggcagcggagagcgagagaggggagcagctattgacctgaaaagtggttctgg

SEQ ID NO: 322254 - DNA, 75 bp, Homo sapiens
gcaacattgaacatgccttcatcctctataacaagtatatcacagttacatccatatgggagaatagtctccaga

SEQ ID NO: 322255 - DNA, 100 bp, Homo sapiens
tcgggtctcgggggccgctctgggatcccggccaccagcaattgtccggaaataatgaagatgtttcattttcaagaccagcagatcttgaccttattca

SEQ ID NO: 322256 - DNA, 119 bp, Homo sapiens
tcctgcagaatcacgcggacatcgtctcctgtgtggcgatggtcttcctgctggggctcatgtttgagaacatccatgatagcagtcttctgtaaatcgaacttttcaagaattctctg

SEQ ID NO: 322257 - DNA, 75 bp, Homo sapiens
cctgaccaagaggaccagactttgttaatgaagtttctgtcctcctacaagggaaagtcatgattacactaactg

SEQ ID NO: 322258 - DNA, 119 bp, Homo sapiens
gggaagtttacacatgtggtttgaacaccaaggggcaactgggccatgagagggaaggaaacaagccaggtgcattggatcgttgtgtgatggggataacagcagttgagattctaaac

SEQ ID NO: 322259 - DNA, 90 bp, Homo sapiens
cggcggcggcctcggctgaagaaagaaggtgggagcggagagcgcaggcgtggtttttcgttggaatatacgttgcacatttatggcgat

SEQ ID NO: 322260 - DNA, 100 bp, Homo sapiens
tggagatgtagaaaaagccatggtgaagtaacacagaaggatgtacaggtttgcagattccgccagcagcacagcaagctctacagatgagtggctcttt

SEQ ID NO: 322261 - DNA, 98 bp, Homo sapiens
atcttggctcctccattctgcttttaaggcaagaagagtggactaactcaagacacaaggcaccttcagcgaggacagcaaagggcgtctacagagac

SEQ ID NO: 322262 - DNA, 82 bp, Homo sapiens
cagaaactggacagtaagaaacttctaggtttttagaacttcagccataaaaatgggcagaattttccttgatcatatcggt

SEQ ID NO: 322263 - DNA, 75 bp, Homo sapiens
cgcgtggctggggaggcgaggccggacgcacctctgtttgggggtcctcagtggagatggctatttcgaaaacag

SEQ ID NO: 322264 - DNA, 101 bp, Homo sapiens
caacctgcagtggatctgcgccaaggcctacggccgagagatcccgctgtgcgctggctgtgaccagcacatcctggaccgcttcatcctcaaggctctgg

SEQ ID NO: 322265 - DNA, 100 bp, Homo sapiens
acctgcagaagaactggcttcgggaattttaccagaaagtttcctacactactgaggtttaggggcactgtgaagcaaaagccacgcctcagaatcccag

SEQ ID NO: 322266 - DNA, 51 bp, Homo sapiens
ctgcgtcaggcatctcaatcatgaaggtctgaagaaaaccctgcgggatga

SEQ ID NO: 322267 - DNA, 98 bp, Homo sapiens
ccatggggtcccgcttcggctcctggatgactgacacgatggcccccagtgcggatagccggatcctgtgccggtatcagaatatctggaacatcaac

SEQ ID NO: 322268 - DNA, 75 bp, Homo sapiens
cggcagcgcgcggtcgacgcgggcctgagctccctccagacctgtcgcgaaatcgcctttcagaaattcctatag

SEQ ID NO: 322269 - DNA, 50 bp, Homo sapiens
tcagctttagaaatacactggaagatgcagacagacatgctgaactatct

SEQ ID NO: 322270 - DNA, 100 bp, Homo sapiens
ggagaaaaactggacccaattcctgacagcttcattctgcaaccaccagtcttccacccggatcgctacggttcctactgatccgagctctgtgactcag

SEQ ID NO: 322271 - DNA, 90 bp, Homo sapiens
tgaacccaaacatagacttgcaagagtaaaccaggtgaaatgtcaactacctgaaagtattttccaagtagacgaactcttgcaccgtct

SEQ ID NO: 322272 - DNA, 77 bp, Homo sapiens
ctcgtgtccctggggaatcctgacttcatcgaagtgaaggaacccttctctgaagcaacagctcttctcctacgcca

SEQ ID NO: 322273 - DNA, 100 bp, Homo sapiens
tctgagactggataagatgaccttcagtgtgctgctcaaaaacaggcattgaatgccccagaggagcccgaaacctcccaggcttggtgcaggaaggaga

SEQ ID NO: 322274 - DNA, 100 bp, Homo sapiens
tcaccaaataagctatatactttggttacctatgtacctgttaccactttcaaaaatgtcagtgaagagcttccagccagaagaaaatgaaatcgtgagg

SEQ ID NO: 322275 - DNA, 83 bp, Homo sapiens
cctggtcagagcgcggatggccgtaaccccgaaggaaatgtacatcgagtacatgtgtgacatggtggcggaggagcccatca

SEQ ID NO: 322276 - DNA, 75 bp, Homo sapiens
agtcgatatccttttgactctcctcaggtgacatcagttgcaaggggatgaccgagcgcattcacagcatcaacc

SEQ ID NO: 322277 - DNA, 100 bp, Homo sapiens
ctgggattggagattccacccaaacttgctggtcactgggagagcagcccgacggccatggaggctgaagagacgatggaatgccttcaggagttccctg

SEQ ID NO: 322278 - DNA, 98 bp, Homo sapiens
tcttccagtggctgtgctcagattccctgaagctctgctgccccgcaggcaccttcgggccctcctgccttctggaatgcagtagccctctgggcctg

SEQ ID NO: 322279 - DNA, 100 bp, Homo sapiens
aggatcaccctgcacgtcttctgggagctcaactatgacttcctgcccaactactgctacaacggctctaccaaccgtgggagctggtgaggtggccaac

SEQ ID NO: 322280 - DNA, 101 bp, Homo sapiens
cgcggccccgcccccgccggttcgcgtctctctgctgcggcgcggggaccgctgtgctctcgcttccacagcgcggcacctgtacctccggggtggcgctg

SEQ ID NO: 322281 - DNA, 82 bp, Homo sapiens
gcttgcagcggggacgcgaggacccgggctgggctttcctcacccgggagaaggaagccaacatccttttggagccatgaat

SEQ ID NO: 322282 - DNA, 75 bp, Homo sapiens
tgtattgatggttttgcactatttacaaagatctgtctggctccattgatgacctccccacgggaacggaagcaa

SEQ ID NO: 322283 - DNA, 100 bp, Homo sapiens
cccggcaccatggacgcgccgcgcgcctcggcggccaagcccccgaccggaatgttatggaacagttcaatcctgggctgcgaaatttaataaacctggg

SEQ ID NO: 322284 - DNA, 74 bp, Homo sapiens
gattcattgaatggcacctgcagaaggtatccgttacagcactgatgtgagtgtagatgaagtaaaagctttgg

SEQ ID NO: 322285 - DNA, 75 bp, Homo sapiens
agcagatctcttggagtgaaggctgttagtcgccgcgcaaagccatgactacagtagtggtacatgtggactcca

SEQ ID NO: 322286 - DNA, 99 bp, Homo sapiens
tcggattgcccatgcacttgttgcagaaacagccaagtttgagttcctgagatctagttggtgagagacatgatgttctaccggttgctgtcgattgtt

SEQ ID NO: 322287 - DNA, 99 bp, Homo sapiens
cacttccttctcatccttttccaccagctaaaggcgctttgacttccgtccaaaacctgatccttattgtcaagctaagtatactttctgtccaactgg

SEQ ID NO: 322288 - DNA, 100 bp, Homo sapiens
accctgcacctggtcctgcgtctgagaggtggtcttccgggatccgtatcggtttaagaagcggacggagctgttcattgccgccgagggcattcacacg

SEQ ID NO: 322289 - DNA, 82 bp, Homo sapiens
tatatcgcggcgacggcgggctgtcgtcacgacgacgtgcggacgcagcggcgggggcgcccacccttcctccattctgagc

SEQ ID NO: 322290 - DNA, 100 bp, Homo sapiens
agcgcagaaagtgaagctgtttcgggccagcgacccgctgctcagcgtcctcatgtggggggtaaaccactcgggtttgtgtttagtgaatcagagggat

SEQ ID NO: 322291 - DNA, 82 bp, Homo sapiens
tgtctgacaacgtggatcgttgttttgaaacgctccagtgatcattctacatatattgtacaaacactagattttcacctgg

SEQ ID NO: 322292 - DNA, 85 bp, Homo sapiens
agtgaggagcctctccgcccggcagccaccccatctgggaagtgaacctgccgctgctcaccctgagccagcccctgctgttggg

SEQ ID NO: 322293 - DNA, 83 bp, Homo sapiens
attgtgagaggaaaacagcctacccggtggtagaggacattgaatacctgaagttcgataaagggccgtggctcaagcaggac

SEQ ID NO: 322294 - DNA, 75 bp, Homo sapiens
tcctcagcagcatgaagaagaggacctggatgatgatgtcatcctgacagaatataggcagatctctccctcata

SEQ ID NO: 322295 - DNA, 101 bp, Homo sapiens
ctgccccttcattgacaacacctactcgtgctcgggcaagctgctggagagggagatcaaggcgggaacaggcacggtctcctggtacccaacaataccac

SEQ ID NO: 322296 - DNA, 96 bp, Homo sapiens
ttgacagccaacaacccacacgcaccccagaacattgtcaggtacagcttcaaaaaatcccacgtgtataagaaaaccctgcaggccttaatctac

SEQ ID NO: 322297 - DNA, 90 bp, Homo sapiens
ctctttttcagacgccactaccctctcaacactgtcaccttctgtgacctggatccacaggaaagaaacgccctgcccacccttggagcc

SEQ ID NO: 322298 - DNA, 100 bp, Homo sapiens
ggcccagatgattgatgagatcaagatgaccgacgacgacctgtttgtggacttggggagcgggatgctgtggagatgataatggtctcatggaagtaga

SEQ ID NO: 322299 - DNA, 98 bp, Homo sapiens
cggcaatgccgccatccgggagaagctggcctgggccaagcctcccggcatggtgctcaaggccttcttccccacgtgctgcgtctcgacggacagcg

SEQ ID NO: 322300 - DNA, 80 bp, Homo sapiens
ctcaaactgactttgcagccacggagagcttagcagtgtctgcaaaaacgaatcttttcctacaacctgttaactgactg

SEQ ID NO: 322301 - DNA, 75 bp, Homo sapiens
gccagccaagaagcatgtgcgactgcaggagaggcatcggaatcggggtaaactgagtgatctggtggcagagca

SEQ ID NO: 322302 - DNA, 51 bp, Homo sapiens
tataatggttccagtatagtctctagccgtgtggttttgccatgttctgtt

SEQ ID NO: 322303 - DNA, 107 bp, Homo sapiens
taatcacatcacaaggctatgaacaaatatgcaatgataactcttctgatagcagcttatttaaaactcagtgtatcccttactcacctaaaggggagaaaagaaac

SEQ ID NO: 322304 - DNA, 51 bp, Homo sapiens
caaaaccactgcctgtgctcgtcttggtgatgccttggacagcagcaactc

SEQ ID NO: 322305 - DNA, 75 bp, Homo sapiens
cagacatcaccatcatgtttgagatggagtgaaggtacctgagcgcaggaaccatggtcttcattgctgcctcag

SEQ ID NO: 322306 - DNA, 90 bp, Homo sapiens
cgcgcctgtagctcgcgggcctcgcaggtctatgaaggcctagacatcatcaccaacaaggtttctgcccaagagcagagaatctgccgg

SEQ ID NO: 322307 - DNA, 55 bp, Homo sapiens
ccttaacaagcgcacggagccctcaaggtaaacaaagctaactgtcgactaccag

SEQ ID NO: 322308 - DNA, 80 bp, Homo sapiens
ttacccagaaaacaagaaaaattcactgtggtccagaagcagatatcggtgagttgctgctgacacgccgaccgcctgct

SEQ ID NO: 322309 - DNA, 90 bp, Homo sapiens
gtgttaacaatgcatccacagagagttatggtgaatggttgcatggatttgaaaaaaaggcaaaagaatgtatggctggaacttcagggt

SEQ ID NO: 322310 - DNA, 74 bp, Homo sapiens
ctgaagtttcttctgggtccatcaccaaagagcagatgccaaatctggttttagctaaagaagatactgaggca

SEQ ID NO: 322311 - DNA, 59 bp, Homo sapiens
tgaaagcagagaccatggagcttcttggtttgatgctataagtgcagagctgttgaact

SEQ ID NO: 322312 - DNA, 100 bp, Homo sapiens
cagatatccacattgacagctatggtgaaaattatctaagcttcaccctgaccatggagagtgatatcaagccttcatctcctcgtcctccaggcagcac

SEQ ID NO: 322313 - DNA, 75 bp, Homo sapiens
ttcaagcagcgccgcaccttcgcttccccgggcgctgcctggacaggcctgcctgcgtgctgggacatgtctggc

SEQ ID NO: 322314 - DNA, 100 bp, Homo sapiens
cttcccgtagcctcggggaaggagcaggatttagaggaccactagttggaccccatcctcgtgctggaggaacagttaaacaggtgttcaaggagctgga

SEQ ID NO: 322315 - DNA, 100 bp, Homo sapiens
cggagccatgtcagaaggagtggacttgattgatatatatgctgacgaggagttcaaccagcttgcagttccccacaatgatgaatggacccgatttgcc

SEQ ID NO: 322316 - DNA, 76 bp, Homo sapiens
ctgtgctccggggttcgaggcagctgaggggaacaccaagtgccgagctatcatggtgaacttacttcagattgtg

SEQ ID NO: 322317 - DNA, 75 bp, Homo sapiens
ctgaagagggctccaggcatccggtcctggtccctgctggttggctggttgaactcatggacctgatacttttct

SEQ ID NO: 322318 - DNA, 96 bp, Homo sapiens
ccaaggcagacagcggcgccttcctgctgctcttcctgctcgtgctcactgtcaccgagccgctgcggccaggtgaaaggtgtagcagtcactcgg

SEQ ID NO: 322319 - DNA, 82 bp, Homo sapiens
ggcccagcctgaaccggcccatccatgcctcagagccacagccccacaaccgcacggtgacaaattctaccgccagtaatca

SEQ ID NO: 322320 - DNA, 83 bp, Homo sapiens
gatttataccatgaaatgattgaatctggtgttatcaacttaaaagatgccacctctaagtttttttcaccgctcaaccctgt

SEQ ID NO: 322321 - DNA, 75 bp, Homo sapiens
cgcatctgggacctgaataaacacgagaatggcatcatttcctggtggtcaacatgaagggcaatgacatcagca

SEQ ID NO: 322322 - DNA, 100 bp, Homo sapiens
cttgctgttcgtgattatatttcttggagttgtgttggtaatgaagaaaagatccaggatgagaagactgataaaagaagaagctagctgaacagctgta

SEQ ID NO: 322323 - DNA, 80 bp, Homo sapiens
gcggcggcggaggggagccagggcgccccagcagggagatgcagttaaagacttgatgcttcgctttctgggtgaaaaag

SEQ ID NO: 322324 - DNA, 75 bp, Homo sapiens
cttatctgaggccaaacccgccactccagaaatccaggagattgttgataagggacatggcttgcagtgtggcag

SEQ ID NO: 322325 - DNA, 98 bp, Homo sapiens
gaagaataaggagaaggataagtcgaaggggaaggcgcctgaagaggacgaagggcttcgtgctgtgtcactccatcgctgggggtacgggttctggc

SEQ ID NO: 322326 - DNA, 100 bp, Homo sapiens
attggataaaaaaaaagaggaattccagaagggccaccccgacctccaagggcagcctgcctcttccttggttgtgccactactgagttctccagttctc

SEQ ID NO: 322327 - DNA, 83 bp, Homo sapiens
ttaagttccgtgaactcagtactgatgcccagtggggcattcgtcttggtaaacttggtagccattttgttctaatagctgtg

SEQ ID NO: 322328 - DNA, 74 bp, Homo sapiens
gtcatttggaaaaacactagagacagacggctggcaggtggtccgtactgagaagaacagtttgaacaaccgat

SEQ ID NO: 322329 - DNA, 97 bp, Homo sapiens
tggttccagtgctgcgcgcaggccggtcccgcagggggcagggaagggggccggacgggcggagcgagagaggaccttatcatgtccttcactgtat

SEQ ID NO: 322330 - DNA, 100 bp, Homo sapiens
cggacctcacgcccatgcacgcccgccataaagcgctggcaggaatcgtcatgaccaaagcttattgcaggagtgaccaggacactacctcctagaagta

SEQ ID NO: 322331 - DNA, 82 bp, Homo sapiens
ggcgagcgcgagcggcgcgagaaaggcgtccccctggataccagtaaactgtccactgaccagcggttacccccatacccat

SEQ ID NO: 322332 - DNA, 95 bp, Homo sapiens
ctcgctgggagagaggtacctctccttttccctctccctttccctaagaaaacttggaatataacgtggagcctcaagaaatctcacaccctgac

SEQ ID NO: 322333 - DNA, 119 bp, Homo sapiens
cagaggtgcccgggcccgcgggacccaggggtggcgcgcgctgcccccaaccccgcaccatcccgagccaaatcttcgagagctgtgcccaggagtgaacaaccagccctacctctgtg

SEQ ID NO: 322334 - DNA, 75 bp, Homo sapiens
cggcgccaaacagaacacaggagtgtggctagtcaagacttatctaaaaacagactggttgaagttccaatggaa

SEQ ID NO: 322335 - DNA, 90 bp, Homo sapiens
acatctacaaccttcgatctcctgacgagagctcttgtccctggcaaagcgaaagcgcagtgactctgaggagaaggagccgcctgtgag

SEQ ID NO: 322336 - DNA, 100 bp, Homo sapiens
gggccttacttgttttttcaacgacagttttggtcttcagttaagggcatcttctctgcattcagtttcatccaagtcattccgggatttcttactagaa

SEQ ID NO: 322337 - DNA, 101 bp, Homo sapiens
cagcagcccgccagccgccgggaggtgtgcaactgaggaacatggctcaagaaactaatcacagccaagtgcctatgctttgttccactggctgtggattt

SEQ ID NO: 322338 - DNA, 98 bp, Homo sapiens
ccagaggtcgtggaggtggccgtggaggcagaggtggcatgggtgtggcaaaggagcagagaactttgacaagttcttcacacgaggacagcccgtct

SEQ ID NO: 322339 - DNA, 90 bp, Homo sapiens
ctatgatctgcagggagacgcacagccaggacatcctggaacctgggaaaggggttattttagggacacagtgatgtactatggctttta

SEQ ID NO: 322340 - DNA, 100 bp, Homo sapiens
gcgcccagacgggccggcccagagctcccgggtcgtctttcgtgtggccgcgagaaactggcgatggaatatgagaggagccctctggaaagaaaaggac

SEQ ID NO: 322341 - DNA, 73 bp, Homo sapiens
aagaacattctcgaatacctagaatggggacgcttccattgcacacagattccatgtgatgagagagaaacat

SEQ ID NO: 322342 - DNA, 98 bp, Homo sapiens
tgctgccggcgctcaccatcaaccctaccatcgccgagggcccatcccctaccagcgagggcgcctccgaattggtgctgaagacatggacggcttcc

SEQ ID NO: 322343 - DNA, 101 bp, Homo sapiens
tctggccagccttgggggcccttggagccctggcccagtggaagctcgtgcctgaggaacatggaggccacgctaatgatggagtctcgctctgtcaccca

SEQ ID NO: 322344 - DNA, 103 bp, Homo sapiens
caagagcatcacgctgccccccgacgagatcttccgcaacctggagaacgccaagcgcttcgccatcgacatagacgttggacctctcgaacaaccagctgag

SEQ ID NO: 322345 - DNA, 75 bp, Homo sapiens
gtggtggccagtagaggaggaggtgaacaaggaggagctcgggttcatgacgctctcgatattcctgtgcagaaa

SEQ ID NO: 322346 - DNA, 95 bp, Homo sapiens
aagtatgttaatttcatggtacatgagtggctatcatactggctattatatggtgaccttgaggaaccctgggagctcaggaaggaaggagcgcc

SEQ ID NO: 322347 - DNA, 74 bp, Homo sapiens
gagagaaacctgacatgtgggcatacctcagtgatccttaatagtcatctggggacctggagaatgatgagcag

SEQ ID NO: 322348 - DNA, 74 bp, Homo sapiens
cagtgtaattctaatctcacggatatcctctgttgggggagaagggcacaaccataatggcattactgacttcc

SEQ ID NO: 322349 - DNA, 59 bp, Homo sapiens
caggtcctcgggggcggcggccacgccaaggacggggcatggtgctgatgtgaaatgtg

SEQ ID NO: 322350 - DNA, 80 bp, Homo sapiens
gctctttgccgtgacaacaccgttcccccagccgggctgcctcccgcgacgatgcccctcaacgttagcttcaccaacag

SEQ ID NO: 322351 - DNA, 98 bp, Homo sapiens
tcattaatggctcggcttatactggagaggtttctacaggaacacgaggaaactccacatcctaattatctcatggctaatgaacgcatgaacctcat

SEQ ID NO: 322352 - DNA, 90 bp, Homo sapiens
agtttatagagaacttcagaaactttcaaagtttgatgagcagagaactgctactgtgaatgaaaactttgccattgatttgatagcaga

SEQ ID NO: 322353 - DNA, 89 bp, Homo sapiens
tgatgatgctcagtttgatgcgtcacactacgacagtgagaaaggagtcctctgaagccttggagtttatgaagcgggacctgacggag

SEQ ID NO: 322354 - DNA, 101 bp, Homo sapiens
agctgcccgcaagcaggccgtgcaggtggcctccctcaccaccggcatggccagtcaggcctcggagacgctgcagcattatctgcataccagaggtacta

SEQ ID NO: 322355 - DNA, 51 bp, Homo sapiens
aggactggaggaagccacgtttcaacagaataatccagaatggctactctg

SEQ ID NO: 322356 - DNA, 100 bp, Homo sapiens
agcaagagattaaagatgcagtacgccacggggccgctgctcaagttccagatttggactcaagcacagagggttcggaaaccgcgttgctgcacggggc

SEQ ID NO: 322357 - DNA, 96 bp, Homo sapiens
acagcagcaatgaccttccctcgggaattccacctctgcgtttttccctccaggttatccggtgttggctcctgctgcttactatgaccaaactgg

SEQ ID NO: 322358 - DNA, 96 bp, Homo sapiens
aggagaaagagagctcaaaatcggagacagagtattgtttcagaagaggagccccgccgaggcatgagggccgtgctccccccagaggaagggatg

SEQ ID NO: 322359 - DNA, 83 bp, Homo sapiens
cccagaccctggagcctcagttggaagcagccgatccagcctgcggagcctgtggggcaggtgccagcgagatttcagattcc

SEQ ID NO: 322360 - DNA, 83 bp, Homo sapiens
gaaaaccagctgaggtgtccgtaaagattccagagaagcctgtgaacaaactgctgatgcaaaagagaaacaattctgggtga

SEQ ID NO: 322361 - DNA, 100 bp, Homo sapiens
caggaggccaggggtgtcgccatggaaagaccacagcaagattctttcattcgtctcctcctagcctgggggaccaggctcgaactgaccctggacatca

SEQ ID NO: 322362 - DNA, 100 bp, Homo sapiens
gacacttgtggagagctcgaattccagaatgatgaaattgtcctcttgttgctgtaccacatagaattcactcaacaagtagaaacgtgagagaagaaaa

SEQ ID NO: 322363 - DNA, 100 bp, Homo sapiens
ttgctccggcgcgttctcaagggcttgcagctgtgatgtcttggcattgcccattttcaagcaggaagattccagccttccattggatggtgaaacagag

SEQ ID NO: 322364 - DNA, 100 bp, Homo sapiens
ctgacgaaattgaaattacctccgagggaaacaagaaaacatcaaagaggtctagcaaagttggcaaacatgaattgactgggcataaagtagctgtgaa

SEQ ID NO: 322365 - DNA, 83 bp, Homo sapiens
taaatgcaccaatcagcatgctgtgtctagctcaaggaactgtggctgcaccatctgtcttcatcttcccgccatctgatgag

SEQ ID NO: 322366 - DNA, 87 bp, Homo sapiens
gccaattcggtggaacgaggacgcggactgcgaaggcagcgtccgtctccaagagagtatgaagagagtgcgtctgtagggcaggga

SEQ ID NO: 322367 - DNA, 98 bp, Homo sapiens
caggttatcgatatactggtaaactcagaccacattatccactgacctccgtgctgcacatgtgctccctcttccacgcgttcatctttgctcagctg

SEQ ID NO: 322368 - DNA, 50 bp, Homo sapiens
gtcgacactctcgcgcccggagggataccaataactagtgcctcgtacta

SEQ ID NO: 322369 - DNA, 89 bp, Homo sapiens
cagacaggagagggatttgtcatcagcgtgtctcatggagaaccactctgtagtattattgattccacagaatacagccaacctccagg

SEQ ID NO: 322370 - DNA, 74 bp, Homo sapiens
cccgtgggcgagccgcccgcccgccgagcagccatgaggtagagtcactgaccacagagctgtcagctgagcgc

SEQ ID NO: 322371 - DNA, 75 bp, Homo sapiens
ggtccttttcattgatgctgctgaggggaatttttccctagattggtgtaaacagccagacgtgggccttcccaa

SEQ ID NO: 322372 - DNA, 98 bp, Homo sapiens
ccccattcattctggattggtggatctgaagtacaaaatattttccagttggcctttaccagagtttgatccaagccagattcgactgattgtatatc

SEQ ID NO: 322373 - DNA, 129 bp, Homo sapiens
aagcattggaaatgtgcaggttcttctagagtatcatattgcctatctaaagccacagtacacgaacctggggctcctgaacagcatggaccagcagattcagaacggctcctcgtccaccagtcccta

SEQ ID NO: 322374 - DNA, 100 bp, Homo sapiens
cgacaagaccatgctggcaagtctgaaggtcaagtaaacctagcctttaagcaacctggaaagaggctagaacaccaaggaattagaattgaatttgtag

SEQ ID NO: 322375 - DNA, 74 bp, Homo sapiens
aagaggaagaggaggatgacccacttgaagctatacagcggcaccgccggaacctggctgagtggttcagccgg

SEQ ID NO: 322376 - DNA, 90 bp, Homo sapiens
gcagtaatagcgtgtttatctgacacggacgactttgctataaaacacgtgaccctagggaaacttttgaagttagcggtatagagagta

SEQ ID NO: 322377 - DNA, 100 bp, Homo sapiens
caacagaatcctctgaaacttccacagatgctattcaggtttttgacgtcaccgctgtgaacatcagtgccacaagcctgaccctgatctggaaagtcag

SEQ ID NO: 322378 - DNA, 50 bp, Homo sapiens
ctcgtgagtagctgggattacagaaaagaagagtcggggacctcctagcc

SEQ ID NO: 322379 - DNA, 78 bp, Homo sapiens
gaccaaaattgaaaaaatggttgacctcacccaggattggagaaggtttgtgttcccgacgccttggtagttggcata

SEQ ID NO: 322380 - DNA, 88 bp, Homo sapiens
ccggggtctatggaagtaatggaaggacccctcaacctgtgaaaccttctaagcccctttgtagcgttcaaggaagaccagaaactgg

SEQ ID NO: 322381 - DNA, 60 bp, Homo sapiens
cgcccctccgcttccagacattctcagctgtcagccctggtacctgacagtgtaaagaag

SEQ ID NO: 322382 - DNA, 75 bp, Homo sapiens
tttaattttagggtcctttatatagaagggagagtagcggacaaacataaattgcagagattcctgactgctgac

SEQ ID NO: 322383 - DNA, 75 bp, Homo sapiens
ccgggatcgtgaccgtggaggatgctgagatgaatcgtcacctgtgtgtttggctttttagacatccatctctta

SEQ ID NO: 322384 - DNA, 99 bp, Homo sapiens
ctgaaaccactcaagagtcataggattagatgatccaagtcaccaagaaattactgtctcaagtgatacgaggtcctgctgtactagccaccaaagcag

SEQ ID NO: 322385 - DNA, 82 bp, Homo sapiens
cccagcccatcctctctaaccaagatgtgaagttcatttccaatccgccctccatggtggcagcggggagcgtggtggccgc

SEQ ID NO: 322386 - DNA, 100 bp, Homo sapiens
tggttctctaatcccctaactggcatgattgagggcagccaagagtataatgaaggtctagtcaaacgcctccacaagcctgagatcttctttgatgttg

SEQ ID NO: 322387 - DNA, 100 bp, Homo sapiens
cggggtttggtaccgagcggagaggagatgcacacggcactcgagtgtgaggctttaatccagtgtgaccagttgaggaaggagctggagaggcaggcgg

SEQ ID NO: 322388 - DNA, 74 bp, Homo sapiens
ttcgggaggaggccttgtccacaggaataggaggccttcaagattttgtgctgaaatctgcaacactgtgtagc

SEQ ID NO: 322389 - DNA, 100 bp, Homo sapiens
tctgagtgtctggggaacgtcggtttggcggccacgcactgccccccacctgccccccactaccccaagtccaatatcagatggaaatgatgcggagcct

SEQ ID NO: 322390 - DNA, 75 bp, Homo sapiens
taaattgcagcaaggctacaatgctatgggattctcccagggaggccaatttctcaggtggtccattatggctga

SEQ ID NO: 322391 - DNA, 128 bp, Homo sapiens
ctgcctctttgacacttatgtagaagatgcctttaagtctgatgatgacattcacccacagtttaggaggaaattatggaagtggaaattacaatgattttggaaattataaccagcaaccttctaac

SEQ ID NO: 322392 - DNA, 82 bp, Homo sapiens
ccacctcctggtgaagaaagcaaacagattatatgcgtcaggcaggagaagtgacttatgcagatgctcacaagggacgcaa

SEQ ID NO: 322393 - DNA, 95 bp, Homo sapiens
gctgctgaggagaggagcgtcaacagcagcaccatggaaccacgaagctgccctgagacgctcactcacgctgtggggatgtcagagagccccat

SEQ ID NO: 322394 - DNA, 100 bp, Homo sapiens
gcgaagtccccggagaactctaccctggaggagattctggggcagtatcaacggagtctccggggttgctgtagtaaaactaaaaaatgcagataaagtg

SEQ ID NO: 322395 - DNA, 100 bp, Homo sapiens
gccgcttcagttctcccggtgtggccacgagtcggcatgtagagcgcatgaagtacaggacaataaagcttcctacacatatcaccaggaggatctcttt

SEQ ID NO: 322396 - DNA, 50 bp, Homo sapiens
caagaatctcaataacagtatgccttatgattctgcagatgactggtctg

SEQ ID NO: 322397 - DNA, 100 bp, Homo sapiens
ctttggaggaactacatcaacaggtgttgaagggaaggggcaagttcgcccaggatgtcagtcaccgtttccctggggagatggtaaccatactctattc

SEQ ID NO: 322398 - DNA, 75 bp, Homo sapiens
cccttaccacccagcagcagggcatcaagcaattctgtggtgttcttggtcacacatttatggagtttctgaagg

SEQ ID NO: 322399 - DNA, 83 bp, Homo sapiens
agcgcccggattggggatgagtatgcggaggacagctctgatgaggagggagtaccctgacttctaccggaagctctacggcc

SEQ ID NO: 322400 - DNA, 119 bp, Homo sapiens
gcctgactttggtgtctgggaaagaggaagcaaatataataatggcagcacagagctacattcgaggagtcagagtattcatcgaaaagaaagcacagctaacacttttaggaacagaa

SEQ ID NO: 322401 - DNA, 74 bp, Homo sapiens
aaaattgatggcaaggttcgagtggatgtcacataccctgctggattcatggaatcctcactatggatgggctc

SEQ ID NO: 322402 - DNA, 98 bp, Homo sapiens
gagaagagccgggaattaaatcacagctaatgaaccttattcgatctgtaagaaccgtgatgagagggttctcatgtatcagccatcttctgtaaggg

SEQ ID NO: 322403 - DNA, 100 bp, Homo sapiens
tgcacatactgcacggccttggctggactctgcgggactatgtccgaggatacatccttcaggaattgaaagatgttggccatcgtgatcagatggctgc

SEQ ID NO: 322404 - DNA, 73 bp, Homo sapiens
aggcggcggagcgcgagagcttcgagcggactcagttaaacacagtgggaatatcacttttgatgagattgtc

SEQ ID NO: 322405 - DNA, 75 bp, Homo sapiens
tggtcctggccttgaggaagactgtcatcccagccctggatgacaccaactctacaacattacctgtcatatact

SEQ ID NO: 322406 - DNA, 75 bp, Homo sapiens
aagaagctgcgcttggccaagctctacctagagcagctccgtcagcaagttgatgtagaacattctcatgttcga

SEQ ID NO: 322407 - DNA, 75 bp, Homo sapiens
cccaggattgaacaaagacagcttggaagttagaagcaagatggagtctgttagacaagttggatggcttgagga

SEQ ID NO: 322408 - DNA, 100 bp, Homo sapiens
caacgttttacttatacaccagatggccctctacctgacccaagtatgatccgtggcagtgtgccaaaccagatgatgcctcgaataactccacaatctg

SEQ ID NO: 322409 - DNA, 88 bp, Homo sapiens
aaaccgagcagcagcctacatgaagcgcaagtgtacatgctgctgttattgctattaatgaagctattgaccgtagaattccagccga

SEQ ID NO: 322410 - DNA, 100 bp, Homo sapiens
ggctatttatccaattatatcattcttttgtgtcatctgtttttagcctgtttatgtctagaacatctatcaatggttcacacaaaagatgttggacaat

SEQ ID NO: 322411 - DNA, 82 bp, Homo sapiens
cggcggcggtggcatctgcggccatggcggcgactactgccaaccccgggcgaactttctgaccaagtatacaactacccag

SEQ ID NO: 322412 - DNA, 100 bp, Homo sapiens
cttcatcctagaccaagtgataaactgaaccctaaaacaattaatccggctctgtgtggctgcacagtgaacgtccccactctggacggcaggacgatac

SEQ ID NO: 322413 - DNA, 75 bp, Homo sapiens
tccgtctcagcgaaccccttttgaagttgaggccaagaaaggatcttgtagagaaattctaaagcagttcctgac

SEQ ID NO: 322414 - DNA, 83 bp, Homo sapiens
aaacagcccgcccgaccccgtcccgaccctggccgccccgagcggagcctggaggtgaaatgacaatggatgctctgttggct

SEQ ID NO: 322415 - DNA, 96 bp, Homo sapiens
actcaatgaatataaactgcacttactggcatgctcaaggaatgggctattaagattcaagaaatccatggtgaaaggtttggattcctatgaaga

SEQ ID NO: 322416 - DNA, 100 bp, Homo sapiens
atcgtgaccgagaccgtgaccgagagcgtgaccgagagcgcgaatatcgtcatcgttagaagaacgtaggcgttcccggtccacatcccgggagagagaa

SEQ ID NO: 322417 - DNA, 83 bp, Homo sapiens
agttttgaagggaggtagcatccgttggatatccacaccatccttctcgctgcaggggtgagcatggacaatcttgtgccaaa

SEQ ID NO: 322418 - DNA, 100 bp, Homo sapiens
gggaggaggaggaggattcagggaataggagctggggagcccttctgcgccacagtgccctgcaggagtcattaaatcaaaacttcatgctgatcatcac

SEQ ID NO: 322419 - DNA, 73 bp, Homo sapiens
cgagaaagaacacgctttgttgcttctaaacctctggaggaggaggccatcagcaagcagtttattgtcccat

SEQ ID NO: 322420 - DNA, 75 bp, Homo sapiens
atatgtgatcaaagcatcagaaggacagccttcctcctgaagagaatgtctttgtgtgtccgaagttgagatggc

SEQ ID NO: 322421 - DNA, 75 bp, Homo sapiens
agagataagaggcccattgccaggcggctttggtgtcatcaaatgtgagaagccctggactttacacatcccgag

SEQ ID NO: 322422 - DNA, 100 bp, Homo sapiens
catcatctcccccctcatccctcaccacagatcccagccagtctctactcagcctggagcaagatattaacctggctgcagagccaaaagtgaaccgagg

SEQ ID NO: 322423 - DNA, 83 bp, Homo sapiens
cggcggggctgaggcggccgcggggcccgagcgcaggtcatcatcagatttgaaatatttaaagtggatacaaaactatttca

SEQ ID NO: 322424 - DNA, 100 bp, Homo sapiens
ccttgtggcgaatggggctcacgtcgagtatgttgagtctaaaaaggacagagtcacagtagtcttcagcacagtgtttaaggatgacgacgatgtggtc

SEQ ID NO: 322425 - DNA, 75 bp, Homo sapiens
gagcatctcatgggggcccccaggactctgaccgggtctctaattaacagaagatggcaaagcccagccacagca

SEQ ID NO: 322426 - DNA, 86 bp, Homo sapiens
aggactttgagccagtccagaccctgctgctgtcttcaaagaagacaatgcagatcttcgtgaagactctgactggtaagaccatc

SEQ ID NO: 322427 - DNA, 80 bp, Homo sapiens
cccagatccatttacactttacagctttatcctgtggataaacgcagagtgaacgagtttggggagtcctacgaggagaa

SEQ ID NO: 322428 - DNA, 97 bp, Homo sapiens
gccgggagcaggcggcgcagcaccagttatcatttaacatggaagaagatgagttcattggagaaaaaacattccaacgttattgtgcagaattcat

SEQ ID NO: 322429 - DNA, 100 bp, Homo sapiens
ctcagaaaccatggaggaaatagagcacacatgcccacagcctcgactggatgtgatcttcgtggtggaaagctaaattttaaaaccaccccaatggatg

SEQ ID NO: 322430 - DNA, 90 bp, Homo sapiens
ctgggctctgtcagccatgtgactgtagtccacatggagctctcagcataccgtgcaacaggtaaatttttccataaccttatggagaga

SEQ ID NO: 322431 - DNA, 75 bp, Homo sapiens
cctctggttcagctcatacaacagcttcttaggtacaccaggggttggaaaaaccacactaggcaaagaacttgc

SEQ ID NO: 322432 - DNA, 74 bp, Homo sapiens
gctgccagggggcttaatgaactgcaaagaacaactctgctcatggtgattacatgcaaaataacgagagcagc

SEQ ID NO: 322433 - DNA, 75 bp, Homo sapiens
cagcaacaccagcaaccaaacagagctcgtaacaatacgttctccagtgctgatgaagcggctttaaaagagccc

SEQ ID NO: 322434 - DNA, 88 bp, Homo sapiens
agcacattgtagaattgcaaataatcctggaaaagtacttggcaggcacagatgaggagagcatcctgactctgttgacatcccgaag

SEQ ID NO: 322435 - DNA, 98 bp, Homo sapiens
ttcgatggcaattttttgtggaacagaattggagcagagtgaagccaccactcgctctcgaatcgcgcggacgctgggcctgcgcaggcctgttcaca

SEQ ID NO: 322436 - DNA, 51 bp, Homo sapiens
aaaatcatattatagatggagtaaagattgttgaacagataaatacgaaac

SEQ ID NO: 322437 - DNA, 50 bp, Homo sapiens
aagaaaagtccgaaagagctgggaaaccggctcctgaaatcaggtgtccc

SEQ ID NO: 322438 - DNA, 75 bp, Homo sapiens
agagaacagctctttgcatccggagagtggacaagaaacttacaaaacactacacagcaaaataatgatctgcta

SEQ ID NO: 322439 - DNA, 82 bp, Homo sapiens
aagtcgctcctgtcatttctacaacaacgtagaaggttttgggatttgagattgacgcggtgaactctgtccagttttcaaa

SEQ ID NO: 322440 - DNA, 98 bp, Homo sapiens
tcttgcccgaagccgggcggaggagagctcaagctaagacactcgcctatggggacatgaaccacgagtggatcggcaacgagtggctccccagcctg

SEQ ID NO: 322441 - DNA, 100 bp, Homo sapiens
ctaccatggtatttgctaacgtttagagagtgcttccccttgccgagcactggagacggtgccgagacctcaaggccaagggaattttatttgtggggag

SEQ ID NO: 322442 - DNA, 75 bp, Homo sapiens
cattgacagaggtcctgttgtactggccgaagacttccttgatatcatgggacctctggtcctcaatcgagttcc

SEQ ID NO: 322443 - DNA, 96 bp, Homo sapiens
tggcggtcgcctgggtccgcgccgagattggatttgtcctgtatccccccagtggaggtcctgcatgggatctgatggatcatgaaaatattttgt

SEQ ID NO: 322444 - DNA, 74 bp, Homo sapiens
gcggcccggagctcgggaccggcccttggactggacagtgccaatgagaaaggcttgtataggaggggtgaagc

SEQ ID NO: 322445 - DNA, 74 bp, Homo sapiens
gtctgtgagcaaacaacccatgacgcaccgacagtaaatggttcacggccgacatcatgtccataggggtgaat

SEQ ID NO: 322446 - DNA, 75 bp, Homo sapiens
acgccactacagttcatcaacatcaactacgtccctctgaagggaaatgtttcaacgtgcgcaagcgttgcggcg

SEQ ID NO: 322447 - DNA, 74 bp, Homo sapiens
tccctcctggaaccaaaggaaatacatttgtacacgatcccaaggaattgaatgatctggcacgggaccctcca

SEQ ID NO: 322448 - DNA, 100 bp, Homo sapiens
cagccgatgggttgtccgactgggagcagaggaagccttgaggacctactcacagataggaattgaagcaactttcatcctttgaaacgtgtgctgaaaa

SEQ ID NO: 322449 - DNA, 75 bp, Homo sapiens
tgaagatcggccgcccgggctacaaagcaaaccagtccagctacgggggcccagccagccagcagctgagtgggg

SEQ ID NO: 322450 - DNA, 83 bp, Homo sapiens
ctgagggccttcgagagctaccgcgccagacaggccctgtttgtgctcttcgtcctggcctacatccacatcgtcttctcccg

SEQ ID NO: 322451 - DNA, 100 bp, Homo sapiens
cagcagcatgattcctatagtcaaaaccagcagtcctatcattcacaaagggaaaactacagccaccacacacaagatggagttttaacattgaatgcgg

SEQ ID NO: 322452 - DNA, 75 bp, Homo sapiens
gtcatctcgaacagtatcttcttcttcgctccctagcttagaagagtcccacccgctgtacctgtgcaatgccag

SEQ ID NO: 322453 - DNA, 101 bp, Homo sapiens
ttccccctttctagggtgaggatggttctacacagccacccggagttccttagttgaaaggtgcgccctgctgtgacagtgaccatgcagcaggtggccag

SEQ ID NO: 322454 - DNA, 88 bp, Homo sapiens
atgtgcggggtgcgccggcagaggatccagtgttcaccatcctggccccggaaggttaccacattctcatctggagccaggaggaagc

SEQ ID NO: 322455 - DNA, 98 bp, Homo sapiens
gccgtgaacgaaagcagtgacggaggagcttgtaccaccgccgccgccatgtctgcgcatctgcaatggatggtcgtgcggaactgctccagtttcct

SEQ ID NO: 322456 - DNA, 100 bp, Homo sapiens
aagagttctttagtttcatctctctataaagttatccaggagccacaaagtgagcggacaaggcaaaatctcagcaagttcggacctctagtacaataag

SEQ ID NO: 322457 - DNA, 100 bp, Homo sapiens
ctgtgacctgtggagacacggccagatctgccctccaggatgtccgtcgcttggtagtggccatgtctagagccagacttggactttatatcttcgccag

SEQ ID NO: 322458 - DNA, 83 bp, Homo sapiens
gcccttgttcccccaaatgtctgactctgactctcggactgagaaacgcaagcgggctgacgcacgaggcacacaggaaggag

SEQ ID NO: 322459 - DNA, 100 bp, Homo sapiens
acacagaatttcagaatttattggatgctgacaaaaatgaagcaatggctgccatccggaagaaactggtgattgttggtgatggagcctgtggaaagac

SEQ ID NO: 322460 - DNA, 75 bp, Homo sapiens
gtcgacgaccgacagggtggtgaaaggttacagaagagaatggtgagcaattgccatgttactttgtcatggtaa

SEQ ID NO: 322461 - DNA, 75 bp, Homo sapiens
ctttgcagtctcgacataagtggccgttgctccagggagaactgcaaatatcttcatccacccccacatttaaaa

SEQ ID NO: 322462 - DNA, 101 bp, Homo sapiens
tatgtacctattagacggcgttactgaagcagccaaacactctattacatcgtggacatcaagcctgctaacatggaggagctgaccgaagtcatcactgc

SEQ ID NO: 322463 - DNA, 98 bp, Homo sapiens
tttctccggggcgcagcgtgacggctggcatcatcattgttggagatgagatccttaagttaattggccttggtcctcacagctccaaaaagaaacag

SEQ ID NO: 322464 - DNA, 75 bp, Homo sapiens
gccggtctgcctccgggagaaccgagcgcttccgcggaagccatcacctggatgcctacgtgggaagggacctcg

SEQ ID NO: 322465 - DNA, 117 bp, Homo sapiens
ctcaggaccatgatggctcagtttcccacagctatgaatgtggccataaaatgcagtaaaaacaaatccagttcccaagaagctgtacaaatgctttcttctgttcgactcaattta

SEQ ID NO: 322466 - DNA, 74 bp, Homo sapiens
tgatgtcatttaccaaatccataaggtaagtggaggtatacttcgaatttttccagaaggcaaagcccagtttg

SEQ ID NO: 322467 - DNA, 100 bp, Homo sapiens
acaactggaggaacaggatttgcaccacgagatgtcactccagagcctgtggatgtggacaaagattcatccctagtgactctctgttatggactctgtg

SEQ ID NO: 322468 - DNA, 95 bp, Homo sapiens
gctgcgtcccaacatccccaactggtggcagagttatgaggaaccactcgttttgactattattttatcactctttgtgaaacttcacaatgttc

SEQ ID NO: 322469 - DNA, 76 bp, Homo sapiens
ccggcgtcgagaatttcaactgaaatgtgatacctcaaagcacaaagtgctggtagtgtctgtgtgtcctcaatct

SEQ ID NO: 322470 - DNA, 100 bp, Homo sapiens
gggagccgccgccgccgccgccgccgccggagctaacctcggggaccgagatgcaggccatccacggcttccgagagacagagaagtcgcgctggtcaga

SEQ ID NO: 322471 - DNA, 100 bp, Homo sapiens
ggagatattccaggcccactccagggcaggtatataacgaagtcatttaacttctatgttttcccgaaacccttcaatagatcctcaccagatgtcaaat

SEQ ID NO: 322472 - DNA, 83 bp, Homo sapiens
agctcatcgggcagattagcgacatccgagtgcagaacctgcaaggccagagatcctcagcaggagcctatggaagagataga

SEQ ID NO: 322473 - DNA, 76 bp, Homo sapiens
ggcgggtcgtgggcacctccaggtggcacaagaatggctcaactctccaaatagagagaatttctatcagttgcaa

SEQ ID NO: 322474 - DNA, 104 bp, Homo sapiens
ccattgacgccatgtcgggttattcgagtgaccgagaccgcggccgggaccgaggaggctgacccgcggctgattgagtccctctcccagatgctgtccatggg

SEQ ID NO: 322475 - DNA, 100 bp, Homo sapiens
taaagatgcagaggaaagaaaagaatacattcctgattacctgccacccattgtgtcttctcaagaagatgggtgagtcaagtgaagacatagaccaaat

SEQ ID NO: 322476 - DNA, 100 bp, Homo sapiens
tgaggttgccatgggaactgctggtactgcaatcattcattttgtgccttgcagcatatagcactttctacattgtgggtttaatattatcaatgcagat

SEQ ID NO: 322477 - DNA, 58 bp, Homo sapiens
cagaaatctacagttactcacacaagctaactgccttctatgaaagcagtcattattc

SEQ ID NO: 322478 - DNA, 100 bp, Homo sapiens
acaagtcagaaactctgatgtacattaaaaaagcaagagcatcagagaataagttaagctgttctaaagaaatccaaatggcagttctgctgaaatttgt

SEQ ID NO: 322479 - DNA, 100 bp, Homo sapiens
aggatgaagaggttggagatgggaccacatcagtaattattcttgacatagggcctgattacattccaacagaggaagaaaggagagtcttcgcagaatg

SEQ ID NO: 322480 - DNA, 75 bp, Homo sapiens
tgaagatgtactgaaactcattgacataggcaacagttgcagcttcttggacacttaatgattgttggcaagaaa

SEQ ID NO: 322481 - DNA, 90 bp, Homo sapiens
tccatcaatcacacgtaccacctggatgttgtggaatgccagctgatgaagaccgagaggccgcgacccaacacctttgtcatacgctgc

SEQ ID NO: 322482 - DNA, 96 bp, Homo sapiens
agaccattcagatgggatctttccggatcaatccagatggcagccagtcagtggtggaggcccaagagctcccagctcccactcccagcagcaggc

SEQ ID NO: 322483 - DNA, 83 bp, Homo sapiens
agcgcagagagcggaggcggtggtggtggcggccgctggccagtccgttggacataccagatggtcgaagagctccacttcct

SEQ ID NO: 322484 - DNA, 100 bp, Homo sapiens
gccagaagactgtcaccatctccaagccctgtggcaaactgaccaagcccaaacctcaagctgtcaccactgactaaagaagagaaaactgcggcagagc

SEQ ID NO: 322485 - DNA, 100 bp, Homo sapiens
cccagagccggcatgaactctcccaacgagtcggtgaacaacgtgggaatgtcgtatgagtatcctgaatactttttggatgttcctgacttggacaatg

SEQ ID NO: 322486 - DNA, 99 bp, Homo sapiens
actgggaggagaagaacattgaagatcacaaaaatcaggggagaaagctaagatgcatagctctcttaggtcccttcgtaatagtgcagctaagaaaag

SEQ ID NO: 322487 - DNA, 75 bp, Homo sapiens
gtgccctgaggttggacgtggggaatttctcctggggctcagagtatgtcggtgcagatctcttgtccatgtgcc

SEQ ID NO: 322488 - DNA, 100 bp, Homo sapiens
cagcgctatcgtgacctgcttttcggttccgggtcttggccccgtccttacctcacaggagatacaacagcggcatggtctggccaactccatctcttcc

SEQ ID NO: 322489 - DNA, 87 bp, Homo sapiens
aagagaggatttgcttttgtaacttttgatgatcatgatacagttgataaaattgttggtcagtcccttgttccaaaaattggaaaa

SEQ ID NO: 322490 - DNA, 100 bp, Homo sapiens
ccagccaaacaatacccacttgtcacgggccattcacatgttaaactgcagcttgcagccatgttttgtatatcaaacctcatatggaatgaagaggaag

SEQ ID NO: 322491 - DNA, 96 bp, Homo sapiens
tggagcctcagttggaagcagccgatccagcctgcggagcctgtggggcagtgcaagaagaaacacacgctgctgtgccccgactttgcccgcagg

SEQ ID NO: 322492 - DNA, 83 bp, Homo sapiens
ggaggcgggacatctccagcaccctcatcgccctggccgacaagcacgcaaattttgcaagaacgaggctcaaggatgtgagg

SEQ ID NO: 322493 - DNA, 100 bp, Homo sapiens
ggacggcggcgcgcagcacgcgcagtatgttgggccctaccggctggagaagacgctgggcaaggggcagacagacgccatggagttggtgctggtcttc

SEQ ID NO: 322494 - DNA, 105 bp, Homo sapiens
gatgttcttcttcgagtatttgtagaaggtgaacagcagagaatttcaaaggaccttgctaatatctgtaagacggcagctacagcaggcatcattggctgggtg

SEQ ID NO: 322495 - DNA, 83 bp, Homo sapiens
tgaagcacccaccgaagacgaccatgacgagctctagctggatgggcgcagagcaggttcaggagaagtggcacctggtggag

SEQ ID NO: 322496 - DNA, 49 bp, Homo sapiens
gctactgcatagagttccctgcaggtctcctacctgccccggatgtgcc

SEQ ID NO: 322497 - DNA, 96 bp, Homo sapiens
gtcagcaggcccaaacccccacaggccgcgggaccctgtcagatgagcatgctggagtgatatctgttctagcccagcaagcagctaagctaacct

SEQ ID NO: 322498 - DNA, 74 bp, Homo sapiens
gccctggctaccatggaccatcctgctggtcagcactgcggctgagagaaaaggaacagttccgtaagctcttt

SEQ ID NO: 322499 - DNA, 74 bp, Homo sapiens
agccatgaacggatggatgtgatgcctgctagccaaaaggggtcctgatgaagaagctgttgtggatcttggca

SEQ ID NO: 322500 - DNA, 75 bp, Homo sapiens
gaatcccggcagcctgaagatcatcaccagtgcagccgcaaggtttctttacctccagaaagaagaatattggcc

SEQ ID NO: 322501 - DNA, 98 bp, Homo sapiens
gtggaagttggggagctttgagattctgtgtgagctgtgcccgtctggctgagatgaggcaaaaagaaatccccagggtcctggagcagctcgaggac

SEQ ID NO: 322502 - DNA, 87 bp, Homo sapiens
cgtgtcctcggagcgcggtccctgtattggtctcctgctcctagagtgcagtgtgccctgaaccgccctgccttctttgctgagagg

SEQ ID NO: 322503 - DNA, 50 bp, Homo sapiens
aaaatggttcccactgccgggcgaggaacaagatcactcaaggtgaagga

SEQ ID NO: 322504 - DNA, 82 bp, Homo sapiens
tgtgctcgagcaaccagaaccggagcatggaggcgcacaacatcctcagacaaatttacatgtattggagaccagaccagaa

SEQ ID NO: 322505 - DNA, 96 bp, Homo sapiens
tcggcagaacattcctgcttccgagttgccaggtatcgagaaccttccctgcgaacttcagaggaacttccagctgatgcgagagctggaccagag

SEQ ID NO: 322506 - DNA, 100 bp, Homo sapiens
ctatgagaacgactgcatctttgacaagtttgagtgttgctggaacggttcggataggcacaaatcctgaagagcccgtgggcgtggactgctcatctgt

SEQ ID NO: 322507 - DNA, 96 bp, Homo sapiens
atgacgtttacaacttttgatctgggtggacatgttcaagaaaatgatgcatcctgttgccagcagtaatccagctttctgtgggcctggcaagcc

SEQ ID NO: 322508 - DNA, 100 bp, Homo sapiens
aagaattgatcttaaaatttgaacctttggattcagcttgtagcagtagaagaagctccatttcatcacatgatatgggccctcacattttccaaacctg

SEQ ID NO: 322509 - DNA, 74 bp, Homo sapiens
tggagaaccaccgcatcaagagcttcaagaacaagggccgcgatgtggaagcacaatcattagcggcatcactt

SEQ ID NO: 322510 - DNA, 100 bp, Homo sapiens
ctagagctccacacaagggaggtcctcaaaagattagagatgtgtccatgggaagagggggagtcggtgaagtacttcctggacaacttggaccggatcg

SEQ ID NO: 322511 - DNA, 50 bp, Homo sapiens
ctcccaagtagctgagactacagggtatgttagagcccaccaaggaacca

SEQ ID NO: 322512 - DNA, 99 bp, Homo sapiens
ggaaggacctaaaggcaaccctgggccccaaggtcctcctgggagaccaggaacgttcactcacagggtacgctcatggagagagggcgcagagcaaac

SEQ ID NO: 322513 - DNA, 75 bp, Homo sapiens
tttcattgagatgatatattgagcccatgcgtagccttttatttgaggtatctcagcgtttgagtcagccaggag

SEQ ID NO: 322514 - DNA, 101 bp, Homo sapiens
aaccaagcttcgcctggtggaattttcagcttttctcgagcagcagcgagacccagactcggactcaggaattgacattggggacatcactgcaaggaagg

SEQ ID NO: 322515 - DNA, 90 bp, Homo sapiens
gagcgacaggagttcatctacccggagaagcaggagccctactcggcaggttgtctttctactcgggacactcttcctttgggatgtact

SEQ ID NO: 322516 - DNA, 100 bp, Homo sapiens
cgccatcctggacggcggcgcccccgggccccagccgcacggcgagccgccggggggtccggggattgtcaatgaggcagatcagattccgatttgacgg

SEQ ID NO: 322517 - DNA, 82 bp, Homo sapiens
aggaaaagcagctccgtccacaacgccgcttcggggctcctagcggagctggagtttgttcagatcatcatcatcgtggtgg

SEQ ID NO: 322518 - DNA, 74 bp, Homo sapiens
ggcgatggagctgttatttttagatacttttaaacacccgagcgctgaggagtgggaatagctttgcgaaaaat

SEQ ID NO: 322519 - DNA, 101 bp, Homo sapiens
cggagaccgggctggagccggacgagctgtcggacttaattcagtgcacaaatgagatgaatgtgaacatcccacagttggcagacagtttatttgaaaga

SEQ ID NO: 322520 - DNA, 98 bp, Homo sapiens
accggcgagccaagttccgcagcctggcatggcttctggggacctttacgagtctgcatgaagaaatcagtgatttttatgaatacatgtctccaaga

SEQ ID NO: 322521 - DNA, 100 bp, Homo sapiens
gagcgcaaactttactctggggcgcagaccgacggcaagttcctccttatcatcctcatcgccctcaacgtcctgctcttctaccgcctctggtccctgg

SEQ ID NO: 322522 - DNA, 76 bp, Homo sapiens
cagcttccaagagaaccaatggaatggagaagctgctgaatgccatggtggcaaaactggggaaccgggaggaccc

SEQ ID NO: 322523 - DNA, 100 bp, Homo sapiens
ccactgacccttgagtgggcctttgagctgctgactttcagctggaacttgaaggtgcagtagacattgttgcaatcatgatcggcaatctgaaaggcac

SEQ ID NO: 322524 - DNA, 100 bp, Homo sapiens
tttcccgctggcgcgcagcctcagctaggtcgccgccctggagaggcaggtgtttgacttcctgggctaccagtgggcgcccatcctggccaactttgtc

SEQ ID NO: 322525 - DNA, 90 bp, Homo sapiens
agtgtgtaggagcatcaaaccagaattgtcgaacacctgatgctgttgagagagcgcctgctcgctgtgcccccgggttatgacgacccc

SEQ ID NO: 322526 - DNA, 90 bp, Homo sapiens
ctacttagctcagcaattcttaccttttgggtggaaagctttggacatgaagggcttggattattattagacattttggaaaaactgatt

SEQ ID NO: 322527 - DNA, 100 bp, Homo sapiens
cgagaccctagaggcctgcggcctgcgaaatggtggagtcaatgaagaaagtagcagggatggatgtggagctgacagttgaagaaagaaacctcctatc

SEQ ID NO: 322528 - DNA, 100 bp, Homo sapiens
cgcggagaaccgctcccggactggaggcgcccgcggcctcgggtgcgtccgctgcgccagaagcatcagatggtgaaggagaaggagacacagaagtgat

SEQ ID NO: 322529 - DNA, 80 bp, Homo sapiens
gaatgtgatttgcttgaagatatgaggtcagcccaaggccaaccccactgtcactctgttcccgccctcctctgaggagc

SEQ ID NO: 322530 - DNA, 75 bp, Homo sapiens
tgctcttcctggactcctgagcagagagccctatgagtttgtctctctggaatggctgcaaaagtggttggatga

SEQ ID NO: 322531 - DNA, 100 bp, Homo sapiens
acaaaagatatacaagaaggagatacattaaatgcaatagcccttcagtactgttgtacgacctagaggatcaagacataatgggagcatttttagacaa

SEQ ID NO: 322532 - DNA, 100 bp, Homo sapiens
tccctgtgaaggtgaaagtggagaaatcagagatgacctgatcagagccatcaagaaactaaaggcacttggcactggcttcggcatcatccctgtgggc

SEQ ID NO: 322533 - DNA, 100 bp, Homo sapiens
agaaggaggataaccagaccttcggctttgagatccagataatggcacctggacacagctgtggcttgtttctgactatcatgagcacgggtccctgttt

SEQ ID NO: 322534 - DNA, 75 bp, Homo sapiens
ttttgctgcaaatgaagttgatggaattacactgtgatacgactgactaatgttggctcaattaagaaacatcag

SEQ ID NO: 322535 - DNA, 82 bp, Homo sapiens
ggaaaaacgtgtgggtacgaccttgcttcctgcctgacacagctcacttcaagaagtgcacaatgtcagaacgtggaattaa

SEQ ID NO: 322536 - DNA, 83 bp, Homo sapiens
ctgctgttgttattgacatgtcaggactgcgggccataggaaaaggatacagagtagagtttcatgaacctgaaacttggtgg

SEQ ID NO: 322537 - DNA, 90 bp, Homo sapiens
ggatcaatccagatggcagccagtcagtggtggaggaagctgcagtaaaggaagatgaagaagaagtttcagataagggcagtgattctg

SEQ ID NO: 322538 - DNA, 74 bp, Homo sapiens
gacattttaaagaacatcttcgaaaacatacagatgcttcttcagctccctcctcttcctccatgggcggtgct

SEQ ID NO: 322539 - DNA, 99 bp, Homo sapiens
ggtgagccttctcgtggcggcggggaccgtccagcccagcgattctcagtcagggtcggcggaccggggagtgcagggctctgtcagattcagtgacag

SEQ ID NO: 322540 - DNA, 75 bp, Homo sapiens
tgttgagcagcccatcgtgcttaaagaaggcccacagcccccatcccgtagcccttcctggatctggagagagca

SEQ ID NO: 322541 - DNA, 98 bp, Homo sapiens
tgacccggtccgcccgtcggtctgcagcgcggctgaggttgtttttcaccattcagaacattgcctgaagcaggtccaccatgccgttagtaacgagg

SEQ ID NO: 322542 - DNA, 76 bp, Homo sapiens
gttttgtgcagattgccagtctaaaggtgctggagaatctggtaaaagcaccattgtgaagcagatgaggatcctg

SEQ ID NO: 322543 - DNA, 100 bp, Homo sapiens
ggtctggctgtggcggaggagcataagaagccccaggatgggtgagttcaacgagaagaagacaacatgtggcaccgtttgcctcaagtacctgctgttt

SEQ ID NO: 322544 - DNA, 75 bp, Homo sapiens
atattcacaatgtatggaaacagaggtttctaagcatgaattgaggaacagaagaagcagagcagatgatcggag

SEQ ID NO: 322545 - DNA, 75 bp, Homo sapiens
ggacctgctggagacctgccatttccaggccttctggacaacacttccttcagaaaacgggaaacttccatttgt

SEQ ID NO: 322546 - DNA, 75 bp, Homo sapiens
gttctggaagcagcaaaagcataggcaggctttcaaaaacagaacctgcacttgttgccaagtcttccatcttac

SEQ ID NO: 322547 - DNA, 78 bp, Homo sapiens
gatgccctgcagtacctgcagaaggtctctggagacatcttcagcagagttgatctctctaatgtattagatcttcat

SEQ ID NO: 322548 - DNA, 100 bp, Homo sapiens
gagaaatgaaattttggaagagtcagcagaagcctccatcaagaaatcggcgagagagagctgagctaaggccagacttctttgactctgcagctatcat

SEQ ID NO: 322549 - DNA, 89 bp, Homo sapiens
gttgcattaaagcattaaaggatagttcttcaggaacagaacgaacaggtgtgtgcggattttaggcaaacaagaaaatattagagtga

SEQ ID NO: 322550 - DNA, 88 bp, Homo sapiens
gaagacgaggatgatgcggaaattaaccccaaggatgctttcattggatttggaggaaatgtgatcaggcaacaagtcaaggataacg

SEQ ID NO: 322551 - DNA, 99 bp, Homo sapiens
tgcaaatgtggtcattatgctgattggtcaaggtcagcatctcctcgacgatcaagatctatctctcttcgtagatcaagatcagcttcactcagaaga

SEQ ID NO: 322552 - DNA, 82 bp, Homo sapiens
ggacgagtgctgtgactgtgttggtttttcacgactgaaaacaacatagcaaaataagccaagatgtctgtggatccaatga

SEQ ID NO: 322553 - DNA, 51 bp, Homo sapiens
agggaactgcttgccaaatttttccaaagattggtgctgaagacatggacg

SEQ ID NO: 322554 - DNA, 76 bp, Homo sapiens
gtctaccaggtgttgctggtgctgtgctgtttgatcacattgtctcctgcatctctgacttcttggactacatggg

SEQ ID NO: 322555 - DNA, 75 bp, Homo sapiens
tttcctgcgctgttccacctcattcaacttcagaacccagcgggtgccgcttctccacccgaggcttccacctcc

SEQ ID NO: 322556 - DNA, 75 bp, Homo sapiens
gagacgtgaaacatgtgaacactcaagtgaagcaaaagccttccatgattacgacccagattcaagaacatggca

SEQ ID NO: 322557 - DNA, 87 bp, Homo sapiens
aagccctactgagcgtgctcccctctgagactggagtgagagggtcttctgatttgttcccgacaaggagttttctggttcagaccg

SEQ ID NO: 322558 - DNA, 100 bp, Homo sapiens
ctgaattttacccttcaggttattcttccagttacacaggctggtgaattaccatatctccgtcaagtgcagtaaccagttcaagttggaagtgtgtctt

SEQ ID NO: 322559 - DNA, 88 bp, Homo sapiens
gagagcgcgaatatcgtcatcgttagaagagaatggatcttggagaatgtctgaaagtccatgacctggctttaagagcggattatga

SEQ ID NO: 322560 - DNA, 52 bp, Homo sapiens
ggggagaggcctggaggacaccaacatgatcttagcaaagcaatgtctcaag

SEQ ID NO: 322561 - DNA, 75 bp, Homo sapiens
cttctggaatccagacagaatgacccgtaatcgacaaaactttgaacgaggctgactgtgccaccgtccccccag

SEQ ID NO: 322562 - DNA, 97 bp, Homo sapiens
agaagcacctggatgagacatttgctacagcatcccacattaagtcaacgatgagggttactaccagggtggaaaatttcagtttgaaactgaagtt

SEQ ID NO: 322563 - DNA, 100 bp, Homo sapiens
cagggcagccaggcagagctgcacccgctgccccagctcaaagattgaaaaggaagatcaggccaaccccaaagaagaagtgaccaaggaggagtttaaa

SEQ ID NO: 322564 - DNA, 82 bp, Homo sapiens
cggccagcgtccctgagacgccaacggcagtcactgccccccattccagctcctgggttcgatacaagaggctgttttccta

SEQ ID NO: 322565 - DNA, 98 bp, Homo sapiens
attcgcagtggtcgcttcttctccttgtggttcctctggagattaaatgtacttcacagaacctcagcgagcggactccagttatattccgtgctctt

SEQ ID NO: 322566 - DNA, 98 bp, Homo sapiens
aaaggattgtgacatatcgttggacccagaattgagggctgaaagacacacagaagtcttcatggatatagttgatacatttaatcatttaattccta

SEQ ID NO: 322567 - DNA, 75 bp, Homo sapiens
aacaactgaaaagtgatgaggaactggcaagaaagctaagcattgatattatctccagatcacactaagtttgtg

SEQ ID NO: 322568 - DNA, 83 bp, Homo sapiens
cccgacgcagcaaaggcaaacttggaaagagcaagatcggcagccctaaaaaatcgaaacgagttggctgagactcttgcact

SEQ ID NO: 322569 - DNA, 101 bp, Homo sapiens
gttgctttgcctgggcggtgcggacaagcgcctgcgtactatactggcaattgctggagaagattttgcaattgttgcttctgatactcgattgagtgaag

SEQ ID NO: 322570 - DNA, 100 bp, Homo sapiens
tccacctacctcaacaacccgtacgtgcggaaggccctcaacatcccggagcagctgccacaatgggacatgtgcaagatcatccagcagctcgtcaacg

SEQ ID NO: 322571 - DNA, 49 bp, Homo sapiens
tgaaagtggaggctgcgaaaataggacatggatttgattgacatacttt

SEQ ID NO: 322572 - DNA, 75 bp, Homo sapiens
accgaggctggagggggagaacacccaggatcagtttgacaacttagaaaaacacacacagtggggaattgatat

SEQ ID NO: 322573 - DNA, 71 bp, Homo sapiens
gccagttgggctgtagaaaccttacttactgtactaattttaacaacagggtcatcgagcagctcggtggg

SEQ ID NO: 322574 - DNA, 95 bp, Homo sapiens
agatgtccttaccagctttgacaatacaggaaatgtttgtttaaacttacacgaatcgctttctggaggaggaggggacccgctgcgcgattgac

SEQ ID NO: 322575 - DNA, 100 bp, Homo sapiens
ccagaatggagaaggaactgttggagatgagacccttccggtcttcttttcaggaacaatcatgaagtttaagaagaaagaatactgtcagaaaagaggc

SEQ ID NO: 322576 - DNA, 90 bp, Homo sapiens
aagaccgttggttctgacgaggcacagcgtttcttgcaagaatgggagattttgaagccagcttcataaggctattggacaaaataacga

SEQ ID NO: 322577 - DNA, 51 bp, Homo sapiens
cgcagcacagccgcgacttcaaggtgaaagaaaagatgttgtcccggttaa

SEQ ID NO: 322578 - DNA, 131 bp, Homo sapiens
gggaactgggaacactggagacctgatttctaactgacgctaccgtcgcggccgccgaccctatcagatttggatatgtccttcatatttgattggatttacagtggtttcagcagtgtgctacagttttt

SEQ ID NO: 322579 - DNA, 100 bp, Homo sapiens
tatgccatctgcaaatacgcctttctcatatccactgccaaagggaccagagacgaaaccagacagagggtcaagtttacagatgaccgtgtctgcaaga

SEQ ID NO: 322580 - DNA, 82 bp, Homo sapiens
cgcgaggttcgagtgttgcagagcctgcggggcaagatctatcgccatggatcggatgaagaagatcaaacggcagctgtca

SEQ ID NO: 322581 - DNA, 99 bp, Homo sapiens
cggaccttttaccatgaatagttctactccttctacaggttatcggggcccaccagggccaccaggttctgctgctcttcctggaagcaaaggtgacac

SEQ ID NO: 322582 - DNA, 73 bp, Homo sapiens
gaaatacatccagcatggctggaggccggctgttcggacggaagcatcaggctgcaccagctgagctccgcgt

SEQ ID NO: 322583 - DNA, 74 bp, Homo sapiens
agagtcaccagtggccctggaggaggccaagggcaagctggcctcattttttctgtctagggtggatgccttga

SEQ ID NO: 322584 - DNA, 100 bp, Homo sapiens
gttgtgtatgatgtgacagatcaggtcacaaacatgtcagacaaaagtgaattaaaggctgagttggaacgtaagaagcagcgactggcccaaatcagag

SEQ ID NO: 322585 - DNA, 138 bp, Homo sapiens
gtcgtttcccagcgctgcgcaggacttctcctggcggcgctgcggatccagggggtcggctgccaggtacaggtggctgtatcgttttaactgcatagagggcaggtctcttttggaattaggattaaagaaagtgca

SEQ ID NO: 322586 - DNA, 100 bp, Homo sapiens
acggggcattgaagaggactgataatggaggcattttccctgaagatgagatcccagagaaggcctgcaggcgcctgcttgaagggaggcggcagaagaa

SEQ ID NO: 322587 - DNA, 100 bp, Homo sapiens
ctgacttctttccaggtgatgtcaagagtttttctaatatgggcagtaacacatagcgtcaaagagagtgatggtgatgattttaattacatcattgcat

SEQ ID NO: 322588 - DNA, 100 bp, Homo sapiens
ctaggttctgcggcacgggatggcggaggcgcctcctgtctcaggttgttctggaattgatagagctccgtgaattgggtgctgccaggtcacttttgag

SEQ ID NO: 322589 - DNA, 75 bp, Homo sapiens
aagacgtcgaggggacgattggaatgacaggtttgatatacgtttgatgaaagaaggtcgtatgaaaggacaagc

SEQ ID NO: 322590 - DNA, 73 bp, Homo sapiens
gcgtccccggcgcgaagaggctggactcggattcgttgcctgagttaccggtattgtaagaacaagccgtacc

SEQ ID NO: 322591 - DNA, 100 bp, Homo sapiens
caaagagaaaggaagcaggcccgttggaagtggttgtacctttttggcatctaacatggtgaagaaaggagtaaagaagagaacaaagtaactcctgggg

SEQ ID NO: 322592 - DNA, 98 bp, Homo sapiens
atctttgaactactgccggagcttctgccaggattaaagaaaccttctaccctgatattccaaatccagaaaactgtaaagcattacagtttcaaaag

SEQ ID NO: 322593 - DNA, 82 bp, Homo sapiens
attttgagtcctcgagtgaatgggcggatctcatatcttcacttggcaaactcaacaagtccctgagattctgcagctcagc

SEQ ID NO: 322594 - DNA, 75 bp, Homo sapiens
gtacgccctcatggggaaaatctccccggtgactttcagcgccctcacaaagccaatgctgaggagatgaccaag

SEQ ID NO: 322595 - DNA, 100 bp, Homo sapiens
gtgatgttctcggcaggagcggagagtttgctccaccaggccaggtatattttcctggagtacgcgtcccctgcccacgctgtggatgctgtgaagaacg

SEQ ID NO: 322596 - DNA, 80 bp, Homo sapiens
cgcctgcgcgccgtggatttcgctgagcggcacggctacatcaagggcatcgtcaaggctaaaaagactccatcagacac

SEQ ID NO: 322597 - DNA, 100 bp, Homo sapiens
cacgttggaaccgaagagagctctgttgttgcatgttctaagaacggaagcatctgggctggatggaatttagcatcaagcagagtcccctttctgttca

SEQ ID NO: 322598 - DNA, 100 bp, Homo sapiens
gaggaggcagcgcgacctccgcacgacatttgaagacagtgatttgttccatttgattggtgttatctgtggcttagcaatttataattgtaccattgtg

SEQ ID NO: 322599 - DNA, 51 bp, Homo sapiens
ggagtccgccccgtgaggagaatggtactaccccagtggagatgcctttgc

SEQ ID NO: 322600 - DNA, 132 bp, Homo sapiens
ggatcctctggccagctgactgcacttcttttttgagaaaggaaggaatatatcctgactgattacgccctcctgcaaaacggcccaactacgttaagcttggcactctggcacctttctgctgtccctggg

SEQ ID NO: 322601 - DNA, 75 bp, Homo sapiens
tccaggccagcctgtccctaagaacatcctgcaggggcaagattcttgccaagagaattaatgtgcgtattgagc

SEQ ID NO: 322602 - DNA, 82 bp, Homo sapiens
ggtcgcgctcgcccgggcggcagacagcctcccgcgacgatgcccctcaacgttagcttcaccaacaggaactatgacctcg

SEQ ID NO: 322603 - DNA, 82 bp, Homo sapiens
ccaggccccagccggcagcatgctgaggacttcctgggagagtctgcgggccaggcatcgacatccgcaacgactatcagca

SEQ ID NO: 322604 - DNA, 75 bp, Homo sapiens
accgggaggccgggccgagcgggctcattgtcatccccaagccaggccagttctccaggtggaactgtagtgtag

SEQ ID NO: 322605 - DNA, 100 bp, Homo sapiens
actctgaggctgatatgcaatgtcacttacaacattaatcagatactgcatttaagctttgtttttgggaggctgaggaaggaggatcatttgagcctgg

SEQ ID NO: 322606 - DNA, 80 bp, Homo sapiens
gttgccggtacatcggggatttctggctctttcctcttcgccttaaattcgagaagatggcgaattagaagatggtgaaa

SEQ ID NO: 322607 - DNA, 90 bp, Homo sapiens
ccgggacctcctggaagccaaaaatgatcacattccagttcatagcaacattttctactctggtgcctttagtagattgttcatctgtac

SEQ ID NO: 322608 - DNA, 75 bp, Homo sapiens
ctttgggaaacctgattgttgtaaatgatttgcttgtaaatgcatcacgaagaggcagcccagaatgaagaaagc

SEQ ID NO: 322609 - DNA, 100 bp, Homo sapiens
agctcagacctgccaatttaccagagataattgataacaccctgtaacagctgagtgttggtaaatcatgcttattgctacagtttacagacaagaggtt

SEQ ID NO: 322610 - DNA, 50 bp, Homo sapiens
cagacctggaggacgatacacatgaaggatacttttgtggaactctatgg

SEQ ID NO: 322611 - DNA, 100 bp, Homo sapiens
cagctgtattgccgcagttctagcttcaccttcacgatgtttcccttggtcaaaagcgcactaaatcgtctccaagggggagtcggtgaagtacttcctg

SEQ ID NO: 322612 - DNA, 76 bp, Homo sapiens
gattcgcagtggtcgcttcttctccttggttcaatgtggcttaattgtggtggcctacaaagatggatcacctgcc

SEQ ID NO: 322613 - DNA, 83 bp, Homo sapiens
gcctgtccgtcagtccctaggtatccgcactgctcaggggtaaagcagctgagcagccattttcagatttaccccttctcatt

SEQ ID NO: 322614 - DNA, 96 bp, Homo sapiens
cctctcacaggtgaatctctcctttcttcattccatggacagcaataagtttgaggtggtatcaacatcctacagaagaagaattaagaattcttg

SEQ ID NO: 322615 - DNA, 50 bp, Homo sapiens
acttgcagttgaaggagtataacacagaattctgcttggtcagaatcgtg

SEQ ID NO: 322616 - DNA, 100 bp, Homo sapiens
cgtggaagcaggactgcgccgcgtcttcctcaaggctgaaggggatgctaagggagataaagcaaaggtgaaggacgaagtaagtcattctctcttcaag

SEQ ID NO: 322617 - DNA, 74 bp, Homo sapiens
gccgcctcacctgtggagctctgggtacaggaagcatctcaattctccctactatattgtacctcacaatcggg

SEQ ID NO: 322618 - DNA, 99 bp, Homo sapiens
cacggtcctggtaacccccctgggcgcccttggagtaccgttcgggtacgtgctctactccctggacctgtacaatgacagcgcccactacgcgctcac

SEQ ID NO: 322619 - DNA, 100 bp, Homo sapiens
gacagggggaactgttcatcttgatgaggatgacgatgtcgataccaagaagcagaagaccgacgaggatgactagacagcaaaaaaggaaaagttaaac

SEQ ID NO: 322620 - DNA, 76 bp, Homo sapiens
aaccaagaacctgctgacaggagagacagaagcggacccagaaatgatcaaggttctgctccagacgagcccttac

SEQ ID NO: 322621 - DNA, 82 bp, Homo sapiens
gacgccttatggagccagcatattccagctgaaccttattcacagtgaaatcagtaatttagccggctttgaggtggaggcc

SEQ ID NO: 322622 - DNA, 75 bp, Homo sapiens
ggcctgcaaggagaactattgtcttatgatcacgccactcccatggttcaagctttgactacaaccagaattcag

SEQ ID NO: 322623 - DNA, 100 bp, Homo sapiens
cgagggtgtcctgttacttccaagtcatcaccagaaagcctgaacacttgcctttgcagactcagttcaaagaaagagaagttggcaatcttcagcactc

SEQ ID NO: 322624 - DNA, 75 bp, Homo sapiens
tgagaagcaagaaggccctggacacagcaatatctctgggctttcacaggcatctaataggattcaggaatcaaa

SEQ ID NO: 322625 - DNA, 100 bp, Homo sapiens
gtcaagaagatccacattgaggtagtggacaaaggtcatgcagaaggcttttgtatgatgtgtacaatgcaagcacatattacccaggcactcagtaatc

SEQ ID NO: 322626 - DNA, 50 bp, Homo sapiens
gagccatactgcgttatagcggccgtgagctgttttggagtcagcggaag

SEQ ID NO: 322627 - DNA, 75 bp, Homo sapiens
gacgacgctgctgggtccgctgagcggggcgacccgagagtattctcgatatcttcatgcacaccttgatacccc

SEQ ID NO: 322628 - DNA, 73 bp, Homo sapiens
gaagcatgaagaaggggtaaggcgtgagcccccaagatttcacgagagagcaggagattcggatgggtcagat

SEQ ID NO: 322629 - DNA, 90 bp, Homo sapiens
gttttccaaaaaatgtgagactttttcttggacgaattcaggggttgtagaaggtgatttagctgccatagaagcatacaagtcatcagg

SEQ ID NO: 322630 - DNA, 75 bp, Homo sapiens
caggagggcagcagtagaatcacttgggttcattctattcagtggccacagatgtctttaattccaaaaacctgg

SEQ ID NO: 322631 - DNA, 101 bp, Homo sapiens
ctcgggctgagtttgcggagaggtcagtaactaaattggagaaaagcattgatgacttagaaggtgaccaagaatatggcccaggtgaccaaagccctgga

SEQ ID NO: 322632 - DNA, 75 bp, Homo sapiens
atcttcgaacttagacttccggaaggactttggcgaggacgcccctgtcctggcaagagctagaaggtgagcgtg

SEQ ID NO: 322633 - DNA, 100 bp, Homo sapiens
aacacattcagactacaagtccagacccaggagagcaaggcccagaaagaggctcacgtgatggttctatgggactctgggaggtgacagatgatgtttt

SEQ ID NO: 322634 - DNA, 97 bp, Homo sapiens
tggtctcaggcataagcacaggggtgcttcagcttcctcaagataccccatcagcctgagtctcttaaaggcctttatacacatatgtctacacata

SEQ ID NO: 322635 - DNA, 98 bp, Homo sapiens
aggacatcctggaacctgggaaaggatataaagatgaagcgcagctgtataaagaagagcacctgaggaatcggcagcaccctcactgctacgttcag

SEQ ID NO: 322636 - DNA, 100 bp, Homo sapiens
tccagtttaggggctcacctgccttgcatcgttccgagtcctgtactggactgcatcaggccgcgtctcctcagggaactctaatgaatcattgattgac

SEQ ID NO: 322637 - DNA, 83 bp, Homo sapiens
tgaacgaagtggccaagaaggagaagcagctgcggaaaatgctagaaggcccgatgagagaaagggaaagttaaggatgctgg

SEQ ID NO: 322638 - DNA, 82 bp, Homo sapiens
tgtgtgtacatcacccccatggaggccctggcagagcaggttctgtacagagtaatgagatgtgtgacggctgcaaaccagg

SEQ ID NO: 322639 - DNA, 99 bp, Homo sapiens
ggagagccgccagggctctatcaaggggctggtgtactccagcaacttccagaaatcgacttaaagcctccagagaagtagaatctgtagaccttccac

SEQ ID NO: 322640 - DNA, 101 bp, Homo sapiens
aagcagtggcgaagggaatcgcaaggctcttccctgaccattttctactgtccctgcgcgagaagacccttttgaggacttctttgggaatcgaaggggtc

SEQ ID NO: 322641 - DNA, 100 bp, Homo sapiens
gatggccctgcagaggcaggctgagcttgaggagggccggccgcagcaccaggagcagctccgaaactgatcccaaagattgagttcctggacctgagtc

SEQ ID NO: 322642 - DNA, 100 bp, Homo sapiens
caatgtgcctttgcaggggagcctgagagccacagtctaccccaaagtctgccaaaggcagtgcaaagaaggaaggctccaaacggaaaatcaacatgag

SEQ ID NO: 322643 - DNA, 142 bp, Homo sapiens
acccagccacctgcctccacgtctggaataatgggtactctttcctcgtggaatttgaagattctacagataaatcagtccaaggtttacactcgcacaccaaccttatatttggacttcaaattggacccaggagccaaac

SEQ ID NO: 322644 - DNA, 98 bp, Homo sapiens
ggcttttggagatggagactatggaaaactaggcttaggaaattccactgcaaaatcttcacctcaggctctgattgtactttctccacaagcttcag

SEQ ID NO: 322645 - DNA, 75 bp, Homo sapiens
ctcgcccacgcccagcagcagcagcaacaggtgtgttgaggctcctggaacacggggaggagtacgtattcaccc

SEQ ID NO: 322646 - DNA, 89 bp, Homo sapiens
cttgacattctcaaagactggtgctatgaagctctgaaagcaaaatcagaggggaagcttgcaaaacagatttgcaaagttgtgttgga

SEQ ID NO: 322647 - DNA, 73 bp, Homo sapiens
atgttggagaactacagaaacctggtctccctaggtatatgactgatgggatgttacttcgtgaagctatgaa

SEQ ID NO: 322648 - DNA, 82 bp, Homo sapiens
aggggggcctggccgcgcagccggtgagaagccctaccactgcaactgggacggctgcggctggaagtttgcgcgctcagac

SEQ ID NO: 322649 - DNA, 74 bp, Homo sapiens
cagcagcccccgaaggccctatcaggacatggagtatgaaagacgagaagaggtgaagagtccagtgaaatgga

SEQ ID NO: 322650 - DNA, 80 bp, Homo sapiens
gtggtcctgatgccaacagtgtaccagcagggcgttggctatgtgcccatcacagctcggagcccaagatcctcttctcc

SEQ ID NO: 322651 - DNA, 100 bp, Homo sapiens
tggactgaacttaaatactgataggaaactaaatatattttgccaactttggaaaaagaattattcttggcagagcacagtgaccttgaagaaggtggac

SEQ ID NO: 322652 - DNA, 100 bp, Homo sapiens
tttgttaaggattccaagtaactcttatttggggcataaggaaatggtggcaggcacttcctcctaacaagaaggaagtagttaaagaaaatataaggaa

SEQ ID NO: 322653 - DNA, 100 bp, Homo sapiens
ttgcatcatcagttttctgcactggaaattacagggctatctttgaagaaaccagatttgaggcttaagcaacttcttccggggaagagtgccagtgcag

SEQ ID NO: 322654 - DNA, 75 bp, Homo sapiens
aaagaaatgtttggagaccagaatgatgatactctggagcatcgtgcatcaagtcaccagggtggtccattcaag

SEQ ID NO: 322655 - DNA, 98 bp, Homo sapiens
gatgaggaagaggaagaaaaaggaccagtgtctcccagaggtcctgctgtactagccaccaaagcagctgctggtactaagaaatatgatcttagtaa

SEQ ID NO: 322656 - DNA, 80 bp, Homo sapiens
gtggtcagcagtgcacaggagaagggcaggaagggcatatgtctctcttttcatgcggcatttatgtgagccgggggcag

SEQ ID NO: 322657 - DNA, 74 bp, Homo sapiens
taagactgtgaaaaggctggtgaaagttaagggacttgccatgaggtgttgaagccttgtttcactgagttgga

SEQ ID NO: 322658 - DNA, 111 bp, Homo sapiens
gttgctgttgctgtttgtgagcctgtggcgcggcttctgtgggccggaaccttaaagataacgaaggaggcccaacttcattcaataaggagcctgacggatttatcccag

SEQ ID NO: 322659 - DNA, 99 bp, Homo sapiens
acagatgctgccttgaactatgagatggcatggaaatatagcaatcggacaaatccggcagtaggtctcctcatttaccacatcccccaggttgaacca

SEQ ID NO: 322660 - DNA, 50 bp, Homo sapiens
cagaaaaacaacgcctggaatggcttcctcagcaccttcaagcccccagc

SEQ ID NO: 322661 - DNA, 88 bp, Homo sapiens
cgccggtggctcggggccccgcggaaaaggacggggaggtttactgcatcgacgcgcggttctacgggaacgtcagccggttcatcaa

SEQ ID NO: 322662 - DNA, 74 bp, Homo sapiens
tgtcttcggtggactccttcggcagtccacccaccgccgccgcctcccagcttcatggcggctgaagagatgca

SEQ ID NO: 322663 - DNA, 100 bp, Homo sapiens
ctttgctgtgaggctcgtcttccaggacttcgacctggagccgtcccaggactgtgcaggggactctgtcacaatggtcctggtgctgcccaggaaccca

SEQ ID NO: 322664 - DNA, 74 bp, Homo sapiens
gagaagcacaagatcatgcacagaggatcactactcttggaatcaaagataaatccaaatactgcatatcagaa

SEQ ID NO: 322665 - DNA, 90 bp, Homo sapiens
cgccgcaccaggtcttgtagcagcgcctcctcggtcagccaagatgggaagtcgctccttgacaagctccagcggcccttgactcccggc

SEQ ID NO: 322666 - DNA, 82 bp, Homo sapiens
cgcgagtgggagcaccaggatctcgggctcggaacgagactgcacggaaggaacaccagccagccgtggaacctcaggtgca

SEQ ID NO: 322667 - DNA, 88 bp, Homo sapiens
ggcacggccatcgccggctcggtggaggcggtggccagcttcctgcctgacacagctcacttcaagaagtgcacaatgtcagaacgtg

SEQ ID NO: 322668 - DNA, 100 bp, Homo sapiens
cccgcggcttcctggaggcggcggccgcgattgcgaggttaaactttttccgtgatgttcctgacttcagagtgttagcctgtggtggagatggaaccgt

SEQ ID NO: 322669 - DNA, 75 bp, Homo sapiens
ccgaagccccctgcaggaactctacaacccaatccagctgggaaaacggcaatggattaataacaagaaattaat

SEQ ID NO: 322670 - DNA, 75 bp, Homo sapiens
tggattccagttcgtctgcccacagccctccactcaacacaggaagcatgcagcagattggaataaatatgatga

SEQ ID NO: 322671 - DNA, 87 bp, Homo sapiens
ggccagaccttggggaccaagaaaagcagcagtgctaaaatgatgtattttctggacaagtcaaggcaggagaaagcaattgctata

SEQ ID NO: 322672 - DNA, 114 bp, Homo sapiens
gcctggttacagctgtttccacgtgcggtgctcgtcgggagtgatcacctaccctacaggactccctggaggaaaagcggaagcggcagcggtctgaacgcctggaacggattt

SEQ ID NO: 322673 - DNA, 76 bp, Homo sapiens
ttggcccaaatgttacactcacaaccactgcgccaggaaagtgactgatcctttgaaatactccagccatgactaa

SEQ ID NO: 322674 - DNA, 100 bp, Homo sapiens
cggtttttcagctcaaaaaccacagctgcacattctttagacttcacagagaatgcagttgtcttgacttcaggtctgtctgttctgttggcaagtaaat

SEQ ID NO: 322675 - DNA, 83 bp, Homo sapiens
gggagtcggaaggggacaaatccgcgatcccagtcatgcatctgtcctggataatgaaagacttactgcagaggagatggatg

SEQ ID NO: 322676 - DNA, 101 bp, Homo sapiens
tttctgaagaagtggctgtagggagcatagctgctacactgaagatgaagcaaggcccaatgacccaggcgatgcctgtgaggagccaccaacatttgaag

SEQ ID NO: 322677 - DNA, 97 bp, Homo sapiens
tgtgctcacagggaaagtggaaaaggttctttcaaagcagcacaggtggtagaagttgccagggacagataacatggcagccagcgggaagaccagc

SEQ ID NO: 322678 - DNA, 100 bp, Homo sapiens
gattcgcattcccaattttaggtggcagtcgcaacccatactattcggacagatggcacagaaaccgctgcgcctgggatcccaacaagccctcaggatt

SEQ ID NO: 322679 - DNA, 115 bp, Homo sapiens
cttgggttttttgtggcttccttcgttattggagccaggcctacaccccaggtgagaagccctaccactgcaactgggacggctgcggctggaagtttgcgcgctcagacgagct

SEQ ID NO: 322680 - DNA, 82 bp, Homo sapiens
catgggcacgtccgcaaggccttcaagagccacaaaacagacacatgaccctcattgagaactgcagcctgcagtacacgct

SEQ ID NO: 322681 - DNA, 90 bp, Homo sapiens
gagtgtctgtccccagagcctcagtttgtgcaggacaccgacatggaacagggactcactgggggttactcactataaacaatatccacc

SEQ ID NO: 322682 - DNA, 83 bp, Homo sapiens
cattaatcagatactgcatttaagtgcccaccagaagtatgtccgacaagcctggcagaaggcagacatcaatacaaaatggg

SEQ ID NO: 322683 - DNA, 83 bp, Homo sapiens
cctgtggcaggagagacaacaaagcgctattatcctaaggcttcctggagattcacgaacaagaataggattcatgacctttg

SEQ ID NO: 322684 - DNA, 73 bp, Homo sapiens
tgacaatggaccaaagacgatcaatcaaattcgtcaagatgcagtaaaagtgttcatgaagtctgtgaagctg

SEQ ID NO: 322685 - DNA, 87 bp, Homo sapiens
ttcttctccaacgcgacagacgtcgaggtgtttgcacttgtgacagcagtatgctgtcttgccgacggggcccttatttaccggaag

SEQ ID NO: 322686 - DNA, 101 bp, Homo sapiens
cttagaggtgtcttggccaccaaacacaggagtctcgctctcagtcaaaatctccaacgggaactcctgctcgtgtaaaatcggagagcaggtcaggatct

SEQ ID NO: 322687 - DNA, 74 bp, Homo sapiens
ggcgttgatatcggtggtaacgacggcctcagcaggcggggaagatgaaaggagtaaagccaatcccagctgaa

SEQ ID NO: 322688 - DNA, 90 bp, Homo sapiens
ccccagtgcactagccattgaagtatttgaagcacatttgggaagccacattttgcagcagtccaaggttgtgctcttggaagacctggc

SEQ ID NO: 322689 - DNA, 90 bp, Homo sapiens
gagagaacagggtggccgcttggtccagtgattcgcctttgccagtctcatctcgtgtctgctttgttaagttccatgatccagactcag

SEQ ID NO: 322690 - DNA, 101 bp, Homo sapiens
ctgtacctggatgaagttccgaaagcaggaactttcgaaagaaggtaccacctatcataggtattaccacacaatttcatgcatggtggcatattttaact

SEQ ID NO: 322691 - DNA, 90 bp, Homo sapiens
gatgccagggccaagacctcggaagggccctcaggccagaggccaaggggtggccgctgccaagcaggtgtctggggaagccaatgaaac

SEQ ID NO: 322692 - DNA, 103 bp, Homo sapiens
gccctgcagtacctgcagaaggtctctggagacatcttcagcagccaaggccacctttgatgccatttctaagacctacagctacctgacccccgacctctgg

SEQ ID NO: 322693 - DNA, 98 bp, Homo sapiens
gccagtcctgacaatgggcagaacgaattcagtgatatcattaagtccagatctggttggtgaaagatgctccttgggatgaggtcccgcttgctcac

SEQ ID NO: 322694 - DNA, 101 bp, Homo sapiens
ttcttagaagcccactcaactgatgaatttaaagatgtttctgcaacagaaccacacaaagaggcagctgaacgtctttcaaaaacagtagatgaagcatg

SEQ ID NO: 322695 - DNA, 100 bp, Homo sapiens
cgactgtgtaaacaactagagaagattggacagcaggtcgacagttatgatgtgattgctcaagcccaatctgggactgggaaaacggccacatttgcca

SEQ ID NO: 322696 - DNA, 50 bp, Homo sapiens
catgcattgccattatctgtgaactaggggtctcctgctgccagctaagt

SEQ ID NO: 322697 - DNA, 90 bp, Homo sapiens
tcctcttcttggtgctgtggctgatgcatttcatggctatcatctacacggttctccaaaaaatgtggaatcctttgcatctatgctgag

SEQ ID NO: 322698 - DNA, 100 bp, Homo sapiens
ccattgctggcatgacgtttacaacttttgatctgggtggacatgttcaaggctggctgaaggcggtgcaggtcctcatggtgctctccctcattctctg

SEQ ID NO: 322699 - DNA, 100 bp, Homo sapiens
cctcaaactcccaggctcaagcaatcctaccatgtcagccttcccagtagctggaactacaggtgatgactgaaaaagggaaactgtgccactatttgta

SEQ ID NO: 322700 - DNA, 98 bp, Homo sapiens
ctgtgctcagggctcgcgggtgaccgaaaggatcatgaactagtgacctggaaagatggaattactctgatcaccaaagaggaagcctctggaagttc

SEQ ID NO: 322701 - DNA, 75 bp, Homo sapiens
cccagctcggcccgcgggggagccccgggagccgcacgaaggaagaatcctgctcaaaaatgaggtgaattaata

SEQ ID NO: 322702 - DNA, 76 bp, Homo sapiens
agaaggaacttgcagaaatcacattggaccctcctcccaactgtagtgtttcctgaggttataggcgggtgtttga

SEQ ID NO: 322703 - DNA, 89 bp, Homo sapiens
cctctgcatgaagctgctattaaagggaagatcgatgtgtgcattgaaattgacattgaacgctgtgtgagagaatctatcaacctgtt

SEQ ID NO: 322704 - DNA, 100 bp, Homo sapiens
ctgcatatctgaccttcgggcccaactcccaaagcagttcaagtttgccccagagatggacgattacgtgggcaccttcctagaggggtgccaggatgac

SEQ ID NO: 322705 - DNA, 88 bp, Homo sapiens
ccagggcagcagggcatcgtgccccagagtgttctgccagttctggataatccactgtccaagaaggttcgaggcctcattgatagct

SEQ ID NO: 322706 - DNA, 90 bp, Homo sapiens
ctgcattttgggaaactcgactttggagaaaccaccgtgctggaccgcttttacaatgcaggacggcggacccagccgagaagacgccgc

SEQ ID NO: 322707 - DNA, 82 bp, Homo sapiens
cgcaacacgcccgcaggctcctgtgtctgctgccggggcagcggggcccggaagggccatccacggcttccgagagacagag

SEQ ID NO: 322708 - DNA, 74 bp, Homo sapiens
gagagtttaaacagccaaaacagttcattcatattcagcctttccccacaaataaaccagagaaagatgcaaga

SEQ ID NO: 322709 - DNA, 83 bp, Homo sapiens
ctctggacagggacagtgggcagtgctcccggaacacaagctgtgaaacactaggtgattgaattactcagatatgaagatca

SEQ ID NO: 322710 - DNA, 50 bp, Homo sapiens
cagaaggctggaggaaacgtcagcgctggagagcgaggtggcttcaataa

SEQ ID NO: 322711 - DNA, 98 bp, Homo sapiens
tcttggggaaactcggagggaccctggcccggaggaagaaagccaaggagggggcagtgatcggtgatggacagtctgctgtggccagtaacattgcc

SEQ ID NO: 322712 - DNA, 113 bp, Homo sapiens
cttgtggagccggagctgggcgcggattcgccgaggcaccgaggcactcagaggagatatggctcgtggacagcagaaaattcagtctcagcagaaaaatgccaaaaagcaag

SEQ ID NO: 322713 - DNA, 73 bp, Homo sapiens
ggcagcagccaatggagggggcgacttacgctctattaccaggttttaaacttcgccatgatcgtgtcttctg

SEQ ID NO: 322714 - DNA, 83 bp, Homo sapiens
ggatcatgtctgcgagccaggattcccgggttgggtttggcactcaacttccagccctcgctcatcatgctgaaccgctactt

SEQ ID NO: 322715 - DNA, 95 bp, Homo sapiens
aggaacccaaactgtggggaatgcatgaaaggcgtgatcaccgacatcacagcgattttcgtcagttgatgaacaagcaaaacttcataagacta

SEQ ID NO: 322716 - DNA, 80 bp, Homo sapiens
gccaattgagattcggagttaaaacaggatggctggctgtggtgaaattgatcattcaataaacatgcttcctacaaaca

SEQ ID NO: 322717 - DNA, 82 bp, Homo sapiens
ttcgtggaaaaatacgagaaacagatcaagcactttgctgcggttggatttctcacgatgtccagtgttatctccatgtctg

SEQ ID NO: 322718 - DNA, 82 bp, Homo sapiens
gcaggagtaaattgaaagaatcacttgatggtgttatctgaaaaggttagtcagctgatggaatggactaacaaaagacctg

SEQ ID NO: 322719 - DNA, 112 bp, Homo sapiens
actgcggaaggccgcagggacctctgcctaggaaagccaggtgaggagtttgaggtgggcagcattacttccatctttagcaatcgggccgtggtgaaatacagtcgtctgg

SEQ ID NO: 322720 - DNA, 100 bp, Homo sapiens
cacgcaaccccagatccatttacactttacattgctgagacaaaggaaaacccactcccttggaggagcatgaccttttcctgtaattcttcccactgct

SEQ ID NO: 322721 - DNA, 94 bp, Homo sapiens
ctgcctcccacaagtagctccagcgccgtaagcgaggcctccttctcctacaagaaagacgcttctggggccagcttatggttcccctattgag

SEQ ID NO: 322722 - DNA, 100 bp, Homo sapiens
ctacaatctaagaaggatttcagcaaatttggagcagggtcacgagaagagaatgccttctagatgcaaaatcacctccaaaccagaccacttttcttga

SEQ ID NO: 322723 - DNA, 100 bp, Homo sapiens
cctgggaggccggccggtgccagcacctttcggcttctgagacggcggcagcagcggcattcagctttttagttggagaaggagcctacagatgggcagt

SEQ ID NO: 322724 - DNA, 104 bp, Homo sapiens
cttttgccaattaggtcacttcaacctcttgttggaagattattcaaaaggaagaaggtagataatgactataatgcccttcgagaaagactcagcaccttgcc

SEQ ID NO: 322725 - DNA, 100 bp, Homo sapiens
ttcaacttgtagacacagccgggcaaatccgagctggatccagagttgcatacagaccaatttctgcatcagtgttatctcgaccagaggctagtaggac

SEQ ID NO: 322726 - DNA, 103 bp, Homo sapiens
ccagcggcaggccgaggcactgggctaccaggctgtggtgctgagtgcagccatgcaagaaagaactctgcaacatgatacttgattgctgtgcccaacagag

SEQ ID NO: 322727 - DNA, 100 bp, Homo sapiens
cgcagccccccaacatcctgctcctgctcatggacgacaggactaccccaatggcacctggctgggcgacgagaacaaccccgagatgcgggtacgctgc

SEQ ID NO: 322728 - DNA, 100 bp, Homo sapiens
tgcgtggaggagctgtgcagccgcgaggaggcgcgggaggtgttcgagaacgaccccgagacgctggtggcagcgatcgtgtttatcagttttggcgtgg

SEQ ID NO: 322729 - DNA, 83 bp, Homo sapiens
tgagaagagaggaaagatcccaacgatcccgtcaacacgaaaatcccaggaatcagaggtgatagaccattacaggacttgtc

SEQ ID NO: 322730 - DNA, 90 bp, Homo sapiens
ctacagcagccaaaacgagaagaagaagaagtgttagaccaggatatgcctcttcatgttcgacgcagtagtgacccagctctaattggc

SEQ ID NO: 322731 - DNA, 83 bp, Homo sapiens
cgggtggcggctcgggacggaggacgcgctagtaaataacattccagctaattttaccaggagtggaaataaattaaatcatc

SEQ ID NO: 322732 - DNA, 90 bp, Homo sapiens
gaggaagggaaccaacccactttctcggcgccgcggctcttttctaaaagtatacgtaggtaacctttccagagatgtgacagaagtcct

SEQ ID NO: 322733 - DNA, 75 bp, Homo sapiens
aggagagtagatctggagaaaccaacagctgtgttgaagaaataatccggaataacaagcctttgtattcatttg

SEQ ID NO: 322734 - DNA, 88 bp, Homo sapiens
gagacctaccgggccctgtctgtgccggccgtgagctgcggcaggacggctggagggcatcttctctgcattcagtttcatccaagtc

SEQ ID NO: 322735 - DNA, 88 bp, Homo sapiens
gcctattatgcccagacaagtccccagggaatgccacagcatcctccagcacctcagtggctgtttggtggccattctccgtccctag

SEQ ID NO: 322736 - DNA, 100 bp, Homo sapiens
cttgttcctcctgtcccaaaagaccatcctgctctcaactacaacatcgtttcaggcttataggctttatactgtggtgcctcgcctggtcaagtttgta

SEQ ID NO: 322737 - DNA, 100 bp, Homo sapiens
agcccgaaaaaaggctcagtgtggcagagagcctccagctggtgacagtacaccagagtgagactgaagatggtgaattcactgaatgtaacaacatgac

SEQ ID NO: 322738 - DNA, 99 bp, Homo sapiens
ggcaagggcaacttcgcggtggtcaagcgggccacgcacctcgtcaccaaggccaaggcaatactgaacactgcgcagcttgcagaggtctcctggcag

SEQ ID NO: 322739 - DNA, 50 bp, Homo sapiens
tgtggctccccttcaggaaataaagcagtatgtctgccatttcctaagtg

SEQ ID NO: 322740 - DNA, 96 bp, Homo sapiens
cgagaggaggtggaccagaacttttggaactagtgccggcggctctccaccccccagagaagctcatagccaaactgaaaagcggaggagagataa

SEQ ID NO: 322741 - DNA, 71 bp, Homo sapiens
accgggacgaagccatcaaacagctgcggaagctgcaggcccatgtccaaactggaatcacagcagccccg

SEQ ID NO: 322742 - DNA, 97 bp, Homo sapiens
tgaggtgacaatgattttgaaccttaaattctttggaaagactcagaatgaagtccattgtggaggctcagaggtttggtttctaacctgactctca

SEQ ID NO: 322743 - DNA, 80 bp, Homo sapiens
aaatacggagtgaatcctggtcctattgtggggggatcggtggctcatttgctgagtaaatatggagccttcaaagaatc

SEQ ID NO: 322744 - DNA, 100 bp, Homo sapiens
gccaaacatgcaggactctagtaacccgcgaaatgatgggatagcgttgcaaatccttaaaagagtcttaacggcaaaatttggtttctctaatattact

SEQ ID NO: 322745 - DNA, 100 bp, Homo sapiens
cggggacccttccgtatctgcctaggcattttgctgtctcctcctaatacgtacataccgagcatcaaatattaaggcacccggagaacagacagtacca

SEQ ID NO: 322746 - DNA, 80 bp, Homo sapiens
atccagcctgcggagcctgtggggcaggtcgatggccaggtggtcttcataaactatactgccttgtgatgcctccctag

SEQ ID NO: 322747 - DNA, 75 bp, Homo sapiens
gcctattggaggaaaacacaccaagaaatctcctttacagacaataggtgaagaacaaacccagaatccctacac

SEQ ID NO: 322748 - DNA, 96 bp, Homo sapiens
ccttttgcaaggagaaaattttggtggagaattatccaacaagaaaaagacctgtggctattaagatagaaatcatgaccaccccaggaaaagaga

SEQ ID NO: 322749 - DNA, 82 bp, Homo sapiens
caatccatggaatgacaacaagaaagtgcagataagcagggatgggcaggaatggtggaaagcagcagacataattggagtg

SEQ ID NO: 322750 - DNA, 81 bp, Homo sapiens
gggagtatgtaggagacttgtggaactgctgatgggcccagatcattgatctgatgatgctggtcatcgatgtgaccaagg

SEQ ID NO: 322751 - DNA, 98 bp, Homo sapiens
aaccccggcggcggtcaaccctccggggcaagtgtccagagaatggctgggatgaaagtacacttgaactctttttacatgaacttgcaatcatggac

SEQ ID NO: 322752 - DNA, 82 bp, Homo sapiens
cgcttccccatggggctggcctgcggcgcctgggcgctctgaggtcaaaatgcagatcttcgtgaaaacccttaccggcaag

SEQ ID NO: 322753 - DNA, 104 bp, Homo sapiens
ttctcgaccacgtaatgtgccagtcatcactggtagcaaaggtcttggtcttgatgccaagtttgggaaaggagctaagaagacatcccactaggaagagagag

SEQ ID NO: 322754 - DNA, 75 bp, Homo sapiens
actttccagccttgtttttcagcagctttgaggaaaagtatagatgtgtgcattgcaatgttgtgtactctgatg

SEQ ID NO: 322755 - DNA, 75 bp, Homo sapiens
tacagttcatgacaatgactttgagccctaccttactggacagtcaaatcagaaaaagcttgtggtgaagggggg

SEQ ID NO: 322756 - DNA, 82 bp, Homo sapiens
gccgctcgcgcagccatgtccgaggagaagcccaagcaagagtgagccatggagctacgtgtggggaacaagtaccgcctgg

SEQ ID NO: 322757 - DNA, 100 bp, Homo sapiens
agaagaataagcacaagagaaagaaggttaagctggctgtcctgaaatattataaggtgtaataatgtcctttatatcagaggtgtggaagaagaggaag

SEQ ID NO: 322758 - DNA, 82 bp, Homo sapiens
tatttccaaagtatgttgcacccagacgatgcagtttcaaggaaaactaaaattcctgtttggacagaagaagaaggcgccg

SEQ ID NO: 322759 - DNA, 100 bp, Homo sapiens
aaggaaatgaaattaaagaaagcaatgctcggatagtcaagtggtcagatggaagtttaattggttggggtcagataagaagaggagtgacaatcaagcc

SEQ ID NO: 322760 - DNA, 98 bp, Homo sapiens
agacagaacagttaatcctcaatttaagcctgatctaacccctagaaacaggcagagatcctacaagaatccaggatgatgatcccagattgccagcg

SEQ ID NO: 322761 - DNA, 83 bp, Homo sapiens
agagattccaaccttccagccccttttgaaaggtataatgggtctctcccaaatggcgatagaggaaggaggaaaagtaggtt

SEQ ID NO: 322762 - DNA, 75 bp, Homo sapiens
gcttgtcgcaatattgtcttcttcgctttagacaaaaaccaatagagccatggcgactccctctgctgccttcga

SEQ ID NO: 322763 - DNA, 100 bp, Homo sapiens
gaaccccaggactgcgcccccgggagcgggcgcccagagggtgaacttctcacctgagggctgtaaagactcgtttgaaaatggagagccaagaaccaac

SEQ ID NO: 322764 - DNA, 89 bp, Homo sapiens
ggtcgctgccttcacccgctgactctggtctcggcgatgacagctgccagagctgctgagggggagagcagacagaagttcttcaccca

SEQ ID NO: 322765 - DNA, 83 bp, Homo sapiens
ttccgcccgcttcgatcgcctcgcgccggctgctctttccggcattccacgcctacgggaaggcaggcaagatgctggtggag

SEQ ID NO: 322766 - DNA, 101 bp, Homo sapiens
ccagggcctgccccggcacgcagccttgcgcaagctcaacgacctggtgaagagggcccggctggtgcgagaagagagttgtatgtacaacccaacaggca

SEQ ID NO: 322767 - DNA, 78 bp, Homo sapiens
tttcccctcagtcgcctcgcgcctgcaggtaaggtagtaagtggatacagagtaagaaatggacagtggacactgatt

SEQ ID NO: 322768 - DNA, 95 bp, Homo sapiens
attgtattgagaacaatatagatttgcagatcctacgctatggagtacagaccatgtgcggcagtggctggagtgggcggtgaaagaatatggcc

SEQ ID NO: 322769 - DNA, 98 bp, Homo sapiens
ttcagaagaggtttggctttccagagggcagtgtagaggtaatagcctgcagctggtgttttgagaagccctactgctgaaaacttaacaattttgtg

SEQ ID NO: 322770 - DNA, 83 bp, Homo sapiens
agaaactaaaaggacagtagaaaaggcttttccagtttgcataataattctgcttggtcagaatcgtgatggcattgtgttca

SEQ ID NO: 322771 - DNA, 152 bp, Homo sapiens
gtggcaattaataaagacccagaagctccaattttccaagtggcagattatggaatagttgcagatttatttaagggtaactgtgtatcagttggaattactgcactaactttgagggccatactcaaggactccaataataaccaagtcaa

SEQ ID NO: 322772 - DNA, 78 bp, Homo sapiens
gattatatcgcatcctatggctcaaagaaagatgattatgcctcctcgctggggaggcagagtcctcgcgtggtctcc

SEQ ID NO: 322773 - DNA, 100 bp, Homo sapiens
cgagtcctctttcactacaatggccacggggtgccccggcccacagtcaacggggaggtctgggtcttcaacaagaacaactctgctcatggtgattaca

SEQ ID NO: 322774 - DNA, 82 bp, Homo sapiens
tagaatcaattaaacactgcattgtgttgctgcagattgccaaaagccagccccagtgcctgctgagccgtttgacaacact

SEQ ID NO: 322775 - DNA, 75 bp, Homo sapiens
aagaagggtgtttggggtgtgttttacaaaggtttcccaaaccactccttatgatccagtgaatattcaagagag

SEQ ID NO: 322776 - DNA, 100 bp, Homo sapiens
agtgccccggggaagccattccccaccccccagttttaatccaggtgctggtttgccaactgacaaaaagaaaggtgggccatctccaggggatgtagaa

SEQ ID NO: 322777 - DNA, 83 bp, Homo sapiens
ggcctcaaggcgacggaaacgaaagcaattctgtggtgttcttggtcacacatttatggagtttctgaagggcagtggagatt

SEQ ID NO: 322778 - DNA, 100 bp, Homo sapiens
aggaaataaattagtggcagagtaagggtgacttgacgccctgaaagccatcacagaggtgaccaccacactacagcacattctcatccggctggagaac

SEQ ID NO: 322779 - DNA, 82 bp, Homo sapiens
atcaaaacaagccctccaggaactcacttagaaatcctgtgttctgtcaacattctccagtttatattcattgccttaagac

SEQ ID NO: 322780 - DNA, 90 bp, Homo sapiens
aagatgatggaagaatttgtaccccatagcaaggttggacgtgataagtatgagcctgcagctgtttcagaacaaggtgataaaaagggc

SEQ ID NO: 322781 - DNA, 90 bp, Homo sapiens
ctgcagggctttttggctgccgagcaggacatccgagaggtcctcagaaacgtgaagaattatgatctctggagaaggacaggaaatcac

SEQ ID NO: 322782 - DNA, 98 bp, Homo sapiens
ttactgcgagaacaactacatacaggaaacagaatccaattcactggaagctagctaatgtagagaattattcccgcatgagacttaagctggtaccg

SEQ ID NO: 322783 - DNA, 83 bp, Homo sapiens
caccatttggacttagctgcctgtggagctgtttggaactgaggaaatatttgatgatgcgtcacctggaaagcaaaaggaaa

SEQ ID NO: 322784 - DNA, 90 bp, Homo sapiens
ctatgatgaacaggtcgaagagtcactacaagatgagactcagattgatggacaacttttcttaattaagcaccttttgatacttcgtga

SEQ ID NO: 322785 - DNA, 74 bp, Homo sapiens
aaaaaccttcgactatgcagagacatgagatggtagccaacccctcaggcgcatattaaatttcctattgacta

SEQ ID NO: 322786 - DNA, 82 bp, Homo sapiens
tggtgaagcagatcgagagcaagatattaataaggcagcggaaagaagaaatatgaatacggctccatcaagacccagcccc

SEQ ID NO: 322787 - DNA, 51 bp, Homo sapiens
cagtctttagaagaatgcaccaagtctgcctggtgatagaggggaccctgg

SEQ ID NO: 322788 - DNA, 75 bp, Homo sapiens
aaaatttcagaaccatcacaaactggttatcaatactctggctgaccatcatcatcgtgggactgactttggtgg

SEQ ID NO: 322789 - DNA, 83 bp, Homo sapiens
gaagactttcgagagtgtatacaaatgacaggtggtcgttctcgttaccggaccacttcttcagccaacaatcccaatctgat

SEQ ID NO: 322790 - DNA, 83 bp, Homo sapiens
agaaggtggcactggccaagaagctcctggcaaaactgcgctttctggctgaggagcttcccaagctcttccttcagtcccac

SEQ ID NO: 322791 - DNA, 96 bp, Homo sapiens
tccactgtgccatctgcagagtgaaactgactaggagtactacatagactaccctgtattcagtggatcagctggcaccacccaaatagataaatt

SEQ ID NO: 322792 - DNA, 75 bp, Homo sapiens
tcgtgcacttgcaggccgggcagtgcggcaaccaaatcggcgccaagttcctccgtgtcacaaagcagtacctgc

SEQ ID NO: 322793 - DNA, 82 bp, Homo sapiens
aggagacttcaaagcttccatcactgggacagaaaggattgagaggatccagaatccagatctctggaatagctaccaggca

SEQ ID NO: 322794 - DNA, 76 bp, Homo sapiens
tctcaatgaaggtagaataggaattgctgcacagatgctggagaatcagatggaagtgcggaagaaggagatcgaa

SEQ ID NO: 322795 - DNA, 51 bp, Homo sapiens
ccaacacagatgtccaagctgccaacttgctgactgaggcagatgcaggtc

SEQ ID NO: 322796 - DNA, 75 bp, Homo sapiens
cggcagtggtgctttcccgaatctcagaatgccgtattcaaagcaatgagtatcccacagatcagaaatccttcg

SEQ ID NO: 322797 - DNA, 83 bp, Homo sapiens
cagacatacgatgggagagttgcagttgatgccggcccaggatggatcagacctgtgaactacccagaagaaattgtctgctg

SEQ ID NO: 322798 - DNA, 74 bp, Homo sapiens
gtgacatctgatgctgtggaacttgcaaatcgaagatgacctgagaattaatttatggcacttagaaatcacag

SEQ ID NO: 322799 - DNA, 75 bp, Homo sapiens
gctgtccctgcggcttctggggggtgaggtggctttgaccccgggttgcccggccagcacgaccgaggaggtggc

SEQ ID NO: 322800 - DNA, 87 bp, Homo sapiens
gtctacataaaggaaggtggtcaggggcagaaggtaattgaaacaggagaaagcttcttgctatctacctccaccatgatgaaagtg

SEQ ID NO: 322801 - DNA, 82 bp, Homo sapiens
gctgctggctgcccttgtctcctttcacctgaactcctggggggaccgtcagtcttcctcttccccccaaaacccaaggaca

SEQ ID NO: 322802 - DNA, 80 bp, Homo sapiens
aaagaggaagcaaatataataatggcagcacagagctacattcgagaacatacatatgatagttgagaaagacacatatt

SEQ ID NO: 322803 - DNA, 75 bp, Homo sapiens
tccagcgagaacttcgcgctggacaagagggtcctgattcgagtgacctactggcatctatcgagctgtgcctat

SEQ ID NO: 322804 - DNA, 74 bp, Homo sapiens
gttaaggattccaagtaactcttatttgacagacagaagccattcgatgttcatcagattggccatttcagcca

SEQ ID NO: 322805 - DNA, 106 bp, Homo sapiens
cggtgcccgaggaggcagccaagctcgtagcctgccactccgtgcggggcgacgatggccttctgaggggctgggacaccagggtacccggcaaatttctcttcac

SEQ ID NO: 322806 - DNA, 100 bp, Homo sapiens
gtgggcgacccccccacctggaagagctgcacactcaggcccaggaggggctccgctccctacaacaccaaggttgggggccgtcccgctcctaaggcag

SEQ ID NO: 322807 - DNA, 51 bp, Homo sapiens
cagattcgcagtggtcgcttcttctccttgtcactcaagactgcttgcaac

SEQ ID NO: 322808 - DNA, 100 bp, Homo sapiens
ggcccggatgagtacgataccgaagcgggctgtgtgccccttctccacccagaggatttttcaagccacattcaattgataggatgaaaaaatttaagag

SEQ ID NO: 322809 - DNA, 75 bp, Homo sapiens
gattgcaaaagactgggtgttgactgcagctcactgtaacttgcacctgtttcccccacctactccaatatttgc

SEQ ID NO: 322810 - DNA, 50 bp, Homo sapiens
ggctactgttttccaatcctcaggtcaagccgaaagggacggcaaagaag

SEQ ID NO: 322811 - DNA, 98 bp, Homo sapiens
tcagtttctgtatagtgtaaaaggtgatcagcgagtttgaggcctctcccgactcgttttcctacagaattcccaacctgagtaggaatcgtcagtac

SEQ ID NO: 322812 - DNA, 100 bp, Homo sapiens
cggcccctggctcctgctcctgggtacaggtttgcagattccgccagcagcacagcaagctctacagatgagtggctctttggcatttggtgctgtggca

SEQ ID NO: 322813 - DNA, 101 bp, Homo sapiens
cgctgggcgtgagatgcagagagcggccgcaggctatttttatgattcccacaaatccaccaccaacattcagaaagccagaactttggtccgatgatttc

SEQ ID NO: 322814 - DNA, 90 bp, Homo sapiens
ccgagatggaccttctggtgactcgggagcgaccccggcgtggaatccgcaacagcggatacgatgttctgtggacaatcacaatgggaa

SEQ ID NO: 322815 - DNA, 100 bp, Homo sapiens
aaactcatcaggacggaagcacaggggccactcagagtcgcccgagaatgggcaggcttggctgaaatgagaactgctgaagcaagacagatagcttgtg

SEQ ID NO: 322816 - DNA, 75 bp, Homo sapiens
gtaaagacagagaaaggcatagacgggttattgataaggaaactatagatttattggcgttcacctctgttgcag

SEQ ID NO: 322817 - DNA, 75 bp, Homo sapiens
cgcggcgcaggaggcggtggagcgcagagcgggcgagcgcggggccacctacagatgctcctgcagtggacacag

SEQ ID NO: 322818 - DNA, 83 bp, Homo sapiens
ccctgaaggctgacaaagccaggcagtttgatggtatccatgtggtgagtggatctcttgatacatcaatccgtgtttgggat

SEQ ID NO: 322819 - DNA, 96 bp, Homo sapiens
gatgtcggcacgcctggcgatcctgggcggcgtggaggggcagcctgttgcgaatgtgagctggaaggcatgctgccaccttatctgtccgcctgc

SEQ ID NO: 322820 - DNA, 100 bp, Homo sapiens
gccacgcgtcccccagtaggagaatgactccgattcgtgaccctcagcgccggtgcatgtcgattgccggaactgtgattaccagcaggaggccgacaac

SEQ ID NO: 322821 - DNA, 95 bp, Homo sapiens
cacctacgtcccgctgccgtcgccgccgccaccatgcccaagagaaaggattttttatcaagcagaaatgcatcgaacaacgagaatcaagatca

SEQ ID NO: 322822 - DNA, 76 bp, Homo sapiens
ctttgctctgtggacccgtgagcaagcataagctgccaaaccaaggatttggagattgaaaatgaagatttgaaag

SEQ ID NO: 322823 - DNA, 95 bp, Homo sapiens
cgcggtttcctgtacctgccttgggatccggagggaggaagctgggacacccgggagtcaggaaatggcctctggctgtacctggcagggagcag

SEQ ID NO: 322824 - DNA, 100 bp, Homo sapiens
ccatcctgcccttgtactgcgccatgatgattgccctgtcccgcatgtgcgactacaagcatcactggcaagctaaccctaggatgactggcctctgaca

SEQ ID NO: 322825 - DNA, 80 bp, Homo sapiens
catccatttcgtggttcacccgctgccgggcaccgaggaccagctcaatgacaggcaccatgactcctgtgaggatgcag

SEQ ID NO: 322826 - DNA, 90 bp, Homo sapiens
aggatgacaggctggcagctatgttcagagaatttacccagcaaaatgagtcgatggatggagatgaaaaggaactagagagcagcgaag

SEQ ID NO: 322827 - DNA, 100 bp, Homo sapiens
ccttctgcaagaaagcctctttgcaaccgggtgttggacatggccacggacagcttcctcgcagggctggtgagtgtcctggatcccccggatacctggg

SEQ ID NO: 322828 - DNA, 99 bp, Homo sapiens
catttaattttagggtcctttatatagaagggagagtttactagaaattcccaactgttccaaagtggtggtacccgcaggcccgactgctagttgtgt

SEQ ID NO: 322829 - DNA, 50 bp, Homo sapiens
aatccggaagggacacgctgaacagaaacctctgcgccatgagagccaag

SEQ ID NO: 322830 - DNA, 75 bp, Homo sapiens
gagattatgctcaacagattgagaacgtttgtctgcctgatgagagccacttgggttaagaaactacctgtgaat

SEQ ID NO: 322831 - DNA, 90 bp, Homo sapiens
gcggcggccacgccaaggacgggaggaaatgagtctcaaccagacagccaggaagacccccgagaagtacttaaaaaaacattggaattc

SEQ ID NO: 322832 - DNA, 100 bp, Homo sapiens
cccggtgcccgaggaggcagccaagctcatggcctgccactgcgtgcgagtccaaaactacttacctggaagaccttccaccaccccctgagtatgaatt

SEQ ID NO: 322833 - DNA, 100 bp, Homo sapiens
ttgaccttcactgcggcccacatgcacctcaggcatgttatgttacccagagaactttccaaacaagtacctaaaactcatctgatgtctgaagaggagt

SEQ ID NO: 322834 - DNA, 80 bp, Homo sapiens
attttcccaatttttgctatactcctgttctggggacagtttggtattaaaatggtagtcgctcttctaaaacttttaaa

SEQ ID NO: 322835 - DNA, 74 bp, Homo sapiens
actgtcattatccagaggatgaggtagaactgaacatcgtggccggttatgggtctcccaaagatgtggctgta

SEQ ID NO: 322836 - DNA, 74 bp, Homo sapiens
ggaagactcaaaaagccttttgtaaaggtggaagatatgagccagttcctccccgggcagaagaaatcaccatt

SEQ ID NO: 322837 - DNA, 97 bp, Homo sapiens
cgggatcccagcctcaggcgtgcgcggacggtgtgcggacagcaaggccatcgtggacgggaacctgaagctgatcctgggcctcatctggaccctg

SEQ ID NO: 322838 - DNA, 75 bp, Homo sapiens
cgaatcagaactctctttatctctcctacaggaaatctgaaatagagtactatgctatgttggctaaaactggtg

SEQ ID NO: 322839 - DNA, 101 bp, Homo sapiens
gaactccttgagaaaaaaagacttattgatctccatacaaatgttgccactgctgttttagaacatataaagggtcaacatatttcactggcacctattca

SEQ ID NO: 322840 - DNA, 100 bp, Homo sapiens
cttcattcagatgtggtggaatatgccaaggaaaaactggagagcttcatcaaaaatagtgatagctttgataagcgcacctatgttggcagcatgcctg

SEQ ID NO: 322841 - DNA, 75 bp, Homo sapiens
ggcaacggatagaggggctgtgtcatagacgtccgacgtgtctggatcagggagcttccaaggcatttgatacct

SEQ ID NO: 322842 - DNA, 90 bp, Homo sapiens
cggaggtttgcaggggtgcagtgtgtctggtcttatgaggaggaagttaacatccctaataggagggttctggttactggtgccactggg

SEQ ID NO: 322843 - DNA, 75 bp, Homo sapiens
cgctttgagctactgggctgtgagctgaacggaatcctgacctctgtgaagagatcctggcatttctggtccaac

SEQ ID NO: 322844 - DNA, 100 bp, Homo sapiens
actgcccaggacttcggaactagacgaggtatgaaattgaaggctgtgaagtgatttgggccattaaagataaagctatagggaatactttcttcgatgc

SEQ ID NO: 322845 - DNA, 100 bp, Homo sapiens
ctcaccacaagcgcagccacaaccaattcatagaatagactcccctggatttaagccagcctctcaacagggatttgtcttggctgttactatgacacgg

SEQ ID NO: 322846 - DNA, 82 bp, Homo sapiens
cggggccctctcagcaagaacgggaacaaaactctgcaggatacagacgtccctcaccagtgccagcttggggtctgcagat

SEQ ID NO: 322847 - DNA, 83 bp, Homo sapiens
atgagtcatgtggcagtggaaaatgcgctcgggctggaccagcaggtcacaccgacaaatctgaagcgggtttgccaggggag

SEQ ID NO: 322848 - DNA, 100 bp, Homo sapiens
cgcaccacagcccatccccagaagatcctggtcccctgctttaaccatcgaaaatgagggcaagggacataggatgaccccagcctgtcccctcttactg

SEQ ID NO: 322849 - DNA, 100 bp, Homo sapiens
gacgcccggcgcgagctcaagctgctgctgctcggccacggcgtatgcctccgaggacggggtcctgaccgaggccatgatggacacccgcgtgcaagat

SEQ ID NO: 322850 - DNA, 75 bp, Homo sapiens
tgtccggaacctgcaccagtctggattcagtttgtctggtgggtggagccgctgactgccgagggcagagcctcg

SEQ ID NO: 322851 - DNA, 100 bp, Homo sapiens
tagtactgccaccagagtatcccatgaaaccaccaagcattattctcctaacggtggggaggccacagcttatgtgaatgactttctcaggagttataaa

SEQ ID NO: 322852 - DNA, 73 bp, Homo sapiens
cctgccaactgcacggtgcgggaccacgtccactgcttgggtactagcaaaggccagacgtcttactcaacaa

SEQ ID NO: 322853 - DNA, 75 bp, Homo sapiens
cccgcctcgagccagcccgccagcatgccccagtccaaaggttttaaaatcaaagatgggaaaatcggagaaaat

SEQ ID NO: 322854 - DNA, 90 bp, Homo sapiens
ggatactgctcagcaaggtgttgtgaatttcccatatgatgatgaagatgagaatgtgcctactgctcctgatcctccaagtcaacattt

SEQ ID NO: 322855 - DNA, 100 bp, Homo sapiens
ccctgtcttccccaacgccccggagccgccggccgctagcgtcagcgccagccagaaatcaatgtggactgaacataaatcacctgatggaaggacttac

SEQ ID NO: 322856 - DNA, 50 bp, Homo sapiens
ggtctcgaactcccgacctcaggccgaggcgggcggatcatgaggtcagg

SEQ ID NO: 322857 - DNA, 50 bp, Homo sapiens
cagaaaccaaaccccaggttccaagatgtgtgaataagagtactcatgaa

SEQ ID NO: 322858 - DNA, 90 bp, Homo sapiens
ttgcggcttgagctagagaaactcagctttctcctgtttctcagaggatttatcaattatgcaaaagttcggaagatgccagaaactttc

SEQ ID NO: 322859 - DNA, 75 bp, Homo sapiens
cacgacaccggctacttctcagctttaccatccctggaggagacctggcagcagagcccagcattacatcaacat

SEQ ID NO: 322860 - DNA, 100 bp, Homo sapiens
tcagtcactccagctccacgggcagacacctgcacagaggacagaactgtaccgctctctttttggccagctccaccctcccgacgaaggccacggggat

SEQ ID NO: 322861 - DNA, 110 bp, Homo sapiens
tttcttgcaaaccacactaacatattactggcatcttcaatctggtatggtgtggtggactttctttgagtactgggatgcaggttccaagtgctgtgagaacacttcag

SEQ ID NO: 322862 - DNA, 99 bp, Homo sapiens
ggaaaaccgaagttggaagtgtctcttagcagcgcgcggagaagaacggggagccagtttccaacatggctagatccatcagaaactgaagccgtggag

SEQ ID NO: 322863 - DNA, 82 bp, Homo sapiens
tgaaggtggaggcagcgcggctctcagtctgcgctcctcagaccaccggcaggtgaacagcctgatgcagaccgaggagtgc

SEQ ID NO: 322864 - DNA, 100 bp, Homo sapiens
cctcaacccggtcgaccccatctcccatgacctgcttgtgaacctggcccgggacctgcagtgccccaagaagtgggctcgggatgagtttgaaggcctc

SEQ ID NO: 322865 - DNA, 100 bp, Homo sapiens
tgttcatgggcagcaccatcgagccagaagcagtatttgtcctggttgtttttgagcacgttcactctcgcagtgtcagctggggctgttttgcttttac

SEQ ID NO: 322866 - DNA, 87 bp, Homo sapiens
cctccagtaagggagggcaagaagatatgaacctgagccttcagtcaagaccctccagcttgcctgggtcctactgggcaatagaca

SEQ ID NO: 322867 - DNA, 101 bp, Homo sapiens
ggccagcaggaggctgatgaaggtcttaggagggaatgattccccagtaatattccctgccctgacccaaagtgctggttggcctccctcccagggaagac

SEQ ID NO: 322868 - DNA, 100 bp, Homo sapiens
ctcaccatacaggaacagggcagacgttagcgtgagtgatcactctcaatcccggggaaatgaataagcgtctaacagaagaacaagccagaaaaacatt

SEQ ID NO: 322869 - DNA, 74 bp, Homo sapiens
ccgcagggcgccctagccttcgcagaaacgatggcggaggaagaagaaggacagaataacgggctcccagattc

SEQ ID NO: 322870 - DNA, 90 bp, Homo sapiens
tctgtgagaacagaagctttatctgtgatagaattgctgcttaaaaaacttgaagcaagagcaactttttctgtcaaataaaaatgagaa

SEQ ID NO: 322871 - DNA, 86 bp, Homo sapiens
cgaccacctcttcaagctgctcatcatcggcgacagcgtgccggtggtggtgtgcacattgagccccggtatagacagttccccca

SEQ ID NO: 322872 - DNA, 50 bp, Homo sapiens
gggcagctgccagcccctggagagctggacctgagggcactcgctttgct

SEQ ID NO: 322873 - DNA, 100 bp, Homo sapiens
gtgatggcttttatggtactggagagacctttgtttttacattctgtccggagtttgaggctgacccccagaagcctcctttgttactagtttggagcag

SEQ ID NO: 322874 - DNA, 123 bp, Homo sapiens
ccatgtcgggttattcgagtgaccgagaccgcggccgggaccgaggagcctgagcccttgtgaagccggcaatgacaagtctgtatggtcgccatgccgagaaaaccactgacatgccaaaac

SEQ ID NO: 322875 - DNA, 96 bp, Homo sapiens
acgtgggcagcggcggctggcgcttcctgcgcatcgtctgcaagaccgcgaggcgagacctcttgacagagcgggatgccaccagcttgtccaaag

SEQ ID NO: 322876 - DNA, 87 bp, Homo sapiens
caaagacaaatggaaagttcctgaaaatgtttataggaggccttagctgggacactacaaagaaagatctgaaggactacttttcca

SEQ ID NO: 322877 - DNA, 75 bp, Homo sapiens
agttctccaaacatgatcgtttactgcaaacatctggagcataagaacagtaattattttcttcttttccaagag

SEQ ID NO: 322878 - DNA, 101 bp, Homo sapiens
ccgccgcagagtccgcggcgccaccgctcgccctccaggctctgccgacttccagttctggaacaagatggttaaactcatttttccctgctctgctcctc

SEQ ID NO: 322879 - DNA, 75 bp, Homo sapiens
acaaatgcaaatacttgtgcactgggagaggatttaaatgtggatgaatttgaggaaatattcaagacaaaagcc

SEQ ID NO: 322880 - DNA, 78 bp, Homo sapiens
acaccaagggcgcccttcccctggatacggtcactttctacaagaccacattgtgcaacacatcattggacaacccaa

SEQ ID NO: 322881 - DNA, 89 bp, Homo sapiens
cagaggatgatgctgactttgatgaagggcctgctttcttccccgggcgatgtgcagagatctttgccaggggtcaaagcgtcgggaag

SEQ ID NO: 322882 - DNA, 118 bp, Homo sapiens
cgcagaagtcgcgtgtctaggtgagtcgcggtgggtcctcgcttgcagttcagcgaccacgacaatgcagatcttcgtgaagactctgactggtaagaccatcaccctcgaggttgag

SEQ ID NO: 322883 - DNA, 100 bp, Homo sapiens
gctccgtggccttagctgtgctcgcgctactctctctttctggcctggaggctatccagcgttttacctcacaaaaactactacaagcaccaagctccct

SEQ ID NO: 322884 - DNA, 51 bp, Homo sapiens
cccaggtgctctggagctggatggtgaagttatctgtgctacaattgcatt

SEQ ID NO: 322885 - DNA, 83 bp, Homo sapiens
gccaaaatatgttaccttcaattcaaaggagaattcctgcactcaggccacaaaagttaaagaggagccatctgtctggccag

SEQ ID NO: 322886 - DNA, 100 bp, Homo sapiens
ctgttctggtgtgtccttacacctcacacgtctgcccccatctgcacaggggaactgaggagaaacaggaatgaagagtgggcgacaaagagaaagcatc

SEQ ID NO: 322887 - DNA, 75 bp, Homo sapiens
tgcacctgctgctcccactggcctttgaggtgcgtgctctggaggaggccaacgccgacctggaagtgaagatcc

SEQ ID NO: 322888 - DNA, 75 bp, Homo sapiens
gaaggatcgaatgctttataaaagattcatcgctgcttcttccagaccagctggtcttgcttctggagcatctct

SEQ ID NO: 322889 - DNA, 116 bp, Homo sapiens
ccagccaccctgcccccaagaaggaagtcatcatgggccggcctggaacaggtgacagcgggaaggtgaccacagtcgtagccactctaggccaaggcccagagcgctcccaagaa

SEQ ID NO: 322890 - DNA, 80 bp, Homo sapiens
ctttcacttccagccagctgtgaagaaggtcctcagaatggttggaatgaccctccagctttgaacagagtacccaaaaa

SEQ ID NO: 322891 - DNA, 75 bp, Homo sapiens
agaggggccgcggaaacctggagtggaagggaagcacaagcctatgcagacgacaacagtttgctgttcatggag

SEQ ID NO: 322892 - DNA, 74 bp, Homo sapiens
gaagcatggtgcctcctgaatgaaggtgcttcctggaggggcctgccccactgttcctgtgctgagttccagga

SEQ ID NO: 322893 - DNA, 100 bp, Homo sapiens
gattacaccaagatctgtgctgaccacaggaattggatctactagtgcaggtaatttcatctgtgccaaagcctccagaggacaagccagaagatgtaca

SEQ ID NO: 322894 - DNA, 100 bp, Homo sapiens
catatatgggtcctgctctttttgcatattcacaggcctccactgggctctcagtaggtgggatttgtcagcagttctcattgcctgagaacatccagct

SEQ ID NO: 322895 - DNA, 100 bp, Homo sapiens
atctacaaccttcgatctcctgacgaaggacaaaagcatgtcttcccttcctgggtgcattggtttggatgcagcaacagctacagtggagtctgaagag

SEQ ID NO: 322896 - DNA, 75 bp, Homo sapiens
gcttcgtgcaccggggcggtccgttgccaaagccaggccgcaatgtttaccgaatgctttttaagagcaaagcat

SEQ ID NO: 322897 - DNA, 97 bp, Homo sapiens
ggatgttggtggtcaagatagaattaggcctctctggaagcattacttccagaatacccaggatctcccagccatccagccccggctagtggcggtc

SEQ ID NO: 322898 - DNA, 87 bp, Homo sapiens
acaaggcagccatagttcacaatgttgattctgatgacctcattagcatgggatccaacgacagttcggctttccagtttggcagca

SEQ ID NO: 322899 - DNA, 100 bp, Homo sapiens
cgaaaggatcatgaactagtgacctggaaagacgaggacctattaaacttggaatggctaaaatcacgcaagtcgactttcctcctcgagaaattgtcac

SEQ ID NO: 322900 - DNA, 75 bp, Homo sapiens
cggccatctttgctcctccctgcaactaactccattcttaattgttcatacagtcaccaggaagcccatgtcttg

SEQ ID NO: 322901 - DNA, 123 bp, Homo sapiens
ctcggttccgcggcgcaccggagggcagcatgtcgcggcggcggcacagcgacgagaacgacgggggacttgatctcatcttcatgccaggccttgggtttgacaaacatggcaaccgactgg

SEQ ID NO: 322902 - DNA, 74 bp, Homo sapiens
cgggtgatcgtagctcggaaatggcggaataacaagcctttgtattcatttgaagataatgcagactatgttta

SEQ ID NO: 322903 - DNA, 100 bp, Homo sapiens
agatattggccgacaaggaagtgaagaaggcgcatcactcccagctgcgcaaagcttgcgaggtggcgttaggacagtgaaaattccagattcagctgat

SEQ ID NO: 322904 - DNA, 82 bp, Homo sapiens
ggaatcagctttgaagtgggagcccagttggaagcccgggaccgtttaaaaaactggaaccacgtgaatgttgagggggcga

SEQ ID NO: 322905 - DNA, 143 bp, Homo sapiens
taacaactgtcgtgactccagagaagccgatccccatttttattgaaagatgtattgagtacattgaagccacaggctcgggctcaagttcactacaggtcacaaaacatgatgtcttgttggctactttaaaatctaacctg

SEQ ID NO: 322906 - DNA, 75 bp, Homo sapiens
tgaaagtctgagcaatggaaggcagcagccaatggagggggcgacttacgaaacagattgtctcagtttacctag

SEQ ID NO: 322907 - DNA, 80 bp, Homo sapiens
agccgccgcattttttaaccctagatctcgagttgctacagtgaacggaagaaaacacgaaacttagaagcttacgtgga

SEQ ID NO: 322908 - DNA, 83 bp, Homo sapiens
cttctccactggttcctgggcaccgaaaggcaatactgaacactgcgcagcttgcagaggtctcctggcagccctcattagga

SEQ ID NO: 322909 - DNA, 100 bp, Homo sapiens
agccgcgaggtggccaagggcctgctgcgggagctcctgccgcccgccgctggcttcaagtgcaagcacttctcagaacttctggatgagttttcccaga

SEQ ID NO: 322910 - DNA, 51 bp, Homo sapiens
tgaaccccatttattcgatcaccacgaacattaaccaggtggtatttgttg

SEQ ID NO: 322911 - DNA, 118 bp, Homo sapiens
tttctttctcgctgatcgcctaacttctactgacgaagcttggaagttgcagaagaccattcctcaagaattttgtatccaaggcccaaaagtttgttacccaagatgatgaatgctg

SEQ ID NO: 322912 - DNA, 100 bp, Homo sapiens
gacagcaaggactcacccaaagacagggaagtggcagaaggaggccttccccgggcggagagcccctctccagtgacaaagcataaatcatggacaccag

SEQ ID NO: 322913 - DNA, 97 bp, Homo sapiens
ggggccggctcggggacttgtgggattatcaccagcaccgatacctgcaaggtctggtgagctgtaccttctttctggcagtgaatggtctgtattc

SEQ ID NO: 322914 - DNA, 90 bp, Homo sapiens
agaataattctgaaagaaagaaaacaaagaaaaacatactccagaattcctaatagaacaagatgtggtgcaattgctgaacaaaccccg

SEQ ID NO: 322915 - DNA, 88 bp, Homo sapiens
gggctcctctttgccctgtacttctcggcggtgcagcggtacccggggccagcggccggagccagtgatgatggccaaagagaagcca

SEQ ID NO: 322916 - DNA, 98 bp, Homo sapiens
cacctggtgcagaagctgcaggccgaggccgacgaccttcaggagcctgcacacatgatcctgaccgtcggaaacaaggcagatggagtcctggtggg

SEQ ID NO: 322917 - DNA, 99 bp, Homo sapiens
gctcgctcatctcagcgcatgatcagttctcagttacatggacacagaacagtatgaagaagcagtacgagactatgaaaaagtataccagacagagaa

SEQ ID NO: 322918 - DNA, 75 bp, Homo sapiens
cttcattgctccttcaggacatggataagccaatggacacgtcagtgttatctgaagaaggaggagagccttttc

SEQ ID NO: 322919 - DNA, 100 bp, Homo sapiens
tcaagaatacgccctgggagcagaagttcaaatgcttctttggaggtgctctcaacagaaccaggatccttcaagggaaatgaggcaagttatcctttgg

SEQ ID NO: 322920 - DNA, 96 bp, Homo sapiens
gttaccgctgaggagctgcagtctctgtcaaggcccctccagccagcgtcaggtgcagaatggcccctctcctgatgagatggacatccagagaag

SEQ ID NO: 322921 - DNA, 99 bp, Homo sapiens
aaagttgtgggtcagctgaccagatccttatgtgaagattcatctgatgcagaatggtaagaggctgaagaagaaaaagacaacaattaaaaagaacac

SEQ ID NO: 322922 - DNA, 95 bp, Homo sapiens
ctggagtaaccctcactggagaatccagagcccggtgtacgagaagtactgcgccgaccactttgccgacggccgctgcgaccagggctgcaaca

SEQ ID NO: 322923 - DNA, 82 bp, Homo sapiens
tcgtgagtgcatggggtataagatggcccactgcgtgaccttggttcagctgtccatttcctgtgaccatctcattgacaag

SEQ ID NO: 322924 - DNA, 83 bp, Homo sapiens
ctttgaactggaccccgcgagcaccagagtcggcgtaactatcgcctgacaggaaagacgagaatccaggacttgaatcgtat

SEQ ID NO: 322925 - DNA, 82 bp, Homo sapiens
gtcgggttattcgagtgaccgagaccgcggccgggaccgaggtttaatggatcgagaagtggcgttgcttgctgaaatggac

SEQ ID NO: 322926 - DNA, 82 bp, Homo sapiens
cttggtttagctgttagacttgaatatggagataatggaactgtggctgcaccatctgtcttcatcttcccgccatctgatg

SEQ ID NO: 322927 - DNA, 90 bp, Homo sapiens
agaaatacttggattctatccctcctggtcagtacatggattcttcacttgttaaggtgtatgtggaatttgatgatcttgaatgggata

SEQ ID NO: 322928 - DNA, 88 bp, Homo sapiens
gaccttgaaatgcatccgctggtcgctgccggaaatggccagggactggtgattgcagctggaagtgcccatgaccgagctggcgtcc

SEQ ID NO: 322929 - DNA, 87 bp, Homo sapiens
cggaacgcaggagacacaagaagcggatccagggtccccttctgcttgttatagccccagtagtcctgtccaggttctagaagactc

SEQ ID NO: 322930 - DNA, 75 bp, Homo sapiens
gacaaggttccccacatctacttggaaatctttgggatgctcaatggataacaaagccattgacctttgccgatt

SEQ ID NO: 322931 - DNA, 75 bp, Homo sapiens
cggcgtttgggctacggttgttgttggcgactgtgcttcaagcgcccattgtaccttttgcagtttaatatgggg

SEQ ID NO: 322932 - DNA, 84 bp, Homo sapiens
ttgttctaacgctgcctttgctttaaaacagtattacttgcggtgctggagaatctggtaaaagcaccattgtgaagcagatga

SEQ ID NO: 322933 - DNA, 88 bp, Homo sapiens
ggggccgggctcaggagcagaggttggacgtgataagtatgagcctgcagctgtttcagaacaaggtgataaaaagggcaaaaagggc

SEQ ID NO: 322934 - DNA, 99 bp, Homo sapiens
ctttagtgatgtggtggtaagatgtatggctattcagcttgaccctgaagaaactcgtcatgctaaaagaaatggacaaagatcttaactcagtggtca

SEQ ID NO: 322935 - DNA, 75 bp, Homo sapiens
agacatgagtatacattcagtatcatggatgaatttcaggtgaagtggatcctaaagagaggatagcacgccaac

SEQ ID NO: 322936 - DNA, 87 bp, Homo sapiens
gaaactgagtatgggatctgatgatgctgcctacacacaaggtgaagactgatgagaagagtctgtgggtgaagacattgaaaaggt

SEQ ID NO: 322937 - DNA, 90 bp, Homo sapiens
ggtcgccgcagtcacggagcgcacggtgtccgcaatgttgccagtgtctgtctgcagattggctacccaactgttgcatcagtaccccat

SEQ ID NO: 322938 - DNA, 100 bp, Homo sapiens
agctgctggaggtttggttctcccggcagcagcccgacgcaaaccaaggatctggggatcttcgcactatcccaagccaactgggtacatggaaaactca

SEQ ID NO: 322939 - DNA, 100 bp, Homo sapiens
aaccacctcgagcggctgctggacgaagagcaaagactcaggtggactgaaggccgctatgatcgaattggtggaaaggttgaagttcaagagctcagac

SEQ ID NO: 322940 - DNA, 95 bp, Homo sapiens
gtggaaggaagttgctgcccaatgtgtccaggtgagggcttccacaactaccaccactcctttccctatgactactctgccagtgagtaccgctg

SEQ ID NO: 322941 - DNA, 75 bp, Homo sapiens
aaaatccggctatttctgaaatggtggcacatgaaagcctattgaagacaaaggagaattcagtgttccaagctg

SEQ ID NO: 322942 - DNA, 100 bp, Homo sapiens
cacagctgaaggctgcgagggactaagagcagactttcctcttgctgatgacatgattcctgtttgaatctgttgacaagattctgaaagctgaacagag

SEQ ID NO: 322943 - DNA, 95 bp, Homo sapiens
ggttactcgcacgcggatttggctggcgtcccgcggtatgttagagcccaccaaggaaccactgaaaccactttctgctgcagaaaaaatagctt

SEQ ID NO: 322944 - DNA, 83 bp, Homo sapiens
gctggtgaaggcagacagcgagtggcgacgatcaaattcaacacccaacagcttccttaatagcaaaggtagcaacagcccag

SEQ ID NO: 322945 - DNA, 90 bp, Homo sapiens
cttcaacatgaggaaggtaactaaagggctacagaactggctacccttatcgataccctgctctgagagagaagtctaaaaaatacagcg

SEQ ID NO: 322946 - DNA, 50 bp, Homo sapiens
gccaatggcacggaggcctgcgtaacgtgctggccaaagcgctctatgac

SEQ ID NO: 322947 - DNA, 75 bp, Homo sapiens
gccagccaccagttcaggagcacttgggagtgatctagacaagttggatggcttgaggactggtactaaaaggaa

SEQ ID NO: 322948 - DNA, 51 bp, Homo sapiens
gctgcgttcacggcaggattcggttagcttgcccagtttcgacaaagaaaa

SEQ ID NO: 322949 - DNA, 100 bp, Homo sapiens
ttttcctgcgtcctgctgggagctgcgcgctccaggtatcctggcctgccgccctagccggcccaaggcaaaatttggtttctctaatattactggaatt

SEQ ID NO: 322950 - DNA, 101 bp, Homo sapiens
gattcgcagtggtcgcttcttctccttggtggttgtgtcaaaccgattggtgacatctccatgctgtattgtcacaagcacatatggctggacagcaaaca

SEQ ID NO: 322951 - DNA, 82 bp, Homo sapiens
tgacaaccttggaacagaacaagaggacaggaggtgtcgttccagggctgcccttgagatggagttgctgcctctttggctc

SEQ ID NO: 322952 - DNA, 100 bp, Homo sapiens
gaggaagaggaggaggaggaacaactgaaccagaccttggcagaaatgaaggcccaggaggtggcggaattgaagaggggcatgtttgacaaccgcgacg

SEQ ID NO: 322953 - DNA, 99 bp, Homo sapiens
atcaaatcagagagaaggaatccaccttcttacgctatggcagctgcccaaactccaaaatgatggtagagaattgaccaagaaaaataaagaaatctg

SEQ ID NO: 322954 - DNA, 80 bp, Homo sapiens
cgctgaagatgttgatggagaagctctaagtacactcgtcttgaatagacttggccttgaaagagctgatacagctgaaa

SEQ ID NO: 322955 - DNA, 98 bp, Homo sapiens
gccggttgagggatatgaggagaatgaggagtttctgaggaccatgcaccacctgctgctggaggacgacttcaaagagggctacctggagacagtgg

SEQ ID NO: 322956 - DNA, 122 bp, Homo sapiens
tccttacagccgctcgtcagactccagcagccaagatggtgaagcagatcgagagcaagactgcttttggcttctggatgccctcctccagtacacatcgtatggggtgacaccgcctagcc

SEQ ID NO: 322957 - DNA, 100 bp, Homo sapiens
ctttcctgtggctcctcaggcttcacctaaagaggaatgcagattccagctgactttggtttctgtgcccagatcacccctgagcagagcaaacgcagta

SEQ ID NO: 322958 - DNA, 100 bp, Homo sapiens
gaagacttggccaggccgtgttccgtgtctctggattcaagtcccaggagtcctgaccagagagcaggcagcaagaatcccaagattgccttgaaactgg

SEQ ID NO: 322959 - DNA, 98 bp, Homo sapiens
ggaaaatgcgctcgggctggaccagcaggcggtgcgtctttctacgtgaataggattttgtggctggccagatacactgcatcatctttttcatcatt

SEQ ID NO: 322960 - DNA, 75 bp, Homo sapiens
aaatagcagcctctctcccctcccaccgcaaaagatacagatattgtggatgaagccatctattacttcaaggcc

SEQ ID NO: 322961 - DNA, 100 bp, Homo sapiens
atggcctggagttcattctttaccacattttaagccagatgaaaccataaagtggtttgatggaactcccacagaccagtcaaactggggcattcggaag

SEQ ID NO: 322962 - DNA, 75 bp, Homo sapiens
tcccgggtcatctccagatgctagggttatgggtacaccaggggttggaaaaaccacactaggcaaagaacttgc

SEQ ID NO: 322963 - DNA, 50 bp, Homo sapiens
attgatcgcatccatatttttttcaggtggtcatgatcacgggagacaac

SEQ ID NO: 322964 - DNA, 82 bp, Homo sapiens
agtcgcacagaaaggcacacagatgtagtggtgtgcatagcccttgacagcgaatagacaatgcagatcttcgtgaagactc

SEQ ID NO: 322965 - DNA, 80 bp, Homo sapiens
ctggaacatagagattttatagggatttctctctgatcaaacggacagttcaggactcagaatctaaggatgaatgttca

SEQ ID NO: 322966 - DNA, 119 bp, Homo sapiens
caggactctttctgttcaggccagaccctctgggagcttctcagccattttccacagatcaggttggtctccgccagctggacatgtccttgctctgccaactgtacagcctctacgag

SEQ ID NO: 322967 - DNA, 50 bp, Homo sapiens
gtcagaaccctccgcagagtaaaggccaagtcctgtatctgccatgtctg

SEQ ID NO: 322968 - DNA, 83 bp, Homo sapiens
tgtggccaaagaccttaggagagacgagcagccttcagggagcgtggagacagggaggaataagtttttttcatctgtaattt

SEQ ID NO: 322969 - DNA, 75 bp, Homo sapiens
caatgagacagggcacaccaaactccatctggagaactacgatgacccgcacaaaacccctgcctccccagttgt

SEQ ID NO: 322970 - DNA, 124 bp, Homo sapiens
ttgtgtcctgagatcaaatggcacttcattggccacctacagaaacaaaatgtcaacaaattgatgggtgatgatgaacagtctacacagatggctgcaagttgggaagatgataaagttacag

SEQ ID NO: 322971 - DNA, 51 bp, Homo sapiens
gaggcagagaaatacgttctgcacatggtcaaaatgcagatcttcgtgaaa

SEQ ID NO: 322972 - DNA, 90 bp, Homo sapiens
ccttacatgtttgaggcccgggaatttcttcgaaaaaagcttattgggaagaagaagaagctcattcacacagaagacccatttaatgat

SEQ ID NO: 322973 - DNA, 100 bp, Homo sapiens
gctacaggcacaaatacatttacaagagccctgagctgccacggatactgaggtacacggctgccccacaccccctgctatctcttgatccccacttcag

SEQ ID NO: 322974 - DNA, 90 bp, Homo sapiens
ttacaagcagcaagtgcgcggttggggccactgcgaggccgttttagatctaccaaaagttttaaaccttcatttattaaattcaggaac

SEQ ID NO: 322975 - DNA, 58 bp, Homo sapiens
acaaaatgtcaacaaattgatgggcacgtctgagaatggtggatgtggtggagaaaga

SEQ ID NO: 322976 - DNA, 100 bp, Homo sapiens
cctcctacaacatggaccgggccgcggtccagaccaacatgagagactgggctcgggatgagtttgaaggcctcttcaagcagccagcagaaaatgtcaa

SEQ ID NO: 322977 - DNA, 50 bp, Homo sapiens
gacacagcagcatgggacagtcagggaggctgagatctgtatctgtggac

SEQ ID NO: 322978 - DNA, 76 bp, Homo sapiens
acattcaaaagctcaaaggctatctggatccagctgtaaccaggaagagcgaaaagctgttgctatatgatacagt

SEQ ID NO: 322979 - DNA, 78 bp, Homo sapiens
aaggacagcttttttcctgcaaggattatattccatcacaacaagatattctgcttgccagaagacccaccaaaggca

SEQ ID NO: 322980 - DNA, 75 bp, Homo sapiens
tggttttaaaacaaatgatgaccaaaccatgtgcttggtcaaaaaaggtgatcgaattgcacagctcatttgcga

SEQ ID NO: 322981 - DNA, 106 bp, Homo sapiens
gccggcaccatggccaagaccgtggcctatttctacgaccccgacgtgggcaacttccactacgctggagagatttaccagcatgagaattaagaaggagaaggaa

SEQ ID NO: 322982 - DNA, 82 bp, Homo sapiens
ggactgagtcctgcaggacacaggcatcaactctcaattgacttatagcattgcttcaggtgatagccttgggcagtttact

SEQ ID NO: 322983 - DNA, 50 bp, Homo sapiens
gccctcgtccagacgccccaaacaaacaagtccttaaatgcactggaaga

SEQ ID NO: 322984 - DNA, 100 bp, Homo sapiens
acgagctggttaggaggcacagggcgtcggacctgcacgagctgtctgggcaacaggtttgtctatgctggctctaactcgggcgtggtccaggccccgc

SEQ ID NO: 322985 - DNA, 100 bp, Homo sapiens
tcattagataatcctcatgcaaatagcgggaagaacaaaggaaggggagcccgggacccccgggggcgcaggtactccaaagattcaggtttactcacgt

SEQ ID NO: 322986 - DNA, 82 bp, Homo sapiens
cttggactgagtcctgcaggacacagatcatgctgctagagacagccaggcgctacaaccacgagacagagtgtatcacctt

SEQ ID NO: 322987 - DNA, 90 bp, Homo sapiens
ataaagctgttttggaactgtcaggtacctcaaagcacccccagaggagcccaccacctggaccgggtacttcgggaaagtgctcatggc

SEQ ID NO: 322988 - DNA, 100 bp, Homo sapiens
cttccacatggcctacaacgtcatcacgccctttctcttgctcaaggactccctccccagctcggtcattagtgccatcagtggacagctgcagtcctac

SEQ ID NO: 322989 - DNA, 83 bp, Homo sapiens
cgcgggcgagcggagcgcaacactcgcttggttggggagatcggcgcttggccggagctcgaggccatgagcagatataccag

SEQ ID NO: 322990 - DNA, 82 bp, Homo sapiens
ttggaagaactccgtgcccagatgctcataaggattgtcctctttctacaaaaggtgcagcggaactgctgcctgacgctct

SEQ ID NO: 322991 - DNA, 100 bp, Homo sapiens
gttctgatggatggaatgactgaatctgatacagcttcagttaatgaaaatgggctagcctttctgagaaaagtctacagcattctttctctgcaggttc

SEQ ID NO: 322992 - DNA, 97 bp, Homo sapiens
taagcatcgtggcgctggtggggggagtcctcatcatcatcgcctcctgcgtcatcaacttaggcgagtgtgaacatggctacgcctcttcattccc

SEQ ID NO: 322993 - DNA, 100 bp, Homo sapiens
agagaatggagctgctggaccggcagctgatgttctctcagtttgcacaagggaggcgacagagacagcagcaggatgcagaagaagctgtcagaattgc

SEQ ID NO: 322994 - DNA, 83 bp, Homo sapiens
atccgcaagcatgctcagaccttcattgctctgtgtgccaccgacttaattcagtgcacaaatgagatgaatgtgaacatccc

SEQ ID NO: 322995 - DNA, 90 bp, Homo sapiens
ctgtggactgcagcctcggcggtcagcagcaaccatgtccaagggacctgcagttggtattgatcttggcaccacctactcttgtgtggg

SEQ ID NO: 322996 - DNA, 58 bp, Homo sapiens
gccaagggcaagtgatttgacaggttgaaatcacaaagattagacacctttttagata

SEQ ID NO: 322997 - DNA, 75 bp, Homo sapiens
gcaggacccctgggcagacctcttcagaaatagcagcggatggtttctcgctctttgggcgcaaatccagatgac

SEQ ID NO: 322998 - DNA, 95 bp, Homo sapiens
aaggcagtggcggcaacaatgatggagaaaaggaaccttcattaacagatgccattccctctcacccaagaggtgtcatggagaaactccagctg

SEQ ID NO: 322999 - DNA, 75 bp, Homo sapiens
gcgccgcgcacttcgtcatgttcttcgcgccctggagtgtggccatctggggccgtgtggtatttgccactcagg

SEQ ID NO: 323000 - DNA, 109 bp, Homo sapiens
ctaatggttcagtggctaaaatgtgtgttaacagttcatgcatcatacctgtccacgtcccccccgaagggcgtgaccatcccgtaccggcccaagccgtccagctctc

SEQ ID NO: 323001 - DNA, 100 bp, Homo sapiens
gcgaccggcggcgggagaggcgccggggccgcacaggtgattaaagtatacagtgaagatgaaaccagcagggctttagatgtacccagtgacataacgg

SEQ ID NO: 323002 - DNA, 60 bp, Homo sapiens
gcttataagaagctcgcccgggaatggcccggattgcatttctacaaggcgaaagaaaag

SEQ ID NO: 323003 - DNA, 50 bp, Homo sapiens
ccggtacatctgaaagccgggaaatgagtacgggaatgtcaggtgctatt

SEQ ID NO: 323004 - DNA, 100 bp, Homo sapiens
ggggactggcctggcgtgcactccgcacctcggggacattattgcgcgtggaacggctgcttttggaaggtgcagaccatgaattacgtggggcagttag

SEQ ID NO: 323005 - DNA, 100 bp, Homo sapiens
ctaacgacaggcgcctccggcccatttacgatggtttcacccaaatatcactggtgtggaggcagaaaacctactgttgacaagaggagttgatggcagt

SEQ ID NO: 323006 - DNA, 100 bp, Homo sapiens
aagattgctcctggagcagttgtatgtgtagaaagtgaaatcagaggagatgtaactatcggtgcaccaatgaagagttaaacagtatgcatttgaccac

SEQ ID NO: 323007 - DNA, 96 bp, Homo sapiens
tccatggactcttgccgcttcgcaaaagtttgttacctctctgcgtatgccactttcagagtgaaacatgagtggacatcaaagaacaagatccag

SEQ ID NO: 323008 - DNA, 75 bp, Homo sapiens
tggagaagttgaaccagctgtgggagaaggcccagcgaggactggtgattgcagctggaagtgcccatgaccgag

SEQ ID NO: 323009 - DNA, 74 bp, Homo sapiens
ctttcctgagtgtagtacggaagaaaagagtctcatcgtggaaggcaagagggaaaagaaaaaagtagagaggt

SEQ ID NO: 323010 - DNA, 74 bp, Homo sapiens
tctccatccgctgcgtggaggtgtcggacgatcaggtgctggacgtcattgctcctccttatacctctgacttc

SEQ ID NO: 323011 - DNA, 96 bp, Homo sapiens
agcgatccgcgggctggcgacgtagaggaggacgcctcacagctcatctttcctaaagttaagcacttcctttgtcctagagacatttattcattc

SEQ ID NO: 323012 - DNA, 75 bp, Homo sapiens
acaagcgtttcccggagcacagggcagcggagatccggactgcatcaaaacatgtaaacaaggacctcggtaata

SEQ ID NO: 323013 - DNA, 60 bp, Homo sapiens
tgatgatgtcatcctgacagaagcacgtgtggttctcaaatataggcattctgatgggaa

SEQ ID NO: 323014 - DNA, 71 bp, Homo sapiens
ccaccttcctgctacagctcttcgagcacgacaaggacctccacaaaaagtactcgtacatccgcaagacc

SEQ ID NO: 323015 - DNA, 100 bp, Homo sapiens
cggtcgtagctgcggtcgcgccgagaaaggttcaacatgcactgaaaaaatcagagaaggctttggataccctaaacaaagccattgtcattgatcccaa

SEQ ID NO: 323016 - DNA, 100 bp, Homo sapiens
agccccggggcggcggccgaggctacagagccggcggcaggggatggcaagatagcggcgcgggagcgtaccgcttttaaaaccaaggatggctatattg

SEQ ID NO: 323017 - DNA, 90 bp, Homo sapiens
ccaagctctgggggtcatcacagagaaggagacccaggtgccttgggacaataatgcagtctgtgcagacccctgctccctgatccccac

SEQ ID NO: 323018 - DNA, 100 bp, Homo sapiens
attattgcgcgtggaacggctgcttttggaagatttgtgacccagaaggaaatctctgacctcagctgtggctcttggtgctggccagaagccaacttca

SEQ ID NO: 323019 - DNA, 49 bp, Homo sapiens
ccaagaagtccgagacacgcggattcaggagcagttccagaaaaatccc

SEQ ID NO: 323020 - DNA, 100 bp, Homo sapiens
atgtgtgaaatcctaagtggattgcagttgggagactttctcattaaggctgggcaagaatccttccgttctatcacccgttcctactacaggggagcag

SEQ ID NO: 323021 - DNA, 100 bp, Homo sapiens
cttctgctgatgagatttatgactgcaaggtggagcactggggcctggaccagcctcttctgaaacactggggtattcaaactcgtgtccttgatgtcac

SEQ ID NO: 323022 - DNA, 90 bp, Homo sapiens
aagtgatttgcctcagcttgtactgaccgaggtgatgagttcacatacactggaagcggtggtaaaaatcttgctggtaacaaaagaatt

SEQ ID NO: 323023 - DNA, 74 bp, Homo sapiens
cggaggggaaatggctgccgaaaacaagccggaagattgagaggatccagaatccagatctctggaatagctac

SEQ ID NO: 323024 - DNA, 100 bp, Homo sapiens
gcgatttctgtcgtgaagcacatagtgacgccagagtggctggaagaatgcttcaggtgtcagaagttcattgatattgatgatgttaagaagttcaaac

SEQ ID NO: 323025 - DNA, 74 bp, Homo sapiens
ctccaacggacccctgtctcccggaggagcgcgcacctgtcttctacaaatgcttctgggaactggaggaccca

SEQ ID NO: 323026 - DNA, 148 bp, Homo sapiens
gatctactgataggcaggttaccatcactggatctgctgccagcattagcctggctcaatatctaatcaatgtcagggcccagtgttcaccatcataccaggggccagaggcgatggcttgcctccatgagacccgaacaccctctcc

SEQ ID NO: 323027 - DNA, 100 bp, Homo sapiens
tcaggatcttcctctccctcgggacccaaggccacaaaggagagctccgtggagagaaggttaaatggaaaccacccttgggaactggatgcctgtgtag

SEQ ID NO: 323028 - DNA, 75 bp, Homo sapiens
agatttgcctgccctcagtggttaacttttttgctgcaatcacaaaatatctaactgattttgagccaattcaat

SEQ ID NO: 323029 - DNA, 100 bp, Homo sapiens
gctgggggagatggaggcgaagacaagagagctcattgtgccggtggtggtgtgcacattgagccccggtatagacagttcccccagctgaccagatccc

SEQ ID NO: 323030 - DNA, 100 bp, Homo sapiens
cctggagtctgaatcttttcgaccaaacctaagtgatcccagtgaacttttactgccagatcaaattgaaaaggaactgtggctgcaccatctgtcttca

SEQ ID NO: 323031 - DNA, 101 bp, Homo sapiens
tgccccggcgccacctggagagaggccgcgtcctgggcagaggcttttgatgaggccattgctgaacttgatacactgaatgaagactcatacaaagacag

SEQ ID NO: 323032 - DNA, 98 bp, Homo sapiens
taaagaaggagttgaatgtgaggcaatggatcacttggagtcctttattgctgaatgtgatcggagaactgagctcgccaagaagcggctggcagaaa

SEQ ID NO: 323033 - DNA, 100 bp, Homo sapiens
cgctggccctctgtctgcctgtgtccctgaccatggctccctgcagtaccctttaacgtctacatcagcatcagcatctgcgtcaccatttcaatctgca

SEQ ID NO: 323034 - DNA, 100 bp, Homo sapiens
cccacctcttgcatcgtcacctacagagtaatcaagtcagaggattatatgacttttatctgcctagagaagaactatggatctacaacatggagactgg

SEQ ID NO: 323035 - DNA, 100 bp, Homo sapiens
cagccacaaggggtcttcctgtggccctcaaacaaaaaatcactgcattacatcagcagttcccttttagactatggcgacatacctggagttcatccag

SEQ ID NO: 323036 - DNA, 87 bp, Homo sapiens
cacggctcttcccggcgctctcctggctcccttctgccccagctccgtctcggcggcggcggggctctggaggccacgggcatgatg

SEQ ID NO: 323037 - DNA, 74 bp, Homo sapiens
acagagagcaacttttattacgtggaacaaaatataacaccagcaatcctgacttgttgctagtcatatttcaa

SEQ ID NO: 323038 - DNA, 80 bp, Homo sapiens
aagatcctaatgaggacattgtggagagaaacatccgaattatggctgaccagtttgagtatgtaatgtatggaaaagtg

SEQ ID NO: 323039 - DNA, 50 bp, Homo sapiens
gttcaaggaggtgctgaagagcgaggagctatccaacttgataaagtcaa

SEQ ID NO: 323040 - DNA, 75 bp, Homo sapiens
ggtgtcgacggatctctttacaagacgcacccacagtcagtttgctgagaacgaaaccaatgaggtcaattttag

SEQ ID NO: 323041 - DNA, 82 bp, Homo sapiens
ctgcccctcaggacccctgctacgtggagaaaacctcggataagacaccattcgcttttcacccaagatgatttgatgtctt

SEQ ID NO: 323042 - DNA, 93 bp, Homo sapiens
ggcctacttgcagcatattacctatcaggagaggaggttaatttggagtggcccctggagtcagtttcctacaccatccgaggccccacccag

SEQ ID NO: 323043 - DNA, 87 bp, Homo sapiens
ggagtgtccagaaaagagtagcagcagtgaggaagagctgccgagacggttgcccccaagtttcctggcagtgtgtgatactgagga

SEQ ID NO: 323044 - DNA, 98 bp, Homo sapiens
gtgtcgtacatccttgtgggagagaacctcatcaatttccacatttcttccaagttctcttgccctgagacgcccgtagctggcttcctttccccttt

SEQ ID NO: 323045 - DNA, 98 bp, Homo sapiens
cggcaactcagaaacatcaggtccaaggacacagcattgttggttttgccatgtactattttacctatgacccgtggattggcaagttattgtatctt

SEQ ID NO: 323046 - DNA, 83 bp, Homo sapiens
tctgggatcacctgatcatttcaggcacctttcacagccagcaggcattggaatatggcaccaaactcgttggaggaaccact

SEQ ID NO: 323047 - DNA, 98 bp, Homo sapiens
cagagaaggtcctgggttctgtctgctgcttcactctggggacctgcactggttaaacatcataatcatgtgtgttggccgaatgggaatcaccattg

SEQ ID NO: 323048 - DNA, 76 bp, Homo sapiens
tgtcgtacagttttgctttcaaagcatagctgaagaagcaggtggagagtgccgagctgaagaaccagcggctcaa

SEQ ID NO: 323049 - DNA, 89 bp, Homo sapiens
gtggcagtagtgaattcattgtataagttgcaccaatcagtaacaaaggcaagccaaaattccttccggatagaatatgatacctttgg

SEQ ID NO: 323050 - DNA, 124 bp, Homo sapiens
taaagcacagctaggcagctggggaaaaggcagcagtggtggagcaaaggcaagtgagactgaaccagacataagttcagaggaatctgtctccactgtagaagaacaagagaatgaaactcca

SEQ ID NO: 323051 - DNA, 82 bp, Homo sapiens
ttcagcgtagagtcgctggagcgggcggagctgtgcgagagcctcctcacttgggatcttttgccagaaatgagggcatact

SEQ ID NO: 323052 - DNA, 75 bp, Homo sapiens
ggagcagcacttccacagccaagtgcgggagtccacgctgcagtacggagacagcaaggacaaccctctcaagta

SEQ ID NO: 323053 - DNA, 75 bp, Homo sapiens
gtcacgactttacatctttggcaatcggtgcagctcaacaaggacacagtgtgcaaaccttgccttgcaggctac

SEQ ID NO: 323054 - DNA, 100 bp, Homo sapiens
ttttttgtacataagaggccccatgtggatttcttcctggaagtggtgaggaagaggatggagatgaagatgaggaagctgagtcagctacgggcaagcg

SEQ ID NO: 323055 - DNA, 100 bp, Homo sapiens
ctccactgtggaaataccgaaaaaggacagtcattttgtttactcattcagccctgttgcaggtcccaataaactcttcataaggttgacagaagcaccc

SEQ ID NO: 323056 - DNA, 82 bp, Homo sapiens
ggaatacaaaactcacaccgacagcatcaaggttcaggataagtttgaggtgctgaattacacaagcattcctatctttctc

SEQ ID NO: 323057 - DNA, 100 bp, Homo sapiens
cagttcaacctgacacaggtcacctgtcactcagccctgctggacctggagaagctcccagaattcaacaggtttaagaattgtttaagctgcatcaatg

SEQ ID NO: 323058 - DNA, 100 bp, Homo sapiens
ctggaccggccggggaaacagtattttctggaaggggtgctggccacagggctcagtgccctgtactcatcactgcctcgaaagattgaggttccagggg

SEQ ID NO: 323059 - DNA, 50 bp, Homo sapiens
caatggagacgccgccgctgcctcccgcgaagacagagatgtcaatgacc

SEQ ID NO: 323060 - DNA, 100 bp, Homo sapiens
atttcttttactacttccaaattcagctacaagatagactttgcagcaggagcgagaacccgagcagcgccatgagcaacactaccgtcgtccccagcac

SEQ ID NO: 323061 - DNA, 128 bp, Homo sapiens
ttttggaagagggagtcaccactggacctccaaggaagccacgtgcagacatctacaaccttcgatctcctgacgaatccatcttcggttgtgaatccggcccggaatgcagccaccccttagagcaa

SEQ ID NO: 323062 - DNA, 75 bp, Homo sapiens
gtcccagctgaccttgatcaggagaagaacaatagtttagaacgggctgtggactggatcttcagtcacattgac

SEQ ID NO: 323063 - DNA, 128 bp, Homo sapiens
cttggaagcaatgtttgaacaaactcgaagaacagctgtggaaagaagttgcaaaacactggtttaaaggagtacatttggaacgtgtttttggaaaaagcatgttaatgtagcagaagagacttcag

SEQ ID NO: 323064 - DNA, 100 bp, Homo sapiens
agattgtgatgaattgtgctgatattgatattattacagcttcatatgcaccagaaggagatgaagagttcaaagaggccttttcattgtttgaccggac

SEQ ID NO: 323065 - DNA, 100 bp, Homo sapiens
cttagctatggatgaaggacagtatgatgggaaagttgatatttggtcacttggcatcacttgtattgaattgggtactttaacccaagcggtgagcccc

SEQ ID NO: 323066 - DNA, 100 bp, Homo sapiens
ctgcgttgtaaatattgctttaccaaacagattaatctaatagctcctcctcggtatgtaatgactacgacaaccctggagagaacagaaggcctttctg

SEQ ID NO: 323067 - DNA, 82 bp, Homo sapiens
gcctctgctgaattggatgaaagataaagcccttaaggacaagacacatcaccttcactttgggatatggaatttgataagc

SEQ ID NO: 323068 - DNA, 100 bp, Homo sapiens
ccgaggtcgctatggccccccatccaggcggtctgaaaacagagtggttgtctctgggtacaggcatccttcacctgctattgttgcaagaacagtcaga

SEQ ID NO: 323069 - DNA, 82 bp, Homo sapiens
cgggcgcagtttctcacgacgggccgagcctgccacttttggtgccctggttgtcagatgttggaaagcagtaggacggaac

SEQ ID NO: 323070 - DNA, 50 bp, Homo sapiens
gaaccttgctcttcatatcagcatgatcactgtcgtcttcctgaaagatg

SEQ ID NO: 323071 - DNA, 100 bp, Homo sapiens
gaagaagcagttcaaccgcatgaagcagctggctaaccagaccgtgggcagggctcaagggttcttgttgatgcacgagataagcttggcattccttggc

SEQ ID NO: 323072 - DNA, 90 bp, Homo sapiens
gatcgtgaccgagaccgtgaccgagagcgtgaccgagagcgcgaatatcgtcatcgttagaagtcctcctgcatatgcccaagaggattg

SEQ ID NO: 323073 - DNA, 97 bp, Homo sapiens
gatttaaagctgagctgcgaggaaaatggcggcgggaggtaaatgccatctgctatggggccaagattatgcttccaggtgttcttcgatatgagga

SEQ ID NO: 323074 - DNA, 75 bp, Homo sapiens
tccctttaatccagtgactgtcaggtcgatcatatcctcctgacaaggtgatccgggcgggccccgcaggaattt

SEQ ID NO: 323075 - DNA, 82 bp, Homo sapiens
gaagaaggaggcagtgaagaaagtgattgcatcgatgaccgtgggcaaagatgtcagaaccaaaaacttttgctagaaaatc

SEQ ID NO: 323076 - DNA, 95 bp, Homo sapiens
ggcaacctctacaaggccaagttcatctcctccgtcaccagccacatctaccagcgccgtgccgtccctgcagtgacaccgaggtgctcctagcc

SEQ ID NO: 323077 - DNA, 80 bp, Homo sapiens
tagtagaaagccttgtctatcttcagacacaaaagctttcagtgaaaggttacaatgacaagcagccaattttactaaag

SEQ ID NO: 323078 - DNA, 74 bp, Homo sapiens
gcaaagtgctgcttccaaagctcattgacttttctgctcaggtccagtggcattgcagagcacggatggttgca

SEQ ID NO: 323079 - DNA, 82 bp, Homo sapiens
cccgggtggcttacagacgctgccagcatcgccgccgccaggtgcgcgcggagccatggttatcatgtcggagttcagcgcg

SEQ ID NO: 323080 - DNA, 80 bp, Homo sapiens
cgagaacggtgcttctatggcaggatatgggggaagcgagtagcattatctgatgatgagacaaaggaaactgaaaacat

SEQ ID NO: 323081 - DNA, 100 bp, Homo sapiens
atttcagtggaataaatggcgtccaaagtcacagatgctatagtctggtatcaaaagaaggtcttgttcagcgttgcgtaatcatccagaaagatgacaa

SEQ ID NO: 323082 - DNA, 95 bp, Homo sapiens
catcgctgctgtcctgcccaaggtccaggatcacctgcttcgggagaaagctcagcagcatgatgagacctattatatgtgggccttggctttct

SEQ ID NO: 323083 - DNA, 100 bp, Homo sapiens
caatgccctggagtcaaagactgctgccagcggggtggaggcgaacagcagaccgatcccggctactcaacagaaatgaaggaggaatctgtaaagaaac

SEQ ID NO: 323084 - DNA, 90 bp, Homo sapiens
caagaagcagatgcgcattttgatggtgacgaggaattgacaatggccatgtcctacgtgaaggatgacatcttccgaatctacattaaa

SEQ ID NO: 323085 - DNA, 100 bp, Homo sapiens
aggaaatatgtagtacaaaatcctgaacaggatgctgtcctcttccataatactatttattacaacctcttatatggaaacatcagtgcttcacctgagg

SEQ ID NO: 323086 - DNA, 75 bp, Homo sapiens
cttctccgacccaaaactttcagatctgtcaatgccttcaattaagttgcagagttctgatggagagatatttga

SEQ ID NO: 323087 - DNA, 98 bp, Homo sapiens
caacccgcagagacttctactggctgcgctcctttctggccggagatggctattcatatgaaaaggaagcaatggaaaattggatcagcaaaaagaaa

SEQ ID NO: 323088 - DNA, 90 bp, Homo sapiens
tccatgctggaccagcagagggagttggcccggaagcgggagcaggagcgaagacgccgggaagccattctcatccgaaaccgctctaca

SEQ ID NO: 323089 - DNA, 124 bp, Homo sapiens
acggagctggtcatcagcctggagaagctggagaatgacaagagcttccgcggtgtcattctgacctcgggactttgaacatgtcggggatcgccctcagcagactcgcccaggagaggaaagc

SEQ ID NO: 323090 - DNA, 82 bp, Homo sapiens
ttacacctgcaaggtctctggaggaattcaatgatgtgtaatagcctgcagctggtgttttgagaagccctactgctgaaaa

SEQ ID NO: 323091 - DNA, 88 bp, Homo sapiens
ggcggaggcagaggtggaggcgctttgaaagcaattctgtggtgttcttggtcacacatttatggagtttctgaagggcagtggagat

SEQ ID NO: 323092 - DNA, 90 bp, Homo sapiens
ctgttgtggctgccgcattgctcccgccgggctgtagctgagcgcggagcccgtggggaccggtgagacctggaatggccaaatatcaag

SEQ ID NO: 323093 - DNA, 100 bp, Homo sapiens
cttgcatactgtctcaatgatggcgagtgctttgtgatcgaaaccctgaccggatcccataaacactgtcgcggttcagcgaggaagaatgcctccaacc

SEQ ID NO: 323094 - DNA, 74 bp, Homo sapiens
cttcttcgtggacactggctccaaggaaaaagttatggctgcagcttcgattgccaatattgtaaaaagttctc

SEQ ID NO: 323095 - DNA, 74 bp, Homo sapiens
ttaaatgaagccactgattagcaatttaaagatcctctccaagggatccctcggtgaagaggactctctgtcga

SEQ ID NO: 323096 - DNA, 95 bp, Homo sapiens
tggtgtttagaccagctagagaccatacagacctaccggtctgtcagtgagatggcttctaacaaggatgaaacgaggaggaagagatagtgacc

SEQ ID NO: 323097 - DNA, 75 bp, Homo sapiens
agaaggtctctggagacatcttcagcagctttaccactcctgaaggccctaaaccccgttccagatgctctgact

SEQ ID NO: 323098 - DNA, 74 bp, Homo sapiens
acaagaccaatatttggtatactgggcacaatccatctggtggcagattctctcgggcctagccgtccttggaa

SEQ ID NO: 323099 - DNA, 75 bp, Homo sapiens
gctctatagtcggagtggagaactgcaagagctttcagcagaggccaaggcagcattgcttgaatttgaagaaag

SEQ ID NO: 323100 - DNA, 75 bp, Homo sapiens
cgggagactcaagccttggaaaatgatcttagggaagaaaacagcataatttaccctcaaaacaaggatggtgaa

SEQ ID NO: 323101 - DNA, 96 bp, Homo sapiens
ataacctctggggaccccaacctcagaggcagcttcaagtgccttttgctgcgcaccaatgcccagcaggggaggctggagtgcagtggcgtgatc

SEQ ID NO: 323102 - DNA, 50 bp, Homo sapiens
gacgggaggatctgaagccggccgcagctatacacagaatgggattttac

SEQ ID NO: 323103 - DNA, 100 bp, Homo sapiens
ctttggggccaccggtcgcccccgcctccgggacctgcggggagggcccgcgagagttggaggagagcagattagtgccattggaaggggcatatgtgtg

SEQ ID NO: 323104 - DNA, 75 bp, Homo sapiens
tttccaacatccagagctgcatcattccttggggcaaaatgtggacaagggtggtgctttctacacagcagagac

SEQ ID NO: 323105 - DNA, 100 bp, Homo sapiens
caattattacattgaatctctgctctggaaagttcttgtcaataccaagattgtctgcggttacgcacatactctagcactaacagatgagggcttgctg

SEQ ID NO: 323106 - DNA, 74 bp, Homo sapiens
gcgtgaccgagagcgcgaatatcgtcatcgttagaagactcctcagacccctgcacaattgagagaaaagcccg

SEQ ID NO: 323107 - DNA, 100 bp, Homo sapiens
actcagccgatgcctcaatggccaactgcagcttctaaccgaaaatcttcagttggcgtaaaaaagaatagcaagagcagaacgttaacgaggcaatcta

SEQ ID NO: 323108 - DNA, 83 bp, Homo sapiens
cacagtgccaagcccccgacgcacaaatatgtccggctgcaagatcaaggccctgcgggccaagacaaacacctacatcaaga

SEQ ID NO: 323109 - DNA, 98 bp, Homo sapiens
tccaagtgtagtcctggcctcatacaatcatgatggtgatatcagtatcaagataaaagtttggaatgggagaaaaattctcaaagcctgaaagaaaa

SEQ ID NO: 323110 - DNA, 100 bp, Homo sapiens
tcagcaaaggttcagccctccaaggccataggaaaaggatacagagtagagtttcatgaacctgaaacttggtggaaatttgatcctgaagaattagaaa

SEQ ID NO: 323111 - DNA, 100 bp, Homo sapiens
ctactacggaaactcggtcagggccacggtgcagaggtaccctccgacccaccacgatcaaataaacggagtcttggagagattgaattgactttaccaa

SEQ ID NO: 323112 - DNA, 50 bp, Homo sapiens
atttccaaagtatgttgcacccaggagatcatgaatcagacagataaaaa

SEQ ID NO: 323113 - DNA, 82 bp, Homo sapiens
tgcaccaccatcaggtcttgaagggagccgggtgtgggctgagccctgcctgattgatgctgccaaggaggagtacaacggg

SEQ ID NO: 323114 - DNA, 82 bp, Homo sapiens
aagggcccaactggaattccacttacggaaagggctattgcaagacacgaagtccgagaaattgagcagcgacatacaatgg

SEQ ID NO: 323115 - DNA, 75 bp, Homo sapiens
atcctttgaagaattctgtgctgaaagttcacatccttggctccttccaaaatatcaagatggcaagaactgcca

SEQ ID NO: 323116 - DNA, 90 bp, Homo sapiens
tggaacgcaaggaccggagggcgtgggctgggacgcccctaccttggtctttcagggtcctgcacgaggtcagcaatggcagcgtggtac

SEQ ID NO: 323117 - DNA, 75 bp, Homo sapiens
aattagtgaatttacacctttgccaagttcacagccatgaatgaaccacagtgcttctacaacgagtccattgcc

SEQ ID NO: 323118 - DNA, 97 bp, Homo sapiens
cagagacaccaggacagaaaagacagtgttctgctttcatggagttcacagaagagtcgaggaggtgtcatggagaaactccagctgggcccagaga

SEQ ID NO: 323119 - DNA, 142 bp, Homo sapiens
cggagacctgggcaatgtccgtgctgatgctgacggccgcgccatcttcagaatggaggatgagcagctgaaggctcttgtcaggatggtgaagctgttcatcggaaacctgccccgggaggctacagagcaggagattcgc

SEQ ID NO: 323120 - DNA, 90 bp, Homo sapiens
agccgcggcttccggagccctcggggcggcggactggctcgcggtgcagggtatttgaagtataccatacaactgttttgaaaatccagc

SEQ ID NO: 323121 - DNA, 82 bp, Homo sapiens
tccgtggcctcgcccaggccgacgggaggatacgaagcgttttcggcttcctgcccggagctgtgcagcaaacagtcgaccc

SEQ ID NO: 323122 - DNA, 101 bp, Homo sapiens
ctctacagactccaaaaggcccttttcagggcccccaaactgtcacagaaagagctgttaacacttcctagataacgggtgatgatgaacagtctacacag

SEQ ID NO: 323123 - DNA, 104 bp, Homo sapiens
agcacccctgagcagcctggcctgccatgtccgggagaagacagtctggagaaggaggggccccccaggaagaagccaggccttgcttccttccggctctcagg

SEQ ID NO: 323124 - DNA, 50 bp, Homo sapiens
gctttactggtgttccagccctaagttgatgcggcagttatatcatgaat

SEQ ID NO: 323125 - DNA, 111 bp, Homo sapiens
gtggaagttcccgccccggagagcggcgaggcggcagccacagacaatgcagatcttcgtgaagactctgactggtaagaccatcaccctcgaggttgagcccagtgacac

SEQ ID NO: 323126 - DNA, 50 bp, Homo sapiens
gccagtgtagccccagtatttactgtgactcctcgtgaagtggcccagca

SEQ ID NO: 323127 - DNA, 98 bp, Homo sapiens
gacggatcatagtgccccacaacgtgagcaaggagttctgcacggggaactctaatgatccaggacaaagaagttaccctggagtatgtatcaagcct

SEQ ID NO: 323128 - DNA, 100 bp, Homo sapiens
cgggaccggcctggagatggagttcgactgcgagggcctgagacggctgcttggcaaggtgctggagaatctggtaaaagcaccattgtgaagcagatga

SEQ ID NO: 323129 - DNA, 75 bp, Homo sapiens
cagtggcacagtgaagataccaggtgcttgtgagtgaggattctgacagtgatggcattgtggcccacttccctg

SEQ ID NO: 323130 - DNA, 75 bp, Homo sapiens
ggcggcggcggctgcggcccaatatagggtcgataaagacaggagtggagtgatatcagacaccgagcttcagca

SEQ ID NO: 323131 - DNA, 74 bp, Homo sapiens
aagataaatatgaggaagaaatcaagattcttactgataaactcaaggagaatccgaagaactcagtcaggaaa

SEQ ID NO: 323132 - DNA, 82 bp, Homo sapiens
gaccaggaggaggttttcaggaccaaaattgtggaaaagtcactctgaacccagtgacttgattgtaaaaatttacagagcg

SEQ ID NO: 323133 - DNA, 74 bp, Homo sapiens
gctgaagaccgaagcaagagctggttcaggggatggagaagtttatgtttgggatgtgaactcaaggaagtgcc

SEQ ID NO: 323134 - DNA, 80 bp, Homo sapiens
caagtgtcccaagtgcaacaaggaggtgtacttcgaacccagcgggtgccgcttctccacccgaggcttccacctccaac

SEQ ID NO: 323135 - DNA, 82 bp, Homo sapiens
gttcgccggcgcgcgctcgcccgcctagtgctgcgcctcaacgcgccgttgtggccccgtctgaggtctggcagtcagagac

SEQ ID NO: 323136 - DNA, 71 bp, Homo sapiens
tggagaccttgacacttatatcctccctgggttgctccttgagggcaggacagttcttatggctttatccg

SEQ ID NO: 323137 - DNA, 75 bp, Homo sapiens
ccgcactccggagactcgcggttgctacgcgcaccatggctggaggcacattgcaagcaacccgtgccttgatgg

SEQ ID NO: 323138 - DNA, 98 bp, Homo sapiens
ggaggaggctggctctggtcttcgatgcacaggagtggccgttatggaacgcagaaggaagaggcccagcagaagggactcgctgagccaccccccgc

SEQ ID NO: 323139 - DNA, 52 bp, Homo sapiens
gctggagcctcaggcggcagcgcttctagcttcaagcagtttatgtatggat

SEQ ID NO: 323140 - DNA, 95 bp, Homo sapiens
atttggcaccaatgtgatggtgacagtggccaagtccttcgaggcaccaataaaatattctgcctgatcaatgcaggagtcctgtacctctactt

SEQ ID NO: 323141 - DNA, 100 bp, Homo sapiens
tttctacgtctgcaacgggaagagaaagcgaagccagtaccagcgtttcacctaccttcccgccaacggtcatcatcagatttgaaatatttaaagtgga

SEQ ID NO: 323142 - DNA, 80 bp, Homo sapiens
ggtgggaagcattctgttgcaacagttgcggagcgcccatgcaggctgaagggtatgtgattggcagctgtattaaacac

SEQ ID NO: 323143 - DNA, 118 bp, Homo sapiens
gcggagcgagcggggccggcggcgggcgccgagggacgccgaggcctcgggcgggggctggcccggggttccaggatattaccttccaaatgatgatggagaattttatcagttctgt

SEQ ID NO: 323144 - DNA, 90 bp, Homo sapiens
gcaagacgggttcagttcgtcatggggctgtttggaaagacccaggagaagccgcccaaagaactgagtctcattctgttaccaggctgg

SEQ ID NO: 323145 - DNA, 76 bp, Homo sapiens
ccttgataggcaaaggttcctttggacagtgctcttattaaacaagtgaacaaatcaatagatggaacagcagatg

SEQ ID NO: 323146 - DNA, 83 bp, Homo sapiens
tggggccttcactcctctgtggctctggaagagcccgatttcctcaggagcttccgccctgcgctgccagtctcctacctgca

SEQ ID NO: 323147 - DNA, 76 bp, Homo sapiens
tacgattagcaccaggatcgtgtctcattttgaacccagatctctttaaggaagttgcagggccaacagaaatgtg

SEQ ID NO: 323148 - DNA, 100 bp, Homo sapiens
ttgaggggtctccatccagatcagctgaatcagagtttgcattgttaacaagtgtgcaacttgctttggtgtttgctgttttattgccacagatgacatt

SEQ ID NO: 323149 - DNA, 75 bp, Homo sapiens
ctgtgaacctgctggccgagtggctcattcagacagctactcccgagcccggagaggacccacgcgtgacccggg

SEQ ID NO: 323150 - DNA, 97 bp, Homo sapiens
gcaaacattgcgtatactcctgatattattatagcctcaatactgaggctgattgagaattcagcctcagcccccagatgaagatggggatcacagt

SEQ ID NO: 323151 - DNA, 100 bp, Homo sapiens
aatcagtttacaagactatgaaggattccactatgacaaggagaaactccgagaagcttaatgcaggctcaacagtaccagcagcagcgtcgaaaatttg

SEQ ID NO: 323152 - DNA, 82 bp, Homo sapiens
gggaaatggctgctgttgcttctgggccagaggaagagaatgagttggatatgtcaagtgaccagatagctgccaatctgca

SEQ ID NO: 323153 - DNA, 75 bp, Homo sapiens
aggagtcgattcttaaaaactctgcttctgttgacctagaggatcaagacataatgggagcatttttagacaagc

SEQ ID NO: 323154 - DNA, 100 bp, Homo sapiens
gcgacggcagcggtcccagcggcagcagcagcggcgggaggagcctccgggctgaaccttagccggccgatcgaggagcagggccccctggacgtcatca

SEQ ID NO: 323155 - DNA, 100 bp, Homo sapiens
caggatggattgccagggcttcctggcccgaaaggagagcctgtctctcaggcagctgcagagcttcaacagtactgtatgcagaatgcctgcaaggatg

SEQ ID NO: 323156 - DNA, 75 bp, Homo sapiens
atatatcctcttagagggagtcaaaagagtatgaacgctgccgtccgtgccgtggtgcgcatgggtatctacgtg

SEQ ID NO: 323157 - DNA, 101 bp, Homo sapiens
caaagtcaagcgggccaccgagaggttttctggccgagtggtgcagtctttgcaagccacatttggaacttttgagtccatcttgagaagctcccaacata

SEQ ID NO: 323158 - DNA, 50 bp, Homo sapiens
cggaccgcagtgccccaagagaggactgcgagaactacatcactctcctg

SEQ ID NO: 323159 - DNA, 83 bp, Homo sapiens
gggaactccactttgtggcaccgtgagattctccagcatgactatatgaaggaagaggaaggttttcctgaagatgaggcgac

SEQ ID NO: 323160 - DNA, 73 bp, Homo sapiens
ccacccacaaacaaactacccattttcttttttggaactcatgagacggtcaaagaattgactgtagatccaa

SEQ ID NO: 323161 - DNA, 83 bp, Homo sapiens
caattgtggactgtcttaaagatttggatgtctcaataaaacgcctatttcaatgatattgctgtaggtgcagtatgctgtag

SEQ ID NO: 323162 - DNA, 100 bp, Homo sapiens
ggttttgtggcggctgctgctagagctggagcatttgccggagcctgcattgattctaatgaagatggggacttgagtaaatctaccgtgttgagaaact

SEQ ID NO: 323163 - DNA, 51 bp, Homo sapiens
gcgaaggacgggagccgaagctcaaggaagacatgtaaggaatttgcataa

SEQ ID NO: 323164 - DNA, 76 bp, Homo sapiens
aagggtgttcccgaactagagtggggacctaatacctatcattgctgctctggaatataatcagtggttcacaaaa

SEQ ID NO: 323165 - DNA, 75 bp, Homo sapiens
gggagggagactgttgttcccggagatgcggcgcgcaggttctgtggacaatcacaatgggaatccaaggagggt

SEQ ID NO: 323166 - DNA, 98 bp, Homo sapiens
taagtctgaatttcggcagaatttagaagcttgacttctcatcagctgagccagaagtgaagtcatttgaagagaagtttggaaaaaggatccttgtc

SEQ ID NO: 323167 - DNA, 109 bp, Homo sapiens
ggcgcctaaagtctgagagagggaagtcgcctctgtgctcgtgagtgcatggggtataagtacaagttgtgcaaagtgaggaagattactgtgggagtgaagggaatcc

SEQ ID NO: 323168 - DNA, 100 bp, Homo sapiens
tggacgtgaacacccgggacacggatggcttcagcccgctgctgctggccgtgcggggcaggacccacgcagccacccagcctcagcactcatctgcgca

SEQ ID NO: 323169 - DNA, 75 bp, Homo sapiens
agaaactgcaccggaaatgtgcctaccaggaggaggaagccaagaatctggtgagcgaagccatcgcagctggca

SEQ ID NO: 323170 - DNA, 97 bp, Homo sapiens
gaagtgctgcgcacctacttggagctggtgctttgcgtgctggtcagcatccggaacaacagcaaaacaagggttcctccagttttggtggtggaaa

SEQ ID NO: 323171 - DNA, 100 bp, Homo sapiens
ccccaaggggattgcctggcaggacgtgaaggggaagaggcccaccctggagtaaccctcactggagaatccagagatcatcactgttgaagaggcaaag

SEQ ID NO: 323172 - DNA, 100 bp, Homo sapiens
gccgtccagcagatggcggatgccctgcagtacctgcagaaggtctctggagacatcttcagcaggagtggaggcagcacagacagtgaggacgaagaag

SEQ ID NO: 323173 - DNA, 100 bp, Homo sapiens
gttcaaatcagtggttgaagaaattcaggttctgccattactgcaatagccacatctgtgtgtcacggcccaccctgtcgccagcttcatcatgccctca

SEQ ID NO: 323174 - DNA, 99 bp, Homo sapiens
gagagaagatggcggaagcggaacatttctcttgggaagttgtgcatctgacaggaatatagtactgtacgatatgaggcaagctactcctttgaaaaa

SEQ ID NO: 323175 - DNA, 100 bp, Homo sapiens
ccagtgccgctactgcaggctcaagaaatgcttccgggctggcatgaagaaggaagtgctgaagagacctgtcacctctgaggaactccttactcccggg

SEQ ID NO: 323176 - DNA, 100 bp, Homo sapiens
gctccgggaccggccgaaaggcgaggaaccgtatttttcagtgctgtacaagcgtcttgaattactctggtagcttttccagaaagacccatgacttcac

SEQ ID NO: 323177 - DNA, 100 bp, Homo sapiens
cccaaatgctggagaccaaagttttcccaagacctgtcttgccgtctctcacactctggaggtcaaaagaaatgagactgctgggctaagatcaaggtgt

SEQ ID NO: 323178 - DNA, 100 bp, Homo sapiens
gcccgggaggaaggaacgaggcaaggagctaaagcagcgtgcgttcagccctggggtaccagctggaggatgagtctgcgcatttggatgaaatgccact

SEQ ID NO: 323179 - DNA, 82 bp, Homo sapiens
cgaggagacagaagggagtgtcggacaccatgacgagagcttggttcagggagcaagtttccgaggttggaaagaagtgact

SEQ ID NO: 323180 - DNA, 100 bp, Homo sapiens
gggctgttacatgcctacccggtaagtgggactaaaggatcttcttcaaaagtttgatgatgtatggcctatggacccccatcctagaaccagagaggac

SEQ ID NO: 323181 - DNA, 51 bp, Homo sapiens
cctgtgcgggatggaacaaaaggagttgtaagacgttcatcgccgtgttat

SEQ ID NO: 323182 - DNA, 50 bp, Homo sapiens
acagctatgtggctctcagataatcagtacacctttgggagcctcactgg

SEQ ID NO: 323183 - DNA, 75 bp, Homo sapiens
gtgttccagttagctttgctaccagttatgcagaaaggccttttccacctcatatccagctccctccagaaattc

SEQ ID NO: 323184 - DNA, 101 bp, Homo sapiens
aacggaccgacggaggtggcgtggatgagcagcagccgcctgagcagtgaggaaaccccgcggacagcgcgatggtggccagcagagatctgcaaccccag

SEQ ID NO: 323185 - DNA, 102 bp, Homo sapiens
ggaagtgattcagacccatcccagaaactgttaaggcagcaataatagaagagcagaaacgaagtgaaaaggctgtggaagaggcagtgaaaagaacaagag

SEQ ID NO: 323186 - DNA, 74 bp, Homo sapiens
ctgcccactctagaggagctgaaagtagatgagtattggtaaaggttttcaaggtgtcatgaaaagatggggat

SEQ ID NO: 323187 - DNA, 96 bp, Homo sapiens
tgacaagattctgaaagctgaacagagaattctggcactgcactgggtaggaaaaagacaattgcagcatgactttcccagggccctgattttcag

SEQ ID NO: 323188 - DNA, 83 bp, Homo sapiens
ccccccccgcccagagtcatggcggcagcagccgctctgagggcgcctgctcaggatttttagactctgaggagcagttggag

SEQ ID NO: 323189 - DNA, 80 bp, Homo sapiens
cttgggcctcgcgccggctatggccgtgccctggggctgagccctcaggttcgtgctggccgtgggcagcgccgtctttg

SEQ ID NO: 323190 - DNA, 90 bp, Homo sapiens
tgaagtccctagggaaccaccaattcttcccaggaatagccaggccagaagaaggaaggcctgtggtgagtgggacaggaaatgacatca

SEQ ID NO: 323191 - DNA, 100 bp, Homo sapiens
ggggagtggaaaggctctcagtgaaaaaggagaacttgccgggctggaactacaccttctggcagtggtttgacggggtgatggaggtgttgaagaagca

SEQ ID NO: 323192 - DNA, 99 bp, Homo sapiens
ccaacatggcggcggccgtaaggtgcatgggtagagactaatagggatgccaaaggaaaaatatgatcctccagatcctcgcagaatttataccatcat

SEQ ID NO: 323193 - DNA, 100 bp, Homo sapiens
atgaagattcaccaaataagctatatactttggttacctatgtacctgttaccactttcaaaaatcgtgcccgggtgttgggaggtctcccagacgtggt

SEQ ID NO: 323194 - DNA, 74 bp, Homo sapiens
ggagctctgcattgaaggcactggggtggatcatccatgccatggagtatgaacttcagatccgtggcggagac

SEQ ID NO: 323195 - DNA, 75 bp, Homo sapiens
tttcagcagcacaatcaacgcaaccacagaaacaagtggtacaggttctagtaaataccgcttgctgtgttttga

SEQ ID NO: 323196 - DNA, 75 bp, Homo sapiens
agagaatgtaagacaggaaaataattaaatattcttaccgagggaccgacgtcatggttcggtgcctcaagctgc

SEQ ID NO: 323197 - DNA, 74 bp, Homo sapiens
gcgggactcaagtacaactcccggcacgagatacactggcagtgatgtctgtggacctgggcagtgagtccatg

SEQ ID NO: 323198 - DNA, 74 bp, Homo sapiens
ccaagttagatgccgattacccacttcgagtcctttattgtggagctaacaacctgagagaagattacaaattt

SEQ ID NO: 323199 - DNA, 101 bp, Homo sapiens
ctcaaaacctcgctccggaaaggggacacctggggttgatatagaagcagctcgaaaggaagaagaacggatcatgcttagagatgccaggcagtggctaa

SEQ ID NO: 323200 - DNA, 50 bp, Homo sapiens
gacaagaccatcgagctcatggaattttggagagtaaaaggctgaacctt

SEQ ID NO: 323201 - DNA, 50 bp, Homo sapiens
ccagctccatggtctggcaggttcttgagttaacttaccaagactggtta

SEQ ID NO: 323202 - DNA, 90 bp, Homo sapiens
caattggcaatgcagcagcagctggcaaacagcttcttcccagatacagtagctgctgctggtggtgacaatgtcaaataacggcctaga

SEQ ID NO: 323203 - DNA, 75 bp, Homo sapiens
ctgctgccgccccttgggctaaaaggagctgaaaggcgggaaggcttattccaaggtaagaggggctgtgtgaag

SEQ ID NO: 323204 - DNA, 100 bp, Homo sapiens
caagagtttgctcctggctgctttgatgtcagtgctgctactccacctctgcggcgaatcagaagttcagaatgaccgaagaagcatgccgaacacggag

SEQ ID NO: 323205 - DNA, 100 bp, Homo sapiens
gggatgtgatgatggagaactacagcaacttactctcactgggtttgtccagaggggttgcgtttatccggtttgacaaacggtcggaggcagaagaggc

SEQ ID NO: 323206 - DNA, 90 bp, Homo sapiens
ggattataggcgtgagccactgcacctggcacagtcggcagaaccaattgaaagaccaacagcaacagcaagtggtatcgttatgtcctg

SEQ ID NO: 323207 - DNA, 80 bp, Homo sapiens
gtgtttcatcatatatacgactaagatatcagcacaatttggaatctaaaggacattattccatgcaagagtcaagcaga

SEQ ID NO: 323208 - DNA, 80 bp, Homo sapiens
ctgctcaagatcagaaatttcaaagagaacttatacagaatggttttacaagatacgtaggtaacctttccagagatgtg

SEQ ID NO: 323209 - DNA, 100 bp, Homo sapiens
ctacgtgaacaacctgaacgtcaccgaggagaagtaccaggaggcgttggccaaggtgcctccggagccagcgtggtggccatagacaacaagatcgaac

SEQ ID NO: 323210 - DNA, 75 bp, Homo sapiens
caagttgcttttggtgtacagggtctgggatgggtgtacgaaggaagcaagaaataaactatcaatcttgcccag

SEQ ID NO: 323211 - DNA, 111 bp, Homo sapiens
aaaaatggaccaacttctttggcaagtggacattttactggctcaagaggagttgaccacaccaaaatgagtctacatggtgctagtgggggacatgagagatcaagagat

SEQ ID NO: 323212 - DNA, 90 bp, Homo sapiens
tgcatgcttctgtcaaaaacaaggttctggaaacaactgggcatatggctccagaacctgggtatcaacccagcaaacattggcttcagt

SEQ ID NO: 323213 - DNA, 101 bp, Homo sapiens
atgttttgctagctgctaaaaccacctttgtcaccagaatgaatgaagtgcttcagatttaaatagtaccttgttatcccataactttggtatcctgaaat

SEQ ID NO: 323214 - DNA, 83 bp, Homo sapiens
gtcgttcctgggcaagctgggcggcaccctggccaggaagcggagggcgcgcgaggcccgaccctgcccgccctggactggca

SEQ ID NO: 323215 - DNA, 50 bp, Homo sapiens
gctgtggaaagaagttgcaaaacactggattggaaaatgccttttatgaa

SEQ ID NO: 323216 - DNA, 100 bp, Homo sapiens
acatgtactacagccagtcttctatgtttccacatcggtcagaaaaagatgaaaactttattctcaagagatttctcattccgcagaaataaggatctgg

SEQ ID NO: 323217 - DNA, 83 bp, Homo sapiens
ctttgcctccaagaaagtccaatctgatgggcagattgtgcttgtagatgactgatactagtagtagtcaaccaaagcctttc

SEQ ID NO: 323218 - DNA, 83 bp, Homo sapiens
agaagatcatcattaaggacggaggcacgtcaactgcttggaccagcatgttcggaagtcccccgagagcgttgctttgatct

SEQ ID NO: 323219 - DNA, 106 bp, Homo sapiens
gcggatggccccaggtgtaagcgcagaaagcaggcgaacccgcggcgcaataacgtgtcacaccatgtctgaccggaaggcagtgatcaagaacgcagacatgtct

SEQ ID NO: 323220 - DNA, 100 bp, Homo sapiens
gtctggagtttgatgaggagcgagcccaggttccagtgggatgggagcttatcacggaaaacatagttttgatactttttctcatcagcgtccctgttta

SEQ ID NO: 323221 - DNA, 98 bp, Homo sapiens
ggacctcccagcgaccactgcagcctgcggacgaggccgggacttggccgagcggatcctaataaggggaaaatggttttcccatcatatgattcccg

SEQ ID NO: 323222 - DNA, 100 bp, Homo sapiens
cgcgggcgcccgaggggccgagcgaggaatgggtaccacagaccatgtcatcgtcctggcgtccacgaaccgagctgacattttggacggtgctctgatg

SEQ ID NO: 323223 - DNA, 75 bp, Homo sapiens
agaaactagagcaaataaccgttttgaaattgtgtttcccattaaacactaccaggacaaaatcaggccttacat

SEQ ID NO: 323224 - DNA, 97 bp, Homo sapiens
aagttcctgtacaaccagaagcgacacaggtaccagcaacttcaaggtttctgccagcccactgttgtatacgcttattgagaaaacaatgcaaaat

SEQ ID NO: 323225 - DNA, 83 bp, Homo sapiens
gggatggcgtgcagcgcaaccacgagacggccttccaagatcttcgtgaagactctgactggtaagaccatcaccctcgaggt

SEQ ID NO: 323226 - DNA, 82 bp, Homo sapiens
aggactttcagaaagaagagggtggttgaaattatccaatgacgaaatcaaacgggcaattctaacaatggacgaacaggaa

SEQ ID NO: 323227 - DNA, 50 bp, Homo sapiens
atgcaaaaaaggaggccaaagactttgaacgtcaaggtcgtgggaaataa

SEQ ID NO: 323228 - DNA, 75 bp, Homo sapiens
ttgtgtatctggagaaaatagagctgcagatctgggacacggccggccaggagcggttccgcaccatcacccaga

SEQ ID NO: 323229 - DNA, 83 bp, Homo sapiens
ggagaagtggagaagcacacatctcagaaagaaagacgagaatccaggacttgaatcgtatcttcccactttctgaggactac

SEQ ID NO: 323230 - DNA, 100 bp, Homo sapiens
ctgttcccagaagcgaagtggagagcgccagagtaatgggtttggaaagaaatcccggcctgcaatgtatgatgtgagccccatcgcctatgaagattac

SEQ ID NO: 323231 - DNA, 75 bp, Homo sapiens
ggctggcggtgcctggacgtacaatggtagacggaggagaagtccatccccaccacccaccagaaggcgacggtc

SEQ ID NO: 323232 - DNA, 100 bp, Homo sapiens
agaccggcctcgcggagcccgcgcgccgagccccacattgttaaaggaaatgggctggcaggaagacagtgaaaatgatgaaacatgtgctcccttaact

SEQ ID NO: 323233 - DNA, 100 bp, Homo sapiens
ttctactgggtggataccaccgaatggtctaagattttcagaatgactgacactgccgaagctgttccaaagtttgaagagatgtttgctagtagattca

SEQ ID NO: 323234 - DNA, 100 bp, Homo sapiens
ctttggttctctcattctgggcttttaccagaaggcataggtggtggaatgggtagcatgaacagtgtgactggaggaatggggatgggactggaccgga

SEQ ID NO: 323235 - DNA, 75 bp, Homo sapiens
ctaccatgtcagccttcccagtagctgggaccacaggtcatttgaaccaattctccgcctccttccccagggaat

SEQ ID NO: 323236 - DNA, 100 bp, Homo sapiens
agatatcgggctgaacggtcaaagacattcacaacatggatgctctggattaatcgaattacagctgctagccaggaacatggactgaagtatccagcgc

SEQ ID NO: 323237 - DNA, 99 bp, Homo sapiens
cgagcggcggcggcggcagcgggtcttgggtcctccgagagcagcagcggccttacgagcaaaatatggaattagagatgacatggtcttgccatttga

SEQ ID NO: 323238 - DNA, 104 bp, Homo sapiens
ggctgaagcgactgagtccgcgatggagggggaaatttgcagtggtgagaaaatgtataaagaaagattctgggaaagaatttgctgcaaagttcatgagaaaa

SEQ ID NO: 323239 - DNA, 100 bp, Homo sapiens
gcattgctgggagcctgaaaactgtgaatgatattgatgatgttaagaagttcaaaccgggttacctggaagctactcttaattggtttagattatataa

SEQ ID NO: 323240 - DNA, 89 bp, Homo sapiens
tggccaaggaggaagggtggctggcagagcacatgctggtggaccccaagttcctgaggaacatgcgctttgccaagaagcacaacaaa

SEQ ID NO: 323241 - DNA, 76 bp, Homo sapiens
gtgagctgtatggagcagttgacacgtagtcactgggaaggatttgcctctgggttgatggtgcatgttgataaaa

SEQ ID NO: 323242 - DNA, 100 bp, Homo sapiens
ccatctccttctctaagagatgcctgcagcctgccatgggacgtggggtccaccggtacagggatacccacccaccatcccagggtctacaacatccaca

SEQ ID NO: 323243 - DNA, 100 bp, Homo sapiens
ttggagggccttccccctagcacctcctcaggccagccacccctgcaggacatgcttgctagcaatgtctcccacactgtggtcctgcgccctctcaagg

SEQ ID NO: 323244 - DNA, 95 bp, Homo sapiens
gatgacacccaggaggcatttgaagttccattcctgtacagccggggccagcgggagctgagcgtgcgggacgtgcaggccacacgcgtgggcct

SEQ ID NO: 323245 - DNA, 75 bp, Homo sapiens
gtgggggacctgccggcacgcgactccccccgggcccaaaattggtttatcttggaagctaaagggcattgctca

SEQ ID NO: 323246 - DNA, 90 bp, Homo sapiens
actactccgtgacctggtacatcgccgagttctgtttccactgtatccaaaaggaggggagaagttgcagtttgattatggtgtctatct

SEQ ID NO: 323247 - DNA, 101 bp, Homo sapiens
gatgggtgagagatgtgatcactggtttcgtggcctgaccaaggacctccaaggtggctggccgtgcggctggagtgtgtgggcaactgcatcgttctgtt

SEQ ID NO: 323248 - DNA, 100 bp, Homo sapiens
cgagagcctctaggtgtaaggaaggtgatgtcgtaaagccgggagtgtcgtaaaccaggcccgatgagagaaagggaaagttaaggatgctggagcagaa

SEQ ID NO: 323249 - DNA, 90 bp, Homo sapiens
gctaagtgttcgctacgcggggctaccggatcggtcggaaatggacccctatggtgtagccgtgggtggaactgtggggcactgcctgtg

SEQ ID NO: 323250 - DNA, 99 bp, Homo sapiens
tgctgctaccatagcaatcaatgtcttttccatcatgtacacaggagcaccagggttctccaaaaaatgtggaatcctttgcatctatgctgagacatt

SEQ ID NO: 323251 - DNA, 102 bp, Homo sapiens
tgaccgagagcgcgaatatcgtcatcgttagaagataagaatgtgccttttgatgaaagaactttatctttctacaatgaagagtggaatttctatgtttaa

SEQ ID NO: 323252 - DNA, 100 bp, Homo sapiens
tatatattgcatcttcctctggctctacagcgactattgggaagaagttacctgcaactacagcaactccagactcatcaaaaacagaaatggacagcag

SEQ ID NO: 323253 - DNA, 85 bp, Homo sapiens
tggactgacctgctaaccaatatcccagccgtccaggagaagctccaccagtatgaaaacccatggacaatcccgaatatgttgt

SEQ ID NO: 323254 - DNA, 101 bp, Homo sapiens
caaggattggtccgacctcgtaacgccacaaggaataatggaaacgcctagctcaatctgtccgaaacacctctggctcagaacctgtggctccaaacctg

SEQ ID NO: 323255 - DNA, 89 bp, Homo sapiens
acgggatccagagcgccgcgcacttcgtcatgttcttcgcgccctggttttgggatttgagattgacgcggtgaactctgtccagtttt

SEQ ID NO: 323256 - DNA, 104 bp, Homo sapiens
tctctgcatcccagccatcacctggatttacctgttttctgggagcttcgaagttagggcctagtcaaaattttgaagctgagtcaattcaagataatgcgcat

SEQ ID NO: 323257 - DNA, 76 bp, Homo sapiens
ggctccctgcagtaccctttaacggtactccaaagattcaggtttactcacgtcatccagcagagaatggaaagtc

SEQ ID NO: 323258 - DNA, 75 bp, Homo sapiens
gtcggcggctgccctcccagaggaactggtgctcctatgtggtgacccgcaccatctcatgccatgtgcagaatg

SEQ ID NO: 323259 - DNA, 100 bp, Homo sapiens
cgcgtggctggaagacatggccactccagtcggtgttgagcacggcgagcagtctcaggcctttagtgatgatgcatcagaggctccttgaaatgctaga

SEQ ID NO: 323260 - DNA, 75 bp, Homo sapiens
aagggggacctggaggtggagctgtccttccgcaagacaatgcagatcttcgtgaagactctgactggtaagacc

SEQ ID NO: 323261 - DNA, 75 bp, Homo sapiens
gacaacgacggcggtggtgacgggcaccgggctcgcggtgtcttctacaaatgcttctgggaactggaggaccca

SEQ ID NO: 323262 - DNA, 101 bp, Homo sapiens
attcttccactgatatctcaaaaggtgatctggacaaaggaacaggtatctcagacacgatgaggcgagtggtacgacagagcaagtttcggcatgtattt

SEQ ID NO: 323263 - DNA, 75 bp, Homo sapiens
ctggactcttcctaagcaagtccgtggaattcggtgcgatctgtaagtcgttgtcgaagcaggagtttaagtccc

SEQ ID NO: 323264 - DNA, 98 bp, Homo sapiens
tgttgctcccgcctgagcccagcccccagaaaggattgtgacatatcgttggacccagaattgagccaaaattgaccaagaggcagaggaaaattcac

SEQ ID NO: 323265 - DNA, 98 bp, Homo sapiens
tgtgggaagaaaagagccacagaagatgttttggtgaagatcagcattaagcccacctgcacccctgggtggcaagaggcatttcatccttcatgaag

SEQ ID NO: 323266 - DNA, 83 bp, Homo sapiens
ggaatctgatggaacccctgaaaacaaccctctggcaggtactaccgtggtgcagtgggcgccctgctggtgtacgacatcgc

SEQ ID NO: 323267 - DNA, 75 bp, Homo sapiens
gactcgtggggctgcagcaccggtgcagtcagcctcagtttccaaagccggaaaaggatcctctagtagccacgg

SEQ ID NO: 323268 - DNA, 75 bp, Homo sapiens
gtggagtttgatgttgttgaaggagaaaagggccatggtggctgtgggcggtaccagcccaggatccggcgttct

SEQ ID NO: 323269 - DNA, 100 bp, Homo sapiens
cgagaagccggtacaggtgccctgcggacacgttgaacacctacctcttcatgatgcaagcccaaggcattctgatccgggacaacgtgagaacaatcgg

SEQ ID NO: 323270 - DNA, 100 bp, Homo sapiens
ctacctctttcctgctggctttggagcctgagctcgaggcccggctggcgcacctgggcgtgcagaatggagaagctgatgccatgagcttggatggagg

SEQ ID NO: 323271 - DNA, 74 bp, Homo sapiens
cccacgccagacacgacgtctggcaggaacctcggcctcagaggttttgggatttgagattgacgcggtgaact

SEQ ID NO: 323272 - DNA, 94 bp, Homo sapiens
cgcagatgtggacttgaaagaagctgcagcggaggaaggcgaggaaaattgcctaagaattatgacccaaaagttaccccagatccagaaagat

SEQ ID NO: 323273 - DNA, 100 bp, Homo sapiens
gaaaagcaaaaaaatgctcttggaacaccttccaccatgaccacctcagcaagttcccacttaaataaaggcatcaagcaggtgtacatgtccctgcctc

SEQ ID NO: 323274 - DNA, 88 bp, Homo sapiens
gttccgcgccgggcgtggacggtgtggggcggtcccggccccgcagactctaaaatagagctcaagcttgagaagagagaaccactaa

SEQ ID NO: 323275 - DNA, 82 bp, Homo sapiens
aaagccaggccccgaggacaagttgcatgagcagagtggtggacatgacaacagagtcaactgcatacagtggcatcaagac

SEQ ID NO: 323276 - DNA, 50 bp, Homo sapiens
aattccagtcaaggccctaaaatatagggggaacacacctgaaactagag

SEQ ID NO: 323277 - DNA, 74 bp, Homo sapiens
cttggaagcaagtgctccactggaaaataaaagccacgtgggttggccaacggtccagatgtgctggagacaga

SEQ ID NO: 323278 - DNA, 100 bp, Homo sapiens
ctcatcattgtgttaatggtgaagcacagcgattccccaattaccagctctggctgggtcgccacaacttgtttgacgacgaaaacacagcccagtttgt

SEQ ID NO: 323279 - DNA, 90 bp, Homo sapiens
ccgcttcctggagaaggcacagcggctgtatccgacgccgcgagttcgcgctactctcctctgcaaggcctaccgtgggggccacttaac

SEQ ID NO: 323280 - DNA, 127 bp, Homo sapiens
ccgcgagcacagagcctcgcctttgccgatccgccgcccgtccacacccgccgccaggtgctggagaatctggtaaaagcaccattgtgaagcagatgaggatcctgcatgttaatgggtttaatgg

SEQ ID NO: 323281 - DNA, 75 bp, Homo sapiens
ccggtgttctacaaactgggaattaccagcacctacgaggtagcagaaggtcaagaaatttgtgtgattgaagcc

SEQ ID NO: 323282 - DNA, 90 bp, Homo sapiens
ttccaccccggcgggagctgtcaggttggctccgcaatctacctgttactcgtattttggacaatcttatggagatgaagtcaaaccccg

SEQ ID NO: 323283 - DNA, 98 bp, Homo sapiens
caagtggggcgatgctggcgctgagtacgtcgtggagtccactggcgtcttcaccaccatggagaagtccaaggcactgcgggagcgctggctgctgg

SEQ ID NO: 323284 - DNA, 74 bp, Homo sapiens
tggacacctcgggggtttcctgctttatggcgaaggtccaacatgtttaccgtggctgatgtgttgagtcaaga

SEQ ID NO: 323285 - DNA, 75 bp, Homo sapiens
cttaaggaaggctttatgaataaggagccaaatgggcggactgttgaagtggctgagggtgaagctgttcgaaca

SEQ ID NO: 323286 - DNA, 100 bp, Homo sapiens
atctgaactatatcctgggttccagaaaaggcagaggttcttaccgaaagcaggaactagaggctgctatccagccagatactagcctggtgtcagtcat

SEQ ID NO: 323287 - DNA, 101 bp, Homo sapiens
tgtggcagatatcgaggtggatggaaagcaggtgacaaaaggtgagacactcacctagaacagtgccgtgctgctgctgggaagttgctttacacaacaca

SEQ ID NO: 323288 - DNA, 75 bp, Homo sapiens
gtatttgcctgaagaaggtcagtgtgcttgcttggagatcaggacgcaaagctgatgttctaatcatgtcagata

SEQ ID NO: 323289 - DNA, 100 bp, Homo sapiens
atcatgtcaagcgaagccttgaaaaagctgccctgagacggtgtcccgccgaaaggtgaaaaaccttttgaatgtccaaattgtcatgaacgatttgcta

SEQ ID NO: 323290 - DNA, 89 bp, Homo sapiens
gggaaatgcaaatgcaacagtgacaaaagtacttaaagatgtggtgaaagtgggagatacattggatcttctcattggagaggataaag

SEQ ID NO: 323291 - DNA, 100 bp, Homo sapiens
accaccaataggccaggactgtcctgtggacagacggggtgagcctcttcttgtgtctggagattctgaaatcaccacgacagcagcatgcatgatggac

SEQ ID NO: 323292 - DNA, 76 bp, Homo sapiens
aacaaaaccaaaggccgaagtacaagatctaaggctcttgtctgcttgctgcccttgaatttcctccaaagaaact

SEQ ID NO: 323293 - DNA, 75 bp, Homo sapiens
tgtgacacaaggaaagtattctacagatccaatggatttgaacagaagcgctttgccaggcttgccagcaagaag

SEQ ID NO: 323294 - DNA, 75 bp, Homo sapiens
ccttctcacttggcctatggaaaacggggatttccaccatctgtcccagggactttgaacatgtcggggatcgcc

SEQ ID NO: 323295 - DNA, 100 bp, Homo sapiens
ccctcgctccctctgctcttcctcccttcgctcgcaccatggtatccaccaacccctcctccaacatcgatccaggcgactatgttgaaatgaatgattc

SEQ ID NO: 323296 - DNA, 83 bp, Homo sapiens
tatccccagtggagccggagtgcgggcgcgccccaccaccgccctcaccatggtgctggctgccagctgctgcgccccccatg

SEQ ID NO: 323297 - DNA, 98 bp, Homo sapiens
tgtggagcgcttctttaagggctacgggaagatcctggaggtggatctgaagaacggtaactctcaggagccttctccgcagttggcttcctcggtag

SEQ ID NO: 323298 - DNA, 51 bp, Homo sapiens
ctggtgcctgtgcaagttgttgaggtgatacagttaatattggagatgtat

SEQ ID NO: 323299 - DNA, 80 bp, Homo sapiens
gcattgactggaaacaatggcatttacagaaagagtcaacagcagtggcaacaggagacctgacagatgccaaaacaaag

SEQ ID NO: 323300 - DNA, 100 bp, Homo sapiens
ccgcggctacgctgaggctctccgctcagggagactcatgcatctgtatgccgtgtgcgtggactgcctggaaggggttcacaagatcatctgcatcaag

SEQ ID NO: 323301 - DNA, 100 bp, Homo sapiens
ctgatattgatattattacagcttcatatgcaccagaaggagatgaagatcaatgagctgagcaatgttcctgttcctgtcatgctaatgccagatgact

SEQ ID NO: 323302 - DNA, 100 bp, Homo sapiens
gagccgccgccgccatctgagggaggctgagtatgagtttatcagctctggtctctacctagtggtgttattgcacttgtgcgaacaaagcttttctgat

SEQ ID NO: 323303 - DNA, 100 bp, Homo sapiens
gagactggcatcctcatcgcctctctggacagcgtggccccgatcctctccatatgagcagcaccagcagtaagagggctccgaccacggcaacccagag

SEQ ID NO: 323304 - DNA, 75 bp, Homo sapiens
ggattatttactcgatgatggaactctggtggtttcaggaaggtagtaagcattaataatgtctttcatctttga

SEQ ID NO: 323305 - DNA, 100 bp, Homo sapiens
ccggcagacactcctcatcttcttccaagacctgcacatccgagatcatgaccatgatgggaagctgtcttttgcagactatgaactggctgtgagagaa

SEQ ID NO: 323306 - DNA, 75 bp, Homo sapiens
ccacatcctcccaggcccttccatggactgaccagggtcctgggtgccagcggtttccaacctagatgaggaaag

SEQ ID NO: 323307 - DNA, 100 bp, Homo sapiens
tgcttttattgagaaacattggacttttttactagggaataggatgattgtcttttgaaagtgtggtatcctatgactggttggaagtcttcaattatac

SEQ ID NO: 323308 - DNA, 101 bp, Homo sapiens
gaagcggaacagccacagcagcctcccaaggagtctgcaagttggaaccaccagctgctgcatcccatggccaggggtggcgtccaggtggcagagcagct

SEQ ID NO: 323309 - DNA, 75 bp, Homo sapiens
aaacatccagggatctatttgtttttagtccatcccaatgaaatggtgtcattccacacatccacaaatctctga

SEQ ID NO: 323310 - DNA, 100 bp, Homo sapiens
tcttcacccgcaccatgatcgttatgaatgatcagctcgacacttcatgcaccagatcatcacagggatgttgtatcttcattctcatggtatactacac

SEQ ID NO: 323311 - DNA, 83 bp, Homo sapiens
acctgggcgagcagcggcgggggcccgagggaagccatgcagtgacacccgctaagacttgttggtagccatgtcggagcccc

SEQ ID NO: 323312 - DNA, 100 bp, Homo sapiens
tcctccaacaccaatcatcccagacgacagcaactctggaaagtggcttctaactcggcgcattttcttagtggatgcagtaagtggacgagaaaatgac

SEQ ID NO: 323313 - DNA, 100 bp, Homo sapiens
agcccggcacaatgcagccaacaagattctgaagaacatgtgtgagcacagcaacaccctggtccagcaggccatgatgattgttctctggggccggact

SEQ ID NO: 323314 - DNA, 75 bp, Homo sapiens
cgagaccattccgtatggagagccggtgcccaccagaagtatgtccgacaagcctggcagaaggcagacatcaat

SEQ ID NO: 323315 - DNA, 74 bp, Homo sapiens
gcgagaggtgcggcgaaggaggcagaggcacttatgcttgtcagggtcctgtattaataggaagttcacatggt

SEQ ID NO: 323316 - DNA, 100 bp, Homo sapiens
ttggtatcactaggaggcccagatgacggaaggaatggttttagggaagactgttgccggatgacaaggctgtcactattgttctgtactacctgacatt

SEQ ID NO: 323317 - DNA, 100 bp, Homo sapiens
cgctgctcatcgtttgcgacgttccctcagcctctgcccaaagaaagaaggagggtcatcaggagcaagagggagaatcctcagagtctgttgttccaga

SEQ ID NO: 323318 - DNA, 82 bp, Homo sapiens
ggacttggtccgcggcatccgtaaccacaaggaggacgagaggctgggaggcggcagaatgcagccagaggagggcacaggc

SEQ ID NO: 323319 - DNA, 75 bp, Homo sapiens
agcctcaagccgctgctcttcgagctgatgttcctggagaccagcgctctcacaggcgagaacgtggaggaggcg

SEQ ID NO: 323320 - DNA, 75 bp, Homo sapiens
ttgtgatggcccaggttcttcaaaagatatatggtccggaaaaagaacccccctctgagaaacgttgcaagtgaa

SEQ ID NO: 323321 - DNA, 75 bp, Homo sapiens
atccccgaatccgatgtccccagcacataataacttgggtgctggagaatctggtaaaagcaccattgtgaagca

SEQ ID NO: 323322 - DNA, 50 bp, Homo sapiens
tgtgcaaacccgagagaactggggaagtcttctgaccaactggccctccg

SEQ ID NO: 323323 - DNA, 82 bp, Homo sapiens
aaggtgcgacagctctggtcagaagactcctgcgaatctggaggtctcttttccactggagcctactttgaaatcagctgag

SEQ ID NO: 323324 - DNA, 89 bp, Homo sapiens
taaatgttgagcctttttggcctggcttgtttgcaaagaataaccatgtgcatggacagccatatacaggcccagcagcacatcacatg

SEQ ID NO: 323325 - DNA, 90 bp, Homo sapiens
gagatgtatacataaagctacaaacatggagtttgcagtgaagattgctggactcgctgaagagagactacgcaggaaagccccagccac

SEQ ID NO: 323326 - DNA, 90 bp, Homo sapiens
attttatctgccacgacccagaaggtgctggagaatctggtaaaagcaccattgtgaagcagatgaggatcctgcatgttaatgggttta

SEQ ID NO: 323327 - DNA, 82 bp, Homo sapiens
ctcgtcgacatgagtgatgtggaggaaaacaacttcgagggcagagtcagcccaaggccaaccccactgtcactctgttccc

SEQ ID NO: 323328 - DNA, 98 bp, Homo sapiens
tcagaaggagctggcggacatcactttagaccctccacctaattgcagatcattgctgaaggtgccaatgggccaacaactccagaagctgacaagat

SEQ ID NO: 323329 - DNA, 83 bp, Homo sapiens
cacgccatgcagctgctgacggcaggacccagatgatgtggtaccagttggccaaagaagagcctggtgttggtgcatgtgct

SEQ ID NO: 323330 - DNA, 83 bp, Homo sapiens
aaaaaactacacggaagagctgaaagtgcccccagatgaggagtgtggccatctggggccgtgtggtatttgccactcaggag

SEQ ID NO: 323331 - DNA, 100 bp, Homo sapiens
aaccccagccgaccttgagctccaggagttcgtctcttacgtctgcggaagtgcagctgcctcagttcttagcgcaggcacccaggcatgtggaatatgc

SEQ ID NO: 323332 - DNA, 100 bp, Homo sapiens
tgagaaccctacttgcctaaatgaggaatgtctttcctaccatctaaaatacgaaggtttctggctgggttaaaaatgtgtctgcaggcacacaggacgt

SEQ ID NO: 323333 - DNA, 98 bp, Homo sapiens
ctgatcctgcggccccagtatgagatccaagccatcatgcacaagcccccctccatgcgcctgaaggcccgacccagcagccctggcttttccgtgct

SEQ ID NO: 323334 - DNA, 88 bp, Homo sapiens
gaataccctagaggaacatccggagacttcactgcccaaacaggaagtctatgatgagtacaaactcttggatactaaattgatggcc

SEQ ID NO: 323335 - DNA, 74 bp, Homo sapiens
attcagtttcttggtacagtggcagacatctggtccctgggcataacagctattgaacttgcaagaggggaacc

SEQ ID NO: 323336 - DNA, 98 bp, Homo sapiens
aagcaaattagctgagaccacagataaagtcaaacaaggcttttgggaagaatttgagacattaaaactaccactactatggaagtaccactactaga

SEQ ID NO: 323337 - DNA, 50 bp, Homo sapiens
tatgcctactctcaagaaatggggtggtggttggagccccccaaaagata

SEQ ID NO: 323338 - DNA, 121 bp, Homo sapiens
gcggcggcgtggagcagcatgtacgccaaggggggcaagggttcggccgtgccctccgacagccaggcccgcgagaaaacccagcgggtgccgcttctccacccgaggcttccacctccaa

SEQ ID NO: 323339 - DNA, 75 bp, Homo sapiens
aagcattgctattacaactgtaagccaggagtgagctaatgtcaaaccccgaaattccacaccacctagtttggc

SEQ ID NO: 323340 - DNA, 98 bp, Homo sapiens
tcgggttctgacaagatggccgggctgccccgcaggatcatcaaggtgagccctattcccagaggcaggtggtgctgaccctgtaacccaaaggagga

SEQ ID NO: 323341 - DNA, 82 bp, Homo sapiens
gaagtcccacagaagctacagctgccaggtcctggtgcttgatggtcgaggccatctcctgggccgcctggcggccatcgtg

SEQ ID NO: 323342 - DNA, 75 bp, Homo sapiens
aagatgatccgggtataataatgaagttaaaagagcagcactccaaggatgaaaactttcggaagagaaagttgc

SEQ ID NO: 323343 - DNA, 101 bp, Homo sapiens
ggtgatttctgcatttccatctgagctgttccatttcctccaagtcaccggcttacagcaaaagaagtgtttgataatgatggaaaacctcgtgtggatat

SEQ ID NO: 323344 - DNA, 75 bp, Homo sapiens
aaggattccaagtaactcttatttgaaaggatcttgttcgagtagaagccacagtcattgaaaagacagaatcat

SEQ ID NO: 323345 - DNA, 51 bp, Homo sapiens
tccagttttttaagaagggacaaaaggaatgacaccaaggaagatgtcttt

SEQ ID NO: 323346 - DNA, 82 bp, Homo sapiens
gacaggcggcgccatcttcgaacttagacttccggaaggactttggcgaggaattcagaaggagctggcggacatcacttta

SEQ ID NO: 323347 - DNA, 75 bp, Homo sapiens
cggccccgcgcgcgcctcgaggccgagtcaaggagcatattaatgaaaagtgccataaactgaaaaaccaaacat

SEQ ID NO: 323348 - DNA, 73 bp, Homo sapiens
gacatctgggggccacaaatgctccttctcctggagacgcaactcaagagaatagtgacagtggtacaggaaa

SEQ ID NO: 323349 - DNA, 100 bp, Homo sapiens
aagaaattgctgcagattttactttatgtgagaaaatctacaatttcttcgagacactcatataaagtgagaaagatcagtctaaagaaaaggagaagaa

SEQ ID NO: 323350 - DNA, 100 bp, Homo sapiens
ggcttggggagctgcagcgttcggtgcttgtgaatgacttcttcttggtggcttgtcttgaggatttcattgaaaatgcccgtctcttcatatttgagac

SEQ ID NO: 323351 - DNA, 100 bp, Homo sapiens
agaacgtcaaacactccaacgattgagagcatttaaagatcaaatgcagccctgaggatttggctactgcatataacaacagggggcaaatcaagtactt

SEQ ID NO: 323352 - DNA, 74 bp, Homo sapiens
gataagacagtcccacagtccaggttgcccccaagtttcctggcagtgtgtgatactgaggaggtgagcttgtt

SEQ ID NO: 323353 - DNA, 76 bp, Homo sapiens
tagagagacgattccacttttcacagtctctaacagctgttgccaaaatggttcaacagtgctgtacttatgttga

SEQ ID NO: 323354 - DNA, 74 bp, Homo sapiens
cacggatcggattcctcagctacgaggaggcgctgaggagagttggagcagtgccagtcctttccaaagaatgt

SEQ ID NO: 323355 - DNA, 124 bp, Homo sapiens
ggtgtctcctcagctgtattcacacattccatcaccttgtcttaatggataatcatgcactagccaaatgtgtgatccccctccagaaaagacttgagtctttacagttggaatttccgtgtcg

SEQ ID NO: 323356 - DNA, 95 bp, Homo sapiens
ccgccttctgcctcagaacggcgtgactcggaggttgaaatcacaaagattagacacctttttagataggtgttcttcagcaccactgacaacac

SEQ ID NO: 323357 - DNA, 83 bp, Homo sapiens
gcccggcacgcggtgctggctctgctgaaggccatcgtgcaggggcaggacggcggctccctggaccaggtgctgaaagaggc

SEQ ID NO: 323358 - DNA, 98 bp, Homo sapiens
gcaaaactgcgctttctggctgaggagatggcccactgcgtgaccttggttcagctgtccatttcctgtgaccatctcattgacaaggacatcggctc

SEQ ID NO: 323359 - DNA, 100 bp, Homo sapiens
caggcgttccagacgattgcacggaatgcacttaagcagatggctgtatgggcgaaaaagatgaccgaaattcaaactcctgaaaatactcctcgtttat

SEQ ID NO: 323360 - DNA, 83 bp, Homo sapiens
ccgcgccgcgcctcagctctgagagcgcctgctcgctgtgcccccgggttatgacgacccccaataaaggaaacaaggccttg

SEQ ID NO: 323361 - DNA, 90 bp, Homo sapiens
gaaaaggtggagcgattagaatggtggagccgccaccaaaatgcagattttcgtgaaaacccttacggggaagaccatcaccctcgaggt

SEQ ID NO: 323362 - DNA, 75 bp, Homo sapiens
gacgccgcctggcaggccctgcgcaccagacggagtctcactctgtcaccaggctggtgcagtggcgtgatctcg

SEQ ID NO: 323363 - DNA, 75 bp, Homo sapiens
agctccacgtccgatgatgaacctccctcctctgtcagtcatggagcaaaagaagaggatgtggagaactttgac

SEQ ID NO: 323364 - DNA, 78 bp, Homo sapiens
gtcaaactggaaagatgcacattttgcctctggttggtggaaagaatccaagtttgaatttcaaggaagtaacttatg

SEQ ID NO: 323365 - DNA, 75 bp, Homo sapiens
accagcctcaagtttcacctatcctcactgatccgtggacttctgtatgatcagattcatgatgttgctatcaaa

SEQ ID NO: 323366 - DNA, 83 bp, Homo sapiens
gacttctggcaatttagagcaactactccttgctgttggaacagcgtttacattttctaaagcaacaggagcgccgtcagcag

SEQ ID NO: 323367 - DNA, 74 bp, Homo sapiens
ccttatcctctacctaaaattgatctcattgctattgcagactttgcagctggcttctccagaccacgccacca

SEQ ID NO: 323368 - DNA, 83 bp, Homo sapiens
gctggatatcttttaactgggctaccagcccgggcctcaaagttttgtgcaccgtccaggtgaggttagagctggggcatcgc

SEQ ID NO: 323369 - DNA, 135 bp, Homo sapiens
agcaaaagcatttacagcaacagcagttccttcagaggcaacagcaccttctcgcggaacagatcatggaagggaagtggttgctgtgtatgttactggtgcttggaactgctattgttgaggctcatgatggac

SEQ ID NO: 323370 - DNA, 100 bp, Homo sapiens
gcagatcacaaaggaatttccagagttagtagcaaggacggtgcgggcttcacagggccccgtctacaaaggagtctgcaaatgcttctgccggtccaag

SEQ ID NO: 323371 - DNA, 98 bp, Homo sapiens
aggacttggtccgcggcatccgtaaccacaaggaggacgagctaccaagatgaatgaactaatggagaaatagaaagtcttcagtgatggcctacgcc

SEQ ID NO: 323372 - DNA, 75 bp, Homo sapiens
agcggaagcggcctggcaggggaaggatcgagattacttctctaacaggatcaccagtttgctccacaaagcaca

SEQ ID NO: 323373 - DNA, 100 bp, Homo sapiens
gtgggctgcaggctgcatctttgctgaaatgctgactggtaaaaccctttttgcagtatggtttgaagtggtgaacatggatttttctcggcttcacatg

SEQ ID NO: 323374 - DNA, 50 bp, Homo sapiens
aaaggaaacacatttcatatactgcagattgcaaattcaactgccataaa

SEQ ID NO: 323375 - DNA, 100 bp, Homo sapiens
agcgccggccgcaccaccgccctctggccgttgcctcaccggacgccagcatgtctccggacgccaccaagccgagccactggtgcagcgtggcgtactg

SEQ ID NO: 323376 - DNA, 75 bp, Homo sapiens
tgaaccagtggtagaaagcacagaaactgaggggacataatcatcactcagtagcggatactctgttttcaagga

SEQ ID NO: 323377 - DNA, 75 bp, Homo sapiens
accacgctcgtgctcatctcctactgtcccacggccaccgaagagctaatggttgcagagaagaatggaacaatc

SEQ ID NO: 323378 - DNA, 88 bp, Homo sapiens
ggagcttcaggctcgctccgtgcggccattcgatgaggactatctaaaccatctcgagcctcccgtgaagcacatgtccttccacgcc

SEQ ID NO: 323379 - DNA, 90 bp, Homo sapiens
ctggtgctgctgatggaggcggtggccgtgctcgtcgggcccccttcgggaggcgtccgacctccgatcatgaacgggcccctgcacccg

SEQ ID NO: 323380 - DNA, 83 bp, Homo sapiens
agcagctgcggcggctcggggtgctctactggaaggtggtcctgccatcatggctgtcctctgcaaaggtctcctcgctcatt

SEQ ID NO: 323381 - DNA, 99 bp, Homo sapiens
gaatcattcttgcagcatttcgtgaaatggctagtgatgagctgaaagagatgcggaaaaacttgaccaaagaagccatcagagagcatcagatggcca

SEQ ID NO: 323382 - DNA, 74 bp, Homo sapiens
ccggctctgggctacggactatgggcgaatagctctgaccacccggcgaagttctaggtctcgttccagatcat

SEQ ID NO: 323383 - DNA, 75 bp, Homo sapiens
gcaagatgtccagtaatgtcccggcggatatgctaatgggaatgacagcaagaaatttaaacgagatagacctcc

SEQ ID NO: 323384 - DNA, 82 bp, Homo sapiens
actaaaatccagatgtcatattcactagccacagtgcagcctggccagaatttccacatgttcacaaaggaagaacttgaag

SEQ ID NO: 323385 - DNA, 100 bp, Homo sapiens
ctcggaaagcatctattgtgaaaaacctaaaggataccttaggtgtcatggagaaactccagctgggcccagagattctgcagcgggaaaatccaaggct

SEQ ID NO: 323386 - DNA, 100 bp, Homo sapiens
ggaaaagacaattgatgacctggaagtccagaagtggagaccactcccccggcccttgcatctgggcttccttgtgccctgccttggacagttggctgca

SEQ ID NO: 323387 - DNA, 90 bp, Homo sapiens
ctcgcgggccggggccacgctcagcgccgagggcgagatcgtgcaggaattgaatgatctggcacgggaccctccagcacagtgttcagc

SEQ ID NO: 323388 - DNA, 100 bp, Homo sapiens
gtgcgagtccatagctgaagaggagcgccagatggtggaggaatacacttatttatgaagtcagaagaggccaagtgatggaaatagtggattaatggca

SEQ ID NO: 323389 - DNA, 100 bp, Homo sapiens
caaatttacatgtattggagaccagaccagaagcccttctgaattaagctgataggaagatgtcttcaggaaatgctaaaattgggcaccctgcccccaa

SEQ ID NO: 323390 - DNA, 74 bp, Homo sapiens
ggagatcaagaaggagaccggctaggtctgcggggtttccgagaggctcgccgggatttctggcggggggctga

SEQ ID NO: 323391 - DNA, 75 bp, Homo sapiens
agatgaacagggttcctggggcatcgacgatctccatatttcattgcaaggagctgacatggacccaaatcctcg

SEQ ID NO: 323392 - DNA, 90 bp, Homo sapiens
gattcttcgacaaagtccaggacctgggcagagactacaagccaggcttggccaataacaccatccaggcctttagcaaaaaacagatag

SEQ ID NO: 323393 - DNA, 75 bp, Homo sapiens
caagagaacgcattgccactgatgcttgctgagccgtttgcacatccttatcaatatgaactaaatcactttacc

SEQ ID NO: 323394 - DNA, 98 bp, Homo sapiens
cggaggggacggtcaacgagggacgcccagaatcggacgcggcagatcaagactggtgccccttgccgatctgagcgcttggccaagtacaaccagct

SEQ ID NO: 323395 - DNA, 82 bp, Homo sapiens
cgagtctccgccgctgcgggcccgctccgacgcggaaggtgtgtgcagtggcctcagggatccggaaagtctaggactgaac

SEQ ID NO: 323396 - DNA, 75 bp, Homo sapiens
tccctgtctgggaccttctccctgcctggacccctactattgcaacaaggttaattatagaaaatgccaagtagg

SEQ ID NO: 323397 - DNA, 75 bp, Homo sapiens
agtggtcgcttcttctccttgattcaccctcatggcttaaatcatggatggcgctggttggcacagatcttaaac

SEQ ID NO: 323398 - DNA, 82 bp, Homo sapiens
cgccgaggcaccgaggcactcagaggaggcccggcagccatggcggtggaaggaggaatgaaatgtgtgaagttcttgctct

SEQ ID NO: 323399 - DNA, 90 bp, Homo sapiens
cccgttcttgcctcaggccagtcgcctccaggccaagagggatccttcacccgtgtctgagacgtctcccacaacctgctccgggcgctg

SEQ ID NO: 323400 - DNA, 100 bp, Homo sapiens
ccaccaacaacaccacaataatccacagccaagaaatgagccgtcagactgctacagcattacctaccggtacctcgaagtgtccaccatcccagagggt

SEQ ID NO: 323401 - DNA, 101 bp, Homo sapiens
ggcccgcaatggcgtctcaggcctggtaaccagccgcagcttccgtactgccagtgtcagcatcaaccagacagagggctggtttttaagtttggccgcac

SEQ ID NO: 323402 - DNA, 83 bp, Homo sapiens
acttacctcacctctaattagggacgaattggagaagaaggatggaggaattagcttaccgaaaggagatggtgagagctgac

SEQ ID NO: 323403 - DNA, 75 bp, Homo sapiens
ctcagcttcgagcttgtgccaaataccacatggaaatgaattctaaggttgaagccatccttgtcaatatatttg

SEQ ID NO: 323404 - DNA, 97 bp, Homo sapiens
tcactgcagcctcaacttcttgtcctcaagtgatcctcccaccttagcctcctaagtagctgggaccacagtgtttgattgcatcgaggtctatgcc

SEQ ID NO: 323405 - DNA, 87 bp, Homo sapiens
cttaccagctttgacaatacaggaaatgtttatttctctatgaatcatcatcaagaactctgggagaacttttgaattcataaccaa

SEQ ID NO: 323406 - DNA, 59 bp, Homo sapiens
caggagaactaccttcatccgagtcacccagcagggttcccttctggagaagagtcacc

SEQ ID NO: 323407 - DNA, 95 bp, Homo sapiens
tgacatcaccttattcacagacaactccaccaattgtacaggtgtgactgcacagaaaagttacaaaacaaatttgactttttgcgctcacagtt

SEQ ID NO: 323408 - DNA, 89 bp, Homo sapiens
tgagtctcaagatggacaaccgggatgttgcagacgcaaacatgcagatctttgtgaagaccctcactggcaaaaccatcacccttgag

SEQ ID NO: 323409 - DNA, 100 bp, Homo sapiens
agaaagatgtattctgaagataaacctttatcatctgagtccttgtcagaatcagagtatattgaggagtaatctatgccagcaattatgacaatgttag

SEQ ID NO: 323410 - DNA, 93 bp, Homo sapiens
cgctgcgccgcaacgccgagcgcaccgacatctgcctgctcaaagcaaaatgatgcttcaacacccaggccaggtctctgcctcggaagtgag

SEQ ID NO: 323411 - DNA, 102 bp, Homo sapiens
agcctctcgaatgggcacacctgtgtagtactgtatctggacggatggactgaatgcgctactcgggaaggacatgatgagcgacctgacgcggaatgacct

SEQ ID NO: 323412 - DNA, 76 bp, Homo sapiens
tggcgcttagtgtaccacatcaaggtcagcccaaggccaaccccactgtcactctgttcccgccctcctctgagga

SEQ ID NO: 323413 - DNA, 100 bp, Homo sapiens
ggctccataaaaaatgtggtcagtgaacctatcgaaggacatgaagactaccacatgatgcgttgacagaaggctacgttggggccctgcacgagaatag

SEQ ID NO: 323414 - DNA, 100 bp, Homo sapiens
aggtggtgtttgtccccgcaggcactcacactcctgggagccggctccagccccatggcctttctgtggtgctcacgtccccagcggtgttcactttcac

SEQ ID NO: 323415 - DNA, 76 bp, Homo sapiens
cgtggcaagcgagcccggggtagagtgatcaacaaatacaagcgcagacgatttcagaaaaccaagaacctgctga

SEQ ID NO: 323416 - DNA, 83 bp, Homo sapiens
caaccatcaatgagatcgaagacactttccgacctgcctagagctggaacgttacctccagagcgagccctgctatgtttcag

SEQ ID NO: 323417 - DNA, 82 bp, Homo sapiens
atccagcaaggtcggcagagcaaggggcttacgcagaaggacctggccacgacccctttgctgatgcaactaagggtgacga

SEQ ID NO: 323418 - DNA, 99 bp, Homo sapiens
gctcaggattggccagccacctctctcaactgtatagctatcctctttttaagggctgggagaactcaggaagcctgggaagctgccaaagaatgtcga

SEQ ID NO: 323419 - DNA, 75 bp, Homo sapiens
tttcatggattatcttacgtagataagacactgcaacagtgctggagaatctggtaaaagcaccattgtgaagca

SEQ ID NO: 323420 - DNA, 75 bp, Homo sapiens
gcgaaagaaaccctctctgagttcttgggcacgttcatcttgattgttaatgtgtgaaactgtgagatatgagag

SEQ ID NO: 323421 - DNA, 88 bp, Homo sapiens
cggccggagtcagcgatggtgcccggcgaggagaaccaactggtcccgaaagaggtttgaaagagaagatagtgaggagctttgaagt

SEQ ID NO: 323422 - DNA, 100 bp, Homo sapiens
gcaacctgctctattaccagaccaactacctggtggtggctgccatgatgatttccattgtgggaatatgctggtttatatgatgacatctccactcaag

SEQ ID NO: 323423 - DNA, 82 bp, Homo sapiens
atccacacatcataaagctttaccagatgcggcattccaaaagaactcactgtcctgattgggatagcagagaaagctgggg

SEQ ID NO: 323424 - DNA, 100 bp, Homo sapiens
ccgccagcgcgtttggctgtgacctgacggagtatctggaaagctcgggacaggatgaaaagcaaactcaagttcctgcctcctcaggcggagcaagaag

SEQ ID NO: 323425 - DNA, 100 bp, Homo sapiens
cgacacccacaagatcgccgtcctgtatgttggagaaggccaggggcgtgaggtcccaggaagtggccaaaagctagacagatccccgttcctgacatca

SEQ ID NO: 323426 - DNA, 100 bp, Homo sapiens
gtacgccacctactattacccccagtatctgcaagccaagctttccagagtgttgaatcttccaccagaaaacttgatcacatcaatatctgcagttcca

SEQ ID NO: 323427 - DNA, 100 bp, Homo sapiens
cgatccgcctgcctgcgcacctgcgccaaacaccagagcaccctagaaggtttaactaaaagaatgctcatgtttgacccagttcctgtcaagcaagagg

SEQ ID NO: 323428 - DNA, 90 bp, Homo sapiens
aaaggaccagacaaatcaaattagtggttttggacctagatgtgaaggctggtggaggctgtgtaatgaccattggagaaatgctacgat

SEQ ID NO: 323429 - DNA, 106 bp, Homo sapiens
ggccgccggggccgccatggagcccgactcggtgattgaggacaagaccatcgagctcatggaactgtggctgcaccatctgtcttcatcttcccgccatctgatg

SEQ ID NO: 323430 - DNA, 100 bp, Homo sapiens
tggcttccgtttgttggtggaggaggtggcaggcctcggcgccaagtatcttcaagaccttctcatggagagtgtgaatttttcccccgccaatctctct

SEQ ID NO: 323431 - DNA, 74 bp, Homo sapiens
tgcagatgcccctcctccaccagaggactgggaggagcatgtcaacaggtataattgaaatcctcaaaggaatg

SEQ ID NO: 323432 - DNA, 75 bp, Homo sapiens
cagaaggtcaacgccgcaggcacaggacaccagcagtgaaaacactgtggttcctccagaaacatatgtgaaagt

SEQ ID NO: 323433 - DNA, 85 bp, Homo sapiens
tgtcctttcaggaaggagccattatttatgtcatcaagaagaatgacgatgtacgaggatgtcgtccaggaaagattgtgcagat

SEQ ID NO: 323434 - DNA, 75 bp, Homo sapiens
cacaaaccctgtgaaagtgcctggggagtgttgccctgtgtgcgaaggtccttatcttgcttccctgccattgga

SEQ ID NO: 323435 - DNA, 75 bp, Homo sapiens
aactgaccgaattaaaatttatacttcgcaaaactcagcaattttttgatgagaccctgcgggagattgtgattg

SEQ ID NO: 323436 - DNA, 83 bp, Homo sapiens
gtgggattactagctgtaattgcaaataacatcattaccattaacaaggcagctagtacaccactgaatcctttaagctttca

SEQ ID NO: 323437 - DNA, 90 bp, Homo sapiens
ctggcggagctggagctggagctctcggaggcttgccgaactaaagcaagaatgtcttgctcgtggtttggagaccaagggaataaagca

SEQ ID NO: 323438 - DNA, 75 bp, Homo sapiens
ggcagcacagattcccttaaccaagggtatttctcaagctgccagatacgtttaccaacgactcatcaacgacgg

SEQ ID NO: 323439 - DNA, 98 bp, Homo sapiens
ccgccgccgccgccgcagagctgcagctcggggccgaggggcggcgactggcggcgcgatggacctgaccgggctcctgctggacgaagaaggcacct

SEQ ID NO: 323440 - DNA, 100 bp, Homo sapiens
ttaagaaacatcgagtcactttgcctggacaggaggaaccctgttggatggcaagcatgtggtgtttggcaaagtgaaagaaggcatgaatattgtggag

SEQ ID NO: 323441 - DNA, 75 bp, Homo sapiens
ggcgaacccgcggcgcaataacgaaaggacccaggagcgataacagtaaatcaaataagatatttgtcggtggaa

SEQ ID NO: 323442 - DNA, 100 bp, Homo sapiens
actacccacctagaagaggtgatgatagctttggagacaggtggttctcttcccaaagtggaagccaaattcatcaattatgtgaagaattgcttccgga

SEQ ID NO: 323443 - DNA, 75 bp, Homo sapiens
cccacatcaacctcctttccaagatggacctcattgagcattatgggaagctggaacatcgatatattgaactct

SEQ ID NO: 323444 - DNA, 90 bp, Homo sapiens
gctgctcagacgctccgagaagcttcaggcagcataacacttacaggactttccttatcccagttgattgtgcagaatacactgcctgtc

SEQ ID NO: 323445 - DNA, 75 bp, Homo sapiens
ccctcagctccgagtccagggcgaggtgtcagaaactatttaaaagaagcactggtgaatataattgccgtgcat

SEQ ID NO: 323446 - DNA, 90 bp, Homo sapiens
tctgaaaacagagtggttgtctctgactgcaaaattcaaaatggggctcaaggtattcgtttcatctacaccagagaaggcagaccaagt

SEQ ID NO: 323447 - DNA, 95 bp, Homo sapiens
ctggttttaatatatctactcccagaggaattccagacaaatcagagcctcattcccttagtagtgaagcattgatgaggagagcagtgtctttg

SEQ ID NO: 323448 - DNA, 100 bp, Homo sapiens
ccacaagctgctacccgtgggccggacggtcatggtcaacattgagcatcctggtggggaagaagttttaagggaacaagctggaggtgacgctactgag

SEQ ID NO: 323449 - DNA, 98 bp, Homo sapiens
agtacatcttgcaattcctaatgtgatgtcaagccctccaacatcctagtcaactcccgtggggagatcaagctctgtgactttggggtcagcgggca

SEQ ID NO: 323450 - DNA, 93 bp, Homo sapiens
cgcctccctcccgcgcgtgctgcgggtctgctcgggggtctacttcgaggacaatgcagatcttcgtgaagactctgactggtaagaccatca

SEQ ID NO: 323451 - DNA, 100 bp, Homo sapiens
cggacgtggaagtgtcgccccaggaaggctgcatcacaaaggtgaaatgacaatggatgctctgttggctcgattgaaacttctgaatccagatgacctt

SEQ ID NO: 323452 - DNA, 75 bp, Homo sapiens
ggatctcccacctttccaagcaaggccaggagccggagtcagagtggtggctacagtgaccggagctcgggcggg

SEQ ID NO: 323453 - DNA, 96 bp, Homo sapiens
gcggacagcattgggagcggccgagccatcccaattaaacagggtctaggtgctggagtgcgcacggaggccgatgtagaggaggaggccctgagg

SEQ ID NO: 323454 - DNA, 74 bp, Homo sapiens
aatatcaagaggaggagttgttggactattagaagacacattagtgcagaagcttccaggctgtagagccctgc

SEQ ID NO: 323455 - DNA, 51 bp, Homo sapiens
gacagaaccggcatacattgagtgccatctgggattgacagctcagcctga

SEQ ID NO: 323456 - DNA, 75 bp, Homo sapiens
gtctgtcagtgagatggcttctaacaagcctcttagcaaatatccggctgtgatcaatgatatttcattctggtt

SEQ ID NO: 323457 - DNA, 75 bp, Homo sapiens
ggccggtgaaggaccgcgaggccttccagaggctcaacttcctgtaccagtaagactttgaccccgacgcaggct

SEQ ID NO: 323458 - DNA, 100 bp, Homo sapiens
gccgagctttccgcgacggccgctccgaggacttccgcaggacccgcaacagcgcagagggaggagcaactgaagtcacatgaaagtaagctgaagcaga

SEQ ID NO: 323459 - DNA, 75 bp, Homo sapiens
gagggattctggcatcagggaggctttcagccggagaagcgagtttcagctggatgccaagtttgtggaggaacg

SEQ ID NO: 323460 - DNA, 102 bp, Homo sapiens
atcatcgtccggattggcagtggttttgacaacatcgacatcaagtcggccggggatttagacaatgcagatcttcgtgaagactctgactggtaagaccat

SEQ ID NO: 323461 - DNA, 82 bp, Homo sapiens
tggaagcctacgccctggggctggacaccagccagcatcacccgtgtccccttctacgacctggtctctactcggaagaaga

SEQ ID NO: 323462 - DNA, 100 bp, Homo sapiens
agcccaagcccatcccctatatttatggcagtgtccccggagctgaaagatcgcaaagaggatgcgaaagggatggaggacgaaggccagaccaaaatca

SEQ ID NO: 323463 - DNA, 90 bp, Homo sapiens
cccggtttgacgcacacggcaccaaactgatctttccaattaaagatgtacccctggagactgatgaccttaccacttggctctatcagc

SEQ ID NO: 323464 - DNA, 76 bp, Homo sapiens
tggtggtcctcccagacaccttgctaatggcagcattagccgctgttgggcctcctaatcctcgggcagatccaga

SEQ ID NO: 323465 - DNA, 73 bp, Homo sapiens
ataatcagagtggaggaagtacagccagcagctctgccagaccatgaggatgagatcccggagacagtgcgaa

SEQ ID NO: 323466 - DNA, 100 bp, Homo sapiens
ggtctgcccacccaacgcgaagacggtgtcatggagaaactccagctgggcccagagattctgcagcgggaaaatccaaggcttatttatgccaggctga

SEQ ID NO: 323467 - DNA, 100 bp, Homo sapiens
cctccttgcgcctccgattcccagaaactaatggcagatcccggaaatccagacttgtatcatgtattaagtgttatctggcaattagcttgtgagatta

SEQ ID NO: 323468 - DNA, 59 bp, Homo sapiens
cctcctccagctgttgttgctgctgggcaagtgtccagagaatggctgggatgaaagta

SEQ ID NO: 323469 - DNA, 75 bp, Homo sapiens
catattgcagttcttgtcaatgacctggatggcactggatctttaaaacgcagtggttcctttagcaaactccgg

SEQ ID NO: 323470 - DNA, 50 bp, Homo sapiens
ctccccagccatgcagaactacctccaatggaagtccgggcacatggcgg

SEQ ID NO: 323471 - DNA, 100 bp, Homo sapiens
agagatggagatgggcagacggattcatttagagctgcggaacaggacgccctctgatggttctggcttccagtcgtcgcggagggagaagtatggcaac

SEQ ID NO: 323472 - DNA, 100 bp, Homo sapiens
ctgcggccggcctgggcaggtgtcttcctcgagaggcaggcaggggatcccggacctgaaagtacccatggcagacaagcctggtaacacagtgaatttc

SEQ ID NO: 323473 - DNA, 80 bp, Homo sapiens
cggcgcccccgcacccccgtgccccgctccggccagggggatatgagactttctactcggaatatcctgagtgttgcgtg

SEQ ID NO: 323474 - DNA, 75 bp, Homo sapiens
gaatttcttcagaatgcagtttacattaaccttcgacagtgtttgaaagatgtatggtgatcttgaaacctccag

SEQ ID NO: 323475 - DNA, 88 bp, Homo sapiens
ccaagaagatgagaccgggggaggcgacgctaagttgctgatcgtggcggctctaatgctagaaaatttacagaaacactcaacaccc

SEQ ID NO: 323476 - DNA, 98 bp, Homo sapiens
ctctcccccggctccatcgacctcaaggacatcaacttccggccgcagatgtcccagatgacgacaacccccccgtgtcttttgtgaagttctccccg

SEQ ID NO: 323477 - DNA, 48 bp, Homo sapiens
ctcccaagtagctgagattacagggtctattgacattcagggatgtgg

SEQ ID NO: 323478 - DNA, 100 bp, Homo sapiens
tggatgccaaacgagattggggccatgccaaggactatgtggaggtcatggaaaatggaagatttgcaaaatacaaatattttacccatgtcatgatcaa

SEQ ID NO: 323479 - DNA, 95 bp, Homo sapiens
cgagctgcacgtcctcgaacgcgaggccaacagccccggctgtaacagaggaggaaatgattttgaatagcctctctctgtgttaccataataag

SEQ ID NO: 323480 - DNA, 100 bp, Homo sapiens
agcaaatctacttttgggttacaaaaatccagaccagaggacacaggccaggacatgctggcttcgtttctgcgaactaacaggcaagcagcaaagttgt

SEQ ID NO: 323481 - DNA, 100 bp, Homo sapiens
aaaatagtgtagcttacgactgtgtacagctccatggaggttggggatacatgtgggagtacccaattgcaaagtcacatttagggcaggcaaaacataa

SEQ ID NO: 323482 - DNA, 117 bp, Homo sapiens
gcgtcccgggggcgcagggaaggagggcgtccgagtcaacaaccgcttcgagctgggctgaaatctctttaatgatggagggaagcaggcagacgcgagtgtctcggccatacaaga

SEQ ID NO: 323483 - DNA, 55 bp, Homo sapiens
tccgccccagacctgtcggcgaaaggcttgtcagctcatttgcagcttacatttt

SEQ ID NO: 323484 - DNA, 101 bp, Homo sapiens
ccgtggacatcggggcagctgacctcgcccacgcccagcagcagcagcaacaggtagaaataacacttcaggatatcaatgacaatccaccagtatttcca

SEQ ID NO: 323485 - DNA, 75 bp, Homo sapiens
atatgatctgtcctgaatgtggcttggttgtaggtagttgatgtcacttggcgatattcctgcaaacatgaagag

SEQ ID NO: 323486 - DNA, 100 bp, Homo sapiens
ctgtggcagcattttttccagaacacaaaaggtgactctgacatcattagaagcatgccagaacagactggtgaaaagtaaaccttttcacctacaaaat

SEQ ID NO: 323487 - DNA, 100 bp, Homo sapiens
ctggttatttcaacttcacctcggcaacaattacttacctggcccaggaggatgggcccgttgtgaattgaagatgttcctgctccttctacatctgcag

SEQ ID NO: 323488 - DNA, 83 bp, Homo sapiens
ttctcagcgttcccctctggcgcctttgctgctcctctctctgcacggagttctcagcctgaagttgactggaactttcagtt

SEQ ID NO: 323489 - DNA, 75 bp, Homo sapiens
tgcgtcgccgggaccctcgcgcgcgaccgccgaatcgctcctgcagcagagacctcctgccccccgaggtctgca

SEQ ID NO: 323490 - DNA, 82 bp, Homo sapiens
caaaaagaagatattacccacagtgcacaggatcagctgctgctctctgaaaagccacagttgtgtcagctatgccaggaag

SEQ ID NO: 323491 - DNA, 100 bp, Homo sapiens
agtggcctcaagatggatgaagacggcggcggcgagggtggtggcgaattactgggagatgtactcaaagatcggccccaggaagcagatggaatcgatt

SEQ ID NO: 323492 - DNA, 115 bp, Homo sapiens
cgctccgtggccttagctgtgctcgcgctactctctctttctggcctggaggctatccagcgtgaaatgacaatggatgctctgttggctcgattgaaacttctgaatccagatg

SEQ ID NO: 323493 - DNA, 98 bp, Homo sapiens
tggctttgccactcatgccgccagcatcaaccccacagagctgggctggtgtgtgacagctctgtgctgctgtgcctcaagaagagatttcacctggg

SEQ ID NO: 323494 - DNA, 98 bp, Homo sapiens
gcggagcccggagctggggcgacgaggcgattgcgggggcctgggctagaaaacctcggatcaattctcagctggtggcacaacaagtggcacaacag

SEQ ID NO: 323495 - DNA, 83 bp, Homo sapiens
ccctggagcctcagttggaagcagccgatccagcctgcggagcctgtggggcagactgcaataaggtcactgatcagtgcctg

SEQ ID NO: 323496 - DNA, 100 bp, Homo sapiens
acagagacaagctgagcttgccgcacaaaaagctagagaggacaagaagctctctctcagacaaccatctcatgggccccattccaggacacttctgagt

SEQ ID NO: 323497 - DNA, 75 bp, Homo sapiens
agctcctctcgctccccggccgcccacccccagcctggtgaatgaactcattcttaaacagaagcaaagatttga

SEQ ID NO: 323498 - DNA, 74 bp, Homo sapiens
aagaggagaggcacccgatatatgttctctaggccttttagaaaacatgtcatttgatccttcaaaaatcacaa

SEQ ID NO: 323499 - DNA, 100 bp, Homo sapiens
agcaactcagagaacaacagaaaactcaaaaaccatctggtgctgtggattgcaaccttgaatgtgtgggttgctgaccgaggaaataaaagaatccaag

SEQ ID NO: 323500 - DNA, 50 bp, Homo sapiens
aaaacggccacatcgacatcatcaggtctctccctggcagtgccctggag

SEQ ID NO: 323501 - DNA, 50 bp, Homo sapiens
atcaaatctactactgttcatggcaggtagaagatgacggtgaaatgttc

SEQ ID NO: 323502 - DNA, 90 bp, Homo sapiens
ggcgtccctggagcggccgccttccagcactggtaaatcccccgcaggagtgaatcttttatcatttgcatatgatctagaagcaaaagc

SEQ ID NO: 323503 - DNA, 83 bp, Homo sapiens
ccgaggaattctatgatgcccctgaagatgtgcacctagggggcggctaccccgtgggagaatgtgatcaatgggcaggacta

SEQ ID NO: 323504 - DNA, 100 bp, Homo sapiens
aaaaagtgattaagcagagaatggagaagaaggttgattccagaattaaacaaccaccatgtcgagcaaaaaggcaaagaccaagaccaccaagaagcgc

SEQ ID NO: 323505 - DNA, 118 bp, Homo sapiens
cttcaacctgctgtacagattggcaacggaagaacaggaggttctaatattctcctggctagaatggcaactagaaaagcaaaaccagatgggcagtaccacctaaaaccagaagaag

SEQ ID NO: 323506 - DNA, 82 bp, Homo sapiens
ccccccaacatcctgctcctgctcatggacgacacggccgaagccctgcagcccacgctacagccggagatgcagctcgagc

SEQ ID NO: 323507 - DNA, 82 bp, Homo sapiens
ggttttgacaacatcgacatcaagtcggccggggatttagcaaattgtggctactaatttgccccctgaagatcaagatggc

SEQ ID NO: 323508 - DNA, 88 bp, Homo sapiens
gaagttgtatattccaataaacagtcactactaggaaaactcaaatctttggcaaccaaggcatactccaaatgcttcttccagttca

SEQ ID NO: 323509 - DNA, 83 bp, Homo sapiens
ctgaacccacagaaactgtccaaacatggatagagctactcactgattttgagaagagggggaaaaaggaagtttgtcctgtc

SEQ ID NO: 323510 - DNA, 75 bp, Homo sapiens
atattccaccaactcaggaatcctactatgatcccaacctgggcattttgtcagtgatgctgatctttgccttct

SEQ ID NO: 323511 - DNA, 100 bp, Homo sapiens
ccgtcctgtgtatggtggtggcaggggccatcgctgccgtctttcacacactgataggacatccataaaaattcatcagagagcattttactactgagct

SEQ ID NO: 323512 - DNA, 100 bp, Homo sapiens
cagtctgcatgtgcagttttcagataatcgcttatcagccgtatggaaaatctgtggactggtgggcctatggcgtcctgttgtatgaaatgcttgccgg

SEQ ID NO: 323513 - DNA, 82 bp, Homo sapiens
cccatctcggccagttcggatccccccagggattcccccaggagtgcccagcacctgaactcctggggggaccgtcagtctt

SEQ ID NO: 323514 - DNA, 100 bp, Homo sapiens
ccaaggagttccctctgtctggcccacatcctcccaggcccttccatggactgaccagggtcctgggtgccagaatgatgtaggagggcagagaatactg

SEQ ID NO: 323515 - DNA, 98 bp, Homo sapiens
gagcgtgaccgagagcgcgaatatcgtcatcgttagaaggtcgtggattcacagataaagtagatcgactaaaactggcagaaattgtgaagcaggtg

SEQ ID NO: 323516 - DNA, 82 bp, Homo sapiens
tgtggtctacgagctgtttctcatctttatactcttccaggaatcttgtcgattggcctggctgctgcctactacagcggag

SEQ ID NO: 323517 - DNA, 82 bp, Homo sapiens
gtccagcacctacgtcccgctgccgtcgccgccgccaccatgcccaagagaaagttgggccggtgcacaaacagcgtggtca

SEQ ID NO: 323518 - DNA, 82 bp, Homo sapiens
ctgtaagaaaagaaaatgtgaggagctgaaaaagaaaccatctgttgttgtgcctctggagatggagtttcactcttgttgc

SEQ ID NO: 323519 - DNA, 100 bp, Homo sapiens
gaaggccatcaagctggcggccaacgactttttccggcggctgctcatggaagatggcatcctaatgtcctatgatcacgtggaactcacattcaatgac

SEQ ID NO: 323520 - DNA, 75 bp, Homo sapiens
cgtcaccgccgcccccccagacaagatggacaccgcggaggaagagagatggaaaacttgatgactagctccacc

SEQ ID NO: 323521 - DNA, 104 bp, Homo sapiens
cgccattatcctctgtttctctgctgcaccgacctcgacgtcttgcctgtgtcccacttgttcgcggcctatagcattactctactgactggcagagacaggag

SEQ ID NO: 323522 - DNA, 75 bp, Homo sapiens
tgatgtggatgatgccaaagttttattagtgaaaatgcctcgtgtaaaagcagctcaagctggaagacagagctc

SEQ ID NO: 323523 - DNA, 100 bp, Homo sapiens
aggaacgcgcctgctcccctcgtcgcagtttccagcccgacgagcttgttttgtcccggactcgcagcgtcaccctttacaccagaaagctggcgggcac

SEQ ID NO: 323524 - DNA, 75 bp, Homo sapiens
gacagtgaaatacgcgtactacgacactgaacgcatcggagtttatgatgtctctggagcagcaagtgacagaaa

SEQ ID NO: 323525 - DNA, 132 bp, Homo sapiens
cgcggctgggcgcctcggccatgactgcggagctgcagcaggacgacgcggccggcgcggcagacggccacggctcgatgttcctcctgctgatcaagagaagctttttatccagaagttacgtcagtgttg

SEQ ID NO: 323526 - DNA, 90 bp, Homo sapiens
aaaagacctgtggctattaagataggtattgtcttctaagaactctgaagcaatgtcagacattgagggaagctctcattgctgcaggaa

SEQ ID NO: 323527 - DNA, 83 bp, Homo sapiens
gggctgcggacgctcggtcccgcgctgcgcatccccgcggacgccacagcgctatcaggatcctcatgaccagccaaagagaa

SEQ ID NO: 323528 - DNA, 88 bp, Homo sapiens
cgggcgtctccgccggctactgccgcttcagttctcccggtgtggccacgagtcgggtctgccatcatggatgttctcgcagaagcaa

SEQ ID NO: 323529 - DNA, 83 bp, Homo sapiens
tccctgagaaccgtttacttccagaagattggtggagcttgatctgaaggaactgtggctgcaccatctgtcttcatcttccc

SEQ ID NO: 323530 - DNA, 93 bp, Homo sapiens
gtaaattgatcaggatttttggcctaccctccaaagaaaagagagaagaagaaggaggttcctgctgtgccagaaacccttaagaaaaagcga

SEQ ID NO: 323531 - DNA, 75 bp, Homo sapiens
ggtggggctgtgacagctgtcagcgtctgcccagtgctccacccttctcaacgatggagtctcactctgtagccc

SEQ ID NO: 323532 - DNA, 75 bp, Homo sapiens
gcaggacaccgacatggaacagggactcactggggattccaaatctatgcaagacggctggggggagagtgacgg

SEQ ID NO: 323533 - DNA, 50 bp, Homo sapiens
cttatgctgaagcacttcgagaggaaggaaaggaggtgagctggcctcag

SEQ ID NO: 323534 - DNA, 75 bp, Homo sapiens
gatccatctgcaccacggtgctggtggacacacacatccatgcggccgcctgcatgaaccaaaagcatctgctgc

SEQ ID NO: 323535 - DNA, 50 bp, Homo sapiens
cgctgagacggtttttcacaagggagtctgaagatacagtattgctcgtc

SEQ ID NO: 323536 - DNA, 83 bp, Homo sapiens
ccggtggtgtccgatggcaagaggttcctgggctctggagggtctccgtctctccaccgggggcttcatccttccagggagga

SEQ ID NO: 323537 - DNA, 73 bp, Homo sapiens
cctatgccagcaccatagggcactatggcaattgaaggaacagactaaaaatcgtgtcctggaaggaaactac

SEQ ID NO: 323538 - DNA, 83 bp, Homo sapiens
gagcgaataaagtttatcacgccggggttgtttacattcagagctctatcaataagaggaatacatattacagtgaattcgac

SEQ ID NO: 323539 - DNA, 100 bp, Homo sapiens
gttccaaccagctctgcaagtgatggatttaaggcaaatcttgtttttaaggagattgagaagaaacttgaagagtattgactcggagacaaaaagaggc

SEQ ID NO: 323540 - DNA, 90 bp, Homo sapiens
tgcagggggatcaagagatggagtaattacctgtcaaccaggggactccgaagaaaaggagctgctgctcaagaggtcatcaaaataatc

SEQ ID NO: 323541 - DNA, 100 bp, Homo sapiens
gacttcatctcctcaacatggaaactaagatcattgagcgcttgaagctggtgcccctgaatcaggaaagtgtggaagagagagtggctgccttcagaaa

SEQ ID NO: 323542 - DNA, 82 bp, Homo sapiens
atgcgaccctcccagaccggccgctctcccctcctctcacggcacctcccaccatgaaggagcacgtgaattgcctctgctt

SEQ ID NO: 323543 - DNA, 100 bp, Homo sapiens
gttgaagcttgctagggattacagtgggtttgactcaattcaagaagtatttgaaaaggagcagtccatctgtgctgcagaggaacagccagcagaagat

SEQ ID NO: 323544 - DNA, 100 bp, Homo sapiens
agtggacgaagtagagtcctagaggcactgaggcgacaggcagcatccccattacggtgcggcacatcgagtccatgatccgcatggcggaggcccacgc

SEQ ID NO: 323545 - DNA, 82 bp, Homo sapiens
aacgagcggcggcggcggcagcgggtcttgggtcctccgagagcagcagcggtcagcccaaggccaaccccactgtcactct

SEQ ID NO: 323546 - DNA, 83 bp, Homo sapiens
aaaacaacttcgagggcagagaatccagatcttacataagatggaagtctctcacactagatactgaacattaaatagaaaat
